United States Patent Application Publication US 2022/0213167 A1 - sequence listing, part 7

SEQ ID NO: 130921 - protein, 14 aa, Homo sapiens
  CDR3 for alpha chain variable domain of TCR clone 65461 (TRAV26-1, TRAJ54)
CIVRRTQGAQKLVF

SEQ ID NO: 130922 - protein, 12 aa, Homo sapiens
  CDR3 for beta chain variable domain of TCR clone 65461 (TRBV11-2, TRBJ2-2)
CASSLGGGELFF

SEQ ID NO: 130923 - protein, 11 aa, Homo sapiens
  CDR3 for alpha chain variable domain of TCR clone 65462 (TRAV2, TRAJ13)
CASGGYQKVTF

SEQ ID NO: 130924 - protein, 13 aa, Homo sapiens
  CDR3 for beta chain variable domain of TCR clone 65462 (TRBV7-9, TRBJ2-7)
CASSLKAGQEQYF

SEQ ID NO: 130925 - protein, 12 aa, Homo sapiens
  CDR3 for alpha chain variable domain of TCR clone 65463 (TRAV27, TRAJ42)
CAGAGSQGNLIF

SEQ ID NO: 130926 - protein, 13 aa, Homo sapiens
  CDR3 for beta chain variable domain of TCR clone 65463 (TRBV20-1, TRBJ1-1)
CSAGTVGNTEAFF

SEQ ID NO: 130927 - protein, 13 aa, Homo sapiens
  CDR3 for alpha chain variable domain of TCR clone 65464 (TRAV23/DV6, TRAJ27)
RAASKPMQANQPL

SEQ ID NO: 130928 - protein, 14 aa, Homo sapiens
  CDR3 for beta chain variable domain of TCR clone 65464 (TRBV5-4, TRBJ1-1)
CASSLDSRRDEAFF

SEQ ID NO: 130929 - protein, 11 aa, Homo sapiens
  CDR3 for alpha chain variable domain of TCR clone 65465 (TRAV12-1, TRAJ30)
CVVNGQDKIIF

SEQ ID NO: 130930 - protein, 16 aa, Homo sapiens
  CDR3 for beta chain variable domain of TCR clone 65465 (TRBV27, TRBJ2-2)
CASSFRGLVRTGELFF

SEQ ID NO: 130931 - protein, 13 aa, Homo sapiens
  CDR3 for alpha chain variable domain of TCR clone 65466 (TRAV8-6, TRAJ49)
CAVITNTGNQFYF

SEQ ID NO: 130932 - protein, 14 aa, Homo sapiens
  CDR3 for beta chain variable domain of TCR clone 65466 (TRBV5-1, TRBJ2-7)
CASSRGESLYEQDF

SEQ ID NO: 130933 - protein, 16 aa, Homo sapiens
  CDR3 for alpha chain variable domain of TCR clone 65467 (TRAV17, TRAJ9)
CATGKWGGTGGFKTIF

SEQ ID NO: 130934 - protein, 12 aa, Homo sapiens
  CDR3 for beta chain variable domain of TCR clone 65467 (TRBV11-2, TRBJ2-1)
CASSPGNNEQFF

SEQ ID NO: 130935 - protein, 15 aa, Homo sapiens
  CDR3 for alpha chain variable domain of TCR clone 65468 (TRAV3, TRAJ22)
CAVRDRGGSARQLTF

SEQ ID NO: 130936 - protein, 15 aa, Homo sapiens
  CDR3 for beta chain variable domain of TCR clone 65468 (TRBV7-3, TRBJ2-2)
CASSETRQGTGELFF

SEQ ID NO: 130937 - protein, 12 aa, Homo sapiens
  CDR3 for alpha chain variable domain of TCR clone 65469 (TRAV36/DV7, TRAJ40)
CAVGTGTYKYIF

SEQ ID NO: 130938 - protein, 16 aa, Homo sapiens
  CDR3 for beta chain variable domain of TCR clone 65469 (TRBV19, TRBJ2-1)
CASSKAGPSSYNEQFF

SEQ ID NO: 130939 - protein, 10 aa, Homo sapiens
  CDR3 for alpha chain variable domain of TCR clone 65470 (TRAV20, TRAJ22)
CPAPARQLTF

SEQ ID NO: 130940 - protein, 11 aa, Homo sapiens
  CDR3 for beta chain variable domain of TCR clone 65470 (TRBV29-1, TRBJ2-5)
CSEDRTGTQYF

SEQ ID NO: 130941 - protein, 14 aa, Homo sapiens
  CDR3 for alpha chain variable domain of TCR clone 65471 (TRAV13-1, TRAJ44)
CAAKATGTASKLTF

SEQ ID NO: 130942 - protein, 17 aa, Homo sapiens
  CDR3 for beta chain variable domain of TCR clone 65471 (TRBV7-3, TRBJ2-3)
RASSLMKRMREADTQYF

SEQ ID NO: 130943 - protein, 16 aa, Homo sapiens
  CDR3 for alpha chain variable domain of TCR clone 65472 (TRAV14/DV4, TRAJ20)
CAMREGRSRDDYKLSF

SEQ ID NO: 130944 - protein, 17 aa, Homo sapiens
  CDR3 for beta chain variable domain of TCR clone 65472 (TRBV7-9, TRBJ2-5)
CASSPGLAGGGRETQYF

SEQ ID NO: 130945 - protein, 11 aa, Homo sapiens
  CDR3 for alpha chain variable domain of TCR clone 65473 (TRAV8-6, TRAJ13)
CALGIYQKVTF

SEQ ID NO: 130946 - protein, 16 aa, Homo sapiens
  CDR3 for beta chain variable domain of TCR clone 65473 (TRBV6-1, TRBJ1-3)
CASVQGGVEIPYILER

SEQ ID NO: 130947 - protein, 12 aa, Homo sapiens
  CDR3 for alpha chain variable domain of TCR clone 65474 (TRAV21, TRAJ37)
CAVRGNTVKLIF

SEQ ID NO: 130948 - protein, 14 aa, Homo sapiens
  CDR3 for beta chain variable domain of TCR clone 65474 (TRBV19, TRBJ2-1)
CASEVTGARNEQFF

SEQ ID NO: 130949 - protein, 14 aa, Homo sapiens
  CDR3 for alpha chain variable domain of TCR clone 65475 (TRAV13-2, TRAJ16)
CAENNWEDGQKLLF

SEQ ID NO: 130950 - protein, 13 aa, Homo sapiens
  CDR3 for beta chain variable domain of TCR clone 65475 (TRBV7-9, TRBJ1-1)
CQQLGGLKTEAFF

SEQ ID NO: 130951 - protein, 14 aa, Homo sapiens
  CDR3 for alpha chain variable domain of TCR clone 65476 (TRAV12-2, TRAJ36)
CAVKISTGANNLFF

SEQ ID NO: 130952 - protein, 14 aa, Homo sapiens
  CDR3 for beta chain variable domain of TCR clone 65476 (TRBV25-1, TRBJ1-2)
CASSDTTGVVGYTV

SEQ ID NO: 130953 - protein, 13 aa, Homo sapiens
  CDR3 for alpha chain variable domain of TCR clone 65477 (TRAV12-2, TRAJ34)
CAVGGYNTDKLIF

SEQ ID NO: 130954 - protein, 15 aa, Homo sapiens
  CDR3 for beta chain variable domain of TCR clone 65477 (TRBV28, TRBJ2-1)
CASRTGAGVIARQFF

SEQ ID NO: 130955 - protein, 14 aa, Homo sapiens
  CDR3 for alpha chain variable domain of TCR clone 65478 (TRAV1-2, TRAJ16)
CAVNRFSDGRKLLF

SEQ ID NO: 130956 - protein, 14 aa, Homo sapiens
  CDR3 for beta chain variable domain of TCR clone 65478 (TRBV7-9, TRBJ2-2)
CASSTVLGRGELFF

SEQ ID NO: 130957 - protein, 14 aa, Homo sapiens
  CDR3 for alpha chain variable domain of TCR clone 65479 (TRAV27, TRAJ22)
CAGVSVLGKRQLTF

SEQ ID NO: 130958 - protein, 17 aa, Homo sapiens
  CDR3 for beta chain variable domain of TCR clone 65479 (TRBV14, TRBJ2-1)
CASSQDRSVTSYNEQFF

SEQ ID NO: 130959 - protein, 15 aa, Homo sapiens
  CDR3 for alpha chain variable domain of TCR clone 65480 (TRAV17, TRAJ16)
CATTLRFSDGQKLLF

SEQ ID NO: 130960 - protein, 15 aa, Homo sapiens
  CDR3 for beta chain variable domain of TCR clone 65480 (TRBV20-1, TRBJ1-1)
CSASRGVTGNTEAFF

SEQ ID NO: 130961 - protein, 15 aa, Homo sapiens
  CDR3 for alpha chain variable domain of TCR clone 65481 (TRAV13-1, TRAJ16)
CAARYQMARNCSLQG

SEQ ID NO: 130962 - protein, 13 aa, Homo sapiens
  CDR3 for beta chain variable domain of TCR clone 65481 (TRBV4-1, TRBJ2-1)
CASSQAGGDEQFF

SEQ ID NO: 130963 - protein, 13 aa, Homo sapiens
  CDR3 for alpha chain variable domain of TCR clone 65482 (TRAV12-1, TRAJ3)
CVVNPRGASKIIF

SEQ ID NO: 130964 - protein, 13 aa, Homo sapiens
  CDR3 for beta chain variable domain of TCR clone 65482 (TRBV28, TRBJ1-5)
CASSGRGNQPQHF

SEQ ID NO: 130965 - protein, 11 aa, Homo sapiens
  CDR3 for alpha chain variable domain of TCR clone 65483 (TRAV3, TRAJ32)
CAVREGSMVVL

SEQ ID NO: 130966 - protein, 13 aa, Homo sapiens
  CDR3 for beta chain variable domain of TCR clone 65483 (TRBV2, TRBJ1-1)
CASSEGGNTEAFF

SEQ ID NO: 130967 - protein, 13 aa, Homo sapiens
  CDR3 for alpha chain variable domain of TCR clone 65484 (TRAV26-1, TRAJ29)
FIVRRSGNTPLVF

SEQ ID NO: 130968 - protein, 16 aa, Homo sapiens
  CDR3 for beta chain variable domain of TCR clone 65484 (TRBV11-2, TRBJ2-7)
CASSLAPTGVNYEQYF

SEQ ID NO: 130969 - protein, 10 aa, Homo sapiens
  CDR3 for alpha chain variable domain of TCR clone 65485 (TRAV21, TRAJ31)
CAVDNARLMF

SEQ ID NO: 130970 - protein, 13 aa, Homo sapiens
  CDR3 for beta chain variable domain of TCR clone 65485 (TRBV24-1, TRBJ2-2)
CATSDWSTGELFF

SEQ ID NO: 130971 - protein, 14 aa, Homo sapiens
  CDR3 for alpha chain variable domain of TCR clone 65486 (TRAV2, TRAJ9)
CAVEDRSGGFKTIF

SEQ ID NO: 130972 - protein, 15 aa, Homo sapiens
  CDR3 for beta chain variable domain of TCR clone 65486 (TRBV29-1, TRBJ2-6)
CSVGDRGSGANVLTF

SEQ ID NO: 130973 - protein, 13 aa, Homo sapiens
  CDR3 for alpha chain variable domain of TCR clone 65487 (TRAV26-1, TRAJ45)
CIVEGGGADGLTF

SEQ ID NO: 130974 - protein, 16 aa, Homo sapiens
  CDR3 for beta chain variable domain of TCR clone 65487 (TRBV10-3, TRBJ2-7)
CAISADFADRPYEQYF

SEQ ID NO: 130975 - protein, 14 aa, Homo sapiens
  CDR3 for alpha chain variable domain of TCR clone 65488 (TRAV12-3, TRAJ12)
CAMSEVDSSYKFIF

SEQ ID NO: 130976 - protein, 12 aa, Homo sapiens
  CDR3 for beta chain variable domain of TCR clone 65488 (TRBV18, TRBJ1-4)
CASSPSREKLFF

SEQ ID NO: 130977 - protein, 18 aa, Homo sapiens
  CDR3 for alpha chain variable domain of TCR clone 65489 (TRAV26-1, TRAJ23)
CIVRVGPEVWNQGGKLIF

SEQ ID NO: 130978 - protein, 14 aa, Homo sapiens
  CDR3 for beta chain variable domain of TCR clone 65489 (TRBV7-6, TRBJ2-3)
CASSLGTVTDTQYF

SEQ ID NO: 130979 - protein, 14 aa, Homo sapiens
  CDR3 for alpha chain variable domain of TCR clone 65490 (TRAV2, TRAJ37)
CAVDFTSNTGKLIL

SEQ ID NO: 130980 - protein, 13 aa, Homo sapiens
  CDR3 for beta chain variable domain of TCR clone 65490 (TRBV20-1, TRBJ1-1)
CSAPLGGGTEAFF

SEQ ID NO: 130981 - protein, 13 aa, Homo sapiens
  CDR3 for alpha chain variable domain of TCR clone 65491 (TRAV8-4, TRAJ48)
CAVRLFGNEKLTF

SEQ ID NO: 130982 - protein, 15 aa, Homo sapiens
  CDR3 for beta chain variable domain of TCR clone 65491 (TRBV20-1, TRBJ2-7)
CSARKGLAESYEQYF

SEQ ID NO: 130983 - protein, 17 aa, Homo sapiens
  CDR3 for alpha chain variable domain of TCR clone 65492 (TRAV26-1, TRAJ28)
CIVRVPDSGAGSYQLTF

SEQ ID NO: 130984 - protein, 17 aa, Homo sapiens
  CDR3 for beta chain variable domain of TCR clone 65492 (TRBV28, TRBJ2-7)
CASSPLPAGGKSYEQYL

SEQ ID NO: 130985 - protein, 16 aa, Homo sapiens
  CDR3 for alpha chain variable domain of TCR clone 65493 (TRAV12-3, TRAJ53)
CAMSPGSGGSNYKLTF

SEQ ID NO: 130986 - protein, 16 aa, Homo sapiens
  CDR3 for beta chain variable domain of TCR clone 65493 (TRBV7-2, TRBJ2-1)
CASSLVGGPELNEQFF

SEQ ID NO: 130987 - protein, 14 aa, Homo sapiens
  CDR3 for alpha chain variable domain of TCR clone 65494 (TRAV13-1, TRAJ31)
CAASSRPNNARLMF

SEQ ID NO: 130988 - protein, 15 aa, Homo sapiens
  CDR3 for beta chain variable domain of TCR clone 65494 (TRBV4-2, TRBJ2-4)
CASSPLGAAKNIQYS

SEQ ID NO: 130989 - protein, 14 aa, Homo sapiens
  CDR3 for alpha chain variable domain of TCR clone 65495 (TRAV8-4, TRAJ20)
CAVTNVLTTTSSAL

SEQ ID NO: 130990 - protein, 16 aa, Homo sapiens
  CDR3 for beta chain variable domain of TCR clone 65495 (TRBV6-1, TRBJ1-2)
CASSGAWQGRSHGYTF

SEQ ID NO: 130991 - protein, 14 aa, Homo sapiens
  CDR3 for alpha chain variable domain of TCR clone 65496 (TRAV35, TRAJ22)
CAGLRPGSARQLTF

SEQ ID NO: 130992 - protein, 15 aa, Homo sapiens
  CDR3 for beta chain variable domain of TCR clone 65496 (TRBV12-4, TRBJ2-5)
CASSPPTGLQEQQYF

SEQ ID NO: 130993 - protein, 14 aa, Homo sapiens
  CDR3 for alpha chain variable domain of TCR clone 65497 (TRAV8-2, TRAJ11)
CVVSEKSGYSTLTF

SEQ ID NO: 130994 - protein, 16 aa, Homo sapiens
  CDR3 for beta chain variable domain of TCR clone 65497 (TRBV28, TRBJ2-1)
CASSSPEYPRDDEQFF

SEQ ID NO: 130995 - protein, 12 aa, Homo sapiens
  CDR3 for alpha chain variable domain of TCR clone 65498 (TRAV12-3, TRAJ20)
CAMVRGDYKLSS

SEQ ID NO: 130996 - protein, 14 aa, Homo sapiens
  CDR3 for beta chain variable domain of TCR clone 65498 (TRBV20-1, TRBJ2-7)
CSAISREASYEQYF

SEQ ID NO: 130997 - protein, 11 aa, Homo sapiens
  CDR3 for alpha chain variable domain of TCR clone 65499 (TRAV1-2, TRAJ20)
CAVANDYKLSF

SEQ ID NO: 130998 - protein, 15 aa, Homo sapiens
  CDR3 for beta chain variable domain of TCR clone 65499 (TRBV20-1, TRBJ2-7)
CSAESGTSGAYEQYF

SEQ ID NO: 130999 - protein, 10 aa, Homo sapiens
  CDR3 for alpha chain variable domain of TCR clone 65500 (TRAV2, TRAJ34)
CAVVNDKLIF

SEQ ID NO: 131000 - protein, 15 aa, Homo sapiens
  CDR3 for beta chain variable domain of TCR clone 65500 (TRBV3-1, TRBJ2-2)
CDSSQDWTRAGELFF

SEQ ID NO: 131001 - protein, 15 aa, Homo sapiens
  CDR3 for alpha chain variable domain of TCR clone 65501 (TRAV23/DV6, TRAJ18)
CAARYRGSTLGRLYI

SEQ ID NO: 131002 - protein, 13 aa, Homo sapiens
  CDR3 for beta chain variable domain of TCR clone 65501 (TRBV7-2, TRBJ2-7)
CASSSPSGSEQYF

SEQ ID NO: 131003 - protein, 17 aa, Homo sapiens
  CDR3 for alpha chain variable domain of TCR clone 65502 (TRAV12-3, TRAJ52)
CNERGGAGGTSYGKLTF

SEQ ID NO: 131004 - protein, 15 aa, Homo sapiens
  CDR3 for beta chain variable domain of TCR clone 65502 (TRBV27, TRBJ1-6)
CASSFDRGLGSPLHF

SEQ ID NO: 131005 - protein, 12 aa, Homo sapiens
  CDR3 for alpha chain variable domain of TCR clone 65503 (TRAV27, TRAJ35)
CAGADFGNVLHC

SEQ ID NO: 131006 - protein, 15 aa, Homo sapiens
  CDR3 for beta chain variable domain of TCR clone 65503 (TRBV9, TRBJ1-6)
CASSVAGTGDSPLHF

SEQ ID NO: 131007 - protein, 16 aa, Homo sapiens
  CDR3 for alpha chain variable domain of TCR clone 65504 (TRAV9-2, TRAJ10)
CALSEGGTGGGNKLAF

SEQ ID NO: 131008 - protein, 16 aa, Homo sapiens
  CDR3 for beta chain variable domain of TCR clone 65504 (TRBV7-2, TRBJ1-4)
CASSPVGRFDREKLFF

SEQ ID NO: 131009 - protein, 19 aa, Homo sapiens
  CDR3 for alpha chain variable domain of TCR clone 65505 (TRAV13-1, TRAJ52)
CVASPYQNAGGTSYGKLTF

SEQ ID NO: 131010 - protein, 14 aa, Homo sapiens
  CDR3 for beta chain variable domain of TCR clone 65505 (TRBV19, TRBJ2-7)
CASTVQGRPYEQYF

SEQ ID NO: 131011 - protein, 19 aa, Homo sapiens
  CDR3 for alpha chain variable domain of TCR clone 65506 (TRAV26-1, TRAJ52)
CIVRAHRSAGGTSYGKLTF

SEQ ID NO: 131012 - protein, 15 aa, Homo sapiens
  CDR3 for beta chain variable domain of TCR clone 65506 (TRBV29-1, TRBJ2-1)
CSGRDRKSSYNEQFF

SEQ ID NO: 131013 - protein, 15 aa, Homo sapiens
  CDR3 for alpha chain variable domain of TCR clone 65507 (TRAV8-3, TRAJ45)
CASSYSGGGADGLTF

SEQ ID NO: 131014 - protein, 16 aa, Homo sapiens
  CDR3 for beta chain variable domain of TCR clone 65507 (TRBV20-1, TRBJ2-2)
CSASASGMPGAGELFF

SEQ ID NO: 131015 - protein, 14 aa, Homo sapiens
  CDR3 for alpha chain variable domain of TCR clone 65508 (TRAV1-2, TRAJ16)
CAVNRFSDGQKLLS

SEQ ID NO: 131016 - protein, 16 aa, Homo sapiens
  CDR3 for beta chain variable domain of TCR clone 65508 (TRBV12-4, TRBJ2-5)
CASSFFVRGRQETQYF

SEQ ID NO: 131017 - protein, 14 aa, Homo sapiens
  CDR3 for alpha chain variable domain of TCR clone 65509 (TRAV12-3, TRAJ58)
CAMSTETSGSRLTF

SEQ ID NO: 131018 - protein, 12 aa, Homo sapiens
  CDR3 for beta chain variable domain of TCR clone 65509 (TRBV7-8, TRBJ2-7)
FASSLGDREQYF

SEQ ID NO: 131019 - protein, 12 aa, Homo sapiens
  CDR3 for alpha chain variable domain of TCR clone 65510 (TRAV21, TRAJ31)
CAVWGNNARLMF

SEQ ID NO: 131020 - protein, 16 aa, Homo sapiens
  CDR3 for beta chain variable domain of TCR clone 65510 (TRBV27, TRBJ2-5)
CASSYGQGGQKETQYF

SEQ ID NO: 131021 - protein, 13 aa, Homo sapiens
  CDR3 for alpha chain variable domain of TCR clone 65511 (TRAV2, TRAJ15)
CAVASQAGTALIF

SEQ ID NO: 131022 - protein, 16 aa, Homo sapiens
  CDR3 for beta chain variable domain of TCR clone 65511 (TRBV4-1, TRBJ2-3)
CASSQSTSGAEDTQYF

SEQ ID NO: 131023 - protein, 19 aa, Homo sapiens
  CDR3 for alpha chain variable domain of TCR clone 65512 (TRAV29/DV5, TRAJ49)
CSVLLCSKLTADTGNQFYF

SEQ ID NO: 131024 - protein, 15 aa, Homo sapiens
  CDR3 for beta chain variable domain of TCR clone 65512 (TRBV9, TRBJ1-6)
CASSVAGTGDSPLHF

SEQ ID NO: 131025 - protein, 13 aa, Homo sapiens
  CDR3 for alpha chain variable domain of TCR clone 65513 (TRAV17, TRAJ9)
CATDYTGGFKTIF

SEQ ID NO: 131026 - protein, 13 aa, Homo sapiens
  CDR3 for beta chain variable domain of TCR clone 65513 (TRBV7-9, TRBJ1-2)
CASSLNQNYGYTF

SEQ ID NO: 131027 - protein, 13 aa, Homo sapiens
  CDR3 for alpha chain variable domain of TCR clone 65514 (TRAV20, TRAJ57)
CAGPQGGSEKLVF

SEQ ID NO: 131028 - protein, 15 aa, Homo sapiens
  CDR3 for beta chain variable domain of TCR clone 65514 (TRBV7-9, TRBJ1-5)
CASSQGHQPNQPQHF

SEQ ID NO: 131029 - protein, 13 aa, Homo sapiens
  CDR3 for alpha chain variable domain of TCR clone 65515 (TRAV23/DV6, TRAJ22)
CAPYSGSARQLTI

SEQ ID NO: 131030 - protein, 15 aa, Homo sapiens
  CDR3 for beta chain variable domain of TCR clone 65515 (TRBV11-2, TRBJ1-6)
CASSLDPWAVSPLHF

SEQ ID NO: 131031 - protein, 16 aa, Homo sapiens
  CDR3 for alpha chain variable domain of TCR clone 65516 (TRAV3, TRAJ10)
CAVRDMRAGGGNKLTF

SEQ ID NO: 131032 - protein, 15 aa, Homo sapiens
  CDR3 for beta chain variable domain of TCR clone 65516 (TRBV11-3, TRBJ2-7)
CASSPGPAGSYEQYF

SEQ ID NO: 131033 - protein, 12 aa, Homo sapiens
  CDR3 for alpha chain variable domain of TCR clone 65517 (TRAV1-1, TRAJ8)
CAGGTGFQKLVF

SEQ ID NO: 131034 - protein, 14 aa, Homo sapiens
  CDR3 for beta chain variable domain of TCR clone 65517 (TRBV7-9, TRBJ1-2)
CASSRQGANYGYTF

SEQ ID NO: 131035 - protein, 16 aa, Homo sapiens
  CDR3 for alpha chain variable domain of TCR clone 65518 (TRAV21, TRAJ37)
CAVRTAGSSNIGKLIF

SEQ ID NO: 131036 - protein, 13 aa, Homo sapiens
  CDR3 for beta chain variable domain of TCR clone 65518 (TRBV7-9, TRBJ2-5)
CASLPSGRETQYF

SEQ ID NO: 131037 - protein, 12 aa, Homo sapiens
  CDR3 for alpha chain variable domain of TCR clone 65519 (TRAV36/DV7, TRAJ54)
CAVVRGAQKLVF

SEQ ID NO: 131038 - protein, 14 aa, Homo sapiens
  CDR3 for beta chain variable domain of TCR clone 65519 (TRBV7-3, TRBJ1-1)
CARSLKGGNTEAFF

SEQ ID NO: 131039 - protein, 16 aa, Homo sapiens
  CDR3 for alpha chain variable domain of TCR clone 65520 (TRAV20, TRAJ22)
CAVQASSSGSARHLTF

SEQ ID NO: 131040 - protein, 13 aa, Homo sapiens
  CDR3 for beta chain variable domain of TCR clone 65520 (TRBV7-2, TRBJ2-5)
CASSQTSVETQYF

SEQ ID NO: 131041 - protein, 14 aa, Homo sapiens
  CDR3 for alpha chain variable domain of TCR clone 65521 (TRAV1-2, TRAJ24)
CAVLTTDSWGKFQF

SEQ ID NO: 131042 - protein, 13 aa, Homo sapiens
  CDR3 for beta chain variable domain of TCR clone 65521 (TRBV2, TRBJ1-5)
CATAGPGNQPQHF

SEQ ID NO: 131043 - protein, 12 aa, Homo sapiens
  CDR3 for alpha chain variable domain of TCR clone 65522 (TRAV8-3, TRAJ40)
CAVTSGTYKYIF

SEQ ID NO: 131044 - protein, 15 aa, Homo sapiens
  CDR3 for beta chain variable domain of TCR clone 65522 (TRBV11-2, TRBJ2-2)
CASRGLAANTGELFF

SEQ ID NO: 131045 - protein, 11 aa, Homo sapiens
  CDR3 for alpha chain variable domain of TCR clone 65523 (TRAV21, TRAJ11)
CAVNGYSTLTF

SEQ ID NO: 131046 - protein, 13 aa, Homo sapiens
  CDR3 for beta chain variable domain of TCR clone 65523 (TRBV7-3, TRBJ1-2)
CASSLKRGYGYTF

SEQ ID NO: 131047 - protein, 15 aa, Homo sapiens
  CDR3 for alpha chain variable domain of TCR clone 65524 (TRAV12-2, TRAJ43)
CAFDMRFGAGTRLTV

SEQ ID NO: 131048 - protein, 14 aa, Homo sapiens
  CDR3 for beta chain variable domain of TCR clone 65524 (TRBV7-2, TRBJ2-7)
CASSPKTSFYEQYF

SEQ ID NO: 131049 - protein, 19 aa, Homo sapiens
  CDR3 for alpha chain variable domain of TCR clone 65525 (TRAV25, TRAJ43)
TATQTTDVGTYFCAVFMRF

SEQ ID NO: 131050 - protein, 13 aa, Homo sapiens
  CDR3 for beta chain variable domain of TCR clone 65525 (TRBV7-9, TRBJ1-2)
CASSVKQNYGYTF

SEQ ID NO: 131051 - protein, 15 aa, Homo sapiens
  CDR3 for alpha chain variable domain of TCR clone 65526 (TRAV12-1, TRAJ44)
CVVDTPQGTASKPTF

SEQ ID NO: 131052 - protein, 13 aa, Homo sapiens
  CDR3 for beta chain variable domain of TCR clone 65526 (TRBV27, TRBJ2-1)
CASSSGSYNEQFF

SEQ ID NO: 131053 - protein, 12 aa, Homo sapiens
  CDR3 for alpha chain variable domain of TCR clone 65527 (TRAV16, TRAJ49)
CALNEGGNQFYF

SEQ ID NO: 131054 - protein, 14 aa, Homo sapiens
  CDR3 for beta chain variable domain of TCR clone 65527 (TRBV7-9, TRBJ2-1)
CASRPTGLRDEQFF

SEQ ID NO: 131055 - protein, 12 aa, Homo sapiens
  CDR3 for alpha chain variable domain of TCR clone 65528 (TRAV13-1, TRAJ49)
CAAPNIGNQFYF

SEQ ID NO: 131056 - protein, 17 aa, Homo sapiens
  CDR3 for beta chain variable domain of TCR clone 65528 (TRBV25-1, TRBJ2-7)
CASSDARVVFSSYEQYF

SEQ ID NO: 131057 - protein, 13 aa, Homo sapiens
  CDR3 for alpha chain variable domain of TCR clone 65529 (TRAV26-1, TRAJ48)
CIVRVVGDGKLTF

SEQ ID NO: 131058 - protein, 16 aa, Homo sapiens
  CDR3 for beta chain variable domain of TCR clone 65529 (TRBV4-1, TRBJ1-2)
CASSQDAGQVLYGYTF

SEQ ID NO: 131059 - protein, 16 aa, Homo sapiens
  CDR3 for alpha chain variable domain of TCR clone 65530 (TRAV2, TRAJ4)
CAVEDRFSGGYNKLIF

SEQ ID NO: 131060 - protein, 13 aa, Homo sapiens
  CDR3 for beta chain variable domain of TCR clone 65530 (TRBV7-2, TRBJ2-7)
CASSSPSGSEQYF

SEQ ID NO: 131061 - protein, 11 aa, Homo sapiens
  CDR3 for alpha chain variable domain of TCR clone 65531 (TRAV12-3, TRAJ27)
CAMANAGKSTF

SEQ ID NO: 131062 - protein, 17 aa, Homo sapiens
  CDR3 for beta chain variable domain of TCR clone 65531 (TRBV5-1, TRBJ2-1)
CASSTGTSGYSYNEQFF

SEQ ID NO: 131063 - protein, 20 aa, Homo sapiens
  CDR3 for alpha chain variable domain of TCR clone 65532 (TRAV12-1, TRAJ42)
SSVIQPPTSVKGGSQGNLIF

SEQ ID NO: 131064 - protein, 18 aa, Homo sapiens
  CDR3 for beta chain variable domain of TCR clone 65532 (TRBV11-2, TRBJ2-3)
CSSSLGGASRGAPNTQYF

SEQ ID NO: 131065 - protein, 12 aa, Homo sapiens
  CDR3 for alpha chain variable domain of TCR clone 65533 (TRAV13-1, TRAJ21)
CEAKEGFNKFYF

SEQ ID NO: 131066 - protein, 15 aa, Homo sapiens
  CDR3 for beta chain variable domain of TCR clone 65533 (TRBV25-1, TRBJ1-4)
CASSPGDSTNEKLFF

SEQ ID NO: 131067 - protein, 18 aa, Homo sapiens
  CDR3 for alpha chain variable domain of TCR clone 65534 (TRAV14/DV4, TRAJ15)
CAMREFPPTGQAGTALIF

SEQ ID NO: 131068 - protein, 13 aa, Homo sapiens
  CDR3 for beta chain variable domain of TCR clone 65534 (TRBV4-2, TRBJ1-1)
CASSQAGNTEAFF

SEQ ID NO: 131069 - protein, 14 aa, Homo sapiens
  CDR3 for alpha chain variable domain of TCR clone 65535 (TRAV26-1, TRAJ38)
CIADNAGNNRKLIC

SEQ ID NO: 131070 - protein, 13 aa, Homo sapiens
  CDR3 for beta chain variable domain of TCR clone 65535 (TRBV20-1, TRBJ2-1)
CSARSSPRDEQFF

SEQ ID NO: 131071 - protein, 12 aa, Homo sapiens
  CDR3 for alpha chain variable domain of TCR clone 65536 (TRAV21, TRAJ23)
CAVGPPGGKLIF

SEQ ID NO: 131072 - protein, 13 aa, Homo sapiens
  CDR3 for beta chain variable domain of TCR clone 65536 (TRBV20-1, TRBJ2-7)
CSARTGAGYEQYF

SEQ ID NO: 131073 - protein, 14 aa, Homo sapiens
  CDR3 for alpha chain variable domain of TCR clone 65537 (TRAV20, TRAJ29)
CAAQAWVGNTPLVF

SEQ ID NO: 131074 - protein, 15 aa, Homo sapiens
  CDR3 for beta chain variable domain of TCR clone 65537 (TRBV29-1, TRBJ2-7)
CSVEFFDRGSYEQYF

SEQ ID NO: 131075 - protein, 11 aa, Homo sapiens
  CDR3 for alpha chain variable domain of TCR clone 65538 (TRAV12-2, TRAJ31)
CAVTRWARLMF

SEQ ID NO: 131076 - protein, 15 aa, Homo sapiens
  CDR3 for beta chain variable domain of TCR clone 65538 (TRBV19, TRBJ2-7)
CASSIGGGRVNEQYF

SEQ ID NO: 131077 - protein, 14 aa, Homo sapiens
  CDR3 for alpha chain variable domain of TCR clone 65539 (TRAV12-2, TRAJ53)
CAVKGGGSNYKLTF

SEQ ID NO: 131078 - protein, 13 aa, Homo sapiens
  CDR3 for beta chain variable domain of TCR clone 65539 (TRBV7-2, TRBJ2-7)
CASSSPSGSEQYF

SEQ ID NO: 131079 - protein, 19 aa, Homo sapiens
  CDR3 for alpha chain variable domain of TCR clone 65540 (TRAV2, TRAJ20)
ILQVREADAAVYRDCKLSF

SEQ ID NO: 131080 - protein, 12 aa, Homo sapiens
  CDR3 for beta chain variable domain of TCR clone 65540 (TRBV11-2, TRBJ2-1)
CASSPGNNEQLF

SEQ ID NO: 131081 - protein, 14 aa, Homo sapiens
  CDR3 for alpha chain variable domain of TCR clone 65541 (TRAV3, TRAJ17)
CAVRDAAAGHKLTF

SEQ ID NO: 131082 - protein, 13 aa, Homo sapiens
  CDR3 for beta chain variable domain of TCR clone 65541 (TRBV2, TRBJ1-1)
CASSVSGYTEAFF

SEQ ID NO: 131083 - protein, 14 aa, Homo sapiens
  CDR3 for alpha chain variable domain of TCR clone 65542 (TRAV17, TRAJ12)
CATDEKDSSYKLIF

SEQ ID NO: 131084 - protein, 16 aa, Homo sapiens
  CDR3 for beta chain variable domain of TCR clone 65542 (TRBV11-2, TRBJ2-1)
CASSPRLAGVYNEQSF

SEQ ID NO: 131085 - protein, 16 aa, Homo sapiens
  CDR3 for alpha chain variable domain of TCR clone 65543 (TRAV17, TRAJ52)
CATGIIGGTSYGKLTF

SEQ ID NO: 131086 - protein, 12 aa, Homo sapiens
  CDR3 for beta chain variable domain of TCR clone 65543 (TRBV7-3, TRBJ2-1)
CASSLINNEQFF

SEQ ID NO: 131087 - protein, 17 aa, Homo sapiens
  CDR3 for alpha chain variable domain of TCR clone 65544 (TRAV3, TRAJ6)
CAVRDGPRAGGSYIPTF

SEQ ID NO: 131088 - protein, 16 aa, Homo sapiens
  CDR3 for beta chain variable domain of TCR clone 65544 (TRBV27, TRBJ2-2)
CASSSSGVSNTGELFF

SEQ ID NO: 131089 - protein, 14 aa, Homo sapiens
  CDR3 for alpha chain variable domain of TCR clone 65545 (TRAV34, TRAJ44)
CGADGTGTASKLTF

SEQ ID NO: 131090 - protein, 17 aa, Homo sapiens
  CDR3 for beta chain variable domain of TCR clone 65545 (TRBV4-1, TRBJ2-7)
CASSRDPLGVRGGEQYF

SEQ ID NO: 131091 - protein, 22 aa, Homo sapiens
  CDR3 for alpha chain variable domain of TCR clone 65546 (TRAV4, )
CLGGRVKPNIQNPYPAVYQLRD

SEQ ID NO: 131092 - protein, 16 aa, Homo sapiens
  CDR3 for beta chain variable domain of TCR clone 65546 (TRBV6-6, TRBJ2-7)
CASIETGTNSSYEQYF

SEQ ID NO: 131093 - protein, 12 aa, Homo sapiens
  CDR3 for alpha chain variable domain of TCR clone 65547 (TRAV21, TRAJ6)
CAVKGGSYIPTF

SEQ ID NO: 131094 - protein, 15 aa, Homo sapiens
  CDR3 for beta chain variable domain of TCR clone 65547 (TRBV11-2, TRBJ1-1)
CASSLQKTLKLSLDK

SEQ ID NO: 131095 - protein, 15 aa, Homo sapiens
  CDR3 for alpha chain variable domain of TCR clone 65548 (TRAV13-1, TRAJ57)
QVPPLSQGGPEKLVF

SEQ ID NO: 131096 - protein, 17 aa, Homo sapiens
  CDR3 for beta chain variable domain of TCR clone 65548 (TRBV7-3, TRBJ2-3)
CASSLMKRMRGADTQYF

SEQ ID NO: 131097 - protein, 11 aa, Homo sapiens
  CDR3 for alpha chain variable domain of TCR clone 65549 (TRAV1-2, TRAJ31)
CAVNNNARLMF

SEQ ID NO: 131098 - protein, 14 aa, Homo sapiens
  CDR3 for beta chain variable domain of TCR clone 65549 (TRBV7-2, TRBJ2-7)
CASSPKTSFYEQYF

SEQ ID NO: 131099 - protein, 17 aa, Homo sapiens
  CDR3 for alpha chain variable domain of TCR clone 65550 (TRAV9-2, TRAJ45)
CALSGYYSGGGADGLTF

SEQ ID NO: 131100 - protein, 14 aa, Homo sapiens
  CDR3 for beta chain variable domain of TCR clone 65550 (TRBV7-2, TRBJ2-7)
CASSLYPGRYEQYF

SEQ ID NO: 131101 - protein, 18 aa, Homo sapiens
  CDR3 for alpha chain variable domain of TCR clone 65551 (TRAV17, TRAJ45)
CATSLDLYSGGGADGLTF

SEQ ID NO: 131102 - protein, 14 aa, Homo sapiens
  CDR3 for beta chain variable domain of TCR clone 65551 (TRBV19, TRBJ2-1)
CASPTFVLSGEQFF

SEQ ID NO: 131103 - protein, 14 aa, Homo sapiens
  CDR3 for alpha chain variable domain of TCR clone 65552 (TRAV12-3, TRAJ42)
CAMNYGGSQGNLIF

SEQ ID NO: 131104 - protein, 11 aa, Homo sapiens
  CDR3 for beta chain variable domain of TCR clone 65552 (TRBV7-8, TRBJ2-7)
CASSLSLEQYF

SEQ ID NO: 131105 - protein, 12 aa, Homo sapiens
  CDR3 for alpha chain variable domain of TCR clone 65553 (TRAV12-3, TRAJ17)
CAMTLTGNKLTF

SEQ ID NO: 131106 - protein, 13 aa, Homo sapiens
  CDR3 for beta chain variable domain of TCR clone 65553 (TRBV7-9, TRBJ1-2)
CASSLKQNYGYTL

SEQ ID NO: 131107 - protein, 12 aa, Homo sapiens
  CDR3 for alpha chain variable domain of TCR clone 65554 (TRAV13-2, TRAJ23)
CAERHRGGKLIF

SEQ ID NO: 131108 - protein, 13 aa, Homo sapiens
  CDR3 for beta chain variable domain of TCR clone 65554 (TRBV12-4, TRBJ2-5)
CASSPGTEETQYF

SEQ ID NO: 131109 - protein, 14 aa, Homo sapiens
  CDR3 for alpha chain variable domain of TCR clone 65555 (TRAV12-2, TRAJ13)
CAVKKTGGYQKVTF

SEQ ID NO: 131110 - protein, 12 aa, Homo sapiens
  CDR3 for beta chain variable domain of TCR clone 65555 (TRBV12-4, TRBJ2-5)
CASSSAQETQYF

SEQ ID NO: 131111 - protein, 16 aa, Homo sapiens
  CDR3 for alpha chain variable domain of TCR clone 65556 (TRAV20, TRAJ26)
CAVQHRRDNYGQNFVF

SEQ ID NO: 131112 - protein, 11 aa, Homo sapiens
  CDR3 for beta chain variable domain of TCR clone 65556 (TRBV6-1, TRBJ2-1)
CASISSNEQFF

SEQ ID NO: 131113 - protein, 11 aa, Homo sapiens
  CDR3 for alpha chain variable domain of TCR clone 65557 (TRAV2, TRAJ33)
CAVDSNYPLIW

SEQ ID NO: 131114 - protein, 14 aa, Homo sapiens
  CDR3 for beta chain variable domain of TCR clone 65557 (TRBV11-2, TRBJ2-3)
CASSRLARTDTQYF

SEQ ID NO: 131115 - protein, 15 aa, Homo sapiens
  CDR3 for alpha chain variable domain of TCR clone 65558 (TRAV12-3, TRAJ6)
CAMSATTGGSYIPTF

SEQ ID NO: 131116 - protein, 18 aa, Homo sapiens
  CDR3 for beta chain variable domain of TCR clone 65558 (TRBV11-2, TRBJ2-3)
CASSLGGASRGAPNTQYF

SEQ ID NO: 131117 - protein, 11 aa, Homo sapiens
  CDR3 for alpha chain variable domain of TCR clone 65559 (TRAV13-2, TRAJ20)
CADSNDYKLSF

SEQ ID NO: 131118 - protein, 14 aa, Homo sapiens
  CDR3 for beta chain variable domain of TCR clone 65559 (TRBV11-2, TRBJ1-5)
CASSLDRGRQTQHF

SEQ ID NO: 131119 - protein, 17 aa, Homo sapiens
  CDR3 for alpha chain variable domain of TCR clone 65560 (TRAV3, TRAJ6)
CAVRDGPRAGGSYIPTF

SEQ ID NO: 131120 - protein, 12 aa, Homo sapiens
  CDR3 for beta chain variable domain of TCR clone 65560 (TRBV9, TRBJ1-1)
CASSEVNTEAFF

SEQ ID NO: 131121 - protein, 13 aa, Homo sapiens
  CDR3 for alpha chain variable domain of TCR clone 65561 (TRAV22, TRAJ26)
CAVEHNYVQNFVF

SEQ ID NO: 131122 - protein, 16 aa, Homo sapiens
  CDR3 for beta chain variable domain of TCR clone 65561 (TRBV7-2, TRBJ2-6)
CASSERRASGANVLTF

SEQ ID NO: 131123 - protein, 16 aa, Homo sapiens
  CDR3 for alpha chain variable domain of TCR clone 65562 (TRAV8-6, TRAJ54)
CAVSGSQNQGAQKLVF

SEQ ID NO: 131124 - protein, 13 aa, Homo sapiens
  CDR3 for beta chain variable domain of TCR clone 65562 (TRBV7-2, TRBJ2-7)
CASRTSSSWEQYF

SEQ ID NO: 131125 - protein, 12 aa, Homo sapiens
  CDR3 for alpha chain variable domain of TCR clone 65563 (TRAV21, TRAJ33)
CAKMDSNYQLIW

SEQ ID NO: 131126 - protein, 16 aa, Homo sapiens
  CDR3 for beta chain variable domain of TCR clone 65563 (TRBV4-3, TRBJ2-1)
CASSKVASGSYNEQFF

SEQ ID NO: 131127 - protein, 14 aa, Homo sapiens
  CDR3 for alpha chain variable domain of TCR clone 65564 (TRAV38-2/DV8, TRAJ23)
CAYRSQNQGGKLIF

SEQ ID NO: 131128 - protein, 14 aa, Homo sapiens
  CDR3 for beta chain variable domain of TCR clone 65564 (TRBV11-2, TRBJ2-5)
CASSRTGGIETQYF

SEQ ID NO: 131129 - protein, 17 aa, Homo sapiens
  CDR3 for alpha chain variable domain of TCR clone 65565 (TRAV3, TRAJ7)
CAVRDMSPLEGTTDSLL

SEQ ID NO: 131130 - protein, 13 aa, Homo sapiens
  CDR3 for beta chain variable domain of TCR clone 65565 (TRBV2, TRBJ1-1)
CASNLLRNTEAFF

SEQ ID NO: 131131 - protein, 13 aa, Homo sapiens
  CDR3 for alpha chain variable domain of TCR clone 65566 (TRAV12-2, TRAJ52)
CNDGGTSYGKLTF

SEQ ID NO: 131132 - protein, 14 aa, Homo sapiens
  CDR3 for beta chain variable domain of TCR clone 65566 (TRBV6-1, TRBJ1-3)
CASVQGGGGNTIYF

SEQ ID NO: 131133 - protein, 13 aa, Homo sapiens
  CDR3 for alpha chain variable domain of TCR clone 65567 (TRAV12-1, TRAJ6)
CVVFPGGSYIPTF

SEQ ID NO: 131134 - protein, 14 aa, Homo sapiens
  CDR3 for beta chain variable domain of TCR clone 65567 (TRBV7-7, TRBJ2-2)
CATRQDSDTGELFF

SEQ ID NO: 131135 - protein, 15 aa, Homo sapiens
  CDR3 for alpha chain variable domain of TCR clone 65568 (TRAV3, TRAJ22)
CAVRDRGGSARQLTF

SEQ ID NO: 131136 - protein, 14 aa, Homo sapiens
  CDR3 for beta chain variable domain of TCR clone 65568 (TRBV28, TRBJ2-1)
CASSPGEGGNEQFF

SEQ ID NO: 131137 - protein, 13 aa, Homo sapiens
  CDR3 for alpha chain variable domain of TCR clone 65569 (TRAV16, TRAJ26)
CITVLCLDQNFVF

SEQ ID NO: 131138 - protein, 12 aa, Homo sapiens
  CDR3 for beta chain variable domain of TCR clone 65569 (TRBV11-2, TRBJ2-1)
CASSPGNNEQFF

SEQ ID NO: 131139 - protein, 15 aa, Homo sapiens
  CDR3 for alpha chain variable domain of TCR clone 65570 (TRAV3, TRAJ22)
CAVRDRGGSARQLTF

SEQ ID NO: 131140 - protein, 14 aa, Homo sapiens
  CDR3 for beta chain variable domain of TCR clone 65570 (TRBV7-3, TRBJ2-1)
CASSLAGGTNEQFF

SEQ ID NO: 131141 - protein, 13 aa, Homo sapiens
  CDR3 for alpha chain variable domain of TCR clone 65571 (TRAV12-2, TRAJ53)
CAMRGGSNYKLTF

SEQ ID NO: 131142 - protein, 15 aa, Homo sapiens
  CDR3 for beta chain variable domain of TCR clone 65571 (TRBV2, TRBJ2-1)
CATQARLVMIGEQFF

SEQ ID NO: 131143 - protein, 16 aa, Homo sapiens
  CDR3 for alpha chain variable domain of TCR clone 65572 (TRAV38-2/DV8, TRAJ47)
CAYRSAIMEYGNKLVF

SEQ ID NO: 131144 - protein, 14 aa, Homo sapiens
  CDR3 for beta chain variable domain of TCR clone 65572 (TRBV19, TRBJ2-7)
RASSIFAGTYEQCF

SEQ ID NO: 131145 - protein, 13 aa, Homo sapiens
  CDR3 for alpha chain variable domain of TCR clone 65573 (TRAV8-3, TRAJ28)
CAVGAVGSYQLTF

SEQ ID NO: 131146 - protein, 16 aa, Homo sapiens
  CDR3 for beta chain variable domain of TCR clone 65573 (TRBV19, TRBJ2-1)
CASSKAGPRSYNEQFF

SEQ ID NO: 131147 - protein, 15 aa, Homo sapiens
  CDR3 for alpha chain variable domain of TCR clone 65574 (TRAV3, TRAJ22)
CAVRDRGGSARQLTF

SEQ ID NO: 131148 - protein, 13 aa, Homo sapiens
  CDR3 for beta chain variable domain of TCR clone 65574 (TRBV4-1, TRBJ2-2)
CASSQENTGELFF

SEQ ID NO: 131149 - protein, 12 aa, Homo sapiens
  CDR3 for alpha chain variable domain of TCR clone 65575 (TRAV3, TRAJ26)
CAVRDYGQNFVF

SEQ ID NO: 131150 - protein, 14 aa, Homo sapiens
  CDR3 for beta chain variable domain of TCR clone 65575 (TRBV18, TRBJ2-5)
CASSPGVSQETQYF

SEQ ID NO: 131151 - protein, 11 aa, Homo sapiens
  CDR3 for alpha chain variable domain of TCR clone 65576 (TRAV3, TRAJ21)
CAVGNFNKFYF

SEQ ID NO: 131152 - protein, 12 aa, Homo sapiens
  CDR3 for beta chain variable domain of TCR clone 65576 (TRBV18, TRBJ2-7)
CASSPRSWEQYF

SEQ ID NO: 131153 - protein, 15 aa, Homo sapiens
  CDR3 for alpha chain variable domain of TCR clone 65577 (TRAV27, TRAJ24)
CAGGTSADSWGKLQF

SEQ ID NO: 131154 - protein, 14 aa, Homo sapiens
  CDR3 for beta chain variable domain of TCR clone 65577 (TRBV25-1, TRBJ1-1)
CASTHLGGNTEAFF

SEQ ID NO: 131155 - protein, 13 aa, Homo sapiens
  CDR3 for alpha chain variable domain of TCR clone 65578 (TRAV22, TRAJ26)
CAVEHNYGQNFVF

SEQ ID NO: 131156 - protein, 16 aa, Homo sapiens
  CDR3 for beta chain variable domain of TCR clone 65578 (TRBV7-2, TRBJ2-6)
CASSERRASGANGLTF

SEQ ID NO: 131157 - protein, 14 aa, Homo sapiens
  CDR3 for alpha chain variable domain of TCR clone 65579 (TRAV23/DV6, TRAJ8)
CAASKDTGFQKLVF

SEQ ID NO: 131158 - protein, 16 aa, Homo sapiens
  CDR3 for beta chain variable domain of TCR clone 65579 (TRBV4-1, TRBJ2-6)
CASSQVGDPGANVLTF

SEQ ID NO: 131159 - protein, 14 aa, Homo sapiens
  CDR3 for alpha chain variable domain of TCR clone 65580 (TRAV1-2, TRAJ16)
CAVNRFSAGQKLLF

SEQ ID NO: 131160 - protein, 13 aa, Homo sapiens
  CDR3 for beta chain variable domain of TCR clone 65580 (TRBV4-1, TRBJ2-1)
CASSQAGGDEQFF

SEQ ID NO: 131161 - protein, 13 aa, Homo sapiens
  CDR3 for alpha chain variable domain of TCR clone 65581 (TRAV39, TRAJ33)
CAVDRDSNYQLIW

SEQ ID NO: 131162 - protein, 16 aa, Homo sapiens
  CDR3 for beta chain variable domain of TCR clone 65581 (TRBV6-1, TRBJ2-3)
CASSEVIGQGTGTQYF

SEQ ID NO: 131163 - protein, 15 aa, Homo sapiens
  CDR3 for alpha chain variable domain of TCR clone 65582 (TRAV12-1, TRAJ44)
CVVFVNTGTASKLTF

SEQ ID NO: 131164 - protein, 17 aa, Homo sapiens
  CDR3 for beta chain variable domain of TCR clone 65582 (TRBV7-8, TRBJ2-6)
CASSAGTVGAGANVLTF

SEQ ID NO: 131165 - protein, 13 aa, Homo sapiens
  CDR3 for alpha chain variable domain of TCR clone 65583 (TRAV12-2, TRAJ34)
CAVRGYNTDKLIF

SEQ ID NO: 131166 - protein, 15 aa, Homo sapiens
  CDR3 for beta chain variable domain of TCR clone 65583 (TRBV28, TRBJ2-1)
CASRTGAGVSARQFF

SEQ ID NO: 131167 - protein, 13 aa, Homo sapiens
  CDR3 for alpha chain variable domain of TCR clone 65584 (TRAV12-3, TRAJ13)
CAMTSGGYQKVTF

SEQ ID NO: 131168 - protein, 13 aa, Homo sapiens
  CDR3 for beta chain variable domain of TCR clone 65584 (TRBV20-1, TRBJ2-2)
CSALGGGAGELFF

SEQ ID NO: 131169 - protein, 11 aa, Homo sapiens
  CDR3 for alpha chain variable domain of TCR clone 65585 (TRAV2, TRAJ13)
CASGGYQKVTF

SEQ ID NO: 131170 - protein, 14 aa, Homo sapiens
  CDR3 for beta chain variable domain of TCR clone 65585 (TRBV19, TRBJ2-1)
CASPTFVLGGEQFF

SEQ ID NO: 131171 - protein, 15 aa, Homo sapiens
  CDR3 for alpha chain variable domain of TCR clone 65586 (TRAV8-2, TRAJ40)
CVVLGTTSGTSKYIF

SEQ ID NO: 131172 - protein, 16 aa, Homo sapiens
  CDR3 for beta chain variable domain of TCR clone 65586 (TRBV7-3, TRBJ2-1)
CASSLEGYRSYNEQFF

SEQ ID NO: 131173 - protein, 13 aa, Homo sapiens
  CDR3 for alpha chain variable domain of TCR clone 65587 (TRAV8-6, TRAJ34)
CAASDQGTDKLIF

SEQ ID NO: 131174 - protein, 14 aa, Homo sapiens
  CDR3 for beta chain variable domain of TCR clone 65587 (TRBV12-4, TRBJ1-1)
CASTWTGHDTEAFF

SEQ ID NO: 131175 - protein, 10 aa, Homo sapiens
  CDR3 for alpha chain variable domain of TCR clone 65588 (TRAV8-4, TRAJ43)
CAVSADDMRF

SEQ ID NO: 131176 - protein, 11 aa, Homo sapiens
  CDR3 for beta chain variable domain of TCR clone 65588 (TRBV12-4, TRBJ2-3)
CASTATDTLYF

SEQ ID NO: 131177 - protein, 15 aa, Homo sapiens
  CDR3 for alpha chain variable domain of TCR clone 65589 (TRAV25, TRAJ53)
CPTSNSGGSNYKLTF

SEQ ID NO: 131178 - protein, 15 aa, Homo sapiens
  CDR3 for beta chain variable domain of TCR clone 65589 (TRBV11-1, TRBJ2-7)
CASSLNYGASYEQYF

SEQ ID NO: 131179 - protein, 13 aa, Homo sapiens
  CDR3 for alpha chain variable domain of TCR clone 65590 (TRAV17, TRAJ9)
CATDDTGGFKTIF

SEQ ID NO: 131180 - protein, 16 aa, Homo sapiens
  CDR3 for beta chain variable domain of TCR clone 65590 (TRBV7-7, TRBJ2-1)
CASSLASGTSYNEQFF

SEQ ID NO: 131181 - protein, 14 aa, Homo sapiens
  CDR3 for alpha chain variable domain of TCR clone 65591 (TRAV13-1, TRAJ20)
CAARPGSNGYKLSF

SEQ ID NO: 131182 - protein, 15 aa, Homo sapiens
  CDR3 for beta chain variable domain of TCR clone 65591 (TRBV4-1, TRBJ2-7)
CASSQQGQGFDEQYF

SEQ ID NO: 131183 - protein, 13 aa, Homo sapiens
  CDR3 for alpha chain variable domain of TCR clone 65592 (TRAV27, TRAJ54)
CAGAGQGAQKMVF

SEQ ID NO: 131184 - protein, 15 aa, Homo sapiens
  CDR3 for beta chain variable domain of TCR clone 65592 (TRBV18, TRBJ2-6)
CASSPSYAGANVLTF

SEQ ID NO: 131185 - protein, 15 aa, Homo sapiens
  CDR3 for alpha chain variable domain of TCR clone 65593 (TRAV23/DV6, TRAJ18)
CAARYRGSTLGRLYF

SEQ ID NO: 131186 - protein, 13 aa, Homo sapiens
  CDR3 for beta chain variable domain of TCR clone 65593 (TRBV10-3, TRBJ2-7)
CASKLAVNYEQYF

SEQ ID NO: 131187 - protein, 13 aa, Homo sapiens
  CDR3 for alpha chain variable domain of TCR clone 65594 (TRAV17, TRAJ9)
CATDYTGGFKTIF

SEQ ID NO: 131188 - protein, 14 aa, Homo sapiens
  CDR3 for beta chain variable domain of TCR clone 65594 (TRBV19, TRBJ2-5)
GASSMTGQQETQYF

SEQ ID NO: 131189 - protein, 12 aa, Homo sapiens
  CDR3 for alpha chain variable domain of TCR clone 65595 (TRAV12-3, TRAJ17)
CAMTLTGNKLTF

SEQ ID NO: 131190 - protein, 18 aa, Homo sapiens
  CDR3 for beta chain variable domain of TCR clone 65595 (TRBV6-6, TRBJ1-3)
CASSYSKWDSISGNTIYF

SEQ ID NO: 131191 - protein, 18 aa, Homo sapiens
  CDR3 for alpha chain variable domain of TCR clone 65596 (TRAV21, TRAJ52)
CAVRPSPAGGTSYGKLTF

SEQ ID NO: 131192 - protein, 17 aa, Homo sapiens
  CDR3 for beta chain variable domain of TCR clone 65596 (TRBV13, TRBJ2-5)
CASSLSRVAGGRNTQYF

SEQ ID NO: 131193 - protein, 12 aa, Homo sapiens
  CDR3 for alpha chain variable domain of TCR clone 65597 (TRAV13-1, TRAJ49)
CEASPMGNQFYF

SEQ ID NO: 131194 - protein, 13 aa, Homo sapiens
  CDR3 for beta chain variable domain of TCR clone 65597 (TRBV20-1, TRBJ2-2)
CSASAAGTGELFF

SEQ ID NO: 131195 - protein, 12 aa, Homo sapiens
  CDR3 for alpha chain variable domain of TCR clone 65598 (TRAV1-1, TRAJ20)
CAVREDDYKLSF

SEQ ID NO: 131196 - protein, 14 aa, Homo sapiens
  CDR3 for beta chain variable domain of TCR clone 65598 (TRBV11-1, TRBJ2-7)
CASSFRQGSYEQYF

SEQ ID NO: 131197 - protein, 13 aa, Homo sapiens
  CDR3 for alpha chain variable domain of TCR clone 65599 (TRAV3, TRAJ29)
CAVRDIIDTPLVF

SEQ ID NO: 131198 - protein, 13 aa, Homo sapiens
  CDR3 for beta chain variable domain of TCR clone 65599 (TRBV27, TRBJ2-1)
CQQCYGGYNEQFF

SEQ ID NO: 131199 - protein, 17 aa, Homo sapiens
  CDR3 for alpha chain variable domain of TCR clone 65600 (TRAV4, TRAJ18)
CLVGERSVGSTLGRPYF

SEQ ID NO: 131200 - protein, 14 aa, Homo sapiens
  CDR3 for beta chain variable domain of TCR clone 65600 (TRBV6-5, TRBJ1-2)
CASSYDGTGGGYTF

SEQ ID NO: 131201 - protein, 16 aa, Homo sapiens
  CDR3 for alpha chain variable domain of TCR clone 65601 (TRAV4, TRAJ5)
CLVGPDHGHRQESTYF

SEQ ID NO: 131202 - protein, 13 aa, Homo sapiens
  CDR3 for beta chain variable domain of TCR clone 65601 (TRBV4-2, TRBJ1-2)
CASSLSASGGYTF

SEQ ID NO: 131203 - protein, 14 aa, Homo sapiens
  CDR3 for alpha chain variable domain of TCR clone 65602 (TRAV38-1, TRAJ45)
CAYYTGGGADGLTF

SEQ ID NO: 131204 - protein, 20 aa, Homo sapiens
  CDR3 for beta chain variable domain of TCR clone 65602 (TRBV28, TRBJ2-1)
CASTPIGRSPGLAGGNEQFF

SEQ ID NO: 131205 - protein, 13 aa, Homo sapiens
  CDR3 for alpha chain variable domain of TCR clone 65603 (TRAV8-1, TRAJ28)
CAVSGAGSYQLTF

SEQ ID NO: 131206 - protein, 13 aa, Homo sapiens
  CDR3 for beta chain variable domain of TCR clone 65603 (TRBV7-2, TRBJ2-2)
CQQRTGAAGELFF

SEQ ID NO: 131207 - protein, 13 aa, Homo sapiens
  CDR3 for alpha chain variable domain of TCR clone 65604 (TRAV17, TRAJ20)
CATDAVGDYKLSF

SEQ ID NO: 131208 - protein, 12 aa, Homo sapiens
  CDR3 for beta chain variable domain of TCR clone 65604 (TRBV7-3, TRBJ1-2)
CASSKKGVPVTF

SEQ ID NO: 131209 - protein, 14 aa, Homo sapiens
  CDR3 for alpha chain variable domain of TCR clone 65605 (TRAV16, TRAJ33)
CALSAMDSNYQLIW

SEQ ID NO: 131210 - protein, 15 aa, Homo sapiens
  CDR3 for beta chain variable domain of TCR clone 65605 (TRBV13, TRBJ1-5)
CASSFGQGGVQPQHF

SEQ ID NO: 131211 - protein, 14 aa, Homo sapiens
  CDR3 for alpha chain variable domain of TCR clone 65606 (TRAV13-1, TRAJ9)
CAASALTGGFRTIF

SEQ ID NO: 131212 - protein, 13 aa, Homo sapiens
  CDR3 for beta chain variable domain of TCR clone 65606 (TRBV20-1, TRBJ1-1)
CSAGTVGNTEAFF

SEQ ID NO: 131213 - protein, 18 aa, Homo sapiens
  CDR3 for alpha chain variable domain of TCR clone 65607 (TRAV12-3, TRAJ52)
CAMSVGGAGGTSYGKLTF

SEQ ID NO: 131214 - protein, 15 aa, Homo sapiens
  CDR3 for beta chain variable domain of TCR clone 65607 (TRBV27, TRBJ1-6)
YASSFDRGLGSPLHF

SEQ ID NO: 131215 - protein, 14 aa, Homo sapiens
  CDR3 for alpha chain variable domain of TCR clone 65608 (TRAV12-2, TRAJ40)
CAVKIPTGTYKYIF

SEQ ID NO: 131216 - protein, 14 aa, Homo sapiens
  CDR3 for beta chain variable domain of TCR clone 65608 (TRBV20-1, TRBJ1-1)
CSEQTRIGGTEAFF

SEQ ID NO: 131217 - protein, 10 aa, Homo sapiens
  CDR3 for alpha chain variable domain of TCR clone 65609 (TRAV30, TRAJ48)
CGIGSEKLTF

SEQ ID NO: 131218 - protein, 13 aa, Homo sapiens
  CDR3 for beta chain variable domain of TCR clone 65609 (TRBV29-1, TRBJ2-7)
CSVGPSGGYEQYF

SEQ ID NO: 131219 - protein, 17 aa, Homo sapiens
  CDR3 for alpha chain variable domain of TCR clone 65610 (TRAV2, TRAJ36)
CAVEDRGNWGKQPLLWD

SEQ ID NO: 131220 - protein, 14 aa, Homo sapiens
  CDR3 for beta chain variable domain of TCR clone 65610 (TRBV7-9, TRBJ2-5)
CASSLDTAQETQCF

SEQ ID NO: 131221 - protein, 16 aa, Homo sapiens
  CDR3 for alpha chain variable domain of TCR clone 65611 (TRAV3, TRAJ37)
CAVRVRGSGNTGRLIF

SEQ ID NO: 131222 - protein, 11 aa, Homo sapiens
  CDR3 for beta chain variable domain of TCR clone 65611 (TRBV11-2, TRBJ2-2)
CASSLPGELFF

SEQ ID NO: 131223 - protein, 12 aa, Homo sapiens
  CDR3 for alpha chain variable domain of TCR clone 65612 (TRAV12-3, TRAJ5)
CAMDTGRRSLTF

SEQ ID NO: 131224 - protein, 13 aa, Homo sapiens
  CDR3 for beta chain variable domain of TCR clone 65612 (TRBV7-7, TRBJ2-2)
CASSLTSAGELFF

SEQ ID NO: 131225 - protein, 17 aa, Homo sapiens
  CDR3 for alpha chain variable domain of TCR clone 65613 (TRAV3, TRAJ6)
CAVRDGPRAGGSYIPTF

SEQ ID NO: 131226 - protein, 13 aa, Homo sapiens
  CDR3 for beta chain variable domain of TCR clone 65613 (TRBV20-1, TRBJ1-1)
CSARVGGNTEAFF

SEQ ID NO: 131227 - protein, 11 aa, Homo sapiens
  CDR3 for alpha chain variable domain of TCR clone 65614 (TRAV1-1, TRAJ23)
CAVRQGGKLIF

SEQ ID NO: 131228 - protein, 15 aa, Homo sapiens
  CDR3 for beta chain variable domain of TCR clone 65614 (TRBV5-1, TRBJ2-3)
CASSVTSGSTDTQYF

SEQ ID NO: 131229 - protein, 16 aa, Homo sapiens
  CDR3 for alpha chain variable domain of TCR clone 65615 (TRAV16, TRAJ4)
CALSRMFSGGYNKLIF

SEQ ID NO: 131230 - protein, 15 aa, Homo sapiens
  CDR3 for beta chain variable domain of TCR clone 65615 (TRBV7-9, TRBJ1-6)
CASSSPGRGNSPLHF

SEQ ID NO: 131231 - protein, 14 aa, Homo sapiens
  CDR3 for alpha chain variable domain of TCR clone 65616 (TRAV1-2, TRAJ8)
CAVREDTGFQELVF

SEQ ID NO: 131232 - protein, 14 aa, Homo sapiens
  CDR3 for beta chain variable domain of TCR clone 65616 (TRBV7-6, TRBJ2-3)
CASSLGTVTDTQYF

SEQ ID NO: 131233 - protein, 14 aa, Homo sapiens
  CDR3 for alpha chain variable domain of TCR clone 65617 (TRAV12-3, TRAJ15)
CAMIPPQAGTALIF

SEQ ID NO: 131234 - protein, 12 aa, Homo sapiens
  CDR3 for beta chain variable domain of TCR clone 65617 (TRBV11-2, TRBJ2-2)
CASSIGGGELFF

SEQ ID NO: 131235 - protein, 12 aa, Homo sapiens
  CDR3 for alpha chain variable domain of TCR clone 65618 (TRAV12-3, TRAJ17)
CAMTLTGNKLTF

SEQ ID NO: 131236 - protein, 12 aa, Homo sapiens
  CDR3 for beta chain variable domain of TCR clone 65618 (TRBV5-7, TRBJ1-1)
CASSLGRGKAFF

SEQ ID NO: 131237 - protein, 12 aa, Homo sapiens
  CDR3 for alpha chain variable domain of TCR clone 65619 (TRAV3, TRAJ43)
CAVGDPNNDMRF

SEQ ID NO: 131238 - protein, 15 aa, Homo sapiens
  CDR3 for beta chain variable domain of TCR clone 65619 (TRBV27, TRBJ1-5)
CASSLGTGFDQPQHF

SEQ ID NO: 131239 - protein, 16 aa, Homo sapiens
  CDR3 for alpha chain variable domain of TCR clone 65620 (TRAV27, TRAJ13)
CAGAKSDSGGYQKVTF

SEQ ID NO: 131240 - protein, 13 aa, Homo sapiens
  CDR3 for beta chain variable domain of TCR clone 65620 (TRBV11-2, TRBJ2-5)
CASSFSSQETQYF

SEQ ID NO: 131241 - protein, 16 aa, Homo sapiens
  CDR3 for alpha chain variable domain of TCR clone 65621 (TRAV14/DV4, TRAJ53)
CAMREGGGGSNYKLTF

SEQ ID NO: 131242 - protein, 16 aa, Homo sapiens
  CDR3 for beta chain variable domain of TCR clone 65621 (TRBV7-9, TRBJ1-2)
CASSLGFSSGEDGYTF

SEQ ID NO: 131243 - protein, 14 aa, Homo sapiens
  CDR3 for alpha chain variable domain of TCR clone 65622 (TRAV12-3, TRAJ6)
CASKWGGGSYIPTF

SEQ ID NO: 131244 - protein, 13 aa, Homo sapiens
  CDR3 for beta chain variable domain of TCR clone 65622 (TRBV2, TRBJ1-1)
CASSEGGNTEAFF

SEQ ID NO: 131245 - protein, 12 aa, Homo sapiens
  CDR3 for alpha chain variable domain of TCR clone 65623 (TRAV3, TRAJ43)
CDVRDPNNDMRF

SEQ ID NO: 131246 - protein, 13 aa, Homo sapiens
  CDR3 for beta chain variable domain of TCR clone 65623 (TRBV19, TRBJ1-2)
CASSVPGQDGYTF

SEQ ID NO: 131247 - protein, 14 aa, Homo sapiens
  CDR3 for alpha chain variable domain of TCR clone 65624 (TRAV34, TRAJ22)
CGADTSGSARQLTF

SEQ ID NO: 131248 - protein, 17 aa, Homo sapiens
  CDR3 for beta chain variable domain of TCR clone 65624 (TRBV7-8, TRBJ2-1)
CASSPPTGTLAYNEQFF

SEQ ID NO: 131249 - protein, 13 aa, Homo sapiens
  CDR3 for alpha chain variable domain of TCR clone 65625 (TRAV35, TRAJ42)
CAGFPGSQGNLIF

SEQ ID NO: 131250 - protein, 13 aa, Homo sapiens
  CDR3 for beta chain variable domain of TCR clone 65625 (TRBV29-1, TRBJ2-1)
RSVEGGRVNEQFF

SEQ ID NO: 131251 - protein, 13 aa, Homo sapiens
  CDR3 for alpha chain variable domain of TCR clone 65626 (TRAV22, TRAJ29)
SAVGGSGNTPLVF

SEQ ID NO: 131252 - protein, 13 aa, Homo sapiens
  CDR3 for beta chain variable domain of TCR clone 65626 (TRBV4-2, TRBJ1-1)
CASSQAGNTEAFF

SEQ ID NO: 131253 - protein, 15 aa, Homo sapiens
  CDR3 for alpha chain variable domain of TCR clone 65627 (TRAV38-1, TRAJ37)
YAFIHGSGNTGKLIF

SEQ ID NO: 131254 - protein, 12 aa, Homo sapiens
  CDR3 for beta chain variable domain of TCR clone 65627 (TRBV7-9, TRBJ2-7)
CASSFGSYEQYF

SEQ ID NO: 131255 - protein, 13 aa, Homo sapiens
  CDR3 for alpha chain variable domain of TCR clone 65628 (TRAV2, TRAJ10)
CAAETGGGNKLTF

SEQ ID NO: 131256 - protein, 14 aa, Homo sapiens
  CDR3 for beta chain variable domain of TCR clone 65628 (TRBV20-1, TRBJ2-3)
CSAGGRRGTDTQYF

SEQ ID NO: 131257 - protein, 14 aa, Homo sapiens
  CDR3 for alpha chain variable domain of TCR clone 65629 (TRAV14/DV4, TRAJ54)
CAMREAPGAQKLVF

SEQ ID NO: 131258 - protein, 14 aa, Homo sapiens
  CDR3 for beta chain variable domain of TCR clone 65629 (TRBV7-2, TRBJ1-1)
CASSFLTGTTEAFF

SEQ ID NO: 131259 - protein, 11 aa, Homo sapiens
  CDR3 for alpha chain variable domain of TCR clone 65630 (TRAV1-2, TRAJ40)
CAVPGTYKYIF

SEQ ID NO: 131260 - protein, 16 aa, Homo sapiens
  CDR3 for beta chain variable domain of TCR clone 65630 (TRBV29-1, TRBJ2-7)
CSVEVGGTSGSYEQYF

SEQ ID NO: 131261 - protein, 10 aa, Homo sapiens
  CDR3 for alpha chain variable domain of TCR clone 65631 (TRAV12-2, TRAJ22)
CAVNETQLTF

SEQ ID NO: 131262 - protein, 15 aa, Homo sapiens
  CDR3 for beta chain variable domain of TCR clone 65631 (TRBV11-3, TRBJ2-7)
CASSPGPASSYEQYF

SEQ ID NO: 131263 - protein, 17 aa, Homo sapiens
  CDR3 for alpha chain variable domain of TCR clone 65632 (TRAV3, TRAJ38)
CAVRDCLNAGNNRKLIW

SEQ ID NO: 131264 - protein, 14 aa, Homo sapiens
  CDR3 for beta chain variable domain of TCR clone 65632 (TRBV7-6, TRBJ2-3)
CASSLGTVTDTQYF

SEQ ID NO: 131265 - protein, 11 aa, Homo sapiens
  CDR3 for alpha chain variable domain of TCR clone 65633 (TRAV17, TRAJ9)
CGFTGGFKTIF

SEQ ID NO: 131266 - protein, 13 aa, Homo sapiens
  CDR3 for beta chain variable domain of TCR clone 65633 (TRBV27, TRBJ2-1)
CASSSGSYNEQFF

SEQ ID NO: 131267 - protein, 12 aa, Homo sapiens
  CDR3 for alpha chain variable domain of TCR clone 65634 (TRAV2, TRAJ33)
CAVPDSNYQLIW

SEQ ID NO: 131268 - protein, 14 aa, Homo sapiens
  CDR3 for beta chain variable domain of TCR clone 65634 (TRBV7-8, TRBJ2-3)
CASSLDAGTDTQYF

SEQ ID NO: 131269 - protein, 14 aa, Homo sapiens
  CDR3 for alpha chain variable domain of TCR clone 65635 (TRAV27, TRAJ40)
CADPTTSGTYKYIF

SEQ ID NO: 131270 - protein, 14 aa, Homo sapiens
  CDR3 for beta chain variable domain of TCR clone 65635 (TRBV19, TRBJ2-7)
CASSIFAGTYEQYF

SEQ ID NO: 131271 - protein, 17 aa, Homo sapiens
  CDR3 for alpha chain variable domain of TCR clone 65636 (TRAV2, TRAJ22)
ILQVREADAAEQRQLTF

SEQ ID NO: 131272 - protein, 16 aa, Homo sapiens
  CDR3 for beta chain variable domain of TCR clone 65636 (TRBV2, TRBJ2-5)
CASSDTQGVGEETQYF

SEQ ID NO: 131273 - protein, 13 aa, Homo sapiens
  CDR3 for alpha chain variable domain of TCR clone 65637 (TRAV29/DV5, TRAJ31)
CAASRDNNARLMF

SEQ ID NO: 131274 - protein, 14 aa, Homo sapiens
  CDR3 for beta chain variable domain of TCR clone 65637 (TRBV7-9, TRBJ2-2)
CASSLVQDTGELFF

SEQ ID NO: 131275 - protein, 12 aa, Homo sapiens
  CDR3 for alpha chain variable domain of TCR clone 65638 (TRAV13-1, TRAJ48)
CAANFGNEKLTF

SEQ ID NO: 131276 - protein, 14 aa, Homo sapiens
  CDR3 for beta chain variable domain of TCR clone 65638 (TRBV6-3, TRBJ1-1)
CASSYQRRDTEAFF

SEQ ID NO: 131277 - protein, 11 aa, Homo sapiens
  CDR3 for alpha chain variable domain of TCR clone 65639 (TRAV13-1, TRAJ40)
CAVSGTYKYIF

SEQ ID NO: 131278 - protein, 13 aa, Homo sapiens
  CDR3 for beta chain variable domain of TCR clone 65639 (TRBV7-9, TRBJ1-2)
CASRTGPNYGYTF

SEQ ID NO: 131279 - protein, 14 aa, Homo sapiens
  CDR3 for alpha chain variable domain of TCR clone 65640 (TRAV8-6, TRAJ5)
CAVSVDTGSRALTF

SEQ ID NO: 131280 - protein, 11 aa, Homo sapiens
  CDR3 for beta chain variable domain of TCR clone 65640 (TRBV7-3, TRBJ2-5)
CASSLSETQYF

SEQ ID NO: 131281 - protein, 14 aa, Homo sapiens
  CDR3 for alpha chain variable domain of TCR clone 65641 (TRAV8-2, TRAJ4)
CVVSPSGGYNKLIF

SEQ ID NO: 131282 - protein, 14 aa, Homo sapiens
  CDR3 for beta chain variable domain of TCR clone 65641 (TRBV7-2, TRBJ2-7)
CASSPKTSFYEQYF

SEQ ID NO: 131283 - protein, 13 aa, Homo sapiens
  CDR3 for alpha chain variable domain of TCR clone 65642 (TRAV21, TRAJ37)
CAVSSGNTGKLIF

SEQ ID NO: 131284 - protein, 17 aa, Homo sapiens
  CDR3 for beta chain variable domain of TCR clone 65642 (TRBV5-1, TRBJ2-5)
CASSLLGLAAKQETQYF

SEQ ID NO: 131285 - protein, 14 aa, Homo sapiens
  CDR3 for alpha chain variable domain of TCR clone 65643 (TRAV1-2, TRAJ16)
CAVNRFSDGQELLF

SEQ ID NO: 131286 - protein, 14 aa, Homo sapiens
  CDR3 for beta chain variable domain of TCR clone 65643 (TRBV11-1, TRBJ2-7)
CASSFRQGSYEQYF

SEQ ID NO: 131287 - protein, 12 aa, Homo sapiens
  CDR3 for alpha chain variable domain of TCR clone 65644 (TRAV12-2, TRAJ10)
WGVTGGGNKLTF

SEQ ID NO: 131288 - protein, 19 aa, Homo sapiens
  CDR3 for beta chain variable domain of TCR clone 65644 (TRBV11-3, TRBJ2-2)
CASSTRPGAKTTNTGELFF

SEQ ID NO: 131289 - protein, 10 aa, Homo sapiens
  CDR3 for alpha chain variable domain of TCR clone 65645 (TRAV2, TRAJ34)
CAVVNDKLIF

SEQ ID NO: 131290 - protein, 14 aa, Homo sapiens
  CDR3 for beta chain variable domain of TCR clone 65645 (TRBV19, TRBJ2-1)
CASPTFVLSGEQFF

SEQ ID NO: 131291 - protein, 12 aa, Homo sapiens
  CDR3 for alpha chain variable domain of TCR clone 65646 (TRAV27, TRAJ35)
CAGADFGNVLHC

SEQ ID NO: 131292 - protein, 16 aa, Homo sapiens
  CDR3 for beta chain variable domain of TCR clone 65646 (TRBV6-1, TRBJ2-1)
CASILRQGSSYNEQSF

SEQ ID NO: 131293 - protein, 12 aa, Homo sapiens
  CDR3 for alpha chain variable domain of TCR clone 65647 (TRAV12-2, TRAJ31)
CAVNTPDARLLF

SEQ ID NO: 131294 - protein, 17 aa, Homo sapiens
  CDR3 for beta chain variable domain of TCR clone 65647 (TRBV20-1, TRBJ1-6)
CSARGGYTFSYNSPLHF

SEQ ID NO: 131295 - protein, 14 aa, Homo sapiens
  CDR3 for alpha chain variable domain of TCR clone 65648 (TRAV21, TRAJ15)
CAVSLNQAGTALIF

SEQ ID NO: 131296 - protein, 11 aa, Homo sapiens
  CDR3 for beta chain variable domain of TCR clone 65648 (TRBV20-1, TRBJ2-7)
CSARTSYGQYF

SEQ ID NO: 131297 - protein, 11 aa, Homo sapiens
  CDR3 for alpha chain variable domain of TCR clone 65649 (TRAV17, TRAJ9)
CGFTGGFKTIF

SEQ ID NO: 131298 - protein, 13 aa, Homo sapiens
  CDR3 for beta chain variable domain of TCR clone 65649 (TRBV7-9, TRBJ2-3)
CASSPGSTDTQYF

SEQ ID NO: 131299 - protein, 13 aa, Homo sapiens
  CDR3 for alpha chain variable domain of TCR clone 65650 (TRAV36/DV7, TRAJ53)
CALRGGSNYKLTF

SEQ ID NO: 131300 - protein, 13 aa, Homo sapiens
  CDR3 for beta chain variable domain of TCR clone 65650 (TRBV28, TRBJ2-4)
CASSQSSKNIQYF

SEQ ID NO: 131301 - protein, 13 aa, Homo sapiens
  CDR3 for alpha chain variable domain of TCR clone 65651 (TRAV13-2, TRAJ13)
CAERPGGYQKVTF

SEQ ID NO: 131302 - protein, 15 aa, Homo sapiens
  CDR3 for beta chain variable domain of TCR clone 65651 (TRBV18, TRBJ2-5)
CQLTTVERGAKTQYF

SEQ ID NO: 131303 - protein, 11 aa, Homo sapiens
  CDR3 for alpha chain variable domain of TCR clone 65652 (TRAV21, TRAJ31)
CAVRNNARLMF

SEQ ID NO: 131304 - protein, 15 aa, Homo sapiens
  CDR3 for beta chain variable domain of TCR clone 65652 (TRBV7-2, TRBJ2-1)
CASSSGLAGGNEQFF

SEQ ID NO: 131305 - protein, 11 aa, Homo sapiens
  CDR3 for alpha chain variable domain of TCR clone 65653 (TRAV27, TRAJ45)
CAGAQEEVLTD

SEQ ID NO: 131306 - protein, 17 aa, Homo sapiens
  CDR3 for beta chain variable domain of TCR clone 65653 (TRBV11-2, TRBJ2-1)
CASSLYPPGVEYNEQFL

SEQ ID NO: 131307 - protein, 15 aa, Homo sapiens
  CDR3 for alpha chain variable domain of TCR clone 65654 (TRAV12-3, TRAJ27)
CAMRAYNTNAGKSTF

SEQ ID NO: 131308 - protein, 13 aa, Homo sapiens
  CDR3 for beta chain variable domain of TCR clone 65654 (TRBV11-2, TRBJ2-5)
FASSRGPSETQYF

SEQ ID NO: 131309 - protein, 14 aa, Homo sapiens
  CDR3 for alpha chain variable domain of TCR clone 65655 (TRAV1-2, TRAJ16)
CDVNRFSDGQKLLF

SEQ ID NO: 131310 - protein, 14 aa, Homo sapiens
  CDR3 for beta chain variable domain of TCR clone 65655 (TRBV13, TRBJ1-1)
CASTVITVNTEAFF

SEQ ID NO: 131311 - protein, 14 aa, Homo sapiens
  CDR3 for alpha chain variable domain of TCR clone 65656 (TRAV26-1, TRAJ21)
CIVRPPYNFNKFYF

SEQ ID NO: 131312 - protein, 14 aa, Homo sapiens
  CDR3 for beta chain variable domain of TCR clone 65656 (TRBV11-3, TRBJ2-1)
CARSATTSGSIQFF

SEQ ID NO: 131313 - protein, 13 aa, Homo sapiens
  CDR3 for alpha chain variable domain of TCR clone 65657 (TRAV3, TRAJ26)
CAVSRGYGQNFVF

SEQ ID NO: 131314 - protein, 14 aa, Homo sapiens
  CDR3 for beta chain variable domain of TCR clone 65657 (TRBV7-2, TRBJ2-7)
CASSPKTSFYEQYF

SEQ ID NO: 131315 - protein, 14 aa, Homo sapiens
  CDR3 for alpha chain variable domain of TCR clone 65658 (TRAV20, TRAJ29)
CAVQAWVGNTPLVF

SEQ ID NO: 131316 - protein, 14 aa, Homo sapiens
  CDR3 for beta chain variable domain of TCR clone 65658 (TRBV5-1, TRBJ2-3)
CASSFPGNTDTQYF

SEQ ID NO: 131317 - protein, 13 aa, Homo sapiens
  CDR3 for alpha chain variable domain of TCR clone 65659 (TRAV29/DV5, TRAJ22)
CAGVSGSARQLTF

SEQ ID NO: 131318 - protein, 16 aa, Homo sapiens
  CDR3 for beta chain variable domain of TCR clone 65659 (TRBV19, TRBJ2-1)
CASSKAGPSSYNEQFF

SEQ ID NO: 131319 - protein, 13 aa, Homo sapiens
  CDR3 for alpha chain variable domain of TCR clone 65660 (TRAV26-1, TRAJ30)
CTVRVESNDKIIF

SEQ ID NO: 131320 - protein, 15 aa, Homo sapiens
  CDR3 for beta chain variable domain of TCR clone 65660 (TRBV6-1, TRBJ2-3)
CASSERGGITDTQYF

SEQ ID NO: 131321 - protein, 14 aa, Homo sapiens
  CDR3 for alpha chain variable domain of TCR clone 65661 (TRAV12-2, TRAJ5)
CAVNRSTGRRALTF

SEQ ID NO: 131322 - protein, 14 aa, Homo sapiens
  CDR3 for beta chain variable domain of TCR clone 65661 (TRBV18, TRBJ2-5)
CASSPGVSQETQYL

SEQ ID NO: 131323 - protein, 13 aa, Homo sapiens
  CDR3 for alpha chain variable domain of TCR clone 65662 (TRAV8-1, TRAJ28)
CAVSGAGSYQLTF

SEQ ID NO: 131324 - protein, 14 aa, Homo sapiens
  CDR3 for beta chain variable domain of TCR clone 65662 (TRBV7-2, TRBJ2-2)
CASRGQWAAGELFF

SEQ ID NO: 131325 - protein, 11 aa, Homo sapiens
  CDR3 for alpha chain variable domain of TCR clone 65663 (TRAV1-1, TRAJ23)
CAVRQGGKLIF

SEQ ID NO: 131326 - protein, 19 aa, Homo sapiens
  CDR3 for beta chain variable domain of TCR clone 65663 (TRBV7-8, TRBJ2-2)
CQQPFISRADYPYHGELFF

SEQ ID NO: 131327 - protein, 15 aa, Homo sapiens
  CDR3 for alpha chain variable domain of TCR clone 65664 (TRAV21, TRAJ53)
CATLNSGGSNYKLTF

SEQ ID NO: 131328 - protein, 13 aa, Homo sapiens
  CDR3 for beta chain variable domain of TCR clone 65664 (TRBV5-4, TRBJ1-1)
CASSVDLGTEAFF

SEQ ID NO: 131329 - protein, 13 aa, Homo sapiens
  CDR3 for alpha chain variable domain of TCR clone 65665 (TRAV3, TRAJ43)
CAVKARNSNDMRF

SEQ ID NO: 131330 - protein, 16 aa, Homo sapiens
  CDR3 for beta chain variable domain of TCR clone 65665 (TRBV7-9, TRBJ2-3)
CASSFSVAGGTDTQYF

SEQ ID NO: 131331 - protein, 13 aa, Homo sapiens
  CDR3 for alpha chain variable domain of TCR clone 65666 (TRAV12-2, TRAJ39)
CVVNNNAGNMLTF

SEQ ID NO: 131332 - protein, 13 aa, Homo sapiens
  CDR3 for beta chain variable domain of TCR clone 65666 (TRBV2, TRBJ1-5)
CATAGPGNQPQHF

SEQ ID NO: 131333 - protein, 14 aa, Homo sapiens
  CDR3 for alpha chain variable domain of TCR clone 65667 (TRAV9-2, TRAJ39)
CALYIYNAGNMLTF

SEQ ID NO: 131334 - protein, 16 aa, Homo sapiens
  CDR3 for beta chain variable domain of TCR clone 65667 (TRBV27, TRBJ2-2)
CASSFRGLVRTGELFF

SEQ ID NO: 131335 - protein, 12 aa, Homo sapiens
  CDR3 for alpha chain variable domain of TCR clone 65668 (TRAV26-1, TRAJ36)
CIVRVRADNLFF

SEQ ID NO: 131336 - protein, 14 aa, Homo sapiens
  CDR3 for beta chain variable domain of TCR clone 65668 (TRBV12-4, TRBJ1-1)
CASSLGTGGTEAFF

SEQ ID NO: 131337 - protein, 20 aa, Homo sapiens
  CDR3 for alpha chain variable domain of TCR clone 65669 (TRAV26-1, TRAJ42)
CCVLLHRQTYYGGSQGNLIF

SEQ ID NO: 131338 - protein, 16 aa, Homo sapiens
  CDR3 for beta chain variable domain of TCR clone 65669 (TRBV7-3, TRBJ2-2)
CASSLKRGTWSGELFF

SEQ ID NO: 131339 - protein, 14 aa, Homo sapiens
  CDR3 for alpha chain variable domain of TCR clone 65670 (TRAV3, TRAJ21)
CAVESQANFNKFYF

SEQ ID NO: 131340 - protein, 18 aa, Homo sapiens
  CDR3 for beta chain variable domain of TCR clone 65670 (TRBV7-9, TRBJ2-1)
CASSVAVSGTSGRNEQFF

SEQ ID NO: 131341 - protein, 15 aa, Homo sapiens
  CDR3 for alpha chain variable domain of TCR clone 65671 (TRAV3, TRAJ22)
CAVRDRGGSARQLTV

SEQ ID NO: 131342 - protein, 14 aa, Homo sapiens
  CDR3 for beta chain variable domain of TCR clone 65671 (TRBV19, TRBJ1-5)
CASSLGLIGQPQHF

SEQ ID NO: 131343 - protein, 14 aa, Homo sapiens
  CDR3 for alpha chain variable domain of TCR clone 65672 (TRAV23/DV6, TRAJ4)
CVANLSGGYNKLIF

SEQ ID NO: 131344 - protein, 11 aa, Homo sapiens
  CDR3 for beta chain variable domain of TCR clone 65672 (TRBV7-9, TRBJ2-3)
CASSPTDTQYF

SEQ ID NO: 131345 - protein, 10 aa, Homo sapiens
  CDR3 for alpha chain variable domain of TCR clone 65673 (TRAV1-2, TRAJ31)
CAFFDARLMF

SEQ ID NO: 131346 - protein, 17 aa, Homo sapiens
  CDR3 for beta chain variable domain of TCR clone 65673 (TRBV13, TRBJ2-3)
CASSLSRVAGGRNTQYF

SEQ ID NO: 131347 - protein, 14 aa, Homo sapiens
  CDR3 for alpha chain variable domain of TCR clone 65674 (TRAV12-2, TRAJ13)
CAVKKTGGYQEVTF

SEQ ID NO: 131348 - protein, 15 aa, Homo sapiens
  CDR3 for beta chain variable domain of TCR clone 65674 (TRBV12-4, TRBJ2-5)
CASSPPTGLQETQYF

SEQ ID NO: 131349 - protein, 11 aa, Homo sapiens
  CDR3 for alpha chain variable domain of TCR clone 65675 (TRAV13-1, TRAJ20)
CSTPNDYKLSF

SEQ ID NO: 131350 - protein, 14 aa, Homo sapiens
  CDR3 for beta chain variable domain of TCR clone 65675 (TRBV5-1, TRBJ2-7)
CASSFASGVNEQYF

SEQ ID NO: 131351 - protein, 14 aa, Homo sapiens
  CDR3 for alpha chain variable domain of TCR clone 65676 (TRAV8-3, TRAJ12)
CAVGARDSSYKLIF

SEQ ID NO: 131352 - protein, 16 aa, Homo sapiens
  CDR3 for beta chain variable domain of TCR clone 65676 (TRBV12-5, TRBJ2-5)
CASGPRTSGNQETQYF

SEQ ID NO: 131353 - protein, 13 aa, Homo sapiens
  CDR3 for alpha chain variable domain of TCR clone 65677 (TRAV2, TRAJ40)
CAVVTSGTYKYIF

SEQ ID NO: 131354 - protein, 15 aa, Homo sapiens
  CDR3 for beta chain variable domain of TCR clone 65677 (TRBV25-1, TRBJ1-6)
CASSGDRGLNSPLHF

SEQ ID NO: 131355 - protein, 14 aa, Homo sapiens
  CDR3 for alpha chain variable domain of TCR clone 65678 (TRAV8-4, TRAJ17)
CAVSDQAAGNKLTF

SEQ ID NO: 131356 - protein, 15 aa, Homo sapiens
  CDR3 for beta chain variable domain of TCR clone 65678 (TRBV7-2, TRBJ1-2)
CASSLAPGRGLGYTF

SEQ ID NO: 131357 - protein, 14 aa, Homo sapiens
  CDR3 for alpha chain variable domain of TCR clone 65679 (TRAV1-2, TRAJ16)
CAVNRFSDGQKLLF

SEQ ID NO: 131358 - protein, 13 aa, Homo sapiens
  CDR3 for beta chain variable domain of TCR clone 65679 (TRBV25-1, TRBJ2-5)
CASSESGRETQYF

SEQ ID NO: 131359 - protein, 17 aa, Homo sapiens
  CDR3 for alpha chain variable domain of TCR clone 65680 (TRAV13-1, TRAJ53)
CAASWKSSGGSNYKLTF

SEQ ID NO: 131360 - protein, 14 aa, Homo sapiens
  CDR3 for beta chain variable domain of TCR clone 65680 (TRBV18, TRBJ2-7)
CASSPRGGAYEQYF

SEQ ID NO: 131361 - protein, 12 aa, Homo sapiens
  CDR3 for alpha chain variable domain of TCR clone 65681 (TRAV21, TRAJ29)
CAVTSGNTPLVF

SEQ ID NO: 131362 - protein, 12 aa, Homo sapiens
  CDR3 for beta chain variable domain of TCR clone 65681 (TRBV2, TRBJ2-1)
CAYGPPGNEQFF

SEQ ID NO: 131363 - protein, 11 aa, Homo sapiens
  CDR3 for alpha chain variable domain of TCR clone 65682 (TRAV17, TRAJ9)
CGFTGGFKTIF

SEQ ID NO: 131364 - protein, 14 aa, Homo sapiens
  CDR3 for beta chain variable domain of TCR clone 65682 (TRBV7-9, TRBJ2-2)
CASSLVQDTEELFF

SEQ ID NO: 131365 - protein, 17 aa, Homo sapiens
  CDR3 for alpha chain variable domain of TCR clone 65683 (TRAV23/DV6, TRAJ58)
CAARLLRGETSGSRLTF

SEQ ID NO: 131366 - protein, 12 aa, Homo sapiens
  CDR3 for beta chain variable domain of TCR clone 65683 (TRBV7-8, TRBJ2-7)
CASSLGDREQYF

SEQ ID NO: 131367 - protein, 12 aa, Homo sapiens
  CDR3 for alpha chain variable domain of TCR clone 65684 (TRAV12-3, TRAJ17)
CAMTLTGNKLTF

SEQ ID NO: 131368 - protein, 10 aa, Homo sapiens
  CDR3 for beta chain variable domain of TCR clone 65684 (TRBV2, TRBJ2-5)
CASSAATQYF

SEQ ID NO: 131369 - protein, 14 aa, Homo sapiens
  CDR3 for alpha chain variable domain of TCR clone 65685 (TRAV21, TRAJ32)
CCGDYGCATNKLIF

SEQ ID NO: 131370 - protein, 13 aa, Homo sapiens
  CDR3 for beta chain variable domain of TCR clone 65685 (TRBV2, TRBJ1-6)
CASGRGGISPLHF

SEQ ID NO: 131371 - protein, 12 aa, Homo sapiens
  CDR3 for alpha chain variable domain of TCR clone 65686 (TRAV8-3, TRAJ26)
CAGDNYGQNFVF

SEQ ID NO: 131372 - protein, 15 aa, Homo sapiens
  CDR3 for beta chain variable domain of TCR clone 65686 (TRBV12-4, TRBJ2-1)
CASSLSGGASNVQFF

SEQ ID NO: 131373 - protein, 15 aa, Homo sapiens
  CDR3 for alpha chain variable domain of TCR clone 65687 (TRAV5, TRAJ33)
CAEAPAMDSNYQLVW

SEQ ID NO: 131374 - protein, 16 aa, Homo sapiens
  CDR3 for beta chain variable domain of TCR clone 65687 (TRBV7-3, TRBJ2-2)
CASSLKRGTLSGELFF

SEQ ID NO: 131375 - protein, 16 aa, Homo sapiens
  CDR3 for alpha chain variable domain of TCR clone 65688 (TRAV30, TRAJ24)
CGTEIVDADSWGKFQF

SEQ ID NO: 131376 - protein, 14 aa, Homo sapiens
  CDR3 for beta chain variable domain of TCR clone 65688 (TRBV7-9, TRBJ2-4)
CASSLAMGGNIQYS

SEQ ID NO: 131377 - protein, 14 aa, Homo sapiens
  CDR3 for alpha chain variable domain of TCR clone 65689 (TRAV3, TRAJ36)
CAVRDGTGANNLFF

SEQ ID NO: 131378 - protein, 16 aa, Homo sapiens
  CDR3 for beta chain variable domain of TCR clone 65689 (TRBV7-3, TRBJ2-5)
CARIQPGGSVQETQYF

SEQ ID NO: 131379 - protein, 15 aa, Homo sapiens
  CDR3 for alpha chain variable domain of TCR clone 65690 (TRAV1-2, TRAJ13)
CAVRGSSGGYQKVTF

SEQ ID NO: 131380 - protein, 15 aa, Homo sapiens
  CDR3 for beta chain variable domain of TCR clone 65690 (TRBV11-3, TRBJ1-3)
CASSLRGTSGNTIYF

SEQ ID NO: 131381 - protein, 14 aa, Homo sapiens
  CDR3 for alpha chain variable domain of TCR clone 65691 (TRAV17, TRAJ11)
CATDARSGYSTLTF

SEQ ID NO: 131382 - protein, 15 aa, Homo sapiens
  CDR3 for beta chain variable domain of TCR clone 65691 (TRBV7-2, TRBJ2-1)
CASSSGLAGGNEQFF

SEQ ID NO: 131383 - protein, 12 aa, Homo sapiens
  CDR3 for alpha chain variable domain of TCR clone 65692 (TRAV16, TRAJ10)
CSRTGGGNKLTF

SEQ ID NO: 131384 - protein, 19 aa, Homo sapiens
  CDR3 for beta chain variable domain of TCR clone 65692 (TRBV25-1, TRBJ2-2)
CAILVHRVDRGRKTGELFF

SEQ ID NO: 131385 - protein, 15 aa, Homo sapiens
  CDR3 for alpha chain variable domain of TCR clone 65693 (TRAV12-3, TRAJ6)
CAMSATTGGSYIPTF

SEQ ID NO: 131386 - protein, 16 aa, Homo sapiens
  CDR3 for beta chain variable domain of TCR clone 65693 (TRBV20-1, TRBJ1-2)
CSASMGQVVANYGYTF

SEQ ID NO: 131387 - protein, 11 aa, Homo sapiens
  CDR3 for alpha chain variable domain of TCR clone 65694 (TRAV2, TRAJ13)
CASGGYQKVTF

SEQ ID NO: 131388 - protein, 14 aa, Homo sapiens
  CDR3 for beta chain variable domain of TCR clone 65694 (TRBV6-6, TRBJ2-7)
CASSDSGAGYEQYF

SEQ ID NO: 131389 - protein, 14 aa, Homo sapiens
  CDR3 for alpha chain variable domain of TCR clone 65695 (TRAV12-2, TRAJ53)
CRERGGGSNHKLTF

SEQ ID NO: 131390 - protein, 17 aa, Homo sapiens
  CDR3 for beta chain variable domain of TCR clone 65695 (TRBV7-3, TRBJ2-3)
CASSLMKRMRGADTQYF

SEQ ID NO: 131391 - protein, 16 aa, Homo sapiens
  CDR3 for alpha chain variable domain of TCR clone 65696 (TRAV30, TRAJ24)
CGTEIVDADSWGKFQF

SEQ ID NO: 131392 - protein, 17 aa, Homo sapiens
  CDR3 for beta chain variable domain of TCR clone 65696 (TRBV20-1, TRBJ2-1)
CSARDPLAGVWDNEQSF

SEQ ID NO: 131393 - protein, 12 aa, Homo sapiens
  CDR3 for alpha chain variable domain of TCR clone 65697 (TRAV8-3, TRAJ40)
CAVTSVTYKYIF

SEQ ID NO: 131394 - protein, 14 aa, Homo sapiens
  CDR3 for beta chain variable domain of TCR clone 65697 (TRBV12-4, TRBJ2-3)
CASSGQGSTDTQYF

SEQ ID NO: 131395 - protein, 14 aa, Homo sapiens
  CDR3 for alpha chain variable domain of TCR clone 65698 (TRAV2, TRAJ9)
CAVEDRSGGFKTIF

SEQ ID NO: 131396 - protein, 14 aa, Homo sapiens
  CDR3 for beta chain variable domain of TCR clone 65698 (TRBV18, TRBJ1-5)
CASSRQQRNQHQHF

SEQ ID NO: 131397 - protein, 16 aa, Homo sapiens
  CDR3 for alpha chain variable domain of TCR clone 65699 (TRAV3, TRAJ37)
RAVRGEGSGNTGKLIF

SEQ ID NO: 131398 - protein, 13 aa, Homo sapiens
  CDR3 for beta chain variable domain of TCR clone 65699 (TRBV14, TRBJ2-7)
CASSQDRRYEQYF

SEQ ID NO: 131399 - protein, 14 aa, Homo sapiens
  CDR3 for alpha chain variable domain of TCR clone 65700 (TRAV29/DV5, TRAJ36)
CAARRKTGANNPFF

SEQ ID NO: 131400 - protein, 19 aa, Homo sapiens
  CDR3 for beta chain variable domain of TCR clone 65700 (TRBV7-2, TRBJ2-3)
CASSFLSRNWGGGTDTQYF

SEQ ID NO: 131401 - protein, 11 aa, Homo sapiens
  CDR3 for alpha chain variable domain of TCR clone 65701 (TRAV13-2, TRAJ45)
VTGGGADGLTF

SEQ ID NO: 131402 - protein, 17 aa, Homo sapiens
  CDR3 for beta chain variable domain of TCR clone 65701 (TRBV19, TRBJ1-1)
CASSIAGRGLMNTEAFL

SEQ ID NO: 131403 - protein, 16 aa, Homo sapiens
  CDR3 for alpha chain variable domain of TCR clone 65702 (TRAV3, TRAJ37)
CAVRGKGSGNTGKLIF

SEQ ID NO: 131404 - protein, 13 aa, Homo sapiens
  CDR3 for beta chain variable domain of TCR clone 65702 (TRBV7-2, TRBJ2-2)
CASSSVRARELFF

SEQ ID NO: 131405 - protein, 14 aa, Homo sapiens
  CDR3 for alpha chain variable domain of TCR clone 65703 (TRAV9-2, TRAJ39)
CALYIYNAGNMLTF

SEQ ID NO: 131406 - protein, 12 aa, Homo sapiens
  CDR3 for beta chain variable domain of TCR clone 65703 (TRBV14, TRBJ1-1)
CASSQLKGLAFF

SEQ ID NO: 131407 - protein, 12 aa, Homo sapiens
  CDR3 for alpha chain variable domain of TCR clone 65704 (TRAV12-3, TRAJ20)
CAMVRGDYKLSF

SEQ ID NO: 131408 - protein, 15 aa, Homo sapiens
  CDR3 for beta chain variable domain of TCR clone 65704 (TRBV9, TRBJ1-6)
CASSVAGTGDSPLHF

SEQ ID NO: 131409 - protein, 15 aa, Homo sapiens
  CDR3 for alpha chain variable domain of TCR clone 65705 (TRAV17, TRAJ45)
TSVLRKGGGADGLTF

SEQ ID NO: 131410 - protein, 15 aa, Homo sapiens
  CDR3 for beta chain variable domain of TCR clone 65705 (TRBV5-7, TRBJ1-5)
CASSYGKLWDQPQHF

SEQ ID NO: 131411 - protein, 16 aa, Homo sapiens
  CDR3 for alpha chain variable domain of TCR clone 65706 (TRAV21, TRAJ52)
CAVTNAGGTSYGKLTF

SEQ ID NO: 131412 - protein, 11 aa, Homo sapiens
  CDR3 for beta chain variable domain of TCR clone 65706 (TRBV11-2, TRBJ2-2)
CASSLPGELFF

SEQ ID NO: 131413 - protein, 15 aa, Homo sapiens
  CDR3 for alpha chain variable domain of TCR clone 65707 (TRAV26-1, TRAJ23)
CIVRVAGYQGGKLIF

SEQ ID NO: 131414 - protein, 18 aa, Homo sapiens
  CDR3 for beta chain variable domain of TCR clone 65707 (TRBV28, TRBJ2-1)
CARSSTSGRANSYNEQFF

SEQ ID NO: 131415 - protein, 16 aa, Homo sapiens
  CDR3 for alpha chain variable domain of TCR clone 65708 (TRAV3, TRAJ37)
CAARGKGSGNTGKLIF

SEQ ID NO: 131416 - protein, 13 aa, Homo sapiens
  CDR3 for beta chain variable domain of TCR clone 65708 (TRBV4-2, TRBJ1-1)
CASSQAGNTEAFF

SEQ ID NO: 131417 - protein, 14 aa, Homo sapiens
  CDR3 for alpha chain variable domain of TCR clone 65709 (TRAV20, TRAJ22)
SAVALGGSARQLTF

SEQ ID NO: 131418 - protein, 15 aa, Homo sapiens
  CDR3 for beta chain variable domain of TCR clone 65709 (TRBV7-2, TRBJ1-1)
CASSFAGDRDTEAFF

SEQ ID NO: 131419 - protein, 13 aa, Homo sapiens
  CDR3 for alpha chain variable domain of TCR clone 65710 (TRAV36/DV7, TRAJ49)
CAGDSNTGNQFYL

SEQ ID NO: 131420 - protein, 12 aa, Homo sapiens
  CDR3 for beta chain variable domain of TCR clone 65710 (TRBV11-2, TRBJ2-2)
CASSLGGGELFF

SEQ ID NO: 131421 - protein, 15 aa, Homo sapiens
  CDR3 for alpha chain variable domain of TCR clone 65711 (TRAV35, TRAJ40)
CAGQLWDSGTYKHIF

SEQ ID NO: 131422 - protein, 12 aa, Homo sapiens
  CDR3 for beta chain variable domain of TCR clone 65711 (TRBV7-8, TRBJ2-7)
CASSLAGYEQYF

SEQ ID NO: 131423 - protein, 14 aa, Homo sapiens
  CDR3 for alpha chain variable domain of TCR clone 65712 (TRAV16, TRAJ33)
CALSAMDSNYQLIW

SEQ ID NO: 131424 - protein, 16 aa, Homo sapiens
  CDR3 for beta chain variable domain of TCR clone 65712 (TRBV25-1, TRBJ2-7)
CASSELTGGGIYERYF

SEQ ID NO: 131425 - protein, 15 aa, Homo sapiens
  CDR3 for alpha chain variable domain of TCR clone 65713 (TRAV9-2, TRAJ49)
RALSPPDHTGNQFYF

SEQ ID NO: 131426 - protein, 14 aa, Homo sapiens
  CDR3 for beta chain variable domain of TCR clone 65713 (TRBV12-4, TRBJ1-1)
CASSLGTGGTEAFF

SEQ ID NO: 131427 - protein, 16 aa, Homo sapiens
  CDR3 for alpha chain variable domain of TCR clone 65714 (TRAV20, TRAJ10)
CAVLRGLTGGGNKLTF

SEQ ID NO: 131428 - protein, 13 aa, Homo sapiens
  CDR3 for beta chain variable domain of TCR clone 65714 (TRBV7-9, TRBJ1-2)
CASSLKQNYGYTF

SEQ ID NO: 131429 - protein, 13 aa, Homo sapiens
  CDR3 for alpha chain variable domain of TCR clone 65715 (TRAV8-4, TRAJ10)
CAAFTGGGNKLTF

SEQ ID NO: 131430 - protein, 15 aa, Homo sapiens
  CDR3 for beta chain variable domain of TCR clone 65715 (TRBV2, TRBJ2-3)
CASSDFEKDTDTQYF

SEQ ID NO: 131431 - protein, 12 aa, Homo sapiens
  CDR3 for alpha chain variable domain of TCR clone 65716 (TRAV27, TRAJ35)
CAGADFGNVLHC

SEQ ID NO: 131432 - protein, 13 aa, Homo sapiens
  CDR3 for beta chain variable domain of TCR clone 65716 (TRBV7-2, TRBJ2-7)
CASSSPSGSEQYF

SEQ ID NO: 131433 - protein, 21 aa, Homo sapiens
  CDR3 for alpha chain variable domain of TCR clone 65717 (TRAV1-1, TRAJ6)
CLLLLRGERLERTGESYIPTF

SEQ ID NO: 131434 - protein, 13 aa, Homo sapiens
  CDR3 for beta chain variable domain of TCR clone 65717 (TRBV10-2, TRBJ2-7)
CASGASGGYEQYF

SEQ ID NO: 131435 - protein, 14 aa, Homo sapiens
  CDR3 for alpha chain variable domain of TCR clone 65718 (TRAV12-2, TRAJ13)
CAVRRTGGYQKVTF

SEQ ID NO: 131436 - protein, 15 aa, Homo sapiens
  CDR3 for beta chain variable domain of TCR clone 65718 (TRBV27, TRBJ2-1)
CASSNGGGSSNEQFF

SEQ ID NO: 131437 - protein, 14 aa, Homo sapiens
  CDR3 for alpha chain variable domain of TCR clone 65719 (TRAV8-4, TRAJ45)
CASGGGGGADGHTF

SEQ ID NO: 131438 - protein, 13 aa, Homo sapiens
  CDR3 for beta chain variable domain of TCR clone 65719 (TRBV10-3, TRBJ2-7)
CASKLAVNYEQYF

SEQ ID NO: 131439 - protein, 12 aa, Homo sapiens
  CDR3 for alpha chain variable domain of TCR clone 65720 (TRAV8-3, TRAJ26)
CAGDNYGQNFVF

SEQ ID NO: 131440 - protein, 14 aa, Homo sapiens
  CDR3 for beta chain variable domain of TCR clone 65720 (TRBV7-8, TRBJ2-3)
CASSLEAGTDTQYF

SEQ ID NO: 131441 - protein, 14 aa, Homo sapiens
  CDR3 for alpha chain variable domain of TCR clone 65721 (TRAV8-2, TRAJ37)
CVVSISGNTGKLTF

SEQ ID NO: 131442 - protein, 17 aa, Homo sapiens
  CDR3 for beta chain variable domain of TCR clone 65721 (TRBV7-9, TRBJ2-3)
CASSPTVAGDLTDTQYF

SEQ ID NO: 131443 - protein, 12 aa, Homo sapiens
  CDR3 for alpha chain variable domain of TCR clone 65722 (TRAV27, TRAJ35)
GAGADFGNVLHC

SEQ ID NO: 131444 - protein, 16 aa, Homo sapiens
  CDR3 for beta chain variable domain of TCR clone 65722 (TRBV6-1, TRBJ2-1)
CASILRQGSSYNEQFF

SEQ ID NO: 131445 - protein, 16 aa, Homo sapiens
  CDR3 for alpha chain variable domain of TCR clone 65723 (TRAV30, TRAJ24)
CSTEIVDADSWGKFQF

SEQ ID NO: 131446 - protein, 14 aa, Homo sapiens
  CDR3 for beta chain variable domain of TCR clone 65723 (TRBV20-1, TRBJ1-3)
CSASPTGAGNTIYF

SEQ ID NO: 131447 - protein, 14 aa, Homo sapiens
  CDR3 for alpha chain variable domain of TCR clone 65724 (TRAV21, TRAJ21)
CAVGVEDNFNKFYF

SEQ ID NO: 131448 - protein, 15 aa, Homo sapiens
  CDR3 for beta chain variable domain of TCR clone 65724 (TRBV7-2, TRBJ2-1)
CASSSGLAGGNEQFF

SEQ ID NO: 131449 - protein, 12 aa, Homo sapiens
  CDR3 for alpha chain variable domain of TCR clone 65725 (TRAV16, TRAJ10)
CSRTGGGNKLTF

SEQ ID NO: 131450 - protein, 16 aa, Homo sapiens
  CDR3 for beta chain variable domain of TCR clone 65725 (TRBV6-5, TRBJ2-1)
CASSETLAGHYNEQFF

SEQ ID NO: 131451 - protein, 13 aa, Homo sapiens
  CDR3 for alpha chain variable domain of TCR clone 65726 (TRAV16, TRAJ10)
CAFLTGGGNKLTF

SEQ ID NO: 131452 - protein, 12 aa, Homo sapiens
  CDR3 for beta chain variable domain of TCR clone 65726 (TRBV28, TRBJ2-7)
CASTGNHYEQYF

SEQ ID NO: 131453 - protein, 13 aa, Homo sapiens
  CDR3 for alpha chain variable domain of TCR clone 65727 (TRAV23/DV6, TRAJ47)
CAASMTRGNKLGF

SEQ ID NO: 131454 - protein, 14 aa, Homo sapiens
  CDR3 for beta chain variable domain of TCR clone 65727 (TRBV7-3, TRBJ1-1)
CASSLKGGNTEAFF

SEQ ID NO: 131455 - protein, 14 aa, Homo sapiens
  CDR3 for alpha chain variable domain of TCR clone 65728 (TRAV27, TRAJ36)
CAGPPKRGANNLFF

SEQ ID NO: 131456 - protein, 15 aa, Homo sapiens
  CDR3 for beta chain variable domain of TCR clone 65728 (TRBV18, TRBJ2-7)
CARPPASTPNYEQYF

SEQ ID NO: 131457 - protein, 17 aa, Homo sapiens
  CDR3 for alpha chain variable domain of TCR clone 65729 (TRAV12-2, TRAJ53)
RAPLTDSQEGSNYKLTF

SEQ ID NO: 131458 - protein, 12 aa, Homo sapiens
  CDR3 for beta chain variable domain of TCR clone 65729 (TRBV11-2, TRBJ2-2)
CASSLGGGELFF

SEQ ID NO: 131459 - protein, 14 aa, Homo sapiens
  CDR3 for alpha chain variable domain of TCR clone 65730 (TRAV2, TRAJ9)
CAVEDRSGGFKTIF

SEQ ID NO: 131460 - protein, 21 aa, Homo sapiens
  CDR3 for beta chain variable domain of TCR clone 65730 (TRBV7-3, TRBJ2-5)
GGTQPCISVPAASGGGETQYF

SEQ ID NO: 131461 - protein, 17 aa, Homo sapiens
  CDR3 for alpha chain variable domain of TCR clone 65731 (TRAV26-1, TRAJ53)
CIVRVDDSGGSNYKLTF

SEQ ID NO: 131462 - protein, 15 aa, Homo sapiens
  CDR3 for beta chain variable domain of TCR clone 65731 (TRBV7-9, TRBJ1-5)
CASSQGHQPNQPQHF

SEQ ID NO: 131463 - protein, 15 aa, Homo sapiens
  CDR3 for alpha chain variable domain of TCR clone 65732 (TRAV17, TRAJ52)
CATEAGGTSFGKLTF

SEQ ID NO: 131464 - protein, 14 aa, Homo sapiens
  CDR3 for beta chain variable domain of TCR clone 65732 (TRBV28, TRBJ1-5)
CASSLGVLVKPQHF

SEQ ID NO: 131465 - protein, 14 aa, Homo sapiens
  CDR3 for alpha chain variable domain of TCR clone 65733 (TRAV8-3, TRAJ27)
CAGGRNTNAGKSTF

SEQ ID NO: 131466 - protein, 13 aa, Homo sapiens
  CDR3 for beta chain variable domain of TCR clone 65733 (TRBV7-3, TRBJ1-1)
CASSLTQGTEAFF

SEQ ID NO: 131467 - protein, 14 aa, Homo sapiens
  CDR3 for alpha chain variable domain of TCR clone 65734 (TRAV38-1, TRAJ29)
CAFITPSGNTPLVF

SEQ ID NO: 131468 - protein, 15 aa, Homo sapiens
  CDR3 for beta chain variable domain of TCR clone 65734 (TRBV5-1, TRBJ2-1)
CASSPPRAPYNEQSF

SEQ ID NO: 131469 - protein, 11 aa, Homo sapiens
  CDR3 for alpha chain variable domain of TCR clone 65735 (TRAV12-3, TRAJ43)
CALSVSNDMRF

SEQ ID NO: 131470 - protein, 13 aa, Homo sapiens
  CDR3 for beta chain variable domain of TCR clone 65735 (TRBV20-1, TRBJ1-1)
CSAPLGGGTEAFF

SEQ ID NO: 131471 - protein, 12 aa, Homo sapiens
  CDR3 for alpha chain variable domain of TCR clone 65736 (TRAV12-3, TRAJ20)
CAMVRGDYKLSF

SEQ ID NO: 131472 - protein, 15 aa, Homo sapiens
  CDR3 for beta chain variable domain of TCR clone 65736 (TRBV4-1, TRBJ1-4)
CASSDTGGTNEKLFF

SEQ ID NO: 131473 - protein, 17 aa, Homo sapiens
  CDR3 for alpha chain variable domain of TCR clone 65737 (TRAV8-6, TRAJ58)
CAVSSWVGETSGSRLTF

SEQ ID NO: 131474 - protein, 14 aa, Homo sapiens
  CDR3 for beta chain variable domain of TCR clone 65737 (TRBV4-2, TRBJ2-1)
CASGLDRAYNEQVF

SEQ ID NO: 131475 - protein, 17 aa, Homo sapiens
  CDR3 for alpha chain variable domain of TCR clone 65738 (TRAV13-1, TRAJ28)
CEASPPYSGAGSYQLTF

SEQ ID NO: 131476 - protein, 16 aa, Homo sapiens
  CDR3 for beta chain variable domain of TCR clone 65738 (TRBV19, TRBJ2-2)
CASRSPGTGATGELFF

SEQ ID NO: 131477 - protein, 14 aa, Homo sapiens
  CDR3 for alpha chain variable domain of TCR clone 65739 (TRAV21, TRAJ35)
CAVMPIGFGNVLHC

SEQ ID NO: 131478 - protein, 16 aa, Homo sapiens
  CDR3 for beta chain variable domain of TCR clone 65739 (TRBV12-5, TRBJ2-5)
CASGPRTSGNQETQYF

SEQ ID NO: 131479 - protein, 16 aa, Homo sapiens
  CDR3 for alpha chain variable domain of TCR clone 65740 (TRAV35, TRAJ37)
CWAFLLGSSNTGKLIF

SEQ ID NO: 131480 - protein, 13 aa, Homo sapiens
  CDR3 for beta chain variable domain of TCR clone 65740 (TRBV2, TRBJ1-2)
CASSVRGNYGYTF

SEQ ID NO: 131481 - protein, 14 aa, Homo sapiens
  CDR3 for alpha chain variable domain of TCR clone 65741 (TRAV12-2, TRAJ13)
CAVKKTGGYQKVTF

SEQ ID NO: 131482 - protein, 18 aa, Homo sapiens
  CDR3 for beta chain variable domain of TCR clone 65741 (TRBV24-1, TRBJ2-2)
CATSDSGQGTASTGELFF

SEQ ID NO: 131483 - protein, 14 aa, Homo sapiens
  CDR3 for alpha chain variable domain of TCR clone 65742 (TRAV17, TRAJ16)
CATADFSDGQKLLF

SEQ ID NO: 131484 - protein, 12 aa, Homo sapiens
  CDR3 for beta chain variable domain of TCR clone 65742 (TRBV24-1, TRBJ1-1)
RATLYPDTEAFF

SEQ ID NO: 131485 - protein, 11 aa, Homo sapiens
  CDR3 for alpha chain variable domain of TCR clone 65743 (TRAV12-1, TRAJ30)
CVGNGQDKIIF

SEQ ID NO: 131486 - protein, 12 aa, Homo sapiens
  CDR3 for beta chain variable domain of TCR clone 65743 (TRBV27, TRBJ2-2)
CASKLFTGELFF

SEQ ID NO: 131487 - protein, 18 aa, Homo sapiens
  CDR3 for alpha chain variable domain of TCR clone 65744 (TRAV12-3, TRAJ52)
CAMSVGGAGGTSYGKLTF

SEQ ID NO: 131488 - protein, 15 aa, Homo sapiens
  CDR3 for beta chain variable domain of TCR clone 65744 (TRBV7-9, TRBJ1-4)
CASSARTGGNEKLFF

SEQ ID NO: 131489 - protein, 14 aa, Homo sapiens
  CDR3 for alpha chain variable domain of TCR clone 65745 (TRAV1-2, TRAJ16)
CAVSRFSDGQKLLF

SEQ ID NO: 131490 - protein, 17 aa, Homo sapiens
  CDR3 for beta chain variable domain of TCR clone 65745 (TRBV20-1, TRBJ2-1)
CSASSSGLAGSYNEQFF

SEQ ID NO: 131491 - protein, 11 aa, Homo sapiens
  CDR3 for alpha chain variable domain of TCR clone 65746 (TRAV13-1, TRAJ34)
CAASETDKLIF

SEQ ID NO: 131492 - protein, 15 aa, Homo sapiens
  CDR3 for beta chain variable domain of TCR clone 65746 (TRBV18, TRBJ1-1)
CASSGRTGEVTEAFF

SEQ ID NO: 131493 - protein, 18 aa, Homo sapiens
  CDR3 for alpha chain variable domain of TCR clone 65747 (TRAV12-3, TRAJ52)
CAMSVGGAGGTSYGRLTF

SEQ ID NO: 131494 - protein, 14 aa, Homo sapiens
  CDR3 for beta chain variable domain of TCR clone 65747 (TRBV7-2, TRBJ2-7)
CASRSQGAAYEQYF

SEQ ID NO: 131495 - protein, 14 aa, Homo sapiens
  CDR3 for alpha chain variable domain of TCR clone 65748 (TRAV26-1, TRAJ45)
CVVRVVGGADGLTF

SEQ ID NO: 131496 - protein, 16 aa, Homo sapiens
  CDR3 for beta chain variable domain of TCR clone 65748 (TRBV7-9, TRBJ1-1)
CASSLTQVRSNTEAFF

SEQ ID NO: 131497 - protein, 14 aa, Homo sapiens
  CDR3 for alpha chain variable domain of TCR clone 65749 (TRAV12-3, TRAJ10)
SHLPLTGGGNKLTF

SEQ ID NO: 131498 - protein, 16 aa, Homo sapiens
  CDR3 for beta chain variable domain of TCR clone 65749 (TRBV5-1, TRBJ2-1)
CASGPWTSGEYNEQFF

SEQ ID NO: 131499 - protein, 15 aa, Homo sapiens
  CDR3 for alpha chain variable domain of TCR clone 65750 (TRAV12-1, TRAJ44)
CVADLPTGTASKLTF

SEQ ID NO: 131500 - protein, 13 aa, Homo sapiens
  CDR3 for beta chain variable domain of TCR clone 65750 (TRBV6-5, TRBJ2-5)
RASSPQGGETQYF

SEQ ID NO: 131501 - protein, 18 aa, Homo sapiens
  CDR3 for alpha chain variable domain of TCR clone 65751 (TRAV13-1, TRAJ10)
CAASKGRAGTGGGNKLTF

SEQ ID NO: 131502 - protein, 14 aa, Homo sapiens
  CDR3 for beta chain variable domain of TCR clone 65751 (TRBV18, TRBJ2-7)
CASSPRGGAYEQYF

SEQ ID NO: 131503 - protein, 15 aa, Homo sapiens
  CDR3 for alpha chain variable domain of TCR clone 65752 (TRAV12-1, TRAJ44)
CVVFVNTGTASKLTF

SEQ ID NO: 131504 - protein, 15 aa, Homo sapiens
  CDR3 for beta chain variable domain of TCR clone 65752 (TRBV11-2, TRBJ2-2)
CASRGLAANTGELFF

SEQ ID NO: 131505 - protein, 14 aa, Homo sapiens
  CDR3 for alpha chain variable domain of TCR clone 65753 (TRAV16, TRAJ54)
FALSGVQGAQKLVF

SEQ ID NO: 131506 - protein, 15 aa, Homo sapiens
  CDR3 for beta chain variable domain of TCR clone 65753 (TRBV18, TRBJ2-2)
CASSTSGLHTGELFF

SEQ ID NO: 131507 - protein, 18 aa, Homo sapiens
  CDR3 for alpha chain variable domain of TCR clone 65754 (TRAV12-3, TRAJ52)
CAMSVGGAGGTSYGKLTF

SEQ ID NO: 131508 - protein, 14 aa, Homo sapiens
  CDR3 for beta chain variable domain of TCR clone 65754 (TRBV7-2, TRBJ2-7)
CASRSQGAAYEKYF

SEQ ID NO: 131509 - protein, 19 aa, Homo sapiens
  CDR3 for alpha chain variable domain of TCR clone 65755 (TRAV2, TRAJ20)
ILPVREADAAVYRDCKLSF

SEQ ID NO: 131510 - protein, 13 aa, Homo sapiens
  CDR3 for beta chain variable domain of TCR clone 65755 (TRBV15, TRBJ1-6)
CATSGGLNSPLHF

SEQ ID NO: 131511 - protein, 17 aa, Homo sapiens
  CDR3 for alpha chain variable domain of TCR clone 65756 (TRAV26-1, TRAJ37)
WIVRVITVSSNTGKLIF

SEQ ID NO: 131512 - protein, 18 aa, Homo sapiens
  CDR3 for beta chain variable domain of TCR clone 65756 (TRBV11-2, TRBJ2-3)
CASSLGGASRGAPNTQYF

SEQ ID NO: 131513 - protein, 15 aa, Homo sapiens
  CDR3 for alpha chain variable domain of TCR clone 65757 (TRAV8-3, TRAJ32)
CAVGPYGGASNKLIF

SEQ ID NO: 131514 - protein, 14 aa, Homo sapiens
  CDR3 for beta chain variable domain of TCR clone 65757 (TRBV29-1, TRBJ2-2)
CSVLAETNTGELFF

SEQ ID NO: 131515 - protein, 13 aa, Homo sapiens
  CDR3 for alpha chain variable domain of TCR clone 65758 (TRAV21, TRAJ20)
CAVGLRVDYKLSF

SEQ ID NO: 131516 - protein, 16 aa, Homo sapiens
  CDR3 for beta chain variable domain of TCR clone 65758 (TRBV25-1, TRBJ1-1)
CASSGDRDRGRIEAFF

SEQ ID NO: 131517 - protein, 15 aa, Homo sapiens
  CDR3 for alpha chain variable domain of TCR clone 65759 (TRAV12-1, TRAJ44)
CVADLPTGTASKLTF

SEQ ID NO: 131518 - protein, 16 aa, Homo sapiens
  CDR3 for beta chain variable domain of TCR clone 65759 (TRBV19, TRBJ2-3)
CASSPEWDRGTDTQYF

SEQ ID NO: 131519 - protein, 15 aa, Homo sapiens
  CDR3 for alpha chain variable domain of TCR clone 65760 (TRAV35, TRAJ23)
CAGQRGYNQGGKPIF

SEQ ID NO: 131520 - protein, 16 aa, Homo sapiens
  CDR3 for beta chain variable domain of TCR clone 65760 (TRBV27, TRBJ2-1)
CASSSRLAGKYNEQFF

SEQ ID NO: 131521 - protein, 14 aa, Homo sapiens
  CDR3 for alpha chain variable domain of TCR clone 65761 (TRAV12-2, TRAJ13)
CAVKETGGYQKVTF

SEQ ID NO: 131522 - protein, 14 aa, Homo sapiens
  CDR3 for beta chain variable domain of TCR clone 65761 (TRBV7-2, TRBJ2-7)
CASSPKTSFYEQYF

SEQ ID NO: 131523 - protein, 12 aa, Homo sapiens
  CDR3 for alpha chain variable domain of TCR clone 65762 (TRAV30, TRAJ20)
CGTENNDYKLSF

SEQ ID NO: 131524 - protein, 15 aa, Homo sapiens
  CDR3 for beta chain variable domain of TCR clone 65762 (TRBV20-1, TRBJ2-7)
CSARDRVSGMDEQYF

SEQ ID NO: 131525 - protein, 12 aa, Homo sapiens
  CDR3 for alpha chain variable domain of TCR clone 65763 (TRAV20, TRAJ37)
CALPSNTGKLIF

SEQ ID NO: 131526 - protein, 14 aa, Homo sapiens
  CDR3 for beta chain variable domain of TCR clone 65763 (TRBV19, TRBJ2-1)
CASPTFVVSGEQFF

SEQ ID NO: 131527 - protein, 23 aa, Homo sapiens
  CDR3 for alpha chain variable domain of TCR clone 65764 (TRAV26-1, TRAJ38)
CIADNAGNNHIQNPDPAVYQLRN

SEQ ID NO: 131528 - protein, 12 aa, Homo sapiens
  CDR3 for beta chain variable domain of TCR clone 65764 (TRBV11-2, TRBJ2-2)
CASSLGGGELFF

SEQ ID NO: 131529 - protein, 12 aa, Homo sapiens
  CDR3 for alpha chain variable domain of TCR clone 65765 (TRAV8-4, TRAJ37)
CAKSSNTGKLIF

SEQ ID NO: 131530 - protein, 15 aa, Homo sapiens
  CDR3 for beta chain variable domain of TCR clone 65765 (TRBV7-9, TRBJ2-7)
CASGSSGLAVYEQYF

SEQ ID NO: 131531 - protein, 16 aa, Homo sapiens
  CDR3 for alpha chain variable domain of TCR clone 65766 (TRAV1-2, TRAJ10)
CAVRGVLTGGGNKLTF

SEQ ID NO: 131532 - protein, 13 aa, Homo sapiens
  CDR3 for beta chain variable domain of TCR clone 65766 (TRBV7-2, TRBJ2-7)
CASSSPSGSEQYF

SEQ ID NO: 131533 - protein, 14 aa, Homo sapiens
  CDR3 for alpha chain variable domain of TCR clone 65767 (TRAV1-2, TRAJ16)
CAVNRFSDGQKLLF

SEQ ID NO: 131534 - protein, 14 aa, Homo sapiens
  CDR3 for beta chain variable domain of TCR clone 65767 (TRBV13, TRBJ2-5)
CASSLGPRGETQYF

SEQ ID NO: 131535 - protein, 12 aa, Homo sapiens
  CDR3 for alpha chain variable domain of TCR clone 65768 (TRAV26-1, TRAJ26)
CIVFIYGQNFVF

SEQ ID NO: 131536 - protein, 13 aa, Homo sapiens
  CDR3 for beta chain variable domain of TCR clone 65768 (TRBV27, TRBJ1-1)
CASSLSSGAEAFF

SEQ ID NO: 131537 - protein, 15 aa, Homo sapiens
  CDR3 for alpha chain variable domain of TCR clone 65769 (TRAV8-3, TRAJ7)
CAVGSISYGNNRLAF

SEQ ID NO: 131538 - protein, 15 aa, Homo sapiens
  CDR3 for beta chain variable domain of TCR clone 65769 (TRBV4-2, TRBJ1-1)
RASSQEDLPRTEAFF

SEQ ID NO: 131539 - protein, 14 aa, Homo sapiens
  CDR3 for alpha chain variable domain of TCR clone 65770 (TRAV12-3, TRAJ10)
SHLPLTGGGNKLTF

SEQ ID NO: 131540 - protein, 16 aa, Homo sapiens
  CDR3 for beta chain variable domain of TCR clone 65770 (TRBV7-2, TRBJ2-3)
CASSLVALYSTDTQYF

SEQ ID NO: 131541 - protein, 13 aa, Homo sapiens
  CDR3 for alpha chain variable domain of TCR clone 65771 (TRAV17, TRAJ54)
CATVIQGAQKLVF

SEQ ID NO: 131542 - protein, 15 aa, Homo sapiens
  CDR3 for beta chain variable domain of TCR clone 65771 (TRBV13, TRBJ2-1)
CASSLLSGLNNERFF

SEQ ID NO: 131543 - protein, 13 aa, Homo sapiens
  CDR3 for alpha chain variable domain of TCR clone 65772 (TRAV1-1, TRAJ13)
CAAYSGGYQKVTF

SEQ ID NO: 131544 - protein, 15 aa, Homo sapiens
  CDR3 for beta chain variable domain of TCR clone 65772 (TRBV20-1, TRBJ2-7)
CSARDRVSGMDEQYF

SEQ ID NO: 131545 - protein, 13 aa, Homo sapiens
  CDR3 for alpha chain variable domain of TCR clone 65773 (TRAV12-3, TRAJ7)
CAMTPYGNKRLAF

SEQ ID NO: 131546 - protein, 16 aa, Homo sapiens
  CDR3 for beta chain variable domain of TCR clone 65773 (TRBV20-1, TRBJ1-4)
CSARPYGGGLNEKLFF

SEQ ID NO: 131547 - protein, 13 aa, Homo sapiens
  CDR3 for alpha chain variable domain of TCR clone 65774 (TRAV26-1, TRAJ33)
CIVRVEGNYQLIW

SEQ ID NO: 131548 - protein, 16 aa, Homo sapiens
  CDR3 for beta chain variable domain of TCR clone 65774 (TRBV15, TRBJ2-7)
CATSSDRGRRRGEQYF

SEQ ID NO: 131549 - protein, 17 aa, Homo sapiens
  CDR3 for alpha chain variable domain of TCR clone 65775 (TRAV26-1, TRAJ53)
CIVRVDDSGGSNYKLTF

SEQ ID NO: 131550 - protein, 14 aa, Homo sapiens
  CDR3 for beta chain variable domain of TCR clone 65775 (TRBV7-9, TRBJ2-7)
CASSLDRPTDEQYF

SEQ ID NO: 131551 - protein, 15 aa, Homo sapiens
  CDR3 for alpha chain variable domain of TCR clone 65776 (TRAV4, TRAJ26)
CLVGDINNYGQNFVF

SEQ ID NO: 131552 - protein, 16 aa, Homo sapiens
  CDR3 for beta chain variable domain of TCR clone 65776 (TRBV28, TRBJ1-4)
CASSSRTGAANEKLFF

SEQ ID NO: 131553 - protein, 12 aa, Homo sapiens
  CDR3 for alpha chain variable domain of TCR clone 65777 (TRAV13-1, TRAJ48)
CAANFGNEKLNF

SEQ ID NO: 131554 - protein, 13 aa, Homo sapiens
  CDR3 for beta chain variable domain of TCR clone 65777 (TRBV7-3, TRBJ1-1)
CASSQDWGAEAFF

SEQ ID NO: 131555 - protein, 14 aa, Homo sapiens
  CDR3 for alpha chain variable domain of TCR clone 65778 (TRAV13-1, TRAJ9)
CAASALTGGFKTIF

SEQ ID NO: 131556 - protein, 16 aa, Homo sapiens
  CDR3 for beta chain variable domain of TCR clone 65778 (TRBV12-5, TRBJ2-5)
CASGPRTSGNQETQYF

SEQ ID NO: 131557 - protein, 14 aa, Homo sapiens
  CDR3 for alpha chain variable domain of TCR clone 65779 (TRAV12-2, TRAJ6)
CASKWGGGSYIPTF

SEQ ID NO: 131558 - protein, 13 aa, Homo sapiens
  CDR3 for beta chain variable domain of TCR clone 65779 (TRBV2, TRBJ1-1)
CASSEGGKTEAFF

SEQ ID NO: 131559 - protein, 15 aa, Homo sapiens
  CDR3 for alpha chain variable domain of TCR clone 65780 (TRAV12-3, TRAJ6)
CAMSATTGGSHIPTF

SEQ ID NO: 131560 - protein, 16 aa, Homo sapiens
  CDR3 for beta chain variable domain of TCR clone 65780 (TRBV20-1, TRBJ1-2)
CSASMGQGVATYGYTF

SEQ ID NO: 131561 - protein, 12 aa, Homo sapiens
  CDR3 for alpha chain variable domain of TCR clone 65781 (TRAV12-3, TRAJ17)
YAMTLTGNKLTF

SEQ ID NO: 131562 - protein, 13 aa, Homo sapiens
  CDR3 for beta chain variable domain of TCR clone 65781 (TRBV27, TRBJ2-1)
CASRTLGVGEQFF

SEQ ID NO: 131563 - protein, 16 aa, Homo sapiens
  CDR3 for alpha chain variable domain of TCR clone 65782 (TRAV23/DV6, TRAJ9)
CAASIGGNTGGFKTIF

SEQ ID NO: 131564 - protein, 16 aa, Homo sapiens
  CDR3 for beta chain variable domain of TCR clone 65782 (TRBV11-2, TRBJ1-2)
CASSLDTGGADYGYTF

SEQ ID NO: 131565 - protein, 13 aa, Homo sapiens
  CDR3 for alpha chain variable domain of TCR clone 65783 (TRAV12-1, TRAJ7)
CVVNMRGNNRLAF

SEQ ID NO: 131566 - protein, 13 aa, Homo sapiens
  CDR3 for beta chain variable domain of TCR clone 65783 (TRBV6-5, TRBJ2-7)
CASRGRGGYEQYF

SEQ ID NO: 131567 - protein, 16 aa, Homo sapiens
  CDR3 for alpha chain variable domain of TCR clone 65784 (TRAV30, TRAJ24)
CGTEIVDADSWGKFQF

SEQ ID NO: 131568 - protein, 19 aa, Homo sapiens
  CDR3 for beta chain variable domain of TCR clone 65784 (TRBV7-9, TRBJ2-6)
CASSLESATVLPGANVLTF

SEQ ID NO: 131569 - protein, 13 aa, Homo sapiens
  CDR3 for alpha chain variable domain of TCR clone 65785 (TRAV27, TRAJ16)
CAGACSDGQKLPF

SEQ ID NO: 131570 - protein, 14 aa, Homo sapiens
  CDR3 for beta chain variable domain of TCR clone 65785 (TRBV11-2, TRBJ1-3)
CASSLAVPGNTIYF

SEQ ID NO: 131571 - protein, 14 aa, Homo sapiens
  CDR3 for alpha chain variable domain of TCR clone 65786 (TRAV12-1, TRAJ10)
CVVNSAGGGNKLTF

SEQ ID NO: 131572 - protein, 14 aa, Homo sapiens
  CDR3 for beta chain variable domain of TCR clone 65786 (TRBV12-4, TRBJ1-1)
CASSLGKGGTEAFF

SEQ ID NO: 131573 - protein, 15 aa, Homo sapiens
  CDR3 for alpha chain variable domain of TCR clone 65787 (TRAV8-3, TRAJ27)
CAVGHSKTNAGKSTF

SEQ ID NO: 131574 - protein, 15 aa, Homo sapiens
  CDR3 for beta chain variable domain of TCR clone 65787 (TRBV7-2, TRBJ2-1)
CASSSGLARGNEQFF

SEQ ID NO: 131575 - protein, 15 aa, Homo sapiens
  CDR3 for alpha chain variable domain of TCR clone 65788 (TRAV17, TRAJ57)
CATGPSQGGSEKLVF

SEQ ID NO: 131576 - protein, 14 aa, Homo sapiens
  CDR3 for beta chain variable domain of TCR clone 65788 (TRBV18, TRBJ2-7)
CASSPRGGSYEQYF

SEQ ID NO: 131577 - protein, 12 aa, Homo sapiens
  CDR3 for alpha chain variable domain of TCR clone 65789 (TRAV12-3, TRAJ3)
CAIDSSASKIIF

SEQ ID NO: 131578 - protein, 15 aa, Homo sapiens
  CDR3 for beta chain variable domain of TCR clone 65789 (TRBV5-1, TRBJ1-2)
CASSYPGTGSSGYTF

SEQ ID NO: 131579 - protein, 16 aa, Homo sapiens
  CDR3 for alpha chain variable domain of TCR clone 65790 (TRAV3, TRAJ10)
RAVRDMRAGGGNKLTF

SEQ ID NO: 131580 - protein, 19 aa, Homo sapiens
  CDR3 for beta chain variable domain of TCR clone 65790 (TRBV6-3, TRBJ1-2)
CASSYSKGRTGPPNYGYTF

SEQ ID NO: 131581 - protein, 11 aa, Homo sapiens
  CDR3 for alpha chain variable domain of TCR clone 65791 (TRAV3, TRAJ21)
CAVGNFNKFYF

SEQ ID NO: 131582 - protein, 15 aa, Homo sapiens
  CDR3 for beta chain variable domain of TCR clone 65791 (TRBV27, TRBJ2-5)
CASSLYPRGGETQYF

SEQ ID NO: 131583 - protein, 13 aa, Homo sapiens
  CDR3 for alpha chain variable domain of TCR clone 65792 (TRAV12-3, TRAJ33)
CAMSVNSNYQLIW

SEQ ID NO: 131584 - protein, 11 aa, Homo sapiens
  CDR3 for beta chain variable domain of TCR clone 65792 (TRBV19, TRBJ1-1)
CASSIGSEAFF

SEQ ID NO: 131585 - protein, 13 aa, Homo sapiens
  CDR3 for alpha chain variable domain of TCR clone 65793 (TRAV1-1, TRAJ9)
CAAKKTGGFKTIF

SEQ ID NO: 131586 - protein, 14 aa, Homo sapiens
  CDR3 for beta chain variable domain of TCR clone 65793 (TRBV20-1, TRBJ2-1)
CSAQIGGSANEQFF

SEQ ID NO: 131587 - protein, 14 aa, Homo sapiens
  CDR3 for alpha chain variable domain of TCR clone 65794 (TRAV13-1, TRAJ10)
CAALFTGGGNKLTF

SEQ ID NO: 131588 - protein, 15 aa, Homo sapiens
  CDR3 for beta chain variable domain of TCR clone 65794 (TRBV10-3, TRBJ2-2)
CAISEGDMAAGELFF

SEQ ID NO: 131589 - protein, 11 aa, Homo sapiens
  CDR3 for alpha chain variable domain of TCR clone 65795 (TRAV21, TRAJ34)
CAHYNTDKLIF

SEQ ID NO: 131590 - protein, 13 aa, Homo sapiens
  CDR3 for beta chain variable domain of TCR clone 65795 (TRBV7-6, TRBJ1-2)
CASSLVTDYGYTF

SEQ ID NO: 131591 - protein, 15 aa, Homo sapiens
  CDR3 for alpha chain variable domain of TCR clone 65796 (TRAV29/DV5, TRAJ29)
CAASERSSGNTPLVF

SEQ ID NO: 131592 - protein, 16 aa, Homo sapiens
  CDR3 for beta chain variable domain of TCR clone 65796 (TRBV19, TRBJ2-1)
CASSKAGPSSYNEQFF

SEQ ID NO: 131593 - protein, 18 aa, Homo sapiens
  CDR3 for alpha chain variable domain of TCR clone 65797 (TRAV35, TRAJ28)
CAGHNYPLSGAGSYQLTF

SEQ ID NO: 131594 - protein, 12 aa, Homo sapiens
  CDR3 for beta chain variable domain of TCR clone 65797 (TRBV7-9, TRBJ1-1)
CASSLEGTDAFF

SEQ ID NO: 131595 - protein, 11 aa, Homo sapiens
  CDR3 for alpha chain variable domain of TCR clone 65798 (TRAV12-1, TRAJ43)
CVEYDNNDMRF

SEQ ID NO: 131596 - protein, 16 aa, Homo sapiens
  CDR3 for beta chain variable domain of TCR clone 65798 (TRBV20-1, TRBJ1-4)
CSAPGQGLLTNEKLFF

SEQ ID NO: 131597 - protein, 14 aa, Homo sapiens
  CDR3 for alpha chain variable domain of TCR clone 65799 (TRAV3, TRAJ7)
CAVREEEREQQTRF

SEQ ID NO: 131598 - protein, 15 aa, Homo sapiens
  CDR3 for beta chain variable domain of TCR clone 65799 (TRBV20-1, TRBJ2-7)
CSARDRVSGMDEQYF

SEQ ID NO: 131599 - protein, 13 aa, Homo sapiens
  CDR3 for alpha chain variable domain of TCR clone 65800 (TRAV8-1, TRAJ30)
CAVIMNRDDKIIF

SEQ ID NO: 131600 - protein, 14 aa, Homo sapiens
  CDR3 for beta chain variable domain of TCR clone 65800 (TRBV7-2, TRBJ1-6)
CASSLQGANSPLNF

SEQ ID NO: 131601 - protein, 15 aa, Homo sapiens
  CDR3 for alpha chain variable domain of TCR clone 65801 (TRAV26-1, TRAJ56)
CIVGVDNGANSKLTF

SEQ ID NO: 131602 - protein, 15 aa, Homo sapiens
  CDR3 for beta chain variable domain of TCR clone 65801 (TRBV20-1, TRBJ2-7)
CSARDPTEVGHEQYF

SEQ ID NO: 131603 - protein, 11 aa, Homo sapiens
  CDR3 for alpha chain variable domain of TCR clone 65802 (TRAV13-1, TRAJ40)
CAVSVTYKYIF

SEQ ID NO: 131604 - protein, 16 aa, Homo sapiens
  CDR3 for beta chain variable domain of TCR clone 65802 (TRBV10-3, TRBJ2-3)
CAISVSRLALTDTQYF

SEQ ID NO: 131605 - protein, 13 aa, Homo sapiens
  CDR3 for alpha chain variable domain of TCR clone 65803 (TRAV17, TRAJ9)
CATDYTGGFKIIF

SEQ ID NO: 131606 - protein, 16 aa, Homo sapiens
  CDR3 for beta chain variable domain of TCR clone 65803 (TRBV7-7, TRBJ2-1)
CASSLASGTSYNEQFF

SEQ ID NO: 131607 - protein, 15 aa, Homo sapiens
  CDR3 for alpha chain variable domain of TCR clone 65804 (TRAV21, TRAJ24)
CAARSSTDSWGKLQL

SEQ ID NO: 131608 - protein, 14 aa, Homo sapiens
  CDR3 for beta chain variable domain of TCR clone 65804 (TRBV11-2, TRBJ2-5)
CASSRTGGIETQYF

SEQ ID NO: 131609 - protein, 14 aa, Homo sapiens
  CDR3 for alpha chain variable domain of TCR clone 65805 (TRAV3, TRAJ21)
CAVESHANFNKFYF

SEQ ID NO: 131610 - protein, 18 aa, Homo sapiens
  CDR3 for beta chain variable domain of TCR clone 65805 (TRBV7-9, TRBJ2-1)
CASSLAVSGTSGRNEQFF

SEQ ID NO: 131611 - protein, 14 aa, Homo sapiens
  CDR3 for alpha chain variable domain of TCR clone 65806 (TRAV3, TRAJ7)
CAVREEEREQQTRF

SEQ ID NO: 131612 - protein, 12 aa, Homo sapiens
  CDR3 for beta chain variable domain of TCR clone 65806 (TRBV29-1, TRBJ2-3)
CSVTGGADTQYF

SEQ ID NO: 131613 - protein, 12 aa, Homo sapiens
  CDR3 for alpha chain variable domain of TCR clone 65807 (TRAV3, TRAJ26)
CAVRDYGQNFVF

SEQ ID NO: 131614 - protein, 13 aa, Homo sapiens
  CDR3 for beta chain variable domain of TCR clone 65807 (TRBV7-7, TRBJ2-5)
CASSRSGQETQYF

SEQ ID NO: 131615 - protein, 14 aa, Homo sapiens
  CDR3 for alpha chain variable domain of TCR clone 65808 (TRAV8-4, TRAJ34)
CAVSDLGDTDKLIF

SEQ ID NO: 131616 - protein, 14 aa, Homo sapiens
  CDR3 for beta chain variable domain of TCR clone 65808 (TRBV20-1, TRBJ2-5)
CSARDGRAGETQYF

SEQ ID NO: 131617 - protein, 18 aa, Homo sapiens
  CDR3 for alpha chain variable domain of TCR clone 65809 (TRAV36/DV7, TRAJ13)
CCGSGDPVRMGGYQKVTF

SEQ ID NO: 131618 - protein, 15 aa, Homo sapiens
  CDR3 for beta chain variable domain of TCR clone 65809 (TRBV19, TRBJ2-1)
CASSTGTSSYNEQFF

SEQ ID NO: 131619 - protein, 12 aa, Homo sapiens
  CDR3 for alpha chain variable domain of TCR clone 65810 (TRAV2, TRAJ9)
CAVGAGGFKTIF

SEQ ID NO: 131620 - protein, 13 aa, Homo sapiens
  CDR3 for beta chain variable domain of TCR clone 65810 (TRBV2, TRBJ1-4)
CASNRGTNEKLFF

SEQ ID NO: 131621 - protein, 23 aa, Homo sapiens
  CDR3 for alpha chain variable domain of TCR clone 65811 (TRAV12-2, TRAJ22)
CAVSFRVHPGPPIVPGSARQLTF

SEQ ID NO: 131622 - protein, 13 aa, Homo sapiens
  CDR3 for beta chain variable domain of TCR clone 65811 (TRBV12-4, TRBJ1-2)
CASSLDSNYGYTF

SEQ ID NO: 131623 - protein, 12 aa, Homo sapiens
  CDR3 for alpha chain variable domain of TCR clone 65812 (TRAV12-1, )
CVVNSWISRTLT

SEQ ID NO: 131624 - protein, 11 aa, Homo sapiens
  CDR3 for beta chain variable domain of TCR clone 65812 (TRBV6-3, TRBJ2-3)
CATGQADTLYF

SEQ ID NO: 131625 - protein, 14 aa, Homo sapiens
  CDR3 for alpha chain variable domain of TCR clone 65813 (TRAV29/DV5, TRAJ36)
CAARCKTGANNLFF

SEQ ID NO: 131626 - protein, 12 aa, Homo sapiens
  CDR3 for beta chain variable domain of TCR clone 65813 (TRBV12-5, TRBJ2-5)
CASGQGVETQYF

SEQ ID NO: 131627 - protein, 14 aa, Homo sapiens
  CDR3 for alpha chain variable domain of TCR clone 65814 (TRAV1-1, TRAJ34)
CAVSPGYNTDKLIF

SEQ ID NO: 131628 - protein, 15 aa, Homo sapiens
  CDR3 for beta chain variable domain of TCR clone 65814 (TRBV6-3, TRBJ2-7)
CASSSPGTVFYEQYF

SEQ ID NO: 131629 - protein, 12 aa, Homo sapiens
  CDR3 for alpha chain variable domain of TCR clone 65815 (TRAV12-3, TRAJ17)
CAMTLTGNKLTF

SEQ ID NO: 131630 - protein, 15 aa, Homo sapiens
  CDR3 for beta chain variable domain of TCR clone 65815 (TRBV20-1, TRBJ2-7)
CSARDQVSGMDKQYF

SEQ ID NO: 131631 - protein, 11 aa, Homo sapiens
  CDR3 for alpha chain variable domain of TCR clone 65816 (TRAV17, TRAJ36)
CAPTGANNLFF

SEQ ID NO: 131632 - protein, 12 aa, Homo sapiens
  CDR3 for beta chain variable domain of TCR clone 65816 (TRBV29-1, TRBJ2-3)
GSVTGGADTQYF

SEQ ID NO: 131633 - protein, 13 aa, Homo sapiens
  CDR3 for alpha chain variable domain of TCR clone 65817 (TRAV38-1, TRAJ42)
CARWGGSQGNRIF

SEQ ID NO: 131634 - protein, 10 aa, Homo sapiens
  CDR3 for beta chain variable domain of TCR clone 65817 (TRBV2, TRBJ2-5)
CASSAATQYF

SEQ ID NO: 131635 - protein, 12 aa, Homo sapiens
  CDR3 for alpha chain variable domain of TCR clone 65818 (TRAV23/DV6, TRAJ24)
CAANDSRGKLQF

SEQ ID NO: 131636 - protein, 16 aa, Homo sapiens
  CDR3 for beta chain variable domain of TCR clone 65818 (TRBV12-4, TRBJ2-5)
CASSLSTSGGKETQYF

SEQ ID NO: 131637 - protein, 12 aa, Homo sapiens
  CDR3 for alpha chain variable domain of TCR clone 65819 (TRAV16, TRAJ21)
CALLGNFNKFYF

SEQ ID NO: 131638 - protein, 15 aa, Homo sapiens
  CDR3 for beta chain variable domain of TCR clone 65819 (TRBV3-1, TRBJ2-2)
CASSQAVGETGELFF

SEQ ID NO: 131639 - protein, 16 aa, Homo sapiens
  CDR3 for alpha chain variable domain of TCR clone 65820 (TRAV12-3, TRAJ53)
CAMSPGSGGSNYKLTF

SEQ ID NO: 131640 - protein, 15 aa, Homo sapiens
  CDR3 for beta chain variable domain of TCR clone 65820 (TRBV19, TRBJ1-1)
CASTSGQIQNTEAFF

SEQ ID NO: 131641 - protein, 14 aa, Homo sapiens
  CDR3 for alpha chain variable domain of TCR clone 65821 (TRAV26-1, TRAJ45)
CIEVTVGGADGLTF

SEQ ID NO: 131642 - protein, 13 aa, Homo sapiens
  CDR3 for beta chain variable domain of TCR clone 65821 (TRBV7-6, TRBJ1-2)
CASSLVADYGYTF

SEQ ID NO: 131643 - protein, 14 aa, Homo sapiens
  CDR3 for alpha chain variable domain of TCR clone 65822 (TRAV38-1, TRAJ35)
CAFLTMGFGNVLHC

SEQ ID NO: 131644 - protein, 17 aa, Homo sapiens
  CDR3 for beta chain variable domain of TCR clone 65822 (TRBV28, TRBJ1-1)
CASSGDLRTESNTEAFF

SEQ ID NO: 131645 - protein, 16 aa, Homo sapiens
  CDR3 for alpha chain variable domain of TCR clone 65823 (TRAV20, TRAJ22)
CAVQASSSGSARQLTF

SEQ ID NO: 131646 - protein, 14 aa, Homo sapiens
  CDR3 for beta chain variable domain of TCR clone 65823 (TRBV18, TRBJ2-5)
CASSPGVSQETQYF

SEQ ID NO: 131647 - protein, 13 aa, Homo sapiens
  CDR3 for alpha chain variable domain of TCR clone 65824 (TRAV12-3, TRAJ7)
CAMTPYGNNRLAF

SEQ ID NO: 131648 - protein, 16 aa, Homo sapiens
  CDR3 for beta chain variable domain of TCR clone 65824 (TRBV20-1, TRBJ1-4)
CSARPYGGELNEKLSF

SEQ ID NO: 131649 - protein, 23 aa, Homo sapiens
  CDR3 for alpha chain variable domain of TCR clone 65825 (TRAV26-1, TRAJ38)
CIADNAGNNHIQNPDPAVYQLRD

SEQ ID NO: 131650 - protein, 15 aa, Homo sapiens
  CDR3 for beta chain variable domain of TCR clone 65825 (TRBV28, TRBJ2-1)
CASSLDTSSYNEQFF

SEQ ID NO: 131651 - protein, 14 aa, Homo sapiens
  CDR3 for alpha chain variable domain of TCR clone 65826 (TRAV12-3, TRAJ10)
SHLPLTEGGNRLTF

SEQ ID NO: 131652 - protein, 14 aa, Homo sapiens
  CDR3 for beta chain variable domain of TCR clone 65826 (TRBV6-1, TRBJ1-3)
CASVQGGGGNTIYF

SEQ ID NO: 131653 - protein, 15 aa, Homo sapiens
  CDR3 for alpha chain variable domain of TCR clone 65827 (TRAV38-1, TRAJ45)
CAFMKGGGGADGLTF

SEQ ID NO: 131654 - protein, 13 aa, Homo sapiens
  CDR3 for beta chain variable domain of TCR clone 65827 (TRBV7-9, TRBJ1-2)
CASSVKQNYGYTF

SEQ ID NO: 131655 - protein, 12 aa, Homo sapiens
  CDR3 for alpha chain variable domain of TCR clone 65828 (TRAV36/DV7, TRAJ54)
CAVVRGAQKLVF

SEQ ID NO: 131656 - protein, 14 aa, Homo sapiens
  CDR3 for beta chain variable domain of TCR clone 65828 (TRBV7-3, TRBJ1-1)
CASSLKAGNTEAFF

SEQ ID NO: 131657 - protein, 16 aa, Homo sapiens
  CDR3 for alpha chain variable domain of TCR clone 65829 (TRAV8-3, TRAJ13)
CAVGAYPSGGYQKVTF

SEQ ID NO: 131658 - protein, 15 aa, Homo sapiens
  CDR3 for beta chain variable domain of TCR clone 65829 (TRBV19, TRBJ1-5)
CASSIVWEDNQPQHF

SEQ ID NO: 131659 - protein, 14 aa, Homo sapiens
  CDR3 for alpha chain variable domain of TCR clone 65830 (TRAV1-2, TRAJ16)
CAVNRFSDGQKLLF

SEQ ID NO: 131660 - protein, 15 aa, Homo sapiens
  CDR3 for beta chain variable domain of TCR clone 65830 (TRBV10-1, TRBJ2-1)
CASSELRGTYNEQFF

SEQ ID NO: 131661 - protein, 15 aa, Homo sapiens
  CDR3 for alpha chain variable domain of TCR clone 65831 (TRAV20, TRAJ58)
CAVQDLETSGSRLTF

SEQ ID NO: 131662 - protein, 13 aa, Homo sapiens
  CDR3 for beta chain variable domain of TCR clone 65831 (TRBV20-1, TRBJ1-1)
CSARGGGNTEAFL

SEQ ID NO: 131663 - protein, 14 aa, Homo sapiens
  CDR3 for alpha chain variable domain of TCR clone 65832 (TRAV1-2, TRAJ8)
CAVRGDTGFQKLVF

SEQ ID NO: 131664 - protein, 16 aa, Homo sapiens
  CDR3 for beta chain variable domain of TCR clone 65832 (TRBV19, TRBJ2-1)
CASGKAGPSSYNEQFF

SEQ ID NO: 131665 - protein, 14 aa, Homo sapiens
  CDR3 for alpha chain variable domain of TCR clone 65833 (TRAV29/DV5, TRAJ37)
CAASGSGNTGKLIF

SEQ ID NO: 131666 - protein, 13 aa, Homo sapiens
  CDR3 for beta chain variable domain of TCR clone 65833 (TRBV2, TRBJ2-3)
CASILAGGQGQYF

SEQ ID NO: 131667 - protein, 12 aa, Homo sapiens
  CDR3 for alpha chain variable domain of TCR clone 65834 (TRAV1-1, TRAJ23)
CAVTNQGGKLIF

SEQ ID NO: 131668 - protein, 15 aa, Homo sapiens
  CDR3 for beta chain variable domain of TCR clone 65834 (TRBV3-1, TRBJ2-7)
CASSQVRQGAYEQYS

SEQ ID NO: 131669 - protein, 14 aa, Homo sapiens
  CDR3 for alpha chain variable domain of TCR clone 65835 (TRAV13-1, TRAJ35)
CAASKGGFGNVLHC

SEQ ID NO: 131670 - protein, 12 aa, Homo sapiens
  CDR3 for beta chain variable domain of TCR clone 65835 (TRBV7-9, TRBJ2-7)
CASSLEGYEQYF

SEQ ID NO: 131671 - protein, 15 aa, Homo sapiens
  CDR3 for alpha chain variable domain of TCR clone 65836 (TRAV26-2, TRAJ57)
CILRDIRGGSEKLVF

SEQ ID NO: 131672 - protein, 15 aa, Homo sapiens
  CDR3 for beta chain variable domain of TCR clone 65836 (TRBV2, TRBJ2-1)
CASDIGLAGEGEQFL

SEQ ID NO: 131673 - protein, 14 aa, Homo sapiens
  CDR3 for alpha chain variable domain of TCR clone 65837 (TRAV12-2, TRAJ13)
CAVKKTGGYQKVTF

SEQ ID NO: 131674 - protein, 13 aa, Homo sapiens
  CDR3 for beta chain variable domain of TCR clone 65837 (TRBV11-2, TRBJ2-5)
CASSSTGEETQYF

SEQ ID NO: 131675 - protein, 14 aa, Homo sapiens
  CDR3 for alpha chain variable domain of TCR clone 65838 (TRAV12-2, TRAJ53)
CAVKGGGSNYKLTF

SEQ ID NO: 131676 - protein, 15 aa, Homo sapiens
  CDR3 for beta chain variable domain of TCR clone 65838 (TRBV7-9, TRBJ2-7)
CASSLALAEAYEQYF

SEQ ID NO: 131677 - protein, 16 aa, Homo sapiens
  CDR3 for alpha chain variable domain of TCR clone 65839 (TRAV30, TRAJ24)
CGTEIVDADSGGKFQF

SEQ ID NO: 131678 - protein, 12 aa, Homo sapiens
  CDR3 for beta chain variable domain of TCR clone 65839 (TRBV11-2, TRBJ2-1)
CASSPGNNEQFF

SEQ ID NO: 131679 - protein, 16 aa, Homo sapiens
  CDR3 for alpha chain variable domain of TCR clone 65840 (TRAV12-2, TRAJ32)
CAVNLGQGGATNKRIF

SEQ ID NO: 131680 - protein, 15 aa, Homo sapiens
  CDR3 for beta chain variable domain of TCR clone 65840 (TRBV20-1, TRBJ2-7)
CSARGPLAGGREQYF

SEQ ID NO: 131681 - protein, 14 aa, Homo sapiens
  CDR3 for alpha chain variable domain of TCR clone 65841 (TRAV12-2, TRAJ13)
CAVNKTGGYQKVTF

SEQ ID NO: 131682 - protein, 15 aa, Homo sapiens
  CDR3 for beta chain variable domain of TCR clone 65841 (TRBV12-4, TRBJ2-5)
CASSPPTGLQETQYF

SEQ ID NO: 131683 - protein, 15 aa, Homo sapiens
  CDR3 for alpha chain variable domain of TCR clone 65842 (TRAV3, TRAJ45)
CAVRPPWGGADGLTF

SEQ ID NO: 131684 - protein, 16 aa, Homo sapiens
  CDR3 for beta chain variable domain of TCR clone 65842 (TRBV6-1, TRBJ2-2)
CASSFGQGANTGELFF

SEQ ID NO: 131685 - protein, 14 aa, Homo sapiens
  CDR3 for alpha chain variable domain of TCR clone 65843 (TRAV35, TRAJ22)
CAGLRPGSARQLTF

SEQ ID NO: 131686 - protein, 13 aa, Homo sapiens
  CDR3 for beta chain variable domain of TCR clone 65843 (TRBV20-1, TRBJ2-7)
CSATHTGGYEQYF

SEQ ID NO: 131687 - protein, 12 aa, Homo sapiens
  CDR3 for alpha chain variable domain of TCR clone 65844 (TRAV13-1, TRAJ21)
CAAKEGFNKFYF

SEQ ID NO: 131688 - protein, 13 aa, Homo sapiens
  CDR3 for beta chain variable domain of TCR clone 65844 (TRBV29-1, TRBJ1-1)
CSVGDSRNTEAFF

SEQ ID NO: 131689 - protein, 16 aa, Homo sapiens
  CDR3 for alpha chain variable domain of TCR clone 65845 (TRAV17, TRAJ17)
CATALQEGAAGNKLTF

SEQ ID NO: 131690 - protein, 12 aa, Homo sapiens
  CDR3 for beta chain variable domain of TCR clone 65845 (TRBV4-2, TRBJ2-5)
CASGGAQETQYF

SEQ ID NO: 131691 - protein, 11 aa, Homo sapiens
  CDR3 for alpha chain variable domain of TCR clone 65846 (TRAV1-2, TRAJ20)
CAVSNDYKLSF

SEQ ID NO: 131692 - protein, 13 aa, Homo sapiens
  CDR3 for beta chain variable domain of TCR clone 65846 (TRBV12-5, TRBJ2-3)
CASGDRQSDTQYF

SEQ ID NO: 131693 - protein, 14 aa, Homo sapiens
  CDR3 for alpha chain variable domain of TCR clone 65847 (TRAV8-1, TRAJ5)
CAVSMGTGRRALAF

SEQ ID NO: 131694 - protein, 15 aa, Homo sapiens
  CDR3 for beta chain variable domain of TCR clone 65847 (TRBV19, TRBJ2-4)
CASRGPRRGENIQYF

SEQ ID NO: 131695 - protein, 13 aa, Homo sapiens
  CDR3 for alpha chain variable domain of TCR clone 65848 (TRAV12-3, TRAJ13)
CAMSSGGYQKVTF

SEQ ID NO: 131696 - protein, 16 aa, Homo sapiens
  CDR3 for beta chain variable domain of TCR clone 65848 (TRBV12-5, TRBJ2-5)
CASGPRTSGNQETQYF

SEQ ID NO: 131697 - protein, 13 aa, Homo sapiens
  CDR3 for alpha chain variable domain of TCR clone 65849 (TRAV12-2, TRAJ4)
FAVRSGGYNKLIF

SEQ ID NO: 131698 - protein, 15 aa, Homo sapiens
  CDR3 for beta chain variable domain of TCR clone 65849 (TRBV10-3, TRBJ2-1)
CAISDVQDRAYEQFF

SEQ ID NO: 131699 - protein, 14 aa, Homo sapiens
  CDR3 for alpha chain variable domain of TCR clone 65850 (TRAV13-1, TRAJ44)
CAAKANGTASKLTF

SEQ ID NO: 131700 - protein, 17 aa, Homo sapiens
  CDR3 for beta chain variable domain of TCR clone 65850 (TRBV7-3, TRBJ2-3)
RASSLMKRMRGADTQYF

SEQ ID NO: 131701 - protein, 18 aa, Homo sapiens
  CDR3 for alpha chain variable domain of TCR clone 65851 (TRAV29/DV5, TRAJ52)
CAAGFRGAGGTSYGKLTF

SEQ ID NO: 131702 - protein, 16 aa, Homo sapiens
  CDR3 for beta chain variable domain of TCR clone 65851 (TRBV7-3, TRBJ2-2)
CASSLKRGTFSGELFF

SEQ ID NO: 131703 - protein, 12 aa, Homo sapiens
  CDR3 for alpha chain variable domain of TCR clone 65852 (TRAV13-1, TRAJ53)
AASGGSNYKLTF

SEQ ID NO: 131704 - protein, 15 aa, Homo sapiens
  CDR3 for beta chain variable domain of TCR clone 65852 (TRBV19, TRBJ1-1)
CASTSGQIQNTEAFF

SEQ ID NO: 131705 - protein, 13 aa, Homo sapiens
  CDR3 for alpha chain variable domain of TCR clone 65853 (TRAV1-1, TRAJ20)
CAVRGSNDYKLSF

SEQ ID NO: 131706 - protein, 15 aa, Homo sapiens
  CDR3 for beta chain variable domain of TCR clone 65853 (TRBV7-2, TRBJ2-1)
CASSSRTSREDEHFF

SEQ ID NO: 131707 - protein, 11 aa, Homo sapiens
  CDR3 for alpha chain variable domain of TCR clone 65854 (TRAV2, TRAJ13)
CASGGYQKVTF

SEQ ID NO: 131708 - protein, 17 aa, Homo sapiens
  CDR3 for beta chain variable domain of TCR clone 65854 (TRBV11-2, TRBJ2-1)
CASSLYPPGVECNEQFF

SEQ ID NO: 131709 - protein, 10 aa, Homo sapiens
  CDR3 for alpha chain variable domain of TCR clone 65855 (TRAV1-2, TRAJ23)
CAGQGGKLMF

SEQ ID NO: 131710 - protein, 16 aa, Homo sapiens
  CDR3 for beta chain variable domain of TCR clone 65855 (TRBV11-2, TRBJ1-1)
CASSLRQGGEHSKAFF

SEQ ID NO: 131711 - protein, 14 aa, Homo sapiens
  CDR3 for alpha chain variable domain of TCR clone 65856 (TRAV16, TRAJ39)
CALSKNNAGNMLTF

SEQ ID NO: 131712 - protein, 16 aa, Homo sapiens
  CDR3 for beta chain variable domain of TCR clone 65856 (TRBV28, TRBJ2-1)
CASRVPASGRIGEQFF

SEQ ID NO: 131713 - protein, 12 aa, Homo sapiens
  CDR3 for alpha chain variable domain of TCR clone 65857 (TRAV2, TRAJ26)
CAGSPGRLWSEF

SEQ ID NO: 131714 - protein, 13 aa, Homo sapiens
  CDR3 for beta chain variable domain of TCR clone 65857 (TRBV7-9, TRBJ1-2)
CASRLKQNYGYTF

SEQ ID NO: 131715 - protein, 16 aa, Homo sapiens
  CDR3 for alpha chain variable domain of TCR clone 65858 (TRAV3, TRAJ37)
CAVRGKGSGNTGKLIF

SEQ ID NO: 131716 - protein, 16 aa, Homo sapiens
  CDR3 for beta chain variable domain of TCR clone 65858 (TRBV7-9, TRBJ2-1)
CASSDVAGGSYNEQFF

SEQ ID NO: 131717 - protein, 10 aa, Homo sapiens
  CDR3 for alpha chain variable domain of TCR clone 65859 (TRAV23/DV6, TRAJ4)
CAAIDFWSRD

SEQ ID NO: 131718 - protein, 13 aa, Homo sapiens
  CDR3 for beta chain variable domain of TCR clone 65859 (TRBV7-2, TRBJ1-1)
CASSRNTNTEAFF

SEQ ID NO: 131719 - protein, 15 aa, Homo sapiens
  CDR3 for alpha chain variable domain of TCR clone 65860 (TRAV27, TRAJ38)
CAARRNAGNNRKPIW

SEQ ID NO: 131720 - protein, 11 aa, Homo sapiens
  CDR3 for beta chain variable domain of TCR clone 65860 (TRBV12-4, TRBJ2-2)
CASSSAGELFF

SEQ ID NO: 131721 - protein, 14 aa, Homo sapiens
  CDR3 for alpha chain variable domain of TCR clone 65861 (TRAV26-1, TRAJ38)
CIADNAGNNRKLIW

SEQ ID NO: 131722 - protein, 15 aa, Homo sapiens
  CDR3 for beta chain variable domain of TCR clone 65861 (TRBV5-1, TRBJ2-7)
CASSLNGGPAREQYF

SEQ ID NO: 131723 - protein, 16 aa, Homo sapiens
  CDR3 for alpha chain variable domain of TCR clone 65862 (TRAV12-2, TRAJ32)
CAVNLGQGGATNKLIF

SEQ ID NO: 131724 - protein, 15 aa, Homo sapiens
  CDR3 for beta chain variable domain of TCR clone 65862 (TRBV20-1, TRBJ2-7)
CSAGGPLAGGREQYF

SEQ ID NO: 131725 - protein, 13 aa, Homo sapiens
  CDR3 for alpha chain variable domain of TCR clone 65863 (TRAV27, TRAJ45)
CRSSGGGADGLTF

SEQ ID NO: 131726 - protein, 17 aa, Homo sapiens
  CDR3 for beta chain variable domain of TCR clone 65863 (TRBV11-2, TRBJ2-7)
CASSLYPPGVEYNEQFF

SEQ ID NO: 131727 - protein, 12 aa, Homo sapiens
  CDR3 for alpha chain variable domain of TCR clone 65864 (TRAV6, TRAJ34)
CALHRGTDKLIF

SEQ ID NO: 131728 - protein, 14 aa, Homo sapiens
  CDR3 for beta chain variable domain of TCR clone 65864 (TRBV7-3, TRBJ1-1)
CASSLGTGYTEAFF

SEQ ID NO: 131729 - protein, 16 aa, Homo sapiens
  CDR3 for alpha chain variable domain of TCR clone 65865 (TRAV30, TRAJ24)
CGTEIVDADSWGKFQF

SEQ ID NO: 131730 - protein, 14 aa, Homo sapiens
  CDR3 for beta chain variable domain of TCR clone 65865 (TRBV19, TRBJ2-1)
CASEVTGARNEQFF

SEQ ID NO: 131731 - protein, 15 aa, Homo sapiens
  CDR3 for alpha chain variable domain of TCR clone 65866 (TRAV29/DV5, TRAJ24)
CAASGATDSWGKFQF

SEQ ID NO: 131732 - protein, 20 aa, Homo sapiens
  CDR3 for beta chain variable domain of TCR clone 65866 (TRBV11-2, TRBJ2-2)
LRTRPCISVPAASLPGGCFF

SEQ ID NO: 131733 - protein, 14 aa, Homo sapiens
  CDR3 for alpha chain variable domain of TCR clone 65867 (TRAV9-2, TRAJ6)
CALSDPGRSYIPTF

SEQ ID NO: 131734 - protein, 16 aa, Homo sapiens
  CDR3 for beta chain variable domain of TCR clone 65867 (TRBV19, TRBJ2-2)
CASRSPGTGATGELFF

SEQ ID NO: 131735 - protein, 18 aa, Homo sapiens
  CDR3 for alpha chain variable domain of TCR clone 65868 (TRAV29/DV5, TRAJ53)
CSVLLCSKRGGSNYKLTF

SEQ ID NO: 131736 - protein, 17 aa, Homo sapiens
  CDR3 for beta chain variable domain of TCR clone 65868 (TRBV7-8, TRBJ2-6)
CASSAGTGGAGADVLTF

SEQ ID NO: 131737 - protein, 12 aa, Homo sapiens
  CDR3 for alpha chain variable domain of TCR clone 65869 (TRAV21, TRAJ13)
PGPSVGYQKVTF

SEQ ID NO: 131738 - protein, 15 aa, Homo sapiens
  CDR3 for beta chain variable domain of TCR clone 65869 (TRBV7-9, TRBJ1-6)
CASSSPGRGNSPLHF

SEQ ID NO: 131739 - protein, 15 aa, Homo sapiens
  CDR3 for alpha chain variable domain of TCR clone 65870 (TRAV25, TRAJ52)
CAGRPGGTSYGKLTF

SEQ ID NO: 131740 - protein, 17 aa, Homo sapiens
  CDR3 for beta chain variable domain of TCR clone 65870 (TRBV7-8, TRBJ2-6)
CASSAETGGAGANVLTF

SEQ ID NO: 131741 - protein, 14 aa, Homo sapiens
  CDR3 for alpha chain variable domain of TCR clone 65871 (TRAV1-2, TRAJ13)
CAVLNSGGYQKVTF

SEQ ID NO: 131742 - protein, 14 aa, Homo sapiens
  CDR3 for beta chain variable domain of TCR clone 65871 (TRBV12-4, TRBJ1-1)
CASSLNDMNTKAFF

SEQ ID NO: 131743 - protein, 13 aa, Homo sapiens
  CDR3 for alpha chain variable domain of TCR clone 65872 (TRAV1-2, TRAJ9)
CAALNTGGFKTIF

SEQ ID NO: 131744 - protein, 13 aa, Homo sapiens
  CDR3 for beta chain variable domain of TCR clone 65872 (TRBV7-2, TRBJ1-4)
CASSLAGLEKLFF

SEQ ID NO: 131745 - protein, 14 aa, Homo sapiens
  CDR3 for alpha chain variable domain of TCR clone 65873 (TRAV16, TRAJ33)
CALSAMDSNYQLIW

SEQ ID NO: 131746 - protein, 16 aa, Homo sapiens
  CDR3 for beta chain variable domain of TCR clone 65873 (TRBV11-1, TRBJ1-1)
CATNPRDRAFNTEAFF

SEQ ID NO: 131747 - protein, 12 aa, Homo sapiens
  CDR3 for alpha chain variable domain of TCR clone 65874 (TRAV35, TRAJ49)
CAGWNTGNPFYF

SEQ ID NO: 131748 - protein, 16 aa, Homo sapiens
  CDR3 for beta chain variable domain of TCR clone 65874 (TRBV5-1, TRBJ2-2)
CASSLWDTTNTGELFF

SEQ ID NO: 131749 - protein, 16 aa, Homo sapiens
  CDR3 for alpha chain variable domain of TCR clone 65875 (TRAV30, TRAJ24)
CGTEMVDADSWGKFKF

SEQ ID NO: 131750 - protein, 14 aa, Homo sapiens
  CDR3 for beta chain variable domain of TCR clone 65875 (TRBV12-5, TRBJ2-5)
CASGSRTHQETQYF

SEQ ID NO: 131751 - protein, 16 aa, Homo sapiens
  CDR3 for alpha chain variable domain of TCR clone 65876 (TRAV16, TRAJ4)
CALSRMLSGGYNKLIF

SEQ ID NO: 131752 - protein, 18 aa, Homo sapiens
  CDR3 for beta chain variable domain of TCR clone 65876 (TRBV20-1, TRBJ2-6)
CSAETTPTHGSGANVLTF

SEQ ID NO: 131753 - protein, 15 aa, Homo sapiens
  CDR3 for alpha chain variable domain of TCR clone 65877 (TRAV8-3, TRAJ27)
CAVGPSKTNAGKSTF

SEQ ID NO: 131754 - protein, 16 aa, Homo sapiens
  CDR3 for beta chain variable domain of TCR clone 65877 (TRBV6-6, TRBJ2-1)
CASSLLSDSSYDEQFF

SEQ ID NO: 131755 - protein, 12 aa, Homo sapiens
  CDR3 for alpha chain variable domain of TCR clone 65878 (TRAV13-1, TRAJ43)
CAASIGDNDMRF

SEQ ID NO: 131756 - protein, 16 aa, Homo sapiens
  CDR3 for beta chain variable domain of TCR clone 65878 (TRBV7-9, TRBJ2-3)
CASSLVFRTDTDTQRF

SEQ ID NO: 131757 - protein, 13 aa, Homo sapiens
  CDR3 for alpha chain variable domain of TCR clone 65879 (TRAV13-1, TRAJ5)
CAARVTGRRALTF

SEQ ID NO: 131758 - protein, 12 aa, Homo sapiens
  CDR3 for beta chain variable domain of TCR clone 65879 (TRBV3-1, TRBJ2-5)
CASSQRGETQHF

SEQ ID NO: 131759 - protein, 12 aa, Homo sapiens
  CDR3 for alpha chain variable domain of TCR clone 65880 (TRAV2, TRAJ10)
CASTGGGNELTF

SEQ ID NO: 131760 - protein, 14 aa, Homo sapiens
  CDR3 for beta chain variable domain of TCR clone 65880 (TRBV7-2, TRBJ2-2)
CASRGQGAAGELFF

SEQ ID NO: 131761 - protein, 18 aa, Homo sapiens
  CDR3 for alpha chain variable domain of TCR clone 65881 (TRAV26-2, TRAJ45)
CILRVDKYSGGGADGLTF

SEQ ID NO: 131762 - protein, 16 aa, Homo sapiens
  CDR3 for beta chain variable domain of TCR clone 65881 (TRBV5-1, TRBJ1-5)
CASSYGTGGSNQPQHF

SEQ ID NO: 131763 - protein, 12 aa, Homo sapiens
  CDR3 for alpha chain variable domain of TCR clone 65882 (TRAV8-3, TRAJ40)
CAVTSGTYKYIF

SEQ ID NO: 131764 - protein, 14 aa, Homo sapiens
  CDR3 for beta chain variable domain of TCR clone 65882 (TRBV25-1, TRBJ1-1)
CASTHLGGNTEAFF

SEQ ID NO: 131765 - protein, 15 aa, Homo sapiens
  CDR3 for alpha chain variable domain of TCR clone 65883 (TRAV12-3, TRAJ6)
CAMSATTGGSYIPTF

SEQ ID NO: 131766 - protein, 13 aa, Homo sapiens
  CDR3 for beta chain variable domain of TCR clone 65883 (TRBV27, TRBJ2-1)
CASRTLGVGEQFF

SEQ ID NO: 131767 - protein, 13 aa, Homo sapiens
  CDR3 for alpha chain variable domain of TCR clone 65884 (TRAV27, TRAJ42)
CAGARGSQGDLIF

SEQ ID NO: 131768 - protein, 15 aa, Homo sapiens
  CDR3 for beta chain variable domain of TCR clone 65884 (TRBV10-3, TRBJ2-2)
CAIRTDREDTGELFF

SEQ ID NO: 131769 - protein, 14 aa, Homo sapiens
  CDR3 for alpha chain variable domain of TCR clone 65885 (TRAV26-1, TRAJ38)
CIADNAGNNRKRIW

SEQ ID NO: 131770 - protein, 14 aa, Homo sapiens
  CDR3 for beta chain variable domain of TCR clone 65885 (TRBV4-1, TRBJ2-2)
CASSQAVNTGELFF

SEQ ID NO: 131771 - protein, 12 aa, Homo sapiens
  CDR3 for alpha chain variable domain of TCR clone 65886 (TRAV17, TRAJ12)
CATLRSSYKLIF

SEQ ID NO: 131772 - protein, 16 aa, Homo sapiens
  CDR3 for beta chain variable domain of TCR clone 65886 (TRBV28, TRBJ2-7)
CASSLFFETGGPQQYF

SEQ ID NO: 131773 - protein, 12 aa, Homo sapiens
  CDR3 for alpha chain variable domain of TCR clone 65887 (TRAV12-3, TRAJ17)
CAMTLTGNKLTF

SEQ ID NO: 131774 - protein, 13 aa, Homo sapiens
  CDR3 for beta chain variable domain of TCR clone 65887 (TRBV7-3, TRBJ1-1)
CASSQDWGAEAFV

SEQ ID NO: 131775 - protein, 14 aa, Homo sapiens
  CDR3 for alpha chain variable domain of TCR clone 65888 (TRAV1-1, TRAJ23)
CAVSIYNQGGKLIF

SEQ ID NO: 131776 - protein, 16 aa, Homo sapiens
  CDR3 for beta chain variable domain of TCR clone 65888 (TRBV7-2, TRBJ1-2)
CASSSNQDRRGHGYTF

SEQ ID NO: 131777 - protein, 15 aa, Homo sapiens
  CDR3 for alpha chain variable domain of TCR clone 65889 (TRAV3, TRAJ47)
CAVRDIGEYGNKLVF

SEQ ID NO: 131778 - protein, 18 aa, Homo sapiens
  CDR3 for beta chain variable domain of TCR clone 65889 (TRBV13, TRBJ2-5)
CASSLTGWGDPVLRARHA

SEQ ID NO: 131779 - protein, 11 aa, Homo sapiens
  CDR3 for alpha chain variable domain of TCR clone 65890 (TRAV3, TRAJ31)
CAVRPDARLMF

SEQ ID NO: 131780 - protein, 16 aa, Homo sapiens
  CDR3 for beta chain variable domain of TCR clone 65890 (TRBV2, TRBJ1-3)
CASSGQGPSSGNTIYF

SEQ ID NO: 131781 - protein, 14 aa, Homo sapiens
  CDR3 for alpha chain variable domain of TCR clone 65891 (TRAV12-2, TRAJ11)
CAVNRESGYSTLTF

SEQ ID NO: 131782 - protein, 10 aa, Homo sapiens
  CDR3 for beta chain variable domain of TCR clone 65891 (TRBV20-1, TRBJ2-5)
CSDRFETQYF

SEQ ID NO: 131783 - protein, 13 aa, Homo sapiens
  CDR3 for alpha chain variable domain of TCR clone 65892 (TRAV27, TRAJ56)
CAGKPGANSKLTF

SEQ ID NO: 131784 - protein, 12 aa, Homo sapiens
  CDR3 for beta chain variable domain of TCR clone 65892 (TRBV5-1, TRBJ2-7)
CASSLDSYEQYF

SEQ ID NO: 131785 - protein, 10 aa, Homo sapiens
  CDR3 for alpha chain variable domain of TCR clone 65893 (TRAV23/DV6, TRAJ3)
CAATTFAFGG

SEQ ID NO: 131786 - protein, 15 aa, Homo sapiens
  CDR3 for beta chain variable domain of TCR clone 65893 (TRBV19, TRBJ1-6)
CASSTQGAVGSPLHF

SEQ ID NO: 131787 - protein, 15 aa, Homo sapiens
  CDR3 for alpha chain variable domain of TCR clone 65894 (TRAV17, TRAJ23)
CATDAENNQGGKLIF

SEQ ID NO: 131788 - protein, 12 aa, Homo sapiens
  CDR3 for beta chain variable domain of TCR clone 65894 (TRBV2, TRBJ2-1)
CAKREGYNEQFF

SEQ ID NO: 131789 - protein, 14 aa, Homo sapiens
  CDR3 for alpha chain variable domain of TCR clone 65895 (TRAV29/DV5, TRAJ48)
CAAMALFGNEKLTF

SEQ ID NO: 131790 - protein, 13 aa, Homo sapiens
  CDR3 for beta chain variable domain of TCR clone 65895 (TRBV10-3, TRBJ2-7)
CASKLAVNYEQYF

SEQ ID NO: 131791 - protein, 16 aa, Homo sapiens
  CDR3 for alpha chain variable domain of TCR clone 65896 (TRAV3, TRAJ22)
CAVRDMGSGSARQLTF

SEQ ID NO: 131792 - protein, 14 aa, Homo sapiens
  CDR3 for beta chain variable domain of TCR clone 65896 (TRBV7-3, TRBJ1-1)
CAGSLKGGNTEAFF

SEQ ID NO: 131793 - protein, 15 aa, Homo sapiens
  CDR3 for alpha chain variable domain of TCR clone 65897 (TRAV3, TRAJ22)
CAVRDRGGSARQMTF

SEQ ID NO: 131794 - protein, 13 aa, Homo sapiens
  CDR3 for beta chain variable domain of TCR clone 65897 (TRBV12-4, TRBJ1-2)
CASSLRQGKGYTF

SEQ ID NO: 131795 - protein, 16 aa, Homo sapiens
  CDR3 for alpha chain variable domain of TCR clone 65898 (TRAV38-1, TRAJ44)
CAFMKRQTGANSKITF

SEQ ID NO: 131796 - protein, 17 aa, Homo sapiens
  CDR3 for beta chain variable domain of TCR clone 65898 (TRBV7-3, TRBJ2-3)
CASSLMKRMRGADTQYF

SEQ ID NO: 131797 - protein, 13 aa, Homo sapiens
  CDR3 for alpha chain variable domain of TCR clone 65899 (TRAV30, TRAJ24)
CGTVADSWGKLQF

SEQ ID NO: 131798 - protein, 14 aa, Homo sapiens
  CDR3 for beta chain variable domain of TCR clone 65899 (TRBV6-3, TRBJ2-2)
CASTYTPDTGELFF

SEQ ID NO: 131799 - protein, 12 aa, Homo sapiens
  CDR3 for alpha chain variable domain of TCR clone 65900 (TRAV26-1, TRAJ43)
CIVRPRGDDMRF

SEQ ID NO: 131800 - protein, 16 aa, Homo sapiens
  CDR3 for beta chain variable domain of TCR clone 65900 (TRBV3-1, TRBJ2-1)
CDSSQGGRRSFDEQFF

SEQ ID NO: 131801 - protein, 11 aa, Homo sapiens
  CDR3 for alpha chain variable domain of TCR clone 65901 (TRAV12-2, TRAJ49)
CAVHTGNQFYF

SEQ ID NO: 131802 - protein, 12 aa, Homo sapiens
  CDR3 for beta chain variable domain of TCR clone 65901 (TRBV20-1, TRBJ2-5)
CSVGTGSETQYF

SEQ ID NO: 131803 - protein, 15 aa, Homo sapiens
  CDR3 for alpha chain variable domain of TCR clone 65902 (TRAV21, TRAJ37)
CAVRPTLSNTGKLIF

SEQ ID NO: 131804 - protein, 16 aa, Homo sapiens
  CDR3 for beta chain variable domain of TCR clone 65902 (TRBV24-1, TRBJ2-3)
CATSDRRQYLTDTQYF

SEQ ID NO: 131805 - protein, 10 aa, Homo sapiens
  CDR3 for alpha chain variable domain of TCR clone 65903 (TRAV8-3, TRAJ18)
CAVSGQRLNP

SEQ ID NO: 131806 - protein, 16 aa, Homo sapiens
  CDR3 for beta chain variable domain of TCR clone 65903 (TRBV28, TRBJ1-5)
CASSFRGGYSNQPQHF

SEQ ID NO: 131807 - protein, 16 aa, Homo sapiens
  CDR3 for alpha chain variable domain of TCR clone 65904 (TRAV12-1, TRAJ48)
CVVNMVSNFGNEKLTF

SEQ ID NO: 131808 - protein, 18 aa, Homo sapiens
  CDR3 for beta chain variable domain of TCR clone 65904 (TRBV11-2, TRBJ2-6)
CASSLNPFLGTGANVLSF

SEQ ID NO: 131809 - protein, 15 aa, Homo sapiens
  CDR3 for alpha chain variable domain of TCR clone 65905 (TRAV3, TRAJ45)
CAVRTPGGGADGLTF

SEQ ID NO: 131810 - protein, 16 aa, Homo sapiens
  CDR3 for beta chain variable domain of TCR clone 65905 (TRBV6-1, TRBJ2-2)
CASSFGQGANTGELFF

SEQ ID NO: 131811 - protein, 11 aa, Homo sapiens
  CDR3 for alpha chain variable domain of TCR clone 65906 (TRAV1-2, TRAJ20)
CAVANDYKLSF

SEQ ID NO: 131812 - protein, 14 aa, Homo sapiens
  CDR3 for beta chain variable domain of TCR clone 65906 (TRBV6-1, TRBJ1-3)
CASVQGGGGNTIYF

SEQ ID NO: 131813 - protein, 12 aa, Homo sapiens
  CDR3 for alpha chain variable domain of TCR clone 65907 (TRAV13-1, TRAJ17)
CAARTAGNKLTF

SEQ ID NO: 131814 - protein, 15 aa, Homo sapiens
  CDR3 for beta chain variable domain of TCR clone 65907 (TRBV7-6, TRBJ1-1)
CASSPQVGANTEAFF

SEQ ID NO: 131815 - protein, 10 aa, Homo sapiens
  CDR3 for alpha chain variable domain of TCR clone 65908 (TRAV5, TRAJ34)
RAEDTDKLIF

SEQ ID NO: 131816 - protein, 12 aa, Homo sapiens
  CDR3 for beta chain variable domain of TCR clone 65908 (TRBV11-2, TRBJ2-2)
CASSLGGGELFF

SEQ ID NO: 131817 - protein, 16 aa, Homo sapiens
  CDR3 for alpha chain variable domain of TCR clone 65909 (TRAV12-3, TRAJ53)
CAMSPGSGGSNYKLTF

SEQ ID NO: 131818 - protein, 16 aa, Homo sapiens
  CDR3 for beta chain variable domain of TCR clone 65909 (TRBV4-2, TRBJ1-1)
CASSQAGFGMSTEAFF

SEQ ID NO: 131819 - protein, 14 aa, Homo sapiens
  CDR3 for alpha chain variable domain of TCR clone 65910 (TRAV8-4, TRAJ13)
CAVTLSGGYQKVTF

SEQ ID NO: 131820 - protein, 15 aa, Homo sapiens
  CDR3 for beta chain variable domain of TCR clone 65910 (TRBV9, TRBJ2-1)
CASSLAGSSYNEQFF

SEQ ID NO: 131821 - protein, 13 aa, Homo sapiens
  CDR3 for alpha chain variable domain of TCR clone 65911 (TRAV10, TRAJ40)
CVVSALGTYKYIL

SEQ ID NO: 131822 - protein, 13 aa, Homo sapiens
  CDR3 for beta chain variable domain of TCR clone 65911 (TRBV20-1, TRBJ2-3)
CSARLAGTDTQYF

SEQ ID NO: 131823 - protein, 13 aa, Homo sapiens
  CDR3 for alpha chain variable domain of TCR clone 65912 (TRAV12-2, TRAJ5)
CAARVTGRRALTF

SEQ ID NO: 131824 - protein, 15 aa, Homo sapiens
  CDR3 for beta chain variable domain of TCR clone 65912 (TRBV7-9, TRBJ2-7)
CASSPGGGLTYEQYF

SEQ ID NO: 131825 - protein, 15 aa, Homo sapiens
  CDR3 for alpha chain variable domain of TCR clone 65913 (TRAV3, TRAJ9)
CAVRARNTGGFRTIF

SEQ ID NO: 131826 - protein, 14 aa, Homo sapiens
  CDR3 for beta chain variable domain of TCR clone 65913 (TRBV4-2, TRBJ2-1)
CASGLDRAYNEQFF

SEQ ID NO: 131827 - protein, 15 aa, Homo sapiens
  CDR3 for alpha chain variable domain of TCR clone 65914 (TRAV20, TRAJ53)
CAVQASGGSNYKPTF

SEQ ID NO: 131828 - protein, 14 aa, Homo sapiens
  CDR3 for beta chain variable domain of TCR clone 65914 (TRBV7-2, TRBJ2-3)
CASSLVGRSRYAVF

SEQ ID NO: 131829 - protein, 10 aa, Homo sapiens
  CDR3 for alpha chain variable domain of TCR clone 65915 (TRAV1-2, TRAJ31)
CAFFDARLMF

SEQ ID NO: 131830 - protein, 16 aa, Homo sapiens
  CDR3 for beta chain variable domain of TCR clone 65915 (TRBV7-3, TRBJ2-2)
CASSLKRGTLSGELFF

SEQ ID NO: 131831 - protein, 13 aa, Homo sapiens
  CDR3 for alpha chain variable domain of TCR clone 65916 (TRAV36/DV7, TRAJ37)
CAVFSSNTGKLIF

SEQ ID NO: 131832 - protein, 13 aa, Homo sapiens
  CDR3 for beta chain variable domain of TCR clone 65916 (TRBV7-9, TRBJ1-2)
CASSLKQNYGYTF

SEQ ID NO: 131833 - protein, 13 aa, Homo sapiens
  CDR3 for alpha chain variable domain of TCR clone 65917 (TRAV27, TRAJ57)
CRSAQGRSEKLVF

SEQ ID NO: 131834 - protein, 11 aa, Homo sapiens
  CDR3 for beta chain variable domain of TCR clone 65917 (TRBV11-2, TRBJ1-1)
CASSINTEAFF

SEQ ID NO: 131835 - protein, 16 aa, Homo sapiens
  CDR3 for alpha chain variable domain of TCR clone 65918 (TRAV3, TRAJ10)
CAVRDMRAGGGNKLTF

SEQ ID NO: 131836 - protein, 13 aa, Homo sapiens
  CDR3 for beta chain variable domain of TCR clone 65918 (TRBV20-1, TRBJ1-1)
CSARLGQGTEAFF

SEQ ID NO: 131837 - protein, 12 aa, Homo sapiens
  CDR3 for alpha chain variable domain of TCR clone 65919 (TRAV21, TRAJ11)
CAATSGYSTLTF

SEQ ID NO: 131838 - protein, 16 aa, Homo sapiens
  CDR3 for beta chain variable domain of TCR clone 65919 (TRBV28, TRBJ2-2)
CARSLEGGSNTGELFF

SEQ ID NO: 131839 - protein, 14 aa, Homo sapiens
  CDR3 for alpha chain variable domain of TCR clone 65920 (TRAV21, TRAJ15)
CAVSLNQAGTALIF

SEQ ID NO: 131840 - protein, 17 aa, Homo sapiens
  CDR3 for beta chain variable domain of TCR clone 65920 (TRBV2, TRBJ1-4)
CASSKRELTQGEEKLFF

SEQ ID NO: 131841 - protein, 12 aa, Homo sapiens
  CDR3 for alpha chain variable domain of TCR clone 65921 (TRAV2, TRAJ34)
CAVERNTDKLIF

SEQ ID NO: 131842 - protein, 23 aa, Homo sapiens
  CDR3 for beta chain variable domain of TCR clone 65921 (TRBV7-2, TRBJ2-5)
RRTRPCISGPAASLGGGEETQYF

SEQ ID NO: 131843 - protein, 17 aa, Homo sapiens
  CDR3 for alpha chain variable domain of TCR clone 65922 (TRAV3, TRAJ6)
CAVRDGPRAGGSYIPTF

SEQ ID NO: 131844 - protein, 15 aa, Homo sapiens
  CDR3 for beta chain variable domain of TCR clone 65922 (TRBV5-1, TRBJ1-2)
CASSPGDRGSYGYTF

SEQ ID NO: 131845 - protein, 11 aa, Homo sapiens
  CDR3 for alpha chain variable domain of TCR clone 65923 (TRAV17, TRAJ36)
CAPTGANNLFF

SEQ ID NO: 131846 - protein, 13 aa, Homo sapiens
  CDR3 for beta chain variable domain of TCR clone 65923 (TRBV10-3, TRBJ2-7)
CASKLAVNYEQYF

SEQ ID NO: 131847 - protein, 15 aa, Homo sapiens
  CDR3 for alpha chain variable domain of TCR clone 65924 (TRAV3, TRAJ4)
CAVRDGTGGYNKLIF

SEQ ID NO: 131848 - protein, 16 aa, Homo sapiens
  CDR3 for beta chain variable domain of TCR clone 65924 (TRBV27, TRBJ2-2)
CASSSSGVSDTGELFF

SEQ ID NO: 131849 - protein, 11 aa, Homo sapiens
  CDR3 for alpha chain variable domain of TCR clone 65925 (TRAV13-1, TRAJ49)
CTCVGGNQFYF

SEQ ID NO: 131850 - protein, 16 aa, Homo sapiens
  CDR3 for beta chain variable domain of TCR clone 65925 (TRBV11-2, TRBJ2-2)
CASSLRTGNLIGELFF

SEQ ID NO: 131851 - protein, 13 aa, Homo sapiens
  CDR3 for alpha chain variable domain of TCR clone 65926 (TRAV8-4, TRAJ21)
CAVSEYNLNKFYF

SEQ ID NO: 131852 - protein, 12 aa, Homo sapiens
  CDR3 for beta chain variable domain of TCR clone 65926 (TRBV7-9, TRBJ1-5)
CASSSDQAPQHF

SEQ ID NO: 131853 - protein, 15 aa, Homo sapiens
  CDR3 for alpha chain variable domain of TCR clone 65927 (TRAV8-3, TRAJ7)
CAVGSVSYGNNRLAF

SEQ ID NO: 131854 - protein, 17 aa, Homo sapiens
  CDR3 for beta chain variable domain of TCR clone 65927 (TRBV20-1, TRBJ2-1)
CSASSSGLAGSYNEQFF

SEQ ID NO: 131855 - protein, 13 aa, Homo sapiens
  CDR3 for alpha chain variable domain of TCR clone 65928 (TRAV12-1, TRAJ20)
CVVNRETDYKLSF

SEQ ID NO: 131856 - protein, 15 aa, Homo sapiens
  CDR3 for beta chain variable domain of TCR clone 65928 (TRBV14, TRBJ2-1)
CASSLGLAGGTKQFF

SEQ ID NO: 131857 - protein, 15 aa, Homo sapiens
  CDR3 for alpha chain variable domain of TCR clone 65929 (TRAV35, TRAJ41)
CAGQLFSNSGYALNF

SEQ ID NO: 131858 - protein, 16 aa, Homo sapiens
  CDR3 for beta chain variable domain of TCR clone 65929 (TRBV18, TRBJ1-1)
CASSPGVGGRGGEAFF

SEQ ID NO: 131859 - protein, 15 aa, Homo sapiens
  CDR3 for alpha chain variable domain of TCR clone 65930 (TRAV12-3, TRAJ6)
CAMSVTTGGSYIPTF

SEQ ID NO: 131860 - protein, 16 aa, Homo sapiens
  CDR3 for beta chain variable domain of TCR clone 65930 (TRBV20-1, TRBJ1-2)
CSASMGQGVANYGYTF

SEQ ID NO: 131861 - protein, 14 aa, Homo sapiens
  CDR3 for alpha chain variable domain of TCR clone 65931 (TRAV2, TRAJ37)
CAVDFTSNTGKLIF

SEQ ID NO: 131862 - protein, 15 aa, Homo sapiens
  CDR3 for beta chain variable domain of TCR clone 65931 (TRBV19, TRBJ1-1)
CASRLRAIQNTEAFF

SEQ ID NO: 131863 - protein, 13 aa, Homo sapiens
  CDR3 for alpha chain variable domain of TCR clone 65932 (TRAV2, TRAJ40)
CAVVTSGTYKYIF

SEQ ID NO: 131864 - protein, 16 aa, Homo sapiens
  CDR3 for beta chain variable domain of TCR clone 65932 (TRBV29-1, TRBJ2-6)
CSVEDITYSGDNVLTF

SEQ ID NO: 131865 - protein, 11 aa, Homo sapiens
  CDR3 for alpha chain variable domain of TCR clone 65933 (TRAV12-1, TRAJ30)
YVVNGQDKIIF

SEQ ID NO: 131866 - protein, 12 aa, Homo sapiens
  CDR3 for beta chain variable domain of TCR clone 65933 (TRBV27, TRBJ2-2)
CASKLFTGELFF

SEQ ID NO: 131867 - protein, 14 aa, Homo sapiens
  CDR3 for alpha chain variable domain of TCR clone 65934 (TRAV1-1, TRAJ27)
CAVIYNTNAGKSTF

SEQ ID NO: 131868 - protein, 15 aa, Homo sapiens
  CDR3 for beta chain variable domain of TCR clone 65934 (TRBV7-2, TRBJ2-1)
CASSSGLAGGNEQFS

SEQ ID NO: 131869 - protein, 17 aa, Homo sapiens
  CDR3 for alpha chain variable domain of TCR clone 65935 (TRAV38-2/DV8, TRAJ45)
CAYRSRYSGGGADGLTF

SEQ ID NO: 131870 - protein, 15 aa, Homo sapiens
  CDR3 for beta chain variable domain of TCR clone 65935 (TRBV19, TRBJ2-1)
CASIKSRGPYNEQFF

SEQ ID NO: 131871 - protein, 17 aa, Homo sapiens
  CDR3 for alpha chain variable domain of TCR clone 65936 (TRAV8-6, TRAJ58)
CAVSSWVGETSGSRLTF

SEQ ID NO: 131872 - protein, 14 aa, Homo sapiens
  CDR3 for beta chain variable domain of TCR clone 65936 (TRBV4-2, TRBJ2-1)
CANGLDRAYNEQFF

SEQ ID NO: 131873 - protein, 12 aa, Homo sapiens
  CDR3 for alpha chain variable domain of TCR clone 65937 (TRAV12-3, TRAJ17)
CAMTLTGNKLTF

SEQ ID NO: 131874 - protein, 15 aa, Homo sapiens
  CDR3 for beta chain variable domain of TCR clone 65937 (TRBV15, TRBJ1-1)
CATSLQGGRNTEAFF

SEQ ID NO: 131875 - protein, 13 aa, Homo sapiens
  CDR3 for alpha chain variable domain of TCR clone 65938 (TRAV26-2, TRAJ43)
CILRAVNNNDMRF

SEQ ID NO: 131876 - protein, 14 aa, Homo sapiens
  CDR3 for beta chain variable domain of TCR clone 65938 (TRBV19, TRBJ2-1)
CASPTVVLSGEQFF

SEQ ID NO: 131877 - protein, 11 aa, Homo sapiens
  CDR3 for alpha chain variable domain of TCR clone 65939 (TRAV23/DV6, TRAJ58)
CAARLLRGETS

SEQ ID NO: 131878 - protein, 16 aa, Homo sapiens
  CDR3 for beta chain variable domain of TCR clone 65939 (TRBV7-6, TRBJ2-1)
CASSAPGPSSYNEQFF

SEQ ID NO: 131879 - protein, 17 aa, Homo sapiens
  CDR3 for alpha chain variable domain of TCR clone 65940 (TRAV13-1, TRAJ52)
CAAGRNAGGTSYGKLTF

SEQ ID NO: 131880 - protein, 15 aa, Homo sapiens
  CDR3 for beta chain variable domain of TCR clone 65940 (TRBV10-2, TRBJ2-6)
CASSEQGTGANVLTF

SEQ ID NO: 131881 - protein, 13 aa, Homo sapiens
  CDR3 for alpha chain variable domain of TCR clone 65941 (TRAV2, TRAJ29)
CAAQNSGNTPLVF

SEQ ID NO: 131882 - protein, 14 aa, Homo sapiens
  CDR3 for beta chain variable domain of TCR clone 65941 (TRBV7-9, TRBJ2-4)
CASSLAMGVNIQYF

SEQ ID NO: 131883 - protein, 16 aa, Homo sapiens
  CDR3 for alpha chain variable domain of TCR clone 65942 (TRAV27, TRAJ52)
CAGAPAGGTSYGKRTF

SEQ ID NO: 131884 - protein, 12 aa, Homo sapiens
  CDR3 for beta chain variable domain of TCR clone 65942 (TRBV27, TRBJ2-1)
CASRGFYNEQFF

SEQ ID NO: 131885 - protein, 14 aa, Homo sapiens
  CDR3 for alpha chain variable domain of TCR clone 65943 (TRAV17, TRAJ57)
CATDPQGGSEKLVF

SEQ ID NO: 131886 - protein, 15 aa, Homo sapiens
  CDR3 for beta chain variable domain of TCR clone 65943 (TRBV10-3, TRBJ2-3)
CAISLTSGGTDTQYF

SEQ ID NO: 131887 - protein, 11 aa, Homo sapiens
  CDR3 for alpha chain variable domain of TCR clone 65944 (TRAV12-1, TRAJ3)
CVVSNASKIIF

SEQ ID NO: 131888 - protein, 15 aa, Homo sapiens
  CDR3 for beta chain variable domain of TCR clone 65944 (TRBV20-1, TRBJ2-5)
CSASGTSGGGETQYF

SEQ ID NO: 131889 - protein, 13 aa, Homo sapiens
  CDR3 for alpha chain variable domain of TCR clone 65945 (TRAV2, TRAJ15)
CAVASQAGTALIF

SEQ ID NO: 131890 - protein, 14 aa, Homo sapiens
  CDR3 for beta chain variable domain of TCR clone 65945 (TRBV7-3, TRBJ2-1)
CASSLAGGTNEQFF

SEQ ID NO: 131891 - protein, 14 aa, Homo sapiens
  CDR3 for alpha chain variable domain of TCR clone 65946 (TRAV17, TRAJ34)
YATDSLEGTDKLIF

SEQ ID NO: 131892 - protein, 13 aa, Homo sapiens
  CDR3 for beta chain variable domain of TCR clone 65946 (TRBV11-2, TRBJ2-7)
CASSGTRPYEQYF

SEQ ID NO: 131893 - protein, 15 aa, Homo sapiens
  CDR3 for alpha chain variable domain of TCR clone 65947 (TRAV8-3, TRAJ27)
CAVGPSKTNAGKSTF

SEQ ID NO: 131894 - protein, 15 aa, Homo sapiens
  CDR3 for beta chain variable domain of TCR clone 65947 (TRBV7-2, TRBJ2-1)
CASSSGLAGGNEQFC

SEQ ID NO: 131895 - protein, 12 aa, Homo sapiens
  CDR3 for alpha chain variable domain of TCR clone 65948 (TRAV12-1, TRAJ40)
CVVYSGTYKYIF

SEQ ID NO: 131896 - protein, 15 aa, Homo sapiens
  CDR3 for beta chain variable domain of TCR clone 65948 (TRBV25-1, TRBJ1-4)
CASSKRIATNEKLFF

SEQ ID NO: 131897 - protein, 16 aa, Homo sapiens
  CDR3 for alpha chain variable domain of TCR clone 65949 (TRAV3, TRAJ4)
CAVRPSASGGYNKLIF

SEQ ID NO: 131898 - protein, 12 aa, Homo sapiens
  CDR3 for beta chain variable domain of TCR clone 65949 (TRBV7-9, TRBJ2-7)
CASSQGVYEQYF

SEQ ID NO: 131899 - protein, 15 aa, Homo sapiens
  CDR3 for alpha chain variable domain of TCR clone 65950 (TRAV27, TRAJ38)
CAARRNAGNNRKLIW

SEQ ID NO: 131900 - protein, 16 aa, Homo sapiens
  CDR3 for beta chain variable domain of TCR clone 65950 (TRBV19, TRBJ1-1)
CASSPTRFWPGTEAFF

SEQ ID NO: 131901 - protein, 18 aa, Homo sapiens
  CDR3 for alpha chain variable domain of TCR clone 65951 (TRAV27, TRAJ3)
CLVIQASLRGSSASKIIF

SEQ ID NO: 131902 - protein, 15 aa, Homo sapiens
  CDR3 for beta chain variable domain of TCR clone 65951 (TRBV28, TRBJ1-3)
CASSMGWASGNTIYF

SEQ ID NO: 131903 - protein, 15 aa, Homo sapiens
  CDR3 for alpha chain variable domain of TCR clone 65952 (TRAV12-2, TRAJ53)
CAVNGGGGSNYKLTF

SEQ ID NO: 131904 - protein, 14 aa, Homo sapiens
  CDR3 for beta chain variable domain of TCR clone 65952 (TRBV7-3, TRBJ2-1)
CASSLAGGTNEQFF

SEQ ID NO: 131905 - protein, 18 aa, Homo sapiens
  CDR3 for alpha chain variable domain of TCR clone 65953 (TRAV13-2, TRAJ52)
CAETPLNAGGTSYGKLTF

SEQ ID NO: 131906 - protein, 14 aa, Homo sapiens
  CDR3 for beta chain variable domain of TCR clone 65953 (TRBV19, TRBJ2-1)
CASPTFVLSGEQFF

SEQ ID NO: 131907 - protein, 12 aa, Homo sapiens
  CDR3 for alpha chain variable domain of TCR clone 65954 (TRAV3, TRAJ33)
CAVRESNYQLIW

SEQ ID NO: 131908 - protein, 13 aa, Homo sapiens
  CDR3 for beta chain variable domain of TCR clone 65954 (TRBV12-4, TRBJ2-5)
CASRLAVQETQYF

SEQ ID NO: 131909 - protein, 14 aa, Homo sapiens
  CDR3 for alpha chain variable domain of TCR clone 65955 (TRAV27, TRAJ58)
CAGDGETSGSRLTF

SEQ ID NO: 131910 - protein, 17 aa, Homo sapiens
  CDR3 for beta chain variable domain of TCR clone 65955 (TRBV11-2, TRBJ2-1)
CASSLYPPGVEYNEQFF

SEQ ID NO: 131911 - protein, 14 aa, Homo sapiens
  CDR3 for alpha chain variable domain of TCR clone 65956 (TRAV8-3, TRAJ4)
CAVGASGGYNKLIF

SEQ ID NO: 131912 - protein, 19 aa, Homo sapiens
  CDR3 for beta chain variable domain of TCR clone 65956 (TRBV25-1, TRBJ2-2)
CAILVYRVDRGRKTGELFF

SEQ ID NO: 131913 - protein, 12 aa, Homo sapiens
  CDR3 for alpha chain variable domain of TCR clone 65957 (TRAV1-2, TRAJ9)
CAGYTGGLKTIF

SEQ ID NO: 131914 - protein, 15 aa, Homo sapiens
  CDR3 for beta chain variable domain of TCR clone 65957 (TRBV11-2, TRBJ2-1)
CASSPAGQSLNEQFF

SEQ ID NO: 131915 - protein, 13 aa, Homo sapiens
  CDR3 for alpha chain variable domain of TCR clone 65958 (TRAV8-3, TRAJ48)
CCGGNFGNEKLTF

SEQ ID NO: 131916 - protein, 12 aa, Homo sapiens
  CDR3 for beta chain variable domain of TCR clone 65958 (TRBV7-2, TRBJ2-5)
CASSQYQETQYF

SEQ ID NO: 131917 - protein, 16 aa, Homo sapiens
  CDR3 for alpha chain variable domain of TCR clone 65959 (TRAV13-2, TRAJ32)
CAEMENYGGATNKLIF

SEQ ID NO: 131918 - protein, 15 aa, Homo sapiens
  CDR3 for beta chain variable domain of TCR clone 65959 (TRBV11-3, TRBJ2-3)
CASLKDGREGDTQYF

SEQ ID NO: 131919 - protein, 14 aa, Homo sapiens
  CDR3 for alpha chain variable domain of TCR clone 65960 (TRAV12-2, TRAJ5)
CAVNRSTGRRALTF

SEQ ID NO: 131920 - protein, 12 aa, Homo sapiens
  CDR3 for beta chain variable domain of TCR clone 65960 (TRBV19, TRBJ1-5)
CASSIAQQPHHF

SEQ ID NO: 131921 - protein, 14 aa, Homo sapiens
  CDR3 for alpha chain variable domain of TCR clone 65961 (TRAV26-1, TRAJ57)
RIRAGQGGSEKLVF

SEQ ID NO: 131922 - protein, 13 aa, Homo sapiens
  CDR3 for beta chain variable domain of TCR clone 65961 (TRBV19, TRBJ2-7)
CASSLTTSYEQYF

SEQ ID NO: 131923 - protein, 11 aa, Homo sapiens
  CDR3 for alpha chain variable domain of TCR clone 65962 (TRAV21, TRAJ34)
CAVTNADKLIF

SEQ ID NO: 131924 - protein, 16 aa, Homo sapiens
  CDR3 for beta chain variable domain of TCR clone 65962 (TRBV18, TRBJ1-1)
CASSPGVGGRGGEAFF

SEQ ID NO: 131925 - protein, 16 aa, Homo sapiens
  CDR3 for alpha chain variable domain of TCR clone 65963 (TRAV4, TRAJ9)
CLVGDPSRPGGFKTIF

SEQ ID NO: 131926 - protein, 16 aa, Homo sapiens
  CDR3 for beta chain variable domain of TCR clone 65963 (TRBV28, TRBJ1-4)
CASSPPYRGRSEKLFF

SEQ ID NO: 131927 - protein, 16 aa, Homo sapiens
  CDR3 for alpha chain variable domain of TCR clone 65964 (TRAV30, TRAJ24)
CGTEIEDADSWGKFQF

SEQ ID NO: 131928 - protein, 15 aa, Homo sapiens
  CDR3 for beta chain variable domain of TCR clone 65964 (TRBV27, TRBJ2-1)
CASSNGGGSSNEQFF

SEQ ID NO: 131929 - protein, 14 aa, Homo sapiens
  CDR3 for alpha chain variable domain of TCR clone 65965 (TRAV12-2, TRAJ9)
CAVNALEGGFKTIF

SEQ ID NO: 131930 - protein, 16 aa, Homo sapiens
  CDR3 for beta chain variable domain of TCR clone 65965 (TRBV19, TRBJ1-6)
CASSVAPVAGKSPLHF

SEQ ID NO: 131931 - protein, 12 aa, Homo sapiens
  CDR3 for alpha chain variable domain of TCR clone 65966 (TRAV13-2, TRAJ23)
CAERHRGGKLIF

SEQ ID NO: 131932 - protein, 18 aa, Homo sapiens
  CDR3 for beta chain variable domain of TCR clone 65966 (TRBV11-2, TRBJ2-3)
CASSLGGASRGAPNTRYF

SEQ ID NO: 131933 - protein, 13 aa, Homo sapiens
  CDR3 for alpha chain variable domain of TCR clone 65967 (TRAV23/DV6, TRAJ24)
CAASEDSWGKLQF

SEQ ID NO: 131934 - protein, 12 aa, Homo sapiens
  CDR3 for beta chain variable domain of TCR clone 65967 (TRBV5-1, TRBJ2-7)
CASSDGTYEQYF

SEQ ID NO: 131935 - protein, 13 aa, Homo sapiens
  CDR3 for alpha chain variable domain of TCR clone 65968 (TRAV27, TRAJ3)
ASLRGSSASKIIF

SEQ ID NO: 131936 - protein, 16 aa, Homo sapiens
  CDR3 for beta chain variable domain of TCR clone 65968 (TRBV7-3, TRBJ2-2)
CASSLKRGTLSGELFF

SEQ ID NO: 131937 - protein, 13 aa, Homo sapiens
  CDR3 for alpha chain variable domain of TCR clone 65969 (TRAV3, TRAJ27)
CAARPLGAGKSTF

SEQ ID NO: 131938 - protein, 14 aa, Homo sapiens
  CDR3 for beta chain variable domain of TCR clone 65969 (TRBV6-1, TRBJ1-3)
CASVQGGGGNTIYF

SEQ ID NO: 131939 - protein, 14 aa, Homo sapiens
  CDR3 for alpha chain variable domain of TCR clone 65970 (TRAV12-2, TRAJ37)
CAVILSSNTGRLIF

SEQ ID NO: 131940 - protein, 15 aa, Homo sapiens
  CDR3 for beta chain variable domain of TCR clone 65970 (TRBV27, TRBJ1-6)
CASSFDRGLGSPLHF

SEQ ID NO: 131941 - protein, 11 aa, Homo sapiens
  CDR3 for alpha chain variable domain of TCR clone 65971 (TRAV8-1, TRAJ27)
CAVNAAGKSTF

SEQ ID NO: 131942 - protein, 12 aa, Homo sapiens
  CDR3 for beta chain variable domain of TCR clone 65971 (TRBV11-2, TRBJ2-3)
CASRPGTDTQYF

SEQ ID NO: 131943 - protein, 12 aa, Homo sapiens
  CDR3 for alpha chain variable domain of TCR clone 65972 (TRAV8-3, TRAJ41)
CAVALSGYAFNF

SEQ ID NO: 131944 - protein, 18 aa, Homo sapiens
  CDR3 for beta chain variable domain of TCR clone 65972 (TRBV20-1, TRBJ2-6)
CSAETTPTHGSGANVLTF

SEQ ID NO: 131945 - protein, 14 aa, Homo sapiens
  CDR3 for alpha chain variable domain of TCR clone 65973 (TRAV8-3, TRAJ22)
CAVKPPGSAKQLTF

SEQ ID NO: 131946 - protein, 14 aa, Homo sapiens
  CDR3 for beta chain variable domain of TCR clone 65973 (TRBV12-4, TRBJ2-2)
CASSLSQDTGELFF

SEQ ID NO: 131947 - protein, 14 aa, Homo sapiens
  CDR3 for alpha chain variable domain of TCR clone 65974 (TRAV12-3, TRAJ12)
CAMSEVDSSYKLVL

SEQ ID NO: 131948 - protein, 12 aa, Homo sapiens
  CDR3 for beta chain variable domain of TCR clone 65974 (TRBV18, TRBJ1-4)
CASSPSREKLFF

SEQ ID NO: 131949 - protein, 21 aa, Homo sapiens
  CDR3 for alpha chain variable domain of TCR clone 65975 (TRAV30, TRAJ43)
GLPAQLLRNLLPIIELNDMRF

SEQ ID NO: 131950 - protein, 13 aa, Homo sapiens
  CDR3 for beta chain variable domain of TCR clone 65975 (TRBV27, TRBJ2-1)
CQQTPGGGKEQFF

SEQ ID NO: 131951 - protein, 14 aa, Homo sapiens
  CDR3 for alpha chain variable domain of TCR clone 65976 (TRAV17, TRAJ34)
CATDSLEGTDKLIS

SEQ ID NO: 131952 - protein, 13 aa, Homo sapiens
  CDR3 for beta chain variable domain of TCR clone 65976 (TRBV11-2, TRBJ2-7)
CASSGTRPYEQYF

SEQ ID NO: 131953 - protein, 14 aa, Homo sapiens
  CDR3 for alpha chain variable domain of TCR clone 65977 (TRAV17, TRAJ6)
CATNPAGGSYIPTF

SEQ ID NO: 131954 - protein, 15 aa, Homo sapiens
  CDR3 for beta chain variable domain of TCR clone 65977 (TRBV2, TRBJ2-5)
YASSGTVAAGETQYF

SEQ ID NO: 131955 - protein, 16 aa, Homo sapiens
  CDR3 for alpha chain variable domain of TCR clone 65978 (TRAV16, TRAJ4)
CITVLPFSGGYNKLIF

SEQ ID NO: 131956 - protein, 15 aa, Homo sapiens
  CDR3 for beta chain variable domain of TCR clone 65978 (TRBV5-1, TRBJ1-2)
CASSLGSVTNYGYTF

SEQ ID NO: 131957 - protein, 16 aa, Homo sapiens
  CDR3 for alpha chain variable domain of TCR clone 65979 (TRAV12-3, TRAJ53)
CAMSPGSGGSNYKLTF

SEQ ID NO: 131958 - protein, 16 aa, Homo sapiens
  CDR3 for beta chain variable domain of TCR clone 65979 (TRBV4-2, TRBJ1-1)
CASSQAGFVMNTEAFF

SEQ ID NO: 131959 - protein, 14 aa, Homo sapiens
  CDR3 for alpha chain variable domain of TCR clone 65980 (TRAV12-2, TRAJ13)
CAVKKTGGYQKVTF

SEQ ID NO: 131960 - protein, 14 aa, Homo sapiens
  CDR3 for beta chain variable domain of TCR clone 65980 (TRBV5-5, TRBJ2-7)
CASGLGQGTYEQYF

SEQ ID NO: 131961 - protein, 14 aa, Homo sapiens
  CDR3 for alpha chain variable domain of TCR clone 65981 (TRAV12-3, TRAJ9)
CAMSPNTGGFKTIF

SEQ ID NO: 131962 - protein, 15 aa, Homo sapiens
  CDR3 for beta chain variable domain of TCR clone 65981 (TRBV11-3, TRBJ2-3)
CASLRDGREGDTQYF

SEQ ID NO: 131963 - protein, 11 aa, Homo sapiens
  CDR3 for alpha chain variable domain of TCR clone 65982 (TRAV2, TRAJ33)
CAVDSNYQLIW

SEQ ID NO: 131964 - protein, 16 aa, Homo sapiens
  CDR3 for beta chain variable domain of TCR clone 65982 (TRBV24-1, TRBJ2-3)
CATSDPGTGATDTQYF

SEQ ID NO: 131965 - protein, 10 aa, Homo sapiens
  CDR3 for alpha chain variable domain of TCR clone 65983 (TRAV23/DV6, TRAJ57)
CAASSTLSQG

SEQ ID NO: 131966 - protein, 14 aa, Homo sapiens
  CDR3 for beta chain variable domain of TCR clone 65983 (TRBV19, TRBJ1-5)
CASRAPDSFLSQHF

SEQ ID NO: 131967 - protein, 14 aa, Homo sapiens
  CDR3 for alpha chain variable domain of TCR clone 65984 (TRAV12-1, TRAJ30)
CVVRGMNRDDRIIF

SEQ ID NO: 131968 - protein, 14 aa, Homo sapiens
  CDR3 for beta chain variable domain of TCR clone 65984 (TRBV7-2, TRBJ2-1)
CASSLTSGNRRQFF

SEQ ID NO: 131969 - protein, 14 aa, Homo sapiens
  CDR3 for alpha chain variable domain of TCR clone 65985 (TRAV8-3, TRAJ9)
CAVVYNTGGFKTIF

SEQ ID NO: 131970 - protein, 14 aa, Homo sapiens
  CDR3 for beta chain variable domain of TCR clone 65985 (TRBV7-3, TRBJ2-2)
CASSSGGFTGELFF

SEQ ID NO: 131971 - protein, 14 aa, Homo sapiens
  CDR3 for alpha chain variable domain of TCR clone 65986 (TRAV12-3, TRAJ10)
SHLPLTGGGNKLTF

SEQ ID NO: 131972 - protein, 12 aa, Homo sapiens
  CDR3 for beta chain variable domain of TCR clone 65986 (TRBV7-9, TRBJ2-7)
RASSIKREEQYF

SEQ ID NO: 131973 - protein, 12 aa, Homo sapiens
  CDR3 for alpha chain variable domain of TCR clone 65987 (TRAV2, TRAJ33)
CAVEDSNYQLIW

SEQ ID NO: 131974 - protein, 14 aa, Homo sapiens
  CDR3 for beta chain variable domain of TCR clone 65987 (TRBV19, TRBJ1-4)
CASSINRGGEKLFF

SEQ ID NO: 131975 - protein, 16 aa, Homo sapiens
  CDR3 for alpha chain variable domain of TCR clone 65988 (TRAV23/DV6, TRAJ9)
CAASIGGNAGGFKTIF

SEQ ID NO: 131976 - protein, 15 aa, Homo sapiens
  CDR3 for beta chain variable domain of TCR clone 65988 (TRBV6-3, TRBJ2-7)
CASSSPGTVLYEQYF

SEQ ID NO: 131977 - protein, 13 aa, Homo sapiens
  CDR3 for alpha chain variable domain of TCR clone 65989 (TRAV8-2, TRAJ22)
CVVSSGSARQLTF

SEQ ID NO: 131978 - protein, 19 aa, Homo sapiens
  CDR3 for beta chain variable domain of TCR clone 65989 (TRBV25-1, TRBJ2-2)
CAILVYRVDRGRKTGELFF

SEQ ID NO: 131979 - protein, 19 aa, Homo sapiens
  CDR3 for alpha chain variable domain of TCR clone 65990 (TRAV1-1, TRAJ27)
CAGSEMTRSSLEKGHDFIF

SEQ ID NO: 131980 - protein, 14 aa, Homo sapiens
  CDR3 for beta chain variable domain of TCR clone 65990 (TRBV11-3, TRBJ1-6)
CASSFSGGDPPLHF

SEQ ID NO: 131981 - protein, 16 aa, Homo sapiens
  CDR3 for alpha chain variable domain of TCR clone 65991 (TRAV21, TRAJ37)
CAVRTAGSSITGKLIF

SEQ ID NO: 131982 - protein, 13 aa, Homo sapiens
  CDR3 for beta chain variable domain of TCR clone 65991 (TRBV7-9, TRBJ2-5)
CASLPSGRETQYF

SEQ ID NO: 131983 - protein, 17 aa, Homo sapiens
  CDR3 for alpha chain variable domain of TCR clone 65992 (TRAV8-4, TRAJ11)
CAVSDRGENSGYSTLTF

SEQ ID NO: 131984 - protein, 14 aa, Homo sapiens
  CDR3 for beta chain variable domain of TCR clone 65992 (TRBV20-1, TRBJ2-1)
CSPNDEASYSEQFF

SEQ ID NO: 131985 - protein, 12 aa, Homo sapiens
  CDR3 for alpha chain variable domain of TCR clone 65993 (TRAV17, TRAJ20)
CATDGDDYKLSF

SEQ ID NO: 131986 - protein, 12 aa, Homo sapiens
  CDR3 for beta chain variable domain of TCR clone 65993 (TRBV7-8, TRBJ2-7)
CASSLGDREQYF

SEQ ID NO: 131987 - protein, 16 aa, Homo sapiens
  CDR3 for alpha chain variable domain of TCR clone 65994 (TRAV35, TRAJ28)
CAGQKYSGAGRYQLTF

SEQ ID NO: 131988 - protein, 13 aa, Homo sapiens
  CDR3 for beta chain variable domain of TCR clone 65994 (TRBV19, TRBJ1-2)
CASSQGQVYGYTF

SEQ ID NO: 131989 - protein, 14 aa, Homo sapiens
  CDR3 for alpha chain variable domain of TCR clone 65995 (TRAV26-1, TRAJ34)
CIVRVAYNTDKLIF

SEQ ID NO: 131990 - protein, 13 aa, Homo sapiens
  CDR3 for beta chain variable domain of TCR clone 65995 (TRBV7-9, TRBJ2-7)
CASSLGLVGEQYF

SEQ ID NO: 131991 - protein, 13 aa, Homo sapiens
  CDR3 for alpha chain variable domain of TCR clone 65996 (TRAV8-3, TRAJ28)
GAVGAVGSYQLTF

SEQ ID NO: 131992 - protein, 15 aa, Homo sapiens
  CDR3 for beta chain variable domain of TCR clone 65996 (TRBV7-9, TRBJ1-5)
CASSQGHQPNQPQHF

SEQ ID NO: 131993 - protein, 14 aa, Homo sapiens
  CDR3 for alpha chain variable domain of TCR clone 65997 (TRAV12-2, TRAJ44)
CAVNPAGTASKLTF

SEQ ID NO: 131994 - protein, 13 aa, Homo sapiens
  CDR3 for beta chain variable domain of TCR clone 65997 (TRBV20-1, TRBJ1-6)
RSAPLGVGSPLHF

SEQ ID NO: 131995 - protein, 11 aa, Homo sapiens
  CDR3 for alpha chain variable domain of TCR clone 65998 (TRAV17, TRAJ9)
CATTGGFKTIF

SEQ ID NO: 131996 - protein, 16 aa, Homo sapiens
  CDR3 for beta chain variable domain of TCR clone 65998 (TRBV7-6, TRBJ2-3)
CASSLWREMGPDTQYF

SEQ ID NO: 131997 - protein, 13 aa, Homo sapiens
  CDR3 for alpha chain variable domain of TCR clone 65999 (TRAV21, TRAJ27)
CAARPGNAGKSTF

SEQ ID NO: 131998 - protein, 14 aa, Homo sapiens
  CDR3 for beta chain variable domain of TCR clone 65999 (TRBV7-6, TRBJ2-3)
CASSLGTVTDTLYF

SEQ ID NO: 131999 - protein, 12 aa, Homo sapiens
  CDR3 for alpha chain variable domain of TCR clone 66000 (TRAV8-3, TRAJ20)
CAVDFNDYKLSF

SEQ ID NO: 132000 - protein, 12 aa, Homo sapiens
  CDR3 for beta chain variable domain of TCR clone 66000 (TRBV12-4, TRBJ1-3)
CASSFSGNIIYF

SEQ ID NO: 132001 - protein, 20 aa, Homo sapiens
  CDR3 for alpha chain variable domain of TCR clone 66001 (TRAV26-1, TRAJ42)
CCVLLHRQTYYGGSQGNLIF

SEQ ID NO: 132002 - protein, 15 aa, Homo sapiens
  CDR3 for beta chain variable domain of TCR clone 66001 (TRBV7-3, TRBJ2-2)
CQQLKAGTLSGELLF

SEQ ID NO: 132003 - protein, 12 aa, Homo sapiens
  CDR3 for alpha chain variable domain of TCR clone 66002 (TRAV13-1, TRAJ21)
CAAKEGFNKFYF

SEQ ID NO: 132004 - protein, 13 aa, Homo sapiens
  CDR3 for beta chain variable domain of TCR clone 66002 (TRBV18, TRBJ1-1)
CASSGGRNTEAFF

SEQ ID NO: 132005 - protein, 14 aa, Homo sapiens
  CDR3 for alpha chain variable domain of TCR clone 66003 (TRAV12-2, TRAJ13)
CAVKKTGGYQKVTF

SEQ ID NO: 132006 - protein, 13 aa, Homo sapiens
  CDR3 for beta chain variable domain of TCR clone 66003 (TRBV19, TRBJ1-2)
CAGSVPGQDGYTF

SEQ ID NO: 132007 - protein, 14 aa, Homo sapiens
  CDR3 for alpha chain variable domain of TCR clone 66004 (TRAV2, TRAJ37)
CAVDFTSNTGKLIF

SEQ ID NO: 132008 - protein, 16 aa, Homo sapiens
  CDR3 for beta chain variable domain of TCR clone 66004 (TRBV7-2, TRBJ2-7)
CASSSQGLAPTYEQYF

SEQ ID NO: 132009 - protein, 16 aa, Homo sapiens
  CDR3 for alpha chain variable domain of TCR clone 66005 (TRAV2, TRAJ10)
CCGGSTVTGGGNKLTF

SEQ ID NO: 132010 - protein, 16 aa, Homo sapiens
  CDR3 for beta chain variable domain of TCR clone 66005 (TRBV18, TRBJ1-5)
CASSPSTGNSNQTQHF

SEQ ID NO: 132011 - protein, 14 aa, Homo sapiens
  CDR3 for alpha chain variable domain of TCR clone 66006 (TRAV17, TRAJ54)
CATDANQGARKLVF

SEQ ID NO: 132012 - protein, 14 aa, Homo sapiens
  CDR3 for beta chain variable domain of TCR clone 66006 (TRBV2, TRBJ1-1)
CASRDTIRNTEAFF

SEQ ID NO: 132013 - protein, 11 aa, Homo sapiens
  CDR3 for alpha chain variable domain of TCR clone 66007 (TRAV2, TRAJ23)
CAVETRGKLIF

SEQ ID NO: 132014 - protein, 14 aa, Homo sapiens
  CDR3 for beta chain variable domain of TCR clone 66007 (TRBV2, TRBJ2-3)
CASSEGQDTDTQYF

SEQ ID NO: 132015 - protein, 15 aa, Homo sapiens
  CDR3 for alpha chain variable domain of TCR clone 66008 (TRAV8-3, TRAJ40)
CAAPSLGSGTYKYIF

SEQ ID NO: 132016 - protein, 16 aa, Homo sapiens
  CDR3 for beta chain variable domain of TCR clone 66008 (TRBV7-3, TRBJ2-3)
CASSLSGYRPEETQYF

SEQ ID NO: 132017 - protein, 15 aa, Homo sapiens
  CDR3 for alpha chain variable domain of TCR clone 66009 (TRAV12-1, TRAJ9)
CVVSFGETGGFKTIF

SEQ ID NO: 132018 - protein, 13 aa, Homo sapiens
  CDR3 for beta chain variable domain of TCR clone 66009 (TRBV2, TRBJ1-4)
CASSERAGEKLFF

SEQ ID NO: 132019 - protein, 16 aa, Homo sapiens
  CDR3 for alpha chain variable domain of TCR clone 66010 (TRAV30, TRAJ24)
CGTEIVDADSWGKFQS

SEQ ID NO: 132020 - protein, 13 aa, Homo sapiens
  CDR3 for beta chain variable domain of TCR clone 66010 (TRBV7-9, TRBJ1-2)
CASSLKQNYGYTF

SEQ ID NO: 132021 - protein, 14 aa, Homo sapiens
  CDR3 for alpha chain variable domain of TCR clone 66011 (TRAV26-1, TRAJ48)
CIVRVGFGNEKLTF

SEQ ID NO: 132022 - protein, 13 aa, Homo sapiens
  CDR3 for beta chain variable domain of TCR clone 66011 (TRBV11-3, TRBJ2-3)
CAISHDTKDTQYF

SEQ ID NO: 132023 - protein, 13 aa, Homo sapiens
  CDR3 for alpha chain variable domain of TCR clone 66012 (TRAV35, TRAJ36)
CAGPRLGANNLFF

SEQ ID NO: 132024 - protein, 15 aa, Homo sapiens
  CDR3 for beta chain variable domain of TCR clone 66012 (TRBV28, TRBJ2-5)
CASSPPWSYQETQYF

SEQ ID NO: 132025 - protein, 13 aa, Homo sapiens
  CDR3 for alpha chain variable domain of TCR clone 66013 (TRAV27, TRAJ8)
CAGGPTGFQKLVF

SEQ ID NO: 132026 - protein, 14 aa, Homo sapiens
  CDR3 for beta chain variable domain of TCR clone 66013 (TRBV9, TRBJ2-2)
CASSVGQGAGELFF

SEQ ID NO: 132027 - protein, 14 aa, Homo sapiens
  CDR3 for alpha chain variable domain of TCR clone 66014 (TRAV2, TRAJ9)
CAVEDRSGGFKTIF

SEQ ID NO: 132028 - protein, 19 aa, Homo sapiens
  CDR3 for beta chain variable domain of TCR clone 66014 (TRBV4-1, TRBJ2-1)
CASSQGPLPGLGSRNEQFF

SEQ ID NO: 132029 - protein, 13 aa, Homo sapiens
  CDR3 for alpha chain variable domain of TCR clone 66015 (TRAV29/DV5, TRAJ31)
CAASRNNNARIMF

SEQ ID NO: 132030 - protein, 12 aa, Homo sapiens
  CDR3 for beta chain variable domain of TCR clone 66015 (TRBV14, TRBJ1-1)
CASSQLKGLAFF

SEQ ID NO: 132031 - protein, 12 aa, Homo sapiens
  CDR3 for alpha chain variable domain of TCR clone 66016 (TRAV8-1, TRAJ26)
CAVNNYGQNFVF

SEQ ID NO: 132032 - protein, 12 aa, Homo sapiens
  CDR3 for beta chain variable domain of TCR clone 66016 (TRBV5-5, TRBJ2-5)
CVSSYFGETQYF

SEQ ID NO: 132033 - protein, 11 aa, Homo sapiens
  CDR3 for alpha chain variable domain of TCR clone 66017 (TRAV23/DV6, TRAJ21)
CAANNFNKFYF

SEQ ID NO: 132034 - protein, 14 aa, Homo sapiens
  CDR3 for beta chain variable domain of TCR clone 66017 (TRBV4-1, TRBJ1-1)
CASSRSGQSFEAFF

SEQ ID NO: 132035 - protein, 14 aa, Homo sapiens
  CDR3 for alpha chain variable domain of TCR clone 66018 (TRAV9-2, TRAJ12)
CALRGMDSSYKLIF

SEQ ID NO: 132036 - protein, 14 aa, Homo sapiens
  CDR3 for beta chain variable domain of TCR clone 66018 (TRBV6-6, TRBJ2-3)
CASRLQREADTQYF

SEQ ID NO: 132037 - protein, 15 aa, Homo sapiens
  CDR3 for alpha chain variable domain of TCR clone 66019 (TRAV8-3, TRAJ27)
CAMGPSKTNAGKSTF

SEQ ID NO: 132038 - protein, 15 aa, Homo sapiens
  CDR3 for beta chain variable domain of TCR clone 66019 (TRBV7-2, TRBJ2-1)
CASSSGLAGGNEQFF

SEQ ID NO: 132039 - protein, 13 aa, Homo sapiens
  CDR3 for alpha chain variable domain of TCR clone 66020 (TRAV13-1, TRAJ39)
CAASIWAGNMLTF

SEQ ID NO: 132040 - protein, 15 aa, Homo sapiens
  CDR3 for beta chain variable domain of TCR clone 66020 (TRBV7-9, TRBJ1-1)
CASSLLEEGGTEAFF

SEQ ID NO: 132041 - protein, 12 aa, Homo sapiens
  CDR3 for alpha chain variable domain of TCR clone 66021 (TRAV12-3, TRAJ17)
CAMTLAGNKLTL

SEQ ID NO: 132042 - protein, 15 aa, Homo sapiens
  CDR3 for beta chain variable domain of TCR clone 66021 (TRBV29-1, TRBJ2-6)
CSFTGGRSGANVLTF

SEQ ID NO: 132043 - protein, 15 aa, Homo sapiens
  CDR3 for alpha chain variable domain of TCR clone 66022 (TRAV12-1, TRAJ44)
CVADLPTGTASKLTF

SEQ ID NO: 132044 - protein, 13 aa, Homo sapiens
  CDR3 for beta chain variable domain of TCR clone 66022 (TRBV6-5, TRBJ2-5)
CASSPQEGETQYF

SEQ ID NO: 132045 - protein, 14 aa, Homo sapiens
  CDR3 for alpha chain variable domain of TCR clone 66023 (TRAV1-2, TRAJ16)
CAVNRFSDGQKLLF

SEQ ID NO: 132046 - protein, 15 aa, Homo sapiens
  CDR3 for beta chain variable domain of TCR clone 66023 (TRBV27, TRBJ2-7)
CASSKAGRGGYEQYF

SEQ ID NO: 132047 - protein, 12 aa, Homo sapiens
  CDR3 for alpha chain variable domain of TCR clone 66024 (TRAV3, TRAJ20)
CAVRDGDYKLSF

SEQ ID NO: 132048 - protein, 13 aa, Homo sapiens
  CDR3 for beta chain variable domain of TCR clone 66024 (TRBV12-4, TRBJ1-2)
CASSLRQGKGYTF

SEQ ID NO: 132049 - protein, 18 aa, Homo sapiens
  CDR3 for alpha chain variable domain of TCR clone 66025 (TRAV21, TRAJ52)
CAVRPSPAGGTSYGKLTF

SEQ ID NO: 132050 - protein, 14 aa, Homo sapiens
  CDR3 for beta chain variable domain of TCR clone 66025 (TRBV6-6, TRBJ1-6)
CASGFEGTTSPLHF

SEQ ID NO: 132051 - protein, 12 aa, Homo sapiens
  CDR3 for alpha chain variable domain of TCR clone 66026 (TRAV12-3, TRAJ17)
SAMTLTGNKLTF

SEQ ID NO: 132052 - protein, 13 aa, Homo sapiens
  CDR3 for beta chain variable domain of TCR clone 66026 (TRBV19, TRBJ1-5)
CASSIGGNQPQHF

SEQ ID NO: 132053 - protein, 15 aa, Homo sapiens
  CDR3 for alpha chain variable domain of TCR clone 66027 (TRAV14/DV4, TRAJ33)
CAMREGRESNYQLIW

SEQ ID NO: 132054 - protein, 15 aa, Homo sapiens
  CDR3 for beta chain variable domain of TCR clone 66027 (TRBV5-5, TRBJ1-5)
CASSSTPGSNQPQHF

SEQ ID NO: 132055 - protein, 10 aa, Homo sapiens
  CDR3 for alpha chain variable domain of TCR clone 66028 (TRAV35, TRAJ41)
DANSGYALNF

SEQ ID NO: 132056 - protein, 14 aa, Homo sapiens
  CDR3 for beta chain variable domain of TCR clone 66028 (TRBV9, TRBJ2-3)
CARSVGLSTDTQYF

SEQ ID NO: 132057 - protein, 12 aa, Homo sapiens
  CDR3 for alpha chain variable domain of TCR clone 66029 (TRAV12-2, TRAJ47)
CAVAEYGNKLVF

SEQ ID NO: 132058 - protein, 13 aa, Homo sapiens
  CDR3 for beta chain variable domain of TCR clone 66029 (TRBV19, TRBJ1-2)
CASSVPGQDGYTF

SEQ ID NO: 132059 - protein, 12 aa, Homo sapiens
  CDR3 for alpha chain variable domain of TCR clone 66030 (TRAV2, TRAJ33)
CAVPDSNYQLIW

SEQ ID NO: 132060 - protein, 15 aa, Homo sapiens
  CDR3 for beta chain variable domain of TCR clone 66030 (TRBV15, TRBJ1-5)
CATSRDPASNQPQHF

SEQ ID NO: 132061 - protein, 14 aa, Homo sapiens
  CDR3 for alpha chain variable domain of TCR clone 66031 (TRAV12-2, TRAJ13)
CAVKKTGGYQKATF

SEQ ID NO: 132062 - protein, 14 aa, Homo sapiens
  CDR3 for beta chain variable domain of TCR clone 66031 (TRBV12-5, TRBJ2-5)
CASGSRTHQETQYF

SEQ ID NO: 132063 - protein, 12 aa, Homo sapiens
  CDR3 for alpha chain variable domain of TCR clone 66032 (TRAV1-1, TRAJ9)
CAVDTGGFKTIF

SEQ ID NO: 132064 - protein, 18 aa, Homo sapiens
  CDR3 for beta chain variable domain of TCR clone 66032 (TRBV20-1, TRBJ2-2)
CSARVQTARPSGTGELFF

SEQ ID NO: 132065 - protein, 16 aa, Homo sapiens
  CDR3 for alpha chain variable domain of TCR clone 66033 (TRAV30, TRAJ24)
CGTEIVDADSWGKFQF

SEQ ID NO: 132066 - protein, 13 aa, Homo sapiens
  CDR3 for beta chain variable domain of TCR clone 66033 (TRBV6-4, TRBJ2-3)
CASSVSWADTQYF

SEQ ID NO: 132067 - protein, 13 aa, Homo sapiens
  CDR3 for alpha chain variable domain of TCR clone 66034 (TRAV2, TRAJ40)
CAVVTSGTYKYIL

SEQ ID NO: 132068 - protein, 14 aa, Homo sapiens
  CDR3 for beta chain variable domain of TCR clone 66034 (TRBV19, TRBJ2-1)
CASPNFVLSGEQFF

SEQ ID NO: 132069 - protein, 14 aa, Homo sapiens
  CDR3 for alpha chain variable domain of TCR clone 66035 (TRAV16, TRAJ57)
CALPTQGGPEKLVF

SEQ ID NO: 132070 - protein, 15 aa, Homo sapiens
  CDR3 for beta chain variable domain of TCR clone 66035 (TRBV28, TRBJ1-3)
CASWGGHLSGNTIYF

SEQ ID NO: 132071 - protein, 13 aa, Homo sapiens
  CDR3 for alpha chain variable domain of TCR clone 66036 (TRAV12-1, TRAJ31)
CVVNMNNNARLMF

SEQ ID NO: 132072 - protein, 15 aa, Homo sapiens
  CDR3 for beta chain variable domain of TCR clone 66036 (TRBV4-1, TRBJ1-2)
CASSQGQGAAYGYTF

SEQ ID NO: 132073 - protein, 12 aa, Homo sapiens
  CDR3 for alpha chain variable domain of TCR clone 66037 (TRAV30, TRAJ43)
CGTEERGNDMRF

SEQ ID NO: 132074 - protein, 11 aa, Homo sapiens
  CDR3 for beta chain variable domain of TCR clone 66037 (TRBV29-1, TRBJ2-5)
CSEDRTGTQYF

SEQ ID NO: 132075 - protein, 15 aa, Homo sapiens
  CDR3 for alpha chain variable domain of TCR clone 66038 (TRAV35, TRAJ40)
CAGQLGNSGTYKYIF

SEQ ID NO: 132076 - protein, 14 aa, Homo sapiens
  CDR3 for beta chain variable domain of TCR clone 66038 (TRBV7-3, TRBJ2-1)
CASSLAGGTNEQFF

SEQ ID NO: 132077 - protein, 13 aa, Homo sapiens
  CDR3 for alpha chain variable domain of TCR clone 66039 (TRAV8-3, TRAJ48)
CAVVPFGNEKLTF

SEQ ID NO: 132078 - protein, 13 aa, Homo sapiens
  CDR3 for beta chain variable domain of TCR clone 66039 (TRBV7-9, TRBJ1-2)
CASSLKQNYGYTF

SEQ ID NO: 132079 - protein, 14 aa, Homo sapiens
  CDR3 for alpha chain variable domain of TCR clone 66040 (TRAV17, TRAJ54)
CATDANQGAQKLVF

SEQ ID NO: 132080 - protein, 12 aa, Homo sapiens
  CDR3 for beta chain variable domain of TCR clone 66040 (TRBV6-3, TRBJ2-1)
CARSGSYNEQFF

SEQ ID NO: 132081 - protein, 11 aa, Homo sapiens
  CDR3 for alpha chain variable domain of TCR clone 66041 (TRAV3, TRAJ21)
CAVGNFNKFYF

SEQ ID NO: 132082 - protein, 13 aa, Homo sapiens
  CDR3 for beta chain variable domain of TCR clone 66041 (TRBV7-6, TRBJ2-7)
CASSLDHTHEQYF

SEQ ID NO: 132083 - protein, 16 aa, Homo sapiens
  CDR3 for alpha chain variable domain of TCR clone 66042 (TRAV12-1, TRAJ53)
CVVTSVAGGSNYKLTF

SEQ ID NO: 132084 - protein, 16 aa, Homo sapiens
  CDR3 for beta chain variable domain of TCR clone 66042 (TRBV7-9, TRBJ1-2)
CASSPGGGAINYGYTF

SEQ ID NO: 132085 - protein, 23 aa, Homo sapiens
  CDR3 for alpha chain variable domain of TCR clone 66043 (TRAV21, TRAJ39)
AASQPGDSATHPLLVNAGNMLTF

SEQ ID NO: 132086 - protein, 14 aa, Homo sapiens
  CDR3 for beta chain variable domain of TCR clone 66043 (TRBV28, TRBJ1-1)
CASSSEQGYTEAFF

SEQ ID NO: 132087 - protein, 13 aa, Homo sapiens
  CDR3 for alpha chain variable domain of TCR clone 66044 (TRAV14/DV4, TRAJ20)
CVMRESNDYKLSF

SEQ ID NO: 132088 - protein, 15 aa, Homo sapiens
  CDR3 for beta chain variable domain of TCR clone 66044 (TRBV7-9, TRBJ1-1)
CASSRPGTANTEAFF

SEQ ID NO: 132089 - protein, 12 aa, Homo sapiens
  CDR3 for alpha chain variable domain of TCR clone 66045 (TRAV12-2, TRAJ21)
CAVNRNFNKFHF

SEQ ID NO: 132090 - protein, 14 aa, Homo sapiens
  CDR3 for beta chain variable domain of TCR clone 66045 (TRBV12-4, TRBJ2-3)
CASSLSGATDTQYF

SEQ ID NO: 132091 - protein, 15 aa, Homo sapiens
  CDR3 for alpha chain variable domain of TCR clone 66046 (TRAV13-1, TRAJ44)
CAASRGGGTANKLTF

SEQ ID NO: 132092 - protein, 14 aa, Homo sapiens
  CDR3 for beta chain variable domain of TCR clone 66046 (TRBV7-2, TRBJ2-5)
CASSPRGSSETQYF

SEQ ID NO: 132093 - protein, 14 aa, Homo sapiens
  CDR3 for alpha chain variable domain of TCR clone 66047 (TRAV17, TRAJ54)
CATDANQGAQKLVF

SEQ ID NO: 132094 - protein, 15 aa, Homo sapiens
  CDR3 for beta chain variable domain of TCR clone 66047 (TRBV7-8, TRBJ1-5)
CASSLERRGLEPQHF

SEQ ID NO: 132095 - protein, 11 aa, Homo sapiens
  CDR3 for alpha chain variable domain of TCR clone 66048 (TRAV21, TRAJ48)
CAVDGNEKLTF

SEQ ID NO: 132096 - protein, 16 aa, Homo sapiens
  CDR3 for beta chain variable domain of TCR clone 66048 (TRBV12-4, TRBJ1-5)
CASSSGPRGSNQPHHF

SEQ ID NO: 132097 - protein, 15 aa, Homo sapiens
  CDR3 for alpha chain variable domain of TCR clone 66049 (TRAV12-3, TRAJ49)
CAMAVTPNTGNQFYF

SEQ ID NO: 132098 - protein, 18 aa, Homo sapiens
  CDR3 for beta chain variable domain of TCR clone 66049 (TRBV4-1, TRBJ1-5)
CASSQDPLGQGLNQPQHF

SEQ ID NO: 132099 - protein, 15 aa, Homo sapiens
  CDR3 for alpha chain variable domain of TCR clone 66050 (TRAV2, TRAJ9)
CAVEDRGTGGFETIF

SEQ ID NO: 132100 - protein, 16 aa, Homo sapiens
  CDR3 for beta chain variable domain of TCR clone 66050 (TRBV24-1, TRBJ2-3)
CAASDPGTGATDTQYF

SEQ ID NO: 132101 - protein, 11 aa, Homo sapiens
  CDR3 for alpha chain variable domain of TCR clone 66051 (TRAV1-2, TRAJ20)
CAVANDYKLSF

SEQ ID NO: 132102 - protein, 14 aa, Homo sapiens
  CDR3 for beta chain variable domain of TCR clone 66051 (TRBV7-2, TRBJ1-1)
CASSFLTGTTEAFF

SEQ ID NO: 132103 - protein, 15 aa, Homo sapiens
  CDR3 for alpha chain variable domain of TCR clone 66052 (TRAV26-1, TRAJ29)
CIVRVEGSGNTPLVF

SEQ ID NO: 132104 - protein, 14 aa, Homo sapiens
  CDR3 for beta chain variable domain of TCR clone 66052 (TRBV5-1, TRBJ2-7)
CASSRGESLYEQYF

SEQ ID NO: 132105 - protein, 22 aa, Homo sapiens
  CDR3 for alpha chain variable domain of TCR clone 66053 (TRAV2, TRAJ38)
CAVEDFPNAGNNHIQNPDPAVY

SEQ ID NO: 132106 - protein, 14 aa, Homo sapiens
  CDR3 for beta chain variable domain of TCR clone 66053 (TRBV29-1, TRBJ1-4)
CSVSGRQGGEKLSF

SEQ ID NO: 132107 - protein, 12 aa, Homo sapiens
  CDR3 for alpha chain variable domain of TCR clone 66054 (TRAV26-2, TRAJ48)
CILRKGNEKLTL

SEQ ID NO: 132108 - protein, 14 aa, Homo sapiens
  CDR3 for beta chain variable domain of TCR clone 66054 (TRBV28, TRBJ2-7)
CASSTLRGRFEQYF

SEQ ID NO: 132109 - protein, 14 aa, Homo sapiens
  CDR3 for alpha chain variable domain of TCR clone 66055 (TRAV1-2, TRAJ16)
CAVNRFSDGQKLLF

SEQ ID NO: 132110 - protein, 15 aa, Homo sapiens
  CDR3 for beta chain variable domain of TCR clone 66055 (TRBV7-6, TRBJ2-5)
CASSKPTGPQETQYF

SEQ ID NO: 132111 - protein, 11 aa, Homo sapiens
  CDR3 for alpha chain variable domain of TCR clone 66056 (TRAV3, TRAJ49)
CAPITGNPFYF

SEQ ID NO: 132112 - protein, 16 aa, Homo sapiens
  CDR3 for beta chain variable domain of TCR clone 66056 (TRBV5-1, TRBJ2-3)
CASSVFPMSSTDTQYF

SEQ ID NO: 132113 - protein, 15 aa, Homo sapiens
  CDR3 for alpha chain variable domain of TCR clone 66057 (TRAV26-2, TRAJ57)
CILRDIRGGSEKLVF

SEQ ID NO: 132114 - protein, 15 aa, Homo sapiens
  CDR3 for beta chain variable domain of TCR clone 66057 (TRBV2, TRBJ2-1)
CASDIGLAGEGGQFF

SEQ ID NO: 132115 - protein, 11 aa, Homo sapiens
  CDR3 for alpha chain variable domain of TCR clone 66058 (TRAV3, TRAJ21)
CAVGNFNKFYF

SEQ ID NO: 132116 - protein, 13 aa, Homo sapiens
  CDR3 for beta chain variable domain of TCR clone 66058 (TRBV7-6, TRBJ2-3)
CASSLRSDNTQYF

SEQ ID NO: 132117 - protein, 14 aa, Homo sapiens
  CDR3 for alpha chain variable domain of TCR clone 66059 (TRAV23/DV6, TRAJ6)
CAAIPSRGSYIPTF

SEQ ID NO: 132118 - protein, 17 aa, Homo sapiens
  CDR3 for beta chain variable domain of TCR clone 66059 (TRBV7-2, TRBJ2-3)
CASSLGGRAAWRDTQYF

SEQ ID NO: 132119 - protein, 14 aa, Homo sapiens
  CDR3 for alpha chain variable domain of TCR clone 66060 (TRAV9-2, TRAJ39)
CALYIYNAGNMLTF

SEQ ID NO: 132120 - protein, 13 aa, Homo sapiens
  CDR3 for beta chain variable domain of TCR clone 66060 (TRBV18, TRBJ1-1)
CASSPETKPEAFF

SEQ ID NO: 132121 - protein, 15 aa, Homo sapiens
  CDR3 for alpha chain variable domain of TCR clone 66061 (TRAV8-6, TRAJ10)
CAVSDQAGGGNKLTF

SEQ ID NO: 132122 - protein, 14 aa, Homo sapiens
  CDR3 for beta chain variable domain of TCR clone 66061 (TRBV12-4, TRBJ1-1)
CASSLGTGGTEAFF

SEQ ID NO: 132123 - protein, 14 aa, Homo sapiens
  CDR3 for alpha chain variable domain of TCR clone 66062 (TRAV21, TRAJ35)
CAVMPIGFGNVLHC

SEQ ID NO: 132124 - protein, 13 aa, Homo sapiens
  CDR3 for beta chain variable domain of TCR clone 66062 (TRBV23-1, TRBJ1-4)
CASRGKFNEKLFF

SEQ ID NO: 132125 - protein, 13 aa, Homo sapiens
  CDR3 for alpha chain variable domain of TCR clone 66063 (TRAV12-3, TRAJ43)
CAMIRPNNNDMRF

SEQ ID NO: 132126 - protein, 14 aa, Homo sapiens
  CDR3 for beta chain variable domain of TCR clone 66063 (TRBV4-1, TRBJ2-2)
CASSQAVNTGELFF

SEQ ID NO: 132127 - protein, 12 aa, Homo sapiens
  CDR3 for alpha chain variable domain of TCR clone 66064 (TRAV23/DV6, TRAJ24)
CAANDSWGKLQL

SEQ ID NO: 132128 - protein, 16 aa, Homo sapiens
  CDR3 for beta chain variable domain of TCR clone 66064 (TRBV12-4, TRBJ2-5)
CASSLSTSGGKETQYF

SEQ ID NO: 132129 - protein, 16 aa, Homo sapiens
  CDR3 for alpha chain variable domain of TCR clone 66065 (TRAV4, TRAJ22)
CLVGDLYSGSARRLTF

SEQ ID NO: 132130 - protein, 16 aa, Homo sapiens
  CDR3 for beta chain variable domain of TCR clone 66065 (TRBV6-1, TRBJ2-5)
CASSETLDRGAETQYF

SEQ ID NO: 132131 - protein, 14 aa, Homo sapiens
  CDR3 for alpha chain variable domain of TCR clone 66066 (TRAV8-4, TRAJ54)
CAVSEVLGAQKLVF

SEQ ID NO: 132132 - protein, 18 aa, Homo sapiens
  CDR3 for beta chain variable domain of TCR clone 66066 (TRBV11-2, TRBJ2-3)
CASSLGGASRGAPNTQYF

SEQ ID NO: 132133 - protein, 13 aa, Homo sapiens
  CDR3 for alpha chain variable domain of TCR clone 66067 (TRAV1-2, TRAJ17)
CAVGKAAGNKLTF

SEQ ID NO: 132134 - protein, 13 aa, Homo sapiens
  CDR3 for beta chain variable domain of TCR clone 66067 (TRBV7-9, TRBJ2-1)
CASSWESYNEQFF

SEQ ID NO: 132135 - protein, 12 aa, Homo sapiens
  CDR3 for alpha chain variable domain of TCR clone 66068 (TRAV12-3, TRAJ3)
CAIDSSASKIIF

SEQ ID NO: 132136 - protein, 10 aa, Homo sapiens
  CDR3 for beta chain variable domain of TCR clone 66068 (TRBV7-9, TRBJ2-3)
CASSLEEAGA

SEQ ID NO: 132137 - protein, 16 aa, Homo sapiens
  CDR3 for alpha chain variable domain of TCR clone 66069 (TRAV2, TRAJ4)
CAVEDRFSGGYNKLIF

SEQ ID NO: 132138 - protein, 13 aa, Homo sapiens
  CDR3 for beta chain variable domain of TCR clone 66069 (TRBV7-9, TRBJ1-2)
CASSLKQNYGYTF

SEQ ID NO: 132139 - protein, 13 aa, Homo sapiens
  CDR3 for alpha chain variable domain of TCR clone 66070 (TRAV21, TRAJ57)
CAVTQGGSEKLVF

SEQ ID NO: 132140 - protein, 14 aa, Homo sapiens
  CDR3 for beta chain variable domain of TCR clone 66070 (TRBV2, TRBJ2-1)
CASSARAAYNEQFF

SEQ ID NO: 132141 - protein, 16 aa, Homo sapiens
  CDR3 for alpha chain variable domain of TCR clone 66071 (TRAV12-3, TRAJ53)
CAMSPGSGGSNYKLTF

SEQ ID NO: 132142 - protein, 12 aa, Homo sapiens
  CDR3 for beta chain variable domain of TCR clone 66071 (TRBV7-9, TRBJ2-7)
CASSIKREEQYF

SEQ ID NO: 132143 - protein, 11 aa, Homo sapiens
  CDR3 for alpha chain variable domain of TCR clone 66072 (TRAV2, TRAJ21)
CAVFNFNKFYF

SEQ ID NO: 132144 - protein, 14 aa, Homo sapiens
  CDR3 for beta chain variable domain of TCR clone 66072 (TRBV15, TRBJ2-3)
CDTRSGTSTDTQYF

SEQ ID NO: 132145 - protein, 12 aa, Homo sapiens
  CDR3 for alpha chain variable domain of TCR clone 66073 (TRAV29/DV5, TRAJ49)
CAATDTGNQFYF

SEQ ID NO: 132146 - protein, 19 aa, Homo sapiens
  CDR3 for beta chain variable domain of TCR clone 66073 (TRBV25-1, TRBJ2-2)
CAILVYRLDRGRKTGELFF

SEQ ID NO: 132147 - protein, 13 aa, Homo sapiens
  CDR3 for alpha chain variable domain of TCR clone 66074 (TRAV3, TRAJ27)
CAVRPLGAGKSTF

SEQ ID NO: 132148 - protein, 13 aa, Homo sapiens
  CDR3 for beta chain variable domain of TCR clone 66074 (TRBV19, TRBJ2-7)
CASSTTGNYERYF

SEQ ID NO: 132149 - protein, 10 aa, Homo sapiens
  CDR3 for alpha chain variable domain of TCR clone 66075 (TRAV21, TRAJ31)
CSVDNARLMF

SEQ ID NO: 132150 - protein, 13 aa, Homo sapiens
  CDR3 for beta chain variable domain of TCR clone 66075 (TRBV4-1, TRBJ1-1)
CASSRKMNTEAFF

SEQ ID NO: 132151 - protein, 15 aa, Homo sapiens
  CDR3 for alpha chain variable domain of TCR clone 66076 (TRAV13-1, TRAJ57)
CAASNTQGRSEKLVF

SEQ ID NO: 132152 - protein, 16 aa, Homo sapiens
  CDR3 for beta chain variable domain of TCR clone 66076 (TRBV19, TRBJ2-1)
CASSKAGPSSYNEQFF

SEQ ID NO: 132153 - protein, 14 aa, Homo sapiens
  CDR3 for alpha chain variable domain of TCR clone 66077 (TRAV4, TRAJ26)
CLVGPHNYGQNFVF

SEQ ID NO: 132154 - protein, 17 aa, Homo sapiens
  CDR3 for beta chain variable domain of TCR clone 66077 (TRBV24-1, TRBJ2-1)
CATSDVSTSRTYNEQFF

SEQ ID NO: 132155 - protein, 14 aa, Homo sapiens
  CDR3 for alpha chain variable domain of TCR clone 66078 (TRAV26-1, TRAJ48)
CIVRVGFGHEKLTF

SEQ ID NO: 132156 - protein, 13 aa, Homo sapiens
  CDR3 for beta chain variable domain of TCR clone 66078 (TRBV11-3, TRBJ2-3)
CASSHDTKDTQYF

SEQ ID NO: 132157 - protein, 14 aa, Homo sapiens
  CDR3 for alpha chain variable domain of TCR clone 66079 (TRAV17, TRAJ34)
CATDSLEGTDKLIF

SEQ ID NO: 132158 - protein, 13 aa, Homo sapiens
  CDR3 for beta chain variable domain of TCR clone 66079 (TRBV11-2, TRBJ2-7)
CASSGTRPYEKYF

SEQ ID NO: 132159 - protein, 12 aa, Homo sapiens
  CDR3 for alpha chain variable domain of TCR clone 66080 (TRAV12-3, TRAJ17)
CAMTLTGNKLTF

SEQ ID NO: 132160 - protein, 16 aa, Homo sapiens
  CDR3 for beta chain variable domain of TCR clone 66080 (TRBV29-1, TRBJ2-6)
CSVEDITYSGANVLTF

SEQ ID NO: 132161 - protein, 13 aa, Homo sapiens
  CDR3 for alpha chain variable domain of TCR clone 66081 (TRAV12-2, TRAJ47)
CAVFMEYGNKLGF

SEQ ID NO: 132162 - protein, 14 aa, Homo sapiens
  CDR3 for beta chain variable domain of TCR clone 66081 (TRBV4-1, TRBJ1-5)
CASSQGPTNQPQHF

SEQ ID NO: 132163 - protein, 17 aa, Homo sapiens
  CDR3 for alpha chain variable domain of TCR clone 66082 (TRAV3, TRAJ42)
CAVRDRDYGGSQGNLIF

SEQ ID NO: 132164 - protein, 13 aa, Homo sapiens
  CDR3 for beta chain variable domain of TCR clone 66082 (TRBV19, TRBJ2-7)
CASSIRSSYEQYF

SEQ ID NO: 132165 - protein, 15 aa, Homo sapiens
  CDR3 for alpha chain variable domain of TCR clone 66083 (TRAV17, TRAJ23)
CATDAEDNQGGKLIF

SEQ ID NO: 132166 - protein, 12 aa, Homo sapiens
  CDR3 for beta chain variable domain of TCR clone 66083 (TRBV2, TRBJ2-1)
CAKREGCNEQFF

SEQ ID NO: 132167 - protein, 15 aa, Homo sapiens
  CDR3 for alpha chain variable domain of TCR clone 66084 (TRAV10, TRAJ10)
CVVSADTGGGNKLTF

SEQ ID NO: 132168 - protein, 15 aa, Homo sapiens
  CDR3 for beta chain variable domain of TCR clone 66084 (TRBV11-3, TRBJ2-7)
CASSLLSGSSYEQYL

SEQ ID NO: 132169 - protein, 13 aa, Homo sapiens
  CDR3 for alpha chain variable domain of TCR clone 66085 (TRAV12-1, TRAJ26)
SATYLYYGQNFVF

SEQ ID NO: 132170 - protein, 15 aa, Homo sapiens
  CDR3 for beta chain variable domain of TCR clone 66085 (TRBV5-1, TRBJ2-6)
CASSLDPSGADVLTF

SEQ ID NO: 132171 - protein, 13 aa, Homo sapiens
  CDR3 for alpha chain variable domain of TCR clone 66086 (TRAV13-2, TRAJ21)
CAENVGQLQQTLL

SEQ ID NO: 132172 - protein, 16 aa, Homo sapiens
  CDR3 for beta chain variable domain of TCR clone 66086 (TRBV3-1, TRBJ2-5)
CASSQDWASGQETQYF

SEQ ID NO: 132173 - protein, 14 aa, Homo sapiens
  CDR3 for alpha chain variable domain of TCR clone 66087 (TRAV1-2, TRAJ8)
CAVREDTGFQKLVV

SEQ ID NO: 132174 - protein, 16 aa, Homo sapiens
  CDR3 for beta chain variable domain of TCR clone 66087 (TRBV12-5, TRBJ2-5)
CASGPRTSGNQETQYF

SEQ ID NO: 132175 - protein, 14 aa, Homo sapiens
  CDR3 for alpha chain variable domain of TCR clone 66088 (TRAV17, TRAJ16)
CATAYFSDGQKLLF

SEQ ID NO: 132176 - protein, 15 aa, Homo sapiens
  CDR3 for beta chain variable domain of TCR clone 66088 (TRBV18, TRBJ2-1)
CASSPPSASYNEQFF

SEQ ID NO: 132177 - protein, 14 aa, Homo sapiens
  CDR3 for alpha chain variable domain of TCR clone 66089 (TRAV8-1, TRAJ34)
CAVNPSYNTDKLIF

SEQ ID NO: 132178 - protein, 16 aa, Homo sapiens
  CDR3 for beta chain variable domain of TCR clone 66089 (TRBV7-2, TRBJ2-6)
CASSVAGRSGANVLTF

SEQ ID NO: 132179 - protein, 13 aa, Homo sapiens
  CDR3 for alpha chain variable domain of TCR clone 66090 (TRAV38-1, TRAJ42)
CARWGGSQGNLSF

SEQ ID NO: 132180 - protein, 17 aa, Homo sapiens
  CDR3 for beta chain variable domain of TCR clone 66090 (TRBV20-1, TRBJ2-1)
CSARDPLAGVWDNEQFF

SEQ ID NO: 132181 - protein, 13 aa, Homo sapiens
  CDR3 for alpha chain variable domain of TCR clone 66091 (TRAV14/DV4, TRAJ4)
CAMKAGGYNKLIF

SEQ ID NO: 132182 - protein, 15 aa, Homo sapiens
  CDR3 for beta chain variable domain of TCR clone 66091 (TRBV11-3, TRBJ1-1)
CASSLGGPGDTEAVF

SEQ ID NO: 132183 - protein, 14 aa, Homo sapiens
  CDR3 for alpha chain variable domain of TCR clone 66092 (TRAV3, TRAJ21)
CAVESQANFNKFYF

SEQ ID NO: 132184 - protein, 18 aa, Homo sapiens
  CDR3 for beta chain variable domain of TCR clone 66092 (TRBV7-9, TRBJ2-1)
CASSLAVPGTSGRNEQFF

SEQ ID NO: 132185 - protein, 13 aa, Homo sapiens
  CDR3 for alpha chain variable domain of TCR clone 66093 (TRAV13-1, TRAJ21)
CAASIYNFNKFYF

SEQ ID NO: 132186 - protein, 15 aa, Homo sapiens
  CDR3 for beta chain variable domain of TCR clone 66093 (TRBV11-2, TRBJ2-2)
CASSSDRVNAGELFF

SEQ ID NO: 132187 - protein, 15 aa, Homo sapiens
  CDR3 for alpha chain variable domain of TCR clone 66094 (TRAV17, TRAJ57)
CATGHSQGGSEKLVF

SEQ ID NO: 132188 - protein, 14 aa, Homo sapiens
  CDR3 for beta chain variable domain of TCR clone 66094 (TRBV12-5, TRBJ2-5)
CASGSRTHQETQYF

SEQ ID NO: 132189 - protein, 20 aa, Homo sapiens
  CDR3 for alpha chain variable domain of TCR clone 66095 (TRAV1-1, TRAJ4)
CLLLLRCEGFLSGGYNKLIF

SEQ ID NO: 132190 - protein, 16 aa, Homo sapiens
  CDR3 for beta chain variable domain of TCR clone 66095 (TRBV28, TRBJ1-4)
CASSLPYRGRSEKLFF

SEQ ID NO: 132191 - protein, 11 aa, Homo sapiens
  CDR3 for alpha chain variable domain of TCR clone 66096 (TRAV1-2, TRAJ20)
CAVSNDHKLSF

SEQ ID NO: 132192 - protein, 16 aa, Homo sapiens
  CDR3 for beta chain variable domain of TCR clone 66096 (TRBV29-1, TRBJ2-6)
CSVEDITYSGANVLTF

SEQ ID NO: 132193 - protein, 14 aa, Homo sapiens
  CDR3 for alpha chain variable domain of TCR clone 66097 (TRAV23/DV6, TRAJ8)
CAASKNTGFQTLVF

SEQ ID NO: 132194 - protein, 16 aa, Homo sapiens
  CDR3 for beta chain variable domain of TCR clone 66097 (TRBV4-1, TRBJ2-6)
CASSQVGDPGANVLTF

SEQ ID NO: 132195 - protein, 14 aa, Homo sapiens
  CDR3 for alpha chain variable domain of TCR clone 66098 (TRAV1-2, TRAJ8)
CAVREDTGFQKLVF

SEQ ID NO: 132196 - protein, 15 aa, Homo sapiens
  CDR3 for beta chain variable domain of TCR clone 66098 (TRBV11-2, TRBJ2-1)
CASSSPSTRYNEQFF

SEQ ID NO: 132197 - protein, 14 aa, Homo sapiens
  CDR3 for alpha chain variable domain of TCR clone 66099 (TRAV1-2, TRAJ16)
CAVNRFSDGQKLLF

SEQ ID NO: 132198 - protein, 13 aa, Homo sapiens
  CDR3 for beta chain variable domain of TCR clone 66099 (TRBV10-3, TRBJ2-7)
CAYKLAVNYEQYF

SEQ ID NO: 132199 - protein, 11 aa, Homo sapiens
  CDR3 for alpha chain variable domain of TCR clone 66100 (TRAV12-2, TRAJ21)
SAVEGFNKFYF

SEQ ID NO: 132200 - protein, 15 aa, Homo sapiens
  CDR3 for beta chain variable domain of TCR clone 66100 (TRBV20-1, TRBJ1-5)
CSASRRGDLGQPQHF

SEQ ID NO: 132201 - protein, 13 aa, Homo sapiens
  CDR3 for alpha chain variable domain of TCR clone 66101 (TRAV2, TRAJ40)
CAVVTSGTYKYIF

SEQ ID NO: 132202 - protein, 18 aa, Homo sapiens
  CDR3 for beta chain variable domain of TCR clone 66101 (TRBV5-5, TRBJ1-5)
CASSLRQVKGSSNQPQHF

SEQ ID NO: 132203 - protein, 13 aa, Homo sapiens
  CDR3 for alpha chain variable domain of TCR clone 66102 (TRAV17, TRAJ27)
CATSNPNAGKSTF

SEQ ID NO: 132204 - protein, 15 aa, Homo sapiens
  CDR3 for beta chain variable domain of TCR clone 66102 (TRBV20-1, TRBJ2-5)
CSASPLAGGQETQYF

SEQ ID NO: 132205 - protein, 13 aa, Homo sapiens
  CDR3 for alpha chain variable domain of TCR clone 66103 (TRAV8-3, TRAJ43)
CAVGPDDNNDMRF

SEQ ID NO: 132206 - protein, 12 aa, Homo sapiens
  CDR3 for beta chain variable domain of TCR clone 66103 (TRBV7-2, TRBJ1-6)
CASSLSSSPLHF

SEQ ID NO: 132207 - protein, 15 aa, Homo sapiens
  CDR3 for alpha chain variable domain of TCR clone 66104 (TRAV4, TRAJ28)
CPPSYSGAGSYQLTF

SEQ ID NO: 132208 - protein, 16 aa, Homo sapiens
  CDR3 for beta chain variable domain of TCR clone 66104 (TRBV5-7, TRBJ2-1)
CASSGGLAGTYNEQFF

SEQ ID NO: 132209 - protein, 12 aa, Homo sapiens
  CDR3 for alpha chain variable domain of TCR clone 66105 (TRAV17, TRAJ20)
CATLANDYKLSF

SEQ ID NO: 132210 - protein, 13 aa, Homo sapiens
  CDR3 for beta chain variable domain of TCR clone 66105 (TRBV7-3, TRBJ1-1)
CASSQDWGAEAFF

SEQ ID NO: 132211 - protein, 15 aa, Homo sapiens
  CDR3 for alpha chain variable domain of TCR clone 66106 (TRAV8-4, TRAJ49)
CAVSDKLNTGNQFYF

SEQ ID NO: 132212 - protein, 14 aa, Homo sapiens
  CDR3 for beta chain variable domain of TCR clone 66106 (TRBV19, TRBJ1-1)
CASRRGQGNTEAFF

SEQ ID NO: 132213 - protein, 14 aa, Homo sapiens
  CDR3 for alpha chain variable domain of TCR clone 66107 (TRAV3, TRAJ6)
CAVRDWGGSYIPTF

SEQ ID NO: 132214 - protein, 15 aa, Homo sapiens
  CDR3 for beta chain variable domain of TCR clone 66107 (TRBV9, TRBJ1-6)
CASSVAGTGDSPLHF

SEQ ID NO: 132215 - protein, 15 aa, Homo sapiens
  CDR3 for alpha chain variable domain of TCR clone 66108 (TRAV21, TRAJ40)
CAVSPQTSGTYKYIF

SEQ ID NO: 132216 - protein, 13 aa, Homo sapiens
  CDR3 for beta chain variable domain of TCR clone 66108 (TRBV7-2, TRBJ2-2)
CASSSVRAGELFF

SEQ ID NO: 132217 - protein, 15 aa, Homo sapiens
  CDR3 for alpha chain variable domain of TCR clone 66109 (TRAV12-2, TRAJ57)
CTVSRGQGGSEKLVF

SEQ ID NO: 132218 - protein, 14 aa, Homo sapiens
  CDR3 for beta chain variable domain of TCR clone 66109 (TRBV20-1, TRBJ2-1)
CSAHPGLPYNEQFF

SEQ ID NO: 132219 - protein, 12 aa, Homo sapiens
  CDR3 for alpha chain variable domain of TCR clone 66110 (TRAV17, TRAJ4)
CATDGGYNKLIF

SEQ ID NO: 132220 - protein, 13 aa, Homo sapiens
  CDR3 for beta chain variable domain of TCR clone 66110 (TRBV7-9, TRBJ1-2)
CASSLKQNYGYTF

SEQ ID NO: 132221 - protein, 13 aa, Homo sapiens
  CDR3 for alpha chain variable domain of TCR clone 66111 (TRAV2, TRAJ40)
CAAVTSGTYKYIF

SEQ ID NO: 132222 - protein, 17 aa, Homo sapiens
  CDR3 for beta chain variable domain of TCR clone 66111 (TRBV20-1, TRBJ2-1)
CSARDPLAGVWDNEQFF

SEQ ID NO: 132223 - protein, 13 aa, Homo sapiens
  CDR3 for alpha chain variable domain of TCR clone 66112 (TRAV13-1, TRAJ6)
CAASKGGSYIPTF

SEQ ID NO: 132224 - protein, 14 aa, Homo sapiens
  CDR3 for beta chain variable domain of TCR clone 66112 (TRBV7-8, TRBJ2-1)
CASSLGVGYNEQFF

SEQ ID NO: 132225 - protein, 14 aa, Homo sapiens
  CDR3 for alpha chain variable domain of TCR clone 66113 (TRAV1-2, TRAJ16)
CAVNRFSDGQKLLF

SEQ ID NO: 132226 - protein, 16 aa, Homo sapiens
  CDR3 for beta chain variable domain of TCR clone 66113 (TRBV12-5, TRBJ2-5)
RASGPRTSGNQETQYF

SEQ ID NO: 132227 - protein, 16 aa, Homo sapiens
  CDR3 for alpha chain variable domain of TCR clone 66114 (TRAV26-1, TRAJ53)
CIVRVAMGGSNYKLTF

SEQ ID NO: 132228 - protein, 13 aa, Homo sapiens
  CDR3 for beta chain variable domain of TCR clone 66114 (TRBV19, TRBJ1-3)
CASRLSLGNTIYF

SEQ ID NO: 132229 - protein, 12 aa, Homo sapiens
  CDR3 for alpha chain variable domain of TCR clone 66115 (TRAV13-1, TRAJ21)
CAAKEGFNKFYF

SEQ ID NO: 132230 - protein, 14 aa, Homo sapiens
  CDR3 for beta chain variable domain of TCR clone 66115 (TRBV23-1, TRBJ2-5)
CASSFLRSQETQYF

SEQ ID NO: 132231 - protein, 12 aa, Homo sapiens
  CDR3 for alpha chain variable domain of TCR clone 66116 (TRAV12-3, TRAJ17)
CAMTLTGNKLTF

SEQ ID NO: 132232 - protein, 14 aa, Homo sapiens
  CDR3 for beta chain variable domain of TCR clone 66116 (TRBV19, TRBJ2-2)
CASSTLHRPGELFF

SEQ ID NO: 132233 - protein, 12 aa, Homo sapiens
  CDR3 for alpha chain variable domain of TCR clone 66117 (TRAV8-6, TRAJ11)
CAVSSGYSTLTF

SEQ ID NO: 132234 - protein, 11 aa, Homo sapiens
  CDR3 for beta chain variable domain of TCR clone 66117 (TRBV20-1, TRBJ1-5)
CSAQGDQPQHS

SEQ ID NO: 132235 - protein, 14 aa, Homo sapiens
  CDR3 for alpha chain variable domain of TCR clone 66118 (TRAV4, TRAJ43)
CLVGPMYNNNDMRF

SEQ ID NO: 132236 - protein, 21 aa, Homo sapiens
  CDR3 for beta chain variable domain of TCR clone 66118 (TRBV11-1, TRBJ2-1)
CASGARERLRPEGPSYNEQFF

SEQ ID NO: 132237 - protein, 14 aa, Homo sapiens
  CDR3 for alpha chain variable domain of TCR clone 66119 (TRAV12-2, TRAJ40)
CAAKIPSGTYKYIF

SEQ ID NO: 132238 - protein, 17 aa, Homo sapiens
  CDR3 for beta chain variable domain of TCR clone 66119 (TRBV18, TRBJ2-1)
CASSPLAAGAGDNEQFF

SEQ ID NO: 132239 - protein, 15 aa, Homo sapiens
  CDR3 for alpha chain variable domain of TCR clone 66120 (TRAV14/DV4, TRAJ12)
CAMREERDSSYKLIF

SEQ ID NO: 132240 - protein, 16 aa, Homo sapiens
  CDR3 for beta chain variable domain of TCR clone 66120 (TRBV11-2, TRBJ1-2)
CASSLDTGGADYGDTF

SEQ ID NO: 132241 - protein, 14 aa, Homo sapiens
  CDR3 for alpha chain variable domain of TCR clone 66121 (TRAV9-2, TRAJ39)
CALYNYNAGNMLTF

SEQ ID NO: 132242 - protein, 15 aa, Homo sapiens
  CDR3 for beta chain variable domain of TCR clone 66121 (TRBV3-1, TRBJ2-7)
CASSQVRQGAYEQYF

SEQ ID NO: 132243 - protein, 14 aa, Homo sapiens
  CDR3 for alpha chain variable domain of TCR clone 66122 (TRAV1-2, TRAJ16)
CAVNRFSDGQKLLF

SEQ ID NO: 132244 - protein, 19 aa, Homo sapiens
  CDR3 for beta chain variable domain of TCR clone 66122 (TRBV2, TRBJ2-2)
CASSQPGLAGGGNTGELFF

SEQ ID NO: 132245 - protein, 11 aa, Homo sapiens
  CDR3 for alpha chain variable domain of TCR clone 66123 (TRAV12-2, TRAJ49)
CALQGGNQFYF

SEQ ID NO: 132246 - protein, 13 aa, Homo sapiens
  CDR3 for beta chain variable domain of TCR clone 66123 (TRBV4-1, TRBJ1-1)
CASSQLGTGEASF

SEQ ID NO: 132247 - protein, 14 aa, Homo sapiens
  CDR3 for alpha chain variable domain of TCR clone 66124 (TRAV23/DV6, TRAJ36)
CAASRRTGANNLFF

SEQ ID NO: 132248 - protein, 15 aa, Homo sapiens
  CDR3 for beta chain variable domain of TCR clone 66124 (TRBV5-1, TRBJ2-1)
CASSPPRPPYNEQFF

SEQ ID NO: 132249 - protein, 22 aa, Homo sapiens
  CDR3 for alpha chain variable domain of TCR clone 66125 (TRAV21, )
CAVRQDAGNNHIQNPDPAVYQL

SEQ ID NO: 132250 - protein, 19 aa, Homo sapiens
  CDR3 for beta chain variable domain of TCR clone 66125 (TRBV4-2, TRBJ1-1)
CISVPADHLTGGGDTEAFF

SEQ ID NO: 132251 - protein, 17 aa, Homo sapiens
  CDR3 for alpha chain variable domain of TCR clone 66126 (TRAV3, TRAJ6)
CAVRDGPRAGGSYKPTF

SEQ ID NO: 132252 - protein, 20 aa, Homo sapiens
  CDR3 for beta chain variable domain of TCR clone 66126 (TRBV28, TRBJ2-1)
CASTPIGRSPGLAGGNEQFF

SEQ ID NO: 132253 - protein, 14 aa, Homo sapiens
  CDR3 for alpha chain variable domain of TCR clone 66127 (TRAV12-2, TRAJ13)
CAVKKTGGYQTVTF

SEQ ID NO: 132254 - protein, 16 aa, Homo sapiens
  CDR3 for beta chain variable domain of TCR clone 66127 (TRBV2, TRBJ2-1)
CASRSPAGGKYNEQFF

SEQ ID NO: 132255 - protein, 15 aa, Homo sapiens
  CDR3 for alpha chain variable domain of TCR clone 66128 (TRAV8-3, TRAJ40)
CAAPSLGSGAYKYIF

SEQ ID NO: 132256 - protein, 12 aa, Homo sapiens
  CDR3 for beta chain variable domain of TCR clone 66128 (TRBV11-2, TRBJ2-2)
CASSLGGGELFF

SEQ ID NO: 132257 - protein, 13 aa, Homo sapiens
  CDR3 for alpha chain variable domain of TCR clone 66129 (TRAV21, TRAJ36)
CAVIKTGANNLFF

SEQ ID NO: 132258 - protein, 13 aa, Homo sapiens
  CDR3 for beta chain variable domain of TCR clone 66129 (TRBV29-1, TRBJ2-3)
FSATRGGRDTQYF

SEQ ID NO: 132259 - protein, 12 aa, Homo sapiens
  CDR3 for alpha chain variable domain of TCR clone 66130 (TRAV17, TRAJ12)
CATLRSSYKLIF

SEQ ID NO: 132260 - protein, 14 aa, Homo sapiens
  CDR3 for beta chain variable domain of TCR clone 66130 (TRBV18, TRBJ2-5)
CASSPGVSQETQYF

SEQ ID NO: 132261 - protein, 18 aa, Homo sapiens
  CDR3 for alpha chain variable domain of TCR clone 66131 (TRAV21, TRAJ52)
CAVRPSPAGGTSYGKLTF

SEQ ID NO: 132262 - protein, 13 aa, Homo sapiens
  CDR3 for beta chain variable domain of TCR clone 66131 (TRBV20-1, TRBJ2-2)
CSALSGGAGELFF

SEQ ID NO: 132263 - protein, 13 aa, Homo sapiens
  CDR3 for alpha chain variable domain of TCR clone 66132 (TRAV8-3, TRAJ6)
CAVEKGGSYILTF

SEQ ID NO: 132264 - protein, 15 aa, Homo sapiens
  CDR3 for beta chain variable domain of TCR clone 66132 (TRBV28, TRBJ2-5)
CASSADRGRGETQYF

SEQ ID NO: 132265 - protein, 15 aa, Homo sapiens
  CDR3 for alpha chain variable domain of TCR clone 66133 (TRAV41, TRAJ45)
CAASYSGGGADGLTF

SEQ ID NO: 132266 - protein, 16 aa, Homo sapiens
  CDR3 for beta chain variable domain of TCR clone 66133 (TRBV19, TRBJ2-1)
CASSKAGPSSYNEQLF

SEQ ID NO: 132267 - protein, 17 aa, Homo sapiens
  CDR3 for alpha chain variable domain of TCR clone 66134 (TRAV3, TRAJ6)
CAVRDGPRAGGSYIPTF

SEQ ID NO: 132268 - protein, 15 aa, Homo sapiens
  CDR3 for beta chain variable domain of TCR clone 66134 (TRBV11-1, TRBJ2-7)
CASSLNYGASYEQYF

SEQ ID NO: 132269 - protein, 13 aa, Homo sapiens
  CDR3 for alpha chain variable domain of TCR clone 66135 (TRAV8-6, TRAJ8)
CAVSNTGFQKLVF

SEQ ID NO: 132270 - protein, 15 aa, Homo sapiens
  CDR3 for beta chain variable domain of TCR clone 66135 (TRBV28, TRBJ2-5)
CASSSGRTIQETKYF

SEQ ID NO: 132271 - protein, 14 aa, Homo sapiens
  CDR3 for alpha chain variable domain of TCR clone 66136 (TRAV1-2, TRAJ8)
CAVREDTGFQKLVF

SEQ ID NO: 132272 - protein, 16 aa, Homo sapiens
  CDR3 for beta chain variable domain of TCR clone 66136 (TRBV19, TRBJ2-1)
CASSKAGPRSYNEQFF

SEQ ID NO: 132273 - protein, 14 aa, Homo sapiens
  CDR3 for alpha chain variable domain of TCR clone 66137 (TRAV30, TRAJ26)
CGTEIVSYGQNFVF

SEQ ID NO: 132274 - protein, 13 aa, Homo sapiens
  CDR3 for beta chain variable domain of TCR clone 66137 (TRBV19, TRBJ1-3)
CASRVSLGNTMYF

SEQ ID NO: 132275 - protein, 13 aa, Homo sapiens
  CDR3 for alpha chain variable domain of TCR clone 66138 (TRAV16, TRAJ26)
CALSGSEFCLLSR

SEQ ID NO: 132276 - protein, 12 aa, Homo sapiens
  CDR3 for beta chain variable domain of TCR clone 66138 (TRBV11-2, TRBJ2-1)
CASSPGNNEQFF

SEQ ID NO: 132277 - protein, 18 aa, Homo sapiens
  CDR3 for alpha chain variable domain of TCR clone 66139 (TRAV26-1, TRAJ22)
CIVRVALISSGSARQLTF

SEQ ID NO: 132278 - protein, 15 aa, Homo sapiens
  CDR3 for beta chain variable domain of TCR clone 66139 (TRBV4-1, TRBJ2-5)
CASSQWDLYQETQYF

SEQ ID NO: 132279 - protein, 11 aa, Homo sapiens
  CDR3 for alpha chain variable domain of TCR clone 66140 (TRAV1-1, TRAJ23)
CAVRQGGKLIF

SEQ ID NO: 132280 - protein, 20 aa, Homo sapiens
  CDR3 for beta chain variable domain of TCR clone 66140 (TRBV7-8, TRBJ2-2)
CASSHLFPGPTIDITGELFF

SEQ ID NO: 132281 - protein, 14 aa, Homo sapiens
  CDR3 for alpha chain variable domain of TCR clone 66141 (TRAV1-2, TRAJ8)
CAVREDTGFQKLVF

SEQ ID NO: 132282 - protein, 15 aa, Homo sapiens
  CDR3 for beta chain variable domain of TCR clone 66141 (TRBV7-9, TRBJ2-2)
CASSPETGAGGELFF

SEQ ID NO: 132283 - protein, 15 aa, Homo sapiens
  CDR3 for alpha chain variable domain of TCR clone 66142 (TRAV17, TRAJ4)
CATGTWSGGYNKLIF

SEQ ID NO: 132284 - protein, 13 aa, Homo sapiens
  CDR3 for beta chain variable domain of TCR clone 66142 (TRBV6-6, TRBJ2-7)
CVSSPKHLAEQYF

SEQ ID NO: 132285 - protein, 11 aa, Homo sapiens
  CDR3 for alpha chain variable domain of TCR clone 66143 (TRAV2, TRAJ13)
CASGGYQKVTF

SEQ ID NO: 132286 - protein, 15 aa, Homo sapiens
  CDR3 for beta chain variable domain of TCR clone 66143 (TRBV5-7, TRBJ2-5)
CASSPQAGRRETQYF

SEQ ID NO: 132287 - protein, 14 aa, Homo sapiens
  CDR3 for alpha chain variable domain of TCR clone 66144 (TRAV13-1, TRAJ6)
CAASITGGSYIPTF

SEQ ID NO: 132288 - protein, 16 aa, Homo sapiens
  CDR3 for beta chain variable domain of TCR clone 66144 (TRBV12-5, TRBJ2-5)
CASGPRTSGNQETQYF

SEQ ID NO: 132289 - protein, 17 aa, Homo sapiens
  CDR3 for alpha chain variable domain of TCR clone 66145 (TRAV3, TRAJ42)
CAVRDRDYGGSQGNLIF

SEQ ID NO: 132290 - protein, 13 aa, Homo sapiens
  CDR3 for beta chain variable domain of TCR clone 66145 (TRBV25-1, TRBJ1-1)
CQHPPGGNTEAFF

SEQ ID NO: 132291 - protein, 15 aa, Homo sapiens
  CDR3 for alpha chain variable domain of TCR clone 66146 (TRAV12-1, TRAJ44)
CVADLPTGTASKLTF

SEQ ID NO: 132292 - protein, 13 aa, Homo sapiens
  CDR3 for beta chain variable domain of TCR clone 66146 (TRBV6-5, TRBJ2-5)
CASSPQGGETQYL

SEQ ID NO: 132293 - protein, 14 aa, Homo sapiens
  CDR3 for alpha chain variable domain of TCR clone 66147 (TRAV12-3, TRAJ10)
SHLPLTGGGNNLTF

SEQ ID NO: 132294 - protein, 14 aa, Homo sapiens
  CDR3 for beta chain variable domain of TCR clone 66147 (TRBV6-1, TRBJ1-3)
CASVQGGGGNTIYF

SEQ ID NO: 132295 - protein, 14 aa, Homo sapiens
  CDR3 for alpha chain variable domain of TCR clone 66148 (TRAV26-1, TRAJ40)
CIVRVARGTYKYIF

SEQ ID NO: 132296 - protein, 14 aa, Homo sapiens
  CDR3 for beta chain variable domain of TCR clone 66148 (TRBV18, TRBJ2-5)
CASSPGVSQETQYF

SEQ ID NO: 132297 - protein, 13 aa, Homo sapiens
  CDR3 for alpha chain variable domain of TCR clone 66149 (TRAV13-2, TRAJ13)
CAERPGGYQKVTF

SEQ ID NO: 132298 - protein, 15 aa, Homo sapiens
  CDR3 for beta chain variable domain of TCR clone 66149 (TRBV28, TRBJ2-1)
CASSIIAGGRSEQFF

SEQ ID NO: 132299 - protein, 12 aa, Homo sapiens
  CDR3 for alpha chain variable domain of TCR clone 66150 (TRAV8-3, TRAJ26)
CAGDNYGQNFVF

SEQ ID NO: 132300 - protein, 15 aa, Homo sapiens
  CDR3 for beta chain variable domain of TCR clone 66150 (TRBV27, TRBJ1-6)
CASSFDRGLGSPLHF

SEQ ID NO: 132301 - protein, 15 aa, Homo sapiens
  CDR3 for alpha chain variable domain of TCR clone 66151 (TRAV3, TRAJ32)
CAVSSYGGATNKFIF

SEQ ID NO: 132302 - protein, 13 aa, Homo sapiens
  CDR3 for beta chain variable domain of TCR clone 66151 (TRBV20-1, TRBJ2-7)
CSARPSTNYEQYF

SEQ ID NO: 132303 - protein, 13 aa, Homo sapiens
  CDR3 for alpha chain variable domain of TCR clone 66152 (TRAV8-6, TRAJ8)
CAVRNTGFQKLVF

SEQ ID NO: 132304 - protein, 15 aa, Homo sapiens
  CDR3 for beta chain variable domain of TCR clone 66152 (TRBV28, TRBJ2-5)
CASSSGRTIQETQYF

SEQ ID NO: 132305 - protein, 12 aa, Homo sapiens
  CDR3 for alpha chain variable domain of TCR clone 66153 (TRAV12-1, TRAJ11)
CVVKAGYSTLTF

SEQ ID NO: 132306 - protein, 13 aa, Homo sapiens
  CDR3 for beta chain variable domain of TCR clone 66153 (TRBV7-7, TRBJ2-2)
CASSLTSAGELFF

SEQ ID NO: 132307 - protein, 14 aa, Homo sapiens
  CDR3 for alpha chain variable domain of TCR clone 66154 (TRAV20, TRAJ29)
CAVQAWVGNTPLVF

SEQ ID NO: 132308 - protein, 15 aa, Homo sapiens
  CDR3 for beta chain variable domain of TCR clone 66154 (TRBV29-1, TRBJ2-7)
CSVEFFDRESYEQYF

SEQ ID NO: 132309 - protein, 14 aa, Homo sapiens
  CDR3 for alpha chain variable domain of TCR clone 66155 (TRAV12-2, TRAJ53)
CRERGGGSNYKLTF

SEQ ID NO: 132310 - protein, 13 aa, Homo sapiens
  CDR3 for beta chain variable domain of TCR clone 66155 (TRBV3-1, TRBJ1-1)
CASSPGVITGAFF

SEQ ID NO: 132311 - protein, 14 aa, Homo sapiens
  CDR3 for alpha chain variable domain of TCR clone 66156 (TRAV13-1, TRAJ35)
CAASKGGFGNVLHC

SEQ ID NO: 132312 - protein, 15 aa, Homo sapiens
  CDR3 for beta chain variable domain of TCR clone 66156 (TRBV7-3, TRBJ1-1)
CASSQDWGLKLSLDK

SEQ ID NO: 132313 - protein, 14 aa, Homo sapiens
  CDR3 for alpha chain variable domain of TCR clone 66157 (TRAV8-3, TRAJ31)
CAVGRGLNNARLMF

SEQ ID NO: 132314 - protein, 15 aa, Homo sapiens
  CDR3 for beta chain variable domain of TCR clone 66157 (TRBV7-2, TRBJ2-2)
CASSLAGGLTGEPFF

SEQ ID NO: 132315 - protein, 14 aa, Homo sapiens
  CDR3 for alpha chain variable domain of TCR clone 66158 (TRAV12-2, TRAJ17)
CAVLFKAAGNKLTF

SEQ ID NO: 132316 - protein, 16 aa, Homo sapiens
  CDR3 for beta chain variable domain of TCR clone 66158 (TRBV13, TRBJ2-2)
CASSPRTGEHTGELFF

SEQ ID NO: 132317 - protein, 18 aa, Homo sapiens
  CDR3 for alpha chain variable domain of TCR clone 66159 (TRAV21, TRAJ52)
CAVRPSPAGGTSYGKLTF

SEQ ID NO: 132318 - protein, 16 aa, Homo sapiens
  CDR3 for beta chain variable domain of TCR clone 66159 (TRBV20-1, TRBJ2-2)
CSASASGIPGAGELFF

SEQ ID NO: 132319 - protein, 15 aa, Homo sapiens
  CDR3 for alpha chain variable domain of TCR clone 66160 (TRAV3, TRAJ47)
CAVRDIGEYGNKLVF

SEQ ID NO: 132320 - protein, 14 aa, Homo sapiens
  CDR3 for beta chain variable domain of TCR clone 66160 (TRBV13, TRBJ2-5)
CASSVERVGETQYF

SEQ ID NO: 132321 - protein, 11 aa, Homo sapiens
  CDR3 for alpha chain variable domain of TCR clone 66161 (TRAV41, TRAJ49)
CAVRSRNQFYF

SEQ ID NO: 132322 - protein, 20 aa, Homo sapiens
  CDR3 for beta chain variable domain of TCR clone 66161 (TRBV12-4, TRBJ2-5)
CASSFSSGGGGDPVLRARHA

SEQ ID NO: 132323 - protein, 11 aa, Homo sapiens
  CDR3 for alpha chain variable domain of TCR clone 66162 (TRAV12-3, TRAJ43)
CAMSVSNDMRF

SEQ ID NO: 132324 - protein, 14 aa, Homo sapiens
  CDR3 for beta chain variable domain of TCR clone 66162 (TRBV7-9, TRBJ1-4)
CAITEGEANEKLFF

SEQ ID NO: 132325 - protein, 11 aa, Homo sapiens
  CDR3 for alpha chain variable domain of TCR clone 66163 (TRAV2, TRAJ33)
CAVESNYQLIW

SEQ ID NO: 132326 - protein, 17 aa, Homo sapiens
  CDR3 for beta chain variable domain of TCR clone 66163 (TRBV11-1, TRBJ2-7)
CASSLTGSFGLDYEQYF

SEQ ID NO: 132327 - protein, 12 aa, Homo sapiens
  CDR3 for alpha chain variable domain of TCR clone 66164 (TRAV4, TRAJ26)
CLVGDCGQNFVF

SEQ ID NO: 132328 - protein, 15 aa, Homo sapiens
  CDR3 for beta chain variable domain of TCR clone 66164 (TRBV27, TRBJ2-1)
CASSNGGGSSNEQFF

SEQ ID NO: 132329 - protein, 13 aa, Homo sapiens
  CDR3 for alpha chain variable domain of TCR clone 66165 (TRAV21, TRAJ20)
CAVGLRVDYKLSF

SEQ ID NO: 132330 - protein, 14 aa, Homo sapiens
  CDR3 for beta chain variable domain of TCR clone 66165 (TRBV7-8, TRBJ1-2)
CASSPDSLSYGYTF

SEQ ID NO: 132331 - protein, 13 aa, Homo sapiens
  CDR3 for alpha chain variable domain of TCR clone 66166 (TRAV27, TRAJ54)
CAGAGQGAQTLVF

SEQ ID NO: 132332 - protein, 15 aa, Homo sapiens
  CDR3 for beta chain variable domain of TCR clone 66166 (TRBV18, TRBJ2-6)
CASSPSYAGANVLTF

SEQ ID NO: 132333 - protein, 13 aa, Homo sapiens
  CDR3 for alpha chain variable domain of TCR clone 66167 (TRAV38-1, TRAJ42)
CARWEGSQGNLIF

SEQ ID NO: 132334 - protein, 17 aa, Homo sapiens
  CDR3 for beta chain variable domain of TCR clone 66167 (TRBV20-1, TRBJ2-1)
CSARDPLAGVWDNEQFF

SEQ ID NO: 132335 - protein, 11 aa, Homo sapiens
  CDR3 for alpha chain variable domain of TCR clone 66168 (TRAV16, TRAJ49)
CSLNTGNQFYF

SEQ ID NO: 132336 - protein, 17 aa, Homo sapiens
  CDR3 for beta chain variable domain of TCR clone 66168 (TRBV7-3, TRBJ2-3)
CASSPGGLAGFGDTQYF

SEQ ID NO: 132337 - protein, 11 aa, Homo sapiens
  CDR3 for alpha chain variable domain of TCR clone 66169 (TRAV26-2, TRAJ8)
CILTGFQKLVF

SEQ ID NO: 132338 - protein, 11 aa, Homo sapiens
  CDR3 for beta chain variable domain of TCR clone 66169 (TRBV11-2, TRBJ2-2)
CASSLPGELFF

SEQ ID NO: 132339 - protein, 15 aa, Homo sapiens
  CDR3 for alpha chain variable domain of TCR clone 66170 (TRAV2, TRAJ9)
CAVEDRGTGGFKTIF

SEQ ID NO: 132340 - protein, 16 aa, Homo sapiens
  CDR3 for beta chain variable domain of TCR clone 66170 (TRBV7-9, TRBJ1-2)
CASSLGFSSGEDGYTF

SEQ ID NO: 132341 - protein, 12 aa, Homo sapiens
  CDR3 for alpha chain variable domain of TCR clone 66171 (TRAV26-2, TRAJ21)
CILKGNFNKFYF

SEQ ID NO: 132342 - protein, 13 aa, Homo sapiens
  CDR3 for beta chain variable domain of TCR clone 66171 (TRBV4-2, TRBJ1-1)
CASSQAGNTEAFF

SEQ ID NO: 132343 - protein, 14 aa, Homo sapiens
  CDR3 for alpha chain variable domain of TCR clone 66172 (TRAV8-3, TRAJ39)
CAVGANNAGNMLTF

SEQ ID NO: 132344 - protein, 12 aa, Homo sapiens
  CDR3 for beta chain variable domain of TCR clone 66172 (TRBV11-3, TRBJ1-1)
CAGSHRQGEAFF

SEQ ID NO: 132345 - protein, 13 aa, Homo sapiens
  CDR3 for alpha chain variable domain of TCR clone 66173 (TRAV3, TRAJ21)
CAVREPDLNKSYF

SEQ ID NO: 132346 - protein, 16 aa, Homo sapiens
  CDR3 for beta chain variable domain of TCR clone 66173 (TRBV12-4, TRBJ2-1)
CASSAVGQGNGDEQFF

SEQ ID NO: 132347 - protein, 12 aa, Homo sapiens
  CDR3 for alpha chain variable domain of TCR clone 66174 (TRAV13-1, TRAJ21)
CAAKEGFNKFYF

SEQ ID NO: 132348 - protein, 15 aa, Homo sapiens
  CDR3 for beta chain variable domain of TCR clone 66174 (TRBV25-1, TRBJ1-4)
CASSPGDSTNEKLFF

SEQ ID NO: 132349 - protein, 20 aa, Homo sapiens
  CDR3 for alpha chain variable domain of TCR clone 66175 (TRAV1-1, TRAJ4)
CLLLLRCEGFLSGGYNKLIF

SEQ ID NO: 132350 - protein, 16 aa, Homo sapiens
  CDR3 for beta chain variable domain of TCR clone 66175 (TRBV28, TRBJ1-4)
RASSPPYRGRSEKLFF

SEQ ID NO: 132351 - protein, 15 aa, Homo sapiens
  CDR3 for alpha chain variable domain of TCR clone 66176 (TRAV8-3, TRAJ45)
CASSYSGGGADGLTF

SEQ ID NO: 132352 - protein, 14 aa, Homo sapiens
  CDR3 for beta chain variable domain of TCR clone 66176 (TRBV7-2, TRBJ2-2)
CASRGQGAAGELFF

SEQ ID NO: 132353 - protein, 15 aa, Homo sapiens
  CDR3 for alpha chain variable domain of TCR clone 66177 (TRAV3, TRAJ4)
CTVRDGTGGYNKLIF

SEQ ID NO: 132354 - protein, 16 aa, Homo sapiens
  CDR3 for beta chain variable domain of TCR clone 66177 (TRBV27, TRBJ2-2)
CASSSSGVSNTGELFF

SEQ ID NO: 132355 - protein, 17 aa, Homo sapiens
  CDR3 for alpha chain variable domain of TCR clone 66178 (TRAV3, TRAJ28)
CAVREAYSGAGSYQLTF

SEQ ID NO: 132356 - protein, 12 aa, Homo sapiens
  CDR3 for beta chain variable domain of TCR clone 66178 (TRBV7-9, TRBJ1-1)
CASSLVRGEAFF

SEQ ID NO: 132357 - protein, 14 aa, Homo sapiens
  CDR3 for alpha chain variable domain of TCR clone 66179 (TRAV8-6, TRAJ9)
CAVTPATGGFKTIF

SEQ ID NO: 132358 - protein, 14 aa, Homo sapiens
  CDR3 for beta chain variable domain of TCR clone 66179 (TRBV20-1, TRBJ1-1)
CSAQTRIGGTEAFF

SEQ ID NO: 132359 - protein, 14 aa, Homo sapiens
  CDR3 for alpha chain variable domain of TCR clone 66180 (TRAV16, TRAJ33)
CALSAMDSNYQLIW

SEQ ID NO: 132360 - protein, 13 aa, Homo sapiens
  CDR3 for beta chain variable domain of TCR clone 66180 (TRBV4-2, TRBJ1-1)
CASSQAGNTEAFF

SEQ ID NO: 132361 - protein, 15 aa, Homo sapiens
  CDR3 for alpha chain variable domain of TCR clone 66181 (TRAV3, TRAJ10)
CAVRDGTGGGKKLTF

SEQ ID NO: 132362 - protein, 15 aa, Homo sapiens
  CDR3 for beta chain variable domain of TCR clone 66181 (TRBV4-2, TRBJ1-4)
CASSLVQREVEKLFF

SEQ ID NO: 132363 - protein, 17 aa, Homo sapiens
  CDR3 for alpha chain variable domain of TCR clone 66182 (TRAV35, TRAJ28)
CAGLQVYSGAGSYQLTF

SEQ ID NO: 132364 - protein, 15 aa, Homo sapiens
  CDR3 for beta chain variable domain of TCR clone 66182 (TRBV2, TRBJ1-2)
CAGSEIGGANYGYTF

SEQ ID NO: 132365 - protein, 18 aa, Homo sapiens
  CDR3 for alpha chain variable domain of TCR clone 66183 (TRAV29/DV5, TRAJ52)
CAAGFRGAGGTSYGKLTF

SEQ ID NO: 132366 - protein, 16 aa, Homo sapiens
  CDR3 for beta chain variable domain of TCR clone 66183 (TRBV7-3, TRBJ2-2)
CASSLKRGTLSGQLFF

SEQ ID NO: 132367 - protein, 12 aa, Homo sapiens
  CDR3 for alpha chain variable domain of TCR clone 66184 (TRAV13-2, TRAJ37)
CAEKGNTGKLIF

SEQ ID NO: 132368 - protein, 15 aa, Homo sapiens
  CDR3 for beta chain variable domain of TCR clone 66184 (TRBV15, TRBJ1-1)
CATSLQGGRNTEAFF

SEQ ID NO: 132369 - protein, 17 aa, Homo sapiens
  CDR3 for alpha chain variable domain of TCR clone 66185 (TRAV3, TRAJ6)
CAVRDGPRAGGSYIPTF

SEQ ID NO: 132370 - protein, 13 aa, Homo sapiens
  CDR3 for beta chain variable domain of TCR clone 66185 (TRBV7-2, TRBJ1-4)
CASSLAGLEKLFF

SEQ ID NO: 132371 - protein, 14 aa, Homo sapiens
  CDR3 for alpha chain variable domain of TCR clone 66186 (TRAV38-1, TRAJ45)
CAPHSGGGADGLTF

SEQ ID NO: 132372 - protein, 14 aa, Homo sapiens
  CDR3 for beta chain variable domain of TCR clone 66186 (TRBV20-1, TRBJ1-1)
CSAQTRIGGTEAFF

SEQ ID NO: 132373 - protein, 14 aa, Homo sapiens
  CDR3 for alpha chain variable domain of TCR clone 66187 (TRAV12-3, TRAJ28)
CATNSGAGSYQLTF

SEQ ID NO: 132374 - protein, 14 aa, Homo sapiens
  CDR3 for beta chain variable domain of TCR clone 66187 (TRBV19, TRBJ2-1)
CASPTFVLSGEQFF

SEQ ID NO: 132375 - protein, 14 aa, Homo sapiens
  CDR3 for alpha chain variable domain of TCR clone 66188 (TRAV8-4, TRAJ45)
CASGGGGGADGLTF

SEQ ID NO: 132376 - protein, 20 aa, Homo sapiens
  CDR3 for beta chain variable domain of TCR clone 66188 (TRBV4-3, TRBJ2-3)
CAGSPRVEMRASGRPDTQYF

SEQ ID NO: 132377 - protein, 12 aa, Homo sapiens
  CDR3 for alpha chain variable domain of TCR clone 66189 (TRAV1-2, TRAJ33)
CAALDSNYQLVW

SEQ ID NO: 132378 - protein, 16 aa, Homo sapiens
  CDR3 for beta chain variable domain of TCR clone 66189 (TRBV20-1, TRBJ1-1)
CSARALTQGMNTEAFF

SEQ ID NO: 132379 - protein, 15 aa, Homo sapiens
  CDR3 for alpha chain variable domain of TCR clone 66190 (TRAV3, TRAJ20)
CAVRDIKLGDYKLSF

SEQ ID NO: 132380 - protein, 15 aa, Homo sapiens
  CDR3 for beta chain variable domain of TCR clone 66190 (TRBV7-9, TRBJ1-6)
CASSSLGRGNSPLHF

SEQ ID NO: 132381 - protein, 15 aa, Homo sapiens
  CDR3 for alpha chain variable domain of TCR clone 66191 (TRAV12-2, TRAJ53)
CAVNGGGGSNYKLTF

SEQ ID NO: 132382 - protein, 17 aa, Homo sapiens
  CDR3 for beta chain variable domain of TCR clone 66191 (TRBV7-3, TRBJ2-3)
CASSLMKRMRGADTRYF

SEQ ID NO: 132383 - protein, 14 aa, Homo sapiens
  CDR3 for alpha chain variable domain of TCR clone 66192 (TRAV3, TRAJ6)
CAVRRTGGSYIPTF

SEQ ID NO: 132384 - protein, 12 aa, Homo sapiens
  CDR3 for beta chain variable domain of TCR clone 66192 (TRBV7-8, TRBJ2-7)
CASSLGDREQYF

SEQ ID NO: 132385 - protein, 16 aa, Homo sapiens
  CDR3 for alpha chain variable domain of TCR clone 66193 (TRAV30, TRAJ24)
CGTEIVDADSWGKFKF

SEQ ID NO: 132386 - protein, 12 aa, Homo sapiens
  CDR3 for beta chain variable domain of TCR clone 66193 (TRBV11-2, TRBJ2-1)
CASSPGNNEQFF

SEQ ID NO: 132387 - protein, 12 aa, Homo sapiens
  CDR3 for alpha chain variable domain of TCR clone 66194 (TRAV3, TRAJ20)
CAVRDGDYKLSF

SEQ ID NO: 132388 - protein, 13 aa, Homo sapiens
  CDR3 for beta chain variable domain of TCR clone 66194 (TRBV9, TRBJ2-1)
CASSVVQGGEQFF

SEQ ID NO: 132389 - protein, 15 aa, Homo sapiens
  CDR3 for alpha chain variable domain of TCR clone 66195 (TRAV2, TRAJ37)
CAVEGGSSNTGKLIF

SEQ ID NO: 132390 - protein, 13 aa, Homo sapiens
  CDR3 for beta chain variable domain of TCR clone 66195 (TRBV20-1, TRBJ1-6)
CSTFREGNSPLHF

SEQ ID NO: 132391 - protein, 15 aa, Homo sapiens
  CDR3 for alpha chain variable domain of TCR clone 66196 (TRAV8-2, TRAJ40)
CVVSDRGSGTYKYIF

SEQ ID NO: 132392 - protein, 17 aa, Homo sapiens
  CDR3 for beta chain variable domain of TCR clone 66196 (TRBV9, TRBJ2-1)
CASSVRSLSGGNNEHFF

SEQ ID NO: 132393 - protein, 14 aa, Homo sapiens
  CDR3 for alpha chain variable domain of TCR clone 66197 (TRAV8-4, TRAJ17)
CVVSEGAAGNKLTF

SEQ ID NO: 132394 - protein, 13 aa, Homo sapiens
  CDR3 for beta chain variable domain of TCR clone 66197 (TRBV19, TRBJ2-1)
CASSMYRVNEQFF

SEQ ID NO: 132395 - protein, 12 aa, Homo sapiens
  CDR3 for alpha chain variable domain of TCR clone 66198 (TRAV12-3, TRAJ17)
RAMALTGNKLTF

SEQ ID NO: 132396 - protein, 15 aa, Homo sapiens
  CDR3 for beta chain variable domain of TCR clone 66198 (TRBV20-1, TRBJ2-7)
CSARDRVSGMDEQYF

SEQ ID NO: 132397 - protein, 17 aa, Homo sapiens
  CDR3 for alpha chain variable domain of TCR clone 66199 (TRAV3, TRAJ6)
CAVRDGPRAGGSYIPTF

SEQ ID NO: 132398 - protein, 20 aa, Homo sapiens
  CDR3 for beta chain variable domain of TCR clone 66199 (TRBV28, TRBJ2-1)
CASTPIGRSPGLAGGNEQVF

SEQ ID NO: 132399 - protein, 17 aa, Homo sapiens
  CDR3 for alpha chain variable domain of TCR clone 66200 (TRAV3, TRAJ42)
CAVRDRDYGGSQGNRIF

SEQ ID NO: 132400 - protein, 17 aa, Homo sapiens
  CDR3 for beta chain variable domain of TCR clone 66200 (TRBV7-9, TRBJ2-3)
CASSPTVAGDLTDTQYF

SEQ ID NO: 132401 - protein, 22 aa, Homo sapiens
  CDR3 for alpha chain variable domain of TCR clone 66201 (TRAV4, )
CLVGPHNYDIQNPDPAAYQLRD

SEQ ID NO: 132402 - protein, 17 aa, Homo sapiens
  CDR3 for beta chain variable domain of TCR clone 66201 (TRBV24-1, TRBJ2-1)
CATSDVSTSGTYNEQFF

SEQ ID NO: 132403 - protein, 13 aa, Homo sapiens
  CDR3 for alpha chain variable domain of TCR clone 66202 (TRAV30, TRAJ6)
CGTEAGGSYIPTF

SEQ ID NO: 132404 - protein, 16 aa, Homo sapiens
  CDR3 for beta chain variable domain of TCR clone 66202 (TRBV12-5, TRBJ2-5)
CASGPRTSGNQETQYF

SEQ ID NO: 132405 - protein, 14 aa, Homo sapiens
  CDR3 for alpha chain variable domain of TCR clone 66203 (TRAV1-2, TRAJ16)
CAVNRFSDGQKLLF

SEQ ID NO: 132406 - protein, 12 aa, Homo sapiens
  CDR3 for beta chain variable domain of TCR clone 66203 (TRBV18, TRBJ2-3)
CASSPLSDTQYF

SEQ ID NO: 132407 - protein, 14 aa, Homo sapiens
  CDR3 for alpha chain variable domain of TCR clone 66204 (TRAV23/DV6, TRAJ40)
CAASLTSGTYKYNF

SEQ ID NO: 132408 - protein, 14 aa, Homo sapiens
  CDR3 for beta chain variable domain of TCR clone 66204 (TRBV5-1, TRBJ2-3)
CASSRGQGGGTQYF

SEQ ID NO: 132409 - protein, 14 aa, Homo sapiens
  CDR3 for alpha chain variable domain of TCR clone 66205 (TRAV1-2, TRAJ8)
CAVREGTGFQKLVF

SEQ ID NO: 132410 - protein, 15 aa, Homo sapiens
  CDR3 for beta chain variable domain of TCR clone 66205 (TRBV28, TRBJ2-6)
CASSLAGSGANVLTF

SEQ ID NO: 132411 - protein, 15 aa, Homo sapiens
  CDR3 for alpha chain variable domain of TCR clone 66206 (TRAV2, TRAJ9)
CAVEDRGTGGFKTIF

SEQ ID NO: 132412 - protein, 16 aa, Homo sapiens
  CDR3 for beta chain variable domain of TCR clone 66206 (TRBV24-1, TRBJ2-3)
CATSDPGTVATDTQYF

SEQ ID NO: 132413 - protein, 22 aa, Homo sapiens
  CDR3 for alpha chain variable domain of TCR clone 66207 (TRAV8-3, )
CARNTGNNHIQNPDPAVYQLRD

SEQ ID NO: 132414 - protein, 15 aa, Homo sapiens
  CDR3 for beta chain variable domain of TCR clone 66207 (TRBV20-1, TRBJ2-7)
CSARDRVSGMDEQYF

SEQ ID NO: 132415 - protein, 13 aa, Homo sapiens
  CDR3 for alpha chain variable domain of TCR clone 66208 (TRAV12-3, TRAJ7)
CAMTPYGNNRLAF

SEQ ID NO: 132416 - protein, 13 aa, Homo sapiens
  CDR3 for beta chain variable domain of TCR clone 66208 (TRBV7-9, TRBJ1-2)
CASSLKQNYGYTF

SEQ ID NO: 132417 - protein, 12 aa, Homo sapiens
  CDR3 for alpha chain variable domain of TCR clone 66209 (TRAV13-1, TRAJ21)
CAAKEGFNKFYF

SEQ ID NO: 132418 - protein, 15 aa, Homo sapiens
  CDR3 for beta chain variable domain of TCR clone 66209 (TRBV6-5, TRBJ2-1)
CASSYDAGAGNEQFF

SEQ ID NO: 132419 - protein, 17 aa, Homo sapiens
  CDR3 for alpha chain variable domain of TCR clone 66210 (TRAV8-3, TRAJ53)
CAVGRLNSGGSNYKLTF

SEQ ID NO: 132420 - protein, 15 aa, Homo sapiens
  CDR3 for beta chain variable domain of TCR clone 66210 (TRBV20-1, TRBJ2-5)
CSATRTSGSLETQYF

SEQ ID NO: 132421 - protein, 13 aa, Homo sapiens
  CDR3 for alpha chain variable domain of TCR clone 66211 (TRAV12-1, TRAJ26)
CVVRRNYGQNFVF

SEQ ID NO: 132422 - protein, 16 aa, Homo sapiens
  CDR3 for beta chain variable domain of TCR clone 66211 (TRBV12-4, TRBJ1-5)
CASSRPVGGSNQPQHF

SEQ ID NO: 132423 - protein, 12 aa, Homo sapiens
  CDR3 for alpha chain variable domain of TCR clone 66212 (TRAV35, TRAJ49)
CAVWNTGNQFYF

SEQ ID NO: 132424 - protein, 16 aa, Homo sapiens
  CDR3 for beta chain variable domain of TCR clone 66212 (TRBV5-1, TRBJ2-2)
CASSLWDTTNTGELFF

SEQ ID NO: 132425 - protein, 14 aa, Homo sapiens
  CDR3 for alpha chain variable domain of TCR clone 66213 (TRAV29/DV5, TRAJ36)
CAARRKTGANNLFF

SEQ ID NO: 132426 - protein, 14 aa, Homo sapiens
  CDR3 for beta chain variable domain of TCR clone 66213 (TRBV12-5, TRBJ2-5)
CASGSRTHQENQYF

SEQ ID NO: 132427 - protein, 13 aa, Homo sapiens
  CDR3 for alpha chain variable domain of TCR clone 66214 (TRAV2, TRAJ29)
CAAGNSGNTPLVF

SEQ ID NO: 132428 - protein, 16 aa, Homo sapiens
  CDR3 for beta chain variable domain of TCR clone 66214 (TRBV7-9, TRBJ1-2)
CDSSPGGGAINYGYTF

SEQ ID NO: 132429 - protein, 13 aa, Homo sapiens
  CDR3 for alpha chain variable domain of TCR clone 66215 (TRAV21, TRAJ45)
CAVMGGGADGLTF

SEQ ID NO: 132430 - protein, 17 aa, Homo sapiens
  CDR3 for beta chain variable domain of TCR clone 66215 (TRBV13, TRBJ2-3)
CASSLSRVAGGRNTQYF

SEQ ID NO: 132431 - protein, 19 aa, Homo sapiens
  CDR3 for alpha chain variable domain of TCR clone 66216 (TRAV1-2, TRAJ26)
CLLPLCCERPDNYGQNFVF

SEQ ID NO: 132432 - protein, 17 aa, Homo sapiens
  CDR3 for beta chain variable domain of TCR clone 66216 (TRBV28, TRBJ2-5)
CASSRQGGLAGAETQYL

SEQ ID NO: 132433 - protein, 13 aa, Homo sapiens
  CDR3 for alpha chain variable domain of TCR clone 66217 (TRAV13-1, TRAJ21)
CAASIYNFNKFYF

SEQ ID NO: 132434 - protein, 15 aa, Homo sapiens
  CDR3 for beta chain variable domain of TCR clone 66217 (TRBV7-8, TRBJ1-5)
CASSLAGQPNQHQHF

SEQ ID NO: 132435 - protein, 12 aa, Homo sapiens
  CDR3 for alpha chain variable domain of TCR clone 66218 (TRAV36/DV7, TRAJ54)
CAVVRGAQKLVF

SEQ ID NO: 132436 - protein, 16 aa, Homo sapiens
  CDR3 for beta chain variable domain of TCR clone 66218 (TRBV28, TRBJ2-7)
CASSSGTSGRGYEQYF

SEQ ID NO: 132437 - protein, 16 aa, Homo sapiens
  CDR3 for alpha chain variable domain of TCR clone 66219 (TRAV3, TRAJ10)
CAVRDMRAGGGNKLTF

SEQ ID NO: 132438 - protein, 14 aa, Homo sapiens
  CDR3 for beta chain variable domain of TCR clone 66219 (TRBV7-2, TRBJ1-1)
CASSVLTGTTEAFF

SEQ ID NO: 132439 - protein, 12 aa, Homo sapiens
  CDR3 for alpha chain variable domain of TCR clone 66220 (TRAV20, TRAJ56)
CAVTGANSKLTF

SEQ ID NO: 132440 - protein, 15 aa, Homo sapiens
  CDR3 for beta chain variable domain of TCR clone 66220 (TRBV20-1, TRBJ2-7)
CSARDRVSGMDEQYF

SEQ ID NO: 132441 - protein, 12 aa, Homo sapiens
  CDR3 for alpha chain variable domain of TCR clone 66221 (TRAV8-3, TRAJ26)
CAVGAGGQNFVF

SEQ ID NO: 132442 - protein, 12 aa, Homo sapiens
  CDR3 for beta chain variable domain of TCR clone 66221 (TRBV4-1, TRBJ2-3)
CASSQGTDTQYF

SEQ ID NO: 132443 - protein, 14 aa, Homo sapiens
  CDR3 for alpha chain variable domain of TCR clone 66222 (TRAV16, TRAJ57)
CALPTQGGSGKLVF

SEQ ID NO: 132444 - protein, 15 aa, Homo sapiens
  CDR3 for beta chain variable domain of TCR clone 66222 (TRBV28, TRBJ1-3)
CASWGGHLSGNTIYF

SEQ ID NO: 132445 - protein, 12 aa, Homo sapiens
  CDR3 for alpha chain variable domain of TCR clone 66223 (TRAV23/DV6, TRAJ27)
CAASKSAGKSTF

SEQ ID NO: 132446 - protein, 15 aa, Homo sapiens
  CDR3 for beta chain variable domain of TCR clone 66223 (TRBV29-1, TRBJ2-1)
CSVRTSLGSYNEQFF

SEQ ID NO: 132447 - protein, 10 aa, Homo sapiens
  CDR3 for alpha chain variable domain of TCR clone 66224 (TRAV12-3, TRAJ49)
CAMNDDQFYF

SEQ ID NO: 132448 - protein, 17 aa, Homo sapiens
  CDR3 for beta chain variable domain of TCR clone 66224 (TRBV20-1, TRBJ2-1)
CSAPPRLAGTRYNEQFF

SEQ ID NO: 132449 - protein, 14 aa, Homo sapiens
  CDR3 for alpha chain variable domain of TCR clone 66225 (TRAV1-2, TRAJ16)
CAVNRFSDCQKLLF

SEQ ID NO: 132450 - protein, 13 aa, Homo sapiens
  CDR3 for beta chain variable domain of TCR clone 66225 (TRBV7-9, TRBJ1-2)
CASSLKQNYGYTF

SEQ ID NO: 132451 - protein, 14 aa, Homo sapiens
  CDR3 for alpha chain variable domain of TCR clone 66226 (TRAV16, TRAJ33)
CALSAMDSNYQLIW

SEQ ID NO: 132452 - protein, 13 aa, Homo sapiens
  CDR3 for beta chain variable domain of TCR clone 66226 (TRBV28, TRBJ1-1)
CASSKQGWTEAFF

SEQ ID NO: 132453 - protein, 11 aa, Homo sapiens
  CDR3 for alpha chain variable domain of TCR clone 66227 (TRAV4, TRAJ31)
CLVGLNVRLMF

SEQ ID NO: 132454 - protein, 16 aa, Homo sapiens
  CDR3 for beta chain variable domain of TCR clone 66227 (TRBV15, TRBJ2-6)
CATSVNGGFLANVLTF

SEQ ID NO: 132455 - protein, 15 aa, Homo sapiens
  CDR3 for alpha chain variable domain of TCR clone 66228 (TRAV21, TRAJ24)
CAARSSTDSWGKLQF

SEQ ID NO: 132456 - protein, 13 aa, Homo sapiens
  CDR3 for beta chain variable domain of TCR clone 66228 (TRBV10-3, TRBJ2-7)
CASKLAVSYEQYF

SEQ ID NO: 132457 - protein, 14 aa, Homo sapiens
  CDR3 for alpha chain variable domain of TCR clone 66229 (TRAV23/DV6, TRAJ4)
CAANLSGGYNKLIF

SEQ ID NO: 132458 - protein, 17 aa, Homo sapiens
  CDR3 for beta chain variable domain of TCR clone 66229 (TRBV4-1, TRBJ1-3)
CASSLQRGIRFGNTIYF

SEQ ID NO: 132459 - protein, 14 aa, Homo sapiens
  CDR3 for alpha chain variable domain of TCR clone 66230 (TRAV25, TRAJ35)
CARRMEGFGHVLHC

SEQ ID NO: 132460 - protein, 13 aa, Homo sapiens
  CDR3 for beta chain variable domain of TCR clone 66230 (TRBV7-2, TRBJ1-4)
CASSLAGLEKLFF

SEQ ID NO: 132461 - protein, 12 aa, Homo sapiens
  CDR3 for alpha chain variable domain of TCR clone 66231 (TRAV27, TRAJ35)
CAGAAFGNVLHC

SEQ ID NO: 132462 - protein, 16 aa, Homo sapiens
  CDR3 for beta chain variable domain of TCR clone 66231 (TRBV6-1, TRBJ2-1)
CASILRQGSSYNEQFF

SEQ ID NO: 132463 - protein, 14 aa, Homo sapiens
  CDR3 for alpha chain variable domain of TCR clone 66232 (TRAV12-2, TRAJ13)
CAVKKTGGYQKVTL

SEQ ID NO: 132464 - protein, 15 aa, Homo sapiens
  CDR3 for beta chain variable domain of TCR clone 66232 (TRBV27, TRBJ2-1)
CASSNGGGSSNEQSF

SEQ ID NO: 132465 - protein, 12 aa, Homo sapiens
  CDR3 for alpha chain variable domain of TCR clone 66233 (TRAV13-1, TRAJ49)
CAASPMGNQFYF

SEQ ID NO: 132466 - protein, 15 aa, Homo sapiens
  CDR3 for beta chain variable domain of TCR clone 66233 (TRBV2, TRBJ2-1)
CASSELAGSYNEQFF

SEQ ID NO: 132467 - protein, 13 aa, Homo sapiens
  CDR3 for alpha chain variable domain of TCR clone 66234 (TRAV3, TRAJ27)
CAVRPLGAGKPTF

SEQ ID NO: 132468 - protein, 15 aa, Homo sapiens
  CDR3 for beta chain variable domain of TCR clone 66234 (TRBV3-1, TRBJ2-7)
CASSQAPSGSYEQYF

SEQ ID NO: 132469 - protein, 14 aa, Homo sapiens
  CDR3 for alpha chain variable domain of TCR clone 66235 (TRAV1-1, TRAJ27)
CAVIYNTNAGKSTF

SEQ ID NO: 132470 - protein, 17 aa, Homo sapiens
  CDR3 for beta chain variable domain of TCR clone 66235 (TRBV7-3, TRBJ2-3)
CASSLMKRMRGADTQYF

SEQ ID NO: 132471 - protein, 23 aa, Homo sapiens
  CDR3 for alpha chain variable domain of TCR clone 66236 (TRAV8-3, )
CAVVTTRIPDIQNPDPAVYPLRD

SEQ ID NO: 132472 - protein, 14 aa, Homo sapiens
  CDR3 for beta chain variable domain of TCR clone 66236 (TRBV11-2, TRBJ2-7)
CASSPSTTSYEQYF

SEQ ID NO: 132473 - protein, 13 aa, Homo sapiens
  CDR3 for alpha chain variable domain of TCR clone 66237 (TRAV27, TRAJ56)
CAGKPGANSKLTF

SEQ ID NO: 132474 - protein, 18 aa, Homo sapiens
  CDR3 for beta chain variable domain of TCR clone 66237 (TRBV11-2, TRBJ2-3)
CASSVGGASRGAPNTQYF

SEQ ID NO: 132475 - protein, 14 aa, Homo sapiens
  CDR3 for alpha chain variable domain of TCR clone 66238 (TRAV16, TRAJ33)
CALSAMDSNYQLIW

SEQ ID NO: 132476 - protein, 13 aa, Homo sapiens
  CDR3 for beta chain variable domain of TCR clone 66238 (TRBV4-1, TRBJ2-2)
CASSQENTGELFF

SEQ ID NO: 132477 - protein, 13 aa, Homo sapiens
  CDR3 for alpha chain variable domain of TCR clone 66239 (TRAV9-2, TRAJ53)
CALSGGSNYKLTF

SEQ ID NO: 132478 - protein, 17 aa, Homo sapiens
  CDR3 for beta chain variable domain of TCR clone 66239 (TRBV11-2, TRBJ2-1)
CAGSLYPPGVEYNEQFF

SEQ ID NO: 132479 - protein, 13 aa, Homo sapiens
  CDR3 for alpha chain variable domain of TCR clone 66240 (TRAV22, TRAJ29)
FSVGGSGNTPLVF

SEQ ID NO: 132480 - protein, 13 aa, Homo sapiens
  CDR3 for beta chain variable domain of TCR clone 66240 (TRBV4-2, TRBJ1-1)
CASSQAGNTEAFF

SEQ ID NO: 132481 - protein, 16 aa, Homo sapiens
  CDR3 for alpha chain variable domain of TCR clone 66241 (TRAV12-3, TRAJ53)
CAVSPGSGGSNYKLTF

SEQ ID NO: 132482 - protein, 17 aa, Homo sapiens
  CDR3 for beta chain variable domain of TCR clone 66241 (TRBV28, TRBJ2-5)
CASSTPEGDALQETQYF

SEQ ID NO: 132483 - protein, 11 aa, Homo sapiens
  CDR3 for alpha chain variable domain of TCR clone 66242 (TRAV2, TRAJ13)
CASGGYQKVTF

SEQ ID NO: 132484 - protein, 16 aa, Homo sapiens
  CDR3 for beta chain variable domain of TCR clone 66242 (TRBV20-1, TRBJ2-3)
CSGEAGLAGGQDTQYF

SEQ ID NO: 132485 - protein, 16 aa, Homo sapiens
  CDR3 for alpha chain variable domain of TCR clone 66243 (TRAV16, TRAJ52)
CALSAAGGTSYGQLTF

SEQ ID NO: 132486 - protein, 12 aa, Homo sapiens
  CDR3 for beta chain variable domain of TCR clone 66243 (TRBV12-4, TRBJ1-3)
CASSFSGNTIYF

SEQ ID NO: 132487 - protein, 15 aa, Homo sapiens
  CDR3 for alpha chain variable domain of TCR clone 66244 (TRAV12-2, TRAJ43)
CAFDMRFGTGTRLTV

SEQ ID NO: 132488 - protein, 18 aa, Homo sapiens
  CDR3 for beta chain variable domain of TCR clone 66244 (TRBV20-1, TRBJ2-3)
CSASGLAGGPGTTDTQYF

SEQ ID NO: 132489 - protein, 16 aa, Homo sapiens
  CDR3 for alpha chain variable domain of TCR clone 66245 (TRAV26-1, TRAJ37)
CIVRGDGSGDTGKLIF

SEQ ID NO: 132490 - protein, 15 aa, Homo sapiens
  CDR3 for beta chain variable domain of TCR clone 66245 (TRBV24-1, TRBJ2-7)
TSVPSVVGVSYEQYF

SEQ ID NO: 132491 - protein, 12 aa, Homo sapiens
  CDR3 for alpha chain variable domain of TCR clone 66246 (TRAV12-1, TRAJ40)
CVVYSGTYKYIF

SEQ ID NO: 132492 - protein, 18 aa, Homo sapiens
  CDR3 for beta chain variable domain of TCR clone 66246 (TRBV11-2, TRBJ2-3)
CASSLGGASRGAPNTLYF

SEQ ID NO: 132493 - protein, 14 aa, Homo sapiens
  CDR3 for alpha chain variable domain of TCR clone 66247 (TRAV1-2, TRAJ15)
CAVRDRQAGTALIF

SEQ ID NO: 132494 - protein, 17 aa, Homo sapiens
  CDR3 for beta chain variable domain of TCR clone 66247 (TRBV5-5, TRBJ1-2)
CASSLGSLDGKSEGYTF

SEQ ID NO: 132495 - protein, 19 aa, Homo sapiens
  CDR3 for alpha chain variable domain of TCR clone 66248 (TRAV1-2, TRAJ26)
CLLPLCCERPDDHGQNFVF

SEQ ID NO: 132496 - protein, 17 aa, Homo sapiens
  CDR3 for beta chain variable domain of TCR clone 66248 (TRBV28, TRBJ2-5)
CASSRQGGLAGAETQYF

SEQ ID NO: 132497 - protein, 15 aa, Homo sapiens
  CDR3 for alpha chain variable domain of TCR clone 66249 (TRAV1-2, TRAJ28)
CAVQYSGAGSYQLTF

SEQ ID NO: 132498 - protein, 13 aa, Homo sapiens
  CDR3 for beta chain variable domain of TCR clone 66249 (TRBV20-1, TRBJ2-7)
CSATRTSGYEQYF

SEQ ID NO: 132499 - protein, 16 aa, Homo sapiens
  CDR3 for alpha chain variable domain of TCR clone 66250 (TRAV16, TRAJ4)
CALSRMFSGGYNKLIF

SEQ ID NO: 132500 - protein, 13 aa, Homo sapiens
  CDR3 for beta chain variable domain of TCR clone 66250 (TRBV27, TRBJ1-1)
CASSLSIGAEAFF

SEQ ID NO: 132501 - protein, 17 aa, Homo sapiens
  CDR3 for alpha chain variable domain of TCR clone 66251 (TRAV17, TRAJ7)
CATLGRLAFGKGNQLVV

SEQ ID NO: 132502 - protein, 13 aa, Homo sapiens
  CDR3 for beta chain variable domain of TCR clone 66251 (TRBV12-4, TRBJ2-7)
CASSLERVREQYF

SEQ ID NO: 132503 - protein, 14 aa, Homo sapiens
  CDR3 for alpha chain variable domain of TCR clone 66252 (TRAV1-2, TRAJ16)
CAVNRFSDGQKLLF

SEQ ID NO: 132504 - protein, 14 aa, Homo sapiens
  CDR3 for beta chain variable domain of TCR clone 66252 (TRBV20-1, TRBJ1-5)
CSTPGTGVGQPQHF

SEQ ID NO: 132505 - protein, 18 aa, Homo sapiens
  CDR3 for alpha chain variable domain of TCR clone 66253 (TRAV16, TRAJ52)
CSLSGVDAGGTSYGKLTF

SEQ ID NO: 132506 - protein, 15 aa, Homo sapiens
  CDR3 for beta chain variable domain of TCR clone 66253 (TRBV11-3, TRBJ2-3)
CASSAGTVVTNTQYF

SEQ ID NO: 132507 - protein, 14 aa, Homo sapiens
  CDR3 for alpha chain variable domain of TCR clone 66254 (TRAV8-4, TRAJ54)
CAVSEVFGAQKLVF

SEQ ID NO: 132508 - protein, 13 aa, Homo sapiens
  CDR3 for beta chain variable domain of TCR clone 66254 (TRBV27, TRBJ2-7)
CASSFVSSYEQYF

SEQ ID NO: 132509 - protein, 14 aa, Homo sapiens
  CDR3 for alpha chain variable domain of TCR clone 66255 (TRAV1-2, TRAJ8)
CAVREDTGFQKLVF

SEQ ID NO: 132510 - protein, 15 aa, Homo sapiens
  CDR3 for beta chain variable domain of TCR clone 66255 (TRBV20-1, TRBJ2-7)
RSARDRVSGMDEQYF

SEQ ID NO: 132511 - protein, 14 aa, Homo sapiens
  CDR3 for alpha chain variable domain of TCR clone 66256 (TRAV1-2, TRAJ16)
CAVNRFSDGQKLLF

SEQ ID NO: 132512 - protein, 15 aa, Homo sapiens
  CDR3 for beta chain variable domain of TCR clone 66256 (TRBV7-2, TRBJ2-3)
CASSLVVRGPDTQYF

SEQ ID NO: 132513 - protein, 12 aa, Homo sapiens
  CDR3 for alpha chain variable domain of TCR clone 66257 (TRAV29/DV5, TRAJ15)
CASNQAGTALIF

SEQ ID NO: 132514 - protein, 11 aa, Homo sapiens
  CDR3 for beta chain variable domain of TCR clone 66257 (TRBV29-1, TRBJ2-5)
CSEDRTGTQYF

SEQ ID NO: 132515 - protein, 18 aa, Homo sapiens
  CDR3 for alpha chain variable domain of TCR clone 66258 (TRAV26-1, TRAJ23)
GIVRVGLEVWNQGGKLIF

SEQ ID NO: 132516 - protein, 16 aa, Homo sapiens
  CDR3 for beta chain variable domain of TCR clone 66258 (TRBV12-4, TRBJ2-5)
CASSFFVRGRQETQYF

SEQ ID NO: 132517 - protein, 12 aa, Homo sapiens
  CDR3 for alpha chain variable domain of TCR clone 66259 (TRAV30, TRAJ43)
CGTEERGNDMRF

SEQ ID NO: 132518 - protein, 13 aa, Homo sapiens
  CDR3 for beta chain variable domain of TCR clone 66259 (TRBV27, TRBJ2-7)
CASSFSQVYEQYF

SEQ ID NO: 132519 - protein, 11 aa, Homo sapiens
  CDR3 for alpha chain variable domain of TCR clone 66260 (TRAV35, TRAJ34)
CWARSTDKLIF

SEQ ID NO: 132520 - protein, 14 aa, Homo sapiens
  CDR3 for beta chain variable domain of TCR clone 66260 (TRBV5-1, TRBJ2-7)
CASSRGESLYEQYF

SEQ ID NO: 132521 - protein, 11 aa, Homo sapiens
  CDR3 for alpha chain variable domain of TCR clone 66261 (TRAV6, TRAJ31)
CALRDNARLMF

SEQ ID NO: 132522 - protein, 12 aa, Homo sapiens
  CDR3 for beta chain variable domain of TCR clone 66261 (TRBV11-3, TRBJ2-2)
CASSLGGGELFF

SEQ ID NO: 132523 - protein, 12 aa, Homo sapiens
  CDR3 for alpha chain variable domain of TCR clone 66262 (TRAV8-3, TRAJ20)
CAVGATDYKLSF

SEQ ID NO: 132524 - protein, 15 aa, Homo sapiens
  CDR3 for beta chain variable domain of TCR clone 66262 (TRBV11-2, TRBJ2-1)
CASSLGTSGLNEQFF

SEQ ID NO: 132525 - protein, 14 aa, Homo sapiens
  CDR3 for alpha chain variable domain of TCR clone 66263 (TRAV3, TRAJ33)
CAVRDMGSNYQLIG

SEQ ID NO: 132526 - protein, 17 aa, Homo sapiens
  CDR3 for beta chain variable domain of TCR clone 66263 (TRBV19, TRBJ2-1)
CASSIWSAQPTHNEQFF

SEQ ID NO: 132527 - protein, 14 aa, Homo sapiens
  CDR3 for alpha chain variable domain of TCR clone 66264 (TRAV8-4, TRAJ13)
CAVTLSGGYQKVTF

SEQ ID NO: 132528 - protein, 16 aa, Homo sapiens
  CDR3 for beta chain variable domain of TCR clone 66264 (TRBV5-7, TRBJ1-4)
CASSPSGGLKTGKLFF

SEQ ID NO: 132529 - protein, 12 aa, Homo sapiens
  CDR3 for alpha chain variable domain of TCR clone 66265 (TRAV12-1, TRAJ40)
CVVYSGTYKYIF

SEQ ID NO: 132530 - protein, 17 aa, Homo sapiens
  CDR3 for beta chain variable domain of TCR clone 66265 (TRBV7-2, TRBJ2-5)
CASSLGGLAGVGETQYF

SEQ ID NO: 132531 - protein, 17 aa, Homo sapiens
  CDR3 for alpha chain variable domain of TCR clone 66266 (TRAV3, TRAJ42)
CAVRDRDYGGSQGNVIF

SEQ ID NO: 132532 - protein, 15 aa, Homo sapiens
  CDR3 for beta chain variable domain of TCR clone 66266 (TRBV6-6, TRBJ2-7)
CASSYSYGGSYEQYF

SEQ ID NO: 132533 - protein, 15 aa, Homo sapiens
  CDR3 for alpha chain variable domain of TCR clone 66267 (TRAV26-1, TRAJ12)
IASSELMDSSYKLIF

SEQ ID NO: 132534 - protein, 11 aa, Homo sapiens
  CDR3 for beta chain variable domain of TCR clone 66267 (TRBV7-9, TRBJ2-3)
CASSPPDTQYS

SEQ ID NO: 132535 - protein, 12 aa, Homo sapiens
  CDR3 for alpha chain variable domain of TCR clone 66268 (TRAV12-3, TRAJ20)
CAMVRGDYKLSF

SEQ ID NO: 132536 - protein, 11 aa, Homo sapiens
  CDR3 for beta chain variable domain of TCR clone 66268 (TRBV12-4, TRBJ2-3)
CASTATDTQYF

SEQ ID NO: 132537 - protein, 19 aa, Homo sapiens
  CDR3 for alpha chain variable domain of TCR clone 66269 (TRAV26-1, TRAJ52)
CIVRAHRNAGGTSYGKLTF

SEQ ID NO: 132538 - protein, 13 aa, Homo sapiens
  CDR3 for beta chain variable domain of TCR clone 66269 (TRBV19, TRBJ2-7)
CASRKAGGSEQHF

SEQ ID NO: 132539 - protein, 14 aa, Homo sapiens
  CDR3 for alpha chain variable domain of TCR clone 66270 (TRAV13-1, TRAJ3)
CAASKSSSDSKIIF

SEQ ID NO: 132540 - protein, 13 aa, Homo sapiens
  CDR3 for beta chain variable domain of TCR clone 66270 (TRBV25-1, TRBJ2-5)
CASSESGRETQYF

SEQ ID NO: 132541 - protein, 14 aa, Homo sapiens
  CDR3 for alpha chain variable domain of TCR clone 66271 (TRAV8-3, TRAJ44)
CAVGLTGTASKLTF

SEQ ID NO: 132542 - protein, 12 aa, Homo sapiens
  CDR3 for beta chain variable domain of TCR clone 66271 (TRBV7-3, TRBJ2-1)
CASSLGFNEQFL

SEQ ID NO: 132543 - protein, 14 aa, Homo sapiens
  CDR3 for alpha chain variable domain of TCR clone 66272 (TRAV1-2, TRAJ16)
CAVNRFSDGQKLLF

SEQ ID NO: 132544 - protein, 15 aa, Homo sapiens
  CDR3 for beta chain variable domain of TCR clone 66272 (TRBV27, TRBJ2-3)
CASRSPAGVIDTQYF

SEQ ID NO: 132545 - protein, 11 aa, Homo sapiens
  CDR3 for alpha chain variable domain of TCR clone 66273 (TRAV4, TRAJ23)
CLVAPGGKLIF

SEQ ID NO: 132546 - protein, 15 aa, Homo sapiens
  CDR3 for beta chain variable domain of TCR clone 66273 (TRBV7-2, TRBJ2-1)
CASSFQADECNEQFF

SEQ ID NO: 132547 - protein, 15 aa, Homo sapiens
  CDR3 for alpha chain variable domain of TCR clone 66274 (TRAV8-1, TRAJ6)
CAVNTPPGGSYIPTF

SEQ ID NO: 132548 - protein, 14 aa, Homo sapiens
  CDR3 for beta chain variable domain of TCR clone 66274 (TRBV12-4, TRBJ2-1)
CASSLGQGASERFF

SEQ ID NO: 132549 - protein, 15 aa, Homo sapiens
  CDR3 for alpha chain variable domain of TCR clone 66275 (TRAV12-2, TRAJ53)
CAVNWGGGSNYKLTF

SEQ ID NO: 132550 - protein, 14 aa, Homo sapiens
  CDR3 for beta chain variable domain of TCR clone 66275 (TRBV19, TRBJ2-2)
CASSTLHRSGELFF

SEQ ID NO: 132551 - protein, 14 aa, Homo sapiens
  CDR3 for alpha chain variable domain of TCR clone 66276 (TRAV12-3, TRAJ10)
SHLPLTGGGNKLTF

SEQ ID NO: 132552 - protein, 12 aa, Homo sapiens
  CDR3 for beta chain variable domain of TCR clone 66276 (TRBV7-8, TRBJ2-7)
CASSLGDREQYS

SEQ ID NO: 132553 - protein, 22 aa, Homo sapiens
  CDR3 for alpha chain variable domain of TCR clone 66277 (TRAV27, TRAJ38)
CAGRFNAGNNHIQNPDPAVYQL

SEQ ID NO: 132554 - protein, 13 aa, Homo sapiens
  CDR3 for beta chain variable domain of TCR clone 66277 (TRBV20-1, TRBJ1-1)
CSARVGGNTEAFF

SEQ ID NO: 132555 - protein, 15 aa, Homo sapiens
  CDR3 for alpha chain variable domain of TCR clone 66278 (TRAV26-1, TRAJ40)
CIVRVTTSGTYKSIF

SEQ ID NO: 132556 - protein, 12 aa, Homo sapiens
  CDR3 for beta chain variable domain of TCR clone 66278 (TRBV7-9, TRBJ1-4)
CASSTDREKLFF

SEQ ID NO: 132557 - protein, 11 aa, Homo sapiens
  CDR3 for alpha chain variable domain of TCR clone 66279 (TRAV12-1, TRAJ30)
CVMNGQDRIIF

SEQ ID NO: 132558 - protein, 12 aa, Homo sapiens
  CDR3 for beta chain variable domain of TCR clone 66279 (TRBV27, TRBJ2-2)
CASKLFTGELFF

SEQ ID NO: 132559 - protein, 13 aa, Homo sapiens
  CDR3 for alpha chain variable domain of TCR clone 66280 (TRAV2, TRAJ15)
CAVASQAGTALIF

SEQ ID NO: 132560 - protein, 17 aa, Homo sapiens
  CDR3 for beta chain variable domain of TCR clone 66280 (TRBV20-1, TRBJ2-1)
CSASSSGLAGSYNEQFF

SEQ ID NO: 132561 - protein, 11 aa, Homo sapiens
  CDR3 for alpha chain variable domain of TCR clone 66281 (TRAV4, TRAJ31)
CLVGDNARLMF

SEQ ID NO: 132562 - protein, 13 aa, Homo sapiens
  CDR3 for beta chain variable domain of TCR clone 66281 (TRBV7-3, TRBJ1-1)
CASSQDWGAEAFF

SEQ ID NO: 132563 - protein, 12 aa, Homo sapiens
  CDR3 for alpha chain variable domain of TCR clone 66282 (TRAV13-2, TRAJ23)
CAERHRGGKLIF

SEQ ID NO: 132564 - protein, 12 aa, Homo sapiens
  CDR3 for beta chain variable domain of TCR clone 66282 (TRBV14, TRBJ2-5)
CASSQLKETQYF

SEQ ID NO: 132565 - protein, 16 aa, Homo sapiens
  CDR3 for alpha chain variable domain of TCR clone 66283 (TRAV13-2, TRAJ32)
CAENMNYGGATNKLIF

SEQ ID NO: 132566 - protein, 14 aa, Homo sapiens
  CDR3 for beta chain variable domain of TCR clone 66283 (TRBV15, TRBJ2-5)
CATSSTGCQETQYF

SEQ ID NO: 132567 - protein, 13 aa, Homo sapiens
  CDR3 for alpha chain variable domain of TCR clone 66284 (TRAV12-1, TRAJ26)
CVVRRNYCQNFVF

SEQ ID NO: 132568 - protein, 14 aa, Homo sapiens
  CDR3 for beta chain variable domain of TCR clone 66284 (TRBV6-3, TRBJ1-1)
CASRYTGESTEAFF

SEQ ID NO: 132569 - protein, 14 aa, Homo sapiens
  CDR3 for alpha chain variable domain of TCR clone 66285 (TRAV14/DV4, TRAJ15)
CAMRRDQAGTTLIF

SEQ ID NO: 132570 - protein, 16 aa, Homo sapiens
  CDR3 for beta chain variable domain of TCR clone 66285 (TRBV15, TRBJ2-3)
CATSRDLGIVTDTQYF

SEQ ID NO: 132571 - protein, 13 aa, Homo sapiens
  CDR3 for alpha chain variable domain of TCR clone 66286 (TRAV12-2, TRAJ39)
CAVNNNAGNMLTF

SEQ ID NO: 132572 - protein, 15 aa, Homo sapiens
  CDR3 for beta chain variable domain of TCR clone 66286 (TRBV29-1, TRBJ2-1)
CSGRDRKSSYNEQFF

SEQ ID NO: 132573 - protein, 14 aa, Homo sapiens
  CDR3 for alpha chain variable domain of TCR clone 66287 (TRAV1-2, TRAJ16)
CAVNRFSDGQKLLF

SEQ ID NO: 132574 - protein, 13 aa, Homo sapiens
  CDR3 for beta chain variable domain of TCR clone 66287 (TRBV23-1, TRBJ1-4)
CASRGKFNEKLFF

SEQ ID NO: 132575 - protein, 14 aa, Homo sapiens
  CDR3 for alpha chain variable domain of TCR clone 66288 (TRAV1-2, TRAJ16)
CAVNRFSDGQKLLF

SEQ ID NO: 132576 - protein, 19 aa, Homo sapiens
  CDR3 for beta chain variable domain of TCR clone 66288 (TRBV19, TRBJ2-2)
CASTRPGLAGGRVTGEPFF

SEQ ID NO: 132577 - protein, 13 aa, Homo sapiens
  CDR3 for alpha chain variable domain of TCR clone 66289 (TRAV25, TRAJ30)
CAGRVDRDDKIIF

SEQ ID NO: 132578 - protein, 17 aa, Homo sapiens
  CDR3 for beta chain variable domain of TCR clone 66289 (TRBV7-9, TRBJ2-6)
CASSFGAGYDGANVLTF

SEQ ID NO: 132579 - protein, 14 aa, Homo sapiens
  CDR3 for alpha chain variable domain of TCR clone 66290 (TRAV4, TRAJ17)
CLVGDMAAGNKLTF

SEQ ID NO: 132580 - protein, 16 aa, Homo sapiens
  CDR3 for beta chain variable domain of TCR clone 66290 (TRBV4-2, TRBJ2-7)
CASSQDGVERGYEQYF

SEQ ID NO: 132581 - protein, 16 aa, Homo sapiens
  CDR3 for alpha chain variable domain of TCR clone 66291 (TRAV17, TRAJ22)
CATGPISSGSAMQLTF

SEQ ID NO: 132582 - protein, 13 aa, Homo sapiens
  CDR3 for beta chain variable domain of TCR clone 66291 (TRBV11-2, TRBJ2-1)
CASSLGLAGGRFF

SEQ ID NO: 132583 - protein, 12 aa, Homo sapiens
  CDR3 for alpha chain variable domain of TCR clone 66292 (TRAV12-3, TRAJ17)
CAMTLTGNELTF

SEQ ID NO: 132584 - protein, 17 aa, Homo sapiens
  CDR3 for beta chain variable domain of TCR clone 66292 (TRBV11-2, TRBJ2-1)
CASSLYPPGVEYNEQFF

SEQ ID NO: 132585 - protein, 12 aa, Homo sapiens
  CDR3 for alpha chain variable domain of TCR clone 66293 (TRAV21, TRAJ11)
CAATSGYSTLTF

SEQ ID NO: 132586 - protein, 13 aa, Homo sapiens
  CDR3 for beta chain variable domain of TCR clone 66293 (TRBV7-3, TRBJ1-1)
CASSQDWGAEAFF

SEQ ID NO: 132587 - protein, 14 aa, Homo sapiens
  CDR3 for alpha chain variable domain of TCR clone 66294 (TRAV26-1, TRAJ38)
CIADNTGNNRKLIW

SEQ ID NO: 132588 - protein, 16 aa, Homo sapiens
  CDR3 for beta chain variable domain of TCR clone 66294 (TRBV20-1, TRBJ2-7)
CSASTSGRLSSYEQYF

SEQ ID NO: 132589 - protein, 13 aa, Homo sapiens
  CDR3 for alpha chain variable domain of TCR clone 66295 (TRAV1-2, TRAJ31)
CAVRPNSNARLMF

SEQ ID NO: 132590 - protein, 14 aa, Homo sapiens
  CDR3 for beta chain variable domain of TCR clone 66295 (TRBV11-2, TRBJ2-1)
CASSLSGPYNEQFF

SEQ ID NO: 132591 - protein, 14 aa, Homo sapiens
  CDR3 for alpha chain variable domain of TCR clone 66296 (TRAV12-3, TRAJ6)
CAMSATRGSYIPTF

SEQ ID NO: 132592 - protein, 16 aa, Homo sapiens
  CDR3 for beta chain variable domain of TCR clone 66296 (TRBV4-2, TRBJ2-1)
CASSPRAGQGANEQFF

SEQ ID NO: 132593 - protein, 12 aa, Homo sapiens
  CDR3 for alpha chain variable domain of TCR clone 66297 (TRAV1-1, TRAJ9)
CAVDTGGFKTIF

SEQ ID NO: 132594 - protein, 17 aa, Homo sapiens
  CDR3 for beta chain variable domain of TCR clone 66297 (TRBV11-2, TRBJ2-1)
CASSLYPPGVEYNEQFF

SEQ ID NO: 132595 - protein, 11 aa, Homo sapiens
  CDR3 for alpha chain variable domain of TCR clone 66298 (TRAV2, TRAJ33)
CAVESNYQLIW

SEQ ID NO: 132596 - protein, 17 aa, Homo sapiens
  CDR3 for beta chain variable domain of TCR clone 66298 (TRBV7-3, TRBJ2-3)
CASSLMKRMRGADTQYF

SEQ ID NO: 132597 - protein, 17 aa, Homo sapiens
  CDR3 for alpha chain variable domain of TCR clone 66299 (TRAV21, TRAJ52)
CAVGVNAGGTSYGKLTF

SEQ ID NO: 132598 - protein, 13 aa, Homo sapiens
  CDR3 for beta chain variable domain of TCR clone 66299 (TRBV5-1, TRBJ1-2)
CASSFQGNYGYTV

SEQ ID NO: 132599 - protein, 13 aa, Homo sapiens
  CDR3 for alpha chain variable domain of TCR clone 66300 (TRAV8-3, TRAJ28)
CAVGGVGSYQLTF

SEQ ID NO: 132600 - protein, 14 aa, Homo sapiens
  CDR3 for beta chain variable domain of TCR clone 66300 (TRBV7-2, TRBJ2-7)
CASRSQGAAYEQYF

SEQ ID NO: 132601 - protein, 11 aa, Homo sapiens
  CDR3 for alpha chain variable domain of TCR clone 66301 (TRAV12-3, TRAJ41)
CAMNAREALNF

SEQ ID NO: 132602 - protein, 16 aa, Homo sapiens
  CDR3 for beta chain variable domain of TCR clone 66301 (TRBV7-8, TRBJ2-3)
CASSTGGQRETDTQYF

SEQ ID NO: 132603 - protein, 16 aa, Homo sapiens
  CDR3 for alpha chain variable domain of TCR clone 66302 (TRAV3, TRAJ37)
CAVRGKGSGNTGKLIF

SEQ ID NO: 132604 - protein, 13 aa, Homo sapiens
  CDR3 for beta chain variable domain of TCR clone 66302 (TRBV14, TRBJ2-7)
RASSQDRRYEQYF

SEQ ID NO: 132605 - protein, 13 aa, Homo sapiens
  CDR3 for alpha chain variable domain of TCR clone 66303 (TRAV27, TRAJ49)
CAPRPYTGNQFYF

SEQ ID NO: 132606 - protein, 16 aa, Homo sapiens
  CDR3 for beta chain variable domain of TCR clone 66303 (TRBV19, TRBJ2-1)
CASSKAGPSSYNEQFF

SEQ ID NO: 132607 - protein, 14 aa, Homo sapiens
  CDR3 for alpha chain variable domain of TCR clone 66304 (TRAV9-2, TRAJ39)
CALYIYNAGNMLTF

SEQ ID NO: 132608 - protein, 12 aa, Homo sapiens
  CDR3 for beta chain variable domain of TCR clone 66304 (TRBV2, TRBJ2-1)
GRGLPSYNEQFF

SEQ ID NO: 132609 - protein, 14 aa, Homo sapiens
  CDR3 for alpha chain variable domain of TCR clone 66305 (TRAV12-2, TRAJ13)
CAVKKTGGYQKVTF

SEQ ID NO: 132610 - protein, 12 aa, Homo sapiens
  CDR3 for beta chain variable domain of TCR clone 66305 (TRBV29-1, TRBJ1-1)
CSESDRNTEAFF

SEQ ID NO: 132611 - protein, 13 aa, Homo sapiens
  CDR3 for alpha chain variable domain of TCR clone 66306 (TRAV30, TRAJ6)
CGFIEGGSCIPTF

SEQ ID NO: 132612 - protein, 13 aa, Homo sapiens
  CDR3 for beta chain variable domain of TCR clone 66306 (TRBV5-4, TRBJ2-5)
CASSPVSQETQYF

SEQ ID NO: 132613 - protein, 11 aa, Homo sapiens
  CDR3 for alpha chain variable domain of TCR clone 66307 (TRAV2, TRAJ33)
CAVDSNYQLIW

SEQ ID NO: 132614 - protein, 15 aa, Homo sapiens
  CDR3 for beta chain variable domain of TCR clone 66307 (TRBV5-1, TRBJ2-1)
CASSPPRAPYNEQFF

SEQ ID NO: 132615 - protein, 14 aa, Homo sapiens
  CDR3 for alpha chain variable domain of TCR clone 66308 (TRAV21, TRAJ21)
CAVKGFGNFNKFYF

SEQ ID NO: 132616 - protein, 13 aa, Homo sapiens
  CDR3 for beta chain variable domain of TCR clone 66308 (TRBV15, TRBJ1-6)
CATSGGLNSPLHF

SEQ ID NO: 132617 - protein, 13 aa, Homo sapiens
  CDR3 for alpha chain variable domain of TCR clone 66309 (TRAV27, TRAJ41)
CAGEGNSGYALNF

SEQ ID NO: 132618 - protein, 19 aa, Homo sapiens
  CDR3 for beta chain variable domain of TCR clone 66309 (TRBV11-3, TRBJ2-2)
CASSTRPGAKTTNTGELFF

SEQ ID NO: 132619 - protein, 15 aa, Homo sapiens
  CDR3 for alpha chain variable domain of TCR clone 66310 (TRAV30, TRAJ32)
CGIEILGGATNKLIF

SEQ ID NO: 132620 - protein, 17 aa, Homo sapiens
  CDR3 for beta chain variable domain of TCR clone 66310 (TRBV5-4, TRBJ2-1)
CASSSAGGRGPYNEQFF

SEQ ID NO: 132621 - protein, 14 aa, Homo sapiens
  CDR3 for alpha chain variable domain of TCR clone 66311 (TRAV12-2, TRAJ5)
CAVNRSTGRRALTF

SEQ ID NO: 132622 - protein, 16 aa, Homo sapiens
  CDR3 for beta chain variable domain of TCR clone 66311 (TRBV12-4, TRBJ1-5)
CASSRPVGGSNQPQHF

SEQ ID NO: 132623 - protein, 16 aa, Homo sapiens
  CDR3 for alpha chain variable domain of TCR clone 66312 (TRAV16, TRAJ4)
CITVLPFSGGYNKLIF

SEQ ID NO: 132624 - protein, 14 aa, Homo sapiens
  CDR3 for beta chain variable domain of TCR clone 66312 (TRBV19, TRBJ2-7)
CTSSMGQGAIEQYF

SEQ ID NO: 132625 - protein, 13 aa, Homo sapiens
  CDR3 for alpha chain variable domain of TCR clone 66313 (TRAV12-1, TRAJ9)
CVVLNTGGFKTIF

SEQ ID NO: 132626 - protein, 13 aa, Homo sapiens
  CDR3 for beta chain variable domain of TCR clone 66313 (TRBV20-1, TRBJ1-1)
CGARGGGNTEAFF

SEQ ID NO: 132627 - protein, 23 aa, Homo sapiens
  CDR3 for alpha chain variable domain of TCR clone 66314 (TRAV8-3, TRAJ38)
CAVGASNAGNNHIQHPDPAVYQL

SEQ ID NO: 132628 - protein, 15 aa, Homo sapiens
  CDR3 for beta chain variable domain of TCR clone 66314 (TRBV11-3, TRBJ1-3)
CASSLFGPSGNTIYF

SEQ ID NO: 132629 - protein, 12 aa, Homo sapiens
  CDR3 for alpha chain variable domain of TCR clone 66315 (TRAV2, TRAJ31)
CAVEDNNARLMF

SEQ ID NO: 132630 - protein, 16 aa, Homo sapiens
  CDR3 for beta chain variable domain of TCR clone 66315 (TRBV10-3, TRBJ2-1)
CAISGEGDGGGGEQFF

SEQ ID NO: 132631 - protein, 16 aa, Homo sapiens
  CDR3 for alpha chain variable domain of TCR clone 66316 (TRAV30, TRAJ24)
CGTEIVDADGWGKFQF

SEQ ID NO: 132632 - protein, 13 aa, Homo sapiens
  CDR3 for beta chain variable domain of TCR clone 66316 (TRBV18, TRBJ1-1)
CASSGGRNTEAFF

SEQ ID NO: 132633 - protein, 16 aa, Homo sapiens
  CDR3 for alpha chain variable domain of TCR clone 66317 (TRAV8-3, TRAJ13)
CAVGAYPSGGYQKVTF

SEQ ID NO: 132634 - protein, 13 aa, Homo sapiens
  CDR3 for beta chain variable domain of TCR clone 66317 (TRBV7-9, TRBJ1-2)
CASSLKQNYGYTL

SEQ ID NO: 132635 - protein, 15 aa, Homo sapiens
  CDR3 for alpha chain variable domain of TCR clone 66318 (TRAV8-3, TRAJ23)
CAVGDRYNQGGKLIF

SEQ ID NO: 132636 - protein, 22 aa, Homo sapiens
  CDR3 for beta chain variable domain of TCR clone 66318 (TRBV29-1, TRBJ2-5)
TVSNMCPEDSSIYLCSAGTQYF

SEQ ID NO: 132637 - protein, 12 aa, Homo sapiens
  CDR3 for alpha chain variable domain of TCR clone 66319 (TRAV12-1, TRAJ40)
CVVYSGTYKYIF

SEQ ID NO: 132638 - protein, 15 aa, Homo sapiens
  CDR3 for beta chain variable domain of TCR clone 66319 (TRBV20-1, TRBJ2-7)
CSAESGTSGAYEQYF

SEQ ID NO: 132639 - protein, 13 aa, Homo sapiens
  CDR3 for alpha chain variable domain of TCR clone 66320 (TRAV8-1, TRAJ36)
CAVNSPTGANNLF

SEQ ID NO: 132640 - protein, 15 aa, Homo sapiens
  CDR3 for beta chain variable domain of TCR clone 66320 (TRBV7-2, TRBJ2-3)
CASSLGQGGTDTQYF

SEQ ID NO: 132641 - protein, 14 aa, Homo sapiens
  CDR3 for alpha chain variable domain of TCR clone 66321 (TRAV12-3, TRAJ10)
SHLPLTGGGNKLTF

SEQ ID NO: 132642 - protein, 16 aa, Homo sapiens
  CDR3 for beta chain variable domain of TCR clone 66321 (TRBV4-2, TRBJ2-7)
CASSQDGVERGYEQYF

SEQ ID NO: 132643 - protein, 15 aa, Homo sapiens
  CDR3 for alpha chain variable domain of TCR clone 66322 (TRAV12-2, TRAJ53)
CAVNGGGGSNYKLTF

SEQ ID NO: 132644 - protein, 16 aa, Homo sapiens
  CDR3 for beta chain variable domain of TCR clone 66322 (TRBV7-9, TRBJ1-2)
CASSISLDRGGYGYTF

SEQ ID NO: 132645 - protein, 14 aa, Homo sapiens
  CDR3 for alpha chain variable domain of TCR clone 66323 (TRAV16, TRAJ39)
CALSKNNAGNMLTF

SEQ ID NO: 132646 - protein, 13 aa, Homo sapiens
  CDR3 for beta chain variable domain of TCR clone 66323 (TRBV6-1, TRBJ1-2)
CASSDSPSYGYTF

SEQ ID NO: 132647 - protein, 13 aa, Homo sapiens
  CDR3 for alpha chain variable domain of TCR clone 66324 (TRAV8-4, TRAJ10)
CAAFTGGGNKLIF

SEQ ID NO: 132648 - protein, 11 aa, Homo sapiens
  CDR3 for beta chain variable domain of TCR clone 66324 (TRBV12-4, TRBJ2-3)
CASTATDTQYF

SEQ ID NO: 132649 - protein, 12 aa, Homo sapiens
  CDR3 for alpha chain variable domain of TCR clone 66325 (TRAV13-1, TRAJ48)
CAATFGNEKLTF

SEQ ID NO: 132650 - protein, 13 aa, Homo sapiens
  CDR3 for beta chain variable domain of TCR clone 66325 (TRBV7-3, TRBJ1-1)
CASSQDWGAEAFF

SEQ ID NO: 132651 - protein, 15 aa, Homo sapiens
  CDR3 for alpha chain variable domain of TCR clone 66326 (TRAV10, TRAJ6)
CVVRPRTGGSYIPTF

SEQ ID NO: 132652 - protein, 15 aa, Homo sapiens
  CDR3 for beta chain variable domain of TCR clone 66326 (TRBV20-1, TRBJ2-7)
CSARDRVSGVDEQYF

SEQ ID NO: 132653 - protein, 11 aa, Homo sapiens
  CDR3 for alpha chain variable domain of TCR clone 66327 (TRAV2, TRAJ21)
CAVFNFNKFYF

SEQ ID NO: 132654 - protein, 14 aa, Homo sapiens
  CDR3 for beta chain variable domain of TCR clone 66327 (TRBV15, TRBJ2-3)
CATWSGTSTDTQYF

SEQ ID NO: 132655 - protein, 14 aa, Homo sapiens
  CDR3 for alpha chain variable domain of TCR clone 66328 (TRAV16, TRAJ33)
CALSAMDSNYQLIW

SEQ ID NO: 132656 - protein, 15 aa, Homo sapiens
  CDR3 for beta chain variable domain of TCR clone 66328 (TRBV7-9, TRBJ1-5)
CASSQGHQPNQPQHF

SEQ ID NO: 132657 - protein, 14 aa, Homo sapiens
  CDR3 for alpha chain variable domain of TCR clone 66329 (TRAV1-2, TRAJ27)
CSVRSGTNAGKSTF

SEQ ID NO: 132658 - protein, 15 aa, Homo sapiens
  CDR3 for beta chain variable domain of TCR clone 66329 (TRBV18, TRBJ2-7)
CASSPLQGRTYEQYF

SEQ ID NO: 132659 - protein, 10 aa, Homo sapiens
  CDR3 for alpha chain variable domain of TCR clone 66330 (TRAV12-2, TRAJ48)
CAVTSEKLTF

SEQ ID NO: 132660 - protein, 17 aa, Homo sapiens
  CDR3 for beta chain variable domain of TCR clone 66330 (TRBV11-3, TRBJ2-7)
CANSLTGSFGLDYEQYF

SEQ ID NO: 132661 - protein, 12 aa, Homo sapiens
  CDR3 for alpha chain variable domain of TCR clone 66331 (TRAV2, TRAJ9)
CAVGAGGFKTIF

SEQ ID NO: 132662 - protein, 14 aa, Homo sapiens
  CDR3 for beta chain variable domain of TCR clone 66331 (TRBV5-1, TRBJ2-7)
CASSFASGVNEQYF

SEQ ID NO: 132663 - protein, 15 aa, Homo sapiens
  CDR3 for alpha chain variable domain of TCR clone 66332 (TRAV3, TRAJ45)
CAVRTPWGGAGGLTF

SEQ ID NO: 132664 - protein, 16 aa, Homo sapiens
  CDR3 for beta chain variable domain of TCR clone 66332 (TRBV6-1, TRBJ2-2)
CASSFGQGANTGELFF

SEQ ID NO: 132665 - protein, 15 aa, Homo sapiens
  CDR3 for alpha chain variable domain of TCR clone 66333 (TRAV8-2, TRAJ42)
CVVSAYMGGQGNLIF

SEQ ID NO: 132666 - protein, 11 aa, Homo sapiens
  CDR3 for beta chain variable domain of TCR clone 66333 (TRBV5-1, TRBJ2-1)
CASSIGQEQFF

SEQ ID NO: 132667 - protein, 15 aa, Homo sapiens
  CDR3 for alpha chain variable domain of TCR clone 66334 (TRAV12-1, TRAJ9)
WVVSFGDTGGFKTIF

SEQ ID NO: 132668 - protein, 13 aa, Homo sapiens
  CDR3 for beta chain variable domain of TCR clone 66334 (TRBV2, TRBJ1-4)
CASSERAGEKLFF

SEQ ID NO: 132669 - protein, 14 aa, Homo sapiens
  CDR3 for alpha chain variable domain of TCR clone 66335 (TRAV17, TRAJ16)
CATADFSDGQKLLF

SEQ ID NO: 132670 - protein, 15 aa, Homo sapiens
  CDR3 for beta chain variable domain of TCR clone 66335 (TRBV18, TRBJ2-1)
CASSLPSASYNEQFF

SEQ ID NO: 132671 - protein, 17 aa, Homo sapiens
  CDR3 for alpha chain variable domain of TCR clone 66336 (TRAV26-2, TRAJ42)
CILRDVGYGGSQGNLIF

SEQ ID NO: 132672 - protein, 16 aa, Homo sapiens
  CDR3 for beta chain variable domain of TCR clone 66336 (TRBV12-4, TRBJ2-7)
CANSLIGGTGTYEQYF

SEQ ID NO: 132673 - protein, 13 aa, Homo sapiens
  CDR3 for alpha chain variable domain of TCR clone 66337 (TRAV8-3, TRAJ21)
CAVAPVDFNKFYF

SEQ ID NO: 132674 - protein, 14 aa, Homo sapiens
  CDR3 for beta chain variable domain of TCR clone 66337 (TRBV15, TRBJ2-3)
CATRSGTSTDTQYF

SEQ ID NO: 132675 - protein, 17 aa, Homo sapiens
  CDR3 for alpha chain variable domain of TCR clone 66338 (TRAV3, TRAJ6)
CAVRDGPRAGGSYIPTF

SEQ ID NO: 132676 - protein, 20 aa, Homo sapiens
  CDR3 for beta chain variable domain of TCR clone 66338 (TRBV28, TRBJ2-1)
CASTLIGRSPGLAGGNEQFF

SEQ ID NO: 132677 - protein, 15 aa, Homo sapiens
  CDR3 for alpha chain variable domain of TCR clone 66339 (TRAV3, TRAJ3)
CCERPRYSSAPKIIF

SEQ ID NO: 132678 - protein, 16 aa, Homo sapiens
  CDR3 for beta chain variable domain of TCR clone 66339 (TRBV19, TRBJ1-5)
CASSIDRGGPRQPQHF

SEQ ID NO: 132679 - protein, 15 aa, Homo sapiens
  CDR3 for alpha chain variable domain of TCR clone 66340 (TRAV16, TRAJ48)
CALLISNFGNEKLAF

SEQ ID NO: 132680 - protein, 15 aa, Homo sapiens
  CDR3 for beta chain variable domain of TCR clone 66340 (TRBV5-4, TRBJ2-7)
CASSRFGTGSYEQYF

SEQ ID NO: 132681 - protein, 13 aa, Homo sapiens
  CDR3 for alpha chain variable domain of TCR clone 66341 (TRAV8-1, TRAJ28)
CAVSVAGSYQLTF

SEQ ID NO: 132682 - protein, 14 aa, Homo sapiens
  CDR3 for beta chain variable domain of TCR clone 66341 (TRBV7-2, TRBJ2-2)
CASRGQGAAGELFF

SEQ ID NO: 132683 - protein, 11 aa, Homo sapiens
  CDR3 for alpha chain variable domain of TCR clone 66342 (TRAV27, TRAJ20)
CAGLNDYKPSF

SEQ ID NO: 132684 - protein, 14 aa, Homo sapiens
  CDR3 for beta chain variable domain of TCR clone 66342 (TRBV6-1, TRBJ1-1)
CASTPLQMNTEAFF

SEQ ID NO: 132685 - protein, 11 aa, Homo sapiens
  CDR3 for alpha chain variable domain of TCR clone 66343 (TRAV8-3, TRAJ4)
CAVGARPDFKR

SEQ ID NO: 132686 - protein, 13 aa, Homo sapiens
  CDR3 for beta chain variable domain of TCR clone 66343 (TRBV20-1, TRBJ1-2)
CSATGIQGSGYAF

SEQ ID NO: 132687 - protein, 14 aa, Homo sapiens
  CDR3 for alpha chain variable domain of TCR clone 66344 (TRAV12-1, TRAJ29)
CAVNEGSGNTPLVF

SEQ ID NO: 132688 - protein, 13 aa, Homo sapiens
  CDR3 for beta chain variable domain of TCR clone 66344 (TRBV7-9, TRBJ2-3)
CASSPGSTDTQYF

SEQ ID NO: 132689 - protein, 11 aa, Homo sapiens
  CDR3 for alpha chain variable domain of TCR clone 66345 (TRAV2, TRAJ33)
CAVDSNYQLIW

SEQ ID NO: 132690 - protein, 14 aa, Homo sapiens
  CDR3 for beta chain variable domain of TCR clone 66345 (TRBV4-1, TRBJ2-2)
CASSQAVNTGELFF

SEQ ID NO: 132691 - protein, 14 aa, Homo sapiens
  CDR3 for alpha chain variable domain of TCR clone 66346 (TRAV2, TRAJ9)
CAVEDRSGGFKTIF

SEQ ID NO: 132692 - protein, 12 aa, Homo sapiens
  CDR3 for beta chain variable domain of TCR clone 66346 (TRBV12-4, TRBJ2-4)
CASSSSGNSQYF

SEQ ID NO: 132693 - protein, 13 aa, Homo sapiens
  CDR3 for alpha chain variable domain of TCR clone 66347 (TRAV21, TRAJ15)
CSVANQAGTALIF

SEQ ID NO: 132694 - protein, 14 aa, Homo sapiens
  CDR3 for beta chain variable domain of TCR clone 66347 (TRBV27, TRBJ2-2)
CASSLGAATGELFF

SEQ ID NO: 132695 - protein, 14 aa, Homo sapiens
  CDR3 for alpha chain variable domain of TCR clone 66348 (TRAV1-1, TRAJ30)
CAVRSLNRDDKIIF

SEQ ID NO: 132696 - protein, 20 aa, Homo sapiens
  CDR3 for beta chain variable domain of TCR clone 66348 (TRBV19, TRBJ2-1)
CASSISRTVTSTRLNNEQFF

SEQ ID NO: 132697 - protein, 13 aa, Homo sapiens
  CDR3 for alpha chain variable domain of TCR clone 66349 (TRAV21, TRAJ20)
CAVGLRVDYKLSF

SEQ ID NO: 132698 - protein, 13 aa, Homo sapiens
  CDR3 for beta chain variable domain of TCR clone 66349 (TRBV6-1, TRBJ1-1)
CASSRQENTEAFF

SEQ ID NO: 132699 - protein, 11 aa, Homo sapiens
  CDR3 for alpha chain variable domain of TCR clone 66350 (TRAV6, TRAJ4)
PISGGYNKLIF

SEQ ID NO: 132700 - protein, 11 aa, Homo sapiens
  CDR3 for beta chain variable domain of TCR clone 66350 (TRBV29-1, TRBJ2-5)
CSEDRTGTQYF

SEQ ID NO: 132701 - protein, 11 aa, Homo sapiens
  CDR3 for alpha chain variable domain of TCR clone 66351 (TRAV25, TRAJ43)
CAGPRNNDMRF

SEQ ID NO: 132702 - protein, 13 aa, Homo sapiens
  CDR3 for beta chain variable domain of TCR clone 66351 (TRBV10-3, TRBJ2-7)
CASKLAVNYEQYF

SEQ ID NO: 132703 - protein, 13 aa, Homo sapiens
  CDR3 for alpha chain variable domain of TCR clone 66352 (TRAV12-2, TRAJ39)
CAVNNNAGNMLTF

SEQ ID NO: 132704 - protein, 14 aa, Homo sapiens
  CDR3 for beta chain variable domain of TCR clone 66352 (TRBV7-2, TRBJ2-7)
CASSPKTSFYEQYF

SEQ ID NO: 132705 - protein, 10 aa, Homo sapiens
  CDR3 for alpha chain variable domain of TCR clone 66353 (TRAV1-2, TRAJ23)
CAGQGGKLIF

SEQ ID NO: 132706 - protein, 14 aa, Homo sapiens
  CDR3 for beta chain variable domain of TCR clone 66353 (TRBV6-1, TRBJ1-3)
CASAQGGGGNTIYF

SEQ ID NO: 132707 - protein, 16 aa, Homo sapiens
  CDR3 for alpha chain variable domain of TCR clone 66354 (TRAV4, TRAJ9)
CLVGDPNRPGGFKTIF

SEQ ID NO: 132708 - protein, 14 aa, Homo sapiens
  CDR3 for beta chain variable domain of TCR clone 66354 (TRBV20-1, TRBJ1-1)
CSAQTRIGGTEAVF

SEQ ID NO: 132709 - protein, 11 aa, Homo sapiens
  CDR3 for alpha chain variable domain of TCR clone 66355 (TRAV21, TRAJ48)
CAVDGNEKLNF

SEQ ID NO: 132710 - protein, 16 aa, Homo sapiens
  CDR3 for beta chain variable domain of TCR clone 66355 (TRBV12-4, TRBJ1-5)
CASSSGPRGSNQPQHF

SEQ ID NO: 132711 - protein, 11 aa, Homo sapiens
  CDR3 for alpha chain variable domain of TCR clone 66356 (TRAV1-2, TRAJ11)
CAVRGYSTLTF

SEQ ID NO: 132712 - protein, 18 aa, Homo sapiens
  CDR3 for beta chain variable domain of TCR clone 66356 (TRBV12-4, TRBJ2-2)
CASSLVAGTRGRTGELFF

SEQ ID NO: 132713 - protein, 15 aa, Homo sapiens
  CDR3 for alpha chain variable domain of TCR clone 66357 (TRAV17, TRAJ42)
CATDHYGGSQGDLIF

SEQ ID NO: 132714 - protein, 14 aa, Homo sapiens
  CDR3 for beta chain variable domain of TCR clone 66357 (TRBV19, TRBJ2-5)
CASSIEHSQETQYF

SEQ ID NO: 132715 - protein, 14 aa, Homo sapiens
  CDR3 for alpha chain variable domain of TCR clone 66358 (TRAV8-1, TRAJ15)
CAVNGQQAGTALIF

SEQ ID NO: 132716 - protein, 13 aa, Homo sapiens
  CDR3 for beta chain variable domain of TCR clone 66358 (TRBV7-3, TRBJ1-1)
CASSQDWGAEAFF

SEQ ID NO: 132717 - protein, 12 aa, Homo sapiens
  CDR3 for alpha chain variable domain of TCR clone 66359 (TRAV12-3, TRAJ17)
CAMTLTGNKLTF

SEQ ID NO: 132718 - protein, 13 aa, Homo sapiens
  CDR3 for beta chain variable domain of TCR clone 66359 (TRBV18, TRBJ1-1)
CASSGGRNTEAFF

SEQ ID NO: 132719 - protein, 11 aa, Homo sapiens
  CDR3 for alpha chain variable domain of TCR clone 66360 (TRAV21, TRAJ39)
LLVNAGNMLTF

SEQ ID NO: 132720 - protein, 14 aa, Homo sapiens
  CDR3 for beta chain variable domain of TCR clone 66360 (TRBV7-2, TRBJ1-2)
CASSQTGSTYGYTF

SEQ ID NO: 132721 - protein, 14 aa, Homo sapiens
  CDR3 for alpha chain variable domain of TCR clone 66361 (TRAV12-3, TRAJ12)
CAMSEVDRSYKLIF

SEQ ID NO: 132722 - protein, 12 aa, Homo sapiens
  CDR3 for beta chain variable domain of TCR clone 66361 (TRBV18, TRBJ1-4)
CASSPSREKLFF

SEQ ID NO: 132723 - protein, 11 aa, Homo sapiens
  CDR3 for alpha chain variable domain of TCR clone 66362 (TRAV12-2, TRAJ31)
CAILNNARLIF

SEQ ID NO: 132724 - protein, 16 aa, Homo sapiens
  CDR3 for beta chain variable domain of TCR clone 66362 (TRBV13, TRBJ2-2)
CASSPRTGEHTGELFF

SEQ ID NO: 132725 - protein, 16 aa, Homo sapiens
  CDR3 for alpha chain variable domain of TCR clone 66363 (TRAV14/DV4, TRAJ54)
CAMREGRIQGAQKLVF

SEQ ID NO: 132726 - protein, 15 aa, Homo sapiens
  CDR3 for beta chain variable domain of TCR clone 66363 (TRBV20-1, TRBJ2-5)
CSAEGTGGLQETQYF

SEQ ID NO: 132727 - protein, 13 aa, Homo sapiens
  CDR3 for alpha chain variable domain of TCR clone 66364 (TRAV27, TRAJ57)
CRSAQGGSEQLVF

SEQ ID NO: 132728 - protein, 11 aa, Homo sapiens
  CDR3 for beta chain variable domain of TCR clone 66364 (TRBV11-2, TRBJ1-1)
CASSINTEAFF

SEQ ID NO: 132729 - protein, 11 aa, Homo sapiens
  CDR3 for alpha chain variable domain of TCR clone 66365 (TRAV17, TRAJ9)
CATTGGFKTIF

SEQ ID NO: 132730 - protein, 12 aa, Homo sapiens
  CDR3 for beta chain variable domain of TCR clone 66365 (TRBV14, TRBJ2-5)
CASSQLKETQYF

SEQ ID NO: 132731 - protein, 14 aa, Homo sapiens
  CDR3 for alpha chain variable domain of TCR clone 66366 (TRAV9-2, TRAJ39)
CALYIYNAGNMLTF

SEQ ID NO: 132732 - protein, 13 aa, Homo sapiens
  CDR3 for beta chain variable domain of TCR clone 66366 (TRBV4-1, TRBJ2-7)
CASSQGQAYEQYF

SEQ ID NO: 132733 - protein, 18 aa, Homo sapiens
  CDR3 for alpha chain variable domain of TCR clone 66367 (TRAV17, TRAJ42)
CFLLLCYGRGGSQGNLIF

SEQ ID NO: 132734 - protein, 14 aa, Homo sapiens
  CDR3 for beta chain variable domain of TCR clone 66367 (TRBV7-2, TRBJ2-3)
CASRFSRPSDTQYF

SEQ ID NO: 132735 - protein, 14 aa, Homo sapiens
  CDR3 for alpha chain variable domain of TCR clone 66368 (TRAV3, TRAJ21)
CAVESQAHFNKFYF

SEQ ID NO: 132736 - protein, 18 aa, Homo sapiens
  CDR3 for beta chain variable domain of TCR clone 66368 (TRBV7-9, TRBJ2-1)
CASSLAVSGTSGRNEQFF

SEQ ID NO: 132737 - protein, 13 aa, Homo sapiens
  CDR3 for alpha chain variable domain of TCR clone 66369 (TRAV13-1, TRAJ20)
CAARVSNDYKLSF

SEQ ID NO: 132738 - protein, 12 aa, Homo sapiens
  CDR3 for beta chain variable domain of TCR clone 66369 (TRBV20-1, TRBJ2-1)
CSARLGTDGQFF

SEQ ID NO: 132739 - protein, 14 aa, Homo sapiens
  CDR3 for alpha chain variable domain of TCR clone 66370 (TRAV21, TRAJ11)
CAVRRNSGYSTLTF

SEQ ID NO: 132740 - protein, 15 aa, Homo sapiens
  CDR3 for beta chain variable domain of TCR clone 66370 (TRBV10-3, TRBJ2-1)
CAISESASGRKEQFF

SEQ ID NO: 132741 - protein, 15 aa, Homo sapiens
  CDR3 for alpha chain variable domain of TCR clone 66371 (TRAV26-1, TRAJ40)
YIDRYATSGTYKYIF

SEQ ID NO: 132742 - protein, 11 aa, Homo sapiens
  CDR3 for beta chain variable domain of TCR clone 66371 (TRBV7-9, TRBJ2-1)
CASSSQNEQFF

SEQ ID NO: 132743 - protein, 13 aa, Homo sapiens
  CDR3 for alpha chain variable domain of TCR clone 66372 (TRAV12-1, TRAJ11)
CVVNRAGYSTLTF

SEQ ID NO: 132744 - protein, 16 aa, Homo sapiens
  CDR3 for beta chain variable domain of TCR clone 66372 (TRBV7-3, TRBJ2-2)
CASSLKRGTLSGELFF

SEQ ID NO: 132745 - protein, 14 aa, Homo sapiens
  CDR3 for alpha chain variable domain of TCR clone 66373 (TRAV12-3, TRAJ10)
SHLPLTGGGNKLTF

SEQ ID NO: 132746 - protein, 13 aa, Homo sapiens
  CDR3 for beta chain variable domain of TCR clone 66373 (TRBV12-4, TRBJ1-1)
CASSFGEDTEAFF

SEQ ID NO: 132747 - protein, 15 aa, Homo sapiens
  CDR3 for alpha chain variable domain of TCR clone 66374 (TRAV23/DV6, TRAJ13)
CAAWPGGGGYQKVTF

SEQ ID NO: 132748 - protein, 13 aa, Homo sapiens
  CDR3 for beta chain variable domain of TCR clone 66374 (TRBV12-4, TRBJ2-2)
CASSPLPPGELFF

SEQ ID NO: 132749 - protein, 12 aa, Homo sapiens
  CDR3 for alpha chain variable domain of TCR clone 66375 (TRAV12-2, TRAJ10)
WGVTVGGNKLTF

SEQ ID NO: 132750 - protein, 20 aa, Homo sapiens
  CDR3 for beta chain variable domain of TCR clone 66375 (TRBV19, TRBJ2-1)
CASSISRTVTSTRLNNEQFF

SEQ ID NO: 132751 - protein, 11 aa, Homo sapiens
  CDR3 for alpha chain variable domain of TCR clone 66376 (TRAV12-1, TRAJ8)
CVVTGFQKLVF

SEQ ID NO: 132752 - protein, 14 aa, Homo sapiens
  CDR3 for beta chain variable domain of TCR clone 66376 (TRBV19, TRBJ2-1)
CASWKSTQYNEQFF

SEQ ID NO: 132753 - protein, 14 aa, Homo sapiens
  CDR3 for alpha chain variable domain of TCR clone 66377 (TRAV26-1, TRAJ34)
CIVRVAYNTDKLIF

SEQ ID NO: 132754 - protein, 13 aa, Homo sapiens
  CDR3 for beta chain variable domain of TCR clone 66377 (TRBV4-2, TRBJ1-1)
CASSRAGNTEAFF

SEQ ID NO: 132755 - protein, 17 aa, Homo sapiens
  CDR3 for alpha chain variable domain of TCR clone 66378 (TRAV16, TRAJ42)
CALSPKLYGGSQGNLIF

SEQ ID NO: 132756 - protein, 13 aa, Homo sapiens
  CDR3 for beta chain variable domain of TCR clone 66378 (TRBV19, TRBJ1-5)
CASSTRRDQPQHL

SEQ ID NO: 132757 - protein, 14 aa, Homo sapiens
  CDR3 for alpha chain variable domain of TCR clone 66379 (TRAV13-1, TRAJ22)
WAASYSGSARQLTF

SEQ ID NO: 132758 - protein, 13 aa, Homo sapiens
  CDR3 for beta chain variable domain of TCR clone 66379 (TRBV27, TRBJ1-1)
CASSLSIGAEAFF

SEQ ID NO: 132759 - protein, 13 aa, Homo sapiens
  CDR3 for alpha chain variable domain of TCR clone 66380 (TRAV3, TRAJ21)
CAVREPDFNKFYF

SEQ ID NO: 132760 - protein, 16 aa, Homo sapiens
  CDR3 for beta chain variable domain of TCR clone 66380 (TRBV7-9, TRBJ2-6)
CASSLKGPLRANVLTF

SEQ ID NO: 132761 - protein, 10 aa, Homo sapiens
  CDR3 for alpha chain variable domain of TCR clone 66381 (TRAV29/DV5, TRAJ54)
LIQGAQKLVF

SEQ ID NO: 132762 - protein, 18 aa, Homo sapiens
  CDR3 for beta chain variable domain of TCR clone 66381 (TRBV3-1, TRBJ1-2)
CASGQDVIGWNGDYGYTF

SEQ ID NO: 132763 - protein, 12 aa, Homo sapiens
  CDR3 for alpha chain variable domain of TCR clone 66382 (TRAV17, TRAJ20)
CATDRYDYKPSF

SEQ ID NO: 132764 - protein, 14 aa, Homo sapiens
  CDR3 for beta chain variable domain of TCR clone 66382 (TRBV19, TRBJ2-1)
CASPTFVLSGEQFF

SEQ ID NO: 132765 - protein, 12 aa, Homo sapiens
  CDR3 for alpha chain variable domain of TCR clone 66383 (TRAV12-1, TRAJ40)
CVVYSGTYKYIF

SEQ ID NO: 132766 - protein, 16 aa, Homo sapiens
  CDR3 for beta chain variable domain of TCR clone 66383 (TRBV28, TRBJ2-7)
CASSLFFETGGPEQYF

SEQ ID NO: 132767 - protein, 15 aa, Homo sapiens
  CDR3 for alpha chain variable domain of TCR clone 66384 (TRAV17, TRAJ23)
CATDAEDNQGGKLIF

SEQ ID NO: 132768 - protein, 12 aa, Homo sapiens
  CDR3 for beta chain variable domain of TCR clone 66384 (TRBV2, TRBJ2-1)
CAKREGYNEQCF

SEQ ID NO: 132769 - protein, 14 aa, Homo sapiens
  CDR3 for alpha chain variable domain of TCR clone 66385 (TRAV1-2, TRAJ8)
CAVREDTGFQKLVF

SEQ ID NO: 132770 - protein, 14 aa, Homo sapiens
  CDR3 for beta chain variable domain of TCR clone 66385 (TRBV7-7, TRBJ2-2)
CATRQDSDTGELFY

SEQ ID NO: 132771 - protein, 12 aa, Homo sapiens
  CDR3 for alpha chain variable domain of TCR clone 66386 (TRAV12-1, TRAJ40)
CVVSGETYKYIF

SEQ ID NO: 132772 - protein, 14 aa, Homo sapiens
  CDR3 for beta chain variable domain of TCR clone 66386 (TRBV7-9, TRBJ1-1)
CASSSTKGNTEAFF

SEQ ID NO: 132773 - protein, 12 aa, Homo sapiens
  CDR3 for alpha chain variable domain of TCR clone 66387 (TRAV13-2, TRAJ16)
CAASPDGQKLLF

SEQ ID NO: 132774 - protein, 12 aa, Homo sapiens
  CDR3 for beta chain variable domain of TCR clone 66387 (TRBV11-2, TRBJ2-2)
CASSLPTGELFF

SEQ ID NO: 132775 - protein, 14 aa, Homo sapiens
  CDR3 for alpha chain variable domain of TCR clone 66388 (TRAV26-1, TRAJ38)
CIADNAGNNRKLIW

SEQ ID NO: 132776 - protein, 16 aa, Homo sapiens
  CDR3 for beta chain variable domain of TCR clone 66388 (TRBV7-7, TRBJ2-1)
CASSLASGTSYNEQFF

SEQ ID NO: 132777 - protein, 13 aa, Homo sapiens
  CDR3 for alpha chain variable domain of TCR clone 66389 (TRAV2, TRAJ40)
CAVVTSGTYKYIF

SEQ ID NO: 132778 - protein, 12 aa, Homo sapiens
  CDR3 for beta chain variable domain of TCR clone 66389 (TRBV19, TRBJ2-1)
CASSMQDTEQFF

SEQ ID NO: 132779 - protein, 13 aa, Homo sapiens
  CDR3 for alpha chain variable domain of TCR clone 66390 (TRAV17, TRAJ31)
CATDENNNARLML

SEQ ID NO: 132780 - protein, 14 aa, Homo sapiens
  CDR3 for beta chain variable domain of TCR clone 66390 (TRBV11-2, TRBJ2-1)
CASSPSRQGGGQFF

SEQ ID NO: 132781 - protein, 16 aa, Homo sapiens
  CDR3 for alpha chain variable domain of TCR clone 66391 (TRAV4, TRAJ9)
CLVGDPNRPGGFKTIF

SEQ ID NO: 132782 - protein, 14 aa, Homo sapiens
  CDR3 for beta chain variable domain of TCR clone 66391 (TRBV25-1, TRBJ1-1)
CASTHLGGNTEAFF

SEQ ID NO: 132783 - protein, 14 aa, Homo sapiens
  CDR3 for alpha chain variable domain of TCR clone 66392 (TRAV16, TRAJ32)
CALKSGGATNKLIF

SEQ ID NO: 132784 - protein, 13 aa, Homo sapiens
  CDR3 for beta chain variable domain of TCR clone 66392 (TRBV10-3, TRBJ2-7)
CASKLAVNYEQYF

SEQ ID NO: 132785 - protein, 14 aa, Homo sapiens
  CDR3 for alpha chain variable domain of TCR clone 66393 (TRAV2, TRAJ9)
CAVEDRSGGFKTIL

SEQ ID NO: 132786 - protein, 19 aa, Homo sapiens
  CDR3 for beta chain variable domain of TCR clone 66393 (TRBV25-1, TRBJ2-2)
CAILVYRVDRGRKTGELFF

SEQ ID NO: 132787 - protein, 10 aa, Homo sapiens
  CDR3 for alpha chain variable domain of TCR clone 66394 (TRAV8-4, TRAJ43)
CAVSADDMRF

SEQ ID NO: 132788 - protein, 13 aa, Homo sapiens
  CDR3 for beta chain variable domain of TCR clone 66394 (TRBV12-4, TRBJ2-5)
CASSPGTEETQYL

SEQ ID NO: 132789 - protein, 15 aa, Homo sapiens
  CDR3 for alpha chain variable domain of TCR clone 66395 (TRAV23/DV6, TRAJ21)
CAASREQLQQILLLI

SEQ ID NO: 132790 - protein, 16 aa, Homo sapiens
  CDR3 for beta chain variable domain of TCR clone 66395 (TRBV20-1, TRBJ2-3)
CSAVRDRGPIADTQYF

SEQ ID NO: 132791 - protein, 14 aa, Homo sapiens
  CDR3 for alpha chain variable domain of TCR clone 66396 (TRAV2, TRAJ23)
CAVGLRNQGGKLIF

SEQ ID NO: 132792 - protein, 15 aa, Homo sapiens
  CDR3 for beta chain variable domain of TCR clone 66396 (TRBV9, TRBJ1-6)
CASSVAGTGDSPLHF

SEQ ID NO: 132793 - protein, 15 aa, Homo sapiens
  CDR3 for alpha chain variable domain of TCR clone 66397 (TRAV8-4, TRAJ40)
CAVSSITSGTYIYIF

SEQ ID NO: 132794 - protein, 13 aa, Homo sapiens
  CDR3 for beta chain variable domain of TCR clone 66397 (TRBV2, TRBJ2-1)
CATSRGTDNEQFF

SEQ ID NO: 132795 - protein, 14 aa, Homo sapiens
  CDR3 for alpha chain variable domain of TCR clone 66398 (TRAV12-2, TRAJ44)
CAVNPAGTASKLTF

SEQ ID NO: 132796 - protein, 15 aa, Homo sapiens
  CDR3 for beta chain variable domain of TCR clone 66398 (TRBV5-1, TRBJ2-1)
GASSPPRAPYNEQFF

SEQ ID NO: 132797 - protein, 12 aa, Homo sapiens
  CDR3 for alpha chain variable domain of TCR clone 66399 (TRAV13-1, TRAJ49)
CAAPNTGNQFYF

SEQ ID NO: 132798 - protein, 17 aa, Homo sapiens
  CDR3 for beta chain variable domain of TCR clone 66399 (TRBV25-1, TRBJ2-7)
CASSDARVVFSSYEQYL

SEQ ID NO: 132799 - protein, 16 aa, Homo sapiens
  CDR3 for alpha chain variable domain of TCR clone 66400 (TRAV26-1, TRAJ37)
CIVRGDGSGNTGKLIC

SEQ ID NO: 132800 - protein, 17 aa, Homo sapiens
  CDR3 for beta chain variable domain of TCR clone 66400 (TRBV4-1, TRBJ2-7)
CASSRDPLGVRGGEQYF

SEQ ID NO: 132801 - protein, 14 aa, Homo sapiens
  CDR3 for alpha chain variable domain of TCR clone 66401 (TRAV27, TRAJ13)
CRSSNSGGYRKVTF

SEQ ID NO: 132802 - protein, 10 aa, Homo sapiens
  CDR3 for beta chain variable domain of TCR clone 66401 (TRBV2, TRBJ2-5)
CASSAATQYF

SEQ ID NO: 132803 - protein, 14 aa, Homo sapiens
  CDR3 for alpha chain variable domain of TCR clone 66402 (TRAV12-3, TRAJ9)
CAMSPNTGGFKTIF

SEQ ID NO: 132804 - protein, 13 aa, Homo sapiens
  CDR3 for beta chain variable domain of TCR clone 66402 (TRBV18, TRBJ1-1)
CASSGGRNTEAFF

SEQ ID NO: 132805 - protein, 15 aa, Homo sapiens
  CDR3 for alpha chain variable domain of TCR clone 66403 (TRAV26-2, TRAJ28)
CILVESGAGSYQLTF

SEQ ID NO: 132806 - protein, 16 aa, Homo sapiens
  CDR3 for beta chain variable domain of TCR clone 66403 (TRBV4-2, TRBJ1-2)
CTSSQEIGGASYGYTF

SEQ ID NO: 132807 - protein, 15 aa, Homo sapiens
  CDR3 for alpha chain variable domain of TCR clone 66404 (TRAV2, TRAJ24)
CAVVRLKNSWGKLKF

SEQ ID NO: 132808 - protein, 16 aa, Homo sapiens
  CDR3 for beta chain variable domain of TCR clone 66404 (TRBV7-7, TRBJ2-3)
CASSPGTSGSTDTQYF

SEQ ID NO: 132809 - protein, 13 aa, Homo sapiens
  CDR3 for alpha chain variable domain of TCR clone 66405 (TRAV21, TRAJ47)
CAVSGLCGNKLVF

SEQ ID NO: 132810 - protein, 17 aa, Homo sapiens
  CDR3 for beta chain variable domain of TCR clone 66405 (TRBV15, TRBJ2-3)
CATSGTTSEEGTDTQYF

SEQ ID NO: 132811 - protein, 14 aa, Homo sapiens
  CDR3 for alpha chain variable domain of TCR clone 66406 (TRAV14/DV4, TRAJ15)
CAMRRDQAGTALIF

SEQ ID NO: 132812 - protein, 16 aa, Homo sapiens
  CDR3 for beta chain variable domain of TCR clone 66406 (TRBV19, TRBJ2-2)
CASRSPGTGATGELFF

SEQ ID NO: 132813 - protein, 14 aa, Homo sapiens
  CDR3 for alpha chain variable domain of TCR clone 66407 (TRAV9-2, TRAJ39)
CALYIYNAGNMLTF

SEQ ID NO: 132814 - protein, 17 aa, Homo sapiens
  CDR3 for beta chain variable domain of TCR clone 66407 (TRBV6-1, TRBJ1-3)
CASVQGGGVETPYILER

SEQ ID NO: 132815 - protein, 12 aa, Homo sapiens
  CDR3 for alpha chain variable domain of TCR clone 66408 (TRAV2, TRAJ10)
CASTGGGNKLTF

SEQ ID NO: 132816 - protein, 17 aa, Homo sapiens
  CDR3 for beta chain variable domain of TCR clone 66408 (TRBV13, TRBJ2-3)
CASSLSRVAGGRNTQYF

SEQ ID NO: 132817 - protein, 13 aa, Homo sapiens
  CDR3 for alpha chain variable domain of TCR clone 66409 (TRAV2, TRAJ24)
CAVSPDSWGKLQF

SEQ ID NO: 132818 - protein, 14 aa, Homo sapiens
  CDR3 for beta chain variable domain of TCR clone 66409 (TRBV13, TRBJ2-5)
CASSLGTAQETQYF

SEQ ID NO: 132819 - protein, 13 aa, Homo sapiens
  CDR3 for alpha chain variable domain of TCR clone 66410 (TRAV36/DV7, TRAJ37)
CAVFSSNTGKLIF

SEQ ID NO: 132820 - protein, 16 aa, Homo sapiens
  CDR3 for beta chain variable domain of TCR clone 66410 (TRBV3-1, TRBJ2-5)
CASSPGQLNGFGTQYF

SEQ ID NO: 132821 - protein, 15 aa, Homo sapiens
  CDR3 for alpha chain variable domain of TCR clone 66411 (TRAV8-4, TRAJ3)
CAVTGENLVQQCFQD

SEQ ID NO: 132822 - protein, 16 aa, Homo sapiens
  CDR3 for beta chain variable domain of TCR clone 66411 (TRBV4-2, TRBJ1-1)
CASSQAGLGMNTEAFF

SEQ ID NO: 132823 - protein, 15 aa, Homo sapiens
  CDR3 for alpha chain variable domain of TCR clone 66412 (TRAV17, TRAJ56)
CATEPFTGANSKLTF

SEQ ID NO: 132824 - protein, 15 aa, Homo sapiens
  CDR3 for beta chain variable domain of TCR clone 66412 (TRBV28, TRBJ1-5)
CASSRTGGYVRPQHF

SEQ ID NO: 132825 - protein, 15 aa, Homo sapiens
  CDR3 for alpha chain variable domain of TCR clone 66413 (TRAV1-2, TRAJ15)
CAVEAANQAGTALIF

SEQ ID NO: 132826 - protein, 14 aa, Homo sapiens
  CDR3 for beta chain variable domain of TCR clone 66413 (TRBV7-8, TRBJ1-2)
CASSAGTAIYGYTF

SEQ ID NO: 132827 - protein, 14 aa, Homo sapiens
  CDR3 for alpha chain variable domain of TCR clone 66414 (TRAV1-2, TRAJ16)
CAVNRFSDGQKLLF

SEQ ID NO: 132828 - protein, 14 aa, Homo sapiens
  CDR3 for beta chain variable domain of TCR clone 66414 (TRBV4-2, TRBJ1-5)
CASSRDRGNQPQHF

SEQ ID NO: 132829 - protein, 12 aa, Homo sapiens
  CDR3 for alpha chain variable domain of TCR clone 66415 (TRAV2, TRAJ31)
CAVEDHNARLMF

SEQ ID NO: 132830 - protein, 16 aa, Homo sapiens
  CDR3 for beta chain variable domain of TCR clone 66415 (TRBV10-3, TRBJ2-1)
CAISGVGDGGGGEQFF

SEQ ID NO: 132831 - protein, 12 aa, Homo sapiens
  CDR3 for alpha chain variable domain of TCR clone 66416 (TRAV21, TRAJ11)
CAATSGYSTLTF

SEQ ID NO: 132832 - protein, 16 aa, Homo sapiens
  CDR3 for beta chain variable domain of TCR clone 66416 (TRBV28, TRBJ2-2)
WASSLEGGSNTGELFF

SEQ ID NO: 132833 - protein, 16 aa, Homo sapiens
  CDR3 for alpha chain variable domain of TCR clone 66417 (TRAV1-2, TRAJ10)
CAVRGVLTGGGNKLTF

SEQ ID NO: 132834 - protein, 12 aa, Homo sapiens
  CDR3 for beta chain variable domain of TCR clone 66417 (TRBV7-8, TRBJ2-7)
CASSLGDREQSF

SEQ ID NO: 132835 - protein, 14 aa, Homo sapiens
  CDR3 for alpha chain variable domain of TCR clone 66418 (TRAV12-3, TRAJ10)
SHLPLTGGGNKLTF

SEQ ID NO: 132836 - protein, 17 aa, Homo sapiens
  CDR3 for beta chain variable domain of TCR clone 66418 (TRBV4-1, TRBJ2-7)
CASSRDPLGVRGGEQYF

SEQ ID NO: 132837 - protein, 12 aa, Homo sapiens
  CDR3 for alpha chain variable domain of TCR clone 66419 (TRAV12-1, TRAJ40)
CVVYSGTYKYIF

SEQ ID NO: 132838 - protein, 13 aa, Homo sapiens
  CDR3 for beta chain variable domain of TCR clone 66419 (TRBV4-2, TRBJ1-1)
CASSQAGNTEAFF

SEQ ID NO: 132839 - protein, 17 aa, Homo sapiens
  CDR3 for alpha chain variable domain of TCR clone 66420 (TRAV26-1, TRAJ22)
CIVRVPSHSGSARQLTF

SEQ ID NO: 132840 - protein, 16 aa, Homo sapiens
  CDR3 for beta chain variable domain of TCR clone 66420 (TRBV28, TRBJ2-1)
RASRRSGRVVGNEQFF

SEQ ID NO: 132841 - protein, 13 aa, Homo sapiens
  CDR3 for alpha chain variable domain of TCR clone 66421 (TRAV12-3, TRAJ40)
CAMSDSGTYKYIF

SEQ ID NO: 132842 - protein, 17 aa, Homo sapiens
  CDR3 for beta chain variable domain of TCR clone 66421 (TRBV24-1, TRBJ2-1)
CATSDVSTSGTYNEQFF

SEQ ID NO: 132843 - protein, 15 aa, Homo sapiens
  CDR3 for alpha chain variable domain of TCR clone 66422 (TRAV8-4, TRAJ8)
CAVSDLNTGFQKLVF

SEQ ID NO: 132844 - protein, 13 aa, Homo sapiens
  CDR3 for beta chain variable domain of TCR clone 66422 (TRBV7-9, TRBJ1-2)
CASSLKQNYGYTF

SEQ ID NO: 132845 - protein, 12 aa, Homo sapiens
  CDR3 for alpha chain variable domain of TCR clone 66423 (TRAV21, TRAJ33)
CAKMDSNYQLIW

SEQ ID NO: 132846 - protein, 15 aa, Homo sapiens
  CDR3 for beta chain variable domain of TCR clone 66423 (TRBV9, TRBJ1-6)
CASSVAGTRDSPLHF

SEQ ID NO: 132847 - protein, 17 aa, Homo sapiens
  CDR3 for alpha chain variable domain of TCR clone 66424 (TRAV3, TRAJ6)
CAVRDGPRAGGSYIPTF

SEQ ID NO: 132848 - protein, 14 aa, Homo sapiens
  CDR3 for beta chain variable domain of TCR clone 66424 (TRBV7-2, TRBJ2-7)
CASSLYPGRYEQYF

SEQ ID NO: 132849 - protein, 13 aa, Homo sapiens
  CDR3 for alpha chain variable domain of TCR clone 66425 (TRAV26-2, TRAJ54)
CIPRVGGAQKLVL

SEQ ID NO: 132850 - protein, 16 aa, Homo sapiens
  CDR3 for beta chain variable domain of TCR clone 66425 (TRBV4-1, TRBJ1-1)
CASSSMSERPNTEAFF

SEQ ID NO: 132851 - protein, 13 aa, Homo sapiens
  CDR3 for alpha chain variable domain of TCR clone 66426 (TRAV23/DV6, TRAJ16)
CAASISDGQKLLF

SEQ ID NO: 132852 - protein, 15 aa, Homo sapiens
  CDR3 for beta chain variable domain of TCR clone 66426 (TRBV2, TRBJ2-2)
CASSREAVGTGELFF

SEQ ID NO: 132853 - protein, 16 aa, Homo sapiens
  CDR3 for alpha chain variable domain of TCR clone 66427 (TRAV30, TRAJ24)
CGTEIVDADSWGKSQF

SEQ ID NO: 132854 - protein, 13 aa, Homo sapiens
  CDR3 for beta chain variable domain of TCR clone 66427 (TRBV11-3, TRBJ1-1)
CASTGSLNTEAFF

SEQ ID NO: 132855 - protein, 15 aa, Homo sapiens
  CDR3 for alpha chain variable domain of TCR clone 66428 (TRAV14/DV4, TRAJ10)
CAMRELTGGGNKLTF

SEQ ID NO: 132856 - protein, 14 aa, Homo sapiens
  CDR3 for beta chain variable domain of TCR clone 66428 (TRBV7-2, TRBJ1-1)
CASSSLTGTTEAFF

SEQ ID NO: 132857 - protein, 11 aa, Homo sapiens
  CDR3 for alpha chain variable domain of TCR clone 66429 (TRAV2, TRAJ33)
CAVESNYQLIW

SEQ ID NO: 132858 - protein, 15 aa, Homo sapiens
  CDR3 for beta chain variable domain of TCR clone 66429 (TRBV19, TRBJ1-1)
CASTSGQIQNTEAYF

SEQ ID NO: 132859 - protein, 15 aa, Homo sapiens
  CDR3 for alpha chain variable domain of TCR clone 66430 (TRAV12-2, TRAJ53)
CAVNGGGGSNYKLTF

SEQ ID NO: 132860 - protein, 14 aa, Homo sapiens
  CDR3 for beta chain variable domain of TCR clone 66430 (TRBV11-2, TRBJ1-2)
CASSLGTANYGYTF

SEQ ID NO: 132861 - protein, 15 aa, Homo sapiens
  CDR3 for alpha chain variable domain of TCR clone 66431 (TRAV16, TRAJ12)
CSKWPLRDSSYKLIF

SEQ ID NO: 132862 - protein, 19 aa, Homo sapiens
  CDR3 for beta chain variable domain of TCR clone 66431 (TRBV7-2, TRBJ2-3)
CASSFLSRNWGGGTDTQYF

SEQ ID NO: 132863 - protein, 13 aa, Homo sapiens
  CDR3 for alpha chain variable domain of TCR clone 66432 (TRAV21, TRAJ27)
CAARPGNAGKSTF

SEQ ID NO: 132864 - protein, 12 aa, Homo sapiens
  CDR3 for beta chain variable domain of TCR clone 66432 (TRBV11-2, TRBJ2-2)
CASSLGGGELFL

SEQ ID NO: 132865 - protein, 12 aa, Homo sapiens
  CDR3 for alpha chain variable domain of TCR clone 66433 (TRAV12-1, TRAJ40)
CVVPSGTYEYIF

SEQ ID NO: 132866 - protein, 15 aa, Homo sapiens
  CDR3 for beta chain variable domain of TCR clone 66433 (TRBV12-4, TRBJ2-1)
CASSPLSGRNNEQFF

SEQ ID NO: 132867 - protein, 13 aa, Homo sapiens
  CDR3 for alpha chain variable domain of TCR clone 66434 (TRAV21, TRAJ27)
CAARPGNAGKATF

SEQ ID NO: 132868 - protein, 13 aa, Homo sapiens
  CDR3 for beta chain variable domain of TCR clone 66434 (TRBV13, TRBJ2-1)
CASILGGRGEQFF

SEQ ID NO: 132869 - protein, 18 aa, Homo sapiens
  CDR3 for alpha chain variable domain of TCR clone 66435 (TRAV12-3, TRAJ52)
CAMSRTNAGGTSYGKLIF

SEQ ID NO: 132870 - protein, 17 aa, Homo sapiens
  CDR3 for beta chain variable domain of TCR clone 66435 (TRBV7-3, TRBJ2-3)
CASSLMKRMRGADTQYF

SEQ ID NO: 132871 - protein, 13 aa, Homo sapiens
  CDR3 for alpha chain variable domain of TCR clone 66436 (TRAV17, TRAJ5)
CATMDTGRRALTF

SEQ ID NO: 132872 - protein, 15 aa, Homo sapiens
  CDR3 for beta chain variable domain of TCR clone 66436 (TRBV20-1, TRBJ2-5)
CSATRSSGSLETQYF

SEQ ID NO: 132873 - protein, 18 aa, Homo sapiens
  CDR3 for alpha chain variable domain of TCR clone 66437 (TRAV12-3, TRAJ52)
CAMSVGGAGGTSYGKLTF

SEQ ID NO: 132874 - protein, 15 aa, Homo sapiens
  CDR3 for beta chain variable domain of TCR clone 66437 (TRBV7-9, TRBJ1-6)
CASSSPGRGNSPLHF

SEQ ID NO: 132875 - protein, 16 aa, Homo sapiens
  CDR3 for alpha chain variable domain of TCR clone 66438 (TRAV13-1, TRAJ45)
CAARGSRKGGADGLTF

SEQ ID NO: 132876 - protein, 13 aa, Homo sapiens
  CDR3 for beta chain variable domain of TCR clone 66438 (TRBV12-4, TRBJ2-5)
CACRKRGKETQYF

SEQ ID NO: 132877 - protein, 14 aa, Homo sapiens
  CDR3 for alpha chain variable domain of TCR clone 66439 (TRAV12-1, TRAJ28)
CVSHSGAGSYQLTF

SEQ ID NO: 132878 - protein, 15 aa, Homo sapiens
  CDR3 for beta chain variable domain of TCR clone 66439 (TRBV20-1, TRBJ2-7)
CSARDRVSGMDEQYF

SEQ ID NO: 132879 - protein, 12 aa, Homo sapiens
  CDR3 for alpha chain variable domain of TCR clone 66440 (TRAV13-2, TRAJ23)
CAERHRGGKLIF

SEQ ID NO: 132880 - protein, 15 aa, Homo sapiens
  CDR3 for beta chain variable domain of TCR clone 66440 (TRBV6-5, TRBJ2-1)
CASSYDAGAGNEQFF

SEQ ID NO: 132881 - protein, 14 aa, Homo sapiens
  CDR3 for alpha chain variable domain of TCR clone 66441 (TRAV12-2, TRAJ9)
CAMSPNTGGFKTIF

SEQ ID NO: 132882 - protein, 15 aa, Homo sapiens
  CDR3 for beta chain variable domain of TCR clone 66441 (TRBV15, TRBJ1-5)
CATSREQGGNQPQHF

SEQ ID NO: 132883 - protein, 10 aa, Homo sapiens
  CDR3 for alpha chain variable domain of TCR clone 66442 (TRAV13-1, TRAJ47)
CAAPKLVFGA

SEQ ID NO: 132884 - protein, 14 aa, Homo sapiens
  CDR3 for beta chain variable domain of TCR clone 66442 (TRBV27, TRBJ2-2)
CASSSRLVPGELSF

SEQ ID NO: 132885 - protein, 13 aa, Homo sapiens
  CDR3 for alpha chain variable domain of TCR clone 66443 (TRAV8-1, TRAJ28)
CAVSGAGSCQLTF

SEQ ID NO: 132886 - protein, 14 aa, Homo sapiens
  CDR3 for beta chain variable domain of TCR clone 66443 (TRBV19, TRBJ2-5)
CASSMTGQQETQYF

SEQ ID NO: 132887 - protein, 14 aa, Homo sapiens
  CDR3 for alpha chain variable domain of TCR clone 66444 (TRAV8-6, TRAJ12)
CAVKAAGSSYKLIF

SEQ ID NO: 132888 - protein, 15 aa, Homo sapiens
  CDR3 for beta chain variable domain of TCR clone 66444 (TRBV5-1, TRBJ2-5)
CASSLGLAEQETQYF

SEQ ID NO: 132889 - protein, 13 aa, Homo sapiens
  CDR3 for alpha chain variable domain of TCR clone 66445 (TRAV39, TRAJ49)
CAVDRNTGNQFHF

SEQ ID NO: 132890 - protein, 14 aa, Homo sapiens
  CDR3 for beta chain variable domain of TCR clone 66445 (TRBV4-1, TRBJ1-1)
CASSRSGQSFEAFF

SEQ ID NO: 132891 - protein, 16 aa, Homo sapiens
  CDR3 for alpha chain variable domain of TCR clone 66446 (TRAV30, TRAJ24)
CGTEIVDADSWGKFQF

SEQ ID NO: 132892 - protein, 13 aa, Homo sapiens
  CDR3 for beta chain variable domain of TCR clone 66446 (TRBV7-3, TRBJ1-1)
CASSQEWGAEAFF

SEQ ID NO: 132893 - protein, 19 aa, Homo sapiens
  CDR3 for alpha chain variable domain of TCR clone 66447 (TRAV26-1, TRAJ52)
CIVRAHRNAGGTSYGKLPF

SEQ ID NO: 132894 - protein, 15 aa, Homo sapiens
  CDR3 for beta chain variable domain of TCR clone 66447 (TRBV12-4, TRBJ2-5)
CASSPPTGLQETQYF

SEQ ID NO: 132895 - protein, 14 aa, Homo sapiens
  CDR3 for alpha chain variable domain of TCR clone 66448 (TRAV26-1, TRAJ45)
CIEVTGGGADRLTF

SEQ ID NO: 132896 - protein, 13 aa, Homo sapiens
  CDR3 for beta chain variable domain of TCR clone 66448 (TRBV7-6, TRBJ1-2)
CASSLVADYGYTF

SEQ ID NO: 132897 - protein, 13 aa, Homo sapiens
  CDR3 for alpha chain variable domain of TCR clone 66449 (TRAV8-3, TRAJ21)
CAVGAYNFNKFYI

SEQ ID NO: 132898 - protein, 16 aa, Homo sapiens
  CDR3 for beta chain variable domain of TCR clone 66449 (TRBV19, TRBJ2-1)
CASSMGGGSSYNEQFF

SEQ ID NO: 132899 - protein, 16 aa, Homo sapiens
  CDR3 for alpha chain variable domain of TCR clone 66450 (TRAV30, TRAJ24)
CGTEIVDADSWGKFQF

SEQ ID NO: 132900 - protein, 15 aa, Homo sapiens
  CDR3 for beta chain variable domain of TCR clone 66450 (TRBV7-2, TRBJ2-1)
CASSLVAGRYNEQFF

SEQ ID NO: 132901 - protein, 11 aa, Homo sapiens
  CDR3 for alpha chain variable domain of TCR clone 66451 (TRAV21, TRAJ34)
CAHYNTDKLIF

SEQ ID NO: 132902 - protein, 15 aa, Homo sapiens
  CDR3 for beta chain variable domain of TCR clone 66451 (TRBV19, TRBJ1-5)
CASSIVWADNQPQHF

SEQ ID NO: 132903 - protein, 13 aa, Homo sapiens
  CDR3 for alpha chain variable domain of TCR clone 66452 (TRAV8-3, TRAJ43)
CAVVPYYNNDMRF

SEQ ID NO: 132904 - protein, 17 aa, Homo sapiens
  CDR3 for beta chain variable domain of TCR clone 66452 (TRBV7-7, TRBJ1-1)
CASIGDRPNLGVTEAFF

SEQ ID NO: 132905 - protein, 15 aa, Homo sapiens
  CDR3 for alpha chain variable domain of TCR clone 66453 (TRAV12-3, TRAJ27)
CAMRAYNTNAGKSTF

SEQ ID NO: 132906 - protein, 17 aa, Homo sapiens
  CDR3 for beta chain variable domain of TCR clone 66453 (TRBV11-2, TRBJ2-1)
CASSLYPPGVEYNEQFF

SEQ ID NO: 132907 - protein, 13 aa, Homo sapiens
  CDR3 for alpha chain variable domain of TCR clone 66454 (TRAV12-3, TRAJ33)
CAVSVNSNYQLIW

SEQ ID NO: 132908 - protein, 14 aa, Homo sapiens
  CDR3 for beta chain variable domain of TCR clone 66454 (TRBV12-5, TRBJ2-5)
CASGSRTHQETQYF

SEQ ID NO: 132909 - protein, 13 aa, Homo sapiens
  CDR3 for alpha chain variable domain of TCR clone 66455 (TRAV12-1, TRAJ26)
CVVRRNYGQNFVF

SEQ ID NO: 132910 - protein, 14 aa, Homo sapiens
  CDR3 for beta chain variable domain of TCR clone 66455 (TRBV7-6, TRBJ2-3)
CASSLGTVTDTQYF

SEQ ID NO: 132911 - protein, 14 aa, Homo sapiens
  CDR3 for alpha chain variable domain of TCR clone 66456 (TRAV1-2, TRAJ8)
CAVREDTGFQKLVF

SEQ ID NO: 132912 - protein, 13 aa, Homo sapiens
  CDR3 for beta chain variable domain of TCR clone 66456 (TRBV10-3, TRBJ1-2)
CAISERDSYGHTF

SEQ ID NO: 132913 - protein, 11 aa, Homo sapiens
  CDR3 for alpha chain variable domain of TCR clone 66457 (TRAV12-1, TRAJ34)
CVVNKGRELIF

SEQ ID NO: 132914 - protein, 17 aa, Homo sapiens
  CDR3 for beta chain variable domain of TCR clone 66457 (TRBV7-3, TRBJ2-3)
CASSLMKRMRGADTQYF

SEQ ID NO: 132915 - protein, 13 aa, Homo sapiens
  CDR3 for alpha chain variable domain of TCR clone 66458 (TRAV8-3, TRAJ30)
CAVGGWRYDKIIF

SEQ ID NO: 132916 - protein, 14 aa, Homo sapiens
  CDR3 for beta chain variable domain of TCR clone 66458 (TRBV20-1, TRBJ1-1)
CSAPPADMNTEAFF

SEQ ID NO: 132917 - protein, 12 aa, Homo sapiens
  CDR3 for alpha chain variable domain of TCR clone 66459 (TRAV25, TRAJ54)
CAGPKGAQKLVF

SEQ ID NO: 132918 - protein, 14 aa, Homo sapiens
  CDR3 for beta chain variable domain of TCR clone 66459 (TRBV7-2, TRBJ2-7)
CASRSQGAAYEQYF

SEQ ID NO: 132919 - protein, 11 aa, Homo sapiens
  CDR3 for alpha chain variable domain of TCR clone 66460 (TRAV9-2, TRAJ42)
CALSDSVDLIF

SEQ ID NO: 132920 - protein, 15 aa, Homo sapiens
  CDR3 for beta chain variable domain of TCR clone 66460 (TRBV4-1, TRBJ1-4)
CASSDTGGTNEKLFF

SEQ ID NO: 132921 - protein, 11 aa, Homo sapiens
  CDR3 for alpha chain variable domain of TCR clone 66461 (TRAV21, TRAJ39)
ILVNAGNMLTF

SEQ ID NO: 132922 - protein, 12 aa, Homo sapiens
  CDR3 for beta chain variable domain of TCR clone 66461 (TRBV12-4, TRBJ2-7)
CASSLGGYEQYF

SEQ ID NO: 132923 - protein, 14 aa, Homo sapiens
  CDR3 for alpha chain variable domain of TCR clone 66462 (TRAV9-2, TRAJ39)
CALYIYNAGNMLTF

SEQ ID NO: 132924 - protein, 14 aa, Homo sapiens
  CDR3 for beta chain variable domain of TCR clone 66462 (TRBV7-9, TRBJ2-2)
CASSLVQDTGELFF

SEQ ID NO: 132925 - protein, 12 aa, Homo sapiens
  CDR3 for alpha chain variable domain of TCR clone 66463 (TRAV27, TRAJ36)
ASTPAGANNLFF

SEQ ID NO: 132926 - protein, 13 aa, Homo sapiens
  CDR3 for beta chain variable domain of TCR clone 66463 (TRBV7-9, TRBJ2-3)
CASSPGPTDTQYF

SEQ ID NO: 132927 - protein, 17 aa, Homo sapiens
  CDR3 for alpha chain variable domain of TCR clone 66464 (TRAV3, TRAJ6)
CAVRDGPRAGGSYIPTF

SEQ ID NO: 132928 - protein, 14 aa, Homo sapiens
  CDR3 for beta chain variable domain of TCR clone 66464 (TRBV6-1, TRBJ1-3)
CASVQGGGENTIYF

SEQ ID NO: 132929 - protein, 14 aa, Homo sapiens
  CDR3 for alpha chain variable domain of TCR clone 66465 (TRAV35, TRAJ50)
CAGHRKTSYDKVIF

SEQ ID NO: 132930 - protein, 15 aa, Homo sapiens
  CDR3 for beta chain variable domain of TCR clone 66465 (TRBV2, TRBJ2-1)
CASSELAGSYNEQFF

SEQ ID NO: 132931 - protein, 14 aa, Homo sapiens
  CDR3 for alpha chain variable domain of TCR clone 66466 (TRAV12-2, TRAJ13)
CAVKKTGGYQKVTF

SEQ ID NO: 132932 - protein, 14 aa, Homo sapiens
  CDR3 for beta chain variable domain of TCR clone 66466 (TRBV7-9, TRBJ2-7)
CASSLGGSSYEQYF

SEQ ID NO: 132933 - protein, 16 aa, Homo sapiens
  CDR3 for alpha chain variable domain of TCR clone 66467 (TRAV30, TRAJ24)
CGTEIVDADSWGKFQF

SEQ ID NO: 132934 - protein, 15 aa, Homo sapiens
  CDR3 for beta chain variable domain of TCR clone 66467 (TRBV7-3, TRBJ2-3)
CASSLGLTLGDTQYF

SEQ ID NO: 132935 - protein, 19 aa, Homo sapiens
  CDR3 for alpha chain variable domain of TCR clone 66468 (TRAV1-2, TRAJ26)
CLLPLCCERPDNYGQNFVF

SEQ ID NO: 132936 - protein, 15 aa, Homo sapiens
  CDR3 for beta chain variable domain of TCR clone 66468 (TRBV9, TRBJ1-6)
CASSVAGTGDSPPHF

SEQ ID NO: 132937 - protein, 17 aa, Homo sapiens
  CDR3 for alpha chain variable domain of TCR clone 66469 (TRAV3, TRAJ42)
CAVRDRDYGGSQGNLIS

SEQ ID NO: 132938 - protein, 12 aa, Homo sapiens
  CDR3 for beta chain variable domain of TCR clone 66469 (TRBV11-2, TRBJ2-1)
CASSPGNNEQFF

SEQ ID NO: 132939 - protein, 14 aa, Homo sapiens
  CDR3 for alpha chain variable domain of TCR clone 66470 (TRAV16, TRAJ29)
CALTRNSGNAPLVF

SEQ ID NO: 132940 - protein, 12 aa, Homo sapiens
  CDR3 for beta chain variable domain of TCR clone 66470 (TRBV2, TRBJ2-1)
CAKREGYNEQFF

SEQ ID NO: 132941 - protein, 15 aa, Homo sapiens
  CDR3 for alpha chain variable domain of TCR clone 66471 (TRAV2, TRAJ9)
CAVEDRGTGGFKTIF

SEQ ID NO: 132942 - protein, 16 aa, Homo sapiens
  CDR3 for beta chain variable domain of TCR clone 66471 (TRBV24-1, TRBJ2-3)
GATSDPGTGATDTQYF

SEQ ID NO: 132943 - protein, 18 aa, Homo sapiens
  CDR3 for alpha chain variable domain of TCR clone 66472 (TRAV29/DV5, TRAJ53)
CSVLLCSKRGGSNYKLTF

SEQ ID NO: 132944 - protein, 17 aa, Homo sapiens
  CDR3 for beta chain variable domain of TCR clone 66472 (TRBV7-8, TRBJ2-6)
CASSAGTGGAGANVPTF

SEQ ID NO: 132945 - protein, 16 aa, Homo sapiens
  CDR3 for alpha chain variable domain of TCR clone 66473 (TRAV12-2, TRAJ6)
CAAPLAGSGGSYIPTF

SEQ ID NO: 132946 - protein, 13 aa, Homo sapiens
  CDR3 for beta chain variable domain of TCR clone 66473 (TRBV12-5, TRBJ2-3)
CASGDRQSDTQYF

SEQ ID NO: 132947 - protein, 14 aa, Homo sapiens
  CDR3 for alpha chain variable domain of TCR clone 66474 (TRAV4, TRAJ10)
CLVGDTGGGNKLTF

SEQ ID NO: 132948 - protein, 17 aa, Homo sapiens
  CDR3 for beta chain variable domain of TCR clone 66474 (TRBV10-2, TRBJ2-5)
CASSVGPQETSTSGQAR

SEQ ID NO: 132949 - protein, 16 aa, Homo sapiens
  CDR3 for alpha chain variable domain of TCR clone 66475 (TRAV12-3, TRAJ53)
CAMSPGSGGSNYKLTF

SEQ ID NO: 132950 - protein, 16 aa, Homo sapiens
  CDR3 for beta chain variable domain of TCR clone 66475 (TRBV11-2, TRBJ2-1)
CASSLLLLSSYNEQFF

SEQ ID NO: 132951 - protein, 14 aa, Homo sapiens
  CDR3 for alpha chain variable domain of TCR clone 66476 (TRAV38-2/DV8, TRAJ30)
CAYRSADRGDKIIF

SEQ ID NO: 132952 - protein, 16 aa, Homo sapiens
  CDR3 for beta chain variable domain of TCR clone 66476 (TRBV15, TRBJ1-3)
CATSSPIGFSGNTIYF

SEQ ID NO: 132953 - protein, 13 aa, Homo sapiens
  CDR3 for alpha chain variable domain of TCR clone 66477 (TRAV2, TRAJ40)
CAVVTSGTYKYIF

SEQ ID NO: 132954 - protein, 14 aa, Homo sapiens
  CDR3 for beta chain variable domain of TCR clone 66477 (TRBV7-9, TRBJ1-2)
CASSRQGANYGYTF

SEQ ID NO: 132955 - protein, 15 aa, Homo sapiens
  CDR3 for alpha chain variable domain of TCR clone 66478 (TRAV35, TRAJ20)
CAVQLVGSNDYKLSF

SEQ ID NO: 132956 - protein, 13 aa, Homo sapiens
  CDR3 for beta chain variable domain of TCR clone 66478 (TRBV19, TRBJ2-7)
CASSKTGTHEQYF

SEQ ID NO: 132957 - protein, 14 aa, Homo sapiens
  CDR3 for alpha chain variable domain of TCR clone 66479 (TRAV13-1, TRAJ44)
CAAKATGTASKLTF

SEQ ID NO: 132958 - protein, 17 aa, Homo sapiens
  CDR3 for beta chain variable domain of TCR clone 66479 (TRBV7-3, TRBJ2-3)
CASSLMKRMRGANTQYF

SEQ ID NO: 132959 - protein, 15 aa, Homo sapiens
  CDR3 for alpha chain variable domain of TCR clone 66480 (TRAV26-1, TRAJ29)
CIVRVEGSGNTPLVF

SEQ ID NO: 132960 - protein, 13 aa, Homo sapiens
  CDR3 for beta chain variable domain of TCR clone 66480 (TRBV7-8, TRBJ2-1)
CASSLMAYNEQFF

SEQ ID NO: 132961 - protein, 22 aa, Homo sapiens
  CDR3 for alpha chain variable domain of TCR clone 66481 (TRAV3, TRAJ38)
CAVRDCLNAGNNHIQNPYPAVY

SEQ ID NO: 132962 - protein, 14 aa, Homo sapiens
  CDR3 for beta chain variable domain of TCR clone 66481 (TRBV5-5, TRBJ1-5)
CASSGQGVDQPQHF

SEQ ID NO: 132963 - protein, 15 aa, Homo sapiens
  CDR3 for alpha chain variable domain of TCR clone 66482 (TRAV4, TRAJ39)
CLVGPNNNAGNMLTF

SEQ ID NO: 132964 - protein, 13 aa, Homo sapiens
  CDR3 for beta chain variable domain of TCR clone 66482 (TRBV11-2, TRBJ2-5)
CASSSTGEETKYF

SEQ ID NO: 132965 - protein, 14 aa, Homo sapiens
  CDR3 for alpha chain variable domain of TCR clone 66483 (TRAV23/DV6, TRAJ22)
CAASVSGSARQLPF

SEQ ID NO: 132966 - protein, 16 aa, Homo sapiens
  CDR3 for beta chain variable domain of TCR clone 66483 (TRBV19, TRBJ2-2)
CASSFPGQGLAGELFF

SEQ ID NO: 132967 - protein, 14 aa, Homo sapiens
  CDR3 for alpha chain variable domain of TCR clone 66484 (TRAV3, TRAJ48)
CAVKSNFGNEKLTF

SEQ ID NO: 132968 - protein, 14 aa, Homo sapiens
  CDR3 for beta chain variable domain of TCR clone 66484 (TRBV7-2, TRBJ1-2)
CASSQTGSTYGYTF

SEQ ID NO: 132969 - protein, 13 aa, Homo sapiens
  CDR3 for alpha chain variable domain of TCR clone 66485 (TRAV8-3, TRAJ28)
CAVGAVGSYQLTF

SEQ ID NO: 132970 - protein, 14 aa, Homo sapiens
  CDR3 for beta chain variable domain of TCR clone 66485 (TRBV7-2, TRBJ2-7)
CASTSQGAAYEQYF

SEQ ID NO: 132971 - protein, 16 aa, Homo sapiens
  CDR3 for alpha chain variable domain of TCR clone 66486 (TRAV30, TRAJ24)
CGTEIVDADSWVKFQF

SEQ ID NO: 132972 - protein, 14 aa, Homo sapiens
  CDR3 for beta chain variable domain of TCR clone 66486 (TRBV12-5, TRBJ2-5)
CASGSRTQQETQYF

SEQ ID NO: 132973 - protein, 10 aa, Homo sapiens
  CDR3 for alpha chain variable domain of TCR clone 66487 (TRAV1-2, TRAJ23)
CAAWAGKLIF

SEQ ID NO: 132974 - protein, 12 aa, Homo sapiens
  CDR3 for beta chain variable domain of TCR clone 66487 (TRBV2, TRBJ2-1)
CAKREGYNEQFF

SEQ ID NO: 132975 - protein, 14 aa, Homo sapiens
  CDR3 for alpha chain variable domain of TCR clone 66488 (TRAV26-1, TRAJ38)
CIADNAGNNRKLIW

SEQ ID NO: 132976 - protein, 13 aa, Homo sapiens
  CDR3 for beta chain variable domain of TCR clone 66488 (TRBV12-4, TRBJ1-1)
CASSPGTGFEAFF

SEQ ID NO: 132977 - protein, 15 aa, Homo sapiens
  CDR3 for alpha chain variable domain of TCR clone 66489 (TRAV12-3, TRAJ49)
CAMAVTPNTGNQFYF

SEQ ID NO: 132978 - protein, 14 aa, Homo sapiens
  CDR3 for beta chain variable domain of TCR clone 66489 (TRBV7-8, TRBJ2-3)
CASSLEAGTDTQHF

SEQ ID NO: 132979 - protein, 11 aa, Homo sapiens
  CDR3 for alpha chain variable domain of TCR clone 66490 (TRAV12-3, TRAJ17)
CNDASGNKLTF

SEQ ID NO: 132980 - protein, 15 aa, Homo sapiens
  CDR3 for beta chain variable domain of TCR clone 66490 (TRBV20-1, TRBJ2-7)
CSARDRVSGMDEQYF

SEQ ID NO: 132981 - protein, 13 aa, Homo sapiens
  CDR3 for alpha chain variable domain of TCR clone 66491 (TRAV35, TRAJ39)
CAGQLGKGNMLTF

SEQ ID NO: 132982 - protein, 16 aa, Homo sapiens
  CDR3 for beta chain variable domain of TCR clone 66491 (TRBV7-8, TRBJ2-5)
CASSPAGGRNQETQYF

SEQ ID NO: 132983 - protein, 15 aa, Homo sapiens
  CDR3 for alpha chain variable domain of TCR clone 66492 (TRAV3, TRAJ4)
CAQNMFSGGYNKLIF

SEQ ID NO: 132984 - protein, 16 aa, Homo sapiens
  CDR3 for beta chain variable domain of TCR clone 66492 (TRBV3-1, TRBJ1-6)
CASSQEFQGSYSPLLF

SEQ ID NO: 132985 - protein, 13 aa, Homo sapiens
  CDR3 for alpha chain variable domain of TCR clone 66493 (TRAV27, TRAJ57)
CRSAQGGSERLVF

SEQ ID NO: 132986 - protein, 16 aa, Homo sapiens
  CDR3 for beta chain variable domain of TCR clone 66493 (TRBV10-3, TRBJ2-1)
CAISGVGDGGGGEQFF

SEQ ID NO: 132987 - protein, 19 aa, Homo sapiens
  CDR3 for alpha chain variable domain of TCR clone 66494 (TRAV1-2, TRAJ18)
CLLPLCCERRGSTLGRLYF

SEQ ID NO: 132988 - protein, 19 aa, Homo sapiens
  CDR3 for beta chain variable domain of TCR clone 66494 (TRBV6-3, TRBJ1-2)
CASSYSKGRTGPPNYGYTF

SEQ ID NO: 132989 - protein, 16 aa, Homo sapiens
  CDR3 for alpha chain variable domain of TCR clone 66495 (TRAV21, TRAJ52)
CAVTNAGGTSYGKLTF

SEQ ID NO: 132990 - protein, 13 aa, Homo sapiens
  CDR3 for beta chain variable domain of TCR clone 66495 (TRBV20-1, TRBJ2-3)
CSAGLAGTDTQYF

SEQ ID NO: 132991 - protein, 12 aa, Homo sapiens
  CDR3 for alpha chain variable domain of TCR clone 66496 (TRAV27, TRAJ35)
CAGADFGNVLHC

SEQ ID NO: 132992 - protein, 15 aa, Homo sapiens
  CDR3 for beta chain variable domain of TCR clone 66496 (TRBV12-4, TRBJ2-5)
CASSPPTGLQETQYF

SEQ ID NO: 132993 - protein, 11 aa, Homo sapiens
  CDR3 for alpha chain variable domain of TCR clone 66497 (TRAV1-2, TRAJ40)
CAAPGTYKYLF

SEQ ID NO: 132994 - protein, 16 aa, Homo sapiens
  CDR3 for beta chain variable domain of TCR clone 66497 (TRBV29-1, TRBJ2-7)
CSVEVVGTSGSYEQYF

SEQ ID NO: 132995 - protein, 18 aa, Homo sapiens
  CDR3 for alpha chain variable domain of TCR clone 66498 (TRAV21, TRAJ52)
CAVRPSPAGGTSYGKLTF

SEQ ID NO: 132996 - protein, 13 aa, Homo sapiens
  CDR3 for beta chain variable domain of TCR clone 66498 (TRBV10-2, TRBJ2-3)
CASSESGDHTQYF

SEQ ID NO: 132997 - protein, 15 aa, Homo sapiens
  CDR3 for alpha chain variable domain of TCR clone 66499 (TRAV12-2, TRAJ8)
CAVREGNTGFQKLVF

SEQ ID NO: 132998 - protein, 15 aa, Homo sapiens
  CDR3 for beta chain variable domain of TCR clone 66499 (TRBV28, TRBJ2-4)
CAAGSGTLLMGIQYF

SEQ ID NO: 132999 - protein, 11 aa, Homo sapiens
  CDR3 for alpha chain variable domain of TCR clone 66500 (TRAV35, TRAJ30)
CAGPGDDKIIF

SEQ ID NO: 133000 - protein, 18 aa, Homo sapiens
  CDR3 for beta chain variable domain of TCR clone 66500 (TRBV28, TRBJ1-2)
CASRQQQGKRGSNYGYTF

SEQ ID NO: 133001 - protein, 12 aa, Homo sapiens
  CDR3 for alpha chain variable domain of TCR clone 66501 (TRAV3, TRAJ43)
CAVSDPNNDMRF

SEQ ID NO: 133002 - protein, 15 aa, Homo sapiens
  CDR3 for beta chain variable domain of TCR clone 66501 (TRBV27, TRBJ1-5)
CASSLGTGFDQPQHF

SEQ ID NO: 133003 - protein, 13 aa, Homo sapiens
  CDR3 for alpha chain variable domain of TCR clone 66502 (TRAV12-2, TRAJ37)
CAGGSGNTGKLIF

SEQ ID NO: 133004 - protein, 16 aa, Homo sapiens
  CDR3 for beta chain variable domain of TCR clone 66502 (TRBV7-8, TRBJ2-3)
CASSTEGQRETDTQYF

SEQ ID NO: 133005 - protein, 15 aa, Homo sapiens
  CDR3 for alpha chain variable domain of TCR clone 66503 (TRAV38-2/DV8, TRAJ48)
CAYRSGGFGNEKLTF

SEQ ID NO: 133006 - protein, 16 aa, Homo sapiens
  CDR3 for beta chain variable domain of TCR clone 66503 (TRBV28, TRBJ2-7)
CASSPWVATGDLPQYF

SEQ ID NO: 133007 - protein, 13 aa, Homo sapiens
  CDR3 for alpha chain variable domain of TCR clone 66504 (TRAV13-1, TRAJ43)
CAASKNNNNDIRF

SEQ ID NO: 133008 - protein, 13 aa, Homo sapiens
  CDR3 for beta chain variable domain of TCR clone 66504 (TRBV4-2, TRBJ1-1)
CASSQAGNTEAFF

SEQ ID NO: 133009 - protein, 15 aa, Homo sapiens
  CDR3 for alpha chain variable domain of TCR clone 66505 (TRAV8-3, TRAJ11)
CAVGLLNSGYSTLTF

SEQ ID NO: 133010 - protein, 13 aa, Homo sapiens
  CDR3 for beta chain variable domain of TCR clone 66505 (TRBV20-1, TRBJ1-1)
CSAPLGGGTEAFF

SEQ ID NO: 133011 - protein, 11 aa, Homo sapiens
  CDR3 for alpha chain variable domain of TCR clone 66506 (TRAV12-3, TRAJ43)
CAMSVSNDMRF

SEQ ID NO: 133012 - protein, 13 aa, Homo sapiens
  CDR3 for beta chain variable domain of TCR clone 66506 (TRBV20-1, TRBJ1-1)
CSAPLWGGTEAFF

SEQ ID NO: 133013 - protein, 13 aa, Homo sapiens
  CDR3 for alpha chain variable domain of TCR clone 66507 (TRAV27, TRAJ49)
CAPRPYTGNQSYF

SEQ ID NO: 133014 - protein, 18 aa, Homo sapiens
  CDR3 for beta chain variable domain of TCR clone 66507 (TRBV7-3, TRBJ2-5)
CASSLGGAAQGRWETQYF

SEQ ID NO: 133015 - protein, 14 aa, Homo sapiens
  CDR3 for alpha chain variable domain of TCR clone 66508 (TRAV1-2, TRAJ6)
CTVSLSGGSYIPTF

SEQ ID NO: 133016 - protein, 14 aa, Homo sapiens
  CDR3 for beta chain variable domain of TCR clone 66508 (TRBV13, TRBJ2-7)
RASSLSRISYEQYF

SEQ ID NO: 133017 - protein, 11 aa, Homo sapiens
  CDR3 for alpha chain variable domain of TCR clone 66509 (TRAV2, TRAJ13)
CASGGYQKVTF

SEQ ID NO: 133018 - protein, 14 aa, Homo sapiens
  CDR3 for beta chain variable domain of TCR clone 66509 (TRBV6-1, TRBJ1-3)
CASVQGGGGNTMYF

SEQ ID NO: 133019 - protein, 11 aa, Homo sapiens
  CDR3 for alpha chain variable domain of TCR clone 66510 (TRAV1-2, TRAJ31)
CAVNNNARLMF

SEQ ID NO: 133020 - protein, 17 aa, Homo sapiens
  CDR3 for beta chain variable domain of TCR clone 66510 (TRBV11-2, TRBJ2-1)
CASSLYPPGVEYNEQFF

SEQ ID NO: 133021 - protein, 13 aa, Homo sapiens
  CDR3 for alpha chain variable domain of TCR clone 66511 (TRAV20, TRAJ48)
CAVQGVGNEKLTF

SEQ ID NO: 133022 - protein, 19 aa, Homo sapiens
  CDR3 for beta chain variable domain of TCR clone 66511 (TRBV2, TRBJ2-2)
CASSQPGLAGGGKTGELFF

SEQ ID NO: 133023 - protein, 15 aa, Homo sapiens
  CDR3 for alpha chain variable domain of TCR clone 66512 (TRAV34, TRAJ38)
CGADFTPGNNRKLIW

SEQ ID NO: 133024 - protein, 14 aa, Homo sapiens
  CDR3 for beta chain variable domain of TCR clone 66512 (TRBV7-3, TRBJ2-1)
CASSLAGGTNEQFF

SEQ ID NO: 133025 - protein, 16 aa, Homo sapiens
  CDR3 for alpha chain variable domain of TCR clone 66513 (TRAV16, TRAJ52)
CALSGVGGTSNGKLTF

SEQ ID NO: 133026 - protein, 14 aa, Homo sapiens
  CDR3 for beta chain variable domain of TCR clone 66513 (TRBV19, TRBJ1-2)
CASSLQGQAYGYTF

SEQ ID NO: 133027 - protein, 11 aa, Homo sapiens
  CDR3 for alpha chain variable domain of TCR clone 66514 (TRAV3, TRAJ17)
CAEAAGNKLTF

SEQ ID NO: 133028 - protein, 15 aa, Homo sapiens
  CDR3 for beta chain variable domain of TCR clone 66514 (TRBV12-4, TRBJ2-7)
CASSLGSGGPYEQYV

SEQ ID NO: 133029 - protein, 13 aa, Homo sapiens
  CDR3 for alpha chain variable domain of TCR clone 66515 (TRAV26-1, )
CIVSHRVEGFWNQ

SEQ ID NO: 133030 - protein, 14 aa, Homo sapiens
  CDR3 for beta chain variable domain of TCR clone 66515 (TRBV20-1, TRBJ2-7)
CSTWTALSSYEQYF

SEQ ID NO: 133031 - protein, 14 aa, Homo sapiens
  CDR3 for alpha chain variable domain of TCR clone 66516 (TRAV12-3, TRAJ10)
SHLPLTGGGNKLTF

SEQ ID NO: 133032 - protein, 12 aa, Homo sapiens
  CDR3 for beta chain variable domain of TCR clone 66516 (TRBV5-7, TRBJ1-2)
CASSLVQNGYTF

SEQ ID NO: 133033 - protein, 12 aa, Homo sapiens
  CDR3 for alpha chain variable domain of TCR clone 66517 (TRAV12-3, TRAJ17)
CAMTLTGNKLTF

SEQ ID NO: 133034 - protein, 15 aa, Homo sapiens
  CDR3 for beta chain variable domain of TCR clone 66517 (TRBV5-7, TRBJ1-2)
CASSLGVAANYGYTF

SEQ ID NO: 133035 - protein, 15 aa, Homo sapiens
  CDR3 for alpha chain variable domain of TCR clone 66518 (TRAV12-1, TRAJ4)
CVVNPFSGGYNKLIF

SEQ ID NO: 133036 - protein, 13 aa, Homo sapiens
  CDR3 for beta chain variable domain of TCR clone 66518 (TRBV20-1, TRBJ1-2)
CSARGTADYGCTF

SEQ ID NO: 133037 - protein, 16 aa, Homo sapiens
  CDR3 for alpha chain variable domain of TCR clone 66519 (TRAV23/DV6, TRAJ9)
CAASIGGNTGGFKTIF

SEQ ID NO: 133038 - protein, 14 aa, Homo sapiens
  CDR3 for beta chain variable domain of TCR clone 66519 (TRBV9, TRBJ2-7)
CASSVGVGFYEQYF

SEQ ID NO: 133039 - protein, 13 aa, Homo sapiens
  CDR3 for alpha chain variable domain of TCR clone 66520 (TRAV2, TRAJ29)
CAAGNSGNTPLVC

SEQ ID NO: 133040 - protein, 16 aa, Homo sapiens
  CDR3 for beta chain variable domain of TCR clone 66520 (TRBV7-9, TRBJ1-2)
CASSPGGGAINYGYTF

SEQ ID NO: 133041 - protein, 13 aa, Homo sapiens
  CDR3 for alpha chain variable domain of TCR clone 66521 (TRAV13-1, TRAJ21)
CAASIYNFNKFYF

SEQ ID NO: 133042 - protein, 14 aa, Homo sapiens
  CDR3 for beta chain variable domain of TCR clone 66521 (TRBV5-5, TRBJ1-5)
CQQLEGGGEQPQHF

SEQ ID NO: 133043 - protein, 14 aa, Homo sapiens
  CDR3 for alpha chain variable domain of TCR clone 66522 (TRAV12-2, TRAJ13)
CAVKKTGGYKKVTF

SEQ ID NO: 133044 - protein, 14 aa, Homo sapiens
  CDR3 for beta chain variable domain of TCR clone 66522 (TRBV19, TRBJ2-1)
CASPTFVLSGEQFF

SEQ ID NO: 133045 - protein, 18 aa, Homo sapiens
  CDR3 for alpha chain variable domain of TCR clone 66523 (TRAV13-1, TRAJ52)
CAASKRSAGGTSYGKLTF

SEQ ID NO: 133046 - protein, 16 aa, Homo sapiens
  CDR3 for beta chain variable domain of TCR clone 66523 (TRBV6-1, TRBJ2-5)
CASSETLDRGAETQYF

SEQ ID NO: 133047 - protein, 16 aa, Homo sapiens
  CDR3 for alpha chain variable domain of TCR clone 66524 (TRAV12-2, TRAJ52)
CRLANAGGTSYVKLTF

SEQ ID NO: 133048 - protein, 13 aa, Homo sapiens
  CDR3 for beta chain variable domain of TCR clone 66524 (TRBV10-3, TRBJ2-7)
CASKLAVNYEQYF

SEQ ID NO: 133049 - protein, 13 aa, Homo sapiens
  CDR3 for alpha chain variable domain of TCR clone 66525 (TRAV35, TRAJ36)
CAGPRIGANNLFF

SEQ ID NO: 133050 - protein, 15 aa, Homo sapiens
  CDR3 for beta chain variable domain of TCR clone 66525 (TRBV28, TRBJ2-5)
CASSPPWSDQETQYF

SEQ ID NO: 133051 - protein, 14 aa, Homo sapiens
  CDR3 for alpha chain variable domain of TCR clone 66526 (TRAV17, TRAJ57)
CATDPQGGSEKLVF

SEQ ID NO: 133052 - protein, 16 aa, Homo sapiens
  CDR3 for beta chain variable domain of TCR clone 66526 (TRBV20-1, TRBJ1-4)
CSAPGQSLLTNEKLFF

SEQ ID NO: 133053 - protein, 14 aa, Homo sapiens
  CDR3 for alpha chain variable domain of TCR clone 66527 (TRAV13-1, TRAJ40)
CAASMTSGIYKYIF

SEQ ID NO: 133054 - protein, 15 aa, Homo sapiens
  CDR3 for beta chain variable domain of TCR clone 66527 (TRBV7-3, TRBJ2-1)
CASSPTGGGEVEQFF

SEQ ID NO: 133055 - protein, 10 aa, Homo sapiens
  CDR3 for alpha chain variable domain of TCR clone 66528 (TRAV12-3, TRAJ49)
CAMNDDQFYF

SEQ ID NO: 133056 - protein, 14 aa, Homo sapiens
  CDR3 for beta chain variable domain of TCR clone 66528 (TRBV18, TRBJ2-5)
CASSPGVSQETQYF

SEQ ID NO: 133057 - protein, 12 aa, Homo sapiens
  CDR3 for alpha chain variable domain of TCR clone 66529 (TRAV17, TRAJ20)
CATDSNDYKLSF

SEQ ID NO: 133058 - protein, 14 aa, Homo sapiens
  CDR3 for beta chain variable domain of TCR clone 66529 (TRBV4-2, TRBJ2-1)
CASGLDRAYNEQFF

SEQ ID NO: 133059 - protein, 12 aa, Homo sapiens
  CDR3 for alpha chain variable domain of TCR clone 66530 (TRAV12-3, TRAJ17)
CAMTLTGNKLTF

SEQ ID NO: 133060 - protein, 14 aa, Homo sapiens
  CDR3 for beta chain variable domain of TCR clone 66530 (TRBV20-1, TRBJ2-3)
CSALGLEGADTQYF

SEQ ID NO: 133061 - protein, 13 aa, Homo sapiens
  CDR3 for alpha chain variable domain of TCR clone 66531 (TRAV21, TRAJ20)
CDVGLRVDYKLSF

SEQ ID NO: 133062 - protein, 13 aa, Homo sapiens
  CDR3 for beta chain variable domain of TCR clone 66531 (TRBV6-1, TRBJ1-1)
CASSRQGNTEAFF

SEQ ID NO: 133063 - protein, 16 aa, Homo sapiens
  CDR3 for alpha chain variable domain of TCR clone 66532 (TRAV17, TRAJ53)
CATDALSGGSNYKLTF

SEQ ID NO: 133064 - protein, 17 aa, Homo sapiens
  CDR3 for beta chain variable domain of TCR clone 66532 (TRBV25-1, TRBJ2-1)
CASSAYGQGRGVYEQFF

SEQ ID NO: 133065 - protein, 17 aa, Homo sapiens
  CDR3 for alpha chain variable domain of TCR clone 66533 (TRAV12-2, TRAJ52)
CAVNKGAGGTSYGKLTF

SEQ ID NO: 133066 - protein, 13 aa, Homo sapiens
  CDR3 for beta chain variable domain of TCR clone 66533 (TRBV24-1, TRBJ2-2)
CATSDWSTGELFF

SEQ ID NO: 133067 - protein, 16 aa, Homo sapiens
  CDR3 for alpha chain variable domain of TCR clone 66534 (TRAV16, TRAJ4)
CALSRIFSGGYNKLIF

SEQ ID NO: 133068 - protein, 16 aa, Homo sapiens
  CDR3 for beta chain variable domain of TCR clone 66534 (TRBV12-4, TRBJ1-5)
CASSRPVGGSNQPQHF

SEQ ID NO: 133069 - protein, 11 aa, Homo sapiens
  CDR3 for alpha chain variable domain of TCR clone 66535 (TRAV1-1, TRAJ23)
CAVRQGGKLIF

SEQ ID NO: 133070 - protein, 14 aa, Homo sapiens
  CDR3 for beta chain variable domain of TCR clone 66535 (TRBV7-2, TRBJ2-2)
CASRGQGAAGELFF

SEQ ID NO: 133071 - protein, 11 aa, Homo sapiens
  CDR3 for alpha chain variable domain of TCR clone 66536 (TRAV21, TRAJ4)
HVSGGYNKLIF

SEQ ID NO: 133072 - protein, 16 aa, Homo sapiens
  CDR3 for beta chain variable domain of TCR clone 66536 (TRBV2, TRBJ1-3)
CASSRTGGSTGNTIYF

SEQ ID NO: 133073 - protein, 16 aa, Homo sapiens
  CDR3 for alpha chain variable domain of TCR clone 66537 (TRAV12-3, TRAJ45)
CAMGWGSGGGADGLTS

SEQ ID NO: 133074 - protein, 15 aa, Homo sapiens
  CDR3 for beta chain variable domain of TCR clone 66537 (TRBV3-1, TRBJ1-2)
CASSHPGTPGYGYTF

SEQ ID NO: 133075 - protein, 12 aa, Homo sapiens
  CDR3 for alpha chain variable domain of TCR clone 66538 (TRAV4, TRAJ26)
CLVGDYGQNFVF

SEQ ID NO: 133076 - protein, 16 aa, Homo sapiens
  CDR3 for beta chain variable domain of TCR clone 66538 (TRBV7-9, TRBJ1-2)
CASSLGFSSGEDGYTF

SEQ ID NO: 133077 - protein, 10 aa, Homo sapiens
  CDR3 for alpha chain variable domain of TCR clone 66539 (TRAV16, TRAJ22)
SAMYLRQLTF

SEQ ID NO: 133078 - protein, 17 aa, Homo sapiens
  CDR3 for beta chain variable domain of TCR clone 66539 (TRBV7-9, TRBJ1-6)
CASSSPDVEIHPSTLGT

SEQ ID NO: 133079 - protein, 12 aa, Homo sapiens
  CDR3 for alpha chain variable domain of TCR clone 66540 (TRAV21, TRAJ31)
WAVWGNNARLMF

SEQ ID NO: 133080 - protein, 16 aa, Homo sapiens
  CDR3 for beta chain variable domain of TCR clone 66540 (TRBV27, TRBJ2-5)
CASSYGPGGQKETQYF

SEQ ID NO: 133081 - protein, 11 aa, Homo sapiens
  CDR3 for alpha chain variable domain of TCR clone 66541 (TRAV3, TRAJ21)
CAVGNFNRFYF

SEQ ID NO: 133082 - protein, 16 aa, Homo sapiens
  CDR3 for beta chain variable domain of TCR clone 66541 (TRBV19, TRBJ2-1)
CASSKAEPSSYNEQFF

SEQ ID NO: 133083 - protein, 14 aa, Homo sapiens
  CDR3 for alpha chain variable domain of TCR clone 66542 (TRAV14/DV4, TRAJ15)
CAMRRDQAGTALIF

SEQ ID NO: 133084 - protein, 14 aa, Homo sapiens
  CDR3 for beta chain variable domain of TCR clone 66542 (TRBV12-4, TRBJ1-1)
CASRPGQGRTEAFF

SEQ ID NO: 133085 - protein, 13 aa, Homo sapiens
  CDR3 for alpha chain variable domain of TCR clone 66543 (TRAV21, TRAJ20)
CAVGLRVDYKLSF

SEQ ID NO: 133086 - protein, 15 aa, Homo sapiens
  CDR3 for beta chain variable domain of TCR clone 66543 (TRBV5-1, TRBJ2-3)
CASSVTSGSTDTQYF

SEQ ID NO: 133087 - protein, 16 aa, Homo sapiens
  CDR3 for alpha chain variable domain of TCR clone 66544 (TRAV8-3, TRAJ8)
CAVPRDGNTCFQKLVF

SEQ ID NO: 133088 - protein, 14 aa, Homo sapiens
  CDR3 for beta chain variable domain of TCR clone 66544 (TRBV4-1, TRBJ2-2)
CAISQAVNTGELFF

SEQ ID NO: 133089 - protein, 14 aa, Homo sapiens
  CDR3 for alpha chain variable domain of TCR clone 66545 (TRAV26-1, TRAJ48)
CIVRVGFGNEKLTF

SEQ ID NO: 133090 - protein, 13 aa, Homo sapiens
  CDR3 for beta chain variable domain of TCR clone 66545 (TRBV11-3, TRBJ2-3)
CASSHDTKDTRYF

SEQ ID NO: 133091 - protein, 16 aa, Homo sapiens
  CDR3 for alpha chain variable domain of TCR clone 66546 (TRAV3, TRAJ10)
CAVRYMRAGGGNKLTF

SEQ ID NO: 133092 - protein, 19 aa, Homo sapiens
  CDR3 for beta chain variable domain of TCR clone 66546 (TRBV6-3, TRBJ1-2)
CASSYSKGRTGPPNYGYTF

SEQ ID NO: 133093 - protein, 13 aa, Homo sapiens
  CDR3 for alpha chain variable domain of TCR clone 66547 (TRAV3, TRAJ27)
CAVRPLGAGKSTY

SEQ ID NO: 133094 - protein, 13 aa, Homo sapiens
  CDR3 for beta chain variable domain of TCR clone 66547 (TRBV7-9, TRBJ2-3)
CASSPGSTDTQYF

SEQ ID NO: 133095 - protein, 14 aa, Homo sapiens
  CDR3 for alpha chain variable domain of TCR clone 66548 (TRAV1-2, TRAJ16)
CAVNRFSDGQKLLF

SEQ ID NO: 133096 - protein, 15 aa, Homo sapiens
  CDR3 for beta chain variable domain of TCR clone 66548 (TRBV9, TRBJ2-1)
CASSLAGSAYNEQFF

SEQ ID NO: 133097 - protein, 14 aa, Homo sapiens
  CDR3 for alpha chain variable domain of TCR clone 66549 (TRAV1-2, TRAJ8)
CAVREDTGFQKLVF

SEQ ID NO: 133098 - protein, 12 aa, Homo sapiens
  CDR3 for beta chain variable domain of TCR clone 66549 (TRBV19, TRBJ2-1)
CASSQISNEQFF

SEQ ID NO: 133099 - protein, 15 aa, Homo sapiens
  CDR3 for alpha chain variable domain of TCR clone 66550 (TRAV20, TRAJ4)
CAVEGFSGGYNKLIF

SEQ ID NO: 133100 - protein, 14 aa, Homo sapiens
  CDR3 for beta chain variable domain of TCR clone 66550 (TRBV7-8, TRBJ2-7)
CASTLGGALGEQYF

SEQ ID NO: 133101 - protein, 14 aa, Homo sapiens
  CDR3 for alpha chain variable domain of TCR clone 66551 (TRAV8-3, TRAJ4)
CAVGASGGYNNLIF

SEQ ID NO: 133102 - protein, 16 aa, Homo sapiens
  CDR3 for beta chain variable domain of TCR clone 66551 (TRBV4-3, TRBJ2-2)
CASSHLQGSGTGELFF

SEQ ID NO: 133103 - protein, 11 aa, Homo sapiens
  CDR3 for alpha chain variable domain of TCR clone 66552 (TRAV17, TRAJ36)
CAPTGANNLFF

SEQ ID NO: 133104 - protein, 13 aa, Homo sapiens
  CDR3 for beta chain variable domain of TCR clone 66552 (TRBV20-1, TRBJ1-1)
CSAPPGGHTEAFS

SEQ ID NO: 133105 - protein, 17 aa, Homo sapiens
  CDR3 for alpha chain variable domain of TCR clone 66553 (TRAV3, TRAJ6)
CAVRDGPRAGGSYIPTF

SEQ ID NO: 133106 - protein, 14 aa, Homo sapiens
  CDR3 for beta chain variable domain of TCR clone 66553 (TRBV19, TRBJ2-2)
CASSTLHRSGELFF

SEQ ID NO: 133107 - protein, 13 aa, Homo sapiens
  CDR3 for alpha chain variable domain of TCR clone 66554 (TRAV8-3, TRAJ28)
CAVGAVGSYQLTF

SEQ ID NO: 133108 - protein, 14 aa, Homo sapiens
  CDR3 for beta chain variable domain of TCR clone 66554 (TRBV7-2, TRBJ2-7)
CASRLQGAAYEQYF

SEQ ID NO: 133109 - protein, 15 aa, Homo sapiens
  CDR3 for alpha chain variable domain of TCR clone 66555 (TRAV20, TRAJ53)
CAVQASGGSNYKLTF

SEQ ID NO: 133110 - protein, 12 aa, Homo sapiens
  CDR3 for beta chain variable domain of TCR clone 66555 (TRBV14, TRBJ1-1)
CASSQLKGLAFF

SEQ ID NO: 133111 - protein, 15 aa, Homo sapiens
  CDR3 for alpha chain variable domain of TCR clone 66556 (TRAV26-1, TRAJ40)
CIVRAVSSGTYKYIF

SEQ ID NO: 133112 - protein, 14 aa, Homo sapiens
  CDR3 for beta chain variable domain of TCR clone 66556 (TRBV19, TRBJ2-1)
CASKDPGLANEQFF

SEQ ID NO: 133113 - protein, 14 aa, Homo sapiens
  CDR3 for alpha chain variable domain of TCR clone 66557 (TRAV12-2, TRAJ13)
CAVKKTGGYQKVTF

SEQ ID NO: 133114 - protein, 16 aa, Homo sapiens
  CDR3 for beta chain variable domain of TCR clone 66557 (TRBV5-1, TRBJ2-1)
CASSIRSGGSYNEQFF

SEQ ID NO: 133115 - protein, 13 aa, Homo sapiens
  CDR3 for alpha chain variable domain of TCR clone 66558 (TRAV39, TRAJ58)
CAGEETSGSRLTF

SEQ ID NO: 133116 - protein, 15 aa, Homo sapiens
  CDR3 for beta chain variable domain of TCR clone 66558 (TRBV7-3, TRBJ2-1)
CASSPTGGGEVEQFF

SEQ ID NO: 133117 - protein, 14 aa, Homo sapiens
  CDR3 for alpha chain variable domain of TCR clone 66559 (TRAV12-1, TRAJ23)
CVVIVYNQGGKLIF

SEQ ID NO: 133118 - protein, 13 aa, Homo sapiens
  CDR3 for beta chain variable domain of TCR clone 66559 (TRBV11-2, TRBJ2-5)
CASSVSSQETQYF

SEQ ID NO: 133119 - protein, 12 aa, Homo sapiens
  CDR3 for alpha chain variable domain of TCR clone 66560 (TRAV12-3, TRAJ17)
CAMTLTGNKLTF

SEQ ID NO: 133120 - protein, 15 aa, Homo sapiens
  CDR3 for beta chain variable domain of TCR clone 66560 (TRBV27, TRBJ1-6)
CASSFDRGLGSPLHF

SEQ ID NO: 133121 - protein, 12 aa, Homo sapiens
  CDR3 for alpha chain variable domain of TCR clone 66561 (TRAV8-3, TRAJ20)
CAVGANDYKLSF

SEQ ID NO: 133122 - protein, 14 aa, Homo sapiens
  CDR3 for beta chain variable domain of TCR clone 66561 (TRBV7-6, TRBJ2-3)
CASSLGTVTDTQYF

SEQ ID NO: 133123 - protein, 14 aa, Homo sapiens
  CDR3 for alpha chain variable domain of TCR clone 66562 (TRAV2, TRAJ13)
CAVFNSGGYQKVTF

SEQ ID NO: 133124 - protein, 13 aa, Homo sapiens
  CDR3 for beta chain variable domain of TCR clone 66562 (TRBV12-4, TRBJ2-7)
CASSFVPTAEQYF

SEQ ID NO: 133125 - protein, 16 aa, Homo sapiens
  CDR3 for alpha chain variable domain of TCR clone 66563 (TRAV3, TRAJ5)
CAVRNLMDTGRRALTF

SEQ ID NO: 133126 - protein, 16 aa, Homo sapiens
  CDR3 for beta chain variable domain of TCR clone 66563 (TRBV4-2, TRBJ2-7)
CASSHEGLANSYEQYF

SEQ ID NO: 133127 - protein, 16 aa, Homo sapiens
  CDR3 for alpha chain variable domain of TCR clone 66564 (TRAV8-6, TRAJ13)
CAVSDKGIWGLPESYL

SEQ ID NO: 133128 - protein, 14 aa, Homo sapiens
  CDR3 for beta chain variable domain of TCR clone 66564 (TRBV12-4, TRBJ2-1)
CASSLGQGASEQFF

SEQ ID NO: 133129 - protein, 14 aa, Homo sapiens
  CDR3 for alpha chain variable domain of TCR clone 66565 (TRAV26-1, TRAJ44)
CIVSSTGTASKLTF

SEQ ID NO: 133130 - protein, 11 aa, Homo sapiens
  CDR3 for beta chain variable domain of TCR clone 66565 (TRBV19, TRBJ2-7)
CASSILGEQYF

SEQ ID NO: 133131 - protein, 18 aa, Homo sapiens
  CDR3 for alpha chain variable domain of TCR clone 66566 (TRAV9-2, TRAJ52)
CALSRHNAGGTSYGKLTF

SEQ ID NO: 133132 - protein, 13 aa, Homo sapiens
  CDR3 for beta chain variable domain of TCR clone 66566 (TRBV7-9, TRBJ1-2)
CASSLKKNYGYTF

SEQ ID NO: 133133 - protein, 14 aa, Homo sapiens
  CDR3 for alpha chain variable domain of TCR clone 66567 (TRAV26-1, TRAJ44)
CIVRPTGTASKLTF

SEQ ID NO: 133134 - protein, 17 aa, Homo sapiens
  CDR3 for beta chain variable domain of TCR clone 66567 (TRBV11-2, TRBJ2-3)
CQQLRGASRGAPNTKYF

SEQ ID NO: 133135 - protein, 16 aa, Homo sapiens
  CDR3 for alpha chain variable domain of TCR clone 66568 (TRAV38-2/DV8, TRAJ47)
CAYRSAIMECGNKLVF

SEQ ID NO: 133136 - protein, 14 aa, Homo sapiens
  CDR3 for beta chain variable domain of TCR clone 66568 (TRBV19, TRBJ2-7)
CASSIFAGTYEQYF

SEQ ID NO: 133137 - protein, 13 aa, Homo sapiens
  CDR3 for alpha chain variable domain of TCR clone 66569 (TRAV8-1, TRAJ28)
CAVSGAGSYRLAF

SEQ ID NO: 133138 - protein, 14 aa, Homo sapiens
  CDR3 for beta chain variable domain of TCR clone 66569 (TRBV7-2, TRBJ2-2)
CASRGQGAAGELFF

SEQ ID NO: 133139 - protein, 14 aa, Homo sapiens
  CDR3 for alpha chain variable domain of TCR clone 66570 (TRAV13-1, TRAJ35)
CAASKVGFGNVLHC

SEQ ID NO: 133140 - protein, 13 aa, Homo sapiens
  CDR3 for beta chain variable domain of TCR clone 66570 (TRBV7-3, TRBJ1-1)
CASSQDWGAEAFF

SEQ ID NO: 133141 - protein, 15 aa, Homo sapiens
  CDR3 for alpha chain variable domain of TCR clone 66571 (TRAV12-3, TRAJ13)
CAMSARSGGYQKVTF

SEQ ID NO: 133142 - protein, 18 aa, Homo sapiens
  CDR3 for beta chain variable domain of TCR clone 66571 (TRBV3-1, TRBJ2-7)
CASSHEGGGRSWHYEQYF

SEQ ID NO: 133143 - protein, 16 aa, Homo sapiens
  CDR3 for alpha chain variable domain of TCR clone 66572 (TRAV17, TRAJ22)
CATGPISSGSARQLTF

SEQ ID NO: 133144 - protein, 15 aa, Homo sapiens
  CDR3 for beta chain variable domain of TCR clone 66572 (TRBV6-1, TRBJ2-5)
CASSEGWGIQETQYF

SEQ ID NO: 133145 - protein, 13 aa, Homo sapiens
  CDR3 for alpha chain variable domain of TCR clone 66573 (TRAV13-2, TRAJ48)
CAEMDFGNEKSTF

SEQ ID NO: 133146 - protein, 12 aa, Homo sapiens
  CDR3 for beta chain variable domain of TCR clone 66573 (TRBV11-2, TRBJ2-2)
CASSLGGGELFF

SEQ ID NO: 133147 - protein, 13 aa, Homo sapiens
  CDR3 for alpha chain variable domain of TCR clone 66574 (TRAV12-3, TRAJ9)
CAMRNTGGFKTIF

SEQ ID NO: 133148 - protein, 12 aa, Homo sapiens
  CDR3 for beta chain variable domain of TCR clone 66574 (TRBV14, TRBJ2-4)
CASSNLKSIQYF

SEQ ID NO: 133149 - protein, 15 aa, Homo sapiens
  CDR3 for alpha chain variable domain of TCR clone 66575 (TRAV17, TRAJ16)
CATALRFSDGQKLLF

SEQ ID NO: 133150 - protein, 17 aa, Homo sapiens
  CDR3 for beta chain variable domain of TCR clone 66575 (TRBV4-1, TRBJ2-7)
CASSRDPLGVRGGEQYF

SEQ ID NO: 133151 - protein, 12 aa, Homo sapiens
  CDR3 for alpha chain variable domain of TCR clone 66576 (TRAV8-3, TRAJ26)
CAGDNYGQNFVF

SEQ ID NO: 133152 - protein, 14 aa, Homo sapiens
  CDR3 for beta chain variable domain of TCR clone 66576 (TRBV12-4, TRBJ1-1)
CASSLGTGGTEAFF

SEQ ID NO: 133153 - protein, 13 aa, Homo sapiens
  CDR3 for alpha chain variable domain of TCR clone 66577 (TRAV3, TRAJ9)
CAFWNTGGFKTIF

SEQ ID NO: 133154 - protein, 13 aa, Homo sapiens
  CDR3 for beta chain variable domain of TCR clone 66577 (TRBV20-1, TRBJ1-1)
CSARGGGNTEAFF

SEQ ID NO: 133155 - protein, 14 aa, Homo sapiens
  CDR3 for alpha chain variable domain of TCR clone 66578 (TRAV1-2, TRAJ16)
CAVNRFSDGQKLLF

SEQ ID NO: 133156 - protein, 15 aa, Homo sapiens
  CDR3 for beta chain variable domain of TCR clone 66578 (TRBV11-2, TRBJ2-1)
CASSLGPDSYNEQFF

SEQ ID NO: 133157 - protein, 12 aa, Homo sapiens
  CDR3 for alpha chain variable domain of TCR clone 66579 (TRAV21, TRAJ31)
CAVWGNNARLMF

SEQ ID NO: 133158 - protein, 15 aa, Homo sapiens
  CDR3 for beta chain variable domain of TCR clone 66579 (TRBV4-1, TRBJ2-3)
CASSRGQGIPDTQYF

SEQ ID NO: 133159 - protein, 14 aa, Homo sapiens
  CDR3 for alpha chain variable domain of TCR clone 66580 (TRAV26-1, TRAJ38)
CIADNAGNNRNLIW

SEQ ID NO: 133160 - protein, 17 aa, Homo sapiens
  CDR3 for beta chain variable domain of TCR clone 66580 (TRBV7-9, TRBJ2-3)
CASSPTVAGDLTDTQYF

SEQ ID NO: 133161 - protein, 15 aa, Homo sapiens
  CDR3 for alpha chain variable domain of TCR clone 66581 (TRAV2, TRAJ20)
CAVDFRGSNDYKLSF

SEQ ID NO: 133162 - protein, 12 aa, Homo sapiens
  CDR3 for beta chain variable domain of TCR clone 66581 (TRBV19, TRBJ2-3)
CASSIGGQAPYF

SEQ ID NO: 133163 - protein, 15 aa, Homo sapiens
  CDR3 for alpha chain variable domain of TCR clone 66582 (TRAV26-1, TRAJ29)
CIVRVEGSGNTPLVF

SEQ ID NO: 133164 - protein, 15 aa, Homo sapiens
  CDR3 for beta chain variable domain of TCR clone 66582 (TRBV19, TRBJ1-6)
CASSTQGAVGSPLHF

SEQ ID NO: 133165 - protein, 11 aa, Homo sapiens
  CDR3 for alpha chain variable domain of TCR clone 66583 (TRAV17, TRAJ9)
CGFTGGFKTIF

SEQ ID NO: 133166 - protein, 14 aa, Homo sapiens
  CDR3 for beta chain variable domain of TCR clone 66583 (TRBV7-9, TRBJ2-2)
CASSLVQETGELFF

SEQ ID NO: 133167 - protein, 15 aa, Homo sapiens
  CDR3 for alpha chain variable domain of TCR clone 66584 (TRAV26-1, TRAJ29)
CIVRVEGSGNTPLVF

SEQ ID NO: 133168 - protein, 15 aa, Homo sapiens
  CDR3 for beta chain variable domain of TCR clone 66584 (TRBV7-9, TRBJ1-5)
CASSQGHLPNQPQHF

SEQ ID NO: 133169 - protein, 14 aa, Homo sapiens
  CDR3 for alpha chain variable domain of TCR clone 66585 (TRAV17, TRAJ39)
CATDPVRAGNMLTF

SEQ ID NO: 133170 - protein, 12 aa, Homo sapiens
  CDR3 for beta chain variable domain of TCR clone 66585 (TRBV2, TRBJ2-4)
CASQGDSGIQYL

SEQ ID NO: 133171 - protein, 12 aa, Homo sapiens
  CDR3 for alpha chain variable domain of TCR clone 66586 (TRAV27, TRAJ42)
CAGGVSQGNLIF

SEQ ID NO: 133172 - protein, 13 aa, Homo sapiens
  CDR3 for beta chain variable domain of TCR clone 66586 (TRBV19, TRBJ2-7)
CASSIRSSYEQYF

SEQ ID NO: 133173 - protein, 15 aa, Homo sapiens
  CDR3 for alpha chain variable domain of TCR clone 66587 (TRAV12-3, TRAJ6)
CAMSATSGGSYIHTF

SEQ ID NO: 133174 - protein, 11 aa, Homo sapiens
  CDR3 for beta chain variable domain of TCR clone 66587 (TRBV20-1, TRBJ1-5)
CSAQGDQPQHF

SEQ ID NO: 133175 - protein, 12 aa, Homo sapiens
  CDR3 for alpha chain variable domain of TCR clone 66588 (TRAV13-1, TRAJ21)
CAAKEGFNKFYF

SEQ ID NO: 133176 - protein, 20 aa, Homo sapiens
  CDR3 for beta chain variable domain of TCR clone 66588 (TRBV7-2, TRBJ2-3)
CASSSPLVEVAGRSTDTQYF

SEQ ID NO: 133177 - protein, 17 aa, Homo sapiens
  CDR3 for alpha chain variable domain of TCR clone 66589 (TRAV12-1, TRAJ52)
CVVTPNAGGTSYGKLTF

SEQ ID NO: 133178 - protein, 16 aa, Homo sapiens
  CDR3 for beta chain variable domain of TCR clone 66589 (TRBV5-1, TRBJ1-1)
CASSSGGNSLNTEAFF

SEQ ID NO: 133179 - protein, 16 aa, Homo sapiens
  CDR3 for alpha chain variable domain of TCR clone 66590 (TRAV3, TRAJ10)
CAVRDMRAVGGNKLTF

SEQ ID NO: 133180 - protein, 14 aa, Homo sapiens
  CDR3 for beta chain variable domain of TCR clone 66590 (TRBV25-1, TRBJ1-1)
CASTHLGGNTEAFF

SEQ ID NO: 133181 - protein, 15 aa, Homo sapiens
  CDR3 for alpha chain variable domain of TCR clone 66591 (TRAV27, TRAJ38)
CAARRNAGNNRKLIW

SEQ ID NO: 133182 - protein, 13 aa, Homo sapiens
  CDR3 for beta chain variable domain of TCR clone 66591 (TRBV12-5, TRBJ2-3)
WASGDRQSDTQYF

SEQ ID NO: 133183 - protein, 16 aa, Homo sapiens
  CDR3 for alpha chain variable domain of TCR clone 66592 (TRAV14/DV4, TRAJ20)
CAMREGRSRDDYKLSF

SEQ ID NO: 133184 - protein, 13 aa, Homo sapiens
  CDR3 for beta chain variable domain of TCR clone 66592 (TRBV20-1, TRBJ2-5)
CSARYTGEETQYF

SEQ ID NO: 133185 - protein, 15 aa, Homo sapiens
  CDR3 for alpha chain variable domain of TCR clone 66593 (TRAV21, TRAJ37)
CAVRPTLSNTGKLIF

SEQ ID NO: 133186 - protein, 16 aa, Homo sapiens
  CDR3 for beta chain variable domain of TCR clone 66593 (TRBV24-1, TRBJ2-3)
CATSDRRKDLTDTQYF

SEQ ID NO: 133187 - protein, 16 aa, Homo sapiens
  CDR3 for alpha chain variable domain of TCR clone 66594 (TRAV30, TRAJ57)
CGTGWAPQGGAEKLVF

SEQ ID NO: 133188 - protein, 14 aa, Homo sapiens
  CDR3 for beta chain variable domain of TCR clone 66594 (TRBV18, TRBJ1-1)
CASSPGFQGVEAFF

SEQ ID NO: 133189 - protein, 14 aa, Homo sapiens
  CDR3 for alpha chain variable domain of TCR clone 66595 (TRAV13-1, TRAJ52)
CAANGGTSYGKLTF

SEQ ID NO: 133190 - protein, 12 aa, Homo sapiens
  CDR3 for beta chain variable domain of TCR clone 66595 (TRBV28, TRBJ2-3)
CASSLYRDTQYF

SEQ ID NO: 133191 - protein, 16 aa, Homo sapiens
  CDR3 for alpha chain variable domain of TCR clone 66596 (TRAV30, TRAJ24)
CGTEIVDADSWGKFQF

SEQ ID NO: 133192 - protein, 16 aa, Homo sapiens
  CDR3 for beta chain variable domain of TCR clone 66596 (TRBV7-9, TRBJ2-3)
CASSPWREVGTDTQYF

SEQ ID NO: 133193 - protein, 15 aa, Homo sapiens
  CDR3 for alpha chain variable domain of TCR clone 66597 (TRAV35, TRAJ22)
CAGTISSGSARQLTF

SEQ ID NO: 133194 - protein, 12 aa, Homo sapiens
  CDR3 for beta chain variable domain of TCR clone 66597 (TRBV11-2, TRBJ2-2)
CASSLGGGELFF

SEQ ID NO: 133195 - protein, 15 aa, Homo sapiens
  CDR3 for alpha chain variable domain of TCR clone 66598 (TRAV2, TRAJ15)
CAVEDRGQAGTTLIF

SEQ ID NO: 133196 - protein, 13 aa, Homo sapiens
  CDR3 for beta chain variable domain of TCR clone 66598 (TRBV10-2, TRBJ2-7)
CASGASGGYEQYF

SEQ ID NO: 133197 - protein, 13 aa, Homo sapiens
  CDR3 for alpha chain variable domain of TCR clone 66599 (TRAV8-2, TRAJ47)
CVVSEREGNKLVF

SEQ ID NO: 133198 - protein, 15 aa, Homo sapiens
  CDR3 for beta chain variable domain of TCR clone 66599 (TRBV6-3, TRBJ2-7)
CASSSHGTVFYEQYF

SEQ ID NO: 133199 - protein, 14 aa, Homo sapiens
  CDR3 for alpha chain variable domain of TCR clone 66600 (TRAV1-2, TRAJ16)
CAVNRFSYGQKLLF

SEQ ID NO: 133200 - protein, 14 aa, Homo sapiens
  CDR3 for beta chain variable domain of TCR clone 66600 (TRBV7-2, TRBJ2-7)
CASSPKTSFYEQYF

SEQ ID NO: 133201 - protein, 15 aa, Homo sapiens
  CDR3 for alpha chain variable domain of TCR clone 66601 (TRAV17, TRAJ13)
CATDAGSGGYQKVTF

SEQ ID NO: 133202 - protein, 17 aa, Homo sapiens
  CDR3 for beta chain variable domain of TCR clone 66601 (TRBV11-2, TRBJ2-1)
CTSSLYPPGVEYNEQFF

SEQ ID NO: 133203 - protein, 10 aa, Homo sapiens
  CDR3 for alpha chain variable domain of TCR clone 66602 (TRAV1-2, TRAJ20)
CALNDYKLSF

SEQ ID NO: 133204 - protein, 16 aa, Homo sapiens
  CDR3 for beta chain variable domain of TCR clone 66602 (TRBV20-1, TRBJ1-1)
CSARALTQGINTEAFF

SEQ ID NO: 133205 - protein, 15 aa, Homo sapiens
  CDR3 for alpha chain variable domain of TCR clone 66603 (TRAV8-3, TRAJ45)
CASSYSGGGADGLTF

SEQ ID NO: 133206 - protein, 17 aa, Homo sapiens
  CDR3 for beta chain variable domain of TCR clone 66603 (TRBV7-8, TRBJ1-2)
CASSLRPLQGHVYGYTF

SEQ ID NO: 133207 - protein, 15 aa, Homo sapiens
  CDR3 for alpha chain variable domain of TCR clone 66604 (TRAV21, TRAJ53)
CATLNSGGSNYKLAF

SEQ ID NO: 133208 - protein, 16 aa, Homo sapiens
  CDR3 for beta chain variable domain of TCR clone 66604 (TRBV20-1, TRBJ1-2)
CSASMGQGVANYGYTF

SEQ ID NO: 133209 - protein, 15 aa, Homo sapiens
  CDR3 for alpha chain variable domain of TCR clone 66605 (TRAV29/DV5, TRAJ42)
CAEKTDGGSQGNLIF

SEQ ID NO: 133210 - protein, 12 aa, Homo sapiens
  CDR3 for beta chain variable domain of TCR clone 66605 (TRBV11-2, TRBJ2-1)
CASSPGNNEQFF

SEQ ID NO: 133211 - protein, 13 aa, Homo sapiens
  CDR3 for alpha chain variable domain of TCR clone 66606 (TRAV26-2, TRAJ57)
CILSRGGSEKLVF

SEQ ID NO: 133212 - protein, 14 aa, Homo sapiens
  CDR3 for beta chain variable domain of TCR clone 66606 (TRBV4-1, TRBJ2-2)
CASSQAVNTGELFF

SEQ ID NO: 133213 - protein, 14 aa, Homo sapiens
  CDR3 for alpha chain variable domain of TCR clone 66607 (TRAV16, TRAJ49)
CALSGQSTGNQFYF

SEQ ID NO: 133214 - protein, 15 aa, Homo sapiens
  CDR3 for beta chain variable domain of TCR clone 66607 (TRBV11-1, TRBJ2-1)
CDSSLFRDTYNEQFF

SEQ ID NO: 133215 - protein, 12 aa, Homo sapiens
  CDR3 for alpha chain variable domain of TCR clone 66608 (TRAV12-3, TRAJ41)
CAMSYSGYALNF

SEQ ID NO: 133216 - protein, 16 aa, Homo sapiens
  CDR3 for beta chain variable domain of TCR clone 66608 (TRBV12-5, TRBJ2-5)
CASGPRTSGNQETQYF

SEQ ID NO: 133217 - protein, 16 aa, Homo sapiens
  CDR3 for alpha chain variable domain of TCR clone 66609 (TRAV3, TRAJ10)
CAVRDMRAGGGNKLTF

SEQ ID NO: 133218 - protein, 14 aa, Homo sapiens
  CDR3 for beta chain variable domain of TCR clone 66609 (TRBV2, TRBJ2-7)
CASSLTSGGYEQYF

SEQ ID NO: 133219 - protein, 14 aa, Homo sapiens
  CDR3 for alpha chain variable domain of TCR clone 66610 (TRAV17, TRAJ33)
CATDARRRNYQLIW

SEQ ID NO: 133220 - protein, 14 aa, Homo sapiens
  CDR3 for beta chain variable domain of TCR clone 66610 (TRBV25-1, TRBJ1-4)
CASSGGGQPEKLFF

SEQ ID NO: 133221 - protein, 13 aa, Homo sapiens
  CDR3 for alpha chain variable domain of TCR clone 66611 (TRAV12-1, TRAJ6)
CVVFPGGSCIPTF

SEQ ID NO: 133222 - protein, 14 aa, Homo sapiens
  CDR3 for beta chain variable domain of TCR clone 66611 (TRBV20-1, TRBJ1-3)
CSASPTGAGNTIYF

SEQ ID NO: 133223 - protein, 16 aa, Homo sapiens
  CDR3 for alpha chain variable domain of TCR clone 66612 (TRAV17, TRAJ22)
CATGPISSGSARQLTF

SEQ ID NO: 133224 - protein, 12 aa, Homo sapiens
  CDR3 for beta chain variable domain of TCR clone 66612 (TRBV11-2, TRBJ2-1)
CQQLGLAGGRFF

SEQ ID NO: 133225 - protein, 13 aa, Homo sapiens
  CDR3 for alpha chain variable domain of TCR clone 66613 (TRAV12-3, TRAJ56)
CAMSFGANSKLTF

SEQ ID NO: 133226 - protein, 13 aa, Homo sapiens
  CDR3 for beta chain variable domain of TCR clone 66613 (TRBV7-8, TRBJ2-7)
CASSFAGLYEQYF

SEQ ID NO: 133227 - protein, 12 aa, Homo sapiens
  CDR3 for alpha chain variable domain of TCR clone 66614 (TRAV36/DV7, TRAJ50)
CAVEPENLLRQG

SEQ ID NO: 133228 - protein, 13 aa, Homo sapiens
  CDR3 for beta chain variable domain of TCR clone 66614 (TRBV7-2, TRBJ2-7)
CASSSPSGGEQYF

SEQ ID NO: 133229 - protein, 17 aa, Homo sapiens
  CDR3 for alpha chain variable domain of TCR clone 66615 (TRAV3, TRAJ6)
CAVRDGPRAGGSYIPTF

SEQ ID NO: 133230 - protein, 14 aa, Homo sapiens
  CDR3 for beta chain variable domain of TCR clone 66615 (TRBV11-2, TRBJ2-3)
CASSRLALTDTQYF

SEQ ID NO: 133231 - protein, 16 aa, Homo sapiens
  CDR3 for alpha chain variable domain of TCR clone 66616 (TRAV3, TRAJ37)
CAVEVRGSGNTGKLIF

SEQ ID NO: 133232 - protein, 16 aa, Homo sapiens
  CDR3 for beta chain variable domain of TCR clone 66616 (TRBV11-2, TRBJ2-7)
CASSPTTGGVSYEQYF

SEQ ID NO: 133233 - protein, 15 aa, Homo sapiens
  CDR3 for alpha chain variable domain of TCR clone 66617 (TRAV3, TRAJ22)
CAVRGRGGSARQLTF

SEQ ID NO: 133234 - protein, 17 aa, Homo sapiens
  CDR3 for beta chain variable domain of TCR clone 66617 (TRBV13, TRBJ2-3)
CASSLSRVAGGRNTQYF

SEQ ID NO: 133235 - protein, 15 aa, Homo sapiens
  CDR3 for alpha chain variable domain of TCR clone 66618 (TRAV27, TRAJ38)
CAARRNAGNNRKLSW

SEQ ID NO: 133236 - protein, 13 aa, Homo sapiens
  CDR3 for beta chain variable domain of TCR clone 66618 (TRBV12-5, TRBJ2-3)
CASGDRQSDTQYF

SEQ ID NO: 133237 - protein, 16 aa, Homo sapiens
  CDR3 for alpha chain variable domain of TCR clone 66619 (TRAV1-2, TRAJ10)
CAVRGVLTGGGNKLTF

SEQ ID NO: 133238 - protein, 15 aa, Homo sapiens
  CDR3 for beta chain variable domain of TCR clone 66619 (TRBV7-9, TRBJ1-6)
CASSSPGRGDSPLHF

SEQ ID NO: 133239 - protein, 14 aa, Homo sapiens
  CDR3 for alpha chain variable domain of TCR clone 66620 (TRAV1-2, TRAJ16)
CAVNRFSDGQKLLF

SEQ ID NO: 133240 - protein, 13 aa, Homo sapiens
  CDR3 for beta chain variable domain of TCR clone 66620 (TRBV24-1, TRBJ2-2)
CATRVDNTGELFF

SEQ ID NO: 133241 - protein, 14 aa, Homo sapiens
  CDR3 for alpha chain variable domain of TCR clone 66621 (TRAV1-2, TRAJ16)
CAVNRFSDVQKLLF

SEQ ID NO: 133242 - protein, 13 aa, Homo sapiens
  CDR3 for beta chain variable domain of TCR clone 66621 (TRBV10-2, TRBJ2-7)
CASGASGGYEQYF

SEQ ID NO: 133243 - protein, 10 aa, Homo sapiens
  CDR3 for alpha chain variable domain of TCR clone 66622 (TRAV12-2, TRAJ43)
CAGDDMRFGA

SEQ ID NO: 133244 - protein, 13 aa, Homo sapiens
  CDR3 for beta chain variable domain of TCR clone 66622 (TRBV7-8, TRBJ2-7)
CASSLTGGREQYF

SEQ ID NO: 133245 - protein, 14 aa, Homo sapiens
  CDR3 for alpha chain variable domain of TCR clone 66623 (TRAV17, TRAJ6)
CATDASGGSYIPTF

SEQ ID NO: 133246 - protein, 19 aa, Homo sapiens
  CDR3 for beta chain variable domain of TCR clone 66623 (TRBV4-3, TRBJ2-7)
CASSQEFIGWQVTPCEQYF

SEQ ID NO: 133247 - protein, 23 aa, Homo sapiens
  CDR3 for alpha chain variable domain of TCR clone 66624 (TRAV1-1, TRAJ11)
LLQELQMKDSASYFCAGYSTLTF

SEQ ID NO: 133248 - protein, 13 aa, Homo sapiens
  CDR3 for beta chain variable domain of TCR clone 66624 (TRBV7-9, TRBJ1-2)
CASSLKQNYGYTF

SEQ ID NO: 133249 - protein, 11 aa, Homo sapiens
  CDR3 for alpha chain variable domain of TCR clone 66625 (TRAV2, TRAJ13)
CASGGYQKVTF

SEQ ID NO: 133250 - protein, 16 aa, Homo sapiens
  CDR3 for beta chain variable domain of TCR clone 66625 (TRBV2, TRBJ2-1)
CASSVGGSLSYNEQLF

SEQ ID NO: 133251 - protein, 12 aa, Homo sapiens
  CDR3 for alpha chain variable domain of TCR clone 66626 (TRAV12-1, TRAJ40)
CVFSSGTYKYIF

SEQ ID NO: 133252 - protein, 18 aa, Homo sapiens
  CDR3 for beta chain variable domain of TCR clone 66626 (TRBV12-4, TRBJ2-2)
CASSLVAGTRGRTGELFF

SEQ ID NO: 133253 - protein, 14 aa, Homo sapiens
  CDR3 for alpha chain variable domain of TCR clone 66627 (TRAV8-6, TRAJ30)
CAVGPVNRDDKIIF

SEQ ID NO: 133254 - protein, 17 aa, Homo sapiens
  CDR3 for beta chain variable domain of TCR clone 66627 (TRBV7-8, TRBJ2-6)
CASSAGTGGAGANVLTF

SEQ ID NO: 133255 - protein, 15 aa, Homo sapiens
  CDR3 for alpha chain variable domain of TCR clone 66628 (TRAV3, TRAJ5)
CAVRPLGRGQESTYF

SEQ ID NO: 133256 - protein, 16 aa, Homo sapiens
  CDR3 for beta chain variable domain of TCR clone 66628 (TRBV3-1, TRBJ2-7)
CASSQGVGKGSSEQYF

SEQ ID NO: 133257 - protein, 14 aa, Homo sapiens
  CDR3 for alpha chain variable domain of TCR clone 66629 (TRAV1-2, TRAJ16)
CAVNRFSDGQKLLF

SEQ ID NO: 133258 - protein, 15 aa, Homo sapiens
  CDR3 for beta chain variable domain of TCR clone 66629 (TRBV11-2, TRBJ1-6)
CASTLRGTGNSPLHF

SEQ ID NO: 133259 - protein, 14 aa, Homo sapiens
  CDR3 for alpha chain variable domain of TCR clone 66630 (TRAV17, TRAJ16)
CATADFSDGQKMLF

SEQ ID NO: 133260 - protein, 15 aa, Homo sapiens
  CDR3 for beta chain variable domain of TCR clone 66630 (TRBV18, TRBJ2-1)
CASSPPSASYNEQFF

SEQ ID NO: 133261 - protein, 17 aa, Homo sapiens
  CDR3 for alpha chain variable domain of TCR clone 66631 (TRAV8-6, TRAJ58)
CAVSSWVGETSGSRLTF

SEQ ID NO: 133262 - protein, 18 aa, Homo sapiens
  CDR3 for beta chain variable domain of TCR clone 66631 (TRBV4-1, TRBJ2-3)
CASSHQLAGGRSTDTQYF

SEQ ID NO: 133263 - protein, 12 aa, Homo sapiens
  CDR3 for alpha chain variable domain of TCR clone 66632 (TRAV23/DV6, TRAJ30)
CAASKGDDKIIF

SEQ ID NO: 133264 - protein, 18 aa, Homo sapiens
  CDR3 for beta chain variable domain of TCR clone 66632 (TRBV10-3, TRBJ2-3)
RAISESRVGPMRGDTQYF

SEQ ID NO: 133265 - protein, 16 aa, Homo sapiens
  CDR3 for alpha chain variable domain of TCR clone 66633 (TRAV21, TRAJ37)
CAVRTAGSSNTGKLNF

SEQ ID NO: 133266 - protein, 13 aa, Homo sapiens
  CDR3 for beta chain variable domain of TCR clone 66633 (TRBV7-9, TRBJ2-5)
CASLPSGRETQYF

SEQ ID NO: 133267 - protein, 14 aa, Homo sapiens
  CDR3 for alpha chain variable domain of TCR clone 66634 (TRAV1-2, TRAJ15)
CAVRDRQAGTALIF

SEQ ID NO: 133268 - protein, 18 aa, Homo sapiens
  CDR3 for beta chain variable domain of TCR clone 66634 (TRBV7-9, TRBJ2-7)
CASSLTTSGSRTWYEQYF

SEQ ID NO: 133269 - protein, 12 aa, Homo sapiens
  CDR3 for alpha chain variable domain of TCR clone 66635 (TRAV13-1, TRAJ49)
CAASPMGNQFYF

SEQ ID NO: 133270 - protein, 13 aa, Homo sapiens
  CDR3 for beta chain variable domain of TCR clone 66635 (TRBV20-1, TRBJ2-2)
CSASAAGSGELFF

SEQ ID NO: 133271 - protein, 14 aa, Homo sapiens
  CDR3 for alpha chain variable domain of TCR clone 66636 (TRAV26-1, TRAJ44)
CIVSNTGTASKLTF

SEQ ID NO: 133272 - protein, 11 aa, Homo sapiens
  CDR3 for beta chain variable domain of TCR clone 66636 (TRBV19, TRBJ2-7)
CASSTLGEQYF

SEQ ID NO: 133273 - protein, 11 aa, Homo sapiens
  CDR3 for alpha chain variable domain of TCR clone 66637 (TRAV26-2, TRAJ8)
CILTGFQKLVF

SEQ ID NO: 133274 - protein, 19 aa, Homo sapiens
  CDR3 for beta chain variable domain of TCR clone 66637 (TRBV20-1, TRBJ2-1)
CSARGETSGNAPQIDEQFF

SEQ ID NO: 133275 - protein, 16 aa, Homo sapiens
  CDR3 for alpha chain variable domain of TCR clone 66638 (TRAV4, TRAJ22)
CLVGDLYSGSARQLTF

SEQ ID NO: 133276 - protein, 16 aa, Homo sapiens
  CDR3 for beta chain variable domain of TCR clone 66638 (TRBV7-9, TRBJ2-1)
CGSSDVAGGSYNEQFF

SEQ ID NO: 133277 - protein, 10 aa, Homo sapiens
  CDR3 for alpha chain variable domain of TCR clone 66639 (TRAV14/DV4, TRAJ48)
CAPRSEKLTF

SEQ ID NO: 133278 - protein, 17 aa, Homo sapiens
  CDR3 for beta chain variable domain of TCR clone 66639 (TRBV28, TRBJ2-5)
CASSTPEGGALQETQYF

SEQ ID NO: 133279 - protein, 16 aa, Homo sapiens
  CDR3 for alpha chain variable domain of TCR clone 66640 (TRAV12-2, TRAJ10)
CAVNRVLTRGGNKPTF

SEQ ID NO: 133280 - protein, 12 aa, Homo sapiens
  CDR3 for beta chain variable domain of TCR clone 66640 (TRBV28, TRBJ2-7)
CASSFSSYEQYF

SEQ ID NO: 133281 - protein, 18 aa, Homo sapiens
  CDR3 for alpha chain variable domain of TCR clone 66641 (TRAV12-3, TRAJ52)
CAMSVGGAGGTSYGKLTF

SEQ ID NO: 133282 - protein, 15 aa, Homo sapiens
  CDR3 for beta chain variable domain of TCR clone 66641 (TRBV27, TRBJ1-6)
CASSFDRGLGSPIHF

SEQ ID NO: 133283 - protein, 12 aa, Homo sapiens
  CDR3 for alpha chain variable domain of TCR clone 66642 (TRAV3, TRAJ20)
CAVRDPDYKLSF

SEQ ID NO: 133284 - protein, 15 aa, Homo sapiens
  CDR3 for beta chain variable domain of TCR clone 66642 (TRBV15, TRBJ1-5)
CATSRDPVSNQPQHF

SEQ ID NO: 133285 - protein, 13 aa, Homo sapiens
  CDR3 for alpha chain variable domain of TCR clone 66643 (TRAV21, TRAJ27)
CAARPGNAGKSTF

SEQ ID NO: 133286 - protein, 15 aa, Homo sapiens
  CDR3 for beta chain variable domain of TCR clone 66643 (TRBV5-1, TRBJ2-1)
CASSPPRAPYNEQFF

SEQ ID NO: 133287 - protein, 14 aa, Homo sapiens
  CDR3 for alpha chain variable domain of TCR clone 66644 (TRAV9-2, TRAJ39)
CALYIYNAGNMLTF

SEQ ID NO: 133288 - protein, 15 aa, Homo sapiens
  CDR3 for beta chain variable domain of TCR clone 66644 (TRBV11-1, TRBJ2-7)
CASSHDSGGDYEQYF

SEQ ID NO: 133289 - protein, 19 aa, Homo sapiens
  CDR3 for alpha chain variable domain of TCR clone 66645 (TRAV29/DV5, TRAJ49)
CSVLLCSKLTVDTGNQFYF

SEQ ID NO: 133290 - protein, 17 aa, Homo sapiens
  CDR3 for beta chain variable domain of TCR clone 66645 (TRBV13, TRBJ2-3)
CASSLSRVEGGRNTQYF

SEQ ID NO: 133291 - protein, 14 aa, Homo sapiens
  CDR3 for alpha chain variable domain of TCR clone 66646 (TRAV23/DV6, TRAJ8)
CAASKATGLQKLVF

SEQ ID NO: 133292 - protein, 15 aa, Homo sapiens
  CDR3 for beta chain variable domain of TCR clone 66646 (TRBV28, TRBJ2-3)
CASSPDRQGANTQYF

SEQ ID NO: 133293 - protein, 13 aa, Homo sapiens
  CDR3 for alpha chain variable domain of TCR clone 66647 (TRAV27, TRAJ49)
CAPRPYTGNQFYF

SEQ ID NO: 133294 - protein, 16 aa, Homo sapiens
  CDR3 for beta chain variable domain of TCR clone 66647 (TRBV4-1, TRBJ1-2)
CASSQDAAQVLYGYTF

SEQ ID NO: 133295 - protein, 10 aa, Homo sapiens
  CDR3 for alpha chain variable domain of TCR clone 66648 (TRAV13-2, TRAJ49)
CEGTGNQFYF

SEQ ID NO: 133296 - protein, 12 aa, Homo sapiens
  CDR3 for beta chain variable domain of TCR clone 66648 (TRBV11-2, TRBJ2-2)
CASSLGGGELFF

SEQ ID NO: 133297 - protein, 14 aa, Homo sapiens
  CDR3 for alpha chain variable domain of TCR clone 66649 (TRAV27, TRAJ36)
CAGPPKRGANNLFF

SEQ ID NO: 133298 - protein, 15 aa, Homo sapiens
  CDR3 for beta chain variable domain of TCR clone 66649 (TRBV18, TRBJ2-7)
CASSPASTHNYEQYF

SEQ ID NO: 133299 - protein, 16 aa, Homo sapiens
  CDR3 for alpha chain variable domain of TCR clone 66650 (TRAV4, TRAJ22)
CLVGDLYSGSARQLTF

SEQ ID NO: 133300 - protein, 13 aa, Homo sapiens
  CDR3 for beta chain variable domain of TCR clone 66650 (TRBV19, TRBJ2-7)
CASSPRQSYEQYF

SEQ ID NO: 133301 - protein, 12 aa, Homo sapiens
  CDR3 for alpha chain variable domain of TCR clone 66651 (TRAV3, TRAJ20)
CAVRDPDYKLSF

SEQ ID NO: 133302 - protein, 12 aa, Homo sapiens
  CDR3 for beta chain variable domain of TCR clone 66651 (TRBV11-2, TRBJ2-2)
CASSLPTGELFF

SEQ ID NO: 133303 - protein, 14 aa, Homo sapiens
  CDR3 for alpha chain variable domain of TCR clone 66652 (TRAV21, TRAJ52)
CGRAGGTSYGKRTF

SEQ ID NO: 133304 - protein, 14 aa, Homo sapiens
  CDR3 for beta chain variable domain of TCR clone 66652 (TRBV19, TRBJ1-2)
CASSVLGYNYGYTF

SEQ ID NO: 133305 - protein, 11 aa, Homo sapiens
  CDR3 for alpha chain variable domain of TCR clone 66653 (TRAV12-3, TRAJ49)
CAVSSGNQFYF

SEQ ID NO: 133306 - protein, 17 aa, Homo sapiens
  CDR3 for beta chain variable domain of TCR clone 66653 (TRBV5-7, TRBJ2-7)
CASSLWRVLAGSYEQYL

SEQ ID NO: 133307 - protein, 14 aa, Homo sapiens
  CDR3 for alpha chain variable domain of TCR clone 66654 (TRAV12-2, TRAJ15)
CAPHTGQAGTALIF

SEQ ID NO: 133308 - protein, 16 aa, Homo sapiens
  CDR3 for beta chain variable domain of TCR clone 66654 (TRBV5-1, TRBJ2-1)
CASSPLGSGGYNEQFF

SEQ ID NO: 133309 - protein, 15 aa, Homo sapiens
  CDR3 for alpha chain variable domain of TCR clone 66655 (TRAV2, TRAJ9)
CAVEDRGTGGFKTIF

SEQ ID NO: 133310 - protein, 16 aa, Homo sapiens
  CDR3 for beta chain variable domain of TCR clone 66655 (TRBV24-1, TRBJ2-3)
CATSDPGTRATDTQYF

SEQ ID NO: 133311 - protein, 14 aa, Homo sapiens
  CDR3 for alpha chain variable domain of TCR clone 66656 (TRAV8-4, TRAJ9)
CAVRINTGGFKTIF

SEQ ID NO: 133312 - protein, 15 aa, Homo sapiens
  CDR3 for beta chain variable domain of TCR clone 66656 (TRBV10-2, TRBJ2-6)
CASSKQGTGANVLTF

SEQ ID NO: 133313 - protein, 14 aa, Homo sapiens
  CDR3 for alpha chain variable domain of TCR clone 66657 (TRAV8-4, TRAJ40)
CAVLSTSGTYKYIF

SEQ ID NO: 133314 - protein, 20 aa, Homo sapiens
  CDR3 for beta chain variable domain of TCR clone 66657 (TRBV19, TRBJ2-1)
CASSISRTVTSTRLNNEQFF

SEQ ID NO: 133315 - protein, 14 aa, Homo sapiens
  CDR3 for alpha chain variable domain of TCR clone 66658 (TRAV13-1, TRAJ10)
CAAKEPGGGNKLTF

SEQ ID NO: 133316 - protein, 20 aa, Homo sapiens
  CDR3 for beta chain variable domain of TCR clone 66658 (TRBV28, TRBJ2-1)
CASTPIGRSPGLAGGNEQFF

SEQ ID NO: 133317 - protein, 15 aa, Homo sapiens
  CDR3 for alpha chain variable domain of TCR clone 66659 (TRAV27, TRAJ45)
CAPVDSGGGADGLTF

SEQ ID NO: 133318 - protein, 15 aa, Homo sapiens
  CDR3 for beta chain variable domain of TCR clone 66659 (TRBV5-1, TRBJ1-1)
CASSVDRLGNTGAFF

SEQ ID NO: 133319 - protein, 16 aa, Homo sapiens
  CDR3 for alpha chain variable domain of TCR clone 66660 (TRAV3, TRAJ37)
CAVRPHGSGNPGKLIF

SEQ ID NO: 133320 - protein, 13 aa, Homo sapiens
  CDR3 for beta chain variable domain of TCR clone 66660 (TRBV2, TRBJ1-5)
CASGTGGYQPQHF

SEQ ID NO: 133321 - protein, 14 aa, Homo sapiens
  CDR3 for alpha chain variable domain of TCR clone 66661 (TRAV38-1, TRAJ40)
CALRPTSGTYKYIF

SEQ ID NO: 133322 - protein, 14 aa, Homo sapiens
  CDR3 for beta chain variable domain of TCR clone 66661 (TRBV25-1, TRBJ1-1)
CASTHLGGNTEAFY

SEQ ID NO: 133323 - protein, 14 aa, Homo sapiens
  CDR3 for alpha chain variable domain of TCR clone 66662 (TRAV13-2, TRAJ17)
CAENSKAAGNKLTF

SEQ ID NO: 133324 - protein, 13 aa, Homo sapiens
  CDR3 for beta chain variable domain of TCR clone 66662 (TRBV4-2, TRBJ1-1)
CASSQAGNTEAFF

SEQ ID NO: 133325 - protein, 14 aa, Homo sapiens
  CDR3 for alpha chain variable domain of TCR clone 66663 (TRAV12-2, TRAJ13)
CAVKKTGGYQKVTF

SEQ ID NO: 133326 - protein, 16 aa, Homo sapiens
  CDR3 for beta chain variable domain of TCR clone 66663 (TRBV5-1, TRBJ2-7)
CASSPGLAGVIYEQYF

SEQ ID NO: 133327 - protein, 16 aa, Homo sapiens
  CDR3 for alpha chain variable domain of TCR clone 66664 (TRAV20, TRAJ22)
CAVQASSSGSARQLTF

SEQ ID NO: 133328 - protein, 13 aa, Homo sapiens
  CDR3 for beta chain variable domain of TCR clone 66664 (TRBV7-2, TRBJ2-5)
CAISQTSVETQYF

SEQ ID NO: 133329 - protein, 15 aa, Homo sapiens
  CDR3 for alpha chain variable domain of TCR clone 66665 (TRAV35, TRAJ40)
CAGQLGTSGTYKYIF

SEQ ID NO: 133330 - protein, 14 aa, Homo sapiens
  CDR3 for beta chain variable domain of TCR clone 66665 (TRBV7-3, TRBJ2-1)
CASSIAGGTNEQFF

SEQ ID NO: 133331 - protein, 15 aa, Homo sapiens
  CDR3 for alpha chain variable domain of TCR clone 66666 (TRAV26-1, TRAJ29)
CIVRVEGSGNTPLAF

SEQ ID NO: 133332 - protein, 14 aa, Homo sapiens
  CDR3 for beta chain variable domain of TCR clone 66666 (TRBV25-1, TRBJ1-1)
CASTHLGGNTEAFF

SEQ ID NO: 133333 - protein, 15 aa, Homo sapiens
  CDR3 for alpha chain variable domain of TCR clone 66667 (TRAV13-1, TRAJ32)
CAASIYGGATNKLIF

SEQ ID NO: 133334 - protein, 12 aa, Homo sapiens
  CDR3 for beta chain variable domain of TCR clone 66667 (TRBV7-6, TRBJ2-3)
CASSTGKDTQYF

SEQ ID NO: 133335 - protein, 15 aa, Homo sapiens
  CDR3 for alpha chain variable domain of TCR clone 66668 (TRAV25, TRAJ53)
CPTSNSGGSSYKLTF

SEQ ID NO: 133336 - protein, 14 aa, Homo sapiens
  CDR3 for beta chain variable domain of TCR clone 66668 (TRBV11-2, TRBJ2-3)
CASSRLARTDTQYF

SEQ ID NO: 133337 - protein, 14 aa, Homo sapiens
  CDR3 for alpha chain variable domain of TCR clone 66669 (TRAV9-2, TRAJ36)
CALPWRTGSNNLFF

SEQ ID NO: 133338 - protein, 14 aa, Homo sapiens
  CDR3 for beta chain variable domain of TCR clone 66669 (TRBV2, TRBJ1-2)
CASSELQVNYGYTF

SEQ ID NO: 133339 - protein, 13 aa, Homo sapiens
  CDR3 for alpha chain variable domain of TCR clone 66670 (TRAV23/DV6, TRAJ47)
CAASIRNGIWKQT

SEQ ID NO: 133340 - protein, 15 aa, Homo sapiens
  CDR3 for beta chain variable domain of TCR clone 66670 (TRBV5-1, TRBJ2-3)
CASSVTSGSTDTQYF

SEQ ID NO: 133341 - protein, 15 aa, Homo sapiens
  CDR3 for alpha chain variable domain of TCR clone 66671 (TRAV12-1, TRAJ9)
CVVSFGDTGGFKTIF

SEQ ID NO: 133342 - protein, 13 aa, Homo sapiens
  CDR3 for beta chain variable domain of TCR clone 66671 (TRBV2, TRBJ1-4)
CASSERAREKLLF

SEQ ID NO: 133343 - protein, 12 aa, Homo sapiens
  CDR3 for alpha chain variable domain of TCR clone 66672 (TRAV25, TRAJ11)
CAGASGYSTLTF

SEQ ID NO: 133344 - protein, 15 aa, Homo sapiens
  CDR3 for beta chain variable domain of TCR clone 66672 (TRBV20-1, TRBJ2-7)
CSARDRVSGMDEQYF

SEQ ID NO: 133345 - protein, 13 aa, Homo sapiens
  CDR3 for alpha chain variable domain of TCR clone 66673 (TRAV2, TRAJ15)
CAVASQAGTALIF

SEQ ID NO: 133346 - protein, 14 aa, Homo sapiens
  CDR3 for beta chain variable domain of TCR clone 66673 (TRBV19, TRBJ2-1)
CASPTFVLSGEQSF

SEQ ID NO: 133347 - protein, 12 aa, Homo sapiens
  CDR3 for alpha chain variable domain of TCR clone 66674 (TRAV2, TRAJ31)
CAVEDNNARLMF

SEQ ID NO: 133348 - protein, 13 aa, Homo sapiens
  CDR3 for beta chain variable domain of TCR clone 66674 (TRBV9, TRBJ2-7)
CASSVGQGGEQYF

SEQ ID NO: 133349 - protein, 11 aa, Homo sapiens
  CDR3 for alpha chain variable domain of TCR clone 66675 (TRAV2, TRAJ33)
CAVDSNYQLIW

SEQ ID NO: 133350 - protein, 16 aa, Homo sapiens
  CDR3 for beta chain variable domain of TCR clone 66675 (TRBV20-1, TRBJ1-4)
CSAPGQGLLTNEKLFF

SEQ ID NO: 133351 - protein, 15 aa, Homo sapiens
  CDR3 for alpha chain variable domain of TCR clone 66676 (TRAV17, TRAJ4)
CATGTWSGGYNKLIF

SEQ ID NO: 133352 - protein, 13 aa, Homo sapiens
  CDR3 for beta chain variable domain of TCR clone 66676 (TRBV7-9, TRBJ2-7)
CASSFAGAYEQYF

SEQ ID NO: 133353 - protein, 15 aa, Homo sapiens
  CDR3 for alpha chain variable domain of TCR clone 66677 (TRAV13-1, TRAJ44)
CAARRGGGTASKLTF

SEQ ID NO: 133354 - protein, 12 aa, Homo sapiens
  CDR3 for beta chain variable domain of TCR clone 66677 (TRBV11-2, TRBJ2-2)
CASSLGGGELFF

SEQ ID NO: 133355 - protein, 12 aa, Homo sapiens
  CDR3 for alpha chain variable domain of TCR clone 66678 (TRAV3, TRAJ31)
CAVRPRGPRLML

SEQ ID NO: 133356 - protein, 17 aa, Homo sapiens
  CDR3 for beta chain variable domain of TCR clone 66678 (TRBV7-9, TRBJ1-5)
CASSASQGGYSNQPQHF

SEQ ID NO: 133357 - protein, 14 aa, Homo sapiens
  CDR3 for alpha chain variable domain of TCR clone 66679 (TRAV12-2, TRAJ36)
CAVSPPTGANNLFF

SEQ ID NO: 133358 - protein, 13 aa, Homo sapiens
  CDR3 for beta chain variable domain of TCR clone 66679 (TRBV20-1, TRBJ1-6)
CSAPTGLGSPLHF

SEQ ID NO: 133359 - protein, 13 aa, Homo sapiens
  CDR3 for alpha chain variable domain of TCR clone 66680 (TRAV8-3, TRAJ36)
CAVGATGANNLFF

SEQ ID NO: 133360 - protein, 11 aa, Homo sapiens
  CDR3 for beta chain variable domain of TCR clone 66680 (TRBV11-2, TRBJ1-1)
CASSINTEAFF

SEQ ID NO: 133361 - protein, 12 aa, Homo sapiens
  CDR3 for alpha chain variable domain of TCR clone 66681 (TRAV13-1, TRAJ21)
CAAKEGFNKFYF

SEQ ID NO: 133362 - protein, 15 aa, Homo sapiens
  CDR3 for beta chain variable domain of TCR clone 66681 (TRBV27, TRBJ2-1)
CANSNGGGSSNEQFF

SEQ ID NO: 133363 - protein, 19 aa, Homo sapiens
  CDR3 for alpha chain variable domain of TCR clone 66682 (TRAV1-1, TRAJ6)
CAVRDQRGQEEATYLHLEE

SEQ ID NO: 133364 - protein, 13 aa, Homo sapiens
  CDR3 for beta chain variable domain of TCR clone 66682 (TRBV10-2, TRBJ2-7)
CASGASGGYEQYF

SEQ ID NO: 133365 - protein, 14 aa, Homo sapiens
  CDR3 for alpha chain variable domain of TCR clone 66683 (TRAV8-2, TRAJ11)
CVVSEKSGYSTLTF

SEQ ID NO: 133366 - protein, 16 aa, Homo sapiens
  CDR3 for beta chain variable domain of TCR clone 66683 (TRBV11-2, TRBJ1-1)
CASSLRQGGEHSKAFF

SEQ ID NO: 133367 - protein, 16 aa, Homo sapiens
  CDR3 for alpha chain variable domain of TCR clone 66684 (TRAV3, TRAJ18)
CAVRDGRGSTLGRLYF

SEQ ID NO: 133368 - protein, 15 aa, Homo sapiens
  CDR3 for beta chain variable domain of TCR clone 66684 (TRBV7-9, TRBJ1-6)
CASSSTGRGNSPLHF

SEQ ID NO: 133369 - protein, 16 aa, Homo sapiens
  CDR3 for alpha chain variable domain of TCR clone 66685 (TRAV23/DV6, TRAJ9)
CAASIGGNTGGFKTIF

SEQ ID NO: 133370 - protein, 16 aa, Homo sapiens
  CDR3 for beta chain variable domain of TCR clone 66685 (TRBV10-3, TRBJ2-1)
CAISGVGDGGGGEQFF

SEQ ID NO: 133371 - protein, 16 aa, Homo sapiens
  CDR3 for alpha chain variable domain of TCR clone 66686 (TRAV26-1, TRAJ52)
CIVSNAGGTSCGKLTF

SEQ ID NO: 133372 - protein, 16 aa, Homo sapiens
  CDR3 for beta chain variable domain of TCR clone 66686 (TRBV5-1, TRBJ2-1)
CASSLEGRGLYNEQFF

SEQ ID NO: 133373 - protein, 14 aa, Homo sapiens
  CDR3 for alpha chain variable domain of TCR clone 66687 (TRAV13-2, TRAJ15)
CAENPNQAGTALIS

SEQ ID NO: 133374 - protein, 16 aa, Homo sapiens
  CDR3 for beta chain variable domain of TCR clone 66687 (TRBV12-4, TRBJ1-2)
CASSPTATGKTRGYTF

SEQ ID NO: 133375 - protein, 13 aa, Homo sapiens
  CDR3 for alpha chain variable domain of TCR clone 66688 (TRAV27, TRAJ27)
CAGGITNAGKSTF

SEQ ID NO: 133376 - protein, 15 aa, Homo sapiens
  CDR3 for beta chain variable domain of TCR clone 66688 (TRBV4-3, TRBJ1-1)
CASSQELGRGTEAFF

SEQ ID NO: 133377 - protein, 11 aa, Homo sapiens
  CDR3 for alpha chain variable domain of TCR clone 66689 (TRAV21, TRAJ34)
FAHYNTDKLIF

SEQ ID NO: 133378 - protein, 13 aa, Homo sapiens
  CDR3 for beta chain variable domain of TCR clone 66689 (TRBV7-6, TRBJ1-2)
CASSLVADYGYTF

SEQ ID NO: 133379 - protein, 16 aa, Homo sapiens
  CDR3 for alpha chain variable domain of TCR clone 66690 (TRAV3, TRAJ37)
CAVRVRGSGNTGTLIF

SEQ ID NO: 133380 - protein, 11 aa, Homo sapiens
  CDR3 for beta chain variable domain of TCR clone 66690 (TRBV11-2, TRBJ2-2)
CASSLPGELFF

SEQ ID NO: 133381 - protein, 12 aa, Homo sapiens
  CDR3 for alpha chain variable domain of TCR clone 66691 (TRAV13-2, TRAJ8)
CAPWLGFQKLVF

SEQ ID NO: 133382 - protein, 16 aa, Homo sapiens
  CDR3 for beta chain variable domain of TCR clone 66691 (TRBV12-5, TRBJ2-5)
CASGPRTSGNQETQYF

SEQ ID NO: 133383 - protein, 13 aa, Homo sapiens
  CDR3 for alpha chain variable domain of TCR clone 66692 (TRAV8-3, TRAJ43)
CAVGPDNNNDMRF

SEQ ID NO: 133384 - protein, 15 aa, Homo sapiens
  CDR3 for beta chain variable domain of TCR clone 66692 (TRBV7-9, TRBJ1-5)
CASSQGHQPNQPQHF

SEQ ID NO: 133385 - protein, 14 aa, Homo sapiens
  CDR3 for alpha chain variable domain of TCR clone 66693 (TRAV8-4, TRAJ37)
CAVSESSNTGKLVF

SEQ ID NO: 133386 - protein, 20 aa, Homo sapiens
  CDR3 for beta chain variable domain of TCR clone 66693 (TRBV7-8, TRBJ2-2)
CASSHLFPGPTIHITGELFF

SEQ ID NO: 133387 - protein, 16 aa, Homo sapiens
  CDR3 for alpha chain variable domain of TCR clone 66694 (TRAV30, TRAJ24)
CGTEIVDVDSWGKFQF

SEQ ID NO: 133388 - protein, 12 aa, Homo sapiens
  CDR3 for beta chain variable domain of TCR clone 66694 (TRBV11-2, TRBJ2-2)
CASSLGGGELFF

SEQ ID NO: 133389 - protein, 11 aa, Homo sapiens
  CDR3 for alpha chain variable domain of TCR clone 66695 (TRAV12-3, TRAJ49)
CVANTGNQFYF

SEQ ID NO: 133390 - protein, 15 aa, Homo sapiens
  CDR3 for beta chain variable domain of TCR clone 66695 (TRBV11-2, TRBJ2-1)
CASSLGTSGLNEQFF

SEQ ID NO: 133391 - protein, 13 aa, Homo sapiens
  CDR3 for alpha chain variable domain of TCR clone 66696 (TRAV13-1, TRAJ53)
QAASGGSNYKLTF

SEQ ID NO: 133392 - protein, 16 aa, Homo sapiens
  CDR3 for beta chain variable domain of TCR clone 66696 (TRBV28, TRBJ2-6)
CASSNRRGSGANVLTF

SEQ ID NO: 133393 - protein, 18 aa, Homo sapiens
  CDR3 for alpha chain variable domain of TCR clone 66697 (TRAV13-1, TRAJ52)
CAAKNPNAGGTSYGKLTF

SEQ ID NO: 133394 - protein, 18 aa, Homo sapiens
  CDR3 for beta chain variable domain of TCR clone 66697 (TRBV4-1, TRBJ1-4)
CASSPRTGGAWTNEKLLF

SEQ ID NO: 133395 - protein, 14 aa, Homo sapiens
  CDR3 for alpha chain variable domain of TCR clone 66698 (TRAV12-3, TRAJ9)
CAMSVETGGFKTIL

SEQ ID NO: 133396 - protein, 14 aa, Homo sapiens
  CDR3 for beta chain variable domain of TCR clone 66698 (TRBV7-2, TRBJ2-7)
CASRSQGAAYEQYF

SEQ ID NO: 133397 - protein, 13 aa, Homo sapiens
  CDR3 for alpha chain variable domain of TCR clone 66699 (TRAV12-3, TRAJ43)
CAMIRPNNNDMRF

SEQ ID NO: 133398 - protein, 14 aa, Homo sapiens
  CDR3 for beta chain variable domain of TCR clone 66699 (TRBV25-1, TRBJ1-1)
CASTHLGGNTEAFF

SEQ ID NO: 133399 - protein, 14 aa, Homo sapiens
  CDR3 for alpha chain variable domain of TCR clone 66700 (TRAV13-1, TRAJ35)
CAASKGGFGNVLNC

SEQ ID NO: 133400 - protein, 13 aa, Homo sapiens
  CDR3 for beta chain variable domain of TCR clone 66700 (TRBV7-3, TRBJ1-1)
CASSQDWGAEAFF

SEQ ID NO: 133401 - protein, 14 aa, Homo sapiens
  CDR3 for alpha chain variable domain of TCR clone 66701 (TRAV12-2, TRAJ13)
CAVKKTGGYQKVTF

SEQ ID NO: 133402 - protein, 17 aa, Homo sapiens
  CDR3 for beta chain variable domain of TCR clone 66701 (TRBV15, TRBJ2-4)
CATSRDNPQTGLDSQYF

SEQ ID NO: 133403 - protein, 17 aa, Homo sapiens
  CDR3 for alpha chain variable domain of TCR clone 66702 (TRAV20, TRAJ57)
CAVRAIVAQGGSEKLVF

SEQ ID NO: 133404 - protein, 13 aa, Homo sapiens
  CDR3 for beta chain variable domain of TCR clone 66702 (TRBV20-1, TRBJ2-5)
CSAFVGGGETQYF

SEQ ID NO: 133405 - protein, 14 aa, Homo sapiens
  CDR3 for alpha chain variable domain of TCR clone 66703 (TRAV8-3, TRAJ4)
CAVGAAGGYNKLIF

SEQ ID NO: 133406 - protein, 15 aa, Homo sapiens
  CDR3 for beta chain variable domain of TCR clone 66703 (TRBV28, TRBJ2-7)
CASSPGGRGFYEQYF

SEQ ID NO: 133407 - protein, 15 aa, Homo sapiens
  CDR3 for alpha chain variable domain of TCR clone 66704 (TRAV3, TRAJ47)
CAVRDIREYGNKLVF

SEQ ID NO: 133408 - protein, 14 aa, Homo sapiens
  CDR3 for beta chain variable domain of TCR clone 66704 (TRBV13, TRBJ2-5)
CASSLERVGETQYF

SEQ ID NO: 133409 - protein, 14 aa, Homo sapiens
  CDR3 for alpha chain variable domain of TCR clone 66705 (TRAV8-3, TRAJ23)
CAVIIYNQGGKLIF

SEQ ID NO: 133410 - protein, 15 aa, Homo sapiens
  CDR3 for beta chain variable domain of TCR clone 66705 (TRBV18, TRBJ2-1)
CASSPPSASYSEQFF

SEQ ID NO: 133411 - protein, 15 aa, Homo sapiens
  CDR3 for alpha chain variable domain of TCR clone 66706 (TRAV2, TRAJ15)
CSVEDRGQAGTALIF

SEQ ID NO: 133412 - protein, 13 aa, Homo sapiens
  CDR3 for beta chain variable domain of TCR clone 66706 (TRBV10-2, TRBJ2-7)
CASGASGGYEQYF

SEQ ID NO: 133413 - protein, 14 aa, Homo sapiens
  CDR3 for alpha chain variable domain of TCR clone 66707 (TRAV8-3, TRAJ4)
CAVDAAGGYNKLIF

SEQ ID NO: 133414 - protein, 13 aa, Homo sapiens
  CDR3 for beta chain variable domain of TCR clone 66707 (TRBV12-4, TRBJ1-2)
CASSLRQGKGYTF

SEQ ID NO: 133415 - protein, 12 aa, Homo sapiens
  CDR3 for alpha chain variable domain of TCR clone 66708 (TRAV2, TRAJ31)
CAVEDNDARLMF

SEQ ID NO: 133416 - protein, 16 aa, Homo sapiens
  CDR3 for beta chain variable domain of TCR clone 66708 (TRBV10-3, TRBJ2-1)
CAISGVGDGGGGEQFF

SEQ ID NO: 133417 - protein, 12 aa, Homo sapiens
  CDR3 for alpha chain variable domain of TCR clone 66709 (TRAV13-1, TRAJ8)
CAALTGFQKLVF

SEQ ID NO: 133418 - protein, 12 aa, Homo sapiens
  CDR3 for beta chain variable domain of TCR clone 66709 (TRBV7-8, TRBJ2-7)
CASSLGDREQYF

SEQ ID NO: 133419 - protein, 13 aa, Homo sapiens
  CDR3 for alpha chain variable domain of TCR clone 66710 (TRAV12-3, TRAJ33)
CAMSVNSNYQLIW

SEQ ID NO: 133420 - protein, 13 aa, Homo sapiens
  CDR3 for beta chain variable domain of TCR clone 66710 (TRBV7-2, TRBJ2-2)
CASSLAVTGGLFF

SEQ ID NO: 133421 - protein, 13 aa, Homo sapiens
  CDR3 for alpha chain variable domain of TCR clone 66711 (TRAV12-3, TRAJ9)
CAMRNTGGFKTIF

SEQ ID NO: 133422 - protein, 11 aa, Homo sapiens
  CDR3 for beta chain variable domain of TCR clone 66711 (TRBV11-2, TRBJ2-2)
CASSLPGELFF

SEQ ID NO: 133423 - protein, 14 aa, Homo sapiens
  CDR3 for alpha chain variable domain of TCR clone 66712 (TRAV1-2, TRAJ8)
CAVRGDTGFQKLVF

SEQ ID NO: 133424 - protein, 16 aa, Homo sapiens
  CDR3 for beta chain variable domain of TCR clone 66712 (TRBV7-9, TRBJ2-5)
CASRLEIGTRKETQYF

SEQ ID NO: 133425 - protein, 14 aa, Homo sapiens
  CDR3 for alpha chain variable domain of TCR clone 66713 (TRAV17, TRAJ24)
CATLTIDSWGKFQF

SEQ ID NO: 133426 - protein, 16 aa, Homo sapiens
  CDR3 for beta chain variable domain of TCR clone 66713 (TRBV4-2, TRBJ2-7)
CASSQDGGSLRGEQYF

SEQ ID NO: 133427 - protein, 14 aa, Homo sapiens
  CDR3 for alpha chain variable domain of TCR clone 66714 (TRAV14/DV4, TRAJ32)
SNVLPLTPTNKLIF

SEQ ID NO: 133428 - protein, 14 aa, Homo sapiens
  CDR3 for beta chain variable domain of TCR clone 66714 (TRBV7-3, TRBJ2-1)
CASSLAGGTNEQFF

SEQ ID NO: 133429 - protein, 11 aa, Homo sapiens
  CDR3 for alpha chain variable domain of TCR clone 66715 (TRAV1-1, TRAJ23)
CAVRQGGKLIF

SEQ ID NO: 133430 - protein, 17 aa, Homo sapiens
  CDR3 for beta chain variable domain of TCR clone 66715 (TRBV4-1, TRBJ2-3)
CASSQSATGGPVDTQYF

SEQ ID NO: 133431 - protein, 12 aa, Homo sapiens
  CDR3 for alpha chain variable domain of TCR clone 66716 (TRAV8-3, TRAJ20)
CAVDFNDYKLSF

SEQ ID NO: 133432 - protein, 12 aa, Homo sapiens
  CDR3 for beta chain variable domain of TCR clone 66716 (TRBV29-1, TRBJ2-3)
CSVTGGANTQYF

SEQ ID NO: 133433 - protein, 12 aa, Homo sapiens
  CDR3 for alpha chain variable domain of TCR clone 66717 (TRAV8-3, TRAJ20)
CAVGANDYMLSF

SEQ ID NO: 133434 - protein, 15 aa, Homo sapiens
  CDR3 for beta chain variable domain of TCR clone 66717 (TRBV11-2, TRBJ2-1)
CASSLGTSGLNEQFF

SEQ ID NO: 133435 - protein, 12 aa, Homo sapiens
  CDR3 for alpha chain variable domain of TCR clone 66718 (TRAV8-3, TRAJ26)
CAGDNYGQNFVF

SEQ ID NO: 133436 - protein, 15 aa, Homo sapiens
  CDR3 for beta chain variable domain of TCR clone 66718 (TRBV11-3, TRBJ2-3)
CASLKDGREGDTQYF

SEQ ID NO: 133437 - protein, 13 aa, Homo sapiens
  CDR3 for alpha chain variable domain of TCR clone 66719 (TRAV1-2, TRAJ9)
CAALNTGGFKTIF

SEQ ID NO: 133438 - protein, 16 aa, Homo sapiens
  CDR3 for beta chain variable domain of TCR clone 66719 (TRBV7-7, TRBJ2-1)
CASSLASGTSYNEQFF

SEQ ID NO: 133439 - protein, 14 aa, Homo sapiens
  CDR3 for alpha chain variable domain of TCR clone 66720 (TRAV25, TRAJ27)
CAGPGNTNAGESTF

SEQ ID NO: 133440 - protein, 16 aa, Homo sapiens
  CDR3 for beta chain variable domain of TCR clone 66720 (TRBV4-1, TRBJ2-6)
CASSQDGGPGANVLTF

SEQ ID NO: 133441 - protein, 13 aa, Homo sapiens
  CDR3 for alpha chain variable domain of TCR clone 66721 (TRAV17, TRAJ5)
CALRGTGRRALTF

SEQ ID NO: 133442 - protein, 13 aa, Homo sapiens
  CDR3 for beta chain variable domain of TCR clone 66721 (TRBV4-2, TRBJ1-1)
CASSQAGDTEAFF

SEQ ID NO: 133443 - protein, 18 aa, Homo sapiens
  CDR3 for alpha chain variable domain of TCR clone 66722 (TRAV12-3, TRAJ52)
CAMSVGGAGGTSYGKLTF

SEQ ID NO: 133444 - protein, 13 aa, Homo sapiens
  CDR3 for beta chain variable domain of TCR clone 66722 (TRBV4-1, TRBJ2-2)
CASSQENTGELFF

SEQ ID NO: 133445 - protein, 18 aa, Homo sapiens
  CDR3 for alpha chain variable domain of TCR clone 66723 (TRAV13-1, TRAJ52)
GAASKRSAGGTSYGKLTF

SEQ ID NO: 133446 - protein, 13 aa, Homo sapiens
  CDR3 for beta chain variable domain of TCR clone 66723 (TRBV12-4, TRBJ1-2)
CASSLRQGKGYTF

SEQ ID NO: 133447 - protein, 14 aa, Homo sapiens
  CDR3 for alpha chain variable domain of TCR clone 66724 (TRAV2, TRAJ9)
CAVEDRSGGFKTIF

SEQ ID NO: 133448 - protein, 15 aa, Homo sapiens
  CDR3 for beta chain variable domain of TCR clone 66724 (TRBV7-9, TRBJ1-4)
CASSRTGGFNEKLFF

SEQ ID NO: 133449 - protein, 14 aa, Homo sapiens
  CDR3 for alpha chain variable domain of TCR clone 66725 (TRAV12-2, TRAJ4)
CAEDLSGGYNKLIF

SEQ ID NO: 133450 - protein, 13 aa, Homo sapiens
  CDR3 for beta chain variable domain of TCR clone 66725 (TRBV7-9, TRBJ1-2)
CASSLKQNYGYTL

SEQ ID NO: 133451 - protein, 14 aa, Homo sapiens
  CDR3 for alpha chain variable domain of TCR clone 66726 (TRAV12-2, TRAJ11)
CAVEGGSGYSTLTF

SEQ ID NO: 133452 - protein, 13 aa, Homo sapiens
  CDR3 for beta chain variable domain of TCR clone 66726 (TRBV7-9, TRBJ1-2)
CASSLKQNYGYTF

SEQ ID NO: 133453 - protein, 12 aa, Homo sapiens
  CDR3 for alpha chain variable domain of TCR clone 66727 (TRAV8-4, TRAJ9)
CAVTFNTGGFKN

SEQ ID NO: 133454 - protein, 15 aa, Homo sapiens
  CDR3 for beta chain variable domain of TCR clone 66727 (TRBV7-9, TRBJ2-2)
CASSPETGAGGELFF

SEQ ID NO: 133455 - protein, 14 aa, Homo sapiens
  CDR3 for alpha chain variable domain of TCR clone 66728 (TRAV12-3, TRAJ9)
CAMSVETGGFKTIF

SEQ ID NO: 133456 - protein, 13 aa, Homo sapiens
  CDR3 for beta chain variable domain of TCR clone 66728 (TRBV7-9, TRBJ1-2)
CASSLKQNYGYTF

SEQ ID NO: 133457 - protein, 14 aa, Homo sapiens
  CDR3 for alpha chain variable domain of TCR clone 66729 (TRAV1-2, TRAJ8)
CAVREDTGFQTLVF

SEQ ID NO: 133458 - protein, 15 aa, Homo sapiens
  CDR3 for beta chain variable domain of TCR clone 66729 (TRBV27, TRBJ2-1)
CASSNGGGSSNEQFF

SEQ ID NO: 133459 - protein, 14 aa, Homo sapiens
  CDR3 for alpha chain variable domain of TCR clone 66730 (TRAV36/DV7, TRAJ44)
CCGANTGTASKLTF

SEQ ID NO: 133460 - protein, 11 aa, Homo sapiens
  CDR3 for beta chain variable domain of TCR clone 66730 (TRBV29-1, TRBJ2-5)
CSEDRTGTQYF

SEQ ID NO: 133461 - protein, 12 aa, Homo sapiens
  CDR3 for alpha chain variable domain of TCR clone 66731 (TRAV21, TRAJ3)
CCFYSSASKIIF

SEQ ID NO: 133462 - protein, 16 aa, Homo sapiens
  CDR3 for beta chain variable domain of TCR clone 66731 (TRBV19, TRBJ2-1)
CVSSKAGPSSYNEQFF

SEQ ID NO: 133463 - protein, 14 aa, Homo sapiens
  CDR3 for alpha chain variable domain of TCR clone 66732 (TRAV23/DV6, TRAJ9)
CASKYWRLQNYLLS

SEQ ID NO: 133464 - protein, 14 aa, Homo sapiens
  CDR3 for beta chain variable domain of TCR clone 66732 (TRBV6-1, TRBJ2-7)
CASTRTGDYYEQYF

SEQ ID NO: 133465 - protein, 14 aa, Homo sapiens
  CDR3 for alpha chain variable domain of TCR clone 66733 (TRAV12-2, TRAJ17)
CAVLFKAAGNKLTF

SEQ ID NO: 133466 - protein, 13 aa, Homo sapiens
  CDR3 for beta chain variable domain of TCR clone 66733 (TRBV19, TRBJ1-2)
CASSQGQIYGYTF

SEQ ID NO: 133467 - protein, 13 aa, Homo sapiens
  CDR3 for alpha chain variable domain of TCR clone 66734 (TRAV21, TRAJ27)
CAARPGNAGKSTF

SEQ ID NO: 133468 - protein, 14 aa, Homo sapiens
  CDR3 for beta chain variable domain of TCR clone 66734 (TRBV11-2, TRBJ2-7)
RASSLGAGAYEQYF

SEQ ID NO: 133469 - protein, 14 aa, Homo sapiens
  CDR3 for alpha chain variable domain of TCR clone 66735 (TRAV13-1, TRAJ35)
CAASKGGFGNVLHC

SEQ ID NO: 133470 - protein, 13 aa, Homo sapiens
  CDR3 for beta chain variable domain of TCR clone 66735 (TRBV7-3, TRBJ1-1)
RASSQDWGAEAFF

SEQ ID NO: 133471 - protein, 15 aa, Homo sapiens
  CDR3 for alpha chain variable domain of TCR clone 66736 (TRAV26-1, TRAJ29)
CIVRVEGSGNTPLVF

SEQ ID NO: 133472 - protein, 16 aa, Homo sapiens
  CDR3 for beta chain variable domain of TCR clone 66736 (TRBV7-3, TRBJ2-1)
CASSLEGYRSYNEQFF

SEQ ID NO: 133473 - protein, 12 aa, Homo sapiens
  CDR3 for alpha chain variable domain of TCR clone 66737 (TRAV25, TRAJ17)
CAGEAAGNKLTF

SEQ ID NO: 133474 - protein, 14 aa, Homo sapiens
  CDR3 for beta chain variable domain of TCR clone 66737 (TRBV19, TRBJ2-1)
CASPTFVLSGEQFF

SEQ ID NO: 133475 - protein, 13 aa, Homo sapiens
  CDR3 for alpha chain variable domain of TCR clone 66738 (TRAV21, TRAJ57)
CAVTQGGSEKLVL

SEQ ID NO: 133476 - protein, 16 aa, Homo sapiens
  CDR3 for beta chain variable domain of TCR clone 66738 (TRBV29-1, TRBJ2-7)
CSVEDAEDGTAYEQYF

SEQ ID NO: 133477 - protein, 14 aa, Homo sapiens
  CDR3 for alpha chain variable domain of TCR clone 66739 (TRAV26-1, TRAJ38)
CTADNAGNNRKLIW

SEQ ID NO: 133478 - protein, 15 aa, Homo sapiens
  CDR3 for beta chain variable domain of TCR clone 66739 (TRBV20-1, TRBJ1-1)
CSASRGVTGNTEAFF

SEQ ID NO: 133479 - protein, 13 aa, Homo sapiens
  CDR3 for alpha chain variable domain of TCR clone 66740 (TRAV8-6, TRAJ21)
CAVSPTSLNKFYF

SEQ ID NO: 133480 - protein, 14 aa, Homo sapiens
  CDR3 for beta chain variable domain of TCR clone 66740 (TRBV7-9, TRBJ2-5)
CASSLDTAQETQYF

SEQ ID NO: 133481 - protein, 12 aa, Homo sapiens
  CDR3 for alpha chain variable domain of TCR clone 66741 (TRAV22, TRAJ22)
CAPGGSARQLPF

SEQ ID NO: 133482 - protein, 13 aa, Homo sapiens
  CDR3 for beta chain variable domain of TCR clone 66741 (TRBV15, TRBJ1-6)
CATSGGLNSPLHF

SEQ ID NO: 133483 - protein, 13 aa, Homo sapiens
  CDR3 for alpha chain variable domain of TCR clone 66742 (TRAV8-4, TRAJ30)
CAVSVNRDDKIIF

SEQ ID NO: 133484 - protein, 13 aa, Homo sapiens
  CDR3 for beta chain variable domain of TCR clone 66742 (TRBV3-1, TRBJ2-2)
CASLARGSGELVF

SEQ ID NO: 133485 - protein, 18 aa, Homo sapiens
  CDR3 for alpha chain variable domain of TCR clone 66743 (TRAV21, TRAJ52)
CAVRPSPAGGTSYGKLTF

SEQ ID NO: 133486 - protein, 16 aa, Homo sapiens
  CDR3 for beta chain variable domain of TCR clone 66743 (TRBV5-1, TRBJ2-1)
CASSLTLAGSRNEQFF

SEQ ID NO: 133487 - protein, 14 aa, Homo sapiens
  CDR3 for alpha chain variable domain of TCR clone 66744 (TRAV1-2, TRAJ8)
CAVREDTGFQRLVF

SEQ ID NO: 133488 - protein, 15 aa, Homo sapiens
  CDR3 for beta chain variable domain of TCR clone 66744 (TRBV28, TRBJ2-1)
CASSIIAGGRSEQFF

SEQ ID NO: 133489 - protein, 16 aa, Homo sapiens
  CDR3 for alpha chain variable domain of TCR clone 66745 (TRAV30, TRAJ24)
CGTEIVDADSWGKFQF

SEQ ID NO: 133490 - protein, 14 aa, Homo sapiens
  CDR3 for beta chain variable domain of TCR clone 66745 (TRBV28, TRBJ1-4)
CASRVTGFDEKLFF

SEQ ID NO: 133491 - protein, 17 aa, Homo sapiens
  CDR3 for alpha chain variable domain of TCR clone 66746 (TRAV3, TRAJ42)
CAVRDRDYRGSQGNLIF

SEQ ID NO: 133492 - protein, 15 aa, Homo sapiens
  CDR3 for beta chain variable domain of TCR clone 66746 (TRBV6-6, TRBJ2-7)
CASSYSYGGSYEQYF

SEQ ID NO: 133493 - protein, 15 aa, Homo sapiens
  CDR3 for alpha chain variable domain of TCR clone 66747 (TRAV12-2, TRAJ22)
CAVNGAPGSARQLTF

SEQ ID NO: 133494 - protein, 15 aa, Homo sapiens
  CDR3 for beta chain variable domain of TCR clone 66747 (TRBV18, TRBJ2-2)
CASSPPVGFTGEPFF

SEQ ID NO: 133495 - protein, 14 aa, Homo sapiens
  CDR3 for alpha chain variable domain of TCR clone 66748 (TRAV20, TRAJ56)
CAVQFGGANSKLTF

SEQ ID NO: 133496 - protein, 12 aa, Homo sapiens
  CDR3 for beta chain variable domain of TCR clone 66748 (TRBV11-2, TRBJ2-2)
CASSLGGGELFF

SEQ ID NO: 133497 - protein, 13 aa, Homo sapiens
  CDR3 for alpha chain variable domain of TCR clone 66749 (TRAV36/DV7, TRAJ33)
CAVDMDSSYQLIW

SEQ ID NO: 133498 - protein, 16 aa, Homo sapiens
  CDR3 for beta chain variable domain of TCR clone 66749 (TRBV15, TRBJ2-3)
CATRLSGGRAPDTQYF

SEQ ID NO: 133499 - protein, 14 aa, Homo sapiens
  CDR3 for alpha chain variable domain of TCR clone 66750 (TRAV4, TRAJ17)
FLVGDMAAGNKLTF

SEQ ID NO: 133500 - protein, 14 aa, Homo sapiens
  CDR3 for beta chain variable domain of TCR clone 66750 (TRBV7-6, TRBJ2-3)
CASSLGTVTDTQYF

SEQ ID NO: 133501 - protein, 14 aa, Homo sapiens
  CDR3 for alpha chain variable domain of TCR clone 66751 (TRAV12-1, TRAJ4)
CGEQRSGGYNKLIF

SEQ ID NO: 133502 - protein, 14 aa, Homo sapiens
  CDR3 for beta chain variable domain of TCR clone 66751 (TRBV19, TRBJ2-1)
CASPTFVLSGEQFF

SEQ ID NO: 133503 - protein, 17 aa, Homo sapiens
  CDR3 for alpha chain variable domain of TCR clone 66752 (TRAV17, TRAJ7)
CATLGRLAFGKGNPVVV

SEQ ID NO: 133504 - protein, 13 aa, Homo sapiens
  CDR3 for beta chain variable domain of TCR clone 66752 (TRBV12-4, TRBJ2-7)
CASSLERVREQYF

SEQ ID NO: 133505 - protein, 13 aa, Homo sapiens
  CDR3 for alpha chain variable domain of TCR clone 66753 (TRAV22, TRAJ29)
CAVGGSGNTPLVF

SEQ ID NO: 133506 - protein, 14 aa, Homo sapiens
  CDR3 for beta chain variable domain of TCR clone 66753 (TRBV19, TRBJ2-7)
CASSMGQGAIEQYF

SEQ ID NO: 133507 - protein, 12 aa, Homo sapiens
  CDR3 for alpha chain variable domain of TCR clone 66754 (TRAV26-2, TRAJ21)
CILKGNFNKIYF

SEQ ID NO: 133508 - protein, 14 aa, Homo sapiens
  CDR3 for beta chain variable domain of TCR clone 66754 (TRBV7-9, TRBJ1-1)
CASTPLQSYTEAFF

SEQ ID NO: 133509 - protein, 16 aa, Homo sapiens
  CDR3 for alpha chain variable domain of TCR clone 66755 (TRAV30, TRAJ24)
CGTEIVDADSWGKFQF

SEQ ID NO: 133510 - protein, 14 aa, Homo sapiens
  CDR3 for beta chain variable domain of TCR clone 66755 (TRBV19, TRBJ2-7)
CASSIRLGDHEQYF

SEQ ID NO: 133511 - protein, 12 aa, Homo sapiens
  CDR3 for alpha chain variable domain of TCR clone 66756 (TRAV26-1, TRAJ20)
CIVGSNDYKLSF

SEQ ID NO: 133512 - protein, 14 aa, Homo sapiens
  CDR3 for beta chain variable domain of TCR clone 66756 (TRBV5-7, TRBJ1-1)
CASSLMAVNTEAFF

SEQ ID NO: 133513 - protein, 14 aa, Homo sapiens
  CDR3 for alpha chain variable domain of TCR clone 66757 (TRAV12-1, TRAJ30)
CVVNIENRDDKIIF

SEQ ID NO: 133514 - protein, 14 aa, Homo sapiens
  CDR3 for beta chain variable domain of TCR clone 66757 (TRBV7-9, TRBJ2-5)
CASSPRPSGETQYF

SEQ ID NO: 133515 - protein, 10 aa, Homo sapiens
  CDR3 for alpha chain variable domain of TCR clone 66758 (TRAV23/DV6, TRAJ57)
CAASSTLSQG

SEQ ID NO: 133516 - protein, 14 aa, Homo sapiens
  CDR3 for beta chain variable domain of TCR clone 66758 (TRBV25-1, TRBJ1-1)
CASTHLGGYTEAFF

SEQ ID NO: 133517 - protein, 14 aa, Homo sapiens
  CDR3 for alpha chain variable domain of TCR clone 66759 (TRAV35, TRAJ22)
CAGLRPGFARQLTF

SEQ ID NO: 133518 - protein, 17 aa, Homo sapiens
  CDR3 for beta chain variable domain of TCR clone 66759 (TRBV15, TRBJ1-4)
CATSRYGTGDPNEKLFF

SEQ ID NO: 133519 - protein, 10 aa, Homo sapiens
  CDR3 for alpha chain variable domain of TCR clone 66760 (TRAV16, TRAJ22)
SAMYLRQLTF

SEQ ID NO: 133520 - protein, 15 aa, Homo sapiens
  CDR3 for beta chain variable domain of TCR clone 66760 (TRBV7-9, TRBJ1-6)
CTSSSPGRGNSPLHF

SEQ ID NO: 133521 - protein, 14 aa, Homo sapiens
  CDR3 for alpha chain variable domain of TCR clone 66761 (TRAV4, TRAJ26)
CLVGPHNYGQNFVF

SEQ ID NO: 133522 - protein, 17 aa, Homo sapiens
  CDR3 for beta chain variable domain of TCR clone 66761 (TRBV24-1, TRBJ2-1)
CATSDVSTSGTYNEQFL

SEQ ID NO: 133523 - protein, 11 aa, Homo sapiens
  CDR3 for alpha chain variable domain of TCR clone 66762 (TRAV16, TRAJ31)
YALFNNARLMF

SEQ ID NO: 133524 - protein, 15 aa, Homo sapiens
  CDR3 for beta chain variable domain of TCR clone 66762 (TRBV18, TRBJ1-1)
CASSPRQGENTEAFF

SEQ ID NO: 133525 - protein, 10 aa, Homo sapiens
  CDR3 for alpha chain variable domain of TCR clone 66763 (TRAV16, TRAJ22)
SAMHLRQLTF

SEQ ID NO: 133526 - protein, 15 aa, Homo sapiens
  CDR3 for beta chain variable domain of TCR clone 66763 (TRBV7-9, TRBJ1-6)
CASSSPGRGNSPLHF

SEQ ID NO: 133527 - protein, 11 aa, Homo sapiens
  CDR3 for alpha chain variable domain of TCR clone 66764 (TRAV23/DV6, TRAJ49)
CAARAGNQFYF

SEQ ID NO: 133528 - protein, 16 aa, Homo sapiens
  CDR3 for beta chain variable domain of TCR clone 66764 (TRBV19, TRBJ2-1)
CASSMGGGSSYNEQFF

SEQ ID NO: 133529 - protein, 16 aa, Homo sapiens
  CDR3 for alpha chain variable domain of TCR clone 66765 (TRAV17, TRAJ53)
CATDALSGGSNYKLTF

SEQ ID NO: 133530 - protein, 15 aa, Homo sapiens
  CDR3 for beta chain variable domain of TCR clone 66765 (TRBV4-3, TRBJ2-1)
CASSQESAIYNEQFF

SEQ ID NO: 133531 - protein, 14 aa, Homo sapiens
  CDR3 for alpha chain variable domain of TCR clone 66766 (TRAV12-2, TRAJ40)
CAVKIPSGTYKYIF

SEQ ID NO: 133532 - protein, 14 aa, Homo sapiens
  CDR3 for beta chain variable domain of TCR clone 66766 (TRBV7-3, TRBJ2-1)
CASSLAGGTNEQFF

SEQ ID NO: 133533 - protein, 12 aa, Homo sapiens
  CDR3 for alpha chain variable domain of TCR clone 66767 (TRAV12-3, TRAJ17)
CAMTLTGNKLTF

SEQ ID NO: 133534 - protein, 16 aa, Homo sapiens
  CDR3 for beta chain variable domain of TCR clone 66767 (TRBV12-4, TRBJ2-7)
CASSPEGQGSSYEQYF

SEQ ID NO: 133535 - protein, 17 aa, Homo sapiens
  CDR3 for alpha chain variable domain of TCR clone 66768 (TRAV36/DV7, TRAJ52)
CAVAQRAGGTSYGKLTF

SEQ ID NO: 133536 - protein, 14 aa, Homo sapiens
  CDR3 for beta chain variable domain of TCR clone 66768 (TRBV12-5, TRBJ2-5)
CASGSRTHQETQYF

SEQ ID NO: 133537 - protein, 11 aa, Homo sapiens
  CDR3 for alpha chain variable domain of TCR clone 66769 (TRAV17, TRAJ31)
CATSNNARLMF

SEQ ID NO: 133538 - protein, 16 aa, Homo sapiens
  CDR3 for beta chain variable domain of TCR clone 66769 (TRBV7-8, TRBJ2-4)
CAGSAERTLAKNIQYF

SEQ ID NO: 133539 - protein, 16 aa, Homo sapiens
  CDR3 for alpha chain variable domain of TCR clone 66770 (TRAV30, TRAJ24)
CGTEMVDADSWGKFQF

SEQ ID NO: 133540 - protein, 12 aa, Homo sapiens
  CDR3 for beta chain variable domain of TCR clone 66770 (TRBV11-2, TRBJ2-1)
CASSPGNNEQFF

SEQ ID NO: 133541 - protein, 14 aa, Homo sapiens
  CDR3 for alpha chain variable domain of TCR clone 66771 (TRAV12-3, TRAJ22)
CAMRLFGSARQLTF

SEQ ID NO: 133542 - protein, 11 aa, Homo sapiens
  CDR3 for beta chain variable domain of TCR clone 66771 (TRBV12-4, TRBJ2-2)
CASSSAGELFF

SEQ ID NO: 133543 - protein, 18 aa, Homo sapiens
  CDR3 for alpha chain variable domain of TCR clone 66772 (TRAV21, TRAJ52)
CAVRPSPAGGTSYGKLTF

SEQ ID NO: 133544 - protein, 15 aa, Homo sapiens
  CDR3 for beta chain variable domain of TCR clone 66772 (TRBV11-3, TRBJ2-3)
CASNGGLDSTDTQYF

SEQ ID NO: 133545 - protein, 14 aa, Homo sapiens
  CDR3 for alpha chain variable domain of TCR clone 66773 (TRAV12-1, TRAJ30)
CVVNIGNRDDKIIL

SEQ ID NO: 133546 - protein, 14 aa, Homo sapiens
  CDR3 for beta chain variable domain of TCR clone 66773 (TRBV7-9, TRBJ2-5)
CASSPRPSGETQYF

SEQ ID NO: 133547 - protein, 11 aa, Homo sapiens
  CDR3 for alpha chain variable domain of TCR clone 66774 (TRAV12-1, TRAJ15)
CVVNAGTALIF

SEQ ID NO: 133548 - protein, 14 aa, Homo sapiens
  CDR3 for beta chain variable domain of TCR clone 66774 (TRBV2, TRBJ2-1)
CASRTGSSYNEQFF

SEQ ID NO: 133549 - protein, 13 aa, Homo sapiens
  CDR3 for alpha chain variable domain of TCR clone 66775 (TRAV17, TRAJ4)
CATKSGGYNKLIF

SEQ ID NO: 133550 - protein, 14 aa, Homo sapiens
  CDR3 for beta chain variable domain of TCR clone 66775 (TRBV20-1, TRBJ1-5)
CSARDNRGNQPQHF

SEQ ID NO: 133551 - protein, 15 aa, Homo sapiens
  CDR3 for alpha chain variable domain of TCR clone 66776 (TRAV35, TRAJ50)
CAGQPRKTSYDKVIF

SEQ ID NO: 133552 - protein, 12 aa, Homo sapiens
  CDR3 for beta chain variable domain of TCR clone 66776 (TRBV5-1, TRBJ2-5)
CASSLGLETQYF

SEQ ID NO: 133553 - protein, 13 aa, Homo sapiens
  CDR3 for alpha chain variable domain of TCR clone 66777 (TRAV8-3, TRAJ28)
CAVGAVGSYQLTF

SEQ ID NO: 133554 - protein, 14 aa, Homo sapiens
  CDR3 for beta chain variable domain of TCR clone 66777 (TRBV7-6, TRBJ2-7)
CASSFRQGADEQYF

SEQ ID NO: 133555 - protein, 14 aa, Homo sapiens
  CDR3 for alpha chain variable domain of TCR clone 66778 (TRAV3, TRAJ6)
CAVRDSRRKLHTYL

SEQ ID NO: 133556 - protein, 15 aa, Homo sapiens
  CDR3 for beta chain variable domain of TCR clone 66778 (TRBV18, TRBJ2-7)
CASSPLQGRTYEQYF

SEQ ID NO: 133557 - protein, 17 aa, Homo sapiens
  CDR3 for alpha chain variable domain of TCR clone 66779 (TRAV26-2, TRAJ42)
CILRDVGYGGSQGNLIF

SEQ ID NO: 133558 - protein, 13 aa, Homo sapiens
  CDR3 for beta chain variable domain of TCR clone 66779 (TRBV7-9, TRBJ2-3)
CASSPRSTDTQYF

SEQ ID NO: 133559 - protein, 14 aa, Homo sapiens
  CDR3 for alpha chain variable domain of TCR clone 66780 (TRAV26-1, TRAJ15)
CIVRANQAGTALIF

SEQ ID NO: 133560 - protein, 16 aa, Homo sapiens
  CDR3 for beta chain variable domain of TCR clone 66780 (TRBV20-1, TRBJ1-4)
CSAIGGPWGANEKLFF

SEQ ID NO: 133561 - protein, 15 aa, Homo sapiens
  CDR3 for alpha chain variable domain of TCR clone 66781 (TRAV13-2, TRAJ45)
CAESDSGGGADGLTL

SEQ ID NO: 133562 - protein, 16 aa, Homo sapiens
  CDR3 for beta chain variable domain of TCR clone 66781 (TRBV11-2, TRBJ2-7)
CASSPTTGGVSYEQYF

SEQ ID NO: 133563 - protein, 14 aa, Homo sapiens
  CDR3 for alpha chain variable domain of TCR clone 66782 (TRAV12-3, TRAJ10)
SHLPLTGGGNKLTF

SEQ ID NO: 133564 - protein, 14 aa, Homo sapiens
  CDR3 for beta chain variable domain of TCR clone 66782 (TRBV7-2, TRBJ2-2)
LASSLNSNTGELFF

SEQ ID NO: 133565 - protein, 12 aa, Homo sapiens
  CDR3 for alpha chain variable domain of TCR clone 66783 (TRAV1-1, TRAJ12)
CAVGDSSYKLIF

SEQ ID NO: 133566 - protein, 14 aa, Homo sapiens
  CDR3 for beta chain variable domain of TCR clone 66783 (TRBV20-1, TRBJ2-7)
CSALELAGVGEQYF

SEQ ID NO: 133567 - protein, 17 aa, Homo sapiens
  CDR3 for alpha chain variable domain of TCR clone 66784 (TRAV3, TRAJ42)
CAVRDRDYGGSQGNLIF

SEQ ID NO: 133568 - protein, 17 aa, Homo sapiens
  CDR3 for beta chain variable domain of TCR clone 66784 (TRBV5-1, TRBJ2-5)
CASSLLGLAANQETQYF

SEQ ID NO: 133569 - protein, 15 aa, Homo sapiens
  CDR3 for alpha chain variable domain of TCR clone 66785 (TRAV17, TRAJ54)
CATEKLGQGAQKLVF

SEQ ID NO: 133570 - protein, 14 aa, Homo sapiens
  CDR3 for beta chain variable domain of TCR clone 66785 (TRBV7-3, TRBJ1-1)
CQQLRGQMKTEAFF

SEQ ID NO: 133571 - protein, 13 aa, Homo sapiens
  CDR3 for alpha chain variable domain of TCR clone 66786 (TRAV13-2, TRAJ53)
CAENMGSNYKLTF

SEQ ID NO: 133572 - protein, 13 aa, Homo sapiens
  CDR3 for beta chain variable domain of TCR clone 66786 (TRBV4-1, TRBJ1-1)
CASSRKMNTEAFF

SEQ ID NO: 133573 - protein, 15 aa, Homo sapiens
  CDR3 for alpha chain variable domain of TCR clone 66787 (TRAV23/DV6, TRAJ18)
CAARYRGSTLGRLYF

SEQ ID NO: 133574 - protein, 12 aa, Homo sapiens
  CDR3 for beta chain variable domain of TCR clone 66787 (TRBV11-2, TRBJ2-2)
CASSLGGGELFF

SEQ ID NO: 133575 - protein, 14 aa, Homo sapiens
  CDR3 for alpha chain variable domain of TCR clone 66788 (TRAV14/DV4, TRAJ49)
CAFNRYLTGNQFYF

SEQ ID NO: 133576 - protein, 13 aa, Homo sapiens
  CDR3 for beta chain variable domain of TCR clone 66788 (TRBV28, TRBJ1-2)
CAGRDRGNYGYTF

SEQ ID NO: 133577 - protein, 13 aa, Homo sapiens
  CDR3 for alpha chain variable domain of TCR clone 66789 (TRAV27, TRAJ49)
CAPRPYTGNQFYF

SEQ ID NO: 133578 - protein, 16 aa, Homo sapiens
  CDR3 for beta chain variable domain of TCR clone 66789 (TRBV4-1, TRBJ1-2)
CASGQDAGQVLYGYTF

SEQ ID NO: 133579 - protein, 12 aa, Homo sapiens
  CDR3 for alpha chain variable domain of TCR clone 66790 (TRAV8-3, TRAJ20)
CAVGANDYKLSF

SEQ ID NO: 133580 - protein, 15 aa, Homo sapiens
  CDR3 for beta chain variable domain of TCR clone 66790 (TRBV28, TRBJ2-4)
CAAGSGTLLMGIQYF

SEQ ID NO: 133581 - protein, 18 aa, Homo sapiens
  CDR3 for alpha chain variable domain of TCR clone 66791 (TRAV21, TRAJ52)
CAVRPSPAGGTSYGKLTF

SEQ ID NO: 133582 - protein, 14 aa, Homo sapiens
  CDR3 for beta chain variable domain of TCR clone 66791 (TRBV6-3, TRBJ1-1)
CASSYQRRDTEAFF

SEQ ID NO: 133583 - protein, 15 aa, Homo sapiens
  CDR3 for alpha chain variable domain of TCR clone 66792 (TRAV20, TRAJ50)
FAVRQMKTSYDKVIF

SEQ ID NO: 133584 - protein, 17 aa, Homo sapiens
  CDR3 for beta chain variable domain of TCR clone 66792 (TRBV28, TRBJ2-7)
CASSPLHRASGVYEQYF

SEQ ID NO: 133585 - protein, 13 aa, Homo sapiens
  CDR3 for alpha chain variable domain of TCR clone 66793 (TRAV26-2, TRAJ43)
FILRAVNNNDMRF

SEQ ID NO: 133586 - protein, 14 aa, Homo sapiens
  CDR3 for beta chain variable domain of TCR clone 66793 (TRBV19, TRBJ2-1)
CASPTFVLSGEQFF

SEQ ID NO: 133587 - protein, 12 aa, Homo sapiens
  CDR3 for alpha chain variable domain of TCR clone 66794 (TRAV29/DV5, TRAJ15)
CASNQAGTALIF

SEQ ID NO: 133588 - protein, 15 aa, Homo sapiens
  CDR3 for beta chain variable domain of TCR clone 66794 (TRBV11-2, TRBJ2-2)
CARSSDRVNAGELFF

SEQ ID NO: 133589 - protein, 13 aa, Homo sapiens
  CDR3 for alpha chain variable domain of TCR clone 66795 (TRAV12-1, TRAJ40)
CVVPTSGTYKYTF

SEQ ID NO: 133590 - protein, 14 aa, Homo sapiens
  CDR3 for beta chain variable domain of TCR clone 66795 (TRBV6-1, TRBJ1-3)
CASVQGGGGNTIYF

SEQ ID NO: 133591 - protein, 15 aa, Homo sapiens
  CDR3 for alpha chain variable domain of TCR clone 66796 (TRAV20, TRAJ6)
CAVRLKSGGSYIPTF

SEQ ID NO: 133592 - protein, 14 aa, Homo sapiens
  CDR3 for beta chain variable domain of TCR clone 66796 (TRBV12-4, TRBJ2-7)
CASSASGGWYEQYF

SEQ ID NO: 133593 - protein, 13 aa, Homo sapiens
  CDR3 for alpha chain variable domain of TCR clone 66797 (TRAV27, TRAJ49)
CAPRPYNGNQFYF

SEQ ID NO: 133594 - protein, 16 aa, Homo sapiens
  CDR3 for beta chain variable domain of TCR clone 66797 (TRBV4-1, TRBJ1-2)
CASSQDAGQVLYSYTF

SEQ ID NO: 133595 - protein, 17 aa, Homo sapiens
  CDR3 for alpha chain variable domain of TCR clone 66798 (TRAV3, TRAJ6)
CAVRDGPRAGGSYIPTF

SEQ ID NO: 133596 - protein, 12 aa, Homo sapiens
  CDR3 for beta chain variable domain of TCR clone 66798 (TRBV11-3, TRBJ1-1)
CASSHRQGEAFF

SEQ ID NO: 133597 - protein, 16 aa, Homo sapiens
  CDR3 for alpha chain variable domain of TCR clone 66799 (TRAV30, TRAJ24)
CGTEIVGADSWGKFQF

SEQ ID NO: 133598 - protein, 17 aa, Homo sapiens
  CDR3 for beta chain variable domain of TCR clone 66799 (TRBV20-1, TRBJ2-2)
CSASGSGQGGLTGELFF

SEQ ID NO: 133599 - protein, 18 aa, Homo sapiens
  CDR3 for alpha chain variable domain of TCR clone 66800 (TRAV26-1, TRAJ23)
CIVRVGLEVWNQGGKLIF

SEQ ID NO: 133600 - protein, 13 aa, Homo sapiens
  CDR3 for beta chain variable domain of TCR clone 66800 (TRBV20-1, TRBJ1-1)
CSARGGGNTEAFF

SEQ ID NO: 133601 - protein, 13 aa, Homo sapiens
  CDR3 for alpha chain variable domain of TCR clone 66801 (TRAV1-2, TRAJ9)
CAALNTGGFKTIF

SEQ ID NO: 133602 - protein, 13 aa, Homo sapiens
  CDR3 for beta chain variable domain of TCR clone 66801 (TRBV19, TRBJ1-2)
CAWSVPGQDGYTF

SEQ ID NO: 133603 - protein, 17 aa, Homo sapiens
  CDR3 for alpha chain variable domain of TCR clone 66802 (TRAV3, TRAJ42)
CAVRDRDYGGSQGNLIF

SEQ ID NO: 133604 - protein, 16 aa, Homo sapiens
  CDR3 for beta chain variable domain of TCR clone 66802 (TRBV5-7, TRBJ2-5)
CASTLAPAGGRETQYF

SEQ ID NO: 133605 - protein, 12 aa, Homo sapiens
  CDR3 for alpha chain variable domain of TCR clone 66803 (TRAV21, TRAJ13)
PGPSGGYQKVTF

SEQ ID NO: 133606 - protein, 15 aa, Homo sapiens
  CDR3 for beta chain variable domain of TCR clone 66803 (TRBV7-9, TRBJ1-6)
CAGSSPGRGNSPLHF

SEQ ID NO: 133607 - protein, 13 aa, Homo sapiens
  CDR3 for alpha chain variable domain of TCR clone 66804 (TRAV36/DV7, TRAJ37)
CAVFSSNTGKLIF

SEQ ID NO: 133608 - protein, 16 aa, Homo sapiens
  CDR3 for beta chain variable domain of TCR clone 66804 (TRBV11-2, TRBJ2-2)
CASSLRTGNLIGELFF

SEQ ID NO: 133609 - protein, 23 aa, Homo sapiens
  CDR3 for alpha chain variable domain of TCR clone 66805 (TRAV26-1, TRAJ38)
CIADNAGNNHIQNPDPPVYQLRD

SEQ ID NO: 133610 - protein, 12 aa, Homo sapiens
  CDR3 for beta chain variable domain of TCR clone 66805 (TRBV11-2, TRBJ2-2)
CASSLGGGELFF

SEQ ID NO: 133611 - protein, 10 aa, Homo sapiens
  CDR3 for alpha chain variable domain of TCR clone 66806 (TRAV13-1, TRAJ41)
CAVTGYALNF

SEQ ID NO: 133612 - protein, 15 aa, Homo sapiens
  CDR3 for beta chain variable domain of TCR clone 66806 (TRBV4-2, TRBJ2-1)
CASSQDVGLAGEQFF

SEQ ID NO: 133613 - protein, 15 aa, Homo sapiens
  CDR3 for alpha chain variable domain of TCR clone 66807 (TRAV27, TRAJ38)
CAARRNAGNNRKLIW

SEQ ID NO: 133614 - protein, 13 aa, Homo sapiens
  CDR3 for beta chain variable domain of TCR clone 66807 (TRBV28, TRBJ2-5)
CAGVSRGEETQYF

SEQ ID NO: 133615 - protein, 13 aa, Homo sapiens
  CDR3 for alpha chain variable domain of TCR clone 66808 (TRAV8-3, TRAJ4)
WVFYSGGYNKLIS

SEQ ID NO: 133616 - protein, 14 aa, Homo sapiens
  CDR3 for beta chain variable domain of TCR clone 66808 (TRBV7-9, TRBJ2-3)
CASSLEDGTDTQYF

SEQ ID NO: 133617 - protein, 13 aa, Homo sapiens
  CDR3 for alpha chain variable domain of TCR clone 66809 (TRAV21, TRAJ20)
CAVGLRVDYKPSF

SEQ ID NO: 133618 - protein, 15 aa, Homo sapiens
  CDR3 for beta chain variable domain of TCR clone 66809 (TRBV10-1, TRBJ2-3)
CASSATSGGFDTQYF

SEQ ID NO: 133619 - protein, 11 aa, Homo sapiens
  CDR3 for alpha chain variable domain of TCR clone 66810 (TRAV12-1, TRAJ21)
CVVNNFNKFYF

SEQ ID NO: 133620 - protein, 11 aa, Homo sapiens
  CDR3 for beta chain variable domain of TCR clone 66810 (TRBV10-3, TRBJ2-7)
CSISEGLEQYF

SEQ ID NO: 133621 - protein, 14 aa, Homo sapiens
  CDR3 for alpha chain variable domain of TCR clone 66811 (TRAV8-6, TRAJ17)
CAVRKKAAGNKLTF

SEQ ID NO: 133622 - protein, 17 aa, Homo sapiens
  CDR3 for beta chain variable domain of TCR clone 66811 (TRBV28, TRBJ2-5)
CASSRQGGLAGAETQYF

SEQ ID NO: 133623 - protein, 14 aa, Homo sapiens
  CDR3 for alpha chain variable domain of TCR clone 66812 (TRAV1-2, TRAJ8)
CAVREDTGFQKLVF

SEQ ID NO: 133624 - protein, 16 aa, Homo sapiens
  CDR3 for beta chain variable domain of TCR clone 66812 (TRBV12-5, TRBJ2-5)
CASGPRTSGKQETQYF

SEQ ID NO: 133625 - protein, 13 aa, Homo sapiens
  CDR3 for alpha chain variable domain of TCR clone 66813 (TRAV12-3, TRAJ7)
CAMTPYGNNRLAF

SEQ ID NO: 133626 - protein, 14 aa, Homo sapiens
  CDR3 for beta chain variable domain of TCR clone 66813 (TRBV5-1, TRBJ2-7)
CASSRGESLYEQYF

SEQ ID NO: 133627 - protein, 14 aa, Homo sapiens
  CDR3 for alpha chain variable domain of TCR clone 66814 (TRAV27, TRAJ21)
CAGVRQLQQILLLI

SEQ ID NO: 133628 - protein, 14 aa, Homo sapiens
  CDR3 for beta chain variable domain of TCR clone 66814 (TRBV7-9, TRBJ1-4)
CASSLEGQSEKLFF

SEQ ID NO: 133629 - protein, 19 aa, Homo sapiens
  CDR3 for alpha chain variable domain of TCR clone 66815 (TRAV26-1, TRAJ50)
CCVLLHRQNPKTSYDKVIF

SEQ ID NO: 133630 - protein, 13 aa, Homo sapiens
  CDR3 for beta chain variable domain of TCR clone 66815 (TRBV7-9, TRBJ1-2)
CASSLKQNYGYTF

SEQ ID NO: 133631 - protein, 15 aa, Homo sapiens
  CDR3 for alpha chain variable domain of TCR clone 66816 (TRAV12-1, TRAJ44)
CVVFVNTGTASKLTF

SEQ ID NO: 133632 - protein, 17 aa, Homo sapiens
  CDR3 for beta chain variable domain of TCR clone 66816 (TRBV7-8, TRBJ2-6)
CASSAGTGGAGSNVLTF

SEQ ID NO: 133633 - protein, 16 aa, Homo sapiens
  CDR3 for alpha chain variable domain of TCR clone 66817 (TRAV30, TRAJ24)
CGTEIVDADSWGKFQF

SEQ ID NO: 133634 - protein, 14 aa, Homo sapiens
  CDR3 for beta chain variable domain of TCR clone 66817 (TRBV19, TRBJ2-1)
CASPTVVLSGEQFF

SEQ ID NO: 133635 - protein, 10 aa, Homo sapiens
  CDR3 for alpha chain variable domain of TCR clone 66818 (TRAV26-1, TRAJ40)
CIAGTYKYIF

SEQ ID NO: 133636 - protein, 13 aa, Homo sapiens
  CDR3 for beta chain variable domain of TCR clone 66818 (TRBV10-3, TRBJ2-7)
CASKLAVNYEQYF

SEQ ID NO: 133637 - protein, 15 aa, Homo sapiens
  CDR3 for alpha chain variable domain of TCR clone 66819 (TRAV12-3, TRAJ6)
CAMSAASGGSYIPTF

SEQ ID NO: 133638 - protein, 13 aa, Homo sapiens
  CDR3 for beta chain variable domain of TCR clone 66819 (TRBV12-4, TRBJ2-5)
CASRLAVQETQYF

SEQ ID NO: 133639 - protein, 16 aa, Homo sapiens
  CDR3 for alpha chain variable domain of TCR clone 66820 (TRAV13-1, TRAJ10)
CAAGYILTGRGNKLTF

SEQ ID NO: 133640 - protein, 15 aa, Homo sapiens
  CDR3 for beta chain variable domain of TCR clone 66820 (TRBV12-4, TRBJ2-7)
CASSQTGAISYEQYF

SEQ ID NO: 133641 - protein, 16 aa, Homo sapiens
  CDR3 for alpha chain variable domain of TCR clone 66821 (TRAV27, TRAJ48)
TAAQPGDTGLYLPLTF

SEQ ID NO: 133642 - protein, 17 aa, Homo sapiens
  CDR3 for beta chain variable domain of TCR clone 66821 (TRBV13, TRBJ2-3)
CASSLSRVAGGRNTQYF

SEQ ID NO: 133643 - protein, 12 aa, Homo sapiens
  CDR3 for alpha chain variable domain of TCR clone 66822 (TRAV1-2, TRAJ29)
CAVPSGNTPLVF

SEQ ID NO: 133644 - protein, 14 aa, Homo sapiens
  CDR3 for beta chain variable domain of TCR clone 66822 (TRBV18, TRBJ2-5)
CASSPGVSQETQYL

SEQ ID NO: 133645 - protein, 16 aa, Homo sapiens
  CDR3 for alpha chain variable domain of TCR clone 66823 (TRAV3, TRAJ37)
CAVRGKGSGNTGKLIF

SEQ ID NO: 133646 - protein, 15 aa, Homo sapiens
  CDR3 for beta chain variable domain of TCR clone 66823 (TRBV7-2, TRBJ2-1)
CASSFQADEYNEQFF

SEQ ID NO: 133647 - protein, 13 aa, Homo sapiens
  CDR3 for alpha chain variable domain of TCR clone 66824 (TRAV20, TRAJ37)
CAGCSSNTGKLIF

SEQ ID NO: 133648 - protein, 15 aa, Homo sapiens
  CDR3 for beta chain variable domain of TCR clone 66824 (TRBV10-3, TRBJ2-3)
CAISLTSGGTDTQYF

SEQ ID NO: 133649 - protein, 16 aa, Homo sapiens
  CDR3 for alpha chain variable domain of TCR clone 66825 (TRAV14/DV4, TRAJ53)
CAMREGGGGSNYKLTF

SEQ ID NO: 133650 - protein, 16 aa, Homo sapiens
  CDR3 for beta chain variable domain of TCR clone 66825 (TRBV7-3, TRBJ2-2)
CASSLKRGTLSGELFF

SEQ ID NO: 133651 - protein, 14 aa, Homo sapiens
  CDR3 for alpha chain variable domain of TCR clone 66826 (TRAV12-3, TRAJ58)
CAMSTETSGSRLTF

SEQ ID NO: 133652 - protein, 16 aa, Homo sapiens
  CDR3 for beta chain variable domain of TCR clone 66826 (TRBV20-1, TRBJ1-4)
CSAPGQGLLTNEKLFF

SEQ ID NO: 133653 - protein, 15 aa, Homo sapiens
  CDR3 for alpha chain variable domain of TCR clone 66827 (TRAV27, TRAJ33)
CAGADIMDSNHQLIW

SEQ ID NO: 133654 - protein, 13 aa, Homo sapiens
  CDR3 for beta chain variable domain of TCR clone 66827 (TRBV28, TRBJ1-2)
CASSLQGRGGYTF

SEQ ID NO: 133655 - protein, 19 aa, Homo sapiens
  CDR3 for alpha chain variable domain of TCR clone 66828 (TRAV26-1, TRAJ42)
CVLLRRQTYYGGSQGNLIF

SEQ ID NO: 133656 - protein, 14 aa, Homo sapiens
  CDR3 for beta chain variable domain of TCR clone 66828 (TRBV11-2, TRBJ2-1)
CASSRATSYNEQFF

SEQ ID NO: 133657 - protein, 16 aa, Homo sapiens
  CDR3 for alpha chain variable domain of TCR clone 66829 (TRAV30, TRAJ24)
CGTEIVDADSWGKFQF

SEQ ID NO: 133658 - protein, 14 aa, Homo sapiens
  CDR3 for beta chain variable domain of TCR clone 66829 (TRBV11-1, TRBJ2-7)
CASTFAVPSYEQYF

SEQ ID NO: 133659 - protein, 17 aa, Homo sapiens
  CDR3 for alpha chain variable domain of TCR clone 66830 (TRAV38-2/DV8, TRAJ23)
CALSRKLIFGQGTELSV

SEQ ID NO: 133660 - protein, 17 aa, Homo sapiens
  CDR3 for beta chain variable domain of TCR clone 66830 (TRBV5-4, TRBJ2-1)
YASSSAGGRGPYNEQFF

SEQ ID NO: 133661 - protein, 20 aa, Homo sapiens
  CDR3 for alpha chain variable domain of TCR clone 66831 (TRAV14/DV4, TRAJ22)
CAMREGPFSISSGSARQLTF

SEQ ID NO: 133662 - protein, 12 aa, Homo sapiens
  CDR3 for beta chain variable domain of TCR clone 66831 (TRBV11-2, TRBJ2-1)
CASSPGNNEQFF

SEQ ID NO: 133663 - protein, 16 aa, Homo sapiens
  CDR3 for alpha chain variable domain of TCR clone 66832 (TRAV8-3, TRAJ44)
CAVGTLMTGTASKLTF

SEQ ID NO: 133664 - protein, 14 aa, Homo sapiens
  CDR3 for beta chain variable domain of TCR clone 66832 (TRBV27, TRBJ2-5)
CASSWREGLETQYF

SEQ ID NO: 133665 - protein, 14 aa, Homo sapiens
  CDR3 for alpha chain variable domain of TCR clone 66833 (TRAV13-1, TRAJ9)
CAASDLTGGFKTIF

SEQ ID NO: 133666 - protein, 13 aa, Homo sapiens
  CDR3 for beta chain variable domain of TCR clone 66833 (TRBV20-1, TRBJ1-1)
CSAGTVGNTEAFF

SEQ ID NO: 133667 - protein, 22 aa, Homo sapiens
  CDR3 for alpha chain variable domain of TCR clone 66834 (TRAV8-4, TRAJ32)
CAAYMVVLQTSSSLELALCLLS

SEQ ID NO: 133668 - protein, 16 aa, Homo sapiens
  CDR3 for beta chain variable domain of TCR clone 66834 (TRBV27, TRBJ2-2)
CASSPLAAANTGELFF

SEQ ID NO: 133669 - protein, 15 aa, Homo sapiens
  CDR3 for alpha chain variable domain of TCR clone 66835 (TRAV3, TRAJ45)
CAVRTPWGGADGLTF

SEQ ID NO: 133670 - protein, 15 aa, Homo sapiens
  CDR3 for beta chain variable domain of TCR clone 66835 (TRBV9, TRBJ1-6)
CASSVAGTGDSPLHF

SEQ ID NO: 133671 - protein, 13 aa, Homo sapiens
  CDR3 for alpha chain variable domain of TCR clone 66836 (TRAV26-1, TRAJ48)
CIVGVVGDEKLTF

SEQ ID NO: 133672 - protein, 19 aa, Homo sapiens
  CDR3 for beta chain variable domain of TCR clone 66836 (TRBV11-3, TRBJ2-2)
CASSTRPGAKTTNTGELFF

SEQ ID NO: 133673 - protein, 14 aa, Homo sapiens
  CDR3 for alpha chain variable domain of TCR clone 66837 (TRAV20, TRAJ29)
CAVQAWVGNTPLVF

SEQ ID NO: 133674 - protein, 14 aa, Homo sapiens
  CDR3 for beta chain variable domain of TCR clone 66837 (TRBV11-2, TRBJ2-3)
CASSRPARTDTQYF

SEQ ID NO: 133675 - protein, 12 aa, Homo sapiens
  CDR3 for alpha chain variable domain of TCR clone 66838 (TRAV12-3, TRAJ17)
CAMTLTGNKLTF

SEQ ID NO: 133676 - protein, 15 aa, Homo sapiens
  CDR3 for beta chain variable domain of TCR clone 66838 (TRBV11-3, TRBJ2-1)
CASSLGDSSHNEQFF

SEQ ID NO: 133677 - protein, 12 aa, Homo sapiens
  CDR3 for alpha chain variable domain of TCR clone 66839 (TRAV1-1, TRAJ39)
CAVPVVGNMLTF

SEQ ID NO: 133678 - protein, 17 aa, Homo sapiens
  CDR3 for beta chain variable domain of TCR clone 66839 (TRBV28, TRBJ2-5)
CASSAPEGDALQETQYF

SEQ ID NO: 133679 - protein, 18 aa, Homo sapiens
  CDR3 for alpha chain variable domain of TCR clone 66840 (TRAV13-1, TRAJ52)
CAADFPNAGGTSYGKLTF

SEQ ID NO: 133680 - protein, 14 aa, Homo sapiens
  CDR3 for beta chain variable domain of TCR clone 66840 (TRBV7-9, TRBJ2-5)
CASSLDTAQETQYF

SEQ ID NO: 133681 - protein, 15 aa, Homo sapiens
  CDR3 for alpha chain variable domain of TCR clone 66841 (TRAV12-3, TRAJ48)
CAMNAKNFGNEKLTF

SEQ ID NO: 133682 - protein, 14 aa, Homo sapiens
  CDR3 for beta chain variable domain of TCR clone 66841 (TRBV2, TRBJ1-6)
CTSSESRNNSPLHF

SEQ ID NO: 133683 - protein, 14 aa, Homo sapiens
  CDR3 for alpha chain variable domain of TCR clone 66842 (TRAV25, TRAJ35)
CARRMEGFWNVLHC

SEQ ID NO: 133684 - protein, 13 aa, Homo sapiens
  CDR3 for beta chain variable domain of TCR clone 66842 (TRBV7-2, TRBJ1-4)
CASSLAGLEKLFF

SEQ ID NO: 133685 - protein, 14 aa, Homo sapiens
  CDR3 for alpha chain variable domain of TCR clone 66843 (TRAV23/DV6, TRAJ4)
CAANLSGGYNNLIF

SEQ ID NO: 133686 - protein, 17 aa, Homo sapiens
  CDR3 for beta chain variable domain of TCR clone 66843 (TRBV4-1, TRBJ1-3)
CASSPQRGIRFGNTIYF

SEQ ID NO: 133687 - protein, 15 aa, Homo sapiens
  CDR3 for alpha chain variable domain of TCR clone 66844 (TRAV3, TRAJ22)
CAVRDRGGSARKLTF

SEQ ID NO: 133688 - protein, 14 aa, Homo sapiens
  CDR3 for beta chain variable domain of TCR clone 66844 (TRBV19, TRBJ2-1)
CASSRLASINEQFF

SEQ ID NO: 133689 - protein, 13 aa, Homo sapiens
  CDR3 for alpha chain variable domain of TCR clone 66845 (TRAV4, TRAJ37)
CLVGSGNTGRLIF

SEQ ID NO: 133690 - protein, 16 aa, Homo sapiens
  CDR3 for beta chain variable domain of TCR clone 66845 (TRBV11-3, TRBJ2-2)
CASSSRTSPGTGELFF

SEQ ID NO: 133691 - protein, 15 aa, Homo sapiens
  CDR3 for alpha chain variable domain of TCR clone 66846 (TRAV27, TRAJ38)
CAARRNAGNNHKLIW

SEQ ID NO: 133692 - protein, 13 aa, Homo sapiens
  CDR3 for beta chain variable domain of TCR clone 66846 (TRBV20-1, TRBJ1-1)
CSARGGGNTEAFF

SEQ ID NO: 133693 - protein, 10 aa, Homo sapiens
  CDR3 for alpha chain variable domain of TCR clone 66847 (TRAV5, TRAJ34)
CAEDTDKLIF

SEQ ID NO: 133694 - protein, 15 aa, Homo sapiens
  CDR3 for beta chain variable domain of TCR clone 66847 (TRBV11-2, TRBJ2-1)
CASSKNRGLIYEQFF

SEQ ID NO: 133695 - protein, 14 aa, Homo sapiens
  CDR3 for alpha chain variable domain of TCR clone 66848 (TRAV8-3, TRAJ39)
CAVGANNAGNMLTF

SEQ ID NO: 133696 - protein, 12 aa, Homo sapiens
  CDR3 for beta chain variable domain of TCR clone 66848 (TRBV24-1, TRBJ1-1)
CATLYPDTEAFF

SEQ ID NO: 133697 - protein, 14 aa, Homo sapiens
  CDR3 for alpha chain variable domain of TCR clone 66849 (TRAV17, TRAJ31)
CATVLRNNNARLMF

SEQ ID NO: 133698 - protein, 14 aa, Homo sapiens
  CDR3 for beta chain variable domain of TCR clone 66849 (TRBV12-4, TRBJ2-5)
CASSLWQKQKTQYF

SEQ ID NO: 133699 - protein, 16 aa, Homo sapiens
  CDR3 for alpha chain variable domain of TCR clone 66850 (TRAV17, TRAJ36)
CATVSLNWGKQPLLRD

SEQ ID NO: 133700 - protein, 13 aa, Homo sapiens
  CDR3 for beta chain variable domain of TCR clone 66850 (TRBV4-1, TRBJ1-1)
CASSQLGTGEAFF

SEQ ID NO: 133701 - protein, 21 aa, Homo sapiens
  CDR3 for alpha chain variable domain of TCR clone 66851 (TRAV36/DV7, TRAJ39)
TATQTGDSAIYLPNAGNMLTF

SEQ ID NO: 133702 - protein, 14 aa, Homo sapiens
  CDR3 for beta chain variable domain of TCR clone 66851 (TRBV11-2, TRBJ1-2)
CASSLGTANYGYTF

SEQ ID NO: 133703 - protein, 17 aa, Homo sapiens
  CDR3 for alpha chain variable domain of TCR clone 66852 (TRAV13-1, TRAJ52)
CAAGRNAGGTSYGKMTF

SEQ ID NO: 133704 - protein, 13 aa, Homo sapiens
  CDR3 for beta chain variable domain of TCR clone 66852 (TRBV7-2, TRBJ1-1)
CASNLKGAKVAFF

SEQ ID NO: 133705 - protein, 15 aa, Homo sapiens
  CDR3 for alpha chain variable domain of TCR clone 66853 (TRAV34, TRAJ38)
CGADFTPGNNRKLIW

SEQ ID NO: 133706 - protein, 14 aa, Homo sapiens
  CDR3 for beta chain variable domain of TCR clone 66853 (TRBV20-1, TRBJ2-5)
CSAHRQGLWETQYF

SEQ ID NO: 133707 - protein, 14 aa, Homo sapiens
  CDR3 for alpha chain variable domain of TCR clone 66854 (TRAV26-1, TRAJ44)
CIVRPTGTASKLTF

SEQ ID NO: 133708 - protein, 12 aa, Homo sapiens
  CDR3 for beta chain variable domain of TCR clone 66854 (TRBV11-3, TRBJ1-1)
CASSLRGSEAFF

SEQ ID NO: 133709 - protein, 14 aa, Homo sapiens
  CDR3 for alpha chain variable domain of TCR clone 66855 (TRAV12-2, TRAJ13)
WSVKKTGGYQKVTF

SEQ ID NO: 133710 - protein, 15 aa, Homo sapiens
  CDR3 for beta chain variable domain of TCR clone 66855 (TRBV27, TRBJ2-1)
CASSNGGGSSNEQFF

SEQ ID NO: 133711 - protein, 15 aa, Homo sapiens
  CDR3 for alpha chain variable domain of TCR clone 66856 (TRAV3, TRAJ7)
CAVRDKDNGSNRLAF

SEQ ID NO: 133712 - protein, 19 aa, Homo sapiens
  CDR3 for beta chain variable domain of TCR clone 66856 (TRBV5-8, TRBJ2-3)
CASSFLGTSGSHRTDTQYF

SEQ ID NO: 133713 - protein, 14 aa, Homo sapiens
  CDR3 for alpha chain variable domain of TCR clone 66857 (TRAV8-4, TRAJ17)
CAVSDQAAGNTLTF

SEQ ID NO: 133714 - protein, 15 aa, Homo sapiens
  CDR3 for beta chain variable domain of TCR clone 66857 (TRBV7-2, TRBJ1-2)
CASSLAPDRGLGYTF

SEQ ID NO: 133715 - protein, 16 aa, Homo sapiens
  CDR3 for alpha chain variable domain of TCR clone 66858 (TRAV21, TRAJ52)
CAVTNAGGTSYRKLTF

SEQ ID NO: 133716 - protein, 20 aa, Homo sapiens
  CDR3 for beta chain variable domain of TCR clone 66858 (TRBV7-8, TRBJ2-2)
CASSHLFPGPTIHITGELFF

SEQ ID NO: 133717 - protein, 14 aa, Homo sapiens
  CDR3 for alpha chain variable domain of TCR clone 66859 (TRAV12-1, TRAJ12)
CVVTRMDSSYKLMF

SEQ ID NO: 133718 - protein, 13 aa, Homo sapiens
  CDR3 for beta chain variable domain of TCR clone 66859 (TRBV20-1, TRBJ1-1)
CSARGGGNTEAFF

SEQ ID NO: 133719 - protein, 16 aa, Homo sapiens
  CDR3 for alpha chain variable domain of TCR clone 66860 (TRAV26-1, TRAJ3)
CRVLLHRQSSASKIIF

SEQ ID NO: 133720 - protein, 15 aa, Homo sapiens
  CDR3 for beta chain variable domain of TCR clone 66860 (TRBV3-1, TRBJ2-2)
CASSTTTGPTGELFF

SEQ ID NO: 133721 - protein, 11 aa, Homo sapiens
  CDR3 for alpha chain variable domain of TCR clone 66861 (TRAV13-1, TRAJ39)
CASHAGNMLTF

SEQ ID NO: 133722 - protein, 14 aa, Homo sapiens
  CDR3 for beta chain variable domain of TCR clone 66861 (TRBV12-4, TRBJ1-1)
YASSLGTGGTEAFF

SEQ ID NO: 133723 - protein, 11 aa, Homo sapiens
  CDR3 for alpha chain variable domain of TCR clone 66862 (TRAV2, TRAJ20)
CAVRNDYKLSF

SEQ ID NO: 133724 - protein, 14 aa, Homo sapiens
  CDR3 for beta chain variable domain of TCR clone 66862 (TRBV12-4, TRBJ2-3)
CASSLQSSTDTQYF

SEQ ID NO: 133725 - protein, 14 aa, Homo sapiens
  CDR3 for alpha chain variable domain of TCR clone 66863 (TRAV12-3, TRAJ9)
CAISVETGGFKTIF

SEQ ID NO: 133726 - protein, 14 aa, Homo sapiens
  CDR3 for beta chain variable domain of TCR clone 66863 (TRBV7-2, TRBJ2-7)
CASRSQGAAYEQYF

SEQ ID NO: 133727 - protein, 13 aa, Homo sapiens
  CDR3 for alpha chain variable domain of TCR clone 66864 (TRAV21, TRAJ27)
CAARPGNAGKSTF

SEQ ID NO: 133728 - protein, 13 aa, Homo sapiens
  CDR3 for beta chain variable domain of TCR clone 66864 (TRBV13, TRBJ2-1)
CASILGGLGEQFF

SEQ ID NO: 133729 - protein, 12 aa, Homo sapiens
  CDR3 for alpha chain variable domain of TCR clone 66865 (TRAV16, TRAJ26)
CAPEELWSEFCL

SEQ ID NO: 133730 - protein, 15 aa, Homo sapiens
  CDR3 for beta chain variable domain of TCR clone 66865 (TRBV7-2, TRBJ2-3)
CASSLTGTSTDTQYF

SEQ ID NO: 133731 - protein, 20 aa, Homo sapiens
  CDR3 for alpha chain variable domain of TCR clone 66866 (TRAV12-1, TRAJ42)
SSVIQPPTSVKGGSQGNLIF

SEQ ID NO: 133732 - protein, 18 aa, Homo sapiens
  CDR3 for beta chain variable domain of TCR clone 66866 (TRBV11-2, TRBJ2-3)
CASSLGGASRGAPKTQYF

SEQ ID NO: 133733 - protein, 12 aa, Homo sapiens
  CDR3 for alpha chain variable domain of TCR clone 66867 (TRAV8-3, TRAJ26)
CAGVNYGQNFVF

SEQ ID NO: 133734 - protein, 15 aa, Homo sapiens
  CDR3 for beta chain variable domain of TCR clone 66867 (TRBV9, TRBJ2-1)
CASSLAGSSYNEQFF

SEQ ID NO: 133735 - protein, 16 aa, Homo sapiens
  CDR3 for alpha chain variable domain of TCR clone 66868 (TRAV36/DV7, TRAJ30)
CAVETYGLDRDDKIIF

SEQ ID NO: 133736 - protein, 16 aa, Homo sapiens
  CDR3 for beta chain variable domain of TCR clone 66868 (TRBV11-2, TRBJ2-1)
CASARGSYSHHNEQFF

SEQ ID NO: 133737 - protein, 12 aa, Homo sapiens
  CDR3 for alpha chain variable domain of TCR clone 66869 (TRAV13-2, TRAJ8)
CAPWLGFQKLVF

SEQ ID NO: 133738 - protein, 13 aa, Homo sapiens
  CDR3 for beta chain variable domain of TCR clone 66869 (TRBV27, TRBJ1-1)
CASSLSIGAEAFF

SEQ ID NO: 133739 - protein, 17 aa, Homo sapiens
  CDR3 for alpha chain variable domain of TCR clone 66870 (TRAV3, TRAJ6)
CAVRDGPRAGGSYIPTF

SEQ ID NO: 133740 - protein, 14 aa, Homo sapiens
  CDR3 for beta chain variable domain of TCR clone 66870 (TRBV7-2, TRBJ1-3)
CASSRLRSGNTIYF

SEQ ID NO: 133741 - protein, 16 aa, Homo sapiens
  CDR3 for alpha chain variable domain of TCR clone 66871 (TRAV3, TRAJ37)
CAVRGKGSGNTGKLIF

SEQ ID NO: 133742 - protein, 20 aa, Homo sapiens
  CDR3 for beta chain variable domain of TCR clone 66871 (TRBV7-8, TRBJ2-2)
CASSHLFPGPTIHATGELFF

SEQ ID NO: 133743 - protein, 13 aa, Homo sapiens
  CDR3 for alpha chain variable domain of TCR clone 66872 (TRAV6, TRAJ20)
CALAVSTDYKLSF

SEQ ID NO: 133744 - protein, 16 aa, Homo sapiens
  CDR3 for beta chain variable domain of TCR clone 66872 (TRBV7-9, TRBJ2-1)
CASSDVAGGSYNEQFF

SEQ ID NO: 133745 - protein, 12 aa, Homo sapiens
  CDR3 for alpha chain variable domain of TCR clone 66873 (TRAV12-1, TRAJ40)
CVVYSGTYKYIF

SEQ ID NO: 133746 - protein, 18 aa, Homo sapiens
  CDR3 for beta chain variable domain of TCR clone 66873 (TRBV11-2, TRBJ2-3)
CASSLGGASRGTPNTQYF

SEQ ID NO: 133747 - protein, 14 aa, Homo sapiens
  CDR3 for alpha chain variable domain of TCR clone 66874 (TRAV17, TRAJ6)
CATDASGGSYIPTF

SEQ ID NO: 133748 - protein, 14 aa, Homo sapiens
  CDR3 for beta chain variable domain of TCR clone 66874 (TRBV25-1, TRBJ1-1)
CASTHLGGNTEAFF

SEQ ID NO: 133749 - protein, 11 aa, Homo sapiens
  CDR3 for alpha chain variable domain of TCR clone 66875 (TRAV2, TRAJ13)
CASGGYQKVTF

SEQ ID NO: 133750 - protein, 16 aa, Homo sapiens
  CDR3 for beta chain variable domain of TCR clone 66875 (TRBV7-2, TRBJ2-3)
CASSLARASGISTQYF

SEQ ID NO: 133751 - protein, 19 aa, Homo sapiens
  CDR3 for alpha chain variable domain of TCR clone 66876 (TRAV8-3, TRAJ8)
LSTSVLWDPMNTGFQNLVF

SEQ ID NO: 133752 - protein, 13 aa, Homo sapiens
  CDR3 for beta chain variable domain of TCR clone 66876 (TRBV10-2, TRBJ2-3)
CASSESGDHTQYF

SEQ ID NO: 133753 - protein, 12 aa, Homo sapiens
  CDR3 for alpha chain variable domain of TCR clone 66877 (TRAV12-3, TRAJ18)
CAMTLTGNKLTF

SEQ ID NO: 133754 - protein, 13 aa, Homo sapiens
  CDR3 for beta chain variable domain of TCR clone 66877 (TRBV7-2, TRBJ2-7)
CASSSPSGSEQYF

SEQ ID NO: 133755 - protein, 14 aa, Homo sapiens
  CDR3 for alpha chain variable domain of TCR clone 66878 (TRAV1-2, TRAJ8)
CAVREDTGFQKLVF

SEQ ID NO: 133756 - protein, 16 aa, Homo sapiens
  CDR3 for beta chain variable domain of TCR clone 66878 (TRBV7-9, TRBJ2-1)
CASIDVAGGSYNEQFF

SEQ ID NO: 133757 - protein, 16 aa, Homo sapiens
  CDR3 for alpha chain variable domain of TCR clone 66879 (TRAV30, TRAJ24)
CGTEIVDADSWGKFQF

SEQ ID NO: 133758 - protein, 13 aa, Homo sapiens
  CDR3 for beta chain variable domain of TCR clone 66879 (TRBV5-4, TRBJ1-1)
CASSVDLGTEAFF

SEQ ID NO: 133759 - protein, 14 aa, Homo sapiens
  CDR3 for alpha chain variable domain of TCR clone 66880 (TRAV14/DV4, TRAJ15)
CAMRRYQAGTALIF

SEQ ID NO: 133760 - protein, 16 aa, Homo sapiens
  CDR3 for beta chain variable domain of TCR clone 66880 (TRBV15, TRBJ2-3)
CATSRDLGIVTDTQYF

SEQ ID NO: 133761 - protein, 16 aa, Homo sapiens
  CDR3 for alpha chain variable domain of TCR clone 66881 (TRAV3, TRAJ5)
CAVRNLMDTGRRALTF

SEQ ID NO: 133762 - protein, 16 aa, Homo sapiens
  CDR3 for beta chain variable domain of TCR clone 66881 (TRBV4-2, TRBJ2-7)
CASSQEGLENSYEQYF

SEQ ID NO: 133763 - protein, 16 aa, Homo sapiens
  CDR3 for alpha chain variable domain of TCR clone 66882 (TRAV1-2, TRAJ10)
CAVRGVLTGGGNKLTF

SEQ ID NO: 133764 - protein, 13 aa, Homo sapiens
  CDR3 for beta chain variable domain of TCR clone 66882 (TRBV20-1, TRBJ1-1)
CSAGTVGNTEALF

SEQ ID NO: 133765 - protein, 13 aa, Homo sapiens
  CDR3 for alpha chain variable domain of TCR clone 66883 (TRAV21, TRAJ36)
CAVIKTGANNLFF

SEQ ID NO: 133766 - protein, 17 aa, Homo sapiens
  CDR3 for beta chain variable domain of TCR clone 66883 (TRBV20-1, TRBJ2-1)
CSASSSGLAGSYNEQFF

SEQ ID NO: 133767 - protein, 15 aa, Homo sapiens
  CDR3 for alpha chain variable domain of TCR clone 66884 (TRAV38-1, TRAJ37)
CAFIHGSGNTGKLIF

SEQ ID NO: 133768 - protein, 17 aa, Homo sapiens
  CDR3 for beta chain variable domain of TCR clone 66884 (TRBV11-2, TRBJ2-1)
CASSLYPPGVEYNEQFF

SEQ ID NO: 133769 - protein, 11 aa, Homo sapiens
  CDR3 for alpha chain variable domain of TCR clone 66885 (TRAV4, TRAJ31)
YLVGDNARLMF

SEQ ID NO: 133770 - protein, 16 aa, Homo sapiens
  CDR3 for beta chain variable domain of TCR clone 66885 (TRBV7-2, TRBJ2-5)
CASSSKWLSGQETQYF

SEQ ID NO: 133771 - protein, 16 aa, Homo sapiens
  CDR3 for alpha chain variable domain of TCR clone 66886 (TRAV30, TRAJ24)
CGTEIVDADSWGKFQF

SEQ ID NO: 133772 - protein, 16 aa, Homo sapiens
  CDR3 for beta chain variable domain of TCR clone 66886 (TRBV27, TRBJ2-1)
CASSLTTSGLFDEQFF

SEQ ID NO: 133773 - protein, 14 aa, Homo sapiens
  CDR3 for alpha chain variable domain of TCR clone 66887 (TRAV20, TRAJ42)
CAVQAGGSQGNLIF

SEQ ID NO: 133774 - protein, 14 aa, Homo sapiens
  CDR3 for beta chain variable domain of TCR clone 66887 (TRBV20-1, TRBJ2-1)
CSAQIGGSANEQFF

SEQ ID NO: 133775 - protein, 17 aa, Homo sapiens
  CDR3 for alpha chain variable domain of TCR clone 66888 (TRAV3, TRAJ6)
CAVRDGPRAGGSYIPTF

SEQ ID NO: 133776 - protein, 14 aa, Homo sapiens
  CDR3 for beta chain variable domain of TCR clone 66888 (TRBV7-2, TRBJ2-7)
CASNPKTSFYGQYF

SEQ ID NO: 133777 - protein, 16 aa, Homo sapiens
  CDR3 for alpha chain variable domain of TCR clone 66889 (TRAV30, TRAJ24)
CGTEIVDADSWGKFQF

SEQ ID NO: 133778 - protein, 15 aa, Homo sapiens
  CDR3 for beta chain variable domain of TCR clone 66889 (TRBV20-1, TRBJ1-5)
CSAREGGYSNQPQHF

SEQ ID NO: 133779 - protein, 15 aa, Homo sapiens
  CDR3 for alpha chain variable domain of TCR clone 66890 (TRAV12-2, TRAJ53)
CAVNGGGGSNYKLTF

SEQ ID NO: 133780 - protein, 13 aa, Homo sapiens
  CDR3 for beta chain variable domain of TCR clone 66890 (TRBV27, TRBJ1-1)
CASSLSIGAEAFF

SEQ ID NO: 133781 - protein, 15 aa, Homo sapiens
  CDR3 for alpha chain variable domain of TCR clone 66891 (TRAV23/DV6, TRAJ33)
CAASNSGGGNCQLIW

SEQ ID NO: 133782 - protein, 12 aa, Homo sapiens
  CDR3 for beta chain variable domain of TCR clone 66891 (TRBV7-3, TRBJ2-1)
CASSFINNEQFF

SEQ ID NO: 133783 - protein, 14 aa, Homo sapiens
  CDR3 for alpha chain variable domain of TCR clone 66892 (TRAV8-2, TRAJ37)
CVVSISGKTGKLIF

SEQ ID NO: 133784 - protein, 11 aa, Homo sapiens
  CDR3 for beta chain variable domain of TCR clone 66892 (TRBV18, TRBJ2-5)
CASSPRETQYF

SEQ ID NO: 133785 - protein, 13 aa, Homo sapiens
  CDR3 for alpha chain variable domain of TCR clone 66893 (TRAV21, TRAJ27)
CAALPGNAGKSTF

SEQ ID NO: 133786 - protein, 14 aa, Homo sapiens
  CDR3 for beta chain variable domain of TCR clone 66893 (TRBV7-9, TRBJ2-5)
CASSLDTAQETQYF

SEQ ID NO: 133787 - protein, 11 aa, Homo sapiens
  CDR3 for alpha chain variable domain of TCR clone 66894 (TRAV1-1, TRAJ23)
CAVRQGGKFIF

SEQ ID NO: 133788 - protein, 20 aa, Homo sapiens
  CDR3 for beta chain variable domain of TCR clone 66894 (TRBV7-8, TRBJ2-2)
CASSHLFPGPTVHITGELFF

SEQ ID NO: 133789 - protein, 14 aa, Homo sapiens
  CDR3 for alpha chain variable domain of TCR clone 66895 (TRAV8-2, TRAJ4)
CVVSPSGGYNKLIF

SEQ ID NO: 133790 - protein, 15 aa, Homo sapiens
  CDR3 for beta chain variable domain of TCR clone 66895 (TRBV4-1, TRBJ1-4)
CASSDTGGTDGKLFF

SEQ ID NO: 133791 - protein, 14 aa, Homo sapiens
  CDR3 for alpha chain variable domain of TCR clone 66896 (TRAV3, TRAJ9)
CAVRLNTGGFKTIF

SEQ ID NO: 133792 - protein, 15 aa, Homo sapiens
  CDR3 for beta chain variable domain of TCR clone 66896 (TRBV7-2, TRBJ2-1)
CASRLASGRVDEQFF

SEQ ID NO: 133793 - protein, 17 aa, Homo sapiens
  CDR3 for alpha chain variable domain of TCR clone 66897 (TRAV3, TRAJ42)
CAVRDRDYGGSQGNLIF

SEQ ID NO: 133794 - protein, 17 aa, Homo sapiens
  CDR3 for beta chain variable domain of TCR clone 66897 (TRBV7-9, TRBJ2-3)
CASSPTVAGDLTGTQYF

SEQ ID NO: 133795 - protein, 10 aa, Homo sapiens
  CDR3 for alpha chain variable domain of TCR clone 66898 (TRAV21, TRAJ24)
CAVDNARLMF

SEQ ID NO: 133796 - protein, 13 aa, Homo sapiens
  CDR3 for beta chain variable domain of TCR clone 66898 (TRBV18, TRBJ1-2)
CASSASATEGYTF

SEQ ID NO: 133797 - protein, 14 aa, Homo sapiens
  CDR3 for alpha chain variable domain of TCR clone 66899 (TRAV8-1, TRAJ49)
CASSIANTGNQFYF

SEQ ID NO: 133798 - protein, 17 aa, Homo sapiens
  CDR3 for beta chain variable domain of TCR clone 66899 (TRBV7-3, TRBJ2-3)
CASSLMKRMRGADTQYF

SEQ ID NO: 133799 - protein, 17 aa, Homo sapiens
  CDR3 for alpha chain variable domain of TCR clone 66900 (TRAV3, TRAJ42)
CAVRDRDYGGSQGKLIF

SEQ ID NO: 133800 - protein, 14 aa, Homo sapiens
  CDR3 for beta chain variable domain of TCR clone 66900 (TRBV7-2, TRBJ2-5)
CASSPRGSSETQYF

SEQ ID NO: 133801 - protein, 17 aa, Homo sapiens
  CDR3 for alpha chain variable domain of TCR clone 66901 (TRAV3, TRAJ6)
CAARDGPRAGGSYIPTF

SEQ ID NO: 133802 - protein, 14 aa, Homo sapiens
  CDR3 for beta chain variable domain of TCR clone 66901 (TRBV11-2, TRBJ2-3)
CASSRLARTDTQYF

SEQ ID NO: 133803 - protein, 12 aa, Homo sapiens
  CDR3 for alpha chain variable domain of TCR clone 66902 (TRAV25, TRAJ29)
CAGHSGNTPLVF

SEQ ID NO: 133804 - protein, 16 aa, Homo sapiens
  CDR3 for beta chain variable domain of TCR clone 66902 (TRBV2, TRBJ2-3)
CASSTSVEGVTDTQYF

SEQ ID NO: 133805 - protein, 12 aa, Homo sapiens
  CDR3 for alpha chain variable domain of TCR clone 66903 (TRAV13-1, TRAJ9)
CASHTGGFKTII

SEQ ID NO: 133806 - protein, 13 aa, Homo sapiens
  CDR3 for beta chain variable domain of TCR clone 66903 (TRBV12-4, TRBJ1-2)
CASSSGSKDGYTF

SEQ ID NO: 133807 - protein, 12 aa, Homo sapiens
  CDR3 for alpha chain variable domain of TCR clone 66904 (TRAV12-3, TRAJ17)
CAMTLTGNKLTF

SEQ ID NO: 133808 - protein, 15 aa, Homo sapiens
  CDR3 for beta chain variable domain of TCR clone 66904 (TRBV11-3, TRBJ2-2)
CASSSDRVNAGELFF

SEQ ID NO: 133809 - protein, 13 aa, Homo sapiens
  CDR3 for alpha chain variable domain of TCR clone 66905 (TRAV1-1, TRAJ9)
CAAKNTGGFKSIF

SEQ ID NO: 133810 - protein, 14 aa, Homo sapiens
  CDR3 for beta chain variable domain of TCR clone 66905 (TRBV20-1, TRBJ2-1)
CSAQIGGSANEQFF

SEQ ID NO: 133811 - protein, 13 aa, Homo sapiens
  CDR3 for alpha chain variable domain of TCR clone 66906 (TRAV26-1, TRAJ34)
CIVRPWITDKLIF

SEQ ID NO: 133812 - protein, 13 aa, Homo sapiens
  CDR3 for beta chain variable domain of TCR clone 66906 (TRBV7-7, TRBJ2-3)
CASSLSRADTQYF

SEQ ID NO: 133813 - protein, 14 aa, Homo sapiens
  CDR3 for alpha chain variable domain of TCR clone 66907 (TRAV1-1, TRAJ27)
CAVIYNTNAGKSTF

SEQ ID NO: 133814 - protein, 12 aa, Homo sapiens
  CDR3 for beta chain variable domain of TCR clone 66907 (TRBV11-2, TRBJ2-4)
CASSSASGSEYF

SEQ ID NO: 133815 - protein, 15 aa, Homo sapiens
  CDR3 for alpha chain variable domain of TCR clone 66908 (TRAV26-1, TRAJ22)
CIVRVSFWFCKATDL

SEQ ID NO: 133816 - protein, 13 aa, Homo sapiens
  CDR3 for beta chain variable domain of TCR clone 66908 (TRBV7-9, TRBJ1-2)
CASILKQNYGYTF

SEQ ID NO: 133817 - protein, 14 aa, Homo sapiens
  CDR3 for alpha chain variable domain of TCR clone 66909 (TRAV35, TRAJ38)
CAGSNAGNNRKRIW

SEQ ID NO: 133818 - protein, 12 aa, Homo sapiens
  CDR3 for beta chain variable domain of TCR clone 66909 (TRBV19, TRBJ2-7)
CASTDRGYEQYF

SEQ ID NO: 133819 - protein, 15 aa, Homo sapiens
  CDR3 for alpha chain variable domain of TCR clone 66910 (TRAV35, TRAJ40)
CAGQLGTSGTYKYIF

SEQ ID NO: 133820 - protein, 14 aa, Homo sapiens
  CDR3 for beta chain variable domain of TCR clone 66910 (TRBV7-3, TRBJ2-1)
CASSLEGGTNEQFF

SEQ ID NO: 133821 - protein, 13 aa, Homo sapiens
  CDR3 for alpha chain variable domain of TCR clone 66911 (TRAV17, TRAJ23)
CATGPSQGGKLIF

SEQ ID NO: 133822 - protein, 20 aa, Homo sapiens
  CDR3 for beta chain variable domain of TCR clone 66911 (TRBV7-8, TRBJ2-2)
CASSHLFPGPTIHITGELFF

SEQ ID NO: 133823 - protein, 15 aa, Homo sapiens
  CDR3 for alpha chain variable domain of TCR clone 66912 (TRAV25, TRAJ52)
CAGRPGVTSYGKLTF

SEQ ID NO: 133824 - protein, 17 aa, Homo sapiens
  CDR3 for beta chain variable domain of TCR clone 66912 (TRBV7-8, TRBJ2-6)
CASSAGTGGAGANVLTF

SEQ ID NO: 133825 - protein, 23 aa, Homo sapiens
  CDR3 for alpha chain variable domain of TCR clone 66913 (TRAV26-1, TRAJ38)
CIADNAGNNHIQSPDPAVYQLRD

SEQ ID NO: 133826 - protein, 12 aa, Homo sapiens
  CDR3 for beta chain variable domain of TCR clone 66913 (TRBV11-2, TRBJ2-2)
CASSLGGGELFF

SEQ ID NO: 133827 - protein, 12 aa, Homo sapiens
  CDR3 for alpha chain variable domain of TCR clone 66914 (TRAV17, TRAJ20)
CATDSNDYKLSF

SEQ ID NO: 133828 - protein, 16 aa, Homo sapiens
  CDR3 for beta chain variable domain of TCR clone 66914 (TRBV7-2, TRBJ1-2)
CASSSNQDRRGHGYTV

SEQ ID NO: 133829 - protein, 12 aa, Homo sapiens
  CDR3 for alpha chain variable domain of TCR clone 66915 (TRAV13-1, TRAJ21)
CAAKEGFNKFYF

SEQ ID NO: 133830 - protein, 15 aa, Homo sapiens
  CDR3 for beta chain variable domain of TCR clone 66915 (TRBV15, TRBJ1-5)
CATSRDPVSNQTQHF

SEQ ID NO: 133831 - protein, 13 aa, Homo sapiens
  CDR3 for alpha chain variable domain of TCR clone 66916 (TRAV27, TRAJ40)
CAGVLASAYKYIF

SEQ ID NO: 133832 - protein, 16 aa, Homo sapiens
  CDR3 for beta chain variable domain of TCR clone 66916 (TRBV11-3, TRBJ2-3)
CASSSISGAGTDTQYF

SEQ ID NO: 133833 - protein, 16 aa, Homo sapiens
  CDR3 for alpha chain variable domain of TCR clone 66917 (TRAV13-1, TRAJ37)
CAASSLGSSNTGKLIF

SEQ ID NO: 133834 - protein, 12 aa, Homo sapiens
  CDR3 for beta chain variable domain of TCR clone 66917 (TRBV6-1, TRBJ2-5)
CASIEGRETQYF

SEQ ID NO: 133835 - protein, 12 aa, Homo sapiens
  CDR3 for alpha chain variable domain of TCR clone 66918 (TRAV13-1, TRAJ15)
CAASQAGTALIF

SEQ ID NO: 133836 - protein, 17 aa, Homo sapiens
  CDR3 for beta chain variable domain of TCR clone 66918 (TRBV19, TRBJ2-7)
CASSISFYDSYPYEQYF

SEQ ID NO: 133837 - protein, 15 aa, Homo sapiens
  CDR3 for alpha chain variable domain of TCR clone 66919 (TRAV38-1, TRAJ37)
CAFIHGSGNTGKLIF

SEQ ID NO: 133838 - protein, 16 aa, Homo sapiens
  CDR3 for beta chain variable domain of TCR clone 66919 (TRBV7-2, TRBJ2-5)
CASSSKWLSGQETQYF

SEQ ID NO: 133839 - protein, 14 aa, Homo sapiens
  CDR3 for alpha chain variable domain of TCR clone 66920 (TRAV26-1, TRAJ38)
CIADNAGNNRKLIW

SEQ ID NO: 133840 - protein, 11 aa, Homo sapiens
  CDR3 for beta chain variable domain of TCR clone 66920 (TRBV12-4, TRBJ2-3)
CASTATDTQYF

SEQ ID NO: 133841 - protein, 13 aa, Homo sapiens
  CDR3 for alpha chain variable domain of TCR clone 66921 (TRAV12-1, TRAJ42)
TSVKGGSQGNLIF

SEQ ID NO: 133842 - protein, 18 aa, Homo sapiens
  CDR3 for beta chain variable domain of TCR clone 66921 (TRBV11-2, TRBJ2-3)
CASSLGGASRGAPNTQYF

SEQ ID NO: 133843 - protein, 14 aa, Homo sapiens
  CDR3 for alpha chain variable domain of TCR clone 66922 (TRAV1-2, TRAJ16)
CAVKRFSDGQKLLF

SEQ ID NO: 133844 - protein, 15 aa, Homo sapiens
  CDR3 for beta chain variable domain of TCR clone 66922 (TRBV9, TRBJ1-6)
RASSVAGTGDSPLHF

SEQ ID NO: 133845 - protein, 15 aa, Homo sapiens
  CDR3 for alpha chain variable domain of TCR clone 66923 (TRAV36/DV7, TRAJ54)
CAVEKPVQGAQKLVF

SEQ ID NO: 133846 - protein, 14 aa, Homo sapiens
  CDR3 for beta chain variable domain of TCR clone 66923 (TRBV4-3, TRBJ2-2)
CASSQGHVTGELSF

SEQ ID NO: 133847 - protein, 12 aa, Homo sapiens
  CDR3 for alpha chain variable domain of TCR clone 66924 (TRAV17, TRAJ20)
CATGSNDYKLSF

SEQ ID NO: 133848 - protein, 16 aa, Homo sapiens
  CDR3 for beta chain variable domain of TCR clone 66924 (TRBV7-2, TRBJ1-2)
CASSSNQDRRGHGYTF

SEQ ID NO: 133849 - protein, 12 aa, Homo sapiens
  CDR3 for alpha chain variable domain of TCR clone 66925 (TRAV2, TRAJ24)
CAATDSWGKFQF

SEQ ID NO: 133850 - protein, 13 aa, Homo sapiens
  CDR3 for beta chain variable domain of TCR clone 66925 (TRBV5-8, TRBJ1-1)
CACSLGGGTEAFF

SEQ ID NO: 133851 - protein, 11 aa, Homo sapiens
  CDR3 for alpha chain variable domain of TCR clone 66926 (TRAV8-3, TRAJ18)
CAVGGRQRLDP

SEQ ID NO: 133852 - protein, 12 aa, Homo sapiens
  CDR3 for beta chain variable domain of TCR clone 66926 (TRBV28, TRBJ2-6)
CAIQAGANVLTF

SEQ ID NO: 133853 - protein, 13 aa, Homo sapiens
  CDR3 for alpha chain variable domain of TCR clone 66927 (TRAV3, TRAJ15)
CAVRDQAGTALIF

SEQ ID NO: 133854 - protein, 15 aa, Homo sapiens
  CDR3 for beta chain variable domain of TCR clone 66927 (TRBV11-1, TRBJ2-7)
CASSLNYGAPYEQYF

SEQ ID NO: 133855 - protein, 13 aa, Homo sapiens
  CDR3 for alpha chain variable domain of TCR clone 66928 (TRAV8-4, TRAJ29)
CAVSATGNTPLVF

SEQ ID NO: 133856 - protein, 14 aa, Homo sapiens
  CDR3 for beta chain variable domain of TCR clone 66928 (TRBV25-1, TRBJ1-1)
CASTHLGGNTEAFF

SEQ ID NO: 133857 - protein, 13 aa, Homo sapiens
  CDR3 for alpha chain variable domain of TCR clone 66929 (TRAV8-4, TRAJ9)
CAVSETGGFKTIF

SEQ ID NO: 133858 - protein, 13 aa, Homo sapiens
  CDR3 for beta chain variable domain of TCR clone 66929 (TRBV7-9, TRBJ2-7)
CASSFAGAYEQYF

SEQ ID NO: 133859 - protein, 14 aa, Homo sapiens
  CDR3 for alpha chain variable domain of TCR clone 66930 (TRAV12-3, TRAJ10)
SHLPLTGGGNKLTF

SEQ ID NO: 133860 - protein, 16 aa, Homo sapiens
  CDR3 for beta chain variable domain of TCR clone 66930 (TRBV12-5, TRBJ2-5)
CTSGPRTSGNQETQYF

SEQ ID NO: 133861 - protein, 16 aa, Homo sapiens
  CDR3 for alpha chain variable domain of TCR clone 66931 (TRAV16, TRAJ57)
CSPYLITQGGSEKLVF

SEQ ID NO: 133862 - protein, 17 aa, Homo sapiens
  CDR3 for beta chain variable domain of TCR clone 66931 (TRBV24-1, TRBJ2-4)
CATSDAEARGVRNIQYF

SEQ ID NO: 133863 - protein, 16 aa, Homo sapiens
  CDR3 for alpha chain variable domain of TCR clone 66932 (TRAV30, TRAJ24)
CGTEIVDADSWGKFQF

SEQ ID NO: 133864 - protein, 15 aa, Homo sapiens
  CDR3 for beta chain variable domain of TCR clone 66932 (TRBV7-8, TRBJ2-7)
CASSLERAGSYEQYF

SEQ ID NO: 133865 - protein, 17 aa, Homo sapiens
  CDR3 for alpha chain variable domain of TCR clone 66933 (TRAV13-1, TRAJ28)
CAASPPYSGAGSYQLTF

SEQ ID NO: 133866 - protein, 19 aa, Homo sapiens
  CDR3 for beta chain variable domain of TCR clone 66933 (TRBV25-1, TRBJ2-2)
CAILVYRVDRGRKIGELFF

SEQ ID NO: 133867 - protein, 13 aa, Homo sapiens
  CDR3 for alpha chain variable domain of TCR clone 66934 (TRAV30, TRAJ49)
CGTEPNTGNQFYF

SEQ ID NO: 133868 - protein, 14 aa, Homo sapiens
  CDR3 for beta chain variable domain of TCR clone 66934 (TRBV29-1, TRBJ2-1)
CSVEFRGIPCEQFF

SEQ ID NO: 133869 - protein, 12 aa, Homo sapiens
  CDR3 for alpha chain variable domain of TCR clone 66935 (TRAV13-1, TRAJ21)
CAAKEGFNKFYF

SEQ ID NO: 133870 - protein, 11 aa, Homo sapiens
  CDR3 for beta chain variable domain of TCR clone 66935 (TRBV7-9, TRBJ2-5)
CASSLGETQYF

SEQ ID NO: 133871 - protein, 15 aa, Homo sapiens
  CDR3 for alpha chain variable domain of TCR clone 66936 (TRAV1-2, TRAJ24)
CAVRGSTDNWGKFQF

SEQ ID NO: 133872 - protein, 16 aa, Homo sapiens
  CDR3 for beta chain variable domain of TCR clone 66936 (TRBV20-1, TRBJ2-1)
CSAATQGPVSYNEQFF

SEQ ID NO: 133873 - protein, 14 aa, Homo sapiens
  CDR3 for alpha chain variable domain of TCR clone 66937 (TRAV27, TRAJ23)
CAGLSYNQGGKRIF

SEQ ID NO: 133874 - protein, 15 aa, Homo sapiens
  CDR3 for beta chain variable domain of TCR clone 66937 (TRBV20-1, TRBJ2-7)
CSARDRVSGMDEQYF

SEQ ID NO: 133875 - protein, 15 aa, Homo sapiens
  CDR3 for alpha chain variable domain of TCR clone 66938 (TRAV26-1, TRAJ56)
CIVRVATGANSKLTF

SEQ ID NO: 133876 - protein, 15 aa, Homo sapiens
  CDR3 for beta chain variable domain of TCR clone 66938 (TRBV27, TRBJ2-7)
CASSPQREGQRGQYF

SEQ ID NO: 133877 - protein, 14 aa, Homo sapiens
  CDR3 for alpha chain variable domain of TCR clone 66939 (TRAV17, TRAJ31)
CATVLRNNNARLRF

SEQ ID NO: 133878 - protein, 14 aa, Homo sapiens
  CDR3 for beta chain variable domain of TCR clone 66939 (TRBV12-4, TRBJ2-5)
CASSLWQKQETQYF

SEQ ID NO: 133879 - protein, 14 aa, Homo sapiens
  CDR3 for alpha chain variable domain of TCR clone 66940 (TRAV1-2, TRAJ8)
CAVREYTGFQKLVF

SEQ ID NO: 133880 - protein, 12 aa, Homo sapiens
  CDR3 for beta chain variable domain of TCR clone 66940 (TRBV7-8, TRBJ2-7)
CASSLGDREQYF

SEQ ID NO: 133881 - protein, 12 aa, Homo sapiens
  CDR3 for alpha chain variable domain of TCR clone 66941 (TRAV12-3, TRAJ17)
CAMTLTGNKLTF

SEQ ID NO: 133882 - protein, 16 aa, Homo sapiens
  CDR3 for beta chain variable domain of TCR clone 66941 (TRBV11-3, TRBJ2-3)
CASSSGSGGGTDTQYF

SEQ ID NO: 133883 - protein, 16 aa, Homo sapiens
  CDR3 for alpha chain variable domain of TCR clone 66942 (TRAV16, TRAJ26)
CALSGSEFCLWSRNQF

SEQ ID NO: 133884 - protein, 12 aa, Homo sapiens
  CDR3 for beta chain variable domain of TCR clone 66942 (TRBV11-2, TRBJ2-1)
CASSPGNNEQFF

SEQ ID NO: 133885 - protein, 13 aa, Homo sapiens
  CDR3 for alpha chain variable domain of TCR clone 66943 (TRAV20, TRAJ37)
CAGCSSNTGKLIF

SEQ ID NO: 133886 - protein, 12 aa, Homo sapiens
  CDR3 for beta chain variable domain of TCR clone 66943 (TRBV11-2, TRBJ2-2)
CASSLPTGELFF

SEQ ID NO: 133887 - protein, 14 aa, Homo sapiens
  CDR3 for alpha chain variable domain of TCR clone 66944 (TRAV12-2, TRAJ13)
CAVKKTGGYQKVTF

SEQ ID NO: 133888 - protein, 16 aa, Homo sapiens
  CDR3 for beta chain variable domain of TCR clone 66944 (TRBV12-4, TRBJ2-5)
CASSCFVRGRQETQYF

SEQ ID NO: 133889 - protein, 12 aa, Homo sapiens
  CDR3 for alpha chain variable domain of TCR clone 66945 (TRAV13-1, TRAJ49)
CAASPMGNQFYF

SEQ ID NO: 133890 - protein, 17 aa, Homo sapiens
  CDR3 for beta chain variable domain of TCR clone 66945 (TRBV11-2, TRBJ2-1)
CASSSYPPGVEYNEQFF

SEQ ID NO: 133891 - protein, 14 aa, Homo sapiens
  CDR3 for alpha chain variable domain of TCR clone 66946 (TRAV8-1, TRAJ24)
CAVNAADSWGKLQF

SEQ ID NO: 133892 - protein, 16 aa, Homo sapiens
  CDR3 for beta chain variable domain of TCR clone 66946 (TRBV4-3, TRBJ2-1)
CASSPALDRGVNGQFF

SEQ ID NO: 133893 - protein, 14 aa, Homo sapiens
  CDR3 for alpha chain variable domain of TCR clone 66947 (TRAV23/DV6, TRAJ4)
CAANLSGGYNKLIF

SEQ ID NO: 133894 - protein, 11 aa, Homo sapiens
  CDR3 for beta chain variable domain of TCR clone 66947 (TRBV7-9, TRBJ2-3)
RASSPTDTQYF

SEQ ID NO: 133895 - protein, 15 aa, Homo sapiens
  CDR3 for alpha chain variable domain of TCR clone 66948 (TRAV21, TRAJ53)
CATLNSGGRNYKLTF

SEQ ID NO: 133896 - protein, 15 aa, Homo sapiens
  CDR3 for beta chain variable domain of TCR clone 66948 (TRBV20-1, TRBJ2-7)
CSARDRVSGMDEQYF

SEQ ID NO: 133897 - protein, 12 aa, Homo sapiens
  CDR3 for alpha chain variable domain of TCR clone 66949 (TRAV3, TRAJ43)
CAVRDPNNDMRF

SEQ ID NO: 133898 - protein, 11 aa, Homo sapiens
  CDR3 for beta chain variable domain of TCR clone 66949 (TRBV6-3, TRBJ2-3)
CATGQADTQYF

SEQ ID NO: 133899 - protein, 14 aa, Homo sapiens
  CDR3 for alpha chain variable domain of TCR clone 66950 (TRAV13-1, TRAJ40)
CAARSTSGTYKYIF

SEQ ID NO: 133900 - protein, 16 aa, Homo sapiens
  CDR3 for beta chain variable domain of TCR clone 66950 (TRBV7-9, TRBJ2-1)
CASSDVAGGSYNEQFF

SEQ ID NO: 133901 - protein, 12 aa, Homo sapiens
  CDR3 for alpha chain variable domain of TCR clone 66951 (TRAV12-3, TRAJ4)
CAMTVAGTRLAV

SEQ ID NO: 133902 - protein, 14 aa, Homo sapiens
  CDR3 for beta chain variable domain of TCR clone 66951 (TRBV10-3, TRBJ1-1)
CAISDTDRGVEAFF

SEQ ID NO: 133903 - protein, 15 aa, Homo sapiens
  CDR3 for alpha chain variable domain of TCR clone 66952 (TRAV21, TRAJ53)
CATLNSGGSNYKLKF

SEQ ID NO: 133904 - protein, 17 aa, Homo sapiens
  CDR3 for beta chain variable domain of TCR clone 66952 (TRBV7-8, TRBJ2-6)
CASSAGTGGAGANVLTF

SEQ ID NO: 133905 - protein, 14 aa, Homo sapiens
  CDR3 for alpha chain variable domain of TCR clone 66953 (TRAV27, TRAJ44)
CAASFTGTASKLTF

SEQ ID NO: 133906 - protein, 13 aa, Homo sapiens
  CDR3 for beta chain variable domain of TCR clone 66953 (TRBV11-2, TRBJ1-5)
CQQLRQGRQPQHF

SEQ ID NO: 133907 - protein, 13 aa, Homo sapiens
  CDR3 for alpha chain variable domain of TCR clone 66954 (TRAV2, TRAJ40)
CAVVTSGTYKYIF

SEQ ID NO: 133908 - protein, 16 aa, Homo sapiens
  CDR3 for beta chain variable domain of TCR clone 66954 (TRBV28, TRBJ2-3)
CASSFFRDPRLGTQYF

SEQ ID NO: 133909 - protein, 13 aa, Homo sapiens
  CDR3 for alpha chain variable domain of TCR clone 66955 (TRAV27, TRAJ45)
CRSSGGGADGLTF

SEQ ID NO: 133910 - protein, 13 aa, Homo sapiens
  CDR3 for beta chain variable domain of TCR clone 66955 (TRBV7-8, TRBJ2-3)
CASSLNPPDTQYF

SEQ ID NO: 133911 - protein, 15 aa, Homo sapiens
  CDR3 for alpha chain variable domain of TCR clone 66956 (TRAV35, TRAJ58)
CAGRRQETSGSRLTF

SEQ ID NO: 133912 - protein, 14 aa, Homo sapiens
  CDR3 for beta chain variable domain of TCR clone 66956 (TRBV6-1, TRBJ1-3)
CASVQGGGGNTIYF

SEQ ID NO: 133913 - protein, 12 aa, Homo sapiens
  CDR3 for alpha chain variable domain of TCR clone 66957 (TRAV8-3, TRAJ26)
CAGDNYGHNFVF

SEQ ID NO: 133914 - protein, 15 aa, Homo sapiens
  CDR3 for beta chain variable domain of TCR clone 66957 (TRBV9, TRBJ2-1)
CASSLAGSSYNEQFF

SEQ ID NO: 133915 - protein, 11 aa, Homo sapiens
  CDR3 for alpha chain variable domain of TCR clone 66958 (TRAV35, TRAJ30)
CAGERDDKNIF

SEQ ID NO: 133916 - protein, 14 aa, Homo sapiens
  CDR3 for beta chain variable domain of TCR clone 66958 (TRBV15, TRBJ2-5)
CATSGDRGQETQYF

SEQ ID NO: 133917 - protein, 15 aa, Homo sapiens
  CDR3 for alpha chain variable domain of TCR clone 66959 (TRAV8-1, TRAJ6)
CAVNTPPGGSYILTF

SEQ ID NO: 133918 - protein, 14 aa, Homo sapiens
  CDR3 for beta chain variable domain of TCR clone 66959 (TRBV12-4, TRBJ2-1)
CASSLGQGASEQFF

SEQ ID NO: 133919 - protein, 14 aa, Homo sapiens
  CDR3 for alpha chain variable domain of TCR clone 66960 (TRAV1-2, TRAJ8)
CAVREDTGIQKLVF

SEQ ID NO: 133920 - protein, 16 aa, Homo sapiens
  CDR3 for beta chain variable domain of TCR clone 66960 (TRBV20-1, TRBJ1-4)
CSAPGQGLLTNEKLFF

SEQ ID NO: 133921 - protein, 17 aa, Homo sapiens
  CDR3 for alpha chain variable domain of TCR clone 66961 (TRAV38-2/DV8, TRAJ28)
CAFLTLYSGAGSYQLTF

SEQ ID NO: 133922 - protein, 14 aa, Homo sapiens
  CDR3 for beta chain variable domain of TCR clone 66961 (TRBV7-2, TRBJ2-5)
CARSLSGGGETQYF

SEQ ID NO: 133923 - protein, 16 aa, Homo sapiens
  CDR3 for alpha chain variable domain of TCR clone 66962 (TRAV30, TRAJ24)
CGTEIVDADSWGNSSL

SEQ ID NO: 133924 - protein, 14 aa, Homo sapiens
  CDR3 for beta chain variable domain of TCR clone 66962 (TRBV12-5, TRBJ2-5)
CASGSRTHQETQYF

SEQ ID NO: 133925 - protein, 13 aa, Homo sapiens
  CDR3 for alpha chain variable domain of TCR clone 66963 (TRAV27, TRAJ41)
CAGEGNSGHALNF

SEQ ID NO: 133926 - protein, 15 aa, Homo sapiens
  CDR3 for beta chain variable domain of TCR clone 66963 (TRBV6-3, TRBJ2-7)
CASSSPGTVFYEQYF

SEQ ID NO: 133927 - protein, 14 aa, Homo sapiens
  CDR3 for alpha chain variable domain of TCR clone 66964 (TRAV12-2, TRAJ40)
CAVKIPSGTHKYIF

SEQ ID NO: 133928 - protein, 17 aa, Homo sapiens
  CDR3 for beta chain variable domain of TCR clone 66964 (TRBV13, TRBJ2-3)
CASSLSRVAGGGNTQYF

SEQ ID NO: 133929 - protein, 15 aa, Homo sapiens
  CDR3 for alpha chain variable domain of TCR clone 66965 (TRAV8-3, TRAJ45)
CASSYSGGGADGLIF

SEQ ID NO: 133930 - protein, 17 aa, Homo sapiens
  CDR3 for beta chain variable domain of TCR clone 66965 (TRBV7-8, TRBJ1-2)
CASSLRPLQGHLYGYTF

SEQ ID NO: 133931 - protein, 12 aa, Homo sapiens
  CDR3 for alpha chain variable domain of TCR clone 66966 (TRAV13-2, TRAJ23)
CAERHRGGKLIF

SEQ ID NO: 133932 - protein, 13 aa, Homo sapiens
  CDR3 for beta chain variable domain of TCR clone 66966 (TRBV25-1, TRBJ2-2)
CASRKANTGELFF

SEQ ID NO: 133933 - protein, 14 aa, Homo sapiens
  CDR3 for alpha chain variable domain of TCR clone 66967 (TRAV29/DV5, TRAJ36)
CAARRKTGANNLFF

SEQ ID NO: 133934 - protein, 14 aa, Homo sapiens
  CDR3 for beta chain variable domain of TCR clone 66967 (TRBV12-5, TRBJ2-5)
CSSGSRTHQETQYF

SEQ ID NO: 133935 - protein, 11 aa, Homo sapiens
  CDR3 for alpha chain variable domain of TCR clone 66968 (TRAV12-3, TRAJ43)
GAMSVSNDMRF

SEQ ID NO: 133936 - protein, 13 aa, Homo sapiens
  CDR3 for beta chain variable domain of TCR clone 66968 (TRBV20-1, TRBJ1-1)
CSAPLGGGTEAFF

SEQ ID NO: 133937 - protein, 15 aa, Homo sapiens
  CDR3 for alpha chain variable domain of TCR clone 66969 (TRAV3, TRAJ36)
CAVRASQTGANNLFF

SEQ ID NO: 133938 - protein, 13 aa, Homo sapiens
  CDR3 for beta chain variable domain of TCR clone 66969 (TRBV10-3, TRBJ1-2)
CAISERDSYGYAF

SEQ ID NO: 133939 - protein, 14 aa, Homo sapiens
  CDR3 for alpha chain variable domain of TCR clone 66970 (TRAV12-3, TRAJ12)
CAMSEVDSSYKLIF

SEQ ID NO: 133940 - protein, 12 aa, Homo sapiens
  CDR3 for beta chain variable domain of TCR clone 66970 (TRBV18, TRBJ1-4)
SASSPSREKLFF

SEQ ID NO: 133941 - protein, 17 aa, Homo sapiens
  CDR3 for alpha chain variable domain of TCR clone 66971 (TRAV8-3, TRAJ52)
CCGCDLPGDYSYGKLTF

SEQ ID NO: 133942 - protein, 18 aa, Homo sapiens
  CDR3 for beta chain variable domain of TCR clone 66971 (TRBV11-2, TRBJ2-6)
CSSSLNPFLGTGANVLTF

SEQ ID NO: 133943 - protein, 12 aa, Homo sapiens
  CDR3 for alpha chain variable domain of TCR clone 66972 (TRAV12-3, TRAJ17)
CAMTLTGNKLTF

SEQ ID NO: 133944 - protein, 14 aa, Homo sapiens
  CDR3 for beta chain variable domain of TCR clone 66972 (TRBV10-3, TRBJ2-2)
CAASSRVNTGELFF

SEQ ID NO: 133945 - protein, 14 aa, Homo sapiens
  CDR3 for alpha chain variable domain of TCR clone 66973 (TRAV2, TRAJ9)
CAVGDRSGGFKTIF

SEQ ID NO: 133946 - protein, 16 aa, Homo sapiens
  CDR3 for beta chain variable domain of TCR clone 66973 (TRBV7-3, TRBJ2-2)
CASSLKRGTLSGELFF

SEQ ID NO: 133947 - protein, 14 aa, Homo sapiens
  CDR3 for alpha chain variable domain of TCR clone 66974 (TRAV21, TRAJ58)
CAVRRGRSGARLTF

SEQ ID NO: 133948 - protein, 13 aa, Homo sapiens
  CDR3 for beta chain variable domain of TCR clone 66974 (TRBV7-2, TRBJ1-6)
CASSLKFDSPLHF

SEQ ID NO: 133949 - protein, 13 aa, Homo sapiens
  CDR3 for alpha chain variable domain of TCR clone 66975 (TRAV21, TRAJ57)
CAVTQGGSERLVF

SEQ ID NO: 133950 - protein, 17 aa, Homo sapiens
  CDR3 for beta chain variable domain of TCR clone 66975 (TRBV10-3, TRBJ2-6)
CAISELAESSGANVLTF

SEQ ID NO: 133951 - protein, 12 aa, Homo sapiens
  CDR3 for alpha chain variable domain of TCR clone 66976 (TRAV4, TRAJ26)
CLVGDHGQNFVF

SEQ ID NO: 133952 - protein, 16 aa, Homo sapiens
  CDR3 for beta chain variable domain of TCR clone 66976 (TRBV7-2, TRBJ1-2)
CASSSNQDRRGHGYTF

SEQ ID NO: 133953 - protein, 11 aa, Homo sapiens
  CDR3 for alpha chain variable domain of TCR clone 66977 (TRAV23/DV6, TRAJ48)
CAPRWGEKVTF

SEQ ID NO: 133954 - protein, 13 aa, Homo sapiens
  CDR3 for beta chain variable domain of TCR clone 66977 (TRBV12-4, TRBJ2-5)
CASSPGTEETQYF

SEQ ID NO: 133955 - protein, 16 aa, Homo sapiens
  CDR3 for alpha chain variable domain of TCR clone 66978 (TRAV35, TRAJ28)
CAEQRYSGAGSYQLTF

SEQ ID NO: 133956 - protein, 14 aa, Homo sapiens
  CDR3 for beta chain variable domain of TCR clone 66978 (TRBV18, TRBJ2-7)
CASSPRGGAYEQYF

SEQ ID NO: 133957 - protein, 13 aa, Homo sapiens
  CDR3 for alpha chain variable domain of TCR clone 66979 (TRAV21, TRAJ45)
CAVMGGGADGLTF

SEQ ID NO: 133958 - protein, 15 aa, Homo sapiens
  CDR3 for beta chain variable domain of TCR clone 66979 (TRBV7-9, TRBJ1-6)
CASSSPGRGNSPLHF

SEQ ID NO: 133959 - protein, 14 aa, Homo sapiens
  CDR3 for alpha chain variable domain of TCR clone 66980 (TRAV3, TRAJ21)
CAVESQANFNKFYF

SEQ ID NO: 133960 - protein, 12 aa, Homo sapiens
  CDR3 for beta chain variable domain of TCR clone 66980 (TRBV6-3, TRBJ2-7)
CASNLTPYEQYF

SEQ ID NO: 133961 - protein, 12 aa, Homo sapiens
  CDR3 for alpha chain variable domain of TCR clone 66981 (TRAV8-3, TRAJ26)
CAGDNYGQNFVF

SEQ ID NO: 133962 - protein, 16 aa, Homo sapiens
  CDR3 for beta chain variable domain of TCR clone 66981 (TRBV7-9, TRBJ2-1)
CASSDVAGGSYNEQFF

SEQ ID NO: 133963 - protein, 14 aa, Homo sapiens
  CDR3 for alpha chain variable domain of TCR clone 66982 (TRAV12-2, TRAJ45)
CAVYSGGGADGLTF

SEQ ID NO: 133964 - protein, 13 aa, Homo sapiens
  CDR3 for beta chain variable domain of TCR clone 66982 (TRBV19, TRBJ2-7)
CASRKAGGSEQYF

SEQ ID NO: 133965 - protein, 23 aa, Homo sapiens
  CDR3 for alpha chain variable domain of TCR clone 66983 (TRAV12-2, TRAJ36)
SLLIRDSQPIDSATLERANNLFF

SEQ ID NO: 133966 - protein, 17 aa, Homo sapiens
  CDR3 for beta chain variable domain of TCR clone 66983 (TRBV3-1, TRBJ2-3)
CASSQLLDRGHTDTQYF

SEQ ID NO: 133967 - protein, 13 aa, Homo sapiens
  CDR3 for alpha chain variable domain of TCR clone 66984 (TRAV12-3, TRAJ5)
CAMIYAGRRALTF

SEQ ID NO: 133968 - protein, 12 aa, Homo sapiens
  CDR3 for beta chain variable domain of TCR clone 66984 (TRBV18, TRBJ1-4)
CASSPSREKLFF

SEQ ID NO: 133969 - protein, 12 aa, Homo sapiens
  CDR3 for alpha chain variable domain of TCR clone 66985 (TRAV16, TRAJ56)
CAPTGANSKLTF

SEQ ID NO: 133970 - protein, 12 aa, Homo sapiens
  CDR3 for beta chain variable domain of TCR clone 66985 (TRBV5-1, TRBJ2-7)
CASSLDSYEQYF

SEQ ID NO: 133971 - protein, 14 aa, Homo sapiens
  CDR3 for alpha chain variable domain of TCR clone 66986 (TRAV13-1, TRAJ44)
CAAKATGTASKLTF

SEQ ID NO: 133972 - protein, 16 aa, Homo sapiens
  CDR3 for beta chain variable domain of TCR clone 66986 (TRBV28, TRBJ1-4)
CASSPPYRGRSEKLFF

SEQ ID NO: 133973 - protein, 13 aa, Homo sapiens
  CDR3 for alpha chain variable domain of TCR clone 66987 (TRAV6, TRAJ20)
CAPAVSNDYKLSF

SEQ ID NO: 133974 - protein, 15 aa, Homo sapiens
  CDR3 for beta chain variable domain of TCR clone 66987 (TRBV7-2, TRBJ2-5)
CASSFLRGGEETQYF

SEQ ID NO: 133975 - protein, 14 aa, Homo sapiens
  CDR3 for alpha chain variable domain of TCR clone 66988 (TRAV12-2, TRAJ48)
CAVNAFFGNEKLTF

SEQ ID NO: 133976 - protein, 13 aa, Homo sapiens
  CDR3 for beta chain variable domain of TCR clone 66988 (TRBV28, TRBJ2-7)
CAGAQQGRDEQYF

SEQ ID NO: 133977 - protein, 16 aa, Homo sapiens
  CDR3 for alpha chain variable domain of TCR clone 66989 (TRAV12-3, TRAJ53)
CAMSPGSGGSNYKLTF

SEQ ID NO: 133978 - protein, 11 aa, Homo sapiens
  CDR3 for beta chain variable domain of TCR clone 66989 (TRBV29-1, TRBJ2-5)
CSEDRTGTQYI

SEQ ID NO: 133979 - protein, 16 aa, Homo sapiens
  CDR3 for alpha chain variable domain of TCR clone 66990 (TRAV16, TRAJ37)
CSKWPDGSSNTGKLIF

SEQ ID NO: 133980 - protein, 16 aa, Homo sapiens
  CDR3 for beta chain variable domain of TCR clone 66990 (TRBV19, TRBJ2-2)
CASRSPGTGATGELFF

SEQ ID NO: 133981 - protein, 14 aa, Homo sapiens
  CDR3 for alpha chain variable domain of TCR clone 66991 (TRAV13-1, TRAJ9)
CAASALTGGFKTNF

SEQ ID NO: 133982 - protein, 13 aa, Homo sapiens
  CDR3 for beta chain variable domain of TCR clone 66991 (TRBV20-1, TRBJ1-1)
CSAGTVGNTEAFF

SEQ ID NO: 133983 - protein, 15 aa, Homo sapiens
  CDR3 for alpha chain variable domain of TCR clone 66992 (TRAV13-1, TRAJ9)
CAASTLNTGGFKTIF

SEQ ID NO: 133984 - protein, 15 aa, Homo sapiens
  CDR3 for beta chain variable domain of TCR clone 66992 (TRBV6-5, TRBJ2-4)
FASSLRESPKNIQYF

SEQ ID NO: 133985 - protein, 17 aa, Homo sapiens
  CDR3 for alpha chain variable domain of TCR clone 66993 (TRAV8-6, TRAJ58)
CAVSSWVGETSGSRLTF

SEQ ID NO: 133986 - protein, 15 aa, Homo sapiens
  CDR3 for beta chain variable domain of TCR clone 66993 (TRBV18, TRBJ2-1)
CASSPPSASYNEQFF

SEQ ID NO: 133987 - protein, 15 aa, Homo sapiens
  CDR3 for alpha chain variable domain of TCR clone 66994 (TRAV8-3, TRAJ41)
CAVGSNSNSGYARNF

SEQ ID NO: 133988 - protein, 17 aa, Homo sapiens
  CDR3 for beta chain variable domain of TCR clone 66994 (TRBV25-1, TRBJ2-1)
CASSAYGQGRGVYEQFF

SEQ ID NO: 133989 - protein, 16 aa, Homo sapiens
  CDR3 for alpha chain variable domain of TCR clone 66995 (TRAV4, TRAJ9)
CLVGDPNRPGGFETIF

SEQ ID NO: 133990 - protein, 16 aa, Homo sapiens
  CDR3 for beta chain variable domain of TCR clone 66995 (TRBV28, TRBJ1-4)
CASSPPYRGRSEKLFL

SEQ ID NO: 133991 - protein, 14 aa, Homo sapiens
  CDR3 for alpha chain variable domain of TCR clone 66996 (TRAV12-3, TRAJ9)
CAMSPNTGGFKTIF

SEQ ID NO: 133992 - protein, 12 aa, Homo sapiens
  CDR3 for beta chain variable domain of TCR clone 66996 (TRBV19, TRBJ1-5)
CANSIAQQPQHF

SEQ ID NO: 133993 - protein, 14 aa, Homo sapiens
  CDR3 for alpha chain variable domain of TCR clone 66997 (TRAV17, TRAJ56)
CATVPAGANSKLTF

SEQ ID NO: 133994 - protein, 15 aa, Homo sapiens
  CDR3 for beta chain variable domain of TCR clone 66997 (TRBV5-1, TRBJ2-2)
CASSSQGGNTGELFF

SEQ ID NO: 133995 - protein, 14 aa, Homo sapiens
  CDR3 for alpha chain variable domain of TCR clone 66998 (TRAV1-2, TRAJ16)
CAVNRFSGGQKLLF

SEQ ID NO: 133996 - protein, 13 aa, Homo sapiens
  CDR3 for beta chain variable domain of TCR clone 66998 (TRBV7-6, TRBJ1-2)
CASSLVADYGYTF

SEQ ID NO: 133997 - protein, 16 aa, Homo sapiens
  CDR3 for alpha chain variable domain of TCR clone 66999 (TRAV8-3, TRAJ8)
CAVPRDGNTGFQKLLF

SEQ ID NO: 133998 - protein, 15 aa, Homo sapiens
  CDR3 for beta chain variable domain of TCR clone 66999 (TRBV6-1, TRBJ2-6)
CASSSRPSGANVLTF

SEQ ID NO: 133999 - protein, 16 aa, Homo sapiens
  CDR3 for alpha chain variable domain of TCR clone 67000 (TRAV30, TRAJ24)
CGTEVVDADSWGKFQF

SEQ ID NO: 134000 - protein, 17 aa, Homo sapiens
  CDR3 for beta chain variable domain of TCR clone 67000 (TRBV20-1, TRBJ2-2)
CSASGSGQGGLTGELFF

SEQ ID NO: 134001 - protein, 12 aa, Homo sapiens
  CDR3 for alpha chain variable domain of TCR clone 67001 (TRAV16, TRAJ26)
CALRSYGQNFVF

SEQ ID NO: 134002 - protein, 15 aa, Homo sapiens
  CDR3 for beta chain variable domain of TCR clone 67001 (TRBV27, TRBJ2-1)
CASSNGGGSSNEQFF

SEQ ID NO: 134003 - protein, 11 aa, Homo sapiens
  CDR3 for alpha chain variable domain of TCR clone 67002 (TRAV4, TRAJ31)
CLVGDNARLMF

SEQ ID NO: 134004 - protein, 16 aa, Homo sapiens
  CDR3 for beta chain variable domain of TCR clone 67002 (TRBV7-2, TRBJ2-5)
CASSSKWLSGQGTQYF

SEQ ID NO: 134005 - protein, 12 aa, Homo sapiens
  CDR3 for alpha chain variable domain of TCR clone 67003 (TRAV8-3, TRAJ27)
GAVGAEAGKSTF

SEQ ID NO: 134006 - protein, 14 aa, Homo sapiens
  CDR3 for beta chain variable domain of TCR clone 67003 (TRBV2, TRBJ2-1)
CASRLIVGHDEQFF

SEQ ID NO: 134007 - protein, 12 aa, Homo sapiens
  CDR3 for alpha chain variable domain of TCR clone 67004 (TRAV12-3, TRAJ17)
CAMTLTGNKLTF

SEQ ID NO: 134008 - protein, 13 aa, Homo sapiens
  CDR3 for beta chain variable domain of TCR clone 67004 (TRBV27, TRBJ2-1)
CASRTLGVVEQFF

SEQ ID NO: 134009 - protein, 11 aa, Homo sapiens
  CDR3 for alpha chain variable domain of TCR clone 67005 (TRAV12-3, TRAJ27)
CAMANAGKSTF

SEQ ID NO: 134010 - protein, 13 aa, Homo sapiens
  CDR3 for beta chain variable domain of TCR clone 67005 (TRBV20-1, TRBJ1-1)
CSASVGGNTEAFF

SEQ ID NO: 134011 - protein, 13 aa, Homo sapiens
  CDR3 for alpha chain variable domain of TCR clone 67006 (TRAV12-2, TRAJ42)
CAGKRGSQGNLIF

SEQ ID NO: 134012 - protein, 13 aa, Homo sapiens
  CDR3 for beta chain variable domain of TCR clone 67006 (TRBV7-9, TRBJ2-3)
CASSPGSTDTQYF

SEQ ID NO: 134013 - protein, 18 aa, Homo sapiens
  CDR3 for alpha chain variable domain of TCR clone 67007 (TRAV21, TRAJ52)
CAVRPSPAGGTSYGKLTF

SEQ ID NO: 134014 - protein, 13 aa, Homo sapiens
  CDR3 for beta chain variable domain of TCR clone 67007 (TRBV7-3, TRBJ1-1)
CASSQDWVAEAFF

SEQ ID NO: 134015 - protein, 15 aa, Homo sapiens
  CDR3 for alpha chain variable domain of TCR clone 67008 (TRAV26-1, TRAJ23)
CIVRVAGYQGGKLIF

SEQ ID NO: 134016 - protein, 16 aa, Homo sapiens
  CDR3 for beta chain variable domain of TCR clone 67008 (TRBV7-9, TRBJ1-2)
CASSLGFSSGEDGYTF

SEQ ID NO: 134017 - protein, 13 aa, Homo sapiens
  CDR3 for alpha chain variable domain of TCR clone 67009 (TRAV13-1, TRAJ21)
CAASIYNFNKFYF

SEQ ID NO: 134018 - protein, 16 aa, Homo sapiens
  CDR3 for beta chain variable domain of TCR clone 67009 (TRBV2, TRBJ1-1)
CASSPTLGGASTEAFF

SEQ ID NO: 134019 - protein, 12 aa, Homo sapiens
  CDR3 for alpha chain variable domain of TCR clone 67010 (TRAV12-1, TRAJ40)
CVVYSGTYKYIF

SEQ ID NO: 134020 - protein, 15 aa, Homo sapiens
  CDR3 for beta chain variable domain of TCR clone 67010 (TRBV27, TRBJ1-6)
CASSLDRGLGSPLHF

SEQ ID NO: 134021 - protein, 14 aa, Homo sapiens
  CDR3 for alpha chain variable domain of TCR clone 67011 (TRAV23/DV6, TRAJ22)
CADISSGSARQLTF

SEQ ID NO: 134022 - protein, 16 aa, Homo sapiens
  CDR3 for beta chain variable domain of TCR clone 67011 (TRBV5-6, TRBJ2-5)
CASIRGQTGYQETQYF

SEQ ID NO: 134023 - protein, 14 aa, Homo sapiens
  CDR3 for alpha chain variable domain of TCR clone 67012 (TRAV13-1, TRAJ44)
CAAKATGTASKLTS

SEQ ID NO: 134024 - protein, 14 aa, Homo sapiens
  CDR3 for beta chain variable domain of TCR clone 67012 (TRBV19, TRBJ2-2)
CASSTLHRSGELFF

SEQ ID NO: 134025 - protein, 16 aa, Homo sapiens
  CDR3 for alpha chain variable domain of TCR clone 67013 (TRAV3, TRAJ34)
CAVRARGTPTSSSLGL

SEQ ID NO: 134026 - protein, 17 aa, Homo sapiens
  CDR3 for beta chain variable domain of TCR clone 67013 (TRBV20-1, TRBJ2-2)
CSASGSGQGGLTGELFF

SEQ ID NO: 134027 - protein, 17 aa, Homo sapiens
  CDR3 for alpha chain variable domain of TCR clone 67014 (TRAV38-1, TRAJ45)
CAFMKHYMGGGADGLTF

SEQ ID NO: 134028 - protein, 13 aa, Homo sapiens
  CDR3 for beta chain variable domain of TCR clone 67014 (TRBV5-7, TRBJ1-1)
CASSLFQNTEAFF

SEQ ID NO: 134029 - protein, 12 aa, Homo sapiens
  CDR3 for alpha chain variable domain of TCR clone 67015 (TRAV21, TRAJ49)
CAVSWTGNQLYF

SEQ ID NO: 134030 - protein, 18 aa, Homo sapiens
  CDR3 for beta chain variable domain of TCR clone 67015 (TRBV7-8, TRBJ2-1)
CASSPAEGLAGGLNEQFF

SEQ ID NO: 134031 - protein, 16 aa, Homo sapiens
  CDR3 for alpha chain variable domain of TCR clone 67016 (TRAV3, TRAJ37)
CAVSPHGSGNTGKLIF

SEQ ID NO: 134032 - protein, 16 aa, Homo sapiens
  CDR3 for beta chain variable domain of TCR clone 67016 (TRBV9, TRBJ1-2)
CASSVEEKVSPYGYTF

SEQ ID NO: 134033 - protein, 18 aa, Homo sapiens
  CDR3 for alpha chain variable domain of TCR clone 67017 (TRAV13-1, TRAJ52)
CAAKNPNAGGTSYGKLTF

SEQ ID NO: 134034 - protein, 15 aa, Homo sapiens
  CDR3 for beta chain variable domain of TCR clone 67017 (TRBV6-1, TRBJ2-3)
CASSERGVITDTQYF

SEQ ID NO: 134035 - protein, 13 aa, Homo sapiens
  CDR3 for alpha chain variable domain of TCR clone 67018 (TRAV12-2, TRAJ6)
CAVNVSRKLHTYI

SEQ ID NO: 134036 - protein, 16 aa, Homo sapiens
  CDR3 for beta chain variable domain of TCR clone 67018 (TRBV12-5, TRBJ2-5)
CASGPRTSGNQETQYF

SEQ ID NO: 134037 - protein, 14 aa, Homo sapiens
  CDR3 for alpha chain variable domain of TCR clone 67019 (TRAV1-2, TRAJ8)
CAVREDTGFQKLVF

SEQ ID NO: 134038 - protein, 14 aa, Homo sapiens
  CDR3 for beta chain variable domain of TCR clone 67019 (TRBV5-1, TRBJ1-1)
CASSLAVGSGEAFF

SEQ ID NO: 134039 - protein, 14 aa, Homo sapiens
  CDR3 for alpha chain variable domain of TCR clone 67020 (TRAV12-3, TRAJ22)
CAMSLFGSARQLTF

SEQ ID NO: 134040 - protein, 17 aa, Homo sapiens
  CDR3 for beta chain variable domain of TCR clone 67020 (TRBV7-9, TRBJ1-1)
CASSLGIAGAENTEAFF

SEQ ID NO: 134041 - protein, 13 aa, Homo sapiens
  CDR3 for alpha chain variable domain of TCR clone 67021 (TRAV35, TRAJ42)
CAGFPGSQGKLIF

SEQ ID NO: 134042 - protein, 13 aa, Homo sapiens
  CDR3 for beta chain variable domain of TCR clone 67021 (TRBV29-1, TRBJ2-1)
CSVEGGRVNEQFF

SEQ ID NO: 134043 - protein, 14 aa, Homo sapiens
  CDR3 for alpha chain variable domain of TCR clone 67022 (TRAV12-2, TRAJ17)
CAVLFKAAGNKLTF

SEQ ID NO: 134044 - protein, 17 aa, Homo sapiens
  CDR3 for beta chain variable domain of TCR clone 67022 (TRBV20-1, TRBJ2-2)
CSASASGQGGLTVELFF

SEQ ID NO: 134045 - protein, 15 aa, Homo sapiens
  CDR3 for alpha chain variable domain of TCR clone 67023 (TRAV2, TRAJ32)
CAVANYGGATNKLIF

SEQ ID NO: 134046 - protein, 15 aa, Homo sapiens
  CDR3 for beta chain variable domain of TCR clone 67023 (TRBV7-7, TRBJ2-5)
CASSQLERAGETQYF

SEQ ID NO: 134047 - protein, 12 aa, Homo sapiens
  CDR3 for alpha chain variable domain of TCR clone 67024 (TRAV27, TRAJ9)
CAGYTGGFKTIF

SEQ ID NO: 134048 - protein, 15 aa, Homo sapiens
  CDR3 for beta chain variable domain of TCR clone 67024 (TRBV11-2, TRBJ2-1)
CASSPAGQSLNEQVF

SEQ ID NO: 134049 - protein, 12 aa, Homo sapiens
  CDR3 for alpha chain variable domain of TCR clone 67025 (TRAV12-3, TRAJ4)
CAMTGARTRLAV

SEQ ID NO: 134050 - protein, 14 aa, Homo sapiens
  CDR3 for beta chain variable domain of TCR clone 67025 (TRBV10-3, TRBJ1-1)
CAISDTDRGVEAFF

SEQ ID NO: 134051 - protein, 14 aa, Homo sapiens
  CDR3 for alpha chain variable domain of TCR clone 67026 (TRAV12-2, TRAJ45)
CALPERGGADGLTF

SEQ ID NO: 134052 - protein, 14 aa, Homo sapiens
  CDR3 for beta chain variable domain of TCR clone 67026 (TRBV18, TRBJ1-5)
CTSSPGNSNQPQHF

SEQ ID NO: 134053 - protein, 15 aa, Homo sapiens
  CDR3 for alpha chain variable domain of TCR clone 67027 (TRAV26-1, TRAJ22)
CIVRVWFWFCKATDL

SEQ ID NO: 134054 - protein, 13 aa, Homo sapiens
  CDR3 for beta chain variable domain of TCR clone 67027 (TRBV7-9, TRBJ1-2)
CASSLKQNYGYTF

SEQ ID NO: 134055 - protein, 16 aa, Homo sapiens
  CDR3 for alpha chain variable domain of TCR clone 67028 (TRAV17, TRAJ9)
CATGEWGRTGGFKTIF

SEQ ID NO: 134056 - protein, 12 aa, Homo sapiens
  CDR3 for beta chain variable domain of TCR clone 67028 (TRBV11-2, TRBJ2-1)
CASSPGNNEQFF

SEQ ID NO: 134057 - protein, 18 aa, Homo sapiens
  CDR3 for alpha chain variable domain of TCR clone 67029 (TRAV12-3, TRAJ52)
CAMSVGGAGGTSYGKLKF

SEQ ID NO: 134058 - protein, 15 aa, Homo sapiens
  CDR3 for beta chain variable domain of TCR clone 67029 (TRBV6-3, TRBJ2-7)
CASSSPGTVFYEQYF

SEQ ID NO: 134059 - protein, 13 aa, Homo sapiens
  CDR3 for alpha chain variable domain of TCR clone 67030 (TRAV1-2, TRAJ9)
CAALNTGGFKTIL

SEQ ID NO: 134060 - protein, 14 aa, Homo sapiens
  CDR3 for beta chain variable domain of TCR clone 67030 (TRBV13, TRBJ2-3)
CASSSGSPTDTQYF

SEQ ID NO: 134061 - protein, 12 aa, Homo sapiens
  CDR3 for alpha chain variable domain of TCR clone 67031 (TRAV8-3, TRAJ26)
CTGDNYGQNFVF

SEQ ID NO: 134062 - protein, 13 aa, Homo sapiens
  CDR3 for beta chain variable domain of TCR clone 67031 (TRBV20-1, TRBJ1-1)
CSAPLGGGTEAFF

SEQ ID NO: 134063 - protein, 13 aa, Homo sapiens
  CDR3 for alpha chain variable domain of TCR clone 67032 (TRAV3, TRAJ21)
CAVREPDFNKFYF

SEQ ID NO: 134064 - protein, 17 aa, Homo sapiens
  CDR3 for beta chain variable domain of TCR clone 67032 (TRBV7-8, TRBJ2-6)
CASSARTGGAGANVLTF

SEQ ID NO: 134065 - protein, 14 aa, Homo sapiens
  CDR3 for alpha chain variable domain of TCR clone 67033 (TRAV1-2, TRAJ16)
CAVNRFSDGKKLLF

SEQ ID NO: 134066 - protein, 14 aa, Homo sapiens
  CDR3 for beta chain variable domain of TCR clone 67033 (TRBV19, TRBJ2-1)
CASPTFVLSGEQFF

SEQ ID NO: 134067 - protein, 15 aa, Homo sapiens
  CDR3 for alpha chain variable domain of TCR clone 67034 (TRAV16, TRAJ57)
CALSGGQGGSEKLVF

SEQ ID NO: 134068 - protein, 16 aa, Homo sapiens
  CDR3 for beta chain variable domain of TCR clone 67034 (TRBV7-3, TRBJ2-2)
CASSLKRGTLSGELFF

SEQ ID NO: 134069 - protein, 13 aa, Homo sapiens
  CDR3 for alpha chain variable domain of TCR clone 67035 (TRAV26-1, TRAJ48)
CIVRVVGEEKLTF

SEQ ID NO: 134070 - protein, 19 aa, Homo sapiens
  CDR3 for beta chain variable domain of TCR clone 67035 (TRBV11-3, TRBJ2-2)
CASSTRPGAKTTNTGELFF

SEQ ID NO: 134071 - protein, 13 aa, Homo sapiens
  CDR3 for alpha chain variable domain of TCR clone 67036 (TRAV17, TRAJ34)
CATDLYNTDKLIF

SEQ ID NO: 134072 - protein, 15 aa, Homo sapiens
  CDR3 for beta chain variable domain of TCR clone 67036 (TRBV20-1, TRBJ2-3)
CSATRTSGFTDTQYF

SEQ ID NO: 134073 - protein, 15 aa, Homo sapiens
  CDR3 for alpha chain variable domain of TCR clone 67037 (TRAV4, TRAJ10)
CLVGDEEGGGNKLTL

SEQ ID NO: 134074 - protein, 15 aa, Homo sapiens
  CDR3 for beta chain variable domain of TCR clone 67037 (TRBV7-2, TRBJ2-7)
CASSLTGQGTYEQYF

SEQ ID NO: 134075 - protein, 12 aa, Homo sapiens
  CDR3 for alpha chain variable domain of TCR clone 67038 (TRAV12-3, TRAJ17)
CAMTLTGNKLTF

SEQ ID NO: 134076 - protein, 13 aa, Homo sapiens
  CDR3 for beta chain variable domain of TCR clone 67038 (TRBV11-2, TRBJ1-1)
CASSLGSDTEAFF

SEQ ID NO: 134077 - protein, 13 aa, Homo sapiens
  CDR3 for alpha chain variable domain of TCR clone 67039 (TRAV8-1, TRAJ28)
CAVSGAGSYQLTF

SEQ ID NO: 134078 - protein, 14 aa, Homo sapiens
  CDR3 for beta chain variable domain of TCR clone 67039 (TRBV7-2, TRBJ2-2)
CASRGQGAAGEPFF

SEQ ID NO: 134079 - protein, 13 aa, Homo sapiens
  CDR3 for alpha chain variable domain of TCR clone 67040 (TRAV27, TRAJ49)
CSPRPYTGNQFYF

SEQ ID NO: 134080 - protein, 16 aa, Homo sapiens
  CDR3 for beta chain variable domain of TCR clone 67040 (TRBV4-1, TRBJ1-2)
CASSQDAGQVLYGYTF

SEQ ID NO: 134081 - protein, 12 aa, Homo sapiens
  CDR3 for alpha chain variable domain of TCR clone 67041 (TRAV12-2, TRAJ43)
CAVNVNNNDTRF

SEQ ID NO: 134082 - protein, 14 aa, Homo sapiens
  CDR3 for beta chain variable domain of TCR clone 67041 (TRBV25-1, TRBJ2-2)
CASSELGLPGELFF

SEQ ID NO: 134083 - protein, 15 aa, Homo sapiens
  CDR3 for alpha chain variable domain of TCR clone 67042 (TRAV26-1, TRAJ48)
CIARWSWCGNEKLTF

SEQ ID NO: 134084 - protein, 12 aa, Homo sapiens
  CDR3 for beta chain variable domain of TCR clone 67042 (TRBV19, TRBJ2-5)
CASSISEETQYF

SEQ ID NO: 134085 - protein, 15 aa, Homo sapiens
  CDR3 for alpha chain variable domain of TCR clone 67043 (TRAV1-2, TRAJ10)
CAVRGFTGGGNKLTF

SEQ ID NO: 134086 - protein, 16 aa, Homo sapiens
  CDR3 for beta chain variable domain of TCR clone 67043 (TRBV4-1, TRBJ2-1)
CDSSQEAGQGSDEQFF

SEQ ID NO: 134087 - protein, 15 aa, Homo sapiens
  CDR3 for alpha chain variable domain of TCR clone 67044 (TRAV12-3, TRAJ49)
FAMAVTPNTGNQFYF

SEQ ID NO: 134088 - protein, 18 aa, Homo sapiens
  CDR3 for beta chain variable domain of TCR clone 67044 (TRBV4-1, TRBJ1-5)
CASSQDPRGQGLNQPQHF

SEQ ID NO: 134089 - protein, 14 aa, Homo sapiens
  CDR3 for alpha chain variable domain of TCR clone 67045 (TRAV12-2, TRAJ45)
CAVNIGGGADGLTF

SEQ ID NO: 134090 - protein, 12 aa, Homo sapiens
  CDR3 for beta chain variable domain of TCR clone 67045 (TRBV11-2, TRBJ2-2)
CASSLGGGELFF

SEQ ID NO: 134091 - protein, 12 aa, Homo sapiens
  CDR3 for alpha chain variable domain of TCR clone 67046 (TRAV22, TRAJ22)
CAPGGSARQLTF

SEQ ID NO: 134092 - protein, 13 aa, Homo sapiens
  CDR3 for beta chain variable domain of TCR clone 67046 (TRBV15, TRBJ1-6)
CATSGGLKSPLHF

SEQ ID NO: 134093 - protein, 13 aa, Homo sapiens
  CDR3 for alpha chain variable domain of TCR clone 67047 (TRAV17, TRAJ6)
CATGFGGSYIPTF

SEQ ID NO: 134094 - protein, 14 aa, Homo sapiens
  CDR3 for beta chain variable domain of TCR clone 67047 (TRBV5-1, TRBJ2-5)
CASSFGGGQETQYF

SEQ ID NO: 134095 - protein, 12 aa, Homo sapiens
  CDR3 for alpha chain variable domain of TCR clone 67048 (TRAV2, TRAJ31)
CAVEDNNARLMF

SEQ ID NO: 134096 - protein, 17 aa, Homo sapiens
  CDR3 for beta chain variable domain of TCR clone 67048 (TRBV13, TRBJ2-3)
CASSLSRVAGGRNTQYF

SEQ ID NO: 134097 - protein, 18 aa, Homo sapiens
  CDR3 for alpha chain variable domain of TCR clone 67049 (TRAV26-1, TRAJ23)
CIVRVGLEVWNQGGKLIF

SEQ ID NO: 134098 - protein, 16 aa, Homo sapiens
  CDR3 for beta chain variable domain of TCR clone 67049 (TRBV12-4, TRBJ2-5)
RASSFFVRGRQETQYF

SEQ ID NO: 134099 - protein, 16 aa, Homo sapiens
  CDR3 for alpha chain variable domain of TCR clone 67050 (TRAV12-3, TRAJ53)
CAMSPGRGGSNYKLTF

SEQ ID NO: 134100 - protein, 13 aa, Homo sapiens
  CDR3 for beta chain variable domain of TCR clone 67050 (TRBV7-3, TRBJ1-1)
CASSQDWGAEAFF

SEQ ID NO: 134101 - protein, 11 aa, Homo sapiens
  CDR3 for alpha chain variable domain of TCR clone 67051 (TRAV35, TRAJ30)
CAPGGDDKIIF

SEQ ID NO: 134102 - protein, 20 aa, Homo sapiens
  CDR3 for beta chain variable domain of TCR clone 67051 (TRBV7-8, TRBJ2-2)
CASSHLFPGPTIHITGELFF

SEQ ID NO: 134103 - protein, 13 aa, Homo sapiens
  CDR3 for alpha chain variable domain of TCR clone 67052 (TRAV23/DV6, TRAJ22)
CAPYSGSAMQLTF

SEQ ID NO: 134104 - protein, 15 aa, Homo sapiens
  CDR3 for beta chain variable domain of TCR clone 67052 (TRBV11-2, TRBJ1-6)
CASSLDPWAVSPLHF

SEQ ID NO: 134105 - protein, 14 aa, Homo sapiens
  CDR3 for alpha chain variable domain of TCR clone 67053 (TRAV2, TRAJ37)
CPVDFTSNTGKLIF

SEQ ID NO: 134106 - protein, 15 aa, Homo sapiens
  CDR3 for beta chain variable domain of TCR clone 67053 (TRBV20-1, TRBJ1-1)
CSASRGVTGNTEAFF

SEQ ID NO: 134107 - protein, 13 aa, Homo sapiens
  CDR3 for alpha chain variable domain of TCR clone 67054 (TRAV27, TRAJ41)
CAGEGNSGYALNF

SEQ ID NO: 134108 - protein, 16 aa, Homo sapiens
  CDR3 for beta chain variable domain of TCR clone 67054 (TRBV6-1, TRBJ2-5)
CASSETLDRGAETQYF

SEQ ID NO: 134109 - protein, 12 aa, Homo sapiens
  CDR3 for alpha chain variable domain of TCR clone 67055 (TRAV1-1, TRAJ8)
CAGGTGFQKLVF

SEQ ID NO: 134110 - protein, 13 aa, Homo sapiens
  CDR3 for beta chain variable domain of TCR clone 67055 (TRBV2, TRBJ1-1)
CASSVSGYTEAFF

SEQ ID NO: 134111 - protein, 21 aa, Homo sapiens
  CDR3 for alpha chain variable domain of TCR clone 67056 (TRAV8-3, TRAJ6)
CAVGGEEATYLHLEEEPALLF

SEQ ID NO: 134112 - protein, 14 aa, Homo sapiens
  CDR3 for beta chain variable domain of TCR clone 67056 (TRBV5-1, TRBJ2-7)
CASSRGESLYEQYF

SEQ ID NO: 134113 - protein, 16 aa, Homo sapiens
  CDR3 for alpha chain variable domain of TCR clone 67057 (TRAV30, TRAJ24)
CGTEIVDADSWGKFQF

SEQ ID NO: 134114 - protein, 18 aa, Homo sapiens
  CDR3 for beta chain variable domain of TCR clone 67057 (TRBV11-2, TRBJ2-3)
CASSLGGASRGAPNTQYL

SEQ ID NO: 134115 - protein, 11 aa, Homo sapiens
  CDR3 for alpha chain variable domain of TCR clone 67058 (TRAV3, TRAJ17)
CAEAAGNELTF

SEQ ID NO: 134116 - protein, 15 aa, Homo sapiens
  CDR3 for beta chain variable domain of TCR clone 67058 (TRBV12-4, TRBJ2-7)
CASSLGSGGPYEQYF

SEQ ID NO: 134117 - protein, 16 aa, Homo sapiens
  CDR3 for alpha chain variable domain of TCR clone 67059 (TRAV3, TRAJ10)
CAVRDMNAGGGSKLTF

SEQ ID NO: 134118 - protein, 16 aa, Homo sapiens
  CDR3 for beta chain variable domain of TCR clone 67059 (TRBV6-3, TRBJ1-2)
CASSYSRRASNYGYTF

SEQ ID NO: 134119 - protein, 15 aa, Homo sapiens
  CDR3 for alpha chain variable domain of TCR clone 67060 (TRAV26-1, TRAJ40)
CIVRAVPSGTYKYIF

SEQ ID NO: 134120 - protein, 14 aa, Homo sapiens
  CDR3 for beta chain variable domain of TCR clone 67060 (TRBV19, TRBJ2-1)
CASKYPGLANEQFF

SEQ ID NO: 134121 - protein, 12 aa, Homo sapiens
  CDR3 for alpha chain variable domain of TCR clone 67061 (TRAV13-1, TRAJ49)
CAASPMGNQFYF

SEQ ID NO: 134122 - protein, 13 aa, Homo sapiens
  CDR3 for beta chain variable domain of TCR clone 67061 (TRBV20-1, TRBJ2-2)
CSASAAGTGGLFF

SEQ ID NO: 134123 - protein, 14 aa, Homo sapiens
  CDR3 for alpha chain variable domain of TCR clone 67062 (TRAV8-3, TRAJ39)
CAVGANNADNMLTF

SEQ ID NO: 134124 - protein, 12 aa, Homo sapiens
  CDR3 for beta chain variable domain of TCR clone 67062 (TRBV11-3, TRBJ1-1)
CASSHRQGEAFF

SEQ ID NO: 134125 - protein, 13 aa, Homo sapiens
  CDR3 for alpha chain variable domain of TCR clone 67063 (TRAV12-2, TRAJ42)
CAVKRGSQGNRIF

SEQ ID NO: 134126 - protein, 12 aa, Homo sapiens
  CDR3 for beta chain variable domain of TCR clone 67063 (TRBV5-7, TRBJ1-2)
CASSLVQNGYTF

SEQ ID NO: 134127 - protein, 13 aa, Homo sapiens
  CDR3 for alpha chain variable domain of TCR clone 67064 (TRAV13-2, TRAJ48)
YAEMDFGNEKLTF

SEQ ID NO: 134128 - protein, 13 aa, Homo sapiens
  CDR3 for beta chain variable domain of TCR clone 67064 (TRBV7-9, TRBJ1-2)
CASSLKQNYGYTF

SEQ ID NO: 134129 - protein, 13 aa, Homo sapiens
  CDR3 for alpha chain variable domain of TCR clone 67065 (TRAV12-3, TRAJ21)
CAPGPHNFNKFYF

SEQ ID NO: 134130 - protein, 15 aa, Homo sapiens
  CDR3 for beta chain variable domain of TCR clone 67065 (TRBV20-1, TRBJ2-7)
CSARDRVSGMDEQYF

SEQ ID NO: 134131 - protein, 15 aa, Homo sapiens
  CDR3 for alpha chain variable domain of TCR clone 67066 (TRAV23/DV6, TRAJ28)
CAALLAYSGAGSYQL

SEQ ID NO: 134132 - protein, 15 aa, Homo sapiens
  CDR3 for beta chain variable domain of TCR clone 67066 (TRBV4-2, TRBJ2-1)
CASSLVAGRYNEQFF

SEQ ID NO: 134133 - protein, 15 aa, Homo sapiens
  CDR3 for alpha chain variable domain of TCR clone 67067 (TRAV3, TRAJ15)
CAVRPANPAGTALIF

SEQ ID NO: 134134 - protein, 14 aa, Homo sapiens
  CDR3 for beta chain variable domain of TCR clone 67067 (TRBV4-1, TRBJ2-2)
CASSQAVNTGELFF

SEQ ID NO: 134135 - protein, 13 aa, Homo sapiens
  CDR3 for alpha chain variable domain of TCR clone 67068 (TRAV8-4, TRAJ30)
CAVSVNRDGKIIF

SEQ ID NO: 134136 - protein, 13 aa, Homo sapiens
  CDR3 for beta chain variable domain of TCR clone 67068 (TRBV3-1, TRBJ2-2)
CASLARGSGELFF

SEQ ID NO: 134137 - protein, 13 aa, Homo sapiens
  CDR3 for alpha chain variable domain of TCR clone 67069 (TRAV12-3, TRAJ54)
CAMTLQGAQKLVF

SEQ ID NO: 134138 - protein, 14 aa, Homo sapiens
  CDR3 for beta chain variable domain of TCR clone 67069 (TRBV4-1, TRBJ2-2)
CASGQAVNTGELFF

SEQ ID NO: 134139 - protein, 14 aa, Homo sapiens
  CDR3 for alpha chain variable domain of TCR clone 67070 (TRAV12-3, TRAJ10)
SHLPLTGGGNKLTF

SEQ ID NO: 134140 - protein, 15 aa, Homo sapiens
  CDR3 for beta chain variable domain of TCR clone 67070 (TRBV27, TRBJ1-5)
CASSLGAGFDQPQHF

SEQ ID NO: 134141 - protein, 16 aa, Homo sapiens
  CDR3 for alpha chain variable domain of TCR clone 67071 (TRAV3, TRAJ37)
CAVRPHGSGNTGKLIF

SEQ ID NO: 134142 - protein, 14 aa, Homo sapiens
  CDR3 for beta chain variable domain of TCR clone 67071 (TRBV5-1, TRBJ2-7)
CASSRGESLYEQYF

SEQ ID NO: 134143 - protein, 15 aa, Homo sapiens
  CDR3 for alpha chain variable domain of TCR clone 67072 (TRAV12-3, TRAJ6)
CAMSATTGGSYIPTF

SEQ ID NO: 134144 - protein, 16 aa, Homo sapiens
  CDR3 for beta chain variable domain of TCR clone 67072 (TRBV20-1, TRBJ1-2)
CSASMGQGVATYGYTF

SEQ ID NO: 134145 - protein, 13 aa, Homo sapiens
  CDR3 for alpha chain variable domain of TCR clone 67073 (TRAV3, TRAJ3)
CAVADSSAPKIIF

SEQ ID NO: 134146 - protein, 12 aa, Homo sapiens
  CDR3 for beta chain variable domain of TCR clone 67073 (TRBV7-8, TRBJ2-7)
CASEGGPHGQYF

SEQ ID NO: 134147 - protein, 10 aa, Homo sapiens
  CDR3 for alpha chain variable domain of TCR clone 67074 (TRAV26-1, TRAJ40)
CIAGTYKYIF

SEQ ID NO: 134148 - protein, 13 aa, Homo sapiens
  CDR3 for beta chain variable domain of TCR clone 67074 (TRBV7-3, TRBJ1-1)
CASSQDWGAEAFF

SEQ ID NO: 134149 - protein, 14 aa, Homo sapiens
  CDR3 for alpha chain variable domain of TCR clone 67075 (TRAV27, TRAJ37)
CAGERPSNTGKLIF

SEQ ID NO: 134150 - protein, 15 aa, Homo sapiens
  CDR3 for beta chain variable domain of TCR clone 67075 (TRBV11-3, TRBJ1-6)
CASSLDWGANSPLHF

SEQ ID NO: 134151 - protein, 14 aa, Homo sapiens
  CDR3 for alpha chain variable domain of TCR clone 67076 (TRAV16, TRAJ39)
CALSKNNAGNMLTF

SEQ ID NO: 134152 - protein, 13 aa, Homo sapiens
  CDR3 for beta chain variable domain of TCR clone 67076 (TRBV7-9, TRBJ2-3)
CASSAAGSDTQYF

SEQ ID NO: 134153 - protein, 16 aa, Homo sapiens
  CDR3 for alpha chain variable domain of TCR clone 67077 (TRAV20, TRAJ52)
CAVLPDVGTSYGKLTF

SEQ ID NO: 134154 - protein, 12 aa, Homo sapiens
  CDR3 for beta chain variable domain of TCR clone 67077 (TRBV19, TRBJ2-1)
CASSQISNEQFF

SEQ ID NO: 134155 - protein, 13 aa, Homo sapiens
  CDR3 for alpha chain variable domain of TCR clone 67078 (TRAV1-1, TRAJ15)
CAVVDQAGTALIF

SEQ ID NO: 134156 - protein, 14 aa, Homo sapiens
  CDR3 for beta chain variable domain of TCR clone 67078 (TRBV5-4, TRBJ1-6)
CASSLWSDDSPLHF

SEQ ID NO: 134157 - protein, 15 aa, Homo sapiens
  CDR3 for alpha chain variable domain of TCR clone 67079 (TRAV14/DV4, TRAJ40)
CAMRGFTSGTYKYIF

SEQ ID NO: 134158 - protein, 16 aa, Homo sapiens
  CDR3 for beta chain variable domain of TCR clone 67079 (TRBV13, TRBJ2-2)
CASSPRTGEHTGELFF

SEQ ID NO: 134159 - protein, 14 aa, Homo sapiens
  CDR3 for alpha chain variable domain of TCR clone 67080 (TRAV1-2, TRAJ16)
CAVNRFSDGQKLLF

SEQ ID NO: 134160 - protein, 15 aa, Homo sapiens
  CDR3 for beta chain variable domain of TCR clone 67080 (TRBV20-1, TRBJ2-7)
CSARDRASGMDEQYF

SEQ ID NO: 134161 - protein, 12 aa, Homo sapiens
  CDR3 for alpha chain variable domain of TCR clone 67081 (TRAV26-2, TRAJ21)
CILKGNFNKFYF

SEQ ID NO: 134162 - protein, 12 aa, Homo sapiens
  CDR3 for beta chain variable domain of TCR clone 67081 (TRBV11-2, TRBJ2-2)
CASSLGGGELFF

SEQ ID NO: 134163 - protein, 18 aa, Homo sapiens
  CDR3 for alpha chain variable domain of TCR clone 67082 (TRAV21, TRAJ53)
CAVKGGENSGGSNYKLTF

SEQ ID NO: 134164 - protein, 13 aa, Homo sapiens
  CDR3 for beta chain variable domain of TCR clone 67082 (TRBV12-4, TRBJ2-7)
CASSLSGVYEQYF

SEQ ID NO: 134165 - protein, 10 aa, Homo sapiens
  CDR3 for alpha chain variable domain of TCR clone 67083 (TRAV1-2, TRAJ20)
CALNDYKLSF

SEQ ID NO: 134166 - protein, 14 aa, Homo sapiens
  CDR3 for beta chain variable domain of TCR clone 67083 (TRBV7-8, TRBJ2-3)
CASSLEAGTDTQYF

SEQ ID NO: 134167 - protein, 16 aa, Homo sapiens
  CDR3 for alpha chain variable domain of TCR clone 67084 (TRAV3, TRAJ5)
CAVRNLMETGRRALTF

SEQ ID NO: 134168 - protein, 16 aa, Homo sapiens
  CDR3 for beta chain variable domain of TCR clone 67084 (TRBV4-2, TRBJ2-7)
CASSQEGLANSYEQYF

SEQ ID NO: 134169 - protein, 11 aa, Homo sapiens
  CDR3 for alpha chain variable domain of TCR clone 67085 (TRAV3, TRAJ21)
CAVGNFNKFYF

SEQ ID NO: 134170 - protein, 14 aa, Homo sapiens
  CDR3 for beta chain variable domain of TCR clone 67085 (TRBV7-6, TRBJ2-3)
CASSVAGGTDTQYF

SEQ ID NO: 134171 - protein, 14 aa, Homo sapiens
  CDR3 for alpha chain variable domain of TCR clone 67086 (TRAV12-2, TRAJ40)
CAVKIPSGTYNYIF

SEQ ID NO: 134172 - protein, 13 aa, Homo sapiens
  CDR3 for beta chain variable domain of TCR clone 67086 (TRBV20-1, TRBJ1-3)
CSARVQGRDTIYF

SEQ ID NO: 134173 - protein, 10 aa, Homo sapiens
  CDR3 for alpha chain variable domain of TCR clone 67087 (TRAV5, TRAJ34)
CAEDTDKLFF

SEQ ID NO: 134174 - protein, 12 aa, Homo sapiens
  CDR3 for beta chain variable domain of TCR clone 67087 (TRBV11-2, TRBJ2-2)
CASSLGGGELFF

SEQ ID NO: 134175 - protein, 11 aa, Homo sapiens
  CDR3 for alpha chain variable domain of TCR clone 67088 (TRAV2, TRAJ13)
CASGGYQKVAF

SEQ ID NO: 134176 - protein, 12 aa, Homo sapiens
  CDR3 for beta chain variable domain of TCR clone 67088 (TRBV7-8, TRBJ2-7)
CASSLGDREQYF

SEQ ID NO: 134177 - protein, 14 aa, Homo sapiens
  CDR3 for alpha chain variable domain of TCR clone 67089 (TRAV2, TRAJ9)
CAVEDRSGGFKTIF

SEQ ID NO: 134178 - protein, 14 aa, Homo sapiens
  CDR3 for beta chain variable domain of TCR clone 67089 (TRBV7-9, TRBJ2-1)
CASSPRDSLYEQFF

SEQ ID NO: 134179 - protein, 14 aa, Homo sapiens
  CDR3 for alpha chain variable domain of TCR clone 67090 (TRAV12-2, TRAJ9)
CAVNALEGGFKTIF

SEQ ID NO: 134180 - protein, 16 aa, Homo sapiens
  CDR3 for beta chain variable domain of TCR clone 67090 (TRBV19, TRBJ1-6)
CASSVAPVAGNSTLHF

SEQ ID NO: 134181 - protein, 14 aa, Homo sapiens
  CDR3 for alpha chain variable domain of TCR clone 67091 (TRAV14/DV4, TRAJ32)
SNVLPLTPTNKLIF

SEQ ID NO: 134182 - protein, 15 aa, Homo sapiens
  CDR3 for beta chain variable domain of TCR clone 67091 (TRBV18, TRBJ2-1)
CASSPPSASYNEQFF

SEQ ID NO: 134183 - protein, 13 aa, Homo sapiens
  CDR3 for alpha chain variable domain of TCR clone 67092 (TRAV20, TRAJ48)
CAVQGVGNEKLTF

SEQ ID NO: 134184 - protein, 14 aa, Homo sapiens
  CDR3 for beta chain variable domain of TCR clone 67092 (TRBV27, TRBJ2-7)
CASSFRDGPYEQYV

SEQ ID NO: 134185 - protein, 15 aa, Homo sapiens
  CDR3 for alpha chain variable domain of TCR clone 67093 (TRAV12-3, TRAJ6)
CAMSATTGGSYIPTF

SEQ ID NO: 134186 - protein, 13 aa, Homo sapiens
  CDR3 for beta chain variable domain of TCR clone 67093 (TRBV7-9, TRBJ1-2)
CASSLRHYYGYTF

SEQ ID NO: 134187 - protein, 15 aa, Homo sapiens
  CDR3 for alpha chain variable domain of TCR clone 67094 (TRAV17, TRAJ23)
CATDAEDNQGGKLIF

SEQ ID NO: 134188 - protein, 12 aa, Homo sapiens
  CDR3 for beta chain variable domain of TCR clone 67094 (TRBV2, TRBJ2-1)
CAKWEGYNEQFF

SEQ ID NO: 134189 - protein, 13 aa, Homo sapiens
  CDR3 for alpha chain variable domain of TCR clone 67095 (TRAV12-2, TRAJ20)
CAVNRFDDYKLSF

SEQ ID NO: 134190 - protein, 12 aa, Homo sapiens
  CDR3 for beta chain variable domain of TCR clone 67095 (TRBV28, TRBJ2-3)
CASSLYRDTQHF

SEQ ID NO: 134191 - protein, 14 aa, Homo sapiens
  CDR3 for alpha chain variable domain of TCR clone 67096 (TRAV3, TRAJ42)
CCETLGGGQGNLIF

SEQ ID NO: 134192 - protein, 14 aa, Homo sapiens
  CDR3 for beta chain variable domain of TCR clone 67096 (TRBV19, TRBJ2-5)
CASSSSGIQETQYF

SEQ ID NO: 134193 - protein, 13 aa, Homo sapiens
  CDR3 for alpha chain variable domain of TCR clone 67097 (TRAV35, TRAJ36)
CAGPRIGANNLFF

SEQ ID NO: 134194 - protein, 16 aa, Homo sapiens
  CDR3 for beta chain variable domain of TCR clone 67097 (TRBV20-1, TRBJ1-4)
CSAPGQGLLTNEKLFF

SEQ ID NO: 134195 - protein, 14 aa, Homo sapiens
  CDR3 for alpha chain variable domain of TCR clone 67098 (TRAV13-1, TRAJ35)
CAASKGGFGNVLHC

SEQ ID NO: 134196 - protein, 17 aa, Homo sapiens
  CDR3 for beta chain variable domain of TCR clone 67098 (TRBV7-3, TRBJ2-5)
CASSLGSGRSGSETQYF

SEQ ID NO: 134197 - protein, 13 aa, Homo sapiens
  CDR3 for alpha chain variable domain of TCR clone 67099 (TRAV12-1, TRAJ26)
CVVRRNYGQNFVF

SEQ ID NO: 134198 - protein, 11 aa, Homo sapiens
  CDR3 for beta chain variable domain of TCR clone 67099 (TRBV29-1, TRBJ2-5)
CSEDRTGTQYF

SEQ ID NO: 134199 - protein, 16 aa, Homo sapiens
  CDR3 for alpha chain variable domain of TCR clone 67100 (TRAV12-2, TRAJ10)
CAVNRVLTGGGNKLTF

SEQ ID NO: 134200 - protein, 13 aa, Homo sapiens
  CDR3 for beta chain variable domain of TCR clone 67100 (TRBV7-9, TRBJ1-2)
CASSLKQNYGYTF

SEQ ID NO: 134201 - protein, 15 aa, Homo sapiens
  CDR3 for alpha chain variable domain of TCR clone 67101 (TRAV17, TRAJ16)
CATALRFSDGPKLLF

SEQ ID NO: 134202 - protein, 12 aa, Homo sapiens
  CDR3 for beta chain variable domain of TCR clone 67101 (TRBV2, TRBJ2-7)
CASSDPDYEQYF

SEQ ID NO: 134203 - protein, 11 aa, Homo sapiens
  CDR3 for alpha chain variable domain of TCR clone 67102 (TRAV1-1, TRAJ23)
CAVHQGGKLIF

SEQ ID NO: 134204 - protein, 13 aa, Homo sapiens
  CDR3 for beta chain variable domain of TCR clone 67102 (TRBV12-4, TRBJ2-2)
CASSPLPPGELFF

SEQ ID NO: 134205 - protein, 13 aa, Homo sapiens
  CDR3 for alpha chain variable domain of TCR clone 67103 (TRAV23/DV6, TRAJ16)
CAASISDGQKLLF

SEQ ID NO: 134206 - protein, 13 aa, Homo sapiens
  CDR3 for beta chain variable domain of TCR clone 67103 (TRBV7-2, TRBJ2-2)
CASSLAVTGELFF

SEQ ID NO: 134207 - protein, 16 aa, Homo sapiens
  CDR3 for alpha chain variable domain of TCR clone 67104 (TRAV30, TRAJ24)
CGTEIVDADSWGKFQF

SEQ ID NO: 134208 - protein, 18 aa, Homo sapiens
  CDR3 for beta chain variable domain of TCR clone 67104 (TRBV7-9, TRBJ2-7)
CANSLTTSGSRTWYEQYF

SEQ ID NO: 134209 - protein, 18 aa, Homo sapiens
  CDR3 for alpha chain variable domain of TCR clone 67105 (TRAV26-1, TRAJ23)
CIVRVGLEVWNQGGKLFF

SEQ ID NO: 134210 - protein, 16 aa, Homo sapiens
  CDR3 for beta chain variable domain of TCR clone 67105 (TRBV12-4, TRBJ2-5)
CASSFFVRGRQETQYF

SEQ ID NO: 134211 - protein, 16 aa, Homo sapiens
  CDR3 for alpha chain variable domain of TCR clone 67106 (TRAV4, TRAJ22)
CLVGDLFSGSARQLTF

SEQ ID NO: 134212 - protein, 16 aa, Homo sapiens
  CDR3 for beta chain variable domain of TCR clone 67106 (TRBV7-9, TRBJ2-1)
CASSDVAGGSYNEQFF

SEQ ID NO: 134213 - protein, 14 aa, Homo sapiens
  CDR3 for alpha chain variable domain of TCR clone 67107 (TRAV17, TRAJ22)
CATVLSGSTRQLTF

SEQ ID NO: 134214 - protein, 13 aa, Homo sapiens
  CDR3 for beta chain variable domain of TCR clone 67107 (TRBV15, TRBJ1-6)
CATSGGLNSPLHF

SEQ ID NO: 134215 - protein, 14 aa, Homo sapiens
  CDR3 for alpha chain variable domain of TCR clone 67108 (TRAV1-2, TRAJ8)
CAVREDTGFQKLVF

SEQ ID NO: 134216 - protein, 16 aa, Homo sapiens
  CDR3 for beta chain variable domain of TCR clone 67108 (TRBV15, TRBJ2-2)
CATSRKLAVRTGELFF

SEQ ID NO: 134217 - protein, 15 aa, Homo sapiens
  CDR3 for alpha chain variable domain of TCR clone 67109 (TRAV3, TRAJ3)
CCERPRYSSASKIIF

SEQ ID NO: 134218 - protein, 13 aa, Homo sapiens
  CDR3 for beta chain variable domain of TCR clone 67109 (TRBV29-1, TRBJ1-1)
CSVGDSRNTEAFF

SEQ ID NO: 134219 - protein, 13 aa, Homo sapiens
  CDR3 for alpha chain variable domain of TCR clone 67110 (TRAV20, TRAJ45)
CGYSGGGADGLTF

SEQ ID NO: 134220 - protein, 15 aa, Homo sapiens
  CDR3 for beta chain variable domain of TCR clone 67110 (TRBV27, TRBJ2-7)
CASSTAGTGSYERYF

SEQ ID NO: 134221 - protein, 15 aa, Homo sapiens
  CDR3 for alpha chain variable domain of TCR clone 67111 (TRAV12-3, TRAJ6)
CAMSGTTGGSYIPTF

SEQ ID NO: 134222 - protein, 17 aa, Homo sapiens
  CDR3 for beta chain variable domain of TCR clone 67111 (TRBV13, TRBJ2-3)
CASSLSRVAGGRNTQYF

SEQ ID NO: 134223 - protein, 11 aa, Homo sapiens
  CDR3 for alpha chain variable domain of TCR clone 67112 (TRAV2, TRAJ13)
CASGGYQKVTS

SEQ ID NO: 134224 - protein, 14 aa, Homo sapiens
  CDR3 for beta chain variable domain of TCR clone 67112 (TRBV7-3, TRBJ2-1)
CASSLAGGTNEQFF

SEQ ID NO: 134225 - protein, 16 aa, Homo sapiens
  CDR3 for alpha chain variable domain of TCR clone 67113 (TRAV30, TRAJ24)
CGTEIVDADSWGKFQF

SEQ ID NO: 134226 - protein, 12 aa, Homo sapiens
  CDR3 for beta chain variable domain of TCR clone 67113 (TRBV19, TRBJ2-7)
CASTDRGYEQYF

SEQ ID NO: 134227 - protein, 14 aa, Homo sapiens
  CDR3 for alpha chain variable domain of TCR clone 67114 (TRAV14/DV4, TRAJ9)
CAMRESTGGFKTIF

SEQ ID NO: 134228 - protein, 19 aa, Homo sapiens
  CDR3 for beta chain variable domain of TCR clone 67114 (TRBV19, TRBJ2-2)
CASTRPGLAEGRVTGELFF

SEQ ID NO: 134229 - protein, 15 aa, Homo sapiens
  CDR3 for alpha chain variable domain of TCR clone 67115 (TRAV3, TRAJ3)
CVVRDMSSSASKIIF

SEQ ID NO: 134230 - protein, 17 aa, Homo sapiens
  CDR3 for beta chain variable domain of TCR clone 67115 (TRBV24-1, TRBJ2-1)
CATSDVSTSGTYNEQFF

SEQ ID NO: 134231 - protein, 14 aa, Homo sapiens
  CDR3 for alpha chain variable domain of TCR clone 67116 (TRAV12-3, TRAJ42)
CAMNYGGSQGNLIF

SEQ ID NO: 134232 - protein, 13 aa, Homo sapiens
  CDR3 for beta chain variable domain of TCR clone 67116 (TRBV4-1, TRBJ2-2)
CASSQENTGELFF

SEQ ID NO: 134233 - protein, 12 aa, Homo sapiens
  CDR3 for alpha chain variable domain of TCR clone 67117 (TRAV29/DV5, TRAJ49)
CAATDTGNQFYF

SEQ ID NO: 134234 - protein, 17 aa, Homo sapiens
  CDR3 for beta chain variable domain of TCR clone 67117 (TRBV20-1, TRBJ2-2)
CSASGSGQGGLTGELFF

SEQ ID NO: 134235 - protein, 13 aa, Homo sapiens
  CDR3 for alpha chain variable domain of TCR clone 67118 (TRAV3, TRAJ27)
CAVRPLGAAKSTF

SEQ ID NO: 134236 - protein, 13 aa, Homo sapiens
  CDR3 for beta chain variable domain of TCR clone 67118 (TRBV7-9, TRBJ2-3)
CASSPGSTDTQYF

SEQ ID NO: 134237 - protein, 13 aa, Homo sapiens
  CDR3 for alpha chain variable domain of TCR clone 67119 (TRAV4, TRAJ28)
CLFIWGWELPTHF

SEQ ID NO: 134238 - protein, 16 aa, Homo sapiens
  CDR3 for beta chain variable domain of TCR clone 67119 (TRBV20-1, TRBJ2-4)
CSATSLAELAKNIQYF

SEQ ID NO: 134239 - protein, 14 aa, Homo sapiens
  CDR3 for alpha chain variable domain of TCR clone 67120 (TRAV2, TRAJ37)
CAVDFTSNTGKLIF

SEQ ID NO: 134240 - protein, 15 aa, Homo sapiens
  CDR3 for beta chain variable domain of TCR clone 67120 (TRBV20-1, TRBJ1-1)
CCASRGVTGNTEAFF

SEQ ID NO: 134241 - protein, 16 aa, Homo sapiens
  CDR3 for alpha chain variable domain of TCR clone 67121 (TRAV26-1, TRAJ45)
CIVEKYSGGGADGLTF

SEQ ID NO: 134242 - protein, 12 aa, Homo sapiens
  CDR3 for beta chain variable domain of TCR clone 67121 (TRBV7-9, TRBJ2-7)
CATRTDAYEQYF

SEQ ID NO: 134243 - protein, 16 aa, Homo sapiens
  CDR3 for alpha chain variable domain of TCR clone 67122 (TRAV30, TRAJ24)
CGTEIVDAGSWGKFQF

SEQ ID NO: 134244 - protein, 15 aa, Homo sapiens
  CDR3 for beta chain variable domain of TCR clone 67122 (TRBV27, TRBJ2-1)
CASSNGGGSSNEQFF

SEQ ID NO: 134245 - protein, 14 aa, Homo sapiens
  CDR3 for alpha chain variable domain of TCR clone 67123 (TRAV12-2, TRAJ13)
CAVKKTGGYQKVTF

SEQ ID NO: 134246 - protein, 13 aa, Homo sapiens
  CDR3 for beta chain variable domain of TCR clone 67123 (TRBV7-9, TRBJ2-2)
CASSLDPTGELFF

SEQ ID NO: 134247 - protein, 14 aa, Homo sapiens
  CDR3 for alpha chain variable domain of TCR clone 67124 (TRAV12-1, TRAJ12)
CVVTRMYSSYKLIF

SEQ ID NO: 134248 - protein, 13 aa, Homo sapiens
  CDR3 for beta chain variable domain of TCR clone 67124 (TRBV20-1, TRBJ1-1)
CSARGGGNTEAFF

SEQ ID NO: 134249 - protein, 13 aa, Homo sapiens
  CDR3 for alpha chain variable domain of TCR clone 67125 (TRAV13-1, TRAJ6)
CAARRGGSYIPTF

SEQ ID NO: 134250 - protein, 16 aa, Homo sapiens
  CDR3 for beta chain variable domain of TCR clone 67125 (TRBV7-9, TRBJ2-2)
CASSLATGVGTGGLFF

SEQ ID NO: 134251 - protein, 15 aa, Homo sapiens
  CDR3 for alpha chain variable domain of TCR clone 67126 (TRAV26-1, TRAJ56)
CIVRVATGANSKLTL

SEQ ID NO: 134252 - protein, 15 aa, Homo sapiens
  CDR3 for beta chain variable domain of TCR clone 67126 (TRBV27, TRBJ2-7)
CASSPQREGQREQYF

SEQ ID NO: 134253 - protein, 13 aa, Homo sapiens
  CDR3 for alpha chain variable domain of TCR clone 67127 (TRAV29/DV5, TRAJ31)
CAASRNNNARLMF

SEQ ID NO: 134254 - protein, 12 aa, Homo sapiens
  CDR3 for beta chain variable domain of TCR clone 67127 (TRBV5-4, TRBJ2-7)
CASSLEAYEQYF

SEQ ID NO: 134255 - protein, 17 aa, Homo sapiens
  CDR3 for alpha chain variable domain of TCR clone 67128 (TRAV3, TRAJ6)
CAVRDGPRAGGSYIPTF

SEQ ID NO: 134256 - protein, 15 aa, Homo sapiens
  CDR3 for beta chain variable domain of TCR clone 67128 (TRBV7-2, TRBJ2-7)
CASSLKGALTYEQYF

SEQ ID NO: 134257 - protein, 13 aa, Homo sapiens
  CDR3 for alpha chain variable domain of TCR clone 67129 (TRAV1-2, TRAJ11)
CAVRREGYSTLTF

SEQ ID NO: 134258 - protein, 14 aa, Homo sapiens
  CDR3 for beta chain variable domain of TCR clone 67129 (TRBV7-2, TRBJ2-7)
CASSPKTSFYEQYF

SEQ ID NO: 134259 - protein, 16 aa, Homo sapiens
  CDR3 for alpha chain variable domain of TCR clone 67130 (TRAV30, TRAJ24)
CGTEIVDADSWGKFQF

SEQ ID NO: 134260 - protein, 16 aa, Homo sapiens
  CDR3 for beta chain variable domain of TCR clone 67130 (TRBV4-3, TRBJ2-1)
CASSPALDRGVNEQFF

SEQ ID NO: 134261 - protein, 12 aa, Homo sapiens
  CDR3 for alpha chain variable domain of TCR clone 67131 (TRAV16, TRAJ30)
CALGDRDDKIIF

SEQ ID NO: 134262 - protein, 16 aa, Homo sapiens
  CDR3 for beta chain variable domain of TCR clone 67131 (TRBV4-3, TRBJ2-1)
CASSPALDRGVNEQFF

SEQ ID NO: 134263 - protein, 12 aa, Homo sapiens
  CDR3 for alpha chain variable domain of TCR clone 67132 (TRAV35, TRAJ39)
LAPNNAGNMLTF

SEQ ID NO: 134264 - protein, 13 aa, Homo sapiens
  CDR3 for beta chain variable domain of TCR clone 67132 (TRBV7-3, TRBJ2-1)
CQQLSGGTNEQFF

SEQ ID NO: 134265 - protein, 15 aa, Homo sapiens
  CDR3 for alpha chain variable domain of TCR clone 67133 (TRAV35, TRAJ40)
CAGQLGTSGTYKYIF

SEQ ID NO: 134266 - protein, 14 aa, Homo sapiens
  CDR3 for beta chain variable domain of TCR clone 67133 (TRBV7-3, TRBJ2-1)
CASSFAGGTNEQFF

SEQ ID NO: 134267 - protein, 12 aa, Homo sapiens
  CDR3 for alpha chain variable domain of TCR clone 67134 (TRAV26-1, TRAJ13)
CIVSRGYQKVTF

SEQ ID NO: 134268 - protein, 15 aa, Homo sapiens
  CDR3 for beta chain variable domain of TCR clone 67134 (TRBV7-9, TRBJ1-6)
CASSSPGRGNSPLHF

SEQ ID NO: 134269 - protein, 10 aa, Homo sapiens
  CDR3 for alpha chain variable domain of TCR clone 67135 (TRAV1-2, TRAJ20)
CACNDYKLSF

SEQ ID NO: 134270 - protein, 16 aa, Homo sapiens
  CDR3 for beta chain variable domain of TCR clone 67135 (TRBV20-1, TRBJ2-1)
CSARDLNQGMNNEQFF

SEQ ID NO: 134271 - protein, 11 aa, Homo sapiens
  CDR3 for alpha chain variable domain of TCR clone 67136 (TRAV2, TRAJ13)
CASGGYQKVTF

SEQ ID NO: 134272 - protein, 14 aa, Homo sapiens
  CDR3 for beta chain variable domain of TCR clone 67136 (TRBV7-9, TRBJ2-1)
CASSSMVGFGEQFF

SEQ ID NO: 134273 - protein, 16 aa, Homo sapiens
  CDR3 for alpha chain variable domain of TCR clone 67137 (TRAV23/DV6, TRAJ9)
CAASIGGNTGGFKTIF

SEQ ID NO: 134274 - protein, 14 aa, Homo sapiens
  CDR3 for beta chain variable domain of TCR clone 67137 (TRBV7-2, TRBJ2-7)
CASRSQGAAYEQYF

SEQ ID NO: 134275 - protein, 15 aa, Homo sapiens
  CDR3 for alpha chain variable domain of TCR clone 67138 (TRAV12-3, TRAJ52)
CNGGASGTSYGKLTF

SEQ ID NO: 134276 - protein, 13 aa, Homo sapiens
  CDR3 for beta chain variable domain of TCR clone 67138 (TRBV20-1, TRBJ2-5)
CSARGDYQETQYF

SEQ ID NO: 134277 - protein, 13 aa, Homo sapiens
  CDR3 for alpha chain variable domain of TCR clone 67139 (TRAV12-3, TRAJ40)
CAMSDSGTYKYIF

SEQ ID NO: 134278 - protein, 22 aa, Homo sapiens
  CDR3 for beta chain variable domain of TCR clone 67139 (TRBV14, TRBJ1-5)
CASSQDGVTPYLPPIGNQPQHL

SEQ ID NO: 134279 - protein, 13 aa, Homo sapiens
  CDR3 for alpha chain variable domain of TCR clone 67140 (TRAV20, TRAJ37)
CAGCSSNTGKLIF

SEQ ID NO: 134280 - protein, 14 aa, Homo sapiens
  CDR3 for beta chain variable domain of TCR clone 67140 (TRBV9, TRBJ2-7)
CASSVGVGSYEQYF

SEQ ID NO: 134281 - protein, 12 aa, Homo sapiens
  CDR3 for alpha chain variable domain of TCR clone 67141 (TRAV23/DV6, TRAJ30)
CAASKGDDKLIF

SEQ ID NO: 134282 - protein, 18 aa, Homo sapiens
  CDR3 for beta chain variable domain of TCR clone 67141 (TRBV10-3, TRBJ2-3)
CAISESRVGPMRGDTQYF

SEQ ID NO: 134283 - protein, 15 aa, Homo sapiens
  CDR3 for alpha chain variable domain of TCR clone 67142 (TRAV25, TRAJ53)
CAATGGGGSNYNLTF

SEQ ID NO: 134284 - protein, 11 aa, Homo sapiens
  CDR3 for beta chain variable domain of TCR clone 67142 (TRBV11-3, TRBJ2-2)
CASSSGGELFF

SEQ ID NO: 134285 - protein, 20 aa, Homo sapiens
  CDR3 for alpha chain variable domain of TCR clone 67143 (TRAV4, TRAJ29)
CCVLLPRGCVPFSGNTPIVF

SEQ ID NO: 134286 - protein, 12 aa, Homo sapiens
  CDR3 for beta chain variable domain of TCR clone 67143 (TRBV6-1, TRBJ2-7)
CASSDYSYEQYF

SEQ ID NO: 134287 - protein, 16 aa, Homo sapiens
  CDR3 for alpha chain variable domain of TCR clone 67144 (TRAV3, TRAJ40)
CAVRDRIASGTYKYIF

SEQ ID NO: 134288 - protein, 16 aa, Homo sapiens
  CDR3 for beta chain variable domain of TCR clone 67144 (TRBV6-1, TRBJ1-2)
CASSEANSIINYGYTC

SEQ ID NO: 134289 - protein, 15 aa, Homo sapiens
  CDR3 for alpha chain variable domain of TCR clone 67145 (TRAV3, TRAJ3)
CAVRDGHSSASKIIF

SEQ ID NO: 134290 - protein, 14 aa, Homo sapiens
  CDR3 for beta chain variable domain of TCR clone 67145 (TRBV28, TRBJ1-4)
CASSFGTFGEKLFF

SEQ ID NO: 134291 - protein, 12 aa, Homo sapiens
  CDR3 for alpha chain variable domain of TCR clone 67146 (TRAV12-1, TRAJ34)
CVGAGATDKLIF

SEQ ID NO: 134292 - protein, 12 aa, Homo sapiens
  CDR3 for beta chain variable domain of TCR clone 67146 (TRBV7-9, TRBJ1-1)
CASSLVRGEAFF

SEQ ID NO: 134293 - protein, 16 aa, Homo sapiens
  CDR3 for alpha chain variable domain of TCR clone 67147 (TRAV21, TRAJ52)
CAVTNAGGTSYGKLTF

SEQ ID NO: 134294 - protein, 16 aa, Homo sapiens
  CDR3 for beta chain variable domain of TCR clone 67147 (TRBV28, TRBJ2-1)
CASSSPEYPRDNEQFF

SEQ ID NO: 134295 - protein, 14 aa, Homo sapiens
  CDR3 for alpha chain variable domain of TCR clone 67148 (TRAV4, TRAJ34)
CLVGDLYNTDKLIF

SEQ ID NO: 134296 - protein, 11 aa, Homo sapiens
  CDR3 for beta chain variable domain of TCR clone 67148 (TRBV11-2, TRBJ2-2)
CASSLPGELFF

SEQ ID NO: 134297 - protein, 12 aa, Homo sapiens
  CDR3 for alpha chain variable domain of TCR clone 67149 (TRAV26-2, TRAJ21)
CILKGNFNKFYF

SEQ ID NO: 134298 - protein, 14 aa, Homo sapiens
  CDR3 for beta chain variable domain of TCR clone 67149 (TRBV7-9, TRBJ1-1)
CASTPLESYTEAFF

SEQ ID NO: 134299 - protein, 13 aa, Homo sapiens
  CDR3 for alpha chain variable domain of TCR clone 67150 (TRAV8-3, TRAJ48)
CCGCNFGNEKLTF

SEQ ID NO: 134300 - protein, 12 aa, Homo sapiens
  CDR3 for beta chain variable domain of TCR clone 67150 (TRBV7-2, TRBJ2-5)
CASGQYQETQYF

SEQ ID NO: 134301 - protein, 15 aa, Homo sapiens
  CDR3 for alpha chain variable domain of TCR clone 67151 (TRAV3, TRAJ4)
CAQNMFSGGYNKLIF

SEQ ID NO: 134302 - protein, 12 aa, Homo sapiens
  CDR3 for beta chain variable domain of TCR clone 67151 (TRBV11-2, TRBJ2-2)
CASSLGGGELFF

SEQ ID NO: 134303 - protein, 15 aa, Homo sapiens
  CDR3 for alpha chain variable domain of TCR clone 67152 (TRAV27, TRAJ38)
CAGRFNAGNNRKLIC

SEQ ID NO: 134304 - protein, 13 aa, Homo sapiens
  CDR3 for beta chain variable domain of TCR clone 67152 (TRBV12-5, TRBJ2-3)
CASQNRGTDTQYF

SEQ ID NO: 134305 - protein, 12 aa, Homo sapiens
  CDR3 for alpha chain variable domain of TCR clone 67153 (TRAV12-1, TRAJ17)
CAMTLAGNKLTF

SEQ ID NO: 134306 - protein, 15 aa, Homo sapiens
  CDR3 for beta chain variable domain of TCR clone 67153 (TRBV20-1, TRBJ2-7)
CSARDRVSGMDEQYF

SEQ ID NO: 134307 - protein, 12 aa, Homo sapiens
  CDR3 for alpha chain variable domain of TCR clone 67154 (TRAV13-2, TRAJ23)
CAERHRGGKLIF

SEQ ID NO: 134308 - protein, 17 aa, Homo sapiens
  CDR3 for beta chain variable domain of TCR clone 67154 (TRBV7-8, TRBJ2-6)
CASSAGTGGAGANVLTF

SEQ ID NO: 134309 - protein, 12 aa, Homo sapiens
  CDR3 for alpha chain variable domain of TCR clone 67155 (TRAV12-1, )
CVVNSWISRTLT

SEQ ID NO: 134310 - protein, 15 aa, Homo sapiens
  CDR3 for beta chain variable domain of TCR clone 67155 (TRBV29-1, TRBJ2-1)
CSGRDRKSSYNEQFF

SEQ ID NO: 134311 - protein, 12 aa, Homo sapiens
  CDR3 for alpha chain variable domain of TCR clone 67156 (TRAV12-2, TRAJ10)
WGVTGGGNKLTF

SEQ ID NO: 134312 - protein, 15 aa, Homo sapiens
  CDR3 for beta chain variable domain of TCR clone 67156 (TRBV28, TRBJ2-4)
CAAGSGTLLMGIQYF

SEQ ID NO: 134313 - protein, 10 aa, Homo sapiens
  CDR3 for alpha chain variable domain of TCR clone 67157 (TRAV12-2, TRAJ52)
RSTSYGKLTF

SEQ ID NO: 134314 - protein, 15 aa, Homo sapiens
  CDR3 for beta chain variable domain of TCR clone 67157 (TRBV20-1, TRBJ2-7)
CSARDRVSGMDEQYF

SEQ ID NO: 134315 - protein, 12 aa, Homo sapiens
  CDR3 for alpha chain variable domain of TCR clone 67158 (TRAV12-3, TRAJ17)
CAMTLTGNKLTF

SEQ ID NO: 134316 - protein, 12 aa, Homo sapiens
  CDR3 for beta chain variable domain of TCR clone 67158 (TRBV7-9, TRBJ1-5)
CASSPLGQPQHF

SEQ ID NO: 134317 - protein, 15 aa, Homo sapiens
  CDR3 for alpha chain variable domain of TCR clone 67159 (TRAV38-1, TRAJ37)
CAFIFGSGNTGKLIF

SEQ ID NO: 134318 - protein, 12 aa, Homo sapiens
  CDR3 for beta chain variable domain of TCR clone 67159 (TRBV7-9, TRBJ2-7)
CASSLEGYKQYF

SEQ ID NO: 134319 - protein, 13 aa, Homo sapiens
  CDR3 for alpha chain variable domain of TCR clone 67160 (TRAV27, TRAJ45)
CRSPGGGADGLTF

SEQ ID NO: 134320 - protein, 11 aa, Homo sapiens
  CDR3 for beta chain variable domain of TCR clone 67160 (TRBV19, TRBJ1-1)
CASSIGSEAFF

SEQ ID NO: 134321 - protein, 12 aa, Homo sapiens
  CDR3 for alpha chain variable domain of TCR clone 67161 (TRAV8-3, TRAJ27)
CAVVAEAGKSTF

SEQ ID NO: 134322 - protein, 14 aa, Homo sapiens
  CDR3 for beta chain variable domain of TCR clone 67161 (TRBV2, TRBJ2-1)
CASRLIVGHDEQFF

SEQ ID NO: 134323 - protein, 13 aa, Homo sapiens
  CDR3 for alpha chain variable domain of TCR clone 67162 (TRAV1-2, TRAJ9)
RAALNTGGFKTIF

SEQ ID NO: 134324 - protein, 12 aa, Homo sapiens
  CDR3 for beta chain variable domain of TCR clone 67162 (TRBV11-3, TRBJ1-1)
CASSHRQGEAFF

SEQ ID NO: 134325 - protein, 11 aa, Homo sapiens
  CDR3 for alpha chain variable domain of TCR clone 67163 (TRAV3, TRAJ21)
CAVGNFNKSYF

SEQ ID NO: 134326 - protein, 16 aa, Homo sapiens
  CDR3 for beta chain variable domain of TCR clone 67163 (TRBV19, TRBJ2-1)
CASSKAGPSSYNGQFF

SEQ ID NO: 134327 - protein, 11 aa, Homo sapiens
  CDR3 for alpha chain variable domain of TCR clone 67164 (TRAV21, TRAJ34)
CAHYNTDKPIF

SEQ ID NO: 134328 - protein, 16 aa, Homo sapiens
  CDR3 for beta chain variable domain of TCR clone 67164 (TRBV10-2, TRBJ1-1)
CASSEFGEGASTEAFF

SEQ ID NO: 134329 - protein, 14 aa, Homo sapiens
  CDR3 for alpha chain variable domain of TCR clone 67165 (TRAV35, TRAJ13)
CAGSPSGGYQKATF

SEQ ID NO: 134330 - protein, 13 aa, Homo sapiens
  CDR3 for beta chain variable domain of TCR clone 67165 (TRBV29-1, TRBJ1-1)
CSVGDSRNTEAFF

SEQ ID NO: 134331 - protein, 14 aa, Homo sapiens
  CDR3 for alpha chain variable domain of TCR clone 67166 (TRAV12-2, TRAJ13)
CAVKKTRGYQKVTF

SEQ ID NO: 134332 - protein, 12 aa, Homo sapiens
  CDR3 for beta chain variable domain of TCR clone 67166 (TRBV12-4, TRBJ1-2)
CASSFIWLHLRF

SEQ ID NO: 134333 - protein, 14 aa, Homo sapiens
  CDR3 for alpha chain variable domain of TCR clone 67167 (TRAV14/DV4, TRAJ58)
CAMMKETSGSRLTF

SEQ ID NO: 134334 - protein, 13 aa, Homo sapiens
  CDR3 for beta chain variable domain of TCR clone 67167 (TRBV7-9, TRBJ1-2)
CASSLKQNYGYTF

SEQ ID NO: 134335 - protein, 14 aa, Homo sapiens
  CDR3 for alpha chain variable domain of TCR clone 67168 (TRAV12-1, TRAJ12)
CVVTRVDSSYKLIF

SEQ ID NO: 134336 - protein, 14 aa, Homo sapiens
  CDR3 for beta chain variable domain of TCR clone 67168 (TRBV4-1, TRBJ2-7)
CASSPVAGGDEQYF

SEQ ID NO: 134337 - protein, 16 aa, Homo sapiens
  CDR3 for alpha chain variable domain of TCR clone 67169 (TRAV3, TRAJ5)
CAVRNLMGTGRRALTF

SEQ ID NO: 134338 - protein, 16 aa, Homo sapiens
  CDR3 for beta chain variable domain of TCR clone 67169 (TRBV4-2, TRBJ2-7)
CASSQEGLANSYEQYF

SEQ ID NO: 134339 - protein, 16 aa, Homo sapiens
  CDR3 for alpha chain variable domain of TCR clone 67170 (TRAV30, TRAJ24)
CGTEIVDADSWGKFQF

SEQ ID NO: 134340 - protein, 16 aa, Homo sapiens
  CDR3 for beta chain variable domain of TCR clone 67170 (TRBV2, TRBJ1-3)
CASSGGAGRSGNTIYI

SEQ ID NO: 134341 - protein, 11 aa, Homo sapiens
  CDR3 for alpha chain variable domain of TCR clone 67171 (TRAV3, TRAJ21)
CALGNFNKFYF

SEQ ID NO: 134342 - protein, 12 aa, Homo sapiens
  CDR3 for beta chain variable domain of TCR clone 67171 (TRBV29-1, TRBJ2-3)
CSVTGGADTQYF

SEQ ID NO: 134343 - protein, 13 aa, Homo sapiens
  CDR3 for alpha chain variable domain of TCR clone 67172 (TRAV20, TRAJ34)
CAVSSYNTDKPIF

SEQ ID NO: 134344 - protein, 13 aa, Homo sapiens
  CDR3 for beta chain variable domain of TCR clone 67172 (TRBV7-9, TRBJ1-2)
CASSLKQNYGYTF

SEQ ID NO: 134345 - protein, 13 aa, Homo sapiens
  CDR3 for alpha chain variable domain of TCR clone 67173 (TRAV26-1, TRAJ30)
CIVGVESNDKIIF

SEQ ID NO: 134346 - protein, 17 aa, Homo sapiens
  CDR3 for beta chain variable domain of TCR clone 67173 (TRBV13, TRBJ2-3)
CASSLSRVAGGRNTQYF

SEQ ID NO: 134347 - protein, 12 aa, Homo sapiens
  CDR3 for alpha chain variable domain of TCR clone 67174 (TRAV3, TRAJ20)
CAVRDGDYKLSF

SEQ ID NO: 134348 - protein, 17 aa, Homo sapiens
  CDR3 for beta chain variable domain of TCR clone 67174 (TRBV24-1, TRBJ2-1)
CATSDVSTSGTYNEQFF

SEQ ID NO: 134349 - protein, 14 aa, Homo sapiens
  CDR3 for alpha chain variable domain of TCR clone 67175 (TRAV2, TRAJ37)
CAVDFTSNTGKLIF

SEQ ID NO: 134350 - protein, 13 aa, Homo sapiens
  CDR3 for beta chain variable domain of TCR clone 67175 (TRBV19, TRBJ2-7)
CASRKAGGSEQYF

SEQ ID NO: 134351 - protein, 14 aa, Homo sapiens
  CDR3 for alpha chain variable domain of TCR clone 67176 (TRAV29/DV5, TRAJ36)
RAARRKTGANNLFF

SEQ ID NO: 134352 - protein, 14 aa, Homo sapiens
  CDR3 for beta chain variable domain of TCR clone 67176 (TRBV12-5, TRBJ2-5)
CASGSRTHQETQYF

SEQ ID NO: 134353 - protein, 15 aa, Homo sapiens
  CDR3 for alpha chain variable domain of TCR clone 67177 (TRAV25, TRAJ53)
CTTSNSGGSNYKLTF

SEQ ID NO: 134354 - protein, 14 aa, Homo sapiens
  CDR3 for beta chain variable domain of TCR clone 67177 (TRBV11-2, TRBJ2-3)
CASSRLARTDTQYF

SEQ ID NO: 134355 - protein, 14 aa, Homo sapiens
  CDR3 for alpha chain variable domain of TCR clone 67178 (TRAV26-1, TRAJ57)
CIRAGQGGSEKLGF

SEQ ID NO: 134356 - protein, 13 aa, Homo sapiens
  CDR3 for beta chain variable domain of TCR clone 67178 (TRBV19, TRBJ2-7)
CASSLTTSYEQYF

SEQ ID NO: 134357 - protein, 13 aa, Homo sapiens
  CDR3 for alpha chain variable domain of TCR clone 67179 (TRAV12-3, TRAJ13)
CAMSSGGYQKVTF

SEQ ID NO: 134358 - protein, 13 aa, Homo sapiens
  CDR3 for beta chain variable domain of TCR clone 67179 (TRBV20-1, TRBJ1-1)
CSDPPGGHTEAFF

SEQ ID NO: 134359 - protein, 13 aa, Homo sapiens
  CDR3 for alpha chain variable domain of TCR clone 67180 (TRAV23/DV6, TRAJ22)
CAPYSGSARRLTF

SEQ ID NO: 134360 - protein, 15 aa, Homo sapiens
  CDR3 for beta chain variable domain of TCR clone 67180 (TRBV11-2, TRBJ1-6)
CASSLDPWAVSPLHF

SEQ ID NO: 134361 - protein, 13 aa, Homo sapiens
  CDR3 for alpha chain variable domain of TCR clone 67181 (TRAV27, TRAJ11)
CAGARSGYSTLPF

SEQ ID NO: 134362 - protein, 16 aa, Homo sapiens
  CDR3 for beta chain variable domain of TCR clone 67181 (TRBV10-2, TRBJ2-2)
CASSESRDRGSGELFF

SEQ ID NO: 134363 - protein, 16 aa, Homo sapiens
  CDR3 for alpha chain variable domain of TCR clone 67182 (TRAV16, TRAJ52)
CALSGVGGTSYGKLPF

SEQ ID NO: 134364 - protein, 14 aa, Homo sapiens
  CDR3 for beta chain variable domain of TCR clone 67182 (TRBV19, TRBJ1-2)
CASSLQGQAYGYTF

SEQ ID NO: 134365 - protein, 14 aa, Homo sapiens
  CDR3 for alpha chain variable domain of TCR clone 67183 (TRAV12-2, TRAJ13)
CAVKRTGGYQKVTF

SEQ ID NO: 134366 - protein, 14 aa, Homo sapiens
  CDR3 for beta chain variable domain of TCR clone 67183 (TRBV5-5, TRBJ2-7)
CASSLGQGTYEQYF

SEQ ID NO: 134367 - protein, 13 aa, Homo sapiens
  CDR3 for alpha chain variable domain of TCR clone 67184 (TRAV13-1, TRAJ5)
CAAEHRGRRALTF

SEQ ID NO: 134368 - protein, 15 aa, Homo sapiens
  CDR3 for beta chain variable domain of TCR clone 67184 (TRBV6-1, TRBJ2-1)
CASSELRGQYNEQFF

SEQ ID NO: 134369 - protein, 18 aa, Homo sapiens
  CDR3 for alpha chain variable domain of TCR clone 67185 (TRAV12-3, TRAJ52)
CAMSVGGAGCTSYGKLTF

SEQ ID NO: 134370 - protein, 15 aa, Homo sapiens
  CDR3 for beta chain variable domain of TCR clone 67185 (TRBV27, TRBJ1-6)
CASSFDRGLGSPLHF

SEQ ID NO: 134371 - protein, 14 aa, Homo sapiens
  CDR3 for alpha chain variable domain of TCR clone 67186 (TRAV2, TRAJ9)
CAVEDRSGGFKTIF

SEQ ID NO: 134372 - protein, 13 aa, Homo sapiens
  CDR3 for beta chain variable domain of TCR clone 67186 (TRBV10-3, TRBJ1-2)
CAISERDSYGYTF

SEQ ID NO: 134373 - protein, 15 aa, Homo sapiens
  CDR3 for alpha chain variable domain of TCR clone 67187 (TRAV26-1, TRAJ18)
CIVRVMSSTLGRLYF

SEQ ID NO: 134374 - protein, 15 aa, Homo sapiens
  CDR3 for beta chain variable domain of TCR clone 67187 (TRBV20-1, TRBJ1-1)
CSASRGVTGNTEAFF

SEQ ID NO: 134375 - protein, 14 aa, Homo sapiens
  CDR3 for alpha chain variable domain of TCR clone 67188 (TRAV8-3, TRAJ7)
CAAIGLYGNNRLAF

SEQ ID NO: 134376 - protein, 15 aa, Homo sapiens
  CDR3 for beta chain variable domain of TCR clone 67188 (TRBV3-1, TRBJ2-1)
CASSTGDTNYNEQFF

SEQ ID NO: 134377 - protein, 16 aa, Homo sapiens
  CDR3 for alpha chain variable domain of TCR clone 67189 (TRAV4, TRAJ22)
CLVGDLYSGSARQLTF

SEQ ID NO: 134378 - protein, 14 aa, Homo sapiens
  CDR3 for beta chain variable domain of TCR clone 67189 (TRBV28, TRBJ2-3)
CASSWGGRADTQYF

SEQ ID NO: 134379 - protein, 15 aa, Homo sapiens
  CDR3 for alpha chain variable domain of TCR clone 67190 (TRAV25, TRAJ53)
CPTRNSGGSNYKLTF

SEQ ID NO: 134380 - protein, 14 aa, Homo sapiens
  CDR3 for beta chain variable domain of TCR clone 67190 (TRBV11-2, TRBJ2-3)
CASSRLARTDTQYF

SEQ ID NO: 134381 - protein, 11 aa, Homo sapiens
  CDR3 for alpha chain variable domain of TCR clone 67191 (TRAV2, TRAJ13)
RASGGYQKVTF

SEQ ID NO: 134382 - protein, 15 aa, Homo sapiens
  CDR3 for beta chain variable domain of TCR clone 67191 (TRBV27, TRBJ2-5)
CASSLYPRGGETQYF

SEQ ID NO: 134383 - protein, 10 aa, Homo sapiens
  CDR3 for alpha chain variable domain of TCR clone 67192 (TRAV12-3, TRAJ49)
CAMNDDQFYF

SEQ ID NO: 134384 - protein, 13 aa, Homo sapiens
  CDR3 for beta chain variable domain of TCR clone 67192 (TRBV18, TRBJ1-1)
CASSPGRNTEAFF

SEQ ID NO: 134385 - protein, 13 aa, Homo sapiens
  CDR3 for alpha chain variable domain of TCR clone 67193 (TRAV21, TRAJ27)
CAARPGNAGKSTF

SEQ ID NO: 134386 - protein, 15 aa, Homo sapiens
  CDR3 for beta chain variable domain of TCR clone 67193 (TRBV5-1, TRBJ2-5)
CASSFKGGDQETQYF

SEQ ID NO: 134387 - protein, 16 aa, Homo sapiens
  CDR3 for alpha chain variable domain of TCR clone 67194 (TRAV13-2, TRAJ32)
CAENMNYGSATNKLIF

SEQ ID NO: 134388 - protein, 14 aa, Homo sapiens
  CDR3 for beta chain variable domain of TCR clone 67194 (TRBV15, TRBJ2-5)
CATSSTGYQETQYF

SEQ ID NO: 134389 - protein, 16 aa, Homo sapiens
  CDR3 for alpha chain variable domain of TCR clone 67195 (TRAV29/DV5, TRAJ30)
KCTSVQQANRDDKIIF

SEQ ID NO: 134390 - protein, 13 aa, Homo sapiens
  CDR3 for beta chain variable domain of TCR clone 67195 (TRBV12-5, TRBJ2-3)
CASQNRGTDTQYF

SEQ ID NO: 134391 - protein, 13 aa, Homo sapiens
  CDR3 for alpha chain variable domain of TCR clone 67196 (TRAV21, TRAJ15)
CAVCSQAGTALIF

SEQ ID NO: 134392 - protein, 16 aa, Homo sapiens
  CDR3 for beta chain variable domain of TCR clone 67196 (TRBV12-4, TRBJ1-5)
CASSRPVGGSNQPQHF

SEQ ID NO: 134393 - protein, 15 aa, Homo sapiens
  CDR3 for alpha chain variable domain of TCR clone 67197 (TRAV12-2, TRAJ53)
CAVNGGGGSNYKLTS

SEQ ID NO: 134394 - protein, 13 aa, Homo sapiens
  CDR3 for beta chain variable domain of TCR clone 67197 (TRBV3-1, TRBJ1-1)
CASSPGVITEAFF

SEQ ID NO: 134395 - protein, 15 aa, Homo sapiens
  CDR3 for alpha chain variable domain of TCR clone 67198 (TRAV13-1, TRAJ45)
CAASGSGGGDDGLTF

SEQ ID NO: 134396 - protein, 14 aa, Homo sapiens
  CDR3 for beta chain variable domain of TCR clone 67198 (TRBV12-4, TRBJ1-2)
CASSFVGTAYGYTF

SEQ ID NO: 134397 - protein, 13 aa, Homo sapiens
  CDR3 for alpha chain variable domain of TCR clone 67199 (TRAV1-2, TRAJ9)
CAALNTGAFKTIF

SEQ ID NO: 134398 - protein, 13 aa, Homo sapiens
  CDR3 for beta chain variable domain of TCR clone 67199 (TRBV19, TRBJ1-2)
CASSVPGQDGYTF

SEQ ID NO: 134399 - protein, 13 aa, Homo sapiens
  CDR3 for alpha chain variable domain of TCR clone 67200 (TRAV12-3, TRAJ54)
CAMFAQGARKLVF

SEQ ID NO: 134400 - protein, 16 aa, Homo sapiens
  CDR3 for beta chain variable domain of TCR clone 67200 (TRBV7-6, TRBJ2-3)
CASSPRRGGLGDTQYF

SEQ ID NO: 134401 - protein, 17 aa, Homo sapiens
  CDR3 for alpha chain variable domain of TCR clone 67201 (TRAV16, TRAJ42)
SALSPKLYGGSQGNLIF

SEQ ID NO: 134402 - protein, 13 aa, Homo sapiens
  CDR3 for beta chain variable domain of TCR clone 67201 (TRBV19, TRBJ1-5)
CASSTRRDQPQHF

SEQ ID NO: 134403 - protein, 11 aa, Homo sapiens
  CDR3 for alpha chain variable domain of TCR clone 67202 (TRAV2, TRAJ13)
CASGGYQKVTF

SEQ ID NO: 134404 - protein, 11 aa, Homo sapiens
  CDR3 for beta chain variable domain of TCR clone 67202 (TRBV7-8, TRBJ2-7)
CASSLSLEQYF

SEQ ID NO: 134405 - protein, 15 aa, Homo sapiens
  CDR3 for alpha chain variable domain of TCR clone 67203 (TRAV17, TRAJ16)
CATALRFSYGQKLLF

SEQ ID NO: 134406 - protein, 15 aa, Homo sapiens
  CDR3 for beta chain variable domain of TCR clone 67203 (TRBV20-1, TRBJ1-1)
CSASRGVTGNTEAFF

SEQ ID NO: 134407 - protein, 23 aa, Homo sapiens
  CDR3 for alpha chain variable domain of TCR clone 67204 (TRAV25, TRAJ39)
TATQTTDVGTYFRENNAGNMLTF

SEQ ID NO: 134408 - protein, 15 aa, Homo sapiens
  CDR3 for beta chain variable domain of TCR clone 67204 (TRBV18, TRBJ1-5)
CASSPSDRSNQPQHF

SEQ ID NO: 134409 - protein, 13 aa, Homo sapiens
  CDR3 for alpha chain variable domain of TCR clone 67205 (TRAV12-3, TRAJ7)
CAMTPYGNNRLAF

SEQ ID NO: 134410 - protein, 16 aa, Homo sapiens
  CDR3 for beta chain variable domain of TCR clone 67205 (TRBV20-1, TRBJ1-4)
CSARPYGGELNEKLFS

SEQ ID NO: 134411 - protein, 11 aa, Homo sapiens
  CDR3 for alpha chain variable domain of TCR clone 67206 (TRAV1-2, TRAJ11)
CAVRGYSTLTF

SEQ ID NO: 134412 - protein, 16 aa, Homo sapiens
  CDR3 for beta chain variable domain of TCR clone 67206 (TRBV12-5, TRBJ2-5)
CASGPRTSGNQETQYF

SEQ ID NO: 134413 - protein, 13 aa, Homo sapiens
  CDR3 for alpha chain variable domain of TCR clone 67207 (TRAV8-4, TRAJ48)
CAVSRFGNEKLTF

SEQ ID NO: 134414 - protein, 15 aa, Homo sapiens
  CDR3 for beta chain variable domain of TCR clone 67207 (TRBV20-1, TRBJ2-7)
CSARKGLAESYEQYF

SEQ ID NO: 134415 - protein, 15 aa, Homo sapiens
  CDR3 for alpha chain variable domain of TCR clone 67208 (TRAV14/DV4, TRAJ33)
CAMGEGRDSNYQLIW

SEQ ID NO: 134416 - protein, 16 aa, Homo sapiens
  CDR3 for beta chain variable domain of TCR clone 67208 (TRBV12-5, TRBJ2-5)
CASGPRTSGNQETQYF

SEQ ID NO: 134417 - protein, 14 aa, Homo sapiens
  CDR3 for alpha chain variable domain of TCR clone 67209 (TRAV20, TRAJ10)
CAVRVEGGGNKLTF

SEQ ID NO: 134418 - protein, 18 aa, Homo sapiens
  CDR3 for beta chain variable domain of TCR clone 67209 (TRBV24-1, TRBJ2-1)
CDTSDLMFLGRGVHEQFF

SEQ ID NO: 134419 - protein, 14 aa, Homo sapiens
  CDR3 for alpha chain variable domain of TCR clone 67210 (TRAV16, TRAJ17)
CALSGRAAGNKLTS

SEQ ID NO: 134420 - protein, 15 aa, Homo sapiens
  CDR3 for beta chain variable domain of TCR clone 67210 (TRBV3-1, TRBJ1-2)
CAGSPTRLPEGGYTF

SEQ ID NO: 134421 - protein, 15 aa, Homo sapiens
  CDR3 for alpha chain variable domain of TCR clone 67211 (TRAV3, TRAJ22)
CAVRDRGGSARQLTF

SEQ ID NO: 134422 - protein, 13 aa, Homo sapiens
  CDR3 for beta chain variable domain of TCR clone 67211 (TRBV12-5, TRBJ2-3)
CASGDRQSDTQYF

SEQ ID NO: 134423 - protein, 17 aa, Homo sapiens
  CDR3 for alpha chain variable domain of TCR clone 67212 (TRAV23/DV6, TRAJ23)
CSKPSPLIYNQGGKLIF

SEQ ID NO: 134424 - protein, 13 aa, Homo sapiens
  CDR3 for beta chain variable domain of TCR clone 67212 (TRBV7-3, TRBJ1-1)
CASSQDWGAEAFF

SEQ ID NO: 134425 - protein, 23 aa, Homo sapiens
  CDR3 for alpha chain variable domain of TCR clone 67213 (TRAV30, TRAJ29)
PAQLLRNLLLWQRAFSGNTPLVF

SEQ ID NO: 134426 - protein, 15 aa, Homo sapiens
  CDR3 for beta chain variable domain of TCR clone 67213 (TRBV5-1, TRBJ2-2)
CASSLFGQNTGELFF

SEQ ID NO: 134427 - protein, 13 aa, Homo sapiens
  CDR3 for alpha chain variable domain of TCR clone 67214 (TRAV27, TRAJ49)
CAPRPYTGNQFYF

SEQ ID NO: 134428 - protein, 16 aa, Homo sapiens
  CDR3 for beta chain variable domain of TCR clone 67214 (TRBV4-1, TRBJ1-2)
CASSQDAGQVLYGYTC

SEQ ID NO: 134429 - protein, 14 aa, Homo sapiens
  CDR3 for alpha chain variable domain of TCR clone 67215 (TRAV13-1, TRAJ26)
CAASSAHYGQNFVF

SEQ ID NO: 134430 - protein, 17 aa, Homo sapiens
  CDR3 for beta chain variable domain of TCR clone 67215 (TRBV25-1, TRBJ2-5)
GASSRRGGRGGQETQYF

SEQ ID NO: 134431 - protein, 15 aa, Homo sapiens
  CDR3 for alpha chain variable domain of TCR clone 67216 (TRAV17, TRAJ57)
CATGPSQGGSEKLVF

SEQ ID NO: 134432 - protein, 13 aa, Homo sapiens
  CDR3 for beta chain variable domain of TCR clone 67216 (TRBV12-4, TRBJ1-1)
CASSPGTGFEAFF

SEQ ID NO: 134433 - protein, 16 aa, Homo sapiens
  CDR3 for alpha chain variable domain of TCR clone 67217 (TRAV30, TRAJ24)
CGTEIVDADSWGKSQV

SEQ ID NO: 134434 - protein, 14 aa, Homo sapiens
  CDR3 for beta chain variable domain of TCR clone 67217 (TRBV12-5, TRBJ2-5)
CASGSRTHQETQYF

SEQ ID NO: 134435 - protein, 11 aa, Homo sapiens
  CDR3 for alpha chain variable domain of TCR clone 67218 (TRAV13-1, TRAJ39)
CASHAGNMLTF

SEQ ID NO: 134436 - protein, 16 aa, Homo sapiens
  CDR3 for beta chain variable domain of TCR clone 67218 (TRBV12-5, TRBJ2-5)
CASGPRTSGNQETQYF

SEQ ID NO: 134437 - protein, 12 aa, Homo sapiens
  CDR3 for alpha chain variable domain of TCR clone 67219 (TRAV12-3, TRAJ17)
CAMTLTGNKLTF

SEQ ID NO: 134438 - protein, 17 aa, Homo sapiens
  CDR3 for beta chain variable domain of TCR clone 67219 (TRBV15, TRBJ1-4)
CATSRYGTGDPNEKLFF

SEQ ID NO: 134439 - protein, 14 aa, Homo sapiens
  CDR3 for alpha chain variable domain of TCR clone 67220 (TRAV38-1, TRAJ40)
CALRPTSGTYKYIF

SEQ ID NO: 134440 - protein, 14 aa, Homo sapiens
  CDR3 for beta chain variable domain of TCR clone 67220 (TRBV25-1, TRBJ1-1)
CASTHLGGNTDAFF

SEQ ID NO: 134441 - protein, 16 aa, Homo sapiens
  CDR3 for alpha chain variable domain of TCR clone 67221 (TRAV16, TRAJ57)
CAPYLITQGGSEKLVF

SEQ ID NO: 134442 - protein, 17 aa, Homo sapiens
  CDR3 for beta chain variable domain of TCR clone 67221 (TRBV24-1, TRBJ2-4)
CDTSDAEARGVRNIQYF

SEQ ID NO: 134443 - protein, 13 aa, Homo sapiens
  CDR3 for alpha chain variable domain of TCR clone 67222 (TRAV12-2, TRAJ10)
CAVPTGGGNKLTF

SEQ ID NO: 134444 - protein, 14 aa, Homo sapiens
  CDR3 for beta chain variable domain of TCR clone 67222 (TRBV12-5, TRBJ2-5)
CASGSRTHQETQYF

SEQ ID NO: 134445 - protein, 12 aa, Homo sapiens
  CDR3 for alpha chain variable domain of TCR clone 67223 (TRAV12-3, TRAJ17)
CAITLTGNKLTF

SEQ ID NO: 134446 - protein, 12 aa, Homo sapiens
  CDR3 for beta chain variable domain of TCR clone 67223 (TRBV11-2, TRBJ2-7)
CASSLPTYEQYF

SEQ ID NO: 134447 - protein, 14 aa, Homo sapiens
  CDR3 for alpha chain variable domain of TCR clone 67224 (TRAV26-1, TRAJ49)
CIVRPSNTGNQFYF

SEQ ID NO: 134448 - protein, 15 aa, Homo sapiens
  CDR3 for beta chain variable domain of TCR clone 67224 (TRBV19, TRBJ1-1)
CASMGFRDVNTEAVF

SEQ ID NO: 134449 - protein, 14 aa, Homo sapiens
  CDR3 for alpha chain variable domain of TCR clone 67225 (TRAV12-2, TRAJ13)
CAVNPSGGYQKVTF

SEQ ID NO: 134450 - protein, 13 aa, Homo sapiens
  CDR3 for beta chain variable domain of TCR clone 67225 (TRBV20-1, TRBJ1-6)
CSAKLGGTSTLHF

SEQ ID NO: 134451 - protein, 14 aa, Homo sapiens
  CDR3 for alpha chain variable domain of TCR clone 67226 (TRAV12-2, TRAJ4)
CAEDLSGGYNKLIF

SEQ ID NO: 134452 - protein, 13 aa, Homo sapiens
  CDR3 for beta chain variable domain of TCR clone 67226 (TRBV7-9, TRBJ1-2)
CASSLRQNYGYTF

SEQ ID NO: 134453 - protein, 13 aa, Homo sapiens
  CDR3 for alpha chain variable domain of TCR clone 67227 (TRAV3, TRAJ8)
CAVRFTGFQELVF

SEQ ID NO: 134454 - protein, 12 aa, Homo sapiens
  CDR3 for beta chain variable domain of TCR clone 67227 (TRBV2, TRBJ1-2)
CASSGQTYGYTF

SEQ ID NO: 134455 - protein, 12 aa, Homo sapiens
  CDR3 for alpha chain variable domain of TCR clone 67228 (TRAV12-3, TRAJ17)
CAMTLTGNKLTF

SEQ ID NO: 134456 - protein, 12 aa, Homo sapiens
  CDR3 for beta chain variable domain of TCR clone 67228 (TRBV6-3, TRBJ2-7)
CASSEPGFEQYF

SEQ ID NO: 134457 - protein, 11 aa, Homo sapiens
  CDR3 for alpha chain variable domain of TCR clone 67229 (TRAV13-2, TRAJ36)
CAETGANNLFF

SEQ ID NO: 134458 - protein, 13 aa, Homo sapiens
  CDR3 for beta chain variable domain of TCR clone 67229 (TRBV7-9, TRBJ2-4)
CATEGLAGNIQYL

SEQ ID NO: 134459 - protein, 14 aa, Homo sapiens
  CDR3 for alpha chain variable domain of TCR clone 67230 (TRAV8-3, TRAJ44)
CAVGLTGTASKLTF

SEQ ID NO: 134460 - protein, 16 aa, Homo sapiens
  CDR3 for beta chain variable domain of TCR clone 67230 (TRBV19, TRBJ2-1)
CASSKAGPSSYNEQFF

SEQ ID NO: 134461 - protein, 14 aa, Homo sapiens
  CDR3 for alpha chain variable domain of TCR clone 67231 (TRAV1-2, TRAJ16)
CAVNRFSDGQKLLF

SEQ ID NO: 134462 - protein, 14 aa, Homo sapiens
  CDR3 for beta chain variable domain of TCR clone 67231 (TRBV7-2, TRBJ2-1)
CASSLVAGRNEQFF

SEQ ID NO: 134463 - protein, 14 aa, Homo sapiens
  CDR3 for alpha chain variable domain of TCR clone 67232 (TRAV8-3, TRAJ13)
CAVGAQEGYQKVTF

SEQ ID NO: 134464 - protein, 13 aa, Homo sapiens
  CDR3 for beta chain variable domain of TCR clone 67232 (TRBV7-9, TRBJ1-2)
CASSLKQNYGYTF

SEQ ID NO: 134465 - protein, 14 aa, Homo sapiens
  CDR3 for alpha chain variable domain of TCR clone 67233 (TRAV16, TRAJ15)
CALSGPQAGTALIF

SEQ ID NO: 134466 - protein, 12 aa, Homo sapiens
  CDR3 for beta chain variable domain of TCR clone 67233 (TRBV18, TRBJ2-5)
CASAPSKETQYF

SEQ ID NO: 134467 - protein, 12 aa, Homo sapiens
  CDR3 for alpha chain variable domain of TCR clone 67234 (TRAV8-2, TRAJ45)
CVQGGGADGLTF

SEQ ID NO: 134468 - protein, 15 aa, Homo sapiens
  CDR3 for beta chain variable domain of TCR clone 67234 (TRBV19, TRBJ1-1)
CASSIRRQMNTEALF

SEQ ID NO: 134469 - protein, 14 aa, Homo sapiens
  CDR3 for alpha chain variable domain of TCR clone 67235 (TRAV20, TRAJ40)
CAVSLTSGTYKYIF

SEQ ID NO: 134470 - protein, 21 aa, Homo sapiens
  CDR3 for beta chain variable domain of TCR clone 67235 (TRBV27, TRBJ1-1)
CASSFLETARREFSLKLSLDE

SEQ ID NO: 134471 - protein, 14 aa, Homo sapiens
  CDR3 for alpha chain variable domain of TCR clone 67236 (TRAV12-2, TRAJ40)
CAVKIPSGTYKYIF

SEQ ID NO: 134472 - protein, 15 aa, Homo sapiens
  CDR3 for beta chain variable domain of TCR clone 67236 (TRBV2, TRBJ2-3)
CASSDFEKATDTQYF

SEQ ID NO: 134473 - protein, 16 aa, Homo sapiens
  CDR3 for alpha chain variable domain of TCR clone 67237 (TRAV23/DV6, TRAJ48)
CAASGVVNFGNEKLTF

SEQ ID NO: 134474 - protein, 15 aa, Homo sapiens
  CDR3 for beta chain variable domain of TCR clone 67237 (TRBV20-1, TRBJ2-5)
CSAGLEGVSQETQYF

SEQ ID NO: 134475 - protein, 13 aa, Homo sapiens
  CDR3 for alpha chain variable domain of TCR clone 67238 (TRAV17, TRAJ9)
CATDGTGGFKTIF

SEQ ID NO: 134476 - protein, 17 aa, Homo sapiens
  CDR3 for beta chain variable domain of TCR clone 67238 (TRBV15, TRBJ2-3)
CATSGTTSEEGTDTQYF

SEQ ID NO: 134477 - protein, 16 aa, Homo sapiens
  CDR3 for alpha chain variable domain of TCR clone 67239 (TRAV3, TRAJ5)
CAVRNLMDTGRRALTF

SEQ ID NO: 134478 - protein, 16 aa, Homo sapiens
  CDR3 for beta chain variable domain of TCR clone 67239 (TRBV4-2, TRBJ2-7)
CASSQEGLANSYEQYS

SEQ ID NO: 134479 - protein, 15 aa, Homo sapiens
  CDR3 for alpha chain variable domain of TCR clone 67240 (TRAV21, TRAJ32)
CAVNAYGGATNKLIF

SEQ ID NO: 134480 - protein, 18 aa, Homo sapiens
  CDR3 for beta chain variable domain of TCR clone 67240 (TRBV7-9, TRBJ2-1)
CASSTGLAEGSSYNEQFF

SEQ ID NO: 134481 - protein, 14 aa, Homo sapiens
  CDR3 for alpha chain variable domain of TCR clone 67241 (TRAV17, TRAJ45)
CATASGGGADGLTF

SEQ ID NO: 134482 - protein, 15 aa, Homo sapiens
  CDR3 for beta chain variable domain of TCR clone 67241 (TRBV11-2, TRBJ2-1)
CDSSRNRGLMYEQFF

SEQ ID NO: 134483 - protein, 12 aa, Homo sapiens
  CDR3 for alpha chain variable domain of TCR clone 67242 (TRAV4, TRAJ9)
CLVPTGGFKTIF

SEQ ID NO: 134484 - protein, 15 aa, Homo sapiens
  CDR3 for beta chain variable domain of TCR clone 67242 (TRBV6-3, TRBJ2-7)
CASSSPGTVFYEQYF

SEQ ID NO: 134485 - protein, 17 aa, Homo sapiens
  CDR3 for alpha chain variable domain of TCR clone 67243 (TRAV3, TRAJ38)
CAVRDCLNAGNNRKLIW

SEQ ID NO: 134486 - protein, 15 aa, Homo sapiens
  CDR3 for beta chain variable domain of TCR clone 67243 (TRBV27, TRBJ2-1)
CASSNGGGSSNERFF

SEQ ID NO: 134487 - protein, 13 aa, Homo sapiens
  CDR3 for alpha chain variable domain of TCR clone 67244 (TRAV3, TRAJ21)
CAVREPDFNKFYF

SEQ ID NO: 134488 - protein, 15 aa, Homo sapiens
  CDR3 for beta chain variable domain of TCR clone 67244 (TRBV7-9, TRBJ1-4)
CASSRTGGFNEKLFF

SEQ ID NO: 134489 - protein, 14 aa, Homo sapiens
  CDR3 for alpha chain variable domain of TCR clone 67245 (TRAV12-2, TRAJ13)
CAVKKTGGYQKVTF

SEQ ID NO: 134490 - protein, 14 aa, Homo sapiens
  CDR3 for beta chain variable domain of TCR clone 67245 (TRBV28, TRBJ1-5)
CASSGQALYQPQHF

SEQ ID NO: 134491 - protein, 14 aa, Homo sapiens
  CDR3 for alpha chain variable domain of TCR clone 67246 (TRAV23/DV6, TRAJ37)
CAASTSSNTVKLIF

SEQ ID NO: 134492 - protein, 15 aa, Homo sapiens
  CDR3 for beta chain variable domain of TCR clone 67246 (TRBV7-9, TRBJ2-7)
CASSPGGGLTYEQYF

SEQ ID NO: 134493 - protein, 14 aa, Homo sapiens
  CDR3 for alpha chain variable domain of TCR clone 67247 (TRAV25, TRAJ45)
CARESGGGDDGLTF

SEQ ID NO: 134494 - protein, 12 aa, Homo sapiens
  CDR3 for beta chain variable domain of TCR clone 67247 (TRBV7-9, TRBJ2-7)
CASSFDGYEQYF

SEQ ID NO: 134495 - protein, 12 aa, Homo sapiens
  CDR3 for alpha chain variable domain of TCR clone 67248 (TRAV8-6, TRAJ57)
CAVQGGSEKLVF

SEQ ID NO: 134496 - protein, 11 aa, Homo sapiens
  CDR3 for beta chain variable domain of TCR clone 67248 (TRBV19, TRBJ1-1)
CASSIGCEAFF

SEQ ID NO: 134497 - protein, 16 aa, Homo sapiens
  CDR3 for alpha chain variable domain of TCR clone 67249 (TRAV2, TRAJ4)
CAVEDRFSGGSNKLIF

SEQ ID NO: 134498 - protein, 13 aa, Homo sapiens
  CDR3 for beta chain variable domain of TCR clone 67249 (TRBV7-7, TRBJ2-5)
CASSRSGQETQYF

SEQ ID NO: 134499 - protein, 15 aa, Homo sapiens
  CDR3 for alpha chain variable domain of TCR clone 67250 (TRAV12-3, TRAJ6)
CAMSATTGGSYIPIF

SEQ ID NO: 134500 - protein, 16 aa, Homo sapiens
  CDR3 for beta chain variable domain of TCR clone 67250 (TRBV20-1, TRBJ1-2)
CSASMGQGVANYGYTF

SEQ ID NO: 134501 - protein, 12 aa, Homo sapiens
  CDR3 for alpha chain variable domain of TCR clone 67251 (TRAV29/DV5, TRAJ43)
CAAPYNNNDMRF

SEQ ID NO: 134502 - protein, 17 aa, Homo sapiens
  CDR3 for beta chain variable domain of TCR clone 67251 (TRBV19, TRBJ2-6)
CASSTGQVFSGANVQTF

SEQ ID NO: 134503 - protein, 13 aa, Homo sapiens
  CDR3 for alpha chain variable domain of TCR clone 67252 (TRAV3, TRAJ21)
CAVREPDFNKFYF

SEQ ID NO: 134504 - protein, 13 aa, Homo sapiens
  CDR3 for beta chain variable domain of TCR clone 67252 (TRBV9, TRBJ2-1)
CASSASGGNEQFF

SEQ ID NO: 134505 - protein, 16 aa, Homo sapiens
  CDR3 for alpha chain variable domain of TCR clone 67253 (TRAV3, TRAJ10)
CAVRDMRAEGGNKLTF

SEQ ID NO: 134506 - protein, 17 aa, Homo sapiens
  CDR3 for beta chain variable domain of TCR clone 67253 (TRBV28, TRBJ2-5)
CASSTPEGDALQETQYF

SEQ ID NO: 134507 - protein, 14 aa, Homo sapiens
  CDR3 for alpha chain variable domain of TCR clone 67254 (TRAV9-2, TRAJ39)
CALYIYNAGNMLTF

SEQ ID NO: 134508 - protein, 13 aa, Homo sapiens
  CDR3 for beta chain variable domain of TCR clone 67254 (TRBV12-4, TRBJ1-2)
CASSSGLTVISTF

SEQ ID NO: 134509 - protein, 13 aa, Homo sapiens
  CDR3 for alpha chain variable domain of TCR clone 67255 (TRAV17, TRAJ9)
CATDYTGGFKTIF

SEQ ID NO: 134510 - protein, 15 aa, Homo sapiens
  CDR3 for beta chain variable domain of TCR clone 67255 (TRBV2, TRBJ2-1)
CASSELAGSYNEQFF

SEQ ID NO: 134511 - protein, 12 aa, Homo sapiens
  CDR3 for alpha chain variable domain of TCR clone 67256 (TRAV12-2, TRAJ47)
CAVAEYGNKLVF

SEQ ID NO: 134512 - protein, 14 aa, Homo sapiens
  CDR3 for beta chain variable domain of TCR clone 67256 (TRBV20-1, TRBJ1-1)
CSAMGGTANNEAFF

SEQ ID NO: 134513 - protein, 14 aa, Homo sapiens
  CDR3 for alpha chain variable domain of TCR clone 67257 (TRAV8-3, TRAJ4)
CAVGAAGGYNKLIF

SEQ ID NO: 134514 - protein, 14 aa, Homo sapiens
  CDR3 for beta chain variable domain of TCR clone 67257 (TRBV7-2, TRBJ2-7)
CASSLPPGQGPQYF

SEQ ID NO: 134515 - protein, 15 aa, Homo sapiens
  CDR3 for alpha chain variable domain of TCR clone 67258 (TRAV20, TRAJ53)
CAVKASGGSNYKLTF

SEQ ID NO: 134516 - protein, 12 aa, Homo sapiens
  CDR3 for beta chain variable domain of TCR clone 67258 (TRBV7-6, TRBJ2-5)
CASSLSQETQYF

SEQ ID NO: 134517 - protein, 14 aa, Homo sapiens
  CDR3 for alpha chain variable domain of TCR clone 67259 (TRAV13-1, TRAJ9)
CAASALTGGFKTIF

SEQ ID NO: 134518 - protein, 14 aa, Homo sapiens
  CDR3 for beta chain variable domain of TCR clone 67259 (TRBV19, TRBJ2-2)
CASSTLHRSGELFF

SEQ ID NO: 134519 - protein, 18 aa, Homo sapiens
  CDR3 for alpha chain variable domain of TCR clone 67260 (TRAV26-1, TRAJ22)
CIVRVALISSGSSRQLTF

SEQ ID NO: 134520 - protein, 13 aa, Homo sapiens
  CDR3 for beta chain variable domain of TCR clone 67260 (TRBV13, TRBJ2-5)
CASSPEVGETQYF

SEQ ID NO: 134521 - protein, 12 aa, Homo sapiens
  CDR3 for alpha chain variable domain of TCR clone 67261 (TRAV8-3, TRAJ26)
RAGDNYGQNFVF

SEQ ID NO: 134522 - protein, 15 aa, Homo sapiens
  CDR3 for beta chain variable domain of TCR clone 67261 (TRBV9, TRBJ2-1)
CASSLAGSSYNEQFF

SEQ ID NO: 134523 - protein, 15 aa, Homo sapiens
  CDR3 for alpha chain variable domain of TCR clone 67262 (TRAV17, TRAJ57)
CATGPSQGGSEKLVF

SEQ ID NO: 134524 - protein, 16 aa, Homo sapiens
  CDR3 for beta chain variable domain of TCR clone 67262 (TRBV12-4, TRBJ1-5)
CASSRPGGGSNQPQHF

SEQ ID NO: 134525 - protein, 14 aa, Homo sapiens
  CDR3 for alpha chain variable domain of TCR clone 67263 (TRAV13-1, TRAJ35)
CAASKGGFGNVLHC

SEQ ID NO: 134526 - protein, 13 aa, Homo sapiens
  CDR3 for beta chain variable domain of TCR clone 67263 (TRBV7-3, TRBJ1-1)
CASSQDSGAEAFF

SEQ ID NO: 134527 - protein, 13 aa, Homo sapiens
  CDR3 for alpha chain variable domain of TCR clone 67264 (TRAV29/DV5, TRAJ31)
CAASRNNNARLIF

SEQ ID NO: 134528 - protein, 12 aa, Homo sapiens
  CDR3 for beta chain variable domain of TCR clone 67264 (TRBV14, TRBJ2-4)
CASSNLKSIQYF

SEQ ID NO: 134529 - protein, 13 aa, Homo sapiens
  CDR3 for alpha chain variable domain of TCR clone 67265 (TRAV12-1, TRAJ6)
CLVFPGGSYIPTF

SEQ ID NO: 134530 - protein, 14 aa, Homo sapiens
  CDR3 for beta chain variable domain of TCR clone 67265 (TRBV20-1, TRBJ1-3)
CSASPTGAGNTIYF

SEQ ID NO: 134531 - protein, 14 aa, Homo sapiens
  CDR3 for alpha chain variable domain of TCR clone 67266 (TRAV8-3, TRAJ10)
CAVGNAGGGNKLTF

SEQ ID NO: 134532 - protein, 16 aa, Homo sapiens
  CDR3 for beta chain variable domain of TCR clone 67266 (TRBV11-2, TRBJ1-2)
CASRLDTGGADYGYTF

SEQ ID NO: 134533 - protein, 16 aa, Homo sapiens
  CDR3 for alpha chain variable domain of TCR clone 67267 (TRAV2, TRAJ4)
CAVEDRFSGGYNKLIF

SEQ ID NO: 134534 - protein, 13 aa, Homo sapiens
  CDR3 for beta chain variable domain of TCR clone 67267 (TRBV7-7, TRBJ2-5)
CASSRSGQETQHF

SEQ ID NO: 134535 - protein, 16 aa, Homo sapiens
  CDR3 for alpha chain variable domain of TCR clone 67268 (TRAV8-3, TRAJ13)
CAVGAYPSGSYQKVTF

SEQ ID NO: 134536 - protein, 15 aa, Homo sapiens
  CDR3 for beta chain variable domain of TCR clone 67268 (TRBV19, TRBJ1-5)
CASSIVWADNQPQHF

SEQ ID NO: 134537 - protein, 12 aa, Homo sapiens
  CDR3 for alpha chain variable domain of TCR clone 67269 (TRAV26-2, TRAJ21)
CILKGNFNKFYF

SEQ ID NO: 134538 - protein, 12 aa, Homo sapiens
  CDR3 for beta chain variable domain of TCR clone 67269 (TRBV7-9, TRBJ2-7)
CASSIKREEQYF

SEQ ID NO: 134539 - protein, 16 aa, Homo sapiens
  CDR3 for alpha chain variable domain of TCR clone 67270 (TRAV3, TRAJ37)
CAVRPHGSGNTGKLIF

SEQ ID NO: 134540 - protein, 14 aa, Homo sapiens
  CDR3 for beta chain variable domain of TCR clone 67270 (TRBV4-1, TRBJ2-2)
CASSQAVNTGELFF

SEQ ID NO: 134541 - protein, 13 aa, Homo sapiens
  CDR3 for alpha chain variable domain of TCR clone 67271 (TRAV12-1, TRAJ31)
CVVNMNNNDRLMF

SEQ ID NO: 134542 - protein, 15 aa, Homo sapiens
  CDR3 for beta chain variable domain of TCR clone 67271 (TRBV4-1, TRBJ1-2)
CASSQGQGAAYGYTF

SEQ ID NO: 134543 - protein, 13 aa, Homo sapiens
  CDR3 for alpha chain variable domain of TCR clone 67272 (TRAV8-6, TRAJ50)
CAVIKTSYDKVIF

SEQ ID NO: 134544 - protein, 16 aa, Homo sapiens
  CDR3 for beta chain variable domain of TCR clone 67272 (TRBV7-9, TRBJ1-2)
CASSLGFSSGEDGYTF

SEQ ID NO: 134545 - protein, 12 aa, Homo sapiens
  CDR3 for alpha chain variable domain of TCR clone 67273 (TRAV5, TRAJ9)
CAGNTGGFKTIF

SEQ ID NO: 134546 - protein, 13 aa, Homo sapiens
  CDR3 for beta chain variable domain of TCR clone 67273 (TRBV19, TRBJ1-4)
CASPTQGNEKLFF

SEQ ID NO: 134547 - protein, 16 aa, Homo sapiens
  CDR3 for alpha chain variable domain of TCR clone 67274 (TRAV3, TRAJ4)
CAVRPSPSGGYNMLIF

SEQ ID NO: 134548 - protein, 12 aa, Homo sapiens
  CDR3 for beta chain variable domain of TCR clone 67274 (TRBV7-9, TRBJ2-7)
CASSQGVYEQYF

SEQ ID NO: 134549 - protein, 18 aa, Homo sapiens
  CDR3 for alpha chain variable domain of TCR clone 67275 (TRAV26-2, TRAJ45)
CILRVDKYSGGGADGLTI

SEQ ID NO: 134550 - protein, 14 aa, Homo sapiens
  CDR3 for beta chain variable domain of TCR clone 67275 (TRBV7-2, TRBJ2-7)
CASRSQGAAYEQYF

SEQ ID NO: 134551 - protein, 14 aa, Homo sapiens
  CDR3 for alpha chain variable domain of TCR clone 67276 (TRAV2, TRAJ37)
CAVDFTSNTGKLIF

SEQ ID NO: 134552 - protein, 13 aa, Homo sapiens
  CDR3 for beta chain variable domain of TCR clone 67276 (TRBV2, TRBJ2-5)
CASSGLVEETQYF

SEQ ID NO: 134553 - protein, 13 aa, Homo sapiens
  CDR3 for alpha chain variable domain of TCR clone 67277 (TRAV23/DV6, TRAJ16)
CAASISDGQKLLF

SEQ ID NO: 134554 - protein, 13 aa, Homo sapiens
  CDR3 for beta chain variable domain of TCR clone 67277 (TRBV7-9, TRBJ1-2)
CASSLKQNYGYTF

SEQ ID NO: 134555 - protein, 20 aa, Homo sapiens
  CDR3 for alpha chain variable domain of TCR clone 67278 (TRAV1-2, TRAJ10)
CLLPLCCERGTHGRRNKLTF

SEQ ID NO: 134556 - protein, 12 aa, Homo sapiens
  CDR3 for beta chain variable domain of TCR clone 67278 (TRBV7-8, TRBJ2-7)
CASSLGDREQYF

SEQ ID NO: 134557 - protein, 16 aa, Homo sapiens
  CDR3 for alpha chain variable domain of TCR clone 67279 (TRAV30, TRAJ24)
CGTEIVDADSWGKFQF

SEQ ID NO: 134558 - protein, 15 aa, Homo sapiens
  CDR3 for beta chain variable domain of TCR clone 67279 (TRBV11-2, TRBJ1-6)
CASTLRETGNSPLHF

SEQ ID NO: 134559 - protein, 11 aa, Homo sapiens
  CDR3 for alpha chain variable domain of TCR clone 67280 (TRAV1-1, TRAJ23)
CAVRQGGKLSF

SEQ ID NO: 134560 - protein, 13 aa, Homo sapiens
  CDR3 for beta chain variable domain of TCR clone 67280 (TRBV7-3, TRBJ1-1)
CASSQDWGAEAFF

SEQ ID NO: 134561 - protein, 14 aa, Homo sapiens
  CDR3 for alpha chain variable domain of TCR clone 67281 (TRAV26-2, TRAJ38)
CILYNAGNNRELIW

SEQ ID NO: 134562 - protein, 14 aa, Homo sapiens
  CDR3 for beta chain variable domain of TCR clone 67281 (TRBV19, TRBJ2-1)
CASPTFVLSGEQFF

SEQ ID NO: 134563 - protein, 15 aa, Homo sapiens
  CDR3 for alpha chain variable domain of TCR clone 67282 (TRAV12-1, TRAJ45)
CVVLSGGGGADGLTF

SEQ ID NO: 134564 - protein, 14 aa, Homo sapiens
  CDR3 for beta chain variable domain of TCR clone 67282 (TRBV11-2, TRBJ2-5)
CASNRTGGIETQYF

SEQ ID NO: 134565 - protein, 12 aa, Homo sapiens
  CDR3 for alpha chain variable domain of TCR clone 67283 (TRAV3, TRAJ39)
CAVIEWSNMLTF

SEQ ID NO: 134566 - protein, 16 aa, Homo sapiens
  CDR3 for beta chain variable domain of TCR clone 67283 (TRBV4-1, TRBJ1-4)
CASSQDLRRGGEKLFF

SEQ ID NO: 134567 - protein, 17 aa, Homo sapiens
  CDR3 for alpha chain variable domain of TCR clone 67284 (TRAV20, TRAJ52)
CAVQANAGGTSYGKLTF

SEQ ID NO: 134568 - protein, 13 aa, Homo sapiens
  CDR3 for beta chain variable domain of TCR clone 67284 (TRBV7-9, TRBJ1-2)
CASSLKQNYGYTF

SEQ ID NO: 134569 - protein, 12 aa, Homo sapiens
  CDR3 for alpha chain variable domain of TCR clone 67285 (TRAV13-2, TRAJ23)
CVERHRGGKLIF

SEQ ID NO: 134570 - protein, 13 aa, Homo sapiens
  CDR3 for beta chain variable domain of TCR clone 67285 (TRBV7-9, TRBJ2-3)
CASSPGSTDTQYF

SEQ ID NO: 134571 - protein, 14 aa, Homo sapiens
  CDR3 for alpha chain variable domain of TCR clone 67286 (TRAV1-2, TRAJ8)
CAVREDTGFQKLIF

SEQ ID NO: 134572 - protein, 16 aa, Homo sapiens
  CDR3 for beta chain variable domain of TCR clone 67286 (TRBV7-3, TRBJ2-2)
CASSLKRGTLSGELFF

SEQ ID NO: 134573 - protein, 11 aa, Homo sapiens
  CDR3 for alpha chain variable domain of TCR clone 67287 (TRAV21, TRAJ20)
CAVRDDYRLSF

SEQ ID NO: 134574 - protein, 14 aa, Homo sapiens
  CDR3 for beta chain variable domain of TCR clone 67287 (TRBV12-4, TRBJ1-1)
CASSFSQMNTEAFF

SEQ ID NO: 134575 - protein, 14 aa, Homo sapiens
  CDR3 for alpha chain variable domain of TCR clone 67288 (TRAV8-2, TRAJ4)
CVVSPSGGYNKLIF

SEQ ID NO: 134576 - protein, 15 aa, Homo sapiens
  CDR3 for beta chain variable domain of TCR clone 67288 (TRBV4-1, TRBJ1-4)
CASSDTGGTTEKLFF

SEQ ID NO: 134577 - protein, 14 aa, Homo sapiens
  CDR3 for alpha chain variable domain of TCR clone 67289 (TRAV12-2, TRAJ45)
CALPERGGADGLTF

SEQ ID NO: 134578 - protein, 14 aa, Homo sapiens
  CDR3 for beta chain variable domain of TCR clone 67289 (TRBV25-1, TRBJ1-1)
CASTHLGGNTEAFF

SEQ ID NO: 134579 - protein, 20 aa, Homo sapiens
  CDR3 for alpha chain variable domain of TCR clone 67290 (TRAV12-1, TRAJ42)
SSVIQPPTSVKEGSQGNLIF

SEQ ID NO: 134580 - protein, 18 aa, Homo sapiens
  CDR3 for beta chain variable domain of TCR clone 67290 (TRBV11-2, TRBJ2-3)
CASSLGGASRGAPNTQYF

SEQ ID NO: 134581 - protein, 14 aa, Homo sapiens
  CDR3 for alpha chain variable domain of TCR clone 67291 (TRAV1-2, TRAJ16)
CAVNRFSDGQKLLF

SEQ ID NO: 134582 - protein, 16 aa, Homo sapiens
  CDR3 for beta chain variable domain of TCR clone 67291 (TRBV4-1, TRBJ1-2)
CASSQDAGQVLYGYTF

SEQ ID NO: 134583 - protein, 13 aa, Homo sapiens
  CDR3 for alpha chain variable domain of TCR clone 67292 (TRAV30, TRAJ18)
CGTEASTLGRLYF

SEQ ID NO: 134584 - protein, 15 aa, Homo sapiens
  CDR3 for beta chain variable domain of TCR clone 67292 (TRBV7-3, TRBJ2-1)
CASSRIGTGSSEQFL

SEQ ID NO: 134585 - protein, 10 aa, Homo sapiens
  CDR3 for alpha chain variable domain of TCR clone 67293 (TRAV1-2, TRAJ31)
CAFFDARLMI

SEQ ID NO: 134586 - protein, 15 aa, Homo sapiens
  CDR3 for beta chain variable domain of TCR clone 67293 (TRBV4-1, TRBJ1-4)
CASSDTGGTNEKLFF

SEQ ID NO: 134587 - protein, 14 aa, Homo sapiens
  CDR3 for alpha chain variable domain of TCR clone 67294 (TRAV26-2, TRAJ32)
CILFRGGATNKLIF

SEQ ID NO: 134588 - protein, 15 aa, Homo sapiens
  CDR3 for beta chain variable domain of TCR clone 67294 (TRBV2, TRBJ2-2)
CASSGLGAGTGELFF

SEQ ID NO: 134589 - protein, 17 aa, Homo sapiens
  CDR3 for alpha chain variable domain of TCR clone 67295 (TRAV36/DV7, TRAJ52)
CAVAQRAGGTSYGKLTF

SEQ ID NO: 134590 - protein, 11 aa, Homo sapiens
  CDR3 for beta chain variable domain of TCR clone 67295 (TRBV6-3, TRBJ2-3)
CATGQADTQYF

SEQ ID NO: 134591 - protein, 12 aa, Homo sapiens
  CDR3 for alpha chain variable domain of TCR clone 67296 (TRAV2, TRAJ37)
CAVTMNTGKLIL

SEQ ID NO: 134592 - protein, 15 aa, Homo sapiens
  CDR3 for beta chain variable domain of TCR clone 67296 (TRBV5-1, TRBJ2-5)
CASSFGGPPQETQYF

SEQ ID NO: 134593 - protein, 14 aa, Homo sapiens
  CDR3 for alpha chain variable domain of TCR clone 67297 (TRAV13-1, TRAJ35)
CAASKGGFGNVLHC

SEQ ID NO: 134594 - protein, 16 aa, Homo sapiens
  CDR3 for beta chain variable domain of TCR clone 67297 (TRBV4-3, TRBJ2-3)
CASSQGGLAGTDTQYF

SEQ ID NO: 134595 - protein, 13 aa, Homo sapiens
  CDR3 for alpha chain variable domain of TCR clone 67298 (TRAV29/DV5, TRAJ31)
CAASRNNNARLMF

SEQ ID NO: 134596 - protein, 14 aa, Homo sapiens
  CDR3 for beta chain variable domain of TCR clone 67298 (TRBV20-1, TRBJ1-5)
CSARDDRGNQPQHF

SEQ ID NO: 134597 - protein, 13 aa, Homo sapiens
  CDR3 for alpha chain variable domain of TCR clone 67299 (TRAV27, TRAJ56)
CAGKPGANSKLTV

SEQ ID NO: 134598 - protein, 18 aa, Homo sapiens
  CDR3 for beta chain variable domain of TCR clone 67299 (TRBV11-2, TRBJ2-3)
CASSLGGASRGAPNTQYF

SEQ ID NO: 134599 - protein, 16 aa, Homo sapiens
  CDR3 for alpha chain variable domain of TCR clone 67300 (TRAV26-1, TRAJ47)
CIVRVVLSQYGNKLVI

SEQ ID NO: 134600 - protein, 16 aa, Homo sapiens
  CDR3 for beta chain variable domain of TCR clone 67300 (TRBV5-1, TRBJ2-1)
CASSFGVSGSYNEQFF

SEQ ID NO: 134601 - protein, 15 aa, Homo sapiens
  CDR3 for alpha chain variable domain of TCR clone 67301 (TRAV8-3, TRAJ15)
CAVGAPNQAGTALIF

SEQ ID NO: 134602 - protein, 14 aa, Homo sapiens
  CDR3 for beta chain variable domain of TCR clone 67301 (TRBV20-1, TRBJ2-1)
CSPNDGASYNEQFF

SEQ ID NO: 134603 - protein, 16 aa, Homo sapiens
  CDR3 for alpha chain variable domain of TCR clone 67302 (TRAV30, TRAJ24)
CGTEIVDADSGGKFQL

SEQ ID NO: 134604 - protein, 14 aa, Homo sapiens
  CDR3 for beta chain variable domain of TCR clone 67302 (TRBV12-5, TRBJ2-5)
CASGSRTHQETQYF

SEQ ID NO: 134605 - protein, 15 aa, Homo sapiens
  CDR3 for alpha chain variable domain of TCR clone 67303 (TRAV12-1, TRAJ34)
CVVPPGGGNTDKLIF

SEQ ID NO: 134606 - protein, 13 aa, Homo sapiens
  CDR3 for beta chain variable domain of TCR clone 67303 (TRBV19, TRBJ1-2)
CASSVPGQDGYTF

SEQ ID NO: 134607 - protein, 12 aa, Homo sapiens
  CDR3 for alpha chain variable domain of TCR clone 67304 (TRAV13-1, TRAJ23)
CAASKKGGKLIF

SEQ ID NO: 134608 - protein, 13 aa, Homo sapiens
  CDR3 for beta chain variable domain of TCR clone 67304 (TRBV19, TRBJ1-5)
CASSEGSNQPQHF

SEQ ID NO: 134609 - protein, 15 aa, Homo sapiens
  CDR3 for alpha chain variable domain of TCR clone 67305 (TRAV3, TRAJ17)
CAVRDTGAVGNKLTF

SEQ ID NO: 134610 - protein, 14 aa, Homo sapiens
  CDR3 for beta chain variable domain of TCR clone 67305 (TRBV6-3, TRBJ1-1)
CASSNLLPGAEAFF

SEQ ID NO: 134611 - protein, 11 aa, Homo sapiens
  CDR3 for alpha chain variable domain of TCR clone 67306 (TRAV12-1, TRAJ30)
CVVNGQGKIIF

SEQ ID NO: 134612 - protein, 12 aa, Homo sapiens
  CDR3 for beta chain variable domain of TCR clone 67306 (TRBV27, TRBJ2-2)
CASKLFTGELFF

SEQ ID NO: 134613 - protein, 15 aa, Homo sapiens
  CDR3 for alpha chain variable domain of TCR clone 67307 (TRAV26-1, TRAJ40)
CIVRAVPSGTYKSIF

SEQ ID NO: 134614 - protein, 14 aa, Homo sapiens
  CDR3 for beta chain variable domain of TCR clone 67307 (TRBV19, TRBJ2-1)
CASKDPGLANEQFF

SEQ ID NO: 134615 - protein, 13 aa, Homo sapiens
  CDR3 for alpha chain variable domain of TCR clone 67308 (TRAV27, TRAJ6)
RAGGTRGSYIPTF

SEQ ID NO: 134616 - protein, 15 aa, Homo sapiens
  CDR3 for beta chain variable domain of TCR clone 67308 (TRBV5-5, TRBJ2-7)
CASSLAAPLSYEQYF

SEQ ID NO: 134617 - protein, 13 aa, Homo sapiens
  CDR3 for alpha chain variable domain of TCR clone 67309 (TRAV3, TRAJ21)
CAVREPDFNKFYF

SEQ ID NO: 134618 - protein, 15 aa, Homo sapiens
  CDR3 for beta chain variable domain of TCR clone 67309 (TRBV4-1, TRBJ1-4)
CASSDTGGTNEKLFF

SEQ ID NO: 134619 - protein, 16 aa, Homo sapiens
  CDR3 for alpha chain variable domain of TCR clone 67310 (TRAV30, TRAJ24)
CGTEIVDADSWGKFQF

SEQ ID NO: 134620 - protein, 13 aa, Homo sapiens
  CDR3 for beta chain variable domain of TCR clone 67310 (TRBV12-4, TRBJ2-1)
CASRQPSNNEQFF

SEQ ID NO: 134621 - protein, 16 aa, Homo sapiens
  CDR3 for alpha chain variable domain of TCR clone 67311 (TRAV14/DV4, TRAJ52)
CAMRYAGGTSYGKLTF

SEQ ID NO: 134622 - protein, 14 aa, Homo sapiens
  CDR3 for beta chain variable domain of TCR clone 67311 (TRBV23-1, TRBJ2-5)
CASSFLRSQETQYF

SEQ ID NO: 134623 - protein, 14 aa, Homo sapiens
  CDR3 for alpha chain variable domain of TCR clone 67312 (TRAV1-2, TRAJ16)
CAVSRFSDGQKLLF

SEQ ID NO: 134624 - protein, 13 aa, Homo sapiens
  CDR3 for beta chain variable domain of TCR clone 67312 (TRBV10-3, TRBJ2-7)
CASKLAVNYEQYF

SEQ ID NO: 134625 - protein, 13 aa, Homo sapiens
  CDR3 for alpha chain variable domain of TCR clone 67313 (TRAV14/DV4, TRAJ22)
CAMRDLSARQLTF

SEQ ID NO: 134626 - protein, 18 aa, Homo sapiens
  CDR3 for beta chain variable domain of TCR clone 67313 (TRBV19, TRBJ1-5)
CASSKGQVSIRSNQPQHF

SEQ ID NO: 134627 - protein, 10 aa, Homo sapiens
  CDR3 for alpha chain variable domain of TCR clone 67314 (TRAV30, TRAJ48)
CGIGNEKLTF

SEQ ID NO: 134628 - protein, 14 aa, Homo sapiens
  CDR3 for beta chain variable domain of TCR clone 67314 (TRBV7-6, TRBJ2-3)
CASSVAWGTDTQYF

SEQ ID NO: 134629 - protein, 15 aa, Homo sapiens
  CDR3 for alpha chain variable domain of TCR clone 67315 (TRAV3, TRAJ22)
CAVRDRGGSARQLTF

SEQ ID NO: 134630 - protein, 12 aa, Homo sapiens
  CDR3 for beta chain variable domain of TCR clone 67315 (TRBV11-2, TRBJ2-1)
CASSPGNNEQFF

SEQ ID NO: 134631 - protein, 13 aa, Homo sapiens
  CDR3 for alpha chain variable domain of TCR clone 67316 (TRAV27, TRAJ6)
CAGGTRGSYIPTF

SEQ ID NO: 134632 - protein, 15 aa, Homo sapiens
  CDR3 for beta chain variable domain of TCR clone 67316 (TRBV11-2, TRBJ1-3)
CASSLSQLVRDTIYF

SEQ ID NO: 134633 - protein, 13 aa, Homo sapiens
  CDR3 for alpha chain variable domain of TCR clone 67317 (TRAV12-3, TRAJ40)
CAMSDSGTHKYIF

SEQ ID NO: 134634 - protein, 14 aa, Homo sapiens
  CDR3 for beta chain variable domain of TCR clone 67317 (TRBV7-2, TRBJ1-5)
CASSTQGAGQPQHF

SEQ ID NO: 134635 - protein, 16 aa, Homo sapiens
  CDR3 for alpha chain variable domain of TCR clone 67318 (TRAV30, TRAJ24)
CGTEIVDADSWGKFQF

SEQ ID NO: 134636 - protein, 16 aa, Homo sapiens
  CDR3 for beta chain variable domain of TCR clone 67318 (TRBV5-1, TRBJ2-3)
CASSLGLAVYTDTQYF

SEQ ID NO: 134637 - protein, 17 aa, Homo sapiens
  CDR3 for alpha chain variable domain of TCR clone 67319 (TRAV8-3, TRAJ6)
CAVRDGPRAGGSYIPTF

SEQ ID NO: 134638 - protein, 14 aa, Homo sapiens
  CDR3 for beta chain variable domain of TCR clone 67319 (TRBV7-2, TRBJ2-7)
CASSPKTSFYEQYF

SEQ ID NO: 134639 - protein, 13 aa, Homo sapiens
  CDR3 for alpha chain variable domain of TCR clone 67320 (TRAV21, TRAJ20)
CAVYPSNDYKLSF

SEQ ID NO: 134640 - protein, 15 aa, Homo sapiens
  CDR3 for beta chain variable domain of TCR clone 67320 (TRBV27, TRBJ2-5)
CASSLYPRGGETQYF

SEQ ID NO: 134641 - protein, 14 aa, Homo sapiens
  CDR3 for alpha chain variable domain of TCR clone 67321 (TRAV13-2, TRAJ22)
CADGTLGYARQLTF

SEQ ID NO: 134642 - protein, 16 aa, Homo sapiens
  CDR3 for beta chain variable domain of TCR clone 67321 (TRBV19, TRBJ2-1)
CASSSKGTRSYNEQFF

SEQ ID NO: 134643 - protein, 13 aa, Homo sapiens
  CDR3 for alpha chain variable domain of TCR clone 67322 (TRAV13-2, TRAJ22)
CLGWISSSRQLTF

SEQ ID NO: 134644 - protein, 15 aa, Homo sapiens
  CDR3 for beta chain variable domain of TCR clone 67322 (TRBV7-2, TRBJ2-3)
CASSSTGLETDTQYF

SEQ ID NO: 134645 - protein, 13 aa, Homo sapiens
  CDR3 for alpha chain variable domain of TCR clone 67323 (TRAV12-1, TRAJ6)
CVVFPGGSHIPTF

SEQ ID NO: 134646 - protein, 14 aa, Homo sapiens
  CDR3 for beta chain variable domain of TCR clone 67323 (TRBV20-1, TRBJ1-3)
CSASPTGAGNTIYF

SEQ ID NO: 134647 - protein, 14 aa, Homo sapiens
  CDR3 for alpha chain variable domain of TCR clone 67324 (TRAV12-1, TRAJ26)
CVVKGSNYGQNIVF

SEQ ID NO: 134648 - protein, 17 aa, Homo sapiens
  CDR3 for beta chain variable domain of TCR clone 67324 (TRBV11-2, TRBJ2-6)
CASSQRDIFSGANVLTF

SEQ ID NO: 134649 - protein, 14 aa, Homo sapiens
  CDR3 for alpha chain variable domain of TCR clone 67325 (TRAV12-3, TRAJ57)
CAMSAWGGSEKLVF

SEQ ID NO: 134650 - protein, 14 aa, Homo sapiens
  CDR3 for beta chain variable domain of TCR clone 67325 (TRBV18, TRBJ2-5)
CAGSPGVSQETQYF

SEQ ID NO: 134651 - protein, 15 aa, Homo sapiens
  CDR3 for alpha chain variable domain of TCR clone 67326 (TRAV19, TRAJ13)
CALSGHSGGYQKVTF

SEQ ID NO: 134652 - protein, 17 aa, Homo sapiens
  CDR3 for beta chain variable domain of TCR clone 67326 (TRBV5-5, TRBJ1-2)
CASSLGSLDGQSEGYTF

SEQ ID NO: 134653 - protein, 16 aa, Homo sapiens
  CDR3 for alpha chain variable domain of TCR clone 67327 (TRAV16, TRAJ57)
CAPHLITQGGSEKLVF

SEQ ID NO: 134654 - protein, 17 aa, Homo sapiens
  CDR3 for beta chain variable domain of TCR clone 67327 (TRBV24-1, TRBJ2-4)
CATSDAEARGVRNIQYF

SEQ ID NO: 134655 - protein, 15 aa, Homo sapiens
  CDR3 for alpha chain variable domain of TCR clone 67328 (TRAV3, TRAJ10)
CAVRDGTGGGNKLTF

SEQ ID NO: 134656 - protein, 15 aa, Homo sapiens
  CDR3 for beta chain variable domain of TCR clone 67328 (TRBV4-3, TRBJ1-4)
SASSLVQREVEKLFF

SEQ ID NO: 134657 - protein, 14 aa, Homo sapiens
  CDR3 for alpha chain variable domain of TCR clone 67329 (TRAV26-1, TRAJ26)
CIVRATFLGQNFVF

SEQ ID NO: 134658 - protein, 16 aa, Homo sapiens
  CDR3 for beta chain variable domain of TCR clone 67329 (TRBV12-4, TRBJ2-7)
CASRSTGTGPSYEKYF

SEQ ID NO: 134659 - protein, 12 aa, Homo sapiens
  CDR3 for alpha chain variable domain of TCR clone 67330 (TRAV30, TRAJ43)
CGTEERGNEMRF

SEQ ID NO: 134660 - protein, 13 aa, Homo sapiens
  CDR3 for beta chain variable domain of TCR clone 67330 (TRBV27, TRBJ2-7)
CASSFSQGYEQYF

SEQ ID NO: 134661 - protein, 11 aa, Homo sapiens
  CDR3 for alpha chain variable domain of TCR clone 67331 (TRAV16, TRAJ49)
CSLNTGNRFYF

SEQ ID NO: 134662 - protein, 12 aa, Homo sapiens
  CDR3 for beta chain variable domain of TCR clone 67331 (TRBV7-9, TRBJ1-4)
CASSTDREKLFF

SEQ ID NO: 134663 - protein, 14 aa, Homo sapiens
  CDR3 for alpha chain variable domain of TCR clone 67332 (TRAV17, TRAJ34)
CATDNLEGTDKLIF

SEQ ID NO: 134664 - protein, 15 aa, Homo sapiens
  CDR3 for beta chain variable domain of TCR clone 67332 (TRBV12-4, TRBJ1-2)
CASSPITGGGYGYTF

SEQ ID NO: 134665 - protein, 12 aa, Homo sapiens
  CDR3 for alpha chain variable domain of TCR clone 67333 (TRAV12-3, TRAJ17)
CAMALTSNKLTF

SEQ ID NO: 134666 - protein, 15 aa, Homo sapiens
  CDR3 for beta chain variable domain of TCR clone 67333 (TRBV20-1, TRBJ2-7)
CSARDRVSGMDEQYF

SEQ ID NO: 134667 - protein, 15 aa, Homo sapiens
  CDR3 for alpha chain variable domain of TCR clone 67334 (TRAV26-1, TRAJ44)
CIVRVATGTASKLTL

SEQ ID NO: 134668 - protein, 18 aa, Homo sapiens
  CDR3 for beta chain variable domain of TCR clone 67334 (TRBV20-1, TRBJ2-3)
CSAKPLVRVARRTDTQYF

SEQ ID NO: 134669 - protein, 16 aa, Homo sapiens
  CDR3 for alpha chain variable domain of TCR clone 67335 (TRAV30, TRAJ24)
CGTEIVDADSWGKFQF

SEQ ID NO: 134670 - protein, 14 aa, Homo sapiens
  CDR3 for beta chain variable domain of TCR clone 67335 (TRBV2, TRBJ2-1)
CASRTGSSYNEQFF

SEQ ID NO: 134671 - protein, 17 aa, Homo sapiens
  CDR3 for alpha chain variable domain of TCR clone 67336 (TRAV13-1, TRAJ52)
CAAERNAGGTSYGKLTF

SEQ ID NO: 134672 - protein, 15 aa, Homo sapiens
  CDR3 for beta chain variable domain of TCR clone 67336 (TRBV6-3, TRBJ2-7)
CASSSPGTVFYEQYF

SEQ ID NO: 134673 - protein, 14 aa, Homo sapiens
  CDR3 for alpha chain variable domain of TCR clone 67337 (TRAV12-3, TRAJ10)
SHLPLTGGGNKLTF

SEQ ID NO: 134674 - protein, 11 aa, Homo sapiens
  CDR3 for beta chain variable domain of TCR clone 67337 (TRBV19, TRBJ1-1)
CAGSIGSEAFF

SEQ ID NO: 134675 - protein, 13 aa, Homo sapiens
  CDR3 for alpha chain variable domain of TCR clone 67338 (TRAV17, TRAJ40)
CAGSLGGTYKYIF

SEQ ID NO: 134676 - protein, 16 aa, Homo sapiens
  CDR3 for beta chain variable domain of TCR clone 67338 (TRBV7-2, TRBJ1-4)
CASSLAPGRRDEKLFF

SEQ ID NO: 134677 - protein, 13 aa, Homo sapiens
  CDR3 for alpha chain variable domain of TCR clone 67339 (TRAV21, TRAJ27)
CAARPGNAGKSTF

SEQ ID NO: 134678 - protein, 16 aa, Homo sapiens
  CDR3 for beta chain variable domain of TCR clone 67339 (TRBV2, TRBJ2-1)
CASRPRSGGPYGEQFF

SEQ ID NO: 134679 - protein, 16 aa, Homo sapiens
  CDR3 for alpha chain variable domain of TCR clone 67340 (TRAV21, TRAJ17)
CAVRPGEEAEGNKLTF

SEQ ID NO: 134680 - protein, 16 aa, Homo sapiens
  CDR3 for beta chain variable domain of TCR clone 67340 (TRBV2, TRBJ2-7)
CASSEPWTGPSYEQYF

SEQ ID NO: 134681 - protein, 15 aa, Homo sapiens
  CDR3 for alpha chain variable domain of TCR clone 67341 (TRAV12-1, TRAJ44)
CVVFVNTGTASNLTF

SEQ ID NO: 134682 - protein, 17 aa, Homo sapiens
  CDR3 for beta chain variable domain of TCR clone 67341 (TRBV7-8, TRBJ2-6)
CASSAGTGGAGANVLTF

SEQ ID NO: 134683 - protein, 13 aa, Homo sapiens
  CDR3 for alpha chain variable domain of TCR clone 67342 (TRAV38-1, TRAJ42)
CARWGGSQGNLIF

SEQ ID NO: 134684 - protein, 15 aa, Homo sapiens
  CDR3 for beta chain variable domain of TCR clone 67342 (TRBV18, TRBJ2-1)
CASSPPSASYNEQFF

SEQ ID NO: 134685 - protein, 12 aa, Homo sapiens
  CDR3 for alpha chain variable domain of TCR clone 67343 (TRAV8-6, TRAJ43)
CSVSNNNNDMRF

SEQ ID NO: 134686 - protein, 15 aa, Homo sapiens
  CDR3 for beta chain variable domain of TCR clone 67343 (TRBV7-3, TRBJ2-6)
CASSLGGSGANVLTF

SEQ ID NO: 134687 - protein, 17 aa, Homo sapiens
  CDR3 for alpha chain variable domain of TCR clone 67344 (TRAV8-6, TRAJ58)
CAVSSWVGETSGSRLTL

SEQ ID NO: 134688 - protein, 15 aa, Homo sapiens
  CDR3 for beta chain variable domain of TCR clone 67344 (TRBV20-1, TRBJ2-7)
CSARDRVSGMDEQYF

SEQ ID NO: 134689 - protein, 12 aa, Homo sapiens
  CDR3 for alpha chain variable domain of TCR clone 67345 (TRAV8-3, TRAJ20)
CAVDFNDYKLSF

SEQ ID NO: 134690 - protein, 12 aa, Homo sapiens
  CDR3 for beta chain variable domain of TCR clone 67345 (TRBV11-2, TRBJ2-2)
CASSLGGGELFF

SEQ ID NO: 134691 - protein, 14 aa, Homo sapiens
  CDR3 for alpha chain variable domain of TCR clone 67346 (TRAV26-1, TRAJ38)
CIADNAGNNRQLLW

SEQ ID NO: 134692 - protein, 13 aa, Homo sapiens
  CDR3 for beta chain variable domain of TCR clone 67346 (TRBV20-1, TRBJ1-1)
CSARGGGNTEAFF

SEQ ID NO: 134693 - protein, 12 aa, Homo sapiens
  CDR3 for alpha chain variable domain of TCR clone 67347 (TRAV16, TRAJ27)
CALNTNAGKSTF

SEQ ID NO: 134694 - protein, 17 aa, Homo sapiens
  CDR3 for beta chain variable domain of TCR clone 67347 (TRBV7-8, TRBJ2-6)
CASSAGTGGAGANVLTF

SEQ ID NO: 134695 - protein, 13 aa, Homo sapiens
  CDR3 for alpha chain variable domain of TCR clone 67348 (TRAV36/DV7, TRAJ37)
CAVFSSNTGKLIF

SEQ ID NO: 134696 - protein, 15 aa, Homo sapiens
  CDR3 for beta chain variable domain of TCR clone 67348 (TRBV12-4, TRBJ2-5)
CQRFFVRGRQETQYF

SEQ ID NO: 134697 - protein, 14 aa, Homo sapiens
  CDR3 for alpha chain variable domain of TCR clone 67349 (TRAV13-1, TRAJ44)
CAAKATGTASKLTF

SEQ ID NO: 134698 - protein, 13 aa, Homo sapiens
  CDR3 for beta chain variable domain of TCR clone 67349 (TRBV5-5, TRBJ1-2)
CARSFWRGEDYTF

SEQ ID NO: 134699 - protein, 14 aa, Homo sapiens
  CDR3 for alpha chain variable domain of TCR clone 67350 (TRAV8-1, TRAJ15)
CAVNGQQAGTALIF

SEQ ID NO: 134700 - protein, 15 aa, Homo sapiens
  CDR3 for beta chain variable domain of TCR clone 67350 (TRBV7-8, TRBJ2-1)
CASSLAGGLYNEQFF

SEQ ID NO: 134701 - protein, 15 aa, Homo sapiens
  CDR3 for alpha chain variable domain of TCR clone 67351 (TRAV26-1, TRAJ9)
CIVRERNTGGFKTIF

SEQ ID NO: 134702 - protein, 11 aa, Homo sapiens
  CDR3 for beta chain variable domain of TCR clone 67351 (TRBV7-6, TRBJ2-5)
CASSFQETQYF

SEQ ID NO: 134703 - protein, 14 aa, Homo sapiens
  CDR3 for alpha chain variable domain of TCR clone 67352 (TRAV12-1, TRAJ3)
CGAARYSSASKIIS

SEQ ID NO: 134704 - protein, 16 aa, Homo sapiens
  CDR3 for beta chain variable domain of TCR clone 67352 (TRBV4-3, TRBJ2-2)
CASSHLQGSGTGELFF

SEQ ID NO: 134705 - protein, 13 aa, Homo sapiens
  CDR3 for alpha chain variable domain of TCR clone 67353 (TRAV2, TRAJ15)
CAVASQAGTALIF

SEQ ID NO: 134706 - protein, 14 aa, Homo sapiens
  CDR3 for beta chain variable domain of TCR clone 67353 (TRBV7-9, TRBJ2-7)
CASSLQQGGYEQYF

SEQ ID NO: 134707 - protein, 16 aa, Homo sapiens
  CDR3 for alpha chain variable domain of TCR clone 67354 (TRAV30, TRAJ24)
CGTEIVDADSWGRFPF

SEQ ID NO: 134708 - protein, 14 aa, Homo sapiens
  CDR3 for beta chain variable domain of TCR clone 67354 (TRBV12-5, TRBJ2-5)
CASGSRTHQETQYF

SEQ ID NO: 134709 - protein, 16 aa, Homo sapiens
  CDR3 for alpha chain variable domain of TCR clone 67355 (TRAV16, TRAJ52)
CALSAAGGTSYGKLTF

SEQ ID NO: 134710 - protein, 12 aa, Homo sapiens
  CDR3 for beta chain variable domain of TCR clone 67355 (TRBV12-4, TRBJ1-3)
CASSCSGNTIYF

SEQ ID NO: 134711 - protein, 14 aa, Homo sapiens
  CDR3 for alpha chain variable domain of TCR clone 67356 (TRAV26-2, TRAJ38)
CILYNAGNNRKLIW

SEQ ID NO: 134712 - protein, 14 aa, Homo sapiens
  CDR3 for beta chain variable domain of TCR clone 67356 (TRBV18, TRBJ2-7)
CASSPRGGAYEQYF

SEQ ID NO: 134713 - protein, 18 aa, Homo sapiens
  CDR3 for alpha chain variable domain of TCR clone 67357 (TRAV13-1, TRAJ10)
CAASKGRAVTGAGNKLTF

SEQ ID NO: 134714 - protein, 14 aa, Homo sapiens
  CDR3 for beta chain variable domain of TCR clone 67357 (TRBV18, TRBJ2-7)
CASSPRGGAYEQYF

SEQ ID NO: 134715 - protein, 11 aa, Homo sapiens
  CDR3 for alpha chain variable domain of TCR clone 67358 (TRAV12-2, TRAJ33)
YAVTSNYQLIW

SEQ ID NO: 134716 - protein, 14 aa, Homo sapiens
  CDR3 for beta chain variable domain of TCR clone 67358 (TRBV12-4, TRBJ2-2)
CASNQGANTGELFF

SEQ ID NO: 134717 - protein, 16 aa, Homo sapiens
  CDR3 for alpha chain variable domain of TCR clone 67359 (TRAV3, TRAJ21)
GAVRDIERGNFNKFYF

SEQ ID NO: 134718 - protein, 13 aa, Homo sapiens
  CDR3 for beta chain variable domain of TCR clone 67359 (TRBV27, TRBJ2-7)
CASSLTTGYEQYF

SEQ ID NO: 134719 - protein, 12 aa, Homo sapiens
  CDR3 for alpha chain variable domain of TCR clone 67360 (TRAV12-3, TRAJ17)
CAMTLTGNKLTF

SEQ ID NO: 134720 - protein, 19 aa, Homo sapiens
  CDR3 for beta chain variable domain of TCR clone 67360 (TRBV25-1, TRBJ2-2)
WAILVYRVDRGRKTGELFF

SEQ ID NO: 134721 - protein, 14 aa, Homo sapiens
  CDR3 for alpha chain variable domain of TCR clone 67361 (TRAV12-3, TRAJ9)
CAMSPNTGGFKTIF

SEQ ID NO: 134722 - protein, 12 aa, Homo sapiens
  CDR3 for beta chain variable domain of TCR clone 67361 (TRBV11-2, TRBJ2-2)
CASSRGGGELFF

SEQ ID NO: 134723 - protein, 14 aa, Homo sapiens
  CDR3 for alpha chain variable domain of TCR clone 67362 (TRAV1-2, TRAJ8)
CAVREDTGFQKLVF

SEQ ID NO: 134724 - protein, 16 aa, Homo sapiens
  CDR3 for beta chain variable domain of TCR clone 67362 (TRBV20-1, TRBJ2-4)
CSDRAILAGQGDIQYF

SEQ ID NO: 134725 - protein, 13 aa, Homo sapiens
  CDR3 for alpha chain variable domain of TCR clone 67363 (TRAV38-2/DV8, TRAJ34)
CAYRNYNTDKLIF

SEQ ID NO: 134726 - protein, 15 aa, Homo sapiens
  CDR3 for beta chain variable domain of TCR clone 67363 (TRBV7-3, TRBJ2-2)
CASSETGQGTGELFF

SEQ ID NO: 134727 - protein, 14 aa, Homo sapiens
  CDR3 for alpha chain variable domain of TCR clone 67364 (TRAV12-2, TRAJ40)
CAVKIPSGTYKYIF

SEQ ID NO: 134728 - protein, 13 aa, Homo sapiens
  CDR3 for beta chain variable domain of TCR clone 67364 (TRBV7-7, TRBJ2-3)
CASSLSRADTQYF

SEQ ID NO: 134729 - protein, 14 aa, Homo sapiens
  CDR3 for alpha chain variable domain of TCR clone 67365 (TRAV12-1, TRAJ4)
CVGDFSGDYNKLIF

SEQ ID NO: 134730 - protein, 15 aa, Homo sapiens
  CDR3 for beta chain variable domain of TCR clone 67365 (TRBV4-2, TRBJ2-7)
CASSQVDRSSYEQYF

SEQ ID NO: 134731 - protein, 13 aa, Homo sapiens
  CDR3 for alpha chain variable domain of TCR clone 67366 (TRAV21, TRAJ20)
CAVGLRVDYTLSF

SEQ ID NO: 134732 - protein, 13 aa, Homo sapiens
  CDR3 for beta chain variable domain of TCR clone 67366 (TRBV6-1, TRBJ1-1)
CASSRQGNTEAFF

SEQ ID NO: 134733 - protein, 13 aa, Homo sapiens
  CDR3 for alpha chain variable domain of TCR clone 67367 (TRAV23/DV6, TRAJ22)
CAPWSGSARQLTF

SEQ ID NO: 134734 - protein, 14 aa, Homo sapiens
  CDR3 for beta chain variable domain of TCR clone 67367 (TRBV18, TRBJ2-7)
CASSPTSGGYEQYF

SEQ ID NO: 134735 - protein, 12 aa, Homo sapiens
  CDR3 for alpha chain variable domain of TCR clone 67368 (TRAV12-1, TRAJ20)
CVVNPDDYKLSF

SEQ ID NO: 134736 - protein, 15 aa, Homo sapiens
  CDR3 for beta chain variable domain of TCR clone 67368 (TRBV9, TRBJ1-6)
CASSVAGTGDSPLHF

SEQ ID NO: 134737 - protein, 16 aa, Homo sapiens
  CDR3 for alpha chain variable domain of TCR clone 67369 (TRAV3, TRAJ6)
CAVRDGMGRRKLHTYI

SEQ ID NO: 134738 - protein, 14 aa, Homo sapiens
  CDR3 for beta chain variable domain of TCR clone 67369 (TRBV7-9, TRBJ1-5)
CASADLGSNQPQHF

SEQ ID NO: 134739 - protein, 14 aa, Homo sapiens
  CDR3 for alpha chain variable domain of TCR clone 67370 (TRAV1-2, TRAJ8)
CAVREDTGFQKLVF

SEQ ID NO: 134740 - protein, 16 aa, Homo sapiens
  CDR3 for beta chain variable domain of TCR clone 67370 (TRBV11-2, TRBJ2-7)
CASSTVTAPKTYEQYF

SEQ ID NO: 134741 - protein, 14 aa, Homo sapiens
  CDR3 for alpha chain variable domain of TCR clone 67371 (TRAV8-4, TRAJ13)
CAVTLAGGYQKVTF

SEQ ID NO: 134742 - protein, 14 aa, Homo sapiens
  CDR3 for beta chain variable domain of TCR clone 67371 (TRBV7-2, TRBJ1-2)
CASSQTGSTYGYTF

SEQ ID NO: 134743 - protein, 14 aa, Homo sapiens
  CDR3 for alpha chain variable domain of TCR clone 67372 (TRAV12-2, TRAJ17)
CAVLFKAAGNKLTF

SEQ ID NO: 134744 - protein, 12 aa, Homo sapiens
  CDR3 for beta chain variable domain of TCR clone 67372 (TRBV11-2, TRBJ2-2)
CASSLPTGELFF

SEQ ID NO: 134745 - protein, 13 aa, Homo sapiens
  CDR3 for alpha chain variable domain of TCR clone 67373 (TRAV2, TRAJ15)
CAVASQAGTALIF

SEQ ID NO: 134746 - protein, 13 aa, Homo sapiens
  CDR3 for beta chain variable domain of TCR clone 67373 (TRBV20-1, TRBJ1-1)
CSARGGGNTEAFF

SEQ ID NO: 134747 - protein, 16 aa, Homo sapiens
  CDR3 for alpha chain variable domain of TCR clone 67374 (TRAV3, TRAJ37)
CAVRPHGSGNTGQLIF

SEQ ID NO: 134748 - protein, 14 aa, Homo sapiens
  CDR3 for beta chain variable domain of TCR clone 67374 (TRBV2, TRBJ2-1)
CASSDRAYYNEQFF

SEQ ID NO: 134749 - protein, 14 aa, Homo sapiens
  CDR3 for alpha chain variable domain of TCR clone 67375 (TRAV26-1, TRAJ38)
CVADNAGNNRKLIW

SEQ ID NO: 134750 - protein, 15 aa, Homo sapiens
  CDR3 for beta chain variable domain of TCR clone 67375 (TRBV7-2, TRBJ2-1)
CASSLVAGRYNEQFF

SEQ ID NO: 134751 - protein, 13 aa, Homo sapiens
  CDR3 for alpha chain variable domain of TCR clone 67376 (TRAV26-2, TRAJ39)
CILRDNAGNMLTF

SEQ ID NO: 134752 - protein, 15 aa, Homo sapiens
  CDR3 for beta chain variable domain of TCR clone 67376 (TRBV11-2, TRBJ1-3)
CASSIWGSYGNTIYF

SEQ ID NO: 134753 - protein, 16 aa, Homo sapiens
  CDR3 for alpha chain variable domain of TCR clone 67377 (TRAV30, TRAJ24)
CGTAIVDADSWGKFKF

SEQ ID NO: 134754 - protein, 14 aa, Homo sapiens
  CDR3 for beta chain variable domain of TCR clone 67377 (TRBV12-5, TRBJ2-5)
CASGSRTHQETQYF

SEQ ID NO: 134755 - protein, 13 aa, Homo sapiens
  CDR3 for alpha chain variable domain of TCR clone 67378 (TRAV13-1, TRAJ10)
CAASGGGGNKLTF

SEQ ID NO: 134756 - protein, 14 aa, Homo sapiens
  CDR3 for beta chain variable domain of TCR clone 67378 (TRBV7-2, TRBJ2-7)
CASSPKTSFYEQYF

SEQ ID NO: 134757 - protein, 11 aa, Homo sapiens
  CDR3 for alpha chain variable domain of TCR clone 67379 (TRAV12-1, TRAJ31)
CVGRVQCQTHV

SEQ ID NO: 134758 - protein, 15 aa, Homo sapiens
  CDR3 for beta chain variable domain of TCR clone 67379 (TRBV19, TRBJ1-1)
CASTSGQIQNTEAFF

SEQ ID NO: 134759 - protein, 15 aa, Homo sapiens
  CDR3 for alpha chain variable domain of TCR clone 67380 (TRAV3, TRAJ32)
CAVSSYGGATNKLIF

SEQ ID NO: 134760 - protein, 14 aa, Homo sapiens
  CDR3 for beta chain variable domain of TCR clone 67380 (TRBV7-9, TRBJ2-2)
CASSGLADTGELFF

SEQ ID NO: 134761 - protein, 13 aa, Homo sapiens
  CDR3 for alpha chain variable domain of TCR clone 67381 (TRAV2, TRAJ15)
CAVASQAETALIF

SEQ ID NO: 134762 - protein, 16 aa, Homo sapiens
  CDR3 for beta chain variable domain of TCR clone 67381 (TRBV5-1, TRBJ1-1)
CASSSGGNSLNTEAFF

SEQ ID NO: 134763 - protein, 14 aa, Homo sapiens
  CDR3 for alpha chain variable domain of TCR clone 67382 (TRAV23/DV6, TRAJ40)
CAARKNSGTYKSIF

SEQ ID NO: 134764 - protein, 14 aa, Homo sapiens
  CDR3 for beta chain variable domain of TCR clone 67382 (TRBV10-3, TRBJ2-5)
CAISERDYQETQYF

SEQ ID NO: 134765 - protein, 14 aa, Homo sapiens
  CDR3 for alpha chain variable domain of TCR clone 67383 (TRAV1-1, TRAJ35)
CAVRSIGFGNVLHC

SEQ ID NO: 134766 - protein, 14 aa, Homo sapiens
  CDR3 for beta chain variable domain of TCR clone 67383 (TRBV5-6, TRBJ2-7)
CANSGGLSSYEQYF

SEQ ID NO: 134767 - protein, 13 aa, Homo sapiens
  CDR3 for alpha chain variable domain of TCR clone 67384 (TRAV2, TRAJ15)
CAVASQAGTALIF

SEQ ID NO: 134768 - protein, 12 aa, Homo sapiens
  CDR3 for beta chain variable domain of TCR clone 67384 (TRBV20-1, TRBJ1-1)
CSARHSGTEAFF

SEQ ID NO: 134769 - protein, 12 aa, Homo sapiens
  CDR3 for alpha chain variable domain of TCR clone 67385 (TRAV12-3, TRAJ17)
CAMTLTGNKLTS

SEQ ID NO: 134770 - protein, 18 aa, Homo sapiens
  CDR3 for beta chain variable domain of TCR clone 67385 (TRBV4-3, TRBJ1-6)
CASSQETPASSYNSPLHF

SEQ ID NO: 134771 - protein, 13 aa, Homo sapiens
  CDR3 for alpha chain variable domain of TCR clone 67386 (TRAV30, TRAJ49)
CGTESQPVTSSIL

SEQ ID NO: 134772 - protein, 16 aa, Homo sapiens
  CDR3 for beta chain variable domain of TCR clone 67386 (TRBV19, TRBJ2-2)
CASRSPGTGATGELFF

SEQ ID NO: 134773 - protein, 12 aa, Homo sapiens
  CDR3 for alpha chain variable domain of TCR clone 67387 (TRAV16, TRAJ56)
CAPTGANSKLTF

SEQ ID NO: 134774 - protein, 15 aa, Homo sapiens
  CDR3 for beta chain variable domain of TCR clone 67387 (TRBV7-9, TRBJ1-6)
CASSSPGRGNSPLHF

SEQ ID NO: 134775 - protein, 14 aa, Homo sapiens
  CDR3 for alpha chain variable domain of TCR clone 67388 (TRAV1-2, TRAJ8)
CAVREDTGFQKLVF

SEQ ID NO: 134776 - protein, 13 aa, Homo sapiens
  CDR3 for beta chain variable domain of TCR clone 67388 (TRBV4-2, TRBJ2-2)
CASEDGGTGELFF

SEQ ID NO: 134777 - protein, 13 aa, Homo sapiens
  CDR3 for alpha chain variable domain of TCR clone 67389 (TRAV23/DV6, TRAJ12)
CAPRVDSSDKLIF

SEQ ID NO: 134778 - protein, 12 aa, Homo sapiens
  CDR3 for beta chain variable domain of TCR clone 67389 (TRBV7-6, TRBJ2-5)
CASSLSQETQYF

SEQ ID NO: 134779 - protein, 14 aa, Homo sapiens
  CDR3 for alpha chain variable domain of TCR clone 67390 (TRAV3, TRAJ34)
CAVRDINNTDKPIF

SEQ ID NO: 134780 - protein, 13 aa, Homo sapiens
  CDR3 for beta chain variable domain of TCR clone 67390 (TRBV20-1, TRBJ1-1)
CSARGGGNTEAFF

SEQ ID NO: 134781 - protein, 14 aa, Homo sapiens
  CDR3 for alpha chain variable domain of TCR clone 67391 (TRAV17, TRAJ12)
CAILPMDSSYKLIF

SEQ ID NO: 134782 - protein, 15 aa, Homo sapiens
  CDR3 for beta chain variable domain of TCR clone 67391 (TRBV5-1, TRBJ1-1)
CASSLGEGENTGAFF

SEQ ID NO: 134783 - protein, 14 aa, Homo sapiens
  CDR3 for alpha chain variable domain of TCR clone 67392 (TRAV26-1, TRAJ24)
CIVSPTDSWGKFQF

SEQ ID NO: 134784 - protein, 17 aa, Homo sapiens
  CDR3 for beta chain variable domain of TCR clone 67392 (TRBV7-9, TRBJ2-1)
CASSLVASYPSYNEQFF

SEQ ID NO: 134785 - protein, 13 aa, Homo sapiens
  CDR3 for alpha chain variable domain of TCR clone 67393 (TRAV27, TRAJ45)
CRSAGGGADGLTF

SEQ ID NO: 134786 - protein, 15 aa, Homo sapiens
  CDR3 for beta chain variable domain of TCR clone 67393 (TRBV20-1, TRBJ2-7)
CSARDRVSGMDEQYF

SEQ ID NO: 134787 - protein, 13 aa, Homo sapiens
  CDR3 for alpha chain variable domain of TCR clone 67394 (TRAV12-1, TRAJ40)
CVVPTSGTYKYIF

SEQ ID NO: 134788 - protein, 16 aa, Homo sapiens
  CDR3 for beta chain variable domain of TCR clone 67394 (TRBV7-2, TRBJ2-7)
CASSLEAGGPWYEQYF

SEQ ID NO: 134789 - protein, 19 aa, Homo sapiens
  CDR3 for alpha chain variable domain of TCR clone 67395 (TRAV25, TRAJ20)
TATQTTDVGILPHDYKLSF

SEQ ID NO: 134790 - protein, 12 aa, Homo sapiens
  CDR3 for beta chain variable domain of TCR clone 67395 (TRBV11-2, TRBJ2-2)
CASSLGGGELFF

SEQ ID NO: 134791 - protein, 15 aa, Homo sapiens
  CDR3 for alpha chain variable domain of TCR clone 67396 (TRAV40, TRAJ45)
CLLGDLGGGADGLTF

SEQ ID NO: 134792 - protein, 13 aa, Homo sapiens
  CDR3 for beta chain variable domain of TCR clone 67396 (TRBV7-9, TRBJ1-2)
CASSLKHNYGYTF

SEQ ID NO: 134793 - protein, 13 aa, Homo sapiens
  CDR3 for alpha chain variable domain of TCR clone 67397 (TRAV3, TRAJ36)
CAVRDTGAHNLFF

SEQ ID NO: 134794 - protein, 15 aa, Homo sapiens
  CDR3 for beta chain variable domain of TCR clone 67397 (TRBV24-1, TRBJ2-1)
CATSGSGGFYNEQFF

SEQ ID NO: 134795 - protein, 17 aa, Homo sapiens
  CDR3 for alpha chain variable domain of TCR clone 67398 (TRAV3, TRAJ38)
CAVRDCLNAGNNRKLIW

SEQ ID NO: 134796 - protein, 14 aa, Homo sapiens
  CDR3 for beta chain variable domain of TCR clone 67398 (TRBV5-5, TRBJ1-5)
CASSEQGVDQPQHF

SEQ ID NO: 134797 - protein, 14 aa, Homo sapiens
  CDR3 for alpha chain variable domain of TCR clone 67399 (TRAV21, TRAJ45)
CAVHSGGGADGITF

SEQ ID NO: 134798 - protein, 14 aa, Homo sapiens
  CDR3 for beta chain variable domain of TCR clone 67399 (TRBV20-1, TRBJ2-1)
CSARRLAEANEQFF

SEQ ID NO: 134799 - protein, 14 aa, Homo sapiens
  CDR3 for alpha chain variable domain of TCR clone 67400 (TRAV38-1, TRAJ45)
CASHSGGGADGLTF

SEQ ID NO: 134800 - protein, 13 aa, Homo sapiens
  CDR3 for beta chain variable domain of TCR clone 67400 (TRBV10-3, TRBJ1-2)
CVISERDSYGYTF

SEQ ID NO: 134801 - protein, 15 aa, Homo sapiens
  CDR3 for alpha chain variable domain of TCR clone 67401 (TRAV3, TRAJ5)
CAVRDLYAGRRALTF

SEQ ID NO: 134802 - protein, 16 aa, Homo sapiens
  CDR3 for beta chain variable domain of TCR clone 67401 (TRBV20-1, TRBJ1-4)
CSAPGQGLLTNEKLFF

SEQ ID NO: 134803 - protein, 14 aa, Homo sapiens
  CDR3 for alpha chain variable domain of TCR clone 67402 (TRAV3, TRAJ9)
CAVRGNTGGFKTTF

SEQ ID NO: 134804 - protein, 16 aa, Homo sapiens
  CDR3 for beta chain variable domain of TCR clone 67402 (TRBV7-2, TRBJ2-7)
CASSLGLAGGAYEQYF

SEQ ID NO: 134805 - protein, 14 aa, Homo sapiens
  CDR3 for alpha chain variable domain of TCR clone 67403 (TRAV1-2, TRAJ27)
CAPAEYTNAGKSTF

SEQ ID NO: 134806 - protein, 18 aa, Homo sapiens
  CDR3 for beta chain variable domain of TCR clone 67403 (TRBV28, TRBJ1-2)
CASRQQQGKGGSNYGYTF

SEQ ID NO: 134807 - protein, 13 aa, Homo sapiens
  CDR3 for alpha chain variable domain of TCR clone 67404 (TRAV21, TRAJ27)
CAARPGNAGKSTF

SEQ ID NO: 134808 - protein, 16 aa, Homo sapiens
  CDR3 for beta chain variable domain of TCR clone 67404 (TRBV28, TRBJ1-5)
CASSFRGGYSNQPQHF

SEQ ID NO: 134809 - protein, 18 aa, Homo sapiens
  CDR3 for alpha chain variable domain of TCR clone 67405 (TRAV21, TRAJ52)
CAVRPSPAGGTSYGKLTF

SEQ ID NO: 134810 - protein, 15 aa, Homo sapiens
  CDR3 for beta chain variable domain of TCR clone 67405 (TRBV20-1, TRBJ2-7)
CSARKGLAESYERYF

SEQ ID NO: 134811 - protein, 13 aa, Homo sapiens
  CDR3 for alpha chain variable domain of TCR clone 67406 (TRAV12-1, TRAJ39)
CVVNYNAGNMLTF

SEQ ID NO: 134812 - protein, 14 aa, Homo sapiens
  CDR3 for beta chain variable domain of TCR clone 67406 (TRBV27, TRBJ2-3)
CASSPLGTTDAQYF

SEQ ID NO: 134813 - protein, 12 aa, Homo sapiens
  CDR3 for alpha chain variable domain of TCR clone 67407 (TRAV12-3, TRAJ4)
CAMTGAGTRLAV

SEQ ID NO: 134814 - protein, 15 aa, Homo sapiens
  CDR3 for beta chain variable domain of TCR clone 67407 (TRBV28, TRBJ2-1)
CASSGLAEVDNEQFF

SEQ ID NO: 134815 - protein, 16 aa, Homo sapiens
  CDR3 for alpha chain variable domain of TCR clone 67408 (TRAV4, TRAJ4)
CLVVPLFSGGYNKLIF

SEQ ID NO: 134816 - protein, 13 aa, Homo sapiens
  CDR3 for beta chain variable domain of TCR clone 67408 (TRBV9, TRBJ2-1)
CASSVGPNNEQFF

SEQ ID NO: 134817 - protein, 15 aa, Homo sapiens
  CDR3 for alpha chain variable domain of TCR clone 67409 (TRAV26-1, TRAJ29)
CIVRVEGSGNTPLVF

SEQ ID NO: 134818 - protein, 16 aa, Homo sapiens
  CDR3 for beta chain variable domain of TCR clone 67409 (TRBV5-1, TRBJ2-3)
CASSSVGRRSTDTQYF

SEQ ID NO: 134819 - protein, 14 aa, Homo sapiens
  CDR3 for alpha chain variable domain of TCR clone 67410 (TRAV8-3, TRAJ40)
CAVGVISGTYKYIF

SEQ ID NO: 134820 - protein, 15 aa, Homo sapiens
  CDR3 for beta chain variable domain of TCR clone 67410 (TRBV7-8, TRBJ2-1)
CASSLADSLYNEQFF

SEQ ID NO: 134821 - protein, 11 aa, Homo sapiens
  CDR3 for alpha chain variable domain of TCR clone 67411 (TRAV21, TRAJ48)
CAVDGNEKLTF

SEQ ID NO: 134822 - protein, 16 aa, Homo sapiens
  CDR3 for beta chain variable domain of TCR clone 67411 (TRBV12-4, TRBJ1-5)
CASGSGPRGSNQPQHF

SEQ ID NO: 134823 - protein, 14 aa, Homo sapiens
  CDR3 for alpha chain variable domain of TCR clone 67412 (TRAV14/DV4, TRAJ15)
CAMRRDQAGTALIF

SEQ ID NO: 134824 - protein, 14 aa, Homo sapiens
  CDR3 for beta chain variable domain of TCR clone 67412 (TRBV4-1, TRBJ2-2)
CASSQAVNTGELFF

SEQ ID NO: 134825 - protein, 11 aa, Homo sapiens
  CDR3 for alpha chain variable domain of TCR clone 67413 (TRAV16, TRAJ49)
CALRSGNQFYF

SEQ ID NO: 134826 - protein, 14 aa, Homo sapiens
  CDR3 for beta chain variable domain of TCR clone 67413 (TRBV7-3, TRBJ2-1)
CASSLGTSANEQFF

SEQ ID NO: 134827 - protein, 13 aa, Homo sapiens
  CDR3 for alpha chain variable domain of TCR clone 67414 (TRAV3, TRAJ27)
CAVRPLGAGKSTF

SEQ ID NO: 134828 - protein, 13 aa, Homo sapiens
  CDR3 for beta chain variable domain of TCR clone 67414 (TRBV7-9, TRBJ2-3)
CASSPGSTDTHYF

SEQ ID NO: 134829 - protein, 13 aa, Homo sapiens
  CDR3 for alpha chain variable domain of TCR clone 67415 (TRAV21, TRAJ27)
CAARPGNAGKSTF

SEQ ID NO: 134830 - protein, 16 aa, Homo sapiens
  CDR3 for beta chain variable domain of TCR clone 67415 (TRBV7-9, TRBJ2-1)
CASSDVAGGSYNEQFF

SEQ ID NO: 134831 - protein, 11 aa, Homo sapiens
  CDR3 for alpha chain variable domain of TCR clone 67416 (TRAV21, TRAJ34)
CAVTNTDKLIF

SEQ ID NO: 134832 - protein, 15 aa, Homo sapiens
  CDR3 for beta chain variable domain of TCR clone 67416 (TRBV4-1, TRBJ2-7)
CASSQNTGRLYEQYF

SEQ ID NO: 134833 - protein, 14 aa, Homo sapiens
  CDR3 for alpha chain variable domain of TCR clone 67417 (TRAV3, TRAJ34)
FAVRDINNTDKLIF

SEQ ID NO: 134834 - protein, 13 aa, Homo sapiens
  CDR3 for beta chain variable domain of TCR clone 67417 (TRBV20-1, TRBJ1-1)
CSARGGGNTEAFF

SEQ ID NO: 134835 - protein, 14 aa, Homo sapiens
  CDR3 for alpha chain variable domain of TCR clone 67418 (TRAV21, TRAJ35)
CAAMPIGFGNALHC

SEQ ID NO: 134836 - protein, 12 aa, Homo sapiens
  CDR3 for beta chain variable domain of TCR clone 67418 (TRBV7-9, TRBJ2-7)
CASSIKREEQYF

SEQ ID NO: 134837 - protein, 13 aa, Homo sapiens
  CDR3 for alpha chain variable domain of TCR clone 67419 (TRAV17, TRAJ33)
CASDADSNYQLIW

SEQ ID NO: 134838 - protein, 17 aa, Homo sapiens
  CDR3 for beta chain variable domain of TCR clone 67419 (TRBV20-1, TRBJ2-3)
CSAVSPGLAGGQDTQYF

SEQ ID NO: 134839 - protein, 15 aa, Homo sapiens
  CDR3 for alpha chain variable domain of TCR clone 67420 (TRAV12-2, TRAJ8)
CAVREENTGFQKLVF

SEQ ID NO: 134840 - protein, 15 aa, Homo sapiens
  CDR3 for beta chain variable domain of TCR clone 67420 (TRBV11-3, TRBJ2-3)
CASLKDGREGDTQYF

SEQ ID NO: 134841 - protein, 14 aa, Homo sapiens
  CDR3 for alpha chain variable domain of TCR clone 67421 (TRAV20, TRAJ26)
CAVQAAIYGKNFVF

SEQ ID NO: 134842 - protein, 14 aa, Homo sapiens
  CDR3 for beta chain variable domain of TCR clone 67421 (TRBV27, TRBJ2-2)
CASSLGDTTGELFF

SEQ ID NO: 134843 - protein, 16 aa, Homo sapiens
  CDR3 for alpha chain variable domain of TCR clone 67422 (TRAV13-1, TRAJ10)
CAAGYILTGGGNKLTF

SEQ ID NO: 134844 - protein, 15 aa, Homo sapiens
  CDR3 for beta chain variable domain of TCR clone 67422 (TRBV12-4, TRBJ2-7)
CASSQTGTISYEQYF

SEQ ID NO: 134845 - protein, 11 aa, Homo sapiens
  CDR3 for alpha chain variable domain of TCR clone 67423 (TRAV13-2, TRAJ20)
CADSNDYKLSF

SEQ ID NO: 134846 - protein, 12 aa, Homo sapiens
  CDR3 for beta chain variable domain of TCR clone 67423 (TRBV11-2, TRBJ2-2)
CASSPGGGELFF

SEQ ID NO: 134847 - protein, 14 aa, Homo sapiens
  CDR3 for alpha chain variable domain of TCR clone 67424 (TRAV35, TRAJ40)
CAGSTTSGTSKYIF

SEQ ID NO: 134848 - protein, 13 aa, Homo sapiens
  CDR3 for beta chain variable domain of TCR clone 67424 (TRBV20-1, TRBJ1-6)
CSAPLGVGSPLHF

SEQ ID NO: 134849 - protein, 16 aa, Homo sapiens
  CDR3 for alpha chain variable domain of TCR clone 67425 (TRAV21, TRAJ37)
CAVRTAGSSDPGKLIF

SEQ ID NO: 134850 - protein, 13 aa, Homo sapiens
  CDR3 for beta chain variable domain of TCR clone 67425 (TRBV7-9, TRBJ2-5)
CASLPSGRETQYF

SEQ ID NO: 134851 - protein, 17 aa, Homo sapiens
  CDR3 for alpha chain variable domain of TCR clone 67426 (TRAV2, TRAJ36)
CAVEDRGNWGKQPLLGD

SEQ ID NO: 134852 - protein, 14 aa, Homo sapiens
  CDR3 for beta chain variable domain of TCR clone 67426 (TRBV7-9, TRBJ2-5)
CASSLDTAQETQYF

SEQ ID NO: 134853 - protein, 12 aa, Homo sapiens
  CDR3 for alpha chain variable domain of TCR clone 67427 (TRAV12-3, TRAJ17)
CAVTLTGNKLTF

SEQ ID NO: 134854 - protein, 12 aa, Homo sapiens
  CDR3 for beta chain variable domain of TCR clone 67427 (TRBV2, TRBJ2-1)
CAYGPPGNEQFF

SEQ ID NO: 134855 - protein, 11 aa, Homo sapiens
  CDR3 for alpha chain variable domain of TCR clone 67428 (TRAV2, TRAJ13)
CASGGYQKVTF

SEQ ID NO: 134856 - protein, 14 aa, Homo sapiens
  CDR3 for beta chain variable domain of TCR clone 67428 (TRBV19, TRBJ2-1)
CTSPTFVLSGEQFF

SEQ ID NO: 134857 - protein, 14 aa, Homo sapiens
  CDR3 for alpha chain variable domain of TCR clone 67429 (TRAV1-2, TRAJ16)
FAVNRFSDGQKLLF

SEQ ID NO: 134858 - protein, 18 aa, Homo sapiens
  CDR3 for beta chain variable domain of TCR clone 67429 (TRBV15, TRBJ2-3)
CATSRDGARSWDTDTQYF

SEQ ID NO: 134859 - protein, 13 aa, Homo sapiens
  CDR3 for alpha chain variable domain of TCR clone 67430 (TRAV3, TRAJ27)
CAVRPLGAGKSTF

SEQ ID NO: 134860 - protein, 16 aa, Homo sapiens
  CDR3 for beta chain variable domain of TCR clone 67430 (TRBV20-1, TRBJ1-4)
CSAPGQGLLTNEKLFF

SEQ ID NO: 134861 - protein, 12 aa, Homo sapiens
  CDR3 for alpha chain variable domain of TCR clone 67431 (TRAV10, TRAJ31)
CVARAHRARLMF

SEQ ID NO: 134862 - protein, 17 aa, Homo sapiens
  CDR3 for beta chain variable domain of TCR clone 67431 (TRBV14, TRBJ2-1)
CASSQDRRDSIYNEQFF

SEQ ID NO: 134863 - protein, 10 aa, Homo sapiens
  CDR3 for alpha chain variable domain of TCR clone 67432 (TRAV38-2/DV8, TRAJ40)
CASGTYKYIF

SEQ ID NO: 134864 - protein, 14 aa, Homo sapiens
  CDR3 for beta chain variable domain of TCR clone 67432 (TRBV7-9, TRBJ2-1)
CAGSPRDSLYEQFF

SEQ ID NO: 134865 - protein, 14 aa, Homo sapiens
  CDR3 for alpha chain variable domain of TCR clone 67433 (TRAV1-2, TRAJ8)
CAVREDSGFQKLVF

SEQ ID NO: 134866 - protein, 14 aa, Homo sapiens
  CDR3 for beta chain variable domain of TCR clone 67433 (TRBV29-1, TRBJ2-5)
CSVETSGSGETQYF

SEQ ID NO: 134867 - protein, 15 aa, Homo sapiens
  CDR3 for alpha chain variable domain of TCR clone 67434 (TRAV23/DV6, TRAJ18)
CAARYRCSTLGRLYF

SEQ ID NO: 134868 - protein, 13 aa, Homo sapiens
  CDR3 for beta chain variable domain of TCR clone 67434 (TRBV7-2, TRBJ2-7)
CASSSPSGSEQYF

SEQ ID NO: 134869 - protein, 16 aa, Homo sapiens
  CDR3 for alpha chain variable domain of TCR clone 67435 (TRAV8-3, TRAJ8)
RAVPRDGNTGFQKLVF

SEQ ID NO: 134870 - protein, 14 aa, Homo sapiens
  CDR3 for beta chain variable domain of TCR clone 67435 (TRBV28, TRBJ1-1)
CASSESGRGTEAFF

SEQ ID NO: 134871 - protein, 13 aa, Homo sapiens
  CDR3 for alpha chain variable domain of TCR clone 67436 (TRAV8-3, TRAJ48)
CAVVPFGNEKLTF

SEQ ID NO: 134872 - protein, 15 aa, Homo sapiens
  CDR3 for beta chain variable domain of TCR clone 67436 (TRBV11-3, TRBJ2-1)
CASSSPSTRYNEQFF

SEQ ID NO: 134873 - protein, 13 aa, Homo sapiens
  CDR3 for alpha chain variable domain of TCR clone 67437 (TRAV24, TRAJ37)
CAFSPGNTGKLIF

SEQ ID NO: 134874 - protein, 12 aa, Homo sapiens
  CDR3 for beta chain variable domain of TCR clone 67437 (TRBV11-2, TRBJ2-2)
CASSLGGGELFF

SEQ ID NO: 134875 - protein, 19 aa, Homo sapiens
  CDR3 for alpha chain variable domain of TCR clone 67438 (TRAV2, TRAJ20)
ILQVRGADAAVYRDCKLSF

SEQ ID NO: 134876 - protein, 17 aa, Homo sapiens
  CDR3 for beta chain variable domain of TCR clone 67438 (TRBV11-2, TRBJ2-1)
CASSLYPPGVEYNEQFF

SEQ ID NO: 134877 - protein, 15 aa, Homo sapiens
  CDR3 for alpha chain variable domain of TCR clone 67439 (TRAV21, TRAJ24)
CAARSSTDSLGKLQF

SEQ ID NO: 134878 - protein, 13 aa, Homo sapiens
  CDR3 for beta chain variable domain of TCR clone 67439 (TRBV11-2, TRBJ2-5)
CASSSTGEETQYF

SEQ ID NO: 134879 - protein, 16 aa, Homo sapiens
  CDR3 for alpha chain variable domain of TCR clone 67440 (TRAV17, TRAJ28)
CATASVSGAGSYQLTF

SEQ ID NO: 134880 - protein, 11 aa, Homo sapiens
  CDR3 for beta chain variable domain of TCR clone 67440 (TRBV7-9, TRBJ2-5)
CASSLGETQYS

SEQ ID NO: 134881 - protein, 15 aa, Homo sapiens
  CDR3 for alpha chain variable domain of TCR clone 67441 (TRAV12-2, TRAJ20)
CAVKGGFGAGTTVTV

SEQ ID NO: 134882 - protein, 13 aa, Homo sapiens
  CDR3 for beta chain variable domain of TCR clone 67441 (TRBV12-4, TRBJ2-7)
CASSPGQLYEKYF

SEQ ID NO: 134883 - protein, 15 aa, Homo sapiens
  CDR3 for alpha chain variable domain of TCR clone 67442 (TRAV17, TRAJ4)
CATGTWSGGYNKLIF

SEQ ID NO: 134884 - protein, 13 aa, Homo sapiens
  CDR3 for beta chain variable domain of TCR clone 67442 (TRBV19, TRBJ1-2)
CASSVPGQDGYTF

SEQ ID NO: 134885 - protein, 13 aa, Homo sapiens
  CDR3 for alpha chain variable domain of TCR clone 67443 (TRAV2, TRAJ40)
CAVVASGTYKYIF

SEQ ID NO: 134886 - protein, 16 aa, Homo sapiens
  CDR3 for beta chain variable domain of TCR clone 67443 (TRBV7-2, TRBJ1-2)
CASSSNQDRRGHGYTF

SEQ ID NO: 134887 - protein, 15 aa, Homo sapiens
  CDR3 for alpha chain variable domain of TCR clone 67444 (TRAV8-3, TRAJ27)
CAVGPSKTNAGKSTF

SEQ ID NO: 134888 - protein, 14 aa, Homo sapiens
  CDR3 for beta chain variable domain of TCR clone 67444 (TRBV7-9, TRBJ2-1)
CASSPRDSLYEQFF

SEQ ID NO: 134889 - protein, 15 aa, Homo sapiens
  CDR3 for alpha chain variable domain of TCR clone 67445 (TRAV26-1, TRAJ44)
CIVRANTGTASKLTF

SEQ ID NO: 134890 - protein, 12 aa, Homo sapiens
  CDR3 for beta chain variable domain of TCR clone 67445 (TRBV11-2, TRBJ2-2)
CASSLGGGELFF

SEQ ID NO: 134891 - protein, 19 aa, Homo sapiens
  CDR3 for alpha chain variable domain of TCR clone 67446 (TRAV17, TRAJ17)
CATDGRPGVIKAAGNKLTF

SEQ ID NO: 134892 - protein, 17 aa, Homo sapiens
  CDR3 for beta chain variable domain of TCR clone 67446 (TRBV12-4, TRBJ1-1)
CARSLSGFRTMNTEAFF

SEQ ID NO: 134893 - protein, 13 aa, Homo sapiens
  CDR3 for alpha chain variable domain of TCR clone 67447 (TRAV21, TRAJ56)
CAVRLGANSKLTF

SEQ ID NO: 134894 - protein, 12 aa, Homo sapiens
  CDR3 for beta chain variable domain of TCR clone 67447 (TRBV12-4, TRBJ2-3)
CASSSTTDTQCF

SEQ ID NO: 134895 - protein, 18 aa, Homo sapiens
  CDR3 for alpha chain variable domain of TCR clone 67448 (TRAV13-2, TRAJ20)
CSYLTWRLSCLLVHKLSF

SEQ ID NO: 134896 - protein, 13 aa, Homo sapiens
  CDR3 for beta chain variable domain of TCR clone 67448 (TRBV2, TRBJ1-4)
CASSERAGEKLFF

SEQ ID NO: 134897 - protein, 14 aa, Homo sapiens
  CDR3 for alpha chain variable domain of TCR clone 67449 (TRAV29/DV5, TRAJ20)
CAASAPIEDYKLSF

SEQ ID NO: 134898 - protein, 13 aa, Homo sapiens
  CDR3 for beta chain variable domain of TCR clone 67449 (TRBV24-1, TRBJ1-4)
CATNNGRSEKLFF

SEQ ID NO: 134899 - protein, 12 aa, Homo sapiens
  CDR3 for alpha chain variable domain of TCR clone 67450 (TRAV12-3, TRAJ31)
CAMSVPNDRLMF

SEQ ID NO: 134900 - protein, 12 aa, Homo sapiens
  CDR3 for beta chain variable domain of TCR clone 67450 (TRBV11-2, TRBJ2-1)
CASSVQREGQFF

SEQ ID NO: 134901 - protein, 15 aa, Homo sapiens
  CDR3 for alpha chain variable domain of TCR clone 67451 (TRAV34, TRAJ38)
CGADFTPGNNRKLIW

SEQ ID NO: 134902 - protein, 19 aa, Homo sapiens
  CDR3 for beta chain variable domain of TCR clone 67451 (TRBV25-1, TRBJ2-2)
CAILVYRVDRGRKTGELFF

SEQ ID NO: 134903 - protein, 16 aa, Homo sapiens
  CDR3 for alpha chain variable domain of TCR clone 67452 (TRAV21, TRAJ17)
CAVRPGEEAEGNKLTF

SEQ ID NO: 134904 - protein, 14 aa, Homo sapiens
  CDR3 for beta chain variable domain of TCR clone 67452 (TRBV3-1, TRBJ2-5)
CASSQGPDQETQYF

SEQ ID NO: 134905 - protein, 16 aa, Homo sapiens
  CDR3 for alpha chain variable domain of TCR clone 67453 (TRAV25, TRAJ53)
CAGPKGSGGSNYKLTF

SEQ ID NO: 134906 - protein, 15 aa, Homo sapiens
  CDR3 for beta chain variable domain of TCR clone 67453 (TRBV27, TRBJ1-6)
CASSFDRGLGSPLHF

SEQ ID NO: 134907 - protein, 17 aa, Homo sapiens
  CDR3 for alpha chain variable domain of TCR clone 67454 (TRAV26-2, TRAJ42)
CILRDVGYGGSQGNLIF

SEQ ID NO: 134908 - protein, 16 aa, Homo sapiens
  CDR3 for beta chain variable domain of TCR clone 67454 (TRBV12-4, TRBJ2-7)
FASSLIGGTGTYEQYF

SEQ ID NO: 134909 - protein, 13 aa, Homo sapiens
  CDR3 for alpha chain variable domain of TCR clone 67455 (TRAV21, TRAJ56)
CAGWVGANSKLTF

SEQ ID NO: 134910 - protein, 14 aa, Homo sapiens
  CDR3 for beta chain variable domain of TCR clone 67455 (TRBV5-1, TRBJ2-1)
CASSLDGDWNEQFF

SEQ ID NO: 134911 - protein, 12 aa, Homo sapiens
  CDR3 for alpha chain variable domain of TCR clone 67456 (TRAV30, TRAJ43)
CGTEERGNDMRF

SEQ ID NO: 134912 - protein, 14 aa, Homo sapiens
  CDR3 for beta chain variable domain of TCR clone 67456 (TRBV4-1, TRBJ2-2)
CASSQAVNTGELFF

SEQ ID NO: 134913 - protein, 14 aa, Homo sapiens
  CDR3 for alpha chain variable domain of TCR clone 67457 (TRAV12-2, TRAJ13)
CAVKKTGGYQKVTF

SEQ ID NO: 134914 - protein, 15 aa, Homo sapiens
  CDR3 for beta chain variable domain of TCR clone 67457 (TRBV7-2, TRBJ2-1)
CASSFQADEYNEQFF

SEQ ID NO: 134915 - protein, 16 aa, Homo sapiens
  CDR3 for alpha chain variable domain of TCR clone 67458 (TRAV30, TRAJ24)
CGTEIVDADSWGKFEF

SEQ ID NO: 134916 - protein, 15 aa, Homo sapiens
  CDR3 for beta chain variable domain of TCR clone 67458 (TRBV20-1, TRBJ2-7)
CSARDRVSGMDEQYF

SEQ ID NO: 134917 - protein, 13 aa, Homo sapiens
  CDR3 for alpha chain variable domain of TCR clone 67459 (TRAV8-3, TRAJ44)
CAVVPGTASKLTF

SEQ ID NO: 134918 - protein, 13 aa, Homo sapiens
  CDR3 for beta chain variable domain of TCR clone 67459 (TRBV7-3, TRBJ1-1)
CASSPAGGLEAFF

SEQ ID NO: 134919 - protein, 14 aa, Homo sapiens
  CDR3 for alpha chain variable domain of TCR clone 67460 (TRAV8-6, TRAJ53)
CAALVLGSNYKLTF

SEQ ID NO: 134920 - protein, 15 aa, Homo sapiens
  CDR3 for beta chain variable domain of TCR clone 67460 (TRBV20-1, TRBJ2-3)
CGAEPLAGHGDTQYF

SEQ ID NO: 134921 - protein, 14 aa, Homo sapiens
  CDR3 for alpha chain variable domain of TCR clone 67461 (TRAV17, TRAJ6)
CATDASGGSYIPTF

SEQ ID NO: 134922 - protein, 13 aa, Homo sapiens
  CDR3 for beta chain variable domain of TCR clone 67461 (TRBV5-1, TRBJ1-5)
CASSLAQDQPQHF

SEQ ID NO: 134923 - protein, 14 aa, Homo sapiens
  CDR3 for alpha chain variable domain of TCR clone 67462 (TRAV1-2, TRAJ16)
CAVNRFSDGQKLLF

SEQ ID NO: 134924 - protein, 13 aa, Homo sapiens
  CDR3 for beta chain variable domain of TCR clone 67462 (TRBV2, TRBJ1-1)
CASSEGGNTEAFF

SEQ ID NO: 134925 - protein, 17 aa, Homo sapiens
  CDR3 for alpha chain variable domain of TCR clone 67463 (TRAV29/DV5, TRAJ40)
RAASVIYTTSGTYKYIF

SEQ ID NO: 134926 - protein, 13 aa, Homo sapiens
  CDR3 for beta chain variable domain of TCR clone 67463 (TRBV6-1, TRBJ2-1)
CASSRDRNNEQFF

SEQ ID NO: 134927 - protein, 16 aa, Homo sapiens
  CDR3 for alpha chain variable domain of TCR clone 67464 (TRAV30, TRAJ24)
CGTEIVDAASWGKFQF

SEQ ID NO: 134928 - protein, 12 aa, Homo sapiens
  CDR3 for beta chain variable domain of TCR clone 67464 (TRBV11-2, TRBJ2-2)
CASSLPTGELFF

SEQ ID NO: 134929 - protein, 12 aa, Homo sapiens
  CDR3 for alpha chain variable domain of TCR clone 67465 (TRAV8-3, TRAJ20)
CAVGANDYKLSF

SEQ ID NO: 134930 - protein, 16 aa, Homo sapiens
  CDR3 for beta chain variable domain of TCR clone 67465 (TRBV19, TRBJ2-2)
CASRSPGTGATGELFI

SEQ ID NO: 134931 - protein, 13 aa, Homo sapiens
  CDR3 for alpha chain variable domain of TCR clone 67466 (TRAV12-3, TRAJ13)
CAMSSGGYQKVTF

SEQ ID NO: 134932 - protein, 13 aa, Homo sapiens
  CDR3 for beta chain variable domain of TCR clone 67466 (TRBV20-1, TRBJ1-1)
CSAPLGGHTEAFF

SEQ ID NO: 134933 - protein, 16 aa, Homo sapiens
  CDR3 for alpha chain variable domain of TCR clone 67467 (TRAV17, TRAJ28)
CSSYAYSGAGSYQLTF

SEQ ID NO: 134934 - protein, 15 aa, Homo sapiens
  CDR3 for beta chain variable domain of TCR clone 67467 (TRBV4-2, TRBJ2-1)
CASSPSGGLYNEQFF

SEQ ID NO: 134935 - protein, 13 aa, Homo sapiens
  CDR3 for alpha chain variable domain of TCR clone 67468 (TRAV1-2, TRAJ9)
FAALNTGGLKTIF

SEQ ID NO: 134936 - protein, 13 aa, Homo sapiens
  CDR3 for beta chain variable domain of TCR clone 67468 (TRBV19, TRBJ1-2)
CASSAPGQDGYTF

SEQ ID NO: 134937 - protein, 12 aa, Homo sapiens
  CDR3 for alpha chain variable domain of TCR clone 67469 (TRAV2, TRAJ10)
CASTGGGNKLTF

SEQ ID NO: 134938 - protein, 15 aa, Homo sapiens
  CDR3 for beta chain variable domain of TCR clone 67469 (TRBV20-1, TRBJ2-7)
CSARDRVSGMDEQYF

SEQ ID NO: 134939 - protein, 16 aa, Homo sapiens
  CDR3 for alpha chain variable domain of TCR clone 67470 (TRAV3, TRAJ37)
CAVRVRGSGNTGKIIF

SEQ ID NO: 134940 - protein, 11 aa, Homo sapiens
  CDR3 for beta chain variable domain of TCR clone 67470 (TRBV11-2, TRBJ2-2)
CASSLPGELFF

SEQ ID NO: 134941 - protein, 12 aa, Homo sapiens
  CDR3 for alpha chain variable domain of TCR clone 67471 (TRAV22, TRAJ29)
CSPPSGNTPLVF

SEQ ID NO: 134942 - protein, 14 aa, Homo sapiens
  CDR3 for beta chain variable domain of TCR clone 67471 (TRBV11-2, TRBJ2-7)
CASSLGAGAYEQYF

SEQ ID NO: 134943 - protein, 14 aa, Homo sapiens
  CDR3 for alpha chain variable domain of TCR clone 67472 (TRAV23/DV6, TRAJ37)
CAASTSSNTGKLIF

SEQ ID NO: 134944 - protein, 13 aa, Homo sapiens
  CDR3 for beta chain variable domain of TCR clone 67472 (TRBV7-7, TRBJ1-1)
CASSLGADTEAFF

SEQ ID NO: 134945 - protein, 17 aa, Homo sapiens
  CDR3 for alpha chain variable domain of TCR clone 67473 (TRAV26-1, TRAJ28)
CIVRVPDSGVGSYQLTF

SEQ ID NO: 134946 - protein, 17 aa, Homo sapiens
  CDR3 for beta chain variable domain of TCR clone 67473 (TRBV28, TRBJ2-7)
CASSPLPAGGKSYEQYF

SEQ ID NO: 134947 - protein, 14 aa, Homo sapiens
  CDR3 for alpha chain variable domain of TCR clone 67474 (TRAV1-2, TRAJ16)
CAVNRFSDGQKLLL

SEQ ID NO: 134948 - protein, 12 aa, Homo sapiens
  CDR3 for beta chain variable domain of TCR clone 67474 (TRBV28, TRBJ2-6)
CAIQAGANVLTF

SEQ ID NO: 134949 - protein, 13 aa, Homo sapiens
  CDR3 for alpha chain variable domain of TCR clone 67475 (TRAV27, TRAJ41)
CAGEGNSGYALNF

SEQ ID NO: 134950 - protein, 14 aa, Homo sapiens
  CDR3 for beta chain variable domain of TCR clone 67475 (TRBV7-2, TRBJ1-1)
CASSFLTGTTESFF

SEQ ID NO: 134951 - protein, 15 aa, Homo sapiens
  CDR3 for alpha chain variable domain of TCR clone 67476 (TRAV23/DV6, TRAJ18)
CAARYRGSTLGRLYF

SEQ ID NO: 134952 - protein, 15 aa, Homo sapiens
  CDR3 for beta chain variable domain of TCR clone 67476 (TRBV7-9, TRBJ1-4)
CASSARTGGNEKLFF

SEQ ID NO: 134953 - protein, 12 aa, Homo sapiens
  CDR3 for alpha chain variable domain of TCR clone 67477 (TRAV17, TRAJ4)
CATDGGYNKLIF

SEQ ID NO: 134954 - protein, 13 aa, Homo sapiens
  CDR3 for beta chain variable domain of TCR clone 67477 (TRBV29-1, TRBJ2-2)
CSTTGVNTGELFC

SEQ ID NO: 134955 - protein, 14 aa, Homo sapiens
  CDR3 for alpha chain variable domain of TCR clone 67478 (TRAV8-6, TRAJ49)
CAVGVRYTGNQFYF

SEQ ID NO: 134956 - protein, 19 aa, Homo sapiens
  CDR3 for beta chain variable domain of TCR clone 67478 (TRBV28, TRBJ2-1)
CASSFSIRGSGRTRYEQFF

SEQ ID NO: 134957 - protein, 14 aa, Homo sapiens
  CDR3 for alpha chain variable domain of TCR clone 67479 (TRAV12-2, TRAJ13)
CAVKKIGGYQKVTF

SEQ ID NO: 134958 - protein, 18 aa, Homo sapiens
  CDR3 for beta chain variable domain of TCR clone 67479 (TRBV24-1, TRBJ2-2)
CATSDSGQGTANTGELFF

SEQ ID NO: 134959 - protein, 14 aa, Homo sapiens
  CDR3 for alpha chain variable domain of TCR clone 67480 (TRAV8-1, TRAJ32)
CAVNARGATNKLIF

SEQ ID NO: 134960 - protein, 14 aa, Homo sapiens
  CDR3 for beta chain variable domain of TCR clone 67480 (TRBV9, TRBJ2-7)
YASSVGVGSYEQYF

SEQ ID NO: 134961 - protein, 18 aa, Homo sapiens
  CDR3 for alpha chain variable domain of TCR clone 67481 (TRAV13-1, TRAJ52)
CAAKNPNAGGTSYGKLTF

SEQ ID NO: 134962 - protein, 13 aa, Homo sapiens
  CDR3 for beta chain variable domain of TCR clone 67481 (TRBV20-1, TRBJ1-1)
CSAPLGGGTEAFF

SEQ ID NO: 134963 - protein, 15 aa, Homo sapiens
  CDR3 for alpha chain variable domain of TCR clone 67482 (TRAV3, TRAJ5)
CSVRDLDTGRRALTF

SEQ ID NO: 134964 - protein, 14 aa, Homo sapiens
  CDR3 for beta chain variable domain of TCR clone 67482 (TRBV25-1, TRBJ1-4)
CASSGGGQPEKLFF

SEQ ID NO: 134965 - protein, 11 aa, Homo sapiens
  CDR3 for alpha chain variable domain of TCR clone 67483 (TRAV3, TRAJ21)
CAVGNFNKFYF

SEQ ID NO: 134966 - protein, 12 aa, Homo sapiens
  CDR3 for beta chain variable domain of TCR clone 67483 (TRBV7-2, TRBJ1-5)
CASSLWSQPQHF

SEQ ID NO: 134967 - protein, 18 aa, Homo sapiens
  CDR3 for alpha chain variable domain of TCR clone 67484 (TRAV21, TRAJ52)
CAVRPSPAGGTSYGKLTF

SEQ ID NO: 134968 - protein, 16 aa, Homo sapiens
  CDR3 for beta chain variable domain of TCR clone 67484 (TRBV11-2, TRBJ2-7)
CASSPLAGGPRYEQYF

SEQ ID NO: 134969 - protein, 14 aa, Homo sapiens
  CDR3 for alpha chain variable domain of TCR clone 67485 (TRAV12-1, TRAJ4)
CVGDLSGGYNKLIF

SEQ ID NO: 134970 - protein, 15 aa, Homo sapiens
  CDR3 for beta chain variable domain of TCR clone 67485 (TRBV4-2, TRBJ2-7)
CASSQVDRSSYEQYF

SEQ ID NO: 134971 - protein, 13 aa, Homo sapiens
  CDR3 for alpha chain variable domain of TCR clone 67486 (TRAV17, TRAJ5)
CAPMDTGRRALTF

SEQ ID NO: 134972 - protein, 14 aa, Homo sapiens
  CDR3 for beta chain variable domain of TCR clone 67486 (TRBV18, TRBJ1-2)
CASSPEGDLYGYTF

SEQ ID NO: 134973 - protein, 16 aa, Homo sapiens
  CDR3 for alpha chain variable domain of TCR clone 67487 (TRAV21, TRAJ52)
CAVTNAGCTSYGKLTF

SEQ ID NO: 134974 - protein, 11 aa, Homo sapiens
  CDR3 for beta chain variable domain of TCR clone 67487 (TRBV2, TRBJ1-1)
CASREGTEAFF

SEQ ID NO: 134975 - protein, 14 aa, Homo sapiens
  CDR3 for alpha chain variable domain of TCR clone 67488 (TRAV13-1, TRAJ44)
CAAKATGTASKLNF

SEQ ID NO: 134976 - protein, 17 aa, Homo sapiens
  CDR3 for beta chain variable domain of TCR clone 67488 (TRBV7-3, TRBJ2-3)
RASSLMKRMRGADTQYF

SEQ ID NO: 134977 - protein, 13 aa, Homo sapiens
  CDR3 for alpha chain variable domain of TCR clone 67489 (TRAV22, TRAJ29)
CAVGGSGNTPLVF

SEQ ID NO: 134978 - protein, 13 aa, Homo sapiens
  CDR3 for beta chain variable domain of TCR clone 67489 (TRBV4-2, TRBJ1-1)
CACSQAGNTEAFF

SEQ ID NO: 134979 - protein, 13 aa, Homo sapiens
  CDR3 for alpha chain variable domain of TCR clone 67490 (TRAV30, TRAJ49)
CGTEPNTGNQFYF

SEQ ID NO: 134980 - protein, 14 aa, Homo sapiens
  CDR3 for beta chain variable domain of TCR clone 67490 (TRBV29-1, TRBJ2-1)
CSVEFRGIPFEQSF

SEQ ID NO: 134981 - protein, 14 aa, Homo sapiens
  CDR3 for alpha chain variable domain of TCR clone 67491 (TRAV12-3, TRAJ9)
CAMSPNTGGFKTIF

SEQ ID NO: 134982 - protein, 13 aa, Homo sapiens
  CDR3 for beta chain variable domain of TCR clone 67491 (TRBV7-3, TRBJ1-1)
CASSQDWGAEAFF

SEQ ID NO: 134983 - protein, 13 aa, Homo sapiens
  CDR3 for alpha chain variable domain of TCR clone 67492 (TRAV21, TRAJ20)
CAVGLRVDYTLSF

SEQ ID NO: 134984 - protein, 13 aa, Homo sapiens
  CDR3 for beta chain variable domain of TCR clone 67492 (TRBV6-1, TRBJ1-1)
CASSRQGNTGAFF

SEQ ID NO: 134985 - protein, 15 aa, Homo sapiens
  CDR3 for alpha chain variable domain of TCR clone 67493 (TRAV12-2, TRAJ53)
CAVNGGGGSNYKLTF

SEQ ID NO: 134986 - protein, 14 aa, Homo sapiens
  CDR3 for beta chain variable domain of TCR clone 67493 (TRBV11-2, TRBJ2-3)
CASSLGGGANTQYF

SEQ ID NO: 134987 - protein, 15 aa, Homo sapiens
  CDR3 for alpha chain variable domain of TCR clone 67494 (TRAV35, TRAJ40)
CAGQLGTSGTYKYIF

SEQ ID NO: 134988 - protein, 19 aa, Homo sapiens
  CDR3 for beta chain variable domain of TCR clone 67494 (TRBV23-1, TRBJ2-7)
CASILLRDRARAVLRAVHQ

SEQ ID NO: 134989 - protein, 15 aa, Homo sapiens
  CDR3 for alpha chain variable domain of TCR clone 67495 (TRAV27, TRAJ38)
CASRRNAGNNRRLIW

SEQ ID NO: 134990 - protein, 13 aa, Homo sapiens
  CDR3 for beta chain variable domain of TCR clone 67495 (TRBV12-5, TRBJ2-3)
CASGDRQSDTQYF

SEQ ID NO: 134991 - protein, 12 aa, Homo sapiens
  CDR3 for alpha chain variable domain of TCR clone 67496 (TRAV13-1, TRAJ21)
CAAKEGFNKLYF

SEQ ID NO: 134992 - protein, 16 aa, Homo sapiens
  CDR3 for beta chain variable domain of TCR clone 67496 (TRBV7-8, TRBJ2-4)
CASSAERTLAKNIQYF

SEQ ID NO: 134993 - protein, 11 aa, Homo sapiens
  CDR3 for alpha chain variable domain of TCR clone 67497 (TRAV29/DV5, TRAJ49)
CAAVPGNQFYF

SEQ ID NO: 134994 - protein, 12 aa, Homo sapiens
  CDR3 for beta chain variable domain of TCR clone 67497 (TRBV6-3, TRBJ2-7)
CASSLTPYEQYF

SEQ ID NO: 134995 - protein, 14 aa, Homo sapiens
  CDR3 for alpha chain variable domain of TCR clone 67498 (TRAV13-1, TRAJ44)
CAAKATGTASKLTF

SEQ ID NO: 134996 - protein, 17 aa, Homo sapiens
  CDR3 for beta chain variable domain of TCR clone 67498 (TRBV7-3, TRBJ2-3)
CASSLMKKMRGADTQYF

SEQ ID NO: 134997 - protein, 17 aa, Homo sapiens
  CDR3 for alpha chain variable domain of TCR clone 67499 (TRAV13-1, TRAJ5)
CSNPSLSRDTGRRALTF

SEQ ID NO: 134998 - protein, 17 aa, Homo sapiens
  CDR3 for beta chain variable domain of TCR clone 67499 (TRBV24-1, TRBJ2-1)
CATSDVSTSGTYNEQLF

SEQ ID NO: 134999 - protein, 21 aa, Homo sapiens
  CDR3 for alpha chain variable domain of TCR clone 67500 (TRAV21, )
CAVRQDAGNNHIQNPDPAVYH

SEQ ID NO: 135000 - protein, 16 aa, Homo sapiens
  CDR3 for beta chain variable domain of TCR clone 67500 (TRBV4-2, TRBJ1-1)
CASRPLDGGGDTEAFF

SEQ ID NO: 135001 - protein, 13 aa, Homo sapiens
  CDR3 for alpha chain variable domain of TCR clone 67501 (TRAV3, TRAJ20)
FAVRSLNDYKLSF

SEQ ID NO: 135002 - protein, 13 aa, Homo sapiens
  CDR3 for beta chain variable domain of TCR clone 67501 (TRBV7-3, TRBJ1-1)
CASSQDWGAEAFF

SEQ ID NO: 135003 - protein, 15 aa, Homo sapiens
  CDR3 for alpha chain variable domain of TCR clone 67502 (TRAV26-2, TRAJ28)
CILVESGAGSYQLTF

SEQ ID NO: 135004 - protein, 16 aa, Homo sapiens
  CDR3 for beta chain variable domain of TCR clone 67502 (TRBV4-2, TRBJ1-2)
CASSQEIRGASYGYTF

SEQ ID NO: 135005 - protein, 13 aa, Homo sapiens
  CDR3 for alpha chain variable domain of TCR clone 67503 (TRAV2, TRAJ15)
CAVASQAGTALIF

SEQ ID NO: 135006 - protein, 17 aa, Homo sapiens
  CDR3 for beta chain variable domain of TCR clone 67503 (TRBV5-5, TRBJ2-7)
CASSLLFRGTSSYEQYF

SEQ ID NO: 135007 - protein, 15 aa, Homo sapiens
  CDR3 for alpha chain variable domain of TCR clone 67504 (TRAV12-1, TRAJ44)
CVVDTPQGTASKLTF

SEQ ID NO: 135008 - protein, 11 aa, Homo sapiens
  CDR3 for beta chain variable domain of TCR clone 67504 (TRBV27, TRBJ2-3)
CASSLGDTQYF

SEQ ID NO: 135009 - protein, 15 aa, Homo sapiens
  CDR3 for alpha chain variable domain of TCR clone 67505 (TRAV8-3, TRAJ13)
CAVAPNSGGYQKVTF

SEQ ID NO: 135010 - protein, 13 aa, Homo sapiens
  CDR3 for beta chain variable domain of TCR clone 67505 (TRBV24-1, TRBJ2-2)
CATSDWSTGELFF

SEQ ID NO: 135011 - protein, 14 aa, Homo sapiens
  CDR3 for alpha chain variable domain of TCR clone 67506 (TRAV36/DV7, TRAJ57)
CAVGFPGGAEKLVF

SEQ ID NO: 135012 - protein, 12 aa, Homo sapiens
  CDR3 for beta chain variable domain of TCR clone 67506 (TRBV19, TRBJ2-7)
CASTSGTYEQYF

SEQ ID NO: 135013 - protein, 13 aa, Homo sapiens
  CDR3 for alpha chain variable domain of TCR clone 67507 (TRAV3, TRAJ21)
CAVREPDFNKFYS

SEQ ID NO: 135014 - protein, 15 aa, Homo sapiens
  CDR3 for beta chain variable domain of TCR clone 67507 (TRBV3-1, TRBJ2-7)
CASSQAPSGSYEQYF

SEQ ID NO: 135015 - protein, 14 aa, Homo sapiens
  CDR3 for alpha chain variable domain of TCR clone 67508 (TRAV20, TRAJ10)
CAVRVEGGGNKRTF

SEQ ID NO: 135016 - protein, 18 aa, Homo sapiens
  CDR3 for beta chain variable domain of TCR clone 67508 (TRBV24-1, TRBJ2-1)
CATSDLMFLGRGVHEQFF

SEQ ID NO: 135017 - protein, 19 aa, Homo sapiens
  CDR3 for alpha chain variable domain of TCR clone 67509 (TRAV3, TRAJ6)
CAVRDRNPSRSGGSYIPTF

SEQ ID NO: 135018 - protein, 14 aa, Homo sapiens
  CDR3 for beta chain variable domain of TCR clone 67509 (TRBV25-1, TRBJ1-1)
CASTHLGGNTEAFF

SEQ ID NO: 135019 - protein, 14 aa, Homo sapiens
  CDR3 for alpha chain variable domain of TCR clone 67510 (TRAV34, TRAJ44)
CGADGTGTASKLTF

SEQ ID NO: 135020 - protein, 15 aa, Homo sapiens
  CDR3 for beta chain variable domain of TCR clone 67510 (TRBV5-1, TRBJ2-1)
CASSPPRAPYNERFF

SEQ ID NO: 135021 - protein, 12 aa, Homo sapiens
  CDR3 for alpha chain variable domain of TCR clone 67511 (TRAV5, TRAJ27)
CAEITNAGKPTF

SEQ ID NO: 135022 - protein, 15 aa, Homo sapiens
  CDR3 for beta chain variable domain of TCR clone 67511 (TRBV11-2, TRBJ1-2)
CASSLEGVQRNGYTF

SEQ ID NO: 135023 - protein, 15 aa, Homo sapiens
  CDR3 for alpha chain variable domain of TCR clone 67512 (TRAV25, TRAJ52)
CAGTSGGTSYGKLTF

SEQ ID NO: 135024 - protein, 15 aa, Homo sapiens
  CDR3 for beta chain variable domain of TCR clone 67512 (TRBV4-1, TRBJ1-4)
CASSDTGGTNEKLFF

SEQ ID NO: 135025 - protein, 13 aa, Homo sapiens
  CDR3 for alpha chain variable domain of TCR clone 67513 (TRAV29/DV5, TRAJ44)
CAASTGTASKLTF

SEQ ID NO: 135026 - protein, 10 aa, Homo sapiens
  CDR3 for beta chain variable domain of TCR clone 67513 (TRBV12-4, TRBJ2-2)
CASSLGVRHT

SEQ ID NO: 135027 - protein, 12 aa, Homo sapiens
  CDR3 for alpha chain variable domain of TCR clone 67514 (TRAV13-1, TRAJ21)
FAAKEGFNKFYF

SEQ ID NO: 135028 - protein, 17 aa, Homo sapiens
  CDR3 for beta chain variable domain of TCR clone 67514 (TRBV20-1, TRBJ2-1)
CSASSSGLAGSYNEQFF

SEQ ID NO: 135029 - protein, 14 aa, Homo sapiens
  CDR3 for alpha chain variable domain of TCR clone 67515 (TRAV1-2, TRAJ8)
CAVREDTGFQKLVF

SEQ ID NO: 135030 - protein, 15 aa, Homo sapiens
  CDR3 for beta chain variable domain of TCR clone 67515 (TRBV11-2, TRBJ2-2)
CASRGLAANTGELFF

SEQ ID NO: 135031 - protein, 18 aa, Homo sapiens
  CDR3 for alpha chain variable domain of TCR clone 67516 (TRAV21, TRAJ52)
CAVRPSPAGGTSYGKLTF

SEQ ID NO: 135032 - protein, 17 aa, Homo sapiens
  CDR3 for beta chain variable domain of TCR clone 67516 (TRBV12-4, TRBJ2-3)
CASSGPGLAGGADTQYF

SEQ ID NO: 135033 - protein, 14 aa, Homo sapiens
  CDR3 for alpha chain variable domain of TCR clone 67517 (TRAV12-1, TRAJ33)
RVVNPEDSNYQLIW

SEQ ID NO: 135034 - protein, 11 aa, Homo sapiens
  CDR3 for beta chain variable domain of TCR clone 67517 (TRBV7-6, TRBJ2-1)
CASSNYGEQFF

SEQ ID NO: 135035 - protein, 15 aa, Homo sapiens
  CDR3 for alpha chain variable domain of TCR clone 67518 (TRAV26-1, TRAJ29)
CIVRVEGSGNTPLVF

SEQ ID NO: 135036 - protein, 15 aa, Homo sapiens
  CDR3 for beta chain variable domain of TCR clone 67518 (TRBV6-1, TRBJ1-3)
CASSDFGFSGNTIYF

SEQ ID NO: 135037 - protein, 16 aa, Homo sapiens
  CDR3 for alpha chain variable domain of TCR clone 67519 (TRAV3, TRAJ37)
CAVRGKGSGNTGKLIF

SEQ ID NO: 135038 - protein, 15 aa, Homo sapiens
  CDR3 for beta chain variable domain of TCR clone 67519 (TRBV4-1, TRBJ1-4)
CASSDTGGTNEKLFF

SEQ ID NO: 135039 - protein, 14 aa, Homo sapiens
  CDR3 for alpha chain variable domain of TCR clone 67520 (TRAV1-2, TRAJ29)
CAVRELTSATPLVF

SEQ ID NO: 135040 - protein, 14 aa, Homo sapiens
  CDR3 for beta chain variable domain of TCR clone 67520 (TRBV3-1, TRBJ2-5)
CASCQGPDQETQYF

SEQ ID NO: 135041 - protein, 16 aa, Homo sapiens
  CDR3 for alpha chain variable domain of TCR clone 67521 (TRAV12-2, TRAJ10)
CAVNRVLTGGGNKLTL

SEQ ID NO: 135042 - protein, 15 aa, Homo sapiens
  CDR3 for beta chain variable domain of TCR clone 67521 (TRBV28, TRBJ2-3)
CASAFQGVSADTQYF

SEQ ID NO: 135043 - protein, 20 aa, Homo sapiens
  CDR3 for alpha chain variable domain of TCR clone 67522 (TRAV1-1, TRAJ37)
CLLLLRCERYGSGNTGKLIF

SEQ ID NO: 135044 - protein, 14 aa, Homo sapiens
  CDR3 for beta chain variable domain of TCR clone 67522 (TRBV7-2, TRBJ2-7)
CASSPKTSFYEQYF

SEQ ID NO: 135045 - protein, 13 aa, Homo sapiens
  CDR3 for alpha chain variable domain of TCR clone 67523 (TRAV8-3, TRAJ28)
CAVGAVGSYQLTF

SEQ ID NO: 135046 - protein, 14 aa, Homo sapiens
  CDR3 for beta chain variable domain of TCR clone 67523 (TRBV19, TRBJ2-2)
CASSTLHRSGELFF

SEQ ID NO: 135047 - protein, 14 aa, Homo sapiens
  CDR3 for alpha chain variable domain of TCR clone 67524 (TRAV16, TRAJ15)
CALSPNQAGTALIF

SEQ ID NO: 135048 - protein, 15 aa, Homo sapiens
  CDR3 for beta chain variable domain of TCR clone 67524 (TRBV27, TRBJ2-3)
CASSLGLAATDTQYF

SEQ ID NO: 135049 - protein, 17 aa, Homo sapiens
  CDR3 for alpha chain variable domain of TCR clone 67525 (TRAV3, TRAJ42)
CAVRDRDYGGSQGNLIF

SEQ ID NO: 135050 - protein, 14 aa, Homo sapiens
  CDR3 for beta chain variable domain of TCR clone 67525 (TRBV19, TRBJ2-5)
CASGMTGQQETQYF

SEQ ID NO: 135051 - protein, 16 aa, Homo sapiens
  CDR3 for alpha chain variable domain of TCR clone 67526 (TRAV26-1, TRAJ37)
CIVRGDGSGDTGKLIF

SEQ ID NO: 135052 - protein, 17 aa, Homo sapiens
  CDR3 for beta chain variable domain of TCR clone 67526 (TRBV4-1, TRBJ2-7)
CASSRDPLGVRGGEQYF

SEQ ID NO: 135053 - protein, 14 aa, Homo sapiens
  CDR3 for alpha chain variable domain of TCR clone 67527 (TRAV8-4, TRAJ45)
CASGGGGGADGLPF

SEQ ID NO: 135054 - protein, 20 aa, Homo sapiens
  CDR3 for beta chain variable domain of TCR clone 67527 (TRBV4-3, TRBJ2-3)
CASSPRVEMRASGRPDTQYF

SEQ ID NO: 135055 - protein, 21 aa, Homo sapiens
  CDR3 for alpha chain variable domain of TCR clone 67528 (TRAV17, TRAJ57)
TASRAADTASYFRANPEKLVF

SEQ ID NO: 135056 - protein, 16 aa, Homo sapiens
  CDR3 for beta chain variable domain of TCR clone 67528 (TRBV11-2, TRBJ2-3)
CASSFQGRGALDTQYF

SEQ ID NO: 135057 - protein, 20 aa, Homo sapiens
  CDR3 for alpha chain variable domain of TCR clone 67529 (TRAV25, TRAJ21)
TATQTTDVGTYPLSFNKFYF

SEQ ID NO: 135058 - protein, 15 aa, Homo sapiens
  CDR3 for beta chain variable domain of TCR clone 67529 (TRBV7-9, TRBJ1-6)
CASSSPGRGNSPLHF

SEQ ID NO: 135059 - protein, 14 aa, Homo sapiens
  CDR3 for alpha chain variable domain of TCR clone 67530 (TRAV29/DV5, TRAJ36)
CAARRKTGANNLFF

SEQ ID NO: 135060 - protein, 17 aa, Homo sapiens
  CDR3 for beta chain variable domain of TCR clone 67530 (TRBV11-2, TRBJ2-1)
CASSLYPPGVEYNEQFF

SEQ ID NO: 135061 - protein, 14 aa, Homo sapiens
  CDR3 for alpha chain variable domain of TCR clone 67531 (TRAV12-2, TRAJ52)
CAVPGGTSYGKLTF

SEQ ID NO: 135062 - protein, 12 aa, Homo sapiens
  CDR3 for beta chain variable domain of TCR clone 67531 (TRBV18, TRBJ2-1)
CASAPGTSEGFF

SEQ ID NO: 135063 - protein, 18 aa, Homo sapiens
  CDR3 for alpha chain variable domain of TCR clone 67532 (TRAV21, TRAJ45)
CCGGPQGGSGGGADGLTF

SEQ ID NO: 135064 - protein, 13 aa, Homo sapiens
  CDR3 for beta chain variable domain of TCR clone 67532 (TRBV4-1, TRBJ2-7)
LGVSRGDRHEQYF

SEQ ID NO: 135065 - protein, 18 aa, Homo sapiens
  CDR3 for alpha chain variable domain of TCR clone 67533 (TRAV9-2, TRAJ52)
CALSRHNAGGTSYGKLTF

SEQ ID NO: 135066 - protein, 13 aa, Homo sapiens
  CDR3 for beta chain variable domain of TCR clone 67533 (TRBV7-9, TRBJ1-2)
CTSSLKQNYGYTF

SEQ ID NO: 135067 - protein, 16 aa, Homo sapiens
  CDR3 for alpha chain variable domain of TCR clone 67534 (TRAV30, TRAJ24)
CGTEIVDADGWGKFQF

SEQ ID NO: 135068 - protein, 14 aa, Homo sapiens
  CDR3 for beta chain variable domain of TCR clone 67534 (TRBV12-5, TRBJ2-5)
CASGSRTHQETQYS

SEQ ID NO: 135069 - protein, 15 aa, Homo sapiens
  CDR3 for alpha chain variable domain of TCR clone 67535 (TRAV3, TRAJ22)
CAVRDRGGSARQLTF

SEQ ID NO: 135070 - protein, 12 aa, Homo sapiens
  CDR3 for beta chain variable domain of TCR clone 67535 (TRBV5-1, TRBJ2-7)
CASSLDSYEQYF

SEQ ID NO: 135071 - protein, 12 aa, Homo sapiens
  CDR3 for alpha chain variable domain of TCR clone 67536 (TRAV17, TRAJ4)
CPTDGGYNKLIF

SEQ ID NO: 135072 - protein, 13 aa, Homo sapiens
  CDR3 for beta chain variable domain of TCR clone 67536 (TRBV29-1, TRBJ2-2)
CSTTGVNTGELFF

SEQ ID NO: 135073 - protein, 17 aa, Homo sapiens
  CDR3 for alpha chain variable domain of TCR clone 67537 (TRAV3, TRAJ6)
CAVRDGPRAGGSHIPTF

SEQ ID NO: 135074 - protein, 16 aa, Homo sapiens
  CDR3 for beta chain variable domain of TCR clone 67537 (TRBV4-1, TRBJ2-7)
CASSLTAGQATYEQHF

SEQ ID NO: 135075 - protein, 11 aa, Homo sapiens
  CDR3 for alpha chain variable domain of TCR clone 67538 (TRAV12-1, TRAJ34)
CVVNKGRELFF

SEQ ID NO: 135076 - protein, 12 aa, Homo sapiens
  CDR3 for beta chain variable domain of TCR clone 67538 (TRBV2, TRBJ2-1)
CAYGPPGNEQFF

SEQ ID NO: 135077 - protein, 15 aa, Homo sapiens
  CDR3 for alpha chain variable domain of TCR clone 67539 (TRAV21, TRAJ53)
CATLNSGGSNYKLTF

SEQ ID NO: 135078 - protein, 14 aa, Homo sapiens
  CDR3 for beta chain variable domain of TCR clone 67539 (TRBV7-2, TRBJ1-2)
CASSQTGSTYGYTF

SEQ ID NO: 135079 - protein, 14 aa, Homo sapiens
  CDR3 for alpha chain variable domain of TCR clone 67540 (TRAV1-2, TRAJ16)
CAVNRFSDGQKLLF

SEQ ID NO: 135080 - protein, 17 aa, Homo sapiens
  CDR3 for beta chain variable domain of TCR clone 67540 (TRBV3-1, TRBJ2-2)
CASSQFRDKVDTGELFF

SEQ ID NO: 135081 - protein, 17 aa, Homo sapiens
  CDR3 for alpha chain variable domain of TCR clone 67541 (TRAV4, TRAJ42)
CLVGVLNYGGSQGNLIF

SEQ ID NO: 135082 - protein, 14 aa, Homo sapiens
  CDR3 for beta chain variable domain of TCR clone 67541 (TRBV7-3, TRBJ1-1)
CASSRQGGDTEAFF

SEQ ID NO: 135083 - protein, 12 aa, Homo sapiens
  CDR3 for alpha chain variable domain of TCR clone 67542 (TRAV2, TRAJ31)
CAVEDNNAGLMF

SEQ ID NO: 135084 - protein, 16 aa, Homo sapiens
  CDR3 for beta chain variable domain of TCR clone 67542 (TRBV10-3, TRBJ2-1)
CAISGVGDGGGGEQFF

SEQ ID NO: 135085 - protein, 13 aa, Homo sapiens
  CDR3 for alpha chain variable domain of TCR clone 67543 (TRAV3, TRAJ21)
CAVREPDFNKFYF

SEQ ID NO: 135086 - protein, 15 aa, Homo sapiens
  CDR3 for beta chain variable domain of TCR clone 67543 (TRBV7-9, TRBJ1-6)
CASSSPGRGNSPLHF

SEQ ID NO: 135087 - protein, 14 aa, Homo sapiens
  CDR3 for alpha chain variable domain of TCR clone 67544 (TRAV8-6, TRAJ9)
CAVSSYTGGFKTIF

SEQ ID NO: 135088 - protein, 13 aa, Homo sapiens
  CDR3 for beta chain variable domain of TCR clone 67544 (TRBV12-5, TRBJ2-3)
CASGDRQSDTQYF

SEQ ID NO: 135089 - protein, 11 aa, Homo sapiens
  CDR3 for alpha chain variable domain of TCR clone 67545 (TRAV3, TRAJ21)
CAVGNFNKFYF

SEQ ID NO: 135090 - protein, 11 aa, Homo sapiens
  CDR3 for beta chain variable domain of TCR clone 67545 (TRBV12-4, TRBJ2-3)
CASTATDTRYF

SEQ ID NO: 135091 - protein, 18 aa, Homo sapiens
  CDR3 for alpha chain variable domain of TCR clone 67546 (TRAV21, TRAJ52)
CAVRPSPAGGTSYGKLTF

SEQ ID NO: 135092 - protein, 15 aa, Homo sapiens
  CDR3 for beta chain variable domain of TCR clone 67546 (TRBV11-1, TRBJ2-7)
CASSLNYGASYEQYF

SEQ ID NO: 135093 - protein, 15 aa, Homo sapiens
  CDR3 for alpha chain variable domain of TCR clone 67547 (TRAV12-3, TRAJ10)
CASYILTGGGNKLTF

SEQ ID NO: 135094 - protein, 15 aa, Homo sapiens
  CDR3 for beta chain variable domain of TCR clone 67547 (TRBV7-2, TRBJ1-6)
CASSLGPDRGKPLHF

SEQ ID NO: 135095 - protein, 13 aa, Homo sapiens
  CDR3 for alpha chain variable domain of TCR clone 67548 (TRAV3, TRAJ21)
CAVREPDFNKFYF

SEQ ID NO: 135096 - protein, 13 aa, Homo sapiens
  CDR3 for beta chain variable domain of TCR clone 67548 (TRBV9, TRBJ2-1)
FASSPSGGNEQFF

SEQ ID NO: 135097 - protein, 16 aa, Homo sapiens
  CDR3 for alpha chain variable domain of TCR clone 67549 (TRAV30, TRAJ24)
CGTEIVDADSWGKFQF

SEQ ID NO: 135098 - protein, 13 aa, Homo sapiens
  CDR3 for beta chain variable domain of TCR clone 67549 (TRBV20-1, TRBJ1-1)
CSARGGGNTEAFF

SEQ ID NO: 135099 - protein, 11 aa, Homo sapiens
  CDR3 for alpha chain variable domain of TCR clone 67550 (TRAV12-3, TRAJ27)
CAMSNAGKSTF

SEQ ID NO: 135100 - protein, 13 aa, Homo sapiens
  CDR3 for beta chain variable domain of TCR clone 67550 (TRBV20-1, TRBJ1-1)
CSARVGGNTEAFF

SEQ ID NO: 135101 - protein, 15 aa, Homo sapiens
  CDR3 for alpha chain variable domain of TCR clone 67551 (TRAV12-2, TRAJ53)
CAVNGGGGSNYKMKF

SEQ ID NO: 135102 - protein, 13 aa, Homo sapiens
  CDR3 for beta chain variable domain of TCR clone 67551 (TRBV3-1, TRBJ1-1)
CASSPGVITEAFF

SEQ ID NO: 135103 - protein, 10 aa, Homo sapiens
  CDR3 for alpha chain variable domain of TCR clone 67552 (TRAV23/DV6, TRAJ57)
CAASSTLSQG

SEQ ID NO: 135104 - protein, 14 aa, Homo sapiens
  CDR3 for beta chain variable domain of TCR clone 67552 (TRBV25-1, TRBJ1-1)
CASTHLGGNTKAFF

SEQ ID NO: 135105 - protein, 14 aa, Homo sapiens
  CDR3 for alpha chain variable domain of TCR clone 67553 (TRAV16, TRAJ54)
CALSLIQGAQKLVF

SEQ ID NO: 135106 - protein, 17 aa, Homo sapiens
  CDR3 for beta chain variable domain of TCR clone 67553 (TRBV11-2, TRBJ2-4)
CASSSVGPGGHRNMQYF

SEQ ID NO: 135107 - protein, 12 aa, Homo sapiens
  CDR3 for alpha chain variable domain of TCR clone 67554 (TRAV25, TRAJ38)
CAGTGNNRKLIW

SEQ ID NO: 135108 - protein, 13 aa, Homo sapiens
  CDR3 for beta chain variable domain of TCR clone 67554 (TRBV7-3, TRBJ1-1)
CASSQDWGAEAFF

SEQ ID NO: 135109 - protein, 12 aa, Homo sapiens
  CDR3 for alpha chain variable domain of TCR clone 67555 (TRAV12-3, TRAJ40)
CAMSSGTYKYIF

SEQ ID NO: 135110 - protein, 15 aa, Homo sapiens
  CDR3 for beta chain variable domain of TCR clone 67555 (TRBV7-3, TRBJ2-2)
CASSERGQGTGELFF

SEQ ID NO: 135111 - protein, 12 aa, Homo sapiens
  CDR3 for alpha chain variable domain of TCR clone 67556 (TRAV2, TRAJ33)
CAVWGSNYQLIW

SEQ ID NO: 135112 - protein, 16 aa, Homo sapiens
  CDR3 for beta chain variable domain of TCR clone 67556 (TRBV20-1, TRBJ1-4)
CSAPGQGLLANEKLFF

SEQ ID NO: 135113 - protein, 14 aa, Homo sapiens
  CDR3 for alpha chain variable domain of TCR clone 67557 (TRAV13-1, TRAJ44)
CAAEATGTASKLTF

SEQ ID NO: 135114 - protein, 14 aa, Homo sapiens
  CDR3 for beta chain variable domain of TCR clone 67557 (TRBV19, TRBJ2-2)
CASSTLHRSGELFF

SEQ ID NO: 135115 - protein, 11 aa, Homo sapiens
  CDR3 for alpha chain variable domain of TCR clone 67558 (TRAV17, TRAJ9)
CATTGGFKTIF

SEQ ID NO: 135116 - protein, 14 aa, Homo sapiens
  CDR3 for beta chain variable domain of TCR clone 67558 (TRBV2, TRBJ2-1)
CASSEALIYNEQFF

SEQ ID NO: 135117 - protein, 13 aa, Homo sapiens
  CDR3 for alpha chain variable domain of TCR clone 67559 (TRAV8-3, TRAJ28)
CAVGAVGSYQLTF

SEQ ID NO: 135118 - protein, 13 aa, Homo sapiens
  CDR3 for beta chain variable domain of TCR clone 67559 (TRBV7-2, TRBJ2-2)
CASSLAVTGELFF

SEQ ID NO: 135119 - protein, 14 aa, Homo sapiens
  CDR3 for alpha chain variable domain of TCR clone 67560 (TRAV25, TRAJ44)
CAVFPTGTASKLTF

SEQ ID NO: 135120 - protein, 14 aa, Homo sapiens
  CDR3 for beta chain variable domain of TCR clone 67560 (TRBV19, TRBJ1-1)
CASTGHKLNTEAFF

SEQ ID NO: 135121 - protein, 15 aa, Homo sapiens
  CDR3 for alpha chain variable domain of TCR clone 67561 (TRAV13-1, TRAJ45)
CAASGSGGGADGLTF

SEQ ID NO: 135122 - protein, 12 aa, Homo sapiens
  CDR3 for beta chain variable domain of TCR clone 67561 (TRBV11-2, TRBJ2-2)
CAGSLGGGELFF

SEQ ID NO: 135123 - protein, 17 aa, Homo sapiens
  CDR3 for alpha chain variable domain of TCR clone 67562 (TRAV2, TRAJ32)
CCLLLWGGGGATNKLTF

SEQ ID NO: 135124 - protein, 15 aa, Homo sapiens
  CDR3 for beta chain variable domain of TCR clone 67562 (TRBV20-1, TRBJ1-1)
CSARGGGTLKLSLDK

SEQ ID NO: 135125 - protein, 16 aa, Homo sapiens
  CDR3 for alpha chain variable domain of TCR clone 67563 (TRAV12-3, TRAJ53)
CAMSPGSGGSNYKLTF

SEQ ID NO: 135126 - protein, 14 aa, Homo sapiens
  CDR3 for beta chain variable domain of TCR clone 67563 (TRBV19, TRBJ2-7)
CASSIFAGTYEQYF

SEQ ID NO: 135127 - protein, 14 aa, Homo sapiens
  CDR3 for alpha chain variable domain of TCR clone 67564 (TRAV1-2, TRAJ8)
CAVREDTGFQKLVF

SEQ ID NO: 135128 - protein, 16 aa, Homo sapiens
  CDR3 for beta chain variable domain of TCR clone 67564 (TRBV12-4, TRBJ1-5)
CASSRPVEGSNQPQHF

SEQ ID NO: 135129 - protein, 11 aa, Homo sapiens
  CDR3 for alpha chain variable domain of TCR clone 67565 (TRAV12-1, TRAJ8)
CVVTGFQKLVF

SEQ ID NO: 135130 - protein, 12 aa, Homo sapiens
  CDR3 for beta chain variable domain of TCR clone 67565 (TRBV19, TRBJ1-5)
CASSIAQQPQHF

SEQ ID NO: 135131 - protein, 19 aa, Homo sapiens
  CDR3 for alpha chain variable domain of TCR clone 67566 (TRAV2, TRAJ20)
ILQVWEADAAVYRDCKLSF

SEQ ID NO: 135132 - protein, 15 aa, Homo sapiens
  CDR3 for beta chain variable domain of TCR clone 67566 (TRBV6-5, TRBJ2-1)
CASSYDAGAGNEQFF

SEQ ID NO: 135133 - protein, 12 aa, Homo sapiens
  CDR3 for alpha chain variable domain of TCR clone 67567 (TRAV20, TRAJ39)
CAVGNAGNMLTF

SEQ ID NO: 135134 - protein, 15 aa, Homo sapiens
  CDR3 for beta chain variable domain of TCR clone 67567 (TRBV5-1, TRBJ2-1)
CASSPPRAPYNEQFF

SEQ ID NO: 135135 - protein, 20 aa, Homo sapiens
  CDR3 for alpha chain variable domain of TCR clone 67568 (TRAV21, TRAJ38)
CAVANAGNNHIQNPDPDIYQ

SEQ ID NO: 135136 - protein, 13 aa, Homo sapiens
  CDR3 for beta chain variable domain of TCR clone 67568 (TRBV2, TRBJ1-1)
CASNLLRNTEAFF

SEQ ID NO: 135137 - protein, 14 aa, Homo sapiens
  CDR3 for alpha chain variable domain of TCR clone 67569 (TRAV1-2, TRAJ16)
FAVNRFSDGQKLLF

SEQ ID NO: 135138 - protein, 14 aa, Homo sapiens
  CDR3 for beta chain variable domain of TCR clone 67569 (TRBV7-9, TRBJ2-3)
CASSLEDGTDTQYF

SEQ ID NO: 135139 - protein, 17 aa, Homo sapiens
  CDR3 for alpha chain variable domain of TCR clone 67570 (TRAV3, TRAJ6)
CAVRDGPRAGGSYIPTF

SEQ ID NO: 135140 - protein, 17 aa, Homo sapiens
  CDR3 for beta chain variable domain of TCR clone 67570 (TRBV19, TRBJ2-7)
CASSISFYDSYPYEQYF

SEQ ID NO: 135141 - protein, 11 aa, Homo sapiens
  CDR3 for alpha chain variable domain of TCR clone 67571 (TRAV2, TRAJ33)
CAVDSNYQLIW

SEQ ID NO: 135142 - protein, 15 aa, Homo sapiens
  CDR3 for beta chain variable domain of TCR clone 67571 (TRBV19, TRBJ1-2)
CASSVGQVLNYDYTF

SEQ ID NO: 135143 - protein, 15 aa, Homo sapiens
  CDR3 for alpha chain variable domain of TCR clone 67572 (TRAV12-2, TRAJ53)
CAVNGGGGSSYKLTF

SEQ ID NO: 135144 - protein, 14 aa, Homo sapiens
  CDR3 for beta chain variable domain of TCR clone 67572 (TRBV2, TRBJ2-1)
CASRTGSSYNEQFF

SEQ ID NO: 135145 - protein, 17 aa, Homo sapiens
  CDR3 for alpha chain variable domain of TCR clone 67573 (TRAV3, TRAJ6)
CAVRDGPRAGGSYIPTF

SEQ ID NO: 135146 - protein, 15 aa, Homo sapiens
  CDR3 for beta chain variable domain of TCR clone 67573 (TRBV2, TRBJ2-1)
CATQARLVMIGEQFF

SEQ ID NO: 135147 - protein, 14 aa, Homo sapiens
  CDR3 for alpha chain variable domain of TCR clone 67574 (TRAV1-2, TRAJ8)
RAVREDTGFQKLVF

SEQ ID NO: 135148 - protein, 16 aa, Homo sapiens
  CDR3 for beta chain variable domain of TCR clone 67574 (TRBV12-5, TRBJ2-5)
CASGPRTSGNQETQYF

SEQ ID NO: 135149 - protein, 16 aa, Homo sapiens
  CDR3 for alpha chain variable domain of TCR clone 67575 (TRAV26-1, TRAJ23)
CIVRVERYSQGGKLIF

SEQ ID NO: 135150 - protein, 15 aa, Homo sapiens
  CDR3 for beta chain variable domain of TCR clone 67575 (TRBV18, TRBJ2-7)
CASSPRGGKGYEQYF

SEQ ID NO: 135151 - protein, 14 aa, Homo sapiens
  CDR3 for alpha chain variable domain of TCR clone 67576 (TRAV20, TRAJ20)
CAVRRGYNDYKLSF

SEQ ID NO: 135152 - protein, 13 aa, Homo sapiens
  CDR3 for beta chain variable domain of TCR clone 67576 (TRBV19, TRBJ2-5)
CASSETEPETQYF

SEQ ID NO: 135153 - protein, 15 aa, Homo sapiens
  CDR3 for alpha chain variable domain of TCR clone 67577 (TRAV8-3, TRAJ45)
CASSYSGGGADGLTF

SEQ ID NO: 135154 - protein, 12 aa, Homo sapiens
  CDR3 for beta chain variable domain of TCR clone 67577 (TRBV10-3, TRBJ2-7)
CLKLAVNYEQYF

SEQ ID NO: 135155 - protein, 10 aa, Homo sapiens
  CDR3 for alpha chain variable domain of TCR clone 67578 (TRAV1-2, TRAJ31)
CAFFDARLMF

SEQ ID NO: 135156 - protein, 13 aa, Homo sapiens
  CDR3 for beta chain variable domain of TCR clone 67578 (TRBV7-9, TRBJ2-3)
CASSPGSTDTQYF

SEQ ID NO: 135157 - protein, 13 aa, Homo sapiens
  CDR3 for alpha chain variable domain of TCR clone 67579 (TRAV3, TRAJ27)
CAVRPVGAGKSTF

SEQ ID NO: 135158 - protein, 13 aa, Homo sapiens
  CDR3 for beta chain variable domain of TCR clone 67579 (TRBV7-9, TRBJ2-3)
CASSPGSTDTQYF

SEQ ID NO: 135159 - protein, 13 aa, Homo sapiens
  CDR3 for alpha chain variable domain of TCR clone 67580 (TRAV2, TRAJ40)
CAVVTSGTYKYIF

SEQ ID NO: 135160 - protein, 16 aa, Homo sapiens
  CDR3 for beta chain variable domain of TCR clone 67580 (TRBV29-1, TRBJ1-2)
CSVEANRDIANYGDTF

SEQ ID NO: 135161 - protein, 18 aa, Homo sapiens
  CDR3 for alpha chain variable domain of TCR clone 67581 (TRAV12-3, TRAJ52)
CAMSVGGAGGPSYGKLTF

SEQ ID NO: 135162 - protein, 15 aa, Homo sapiens
  CDR3 for beta chain variable domain of TCR clone 67581 (TRBV27, TRBJ1-6)
CASSFDRGLGSPLHF

SEQ ID NO: 135163 - protein, 17 aa, Homo sapiens
  CDR3 for alpha chain variable domain of TCR clone 67582 (TRAV16, TRAJ26)
CALSGSEFCLRSRNQIV

SEQ ID NO: 135164 - protein, 12 aa, Homo sapiens
  CDR3 for beta chain variable domain of TCR clone 67582 (TRBV11-2, TRBJ2-1)
CASSPGNNEQFF

SEQ ID NO: 135165 - protein, 14 aa, Homo sapiens
  CDR3 for alpha chain variable domain of TCR clone 67583 (TRAV12-2, TRAJ44)
CAVNPAGIASKLTF

SEQ ID NO: 135166 - protein, 13 aa, Homo sapiens
  CDR3 for beta chain variable domain of TCR clone 67583 (TRBV4-2, TRBJ1-1)
CASSQAGNTEAFF

SEQ ID NO: 135167 - protein, 15 aa, Homo sapiens
  CDR3 for alpha chain variable domain of TCR clone 67584 (TRAV3, TRAJ20)
CAVRDIKLSDYKLSF

SEQ ID NO: 135168 - protein, 17 aa, Homo sapiens
  CDR3 for beta chain variable domain of TCR clone 67584 (TRBV7-3, TRBJ2-3)
CASSLMKRMRGADTQYF

SEQ ID NO: 135169 - protein, 16 aa, Homo sapiens
  CDR3 for alpha chain variable domain of TCR clone 67585 (TRAV23/DV6, TRAJ9)
CAASIGGNTGGFKTIF

SEQ ID NO: 135170 - protein, 15 aa, Homo sapiens
  CDR3 for beta chain variable domain of TCR clone 67585 (TRBV11-2, TRBJ2-1)
CASSSPSTRYNEQFF

SEQ ID NO: 135171 - protein, 15 aa, Homo sapiens
  CDR3 for alpha chain variable domain of TCR clone 67586 (TRAV17, TRAJ56)
CATGANTGANSKLTF

SEQ ID NO: 135172 - protein, 14 aa, Homo sapiens
  CDR3 for beta chain variable domain of TCR clone 67586 (TRBV19, TRBJ1-5)
CASSLGTGGQPQHF

SEQ ID NO: 135173 - protein, 11 aa, Homo sapiens
  CDR3 for alpha chain variable domain of TCR clone 67587 (TRAV4, TRAJ23)
CLVATGGKLIF

SEQ ID NO: 135174 - protein, 15 aa, Homo sapiens
  CDR3 for beta chain variable domain of TCR clone 67587 (TRBV7-2, TRBJ2-1)
CASSFQADEYNEQFF

SEQ ID NO: 135175 - protein, 15 aa, Homo sapiens
  CDR3 for alpha chain variable domain of TCR clone 67588 (TRAV26-1, TRAJ29)
CIVRVEGSGNTPLVF

SEQ ID NO: 135176 - protein, 14 aa, Homo sapiens
  CDR3 for beta chain variable domain of TCR clone 67588 (TRBV7-9, TRBJ2-2)
CASSGLADTGELFF

SEQ ID NO: 135177 - protein, 14 aa, Homo sapiens
  CDR3 for alpha chain variable domain of TCR clone 67589 (TRAV17, TRAJ12)
CATDEKDSSYKLTF

SEQ ID NO: 135178 - protein, 16 aa, Homo sapiens
  CDR3 for beta chain variable domain of TCR clone 67589 (TRBV11-2, TRBJ2-1)
CASSPRLAGVYNEQFF

SEQ ID NO: 135179 - protein, 14 aa, Homo sapiens
  CDR3 for alpha chain variable domain of TCR clone 67590 (TRAV12-1, TRAJ8)
CVVNSNTGFQKLVF

SEQ ID NO: 135180 - protein, 17 aa, Homo sapiens
  CDR3 for beta chain variable domain of TCR clone 67590 (TRBV7-8, TRBJ2-6)
RASSAGTGGAGANVLTF

SEQ ID NO: 135181 - protein, 10 aa, Homo sapiens
  CDR3 for alpha chain variable domain of TCR clone 67591 (TRAV38-2/DV8, TRAJ21)
CAYRSNKFYF

SEQ ID NO: 135182 - protein, 12 aa, Homo sapiens
  CDR3 for beta chain variable domain of TCR clone 67591 (TRBV11-3, TRBJ2-3)
CASSLWEDKQYF

SEQ ID NO: 135183 - protein, 15 aa, Homo sapiens
  CDR3 for alpha chain variable domain of TCR clone 67592 (TRAV12-3, TRAJ27)
CAMRAYNANAGKSTF

SEQ ID NO: 135184 - protein, 13 aa, Homo sapiens
  CDR3 for beta chain variable domain of TCR clone 67592 (TRBV11-2, TRBJ2-5)
CASSRGPSETQYF

SEQ ID NO: 135185 - protein, 15 aa, Homo sapiens
  CDR3 for alpha chain variable domain of TCR clone 67593 (TRAV27, TRAJ50)
CAGVGRGASYDKVIF

SEQ ID NO: 135186 - protein, 14 aa, Homo sapiens
  CDR3 for beta chain variable domain of TCR clone 67593 (TRBV7-2, TRBJ1-1)
CASSFYDLNTEAFF

SEQ ID NO: 135187 - protein, 14 aa, Homo sapiens
  CDR3 for alpha chain variable domain of TCR clone 67594 (TRAV1-2, TRAJ16)
CAVNRFSDGQKPLF

SEQ ID NO: 135188 - protein, 14 aa, Homo sapiens
  CDR3 for beta chain variable domain of TCR clone 67594 (TRBV13, TRBJ2-5)
CASSLGRGQETQYF

SEQ ID NO: 135189 - protein, 15 aa, Homo sapiens
  CDR3 for alpha chain variable domain of TCR clone 67595 (TRAV3, TRAJ24)
CAVRDKMTAGGNCSL

SEQ ID NO: 135190 - protein, 14 aa, Homo sapiens
  CDR3 for beta chain variable domain of TCR clone 67595 (TRBV7-2, TRBJ2-3)
CASSQTGSSYTQYF

SEQ ID NO: 135191 - protein, 12 aa, Homo sapiens
  CDR3 for alpha chain variable domain of TCR clone 67596 (TRAV26-2, TRAJ21)
CILKGKFNKFYF

SEQ ID NO: 135192 - protein, 14 aa, Homo sapiens
  CDR3 for beta chain variable domain of TCR clone 67596 (TRBV7-9, TRBJ1-1)
CASTPLQSYTEAFF

SEQ ID NO: 135193 - protein, 13 aa, Homo sapiens
  CDR3 for alpha chain variable domain of TCR clone 67597 (TRAV8-4, TRAJ9)
CAVSETGGFKTIF

SEQ ID NO: 135194 - protein, 12 aa, Homo sapiens
  CDR3 for beta chain variable domain of TCR clone 67597 (TRBV11-2, TRBJ2-1)
CASSPGNNEQFF

SEQ ID NO: 135195 - protein, 16 aa, Homo sapiens
  CDR3 for alpha chain variable domain of TCR clone 67598 (TRAV17, TRAJ12)
CFLLLCWGDSSYKLIF

SEQ ID NO: 135196 - protein, 12 aa, Homo sapiens
  CDR3 for beta chain variable domain of TCR clone 67598 (TRBV29-1, TRBJ1-1)
CSESDGNTEAFF

SEQ ID NO: 135197 - protein, 16 aa, Homo sapiens
  CDR3 for alpha chain variable domain of TCR clone 67599 (TRAV13-1, TRAJ48)
CAASIFGNFGNEKLTF

SEQ ID NO: 135198 - protein, 14 aa, Homo sapiens
  CDR3 for beta chain variable domain of TCR clone 67599 (TRBV6-1, TRBJ1-3)
CASVQGGGGNTIYF

SEQ ID NO: 135199 - protein, 17 aa, Homo sapiens
  CDR3 for alpha chain variable domain of TCR clone 67600 (TRAV4, TRAJ13)
CLVGVQGSSGGYQKVTF

SEQ ID NO: 135200 - protein, 18 aa, Homo sapiens
  CDR3 for beta chain variable domain of TCR clone 67600 (TRBV15, TRBJ2-3)
CATSRDGARSWDTDTHYF

SEQ ID NO: 135201 - protein, 15 aa, Homo sapiens
  CDR3 for alpha chain variable domain of TCR clone 67601 (TRAV8-3, TRAJ32)
CAVGPYGGATDKLIF

SEQ ID NO: 135202 - protein, 14 aa, Homo sapiens
  CDR3 for beta chain variable domain of TCR clone 67601 (TRBV29-1, TRBJ2-2)
CSVLAETNTGELFF

SEQ ID NO: 135203 - protein, 15 aa, Homo sapiens
  CDR3 for alpha chain variable domain of TCR clone 67602 (TRAV3, TRAJ24)
CAVGDKMTAGGNCSL

SEQ ID NO: 135204 - protein, 14 aa, Homo sapiens
  CDR3 for beta chain variable domain of TCR clone 67602 (TRBV7-2, TRBJ2-3)
CASSQTGSSYTQYF

SEQ ID NO: 135205 - protein, 11 aa, Homo sapiens
  CDR3 for alpha chain variable domain of TCR clone 67603 (TRAV21, TRAJ34)
CAHHNTDKLIF

SEQ ID NO: 135206 - protein, 13 aa, Homo sapiens
  CDR3 for beta chain variable domain of TCR clone 67603 (TRBV7-6, TRBJ1-2)
CASSLVADYGYTF

SEQ ID NO: 135207 - protein, 13 aa, Homo sapiens
  CDR3 for alpha chain variable domain of TCR clone 67604 (TRAV27, TRAJ27)
CAGGITNAGKSAF

SEQ ID NO: 135208 - protein, 13 aa, Homo sapiens
  CDR3 for beta chain variable domain of TCR clone 67604 (TRBV20-1, TRBJ1-2)
CSASLGVGYGYTF

SEQ ID NO: 135209 - protein, 14 aa, Homo sapiens
  CDR3 for alpha chain variable domain of TCR clone 67605 (TRAV13-2, TRAJ43)
CSEVPTYNNNDMRF

SEQ ID NO: 135210 - protein, 15 aa, Homo sapiens
  CDR3 for beta chain variable domain of TCR clone 67605 (TRBV7-9, TRBJ2-2)
CASGPLDTFPGELFF

SEQ ID NO: 135211 - protein, 11 aa, Homo sapiens
  CDR3 for alpha chain variable domain of TCR clone 67606 (TRAV2, TRAJ33)
CAVESNYQLIW

SEQ ID NO: 135212 - protein, 16 aa, Homo sapiens
  CDR3 for beta chain variable domain of TCR clone 67606 (TRBV2, TRBJ1-5)
CASSELHKSGFQPQHF

SEQ ID NO: 135213 - protein, 12 aa, Homo sapiens
  CDR3 for alpha chain variable domain of TCR clone 67607 (TRAV2, TRAJ33)
CAFLDSNYQLIW

SEQ ID NO: 135214 - protein, 16 aa, Homo sapiens
  CDR3 for beta chain variable domain of TCR clone 67607 (TRBV2, TRBJ2-7)
CASSEPWTGPSYEQYF

SEQ ID NO: 135215 - protein, 12 aa, Homo sapiens
  CDR3 for alpha chain variable domain of TCR clone 67608 (TRAV20, TRAJ54)
CAAQEGAQKLVF

SEQ ID NO: 135216 - protein, 17 aa, Homo sapiens
  CDR3 for beta chain variable domain of TCR clone 67608 (TRBV13, TRBJ2-3)
CASSLSRVAGGRNTQYF

SEQ ID NO: 135217 - protein, 15 aa, Homo sapiens
  CDR3 for alpha chain variable domain of TCR clone 67609 (TRAV26-2, TRAJ45)
CILRDRVDQEEVLTD

SEQ ID NO: 135218 - protein, 19 aa, Homo sapiens
  CDR3 for beta chain variable domain of TCR clone 67609 (TRBV7-9, TRBJ2-1)
CASGHNRGALLRSYNEQFF

SEQ ID NO: 135219 - protein, 15 aa, Homo sapiens
  CDR3 for alpha chain variable domain of TCR clone 67610 (TRAV8-4, TRAJ6)
CAVSAPSGGSYIPTF

SEQ ID NO: 135220 - protein, 15 aa, Homo sapiens
  CDR3 for beta chain variable domain of TCR clone 67610 (TRBV2, TRBJ2-1)
CASSEARSAHNEQFF

SEQ ID NO: 135221 - protein, 13 aa, Homo sapiens
  CDR3 for alpha chain variable domain of TCR clone 67611 (TRAV14/DV4, TRAJ4)
CAMKVGGYNKLIF

SEQ ID NO: 135222 - protein, 15 aa, Homo sapiens
  CDR3 for beta chain variable domain of TCR clone 67611 (TRBV11-3, TRBJ1-1)
CASSLGGPGDTEAFF

SEQ ID NO: 135223 - protein, 13 aa, Homo sapiens
  CDR3 for alpha chain variable domain of TCR clone 67612 (TRAV12-2, TRAJ45)
CAVNRGGADGLTF

SEQ ID NO: 135224 - protein, 16 aa, Homo sapiens
  CDR3 for beta chain variable domain of TCR clone 67612 (TRBV2, TRBJ1-1)
CASSPTLGGASTESFF

SEQ ID NO: 135225 - protein, 15 aa, Homo sapiens
  CDR3 for alpha chain variable domain of TCR clone 67613 (TRAV34, TRAJ38)
CGADFTPGNNRKLIW

SEQ ID NO: 135226 - protein, 16 aa, Homo sapiens
  CDR3 for beta chain variable domain of TCR clone 67613 (TRBV12-5, TRBJ2-5)
CASGARTSGNQETQYF

SEQ ID NO: 135227 - protein, 16 aa, Homo sapiens
  CDR3 for alpha chain variable domain of TCR clone 67614 (TRAV8-3, TRAJ13)
CAVGAYPSGGYQKVTF

SEQ ID NO: 135228 - protein, 15 aa, Homo sapiens
  CDR3 for beta chain variable domain of TCR clone 67614 (TRBV2, TRBJ2-3)
CASSDFEKATDTQYF

SEQ ID NO: 135229 - protein, 11 aa, Homo sapiens
  CDR3 for alpha chain variable domain of TCR clone 67615 (TRAV1-1, TRAJ30)
CAQNRDDKIIF

SEQ ID NO: 135230 - protein, 15 aa, Homo sapiens
  CDR3 for beta chain variable domain of TCR clone 67615 (TRBV18, TRBJ1-1)
CASSPRQGENTEAFF

SEQ ID NO: 135231 - protein, 12 aa, Homo sapiens
  CDR3 for alpha chain variable domain of TCR clone 67616 (TRAV13-1, TRAJ21)
CAAKEGFNKFYF

SEQ ID NO: 135232 - protein, 15 aa, Homo sapiens
  CDR3 for beta chain variable domain of TCR clone 67616 (TRBV25-1, TRBJ2-5)
CASSDTGTHQETQYF

SEQ ID NO: 135233 - protein, 14 aa, Homo sapiens
  CDR3 for alpha chain variable domain of TCR clone 67617 (TRAV1-2, TRAJ6)
CAVSLSGGSYIPTF

SEQ ID NO: 135234 - protein, 15 aa, Homo sapiens
  CDR3 for beta chain variable domain of TCR clone 67617 (TRBV28, TRBJ2-7)
CAISPGGRGFYEQYF

SEQ ID NO: 135235 - protein, 15 aa, Homo sapiens
  CDR3 for alpha chain variable domain of TCR clone 67618 (TRAV8-3, TRAJ45)
CAVEGSGGGADGLTF

SEQ ID NO: 135236 - protein, 16 aa, Homo sapiens
  CDR3 for beta chain variable domain of TCR clone 67618 (TRBV6-5, TRBJ2-6)
CASSYPLASGANVLTF

SEQ ID NO: 135237 - protein, 15 aa, Homo sapiens
  CDR3 for alpha chain variable domain of TCR clone 67619 (TRAV8-3, TRAJ40)
CAAPSLGSGTYRYIF

SEQ ID NO: 135238 - protein, 15 aa, Homo sapiens
  CDR3 for beta chain variable domain of TCR clone 67619 (TRBV19, TRBJ1-2)
CASSVGQVLNYGYTF

SEQ ID NO: 135239 - protein, 13 aa, Homo sapiens
  CDR3 for alpha chain variable domain of TCR clone 67620 (TRAV1-1, TRAJ9)
CAAKNTGGFKTIF

SEQ ID NO: 135240 - protein, 15 aa, Homo sapiens
  CDR3 for beta chain variable domain of TCR clone 67620 (TRBV7-9, TRBJ1-6)
CASSSPGRGNSPLHF

SEQ ID NO: 135241 - protein, 13 aa, Homo sapiens
  CDR3 for alpha chain variable domain of TCR clone 67621 (TRAV17, TRAJ37)
CATDASNTGKLIF

SEQ ID NO: 135242 - protein, 14 aa, Homo sapiens
  CDR3 for beta chain variable domain of TCR clone 67621 (TRBV7-8, TRBJ2-1)
CATERERSYNEQFF

SEQ ID NO: 135243 - protein, 14 aa, Homo sapiens
  CDR3 for alpha chain variable domain of TCR clone 67622 (TRAV1-2, TRAJ8)
CAVGEDTGFQKLVF

SEQ ID NO: 135244 - protein, 16 aa, Homo sapiens
  CDR3 for beta chain variable domain of TCR clone 67622 (TRBV7-6, TRBJ2-6)
CASSLPGLSGANVLTF

SEQ ID NO: 135245 - protein, 13 aa, Homo sapiens
  CDR3 for alpha chain variable domain of TCR clone 67623 (TRAV12-1, TRAJ39)
CVARSGAGNMLTL

SEQ ID NO: 135246 - protein, 15 aa, Homo sapiens
  CDR3 for beta chain variable domain of TCR clone 67623 (TRBV7-2, TRBJ2-1)
CASSSGLAGGNEQFF

SEQ ID NO: 135247 - protein, 13 aa, Homo sapiens
  CDR3 for alpha chain variable domain of TCR clone 67624 (TRAV8-3, TRAJ36)
CAVGATGANNLFF

SEQ ID NO: 135248 - protein, 15 aa, Homo sapiens
  CDR3 for beta chain variable domain of TCR clone 67624 (TRBV7-2, TRBJ1-2)
CASSPRAGWKYGYTF

SEQ ID NO: 135249 - protein, 14 aa, Homo sapiens
  CDR3 for alpha chain variable domain of TCR clone 67625 (TRAV1-1, TRAJ27)
CAVIYNTNAGKSAF

SEQ ID NO: 135250 - protein, 13 aa, Homo sapiens
  CDR3 for beta chain variable domain of TCR clone 67625 (TRBV7-9, TRBJ1-2)
CASSLKQNYGYTF

SEQ ID NO: 135251 - protein, 15 aa, Homo sapiens
  CDR3 for alpha chain variable domain of TCR clone 67626 (TRAV12-2, TRAJ9)
CAVNNERTGGLKTIF

SEQ ID NO: 135252 - protein, 14 aa, Homo sapiens
  CDR3 for beta chain variable domain of TCR clone 67626 (TRBV4-1, TRBJ1-4)
CASSQERKNEKLFF

SEQ ID NO: 135253 - protein, 12 aa, Homo sapiens
  CDR3 for alpha chain variable domain of TCR clone 67627 (TRAV17, TRAJ28)
WDSGAGSYQLTF

SEQ ID NO: 135254 - protein, 13 aa, Homo sapiens
  CDR3 for beta chain variable domain of TCR clone 67627 (TRBV11-3, TRBJ1-1)
CASSRQPNTEAFF

SEQ ID NO: 135255 - protein, 17 aa, Homo sapiens
  CDR3 for alpha chain variable domain of TCR clone 67628 (TRAV4, TRAJ42)
CLVGVLNYGGSQGNLIF

SEQ ID NO: 135256 - protein, 12 aa, Homo sapiens
  CDR3 for beta chain variable domain of TCR clone 67628 (TRBV20-1, TRBJ2-1)
CSAQYTYNEQFS

SEQ ID NO: 135257 - protein, 10 aa, Homo sapiens
  CDR3 for alpha chain variable domain of TCR clone 67629 (TRAV21, TRAJ43)
CAVRIGDMRS

SEQ ID NO: 135258 - protein, 13 aa, Homo sapiens
  CDR3 for beta chain variable domain of TCR clone 67629 (TRBV20-1, TRBJ2-7)
CSAPGLADYEQYF

SEQ ID NO: 135259 - protein, 14 aa, Homo sapiens
  CDR3 for alpha chain variable domain of TCR clone 67630 (TRAV21, TRAJ38)
CAVMGAGNNRKPIW

SEQ ID NO: 135260 - protein, 13 aa, Homo sapiens
  CDR3 for beta chain variable domain of TCR clone 67630 (TRBV7-3, TRBJ2-5)
CASSIGFFETQYF

SEQ ID NO: 135261 - protein, 14 aa, Homo sapiens
  CDR3 for alpha chain variable domain of TCR clone 67631 (TRAV1-2, TRAJ8)
CAVREDTGFQKLVF

SEQ ID NO: 135262 - protein, 15 aa, Homo sapiens
  CDR3 for beta chain variable domain of TCR clone 67631 (TRBV2, TRBJ2-7)
CASTLLGSGATEQYF

SEQ ID NO: 135263 - protein, 15 aa, Homo sapiens
  CDR3 for alpha chain variable domain of TCR clone 67632 (TRAV8-4, TRAJ3)
CAGTGENLVQQCFQD

SEQ ID NO: 135264 - protein, 16 aa, Homo sapiens
  CDR3 for beta chain variable domain of TCR clone 67632 (TRBV4-2, TRBJ1-1)
CASSQAGFGMNTEAFF

SEQ ID NO: 135265 - protein, 15 aa, Homo sapiens
  CDR3 for alpha chain variable domain of TCR clone 67633 (TRAV8-2, TRAJ28)
CVVSESGAGSYQLTF

SEQ ID NO: 135266 - protein, 15 aa, Homo sapiens
  CDR3 for beta chain variable domain of TCR clone 67633 (TRBV7-3, TRBJ2-1)
CASSPTGGGEVEQFF

SEQ ID NO: 135267 - protein, 13 aa, Homo sapiens
  CDR3 for alpha chain variable domain of TCR clone 67634 (TRAV2, TRAJ10)
SAVETGGGNKLTF

SEQ ID NO: 135268 - protein, 14 aa, Homo sapiens
  CDR3 for beta chain variable domain of TCR clone 67634 (TRBV20-1, TRBJ2-3)
CSAGGRRGTDTQYF

SEQ ID NO: 135269 - protein, 15 aa, Homo sapiens
  CDR3 for alpha chain variable domain of TCR clone 67635 (TRAV27, TRAJ38)
CAARRNAGNNRKLIW

SEQ ID NO: 135270 - protein, 17 aa, Homo sapiens
  CDR3 for beta chain variable domain of TCR clone 67635 (TRBV20-1, TRBJ2-2)
CSASGSGQGGLTEELFF

SEQ ID NO: 135271 - protein, 16 aa, Homo sapiens
  CDR3 for alpha chain variable domain of TCR clone 67636 (TRAV23/DV6, TRAJ12)
CSNRSGAMDSSYKLIF

SEQ ID NO: 135272 - protein, 12 aa, Homo sapiens
  CDR3 for beta chain variable domain of TCR clone 67636 (TRBV10-3, TRBJ2-2)
CAIRENTGELFF

SEQ ID NO: 135273 - protein, 12 aa, Homo sapiens
  CDR3 for alpha chain variable domain of TCR clone 67637 (TRAV13-1, TRAJ21)
CAAKEGFNKFYF

SEQ ID NO: 135274 - protein, 18 aa, Homo sapiens
  CDR3 for beta chain variable domain of TCR clone 67637 (TRBV7-6, TRBJ2-1)
CASSPRTSGMSSYNEQFF

SEQ ID NO: 135275 - protein, 13 aa, Homo sapiens
  CDR3 for alpha chain variable domain of TCR clone 67638 (TRAV20, TRAJ37)
CARCSSSTGKLIF

SEQ ID NO: 135276 - protein, 11 aa, Homo sapiens
  CDR3 for beta chain variable domain of TCR clone 67638 (TRBV12-4, TRBJ2-3)
CASTATDTQYF

SEQ ID NO: 135277 - protein, 14 aa, Homo sapiens
  CDR3 for alpha chain variable domain of TCR clone 67639 (TRAV13-1, TRAJ40)
CAASMTSGTYKYIF

SEQ ID NO: 135278 - protein, 15 aa, Homo sapiens
  CDR3 for beta chain variable domain of TCR clone 67639 (TRBV7-3, TRBJ2-1)
CANSPTGGGEVEQFF

SEQ ID NO: 135279 - protein, 16 aa, Homo sapiens
  CDR3 for alpha chain variable domain of TCR clone 67640 (TRAV3, TRAJ37)
CAVRGRGSGNTGKLIF

SEQ ID NO: 135280 - protein, 13 aa, Homo sapiens
  CDR3 for beta chain variable domain of TCR clone 67640 (TRBV20-1, TRBJ2-7)
CSAQDRDSYEQYF

SEQ ID NO: 135281 - protein, 13 aa, Homo sapiens
  CDR3 for alpha chain variable domain of TCR clone 67641 (TRAV21, TRAJ57)
CAVTQGGSEKLVF

SEQ ID NO: 135282 - protein, 16 aa, Homo sapiens
  CDR3 for beta chain variable domain of TCR clone 67641 (TRBV29-1, TRBJ2-7)
CNVEDAEDGTAYEQYF

SEQ ID NO: 135283 - protein, 13 aa, Homo sapiens
  CDR3 for alpha chain variable domain of TCR clone 67642 (TRAV12-2, TRAJ7)
CAGLIYENNRLAF

SEQ ID NO: 135284 - protein, 16 aa, Homo sapiens
  CDR3 for beta chain variable domain of TCR clone 67642 (TRBV19, TRBJ2-2)
CASRSPGTGATGELFF

SEQ ID NO: 135285 - protein, 13 aa, Homo sapiens
  CDR3 for alpha chain variable domain of TCR clone 67643 (TRAV17, TRAJ9)
CATDYTGGFKTIF

SEQ ID NO: 135286 - protein, 15 aa, Homo sapiens
  CDR3 for beta chain variable domain of TCR clone 67643 (TRBV18, TRBJ2-1)
CASSPPSASYNEQFF

SEQ ID NO: 135287 - protein, 14 aa, Homo sapiens
  CDR3 for alpha chain variable domain of TCR clone 67644 (TRAV21, TRAJ54)
CAVRPLQGAQKLVF

SEQ ID NO: 135288 - protein, 18 aa, Homo sapiens
  CDR3 for beta chain variable domain of TCR clone 67644 (TRBV4-1, TRBJ1-5)
CASSQDPRGQGLNQPQHF

SEQ ID NO: 135289 - protein, 16 aa, Homo sapiens
  CDR3 for alpha chain variable domain of TCR clone 67645 (TRAV29/DV5, TRAJ30)
QCTSVQQANRDDKIIF

SEQ ID NO: 135290 - protein, 13 aa, Homo sapiens
  CDR3 for beta chain variable domain of TCR clone 67645 (TRBV12-5, TRBJ2-3)
CASQKRGTDTQYF

SEQ ID NO: 135291 - protein, 19 aa, Homo sapiens
  CDR3 for alpha chain variable domain of TCR clone 67646 (TRAV26-1, TRAJ28)
CIVRAAHAYSGAGSYQLTF

SEQ ID NO: 135292 - protein, 12 aa, Homo sapiens
  CDR3 for beta chain variable domain of TCR clone 67646 (TRBV27, TRBJ2-2)
CASKLFTGELFF

SEQ ID NO: 135293 - protein, 11 aa, Homo sapiens
  CDR3 for alpha chain variable domain of TCR clone 67647 (TRAV12-1, TRAJ34)
CVVNKGRELIF

SEQ ID NO: 135294 - protein, 12 aa, Homo sapiens
  CDR3 for beta chain variable domain of TCR clone 67647 (TRBV11-2, TRBJ2-2)
CAGSLGGGELFF

SEQ ID NO: 135295 - protein, 10 aa, Homo sapiens
  CDR3 for alpha chain variable domain of TCR clone 67648 (TRAV8-4, TRAJ39)
CAVAGNMLTF

SEQ ID NO: 135296 - protein, 15 aa, Homo sapiens
  CDR3 for beta chain variable domain of TCR clone 67648 (TRBV5-1, TRBJ2-3)
CASSSTSGSTDTQYF

SEQ ID NO: 135297 - protein, 14 aa, Homo sapiens
  CDR3 for alpha chain variable domain of TCR clone 67649 (TRAV13-2, TRAJ43)
CAEIPTYNNNDMRF

SEQ ID NO: 135298 - protein, 15 aa, Homo sapiens
  CDR3 for beta chain variable domain of TCR clone 67649 (TRBV7-9, TRBJ2-2)
CASGPLDAFPGELFF

SEQ ID NO: 135299 - protein, 16 aa, Homo sapiens
  CDR3 for alpha chain variable domain of TCR clone 67650 (TRAV16, TRAJ57)
CAPYLITQGGSEKLVF

SEQ ID NO: 135300 - protein, 17 aa, Homo sapiens
  CDR3 for beta chain variable domain of TCR clone 67650 (TRBV24-1, TRBJ2-4)
CATSDAEARGVRNVQYF

SEQ ID NO: 135301 - protein, 14 aa, Homo sapiens
  CDR3 for alpha chain variable domain of TCR clone 67651 (TRAV9-2, TRAJ39)
CALYIYNAGNMLTF

SEQ ID NO: 135302 - protein, 15 aa, Homo sapiens
  CDR3 for beta chain variable domain of TCR clone 67651 (TRBV7-2, TRBJ2-1)
CASTHGTGIYNEQFF

SEQ ID NO: 135303 - protein, 12 aa, Homo sapiens
  CDR3 for alpha chain variable domain of TCR clone 67652 (TRAV27, TRAJ48)
CAGARGNEKLTF

SEQ ID NO: 135304 - protein, 14 aa, Homo sapiens
  CDR3 for beta chain variable domain of TCR clone 67652 (TRBV12-5, TRBJ2-5)
CASGSRTHQETQHF

SEQ ID NO: 135305 - protein, 16 aa, Homo sapiens
  CDR3 for alpha chain variable domain of TCR clone 67653 (TRAV12-3, TRAJ58)
CAMTDTEETSGSRLTF

SEQ ID NO: 135306 - protein, 22 aa, Homo sapiens
  CDR3 for beta chain variable domain of TCR clone 67653 (TRBV23-1, TRBJ2-7)
CAGSRRLDSGQGYVGGGYEQYF

SEQ ID NO: 135307 - protein, 14 aa, Homo sapiens
  CDR3 for alpha chain variable domain of TCR clone 67654 (TRAV20, TRAJ29)
CAVQAWVGNTPLVF

SEQ ID NO: 135308 - protein, 20 aa, Homo sapiens
  CDR3 for beta chain variable domain of TCR clone 67654 (TRBV7-8, TRBJ2-2)
CASSHLFPGPTIHITGELFF

SEQ ID NO: 135309 - protein, 13 aa, Homo sapiens
  CDR3 for alpha chain variable domain of TCR clone 67655 (TRAV36/DV7, TRAJ54)
CAVDIQGAQKLVF

SEQ ID NO: 135310 - protein, 18 aa, Homo sapiens
  CDR3 for beta chain variable domain of TCR clone 67655 (TRBV15, TRBJ2-3)
CATSRDGARSWDTDTQYF

SEQ ID NO: 135311 - protein, 11 aa, Homo sapiens
  CDR3 for alpha chain variable domain of TCR clone 67656 (TRAV12-1, TRAJ30)
CVVNGQDKILF

SEQ ID NO: 135312 - protein, 12 aa, Homo sapiens
  CDR3 for beta chain variable domain of TCR clone 67656 (TRBV27, TRBJ2-2)
CASKLFTGELFF

SEQ ID NO: 135313 - protein, 12 aa, Homo sapiens
  CDR3 for alpha chain variable domain of TCR clone 67657 (TRAV12-1, TRAJ40)
CVVDSGTYKYIF

SEQ ID NO: 135314 - protein, 18 aa, Homo sapiens
  CDR3 for beta chain variable domain of TCR clone 67657 (TRBV11-2, TRBJ2-3)
CASSLGGASRGAPNTQYF

SEQ ID NO: 135315 - protein, 15 aa, Homo sapiens
  CDR3 for alpha chain variable domain of TCR clone 67658 (TRAV2, TRAJ37)
CAVGDGSSNTGTLIF

SEQ ID NO: 135316 - protein, 13 aa, Homo sapiens
  CDR3 for beta chain variable domain of TCR clone 67658 (TRBV20-1, TRBJ2-7)
CSAQTGLSYEQYF

SEQ ID NO: 135317 - protein, 14 aa, Homo sapiens
  CDR3 for alpha chain variable domain of TCR clone 67659 (TRAV1-2, TRAJ8)
CAVREDTGFQKLVF

SEQ ID NO: 135318 - protein, 15 aa, Homo sapiens
  CDR3 for beta chain variable domain of TCR clone 67659 (TRBV7-3, TRBJ2-3)
CASSLTSGVGDTQYF

SEQ ID NO: 135319 - protein, 14 aa, Homo sapiens
  CDR3 for alpha chain variable domain of TCR clone 67660 (TRAV12-3, TRAJ10)
SHLPLTGGGNKLTF

SEQ ID NO: 135320 - protein, 13 aa, Homo sapiens
  CDR3 for beta chain variable domain of TCR clone 67660 (TRBV19, TRBJ2-2)
CASSIWSTGELFF

SEQ ID NO: 135321 - protein, 13 aa, Homo sapiens
  CDR3 for alpha chain variable domain of TCR clone 67661 (TRAV12-1, TRAJ16)
CVVNGPDGQKPLF

SEQ ID NO: 135322 - protein, 15 aa, Homo sapiens
  CDR3 for beta chain variable domain of TCR clone 67661 (TRBV6-3, TRBJ2-7)
CASSSPGTVFYEQYF

SEQ ID NO: 135323 - protein, 14 aa, Homo sapiens
  CDR3 for alpha chain variable domain of TCR clone 67662 (TRAV12-1, TRAJ30)
CVPTGTNRDDKIIF

SEQ ID NO: 135324 - protein, 11 aa, Homo sapiens
  CDR3 for beta chain variable domain of TCR clone 67662 (TRBV4-1, TRBJ2-2)
CASEHTGELSF

SEQ ID NO: 135325 - protein, 14 aa, Homo sapiens
  CDR3 for alpha chain variable domain of TCR clone 67663 (TRAV3, TRAJ40)
CAVRDRRGTYKHIF

SEQ ID NO: 135326 - protein, 15 aa, Homo sapiens
  CDR3 for beta chain variable domain of TCR clone 67663 (TRBV11-1, TRBJ1-3)
CASTDPRAFGNTIYF

SEQ ID NO: 135327 - protein, 14 aa, Homo sapiens
  CDR3 for alpha chain variable domain of TCR clone 67664 (TRAV26-1, TRAJ34)
CIVRVAYSTDKLIF

SEQ ID NO: 135328 - protein, 13 aa, Homo sapiens
  CDR3 for beta chain variable domain of TCR clone 67664 (TRBV4-2, TRBJ1-1)
CASSQAGNTEAFF

SEQ ID NO: 135329 - protein, 16 aa, Homo sapiens
  CDR3 for alpha chain variable domain of TCR clone 67665 (TRAV1-2, TRAJ10)
CAVRRVLTGGGNKLTF

SEQ ID NO: 135330 - protein, 12 aa, Homo sapiens
  CDR3 for beta chain variable domain of TCR clone 67665 (TRBV7-8, TRBJ2-7)
CASSLGDREQYF

SEQ ID NO: 135331 - protein, 14 aa, Homo sapiens
  CDR3 for alpha chain variable domain of TCR clone 67666 (TRAV23/DV6, TRAJ17)
CAARGRAAGNKPTF

SEQ ID NO: 135332 - protein, 13 aa, Homo sapiens
  CDR3 for beta chain variable domain of TCR clone 67666 (TRBV7-6, TRBJ1-2)
CASSLVADYGYTF

SEQ ID NO: 135333 - protein, 16 aa, Homo sapiens
  CDR3 for alpha chain variable domain of TCR clone 67667 (TRAV12-3, TRAJ53)
CAMSPGSGGSNYKLTF

SEQ ID NO: 135334 - protein, 11 aa, Homo sapiens
  CDR3 for beta chain variable domain of TCR clone 67667 (TRBV29-1, TRBJ2-5)
CSEDRTGDQYF

SEQ ID NO: 135335 - protein, 15 aa, Homo sapiens
  CDR3 for alpha chain variable domain of TCR clone 67668 (TRAV3, TRAJ47)
CAVRDIGEYGNKLVF

SEQ ID NO: 135336 - protein, 14 aa, Homo sapiens
  CDR3 for beta chain variable domain of TCR clone 67668 (TRBV13, TRBJ2-5)
CASSIERVGETQYF

SEQ ID NO: 135337 - protein, 12 aa, Homo sapiens
  CDR3 for alpha chain variable domain of TCR clone 67669 (TRAV30, TRAJ20)
CGTESNDYKPSF

SEQ ID NO: 135338 - protein, 15 aa, Homo sapiens
  CDR3 for beta chain variable domain of TCR clone 67669 (TRBV20-1, TRBJ2-7)
CSARDRVSGMDEQYF

SEQ ID NO: 135339 - protein, 13 aa, Homo sapiens
  CDR3 for alpha chain variable domain of TCR clone 67670 (TRAV17, TRAJ9)
CATDYTGGFKTIF

SEQ ID NO: 135340 - protein, 13 aa, Homo sapiens
  CDR3 for beta chain variable domain of TCR clone 67670 (TRBV4-1, TRBJ2-5)
CASSLTRGETQYF

SEQ ID NO: 135341 - protein, 13 aa, Homo sapiens
  CDR3 for alpha chain variable domain of TCR clone 67671 (TRAV21, TRAJ57)
CAVTQGGSQKLVF

SEQ ID NO: 135342 - protein, 16 aa, Homo sapiens
  CDR3 for beta chain variable domain of TCR clone 67671 (TRBV29-1, TRBJ2-7)
CSVEDAEDGTAYEQYF

SEQ ID NO: 135343 - protein, 12 aa, Homo sapiens
  CDR3 for alpha chain variable domain of TCR clone 67672 (TRAV21, TRAJ3)
CFFYSSASKIIF

SEQ ID NO: 135344 - protein, 16 aa, Homo sapiens
  CDR3 for beta chain variable domain of TCR clone 67672 (TRBV19, TRBJ2-1)
CASSKAGPSSYNEQFF

SEQ ID NO: 135345 - protein, 14 aa, Homo sapiens
  CDR3 for alpha chain variable domain of TCR clone 67673 (TRAV38-1, TRAJ45)
CAYYSGGGADGLTF

SEQ ID NO: 135346 - protein, 17 aa, Homo sapiens
  CDR3 for beta chain variable domain of TCR clone 67673 (TRBV11-2, TRBJ2-1)
CASSLYPPGVEYNEQFF

SEQ ID NO: 135347 - protein, 14 aa, Homo sapiens
  CDR3 for alpha chain variable domain of TCR clone 67674 (TRAV8-4, TRAJ39)
RAVSLNNAGNMLTF

SEQ ID NO: 135348 - protein, 16 aa, Homo sapiens
  CDR3 for beta chain variable domain of TCR clone 67674 (TRBV13, TRBJ2-7)
CASSSRESGRTYEQYF

SEQ ID NO: 135349 - protein, 11 aa, Homo sapiens
  CDR3 for alpha chain variable domain of TCR clone 67675 (TRAV35, TRAJ30)
CAGTGDDKIIF

SEQ ID NO: 135350 - protein, 18 aa, Homo sapiens
  CDR3 for beta chain variable domain of TCR clone 67675 (TRBV7-6, TRBJ2-1)
CASSPRTSGMSSYNEQFF

SEQ ID NO: 135351 - protein, 12 aa, Homo sapiens
  CDR3 for alpha chain variable domain of TCR clone 67676 (TRAV12-3, TRAJ17)
CAMTLTGNKLTF

SEQ ID NO: 135352 - protein, 13 aa, Homo sapiens
  CDR3 for beta chain variable domain of TCR clone 67676 (TRBV5-4, TRBJ1-1)
CASSVDLGTEAFF

SEQ ID NO: 135353 - protein, 19 aa, Homo sapiens
  CDR3 for alpha chain variable domain of TCR clone 67677 (TRAV2, TRAJ20)
ILQVREADAAVYRDCKLSF

SEQ ID NO: 135354 - protein, 13 aa, Homo sapiens
  CDR3 for beta chain variable domain of TCR clone 67677 (TRBV7-3, TRBJ1-1)
CASIQDWGAEAFF

SEQ ID NO: 135355 - protein, 12 aa, Homo sapiens
  CDR3 for alpha chain variable domain of TCR clone 67678 (TRAV12-1, TRAJ40)
CVVYSGTYKYIF

SEQ ID NO: 135356 - protein, 16 aa, Homo sapiens
  CDR3 for beta chain variable domain of TCR clone 67678 (TRBV12-4, TRBJ1-5)
CASSRPVGGSNQPQHF

SEQ ID NO: 135357 - protein, 13 aa, Homo sapiens
  CDR3 for alpha chain variable domain of TCR clone 67679 (TRAV12-1, TRAJ29)
CVVNGPGNKPLVF

SEQ ID NO: 135358 - protein, 13 aa, Homo sapiens
  CDR3 for beta chain variable domain of TCR clone 67679 (TRBV7-2, TRBJ2-5)
CASSRGGLETQYF

SEQ ID NO: 135359 - protein, 15 aa, Homo sapiens
  CDR3 for alpha chain variable domain of TCR clone 67680 (TRAV3, TRAJ5)
CAVRDLDTGRRALTF

SEQ ID NO: 135360 - protein, 16 aa, Homo sapiens
  CDR3 for beta chain variable domain of TCR clone 67680 (TRBV7-2, TRBJ2-5)
CASSPFPTGGEETQYF

SEQ ID NO: 135361 - protein, 17 aa, Homo sapiens
  CDR3 for alpha chain variable domain of TCR clone 67681 (TRAV3, TRAJ38)
CAVRDCLNAGNNRKLIW

SEQ ID NO: 135362 - protein, 16 aa, Homo sapiens
  CDR3 for beta chain variable domain of TCR clone 67681 (TRBV12-4, TRBJ1-5)
CASSRPVGGSNQPQHF

SEQ ID NO: 135363 - protein, 13 aa, Homo sapiens
  CDR3 for alpha chain variable domain of TCR clone 67682 (TRAV12-3, TRAJ33)
CAMSVNSNYQLIW

SEQ ID NO: 135364 - protein, 14 aa, Homo sapiens
  CDR3 for beta chain variable domain of TCR clone 67682 (TRBV12-5, TRBJ2-5)
RASGSRTHQETQYF

SEQ ID NO: 135365 - protein, 16 aa, Homo sapiens
  CDR3 for alpha chain variable domain of TCR clone 67683 (TRAV12-2, TRAJ50)
CAVGTATKTSYDKVIF

SEQ ID NO: 135366 - protein, 12 aa, Homo sapiens
  CDR3 for beta chain variable domain of TCR clone 67683 (TRBV12-4, TRBJ1-5)
CASSLGRQHQHF

SEQ ID NO: 135367 - protein, 14 aa, Homo sapiens
  CDR3 for alpha chain variable domain of TCR clone 67684 (TRAV1-2, TRAJ8)
CAVREDTGFQKLVF

SEQ ID NO: 135368 - protein, 12 aa, Homo sapiens
  CDR3 for beta chain variable domain of TCR clone 67684 (TRBV12-4, TRBJ1-3)
CASSFSGNTIYF

SEQ ID NO: 135369 - protein, 14 aa, Homo sapiens
  CDR3 for alpha chain variable domain of TCR clone 67685 (TRAV26-1, TRAJ38)
CIADNAGNNRKLIW

SEQ ID NO: 135370 - protein, 14 aa, Homo sapiens
  CDR3 for beta chain variable domain of TCR clone 67685 (TRBV4-1, TRBJ2-2)
CASSQAVNTGELLF

SEQ ID NO: 135371 - protein, 15 aa, Homo sapiens
  CDR3 for alpha chain variable domain of TCR clone 67686 (TRAV2, TRAJ24)
CAVVRMKNSWGKLQF

SEQ ID NO: 135372 - protein, 16 aa, Homo sapiens
  CDR3 for beta chain variable domain of TCR clone 67686 (TRBV7-7, TRBJ2-3)
CASSPGTSGSTDTQYF

SEQ ID NO: 135373 - protein, 14 aa, Homo sapiens
  CDR3 for alpha chain variable domain of TCR clone 67687 (TRAV35, TRAJ33)
GAGSSQDSNYQLIW

SEQ ID NO: 135374 - protein, 15 aa, Homo sapiens
  CDR3 for beta chain variable domain of TCR clone 67687 (TRBV5-1, TRBJ1-4)
FAPAAWKDGNEKLFF

SEQ ID NO: 135375 - protein, 17 aa, Homo sapiens
  CDR3 for alpha chain variable domain of TCR clone 67688 (TRAV4, TRAJ13)
CLVGVQGSSGGYQKVTF

SEQ ID NO: 135376 - protein, 18 aa, Homo sapiens
  CDR3 for beta chain variable domain of TCR clone 67688 (TRBV15, TRBJ2-3)
CATSRDGARSWDTETQYF

SEQ ID NO: 135377 - protein, 10 aa, Homo sapiens
  CDR3 for alpha chain variable domain of TCR clone 67689 (TRAV20, TRAJ22)
CAAPARQLTF

SEQ ID NO: 135378 - protein, 13 aa, Homo sapiens
  CDR3 for beta chain variable domain of TCR clone 67689 (TRBV11-2, TRBJ2-5)
CASSRGPSETQYF

SEQ ID NO: 135379 - protein, 13 aa, Homo sapiens
  CDR3 for alpha chain variable domain of TCR clone 67690 (TRAV27, TRAJ54)
CAGAGQGAQKRVF

SEQ ID NO: 135380 - protein, 15 aa, Homo sapiens
  CDR3 for beta chain variable domain of TCR clone 67690 (TRBV18, TRBJ2-6)
CASSPSYAGANVLTF

SEQ ID NO: 135381 - protein, 17 aa, Homo sapiens
  CDR3 for alpha chain variable domain of TCR clone 67691 (TRAV3, TRAJ6)
CAVRDGPRAGRSYIPTF

SEQ ID NO: 135382 - protein, 13 aa, Homo sapiens
  CDR3 for beta chain variable domain of TCR clone 67691 (TRBV27, TRBJ2-1)
CASRTLGVGEQFF

SEQ ID NO: 135383 - protein, 15 aa, Homo sapiens
  CDR3 for alpha chain variable domain of TCR clone 67692 (TRAV8-3, TRAJ6)
CAVGEDRGGSYIPTF

SEQ ID NO: 135384 - protein, 14 aa, Homo sapiens
  CDR3 for beta chain variable domain of TCR clone 67692 (TRBV27, TRBJ2-2)
CASLRAPPGGELFF

SEQ ID NO: 135385 - protein, 14 aa, Homo sapiens
  CDR3 for alpha chain variable domain of TCR clone 67693 (TRAV12-1, TRAJ12)
CVVTRMDSSYKLIF

SEQ ID NO: 135386 - protein, 16 aa, Homo sapiens
  CDR3 for beta chain variable domain of TCR clone 67693 (TRBV20-1, TRBJ1-4)
CSAPGQGLLTNEKLFF

SEQ ID NO: 135387 - protein, 18 aa, Homo sapiens
  CDR3 for alpha chain variable domain of TCR clone 67694 (TRAV21, TRAJ52)
CAVRPSPAGGTSSGKLTF

SEQ ID NO: 135388 - protein, 12 aa, Homo sapiens
  CDR3 for beta chain variable domain of TCR clone 67694 (TRBV11-2, TRBJ2-2)
CASSLGGGELFF

SEQ ID NO: 135389 - protein, 14 aa, Homo sapiens
  CDR3 for alpha chain variable domain of TCR clone 67695 (TRAV2, TRAJ37)
CGVDFTSNTGKLIF

SEQ ID NO: 135390 - protein, 15 aa, Homo sapiens
  CDR3 for beta chain variable domain of TCR clone 67695 (TRBV20-1, TRBJ1-1)
CSASRGVTGNTEAFF

SEQ ID NO: 135391 - protein, 12 aa, Homo sapiens
  CDR3 for alpha chain variable domain of TCR clone 67696 (TRAV1-1, TRAJ29)
CAVISGNTPLVF

SEQ ID NO: 135392 - protein, 17 aa, Homo sapiens
  CDR3 for beta chain variable domain of TCR clone 67696 (TRBV20-1, TRBJ2-2)
CSASGSGQGGLTGEPFF

SEQ ID NO: 135393 - protein, 11 aa, Homo sapiens
  CDR3 for alpha chain variable domain of TCR clone 67697 (TRAV12-3, TRAJ43)
CAASVSNDMRF

SEQ ID NO: 135394 - protein, 13 aa, Homo sapiens
  CDR3 for beta chain variable domain of TCR clone 67697 (TRBV20-1, TRBJ1-1)
CSAPLGGGTEAFF

SEQ ID NO: 135395 - protein, 16 aa, Homo sapiens
  CDR3 for alpha chain variable domain of TCR clone 67698 (TRAV16, TRAJ52)
CALSAAGGTSYGKLTF

SEQ ID NO: 135396 - protein, 15 aa, Homo sapiens
  CDR3 for beta chain variable domain of TCR clone 67698 (TRBV28, TRBJ1-1)
CASRIKGGLNTEAFF

SEQ ID NO: 135397 - protein, 14 aa, Homo sapiens
  CDR3 for alpha chain variable domain of TCR clone 67699 (TRAV21, TRAJ45)
CAVSSGGGADGLTF

SEQ ID NO: 135398 - protein, 14 aa, Homo sapiens
  CDR3 for beta chain variable domain of TCR clone 67699 (TRBV2, TRBJ2-3)
CASGLAGGSDTQYF

SEQ ID NO: 135399 - protein, 13 aa, Homo sapiens
  CDR3 for alpha chain variable domain of TCR clone 67700 (TRAV17, TRAJ9)
CATDYTGGFKTIF

SEQ ID NO: 135400 - protein, 16 aa, Homo sapiens
  CDR3 for beta chain variable domain of TCR clone 67700 (TRBV7-7, TRBJ2-1)
CASSLASGTSYNEQSF

SEQ ID NO: 135401 - protein, 13 aa, Homo sapiens
  CDR3 for alpha chain variable domain of TCR clone 67701 (TRAV23/DV6, TRAJ27)
CAASKPMQANQPL

SEQ ID NO: 135402 - protein, 14 aa, Homo sapiens
  CDR3 for beta chain variable domain of TCR clone 67701 (TRBV5-4, TRBJ1-1)
CARSLDSRRDEAFF

SEQ ID NO: 135403 - protein, 13 aa, Homo sapiens
  CDR3 for alpha chain variable domain of TCR clone 67702 (TRAV13-1, TRAJ5)
CAARVTGRRALTF

SEQ ID NO: 135404 - protein, 15 aa, Homo sapiens
  CDR3 for beta chain variable domain of TCR clone 67702 (TRBV7-2, TRBJ1-2)
CASRPRAGWNYGYTF

SEQ ID NO: 135405 - protein, 15 aa, Homo sapiens
  CDR3 for alpha chain variable domain of TCR clone 67703 (TRAV27, TRAJ45)
CRSPQSGGGADGLTF

SEQ ID NO: 135406 - protein, 12 aa, Homo sapiens
  CDR3 for beta chain variable domain of TCR clone 67703 (TRBV24-1, TRBJ2-7)
CATSDPGYGQYF

SEQ ID NO: 135407 - protein, 16 aa, Homo sapiens
  CDR3 for alpha chain variable domain of TCR clone 67704 (TRAV14/DV4, TRAJ53)
CAMREGGGGSNYKLTF

SEQ ID NO: 135408 - protein, 16 aa, Homo sapiens
  CDR3 for beta chain variable domain of TCR clone 67704 (TRBV12-4, TRBJ2-7)
CASRSTGTGPSYEQYF

SEQ ID NO: 135409 - protein, 15 aa, Homo sapiens
  CDR3 for alpha chain variable domain of TCR clone 67705 (TRAV8-3, TRAJ45)
CASSYSGGGADGLTF

SEQ ID NO: 135410 - protein, 14 aa, Homo sapiens
  CDR3 for beta chain variable domain of TCR clone 67705 (TRBV27, TRBJ2-2)
CASSLGAATGELFF

SEQ ID NO: 135411 - protein, 14 aa, Homo sapiens
  CDR3 for alpha chain variable domain of TCR clone 67706 (TRAV2, TRAJ9)
CAVEDRSGGFETIF

SEQ ID NO: 135412 - protein, 14 aa, Homo sapiens
  CDR3 for beta chain variable domain of TCR clone 67706 (TRBV9, TRBJ2-1)
CASSVAGTFDEQFF

SEQ ID NO: 135413 - protein, 12 aa, Homo sapiens
  CDR3 for alpha chain variable domain of TCR clone 67707 (TRAV3, TRAJ20)
CAVRDPDYKLSF

SEQ ID NO: 135414 - protein, 16 aa, Homo sapiens
  CDR3 for beta chain variable domain of TCR clone 67707 (TRBV12-4, TRBJ2-3)
CASSFGTGGISDTQYF

SEQ ID NO: 135415 - protein, 12 aa, Homo sapiens
  CDR3 for alpha chain variable domain of TCR clone 67708 (TRAV1-1, TRAJ8)
CVGGTGFQKLVF

SEQ ID NO: 135416 - protein, 17 aa, Homo sapiens
  CDR3 for beta chain variable domain of TCR clone 67708 (TRBV4-3, TRBJ2-1)
CASSQGLAIVSSNEQFF

SEQ ID NO: 135417 - protein, 12 aa, Homo sapiens
  CDR3 for alpha chain variable domain of TCR clone 67709 (TRAV13-1, TRAJ49)
CAASPMGNQFYF

SEQ ID NO: 135418 - protein, 16 aa, Homo sapiens
  CDR3 for beta chain variable domain of TCR clone 67709 (TRBV11-2, TRBJ2-1)
CQQLIPPGVEYNEQFF

SEQ ID NO: 135419 - protein, 15 aa, Homo sapiens
  CDR3 for alpha chain variable domain of TCR clone 67710 (TRAV3, TRAJ4)
CAQNMFSGGYNKLIF

SEQ ID NO: 135420 - protein, 13 aa, Homo sapiens
  CDR3 for beta chain variable domain of TCR clone 67710 (TRBV19, TRBJ1-2)
CASSVPGQDGYTF

SEQ ID NO: 135421 - protein, 15 aa, Homo sapiens
  CDR3 for alpha chain variable domain of TCR clone 67711 (TRAV21, TRAJ10)
CAVPLLTGGGNKLTF

SEQ ID NO: 135422 - protein, 14 aa, Homo sapiens
  CDR3 for beta chain variable domain of TCR clone 67711 (TRBV2, TRBJ1-5)
CASSGTVSNQPQHF

SEQ ID NO: 135423 - protein, 15 aa, Homo sapiens
  CDR3 for alpha chain variable domain of TCR clone 67712 (TRAV29/DV5, TRAJ29)
CAASERSSGNTPLVF

SEQ ID NO: 135424 - protein, 13 aa, Homo sapiens
  CDR3 for beta chain variable domain of TCR clone 67712 (TRBV7-3, TRBJ1-1)
CASSQDWGAEAFF

SEQ ID NO: 135425 - protein, 15 aa, Homo sapiens
  CDR3 for alpha chain variable domain of TCR clone 67713 (TRAV8-6, TRAJ10)
CAVSSKGGGGNKLTF

SEQ ID NO: 135426 - protein, 16 aa, Homo sapiens
  CDR3 for beta chain variable domain of TCR clone 67713 (TRBV2, TRBJ2-5)
CASSETQGVGEETQYF

SEQ ID NO: 135427 - protein, 15 aa, Homo sapiens
  CDR3 for alpha chain variable domain of TCR clone 67714 (TRAV17, TRAJ54)
CATTRSEQGAQKLAF

SEQ ID NO: 135428 - protein, 16 aa, Homo sapiens
  CDR3 for beta chain variable domain of TCR clone 67714 (TRBV12-4, TRBJ2-3)
CASSLRLAETTDTQYF

SEQ ID NO: 135429 - protein, 12 aa, Homo sapiens
  CDR3 for alpha chain variable domain of TCR clone 67715 (TRAV13-1, TRAJ20)
CAARQNDYKLSF

SEQ ID NO: 135430 - protein, 14 aa, Homo sapiens
  CDR3 for beta chain variable domain of TCR clone 67715 (TRBV5-1, TRBJ2-7)
CASSCASGVNEQYF

SEQ ID NO: 135431 - protein, 14 aa, Homo sapiens
  CDR3 for alpha chain variable domain of TCR clone 67716 (TRAV12-2, TRAJ13)
CAVKKTGGYQKVTF

SEQ ID NO: 135432 - protein, 13 aa, Homo sapiens
  CDR3 for beta chain variable domain of TCR clone 67716 (TRBV18, TRBJ1-1)
CASSGGRNTEAFF

SEQ ID NO: 135433 - protein, 13 aa, Homo sapiens
  CDR3 for alpha chain variable domain of TCR clone 67717 (TRAV2, TRAJ15)
CAVASQAGTALIF

SEQ ID NO: 135434 - protein, 12 aa, Homo sapiens
  CDR3 for beta chain variable domain of TCR clone 67717 (TRBV5-1, TRBJ2-3)
CASSLAADTQYF

SEQ ID NO: 135435 - protein, 13 aa, Homo sapiens
  CDR3 for alpha chain variable domain of TCR clone 67718 (TRAV20, TRAJ37)
CAGCSSNTGKLIF

SEQ ID NO: 135436 - protein, 10 aa, Homo sapiens
  CDR3 for beta chain variable domain of TCR clone 67718 (TRBV12-4, TRBJ2-3)
CQHRTDTQYF

SEQ ID NO: 135437 - protein, 13 aa, Homo sapiens
  CDR3 for alpha chain variable domain of TCR clone 67719 (TRAV35, TRAJ42)
CAGFPGSQVNLIF

SEQ ID NO: 135438 - protein, 14 aa, Homo sapiens
  CDR3 for beta chain variable domain of TCR clone 67719 (TRBV19, TRBJ2-1)
CASPTFVLSGEQFF

SEQ ID NO: 135439 - protein, 12 aa, Homo sapiens
  CDR3 for alpha chain variable domain of TCR clone 67720 (TRAV12-2, TRAJ52)
IGGGTSYGKLTF

SEQ ID NO: 135440 - protein, 13 aa, Homo sapiens
  CDR3 for beta chain variable domain of TCR clone 67720 (TRBV12-4, TRBJ1-1)
CASSPETGFEAFF

SEQ ID NO: 135441 - protein, 11 aa, Homo sapiens
  CDR3 for alpha chain variable domain of TCR clone 67721 (TRAV2, TRAJ33)
CAVESNYQLIW

SEQ ID NO: 135442 - protein, 14 aa, Homo sapiens
  CDR3 for beta chain variable domain of TCR clone 67721 (TRBV7-2, TRBJ1-1)
CASSFLTGTTEAFF

SEQ ID NO: 135443 - protein, 14 aa, Homo sapiens
  CDR3 for alpha chain variable domain of TCR clone 67722 (TRAV8-4, TRAJ5)
CAVSTDTGRRAPTF

SEQ ID NO: 135444 - protein, 14 aa, Homo sapiens
  CDR3 for beta chain variable domain of TCR clone 67722 (TRBV5-1, TRBJ2-2)
CASSLGGGSGELFF

SEQ ID NO: 135445 - protein, 14 aa, Homo sapiens
  CDR3 for alpha chain variable domain of TCR clone 67723 (TRAV35, TRAJ22)
CAGLRPGSAMQLTF

SEQ ID NO: 135446 - protein, 14 aa, Homo sapiens
  CDR3 for beta chain variable domain of TCR clone 67723 (TRBV5-1, TRBJ2-7)
CASSRGESLYEQYF

SEQ ID NO: 135447 - protein, 11 aa, Homo sapiens
  CDR3 for alpha chain variable domain of TCR clone 67724 (TRAV1-1, TRAJ23)
CAVRQGGKRIF

SEQ ID NO: 135448 - protein, 14 aa, Homo sapiens
  CDR3 for beta chain variable domain of TCR clone 67724 (TRBV19, TRBJ2-1)
CASPTFVLSGEQFF

SEQ ID NO: 135449 - protein, 15 aa, Homo sapiens
  CDR3 for alpha chain variable domain of TCR clone 67725 (TRAV13-2, TRAJ58)
CVTAQKGTSGSRLTF

SEQ ID NO: 135450 - protein, 14 aa, Homo sapiens
  CDR3 for beta chain variable domain of TCR clone 67725 (TRBV7-2, TRBJ2-3)
CASRRGLAADTQYF

SEQ ID NO: 135451 - protein, 14 aa, Homo sapiens
  CDR3 for alpha chain variable domain of TCR clone 67726 (TRAV12-2, TRAJ13)
CAVKKTGGYQKVTF

SEQ ID NO: 135452 - protein, 15 aa, Homo sapiens
  CDR3 for beta chain variable domain of TCR clone 67726 (TRBV5-7, TRBJ2-7)
CASSLGPGRGHEQYF

SEQ ID NO: 135453 - protein, 15 aa, Homo sapiens
  CDR3 for alpha chain variable domain of TCR clone 67727 (TRAV17, TRAJ57)
CATGPSQGGSEKLVF

SEQ ID NO: 135454 - protein, 18 aa, Homo sapiens
  CDR3 for beta chain variable domain of TCR clone 67727 (TRBV7-9, TRBJ2-7)
CASSLTTRGSRTWYEQYF

SEQ ID NO: 135455 - protein, 12 aa, Homo sapiens
  CDR3 for alpha chain variable domain of TCR clone 67728 (TRAV3, TRAJ27)
CAVRDNAGKSTF

SEQ ID NO: 135456 - protein, 15 aa, Homo sapiens
  CDR3 for beta chain variable domain of TCR clone 67728 (TRBV11-3, TRBJ2-3)
CASLKDGREGDTQYF

SEQ ID NO: 135457 - protein, 13 aa, Homo sapiens
  CDR3 for alpha chain variable domain of TCR clone 67729 (TRAV20, TRAJ40)
CAVPFSGTYKYIF

SEQ ID NO: 135458 - protein, 13 aa, Homo sapiens
  CDR3 for beta chain variable domain of TCR clone 67729 (TRBV15, TRBJ2-5)
CATSQIGEENQYF

SEQ ID NO: 135459 - protein, 15 aa, Homo sapiens
  CDR3 for alpha chain variable domain of TCR clone 67730 (TRAV12-1, TRAJ44)
CVADLPTGTASKLTF

SEQ ID NO: 135460 - protein, 13 aa, Homo sapiens
  CDR3 for beta chain variable domain of TCR clone 67730 (TRBV6-5, TRBJ2-5)
CASSAQGGETQYF

SEQ ID NO: 135461 - protein, 17 aa, Homo sapiens
  CDR3 for alpha chain variable domain of TCR clone 67731 (TRAV3, TRAJ28)
CAVREAYSGAGSYQLIF

SEQ ID NO: 135462 - protein, 18 aa, Homo sapiens
  CDR3 for beta chain variable domain of TCR clone 67731 (TRBV27, TRBJ2-1)
CASGNRAVGVGSKNEQFF

SEQ ID NO: 135463 - protein, 16 aa, Homo sapiens
  CDR3 for alpha chain variable domain of TCR clone 67732 (TRAV3, TRAJ42)
CAVRDIEGGSQGNPIF

SEQ ID NO: 135464 - protein, 14 aa, Homo sapiens
  CDR3 for beta chain variable domain of TCR clone 67732 (TRBV18, TRBJ1-1)
CASSPPTGRTEAFF

SEQ ID NO: 135465 - protein, 16 aa, Homo sapiens
  CDR3 for alpha chain variable domain of TCR clone 67733 (TRAV8-3, TRAJ8)
CAVPRDGNTGFQKLVF

SEQ ID NO: 135466 - protein, 15 aa, Homo sapiens
  CDR3 for beta chain variable domain of TCR clone 67733 (TRBV6-1, TRBJ2-6)
CASSYRPSGANVLTF

SEQ ID NO: 135467 - protein, 16 aa, Homo sapiens
  CDR3 for alpha chain variable domain of TCR clone 67734 (TRAV17, TRAJ52)
CATSNAGGTSYGKLTF

SEQ ID NO: 135468 - protein, 14 aa, Homo sapiens
  CDR3 for beta chain variable domain of TCR clone 67734 (TRBV19, TRBJ2-1)
CASPTFVLSGEQFF

SEQ ID NO: 135469 - protein, 14 aa, Homo sapiens
  CDR3 for alpha chain variable domain of TCR clone 67735 (TRAV4, TRAJ6)
CLVGAAGGSYIPTF

SEQ ID NO: 135470 - protein, 16 aa, Homo sapiens
  CDR3 for beta chain variable domain of TCR clone 67735 (TRBV7-6, TRBJ2-1)
CASSLNEGPSYNEQFF

SEQ ID NO: 135471 - protein, 12 aa, Homo sapiens
  CDR3 for alpha chain variable domain of TCR clone 67736 (TRAV12-3, TRAJ17)
CAMTLTGNKLTF

SEQ ID NO: 135472 - protein, 13 aa, Homo sapiens
  CDR3 for beta chain variable domain of TCR clone 67736 (TRBV3-1, TRBJ1-1)
CASSPGVITEAFF

SEQ ID NO: 135473 - protein, 15 aa, Homo sapiens
  CDR3 for alpha chain variable domain of TCR clone 67737 (TRAV3, TRAJ20)
CAVKDIKLSDYKLSF

SEQ ID NO: 135474 - protein, 15 aa, Homo sapiens
  CDR3 for beta chain variable domain of TCR clone 67737 (TRBV7-9, TRBJ1-6)
CASSSPGRGNSPLHF

SEQ ID NO: 135475 - protein, 10 aa, Homo sapiens
  CDR3 for alpha chain variable domain of TCR clone 67738 (TRAV27, TRAJ43)
CAGNNNDMRF

SEQ ID NO: 135476 - protein, 15 aa, Homo sapiens
  CDR3 for beta chain variable domain of TCR clone 67738 (TRBV12-4, TRBJ2-5)
CASSPPTGLQETQYF

SEQ ID NO: 135477 - protein, 16 aa, Homo sapiens
  CDR3 for alpha chain variable domain of TCR clone 67739 (TRAV8-6, TRAJ4)
CAVSERISGGYNKLIF

SEQ ID NO: 135478 - protein, 19 aa, Homo sapiens
  CDR3 for beta chain variable domain of TCR clone 67739 (TRBV19, TRBJ1-5)
CASSISPRKTGGGNQPQHF

SEQ ID NO: 135479 - protein, 13 aa, Homo sapiens
  CDR3 for alpha chain variable domain of TCR clone 67740 (TRAV29/DV5, TRAJ29)
CAASAAGNTPLVF

SEQ ID NO: 135480 - protein, 17 aa, Homo sapiens
  CDR3 for beta chain variable domain of TCR clone 67740 (TRBV7-9, TRBJ2-1)
CASSLVASYPSYNEQFF

SEQ ID NO: 135481 - protein, 15 aa, Homo sapiens
  CDR3 for alpha chain variable domain of TCR clone 67741 (TRAV17, TRAJ28)
CATVDSGAGSYQLTF

SEQ ID NO: 135482 - protein, 12 aa, Homo sapiens
  CDR3 for beta chain variable domain of TCR clone 67741 (TRBV12-4, TRBJ2-7)
CASSLGGYEQYF

SEQ ID NO: 135483 - protein, 11 aa, Homo sapiens
  CDR3 for alpha chain variable domain of TCR clone 67742 (TRAV2, TRAJ21)
CAVFNFNKFYF

SEQ ID NO: 135484 - protein, 14 aa, Homo sapiens
  CDR3 for beta chain variable domain of TCR clone 67742 (TRBV4-1, TRBJ2-2)
CASSQAVNTGELFF

SEQ ID NO: 135485 - protein, 14 aa, Homo sapiens
  CDR3 for alpha chain variable domain of TCR clone 67743 (TRAV13-2, TRAJ29)
CAENIEPGNTPLVF

SEQ ID NO: 135486 - protein, 14 aa, Homo sapiens
  CDR3 for beta chain variable domain of TCR clone 67743 (TRBV19, TRBJ2-2)
CATTGHVNTGELFF

SEQ ID NO: 135487 - protein, 12 aa, Homo sapiens
  CDR3 for alpha chain variable domain of TCR clone 67744 (TRAV3, TRAJ20)
CAERHKVERLQA

SEQ ID NO: 135488 - protein, 15 aa, Homo sapiens
  CDR3 for beta chain variable domain of TCR clone 67744 (TRBV7-9, TRBJ1-6)
CASSSPGRGNSPLHF

SEQ ID NO: 135489 - protein, 12 aa, Homo sapiens
  CDR3 for alpha chain variable domain of TCR clone 67745 (TRAV8-4, TRAJ43)
CAVSVNNNDMRF

SEQ ID NO: 135490 - protein, 13 aa, Homo sapiens
  CDR3 for beta chain variable domain of TCR clone 67745 (TRBV7-9, TRBJ1-2)
CASSVKQNYGYTF

SEQ ID NO: 135491 - protein, 14 aa, Homo sapiens
  CDR3 for alpha chain variable domain of TCR clone 67746 (TRAV13-1, TRAJ44)
CAAKATGTASKLTF

SEQ ID NO: 135492 - protein, 17 aa, Homo sapiens
  CDR3 for beta chain variable domain of TCR clone 67746 (TRBV7-3, TRBJ2-3)
CASSLMKRMRGADMQYF

SEQ ID NO: 135493 - protein, 16 aa, Homo sapiens
  CDR3 for alpha chain variable domain of TCR clone 67747 (TRAV3, TRAJ37)
CAVRPHGSGNPGKLIF

SEQ ID NO: 135494 - protein, 14 aa, Homo sapiens
  CDR3 for beta chain variable domain of TCR clone 67747 (TRBV25-1, TRBJ1-1)
CASTHLGGNTEAFF

SEQ ID NO: 135495 - protein, 11 aa, Homo sapiens
  CDR3 for alpha chain variable domain of TCR clone 67748 (TRAV27, TRAJ43)
CAGANNNDMRF

SEQ ID NO: 135496 - protein, 12 aa, Homo sapiens
  CDR3 for beta chain variable domain of TCR clone 67748 (TRBV11-2, TRBJ2-2)
CASSLGGGELFF

SEQ ID NO: 135497 - protein, 18 aa, Homo sapiens
  CDR3 for alpha chain variable domain of TCR clone 67749 (TRAV26-1, TRAJ56)
CIVRVASRVTGANSKLKF

SEQ ID NO: 135498 - protein, 15 aa, Homo sapiens
  CDR3 for beta chain variable domain of TCR clone 67749 (TRBV7-9, TRBJ2-5)
CASSDTGRGRETQYF

SEQ ID NO: 135499 - protein, 12 aa, Homo sapiens
  CDR3 for alpha chain variable domain of TCR clone 67750 (TRAV13-1, TRAJ15)
CAASQSGTALIF

SEQ ID NO: 135500 - protein, 14 aa, Homo sapiens
  CDR3 for beta chain variable domain of TCR clone 67750 (TRBV19, TRBJ2-2)
CASSTLHRSGELFF

SEQ ID NO: 135501 - protein, 15 aa, Homo sapiens
  CDR3 for alpha chain variable domain of TCR clone 67751 (TRAV13-1, TRAJ44)
CAASRGGGTASKLTF

SEQ ID NO: 135502 - protein, 14 aa, Homo sapiens
  CDR3 for beta chain variable domain of TCR clone 67751 (TRBV7-2, TRBJ2-5)
CASSPRGSSETQYV

SEQ ID NO: 135503 - protein, 11 aa, Homo sapiens
  CDR3 for alpha chain variable domain of TCR clone 67752 (TRAV1-2, TRAJ20)
FAVANDYKLSF

SEQ ID NO: 135504 - protein, 18 aa, Homo sapiens
  CDR3 for beta chain variable domain of TCR clone 67752 (TRBV20-1, TRBJ2-6)
CSAETTPTHGSGANVLTF

SEQ ID NO: 135505 - protein, 15 aa, Homo sapiens
  CDR3 for alpha chain variable domain of TCR clone 67753 (TRAV36/DV7, TRAJ54)
CAVEKPVQGAQKLVF

SEQ ID NO: 135506 - protein, 14 aa, Homo sapiens
  CDR3 for beta chain variable domain of TCR clone 67753 (TRBV4-3, TRBJ2-2)
CASSQGHVAGELFF

SEQ ID NO: 135507 - protein, 14 aa, Homo sapiens
  CDR3 for alpha chain variable domain of TCR clone 67754 (TRAV22, TRAJ57)
CAVELQGGSEKLVF

SEQ ID NO: 135508 - protein, 15 aa, Homo sapiens
  CDR3 for beta chain variable domain of TCR clone 67754 (TRBV20-1, TRBJ2-5)
CSAPPRAGFGETQYF

SEQ ID NO: 135509 - protein, 17 aa, Homo sapiens
  CDR3 for alpha chain variable domain of TCR clone 67755 (TRAV3, TRAJ38)
CAVRDCLNAGNNRKLIW

SEQ ID NO: 135510 - protein, 20 aa, Homo sapiens
  CDR3 for beta chain variable domain of TCR clone 67755 (TRBV7-8, TRBJ2-2)
CASSHLFPGPTIHITGELFF

SEQ ID NO: 135511 - protein, 16 aa, Homo sapiens
  CDR3 for alpha chain variable domain of TCR clone 67756 (TRAV16, TRAJ4)
CITVLPFSGGYNKLIF

SEQ ID NO: 135512 - protein, 14 aa, Homo sapiens
  CDR3 for beta chain variable domain of TCR clone 67756 (TRBV19, TRBJ2-7)
CASSMGQVAIEQYF

SEQ ID NO: 135513 - protein, 16 aa, Homo sapiens
  CDR3 for alpha chain variable domain of TCR clone 67757 (TRAV1-2, TRAJ10)
CAVGGVLTGGGNKLTF

SEQ ID NO: 135514 - protein, 12 aa, Homo sapiens
  CDR3 for beta chain variable domain of TCR clone 67757 (TRBV7-8, TRBJ2-7)
CASSLGGREQYF

SEQ ID NO: 135515 - protein, 14 aa, Homo sapiens
  CDR3 for alpha chain variable domain of TCR clone 67758 (TRAV9-2, TRAJ39)
CALYIYNAGNMLTF

SEQ ID NO: 135516 - protein, 16 aa, Homo sapiens
  CDR3 for beta chain variable domain of TCR clone 67758 (TRBV5-7, TRBJ1-1)
CASSLVGPRGNTEAFF

SEQ ID NO: 135517 - protein, 14 aa, Homo sapiens
  CDR3 for alpha chain variable domain of TCR clone 67759 (TRAV27, TRAJ22)
CAGLPSGSARQLTF

SEQ ID NO: 135518 - protein, 15 aa, Homo sapiens
  CDR3 for beta chain variable domain of TCR clone 67759 (TRBV9, TRBJ1-6)
CASSVAGTGDSPLHF

SEQ ID NO: 135519 - protein, 14 aa, Homo sapiens
  CDR3 for alpha chain variable domain of TCR clone 67760 (TRAV17, TRAJ34)
CATDSLEGNDKLIF

SEQ ID NO: 135520 - protein, 13 aa, Homo sapiens
  CDR3 for beta chain variable domain of TCR clone 67760 (TRBV11-2, TRBJ2-7)
CASSGTRPYEQYF

SEQ ID NO: 135521 - protein, 13 aa, Homo sapiens
  CDR3 for alpha chain variable domain of TCR clone 67761 (TRAV3, TRAJ15)
CAVRDQAGTALIF

SEQ ID NO: 135522 - protein, 12 aa, Homo sapiens
  CDR3 for beta chain variable domain of TCR clone 67761 (TRBV11-2, TRBJ2-2)
CASSLPTGELFF

SEQ ID NO: 135523 - protein, 16 aa, Homo sapiens
  CDR3 for alpha chain variable domain of TCR clone 67762 (TRAV20, TRAJ10)
CAVLRGLTGGGNKLTF

SEQ ID NO: 135524 - protein, 14 aa, Homo sapiens
  CDR3 for beta chain variable domain of TCR clone 67762 (TRBV19, TRBJ1-5)
CASRAPDSVLSQHF

SEQ ID NO: 135525 - protein, 13 aa, Homo sapiens
  CDR3 for alpha chain variable domain of TCR clone 67763 (TRAV1-2, TRAJ9)
CAVLNTGGFKTIF

SEQ ID NO: 135526 - protein, 14 aa, Homo sapiens
  CDR3 for beta chain variable domain of TCR clone 67763 (TRBV7-2, TRBJ2-7)
CASSPKTSFYEQYF

SEQ ID NO: 135527 - protein, 14 aa, Homo sapiens
  CDR3 for alpha chain variable domain of TCR clone 67764 (TRAV17, TRAJ57)
CAMDPQGGSEKLVF

SEQ ID NO: 135528 - protein, 14 aa, Homo sapiens
  CDR3 for beta chain variable domain of TCR clone 67764 (TRBV5-8, TRBJ2-3)
CASSLGQGTDTQYF

SEQ ID NO: 135529 - protein, 14 aa, Homo sapiens
  CDR3 for alpha chain variable domain of TCR clone 67765 (TRAV16, TRAJ48)
CALTPGLGNEKLTF

SEQ ID NO: 135530 - protein, 14 aa, Homo sapiens
  CDR3 for beta chain variable domain of TCR clone 67765 (TRBV7-2, TRBJ2-7)
CASSSISGFSEQYF

SEQ ID NO: 135531 - protein, 15 aa, Homo sapiens
  CDR3 for alpha chain variable domain of TCR clone 67766 (TRAV3, TRAJ5)
CAVRDLDTGRKALTF

SEQ ID NO: 135532 - protein, 14 aa, Homo sapiens
  CDR3 for beta chain variable domain of TCR clone 67766 (TRBV25-1, TRBJ1-1)
CASTHLGGNTEAFF

SEQ ID NO: 135533 - protein, 12 aa, Homo sapiens
  CDR3 for alpha chain variable domain of TCR clone 67767 (TRAV1-2, TRAJ29)
CAVPSGNTPLVF

SEQ ID NO: 135534 - protein, 14 aa, Homo sapiens
  CDR3 for beta chain variable domain of TCR clone 67767 (TRBV6-1, TRBJ1-3)
CASVQGGGGNTMYF

SEQ ID NO: 135535 - protein, 13 aa, Homo sapiens
  CDR3 for alpha chain variable domain of TCR clone 67768 (TRAV17, TRAJ7)
CATDNYGNNRLAF

SEQ ID NO: 135536 - protein, 19 aa, Homo sapiens
  CDR3 for beta chain variable domain of TCR clone 67768 (TRBV25-1, TRBJ2-2)
CAILVYRVDRGRKTGELFF

SEQ ID NO: 135537 - protein, 17 aa, Homo sapiens
  CDR3 for alpha chain variable domain of TCR clone 67769 (TRAV21, TRAJ52)
CCEAFPAGGTSYGKLTF

SEQ ID NO: 135538 - protein, 13 aa, Homo sapiens
  CDR3 for beta chain variable domain of TCR clone 67769 (TRBV10-3, TRBJ2-1)
CAISEFSGREQFF

SEQ ID NO: 135539 - protein, 12 aa, Homo sapiens
  CDR3 for alpha chain variable domain of TCR clone 67770 (TRAV25, TRAJ53)
RQSGGSNYKLTF

SEQ ID NO: 135540 - protein, 15 aa, Homo sapiens
  CDR3 for beta chain variable domain of TCR clone 67770 (TRBV5-1, TRBJ2-2)
CASSWTSPNTGELFF

SEQ ID NO: 135541 - protein, 14 aa, Homo sapiens
  CDR3 for alpha chain variable domain of TCR clone 67771 (TRAV38-1, TRAJ45)
CAYYSGGGADGLTF

SEQ ID NO: 135542 - protein, 15 aa, Homo sapiens
  CDR3 for beta chain variable domain of TCR clone 67771 (TRBV10-3, TRBJ2-3)
CAISLTSGGTDTQYF

SEQ ID NO: 135543 - protein, 17 aa, Homo sapiens
  CDR3 for alpha chain variable domain of TCR clone 67772 (TRAV3, TRAJ42)
CAVRDRGYGGSQGNLIF

SEQ ID NO: 135544 - protein, 12 aa, Homo sapiens
  CDR3 for beta chain variable domain of TCR clone 67772 (TRBV29-1, TRBJ2-2)
CSVDKYTGELFF

SEQ ID NO: 135545 - protein, 12 aa, Homo sapiens
  CDR3 for alpha chain variable domain of TCR clone 67773 (TRAV13-1, TRAJ15)
CAASQAGTALLF

SEQ ID NO: 135546 - protein, 14 aa, Homo sapiens
  CDR3 for beta chain variable domain of TCR clone 67773 (TRBV19, TRBJ2-2)
CASSTLHRSGELFF

SEQ ID NO: 135547 - protein, 13 aa, Homo sapiens
  CDR3 for alpha chain variable domain of TCR clone 67774 (TRAV27, TRAJ17)
CAGAATAGNKLTF

SEQ ID NO: 135548 - protein, 15 aa, Homo sapiens
  CDR3 for beta chain variable domain of TCR clone 67774 (TRBV5-1, TRBJ2-3)
CASRNQAGGTDTQYF

SEQ ID NO: 135549 - protein, 15 aa, Homo sapiens
  CDR3 for alpha chain variable domain of TCR clone 67775 (TRAV8-4, TRAJ15)
CAVSDPVQAGTALIF

SEQ ID NO: 135550 - protein, 14 aa, Homo sapiens
  CDR3 for beta chain variable domain of TCR clone 67775 (TRBV7-2, TRBJ1-3)
CASSLSRSGNAIYF

SEQ ID NO: 135551 - protein, 13 aa, Homo sapiens
  CDR3 for alpha chain variable domain of TCR clone 67776 (TRAV13-1, TRAJ39)
CSKYSNAGNMLTF

SEQ ID NO: 135552 - protein, 16 aa, Homo sapiens
  CDR3 for beta chain variable domain of TCR clone 67776 (TRBV20-1, TRBJ1-4)
CSAPGQDLLTNEKLFF

SEQ ID NO: 135553 - protein, 15 aa, Homo sapiens
  CDR3 for alpha chain variable domain of TCR clone 67777 (TRAV14/DV4, TRAJ3)
CAMRAGYSSASKIIF

SEQ ID NO: 135554 - protein, 16 aa, Homo sapiens
  CDR3 for beta chain variable domain of TCR clone 67777 (TRBV7-6, TRBJ2-5)
CASSETSGRAVETQYF

SEQ ID NO: 135555 - protein, 17 aa, Homo sapiens
  CDR3 for alpha chain variable domain of TCR clone 67778 (TRAV3, TRAJ6)
CAVRDGPRAGGSYIPTF

SEQ ID NO: 135556 - protein, 17 aa, Homo sapiens
  CDR3 for beta chain variable domain of TCR clone 67778 (TRBV6-3, TRBJ2-1)
CASSYSSGTRGLDEQFF

SEQ ID NO: 135557 - protein, 16 aa, Homo sapiens
  CDR3 for alpha chain variable domain of TCR clone 67779 (TRAV1-2, TRAJ10)
CAVRGVLTGGGNKLTF

SEQ ID NO: 135558 - protein, 13 aa, Homo sapiens
  CDR3 for beta chain variable domain of TCR clone 67779 (TRBV11-2, TRBJ2-5)
CASSRGPSETQYF

SEQ ID NO: 135559 - protein, 15 aa, Homo sapiens
  CDR3 for alpha chain variable domain of TCR clone 67780 (TRAV21, TRAJ17)
CAVRRSPSCRQQANF

SEQ ID NO: 135560 - protein, 16 aa, Homo sapiens
  CDR3 for beta chain variable domain of TCR clone 67780 (TRBV7-9, TRBJ2-3)
CASSPWREVGTDTQYF

SEQ ID NO: 135561 - protein, 16 aa, Homo sapiens
  CDR3 for alpha chain variable domain of TCR clone 67781 (TRAV3, TRAJ37)
CAVGGKGSGNTGKLIF

SEQ ID NO: 135562 - protein, 15 aa, Homo sapiens
  CDR3 for beta chain variable domain of TCR clone 67781 (TRBV7-3, TRBJ2-2)
CASSETGQGTGELFF

SEQ ID NO: 135563 - protein, 16 aa, Homo sapiens
  CDR3 for alpha chain variable domain of TCR clone 67782 (TRAV21, TRAJ37)
CAVRPRGSSNTGKLIF

SEQ ID NO: 135564 - protein, 15 aa, Homo sapiens
  CDR3 for beta chain variable domain of TCR clone 67782 (TRBV20-1, TRBJ2-7)
CSARDRVSGMDEQYF

SEQ ID NO: 135565 - protein, 13 aa, Homo sapiens
  CDR3 for alpha chain variable domain of TCR clone 67783 (TRAV13-1, TRAJ53)
QAARGGSNYKLTF

SEQ ID NO: 135566 - protein, 16 aa, Homo sapiens
  CDR3 for beta chain variable domain of TCR clone 67783 (TRBV28, TRBJ2-6)
CASSNRRGSGANVLTF

SEQ ID NO: 135567 - protein, 12 aa, Homo sapiens
  CDR3 for alpha chain variable domain of TCR clone 67784 (TRAV1-2, TRAJ9)
CAGYTGCFKTIF

SEQ ID NO: 135568 - protein, 15 aa, Homo sapiens
  CDR3 for beta chain variable domain of TCR clone 67784 (TRBV11-2, TRBJ2-1)
CASSPAGQSLNEQFF

SEQ ID NO: 135569 - protein, 19 aa, Homo sapiens
  CDR3 for alpha chain variable domain of TCR clone 67785 (TRAV25, TRAJ43)
TATQTTDVGTYFCAVFMRF

SEQ ID NO: 135570 - protein, 13 aa, Homo sapiens
  CDR3 for beta chain variable domain of TCR clone 67785 (TRBV7-9, TRBJ1-2)
CASSLKQNYGYTL

SEQ ID NO: 135571 - protein, 14 aa, Homo sapiens
  CDR3 for alpha chain variable domain of TCR clone 67786 (TRAV16, TRAJ17)
CALSGRAAGNKLTF

SEQ ID NO: 135572 - protein, 16 aa, Homo sapiens
  CDR3 for beta chain variable domain of TCR clone 67786 (TRBV5-1, TRBJ1-1)
CASSSGGNSLNTEAFF

SEQ ID NO: 135573 - protein, 14 aa, Homo sapiens
  CDR3 for alpha chain variable domain of TCR clone 67787 (TRAV29/DV5, TRAJ44)
CAASALGTASKLTF

SEQ ID NO: 135574 - protein, 16 aa, Homo sapiens
  CDR3 for beta chain variable domain of TCR clone 67787 (TRBV27, TRBJ2-2)
CASSFRGLVRTGELFF

SEQ ID NO: 135575 - protein, 13 aa, Homo sapiens
  CDR3 for alpha chain variable domain of TCR clone 67788 (TRAV30, TRAJ6)
CGFIEGGSYIPTF

SEQ ID NO: 135576 - protein, 13 aa, Homo sapiens
  CDR3 for beta chain variable domain of TCR clone 67788 (TRBV5-4, TRBJ2-5)
CASSPVSQETQDF

SEQ ID NO: 135577 - protein, 14 aa, Homo sapiens
  CDR3 for alpha chain variable domain of TCR clone 67789 (TRAV13-2, TRAJ58)
CAERWLTSGSRLTF

SEQ ID NO: 135578 - protein, 16 aa, Homo sapiens
  CDR3 for beta chain variable domain of TCR clone 67789 (TRBV18, TRBJ1-4)
CASSLQTVATNGKLFF

SEQ ID NO: 135579 - protein, 15 aa, Homo sapiens
  CDR3 for alpha chain variable domain of TCR clone 67790 (TRAV3, TRAJ20)
CAVRDIKLSDYKLSF

SEQ ID NO: 135580 - protein, 15 aa, Homo sapiens
  CDR3 for beta chain variable domain of TCR clone 67790 (TRBV7-9, TRBJ1-6)
CASSPPGRGNSPLHF

SEQ ID NO: 135581 - protein, 15 aa, Homo sapiens
  CDR3 for alpha chain variable domain of TCR clone 67791 (TRAV2, TRAJ15)
CAVEARGQAGTALIF

SEQ ID NO: 135582 - protein, 13 aa, Homo sapiens
  CDR3 for beta chain variable domain of TCR clone 67791 (TRBV10-2, TRBJ2-7)
CASGASGGYEQYF

SEQ ID NO: 135583 - protein, 13 aa, Homo sapiens
  CDR3 for alpha chain variable domain of TCR clone 67792 (TRAV2, TRAJ23)
CAVMGNQGGKLIF

SEQ ID NO: 135584 - protein, 15 aa, Homo sapiens
  CDR3 for beta chain variable domain of TCR clone 67792 (TRBV11-3, TRBJ2-1)
CASSSSTISYNEQFF

SEQ ID NO: 135585 - protein, 15 aa, Homo sapiens
  CDR3 for alpha chain variable domain of TCR clone 67793 (TRAV12-3, TRAJ6)
CAMSATSGGSYIPTF

SEQ ID NO: 135586 - protein, 16 aa, Homo sapiens
  CDR3 for beta chain variable domain of TCR clone 67793 (TRBV20-1, TRBJ1-2)
CSASMGQGVANYGYTF

SEQ ID NO: 135587 - protein, 14 aa, Homo sapiens
  CDR3 for alpha chain variable domain of TCR clone 67794 (TRAV29/DV5, TRAJ48)
CAAMALFGNEKLTF

SEQ ID NO: 135588 - protein, 15 aa, Homo sapiens
  CDR3 for beta chain variable domain of TCR clone 67794 (TRBV7-2, TRBJ2-1)
CASTHGAGIYNEQFF

SEQ ID NO: 135589 - protein, 14 aa, Homo sapiens
  CDR3 for alpha chain variable domain of TCR clone 67795 (TRAV1-1, TRAJ34)
CAVSPSYNTDKLIF

SEQ ID NO: 135590 - protein, 12 aa, Homo sapiens
  CDR3 for beta chain variable domain of TCR clone 67795 (TRBV14, TRBJ2-5)
CASSQLKETQYF

SEQ ID NO: 135591 - protein, 13 aa, Homo sapiens
  CDR3 for alpha chain variable domain of TCR clone 67796 (TRAV30, TRAJ34)
CGTVGYNTDKLTF

SEQ ID NO: 135592 - protein, 16 aa, Homo sapiens
  CDR3 for beta chain variable domain of TCR clone 67796 (TRBV7-9, TRBJ1-2)
CASSLGSSSGEDGYTF

SEQ ID NO: 135593 - protein, 13 aa, Homo sapiens
  CDR3 for alpha chain variable domain of TCR clone 67797 (TRAV20, TRAJ37)
CAGCSSNTGKLIF

SEQ ID NO: 135594 - protein, 14 aa, Homo sapiens
  CDR3 for beta chain variable domain of TCR clone 67797 (TRBV11-2, TRBJ2-7)
CASSSTGEGYEQYF

SEQ ID NO: 135595 - protein, 14 aa, Homo sapiens
  CDR3 for alpha chain variable domain of TCR clone 67798 (TRAV36/DV7, TRAJ13)
WGSGENGGYQKVTF

SEQ ID NO: 135596 - protein, 15 aa, Homo sapiens
  CDR3 for beta chain variable domain of TCR clone 67798 (TRBV19, TRBJ2-1)
CASNTGTSSYNEQFF

SEQ ID NO: 135597 - protein, 14 aa, Homo sapiens
  CDR3 for alpha chain variable domain of TCR clone 67799 (TRAV14/DV4, TRAJ15)
CAMRRDQAGTALIF

SEQ ID NO: 135598 - protein, 14 aa, Homo sapiens
  CDR3 for beta chain variable domain of TCR clone 67799 (TRBV7-9, TRBJ2-3)
CASSLEQGTNTQYF

SEQ ID NO: 135599 - protein, 10 aa, Homo sapiens
  CDR3 for alpha chain variable domain of TCR clone 67800 (TRAV5, TRAJ34)
CAEDTDKLIF

SEQ ID NO: 135600 - protein, 13 aa, Homo sapiens
  CDR3 for beta chain variable domain of TCR clone 67800 (TRBV10-3, TRBJ2-7)
CASKLAVNYEQYF

SEQ ID NO: 135601 - protein, 18 aa, Homo sapiens
  CDR3 for alpha chain variable domain of TCR clone 67801 (TRAV26-1, TRAJ52)
CIVSVAGAGGTSYGKLTF

SEQ ID NO: 135602 - protein, 13 aa, Homo sapiens
  CDR3 for beta chain variable domain of TCR clone 67801 (TRBV7-8, TRBJ1-2)
CASSAQSYYGYTF

SEQ ID NO: 135603 - protein, 14 aa, Homo sapiens
  CDR3 for alpha chain variable domain of TCR clone 67802 (TRAV1-2, TRAJ16)
RAVNRFSDGQKLLF

SEQ ID NO: 135604 - protein, 16 aa, Homo sapiens
  CDR3 for beta chain variable domain of TCR clone 67802 (TRBV20-1, TRBJ1-4)
CSAPGQGLLTNEKLFF

SEQ ID NO: 135605 - protein, 12 aa, Homo sapiens
  CDR3 for alpha chain variable domain of TCR clone 67803 (TRAV8-6, TRAJ43)
RAVSNNNNDMRF

SEQ ID NO: 135606 - protein, 15 aa, Homo sapiens
  CDR3 for beta chain variable domain of TCR clone 67803 (TRBV7-3, TRBJ2-6)
CASSLGGSGANVLTF

SEQ ID NO: 135607 - protein, 11 aa, Homo sapiens
  CDR3 for alpha chain variable domain of TCR clone 67804 (TRAV2, TRAJ33)
CAVESNYQLIW

SEQ ID NO: 135608 - protein, 16 aa, Homo sapiens
  CDR3 for beta chain variable domain of TCR clone 67804 (TRBV20-1, TRBJ2-3)
CSAVRDRGPIADTQYF

SEQ ID NO: 135609 - protein, 13 aa, Homo sapiens
  CDR3 for alpha chain variable domain of TCR clone 67805 (TRAV13-2, TRAJ13)
CAERPGGYQKVTF

SEQ ID NO: 135610 - protein, 14 aa, Homo sapiens
  CDR3 for beta chain variable domain of TCR clone 67805 (TRBV23-1, TRBJ2-5)
CASSFLRSQETQYL

SEQ ID NO: 135611 - protein, 16 aa, Homo sapiens
  CDR3 for alpha chain variable domain of TCR clone 67806 (TRAV12-2, TRAJ6)
CAAPLAGSGGSSIPTF

SEQ ID NO: 135612 - protein, 10 aa, Homo sapiens
  CDR3 for beta chain variable domain of TCR clone 67806 (TRBV28, TRBJ1-2)
CASSSDRAVF

SEQ ID NO: 135613 - protein, 13 aa, Homo sapiens
  CDR3 for alpha chain variable domain of TCR clone 67807 (TRAV8-6, TRAJ8)
CTVSNTGFQKLVF

SEQ ID NO: 135614 - protein, 15 aa, Homo sapiens
  CDR3 for beta chain variable domain of TCR clone 67807 (TRBV28, TRBJ2-5)
CASSSGRTIQETQYF

SEQ ID NO: 135615 - protein, 16 aa, Homo sapiens
  CDR3 for alpha chain variable domain of TCR clone 67808 (TRAV12-3, TRAJ45)
CAMGWGSGGGADELTF

SEQ ID NO: 135616 - protein, 15 aa, Homo sapiens
  CDR3 for beta chain variable domain of TCR clone 67808 (TRBV3-1, TRBJ1-2)
CASSHPGTPGYGYTF

SEQ ID NO: 135617 - protein, 11 aa, Homo sapiens
  CDR3 for alpha chain variable domain of TCR clone 67809 (TRAV17, TRAJ21)
CATGNSNKFYF

SEQ ID NO: 135618 - protein, 16 aa, Homo sapiens
  CDR3 for beta chain variable domain of TCR clone 67809 (TRBV2, TRBJ2-1)
CASSANPRDWQAEQFF

SEQ ID NO: 135619 - protein, 12 aa, Homo sapiens
  CDR3 for alpha chain variable domain of TCR clone 67810 (TRAV1-1, TRAJ9)
CALNTGGFKTIF

SEQ ID NO: 135620 - protein, 14 aa, Homo sapiens
  CDR3 for beta chain variable domain of TCR clone 67810 (TRBV19, TRBJ2-1)
CASPTFVLSGEQFF

SEQ ID NO: 135621 - protein, 12 aa, Homo sapiens
  CDR3 for alpha chain variable domain of TCR clone 67811 (TRAV17, TRAJ39)
CATGAAGNMLTF

SEQ ID NO: 135622 - protein, 16 aa, Homo sapiens
  CDR3 for beta chain variable domain of TCR clone 67811 (TRBV10-3, TRBJ2-1)
CAISGVGDGGGGEQFF

SEQ ID NO: 135623 - protein, 14 aa, Homo sapiens
  CDR3 for alpha chain variable domain of TCR clone 67812 (TRAV1-2, TRAJ16)
CAVNRFSDVQKLLF

SEQ ID NO: 135624 - protein, 15 aa, Homo sapiens
  CDR3 for beta chain variable domain of TCR clone 67812 (TRBV2, TRBJ2-5)
CASSSSVAGGETQYF

SEQ ID NO: 135625 - protein, 15 aa, Homo sapiens
  CDR3 for alpha chain variable domain of TCR clone 67813 (TRAV29/DV5, TRAJ29)
CAASERSSRNTPLVF

SEQ ID NO: 135626 - protein, 17 aa, Homo sapiens
  CDR3 for beta chain variable domain of TCR clone 67813 (TRBV4-1, TRBJ1-4)
CASSQEGPRGVEEKLFF

SEQ ID NO: 135627 - protein, 15 aa, Homo sapiens
  CDR3 for alpha chain variable domain of TCR clone 67814 (TRAV26-1, TRAJ23)
CIVRVAGYQGGKLIF

SEQ ID NO: 135628 - protein, 18 aa, Homo sapiens
  CDR3 for beta chain variable domain of TCR clone 67814 (TRBV28, TRBJ2-1)
CASSSTSGRANSYNEQFF

SEQ ID NO: 135629 - protein, 14 aa, Homo sapiens
  CDR3 for alpha chain variable domain of TCR clone 67815 (TRAV9-2, TRAJ39)
CALYIYNAGNMLTF

SEQ ID NO: 135630 - protein, 14 aa, Homo sapiens
  CDR3 for beta chain variable domain of TCR clone 67815 (TRBV6-1, TRBJ1-2)
CASSTGWPPTGYTF

SEQ ID NO: 135631 - protein, 16 aa, Homo sapiens
  CDR3 for alpha chain variable domain of TCR clone 67816 (TRAV38-1, TRAJ45)
CAFMKGSGGGADGLTL

SEQ ID NO: 135632 - protein, 15 aa, Homo sapiens
  CDR3 for beta chain variable domain of TCR clone 67816 (TRBV20-1, TRBJ2-7)
CSAREGRDSLYEQYF

SEQ ID NO: 135633 - protein, 16 aa, Homo sapiens
  CDR3 for alpha chain variable domain of TCR clone 67817 (TRAV3, TRAJ10)
CAVRDMRAGGGNKLTF

SEQ ID NO: 135634 - protein, 16 aa, Homo sapiens
  CDR3 for beta chain variable domain of TCR clone 67817 (TRBV2, TRBJ2-1)
CASSVGGSLSYNEQFF

SEQ ID NO: 135635 - protein, 15 aa, Homo sapiens
  CDR3 for alpha chain variable domain of TCR clone 67818 (TRAV3, TRAJ22)
CAVRDRGGSARELTF

SEQ ID NO: 135636 - protein, 14 aa, Homo sapiens
  CDR3 for beta chain variable domain of TCR clone 67818 (TRBV19, TRBJ2-1)
CASSRLASINEQFF

SEQ ID NO: 135637 - protein, 15 aa, Homo sapiens
  CDR3 for alpha chain variable domain of TCR clone 67819 (TRAV21, TRAJ53)
CATLNSGGSNYKLTF

SEQ ID NO: 135638 - protein, 13 aa, Homo sapiens
  CDR3 for beta chain variable domain of TCR clone 67819 (TRBV12-4, TRBJ2-7)
CASSLSGVYEQYF

SEQ ID NO: 135639 - protein, 15 aa, Homo sapiens
  CDR3 for alpha chain variable domain of TCR clone 67820 (TRAV8-3, TRAJ11)
CAVGLLNSGYSTLTF

SEQ ID NO: 135640 - protein, 15 aa, Homo sapiens
  CDR3 for beta chain variable domain of TCR clone 67820 (TRBV7-9, TRBJ1-5)
CASSQGHQPNQPQHF

SEQ ID NO: 135641 - protein, 14 aa, Homo sapiens
  CDR3 for alpha chain variable domain of TCR clone 67821 (TRAV4, TRAJ9)
CLVGSGTGGFKTIF

SEQ ID NO: 135642 - protein, 15 aa, Homo sapiens
  CDR3 for beta chain variable domain of TCR clone 67821 (TRBV7-2, TRBJ2-1)
CASSLASGGVNEQFF

SEQ ID NO: 135643 - protein, 14 aa, Homo sapiens
  CDR3 for alpha chain variable domain of TCR clone 67822 (TRAV12-1, TRAJ13)
CVVIDSWGYQKVTF

SEQ ID NO: 135644 - protein, 13 aa, Homo sapiens
  CDR3 for beta chain variable domain of TCR clone 67822 (TRBV20-1, TRBJ1-1)
CSAPPGGHTEAFF

SEQ ID NO: 135645 - protein, 14 aa, Homo sapiens
  CDR3 for alpha chain variable domain of TCR clone 67823 (TRAV12-3, TRAJ10)
SHLPLTGGGNKLTF

SEQ ID NO: 135646 - protein, 16 aa, Homo sapiens
  CDR3 for beta chain variable domain of TCR clone 67823 (TRBV19, TRBJ1-1)
CASRFGGPVTGTEASF

SEQ ID NO: 135647 - protein, 12 aa, Homo sapiens
  CDR3 for alpha chain variable domain of TCR clone 67824 (TRAV21, TRAJ33)
CAFQDSDYQLIW

SEQ ID NO: 135648 - protein, 14 aa, Homo sapiens
  CDR3 for beta chain variable domain of TCR clone 67824 (TRBV28, TRBJ2-1)
CASSPGEGGNEQFF

SEQ ID NO: 135649 - protein, 14 aa, Homo sapiens
  CDR3 for alpha chain variable domain of TCR clone 67825 (TRAV8-4, TRAJ13)
CAVTLSGGYQKVTF

SEQ ID NO: 135650 - protein, 17 aa, Homo sapiens
  CDR3 for beta chain variable domain of TCR clone 67825 (TRBV7-3, TRBJ2-3)
CASSLMKRMRGADTQYF

SEQ ID NO: 135651 - protein, 17 aa, Homo sapiens
  CDR3 for alpha chain variable domain of TCR clone 67826 (TRAV3, TRAJ42)
CAVRDRHYGGSQGNLIF

SEQ ID NO: 135652 - protein, 15 aa, Homo sapiens
  CDR3 for beta chain variable domain of TCR clone 67826 (TRBV6-6, TRBJ2-7)
CASSYSYGGSYEQYF

SEQ ID NO: 135653 - protein, 15 aa, Homo sapiens
  CDR3 for alpha chain variable domain of TCR clone 67827 (TRAV13-1, TRAJ43)
CAATPELGGNNDMRF

SEQ ID NO: 135654 - protein, 15 aa, Homo sapiens
  CDR3 for beta chain variable domain of TCR clone 67827 (TRBV10-2, TRBJ2-6)
CASSEQGTGANVLTS

SEQ ID NO: 135655 - protein, 15 aa, Homo sapiens
  CDR3 for alpha chain variable domain of TCR clone 67828 (TRAV8-4, TRAJ47)
CAVRDPEEYGNKLVF

SEQ ID NO: 135656 - protein, 15 aa, Homo sapiens
  CDR3 for beta chain variable domain of TCR clone 67828 (TRBV11-2, TRBJ2-1)
CASSLGPDSYNEQFF

SEQ ID NO: 135657 - protein, 13 aa, Homo sapiens
  CDR3 for alpha chain variable domain of TCR clone 67829 (TRAV26-1, TRAJ33)
CIVRVNSNYQLIW

SEQ ID NO: 135658 - protein, 15 aa, Homo sapiens
  CDR3 for beta chain variable domain of TCR clone 67829 (TRBV7-2, TRBJ1-5)
CASSFSAGINQPQHF

SEQ ID NO: 135659 - protein, 14 aa, Homo sapiens
  CDR3 for alpha chain variable domain of TCR clone 67830 (TRAV23/DV6, TRAJ37)
CAASTTGNTGKLTF

SEQ ID NO: 135660 - protein, 16 aa, Homo sapiens
  CDR3 for beta chain variable domain of TCR clone 67830 (TRBV24-1, TRBJ2-1)
CATSDLAGPTYNEQFF

SEQ ID NO: 135661 - protein, 14 aa, Homo sapiens
  CDR3 for alpha chain variable domain of TCR clone 67831 (TRAV1-2, TRAJ48)
CAVREDTGFQKLVF

SEQ ID NO: 135662 - protein, 16 aa, Homo sapiens
  CDR3 for beta chain variable domain of TCR clone 67831 (TRBV7-9, TRBJ2-1)
CASSDVAGGSYNEQFF

SEQ ID NO: 135663 - protein, 15 aa, Homo sapiens
  CDR3 for alpha chain variable domain of TCR clone 67832 (TRAV12-1, TRAJ42)
CVVTRDGRSQGNLIF

SEQ ID NO: 135664 - protein, 14 aa, Homo sapiens
  CDR3 for beta chain variable domain of TCR clone 67832 (TRBV11-2, TRBJ2-3)
CASSLGGGANTQYF

SEQ ID NO: 135665 - protein, 16 aa, Homo sapiens
  CDR3 for alpha chain variable domain of TCR clone 67833 (TRAV38-1, TRAJ37)
YAFKGDGSSNTGKLIF

SEQ ID NO: 135666 - protein, 13 aa, Homo sapiens
  CDR3 for beta chain variable domain of TCR clone 67833 (TRBV12-4, TRBJ2-5)
CASSLFRRETQYF

SEQ ID NO: 135667 - protein, 18 aa, Homo sapiens
  CDR3 for alpha chain variable domain of TCR clone 67834 (TRAV12-3, TRAJ52)
CAMSVGVAGGTSYGKLTF

SEQ ID NO: 135668 - protein, 15 aa, Homo sapiens
  CDR3 for beta chain variable domain of TCR clone 67834 (TRBV27, TRBJ1-6)
CASSFDRGLGSPLHF

SEQ ID NO: 135669 - protein, 13 aa, Homo sapiens
  CDR3 for alpha chain variable domain of TCR clone 67835 (TRAV12-3, TRAJ9)
CAMRNTGGFKTIV

SEQ ID NO: 135670 - protein, 14 aa, Homo sapiens
  CDR3 for beta chain variable domain of TCR clone 67835 (TRBV11-2, TRBJ2-7)
CASSSTGEGYEQYF

SEQ ID NO: 135671 - protein, 11 aa, Homo sapiens
  CDR3 for alpha chain variable domain of TCR clone 67836 (TRAV12-1, TRAJ21)
CVVYNFNNFYF

SEQ ID NO: 135672 - protein, 14 aa, Homo sapiens
  CDR3 for beta chain variable domain of TCR clone 67836 (TRBV19, TRBJ2-7)
CASSMGQGAIEQYF

SEQ ID NO: 135673 - protein, 17 aa, Homo sapiens
  CDR3 for alpha chain variable domain of TCR clone 67837 (TRAV8-6, TRAJ58)
CAVSSYVGETSGSRLTF

SEQ ID NO: 135674 - protein, 14 aa, Homo sapiens
  CDR3 for beta chain variable domain of TCR clone 67837 (TRBV4-3, TRBJ2-1)
CASGLDRAYNEQFF

SEQ ID NO: 135675 - protein, 15 aa, Homo sapiens
  CDR3 for alpha chain variable domain of TCR clone 67838 (TRAV13-1, TRAJ5)
CAVYIRDTGRRALTF

SEQ ID NO: 135676 - protein, 13 aa, Homo sapiens
  CDR3 for beta chain variable domain of TCR clone 67838 (TRBV12-4, TRBJ2-2)
CASSITGSGELFF

SEQ ID NO: 135677 - protein, 13 aa, Homo sapiens
  CDR3 for alpha chain variable domain of TCR clone 67839 (TRAV23/DV6, TRAJ15)
CAALPASRNCSDL

SEQ ID NO: 135678 - protein, 14 aa, Homo sapiens
  CDR3 for beta chain variable domain of TCR clone 67839 (TRBV7-9, TRBJ1-2)
CASSRQGANYGYTF

SEQ ID NO: 135679 - protein, 13 aa, Homo sapiens
  CDR3 for alpha chain variable domain of TCR clone 67840 (TRAV17, TRAJ9)
CATDYTGGFKTIF

SEQ ID NO: 135680 - protein, 11 aa, Homo sapiens
  CDR3 for beta chain variable domain of TCR clone 67840 (TRBV19, TRBJ2-2)
CASRYSGELFF

SEQ ID NO: 135681 - protein, 13 aa, Homo sapiens
  CDR3 for alpha chain variable domain of TCR clone 67841 (TRAV12-1, TRAJ21)
CVVIGDNFNKFYF

SEQ ID NO: 135682 - protein, 14 aa, Homo sapiens
  CDR3 for beta chain variable domain of TCR clone 67841 (TRBV7-3, TRBJ2-2)
CVSSLYPLTGELFF

SEQ ID NO: 135683 - protein, 19 aa, Homo sapiens
  CDR3 for alpha chain variable domain of TCR clone 67842 (TRAV2, TRAJ20)
ILQVREADAAVYRDCKLSF

SEQ ID NO: 135684 - protein, 12 aa, Homo sapiens
  CDR3 for beta chain variable domain of TCR clone 67842 (TRBV11-2, TRBJ2-1)
CAGSPGNNEQFF

SEQ ID NO: 135685 - protein, 16 aa, Homo sapiens
  CDR3 for alpha chain variable domain of TCR clone 67843 (TRAV13-1, TRAJ10)
CAASSHFTGGGNTLTF

SEQ ID NO: 135686 - protein, 15 aa, Homo sapiens
  CDR3 for beta chain variable domain of TCR clone 67843 (TRBV7-9, TRBJ1-6)
CASSSPGRGNSPLHF

SEQ ID NO: 135687 - protein, 14 aa, Homo sapiens
  CDR3 for alpha chain variable domain of TCR clone 67844 (TRAV13-2, TRAJ43)
CAEIPTYNNNDMRF

SEQ ID NO: 135688 - protein, 13 aa, Homo sapiens
  CDR3 for beta chain variable domain of TCR clone 67844 (TRBV19, TRBJ1-2)
CASSVPGQDGYTF

SEQ ID NO: 135689 - protein, 13 aa, Homo sapiens
  CDR3 for alpha chain variable domain of TCR clone 67845 (TRAV2, TRAJ12)
CAVGVDSSYKLIF

SEQ ID NO: 135690 - protein, 13 aa, Homo sapiens
  CDR3 for beta chain variable domain of TCR clone 67845 (TRBV20-1, TRBJ2-1)
CSARSSPRDEQFF

SEQ ID NO: 135691 - protein, 15 aa, Homo sapiens
  CDR3 for alpha chain variable domain of TCR clone 67846 (TRAV13-1, TRAJ15)
CAASIERQAGTALVF

SEQ ID NO: 135692 - protein, 13 aa, Homo sapiens
  CDR3 for beta chain variable domain of TCR clone 67846 (TRBV5-1, TRBJ2-7)
CASSATGGNEQYF

SEQ ID NO: 135693 - protein, 11 aa, Homo sapiens
  CDR3 for alpha chain variable domain of TCR clone 67847 (TRAV35, TRAJ34)
CWARNTDKLIF

SEQ ID NO: 135694 - protein, 16 aa, Homo sapiens
  CDR3 for beta chain variable domain of TCR clone 67847 (TRBV2, TRBJ1-1)
CASSPPNRGMNTEAFF

SEQ ID NO: 135695 - protein, 12 aa, Homo sapiens
  CDR3 for alpha chain variable domain of TCR clone 67848 (TRAV12-1, TRAJ40)
CVVYSGTYKYIF

SEQ ID NO: 135696 - protein, 14 aa, Homo sapiens
  CDR3 for beta chain variable domain of TCR clone 67848 (TRBV20-1, TRBJ2-3)
CSARGGASTDTQYF

SEQ ID NO: 135697 - protein, 15 aa, Homo sapiens
  CDR3 for alpha chain variable domain of TCR clone 67849 (TRAV21, TRAJ40)
CAVRPQTSGTYKYIF

SEQ ID NO: 135698 - protein, 17 aa, Homo sapiens
  CDR3 for beta chain variable domain of TCR clone 67849 (TRBV7-8, TRBJ2-6)
CASSAGTGGAGANVLTF

SEQ ID NO: 135699 - protein, 10 aa, Homo sapiens
  CDR3 for alpha chain variable domain of TCR clone 67850 (TRAV23/DV6, TRAJ31)
CARGGSRLMF

SEQ ID NO: 135700 - protein, 14 aa, Homo sapiens
  CDR3 for beta chain variable domain of TCR clone 67850 (TRBV7-8, TRBJ1-2)
CASSPDSLSYGYTF

SEQ ID NO: 135701 - protein, 22 aa, Homo sapiens
  CDR3 for alpha chain variable domain of TCR clone 67851 (TRAV21, TRAJ35)
CAVMPIGFGNVLHCGSGPPVIV

SEQ ID NO: 135702 - protein, 12 aa, Homo sapiens
  CDR3 for beta chain variable domain of TCR clone 67851 (TRBV7-9, TRBJ2-7)
CASSIKREEQYF

SEQ ID NO: 135703 - protein, 14 aa, Homo sapiens
  CDR3 for alpha chain variable domain of TCR clone 67852 (TRAV1-2, TRAJ8)
CAVREDTGFQKLVF

SEQ ID NO: 135704 - protein, 16 aa, Homo sapiens
  CDR3 for beta chain variable domain of TCR clone 67852 (TRBV7-6, TRBJ2-6)
CASSIPGLSGANVLTF

SEQ ID NO: 135705 - protein, 14 aa, Homo sapiens
  CDR3 for alpha chain variable domain of TCR clone 67853 (TRAV12-1, TRAJ34)
CVVNLDYNTDKLIF

SEQ ID NO: 135706 - protein, 20 aa, Homo sapiens
  CDR3 for beta chain variable domain of TCR clone 67853 (TRBV7-3, TRBJ2-7)
CARSPRGLAGMVAVLRAGHQ

SEQ ID NO: 135707 - protein, 15 aa, Homo sapiens
  CDR3 for alpha chain variable domain of TCR clone 67854 (TRAV3, TRAJ17)
CSVSPKEAAGNKLTF

SEQ ID NO: 135708 - protein, 12 aa, Homo sapiens
  CDR3 for beta chain variable domain of TCR clone 67854 (TRBV7-9, TRBJ1-6)
CASSLMTSPLHF

SEQ ID NO: 135709 - protein, 15 aa, Homo sapiens
  CDR3 for alpha chain variable domain of TCR clone 67855 (TRAV17, TRAJ16)
CATALRFSDGQKLLF

SEQ ID NO: 135710 - protein, 13 aa, Homo sapiens
  CDR3 for beta chain variable domain of TCR clone 67855 (TRBV19, TRBJ2-5)
CASSETAPETQYF

SEQ ID NO: 135711 - protein, 12 aa, Homo sapiens
  CDR3 for alpha chain variable domain of TCR clone 67856 (TRAV3, TRAJ20)
CAVRDGDYKLSF

SEQ ID NO: 135712 - protein, 19 aa, Homo sapiens
  CDR3 for beta chain variable domain of TCR clone 67856 (TRBV19, TRBJ2-5)
CASSIGQVTDFFLGETQYF

SEQ ID NO: 135713 - protein, 16 aa, Homo sapiens
  CDR3 for alpha chain variable domain of TCR clone 67857 (TRAV35, TRAJ28)
CAGQGYSGAGSYQLTF

SEQ ID NO: 135714 - protein, 13 aa, Homo sapiens
  CDR3 for beta chain variable domain of TCR clone 67857 (TRBV19, TRBJ1-2)
CASSQGQVYGYTF

SEQ ID NO: 135715 - protein, 14 aa, Homo sapiens
  CDR3 for alpha chain variable domain of TCR clone 67858 (TRAV35, TRAJ22)
CAGLRPGSARQLTF

SEQ ID NO: 135716 - protein, 13 aa, Homo sapiens
  CDR3 for beta chain variable domain of TCR clone 67858 (TRBV4-2, TRBJ1-1)
CASSQAGNTEAFF

SEQ ID NO: 135717 - protein, 15 aa, Homo sapiens
  CDR3 for alpha chain variable domain of TCR clone 67859 (TRAV12-2, TRAJ53)
CAVNGGGGSTYKLTF

SEQ ID NO: 135718 - protein, 17 aa, Homo sapiens
  CDR3 for beta chain variable domain of TCR clone 67859 (TRBV7-3, TRBJ2-3)
CASSLMKRMRGADTQYF

SEQ ID NO: 135719 - protein, 12 aa, Homo sapiens
  CDR3 for alpha chain variable domain of TCR clone 67860 (TRAV12-3, TRAJ17)
CAMTLTGNKLTF

SEQ ID NO: 135720 - protein, 12 aa, Homo sapiens
  CDR3 for beta chain variable domain of TCR clone 67860 (TRBV19, TRBJ2-1)
CASSQISNEQFF

SEQ ID NO: 135721 - protein, 13 aa, Homo sapiens
  CDR3 for alpha chain variable domain of TCR clone 67861 (TRAV21, TRAJ27)
CAARPGNAGKSTF

SEQ ID NO: 135722 - protein, 14 aa, Homo sapiens
  CDR3 for beta chain variable domain of TCR clone 67861 (TRBV7-6, TRBJ2-3)
CATSLGTVTDTQYF

SEQ ID NO: 135723 - protein, 12 aa, Homo sapiens
  CDR3 for alpha chain variable domain of TCR clone 67862 (TRAV13-1, TRAJ21)
CAAKEGLDKFYF

SEQ ID NO: 135724 - protein, 14 aa, Homo sapiens
  CDR3 for beta chain variable domain of TCR clone 67862 (TRBV5-4, TRBJ1-1)
CASSLDSRRDEAFF

SEQ ID NO: 135725 - protein, 14 aa, Homo sapiens
  CDR3 for alpha chain variable domain of TCR clone 67863 (TRAV13-1, TRAJ44)
CAAKATGTASKLTF

SEQ ID NO: 135726 - protein, 15 aa, Homo sapiens
  CDR3 for beta chain variable domain of TCR clone 67863 (TRBV28, TRBJ2-7)
CASSLWGGGSYEQYF

SEQ ID NO: 135727 - protein, 17 aa, Homo sapiens
  CDR3 for alpha chain variable domain of TCR clone 67864 (TRAV3, TRAJ6)
FAVRDGPRAGGSYLPTF

SEQ ID NO: 135728 - protein, 14 aa, Homo sapiens
  CDR3 for beta chain variable domain of TCR clone 67864 (TRBV7-2, TRBJ2-7)
CASSPKTSFYEQYF

SEQ ID NO: 135729 - protein, 12 aa, Homo sapiens
  CDR3 for alpha chain variable domain of TCR clone 67865 (TRAV5, TRAJ29)
CAGSKKETHLLS

SEQ ID NO: 135730 - protein, 15 aa, Homo sapiens
  CDR3 for beta chain variable domain of TCR clone 67865 (TRBV10-1, TRBJ2-3)
CASSATSGGFDTQYF

SEQ ID NO: 135731 - protein, 14 aa, Homo sapiens
  CDR3 for alpha chain variable domain of TCR clone 67866 (TRAV26-1, TRAJ34)
CIVIVAYNTDKLTF

SEQ ID NO: 135732 - protein, 15 aa, Homo sapiens
  CDR3 for beta chain variable domain of TCR clone 67866 (TRBV20-1, TRBJ2-7)
CSARVPAAYFYKQYF

SEQ ID NO: 135733 - protein, 17 aa, Homo sapiens
  CDR3 for alpha chain variable domain of TCR clone 67867 (TRAV26-1, TRAJ58)
CIVRVGAGETSGSRLTF

SEQ ID NO: 135734 - protein, 13 aa, Homo sapiens
  CDR3 for beta chain variable domain of TCR clone 67867 (TRBV12-5, TRBJ1-2)
CASGVRTGNGYTF

SEQ ID NO: 135735 - protein, 16 aa, Homo sapiens
  CDR3 for alpha chain variable domain of TCR clone 67868 (TRAV1-2, TRAJ16)
CAPPGFQMARSCSLQG

SEQ ID NO: 135736 - protein, 15 aa, Homo sapiens
  CDR3 for beta chain variable domain of TCR clone 67868 (TRBV9, TRBJ1-6)
CASSVAGTGDSPLHF

SEQ ID NO: 135737 - protein, 14 aa, Homo sapiens
  CDR3 for alpha chain variable domain of TCR clone 67869 (TRAV27, TRAJ22)
CAGLPSGSARQLTF

SEQ ID NO: 135738 - protein, 14 aa, Homo sapiens
  CDR3 for beta chain variable domain of TCR clone 67869 (TRBV6-1, TRBJ1-3)
CASVQGGGGNTIYF

SEQ ID NO: 135739 - protein, 14 aa, Homo sapiens
  CDR3 for alpha chain variable domain of TCR clone 67870 (TRAV9-2, TRAJ26)
CALSDVDYGQNFVF

SEQ ID NO: 135740 - protein, 19 aa, Homo sapiens
  CDR3 for beta chain variable domain of TCR clone 67870 (TRBV11-2, TRBJ2-3)
CASSAPRAGGNPSTDTQYF

SEQ ID NO: 135741 - protein, 12 aa, Homo sapiens
  CDR3 for alpha chain variable domain of TCR clone 67871 (TRAV35, TRAJ39)
LAPNNAGNTLTF

SEQ ID NO: 135742 - protein, 16 aa, Homo sapiens
  CDR3 for beta chain variable domain of TCR clone 67871 (TRBV2, TRBJ2-3)
CASSTSVEGVTDTQYF

SEQ ID NO: 135743 - protein, 12 aa, Homo sapiens
  CDR3 for alpha chain variable domain of TCR clone 67872 (TRAV16, TRAJ10)
CSRTGGGNKLTF

SEQ ID NO: 135744 - protein, 13 aa, Homo sapiens
  CDR3 for beta chain variable domain of TCR clone 67872 (TRBV10-1, TRBJ1-1)
CASRLRENTEAFF

SEQ ID NO: 135745 - protein, 15 aa, Homo sapiens
  CDR3 for alpha chain variable domain of TCR clone 67873 (TRAV12-3, TRAJ49)
CAMSVTPNTGNQFYF

SEQ ID NO: 135746 - protein, 18 aa, Homo sapiens
  CDR3 for beta chain variable domain of TCR clone 67873 (TRBV4-1, TRBJ1-5)
CASSQDPRGQGLNQPQHF

SEQ ID NO: 135747 - protein, 11 aa, Homo sapiens
  CDR3 for alpha chain variable domain of TCR clone 67874 (TRAV1-1, TRAJ23)
CAVRQGGKLIF

SEQ ID NO: 135748 - protein, 14 aa, Homo sapiens
  CDR3 for beta chain variable domain of TCR clone 67874 (TRBV2, TRBJ1-1)
CASRDTIRNTEAFF

SEQ ID NO: 135749 - protein, 12 aa, Homo sapiens
  CDR3 for alpha chain variable domain of TCR clone 67875 (TRAV21, TRAJ11)
CAATSGYSTLAF

SEQ ID NO: 135750 - protein, 14 aa, Homo sapiens
  CDR3 for beta chain variable domain of TCR clone 67875 (TRBV20-1, TRBJ2-7)
CSAPGLAGVGEQYF

SEQ ID NO: 135751 - protein, 15 aa, Homo sapiens
  CDR3 for alpha chain variable domain of TCR clone 67876 (TRAV35, TRAJ23)
CAGPLGNNKGGKLIF

SEQ ID NO: 135752 - protein, 14 aa, Homo sapiens
  CDR3 for beta chain variable domain of TCR clone 67876 (TRBV7-9, TRBJ1-1)
CASTPLQSYTEAFF

SEQ ID NO: 135753 - protein, 14 aa, Homo sapiens
  CDR3 for alpha chain variable domain of TCR clone 67877 (TRAV1-2, TRAJ16)
CAVNRFSDGQKLLF

SEQ ID NO: 135754 - protein, 16 aa, Homo sapiens
  CDR3 for beta chain variable domain of TCR clone 67877 (TRBV7-8, TRBJ2-6)
CASRVGDSSGANVLTF

SEQ ID NO: 135755 - protein, 20 aa, Homo sapiens
  CDR3 for alpha chain variable domain of TCR clone 67878 (TRAV12-1, TRAJ42)
SSVIQPPTSVKGGSQGNLIF

SEQ ID NO: 135756 - protein, 17 aa, Homo sapiens
  CDR3 for beta chain variable domain of TCR clone 67878 (TRBV7-8, TRBJ2-6)
CASSAGTGGAGANVLTF

SEQ ID NO: 135757 - protein, 18 aa, Homo sapiens
  CDR3 for alpha chain variable domain of TCR clone 67879 (TRAV8-3, TRAJ4)
WVRDPTSNDPVGYNKLIF

SEQ ID NO: 135758 - protein, 13 aa, Homo sapiens
  CDR3 for beta chain variable domain of TCR clone 67879 (TRBV20-1, TRBJ1-2)
CSATGIQGSGYTF

SEQ ID NO: 135759 - protein, 13 aa, Homo sapiens
  CDR3 for alpha chain variable domain of TCR clone 67880 (TRAV8-3, TRAJ43)
WAVGPDNNNDMRF

SEQ ID NO: 135760 - protein, 12 aa, Homo sapiens
  CDR3 for beta chain variable domain of TCR clone 67880 (TRBV7-2, TRBJ1-6)
CASSLSSSPLHF

SEQ ID NO: 135761 - protein, 16 aa, Homo sapiens
  CDR3 for alpha chain variable domain of TCR clone 67881 (TRAV3, TRAJ10)
CAVGDMNAGGGNKLTF

SEQ ID NO: 135762 - protein, 15 aa, Homo sapiens
  CDR3 for beta chain variable domain of TCR clone 67881 (TRBV5-1, TRBJ1-2)
CASSLGSVTNYGYTF

SEQ ID NO: 135763 - protein, 12 aa, Homo sapiens
  CDR3 for alpha chain variable domain of TCR clone 67882 (TRAV13-2, TRAJ8)
CAPWLGFQKLVF

SEQ ID NO: 135764 - protein, 15 aa, Homo sapiens
  CDR3 for beta chain variable domain of TCR clone 67882 (TRBV4-1, TRBJ1-4)
CASSDTGGTNEKLFF

SEQ ID NO: 135765 - protein, 14 aa, Homo sapiens
  CDR3 for alpha chain variable domain of TCR clone 67883 (TRAV26-1, TRAJ21)
CIVRPPYNFNKFYF

SEQ ID NO: 135766 - protein, 14 aa, Homo sapiens
  CDR3 for beta chain variable domain of TCR clone 67883 (TRBV4-1, TRBJ2-2)
CASSQAVNAGELFF

SEQ ID NO: 135767 - protein, 15 aa, Homo sapiens
  CDR3 for alpha chain variable domain of TCR clone 67884 (TRAV3, TRAJ5)
CAVRDLDTGRRALTF

SEQ ID NO: 135768 - protein, 13 aa, Homo sapiens
  CDR3 for beta chain variable domain of TCR clone 67884 (TRBV4-2, TRBJ1-1)
CASSQAGNTEAFF

SEQ ID NO: 135769 - protein, 13 aa, Homo sapiens
  CDR3 for alpha chain variable domain of TCR clone 67885 (TRAV12-3, TRAJ33)
CAMSVNSNYQLIW

SEQ ID NO: 135770 - protein, 13 aa, Homo sapiens
  CDR3 for beta chain variable domain of TCR clone 67885 (TRBV12-4, TRBJ2-2)
CASSITGSGELFF

SEQ ID NO: 135771 - protein, 13 aa, Homo sapiens
  CDR3 for alpha chain variable domain of TCR clone 67886 (TRAV12-3, TRAJ47)
CAVFMEYGNKLVF

SEQ ID NO: 135772 - protein, 14 aa, Homo sapiens
  CDR3 for beta chain variable domain of TCR clone 67886 (TRBV4-1, TRBJ1-5)
CASSQGPTNQPQHF

SEQ ID NO: 135773 - protein, 15 aa, Homo sapiens
  CDR3 for alpha chain variable domain of TCR clone 67887 (TRAV12-1, TRAJ44)
CVLFVNTGTASKLTF

SEQ ID NO: 135774 - protein, 17 aa, Homo sapiens
  CDR3 for beta chain variable domain of TCR clone 67887 (TRBV7-8, TRBJ2-6)
CASSAGTGGAGANVLTF

SEQ ID NO: 135775 - protein, 12 aa, Homo sapiens
  CDR3 for alpha chain variable domain of TCR clone 67888 (TRAV17, TRAJ39)
CATGAAGNMLTF

SEQ ID NO: 135776 - protein, 14 aa, Homo sapiens
  CDR3 for beta chain variable domain of TCR clone 67888 (TRBV7-9, TRBJ1-2)
CAISRQGANYGYTF

SEQ ID NO: 135777 - protein, 15 aa, Homo sapiens
  CDR3 for alpha chain variable domain of TCR clone 67889 (TRAV24, TRAJ9)
CAFKGPETGGFKTIF

SEQ ID NO: 135778 - protein, 12 aa, Homo sapiens
  CDR3 for beta chain variable domain of TCR clone 67889 (TRBV11-2, TRBJ2-2)
CASSLGGGELFF

SEQ ID NO: 135779 - protein, 16 aa, Homo sapiens
  CDR3 for alpha chain variable domain of TCR clone 67890 (TRAV26-1, TRAJ53)
CIVRVAMGGSNYKLTF

SEQ ID NO: 135780 - protein, 12 aa, Homo sapiens
  CDR3 for beta chain variable domain of TCR clone 67890 (TRBV7-9, TRBJ1-5)
CARSPQGQPQHF

SEQ ID NO: 135781 - protein, 14 aa, Homo sapiens
  CDR3 for alpha chain variable domain of TCR clone 67891 (TRAV12-2, TRAJ53)
CAAKGGGSNYKLTF

SEQ ID NO: 135782 - protein, 14 aa, Homo sapiens
  CDR3 for beta chain variable domain of TCR clone 67891 (TRBV7-7, TRBJ2-2)
CATRQDSDTGELFF

SEQ ID NO: 135783 - protein, 14 aa, Homo sapiens
  CDR3 for alpha chain variable domain of TCR clone 67892 (TRAV30, TRAJ33)
CGTVAPRSNYQLIW

SEQ ID NO: 135784 - protein, 18 aa, Homo sapiens
  CDR3 for beta chain variable domain of TCR clone 67892 (TRBV11-2, TRBJ2-3)
CASSFGGASRGAPNTQYF

SEQ ID NO: 135785 - protein, 15 aa, Homo sapiens
  CDR3 for alpha chain variable domain of TCR clone 67893 (TRAV38-1, TRAJ37)
CAFIFGSGNTGKLIF

SEQ ID NO: 135786 - protein, 14 aa, Homo sapiens
  CDR3 for beta chain variable domain of TCR clone 67893 (TRBV19, TRBJ2-7)
CASNFRDTFTGMYF

SEQ ID NO: 135787 - protein, 15 aa, Homo sapiens
  CDR3 for alpha chain variable domain of TCR clone 67894 (TRAV12-1, TRAJ9)
CVVSFGATGGFKTIF

SEQ ID NO: 135788 - protein, 13 aa, Homo sapiens
  CDR3 for beta chain variable domain of TCR clone 67894 (TRBV2, TRBJ1-4)
CASSERAGEKLFF

SEQ ID NO: 135789 - protein, 13 aa, Homo sapiens
  CDR3 for alpha chain variable domain of TCR clone 67895 (TRAV8-4, TRAJ10)
CAAFTGGGNKLTF

SEQ ID NO: 135790 - protein, 15 aa, Homo sapiens
  CDR3 for beta chain variable domain of TCR clone 67895 (TRBV24-1, TRBJ1-4)
CATSDPQGADEKLFF

SEQ ID NO: 135791 - protein, 13 aa, Homo sapiens
  CDR3 for alpha chain variable domain of TCR clone 67896 (TRAV21, TRAJ27)
CAARPGNAGKSTF

SEQ ID NO: 135792 - protein, 18 aa, Homo sapiens
  CDR3 for beta chain variable domain of TCR clone 67896 (TRBV5-1, TRBJ2-7)
CASSSTGGASGYSYEQYF

SEQ ID NO: 135793 - protein, 15 aa, Homo sapiens
  CDR3 for alpha chain variable domain of TCR clone 67897 (TRAV3, TRAJ22)
CAVRDRGGSARQLTF

SEQ ID NO: 135794 - protein, 14 aa, Homo sapiens
  CDR3 for beta chain variable domain of TCR clone 67897 (TRBV7-7, TRBJ2-2)
CASSRDRSTGELFF

SEQ ID NO: 135795 - protein, 14 aa, Homo sapiens
  CDR3 for alpha chain variable domain of TCR clone 67898 (TRAV1-2, TRAJ8)
CAVREDTGFQKLVF

SEQ ID NO: 135796 - protein, 13 aa, Homo sapiens
  CDR3 for beta chain variable domain of TCR clone 67898 (TRBV11-2, TRBJ2-7)
CASSGTRPYEQYF

SEQ ID NO: 135797 - protein, 13 aa, Homo sapiens
  CDR3 for alpha chain variable domain of TCR clone 67899 (TRAV17, TRAJ26)
CATVDNYGQNFVF

SEQ ID NO: 135798 - protein, 16 aa, Homo sapiens
  CDR3 for beta chain variable domain of TCR clone 67899 (TRBV19, TRBJ2-1)
CASSKAGPSSYNEQFF

SEQ ID NO: 135799 - protein, 13 aa, Homo sapiens
  CDR3 for alpha chain variable domain of TCR clone 67900 (TRAV13-1, TRAJ39)
CAASIWAGNMLTF

SEQ ID NO: 135800 - protein, 14 aa, Homo sapiens
  CDR3 for beta chain variable domain of TCR clone 67900 (TRBV25-1, TRBJ1-4)
CASSGGGQPEKLFF

SEQ ID NO: 135801 - protein, 13 aa, Homo sapiens
  CDR3 for alpha chain variable domain of TCR clone 67901 (TRAV21, TRAJ27)
CAARPGNAGKSTF

SEQ ID NO: 135802 - protein, 14 aa, Homo sapiens
  CDR3 for beta chain variable domain of TCR clone 67901 (TRBV7-6, TRBJ2-3)
CASSLGTVPDTQYF

SEQ ID NO: 135803 - protein, 16 aa, Homo sapiens
  CDR3 for alpha chain variable domain of TCR clone 67902 (TRAV3, TRAJ3)
CAVRDRAKSRASKIIF

SEQ ID NO: 135804 - protein, 16 aa, Homo sapiens
  CDR3 for beta chain variable domain of TCR clone 67902 (TRBV20-1, TRBJ2-4)
CSATSLAELAKNIQYF

SEQ ID NO: 135805 - protein, 14 aa, Homo sapiens
  CDR3 for alpha chain variable domain of TCR clone 67903 (TRAV8-3, TRAJ10)
CAVGNAGGGNKLTF

SEQ ID NO: 135806 - protein, 15 aa, Homo sapiens
  CDR3 for beta chain variable domain of TCR clone 67903 (TRBV4-1, TRBJ1-4)
CASSDTGGTNEKLFF

SEQ ID NO: 135807 - protein, 13 aa, Homo sapiens
  CDR3 for alpha chain variable domain of TCR clone 67904 (TRAV29/DV5, TRAJ47)
CAASSEYGNKLVF

SEQ ID NO: 135808 - protein, 15 aa, Homo sapiens
  CDR3 for beta chain variable domain of TCR clone 67904 (TRBV7-9, TRBJ1-4)
CASSARTGGNEKLFF

SEQ ID NO: 135809 - protein, 14 aa, Homo sapiens
  CDR3 for alpha chain variable domain of TCR clone 67905 (TRAV12-3, TRAJ13)
CAMRNSGGYQKVTF

SEQ ID NO: 135810 - protein, 14 aa, Homo sapiens
  CDR3 for beta chain variable domain of TCR clone 67905 (TRBV4-1, TRBJ1-6)
RAGSPGSDSSPLHF

SEQ ID NO: 135811 - protein, 15 aa, Homo sapiens
  CDR3 for alpha chain variable domain of TCR clone 67906 (TRAV12-3, TRAJ6)
CAMSAASGGSYIPTS

SEQ ID NO: 135812 - protein, 13 aa, Homo sapiens
  CDR3 for beta chain variable domain of TCR clone 67906 (TRBV20-1, TRBJ1-2)
CSASPEFNYGYTF

SEQ ID NO: 135813 - protein, 12 aa, Homo sapiens
  CDR3 for alpha chain variable domain of TCR clone 67907 (TRAV21, TRAJ3)
CYFYSSASKIIF

SEQ ID NO: 135814 - protein, 16 aa, Homo sapiens
  CDR3 for beta chain variable domain of TCR clone 67907 (TRBV19, TRBJ2-1)
CASSKAGPSSYNEQFF

SEQ ID NO: 135815 - protein, 18 aa, Homo sapiens
  CDR3 for alpha chain variable domain of TCR clone 67908 (TRAV9-2, TRAJ52)
CALSRHNAGGTSHGKLTF

SEQ ID NO: 135816 - protein, 13 aa, Homo sapiens
  CDR3 for beta chain variable domain of TCR clone 67908 (TRBV7-9, TRBJ1-2)
CASSLKQNYGYTF

SEQ ID NO: 135817 - protein, 14 aa, Homo sapiens
  CDR3 for alpha chain variable domain of TCR clone 67909 (TRAV1-2, TRAJ8)
CAVREDTGFQKLVF

SEQ ID NO: 135818 - protein, 12 aa, Homo sapiens
  CDR3 for beta chain variable domain of TCR clone 67909 (TRBV28, TRBJ2-6)
CAIQAGANVLTF

SEQ ID NO: 135819 - protein, 12 aa, Homo sapiens
  CDR3 for alpha chain variable domain of TCR clone 67910 (TRAV17, TRAJ20)
CATDGDDYKLSF

SEQ ID NO: 135820 - protein, 12 aa, Homo sapiens
  CDR3 for beta chain variable domain of TCR clone 67910 (TRBV2, TRBJ2-1)
CAYGPPGNEQFF

SEQ ID NO: 135821 - protein, 13 aa, Homo sapiens
  CDR3 for alpha chain variable domain of TCR clone 67911 (TRAV27, TRAJ41)
CAGEGTSGYALNF

SEQ ID NO: 135822 - protein, 14 aa, Homo sapiens
  CDR3 for beta chain variable domain of TCR clone 67911 (TRBV7-2, TRBJ1-1)
CASSFLTGTTEAFF

SEQ ID NO: 135823 - protein, 13 aa, Homo sapiens
  CDR3 for alpha chain variable domain of TCR clone 67912 (TRAV3, TRAJ21)
CAVREPDFNKFYF

SEQ ID NO: 135824 - protein, 14 aa, Homo sapiens
  CDR3 for beta chain variable domain of TCR clone 67912 (TRBV19, TRBJ1-5)
CASRAPYSFLSQHF

SEQ ID NO: 135825 - protein, 14 aa, Homo sapiens
  CDR3 for alpha chain variable domain of TCR clone 67913 (TRAV26-1, TRAJ34)
CLVRVAYNTDKLIF

SEQ ID NO: 135826 - protein, 14 aa, Homo sapiens
  CDR3 for beta chain variable domain of TCR clone 67913 (TRBV20-1, TRBJ2-7)
CSAWTALSSYEQYF

SEQ ID NO: 135827 - protein, 14 aa, Homo sapiens
  CDR3 for alpha chain variable domain of TCR clone 67914 (TRAV2, TRAJ9)
CAVEDRSGGFKTIF

SEQ ID NO: 135828 - protein, 14 aa, Homo sapiens
  CDR3 for beta chain variable domain of TCR clone 67914 (TRBV7-8, TRBJ2-5)
CASSATGGQETQYF

SEQ ID NO: 135829 - protein, 14 aa, Homo sapiens
  CDR3 for alpha chain variable domain of TCR clone 67915 (TRAV12-2, TRAJ32)
CAHPESGATNRLIF

SEQ ID NO: 135830 - protein, 14 aa, Homo sapiens
  CDR3 for beta chain variable domain of TCR clone 67915 (TRBV4-2, TRBJ2-3)
CASRETRAPGMQYF

SEQ ID NO: 135831 - protein, 12 aa, Homo sapiens
  CDR3 for alpha chain variable domain of TCR clone 67916 (TRAV29/DV5, TRAJ34)
CAARHNTDKPIF

SEQ ID NO: 135832 - protein, 13 aa, Homo sapiens
  CDR3 for beta chain variable domain of TCR clone 67916 (TRBV2, TRBJ1-5)
CATAGPGNQPQHF

SEQ ID NO: 135833 - protein, 11 aa, Homo sapiens
  CDR3 for alpha chain variable domain of TCR clone 67917 (TRAV12-3, TRAJ43)
CAMSVSNDMRF

SEQ ID NO: 135834 - protein, 13 aa, Homo sapiens
  CDR3 for beta chain variable domain of TCR clone 67917 (TRBV12-4, TRBJ1-2)
CASSLRQGKGYTF

SEQ ID NO: 135835 - protein, 13 aa, Homo sapiens
  CDR3 for alpha chain variable domain of TCR clone 67918 (TRAV30, TRAJ24)
CGTVTDSWGKLQF

SEQ ID NO: 135836 - protein, 13 aa, Homo sapiens
  CDR3 for beta chain variable domain of TCR clone 67918 (TRBV27, TRBJ2-1)
CASRTLGVGEQFF

SEQ ID NO: 135837 - protein, 12 aa, Homo sapiens
  CDR3 for alpha chain variable domain of TCR clone 67919 (TRAV27, TRAJ33)
CAGEDSNYQLIW

SEQ ID NO: 135838 - protein, 17 aa, Homo sapiens
  CDR3 for beta chain variable domain of TCR clone 67919 (TRBV7-3, TRBJ1-3)
CASSPLGRGTPGNTMYF

SEQ ID NO: 135839 - protein, 12 aa, Homo sapiens
  CDR3 for alpha chain variable domain of TCR clone 67920 (TRAV17, TRAJ4)
CATDGGYNKLIF

SEQ ID NO: 135840 - protein, 13 aa, Homo sapiens
  CDR3 for beta chain variable domain of TCR clone 67920 (TRBV29-1, TRBJ2-2)
CSATGVSTGELFF

SEQ ID NO: 135841 - protein, 16 aa, Homo sapiens
  CDR3 for alpha chain variable domain of TCR clone 67921 (TRAV30, TRAJ24)
CGTEIVDADSWGKFQF

SEQ ID NO: 135842 - protein, 13 aa, Homo sapiens
  CDR3 for beta chain variable domain of TCR clone 67921 (TRBV19, TRBJ2-5)
CASRDSRRETQYF

SEQ ID NO: 135843 - protein, 10 aa, Homo sapiens
  CDR3 for alpha chain variable domain of TCR clone 67922 (TRAV1-2, TRAJ23)
CAGQGGRLIF

SEQ ID NO: 135844 - protein, 14 aa, Homo sapiens
  CDR3 for beta chain variable domain of TCR clone 67922 (TRBV7-9, TRBJ2-1)
CASSPRDSLYEQFF

SEQ ID NO: 135845 - protein, 12 aa, Homo sapiens
  CDR3 for alpha chain variable domain of TCR clone 67923 (TRAV12-1, TRAJ40)
CVVYSGTYKYTF

SEQ ID NO: 135846 - protein, 15 aa, Homo sapiens
  CDR3 for beta chain variable domain of TCR clone 67923 (TRBV7-9, TRBJ1-6)
CASSSPGRGNSPLHF

SEQ ID NO: 135847 - protein, 17 aa, Homo sapiens
  CDR3 for alpha chain variable domain of TCR clone 67924 (TRAV3, TRAJ38)
CAVRDCLNAGNNRKLIW

SEQ ID NO: 135848 - protein, 16 aa, Homo sapiens
  CDR3 for beta chain variable domain of TCR clone 67924 (TRBV27, TRBJ2-2)
CASSFRGLVRTGELFF

SEQ ID NO: 135849 - protein, 15 aa, Homo sapiens
  CDR3 for alpha chain variable domain of TCR clone 67925 (TRAV21, TRAJ18)
CAVRDRGSTLGRLYF

SEQ ID NO: 135850 - protein, 14 aa, Homo sapiens
  CDR3 for beta chain variable domain of TCR clone 67925 (TRBV7-6, TRBJ2-3)
CASSLGTVTDTQYF

SEQ ID NO: 135851 - protein, 14 aa, Homo sapiens
  CDR3 for alpha chain variable domain of TCR clone 67926 (TRAV14/DV4, TRAJ11)
CAMSSNSGYSTLTF

SEQ ID NO: 135852 - protein, 15 aa, Homo sapiens
  CDR3 for beta chain variable domain of TCR clone 67926 (TRBV6-3, TRBJ2-7)
CASSSPGTVFYEQYF

SEQ ID NO: 135853 - protein, 15 aa, Homo sapiens
  CDR3 for alpha chain variable domain of TCR clone 67927 (TRAV8-3, TRAJ11)
CAVGLLNSGYSTLTF

SEQ ID NO: 135854 - protein, 14 aa, Homo sapiens
  CDR3 for beta chain variable domain of TCR clone 67927 (TRBV4-1, TRBJ2-5)
RASSRSGSGETQYF

SEQ ID NO: 135855 - protein, 14 aa, Homo sapiens
  CDR3 for alpha chain variable domain of TCR clone 67928 (TRAV26-1, TRAJ38)
CIADNAGNNRKLIW

SEQ ID NO: 135856 - protein, 15 aa, Homo sapiens
  CDR3 for beta chain variable domain of TCR clone 67928 (TRBV2, TRBJ2-1)
CASSELAGSYNEQFF

SEQ ID NO: 135857 - protein, 15 aa, Homo sapiens
  CDR3 for alpha chain variable domain of TCR clone 67929 (TRAV26-1, TRAJ42)
CIVRVKGGSQGNLIF

SEQ ID NO: 135858 - protein, 14 aa, Homo sapiens
  CDR3 for beta chain variable domain of TCR clone 67929 (TRBV19, TRBJ2-2)
CATTGHANTGELFC

SEQ ID NO: 135859 - protein, 14 aa, Homo sapiens
  CDR3 for alpha chain variable domain of TCR clone 67930 (TRAV12-3, TRAJ29)
CAMSPYSGNTPLVF

SEQ ID NO: 135860 - protein, 13 aa, Homo sapiens
  CDR3 for beta chain variable domain of TCR clone 67930 (TRBV7-9, TRBJ1-2)
CASSLKQNYGYTF

SEQ ID NO: 135861 - protein, 14 aa, Homo sapiens
  CDR3 for alpha chain variable domain of TCR clone 67931 (TRAV16, TRAJ33)
CALSAMDSNYQLIW

SEQ ID NO: 135862 - protein, 15 aa, Homo sapiens
  CDR3 for beta chain variable domain of TCR clone 67931 (TRBV28, TRBJ2-7)
CASSLEAYPIYEQYV

SEQ ID NO: 135863 - protein, 14 aa, Homo sapiens
  CDR3 for alpha chain variable domain of TCR clone 67932 (TRAV1-2, TRAJ8)
CAVREDTGFQKLVF

SEQ ID NO: 135864 - protein, 15 aa, Homo sapiens
  CDR3 for beta chain variable domain of TCR clone 67932 (TRBV28, TRBJ2-4)
RAAGSGTLLMGIQYF

SEQ ID NO: 135865 - protein, 15 aa, Homo sapiens
  CDR3 for alpha chain variable domain of TCR clone 67933 (TRAV17, TRAJ45)
TSVLRTGGGADGLTF

SEQ ID NO: 135866 - protein, 15 aa, Homo sapiens
  CDR3 for beta chain variable domain of TCR clone 67933 (TRBV6-3, TRBJ2-7)
CASSSPGTVFYEQYF

SEQ ID NO: 135867 - protein, 12 aa, Homo sapiens
  CDR3 for alpha chain variable domain of TCR clone 67934 (TRAV3, TRAJ43)
CAVRDPNNDMRF

SEQ ID NO: 135868 - protein, 17 aa, Homo sapiens
  CDR3 for beta chain variable domain of TCR clone 67934 (TRBV7-8, TRBJ2-6)
CARSAGTGGAGANVLTF

SEQ ID NO: 135869 - protein, 12 aa, Homo sapiens
  CDR3 for alpha chain variable domain of TCR clone 67935 (TRAV36/DV7, TRAJ54)
CAVVRGAQELVF

SEQ ID NO: 135870 - protein, 14 aa, Homo sapiens
  CDR3 for beta chain variable domain of TCR clone 67935 (TRBV7-3, TRBJ1-1)
CASSLKGGNTETFF

SEQ ID NO: 135871 - protein, 18 aa, Homo sapiens
  CDR3 for alpha chain variable domain of TCR clone 67936 (TRAV1-2, TRAJ18)
CAVRDMGDRGSTLGRLYF

SEQ ID NO: 135872 - protein, 16 aa, Homo sapiens
  CDR3 for beta chain variable domain of TCR clone 67936 (TRBV29-1, TRBJ1-2)
CSVEANRYIANYGYTF

SEQ ID NO: 135873 - protein, 14 aa, Homo sapiens
  CDR3 for alpha chain variable domain of TCR clone 67937 (TRAV17, TRAJ57)
CATEAQGGSEKLVF

SEQ ID NO: 135874 - protein, 14 aa, Homo sapiens
  CDR3 for beta chain variable domain of TCR clone 67937 (TRBV7-7, TRBJ2-7)
CASSLGRGVGEQYF

SEQ ID NO: 135875 - protein, 14 aa, Homo sapiens
  CDR3 for alpha chain variable domain of TCR clone 67938 (TRAV35, TRAJ22)
CAGLRPGSARQLTF

SEQ ID NO: 135876 - protein, 15 aa, Homo sapiens
  CDR3 for beta chain variable domain of TCR clone 67938 (TRBV12-4, TRBJ2-5)
CASSPRTGLQETQYF

SEQ ID NO: 135877 - protein, 12 aa, Homo sapiens
  CDR3 for alpha chain variable domain of TCR clone 67939 (TRAV13-1, TRAJ21)
CAAKEGFNKFYF

SEQ ID NO: 135878 - protein, 16 aa, Homo sapiens
  CDR3 for beta chain variable domain of TCR clone 67939 (TRBV7-8, TRBJ2-4)
CAGSAERTLAKNIQYF

SEQ ID NO: 135879 - protein, 12 aa, Homo sapiens
  CDR3 for alpha chain variable domain of TCR clone 67940 (TRAV25, TRAJ31)
CAGHLNNARLMF

SEQ ID NO: 135880 - protein, 13 aa, Homo sapiens
  CDR3 for beta chain variable domain of TCR clone 67940 (TRBV11-2, TRBJ2-5)
CASSRGPSETQYF

SEQ ID NO: 135881 - protein, 12 aa, Homo sapiens
  CDR3 for alpha chain variable domain of TCR clone 67941 (TRAV29/DV5, TRAJ49)
CAATDTGNQFYF

SEQ ID NO: 135882 - protein, 12 aa, Homo sapiens
  CDR3 for beta chain variable domain of TCR clone 67941 (TRBV28, TRBJ2-7)
CASSRSGYEQYF

SEQ ID NO: 135883 - protein, 14 aa, Homo sapiens
  CDR3 for alpha chain variable domain of TCR clone 67942 (TRAV12-2, TRAJ13)
CAVKKTGGYQKVTF

SEQ ID NO: 135884 - protein, 11 aa, Homo sapiens
  CDR3 for beta chain variable domain of TCR clone 67942 (TRBV29-1, TRBJ2-5)
CSEDRKGTQYF

SEQ ID NO: 135885 - protein, 14 aa, Homo sapiens
  CDR3 for alpha chain variable domain of TCR clone 67943 (TRAV4, TRAJ26)
CLVGPHNYVQNFVF

SEQ ID NO: 135886 - protein, 17 aa, Homo sapiens
  CDR3 for beta chain variable domain of TCR clone 67943 (TRBV24-1, TRBJ2-1)
CATSDVSTSGTYNEQFF

SEQ ID NO: 135887 - protein, 11 aa, Homo sapiens
  CDR3 for alpha chain variable domain of TCR clone 67944 (TRAV12-3, TRAJ27)
CAMANAGKSTF

SEQ ID NO: 135888 - protein, 13 aa, Homo sapiens
  CDR3 for beta chain variable domain of TCR clone 67944 (TRBV20-1, TRBJ1-1)
CSARLGGNTEAFF

SEQ ID NO: 135889 - protein, 17 aa, Homo sapiens
  CDR3 for alpha chain variable domain of TCR clone 67945 (TRAV26-1, TRAJ27)
CIVSTPWINTNAGKSTF

SEQ ID NO: 135890 - protein, 17 aa, Homo sapiens
  CDR3 for beta chain variable domain of TCR clone 67945 (TRBV13, TRBJ2-3)
CASSLSRVAGGRNTQYF

SEQ ID NO: 135891 - protein, 12 aa, Homo sapiens
  CDR3 for alpha chain variable domain of TCR clone 67946 (TRAV13-1, TRAJ21)
CSAFFNFNKFYF

SEQ ID NO: 135892 - protein, 14 aa, Homo sapiens
  CDR3 for beta chain variable domain of TCR clone 67946 (TRBV4-1, TRBJ2-7)
CASRLTSGSYEQYF

SEQ ID NO: 135893 - protein, 12 aa, Homo sapiens
  CDR3 for alpha chain variable domain of TCR clone 67947 (TRAV13-1, TRAJ15)
CAASQAGTALIS

SEQ ID NO: 135894 - protein, 14 aa, Homo sapiens
  CDR3 for beta chain variable domain of TCR clone 67947 (TRBV19, TRBJ2-2)
CASSTLHRSGELFF

SEQ ID NO: 135895 - protein, 13 aa, Homo sapiens
  CDR3 for alpha chain variable domain of TCR clone 67948 (TRAV16, TRAJ28)
CAPTGAGSYQLPF

SEQ ID NO: 135896 - protein, 16 aa, Homo sapiens
  CDR3 for beta chain variable domain of TCR clone 67948 (TRBV28, TRBJ1-5)
CASSLTGQGWNQPQHF

SEQ ID NO: 135897 - protein, 19 aa, Homo sapiens
  CDR3 for alpha chain variable domain of TCR clone 67949 (TRAV2, TRAJ20)
ILQVREADAAAYRDCKLSF

SEQ ID NO: 135898 - protein, 15 aa, Homo sapiens
  CDR3 for beta chain variable domain of TCR clone 67949 (TRBV9, TRBJ1-6)
CASSVAGTGDSPLHF

SEQ ID NO: 135899 - protein, 13 aa, Homo sapiens
  CDR3 for alpha chain variable domain of TCR clone 67950 (TRAV36/DV7, TRAJ54)
CAVDIQGAQKLVF

SEQ ID NO: 135900 - protein, 14 aa, Homo sapiens
  CDR3 for beta chain variable domain of TCR clone 67950 (TRBV19, TRBJ2-7)
CSSNFRDTLTGMYF

SEQ ID NO: 135901 - protein, 12 aa, Homo sapiens
  CDR3 for alpha chain variable domain of TCR clone 67951 (TRAV3, TRAJ27)
CAVRDVAGKSTF

SEQ ID NO: 135902 - protein, 13 aa, Homo sapiens
  CDR3 for beta chain variable domain of TCR clone 67951 (TRBV10-3, TRBJ1-2)
CAINADLNYGYTF

SEQ ID NO: 135903 - protein, 16 aa, Homo sapiens
  CDR3 for alpha chain variable domain of TCR clone 67952 (TRAV21, TRAJ45)
CAVRPDAGGGADGLTF

SEQ ID NO: 135904 - protein, 12 aa, Homo sapiens
  CDR3 for beta chain variable domain of TCR clone 67952 (TRBV7-8, TRBJ2-7)
CASSLGDREQYF

SEQ ID NO: 135905 - protein, 18 aa, Homo sapiens
  CDR3 for alpha chain variable domain of TCR clone 67953 (TRAV12-3, TRAJ52)
CAMSVGGAVGTSYGKLTF

SEQ ID NO: 135906 - protein, 15 aa, Homo sapiens
  CDR3 for beta chain variable domain of TCR clone 67953 (TRBV27, TRBJ1-6)
CASSFDRGLGSPLHF

SEQ ID NO: 135907 - protein, 11 aa, Homo sapiens
  CDR3 for alpha chain variable domain of TCR clone 67954 (TRAV4, TRAJ31)
CLVGDNAGLMF

SEQ ID NO: 135908 - protein, 16 aa, Homo sapiens
  CDR3 for beta chain variable domain of TCR clone 67954 (TRBV7-2, TRBJ2-5)
CASSSKWLSGQETQYF

SEQ ID NO: 135909 - protein, 16 aa, Homo sapiens
  CDR3 for alpha chain variable domain of TCR clone 67955 (TRAV1-2, TRAJ10)
CAVRGVLTGGGNKLTI

SEQ ID NO: 135910 - protein, 12 aa, Homo sapiens
  CDR3 for beta chain variable domain of TCR clone 67955 (TRBV7-8, TRBJ2-7)
CASSLGDREQYF

SEQ ID NO: 135911 - protein, 22 aa, Homo sapiens
  CDR3 for alpha chain variable domain of TCR clone 67956 (TRAV2, TRAJ10)
ILLVREADAAVYYTGGGNKLTF

SEQ ID NO: 135912 - protein, 16 aa, Homo sapiens
  CDR3 for beta chain variable domain of TCR clone 67956 (TRBV5-7, TRBJ1-2)
CASSRGVTGGSYGYTF

SEQ ID NO: 135913 - protein, 14 aa, Homo sapiens
  CDR3 for alpha chain variable domain of TCR clone 67957 (TRAV29/DV5, TRAJ36)
CAARRKTGANNLFF

SEQ ID NO: 135914 - protein, 14 aa, Homo sapiens
  CDR3 for beta chain variable domain of TCR clone 67957 (TRBV12-5, TRBJ2-5)
CASGSRTHQETQYV

SEQ ID NO: 135915 - protein, 16 aa, Homo sapiens
  CDR3 for alpha chain variable domain of TCR clone 67958 (TRAV8-3, TRAJ52)
CAVQPAGGTSDGKLTF

SEQ ID NO: 135916 - protein, 15 aa, Homo sapiens
  CDR3 for beta chain variable domain of TCR clone 67958 (TRBV11-2, TRBJ2-7)
CASSLAGGVATEQYF

SEQ ID NO: 135917 - protein, 15 aa, Homo sapiens
  CDR3 for alpha chain variable domain of TCR clone 67959 (TRAV2, TRAJ24)
CAVVRLKNSWGKLQF

SEQ ID NO: 135918 - protein, 16 aa, Homo sapiens
  CDR3 for beta chain variable domain of TCR clone 67959 (TRBV7-7, TRBJ2-3)
CASSPGTSRSTDTQYF

SEQ ID NO: 135919 - protein, 13 aa, Homo sapiens
  CDR3 for alpha chain variable domain of TCR clone 67960 (TRAV3, TRAJ15)
CAVRDQAGSALIF

SEQ ID NO: 135920 - protein, 15 aa, Homo sapiens
  CDR3 for beta chain variable domain of TCR clone 67960 (TRBV11-1, TRBJ2-7)
CASSLNYGASYEQYF

SEQ ID NO: 135921 - protein, 12 aa, Homo sapiens
  CDR3 for alpha chain variable domain of TCR clone 67961 (TRAV12-3, TRAJ17)
CAMTLTGNKLTF

SEQ ID NO: 135922 - protein, 13 aa, Homo sapiens
  CDR3 for beta chain variable domain of TCR clone 67961 (TRBV27, TRBJ2-1)
CASRTLGVGEEFF

SEQ ID NO: 135923 - protein, 15 aa, Homo sapiens
  CDR3 for alpha chain variable domain of TCR clone 67962 (TRAV26-1, TRAJ22)
CIVRVSFWFCKATDL

SEQ ID NO: 135924 - protein, 13 aa, Homo sapiens
  CDR3 for beta chain variable domain of TCR clone 67962 (TRBV7-9, TRBJ1-2)
CASSLKQNYGYPF

SEQ ID NO: 135925 - protein, 13 aa, Homo sapiens
  CDR3 for alpha chain variable domain of TCR clone 67963 (TRAV12-2, TRAJ40)
CAVRGPGTYKYIF

SEQ ID NO: 135926 - protein, 15 aa, Homo sapiens
  CDR3 for beta chain variable domain of TCR clone 67963 (TRBV28, TRBJ1-2)
CASSFRDRPSYGYTF

SEQ ID NO: 135927 - protein, 12 aa, Homo sapiens
  CDR3 for alpha chain variable domain of TCR clone 67964 (TRAV30, TRAJ39)
CGRGNAGNMLTF

SEQ ID NO: 135928 - protein, 15 aa, Homo sapiens
  CDR3 for beta chain variable domain of TCR clone 67964 (TRBV5-1, TRBJ1-1)
CASSWTGRGNTEAFL

SEQ ID NO: 135929 - protein, 15 aa, Homo sapiens
  CDR3 for alpha chain variable domain of TCR clone 67965 (TRAV12-3, TRAJ11)
CAMSEENSGYSTLTF

SEQ ID NO: 135930 - protein, 17 aa, Homo sapiens
  CDR3 for beta chain variable domain of TCR clone 67965 (TRBV11-2, TRBJ2-1)
CASSLYPPGVEYNEQFF

SEQ ID NO: 135931 - protein, 15 aa, Homo sapiens
  CDR3 for alpha chain variable domain of TCR clone 67966 (TRAV2, TRAJ44)
CAVEAYTGTASKLTF

SEQ ID NO: 135932 - protein, 16 aa, Homo sapiens
  CDR3 for beta chain variable domain of TCR clone 67966 (TRBV7-9, TRBJ1-2)
CASSLGFSSGEDGYTF

SEQ ID NO: 135933 - protein, 14 aa, Homo sapiens
  CDR3 for alpha chain variable domain of TCR clone 67967 (TRAV12-2, TRAJ13)
CAVKKTGGYQKVTF

SEQ ID NO: 135934 - protein, 15 aa, Homo sapiens
  CDR3 for beta chain variable domain of TCR clone 67967 (TRBV5-7, TRBJ1-5)
CASSYGKLWDQPQHF

SEQ ID NO: 135935 - protein, 15 aa, Homo sapiens
  CDR3 for alpha chain variable domain of TCR clone 67968 (TRAV8-3, TRAJ20)
CAVEAKGSNDYKLSF

SEQ ID NO: 135936 - protein, 12 aa, Homo sapiens
  CDR3 for beta chain variable domain of TCR clone 67968 (TRBV7-2, TRBJ1-2)
CASRDSIYGYTL

SEQ ID NO: 135937 - protein, 15 aa, Homo sapiens
  CDR3 for alpha chain variable domain of TCR clone 67969 (TRAV17, TRAJ4)
CATGTWSGGYNKLIF

SEQ ID NO: 135938 - protein, 13 aa, Homo sapiens
  CDR3 for beta chain variable domain of TCR clone 67969 (TRBV6-6, TRBJ2-7)
RASSPKHLAEQYF

SEQ ID NO: 135939 - protein, 12 aa, Homo sapiens
  CDR3 for alpha chain variable domain of TCR clone 67970 (TRAV23/DV6, TRAJ17)
CAAKAAGNKLTF

SEQ ID NO: 135940 - protein, 15 aa, Homo sapiens
  CDR3 for beta chain variable domain of TCR clone 67970 (TRBV5-1, TRBJ2-1)
CASSPPRAPYNEQFF

SEQ ID NO: 135941 - protein, 15 aa, Homo sapiens
  CDR3 for alpha chain variable domain of TCR clone 67971 (TRAV12-2, TRAJ43)
CAFDMRFGAGTRLTV

SEQ ID NO: 135942 - protein, 13 aa, Homo sapiens
  CDR3 for beta chain variable domain of TCR clone 67971 (TRBV20-1, TRBJ2-7)
CSATHTSGYEQYF

SEQ ID NO: 135943 - protein, 18 aa, Homo sapiens
  CDR3 for alpha chain variable domain of TCR clone 67972 (TRAV26-1, TRAJ23)
CIVRVGLEVWNQGGKLIF

SEQ ID NO: 135944 - protein, 14 aa, Homo sapiens
  CDR3 for beta chain variable domain of TCR clone 67972 (TRBV25-1, TRBJ1-1)
CASTHLGGNTEAFF

SEQ ID NO: 135945 - protein, 14 aa, Homo sapiens
  CDR3 for alpha chain variable domain of TCR clone 67973 (TRAV26-1, TRAJ38)
CIADNAGNNRKLIW

SEQ ID NO: 135946 - protein, 17 aa, Homo sapiens
  CDR3 for beta chain variable domain of TCR clone 67973 (TRBV13, TRBJ2-3)
CASSLSGVAGGRNTQYF

SEQ ID NO: 135947 - protein, 14 aa, Homo sapiens
  CDR3 for alpha chain variable domain of TCR clone 67974 (TRAV8-3, TRAJ27)
CAVIYNTNAGKSTF

SEQ ID NO: 135948 - protein, 15 aa, Homo sapiens
  CDR3 for beta chain variable domain of TCR clone 67974 (TRBV7-2, TRBJ2-1)
CASSSGLAGGNEQFF

SEQ ID NO: 135949 - protein, 14 aa, Homo sapiens
  CDR3 for alpha chain variable domain of TCR clone 67975 (TRAV1-1, TRAJ28)
CAAPSGAGSYQLTF

SEQ ID NO: 135950 - protein, 15 aa, Homo sapiens
  CDR3 for beta chain variable domain of TCR clone 67975 (TRBV7-2, TRBJ1-2)
CASSLVSGGDYGYAF

SEQ ID NO: 135951 - protein, 14 aa, Homo sapiens
  CDR3 for alpha chain variable domain of TCR clone 67976 (TRAV17, TRAJ6)
CATDASGGSYIPTF

SEQ ID NO: 135952 - protein, 18 aa, Homo sapiens
  CDR3 for beta chain variable domain of TCR clone 67976 (TRBV7-7, TRBJ2-1)
CASSLALTSGRSYNEQFF

SEQ ID NO: 135953 - protein, 16 aa, Homo sapiens
  CDR3 for alpha chain variable domain of TCR clone 67977 (TRAV30, TRAJ24)
CGTEIVDADSWGKFQF

SEQ ID NO: 135954 - protein, 13 aa, Homo sapiens
  CDR3 for beta chain variable domain of TCR clone 67977 (TRBV9, TRBJ2-5)
CASSPAGLGTQYF

SEQ ID NO: 135955 - protein, 15 aa, Homo sapiens
  CDR3 for alpha chain variable domain of TCR clone 67978 (TRAV8-4, TRAJ13)
CAVSDRGGGYQKVTF

SEQ ID NO: 135956 - protein, 17 aa, Homo sapiens
  CDR3 for beta chain variable domain of TCR clone 67978 (TRBV6-4, TRBJ1-2)
CASSEFGSATTNYGYTF

SEQ ID NO: 135957 - protein, 13 aa, Homo sapiens
  CDR3 for alpha chain variable domain of TCR clone 67979 (TRAV13-1, TRAJ11)
CAAVLAGYSTLTF

SEQ ID NO: 135958 - protein, 17 aa, Homo sapiens
  CDR3 for beta chain variable domain of TCR clone 67979 (TRBV4-1, TRBJ2-5)
CASSQDLTGGPIETQYF

SEQ ID NO: 135959 - protein, 14 aa, Homo sapiens
  CDR3 for alpha chain variable domain of TCR clone 67980 (TRAV12-1, TRAJ12)
CVATRMDSSYKLIF

SEQ ID NO: 135960 - protein, 13 aa, Homo sapiens
  CDR3 for beta chain variable domain of TCR clone 67980 (TRBV20-1, TRBJ1-1)
RSARGGGNTEAFF

SEQ ID NO: 135961 - protein, 14 aa, Homo sapiens
  CDR3 for alpha chain variable domain of TCR clone 67981 (TRAV8-2, TRAJ4)
CIVSPSGGYNKLIF

SEQ ID NO: 135962 - protein, 14 aa, Homo sapiens
  CDR3 for beta chain variable domain of TCR clone 67981 (TRBV19, TRBJ2-5)
CASSSSGIQETQYF

SEQ ID NO: 135963 - protein, 14 aa, Homo sapiens
  CDR3 for alpha chain variable domain of TCR clone 67982 (TRAV9-2, TRAJ39)
CALYIYNAGNMLTF

SEQ ID NO: 135964 - protein, 14 aa, Homo sapiens
  CDR3 for beta chain variable domain of TCR clone 67982 (TRBV11-1, TRBJ2-7)
CASTFAVPSYEQYF

SEQ ID NO: 135965 - protein, 20 aa, Homo sapiens
  CDR3 for alpha chain variable domain of TCR clone 67983 (TRAV12-3, TRAJ42)
SSVIQPPTSVKGGSQGNLIF

SEQ ID NO: 135966 - protein, 18 aa, Homo sapiens
  CDR3 for beta chain variable domain of TCR clone 67983 (TRBV11-2, TRBJ2-3)
CASSLGGASRGAPNTQYF

SEQ ID NO: 135967 - protein, 16 aa, Homo sapiens
  CDR3 for alpha chain variable domain of TCR clone 67984 (TRAV3, TRAJ10)
CAVRDMRAVGGNKLTF

SEQ ID NO: 135968 - protein, 19 aa, Homo sapiens
  CDR3 for beta chain variable domain of TCR clone 67984 (TRBV6-3, TRBJ1-2)
CASSYSKGRTGPPNYGYTF

SEQ ID NO: 135969 - protein, 12 aa, Homo sapiens
  CDR3 for alpha chain variable domain of TCR clone 67985 (TRAV1-1, TRAJ8)
CAGGTGFQKLVF

SEQ ID NO: 135970 - protein, 15 aa, Homo sapiens
  CDR3 for beta chain variable domain of TCR clone 67985 (TRBV7-9, TRBJ1-4)
CASSQTGGFNEKLFF

SEQ ID NO: 135971 - protein, 14 aa, Homo sapiens
  CDR3 for alpha chain variable domain of TCR clone 67986 (TRAV1-2, TRAJ16)
CAVNRLSDGQKLLF

SEQ ID NO: 135972 - protein, 14 aa, Homo sapiens
  CDR3 for beta chain variable domain of TCR clone 67986 (TRBV25-1, TRBJ1-1)
CASTHLGGNTEAFF

SEQ ID NO: 135973 - protein, 15 aa, Homo sapiens
  CDR3 for alpha chain variable domain of TCR clone 67987 (TRAV26-1, TRAJ29)
CVVRVEGSGNTPLVF

SEQ ID NO: 135974 - protein, 15 aa, Homo sapiens
  CDR3 for beta chain variable domain of TCR clone 67987 (TRBV7-9, TRBJ1-5)
CASSQGHQPNQTQHF

SEQ ID NO: 135975 - protein, 13 aa, Homo sapiens
  CDR3 for alpha chain variable domain of TCR clone 67988 (TRAV13-2, TRAJ48)
CAEMDFGNEKLTF

SEQ ID NO: 135976 - protein, 15 aa, Homo sapiens
  CDR3 for beta chain variable domain of TCR clone 67988 (TRBV7-9, TRBJ1-6)
CASSSPGRGNSPLHY

SEQ ID NO: 135977 - protein, 12 aa, Homo sapiens
  CDR3 for alpha chain variable domain of TCR clone 67989 (TRAV4, TRAJ26)
CLVGDYCQNFVF

SEQ ID NO: 135978 - protein, 16 aa, Homo sapiens
  CDR3 for beta chain variable domain of TCR clone 67989 (TRBV7-2, TRBJ1-2)
CASSSNQDRRGHGYTF

SEQ ID NO: 135979 - protein, 13 aa, Homo sapiens
  CDR3 for alpha chain variable domain of TCR clone 67990 (TRAV2, TRAJ15)
CAVASQAGTALIF

SEQ ID NO: 135980 - protein, 16 aa, Homo sapiens
  CDR3 for beta chain variable domain of TCR clone 67990 (TRBV5-1, TRBJ1-1)
CDSSSGGNSLNTEAFF

SEQ ID NO: 135981 - protein, 13 aa, Homo sapiens
  CDR3 for alpha chain variable domain of TCR clone 67991 (TRAV3, TRAJ33)
CVVRDRSNYQLIW

SEQ ID NO: 135982 - protein, 16 aa, Homo sapiens
  CDR3 for beta chain variable domain of TCR clone 67991 (TRBV4-2, TRBJ2-7)
CASSQDRGTSSYEQYF

SEQ ID NO: 135983 - protein, 15 aa, Homo sapiens
  CDR3 for alpha chain variable domain of TCR clone 67992 (TRAV2, TRAJ28)
CAVPYSGAGSYQLTF

SEQ ID NO: 135984 - protein, 17 aa, Homo sapiens
  CDR3 for beta chain variable domain of TCR clone 67992 (TRBV20-1, TRBJ2-4)
CSASDWASGGRENIQYF

SEQ ID NO: 135985 - protein, 14 aa, Homo sapiens
  CDR3 for alpha chain variable domain of TCR clone 67993 (TRAV16, TRAJ54)
CALSDGQGVQKLVF

SEQ ID NO: 135986 - protein, 13 aa, Homo sapiens
  CDR3 for beta chain variable domain of TCR clone 67993 (TRBV20-1, TRBJ2-4)
CSAPTWAGNIQYF

SEQ ID NO: 135987 - protein, 11 aa, Homo sapiens
  CDR3 for alpha chain variable domain of TCR clone 67994 (TRAV36/DV7, TRAJ23)
CAVEARESLSS

SEQ ID NO: 135988 - protein, 14 aa, Homo sapiens
  CDR3 for beta chain variable domain of TCR clone 67994 (TRBV5-1, TRBJ2-3)
CASRGQNSTDTQYF

SEQ ID NO: 135989 - protein, 16 aa, Homo sapiens
  CDR3 for alpha chain variable domain of TCR clone 67995 (TRAV16, TRAJ52)
RALSAAGGTSYGKLTF

SEQ ID NO: 135990 - protein, 12 aa, Homo sapiens
  CDR3 for beta chain variable domain of TCR clone 67995 (TRBV12-4, TRBJ1-3)
CASSFSGNTIYF

SEQ ID NO: 135991 - protein, 16 aa, Homo sapiens
  CDR3 for alpha chain variable domain of TCR clone 67996 (TRAV12-3, TRAJ53)
CAMSPGSGGSNYKLTS

SEQ ID NO: 135992 - protein, 12 aa, Homo sapiens
  CDR3 for beta chain variable domain of TCR clone 67996 (TRBV7-8, TRBJ2-7)
CASSLGDREQYF

SEQ ID NO: 135993 - protein, 15 aa, Homo sapiens
  CDR3 for alpha chain variable domain of TCR clone 67997 (TRAV8-4, TRAJ29)
CAVSEDFRGNTPLVF

SEQ ID NO: 135994 - protein, 18 aa, Homo sapiens
  CDR3 for beta chain variable domain of TCR clone 67997 (TRBV20-1, TRBJ2-6)
CSARTLAGGPSGANVLTL

SEQ ID NO: 135995 - protein, 17 aa, Homo sapiens
  CDR3 for alpha chain variable domain of TCR clone 67998 (TRAV3, TRAJ6)
CAVRDGPRAGGSYIPTF

SEQ ID NO: 135996 - protein, 16 aa, Homo sapiens
  CDR3 for beta chain variable domain of TCR clone 67998 (TRBV2, TRBJ2-7)
CASSEPWTGPSYEQYF

SEQ ID NO: 135997 - protein, 14 aa, Homo sapiens
  CDR3 for alpha chain variable domain of TCR clone 67999 (TRAV26-1, TRAJ48)
CIVRSWGGNEKLTF

SEQ ID NO: 135998 - protein, 14 aa, Homo sapiens
  CDR3 for beta chain variable domain of TCR clone 67999 (TRBV12-4, TRBJ2-7)
CASSASGGWYEQYF

SEQ ID NO: 135999 - protein, 14 aa, Homo sapiens
  CDR3 for alpha chain variable domain of TCR clone 68000 (TRAV13-1, TRAJ44)
CSAKATGTASKLTF

SEQ ID NO: 136000 - protein, 13 aa, Homo sapiens
  CDR3 for beta chain variable domain of TCR clone 68000 (TRBV5-5, TRBJ1-2)
CASSFWRGEDYTF

SEQ ID NO: 136001 - protein, 14 aa, Homo sapiens
  CDR3 for alpha chain variable domain of TCR clone 68001 (TRAV1-2, TRAJ16)
CAVNRFSDGQKLLV

SEQ ID NO: 136002 - protein, 13 aa, Homo sapiens
  CDR3 for beta chain variable domain of TCR clone 68001 (TRBV4-1, TRBJ2-1)
CASSQAGGDEQFF

SEQ ID NO: 136003 - protein, 18 aa, Homo sapiens
  CDR3 for alpha chain variable domain of TCR clone 68002 (TRAV12-3, TRAJ52)
CAMSRTNAGGTSYGKLTF

SEQ ID NO: 136004 - protein, 17 aa, Homo sapiens
  CDR3 for beta chain variable domain of TCR clone 68002 (TRBV13, TRBJ2-3)
CASSLFRVAGGRNTQYF

SEQ ID NO: 136005 - protein, 21 aa, Homo sapiens
  CDR3 for alpha chain variable domain of TCR clone 68003 (TRAV12-1, TRAJ32)
SSVIQPPTSMNYGGATNKLIF

SEQ ID NO: 136006 - protein, 16 aa, Homo sapiens
  CDR3 for beta chain variable domain of TCR clone 68003 (TRBV4-2, TRBJ2-3)
CASSQELAGDTDTQYF

SEQ ID NO: 136007 - protein, 14 aa, Homo sapiens
  CDR3 for alpha chain variable domain of TCR clone 68004 (TRAV1-2, TRAJ16)
CAVNRFSDGQKLLF

SEQ ID NO: 136008 - protein, 18 aa, Homo sapiens
  CDR3 for beta chain variable domain of TCR clone 68004 (TRBV20-1, TRBJ2-6)
CSAETTTTHGSGANVLTF

SEQ ID NO: 136009 - protein, 15 aa, Homo sapiens
  CDR3 for alpha chain variable domain of TCR clone 68005 (TRAV2, TRAJ37)
CAVVVRSGNTGKLIF

SEQ ID NO: 136010 - protein, 16 aa, Homo sapiens
  CDR3 for beta chain variable domain of TCR clone 68005 (TRBV13, TRBJ2-2)
CASSPRTGEHTGELFF

SEQ ID NO: 136011 - protein, 12 aa, Homo sapiens
  CDR3 for alpha chain variable domain of TCR clone 68006 (TRAV12-3, TRAJ41)
CAMSYSGYALNF

SEQ ID NO: 136012 - protein, 13 aa, Homo sapiens
  CDR3 for beta chain variable domain of TCR clone 68006 (TRBV7-3, TRBJ2-1)
CASSLDSYNEQFV

SEQ ID NO: 136013 - protein, 14 aa, Homo sapiens
  CDR3 for alpha chain variable domain of TCR clone 68007 (TRAV12-2, TRAJ45)
CAVNIGGGADGLTF

SEQ ID NO: 136014 - protein, 13 aa, Homo sapiens
  CDR3 for beta chain variable domain of TCR clone 68007 (TRBV19, TRBJ2-2)
CASSIWNTGELFF

SEQ ID NO: 136015 - protein, 14 aa, Homo sapiens
  CDR3 for alpha chain variable domain of TCR clone 68008 (TRAV35, TRAJ22)
CAGLGPGSARQLTF

SEQ ID NO: 136016 - protein, 14 aa, Homo sapiens
  CDR3 for beta chain variable domain of TCR clone 68008 (TRBV11-3, TRBJ2-3)
CASSSGQGPDTQYF

SEQ ID NO: 136017 - protein, 18 aa, Homo sapiens
  CDR3 for alpha chain variable domain of TCR clone 68009 (TRAV17, TRAJ45)
CATPLDLYSGGGADGLTF

SEQ ID NO: 136018 - protein, 15 aa, Homo sapiens
  CDR3 for beta chain variable domain of TCR clone 68009 (TRBV11-2, TRBJ2-1)
CASSKNRGLIYEQFF

SEQ ID NO: 136019 - protein, 14 aa, Homo sapiens
  CDR3 for alpha chain variable domain of TCR clone 68010 (TRAV1-2, TRAJ16)
CAVNRFSDGQKLLF

SEQ ID NO: 136020 - protein, 14 aa, Homo sapiens
  CDR3 for beta chain variable domain of TCR clone 68010 (TRBV9, TRBJ2-1)
CASSVVAAYNEQFF

SEQ ID NO: 136021 - protein, 14 aa, Homo sapiens
  CDR3 for alpha chain variable domain of TCR clone 68011 (TRAV14/DV4, TRAJ32)
SNVLPLTPTNKLIF

SEQ ID NO: 136022 - protein, 14 aa, Homo sapiens
  CDR3 for beta chain variable domain of TCR clone 68011 (TRBV28, TRBJ2-1)
CASSLVAPYNEQFF

SEQ ID NO: 136023 - protein, 14 aa, Homo sapiens
  CDR3 for alpha chain variable domain of TCR clone 68012 (TRAV4, TRAJ26)
CLVGPHNYGQNFVF

SEQ ID NO: 136024 - protein, 17 aa, Homo sapiens
  CDR3 for beta chain variable domain of TCR clone 68012 (TRBV20-1, TRBJ2-1)
CSASSSGLAGSYNEQFL

SEQ ID NO: 136025 - protein, 14 aa, Homo sapiens
  CDR3 for alpha chain variable domain of TCR clone 68013 (TRAV12-2, TRAJ45)
CALPERGGADGLTF

SEQ ID NO: 136026 - protein, 14 aa, Homo sapiens
  CDR3 for beta chain variable domain of TCR clone 68013 (TRBV18, TRBJ1-5)
CASSPGNGNQPQHF

SEQ ID NO: 136027 - protein, 17 aa, Homo sapiens
  CDR3 for alpha chain variable domain of TCR clone 68014 (TRAV4, TRAJ22)
CCVLLPRGGGSARQLTF

SEQ ID NO: 136028 - protein, 14 aa, Homo sapiens
  CDR3 for beta chain variable domain of TCR clone 68014 (TRBV20-1, TRBJ1-1)
CSARAVSGYTEAFF

SEQ ID NO: 136029 - protein, 15 aa, Homo sapiens
  CDR3 for alpha chain variable domain of TCR clone 68015 (TRAV3, TRAJ17)
CAVSPKEAAGNKLTF

SEQ ID NO: 136030 - protein, 12 aa, Homo sapiens
  CDR3 for beta chain variable domain of TCR clone 68015 (TRBV7-9, TRBJ1-6)
CASSLMTPPLHF

SEQ ID NO: 136031 - protein, 14 aa, Homo sapiens
  CDR3 for alpha chain variable domain of TCR clone 68016 (TRAV23/DV6, TRAJ37)
CAASTSSNTGTLIF

SEQ ID NO: 136032 - protein, 13 aa, Homo sapiens
  CDR3 for beta chain variable domain of TCR clone 68016 (TRBV7-7, TRBJ1-1)
CASSLGANTEAFF

SEQ ID NO: 136033 - protein, 16 aa, Homo sapiens
  CDR3 for alpha chain variable domain of TCR clone 68017 (TRAV12-3, TRAJ53)
CAMSPGSGGSNYKLTF

SEQ ID NO: 136034 - protein, 17 aa, Homo sapiens
  CDR3 for beta chain variable domain of TCR clone 68017 (TRBV28, TRBJ2-5)
CASSTAEGDALQETQYF

SEQ ID NO: 136035 - protein, 15 aa, Homo sapiens
  CDR3 for alpha chain variable domain of TCR clone 68018 (TRAV25, TRAJ53)
CPTSNSGGSNYKLTI

SEQ ID NO: 136036 - protein, 14 aa, Homo sapiens
  CDR3 for beta chain variable domain of TCR clone 68018 (TRBV11-2, TRBJ2-3)
CASSRLARTDTQYF

SEQ ID NO: 136037 - protein, 13 aa, Homo sapiens
  CDR3 for alpha chain variable domain of TCR clone 68019 (TRAV21, TRAJ20)
CAVGVFADYKLSF

SEQ ID NO: 136038 - protein, 16 aa, Homo sapiens
  CDR3 for beta chain variable domain of TCR clone 68019 (TRBV7-3, TRBJ2-2)
CASSLKRGTLSGELFF

SEQ ID NO: 136039 - protein, 14 aa, Homo sapiens
  CDR3 for alpha chain variable domain of TCR clone 68020 (TRAV2, TRAJ41)
YAVGTSNSGYALNF

SEQ ID NO: 136040 - protein, 13 aa, Homo sapiens
  CDR3 for beta chain variable domain of TCR clone 68020 (TRBV4-1, TRBJ2-1)
CASSQEVQYEQFF

SEQ ID NO: 136041 - protein, 13 aa, Homo sapiens
  CDR3 for alpha chain variable domain of TCR clone 68021 (TRAV3, TRAJ8)
CAVRFTGFQKLVF

SEQ ID NO: 136042 - protein, 15 aa, Homo sapiens
  CDR3 for beta chain variable domain of TCR clone 68021 (TRBV20-1, TRBJ2-7)
CSARDWVSGMDEQYF

SEQ ID NO: 136043 - protein, 13 aa, Homo sapiens
  CDR3 for alpha chain variable domain of TCR clone 68022 (TRAV13-2, TRAJ53)
CAENMGSNYKLTF

SEQ ID NO: 136044 - protein, 13 aa, Homo sapiens
  CDR3 for beta chain variable domain of TCR clone 68022 (TRBV4-1, TRBJ2-2)
CASSQENTEELFF

SEQ ID NO: 136045 - protein, 14 aa, Homo sapiens
  CDR3 for alpha chain variable domain of TCR clone 68023 (TRAV14/DV4, TRAJ54)
CAMREAPGAQKLVF

SEQ ID NO: 136046 - protein, 15 aa, Homo sapiens
  CDR3 for beta chain variable domain of TCR clone 68023 (TRBV5-1, TRBJ2-7)
CASSLNGGPAREQYL

SEQ ID NO: 136047 - protein, 12 aa, Homo sapiens
  CDR3 for alpha chain variable domain of TCR clone 68024 (TRAV16, TRAJ27)
CALNTNAGKSTF

SEQ ID NO: 136048 - protein, 16 aa, Homo sapiens
  CDR3 for beta chain variable domain of TCR clone 68024 (TRBV19, TRBJ1-1)
CASSPTRFWPGTEAFF

SEQ ID NO: 136049 - protein, 14 aa, Homo sapiens
  CDR3 for alpha chain variable domain of TCR clone 68025 (TRAV1-2, TRAJ16)
CAVNRVSDGQKLLF

SEQ ID NO: 136050 - protein, 12 aa, Homo sapiens
  CDR3 for beta chain variable domain of TCR clone 68025 (TRBV11-2, TRBJ2-1)
CASSPGNNEQFF

SEQ ID NO: 136051 - protein, 20 aa, Homo sapiens
  CDR3 for alpha chain variable domain of TCR clone 68026 (TRAV1-2, TRAJ8)
CAERGHRLSETCIWNWHPTS

SEQ ID NO: 136052 - protein, 15 aa, Homo sapiens
  CDR3 for beta chain variable domain of TCR clone 68026 (TRBV6-3, TRBJ2-7)
CASSSPGTVFYEQYF

SEQ ID NO: 136053 - protein, 14 aa, Homo sapiens
  CDR3 for alpha chain variable domain of TCR clone 68027 (TRAV25, TRAJ22)
CAVRSSGSARQLTF

SEQ ID NO: 136054 - protein, 16 aa, Homo sapiens
  CDR3 for beta chain variable domain of TCR clone 68027 (TRBV4-2, TRBJ1-1)
CDSSPSPGRAAPEAFF

SEQ ID NO: 136055 - protein, 16 aa, Homo sapiens
  CDR3 for alpha chain variable domain of TCR clone 68028 (TRAV3, TRAJ10)
CAVRDMRAGGGNKLTF

SEQ ID NO: 136056 - protein, 18 aa, Homo sapiens
  CDR3 for beta chain variable domain of TCR clone 68028 (TRBV6-6, TRBJ1-3)
CASSYSKWDSISGNTIYF

SEQ ID NO: 136057 - protein, 14 aa, Homo sapiens
  CDR3 for alpha chain variable domain of TCR clone 68029 (TRAV2, TRAJ9)
CAVEDRGGGFKTIF

SEQ ID NO: 136058 - protein, 15 aa, Homo sapiens
  CDR3 for beta chain variable domain of TCR clone 68029 (TRBV6-6, TRBJ2-7)
CASSYSYGGSYEQYF

SEQ ID NO: 136059 - protein, 14 aa, Homo sapiens
  CDR3 for alpha chain variable domain of TCR clone 68030 (TRAV20, TRAJ13)
CAVQVSGGYQKVTF

SEQ ID NO: 136060 - protein, 14 aa, Homo sapiens
  CDR3 for beta chain variable domain of TCR clone 68030 (TRBV19, TRBJ2-1)
CASPTFVLSGEQFF

SEQ ID NO: 136061 - protein, 15 aa, Homo sapiens
  CDR3 for alpha chain variable domain of TCR clone 68031 (TRAV20, TRAJ53)
CAVQASGGSNYKLTF

SEQ ID NO: 136062 - protein, 12 aa, Homo sapiens
  CDR3 for beta chain variable domain of TCR clone 68031 (TRBV7-8, TRBJ2-7)
CASSRGDREQYF

SEQ ID NO: 136063 - protein, 15 aa, Homo sapiens
  CDR3 for alpha chain variable domain of TCR clone 68032 (TRAV3, TRAJ22)
CAVRDRGGSARQLTF

SEQ ID NO: 136064 - protein, 16 aa, Homo sapiens
  CDR3 for beta chain variable domain of TCR clone 68032 (TRBV12-4, TRBJ1-5)
CASSRPVGGSNQPQHF

SEQ ID NO: 136065 - protein, 12 aa, Homo sapiens
  CDR3 for alpha chain variable domain of TCR clone 68033 (TRAV13-2, TRAJ23)
CAERHRGGKLIF

SEQ ID NO: 136066 - protein, 14 aa, Homo sapiens
  CDR3 for beta chain variable domain of TCR clone 68033 (TRBV20-1, TRBJ1-1)
RSAQTRIGGTEAFF

SEQ ID NO: 136067 - protein, 14 aa, Homo sapiens
  CDR3 for alpha chain variable domain of TCR clone 68034 (TRAV12-2, TRAJ24)
CAVTPADSWGKLQF

SEQ ID NO: 136068 - protein, 12 aa, Homo sapiens
  CDR3 for beta chain variable domain of TCR clone 68034 (TRBV3-1, TRBJ2-1)
CASSQGSSGQFL

SEQ ID NO: 136069 - protein, 13 aa, Homo sapiens
  CDR3 for alpha chain variable domain of TCR clone 68035 (TRAV35, TRAJ57)
CWSPQGGSEKLVF

SEQ ID NO: 136070 - protein, 18 aa, Homo sapiens
  CDR3 for beta chain variable domain of TCR clone 68035 (TRBV6-6, TRBJ1-3)
CASSYSEWDSISGNTIYF

SEQ ID NO: 136071 - protein, 15 aa, Homo sapiens
  CDR3 for alpha chain variable domain of TCR clone 68036 (TRAV12-3, TRAJ49)
CAMAVTPNTGNPFYF

SEQ ID NO: 136072 - protein, 18 aa, Homo sapiens
  CDR3 for beta chain variable domain of TCR clone 68036 (TRBV4-1, TRBJ1-5)
CASSQDPRGQGLNQPQHF

SEQ ID NO: 136073 - protein, 14 aa, Homo sapiens
  CDR3 for alpha chain variable domain of TCR clone 68037 (TRAV12-2, TRAJ17)
CAVLFKAAGNKLTF

SEQ ID NO: 136074 - protein, 13 aa, Homo sapiens
  CDR3 for beta chain variable domain of TCR clone 68037 (TRBV11-2, TRBJ2-1)
CASSLDLVNEQFF

SEQ ID NO: 136075 - protein, 16 aa, Homo sapiens
  CDR3 for alpha chain variable domain of TCR clone 68038 (TRAV12-2, TRAJ36)
CGTNNLFFWTGTRLTV

SEQ ID NO: 136076 - protein, 14 aa, Homo sapiens
  CDR3 for beta chain variable domain of TCR clone 68038 (TRBV7-2, TRBJ2-1)
CASSLSRVDNEQFF

SEQ ID NO: 136077 - protein, 11 aa, Homo sapiens
  CDR3 for alpha chain variable domain of TCR clone 68039 (TRAV12-1, TRAJ21)
GVVNNFNKFYF

SEQ ID NO: 136078 - protein, 11 aa, Homo sapiens
  CDR3 for beta chain variable domain of TCR clone 68039 (TRBV10-3, TRBJ2-7)
CAISEGLEQYF

SEQ ID NO: 136079 - protein, 14 aa, Homo sapiens
  CDR3 for alpha chain variable domain of TCR clone 68040 (TRAV35, TRAJ22)
CAGLRPGSARQLTF

SEQ ID NO: 136080 - protein, 13 aa, Homo sapiens
  CDR3 for beta chain variable domain of TCR clone 68040 (TRBV4-1, TRBJ2-1)
CASSQEVQYEQFF

SEQ ID NO: 136081 - protein, 15 aa, Homo sapiens
  CDR3 for alpha chain variable domain of TCR clone 68041 (TRAV13-1, TRAJ17)
CAASIERAAGNKLTF

SEQ ID NO: 136082 - protein, 12 aa, Homo sapiens
  CDR3 for beta chain variable domain of TCR clone 68041 (TRBV5-7, TRBJ1-1)
CASSLGKGKAFF

SEQ ID NO: 136083 - protein, 17 aa, Homo sapiens
  CDR3 for alpha chain variable domain of TCR clone 68042 (TRAV35, TRAJ47)
GLLDCRTHTEYGKKLVF

SEQ ID NO: 136084 - protein, 11 aa, Homo sapiens
  CDR3 for beta chain variable domain of TCR clone 68042 (TRBV29-1, TRBJ1-1)
CSVEVGTRTFF

SEQ ID NO: 136085 - protein, 15 aa, Homo sapiens
  CDR3 for alpha chain variable domain of TCR clone 68043 (TRAV35, TRAJ23)
CAGPLGNNQGGKLIF

SEQ ID NO: 136086 - protein, 15 aa, Homo sapiens
  CDR3 for beta chain variable domain of TCR clone 68043 (TRBV7-9, TRBJ1-5)
CASSQGHQPNQPQHF

SEQ ID NO: 136087 - protein, 14 aa, Homo sapiens
  CDR3 for alpha chain variable domain of TCR clone 68044 (TRAV38-1, TRAJ40)
CALRPTSGTYKYIF

SEQ ID NO: 136088 - protein, 14 aa, Homo sapiens
  CDR3 for beta chain variable domain of TCR clone 68044 (TRBV25-1, TRBJ1-1)
CASTHLGWNTEAFF

SEQ ID NO: 136089 - protein, 11 aa, Homo sapiens
  CDR3 for alpha chain variable domain of TCR clone 68045 (TRAV2, TRAJ33)
CAVESNYQLIW

SEQ ID NO: 136090 - protein, 12 aa, Homo sapiens
  CDR3 for beta chain variable domain of TCR clone 68045 (TRBV12-5, TRBJ2-3)
CASGGAADTQYF

SEQ ID NO: 136091 - protein, 19 aa, Homo sapiens
  CDR3 for alpha chain variable domain of TCR clone 68046 (TRAV2, TRAJ20)
TLQVREADAAVYRDCKLSF

SEQ ID NO: 136092 - protein, 13 aa, Homo sapiens
  CDR3 for beta chain variable domain of TCR clone 68046 (TRBV15, TRBJ1-6)
CATSGGLNSPLHF

SEQ ID NO: 136093 - protein, 16 aa, Homo sapiens
  CDR3 for alpha chain variable domain of TCR clone 68047 (TRAV35, TRAJ37)
CWAFLRGSSNTGKLIF

SEQ ID NO: 136094 - protein, 13 aa, Homo sapiens
  CDR3 for beta chain variable domain of TCR clone 68047 (TRBV2, TRBJ1-2)
CASSVRGNYGDTF

SEQ ID NO: 136095 - protein, 12 aa, Homo sapiens
  CDR3 for alpha chain variable domain of TCR clone 68048 (TRAV12-3, TRAJ40)
CAMSSGTYKYIF

SEQ ID NO: 136096 - protein, 13 aa, Homo sapiens
  CDR3 for beta chain variable domain of TCR clone 68048 (TRBV20-1, TRBJ1-1)
CSARGGGNTEAFF

SEQ ID NO: 136097 - protein, 11 aa, Homo sapiens
  CDR3 for alpha chain variable domain of TCR clone 68049 (TRAV17, TRAJ21)
CATGNFNKFYF

SEQ ID NO: 136098 - protein, 16 aa, Homo sapiens
  CDR3 for beta chain variable domain of TCR clone 68049 (TRBV2, TRBJ2-1)
CASSANPRDWQAEQFF

SEQ ID NO: 136099 - protein, 13 aa, Homo sapiens
  CDR3 for alpha chain variable domain of TCR clone 68050 (TRAV22, TRAJ48)
CAVGRFGNEKLTF

SEQ ID NO: 136100 - protein, 12 aa, Homo sapiens
  CDR3 for beta chain variable domain of TCR clone 68050 (TRBV19, TRBJ2-7)
CASTSGTYEQYF

SEQ ID NO: 136101 - protein, 15 aa, Homo sapiens
  CDR3 for alpha chain variable domain of TCR clone 68051 (TRAV21, TRAJ53)
CATLNSGGSNYKLTF

SEQ ID NO: 136102 - protein, 13 aa, Homo sapiens
  CDR3 for beta chain variable domain of TCR clone 68051 (TRBV12-5, TRBJ2-3)
CASGDRQSDTQYF

SEQ ID NO: 136103 - protein, 14 aa, Homo sapiens
  CDR3 for alpha chain variable domain of TCR clone 68052 (TRAV8-4, TRAJ9)
CAVRINTGGFKTIF

SEQ ID NO: 136104 - protein, 14 aa, Homo sapiens
  CDR3 for beta chain variable domain of TCR clone 68052 (TRBV19, TRBJ2-1)
CASPTFVLSGEQFF

SEQ ID NO: 136105 - protein, 11 aa, Homo sapiens
  CDR3 for alpha chain variable domain of TCR clone 68053 (TRAV3, TRAJ21)
CAVGNFNKFYF

SEQ ID NO: 136106 - protein, 14 aa, Homo sapiens
  CDR3 for beta chain variable domain of TCR clone 68053 (TRBV7-9, TRBJ2-2)
CASSLVQDTGELFF

SEQ ID NO: 136107 - protein, 14 aa, Homo sapiens
  CDR3 for alpha chain variable domain of TCR clone 68054 (TRAV23/DV6, TRAJ11)
CAALVGGGYSTLTF

SEQ ID NO: 136108 - protein, 13 aa, Homo sapiens
  CDR3 for beta chain variable domain of TCR clone 68054 (TRBV11-3, TRBJ1-1)
CASSLGGNTEAFF

SEQ ID NO: 136109 - protein, 19 aa, Homo sapiens
  CDR3 for alpha chain variable domain of TCR clone 68055 (TRAV25, TRAJ43)
TATQTTDIGTYFCAVFMRF

SEQ ID NO: 136110 - protein, 13 aa, Homo sapiens
  CDR3 for beta chain variable domain of TCR clone 68055 (TRBV7-9, TRBJ1-2)
CASSLKQNYGYTF

SEQ ID NO: 136111 - protein, 17 aa, Homo sapiens
  CDR3 for alpha chain variable domain of TCR clone 68056 (TRAV38-2/DV8, TRAJ23)
CALSRKLIFGQGTELSV

SEQ ID NO: 136112 - protein, 17 aa, Homo sapiens
  CDR3 for beta chain variable domain of TCR clone 68056 (TRBV5-4, TRBJ2-1)
CASSSAGGRGPYDEQFF

SEQ ID NO: 136113 - protein, 17 aa, Homo sapiens
  CDR3 for alpha chain variable domain of TCR clone 68057 (TRAV3, TRAJ6)
CAVRDGPRAGGSYIPNF

SEQ ID NO: 136114 - protein, 20 aa, Homo sapiens
  CDR3 for beta chain variable domain of TCR clone 68057 (TRBV28, TRBJ2-1)
CASTPIGRSPGLAGGNEQFF

SEQ ID NO: 136115 - protein, 14 aa, Homo sapiens
  CDR3 for alpha chain variable domain of TCR clone 68058 (TRAV8-3, TRAJ9)
CAVVYNTGGFKTIF

SEQ ID NO: 136116 - protein, 16 aa, Homo sapiens
  CDR3 for beta chain variable domain of TCR clone 68058 (TRBV7-3, TRBJ2-2)
CARSLKRGTLSGELFF

SEQ ID NO: 136117 - protein, 11 aa, Homo sapiens
  CDR3 for alpha chain variable domain of TCR clone 68059 (TRAV35, TRAJ34)
CWARNTDKLIF

SEQ ID NO: 136118 - protein, 14 aa, Homo sapiens
  CDR3 for beta chain variable domain of TCR clone 68059 (TRBV4-2, TRBJ2-1)
CASGLDRAYNEQFF

SEQ ID NO: 136119 - protein, 14 aa, Homo sapiens
  CDR3 for alpha chain variable domain of TCR clone 68060 (TRAV26-1, TRAJ21)
CIVRVVYNSNKFYF

SEQ ID NO: 136120 - protein, 11 aa, Homo sapiens
  CDR3 for beta chain variable domain of TCR clone 68060 (TRBV5-6, TRBJ2-5)
CASSLERTQYF

SEQ ID NO: 136121 - protein, 13 aa, Homo sapiens
  CDR3 for alpha chain variable domain of TCR clone 68061 (TRAV2, TRAJ20)
CAVGDPSEYKLSF

SEQ ID NO: 136122 - protein, 16 aa, Homo sapiens
  CDR3 for beta chain variable domain of TCR clone 68061 (TRBV25-1, TRBJ2-7)
CASSELTGGGIYEQYF

SEQ ID NO: 136123 - protein, 11 aa, Homo sapiens
  CDR3 for alpha chain variable domain of TCR clone 68062 (TRAV21, TRAJ34)
CAHYNTDKLIF

SEQ ID NO: 136124 - protein, 12 aa, Homo sapiens
  CDR3 for beta chain variable domain of TCR clone 68062 (TRBV11-2, TRBJ2-2)
CASSLGGGELFF

SEQ ID NO: 136125 - protein, 14 aa, Homo sapiens
  CDR3 for alpha chain variable domain of TCR clone 68063 (TRAV2, TRAJ9)
CAVEDRSGGFKTIF

SEQ ID NO: 136126 - protein, 16 aa, Homo sapiens
  CDR3 for beta chain variable domain of TCR clone 68063 (TRBV7-3, TRBJ2-2)
CAGSLKRGTLSGELFF

SEQ ID NO: 136127 - protein, 16 aa, Homo sapiens
  CDR3 for alpha chain variable domain of TCR clone 68064 (TRAV27, TRAJ34)
CAGGGLGDYNTDKLIF

SEQ ID NO: 136128 - protein, 15 aa, Homo sapiens
  CDR3 for beta chain variable domain of TCR clone 68064 (TRBV9, TRBJ1-4)
CASSVGGSTNGKLFF

SEQ ID NO: 136129 - protein, 11 aa, Homo sapiens
  CDR3 for alpha chain variable domain of TCR clone 68065 (TRAV1-2, TRAJ20)
CAVANDYKLSF

SEQ ID NO: 136130 - protein, 14 aa, Homo sapiens
  CDR3 for beta chain variable domain of TCR clone 68065 (TRBV7-9, TRBJ2-1)
CASRPTGLRNEQFF

SEQ ID NO: 136131 - protein, 13 aa, Homo sapiens
  CDR3 for alpha chain variable domain of TCR clone 68066 (TRAV23/DV6, TRAJ21)
CAASREQLQQILL

SEQ ID NO: 136132 - protein, 11 aa, Homo sapiens
  CDR3 for beta chain variable domain of TCR clone 68066 (TRBV24-1, TRBJ2-3)
CATSDLDTQYF

SEQ ID NO: 136133 - protein, 13 aa, Homo sapiens
  CDR3 for alpha chain variable domain of TCR clone 68067 (TRAV2, TRAJ40)
CVVVTSGTYKYIF

SEQ ID NO: 136134 - protein, 14 aa, Homo sapiens
  CDR3 for beta chain variable domain of TCR clone 68067 (TRBV7-6, TRBJ2-1)
CASSLGGGADEQFF

SEQ ID NO: 136135 - protein, 10 aa, Homo sapiens
  CDR3 for alpha chain variable domain of TCR clone 68068 (TRAV1-2, TRAJ20)
CACNDYKLSF

SEQ ID NO: 136136 - protein, 16 aa, Homo sapiens
  CDR3 for beta chain variable domain of TCR clone 68068 (TRBV20-1, TRBJ2-1)
CSARDLKQGMNNEHFF

SEQ ID NO: 136137 - protein, 14 aa, Homo sapiens
  CDR3 for alpha chain variable domain of TCR clone 68069 (TRAV12-3, TRAJ10)
SHLPLTGGGDKLTF

SEQ ID NO: 136138 - protein, 12 aa, Homo sapiens
  CDR3 for beta chain variable domain of TCR clone 68069 (TRBV11-2, TRBJ2-2)
CASSLGGGELFF

SEQ ID NO: 136139 - protein, 14 aa, Homo sapiens
  CDR3 for alpha chain variable domain of TCR clone 68070 (TRAV4, TRAJ29)
CLGGPDSGNTPLVF

SEQ ID NO: 136140 - protein, 15 aa, Homo sapiens
  CDR3 for beta chain variable domain of TCR clone 68070 (TRBV7-6, TRBJ2-7)
CASSNRDSPFGEQYF

SEQ ID NO: 136141 - protein, 14 aa, Homo sapiens
  CDR3 for alpha chain variable domain of TCR clone 68071 (TRAV9-2, TRAJ39)
CALYIYNAGNMLTF

SEQ ID NO: 136142 - protein, 15 aa, Homo sapiens
  CDR3 for beta chain variable domain of TCR clone 68071 (TRBV28, TRBJ2-1)
CASSGLAEVDNEQFF

SEQ ID NO: 136143 - protein, 15 aa, Homo sapiens
  CDR3 for alpha chain variable domain of TCR clone 68072 (TRAV29/DV5, TRAJ42)
CAAKTDGGSKGNLIF

SEQ ID NO: 136144 - protein, 12 aa, Homo sapiens
  CDR3 for beta chain variable domain of TCR clone 68072 (TRBV11-2, TRBJ2-1)
CASSPGNNEQFF

SEQ ID NO: 136145 - protein, 12 aa, Homo sapiens
  CDR3 for alpha chain variable domain of TCR clone 68073 (TRAV1-1, TRAJ39)
CAVPVVGNMLTF

SEQ ID NO: 136146 - protein, 13 aa, Homo sapiens
  CDR3 for beta chain variable domain of TCR clone 68073 (TRBV28, TRBJ2-5)
CASRDRGRKTQYF

SEQ ID NO: 136147 - protein, 11 aa, Homo sapiens
  CDR3 for alpha chain variable domain of TCR clone 68074 (TRAV2, TRAJ13)
CASGGYQKVTF

SEQ ID NO: 136148 - protein, 13 aa, Homo sapiens
  CDR3 for beta chain variable domain of TCR clone 68074 (TRBV20-1, TRBJ1-1)
CSAGTVGNTEAFF

SEQ ID NO: 136149 - protein, 16 aa, Homo sapiens
  CDR3 for alpha chain variable domain of TCR clone 68075 (TRAV20, TRAJ22)
CAVQASSSGSARQLTF

SEQ ID NO: 136150 - protein, 13 aa, Homo sapiens
  CDR3 for beta chain variable domain of TCR clone 68075 (TRBV7-2, TRBJ2-5)
CASSQTSLETQYF

SEQ ID NO: 136151 - protein, 15 aa, Homo sapiens
  CDR3 for alpha chain variable domain of TCR clone 68076 (TRAV21, TRAJ24)
CAARSSTDSWGKLQF

SEQ ID NO: 136152 - protein, 15 aa, Homo sapiens
  CDR3 for beta chain variable domain of TCR clone 68076 (TRBV20-1, TRBJ2-7)
CSARDRVSGMDEQYF

SEQ ID NO: 136153 - protein, 14 aa, Homo sapiens
  CDR3 for alpha chain variable domain of TCR clone 68077 (TRAV1-2, TRAJ8)
CAVREGTGFQKLVF

SEQ ID NO: 136154 - protein, 15 aa, Homo sapiens
  CDR3 for beta chain variable domain of TCR clone 68077 (TRBV6-3, TRBJ2-7)
CASSSPGAVFYEQYF

SEQ ID NO: 136155 - protein, 14 aa, Homo sapiens
  CDR3 for alpha chain variable domain of TCR clone 68078 (TRAV8-6, TRAJ5)
CAGSVDTGRRALTF

SEQ ID NO: 136156 - protein, 14 aa, Homo sapiens
  CDR3 for beta chain variable domain of TCR clone 68078 (TRBV6-1, TRBJ1-3)
CASVQGGGGNTIYF

SEQ ID NO: 136157 - protein, 13 aa, Homo sapiens
  CDR3 for alpha chain variable domain of TCR clone 68079 (TRAV36/DV7, TRAJ7)
CAGTRYGNNRLAF

SEQ ID NO: 136158 - protein, 15 aa, Homo sapiens
  CDR3 for beta chain variable domain of TCR clone 68079 (TRBV11-3, TRBJ2-7)
CASSHGPASSYEQYF

SEQ ID NO: 136159 - protein, 15 aa, Homo sapiens
  CDR3 for alpha chain variable domain of TCR clone 68080 (TRAV3, TRAJ47)
CAVRDTGEYGNRLVF

SEQ ID NO: 136160 - protein, 14 aa, Homo sapiens
  CDR3 for beta chain variable domain of TCR clone 68080 (TRBV13, TRBJ2-5)
CASSLERVGETQYS

SEQ ID NO: 136161 - protein, 14 aa, Homo sapiens
  CDR3 for alpha chain variable domain of TCR clone 68081 (TRAV20, TRAJ22)
CAVALGGSARQLNF

SEQ ID NO: 136162 - protein, 15 aa, Homo sapiens
  CDR3 for beta chain variable domain of TCR clone 68081 (TRBV7-2, TRBJ1-1)
CASSFAGDRDTEAFF

SEQ ID NO: 136163 - protein, 13 aa, Homo sapiens
  CDR3 for alpha chain variable domain of TCR clone 68082 (TRAV12-1, TRAJ29)
CVVRDSGNTPLVF

SEQ ID NO: 136164 - protein, 14 aa, Homo sapiens
  CDR3 for beta chain variable domain of TCR clone 68082 (TRBV7-2, TRBJ2-7)
CASRSQGAAYEQYF

SEQ ID NO: 136165 - protein, 12 aa, Homo sapiens
  CDR3 for alpha chain variable domain of TCR clone 68083 (TRAV13-2, TRAJ23)
YAERHRGGKLIF

SEQ ID NO: 136166 - protein, 15 aa, Homo sapiens
  CDR3 for beta chain variable domain of TCR clone 68083 (TRBV15, TRBJ2-1)
CATSRPGQGLHEQFF

SEQ ID NO: 136167 - protein, 15 aa, Homo sapiens
  CDR3 for alpha chain variable domain of TCR clone 68084 (TRAV26-1, TRAJ29)
CIVRVEGSGNNPLVF

SEQ ID NO: 136168 - protein, 15 aa, Homo sapiens
  CDR3 for beta chain variable domain of TCR clone 68084 (TRBV7-9, TRBJ1-5)
CASSQGHQPNQPQHF

SEQ ID NO: 136169 - protein, 13 aa, Homo sapiens
  CDR3 for alpha chain variable domain of TCR clone 68085 (TRAV8-3, TRAJ15)
CATINQAGTALIF

SEQ ID NO: 136170 - protein, 13 aa, Homo sapiens
  CDR3 for beta chain variable domain of TCR clone 68085 (TRBV12-4, TRBJ2-1)
CASRQPSNNEQFF

SEQ ID NO: 136171 - protein, 13 aa, Homo sapiens
  CDR3 for alpha chain variable domain of TCR clone 68086 (TRAV27, TRAJ49)
CAPRPYTGNQFYF

SEQ ID NO: 136172 - protein, 16 aa, Homo sapiens
  CDR3 for beta chain variable domain of TCR clone 68086 (TRBV4-1, TRBJ1-2)
CASSQDEGQVLYGYTF

SEQ ID NO: 136173 - protein, 14 aa, Homo sapiens
  CDR3 for alpha chain variable domain of TCR clone 68087 (TRAV38-2/DV8, TRAJ42)
CAYPEGGSQGNLIF

SEQ ID NO: 136174 - protein, 15 aa, Homo sapiens
  CDR3 for beta chain variable domain of TCR clone 68087 (TRBV19, TRBJ2-1)
CASSTGTSSYNEHFF

SEQ ID NO: 136175 - protein, 17 aa, Homo sapiens
  CDR3 for alpha chain variable domain of TCR clone 68088 (TRAV3, TRAJ6)
CAVRDDPRAGGSYIPTF

SEQ ID NO: 136176 - protein, 14 aa, Homo sapiens
  CDR3 for beta chain variable domain of TCR clone 68088 (TRBV7-2, TRBJ2-7)
RASSPKTSFYEQYF

SEQ ID NO: 136177 - protein, 11 aa, Homo sapiens
  CDR3 for alpha chain variable domain of TCR clone 68089 (TRAV2, TRAJ13)
CASGGYQKVTF

SEQ ID NO: 136178 - protein, 16 aa, Homo sapiens
  CDR3 for beta chain variable domain of TCR clone 68089 (TRBV4-1, TRBJ2-5)
CASSSGLAGVLGTQYF

SEQ ID NO: 136179 - protein, 11 aa, Homo sapiens
  CDR3 for alpha chain variable domain of TCR clone 68090 (TRAV3, TRAJ21)
CAVGNFNKFYF

SEQ ID NO: 136180 - protein, 16 aa, Homo sapiens
  CDR3 for beta chain variable domain of TCR clone 68090 (TRBV19, TRBJ2-1)
CAGSRAGPSSYNEQFF

SEQ ID NO: 136181 - protein, 14 aa, Homo sapiens
  CDR3 for alpha chain variable domain of TCR clone 68091 (TRAV1-2, TRAJ16)
YAVNRFSDGQKLLF

SEQ ID NO: 136182 - protein, 14 aa, Homo sapiens
  CDR3 for beta chain variable domain of TCR clone 68091 (TRBV7-9, TRBJ2-3)
CASSLEDGTDTQYF

SEQ ID NO: 136183 - protein, 15 aa, Homo sapiens
  CDR3 for alpha chain variable domain of TCR clone 68092 (TRAV3, TRAJ32)
CAVSSYGGAKNKLIF

SEQ ID NO: 136184 - protein, 13 aa, Homo sapiens
  CDR3 for beta chain variable domain of TCR clone 68092 (TRBV20-1, TRBJ2-7)
CSARPSTNYEQYF

SEQ ID NO: 136185 - protein, 13 aa, Homo sapiens
  CDR3 for alpha chain variable domain of TCR clone 68093 (TRAV12-1, TRAJ33)
CGDAPDSNYQLIW

SEQ ID NO: 136186 - protein, 14 aa, Homo sapiens
  CDR3 for beta chain variable domain of TCR clone 68093 (TRBV13, TRBJ2-7)
CASSLEGASYEQYF

SEQ ID NO: 136187 - protein, 13 aa, Homo sapiens
  CDR3 for alpha chain variable domain of TCR clone 68094 (TRAV27, TRAJ54)
CSGAGQGAQKLVF

SEQ ID NO: 136188 - protein, 15 aa, Homo sapiens
  CDR3 for beta chain variable domain of TCR clone 68094 (TRBV18, TRBJ2-6)
CASSPSYAGANVLTF

SEQ ID NO: 136189 - protein, 15 aa, Homo sapiens
  CDR3 for alpha chain variable domain of TCR clone 68095 (TRAV26-1, TRAJ29)
CIVRAEGPGNTPLVF

SEQ ID NO: 136190 - protein, 14 aa, Homo sapiens
  CDR3 for beta chain variable domain of TCR clone 68095 (TRBV18, TRBJ2-5)
CASSPGVSQETQYF

SEQ ID NO: 136191 - protein, 18 aa, Homo sapiens
  CDR3 for alpha chain variable domain of TCR clone 68096 (TRAV26-1, TRAJ52)
CIVGVAGAGGTSYGKLTF

SEQ ID NO: 136192 - protein, 13 aa, Homo sapiens
  CDR3 for beta chain variable domain of TCR clone 68096 (TRBV7-8, TRBJ1-2)
CASSAQSYYGYTF

SEQ ID NO: 136193 - protein, 16 aa, Homo sapiens
  CDR3 for alpha chain variable domain of TCR clone 68097 (TRAV8-3, TRAJ4)
CAVEDRFSGGYNKLIF

SEQ ID NO: 136194 - protein, 13 aa, Homo sapiens
  CDR3 for beta chain variable domain of TCR clone 68097 (TRBV7-7, TRBJ2-5)
CASSRSGQETRYF

SEQ ID NO: 136195 - protein, 14 aa, Homo sapiens
  CDR3 for alpha chain variable domain of TCR clone 68098 (TRAV16, TRAJ26)
CALSSANYGQNFVS

SEQ ID NO: 136196 - protein, 16 aa, Homo sapiens
  CDR3 for beta chain variable domain of TCR clone 68098 (TRBV20-1, TRBJ1-4)
CSAPGQGLLTNEKLFF

SEQ ID NO: 136197 - protein, 12 aa, Homo sapiens
  CDR3 for alpha chain variable domain of TCR clone 68099 (TRAV12-2, TRAJ16)
CAVAPDGQKLLF

SEQ ID NO: 136198 - protein, 13 aa, Homo sapiens
  CDR3 for beta chain variable domain of TCR clone 68099 (TRBV10-3, TRBJ2-7)
CASKLAVNYEQYF

SEQ ID NO: 136199 - protein, 15 aa, Homo sapiens
  CDR3 for alpha chain variable domain of TCR clone 68100 (TRAV12-3, TRAJ6)
CAMSATTGGSYIPTF

SEQ ID NO: 136200 - protein, 14 aa, Homo sapiens
  CDR3 for beta chain variable domain of TCR clone 68100 (TRBV7-3, TRBJ1-1)
CASSLKGGNTEAFF

SEQ ID NO: 136201 - protein, 15 aa, Homo sapiens
  CDR3 for alpha chain variable domain of TCR clone 68101 (TRAV12-1, TRAJ15)
CVVIRANQAGTALIF

SEQ ID NO: 136202 - protein, 14 aa, Homo sapiens
  CDR3 for beta chain variable domain of TCR clone 68101 (TRBV5-1, TRBJ1-1)
CASSLVSINTEAFF

SEQ ID NO: 136203 - protein, 17 aa, Homo sapiens
  CDR3 for alpha chain variable domain of TCR clone 68102 (TRAV26-2, TRAJ42)
CILRDVGYGGSPGNLIF

SEQ ID NO: 136204 - protein, 16 aa, Homo sapiens
  CDR3 for beta chain variable domain of TCR clone 68102 (TRBV12-4, TRBJ2-7)
CASSLIGGTGTYEQYF

SEQ ID NO: 136205 - protein, 12 aa, Homo sapiens
  CDR3 for alpha chain variable domain of TCR clone 68103 (TRAV3, TRAJ20)
CAVRDPDYKLSF

SEQ ID NO: 136206 - protein, 16 aa, Homo sapiens
  CDR3 for beta chain variable domain of TCR clone 68103 (TRBV12-4, TRBJ1-5)
CASSRPVGGSNQPQHF

SEQ ID NO: 136207 - protein, 18 aa, Homo sapiens
  CDR3 for alpha chain variable domain of TCR clone 68104 (TRAV26-1, TRAJ22)
CIVRVALISSGSARQLTF

SEQ ID NO: 136208 - protein, 16 aa, Homo sapiens
  CDR3 for beta chain variable domain of TCR clone 68104 (TRBV5-1, TRBJ1-1)
CASSSGGNSLNTEAFF

SEQ ID NO: 136209 - protein, 14 aa, Homo sapiens
  CDR3 for alpha chain variable domain of TCR clone 68105 (TRAV12-3, TRAJ10)
SHLPLTGGGNKLTF

SEQ ID NO: 136210 - protein, 14 aa, Homo sapiens
  CDR3 for beta chain variable domain of TCR clone 68105 (TRBV6-1, TRBJ1-3)
CASVQGGGGTTIYF

SEQ ID NO: 136211 - protein, 15 aa, Homo sapiens
  CDR3 for alpha chain variable domain of TCR clone 68106 (TRAV21, TRAJ53)
CAVRQSGGSNYKLTF

SEQ ID NO: 136212 - protein, 13 aa, Homo sapiens
  CDR3 for beta chain variable domain of TCR clone 68106 (TRBV7-9, TRBJ2-1)
CASSLGTVNEQFF

SEQ ID NO: 136213 - protein, 16 aa, Homo sapiens
  CDR3 for alpha chain variable domain of TCR clone 68107 (TRAV17, TRAJ22)
CATGPISSGSARQLTF

SEQ ID NO: 136214 - protein, 13 aa, Homo sapiens
  CDR3 for beta chain variable domain of TCR clone 68107 (TRBV11-2, TRBJ2-1)
CASSLGLAGERFF

SEQ ID NO: 136215 - protein, 17 aa, Homo sapiens
  CDR3 for alpha chain variable domain of TCR clone 68108 (TRAV3, TRAJ6)
CAVRDGPRAGGSYTPTF

SEQ ID NO: 136216 - protein, 13 aa, Homo sapiens
  CDR3 for beta chain variable domain of TCR clone 68108 (TRBV10-3, TRBJ2-7)
CASKLAVNYEQYF

SEQ ID NO: 136217 - protein, 14 aa, Homo sapiens
  CDR3 for alpha chain variable domain of TCR clone 68109 (TRAV1-2, TRAJ8)
CAVREDTGFQKLVF

SEQ ID NO: 136218 - protein, 17 aa, Homo sapiens
  CDR3 for beta chain variable domain of TCR clone 68109 (TRBV11-2, TRBJ2-1)
CASSLYPSGVEYNEQFF

SEQ ID NO: 136219 - protein, 18 aa, Homo sapiens
  CDR3 for alpha chain variable domain of TCR clone 68110 (TRAV26-1, TRAJ23)
CIVRVGLEVWNQGGKLIF

SEQ ID NO: 136220 - protein, 16 aa, Homo sapiens
  CDR3 for beta chain variable domain of TCR clone 68110 (TRBV12-4, TRBJ2-5)
CASRFFVRGRQETQYF

SEQ ID NO: 136221 - protein, 12 aa, Homo sapiens
  CDR3 for alpha chain variable domain of TCR clone 68111 (TRAV8-3, TRAJ20)
CAVGANDYKLSF

SEQ ID NO: 136222 - protein, 15 aa, Homo sapiens
  CDR3 for beta chain variable domain of TCR clone 68111 (TRBV20-1, TRBJ2-7)
CSARVPAAYFYEQYF

SEQ ID NO: 136223 - protein, 14 aa, Homo sapiens
  CDR3 for alpha chain variable domain of TCR clone 68112 (TRAV8-2, TRAJ23)
CVVSDDNQGGKLIF

SEQ ID NO: 136224 - protein, 16 aa, Homo sapiens
  CDR3 for beta chain variable domain of TCR clone 68112 (TRBV4-2, TRBJ2-5)
CASSQELAGSQETQYF

SEQ ID NO: 136225 - protein, 16 aa, Homo sapiens
  CDR3 for alpha chain variable domain of TCR clone 68113 (TRAV14/DV4, TRAJ54)
CAMREGRIQGAQKLVF

SEQ ID NO: 136226 - protein, 13 aa, Homo sapiens
  CDR3 for beta chain variable domain of TCR clone 68113 (TRBV2, TRBJ1-5)
CATAGPGNQPQHF

SEQ ID NO: 136227 - protein, 13 aa, Homo sapiens
  CDR3 for alpha chain variable domain of TCR clone 68114 (TRAV2, TRAJ15)
CAVASQAGTALIF

SEQ ID NO: 136228 - protein, 14 aa, Homo sapiens
  CDR3 for beta chain variable domain of TCR clone 68114 (TRBV7-2, TRBJ2-3)
CASRRGLAADTQYF

SEQ ID NO: 136229 - protein, 14 aa, Homo sapiens
  CDR3 for alpha chain variable domain of TCR clone 68115 (TRAV8-4, TRAJ38)
CARLNAGNNRKLIL

SEQ ID NO: 136230 - protein, 12 aa, Homo sapiens
  CDR3 for beta chain variable domain of TCR clone 68115 (TRBV6-1, TRBJ2-7)
CASSEPLYEQYF

SEQ ID NO: 136231 - protein, 11 aa, Homo sapiens
  CDR3 for alpha chain variable domain of TCR clone 68116 (TRAV12-3, TRAJ27)
CAMANAGKSTF

SEQ ID NO: 136232 - protein, 14 aa, Homo sapiens
  CDR3 for beta chain variable domain of TCR clone 68116 (TRBV4-1, TRBJ2-2)
CASSQAVNTGELFL

SEQ ID NO: 136233 - protein, 15 aa, Homo sapiens
  CDR3 for alpha chain variable domain of TCR clone 68117 (TRAV8-3, TRAJ45)
CASSYSGGGADGLTF

SEQ ID NO: 136234 - protein, 14 aa, Homo sapiens
  CDR3 for beta chain variable domain of TCR clone 68117 (TRBV18, TRBJ2-7)
CASSPRGGAYEQYF

SEQ ID NO: 136235 - protein, 10 aa, Homo sapiens
  CDR3 for alpha chain variable domain of TCR clone 68118 (TRAV21, TRAJ31)
CAVDNARLMF

SEQ ID NO: 136236 - protein, 13 aa, Homo sapiens
  CDR3 for beta chain variable domain of TCR clone 68118 (TRBV4-1, TRBJ1-1)
CASSRKMSTEAFF

SEQ ID NO: 136237 - protein, 13 aa, Homo sapiens
  CDR3 for alpha chain variable domain of TCR clone 68119 (TRAV21, TRAJ57)
CAVTQGGPEKLVL

SEQ ID NO: 136238 - protein, 16 aa, Homo sapiens
  CDR3 for beta chain variable domain of TCR clone 68119 (TRBV29-1, TRBJ2-7)
CSVEDAEDGTAYEQYF

SEQ ID NO: 136239 - protein, 11 aa, Homo sapiens
  CDR3 for alpha chain variable domain of TCR clone 68120 (TRAV12-3, TRAJ16)
LTGGDGQKRLF

SEQ ID NO: 136240 - protein, 13 aa, Homo sapiens
  CDR3 for beta chain variable domain of TCR clone 68120 (TRBV12-4, TRBJ1-4)
CASAMGHNEKLFF

SEQ ID NO: 136241 - protein, 14 aa, Homo sapiens
  CDR3 for alpha chain variable domain of TCR clone 68121 (TRAV1-2, TRAJ8)
CAVREDAGFQKLVF

SEQ ID NO: 136242 - protein, 16 aa, Homo sapiens
  CDR3 for beta chain variable domain of TCR clone 68121 (TRBV15, TRBJ2-3)
CATSRDLGIVTDTQYF

SEQ ID NO: 136243 - protein, 14 aa, Homo sapiens
  CDR3 for alpha chain variable domain of TCR clone 68122 (TRAV16, TRAJ17)
CALSGRAAGNKLTF

SEQ ID NO: 136244 - protein, 15 aa, Homo sapiens
  CDR3 for beta chain variable domain of TCR clone 68122 (TRBV3-1, TRBJ1-2)
CASSPTRLPEGGYTV

SEQ ID NO: 136245 - protein, 11 aa, Homo sapiens
  CDR3 for alpha chain variable domain of TCR clone 68123 (TRAV2, TRAJ33)
CAVESNYQLIW

SEQ ID NO: 136246 - protein, 15 aa, Homo sapiens
  CDR3 for beta chain variable domain of TCR clone 68123 (TRBV19, TRBJ1-1)
CASTSGQVKNTEAFF

SEQ ID NO: 136247 - protein, 12 aa, Homo sapiens
  CDR3 for alpha chain variable domain of TCR clone 68124 (TRAV1-1, TRAJ44)
CAVPVVGNMLTF

SEQ ID NO: 136248 - protein, 14 aa, Homo sapiens
  CDR3 for beta chain variable domain of TCR clone 68124 (TRBV11-2, TRBJ2-3)
CANSRLARTDTQYF

SEQ ID NO: 136249 - protein, 12 aa, Homo sapiens
  CDR3 for alpha chain variable domain of TCR clone 68125 (TRAV13-1, TRAJ27)
CAAHTNAGKSTF

SEQ ID NO: 136250 - protein, 14 aa, Homo sapiens
  CDR3 for beta chain variable domain of TCR clone 68125 (TRBV19, TRBJ2-2)
CASSGQGIAWELFF

SEQ ID NO: 136251 - protein, 13 aa, Homo sapiens
  CDR3 for alpha chain variable domain of TCR clone 68126 (TRAV26-2, TRAJ57)
CILSRGGSEKLVL

SEQ ID NO: 136252 - protein, 16 aa, Homo sapiens
  CDR3 for beta chain variable domain of TCR clone 68126 (TRBV18, TRBJ1-5)
CASSPRTGGGNQPQHF

SEQ ID NO: 136253 - protein, 13 aa, Homo sapiens
  CDR3 for alpha chain variable domain of TCR clone 68127 (TRAV13-1, TRAJ6)
CAASKGGSYIPTF

SEQ ID NO: 136254 - protein, 15 aa, Homo sapiens
  CDR3 for beta chain variable domain of TCR clone 68127 (TRBV7-3, TRBJ2-1)
CASSPTGGGEVEQFF

SEQ ID NO: 136255 - protein, 18 aa, Homo sapiens
  CDR3 for alpha chain variable domain of TCR clone 68128 (TRAV21, TRAJ52)
CAVRPSPAGGTSYGKLTF

SEQ ID NO: 136256 - protein, 14 aa, Homo sapiens
  CDR3 for beta chain variable domain of TCR clone 68128 (TRBV13, TRBJ2-5)
CASSLGTAQETQYF

SEQ ID NO: 136257 - protein, 16 aa, Homo sapiens
  CDR3 for alpha chain variable domain of TCR clone 68129 (TRAV4, TRAJ22)
CLVGDLYSGSARQLTF

SEQ ID NO: 136258 - protein, 13 aa, Homo sapiens
  CDR3 for beta chain variable domain of TCR clone 68129 (TRBV28, TRBJ2-5)
CASSFAGGETQYF

SEQ ID NO: 136259 - protein, 14 aa, Homo sapiens
  CDR3 for alpha chain variable domain of TCR clone 68130 (TRAV2, TRAJ37)
CAVDFTSNTGKLIF

SEQ ID NO: 136260 - protein, 16 aa, Homo sapiens
  CDR3 for beta chain variable domain of TCR clone 68130 (TRBV29-1, TRBJ2-2)
CSVETRASGNTGELFF

SEQ ID NO: 136261 - protein, 16 aa, Homo sapiens
  CDR3 for alpha chain variable domain of TCR clone 68131 (TRAV30, TRAJ24)
CGTEIVDADSWGKFQF

SEQ ID NO: 136262 - protein, 12 aa, Homo sapiens
  CDR3 for beta chain variable domain of TCR clone 68131 (TRBV18, TRBJ1-1)
CASSPGGTEAFF

SEQ ID NO: 136263 - protein, 17 aa, Homo sapiens
  CDR3 for alpha chain variable domain of TCR clone 68132 (TRAV23/DV6, TRAJ58)
CSARLLRGETSGSRLTF

SEQ ID NO: 136264 - protein, 15 aa, Homo sapiens
  CDR3 for beta chain variable domain of TCR clone 68132 (TRBV4-1, TRBJ1-4)
CASSDTGGTNEKLFF

SEQ ID NO: 136265 - protein, 14 aa, Homo sapiens
  CDR3 for alpha chain variable domain of TCR clone 68133 (TRAV38-1, TRAJ45)
CDYYSGGGADGLTF

SEQ ID NO: 136266 - protein, 20 aa, Homo sapiens
  CDR3 for beta chain variable domain of TCR clone 68133 (TRBV28, TRBJ2-1)
CASTPIGRSPGLAGGNEQFF

SEQ ID NO: 136267 - protein, 12 aa, Homo sapiens
  CDR3 for alpha chain variable domain of TCR clone 68134 (TRAV12-1, TRAJ23)
CVVRNQGGKLIF

SEQ ID NO: 136268 - protein, 16 aa, Homo sapiens
  CDR3 for beta chain variable domain of TCR clone 68134 (TRBV7-3, TRBJ2-2)
CASSLKRGTLSGELFF

SEQ ID NO: 136269 - protein, 12 aa, Homo sapiens
  CDR3 for alpha chain variable domain of TCR clone 68135 (TRAV12-1, TRAJ40)
CVVYSGTYKYIF

SEQ ID NO: 136270 - protein, 18 aa, Homo sapiens
  CDR3 for beta chain variable domain of TCR clone 68135 (TRBV11-3, TRBJ2-3)
CASSLGGASREAPNTQYF

SEQ ID NO: 136271 - protein, 15 aa, Homo sapiens
  CDR3 for alpha chain variable domain of TCR clone 68136 (TRAV17, TRAJ13)
CATYAGSGGYQKVTF

SEQ ID NO: 136272 - protein, 17 aa, Homo sapiens
  CDR3 for beta chain variable domain of TCR clone 68136 (TRBV11-2, TRBJ2-1)
CASSLYPPGVEYNEQFF

SEQ ID NO: 136273 - protein, 15 aa, Homo sapiens
  CDR3 for alpha chain variable domain of TCR clone 68137 (TRAV8-3, TRAJ45)
CASLYSGGGADGLTF

SEQ ID NO: 136274 - protein, 15 aa, Homo sapiens
  CDR3 for beta chain variable domain of TCR clone 68137 (TRBV27, TRBJ1-4)
CASSPRRATNEKLFF

SEQ ID NO: 136275 - protein, 14 aa, Homo sapiens
  CDR3 for alpha chain variable domain of TCR clone 68138 (TRAV12-2, TRAJ13)
CAMKKTGGYQKVTF

SEQ ID NO: 136276 - protein, 16 aa, Homo sapiens
  CDR3 for beta chain variable domain of TCR clone 68138 (TRBV2, TRBJ2-1)
CASRSPAGGKYNEQFF

SEQ ID NO: 136277 - protein, 15 aa, Homo sapiens
  CDR3 for alpha chain variable domain of TCR clone 68139 (TRAV3, TRAJ3)
CAVRNRDSSASKIIF

SEQ ID NO: 136278 - protein, 18 aa, Homo sapiens
  CDR3 for beta chain variable domain of TCR clone 68139 (TRBV25-1, TRBJ1-2)
CASSGLQNGQGLIFGYTF

SEQ ID NO: 136279 - protein, 13 aa, Homo sapiens
  CDR3 for alpha chain variable domain of TCR clone 68140 (TRAV8-3, TRAJ20)
CAVGRPSDYKLSF

SEQ ID NO: 136280 - protein, 13 aa, Homo sapiens
  CDR3 for beta chain variable domain of TCR clone 68140 (TRBV6-5, TRBJ1-4)
CASSYLSQEKLFF

SEQ ID NO: 136281 - protein, 11 aa, Homo sapiens
  CDR3 for alpha chain variable domain of TCR clone 68141 (TRAV21, TRAJ34)
CAVTNTDKLIF

SEQ ID NO: 136282 - protein, 15 aa, Homo sapiens
  CDR3 for beta chain variable domain of TCR clone 68141 (TRBV4-1, TRBJ2-5)
CASSQWDLYQETQYF

SEQ ID NO: 136283 - protein, 15 aa, Homo sapiens
  CDR3 for alpha chain variable domain of TCR clone 68142 (TRAV13-1, TRAJ32)
CAASIYGCATNKLIF

SEQ ID NO: 136284 - protein, 12 aa, Homo sapiens
  CDR3 for beta chain variable domain of TCR clone 68142 (TRBV7-6, TRBJ2-3)
CASSTGTDTQYF

SEQ ID NO: 136285 - protein, 10 aa, Homo sapiens
  CDR3 for alpha chain variable domain of TCR clone 68143 (TRAV2, TRAJ34)
SAVVNDKLIF

SEQ ID NO: 136286 - protein, 13 aa, Homo sapiens
  CDR3 for beta chain variable domain of TCR clone 68143 (TRBV7-3, TRBJ1-1)
CASSLTQGTEAFF

SEQ ID NO: 136287 - protein, 16 aa, Homo sapiens
  CDR3 for alpha chain variable domain of TCR clone 68144 (TRAV12-3, TRAJ53)
CAMSTGSGGSNYKLTF

SEQ ID NO: 136288 - protein, 15 aa, Homo sapiens
  CDR3 for beta chain variable domain of TCR clone 68144 (TRBV27, TRBJ2-1)
CASSNGGGSSNEQFF

SEQ ID NO: 136289 - protein, 13 aa, Homo sapiens
  CDR3 for alpha chain variable domain of TCR clone 68145 (TRAV12-2, TRAJ9)
CAVKWAGGFKTVF

SEQ ID NO: 136290 - protein, 15 aa, Homo sapiens
  CDR3 for beta chain variable domain of TCR clone 68145 (TRBV5-1, TRBJ1-4)
CASSLTADSDEKLFF

SEQ ID NO: 136291 - protein, 12 aa, Homo sapiens
  CDR3 for alpha chain variable domain of TCR clone 68146 (TRAV13-2, TRAJ39)
CAESRPGNMLTF

SEQ ID NO: 136292 - protein, 16 aa, Homo sapiens
  CDR3 for beta chain variable domain of TCR clone 68146 (TRBV7-3, TRBJ2-1)
CASSLEGYRSYNEQFF

SEQ ID NO: 136293 - protein, 10 aa, Homo sapiens
  CDR3 for alpha chain variable domain of TCR clone 68147 (TRAV30, TRAJ48)
CGIGNEKLTF

SEQ ID NO: 136294 - protein, 16 aa, Homo sapiens
  CDR3 for beta chain variable domain of TCR clone 68147 (TRBV27, TRBJ2-1)
SMNVEPGTSGDNEQSF

SEQ ID NO: 136295 - protein, 11 aa, Homo sapiens
  CDR3 for alpha chain variable domain of TCR clone 68148 (TRAV29/DV5, TRAJ49)
CAAVPGNPFYF

SEQ ID NO: 136296 - protein, 17 aa, Homo sapiens
  CDR3 for beta chain variable domain of TCR clone 68148 (TRBV4-2, TRBJ1-1)
CASTQFGGGSGNTEAFF

SEQ ID NO: 136297 - protein, 14 aa, Homo sapiens
  CDR3 for alpha chain variable domain of TCR clone 68149 (TRAV16, TRAJ26)
CALSSANYGQNFVF

SEQ ID NO: 136298 - protein, 13 aa, Homo sapiens
  CDR3 for beta chain variable domain of TCR clone 68149 (TRBV20-1, TRBJ1-1)
CSAPEGGNTEAFF

SEQ ID NO: 136299 - protein, 11 aa, Homo sapiens
  CDR3 for alpha chain variable domain of TCR clone 68150 (TRAV23/DV6, TRAJ58)
CAARLLRGETS

SEQ ID NO: 136300 - protein, 15 aa, Homo sapiens
  CDR3 for beta chain variable domain of TCR clone 68150 (TRBV20-1, TRBJ2-7)
CSARDRVSGMDEQYF

SEQ ID NO: 136301 - protein, 18 aa, Homo sapiens
  CDR3 for alpha chain variable domain of TCR clone 68151 (TRAV13-1, TRAJ52)
CAASKRSAGGTSYGKLTF

SEQ ID NO: 136302 - protein, 13 aa, Homo sapiens
  CDR3 for beta chain variable domain of TCR clone 68151 (TRBV12-4, TRBJ1-2)
CASRLRQGKGYTF

SEQ ID NO: 136303 - protein, 14 aa, Homo sapiens
  CDR3 for alpha chain variable domain of TCR clone 68152 (TRAV20, TRAJ37)
CAVQAASNTGKLIF

SEQ ID NO: 136304 - protein, 13 aa, Homo sapiens
  CDR3 for beta chain variable domain of TCR clone 68152 (TRBV7-9, TRBJ1-2)
CASSLKQNYGYTF

SEQ ID NO: 136305 - protein, 17 aa, Homo sapiens
  CDR3 for alpha chain variable domain of TCR clone 68153 (TRAV13-1, TRAJ52)
CAASSGAGGTSYGKLTF

SEQ ID NO: 136306 - protein, 16 aa, Homo sapiens
  CDR3 for beta chain variable domain of TCR clone 68153 (TRBV20-1, TRBJ2-2)
CSASASGIPGAGELFF

SEQ ID NO: 136307 - protein, 13 aa, Homo sapiens
  CDR3 for alpha chain variable domain of TCR clone 68154 (TRAV21, TRAJ29)
CAVRSSGNTPLVF

SEQ ID NO: 136308 - protein, 12 aa, Homo sapiens
  CDR3 for beta chain variable domain of TCR clone 68154 (TRBV11-2, TRBJ2-2)
CASSLGGGELFF

SEQ ID NO: 136309 - protein, 17 aa, Homo sapiens
  CDR3 for alpha chain variable domain of TCR clone 68155 (TRAV23/DV6, TRAJ28)
CAALLAYSGAGSYQLTF

SEQ ID NO: 136310 - protein, 13 aa, Homo sapiens
  CDR3 for beta chain variable domain of TCR clone 68155 (TRBV4-2, TRBJ2-3)
CASSQVNTDTQYF

SEQ ID NO: 136311 - protein, 11 aa, Homo sapiens
  CDR3 for alpha chain variable domain of TCR clone 68156 (TRAV2, TRAJ13)
CASGGYQKVTF

SEQ ID NO: 136312 - protein, 15 aa, Homo sapiens
  CDR3 for beta chain variable domain of TCR clone 68156 (TRBV28, TRBJ1-3)
CAGSMGWASGNTIYF

SEQ ID NO: 136313 - protein, 16 aa, Homo sapiens
  CDR3 for alpha chain variable domain of TCR clone 68157 (TRAV30, TRAJ24)
CGTEIVDADSWGKFQF

SEQ ID NO: 136314 - protein, 13 aa, Homo sapiens
  CDR3 for beta chain variable domain of TCR clone 68157 (TRBV12-4, TRBJ2-5)
CASSPGTEEAQYF

SEQ ID NO: 136315 - protein, 16 aa, Homo sapiens
  CDR3 for alpha chain variable domain of TCR clone 68158 (TRAV16, TRAJ4)
CALSRMFSGGYNELIF

SEQ ID NO: 136316 - protein, 14 aa, Homo sapiens
  CDR3 for beta chain variable domain of TCR clone 68158 (TRBV4-1, TRBJ2-2)
CASSQAVNTGELFF

SEQ ID NO: 136317 - protein, 14 aa, Homo sapiens
  CDR3 for alpha chain variable domain of TCR clone 68159 (TRAV12-2, TRAJ13)
CAVKKTGGYKKVTF

SEQ ID NO: 136318 - protein, 13 aa, Homo sapiens
  CDR3 for beta chain variable domain of TCR clone 68159 (TRBV10-3, TRBJ2-7)
CASKLAVNYEQYF

SEQ ID NO: 136319 - protein, 10 aa, Homo sapiens
  CDR3 for alpha chain variable domain of TCR clone 68160 (TRAV2, TRAJ34)
CAVVNDKLVF

SEQ ID NO: 136320 - protein, 16 aa, Homo sapiens
  CDR3 for beta chain variable domain of TCR clone 68160 (TRBV5-1, TRBJ2-3)
CASSLGLAVYTDTQYF

SEQ ID NO: 136321 - protein, 13 aa, Homo sapiens
  CDR3 for alpha chain variable domain of TCR clone 68161 (TRAV26-1, TRAJ48)
CIVRVVGDEKLTF

SEQ ID NO: 136322 - protein, 18 aa, Homo sapiens
  CDR3 for beta chain variable domain of TCR clone 68161 (TRBV4-3, TRBJ1-6)
CSSSQETPASSYNSPLHF

SEQ ID NO: 136323 - protein, 14 aa, Homo sapiens
  CDR3 for alpha chain variable domain of TCR clone 68162 (TRAV1-2, TRAJ16)
CAVNRFSDGQKLLF

SEQ ID NO: 136324 - protein, 12 aa, Homo sapiens
  CDR3 for beta chain variable domain of TCR clone 68162 (TRBV7-6, TRBJ2-7)
CASSLADSEQCF

SEQ ID NO: 136325 - protein, 14 aa, Homo sapiens
  CDR3 for alpha chain variable domain of TCR clone 68163 (TRAV1-2, TRAJ16)
CAVNRLSDGQKLLF

SEQ ID NO: 136326 - protein, 13 aa, Homo sapiens
  CDR3 for beta chain variable domain of TCR clone 68163 (TRBV10-3, TRBJ2-7)
CASKLAVNYEQYF

SEQ ID NO: 136327 - protein, 14 aa, Homo sapiens
  CDR3 for alpha chain variable domain of TCR clone 68164 (TRAV20, TRAJ22)
CAVALGGSARQLTF

SEQ ID NO: 136328 - protein, 15 aa, Homo sapiens
  CDR3 for beta chain variable domain of TCR clone 68164 (TRBV6-1, TRBJ2-1)
CASSELRGQYNEQFF

SEQ ID NO: 136329 - protein, 14 aa, Homo sapiens
  CDR3 for alpha chain variable domain of TCR clone 68165 (TRAV12-1, TRAJ17)
CVVNYKAASNKLTF

SEQ ID NO: 136330 - protein, 17 aa, Homo sapiens
  CDR3 for beta chain variable domain of TCR clone 68165 (TRBV20-1, TRBJ2-1)
CSASSSGLAGSYNEQFF

SEQ ID NO: 136331 - protein, 17 aa, Homo sapiens
  CDR3 for alpha chain variable domain of TCR clone 68166 (TRAV4, TRAJ13)
CLVGVQGSSGGYQKVTF

SEQ ID NO: 136332 - protein, 18 aa, Homo sapiens
  CDR3 for beta chain variable domain of TCR clone 68166 (TRBV15, TRBJ2-3)
CATSGDGARSWDTDTQYF

SEQ ID NO: 136333 - protein, 14 aa, Homo sapiens
  CDR3 for alpha chain variable domain of TCR clone 68167 (TRAV16, TRAJ17)
CALSGRAAGNKLPF

SEQ ID NO: 136334 - protein, 15 aa, Homo sapiens
  CDR3 for beta chain variable domain of TCR clone 68167 (TRBV3-1, TRBJ1-2)
CASSPTRLPEGGYTF

SEQ ID NO: 136335 - protein, 15 aa, Homo sapiens
  CDR3 for alpha chain variable domain of TCR clone 68168 (TRAV3, TRAJ13)
CAVRVYSGGYQKVTF

SEQ ID NO: 136336 - protein, 15 aa, Homo sapiens
  CDR3 for beta chain variable domain of TCR clone 68168 (TRBV5-7, TRBJ1-2)
CASSLGVSANYGYTF

SEQ ID NO: 136337 - protein, 14 aa, Homo sapiens
  CDR3 for alpha chain variable domain of TCR clone 68169 (TRAV38-1, TRAJ45)
CAYYSGGGADGLTF

SEQ ID NO: 136338 - protein, 20 aa, Homo sapiens
  CDR3 for beta chain variable domain of TCR clone 68169 (TRBV28, TRBJ2-1)
CASTPIGRSPGLAEGNEQFF

SEQ ID NO: 136339 - protein, 14 aa, Homo sapiens
  CDR3 for alpha chain variable domain of TCR clone 68170 (TRAV12-2, TRAJ32)
CAHPASGATNKLIF

SEQ ID NO: 136340 - protein, 14 aa, Homo sapiens
  CDR3 for beta chain variable domain of TCR clone 68170 (TRBV4-2, TRBJ2-3)
CASRETRAPGMQYF

SEQ ID NO: 136341 - protein, 14 aa, Homo sapiens
  CDR3 for alpha chain variable domain of TCR clone 68171 (TRAV12-2, TRAJ17)
CAALFKAAGNKLTF

SEQ ID NO: 136342 - protein, 16 aa, Homo sapiens
  CDR3 for beta chain variable domain of TCR clone 68171 (TRBV4-1, TRBJ2-7)
CASRPSGGGADNEQYF

SEQ ID NO: 136343 - protein, 15 aa, Homo sapiens
  CDR3 for alpha chain variable domain of TCR clone 68172 (TRAV12-2, TRAJ56)
CAVNPFTGANSKLTF

SEQ ID NO: 136344 - protein, 13 aa, Homo sapiens
  CDR3 for beta chain variable domain of TCR clone 68172 (TRBV20-1, TRBJ1-2)
CSARDRVYGGYAF

SEQ ID NO: 136345 - protein, 12 aa, Homo sapiens
  CDR3 for alpha chain variable domain of TCR clone 68173 (TRAV1-1, TRAJ43)
CAPRVSSNDMLF

SEQ ID NO: 136346 - protein, 15 aa, Homo sapiens
  CDR3 for beta chain variable domain of TCR clone 68173 (TRBV5-1, TRBJ2-7)
CASSLGDFTTYEQYF

SEQ ID NO: 136347 - protein, 14 aa, Homo sapiens
  CDR3 for alpha chain variable domain of TCR clone 68174 (TRAV35, TRAJ10)
CAGILTGGGNKLTF

SEQ ID NO: 136348 - protein, 16 aa, Homo sapiens
  CDR3 for beta chain variable domain of TCR clone 68174 (TRBV12-5, TRBJ2-5)
CASGPRTSGNQETQYL

SEQ ID NO: 136349 - protein, 16 aa, Homo sapiens
  CDR3 for alpha chain variable domain of TCR clone 68175 (TRAV38-2/DV8, TRAJ45)
CAYTTTSGGGADGLTF

SEQ ID NO: 136350 - protein, 14 aa, Homo sapiens
  CDR3 for beta chain variable domain of TCR clone 68175 (TRBV7-9, TRBJ2-2)
CARSLGHRTGELFF

SEQ ID NO: 136351 - protein, 12 aa, Homo sapiens
  CDR3 for alpha chain variable domain of TCR clone 68176 (TRAV27, TRAJ36)
CAGMTGANNLFF

SEQ ID NO: 136352 - protein, 14 aa, Homo sapiens
  CDR3 for beta chain variable domain of TCR clone 68176 (TRBV12-4, TRBJ2-3)
CASSSVPSTDTQYF

SEQ ID NO: 136353 - protein, 13 aa, Homo sapiens
  CDR3 for alpha chain variable domain of TCR clone 68177 (TRAV12-2, TRAJ18)
CAVRGSTLGRLYF

SEQ ID NO: 136354 - protein, 12 aa, Homo sapiens
  CDR3 for beta chain variable domain of TCR clone 68177 (TRBV19, TRBJ2-1)
CASSRQGAEQFF

SEQ ID NO: 136355 - protein, 14 aa, Homo sapiens
  CDR3 for alpha chain variable domain of TCR clone 68178 (TRAV35, TRAJ33)
CAGSSQDSNYQLIW

SEQ ID NO: 136356 - protein, 15 aa, Homo sapiens
  CDR3 for beta chain variable domain of TCR clone 68178 (TRBV20-1, TRBJ2-7)
CSAESGTSWAYEQYF

SEQ ID NO: 136357 - protein, 14 aa, Homo sapiens
  CDR3 for alpha chain variable domain of TCR clone 68179 (TRAV14/DV4, TRAJ41)
CARGGPDSGYALNF

SEQ ID NO: 136358 - protein, 15 aa, Homo sapiens
  CDR3 for beta chain variable domain of TCR clone 68179 (TRBV19, TRBJ2-1)
CASSIQAASYNEQFF

SEQ ID NO: 136359 - protein, 13 aa, Homo sapiens
  CDR3 for alpha chain variable domain of TCR clone 68180 (TRAV29/DV5, TRAJ31)
CAASRNNNARLMF

SEQ ID NO: 136360 - protein, 16 aa, Homo sapiens
  CDR3 for beta chain variable domain of TCR clone 68180 (TRBV19, TRBJ2-1)
CASSKAGPSSYNEQFF

SEQ ID NO: 136361 - protein, 16 aa, Homo sapiens
  CDR3 for alpha chain variable domain of TCR clone 68181 (TRAV30, TRAJ24)
CGTEIVDADSWGKFQF

SEQ ID NO: 136362 - protein, 15 aa, Homo sapiens
  CDR3 for beta chain variable domain of TCR clone 68181 (TRBV6-1, TRBJ2-1)
CASSEAAYSYNEQFF

SEQ ID NO: 136363 - protein, 14 aa, Homo sapiens
  CDR3 for alpha chain variable domain of TCR clone 68182 (TRAV23/DV6, TRAJ45)
CAASWGGGADGLTF

SEQ ID NO: 136364 - protein, 15 aa, Homo sapiens
  CDR3 for beta chain variable domain of TCR clone 68182 (TRBV4-2, TRBJ1-2)
CASSRDTGAGYGYTF

SEQ ID NO: 136365 - protein, 23 aa, Homo sapiens
  CDR3 for alpha chain variable domain of TCR clone 68183 (TRAV21, TRAJ20)
LQLHSLVTQPPTSVLPNDYKLSF

SEQ ID NO: 136366 - protein, 14 aa, Homo sapiens
  CDR3 for beta chain variable domain of TCR clone 68183 (TRBV7-2, TRBJ1-3)
CASSRLRSGNTIYF

SEQ ID NO: 136367 - protein, 13 aa, Homo sapiens
  CDR3 for alpha chain variable domain of TCR clone 68184 (TRAV1-2, TRAJ9)
CAALNTGGFKTIF

SEQ ID NO: 136368 - protein, 15 aa, Homo sapiens
  CDR3 for beta chain variable domain of TCR clone 68184 (TRBV28, TRBJ1-1)
CASTSTRGLNTEAFF

SEQ ID NO: 136369 - protein, 16 aa, Homo sapiens
  CDR3 for alpha chain variable domain of TCR clone 68185 (TRAV12-2, TRAJ32)
CAVNLGQGGATNNLIF

SEQ ID NO: 136370 - protein, 15 aa, Homo sapiens
  CDR3 for beta chain variable domain of TCR clone 68185 (TRBV20-1, TRBJ2-7)
CSARGPLAGGREQYF

SEQ ID NO: 136371 - protein, 15 aa, Homo sapiens
  CDR3 for alpha chain variable domain of TCR clone 68186 (TRAV21, TRAJ53)
CATLNSGGSNYKLTF

SEQ ID NO: 136372 - protein, 15 aa, Homo sapiens
  CDR3 for beta chain variable domain of TCR clone 68186 (TRBV18, TRBJ2-1)
CASSPPSAAYNEQFF

SEQ ID NO: 136373 - protein, 13 aa, Homo sapiens
  CDR3 for alpha chain variable domain of TCR clone 68187 (TRAV8-6, TRAJ9)
CSVWDTGGFKTIF

SEQ ID NO: 136374 - protein, 14 aa, Homo sapiens
  CDR3 for beta chain variable domain of TCR clone 68187 (TRBV2, TRBJ2-1)
CASSEALIYNEQFF

SEQ ID NO: 136375 - protein, 13 aa, Homo sapiens
  CDR3 for alpha chain variable domain of TCR clone 68188 (TRAV3, TRAJ21)
CAVREPDFNKFYF

SEQ ID NO: 136376 - protein, 15 aa, Homo sapiens
  CDR3 for beta chain variable domain of TCR clone 68188 (TRBV28, TRBJ2-3)
CASGFGTRLADTQYF

SEQ ID NO: 136377 - protein, 16 aa, Homo sapiens
  CDR3 for alpha chain variable domain of TCR clone 68189 (TRAV3, TRAJ37)
CAVRGKGSGNTGKLIF

SEQ ID NO: 136378 - protein, 14 aa, Homo sapiens
  CDR3 for beta chain variable domain of TCR clone 68189 (TRBV4-2, TRBJ2-1)
CASGLDRAYNEQFF

SEQ ID NO: 136379 - protein, 13 aa, Homo sapiens
  CDR3 for alpha chain variable domain of TCR clone 68190 (TRAV12-2, TRAJ4)
CAVRSVGYNKLIF

SEQ ID NO: 136380 - protein, 15 aa, Homo sapiens
  CDR3 for beta chain variable domain of TCR clone 68190 (TRBV10-3, TRBJ2-1)
CAISDVQDRAYEQFF

SEQ ID NO: 136381 - protein, 14 aa, Homo sapiens
  CDR3 for alpha chain variable domain of TCR clone 68191 (TRAV2, TRAJ3)
CAVRPYSSASTIIF

SEQ ID NO: 136382 - protein, 17 aa, Homo sapiens
  CDR3 for beta chain variable domain of TCR clone 68191 (TRBV7-6, TRBJ2-5)
CASSSPQAGDPSETQYF

SEQ ID NO: 136383 - protein, 14 aa, Homo sapiens
  CDR3 for alpha chain variable domain of TCR clone 68192 (TRAV9-2, TRAJ39)
CALYIYNAGNMLTF

SEQ ID NO: 136384 - protein, 14 aa, Homo sapiens
  CDR3 for beta chain variable domain of TCR clone 68192 (TRBV6-5, TRBJ1-2)
CASSYDGTGGGYTF

SEQ ID NO: 136385 - protein, 14 aa, Homo sapiens
  CDR3 for alpha chain variable domain of TCR clone 68193 (TRAV12-2, TRAJ13)
CAVKKTGGYQKVTC

SEQ ID NO: 136386 - protein, 14 aa, Homo sapiens
  CDR3 for beta chain variable domain of TCR clone 68193 (TRBV5-5, TRBJ2-7)
CASSLGQGTYEQYF

SEQ ID NO: 136387 - protein, 15 aa, Homo sapiens
  CDR3 for alpha chain variable domain of TCR clone 68194 (TRAV2, TRAJ15)
CAVKDRGQAGTALIF

SEQ ID NO: 136388 - protein, 13 aa, Homo sapiens
  CDR3 for beta chain variable domain of TCR clone 68194 (TRBV10-2, TRBJ2-7)
CASGASGGYEQYF

SEQ ID NO: 136389 - protein, 12 aa, Homo sapiens
  CDR3 for alpha chain variable domain of TCR clone 68195 (TRAV29/DV5, TRAJ34)
CAARHNTDKLIF

SEQ ID NO: 136390 - protein, 15 aa, Homo sapiens
  CDR3 for beta chain variable domain of TCR clone 68195 (TRBV6-3, TRBJ2-7)
CASSSPGTVFYEQYF

SEQ ID NO: 136391 - protein, 12 aa, Homo sapiens
  CDR3 for alpha chain variable domain of TCR clone 68196 (TRAV1-1, TRAJ8)
CAGGTGFKKLVF

SEQ ID NO: 136392 - protein, 15 aa, Homo sapiens
  CDR3 for beta chain variable domain of TCR clone 68196 (TRBV7-9, TRBJ1-4)
CASSRTGGFNEKLFF

SEQ ID NO: 136393 - protein, 18 aa, Homo sapiens
  CDR3 for alpha chain variable domain of TCR clone 68197 (TRAV21, TRAJ52)
CAVRPSPAGGTSYGKLTF

SEQ ID NO: 136394 - protein, 16 aa, Homo sapiens
  CDR3 for beta chain variable domain of TCR clone 68197 (TRBV12-4, TRBJ2-1)
CASSPQERPSYNEQFF

SEQ ID NO: 136395 - protein, 12 aa, Homo sapiens
  CDR3 for alpha chain variable domain of TCR clone 68198 (TRAV12-3, TRAJ5)
CASGQGRRALTF

SEQ ID NO: 136396 - protein, 16 aa, Homo sapiens
  CDR3 for beta chain variable domain of TCR clone 68198 (TRBV19, TRBJ1-1)
CASSPTRFWPGTEAFF

SEQ ID NO: 136397 - protein, 14 aa, Homo sapiens
  CDR3 for alpha chain variable domain of TCR clone 68199 (TRAV12-2, TRAJ5)
CAVNRSTGRRALTF

SEQ ID NO: 136398 - protein, 15 aa, Homo sapiens
  CDR3 for beta chain variable domain of TCR clone 68199 (TRBV15, TRBJ1-5)
CATSRERGGNQPQHF

SEQ ID NO: 136399 - protein, 12 aa, Homo sapiens
  CDR3 for alpha chain variable domain of TCR clone 68200 (TRAV12-3, TRAJ17)
CAMTLTGNKLTF

SEQ ID NO: 136400 - protein, 15 aa, Homo sapiens
  CDR3 for beta chain variable domain of TCR clone 68200 (TRBV5-7, TRBJ2-7)
RASSPYFEGSYEQYF

SEQ ID NO: 136401 - protein, 15 aa, Homo sapiens
  CDR3 for alpha chain variable domain of TCR clone 68201 (TRAV26-1, TRAJ39)
CIVRVARNAGNMFTF

SEQ ID NO: 136402 - protein, 16 aa, Homo sapiens
  CDR3 for beta chain variable domain of TCR clone 68201 (TRBV5-1, TRBJ2-1)
CASSLTLAGGRNEQFF

SEQ ID NO: 136403 - protein, 15 aa, Homo sapiens
  CDR3 for alpha chain variable domain of TCR clone 68202 (TRAV13-1, TRAJ36)
CAASIRRTGANNLFF

SEQ ID NO: 136404 - protein, 14 aa, Homo sapiens
  CDR3 for beta chain variable domain of TCR clone 68202 (TRBV6-1, TRBJ1-3)
CASVQGGGGNTIYF

SEQ ID NO: 136405 - protein, 18 aa, Homo sapiens
  CDR3 for alpha chain variable domain of TCR clone 68203 (TRAV1-1, TRAJ12)
CLLLLCCERGDSSYKLIF

SEQ ID NO: 136406 - protein, 15 aa, Homo sapiens
  CDR3 for beta chain variable domain of TCR clone 68203 (TRBV18, TRBJ2-5)
CASTDRGPRQETQYF

SEQ ID NO: 136407 - protein, 23 aa, Homo sapiens
  CDR3 for alpha chain variable domain of TCR clone 68204 (TRAV26-1, )
CIADNSGNNHIQNPDPAVYQLRD

SEQ ID NO: 136408 - protein, 13 aa, Homo sapiens
  CDR3 for beta chain variable domain of TCR clone 68204 (TRBV20-1, TRBJ1-1)
CSARGGGNTEAFF

SEQ ID NO: 136409 - protein, 15 aa, Homo sapiens
  CDR3 for alpha chain variable domain of TCR clone 68205 (TRAV4, TRAJ26)
CLVGDMNNYDQNFVF

SEQ ID NO: 136410 - protein, 16 aa, Homo sapiens
  CDR3 for beta chain variable domain of TCR clone 68205 (TRBV28, TRBJ1-4)
CASSSRTGAANEKLFF

SEQ ID NO: 136411 - protein, 15 aa, Homo sapiens
  CDR3 for alpha chain variable domain of TCR clone 68206 (TRAV29/DV5, TRAJ24)
CAASGATDSWGKFRF

SEQ ID NO: 136412 - protein, 12 aa, Homo sapiens
  CDR3 for beta chain variable domain of TCR clone 68206 (TRBV11-2, TRBJ2-2)
CASSLPTGELFF

SEQ ID NO: 136413 - protein, 14 aa, Homo sapiens
  CDR3 for alpha chain variable domain of TCR clone 68207 (TRAV17, TRAJ57)
CATDPQGGSEKLVF

SEQ ID NO: 136414 - protein, 18 aa, Homo sapiens
  CDR3 for beta chain variable domain of TCR clone 68207 (TRBV6-6, TRBJ1-3)
CASSYSKWDSIYGNTIYF

SEQ ID NO: 136415 - protein, 14 aa, Homo sapiens
  CDR3 for alpha chain variable domain of TCR clone 68208 (TRAV1-2, TRAJ16)
CAVNRFSDGQKLLF

SEQ ID NO: 136416 - protein, 16 aa, Homo sapiens
  CDR3 for beta chain variable domain of TCR clone 68208 (TRBV27, TRBJ2-7)
CASSSERRDSAYEQYF

SEQ ID NO: 136417 - protein, 15 aa, Homo sapiens
  CDR3 for alpha chain variable domain of TCR clone 68209 (TRAV4, TRAJ26)
CLVGDMNNYGQNFVF

SEQ ID NO: 136418 - protein, 16 aa, Homo sapiens
  CDR3 for beta chain variable domain of TCR clone 68209 (TRBV28, TRBJ1-4)
CASSSRTGAAIEKLFF

SEQ ID NO: 136419 - protein, 19 aa, Homo sapiens
  CDR3 for alpha chain variable domain of TCR clone 68210 (TRAV1-2, TRAJ16)
LSYNVLDGLEEKDGQKLLF

SEQ ID NO: 136420 - protein, 15 aa, Homo sapiens
  CDR3 for beta chain variable domain of TCR clone 68210 (TRBV9, TRBJ1-6)
CASSVAGTGDSPLHF

SEQ ID NO: 136421 - protein, 18 aa, Homo sapiens
  CDR3 for alpha chain variable domain of TCR clone 68211 (TRAV13-1, TRAJ52)
CAAKNPNAGGTSYGKLTF

SEQ ID NO: 136422 - protein, 15 aa, Homo sapiens
  CDR3 for beta chain variable domain of TCR clone 68211 (TRBV19, TRBJ2-1)
CASSSPGVPLDEQFF

SEQ ID NO: 136423 - protein, 17 aa, Homo sapiens
  CDR3 for alpha chain variable domain of TCR clone 68212 (TRAV12-3, TRAJ26)
CAMSGGRWDNYGQNFVF

SEQ ID NO: 136424 - protein, 12 aa, Homo sapiens
  CDR3 for beta chain variable domain of TCR clone 68212 (TRBV19, TRBJ1-1)
CASSTTGSEAFF

SEQ ID NO: 136425 - protein, 13 aa, Homo sapiens
  CDR3 for alpha chain variable domain of TCR clone 68213 (TRAV13-1, TRAJ39)
CAASIWAGNMLTF

SEQ ID NO: 136426 - protein, 15 aa, Homo sapiens
  CDR3 for beta chain variable domain of TCR clone 68213 (TRBV7-9, TRBJ1-1)
CASSLLEQGGTKAFF

SEQ ID NO: 136427 - protein, 13 aa, Homo sapiens
  CDR3 for alpha chain variable domain of TCR clone 68214 (TRAV8-3, TRAJ12)
WVLRMDSSYKLIF

SEQ ID NO: 136428 - protein, 15 aa, Homo sapiens
  CDR3 for beta chain variable domain of TCR clone 68214 (TRBV13, TRBJ1-2)
CASSLGRQPGYGYTF

SEQ ID NO: 136429 - protein, 13 aa, Homo sapiens
  CDR3 for alpha chain variable domain of TCR clone 68215 (TRAV20, TRAJ49)
CAVQARTGNQFYF

SEQ ID NO: 136430 - protein, 14 aa, Homo sapiens
  CDR3 for beta chain variable domain of TCR clone 68215 (TRBV7-2, TRBJ2-7)
CASSPKTNFYEQYF

SEQ ID NO: 136431 - protein, 11 aa, Homo sapiens
  CDR3 for alpha chain variable domain of TCR clone 68216 (TRAV1-2, TRAJ20)
CAVSNDYKLSF

SEQ ID NO: 136432 - protein, 16 aa, Homo sapiens
  CDR3 for beta chain variable domain of TCR clone 68216 (TRBV29-1, TRBJ2-6)
CSVEDITYSGANALTF

SEQ ID NO: 136433 - protein, 21 aa, Homo sapiens
  CDR3 for alpha chain variable domain of TCR clone 68217 (TRAV8-3, TRAJ10)
CAVGHTHGRRKQTHLWARHSA

SEQ ID NO: 136434 - protein, 10 aa, Homo sapiens
  CDR3 for beta chain variable domain of TCR clone 68217 (TRBV20-1, TRBJ2-5)
CSARFETQYF

SEQ ID NO: 136435 - protein, 15 aa, Homo sapiens
  CDR3 for alpha chain variable domain of TCR clone 68218 (TRAV8-3, TRAJ27)
CAVGPPKTNAGKSTF

SEQ ID NO: 136436 - protein, 14 aa, Homo sapiens
  CDR3 for beta chain variable domain of TCR clone 68218 (TRBV11-2, TRBJ2-3)
CASSRLARTDTQYF

SEQ ID NO: 136437 - protein, 14 aa, Homo sapiens
  CDR3 for alpha chain variable domain of TCR clone 68219 (TRAV2, TRAJ9)
CAVDDRSGGFKTIF

SEQ ID NO: 136438 - protein, 15 aa, Homo sapiens
  CDR3 for beta chain variable domain of TCR clone 68219 (TRBV7-2, TRBJ2-1)
CASSSGLAGGNEQFF

SEQ ID NO: 136439 - protein, 12 aa, Homo sapiens
  CDR3 for alpha chain variable domain of TCR clone 68220 (TRAV16, TRAJ10)
CSRTGGGNKLTF

SEQ ID NO: 136440 - protein, 19 aa, Homo sapiens
  CDR3 for beta chain variable domain of TCR clone 68220 (TRBV25-1, TRBJ2-2)
CAILVCRVDRGRKTGELLF

SEQ ID NO: 136441 - protein, 16 aa, Homo sapiens
  CDR3 for alpha chain variable domain of TCR clone 68221 (TRAV12-3, TRAJ28)
CAMRANYGAGSYQLTF

SEQ ID NO: 136442 - protein, 16 aa, Homo sapiens
  CDR3 for beta chain variable domain of TCR clone 68221 (TRBV7-2, TRBJ1-3)
CASSRLEASSGNTIYF

SEQ ID NO: 136443 - protein, 13 aa, Homo sapiens
  CDR3 for alpha chain variable domain of TCR clone 68222 (TRAV21, TRAJ57)
CAVTQGGSEKLVF

SEQ ID NO: 136444 - protein, 12 aa, Homo sapiens
  CDR3 for beta chain variable domain of TCR clone 68222 (TRBV5-1, TRBJ2-7)
CASSLDSYEQYF

SEQ ID NO: 136445 - protein, 16 aa, Homo sapiens
  CDR3 for alpha chain variable domain of TCR clone 68223 (TRAV30, TRAJ24)
CGTEIVDADSWGKFQF

SEQ ID NO: 136446 - protein, 15 aa, Homo sapiens
  CDR3 for beta chain variable domain of TCR clone 68223 (TRBV11-2, TRBJ1-6)
CASSLDPWAVSPLHF

SEQ ID NO: 136447 - protein, 11 aa, Homo sapiens
  CDR3 for alpha chain variable domain of TCR clone 68224 (TRAV12-3, TRAJ27)
CAMANAGKSTF

SEQ ID NO: 136448 - protein, 14 aa, Homo sapiens
  CDR3 for beta chain variable domain of TCR clone 68224 (TRBV4-1, TRBJ2-2)
CASSQAVNTGEPFF

SEQ ID NO: 136449 - protein, 17 aa, Homo sapiens
  CDR3 for alpha chain variable domain of TCR clone 68225 (TRAV27, TRAJ45)
ASTSVQELRRGADGLTF

SEQ ID NO: 136450 - protein, 17 aa, Homo sapiens
  CDR3 for beta chain variable domain of TCR clone 68225 (TRBV11-2, TRBJ2-1)
CASSLYPPGVEYNEQFF

SEQ ID NO: 136451 - protein, 15 aa, Homo sapiens
  CDR3 for alpha chain variable domain of TCR clone 68226 (TRAV3, TRAJ5)
CAVRDLDTGRRALTF

SEQ ID NO: 136452 - protein, 15 aa, Homo sapiens
  CDR3 for beta chain variable domain of TCR clone 68226 (TRBV5-1, TRBJ2-7)
CASSLMTSGSNEQYF

SEQ ID NO: 136453 - protein, 13 aa, Homo sapiens
  CDR3 for alpha chain variable domain of TCR clone 68227 (TRAV13-2, TRAJ48)
CAEMDFGNEKLTF

SEQ ID NO: 136454 - protein, 12 aa, Homo sapiens
  CDR3 for beta chain variable domain of TCR clone 68227 (TRBV5-5, TRBJ2-5)
CASSYFGETQYF

SEQ ID NO: 136455 - protein, 15 aa, Homo sapiens
  CDR3 for alpha chain variable domain of TCR clone 68228 (TRAV13-1, TRAJ44)
CAASRNTGTASKLTF

SEQ ID NO: 136456 - protein, 14 aa, Homo sapiens
  CDR3 for beta chain variable domain of TCR clone 68228 (TRBV11-2, TRBJ1-2)
CASSLYRGNYGYAF

SEQ ID NO: 136457 - protein, 14 aa, Homo sapiens
  CDR3 for alpha chain variable domain of TCR clone 68229 (TRAV26-1, TRAJ38)
CIADNAGNNRKLIW

SEQ ID NO: 136458 - protein, 17 aa, Homo sapiens
  CDR3 for beta chain variable domain of TCR clone 68229 (TRBV4-1, TRBJ2-3)
CASSQGYVSGGTDTQYF

SEQ ID NO: 136459 - protein, 13 aa, Homo sapiens
  CDR3 for alpha chain variable domain of TCR clone 68230 (TRAV12-1, TRAJ39)
CVARSGAGNMLTF

SEQ ID NO: 136460 - protein, 17 aa, Homo sapiens
  CDR3 for beta chain variable domain of TCR clone 68230 (TRBV20-1, TRBJ2-1)
CSASSSGLAGSYNEQFF

SEQ ID NO: 136461 - protein, 12 aa, Homo sapiens
  CDR3 for alpha chain variable domain of TCR clone 68231 (TRAV8-3, TRAJ34)
WASGYNTDKLIF

SEQ ID NO: 136462 - protein, 13 aa, Homo sapiens
  CDR3 for beta chain variable domain of TCR clone 68231 (TRBV6-4, TRBJ2-3)
CSSSVSWADTQYF

SEQ ID NO: 136463 - protein, 13 aa, Homo sapiens
  CDR3 for alpha chain variable domain of TCR clone 68232 (TRAV30, TRAJ31)
CGTEITNNARLMF

SEQ ID NO: 136464 - protein, 13 aa, Homo sapiens
  CDR3 for beta chain variable domain of TCR clone 68232 (TRBV7-9, TRBJ2-3)
CASSPGSTDTQYF

SEQ ID NO: 136465 - protein, 12 aa, Homo sapiens
  CDR3 for alpha chain variable domain of TCR clone 68233 (TRAV2, TRAJ5)
CALDTGRRARTF

SEQ ID NO: 136466 - protein, 15 aa, Homo sapiens
  CDR3 for beta chain variable domain of TCR clone 68233 (TRBV10-3, TRBJ2-1)
CAISDVQDRAYEQFF

SEQ ID NO: 136467 - protein, 14 aa, Homo sapiens
  CDR3 for alpha chain variable domain of TCR clone 68234 (TRAV20, TRAJ40)
CAVSLTSGTYKYIF

SEQ ID NO: 136468 - protein, 14 aa, Homo sapiens
  CDR3 for beta chain variable domain of TCR clone 68234 (TRBV5-1, TRBJ2-7)
CASSFASGVNEQYF

SEQ ID NO: 136469 - protein, 14 aa, Homo sapiens
  CDR3 for alpha chain variable domain of TCR clone 68235 (TRAV17, TRAJ22)
CATSPSGSARQLTF

SEQ ID NO: 136470 - protein, 13 aa, Homo sapiens
  CDR3 for beta chain variable domain of TCR clone 68235 (TRBV11-2, TRBJ2-5)
CASGHGAKETQYF

SEQ ID NO: 136471 - protein, 16 aa, Homo sapiens
  CDR3 for alpha chain variable domain of TCR clone 68236 (TRAV17, TRAJ28)
CTSYAYSGAGSYQLTF

SEQ ID NO: 136472 - protein, 15 aa, Homo sapiens
  CDR3 for beta chain variable domain of TCR clone 68236 (TRBV4-2, TRBJ2-1)
CASSPSGGLYNEQFF

SEQ ID NO: 136473 - protein, 12 aa, Homo sapiens
  CDR3 for alpha chain variable domain of TCR clone 68237 (TRAV1-1, TRAJ39)
CAVPVVGNMLTF

SEQ ID NO: 136474 - protein, 15 aa, Homo sapiens
  CDR3 for beta chain variable domain of TCR clone 68237 (TRBV19, TRBJ1-6)
CASSTQGAVGSPIHF

SEQ ID NO: 136475 - protein, 15 aa, Homo sapiens
  CDR3 for alpha chain variable domain of TCR clone 68238 (TRAV39, TRAJ32)
CAVDMEGGATNKLIF

SEQ ID NO: 136476 - protein, 17 aa, Homo sapiens
  CDR3 for beta chain variable domain of TCR clone 68238 (TRBV7-2, TRBJ1-4)
CASSFKAGPTTNEKLLF

SEQ ID NO: 136477 - protein, 14 aa, Homo sapiens
  CDR3 for alpha chain variable domain of TCR clone 68239 (TRAV12-2, TRAJ44)
CAVNPAGTASKLTF

SEQ ID NO: 136478 - protein, 14 aa, Homo sapiens
  CDR3 for beta chain variable domain of TCR clone 68239 (TRBV13, TRBJ2-7)
CASSLKGASYEQYF

SEQ ID NO: 136479 - protein, 14 aa, Homo sapiens
  CDR3 for alpha chain variable domain of TCR clone 68240 (TRAV20, TRAJ56)
CAVQCGGANSKLTF

SEQ ID NO: 136480 - protein, 14 aa, Homo sapiens
  CDR3 for beta chain variable domain of TCR clone 68240 (TRBV20-1, TRBJ2-7)
CSAKRGRSSYEQYF

SEQ ID NO: 136481 - protein, 14 aa, Homo sapiens
  CDR3 for alpha chain variable domain of TCR clone 68241 (TRAV23/DV6, TRAJ58)
FAGMRETSGSRLTF

SEQ ID NO: 136482 - protein, 13 aa, Homo sapiens
  CDR3 for beta chain variable domain of TCR clone 68241 (TRBV28, TRBJ2-7)
CASRSSGVYEQYF

SEQ ID NO: 136483 - protein, 12 aa, Homo sapiens
  CDR3 for alpha chain variable domain of TCR clone 68242 (TRAV12-1, TRAJ40)
CVSYSGTYKYIF

SEQ ID NO: 136484 - protein, 18 aa, Homo sapiens
  CDR3 for beta chain variable domain of TCR clone 68242 (TRBV12-4, TRBJ2-2)
CASSLVAGTRGRTGELFF

SEQ ID NO: 136485 - protein, 13 aa, Homo sapiens
  CDR3 for alpha chain variable domain of TCR clone 68243 (TRAV23/DV6, TRAJ6)
CAAKTGGSYIPTF

SEQ ID NO: 136486 - protein, 15 aa, Homo sapiens
  CDR3 for beta chain variable domain of TCR clone 68243 (TRBV5-1, TRBJ1-2)
CASSSYGEFDYGYTF

SEQ ID NO: 136487 - protein, 14 aa, Homo sapiens
  CDR3 for alpha chain variable domain of TCR clone 68244 (TRAV12-1, TRAJ38)
CGELKAGNNLKLIW

SEQ ID NO: 136488 - protein, 13 aa, Homo sapiens
  CDR3 for beta chain variable domain of TCR clone 68244 (TRBV4-2, TRBJ1-1)
CASSQAGNTEAFF

SEQ ID NO: 136489 - protein, 14 aa, Homo sapiens
  CDR3 for alpha chain variable domain of TCR clone 68245 (TRAV2, TRAJ9)
CAVEDRSGGFKTIF

SEQ ID NO: 136490 - protein, 14 aa, Homo sapiens
  CDR3 for beta chain variable domain of TCR clone 68245 (TRBV7-3, TRBJ2-2)
CASSSGGYTGELFF

SEQ ID NO: 136491 - protein, 13 aa, Homo sapiens
  CDR3 for alpha chain variable domain of TCR clone 68246 (TRAV2, TRAJ40)
CAVVTSGTYKYIF

SEQ ID NO: 136492 - protein, 13 aa, Homo sapiens
  CDR3 for beta chain variable domain of TCR clone 68246 (TRBV7-9, TRBJ2-5)
CASLPSGREAQYF

SEQ ID NO: 136493 - protein, 11 aa, Homo sapiens
  CDR3 for alpha chain variable domain of TCR clone 68247 (TRAV1-1, TRAJ23)
CAVRQGGKLMF

SEQ ID NO: 136494 - protein, 20 aa, Homo sapiens
  CDR3 for beta chain variable domain of TCR clone 68247 (TRBV7-8, TRBJ2-2)
CASSHLFPGPTIHITGELFF

SEQ ID NO: 136495 - protein, 16 aa, Homo sapiens
  CDR3 for alpha chain variable domain of TCR clone 68248 (TRAV4, TRAJ8)
RLVGDSGNTGFQKLVF

SEQ ID NO: 136496 - protein, 15 aa, Homo sapiens
  CDR3 for beta chain variable domain of TCR clone 68248 (TRBV15, TRBJ1-2)
CATSRVRASGSGYTF

SEQ ID NO: 136497 - protein, 12 aa, Homo sapiens
  CDR3 for alpha chain variable domain of TCR clone 68249 (TRAV29/DV5, TRAJ43)
CAAPYNNNDMRF

SEQ ID NO: 136498 - protein, 15 aa, Homo sapiens
  CDR3 for beta chain variable domain of TCR clone 68249 (TRBV18, TRBJ1-6)
CASSRIQGRNSHLHF

SEQ ID NO: 136499 - protein, 14 aa, Homo sapiens
  CDR3 for alpha chain variable domain of TCR clone 68250 (TRAV1-2, TRAJ8)
CAVREDTGFQELVF

SEQ ID NO: 136500 - protein, 14 aa, Homo sapiens
  CDR3 for beta chain variable domain of TCR clone 68250 (TRBV20-1, TRBJ1-1)
CSAQTRIGGTEAFF

SEQ ID NO: 136501 - protein, 14 aa, Homo sapiens
  CDR3 for alpha chain variable domain of TCR clone 68251 (TRAV38-1, TRAJ45)
CASHSGGGADGLTF

SEQ ID NO: 136502 - protein, 18 aa, Homo sapiens
  CDR3 for beta chain variable domain of TCR clone 68251 (TRBV24-1, TRBJ2-1)
CATSDLMFLGRGVHEQFF

SEQ ID NO: 136503 - protein, 16 aa, Homo sapiens
  CDR3 for alpha chain variable domain of TCR clone 68252 (TRAV9-2, TRAJ37)
CALSATRSSNTGKLIF

SEQ ID NO: 136504 - protein, 14 aa, Homo sapiens
  CDR3 for beta chain variable domain of TCR clone 68252 (TRBV9, TRBJ2-1)
CASSVVAAYNEQFF

SEQ ID NO: 136505 - protein, 15 aa, Homo sapiens
  CDR3 for alpha chain variable domain of TCR clone 68253 (TRAV13-1, TRAJ44)
CAASRGGGTASKLTF

SEQ ID NO: 136506 - protein, 12 aa, Homo sapiens
  CDR3 for beta chain variable domain of TCR clone 68253 (TRBV24-1, TRBJ1-1)
CATLYPDTEAFF

SEQ ID NO: 136507 - protein, 12 aa, Homo sapiens
  CDR3 for alpha chain variable domain of TCR clone 68254 (TRAV4, TRAJ26)
CLVGDYGQNFVF

SEQ ID NO: 136508 - protein, 14 aa, Homo sapiens
  CDR3 for beta chain variable domain of TCR clone 68254 (TRBV7-2, TRBJ2-7)
CASSPKTSSYEQYF

SEQ ID NO: 136509 - protein, 16 aa, Homo sapiens
  CDR3 for alpha chain variable domain of TCR clone 68255 (TRAV8-3, TRAJ8)
CAVPRDGNTGFQKLVF

SEQ ID NO: 136510 - protein, 14 aa, Homo sapiens
  CDR3 for beta chain variable domain of TCR clone 68255 (TRBV4-1, TRBJ2-2)
CASSQAVSTGELLF

SEQ ID NO: 136511 - protein, 14 aa, Homo sapiens
  CDR3 for alpha chain variable domain of TCR clone 68256 (TRAV1-2, TRAJ16)
CAVNRFSDGQTLLF

SEQ ID NO: 136512 - protein, 15 aa, Homo sapiens
  CDR3 for beta chain variable domain of TCR clone 68256 (TRBV7-9, TRBJ1-6)
CASGSPGRGNSPLHF

SEQ ID NO: 136513 - protein, 12 aa, Homo sapiens
  CDR3 for alpha chain variable domain of TCR clone 68257 (TRAV8-4, TRAJ43)
CAVSVNNNDMRF

SEQ ID NO: 136514 - protein, 16 aa, Homo sapiens
  CDR3 for beta chain variable domain of TCR clone 68257 (TRBV7-2, TRBJ2-6)
RASSLAGRSGANVLTF

SEQ ID NO: 136515 - protein, 17 aa, Homo sapiens
  CDR3 for alpha chain variable domain of TCR clone 68258 (TRAV3, TRAJ42)
CAVRDRDYGGSQGNLTF

SEQ ID NO: 136516 - protein, 13 aa, Homo sapiens
  CDR3 for beta chain variable domain of TCR clone 68258 (TRBV10-3, TRBJ2-7)
CASKLAVNYEQYF

SEQ ID NO: 136517 - protein, 15 aa, Homo sapiens
  CDR3 for alpha chain variable domain of TCR clone 68259 (TRAV26-1, TRAJ29)
CIVRVEGSGNTPLVF

SEQ ID NO: 136518 - protein, 14 aa, Homo sapiens
  CDR3 for beta chain variable domain of TCR clone 68259 (TRBV7-9, TRBJ1-5)
CQSQGHQPNQPQHF

SEQ ID NO: 136519 - protein, 13 aa, Homo sapiens
  CDR3 for alpha chain variable domain of TCR clone 68260 (TRAV12-3, TRAJ13)
CAMSSGGYQKVTF

SEQ ID NO: 136520 - protein, 13 aa, Homo sapiens
  CDR3 for beta chain variable domain of TCR clone 68260 (TRBV2, TRBJ1-1)
CASSEGGNTEAFF

SEQ ID NO: 136521 - protein, 14 aa, Homo sapiens
  CDR3 for alpha chain variable domain of TCR clone 68261 (TRAV12-3, TRAJ58)
CAMSTETSGSRLTF

SEQ ID NO: 136522 - protein, 14 aa, Homo sapiens
  CDR3 for beta chain variable domain of TCR clone 68261 (TRBV7-2, TRBJ2-7)
CASSPKTSFYEQYF

SEQ ID NO: 136523 - protein, 14 aa, Homo sapiens
  CDR3 for alpha chain variable domain of TCR clone 68262 (TRAV8-3, TRAJ30)
CAVGYMNRDDKIIF

SEQ ID NO: 136524 - protein, 17 aa, Homo sapiens
  CDR3 for beta chain variable domain of TCR clone 68262 (TRBV19, TRBJ2-2)
CASSRNPGGFGTGELFF

SEQ ID NO: 136525 - protein, 13 aa, Homo sapiens
  CDR3 for alpha chain variable domain of TCR clone 68263 (TRAV8-3, TRAJ4)
WVFYSGGYNKLIF

SEQ ID NO: 136526 - protein, 14 aa, Homo sapiens
  CDR3 for beta chain variable domain of TCR clone 68263 (TRBV7-9, TRBJ2-3)
CASSLEDGTETQYF

SEQ ID NO: 136527 - protein, 12 aa, Homo sapiens
  CDR3 for alpha chain variable domain of TCR clone 68264 (TRAV17, TRAJ53)
CVGGGSNYKLTF

SEQ ID NO: 136528 - protein, 16 aa, Homo sapiens
  CDR3 for beta chain variable domain of TCR clone 68264 (TRBV11-2, TRBJ2-3)
CASSFQGRGALDTQYF

SEQ ID NO: 136529 - protein, 12 aa, Homo sapiens
  CDR3 for alpha chain variable domain of TCR clone 68265 (TRAV1-1, TRAJ8)
CAGGTGFQKPVF

SEQ ID NO: 136530 - protein, 15 aa, Homo sapiens
  CDR3 for beta chain variable domain of TCR clone 68265 (TRBV7-9, TRBJ1-4)
CASSRTGGFNEKLFF

SEQ ID NO: 136531 - protein, 17 aa, Homo sapiens
  CDR3 for alpha chain variable domain of TCR clone 68266 (TRAV26-1, TRAJ36)
CIVRPPGDQTGANNLLF

SEQ ID NO: 136532 - protein, 16 aa, Homo sapiens
  CDR3 for beta chain variable domain of TCR clone 68266 (TRBV19, TRBJ2-1)
CASSKAGPSSYNEQFF

SEQ ID NO: 136533 - protein, 15 aa, Homo sapiens
  CDR3 for alpha chain variable domain of TCR clone 68267 (TRAV21, TRAJ53)
CATLNSGGSNYKLTF

SEQ ID NO: 136534 - protein, 16 aa, Homo sapiens
  CDR3 for beta chain variable domain of TCR clone 68267 (TRBV29-1, TRBJ1-2)
CSVEANRDIANYGYAF

SEQ ID NO: 136535 - protein, 13 aa, Homo sapiens
  CDR3 for alpha chain variable domain of TCR clone 68268 (TRAV26-1, TRAJ40)
CIVRVEGTYKYIF

SEQ ID NO: 136536 - protein, 15 aa, Homo sapiens
  CDR3 for beta chain variable domain of TCR clone 68268 (TRBV12-4, TRBJ1-2)
CASSLAHRDGQADTF

SEQ ID NO: 136537 - protein, 14 aa, Homo sapiens
  CDR3 for alpha chain variable domain of TCR clone 68269 (TRAV8-3, TRAJ13)
CAVGAQEGYQKVTF

SEQ ID NO: 136538 - protein, 15 aa, Homo sapiens
  CDR3 for beta chain variable domain of TCR clone 68269 (TRBV3-1, TRBJ1-1)
CASKMRATMNTEAVF

SEQ ID NO: 136539 - protein, 14 aa, Homo sapiens
  CDR3 for alpha chain variable domain of TCR clone 68270 (TRAV12-3, TRAJ42)
CAMNYGGSQGNLIF

SEQ ID NO: 136540 - protein, 15 aa, Homo sapiens
  CDR3 for beta chain variable domain of TCR clone 68270 (TRBV5-7, TRBJ1-5)
CTSSYGKLWDQPQHF

SEQ ID NO: 136541 - protein, 13 aa, Homo sapiens
  CDR3 for alpha chain variable domain of TCR clone 68271 (TRAV29/DV5, TRAJ31)
CAASRNNNARLMF

SEQ ID NO: 136542 - protein, 15 aa, Homo sapiens
  CDR3 for beta chain variable domain of TCR clone 68271 (TRBV7-2, TRBJ2-3)
CASSLRGGSTDTQCF

SEQ ID NO: 136543 - protein, 16 aa, Homo sapiens
  CDR3 for alpha chain variable domain of TCR clone 68272 (TRAV3, TRAJ37)
CAVKPHGSGNTGKLIF

SEQ ID NO: 136544 - protein, 16 aa, Homo sapiens
  CDR3 for beta chain variable domain of TCR clone 68272 (TRBV9, TRBJ1-2)
CASSVEEKVSPYGYTF

SEQ ID NO: 136545 - protein, 12 aa, Homo sapiens
  CDR3 for alpha chain variable domain of TCR clone 68273 (TRAV2, TRAJ9)
CAVGAGGFKTIF

SEQ ID NO: 136546 - protein, 11 aa, Homo sapiens
  CDR3 for beta chain variable domain of TCR clone 68273 (TRBV13, TRBJ2-2)
CASSPRAGEHT

SEQ ID NO: 136547 - protein, 16 aa, Homo sapiens
  CDR3 for alpha chain variable domain of TCR clone 68274 (TRAV30, TRAJ24)
CGTEIVDADSWGKFQF

SEQ ID NO: 136548 - protein, 15 aa, Homo sapiens
  CDR3 for beta chain variable domain of TCR clone 68274 (TRBV6-3, TRBJ2-7)
CASSPPGTVFYEQYF

SEQ ID NO: 136549 - protein, 16 aa, Homo sapiens
  CDR3 for alpha chain variable domain of TCR clone 68275 (TRAV1-2, TRAJ10)
CAVRGVLTGGGNKLTF

SEQ ID NO: 136550 - protein, 12 aa, Homo sapiens
  CDR3 for beta chain variable domain of TCR clone 68275 (TRBV11-2, TRBJ2-1)
CASSPGNNGQFF

SEQ ID NO: 136551 - protein, 15 aa, Homo sapiens
  CDR3 for alpha chain variable domain of TCR clone 68276 (TRAV12-1, TRAJ44)
CVVFVNTGTASKLTF

SEQ ID NO: 136552 - protein, 17 aa, Homo sapiens
  CDR3 for beta chain variable domain of TCR clone 68276 (TRBV7-8, TRBJ2-6)
CASSAGTGRAGANVLTF

SEQ ID NO: 136553 - protein, 13 aa, Homo sapiens
  CDR3 for alpha chain variable domain of TCR clone 68277 (TRAV8-6, TRAJ21)
CAVSPSSLSKFYF

SEQ ID NO: 136554 - protein, 13 aa, Homo sapiens
  CDR3 for beta chain variable domain of TCR clone 68277 (TRBV29-1, TRBJ2-1)
CSVEGGRVNEQFF

SEQ ID NO: 136555 - protein, 12 aa, Homo sapiens
  CDR3 for alpha chain variable domain of TCR clone 68278 (TRAV12-1, TRAJ40)
CVVYSGTYKSIF

SEQ ID NO: 136556 - protein, 18 aa, Homo sapiens
  CDR3 for beta chain variable domain of TCR clone 68278 (TRBV11-2, TRBJ2-3)
CASSLGGASRGAPNTQYF

SEQ ID NO: 136557 - protein, 11 aa, Homo sapiens
  CDR3 for alpha chain variable domain of TCR clone 68279 (TRAV22, TRAJ30)
CAGNRDDKIIF

SEQ ID NO: 136558 - protein, 13 aa, Homo sapiens
  CDR3 for beta chain variable domain of TCR clone 68279 (TRBV20-1, TRBJ2-1)
CSASTGTSNEQFF

SEQ ID NO: 136559 - protein, 15 aa, Homo sapiens
  CDR3 for alpha chain variable domain of TCR clone 68280 (TRAV16, TRAJ12)
CSKWPLRDSSYKLIF

SEQ ID NO: 136560 - protein, 17 aa, Homo sapiens
  CDR3 for beta chain variable domain of TCR clone 68280 (TRBV7-3, TRBJ2-3)
CASSLMKRMRGADTQYF

SEQ ID NO: 136561 - protein, 16 aa, Homo sapiens
  CDR3 for alpha chain variable domain of TCR clone 68281 (TRAV3, TRAJ37)
CAVRVRGSGNTGKLTF

SEQ ID NO: 136562 - protein, 11 aa, Homo sapiens
  CDR3 for beta chain variable domain of TCR clone 68281 (TRBV11-2, TRBJ2-2)
CASSLPGELFF

SEQ ID NO: 136563 - protein, 16 aa, Homo sapiens
  CDR3 for alpha chain variable domain of TCR clone 68282 (TRAV30, TRAJ24)
CGTEIVDADSWGRFQF

SEQ ID NO: 136564 - protein, 14 aa, Homo sapiens
  CDR3 for beta chain variable domain of TCR clone 68282 (TRBV12-5, TRBJ2-5)
CASGSRTYQETQYF

SEQ ID NO: 136565 - protein, 12 aa, Homo sapiens
  CDR3 for alpha chain variable domain of TCR clone 68283 (TRAV2, TRAJ9)
FAVGAGGFKTIF

SEQ ID NO: 136566 - protein, 17 aa, Homo sapiens
  CDR3 for beta chain variable domain of TCR clone 68283 (TRBV13, TRBJ2-3)
CASSLSRVAGGRNTQYF

SEQ ID NO: 136567 - protein, 14 aa, Homo sapiens
  CDR3 for alpha chain variable domain of TCR clone 68284 (TRAV17, TRAJ57)
RATDPQGGSEKLVF

SEQ ID NO: 136568 - protein, 13 aa, Homo sapiens
  CDR3 for beta chain variable domain of TCR clone 68284 (TRBV19, TRBJ2-7)
CASSPRQSYEQYF

SEQ ID NO: 136569 - protein, 14 aa, Homo sapiens
  CDR3 for alpha chain variable domain of TCR clone 68285 (TRAV29/DV5, TRAJ45)
CAASFRGGADGLTF

SEQ ID NO: 136570 - protein, 15 aa, Homo sapiens
  CDR3 for beta chain variable domain of TCR clone 68285 (TRBV11-2, TRBJ1-2)
CASSLEGVQRNGYTF

SEQ ID NO: 136571 - protein, 15 aa, Homo sapiens
  CDR3 for alpha chain variable domain of TCR clone 68286 (TRAV3, TRAJ47)
CAVREIGEYGNKLVF

SEQ ID NO: 136572 - protein, 14 aa, Homo sapiens
  CDR3 for beta chain variable domain of TCR clone 68286 (TRBV13, TRBJ2-5)
CASSLERVGETQYF

SEQ ID NO: 136573 - protein, 13 aa, Homo sapiens
  CDR3 for alpha chain variable domain of TCR clone 68287 (TRAV12-3, TRAJ33)
CAMSVNSNYQLIW

SEQ ID NO: 136574 - protein, 12 aa, Homo sapiens
  CDR3 for beta chain variable domain of TCR clone 68287 (TRBV18, TRBJ2-1)
CASSSDEDEQFF

SEQ ID NO: 136575 - protein, 12 aa, Homo sapiens
  CDR3 for alpha chain variable domain of TCR clone 68288 (TRAV3, TRAJ31)
CAVRPRGPRLML

SEQ ID NO: 136576 - protein, 17 aa, Homo sapiens
  CDR3 for beta chain variable domain of TCR clone 68288 (TRBV7-9, TRBJ1-5)
CASSASQGGYSNQPQHF

SEQ ID NO: 136577 - protein, 17 aa, Homo sapiens
  CDR3 for alpha chain variable domain of TCR clone 68289 (TRAV20, TRAJ28)
CSVQGGYSGAGSYQLTF

SEQ ID NO: 136578 - protein, 15 aa, Homo sapiens
  CDR3 for beta chain variable domain of TCR clone 68289 (TRBV7-2, TRBJ2-7)
CASSLSSGRTYEQYF

SEQ ID NO: 136579 - protein, 14 aa, Homo sapiens
  CDR3 for alpha chain variable domain of TCR clone 68290 (TRAV38-1, TRAJ29)
CAFITPSGNTPLVF

SEQ ID NO: 136580 - protein, 14 aa, Homo sapiens
  CDR3 for beta chain variable domain of TCR clone 68290 (TRBV18, TRBJ2-7)
CASSPRGGAYEQYC

SEQ ID NO: 136581 - protein, 12 aa, Homo sapiens
  CDR3 for alpha chain variable domain of TCR clone 68291 (TRAV12-3, TRAJ17)
CAMTLTGNKLTF

SEQ ID NO: 136582 - protein, 14 aa, Homo sapiens
  CDR3 for beta chain variable domain of TCR clone 68291 (TRBV7-3, TRBJ2-2)
CASSPDPSGRELFF

SEQ ID NO: 136583 - protein, 12 aa, Homo sapiens
  CDR3 for alpha chain variable domain of TCR clone 68292 (TRAV16, TRAJ9)
CALRSGGFKTIF

SEQ ID NO: 136584 - protein, 14 aa, Homo sapiens
  CDR3 for beta chain variable domain of TCR clone 68292 (TRBV7-9, TRBJ2-1)
CASSLAGPYNEQFF

SEQ ID NO: 136585 - protein, 11 aa, Homo sapiens
  CDR3 for alpha chain variable domain of TCR clone 68293 (TRAV1-2, TRAJ20)
CAVANDYKLSF

SEQ ID NO: 136586 - protein, 14 aa, Homo sapiens
  CDR3 for beta chain variable domain of TCR clone 68293 (TRBV7-9, TRBJ1-1)
CASTPLQPYTEAFF

SEQ ID NO: 136587 - protein, 15 aa, Homo sapiens
  CDR3 for alpha chain variable domain of TCR clone 68294 (TRAV12-3, TRAJ5)
CAMSGLGTGRRALTL

SEQ ID NO: 136588 - protein, 16 aa, Homo sapiens
  CDR3 for beta chain variable domain of TCR clone 68294 (TRBV20-1, TRBJ2-3)
CSARLHSAGAIDTQYF

SEQ ID NO: 136589 - protein, 17 aa, Homo sapiens
  CDR3 for alpha chain variable domain of TCR clone 68295 (TRAV13-1, TRAJ31)
CAPRDRLMFGDGTQLVV

SEQ ID NO: 136590 - protein, 14 aa, Homo sapiens
  CDR3 for beta chain variable domain of TCR clone 68295 (TRBV19, TRBJ2-2)
CASSGQGIAGELFF

SEQ ID NO: 136591 - protein, 12 aa, Homo sapiens
  CDR3 for alpha chain variable domain of TCR clone 68296 (TRAV16, TRAJ10)
CSRTGVGNKLTF

SEQ ID NO: 136592 - protein, 19 aa, Homo sapiens
  CDR3 for beta chain variable domain of TCR clone 68296 (TRBV25-1, TRBJ2-2)
CAILVYRVDRGRKTGELFF

SEQ ID NO: 136593 - protein, 11 aa, Homo sapiens
  CDR3 for alpha chain variable domain of TCR clone 68297 (TRAV3, TRAJ21)
CAVGNFNKFYF

SEQ ID NO: 136594 - protein, 13 aa, Homo sapiens
  CDR3 for beta chain variable domain of TCR clone 68297 (TRBV24-1, TRBJ2-2)
CATSDWSTGELFF

SEQ ID NO: 136595 - protein, 14 aa, Homo sapiens
  CDR3 for alpha chain variable domain of TCR clone 68298 (TRAV1-2, TRAJ16)
CAVNRFSHGQKLLF

SEQ ID NO: 136596 - protein, 13 aa, Homo sapiens
  CDR3 for beta chain variable domain of TCR clone 68298 (TRBV10-3, TRBJ2-7)
CASKLAVNYEQYF

SEQ ID NO: 136597 - protein, 13 aa, Homo sapiens
  CDR3 for alpha chain variable domain of TCR clone 68299 (TRAV17, TRAJ54)
CAAGIQGAQKLVF

SEQ ID NO: 136598 - protein, 14 aa, Homo sapiens
  CDR3 for beta chain variable domain of TCR clone 68299 (TRBV11-2, TRBJ1-2)
CASSLGTANYSYTF

SEQ ID NO: 136599 - protein, 14 aa, Homo sapiens
  CDR3 for alpha chain variable domain of TCR clone 68300 (TRAV12-3, TRAJ10)
SHLPLTGGGNKLTF

SEQ ID NO: 136600 - protein, 15 aa, Homo sapiens
  CDR3 for beta chain variable domain of TCR clone 68300 (TRBV7-9, TRBJ1-4)
RASSRTGGFNEKLFF

SEQ ID NO: 136601 - protein, 15 aa, Homo sapiens
  CDR3 for alpha chain variable domain of TCR clone 68301 (TRAV38-1, TRAJ37)
CAFIFGSGNTGKLIF

SEQ ID NO: 136602 - protein, 14 aa, Homo sapiens
  CDR3 for beta chain variable domain of TCR clone 68301 (TRBV7-2, TRBJ2-7)
CASSPKTSFYEQYF

SEQ ID NO: 136603 - protein, 11 aa, Homo sapiens
  CDR3 for alpha chain variable domain of TCR clone 68302 (TRAV12-1, TRAJ30)
CVVNGQDKIIF

SEQ ID NO: 136604 - protein, 12 aa, Homo sapiens
  CDR3 for beta chain variable domain of TCR clone 68302 (TRBV12-4, TRBJ2-2)
CASKLFTGELFF

SEQ ID NO: 136605 - protein, 12 aa, Homo sapiens
  CDR3 for alpha chain variable domain of TCR clone 68303 (TRAV21, TRAJ23)
CAVMLQAGKLIF

SEQ ID NO: 136606 - protein, 14 aa, Homo sapiens
  CDR3 for beta chain variable domain of TCR clone 68303 (TRBV7-9, TRBJ1-4)
CAITEGEANEKLFF

SEQ ID NO: 136607 - protein, 15 aa, Homo sapiens
  CDR3 for alpha chain variable domain of TCR clone 68304 (TRAV26-2, TRAJ13)
CILRDLSGGYQKVTF

SEQ ID NO: 136608 - protein, 11 aa, Homo sapiens
  CDR3 for beta chain variable domain of TCR clone 68304 (TRBV7-9, TRBJ2-5)
CGSSLSATQYF

SEQ ID NO: 136609 - protein, 16 aa, Homo sapiens
  CDR3 for alpha chain variable domain of TCR clone 68305 (TRAV30, TRAJ24)
CGTEIVDADSWGKFQF

SEQ ID NO: 136610 - protein, 14 aa, Homo sapiens
  CDR3 for beta chain variable domain of TCR clone 68305 (TRBV13, TRBJ2-1)
CASSPRPRYNEQFC

SEQ ID NO: 136611 - protein, 13 aa, Homo sapiens
  CDR3 for alpha chain variable domain of TCR clone 68306 (TRAV1-1, TRAJ9)
CAAKNTGGFKTIF

SEQ ID NO: 136612 - protein, 15 aa, Homo sapiens
  CDR3 for beta chain variable domain of TCR clone 68306 (TRBV11-3, TRBJ2-3)
CASLKDGREGDTQYF

SEQ ID NO: 136613 - protein, 14 aa, Homo sapiens
  CDR3 for alpha chain variable domain of TCR clone 68307 (TRAV13-1, TRAJ9)
CAASALTGGFKTIF

SEQ ID NO: 136614 - protein, 13 aa, Homo sapiens
  CDR3 for beta chain variable domain of TCR clone 68307 (TRBV7-9, TRBJ1-2)
CASSLKQNYGYTF

SEQ ID NO: 136615 - protein, 12 aa, Homo sapiens
  CDR3 for alpha chain variable domain of TCR clone 68308 (TRAV17, TRAJ20)
CATDSNDYKLSF

SEQ ID NO: 136616 - protein, 17 aa, Homo sapiens
  CDR3 for beta chain variable domain of TCR clone 68308 (TRBV5-1, TRBJ2-2)
CASSLAGLSGGTEELFF

SEQ ID NO: 136617 - protein, 13 aa, Homo sapiens
  CDR3 for alpha chain variable domain of TCR clone 68309 (TRAV2, TRAJ40)
CAVDTSGTYKYIF

SEQ ID NO: 136618 - protein, 15 aa, Homo sapiens
  CDR3 for beta chain variable domain of TCR clone 68309 (TRBV11-3, TRBJ2-3)
CASLKDGREGDTQYF

SEQ ID NO: 136619 - protein, 17 aa, Homo sapiens
  CDR3 for alpha chain variable domain of TCR clone 68310 (TRAV4, TRAJ18)
CLVGERSVGSTLGRLYF

SEQ ID NO: 136620 - protein, 18 aa, Homo sapiens
  CDR3 for beta chain variable domain of TCR clone 68310 (TRBV11-3, TRBJ2-3)
CASSLGGASRGAPNTQYF

SEQ ID NO: 136621 - protein, 13 aa, Homo sapiens
  CDR3 for alpha chain variable domain of TCR clone 68311 (TRAV17, TRAJ5)
CAPMDTGRRALTF

SEQ ID NO: 136622 - protein, 20 aa, Homo sapiens
  CDR3 for beta chain variable domain of TCR clone 68311 (TRBV6-6, TRBJ2-5)
CASSPRGGLRGDPVLRARHA

SEQ ID NO: 136623 - protein, 13 aa, Homo sapiens
  CDR3 for alpha chain variable domain of TCR clone 68312 (TRAV3, TRAJ15)
CAVRAQAGTALIF

SEQ ID NO: 136624 - protein, 15 aa, Homo sapiens
  CDR3 for beta chain variable domain of TCR clone 68312 (TRBV11-1, TRBJ2-7)
CASSLNYGASYEQYF

SEQ ID NO: 136625 - protein, 23 aa, Homo sapiens
  CDR3 for alpha chain variable domain of TCR clone 68313 (TRAV40, )
CLLGDGIPDIQNPDPAVYQLRDF

SEQ ID NO: 136626 - protein, 16 aa, Homo sapiens
  CDR3 for beta chain variable domain of TCR clone 68313 (TRBV20-1, TRBJ1-5)
CSAELPGQQTNQPQHF

SEQ ID NO: 136627 - protein, 16 aa, Homo sapiens
  CDR3 for alpha chain variable domain of TCR clone 68314 (TRAV12-2, TRAJ18)
CAVTTDRGSTLGRLYF

SEQ ID NO: 136628 - protein, 13 aa, Homo sapiens
  CDR3 for beta chain variable domain of TCR clone 68314 (TRBV19, TRBJ2-3)
CATWDKITDTRYF

SEQ ID NO: 136629 - protein, 12 aa, Homo sapiens
  CDR3 for alpha chain variable domain of TCR clone 68315 (TRAV21, TRAJ3)
CCFYNSASKIIF

SEQ ID NO: 136630 - protein, 16 aa, Homo sapiens
  CDR3 for beta chain variable domain of TCR clone 68315 (TRBV19, TRBJ2-1)
CASSKAGPSSYNEQFF

SEQ ID NO: 136631 - protein, 13 aa, Homo sapiens
  CDR3 for alpha chain variable domain of TCR clone 68316 (TRAV8-4, TRAJ30)
CAVSVNRDDRIIF

SEQ ID NO: 136632 - protein, 13 aa, Homo sapiens
  CDR3 for beta chain variable domain of TCR clone 68316 (TRBV3-1, TRBJ2-2)
CASLARGSGELFF

SEQ ID NO: 136633 - protein, 14 aa, Homo sapiens
  CDR3 for alpha chain variable domain of TCR clone 68317 (TRAV27, TRAJ17)
CRSTIRAAGNKLTF

SEQ ID NO: 136634 - protein, 16 aa, Homo sapiens
  CDR3 for beta chain variable domain of TCR clone 68317 (TRBV5-7, TRBJ2-5)
CASTFAPAGGRDTQYF

SEQ ID NO: 136635 - protein, 15 aa, Homo sapiens
  CDR3 for alpha chain variable domain of TCR clone 68318 (TRAV27, TRAJ50)
CAGRERGTSYDKAIF

SEQ ID NO: 136636 - protein, 16 aa, Homo sapiens
  CDR3 for beta chain variable domain of TCR clone 68318 (TRBV10-3, TRBJ1-5)
CAISDQVGAPNQPQHF

SEQ ID NO: 136637 - protein, 15 aa, Homo sapiens
  CDR3 for alpha chain variable domain of TCR clone 68319 (TRAV27, TRAJ38)
CAARRNAGNNRKLIW

SEQ ID NO: 136638 - protein, 14 aa, Homo sapiens
  CDR3 for beta chain variable domain of TCR clone 68319 (TRBV2, TRBJ2-1)
CASSEARQGVSEFF

SEQ ID NO: 136639 - protein, 17 aa, Homo sapiens
  CDR3 for alpha chain variable domain of TCR clone 68320 (TRAV12-2, TRAJ52)
CAVNKGAGGTSYGKLTF

SEQ ID NO: 136640 - protein, 15 aa, Homo sapiens
  CDR3 for beta chain variable domain of TCR clone 68320 (TRBV6-5, TRBJ2-1)
CASSYDAGAGNEQFF

SEQ ID NO: 136641 - protein, 15 aa, Homo sapiens
  CDR3 for alpha chain variable domain of TCR clone 68321 (TRAV12-3, TRAJ6)
CAMSATTGGSYIPTF

SEQ ID NO: 136642 - protein, 16 aa, Homo sapiens
  CDR3 for beta chain variable domain of TCR clone 68321 (TRBV7-6, TRBJ2-7)
CASSGGTGALSYEQYF

SEQ ID NO: 136643 - protein, 13 aa, Homo sapiens
  CDR3 for alpha chain variable domain of TCR clone 68322 (TRAV13-2, TRAJ21)
CAENLYNFNKFYF

SEQ ID NO: 136644 - protein, 13 aa, Homo sapiens
  CDR3 for beta chain variable domain of TCR clone 68322 (TRBV19, TRBJ2-7)
CASSPRQSYEQYF

SEQ ID NO: 136645 - protein, 10 aa, Homo sapiens
  CDR3 for alpha chain variable domain of TCR clone 68323 (TRAV2, TRAJ34)
CAVVNDKLIF

SEQ ID NO: 136646 - protein, 16 aa, Homo sapiens
  CDR3 for beta chain variable domain of TCR clone 68323 (TRBV5-1, TRBJ2-2)
CASSSRTGGRTGELFF

SEQ ID NO: 136647 - protein, 16 aa, Homo sapiens
  CDR3 for alpha chain variable domain of TCR clone 68324 (TRAV30, TRAJ24)
CGTEIVDADSWGKFKF

SEQ ID NO: 136648 - protein, 16 aa, Homo sapiens
  CDR3 for beta chain variable domain of TCR clone 68324 (TRBV28, TRBJ2-7)
CASSLFFETGGPEQYF

SEQ ID NO: 136649 - protein, 15 aa, Homo sapiens
  CDR3 for alpha chain variable domain of TCR clone 68325 (TRAV26-1, TRAJ29)
CIVRVEGSGNTPLVF

SEQ ID NO: 136650 - protein, 15 aa, Homo sapiens
  CDR3 for beta chain variable domain of TCR clone 68325 (TRBV7-9, TRBJ1-5)
CASSQGHQRNQPQHF

SEQ ID NO: 136651 - protein, 12 aa, Homo sapiens
  CDR3 for alpha chain variable domain of TCR clone 68326 (TRAV12-3, TRAJ17)
CAMTLTGNKLTF

SEQ ID NO: 136652 - protein, 16 aa, Homo sapiens
  CDR3 for beta chain variable domain of TCR clone 68326 (TRBV27, TRBJ2-5)
CASSSQTSGFQETQYF

SEQ ID NO: 136653 - protein, 15 aa, Homo sapiens
  CDR3 for alpha chain variable domain of TCR clone 68327 (TRAV1-2, TRAJ30)
CAVRPHGNRDDKIIF

SEQ ID NO: 136654 - protein, 13 aa, Homo sapiens
  CDR3 for beta chain variable domain of TCR clone 68327 (TRBV4-1, TRBJ2-7)
CANSQGQAYEQYF

SEQ ID NO: 136655 - protein, 12 aa, Homo sapiens
  CDR3 for alpha chain variable domain of TCR clone 68328 (TRAV29/DV5, TRAJ34)
CAARHNTDKLIF

SEQ ID NO: 136656 - protein, 15 aa, Homo sapiens
  CDR3 for beta chain variable domain of TCR clone 68328 (TRBV19, TRBJ2-7)
CASSPDGSGEALRYF

SEQ ID NO: 136657 - protein, 14 aa, Homo sapiens
  CDR3 for alpha chain variable domain of TCR clone 68329 (TRAV1-2, TRAJ8)
CAVREDTGCQKLVF

SEQ ID NO: 136658 - protein, 16 aa, Homo sapiens
  CDR3 for beta chain variable domain of TCR clone 68329 (TRBV7-3, TRBJ2-2)
CASSLKRGTLSGELFF

SEQ ID NO: 136659 - protein, 12 aa, Homo sapiens
  CDR3 for alpha chain variable domain of TCR clone 68330 (TRAV12-3, TRAJ20)
CAMVRGDYKLRF

SEQ ID NO: 136660 - protein, 14 aa, Homo sapiens
  CDR3 for beta chain variable domain of TCR clone 68330 (TRBV5-5, TRBJ1-5)
CASSGQGVDQPQHF

SEQ ID NO: 136661 - protein, 14 aa, Homo sapiens
  CDR3 for alpha chain variable domain of TCR clone 68331 (TRAV1-2, TRAJ16)
CAVNRFSDGQKLLF

SEQ ID NO: 136662 - protein, 13 aa, Homo sapiens
  CDR3 for beta chain variable domain of TCR clone 68331 (TRBV10-3, TRBJ2-7)
CASKRAVNYEQYF

SEQ ID NO: 136663 - protein, 15 aa, Homo sapiens
  CDR3 for alpha chain variable domain of TCR clone 68332 (TRAV17, TRAJ22)
CATVAPSGSARQLTF

SEQ ID NO: 136664 - protein, 16 aa, Homo sapiens
  CDR3 for beta chain variable domain of TCR clone 68332 (TRBV10-3, TRBJ2-7)
CAISADFADRPYERYF

SEQ ID NO: 136665 - protein, 16 aa, Homo sapiens
  CDR3 for alpha chain variable domain of TCR clone 68333 (TRAV14/DV4, TRAJ53)
CAMREGGGGSNYKLTF

SEQ ID NO: 136666 - protein, 12 aa, Homo sapiens
  CDR3 for beta chain variable domain of TCR clone 68333 (TRBV20-1, TRBJ2-1)
CSARLGTDEQFF

SEQ ID NO: 136667 - protein, 15 aa, Homo sapiens
  CDR3 for alpha chain variable domain of TCR clone 68334 (TRAV17, TRAJ6)
CATDLPSGGSHIPTF

SEQ ID NO: 136668 - protein, 16 aa, Homo sapiens
  CDR3 for beta chain variable domain of TCR clone 68334 (TRBV4-1, TRBJ2-7)
CASSQDPTGYSYEQYF

SEQ ID NO: 136669 - protein, 14 aa, Homo sapiens
  CDR3 for alpha chain variable domain of TCR clone 68335 (TRAV12-3, TRAJ42)
CAMNYGGSQGNLIF

SEQ ID NO: 136670 - protein, 16 aa, Homo sapiens
  CDR3 for beta chain variable domain of TCR clone 68335 (TRBV12-5, TRBJ2-5)
CASGPRTSGNQETQYF

SEQ ID NO: 136671 - protein, 13 aa, Homo sapiens
  CDR3 for alpha chain variable domain of TCR clone 68336 (TRAV35, TRAJ42)
CAGFPGSQGNLIF

SEQ ID NO: 136672 - protein, 16 aa, Homo sapiens
  CDR3 for beta chain variable domain of TCR clone 68336 (TRBV12-4, TRBJ2-5)
CASSFFVRGRQETQYF

SEQ ID NO: 136673 - protein, 13 aa, Homo sapiens
  CDR3 for alpha chain variable domain of TCR clone 68337 (TRAV2, TRAJ40)
CAVVTSGTYKYIF

SEQ ID NO: 136674 - protein, 15 aa, Homo sapiens
  CDR3 for beta chain variable domain of TCR clone 68337 (TRBV5-1, TRBJ2-5)
CASSFKGGDQETQYF

SEQ ID NO: 136675 - protein, 11 aa, Homo sapiens
  CDR3 for alpha chain variable domain of TCR clone 68338 (TRAV27, TRAJ37)
CAGTPGGKLIF

SEQ ID NO: 136676 - protein, 15 aa, Homo sapiens
  CDR3 for beta chain variable domain of TCR clone 68338 (TRBV5-5, TRBJ2-5)
CASGVAGDLGETQYF

SEQ ID NO: 136677 - protein, 16 aa, Homo sapiens
  CDR3 for alpha chain variable domain of TCR clone 68339 (TRAV3, TRAJ21)
CAVRDIERGNFNKFYF

SEQ ID NO: 136678 - protein, 14 aa, Homo sapiens
  CDR3 for beta chain variable domain of TCR clone 68339 (TRBV20-1, TRBJ1-3)
CSASPTGAGNTIYF

SEQ ID NO: 136679 - protein, 14 aa, Homo sapiens
  CDR3 for alpha chain variable domain of TCR clone 68340 (TRAV13-2, TRAJ10)
CAETFTGGGKKLTF

SEQ ID NO: 136680 - protein, 16 aa, Homo sapiens
  CDR3 for beta chain variable domain of TCR clone 68340 (TRBV18, TRBJ2-7)
CASSPRSQGISYEQYF

SEQ ID NO: 136681 - protein, 12 aa, Homo sapiens
  CDR3 for alpha chain variable domain of TCR clone 68341 (TRAV2, TRAJ10)
CASTGGGNKLTF

SEQ ID NO: 136682 - protein, 14 aa, Homo sapiens
  CDR3 for beta chain variable domain of TCR clone 68341 (TRBV7-2, TRBJ2-2)
CASRVQGAAGELFF

SEQ ID NO: 136683 - protein, 17 aa, Homo sapiens
  CDR3 for alpha chain variable domain of TCR clone 68342 (TRAV13-1, TRAJ52)
FAASSGAGGTSYGKLTF

SEQ ID NO: 136684 - protein, 15 aa, Homo sapiens
  CDR3 for beta chain variable domain of TCR clone 68342 (TRBV2, TRBJ2-1)
CASSELAGSYNEQFF

SEQ ID NO: 136685 - protein, 16 aa, Homo sapiens
  CDR3 for alpha chain variable domain of TCR clone 68343 (TRAV3, TRAJ37)
YAVRVRGSGNTGKLIF

SEQ ID NO: 136686 - protein, 11 aa, Homo sapiens
  CDR3 for beta chain variable domain of TCR clone 68343 (TRBV11-2, TRBJ2-2)
CASSLPGELFF

SEQ ID NO: 136687 - protein, 14 aa, Homo sapiens
  CDR3 for alpha chain variable domain of TCR clone 68344 (TRAV17, TRAJ22)
CATSPSGSARQLTF

SEQ ID NO: 136688 - protein, 13 aa, Homo sapiens
  CDR3 for beta chain variable domain of TCR clone 68344 (TRBV27, TRBJ2-7)
CASSLTTGYEQYF

SEQ ID NO: 136689 - protein, 14 aa, Homo sapiens
  CDR3 for alpha chain variable domain of TCR clone 68345 (TRAV12-3, TRAJ10)
SHLPLTGGGNKLTF

SEQ ID NO: 136690 - protein, 15 aa, Homo sapiens
  CDR3 for beta chain variable domain of TCR clone 68345 (TRBV7-9, TRBJ1-1)
CASSLLEQGGTEAFF

SEQ ID NO: 136691 - protein, 18 aa, Homo sapiens
  CDR3 for alpha chain variable domain of TCR clone 68346 (TRAV13-1, TRAJ52)
CAAKNPNAGGTSYGKLTF

SEQ ID NO: 136692 - protein, 15 aa, Homo sapiens
  CDR3 for beta chain variable domain of TCR clone 68346 (TRBV6-1, TRBJ2-3)
CASSERGGITDTQYI

SEQ ID NO: 136693 - protein, 16 aa, Homo sapiens
  CDR3 for alpha chain variable domain of TCR clone 68347 (TRAV16, TRAJ4)
CITVLPFSGGYNKLIF

SEQ ID NO: 136694 - protein, 17 aa, Homo sapiens
  CDR3 for beta chain variable domain of TCR clone 68347 (TRBV13, TRBJ2-3)
CASSLSRVAGGRNTQYF

SEQ ID NO: 136695 - protein, 15 aa, Homo sapiens
  CDR3 for alpha chain variable domain of TCR clone 68348 (TRAV17, TRAJ42)
CATAHYGGSQGNLIF

SEQ ID NO: 136696 - protein, 14 aa, Homo sapiens
  CDR3 for beta chain variable domain of TCR clone 68348 (TRBV19, TRBJ2-5)
CASSIEHSQETQYF

SEQ ID NO: 136697 - protein, 20 aa, Homo sapiens
  CDR3 for alpha chain variable domain of TCR clone 68349 (TRAV1-1, TRAJ37)
CLLLLRCERYGSGNTGKLIF

SEQ ID NO: 136698 - protein, 14 aa, Homo sapiens
  CDR3 for beta chain variable domain of TCR clone 68349 (TRBV4-1, TRBJ2-2)
CASSQAVSTGELFF

SEQ ID NO: 136699 - protein, 14 aa, Homo sapiens
  CDR3 for alpha chain variable domain of TCR clone 68350 (TRAV16, TRAJ3)
CALSQYSSASKIIF

SEQ ID NO: 136700 - protein, 13 aa, Homo sapiens
  CDR3 for beta chain variable domain of TCR clone 68350 (TRBV19, TRBJ1-5)
CASSIGGNQPQHF

SEQ ID NO: 136701 - protein, 14 aa, Homo sapiens
  CDR3 for alpha chain variable domain of TCR clone 68351 (TRAV2, TRAJ3)
CAVDRYSSASKIIF

SEQ ID NO: 136702 - protein, 16 aa, Homo sapiens
  CDR3 for beta chain variable domain of TCR clone 68351 (TRBV20-1, TRBJ1-5)
CSAELPGQQTNQPQNF

SEQ ID NO: 136703 - protein, 16 aa, Homo sapiens
  CDR3 for alpha chain variable domain of TCR clone 68352 (TRAV8-3, TRAJ52)
CAVQTAGGTSYGKLTF

SEQ ID NO: 136704 - protein, 15 aa, Homo sapiens
  CDR3 for beta chain variable domain of TCR clone 68352 (TRBV11-2, TRBJ2-7)
CASSLAGGVATEQYF

SEQ ID NO: 136705 - protein, 16 aa, Homo sapiens
  CDR3 for alpha chain variable domain of TCR clone 68353 (TRAV3, TRAJ3)
CAVRDRSKSSASKIIF

SEQ ID NO: 136706 - protein, 16 aa, Homo sapiens
  CDR3 for beta chain variable domain of TCR clone 68353 (TRBV20-1, TRBJ2-4)
CSATSLAELAKNIQYF

SEQ ID NO: 136707 - protein, 14 aa, Homo sapiens
  CDR3 for alpha chain variable domain of TCR clone 68354 (TRAV12-2, TRAJ5)
CAVNRSTGRRALTF

SEQ ID NO: 136708 - protein, 17 aa, Homo sapiens
  CDR3 for beta chain variable domain of TCR clone 68354 (TRBV4-1, TRBJ2-7)
CASSRDPLGVRGGEQYF

SEQ ID NO: 136709 - protein, 15 aa, Homo sapiens
  CDR3 for alpha chain variable domain of TCR clone 68355 (TRAV35, TRAJ23)
CAGPLGNNQGGKLIL

SEQ ID NO: 136710 - protein, 14 aa, Homo sapiens
  CDR3 for beta chain variable domain of TCR clone 68355 (TRBV7-9, TRBJ1-1)
CASTPLQSYTEAFF

SEQ ID NO: 136711 - protein, 14 aa, Homo sapiens
  CDR3 for alpha chain variable domain of TCR clone 68356 (TRAV12-2, TRAJ17)
CAVLFKAAGNKLTF

SEQ ID NO: 136712 - protein, 14 aa, Homo sapiens
  CDR3 for beta chain variable domain of TCR clone 68356 (TRBV7-7, TRBJ2-2)
CATRQDADTGELFF

SEQ ID NO: 136713 - protein, 15 aa, Homo sapiens
  CDR3 for alpha chain variable domain of TCR clone 68357 (TRAV3, TRAJ42)
CAVRGGTGSKGNLIF

SEQ ID NO: 136714 - protein, 14 aa, Homo sapiens
  CDR3 for beta chain variable domain of TCR clone 68357 (TRBV19, TRBJ1-2)
CASSSLFARDVYTF

SEQ ID NO: 136715 - protein, 14 aa, Homo sapiens
  CDR3 for alpha chain variable domain of TCR clone 68358 (TRAV38-2/DV8, TRAJ23)
AAMYFCALSRKLIF

SEQ ID NO: 136716 - protein, 17 aa, Homo sapiens
  CDR3 for beta chain variable domain of TCR clone 68358 (TRBV5-4, TRBJ2-1)
CASSSAGGRGPYNEQFF

SEQ ID NO: 136717 - protein, 14 aa, Homo sapiens
  CDR3 for alpha chain variable domain of TCR clone 68359 (TRAV26-1, TRAJ38)
CIADNAGSNRKLIW

SEQ ID NO: 136718 - protein, 17 aa, Homo sapiens
  CDR3 for beta chain variable domain of TCR clone 68359 (TRBV15, TRBJ1-1)
CATSRVGGADGDTEAFF

SEQ ID NO: 136719 - protein, 15 aa, Homo sapiens
  CDR3 for alpha chain variable domain of TCR clone 68360 (TRAV39, TRAJ43)
CAVGELHALWSRDQT

SEQ ID NO: 136720 - protein, 15 aa, Homo sapiens
  CDR3 for beta chain variable domain of TCR clone 68360 (TRBV12-4, TRBJ2-5)
CASSPPTGLQETQYF

SEQ ID NO: 136721 - protein, 11 aa, Homo sapiens
  CDR3 for alpha chain variable domain of TCR clone 68361 (TRAV2, TRAJ13)
FASGGYQKVTF

SEQ ID NO: 136722 - protein, 15 aa, Homo sapiens
  CDR3 for beta chain variable domain of TCR clone 68361 (TRBV7-9, TRBJ1-6)
CASSSPGRGNSPLHF

SEQ ID NO: 136723 - protein, 13 aa, Homo sapiens
  CDR3 for alpha chain variable domain of TCR clone 68362 (TRAV1-2, TRAJ9)
CAALNTGGFKTIF

SEQ ID NO: 136724 - protein, 14 aa, Homo sapiens
  CDR3 for beta chain variable domain of TCR clone 68362 (TRBV13, TRBJ2-3)
CASSSGSPTETQYF

SEQ ID NO: 136725 - protein, 12 aa, Homo sapiens
  CDR3 for alpha chain variable domain of TCR clone 68363 (TRAV21, TRAJ11)
CAATSGYSTLTF

SEQ ID NO: 136726 - protein, 16 aa, Homo sapiens
  CDR3 for beta chain variable domain of TCR clone 68363 (TRBV24-1, TRBJ2-3)
CATSDPGTGATDTQYF

SEQ ID NO: 136727 - protein, 11 aa, Homo sapiens
  CDR3 for alpha chain variable domain of TCR clone 68364 (TRAV12-2, TRAJ31)
CAVTRWARLMF

SEQ ID NO: 136728 - protein, 15 aa, Homo sapiens
  CDR3 for beta chain variable domain of TCR clone 68364 (TRBV19, TRBJ2-7)
CASSIGGVLVNEQYF

SEQ ID NO: 136729 - protein, 17 aa, Homo sapiens
  CDR3 for alpha chain variable domain of TCR clone 68365 (TRAV8-3, TRAJ34)
CAIPGKLIFGTGTRLQV

SEQ ID NO: 136730 - protein, 15 aa, Homo sapiens
  CDR3 for beta chain variable domain of TCR clone 68365 (TRBV5-7, TRBJ2-1)
CASRRRLAGDNEQFF

SEQ ID NO: 136731 - protein, 16 aa, Homo sapiens
  CDR3 for alpha chain variable domain of TCR clone 68366 (TRAV26-1, TRAJ38)
CIVRVELGGNNRKLIW

SEQ ID NO: 136732 - protein, 17 aa, Homo sapiens
  CDR3 for beta chain variable domain of TCR clone 68366 (TRBV20-1, TRBJ2-2)
CSARVKRTHVRSGELFF

SEQ ID NO: 136733 - protein, 14 aa, Homo sapiens
  CDR3 for alpha chain variable domain of TCR clone 68367 (TRAV35, TRAJ13)
CAGSPSGGYQKVTF

SEQ ID NO: 136734 - protein, 13 aa, Homo sapiens
  CDR3 for beta chain variable domain of TCR clone 68367 (TRBV29-1, TRBJ1-1)
CSAGDSRNTEAFF

SEQ ID NO: 136735 - protein, 16 aa, Homo sapiens
  CDR3 for alpha chain variable domain of TCR clone 68368 (TRAV30, TRAJ53)
CGITGGSGGSNYKLTF

SEQ ID NO: 136736 - protein, 14 aa, Homo sapiens
  CDR3 for beta chain variable domain of TCR clone 68368 (TRBV25-1, TRBJ1-6)
CASSLSADISPLHF

SEQ ID NO: 136737 - protein, 14 aa, Homo sapiens
  CDR3 for alpha chain variable domain of TCR clone 68369 (TRAV13-1, TRAJ23)
CAASRLGRGGKLIF

SEQ ID NO: 136738 - protein, 15 aa, Homo sapiens
  CDR3 for beta chain variable domain of TCR clone 68369 (TRBV7-2, TRBJ2-1)
CASSLVAGRYNEQFF

SEQ ID NO: 136739 - protein, 14 aa, Homo sapiens
  CDR3 for alpha chain variable domain of TCR clone 68370 (TRAV1-2, TRAJ16)
FAVNRFSDGQKLLF

SEQ ID NO: 136740 - protein, 13 aa, Homo sapiens
  CDR3 for beta chain variable domain of TCR clone 68370 (TRBV19, TRBJ1-2)
CASSVPGQDGYTF

SEQ ID NO: 136741 - protein, 15 aa, Homo sapiens
  CDR3 for alpha chain variable domain of TCR clone 68371 (TRAV13-1, TRAJ57)
CAASNTQGGSDKLVF

SEQ ID NO: 136742 - protein, 16 aa, Homo sapiens
  CDR3 for beta chain variable domain of TCR clone 68371 (TRBV19, TRBJ2-1)
CASSKAGPSSYNEQFF

SEQ ID NO: 136743 - protein, 10 aa, Homo sapiens
  CDR3 for alpha chain variable domain of TCR clone 68372 (TRAV25, TRAJ34)
CAENTDKLIF

SEQ ID NO: 136744 - protein, 15 aa, Homo sapiens
  CDR3 for beta chain variable domain of TCR clone 68372 (TRBV15, TRBJ1-1)
CATSLQGGRNTEAFF

SEQ ID NO: 136745 - protein, 13 aa, Homo sapiens
  CDR3 for alpha chain variable domain of TCR clone 68373 (TRAV2, TRAJ40)
CAVVTSGTYKYIF

SEQ ID NO: 136746 - protein, 17 aa, Homo sapiens
  CDR3 for beta chain variable domain of TCR clone 68373 (TRBV5-1, TRBJ2-1)
CASSTGTSGYSYNEQFF

SEQ ID NO: 136747 - protein, 12 aa, Homo sapiens
  CDR3 for alpha chain variable domain of TCR clone 68374 (TRAV16, TRAJ10)
CSRTGGGNTLTF

SEQ ID NO: 136748 - protein, 15 aa, Homo sapiens
  CDR3 for beta chain variable domain of TCR clone 68374 (TRBV6-3, TRBJ2-7)
CASSSPGTVFYEQYF

SEQ ID NO: 136749 - protein, 14 aa, Homo sapiens
  CDR3 for alpha chain variable domain of TCR clone 68375 (TRAV3, TRAJ22)
CAVREYGSARQLTF

SEQ ID NO: 136750 - protein, 13 aa, Homo sapiens
  CDR3 for beta chain variable domain of TCR clone 68375 (TRBV11-2, TRBJ2-5)
CASGHGAKETQYF

SEQ ID NO: 136751 - protein, 15 aa, Homo sapiens
  CDR3 for alpha chain variable domain of TCR clone 68376 (TRAV8-3, TRAJ45)
CASSYSGGGADGLTF

SEQ ID NO: 136752 - protein, 15 aa, Homo sapiens
  CDR3 for beta chain variable domain of TCR clone 68376 (TRBV20-1, TRBJ2-7)
CSARDRVPGMDEQYF

SEQ ID NO: 136753 - protein, 14 aa, Homo sapiens
  CDR3 for alpha chain variable domain of TCR clone 68377 (TRAV12-3, TRAJ21)
CAMEGHQGFNKFYF

SEQ ID NO: 136754 - protein, 16 aa, Homo sapiens
  CDR3 for beta chain variable domain of TCR clone 68377 (TRBV19, TRBJ2-1)
CASSKAGPSFYNEQFF

SEQ ID NO: 136755 - protein, 18 aa, Homo sapiens
  CDR3 for alpha chain variable domain of TCR clone 68378 (TRAV21, TRAJ52)
CDVRPSPAGGTSYGKLTF

SEQ ID NO: 136756 - protein, 13 aa, Homo sapiens
  CDR3 for beta chain variable domain of TCR clone 68378 (TRBV7-3, TRBJ1-1)
CASSQDWGAEAFF

SEQ ID NO: 136757 - protein, 14 aa, Homo sapiens
  CDR3 for alpha chain variable domain of TCR clone 68379 (TRAV23/DV6, TRAJ38)
CAASFVGNNRKLIW

SEQ ID NO: 136758 - protein, 14 aa, Homo sapiens
  CDR3 for beta chain variable domain of TCR clone 68379 (TRBV4-1, TRBJ2-1)
CASRTSGVFHEQFF

SEQ ID NO: 136759 - protein, 15 aa, Homo sapiens
  CDR3 for alpha chain variable domain of TCR clone 68380 (TRAV3, TRAJ5)
CAVRDLDTGRRALTF

SEQ ID NO: 136760 - protein, 16 aa, Homo sapiens
  CDR3 for beta chain variable domain of TCR clone 68380 (TRBV5-5, TRBJ2-2)
CASSGRREGATGELFF

SEQ ID NO: 136761 - protein, 12 aa, Homo sapiens
  CDR3 for alpha chain variable domain of TCR clone 68381 (TRAV8-6, TRAJ57)
CAVQGGSEKLVF

SEQ ID NO: 136762 - protein, 11 aa, Homo sapiens
  CDR3 for beta chain variable domain of TCR clone 68381 (TRBV19, TRBJ1-1)
RASSIGSEAFF

SEQ ID NO: 136763 - protein, 14 aa, Homo sapiens
  CDR3 for alpha chain variable domain of TCR clone 68382 (TRAV1-2, TRAJ8)
CAVREDTGFQKLVF

SEQ ID NO: 136764 - protein, 12 aa, Homo sapiens
  CDR3 for beta chain variable domain of TCR clone 68382 (TRBV7-2, TRBJ1-1)
AAEPGRTFEAFF

SEQ ID NO: 136765 - protein, 17 aa, Homo sapiens
  CDR3 for alpha chain variable domain of TCR clone 68383 (TRAV3, TRAJ42)
CAVRDRDYGGSQGNLIF

SEQ ID NO: 136766 - protein, 14 aa, Homo sapiens
  CDR3 for beta chain variable domain of TCR clone 68383 (TRBV7-2, TRBJ2-7)
CASRPQGAAYEQYF

SEQ ID NO: 136767 - protein, 16 aa, Homo sapiens
  CDR3 for alpha chain variable domain of TCR clone 68384 (TRAV12-2, TRAJ32)
CAGNLGQGGATNKLIF

SEQ ID NO: 136768 - protein, 15 aa, Homo sapiens
  CDR3 for beta chain variable domain of TCR clone 68384 (TRBV20-1, TRBJ2-7)
CSARGPLAGGREQYF

SEQ ID NO: 136769 - protein, 14 aa, Homo sapiens
  CDR3 for alpha chain variable domain of TCR clone 68385 (TRAV8-4, TRAJ43)
CAVSDPRNNNDMRF

SEQ ID NO: 136770 - protein, 15 aa, Homo sapiens
  CDR3 for beta chain variable domain of TCR clone 68385 (TRBV4-2, TRBJ1-2)
CASSQGTGGRDGYTF

SEQ ID NO: 136771 - protein, 13 aa, Homo sapiens
  CDR3 for alpha chain variable domain of TCR clone 68386 (TRAV2, TRAJ15)
CAVASQAGTALIF

SEQ ID NO: 136772 - protein, 16 aa, Homo sapiens
  CDR3 for beta chain variable domain of TCR clone 68386 (TRBV5-1, TRBJ1-1)
CTSSSGGNSLNTEAFF

SEQ ID NO: 136773 - protein, 14 aa, Homo sapiens
  CDR3 for alpha chain variable domain of TCR clone 68387 (TRAV12-2, TRAJ45)
CAVYSGGGADGLTF

SEQ ID NO: 136774 - protein, 14 aa, Homo sapiens
  CDR3 for beta chain variable domain of TCR clone 68387 (TRBV6-5, TRBJ1-2)
CASTSGGGSDGYTF

SEQ ID NO: 136775 - protein, 11 aa, Homo sapiens
  CDR3 for alpha chain variable domain of TCR clone 68388 (TRAV12-1, TRAJ8)
CVVTGFQKLVF

SEQ ID NO: 136776 - protein, 14 aa, Homo sapiens
  CDR3 for beta chain variable domain of TCR clone 68388 (TRBV19, TRBJ2-1)
CASGKSTQYNELFF

SEQ ID NO: 136777 - protein, 14 aa, Homo sapiens
  CDR3 for alpha chain variable domain of TCR clone 68389 (TRAV1-2, TRAJ8)
CAVREDTGFQKLVF

SEQ ID NO: 136778 - protein, 15 aa, Homo sapiens
  CDR3 for beta chain variable domain of TCR clone 68389 (TRBV28, TRBJ2-1)
CASSIIAGGRGEQFF

SEQ ID NO: 136779 - protein, 13 aa, Homo sapiens
  CDR3 for alpha chain variable domain of TCR clone 68390 (TRAV12-3, TRAJ9)
CAMRNTGGFKTIF

SEQ ID NO: 136780 - protein, 13 aa, Homo sapiens
  CDR3 for beta chain variable domain of TCR clone 68390 (TRBV12-5, TRBJ2-3)
CASGDRQSDTQYF

SEQ ID NO: 136781 - protein, 13 aa, Homo sapiens
  CDR3 for alpha chain variable domain of TCR clone 68391 (TRAV26-2, TRAJ43)
CILRAVNNNDMRF

SEQ ID NO: 136782 - protein, 15 aa, Homo sapiens
  CDR3 for beta chain variable domain of TCR clone 68391 (TRBV9, TRBJ1-6)
CASSVAGTGDSPLHF

SEQ ID NO: 136783 - protein, 14 aa, Homo sapiens
  CDR3 for alpha chain variable domain of TCR clone 68392 (TRAV17, TRAJ12)
CAILPMDSSYKLIF

SEQ ID NO: 136784 - protein, 17 aa, Homo sapiens
  CDR3 for beta chain variable domain of TCR clone 68392 (TRBV20-1, TRBJ2-2)
CSASGSGQGGLTGELFF

SEQ ID NO: 136785 - protein, 13 aa, Homo sapiens
  CDR3 for alpha chain variable domain of TCR clone 68393 (TRAV12-1, TRAJ16)
CVANGPDGQKLLF

SEQ ID NO: 136786 - protein, 13 aa, Homo sapiens
  CDR3 for beta chain variable domain of TCR clone 68393 (TRBV2, TRBJ1-1)
CARNPTGGFHAFF

SEQ ID NO: 136787 - protein, 14 aa, Homo sapiens
  CDR3 for alpha chain variable domain of TCR clone 68394 (TRAV26-1, TRAJ44)
CIVSNTGTASKLTF

SEQ ID NO: 136788 - protein, 15 aa, Homo sapiens
  CDR3 for beta chain variable domain of TCR clone 68394 (TRBV19, TRBJ1-1)
CASTSGQIQNTEAFF

SEQ ID NO: 136789 - protein, 15 aa, Homo sapiens
  CDR3 for alpha chain variable domain of TCR clone 68395 (TRAV17, TRAJ4)
CATGTWSGGYNKLIF

SEQ ID NO: 136790 - protein, 14 aa, Homo sapiens
  CDR3 for beta chain variable domain of TCR clone 68395 (TRBV12-4, TRBJ1-1)
CASSLGTGGTEAFF

SEQ ID NO: 136791 - protein, 12 aa, Homo sapiens
  CDR3 for alpha chain variable domain of TCR clone 68396 (TRAV21, TRAJ11)
CAATSGYSTLTF

SEQ ID NO: 136792 - protein, 18 aa, Homo sapiens
  CDR3 for beta chain variable domain of TCR clone 68396 (TRBV11-2, TRBJ2-3)
CASSLGGASRGAPNTQYF

SEQ ID NO: 136793 - protein, 18 aa, Homo sapiens
  CDR3 for alpha chain variable domain of TCR clone 68397 (TRAV21, TRAJ52)
RAVRPSPAGGTSYGKLTF

SEQ ID NO: 136794 - protein, 13 aa, Homo sapiens
  CDR3 for beta chain variable domain of TCR clone 68397 (TRBV10-3, TRBJ2-7)
CASKLAVNYEQYF

SEQ ID NO: 136795 - protein, 13 aa, Homo sapiens
  CDR3 for alpha chain variable domain of TCR clone 68398 (TRAV13-1, TRAJ21)
CAASIYNFNKFYF

SEQ ID NO: 136796 - protein, 15 aa, Homo sapiens
  CDR3 for beta chain variable domain of TCR clone 68398 (TRBV7-2, TRBJ1-2)
CASSPRAGWNYGYTF

SEQ ID NO: 136797 - protein, 15 aa, Homo sapiens
  CDR3 for alpha chain variable domain of TCR clone 68399 (TRAV12-2, TRAJ43)
CAFDMRFGAGTRLTV

SEQ ID NO: 136798 - protein, 18 aa, Homo sapiens
  CDR3 for beta chain variable domain of TCR clone 68399 (TRBV20-1, TRBJ2-3)
CSASGLAGVPGTTDTQYF

SEQ ID NO: 136799 - protein, 15 aa, Homo sapiens
  CDR3 for alpha chain variable domain of TCR clone 68400 (TRAV17, TRAJ37)
CATDHGSSNTGKLIF

SEQ ID NO: 136800 - protein, 14 aa, Homo sapiens
  CDR3 for beta chain variable domain of TCR clone 68400 (TRBV25-1, TRBJ1-1)
CASTHLGGNTEAFF

SEQ ID NO: 136801 - protein, 15 aa, Homo sapiens
  CDR3 for alpha chain variable domain of TCR clone 68401 (TRAV3, TRAJ3)
CAVRDGHSRASKIIF

SEQ ID NO: 136802 - protein, 14 aa, Homo sapiens
  CDR3 for beta chain variable domain of TCR clone 68401 (TRBV28, TRBJ1-4)
CASSFGTFDEKLFF

SEQ ID NO: 136803 - protein, 13 aa, Homo sapiens
  CDR3 for alpha chain variable domain of TCR clone 68402 (TRAV21, TRAJ27)
CAARPGNAGKSTF

SEQ ID NO: 136804 - protein, 15 aa, Homo sapiens
  CDR3 for beta chain variable domain of TCR clone 68402 (TRBV3-1, TRBJ2-1)
CASSQALVAYNEQFF

SEQ ID NO: 136805 - protein, 14 aa, Homo sapiens
  CDR3 for alpha chain variable domain of TCR clone 68403 (TRAV16, TRAJ17)
CALSGRAAGNKLTF

SEQ ID NO: 136806 - protein, 16 aa, Homo sapiens
  CDR3 for beta chain variable domain of TCR clone 68403 (TRBV18, TRBJ2-6)
CQLTTSGAVGANVLTF

SEQ ID NO: 136807 - protein, 13 aa, Homo sapiens
  CDR3 for alpha chain variable domain of TCR clone 68404 (TRAV8-6, TRAJ21)
WAVSPSSLNKFYF

SEQ ID NO: 136808 - protein, 14 aa, Homo sapiens
  CDR3 for beta chain variable domain of TCR clone 68404 (TRBV7-9, TRBJ2-5)
CASSLDTAQETQYF

SEQ ID NO: 136809 - protein, 17 aa, Homo sapiens
  CDR3 for alpha chain variable domain of TCR clone 68405 (TRAV38-2/DV8, TRAJ28)
CAFLTLYSGAGSYQLTF

SEQ ID NO: 136810 - protein, 14 aa, Homo sapiens
  CDR3 for beta chain variable domain of TCR clone 68405 (TRBV7-2, TRBJ2-5)
CASSLSGGGETQYL

SEQ ID NO: 136811 - protein, 14 aa, Homo sapiens
  CDR3 for alpha chain variable domain of TCR clone 68406 (TRAV23/DV6, TRAJ40)
CAASLTSGTYKYIF

SEQ ID NO: 136812 - protein, 14 aa, Homo sapiens
  CDR3 for beta chain variable domain of TCR clone 68406 (TRBV5-1, TRBJ2-3)
CASNRGQGGGTQYF

SEQ ID NO: 136813 - protein, 12 aa, Homo sapiens
  CDR3 for alpha chain variable domain of TCR clone 68407 (TRAV1-1, TRAJ8)
CAGGTGFQKLVF

SEQ ID NO: 136814 - protein, 15 aa, Homo sapiens
  CDR3 for beta chain variable domain of TCR clone 68407 (TRBV6-3, TRBJ2-7)
CASSSPGTVFYEQYF

SEQ ID NO: 136815 - protein, 13 aa, Homo sapiens
  CDR3 for alpha chain variable domain of TCR clone 68408 (TRAV3, TRAJ21)
CAVREPDFTKFYF

SEQ ID NO: 136816 - protein, 12 aa, Homo sapiens
  CDR3 for beta chain variable domain of TCR clone 68408 (TRBV5-1, TRBJ2-4)
LAGEWTKNIQYF

SEQ ID NO: 136817 - protein, 13 aa, Homo sapiens
  CDR3 for alpha chain variable domain of TCR clone 68409 (TRAV8-3, TRAJ44)
CAVVPGTATKLTF

SEQ ID NO: 136818 - protein, 14 aa, Homo sapiens
  CDR3 for beta chain variable domain of TCR clone 68409 (TRBV11-2, TRBJ2-3)
CASSRLARTDTQYF

SEQ ID NO: 136819 - protein, 15 aa, Homo sapiens
  CDR3 for alpha chain variable domain of TCR clone 68410 (TRAV27, TRAJ38)
CAVRRNAGNNRKLIW

SEQ ID NO: 136820 - protein, 13 aa, Homo sapiens
  CDR3 for beta chain variable domain of TCR clone 68410 (TRBV20-1, TRBJ1-1)
CSARAGGNTEAFF

SEQ ID NO: 136821 - protein, 14 aa, Homo sapiens
  CDR3 for alpha chain variable domain of TCR clone 68411 (TRAV12-2, TRAJ24)
CAVTPADSWGKLQF

SEQ ID NO: 136822 - protein, 17 aa, Homo sapiens
  CDR3 for beta chain variable domain of TCR clone 68411 (TRBV20-1, TRBJ2-2)
CSASGSGQGGLTGELFF

SEQ ID NO: 136823 - protein, 14 aa, Homo sapiens
  CDR3 for alpha chain variable domain of TCR clone 68412 (TRAV13-2, TRAJ43)
CAEIPTYNNNDMHF

SEQ ID NO: 136824 - protein, 15 aa, Homo sapiens
  CDR3 for beta chain variable domain of TCR clone 68412 (TRBV7-9, TRBJ2-2)
CASGPLDTFPGELFF

SEQ ID NO: 136825 - protein, 13 aa, Homo sapiens
  CDR3 for alpha chain variable domain of TCR clone 68413 (TRAV27, TRAJ39)
CAGVNNAGKMLTF

SEQ ID NO: 136826 - protein, 19 aa, Homo sapiens
  CDR3 for beta chain variable domain of TCR clone 68413 (TRBV5-1, TRBJ2-3)
CASSLWLAGGITTTDTQYF

SEQ ID NO: 136827 - protein, 21 aa, Homo sapiens
  CDR3 for alpha chain variable domain of TCR clone 68414 (TRAV8-3, TRAJ6)
CAVGGEEATYLHLEEEPAFLF

SEQ ID NO: 136828 - protein, 14 aa, Homo sapiens
  CDR3 for beta chain variable domain of TCR clone 68414 (TRBV5-1, TRBJ2-7)
CASSRGESLYEQYF

SEQ ID NO: 136829 - protein, 14 aa, Homo sapiens
  CDR3 for alpha chain variable domain of TCR clone 68415 (TRAV21, TRAJ21)
CAVKGFGNFNKFYF

SEQ ID NO: 136830 - protein, 13 aa, Homo sapiens
  CDR3 for beta chain variable domain of TCR clone 68415 (TRBV18, TRBJ1-1)
CASPPETKPEAFF

SEQ ID NO: 136831 - protein, 12 aa, Homo sapiens
  CDR3 for alpha chain variable domain of TCR clone 68416 (TRAV8-3, TRAJ20)
CAVGANDYKLSF

SEQ ID NO: 136832 - protein, 17 aa, Homo sapiens
  CDR3 for beta chain variable domain of TCR clone 68416 (TRBV28, TRBJ2-5)
CASSRQGGLAGAETQYF

SEQ ID NO: 136833 - protein, 14 aa, Homo sapiens
  CDR3 for alpha chain variable domain of TCR clone 68417 (TRAV38-1, TRAJ45)
CAYYSGGGADGLTF

SEQ ID NO: 136834 - protein, 15 aa, Homo sapiens
  CDR3 for beta chain variable domain of TCR clone 68417 (TRBV10-2, TRBJ2-6)
CASSEQGTGANVLTF

SEQ ID NO: 136835 - protein, 16 aa, Homo sapiens
  CDR3 for alpha chain variable domain of TCR clone 68418 (TRAV23/DV6, TRAJ9)
CAASIGGNTGGFKTIF

SEQ ID NO: 136836 - protein, 14 aa, Homo sapiens
  CDR3 for beta chain variable domain of TCR clone 68418 (TRBV7-3, TRBJ2-2)
CASSSGGYTGELFF

SEQ ID NO: 136837 - protein, 16 aa, Homo sapiens
  CDR3 for alpha chain variable domain of TCR clone 68419 (TRAV2, TRAJ4)
CAVEDRFSGGYNKLIF

SEQ ID NO: 136838 - protein, 13 aa, Homo sapiens
  CDR3 for beta chain variable domain of TCR clone 68419 (TRBV7-7, TRBJ2-5)
CAISRSGQETQYF

SEQ ID NO: 136839 - protein, 14 aa, Homo sapiens
  CDR3 for alpha chain variable domain of TCR clone 68420 (TRAV20, TRAJ42)
CAVQAGGSQGNLIF

SEQ ID NO: 136840 - protein, 16 aa, Homo sapiens
  CDR3 for beta chain variable domain of TCR clone 68420 (TRBV7-2, TRBJ1-6)
CASSSFESSYNSPLHF

SEQ ID NO: 136841 - protein, 14 aa, Homo sapiens
  CDR3 for alpha chain variable domain of TCR clone 68421 (TRAV1-2, TRAJ16)
CAVNRFSDGLKLLF

SEQ ID NO: 136842 - protein, 13 aa, Homo sapiens
  CDR3 for beta chain variable domain of TCR clone 68421 (TRBV7-9, TRBJ1-2)
CASSLKQNYGYTF

SEQ ID NO: 136843 - protein, 13 aa, Homo sapiens
  CDR3 for alpha chain variable domain of TCR clone 68422 (TRAV13-1, TRAJ12)
CSASPDSSYKLIF

SEQ ID NO: 136844 - protein, 16 aa, Homo sapiens
  CDR3 for beta chain variable domain of TCR clone 68422 (TRBV15, TRBJ2-1)
CATSRERLAGAYEQFF

SEQ ID NO: 136845 - protein, 14 aa, Homo sapiens
  CDR3 for alpha chain variable domain of TCR clone 68423 (TRAV8-2, TRAJ4)
CVVSPSGGYNKLIF

SEQ ID NO: 136846 - protein, 17 aa, Homo sapiens
  CDR3 for beta chain variable domain of TCR clone 68423 (TRBV20-1, TRBJ2-1)
CSASSSGLAGSYNEQFF

SEQ ID NO: 136847 - protein, 12 aa, Homo sapiens
  CDR3 for alpha chain variable domain of TCR clone 68424 (TRAV1-2, TRAJ33)
CAALDSNYQLIW

SEQ ID NO: 136848 - protein, 13 aa, Homo sapiens
  CDR3 for beta chain variable domain of TCR clone 68424 (TRBV7-2, TRBJ2-7)
CARSFGQEKEQYF

SEQ ID NO: 136849 - protein, 18 aa, Homo sapiens
  CDR3 for alpha chain variable domain of TCR clone 68425 (TRAV21, TRAJ53)
CAVKGGENSGGSNYKLTF

SEQ ID NO: 136850 - protein, 16 aa, Homo sapiens
  CDR3 for beta chain variable domain of TCR clone 68425 (TRBV12-5, TRBJ2-5)
CASGPRTSGNQETQYF

SEQ ID NO: 136851 - protein, 19 aa, Homo sapiens
  CDR3 for alpha chain variable domain of TCR clone 68426 (TRAV1-2, TRAJ18)
CLLPLCCERRGSTLGRLYF

SEQ ID NO: 136852 - protein, 13 aa, Homo sapiens
  CDR3 for beta chain variable domain of TCR clone 68426 (TRBV20-1, TRBJ1-1)
CSARVGGNTEAFF

SEQ ID NO: 136853 - protein, 15 aa, Homo sapiens
  CDR3 for alpha chain variable domain of TCR clone 68427 (TRAV12-2, TRAJ53)
CAVNGGGGSNYKLTF

SEQ ID NO: 136854 - protein, 17 aa, Homo sapiens
  CDR3 for beta chain variable domain of TCR clone 68427 (TRBV19, TRBJ2-6)
CASSSGTVFSGANVLTF

SEQ ID NO: 136855 - protein, 14 aa, Homo sapiens
  CDR3 for alpha chain variable domain of TCR clone 68428 (TRAV12-2, TRAJ24)
CAVTPADSWGKLQF

SEQ ID NO: 136856 - protein, 13 aa, Homo sapiens
  CDR3 for beta chain variable domain of TCR clone 68428 (TRBV7-3, TRBJ1-1)
CASSQDWGAEAFF

SEQ ID NO: 136857 - protein, 15 aa, Homo sapiens
  CDR3 for alpha chain variable domain of TCR clone 68429 (TRAV2, TRAJ9)
CAVAALNTGGFKTIF

SEQ ID NO: 136858 - protein, 12 aa, Homo sapiens
  CDR3 for beta chain variable domain of TCR clone 68429 (TRBV11-2, TRBJ2-2)
CASSLGGGELFF

SEQ ID NO: 136859 - protein, 12 aa, Homo sapiens
  CDR3 for alpha chain variable domain of TCR clone 68430 (TRAV12-3, TRAJ17)
CAITLTGNKLTF

SEQ ID NO: 136860 - protein, 14 aa, Homo sapiens
  CDR3 for beta chain variable domain of TCR clone 68430 (TRBV4-1, TRBJ2-7)
CASSQDREHVEQYF

SEQ ID NO: 136861 - protein, 14 aa, Homo sapiens
  CDR3 for alpha chain variable domain of TCR clone 68431 (TRAV12-2, TRAJ13)
CAVKKTGGYQKVTF

SEQ ID NO: 136862 - protein, 18 aa, Homo sapiens
  CDR3 for beta chain variable domain of TCR clone 68431 (TRBV12-4, TRBJ2-2)
CASSLVAGTRGRTGELFF

SEQ ID NO: 136863 - protein, 14 aa, Homo sapiens
  CDR3 for alpha chain variable domain of TCR clone 68432 (TRAV14/DV4, TRAJ54)
CAMREAPGAQKLVF

SEQ ID NO: 136864 - protein, 14 aa, Homo sapiens
  CDR3 for beta chain variable domain of TCR clone 68432 (TRBV19, TRBJ2-1)
CASGKSTQYNEQFF

SEQ ID NO: 136865 - protein, 13 aa, Homo sapiens
  CDR3 for alpha chain variable domain of TCR clone 68433 (TRAV29/DV5, TRAJ26)
CAATDNYGQNFVF

SEQ ID NO: 136866 - protein, 13 aa, Homo sapiens
  CDR3 for beta chain variable domain of TCR clone 68433 (TRBV7-9, TRBJ2-7)
CASSAGLQYEQYF

SEQ ID NO: 136867 - protein, 16 aa, Homo sapiens
  CDR3 for alpha chain variable domain of TCR clone 68434 (TRAV26-1, TRAJ52)
CIVSNAGGTSYGKLTS

SEQ ID NO: 136868 - protein, 15 aa, Homo sapiens
  CDR3 for beta chain variable domain of TCR clone 68434 (TRBV7-3, TRBJ2-1)
CASSPTGGGEVEQFF

SEQ ID NO: 136869 - protein, 10 aa, Homo sapiens
  CDR3 for alpha chain variable domain of TCR clone 68435 (TRAV12-3, TRAJ18)
CAMSAEAQPW

SEQ ID NO: 136870 - protein, 14 aa, Homo sapiens
  CDR3 for beta chain variable domain of TCR clone 68435 (TRBV19, TRBJ2-1)
CASPTFVLSGEQFF

SEQ ID NO: 136871 - protein, 11 aa, Homo sapiens
  CDR3 for alpha chain variable domain of TCR clone 68436 (TRAV35, TRAJ22)
CAGPGVGQLTF

SEQ ID NO: 136872 - protein, 14 aa, Homo sapiens
  CDR3 for beta chain variable domain of TCR clone 68436 (TRBV7-2, TRBJ2-7)
CASRSQGAAYEQYF

SEQ ID NO: 136873 - protein, 12 aa, Homo sapiens
  CDR3 for alpha chain variable domain of TCR clone 68437 (TRAV36/DV7, TRAJ54)
CAVVRGAQKLVF

SEQ ID NO: 136874 - protein, 14 aa, Homo sapiens
  CDR3 for beta chain variable domain of TCR clone 68437 (TRBV7-3, TRBJ1-1)
CASSLKGRNTEAFF

SEQ ID NO: 136875 - protein, 13 aa, Homo sapiens
  CDR3 for alpha chain variable domain of TCR clone 68438 (TRAV36/DV7, TRAJ37)
YAVFSSNTGKLIF

SEQ ID NO: 136876 - protein, 16 aa, Homo sapiens
  CDR3 for beta chain variable domain of TCR clone 68438 (TRBV3-1, TRBJ2-5)
CASSPGQFNGFGTQYF

SEQ ID NO: 136877 - protein, 14 aa, Homo sapiens
  CDR3 for alpha chain variable domain of TCR clone 68439 (TRAV8-1, TRAJ15)
CAVNGQQAGTALIF

SEQ ID NO: 136878 - protein, 15 aa, Homo sapiens
  CDR3 for beta chain variable domain of TCR clone 68439 (TRBV19, TRBJ1-1)
CASTSGQIQNTEAFF

SEQ ID NO: 136879 - protein, 14 aa, Homo sapiens
  CDR3 for alpha chain variable domain of TCR clone 68440 (TRAV38-1, TRAJ45)
CASHSGGGADGLTF

SEQ ID NO: 136880 - protein, 13 aa, Homo sapiens
  CDR3 for beta chain variable domain of TCR clone 68440 (TRBV10-3, TRBJ1-2)
CAIRERDSYGYTF

SEQ ID NO: 136881 - protein, 16 aa, Homo sapiens
  CDR3 for alpha chain variable domain of TCR clone 68441 (TRAV3, TRAJ18)
CAVRDGRGSTLGRLYF

SEQ ID NO: 136882 - protein, 15 aa, Homo sapiens
  CDR3 for beta chain variable domain of TCR clone 68441 (TRBV7-9, TRBJ1-6)
CASSSPGRGNSALHF

SEQ ID NO: 136883 - protein, 13 aa, Homo sapiens
  CDR3 for alpha chain variable domain of TCR clone 68442 (TRAV13-2, TRAJ13)
CADLSGGYQKVTF

SEQ ID NO: 136884 - protein, 15 aa, Homo sapiens
  CDR3 for beta chain variable domain of TCR clone 68442 (TRBV19, TRBJ1-1)
CVSSIGGGRNTEAFF

SEQ ID NO: 136885 - protein, 15 aa, Homo sapiens
  CDR3 for alpha chain variable domain of TCR clone 68443 (TRAV27, TRAJ38)
CAARRNAGNNRKLIW

SEQ ID NO: 136886 - protein, 13 aa, Homo sapiens
  CDR3 for beta chain variable domain of TCR clone 68443 (TRBV7-7, TRBJ2-3)
CASSLSRADTQYF

SEQ ID NO: 136887 - protein, 11 aa, Homo sapiens
  CDR3 for alpha chain variable domain of TCR clone 68444 (TRAV3, TRAJ21)
CAVGNFNKFYF

SEQ ID NO: 136888 - protein, 16 aa, Homo sapiens
  CDR3 for beta chain variable domain of TCR clone 68444 (TRBV7-9, TRBJ2-1)
CASSDVAGGSYNEQFF

SEQ ID NO: 136889 - protein, 18 aa, Homo sapiens
  CDR3 for alpha chain variable domain of TCR clone 68445 (TRAV12-3, TRAJ52)
CAMSVGGAGGTSYGKLTF

SEQ ID NO: 136890 - protein, 11 aa, Homo sapiens
  CDR3 for beta chain variable domain of TCR clone 68445 (TRBV7-9, TRBJ2-6)
CASPRANVLTF

SEQ ID NO: 136891 - protein, 11 aa, Homo sapiens
  CDR3 for alpha chain variable domain of TCR clone 68446 (TRAV2, TRAJ13)
CASGGYQKVTF

SEQ ID NO: 136892 - protein, 12 aa, Homo sapiens
  CDR3 for beta chain variable domain of TCR clone 68446 (TRBV14, TRBJ1-1)
CASSQLKGLAFF

SEQ ID NO: 136893 - protein, 13 aa, Homo sapiens
  CDR3 for alpha chain variable domain of TCR clone 68447 (TRAV20, TRAJ42)
CCAGGGSQGNLIF

SEQ ID NO: 136894 - protein, 14 aa, Homo sapiens
  CDR3 for beta chain variable domain of TCR clone 68447 (TRBV28, TRBJ1-2)
CASRIQGANYGYTF

SEQ ID NO: 136895 - protein, 16 aa, Homo sapiens
  CDR3 for alpha chain variable domain of TCR clone 68448 (TRAV30, TRAJ24)
CGTEIVDADSCGKFQF

SEQ ID NO: 136896 - protein, 15 aa, Homo sapiens
  CDR3 for beta chain variable domain of TCR clone 68448 (TRBV20-1, TRBJ2-7)
CSARDRVSGMDEQYF

SEQ ID NO: 136897 - protein, 14 aa, Homo sapiens
  CDR3 for alpha chain variable domain of TCR clone 68449 (TRAV8-2, TRAJ11)
CVVSEKAGYSTLTF

SEQ ID NO: 136898 - protein, 16 aa, Homo sapiens
  CDR3 for beta chain variable domain of TCR clone 68449 (TRBV28, TRBJ2-1)
CASSSPEYPRDNEQFF

SEQ ID NO: 136899 - protein, 12 aa, Homo sapiens
  CDR3 for alpha chain variable domain of TCR clone 68450 (TRAV21, TRAJ31)
CVLAGNNSRLMF

SEQ ID NO: 136900 - protein, 16 aa, Homo sapiens
  CDR3 for beta chain variable domain of TCR clone 68450 (TRBV27, TRBJ2-5)
CASSFGPGGTKETQYF

SEQ ID NO: 136901 - protein, 11 aa, Homo sapiens
  CDR3 for alpha chain variable domain of TCR clone 68451 (TRAV2, TRAJ33)
CAVESNYQLIW

SEQ ID NO: 136902 - protein, 15 aa, Homo sapiens
  CDR3 for beta chain variable domain of TCR clone 68451 (TRBV2, TRBJ2-3)
CASSDFEKATDTQYF

SEQ ID NO: 136903 - protein, 12 aa, Homo sapiens
  CDR3 for alpha chain variable domain of TCR clone 68452 (TRAV12-3, TRAJ17)
CAMTLTGNKLTF

SEQ ID NO: 136904 - protein, 16 aa, Homo sapiens
  CDR3 for beta chain variable domain of TCR clone 68452 (TRBV4-1, TRBJ1-4)
CASSQDLRRGGEKLFF

SEQ ID NO: 136905 - protein, 10 aa, Homo sapiens
  CDR3 for alpha chain variable domain of TCR clone 68453 (TRAV1-2, TRAJ23)
CAGQGGKLIF

SEQ ID NO: 136906 - protein, 16 aa, Homo sapiens
  CDR3 for beta chain variable domain of TCR clone 68453 (TRBV11-2, TRBJ1-1)
CASSLRQGGEHSKAFS

SEQ ID NO: 136907 - protein, 14 aa, Homo sapiens
  CDR3 for alpha chain variable domain of TCR clone 68454 (TRAV16, TRAJ33)
CALSAVDSNYQLIW

SEQ ID NO: 136908 - protein, 16 aa, Homo sapiens
  CDR3 for beta chain variable domain of TCR clone 68454 (TRBV12-4, TRBJ2-3)
CASSFPSNTNTDTQCF

SEQ ID NO: 136909 - protein, 13 aa, Homo sapiens
  CDR3 for alpha chain variable domain of TCR clone 68455 (TRAV21, TRAJ20)
CAVSRLGDYELSF

SEQ ID NO: 136910 - protein, 13 aa, Homo sapiens
  CDR3 for beta chain variable domain of TCR clone 68455 (TRBV7-3, TRBJ1-1)
CASSPAGGLEAFF

SEQ ID NO: 136911 - protein, 10 aa, Homo sapiens
  CDR3 for alpha chain variable domain of TCR clone 68456 (TRAV1-2, TRAJ31)
CAFFDARLMF

SEQ ID NO: 136912 - protein, 15 aa, Homo sapiens
  CDR3 for beta chain variable domain of TCR clone 68456 (TRBV9, TRBJ1-6)
CASSVAGTGDSPLHF

SEQ ID NO: 136913 - protein, 14 aa, Homo sapiens
  CDR3 for alpha chain variable domain of TCR clone 68457 (TRAV12-2, TRAJ13)
CAVKKTGGYQKVTF

SEQ ID NO: 136914 - protein, 13 aa, Homo sapiens
  CDR3 for beta chain variable domain of TCR clone 68457 (TRBV20-1, TRBJ2-1)
CSRGMTSYNEQFF

SEQ ID NO: 136915 - protein, 10 aa, Homo sapiens
  CDR3 for alpha chain variable domain of TCR clone 68458 (TRAV23/DV6, TRAJ43)
CAAAVAALEQ

SEQ ID NO: 136916 - protein, 13 aa, Homo sapiens
  CDR3 for beta chain variable domain of TCR clone 68458 (TRBV6-5, TRBJ2-5)
CATAPSPQETQYF

SEQ ID NO: 136917 - protein, 16 aa, Homo sapiens
  CDR3 for alpha chain variable domain of TCR clone 68459 (TRAV3, TRAJ42)
CCERQGYGGSQGNLIF

SEQ ID NO: 136918 - protein, 20 aa, Homo sapiens
  CDR3 for beta chain variable domain of TCR clone 68459 (TRBV28, TRBJ2-1)
CASTPIGRPPGLAGGDEQFF

SEQ ID NO: 136919 - protein, 14 aa, Homo sapiens
  CDR3 for alpha chain variable domain of TCR clone 68460 (TRAV1-2, TRAJ16)
CAVNRFSDGQKLLF

SEQ ID NO: 136920 - protein, 12 aa, Homo sapiens
  CDR3 for beta chain variable domain of TCR clone 68460 (TRBV11-2, TRBJ2-2)
CASSLGGGGLFF

SEQ ID NO: 136921 - protein, 18 aa, Homo sapiens
  CDR3 for alpha chain variable domain of TCR clone 68461 (TRAV26-1, TRAJ23)
CIVRVGLEVWNQGGKLIF

SEQ ID NO: 136922 - protein, 14 aa, Homo sapiens
  CDR3 for beta chain variable domain of TCR clone 68461 (TRBV7-2, TRBJ2-7)
CASSPKTSFYEQYF

SEQ ID NO: 136923 - protein, 16 aa, Homo sapiens
  CDR3 for alpha chain variable domain of TCR clone 68462 (TRAV30, TRAJ24)
CGTEIVDADSWGKFQF

SEQ ID NO: 136924 - protein, 16 aa, Homo sapiens
  CDR3 for beta chain variable domain of TCR clone 68462 (TRBV20-1, TRBJ1-1)
CSARALTQGMNTEAFL

SEQ ID NO: 136925 - protein, 15 aa, Homo sapiens
  CDR3 for alpha chain variable domain of TCR clone 68463 (TRAV26-1, TRAJ29)
CIVRVEGSGNTPLVF

SEQ ID NO: 136926 - protein, 16 aa, Homo sapiens
  CDR3 for beta chain variable domain of TCR clone 68463 (TRBV11-2, TRBJ2-3)
CASSSRTSGGAGTQYF

SEQ ID NO: 136927 - protein, 18 aa, Homo sapiens
  CDR3 for alpha chain variable domain of TCR clone 68464 (TRAV12-3, TRAJ52)
CAMSVGGAGGTSYGKLTF

SEQ ID NO: 136928 - protein, 15 aa, Homo sapiens
  CDR3 for beta chain variable domain of TCR clone 68464 (TRBV27, TRBJ1-6)
CASSFARGLGSPLHF

SEQ ID NO: 136929 - protein, 14 aa, Homo sapiens
  CDR3 for alpha chain variable domain of TCR clone 68465 (TRAV17, TRAJ16)
CTTADFSDGQKLLF

SEQ ID NO: 136930 - protein, 15 aa, Homo sapiens
  CDR3 for beta chain variable domain of TCR clone 68465 (TRBV18, TRBJ2-1)
CASSPPSASYNEQFF

SEQ ID NO: 136931 - protein, 13 aa, Homo sapiens
  CDR3 for alpha chain variable domain of TCR clone 68466 (TRAV2, TRAJ15)
CAVASQAGTALIF

SEQ ID NO: 136932 - protein, 12 aa, Homo sapiens
  CDR3 for beta chain variable domain of TCR clone 68466 (TRBV11-2, TRBJ2-1)
CASSPGNNEQFF

SEQ ID NO: 136933 - protein, 13 aa, Homo sapiens
  CDR3 for alpha chain variable domain of TCR clone 68467 (TRAV2, TRAJ40)
CAVVTSGTYKYIF

SEQ ID NO: 136934 - protein, 14 aa, Homo sapiens
  CDR3 for beta chain variable domain of TCR clone 68467 (TRBV11-3, TRBJ2-3)
CQPEGRGEGDTQYF

SEQ ID NO: 136935 - protein, 15 aa, Homo sapiens
  CDR3 for alpha chain variable domain of TCR clone 68468 (TRAV27, TRAJ38)
CAARRNAGNNRKLIW

SEQ ID NO: 136936 - protein, 11 aa, Homo sapiens
  CDR3 for beta chain variable domain of TCR clone 68468 (TRBV10-3, TRBJ2-1)
CAISDRGLQFF

SEQ ID NO: 136937 - protein, 15 aa, Homo sapiens
  CDR3 for alpha chain variable domain of TCR clone 68469 (TRAV26-1, TRAJ40)
CIVRVTTSGTYKYIF

SEQ ID NO: 136938 - protein, 12 aa, Homo sapiens
  CDR3 for beta chain variable domain of TCR clone 68469 (TRBV7-9, TRBJ1-4)
CARSTDREKLFF

SEQ ID NO: 136939 - protein, 14 aa, Homo sapiens
  CDR3 for alpha chain variable domain of TCR clone 68470 (TRAV12-2, TRAJ40)
CAVKIPSGTYKYIF

SEQ ID NO: 136940 - protein, 12 aa, Homo sapiens
  CDR3 for beta chain variable domain of TCR clone 68470 (TRBV11-2, TRBJ2-2)
CASGLGGGELFF

SEQ ID NO: 136941 - protein, 15 aa, Homo sapiens
  CDR3 for alpha chain variable domain of TCR clone 68471 (TRAV3, TRAJ17)
CAVRDTGAAGNRLTF

SEQ ID NO: 136942 - protein, 14 aa, Homo sapiens
  CDR3 for beta chain variable domain of TCR clone 68471 (TRBV6-3, TRBJ1-1)
CASSNLLPGAEAFF

SEQ ID NO: 136943 - protein, 16 aa, Homo sapiens
  CDR3 for alpha chain variable domain of TCR clone 68472 (TRAV30, TRAJ24)
CGTEIVDADSWGKFQF

SEQ ID NO: 136944 - protein, 14 aa, Homo sapiens
  CDR3 for beta chain variable domain of TCR clone 68472 (TRBV7-6, TRBJ2-3)
CASSVAGGTDTQYF

SEQ ID NO: 136945 - protein, 10 aa, Homo sapiens
  CDR3 for alpha chain variable domain of TCR clone 68473 (TRAV9-2, TRAJ34)
CALSDYKLIF

SEQ ID NO: 136946 - protein, 14 aa, Homo sapiens
  CDR3 for beta chain variable domain of TCR clone 68473 (TRBV7-8, TRBJ2-7)
CASSVGQGAYEQYF

SEQ ID NO: 136947 - protein, 14 aa, Homo sapiens
  CDR3 for alpha chain variable domain of TCR clone 68474 (TRAV12-2, TRAJ40)
GAVKIPSGTYKYIF

SEQ ID NO: 136948 - protein, 14 aa, Homo sapiens
  CDR3 for beta chain variable domain of TCR clone 68474 (TRBV20-1, TRBJ1-1)
CSAQTRIGGTEAFF

SEQ ID NO: 136949 - protein, 15 aa, Homo sapiens
  CDR3 for alpha chain variable domain of TCR clone 68475 (TRAV12-1, TRAJ44)
CVADLPTGTASKLTF

SEQ ID NO: 136950 - protein, 13 aa, Homo sapiens
  CDR3 for beta chain variable domain of TCR clone 68475 (TRBV6-5, TRBJ2-5)
CVSSPQGGETQYF

SEQ ID NO: 136951 - protein, 15 aa, Homo sapiens
  CDR3 for alpha chain variable domain of TCR clone 68476 (TRAV3, TRAJ5)
CAVRDRKTGRRDLTF

SEQ ID NO: 136952 - protein, 15 aa, Homo sapiens
  CDR3 for beta chain variable domain of TCR clone 68476 (TRBV7-8, TRBJ2-1)
CASSLADSLYNEQFF

SEQ ID NO: 136953 - protein, 13 aa, Homo sapiens
  CDR3 for alpha chain variable domain of TCR clone 68477 (TRAV1-1, TRAJ29)
CAVRDRGNTPLVF

SEQ ID NO: 136954 - protein, 12 aa, Homo sapiens
  CDR3 for beta chain variable domain of TCR clone 68477 (TRBV12-4, TRBJ2-3)
CASSTLPDTQYF

SEQ ID NO: 136955 - protein, 14 aa, Homo sapiens
  CDR3 for alpha chain variable domain of TCR clone 68478 (TRAV26-1, TRAJ34)
CIVRVAYNTYKLIF

SEQ ID NO: 136956 - protein, 15 aa, Homo sapiens
  CDR3 for beta chain variable domain of TCR clone 68478 (TRBV20-1, TRBJ2-7)
CSARVPAAYFYEQYF

SEQ ID NO: 136957 - protein, 12 aa, Homo sapiens
  CDR3 for alpha chain variable domain of TCR clone 68479 (TRAV21, TRAJ12)
CAVMDSSYKLIF

SEQ ID NO: 136958 - protein, 13 aa, Homo sapiens
  CDR3 for beta chain variable domain of TCR clone 68479 (TRBV4-1, TRBJ1-1)
CASSRKMNTEAFF

SEQ ID NO: 136959 - protein, 13 aa, Homo sapiens
  CDR3 for alpha chain variable domain of TCR clone 68480 (TRAV30, TRAJ24)
CGTVTDSWGKLQF

SEQ ID NO: 136960 - protein, 12 aa, Homo sapiens
  CDR3 for beta chain variable domain of TCR clone 68480 (TRBV11-2, TRBJ2-2)
CASSLGGGELFF

SEQ ID NO: 136961 - protein, 13 aa, Homo sapiens
  CDR3 for alpha chain variable domain of TCR clone 68481 (TRAV29/DV5, TRAJ31)
CAASRSNNARLMF

SEQ ID NO: 136962 - protein, 12 aa, Homo sapiens
  CDR3 for beta chain variable domain of TCR clone 68481 (TRBV14, TRBJ2-5)
CASSHLKETQYF

SEQ ID NO: 136963 - protein, 12 aa, Homo sapiens
  CDR3 for alpha chain variable domain of TCR clone 68482 (TRAV27, TRAJ35)
CAGADFGNVLLC

SEQ ID NO: 136964 - protein, 16 aa, Homo sapiens
  CDR3 for beta chain variable domain of TCR clone 68482 (TRBV6-1, TRBJ2-1)
CASILRQGSSYNEQFF

SEQ ID NO: 136965 - protein, 13 aa, Homo sapiens
  CDR3 for alpha chain variable domain of TCR clone 68483 (TRAV3, TRAJ20)
CAVRSLNDYKLSF

SEQ ID NO: 136966 - protein, 13 aa, Homo sapiens
  CDR3 for beta chain variable domain of TCR clone 68483 (TRBV6-1, TRBJ2-1)
CAWMDPTNNEQFF

SEQ ID NO: 136967 - protein, 16 aa, Homo sapiens
  CDR3 for alpha chain variable domain of TCR clone 68484 (TRAV4, TRAJ22)
CLVGALYSGSARQLTF

SEQ ID NO: 136968 - protein, 16 aa, Homo sapiens
  CDR3 for beta chain variable domain of TCR clone 68484 (TRBV7-9, TRBJ2-3)
CASSPWREVGTDTQYF

SEQ ID NO: 136969 - protein, 15 aa, Homo sapiens
  CDR3 for alpha chain variable domain of TCR clone 68485 (TRAV40, TRAJ45)
CLLGDLGGGADGLPF

SEQ ID NO: 136970 - protein, 13 aa, Homo sapiens
  CDR3 for beta chain variable domain of TCR clone 68485 (TRBV7-9, TRBJ1-2)
CASSLKQNYGYTF

SEQ ID NO: 136971 - protein, 12 aa, Homo sapiens
  CDR3 for alpha chain variable domain of TCR clone 68486 (TRAV25, TRAJ11)
CAGASGYSTLTF

SEQ ID NO: 136972 - protein, 13 aa, Homo sapiens
  CDR3 for beta chain variable domain of TCR clone 68486 (TRBV7-2, TRBJ2-2)
CASSLAVTGEPFF

SEQ ID NO: 136973 - protein, 14 aa, Homo sapiens
  CDR3 for alpha chain variable domain of TCR clone 68487 (TRAV12-2, TRAJ13)
CAVKKTGGYQKVTF

SEQ ID NO: 136974 - protein, 15 aa, Homo sapiens
  CDR3 for beta chain variable domain of TCR clone 68487 (TRBV12-4, TRBJ2-5)
CASSPPTGRQETQYF

SEQ ID NO: 136975 - protein, 16 aa, Homo sapiens
  CDR3 for alpha chain variable domain of TCR clone 68488 (TRAV8-1, TRAJ42)
CAVTSRYGGSHGNLIF

SEQ ID NO: 136976 - protein, 12 aa, Homo sapiens
  CDR3 for beta chain variable domain of TCR clone 68488 (TRBV6-3, TRBJ2-7)
CASSLGRRGLYF

SEQ ID NO: 136977 - protein, 13 aa, Homo sapiens
  CDR3 for alpha chain variable domain of TCR clone 68489 (TRAV26-2, TRAJ57)
CILSRGGSEKLVF

SEQ ID NO: 136978 - protein, 12 aa, Homo sapiens
  CDR3 for beta chain variable domain of TCR clone 68489 (TRBV28, TRBJ2-6)
CAIQAGANVLTF

SEQ ID NO: 136979 - protein, 13 aa, Homo sapiens
  CDR3 for alpha chain variable domain of TCR clone 68490 (TRAV17, TRAJ5)
CAPMDTGRRALTF

SEQ ID NO: 136980 - protein, 13 aa, Homo sapiens
  CDR3 for beta chain variable domain of TCR clone 68490 (TRBV7-9, TRBJ1-2)
CASSLKQNYGDTF

SEQ ID NO: 136981 - protein, 18 aa, Homo sapiens
  CDR3 for alpha chain variable domain of TCR clone 68491 (TRAV26-1, TRAJ57)
CIVRVALRFQGGSEKLVF

SEQ ID NO: 136982 - protein, 12 aa, Homo sapiens
  CDR3 for beta chain variable domain of TCR clone 68491 (TRBV11-2, TRBJ2-2)
CASSLGGGELFF

SEQ ID NO: 136983 - protein, 18 aa, Homo sapiens
  CDR3 for alpha chain variable domain of TCR clone 68492 (TRAV29/DV5, TRAJ52)
CAAGFRGAGGTSYGKLTF

SEQ ID NO: 136984 - protein, 16 aa, Homo sapiens
  CDR3 for beta chain variable domain of TCR clone 68492 (TRBV7-3, TRBJ2-2)
CASILKRGTLSGELFF

SEQ ID NO: 136985 - protein, 20 aa, Homo sapiens
  CDR3 for alpha chain variable domain of TCR clone 68493 (TRAV26-1, TRAJ42)
CCVLLHRQTYYGGSQGNLIF

SEQ ID NO: 136986 - protein, 16 aa, Homo sapiens
  CDR3 for beta chain variable domain of TCR clone 68493 (TRBV7-3, TRBJ2-2)
CASSLKRGTLSGELFV

SEQ ID NO: 136987 - protein, 13 aa, Homo sapiens
  CDR3 for alpha chain variable domain of TCR clone 68494 (TRAV3, TRAJ29)
FAVRDIIDTPLVF

SEQ ID NO: 136988 - protein, 14 aa, Homo sapiens
  CDR3 for beta chain variable domain of TCR clone 68494 (TRBV27, TRBJ2-1)
CASSATGGYNEQFF

SEQ ID NO: 136989 - protein, 15 aa, Homo sapiens
  CDR3 for alpha chain variable domain of TCR clone 68495 (TRAV17, TRAJ6)
CATDLPSGGSYIPTF

SEQ ID NO: 136990 - protein, 16 aa, Homo sapiens
  CDR3 for beta chain variable domain of TCR clone 68495 (TRBV4-1, TRBJ2-7)
CASSQDPTGYSYEQYL

SEQ ID NO: 136991 - protein, 15 aa, Homo sapiens
  CDR3 for alpha chain variable domain of TCR clone 68496 (TRAV1-2, TRAJ28)
CAVQYSGAGSYQLTF

SEQ ID NO: 136992 - protein, 13 aa, Homo sapiens
  CDR3 for beta chain variable domain of TCR clone 68496 (TRBV20-1, TRBJ2-7)
CSATHTSGYEQDF

SEQ ID NO: 136993 - protein, 13 aa, Homo sapiens
  CDR3 for alpha chain variable domain of TCR clone 68497 (TRAV8-3, TRAJ43)
CAVVPYNNNDMLF

SEQ ID NO: 136994 - protein, 16 aa, Homo sapiens
  CDR3 for beta chain variable domain of TCR clone 68497 (TRBV7-2, TRBJ2-5)
CASSPFPTGGEETQYF

SEQ ID NO: 136995 - protein, 14 aa, Homo sapiens
  CDR3 for alpha chain variable domain of TCR clone 68498 (TRAV2, TRAJ42)
CAVVGGGSQGNLIF

SEQ ID NO: 136996 - protein, 16 aa, Homo sapiens
  CDR3 for beta chain variable domain of TCR clone 68498 (TRBV7-3, TRBJ2-5)
CASSLMGGASQETQYF

SEQ ID NO: 136997 - protein, 15 aa, Homo sapiens
  CDR3 for alpha chain variable domain of TCR clone 68499 (TRAV3, TRAJ22)
CAVRDRGGSARQLTF

SEQ ID NO: 136998 - protein, 16 aa, Homo sapiens
  CDR3 for beta chain variable domain of TCR clone 68499 (TRBV2, TRBJ2-3)
CASSTSVEGVTDTQYF

SEQ ID NO: 136999 - protein, 15 aa, Homo sapiens
  CDR3 for alpha chain variable domain of TCR clone 68500 (TRAV13-1, TRAJ3)
CAASKLASSASKLIF

SEQ ID NO: 137000 - protein, 16 aa, Homo sapiens
  CDR3 for beta chain variable domain of TCR clone 68500 (TRBV25-1, TRBJ1-5)
CASGAPTVNSNQPQHF

SEQ ID NO: 137001 - protein, 12 aa, Homo sapiens
  CDR3 for alpha chain variable domain of TCR clone 68501 (TRAV1-1, TRAJ29)
CAVRNLNTPLVF

SEQ ID NO: 137002 - protein, 15 aa, Homo sapiens
  CDR3 for beta chain variable domain of TCR clone 68501 (TRBV27, TRBJ2-3)
CASSLGLAGPDTQYF

SEQ ID NO: 137003 - protein, 14 aa, Homo sapiens
  CDR3 for alpha chain variable domain of TCR clone 68502 (TRAV2, TRAJ9)
CAVEDRSGGFKTIF

SEQ ID NO: 137004 - protein, 13 aa, Homo sapiens
  CDR3 for beta chain variable domain of TCR clone 68502 (TRBV7-2, TRBJ2-7)
CASSSPSGSEQYF

SEQ ID NO: 137005 - protein, 11 aa, Homo sapiens
  CDR3 for alpha chain variable domain of TCR clone 68503 (TRAV17, TRAJ9)
CGFTGVFKTIF

SEQ ID NO: 137006 - protein, 14 aa, Homo sapiens
  CDR3 for beta chain variable domain of TCR clone 68503 (TRBV7-9, TRBJ2-2)
CASSLVQDTGELFF

SEQ ID NO: 137007 - protein, 11 aa, Homo sapiens
  CDR3 for alpha chain variable domain of TCR clone 68504 (TRAV1-1, TRAJ23)
CAVRQGGKLIF

SEQ ID NO: 137008 - protein, 14 aa, Homo sapiens
  CDR3 for beta chain variable domain of TCR clone 68504 (TRBV11-2, TRBJ2-7)
CASSLGAGAYEQYF

SEQ ID NO: 137009 - protein, 15 aa, Homo sapiens
  CDR3 for alpha chain variable domain of TCR clone 68505 (TRAV26-1, TRAJ56)
CIVRVATGANSKLTF

SEQ ID NO: 137010 - protein, 17 aa, Homo sapiens
  CDR3 for beta chain variable domain of TCR clone 68505 (TRBV20-1, TRBJ2-2)
CSASGSGQGGLTGELFF

SEQ ID NO: 137011 - protein, 14 aa, Homo sapiens
  CDR3 for alpha chain variable domain of TCR clone 68506 (TRAV3, TRAJ22)
CAVRDSGSARQLTF

SEQ ID NO: 137012 - protein, 15 aa, Homo sapiens
  CDR3 for beta chain variable domain of TCR clone 68506 (TRBV11-2, TRBJ2-5)
CASSLASYSGETQYL

SEQ ID NO: 137013 - protein, 15 aa, Homo sapiens
  CDR3 for alpha chain variable domain of TCR clone 68507 (TRAV17, TRAJ23)
CATDAEDNQGGKLIF

SEQ ID NO: 137014 - protein, 12 aa, Homo sapiens
  CDR3 for beta chain variable domain of TCR clone 68507 (TRBV2, TRBJ2-1)
CAKRECYNEQFF

SEQ ID NO: 137015 - protein, 17 aa, Homo sapiens
  CDR3 for alpha chain variable domain of TCR clone 68508 (TRAV23/DV6, TRAJ58)
CAARLLRGETSGSRLTF

SEQ ID NO: 137016 - protein, 15 aa, Homo sapiens
  CDR3 for beta chain variable domain of TCR clone 68508 (TRBV6-3, TRBJ2-7)
CASSSPGTVFYEQYF

SEQ ID NO: 137017 - protein, 11 aa, Homo sapiens
  CDR3 for alpha chain variable domain of TCR clone 68509 (TRAV23/DV6, TRAJ58)
CAARLLRGETS

SEQ ID NO: 137018 - protein, 13 aa, Homo sapiens
  CDR3 for beta chain variable domain of TCR clone 68509 (TRBV6-4, TRBJ1-5)
CASSADLNQTQHF

SEQ ID NO: 137019 - protein, 14 aa, Homo sapiens
  CDR3 for alpha chain variable domain of TCR clone 68510 (TRAV12-3, TRAJ10)
SHLPLTGGGNKLTF

SEQ ID NO: 137020 - protein, 16 aa, Homo sapiens
  CDR3 for beta chain variable domain of TCR clone 68510 (TRBV19, TRBJ2-1)
CASSKAGPSAYNEQFF

SEQ ID NO: 137021 - protein, 17 aa, Homo sapiens
  CDR3 for alpha chain variable domain of TCR clone 68511 (TRAV3, TRAJ6)
CAVRDGPRAGGSYIHTF

SEQ ID NO: 137022 - protein, 14 aa, Homo sapiens
  CDR3 for beta chain variable domain of TCR clone 68511 (TRBV7-2, TRBJ2-7)
CASSPKTSFHEQYF

SEQ ID NO: 137023 - protein, 14 aa, Homo sapiens
  CDR3 for alpha chain variable domain of TCR clone 68512 (TRAV17, TRAJ6)
CATDASGGSHIPTF

SEQ ID NO: 137024 - protein, 19 aa, Homo sapiens
  CDR3 for beta chain variable domain of TCR clone 68512 (TRBV4-3, TRBJ2-7)
CASSQEFIGWQVTPYEQYF

SEQ ID NO: 137025 - protein, 12 aa, Homo sapiens
  CDR3 for alpha chain variable domain of TCR clone 68513 (TRAV23/DV6, TRAJ17)
CARGSCRQQVNF

SEQ ID NO: 137026 - protein, 14 aa, Homo sapiens
  CDR3 for beta chain variable domain of TCR clone 68513 (TRBV7-2, TRBJ1-2)
CASSQTGSTYGYTF

SEQ ID NO: 137027 - protein, 14 aa, Homo sapiens
  CDR3 for alpha chain variable domain of TCR clone 68514 (TRAV1-2, TRAJ8)
CAVREDTGFQKLVF

SEQ ID NO: 137028 - protein, 15 aa, Homo sapiens
  CDR3 for beta chain variable domain of TCR clone 68514 (TRBV7-8, TRBJ2-2)
CASSETGQGTGELFF

SEQ ID NO: 137029 - protein, 17 aa, Homo sapiens
  CDR3 for alpha chain variable domain of TCR clone 68515 (TRAV3, TRAJ6)
CAVRDGPRAGGSYIPTF

SEQ ID NO: 137030 - protein, 13 aa, Homo sapiens
  CDR3 for beta chain variable domain of TCR clone 68515 (TRBV27, TRBJ1-4)
CASSLMGDEKLFF

SEQ ID NO: 137031 - protein, 13 aa, Homo sapiens
  CDR3 for alpha chain variable domain of TCR clone 68516 (TRAV4, TRAJ42)
CLVGGGSQGNLIF

SEQ ID NO: 137032 - protein, 13 aa, Homo sapiens
  CDR3 for beta chain variable domain of TCR clone 68516 (TRBV7-9, TRBJ1-2)
CASSLKQNYGYTF

SEQ ID NO: 137033 - protein, 13 aa, Homo sapiens
  CDR3 for alpha chain variable domain of TCR clone 68517 (TRAV16, TRAJ28)
CALTGAGSYQLTF

SEQ ID NO: 137034 - protein, 16 aa, Homo sapiens
  CDR3 for beta chain variable domain of TCR clone 68517 (TRBV28, TRBJ1-5)
RASSLTGQGWTQPQHF

SEQ ID NO: 137035 - protein, 14 aa, Homo sapiens
  CDR3 for alpha chain variable domain of TCR clone 68518 (TRAV9-2, TRAJ36)
CALPWRTGANDLFF

SEQ ID NO: 137036 - protein, 14 aa, Homo sapiens
  CDR3 for beta chain variable domain of TCR clone 68518 (TRBV2, TRBJ1-2)
CASSELQVNYGYTF

SEQ ID NO: 137037 - protein, 15 aa, Homo sapiens
  CDR3 for alpha chain variable domain of TCR clone 68519 (TRAV10, TRAJ44)
CVVSGATDTASKLTF

SEQ ID NO: 137038 - protein, 14 aa, Homo sapiens
  CDR3 for beta chain variable domain of TCR clone 68519 (TRBV25-1, TRBJ1-1)
CASTHLGGNTEAFF

SEQ ID NO: 137039 - protein, 14 aa, Homo sapiens
  CDR3 for alpha chain variable domain of TCR clone 68520 (TRAV12-2, TRAJ17)
CAVLFKAAGNKLTF

SEQ ID NO: 137040 - protein, 13 aa, Homo sapiens
  CDR3 for beta chain variable domain of TCR clone 68520 (TRBV19, TRBJ2-1)
CATSRGVYNEQFF

SEQ ID NO: 137041 - protein, 11 aa, Homo sapiens
  CDR3 for alpha chain variable domain of TCR clone 68521 (TRAV12-1, TRAJ34)
WVVNKGRELIF

SEQ ID NO: 137042 - protein, 12 aa, Homo sapiens
  CDR3 for beta chain variable domain of TCR clone 68521 (TRBV2, TRBJ2-1)
CAYGPPGNEQFF

SEQ ID NO: 137043 - protein, 13 aa, Homo sapiens
  CDR3 for alpha chain variable domain of TCR clone 68522 (TRAV12-3, TRAJ13)
CAMSSGGYQKVTF

SEQ ID NO: 137044 - protein, 16 aa, Homo sapiens
  CDR3 for beta chain variable domain of TCR clone 68522 (TRBV2, TRBJ2-1)
CASSVGGSLSYNEQFF

SEQ ID NO: 137045 - protein, 14 aa, Homo sapiens
  CDR3 for alpha chain variable domain of TCR clone 68523 (TRAV12-2, TRAJ17)
CAVNIKAAGNKLTF

SEQ ID NO: 137046 - protein, 16 aa, Homo sapiens
  CDR3 for beta chain variable domain of TCR clone 68523 (TRBV20-1, TRBJ2-6)
CSASSQGYEGANVLTF

SEQ ID NO: 137047 - protein, 13 aa, Homo sapiens
  CDR3 for alpha chain variable domain of TCR clone 68524 (TRAV12-1, TRAJ9)
CVVLNTGGFKTIF

SEQ ID NO: 137048 - protein, 12 aa, Homo sapiens
  CDR3 for beta chain variable domain of TCR clone 68524 (TRBV11-2, TRBJ2-1)
CASSPGNNEQFF

SEQ ID NO: 137049 - protein, 12 aa, Homo sapiens
  CDR3 for alpha chain variable domain of TCR clone 68525 (TRAV35, TRAJ49)
FAGWNTGNQFYF

SEQ ID NO: 137050 - protein, 16 aa, Homo sapiens
  CDR3 for beta chain variable domain of TCR clone 68525 (TRBV5-1, TRBJ2-2)
CASSLWDTTNTGELFF

SEQ ID NO: 137051 - protein, 16 aa, Homo sapiens
  CDR3 for alpha chain variable domain of TCR clone 68526 (TRAV14/DV4, TRAJ20)
CAMREGRSRDDYKLSF

SEQ ID NO: 137052 - protein, 17 aa, Homo sapiens
  CDR3 for beta chain variable domain of TCR clone 68526 (TRBV15, TRBJ1-1)
CAPSRVGGADGDTEAFF

SEQ ID NO: 137053 - protein, 13 aa, Homo sapiens
  CDR3 for alpha chain variable domain of TCR clone 68527 (TRAV30, TRAJ24)
CGTVTDGWGKLQF

SEQ ID NO: 137054 - protein, 15 aa, Homo sapiens
  CDR3 for beta chain variable domain of TCR clone 68527 (TRBV25-1, TRBJ1-4)
CASSPGDSTNEKLFF

SEQ ID NO: 137055 - protein, 15 aa, Homo sapiens
  CDR3 for alpha chain variable domain of TCR clone 68528 (TRAV12-3, TRAJ6)
CAMIATSGGSYIPTF

SEQ ID NO: 137056 - protein, 11 aa, Homo sapiens
  CDR3 for beta chain variable domain of TCR clone 68528 (TRBV20-1, TRBJ1-5)
CSAQGDQPQHF

SEQ ID NO: 137057 - protein, 14 aa, Homo sapiens
  CDR3 for alpha chain variable domain of TCR clone 68529 (TRAV12-2, TRAJ13)
CAVKKTGGYQKVTF

SEQ ID NO: 137058 - protein, 12 aa, Homo sapiens
  CDR3 for beta chain variable domain of TCR clone 68529 (TRBV11-3, TRBJ1-1)
CASSHRQGEAFF

SEQ ID NO: 137059 - protein, 15 aa, Homo sapiens
  CDR3 for alpha chain variable domain of TCR clone 68530 (TRAV26-1, TRAJ29)
CIVRVEGSGNTPLVF

SEQ ID NO: 137060 - protein, 13 aa, Homo sapiens
  CDR3 for beta chain variable domain of TCR clone 68530 (TRBV7-2, TRBJ2-5)
CASSQTSVETQYF

SEQ ID NO: 137061 - protein, 11 aa, Homo sapiens
  CDR3 for alpha chain variable domain of TCR clone 68531 (TRAV9-2, TRAJ43)
CALNNNNDMRL

SEQ ID NO: 137062 - protein, 13 aa, Homo sapiens
  CDR3 for beta chain variable domain of TCR clone 68531 (TRBV20-1, TRBJ2-1)
CSASTGTSNEQFF

SEQ ID NO: 137063 - protein, 16 aa, Homo sapiens
  CDR3 for alpha chain variable domain of TCR clone 68532 (TRAV35, TRAJ28)
CAGQRYSGAGSYQLTF

SEQ ID NO: 137064 - protein, 13 aa, Homo sapiens
  CDR3 for beta chain variable domain of TCR clone 68532 (TRBV19, TRBJ1-2)
FASSQGQVYGYTF

SEQ ID NO: 137065 - protein, 15 aa, Homo sapiens
  CDR3 for alpha chain variable domain of TCR clone 68533 (TRAV26-1, TRAJ44)
CIVRANTGTASKLTF

SEQ ID NO: 137066 - protein, 16 aa, Homo sapiens
  CDR3 for beta chain variable domain of TCR clone 68533 (TRBV7-7, TRBJ2-1)
CASSLASETSYNEQFF

SEQ ID NO: 137067 - protein, 15 aa, Homo sapiens
  CDR3 for alpha chain variable domain of TCR clone 68534 (TRAV26-2, TRAJ13)
CILRDLSGGCQKVTF

SEQ ID NO: 137068 - protein, 11 aa, Homo sapiens
  CDR3 for beta chain variable domain of TCR clone 68534 (TRBV7-9, TRBJ2-5)
CASSLSATQYF

SEQ ID NO: 137069 - protein, 16 aa, Homo sapiens
  CDR3 for alpha chain variable domain of TCR clone 68535 (TRAV12-2, TRAJ32)
CAVNLGQGGATNKLIF

SEQ ID NO: 137070 - protein, 14 aa, Homo sapiens
  CDR3 for beta chain variable domain of TCR clone 68535 (TRBV11-2, TRBJ1-2)
CASSLGTANYGYTF

SEQ ID NO: 137071 - protein, 19 aa, Homo sapiens
  CDR3 for alpha chain variable domain of TCR clone 68536 (TRAV8-3, TRAJ8)
LSTSVLWDPMNTGFQKLVF

SEQ ID NO: 137072 - protein, 13 aa, Homo sapiens
  CDR3 for beta chain variable domain of TCR clone 68536 (TRBV10-2, TRBJ2-3)
RASSESGDHTQYF

SEQ ID NO: 137073 - protein, 14 aa, Homo sapiens
  CDR3 for alpha chain variable domain of TCR clone 68537 (TRAV17, TRAJ56)
CATVPAGANSKLKF

SEQ ID NO: 137074 - protein, 13 aa, Homo sapiens
  CDR3 for beta chain variable domain of TCR clone 68537 (TRBV12-4, TRBJ2-2)
CASSITGSGELFF

SEQ ID NO: 137075 - protein, 14 aa, Homo sapiens
  CDR3 for alpha chain variable domain of TCR clone 68538 (TRAV26-1, TRAJ45)
CIEVTGGGADGLTF

SEQ ID NO: 137076 - protein, 13 aa, Homo sapiens
  CDR3 for beta chain variable domain of TCR clone 68538 (TRBV7-6, TRBJ1-2)
GASSLVADYGYTF

SEQ ID NO: 137077 - protein, 12 aa, Homo sapiens
  CDR3 for alpha chain variable domain of TCR clone 68539 (TRAV1-2, TRAJ29)
CAVRNLNTPLVF

SEQ ID NO: 137078 - protein, 15 aa, Homo sapiens
  CDR3 for beta chain variable domain of TCR clone 68539 (TRBV4-1, TRBJ1-4)
CASSDTGGTNERLFF

SEQ ID NO: 137079 - protein, 13 aa, Homo sapiens
  CDR3 for alpha chain variable domain of TCR clone 68540 (TRAV8-4, TRAJ54)
CAVRIQGAQKLVF

SEQ ID NO: 137080 - protein, 15 aa, Homo sapiens
  CDR3 for beta chain variable domain of TCR clone 68540 (TRBV5-5, TRBJ2-7)
RASSLAAPLSYEQYF

SEQ ID NO: 137081 - protein, 13 aa, Homo sapiens
  CDR3 for alpha chain variable domain of TCR clone 68541 (TRAV12-2, TRAJ10)
CAVPTGGGNKLTF

SEQ ID NO: 137082 - protein, 14 aa, Homo sapiens
  CDR3 for beta chain variable domain of TCR clone 68541 (TRBV6-1, TRBJ1-3)
CASVQGGGGNTMYF

SEQ ID NO: 137083 - protein, 14 aa, Homo sapiens
  CDR3 for alpha chain variable domain of TCR clone 68542 (TRAV12-2, TRAJ44)
CAVNPAGTASKLPF

SEQ ID NO: 137084 - protein, 15 aa, Homo sapiens
  CDR3 for beta chain variable domain of TCR clone 68542 (TRBV5-1, TRBJ2-1)
CASSPPRAPYNEQFF

SEQ ID NO: 137085 - protein, 13 aa, Homo sapiens
  CDR3 for alpha chain variable domain of TCR clone 68543 (TRAV2, TRAJ40)
CAVVTSGTYKYIF

SEQ ID NO: 137086 - protein, 16 aa, Homo sapiens
  CDR3 for beta chain variable domain of TCR clone 68543 (TRBV5-1, TRBJ1-1)
CASSSGGNSLNTEAFF

SEQ ID NO: 137087 - protein, 19 aa, Homo sapiens
  CDR3 for alpha chain variable domain of TCR clone 68544 (TRAV26-1, TRAJ28)
CIVRVAHAYSGAGSYQLTF

SEQ ID NO: 137088 - protein, 16 aa, Homo sapiens
  CDR3 for beta chain variable domain of TCR clone 68544 (TRBV19, TRBJ2-1)
CASSKAGPSSYNEQFF

SEQ ID NO: 137089 - protein, 16 aa, Homo sapiens
  CDR3 for alpha chain variable domain of TCR clone 68545 (TRAV8-4, TRAJ9)
CAVTFNTGGFKDYLWS

SEQ ID NO: 137090 - protein, 15 aa, Homo sapiens
  CDR3 for beta chain variable domain of TCR clone 68545 (TRBV7-9, TRBJ2-2)
CASSPETGAGGELFF

SEQ ID NO: 137091 - protein, 14 aa, Homo sapiens
  CDR3 for alpha chain variable domain of TCR clone 68546 (TRAV12-2, TRAJ40)
CAVKIPSGTYKYIF

SEQ ID NO: 137092 - protein, 14 aa, Homo sapiens
  CDR3 for beta chain variable domain of TCR clone 68546 (TRBV20-1, TRBJ1-1)
CSAQTRIGGTEAFY

SEQ ID NO: 137093 - protein, 15 aa, Homo sapiens
  CDR3 for alpha chain variable domain of TCR clone 68547 (TRAV4, TRAJ29)
CLVGAYRSQETHLLS

SEQ ID NO: 137094 - protein, 12 aa, Homo sapiens
  CDR3 for beta chain variable domain of TCR clone 68547 (TRBV6-1, TRBJ2-7)
CASSDYSYEQYF

SEQ ID NO: 137095 - protein, 11 aa, Homo sapiens
  CDR3 for alpha chain variable domain of TCR clone 68548 (TRAV12-1, TRAJ34)
CVVNKGRELIF

SEQ ID NO: 137096 - protein, 12 aa, Homo sapiens
  CDR3 for beta chain variable domain of TCR clone 68548 (TRBV2, TRBJ2-1)
CAYGPPGNDQFF

SEQ ID NO: 137097 - protein, 14 aa, Homo sapiens
  CDR3 for alpha chain variable domain of TCR clone 68549 (TRAV1-1, TRAJ23)
CAVSVYNQGGKLIF

SEQ ID NO: 137098 - protein, 15 aa, Homo sapiens
  CDR3 for beta chain variable domain of TCR clone 68549 (TRBV5-8, TRBJ2-2)
CASSLDRGATGELFF

SEQ ID NO: 137099 - protein, 13 aa, Homo sapiens
  CDR3 for alpha chain variable domain of TCR clone 68550 (TRAV13-2, TRAJ21)
CAASIYNFNKFYF

SEQ ID NO: 137100 - protein, 13 aa, Homo sapiens
  CDR3 for beta chain variable domain of TCR clone 68550 (TRBV27, TRBJ1-4)
CASSLMGDEKLFF

SEQ ID NO: 137101 - protein, 12 aa, Homo sapiens
  CDR3 for alpha chain variable domain of TCR clone 68551 (TRAV12-2, TRAJ8)
CAVNTGFQKLVF

SEQ ID NO: 137102 - protein, 14 aa, Homo sapiens
  CDR3 for beta chain variable domain of TCR clone 68551 (TRBV7-8, TRBJ2-3)
CASSLEAGTDTQYF

SEQ ID NO: 137103 - protein, 14 aa, Homo sapiens
  CDR3 for alpha chain variable domain of TCR clone 68552 (TRAV12-2, TRAJ13)
CAVKKTGGYQKVTF

SEQ ID NO: 137104 - protein, 15 aa, Homo sapiens
  CDR3 for beta chain variable domain of TCR clone 68552 (TRBV25-1, TRBJ1-4)
CASSPGDSTNEKLFF

SEQ ID NO: 137105 - protein, 14 aa, Homo sapiens
  CDR3 for alpha chain variable domain of TCR clone 68553 (TRAV1-2, TRAJ16)
CAVNRFSDGQELLF

SEQ ID NO: 137106 - protein, 15 aa, Homo sapiens
  CDR3 for beta chain variable domain of TCR clone 68553 (TRBV11-3, TRBJ2-3)
CASLKDGREGDTQYF

SEQ ID NO: 137107 - protein, 16 aa, Homo sapiens
  CDR3 for alpha chain variable domain of TCR clone 68554 (TRAV30, TRAJ24)
CGTEIVDADSWGKFQL

SEQ ID NO: 137108 - protein, 16 aa, Homo sapiens
  CDR3 for beta chain variable domain of TCR clone 68554 (TRBV15, TRBJ2-6)
CATSVNGGFLANVLTF

SEQ ID NO: 137109 - protein, 14 aa, Homo sapiens
  CDR3 for alpha chain variable domain of TCR clone 68555 (TRAV12-2, TRAJ45)
CALPERGGADGLTF

SEQ ID NO: 137110 - protein, 14 aa, Homo sapiens
  CDR3 for beta chain variable domain of TCR clone 68555 (TRBV18, TRBJ1-5)
CASSPGNSNQPQNF

SEQ ID NO: 137111 - protein, 17 aa, Homo sapiens
  CDR3 for alpha chain variable domain of TCR clone 68556 (TRAV26-1, TRAJ46)
IASSESEKKSSGDKLTF

SEQ ID NO: 137112 - protein, 16 aa, Homo sapiens
  CDR3 for beta chain variable domain of TCR clone 68556 (TRBV27, TRBJ2-2)
CASSCRGLVRTGELFF

SEQ ID NO: 137113 - protein, 12 aa, Homo sapiens
  CDR3 for alpha chain variable domain of TCR clone 68557 (TRAV13-1, TRAJ21)
CAAKEGFNKFYF

SEQ ID NO: 137114 - protein, 11 aa, Homo sapiens
  CDR3 for beta chain variable domain of TCR clone 68557 (TRBV19, TRBJ1-1)
CASSIGSEAFF

SEQ ID NO: 137115 - protein, 12 aa, Homo sapiens
  CDR3 for alpha chain variable domain of TCR clone 68558 (TRAV13-1, TRAJ15)
CAASQAGTALIF

SEQ ID NO: 137116 - protein, 14 aa, Homo sapiens
  CDR3 for beta chain variable domain of TCR clone 68558 (TRBV7-2, TRBJ2-7)
CASSLYPGRYEQYF

SEQ ID NO: 137117 - protein, 12 aa, Homo sapiens
  CDR3 for alpha chain variable domain of TCR clone 68559 (TRAV12-2, TRAJ52)
IGGCTSYGKLTF

SEQ ID NO: 137118 - protein, 13 aa, Homo sapiens
  CDR3 for beta chain variable domain of TCR clone 68559 (TRBV15, TRBJ2-7)
CATSTTGHYEQYF

SEQ ID NO: 137119 - protein, 15 aa, Homo sapiens
  CDR3 for alpha chain variable domain of TCR clone 68560 (TRAV8-3, TRAJ23)
CAVGDRYNQGGQLIF

SEQ ID NO: 137120 - protein, 22 aa, Homo sapiens
  CDR3 for beta chain variable domain of TCR clone 68560 (TRBV29-1, TRBJ2-5)
TVSNMSPEDSSIYLCSAGTQYF

SEQ ID NO: 137121 - protein, 12 aa, Homo sapiens
  CDR3 for alpha chain variable domain of TCR clone 68561 (TRAV36/DV7, TRAJ37)
CACYGNTGKLIF

SEQ ID NO: 137122 - protein, 14 aa, Homo sapiens
  CDR3 for beta chain variable domain of TCR clone 68561 (TRBV18, TRBJ2-5)
CASSPGVSQETQYF

SEQ ID NO: 137123 - protein, 18 aa, Homo sapiens
  CDR3 for alpha chain variable domain of TCR clone 68562 (TRAV29/DV5, TRAJ52)
CAAGFRGAGGTSYGKLIF

SEQ ID NO: 137124 - protein, 16 aa, Homo sapiens
  CDR3 for beta chain variable domain of TCR clone 68562 (TRBV7-3, TRBJ2-2)
CASSLKRGTLSGELFF

SEQ ID NO: 137125 - protein, 16 aa, Homo sapiens
  CDR3 for alpha chain variable domain of TCR clone 68563 (TRAV26-1, TRAJ56)
CIVRARERGANSELTF

SEQ ID NO: 137126 - protein, 13 aa, Homo sapiens
  CDR3 for beta chain variable domain of TCR clone 68563 (TRBV7-2, TRBJ1-1)
CASSLRANTEAFF

SEQ ID NO: 137127 - protein, 12 aa, Homo sapiens
  CDR3 for alpha chain variable domain of TCR clone 68564 (TRAV16, TRAJ10)
CPRTGGGNKLTF

SEQ ID NO: 137128 - protein, 13 aa, Homo sapiens
  CDR3 for beta chain variable domain of TCR clone 68564 (TRBV15, TRBJ2-7)
CATSTTGHYEQYF

SEQ ID NO: 137129 - protein, 15 aa, Homo sapiens
  CDR3 for alpha chain variable domain of TCR clone 68565 (TRAV8-3, TRAJ37)
CAVGAPSSNTSKLIF

SEQ ID NO: 137130 - protein, 15 aa, Homo sapiens
  CDR3 for beta chain variable domain of TCR clone 68565 (TRBV11-2, TRBJ1-2)
CASSQMRGLNYGYTF

SEQ ID NO: 137131 - protein, 14 aa, Homo sapiens
  CDR3 for alpha chain variable domain of TCR clone 68566 (TRAV1-2, TRAJ16)
CAVNRFSDGQKLLF

SEQ ID NO: 137132 - protein, 16 aa, Homo sapiens
  CDR3 for beta chain variable domain of TCR clone 68566 (TRBV9, TRBJ2-1)
CASSVGGGGNYNGQFF

SEQ ID NO: 137133 - protein, 12 aa, Homo sapiens
  CDR3 for alpha chain variable domain of TCR clone 68567 (TRAV20, TRAJ37)
CALPSNTGKLIF

SEQ ID NO: 137134 - protein, 14 aa, Homo sapiens
  CDR3 for beta chain variable domain of TCR clone 68567 (TRBV19, TRBJ2-1)
CASPTFVLGGEQFF

SEQ ID NO: 137135 - protein, 15 aa, Homo sapiens
  CDR3 for alpha chain variable domain of TCR clone 68568 (TRAV17, TRAJ57)
CATGPSQGGSEKLVF

SEQ ID NO: 137136 - protein, 18 aa, Homo sapiens
  CDR3 for beta chain variable domain of TCR clone 68568 (TRBV25-1, TRBJ1-2)
CASSGLQNGQGLIFGYTF

SEQ ID NO: 137137 - protein, 11 aa, Homo sapiens
  CDR3 for alpha chain variable domain of TCR clone 68569 (TRAV12-3, TRAJ43)
CAMSVSNDMRF

SEQ ID NO: 137138 - protein, 13 aa, Homo sapiens
  CDR3 for beta chain variable domain of TCR clone 68569 (TRBV20-1, TRBJ1-1)
CSAPLGRGTEAFF

SEQ ID NO: 137139 - protein, 13 aa, Homo sapiens
  CDR3 for alpha chain variable domain of TCR clone 68570 (TRAV1-2, TRAJ9)
CAALNTGGFKTIF

SEQ ID NO: 137140 - protein, 16 aa, Homo sapiens
  CDR3 for beta chain variable domain of TCR clone 68570 (TRBV2, TRBJ1-1)
CASSPPNRGMNTEAFF

SEQ ID NO: 137141 - protein, 15 aa, Homo sapiens
  CDR3 for alpha chain variable domain of TCR clone 68571 (TRAV2, TRAJ22)
CAVPSRGGSARQLTF

SEQ ID NO: 137142 - protein, 14 aa, Homo sapiens
  CDR3 for beta chain variable domain of TCR clone 68571 (TRBV7-8, TRBJ2-3)
CASSSRDSTDTQYF

SEQ ID NO: 137143 - protein, 12 aa, Homo sapiens
  CDR3 for alpha chain variable domain of TCR clone 68572 (TRAV35, TRAJ39)
LAPNNAGNMLTF

SEQ ID NO: 137144 - protein, 15 aa, Homo sapiens
  CDR3 for beta chain variable domain of TCR clone 68572 (TRBV27, TRBJ1-5)
CASSLGQGSVQPQHF

SEQ ID NO: 137145 - protein, 13 aa, Homo sapiens
  CDR3 for alpha chain variable domain of TCR clone 68573 (TRAV21, TRAJ27)
CAALNTNAGKSTF

SEQ ID NO: 137146 - protein, 16 aa, Homo sapiens
  CDR3 for beta chain variable domain of TCR clone 68573 (TRBV7-3, TRBJ2-2)
CASSLKRGTLSGELFF

SEQ ID NO: 137147 - protein, 12 aa, Homo sapiens
  CDR3 for alpha chain variable domain of TCR clone 68574 (TRAV1-1, TRAJ8)
CAGGTGFRKLVF

SEQ ID NO: 137148 - protein, 16 aa, Homo sapiens
  CDR3 for beta chain variable domain of TCR clone 68574 (TRBV12-5, TRBJ2-5)
CASGPRTSGNQETQYF

SEQ ID NO: 137149 - protein, 12 aa, Homo sapiens
  CDR3 for alpha chain variable domain of TCR clone 68575 (TRAV30, TRAJ43)
CGTEERGNDMRF

SEQ ID NO: 137150 - protein, 18 aa, Homo sapiens
  CDR3 for beta chain variable domain of TCR clone 68575 (TRBV11-2, TRBJ2-3)
CASSLGGASRGAPNTQYF

SEQ ID NO: 137151 - protein, 15 aa, Homo sapiens
  CDR3 for alpha chain variable domain of TCR clone 68576 (TRAV2, TRAJ15)
CAVEDHNQAGTALIF

SEQ ID NO: 137152 - protein, 13 aa, Homo sapiens
  CDR3 for beta chain variable domain of TCR clone 68576 (TRBV10-2, TRBJ2-1)
CASGASGDAKQFF

SEQ ID NO: 137153 - protein, 16 aa, Homo sapiens
  CDR3 for alpha chain variable domain of TCR clone 68577 (TRAV30, TRAJ24)
CGTEIVDADSWGKFQF

SEQ ID NO: 137154 - protein, 13 aa, Homo sapiens
  CDR3 for beta chain variable domain of TCR clone 68577 (TRBV20-1, TRBJ1-1)
CSARGGGDTEAFF

SEQ ID NO: 137155 - protein, 11 aa, Homo sapiens
  CDR3 for alpha chain variable domain of TCR clone 68578 (TRAV2, TRAJ21)
CAVSNFNKFYF

SEQ ID NO: 137156 - protein, 14 aa, Homo sapiens
  CDR3 for beta chain variable domain of TCR clone 68578 (TRBV15, TRBJ2-3)
CATRSGTSTDTQYF

SEQ ID NO: 137157 - protein, 14 aa, Homo sapiens
  CDR3 for alpha chain variable domain of TCR clone 68579 (TRAV23/DV6, TRAJ5)
CAAKRPAGRRALTF

SEQ ID NO: 137158 - protein, 15 aa, Homo sapiens
  CDR3 for beta chain variable domain of TCR clone 68579 (TRBV10-3, TRBJ2-3)
CAISLTSGGTDTQYF

SEQ ID NO: 137159 - protein, 15 aa, Homo sapiens
  CDR3 for alpha chain variable domain of TCR clone 68580 (TRAV26-2, TRAJ57)
CILRDIRGGSEKLVF

SEQ ID NO: 137160 - protein, 15 aa, Homo sapiens
  CDR3 for beta chain variable domain of TCR clone 68580 (TRBV2, TRBJ2-1)
CASDTGLAGEGEQFF

SEQ ID NO: 137161 - protein, 21 aa, Homo sapiens
  CDR3 for alpha chain variable domain of TCR clone 68581 (TRAV12-2, TRAJ53)
PAIQPPTSVPPILSSNYKLTF

SEQ ID NO: 137162 - protein, 13 aa, Homo sapiens
  CDR3 for beta chain variable domain of TCR clone 68581 (TRBV7-7, TRBJ2-3)
CASSLSRADTQYF

SEQ ID NO: 137163 - protein, 15 aa, Homo sapiens
  CDR3 for alpha chain variable domain of TCR clone 68582 (TRAV8-2, TRAJ40)
CVVLGTTSGNYKYIF

SEQ ID NO: 137164 - protein, 16 aa, Homo sapiens
  CDR3 for beta chain variable domain of TCR clone 68582 (TRBV7-3, TRBJ2-1)
CASSLEGYRSYNEQFF

SEQ ID NO: 137165 - protein, 13 aa, Homo sapiens
  CDR3 for alpha chain variable domain of TCR clone 68583 (TRAV2, TRAJ15)
CAVASQAGTALIF

SEQ ID NO: 137166 - protein, 17 aa, Homo sapiens
  CDR3 for beta chain variable domain of TCR clone 68583 (TRBV20-1, TRBJ2-2)
CSASGSGQGGLTGELFF

SEQ ID NO: 137167 - protein, 13 aa, Homo sapiens
  CDR3 for alpha chain variable domain of TCR clone 68584 (TRAV2, TRAJ40)
CAVVTPGTYKYIF

SEQ ID NO: 137168 - protein, 14 aa, Homo sapiens
  CDR3 for beta chain variable domain of TCR clone 68584 (TRBV19, TRBJ2-1)
CASPTCVLSGEQFF

SEQ ID NO: 137169 - protein, 13 aa, Homo sapiens
  CDR3 for alpha chain variable domain of TCR clone 68585 (TRAV2, TRAJ40)
CAVVTSGTYKYIF

SEQ ID NO: 137170 - protein, 13 aa, Homo sapiens
  CDR3 for beta chain variable domain of TCR clone 68585 (TRBV19, TRBJ1-5)
CASSIGGNQPQHF

SEQ ID NO: 137171 - protein, 13 aa, Homo sapiens
  CDR3 for alpha chain variable domain of TCR clone 68586 (TRAV21, TRAJ20)
CAVGLRVDYKLSF

SEQ ID NO: 137172 - protein, 14 aa, Homo sapiens
  CDR3 for beta chain variable domain of TCR clone 68586 (TRBV7-2, TRBJ2-7)
CASRSQGAAYEQYF

SEQ ID NO: 137173 - protein, 16 aa, Homo sapiens
  CDR3 for alpha chain variable domain of TCR clone 68587 (TRAV3, TRAJ37)
CAVRGKGSGNTGKLIF

SEQ ID NO: 137174 - protein, 13 aa, Homo sapiens
  CDR3 for beta chain variable domain of TCR clone 68587 (TRBV14, TRBJ2-7)
CASRQDRRYEQYF

SEQ ID NO: 137175 - protein, 18 aa, Homo sapiens
  CDR3 for alpha chain variable domain of TCR clone 68588 (TRAV21, TRAJ52)
CAVRPSPAGGTSYGKLTF

SEQ ID NO: 137176 - protein, 13 aa, Homo sapiens
  CDR3 for beta chain variable domain of TCR clone 68588 (TRBV10-3, TRBJ1-2)
CAISERDSYGYTF

SEQ ID NO: 137177 - protein, 15 aa, Homo sapiens
  CDR3 for alpha chain variable domain of TCR clone 68589 (TRAV14/DV4, TRAJ12)
CAMREGRDSSYRLIF

SEQ ID NO: 137178 - protein, 15 aa, Homo sapiens
  CDR3 for beta chain variable domain of TCR clone 68589 (TRBV4-1, TRBJ1-4)
RASSDTGGTNEKLFF

SEQ ID NO: 137179 - protein, 14 aa, Homo sapiens
  CDR3 for alpha chain variable domain of TCR clone 68590 (TRAV13-1, TRAJ20)
CAACPGSNDYKLSF

SEQ ID NO: 137180 - protein, 13 aa, Homo sapiens
  CDR3 for beta chain variable domain of TCR clone 68590 (TRBV20-1, TRBJ1-1)
CSAPPGGHTEAFF

SEQ ID NO: 137181 - protein, 17 aa, Homo sapiens
  CDR3 for alpha chain variable domain of TCR clone 68591 (TRAV23/DV6, TRAJ57)
CAASSTLSQGGSEKLVF

SEQ ID NO: 137182 - protein, 14 aa, Homo sapiens
  CDR3 for beta chain variable domain of TCR clone 68591 (TRBV7-8, TRBJ2-5)
CASSATGGQETRYF

SEQ ID NO: 137183 - protein, 13 aa, Homo sapiens
  CDR3 for alpha chain variable domain of TCR clone 68592 (TRAV13-1, TRAJ39)
CSKYSNAGNMLTF

SEQ ID NO: 137184 - protein, 18 aa, Homo sapiens
  CDR3 for beta chain variable domain of TCR clone 68592 (TRBV10-2, TRBJ2-2)
CISAPAGHRQADAGELFF

SEQ ID NO: 137185 - protein, 15 aa, Homo sapiens
  CDR3 for alpha chain variable domain of TCR clone 68593 (TRAV3, TRAJ5)
CAVRDLDTGRRALTF

SEQ ID NO: 137186 - protein, 17 aa, Homo sapiens
  CDR3 for beta chain variable domain of TCR clone 68593 (TRBV25-1, TRBJ2-7)
CQPQQPPRTGATYEQYF

SEQ ID NO: 137187 - protein, 13 aa, Homo sapiens
  CDR3 for alpha chain variable domain of TCR clone 68594 (TRAV9-2, TRAJ49)
CALIQIGGNQFYF

SEQ ID NO: 137188 - protein, 13 aa, Homo sapiens
  CDR3 for beta chain variable domain of TCR clone 68594 (TRBV20-1, TRBJ1-1)
YSARGGGNTEAFF

SEQ ID NO: 137189 - protein, 14 aa, Homo sapiens
  CDR3 for alpha chain variable domain of TCR clone 68595 (TRAV35, TRAJ33)
CAGSSQDSNYQLIW

SEQ ID NO: 137190 - protein, 16 aa, Homo sapiens
  CDR3 for beta chain variable domain of TCR clone 68595 (TRBV9, TRBJ1-2)
CASSVEEKVSPYGYTF

SEQ ID NO: 137191 - protein, 14 aa, Homo sapiens
  CDR3 for alpha chain variable domain of TCR clone 68596 (TRAV16, TRAJ15)
CALSFNQSGTALIF

SEQ ID NO: 137192 - protein, 16 aa, Homo sapiens
  CDR3 for beta chain variable domain of TCR clone 68596 (TRBV9, TRBJ2-7)
CASSAGPDRSPYEQYF

SEQ ID NO: 137193 - protein, 14 aa, Homo sapiens
  CDR3 for alpha chain variable domain of TCR clone 68597 (TRAV26-1, TRAJ45)
CIVRVVGGAYGLTF

SEQ ID NO: 137194 - protein, 16 aa, Homo sapiens
  CDR3 for beta chain variable domain of TCR clone 68597 (TRBV7-9, TRBJ1-1)
CASSLTQVRSNTEAFF

SEQ ID NO: 137195 - protein, 15 aa, Homo sapiens
  CDR3 for alpha chain variable domain of TCR clone 68598 (TRAV3, TRAJ5)
CAVRDLDTGRRALTF

SEQ ID NO: 137196 - protein, 12 aa, Homo sapiens
  CDR3 for beta chain variable domain of TCR clone 68598 (TRBV29-1, TRBJ2-3)
CSVTGGADTQYF

SEQ ID NO: 137197 - protein, 12 aa, Homo sapiens
  CDR3 for alpha chain variable domain of TCR clone 68599 (TRAV1-1, TRAJ9)
FAVDTGGFKTIF

SEQ ID NO: 137198 - protein, 14 aa, Homo sapiens
  CDR3 for beta chain variable domain of TCR clone 68599 (TRBV7-8, TRBJ2-5)
CASSATGGQETQYF

SEQ ID NO: 137199 - protein, 13 aa, Homo sapiens
  CDR3 for alpha chain variable domain of TCR clone 68600 (TRAV36/DV7, TRAJ37)
CAVFSSNTGKLIF

SEQ ID NO: 137200 - protein, 16 aa, Homo sapiens
  CDR3 for beta chain variable domain of TCR clone 68600 (TRBV12-5, TRBJ2-5)
CASGPRTSGNQETQYF

SEQ ID NO: 137201 - protein, 14 aa, Homo sapiens
  CDR3 for alpha chain variable domain of TCR clone 68601 (TRAV12-3, TRAJ10)
SHLPLTGGGNKLTF

SEQ ID NO: 137202 - protein, 13 aa, Homo sapiens
  CDR3 for beta chain variable domain of TCR clone 68601 (TRBV11-2, TRBJ2-5)
CASSFSSQETQYF

SEQ ID NO: 137203 - protein, 14 aa, Homo sapiens
  CDR3 for alpha chain variable domain of TCR clone 68602 (TRAV13-1, TRAJ26)
RAASSAHYGQNFVF

SEQ ID NO: 137204 - protein, 17 aa, Homo sapiens
  CDR3 for beta chain variable domain of TCR clone 68602 (TRBV25-1, TRBJ2-5)
CASSRRGGRGGQETQYF

SEQ ID NO: 137205 - protein, 13 aa, Homo sapiens
  CDR3 for alpha chain variable domain of TCR clone 68603 (TRAV27, TRAJ45)
CRSSGGGADGLTF

SEQ ID NO: 137206 - protein, 14 aa, Homo sapiens
  CDR3 for beta chain variable domain of TCR clone 68603 (TRBV11-2, TRBJ2-7)
CASSPKTSFYEQYF

SEQ ID NO: 137207 - protein, 14 aa, Homo sapiens
  CDR3 for alpha chain variable domain of TCR clone 68604 (TRAV1-2, TRAJ8)
CAVREDTGFQELVF

SEQ ID NO: 137208 - protein, 17 aa, Homo sapiens
  CDR3 for beta chain variable domain of TCR clone 68604 (TRBV11-3, TRBJ2-1)
CASSLYPPGVEYNEQFF

SEQ ID NO: 137209 - protein, 12 aa, Homo sapiens
  CDR3 for alpha chain variable domain of TCR clone 68605 (TRAV12-3, TRAJ3)
CAIYSSASKIIF

SEQ ID NO: 137210 - protein, 17 aa, Homo sapiens
  CDR3 for beta chain variable domain of TCR clone 68605 (TRBV7-9, TRBJ2-3)
CASSLEEAGAYPDTQYF

SEQ ID NO: 137211 - protein, 13 aa, Homo sapiens
  CDR3 for alpha chain variable domain of TCR clone 68606 (TRAV23/DV6, TRAJ12)
CAPRVDSSYNLIF

SEQ ID NO: 137212 - protein, 12 aa, Homo sapiens
  CDR3 for beta chain variable domain of TCR clone 68606 (TRBV7-8, TRBJ2-7)
CASSLGDREQYF

SEQ ID NO: 137213 - protein, 16 aa, Homo sapiens
  CDR3 for alpha chain variable domain of TCR clone 68607 (TRAV16, TRAJ4)
CALSRMFSGGYNKLIF

SEQ ID NO: 137214 - protein, 15 aa, Homo sapiens
  CDR3 for beta chain variable domain of TCR clone 68607 (TRBV7-2, TRBJ1-2)
CASSLVSGGDYGYTF

SEQ ID NO: 137215 - protein, 14 aa, Homo sapiens
  CDR3 for alpha chain variable domain of TCR clone 68608 (TRAV1-2, TRAJ16)
CAVNRFSDGQKRLF

SEQ ID NO: 137216 - protein, 16 aa, Homo sapiens
  CDR3 for beta chain variable domain of TCR clone 68608 (TRBV12-4, TRBJ1-5)
CASSRPVGGSNQPQHF

SEQ ID NO: 137217 - protein, 16 aa, Homo sapiens
  CDR3 for alpha chain variable domain of TCR clone 68609 (TRAV12-2, TRAJ18)
CAVTTDRGSTLGRLYF

SEQ ID NO: 137218 - protein, 14 aa, Homo sapiens
  CDR3 for beta chain variable domain of TCR clone 68609 (TRBV4-2, TRBJ1-5)
CASSQDSINQPRHF

SEQ ID NO: 137219 - protein, 14 aa, Homo sapiens
  CDR3 for alpha chain variable domain of TCR clone 68610 (TRAV1-2, TRAJ16)
WAVNRFSDGQKLLF

SEQ ID NO: 137220 - protein, 14 aa, Homo sapiens
  CDR3 for beta chain variable domain of TCR clone 68610 (TRBV13, TRBJ2-5)
CASSLGRGQETQYF

SEQ ID NO: 137221 - protein, 12 aa, Homo sapiens
  CDR3 for alpha chain variable domain of TCR clone 68611 (TRAV2, TRAJ36)
CAELTGANNLFF

SEQ ID NO: 137222 - protein, 18 aa, Homo sapiens
  CDR3 for beta chain variable domain of TCR clone 68611 (TRBV19, TRBJ1-1)
CASSIDGGDYTGDTEAFF

SEQ ID NO: 137223 - protein, 13 aa, Homo sapiens
  CDR3 for alpha chain variable domain of TCR clone 68612 (TRAV27, TRAJ57)
CRSSQGGSEKLVF

SEQ ID NO: 137224 - protein, 11 aa, Homo sapiens
  CDR3 for beta chain variable domain of TCR clone 68612 (TRBV11-2, TRBJ1-1)
CASSINTEAFF

SEQ ID NO: 137225 - protein, 18 aa, Homo sapiens
  CDR3 for alpha chain variable domain of TCR clone 68613 (TRAV13-1, TRAJ28)
CAASPVPILWGWELPTHF

SEQ ID NO: 137226 - protein, 13 aa, Homo sapiens
  CDR3 for beta chain variable domain of TCR clone 68613 (TRBV15, TRBJ2-7)
CATSTTGHYEKYF

SEQ ID NO: 137227 - protein, 14 aa, Homo sapiens
  CDR3 for alpha chain variable domain of TCR clone 68614 (TRAV26-1, TRAJ38)
CIADNAGNNRKLIW

SEQ ID NO: 137228 - protein, 16 aa, Homo sapiens
  CDR3 for beta chain variable domain of TCR clone 68614 (TRBV20-1, TRBJ2-1)
CSARDLAGHSYNEQFF

SEQ ID NO: 137229 - protein, 15 aa, Homo sapiens
  CDR3 for alpha chain variable domain of TCR clone 68615 (TRAV12-2, TRAJ53)
CAVNGGGGRNYKLTF

SEQ ID NO: 137230 - protein, 14 aa, Homo sapiens
  CDR3 for beta chain variable domain of TCR clone 68615 (TRBV6-1, TRBJ1-3)
CASVQGGGGNTIYF

SEQ ID NO: 137231 - protein, 13 aa, Homo sapiens
  CDR3 for alpha chain variable domain of TCR clone 68616 (TRAV12-2, TRAJ20)
CDVYPSNDYKLSF

SEQ ID NO: 137232 - protein, 15 aa, Homo sapiens
  CDR3 for beta chain variable domain of TCR clone 68616 (TRBV27, TRBJ2-5)
CASSLYPRGGETQYF

SEQ ID NO: 137233 - protein, 14 aa, Homo sapiens
  CDR3 for alpha chain variable domain of TCR clone 68617 (TRAV1-2, TRAJ16)
CAVNRFSDGQKLLF

SEQ ID NO: 137234 - protein, 15 aa, Homo sapiens
  CDR3 for beta chain variable domain of TCR clone 68617 (TRBV13, TRBJ2-1)
CASSLLSGLNNEQFF

SEQ ID NO: 137235 - protein, 13 aa, Homo sapiens
  CDR3 for alpha chain variable domain of TCR clone 68618 (TRAV30, TRAJ6)
CGIIEGGSYIPTF

SEQ ID NO: 137236 - protein, 13 aa, Homo sapiens
  CDR3 for beta chain variable domain of TCR clone 68618 (TRBV5-4, TRBJ2-5)
CASSPVSQETQYF

SEQ ID NO: 137237 - protein, 14 aa, Homo sapiens
  CDR3 for alpha chain variable domain of TCR clone 68619 (TRAV35, TRAJ13)
CAGSPSGGYQKVTF

SEQ ID NO: 137238 - protein, 15 aa, Homo sapiens
  CDR3 for beta chain variable domain of TCR clone 68619 (TRBV12-4, TRBJ2-5)
CASSPPTGLQETQYF

SEQ ID NO: 137239 - protein, 11 aa, Homo sapiens
  CDR3 for alpha chain variable domain of TCR clone 68620 (TRAV2, TRAJ33)
CAVDSNYQLIW

SEQ ID NO: 137240 - protein, 15 aa, Homo sapiens
  CDR3 for beta chain variable domain of TCR clone 68620 (TRBV11-3, TRBJ2-3)
CASLKDGREGDTQYF

SEQ ID NO: 137241 - protein, 10 aa, Homo sapiens
  CDR3 for alpha chain variable domain of TCR clone 68621 (TRAV2, TRAJ34)
CAVVNDKLVF

SEQ ID NO: 137242 - protein, 15 aa, Homo sapiens
  CDR3 for beta chain variable domain of TCR clone 68621 (TRBV3-1, TRBJ2-2)
CASSQDWTRAGELFF

SEQ ID NO: 137243 - protein, 14 aa, Homo sapiens
  CDR3 for alpha chain variable domain of TCR clone 68622 (TRAV35, TRAJ24)
CAGPRRDSWGKLQF

SEQ ID NO: 137244 - protein, 12 aa, Homo sapiens
  CDR3 for beta chain variable domain of TCR clone 68622 (TRBV12-4, TRBJ2-3)
CASSLGLDTQYF

SEQ ID NO: 137245 - protein, 15 aa, Homo sapiens
  CDR3 for alpha chain variable domain of TCR clone 68623 (TRAV12-2, TRAJ53)
CTVNGGGGSNYKLTF

SEQ ID NO: 137246 - protein, 12 aa, Homo sapiens
  CDR3 for beta chain variable domain of TCR clone 68623 (TRBV7-6, TRBJ2-5)
CASSLSQETQYF

SEQ ID NO: 137247 - protein, 15 aa, Homo sapiens
  CDR3 for alpha chain variable domain of TCR clone 68624 (TRAV13-1, TRAJ44)
CAASRGGGTASKLNF

SEQ ID NO: 137248 - protein, 14 aa, Homo sapiens
  CDR3 for beta chain variable domain of TCR clone 68624 (TRBV7-2, TRBJ2-5)
CASSPRGSSETQYF

SEQ ID NO: 137249 - protein, 14 aa, Homo sapiens
  CDR3 for alpha chain variable domain of TCR clone 68625 (TRAV12-2, TRAJ13)
CAVKKTGGYQKVTF

SEQ ID NO: 137250 - protein, 14 aa, Homo sapiens
  CDR3 for beta chain variable domain of TCR clone 68625 (TRBV19, TRBJ2-1)
CARGARSFQWEQFF

SEQ ID NO: 137251 - protein, 12 aa, Homo sapiens
  CDR3 for alpha chain variable domain of TCR clone 68626 (TRAV13-1, TRAJ27)
CAAHANAGKSTF

SEQ ID NO: 137252 - protein, 14 aa, Homo sapiens
  CDR3 for beta chain variable domain of TCR clone 68626 (TRBV19, TRBJ2-2)
RASSGQGIAGELFF

SEQ ID NO: 137253 - protein, 13 aa, Homo sapiens
  CDR3 for alpha chain variable domain of TCR clone 68627 (TRAV35, TRAJ21)
CAGQLSNFNKFYF

SEQ ID NO: 137254 - protein, 11 aa, Homo sapiens
  CDR3 for beta chain variable domain of TCR clone 68627 (TRBV7-7, TRBJ2-5)
CASSSRETQYF

SEQ ID NO: 137255 - protein, 23 aa, Homo sapiens
  CDR3 for alpha chain variable domain of TCR clone 68628 (TRAV26-1, TRAJ38)
CIADNAGNNHIQNPDPAEYQLRD

SEQ ID NO: 137256 - protein, 13 aa, Homo sapiens
  CDR3 for beta chain variable domain of TCR clone 68628 (TRBV20-1, TRBJ1-1)
CSARGGGNTEAFF

SEQ ID NO: 137257 - protein, 15 aa, Homo sapiens
  CDR3 for alpha chain variable domain of TCR clone 68629 (TRAV26-1, TRAJ44)
CIVRANTGTASKLTF

SEQ ID NO: 137258 - protein, 12 aa, Homo sapiens
  CDR3 for beta chain variable domain of TCR clone 68629 (TRBV7-3, TRBJ2-1)
CASSFINNEQFF

SEQ ID NO: 137259 - protein, 18 aa, Homo sapiens
  CDR3 for alpha chain variable domain of TCR clone 68630 (TRAV21, TRAJ52)
CAVRPSPAGGTSYGKLTF

SEQ ID NO: 137260 - protein, 15 aa, Homo sapiens
  CDR3 for beta chain variable domain of TCR clone 68630 (TRBV19, TRBJ2-1)
CASSIVEGGYNEQFF

SEQ ID NO: 137261 - protein, 16 aa, Homo sapiens
  CDR3 for alpha chain variable domain of TCR clone 68631 (TRAV30, TRAJ24)
CGTEIVDADSWGKFQF

SEQ ID NO: 137262 - protein, 13 aa, Homo sapiens
  CDR3 for beta chain variable domain of TCR clone 68631 (TRBV7-8, TRBJ2-7)
CASSLTGGREQYF

SEQ ID NO: 137263 - protein, 11 aa, Homo sapiens
  CDR3 for alpha chain variable domain of TCR clone 68632 (TRAV12-3, TRAJ43)
CAMSVSNDMRF

SEQ ID NO: 137264 - protein, 16 aa, Homo sapiens
  CDR3 for beta chain variable domain of TCR clone 68632 (TRBV2, TRBJ2-3)
CASSTSVEGVTDMQYF

SEQ ID NO: 137265 - protein, 14 aa, Homo sapiens
  CDR3 for alpha chain variable domain of TCR clone 68633 (TRAV26-1, TRAJ45)
CIEVAGGGADGLTF

SEQ ID NO: 137266 - protein, 13 aa, Homo sapiens
  CDR3 for beta chain variable domain of TCR clone 68633 (TRBV7-6, TRBJ1-2)
CASSLVADYGYTF

SEQ ID NO: 137267 - protein, 15 aa, Homo sapiens
  CDR3 for alpha chain variable domain of TCR clone 68634 (TRAV8-3, TRAJ45)
CASSYSGGGADGLTF

SEQ ID NO: 137268 - protein, 15 aa, Homo sapiens
  CDR3 for beta chain variable domain of TCR clone 68634 (TRBV12-4, TRBJ2-5)
CASSPPTGLQETQYF

SEQ ID NO: 137269 - protein, 14 aa, Homo sapiens
  CDR3 for alpha chain variable domain of TCR clone 68635 (TRAV12-3, TRAJ7)
CAMSEIGGNNRLAF

SEQ ID NO: 137270 - protein, 12 aa, Homo sapiens
  CDR3 for beta chain variable domain of TCR clone 68635 (TRBV5-4, TRBJ1-1)
CASSLDRREAFL

SEQ ID NO: 137271 - protein, 12 aa, Homo sapiens
  CDR3 for alpha chain variable domain of TCR clone 68636 (TRAV12-1, TRAJ40)
CVVYSGTYKYIF

SEQ ID NO: 137272 - protein, 18 aa, Homo sapiens
  CDR3 for beta chain variable domain of TCR clone 68636 (TRBV11-2, TRBJ2-3)
CASSLGGAWRGAPNTQYF

SEQ ID NO: 137273 - protein, 17 aa, Homo sapiens
  CDR3 for alpha chain variable domain of TCR clone 68637 (TRAV3, TRAJ6)
CAVRDGPRAGGSDIPTF

SEQ ID NO: 137274 - protein, 16 aa, Homo sapiens
  CDR3 for beta chain variable domain of TCR clone 68637 (TRBV7-8, TRBJ2-3)
CASSTEGQRETDTQYF

SEQ ID NO: 137275 - protein, 11 aa, Homo sapiens
  CDR3 for alpha chain variable domain of TCR clone 68638 (TRAV1-1, TRAJ30)
CAVSRDDKIIF

SEQ ID NO: 137276 - protein, 16 aa, Homo sapiens
  CDR3 for beta chain variable domain of TCR clone 68638 (TRBV6-3, TRBJ2-3)
CASSQRSSGVSDTQYF

SEQ ID NO: 137277 - protein, 11 aa, Homo sapiens
  CDR3 for alpha chain variable domain of TCR clone 68639 (TRAV27, TRAJ20)
CAGADDYKLSF

SEQ ID NO: 137278 - protein, 13 aa, Homo sapiens
  CDR3 for beta chain variable domain of TCR clone 68639 (TRBV7-9, TRBJ1-2)
CASSLKQNYGYTF

SEQ ID NO: 137279 - protein, 18 aa, Homo sapiens
  CDR3 for alpha chain variable domain of TCR clone 68640 (TRAV26-2, )
CILTDIQNPDPAVYQLRD

SEQ ID NO: 137280 - protein, 17 aa, Homo sapiens
  CDR3 for beta chain variable domain of TCR clone 68640 (TRBV7-8, TRBJ2-6)
CASSAGTGGAGANVLTF

SEQ ID NO: 137281 - protein, 12 aa, Homo sapiens
  CDR3 for alpha chain variable domain of TCR clone 68641 (TRAV1-2, TRAJ29)
CAVPSGNTPLVF

SEQ ID NO: 137282 - protein, 12 aa, Homo sapiens
  CDR3 for beta chain variable domain of TCR clone 68641 (TRBV7-9, TRBJ2-7)
CTSSFGSYEQYF

SEQ ID NO: 137283 - protein, 12 aa, Homo sapiens
  CDR3 for alpha chain variable domain of TCR clone 68642 (TRAV13-1, TRAJ21)
CAAKEGSNKFYF

SEQ ID NO: 137284 - protein, 20 aa, Homo sapiens
  CDR3 for beta chain variable domain of TCR clone 68642 (TRBV7-8, TRBJ2-2)
CASSHLFPGPTIHITGELFF

SEQ ID NO: 137285 - protein, 11 aa, Homo sapiens
  CDR3 for alpha chain variable domain of TCR clone 68643 (TRAV1-2, TRAJ31)
CAVNNNARLMF

SEQ ID NO: 137286 - protein, 14 aa, Homo sapiens
  CDR3 for beta chain variable domain of TCR clone 68643 (TRBV19, TRBJ2-7)
CASSIRRQGGEQYF

SEQ ID NO: 137287 - protein, 13 aa, Homo sapiens
  CDR3 for alpha chain variable domain of TCR clone 68644 (TRAV2, TRAJ40)
CAVVTSGTHKYIF

SEQ ID NO: 137288 - protein, 16 aa, Homo sapiens
  CDR3 for beta chain variable domain of TCR clone 68644 (TRBV19, TRBJ2-2)
CASRSPGTGATGELFF

SEQ ID NO: 137289 - protein, 15 aa, Homo sapiens
  CDR3 for alpha chain variable domain of TCR clone 68645 (TRAV27, TRAJ38)
CAARRNADNNRKLIR

SEQ ID NO: 137290 - protein, 13 aa, Homo sapiens
  CDR3 for beta chain variable domain of TCR clone 68645 (TRBV12-5, TRBJ2-3)
CASGDRQSDTQYF

SEQ ID NO: 137291 - protein, 15 aa, Homo sapiens
  CDR3 for alpha chain variable domain of TCR clone 68646 (TRAV3, TRAJ10)
CAVRDGTGGGNKLTF

SEQ ID NO: 137292 - protein, 17 aa, Homo sapiens
  CDR3 for beta chain variable domain of TCR clone 68646 (TRBV4-2, TRBJ1-4)
CASSLVQREVEKLFLAV

SEQ ID NO: 137293 - protein, 15 aa, Homo sapiens
  CDR3 for alpha chain variable domain of TCR clone 68647 (TRAV8-2, TRAJ27)
CVVSDRGTNAGKSTF

SEQ ID NO: 137294 - protein, 14 aa, Homo sapiens
  CDR3 for beta chain variable domain of TCR clone 68647 (TRBV6-6, TRBJ2-7)
CASQQGIRSYEQYF

SEQ ID NO: 137295 - protein, 13 aa, Homo sapiens
  CDR3 for alpha chain variable domain of TCR clone 68648 (TRAV21, TRAJ27)
CAARPGNAGQSTL

SEQ ID NO: 137296 - protein, 14 aa, Homo sapiens
  CDR3 for beta chain variable domain of TCR clone 68648 (TRBV7-6, TRBJ2-3)
CASSLGTVTDTQYF

SEQ ID NO: 137297 - protein, 13 aa, Homo sapiens
  CDR3 for alpha chain variable domain of TCR clone 68649 (TRAV8-6, TRAJ49)
CAVITNTGDQFYF

SEQ ID NO: 137298 - protein, 14 aa, Homo sapiens
  CDR3 for beta chain variable domain of TCR clone 68649 (TRBV19, TRBJ2-1)
CASPTFVLSGEQFF

SEQ ID NO: 137299 - protein, 14 aa, Homo sapiens
  CDR3 for alpha chain variable domain of TCR clone 68650 (TRAV20, TRAJ40)
CAVSLTSGTYKYIF

SEQ ID NO: 137300 - protein, 21 aa, Homo sapiens
  CDR3 for beta chain variable domain of TCR clone 68650 (TRBV27, TRBJ1-1)
CASSFPETARREFSLKLSLDK

SEQ ID NO: 137301 - protein, 15 aa, Homo sapiens
  CDR3 for alpha chain variable domain of TCR clone 68651 (TRAV14/DV4, TRAJ12)
CTMREERDSSYKLIF

SEQ ID NO: 137302 - protein, 16 aa, Homo sapiens
  CDR3 for beta chain variable domain of TCR clone 68651 (TRBV11-2, TRBJ1-2)
CASSLDRGGNNYGYTF

SEQ ID NO: 137303 - protein, 10 aa, Homo sapiens
  CDR3 for alpha chain variable domain of TCR clone 68652 (TRAV38-1, TRAJ34)
CAFMDDKLIF

SEQ ID NO: 137304 - protein, 16 aa, Homo sapiens
  CDR3 for beta chain variable domain of TCR clone 68652 (TRBV7-3, TRBJ2-2)
CASSLKRGTLSGELFF

SEQ ID NO: 137305 - protein, 12 aa, Homo sapiens
  CDR3 for alpha chain variable domain of TCR clone 68653 (TRAV12-3, TRAJ17)
CAMTLTGNKLTL

SEQ ID NO: 137306 - protein, 15 aa, Homo sapiens
  CDR3 for beta chain variable domain of TCR clone 68653 (TRBV20-1, TRBJ2-7)
CSARDRVAGMDEQYF

SEQ ID NO: 137307 - protein, 14 aa, Homo sapiens
  CDR3 for alpha chain variable domain of TCR clone 68654 (TRAV13-1, TRAJ44)
CAAKATGTASKLTF

SEQ ID NO: 137308 - protein, 14 aa, Homo sapiens
  CDR3 for beta chain variable domain of TCR clone 68654 (TRBV7-2, TRBJ2-7)
CASRSQGAAYEQYF

SEQ ID NO: 137309 - protein, 13 aa, Homo sapiens
  CDR3 for alpha chain variable domain of TCR clone 68655 (TRAV13-1, TRAJ21)
CAASIYNFNKFYF

SEQ ID NO: 137310 - protein, 17 aa, Homo sapiens
  CDR3 for beta chain variable domain of TCR clone 68655 (TRBV20-1, TRBJ2-1)
CSASWGSSGGPNNEQFF

SEQ ID NO: 137311 - protein, 16 aa, Homo sapiens
  CDR3 for alpha chain variable domain of TCR clone 68656 (TRAV30, TRAJ24)
CGTEIVDADSWGKFQF

SEQ ID NO: 137312 - protein, 12 aa, Homo sapiens
  CDR3 for beta chain variable domain of TCR clone 68656 (TRBV11-2, TRBJ2-2)
CDSSLGGGELFF

SEQ ID NO: 137313 - protein, 11 aa, Homo sapiens
  CDR3 for alpha chain variable domain of TCR clone 68657 (TRAV21, TRAJ11)
CAVNGYSTLTF

SEQ ID NO: 137314 - protein, 16 aa, Homo sapiens
  CDR3 for beta chain variable domain of TCR clone 68657 (TRBV7-3, TRBJ2-1)
CASSLVSGSSNNEQFF

SEQ ID NO: 137315 - protein, 18 aa, Homo sapiens
  CDR3 for alpha chain variable domain of TCR clone 68658 (TRAV9-2, TRAJ52)
CALSRHNAGGPSYGKLTF

SEQ ID NO: 137316 - protein, 13 aa, Homo sapiens
  CDR3 for beta chain variable domain of TCR clone 68658 (TRBV7-9, TRBJ1-2)
CASSLKQNYGYTF

SEQ ID NO: 137317 - protein, 10 aa, Homo sapiens
  CDR3 for alpha chain variable domain of TCR clone 68659 (TRAV8-4, TRAJ43)
CAVSADDMRF

SEQ ID NO: 137318 - protein, 15 aa, Homo sapiens
  CDR3 for beta chain variable domain of TCR clone 68659 (TRBV19, TRBJ1-2)
CASSVGQVLNYGYTF

SEQ ID NO: 137319 - protein, 15 aa, Homo sapiens
  CDR3 for alpha chain variable domain of TCR clone 68660 (TRAV12-1, TRAJ41)
CVVNSRTGSGYALNF

SEQ ID NO: 137320 - protein, 11 aa, Homo sapiens
  CDR3 for beta chain variable domain of TCR clone 68660 (TRBV6-4, TRBJ2-1)
CASSDSCAQFF

SEQ ID NO: 137321 - protein, 16 aa, Homo sapiens
  CDR3 for alpha chain variable domain of TCR clone 68661 (TRAV26-1, TRAJ53)
CIVRVAMGGSNYKLTF

SEQ ID NO: 137322 - protein, 12 aa, Homo sapiens
  CDR3 for beta chain variable domain of TCR clone 68661 (TRBV7-9, TRBJ1-5)
CASIPQGQPQHF

SEQ ID NO: 137323 - protein, 16 aa, Homo sapiens
  CDR3 for alpha chain variable domain of TCR clone 68662 (TRAV3, TRAJ3)
CAVRDRAKSNASKIIF

SEQ ID NO: 137324 - protein, 13 aa, Homo sapiens
  CDR3 for beta chain variable domain of TCR clone 68662 (TRBV10-3, TRBJ2-7)
CASKLAVNYEQYF

SEQ ID NO: 137325 - protein, 13 aa, Homo sapiens
  CDR3 for alpha chain variable domain of TCR clone 68663 (TRAV21, TRAJ6)
CVVFPGGSYIPTF

SEQ ID NO: 137326 - protein, 14 aa, Homo sapiens
  CDR3 for beta chain variable domain of TCR clone 68663 (TRBV20-1, TRBJ1-3)
CSASPTGAGNTIYF

SEQ ID NO: 137327 - protein, 12 aa, Homo sapiens
  CDR3 for alpha chain variable domain of TCR clone 68664 (TRAV12-3, TRAJ17)
CAMTLTGNKLTF

SEQ ID NO: 137328 - protein, 14 aa, Homo sapiens
  CDR3 for beta chain variable domain of TCR clone 68664 (TRBV20-1, TRBJ2-7)
CSAKTGTGGYEQYF

SEQ ID NO: 137329 - protein, 12 aa, Homo sapiens
  CDR3 for alpha chain variable domain of TCR clone 68665 (TRAV17, TRAJ4)
CATDGGYNKLIF

SEQ ID NO: 137330 - protein, 13 aa, Homo sapiens
  CDR3 for beta chain variable domain of TCR clone 68665 (TRBV29-1, TRBJ2-2)
CSTTGVNTGDLFF

SEQ ID NO: 137331 - protein, 13 aa, Homo sapiens
  CDR3 for alpha chain variable domain of TCR clone 68666 (TRAV12-1, TRAJ22)
CVASGGSARHLTF

SEQ ID NO: 137332 - protein, 12 aa, Homo sapiens
  CDR3 for beta chain variable domain of TCR clone 68666 (TRBV29-1, TRBJ2-3)
CSVTGGADTQYF

SEQ ID NO: 137333 - protein, 15 aa, Homo sapiens
  CDR3 for alpha chain variable domain of TCR clone 68667 (TRAV35, TRAJ23)
CAGPLVNNQGGKLIF

SEQ ID NO: 137334 - protein, 14 aa, Homo sapiens
  CDR3 for beta chain variable domain of TCR clone 68667 (TRBV7-9, TRBJ1-1)
CASTPLQSYTEAFF

SEQ ID NO: 137335 - protein, 15 aa, Homo sapiens
  CDR3 for alpha chain variable domain of TCR clone 68668 (TRAV21, TRAJ53)
CATLNSGGSNYKLTF

SEQ ID NO: 137336 - protein, 14 aa, Homo sapiens
  CDR3 for beta chain variable domain of TCR clone 68668 (TRBV7-7, TRBJ2-2)
CATRQDSDTGELFF

SEQ ID NO: 137337 - protein, 15 aa, Homo sapiens
  CDR3 for alpha chain variable domain of TCR clone 68669 (TRAV12-1, TRAJ44)
FVADLPTGTASKLTF

SEQ ID NO: 137338 - protein, 13 aa, Homo sapiens
  CDR3 for beta chain variable domain of TCR clone 68669 (TRBV6-5, TRBJ2-5)
CASSPQGGETQYF

SEQ ID NO: 137339 - protein, 15 aa, Homo sapiens
  CDR3 for alpha chain variable domain of TCR clone 68670 (TRAV23/DV6, TRAJ30)
CAASSQESRDDKSIF

SEQ ID NO: 137340 - protein, 17 aa, Homo sapiens
  CDR3 for beta chain variable domain of TCR clone 68670 (TRBV4-3, TRBJ2-1)
CASSQFSSGRASGEQFF

SEQ ID NO: 137341 - protein, 13 aa, Homo sapiens
  CDR3 for alpha chain variable domain of TCR clone 68671 (TRAV3, TRAJ20)
CAVRSLNDYKLSF

SEQ ID NO: 137342 - protein, 13 aa, Homo sapiens
  CDR3 for beta chain variable domain of TCR clone 68671 (TRBV7-3, TRBJ1-1)
CASSQDRGAEAFF

SEQ ID NO: 137343 - protein, 14 aa, Homo sapiens
  CDR3 for alpha chain variable domain of TCR clone 68672 (TRAV38-1, TRAJ45)
CASHSGGGADGLTF

SEQ ID NO: 137344 - protein, 13 aa, Homo sapiens
  CDR3 for beta chain variable domain of TCR clone 68672 (TRBV10-3, TRBJ1-2)
CAISERDIYGYTF

SEQ ID NO: 137345 - protein, 12 aa, Homo sapiens
  CDR3 for alpha chain variable domain of TCR clone 68673 (TRAV36/DV7, TRAJ40)
CAVGTGTYKYIF

SEQ ID NO: 137346 - protein, 15 aa, Homo sapiens
  CDR3 for beta chain variable domain of TCR clone 68673 (TRBV7-2, TRBJ2-1)
CASSLASGRVNEQFF

SEQ ID NO: 137347 - protein, 13 aa, Homo sapiens
  CDR3 for alpha chain variable domain of TCR clone 68674 (TRAV21, TRAJ57)
CAVTQGGSEKLVF

SEQ ID NO: 137348 - protein, 15 aa, Homo sapiens
  CDR3 for beta chain variable domain of TCR clone 68674 (TRBV5-1, TRBJ1-1)
FASSSTTGTNTEAFF

SEQ ID NO: 137349 - protein, 12 aa, Homo sapiens
  CDR3 for alpha chain variable domain of TCR clone 68675 (TRAV12-3, TRAJ17)
CAMTLTGNKPTF

SEQ ID NO: 137350 - protein, 16 aa, Homo sapiens
  CDR3 for beta chain variable domain of TCR clone 68675 (TRBV7-3, TRBJ2-1)
CASSLEGYRSYNEQFF

SEQ ID NO: 137351 - protein, 15 aa, Homo sapiens
  CDR3 for alpha chain variable domain of TCR clone 68676 (TRAV12-3, TRAJ27)
CAMRAYNTNAGKSTV

SEQ ID NO: 137352 - protein, 13 aa, Homo sapiens
  CDR3 for beta chain variable domain of TCR clone 68676 (TRBV11-2, TRBJ2-5)
CASSRGPSETQYF

SEQ ID NO: 137353 - protein, 13 aa, Homo sapiens
  CDR3 for alpha chain variable domain of TCR clone 68677 (TRAV21, TRAJ57)
CAVTQGGSEKLVV

SEQ ID NO: 137354 - protein, 15 aa, Homo sapiens
  CDR3 for beta chain variable domain of TCR clone 68677 (TRBV5-1, TRBJ1-1)
CASSSTTGTNTEAFF

SEQ ID NO: 137355 - protein, 14 aa, Homo sapiens
  CDR3 for alpha chain variable domain of TCR clone 68678 (TRAV2, TRAJ9)
CAVEDRSGGFKTIF

SEQ ID NO: 137356 - protein, 15 aa, Homo sapiens
  CDR3 for beta chain variable domain of TCR clone 68678 (TRBV7-9, TRBJ2-2)
CASGPLDTFPGELFF

SEQ ID NO: 137357 - protein, 17 aa, Homo sapiens
  CDR3 for alpha chain variable domain of TCR clone 68679 (TRAV13-1, TRAJ53)
CAASWKSSGGSNYKLTF

SEQ ID NO: 137358 - protein, 18 aa, Homo sapiens
  CDR3 for beta chain variable domain of TCR clone 68679 (TRBV7-9, TRBJ2-1)
CQQPQPGALLRSYNEQFF

SEQ ID NO: 137359 - protein, 11 aa, Homo sapiens
  CDR3 for alpha chain variable domain of TCR clone 68680 (TRAV12-3, TRAJ16)
LTGGDGQKLLF

SEQ ID NO: 137360 - protein, 13 aa, Homo sapiens
  CDR3 for beta chain variable domain of TCR clone 68680 (TRBV12-4, TRBJ1-4)
CASAMSHNEKLFF

SEQ ID NO: 137361 - protein, 17 aa, Homo sapiens
  CDR3 for alpha chain variable domain of TCR clone 68681 (TRAV3, TRAJ38)
CAVRDCLNAGSNRKLIW

SEQ ID NO: 137362 - protein, 16 aa, Homo sapiens
  CDR3 for beta chain variable domain of TCR clone 68681 (TRBV20-1, TRBJ1-4)
CSAPGQGLLTNEKLFF

SEQ ID NO: 137363 - protein, 11 aa, Homo sapiens
  CDR3 for alpha chain variable domain of TCR clone 68682 (TRAV21, TRAJ34)
CAVTNTDKLIF

SEQ ID NO: 137364 - protein, 16 aa, Homo sapiens
  CDR3 for beta chain variable domain of TCR clone 68682 (TRBV18, TRBJ1-1)
CASSPGVGGRGGEAVF

SEQ ID NO: 137365 - protein, 16 aa, Homo sapiens
  CDR3 for alpha chain variable domain of TCR clone 68683 (TRAV26-1, TRAJ53)
CIVRVAMGGSNYKLTF

SEQ ID NO: 137366 - protein, 12 aa, Homo sapiens
  CDR3 for beta chain variable domain of TCR clone 68683 (TRBV7-9, TRBJ1-5)
CASSQQGQPQHF

SEQ ID NO: 137367 - protein, 14 aa, Homo sapiens
  CDR3 for alpha chain variable domain of TCR clone 68684 (TRAV20, TRAJ56)
CAVQFGGANSKLTF

SEQ ID NO: 137368 - protein, 14 aa, Homo sapiens
  CDR3 for beta chain variable domain of TCR clone 68684 (TRBV4-1, TRBJ2-5)
CASSRSGSGETQYF

SEQ ID NO: 137369 - protein, 11 aa, Homo sapiens
  CDR3 for alpha chain variable domain of TCR clone 68685 (TRAV1-2, TRAJ20)
CAVANDYKLSF

SEQ ID NO: 137370 - protein, 18 aa, Homo sapiens
  CDR3 for beta chain variable domain of TCR clone 68685 (TRBV20-1, TRBJ2-6)
CSAETTPTHGSGANVLTS

SEQ ID NO: 137371 - protein, 13 aa, Homo sapiens
  CDR3 for alpha chain variable domain of TCR clone 68686 (TRAV26-1, TRAJ33)
CIVRVDSNYQLIW

SEQ ID NO: 137372 - protein, 15 aa, Homo sapiens
  CDR3 for beta chain variable domain of TCR clone 68686 (TRBV7-2, TRBJ1-5)
CASSFSAGINQTQHF

SEQ ID NO: 137373 - protein, 16 aa, Homo sapiens
  CDR3 for alpha chain variable domain of TCR clone 68687 (TRAV12-3, TRAJ53)
CAVSVGSGGSNYKLTF

SEQ ID NO: 137374 - protein, 11 aa, Homo sapiens
  CDR3 for beta chain variable domain of TCR clone 68687 (TRBV29-1, TRBJ2-5)
CSVASGETQYF

SEQ ID NO: 137375 - protein, 12 aa, Homo sapiens
  CDR3 for alpha chain variable domain of TCR clone 68688 (TRAV8-3, TRAJ26)
CAGDNYGQNFVF

SEQ ID NO: 137376 - protein, 15 aa, Homo sapiens
  CDR3 for beta chain variable domain of TCR clone 68688 (TRBV7-8, TRBJ2-7)
CASSLERAGSYEQYF

SEQ ID NO: 137377 - protein, 14 aa, Homo sapiens
  CDR3 for alpha chain variable domain of TCR clone 68689 (TRAV12-3, TRAJ10)
SHLPLPGGGNKLTF

SEQ ID NO: 137378 - protein, 11 aa, Homo sapiens
  CDR3 for beta chain variable domain of TCR clone 68689 (TRBV19, TRBJ1-1)
CASSIGSEAFF

SEQ ID NO: 137379 - protein, 14 aa, Homo sapiens
  CDR3 for alpha chain variable domain of TCR clone 68690 (TRAV2, TRAJ9)
CAVEDRSGGFKTIF

SEQ ID NO: 137380 - protein, 16 aa, Homo sapiens
  CDR3 for beta chain variable domain of TCR clone 68690 (TRBV7-3, TRBJ2-2)
CASSLKRGTLSGELFL

SEQ ID NO: 137381 - protein, 13 aa, Homo sapiens
  CDR3 for alpha chain variable domain of TCR clone 68691 (TRAV21, TRAJ27)
CAARPGNAGKSTS

SEQ ID NO: 137382 - protein, 13 aa, Homo sapiens
  CDR3 for beta chain variable domain of TCR clone 68691 (TRBV7-3, TRBJ2-7)
CASSQAGGYEQYF

SEQ ID NO: 137383 - protein, 15 aa, Homo sapiens
  CDR3 for alpha chain variable domain of TCR clone 68692 (TRAV17, TRAJ4)
CATGTWSGGYNKLIF

SEQ ID NO: 137384 - protein, 13 aa, Homo sapiens
  CDR3 for beta chain variable domain of TCR clone 68692 (TRBV6-6, TRBJ2-7)
CASSPKHLDEQYF

SEQ ID NO: 137385 - protein, 14 aa, Homo sapiens
  CDR3 for alpha chain variable domain of TCR clone 68693 (TRAV12-3, TRAJ9)
CAMSVETGGFKTIF

SEQ ID NO: 137386 - protein, 13 aa, Homo sapiens
  CDR3 for beta chain variable domain of TCR clone 68693 (TRBV19, TRBJ2-2)
CASKVSAAGELFF

SEQ ID NO: 137387 - protein, 14 aa, Homo sapiens
  CDR3 for alpha chain variable domain of TCR clone 68694 (TRAV8-4, TRAJ17)
CAVSSPAAGNKLTF

SEQ ID NO: 137388 - protein, 15 aa, Homo sapiens
  CDR3 for beta chain variable domain of TCR clone 68694 (TRBV6-3, TRBJ2-7)
CASSSPGTVFYEQYF

SEQ ID NO: 137389 - protein, 12 aa, Homo sapiens
  CDR3 for alpha chain variable domain of TCR clone 68695 (TRAV16, TRAJ56)
CAPTGANSKLTF

SEQ ID NO: 137390 - protein, 17 aa, Homo sapiens
  CDR3 for beta chain variable domain of TCR clone 68695 (TRBV27, TRBJ2-6)
CASSLKGFASGANVLTF

SEQ ID NO: 137391 - protein, 14 aa, Homo sapiens
  CDR3 for alpha chain variable domain of TCR clone 68696 (TRAV26-1, TRAJ34)
CIVRVAYNTDKLIF

SEQ ID NO: 137392 - protein, 12 aa, Homo sapiens
  CDR3 for beta chain variable domain of TCR clone 68696 (TRBV14, TRBJ2-5)
CASSHLKETQYF

SEQ ID NO: 137393 - protein, 14 aa, Homo sapiens
  CDR3 for alpha chain variable domain of TCR clone 68697 (TRAV1-2, TRAJ8)
CAVREDTGFQKLVF

SEQ ID NO: 137394 - protein, 18 aa, Homo sapiens
  CDR3 for beta chain variable domain of TCR clone 68697 (TRBV10-3, TRBJ2-3)
CAISESRVGPMRGDTQYF

SEQ ID NO: 137395 - protein, 12 aa, Homo sapiens
  CDR3 for alpha chain variable domain of TCR clone 68698 (TRAV1-2, TRAJ26)
CAVRYYGRNFVF

SEQ ID NO: 137396 - protein, 14 aa, Homo sapiens
  CDR3 for beta chain variable domain of TCR clone 68698 (TRBV11-1, TRBJ2-7)
CASSFRQGSYEQYF

SEQ ID NO: 137397 - protein, 11 aa, Homo sapiens
  CDR3 for alpha chain variable domain of TCR clone 68699 (TRAV23/DV6, TRAJ58)
CAARLLRGETS

SEQ ID NO: 137398 - protein, 13 aa, Homo sapiens
  CDR3 for beta chain variable domain of TCR clone 68699 (TRBV10-3, TRBJ2-7)
CASKLAVNYEQYF

SEQ ID NO: 137399 - protein, 15 aa, Homo sapiens
  CDR3 for alpha chain variable domain of TCR clone 68700 (TRAV3, TRAJ9)
CAVRDSNTGGFKTIF

SEQ ID NO: 137400 - protein, 14 aa, Homo sapiens
  CDR3 for beta chain variable domain of TCR clone 68700 (TRBV20-1, TRBJ1-1)
CSAQTRIGGTEAFF

SEQ ID NO: 137401 - protein, 16 aa, Homo sapiens
  CDR3 for alpha chain variable domain of TCR clone 68701 (TRAV12-3, TRAJ53)
CAMSVGSGGSNYKLTL

SEQ ID NO: 137402 - protein, 11 aa, Homo sapiens
  CDR3 for beta chain variable domain of TCR clone 68701 (TRBV29-1, TRBJ2-5)
CSVASGETQYF

SEQ ID NO: 137403 - protein, 11 aa, Homo sapiens
  CDR3 for alpha chain variable domain of TCR clone 68702 (TRAV3, TRAJ21)
CAVGNFNKFYF

SEQ ID NO: 137404 - protein, 14 aa, Homo sapiens
  CDR3 for beta chain variable domain of TCR clone 68702 (TRBV7-3, TRBJ2-7)
CASSLKADSYEQYF

SEQ ID NO: 137405 - protein, 16 aa, Homo sapiens
  CDR3 for alpha chain variable domain of TCR clone 68703 (TRAV3, TRAJ23)
CAVKIGIYNQGGKLIF

SEQ ID NO: 137406 - protein, 15 aa, Homo sapiens
  CDR3 for beta chain variable domain of TCR clone 68703 (TRBV20-1, TRBJ2-7)
CSARDRVSGMDEQYF

SEQ ID NO: 137407 - protein, 14 aa, Homo sapiens
  CDR3 for alpha chain variable domain of TCR clone 68704 (TRAV1-2, TRAJ29)
CAVRELTSATPLVF

SEQ ID NO: 137408 - protein, 16 aa, Homo sapiens
  CDR3 for beta chain variable domain of TCR clone 68704 (TRBV20-1, TRBJ2-1)
CSALTWTSGSYNEQFF

SEQ ID NO: 137409 - protein, 14 aa, Homo sapiens
  CDR3 for alpha chain variable domain of TCR clone 68705 (TRAV12-2, TRAJ13)
CAVKKTGGYQKVTF

SEQ ID NO: 137410 - protein, 13 aa, Homo sapiens
  CDR3 for beta chain variable domain of TCR clone 68705 (TRBV7-6, TRBJ1-2)
CASSLVADYGYTF

SEQ ID NO: 137411 - protein, 14 aa, Homo sapiens
  CDR3 for alpha chain variable domain of TCR clone 68706 (TRAV4, TRAJ26)
RLVGPHNYGQNFVF

SEQ ID NO: 137412 - protein, 17 aa, Homo sapiens
  CDR3 for beta chain variable domain of TCR clone 68706 (TRBV24-1, TRBJ2-1)
CATSDVSTSGTYNEQFF

SEQ ID NO: 137413 - protein, 14 aa, Homo sapiens
  CDR3 for alpha chain variable domain of TCR clone 68707 (TRAV9-2, TRAJ9)
CALTLNTGGFKTIF

SEQ ID NO: 137414 - protein, 15 aa, Homo sapiens
  CDR3 for beta chain variable domain of TCR clone 68707 (TRBV7-6, TRBJ2-1)
CQQRSGASSYNEQFF

SEQ ID NO: 137415 - protein, 15 aa, Homo sapiens
  CDR3 for alpha chain variable domain of TCR clone 68708 (TRAV26-1, TRAJ29)
CIVRVEGSGNTPLVF

SEQ ID NO: 137416 - protein, 14 aa, Homo sapiens
  CDR3 for beta chain variable domain of TCR clone 68708 (TRBV18, TRBJ2-5)
CASSPGMSQETQYF

SEQ ID NO: 137417 - protein, 10 aa, Homo sapiens
  CDR3 for alpha chain variable domain of TCR clone 68709 (TRAV1-2, TRAJ31)
CAFFDARLMF

SEQ ID NO: 137418 - protein, 13 aa, Homo sapiens
  CDR3 for beta chain variable domain of TCR clone 68709 (TRBV7-3, TRBJ1-1)
CASSQDWGAEAFF

SEQ ID NO: 137419 - protein, 14 aa, Homo sapiens
  CDR3 for alpha chain variable domain of TCR clone 68710 (TRAV13-1, TRAJ3)
CAASKSRSASKIIF

SEQ ID NO: 137420 - protein, 13 aa, Homo sapiens
  CDR3 for beta chain variable domain of TCR clone 68710 (TRBV25-1, TRBJ2-5)
CASSESGRETQYF

SEQ ID NO: 137421 - protein, 14 aa, Homo sapiens
  CDR3 for alpha chain variable domain of TCR clone 68711 (TRAV13-1, TRAJ6)
CAASITGGSYIPTF

SEQ ID NO: 137422 - protein, 14 aa, Homo sapiens
  CDR3 for beta chain variable domain of TCR clone 68711 (TRBV7-2, TRBJ2-5)
CASSPRGSSETQYF

SEQ ID NO: 137423 - protein, 17 aa, Homo sapiens
  CDR3 for alpha chain variable domain of TCR clone 68712 (TRAV3, TRAJ12)
CAVRDGGRMDSSYKLIF

SEQ ID NO: 137424 - protein, 14 aa, Homo sapiens
  CDR3 for beta chain variable domain of TCR clone 68712 (TRBV7-2, TRBJ2-5)
CASSPRGSSETQYF

SEQ ID NO: 137425 - protein, 13 aa, Homo sapiens
  CDR3 for alpha chain variable domain of TCR clone 68713 (TRAV20, TRAJ48)
CAVQGVGNEKLTF

SEQ ID NO: 137426 - protein, 14 aa, Homo sapiens
  CDR3 for beta chain variable domain of TCR clone 68713 (TRBV27, TRBJ2-7)
CASSFQDGPYEQYF

SEQ ID NO: 137427 - protein, 15 aa, Homo sapiens
  CDR3 for alpha chain variable domain of TCR clone 68714 (TRAV3, TRAJ3)
CAVRDRDSSASKIIF

SEQ ID NO: 137428 - protein, 18 aa, Homo sapiens
  CDR3 for beta chain variable domain of TCR clone 68714 (TRBV25-1, TRBJ1-2)
CASSGLQNGQGLIYGYTF

SEQ ID NO: 137429 - protein, 16 aa, Homo sapiens
  CDR3 for alpha chain variable domain of TCR clone 68715 (TRAV35, TRAJ28)
CAGYLYSGAGSYQLTF

SEQ ID NO: 137430 - protein, 13 aa, Homo sapiens
  CDR3 for beta chain variable domain of TCR clone 68715 (TRBV7-2, TRBJ2-2)
CASSLAVTGELFF

SEQ ID NO: 137431 - protein, 13 aa, Homo sapiens
  CDR3 for alpha chain variable domain of TCR clone 68716 (TRAV27, TRAJ42)
CAGARGSQGNHIF

SEQ ID NO: 137432 - protein, 15 aa, Homo sapiens
  CDR3 for beta chain variable domain of TCR clone 68716 (TRBV10-3, TRBJ2-2)
CAIRTDREDTGELFF

SEQ ID NO: 137433 - protein, 16 aa, Homo sapiens
  CDR3 for alpha chain variable domain of TCR clone 68717 (TRAV12-3, TRAJ53)
CAMSPGSGGSNYKLTF

SEQ ID NO: 137434 - protein, 15 aa, Homo sapiens
  CDR3 for beta chain variable domain of TCR clone 68717 (TRBV11-2, TRBJ2-1)
CASSKNRGLIYEQFF

SEQ ID NO: 137435 - protein, 16 aa, Homo sapiens
  CDR3 for alpha chain variable domain of TCR clone 68718 (TRAV4, TRAJ18)
CCVLLIGGSTLGRLYF

SEQ ID NO: 137436 - protein, 12 aa, Homo sapiens
  CDR3 for beta chain variable domain of TCR clone 68718 (TRBV6-3, TRBJ2-7)
CASSLTPYERYF

SEQ ID NO: 137437 - protein, 15 aa, Homo sapiens
  CDR3 for alpha chain variable domain of TCR clone 68719 (TRAV2, TRAJ28)
CAVPYSGAGSYQLTF

SEQ ID NO: 137438 - protein, 15 aa, Homo sapiens
  CDR3 for beta chain variable domain of TCR clone 68719 (TRBV7-2, TRBJ2-1)
CASSFQADEYNEQFF

SEQ ID NO: 137439 - protein, 11 aa, Homo sapiens
  CDR3 for alpha chain variable domain of TCR clone 68720 (TRAV12-1, TRAJ40)
CVVPGTYKYIF

SEQ ID NO: 137440 - protein, 13 aa, Homo sapiens
  CDR3 for beta chain variable domain of TCR clone 68720 (TRBV19, TRBJ2-7)
CASSPRQSYEQYF

SEQ ID NO: 137441 - protein, 16 aa, Homo sapiens
  CDR3 for alpha chain variable domain of TCR clone 68721 (TRAV3, TRAJ37)
CAVRGKGPGNTGKLIF

SEQ ID NO: 137442 - protein, 13 aa, Homo sapiens
  CDR3 for beta chain variable domain of TCR clone 68721 (TRBV4-2, TRBJ1-1)
CASSQAGNTEAFF

SEQ ID NO: 137443 - protein, 13 aa, Homo sapiens
  CDR3 for alpha chain variable domain of TCR clone 68722 (TRAV23/DV6, TRAJ36)
CAASQTGANNLFF

SEQ ID NO: 137444 - protein, 16 aa, Homo sapiens
  CDR3 for beta chain variable domain of TCR clone 68722 (TRBV5-4, TRBJ1-5)
CISVPAAWGGDQPQHF

SEQ ID NO: 137445 - protein, 23 aa, Homo sapiens
  CDR3 for alpha chain variable domain of TCR clone 68723 (TRAV26-1, TRAJ38)
CIADNAGNNHIQNPDPAVYQLRD

SEQ ID NO: 137446 - protein, 13 aa, Homo sapiens
  CDR3 for beta chain variable domain of TCR clone 68723 (TRBV20-1, TRBJ1-1)
CGARGGGNTEAFF

SEQ ID NO: 137447 - protein, 17 aa, Homo sapiens
  CDR3 for alpha chain variable domain of TCR clone 68724 (TRAV12-3, TRAJ6)
CAMSARGGAGGSYIPTF

SEQ ID NO: 137448 - protein, 17 aa, Homo sapiens
  CDR3 for beta chain variable domain of TCR clone 68724 (TRBV7-8, TRBJ2-6)
CASSAGTGGAGANVLTF

SEQ ID NO: 137449 - protein, 11 aa, Homo sapiens
  CDR3 for alpha chain variable domain of TCR clone 68725 (TRAV21, TRAJ4)
HVSGGYNKLLF

SEQ ID NO: 137450 - protein, 13 aa, Homo sapiens
  CDR3 for beta chain variable domain of TCR clone 68725 (TRBV7-3, TRBJ2-5)
CASSLTAGETQYF

SEQ ID NO: 137451 - protein, 15 aa, Homo sapiens
  CDR3 for alpha chain variable domain of TCR clone 68726 (TRAV27, TRAJ38)
CAARRNAGNNRKLIW

SEQ ID NO: 137452 - protein, 15 aa, Homo sapiens
  CDR3 for beta chain variable domain of TCR clone 68726 (TRBV5-1, TRBJ2-1)
CASSPPRAPYNEQLF

SEQ ID NO: 137453 - protein, 18 aa, Homo sapiens
  CDR3 for alpha chain variable domain of TCR clone 68727 (TRAV29/DV5, TRAJ52)
CAAGFRGAGGTSYGKLTF

SEQ ID NO: 137454 - protein, 14 aa, Homo sapiens
  CDR3 for beta chain variable domain of TCR clone 68727 (TRBV6-1, TRBJ1-3)
CASVQGGGGNTIYF

SEQ ID NO: 137455 - protein, 14 aa, Homo sapiens
  CDR3 for alpha chain variable domain of TCR clone 68728 (TRAV21, TRAJ45)
CAVSSGGGADGLTF

SEQ ID NO: 137456 - protein, 15 aa, Homo sapiens
  CDR3 for beta chain variable domain of TCR clone 68728 (TRBV6-1, TRBJ2-4)
CASSEAVWTINIQYV

SEQ ID NO: 137457 - protein, 15 aa, Homo sapiens
  CDR3 for alpha chain variable domain of TCR clone 68729 (TRAV3, TRAJ20)
CAVRDSRSNDYTLSF

SEQ ID NO: 137458 - protein, 14 aa, Homo sapiens
  CDR3 for beta chain variable domain of TCR clone 68729 (TRBV20-1, TRBJ2-7)
CSARRGNGIYEQYF

SEQ ID NO: 137459 - protein, 13 aa, Homo sapiens
  CDR3 for alpha chain variable domain of TCR clone 68730 (TRAV16, TRAJ48)
CSTPGFGNEKLTF

SEQ ID NO: 137460 - protein, 14 aa, Homo sapiens
  CDR3 for beta chain variable domain of TCR clone 68730 (TRBV7-2, TRBJ2-7)
CASSSISGFSEQYF

SEQ ID NO: 137461 - protein, 17 aa, Homo sapiens
  CDR3 for alpha chain variable domain of TCR clone 68731 (TRAV13-1, TRAJ52)
CAAGRNAGGTSYGKLPF

SEQ ID NO: 137462 - protein, 13 aa, Homo sapiens
  CDR3 for beta chain variable domain of TCR clone 68731 (TRBV7-2, TRBJ1-1)
CASNLKGAKVAFF

SEQ ID NO: 137463 - protein, 14 aa, Homo sapiens
  CDR3 for alpha chain variable domain of TCR clone 68732 (TRAV17, TRAJ16)
CATADFSDGQKLLF

SEQ ID NO: 137464 - protein, 13 aa, Homo sapiens
  CDR3 for beta chain variable domain of TCR clone 68732 (TRBV7-3, TRBJ1-1)
CASSQDWGAEAFF

SEQ ID NO: 137465 - protein, 16 aa, Homo sapiens
  CDR3 for alpha chain variable domain of TCR clone 68733 (TRAV12-3, TRAJ53)
CAMSVGSGGSNYKLTF

SEQ ID NO: 137466 - protein, 11 aa, Homo sapiens
  CDR3 for beta chain variable domain of TCR clone 68733 (TRBV29-1, TRBJ2-5)
CSVASGETQYC

SEQ ID NO: 137467 - protein, 15 aa, Homo sapiens
  CDR3 for alpha chain variable domain of TCR clone 68734 (TRAV14/DV4, TRAJ22)
SAMREGWTTARQLTF

SEQ ID NO: 137468 - protein, 13 aa, Homo sapiens
  CDR3 for beta chain variable domain of TCR clone 68734 (TRBV5-4, TRBJ1-2)
CASSSRENYGYTF

SEQ ID NO: 137469 - protein, 12 aa, Homo sapiens
  CDR3 for alpha chain variable domain of TCR clone 68735 (TRAV13-1, TRAJ21)
CAAKEGFNKFYF

SEQ ID NO: 137470 - protein, 17 aa, Homo sapiens
  CDR3 for beta chain variable domain of TCR clone 68735 (TRBV20-1, TRBJ2-1)
CSASSSGLAGSYNEQFL

SEQ ID NO: 137471 - protein, 16 aa, Homo sapiens
  CDR3 for alpha chain variable domain of TCR clone 68736 (TRAV23/DV6, )
CADIQNPDPAVYQLRD

SEQ ID NO: 137472 - protein, 13 aa, Homo sapiens
  CDR3 for beta chain variable domain of TCR clone 68736 (TRBV28, TRBJ2-7)
CASRSRGVYEQYF

SEQ ID NO: 137473 - protein, 11 aa, Homo sapiens
  CDR3 for alpha chain variable domain of TCR clone 68737 (TRAV12-2, TRAJ39)
CAVNNMLTFGG

SEQ ID NO: 137474 - protein, 14 aa, Homo sapiens
  CDR3 for beta chain variable domain of TCR clone 68737 (TRBV18, TRBJ2-7)
CASSPRGGAYEQYF

SEQ ID NO: 137475 - protein, 15 aa, Homo sapiens
  CDR3 for alpha chain variable domain of TCR clone 68738 (TRAV26-1, TRAJ44)
CIVRANTGTASKLTF

SEQ ID NO: 137476 - protein, 12 aa, Homo sapiens
  CDR3 for beta chain variable domain of TCR clone 68738 (TRBV19, TRBJ1-1)
CASMNRYTEAFF

SEQ ID NO: 137477 - protein, 14 aa, Homo sapiens
  CDR3 for alpha chain variable domain of TCR clone 68739 (TRAV20, TRAJ10)
CAVRVEGGGNKLTF

SEQ ID NO: 137478 - protein, 13 aa, Homo sapiens
  CDR3 for beta chain variable domain of TCR clone 68739 (TRBV13, TRBJ2-2)
CASSPGLTGELFS

SEQ ID NO: 137479 - protein, 15 aa, Homo sapiens
  CDR3 for alpha chain variable domain of TCR clone 68740 (TRAV8-3, TRAJ32)
CAVEVVLQTSSSLEL

SEQ ID NO: 137480 - protein, 15 aa, Homo sapiens
  CDR3 for beta chain variable domain of TCR clone 68740 (TRBV7-2, TRBJ2-1)
CASSSRTSREDEQFF

SEQ ID NO: 137481 - protein, 17 aa, Homo sapiens
  CDR3 for alpha chain variable domain of TCR clone 68741 (TRAV3, TRAJ42)
CAVRDRDYGGSQGNPIF

SEQ ID NO: 137482 - protein, 17 aa, Homo sapiens
  CDR3 for beta chain variable domain of TCR clone 68741 (TRBV7-9, TRBJ2-3)
CASSPTVAGDLTDTQYF

SEQ ID NO: 137483 - protein, 14 aa, Homo sapiens
  CDR3 for alpha chain variable domain of TCR clone 68742 (TRAV38-2/DV8, TRAJ23)
CAYRSQNQGGKLIF

SEQ ID NO: 137484 - protein, 13 aa, Homo sapiens
  CDR3 for beta chain variable domain of TCR clone 68742 (TRBV24-1, TRBJ2-1)
CSTSAGPYNEQFF

SEQ ID NO: 137485 - protein, 13 aa, Homo sapiens
  CDR3 for alpha chain variable domain of TCR clone 68743 (TRAV22, TRAJ48)
CAVERFGNEKLTF

SEQ ID NO: 137486 - protein, 18 aa, Homo sapiens
  CDR3 for beta chain variable domain of TCR clone 68743 (TRBV4-3, TRBJ1-6)
CASSQETPASSYNSPLHF

SEQ ID NO: 137487 - protein, 14 aa, Homo sapiens
  CDR3 for alpha chain variable domain of TCR clone 68744 (TRAV12-2, TRAJ24)
CAVTPAGSWGKLQF

SEQ ID NO: 137488 - protein, 12 aa, Homo sapiens
  CDR3 for beta chain variable domain of TCR clone 68744 (TRBV3-1, TRBJ2-1)
CASSQGSSGQFF

SEQ ID NO: 137489 - protein, 14 aa, Homo sapiens
  CDR3 for alpha chain variable domain of TCR clone 68745 (TRAV1-2, TRAJ8)
CAVREDTGFQKLVF

SEQ ID NO: 137490 - protein, 15 aa, Homo sapiens
  CDR3 for beta chain variable domain of TCR clone 68745 (TRBV3-1, TRBJ2-2)
CASSQDWTRAGELFF

SEQ ID NO: 137491 - protein, 16 aa, Homo sapiens
  CDR3 for alpha chain variable domain of TCR clone 68746 (TRAV12-3, TRAJ53)
CAMSPGSGGSNYKLTF

SEQ ID NO: 137492 - protein, 12 aa, Homo sapiens
  CDR3 for beta chain variable domain of TCR clone 68746 (TRBV11-2, TRBJ2-2)
CASSLPTGELFF

SEQ ID NO: 137493 - protein, 11 aa, Homo sapiens
  CDR3 for alpha chain variable domain of TCR clone 68747 (TRAV12-2, TRAJ31)
CAVTRWASLMF

SEQ ID NO: 137494 - protein, 15 aa, Homo sapiens
  CDR3 for beta chain variable domain of TCR clone 68747 (TRBV19, TRBJ2-7)
CASSIGGGLVNEQYF

SEQ ID NO: 137495 - protein, 12 aa, Homo sapiens
  CDR3 for alpha chain variable domain of TCR clone 68748 (TRAV12-3, TRAJ17)
CAMTLTGNKLTF

SEQ ID NO: 137496 - protein, 18 aa, Homo sapiens
  CDR3 for beta chain variable domain of TCR clone 68748 (TRBV11-2, TRBJ2-5)
CASSLVGAGGPYQETQYF

SEQ ID NO: 137497 - protein, 15 aa, Homo sapiens
  CDR3 for alpha chain variable domain of TCR clone 68749 (TRAV2, TRAJ13)
CATPSYSGGYQKVTF

SEQ ID NO: 137498 - protein, 13 aa, Homo sapiens
  CDR3 for beta chain variable domain of TCR clone 68749 (TRBV27, TRBJ1-1)
CASSLSIGAEAFF

SEQ ID NO: 137499 - protein, 14 aa, Homo sapiens
  CDR3 for alpha chain variable domain of TCR clone 68750 (TRAV17, TRAJ37)
CATDGSSNTGKLIS

SEQ ID NO: 137500 - protein, 13 aa, Homo sapiens
  CDR3 for beta chain variable domain of TCR clone 68750 (TRBV11-2, TRBJ2-1)
CASSLDLVNEQFF

SEQ ID NO: 137501 - protein, 12 aa, Homo sapiens
  CDR3 for alpha chain variable domain of TCR clone 68751 (TRAV13-1, TRAJ42)
SVLRGSQGNLIF

SEQ ID NO: 137502 - protein, 13 aa, Homo sapiens
  CDR3 for beta chain variable domain of TCR clone 68751 (TRBV2, TRBJ1-4)
CASSELGVERLFF

SEQ ID NO: 137503 - protein, 13 aa, Homo sapiens
  CDR3 for alpha chain variable domain of TCR clone 68752 (TRAV24, TRAJ23)
CASHCNQGGKLIF

SEQ ID NO: 137504 - protein, 13 aa, Homo sapiens
  CDR3 for beta chain variable domain of TCR clone 68752 (TRBV13, TRBJ2-1)
CASILGGRGEQFF

SEQ ID NO: 137505 - protein, 10 aa, Homo sapiens
  CDR3 for alpha chain variable domain of TCR clone 68753 (TRAV1-1, TRAJ20)
CAVRDRTTSS

SEQ ID NO: 137506 - protein, 18 aa, Homo sapiens
  CDR3 for beta chain variable domain of TCR clone 68753 (TRBV20-1, TRBJ2-6)
CSAETTPTHGSGANVLTF

SEQ ID NO: 137507 - protein, 16 aa, Homo sapiens
  CDR3 for alpha chain variable domain of TCR clone 68754 (TRAV38-1, TRAJ37)
CAFKGDGSSNTGKLIF

SEQ ID NO: 137508 - protein, 12 aa, Homo sapiens
  CDR3 for beta chain variable domain of TCR clone 68754 (TRBV7-9, TRBJ2-7)
CASSFGSYEQYF

SEQ ID NO: 137509 - protein, 13 aa, Homo sapiens
  CDR3 for alpha chain variable domain of TCR clone 68755 (TRAV21, TRAJ37)
CAASSGNTGKLIF

SEQ ID NO: 137510 - protein, 17 aa, Homo sapiens
  CDR3 for beta chain variable domain of TCR clone 68755 (TRBV5-1, TRBJ2-5)
CASSLLGLAANQETQYF

SEQ ID NO: 137511 - protein, 16 aa, Homo sapiens
  CDR3 for alpha chain variable domain of TCR clone 68756 (TRAV3, TRAJ6)
CAVRDGMGRRKLHTYI

SEQ ID NO: 137512 - protein, 15 aa, Homo sapiens
  CDR3 for beta chain variable domain of TCR clone 68756 (TRBV9, TRBJ2-1)
CAISLAGSSYNEQFF

SEQ ID NO: 137513 - protein, 11 aa, Homo sapiens
  CDR3 for alpha chain variable domain of TCR clone 68757 (TRAV1-1, TRAJ23)
CAVRQGGKLIF

SEQ ID NO: 137514 - protein, 13 aa, Homo sapiens
  CDR3 for beta chain variable domain of TCR clone 68757 (TRBV7-3, TRBJ1-1)
CASIQDWGAEAFF

SEQ ID NO: 137515 - protein, 12 aa, Homo sapiens
  CDR3 for alpha chain variable domain of TCR clone 68758 (TRAV13-1, TRAJ20)
CAASMGDYKLSF

SEQ ID NO: 137516 - protein, 13 aa, Homo sapiens
  CDR3 for beta chain variable domain of TCR clone 68758 (TRBV12-4, TRBJ1-1)
CASSPGTGFEAFF

SEQ ID NO: 137517 - protein, 15 aa, Homo sapiens
  CDR3 for alpha chain variable domain of TCR clone 68759 (TRAV40, TRAJ45)
CLLGDLGGGADGLTS

SEQ ID NO: 137518 - protein, 13 aa, Homo sapiens
  CDR3 for beta chain variable domain of TCR clone 68759 (TRBV7-9, TRBJ1-2)
CASSLKQNYGYTF

SEQ ID NO: 137519 - protein, 11 aa, Homo sapiens
  CDR3 for alpha chain variable domain of TCR clone 68760 (TRAV2, TRAJ13)
CASGGYQKVTF

SEQ ID NO: 137520 - protein, 14 aa, Homo sapiens
  CDR3 for beta chain variable domain of TCR clone 68760 (TRBV5-1, TRBJ2-3)
CASRGQTSTDTQYF

SEQ ID NO: 137521 - protein, 13 aa, Homo sapiens
  CDR3 for alpha chain variable domain of TCR clone 68761 (TRAV35, TRAJ43)
CAGYPYNNNDMRF

SEQ ID NO: 137522 - protein, 15 aa, Homo sapiens
  CDR3 for beta chain variable domain of TCR clone 68761 (TRBV25-1, TRBJ1-4)
CASSKRIATNEELFF

SEQ ID NO: 137523 - protein, 14 aa, Homo sapiens
  CDR3 for alpha chain variable domain of TCR clone 68762 (TRAV12-2, TRAJ17)
CAVNIKAAGNKLTS

SEQ ID NO: 137524 - protein, 16 aa, Homo sapiens
  CDR3 for beta chain variable domain of TCR clone 68762 (TRBV20-1, TRBJ2-6)
CSASSQGYDGANVLTF

SEQ ID NO: 137525 - protein, 13 aa, Homo sapiens
  CDR3 for alpha chain variable domain of TCR clone 68763 (TRAV12-3, TRAJ9)
CAMRNTGGFKTIF

SEQ ID NO: 137526 - protein, 16 aa, Homo sapiens
  CDR3 for beta chain variable domain of TCR clone 68763 (TRBV19, TRBJ2-1)
CASSVDGSFAYNEQFF

SEQ ID NO: 137527 - protein, 19 aa, Homo sapiens
  CDR3 for alpha chain variable domain of TCR clone 68764 (TRAV38-2/DV8, TRAJ42)
CAYRSAGMNYGGSQGNLIF

SEQ ID NO: 137528 - protein, 14 aa, Homo sapiens
  CDR3 for beta chain variable domain of TCR clone 68764 (TRBV7-2, TRBJ1-2)
CASSQTGSTYGYTF

SEQ ID NO: 137529 - protein, 15 aa, Homo sapiens
  CDR3 for alpha chain variable domain of TCR clone 68765 (TRAV21, TRAJ37)
CAVMPTLSNTGKLIF

SEQ ID NO: 137530 - protein, 16 aa, Homo sapiens
  CDR3 for beta chain variable domain of TCR clone 68765 (TRBV24-1, TRBJ2-3)
CATSDRRQDLTDTQYF

SEQ ID NO: 137531 - protein, 15 aa, Homo sapiens
  CDR3 for alpha chain variable domain of TCR clone 68766 (TRAV17, TRAJ45)
CATAYSGGGADGLTF

SEQ ID NO: 137532 - protein, 15 aa, Homo sapiens
  CDR3 for beta chain variable domain of TCR clone 68766 (TRBV9, TRBJ1-6)
CASSVAGTGDSPLHF

SEQ ID NO: 137533 - protein, 23 aa, Homo sapiens
  CDR3 for alpha chain variable domain of TCR clone 68767 (TRAV30, TRAJ43)
CTLRPPSSVTQEPTSAALSDMRF

SEQ ID NO: 137534 - protein, 13 aa, Homo sapiens
  CDR3 for beta chain variable domain of TCR clone 68767 (TRBV19, TRBJ1-2)
CASSQGQVYGYTF

SEQ ID NO: 137535 - protein, 13 aa, Homo sapiens
  CDR3 for alpha chain variable domain of TCR clone 68768 (TRAV20, TRAJ49)
CAVQARTGDQFYF

SEQ ID NO: 137536 - protein, 14 aa, Homo sapiens
  CDR3 for beta chain variable domain of TCR clone 68768 (TRBV7-2, TRBJ2-7)
CASSPKTSFYEQYF

SEQ ID NO: 137537 - protein, 14 aa, Homo sapiens
  CDR3 for alpha chain variable domain of TCR clone 68769 (TRAV1-2, TRAJ16)
CAVNRFSDGQKLLF

SEQ ID NO: 137538 - protein, 13 aa, Homo sapiens
  CDR3 for beta chain variable domain of TCR clone 68769 (TRBV7-3, TRBJ2-5)
CASSFRGGETQYF

SEQ ID NO: 137539 - protein, 15 aa, Homo sapiens
  CDR3 for alpha chain variable domain of TCR clone 68770 (TRAV8-3, TRAJ45)
CASSYSGGGADGITF

SEQ ID NO: 137540 - protein, 17 aa, Homo sapiens
  CDR3 for beta chain variable domain of TCR clone 68770 (TRBV7-8, TRBJ1-2)
CASSLRPLQGHLYGYTF

SEQ ID NO: 137541 - protein, 13 aa, Homo sapiens
  CDR3 for alpha chain variable domain of TCR clone 68771 (TRAV12-3, TRAJ7)
CAMTPYGNNRLAF

SEQ ID NO: 137542 - protein, 14 aa, Homo sapiens
  CDR3 for beta chain variable domain of TCR clone 68771 (TRBV4-2, TRBJ2-1)
CASGLDRAYNEQFF

SEQ ID NO: 137543 - protein, 12 aa, Homo sapiens
  CDR3 for alpha chain variable domain of TCR clone 68772 (TRAV12-3, TRAJ40)
CAMSSGTYKYIF

SEQ ID NO: 137544 - protein, 20 aa, Homo sapiens
  CDR3 for beta chain variable domain of TCR clone 68772 (TRBV7-8, TRBJ2-2)
WASSHLFPGPTIHITGELFF

SEQ ID NO: 137545 - protein, 14 aa, Homo sapiens
  CDR3 for alpha chain variable domain of TCR clone 68773 (TRAV17, TRAJ56)
FATEDTGANSKLTF

SEQ ID NO: 137546 - protein, 16 aa, Homo sapiens
  CDR3 for beta chain variable domain of TCR clone 68773 (TRBV19, TRBJ2-1)
CASSIKLAGSYNEQFF

SEQ ID NO: 137547 - protein, 16 aa, Homo sapiens
  CDR3 for alpha chain variable domain of TCR clone 68774 (TRAV12-1, TRAJ43)
CVVNSHRFGAGTRLTV

SEQ ID NO: 137548 - protein, 13 aa, Homo sapiens
  CDR3 for beta chain variable domain of TCR clone 68774 (TRBV20-1, TRBJ1-1)
CSARGGGNTEAFF

SEQ ID NO: 137549 - protein, 13 aa, Homo sapiens
  CDR3 for alpha chain variable domain of TCR clone 68775 (TRAV8-4, TRAJ10)
CAAFMGGGNKLTF

SEQ ID NO: 137550 - protein, 15 aa, Homo sapiens
  CDR3 for beta chain variable domain of TCR clone 68775 (TRBV2, TRBJ2-3)
CASSDFEKATDTQYF

SEQ ID NO: 137551 - protein, 13 aa, Homo sapiens
  CDR3 for alpha chain variable domain of TCR clone 68776 (TRAV3, TRAJ34)
CAVRDIGSDKLIF

SEQ ID NO: 137552 - protein, 14 aa, Homo sapiens
  CDR3 for beta chain variable domain of TCR clone 68776 (TRBV12-5, TRBJ2-5)
CASGSRTHQETQYF

SEQ ID NO: 137553 - protein, 11 aa, Homo sapiens
  CDR3 for alpha chain variable domain of TCR clone 68777 (TRAV8-3, TRAJ15)
CAVGPGTALIF

SEQ ID NO: 137554 - protein, 18 aa, Homo sapiens
  CDR3 for beta chain variable domain of TCR clone 68777 (TRBV18, TRBJ2-3)
CASSYTSGDAGGTDTQYF

SEQ ID NO: 137555 - protein, 17 aa, Homo sapiens
  CDR3 for alpha chain variable domain of TCR clone 68778 (TRAV8-6, TRAJ58)
CAVSSWVGETSGSRLTF

SEQ ID NO: 137556 - protein, 15 aa, Homo sapiens
  CDR3 for beta chain variable domain of TCR clone 68778 (TRBV5-1, TRBJ2-1)
CASSPPRAPYNGQFF

SEQ ID NO: 137557 - protein, 14 aa, Homo sapiens
  CDR3 for alpha chain variable domain of TCR clone 68779 (TRAV26-1, TRAJ49)
CIVRLSNTGNQFYF

SEQ ID NO: 137558 - protein, 13 aa, Homo sapiens
  CDR3 for beta chain variable domain of TCR clone 68779 (TRBV4-1, TRBJ2-7)
CASSQGQAYEQYF

SEQ ID NO: 137559 - protein, 12 aa, Homo sapiens
  CDR3 for alpha chain variable domain of TCR clone 68780 (TRAV26-2, TRAJ21)
CILKGNFNKFYF

SEQ ID NO: 137560 - protein, 14 aa, Homo sapiens
  CDR3 for beta chain variable domain of TCR clone 68780 (TRBV7-9, TRBJ1-1)
CASTPLQSYTEDFF

SEQ ID NO: 137561 - protein, 14 aa, Homo sapiens
  CDR3 for alpha chain variable domain of TCR clone 68781 (TRAV12-2, TRAJ17)
CAVLFKAAGNKLTF

SEQ ID NO: 137562 - protein, 17 aa, Homo sapiens
  CDR3 for beta chain variable domain of TCR clone 68781 (TRBV20-1, TRBJ2-2)
CSASGSGQGGLTGEQFF

SEQ ID NO: 137563 - protein, 14 aa, Homo sapiens
  CDR3 for alpha chain variable domain of TCR clone 68782 (TRAV2, TRAJ9)
CAVEDRSGGFKTIF

SEQ ID NO: 137564 - protein, 19 aa, Homo sapiens
  CDR3 for beta chain variable domain of TCR clone 68782 (TRBV25-1, TRBJ2-2)
CDILVYRVDRGRKTGELFF

SEQ ID NO: 137565 - protein, 14 aa, Homo sapiens
  CDR3 for alpha chain variable domain of TCR clone 68783 (TRAV26-2, TRAJ45)
CILRTGGGADGLTF

SEQ ID NO: 137566 - protein, 15 aa, Homo sapiens
  CDR3 for beta chain variable domain of TCR clone 68783 (TRBV20-1, TRBJ2-7)
CSARDRVSGMDEQYF

SEQ ID NO: 137567 - protein, 11 aa, Homo sapiens
  CDR3 for alpha chain variable domain of TCR clone 68784 (TRAV2, TRAJ33)
CAVESNYQLIW

SEQ ID NO: 137568 - protein, 14 aa, Homo sapiens
  CDR3 for beta chain variable domain of TCR clone 68784 (TRBV11-2, TRBJ2-7)
CASSLGAGAYEQYF

SEQ ID NO: 137569 - protein, 15 aa, Homo sapiens
  CDR3 for alpha chain variable domain of TCR clone 68785 (TRAV21, TRAJ57)
CAVIITQGGSEKLVF

SEQ ID NO: 137570 - protein, 12 aa, Homo sapiens
  CDR3 for beta chain variable domain of TCR clone 68785 (TRBV11-2, TRBJ2-2)
CASSLGGGELFF

SEQ ID NO: 137571 - protein, 13 aa, Homo sapiens
  CDR3 for alpha chain variable domain of TCR clone 68786 (TRAV8-6, TRAJ54)
CAVIAQGAQKLVF

SEQ ID NO: 137572 - protein, 17 aa, Homo sapiens
  CDR3 for beta chain variable domain of TCR clone 68786 (TRBV20-1, TRBJ2-3)
CSASLLGRGGSADTQYF

SEQ ID NO: 137573 - protein, 16 aa, Homo sapiens
  CDR3 for alpha chain variable domain of TCR clone 68787 (TRAV1-2, TRAJ10)
CAVRGVLTGGGNKLTF

SEQ ID NO: 137574 - protein, 12 aa, Homo sapiens
  CDR3 for beta chain variable domain of TCR clone 68787 (TRBV14, TRBJ2-7)
CASSSLKGEQYF

SEQ ID NO: 137575 - protein, 15 aa, Homo sapiens
  CDR3 for alpha chain variable domain of TCR clone 68788 (TRAV3, TRAJ3)
CAVRDRDSSASKRIF

SEQ ID NO: 137576 - protein, 18 aa, Homo sapiens
  CDR3 for beta chain variable domain of TCR clone 68788 (TRBV25-1, TRBJ1-2)
CASSGLQNGQGLIFGYTF

SEQ ID NO: 137577 - protein, 15 aa, Homo sapiens
  CDR3 for alpha chain variable domain of TCR clone 68789 (TRAV3, TRAJ22)
CAVRDRGGSARQLTF

SEQ ID NO: 137578 - protein, 16 aa, Homo sapiens
  CDR3 for beta chain variable domain of TCR clone 68789 (TRBV4-1, TRBJ2-3)
CASSQSTSGAEDTQYF

SEQ ID NO: 137579 - protein, 13 aa, Homo sapiens
  CDR3 for alpha chain variable domain of TCR clone 68790 (TRAV17, TRAJ40)
CATRSPGTYKYIF

SEQ ID NO: 137580 - protein, 13 aa, Homo sapiens
  CDR3 for beta chain variable domain of TCR clone 68790 (TRBV2, TRBJ1-5)
CATAGPGDQPQHF

SEQ ID NO: 137581 - protein, 15 aa, Homo sapiens
  CDR3 for alpha chain variable domain of TCR clone 68791 (TRAV3, TRAJ3)
CAVRDRDSSASKIIF

SEQ ID NO: 137582 - protein, 18 aa, Homo sapiens
  CDR3 for beta chain variable domain of TCR clone 68791 (TRBV25-1, TRBJ1-2)
CASSGLQNGQGLIFGYIF

SEQ ID NO: 137583 - protein, 11 aa, Homo sapiens
  CDR3 for alpha chain variable domain of TCR clone 68792 (TRAV2, TRAJ13)
CATGGYQKVTF

SEQ ID NO: 137584 - protein, 16 aa, Homo sapiens
  CDR3 for beta chain variable domain of TCR clone 68792 (TRBV6-1, TRBJ2-5)
CASSETLDRGAETQYF

SEQ ID NO: 137585 - protein, 15 aa, Homo sapiens
  CDR3 for alpha chain variable domain of TCR clone 68793 (TRAV3, TRAJ4)
CAQNMFSGGYNKLIF

SEQ ID NO: 137586 - protein, 17 aa, Homo sapiens
  CDR3 for beta chain variable domain of TCR clone 68793 (TRBV7-3, TRBJ2-3)
CASSLMKRMRGADTQYF

SEQ ID NO: 137587 - protein, 14 aa, Homo sapiens
  CDR3 for alpha chain variable domain of TCR clone 68794 (TRAV3, TRAJ9)
CAVRLNTGGFKTIF

SEQ ID NO: 137588 - protein, 12 aa, Homo sapiens
  CDR3 for beta chain variable domain of TCR clone 68794 (TRBV11-2, TRBJ2-2)
CASSLGGGELFF

SEQ ID NO: 137589 - protein, 14 aa, Homo sapiens
  CDR3 for alpha chain variable domain of TCR clone 68795 (TRAV8-6, TRAJ9)
CAVSSYTGGFKTIF

SEQ ID NO: 137590 - protein, 20 aa, Homo sapiens
  CDR3 for beta chain variable domain of TCR clone 68795 (TRBV7-8, TRBJ2-2)
CASSHLFPGPTIHITGELFF

SEQ ID NO: 137591 - protein, 12 aa, Homo sapiens
  CDR3 for alpha chain variable domain of TCR clone 68796 (TRAV12-1, TRAJ40)
CVAYSGTYKYIF

SEQ ID NO: 137592 - protein, 15 aa, Homo sapiens
  CDR3 for beta chain variable domain of TCR clone 68796 (TRBV27, TRBJ1-6)
CASSFDRGLGSPLHF

SEQ ID NO: 137593 - protein, 14 aa, Homo sapiens
  CDR3 for alpha chain variable domain of TCR clone 68797 (TRAV1-2, TRAJ16)
CAVNRFSDGQKLLF

SEQ ID NO: 137594 - protein, 16 aa, Homo sapiens
  CDR3 for beta chain variable domain of TCR clone 68797 (TRBV7-3, TRBJ2-2)
CASSLKRGALSGELFF

SEQ ID NO: 137595 - protein, 14 aa, Homo sapiens
  CDR3 for alpha chain variable domain of TCR clone 68798 (TRAV26-2, TRAJ38)
CILYNAGNNRKLIW

SEQ ID NO: 137596 - protein, 20 aa, Homo sapiens
  CDR3 for beta chain variable domain of TCR clone 68798 (TRBV28, TRBJ2-1)
CASTPIGRSPGLAGGNEQFF

SEQ ID NO: 137597 - protein, 15 aa, Homo sapiens
  CDR3 for alpha chain variable domain of TCR clone 68799 (TRAV3, TRAJ32)
CAASSYGGATNKLIF

SEQ ID NO: 137598 - protein, 13 aa, Homo sapiens
  CDR3 for beta chain variable domain of TCR clone 68799 (TRBV20-1, TRBJ2-7)
CSARPSTNYEQYF

SEQ ID NO: 137599 - protein, 14 aa, Homo sapiens
  CDR3 for alpha chain variable domain of TCR clone 68800 (TRAV1-2, TRAJ16)
CAVNRFSDGQKLLF

SEQ ID NO: 137600 - protein, 13 aa, Homo sapiens
  CDR3 for beta chain variable domain of TCR clone 68800 (TRBV12-4, TRBJ2-5)
YASSLGGSRTQYF

SEQ ID NO: 137601 - protein, 16 aa, Homo sapiens
  CDR3 for alpha chain variable domain of TCR clone 68801 (TRAV30, TRAJ24)
CGTEIGDADSWGKFQF

SEQ ID NO: 137602 - protein, 15 aa, Homo sapiens
  CDR3 for beta chain variable domain of TCR clone 68801 (TRBV6-3, TRBJ2-7)
CASSSPGTVFYEQYF

SEQ ID NO: 137603 - protein, 13 aa, Homo sapiens
  CDR3 for alpha chain variable domain of TCR clone 68802 (TRAV8-6, TRAJ13)
CAVSSGGYQKVTF

SEQ ID NO: 137604 - protein, 15 aa, Homo sapiens
  CDR3 for beta chain variable domain of TCR clone 68802 (TRBV7-9, TRBJ2-7)
CASSLPRGQANEQYF

SEQ ID NO: 137605 - protein, 17 aa, Homo sapiens
  CDR3 for alpha chain variable domain of TCR clone 68803 (TRAV3, TRAJ6)
CAVRDGPRAGGSYIPTF

SEQ ID NO: 137606 - protein, 14 aa, Homo sapiens
  CDR3 for beta chain variable domain of TCR clone 68803 (TRBV6-1, TRBJ1-3)
CASVQGGGGNTMYF

SEQ ID NO: 137607 - protein, 14 aa, Homo sapiens
  CDR3 for alpha chain variable domain of TCR clone 68804 (TRAV4, TRAJ6)
CLVGEAGGSYIPTF

SEQ ID NO: 137608 - protein, 16 aa, Homo sapiens
  CDR3 for beta chain variable domain of TCR clone 68804 (TRBV7-6, TRBJ2-1)
CASSLNEGPAYNEQFF

SEQ ID NO: 137609 - protein, 11 aa, Homo sapiens
  CDR3 for alpha chain variable domain of TCR clone 68805 (TRAV4, TRAJ29)
CLVEVNTPLVF

SEQ ID NO: 137610 - protein, 16 aa, Homo sapiens
  CDR3 for beta chain variable domain of TCR clone 68805 (TRBV19, TRBJ2-1)
CASSIQAGGSYNEQFF

SEQ ID NO: 137611 - protein, 13 aa, Homo sapiens
  CDR3 for alpha chain variable domain of TCR clone 68806 (TRAV27, TRAJ3)
ASLRGNSASKIIF

SEQ ID NO: 137612 - protein, 15 aa, Homo sapiens
  CDR3 for beta chain variable domain of TCR clone 68806 (TRBV28, TRBJ1-3)
CASSMGWASGNTIYF

SEQ ID NO: 137613 - protein, 18 aa, Homo sapiens
  CDR3 for alpha chain variable domain of TCR clone 68807 (TRAV23/DV6, TRAJ21)
CAASSGGGTTSTNFTLDL

SEQ ID NO: 137614 - protein, 11 aa, Homo sapiens
  CDR3 for beta chain variable domain of TCR clone 68807 (TRBV7-8, TRBJ2-7)
CAGSLSLEQYF

SEQ ID NO: 137615 - protein, 16 aa, Homo sapiens
  CDR3 for alpha chain variable domain of TCR clone 68808 (TRAV30, TRAJ24)
CGTEIVDADSWGKFQF

SEQ ID NO: 137616 - protein, 13 aa, Homo sapiens
  CDR3 for beta chain variable domain of TCR clone 68808 (TRBV10-3, TRBJ2-7)
CASELAVNYEQYF

SEQ ID NO: 137617 - protein, 16 aa, Homo sapiens
  CDR3 for alpha chain variable domain of TCR clone 68809 (TRAV27, TRAJ13)
CAGAKSDSGGYQKVTF

SEQ ID NO: 137618 - protein, 15 aa, Homo sapiens
  CDR3 for beta chain variable domain of TCR clone 68809 (TRBV29-1, TRBJ2-1)
CSVGRHALFYKEQFF

SEQ ID NO: 137619 - protein, 15 aa, Homo sapiens
  CDR3 for alpha chain variable domain of TCR clone 68810 (TRAV3, TRAJ22)
CAVRDRGGSARQLTF

SEQ ID NO: 137620 - protein, 16 aa, Homo sapiens
  CDR3 for beta chain variable domain of TCR clone 68810 (TRBV5-4, TRBJ2-3)
CASQQPGAGGADKQYF

SEQ ID NO: 137621 - protein, 14 aa, Homo sapiens
  CDR3 for alpha chain variable domain of TCR clone 68811 (TRAV23/DV6, TRAJ24)
CAASLSDRWGKLQF

SEQ ID NO: 137622 - protein, 16 aa, Homo sapiens
  CDR3 for beta chain variable domain of TCR clone 68811 (TRBV7-9, TRBJ2-6)
CASSLKGPLRANVLTF

SEQ ID NO: 137623 - protein, 15 aa, Homo sapiens
  CDR3 for alpha chain variable domain of TCR clone 68812 (TRAV3, TRAJ36)
CAVRASQTGANNLFF

SEQ ID NO: 137624 - protein, 14 aa, Homo sapiens
  CDR3 for beta chain variable domain of TCR clone 68812 (TRBV25-1, TRBJ1-1)
CASTHLGGNTEAFF

SEQ ID NO: 137625 - protein, 13 aa, Homo sapiens
  CDR3 for alpha chain variable domain of TCR clone 68813 (TRAV21, TRAJ57)
CAVTQGGSEKLVF

SEQ ID NO: 137626 - protein, 17 aa, Homo sapiens
  CDR3 for beta chain variable domain of TCR clone 68813 (TRBV28, TRBJ2-5)
CASSRQGGLAGAETQYF

SEQ ID NO: 137627 - protein, 13 aa, Homo sapiens
  CDR3 for alpha chain variable domain of TCR clone 68814 (TRAV2, TRAJ15)
CAVASQAGTALIF

SEQ ID NO: 137628 - protein, 16 aa, Homo sapiens
  CDR3 for beta chain variable domain of TCR clone 68814 (TRBV28, TRBJ2-1)
CASRRSGRVVGNEQFF

SEQ ID NO: 137629 - protein, 13 aa, Homo sapiens
  CDR3 for alpha chain variable domain of TCR clone 68815 (TRAV36/DV7, TRAJ37)
CAVFSSNTGKLIF

SEQ ID NO: 137630 - protein, 16 aa, Homo sapiens
  CDR3 for beta chain variable domain of TCR clone 68815 (TRBV3-1, TRBJ2-5)
CASSPGQVNGFGTQYF

SEQ ID NO: 137631 - protein, 17 aa, Homo sapiens
  CDR3 for alpha chain variable domain of TCR clone 68816 (TRAV26-1, TRAJ28)
CIVRVPDSGAGSYQPTF

SEQ ID NO: 137632 - protein, 17 aa, Homo sapiens
  CDR3 for beta chain variable domain of TCR clone 68816 (TRBV28, TRBJ2-7)
CASSPLPAGGKSYEQYF

SEQ ID NO: 137633 - protein, 19 aa, Homo sapiens
  CDR3 for alpha chain variable domain of TCR clone 68817 (TRAV2, TRAJ20)
ILQVREADAAVYRDCKLSF

SEQ ID NO: 137634 - protein, 13 aa, Homo sapiens
  CDR3 for beta chain variable domain of TCR clone 68817 (TRBV15, TRBJ1-6)
CATSGGLNSPLRF

SEQ ID NO: 137635 - protein, 14 aa, Homo sapiens
  CDR3 for alpha chain variable domain of TCR clone 68818 (TRAV38-1, TRAJ45)
CAYYSGGGADGLTF

SEQ ID NO: 137636 - protein, 20 aa, Homo sapiens
  CDR3 for beta chain variable domain of TCR clone 68818 (TRBV28, TRBJ2-1)
CTSTPIGRSPGLAGGNEQFF

SEQ ID NO: 137637 - protein, 15 aa, Homo sapiens
  CDR3 for alpha chain variable domain of TCR clone 68819 (TRAV4, TRAJ39)
CLVGPKNNAGNMLTF

SEQ ID NO: 137638 - protein, 13 aa, Homo sapiens
  CDR3 for beta chain variable domain of TCR clone 68819 (TRBV11-2, TRBJ2-5)
CASSSTGEETQYF

SEQ ID NO: 137639 - protein, 17 aa, Homo sapiens
  CDR3 for alpha chain variable domain of TCR clone 68820 (TRAV3, TRAJ42)
CAVRDRDYGGSQGNLIF

SEQ ID NO: 137640 - protein, 14 aa, Homo sapiens
  CDR3 for beta chain variable domain of TCR clone 68820 (TRBV19, TRBJ2-5)
CASSMTGKQETQYF

SEQ ID NO: 137641 - protein, 14 aa, Homo sapiens
  CDR3 for alpha chain variable domain of TCR clone 68821 (TRAV12-2, TRAJ45)
CAVNIGGGADGLTF

SEQ ID NO: 137642 - protein, 13 aa, Homo sapiens
  CDR3 for beta chain variable domain of TCR clone 68821 (TRBV19, TRBJ2-2)
CASSIWSTGELFS

SEQ ID NO: 137643 - protein, 17 aa, Homo sapiens
  CDR3 for alpha chain variable domain of TCR clone 68822 (TRAV3, TRAJ6)
CAARDGPRAGGSYIPTF

SEQ ID NO: 137644 - protein, 14 aa, Homo sapiens
  CDR3 for beta chain variable domain of TCR clone 68822 (TRBV7-2, TRBJ2-7)
CASSPKTGFYEQYF

SEQ ID NO: 137645 - protein, 14 aa, Homo sapiens
  CDR3 for alpha chain variable domain of TCR clone 68823 (TRAV8-3, TRAJ35)
CAVVPQGFGNVLHC

SEQ ID NO: 137646 - protein, 15 aa, Homo sapiens
  CDR3 for beta chain variable domain of TCR clone 68823 (TRBV20-1, TRBJ2-7)
CSARVPAAYFYEQYF

SEQ ID NO: 137647 - protein, 15 aa, Homo sapiens
  CDR3 for alpha chain variable domain of TCR clone 68824 (TRAV8-3, TRAJ11)
CAVGLLNSGYSTLTF

SEQ ID NO: 137648 - protein, 14 aa, Homo sapiens
  CDR3 for beta chain variable domain of TCR clone 68824 (TRBV7-2, TRBJ2-7)
CASRSQGAAYEQYF

SEQ ID NO: 137649 - protein, 13 aa, Homo sapiens
  CDR3 for alpha chain variable domain of TCR clone 68825 (TRAV8-6, TRAJ13)
CAVRDGGYQKVTF

SEQ ID NO: 137650 - protein, 15 aa, Homo sapiens
  CDR3 for beta chain variable domain of TCR clone 68825 (TRBV7-9, TRBJ2-2)
CASRPEGTSTEELFF

SEQ ID NO: 137651 - protein, 18 aa, Homo sapiens
  CDR3 for alpha chain variable domain of TCR clone 68826 (TRAV21, TRAJ52)
CAVRPSPAGGTSYGKLTF

SEQ ID NO: 137652 - protein, 16 aa, Homo sapiens
  CDR3 for beta chain variable domain of TCR clone 68826 (TRBV2, TRBJ2-3)
CASSTSVEGVTDTQYF

SEQ ID NO: 137653 - protein, 15 aa, Homo sapiens
  CDR3 for alpha chain variable domain of TCR clone 68827 (TRAV17, TRAJ23)
CATDAEDNQGGKLIF

SEQ ID NO: 137654 - protein, 15 aa, Homo sapiens
  CDR3 for beta chain variable domain of TCR clone 68827 (TRBV27, TRBJ2-1)
CASSNGGGSSNEQFF

SEQ ID NO: 137655 - protein, 18 aa, Homo sapiens
  CDR3 for alpha chain variable domain of TCR clone 68828 (TRAV21, TRAJ52)
CAVRPSTAGGTSYGKLTF

SEQ ID NO: 137656 - protein, 16 aa, Homo sapiens
  CDR3 for beta chain variable domain of TCR clone 68828 (TRBV7-3, TRBJ2-1)
CASSLEGYRSYNEQFF

SEQ ID NO: 137657 - protein, 11 aa, Homo sapiens
  CDR3 for alpha chain variable domain of TCR clone 68829 (TRAV35, TRAJ30)
RAGPGDDKIIF

SEQ ID NO: 137658 - protein, 18 aa, Homo sapiens
  CDR3 for beta chain variable domain of TCR clone 68829 (TRBV7-6, TRBJ2-1)
CASSPRTSGMSSYNEQFF

SEQ ID NO: 137659 - protein, 13 aa, Homo sapiens
  CDR3 for alpha chain variable domain of TCR clone 68830 (TRAV13-2, TRAJ49)
CAETLHGGNQFYF

SEQ ID NO: 137660 - protein, 20 aa, Homo sapiens
  CDR3 for beta chain variable domain of TCR clone 68830 (TRBV28, TRBJ2-1)
CASTPIGRSPGLAGGNEQFF

SEQ ID NO: 137661 - protein, 14 aa, Homo sapiens
  CDR3 for alpha chain variable domain of TCR clone 68831 (TRAV5, TRAJ40)
CAESSGSGTYKYIF

SEQ ID NO: 137662 - protein, 14 aa, Homo sapiens
  CDR3 for beta chain variable domain of TCR clone 68831 (TRBV19, TRBJ2-1)
CASPTFVLSGEQFF

SEQ ID NO: 137663 - protein, 14 aa, Homo sapiens
  CDR3 for alpha chain variable domain of TCR clone 68832 (TRAV8-1, TRAJ5)
CAVRTDTGRRALTF

SEQ ID NO: 137664 - protein, 17 aa, Homo sapiens
  CDR3 for beta chain variable domain of TCR clone 68832 (TRBV28, TRBJ1-5)
CASSLSWLVSSNQPQHF

SEQ ID NO: 137665 - protein, 12 aa, Homo sapiens
  CDR3 for alpha chain variable domain of TCR clone 68833 (TRAV17, TRAJ20)
CATDSNDYKLSF

SEQ ID NO: 137666 - protein, 14 aa, Homo sapiens
  CDR3 for beta chain variable domain of TCR clone 68833 (TRBV11-2, TRBJ2-5)
CASSRTGGIETQYF

SEQ ID NO: 137667 - protein, 13 aa, Homo sapiens
  CDR3 for alpha chain variable domain of TCR clone 68834 (TRAV3, TRAJ21)
CAVREPDFNKFYF

SEQ ID NO: 137668 - protein, 16 aa, Homo sapiens
  CDR3 for beta chain variable domain of TCR clone 68834 (TRBV7-2, TRBJ2-5)
CASSSKWLSGQETQYF

SEQ ID NO: 137669 - protein, 14 aa, Homo sapiens
  CDR3 for alpha chain variable domain of TCR clone 68835 (TRAV17, TRAJ16)
CATADFSDGQKLLF

SEQ ID NO: 137670 - protein, 14 aa, Homo sapiens
  CDR3 for beta chain variable domain of TCR clone 68835 (TRBV7-2, TRBJ2-7)
CASSPKTSFYEQYF

SEQ ID NO: 137671 - protein, 13 aa, Homo sapiens
  CDR3 for alpha chain variable domain of TCR clone 68836 (TRAV2, TRAJ15)
CAVDSQAGTALIF

SEQ ID NO: 137672 - protein, 14 aa, Homo sapiens
  CDR3 for beta chain variable domain of TCR clone 68836 (TRBV25-1, TRBJ1-1)
CASTHLGGNTEAFF

SEQ ID NO: 137673 - protein, 14 aa, Homo sapiens
  CDR3 for alpha chain variable domain of TCR clone 68837 (TRAV27, TRAJ23)
CAGAFDNPGGKLIF

SEQ ID NO: 137674 - protein, 15 aa, Homo sapiens
  CDR3 for beta chain variable domain of TCR clone 68837 (TRBV7-3, TRBJ2-7)
CASSLTGQGKYEQYF

SEQ ID NO: 137675 - protein, 14 aa, Homo sapiens
  CDR3 for alpha chain variable domain of TCR clone 68838 (TRAV17, TRAJ57)
CATDPQGGSEKLVF

SEQ ID NO: 137676 - protein, 15 aa, Homo sapiens
  CDR3 for beta chain variable domain of TCR clone 68838 (TRBV7-9, TRBJ1-2)
CASSLDREPNYGYTF

SEQ ID NO: 137677 - protein, 15 aa, Homo sapiens
  CDR3 for alpha chain variable domain of TCR clone 68839 (TRAV21, TRAJ53)
CATLNSVGSNYKLTF

SEQ ID NO: 137678 - protein, 16 aa, Homo sapiens
  CDR3 for beta chain variable domain of TCR clone 68839 (TRBV9, TRBJ2-1)
CASSVGGGGNYNEQFF

SEQ ID NO: 137679 - protein, 11 aa, Homo sapiens
  CDR3 for alpha chain variable domain of TCR clone 68840 (TRAV26-2, TRAJ33)
CILRSRQATIS

SEQ ID NO: 137680 - protein, 13 aa, Homo sapiens
  CDR3 for beta chain variable domain of TCR clone 68840 (TRBV24-1, TRBJ2-2)
CATSDWSTGELFF

SEQ ID NO: 137681 - protein, 14 aa, Homo sapiens
  CDR3 for alpha chain variable domain of TCR clone 68841 (TRAV36/DV7, TRAJ13)
WGSGENGGYQKVTF

SEQ ID NO: 137682 - protein, 15 aa, Homo sapiens
  CDR3 for beta chain variable domain of TCR clone 68841 (TRBV19, TRBJ2-1)
CASSTGTSPYNEQFF

SEQ ID NO: 137683 - protein, 17 aa, Homo sapiens
  CDR3 for alpha chain variable domain of TCR clone 68842 (TRAV8-6, TRAJ58)
CAVSSWVGETSGSRLTF

SEQ ID NO: 137684 - protein, 17 aa, Homo sapiens
  CDR3 for beta chain variable domain of TCR clone 68842 (TRBV11-2, TRBJ2-1)
CASSLYPPGVEYYEQFF

SEQ ID NO: 137685 - protein, 11 aa, Homo sapiens
  CDR3 for alpha chain variable domain of TCR clone 68843 (TRAV2, TRAJ33)
CAVDSNYQLIW

SEQ ID NO: 137686 - protein, 16 aa, Homo sapiens
  CDR3 for beta chain variable domain of TCR clone 68843 (TRBV19, TRBJ2-3)
CASSPGAASRTDTQYF

SEQ ID NO: 137687 - protein, 15 aa, Homo sapiens
  CDR3 for alpha chain variable domain of TCR clone 68844 (TRAV12-3, TRAJ42)
CAMSGHGGSQGNLIF

SEQ ID NO: 137688 - protein, 18 aa, Homo sapiens
  CDR3 for beta chain variable domain of TCR clone 68844 (TRBV7-2, TRBJ2-7)
CASSLAQGLRDSSYEQYF

SEQ ID NO: 137689 - protein, 12 aa, Homo sapiens
  CDR3 for alpha chain variable domain of TCR clone 68845 (TRAV3, TRAJ43)
CAVRDPNNDMRF

SEQ ID NO: 137690 - protein, 15 aa, Homo sapiens
  CDR3 for beta chain variable domain of TCR clone 68845 (TRBV29-1, TRBJ2-7)
CSVEFFDRGSYEQYF

SEQ ID NO: 137691 - protein, 15 aa, Homo sapiens
  CDR3 for alpha chain variable domain of TCR clone 68846 (TRAV3, TRAJ22)
CAVRDRGGSARQLTF

SEQ ID NO: 137692 - protein, 14 aa, Homo sapiens
  CDR3 for beta chain variable domain of TCR clone 68846 (TRBV7-9, TRBJ2-5)
CASSLVGGEETQYF

SEQ ID NO: 137693 - protein, 13 aa, Homo sapiens
  CDR3 for alpha chain variable domain of TCR clone 68847 (TRAV13-2, TRAJ13)
CAERPGGYQKVTF

SEQ ID NO: 137694 - protein, 15 aa, Homo sapiens
  CDR3 for beta chain variable domain of TCR clone 68847 (TRBV4-1, TRBJ1-4)
CASSDTGGTNEKLSF

SEQ ID NO: 137695 - protein, 18 aa, Homo sapiens
  CDR3 for alpha chain variable domain of TCR clone 68848 (TRAV21, TRAJ52)
CVVRPSPAGGTSYGKLTF

SEQ ID NO: 137696 - protein, 13 aa, Homo sapiens
  CDR3 for beta chain variable domain of TCR clone 68848 (TRBV7-3, TRBJ1-1)
CASSQDWGAEAFF

SEQ ID NO: 137697 - protein, 11 aa, Homo sapiens
  CDR3 for alpha chain variable domain of TCR clone 68849 (TRAV2, TRAJ23)
CAVETRGKLIF

SEQ ID NO: 137698 - protein, 14 aa, Homo sapiens
  CDR3 for beta chain variable domain of TCR clone 68849 (TRBV2, TRBJ2-3)
RASSEGQNTDTQYF

SEQ ID NO: 137699 - protein, 13 aa, Homo sapiens
  CDR3 for alpha chain variable domain of TCR clone 68850 (TRAV2, TRAJ9)
CAVESTGGFKTIS

SEQ ID NO: 137700 - protein, 15 aa, Homo sapiens
  CDR3 for beta chain variable domain of TCR clone 68850 (TRBV10-3, TRBJ2-1)
CAVTFGGGTDNEQFF

SEQ ID NO: 137701 - protein, 15 aa, Homo sapiens
  CDR3 for alpha chain variable domain of TCR clone 68851 (TRAV26-2, TRAJ13)
CILRDLSGGYQKVTF

SEQ ID NO: 137702 - protein, 20 aa, Homo sapiens
  CDR3 for beta chain variable domain of TCR clone 68851 (TRBV7-9, TRBJ2-1)
CASSLEGQDLAPSSYNEQFF

SEQ ID NO: 137703 - protein, 18 aa, Homo sapiens
  CDR3 for alpha chain variable domain of TCR clone 68852 (TRAV21, TRAJ52)
GAVRPSPAGGTSYGKLTF

SEQ ID NO: 137704 - protein, 13 aa, Homo sapiens
  CDR3 for beta chain variable domain of TCR clone 68852 (TRBV7-3, TRBJ1-1)
CASSQDWGAEAFF

SEQ ID NO: 137705 - protein, 14 aa, Homo sapiens
  CDR3 for alpha chain variable domain of TCR clone 68853 (TRAV17, TRAJ57)
CATDAKGGSEKLVF

SEQ ID NO: 137706 - protein, 15 aa, Homo sapiens
  CDR3 for beta chain variable domain of TCR clone 68853 (TRBV7-2, TRBJ2-1)
CASTHGTGTYNEQFF

SEQ ID NO: 137707 - protein, 14 aa, Homo sapiens
  CDR3 for alpha chain variable domain of TCR clone 68854 (TRAV4, TRAJ20)
CLVGRRSNDYKLSF

SEQ ID NO: 137708 - protein, 18 aa, Homo sapiens
  CDR3 for beta chain variable domain of TCR clone 68854 (TRBV2, TRBJ2-5)
CASSGDPQGGGAQETQYF

SEQ ID NO: 137709 - protein, 16 aa, Homo sapiens
  CDR3 for alpha chain variable domain of TCR clone 68855 (TRAV26-1, TRAJ50)
CIVRVEAGTSYDKVIF

SEQ ID NO: 137710 - protein, 13 aa, Homo sapiens
  CDR3 for beta chain variable domain of TCR clone 68855 (TRBV25-1, TRBJ1-2)
CASSENMGRGHTF

SEQ ID NO: 137711 - protein, 15 aa, Homo sapiens
  CDR3 for alpha chain variable domain of TCR clone 68856 (TRAV27, TRAJ50)
CAGVGRGTSYDKVIF

SEQ ID NO: 137712 - protein, 14 aa, Homo sapiens
  CDR3 for beta chain variable domain of TCR clone 68856 (TRBV7-2, TRBJ1-1)
CDSSFYDLNTEAFF

SEQ ID NO: 137713 - protein, 14 aa, Homo sapiens
  CDR3 for alpha chain variable domain of TCR clone 68857 (TRAV1-2, TRAJ8)
CAVREDTGFQKLVF

SEQ ID NO: 137714 - protein, 13 aa, Homo sapiens
  CDR3 for beta chain variable domain of TCR clone 68857 (TRBV12-4, TRBJ1-2)
CASSSGLTVIATF

SEQ ID NO: 137715 - protein, 13 aa, Homo sapiens
  CDR3 for alpha chain variable domain of TCR clone 68858 (TRAV27, TRAJ45)
CRNSGGGADGLTF

SEQ ID NO: 137716 - protein, 17 aa, Homo sapiens
  CDR3 for beta chain variable domain of TCR clone 68858 (TRBV11-2, TRBJ2-1)
CASSLYPPGVEYNEQFF

SEQ ID NO: 137717 - protein, 14 aa, Homo sapiens
  CDR3 for alpha chain variable domain of TCR clone 68859 (TRAV12-2, TRAJ33)
CAVKRARSNYKLIW

SEQ ID NO: 137718 - protein, 12 aa, Homo sapiens
  CDR3 for beta chain variable domain of TCR clone 68859 (TRBV24-1, TRBJ2-3)
CATSDSTDTQYF

SEQ ID NO: 137719 - protein, 14 aa, Homo sapiens
  CDR3 for alpha chain variable domain of TCR clone 68860 (TRAV3, TRAJ37)
CAVKESGNTGKLIF

SEQ ID NO: 137720 - protein, 16 aa, Homo sapiens
  CDR3 for beta chain variable domain of TCR clone 68860 (TRBV2, TRBJ2-3)
CASSTSVEGVTDTQYF

SEQ ID NO: 137721 - protein, 14 aa, Homo sapiens
  CDR3 for alpha chain variable domain of TCR clone 68861 (TRAV1-2, TRAJ16)
CAVNRFSDGQKLLF

SEQ ID NO: 137722 - protein, 13 aa, Homo sapiens
  CDR3 for beta chain variable domain of TCR clone 68861 (TRBV7-3, TRBJ1-1)
CASSLTQGTEAFF

SEQ ID NO: 137723 - protein, 13 aa, Homo sapiens
  CDR3 for alpha chain variable domain of TCR clone 68862 (TRAV1-1, TRAJ9)
CAAQNTGGFKTIF

SEQ ID NO: 137724 - protein, 14 aa, Homo sapiens
  CDR3 for beta chain variable domain of TCR clone 68862 (TRBV20-1, TRBJ2-1)
CSAQIGGSANEQFF

SEQ ID NO: 137725 - protein, 13 aa, Homo sapiens
  CDR3 for alpha chain variable domain of TCR clone 68863 (TRAV3, TRAJ21)
CAVREPDCNKFYF

SEQ ID NO: 137726 - protein, 14 aa, Homo sapiens
  CDR3 for beta chain variable domain of TCR clone 68863 (TRBV4-1, TRBJ2-2)
CASSQAVNTGELFF

SEQ ID NO: 137727 - protein, 13 aa, Homo sapiens
  CDR3 for alpha chain variable domain of TCR clone 68864 (TRAV8-3, TRAJ36)
CAVGATGANNLFF

SEQ ID NO: 137728 - protein, 13 aa, Homo sapiens
  CDR3 for beta chain variable domain of TCR clone 68864 (TRBV20-1, TRBJ1-1)
CSARVGGNTEAFF

SEQ ID NO: 137729 - protein, 15 aa, Homo sapiens
  CDR3 for alpha chain variable domain of TCR clone 68865 (TRAV3, TRAJ22)
CAVRDRGGSARQLTF

SEQ ID NO: 137730 - protein, 14 aa, Homo sapiens
  CDR3 for beta chain variable domain of TCR clone 68865 (TRBV7-2, TRBJ1-1)
CASSFLTGTTEAFF

SEQ ID NO: 137731 - protein, 14 aa, Homo sapiens
  CDR3 for alpha chain variable domain of TCR clone 68866 (TRAV1-2, TRAJ8)
CAVREDAGFQKLVF

SEQ ID NO: 137732 - protein, 14 aa, Homo sapiens
  CDR3 for beta chain variable domain of TCR clone 68866 (TRBV5-4, TRBJ1-1)
CASSLDSRRDEAFF

SEQ ID NO: 137733 - protein, 14 aa, Homo sapiens
  CDR3 for alpha chain variable domain of TCR clone 68867 (TRAV1-2, TRAJ8)
CAVREDTGFQKLVF

SEQ ID NO: 137734 - protein, 16 aa, Homo sapiens
  CDR3 for beta chain variable domain of TCR clone 68867 (TRBV28, TRBJ2-5)
CASSFSPAGGWETQYF

SEQ ID NO: 137735 - protein, 13 aa, Homo sapiens
  CDR3 for alpha chain variable domain of TCR clone 68868 (TRAV21, TRAJ27)
CAARPGNAGKSTF

SEQ ID NO: 137736 - protein, 15 aa, Homo sapiens
  CDR3 for beta chain variable domain of TCR clone 68868 (TRBV20-1, TRBJ1-1)
CSASRGVTGNTEAFF

SEQ ID NO: 137737 - protein, 11 aa, Homo sapiens
  CDR3 for alpha chain variable domain of TCR clone 68869 (TRAV13-1, TRAJ6)
CVTLGSYIPTF

SEQ ID NO: 137738 - protein, 12 aa, Homo sapiens
  CDR3 for beta chain variable domain of TCR clone 68869 (TRBV11-2, TRBJ2-1)
CASSPGNNEQFF

SEQ ID NO: 137739 - protein, 14 aa, Homo sapiens
  CDR3 for alpha chain variable domain of TCR clone 68870 (TRAV12-3, TRAJ10)
IHLPLTGGGNKLTF

SEQ ID NO: 137740 - protein, 14 aa, Homo sapiens
  CDR3 for beta chain variable domain of TCR clone 68870 (TRBV6-1, TRBJ1-3)
CASVQGGGGNTIYF

SEQ ID NO: 137741 - protein, 15 aa, Homo sapiens
  CDR3 for alpha chain variable domain of TCR clone 68871 (TRAV12-3, TRAJ6)
CAMSAITGGSYIPTF

SEQ ID NO: 137742 - protein, 16 aa, Homo sapiens
  CDR3 for beta chain variable domain of TCR clone 68871 (TRBV20-1, TRBJ1-2)
CSASMGQGVANYGYTF

SEQ ID NO: 137743 - protein, 11 aa, Homo sapiens
  CDR3 for alpha chain variable domain of TCR clone 68872 (TRAV35, TRAJ30)
CAGERDDKIIF

SEQ ID NO: 137744 - protein, 14 aa, Homo sapiens
  CDR3 for beta chain variable domain of TCR clone 68872 (TRBV12-5, TRBJ2-5)
CASGSRTHQETQYF

SEQ ID NO: 137745 - protein, 13 aa, Homo sapiens
  CDR3 for alpha chain variable domain of TCR clone 68873 (TRAV26-1, TRAJ34)
CIVRPWITDKLLF

SEQ ID NO: 137746 - protein, 13 aa, Homo sapiens
  CDR3 for beta chain variable domain of TCR clone 68873 (TRBV5-1, TRBJ2-1)
CASSLGSYNEQFF

SEQ ID NO: 137747 - protein, 16 aa, Homo sapiens
  CDR3 for alpha chain variable domain of TCR clone 68874 (TRAV8-3, TRAJ13)
CAVGAYPSGGYQEVTF

SEQ ID NO: 137748 - protein, 13 aa, Homo sapiens
  CDR3 for beta chain variable domain of TCR clone 68874 (TRBV7-9, TRBJ1-2)
CASSLKQNYGYTF

SEQ ID NO: 137749 - protein, 18 aa, Homo sapiens
  CDR3 for alpha chain variable domain of TCR clone 68875 (TRAV21, TRAJ52)
CAVRPFPAGGTSYGKLTF

SEQ ID NO: 137750 - protein, 17 aa, Homo sapiens
  CDR3 for beta chain variable domain of TCR clone 68875 (TRBV14, TRBJ2-3)
CASSQEPSGLSTDTQYF

SEQ ID NO: 137751 - protein, 11 aa, Homo sapiens
  CDR3 for alpha chain variable domain of TCR clone 68876 (TRAV2, TRAJ33)
CAVESNYQLIW

SEQ ID NO: 137752 - protein, 15 aa, Homo sapiens
  CDR3 for beta chain variable domain of TCR clone 68876 (TRBV19, TRBJ1-2)
CASSVGQVLNYGYTF

SEQ ID NO: 137753 - protein, 14 aa, Homo sapiens
  CDR3 for alpha chain variable domain of TCR clone 68877 (TRAV16, TRAJ32)
CALQSGGATNKLIF

SEQ ID NO: 137754 - protein, 17 aa, Homo sapiens
  CDR3 for beta chain variable domain of TCR clone 68877 (TRBV20-1, TRBJ2-1)
CSASSSGLAGSYNEQFF

SEQ ID NO: 137755 - protein, 14 aa, Homo sapiens
  CDR3 for alpha chain variable domain of TCR clone 68878 (TRAV12-2, TRAJ40)
CAVKIPSGTYKYIF

SEQ ID NO: 137756 - protein, 18 aa, Homo sapiens
  CDR3 for beta chain variable domain of TCR clone 68878 (TRBV20-1, TRBJ2-3)
CSASGLAGGPGTTDTQYF

SEQ ID NO: 137757 - protein, 12 aa, Homo sapiens
  CDR3 for alpha chain variable domain of TCR clone 68879 (TRAV35, TRAJ39)
LAPNNAGNMLTV

SEQ ID NO: 137758 - protein, 16 aa, Homo sapiens
  CDR3 for beta chain variable domain of TCR clone 68879 (TRBV2, TRBJ2-3)
CASSTSVEGVTDTQYF

SEQ ID NO: 137759 - protein, 15 aa, Homo sapiens
  CDR3 for alpha chain variable domain of TCR clone 68880 (TRAV12-2, TRAJ43)
CAFDMRFGAGTRLTV

SEQ ID NO: 137760 - protein, 14 aa, Homo sapiens
  CDR3 for beta chain variable domain of TCR clone 68880 (TRBV7-2, TRBJ2-7)
CASRSQGAAYEQYF

SEQ ID NO: 137761 - protein, 14 aa, Homo sapiens
  CDR3 for alpha chain variable domain of TCR clone 68881 (TRAV12-2, TRAJ40)
CTVKIPSGTYKYIF

SEQ ID NO: 137762 - protein, 14 aa, Homo sapiens
  CDR3 for beta chain variable domain of TCR clone 68881 (TRBV11-2, TRBJ1-5)
CASSLDRGRQPQHF

SEQ ID NO: 137763 - protein, 15 aa, Homo sapiens
  CDR3 for alpha chain variable domain of TCR clone 68882 (TRAV17, TRAJ45)
CATAYSGGGADGLAF

SEQ ID NO: 137764 - protein, 17 aa, Homo sapiens
  CDR3 for beta chain variable domain of TCR clone 68882 (TRBV5-1, TRBJ1-5)
CASSLVGREEGNQPQHF

SEQ ID NO: 137765 - protein, 15 aa, Homo sapiens
  CDR3 for alpha chain variable domain of TCR clone 68883 (TRAV12-1, TRAJ42)
CVVTRDGGSQGNLIF

SEQ ID NO: 137766 - protein, 14 aa, Homo sapiens
  CDR3 for beta chain variable domain of TCR clone 68883 (TRBV11-2, TRBJ2-3)
CASSLSGGANTQYF

SEQ ID NO: 137767 - protein, 10 aa, Homo sapiens
  CDR3 for alpha chain variable domain of TCR clone 68884 (TRAV1-2, TRAJ20)
CALNDYKLSF

SEQ ID NO: 137768 - protein, 14 aa, Homo sapiens
  CDR3 for beta chain variable domain of TCR clone 68884 (TRBV12-5, TRBJ2-5)
CASGSRTHQETQYF

SEQ ID NO: 137769 - protein, 16 aa, Homo sapiens
  CDR3 for alpha chain variable domain of TCR clone 68885 (TRAV12-2, TRAJ10)
CAVNRVLTGGGNKLTF

SEQ ID NO: 137770 - protein, 13 aa, Homo sapiens
  CDR3 for beta chain variable domain of TCR clone 68885 (TRBV29-1, TRBJ2-7)
CSVKREGNYEQYF

SEQ ID NO: 137771 - protein, 16 aa, Homo sapiens
  CDR3 for alpha chain variable domain of TCR clone 68886 (TRAV16, TRAJ42)
CARKMNYGGSQGNLIF

SEQ ID NO: 137772 - protein, 13 aa, Homo sapiens
  CDR3 for beta chain variable domain of TCR clone 68886 (TRBV20-1, TRBJ2-7)
CSASPPSSYEQYV

SEQ ID NO: 137773 - protein, 12 aa, Homo sapiens
  CDR3 for alpha chain variable domain of TCR clone 68887 (TRAV21, TRAJ33)
CAVQDSNYQLIW

SEQ ID NO: 137774 - protein, 18 aa, Homo sapiens
  CDR3 for beta chain variable domain of TCR clone 68887 (TRBV19, TRBJ2-6)
CASSADRAGSSGANVLTF

SEQ ID NO: 137775 - protein, 13 aa, Homo sapiens
  CDR3 for alpha chain variable domain of TCR clone 68888 (TRAV12-2, TRAJ12)
CAVNGDSSYKLIF

SEQ ID NO: 137776 - protein, 15 aa, Homo sapiens
  CDR3 for beta chain variable domain of TCR clone 68888 (TRBV20-1, TRBJ1-1)
CSASRGVTGNTEAFF

SEQ ID NO: 137777 - protein, 14 aa, Homo sapiens
  CDR3 for alpha chain variable domain of TCR clone 68889 (TRAV12-2, TRAJ15)
CAPHTGKAGTALIF

SEQ ID NO: 137778 - protein, 17 aa, Homo sapiens
  CDR3 for beta chain variable domain of TCR clone 68889 (TRBV5-5, TRBJ1-2)
CASSLGSLDGQSEGYTF

SEQ ID NO: 137779 - protein, 10 aa, Homo sapiens
  CDR3 for alpha chain variable domain of TCR clone 68890 (TRAV8-4, TRAJ43)
CAVSADDMRF

SEQ ID NO: 137780 - protein, 16 aa, Homo sapiens
  CDR3 for beta chain variable domain of TCR clone 68890 (TRBV20-1, TRBJ2-1)
CSALTWTSGSYNEQFF

SEQ ID NO: 137781 - protein, 15 aa, Homo sapiens
  CDR3 for alpha chain variable domain of TCR clone 68891 (TRAV27, TRAJ38)
CAARRNAGDNRKLIW

SEQ ID NO: 137782 - protein, 15 aa, Homo sapiens
  CDR3 for beta chain variable domain of TCR clone 68891 (TRBV5-1, TRBJ2-1)
CASSPPRAPYNEQFF

SEQ ID NO: 137783 - protein, 19 aa, Homo sapiens
  CDR3 for alpha chain variable domain of TCR clone 68892 (TRAV1-2, TRAJ26)
CLLPLCCERPDNYGQNFVF

SEQ ID NO: 137784 - protein, 15 aa, Homo sapiens
  CDR3 for beta chain variable domain of TCR clone 68892 (TRBV9, TRBJ1-6)
CASRVAGTGDSPLHF

SEQ ID NO: 137785 - protein, 15 aa, Homo sapiens
  CDR3 for alpha chain variable domain of TCR clone 68893 (TRAV23/DV6, TRAJ13)
CAAWPGGGGYEKVTF

SEQ ID NO: 137786 - protein, 17 aa, Homo sapiens
  CDR3 for beta chain variable domain of TCR clone 68893 (TRBV19, TRBJ2-7)
CASSISFYDSYPYEQYF

SEQ ID NO: 137787 - protein, 15 aa, Homo sapiens
  CDR3 for alpha chain variable domain of TCR clone 68894 (TRAV17, TRAJ13)
CATDAGSGGYQKFTF

SEQ ID NO: 137788 - protein, 17 aa, Homo sapiens
  CDR3 for beta chain variable domain of TCR clone 68894 (TRBV11-2, TRBJ2-1)
CASSLYPPGVEYNEQFF

SEQ ID NO: 137789 - protein, 16 aa, Homo sapiens
  CDR3 for alpha chain variable domain of TCR clone 68895 (TRAV3, TRAJ37)
CAVRPHGSGNTAKLIF

SEQ ID NO: 137790 - protein, 16 aa, Homo sapiens
  CDR3 for beta chain variable domain of TCR clone 68895 (TRBV9, TRBJ1-2)
CASSVEEKVSPYGYTF

SEQ ID NO: 137791 - protein, 16 aa, Homo sapiens
  CDR3 for alpha chain variable domain of TCR clone 68896 (TRAV3, TRAJ21)
CAVRDIERGNFNKFYF

SEQ ID NO: 137792 - protein, 14 aa, Homo sapiens
  CDR3 for beta chain variable domain of TCR clone 68896 (TRBV19, TRBJ1-5)
CASRAPDSFLSQHF

SEQ ID NO: 137793 - protein, 12 aa, Homo sapiens
  CDR3 for alpha chain variable domain of TCR clone 68897 (TRAV1-1, TRAJ43)
CAPRVSSNDMRF

SEQ ID NO: 137794 - protein, 15 aa, Homo sapiens
  CDR3 for beta chain variable domain of TCR clone 68897 (TRBV5-1, TRBJ2-7)
CASSLGGFTTYEQYF

SEQ ID NO: 137795 - protein, 15 aa, Homo sapiens
  CDR3 for alpha chain variable domain of TCR clone 68898 (TRAV25, TRAJ53)
CPTSNSGGSNYKLTF

SEQ ID NO: 137796 - protein, 15 aa, Homo sapiens
  CDR3 for beta chain variable domain of TCR clone 68898 (TRBV27, TRBJ2-3)
CASSLGLAGPDTQYF

SEQ ID NO: 137797 - protein, 14 aa, Homo sapiens
  CDR3 for alpha chain variable domain of TCR clone 68899 (TRAV12-1, TRAJ12)
CVVTRMDSSYKLIF

SEQ ID NO: 137798 - protein, 16 aa, Homo sapiens
  CDR3 for beta chain variable domain of TCR clone 68899 (TRBV2, TRBJ2-7)
CASSEPWTGPSYEQYF

SEQ ID NO: 137799 - protein, 12 aa, Homo sapiens
  CDR3 for alpha chain variable domain of TCR clone 68900 (TRAV21, TRAJ42)
CAVEGSQGNLIF

SEQ ID NO: 137800 - protein, 14 aa, Homo sapiens
  CDR3 for beta chain variable domain of TCR clone 68900 (TRBV12-4, TRBJ1-1)
CASSLGTGGTEAFF

SEQ ID NO: 137801 - protein, 16 aa, Homo sapiens
  CDR3 for alpha chain variable domain of TCR clone 68901 (TRAV3, TRAJ32)
CAVRDMRAGGGNKLIF

SEQ ID NO: 137802 - protein, 14 aa, Homo sapiens
  CDR3 for beta chain variable domain of TCR clone 68901 (TRBV15, TRBJ2-5)
CATSGGTRTETQYF

SEQ ID NO: 137803 - protein, 13 aa, Homo sapiens
  CDR3 for alpha chain variable domain of TCR clone 68902 (TRAV21, TRAJ27)
CAARPGNAGKSTF

SEQ ID NO: 137804 - protein, 12 aa, Homo sapiens
  CDR3 for beta chain variable domain of TCR clone 68902 (TRBV11-2, TRBJ2-2)
CASGLGGGELFF

SEQ ID NO: 137805 - protein, 13 aa, Homo sapiens
  CDR3 for alpha chain variable domain of TCR clone 68903 (TRAV13-1, TRAJ37)
CAARSGNTGKLIS

SEQ ID NO: 137806 - protein, 14 aa, Homo sapiens
  CDR3 for beta chain variable domain of TCR clone 68903 (TRBV12-4, TRBJ2-3)
CASSLGQGTDTQYF

SEQ ID NO: 137807 - protein, 11 aa, Homo sapiens
  CDR3 for alpha chain variable domain of TCR clone 68904 (TRAV1-1, TRAJ23)
CAVRQGGKLIF

SEQ ID NO: 137808 - protein, 13 aa, Homo sapiens
  CDR3 for beta chain variable domain of TCR clone 68904 (TRBV7-6, TRBJ1-2)
CASSLVADYGYTF

SEQ ID NO: 137809 - protein, 14 aa, Homo sapiens
  CDR3 for alpha chain variable domain of TCR clone 68905 (TRAV13-1, TRAJ53)
CAASISGSNYKLTF

SEQ ID NO: 137810 - protein, 15 aa, Homo sapiens
  CDR3 for beta chain variable domain of TCR clone 68905 (TRBV4-1, TRBJ1-4)
CASSGTGGTNEKLFF

SEQ ID NO: 137811 - protein, 12 aa, Homo sapiens
  CDR3 for alpha chain variable domain of TCR clone 68906 (TRAV12-3, TRAJ20)
CAMVIGDYKLSF

SEQ ID NO: 137812 - protein, 14 aa, Homo sapiens
  CDR3 for beta chain variable domain of TCR clone 68906 (TRBV5-5, TRBJ1-5)
CASSGQGVDQPQHF

SEQ ID NO: 137813 - protein, 16 aa, Homo sapiens
  CDR3 for alpha chain variable domain of TCR clone 68907 (TRAV30, TRAJ24)
CGTEIVDADSWGKFQF

SEQ ID NO: 137814 - protein, 15 aa, Homo sapiens
  CDR3 for beta chain variable domain of TCR clone 68907 (TRBV7-9, TRBJ1-4)
CASSARTGGNETLFF

SEQ ID NO: 137815 - protein, 12 aa, Homo sapiens
  CDR3 for alpha chain variable domain of TCR clone 68908 (TRAV12-1, TRAJ23)
CVVNIPGGKIIF

SEQ ID NO: 137816 - protein, 15 aa, Homo sapiens
  CDR3 for beta chain variable domain of TCR clone 68908 (TRBV7-2, TRBJ2-7)
CASSLVSSGSYEQYF

SEQ ID NO: 137817 - protein, 14 aa, Homo sapiens
  CDR3 for alpha chain variable domain of TCR clone 68909 (TRAV16, TRAJ15)
CALSFNQAGTALIF

SEQ ID NO: 137818 - protein, 13 aa, Homo sapiens
  CDR3 for beta chain variable domain of TCR clone 68909 (TRBV12-5, TRBJ2-3)
CASGDRQSDTQYF

SEQ ID NO: 137819 - protein, 15 aa, Homo sapiens
  CDR3 for alpha chain variable domain of TCR clone 68910 (TRAV4, TRAJ26)
CLVGGLDNYGQNFVF

SEQ ID NO: 137820 - protein, 13 aa, Homo sapiens
  CDR3 for beta chain variable domain of TCR clone 68910 (TRBV20-1, TRBJ2-5)
CSASVTGRETQYF

SEQ ID NO: 137821 - protein, 13 aa, Homo sapiens
  CDR3 for alpha chain variable domain of TCR clone 68911 (TRAV12-1, TRAJ16)
CVVNGPDGQKLPF

SEQ ID NO: 137822 - protein, 12 aa, Homo sapiens
  CDR3 for beta chain variable domain of TCR clone 68911 (TRBV24-1, TRBJ2-2)
CATSDPGLTGLQ

SEQ ID NO: 137823 - protein, 13 aa, Homo sapiens
  CDR3 for alpha chain variable domain of TCR clone 68912 (TRAV12-1, TRAJ9)
CVVLNTGGFKTIF

SEQ ID NO: 137824 - protein, 13 aa, Homo sapiens
  CDR3 for beta chain variable domain of TCR clone 68912 (TRBV20-1, TRBJ1-1)
CSARGGGNTEAFL

SEQ ID NO: 137825 - protein, 16 aa, Homo sapiens
  CDR3 for alpha chain variable domain of TCR clone 68913 (TRAV3, TRAJ10)
CAVRDMRAGGGKKLTF

SEQ ID NO: 137826 - protein, 16 aa, Homo sapiens
  CDR3 for beta chain variable domain of TCR clone 68913 (TRBV12-5, TRBJ2-5)
CASGPRTSGNQETQYF

SEQ ID NO: 137827 - protein, 14 aa, Homo sapiens
  CDR3 for alpha chain variable domain of TCR clone 68914 (TRAV13-2, TRAJ17)
CAENSKAAGNKLTF

SEQ ID NO: 137828 - protein, 14 aa, Homo sapiens
  CDR3 for beta chain variable domain of TCR clone 68914 (TRBV7-8, TRBJ2-3)
CASSFPDGQDTQYF

SEQ ID NO: 137829 - protein, 16 aa, Homo sapiens
  CDR3 for alpha chain variable domain of TCR clone 68915 (TRAV12-3, TRAJ53)
CAMSPGSGGSNYKLTF

SEQ ID NO: 137830 - protein, 20 aa, Homo sapiens
  CDR3 for beta chain variable domain of TCR clone 68915 (TRBV7-8, TRBJ2-2)
WASSHLFPGPTIHITGELFF

SEQ ID NO: 137831 - protein, 15 aa, Homo sapiens
  CDR3 for alpha chain variable domain of TCR clone 68916 (TRAV21, TRAJ53)
CATLNSGGSNYKLTF

SEQ ID NO: 137832 - protein, 16 aa, Homo sapiens
  CDR3 for beta chain variable domain of TCR clone 68916 (TRBV7-9, TRBJ2-1)
CASSSPQGTTRNEQFF

SEQ ID NO: 137833 - protein, 14 aa, Homo sapiens
  CDR3 for alpha chain variable domain of TCR clone 68917 (TRAV12-3, TRAJ10)
SHLPLTGGGNKLTF

SEQ ID NO: 137834 - protein, 11 aa, Homo sapiens
  CDR3 for beta chain variable domain of TCR clone 68917 (TRBV7-8, TRBJ2-7)
CASSLSLEQYF

SEQ ID NO: 137835 - protein, 13 aa, Homo sapiens
  CDR3 for alpha chain variable domain of TCR clone 68918 (TRAV8-3, TRAJ28)
CAVGAFGSYQLTF

SEQ ID NO: 137836 - protein, 17 aa, Homo sapiens
  CDR3 for beta chain variable domain of TCR clone 68918 (TRBV11-2, TRBJ2-1)
CASSLYPPGVEYNEQFF

SEQ ID NO: 137837 - protein, 11 aa, Homo sapiens
  CDR3 for alpha chain variable domain of TCR clone 68919 (TRAV1-2, TRAJ31)
CAVNNNARLMF

SEQ ID NO: 137838 - protein, 15 aa, Homo sapiens
  CDR3 for beta chain variable domain of TCR clone 68919 (TRBV28, TRBJ2-1)
CASSIIAGGRSDQFF

SEQ ID NO: 137839 - protein, 17 aa, Homo sapiens
  CDR3 for alpha chain variable domain of TCR clone 68920 (TRAV26-1, TRAJ53)
CIVRVDDSGGSNNKLTF

SEQ ID NO: 137840 - protein, 15 aa, Homo sapiens
  CDR3 for beta chain variable domain of TCR clone 68920 (TRBV20-1, TRBJ2-7)
CSARVPAAYFYEQYF

SEQ ID NO: 137841 - protein, 14 aa, Homo sapiens
  CDR3 for alpha chain variable domain of TCR clone 68921 (TRAV23/DV6, TRAJ9)
CASKYWRLQNYLRS

SEQ ID NO: 137842 - protein, 14 aa, Homo sapiens
  CDR3 for beta chain variable domain of TCR clone 68921 (TRBV6-1, TRBJ2-7)
CASTRTGDYYEQYF

SEQ ID NO: 137843 - protein, 12 aa, Homo sapiens
  CDR3 for alpha chain variable domain of TCR clone 68922 (TRAV30, TRAJ43)
CGTEERGNDMRF

SEQ ID NO: 137844 - protein, 11 aa, Homo sapiens
  CDR3 for beta chain variable domain of TCR clone 68922 (TRBV29-1, TRBJ2-5)
RSEDRTGTQYF

SEQ ID NO: 137845 - protein, 13 aa, Homo sapiens
  CDR3 for alpha chain variable domain of TCR clone 68923 (TRAV8-3, TRAJ43)
CAVVPDNNNDMRF

SEQ ID NO: 137846 - protein, 12 aa, Homo sapiens
  CDR3 for beta chain variable domain of TCR clone 68923 (TRBV7-2, TRBJ1-6)
CASSLSSSPLHF

SEQ ID NO: 137847 - protein, 13 aa, Homo sapiens
  CDR3 for alpha chain variable domain of TCR clone 68924 (TRAV27, TRAJ6)
CAGGTRGSYIPTF

SEQ ID NO: 137848 - protein, 14 aa, Homo sapiens
  CDR3 for beta chain variable domain of TCR clone 68924 (TRBV27, TRBJ2-1)
CAGSIAETYNEQFF

SEQ ID NO: 137849 - protein, 14 aa, Homo sapiens
  CDR3 for alpha chain variable domain of TCR clone 68925 (TRAV16, TRAJ33)
CALSAMDSNYQLIW

SEQ ID NO: 137850 - protein, 12 aa, Homo sapiens
  CDR3 for beta chain variable domain of TCR clone 68925 (TRBV5-1, TRBJ1-2)
CARSQDTYGYTF

SEQ ID NO: 137851 - protein, 15 aa, Homo sapiens
  CDR3 for alpha chain variable domain of TCR clone 68926 (TRAV8-3, TRAJ11)
CAMGLLNSGYSTLTF

SEQ ID NO: 137852 - protein, 16 aa, Homo sapiens
  CDR3 for beta chain variable domain of TCR clone 68926 (TRBV7-9, TRBJ1-2)
CASSLGFSSGEDGYTF

SEQ ID NO: 137853 - protein, 13 aa, Homo sapiens
  CDR3 for alpha chain variable domain of TCR clone 68927 (TRAV30, TRAJ34)
CGTVGYKTDKLIF

SEQ ID NO: 137854 - protein, 16 aa, Homo sapiens
  CDR3 for beta chain variable domain of TCR clone 68927 (TRBV7-9, TRBJ1-2)
CASSLGFSSGEDGYTF

SEQ ID NO: 137855 - protein, 15 aa, Homo sapiens
  CDR3 for alpha chain variable domain of TCR clone 68928 (TRAV12-2, TRAJ53)
CAVNGGGGSNYKLTF

SEQ ID NO: 137856 - protein, 13 aa, Homo sapiens
  CDR3 for beta chain variable domain of TCR clone 68928 (TRBV3-1, TRBJ1-1)
CASGPGVITEAFF

SEQ ID NO: 137857 - protein, 15 aa, Homo sapiens
  CDR3 for alpha chain variable domain of TCR clone 68929 (TRAV17, TRAJ37)
CATDHGSSNTGKLTF

SEQ ID NO: 137858 - protein, 14 aa, Homo sapiens
  CDR3 for beta chain variable domain of TCR clone 68929 (TRBV7-2, TRBJ2-3)
CASSRTSGADTQYF

SEQ ID NO: 137859 - protein, 14 aa, Homo sapiens
  CDR3 for alpha chain variable domain of TCR clone 68930 (TRAV12-3, TRAJ9)
CAVSPNTGGFKTIF

SEQ ID NO: 137860 - protein, 13 aa, Homo sapiens
  CDR3 for beta chain variable domain of TCR clone 68930 (TRBV4-1, TRBJ2-1)
CASSQAGGDEQFF

SEQ ID NO: 137861 - protein, 15 aa, Homo sapiens
  CDR3 for alpha chain variable domain of TCR clone 68931 (TRAV8-2, TRAJ27)
CVVSDRGTNASKSTF

SEQ ID NO: 137862 - protein, 15 aa, Homo sapiens
  CDR3 for beta chain variable domain of TCR clone 68931 (TRBV15, TRBJ1-4)
CATSRDMGSYEKLFF

SEQ ID NO: 137863 - protein, 13 aa, Homo sapiens
  CDR3 for alpha chain variable domain of TCR clone 68932 (TRAV27, TRAJ6)
CAGGTRGSYIPTF

SEQ ID NO: 137864 - protein, 14 aa, Homo sapiens
  CDR3 for beta chain variable domain of TCR clone 68932 (TRBV6-3, TRBJ1-1)
CASSYQRRDTEAFL

SEQ ID NO: 137865 - protein, 14 aa, Homo sapiens
  CDR3 for alpha chain variable domain of TCR clone 68933 (TRAV1-2, TRAJ16)
CAVNRFSDGQKMLF

SEQ ID NO: 137866 - protein, 13 aa, Homo sapiens
  CDR3 for beta chain variable domain of TCR clone 68933 (TRBV6-5, TRBJ1-1)
QTSVYFCALRAFF

SEQ ID NO: 137867 - protein, 15 aa, Homo sapiens
  CDR3 for alpha chain variable domain of TCR clone 68934 (TRAV3, TRAJ5)
CAVRDLDTGRRALTF

SEQ ID NO: 137868 - protein, 13 aa, Homo sapiens
  CDR3 for beta chain variable domain of TCR clone 68934 (TRBV12-4, TRBJ2-7)
CASSSTETYEQYF

SEQ ID NO: 137869 - protein, 13 aa, Homo sapiens
  CDR3 for alpha chain variable domain of TCR clone 68935 (TRAV13-1, TRAJ39)
RAASIWAGNMLTF

SEQ ID NO: 137870 - protein, 13 aa, Homo sapiens
  CDR3 for beta chain variable domain of TCR clone 68935 (TRBV11-2, TRBJ1-3)
CASSLEPVNTIYF

SEQ ID NO: 137871 - protein, 12 aa, Homo sapiens
  CDR3 for alpha chain variable domain of TCR clone 68936 (TRAV3, TRAJ26)
CALRDYGQNFVF

SEQ ID NO: 137872 - protein, 16 aa, Homo sapiens
  CDR3 for beta chain variable domain of TCR clone 68936 (TRBV11-2, TRBJ1-2)
CASSPSGREANYGYTF

SEQ ID NO: 137873 - protein, 17 aa, Homo sapiens
  CDR3 for alpha chain variable domain of TCR clone 68937 (TRAV4, TRAJ13)
CLVGVQVSSGGYQKVTF

SEQ ID NO: 137874 - protein, 13 aa, Homo sapiens
  CDR3 for beta chain variable domain of TCR clone 68937 (TRBV10-3, TRBJ2-7)
CASKLAVNYEQYF

SEQ ID NO: 137875 - protein, 14 aa, Homo sapiens
  CDR3 for alpha chain variable domain of TCR clone 68938 (TRAV17, TRAJ6)
CATDASGGSYIPTF

SEQ ID NO: 137876 - protein, 19 aa, Homo sapiens
  CDR3 for beta chain variable domain of TCR clone 68938 (TRBV4-3, TRBJ2-7)
CARSQEFIGWQVTPYEQYF

SEQ ID NO: 137877 - protein, 16 aa, Homo sapiens
  CDR3 for alpha chain variable domain of TCR clone 68939 (TRAV3, TRAJ5)
CAVRNLMDTGRRALTF

SEQ ID NO: 137878 - protein, 16 aa, Homo sapiens
  CDR3 for beta chain variable domain of TCR clone 68939 (TRBV4-2, TRBJ2-7)
CASSQEGLANSYGQYF

SEQ ID NO: 137879 - protein, 14 aa, Homo sapiens
  CDR3 for alpha chain variable domain of TCR clone 68940 (TRAV13-2, TRAJ4)
CAEKGPKGYNKLIF

SEQ ID NO: 137880 - protein, 13 aa, Homo sapiens
  CDR3 for beta chain variable domain of TCR clone 68940 (TRBV18, TRBJ2-5)
YASSPPGKETQYF

SEQ ID NO: 137881 - protein, 14 aa, Homo sapiens
  CDR3 for alpha chain variable domain of TCR clone 68941 (TRAV1-2, TRAJ16)
CAVNRLSDGQKLLF

SEQ ID NO: 137882 - protein, 12 aa, Homo sapiens
  CDR3 for beta chain variable domain of TCR clone 68941 (TRBV5-1, TRBJ2-7)
CASSSTTYEQYF

SEQ ID NO: 137883 - protein, 16 aa, Homo sapiens
  CDR3 for alpha chain variable domain of TCR clone 68942 (TRAV26-1, TRAJ52)
CIVSNAGGASYGKLTF

SEQ ID NO: 137884 - protein, 15 aa, Homo sapiens
  CDR3 for beta chain variable domain of TCR clone 68942 (TRBV7-3, TRBJ2-1)
CASSPTGGGEVEQFF

SEQ ID NO: 137885 - protein, 12 aa, Homo sapiens
  CDR3 for alpha chain variable domain of TCR clone 68943 (TRAV16, TRAJ10)
CSRTGGGNKLTF

SEQ ID NO: 137886 - protein, 18 aa, Homo sapiens
  CDR3 for beta chain variable domain of TCR clone 68943 (TRBV11-2, TRBJ2-3)
CASSLGGASRGAPNTQYF

SEQ ID NO: 137887 - protein, 14 aa, Homo sapiens
  CDR3 for alpha chain variable domain of TCR clone 68944 (TRAV12-3, TRAJ10)
SHLPLTGGGNKLTF

SEQ ID NO: 137888 - protein, 14 aa, Homo sapiens
  CDR3 for beta chain variable domain of TCR clone 68944 (TRBV7-2, TRBJ2-3)
CASSQTGSSYTQYF

SEQ ID NO: 137889 - protein, 17 aa, Homo sapiens
  CDR3 for alpha chain variable domain of TCR clone 68945 (TRAV14/DV4, TRAJ28)
CAMREGYSGAGSYQLTF

SEQ ID NO: 137890 - protein, 14 aa, Homo sapiens
  CDR3 for beta chain variable domain of TCR clone 68945 (TRBV5-7, TRBJ1-1)
CASSLAGDWTEALF

SEQ ID NO: 137891 - protein, 14 aa, Homo sapiens
  CDR3 for alpha chain variable domain of TCR clone 68946 (TRAV20, TRAJ42)
CAVQAGGSQGNLIF

SEQ ID NO: 137892 - protein, 14 aa, Homo sapiens
  CDR3 for beta chain variable domain of TCR clone 68946 (TRBV19, TRBJ2-1)
CASGKSTQYNEQFF

SEQ ID NO: 137893 - protein, 15 aa, Homo sapiens
  CDR3 for alpha chain variable domain of TCR clone 68947 (TRAV12-3, TRAJ49)
CAMAVTPNTGNQFYF

SEQ ID NO: 137894 - protein, 18 aa, Homo sapiens
  CDR3 for beta chain variable domain of TCR clone 68947 (TRBV4-1, TRBJ1-5)
CASRQDPRGQGLNQPQHF

SEQ ID NO: 137895 - protein, 14 aa, Homo sapiens
  CDR3 for alpha chain variable domain of TCR clone 68948 (TRAV12-3, TRAJ29)
CAMILLSGNTPLVF

SEQ ID NO: 137896 - protein, 16 aa, Homo sapiens
  CDR3 for beta chain variable domain of TCR clone 68948 (TRBV28, TRBJ2-7)
CASSSGTSWGGYEQYF

SEQ ID NO: 137897 - protein, 14 aa, Homo sapiens
  CDR3 for alpha chain variable domain of TCR clone 68949 (TRAV17, TRAJ16)
CATADFSDGQKLLF

SEQ ID NO: 137898 - protein, 15 aa, Homo sapiens
  CDR3 for beta chain variable domain of TCR clone 68949 (TRBV18, TRBJ2-1)
CASSPPNASYNEQFF

SEQ ID NO: 137899 - protein, 16 aa, Homo sapiens
  CDR3 for alpha chain variable domain of TCR clone 68950 (TRAV26-1, TRAJ37)
CIYARHGSSNTGKLIF

SEQ ID NO: 137900 - protein, 16 aa, Homo sapiens
  CDR3 for beta chain variable domain of TCR clone 68950 (TRBV7-3, TRBJ2-1)
CASSLEGYRSYNEQFF

SEQ ID NO: 137901 - protein, 15 aa, Homo sapiens
  CDR3 for alpha chain variable domain of TCR clone 68951 (TRAV25, TRAJ52)
CAGRPGGTSYGKLTF

SEQ ID NO: 137902 - protein, 18 aa, Homo sapiens
  CDR3 for beta chain variable domain of TCR clone 68951 (TRBV11-2, TRBJ2-3)
CASSVGGASRGAPNTQYF

SEQ ID NO: 137903 - protein, 14 aa, Homo sapiens
  CDR3 for alpha chain variable domain of TCR clone 68952 (TRAV17, TRAJ53)
CATGAGGSNYKLTF

SEQ ID NO: 137904 - protein, 16 aa, Homo sapiens
  CDR3 for beta chain variable domain of TCR clone 68952 (TRBV4-1, TRBJ1-1)
CASSQDAGMGNTEAFF

SEQ ID NO: 137905 - protein, 12 aa, Homo sapiens
  CDR3 for alpha chain variable domain of TCR clone 68953 (TRAV27, )
CAARRMLATTIS

SEQ ID NO: 137906 - protein, 13 aa, Homo sapiens
  CDR3 for beta chain variable domain of TCR clone 68953 (TRBV12-5, TRBJ2-3)
CASGDRQSDTQYF

SEQ ID NO: 137907 - protein, 15 aa, Homo sapiens
  CDR3 for alpha chain variable domain of TCR clone 68954 (TRAV4, TRAJ10)
CLVGDGSGGGNKLTF

SEQ ID NO: 137908 - protein, 15 aa, Homo sapiens
  CDR3 for beta chain variable domain of TCR clone 68954 (TRBV27, TRBJ2-3)
CASSFLAGVIDTQYF

SEQ ID NO: 137909 - protein, 14 aa, Homo sapiens
  CDR3 for alpha chain variable domain of TCR clone 68955 (TRAV1-2, TRAJ8)
CAVREDTGFQKLVF

SEQ ID NO: 137910 - protein, 16 aa, Homo sapiens
  CDR3 for beta chain variable domain of TCR clone 68955 (TRBV7-6, TRBJ2-7)
CASSGGTGALSHEQYF

SEQ ID NO: 137911 - protein, 14 aa, Homo sapiens
  CDR3 for alpha chain variable domain of TCR clone 68956 (TRAV17, TRAJ16)
CATADFSDVQKLLF

SEQ ID NO: 137912 - protein, 15 aa, Homo sapiens
  CDR3 for beta chain variable domain of TCR clone 68956 (TRBV6-5, TRBJ2-1)
CASSYDAGAGNEQFF

SEQ ID NO: 137913 - protein, 14 aa, Homo sapiens
  CDR3 for alpha chain variable domain of TCR clone 68957 (TRAV12-2, TRAJ44)
CAVNPAGTASKLTF

SEQ ID NO: 137914 - protein, 18 aa, Homo sapiens
  CDR3 for beta chain variable domain of TCR clone 68957 (TRBV11-2, TRBJ2-3)
CASSLGGASRGAPNTQYF

SEQ ID NO: 137915 - protein, 13 aa, Homo sapiens
  CDR3 for alpha chain variable domain of TCR clone 68958 (TRAV1-2, TRAJ9)
CAALNTGGFKTIF

SEQ ID NO: 137916 - protein, 16 aa, Homo sapiens
  CDR3 for beta chain variable domain of TCR clone 68958 (TRBV19, TRBJ1-1)
CASRFGGPVTGTEAFF

SEQ ID NO: 137917 - protein, 14 aa, Homo sapiens
  CDR3 for alpha chain variable domain of TCR clone 68959 (TRAV1-2, TRAJ16)
CAVNRFSDGQKLLF

SEQ ID NO: 137918 - protein, 15 aa, Homo sapiens
  CDR3 for beta chain variable domain of TCR clone 68959 (TRBV5-1, TRBJ2-7)
CASSLGDFTTYEQYF

SEQ ID NO: 137919 - protein, 13 aa, Homo sapiens
  CDR3 for alpha chain variable domain of TCR clone 68960 (TRAV21, TRAJ24)
GLMTTDSWGKLQV

SEQ ID NO: 137920 - protein, 12 aa, Homo sapiens
  CDR3 for beta chain variable domain of TCR clone 68960 (TRBV11-2, TRBJ2-7)
CASSPPADEQYF

SEQ ID NO: 137921 - protein, 12 aa, Homo sapiens
  CDR3 for alpha chain variable domain of TCR clone 68961 (TRAV3, TRAJ43)
CAVRDPNNDMRF

SEQ ID NO: 137922 - protein, 16 aa, Homo sapiens
  CDR3 for beta chain variable domain of TCR clone 68961 (TRBV6-5, TRBJ2-1)
CASSETLAGHYNEQFF

SEQ ID NO: 137923 - protein, 14 aa, Homo sapiens
  CDR3 for alpha chain variable domain of TCR clone 68962 (TRAV8-6, TRAJ29)
CAVSGWAGNTPLVF

SEQ ID NO: 137924 - protein, 13 aa, Homo sapiens
  CDR3 for beta chain variable domain of TCR clone 68962 (TRBV7-3, TRBJ1-1)
CASSQDWGAEAFF

SEQ ID NO: 137925 - protein, 16 aa, Homo sapiens
  CDR3 for alpha chain variable domain of TCR clone 68963 (TRAV1-2, TRAJ10)
CAVRGVLTGGGNKLTF

SEQ ID NO: 137926 - protein, 14 aa, Homo sapiens
  CDR3 for beta chain variable domain of TCR clone 68963 (TRBV20-1, TRBJ1-1)
CSAQTRIGGTEAFF

SEQ ID NO: 137927 - protein, 17 aa, Homo sapiens
  CDR3 for alpha chain variable domain of TCR clone 68964 (TRAV26-1, TRAJ53)
CIVRVDDSGGSNYKLTF

SEQ ID NO: 137928 - protein, 14 aa, Homo sapiens
  CDR3 for beta chain variable domain of TCR clone 68964 (TRBV12-5, TRBJ2-5)
CASGSRTHQETQYF

SEQ ID NO: 137929 - protein, 17 aa, Homo sapiens
  CDR3 for alpha chain variable domain of TCR clone 68965 (TRAV4, TRAJ13)
CLVGVQGSSGGYQKVTF

SEQ ID NO: 137930 - protein, 14 aa, Homo sapiens
  CDR3 for beta chain variable domain of TCR clone 68965 (TRBV7-3, TRBJ2-1)
CASSLAGGTNEQFF

SEQ ID NO: 137931 - protein, 14 aa, Homo sapiens
  CDR3 for alpha chain variable domain of TCR clone 68966 (TRAV1-2, TRAJ8)
CAVREDTGFQKLVF

SEQ ID NO: 137932 - protein, 16 aa, Homo sapiens
  CDR3 for beta chain variable domain of TCR clone 68966 (TRBV2, TRBJ2-7)
CASSEPWTGPSYEQYF

SEQ ID NO: 137933 - protein, 12 aa, Homo sapiens
  CDR3 for alpha chain variable domain of TCR clone 68967 (TRAV3, TRAJ20)
CAVRDPDYKLSF

SEQ ID NO: 137934 - protein, 15 aa, Homo sapiens
  CDR3 for beta chain variable domain of TCR clone 68967 (TRBV7-9, TRBJ1-6)
CASSSPGRGNSPLHF

SEQ ID NO: 137935 - protein, 14 aa, Homo sapiens
  CDR3 for alpha chain variable domain of TCR clone 68968 (TRAV1-2, TRAJ6)
CAVSLSGGSYIPTC

SEQ ID NO: 137936 - protein, 15 aa, Homo sapiens
  CDR3 for beta chain variable domain of TCR clone 68968 (TRBV28, TRBJ2-7)
CASSPGGRGFYEQYF

SEQ ID NO: 137937 - protein, 11 aa, Homo sapiens
  CDR3 for alpha chain variable domain of TCR clone 68969 (TRAV3, TRAJ21)
CAVGNFNKFYF

SEQ ID NO: 137938 - protein, 14 aa, Homo sapiens
  CDR3 for beta chain variable domain of TCR clone 68969 (TRBV12-5, TRBJ2-5)
CASGSRTHQGTQYF

SEQ ID NO: 137939 - protein, 14 aa, Homo sapiens
  CDR3 for alpha chain variable domain of TCR clone 68970 (TRAV17, TRAJ40)
CATALTSGTYKYIF

SEQ ID NO: 137940 - protein, 17 aa, Homo sapiens
  CDR3 for beta chain variable domain of TCR clone 68970 (TRBV6-5, TRBJ2-7)
CASSYSFWGQGSYEQYF

SEQ ID NO: 137941 - protein, 14 aa, Homo sapiens
  CDR3 for alpha chain variable domain of TCR clone 68971 (TRAV12-2, TRAJ13)
CAVKKTGGYQKVTF

SEQ ID NO: 137942 - protein, 14 aa, Homo sapiens
  CDR3 for beta chain variable domain of TCR clone 68971 (TRBV15, TRBJ2-1)
CATSGVEDYNEQFF

SEQ ID NO: 137943 - protein, 15 aa, Homo sapiens
  CDR3 for alpha chain variable domain of TCR clone 68972 (TRAV27, TRAJ38)
CAARRNAGNNRELIW

SEQ ID NO: 137944 - protein, 13 aa, Homo sapiens
  CDR3 for beta chain variable domain of TCR clone 68972 (TRBV7-3, TRBJ2-1)
CASSLDSYNEQFF

SEQ ID NO: 137945 - protein, 13 aa, Homo sapiens
  CDR3 for alpha chain variable domain of TCR clone 68973 (TRAV26-1, TRAJ34)
CIVRPWITDKLIF

SEQ ID NO: 137946 - protein, 12 aa, Homo sapiens
  CDR3 for beta chain variable domain of TCR clone 68973 (TRBV7-9, TRBJ2-7)
CASSLEGYEQYF

SEQ ID NO: 137947 - protein, 14 aa, Homo sapiens
  CDR3 for alpha chain variable domain of TCR clone 68974 (TRAV3, TRAJ21)
CAVESQANFNKFYF

SEQ ID NO: 137948 - protein, 18 aa, Homo sapiens
  CDR3 for beta chain variable domain of TCR clone 68974 (TRBV7-9, TRBJ2-1)
WASSLAVSGTSGRNEQFF

SEQ ID NO: 137949 - protein, 11 aa, Homo sapiens
  CDR3 for alpha chain variable domain of TCR clone 68975 (TRAV27, TRAJ47)
SIVEYGNKLVF

SEQ ID NO: 137950 - protein, 18 aa, Homo sapiens
  CDR3 for beta chain variable domain of TCR clone 68975 (TRBV2, TRBJ2-1)
CASRGLAGGPRTYSEQFF

SEQ ID NO: 137951 - protein, 18 aa, Homo sapiens
  CDR3 for alpha chain variable domain of TCR clone 68976 (TRAV21, TRAJ52)
CAVRPSPAGGTSYGKLPF

SEQ ID NO: 137952 - protein, 12 aa, Homo sapiens
  CDR3 for beta chain variable domain of TCR clone 68976 (TRBV11-2, TRBJ2-2)
CASSLGGGELFF

SEQ ID NO: 137953 - protein, 13 aa, Homo sapiens
  CDR3 for alpha chain variable domain of TCR clone 68977 (TRAV1-2, TRAJ9)
CAALNTGGYKTIF

SEQ ID NO: 137954 - protein, 13 aa, Homo sapiens
  CDR3 for beta chain variable domain of TCR clone 68977 (TRBV19, TRBJ1-2)
CASSVPGQDGYTF

SEQ ID NO: 137955 - protein, 15 aa, Homo sapiens
  CDR3 for alpha chain variable domain of TCR clone 68978 (TRAV8-4, TRAJ37)
CAVTDGSSNTGKLIF

SEQ ID NO: 137956 - protein, 13 aa, Homo sapiens
  CDR3 for beta chain variable domain of TCR clone 68978 (TRBV12-4, TRBJ2-5)
CASSLGGSRTQYF

SEQ ID NO: 137957 - protein, 12 aa, Homo sapiens
  CDR3 for alpha chain variable domain of TCR clone 68979 (TRAV16, TRAJ26)
CALRSYGQNFFF

SEQ ID NO: 137958 - protein, 14 aa, Homo sapiens
  CDR3 for beta chain variable domain of TCR clone 68979 (TRBV10-3, TRBJ2-1)
CAISSDLAYNEQFF

SEQ ID NO: 137959 - protein, 12 aa, Homo sapiens
  CDR3 for alpha chain variable domain of TCR clone 68980 (TRAV13-1, TRAJ21)
CAAFFNFSKFYF

SEQ ID NO: 137960 - protein, 14 aa, Homo sapiens
  CDR3 for beta chain variable domain of TCR clone 68980 (TRBV4-1, TRBJ2-7)
CASRLTSGSYEQYF

SEQ ID NO: 137961 - protein, 16 aa, Homo sapiens
  CDR3 for alpha chain variable domain of TCR clone 68981 (TRAV30, TRAJ24)
CGTAIVDADSWGKFQF

SEQ ID NO: 137962 - protein, 15 aa, Homo sapiens
  CDR3 for beta chain variable domain of TCR clone 68981 (TRBV7-9, TRBJ1-4)
CASSARTGGNEKLFF

SEQ ID NO: 137963 - protein, 11 aa, Homo sapiens
  CDR3 for alpha chain variable domain of TCR clone 68982 (TRAV23/DV6, TRAJ48)
CAPRWGEKLTF

SEQ ID NO: 137964 - protein, 14 aa, Homo sapiens
  CDR3 for beta chain variable domain of TCR clone 68982 (TRBV29-1, TRBJ1-3)
CSVADRVVGNTMYF

SEQ ID NO: 137965 - protein, 12 aa, Homo sapiens
  CDR3 for alpha chain variable domain of TCR clone 68983 (TRAV20, TRAJ33)
CAVRGSNYQLIW

SEQ ID NO: 137966 - protein, 15 aa, Homo sapiens
  CDR3 for beta chain variable domain of TCR clone 68983 (TRBV11-3, TRBJ2-3)
CASLKDGGEGDTQYF

SEQ ID NO: 137967 - protein, 13 aa, Homo sapiens
  CDR3 for alpha chain variable domain of TCR clone 68984 (TRAV25, TRAJ26)
CAGMDNYGQNFVF

SEQ ID NO: 137968 - protein, 13 aa, Homo sapiens
  CDR3 for beta chain variable domain of TCR clone 68984 (TRBV7-3, TRBJ1-1)
CASSQDWGAEAFF

SEQ ID NO: 137969 - protein, 12 aa, Homo sapiens
  CDR3 for alpha chain variable domain of TCR clone 68985 (TRAV13-1, TRAJ49)
CAASPMGNQFYF

SEQ ID NO: 137970 - protein, 17 aa, Homo sapiens
  CDR3 for beta chain variable domain of TCR clone 68985 (TRBV11-2, TRBJ2-1)
CASSLCPPGVEYNEQFF

SEQ ID NO: 137971 - protein, 11 aa, Homo sapiens
  CDR3 for alpha chain variable domain of TCR clone 68986 (TRAV17, TRAJ9)
CATTGGFKTIF

SEQ ID NO: 137972 - protein, 14 aa, Homo sapiens
  CDR3 for beta chain variable domain of TCR clone 68986 (TRBV7-2, TRBJ2-7)
CASRSQGAAYEQYF

SEQ ID NO: 137973 - protein, 14 aa, Homo sapiens
  CDR3 for alpha chain variable domain of TCR clone 68987 (TRAV26-1, TRAJ38)
CIADNAGNYRKLIW

SEQ ID NO: 137974 - protein, 13 aa, Homo sapiens
  CDR3 for beta chain variable domain of TCR clone 68987 (TRBV7-9, TRBJ2-3)
CASSPGSTDTQYF

SEQ ID NO: 137975 - protein, 15 aa, Homo sapiens
  CDR3 for alpha chain variable domain of TCR clone 68988 (TRAV27, TRAJ38)
CAARRNAGNNRKLVW

SEQ ID NO: 137976 - protein, 11 aa, Homo sapiens
  CDR3 for beta chain variable domain of TCR clone 68988 (TRBV12-4, TRBJ2-2)
CASSSAGELFF

SEQ ID NO: 137977 - protein, 14 aa, Homo sapiens
  CDR3 for alpha chain variable domain of TCR clone 68989 (TRAV2, TRAJ39)
CAVEGDNAGNMLTF

SEQ ID NO: 137978 - protein, 14 aa, Homo sapiens
  CDR3 for beta chain variable domain of TCR clone 68989 (TRBV28, TRBJ2-7)
CASILRARGNEQYF

SEQ ID NO: 137979 - protein, 16 aa, Homo sapiens
  CDR3 for alpha chain variable domain of TCR clone 68990 (TRAV1-2, TRAJ10)
CAVRGVLTGGGNKITF

SEQ ID NO: 137980 - protein, 15 aa, Homo sapiens
  CDR3 for beta chain variable domain of TCR clone 68990 (TRBV29-1, TRBJ2-1)
CSVGRHALFYNEQFF

SEQ ID NO: 137981 - protein, 14 aa, Homo sapiens
  CDR3 for alpha chain variable domain of TCR clone 68991 (TRAV12-2, TRAJ40)
CAVKIPSGTYKYIF

SEQ ID NO: 137982 - protein, 13 aa, Homo sapiens
  CDR3 for beta chain variable domain of TCR clone 68991 (TRBV4-1, TRBJ2-2)
CASSQENTGELFF

SEQ ID NO: 137983 - protein, 14 aa, Homo sapiens
  CDR3 for alpha chain variable domain of TCR clone 68992 (TRAV26-1, TRAJ38)
CIADNAGNNRKLIW

SEQ ID NO: 137984 - protein, 11 aa, Homo sapiens
  CDR3 for beta chain variable domain of TCR clone 68992 (TRBV7-8, TRBJ2-7)
CASSLSLEQYF

SEQ ID NO: 137985 - protein, 14 aa, Homo sapiens
  CDR3 for alpha chain variable domain of TCR clone 68993 (TRAV1-2, TRAJ16)
CAVNRFSDGQRLLF

SEQ ID NO: 137986 - protein, 20 aa, Homo sapiens
  CDR3 for beta chain variable domain of TCR clone 68993 (TRBV7-8, TRBJ2-2)
CAGSHLFPGPTIHITGELFF

SEQ ID NO: 137987 - protein, 16 aa, Homo sapiens
  CDR3 for alpha chain variable domain of TCR clone 68994 (TRAV30, TRAJ24)
CGTEIVDADSWGKFQF

SEQ ID NO: 137988 - protein, 12 aa, Homo sapiens
  CDR3 for beta chain variable domain of TCR clone 68994 (TRBV11-2, TRBJ2-2)
CASSRPTGELFF

SEQ ID NO: 137989 - protein, 13 aa, Homo sapiens
  CDR3 for alpha chain variable domain of TCR clone 68995 (TRAV8-2, TRAJ9)
CVVSAGGGFKTIF

SEQ ID NO: 137990 - protein, 16 aa, Homo sapiens
  CDR3 for beta chain variable domain of TCR clone 68995 (TRBV28, TRBJ2-7)
CASSSGTSGRGYEQYF

SEQ ID NO: 137991 - protein, 12 aa, Homo sapiens
  CDR3 for alpha chain variable domain of TCR clone 68996 (TRAV12-3, TRAJ17)
CAMTLTGNKLTF

SEQ ID NO: 137992 - protein, 16 aa, Homo sapiens
  CDR3 for beta chain variable domain of TCR clone 68996 (TRBV6-1, TRBJ1-2)
CASSGAWQGRSHGYTF

SEQ ID NO: 137993 - protein, 13 aa, Homo sapiens
  CDR3 for alpha chain variable domain of TCR clone 68997 (TRAV27, TRAJ58)
CAGAETSGSRLTF

SEQ ID NO: 137994 - protein, 13 aa, Homo sapiens
  CDR3 for beta chain variable domain of TCR clone 68997 (TRBV7-2, TRBJ2-1)
CTSNRDRWNEQFF

SEQ ID NO: 137995 - protein, 17 aa, Homo sapiens
  CDR3 for alpha chain variable domain of TCR clone 68998 (TRAV9-2, TRAJ45)
CALSGYYSGGGADGLTF

SEQ ID NO: 137996 - protein, 15 aa, Homo sapiens
  CDR3 for beta chain variable domain of TCR clone 68998 (TRBV20-1, TRBJ2-7)
CSARDRVSGMDEQYF

SEQ ID NO: 137997 - protein, 17 aa, Homo sapiens
  CDR3 for alpha chain variable domain of TCR clone 68999 (TRAV26-1, TRAJ22)
CIVRVPSHSGSARQLPF

SEQ ID NO: 137998 - protein, 16 aa, Homo sapiens
  CDR3 for beta chain variable domain of TCR clone 68999 (TRBV28, TRBJ2-1)
CASRRSGRVVGNEQFF

SEQ ID NO: 137999 - protein, 14 aa, Homo sapiens
  CDR3 for alpha chain variable domain of TCR clone 69000 (TRAV1-2, TRAJ8)
CAVREDTGFQKLVF

SEQ ID NO: 138000 - protein, 13 aa, Homo sapiens
  CDR3 for beta chain variable domain of TCR clone 69000 (TRBV10-3, TRBJ1-2)
CAISERDSYGYAF

SEQ ID NO: 138001 - protein, 13 aa, Homo sapiens
  CDR3 for alpha chain variable domain of TCR clone 69001 (TRAV2, TRAJ40)
CAVVTSGTYKYIF

SEQ ID NO: 138002 - protein, 16 aa, Homo sapiens
  CDR3 for beta chain variable domain of TCR clone 69001 (TRBV29-1, TRBJ1-2)
CSVEANRDIANNGYTF

SEQ ID NO: 138003 - protein, 12 aa, Homo sapiens
  CDR3 for alpha chain variable domain of TCR clone 69002 (TRAV12-3, TRAJ17)
CAMTLTGNKLTF

SEQ ID NO: 138004 - protein, 16 aa, Homo sapiens
  CDR3 for beta chain variable domain of TCR clone 69002 (TRBV12-4, TRBJ2-5)
CASSFFVRGRKETQYF

SEQ ID NO: 138005 - protein, 14 aa, Homo sapiens
  CDR3 for alpha chain variable domain of TCR clone 69003 (TRAV12-3, TRAJ10)
SHLPLTGGGNKLTF

SEQ ID NO: 138006 - protein, 13 aa, Homo sapiens
  CDR3 for beta chain variable domain of TCR clone 69003 (TRBV7-9, TRBJ1-2)
CASSLKQSYGYTF

SEQ ID NO: 138007 - protein, 12 aa, Homo sapiens
  CDR3 for alpha chain variable domain of TCR clone 69004 (TRAV12-2, TRAJ10)
WGVTGGGNKLTF

SEQ ID NO: 138008 - protein, 15 aa, Homo sapiens
  CDR3 for beta chain variable domain of TCR clone 69004 (TRBV11-2, TRBJ2-1)
CASSLGTSGLNEQFF

SEQ ID NO: 138009 - protein, 14 aa, Homo sapiens
  CDR3 for alpha chain variable domain of TCR clone 69005 (TRAV8-1, TRAJ23)
CAVGTYNQGGKLIF

SEQ ID NO: 138010 - protein, 14 aa, Homo sapiens
  CDR3 for beta chain variable domain of TCR clone 69005 (TRBV2, TRBJ2-5)
CASSEVLAQETQYF

SEQ ID NO: 138011 - protein, 15 aa, Homo sapiens
  CDR3 for alpha chain variable domain of TCR clone 69006 (TRAV35, TRAJ58)
CAGRRQETSGSSLTF

SEQ ID NO: 138012 - protein, 11 aa, Homo sapiens
  CDR3 for beta chain variable domain of TCR clone 69006 (TRBV11-2, TRBJ1-1)
CASSINTEAFF

SEQ ID NO: 138013 - protein, 15 aa, Homo sapiens
  CDR3 for alpha chain variable domain of TCR clone 69007 (TRAV26-1, TRAJ40)
CIVRVTTSGTYKYNF

SEQ ID NO: 138014 - protein, 12 aa, Homo sapiens
  CDR3 for beta chain variable domain of TCR clone 69007 (TRBV7-9, TRBJ1-4)
CASSTDREKLFF

SEQ ID NO: 138015 - protein, 14 aa, Homo sapiens
  CDR3 for alpha chain variable domain of TCR clone 69008 (TRAV26-1, TRAJ38)
CIADNAGNNRKLIW

SEQ ID NO: 138016 - protein, 13 aa, Homo sapiens
  CDR3 for beta chain variable domain of TCR clone 69008 (TRBV7-9, TRBJ1-2)
CASSVKQNYGYTF

SEQ ID NO: 138017 - protein, 14 aa, Homo sapiens
  CDR3 for alpha chain variable domain of TCR clone 69009 (TRAV8-2, TRAJ4)
CVVSPSGGYNKLIF

SEQ ID NO: 138018 - protein, 15 aa, Homo sapiens
  CDR3 for beta chain variable domain of TCR clone 69009 (TRBV4-1, TRBJ1-4)
CASSDSGGTNEKLFF

SEQ ID NO: 138019 - protein, 21 aa, Homo sapiens
  CDR3 for alpha chain variable domain of TCR clone 69010 (TRAV26-1, )
CIVSHRVEGFWNQIPDIRTLT

SEQ ID NO: 138020 - protein, 14 aa, Homo sapiens
  CDR3 for beta chain variable domain of TCR clone 69010 (TRBV20-1, TRBJ2-7)
CSAWTALSSYEQYF

SEQ ID NO: 138021 - protein, 13 aa, Homo sapiens
  CDR3 for alpha chain variable domain of TCR clone 69011 (TRAV3, TRAJ31)
CSVREGNNARLMF

SEQ ID NO: 138022 - protein, 15 aa, Homo sapiens
  CDR3 for beta chain variable domain of TCR clone 69011 (TRBV6-1, TRBJ1-1)
CASRTPGQLNTEAFF

SEQ ID NO: 138023 - protein, 11 aa, Homo sapiens
  CDR3 for alpha chain variable domain of TCR clone 69012 (TRAV23/DV6, TRAJ49)
CAVAPVTSPIL

SEQ ID NO: 138024 - protein, 13 aa, Homo sapiens
  CDR3 for beta chain variable domain of TCR clone 69012 (TRBV6-1, TRBJ1-1)
CASSRQGNTEAFF

SEQ ID NO: 138025 - protein, 13 aa, Homo sapiens
  CDR3 for alpha chain variable domain of TCR clone 69013 (TRAV13-2, TRAJ48)
CAEMDFGNEKLTF

SEQ ID NO: 138026 - protein, 15 aa, Homo sapiens
  CDR3 for beta chain variable domain of TCR clone 69013 (TRBV7-9, TRBJ1-6)
CASSSPGRGNSPRHF

SEQ ID NO: 138027 - protein, 13 aa, Homo sapiens
  CDR3 for alpha chain variable domain of TCR clone 69014 (TRAV26-1, TRAJ33)
CIVRVDSNYQLIW

SEQ ID NO: 138028 - protein, 13 aa, Homo sapiens
  CDR3 for beta chain variable domain of TCR clone 69014 (TRBV20-1, TRBJ2-2)
CSASAAGTGELFF

SEQ ID NO: 138029 - protein, 11 aa, Homo sapiens
  CDR3 for alpha chain variable domain of TCR clone 69015 (TRAV1-1, TRAJ16)
CAAGDGQKLLS

SEQ ID NO: 138030 - protein, 15 aa, Homo sapiens
  CDR3 for beta chain variable domain of TCR clone 69015 (TRBV28, TRBJ1-2)
CASIPQGSDDYGYTF

SEQ ID NO: 138031 - protein, 15 aa, Homo sapiens
  CDR3 for alpha chain variable domain of TCR clone 69016 (TRAV22, TRAJ45)
CAAKYSGGGADGLTF

SEQ ID NO: 138032 - protein, 17 aa, Homo sapiens
  CDR3 for beta chain variable domain of TCR clone 69016 (TRBV7-2, TRBJ2-3)
CASSLEARGTSTDTQYF

SEQ ID NO: 138033 - protein, 11 aa, Homo sapiens
  CDR3 for alpha chain variable domain of TCR clone 69017 (TRAV17, TRAJ9)
CATTGGFNTIF

SEQ ID NO: 138034 - protein, 11 aa, Homo sapiens
  CDR3 for beta chain variable domain of TCR clone 69017 (TRBV29-1, TRBJ2-5)
CSEDRTGTQYF

SEQ ID NO: 138035 - protein, 12 aa, Homo sapiens
  CDR3 for alpha chain variable domain of TCR clone 69018 (TRAV4, TRAJ26)
CLVGDYGQNFVF

SEQ ID NO: 138036 - protein, 13 aa, Homo sapiens
  CDR3 for beta chain variable domain of TCR clone 69018 (TRBV19, TRBJ1-2)
CASSVPGQDGYTF

SEQ ID NO: 138037 - protein, 11 aa, Homo sapiens
  CDR3 for alpha chain variable domain of TCR clone 69019 (TRAV1-2, TRAJ20)
CAVANDYKLSF

SEQ ID NO: 138038 - protein, 14 aa, Homo sapiens
  CDR3 for beta chain variable domain of TCR clone 69019 (TRBV7-2, TRBJ2-7)
CASRSQGAAYEQYF

SEQ ID NO: 138039 - protein, 14 aa, Homo sapiens
  CDR3 for alpha chain variable domain of TCR clone 69020 (TRAV6, TRAJ6)
CALPTSGGSYIPTF

SEQ ID NO: 138040 - protein, 17 aa, Homo sapiens
  CDR3 for beta chain variable domain of TCR clone 69020 (TRBV5-1, TRBJ2-5)
CASSPVALGRNQETQYF

SEQ ID NO: 138041 - protein, 12 aa, Homo sapiens
  CDR3 for alpha chain variable domain of TCR clone 69021 (TRAV13-1, TRAJ9)
CASHTGGFKTIF

SEQ ID NO: 138042 - protein, 14 aa, Homo sapiens
  CDR3 for beta chain variable domain of TCR clone 69021 (TRBV19, TRBJ2-1)
CASPTFVLSGEQFF

SEQ ID NO: 138043 - protein, 13 aa, Homo sapiens
  CDR3 for alpha chain variable domain of TCR clone 69022 (TRAV20, TRAJ37)
CAGCSSNTGKLIF

SEQ ID NO: 138044 - protein, 11 aa, Homo sapiens
  CDR3 for beta chain variable domain of TCR clone 69022 (TRBV12-4, TRBJ2-3)
FASTATDTQYF

SEQ ID NO: 138045 - protein, 16 aa, Homo sapiens
  CDR3 for alpha chain variable domain of TCR clone 69023 (TRAV12-3, TRAJ53)
CAMSPGSGGSNYKPTF

SEQ ID NO: 138046 - protein, 12 aa, Homo sapiens
  CDR3 for beta chain variable domain of TCR clone 69023 (TRBV6-3, TRBJ2-1)
CASSGSYNEQFF

SEQ ID NO: 138047 - protein, 14 aa, Homo sapiens
  CDR3 for alpha chain variable domain of TCR clone 69024 (TRAV13-2, TRAJ42)
CGEWVGGSQGNLIF

SEQ ID NO: 138048 - protein, 12 aa, Homo sapiens
  CDR3 for beta chain variable domain of TCR clone 69024 (TRBV11-2, TRBJ2-2)
CASSLGGGELFF

SEQ ID NO: 138049 - protein, 15 aa, Homo sapiens
  CDR3 for alpha chain variable domain of TCR clone 69025 (TRAV12-3, TRAJ47)
CAMSALVEYGNKLVF

SEQ ID NO: 138050 - protein, 14 aa, Homo sapiens
  CDR3 for beta chain variable domain of TCR clone 69025 (TRBV25-1, TRBJ1-1)
CASTHLGGNTEAFF

SEQ ID NO: 138051 - protein, 12 aa, Homo sapiens
  CDR3 for alpha chain variable domain of TCR clone 69026 (TRAV13-1, TRAJ49)
CAASPMGNQFYF

SEQ ID NO: 138052 - protein, 14 aa, Homo sapiens
  CDR3 for beta chain variable domain of TCR clone 69026 (TRBV19, TRBJ1-5)
CASSYTGSSQPQHF

SEQ ID NO: 138053 - protein, 14 aa, Homo sapiens
  CDR3 for alpha chain variable domain of TCR clone 69027 (TRAV4, TRAJ17)
CLVGDMAAGNKLTF

SEQ ID NO: 138054 - protein, 13 aa, Homo sapiens
  CDR3 for beta chain variable domain of TCR clone 69027 (TRBV7-3, TRBJ1-1)
CASSQDWGAEAFF

SEQ ID NO: 138055 - protein, 13 aa, Homo sapiens
  CDR3 for alpha chain variable domain of TCR clone 69028 (TRAV26-2, TRAJ43)
CILRAVNNNDMRF

SEQ ID NO: 138056 - protein, 13 aa, Homo sapiens
  CDR3 for beta chain variable domain of TCR clone 69028 (TRBV29-1, TRBJ2-2)
CSVYREDTGELFF

SEQ ID NO: 138057 - protein, 17 aa, Homo sapiens
  CDR3 for alpha chain variable domain of TCR clone 69029 (TRAV38-1, TRAJ48)
CAFMRPRSNFGNEKLTF

SEQ ID NO: 138058 - protein, 12 aa, Homo sapiens
  CDR3 for beta chain variable domain of TCR clone 69029 (TRBV25-1, TRBJ2-7)
CASSGGFYEQYF

SEQ ID NO: 138059 - protein, 12 aa, Homo sapiens
  CDR3 for alpha chain variable domain of TCR clone 69030 (TRAV21, TRAJ11)
CAATSGYNTLTF

SEQ ID NO: 138060 - protein, 14 aa, Homo sapiens
  CDR3 for beta chain variable domain of TCR clone 69030 (TRBV20-1, TRBJ2-7)
CSAPELAGVGEQYF

SEQ ID NO: 138061 - protein, 12 aa, Homo sapiens
  CDR3 for alpha chain variable domain of TCR clone 69031 (TRAV12-3, TRAJ17)
CAVTLTGNKLTF

SEQ ID NO: 138062 - protein, 13 aa, Homo sapiens
  CDR3 for beta chain variable domain of TCR clone 69031 (TRBV19, TRBJ2-7)
CASRKAGGSEQYF

SEQ ID NO: 138063 - protein, 16 aa, Homo sapiens
  CDR3 for alpha chain variable domain of TCR clone 69032 (TRAV21, TRAJ22)
CAVKKVSSGSARQLTF

SEQ ID NO: 138064 - protein, 13 aa, Homo sapiens
  CDR3 for beta chain variable domain of TCR clone 69032 (TRBV7-7, TRBJ2-3)
CASSLSRADTQYF

SEQ ID NO: 138065 - protein, 14 aa, Homo sapiens
  CDR3 for alpha chain variable domain of TCR clone 69033 (TRAV1-2, TRAJ8)
CAVREDTGFQKLVF

SEQ ID NO: 138066 - protein, 13 aa, Homo sapiens
  CDR3 for beta chain variable domain of TCR clone 69033 (TRBV9, TRBJ2-1)
CASSVGQGGEQFF

SEQ ID NO: 138067 - protein, 13 aa, Homo sapiens
  CDR3 for alpha chain variable domain of TCR clone 69034 (TRAV3, TRAJ27)
CAVRPLGAGKSTF

SEQ ID NO: 138068 - protein, 13 aa, Homo sapiens
  CDR3 for beta chain variable domain of TCR clone 69034 (TRBV7-9, TRBJ2-3)
GASSPGSTDTQYF

SEQ ID NO: 138069 - protein, 13 aa, Homo sapiens
  CDR3 for alpha chain variable domain of TCR clone 69035 (TRAV1-2, TRAJ12)
CAVSMDSSYKLIL

SEQ ID NO: 138070 - protein, 15 aa, Homo sapiens
  CDR3 for beta chain variable domain of TCR clone 69035 (TRBV27, TRBJ2-5)
CASSLIPSGGETQYF

SEQ ID NO: 138071 - protein, 11 aa, Homo sapiens
  CDR3 for alpha chain variable domain of TCR clone 69036 (TRAV21, TRAJ49)
CAVSFGNQFYF

SEQ ID NO: 138072 - protein, 15 aa, Homo sapiens
  CDR3 for beta chain variable domain of TCR clone 69036 (TRBV10-3, TRBJ2-1)
CATNGGPGQGGEQFF

SEQ ID NO: 138073 - protein, 14 aa, Homo sapiens
  CDR3 for alpha chain variable domain of TCR clone 69037 (TRAV12-2, TRAJ17)
CAVLFKAAGNKLTF

SEQ ID NO: 138074 - protein, 17 aa, Homo sapiens
  CDR3 for beta chain variable domain of TCR clone 69037 (TRBV4-1, TRBJ2-7)
CASSRDPLGVRGGEQYF

SEQ ID NO: 138075 - protein, 17 aa, Homo sapiens
  CDR3 for alpha chain variable domain of TCR clone 69038 (TRAV3, TRAJ42)
CAVRDRDYGGSQGNLIS

SEQ ID NO: 138076 - protein, 15 aa, Homo sapiens
  CDR3 for beta chain variable domain of TCR clone 69038 (TRBV6-6, TRBJ2-7)
CASSYSYGGSYEQYF

SEQ ID NO: 138077 - protein, 13 aa, Homo sapiens
  CDR3 for alpha chain variable domain of TCR clone 69039 (TRAV27, TRAJ8)
CAGGPTGFQKLVF

SEQ ID NO: 138078 - protein, 14 aa, Homo sapiens
  CDR3 for beta chain variable domain of TCR clone 69039 (TRBV7-2, TRBJ2-7)
CASRSQGAAYEQYF

SEQ ID NO: 138079 - protein, 15 aa, Homo sapiens
  CDR3 for alpha chain variable domain of TCR clone 69040 (TRAV2, TRAJ37)
CAVGDGSSNTGKLIF

SEQ ID NO: 138080 - protein, 13 aa, Homo sapiens
  CDR3 for beta chain variable domain of TCR clone 69040 (TRBV20-1, TRBJ1-6)
CSTFREGNSPLHF

SEQ ID NO: 138081 - protein, 12 aa, Homo sapiens
  CDR3 for alpha chain variable domain of TCR clone 69041 (TRAV12-1, TRAJ40)
CVFYSGTYKYIF

SEQ ID NO: 138082 - protein, 18 aa, Homo sapiens
  CDR3 for beta chain variable domain of TCR clone 69041 (TRBV12-4, TRBJ2-2)
CASNLVAGTRGRTGEPFF

SEQ ID NO: 138083 - protein, 11 aa, Homo sapiens
  CDR3 for alpha chain variable domain of TCR clone 69042 (TRAV21, TRAJ34)
CAHYNTDKLIF

SEQ ID NO: 138084 - protein, 13 aa, Homo sapiens
  CDR3 for beta chain variable domain of TCR clone 69042 (TRBV7-6, TRBJ1-2)
CASSLVADYSYTF

SEQ ID NO: 138085 - protein, 15 aa, Homo sapiens
  CDR3 for alpha chain variable domain of TCR clone 69043 (TRAV8-3, TRAJ27)
CAVGPSKTNAGKSTF

SEQ ID NO: 138086 - protein, 15 aa, Homo sapiens
  CDR3 for beta chain variable domain of TCR clone 69043 (TRBV7-2, TRBJ2-1)
CASSYGLAGGNEQFF

SEQ ID NO: 138087 - protein, 18 aa, Homo sapiens
  CDR3 for alpha chain variable domain of TCR clone 69044 (TRAV13-1, TRAJ52)
CAAKNPNAGGTSYGKLTF

SEQ ID NO: 138088 - protein, 15 aa, Homo sapiens
  CDR3 for beta chain variable domain of TCR clone 69044 (TRBV6-1, TRBJ2-3)
FASSERGGITDTQYF

SEQ ID NO: 138089 - protein, 15 aa, Homo sapiens
  CDR3 for alpha chain variable domain of TCR clone 69045 (TRAV29/DV5, TRAJ42)
CAAIGYGGSQGNLIF

SEQ ID NO: 138090 - protein, 16 aa, Homo sapiens
  CDR3 for beta chain variable domain of TCR clone 69045 (TRBV18, TRBJ2-7)
CASSPRSQGISYEQYF

SEQ ID NO: 138091 - protein, 12 aa, Homo sapiens
  CDR3 for alpha chain variable domain of TCR clone 69046 (TRAV10, TRAJ43)
CVVVRVGNDMRL

SEQ ID NO: 138092 - protein, 15 aa, Homo sapiens
  CDR3 for beta chain variable domain of TCR clone 69046 (TRBV2, TRBJ2-7)
CASSEGLARSYEQYF

SEQ ID NO: 138093 - protein, 17 aa, Homo sapiens
  CDR3 for alpha chain variable domain of TCR clone 69047 (TRAV3, TRAJ7)
CAVRDMSPLEGTTDSLL

SEQ ID NO: 138094 - protein, 17 aa, Homo sapiens
  CDR3 for beta chain variable domain of TCR clone 69047 (TRBV15, TRBJ1-2)
CATSGREIDVVNYGDTF

SEQ ID NO: 138095 - protein, 17 aa, Homo sapiens
  CDR3 for alpha chain variable domain of TCR clone 69048 (TRAV8-3, TRAJ50)
CAVGAVDTETSYDKVIF

SEQ ID NO: 138096 - protein, 13 aa, Homo sapiens
  CDR3 for beta chain variable domain of TCR clone 69048 (TRBV7-9, TRBJ2-2)
CASSSAGTGKLFF

SEQ ID NO: 138097 - protein, 16 aa, Homo sapiens
  CDR3 for alpha chain variable domain of TCR clone 69049 (TRAV22, TRAJ45)
CAVERGKRGGADGLTF

SEQ ID NO: 138098 - protein, 12 aa, Homo sapiens
  CDR3 for beta chain variable domain of TCR clone 69049 (TRBV3-1, TRBJ2-1)
CASSQGSSGQFF

SEQ ID NO: 138099 - protein, 14 aa, Homo sapiens
  CDR3 for alpha chain variable domain of TCR clone 69050 (TRAV35, TRAJ33)
CAGSSQDSNYQLIW

SEQ ID NO: 138100 - protein, 16 aa, Homo sapiens
  CDR3 for beta chain variable domain of TCR clone 69050 (TRBV7-3, TRBJ2-2)
CASSLKRGTLSGELFF

SEQ ID NO: 138101 - protein, 14 aa, Homo sapiens
  CDR3 for alpha chain variable domain of TCR clone 69051 (TRAV12-2, TRAJ6)
CASKWGGGSYIPTF

SEQ ID NO: 138102 - protein, 15 aa, Homo sapiens
  CDR3 for beta chain variable domain of TCR clone 69051 (TRBV28, TRBJ2-4)
CAAGSGTLLMGIQYF

SEQ ID NO: 138103 - protein, 15 aa, Homo sapiens
  CDR3 for alpha chain variable domain of TCR clone 69052 (TRAV12-3, TRAJ5)
CAMSGLGTCRRALTF

SEQ ID NO: 138104 - protein, 16 aa, Homo sapiens
  CDR3 for beta chain variable domain of TCR clone 69052 (TRBV20-1, TRBJ2-3)
CSARLHSAGAIDTQYF

SEQ ID NO: 138105 - protein, 14 aa, Homo sapiens
  CDR3 for alpha chain variable domain of TCR clone 69053 (TRAV8-3, TRAJ48)
CRGCGQFGNEKLTF

SEQ ID NO: 138106 - protein, 15 aa, Homo sapiens
  CDR3 for beta chain variable domain of TCR clone 69053 (TRBV28, TRBJ2-4)
CAAGSGTLLMGIQYF

SEQ ID NO: 138107 - protein, 17 aa, Homo sapiens
  CDR3 for alpha chain variable domain of TCR clone 69054 (TRAV16, TRAJ58)
CITVLSNGETSGPRLTF

SEQ ID NO: 138108 - protein, 17 aa, Homo sapiens
  CDR3 for beta chain variable domain of TCR clone 69054 (TRBV18, TRBJ2-1)
CASSKGLSGGADNEQFF

SEQ ID NO: 138109 - protein, 14 aa, Homo sapiens
  CDR3 for alpha chain variable domain of TCR clone 69055 (TRAV13-2, TRAJ43)
CAEIPTYNNNDMPF

SEQ ID NO: 138110 - protein, 15 aa, Homo sapiens
  CDR3 for beta chain variable domain of TCR clone 69055 (TRBV7-9, TRBJ2-2)
CASGPLDTFPGELFF

SEQ ID NO: 138111 - protein, 10 aa, Homo sapiens
  CDR3 for alpha chain variable domain of TCR clone 69056 (TRAV23/DV6, TRAJ57)
CAASSTLSQG

SEQ ID NO: 138112 - protein, 14 aa, Homo sapiens
  CDR3 for beta chain variable domain of TCR clone 69056 (TRBV7-3, TRBJ2-3)
CASSSTGVADTQYF

SEQ ID NO: 138113 - protein, 17 aa, Homo sapiens
  CDR3 for alpha chain variable domain of TCR clone 69057 (TRAV3, TRAJ6)
CAVRDGPRAGGSYIPTF

SEQ ID NO: 138114 - protein, 13 aa, Homo sapiens
  CDR3 for beta chain variable domain of TCR clone 69057 (TRBV5-5, TRBJ2-2)
CASTLGGAGELFF

SEQ ID NO: 138115 - protein, 16 aa, Homo sapiens
  CDR3 for alpha chain variable domain of TCR clone 69058 (TRAV4, TRAJ5)
CIVGPDHGHGQESTYF

SEQ ID NO: 138116 - protein, 15 aa, Homo sapiens
  CDR3 for beta chain variable domain of TCR clone 69058 (TRBV27, TRBJ2-5)
CASSLIPSGGETQYF

SEQ ID NO: 138117 - protein, 16 aa, Homo sapiens
  CDR3 for alpha chain variable domain of TCR clone 69059 (TRAV21, TRAJ45)
CAVSWGAGGGADGLTF

SEQ ID NO: 138118 - protein, 14 aa, Homo sapiens
  CDR3 for beta chain variable domain of TCR clone 69059 (TRBV4-2, TRBJ1-2)
CASSPGGSNYGYTF

SEQ ID NO: 138119 - protein, 15 aa, Homo sapiens
  CDR3 for alpha chain variable domain of TCR clone 69060 (TRAV25, TRAJ53)
CAATGGGGRNYKLTF

SEQ ID NO: 138120 - protein, 19 aa, Homo sapiens
  CDR3 for beta chain variable domain of TCR clone 69060 (TRBV7-2, TRBJ2-3)
CASSFLSRNWGGGTDTQYF

SEQ ID NO: 138121 - protein, 14 aa, Homo sapiens
  CDR3 for alpha chain variable domain of TCR clone 69061 (TRAV2, TRAJ9)
CAVEDRSGGFKTIF

SEQ ID NO: 138122 - protein, 13 aa, Homo sapiens
  CDR3 for beta chain variable domain of TCR clone 69061 (TRBV12-4, TRBJ2-1)
CASSFQGYNEQFF

SEQ ID NO: 138123 - protein, 19 aa, Homo sapiens
  CDR3 for alpha chain variable domain of TCR clone 69062 (TRAV26-1, TRAJ52)
CIVRVHRNAGGTSYGKLTF

SEQ ID NO: 138124 - protein, 15 aa, Homo sapiens
  CDR3 for beta chain variable domain of TCR clone 69062 (TRBV12-4, TRBJ2-5)
CASSPPTGLQETQYF

SEQ ID NO: 138125 - protein, 18 aa, Homo sapiens
  CDR3 for alpha chain variable domain of TCR clone 69063 (TRAV26-1, TRAJ22)
CIVRVALISSCSARQLTF

SEQ ID NO: 138126 - protein, 13 aa, Homo sapiens
  CDR3 for beta chain variable domain of TCR clone 69063 (TRBV13, TRBJ2-5)
CASSPEVGETQYF

SEQ ID NO: 138127 - protein, 13 aa, Homo sapiens
  CDR3 for alpha chain variable domain of TCR clone 69064 (TRAV8-3, TRAJ44)
CAVVPGTASKLTF

SEQ ID NO: 138128 - protein, 19 aa, Homo sapiens
  CDR3 for beta chain variable domain of TCR clone 69064 (TRBV19, TRBJ2-5)
CASSIGQVTDFFLGETQYF

SEQ ID NO: 138129 - protein, 15 aa, Homo sapiens
  CDR3 for alpha chain variable domain of TCR clone 69065 (TRAV26-1, TRAJ42)
FIVRVKGGSKGNLIF

SEQ ID NO: 138130 - protein, 14 aa, Homo sapiens
  CDR3 for beta chain variable domain of TCR clone 69065 (TRBV19, TRBJ2-2)
CATTGHANTGELFF

SEQ ID NO: 138131 - protein, 12 aa, Homo sapiens
  CDR3 for alpha chain variable domain of TCR clone 69066 (TRAV25, TRAJ20)
CAGRSNDYKLSF

SEQ ID NO: 138132 - protein, 19 aa, Homo sapiens
  CDR3 for beta chain variable domain of TCR clone 69066 (TRBV27, TRBJ2-4)
SMNVEIPGQGPLDKNIQYF

SEQ ID NO: 138133 - protein, 12 aa, Homo sapiens
  CDR3 for alpha chain variable domain of TCR clone 69067 (TRAV1-2, TRAJ33)
CAALDSNYQLIW

SEQ ID NO: 138134 - protein, 12 aa, Homo sapiens
  CDR3 for beta chain variable domain of TCR clone 69067 (TRBV12-4, TRBJ2-7)
CASSLGGYEQYF

SEQ ID NO: 138135 - protein, 14 aa, Homo sapiens
  CDR3 for alpha chain variable domain of TCR clone 69068 (TRAV17, TRAJ32)
CATDPGCATNKLIF

SEQ ID NO: 138136 - protein, 14 aa, Homo sapiens
  CDR3 for beta chain variable domain of TCR clone 69068 (TRBV2, TRBJ1-5)
CASSENRGGQPQHF

SEQ ID NO: 138137 - protein, 14 aa, Homo sapiens
  CDR3 for alpha chain variable domain of TCR clone 69069 (TRAV1-1, TRAJ27)
CAVIYNTNAGKSTF

SEQ ID NO: 138138 - protein, 14 aa, Homo sapiens
  CDR3 for beta chain variable domain of TCR clone 69069 (TRBV25-1, TRBJ1-1)
CASTHLGENTEAFF

SEQ ID NO: 138139 - protein, 18 aa, Homo sapiens
  CDR3 for alpha chain variable domain of TCR clone 69070 (TRAV3, TRAJ17)
CAVRARRGGRSCRQQANF

SEQ ID NO: 138140 - protein, 14 aa, Homo sapiens
  CDR3 for beta chain variable domain of TCR clone 69070 (TRBV4-1, TRBJ2-2)
CASSQAVNTWELFF

SEQ ID NO: 138141 - protein, 12 aa, Homo sapiens
  CDR3 for alpha chain variable domain of TCR clone 69071 (TRAV16, TRAJ56)
CAPTGANSKLTF

SEQ ID NO: 138142 - protein, 15 aa, Homo sapiens
  CDR3 for beta chain variable domain of TCR clone 69071 (TRBV20-1, TRBJ2-7)
CSARDRVSGMDEQYF

SEQ ID NO: 138143 - protein, 12 aa, Homo sapiens
  CDR3 for alpha chain variable domain of TCR clone 69072 (TRAV12-3, TRAJ17)
CAMTLTGNKLTF

SEQ ID NO: 138144 - protein, 16 aa, Homo sapiens
  CDR3 for beta chain variable domain of TCR clone 69072 (TRBV28, TRBJ2-1)
CASSSPEYPRDNEQFF

SEQ ID NO: 138145 - protein, 13 aa, Homo sapiens
  CDR3 for alpha chain variable domain of TCR clone 69073 (TRAV8-3, TRAJ43)
CAVGADNNNDMRF

SEQ ID NO: 138146 - protein, 13 aa, Homo sapiens
  CDR3 for beta chain variable domain of TCR clone 69073 (TRBV4-2, TRBJ1-1)
CASSQAENTEAFF

SEQ ID NO: 138147 - protein, 13 aa, Homo sapiens
  CDR3 for alpha chain variable domain of TCR clone 69074 (TRAV35, TRAJ57)
CWSPQGGSEKLVF

SEQ ID NO: 138148 - protein, 13 aa, Homo sapiens
  CDR3 for beta chain variable domain of TCR clone 69074 (TRBV7-3, TRBJ1-1)
CASSQDWGAEAFF

SEQ ID NO: 138149 - protein, 15 aa, Homo sapiens
  CDR3 for alpha chain variable domain of TCR clone 69075 (TRAV12-1, TRAJ44)
CVAVLPTGTASKLTF

SEQ ID NO: 138150 - protein, 13 aa, Homo sapiens
  CDR3 for beta chain variable domain of TCR clone 69075 (TRBV6-5, TRBJ2-5)
CASSPQGGETQYF

SEQ ID NO: 138151 - protein, 13 aa, Homo sapiens
  CDR3 for alpha chain variable domain of TCR clone 69076 (TRAV8-3, TRAJ28)
CAVGAVGSYQLTF

SEQ ID NO: 138152 - protein, 14 aa, Homo sapiens
  CDR3 for beta chain variable domain of TCR clone 69076 (TRBV7-2, TRBJ2-7)
CASRSQGAGYEQYF

SEQ ID NO: 138153 - protein, 13 aa, Homo sapiens
  CDR3 for alpha chain variable domain of TCR clone 69077 (TRAV27, TRAJ49)
CAPRPYTGNPFYF

SEQ ID NO: 138154 - protein, 18 aa, Homo sapiens
  CDR3 for beta chain variable domain of TCR clone 69077 (TRBV7-3, TRBJ2-5)
CASSLGGAAQGRWETQYF

SEQ ID NO: 138155 - protein, 19 aa, Homo sapiens
  CDR3 for alpha chain variable domain of TCR clone 69078 (TRAV2, TRAJ32)
CAFNPPESGWCYKQAHLLN

SEQ ID NO: 138156 - protein, 12 aa, Homo sapiens
  CDR3 for beta chain variable domain of TCR clone 69078 (TRBV20-1, TRBJ2-7)
CSAITPTKEQYF

SEQ ID NO: 138157 - protein, 14 aa, Homo sapiens
  CDR3 for alpha chain variable domain of TCR clone 69079 (TRAV12-2, TRAJ17)
CAVLFRAAGNKLTF

SEQ ID NO: 138158 - protein, 17 aa, Homo sapiens
  CDR3 for beta chain variable domain of TCR clone 69079 (TRBV20-1, TRBJ2-2)
CGASGSGQGGLTGELFF

SEQ ID NO: 138159 - protein, 14 aa, Homo sapiens
  CDR3 for alpha chain variable domain of TCR clone 69080 (TRAV38-1, TRAJ45)
CAYYSGGGADGLTF

SEQ ID NO: 138160 - protein, 14 aa, Homo sapiens
  CDR3 for beta chain variable domain of TCR clone 69080 (TRBV12-5, TRBJ2-5)
CASGSRTHQETQYF

SEQ ID NO: 138161 - protein, 12 aa, Homo sapiens
  CDR3 for alpha chain variable domain of TCR clone 69081 (TRAV8-3, TRAJ15)
CAVGAPLSALIF

SEQ ID NO: 138162 - protein, 17 aa, Homo sapiens
  CDR3 for beta chain variable domain of TCR clone 69081 (TRBV5-5, TRBJ1-1)
CASSLRSRGLMNTEAFF

SEQ ID NO: 138163 - protein, 15 aa, Homo sapiens
  CDR3 for alpha chain variable domain of TCR clone 69082 (TRAV3, TRAJ22)
CAVRDRGGSARQLTF

SEQ ID NO: 138164 - protein, 18 aa, Homo sapiens
  CDR3 for beta chain variable domain of TCR clone 69082 (TRBV28, TRBJ2-1)
CTSSSTSGRANSYNEQFF

SEQ ID NO: 138165 - protein, 15 aa, Homo sapiens
  CDR3 for alpha chain variable domain of TCR clone 69083 (TRAV26-1, TRAJ37)
CIVRVADGNTGKLIF

SEQ ID NO: 138166 - protein, 14 aa, Homo sapiens
  CDR3 for beta chain variable domain of TCR clone 69083 (TRBV10-3, TRBJ2-2)
CATFGQLNTGELFL

SEQ ID NO: 138167 - protein, 13 aa, Homo sapiens
  CDR3 for alpha chain variable domain of TCR clone 69084 (TRAV38-1, TRAJ42)
CARWGGSQGNLIF

SEQ ID NO: 138168 - protein, 17 aa, Homo sapiens
  CDR3 for beta chain variable domain of TCR clone 69084 (TRBV20-1, TRBJ2-1)
CSARDPLAGVWDNEQFI

SEQ ID NO: 138169 - protein, 15 aa, Homo sapiens
  CDR3 for alpha chain variable domain of TCR clone 69085 (TRAV12-3, TRAJ6)
CAMSAASGGSYIPTF

SEQ ID NO: 138170 - protein, 13 aa, Homo sapiens
  CDR3 for beta chain variable domain of TCR clone 69085 (TRBV20-1, TRBJ1-2)
CSASTERIYGYAF

SEQ ID NO: 138171 - protein, 17 aa, Homo sapiens
  CDR3 for alpha chain variable domain of TCR clone 69086 (TRAV13-1, TRAJ28)
CAASPPYSGAGSYQLTF

SEQ ID NO: 138172 - protein, 12 aa, Homo sapiens
  CDR3 for beta chain variable domain of TCR clone 69086 (TRBV12-4, TRBJ2-3)
CASSTLPDTQYF

SEQ ID NO: 138173 - protein, 13 aa, Homo sapiens
  CDR3 for alpha chain variable domain of TCR clone 69087 (TRAV3, TRAJ27)
CAVRPLGAGKSTF

SEQ ID NO: 138174 - protein, 12 aa, Homo sapiens
  CDR3 for beta chain variable domain of TCR clone 69087 (TRBV11-2, TRBJ2-1)
CASSPGNNEQFF

SEQ ID NO: 138175 - protein, 15 aa, Homo sapiens
  CDR3 for alpha chain variable domain of TCR clone 69088 (TRAV21, TRAJ24)
CAARSSTDSWGKLQF

SEQ ID NO: 138176 - protein, 13 aa, Homo sapiens
  CDR3 for beta chain variable domain of TCR clone 69088 (TRBV11-2, TRBJ2-5)
CVSSSTGEETQYF

SEQ ID NO: 138177 - protein, 12 aa, Homo sapiens
  CDR3 for alpha chain variable domain of TCR clone 69089 (TRAV27, TRAJ13)
CAGVGGYQKVTF

SEQ ID NO: 138178 - protein, 15 aa, Homo sapiens
  CDR3 for beta chain variable domain of TCR clone 69089 (TRBV20-1, TRBJ2-6)
CSARDRGPGANVLTF

SEQ ID NO: 138179 - protein, 16 aa, Homo sapiens
  CDR3 for alpha chain variable domain of TCR clone 69090 (TRAV12-2, TRAJ10)
CAVNRVLTGGGNNLTF

SEQ ID NO: 138180 - protein, 12 aa, Homo sapiens
  CDR3 for beta chain variable domain of TCR clone 69090 (TRBV28, TRBJ2-7)
CASSFSSYEQYF

SEQ ID NO: 138181 - protein, 14 aa, Homo sapiens
  CDR3 for alpha chain variable domain of TCR clone 69091 (TRAV20, TRAJ40)
CAVSLTSGTYKYIF

SEQ ID NO: 138182 - protein, 19 aa, Homo sapiens
  CDR3 for beta chain variable domain of TCR clone 69091 (TRBV11-3, TRBJ2-2)
CASSTRPGAKTTNTGELFF

SEQ ID NO: 138183 - protein, 13 aa, Homo sapiens
  CDR3 for alpha chain variable domain of TCR clone 69092 (TRAV2, TRAJ40)
CAVVTSGTYKYIF

SEQ ID NO: 138184 - protein, 15 aa, Homo sapiens
  CDR3 for beta chain variable domain of TCR clone 69092 (TRBV18, TRBJ2-1)
CASSPPSASYNEQSF

SEQ ID NO: 138185 - protein, 13 aa, Homo sapiens
  CDR3 for alpha chain variable domain of TCR clone 69093 (TRAV38-2/DV8, TRAJ53)
CASGGGSNYKLTF

SEQ ID NO: 138186 - protein, 16 aa, Homo sapiens
  CDR3 for beta chain variable domain of TCR clone 69093 (TRBV28, TRBJ1-5)
CASRFRGAVQNQTQHF

SEQ ID NO: 138187 - protein, 14 aa, Homo sapiens
  CDR3 for alpha chain variable domain of TCR clone 69094 (TRAV1-2, TRAJ16)
CAVNRFSDGQTLLF

SEQ ID NO: 138188 - protein, 16 aa, Homo sapiens
  CDR3 for beta chain variable domain of TCR clone 69094 (TRBV12-5, TRBJ2-5)
CASGPRTSGNQETQYF

SEQ ID NO: 138189 - protein, 12 aa, Homo sapiens
  CDR3 for alpha chain variable domain of TCR clone 69095 (TRAV41, TRAJ58)
CAVETSGSRLTF

SEQ ID NO: 138190 - protein, 15 aa, Homo sapiens
  CDR3 for beta chain variable domain of TCR clone 69095 (TRBV29-1, TRBJ2-6)
CGVGDRGSGANVLTF

SEQ ID NO: 138191 - protein, 15 aa, Homo sapiens
  CDR3 for alpha chain variable domain of TCR clone 69096 (TRAV12-3, TRAJ27)
CAMRAYNTNACKSTF

SEQ ID NO: 138192 - protein, 13 aa, Homo sapiens
  CDR3 for beta chain variable domain of TCR clone 69096 (TRBV11-2, TRBJ2-5)
CASGRGPSETQYF

SEQ ID NO: 138193 - protein, 14 aa, Homo sapiens
  CDR3 for alpha chain variable domain of TCR clone 69097 (TRAV1-2, TRAJ8)
CAVREDTGLQKLVF

SEQ ID NO: 138194 - protein, 13 aa, Homo sapiens
  CDR3 for beta chain variable domain of TCR clone 69097 (TRBV27, TRBJ1-1)
CASSLSIGAESFF

SEQ ID NO: 138195 - protein, 12 aa, Homo sapiens
  CDR3 for alpha chain variable domain of TCR clone 69098 (TRAV8-3, TRAJ26)
CAGDNYGQHFVF

SEQ ID NO: 138196 - protein, 13 aa, Homo sapiens
  CDR3 for beta chain variable domain of TCR clone 69098 (TRBV20-1, TRBJ1-1)
CSAPLGGGTEAFF

SEQ ID NO: 138197 - protein, 14 aa, Homo sapiens
  CDR3 for alpha chain variable domain of TCR clone 69099 (TRAV12-1, TRAJ17)
CVVNYKAAGNKLTF

SEQ ID NO: 138198 - protein, 15 aa, Homo sapiens
  CDR3 for beta chain variable domain of TCR clone 69099 (TRBV7-3, TRBJ2-2)
CASSETGQGTGELFF

SEQ ID NO: 138199 - protein, 15 aa, Homo sapiens
  CDR3 for alpha chain variable domain of TCR clone 69100 (TRAV34, TRAJ38)
CGADFTPGNSRKLIW

SEQ ID NO: 138200 - protein, 16 aa, Homo sapiens
  CDR3 for beta chain variable domain of TCR clone 69100 (TRBV6-1, TRBJ2-3)
CASSEVIGQGTDTQYF

SEQ ID NO: 138201 - protein, 12 aa, Homo sapiens
  CDR3 for alpha chain variable domain of TCR clone 69101 (TRAV1-1, TRAJ8)
CAGGTGFQKLVF

SEQ ID NO: 138202 - protein, 15 aa, Homo sapiens
  CDR3 for beta chain variable domain of TCR clone 69101 (TRBV7-9, TRBJ1-4)
CASSRTGGFNEKLFF

SEQ ID NO: 138203 - protein, 21 aa, Homo sapiens
  CDR3 for alpha chain variable domain of TCR clone 69102 (TRAV25, TRAJ53)
TATQTTDVGTGSGGSNYKLTF

SEQ ID NO: 138204 - protein, 14 aa, Homo sapiens
  CDR3 for beta chain variable domain of TCR clone 69102 (TRBV19, TRBJ2-1)
CASPTFVLSGEQFF

SEQ ID NO: 138205 - protein, 16 aa, Homo sapiens
  CDR3 for alpha chain variable domain of TCR clone 69103 (TRAV16, TRAJ4)
CALSRMFSGGYNKLIF

SEQ ID NO: 138206 - protein, 13 aa, Homo sapiens
  CDR3 for beta chain variable domain of TCR clone 69103 (TRBV4-1, TRBJ2-1)
CASSQAGGDEQFF

SEQ ID NO: 138207 - protein, 15 aa, Homo sapiens
  CDR3 for alpha chain variable domain of TCR clone 69104 (TRAV21, TRAJ24)
CAARSSTDSWGKLQF

SEQ ID NO: 138208 - protein, 13 aa, Homo sapiens
  CDR3 for beta chain variable domain of TCR clone 69104 (TRBV11-2, TRBJ2-5)
CASSSTGEETHYF

SEQ ID NO: 138209 - protein, 15 aa, Homo sapiens
  CDR3 for alpha chain variable domain of TCR clone 69105 (TRAV35, TRAJ58)
CAGRRQETSGSRLTF

SEQ ID NO: 138210 - protein, 16 aa, Homo sapiens
  CDR3 for beta chain variable domain of TCR clone 69105 (TRBV12-4, TRBJ2-1)
CASSAVGQGNGDEQFF

SEQ ID NO: 138211 - protein, 11 aa, Homo sapiens
  CDR3 for alpha chain variable domain of TCR clone 69106 (TRAV1-1, TRAJ20)
CAVFNDYKLSF

SEQ ID NO: 138212 - protein, 16 aa, Homo sapiens
  CDR3 for beta chain variable domain of TCR clone 69106 (TRBV29-1, TRBJ2-2)
CSVEKTSEGNAGELFF

SEQ ID NO: 138213 - protein, 12 aa, Homo sapiens
  CDR3 for alpha chain variable domain of TCR clone 69107 (TRAV8-4, TRAJ37)
CAVRSNTGKLIF

SEQ ID NO: 138214 - protein, 16 aa, Homo sapiens
  CDR3 for beta chain variable domain of TCR clone 69107 (TRBV7-2, TRBJ2-3)
CASSLVGDASTDTQYC

SEQ ID NO: 138215 - protein, 16 aa, Homo sapiens
  CDR3 for alpha chain variable domain of TCR clone 69108 (TRAV4, TRAJ22)
CLVGDLYSGSARQLTF

SEQ ID NO: 138216 - protein, 17 aa, Homo sapiens
  CDR3 for beta chain variable domain of TCR clone 69108 (TRBV11-2, TRBJ2-1)
CASSLYPPGVEYNEQFS

SEQ ID NO: 138217 - protein, 14 aa, Homo sapiens
  CDR3 for alpha chain variable domain of TCR clone 69109 (TRAV34, TRAJ44)
CGADGTGTASKLTF

SEQ ID NO: 138218 - protein, 14 aa, Homo sapiens
  CDR3 for beta chain variable domain of TCR clone 69109 (TRBV20-1, TRBJ1-1)
CSATGVKGGTEALF

SEQ ID NO: 138219 - protein, 13 aa, Homo sapiens
  CDR3 for alpha chain variable domain of TCR clone 69110 (TRAV25, TRAJ26)
CAGMDNYGQNFVF

SEQ ID NO: 138220 - protein, 17 aa, Homo sapiens
  CDR3 for beta chain variable domain of TCR clone 69110 (TRBV4-1, TRBJ1-3)
CASSPQRGIRFGNTIYF

SEQ ID NO: 138221 - protein, 14 aa, Homo sapiens
  CDR3 for alpha chain variable domain of TCR clone 69111 (TRAV9-2, TRAJ39)
CALYIYNAGNMLTF

SEQ ID NO: 138222 - protein, 15 aa, Homo sapiens
  CDR3 for beta chain variable domain of TCR clone 69111 (TRBV4-3, TRBJ1-6)
CASSQDSQGGSPLHF

SEQ ID NO: 138223 - protein, 12 aa, Homo sapiens
  CDR3 for alpha chain variable domain of TCR clone 69112 (TRAV12-2, TRAJ30)
CAVRNRDDKIIF

SEQ ID NO: 138224 - protein, 15 aa, Homo sapiens
  CDR3 for beta chain variable domain of TCR clone 69112 (TRBV6-3, TRBJ1-5)
CASRVGRWSNQPQHF

SEQ ID NO: 138225 - protein, 13 aa, Homo sapiens
  CDR3 for alpha chain variable domain of TCR clone 69113 (TRAV21, TRAJ27)
CAARPGNAGKSTF

SEQ ID NO: 138226 - protein, 16 aa, Homo sapiens
  CDR3 for beta chain variable domain of TCR clone 69113 (TRBV5-1, TRBJ2-2)
CASSLWDTTNTGELFF

SEQ ID NO: 138227 - protein, 14 aa, Homo sapiens
  CDR3 for alpha chain variable domain of TCR clone 69114 (TRAV13-1, TRAJ44)
CAAKAIGTASKLTF

SEQ ID NO: 138228 - protein, 17 aa, Homo sapiens
  CDR3 for beta chain variable domain of TCR clone 69114 (TRBV7-3, TRBJ2-3)
CASSLMKRMRGADTQYF

SEQ ID NO: 138229 - protein, 11 aa, Homo sapiens
  CDR3 for alpha chain variable domain of TCR clone 69115 (TRAV1-2, TRAJ40)
CAGPGTYKYIF

SEQ ID NO: 138230 - protein, 16 aa, Homo sapiens
  CDR3 for beta chain variable domain of TCR clone 69115 (TRBV29-1, TRBJ2-7)
CSVEVVGTSGSYEQYF

SEQ ID NO: 138231 - protein, 13 aa, Homo sapiens
  CDR3 for alpha chain variable domain of TCR clone 69116 (TRAV23/DV6, TRAJ22)
CAPYSGSARQLTF

SEQ ID NO: 138232 - protein, 15 aa, Homo sapiens
  CDR3 for beta chain variable domain of TCR clone 69116 (TRBV11-2, TRBJ1-6)
CVSSLDPWAVSPLHF

SEQ ID NO: 138233 - protein, 15 aa, Homo sapiens
  CDR3 for alpha chain variable domain of TCR clone 69117 (TRAV17, TRAJ16)
CATALRFSDGQKLLF

SEQ ID NO: 138234 - protein, 14 aa, Homo sapiens
  CDR3 for beta chain variable domain of TCR clone 69117 (TRBV9, TRBJ1-3)
CASSVVGDGNTIYF

SEQ ID NO: 138235 - protein, 14 aa, Homo sapiens
  CDR3 for alpha chain variable domain of TCR clone 69118 (TRAV13-1, TRAJ8)
CAASEDTGFQKLVF

SEQ ID NO: 138236 - protein, 13 aa, Homo sapiens
  CDR3 for beta chain variable domain of TCR clone 69118 (TRBV19, TRBJ1-5)
CASSTRRDQHQHF

SEQ ID NO: 138237 - protein, 15 aa, Homo sapiens
  CDR3 for alpha chain variable domain of TCR clone 69119 (TRAV1-2, TRAJ38)
CAARRNAGNNRKLIW

SEQ ID NO: 138238 - protein, 13 aa, Homo sapiens
  CDR3 for beta chain variable domain of TCR clone 69119 (TRBV12-5, TRBJ2-3)
CASGDRQSDTQYF

SEQ ID NO: 138239 - protein, 12 aa, Homo sapiens
  CDR3 for alpha chain variable domain of TCR clone 69120 (TRAV12-3, TRAJ3)
CAIDRSASKIIF

SEQ ID NO: 138240 - protein, 17 aa, Homo sapiens
  CDR3 for beta chain variable domain of TCR clone 69120 (TRBV7-9, TRBJ2-3)
CASSLEEAGAYPDTQYF

SEQ ID NO: 138241 - protein, 16 aa, Homo sapiens
  CDR3 for alpha chain variable domain of TCR clone 69121 (TRAV30, TRAJ24)
CGTEIVDADSWGKFQF

SEQ ID NO: 138242 - protein, 13 aa, Homo sapiens
  CDR3 for beta chain variable domain of TCR clone 69121 (TRBV18, TRBJ1-2)
CASSASATEGYTL

SEQ ID NO: 138243 - protein, 14 aa, Homo sapiens
  CDR3 for alpha chain variable domain of TCR clone 69122 (TRAV12-1, TRAJ41)
CVVPELKFRVCTQL

SEQ ID NO: 138244 - protein, 12 aa, Homo sapiens
  CDR3 for beta chain variable domain of TCR clone 69122 (TRBV14, TRBJ2-5)
CASSQLKETQYF

SEQ ID NO: 138245 - protein, 12 aa, Homo sapiens
  CDR3 for alpha chain variable domain of TCR clone 69123 (TRAV26-2, TRAJ47)
RILVEYGNKLVF

SEQ ID NO: 138246 - protein, 16 aa, Homo sapiens
  CDR3 for beta chain variable domain of TCR clone 69123 (TRBV18, TRBJ1-4)
CASSPLVGDRAEKLFF

SEQ ID NO: 138247 - protein, 16 aa, Homo sapiens
  CDR3 for alpha chain variable domain of TCR clone 69124 (TRAV35, TRAJ28)
CAGQRNSGAGSYQLTF

SEQ ID NO: 138248 - protein, 13 aa, Homo sapiens
  CDR3 for beta chain variable domain of TCR clone 69124 (TRBV19, TRBJ1-2)
CASSQGQVYGYTF

SEQ ID NO: 138249 - protein, 15 aa, Homo sapiens
  CDR3 for alpha chain variable domain of TCR clone 69125 (TRAV13-1, TRAJ57)
QVPPLSQGGSEKLAF

SEQ ID NO: 138250 - protein, 17 aa, Homo sapiens
  CDR3 for beta chain variable domain of TCR clone 69125 (TRBV7-3, TRBJ2-3)
CASSLMKRMRGADTQYF

SEQ ID NO: 138251 - protein, 12 aa, Homo sapiens
  CDR3 for alpha chain variable domain of TCR clone 69126 (TRAV8-3, TRAJ27)
CAVGAEAGKSNF

SEQ ID NO: 138252 - protein, 14 aa, Homo sapiens
  CDR3 for beta chain variable domain of TCR clone 69126 (TRBV2, TRBJ2-1)
CASRLIVGHDEQFF

SEQ ID NO: 138253 - protein, 15 aa, Homo sapiens
  CDR3 for alpha chain variable domain of TCR clone 69127 (TRAV8-2, TRAJ15)
CVVTMGNQAGTALIF

SEQ ID NO: 138254 - protein, 15 aa, Homo sapiens
  CDR3 for beta chain variable domain of TCR clone 69127 (TRBV20-1, TRBJ2-1)
CSASSAGSSYNEQFF

SEQ ID NO: 138255 - protein, 13 aa, Homo sapiens
  CDR3 for alpha chain variable domain of TCR clone 69128 (TRAV12-1, TRAJ16)
CVVNGPDSQKLLF

SEQ ID NO: 138256 - protein, 12 aa, Homo sapiens
  CDR3 for beta chain variable domain of TCR clone 69128 (TRBV24-1, TRBJ2-2)
CATSDPGLTGLQ

SEQ ID NO: 138257 - protein, 11 aa, Homo sapiens
  CDR3 for alpha chain variable domain of TCR clone 69129 (TRAV17, TRAJ9)
CASTGGFKTIF

SEQ ID NO: 138258 - protein, 14 aa, Homo sapiens
  CDR3 for beta chain variable domain of TCR clone 69129 (TRBV7-9, TRBJ2-2)
CASSGLADTGELFF

SEQ ID NO: 138259 - protein, 15 aa, Homo sapiens
  CDR3 for alpha chain variable domain of TCR clone 69130 (TRAV12-2, TRAJ53)
CAVNGGGGSNHKLTF

SEQ ID NO: 138260 - protein, 17 aa, Homo sapiens
  CDR3 for beta chain variable domain of TCR clone 69130 (TRBV7-3, TRBJ2-3)
CASSLMKRMRGADTQYF

SEQ ID NO: 138261 - protein, 14 aa, Homo sapiens
  CDR3 for alpha chain variable domain of TCR clone 69131 (TRAV26-1, TRAJ54)
CIVRRTQGAQKLVF

SEQ ID NO: 138262 - protein, 14 aa, Homo sapiens
  CDR3 for beta chain variable domain of TCR clone 69131 (TRBV25-1, TRBJ1-1)
CASTHLGGNTEAFF

SEQ ID NO: 138263 - protein, 13 aa, Homo sapiens
  CDR3 for alpha chain variable domain of TCR clone 69132 (TRAV12-2, TRAJ48)
CAAPNFGNEKLTF

SEQ ID NO: 138264 - protein, 13 aa, Homo sapiens
  CDR3 for beta chain variable domain of TCR clone 69132 (TRBV19, TRBJ1-2)
CASSVPGQDGYTF

SEQ ID NO: 138265 - protein, 12 aa, Homo sapiens
  CDR3 for alpha chain variable domain of TCR clone 69133 (TRAV1-1, TRAJ20)
CAVREDDYKLSF

SEQ ID NO: 138266 - protein, 14 aa, Homo sapiens
  CDR3 for beta chain variable domain of TCR clone 69133 (TRBV19, TRBJ2-1)
CASPTFVLSGEQFF

SEQ ID NO: 138267 - protein, 13 aa, Homo sapiens
  CDR3 for alpha chain variable domain of TCR clone 69134 (TRAV4, TRAJ31)
CLVALNNNARLMF

SEQ ID NO: 138268 - protein, 14 aa, Homo sapiens
  CDR3 for beta chain variable domain of TCR clone 69134 (TRBV7-2, TRBJ2-7)
CASSPKTSFYEQYF

SEQ ID NO: 138269 - protein, 14 aa, Homo sapiens
  CDR3 for alpha chain variable domain of TCR clone 69135 (TRAV13-1, TRAJ35)
CAASKGGFGNVLHC

SEQ ID NO: 138270 - protein, 13 aa, Homo sapiens
  CDR3 for beta chain variable domain of TCR clone 69135 (TRBV7-3, TRBJ1-1)
CASSQDWGAEAVV

SEQ ID NO: 138271 - protein, 11 aa, Homo sapiens
  CDR3 for alpha chain variable domain of TCR clone 69136 (TRAV4, TRAJ23)
CLLAPGGKLIF

SEQ ID NO: 138272 - protein, 13 aa, Homo sapiens
  CDR3 for beta chain variable domain of TCR clone 69136 (TRBV7-9, TRBJ1-2)
CASSLKQNYGYTF

SEQ ID NO: 138273 - protein, 14 aa, Homo sapiens
  CDR3 for alpha chain variable domain of TCR clone 69137 (TRAV8-4, TRAJ38)
RARLNAGNNRKLIW

SEQ ID NO: 138274 - protein, 12 aa, Homo sapiens
  CDR3 for beta chain variable domain of TCR clone 69137 (TRBV6-1, TRBJ2-7)
CASSEPLYEQYF

SEQ ID NO: 138275 - protein, 14 aa, Homo sapiens
  CDR3 for alpha chain variable domain of TCR clone 69138 (TRAV26-1, TRAJ34)
CIVRVAYNTDKLIF

SEQ ID NO: 138276 - protein, 14 aa, Homo sapiens
  CDR3 for beta chain variable domain of TCR clone 69138 (TRBV28, TRBJ2-7)
CASSLLGQGVEQYF

SEQ ID NO: 138277 - protein, 13 aa, Homo sapiens
  CDR3 for alpha chain variable domain of TCR clone 69139 (TRAV8-3, TRAJ13)
CAVVPGTASKLTF

SEQ ID NO: 138278 - protein, 16 aa, Homo sapiens
  CDR3 for beta chain variable domain of TCR clone 69139 (TRBV6-1, TRBJ2-5)
CASSETLDRGAETQYF

SEQ ID NO: 138279 - protein, 12 aa, Homo sapiens
  CDR3 for alpha chain variable domain of TCR clone 69140 (TRAV12-3, TRAJ17)
CAMTLTGNKLTF

SEQ ID NO: 138280 - protein, 17 aa, Homo sapiens
  CDR3 for beta chain variable domain of TCR clone 69140 (TRBV11-2, TRBJ2-1)
CASSLYPTGVEYNEQFF

SEQ ID NO: 138281 - protein, 12 aa, Homo sapiens
  CDR3 for alpha chain variable domain of TCR clone 69141 (TRAV3, TRAJ43)
CAVRDPNSDMRF

SEQ ID NO: 138282 - protein, 13 aa, Homo sapiens
  CDR3 for beta chain variable domain of TCR clone 69141 (TRBV19, TRBJ1-2)
CASSVPGQDGYTF

SEQ ID NO: 138283 - protein, 16 aa, Homo sapiens
  CDR3 for alpha chain variable domain of TCR clone 69142 (TRAV16, TRAJ52)
CALSGVGGISYGKLTF

SEQ ID NO: 138284 - protein, 14 aa, Homo sapiens
  CDR3 for beta chain variable domain of TCR clone 69142 (TRBV19, TRBJ1-2)
CASSLQGQAYGYTF

SEQ ID NO: 138285 - protein, 17 aa, Homo sapiens
  CDR3 for alpha chain variable domain of TCR clone 69143 (TRAV13-1, TRAJ28)
CAASPPYSGAGSYQLPF

SEQ ID NO: 138286 - protein, 15 aa, Homo sapiens
  CDR3 for beta chain variable domain of TCR clone 69143 (TRBV6-3, TRBJ2-2)
CASSFLATLTGELFF

SEQ ID NO: 138287 - protein, 14 aa, Homo sapiens
  CDR3 for alpha chain variable domain of TCR clone 69144 (TRAV13-1, TRAJ12)
CSNYPMDSSYKLIF

SEQ ID NO: 138288 - protein, 11 aa, Homo sapiens
  CDR3 for beta chain variable domain of TCR clone 69144 (TRBV20-1, TRBJ2-1)
CSLPSGSEQFF

SEQ ID NO: 138289 - protein, 15 aa, Homo sapiens
  CDR3 for alpha chain variable domain of TCR clone 69145 (TRAV13-2, TRAJ45)
CAEHHSGGGADELTF

SEQ ID NO: 138290 - protein, 15 aa, Homo sapiens
  CDR3 for beta chain variable domain of TCR clone 69145 (TRBV7-2, TRBJ2-7)
CASSLALGSAYEQYF

SEQ ID NO: 138291 - protein, 15 aa, Homo sapiens
  CDR3 for alpha chain variable domain of TCR clone 69146 (TRAV35, TRAJ40)
CAGVPGASGTYKYIF

SEQ ID NO: 138292 - protein, 15 aa, Homo sapiens
  CDR3 for beta chain variable domain of TCR clone 69146 (TRBV6-3, TRBJ2-1)
CASTQRTFSYNEQFF

SEQ ID NO: 138293 - protein, 13 aa, Homo sapiens
  CDR3 for alpha chain variable domain of TCR clone 69147 (TRAV30, TRAJ34)
CGTVGYNTDKLIF

SEQ ID NO: 138294 - protein, 16 aa, Homo sapiens
  CDR3 for beta chain variable domain of TCR clone 69147 (TRBV7-9, TRBJ1-2)
CGSSLGFSSGEDGYTF

SEQ ID NO: 138295 - protein, 14 aa, Homo sapiens
  CDR3 for alpha chain variable domain of TCR clone 69148 (TRAV1-2, TRAJ13)
CAVKHSGGYQKVTF

SEQ ID NO: 138296 - protein, 15 aa, Homo sapiens
  CDR3 for beta chain variable domain of TCR clone 69148 (TRBV20-1, TRBJ2-7)
CSARDRVSGMDEQYF

SEQ ID NO: 138297 - protein, 13 aa, Homo sapiens
  CDR3 for alpha chain variable domain of TCR clone 69149 (TRAV13-1, TRAJ10)
CAALEGGGNKLTL

SEQ ID NO: 138298 - protein, 15 aa, Homo sapiens
  CDR3 for beta chain variable domain of TCR clone 69149 (TRBV20-1, TRBJ2-7)
CSARDRVSGMDEQYF

SEQ ID NO: 138299 - protein, 13 aa, Homo sapiens
  CDR3 for alpha chain variable domain of TCR clone 69150 (TRAV21, TRAJ27)
CAALNTKAGKSTF

SEQ ID NO: 138300 - protein, 14 aa, Homo sapiens
  CDR3 for beta chain variable domain of TCR clone 69150 (TRBV7-6, TRBJ2-3)
CASSLGTVTDTQYF

SEQ ID NO: 138301 - protein, 12 aa, Homo sapiens
  CDR3 for alpha chain variable domain of TCR clone 69151 (TRAV17, TRAJ39)
CATGAAGNMLTV

SEQ ID NO: 138302 - protein, 14 aa, Homo sapiens
  CDR3 for beta chain variable domain of TCR clone 69151 (TRBV7-9, TRBJ1-2)
CASSRQGANYGYTF

SEQ ID NO: 138303 - protein, 15 aa, Homo sapiens
  CDR3 for alpha chain variable domain of TCR clone 69152 (TRAV8-3, TRAJ27)
CAVGPSKTNAGKSTF

SEQ ID NO: 138304 - protein, 15 aa, Homo sapiens
  CDR3 for beta chain variable domain of TCR clone 69152 (TRBV7-2, TRBJ2-1)
CSSSSGLAGGNEQFF

SEQ ID NO: 138305 - protein, 13 aa, Homo sapiens
  CDR3 for alpha chain variable domain of TCR clone 69153 (TRAV1-1, TRAJ9)
CAAKNTGGVKTIF

SEQ ID NO: 138306 - protein, 14 aa, Homo sapiens
  CDR3 for beta chain variable domain of TCR clone 69153 (TRBV20-1, TRBJ2-1)
CSAQIGGSANEQFF

SEQ ID NO: 138307 - protein, 13 aa, Homo sapiens
  CDR3 for alpha chain variable domain of TCR clone 69154 (TRAV12-3, TRAJ33)
CAMSVNSNYQLIW

SEQ ID NO: 138308 - protein, 13 aa, Homo sapiens
  CDR3 for beta chain variable domain of TCR clone 69154 (TRBV7-2, TRBJ2-2)
CACSLAVTGELFF

SEQ ID NO: 138309 - protein, 16 aa, Homo sapiens
  CDR3 for alpha chain variable domain of TCR clone 69155 (TRAV3, TRAJ10)
CAVRDINAGGGNKLTF

SEQ ID NO: 138310 - protein, 16 aa, Homo sapiens
  CDR3 for beta chain variable domain of TCR clone 69155 (TRBV6-3, TRBJ1-2)
CASSYSRRASNYGYTF

SEQ ID NO: 138311 - protein, 14 aa, Homo sapiens
  CDR3 for alpha chain variable domain of TCR clone 69156 (TRAV9-2, TRAJ39)
CAPYIYNAGNMLTF

SEQ ID NO: 138312 - protein, 14 aa, Homo sapiens
  CDR3 for beta chain variable domain of TCR clone 69156 (TRBV6-1, TRBJ1-3)
CASVQGGGGNTIYF

SEQ ID NO: 138313 - protein, 14 aa, Homo sapiens
  CDR3 for alpha chain variable domain of TCR clone 69157 (TRAV1-2, TRAJ16)
CAVNRFSDGQKLLF

SEQ ID NO: 138314 - protein, 15 aa, Homo sapiens
  CDR3 for beta chain variable domain of TCR clone 69157 (TRBV9, TRBJ1-6)
CGSSVAGTGDSPLHF

SEQ ID NO: 138315 - protein, 14 aa, Homo sapiens
  CDR3 for alpha chain variable domain of TCR clone 69158 (TRAV3, TRAJ36)
CAVRDGIGANNLFF

SEQ ID NO: 138316 - protein, 16 aa, Homo sapiens
  CDR3 for beta chain variable domain of TCR clone 69158 (TRBV7-3, TRBJ2-5)
CASIQPGGSVQETQYF

SEQ ID NO: 138317 - protein, 13 aa, Homo sapiens
  CDR3 for alpha chain variable domain of TCR clone 69159 (TRAV8-3, TRAJ28)
CAVGAVGSYQLTF

SEQ ID NO: 138318 - protein, 17 aa, Homo sapiens
  CDR3 for beta chain variable domain of TCR clone 69159 (TRBV11-2, TRBJ2-1)
CASSLYPPGVEYNGQFF

SEQ ID NO: 138319 - protein, 12 aa, Homo sapiens
  CDR3 for alpha chain variable domain of TCR clone 69160 (TRAV12-2, TRAJ8)
CAGNTGFQKLVF

SEQ ID NO: 138320 - protein, 15 aa, Homo sapiens
  CDR3 for beta chain variable domain of TCR clone 69160 (TRBV7-8, TRBJ1-5)
CASSLERRGLEPQHF

SEQ ID NO: 138321 - protein, 15 aa, Homo sapiens
  CDR3 for alpha chain variable domain of TCR clone 69161 (TRAV3, TRAJ22)
CAVRDRGGSARQRTF

SEQ ID NO: 138322 - protein, 14 aa, Homo sapiens
  CDR3 for beta chain variable domain of TCR clone 69161 (TRBV19, TRBJ2-1)
CASSRLASINEQFF

SEQ ID NO: 138323 - protein, 12 aa, Homo sapiens
  CDR3 for alpha chain variable domain of TCR clone 69162 (TRAV17, TRAJ47)
CAPTVRGNKLVF

SEQ ID NO: 138324 - protein, 13 aa, Homo sapiens
  CDR3 for beta chain variable domain of TCR clone 69162 (TRBV7-2, TRBJ2-4)
CASSLAEGGMQYF

SEQ ID NO: 138325 - protein, 17 aa, Homo sapiens
  CDR3 for alpha chain variable domain of TCR clone 69163 (TRAV3, TRAJ38)
CAVRDCLNAGNNRKLIW

SEQ ID NO: 138326 - protein, 16 aa, Homo sapiens
  CDR3 for beta chain variable domain of TCR clone 69163 (TRBV2, TRBJ1-4)
CASNLLQGATNEKLFF

SEQ ID NO: 138327 - protein, 14 aa, Homo sapiens
  CDR3 for alpha chain variable domain of TCR clone 69164 (TRAV29/DV5, TRAJ32)
CAAAYGGATNKLIF

SEQ ID NO: 138328 - protein, 12 aa, Homo sapiens
  CDR3 for beta chain variable domain of TCR clone 69164 (TRBV11-2, TRBJ2-2)
CASSLGGGELFF

SEQ ID NO: 138329 - protein, 15 aa, Homo sapiens
  CDR3 for alpha chain variable domain of TCR clone 69165 (TRAV35, TRAJ58)
CAGRCQETSGSRLTF

SEQ ID NO: 138330 - protein, 11 aa, Homo sapiens
  CDR3 for beta chain variable domain of TCR clone 69165 (TRBV11-2, TRBJ1-1)
CASSINTEAFF

SEQ ID NO: 138331 - protein, 12 aa, Homo sapiens
  CDR3 for alpha chain variable domain of TCR clone 69166 (TRAV8-6, TRAJ31)
CAVSPNNARLMF

SEQ ID NO: 138332 - protein, 16 aa, Homo sapiens
  CDR3 for beta chain variable domain of TCR clone 69166 (TRBV20-1, TRBJ2-6)
CSASSQGYDGANVLTF

SEQ ID NO: 138333 - protein, 13 aa, Homo sapiens
  CDR3 for alpha chain variable domain of TCR clone 69167 (TRAV30, TRAJ24)
CGPVTDSWGKLQF

SEQ ID NO: 138334 - protein, 14 aa, Homo sapiens
  CDR3 for beta chain variable domain of TCR clone 69167 (TRBV6-3, TRBJ2-2)
CASTYTPDTGELFF

SEQ ID NO: 138335 - protein, 13 aa, Homo sapiens
  CDR3 for alpha chain variable domain of TCR clone 69168 (TRAV1-2, TRAJ13)
CAVNSGGYQKVTF

SEQ ID NO: 138336 - protein, 14 aa, Homo sapiens
  CDR3 for beta chain variable domain of TCR clone 69168 (TRBV4-1, TRBJ1-5)
CASSPKGDNQHQHF

SEQ ID NO: 138337 - protein, 11 aa, Homo sapiens
  CDR3 for alpha chain variable domain of TCR clone 69169 (TRAV1-1, TRAJ23)
CAVRQGGKLIF

SEQ ID NO: 138338 - protein, 20 aa, Homo sapiens
  CDR3 for beta chain variable domain of TCR clone 69169 (TRBV7-8, TRBJ2-2)
CASSHLFPGPTVHITGELFF

SEQ ID NO: 138339 - protein, 16 aa, Homo sapiens
  CDR3 for alpha chain variable domain of TCR clone 69170 (TRAV4, TRAJ42)
CLVGPIYGGSQGNLIF

SEQ ID NO: 138340 - protein, 13 aa, Homo sapiens
  CDR3 for beta chain variable domain of TCR clone 69170 (TRBV11-2, TRBJ2-7)
RASSPLGSYEQYF

SEQ ID NO: 138341 - protein, 17 aa, Homo sapiens
  CDR3 for alpha chain variable domain of TCR clone 69171 (TRAV35, TRAJ47)
GLLDCRTHTEYGNKLDF

SEQ ID NO: 138342 - protein, 11 aa, Homo sapiens
  CDR3 for beta chain variable domain of TCR clone 69171 (TRBV29-1, TRBJ1-1)
CSVEVGTRTFF

SEQ ID NO: 138343 - protein, 14 aa, Homo sapiens
  CDR3 for alpha chain variable domain of TCR clone 69172 (TRAV12-2, TRAJ13)
CAVKKTGGLPESYL

SEQ ID NO: 138344 - protein, 15 aa, Homo sapiens
  CDR3 for beta chain variable domain of TCR clone 69172 (TRBV27, TRBJ2-1)
CASSNGGGSSNEQFF

SEQ ID NO: 138345 - protein, 13 aa, Homo sapiens
  CDR3 for alpha chain variable domain of TCR clone 69173 (TRAV12-2, TRAJ24)
CVVSTDSWGKLQF

SEQ ID NO: 138346 - protein, 15 aa, Homo sapiens
  CDR3 for beta chain variable domain of TCR clone 69173 (TRBV7-2, TRBJ2-2)
CASSPTGANTGELFF

SEQ ID NO: 138347 - protein, 15 aa, Homo sapiens
  CDR3 for alpha chain variable domain of TCR clone 69174 (TRAV12-2, TRAJ53)
CAVNGGGGSNYKLTI

SEQ ID NO: 138348 - protein, 13 aa, Homo sapiens
  CDR3 for beta chain variable domain of TCR clone 69174 (TRBV3-1, TRBJ1-1)
CASSPGVITEAFF

SEQ ID NO: 138349 - protein, 12 aa, Homo sapiens
  CDR3 for alpha chain variable domain of TCR clone 69175 (TRAV12-1, TRAJ40)
CVFYSGTYKYIF

SEQ ID NO: 138350 - protein, 14 aa, Homo sapiens
  CDR3 for beta chain variable domain of TCR clone 69175 (TRBV12-5, TRBJ2-5)
CASGSRTHQETQYF

SEQ ID NO: 138351 - protein, 16 aa, Homo sapiens
  CDR3 for alpha chain variable domain of TCR clone 69176 (TRAV26-1, TRAJ37)
CIVRGDGSGNTGKLIF

SEQ ID NO: 138352 - protein, 17 aa, Homo sapiens
  CDR3 for beta chain variable domain of TCR clone 69176 (TRBV4-1, TRBJ2-7)
CASSQDPLGVRGGEQYF

SEQ ID NO: 138353 - protein, 15 aa, Homo sapiens
  CDR3 for alpha chain variable domain of TCR clone 69177 (TRAV17, TRAJ57)
CATGPSQCVSEKLVF

SEQ ID NO: 138354 - protein, 16 aa, Homo sapiens
  CDR3 for beta chain variable domain of TCR clone 69177 (TRBV12-4, TRBJ1-5)
CASSRPVGGSNQPQHF

SEQ ID NO: 138355 - protein, 12 aa, Homo sapiens
  CDR3 for alpha chain variable domain of TCR clone 69178 (TRAV12-3, TRAJ17)
CAMTLTGNKLTF

SEQ ID NO: 138356 - protein, 15 aa, Homo sapiens
  CDR3 for beta chain variable domain of TCR clone 69178 (TRBV5-1, TRBJ2-1)
CASSPPRAPYNEQFL

SEQ ID NO: 138357 - protein, 17 aa, Homo sapiens
  CDR3 for alpha chain variable domain of TCR clone 69179 (TRAV4, TRAJ13)
CLVGVQGSSGGYQKVTF

SEQ ID NO: 138358 - protein, 18 aa, Homo sapiens
  CDR3 for beta chain variable domain of TCR clone 69179 (TRBV15, TRBJ2-3)
CATSRDGTRSWDTDTQYF

SEQ ID NO: 138359 - protein, 20 aa, Homo sapiens
  CDR3 for alpha chain variable domain of TCR clone 69180 (TRAV26-1, TRAJ42)
CCVLLHRQTYYGGSQGNLIF

SEQ ID NO: 138360 - protein, 16 aa, Homo sapiens
  CDR3 for beta chain variable domain of TCR clone 69180 (TRBV7-3, TRBJ2-2)
CASGLKRGTLSGELFF

SEQ ID NO: 138361 - protein, 15 aa, Homo sapiens
  CDR3 for alpha chain variable domain of TCR clone 69181 (TRAV29/DV5, TRAJ24)
CAASGATESWGKFQF

SEQ ID NO: 138362 - protein, 12 aa, Homo sapiens
  CDR3 for beta chain variable domain of TCR clone 69181 (TRBV11-2, TRBJ2-2)
CASSLPTGELFF

SEQ ID NO: 138363 - protein, 15 aa, Homo sapiens
  CDR3 for alpha chain variable domain of TCR clone 69182 (TRAV26-1, TRAJ56)
YIVRVATGANSKLTF

SEQ ID NO: 138364 - protein, 15 aa, Homo sapiens
  CDR3 for beta chain variable domain of TCR clone 69182 (TRBV27, TRBJ2-7)
CASSPQREGQREQYF

SEQ ID NO: 138365 - protein, 23 aa, Homo sapiens
  CDR3 for alpha chain variable domain of TCR clone 69183 (TRAV26-1, TRAJ38)
CIADNAGNNHIQNPDPAVHQLRD

SEQ ID NO: 138366 - protein, 12 aa, Homo sapiens
  CDR3 for beta chain variable domain of TCR clone 69183 (TRBV11-2, TRBJ2-2)
CASSLGGGELFF

SEQ ID NO: 138367 - protein, 14 aa, Homo sapiens
  CDR3 for alpha chain variable domain of TCR clone 69184 (TRAV20, TRAJ32)
CCGRYGGATNKLIF

SEQ ID NO: 138368 - protein, 16 aa, Homo sapiens
  CDR3 for beta chain variable domain of TCR clone 69184 (TRBV19, TRBJ2-2)
GASRSPGTGATGELFF

SEQ ID NO: 138369 - protein, 12 aa, Homo sapiens
  CDR3 for alpha chain variable domain of TCR clone 69185 (TRAV17, TRAJ20)
CATLANDYKLSF

SEQ ID NO: 138370 - protein, 14 aa, Homo sapiens
  CDR3 for beta chain variable domain of TCR clone 69185 (TRBV10-3, TRBJ1-2)
YAISEDTPYYGYTF

SEQ ID NO: 138371 - protein, 11 aa, Homo sapiens
  CDR3 for alpha chain variable domain of TCR clone 69186 (TRAV12-2, TRAJ43)
CAAYNNNDMRF

SEQ ID NO: 138372 - protein, 14 aa, Homo sapiens
  CDR3 for beta chain variable domain of TCR clone 69186 (TRBV7-8, TRBJ1-2)
CASSAGTAICGYTF

SEQ ID NO: 138373 - protein, 12 aa, Homo sapiens
  CDR3 for alpha chain variable domain of TCR clone 69187 (TRAV1-1, TRAJ39)
CAVPVVGNMLTF

SEQ ID NO: 138374 - protein, 11 aa, Homo sapiens
  CDR3 for beta chain variable domain of TCR clone 69187 (TRBV7-9, TRBJ2-5)
CASSLGETQYF

SEQ ID NO: 138375 - protein, 14 aa, Homo sapiens
  CDR3 for alpha chain variable domain of TCR clone 69188 (TRAV13-1, TRAJ44)
CAAKATGTASKLTF

SEQ ID NO: 138376 - protein, 20 aa, Homo sapiens
  CDR3 for beta chain variable domain of TCR clone 69188 (TRBV19, TRBJ2-1)
CASSISRTVTSTRLNNEQFF

SEQ ID NO: 138377 - protein, 11 aa, Homo sapiens
  CDR3 for alpha chain variable domain of TCR clone 69189 (TRAV12-2, TRAJ33)
CAVGSNYQLIW

SEQ ID NO: 138378 - protein, 14 aa, Homo sapiens
  CDR3 for beta chain variable domain of TCR clone 69189 (TRBV6-1, TRBJ2-2)
CASVEQIESGELFF

SEQ ID NO: 138379 - protein, 17 aa, Homo sapiens
  CDR3 for alpha chain variable domain of TCR clone 69190 (TRAV3, TRAJ38)
CAVRDCLNAGNNRKLIW

SEQ ID NO: 138380 - protein, 14 aa, Homo sapiens
  CDR3 for beta chain variable domain of TCR clone 69190 (TRBV25-1, TRBJ1-4)
CASSGGGQPEKLFF

SEQ ID NO: 138381 - protein, 11 aa, Homo sapiens
  CDR3 for alpha chain variable domain of TCR clone 69191 (TRAV3, TRAJ21)
CAVGNFNKFYL

SEQ ID NO: 138382 - protein, 14 aa, Homo sapiens
  CDR3 for beta chain variable domain of TCR clone 69191 (TRBV18, TRBJ2-5)
CASSPGVSQETQYF

SEQ ID NO: 138383 - protein, 13 aa, Homo sapiens
  CDR3 for alpha chain variable domain of TCR clone 69192 (TRAV21, TRAJ57)
CAVIEGGSEKLVS

SEQ ID NO: 138384 - protein, 14 aa, Homo sapiens
  CDR3 for beta chain variable domain of TCR clone 69192 (TRBV12-5, TRBJ2-5)
CASGSRTHQETQYF

SEQ ID NO: 138385 - protein, 12 aa, Homo sapiens
  CDR3 for alpha chain variable domain of TCR clone 69193 (TRAV1-1, TRAJ8)
CAGGTGFQKLVF

SEQ ID NO: 138386 - protein, 14 aa, Homo sapiens
  CDR3 for beta chain variable domain of TCR clone 69193 (TRBV11-2, TRBJ2-3)
CASSRLARTDTQYF

SEQ ID NO: 138387 - protein, 15 aa, Homo sapiens
  CDR3 for alpha chain variable domain of TCR clone 69194 (TRAV12-1, TRAJ4)
CVVNPFSGGYNKLIF

SEQ ID NO: 138388 - protein, 20 aa, Homo sapiens
  CDR3 for beta chain variable domain of TCR clone 69194 (TRBV7-8, TRBJ2-2)
CASSHLFPGPTIHITGELFF

SEQ ID NO: 138389 - protein, 11 aa, Homo sapiens
  CDR3 for alpha chain variable domain of TCR clone 69195 (TRAV21, TRAJ34)
CAHYNTDKLTF

SEQ ID NO: 138390 - protein, 19 aa, Homo sapiens
  CDR3 for beta chain variable domain of TCR clone 69195 (TRBV25-1, TRBJ2-2)
CAILVYRVDRGRKTGELFF

SEQ ID NO: 138391 - protein, 14 aa, Homo sapiens
  CDR3 for alpha chain variable domain of TCR clone 69196 (TRAV1-2, TRAJ16)
CAVNRFSAGQKLLF

SEQ ID NO: 138392 - protein, 13 aa, Homo sapiens
  CDR3 for beta chain variable domain of TCR clone 69196 (TRBV10-3, TRBJ2-7)
CASKLAVNYEQYF

SEQ ID NO: 138393 - protein, 10 aa, Homo sapiens
  CDR3 for alpha chain variable domain of TCR clone 69197 (TRAV23/DV6, TRAJ57)
CAASSTLSQG

SEQ ID NO: 138394 - protein, 11 aa, Homo sapiens
  CDR3 for beta chain variable domain of TCR clone 69197 (TRBV12-4, TRBJ2-3)
CASTATDTQYF

SEQ ID NO: 138395 - protein, 14 aa, Homo sapiens
  CDR3 for alpha chain variable domain of TCR clone 69198 (TRAV17, TRAJ15)
CATGPNPAGTALIF

SEQ ID NO: 138396 - protein, 15 aa, Homo sapiens
  CDR3 for beta chain variable domain of TCR clone 69198 (TRBV11-2, TRBJ2-2)
CASSSDRVNAGELFF

SEQ ID NO: 138397 - protein, 14 aa, Homo sapiens
  CDR3 for alpha chain variable domain of TCR clone 69199 (TRAV1-2, TRAJ8)
CAVREDTGFQKLVL

SEQ ID NO: 138398 - protein, 15 aa, Homo sapiens
  CDR3 for beta chain variable domain of TCR clone 69199 (TRBV9, TRBJ1-6)
CASSVAGTGDSPLHF

SEQ ID NO: 138399 - protein, 15 aa, Homo sapiens
  CDR3 for alpha chain variable domain of TCR clone 69200 (TRAV8-4, TRAJ37)
CAVTYGSSNIGKLIF

SEQ ID NO: 138400 - protein, 13 aa, Homo sapiens
  CDR3 for beta chain variable domain of TCR clone 69200 (TRBV12-4, TRBJ2-5)
CASSLGGSRTQYF

SEQ ID NO: 138401 - protein, 14 aa, Homo sapiens
  CDR3 for alpha chain variable domain of TCR clone 69201 (TRAV17, TRAJ57)
CATDPQGGSEKLAF

SEQ ID NO: 138402 - protein, 14 aa, Homo sapiens
  CDR3 for beta chain variable domain of TCR clone 69201 (TRBV27, TRBJ2-5)
CASSSLKGWETQYF

SEQ ID NO: 138403 - protein, 13 aa, Homo sapiens
  CDR3 for alpha chain variable domain of TCR clone 69202 (TRAV8-6, TRAJ33)
CAVSEGSNYQLIW

SEQ ID NO: 138404 - protein, 15 aa, Homo sapiens
  CDR3 for beta chain variable domain of TCR clone 69202 (TRBV9, TRBJ1-6)
CASSVAGTGDSPLHF

SEQ ID NO: 138405 - protein, 11 aa, Homo sapiens
  CDR3 for alpha chain variable domain of TCR clone 69203 (TRAV1-2, TRAJ40)
SAVPGTYKYIF

SEQ ID NO: 138406 - protein, 16 aa, Homo sapiens
  CDR3 for beta chain variable domain of TCR clone 69203 (TRBV12-4, TRBJ2-5)
CASSFFVRGRQETQYF

SEQ ID NO: 138407 - protein, 14 aa, Homo sapiens
  CDR3 for alpha chain variable domain of TCR clone 69204 (TRAV26-2, TRAJ27)
CILRGISDAGKSTF

SEQ ID NO: 138408 - protein, 15 aa, Homo sapiens
  CDR3 for beta chain variable domain of TCR clone 69204 (TRBV10-3, TRBJ2-7)
CATREQGLRSYEQYF

SEQ ID NO: 138409 - protein, 11 aa, Homo sapiens
  CDR3 for alpha chain variable domain of TCR clone 69205 (TRAV35, TRAJ30)
CAGPGDDKIIF

SEQ ID NO: 138410 - protein, 14 aa, Homo sapiens
  CDR3 for beta chain variable domain of TCR clone 69205 (TRBV7-6, TRBJ1-6)
CASSQAGGGSALHF

SEQ ID NO: 138411 - protein, 16 aa, Homo sapiens
  CDR3 for alpha chain variable domain of TCR clone 69206 (TRAV3, TRAJ37)
CAVRGKGSGNTGKLIF

SEQ ID NO: 138412 - protein, 14 aa, Homo sapiens
  CDR3 for beta chain variable domain of TCR clone 69206 (TRBV12-4, TRBJ1-1)
CASTWTGHDTEAFF

SEQ ID NO: 138413 - protein, 14 aa, Homo sapiens
  CDR3 for alpha chain variable domain of TCR clone 69207 (TRAV1-1, TRAJ27)
CAVIYNTNAGKSTF

SEQ ID NO: 138414 - protein, 15 aa, Homo sapiens
  CDR3 for beta chain variable domain of TCR clone 69207 (TRBV7-9, TRBJ1-5)
CASSQGHQPNQPQHF

SEQ ID NO: 138415 - protein, 16 aa, Homo sapiens
  CDR3 for alpha chain variable domain of TCR clone 69208 (TRAV30, TRAJ24)
CGTEIVDADSWGKFQF

SEQ ID NO: 138416 - protein, 17 aa, Homo sapiens
  CDR3 for beta chain variable domain of TCR clone 69208 (TRBV13, TRBJ2-3)
CASSLSRVAGGRNTKYF

SEQ ID NO: 138417 - protein, 12 aa, Homo sapiens
  CDR3 for alpha chain variable domain of TCR clone 69209 (TRAV21, TRAJ49)
CAVNDGGNQFYF

SEQ ID NO: 138418 - protein, 14 aa, Homo sapiens
  CDR3 for beta chain variable domain of TCR clone 69209 (TRBV18, TRBJ2-7)
CASSPRGGSYEQYS

SEQ ID NO: 138419 - protein, 15 aa, Homo sapiens
  CDR3 for alpha chain variable domain of TCR clone 69210 (TRAV8-4, TRAJ12)
CAVRDRVDSSYKLIF

SEQ ID NO: 138420 - protein, 15 aa, Homo sapiens
  CDR3 for beta chain variable domain of TCR clone 69210 (TRBV11-3, TRBJ2-1)
CASSLAGQTYNEQFF

SEQ ID NO: 138421 - protein, 14 aa, Homo sapiens
  CDR3 for alpha chain variable domain of TCR clone 69211 (TRAV36/DV7, TRAJ57)
CAVGFPSGSEKLVF

SEQ ID NO: 138422 - protein, 12 aa, Homo sapiens
  CDR3 for beta chain variable domain of TCR clone 69211 (TRBV19, TRBJ2-7)
CASTSGTYEQYF

SEQ ID NO: 138423 - protein, 16 aa, Homo sapiens
  CDR3 for alpha chain variable domain of TCR clone 69212 (TRAV26-1, )
CIDIQNPYPAVYQLRD

SEQ ID NO: 138424 - protein, 19 aa, Homo sapiens
  CDR3 for beta chain variable domain of TCR clone 69212 (TRBV19, TRBJ2-5)
CASSIGQVTDFFLGETQYF

SEQ ID NO: 138425 - protein, 11 aa, Homo sapiens
  CDR3 for alpha chain variable domain of TCR clone 69213 (TRAV13-1, TRAJ49)
CACVGGNQFYF

SEQ ID NO: 138426 - protein, 13 aa, Homo sapiens
  CDR3 for beta chain variable domain of TCR clone 69213 (TRBV11-3, TRBJ2-5)
CASSRQGGETQYF

SEQ ID NO: 138427 - protein, 15 aa, Homo sapiens
  CDR3 for alpha chain variable domain of TCR clone 69214 (TRAV3, TRAJ20)
CAVKDSRSNDYKLSF

SEQ ID NO: 138428 - protein, 14 aa, Homo sapiens
  CDR3 for beta chain variable domain of TCR clone 69214 (TRBV20-1, TRBJ2-7)
CSARCGNGIYEQYF

SEQ ID NO: 138429 - protein, 16 aa, Homo sapiens
  CDR3 for alpha chain variable domain of TCR clone 69215 (TRAV27, TRAJ48)
TAAQPGDTGLYLPLTF

SEQ ID NO: 138430 - protein, 13 aa, Homo sapiens
  CDR3 for beta chain variable domain of TCR clone 69215 (TRBV15, TRBJ1-6)
CATSGGLNSPLHF

SEQ ID NO: 138431 - protein, 15 aa, Homo sapiens
  CDR3 for alpha chain variable domain of TCR clone 69216 (TRAV8-2, TRAJ40)
CVVLVTTSGTYKYIF

SEQ ID NO: 138432 - protein, 16 aa, Homo sapiens
  CDR3 for beta chain variable domain of TCR clone 69216 (TRBV7-3, TRBJ2-1)
CASSLEGYRSYNEQFF

SEQ ID NO: 138433 - protein, 16 aa, Homo sapiens
  CDR3 for alpha chain variable domain of TCR clone 69217 (TRAV26-1, TRAJ45)
CIVEKYSGGGADGLTF

SEQ ID NO: 138434 - protein, 15 aa, Homo sapiens
  CDR3 for beta chain variable domain of TCR clone 69217 (TRBV15, TRBJ2-7)
CHQQRPIQQAYEQHF

SEQ ID NO: 138435 - protein, 17 aa, Homo sapiens
  CDR3 for alpha chain variable domain of TCR clone 69218 (TRAV3, TRAJ6)
CAVRDGPRAGGSYIPTF

SEQ ID NO: 138436 - protein, 15 aa, Homo sapiens
  CDR3 for beta chain variable domain of TCR clone 69218 (TRBV7-2, TRBJ1-2)
CASSPRAGWNYGYTF

SEQ ID NO: 138437 - protein, 14 aa, Homo sapiens
  CDR3 for alpha chain variable domain of TCR clone 69219 (TRAV29/DV5, TRAJ48)
CAAMALFGNEKLTF

SEQ ID NO: 138438 - protein, 15 aa, Homo sapiens
  CDR3 for beta chain variable domain of TCR clone 69219 (TRBV7-2, TRBJ2-1)
CASTHGTGIHNEQFF

SEQ ID NO: 138439 - protein, 14 aa, Homo sapiens
  CDR3 for alpha chain variable domain of TCR clone 69220 (TRAV23/DV6, TRAJ24)
CAAGRPAAGGNCSL

SEQ ID NO: 138440 - protein, 15 aa, Homo sapiens
  CDR3 for beta chain variable domain of TCR clone 69220 (TRBV7-2, TRBJ1-2)
CASSPRAGWNYGYTF

SEQ ID NO: 138441 - protein, 13 aa, Homo sapiens
  CDR3 for alpha chain variable domain of TCR clone 69221 (TRAV13-2, TRAJ10)
CAENTGGGNKLTF

SEQ ID NO: 138442 - protein, 15 aa, Homo sapiens
  CDR3 for beta chain variable domain of TCR clone 69221 (TRBV12-4, TRBJ2-2)
CASGRQGANTGELFF

SEQ ID NO: 138443 - protein, 20 aa, Homo sapiens
  CDR3 for alpha chain variable domain of TCR clone 69222 (TRAV21, TRAJ4)
AASQPGDSATLAGGYNKLIF

SEQ ID NO: 138444 - protein, 19 aa, Homo sapiens
  CDR3 for beta chain variable domain of TCR clone 69222 (TRBV18, TRBJ1-3)
CASSPLSRTGMSSGNTIDF

SEQ ID NO: 138445 - protein, 16 aa, Homo sapiens
  CDR3 for alpha chain variable domain of TCR clone 69223 (TRAV38-1, TRAJ56)
CAFMKRQTGANSKLTF

SEQ ID NO: 138446 - protein, 11 aa, Homo sapiens
  CDR3 for beta chain variable domain of TCR clone 69223 (TRBV11-2, TRBJ1-1)
CASSINTEAFF

SEQ ID NO: 138447 - protein, 13 aa, Homo sapiens
  CDR3 for alpha chain variable domain of TCR clone 69224 (TRAV21, TRAJ27)
CAARPGNAGKSTF

SEQ ID NO: 138448 - protein, 15 aa, Homo sapiens
  CDR3 for beta chain variable domain of TCR clone 69224 (TRBV2, TRBJ2-3)
CASSDAGGAPDTQYF

SEQ ID NO: 138449 - protein, 15 aa, Homo sapiens
  CDR3 for alpha chain variable domain of TCR clone 69225 (TRAV12-1, TRAJ44)
CVADLPTGTSSKLTF

SEQ ID NO: 138450 - protein, 13 aa, Homo sapiens
  CDR3 for beta chain variable domain of TCR clone 69225 (TRBV6-5, TRBJ2-5)
CASSPQGGETQYF

SEQ ID NO: 138451 - protein, 13 aa, Homo sapiens
  CDR3 for alpha chain variable domain of TCR clone 69226 (TRAV13-1, TRAJ40)
CAARTSGTYKYIF

SEQ ID NO: 138452 - protein, 15 aa, Homo sapiens
  CDR3 for beta chain variable domain of TCR clone 69226 (TRBV7-2, TRBJ2-1)
CASSLVAGGYNEQFF

SEQ ID NO: 138453 - protein, 14 aa, Homo sapiens
  CDR3 for alpha chain variable domain of TCR clone 69227 (TRAV8-4, TRAJ39)
CAVSLNDAGNMLTF

SEQ ID NO: 138454 - protein, 16 aa, Homo sapiens
  CDR3 for beta chain variable domain of TCR clone 69227 (TRBV13, TRBJ2-7)
CASSSRESGRTYEQYF

SEQ ID NO: 138455 - protein, 15 aa, Homo sapiens
  CDR3 for alpha chain variable domain of TCR clone 69228 (TRAV30, TRAJ32)
CGTEILGGATDKLIF

SEQ ID NO: 138456 - protein, 13 aa, Homo sapiens
  CDR3 for beta chain variable domain of TCR clone 69228 (TRBV6-3, TRBJ2-7)
CASSFSGGYEQYF

SEQ ID NO: 138457 - protein, 14 aa, Homo sapiens
  CDR3 for alpha chain variable domain of TCR clone 69229 (TRAV1-2, TRAJ16)
CAVNRFSDGHKLLF

SEQ ID NO: 138458 - protein, 13 aa, Homo sapiens
  CDR3 for beta chain variable domain of TCR clone 69229 (TRBV10-3, TRBJ2-7)
CASKLAVNYEQYF

SEQ ID NO: 138459 - protein, 16 aa, Homo sapiens
  CDR3 for alpha chain variable domain of TCR clone 69230 (TRAV22, TRAJ45)
CAVERGKRGGADGLTF

SEQ ID NO: 138460 - protein, 16 aa, Homo sapiens
  CDR3 for beta chain variable domain of TCR clone 69230 (TRBV6-1, TRBJ2-5)
CASSETLDRGAETQYF

SEQ ID NO: 138461 - protein, 14 aa, Homo sapiens
  CDR3 for alpha chain variable domain of TCR clone 69231 (TRAV1-2, TRAJ16)
CAVNRFSDGQKLLF

SEQ ID NO: 138462 - protein, 13 aa, Homo sapiens
  CDR3 for beta chain variable domain of TCR clone 69231 (TRBV19, TRBJ2-1)
CATSRGVYNEQFF

SEQ ID NO: 138463 - protein, 15 aa, Homo sapiens
  CDR3 for alpha chain variable domain of TCR clone 69232 (TRAV19, TRAJ9)
CALSEARTGGVKTIF

SEQ ID NO: 138464 - protein, 17 aa, Homo sapiens
  CDR3 for beta chain variable domain of TCR clone 69232 (TRBV28, TRBJ2-5)
CASSTPEGDALQETQYF

SEQ ID NO: 138465 - protein, 14 aa, Homo sapiens
  CDR3 for alpha chain variable domain of TCR clone 69233 (TRAV13-1, TRAJ35)
CAASKGGFGNVLHC

SEQ ID NO: 138466 - protein, 13 aa, Homo sapiens
  CDR3 for beta chain variable domain of TCR clone 69233 (TRBV7-3, TRBJ1-1)
CASSQAWGAEAFF

SEQ ID NO: 138467 - protein, 15 aa, Homo sapiens
  CDR3 for alpha chain variable domain of TCR clone 69234 (TRAV12-2, TRAJ43)
CAFDMRFGAGTRLTV

SEQ ID NO: 138468 - protein, 18 aa, Homo sapiens
  CDR3 for beta chain variable domain of TCR clone 69234 (TRBV20-1, TRBJ2-3)
CSASGLAGGPVTTDTQYF

SEQ ID NO: 138469 - protein, 13 aa, Homo sapiens
  CDR3 for alpha chain variable domain of TCR clone 69235 (TRAV36/DV7, TRAJ37)
CAVFSSNTGKLIF

SEQ ID NO: 138470 - protein, 16 aa, Homo sapiens
  CDR3 for beta chain variable domain of TCR clone 69235 (TRBV3-1, TRBJ2-5)
CASSPGQFNGFGNQYF

SEQ ID NO: 138471 - protein, 16 aa, Homo sapiens
  CDR3 for alpha chain variable domain of TCR clone 69236 (TRAV3, TRAJ10)
CAVRDMRAGGGNKLTF

SEQ ID NO: 138472 - protein, 12 aa, Homo sapiens
  CDR3 for beta chain variable domain of TCR clone 69236 (TRBV7-9, TRBJ1-1)
CASILVRGEAFF

SEQ ID NO: 138473 - protein, 17 aa, Homo sapiens
  CDR3 for alpha chain variable domain of TCR clone 69237 (TRAV2, TRAJ22)
ILQVREADAAEQRQLTF

SEQ ID NO: 138474 - protein, 16 aa, Homo sapiens
  CDR3 for beta chain variable domain of TCR clone 69237 (TRBV2, TRBJ2-5)
CASSETQGVGGETQYF

SEQ ID NO: 138475 - protein, 13 aa, Homo sapiens
  CDR3 for alpha chain variable domain of TCR clone 69238 (TRAV13-1, TRAJ40)
CAASKGGTYEYIF

SEQ ID NO: 138476 - protein, 13 aa, Homo sapiens
  CDR3 for beta chain variable domain of TCR clone 69238 (TRBV7-6, TRBJ1-2)
CASSLVADYGYTF

SEQ ID NO: 138477 - protein, 13 aa, Homo sapiens
  CDR3 for alpha chain variable domain of TCR clone 69239 (TRAV13-2, TRAJ48)
CAEMDFGNEKLTF

SEQ ID NO: 138478 - protein, 15 aa, Homo sapiens
  CDR3 for beta chain variable domain of TCR clone 69239 (TRBV10-3, TRBJ2-1)
CAIRNGTSGHNEQFF

SEQ ID NO: 138479 - protein, 16 aa, Homo sapiens
  CDR3 for alpha chain variable domain of TCR clone 69240 (TRAV8-4, TRAJ52)
CAAANAGGTSYGKLTF

SEQ ID NO: 138480 - protein, 15 aa, Homo sapiens
  CDR3 for beta chain variable domain of TCR clone 69240 (TRBV6-3, TRBJ2-7)
CSSSSPGTVFYEQYF

SEQ ID NO: 138481 - protein, 17 aa, Homo sapiens
  CDR3 for alpha chain variable domain of TCR clone 69241 (TRAV3, TRAJ6)
CAVRDGPRAGGSYIPTF

SEQ ID NO: 138482 - protein, 16 aa, Homo sapiens
  CDR3 for beta chain variable domain of TCR clone 69241 (TRBV5-1, TRBJ1-3)
CASSPWAPRSGNTIYF

SEQ ID NO: 138483 - protein, 17 aa, Homo sapiens
  CDR3 for alpha chain variable domain of TCR clone 69242 (TRAV8-6, TRAJ58)
CAVSSWVGETSGYRLTF

SEQ ID NO: 138484 - protein, 14 aa, Homo sapiens
  CDR3 for beta chain variable domain of TCR clone 69242 (TRBV4-2, TRBJ2-1)
CASGLDRAYNEQFF

SEQ ID NO: 138485 - protein, 14 aa, Homo sapiens
  CDR3 for alpha chain variable domain of TCR clone 69243 (TRAV12-1, TRAJ45)
CVVMRSGGADGLTF

SEQ ID NO: 138486 - protein, 17 aa, Homo sapiens
  CDR3 for beta chain variable domain of TCR clone 69243 (TRBV11-2, TRBJ2-1)
CASSLYPPGVEYNEQFF

SEQ ID NO: 138487 - protein, 13 aa, Homo sapiens
  CDR3 for alpha chain variable domain of TCR clone 69244 (TRAV13-1, TRAJ39)
CAASIWAGNMLTF

SEQ ID NO: 138488 - protein, 15 aa, Homo sapiens
  CDR3 for beta chain variable domain of TCR clone 69244 (TRBV7-9, TRBJ1-1)
CTSSLLEQGGTEAFF

SEQ ID NO: 138489 - protein, 11 aa, Homo sapiens
  CDR3 for alpha chain variable domain of TCR clone 69245 (TRAV2, TRAJ21)
CAVFNFNKFYF

SEQ ID NO: 138490 - protein, 14 aa, Homo sapiens
  CDR3 for beta chain variable domain of TCR clone 69245 (TRBV15, TRBJ2-3)
CATRSGTSTDTQYL

SEQ ID NO: 138491 - protein, 14 aa, Homo sapiens
  CDR3 for alpha chain variable domain of TCR clone 69246 (TRAV30, TRAJ33)
CGTVAPRSNYQLIW

SEQ ID NO: 138492 - protein, 16 aa, Homo sapiens
  CDR3 for beta chain variable domain of TCR clone 69246 (TRBV3-1, TRBJ2-5)
CASSTGQFNGFGTQYF

SEQ ID NO: 138493 - protein, 17 aa, Homo sapiens
  CDR3 for alpha chain variable domain of TCR clone 69247 (TRAV21, TRAJ53)
CCEGGENSGGSNYKLTF

SEQ ID NO: 138494 - protein, 13 aa, Homo sapiens
  CDR3 for beta chain variable domain of TCR clone 69247 (TRBV9, TRBJ2-1)
CASSPSGGSEQFF

SEQ ID NO: 138495 - protein, 16 aa, Homo sapiens
  CDR3 for alpha chain variable domain of TCR clone 69248 (TRAV3, TRAJ37)
CAVRFRGSGNTGKLIF

SEQ ID NO: 138496 - protein, 11 aa, Homo sapiens
  CDR3 for beta chain variable domain of TCR clone 69248 (TRBV11-2, TRBJ2-2)
CASSLPGELFF

SEQ ID NO: 138497 - protein, 14 aa, Homo sapiens
  CDR3 for alpha chain variable domain of TCR clone 69249 (TRAV12-3, TRAJ10)
SHLPLTGGGNKLTF

SEQ ID NO: 138498 - protein, 14 aa, Homo sapiens
  CDR3 for beta chain variable domain of TCR clone 69249 (TRBV28, TRBJ2-1)
CASSYYTAYNEQFF

SEQ ID NO: 138499 - protein, 15 aa, Homo sapiens
  CDR3 for alpha chain variable domain of TCR clone 69250 (TRAV25, TRAJ53)
CAATGGGGSNYKLTF

SEQ ID NO: 138500 - protein, 19 aa, Homo sapiens
  CDR3 for beta chain variable domain of TCR clone 69250 (TRBV7-2, TRBJ2-3)
CVSSFLSRNWGGGTDTQYF

SEQ ID NO: 138501 - protein, 13 aa, Homo sapiens
  CDR3 for alpha chain variable domain of TCR clone 69251 (TRAV13-1, TRAJ21)
CAASIYNFNKFYF

SEQ ID NO: 138502 - protein, 13 aa, Homo sapiens
  CDR3 for beta chain variable domain of TCR clone 69251 (TRBV27, TRBJ1-4)
CASSLMGDVKLFF

SEQ ID NO: 138503 - protein, 17 aa, Homo sapiens
  CDR3 for alpha chain variable domain of TCR clone 69252 (TRAV3, TRAJ6)
CAVRDGPRAGGSYLPTF

SEQ ID NO: 138504 - protein, 14 aa, Homo sapiens
  CDR3 for beta chain variable domain of TCR clone 69252 (TRBV7-2, TRBJ2-7)
CASSPKTSFYEQYF

SEQ ID NO: 138505 - protein, 11 aa, Homo sapiens
  CDR3 for alpha chain variable domain of TCR clone 69253 (TRAV12-3, TRAJ43)
CAMSVSNDMRF

SEQ ID NO: 138506 - protein, 12 aa, Homo sapiens
  CDR3 for beta chain variable domain of TCR clone 69253 (TRBV20-1, TRBJ2-7)
CSAGLKMGEQYF

SEQ ID NO: 138507 - protein, 15 aa, Homo sapiens
  CDR3 for alpha chain variable domain of TCR clone 69254 (TRAV25, TRAJ53)
CAATGGGGSNYKLTF

SEQ ID NO: 138508 - protein, 15 aa, Homo sapiens
  CDR3 for beta chain variable domain of TCR clone 69254 (TRBV4-1, TRBJ2-5)
CASSQLAGGQETQYF

SEQ ID NO: 138509 - protein, 14 aa, Homo sapiens
  CDR3 for alpha chain variable domain of TCR clone 69255 (TRAV29/DV5, TRAJ34)
CAASASRETDKLIF

SEQ ID NO: 138510 - protein, 17 aa, Homo sapiens
  CDR3 for beta chain variable domain of TCR clone 69255 (TRBV20-1, TRBJ2-1)
CSARDPLAGVWDNEQFF

SEQ ID NO: 138511 - protein, 12 aa, Homo sapiens
  CDR3 for alpha chain variable domain of TCR clone 69256 (TRAV26-1, TRAJ17)
CIVRSAGNKLTF

SEQ ID NO: 138512 - protein, 12 aa, Homo sapiens
  CDR3 for beta chain variable domain of TCR clone 69256 (TRBV11-2, TRBJ2-2)
CASSLPTGELFF

SEQ ID NO: 138513 - protein, 13 aa, Homo sapiens
  CDR3 for alpha chain variable domain of TCR clone 69257 (TRAV17, TRAJ9)
CAPDYTGGFKTIF

SEQ ID NO: 138514 - protein, 14 aa, Homo sapiens
  CDR3 for beta chain variable domain of TCR clone 69257 (TRBV19, TRBJ2-5)
CASSMTGQQETQYF

SEQ ID NO: 138515 - protein, 13 aa, Homo sapiens
  CDR3 for alpha chain variable domain of TCR clone 69258 (TRAV1-2, TRAJ9)
CAALNTGGFKTIF

SEQ ID NO: 138516 - protein, 13 aa, Homo sapiens
  CDR3 for beta chain variable domain of TCR clone 69258 (TRBV7-9, TRBJ2-3)
CASSPGSTDTQYF

SEQ ID NO: 138517 - protein, 13 aa, Homo sapiens
  CDR3 for alpha chain variable domain of TCR clone 69259 (TRAV8-1, TRAJ28)
CAVSGAGSYQLTL

SEQ ID NO: 138518 - protein, 14 aa, Homo sapiens
  CDR3 for beta chain variable domain of TCR clone 69259 (TRBV7-2, TRBJ2-2)
CASRGQGAAGELFF

SEQ ID NO: 138519 - protein, 12 aa, Homo sapiens
  CDR3 for alpha chain variable domain of TCR clone 69260 (TRAV4, TRAJ26)
CLVGDYGQNFVF

SEQ ID NO: 138520 - protein, 16 aa, Homo sapiens
  CDR3 for beta chain variable domain of TCR clone 69260 (TRBV12-4, TRBJ2-7)
CASSLIGGTGTYEQYF

SEQ ID NO: 138521 - protein, 15 aa, Homo sapiens
  CDR3 for alpha chain variable domain of TCR clone 69261 (TRAV12-1, TRAJ44)
CVVFVNTGTASKFTF

SEQ ID NO: 138522 - protein, 17 aa, Homo sapiens
  CDR3 for beta chain variable domain of TCR clone 69261 (TRBV7-8, TRBJ2-6)
CASSAGTGGAGANVLTF

SEQ ID NO: 138523 - protein, 12 aa, Homo sapiens
  CDR3 for alpha chain variable domain of TCR clone 69262 (TRAV8-3, TRAJ26)
CAGDNYGQNFVF

SEQ ID NO: 138524 - protein, 10 aa, Homo sapiens
  CDR3 for beta chain variable domain of TCR clone 69262 (TRBV28, TRBJ1-2)
CASSSDRAVF

SEQ ID NO: 138525 - protein, 10 aa, Homo sapiens
  CDR3 for alpha chain variable domain of TCR clone 69263 (TRAV21, TRAJ20)
CAVNVGRLQA

SEQ ID NO: 138526 - protein, 15 aa, Homo sapiens
  CDR3 for beta chain variable domain of TCR clone 69263 (TRBV7-2, TRBJ2-1)
CASSSRTSREDEQFF

SEQ ID NO: 138527 - protein, 14 aa, Homo sapiens
  CDR3 for alpha chain variable domain of TCR clone 69264 (TRAV12-1, TRAJ26)
CVVKGSNYGQNFVF

SEQ ID NO: 138528 - protein, 17 aa, Homo sapiens
  CDR3 for beta chain variable domain of TCR clone 69264 (TRBV11-2, TRBJ2-6)
CASSQRDIFSGAYVLTF

SEQ ID NO: 138529 - protein, 12 aa, Homo sapiens
  CDR3 for alpha chain variable domain of TCR clone 69265 (TRAV16, TRAJ27)
CALNTNAGKSTF

SEQ ID NO: 138530 - protein, 15 aa, Homo sapiens
  CDR3 for beta chain variable domain of TCR clone 69265 (TRBV6-5, TRBJ2-1)
CASSYDAGAGNEQFF

SEQ ID NO: 138531 - protein, 14 aa, Homo sapiens
  CDR3 for alpha chain variable domain of TCR clone 69266 (TRAV14/DV4, TRAJ41)
YARGGPDSGYALNF

SEQ ID NO: 138532 - protein, 15 aa, Homo sapiens
  CDR3 for beta chain variable domain of TCR clone 69266 (TRBV19, TRBJ2-1)
CASSIQATSYNEQFF

SEQ ID NO: 138533 - protein, 17 aa, Homo sapiens
  CDR3 for alpha chain variable domain of TCR clone 69267 (TRAV38-1, TRAJ28)
CAFMKPTSGAGSYQLTF

SEQ ID NO: 138534 - protein, 15 aa, Homo sapiens
  CDR3 for beta chain variable domain of TCR clone 69267 (TRBV5-1, TRBJ2-4)
CASSLGGGGSYIHYF

SEQ ID NO: 138535 - protein, 14 aa, Homo sapiens
  CDR3 for alpha chain variable domain of TCR clone 69268 (TRAV12-2, TRAJ6)
RASKWGGGSYIPTF

SEQ ID NO: 138536 - protein, 13 aa, Homo sapiens
  CDR3 for beta chain variable domain of TCR clone 69268 (TRBV2, TRBJ1-1)
CASSEGGNTEAFF

SEQ ID NO: 138537 - protein, 14 aa, Homo sapiens
  CDR3 for alpha chain variable domain of TCR clone 69269 (TRAV1-2, TRAJ8)
CAVREDTGFQKLVF

SEQ ID NO: 138538 - protein, 16 aa, Homo sapiens
  CDR3 for beta chain variable domain of TCR clone 69269 (TRBV19, TRBJ2-2)
CASSFPGQGLAGELFF

SEQ ID NO: 138539 - protein, 16 aa, Homo sapiens
  CDR3 for alpha chain variable domain of TCR clone 69270 (TRAV30, TRAJ24)
CGTEIVDADSWGKFQF

SEQ ID NO: 138540 - protein, 15 aa, Homo sapiens
  CDR3 for beta chain variable domain of TCR clone 69270 (TRBV7-9, TRBJ2-1)
CASSLGWGRANEQFF

SEQ ID NO: 138541 - protein, 14 aa, Homo sapiens
  CDR3 for alpha chain variable domain of TCR clone 69271 (TRAV12-1, TRAJ12)
CVVTRMDSSYKLIF

SEQ ID NO: 138542 - protein, 13 aa, Homo sapiens
  CDR3 for beta chain variable domain of TCR clone 69271 (TRBV20-1, TRBJ1-1)
CSSRGGGNTEAFF

SEQ ID NO: 138543 - protein, 14 aa, Homo sapiens
  CDR3 for alpha chain variable domain of TCR clone 69272 (TRAV29/DV5, TRAJ45)
CAASFRGGADGLAF

SEQ ID NO: 138544 - protein, 11 aa, Homo sapiens
  CDR3 for beta chain variable domain of TCR clone 69272 (TRBV11-2, TRBJ2-2)
CASSLPGELFF

SEQ ID NO: 138545 - protein, 14 aa, Homo sapiens
  CDR3 for alpha chain variable domain of TCR clone 69273 (TRAV3, TRAJ9)
CAVRGNTGGFKTIF

SEQ ID NO: 138546 - protein, 14 aa, Homo sapiens
  CDR3 for beta chain variable domain of TCR clone 69273 (TRBV15, TRBJ2-1)
CATSGVEDYNERFF

SEQ ID NO: 138547 - protein, 12 aa, Homo sapiens
  CDR3 for alpha chain variable domain of TCR clone 69274 (TRAV3, TRAJ31)
CAVRDGNARLMF

SEQ ID NO: 138548 - protein, 16 aa, Homo sapiens
  CDR3 for beta chain variable domain of TCR clone 69274 (TRBV2, TRBJ2-3)
CASSTSVEGVTDTQYF

SEQ ID NO: 138549 - protein, 17 aa, Homo sapiens
  CDR3 for alpha chain variable domain of TCR clone 69275 (TRAV26-1, TRAJ53)
CIVRVDDSGGSNYKLTF

SEQ ID NO: 138550 - protein, 15 aa, Homo sapiens
  CDR3 for beta chain variable domain of TCR clone 69275 (TRBV20-1, TRBJ2-7)
CSARVPAAYFYDQYF

SEQ ID NO: 138551 - protein, 13 aa, Homo sapiens
  CDR3 for alpha chain variable domain of TCR clone 69276 (TRAV35, TRAJ42)
CAGFPGSQGNLIF

SEQ ID NO: 138552 - protein, 13 aa, Homo sapiens
  CDR3 for beta chain variable domain of TCR clone 69276 (TRBV29-1, TRBJ2-1)
CSVEGRRVNEQFF

SEQ ID NO: 138553 - protein, 14 aa, Homo sapiens
  CDR3 for alpha chain variable domain of TCR clone 69277 (TRAV16, TRAJ33)
CALSAMDSNYQLIW

SEQ ID NO: 138554 - protein, 13 aa, Homo sapiens
  CDR3 for beta chain variable domain of TCR clone 69277 (TRBV24-1, TRBJ2-2)
CATSDWSTGELFF

SEQ ID NO: 138555 - protein, 15 aa, Homo sapiens
  CDR3 for alpha chain variable domain of TCR clone 69278 (TRAV27, TRAJ38)
CAARRNAGNNRKLIW

SEQ ID NO: 138556 - protein, 13 aa, Homo sapiens
  CDR3 for beta chain variable domain of TCR clone 69278 (TRBV12-5, TRBJ2-3)
CASGDRQSDTLYF

SEQ ID NO: 138557 - protein, 13 aa, Homo sapiens
  CDR3 for alpha chain variable domain of TCR clone 69279 (TRAV12-2, TRAJ10)
CAVSTGGGNKLTF

SEQ ID NO: 138558 - protein, 11 aa, Homo sapiens
  CDR3 for beta chain variable domain of TCR clone 69279 (TRBV6-1, TRBJ2-1)
CASISSNEQFF

SEQ ID NO: 138559 - protein, 13 aa, Homo sapiens
  CDR3 for alpha chain variable domain of TCR clone 69280 (TRAV6, TRAJ16)
CALDDSDGQKLLF

SEQ ID NO: 138560 - protein, 14 aa, Homo sapiens
  CDR3 for beta chain variable domain of TCR clone 69280 (TRBV12-4, TRBJ1-6)
CASNLQGKGSPLHL

SEQ ID NO: 138561 - protein, 16 aa, Homo sapiens
  CDR3 for alpha chain variable domain of TCR clone 69281 (TRAV14/DV4, TRAJ54)
CAMREGRIQGAQKLVF

SEQ ID NO: 138562 - protein, 14 aa, Homo sapiens
  CDR3 for beta chain variable domain of TCR clone 69281 (TRBV6-1, TRBJ1-3)
CASVQGGGGNTIYF

SEQ ID NO: 138563 - protein, 12 aa, Homo sapiens
  CDR3 for alpha chain variable domain of TCR clone 69282 (TRAV21, TRAJ6)
CAVKGGSYIPTF

SEQ ID NO: 138564 - protein, 13 aa, Homo sapiens
  CDR3 for beta chain variable domain of TCR clone 69282 (TRBV11-2, TRBJ1-1)
CASSFTENTGAFF

SEQ ID NO: 138565 - protein, 14 aa, Homo sapiens
  CDR3 for alpha chain variable domain of TCR clone 69283 (TRAV40, TRAJ41)
CLLGPPNSGYALNF

SEQ ID NO: 138566 - protein, 11 aa, Homo sapiens
  CDR3 for beta chain variable domain of TCR clone 69283 (TRBV19, TRBJ2-7)
CASSIPGEQYF

SEQ ID NO: 138567 - protein, 14 aa, Homo sapiens
  CDR3 for alpha chain variable domain of TCR clone 69284 (TRAV36/DV7, TRAJ53)
CAVVDGGSNYKLTF

SEQ ID NO: 138568 - protein, 16 aa, Homo sapiens
  CDR3 for beta chain variable domain of TCR clone 69284 (TRBV15, TRBJ2-7)
CATSARQARSSYERYF

SEQ ID NO: 138569 - protein, 16 aa, Homo sapiens
  CDR3 for alpha chain variable domain of TCR clone 69285 (TRAV26-1, TRAJ53)
CIVRVAMGGSTYKLTF

SEQ ID NO: 138570 - protein, 12 aa, Homo sapiens
  CDR3 for beta chain variable domain of TCR clone 69285 (TRBV7-9, TRBJ1-5)
CASSPQGQPQHF

SEQ ID NO: 138571 - protein, 13 aa, Homo sapiens
  CDR3 for alpha chain variable domain of TCR clone 69286 (TRAV8-4, TRAJ10)
CAAFTGGGNKLTF

SEQ ID NO: 138572 - protein, 12 aa, Homo sapiens
  CDR3 for beta chain variable domain of TCR clone 69286 (TRBV3-1, TRBJ2-1)
CASGQGSSGQFF

SEQ ID NO: 138573 - protein, 13 aa, Homo sapiens
  CDR3 for alpha chain variable domain of TCR clone 69287 (TRAV23/DV6, TRAJ27)
CAASKPMQANQPL

SEQ ID NO: 138574 - protein, 12 aa, Homo sapiens
  CDR3 for beta chain variable domain of TCR clone 69287 (TRBV11-2, TRBJ2-2)
CASSLGGGELFF

SEQ ID NO: 138575 - protein, 14 aa, Homo sapiens
  CDR3 for alpha chain variable domain of TCR clone 69288 (TRAV16, TRAJ15)
CALSGPQAGTALIF

SEQ ID NO: 138576 - protein, 12 aa, Homo sapiens
  CDR3 for beta chain variable domain of TCR clone 69288 (TRBV18, TRBJ2-5)
CASSPSNETQYF

SEQ ID NO: 138577 - protein, 15 aa, Homo sapiens
  CDR3 for alpha chain variable domain of TCR clone 69289 (TRAV26-1, TRAJ3)
CIVRSGYSSASKIIF

SEQ ID NO: 138578 - protein, 14 aa, Homo sapiens
  CDR3 for beta chain variable domain of TCR clone 69289 (TRBV13, TRBJ2-5)
CARYRRLAEETQYF

SEQ ID NO: 138579 - protein, 15 aa, Homo sapiens
  CDR3 for alpha chain variable domain of TCR clone 69290 (TRAV12-3, TRAJ6)
CAMSATSGGSYIPTL

SEQ ID NO: 138580 - protein, 11 aa, Homo sapiens
  CDR3 for beta chain variable domain of TCR clone 69290 (TRBV20-1, TRBJ1-5)
CSAQGDQPQHF

SEQ ID NO: 138581 - protein, 15 aa, Homo sapiens
  CDR3 for alpha chain variable domain of TCR clone 69291 (TRAV21, TRAJ53)
CATLNSGGSNYKLTF

SEQ ID NO: 138582 - protein, 13 aa, Homo sapiens
  CDR3 for beta chain variable domain of TCR clone 69291 (TRBV11-2, TRBJ2-5)
CASSATGEETQYF

SEQ ID NO: 138583 - protein, 12 aa, Homo sapiens
  CDR3 for alpha chain variable domain of TCR clone 69292 (TRAV8-3, TRAJ26)
CAGDNYGQNFVF

SEQ ID NO: 138584 - protein, 16 aa, Homo sapiens
  CDR3 for beta chain variable domain of TCR clone 69292 (TRBV12-4, TRBJ2-5)
CASSWRPSGDLETQYF

SEQ ID NO: 138585 - protein, 15 aa, Homo sapiens
  CDR3 for alpha chain variable domain of TCR clone 69293 (TRAV12-1, TRAJ44)
CVVFVNTGTASKLTF

SEQ ID NO: 138586 - protein, 16 aa, Homo sapiens
  CDR3 for beta chain variable domain of TCR clone 69293 (TRBV5-4, TRBJ2-3)
CASQQPGAGGADTQYF

SEQ ID NO: 138587 - protein, 16 aa, Homo sapiens
  CDR3 for alpha chain variable domain of TCR clone 69294 (TRAV30, TRAJ24)
CGTEIVDADSWGKFKF

SEQ ID NO: 138588 - protein, 14 aa, Homo sapiens
  CDR3 for beta chain variable domain of TCR clone 69294 (TRBV13, TRBJ2-1)
CASSPRPRYNEQFF

SEQ ID NO: 138589 - protein, 13 aa, Homo sapiens
  CDR3 for alpha chain variable domain of TCR clone 69295 (TRAV26-1, TRAJ33)
CIVRVEGNYQLIW

SEQ ID NO: 138590 - protein, 13 aa, Homo sapiens
  CDR3 for beta chain variable domain of TCR clone 69295 (TRBV6-3, TRBJ2-7)
CARTWGSSYEQYF

SEQ ID NO: 138591 - protein, 14 aa, Homo sapiens
  CDR3 for alpha chain variable domain of TCR clone 69296 (TRAV1-2, TRAJ16)
CAVNRFSAGQKLLF

SEQ ID NO: 138592 - protein, 14 aa, Homo sapiens
  CDR3 for beta chain variable domain of TCR clone 69296 (TRBV4-1, TRBJ2-2)
CASSQAVNTGELFF

SEQ ID NO: 138593 - protein, 13 aa, Homo sapiens
  CDR3 for alpha chain variable domain of TCR clone 69297 (TRAV26-2, TRAJ43)
CILRAVNNNDMRF

SEQ ID NO: 138594 - protein, 15 aa, Homo sapiens
  CDR3 for beta chain variable domain of TCR clone 69297 (TRBV7-2, TRBJ2-1)
CASPHGTGIYNEQFF

SEQ ID NO: 138595 - protein, 11 aa, Homo sapiens
  CDR3 for alpha chain variable domain of TCR clone 69298 (TRAV21, TRAJ48)
CAVDGSEKLTF

SEQ ID NO: 138596 - protein, 16 aa, Homo sapiens
  CDR3 for beta chain variable domain of TCR clone 69298 (TRBV12-4, TRBJ1-5)
CASSSGPRGSNQPQHF

SEQ ID NO: 138597 - protein, 14 aa, Homo sapiens
  CDR3 for alpha chain variable domain of TCR clone 69299 (TRAV1-2, TRAJ16)
CAVNRFSDGQKLFF

SEQ ID NO: 138598 - protein, 13 aa, Homo sapiens
  CDR3 for beta chain variable domain of TCR clone 69299 (TRBV6-1, TRBJ2-5)
CASGYQSVETQYF

SEQ ID NO: 138599 - protein, 15 aa, Homo sapiens
  CDR3 for alpha chain variable domain of TCR clone 69300 (TRAV26-1, TRAJ56)
CIVRVATGANSKLTF

SEQ ID NO: 138600 - protein, 16 aa, Homo sapiens
  CDR3 for beta chain variable domain of TCR clone 69300 (TRBV11-2, TRBJ1-2)
CASSLDTGGADYGYTF

SEQ ID NO: 138601 - protein, 13 aa, Homo sapiens
  CDR3 for alpha chain variable domain of TCR clone 69301 (TRAV8-3, TRAJ28)
CAVGAVGSYQLTF

SEQ ID NO: 138602 - protein, 15 aa, Homo sapiens
  CDR3 for beta chain variable domain of TCR clone 69301 (TRBV7-9, TRBJ1-5)
CANSQGHQPNQPQHF

SEQ ID NO: 138603 - protein, 14 aa, Homo sapiens
  CDR3 for alpha chain variable domain of TCR clone 69302 (TRAV13-1, TRAJ13)
CSASRVGGYQKVTF

SEQ ID NO: 138604 - protein, 17 aa, Homo sapiens
  CDR3 for beta chain variable domain of TCR clone 69302 (TRBV15, TRBJ1-5)
CATSRAPPGTRNQPQHF

SEQ ID NO: 138605 - protein, 15 aa, Homo sapiens
  CDR3 for alpha chain variable domain of TCR clone 69303 (TRAV21, TRAJ53)
CATLNSGGSNYKLTF

SEQ ID NO: 138606 - protein, 16 aa, Homo sapiens
  CDR3 for beta chain variable domain of TCR clone 69303 (TRBV9, TRBJ2-1)
CASSVGGGGNYNERFF

SEQ ID NO: 138607 - protein, 16 aa, Homo sapiens
  CDR3 for alpha chain variable domain of TCR clone 69304 (TRAV21, TRAJ52)
CAVTNAGGTSYGKLTF

SEQ ID NO: 138608 - protein, 16 aa, Homo sapiens
  CDR3 for beta chain variable domain of TCR clone 69304 (TRBV2, TRBJ2-1)
CASSVGGPLSYNEQFF

SEQ ID NO: 138609 - protein, 16 aa, Homo sapiens
  CDR3 for alpha chain variable domain of TCR clone 69305 (TRAV30, TRAJ24)
CGTEIVDADSWGKFQF

SEQ ID NO: 138610 - protein, 12 aa, Homo sapiens
  CDR3 for beta chain variable domain of TCR clone 69305 (TRBV27, TRBJ2-1)
CASRGLYNEQFF

SEQ ID NO: 138611 - protein, 15 aa, Homo sapiens
  CDR3 for alpha chain variable domain of TCR clone 69306 (TRAV8-3, TRAJ27)
CAVGPSKTNAGKSTF

SEQ ID NO: 138612 - protein, 14 aa, Homo sapiens
  CDR3 for beta chain variable domain of TCR clone 69306 (TRBV2, TRBJ2-7)
CASSIGTSVYEQYF

SEQ ID NO: 138613 - protein, 14 aa, Homo sapiens
  CDR3 for alpha chain variable domain of TCR clone 69307 (TRAV8-2, TRAJ11)
CVVSEKSGYSTLTF

SEQ ID NO: 138614 - protein, 16 aa, Homo sapiens
  CDR3 for beta chain variable domain of TCR clone 69307 (TRBV28, TRBJ2-1)
CASSSPEYPRGNEQFF

SEQ ID NO: 138615 - protein, 15 aa, Homo sapiens
  CDR3 for alpha chain variable domain of TCR clone 69308 (TRAV21, TRAJ45)
CAVSYSGGGADGLTF

SEQ ID NO: 138616 - protein, 12 aa, Homo sapiens
  CDR3 for beta chain variable domain of TCR clone 69308 (TRBV11-2, TRBJ2-1)
CASSPGNNEQLF

SEQ ID NO: 138617 - protein, 13 aa, Homo sapiens
  CDR3 for alpha chain variable domain of TCR clone 69309 (TRAV29/DV5, TRAJ47)
CAASAEYGNKLVF

SEQ ID NO: 138618 - protein, 17 aa, Homo sapiens
  CDR3 for beta chain variable domain of TCR clone 69309 (TRBV7-9, TRBJ2-6)
CASSFGAGYSGANVLTF

SEQ ID NO: 138619 - protein, 14 aa, Homo sapiens
  CDR3 for alpha chain variable domain of TCR clone 69310 (TRAV16, TRAJ15)
CTLSGPQAGTALIF

SEQ ID NO: 138620 - protein, 12 aa, Homo sapiens
  CDR3 for beta chain variable domain of TCR clone 69310 (TRBV18, TRBJ2-5)
CASSPSKETQYF

SEQ ID NO: 138621 - protein, 14 aa, Homo sapiens
  CDR3 for alpha chain variable domain of TCR clone 69311 (TRAV13-2, TRAJ11)
CAETGNSGYSTLTF

SEQ ID NO: 138622 - protein, 15 aa, Homo sapiens
  CDR3 for beta chain variable domain of TCR clone 69311 (TRBV20-1, TRBJ1-5)
CSARGSVDSNQPQHF

SEQ ID NO: 138623 - protein, 15 aa, Homo sapiens
  CDR3 for alpha chain variable domain of TCR clone 69312 (TRAV35, TRAJ23)
CAGQRGYNQGGKLIF

SEQ ID NO: 138624 - protein, 16 aa, Homo sapiens
  CDR3 for beta chain variable domain of TCR clone 69312 (TRBV27, TRBJ2-1)
CASSSRLAGSYNEQFF

SEQ ID NO: 138625 - protein, 11 aa, Homo sapiens
  CDR3 for alpha chain variable domain of TCR clone 69313 (TRAV17, TRAJ9)
CGFTGGFKTIF

SEQ ID NO: 138626 - protein, 12 aa, Homo sapiens
  CDR3 for beta chain variable domain of TCR clone 69313 (TRBV7-8, TRBJ2-7)
CASSLGDREQYF

SEQ ID NO: 138627 - protein, 14 aa, Homo sapiens
  CDR3 for alpha chain variable domain of TCR clone 69314 (TRAV1-2, TRAJ16)
CAVNRFSDGQKLLF

SEQ ID NO: 138628 - protein, 15 aa, Homo sapiens
  CDR3 for beta chain variable domain of TCR clone 69314 (TRBV20-1, TRBJ2-3)
CSARPSGFYTDTQYF

SEQ ID NO: 138629 - protein, 13 aa, Homo sapiens
  CDR3 for alpha chain variable domain of TCR clone 69315 (TRAV2, TRAJ15)
CAVASQAGTALIF

SEQ ID NO: 138630 - protein, 14 aa, Homo sapiens
  CDR3 for beta chain variable domain of TCR clone 69315 (TRBV7-3, TRBJ1-1)
CASSLGTGYTEAFF

SEQ ID NO: 138631 - protein, 15 aa, Homo sapiens
  CDR3 for alpha chain variable domain of TCR clone 69316 (TRAV2, TRAJ15)
CAVEDRGQAGTALIF

SEQ ID NO: 138632 - protein, 13 aa, Homo sapiens
  CDR3 for beta chain variable domain of TCR clone 69316 (TRBV10-2, TRBJ2-3)
CASSESGDHTQYF

SEQ ID NO: 138633 - protein, 13 aa, Homo sapiens
  CDR3 for alpha chain variable domain of TCR clone 69317 (TRAV16, TRAJ34)
CALISYNTDKLIF

SEQ ID NO: 138634 - protein, 14 aa, Homo sapiens
  CDR3 for beta chain variable domain of TCR clone 69317 (TRBV19, TRBJ2-1)
CASPTFVLSGEQFF

SEQ ID NO: 138635 - protein, 13 aa, Homo sapiens
  CDR3 for alpha chain variable domain of TCR clone 69318 (TRAV25, TRAJ10)
CAGSTGGGNKLTF

SEQ ID NO: 138636 - protein, 15 aa, Homo sapiens
  CDR3 for beta chain variable domain of TCR clone 69318 (TRBV19, TRBJ2-1)
CASSSPGVPLDEQFF

SEQ ID NO: 138637 - protein, 13 aa, Homo sapiens
  CDR3 for alpha chain variable domain of TCR clone 69319 (TRAV12-3, TRAJ39)
CAMIDNAGNMLTF

SEQ ID NO: 138638 - protein, 12 aa, Homo sapiens
  CDR3 for beta chain variable domain of TCR clone 69319 (TRBV19, TRBJ1-5)
CASSIAQQPQHF

SEQ ID NO: 138639 - protein, 14 aa, Homo sapiens
  CDR3 for alpha chain variable domain of TCR clone 69320 (TRAV12-2, TRAJ53)
CAGKGGGSNYKLTF

SEQ ID NO: 138640 - protein, 15 aa, Homo sapiens
  CDR3 for beta chain variable domain of TCR clone 69320 (TRBV11-2, TRBJ2-2)
CASSLDTGNTGELFF

SEQ ID NO: 138641 - protein, 14 aa, Homo sapiens
  CDR3 for alpha chain variable domain of TCR clone 69321 (TRAV16, TRAJ37)
CALDISGNTGKLIF

SEQ ID NO: 138642 - protein, 14 aa, Homo sapiens
  CDR3 for beta chain variable domain of TCR clone 69321 (TRBV6-1, TRBJ1-3)
CASVQGGGGNTIYF

SEQ ID NO: 138643 - protein, 14 aa, Homo sapiens
  CDR3 for alpha chain variable domain of TCR clone 69322 (TRAV1-2, TRAJ16)
CAVNRFSDGQKLLF

SEQ ID NO: 138644 - protein, 15 aa, Homo sapiens
  CDR3 for beta chain variable domain of TCR clone 69322 (TRBV7-2, TRBJ1-1)
CASSFAGDRDTEAFF

SEQ ID NO: 138645 - protein, 14 aa, Homo sapiens
  CDR3 for alpha chain variable domain of TCR clone 69323 (TRAV2, TRAJ11)
CAVVPNSGYSTLTF

SEQ ID NO: 138646 - protein, 15 aa, Homo sapiens
  CDR3 for beta chain variable domain of TCR clone 69323 (TRBV4-1, TRBJ1-3)
CASSQDLRVGSTIYF

SEQ ID NO: 138647 - protein, 11 aa, Homo sapiens
  CDR3 for alpha chain variable domain of TCR clone 69324 (TRAV12-1, TRAJ15)
RVVNAGTALIF

SEQ ID NO: 138648 - protein, 16 aa, Homo sapiens
  CDR3 for beta chain variable domain of TCR clone 69324 (TRBV28, TRBJ2-1)
CASSSRVRDSYNEQFF

SEQ ID NO: 138649 - protein, 12 aa, Homo sapiens
  CDR3 for alpha chain variable domain of TCR clone 69325 (TRAV17, TRAJ30)
CVPERRDDKIIF

SEQ ID NO: 138650 - protein, 14 aa, Homo sapiens
  CDR3 for beta chain variable domain of TCR clone 69325 (TRBV7-7, TRBJ2-2)
CASSRDRGTGELFF

SEQ ID NO: 138651 - protein, 14 aa, Homo sapiens
  CDR3 for alpha chain variable domain of TCR clone 69326 (TRAV12-3, TRAJ10)
SHLPLTGGGNKLTF

SEQ ID NO: 138652 - protein, 19 aa, Homo sapiens
  CDR3 for beta chain variable domain of TCR clone 69326 (TRBV4-1, TRBJ1-1)
CASSRIILTPRGVSTEAFF

SEQ ID NO: 138653 - protein, 10 aa, Homo sapiens
  CDR3 for alpha chain variable domain of TCR clone 69327 (TRAV23/DV6, TRAJ57)
CAASSTLSQG

SEQ ID NO: 138654 - protein, 14 aa, Homo sapiens
  CDR3 for beta chain variable domain of TCR clone 69327 (TRBV7-9, TRBJ2-2)
CASSGLADTGELFF

SEQ ID NO: 138655 - protein, 14 aa, Homo sapiens
  CDR3 for alpha chain variable domain of TCR clone 69328 (TRAV16, TRAJ33)
CALSAMDSNYQLIW

SEQ ID NO: 138656 - protein, 16 aa, Homo sapiens
  CDR3 for beta chain variable domain of TCR clone 69328 (TRBV25-1, TRBJ2-7)
CASSELTGGGIYEQYL

SEQ ID NO: 138657 - protein, 16 aa, Homo sapiens
  CDR3 for alpha chain variable domain of TCR clone 69329 (TRAV26-1, TRAJ23)
CIVRVANSNRGGKLIF

SEQ ID NO: 138658 - protein, 16 aa, Homo sapiens
  CDR3 for beta chain variable domain of TCR clone 69329 (TRBV10-3, TRBJ2-1)
CAISGVGDGGGGEQFF

SEQ ID NO: 138659 - protein, 14 aa, Homo sapiens
  CDR3 for alpha chain variable domain of TCR clone 69330 (TRAV1-2, TRAJ16)
CAVNRFSDGQKLLF

SEQ ID NO: 138660 - protein, 13 aa, Homo sapiens
  CDR3 for beta chain variable domain of TCR clone 69330 (TRBV12-4, TRBJ2-7)
CASSLERVREQYF

SEQ ID NO: 138661 - protein, 15 aa, Homo sapiens
  CDR3 for alpha chain variable domain of TCR clone 69331 (TRAV17, TRAJ57)
CATGPSQGGSERLVF

SEQ ID NO: 138662 - protein, 17 aa, Homo sapiens
  CDR3 for beta chain variable domain of TCR clone 69331 (TRBV20-1, TRBJ2-1)
CSASSSGLAGSYNEQFF

SEQ ID NO: 138663 - protein, 11 aa, Homo sapiens
  CDR3 for alpha chain variable domain of TCR clone 69332 (TRAV2, TRAJ13)
CASGGYQKVTF

SEQ ID NO: 138664 - protein, 15 aa, Homo sapiens
  CDR3 for beta chain variable domain of TCR clone 69332 (TRBV2, TRBJ2-5)
CASTRDGGPQETQYF

SEQ ID NO: 138665 - protein, 12 aa, Homo sapiens
  CDR3 for alpha chain variable domain of TCR clone 69333 (TRAV13-1, TRAJ49)
CAASPMCNQFYF

SEQ ID NO: 138666 - protein, 13 aa, Homo sapiens
  CDR3 for beta chain variable domain of TCR clone 69333 (TRBV20-1, TRBJ2-2)
CSASAAGTGELFF

SEQ ID NO: 138667 - protein, 13 aa, Homo sapiens
  CDR3 for alpha chain variable domain of TCR clone 69334 (TRAV8-3, TRAJ21)
CAVGAYNFNKFYF

SEQ ID NO: 138668 - protein, 16 aa, Homo sapiens
  CDR3 for beta chain variable domain of TCR clone 69334 (TRBV19, TRBJ2-1)
CASSMGGGSSYNERFF

SEQ ID NO: 138669 - protein, 15 aa, Homo sapiens
  CDR3 for alpha chain variable domain of TCR clone 69335 (TRAV3, TRAJ36)
CAVRASQTGANNLFF

SEQ ID NO: 138670 - protein, 17 aa, Homo sapiens
  CDR3 for beta chain variable domain of TCR clone 69335 (TRBV7-3, TRBJ2-3)
CASSLMKRMRGADTQYF

SEQ ID NO: 138671 - protein, 15 aa, Homo sapiens
  CDR3 for alpha chain variable domain of TCR clone 69336 (TRAV3, TRAJ5)
CAVRDRKTGRRALTF

SEQ ID NO: 138672 - protein, 15 aa, Homo sapiens
  CDR3 for beta chain variable domain of TCR clone 69336 (TRBV7-8, TRBJ2-1)
CASRLADSLYNEQFF

SEQ ID NO: 138673 - protein, 13 aa, Homo sapiens
  CDR3 for alpha chain variable domain of TCR clone 69337 (TRAV12-1, TRAJ7)
CVVNMRGNNRLAF

SEQ ID NO: 138674 - protein, 15 aa, Homo sapiens
  CDR3 for beta chain variable domain of TCR clone 69337 (TRBV10-3, TRBJ2-1)
CAIRNGTSGHNEQFF

SEQ ID NO: 138675 - protein, 12 aa, Homo sapiens
  CDR3 for alpha chain variable domain of TCR clone 69338 (TRAV21, TRAJ3)
CCFYSSASKIIF

SEQ ID NO: 138676 - protein, 15 aa, Homo sapiens
  CDR3 for beta chain variable domain of TCR clone 69338 (TRBV6-3, TRBJ2-2)
CASSFLATLTGELFF

SEQ ID NO: 138677 - protein, 15 aa, Homo sapiens
  CDR3 for alpha chain variable domain of TCR clone 69339 (TRAV14/DV4, TRAJ46)
CAVREKKSSGDKLTF

SEQ ID NO: 138678 - protein, 13 aa, Homo sapiens
  CDR3 for beta chain variable domain of TCR clone 69339 (TRBV20-1, TRBJ2-5)
CSAREAFQETQYF

SEQ ID NO: 138679 - protein, 16 aa, Homo sapiens
  CDR3 for alpha chain variable domain of TCR clone 69340 (TRAV4, TRAJ22)
CLVGDLYSGSARQLTF

SEQ ID NO: 138680 - protein, 16 aa, Homo sapiens
  CDR3 for beta chain variable domain of TCR clone 69340 (TRBV7-9, TRBJ2-1)
CASSDVAGGSYNEKFF

SEQ ID NO: 138681 - protein, 12 aa, Homo sapiens
  CDR3 for alpha chain variable domain of TCR clone 69341 (TRAV1-2, TRAJ33)
CAALDSNYQLIW

SEQ ID NO: 138682 - protein, 16 aa, Homo sapiens
  CDR3 for beta chain variable domain of TCR clone 69341 (TRBV19, TRBJ2-1)
CASSKAGPSSYNEQFF

SEQ ID NO: 138683 - protein, 14 aa, Homo sapiens
  CDR3 for alpha chain variable domain of TCR clone 69342 (TRAV8-2, TRAJ4)
CVVGTSGGYNKLIF

SEQ ID NO: 138684 - protein, 15 aa, Homo sapiens
  CDR3 for beta chain variable domain of TCR clone 69342 (TRBV4-1, TRBJ1-4)
CASSDTGGTNEKLFF

SEQ ID NO: 138685 - protein, 15 aa, Homo sapiens
  CDR3 for alpha chain variable domain of TCR clone 69343 (TRAV17, TRAJ35)
CATAFVLGFGNVLHC

SEQ ID NO: 138686 - protein, 15 aa, Homo sapiens
  CDR3 for beta chain variable domain of TCR clone 69343 (TRBV7-9, TRBJ2-7)
CASSLALAEAYEQYF

SEQ ID NO: 138687 - protein, 12 aa, Homo sapiens
  CDR3 for alpha chain variable domain of TCR clone 69344 (TRAV16, TRAJ26)
CALRSYGQNFVL

SEQ ID NO: 138688 - protein, 14 aa, Homo sapiens
  CDR3 for beta chain variable domain of TCR clone 69344 (TRBV10-3, TRBJ2-1)
CAISSDLAYNEQFS

SEQ ID NO: 138689 - protein, 11 aa, Homo sapiens
  CDR3 for alpha chain variable domain of TCR clone 69345 (TRAV13-1, TRAJ6)
CATLGSYIPTF

SEQ ID NO: 138690 - protein, 12 aa, Homo sapiens
  CDR3 for beta chain variable domain of TCR clone 69345 (TRBV11-2, TRBJ2-1)
CASSPGNNEQFV

SEQ ID NO: 138691 - protein, 12 aa, Homo sapiens
  CDR3 for alpha chain variable domain of TCR clone 69346 (TRAV29/DV5, TRAJ34)
CAASGNTDKLIF

SEQ ID NO: 138692 - protein, 15 aa, Homo sapiens
  CDR3 for beta chain variable domain of TCR clone 69346 (TRBV6-1, TRBJ2-5)
CVSSEGWGIQETQYF

SEQ ID NO: 138693 - protein, 16 aa, Homo sapiens
  CDR3 for alpha chain variable domain of TCR clone 69347 (TRAV16, TRAJ57)
CAPYLITQGGSEKLVF

SEQ ID NO: 138694 - protein, 17 aa, Homo sapiens
  CDR3 for beta chain variable domain of TCR clone 69347 (TRBV24-1, TRBJ2-4)
CAASDAEARGVRNIQYF

SEQ ID NO: 138695 - protein, 17 aa, Homo sapiens
  CDR3 for alpha chain variable domain of TCR clone 69348 (TRAV38-1, TRAJ45)
CAFMKHYMGGGADGLTF

SEQ ID NO: 138696 - protein, 16 aa, Homo sapiens
  CDR3 for beta chain variable domain of TCR clone 69348 (TRBV7-9, TRBJ2-1)
CASSDVAGGSYNEQFF

SEQ ID NO: 138697 - protein, 18 aa, Homo sapiens
  CDR3 for alpha chain variable domain of TCR clone 69349 (TRAV21, TRAJ52)
CAVRPSPAGGTSYGKLTF

SEQ ID NO: 138698 - protein, 14 aa, Homo sapiens
  CDR3 for beta chain variable domain of TCR clone 69349 (TRBV7-2, TRBJ2-1)
CVSSLEGGYNEQFF

SEQ ID NO: 138699 - protein, 10 aa, Homo sapiens
  CDR3 for alpha chain variable domain of TCR clone 69350 (TRAV21, TRAJ31)
CAVDNARLMF

SEQ ID NO: 138700 - protein, 13 aa, Homo sapiens
  CDR3 for beta chain variable domain of TCR clone 69350 (TRBV12-4, TRBJ1-1)
CASSPGTGFEAFF

SEQ ID NO: 138701 - protein, 16 aa, Homo sapiens
  CDR3 for alpha chain variable domain of TCR clone 69351 (TRAV16, TRAJ42)
CARKMNYGGSQGNLIF

SEQ ID NO: 138702 - protein, 13 aa, Homo sapiens
  CDR3 for beta chain variable domain of TCR clone 69351 (TRBV20-1, TRBJ2-7)
CSASPPSAYEQYF

SEQ ID NO: 138703 - protein, 12 aa, Homo sapiens
  CDR3 for alpha chain variable domain of TCR clone 69352 (TRAV2, TRAJ33)
CAVPDSNYQLIC

SEQ ID NO: 138704 - protein, 17 aa, Homo sapiens
  CDR3 for beta chain variable domain of TCR clone 69352 (TRBV6-5, TRBJ2-3)
CASSYGTSLYKSDTQYF

SEQ ID NO: 138705 - protein, 14 aa, Homo sapiens
  CDR3 for alpha chain variable domain of TCR clone 69353 (TRAV8-3, TRAJ9)
CAVVSNTGGFKTIF

SEQ ID NO: 138706 - protein, 14 aa, Homo sapiens
  CDR3 for beta chain variable domain of TCR clone 69353 (TRBV7-3, TRBJ2-2)
CASSSGGYTGELFF

SEQ ID NO: 138707 - protein, 16 aa, Homo sapiens
  CDR3 for alpha chain variable domain of TCR clone 69354 (TRAV3, TRAJ10)
CAVRDMRAGGGNKHTF

SEQ ID NO: 138708 - protein, 13 aa, Homo sapiens
  CDR3 for beta chain variable domain of TCR clone 69354 (TRBV6-1, TRBJ1-1)
CASSRQGNTEAFF

SEQ ID NO: 138709 - protein, 12 aa, Homo sapiens
  CDR3 for alpha chain variable domain of TCR clone 69355 (TRAV2, TRAJ33)
CAVPDSNCQLIW

SEQ ID NO: 138710 - protein, 18 aa, Homo sapiens
  CDR3 for beta chain variable domain of TCR clone 69355 (TRBV7-3, TRBJ2-3)
CASSSTGTYPGSTDTQYF

SEQ ID NO: 138711 - protein, 15 aa, Homo sapiens
  CDR3 for alpha chain variable domain of TCR clone 69356 (TRAV2, TRAJ22)
CAVPSRGGSARQLTF

SEQ ID NO: 138712 - protein, 13 aa, Homo sapiens
  CDR3 for beta chain variable domain of TCR clone 69356 (TRBV10-3, TRBJ1-2)
CAISERDSYGYTF

SEQ ID NO: 138713 - protein, 12 aa, Homo sapiens
  CDR3 for alpha chain variable domain of TCR clone 69357 (TRAV16, TRAJ9)
CALRAGGFKTIF

SEQ ID NO: 138714 - protein, 13 aa, Homo sapiens
  CDR3 for beta chain variable domain of TCR clone 69357 (TRBV4-3, TRBJ1-1)
CASSQVEGLMAFF

SEQ ID NO: 138715 - protein, 18 aa, Homo sapiens
  CDR3 for alpha chain variable domain of TCR clone 69358 (TRAV21, TRAJ52)
CAVRPSPAGGTSDGKLTF

SEQ ID NO: 138716 - protein, 16 aa, Homo sapiens
  CDR3 for beta chain variable domain of TCR clone 69358 (TRBV7-3, TRBJ2-1)
CASSLEGYRSYNEQFF

SEQ ID NO: 138717 - protein, 13 aa, Homo sapiens
  CDR3 for alpha chain variable domain of TCR clone 69359 (TRAV1-1, TRAJ31)
CASYLNNNARLMF

SEQ ID NO: 138718 - protein, 13 aa, Homo sapiens
  CDR3 for beta chain variable domain of TCR clone 69359 (TRBV15, TRBJ1-6)
CATSGGLNSTLHF

SEQ ID NO: 138719 - protein, 13 aa, Homo sapiens
  CDR3 for alpha chain variable domain of TCR clone 69360 (TRAV2, TRAJ40)
CAVVTSGTYKYIF

SEQ ID NO: 138720 - protein, 14 aa, Homo sapiens
  CDR3 for beta chain variable domain of TCR clone 69360 (TRBV19, TRBJ2-1)
CASPTFVLSGEPFF

SEQ ID NO: 138721 - protein, 14 aa, Homo sapiens
  CDR3 for alpha chain variable domain of TCR clone 69361 (TRAV3, TRAJ37)
CAVKEPGNTGKLIF

SEQ ID NO: 138722 - protein, 13 aa, Homo sapiens
  CDR3 for beta chain variable domain of TCR clone 69361 (TRBV20-1, TRBJ1-1)
CSARGGGNTEAFF

SEQ ID NO: 138723 - protein, 11 aa, Homo sapiens
  CDR3 for alpha chain variable domain of TCR clone 69362 (TRAV21, TRAJ48)
CAVDGNEKLTF

SEQ ID NO: 138724 - protein, 20 aa, Homo sapiens
  CDR3 for beta chain variable domain of TCR clone 69362 (TRBV6-6, TRBJ2-5)
CASSPGGGLRGDPVLRARHA

SEQ ID NO: 138725 - protein, 13 aa, Homo sapiens
  CDR3 for alpha chain variable domain of TCR clone 69363 (TRAV22, TRAJ26)
CAVESNYGQNFVF

SEQ ID NO: 138726 - protein, 16 aa, Homo sapiens
  CDR3 for beta chain variable domain of TCR clone 69363 (TRBV7-2, TRBJ2-6)
CASSERRDSGANVLTF

SEQ ID NO: 138727 - protein, 14 aa, Homo sapiens
  CDR3 for alpha chain variable domain of TCR clone 69364 (TRAV12-2, TRAJ40)
CAVKIPSGTYKYIF

SEQ ID NO: 138728 - protein, 13 aa, Homo sapiens
  CDR3 for beta chain variable domain of TCR clone 69364 (TRBV4-1, TRBJ2-1)
CASSQAGGDEQFF

SEQ ID NO: 138729 - protein, 12 aa, Homo sapiens
  CDR3 for alpha chain variable domain of TCR clone 69365 (TRAV12-1, TRAJ32)
CVVKGATNKLIF

SEQ ID NO: 138730 - protein, 15 aa, Homo sapiens
  CDR3 for beta chain variable domain of TCR clone 69365 (TRBV20-1, TRBJ2-3)
CIASGTSGYTDTQYF

SEQ ID NO: 138731 - protein, 15 aa, Homo sapiens
  CDR3 for alpha chain variable domain of TCR clone 69366 (TRAV13-1, TRAJ5)
CAASPRGHGQESTYS

SEQ ID NO: 138732 - protein, 17 aa, Homo sapiens
  CDR3 for beta chain variable domain of TCR clone 69366 (TRBV3-1, TRBJ2-2)
CASSQFRDKVDTGELFF

SEQ ID NO: 138733 - protein, 15 aa, Homo sapiens
  CDR3 for alpha chain variable domain of TCR clone 69367 (TRAV16, TRAJ48)
CALLVSNFGNEKLTF

SEQ ID NO: 138734 - protein, 15 aa, Homo sapiens
  CDR3 for beta chain variable domain of TCR clone 69367 (TRBV5-4, TRBJ2-7)
CASSRFGTGSYEQYF

SEQ ID NO: 138735 - protein, 13 aa, Homo sapiens
  CDR3 for alpha chain variable domain of TCR clone 69368 (TRAV20, TRAJ45)
CAVKKRRCRRTHL

SEQ ID NO: 138736 - protein, 13 aa, Homo sapiens
  CDR3 for beta chain variable domain of TCR clone 69368 (TRBV12-4, TRBJ1-1)
CASSPGTGFEAFF

SEQ ID NO: 138737 - protein, 14 aa, Homo sapiens
  CDR3 for alpha chain variable domain of TCR clone 69369 (TRAV35, TRAJ33)
CAGSPQDSNYQLIW

SEQ ID NO: 138738 - protein, 15 aa, Homo sapiens
  CDR3 for beta chain variable domain of TCR clone 69369 (TRBV5-1, TRBJ1-4)
FAPAAWKDGNEKLFF

SEQ ID NO: 138739 - protein, 14 aa, Homo sapiens
  CDR3 for alpha chain variable domain of TCR clone 69370 (TRAV12-2, TRAJ53)
CRERGGGSNYKLTF

SEQ ID NO: 138740 - protein, 13 aa, Homo sapiens
  CDR3 for beta chain variable domain of TCR clone 69370 (TRBV3-1, TRBJ1-1)
CASSLGVITEAFF

SEQ ID NO: 138741 - protein, 13 aa, Homo sapiens
  CDR3 for alpha chain variable domain of TCR clone 69371 (TRAV12-2, TRAJ42)
CAVKRGSQGNLIF

SEQ ID NO: 138742 - protein, 16 aa, Homo sapiens
  CDR3 for beta chain variable domain of TCR clone 69371 (TRBV7-9, TRBJ1-2)
CASSLGFSSGEDGYTF

SEQ ID NO: 138743 - protein, 14 aa, Homo sapiens
  CDR3 for alpha chain variable domain of TCR clone 69372 (TRAV8-3, TRAJ4)
CAVGAAGGYNKLIF

SEQ ID NO: 138744 - protein, 15 aa, Homo sapiens
  CDR3 for beta chain variable domain of TCR clone 69372 (TRBV6-5, TRBJ2-1)
CASGYDAGAGNEQFF

SEQ ID NO: 138745 - protein, 14 aa, Homo sapiens
  CDR3 for alpha chain variable domain of TCR clone 69373 (TRAV8-1, TRAJ9)
CAVNAWTGGFKTIF

SEQ ID NO: 138746 - protein, 15 aa, Homo sapiens
  CDR3 for beta chain variable domain of TCR clone 69373 (TRBV19, TRBJ2-1)
CASSSPGVPLDEQFF

SEQ ID NO: 138747 - protein, 11 aa, Homo sapiens
  CDR3 for alpha chain variable domain of TCR clone 69374 (TRAV13-2, TRAJ20)
CADSNDYKLSF

SEQ ID NO: 138748 - protein, 14 aa, Homo sapiens
  CDR3 for beta chain variable domain of TCR clone 69374 (TRBV7-2, TRBJ2-7)
CASRSQGAAYEQYF

SEQ ID NO: 138749 - protein, 14 aa, Homo sapiens
  CDR3 for alpha chain variable domain of TCR clone 69375 (TRAV27, TRAJ45)
CAGAQEEVRTDSPL

SEQ ID NO: 138750 - protein, 17 aa, Homo sapiens
  CDR3 for beta chain variable domain of TCR clone 69375 (TRBV11-2, TRBJ2-1)
CASSLYPPGVEYNEQFF

SEQ ID NO: 138751 - protein, 13 aa, Homo sapiens
  CDR3 for alpha chain variable domain of TCR clone 69376 (TRAV19, TRAJ31)
CALKSGNNARLMF

SEQ ID NO: 138752 - protein, 15 aa, Homo sapiens
  CDR3 for beta chain variable domain of TCR clone 69376 (TRBV7-8, TRBJ2-7)
CASSLRHFEAYEQYF

SEQ ID NO: 138753 - protein, 13 aa, Homo sapiens
  CDR3 for alpha chain variable domain of TCR clone 69377 (TRAV35, TRAJ42)
CAGFPVSQGNLIF

SEQ ID NO: 138754 - protein, 13 aa, Homo sapiens
  CDR3 for beta chain variable domain of TCR clone 69377 (TRBV29-1, TRBJ2-1)
CSVEGGRVNEQFF

SEQ ID NO: 138755 - protein, 14 aa, Homo sapiens
  CDR3 for alpha chain variable domain of TCR clone 69378 (TRAV13-1, TRAJ44)
CAAKATSTASKLTF

SEQ ID NO: 138756 - protein, 16 aa, Homo sapiens
  CDR3 for beta chain variable domain of TCR clone 69378 (TRBV7-9, TRBJ2-6)
CASSLKGPLRANVLTF

SEQ ID NO: 138757 - protein, 10 aa, Homo sapiens
  CDR3 for alpha chain variable domain of TCR clone 69379 (TRAV8-4, TRAJ43)
CAVSADDMRF

SEQ ID NO: 138758 - protein, 15 aa, Homo sapiens
  CDR3 for beta chain variable domain of TCR clone 69379 (TRBV11-3, TRBJ2-3)
CASLKDGREGDTQYF

SEQ ID NO: 138759 - protein, 18 aa, Homo sapiens
  CDR3 for alpha chain variable domain of TCR clone 69380 (TRAV17, TRAJ45)
CATSLDLYSGGGADGITF

SEQ ID NO: 138760 - protein, 15 aa, Homo sapiens
  CDR3 for beta chain variable domain of TCR clone 69380 (TRBV11-2, TRBJ2-1)
CASSKNRGLIYEQFF

SEQ ID NO: 138761 - protein, 11 aa, Homo sapiens
  CDR3 for alpha chain variable domain of TCR clone 69381 (TRAV2, TRAJ13)
CASGGYQKVTF

SEQ ID NO: 138762 - protein, 15 aa, Homo sapiens
  CDR3 for beta chain variable domain of TCR clone 69381 (TRBV28, TRBJ2-5)
CASSSGRTIQETQYF

SEQ ID NO: 138763 - protein, 15 aa, Homo sapiens
  CDR3 for alpha chain variable domain of TCR clone 69382 (TRAV21, TRAJ38)
CAVRQDAGNNRKLIW

SEQ ID NO: 138764 - protein, 13 aa, Homo sapiens
  CDR3 for beta chain variable domain of TCR clone 69382 (TRBV12-4, TRBJ1-1)
CASITGLNTEAFF

SEQ ID NO: 138765 - protein, 17 aa, Homo sapiens
  CDR3 for alpha chain variable domain of TCR clone 69383 (TRAV20, TRAJ45)
CAVQAPDSGGGADGLTF

SEQ ID NO: 138766 - protein, 12 aa, Homo sapiens
  CDR3 for beta chain variable domain of TCR clone 69383 (TRBV19, TRBJ1-2)
CASTRAEYGYTF

SEQ ID NO: 138767 - protein, 13 aa, Homo sapiens
  CDR3 for alpha chain variable domain of TCR clone 69384 (TRAV30, TRAJ24)
CCTVTDSWGKLQF

SEQ ID NO: 138768 - protein, 14 aa, Homo sapiens
  CDR3 for beta chain variable domain of TCR clone 69384 (TRBV6-3, TRBJ2-2)
CASTYTPDTGELFF

SEQ ID NO: 138769 - protein, 15 aa, Homo sapiens
  CDR3 for alpha chain variable domain of TCR clone 69385 (TRAV20, TRAJ53)
CAVQASGGSNYKLTF

SEQ ID NO: 138770 - protein, 12 aa, Homo sapiens
  CDR3 for beta chain variable domain of TCR clone 69385 (TRBV7-6, TRBJ2-5)
CASSLGQETQYF

SEQ ID NO: 138771 - protein, 19 aa, Homo sapiens
  CDR3 for alpha chain variable domain of TCR clone 69386 (TRAV13-1, TRAJ52)
CAASPYQNAGGTSYGKLTF

SEQ ID NO: 138772 - protein, 14 aa, Homo sapiens
  CDR3 for beta chain variable domain of TCR clone 69386 (TRBV11-2, TRBJ2-5)
CASSRTGGIETQYF

SEQ ID NO: 138773 - protein, 15 aa, Homo sapiens
  CDR3 for alpha chain variable domain of TCR clone 69387 (TRAV21, TRAJ53)
CATLNSGGSNYKLTF

SEQ ID NO: 138774 - protein, 14 aa, Homo sapiens
  CDR3 for beta chain variable domain of TCR clone 69387 (TRBV2, TRBJ2-7)
CASSLTSGGYEQYF

SEQ ID NO: 138775 - protein, 10 aa, Homo sapiens
  CDR3 for alpha chain variable domain of TCR clone 69388 (TRAV12-1, TRAJ37)
GSSNTGKLIF

SEQ ID NO: 138776 - protein, 15 aa, Homo sapiens
  CDR3 for beta chain variable domain of TCR clone 69388 (TRBV19, TRBJ1-6)
CVSSTQGAVGSPLHF

SEQ ID NO: 138777 - protein, 14 aa, Homo sapiens
  CDR3 for alpha chain variable domain of TCR clone 69389 (TRAV12-1, TRAJ22)
CVVTTSGSARQLTF

SEQ ID NO: 138778 - protein, 14 aa, Homo sapiens
  CDR3 for beta chain variable domain of TCR clone 69389 (TRBV11-3, TRBJ1-6)
CASSFSGGDSPLHF

SEQ ID NO: 138779 - protein, 13 aa, Homo sapiens
  CDR3 for alpha chain variable domain of TCR clone 69390 (TRAV1-2, TRAJ36)
GAVDQTGANNLFF

SEQ ID NO: 138780 - protein, 14 aa, Homo sapiens
  CDR3 for beta chain variable domain of TCR clone 69390 (TRBV20-1, TRBJ2-5)
CSAREMTKQETQYF

SEQ ID NO: 138781 - protein, 13 aa, Homo sapiens
  CDR3 for alpha chain variable domain of TCR clone 69391 (TRAV2, TRAJ40)
CAVVTSGTYKYIF

SEQ ID NO: 138782 - protein, 15 aa, Homo sapiens
  CDR3 for beta chain variable domain of TCR clone 69391 (TRBV11-3, TRBJ2-3)
CVSLKDGREGDTQYF

SEQ ID NO: 138783 - protein, 12 aa, Homo sapiens
  CDR3 for alpha chain variable domain of TCR clone 69392 (TRAV3, TRAJ20)
CAVRDPDYKLSF

SEQ ID NO: 138784 - protein, 18 aa, Homo sapiens
  CDR3 for beta chain variable domain of TCR clone 69392 (TRBV12-4, TRBJ1-5)
CASSLFLVGVGAYQPQHF

SEQ ID NO: 138785 - protein, 13 aa, Homo sapiens
  CDR3 for alpha chain variable domain of TCR clone 69393 (TRAV17, TRAJ4)
CATKSGGYNELIF

SEQ ID NO: 138786 - protein, 14 aa, Homo sapiens
  CDR3 for beta chain variable domain of TCR clone 69393 (TRBV20-1, TRBJ1-5)
CSARDDRGNQPQHF

SEQ ID NO: 138787 - protein, 16 aa, Homo sapiens
  CDR3 for alpha chain variable domain of TCR clone 69394 (TRAV16, TRAJ4)
CALSRMFSGGYNKLIF

SEQ ID NO: 138788 - protein, 17 aa, Homo sapiens
  CDR3 for beta chain variable domain of TCR clone 69394 (TRBV7-3, TRBJ2-5)
CASSLGSGRSGSEAQYF

SEQ ID NO: 138789 - protein, 14 aa, Homo sapiens
  CDR3 for alpha chain variable domain of TCR clone 69395 (TRAV8-3, TRAJ4)
CAVGASGGYNKLIF

SEQ ID NO: 138790 - protein, 15 aa, Homo sapiens
  CDR3 for beta chain variable domain of TCR clone 69395 (TRBV10-2, TRBJ2-5)
CASRGSGGPQETQYL

SEQ ID NO: 138791 - protein, 11 aa, Homo sapiens
  CDR3 for alpha chain variable domain of TCR clone 69396 (TRAV26-2, TRAJ45)
PIGGGADGLTF

SEQ ID NO: 138792 - protein, 20 aa, Homo sapiens
  CDR3 for beta chain variable domain of TCR clone 69396 (TRBV28, TRBJ2-1)
CASTPIGRSPGLAGGNEQFF

SEQ ID NO: 138793 - protein, 19 aa, Homo sapiens
  CDR3 for alpha chain variable domain of TCR clone 69397 (TRAV29/DV5, TRAJ49)
CSVLLCSKVTVDTGNQFYF

SEQ ID NO: 138794 - protein, 17 aa, Homo sapiens
  CDR3 for beta chain variable domain of TCR clone 69397 (TRBV13, TRBJ2-3)
CASSLSRVAGGRNTQYF

SEQ ID NO: 138795 - protein, 13 aa, Homo sapiens
  CDR3 for alpha chain variable domain of TCR clone 69398 (TRAV13-2, TRAJ13)
CAERPGGYQKVTF

SEQ ID NO: 138796 - protein, 12 aa, Homo sapiens
  CDR3 for beta chain variable domain of TCR clone 69398 (TRBV12-4, TRBJ1-2)
CASSFIWLHLRF

SEQ ID NO: 138797 - protein, 16 aa, Homo sapiens
  CDR3 for alpha chain variable domain of TCR clone 69399 (TRAV12-3, TRAJ53)
CAMSPGSGGSNYKLTF

SEQ ID NO: 138798 - protein, 16 aa, Homo sapiens
  CDR3 for beta chain variable domain of TCR clone 69399 (TRBV12-4, TRBJ2-5)
CASSFFVRGRQETQYF

SEQ ID NO: 138799 - protein, 12 aa, Homo sapiens
  CDR3 for alpha chain variable domain of TCR clone 69400 (TRAV17, TRAJ57)
CATDGGSEKLVF

SEQ ID NO: 138800 - protein, 18 aa, Homo sapiens
  CDR3 for beta chain variable domain of TCR clone 69400 (TRBV19, TRBJ2-6)
CASIGPTSGGSGANVLTL

SEQ ID NO: 138801 - protein, 16 aa, Homo sapiens
  CDR3 for alpha chain variable domain of TCR clone 69401 (TRAV30, TRAJ24)
YGTEIVDADSWGKFQF

SEQ ID NO: 138802 - protein, 13 aa, Homo sapiens
  CDR3 for beta chain variable domain of TCR clone 69401 (TRBV11-2, TRBJ2-5)
CASSSTGEETQYF

SEQ ID NO: 138803 - protein, 13 aa, Homo sapiens
  CDR3 for alpha chain variable domain of TCR clone 69402 (TRAV20, TRAJ37)
CAGCSSNTGKLIF

SEQ ID NO: 138804 - protein, 14 aa, Homo sapiens
  CDR3 for beta chain variable domain of TCR clone 69402 (TRBV7-3, TRBJ2-1)
CASSLAGGTNEQFF

SEQ ID NO: 138805 - protein, 12 aa, Homo sapiens
  CDR3 for alpha chain variable domain of TCR clone 69403 (TRAV8-3, TRAJ20)
CAEGANDYKLSF

SEQ ID NO: 138806 - protein, 16 aa, Homo sapiens
  CDR3 for beta chain variable domain of TCR clone 69403 (TRBV19, TRBJ2-2)
CASRSPGTGATGELFF

SEQ ID NO: 138807 - protein, 13 aa, Homo sapiens
  CDR3 for alpha chain variable domain of TCR clone 69404 (TRAV13-1, TRAJ33)
CAASRAGNYQLIW

SEQ ID NO: 138808 - protein, 22 aa, Homo sapiens
  CDR3 for beta chain variable domain of TCR clone 69404 (TRBV2, TRBJ2-7)
KSRSTKLEDSAMYFCASSEQYF

SEQ ID NO: 138809 - protein, 15 aa, Homo sapiens
  CDR3 for alpha chain variable domain of TCR clone 69405 (TRAV21, TRAJ53)
CATLNSGGSNYKLTF

SEQ ID NO: 138810 - protein, 15 aa, Homo sapiens
  CDR3 for beta chain variable domain of TCR clone 69405 (TRBV5-1, TRBJ2-1)
CASSPPRAPCNEQFF

SEQ ID NO: 138811 - protein, 11 aa, Homo sapiens
  CDR3 for alpha chain variable domain of TCR clone 69406 (TRAV2, TRAJ33)
CAVDGNYQLIW

SEQ ID NO: 138812 - protein, 15 aa, Homo sapiens
  CDR3 for beta chain variable domain of TCR clone 69406 (TRBV19, TRBJ1-2)
CASSVGQVLNYGFTF

SEQ ID NO: 138813 - protein, 16 aa, Homo sapiens
  CDR3 for alpha chain variable domain of TCR clone 69407 (TRAV1-2, TRAJ33)
CAVRAISMDSNYQLIW

SEQ ID NO: 138814 - protein, 15 aa, Homo sapiens
  CDR3 for beta chain variable domain of TCR clone 69407 (TRBV2, TRBJ1-2)
CASSEIGGANYGYTF

SEQ ID NO: 138815 - protein, 14 aa, Homo sapiens
  CDR3 for alpha chain variable domain of TCR clone 69408 (TRAV20, TRAJ42)
CAVQAGGSQGNLIF

SEQ ID NO: 138816 - protein, 12 aa, Homo sapiens
  CDR3 for beta chain variable domain of TCR clone 69408 (TRBV12-5, TRBJ2-5)
CASGQGVETQYF

SEQ ID NO: 138817 - protein, 15 aa, Homo sapiens
  CDR3 for alpha chain variable domain of TCR clone 69409 (TRAV16, TRAJ4)
CALPSLSGGYNKLIF

SEQ ID NO: 138818 - protein, 14 aa, Homo sapiens
  CDR3 for beta chain variable domain of TCR clone 69409 (TRBV18, TRBJ2-5)
CASSPPGHQETQYF

SEQ ID NO: 138819 - protein, 12 aa, Homo sapiens
  CDR3 for alpha chain variable domain of TCR clone 69410 (TRAV12-3, TRAJ17)
CAMTLTGNKLTF

SEQ ID NO: 138820 - protein, 13 aa, Homo sapiens
  CDR3 for beta chain variable domain of TCR clone 69410 (TRBV7-9, TRBJ1-2)
CASRLKQNYGYTF

SEQ ID NO: 138821 - protein, 13 aa, Homo sapiens
  CDR3 for alpha chain variable domain of TCR clone 69411 (TRAV1-2, TRAJ9)
CAALNTGGFKTIF

SEQ ID NO: 138822 - protein, 16 aa, Homo sapiens
  CDR3 for beta chain variable domain of TCR clone 69411 (TRBV28, TRBJ1-4)
CASSSRTGAANDKLFF

SEQ ID NO: 138823 - protein, 12 aa, Homo sapiens
  CDR3 for alpha chain variable domain of TCR clone 69412 (TRAV1-1, TRAJ8)
CAGGTGFQKLVC

SEQ ID NO: 138824 - protein, 15 aa, Homo sapiens
  CDR3 for beta chain variable domain of TCR clone 69412 (TRBV7-9, TRBJ1-4)
CASSRTGGFNEKLFF

SEQ ID NO: 138825 - protein, 18 aa, Homo sapiens
  CDR3 for alpha chain variable domain of TCR clone 69413 (TRAV21, TRAJ52)
CAVRPSPAGGTSYGKLTF

SEQ ID NO: 138826 - protein, 17 aa, Homo sapiens
  CDR3 for beta chain variable domain of TCR clone 69413 (TRBV3-1, TRBJ2-2)
CASSQFRDKVDTGELFF

SEQ ID NO: 138827 - protein, 12 aa, Homo sapiens
  CDR3 for alpha chain variable domain of TCR clone 69414 (TRAV23/DV6, TRAJ30)
CAASKGADKIIF

SEQ ID NO: 138828 - protein, 18 aa, Homo sapiens
  CDR3 for beta chain variable domain of TCR clone 69414 (TRBV10-3, TRBJ2-3)
CAISESRVGPMRGDTQYF

SEQ ID NO: 138829 - protein, 12 aa, Homo sapiens
  CDR3 for alpha chain variable domain of TCR clone 69415 (TRAV12-1, TRAJ40)
CVVYSGTYKYIF

SEQ ID NO: 138830 - protein, 13 aa, Homo sapiens
  CDR3 for beta chain variable domain of TCR clone 69415 (TRBV14, TRBJ1-1)
CASSQEAGTEAFF

SEQ ID NO: 138831 - protein, 14 aa, Homo sapiens
  CDR3 for alpha chain variable domain of TCR clone 69416 (TRAV12-2, TRAJ53)
CRERGGGSNYKLTF

SEQ ID NO: 138832 - protein, 14 aa, Homo sapiens
  CDR3 for beta chain variable domain of TCR clone 69416 (TRBV18, TRBJ2-7)
CASSPRGGAYEQYF

SEQ ID NO: 138833 - protein, 12 aa, Homo sapiens
  CDR3 for alpha chain variable domain of TCR clone 69417 (TRAV13-1, TRAJ48)
CAANFGNEKLTF

SEQ ID NO: 138834 - protein, 14 aa, Homo sapiens
  CDR3 for beta chain variable domain of TCR clone 69417 (TRBV12-5, TRBJ2-5)
CASGSRTHQETQYF

SEQ ID NO: 138835 - protein, 12 aa, Homo sapiens
  CDR3 for alpha chain variable domain of TCR clone 69418 (TRAV23/DV6, TRAJ30)
CAASKGDDKIIF

SEQ ID NO: 138836 - protein, 18 aa, Homo sapiens
  CDR3 for beta chain variable domain of TCR clone 69418 (TRBV10-3, TRBJ2-3)
CAISESGVGPMRGDTQYF

SEQ ID NO: 138837 - protein, 14 aa, Homo sapiens
  CDR3 for alpha chain variable domain of TCR clone 69419 (TRAV1-2, TRAJ8)
CAVREDTGFQKLVF

SEQ ID NO: 138838 - protein, 14 aa, Homo sapiens
  CDR3 for beta chain variable domain of TCR clone 69419 (TRBV5-1, TRBJ2-7)
CASSFASGVNEQYF

SEQ ID NO: 138839 - protein, 12 aa, Homo sapiens
  CDR3 for alpha chain variable domain of TCR clone 69420 (TRAV20, TRAJ39)
CAAGNAGNMLTF

SEQ ID NO: 138840 - protein, 16 aa, Homo sapiens
  CDR3 for beta chain variable domain of TCR clone 69420 (TRBV15, TRBJ1-2)
CATSRGPRTGGGGYTF

SEQ ID NO: 138841 - protein, 18 aa, Homo sapiens
  CDR3 for alpha chain variable domain of TCR clone 69421 (TRAV21, TRAJ52)
CAVRPSPAGGTSYGKLTF

SEQ ID NO: 138842 - protein, 10 aa, Homo sapiens
  CDR3 for beta chain variable domain of TCR clone 69421 (TRBV13, TRBJ2-3)
VAGGRNTQYF

SEQ ID NO: 138843 - protein, 15 aa, Homo sapiens
  CDR3 for alpha chain variable domain of TCR clone 69422 (TRAV13-1, TRAJ52)
CAATSPRTSYGKLTF

SEQ ID NO: 138844 - protein, 16 aa, Homo sapiens
  CDR3 for beta chain variable domain of TCR clone 69422 (TRBV11-1, TRBJ2-2)
CASSAEGLKNTGELFF

SEQ ID NO: 138845 - protein, 13 aa, Homo sapiens
  CDR3 for alpha chain variable domain of TCR clone 69423 (TRAV12-3, TRAJ40)
CAMSDSGTYKYLF

SEQ ID NO: 138846 - protein, 14 aa, Homo sapiens
  CDR3 for beta chain variable domain of TCR clone 69423 (TRBV7-2, TRBJ1-5)
CASSTQGAGQPQHF

SEQ ID NO: 138847 - protein, 14 aa, Homo sapiens
  CDR3 for alpha chain variable domain of TCR clone 69424 (TRAV13-1, TRAJ44)
CAAKATGTASKLTF

SEQ ID NO: 138848 - protein, 17 aa, Homo sapiens
  CDR3 for beta chain variable domain of TCR clone 69424 (TRBV7-3, TRBJ2-3)
CASSLMKRLRGADTQYF

SEQ ID NO: 138849 - protein, 16 aa, Homo sapiens
  CDR3 for alpha chain variable domain of TCR clone 69425 (TRAV20, TRAJ22)
CAVQASSSGSARQLTL

SEQ ID NO: 138850 - protein, 13 aa, Homo sapiens
  CDR3 for beta chain variable domain of TCR clone 69425 (TRBV7-2, TRBJ2-5)
CASSQTSVETQYF

SEQ ID NO: 138851 - protein, 14 aa, Homo sapiens
  CDR3 for alpha chain variable domain of TCR clone 69426 (TRAV3, TRAJ9)
CSVRGNTGGFKTIF

SEQ ID NO: 138852 - protein, 14 aa, Homo sapiens
  CDR3 for beta chain variable domain of TCR clone 69426 (TRBV15, TRBJ2-1)
CATSGVEDYNEQFF

SEQ ID NO: 138853 - protein, 13 aa, Homo sapiens
  CDR3 for alpha chain variable domain of TCR clone 69427 (TRAV17, TRAJ26)
CATVDNYCQNFVF

SEQ ID NO: 138854 - protein, 16 aa, Homo sapiens
  CDR3 for beta chain variable domain of TCR clone 69427 (TRBV2, TRBJ2-1)
CASSVGGSLSYNEQFF

SEQ ID NO: 138855 - protein, 14 aa, Homo sapiens
  CDR3 for alpha chain variable domain of TCR clone 69428 (TRAV26-1, TRAJ48)
CIVRVGFGNEKLNF

SEQ ID NO: 138856 - protein, 13 aa, Homo sapiens
  CDR3 for beta chain variable domain of TCR clone 69428 (TRBV11-3, TRBJ2-3)
CASSHDTKDTQYF

SEQ ID NO: 138857 - protein, 12 aa, Homo sapiens
  CDR3 for alpha chain variable domain of TCR clone 69429 (TRAV27, TRAJ41)
CAGRNSGYALNF

SEQ ID NO: 138858 - protein, 15 aa, Homo sapiens
  CDR3 for beta chain variable domain of TCR clone 69429 (TRBV6-3, TRBJ2-7)
CASSPPGTVFYEQYF

SEQ ID NO: 138859 - protein, 12 aa, Homo sapiens
  CDR3 for alpha chain variable domain of TCR clone 69430 (TRAV1-1, TRAJ8)
CAGGTGFQKLVF

SEQ ID NO: 138860 - protein, 19 aa, Homo sapiens
  CDR3 for beta chain variable domain of TCR clone 69430 (TRBV19, TRBJ2-5)
CASSIGQVTDFFLGETQYF

SEQ ID NO: 138861 - protein, 12 aa, Homo sapiens
  CDR3 for alpha chain variable domain of TCR clone 69431 (TRAV13-1, TRAJ27)
CAAHTNAGKSTF

SEQ ID NO: 138862 - protein, 14 aa, Homo sapiens
  CDR3 for beta chain variable domain of TCR clone 69431 (TRBV12-4, TRBJ2-5)
CASSLWQKQETQYF

SEQ ID NO: 138863 - protein, 14 aa, Homo sapiens
  CDR3 for alpha chain variable domain of TCR clone 69432 (TRAV17, TRAJ57)
CATDPQGGSEKLVF

SEQ ID NO: 138864 - protein, 18 aa, Homo sapiens
  CDR3 for beta chain variable domain of TCR clone 69432 (TRBV6-6, TRBJ1-3)
CASSYSKWDSIAGNTIYF

SEQ ID NO: 138865 - protein, 13 aa, Homo sapiens
  CDR3 for alpha chain variable domain of TCR clone 69433 (TRAV8-3, TRAJ43)
CAVVPYNNNDMRF

SEQ ID NO: 138866 - protein, 13 aa, Homo sapiens
  CDR3 for beta chain variable domain of TCR clone 69433 (TRBV19, TRBJ1-2)
CASSVPGQDGYTF

SEQ ID NO: 138867 - protein, 13 aa, Homo sapiens
  CDR3 for alpha chain variable domain of TCR clone 69434 (TRAV13-2, TRAJ48)
CAEMDFGNEKFTF

SEQ ID NO: 138868 - protein, 15 aa, Homo sapiens
  CDR3 for beta chain variable domain of TCR clone 69434 (TRBV7-9, TRBJ1-6)
CASSSPGRGNSPLHF

SEQ ID NO: 138869 - protein, 15 aa, Homo sapiens
  CDR3 for alpha chain variable domain of TCR clone 69435 (TRAV8-3, TRAJ11)
CAVGLLNSGYSTLTF

SEQ ID NO: 138870 - protein, 15 aa, Homo sapiens
  CDR3 for beta chain variable domain of TCR clone 69435 (TRBV3-1, TRBJ2-7)
CASSQEWTGSYEQYF

SEQ ID NO: 138871 - protein, 17 aa, Homo sapiens
  CDR3 for alpha chain variable domain of TCR clone 69436 (TRAV3, TRAJ42)
CAVRDRDYGGSQGNLIF

SEQ ID NO: 138872 - protein, 13 aa, Homo sapiens
  CDR3 for beta chain variable domain of TCR clone 69436 (TRBV19, TRBJ2-7)
CASRKAGGSEQYF

SEQ ID NO: 138873 - protein, 13 aa, Homo sapiens
  CDR3 for alpha chain variable domain of TCR clone 69437 (TRAV13-1, TRAJ39)
CAASILAGNMLTF

SEQ ID NO: 138874 - protein, 15 aa, Homo sapiens
  CDR3 for beta chain variable domain of TCR clone 69437 (TRBV7-9, TRBJ1-1)
CASSLLEQGGTEAFF

SEQ ID NO: 138875 - protein, 11 aa, Homo sapiens
  CDR3 for alpha chain variable domain of TCR clone 69438 (TRAV12-2, TRAJ31)
CAILNNASLMF

SEQ ID NO: 138876 - protein, 13 aa, Homo sapiens
  CDR3 for beta chain variable domain of TCR clone 69438 (TRBV20-1, TRBJ1-1)
CSARLGQGTEAFF

SEQ ID NO: 138877 - protein, 15 aa, Homo sapiens
  CDR3 for alpha chain variable domain of TCR clone 69439 (TRAV12-2, TRAJ43)
CAFDMRFGAGTRLTV

SEQ ID NO: 138878 - protein, 18 aa, Homo sapiens
  CDR3 for beta chain variable domain of TCR clone 69439 (TRBV20-1, TRBJ2-3)
CSASGLAGGPGTTDTRYF

SEQ ID NO: 138879 - protein, 18 aa, Homo sapiens
  CDR3 for alpha chain variable domain of TCR clone 69440 (TRAV12-2, )
CAVEDIQNPDPAVYQLRD

SEQ ID NO: 138880 - protein, 16 aa, Homo sapiens
  CDR3 for beta chain variable domain of TCR clone 69440 (TRBV6-1, TRBJ1-2)
CASSGAWQGRSHGDTF

SEQ ID NO: 138881 - protein, 14 aa, Homo sapiens
  CDR3 for alpha chain variable domain of TCR clone 69441 (TRAV21, TRAJ28)
CAVGSGAGSYQLTF

SEQ ID NO: 138882 - protein, 13 aa, Homo sapiens
  CDR3 for beta chain variable domain of TCR clone 69441 (TRBV29-1, TRBJ2-2)
CSTTGVNTGELFF

SEQ ID NO: 138883 - protein, 13 aa, Homo sapiens
  CDR3 for alpha chain variable domain of TCR clone 69442 (TRAV3, TRAJ15)
CAVRDQAGTALIF

SEQ ID NO: 138884 - protein, 15 aa, Homo sapiens
  CDR3 for beta chain variable domain of TCR clone 69442 (TRBV11-1, TRBJ2-7)
CASSLNYGASYVQYF

SEQ ID NO: 138885 - protein, 11 aa, Homo sapiens
  CDR3 for alpha chain variable domain of TCR clone 69443 (TRAV3, TRAJ21)
CAVGNFNKFYF

SEQ ID NO: 138886 - protein, 17 aa, Homo sapiens
  CDR3 for beta chain variable domain of TCR clone 69443 (TRBV20-1, TRBJ2-1)
RSASSSGLAGSYNEQFF

SEQ ID NO: 138887 - protein, 14 aa, Homo sapiens
  CDR3 for alpha chain variable domain of TCR clone 69444 (TRAV27, TRAJ22)
CAGLPSGSARQLTF

SEQ ID NO: 138888 - protein, 16 aa, Homo sapiens
  CDR3 for beta chain variable domain of TCR clone 69444 (TRBV7-3, TRBJ2-2)
CASSLKRGTLSGEPFF

SEQ ID NO: 138889 - protein, 10 aa, Homo sapiens
  CDR3 for alpha chain variable domain of TCR clone 69445 (TRAV25, TRAJ20)
CAVNDYKLSF

SEQ ID NO: 138890 - protein, 18 aa, Homo sapiens
  CDR3 for beta chain variable domain of TCR clone 69445 (TRBV20-1, TRBJ2-6)
CSAETTPTHGSGANDLTF

SEQ ID NO: 138891 - protein, 14 aa, Homo sapiens
  CDR3 for alpha chain variable domain of TCR clone 69446 (TRAV12-2, TRAJ53)
CAVKGGGSNYKLTF

SEQ ID NO: 138892 - protein, 14 aa, Homo sapiens
  CDR3 for beta chain variable domain of TCR clone 69446 (TRBV7-7, TRBJ2-2)
CATRQDCDTGELFF

SEQ ID NO: 138893 - protein, 14 aa, Homo sapiens
  CDR3 for alpha chain variable domain of TCR clone 69447 (TRAV12-2, TRAJ40)
CAVKVPSGTYKYIF

SEQ ID NO: 138894 - protein, 14 aa, Homo sapiens
  CDR3 for beta chain variable domain of TCR clone 69447 (TRBV7-3, TRBJ2-1)
CASSLAGGTNEQFF

SEQ ID NO: 138895 - protein, 13 aa, Homo sapiens
  CDR3 for alpha chain variable domain of TCR clone 69448 (TRAV12-2, TRAJ10)
CAVPTGGGNKLTF

SEQ ID NO: 138896 - protein, 11 aa, Homo sapiens
  CDR3 for beta chain variable domain of TCR clone 69448 (TRBV6-1, TRBJ2-1)
CASISANEQFF

SEQ ID NO: 138897 - protein, 11 aa, Homo sapiens
  CDR3 for alpha chain variable domain of TCR clone 69449 (TRAV4, TRAJ23)
CLVAPGGKLIF

SEQ ID NO: 138898 - protein, 15 aa, Homo sapiens
  CDR3 for beta chain variable domain of TCR clone 69449 (TRBV7-2, TRBJ2-1)
CASGFQADEYNEQFF

SEQ ID NO: 138899 - protein, 13 aa, Homo sapiens
  CDR3 for alpha chain variable domain of TCR clone 69450 (TRAV12-1, TRAJ20)
CVVNRETDYKLSF

SEQ ID NO: 138900 - protein, 14 aa, Homo sapiens
  CDR3 for beta chain variable domain of TCR clone 69450 (TRBV6-1, TRBJ1-3)
CASVQGGGGNTIYF

SEQ ID NO: 138901 - protein, 10 aa, Homo sapiens
  CDR3 for alpha chain variable domain of TCR clone 69451 (TRAV21, TRAJ49)
CAVTGNQFYF

SEQ ID NO: 138902 - protein, 16 aa, Homo sapiens
  CDR3 for beta chain variable domain of TCR clone 69451 (TRBV7-7, TRBJ2-1)
CASSLASGTTYNEQFF

SEQ ID NO: 138903 - protein, 15 aa, Homo sapiens
  CDR3 for alpha chain variable domain of TCR clone 69452 (TRAV12-3, TRAJ42)
CAMITSVGSQGNLIF

SEQ ID NO: 138904 - protein, 15 aa, Homo sapiens
  CDR3 for beta chain variable domain of TCR clone 69452 (TRBV7-9, TRBJ1-6)
CASSSPGRGNSPLHF

SEQ ID NO: 138905 - protein, 11 aa, Homo sapiens
  CDR3 for alpha chain variable domain of TCR clone 69453 (TRAV17, TRAJ39)
CATGAGNMLTF

SEQ ID NO: 138906 - protein, 16 aa, Homo sapiens
  CDR3 for beta chain variable domain of TCR clone 69453 (TRBV5-1, TRBJ2-1)
YASSFGVSGSYNEQLF

SEQ ID NO: 138907 - protein, 18 aa, Homo sapiens
  CDR3 for alpha chain variable domain of TCR clone 69454 (TRAV35, TRAJ28)
CAGHNYPLSGAGSYQLTF

SEQ ID NO: 138908 - protein, 12 aa, Homo sapiens
  CDR3 for beta chain variable domain of TCR clone 69454 (TRBV7-9, TRBJ1-1)
CASSLEGTEAFC

SEQ ID NO: 138909 - protein, 11 aa, Homo sapiens
  CDR3 for alpha chain variable domain of TCR clone 69455 (TRAV12-3, TRAJ27)
CAMANACKSTF

SEQ ID NO: 138910 - protein, 15 aa, Homo sapiens
  CDR3 for beta chain variable domain of TCR clone 69455 (TRBV2, TRBJ2-1)
CASSELAGSYNEQFF

SEQ ID NO: 138911 - protein, 14 aa, Homo sapiens
  CDR3 for alpha chain variable domain of TCR clone 69456 (TRAV20, TRAJ22)
CAVALGGSARQLTF

SEQ ID NO: 138912 - protein, 15 aa, Homo sapiens
  CDR3 for beta chain variable domain of TCR clone 69456 (TRBV7-2, TRBJ1-1)
CASSCAGDRDTEAFF

SEQ ID NO: 138913 - protein, 12 aa, Homo sapiens
  CDR3 for alpha chain variable domain of TCR clone 69457 (TRAV13-1, TRAJ21)
CAAKGGFNKFYF

SEQ ID NO: 138914 - protein, 17 aa, Homo sapiens
  CDR3 for beta chain variable domain of TCR clone 69457 (TRBV20-1, TRBJ2-1)
CSASSSGLAGSYNEQFF

SEQ ID NO: 138915 - protein, 13 aa, Homo sapiens
  CDR3 for alpha chain variable domain of TCR clone 69458 (TRAV29/DV5, TRAJ31)
CAASRNNNARLMF

SEQ ID NO: 138916 - protein, 14 aa, Homo sapiens
  CDR3 for beta chain variable domain of TCR clone 69458 (TRBV7-8, TRBJ2-3)
CASSLEAGTDTQYF

SEQ ID NO: 138917 - protein, 14 aa, Homo sapiens
  CDR3 for alpha chain variable domain of TCR clone 69459 (TRAV26-1, TRAJ45)
CIVRVVGGADGLIF

SEQ ID NO: 138918 - protein, 16 aa, Homo sapiens
  CDR3 for beta chain variable domain of TCR clone 69459 (TRBV7-9, TRBJ1-1)
CASSLTQVRSNTEAFF

SEQ ID NO: 138919 - protein, 14 aa, Homo sapiens
  CDR3 for alpha chain variable domain of TCR clone 69460 (TRAV35, TRAJ33)
CAGSSQDSNYQLIW

SEQ ID NO: 138920 - protein, 15 aa, Homo sapiens
  CDR3 for beta chain variable domain of TCR clone 69460 (TRBV5-1, TRBJ1-4)
FAPAAWEDGNEKLFF

SEQ ID NO: 138921 - protein, 13 aa, Homo sapiens
  CDR3 for alpha chain variable domain of TCR clone 69461 (TRAV12-3, TRAJ33)
CAMSVNSNYQLIW

SEQ ID NO: 138922 - protein, 14 aa, Homo sapiens
  CDR3 for beta chain variable domain of TCR clone 69461 (TRBV4-2, TRBJ2-1)
CASGLDRAYNEQFF

SEQ ID NO: 138923 - protein, 13 aa, Homo sapiens
  CDR3 for alpha chain variable domain of TCR clone 69462 (TRAV3, TRAJ21)
CAVREPDFNKFYF

SEQ ID NO: 138924 - protein, 15 aa, Homo sapiens
  CDR3 for beta chain variable domain of TCR clone 69462 (TRBV10-2, TRBJ2-6)
CASSEQGTGANVLTF

SEQ ID NO: 138925 - protein, 12 aa, Homo sapiens
  CDR3 for alpha chain variable domain of TCR clone 69463 (TRAV21, TRAJ33)
CAKMDSNYQLIW

SEQ ID NO: 138926 - protein, 16 aa, Homo sapiens
  CDR3 for beta chain variable domain of TCR clone 69463 (TRBV19, TRBJ2-2)
CASRSPGTGATGELFF

SEQ ID NO: 138927 - protein, 16 aa, Homo sapiens
  CDR3 for alpha chain variable domain of TCR clone 69464 (TRAV30, TRAJ24)
CGTEIVDADSWGKFQF

SEQ ID NO: 138928 - protein, 15 aa, Homo sapiens
  CDR3 for beta chain variable domain of TCR clone 69464 (TRBV19, TRBJ1-6)
CASSTQGAVGSPLHF

SEQ ID NO: 138929 - protein, 14 aa, Homo sapiens
  CDR3 for alpha chain variable domain of TCR clone 69465 (TRAV27, TRAJ45)
CAGAQEEVLTDSPF

SEQ ID NO: 138930 - protein, 13 aa, Homo sapiens
  CDR3 for beta chain variable domain of TCR clone 69465 (TRBV7-7, TRBJ2-5)
CASSRSGQETQYF

SEQ ID NO: 138931 - protein, 13 aa, Homo sapiens
  CDR3 for alpha chain variable domain of TCR clone 69466 (TRAV36/DV7, TRAJ38)
CVANAGNNRKLIW

SEQ ID NO: 138932 - protein, 14 aa, Homo sapiens
  CDR3 for beta chain variable domain of TCR clone 69466 (TRBV7-2, TRBJ2-7)
CASSLRWKVNEQYF

SEQ ID NO: 138933 - protein, 17 aa, Homo sapiens
  CDR3 for alpha chain variable domain of TCR clone 69467 (TRAV3, TRAJ12)
CAVRDGGRMDSSYKLIF

SEQ ID NO: 138934 - protein, 13 aa, Homo sapiens
  CDR3 for beta chain variable domain of TCR clone 69467 (TRBV15, TRBJ1-6)
CATPGGLNSPLHF

SEQ ID NO: 138935 - protein, 13 aa, Homo sapiens
  CDR3 for alpha chain variable domain of TCR clone 69468 (TRAV8-1, TRAJ39)
CAGLNNAGNMLTF

SEQ ID NO: 138936 - protein, 17 aa, Homo sapiens
  CDR3 for beta chain variable domain of TCR clone 69468 (TRBV19, TRBJ2-3)
CASSIDTAGGGTDTQYF

SEQ ID NO: 138937 - protein, 16 aa, Homo sapiens
  CDR3 for alpha chain variable domain of TCR clone 69469 (TRAV1-2, TRAJ10)
CAVRGVLTGGGNKLTF

SEQ ID NO: 138938 - protein, 14 aa, Homo sapiens
  CDR3 for beta chain variable domain of TCR clone 69469 (TRBV20-1, TRBJ2-7)
CSAKRGRSSYEQYF

SEQ ID NO: 138939 - protein, 15 aa, Homo sapiens
  CDR3 for alpha chain variable domain of TCR clone 69470 (TRAV25, TRAJ52)
CAGRPGGTSYGKLTF

SEQ ID NO: 138940 - protein, 17 aa, Homo sapiens
  CDR3 for beta chain variable domain of TCR clone 69470 (TRBV7-8, TRBJ2-6)
FASSAGTGGAGANVLTF

SEQ ID NO: 138941 - protein, 12 aa, Homo sapiens
  CDR3 for alpha chain variable domain of TCR clone 69471 (TRAV16, TRAJ21)
CAPLGNFNKFYF

SEQ ID NO: 138942 - protein, 13 aa, Homo sapiens
  CDR3 for beta chain variable domain of TCR clone 69471 (TRBV28, TRBJ2-7)
CASKAGGVYEQYF

SEQ ID NO: 138943 - protein, 13 aa, Homo sapiens
  CDR3 for alpha chain variable domain of TCR clone 69472 (TRAV25, TRAJ30)
WAGRVDRDDKIIF

SEQ ID NO: 138944 - protein, 17 aa, Homo sapiens
  CDR3 for beta chain variable domain of TCR clone 69472 (TRBV7-9, TRBJ2-6)
CASSFGAGYSGANVLTF

SEQ ID NO: 138945 - protein, 15 aa, Homo sapiens
  CDR3 for alpha chain variable domain of TCR clone 69473 (TRAV3, TRAJ20)
CAVRDSRSNDYKLSF

SEQ ID NO: 138946 - protein, 14 aa, Homo sapiens
  CDR3 for beta chain variable domain of TCR clone 69473 (TRBV20-1, TRBJ2-7)
CSARRGNGIYERYF

SEQ ID NO: 138947 - protein, 15 aa, Homo sapiens
  CDR3 for alpha chain variable domain of TCR clone 69474 (TRAV38-1, TRAJ37)
CAFIHGSCNTGKLIF

SEQ ID NO: 138948 - protein, 12 aa, Homo sapiens
  CDR3 for beta chain variable domain of TCR clone 69474 (TRBV7-9, TRBJ2-7)
CASSFGSYEQYF

SEQ ID NO: 138949 - protein, 14 aa, Homo sapiens
  CDR3 for alpha chain variable domain of TCR clone 69475 (TRAV21, TRAJ45)
CAVSSGGGADGLTF

SEQ ID NO: 138950 - protein, 16 aa, Homo sapiens
  CDR3 for beta chain variable domain of TCR clone 69475 (TRBV7-6, TRBJ2-7)
CASSGGTGALSYEQYF

SEQ ID NO: 138951 - protein, 19 aa, Homo sapiens
  CDR3 for alpha chain variable domain of TCR clone 69476 (TRAV26-1, TRAJ22)
CCVLLHRWVFSGSARPLTF

SEQ ID NO: 138952 - protein, 19 aa, Homo sapiens
  CDR3 for beta chain variable domain of TCR clone 69476 (TRBV19, TRBJ2-5)
CASSIGQVTDFFLGETQYF

SEQ ID NO: 138953 - protein, 17 aa, Homo sapiens
  CDR3 for alpha chain variable domain of TCR clone 69477 (TRAV13-2, TRAJ31)
CAENARLMFGDGTQLVV

SEQ ID NO: 138954 - protein, 17 aa, Homo sapiens
  CDR3 for beta chain variable domain of TCR clone 69477 (TRBV28, TRBJ2-7)
CASSPLHRASGVYEQYF

SEQ ID NO: 138955 - protein, 14 aa, Homo sapiens
  CDR3 for alpha chain variable domain of TCR clone 69478 (TRAV25, TRAJ21)
CAGRSGYNFNKFYF

SEQ ID NO: 138956 - protein, 14 aa, Homo sapiens
  CDR3 for beta chain variable domain of TCR clone 69478 (TRBV7-2, TRBJ2-5)
CASSPAGNQETQYF

SEQ ID NO: 138957 - protein, 11 aa, Homo sapiens
  CDR3 for alpha chain variable domain of TCR clone 69479 (TRAV35, TRAJ34)
CWARNTDKLIF

SEQ ID NO: 138958 - protein, 20 aa, Homo sapiens
  CDR3 for beta chain variable domain of TCR clone 69479 (TRBV7-8, TRBJ2-2)
CASSHLFPGPTIHITGELFF

SEQ ID NO: 138959 - protein, 12 aa, Homo sapiens
  CDR3 for alpha chain variable domain of TCR clone 69480 (TRAV1-2, TRAJ33)
CAALDSNYQLIW

SEQ ID NO: 138960 - protein, 16 aa, Homo sapiens
  CDR3 for beta chain variable domain of TCR clone 69480 (TRBV6-4, TRBJ1-2)
CASSEAVGDPNCGYTF

SEQ ID NO: 138961 - protein, 15 aa, Homo sapiens
  CDR3 for alpha chain variable domain of TCR clone 69481 (TRAV12-1, TRAJ9)
CVVSFGDTGGFKTIF

SEQ ID NO: 138962 - protein, 13 aa, Homo sapiens
  CDR3 for beta chain variable domain of TCR clone 69481 (TRBV7-9, TRBJ1-2)
CASSLKQNYGYTF

SEQ ID NO: 138963 - protein, 14 aa, Homo sapiens
  CDR3 for alpha chain variable domain of TCR clone 69482 (TRAV1-2, TRAJ16)
CAVNRFSDGQKLLF

SEQ ID NO: 138964 - protein, 12 aa, Homo sapiens
  CDR3 for beta chain variable domain of TCR clone 69482 (TRBV6-1, TRBJ2-7)
CASSDYSYEQYF

SEQ ID NO: 138965 - protein, 15 aa, Homo sapiens
  CDR3 for alpha chain variable domain of TCR clone 69483 (TRAV25, TRAJ52)
CAGRPGGTSYGKLTF

SEQ ID NO: 138966 - protein, 15 aa, Homo sapiens
  CDR3 for beta chain variable domain of TCR clone 69483 (TRBV9, TRBJ1-6)
CASSVAGTGDSPLHF

SEQ ID NO: 138967 - protein, 14 aa, Homo sapiens
  CDR3 for alpha chain variable domain of TCR clone 69484 (TRAV13-1, TRAJ35)
CAASKGGFGNVLHC

SEQ ID NO: 138968 - protein, 15 aa, Homo sapiens
  CDR3 for beta chain variable domain of TCR clone 69484 (TRBV7-3, TRBJ2-1)
CASSPTGGGEVEQFF

SEQ ID NO: 138969 - protein, 13 aa, Homo sapiens
  CDR3 for alpha chain variable domain of TCR clone 69485 (TRAV8-4, TRAJ49)
CAVSAPTGNQFYF

SEQ ID NO: 138970 - protein, 14 aa, Homo sapiens
  CDR3 for beta chain variable domain of TCR clone 69485 (TRBV7-3, TRBJ2-7)
CASSLSGVSYEQYF

SEQ ID NO: 138971 - protein, 17 aa, Homo sapiens
  CDR3 for alpha chain variable domain of TCR clone 69486 (TRAV3, TRAJ12)
CAVRDGGRMDSSYNLIF

SEQ ID NO: 138972 - protein, 14 aa, Homo sapiens
  CDR3 for beta chain variable domain of TCR clone 69486 (TRBV7-9, TRBJ1-2)
CASSRQGANYGYTF

SEQ ID NO: 138973 - protein, 11 aa, Homo sapiens
  CDR3 for alpha chain variable domain of TCR clone 69487 (TRAV12-3, TRAJ27)
CAMANACKSTF

SEQ ID NO: 138974 - protein, 13 aa, Homo sapiens
  CDR3 for beta chain variable domain of TCR clone 69487 (TRBV20-1, TRBJ1-1)
CSARVGGNTEAFF

SEQ ID NO: 138975 - protein, 15 aa, Homo sapiens
  CDR3 for alpha chain variable domain of TCR clone 69488 (TRAV3, TRAJ20)
CAMRDVKLSDYKLSF

SEQ ID NO: 138976 - protein, 15 aa, Homo sapiens
  CDR3 for beta chain variable domain of TCR clone 69488 (TRBV7-9, TRBJ1-6)
CASSSPGRGNSPLHF

SEQ ID NO: 138977 - protein, 13 aa, Homo sapiens
  CDR3 for alpha chain variable domain of TCR clone 69489 (TRAV27, TRAJ41)
CAGEGNSGYALNF

SEQ ID NO: 138978 - protein, 17 aa, Homo sapiens
  CDR3 for beta chain variable domain of TCR clone 69489 (TRBV13, TRBJ2-3)
CASSLSRVAGGRNTQYF

SEQ ID NO: 138979 - protein, 13 aa, Homo sapiens
  CDR3 for alpha chain variable domain of TCR clone 69490 (TRAV8-3, TRAJ28)
CAVGAVGSYQLTF

SEQ ID NO: 138980 - protein, 14 aa, Homo sapiens
  CDR3 for beta chain variable domain of TCR clone 69490 (TRBV7-2, TRBJ2-7)
CASRSQGTAYEQYF

SEQ ID NO: 138981 - protein, 21 aa, Homo sapiens
  CDR3 for alpha chain variable domain of TCR clone 69491 (TRAV26-1, )
CIADNAGNNNIQNPDPAVYQL

SEQ ID NO: 138982 - protein, 13 aa, Homo sapiens
  CDR3 for beta chain variable domain of TCR clone 69491 (TRBV20-1, TRBJ1-1)
CSARGGGNTEAFF

SEQ ID NO: 138983 - protein, 12 aa, Homo sapiens
  CDR3 for alpha chain variable domain of TCR clone 69492 (TRAV2, TRAJ31)
CAVEDNNARLMF

SEQ ID NO: 138984 - protein, 15 aa, Homo sapiens
  CDR3 for beta chain variable domain of TCR clone 69492 (TRBV11-3, TRBJ2-3)
CASLKDGREGDTQYF

SEQ ID NO: 138985 - protein, 15 aa, Homo sapiens
  CDR3 for alpha chain variable domain of TCR clone 69493 (TRAV2, TRAJ9)
CAVAALNTGGFKTIF

SEQ ID NO: 138986 - protein, 14 aa, Homo sapiens
  CDR3 for beta chain variable domain of TCR clone 69493 (TRBV7-8, TRBJ2-5)
CASSTTGGQETQYF

SEQ ID NO: 138987 - protein, 16 aa, Homo sapiens
  CDR3 for alpha chain variable domain of TCR clone 69494 (TRAV8-3, TRAJ8)
CAVPRDGNTGFQKLVF

SEQ ID NO: 138988 - protein, 14 aa, Homo sapiens
  CDR3 for beta chain variable domain of TCR clone 69494 (TRBV4-1, TRBJ2-2)
CASSQAVNTGELSF

SEQ ID NO: 138989 - protein, 13 aa, Homo sapiens
  CDR3 for alpha chain variable domain of TCR clone 69495 (TRAV26-1, TRAJ48)
CIVRVVGDEKLTF

SEQ ID NO: 138990 - protein, 19 aa, Homo sapiens
  CDR3 for beta chain variable domain of TCR clone 69495 (TRBV11-3, TRBJ2-2)
CAGSTRPGAKTTNTGELFF

SEQ ID NO: 138991 - protein, 14 aa, Homo sapiens
  CDR3 for alpha chain variable domain of TCR clone 69496 (TRAV26-1, TRAJ22)
CIVRVYGSARQLTF

SEQ ID NO: 138992 - protein, 17 aa, Homo sapiens
  CDR3 for beta chain variable domain of TCR clone 69496 (TRBV7-3, TRBJ2-3)
CASSPGGLAGFGDTQYV

SEQ ID NO: 138993 - protein, 14 aa, Homo sapiens
  CDR3 for alpha chain variable domain of TCR clone 69497 (TRAV29/DV5, TRAJ36)
CAARRKTGANNLFF

SEQ ID NO: 138994 - protein, 17 aa, Homo sapiens
  CDR3 for beta chain variable domain of TCR clone 69497 (TRBV18, TRBJ1-5)
CASSPTMGQGTNQPQHF

SEQ ID NO: 138995 - protein, 12 aa, Homo sapiens
  CDR3 for alpha chain variable domain of TCR clone 69498 (TRAV13-2, TRAJ23)
CAERHMGGKLIF

SEQ ID NO: 138996 - protein, 16 aa, Homo sapiens
  CDR3 for beta chain variable domain of TCR clone 69498 (TRBV20-1, TRBJ1-4)
CSAPGQGLLTNEKLFF

SEQ ID NO: 138997 - protein, 17 aa, Homo sapiens
  CDR3 for alpha chain variable domain of TCR clone 69499 (TRAV13-1, TRAJ52)
CAASSGAGGTSYGKLTF

SEQ ID NO: 138998 - protein, 15 aa, Homo sapiens
  CDR3 for beta chain variable domain of TCR clone 69499 (TRBV2, TRBJ2-1)
CASSELAGSYSEQFF

SEQ ID NO: 138999 - protein, 14 aa, Homo sapiens
  CDR3 for alpha chain variable domain of TCR clone 69500 (TRAV21, TRAJ35)
CAVMPIGFGIVLHC

SEQ ID NO: 139000 - protein, 12 aa, Homo sapiens
  CDR3 for beta chain variable domain of TCR clone 69500 (TRBV7-9, TRBJ2-7)
CASSIKREEQYF

SEQ ID NO: 139001 - protein, 12 aa, Homo sapiens
  CDR3 for alpha chain variable domain of TCR clone 69501 (TRAV13-1, TRAJ53)
AASGGSNYKLIF

SEQ ID NO: 139002 - protein, 12 aa, Homo sapiens
  CDR3 for beta chain variable domain of TCR clone 69501 (TRBV18, TRBJ1-4)
CASSPSREKLFF

SEQ ID NO: 139003 - protein, 16 aa, Homo sapiens
  CDR3 for alpha chain variable domain of TCR clone 69502 (TRAV30, TRAJ24)
CGTEIVDADSWGKFQF

SEQ ID NO: 139004 - protein, 19 aa, Homo sapiens
  CDR3 for beta chain variable domain of TCR clone 69502 (TRBV28, TRBJ2-1)
CASSFSIRGSGRTRYEQFF

SEQ ID NO: 139005 - protein, 17 aa, Homo sapiens
  CDR3 for alpha chain variable domain of TCR clone 69503 (TRAV16, TRAJ58)
CITVLSNGETSGYRLTF

SEQ ID NO: 139006 - protein, 17 aa, Homo sapiens
  CDR3 for beta chain variable domain of TCR clone 69503 (TRBV18, TRBJ2-1)
CASSKGLSGGADNEQFF

SEQ ID NO: 139007 - protein, 15 aa, Homo sapiens
  CDR3 for alpha chain variable domain of TCR clone 69504 (TRAV12-2, TRAJ23)
CAVKPIYNQGEKLIF

SEQ ID NO: 139008 - protein, 15 aa, Homo sapiens
  CDR3 for beta chain variable domain of TCR clone 69504 (TRBV5-1, TRBJ1-2)
CASSLVGGQSQGYTF

SEQ ID NO: 139009 - protein, 14 aa, Homo sapiens
  CDR3 for alpha chain variable domain of TCR clone 69505 (TRAV16, TRAJ37)
CALDISGTTGKLIF

SEQ ID NO: 139010 - protein, 14 aa, Homo sapiens
  CDR3 for beta chain variable domain of TCR clone 69505 (TRBV7-6, TRBJ2-7)
CASSFRQGADEQYF

SEQ ID NO: 139011 - protein, 15 aa, Homo sapiens
  CDR3 for alpha chain variable domain of TCR clone 69506 (TRAV26-2, TRAJ13)
CILRDLSGGYQKVTF

SEQ ID NO: 139012 - protein, 14 aa, Homo sapiens
  CDR3 for beta chain variable domain of TCR clone 69506 (TRBV4-1, TRBJ2-3)
CASSKEGSTDTQYF

SEQ ID NO: 139013 - protein, 14 aa, Homo sapiens
  CDR3 for alpha chain variable domain of TCR clone 69507 (TRAV3, TRAJ7)
CAVREEEREQQTRF

SEQ ID NO: 139014 - protein, 15 aa, Homo sapiens
  CDR3 for beta chain variable domain of TCR clone 69507 (TRBV29-1, TRBJ2-7)
CSVEFFDRGSYEQYF

SEQ ID NO: 139015 - protein, 13 aa, Homo sapiens
  CDR3 for alpha chain variable domain of TCR clone 69508 (TRAV12-1, TRAJ31)
CVVNMNNNARLML

SEQ ID NO: 139016 - protein, 15 aa, Homo sapiens
  CDR3 for beta chain variable domain of TCR clone 69508 (TRBV4-1, TRBJ1-2)
CASNQGQGAAYGYTF

SEQ ID NO: 139017 - protein, 14 aa, Homo sapiens
  CDR3 for alpha chain variable domain of TCR clone 69509 (TRAV8-4, TRAJ9)
CAVRKNTGGFKTIF

SEQ ID NO: 139018 - protein, 15 aa, Homo sapiens
  CDR3 for beta chain variable domain of TCR clone 69509 (TRBV10-2, TRBJ2-6)
CASSEQGTGANVLTF

SEQ ID NO: 139019 - protein, 14 aa, Homo sapiens
  CDR3 for alpha chain variable domain of TCR clone 69510 (TRAV27, TRAJ36)
CAGPPKRGANNLFF

SEQ ID NO: 139020 - protein, 15 aa, Homo sapiens
  CDR3 for beta chain variable domain of TCR clone 69510 (TRBV18, TRBJ2-7)
CASSPGSTPNYEQYF

SEQ ID NO: 139021 - protein, 14 aa, Homo sapiens
  CDR3 for alpha chain variable domain of TCR clone 69511 (TRAV12-1, TRAJ17)
CVVNPKAAGNKLTF

SEQ ID NO: 139022 - protein, 16 aa, Homo sapiens
  CDR3 for beta chain variable domain of TCR clone 69511 (TRBV20-1, TRBJ2-1)
CSASASGYSAYNEQFF

SEQ ID NO: 139023 - protein, 17 aa, Homo sapiens
  CDR3 for alpha chain variable domain of TCR clone 69512 (TRAV3, TRAJ12)
CAVRDGGGMDSSYKLIF

SEQ ID NO: 139024 - protein, 13 aa, Homo sapiens
  CDR3 for beta chain variable domain of TCR clone 69512 (TRBV20-1, TRBJ1-1)
CSAPLGGGTEAFF

SEQ ID NO: 139025 - protein, 12 aa, Homo sapiens
  CDR3 for alpha chain variable domain of TCR clone 69513 (TRAV1-1, TRAJ30)
CVVRGRDDKIIF

SEQ ID NO: 139026 - protein, 13 aa, Homo sapiens
  CDR3 for beta chain variable domain of TCR clone 69513 (TRBV11-3, TRBJ2-7)
CASSLDKLYEQYF

SEQ ID NO: 139027 - protein, 16 aa, Homo sapiens
  CDR3 for alpha chain variable domain of TCR clone 69514 (TRAV17, TRAJ53)
CATDALSGGSNYKLTF

SEQ ID NO: 139028 - protein, 16 aa, Homo sapiens
  CDR3 for beta chain variable domain of TCR clone 69514 (TRBV20-1, TRBJ1-4)
CSAPGQGLLTNEKLFF

SEQ ID NO: 139029 - protein, 13 aa, Homo sapiens
  CDR3 for alpha chain variable domain of TCR clone 69515 (TRAV26-2, TRAJ43)
CILRAVNNNDTRF

SEQ ID NO: 139030 - protein, 15 aa, Homo sapiens
  CDR3 for beta chain variable domain of TCR clone 69515 (TRBV7-2, TRBJ2-1)
CASTHGTGIYNEQSF

SEQ ID NO: 139031 - protein, 15 aa, Homo sapiens
  CDR3 for alpha chain variable domain of TCR clone 69516 (TRAV21, TRAJ32)
CAVNSYCGATNKLIF

SEQ ID NO: 139032 - protein, 18 aa, Homo sapiens
  CDR3 for beta chain variable domain of TCR clone 69516 (TRBV7-9, TRBJ2-1)
CASSTGLAEGSSYNEQFF

SEQ ID NO: 139033 - protein, 13 aa, Homo sapiens
  CDR3 for alpha chain variable domain of TCR clone 69517 (TRAV12-1, TRAJ17)
CVNYKAAGNKLTF

SEQ ID NO: 139034 - protein, 17 aa, Homo sapiens
  CDR3 for beta chain variable domain of TCR clone 69517 (TRBV20-1, TRBJ2-1)
CSASSSGLAGSYNEQFF

SEQ ID NO: 139035 - protein, 13 aa, Homo sapiens
  CDR3 for alpha chain variable domain of TCR clone 69518 (TRAV12-2, TRAJ17)
CRAFQSCRNKLTF

SEQ ID NO: 139036 - protein, 17 aa, Homo sapiens
  CDR3 for beta chain variable domain of TCR clone 69518 (TRBV20-1, TRBJ2-2)
CSASGSGQGGLTGELFF

SEQ ID NO: 139037 - protein, 13 aa, Homo sapiens
  CDR3 for alpha chain variable domain of TCR clone 69519 (TRAV12-2, TRAJ20)
CAVYPSNDYKLSF

SEQ ID NO: 139038 - protein, 15 aa, Homo sapiens
  CDR3 for beta chain variable domain of TCR clone 69519 (TRBV18, TRBJ1-2)
CASSPGNGLGYGYSF

SEQ ID NO: 139039 - protein, 10 aa, Homo sapiens
  CDR3 for alpha chain variable domain of TCR clone 69520 (TRAV1-2, TRAJ18)
CAVRGEAKPW

SEQ ID NO: 139040 - protein, 15 aa, Homo sapiens
  CDR3 for beta chain variable domain of TCR clone 69520 (TRBV20-1, TRBJ2-1)
CSAEGGLLAGDEQFF

SEQ ID NO: 139041 - protein, 14 aa, Homo sapiens
  CDR3 for alpha chain variable domain of TCR clone 69521 (TRAV1-2, TRAJ6)
CAVSFSGGSYIPTF

SEQ ID NO: 139042 - protein, 15 aa, Homo sapiens
  CDR3 for beta chain variable domain of TCR clone 69521 (TRBV28, TRBJ2-7)
CASSPGGRGFYEQYF

SEQ ID NO: 139043 - protein, 14 aa, Homo sapiens
  CDR3 for alpha chain variable domain of TCR clone 69522 (TRAV1-2, TRAJ16)
CAVNRFSDGQKLLF

SEQ ID NO: 139044 - protein, 16 aa, Homo sapiens
  CDR3 for beta chain variable domain of TCR clone 69522 (TRBV13, TRBJ2-2)
CASSPRTGERTGELFF

SEQ ID NO: 139045 - protein, 14 aa, Homo sapiens
  CDR3 for alpha chain variable domain of TCR clone 69523 (TRAV12-1, TRAJ33)
CVVNPEDSNYQLIW

SEQ ID NO: 139046 - protein, 11 aa, Homo sapiens
  CDR3 for beta chain variable domain of TCR clone 69523 (TRBV7-7, TRBJ2-1)
CASSNYGEQFF

SEQ ID NO: 139047 - protein, 12 aa, Homo sapiens
  CDR3 for alpha chain variable domain of TCR clone 69524 (TRAV23/DV6, TRAJ30)
CAASKGDDKIIF

SEQ ID NO: 139048 - protein, 15 aa, Homo sapiens
  CDR3 for beta chain variable domain of TCR clone 69524 (TRBV29-1, TRBJ2-1)
CSGRDRKSSYNGQFF

SEQ ID NO: 139049 - protein, 14 aa, Homo sapiens
  CDR3 for alpha chain variable domain of TCR clone 69525 (TRAV29/DV5, TRAJ20)
CAASAPIEDYKLSF

SEQ ID NO: 139050 - protein, 15 aa, Homo sapiens
  CDR3 for beta chain variable domain of TCR clone 69525 (TRBV6-4, TRBJ2-1)
CASSDSTGGYNEQFF

SEQ ID NO: 139051 - protein, 13 aa, Homo sapiens
  CDR3 for alpha chain variable domain of TCR clone 69526 (TRAV12-2, TRAJ20)
CAVFPSNDYKLSF

SEQ ID NO: 139052 - protein, 15 aa, Homo sapiens
  CDR3 for beta chain variable domain of TCR clone 69526 (TRBV27, TRBJ2-5)
CASSLYPRGGETQYF

SEQ ID NO: 139053 - protein, 16 aa, Homo sapiens
  CDR3 for alpha chain variable domain of TCR clone 69527 (TRAV13-1, TRAJ37)
CAARSLGSSNTGKLIF

SEQ ID NO: 139054 - protein, 12 aa, Homo sapiens
  CDR3 for beta chain variable domain of TCR clone 69527 (TRBV6-1, TRBJ2-5)
CASSEGRETQYF

SEQ ID NO: 139055 - protein, 13 aa, Homo sapiens
  CDR3 for alpha chain variable domain of TCR clone 69528 (TRAV12-1, TRAJ9)
CVVLNTGGLKTIF

SEQ ID NO: 139056 - protein, 13 aa, Homo sapiens
  CDR3 for beta chain variable domain of TCR clone 69528 (TRBV20-1, TRBJ1-1)
CSARGGGNTEAFF

SEQ ID NO: 139057 - protein, 13 aa, Homo sapiens
  CDR3 for alpha chain variable domain of TCR clone 69529 (TRAV3, TRAJ15)
CALRDQAGTALIF

SEQ ID NO: 139058 - protein, 15 aa, Homo sapiens
  CDR3 for beta chain variable domain of TCR clone 69529 (TRBV11-1, TRBJ2-7)
CASSLNYGASYEQYF

SEQ ID NO: 139059 - protein, 15 aa, Homo sapiens
  CDR3 for alpha chain variable domain of TCR clone 69530 (TRAV3, TRAJ22)
CAVRDRGGSARQLTF

SEQ ID NO: 139060 - protein, 14 aa, Homo sapiens
  CDR3 for beta chain variable domain of TCR clone 69530 (TRBV2, TRBJ2-5)
CASSEVLAQETQYF

SEQ ID NO: 139061 - protein, 16 aa, Homo sapiens
  CDR3 for alpha chain variable domain of TCR clone 69531 (TRAV1-2, TRAJ10)
CAVRGVLTGGGNKLTF

SEQ ID NO: 139062 - protein, 20 aa, Homo sapiens
  CDR3 for beta chain variable domain of TCR clone 69531 (TRBV7-8, TRBJ2-2)
CASSHLFPGPTNHITGELFF

SEQ ID NO: 139063 - protein, 15 aa, Homo sapiens
  CDR3 for alpha chain variable domain of TCR clone 69532 (TRAV2, TRAJ22)
CAVHSRGGSARQLTF

SEQ ID NO: 139064 - protein, 11 aa, Homo sapiens
  CDR3 for beta chain variable domain of TCR clone 69532 (TRBV27, TRBJ2-3)
CASSLGDTQYF

SEQ ID NO: 139065 - protein, 14 aa, Homo sapiens
  CDR3 for alpha chain variable domain of TCR clone 69533 (TRAV38-1, TRAJ45)
CASHSGGGADGLTF

SEQ ID NO: 139066 - protein, 14 aa, Homo sapiens
  CDR3 for beta chain variable domain of TCR clone 69533 (TRBV18, TRBJ2-7)
CASSPRGGAYEQYF

SEQ ID NO: 139067 - protein, 16 aa, Homo sapiens
  CDR3 for alpha chain variable domain of TCR clone 69534 (TRAV26-1, TRAJ45)
CIVEKYSGGGADGLTC

SEQ ID NO: 139068 - protein, 16 aa, Homo sapiens
  CDR3 for beta chain variable domain of TCR clone 69534 (TRBV28, TRBJ1-4)
CASSPPYRGRSEKLFF

SEQ ID NO: 139069 - protein, 22 aa, Homo sapiens
  CDR3 for alpha chain variable domain of TCR clone 69535 (TRAV21, )
CAVRQDAGNSHIQNPDPAVYQL

SEQ ID NO: 139070 - protein, 16 aa, Homo sapiens
  CDR3 for beta chain variable domain of TCR clone 69535 (TRBV4-2, TRBJ1-1)
CASRPLDGGGDTEAFF

SEQ ID NO: 139071 - protein, 14 aa, Homo sapiens
  CDR3 for alpha chain variable domain of TCR clone 69536 (TRAV12-1, TRAJ41)
CVVLNSNSGYALNF

SEQ ID NO: 139072 - protein, 14 aa, Homo sapiens
  CDR3 for beta chain variable domain of TCR clone 69536 (TRBV5-1, TRBJ2-7)
CASSRGGSLYEQYF

SEQ ID NO: 139073 - protein, 17 aa, Homo sapiens
  CDR3 for alpha chain variable domain of TCR clone 69537 (TRAV3, TRAJ38)
CAVRDCLNAGNNRKLIL

SEQ ID NO: 139074 - protein, 16 aa, Homo sapiens
  CDR3 for beta chain variable domain of TCR clone 69537 (TRBV20-1, TRBJ1-4)
CSARPYGGELNEKLFF

SEQ ID NO: 139075 - protein, 13 aa, Homo sapiens
  CDR3 for alpha chain variable domain of TCR clone 69538 (TRAV8-3, TRAJ43)
CAVVPYNNNDMRF

SEQ ID NO: 139076 - protein, 20 aa, Homo sapiens
  CDR3 for beta chain variable domain of TCR clone 69538 (TRBV7-8, TRBJ2-2)
CASSHLFPGPTIHITGELFF

SEQ ID NO: 139077 - protein, 16 aa, Homo sapiens
  CDR3 for alpha chain variable domain of TCR clone 69539 (TRAV30, TRAJ24)
CGTEIVDADIWGKFQF

SEQ ID NO: 139078 - protein, 16 aa, Homo sapiens
  CDR3 for beta chain variable domain of TCR clone 69539 (TRBV4-1, TRBJ2-7)
CASSQEGTASSYEQYF

SEQ ID NO: 139079 - protein, 15 aa, Homo sapiens
  CDR3 for alpha chain variable domain of TCR clone 69540 (TRAV12-1, TRAJ44)
CVVFVNTGTASKLTF

SEQ ID NO: 139080 - protein, 16 aa, Homo sapiens
  CDR3 for beta chain variable domain of TCR clone 69540 (TRBV4-3, TRBJ2-1)
CASSPALDRGVNEQFF

SEQ ID NO: 139081 - protein, 11 aa, Homo sapiens
  CDR3 for alpha chain variable domain of TCR clone 69541 (TRAV1-2, TRAJ20)
CAVANDYKLSF

SEQ ID NO: 139082 - protein, 18 aa, Homo sapiens
  CDR3 for beta chain variable domain of TCR clone 69541 (TRBV20-1, TRBJ2-6)
CSAVTTPTHGSGANVLTF

SEQ ID NO: 139083 - protein, 11 aa, Homo sapiens
  CDR3 for alpha chain variable domain of TCR clone 69542 (TRAV3, TRAJ21)
CAVGNFNKFYF

SEQ ID NO: 139084 - protein, 14 aa, Homo sapiens
  CDR3 for beta chain variable domain of TCR clone 69542 (TRBV20-1, TRBJ1-3)
CSASPTGAGNTIYF

SEQ ID NO: 139085 - protein, 12 aa, Homo sapiens
  CDR3 for alpha chain variable domain of TCR clone 69543 (TRAV26-1, TRAJ53)
CIEGGSNYKLTF

SEQ ID NO: 139086 - protein, 14 aa, Homo sapiens
  CDR3 for beta chain variable domain of TCR clone 69543 (TRBV7-9, TRBJ2-7)
CASSTTTGRDEQYF

SEQ ID NO: 139087 - protein, 11 aa, Homo sapiens
  CDR3 for alpha chain variable domain of TCR clone 69544 (TRAV12-3, TRAJ43)
CAMSVSNDMRF

SEQ ID NO: 139088 - protein, 14 aa, Homo sapiens
  CDR3 for beta chain variable domain of TCR clone 69544 (TRBV20-1, TRBJ2-7)
CSAKRGRSSYEQYF

SEQ ID NO: 139089 - protein, 11 aa, Homo sapiens
  CDR3 for alpha chain variable domain of TCR clone 69545 (TRAV2, TRAJ13)
CASGGYQKVAF

SEQ ID NO: 139090 - protein, 16 aa, Homo sapiens
  CDR3 for beta chain variable domain of TCR clone 69545 (TRBV2, TRBJ2-1)
CASSVGGSLSYNEQFF

SEQ ID NO: 139091 - protein, 16 aa, Homo sapiens
  CDR3 for alpha chain variable domain of TCR clone 69546 (TRAV16, TRAJ4)
CITVLPFSGGYNKLTF

SEQ ID NO: 139092 - protein, 14 aa, Homo sapiens
  CDR3 for beta chain variable domain of TCR clone 69546 (TRBV19, TRBJ2-7)
CASSMGQGAIEQYF

SEQ ID NO: 139093 - protein, 16 aa, Homo sapiens
  CDR3 for alpha chain variable domain of TCR clone 69547 (TRAV30, TRAJ24)
CGTEIVDADSWGKFQF

SEQ ID NO: 139094 - protein, 15 aa, Homo sapiens
  CDR3 for beta chain variable domain of TCR clone 69547 (TRBV9, TRBJ1-3)
CASSVTGFSGNTIYF

SEQ ID NO: 139095 - protein, 17 aa, Homo sapiens
  CDR3 for alpha chain variable domain of TCR clone 69548 (TRAV12-2, TRAJ6)
CAPQGPPRAGGSSIPTF

SEQ ID NO: 139096 - protein, 16 aa, Homo sapiens
  CDR3 for beta chain variable domain of TCR clone 69548 (TRBV19, TRBJ2-2)
CASSTARASNTGELFF

SEQ ID NO: 139097 - protein, 14 aa, Homo sapiens
  CDR3 for alpha chain variable domain of TCR clone 69549 (TRAV30, TRAJ26)
CGTEIVSYGQNFVF

SEQ ID NO: 139098 - protein, 13 aa, Homo sapiens
  CDR3 for beta chain variable domain of TCR clone 69549 (TRBV19, TRBJ1-3)
CASRLSLGNTIYL

SEQ ID NO: 139099 - protein, 15 aa, Homo sapiens
  CDR3 for alpha chain variable domain of TCR clone 69550 (TRAV13-1, TRAJ18)
CAASGGGSTLGRLYF

SEQ ID NO: 139100 - protein, 13 aa, Homo sapiens
  CDR3 for beta chain variable domain of TCR clone 69550 (TRBV10-3, TRBJ2-7)
RASKLAVNYEQYF

SEQ ID NO: 139101 - protein, 13 aa, Homo sapiens
  CDR3 for alpha chain variable domain of TCR clone 69551 (TRAV20, TRAJ45)
CAVKKRRCRRTHL

SEQ ID NO: 139102 - protein, 18 aa, Homo sapiens
  CDR3 for beta chain variable domain of TCR clone 69551 (TRBV10-3, TRBJ2-1)
CTSVPSVSLRGGVDEQFF

SEQ ID NO: 139103 - protein, 11 aa, Homo sapiens
  CDR3 for alpha chain variable domain of TCR clone 69552 (TRAV12-1, TRAJ8)
CVVTGFQKLVF

SEQ ID NO: 139104 - protein, 14 aa, Homo sapiens
  CDR3 for beta chain variable domain of TCR clone 69552 (TRBV19, TRBJ2-1)
CASAKSTQYNEQFF

SEQ ID NO: 139105 - protein, 16 aa, Homo sapiens
  CDR3 for alpha chain variable domain of TCR clone 69553 (TRAV3, TRAJ21)
CAVRDIERGNFNKFYF

SEQ ID NO: 139106 - protein, 15 aa, Homo sapiens
  CDR3 for beta chain variable domain of TCR clone 69553 (TRBV25-1, TRBJ1-4)
CASSPGDSTNEKLFF

SEQ ID NO: 139107 - protein, 14 aa, Homo sapiens
  CDR3 for alpha chain variable domain of TCR clone 69554 (TRAV2, TRAJ42)
CAVVGGGSQGNLIF

SEQ ID NO: 139108 - protein, 14 aa, Homo sapiens
  CDR3 for beta chain variable domain of TCR clone 69554 (TRBV6-1, TRBJ2-1)
CASAKDGFYNEQFF

SEQ ID NO: 139109 - protein, 15 aa, Homo sapiens
  CDR3 for alpha chain variable domain of TCR clone 69555 (TRAV23/DV6, TRAJ30)
CAASSQESRDDKIIF

SEQ ID NO: 139110 - protein, 17 aa, Homo sapiens
  CDR3 for beta chain variable domain of TCR clone 69555 (TRBV4-3, TRBJ2-1)
CASSQFPSGRASGEQFF

SEQ ID NO: 139111 - protein, 13 aa, Homo sapiens
  CDR3 for alpha chain variable domain of TCR clone 69556 (TRAV13-2, TRAJ8)
CAVMNTGFQKLVF

SEQ ID NO: 139112 - protein, 17 aa, Homo sapiens
  CDR3 for beta chain variable domain of TCR clone 69556 (TRBV28, TRBJ2-1)
CASSSARQALTYNEQFF

SEQ ID NO: 139113 - protein, 11 aa, Homo sapiens
  CDR3 for alpha chain variable domain of TCR clone 69557 (TRAV13-1, TRAJ39)
CASHAGNMLTF

SEQ ID NO: 139114 - protein, 14 aa, Homo sapiens
  CDR3 for beta chain variable domain of TCR clone 69557 (TRBV11-2, TRBJ1-5)
CASGLDRGRQPQHF

SEQ ID NO: 139115 - protein, 16 aa, Homo sapiens
  CDR3 for alpha chain variable domain of TCR clone 69558 (TRAV4, TRAJ22)
CLVGDLYSGSARQLTF

SEQ ID NO: 139116 - protein, 17 aa, Homo sapiens
  CDR3 for beta chain variable domain of TCR clone 69558 (TRBV11-2, TRBJ2-3)
CASSLYPPGVEYNEQFF

SEQ ID NO: 139117 - protein, 15 aa, Homo sapiens
  CDR3 for alpha chain variable domain of TCR clone 69559 (TRAV16, TRAJ12)
CSKWPLRDSSYKLIF

SEQ ID NO: 139118 - protein, 15 aa, Homo sapiens
  CDR3 for beta chain variable domain of TCR clone 69559 (TRBV9, TRBJ1-6)
CASSVAGTGDSPLHF

SEQ ID NO: 139119 - protein, 13 aa, Homo sapiens
  CDR3 for alpha chain variable domain of TCR clone 69560 (TRAV12-3, TRAJ13)
CAMSSGGYQKVTF

SEQ ID NO: 139120 - protein, 15 aa, Homo sapiens
  CDR3 for beta chain variable domain of TCR clone 69560 (TRBV6-3, TRBJ2-7)
CASSSPGTVFYEQYF

SEQ ID NO: 139121 - protein, 16 aa, Homo sapiens
  CDR3 for alpha chain variable domain of TCR clone 69561 (TRAV27, TRAJ13)
CAGAKSDSGGYQKVTF

SEQ ID NO: 139122 - protein, 15 aa, Homo sapiens
  CDR3 for beta chain variable domain of TCR clone 69561 (TRBV29-1, TRBJ2-1)
CSVGRHALFYNGQFF

SEQ ID NO: 139123 - protein, 11 aa, Homo sapiens
  CDR3 for alpha chain variable domain of TCR clone 69562 (TRAV21, TRAJ34)
CAPLDTDKLIF

SEQ ID NO: 139124 - protein, 16 aa, Homo sapiens
  CDR3 for beta chain variable domain of TCR clone 69562 (TRBV5-1, TRBJ2-3)
CASSLAGEGGTDTQYF

SEQ ID NO: 139125 - protein, 14 aa, Homo sapiens
  CDR3 for alpha chain variable domain of TCR clone 69563 (TRAV17, TRAJ22)
CATSPSGSARQLTF

SEQ ID NO: 139126 - protein, 16 aa, Homo sapiens
  CDR3 for beta chain variable domain of TCR clone 69563 (TRBV20-1, TRBJ1-4)
CSAPGQGLLTNEKLFF

SEQ ID NO: 139127 - protein, 17 aa, Homo sapiens
  CDR3 for alpha chain variable domain of TCR clone 69564 (TRAV3, TRAJ6)
CAVRDGPRAGGSYIPTF

SEQ ID NO: 139128 - protein, 13 aa, Homo sapiens
  CDR3 for beta chain variable domain of TCR clone 69564 (TRBV4-1, TRBJ2-1)
CASSQEVQYEQFF

SEQ ID NO: 139129 - protein, 12 aa, Homo sapiens
  CDR3 for alpha chain variable domain of TCR clone 69565 (TRAV8-3, TRAJ26)
CAGDNYGQIFVF

SEQ ID NO: 139130 - protein, 15 aa, Homo sapiens
  CDR3 for beta chain variable domain of TCR clone 69565 (TRBV9, TRBJ2-1)
CASSLAGSSYNEQFF

SEQ ID NO: 139131 - protein, 13 aa, Homo sapiens
  CDR3 for alpha chain variable domain of TCR clone 69566 (TRAV8-3, TRAJ48)
CAVVPFGNEKLTC

SEQ ID NO: 139132 - protein, 15 aa, Homo sapiens
  CDR3 for beta chain variable domain of TCR clone 69566 (TRBV11-2, TRBJ2-1)
CASSSPSTRYNEQFF

SEQ ID NO: 139133 - protein, 14 aa, Homo sapiens
  CDR3 for alpha chain variable domain of TCR clone 69567 (TRAV35, TRAJ22)
CAGLRPGSARQLTF

SEQ ID NO: 139134 - protein, 16 aa, Homo sapiens
  CDR3 for beta chain variable domain of TCR clone 69567 (TRBV19, TRBJ1-1)
CASRVDVTGAAWGAFF

SEQ ID NO: 139135 - protein, 12 aa, Homo sapiens
  CDR3 for alpha chain variable domain of TCR clone 69568 (TRAV13-2, TRAJ23)
CAERHRGGKLIF

SEQ ID NO: 139136 - protein, 13 aa, Homo sapiens
  CDR3 for beta chain variable domain of TCR clone 69568 (TRBV20-1, TRBJ1-1)
CSARLGQGTEAFF

SEQ ID NO: 139137 - protein, 14 aa, Homo sapiens
  CDR3 for alpha chain variable domain of TCR clone 69569 (TRAV12-2, TRAJ13)
CAVKKTGGYQKVTF

SEQ ID NO: 139138 - protein, 13 aa, Homo sapiens
  CDR3 for beta chain variable domain of TCR clone 69569 (TRBV2, TRBJ1-1)
CASRWTVNTEAFF

SEQ ID NO: 139139 - protein, 15 aa, Homo sapiens
  CDR3 for alpha chain variable domain of TCR clone 69570 (TRAV3, TRAJ32)
CAVSSYGGATNKLIF

SEQ ID NO: 139140 - protein, 13 aa, Homo sapiens
  CDR3 for beta chain variable domain of TCR clone 69570 (TRBV20-1, TRBJ2-7)
YSARPSTNYEQYF

SEQ ID NO: 139141 - protein, 16 aa, Homo sapiens
  CDR3 for alpha chain variable domain of TCR clone 69571 (TRAV4, TRAJ22)
FLVGDLYSGSARQLTF

SEQ ID NO: 139142 - protein, 16 aa, Homo sapiens
  CDR3 for beta chain variable domain of TCR clone 69571 (TRBV7-9, TRBJ2-3)
CASSPWREVGTDTQYF

SEQ ID NO: 139143 - protein, 16 aa, Homo sapiens
  CDR3 for alpha chain variable domain of TCR clone 69572 (TRAV16, TRAJ21)
CACGWATTSTNFALDL

SEQ ID NO: 139144 - protein, 15 aa, Homo sapiens
  CDR3 for beta chain variable domain of TCR clone 69572 (TRBV19, TRBJ2-1)
CASSIQAASYNEQFF

SEQ ID NO: 139145 - protein, 16 aa, Homo sapiens
  CDR3 for alpha chain variable domain of TCR clone 69573 (TRAV3, TRAJ37)
CAVRPHGSGNTGNLIF

SEQ ID NO: 139146 - protein, 13 aa, Homo sapiens
  CDR3 for beta chain variable domain of TCR clone 69573 (TRBV2, TRBJ1-5)
CASGTGGYQPQHF

SEQ ID NO: 139147 - protein, 11 aa, Homo sapiens
  CDR3 for alpha chain variable domain of TCR clone 69574 (TRAV16, TRAJ33)
CALHSNYQLIW

SEQ ID NO: 139148 - protein, 15 aa, Homo sapiens
  CDR3 for beta chain variable domain of TCR clone 69574 (TRBV4-1, TRBJ2-7)
CAGSQQGQGFDEQYF

SEQ ID NO: 139149 - protein, 14 aa, Homo sapiens
  CDR3 for alpha chain variable domain of TCR clone 69575 (TRAV35, TRAJ10)
CAGILTGGGNKLTF

SEQ ID NO: 139150 - protein, 13 aa, Homo sapiens
  CDR3 for beta chain variable domain of TCR clone 69575 (TRBV10-3, TRBJ2-7)
CASKLAVNYEQYF

SEQ ID NO: 139151 - protein, 13 aa, Homo sapiens
  CDR3 for alpha chain variable domain of TCR clone 69576 (TRAV13-2, TRAJ13)
CADLSGGYQKVTF

SEQ ID NO: 139152 - protein, 15 aa, Homo sapiens
  CDR3 for beta chain variable domain of TCR clone 69576 (TRBV19, TRBJ1-1)
CASSIDGGRNTEAFF

SEQ ID NO: 139153 - protein, 18 aa, Homo sapiens
  CDR3 for alpha chain variable domain of TCR clone 69577 (TRAV26-2, TRAJ54)
FILRDVEVGIQGAQKLVF

SEQ ID NO: 139154 - protein, 17 aa, Homo sapiens
  CDR3 for beta chain variable domain of TCR clone 69577 (TRBV20-1, TRBJ1-5)
CSASLSPGQGGNQPQHF

SEQ ID NO: 139155 - protein, 13 aa, Homo sapiens
  CDR3 for alpha chain variable domain of TCR clone 69578 (TRAV16, TRAJ11)
CALTQSGYSTLTF

SEQ ID NO: 139156 - protein, 14 aa, Homo sapiens
  CDR3 for beta chain variable domain of TCR clone 69578 (TRBV19, TRBJ2-7)
CASSTTRSSYEQCF

SEQ ID NO: 139157 - protein, 13 aa, Homo sapiens
  CDR3 for alpha chain variable domain of TCR clone 69579 (TRAV26-2, TRAJ33)
CILTLDSNYQLIW

SEQ ID NO: 139158 - protein, 17 aa, Homo sapiens
  CDR3 for beta chain variable domain of TCR clone 69579 (TRBV7-8, TRBJ2-6)
CASSAGTGGAGANVLTF

SEQ ID NO: 139159 - protein, 13 aa, Homo sapiens
  CDR3 for alpha chain variable domain of TCR clone 69580 (TRAV30, TRAJ6)
CGFIEGGSYIPTF

SEQ ID NO: 139160 - protein, 13 aa, Homo sapiens
  CDR3 for beta chain variable domain of TCR clone 69580 (TRBV5-4, TRBJ2-5)
CASSPVSKETQYF

SEQ ID NO: 139161 - protein, 12 aa, Homo sapiens
  CDR3 for alpha chain variable domain of TCR clone 69581 (TRAV27, TRAJ13)
CAGAGGYQKVTF

SEQ ID NO: 139162 - protein, 15 aa, Homo sapiens
  CDR3 for beta chain variable domain of TCR clone 69581 (TRBV7-9, TRBJ1-6)
CASSSPGRGNSPLHF

SEQ ID NO: 139163 - protein, 19 aa, Homo sapiens
  CDR3 for alpha chain variable domain of TCR clone 69582 (TRAV26-1, TRAJ52)
CIVRAHSNAGGTSYGKLTF

SEQ ID NO: 139164 - protein, 13 aa, Homo sapiens
  CDR3 for beta chain variable domain of TCR clone 69582 (TRBV20-1, TRBJ1-6)
CSAPLGVGSPLHF

SEQ ID NO: 139165 - protein, 13 aa, Homo sapiens
  CDR3 for alpha chain variable domain of TCR clone 69583 (TRAV8-1, TRAJ7)
CAVMPYGNNRLAF

SEQ ID NO: 139166 - protein, 15 aa, Homo sapiens
  CDR3 for beta chain variable domain of TCR clone 69583 (TRBV2, TRBJ2-1)
CASSELAGSYNEQFF

SEQ ID NO: 139167 - protein, 14 aa, Homo sapiens
  CDR3 for alpha chain variable domain of TCR clone 69584 (TRAV26-1, TRAJ38)
CIADNAGNNRKLIW

SEQ ID NO: 139168 - protein, 13 aa, Homo sapiens
  CDR3 for beta chain variable domain of TCR clone 69584 (TRBV20-1, TRBJ1-1)
CSARGGGNTEVFF

SEQ ID NO: 139169 - protein, 13 aa, Homo sapiens
  CDR3 for alpha chain variable domain of TCR clone 69585 (TRAV8-3, TRAJ28)
CAVGAVGSYQLTF

SEQ ID NO: 139170 - protein, 20 aa, Homo sapiens
  CDR3 for beta chain variable domain of TCR clone 69585 (TRBV28, TRBJ2-1)
CASTPIGRSPGLAGGNEQFF

SEQ ID NO: 139171 - protein, 16 aa, Homo sapiens
  CDR3 for alpha chain variable domain of TCR clone 69586 (TRAV12-3, TRAJ18)
CARRGSRGSTLGRLYF

SEQ ID NO: 139172 - protein, 19 aa, Homo sapiens
  CDR3 for beta chain variable domain of TCR clone 69586 (TRBV6-3, TRBJ2-7)
CASSYRTGLAGGVSGEQYF

SEQ ID NO: 139173 - protein, 17 aa, Homo sapiens
  CDR3 for alpha chain variable domain of TCR clone 69587 (TRAV17, TRAJ28)
CATDPRRGGAGSYQLTF

SEQ ID NO: 139174 - protein, 16 aa, Homo sapiens
  CDR3 for beta chain variable domain of TCR clone 69587 (TRBV25-1, TRBJ1-1)
CASSGDRDRGRIEAFL

SEQ ID NO: 139175 - protein, 16 aa, Homo sapiens
  CDR3 for alpha chain variable domain of TCR clone 69588 (TRAV3, TRAJ37)
CAVRPHGSGNTGKLIF

SEQ ID NO: 139176 - protein, 14 aa, Homo sapiens
  CDR3 for beta chain variable domain of TCR clone 69588 (TRBV2, TRBJ1-1)
CASTHLGGNTEAFF

SEQ ID NO: 139177 - protein, 14 aa, Homo sapiens
  CDR3 for alpha chain variable domain of TCR clone 69589 (TRAV16, TRAJ33)
CALSAMDSNYQLIW

SEQ ID NO: 139178 - protein, 12 aa, Homo sapiens
  CDR3 for beta chain variable domain of TCR clone 69589 (TRBV5-1, TRBJ1-2)
CDSSQDTYGYTF

SEQ ID NO: 139179 - protein, 13 aa, Homo sapiens
  CDR3 for alpha chain variable domain of TCR clone 69590 (TRAV17, TRAJ34)
CVTDLYNTDKLIF

SEQ ID NO: 139180 - protein, 15 aa, Homo sapiens
  CDR3 for beta chain variable domain of TCR clone 69590 (TRBV20-1, TRBJ2-3)
CSATGTSGFTDTQYF

SEQ ID NO: 139181 - protein, 11 aa, Homo sapiens
  CDR3 for alpha chain variable domain of TCR clone 69591 (TRAV23/DV6, TRAJ58)
CAAGLLRGETS

SEQ ID NO: 139182 - protein, 15 aa, Homo sapiens
  CDR3 for beta chain variable domain of TCR clone 69591 (TRBV9, TRBJ1-6)
CASSVAGTGDSPLHF

SEQ ID NO: 139183 - protein, 13 aa, Homo sapiens
  CDR3 for alpha chain variable domain of TCR clone 69592 (TRAV12-3, TRAJ7)
CAMSASGNNRLAF

SEQ ID NO: 139184 - protein, 14 aa, Homo sapiens
  CDR3 for beta chain variable domain of TCR clone 69592 (TRBV5-7, TRBJ1-6)
CASTPWPADSPLHF

SEQ ID NO: 139185 - protein, 11 aa, Homo sapiens
  CDR3 for alpha chain variable domain of TCR clone 69593 (TRAV2, TRAJ13)
CVSGGYQKVTF

SEQ ID NO: 139186 - protein, 16 aa, Homo sapiens
  CDR3 for beta chain variable domain of TCR clone 69593 (TRBV27, TRBJ2-2)
CASSFRGLVRTGELFF

SEQ ID NO: 139187 - protein, 13 aa, Homo sapiens
  CDR3 for alpha chain variable domain of TCR clone 69594 (TRAV12-2, TRAJ20)
CAVYPSNDYNLSF

SEQ ID NO: 139188 - protein, 15 aa, Homo sapiens
  CDR3 for beta chain variable domain of TCR clone 69594 (TRBV27, TRBJ2-5)
CASSLYPRGGETQYF

SEQ ID NO: 139189 - protein, 17 aa, Homo sapiens
  CDR3 for alpha chain variable domain of TCR clone 69595 (TRAV17, TRAJ28)
CATDPRRGGAGSYQLTF

SEQ ID NO: 139190 - protein, 16 aa, Homo sapiens
  CDR3 for beta chain variable domain of TCR clone 69595 (TRBV25-1, TRBJ1-1)
CASNGDRDRGRIEAFF

SEQ ID NO: 139191 - protein, 13 aa, Homo sapiens
  CDR3 for alpha chain variable domain of TCR clone 69596 (TRAV12-3, TRAJ13)
CAMGTGGYQKVTS

SEQ ID NO: 139192 - protein, 14 aa, Homo sapiens
  CDR3 for beta chain variable domain of TCR clone 69596 (TRBV7-2, TRBJ2-5)
CASSTGGELKTQYF

SEQ ID NO: 139193 - protein, 16 aa, Homo sapiens
  CDR3 for alpha chain variable domain of TCR clone 69597 (TRAV21, TRAJ52)
CAVTTAGGTSYGKLTF

SEQ ID NO: 139194 - protein, 13 aa, Homo sapiens
  CDR3 for beta chain variable domain of TCR clone 69597 (TRBV20-1, TRBJ2-3)
CSARLAGTDTQYF

SEQ ID NO: 139195 - protein, 11 aa, Homo sapiens
  CDR3 for alpha chain variable domain of TCR clone 69598 (TRAV17, TRAJ9)
CATTGGFKTIF

SEQ ID NO: 139196 - protein, 15 aa, Homo sapiens
  CDR3 for beta chain variable domain of TCR clone 69598 (TRBV7-9, TRBJ1-4)
CASSRTGGFNEKLFF

SEQ ID NO: 139197 - protein, 17 aa, Homo sapiens
  CDR3 for alpha chain variable domain of TCR clone 69599 (TRAV3, TRAJ42)
CAVRDSDYGGSQGNLIF

SEQ ID NO: 139198 - protein, 17 aa, Homo sapiens
  CDR3 for beta chain variable domain of TCR clone 69599 (TRBV7-9, TRBJ2-3)
CASSPTVAGDLTDTQYF

SEQ ID NO: 139199 - protein, 14 aa, Homo sapiens
  CDR3 for alpha chain variable domain of TCR clone 69600 (TRAV8-6, TRAJ52)
CAMIGSTSYGKLTF

SEQ ID NO: 139200 - protein, 15 aa, Homo sapiens
  CDR3 for beta chain variable domain of TCR clone 69600 (TRBV11-2, TRBJ2-5)
CASSLGAGGVETQYF

SEQ ID NO: 139201 - protein, 14 aa, Homo sapiens
  CDR3 for alpha chain variable domain of TCR clone 69601 (TRAV8-4, TRAJ9)
CAVSEVNGGFKTIF

SEQ ID NO: 139202 - protein, 13 aa, Homo sapiens
  CDR3 for beta chain variable domain of TCR clone 69601 (TRBV7-9, TRBJ1-2)
CASSLKQNYGYTF

SEQ ID NO: 139203 - protein, 16 aa, Homo sapiens
  CDR3 for alpha chain variable domain of TCR clone 69602 (TRAV3, TRAJ10)
CAVRDMRAGGGNKLTF

SEQ ID NO: 139204 - protein, 14 aa, Homo sapiens
  CDR3 for beta chain variable domain of TCR clone 69602 (TRBV4-1, TRBJ2-7)
CASSPVAGGDEQYF

SEQ ID NO: 139205 - protein, 13 aa, Homo sapiens
  CDR3 for alpha chain variable domain of TCR clone 69603 (TRAV2, TRAJ40)
CAVVTSGTYKYIF

SEQ ID NO: 139206 - protein, 16 aa, Homo sapiens
  CDR3 for beta chain variable domain of TCR clone 69603 (TRBV28, TRBJ2-7)
CASSSGTSGRGYEQYF

SEQ ID NO: 139207 - protein, 12 aa, Homo sapiens
  CDR3 for alpha chain variable domain of TCR clone 69604 (TRAV13-1, TRAJ21)
CAAKEGFNKFYF

SEQ ID NO: 139208 - protein, 17 aa, Homo sapiens
  CDR3 for beta chain variable domain of TCR clone 69604 (TRBV18, TRBJ2-1)
CASSKGLSGGADNEQFF

SEQ ID NO: 139209 - protein, 12 aa, Homo sapiens
  CDR3 for alpha chain variable domain of TCR clone 69605 (TRAV1-2, TRAJ9)
CAGYTGGFKTIF

SEQ ID NO: 139210 - protein, 15 aa, Homo sapiens
  CDR3 for beta chain variable domain of TCR clone 69605 (TRBV11-2, TRBJ2-1)
CASSSAGQSLNEQFF

SEQ ID NO: 139211 - protein, 14 aa, Homo sapiens
  CDR3 for alpha chain variable domain of TCR clone 69606 (TRAV16, TRAJ22)
CALRGQGSARQLTF

SEQ ID NO: 139212 - protein, 13 aa, Homo sapiens
  CDR3 for beta chain variable domain of TCR clone 69606 (TRBV7-3, TRBJ2-7)
CASSKRRGGEQYF

SEQ ID NO: 139213 - protein, 15 aa, Homo sapiens
  CDR3 for alpha chain variable domain of TCR clone 69607 (TRAV3, TRAJ5)
CAVRDRKTGRRALAF

SEQ ID NO: 139214 - protein, 15 aa, Homo sapiens
  CDR3 for beta chain variable domain of TCR clone 69607 (TRBV7-8, TRBJ2-1)
CASSLADSLYNEQFF

SEQ ID NO: 139215 - protein, 15 aa, Homo sapiens
  CDR3 for alpha chain variable domain of TCR clone 69608 (TRAV13-1, TRAJ44)
CAASRGGGTASKLTF

SEQ ID NO: 139216 - protein, 14 aa, Homo sapiens
  CDR3 for beta chain variable domain of TCR clone 69608 (TRBV7-2, TRBJ2-5)
CASSLRGSSETQYF

SEQ ID NO: 139217 - protein, 12 aa, Homo sapiens
  CDR3 for alpha chain variable domain of TCR clone 69609 (TRAV12-1, TRAJ40)
CVFYSGTYKYIF

SEQ ID NO: 139218 - protein, 18 aa, Homo sapiens
  CDR3 for beta chain variable domain of TCR clone 69609 (TRBV12-4, TRBJ2-2)
CASSLVAGNRGRTGELFF

SEQ ID NO: 139219 - protein, 12 aa, Homo sapiens
  CDR3 for alpha chain variable domain of TCR clone 69610 (TRAV12-3, TRAJ34)
CAMGYNTDKHIF

SEQ ID NO: 139220 - protein, 14 aa, Homo sapiens
  CDR3 for beta chain variable domain of TCR clone 69610 (TRBV4-1, TRBJ2-2)
CASSQAVNTGELFF

SEQ ID NO: 139221 - protein, 13 aa, Homo sapiens
  CDR3 for alpha chain variable domain of TCR clone 69611 (TRAV1-2, TRAJ9)
CAALNTGGSKTIF

SEQ ID NO: 139222 - protein, 14 aa, Homo sapiens
  CDR3 for beta chain variable domain of TCR clone 69611 (TRBV13, TRBJ2-3)
CASSSGSPTDTQYF

SEQ ID NO: 139223 - protein, 13 aa, Homo sapiens
  CDR3 for alpha chain variable domain of TCR clone 69612 (TRAV26-1, TRAJ36)
CIAVRQGANNLFF

SEQ ID NO: 139224 - protein, 19 aa, Homo sapiens
  CDR3 for beta chain variable domain of TCR clone 69612 (TRBV27, TRBJ2-1)
CASSLEILSPGAAGNEQFF

SEQ ID NO: 139225 - protein, 11 aa, Homo sapiens
  CDR3 for alpha chain variable domain of TCR clone 69613 (TRAV12-3, TRAJ43)
CAMSVSNDMRF

SEQ ID NO: 139226 - protein, 15 aa, Homo sapiens
  CDR3 for beta chain variable domain of TCR clone 69613 (TRBV4-1, TRBJ1-4)
CASSDTGGTNEKLFF

SEQ ID NO: 139227 - protein, 12 aa, Homo sapiens
  CDR3 for alpha chain variable domain of TCR clone 69614 (TRAV12-1, TRAJ34)
CVVAGATDKLIF

SEQ ID NO: 139228 - protein, 12 aa, Homo sapiens
  CDR3 for beta chain variable domain of TCR clone 69614 (TRBV7-9, TRBJ1-1)
CASSLVRGEAFS

SEQ ID NO: 139229 - protein, 14 aa, Homo sapiens
  CDR3 for alpha chain variable domain of TCR clone 69615 (TRAV8-3, TRAJ30)
CAVGDMNRDDKSIF

SEQ ID NO: 139230 - protein, 17 aa, Homo sapiens
  CDR3 for beta chain variable domain of TCR clone 69615 (TRBV19, TRBJ2-2)
CASSRNPGGFGTGELFF

SEQ ID NO: 139231 - protein, 16 aa, Homo sapiens
  CDR3 for alpha chain variable domain of TCR clone 69616 (TRAV12-2, TRAJ10)
CAVNRVLTGGGNKITF

SEQ ID NO: 139232 - protein, 12 aa, Homo sapiens
  CDR3 for beta chain variable domain of TCR clone 69616 (TRBV28, TRBJ2-7)
CASSFSSYEQYF

SEQ ID NO: 139233 - protein, 14 aa, Homo sapiens
  CDR3 for alpha chain variable domain of TCR clone 69617 (TRAV1-2, TRAJ16)
CAVNRFSDGQKLLF

SEQ ID NO: 139234 - protein, 16 aa, Homo sapiens
  CDR3 for beta chain variable domain of TCR clone 69617 (TRBV10-3, TRBJ2-7)
CAISADFAGRPYEQYF

SEQ ID NO: 139235 - protein, 16 aa, Homo sapiens
  CDR3 for alpha chain variable domain of TCR clone 69618 (TRAV12-3, TRAJ53)
CAMSPGSGGSNYKLTF

SEQ ID NO: 139236 - protein, 15 aa, Homo sapiens
  CDR3 for beta chain variable domain of TCR clone 69618 (TRBV11-2, TRBJ1-1)
CASSSRSSLLLSLDK

SEQ ID NO: 139237 - protein, 15 aa, Homo sapiens
  CDR3 for alpha chain variable domain of TCR clone 69619 (TRAV26-1, TRAJ15)
CIVRAANQAGTSLIF

SEQ ID NO: 139238 - protein, 15 aa, Homo sapiens
  CDR3 for beta chain variable domain of TCR clone 69619 (TRBV20-1, TRBJ1-1)
CSARSAATSNTEAFF

SEQ ID NO: 139239 - protein, 15 aa, Homo sapiens
  CDR3 for alpha chain variable domain of TCR clone 69620 (TRAV12-2, TRAJ53)
CAVNGGGGSNYKLTF

SEQ ID NO: 139240 - protein, 18 aa, Homo sapiens
  CDR3 for beta chain variable domain of TCR clone 69620 (TRBV15, TRBJ2-1)
CVPPPGCSGGPTTNEQFF

SEQ ID NO: 139241 - protein, 17 aa, Homo sapiens
  CDR3 for alpha chain variable domain of TCR clone 69621 (TRAV12-2, TRAJ53)
CAPLTDSQEGSNYKLPF

SEQ ID NO: 139242 - protein, 12 aa, Homo sapiens
  CDR3 for beta chain variable domain of TCR clone 69621 (TRBV11-2, TRBJ2-2)
CASSLGGGELFF

SEQ ID NO: 139243 - protein, 15 aa, Homo sapiens
  CDR3 for alpha chain variable domain of TCR clone 69622 (TRAV12-3, TRAJ49)
CSMAVTPNTGNQFYF

SEQ ID NO: 139244 - protein, 18 aa, Homo sapiens
  CDR3 for beta chain variable domain of TCR clone 69622 (TRBV4-1, TRBJ1-5)
CASSQDPRGQGLNQPQHF

SEQ ID NO: 139245 - protein, 14 aa, Homo sapiens
  CDR3 for alpha chain variable domain of TCR clone 69623 (TRAV2, TRAJ9)
CAVEDRSGGFKTIF

SEQ ID NO: 139246 - protein, 14 aa, Homo sapiens
  CDR3 for beta chain variable domain of TCR clone 69623 (TRBV18, TRBJ1-5)
CASSRQQRNQTQHF

SEQ ID NO: 139247 - protein, 13 aa, Homo sapiens
  CDR3 for alpha chain variable domain of TCR clone 69624 (TRAV26-1, TRAJ34)
CIVRPWITDKLIL

SEQ ID NO: 139248 - protein, 13 aa, Homo sapiens
  CDR3 for beta chain variable domain of TCR clone 69624 (TRBV5-1, TRBJ2-1)
CASSLGSYNEQFF

SEQ ID NO: 139249 - protein, 13 aa, Homo sapiens
  CDR3 for alpha chain variable domain of TCR clone 69625 (TRAV21, TRAJ27)
CAARPGNAGKSTF

SEQ ID NO: 139250 - protein, 14 aa, Homo sapiens
  CDR3 for beta chain variable domain of TCR clone 69625 (TRBV13, TRBJ2-7)
CASSLKGASYEQYF

SEQ ID NO: 139251 - protein, 15 aa, Homo sapiens
  CDR3 for alpha chain variable domain of TCR clone 69626 (TRAV12-1, TRAJ44)
CVVFVNTGTASKLTF

SEQ ID NO: 139252 - protein, 16 aa, Homo sapiens
  CDR3 for beta chain variable domain of TCR clone 69626 (TRBV7-3, TRBJ2-2)
CASSLKRGTLSGELFF

SEQ ID NO: 139253 - protein, 13 aa, Homo sapiens
  CDR3 for alpha chain variable domain of TCR clone 69627 (TRAV20, TRAJ37)
CAGCSSNTGKLIF

SEQ ID NO: 139254 - protein, 15 aa, Homo sapiens
  CDR3 for beta chain variable domain of TCR clone 69627 (TRBV19, TRBJ1-1)
CASTSGQIQNTEAFF

SEQ ID NO: 139255 - protein, 13 aa, Homo sapiens
  CDR3 for alpha chain variable domain of TCR clone 69628 (TRAV21, TRAJ20)
CAVGLRVDYRLSF

SEQ ID NO: 139256 - protein, 13 aa, Homo sapiens
  CDR3 for beta chain variable domain of TCR clone 69628 (TRBV6-1, TRBJ1-1)
CASSRQGNAEAFF

SEQ ID NO: 139257 - protein, 13 aa, Homo sapiens
  CDR3 for alpha chain variable domain of TCR clone 69629 (TRAV13-2, TRAJ13)
CAESPGGYQKVTF

SEQ ID NO: 139258 - protein, 15 aa, Homo sapiens
  CDR3 for beta chain variable domain of TCR clone 69629 (TRBV11-3, TRBJ2-7)
CASSPGPASSYEQYF

SEQ ID NO: 139259 - protein, 13 aa, Homo sapiens
  CDR3 for alpha chain variable domain of TCR clone 69630 (TRAV21, TRAJ27)
CAARPGNAGKSTF

SEQ ID NO: 139260 - protein, 14 aa, Homo sapiens
  CDR3 for beta chain variable domain of TCR clone 69630 (TRBV11-2, TRBJ2-7)
CASSLGARAYEQYF

SEQ ID NO: 139261 - protein, 15 aa, Homo sapiens
  CDR3 for alpha chain variable domain of TCR clone 69631 (TRAV26-1, TRAJ23)
CIVRVAGYQGGKLIF

SEQ ID NO: 139262 - protein, 18 aa, Homo sapiens
  CDR3 for beta chain variable domain of TCR clone 69631 (TRBV28, TRBJ2-1)
RASSSTSGRANSYNEQFF

SEQ ID NO: 139263 - protein, 23 aa, Homo sapiens
  CDR3 for alpha chain variable domain of TCR clone 69632 (TRAV12-2, TRAJ22)
CAVSFRVHPGPPIVSGSARQLTF

SEQ ID NO: 139264 - protein, 13 aa, Homo sapiens
  CDR3 for beta chain variable domain of TCR clone 69632 (TRBV12-4, TRBJ1-2)
CASSLDSNYGHTF

SEQ ID NO: 139265 - protein, 14 aa, Homo sapiens
  CDR3 for alpha chain variable domain of TCR clone 69633 (TRAV38-1, TRAJ45)
CAYYSGGGADGLTF

SEQ ID NO: 139266 - protein, 13 aa, Homo sapiens
  CDR3 for beta chain variable domain of TCR clone 69633 (TRBV27, TRBJ1-4)
CASSLMGDEKLFF

SEQ ID NO: 139267 - protein, 12 aa, Homo sapiens
  CDR3 for alpha chain variable domain of TCR clone 69634 (TRAV16, TRAJ10)
CSRTVGGNKLTF

SEQ ID NO: 139268 - protein, 15 aa, Homo sapiens
  CDR3 for beta chain variable domain of TCR clone 69634 (TRBV6-3, TRBJ2-7)
CASSSPGTVFYEQYF

SEQ ID NO: 139269 - protein, 17 aa, Homo sapiens
  CDR3 for alpha chain variable domain of TCR clone 69635 (TRAV13-1, TRAJ28)
CSASPPYSGAGSYQLTF

SEQ ID NO: 139270 - protein, 12 aa, Homo sapiens
  CDR3 for beta chain variable domain of TCR clone 69635 (TRBV11-2, TRBJ2-2)
CASSLPTGELFF

SEQ ID NO: 139271 - protein, 15 aa, Homo sapiens
  CDR3 for alpha chain variable domain of TCR clone 69636 (TRAV35, TRAJ40)
CAGQLGASGTYKYIF

SEQ ID NO: 139272 - protein, 14 aa, Homo sapiens
  CDR3 for beta chain variable domain of TCR clone 69636 (TRBV7-3, TRBJ2-1)
CASSLAGGTNEQFF

SEQ ID NO: 139273 - protein, 18 aa, Homo sapiens
  CDR3 for alpha chain variable domain of TCR clone 69637 (TRAV13-1, TRAJ52)
CAASKRSAGGTSYGKLTF

SEQ ID NO: 139274 - protein, 13 aa, Homo sapiens
  CDR3 for beta chain variable domain of TCR clone 69637 (TRBV12-4, TRBJ1-2)
CASSLRQGKGCTF

SEQ ID NO: 139275 - protein, 19 aa, Homo sapiens
  CDR3 for alpha chain variable domain of TCR clone 69638 (TRAV2, TRAJ20)
ILQVREADAAVYRDCKLSF

SEQ ID NO: 139276 - protein, 16 aa, Homo sapiens
  CDR3 for beta chain variable domain of TCR clone 69638 (TRBV7-7, TRBJ2-1)
CASSLASGTSYNEQFF

SEQ ID NO: 139277 - protein, 13 aa, Homo sapiens
  CDR3 for alpha chain variable domain of TCR clone 69639 (TRAV27, TRAJ56)
CAGKPGANSKLTF

SEQ ID NO: 139278 - protein, 18 aa, Homo sapiens
  CDR3 for beta chain variable domain of TCR clone 69639 (TRBV11-2, TRBJ2-3)
CASSLGGAPRGAPNTQYF

SEQ ID NO: 139279 - protein, 23 aa, Homo sapiens
  CDR3 for alpha chain variable domain of TCR clone 69640 (TRAV4, TRAJ26)
IPADRKSSTLILPRVYYGQNFVF

SEQ ID NO: 139280 - protein, 16 aa, Homo sapiens
  CDR3 for beta chain variable domain of TCR clone 69640 (TRBV7-2, TRBJ1-2)
CASSSNQDRRGHGYTF

SEQ ID NO: 139281 - protein, 14 aa, Homo sapiens
  CDR3 for alpha chain variable domain of TCR clone 69641 (TRAV12-2, TRAJ44)
CAVNQAGTASKLTF

SEQ ID NO: 139282 - protein, 13 aa, Homo sapiens
  CDR3 for beta chain variable domain of TCR clone 69641 (TRBV20-1, TRBJ1-6)
CSAPLGVGSPLHF

SEQ ID NO: 139283 - protein, 15 aa, Homo sapiens
  CDR3 for alpha chain variable domain of TCR clone 69642 (TRAV25, TRAJ52)
CAGRPGGTSYGKLTF

SEQ ID NO: 139284 - protein, 17 aa, Homo sapiens
  CDR3 for beta chain variable domain of TCR clone 69642 (TRBV7-8, TRBJ2-6)
CASSAVTGGAGANVLTF

SEQ ID NO: 139285 - protein, 13 aa, Homo sapiens
  CDR3 for alpha chain variable domain of TCR clone 69643 (TRAV2, TRAJ40)
CAVVTSGTYKYIF

SEQ ID NO: 139286 - protein, 12 aa, Homo sapiens
  CDR3 for beta chain variable domain of TCR clone 69643 (TRBV12-4, TRBJ2-1)
CASSPGRNEQFF

SEQ ID NO: 139287 - protein, 14 aa, Homo sapiens
  CDR3 for alpha chain variable domain of TCR clone 69644 (TRAV29/DV5, TRAJ36)
CAARRKAGANNLFF

SEQ ID NO: 139288 - protein, 13 aa, Homo sapiens
  CDR3 for beta chain variable domain of TCR clone 69644 (TRBV15, TRBJ1-6)
CATSGGLNSPLHF

SEQ ID NO: 139289 - protein, 14 aa, Homo sapiens
  CDR3 for alpha chain variable domain of TCR clone 69645 (TRAV16, TRAJ17)
CAPSGRAAGNKLTF

SEQ ID NO: 139290 - protein, 17 aa, Homo sapiens
  CDR3 for beta chain variable domain of TCR clone 69645 (TRBV18, TRBJ2-6)
CASSPRQGAVGANVLTF

SEQ ID NO: 139291 - protein, 12 aa, Homo sapiens
  CDR3 for alpha chain variable domain of TCR clone 69646 (TRAV10, TRAJ43)
CVVVRVGNDMRF

SEQ ID NO: 139292 - protein, 13 aa, Homo sapiens
  CDR3 for beta chain variable domain of TCR clone 69646 (TRBV7-3, TRBJ1-1)
CASSQDWGAEAFF

SEQ ID NO: 139293 - protein, 21 aa, Homo sapiens
  CDR3 for alpha chain variable domain of TCR clone 69647 (TRAV12-1, TRAJ32)
SSVIKPPTSMNYGGATNKLIF

SEQ ID NO: 139294 - protein, 15 aa, Homo sapiens
  CDR3 for beta chain variable domain of TCR clone 69647 (TRBV7-9, TRBJ2-2)
CASGPLDTFPGELFF

SEQ ID NO: 139295 - protein, 14 aa, Homo sapiens
  CDR3 for alpha chain variable domain of TCR clone 69648 (TRAV12-3, TRAJ10)
SHLPLTGGGNKLTF

SEQ ID NO: 139296 - protein, 14 aa, Homo sapiens
  CDR3 for beta chain variable domain of TCR clone 69648 (TRBV18, TRBJ2-7)
CASSPTSGGYEQYF

SEQ ID NO: 139297 - protein, 15 aa, Homo sapiens
  CDR3 for alpha chain variable domain of TCR clone 69649 (TRAV8-4, TRAJ47)
CAVSDPEEYGNKLVF

SEQ ID NO: 139298 - protein, 15 aa, Homo sapiens
  CDR3 for beta chain variable domain of TCR clone 69649 (TRBV11-2, TRBJ2-1)
CASSLGPDSYNGQFF

SEQ ID NO: 139299 - protein, 16 aa, Homo sapiens
  CDR3 for alpha chain variable domain of TCR clone 69650 (TRAV3, TRAJ21)
CAVRDIERGKFNKFYF

SEQ ID NO: 139300 - protein, 16 aa, Homo sapiens
  CDR3 for beta chain variable domain of TCR clone 69650 (TRBV12-4, TRBJ1-5)
CASSRPVGGSNQPQHF

SEQ ID NO: 139301 - protein, 14 aa, Homo sapiens
  CDR3 for alpha chain variable domain of TCR clone 69651 (TRAV12-3, TRAJ10)
SHLPLTGGGNKLTF

SEQ ID NO: 139302 - protein, 14 aa, Homo sapiens
  CDR3 for beta chain variable domain of TCR clone 69651 (TRBV7-2, TRBJ2-2)
CASILNSNTGELFF

SEQ ID NO: 139303 - protein, 16 aa, Homo sapiens
  CDR3 for alpha chain variable domain of TCR clone 69652 (TRAV16, TRAJ4)
CALSRMFSGGYNKLIF

SEQ ID NO: 139304 - protein, 13 aa, Homo sapiens
  CDR3 for beta chain variable domain of TCR clone 69652 (TRBV28, TRBJ2-7)
CAGAQQGLDEQYF

SEQ ID NO: 139305 - protein, 11 aa, Homo sapiens
  CDR3 for alpha chain variable domain of TCR clone 69653 (TRAV2, TRAJ13)
CASGGYQKVTF

SEQ ID NO: 139306 - protein, 16 aa, Homo sapiens
  CDR3 for beta chain variable domain of TCR clone 69653 (TRBV7-6, TRBJ1-6)
CASSLSSRIGDSPLHF

SEQ ID NO: 139307 - protein, 13 aa, Homo sapiens
  CDR3 for alpha chain variable domain of TCR clone 69654 (TRAV6, TRAJ23)
CALEQNQGGKLIF

SEQ ID NO: 139308 - protein, 15 aa, Homo sapiens
  CDR3 for beta chain variable domain of TCR clone 69654 (TRBV28, TRBJ1-2)
CASSGSEQRAFGYTF

SEQ ID NO: 139309 - protein, 13 aa, Homo sapiens
  CDR3 for alpha chain variable domain of TCR clone 69655 (TRAV36/DV7, TRAJ37)
CAVFSSNTGKLIF

SEQ ID NO: 139310 - protein, 20 aa, Homo sapiens
  CDR3 for beta chain variable domain of TCR clone 69655 (TRBV7-8, TRBJ2-2)
CASSHLFPGPTIHITGELFF

SEQ ID NO: 139311 - protein, 13 aa, Homo sapiens
  CDR3 for alpha chain variable domain of TCR clone 69656 (TRAV12-3, TRAJ41)
CAIAPNSGYALHF

SEQ ID NO: 139312 - protein, 14 aa, Homo sapiens
  CDR3 for beta chain variable domain of TCR clone 69656 (TRBV7-2, TRBJ1-3)
CASSLGTAGNTIYF

SEQ ID NO: 139313 - protein, 14 aa, Homo sapiens
  CDR3 for alpha chain variable domain of TCR clone 69657 (TRAV12-2, TRAJ5)
CAVNRSTGRRALTF

SEQ ID NO: 139314 - protein, 12 aa, Homo sapiens
  CDR3 for beta chain variable domain of TCR clone 69657 (TRBV7-9, TRBJ2-7)
CASSLEGYEQYF

SEQ ID NO: 139315 - protein, 12 aa, Homo sapiens
  CDR3 for alpha chain variable domain of TCR clone 69658 (TRAV13-1, TRAJ49)
CAAPKTGNQFYF

SEQ ID NO: 139316 - protein, 17 aa, Homo sapiens
  CDR3 for beta chain variable domain of TCR clone 69658 (TRBV25-1, TRBJ2-7)
CASSDARVVFSSYEQYF

SEQ ID NO: 139317 - protein, 12 aa, Homo sapiens
  CDR3 for alpha chain variable domain of TCR clone 69659 (TRAV13-2, TRAJ23)
CAERHRGGKLIF

SEQ ID NO: 139318 - protein, 19 aa, Homo sapiens
  CDR3 for beta chain variable domain of TCR clone 69659 (TRBV19, TRBJ2-5)
CANSIGQVTDFFLGETQYF

SEQ ID NO: 139319 - protein, 12 aa, Homo sapiens
  CDR3 for alpha chain variable domain of TCR clone 69660 (TRAV2, TRAJ31)
CAVEDNNARLMF

SEQ ID NO: 139320 - protein, 16 aa, Homo sapiens
  CDR3 for beta chain variable domain of TCR clone 69660 (TRBV10-3, TRBJ2-1)
CAISGVGDGGGGEEFF

SEQ ID NO: 139321 - protein, 11 aa, Homo sapiens
  CDR3 for alpha chain variable domain of TCR clone 69661 (TRAV13-1, TRAJ48)
CSKLWNEKLTF

SEQ ID NO: 139322 - protein, 16 aa, Homo sapiens
  CDR3 for beta chain variable domain of TCR clone 69661 (TRBV7-3, TRBJ2-2)
CASSLKRGTLSGELFF

SEQ ID NO: 139323 - protein, 13 aa, Homo sapiens
  CDR3 for alpha chain variable domain of TCR clone 69662 (TRAV2, TRAJ24)
CAVTTDSRGKLQF

SEQ ID NO: 139324 - protein, 14 aa, Homo sapiens
  CDR3 for beta chain variable domain of TCR clone 69662 (TRBV13, TRBJ2-5)
CASSLGRGQETQYF

SEQ ID NO: 139325 - protein, 14 aa, Homo sapiens
  CDR3 for alpha chain variable domain of TCR clone 69663 (TRAV20, TRAJ40)
CAASLTSGTYKYIF

SEQ ID NO: 139326 - protein, 21 aa, Homo sapiens
  CDR3 for beta chain variable domain of TCR clone 69663 (TRBV27, TRBJ1-1)
CASSFLETARREFSLKLSLDK

SEQ ID NO: 139327 - protein, 11 aa, Homo sapiens
  CDR3 for alpha chain variable domain of TCR clone 69664 (TRAV3, TRAJ17)
CAEAAGNKLTF

SEQ ID NO: 139328 - protein, 15 aa, Homo sapiens
  CDR3 for beta chain variable domain of TCR clone 69664 (TRBV12-4, TRBJ2-7)
CASSLGSGGPYEQHF

SEQ ID NO: 139329 - protein, 16 aa, Homo sapiens
  CDR3 for alpha chain variable domain of TCR clone 69665 (TRAV26-1, TRAJ23)
CIVRVERYNQGGKLIF

SEQ ID NO: 139330 - protein, 15 aa, Homo sapiens
  CDR3 for beta chain variable domain of TCR clone 69665 (TRBV18, TRBJ2-7)
CDSSPRGGKGYEQYF

SEQ ID NO: 139331 - protein, 15 aa, Homo sapiens
  CDR3 for alpha chain variable domain of TCR clone 69666 (TRAV8-3, TRAJ11)
CAVGLLNSGYSTLTF

SEQ ID NO: 139332 - protein, 16 aa, Homo sapiens
  CDR3 for beta chain variable domain of TCR clone 69666 (TRBV7-9, TRBJ1-2)
CANSLGFSSGEDGYTF

SEQ ID NO: 139333 - protein, 15 aa, Homo sapiens
  CDR3 for alpha chain variable domain of TCR clone 69667 (TRAV3, TRAJ22)
CAVRDRGGSARQLTF

SEQ ID NO: 139334 - protein, 15 aa, Homo sapiens
  CDR3 for beta chain variable domain of TCR clone 69667 (TRBV6-5, TRBJ2-1)
CASSYDAGAGNEQFF

SEQ ID NO: 139335 - protein, 15 aa, Homo sapiens
  CDR3 for alpha chain variable domain of TCR clone 69668 (TRAV12-1, TRAJ10)
CVVNKLTGGGNKLIF

SEQ ID NO: 139336 - protein, 17 aa, Homo sapiens
  CDR3 for beta chain variable domain of TCR clone 69668 (TRBV5-1, TRBJ1-6)
CASSPSLQGSDNSPLHF

SEQ ID NO: 139337 - protein, 12 aa, Homo sapiens
  CDR3 for alpha chain variable domain of TCR clone 69669 (TRAV17, TRAJ45)
CAAGGGADGLTF

SEQ ID NO: 139338 - protein, 15 aa, Homo sapiens
  CDR3 for beta chain variable domain of TCR clone 69669 (TRBV20-1, TRBJ2-7)
CSARDRVSGMDELYF

SEQ ID NO: 139339 - protein, 11 aa, Homo sapiens
  CDR3 for alpha chain variable domain of TCR clone 69670 (TRAV3, TRAJ17)
CAEAAGNKLTF

SEQ ID NO: 139340 - protein, 15 aa, Homo sapiens
  CDR3 for beta chain variable domain of TCR clone 69670 (TRBV12-4, TRBJ2-7)
CAGSLGSGGPYEQYF

SEQ ID NO: 139341 - protein, 14 aa, Homo sapiens
  CDR3 for alpha chain variable domain of TCR clone 69671 (TRAV12-3, TRAJ22)
CAMSLFGSARQLTS

SEQ ID NO: 139342 - protein, 11 aa, Homo sapiens
  CDR3 for beta chain variable domain of TCR clone 69671 (TRBV12-4, TRBJ2-2)
CASSSAGELLF

SEQ ID NO: 139343 - protein, 13 aa, Homo sapiens
  CDR3 for alpha chain variable domain of TCR clone 69672 (TRAV35, TRAJ33)
CAGQLYGVYQLIC

SEQ ID NO: 139344 - protein, 14 aa, Homo sapiens
  CDR3 for beta chain variable domain of TCR clone 69672 (TRBV7-2, TRBJ1-1)
CASSLGGAGTEAFF

SEQ ID NO: 139345 - protein, 11 aa, Homo sapiens
  CDR3 for alpha chain variable domain of TCR clone 69673 (TRAV2, TRAJ37)
CAVDNTGKLIF

SEQ ID NO: 139346 - protein, 16 aa, Homo sapiens
  CDR3 for beta chain variable domain of TCR clone 69673 (TRBV9, TRBJ2-1)
CASSVGGGGSYNEQFF

SEQ ID NO: 139347 - protein, 12 aa, Homo sapiens
  CDR3 for alpha chain variable domain of TCR clone 69674 (TRAV10, TRAJ6)
CVVSEGSYIPTF

SEQ ID NO: 139348 - protein, 15 aa, Homo sapiens
  CDR3 for beta chain variable domain of TCR clone 69674 (TRBV7-8, TRBJ2-1)
CASSLADSLYNEQFF

SEQ ID NO: 139349 - protein, 10 aa, Homo sapiens
  CDR3 for alpha chain variable domain of TCR clone 69675 (TRAV16, TRAJ22)
SAMYLRQLIF

SEQ ID NO: 139350 - protein, 15 aa, Homo sapiens
  CDR3 for beta chain variable domain of TCR clone 69675 (TRBV7-9, TRBJ1-6)
CASSSPGRGNSPLHF

SEQ ID NO: 139351 - protein, 15 aa, Homo sapiens
  CDR3 for alpha chain variable domain of TCR clone 69676 (TRAV3, TRAJ29)
CAVRYLYSGNTPLVF

SEQ ID NO: 139352 - protein, 17 aa, Homo sapiens
  CDR3 for beta chain variable domain of TCR clone 69676 (TRBV20-1, TRBJ2-1)
CSARDPLAGVWDNEQFF

SEQ ID NO: 139353 - protein, 14 aa, Homo sapiens
  CDR3 for alpha chain variable domain of TCR clone 69677 (TRAV9-2, TRAJ39)
CALYIYNAGNMLTF

SEQ ID NO: 139354 - protein, 21 aa, Homo sapiens
  CDR3 for beta chain variable domain of TCR clone 69677 (TRBV7-3, TRBJ2-1)
GGTQPCISVPAAGRSYNEQFF

SEQ ID NO: 139355 - protein, 12 aa, Homo sapiens
  CDR3 for alpha chain variable domain of TCR clone 69678 (TRAV12-1, TRAJ30)
CVVNPRDDKIIF

SEQ ID NO: 139356 - protein, 13 aa, Homo sapiens
  CDR3 for beta chain variable domain of TCR clone 69678 (TRBV2, TRBJ1-1)
CASRWTVNTEAFF

SEQ ID NO: 139357 - protein, 13 aa, Homo sapiens
  CDR3 for alpha chain variable domain of TCR clone 69679 (TRAV1-1, TRAJ31)
CASYLNNNSRLMF

SEQ ID NO: 139358 - protein, 14 aa, Homo sapiens
  CDR3 for beta chain variable domain of TCR clone 69679 (TRBV4-1, TRBJ2-5)
CASSRSGSGETQYF

SEQ ID NO: 139359 - protein, 18 aa, Homo sapiens
  CDR3 for alpha chain variable domain of TCR clone 69680 (TRAV21, TRAJ52)
CAVRPSLAGGTSYGKLTF

SEQ ID NO: 139360 - protein, 14 aa, Homo sapiens
  CDR3 for beta chain variable domain of TCR clone 69680 (TRBV4-1, TRBJ2-2)
CASSQAVNTGELFF

SEQ ID NO: 139361 - protein, 12 aa, Homo sapiens
  CDR3 for alpha chain variable domain of TCR clone 69681 (TRAV12-2, TRAJ21)
CAVNRNFNKFYF

SEQ ID NO: 139362 - protein, 14 aa, Homo sapiens
  CDR3 for beta chain variable domain of TCR clone 69681 (TRBV12-4, TRBJ2-3)
CASSLSGATGTQYF

SEQ ID NO: 139363 - protein, 12 aa, Homo sapiens
  CDR3 for alpha chain variable domain of TCR clone 69682 (TRAV3, TRAJ27)
CAVRDKAGKSTF

SEQ ID NO: 139364 - protein, 14 aa, Homo sapiens
  CDR3 for beta chain variable domain of TCR clone 69682 (TRBV5-1, TRBJ1-2)
CASSVDSTNYGYTL

SEQ ID NO: 139365 - protein, 14 aa, Homo sapiens
  CDR3 for alpha chain variable domain of TCR clone 69683 (TRAV1-2, TRAJ8)
CAVREDTGFQKLVF

SEQ ID NO: 139366 - protein, 17 aa, Homo sapiens
  CDR3 for beta chain variable domain of TCR clone 69683 (TRBV11-2, TRBJ2-1)
CVSSLYPPGVEYNEQFF

SEQ ID NO: 139367 - protein, 13 aa, Homo sapiens
  CDR3 for alpha chain variable domain of TCR clone 69684 (TRAV12-1, TRAJ22)
CVASGGAARQLTF

SEQ ID NO: 139368 - protein, 12 aa, Homo sapiens
  CDR3 for beta chain variable domain of TCR clone 69684 (TRBV29-1, TRBJ2-3)
CSVTGGADTQYF

SEQ ID NO: 139369 - protein, 12 aa, Homo sapiens
  CDR3 for alpha chain variable domain of TCR clone 69685 (TRAV12-3, TRAJ20)
CAMVRGDYKLSF

SEQ ID NO: 139370 - protein, 18 aa, Homo sapiens
  CDR3 for beta chain variable domain of TCR clone 69685 (TRBV7-9, TRBJ2-7)
CASSLTTSGSRTWYEQYF

SEQ ID NO: 139371 - protein, 13 aa, Homo sapiens
  CDR3 for alpha chain variable domain of TCR clone 69686 (TRAV8-4, TRAJ10)
CAAFPGGGNKLTF

SEQ ID NO: 139372 - protein, 15 aa, Homo sapiens
  CDR3 for beta chain variable domain of TCR clone 69686 (TRBV2, TRBJ2-3)
CASSDFEKATDTQYF

SEQ ID NO: 139373 - protein, 14 aa, Homo sapiens
  CDR3 for alpha chain variable domain of TCR clone 69687 (TRAV38-1, TRAJ29)
CAFITPSGNTPLVF

SEQ ID NO: 139374 - protein, 16 aa, Homo sapiens
  CDR3 for beta chain variable domain of TCR clone 69687 (TRBV5-1, TRBJ2-2)
CASSSRTGGRTGELFF

SEQ ID NO: 139375 - protein, 14 aa, Homo sapiens
  CDR3 for alpha chain variable domain of TCR clone 69688 (TRAV20, TRAJ56)
CAVQFGGANSKLTF

SEQ ID NO: 139376 - protein, 14 aa, Homo sapiens
  CDR3 for beta chain variable domain of TCR clone 69688 (TRBV6-1, TRBJ1-3)
CASVQGGGGNTIYF

SEQ ID NO: 139377 - protein, 14 aa, Homo sapiens
  CDR3 for alpha chain variable domain of TCR clone 69689 (TRAV16, TRAJ15)
CALRPNQAGTALIF

SEQ ID NO: 139378 - protein, 12 aa, Homo sapiens
  CDR3 for beta chain variable domain of TCR clone 69689 (TRBV6-3, TRBJ2-1)
CASSGSYNEQFF

SEQ ID NO: 139379 - protein, 13 aa, Homo sapiens
  CDR3 for alpha chain variable domain of TCR clone 69690 (TRAV2, TRAJ15)
CAVASQAGTALIF

SEQ ID NO: 139380 - protein, 15 aa, Homo sapiens
  CDR3 for beta chain variable domain of TCR clone 69690 (TRBV7-3, TRBJ2-2)
CASSETGQGTEELFF

SEQ ID NO: 139381 - protein, 11 aa, Homo sapiens
  CDR3 for alpha chain variable domain of TCR clone 69691 (TRAV12-1, TRAJ21)
CVVNKFNKFYF

SEQ ID NO: 139382 - protein, 17 aa, Homo sapiens
  CDR3 for beta chain variable domain of TCR clone 69691 (TRBV7-8, TRBJ2-1)
CASSPPTGTLAYNEQFF

SEQ ID NO: 139383 - protein, 15 aa, Homo sapiens
  CDR3 for alpha chain variable domain of TCR clone 69692 (TRAV14/DV4, TRAJ49)
CAMREGMNTGNQFYF

SEQ ID NO: 139384 - protein, 15 aa, Homo sapiens
  CDR3 for beta chain variable domain of TCR clone 69692 (TRBV20-1, TRBJ1-1)
CSASRGVTGNTEAFF

SEQ ID NO: 139385 - protein, 12 aa, Homo sapiens
  CDR3 for alpha chain variable domain of TCR clone 69693 (TRAV2, TRAJ31)
CAVEDNNARRMF

SEQ ID NO: 139386 - protein, 16 aa, Homo sapiens
  CDR3 for beta chain variable domain of TCR clone 69693 (TRBV10-3, TRBJ2-1)
CAISGVGDGGGGEQFF

SEQ ID NO: 139387 - protein, 15 aa, Homo sapiens
  CDR3 for alpha chain variable domain of TCR clone 69694 (TRAV3, TRAJ5)
CAVRDLDTGRRALTL

SEQ ID NO: 139388 - protein, 13 aa, Homo sapiens
  CDR3 for beta chain variable domain of TCR clone 69694 (TRBV12-4, TRBJ2-7)
CTSSPTETYEQYF

SEQ ID NO: 139389 - protein, 16 aa, Homo sapiens
  CDR3 for alpha chain variable domain of TCR clone 69695 (TRAV30, TRAJ24)
CGTEIVDADSWGKFQF

SEQ ID NO: 139390 - protein, 16 aa, Homo sapiens
  CDR3 for beta chain variable domain of TCR clone 69695 (TRBV12-5, TRBJ2-5)
CASGPRTGGNQETQYF

SEQ ID NO: 139391 - protein, 14 aa, Homo sapiens
  CDR3 for alpha chain variable domain of TCR clone 69696 (TRAV12-2, TRAJ40)
CAVKIPSGTYKYIF

SEQ ID NO: 139392 - protein, 14 aa, Homo sapiens
  CDR3 for beta chain variable domain of TCR clone 69696 (TRBV2, TRBJ2-7)
CASSLTSGGYEQYF

SEQ ID NO: 139393 - protein, 15 aa, Homo sapiens
  CDR3 for alpha chain variable domain of TCR clone 69697 (TRAV2, TRAJ9)
CAVEDRGTGGFKTIF

SEQ ID NO: 139394 - protein, 14 aa, Homo sapiens
  CDR3 for beta chain variable domain of TCR clone 69697 (TRBV2, TRBJ2-7)
CASSLTSGGYEQYF

SEQ ID NO: 139395 - protein, 11 aa, Homo sapiens
  CDR3 for alpha chain variable domain of TCR clone 69698 (TRAV2, TRAJ13)
CASGGYQKVTC

SEQ ID NO: 139396 - protein, 16 aa, Homo sapiens
  CDR3 for beta chain variable domain of TCR clone 69698 (TRBV6-1, TRBJ2-5)
CASSETLDRGAETQYF

SEQ ID NO: 139397 - protein, 18 aa, Homo sapiens
  CDR3 for alpha chain variable domain of TCR clone 69699 (TRAV12-3, TRAJ52)
CSMSRTNAGGTSYGKLTF

SEQ ID NO: 139398 - protein, 17 aa, Homo sapiens
  CDR3 for beta chain variable domain of TCR clone 69699 (TRBV7-3, TRBJ2-3)
CASSLMKRMRGADTQYF

SEQ ID NO: 139399 - protein, 13 aa, Homo sapiens
  CDR3 for alpha chain variable domain of TCR clone 69700 (TRAV23/DV6, TRAJ15)
CAALPAGRTCSDL

SEQ ID NO: 139400 - protein, 14 aa, Homo sapiens
  CDR3 for beta chain variable domain of TCR clone 69700 (TRBV7-9, TRBJ1-2)
CASSRQGANYGYTF

SEQ ID NO: 139401 - protein, 14 aa, Homo sapiens
  CDR3 for alpha chain variable domain of TCR clone 69701 (TRAV26-1, TRAJ38)
CIADNAGNNRKLIW

SEQ ID NO: 139402 - protein, 14 aa, Homo sapiens
  CDR3 for beta chain variable domain of TCR clone 69701 (TRBV20-1, TRBJ1-3)
CSASPTGAGNTMYF

SEQ ID NO: 139403 - protein, 15 aa, Homo sapiens
  CDR3 for alpha chain variable domain of TCR clone 69702 (TRAV12-2, TRAJ53)
CAGNGGGGSNYKLTF

SEQ ID NO: 139404 - protein, 14 aa, Homo sapiens
  CDR3 for beta chain variable domain of TCR clone 69702 (TRBV18, TRBJ2-7)
CASSPRGGAYEQYF

SEQ ID NO: 139405 - protein, 12 aa, Homo sapiens
  CDR3 for alpha chain variable domain of TCR clone 69703 (TRAV17, TRAJ57)
CATDGGSEKLVF

SEQ ID NO: 139406 - protein, 14 aa, Homo sapiens
  CDR3 for beta chain variable domain of TCR clone 69703 (TRBV20-1, TRBJ1-6)
CSARGTGYNSPLHF

SEQ ID NO: 139407 - protein, 15 aa, Homo sapiens
  CDR3 for alpha chain variable domain of TCR clone 69704 (TRAV3, TRAJ32)
CAVRSYGGATNKLIF

SEQ ID NO: 139408 - protein, 13 aa, Homo sapiens
  CDR3 for beta chain variable domain of TCR clone 69704 (TRBV20-1, TRBJ2-7)
CSARPSTNYEQYF

SEQ ID NO: 139409 - protein, 14 aa, Homo sapiens
  CDR3 for alpha chain variable domain of TCR clone 69705 (TRAV2, TRAJ9)
CAVEDRSGGFKAIF

SEQ ID NO: 139410 - protein, 14 aa, Homo sapiens
  CDR3 for beta chain variable domain of TCR clone 69705 (TRBV7-2, TRBJ2-7)
CASSLPPGQGPQYF

SEQ ID NO: 139411 - protein, 16 aa, Homo sapiens
  CDR3 for alpha chain variable domain of TCR clone 69706 (TRAV30, TRAJ24)
CGTEIVDADSWGKFQS

SEQ ID NO: 139412 - protein, 17 aa, Homo sapiens
  CDR3 for beta chain variable domain of TCR clone 69706 (TRBV20-1, TRBJ2-1)
CSASSSGLAGSYNEQFF

SEQ ID NO: 139413 - protein, 12 aa, Homo sapiens
  CDR3 for alpha chain variable domain of TCR clone 69707 (TRAV1-1, TRAJ39)
CAVPVVGNRLTF

SEQ ID NO: 139414 - protein, 15 aa, Homo sapiens
  CDR3 for beta chain variable domain of TCR clone 69707 (TRBV19, TRBJ1-6)
CASSTQGAVGSPLHF

SEQ ID NO: 139415 - protein, 11 aa, Homo sapiens
  CDR3 for alpha chain variable domain of TCR clone 69708 (TRAV12-3, TRAJ27)
CAMANAGKSTF

SEQ ID NO: 139416 - protein, 17 aa, Homo sapiens
  CDR3 for beta chain variable domain of TCR clone 69708 (TRBV11-2, TRBJ2-1)
CASSLYPPGVEYNEQFF

SEQ ID NO: 139417 - protein, 13 aa, Homo sapiens
  CDR3 for alpha chain variable domain of TCR clone 69709 (TRAV20, TRAJ20)
CAVQAGSGYKLSF

SEQ ID NO: 139418 - protein, 17 aa, Homo sapiens
  CDR3 for beta chain variable domain of TCR clone 69709 (TRBV7-3, TRBJ2-5)
CASSLGLAGARGETQYF

SEQ ID NO: 139419 - protein, 16 aa, Homo sapiens
  CDR3 for alpha chain variable domain of TCR clone 69710 (TRAV1-2, TRAJ10)
CAVRGVLTGGGNKLTF

SEQ ID NO: 139420 - protein, 14 aa, Homo sapiens
  CDR3 for beta chain variable domain of TCR clone 69710 (TRBV9, TRBJ2-2)
CASSVGQGAGELFF

SEQ ID NO: 139421 - protein, 14 aa, Homo sapiens
  CDR3 for alpha chain variable domain of TCR clone 69711 (TRAV13-1, TRAJ31)
CAASSRPNNARPMF

SEQ ID NO: 139422 - protein, 15 aa, Homo sapiens
  CDR3 for beta chain variable domain of TCR clone 69711 (TRBV4-2, TRBJ2-4)
CASSPLGAAKNIQYF

SEQ ID NO: 139423 - protein, 16 aa, Homo sapiens
  CDR3 for alpha chain variable domain of TCR clone 69712 (TRAV30, TRAJ24)
CGTEIVDADSWGKFQF

SEQ ID NO: 139424 - protein, 14 aa, Homo sapiens
  CDR3 for beta chain variable domain of TCR clone 69712 (TRBV15, TRBJ2-7)
CATSPDRGLYEQYF

SEQ ID NO: 139425 - protein, 17 aa, Homo sapiens
  CDR3 for alpha chain variable domain of TCR clone 69713 (TRAV8-2, TRAJ17)
CVVGDRRFKAAGNKLTF

SEQ ID NO: 139426 - protein, 18 aa, Homo sapiens
  CDR3 for beta chain variable domain of TCR clone 69713 (TRBV7-9, TRBJ2-7)
CASSLTTSGSRTWYEQYF

SEQ ID NO: 139427 - protein, 12 aa, Homo sapiens
  CDR3 for alpha chain variable domain of TCR clone 69714 (TRAV21, TRAJ9)
CAVRLGGFKTIF

SEQ ID NO: 139428 - protein, 15 aa, Homo sapiens
  CDR3 for beta chain variable domain of TCR clone 69714 (TRBV7-9, TRBJ2-2)
CASGPLDTFPGELFF

SEQ ID NO: 139429 - protein, 15 aa, Homo sapiens
  CDR3 for alpha chain variable domain of TCR clone 69715 (TRAV35, TRAJ23)
CAGPLGNNQGGKLIS

SEQ ID NO: 139430 - protein, 14 aa, Homo sapiens
  CDR3 for beta chain variable domain of TCR clone 69715 (TRBV7-9, TRBJ1-1)
CASTPLQSYTEAFF

SEQ ID NO: 139431 - protein, 13 aa, Homo sapiens
  CDR3 for alpha chain variable domain of TCR clone 69716 (TRAV21, TRAJ36)
CAVIKTGSNNLFF

SEQ ID NO: 139432 - protein, 13 aa, Homo sapiens
  CDR3 for beta chain variable domain of TCR clone 69716 (TRBV29-1, TRBJ2-3)
CSATRGGRDTQYF

SEQ ID NO: 139433 - protein, 13 aa, Homo sapiens
  CDR3 for alpha chain variable domain of TCR clone 69717 (TRAV12-3, TRAJ54)
CAMTVQGAQKLVF

SEQ ID NO: 139434 - protein, 13 aa, Homo sapiens
  CDR3 for beta chain variable domain of TCR clone 69717 (TRBV20-1, TRBJ1-2)
CSARDQGAYGYTF

SEQ ID NO: 139435 - protein, 12 aa, Homo sapiens
  CDR3 for alpha chain variable domain of TCR clone 69718 (TRAV27, TRAJ42)
CAGVGSQGNLIF

SEQ ID NO: 139436 - protein, 13 aa, Homo sapiens
  CDR3 for beta chain variable domain of TCR clone 69718 (TRBV19, TRBJ2-7)
CASSIRSSYEQYF

SEQ ID NO: 139437 - protein, 23 aa, Homo sapiens
  CDR3 for alpha chain variable domain of TCR clone 69719 (TRAV3, TRAJ42)
CAVRRLEEAKEISSLEKALNSLL

SEQ ID NO: 139438 - protein, 14 aa, Homo sapiens
  CDR3 for beta chain variable domain of TCR clone 69719 (TRBV19, TRBJ2-5)
CASSSSGIQETQYF

SEQ ID NO: 139439 - protein, 13 aa, Homo sapiens
  CDR3 for alpha chain variable domain of TCR clone 69720 (TRAV20, TRAJ37)
CAGCSSNTGKLFF

SEQ ID NO: 139440 - protein, 11 aa, Homo sapiens
  CDR3 for beta chain variable domain of TCR clone 69720 (TRBV12-4, TRBJ2-3)
CASTATDTQYF

SEQ ID NO: 139441 - protein, 15 aa, Homo sapiens
  CDR3 for alpha chain variable domain of TCR clone 69721 (TRAV26-1, TRAJ22)
CIVRVSFWFCKATDL

SEQ ID NO: 139442 - protein, 12 aa, Homo sapiens
  CDR3 for beta chain variable domain of TCR clone 69721 (TRBV6-3, TRBJ2-7)
CASSRQGYEQYF

SEQ ID NO: 139443 - protein, 15 aa, Homo sapiens
  CDR3 for alpha chain variable domain of TCR clone 69722 (TRAV26-1, TRAJ29)
CIVRVEGSGNTPLVF

SEQ ID NO: 139444 - protein, 12 aa, Homo sapiens
  CDR3 for beta chain variable domain of TCR clone 69722 (TRBV11-2, TRBJ2-1)
CASSPGNNEQFF

SEQ ID NO: 139445 - protein, 13 aa, Homo sapiens
  CDR3 for alpha chain variable domain of TCR clone 69723 (TRAV12-3, TRAJ7)
CAMTPYGNNRLAF

SEQ ID NO: 139446 - protein, 16 aa, Homo sapiens
  CDR3 for beta chain variable domain of TCR clone 69723 (TRBV19, TRBJ2-1)
CASSKAGPSSYNEQFF

SEQ ID NO: 139447 - protein, 19 aa, Homo sapiens
  CDR3 for alpha chain variable domain of TCR clone 69724 (TRAV38-1, TRAJ53)
CAFMKHGRESGGSNYKLTF

SEQ ID NO: 139448 - protein, 13 aa, Homo sapiens
  CDR3 for beta chain variable domain of TCR clone 69724 (TRBV19, TRBJ2-7)
CASSPRQSYEQYF

SEQ ID NO: 139449 - protein, 15 aa, Homo sapiens
  CDR3 for alpha chain variable domain of TCR clone 69725 (TRAV8-3, TRAJ23)
CAVGDRYNQGGKLIF

SEQ ID NO: 139450 - protein, 13 aa, Homo sapiens
  CDR3 for beta chain variable domain of TCR clone 69725 (TRBV20-1, TRBJ2-1)
CSARPPPGNGQFF

SEQ ID NO: 139451 - protein, 10 aa, Homo sapiens
  CDR3 for alpha chain variable domain of TCR clone 69726 (TRAV16, TRAJ22)
SAMYLRQLTF

SEQ ID NO: 139452 - protein, 17 aa, Homo sapiens
  CDR3 for beta chain variable domain of TCR clone 69726 (TRBV11-2, TRBJ2-1)
CASSLYPPGVEYNEQFF

SEQ ID NO: 139453 - protein, 11 aa, Homo sapiens
  CDR3 for alpha chain variable domain of TCR clone 69727 (TRAV2, TRAJ13)
CASGGYQKVTF

SEQ ID NO: 139454 - protein, 13 aa, Homo sapiens
  CDR3 for beta chain variable domain of TCR clone 69727 (TRBV12-4, TRBJ1-5)
CASSPDRAQPQHF

SEQ ID NO: 139455 - protein, 14 aa, Homo sapiens
  CDR3 for alpha chain variable domain of TCR clone 69728 (TRAV29/DV5, TRAJ57)
CAASLRGGSEKLVF

SEQ ID NO: 139456 - protein, 12 aa, Homo sapiens
  CDR3 for beta chain variable domain of TCR clone 69728 (TRBV6-3, TRBJ2-7)
CASSLTPYEQYF

SEQ ID NO: 139457 - protein, 12 aa, Homo sapiens
  CDR3 for alpha chain variable domain of TCR clone 69729 (TRAV26-1, TRAJ36)
RIVRVRADNLFF

SEQ ID NO: 139458 - protein, 14 aa, Homo sapiens
  CDR3 for beta chain variable domain of TCR clone 69729 (TRBV14, TRBJ2-3)
CASSRKLAADTQYF

SEQ ID NO: 139459 - protein, 12 aa, Homo sapiens
  CDR3 for alpha chain variable domain of TCR clone 69730 (TRAV13-2, TRAJ23)
CAERHRGGKLIF

SEQ ID NO: 139460 - protein, 13 aa, Homo sapiens
  CDR3 for beta chain variable domain of TCR clone 69730 (TRBV6-5, TRBJ2-5)
CASSPQGGETQYF

SEQ ID NO: 139461 - protein, 13 aa, Homo sapiens
  CDR3 for alpha chain variable domain of TCR clone 69731 (TRAV12-3, TRAJ40)
CAMSDSGTYKYIF

SEQ ID NO: 139462 - protein, 14 aa, Homo sapiens
  CDR3 for beta chain variable domain of TCR clone 69731 (TRBV19, TRBJ2-1)
CASPTFVLSGEQFF

SEQ ID NO: 139463 - protein, 18 aa, Homo sapiens
  CDR3 for alpha chain variable domain of TCR clone 69732 (TRAV26-1, TRAJ37)
CIVRVDMHGSSNTGKLIF

SEQ ID NO: 139464 - protein, 15 aa, Homo sapiens
  CDR3 for beta chain variable domain of TCR clone 69732 (TRBV20-1, TRBJ2-7)
CSARVLASPLYEQYL

SEQ ID NO: 139465 - protein, 14 aa, Homo sapiens
  CDR3 for alpha chain variable domain of TCR clone 69733 (TRAV26-1, TRAJ45)
CIEVTGGGADGLTF

SEQ ID NO: 139466 - protein, 17 aa, Homo sapiens
  CDR3 for beta chain variable domain of TCR clone 69733 (TRBV13, TRBJ2-3)
CASSLSRVAGGRNTQYF

SEQ ID NO: 139467 - protein, 13 aa, Homo sapiens
  CDR3 for alpha chain variable domain of TCR clone 69734 (TRAV22, TRAJ37)
CAVPSSNTGKLIF

SEQ ID NO: 139468 - protein, 16 aa, Homo sapiens
  CDR3 for beta chain variable domain of TCR clone 69734 (TRBV12-4, TRBJ1-5)
CASSRPVGGSNQPQHF

SEQ ID NO: 139469 - protein, 13 aa, Homo sapiens
  CDR3 for alpha chain variable domain of TCR clone 69735 (TRAV17, TRAJ9)
CATDYTGGFKTIF

SEQ ID NO: 139470 - protein, 16 aa, Homo sapiens
  CDR3 for beta chain variable domain of TCR clone 69735 (TRBV2, TRBJ2-5)
CASSETQGVGEETQYF

SEQ ID NO: 139471 - protein, 11 aa, Homo sapiens
  CDR3 for alpha chain variable domain of TCR clone 69736 (TRAV21, TRAJ34)
CAVDNTDKLIF

SEQ ID NO: 139472 - protein, 15 aa, Homo sapiens
  CDR3 for beta chain variable domain of TCR clone 69736 (TRBV28, TRBJ1-3)
CASSMGWASGNTIYF

SEQ ID NO: 139473 - protein, 13 aa, Homo sapiens
  CDR3 for alpha chain variable domain of TCR clone 69737 (TRAV12-2, TRAJ24)
RAVSTDSWGKLQF

SEQ ID NO: 139474 - protein, 12 aa, Homo sapiens
  CDR3 for beta chain variable domain of TCR clone 69737 (TRBV7-6, TRBJ2-7)
CASSLADSEQYF

SEQ ID NO: 139475 - protein, 16 aa, Homo sapiens
  CDR3 for alpha chain variable domain of TCR clone 69738 (TRAV3, TRAJ10)
CAVRDMRAGGGNKLTF

SEQ ID NO: 139476 - protein, 19 aa, Homo sapiens
  CDR3 for beta chain variable domain of TCR clone 69738 (TRBV4-3, TRBJ2-7)
CISAPAAKQPSGTPYEQYF

SEQ ID NO: 139477 - protein, 13 aa, Homo sapiens
  CDR3 for alpha chain variable domain of TCR clone 69739 (TRAV27, TRAJ29)
CAGAHSGNTPLVF

SEQ ID NO: 139478 - protein, 16 aa, Homo sapiens
  CDR3 for beta chain variable domain of TCR clone 69739 (TRBV19, TRBJ2-2)
CASRSPGTGATGELFF

SEQ ID NO: 139479 - protein, 14 aa, Homo sapiens
  CDR3 for alpha chain variable domain of TCR clone 69740 (TRAV1-2, TRAJ16)
CAVNRCSDGQKLLF

SEQ ID NO: 139480 - protein, 12 aa, Homo sapiens
  CDR3 for beta chain variable domain of TCR clone 69740 (TRBV24-1, TRBJ1-1)
CATLYPDTEAFF

SEQ ID NO: 139481 - protein, 18 aa, Homo sapiens
  CDR3 for alpha chain variable domain of TCR clone 69741 (TRAV21, TRAJ52)
CAVRPSPAGGTSYGKLTF

SEQ ID NO: 139482 - protein, 16 aa, Homo sapiens
  CDR3 for beta chain variable domain of TCR clone 69741 (TRBV7-3, TRBJ2-1)
CASSLEGYRSYNEQLF

SEQ ID NO: 139483 - protein, 14 aa, Homo sapiens
  CDR3 for alpha chain variable domain of TCR clone 69742 (TRAV1-2, TRAJ16)
CAVNRFSDGQKLLF

SEQ ID NO: 139484 - protein, 15 aa, Homo sapiens
  CDR3 for beta chain variable domain of TCR clone 69742 (TRBV12-4, TRBJ2-1)
CASSPLSGRNNEQFF

SEQ ID NO: 139485 - protein, 12 aa, Homo sapiens
  CDR3 for alpha chain variable domain of TCR clone 69743 (TRAV27, TRAJ35)
CAGADFGNVLHC

SEQ ID NO: 139486 - protein, 11 aa, Homo sapiens
  CDR3 for beta chain variable domain of TCR clone 69743 (TRBV12-4, TRBJ2-3)
CASTATDTQYF

SEQ ID NO: 139487 - protein, 12 aa, Homo sapiens
  CDR3 for alpha chain variable domain of TCR clone 69744 (TRAV12-3, TRAJ17)
CAMTLTGNKLTF

SEQ ID NO: 139488 - protein, 17 aa, Homo sapiens
  CDR3 for beta chain variable domain of TCR clone 69744 (TRBV20-1, TRBJ2-1)
CSASSSGLAGSYNGQFF

SEQ ID NO: 139489 - protein, 14 aa, Homo sapiens
  CDR3 for alpha chain variable domain of TCR clone 69745 (TRAV12-3, TRAJ10)
SHLPLTVGGNKLTF

SEQ ID NO: 139490 - protein, 15 aa, Homo sapiens
  CDR3 for beta chain variable domain of TCR clone 69745 (TRBV7-9, TRBJ1-4)
CASSRTGGFNEKLFF

SEQ ID NO: 139491 - protein, 11 aa, Homo sapiens
  CDR3 for alpha chain variable domain of TCR clone 69746 (TRAV12-1, TRAJ34)
CVVNQGRELIF

SEQ ID NO: 139492 - protein, 12 aa, Homo sapiens
  CDR3 for beta chain variable domain of TCR clone 69746 (TRBV2, TRBJ2-1)
CAYGPPGNEQFF

SEQ ID NO: 139493 - protein, 17 aa, Homo sapiens
  CDR3 for alpha chain variable domain of TCR clone 69747 (TRAV21, TRAJ52)
CAVGTNAGGTSYGRLTF

SEQ ID NO: 139494 - protein, 13 aa, Homo sapiens
  CDR3 for beta chain variable domain of TCR clone 69747 (TRBV5-1, TRBJ1-2)
CASSFSGNLGYTF

SEQ ID NO: 139495 - protein, 13 aa, Homo sapiens
  CDR3 for alpha chain variable domain of TCR clone 69748 (TRAV27, TRAJ8)
CAGGPTGFQKLVF

SEQ ID NO: 139496 - protein, 15 aa, Homo sapiens
  CDR3 for beta chain variable domain of TCR clone 69748 (TRBV6-1, TRBJ2-7)
CASRESMGDFYEQYF

SEQ ID NO: 139497 - protein, 12 aa, Homo sapiens
  CDR3 for alpha chain variable domain of TCR clone 69749 (TRAV25, TRAJ29)
CAGHSGNTPLVF

SEQ ID NO: 139498 - protein, 14 aa, Homo sapiens
  CDR3 for beta chain variable domain of TCR clone 69749 (TRBV6-1, TRBJ2-7)
CASTRTGDYYEHYF

SEQ ID NO: 139499 - protein, 14 aa, Homo sapiens
  CDR3 for alpha chain variable domain of TCR clone 69750 (TRAV35, TRAJ22)
CAGLRPGSARQLTF

SEQ ID NO: 139500 - protein, 16 aa, Homo sapiens
  CDR3 for beta chain variable domain of TCR clone 69750 (TRBV5-1, TRBJ2-2)
CASSSRTGGRTGELFF

SEQ ID NO: 139501 - protein, 14 aa, Homo sapiens
  CDR3 for alpha chain variable domain of TCR clone 69751 (TRAV2, TRAJ9)
CAVEDRGGGFETIF

SEQ ID NO: 139502 - protein, 16 aa, Homo sapiens
  CDR3 for beta chain variable domain of TCR clone 69751 (TRBV7-3, TRBJ2-1)
CASSLEGYRSYNEQFF

SEQ ID NO: 139503 - protein, 14 aa, Homo sapiens
  CDR3 for alpha chain variable domain of TCR clone 69752 (TRAV12-2, TRAJ40)
CAVKIPSGTYKYIF

SEQ ID NO: 139504 - protein, 11 aa, Homo sapiens
  CDR3 for beta chain variable domain of TCR clone 69752 (TRBV11-2, TRBJ2-2)
CASSLPGELFF

SEQ ID NO: 139505 - protein, 13 aa, Homo sapiens
  CDR3 for alpha chain variable domain of TCR clone 69753 (TRAV2, TRAJ40)
RAVVTSGTYKYIF

SEQ ID NO: 139506 - protein, 16 aa, Homo sapiens
  CDR3 for beta chain variable domain of TCR clone 69753 (TRBV29-1, TRBJ1-2)
CSVEANRDIANYGYTF

SEQ ID NO: 139507 - protein, 17 aa, Homo sapiens
  CDR3 for alpha chain variable domain of TCR clone 69754 (TRAV26-1, TRAJ46)
IASSESEKKSSGDKLTF

SEQ ID NO: 139508 - protein, 16 aa, Homo sapiens
  CDR3 for beta chain variable domain of TCR clone 69754 (TRBV27, TRBJ2-2)
CASSFRGLVRTGEPFF

SEQ ID NO: 139509 - protein, 14 aa, Homo sapiens
  CDR3 for alpha chain variable domain of TCR clone 69755 (TRAV1-2, TRAJ8)
CAVREDTGFQKLVF

SEQ ID NO: 139510 - protein, 16 aa, Homo sapiens
  CDR3 for beta chain variable domain of TCR clone 69755 (TRBV20-1, TRBJ2-4)
CSARAILAGQGDMQYF

SEQ ID NO: 139511 - protein, 16 aa, Homo sapiens
  CDR3 for alpha chain variable domain of TCR clone 69756 (TRAV1-1, TRAJ29)
FAVRSTRNSGNTPLVF

SEQ ID NO: 139512 - protein, 16 aa, Homo sapiens
  CDR3 for beta chain variable domain of TCR clone 69756 (TRBV27, TRBJ1-1)
CASSSRGRTGYTEAFF

SEQ ID NO: 139513 - protein, 14 aa, Homo sapiens
  CDR3 for alpha chain variable domain of TCR clone 69757 (TRAV12-2, TRAJ13)
CAVKKTGGYQKVTF

SEQ ID NO: 139514 - protein, 12 aa, Homo sapiens
  CDR3 for beta chain variable domain of TCR clone 69757 (TRBV14, TRBJ2-7)
CASSSLKGEQYF

SEQ ID NO: 139515 - protein, 17 aa, Homo sapiens
  CDR3 for alpha chain variable domain of TCR clone 69758 (TRAV3, TRAJ42)
CAVRDRDYGGSQGNLIF

SEQ ID NO: 139516 - protein, 13 aa, Homo sapiens
  CDR3 for beta chain variable domain of TCR clone 69758 (TRBV7-2, TRBJ2-2)
CASSLAVTGELFF

SEQ ID NO: 139517 - protein, 13 aa, Homo sapiens
  CDR3 for alpha chain variable domain of TCR clone 69759 (TRAV3, TRAJ21)
CAVREPDFNKFYF

SEQ ID NO: 139518 - protein, 13 aa, Homo sapiens
  CDR3 for beta chain variable domain of TCR clone 69759 (TRBV20-1, TRBJ1-1)
RSARGGGNTEAFF

SEQ ID NO: 139519 - protein, 17 aa, Homo sapiens
  CDR3 for alpha chain variable domain of TCR clone 69760 (TRAV4, TRAJ18)
CLVVAAGRGSTLGRLYF

SEQ ID NO: 139520 - protein, 17 aa, Homo sapiens
  CDR3 for beta chain variable domain of TCR clone 69760 (TRBV28, TRBJ2-2)
CASSLATGMGDDGELFF

SEQ ID NO: 139521 - protein, 15 aa, Homo sapiens
  CDR3 for alpha chain variable domain of TCR clone 69761 (TRAV26-1, TRAJ29)
CIVRVEGSGNTPLVF

SEQ ID NO: 139522 - protein, 16 aa, Homo sapiens
  CDR3 for beta chain variable domain of TCR clone 69761 (TRBV7-9, TRBJ2-1)
CASSDVAGGSYNEQFF

SEQ ID NO: 139523 - protein, 15 aa, Homo sapiens
  CDR3 for alpha chain variable domain of TCR clone 69762 (TRAV3, TRAJ37)
CAVIRSSSNTGKLIF

SEQ ID NO: 139524 - protein, 16 aa, Homo sapiens
  CDR3 for beta chain variable domain of TCR clone 69762 (TRBV19, TRBJ2-1)
CASSKAGPSSYNEQFF

SEQ ID NO: 139525 - protein, 16 aa, Homo sapiens
  CDR3 for alpha chain variable domain of TCR clone 69763 (TRAV12-2, TRAJ32)
CAVNLVQGGATNKLIF

SEQ ID NO: 139526 - protein, 15 aa, Homo sapiens
  CDR3 for beta chain variable domain of TCR clone 69763 (TRBV20-1, TRBJ2-7)
CSARGPLAGGREQYF

SEQ ID NO: 139527 - protein, 15 aa, Homo sapiens
  CDR3 for alpha chain variable domain of TCR clone 69764 (TRAV12-1, TRAJ42)
CVVTRDGGSQGNLIF

SEQ ID NO: 139528 - protein, 16 aa, Homo sapiens
  CDR3 for beta chain variable domain of TCR clone 69764 (TRBV19, TRBJ2-1)
CASSKAGPSSYNEQFF

SEQ ID NO: 139529 - protein, 16 aa, Homo sapiens
  CDR3 for alpha chain variable domain of TCR clone 69765 (TRAV1-2, TRAJ15)
CAVRDEVSQAGTALIF

SEQ ID NO: 139530 - protein, 19 aa, Homo sapiens
  CDR3 for beta chain variable domain of TCR clone 69765 (TRBV11-2, TRBJ2-2)
LRTRPCISVPAAYPGSCFF

SEQ ID NO: 139531 - protein, 14 aa, Homo sapiens
  CDR3 for alpha chain variable domain of TCR clone 69766 (TRAV1-1, TRAJ27)
CAVIYNTNAGKSTF

SEQ ID NO: 139532 - protein, 15 aa, Homo sapiens
  CDR3 for beta chain variable domain of TCR clone 69766 (TRBV7-2, TRBJ2-1)
CASSSGLAEGNEQFF

SEQ ID NO: 139533 - protein, 13 aa, Homo sapiens
  CDR3 for alpha chain variable domain of TCR clone 69767 (TRAV3, TRAJ21)
CAVREPDFNKLYF

SEQ ID NO: 139534 - protein, 14 aa, Homo sapiens
  CDR3 for beta chain variable domain of TCR clone 69767 (TRBV5-5, TRBJ1-2)
CASSLDPYNYGYTF

SEQ ID NO: 139535 - protein, 12 aa, Homo sapiens
  CDR3 for alpha chain variable domain of TCR clone 69768 (TRAV21, TRAJ58)
CAAETSGSSLTF

SEQ ID NO: 139536 - protein, 15 aa, Homo sapiens
  CDR3 for beta chain variable domain of TCR clone 69768 (TRBV20-1, TRBJ2-7)
CSARDPVKGEGEQYF

SEQ ID NO: 139537 - protein, 12 aa, Homo sapiens
  CDR3 for alpha chain variable domain of TCR clone 69769 (TRAV30, TRAJ43)
CGTEARGNDMRF

SEQ ID NO: 139538 - protein, 13 aa, Homo sapiens
  CDR3 for beta chain variable domain of TCR clone 69769 (TRBV27, TRBJ2-7)
CASSFSQGYEQYF

SEQ ID NO: 139539 - protein, 13 aa, Homo sapiens
  CDR3 for alpha chain variable domain of TCR clone 69770 (TRAV35, TRAJ42)
CAGFPGSQGNLIF

SEQ ID NO: 139540 - protein, 15 aa, Homo sapiens
  CDR3 for beta chain variable domain of TCR clone 69770 (TRBV7-9, TRBJ1-5)
CASSQGHQPNQPQHF

SEQ ID NO: 139541 - protein, 17 aa, Homo sapiens
  CDR3 for alpha chain variable domain of TCR clone 69771 (TRAV13-1, TRAJ52)
CAAGRNAGGTSYGKLTF

SEQ ID NO: 139542 - protein, 15 aa, Homo sapiens
  CDR3 for beta chain variable domain of TCR clone 69771 (TRBV6-3, TRBJ2-7)
CSSSSPGTVFYEQYF

SEQ ID NO: 139543 - protein, 14 aa, Homo sapiens
  CDR3 for alpha chain variable domain of TCR clone 69772 (TRAV23/DV6, TRAJ11)
CAALIGGGYSTLTF

SEQ ID NO: 139544 - protein, 15 aa, Homo sapiens
  CDR3 for beta chain variable domain of TCR clone 69772 (TRBV6-3, TRBJ2-7)
CASSSPGTVFYEQYF

SEQ ID NO: 139545 - protein, 16 aa, Homo sapiens
  CDR3 for alpha chain variable domain of TCR clone 69773 (TRAV21, TRAJ33)
RAVSPASMDSNYQLIW

SEQ ID NO: 139546 - protein, 17 aa, Homo sapiens
  CDR3 for beta chain variable domain of TCR clone 69773 (TRBV2, TRBJ1-4)
CASSKRELTQGEEKLFF

SEQ ID NO: 139547 - protein, 14 aa, Homo sapiens
  CDR3 for alpha chain variable domain of TCR clone 69774 (TRAV27, TRAJ23)
CAGLSYNPGGKLIF

SEQ ID NO: 139548 - protein, 15 aa, Homo sapiens
  CDR3 for beta chain variable domain of TCR clone 69774 (TRBV19, TRBJ2-2)
CASSLNRGVTGELFF

SEQ ID NO: 139549 - protein, 15 aa, Homo sapiens
  CDR3 for alpha chain variable domain of TCR clone 69775 (TRAV3, TRAJ22)
CAVRDRGGSARQLTF

SEQ ID NO: 139550 - protein, 15 aa, Homo sapiens
  CDR3 for beta chain variable domain of TCR clone 69775 (TRBV7-3, TRBJ2-1)
CAGSPTGGGEVEQFF

SEQ ID NO: 139551 - protein, 12 aa, Homo sapiens
  CDR3 for alpha chain variable domain of TCR clone 69776 (TRAV13-2, TRAJ8)
CAPWLGFQKLVF

SEQ ID NO: 139552 - protein, 22 aa, Homo sapiens
  CDR3 for beta chain variable domain of TCR clone 69776 (TRBV29-1, TRBJ2-5)
AVSNMSPEDSSIYLCSAGTQYF

SEQ ID NO: 139553 - protein, 14 aa, Homo sapiens
  CDR3 for alpha chain variable domain of TCR clone 69777 (TRAV1-1, TRAJ27)
CAVIYNTNAGKSTF

SEQ ID NO: 139554 - protein, 15 aa, Homo sapiens
  CDR3 for beta chain variable domain of TCR clone 69777 (TRBV6-5, TRBJ2-1)
CASSYDAGAGNEQFF

SEQ ID NO: 139555 - protein, 12 aa, Homo sapiens
  CDR3 for alpha chain variable domain of TCR clone 69778 (TRAV21, TRAJ11)
CAATSGYSTLTF

SEQ ID NO: 139556 - protein, 14 aa, Homo sapiens
  CDR3 for beta chain variable domain of TCR clone 69778 (TRBV20-1, TRBJ2-7)
CSSPELAGVGEQYF

SEQ ID NO: 139557 - protein, 22 aa, Homo sapiens
  CDR3 for alpha chain variable domain of TCR clone 69779 (TRAV8-2, TRAJ45)
HLTKPSAHMSDAAEYSADGLTF

SEQ ID NO: 139558 - protein, 13 aa, Homo sapiens
  CDR3 for beta chain variable domain of TCR clone 69779 (TRBV7-3, TRBJ2-1)
CASSPVAYNEHFF

SEQ ID NO: 139559 - protein, 11 aa, Homo sapiens
  CDR3 for alpha chain variable domain of TCR clone 69780 (TRAV12-3, TRAJ27)
CAMANAGKSTF

SEQ ID NO: 139560 - protein, 13 aa, Homo sapiens
  CDR3 for beta chain variable domain of TCR clone 69780 (TRBV7-2, TRBJ1-1)
CASNLKGAKVAFF

SEQ ID NO: 139561 - protein, 10 aa, Homo sapiens
  CDR3 for alpha chain variable domain of TCR clone 69781 (TRAV1-2, TRAJ20)
CALNDYKLSF

SEQ ID NO: 139562 - protein, 14 aa, Homo sapiens
  CDR3 for beta chain variable domain of TCR clone 69781 (TRBV7-8, TRBJ2-5)
CASSATGGQETQYF

SEQ ID NO: 139563 - protein, 14 aa, Homo sapiens
  CDR3 for alpha chain variable domain of TCR clone 69782 (TRAV12-2, TRAJ17)
CAVLFKAAGNKLTF

SEQ ID NO: 139564 - protein, 13 aa, Homo sapiens
  CDR3 for beta chain variable domain of TCR clone 69782 (TRBV5-7, TRBJ1-2)
CASSLIRAPGYTF

SEQ ID NO: 139565 - protein, 14 aa, Homo sapiens
  CDR3 for alpha chain variable domain of TCR clone 69783 (TRAV21, TRAJ35)
CAVMPIGFGNVLHC

SEQ ID NO: 139566 - protein, 14 aa, Homo sapiens
  CDR3 for beta chain variable domain of TCR clone 69783 (TRBV7-9, TRBJ2-7)
CASSIKREEQYSGR

SEQ ID NO: 139567 - protein, 17 aa, Homo sapiens
  CDR3 for alpha chain variable domain of TCR clone 69784 (TRAV3, TRAJ6)
CAVGDGPRAGGSYIPTF

SEQ ID NO: 139568 - protein, 13 aa, Homo sapiens
  CDR3 for beta chain variable domain of TCR clone 69784 (TRBV12-5, TRBJ2-3)
CASGDRQSDTQYF

SEQ ID NO: 139569 - protein, 14 aa, Homo sapiens
  CDR3 for alpha chain variable domain of TCR clone 69785 (TRAV26-1, TRAJ45)
CIEVTGGGADGLTF

SEQ ID NO: 139570 - protein, 13 aa, Homo sapiens
  CDR3 for beta chain variable domain of TCR clone 69785 (TRBV7-6, TRBJ1-2)
CDSSLVADYGYTF

SEQ ID NO: 139571 - protein, 13 aa, Homo sapiens
  CDR3 for alpha chain variable domain of TCR clone 69786 (TRAV2, TRAJ40)
CAVVTSGTYKYIF

SEQ ID NO: 139572 - protein, 15 aa, Homo sapiens
  CDR3 for beta chain variable domain of TCR clone 69786 (TRBV7-2, TRBJ2-7)
CASSLKGALTYEQYF

SEQ ID NO: 139573 - protein, 14 aa, Homo sapiens
  CDR3 for alpha chain variable domain of TCR clone 69787 (TRAV2, TRAJ9)
CAVEERSGGFKTIF

SEQ ID NO: 139574 - protein, 13 aa, Homo sapiens
  CDR3 for beta chain variable domain of TCR clone 69787 (TRBV19, TRBJ1-2)
CASSVPGQDGYTF

SEQ ID NO: 139575 - protein, 14 aa, Homo sapiens
  CDR3 for alpha chain variable domain of TCR clone 69788 (TRAV12-3, TRAJ56)
CAMSVTGANGKLTF

SEQ ID NO: 139576 - protein, 17 aa, Homo sapiens
  CDR3 for beta chain variable domain of TCR clone 69788 (TRBV20-1, TRBJ2-3)
CSASLLGRGGNADTQYF

SEQ ID NO: 139577 - protein, 13 aa, Homo sapiens
  CDR3 for alpha chain variable domain of TCR clone 69789 (TRAV21, TRAJ15)
CAVANQAGTALIF

SEQ ID NO: 139578 - protein, 16 aa, Homo sapiens
  CDR3 for beta chain variable domain of TCR clone 69789 (TRBV12-5, TRBJ2-5)
CASGPRTSGNQETQYF

SEQ ID NO: 139579 - protein, 11 aa, Homo sapiens
  CDR3 for alpha chain variable domain of TCR clone 69790 (TRAV21, TRAJ34)
CAVTNTDKLIF

SEQ ID NO: 139580 - protein, 14 aa, Homo sapiens
  CDR3 for beta chain variable domain of TCR clone 69790 (TRBV7-8, TRBJ2-3)
CASSLEAGTDTQYF

SEQ ID NO: 139581 - protein, 15 aa, Homo sapiens
  CDR3 for alpha chain variable domain of TCR clone 69791 (TRAV3, TRAJ22)
CAVRDRGGSARQLTF

SEQ ID NO: 139582 - protein, 12 aa, Homo sapiens
  CDR3 for beta chain variable domain of TCR clone 69791 (TRBV12-4, TRBJ2-1)
CASSPGRNEQFF

SEQ ID NO: 139583 - protein, 13 aa, Homo sapiens
  CDR3 for alpha chain variable domain of TCR clone 69792 (TRAV8-6, TRAJ49)
CAVITNTGNQFYF

SEQ ID NO: 139584 - protein, 13 aa, Homo sapiens
  CDR3 for beta chain variable domain of TCR clone 69792 (TRBV7-9, TRBJ2-7)
CASSVAGAYEQYF

SEQ ID NO: 139585 - protein, 14 aa, Homo sapiens
  CDR3 for alpha chain variable domain of TCR clone 69793 (TRAV36/DV7, TRAJ44)
CCGANTGTASKLTF

SEQ ID NO: 139586 - protein, 14 aa, Homo sapiens
  CDR3 for beta chain variable domain of TCR clone 69793 (TRBV7-9, TRBJ2-2)
CASSLVQDTGELFF

SEQ ID NO: 139587 - protein, 11 aa, Homo sapiens
  CDR3 for alpha chain variable domain of TCR clone 69794 (TRAV12-2, TRAJ54)
CAVGGAQKLVF

SEQ ID NO: 139588 - protein, 17 aa, Homo sapiens
  CDR3 for beta chain variable domain of TCR clone 69794 (TRBV18, TRBJ1-3)
CASSPYPTGPSGNTIYF

SEQ ID NO: 139589 - protein, 14 aa, Homo sapiens
  CDR3 for alpha chain variable domain of TCR clone 69795 (TRAV12-1, TRAJ22)
CVAFSSGSARQLTF

SEQ ID NO: 139590 - protein, 17 aa, Homo sapiens
  CDR3 for beta chain variable domain of TCR clone 69795 (TRBV13, TRBJ2-3)
CASSLSRVAGGRNTQYF

SEQ ID NO: 139591 - protein, 14 aa, Homo sapiens
  CDR3 for alpha chain variable domain of TCR clone 69796 (TRAV20, TRAJ10)
CAVRVEGGGNKLTV

SEQ ID NO: 139592 - protein, 13 aa, Homo sapiens
  CDR3 for beta chain variable domain of TCR clone 69796 (TRBV13, TRBJ2-2)
CASSPGLTGELFF

SEQ ID NO: 139593 - protein, 16 aa, Homo sapiens
  CDR3 for alpha chain variable domain of TCR clone 69797 (TRAV3, TRAJ10)
CAVRDMNAGGGNKLTF

SEQ ID NO: 139594 - protein, 16 aa, Homo sapiens
  CDR3 for beta chain variable domain of TCR clone 69797 (TRBV12-5, TRBJ2-5)
CASGPRTSGNQETQYF

SEQ ID NO: 139595 - protein, 14 aa, Homo sapiens
  CDR3 for alpha chain variable domain of TCR clone 69798 (TRAV16, TRAJ37)
RALDISGNTGKLIF

SEQ ID NO: 139596 - protein, 14 aa, Homo sapiens
  CDR3 for beta chain variable domain of TCR clone 69798 (TRBV7-6, TRBJ2-7)
CASSFRQGADEQYF

SEQ ID NO: 139597 - protein, 14 aa, Homo sapiens
  CDR3 for alpha chain variable domain of TCR clone 69799 (TRAV23/DV6, TRAJ40)
CAASLTSGTYKYIF

SEQ ID NO: 139598 - protein, 14 aa, Homo sapiens
  CDR3 for beta chain variable domain of TCR clone 69799 (TRBV19, TRBJ2-1)
CASPTFVLSGEQFF

SEQ ID NO: 139599 - protein, 20 aa, Homo sapiens
  CDR3 for alpha chain variable domain of TCR clone 69800 (TRAV2, TRAJ9)
CAVGAEASKLSLEQEQDYLL

SEQ ID NO: 139600 - protein, 16 aa, Homo sapiens
  CDR3 for beta chain variable domain of TCR clone 69800 (TRBV13, TRBJ2-2)
CASSPRTGEHTGELFF

SEQ ID NO: 139601 - protein, 15 aa, Homo sapiens
  CDR3 for alpha chain variable domain of TCR clone 69801 (TRAV17, TRAJ57)
CATGPSQGGSEKLVF

SEQ ID NO: 139602 - protein, 16 aa, Homo sapiens
  CDR3 for beta chain variable domain of TCR clone 69801 (TRBV12-4, TRBJ1-5)
CASIQPVGGSNQPQHF

SEQ ID NO: 139603 - protein, 14 aa, Homo sapiens
  CDR3 for alpha chain variable domain of TCR clone 69802 (TRAV1-2, TRAJ16)
CAVNRFSDGQKLLF

SEQ ID NO: 139604 - protein, 13 aa, Homo sapiens
  CDR3 for beta chain variable domain of TCR clone 69802 (TRBV2, TRBJ1-1)
CASRWTVNTEAFF

SEQ ID NO: 139605 - protein, 12 aa, Homo sapiens
  CDR3 for alpha chain variable domain of TCR clone 69803 (TRAV35, TRAJ39)
LAPNNAGNMLTS

SEQ ID NO: 139606 - protein, 16 aa, Homo sapiens
  CDR3 for beta chain variable domain of TCR clone 69803 (TRBV2, TRBJ2-3)
CASSTSVEGVTDTQYF

SEQ ID NO: 139607 - protein, 11 aa, Homo sapiens
  CDR3 for alpha chain variable domain of TCR clone 69804 (TRAV2, TRAJ23)
CAVETRGKLIF

SEQ ID NO: 139608 - protein, 14 aa, Homo sapiens
  CDR3 for beta chain variable domain of TCR clone 69804 (TRBV2, TRBJ2-3)
FASSEGQNTDTQYF

SEQ ID NO: 139609 - protein, 14 aa, Homo sapiens
  CDR3 for alpha chain variable domain of TCR clone 69805 (TRAV1-2, TRAJ16)
CAVNRFSDGQKLLF

SEQ ID NO: 139610 - protein, 14 aa, Homo sapiens
  CDR3 for beta chain variable domain of TCR clone 69805 (TRBV7-2, TRBJ1-1)
CASSFLEGTTEAFF

SEQ ID NO: 139611 - protein, 16 aa, Homo sapiens
  CDR3 for alpha chain variable domain of TCR clone 69806 (TRAV12-3, TRAJ53)
CAMSPGSGGSNYKLTF

SEQ ID NO: 139612 - protein, 17 aa, Homo sapiens
  CDR3 for beta chain variable domain of TCR clone 69806 (TRBV11-1, TRBJ2-7)
CASSLTGSFGLDYEQYF

SEQ ID NO: 139613 - protein, 11 aa, Homo sapiens
  CDR3 for alpha chain variable domain of TCR clone 69807 (TRAV3, TRAJ21)
CAVGNFNKFSF

SEQ ID NO: 139614 - protein, 13 aa, Homo sapiens
  CDR3 for beta chain variable domain of TCR clone 69807 (TRBV7-9, TRBJ1-2)
CASSLKQNYGYTF

SEQ ID NO: 139615 - protein, 17 aa, Homo sapiens
  CDR3 for alpha chain variable domain of TCR clone 69808 (TRAV26-2, TRAJ42)
CILRDVGYGGSQGNLIF

SEQ ID NO: 139616 - protein, 13 aa, Homo sapiens
  CDR3 for beta chain variable domain of TCR clone 69808 (TRBV7-2, TRBJ2-2)
CASSSRPTGELFF

SEQ ID NO: 139617 - protein, 14 aa, Homo sapiens
  CDR3 for alpha chain variable domain of TCR clone 69809 (TRAV13-2, TRAJ37)
CAEKISGNTGKLIF

SEQ ID NO: 139618 - protein, 15 aa, Homo sapiens
  CDR3 for beta chain variable domain of TCR clone 69809 (TRBV11-2, TRBJ1-3)
CASSAHSSSGNTIYF

SEQ ID NO: 139619 - protein, 14 aa, Homo sapiens
  CDR3 for alpha chain variable domain of TCR clone 69810 (TRAV12-3, TRAJ10)
SHLPLTGGGNKLTF

SEQ ID NO: 139620 - protein, 12 aa, Homo sapiens
  CDR3 for beta chain variable domain of TCR clone 69810 (TRBV7-8, TRBJ2-7)
CASSLGYREQYF

SEQ ID NO: 139621 - protein, 11 aa, Homo sapiens
  CDR3 for alpha chain variable domain of TCR clone 69811 (TRAV3, TRAJ27)
CAVRDPQGTNA

SEQ ID NO: 139622 - protein, 17 aa, Homo sapiens
  CDR3 for beta chain variable domain of TCR clone 69811 (TRBV4-1, TRBJ2-7)
CASSQGRGLQTSYEQYF

SEQ ID NO: 139623 - protein, 18 aa, Homo sapiens
  CDR3 for alpha chain variable domain of TCR clone 69812 (TRAV9-2, TRAJ52)
CALSRHNAGGTSYGKLTF

SEQ ID NO: 139624 - protein, 13 aa, Homo sapiens
  CDR3 for beta chain variable domain of TCR clone 69812 (TRBV7-9, TRBJ1-2)
CASSLKQNYVYTF

SEQ ID NO: 139625 - protein, 14 aa, Homo sapiens
  CDR3 for alpha chain variable domain of TCR clone 69813 (TRAV1-2, TRAJ8)
CAVREDTGFQKLVF

SEQ ID NO: 139626 - protein, 14 aa, Homo sapiens
  CDR3 for beta chain variable domain of TCR clone 69813 (TRBV10-3, TRBJ1-6)
CAISGRGPNSPLHF

SEQ ID NO: 139627 - protein, 14 aa, Homo sapiens
  CDR3 for alpha chain variable domain of TCR clone 69814 (TRAV1-2, TRAJ16)
CAVNRFSDGQKLLF

SEQ ID NO: 139628 - protein, 15 aa, Homo sapiens
  CDR3 for beta chain variable domain of TCR clone 69814 (TRBV19, TRBJ2-2)
CASSPRTGWTGELFF

SEQ ID NO: 139629 - protein, 15 aa, Homo sapiens
  CDR3 for alpha chain variable domain of TCR clone 69815 (TRAV12-2, TRAJ53)
CAVNTGGGSNYKLTF

SEQ ID NO: 139630 - protein, 11 aa, Homo sapiens
  CDR3 for beta chain variable domain of TCR clone 69815 (TRBV7-8, TRBJ2-7)
CASSLSLEQYF

SEQ ID NO: 139631 - protein, 15 aa, Homo sapiens
  CDR3 for alpha chain variable domain of TCR clone 69816 (TRAV12-2, TRAJ43)
CAFAMRFGAGTRLTV

SEQ ID NO: 139632 - protein, 18 aa, Homo sapiens
  CDR3 for beta chain variable domain of TCR clone 69816 (TRBV20-1, TRBJ2-3)
CSASGLAGGPGTTDTQYF

SEQ ID NO: 139633 - protein, 14 aa, Homo sapiens
  CDR3 for alpha chain variable domain of TCR clone 69817 (TRAV1-2, TRAJ8)
CAVREDTGFQKPVF

SEQ ID NO: 139634 - protein, 15 aa, Homo sapiens
  CDR3 for beta chain variable domain of TCR clone 69817 (TRBV7-3, TRBJ2-1)
CASSLDGNSYNEQFF

SEQ ID NO: 139635 - protein, 15 aa, Homo sapiens
  CDR3 for alpha chain variable domain of TCR clone 69818 (TRAV12-2, TRAJ43)
CAFDMRFGAGTRLTV

SEQ ID NO: 139636 - protein, 15 aa, Homo sapiens
  CDR3 for beta chain variable domain of TCR clone 69818 (TRBV12-4, TRBJ2-5)
CASSPPTGLQETQYF

SEQ ID NO: 139637 - protein, 17 aa, Homo sapiens
  CDR3 for alpha chain variable domain of TCR clone 69819 (TRAV2, TRAJ23)
CCLLLCWERGLGGKLIF

SEQ ID NO: 139638 - protein, 20 aa, Homo sapiens
  CDR3 for beta chain variable domain of TCR clone 69819 (TRBV3-1, TRBJ2-6)
CASSPRPGLEGGAGANDLTF

SEQ ID NO: 139639 - protein, 11 aa, Homo sapiens
  CDR3 for alpha chain variable domain of TCR clone 69820 (TRAV12-1, TRAJ21)
CVVNNFNKFYF

SEQ ID NO: 139640 - protein, 17 aa, Homo sapiens
  CDR3 for beta chain variable domain of TCR clone 69820 (TRBV7-8, TRBJ2-1)
CASSPPTGTLAYNEQLF

SEQ ID NO: 139641 - protein, 12 aa, Homo sapiens
  CDR3 for alpha chain variable domain of TCR clone 69821 (TRAV17, TRAJ39)
CATGAAGNMLTF

SEQ ID NO: 139642 - protein, 14 aa, Homo sapiens
  CDR3 for beta chain variable domain of TCR clone 69821 (TRBV20-1, TRBJ1-1)
CSAQTRIGGTEAFF

SEQ ID NO: 139643 - protein, 13 aa, Homo sapiens
  CDR3 for alpha chain variable domain of TCR clone 69822 (TRAV2, TRAJ40)
CAVVTSGTYKYIF

SEQ ID NO: 139644 - protein, 14 aa, Homo sapiens
  CDR3 for beta chain variable domain of TCR clone 69822 (TRBV4-2, TRBJ2-1)
CASGPDRAYNEQFF

SEQ ID NO: 139645 - protein, 12 aa, Homo sapiens
  CDR3 for alpha chain variable domain of TCR clone 69823 (TRAV12-3, TRAJ41)
CAMSYSGYALNF

SEQ ID NO: 139646 - protein, 13 aa, Homo sapiens
  CDR3 for beta chain variable domain of TCR clone 69823 (TRBV7-3, TRBJ2-1)
CASSLDSDNEQFF

SEQ ID NO: 139647 - protein, 15 aa, Homo sapiens
  CDR3 for alpha chain variable domain of TCR clone 69824 (TRAV16, TRAJ20)
CALKGGPRADYKLSF

SEQ ID NO: 139648 - protein, 16 aa, Homo sapiens
  CDR3 for beta chain variable domain of TCR clone 69824 (TRBV11-3, TRBJ2-2)
CASSSRTSPGTGELFF

SEQ ID NO: 139649 - protein, 13 aa, Homo sapiens
  CDR3 for alpha chain variable domain of TCR clone 69825 (TRAV9-2, TRAJ53)
CALSGGSNYKLTF

SEQ ID NO: 139650 - protein, 14 aa, Homo sapiens
  CDR3 for beta chain variable domain of TCR clone 69825 (TRBV6-1, TRBJ1-3)
CASVQGGGGNTIYF

SEQ ID NO: 139651 - protein, 13 aa, Homo sapiens
  CDR3 for alpha chain variable domain of TCR clone 69826 (TRAV21, TRAJ57)
CAVTQGGSEKLVF

SEQ ID NO: 139652 - protein, 14 aa, Homo sapiens
  CDR3 for beta chain variable domain of TCR clone 69826 (TRBV12-4, TRBJ2-2)
CASSFWERDGELFF

SEQ ID NO: 139653 - protein, 14 aa, Homo sapiens
  CDR3 for alpha chain variable domain of TCR clone 69827 (TRAV23/DV6, TRAJ24)
CAASLSESWGKLQF

SEQ ID NO: 139654 - protein, 16 aa, Homo sapiens
  CDR3 for beta chain variable domain of TCR clone 69827 (TRBV7-9, TRBJ2-6)
CASSLKGPLRANVLTF

SEQ ID NO: 139655 - protein, 15 aa, Homo sapiens
  CDR3 for alpha chain variable domain of TCR clone 69828 (TRAV35, TRAJ23)
CAGPLGNNQGGKLIF

SEQ ID NO: 139656 - protein, 14 aa, Homo sapiens
  CDR3 for beta chain variable domain of TCR clone 69828 (TRBV7-9, TRBJ1-1)
CASTPLQSYTEASF

SEQ ID NO: 139657 - protein, 12 aa, Homo sapiens
  CDR3 for alpha chain variable domain of TCR clone 69829 (TRAV13-2, TRAJ23)
CAERHRGGKLIF

SEQ ID NO: 139658 - protein, 12 aa, Homo sapiens
  CDR3 for beta chain variable domain of TCR clone 69829 (TRBV18, TRBJ2-1)
CASSPGTSEGFF

SEQ ID NO: 139659 - protein, 21 aa, Homo sapiens
  CDR3 for alpha chain variable domain of TCR clone 69830 (TRAV8-3, TRAJ10)
CAVGHTHGRRKQTHLCDRHSA

SEQ ID NO: 139660 - protein, 10 aa, Homo sapiens
  CDR3 for beta chain variable domain of TCR clone 69830 (TRBV20-1, TRBJ2-5)
CSARFETQYF

SEQ ID NO: 139661 - protein, 13 aa, Homo sapiens
  CDR3 for alpha chain variable domain of TCR clone 69831 (TRAV17, TRAJ4)
CATKSGGYNKLIF

SEQ ID NO: 139662 - protein, 11 aa, Homo sapiens
  CDR3 for beta chain variable domain of TCR clone 69831 (TRBV20-1, TRBJ1-5)
ETTGGISPSIF

SEQ ID NO: 139663 - protein, 12 aa, Homo sapiens
  CDR3 for alpha chain variable domain of TCR clone 69832 (TRAV12-3, TRAJ17)
CAMTLTGNKLAF

SEQ ID NO: 139664 - protein, 13 aa, Homo sapiens
  CDR3 for beta chain variable domain of TCR clone 69832 (TRBV9, TRBJ2-2)
CASSPRPAGELFF

SEQ ID NO: 139665 - protein, 13 aa, Homo sapiens
  CDR3 for alpha chain variable domain of TCR clone 69833 (TRAV1-2, TRAJ36)
CAVDRTGANNLFF

SEQ ID NO: 139666 - protein, 14 aa, Homo sapiens
  CDR3 for beta chain variable domain of TCR clone 69833 (TRBV20-1, TRBJ2-5)
CSAREMTKQETQYF

SEQ ID NO: 139667 - protein, 14 aa, Homo sapiens
  CDR3 for alpha chain variable domain of TCR clone 69834 (TRAV8-4, TRAJ9)
CAVRINTGGFKTIF

SEQ ID NO: 139668 - protein, 12 aa, Homo sapiens
  CDR3 for beta chain variable domain of TCR clone 69834 (TRBV6-3, TRBJ2-7)
CASSLTPYEQYF

SEQ ID NO: 139669 - protein, 15 aa, Homo sapiens
  CDR3 for alpha chain variable domain of TCR clone 69835 (TRAV9-2, TRAJ4)
CALAPSSGGYNKLIF

SEQ ID NO: 139670 - protein, 13 aa, Homo sapiens
  CDR3 for beta chain variable domain of TCR clone 69835 (TRBV20-1, TRBJ1-2)
CSATGIQGSGYTF

SEQ ID NO: 139671 - protein, 14 aa, Homo sapiens
  CDR3 for alpha chain variable domain of TCR clone 69836 (TRAV12-1, TRAJ17)
CVVNYKAAGNKLTF

SEQ ID NO: 139672 - protein, 14 aa, Homo sapiens
  CDR3 for beta chain variable domain of TCR clone 69836 (TRBV4-1, TRBJ2-7)
CASSPVAGGDEQYF

SEQ ID NO: 139673 - protein, 13 aa, Homo sapiens
  CDR3 for alpha chain variable domain of TCR clone 69837 (TRAV35, TRAJ36)
CAGPRIGANNLFF

SEQ ID NO: 139674 - protein, 20 aa, Homo sapiens
  CDR3 for beta chain variable domain of TCR clone 69837 (TRBV28, TRBJ2-5)
CASSPPVVVPRDPVLRARHA

SEQ ID NO: 139675 - protein, 14 aa, Homo sapiens
  CDR3 for alpha chain variable domain of TCR clone 69838 (TRAV12-2, TRAJ13)
CAVRKTGGYQKVTF

SEQ ID NO: 139676 - protein, 15 aa, Homo sapiens
  CDR3 for beta chain variable domain of TCR clone 69838 (TRBV20-1, TRBJ2-7)
CSARDRVSGMDEQYF

SEQ ID NO: 139677 - protein, 11 aa, Homo sapiens
  CDR3 for alpha chain variable domain of TCR clone 69839 (TRAV12-2, TRAJ42)
CAPGSQGNLIF

SEQ ID NO: 139678 - protein, 15 aa, Homo sapiens
  CDR3 for beta chain variable domain of TCR clone 69839 (TRBV28, TRBJ1-1)
CASTSTRGLNTEAFF

SEQ ID NO: 139679 - protein, 17 aa, Homo sapiens
  CDR3 for alpha chain variable domain of TCR clone 69840 (TRAV3, TRAJ42)
CAVRDRDYGGSQGNLTF

SEQ ID NO: 139680 - protein, 14 aa, Homo sapiens
  CDR3 for beta chain variable domain of TCR clone 69840 (TRBV7-2, TRBJ2-5)
CASSPRGSSETQYF

SEQ ID NO: 139681 - protein, 11 aa, Homo sapiens
  CDR3 for alpha chain variable domain of TCR clone 69841 (TRAV3, TRAJ21)
CAVGNFNKFYF

SEQ ID NO: 139682 - protein, 16 aa, Homo sapiens
  CDR3 for beta chain variable domain of TCR clone 69841 (TRBV5-1, TRBJ2-2)
CASSFGDRPNTGELFF

SEQ ID NO: 139683 - protein, 12 aa, Homo sapiens
  CDR3 for alpha chain variable domain of TCR clone 69842 (TRAV1-1, TRAJ39)
CAVPVVGNMLTF

SEQ ID NO: 139684 - protein, 13 aa, Homo sapiens
  CDR3 for beta chain variable domain of TCR clone 69842 (TRBV7-3, TRBJ1-1)
CASSQDWGAEAFF

SEQ ID NO: 139685 - protein, 14 aa, Homo sapiens
  CDR3 for alpha chain variable domain of TCR clone 69843 (TRAV1-1, TRAJ27)
CAVIYNTNAGKSTF

SEQ ID NO: 139686 - protein, 15 aa, Homo sapiens
  CDR3 for beta chain variable domain of TCR clone 69843 (TRBV7-2, TRBJ2-2)
CASRRPGQNTGELFF

SEQ ID NO: 139687 - protein, 15 aa, Homo sapiens
  CDR3 for alpha chain variable domain of TCR clone 69844 (TRAV8-6, TRAJ48)
CCEPRFNFGNERLTF

SEQ ID NO: 139688 - protein, 15 aa, Homo sapiens
  CDR3 for beta chain variable domain of TCR clone 69844 (TRBV12-4, TRBJ2-2)
CASSPQPGSTGELFF

SEQ ID NO: 139689 - protein, 13 aa, Homo sapiens
  CDR3 for alpha chain variable domain of TCR clone 69845 (TRAV17, TRAJ22)
CAHHSGSARQLTF

SEQ ID NO: 139690 - protein, 18 aa, Homo sapiens
  CDR3 for beta chain variable domain of TCR clone 69845 (TRBV12-4, TRBJ2-2)
CASSLVAGTRGRTGELFF

SEQ ID NO: 139691 - protein, 13 aa, Homo sapiens
  CDR3 for alpha chain variable domain of TCR clone 69846 (TRAV13-2, TRAJ40)
CAEFTSGAYKYIF

SEQ ID NO: 139692 - protein, 12 aa, Homo sapiens
  CDR3 for beta chain variable domain of TCR clone 69846 (TRBV11-2, TRBJ2-2)
CASSLGGGELFF

SEQ ID NO: 139693 - protein, 17 aa, Homo sapiens
  CDR3 for alpha chain variable domain of TCR clone 69847 (TRAV13-1, TRAJ31)
CAPRDRLMFGDGTQLVV

SEQ ID NO: 139694 - protein, 15 aa, Homo sapiens
  CDR3 for beta chain variable domain of TCR clone 69847 (TRBV27, TRBJ2-1)
CASSNGGGSSNEQFF

SEQ ID NO: 139695 - protein, 12 aa, Homo sapiens
  CDR3 for alpha chain variable domain of TCR clone 69848 (TRAV13-2, TRAJ42)
CAEGGSQGNLIF

SEQ ID NO: 139696 - protein, 14 aa, Homo sapiens
  CDR3 for beta chain variable domain of TCR clone 69848 (TRBV25-1, TRBJ1-1)
CASTHLGGNTEAFF

SEQ ID NO: 139697 - protein, 13 aa, Homo sapiens
  CDR3 for alpha chain variable domain of TCR clone 69849 (TRAV8-3, TRAJ36)
CAVGATGANSLFF

SEQ ID NO: 139698 - protein, 15 aa, Homo sapiens
  CDR3 for beta chain variable domain of TCR clone 69849 (TRBV7-2, TRBJ1-2)
CTSSPRAGWNYGYTF

SEQ ID NO: 139699 - protein, 16 aa, Homo sapiens
  CDR3 for alpha chain variable domain of TCR clone 69850 (TRAV26-1, TRAJ53)
CIVRVAMGGSNYKLTY

SEQ ID NO: 139700 - protein, 12 aa, Homo sapiens
  CDR3 for beta chain variable domain of TCR clone 69850 (TRBV7-9, TRBJ1-5)
CASSPQGQPQHF

SEQ ID NO: 139701 - protein, 11 aa, Homo sapiens
  CDR3 for alpha chain variable domain of TCR clone 69851 (TRAV2, TRAJ33)
CAVDSNYQLIW

SEQ ID NO: 139702 - protein, 15 aa, Homo sapiens
  CDR3 for beta chain variable domain of TCR clone 69851 (TRBV19, TRBJ1-2)
CAISVGQVLNYGYTF

SEQ ID NO: 139703 - protein, 15 aa, Homo sapiens
  CDR3 for alpha chain variable domain of TCR clone 69852 (TRAV13-2, TRAJ50)
CAEEPLKTSYDKVIF

SEQ ID NO: 139704 - protein, 15 aa, Homo sapiens
  CDR3 for beta chain variable domain of TCR clone 69852 (TRBV7-2, TRBJ2-1)
CASTHGTGIYNEQFF

SEQ ID NO: 139705 - protein, 23 aa, Homo sapiens
  CDR3 for alpha chain variable domain of TCR clone 69853 (TRAV1-1, TRAJ11)
LLQELQMKDSASYFCAGYSTLTF

SEQ ID NO: 139706 - protein, 18 aa, Homo sapiens
  CDR3 for beta chain variable domain of TCR clone 69853 (TRBV7-9, TRBJ2-3)
CASSLDLAGLATPDTQYF

SEQ ID NO: 139707 - protein, 15 aa, Homo sapiens
  CDR3 for alpha chain variable domain of TCR clone 69854 (TRAV13-1, TRAJ44)
CAASRGGGTASKLTF

SEQ ID NO: 139708 - protein, 14 aa, Homo sapiens
  CDR3 for beta chain variable domain of TCR clone 69854 (TRBV7-2, TRBJ2-5)
CASSPRGSSETKYF

SEQ ID NO: 139709 - protein, 12 aa, Homo sapiens
  CDR3 for alpha chain variable domain of TCR clone 69855 (TRAV21, TRAJ33)
CAKMDSNYQLIW

SEQ ID NO: 139710 - protein, 14 aa, Homo sapiens
  CDR3 for beta chain variable domain of TCR clone 69855 (TRBV2, TRBJ2-7)
CSSSLTSGGYEQYF

SEQ ID NO: 139711 - protein, 18 aa, Homo sapiens
  CDR3 for alpha chain variable domain of TCR clone 69856 (TRAV26-1, TRAJ22)
CIVRVALISSGSARQLTF

SEQ ID NO: 139712 - protein, 13 aa, Homo sapiens
  CDR3 for beta chain variable domain of TCR clone 69856 (TRBV13, TRBJ2-5)
CASSPEVGETQYV

SEQ ID NO: 139713 - protein, 17 aa, Homo sapiens
  CDR3 for alpha chain variable domain of TCR clone 69857 (TRAV16, TRAJ42)
CALSPKLYGGSQGNIIF

SEQ ID NO: 139714 - protein, 13 aa, Homo sapiens
  CDR3 for beta chain variable domain of TCR clone 69857 (TRBV19, TRBJ1-5)
CASSTRRDQPQHF

SEQ ID NO: 139715 - protein, 14 aa, Homo sapiens
  CDR3 for alpha chain variable domain of TCR clone 69858 (TRAV1-2, TRAJ16)
CAVNRFSDGQKLLF

SEQ ID NO: 139716 - protein, 11 aa, Homo sapiens
  CDR3 for beta chain variable domain of TCR clone 69858 (TRBV29-1, TRBJ2-5)
CSEDRTGTQYY

SEQ ID NO: 139717 - protein, 13 aa, Homo sapiens
  CDR3 for alpha chain variable domain of TCR clone 69859 (TRAV3, TRAJ21)
CAVIEPDFNKFYF

SEQ ID NO: 139718 - protein, 13 aa, Homo sapiens
  CDR3 for beta chain variable domain of TCR clone 69859 (TRBV9, TRBJ2-1)
CASSPSGGNEQFF

SEQ ID NO: 139719 - protein, 14 aa, Homo sapiens
  CDR3 for alpha chain variable domain of TCR clone 69860 (TRAV2, TRAJ9)
CAVEDRSGGFKTIF

SEQ ID NO: 139720 - protein, 16 aa, Homo sapiens
  CDR3 for beta chain variable domain of TCR clone 69860 (TRBV19, TRBJ2-1)
CASSSKGTRSYNEQFF

SEQ ID NO: 139721 - protein, 12 aa, Homo sapiens
  CDR3 for alpha chain variable domain of TCR clone 69861 (TRAV12-3, TRAJ17)
CAMTLTGNKLTF

SEQ ID NO: 139722 - protein, 15 aa, Homo sapiens
  CDR3 for beta chain variable domain of TCR clone 69861 (TRBV6-1, TRBJ2-3)
CASSEIAHSTDTQYF

SEQ ID NO: 139723 - protein, 18 aa, Homo sapiens
  CDR3 for alpha chain variable domain of TCR clone 69862 (TRAV13-1, TRAJ52)
CAAKNPNAGGTSYGKLTF

SEQ ID NO: 139724 - protein, 16 aa, Homo sapiens
  CDR3 for beta chain variable domain of TCR clone 69862 (TRBV4-1, TRBJ2-3)
CASSQSTSGAEDTQYF

SEQ ID NO: 139725 - protein, 12 aa, Homo sapiens
  CDR3 for alpha chain variable domain of TCR clone 69863 (TRAV8-6, TRAJ4)
CAVSDHPNKLIF

SEQ ID NO: 139726 - protein, 21 aa, Homo sapiens
  CDR3 for beta chain variable domain of TCR clone 69863 (TRBV6-1, TRBJ1-1)
CASSGVGNYKGISGFDTEAFF

SEQ ID NO: 139727 - protein, 15 aa, Homo sapiens
  CDR3 for alpha chain variable domain of TCR clone 69864 (TRAV3, TRAJ32)
CAVSSYGGATNNLIF

SEQ ID NO: 139728 - protein, 13 aa, Homo sapiens
  CDR3 for beta chain variable domain of TCR clone 69864 (TRBV20-1, TRBJ2-7)
CSARPSTNYEQYF

SEQ ID NO: 139729 - protein, 14 aa, Homo sapiens
  CDR3 for alpha chain variable domain of TCR clone 69865 (TRAV35, TRAJ22)
CAGLRPGSARQLTF

SEQ ID NO: 139730 - protein, 12 aa, Homo sapiens
  CDR3 for beta chain variable domain of TCR clone 69865 (TRBV29-1, TRBJ2-3)
CSVTGGADTQYF

SEQ ID NO: 139731 - protein, 13 aa, Homo sapiens
  CDR3 for alpha chain variable domain of TCR clone 69866 (TRAV12-3, TRAJ13)
CAMSSGGYQKVTF

SEQ ID NO: 139732 - protein, 13 aa, Homo sapiens
  CDR3 for beta chain variable domain of TCR clone 69866 (TRBV20-1, TRBJ1-1)
CSAPPGGHTESFF

SEQ ID NO: 139733 - protein, 13 aa, Homo sapiens
  CDR3 for alpha chain variable domain of TCR clone 69867 (TRAV17, TRAJ9)
CATDYTGGFETIF

SEQ ID NO: 139734 - protein, 16 aa, Homo sapiens
  CDR3 for beta chain variable domain of TCR clone 69867 (TRBV7-7, TRBJ2-1)
CASSLASGTSYNGQFF

SEQ ID NO: 139735 - protein, 14 aa, Homo sapiens
  CDR3 for alpha chain variable domain of TCR clone 69868 (TRAV13-1, TRAJ40)
CAANMTSGTYKYIF

SEQ ID NO: 139736 - protein, 15 aa, Homo sapiens
  CDR3 for beta chain variable domain of TCR clone 69868 (TRBV7-3, TRBJ2-1)
CASSPTGGGEVEQFF

SEQ ID NO: 139737 - protein, 13 aa, Homo sapiens
  CDR3 for alpha chain variable domain of TCR clone 69869 (TRAV27, TRAJ57)
CRSAQGGSEKLVF

SEQ ID NO: 139738 - protein, 11 aa, Homo sapiens
  CDR3 for beta chain variable domain of TCR clone 69869 (TRBV11-2, TRBJ1-1)
RASSINTEAFF

SEQ ID NO: 139739 - protein, 13 aa, Homo sapiens
  CDR3 for alpha chain variable domain of TCR clone 69870 (TRAV27, TRAJ45)
CRSSGGGADGLTF

SEQ ID NO: 139740 - protein, 15 aa, Homo sapiens
  CDR3 for beta chain variable domain of TCR clone 69870 (TRBV9, TRBJ2-2)
RASSDFAGASGELFF

SEQ ID NO: 139741 - protein, 14 aa, Homo sapiens
  CDR3 for alpha chain variable domain of TCR clone 69871 (TRAV13-2, TRAJ43)
CAEIPTYNNHDMRF

SEQ ID NO: 139742 - protein, 15 aa, Homo sapiens
  CDR3 for beta chain variable domain of TCR clone 69871 (TRBV7-9, TRBJ2-2)
CASGPLDTFPGELFF

SEQ ID NO: 139743 - protein, 21 aa, Homo sapiens
  CDR3 for alpha chain variable domain of TCR clone 69872 (TRAV12-1, TRAJ32)
SSVIQPPTSMNYGGATKKLIF

SEQ ID NO: 139744 - protein, 18 aa, Homo sapiens
  CDR3 for beta chain variable domain of TCR clone 69872 (TRBV20-1, TRBJ2-3)
CSASGLAGGPGTTDTQYF

SEQ ID NO: 139745 - protein, 16 aa, Homo sapiens
  CDR3 for alpha chain variable domain of TCR clone 69873 (TRAV16, TRAJ4)
CALSRMFSGGYNKLIF

SEQ ID NO: 139746 - protein, 16 aa, Homo sapiens
  CDR3 for beta chain variable domain of TCR clone 69873 (TRBV2, TRBJ2-1)
CASRSPAGGKYNEQFF

SEQ ID NO: 139747 - protein, 13 aa, Homo sapiens
  CDR3 for alpha chain variable domain of TCR clone 69874 (TRAV29/DV5, TRAJ31)
CAASRNNNARLMF

SEQ ID NO: 139748 - protein, 13 aa, Homo sapiens
  CDR3 for beta chain variable domain of TCR clone 69874 (TRBV7-9, TRBJ2-5)
CASLSPGQETQYF

SEQ ID NO: 139749 - protein, 14 aa, Homo sapiens
  CDR3 for alpha chain variable domain of TCR clone 69875 (TRAV1-2, TRAJ8)
CAVREDTGFQKLVF

SEQ ID NO: 139750 - protein, 16 aa, Homo sapiens
  CDR3 for beta chain variable domain of TCR clone 69875 (TRBV27, TRBJ2-2)
CASSFRGLVRAGELFF

SEQ ID NO: 139751 - protein, 21 aa, Homo sapiens
  CDR3 for alpha chain variable domain of TCR clone 69876 (TRAV30, TRAJ43)
GLPAQLPRNLLPIIELNDMRF

SEQ ID NO: 139752 - protein, 14 aa, Homo sapiens
  CDR3 for beta chain variable domain of TCR clone 69876 (TRBV27, TRBJ2-1)
CASRHLGGGKEQFF

SEQ ID NO: 139753 - protein, 16 aa, Homo sapiens
  CDR3 for alpha chain variable domain of TCR clone 69877 (TRAV12-2, TRAJ52)
CRLANAGGTSYGKLTF

SEQ ID NO: 139754 - protein, 13 aa, Homo sapiens
  CDR3 for beta chain variable domain of TCR clone 69877 (TRBV19, TRBJ2-7)
CASSIRSSYEQYF

SEQ ID NO: 139755 - protein, 15 aa, Homo sapiens
  CDR3 for alpha chain variable domain of TCR clone 69878 (TRAV25, TRAJ53)
CPTSNSGGSNYKLTF

SEQ ID NO: 139756 - protein, 15 aa, Homo sapiens
  CDR3 for beta chain variable domain of TCR clone 69878 (TRBV9, TRBJ1-6)
CASSVAGTGDSPLHF

SEQ ID NO: 139757 - protein, 15 aa, Homo sapiens
  CDR3 for alpha chain variable domain of TCR clone 69879 (TRAV14/DV4, TRAJ39)
CAMRAVNNAGNMLTF

SEQ ID NO: 139758 - protein, 15 aa, Homo sapiens
  CDR3 for beta chain variable domain of TCR clone 69879 (TRBV20-1, TRBJ2-7)
CSARDRVSGMDEQYF

SEQ ID NO: 139759 - protein, 19 aa, Homo sapiens
  CDR3 for alpha chain variable domain of TCR clone 69880 (TRAV1-2, TRAJ26)
CLLPLCCERPDNYGQNFVF

SEQ ID NO: 139760 - protein, 15 aa, Homo sapiens
  CDR3 for beta chain variable domain of TCR clone 69880 (TRBV19, TRBJ1-5)
CASSIVWADNQPQHF

SEQ ID NO: 139761 - protein, 14 aa, Homo sapiens
  CDR3 for alpha chain variable domain of TCR clone 69881 (TRAV12-2, TRAJ10)
SHLPLTGGGNKLTF

SEQ ID NO: 139762 - protein, 14 aa, Homo sapiens
  CDR3 for beta chain variable domain of TCR clone 69881 (TRBV6-1, TRBJ1-3)
CASVQGGGGNTIYF

SEQ ID NO: 139763 - protein, 14 aa, Homo sapiens
  CDR3 for alpha chain variable domain of TCR clone 69882 (TRAV12-3, TRAJ47)
CAMSVREYGNTLVF

SEQ ID NO: 139764 - protein, 15 aa, Homo sapiens
  CDR3 for beta chain variable domain of TCR clone 69882 (TRBV20-1, TRBJ2-2)
CSARDTRLNTGELFF

SEQ ID NO: 139765 - protein, 14 aa, Homo sapiens
  CDR3 for alpha chain variable domain of TCR clone 69883 (TRAV27, TRAJ12)
CAGARMDSSYKFIF

SEQ ID NO: 139766 - protein, 18 aa, Homo sapiens
  CDR3 for beta chain variable domain of TCR clone 69883 (TRBV10-3, TRBJ2-7)
CAISESGRPSGGRVEQYF

SEQ ID NO: 139767 - protein, 14 aa, Homo sapiens
  CDR3 for alpha chain variable domain of TCR clone 69884 (TRAV1-2, TRAJ8)
CAVRGDTGFQKLVF

SEQ ID NO: 139768 - protein, 16 aa, Homo sapiens
  CDR3 for beta chain variable domain of TCR clone 69884 (TRBV12-4, TRBJ1-5)
CASSRPVGGSNQPQHF

SEQ ID NO: 139769 - protein, 14 aa, Homo sapiens
  CDR3 for alpha chain variable domain of TCR clone 69885 (TRAV21, TRAJ45)
CAVSSGGGADRLTF

SEQ ID NO: 139770 - protein, 15 aa, Homo sapiens
  CDR3 for beta chain variable domain of TCR clone 69885 (TRBV6-1, TRBJ2-4)
CASSEAVWTINIQYF

SEQ ID NO: 139771 - protein, 15 aa, Homo sapiens
  CDR3 for alpha chain variable domain of TCR clone 69886 (TRAV8-2, TRAJ40)
CVVSDRGSGTYKYIF

SEQ ID NO: 139772 - protein, 16 aa, Homo sapiens
  CDR3 for beta chain variable domain of TCR clone 69886 (TRBV12-5, TRBJ2-5)
CASGPRTSGNQETQYF

SEQ ID NO: 139773 - protein, 16 aa, Homo sapiens
  CDR3 for alpha chain variable domain of TCR clone 69887 (TRAV3, TRAJ23)
CAVTIGIYNQGGKLIF

SEQ ID NO: 139774 - protein, 17 aa, Homo sapiens
  CDR3 for beta chain variable domain of TCR clone 69887 (TRBV10-3, TRBJ2-6)
CAISESTAPSGANVLTF

SEQ ID NO: 139775 - protein, 13 aa, Homo sapiens
  CDR3 for alpha chain variable domain of TCR clone 69888 (TRAV9-2, TRAJ53)
CALSGGSNYKLTF

SEQ ID NO: 139776 - protein, 17 aa, Homo sapiens
  CDR3 for beta chain variable domain of TCR clone 69888 (TRBV11-2, TRBJ2-1)
CASSLYPPGVEYNGQFL

SEQ ID NO: 139777 - protein, 12 aa, Homo sapiens
  CDR3 for alpha chain variable domain of TCR clone 69889 (TRAV13-1, TRAJ49)
CAASIRSNQFYF

SEQ ID NO: 139778 - protein, 14 aa, Homo sapiens
  CDR3 for beta chain variable domain of TCR clone 69889 (TRBV7-2, TRBJ2-1)
CACSPGLAGNEQFF

SEQ ID NO: 139779 - protein, 12 aa, Homo sapiens
  CDR3 for alpha chain variable domain of TCR clone 69890 (TRAV8-3, TRAJ20)
CAVGANDYKLSI

SEQ ID NO: 139780 - protein, 16 aa, Homo sapiens
  CDR3 for beta chain variable domain of TCR clone 69890 (TRBV19, TRBJ2-2)
CASRSPGTGATGELFF

SEQ ID NO: 139781 - protein, 15 aa, Homo sapiens
  CDR3 for alpha chain variable domain of TCR clone 69891 (TRAV17, TRAJ42)
CATDHYVGSQGNLIF

SEQ ID NO: 139782 - protein, 14 aa, Homo sapiens
  CDR3 for beta chain variable domain of TCR clone 69891 (TRBV19, TRBJ2-5)
CASSIEHSQETQYF

SEQ ID NO: 139783 - protein, 14 aa, Homo sapiens
  CDR3 for alpha chain variable domain of TCR clone 69892 (TRAV35, TRAJ33)
CAGSSQDSNYQLIW

SEQ ID NO: 139784 - protein, 17 aa, Homo sapiens
  CDR3 for beta chain variable domain of TCR clone 69892 (TRBV20-1, TRBJ2-7)
CSAESGTSGHTSSTSGR

SEQ ID NO: 139785 - protein, 12 aa, Homo sapiens
  CDR3 for alpha chain variable domain of TCR clone 69893 (TRAV17, TRAJ4)
CATRGGYNKLIF

SEQ ID NO: 139786 - protein, 15 aa, Homo sapiens
  CDR3 for beta chain variable domain of TCR clone 69893 (TRBV20-1, TRBJ2-7)
CSARDRVSGMDEQYF

SEQ ID NO: 139787 - protein, 15 aa, Homo sapiens
  CDR3 for alpha chain variable domain of TCR clone 69894 (TRAV17, TRAJ52)
CATEAGGTSYGKLKF

SEQ ID NO: 139788 - protein, 14 aa, Homo sapiens
  CDR3 for beta chain variable domain of TCR clone 69894 (TRBV28, TRBJ1-5)
CASSLGVLVKPQHF

SEQ ID NO: 139789 - protein, 15 aa, Homo sapiens
  CDR3 for alpha chain variable domain of TCR clone 69895 (TRAV3, TRAJ22)
CAVRDRGGSARQLTF

SEQ ID NO: 139790 - protein, 16 aa, Homo sapiens
  CDR3 for beta chain variable domain of TCR clone 69895 (TRBV5-4, TRBJ2-3)
CASQKPGAGGADTQYF

SEQ ID NO: 139791 - protein, 12 aa, Homo sapiens
  CDR3 for alpha chain variable domain of TCR clone 69896 (TRAV13-1, TRAJ49)
CTASIWGNQFYF

SEQ ID NO: 139792 - protein, 14 aa, Homo sapiens
  CDR3 for beta chain variable domain of TCR clone 69896 (TRBV12-4, TRBJ1-1)
CASSLDGLNTEAFF

SEQ ID NO: 139793 - protein, 19 aa, Homo sapiens
  CDR3 for alpha chain variable domain of TCR clone 69897 (TRAV26-1, TRAJ29)
CCVLLHRQSRGIGNTPLVF

SEQ ID NO: 139794 - protein, 15 aa, Homo sapiens
  CDR3 for beta chain variable domain of TCR clone 69897 (TRBV7-9, TRBJ1-5)
CASSQGHQPNQPQHF

SEQ ID NO: 139795 - protein, 19 aa, Homo sapiens
  CDR3 for alpha chain variable domain of TCR clone 69898 (TRAV26-1, TRAJ38)
CIADNAGNNHIQNPDPAVY

SEQ ID NO: 139796 - protein, 15 aa, Homo sapiens
  CDR3 for beta chain variable domain of TCR clone 69898 (TRBV27, TRBJ2-1)
CASSNGGGSSNEQFF

SEQ ID NO: 139797 - protein, 17 aa, Homo sapiens
  CDR3 for alpha chain variable domain of TCR clone 69899 (TRAV13-1, TRAJ28)
CAASPPYSGAGSYQLTL

SEQ ID NO: 139798 - protein, 12 aa, Homo sapiens
  CDR3 for beta chain variable domain of TCR clone 69899 (TRBV11-2, TRBJ2-2)
CASSLPTGELFF

SEQ ID NO: 139799 - protein, 10 aa, Homo sapiens
  CDR3 for alpha chain variable domain of TCR clone 69900 (TRAV36/DV7, TRAJ48)
CAVGNEKLTF

SEQ ID NO: 139800 - protein, 15 aa, Homo sapiens
  CDR3 for beta chain variable domain of TCR clone 69900 (TRBV7-2, TRBJ1-2)
CASSPRAGWNYGYTF

SEQ ID NO: 139801 - protein, 14 aa, Homo sapiens
  CDR3 for alpha chain variable domain of TCR clone 69901 (TRAV2, TRAJ9)
CAVEDRSGGFKTIF

SEQ ID NO: 139802 - protein, 14 aa, Homo sapiens
  CDR3 for beta chain variable domain of TCR clone 69901 (TRBV18, TRBJ1-5)
CARSRQQRNQPQHF

SEQ ID NO: 139803 - protein, 15 aa, Homo sapiens
  CDR3 for alpha chain variable domain of TCR clone 69902 (TRAV38-1, TRAJ37)
CAFIHRSGNTGKLIF

SEQ ID NO: 139804 - protein, 12 aa, Homo sapiens
  CDR3 for beta chain variable domain of TCR clone 69902 (TRBV7-9, TRBJ2-7)
CASSFGSYEQYF

SEQ ID NO: 139805 - protein, 14 aa, Homo sapiens
  CDR3 for alpha chain variable domain of TCR clone 69903 (TRAV12-3, TRAJ10)
SHLPLTGGGNKLTF

SEQ ID NO: 139806 - protein, 18 aa, Homo sapiens
  CDR3 for beta chain variable domain of TCR clone 69903 (TRBV7-2, TRBJ2-3)
CASSLKREGSGITDTQYF

SEQ ID NO: 139807 - protein, 15 aa, Homo sapiens
  CDR3 for alpha chain variable domain of TCR clone 69904 (TRAV17, TRAJ56)
CATEPFTGANSKLAF

SEQ ID NO: 139808 - protein, 15 aa, Homo sapiens
  CDR3 for beta chain variable domain of TCR clone 69904 (TRBV28, TRBJ1-5)
CASSRTGGYVQPQHF

SEQ ID NO: 139809 - protein, 12 aa, Homo sapiens
  CDR3 for alpha chain variable domain of TCR clone 69905 (TRAV8-4, TRAJ37)
CAVRSNTGKLIF

SEQ ID NO: 139810 - protein, 16 aa, Homo sapiens
  CDR3 for beta chain variable domain of TCR clone 69905 (TRBV7-2, TRBJ2-3)
CASSLMGDASTDTQYF

SEQ ID NO: 139811 - protein, 13 aa, Homo sapiens
  CDR3 for alpha chain variable domain of TCR clone 69906 (TRAV8-2, TRAJ43)
CVVRDQGDNDMRF

SEQ ID NO: 139812 - protein, 12 aa, Homo sapiens
  CDR3 for beta chain variable domain of TCR clone 69906 (TRBV7-9, TRBJ2-7)
CASRTGFDEQYF

SEQ ID NO: 139813 - protein, 16 aa, Homo sapiens
  CDR3 for alpha chain variable domain of TCR clone 69907 (TRAV3, TRAJ37)
CAVRVRGSGNTGTLIF

SEQ ID NO: 139814 - protein, 13 aa, Homo sapiens
  CDR3 for beta chain variable domain of TCR clone 69907 (TRBV7-9, TRBJ1-2)
CASSLKQNYGYTF

SEQ ID NO: 139815 - protein, 13 aa, Homo sapiens
  CDR3 for alpha chain variable domain of TCR clone 69908 (TRAV12-3, TRAJ33)
CAMSVNSNYQLIW

SEQ ID NO: 139816 - protein, 15 aa, Homo sapiens
  CDR3 for beta chain variable domain of TCR clone 69908 (TRBV28, TRBJ2-1)
CASSLGTRLYNEQFF

SEQ ID NO: 139817 - protein, 18 aa, Homo sapiens
  CDR3 for alpha chain variable domain of TCR clone 69909 (TRAV1-2, TRAJ18)
CAVRDMGDRGSTLGRLYF

SEQ ID NO: 139818 - protein, 12 aa, Homo sapiens
  CDR3 for beta chain variable domain of TCR clone 69909 (TRBV11-2, TRBJ2-2)
CASSLGGGELFF

SEQ ID NO: 139819 - protein, 13 aa, Homo sapiens
  CDR3 for alpha chain variable domain of TCR clone 69910 (TRAV8-6, TRAJ36)
CAVIGPGANNLFF

SEQ ID NO: 139820 - protein, 14 aa, Homo sapiens
  CDR3 for beta chain variable domain of TCR clone 69910 (TRBV12-4, TRBJ1-1)
CASSLGTGGTEAFF

SEQ ID NO: 139821 - protein, 19 aa, Homo sapiens
  CDR3 for alpha chain variable domain of TCR clone 69911 (TRAV26-1, TRAJ22)
CCVLLHRWVFSGSARQLTF

SEQ ID NO: 139822 - protein, 19 aa, Homo sapiens
  CDR3 for beta chain variable domain of TCR clone 69911 (TRBV19, TRBJ2-5)
RASSIGQVTDFFLGETQYF

SEQ ID NO: 139823 - protein, 14 aa, Homo sapiens
  CDR3 for alpha chain variable domain of TCR clone 69912 (TRAV13-1, TRAJ44)
CAAKATGTASKLTF

SEQ ID NO: 139824 - protein, 16 aa, Homo sapiens
  CDR3 for beta chain variable domain of TCR clone 69912 (TRBV7-9, TRBJ2-6)
CASSLKGLLRANVLTF

SEQ ID NO: 139825 - protein, 15 aa, Homo sapiens
  CDR3 for alpha chain variable domain of TCR clone 69913 (TRAV26-1, TRAJ40)
CIVRVTTSGTYKYIF

SEQ ID NO: 139826 - protein, 12 aa, Homo sapiens
  CDR3 for beta chain variable domain of TCR clone 69913 (TRBV7-9, TRBJ1-4)
CASSTDREKLFS

SEQ ID NO: 139827 - protein, 14 aa, Homo sapiens
  CDR3 for alpha chain variable domain of TCR clone 69914 (TRAV12-2, TRAJ45)
CALPERGGTDGLTF

SEQ ID NO: 139828 - protein, 14 aa, Homo sapiens
  CDR3 for beta chain variable domain of TCR clone 69914 (TRBV18, TRBJ1-5)
CASSPGNSNQPQHF

SEQ ID NO: 139829 - protein, 18 aa, Homo sapiens
  CDR3 for alpha chain variable domain of TCR clone 69915 (TRAV13-1, TRAJ52)
CAASRRSAGGTSYGKLTF

SEQ ID NO: 139830 - protein, 14 aa, Homo sapiens
  CDR3 for beta chain variable domain of TCR clone 69915 (TRBV19, TRBJ2-1)
CASPTFVLSGEQFF

SEQ ID NO: 139831 - protein, 15 aa, Homo sapiens
  CDR3 for alpha chain variable domain of TCR clone 69916 (TRAV27, TRAJ38)
CAARRNAGNNRRLIW

SEQ ID NO: 139832 - protein, 13 aa, Homo sapiens
  CDR3 for beta chain variable domain of TCR clone 69916 (TRBV20-1, TRBJ1-1)
CSARAGGNTEAFF

SEQ ID NO: 139833 - protein, 13 aa, Homo sapiens
  CDR3 for alpha chain variable domain of TCR clone 69917 (TRAV12-3, TRAJ33)
CAMSLNSNYQLIC

SEQ ID NO: 139834 - protein, 13 aa, Homo sapiens
  CDR3 for beta chain variable domain of TCR clone 69917 (TRBV7-2, TRBJ2-2)
CASSLAVTGELFF

SEQ ID NO: 139835 - protein, 14 aa, Homo sapiens
  CDR3 for alpha chain variable domain of TCR clone 69918 (TRAV12-2, TRAJ29)
CAVRRNSGDTPLVF

SEQ ID NO: 139836 - protein, 13 aa, Homo sapiens
  CDR3 for beta chain variable domain of TCR clone 69918 (TRBV12-4, TRBJ2-1)
CASSHYTDNEQFF

SEQ ID NO: 139837 - protein, 15 aa, Homo sapiens
  CDR3 for alpha chain variable domain of TCR clone 69919 (TRAV3, TRAJ9)
CAVRGLNTGGFKTIF

SEQ ID NO: 139838 - protein, 13 aa, Homo sapiens
  CDR3 for beta chain variable domain of TCR clone 69919 (TRBV6-3, TRBJ2-3)
CASEGELKDTQYF

SEQ ID NO: 139839 - protein, 14 aa, Homo sapiens
  CDR3 for alpha chain variable domain of TCR clone 69920 (TRAV1-2, TRAJ16)
CAVNRFSAGQKLLF

SEQ ID NO: 139840 - protein, 14 aa, Homo sapiens
  CDR3 for beta chain variable domain of TCR clone 69920 (TRBV13, TRBJ2-5)
CASSLGRGQETQYF

SEQ ID NO: 139841 - protein, 13 aa, Homo sapiens
  CDR3 for alpha chain variable domain of TCR clone 69921 (TRAV8-3, TRAJ36)
CAVGATGANNLFF

SEQ ID NO: 139842 - protein, 15 aa, Homo sapiens
  CDR3 for beta chain variable domain of TCR clone 69921 (TRBV7-2, TRBJ1-2)
CASSPRAGLNYGYTF

SEQ ID NO: 139843 - protein, 15 aa, Homo sapiens
  CDR3 for alpha chain variable domain of TCR clone 69922 (TRAV12-2, TRAJ43)
CAFDTRFGAGTRLTV

SEQ ID NO: 139844 - protein, 13 aa, Homo sapiens
  CDR3 for beta chain variable domain of TCR clone 69922 (TRBV4-2, TRBJ1-1)
CASSQAGNTEAFF

SEQ ID NO: 139845 - protein, 13 aa, Homo sapiens
  CDR3 for alpha chain variable domain of TCR clone 69923 (TRAV2, TRAJ15)
CAVAPQAGTALIF

SEQ ID NO: 139846 - protein, 17 aa, Homo sapiens
  CDR3 for beta chain variable domain of TCR clone 69923 (TRBV7-3, TRBJ2-5)
CASSLGSGRSGSETQYF

SEQ ID NO: 139847 - protein, 16 aa, Homo sapiens
  CDR3 for alpha chain variable domain of TCR clone 69924 (TRAV3, TRAJ37)
CAVRPHGSGNTGKLIF

SEQ ID NO: 139848 - protein, 13 aa, Homo sapiens
  CDR3 for beta chain variable domain of TCR clone 69924 (TRBV20-1, TRBJ1-1)
CSARGGGNTEAFF

SEQ ID NO: 139849 - protein, 11 aa, Homo sapiens
  CDR3 for alpha chain variable domain of TCR clone 69925 (TRAV12-2, TRAJ31)
CSVTRWARLMF

SEQ ID NO: 139850 - protein, 15 aa, Homo sapiens
  CDR3 for beta chain variable domain of TCR clone 69925 (TRBV19, TRBJ2-7)
CASSIGGGLVNEQYF

SEQ ID NO: 139851 - protein, 14 aa, Homo sapiens
  CDR3 for alpha chain variable domain of TCR clone 69926 (TRAV13-2, TRAJ9)
CAENSFTGGFKTIF

SEQ ID NO: 139852 - protein, 14 aa, Homo sapiens
  CDR3 for beta chain variable domain of TCR clone 69926 (TRBV7-6, TRBJ1-6)
CASSQAGGGSPLHF

SEQ ID NO: 139853 - protein, 14 aa, Homo sapiens
  CDR3 for alpha chain variable domain of TCR clone 69927 (TRAV1-2, TRAJ8)
CAVREDTVFQKLVF

SEQ ID NO: 139854 - protein, 13 aa, Homo sapiens
  CDR3 for beta chain variable domain of TCR clone 69927 (TRBV24-1, TRBJ2-2)
CATSDWSTGELFF

SEQ ID NO: 139855 - protein, 12 aa, Homo sapiens
  CDR3 for alpha chain variable domain of TCR clone 69928 (TRAV12-2, TRAJ4)
GWPEGGYNKLVF

SEQ ID NO: 139856 - protein, 16 aa, Homo sapiens
  CDR3 for beta chain variable domain of TCR clone 69928 (TRBV6-1, TRBJ2-5)
CASSETLDRGAETQYF

SEQ ID NO: 139857 - protein, 12 aa, Homo sapiens
  CDR3 for alpha chain variable domain of TCR clone 69929 (TRAV13-1, TRAJ21)
CAAKEGFNIFYF

SEQ ID NO: 139858 - protein, 14 aa, Homo sapiens
  CDR3 for beta chain variable domain of TCR clone 69929 (TRBV5-4, TRBJ1-1)
CASSLDSRRDEAFF

SEQ ID NO: 139859 - protein, 11 aa, Homo sapiens
  CDR3 for alpha chain variable domain of TCR clone 69930 (TRAV1-2, TRAJ40)
CAVPGTYKYIF

SEQ ID NO: 139860 - protein, 15 aa, Homo sapiens
  CDR3 for beta chain variable domain of TCR clone 69930 (TRBV5-6, TRBJ1-5)
CASSYGKLWDQPQHF

SEQ ID NO: 139861 - protein, 12 aa, Homo sapiens
  CDR3 for alpha chain variable domain of TCR clone 69931 (TRAV12-1, TRAJ40)
CVVYSGTYKYIF

SEQ ID NO: 139862 - protein, 18 aa, Homo sapiens
  CDR3 for beta chain variable domain of TCR clone 69931 (TRBV25-1, TRBJ1-2)
CASSGLQNGQGLIFGYIF

SEQ ID NO: 139863 - protein, 11 aa, Homo sapiens
  CDR3 for alpha chain variable domain of TCR clone 69932 (TRAV2, TRAJ13)
CASGGYQKVTF

SEQ ID NO: 139864 - protein, 16 aa, Homo sapiens
  CDR3 for beta chain variable domain of TCR clone 69932 (TRBV6-1, TRBJ2-5)
CANSETLDRGAETQYF

SEQ ID NO: 139865 - protein, 15 aa, Homo sapiens
  CDR3 for alpha chain variable domain of TCR clone 69933 (TRAV2, TRAJ9)
CAVEDRGTGGFKTIF

SEQ ID NO: 139866 - protein, 16 aa, Homo sapiens
  CDR3 for beta chain variable domain of TCR clone 69933 (TRBV24-1, TRBJ2-3)
CATSDPGTGATDTQYV

SEQ ID NO: 139867 - protein, 13 aa, Homo sapiens
  CDR3 for alpha chain variable domain of TCR clone 69934 (TRAV27, TRAJ49)
CAPRPYTGNQFYF

SEQ ID NO: 139868 - protein, 14 aa, Homo sapiens
  CDR3 for beta chain variable domain of TCR clone 69934 (TRBV7-2, TRBJ2-7)
CASSPKTSFYEQYF

SEQ ID NO: 139869 - protein, 12 aa, Homo sapiens
  CDR3 for alpha chain variable domain of TCR clone 69935 (TRAV12-3, TRAJ17)
CAMTLTGNKPTF

SEQ ID NO: 139870 - protein, 15 aa, Homo sapiens
  CDR3 for beta chain variable domain of TCR clone 69935 (TRBV11-3, TRBJ2-3)
CASLRDGREGDTQYF

SEQ ID NO: 139871 - protein, 14 aa, Homo sapiens
  CDR3 for alpha chain variable domain of TCR clone 69936 (TRAV17, TRAJ57)
CATDPQGGSERLVF

SEQ ID NO: 139872 - protein, 18 aa, Homo sapiens
  CDR3 for beta chain variable domain of TCR clone 69936 (TRBV6-6, TRBJ1-3)
CASSYSKWDSISGNTIYF

SEQ ID NO: 139873 - protein, 15 aa, Homo sapiens
  CDR3 for alpha chain variable domain of TCR clone 69937 (TRAV12-1, TRAJ9)
CVVSFGDTGGFKTIF

SEQ ID NO: 139874 - protein, 13 aa, Homo sapiens
  CDR3 for beta chain variable domain of TCR clone 69937 (TRBV7-2, TRBJ2-2)
CASSLAVTGELFF

SEQ ID NO: 139875 - protein, 17 aa, Homo sapiens
  CDR3 for alpha chain variable domain of TCR clone 69938 (TRAV3, TRAJ6)
CAVKDGPRAGGSYIPTF

SEQ ID NO: 139876 - protein, 14 aa, Homo sapiens
  CDR3 for beta chain variable domain of TCR clone 69938 (TRBV7-2, TRBJ2-7)
CASNPKTSFYEQYF

SEQ ID NO: 139877 - protein, 17 aa, Homo sapiens
  CDR3 for alpha chain variable domain of TCR clone 69939 (TRAV26-2, TRAJ42)
CILRNVGYGGSQGNLIF

SEQ ID NO: 139878 - protein, 16 aa, Homo sapiens
  CDR3 for beta chain variable domain of TCR clone 69939 (TRBV12-4, TRBJ2-7)
CASSLIGGTGTYEQYF

SEQ ID NO: 139879 - protein, 14 aa, Homo sapiens
  CDR3 for alpha chain variable domain of TCR clone 69940 (TRAV17, TRAJ54)
SATDANQGAQKLVF

SEQ ID NO: 139880 - protein, 14 aa, Homo sapiens
  CDR3 for beta chain variable domain of TCR clone 69940 (TRBV25-1, TRBJ1-1)
CASTHLGGNTEAFF

SEQ ID NO: 139881 - protein, 18 aa, Homo sapiens
  CDR3 for alpha chain variable domain of TCR clone 69941 (TRAV26-1, TRAJ44)
CIVRVAGGGISTARKLTF

SEQ ID NO: 139882 - protein, 16 aa, Homo sapiens
  CDR3 for beta chain variable domain of TCR clone 69941 (TRBV20-1, TRBJ2-3)
CSAIFPIGGLTDTQYF

SEQ ID NO: 139883 - protein, 15 aa, Homo sapiens
  CDR3 for alpha chain variable domain of TCR clone 69942 (TRAV21, TRAJ53)
CAVRQSGGSNYKLTF

SEQ ID NO: 139884 - protein, 15 aa, Homo sapiens
  CDR3 for beta chain variable domain of TCR clone 69942 (TRBV5-1, TRBJ2-2)
CASSLLQGRPGELFF

SEQ ID NO: 139885 - protein, 11 aa, Homo sapiens
  CDR3 for alpha chain variable domain of TCR clone 69943 (TRAV12-2, TRAJ49)
CAVTGGNQFYF

SEQ ID NO: 139886 - protein, 14 aa, Homo sapiens
  CDR3 for beta chain variable domain of TCR clone 69943 (TRBV7-3, TRBJ1-1)
CASSLKGGNTEAFF

SEQ ID NO: 139887 - protein, 13 aa, Homo sapiens
  CDR3 for alpha chain variable domain of TCR clone 69944 (TRAV3, TRAJ29)
CAVRDIIDTPLVF

SEQ ID NO: 139888 - protein, 14 aa, Homo sapiens
  CDR3 for beta chain variable domain of TCR clone 69944 (TRBV27, TRBJ2-1)
CASSATGGYNKQFF

SEQ ID NO: 139889 - protein, 14 aa, Homo sapiens
  CDR3 for alpha chain variable domain of TCR clone 69945 (TRAV8-2, TRAJ37)
CVVSISGNTGKLIF

SEQ ID NO: 139890 - protein, 13 aa, Homo sapiens
  CDR3 for beta chain variable domain of TCR clone 69945 (TRBV7-2, TRBJ2-5)
CASSQTSVETQYF

SEQ ID NO: 139891 - protein, 14 aa, Homo sapiens
  CDR3 for alpha chain variable domain of TCR clone 69946 (TRAV12-3, TRAJ5)
CAMSTYTGRRALTF

SEQ ID NO: 139892 - protein, 13 aa, Homo sapiens
  CDR3 for beta chain variable domain of TCR clone 69946 (TRBV28, TRBJ2-3)
CASSTGGGDTQHF

SEQ ID NO: 139893 - protein, 17 aa, Homo sapiens
  CDR3 for alpha chain variable domain of TCR clone 69947 (TRAV38-1, TRAJ45)
CAFMRSHSGGGADGLTF

SEQ ID NO: 139894 - protein, 15 aa, Homo sapiens
  CDR3 for beta chain variable domain of TCR clone 69947 (TRBV7-2, TRBJ2-3)
CAGSLVVRGPDTQYF

SEQ ID NO: 139895 - protein, 13 aa, Homo sapiens
  CDR3 for alpha chain variable domain of TCR clone 69948 (TRAV12-2, TRAJ9)
CAGKWAGGFKTIF

SEQ ID NO: 139896 - protein, 12 aa, Homo sapiens
  CDR3 for beta chain variable domain of TCR clone 69948 (TRBV7-8, TRBJ2-7)
CASSLGDREQYF

SEQ ID NO: 139897 - protein, 12 aa, Homo sapiens
  CDR3 for alpha chain variable domain of TCR clone 69949 (TRAV8-3, TRAJ20)
CAVGANDYKLSF

SEQ ID NO: 139898 - protein, 16 aa, Homo sapiens
  CDR3 for beta chain variable domain of TCR clone 69949 (TRBV19, TRBJ2-2)
CASRSPGTGATAELFF

SEQ ID NO: 139899 - protein, 14 aa, Homo sapiens
  CDR3 for alpha chain variable domain of TCR clone 69950 (TRAV35, TRAJ13)
CAGSPSGGYQKVTF

SEQ ID NO: 139900 - protein, 17 aa, Homo sapiens
  CDR3 for beta chain variable domain of TCR clone 69950 (TRBV7-6, TRBJ2-5)
CASSTGLADPWGETQYF

SEQ ID NO: 139901 - protein, 14 aa, Homo sapiens
  CDR3 for alpha chain variable domain of TCR clone 69951 (TRAV12-2, TRAJ13)
CAVEKTGGYQKVTF

SEQ ID NO: 139902 - protein, 12 aa, Homo sapiens
  CDR3 for beta chain variable domain of TCR clone 69951 (TRBV11-2, TRBJ2-2)
CASSLGGGELFF

SEQ ID NO: 139903 - protein, 16 aa, Homo sapiens
  CDR3 for alpha chain variable domain of TCR clone 69952 (TRAV30, TRAJ24)
CGTEIVDADSWGQFQF

SEQ ID NO: 139904 - protein, 12 aa, Homo sapiens
  CDR3 for beta chain variable domain of TCR clone 69952 (TRBV11-2, TRBJ2-2)
CASSLGGGELFF

SEQ ID NO: 139905 - protein, 13 aa, Homo sapiens
  CDR3 for alpha chain variable domain of TCR clone 69953 (TRAV8-3, TRAJ44)
CAVVPGTASKLTF

SEQ ID NO: 139906 - protein, 14 aa, Homo sapiens
  CDR3 for beta chain variable domain of TCR clone 69953 (TRBV11-2, TRBJ2-3)
CASSRLARTDTQYL

SEQ ID NO: 139907 - protein, 14 aa, Homo sapiens
  CDR3 for alpha chain variable domain of TCR clone 69954 (TRAV12-3, TRAJ10)
SHLPLTGGGNKLTF

SEQ ID NO: 139908 - protein, 16 aa, Homo sapiens
  CDR3 for beta chain variable domain of TCR clone 69954 (TRBV7-7, TRBJ2-1)
CASSLASGTSYNEQFF

SEQ ID NO: 139909 - protein, 13 aa, Homo sapiens
  CDR3 for alpha chain variable domain of TCR clone 69955 (TRAV27, TRAJ49)
CAPRPYTGNQFFF

SEQ ID NO: 139910 - protein, 16 aa, Homo sapiens
  CDR3 for beta chain variable domain of TCR clone 69955 (TRBV4-1, TRBJ1-2)
CASSQDAGQVLYGYTF

SEQ ID NO: 139911 - protein, 14 aa, Homo sapiens
  CDR3 for alpha chain variable domain of TCR clone 69956 (TRAV13-1, TRAJ12)
CSSYPMDSSYKLIF

SEQ ID NO: 139912 - protein, 11 aa, Homo sapiens
  CDR3 for beta chain variable domain of TCR clone 69956 (TRBV20-1, TRBJ2-1)
CSLSSGSEQFF

SEQ ID NO: 139913 - protein, 19 aa, Homo sapiens
  CDR3 for alpha chain variable domain of TCR clone 69957 (TRAV3, TRAJ6)
CAVRDRNPSRSGGSYIPTF

SEQ ID NO: 139914 - protein, 15 aa, Homo sapiens
  CDR3 for beta chain variable domain of TCR clone 69957 (TRBV18, TRBJ2-7)
CASSPTFMDSYEQYS

SEQ ID NO: 139915 - protein, 11 aa, Homo sapiens
  CDR3 for alpha chain variable domain of TCR clone 69958 (TRAV12-3, TRAJ43)
CAMSVSNDMRF

SEQ ID NO: 139916 - protein, 13 aa, Homo sapiens
  CDR3 for beta chain variable domain of TCR clone 69958 (TRBV20-1, TRBJ1-1)
CSAPLGGGTESFF

SEQ ID NO: 139917 - protein, 14 aa, Homo sapiens
  CDR3 for alpha chain variable domain of TCR clone 69959 (TRAV1-2, TRAJ16)
CAVNRFSDGQKLLF

SEQ ID NO: 139918 - protein, 14 aa, Homo sapiens
  CDR3 for beta chain variable domain of TCR clone 69959 (TRBV4-1, TRBJ2-2)
CASSQAANTGELFF

SEQ ID NO: 139919 - protein, 12 aa, Homo sapiens
  CDR3 for alpha chain variable domain of TCR clone 69960 (TRAV8-3, TRAJ40)
CAVTSGTYKYIF

SEQ ID NO: 139920 - protein, 14 aa, Homo sapiens
  CDR3 for beta chain variable domain of TCR clone 69960 (TRBV12-4, TRBJ2-3)
CASNGQGSTDTQYF

SEQ ID NO: 139921 - protein, 16 aa, Homo sapiens
  CDR3 for alpha chain variable domain of TCR clone 69961 (TRAV2, TRAJ4)
CAVEDRFSGGYNKLIF

SEQ ID NO: 139922 - protein, 13 aa, Homo sapiens
  CDR3 for beta chain variable domain of TCR clone 69961 (TRBV7-7, TRBJ2-5)
CASSRSGQETLYF

SEQ ID NO: 139923 - protein, 18 aa, Homo sapiens
  CDR3 for alpha chain variable domain of TCR clone 69962 (TRAV21, TRAJ52)
CAVRPSPAGGTSYGKLTF

SEQ ID NO: 139924 - protein, 12 aa, Homo sapiens
  CDR3 for beta chain variable domain of TCR clone 69962 (TRBV5-1, TRBJ1-2)
CASSQDTYGYTF

SEQ ID NO: 139925 - protein, 14 aa, Homo sapiens
  CDR3 for alpha chain variable domain of TCR clone 69963 (TRAV26-1, TRAJ39)
CIVRGSRAGNMLTF

SEQ ID NO: 139926 - protein, 15 aa, Homo sapiens
  CDR3 for beta chain variable domain of TCR clone 69963 (TRBV7-9, TRBJ1-5)
CVSSQGHQPNQPQNF

SEQ ID NO: 139927 - protein, 18 aa, Homo sapiens
  CDR3 for alpha chain variable domain of TCR clone 69964 (TRAV26-1, TRAJ5)
CIVRVVPPRDTGRRARTF

SEQ ID NO: 139928 - protein, 15 aa, Homo sapiens
  CDR3 for beta chain variable domain of TCR clone 69964 (TRBV7-9, TRBJ2-7)
CASSLPMGQANEQYF

SEQ ID NO: 139929 - protein, 15 aa, Homo sapiens
  CDR3 for alpha chain variable domain of TCR clone 69965 (TRAV25, TRAJ53)
CAATGGGGSNYKLTF

SEQ ID NO: 139930 - protein, 19 aa, Homo sapiens
  CDR3 for beta chain variable domain of TCR clone 69965 (TRBV7-2, TRBJ2-3)
CASSFLARNWGGGTDTQYF

SEQ ID NO: 139931 - protein, 16 aa, Homo sapiens
  CDR3 for alpha chain variable domain of TCR clone 69966 (TRAV4, TRAJ9)
CLVGDPTRPGGFKTIF

SEQ ID NO: 139932 - protein, 16 aa, Homo sapiens
  CDR3 for beta chain variable domain of TCR clone 69966 (TRBV28, TRBJ1-4)
CASSPPYRGRSEKLFF

SEQ ID NO: 139933 - protein, 11 aa, Homo sapiens
  CDR3 for alpha chain variable domain of TCR clone 69967 (TRAV21, TRAJ34)
CAHYNTDKLIF

SEQ ID NO: 139934 - protein, 15 aa, Homo sapiens
  CDR3 for beta chain variable domain of TCR clone 69967 (TRBV28, TRBJ1-3)
CASSMGWASGNTIYF

SEQ ID NO: 139935 - protein, 14 aa, Homo sapiens
  CDR3 for alpha chain variable domain of TCR clone 69968 (TRAV17, TRAJ57)
CATDPQGGSEKLVF

SEQ ID NO: 139936 - protein, 18 aa, Homo sapiens
  CDR3 for beta chain variable domain of TCR clone 69968 (TRBV6-6, TRBJ1-3)
CASSYSKWDSISGNTIYS

SEQ ID NO: 139937 - protein, 10 aa, Homo sapiens
  CDR3 for alpha chain variable domain of TCR clone 69969 (TRAV1-2, TRAJ23)
CAAWAGKLIF

SEQ ID NO: 139938 - protein, 14 aa, Homo sapiens
  CDR3 for beta chain variable domain of TCR clone 69969 (TRBV20-1, TRBJ2-7)
CSAKTGTGGYEQYL

SEQ ID NO: 139939 - protein, 15 aa, Homo sapiens
  CDR3 for alpha chain variable domain of TCR clone 69970 (TRAV25, TRAJ52)
CAERPGGTSYGKLTF

SEQ ID NO: 139940 - protein, 17 aa, Homo sapiens
  CDR3 for beta chain variable domain of TCR clone 69970 (TRBV7-8, TRBJ2-6)
CASSAGTGGAGANVLTF

SEQ ID NO: 139941 - protein, 13 aa, Homo sapiens
  CDR3 for alpha chain variable domain of TCR clone 69971 (TRAV2, TRAJ40)
CAVVTSGTYKYIF

SEQ ID NO: 139942 - protein, 13 aa, Homo sapiens
  CDR3 for beta chain variable domain of TCR clone 69971 (TRBV7-8, TRBJ2-1)
CASSAGTGNEQFF

SEQ ID NO: 139943 - protein, 13 aa, Homo sapiens
  CDR3 for alpha chain variable domain of TCR clone 69972 (TRAV8-4, TRAJ10)
CAAFKGGGNKLTF

SEQ ID NO: 139944 - protein, 15 aa, Homo sapiens
  CDR3 for beta chain variable domain of TCR clone 69972 (TRBV2, TRBJ2-3)
CASSDFEKATDTQYF

SEQ ID NO: 139945 - protein, 17 aa, Homo sapiens
  CDR3 for alpha chain variable domain of TCR clone 69973 (TRAV13-1, TRAJ52)
CAASSGAGGTSYGKLTF

SEQ ID NO: 139946 - protein, 12 aa, Homo sapiens
  CDR3 for beta chain variable domain of TCR clone 69973 (TRBV7-9, TRBJ2-7)
CASSIKREEQYF

SEQ ID NO: 139947 - protein, 12 aa, Homo sapiens
  CDR3 for alpha chain variable domain of TCR clone 69974 (TRAV8-1, TRAJ26)
CAVNNYGQNFVF

SEQ ID NO: 139948 - protein, 12 aa, Homo sapiens
  CDR3 for beta chain variable domain of TCR clone 69974 (TRBV5-5, TRBJ2-5)
CASSYFRETQYF

SEQ ID NO: 139949 - protein, 14 aa, Homo sapiens
  CDR3 for alpha chain variable domain of TCR clone 69975 (TRAV13-1, TRAJ9)
CAASAITGGFKTIF

SEQ ID NO: 139950 - protein, 13 aa, Homo sapiens
  CDR3 for beta chain variable domain of TCR clone 69975 (TRBV20-1, TRBJ1-1)
CSAGTVGNTEAFF

SEQ ID NO: 139951 - protein, 15 aa, Homo sapiens
  CDR3 for alpha chain variable domain of TCR clone 69976 (TRAV34, TRAJ38)
CGADFTPGNNRKLIW

SEQ ID NO: 139952 - protein, 13 aa, Homo sapiens
  CDR3 for beta chain variable domain of TCR clone 69976 (TRBV12-4, TRBJ1-2)
CASSLRQGKGYTF

SEQ ID NO: 139953 - protein, 13 aa, Homo sapiens
  CDR3 for alpha chain variable domain of TCR clone 69977 (TRAV3, TRAJ21)
CAVREPDFNKFYF

SEQ ID NO: 139954 - protein, 12 aa, Homo sapiens
  CDR3 for beta chain variable domain of TCR clone 69977 (TRBV7-9, TRBJ2-7)
CASSIKREEQYF

SEQ ID NO: 139955 - protein, 19 aa, Homo sapiens
  CDR3 for alpha chain variable domain of TCR clone 69978 (TRAV3, TRAJ6)
CAVRDRNPSRSGGSYIPTF

SEQ ID NO: 139956 - protein, 15 aa, Homo sapiens
  CDR3 for beta chain variable domain of TCR clone 69978 (TRBV18, TRBJ2-7)
CASSPTFTDSYEQYF

SEQ ID NO: 139957 - protein, 13 aa, Homo sapiens
  CDR3 for alpha chain variable domain of TCR clone 69979 (TRAV22, TRAJ29)
CAVGGSGNTPLAF

SEQ ID NO: 139958 - protein, 13 aa, Homo sapiens
  CDR3 for beta chain variable domain of TCR clone 69979 (TRBV4-2, TRBJ1-1)
CASSQAGNTEAFF

SEQ ID NO: 139959 - protein, 17 aa, Homo sapiens
  CDR3 for alpha chain variable domain of TCR clone 69980 (TRAV12-1, TRAJ32)
CVVNMQGYGGATNKPIF

SEQ ID NO: 139960 - protein, 13 aa, Homo sapiens
  CDR3 for beta chain variable domain of TCR clone 69980 (TRBV6-6, TRBJ2-1)
CASSLHQGDEQFF

SEQ ID NO: 139961 - protein, 12 aa, Homo sapiens
  CDR3 for alpha chain variable domain of TCR clone 69981 (TRAV13-1, TRAJ48)
CAANFGNEKLTF

SEQ ID NO: 139962 - protein, 14 aa, Homo sapiens
  CDR3 for beta chain variable domain of TCR clone 69981 (TRBV5-1, TRBJ1-6)
CASRPGTSNSPLHF

SEQ ID NO: 139963 - protein, 17 aa, Homo sapiens
  CDR3 for alpha chain variable domain of TCR clone 69982 (TRAV3, TRAJ42)
CAVRDRDYGGSKGNLIF

SEQ ID NO: 139964 - protein, 18 aa, Homo sapiens
  CDR3 for beta chain variable domain of TCR clone 69982 (TRBV20-1, TRBJ2-3)
CSASGLAGGPGTTDTQYF

SEQ ID NO: 139965 - protein, 12 aa, Homo sapiens
  CDR3 for alpha chain variable domain of TCR clone 69983 (TRAV12-3, TRAJ17)
CAMTLTGNKITF

SEQ ID NO: 139966 - protein, 15 aa, Homo sapiens
  CDR3 for beta chain variable domain of TCR clone 69983 (TRBV19, TRBJ2-1)
CASSILGEGRNEQFF

SEQ ID NO: 139967 - protein, 14 aa, Homo sapiens
  CDR3 for alpha chain variable domain of TCR clone 69984 (TRAV27, TRAJ23)
PHLGAKDQGGKLIF

SEQ ID NO: 139968 - protein, 16 aa, Homo sapiens
  CDR3 for beta chain variable domain of TCR clone 69984 (TRBV27, TRBJ2-2)
CASSFRGLVRTGELFF

SEQ ID NO: 139969 - protein, 12 aa, Homo sapiens
  CDR3 for alpha chain variable domain of TCR clone 69985 (TRAV23/DV6, TRAJ33)
CAPMDSNYQLIW

SEQ ID NO: 139970 - protein, 15 aa, Homo sapiens
  CDR3 for beta chain variable domain of TCR clone 69985 (TRBV5-4, TRBJ2-3)
CASSLYRGRTDTQYF

SEQ ID NO: 139971 - protein, 13 aa, Homo sapiens
  CDR3 for alpha chain variable domain of TCR clone 69986 (TRAV26-2, TRAJ43)
CILRTVNNNDMRF

SEQ ID NO: 139972 - protein, 15 aa, Homo sapiens
  CDR3 for beta chain variable domain of TCR clone 69986 (TRBV7-2, TRBJ2-1)
CASTHGTGIYNEQFF

SEQ ID NO: 139973 - protein, 14 aa, Homo sapiens
  CDR3 for alpha chain variable domain of TCR clone 69987 (TRAV8-4, TRAJ23)
CAVSAPGSGGKLIF

SEQ ID NO: 139974 - protein, 17 aa, Homo sapiens
  CDR3 for beta chain variable domain of TCR clone 69987 (TRBV4-3, TRBJ2-3)
CASSQDPRAGAVDTQYF

SEQ ID NO: 139975 - protein, 15 aa, Homo sapiens
  CDR3 for alpha chain variable domain of TCR clone 69988 (TRAV4, TRAJ39)
CLVGPNNNAGNMLTF

SEQ ID NO: 139976 - protein, 16 aa, Homo sapiens
  CDR3 for beta chain variable domain of TCR clone 69988 (TRBV13, TRBJ2-2)
CASSPRAGEHTGELFF

SEQ ID NO: 139977 - protein, 11 aa, Homo sapiens
  CDR3 for alpha chain variable domain of TCR clone 69989 (TRAV4, TRAJ31)
CLVGDKARLMF

SEQ ID NO: 139978 - protein, 16 aa, Homo sapiens
  CDR3 for beta chain variable domain of TCR clone 69989 (TRBV7-2, TRBJ2-5)
CASSSKWLSGQETQYF

SEQ ID NO: 139979 - protein, 15 aa, Homo sapiens
  CDR3 for alpha chain variable domain of TCR clone 69990 (TRAV8-3, TRAJ11)
CAVGLLNSGYSTLTF

SEQ ID NO: 139980 - protein, 16 aa, Homo sapiens
  CDR3 for beta chain variable domain of TCR clone 69990 (TRBV7-9, TRBJ1-2)
CASSLGFYSGEDGYTF

SEQ ID NO: 139981 - protein, 11 aa, Homo sapiens
  CDR3 for alpha chain variable domain of TCR clone 69991 (TRAV36/DV7, TRAJ23)
CAVEARESLSS

SEQ ID NO: 139982 - protein, 14 aa, Homo sapiens
  CDR3 for beta chain variable domain of TCR clone 69991 (TRBV5-1, TRBJ2-3)
CASRGQTSTDTQYF

SEQ ID NO: 139983 - protein, 14 aa, Homo sapiens
  CDR3 for alpha chain variable domain of TCR clone 69992 (TRAV27, TRAJ23)
CAGLSYNQGGKLSF

SEQ ID NO: 139984 - protein, 15 aa, Homo sapiens
  CDR3 for beta chain variable domain of TCR clone 69992 (TRBV19, TRBJ2-2)
CASSLNRGVTGELFF

SEQ ID NO: 139985 - protein, 16 aa, Homo sapiens
  CDR3 for alpha chain variable domain of TCR clone 69993 (TRAV12-2, TRAJ32)
CAVNLGQGGATNKLIF

SEQ ID NO: 139986 - protein, 15 aa, Homo sapiens
  CDR3 for beta chain variable domain of TCR clone 69993 (TRBV20-1, TRBJ2-7)
CSARGHLAGGREQYF

SEQ ID NO: 139987 - protein, 13 aa, Homo sapiens
  CDR3 for alpha chain variable domain of TCR clone 69994 (TRAV13-1, TRAJ21)
CAASIYDFNKFYF

SEQ ID NO: 139988 - protein, 12 aa, Homo sapiens
  CDR3 for beta chain variable domain of TCR clone 69994 (TRBV11-2, TRBJ2-1)
CASSPGNNEQFF

SEQ ID NO: 139989 - protein, 10 aa, Homo sapiens
  CDR3 for alpha chain variable domain of TCR clone 69995 (TRAV23/DV6, TRAJ57)
CAACSTLSQG

SEQ ID NO: 139990 - protein, 14 aa, Homo sapiens
  CDR3 for beta chain variable domain of TCR clone 69995 (TRBV25-1, TRBJ1-1)
CASTHLGGNTEAFF

SEQ ID NO: 139991 - protein, 14 aa, Homo sapiens
  CDR3 for alpha chain variable domain of TCR clone 69996 (TRAV1-2, TRAJ8)
CAVREDTGFQKLVF

SEQ ID NO: 139992 - protein, 17 aa, Homo sapiens
  CDR3 for beta chain variable domain of TCR clone 69996 (TRBV15, TRBJ1-1)
CATSLQGGRNTEASLDK

SEQ ID NO: 139993 - protein, 11 aa, Homo sapiens
  CDR3 for alpha chain variable domain of TCR clone 69997 (TRAV4, TRAJ28)
SLVGDNRAETL

SEQ ID NO: 139994 - protein, 13 aa, Homo sapiens
  CDR3 for beta chain variable domain of TCR clone 69997 (TRBV20-1, TRBJ2-7)
CSATHTSGYEQYF

SEQ ID NO: 139995 - protein, 14 aa, Homo sapiens
  CDR3 for alpha chain variable domain of TCR clone 69998 (TRAV1-2, TRAJ8)
RAVREDTGFRKLVF

SEQ ID NO: 139996 - protein, 15 aa, Homo sapiens
  CDR3 for beta chain variable domain of TCR clone 69998 (TRBV6-3, TRBJ2-7)
CASSSPGTVFYEQYF

SEQ ID NO: 139997 - protein, 16 aa, Homo sapiens
  CDR3 for alpha chain variable domain of TCR clone 69999 (TRAV27, TRAJ52)
CAGAPAGGTSFGKLTF

SEQ ID NO: 139998 - protein, 12 aa, Homo sapiens
  CDR3 for beta chain variable domain of TCR clone 69999 (TRBV27, TRBJ2-1)
CASRGFYNEQFF

SEQ ID NO: 139999 - protein, 15 aa, Homo sapiens
  CDR3 for alpha chain variable domain of TCR clone 70000 (TRAV3, TRAJ22)
CAVRDRGGSARLLTF

SEQ ID NO: 140000 - protein, 16 aa, Homo sapiens
  CDR3 for beta chain variable domain of TCR clone 70000 (TRBV5-4, TRBJ2-3)
CASQQPGAGGADTQYF

SEQ ID NO: 140001 - protein, 14 aa, Homo sapiens
  CDR3 for alpha chain variable domain of TCR clone 70001 (TRAV13-1, TRAJ44)
CAAKATGTASKLTF

SEQ ID NO: 140002 - protein, 15 aa, Homo sapiens
  CDR3 for beta chain variable domain of TCR clone 70001 (TRBV28, TRBJ2-4)
CAAGSGTLLMGIQYF

SEQ ID NO: 140003 - protein, 13 aa, Homo sapiens
  CDR3 for alpha chain variable domain of TCR clone 70002 (TRAV3, TRAJ30)
CAVRDRGDDKIIF

SEQ ID NO: 140004 - protein, 14 aa, Homo sapiens
  CDR3 for beta chain variable domain of TCR clone 70002 (TRBV5-1, TRBJ1-1)
CASSRTTGGTEAFF

SEQ ID NO: 140005 - protein, 16 aa, Homo sapiens
  CDR3 for alpha chain variable domain of TCR clone 70003 (TRAV20, TRAJ22)
CAVQASSSGAARQLTF

SEQ ID NO: 140006 - protein, 13 aa, Homo sapiens
  CDR3 for beta chain variable domain of TCR clone 70003 (TRBV7-2, TRBJ2-5)
CASSQTSVETQYF

SEQ ID NO: 140007 - protein, 14 aa, Homo sapiens
  CDR3 for alpha chain variable domain of TCR clone 70004 (TRAV8-2, TRAJ45)
CVVSAGGGADGLTF

SEQ ID NO: 140008 - protein, 12 aa, Homo sapiens
  CDR3 for beta chain variable domain of TCR clone 70004 (TRBV12-4, TRBJ2-1)
CASSLVRVERFF

SEQ ID NO: 140009 - protein, 13 aa, Homo sapiens
  CDR3 for alpha chain variable domain of TCR clone 70005 (TRAV40, TRAJ41)
CLLGAQSGYALNF

SEQ ID NO: 140010 - protein, 13 aa, Homo sapiens
  CDR3 for beta chain variable domain of TCR clone 70005 (TRBV7-9, TRBJ1-2)
CASSLKQNYGYTF

SEQ ID NO: 140011 - protein, 12 aa, Homo sapiens
  CDR3 for alpha chain variable domain of TCR clone 70006 (TRAV12-2, TRAJ3)
CAVWSSASKIIF

SEQ ID NO: 140012 - protein, 12 aa, Homo sapiens
  CDR3 for beta chain variable domain of TCR clone 70006 (TRBV11-2, TRBJ2-1)
CASSPGNNVQFF

SEQ ID NO: 140013 - protein, 14 aa, Homo sapiens
  CDR3 for alpha chain variable domain of TCR clone 70007 (TRAV1-2, TRAJ16)
CAVNRFSDGQKLLF

SEQ ID NO: 140014 - protein, 14 aa, Homo sapiens
  CDR3 for beta chain variable domain of TCR clone 70007 (TRBV12-4, TRBJ1-2)
CASSFVGTAYGYTF

SEQ ID NO: 140015 - protein, 14 aa, Homo sapiens
  CDR3 for alpha chain variable domain of TCR clone 70008 (TRAV20, TRAJ56)
CAVQFGGANSKLTF

SEQ ID NO: 140016 - protein, 14 aa, Homo sapiens
  CDR3 for beta chain variable domain of TCR clone 70008 (TRBV12-5, TRBJ2-5)
CASGSRTHQETQYF

SEQ ID NO: 140017 - protein, 14 aa, Homo sapiens
  CDR3 for alpha chain variable domain of TCR clone 70009 (TRAV12-2, TRAJ13)
CAVKKTGGYQKVTF

SEQ ID NO: 140018 - protein, 14 aa, Homo sapiens
  CDR3 for beta chain variable domain of TCR clone 70009 (TRBV5-1, TRBJ2-2)
CASSLGGGSGELFF

SEQ ID NO: 140019 - protein, 15 aa, Homo sapiens
  CDR3 for alpha chain variable domain of TCR clone 70010 (TRAV2, TRAJ9)
CAVEDRGTGGFKTIF

SEQ ID NO: 140020 - protein, 15 aa, Homo sapiens
  CDR3 for beta chain variable domain of TCR clone 70010 (TRBV11-2, TRBJ2-2)
CASSSDRVNAGELFF

SEQ ID NO: 140021 - protein, 15 aa, Homo sapiens
  CDR3 for alpha chain variable domain of TCR clone 70011 (TRAV26-1, TRAJ44)
CIVRANTGTASKLTF

SEQ ID NO: 140022 - protein, 16 aa, Homo sapiens
  CDR3 for beta chain variable domain of TCR clone 70011 (TRBV7-7, TRBJ2-1)
CASSLASRTSYNEQFF

SEQ ID NO: 140023 - protein, 12 aa, Homo sapiens
  CDR3 for alpha chain variable domain of TCR clone 70012 (TRAV16, TRAJ56)
CAPTGANSKLTF

SEQ ID NO: 140024 - protein, 16 aa, Homo sapiens
  CDR3 for beta chain variable domain of TCR clone 70012 (TRBV12-4, TRBJ2-1)
CASSAVGQGNGDEQFF

SEQ ID NO: 140025 - protein, 14 aa, Homo sapiens
  CDR3 for alpha chain variable domain of TCR clone 70013 (TRAV12-1, TRAJ17)
CVVNYKAAGNKLTL

SEQ ID NO: 140026 - protein, 15 aa, Homo sapiens
  CDR3 for beta chain variable domain of TCR clone 70013 (TRBV7-2, TRBJ2-1)
CASTHGTGIYNEQFF

SEQ ID NO: 140027 - protein, 16 aa, Homo sapiens
  CDR3 for alpha chain variable domain of TCR clone 70014 (TRAV20, TRAJ10)
CAVLRGLTGGGNKPTF

SEQ ID NO: 140028 - protein, 14 aa, Homo sapiens
  CDR3 for beta chain variable domain of TCR clone 70014 (TRBV19, TRBJ1-5)
CASRAPDSFLSQHF

SEQ ID NO: 140029 - protein, 18 aa, Homo sapiens
  CDR3 for alpha chain variable domain of TCR clone 70015 (TRAV12-3, TRAJ52)
WAMSVGGAGGTSYGKLTF

SEQ ID NO: 140030 - protein, 15 aa, Homo sapiens
  CDR3 for beta chain variable domain of TCR clone 70015 (TRBV27, TRBJ1-6)
CASSFDRGLGSPLHF

SEQ ID NO: 140031 - protein, 15 aa, Homo sapiens
  CDR3 for alpha chain variable domain of TCR clone 70016 (TRAV27, TRAJ38)
CAARRNAGNNRKLIW

SEQ ID NO: 140032 - protein, 13 aa, Homo sapiens
  CDR3 for beta chain variable domain of TCR clone 70016 (TRBV12-5, TRBJ2-3)
CASGDRQPDTQYL

SEQ ID NO: 140033 - protein, 14 aa, Homo sapiens
  CDR3 for alpha chain variable domain of TCR clone 70017 (TRAV1-2, TRAJ8)
CAVREDTGLQKLVF

SEQ ID NO: 140034 - protein, 11 aa, Homo sapiens
  CDR3 for beta chain variable domain of TCR clone 70017 (TRBV11-3, TRBJ2-7)
CASSRTCEQYF

SEQ ID NO: 140035 - protein, 18 aa, Homo sapiens
  CDR3 for alpha chain variable domain of TCR clone 70018 (TRAV21, TRAJ52)
CAVRPSPAGGTSYGKLTF

SEQ ID NO: 140036 - protein, 19 aa, Homo sapiens
  CDR3 for beta chain variable domain of TCR clone 70018 (TRBV7-2, TRBJ2-3)
CASSFLSRNWGGGTGTQYF

SEQ ID NO: 140037 - protein, 16 aa, Homo sapiens
  CDR3 for alpha chain variable domain of TCR clone 70019 (TRAV3, TRAJ37)
CTVRGKGSGNTGKLIF

SEQ ID NO: 140038 - protein, 13 aa, Homo sapiens
  CDR3 for beta chain variable domain of TCR clone 70019 (TRBV14, TRBJ2-7)
CASSQDRRYEQYF

SEQ ID NO: 140039 - protein, 11 aa, Homo sapiens
  CDR3 for alpha chain variable domain of TCR clone 70020 (TRAV1-2, TRAJ40)
CAVPRTYKYIF

SEQ ID NO: 140040 - protein, 16 aa, Homo sapiens
  CDR3 for beta chain variable domain of TCR clone 70020 (TRBV29-1, TRBJ2-7)
CSVEVVGTSGSYEQYF

SEQ ID NO: 140041 - protein, 12 aa, Homo sapiens
  CDR3 for alpha chain variable domain of TCR clone 70021 (TRAV23/DV6, TRAJ31)
CAARRIVARLMF

SEQ ID NO: 140042 - protein, 13 aa, Homo sapiens
  CDR3 for beta chain variable domain of TCR clone 70021 (TRBV28, TRBJ2-7)
CASKAGGVYEQYF

SEQ ID NO: 140043 - protein, 18 aa, Homo sapiens
  CDR3 for alpha chain variable domain of TCR clone 70022 (TRAV21, TRAJ52)
CAARPSPSGGTSYGKLTF

SEQ ID NO: 140044 - protein, 13 aa, Homo sapiens
  CDR3 for beta chain variable domain of TCR clone 70022 (TRBV4-2, TRBJ1-1)
CASSQAGNTEAFF

SEQ ID NO: 140045 - protein, 15 aa, Homo sapiens
  CDR3 for alpha chain variable domain of TCR clone 70023 (TRAV3, TRAJ10)
CAVRDGTGGGNKLTF

SEQ ID NO: 140046 - protein, 15 aa, Homo sapiens
  CDR3 for beta chain variable domain of TCR clone 70023 (TRBV4-3, TRBJ1-4)
FASSLVQREVEKLFF

SEQ ID NO: 140047 - protein, 16 aa, Homo sapiens
  CDR3 for alpha chain variable domain of TCR clone 70024 (TRAV35, TRAJ37)
CWAFLRGSSNTGQLIF

SEQ ID NO: 140048 - protein, 13 aa, Homo sapiens
  CDR3 for beta chain variable domain of TCR clone 70024 (TRBV2, TRBJ1-2)
CASSVRGNYGYTF

SEQ ID NO: 140049 - protein, 13 aa, Homo sapiens
  CDR3 for alpha chain variable domain of TCR clone 70025 (TRAV8-3, TRAJ4)
WVFYSGGYNKLIF

SEQ ID NO: 140050 - protein, 16 aa, Homo sapiens
  CDR3 for beta chain variable domain of TCR clone 70025 (TRBV7-8, TRBJ2-3)
CAGSTEGQRETDTQYF

SEQ ID NO: 140051 - protein, 11 aa, Homo sapiens
  CDR3 for alpha chain variable domain of TCR clone 70026 (TRAV3, TRAJ13)
CAVTSYQKVAF

SEQ ID NO: 140052 - protein, 15 aa, Homo sapiens
  CDR3 for beta chain variable domain of TCR clone 70026 (TRBV7-9, TRBJ2-7)
CASSSSGLAVYEQYF

SEQ ID NO: 140053 - protein, 15 aa, Homo sapiens
  CDR3 for alpha chain variable domain of TCR clone 70027 (TRAV8-6, TRAJ10)
CAVSDQAGGGNKLTF

SEQ ID NO: 140054 - protein, 14 aa, Homo sapiens
  CDR3 for beta chain variable domain of TCR clone 70027 (TRBV7-9, TRBJ2-5)
CASSLAFGQETQYF

SEQ ID NO: 140055 - protein, 14 aa, Homo sapiens
  CDR3 for alpha chain variable domain of TCR clone 70028 (TRAV8-1, TRAJ23)
RAVGTYNQGGKLIF

SEQ ID NO: 140056 - protein, 16 aa, Homo sapiens
  CDR3 for beta chain variable domain of TCR clone 70028 (TRBV18, TRBJ1-5)
CASSPSTGNSNQPQHS

SEQ ID NO: 140057 - protein, 13 aa, Homo sapiens
  CDR3 for alpha chain variable domain of TCR clone 70029 (TRAV2, TRAJ40)
CAVVTSGTYKYIF

SEQ ID NO: 140058 - protein, 13 aa, Homo sapiens
  CDR3 for beta chain variable domain of TCR clone 70029 (TRBV4-1, TRBJ2-5)
CASSLTRGETQYF

SEQ ID NO: 140059 - protein, 18 aa, Homo sapiens
  CDR3 for alpha chain variable domain of TCR clone 70030 (TRAV13-1, TRAJ52)
CAAKNPNAGGTSYRKLIF

SEQ ID NO: 140060 - protein, 16 aa, Homo sapiens
  CDR3 for beta chain variable domain of TCR clone 70030 (TRBV27, TRBJ2-2)
CASSFRGLVRTGELFF

SEQ ID NO: 140061 - protein, 14 aa, Homo sapiens
  CDR3 for alpha chain variable domain of TCR clone 70031 (TRAV1-2, TRAJ16)
CAVNRFSDGQKLLF

SEQ ID NO: 140062 - protein, 11 aa, Homo sapiens
  CDR3 for beta chain variable domain of TCR clone 70031 (TRBV29-1, TRBJ2-5)
CGEDRTGTQYF

SEQ ID NO: 140063 - protein, 13 aa, Homo sapiens
  CDR3 for alpha chain variable domain of TCR clone 70032 (TRAV26-1, TRAJ48)
CIVRVVGDEKLTF

SEQ ID NO: 140064 - protein, 19 aa, Homo sapiens
  CDR3 for beta chain variable domain of TCR clone 70032 (TRBV11-3, TRBJ2-2)
CASSTRPGAKTTNTGELSF

SEQ ID NO: 140065 - protein, 13 aa, Homo sapiens
  CDR3 for alpha chain variable domain of TCR clone 70033 (TRAV8-3, TRAJ28)
CAVGAVGSYQVTF

SEQ ID NO: 140066 - protein, 14 aa, Homo sapiens
  CDR3 for beta chain variable domain of TCR clone 70033 (TRBV7-2, TRBJ2-7)
CASRSQGAAYEQYF

SEQ ID NO: 140067 - protein, 12 aa, Homo sapiens
  CDR3 for alpha chain variable domain of TCR clone 70034 (TRAV3, TRAJ7)
CADLLWEQQTRL

SEQ ID NO: 140068 - protein, 13 aa, Homo sapiens
  CDR3 for beta chain variable domain of TCR clone 70034 (TRBV7-3, TRBJ2-5)
CASSFRGGETQYF

SEQ ID NO: 140069 - protein, 15 aa, Homo sapiens
  CDR3 for alpha chain variable domain of TCR clone 70035 (TRAV29/DV5, TRAJ29)
CAASERSSGNTPLVF

SEQ ID NO: 140070 - protein, 17 aa, Homo sapiens
  CDR3 for beta chain variable domain of TCR clone 70035 (TRBV4-1, TRBJ1-4)
CAISQEGPRGVEEKLFF

SEQ ID NO: 140071 - protein, 17 aa, Homo sapiens
  CDR3 for alpha chain variable domain of TCR clone 70036 (TRAV26-2, TRAJ42)
CILRDVGYGGSQGNLIF

SEQ ID NO: 140072 - protein, 16 aa, Homo sapiens
  CDR3 for beta chain variable domain of TCR clone 70036 (TRBV12-4, TRBJ2-7)
CASSLIGGTGTYGQYS

SEQ ID NO: 140073 - protein, 13 aa, Homo sapiens
  CDR3 for alpha chain variable domain of TCR clone 70037 (TRAV8-2, TRAJ47)
CVVREREGNKLVF

SEQ ID NO: 140074 - protein, 16 aa, Homo sapiens
  CDR3 for beta chain variable domain of TCR clone 70037 (TRBV5-1, TRBJ1-1)
CASSKTGTEVGTEAFF

SEQ ID NO: 140075 - protein, 12 aa, Homo sapiens
  CDR3 for alpha chain variable domain of TCR clone 70038 (TRAV2, TRAJ9)
CAVGAGGFKTIF

SEQ ID NO: 140076 - protein, 16 aa, Homo sapiens
  CDR3 for beta chain variable domain of TCR clone 70038 (TRBV9, TRBJ2-1)
CASSVGGGGNYNEQFF

SEQ ID NO: 140077 - protein, 12 aa, Homo sapiens
  CDR3 for alpha chain variable domain of TCR clone 70039 (TRAV12-3, TRAJ40)
CAMSSGTYKHIF

SEQ ID NO: 140078 - protein, 15 aa, Homo sapiens
  CDR3 for beta chain variable domain of TCR clone 70039 (TRBV7-3, TRBJ2-2)
CASSETGQGTGELFF

SEQ ID NO: 140079 - protein, 13 aa, Homo sapiens
  CDR3 for alpha chain variable domain of TCR clone 70040 (TRAV13-1, TRAJ5)
CAASDTGRRALTF

SEQ ID NO: 140080 - protein, 12 aa, Homo sapiens
  CDR3 for beta chain variable domain of TCR clone 70040 (TRBV28, TRBJ2-3)
CASSLFRDTQYF

SEQ ID NO: 140081 - protein, 10 aa, Homo sapiens
  CDR3 for alpha chain variable domain of TCR clone 70041 (TRAV13-2, TRAJ49)
CADTGNQFHF

SEQ ID NO: 140082 - protein, 15 aa, Homo sapiens
  CDR3 for beta chain variable domain of TCR clone 70041 (TRBV6-6, TRBJ1-1)
CASSPRGDVETEAFF

SEQ ID NO: 140083 - protein, 15 aa, Homo sapiens
  CDR3 for alpha chain variable domain of TCR clone 70042 (TRAV2, TRAJ9)
CAVAALNTGGFKTLF

SEQ ID NO: 140084 - protein, 14 aa, Homo sapiens
  CDR3 for beta chain variable domain of TCR clone 70042 (TRBV7-8, TRBJ2-5)
CASSATGGQETQYF

SEQ ID NO: 140085 - protein, 11 aa, Homo sapiens
  CDR3 for alpha chain variable domain of TCR clone 70043 (TRAV21, TRAJ11)
CAVNGYSTLTF

SEQ ID NO: 140086 - protein, 11 aa, Homo sapiens
  CDR3 for beta chain variable domain of TCR clone 70043 (TRBV19, TRBJ1-1)
CASSIRSEAFF

SEQ ID NO: 140087 - protein, 17 aa, Homo sapiens
  CDR3 for alpha chain variable domain of TCR clone 70044 (TRAV3, TRAJ6)
CAVRDGPRAGGSYIPTF

SEQ ID NO: 140088 - protein, 13 aa, Homo sapiens
  CDR3 for beta chain variable domain of TCR clone 70044 (TRBV7-2, TRBJ2-2)
CASSSVRAGELFF

SEQ ID NO: 140089 - protein, 15 aa, Homo sapiens
  CDR3 for alpha chain variable domain of TCR clone 70045 (TRAV3, TRAJ17)
CAVRDTGAAGNKLTF

SEQ ID NO: 140090 - protein, 16 aa, Homo sapiens
  CDR3 for beta chain variable domain of TCR clone 70045 (TRBV7-6, TRBJ2-3)
CASSLRREMGPDTQYF

SEQ ID NO: 140091 - protein, 15 aa, Homo sapiens
  CDR3 for alpha chain variable domain of TCR clone 70046 (TRAV35, TRAJ58)
CAGRRQETSGSRLTF

SEQ ID NO: 140092 - protein, 11 aa, Homo sapiens
  CDR3 for beta chain variable domain of TCR clone 70046 (TRBV11-2, TRBJ2-2)
CASSLPGELFF

SEQ ID NO: 140093 - protein, 18 aa, Homo sapiens
  CDR3 for alpha chain variable domain of TCR clone 70047 (TRAV29/DV5, TRAJ52)
CAAGFRGAGGTSYGKLTF

SEQ ID NO: 140094 - protein, 16 aa, Homo sapiens
  CDR3 for beta chain variable domain of TCR clone 70047 (TRBV7-3, TRBJ2-2)
CASSLKRGSLSGELFF

SEQ ID NO: 140095 - protein, 11 aa, Homo sapiens
  CDR3 for alpha chain variable domain of TCR clone 70048 (TRAV1-1, TRAJ23)
CAVRQGGKLIF

SEQ ID NO: 140096 - protein, 14 aa, Homo sapiens
  CDR3 for beta chain variable domain of TCR clone 70048 (TRBV19, TRBJ2-7)
CASSHGDFSYEQYF

SEQ ID NO: 140097 - protein, 15 aa, Homo sapiens
  CDR3 for alpha chain variable domain of TCR clone 70049 (TRAV27, TRAJ38)
CAARRNAGNNRKLIV

SEQ ID NO: 140098 - protein, 13 aa, Homo sapiens
  CDR3 for beta chain variable domain of TCR clone 70049 (TRBV12-5, TRBJ2-3)
CASGDRQSDTQYF

SEQ ID NO: 140099 - protein, 13 aa, Homo sapiens
  CDR3 for alpha chain variable domain of TCR clone 70050 (TRAV27, TRAJ17)
CAGAATAGNKLTF

SEQ ID NO: 140100 - protein, 15 aa, Homo sapiens
  CDR3 for beta chain variable domain of TCR clone 70050 (TRBV5-1, TRBJ2-3)
FASRNQAGSTDTQYF

SEQ ID NO: 140101 - protein, 15 aa, Homo sapiens
  CDR3 for alpha chain variable domain of TCR clone 70051 (TRAV27, TRAJ38)
CAARGNAGNNRKLIW

SEQ ID NO: 140102 - protein, 13 aa, Homo sapiens
  CDR3 for beta chain variable domain of TCR clone 70051 (TRBV12-5, TRBJ2-3)
CASGDRQSDTQYF

SEQ ID NO: 140103 - protein, 15 aa, Homo sapiens
  CDR3 for alpha chain variable domain of TCR clone 70052 (TRAV40, TRAJ45)
CLLVDLGGGADGLTF

SEQ ID NO: 140104 - protein, 13 aa, Homo sapiens
  CDR3 for beta chain variable domain of TCR clone 70052 (TRBV7-9, TRBJ1-2)
CASSLKQNYGYTF

SEQ ID NO: 140105 - protein, 14 aa, Homo sapiens
  CDR3 for alpha chain variable domain of TCR clone 70053 (TRAV17, TRAJ6)
CATDASGGSYIPKF

SEQ ID NO: 140106 - protein, 19 aa, Homo sapiens
  CDR3 for beta chain variable domain of TCR clone 70053 (TRBV4-3, TRBJ2-7)
CASSQEFIGWQVTPYEQYF

SEQ ID NO: 140107 - protein, 11 aa, Homo sapiens
  CDR3 for alpha chain variable domain of TCR clone 70054 (TRAV2, TRAJ13)
CASGGYQKVTF

SEQ ID NO: 140108 - protein, 10 aa, Homo sapiens
  CDR3 for beta chain variable domain of TCR clone 70054 (TRBV2, TRBJ2-5)
CASSAATQYF

SEQ ID NO: 140109 - protein, 14 aa, Homo sapiens
  CDR3 for alpha chain variable domain of TCR clone 70055 (TRAV2, TRAJ41)
CAVGTSNSGYALNF

SEQ ID NO: 140110 - protein, 13 aa, Homo sapiens
  CDR3 for beta chain variable domain of TCR clone 70055 (TRBV4-1, TRBJ2-1)
CASSQEVQYEQFV

SEQ ID NO: 140111 - protein, 14 aa, Homo sapiens
  CDR3 for alpha chain variable domain of TCR clone 70056 (TRAV12-2, TRAJ13)
CAVKKTGGYQKVTF

SEQ ID NO: 140112 - protein, 14 aa, Homo sapiens
  CDR3 for beta chain variable domain of TCR clone 70056 (TRBV10-3, TRBJ2-1)
CDISSDLAYNEQFF

SEQ ID NO: 140113 - protein, 11 aa, Homo sapiens
  CDR3 for alpha chain variable domain of TCR clone 70057 (TRAV21, TRAJ34)
CAVTNTDKLIF

SEQ ID NO: 140114 - protein, 15 aa, Homo sapiens
  CDR3 for beta chain variable domain of TCR clone 70057 (TRBV5-5, TRBJ1-1)
CASSLVGKDNTEAFF

SEQ ID NO: 140115 - protein, 13 aa, Homo sapiens
  CDR3 for alpha chain variable domain of TCR clone 70058 (TRAV20, TRAJ34)
CAVRSYDTDKLIF

SEQ ID NO: 140116 - protein, 12 aa, Homo sapiens
  CDR3 for beta chain variable domain of TCR clone 70058 (TRBV11-2, TRBJ2-1)
CASSPGNNEQFF

SEQ ID NO: 140117 - protein, 14 aa, Homo sapiens
  CDR3 for alpha chain variable domain of TCR clone 70059 (TRAV26-1, TRAJ38)
CIAHNAGNNRKLIW

SEQ ID NO: 140118 - protein, 13 aa, Homo sapiens
  CDR3 for beta chain variable domain of TCR clone 70059 (TRBV20-1, TRBJ1-1)
CSARGGGNTEAFF

SEQ ID NO: 140119 - protein, 14 aa, Homo sapiens
  CDR3 for alpha chain variable domain of TCR clone 70060 (TRAV12-2, TRAJ40)
CAVKIPSGTYKYIF

SEQ ID NO: 140120 - protein, 13 aa, Homo sapiens
  CDR3 for beta chain variable domain of TCR clone 70060 (TRBV28, TRBJ2-7)
CAGAQQGLDEQYF

SEQ ID NO: 140121 - protein, 14 aa, Homo sapiens
  CDR3 for alpha chain variable domain of TCR clone 70061 (TRAV9-2, TRAJ39)
CALYIYNAGNMLTF

SEQ ID NO: 140122 - protein, 12 aa, Homo sapiens
  CDR3 for beta chain variable domain of TCR clone 70061 (TRBV7-6, TRBJ2-3)
CASSTGTDTQYF

SEQ ID NO: 140123 - protein, 12 aa, Homo sapiens
  CDR3 for alpha chain variable domain of TCR clone 70062 (TRAV26-2, TRAJ21)
CILKGNFNKSYF

SEQ ID NO: 140124 - protein, 14 aa, Homo sapiens
  CDR3 for beta chain variable domain of TCR clone 70062 (TRBV7-9, TRBJ1-1)
CASTPLQSYTEAFF

SEQ ID NO: 140125 - protein, 14 aa, Homo sapiens
  CDR3 for alpha chain variable domain of TCR clone 70063 (TRAV1-2, TRAJ16)
CAVNRFSDGQKLLF

SEQ ID NO: 140126 - protein, 15 aa, Homo sapiens
  CDR3 for beta chain variable domain of TCR clone 70063 (TRBV5-1, TRBJ2-7)
CASSPQGRPLDEQYF

SEQ ID NO: 140127 - protein, 12 aa, Homo sapiens
  CDR3 for alpha chain variable domain of TCR clone 70064 (TRAV12-3, TRAJ20)
CEMVRGDYKLSF

SEQ ID NO: 140128 - protein, 16 aa, Homo sapiens
  CDR3 for beta chain variable domain of TCR clone 70064 (TRBV5-1, TRBJ2-3)
CASSLGLAVYTDTQYF

SEQ ID NO: 140129 - protein, 15 aa, Homo sapiens
  CDR3 for alpha chain variable domain of TCR clone 70065 (TRAV17, TRAJ40)
CATVSSTSGTYKYIF

SEQ ID NO: 140130 - protein, 15 aa, Homo sapiens
  CDR3 for beta chain variable domain of TCR clone 70065 (TRBV20-1, TRBJ2-7)
CSARDRVSGMDEQYF

SEQ ID NO: 140131 - protein, 18 aa, Homo sapiens
  CDR3 for alpha chain variable domain of TCR clone 70066 (TRAV21, TRAJ52)
CAVRPSPAGGTSYGKLTF

SEQ ID NO: 140132 - protein, 17 aa, Homo sapiens
  CDR3 for beta chain variable domain of TCR clone 70066 (TRBV19, TRBJ2-7)
CASSISFYDSYPYEQYF

SEQ ID NO: 140133 - protein, 13 aa, Homo sapiens
  CDR3 for alpha chain variable domain of TCR clone 70067 (TRAV2, TRAJ40)
CAVVTSGTYKYIF

SEQ ID NO: 140134 - protein, 13 aa, Homo sapiens
  CDR3 for beta chain variable domain of TCR clone 70067 (TRBV10-3, TRBJ1-2)
CAISERDNYGYTF

SEQ ID NO: 140135 - protein, 17 aa, Homo sapiens
  CDR3 for alpha chain variable domain of TCR clone 70068 (TRAV13-1, TRAJ31)
CAPRDRLMFGDGIQLVV

SEQ ID NO: 140136 - protein, 12 aa, Homo sapiens
  CDR3 for beta chain variable domain of TCR clone 70068 (TRBV7-9, TRBJ2-7)
CASSLEGYEQYF

SEQ ID NO: 140137 - protein, 14 aa, Homo sapiens
  CDR3 for alpha chain variable domain of TCR clone 70069 (TRAV8-1, TRAJ49)
CASSIANTGNQFHF

SEQ ID NO: 140138 - protein, 13 aa, Homo sapiens
  CDR3 for beta chain variable domain of TCR clone 70069 (TRBV11-2, TRBJ2-5)
CASSFSSQETQYF

SEQ ID NO: 140139 - protein, 18 aa, Homo sapiens
  CDR3 for alpha chain variable domain of TCR clone 70070 (TRAV12-3, TRAJ52)
CAMSVGGAGGTNYGKLTF

SEQ ID NO: 140140 - protein, 14 aa, Homo sapiens
  CDR3 for beta chain variable domain of TCR clone 70070 (TRBV7-2, TRBJ2-7)
CASRSQGAAYEQYF

SEQ ID NO: 140141 - protein, 14 aa, Homo sapiens
  CDR3 for alpha chain variable domain of TCR clone 70071 (TRAV1-2, TRAJ27)
CAVTNNTNAGKSTF

SEQ ID NO: 140142 - protein, 16 aa, Homo sapiens
  CDR3 for beta chain variable domain of TCR clone 70071 (TRBV7-3, TRBJ2-2)
CASSLKRGTLSGELFF

SEQ ID NO: 140143 - protein, 11 aa, Homo sapiens
  CDR3 for alpha chain variable domain of TCR clone 70072 (TRAV2, TRAJ13)
CASGGYQKVTF

SEQ ID NO: 140144 - protein, 13 aa, Homo sapiens
  CDR3 for beta chain variable domain of TCR clone 70072 (TRBV19, TRBJ1-2)
CASSQGQVYGYTF

SEQ ID NO: 140145 - protein, 14 aa, Homo sapiens
  CDR3 for alpha chain variable domain of TCR clone 70073 (TRAV16, TRAJ33)
CALSAMDSNYQLIW

SEQ ID NO: 140146 - protein, 16 aa, Homo sapiens
  CDR3 for beta chain variable domain of TCR clone 70073 (TRBV25-1, TRBJ2-7)
CASSELTGGGIYEQCF

SEQ ID NO: 140147 - protein, 14 aa, Homo sapiens
  CDR3 for alpha chain variable domain of TCR clone 70074 (TRAV2, TRAJ39)
CALSKNNAGNMLTF

SEQ ID NO: 140148 - protein, 19 aa, Homo sapiens
  CDR3 for beta chain variable domain of TCR clone 70074 (TRBV6-6, TRBJ2-1)
AAPSQTSVYFCASSYEQFF

SEQ ID NO: 140149 - protein, 15 aa, Homo sapiens
  CDR3 for alpha chain variable domain of TCR clone 70075 (TRAV16, TRAJ12)
CSQWPLRDSSYKLIF

SEQ ID NO: 140150 - protein, 13 aa, Homo sapiens
  CDR3 for beta chain variable domain of TCR clone 70075 (TRBV4-2, TRBJ1-1)
CASSQAGNTEAFF

SEQ ID NO: 140151 - protein, 17 aa, Homo sapiens
  CDR3 for alpha chain variable domain of TCR clone 70076 (TRAV4, TRAJ18)
CLVVAAGRGSTLGRLYF

SEQ ID NO: 140152 - protein, 17 aa, Homo sapiens
  CDR3 for beta chain variable domain of TCR clone 70076 (TRBV28, TRBJ2-2)
CASSLATGMGDAGELVF

SEQ ID NO: 140153 - protein, 13 aa, Homo sapiens
  CDR3 for alpha chain variable domain of TCR clone 70077 (TRAV8-3, TRAJ43)
CAMGPDNNNDMCF

SEQ ID NO: 140154 - protein, 12 aa, Homo sapiens
  CDR3 for beta chain variable domain of TCR clone 70077 (TRBV7-2, TRBJ1-6)
CASSLSSSPLHF

SEQ ID NO: 140155 - protein, 16 aa, Homo sapiens
  CDR3 for alpha chain variable domain of TCR clone 70078 (TRAV30, TRAJ24)
CGTEIVDADSWGKFQF

SEQ ID NO: 140156 - protein, 14 aa, Homo sapiens
  CDR3 for beta chain variable domain of TCR clone 70078 (TRBV28, TRBJ2-5)
CASSLGDRAETQYF

SEQ ID NO: 140157 - protein, 14 aa, Homo sapiens
  CDR3 for alpha chain variable domain of TCR clone 70079 (TRAV17, TRAJ16)
CATANFSDGQKLLF

SEQ ID NO: 140158 - protein, 15 aa, Homo sapiens
  CDR3 for beta chain variable domain of TCR clone 70079 (TRBV18, TRBJ2-1)
CASSPPSASYNEQFF

SEQ ID NO: 140159 - protein, 11 aa, Homo sapiens
  CDR3 for alpha chain variable domain of TCR clone 70080 (TRAV3, TRAJ17)
PRGAAGNKLTF

SEQ ID NO: 140160 - protein, 16 aa, Homo sapiens
  CDR3 for beta chain variable domain of TCR clone 70080 (TRBV7-6, TRBJ2-1)
CASSAPGPSSYNEQFV

SEQ ID NO: 140161 - protein, 13 aa, Homo sapiens
  CDR3 for alpha chain variable domain of TCR clone 70081 (TRAV21, TRAJ15)
CAVTNQAGTALIF

SEQ ID NO: 140162 - protein, 14 aa, Homo sapiens
  CDR3 for beta chain variable domain of TCR clone 70081 (TRBV27, TRBJ2-2)
CASSLGAATGELFF

SEQ ID NO: 140163 - protein, 15 aa, Homo sapiens
  CDR3 for alpha chain variable domain of TCR clone 70082 (TRAV2, TRAJ22)
CAVPSRGGSARQLTF

SEQ ID NO: 140164 - protein, 14 aa, Homo sapiens
  CDR3 for beta chain variable domain of TCR clone 70082 (TRBV19, TRBJ2-1)
CASPTFVLSGEQFF

SEQ ID NO: 140165 - protein, 16 aa, Homo sapiens
  CDR3 for alpha chain variable domain of TCR clone 70083 (TRAV27, TRAJ48)
TAAQPGDTGLYLPLTF

SEQ ID NO: 140166 - protein, 15 aa, Homo sapiens
  CDR3 for beta chain variable domain of TCR clone 70083 (TRBV7-3, TRBJ2-1)
CASSFGQSNYNEQFF

SEQ ID NO: 140167 - protein, 11 aa, Homo sapiens
  CDR3 for alpha chain variable domain of TCR clone 70084 (TRAV12-2, TRAJ31)
CAVTRWARPMF

SEQ ID NO: 140168 - protein, 13 aa, Homo sapiens
  CDR3 for beta chain variable domain of TCR clone 70084 (TRBV19, TRBJ1-2)
CASSVPGQDGYTF

SEQ ID NO: 140169 - protein, 14 aa, Homo sapiens
  CDR3 for alpha chain variable domain of TCR clone 70085 (TRAV9-2, TRAJ42)
CALSTVGSQGNLIF

SEQ ID NO: 140170 - protein, 10 aa, Homo sapiens
  CDR3 for beta chain variable domain of TCR clone 70085 (TRBV24-1, TRBJ2-2)
CATSEADLER

SEQ ID NO: 140171 - protein, 12 aa, Homo sapiens
  CDR3 for alpha chain variable domain of TCR clone 70086 (TRAV13-1, TRAJ49)
CAAPNAGNQFYF

SEQ ID NO: 140172 - protein, 17 aa, Homo sapiens
  CDR3 for beta chain variable domain of TCR clone 70086 (TRBV25-1, TRBJ2-7)
CASSDARVVFSSYEQYF

SEQ ID NO: 140173 - protein, 16 aa, Homo sapiens
  CDR3 for alpha chain variable domain of TCR clone 70087 (TRAV17, TRAJ28)
CATASVSVAGSYQLTF

SEQ ID NO: 140174 - protein, 14 aa, Homo sapiens
  CDR3 for beta chain variable domain of TCR clone 70087 (TRBV19, TRBJ2-1)
CASEVTGARNEQFF

SEQ ID NO: 140175 - protein, 14 aa, Homo sapiens
  CDR3 for alpha chain variable domain of TCR clone 70088 (TRAV1-2, TRAJ16)
CAVNRFSDGQKLLF

SEQ ID NO: 140176 - protein, 12 aa, Homo sapiens
  CDR3 for beta chain variable domain of TCR clone 70088 (TRBV19, TRBJ2-3)
CATTSSTDTQYF

SEQ ID NO: 140177 - protein, 17 aa, Homo sapiens
  CDR3 for alpha chain variable domain of TCR clone 70089 (TRAV3, TRAJ6)
CAVRDGPRAGGSYIPTF

SEQ ID NO: 140178 - protein, 13 aa, Homo sapiens
  CDR3 for beta chain variable domain of TCR clone 70089 (TRBV7-2, TRBJ1-6)
CASSLKFDSPLHF

SEQ ID NO: 140179 - protein, 14 aa, Homo sapiens
  CDR3 for alpha chain variable domain of TCR clone 70090 (TRAV3, TRAJ7)
CAVREEEREQQTRF

SEQ ID NO: 140180 - protein, 12 aa, Homo sapiens
  CDR3 for beta chain variable domain of TCR clone 70090 (TRBV7-8, TRBJ2-7)
CASSLGDREQHF

SEQ ID NO: 140181 - protein, 12 aa, Homo sapiens
  CDR3 for alpha chain variable domain of TCR clone 70091 (TRAV21, TRAJ12)
CAVMDSSYKLIF

SEQ ID NO: 140182 - protein, 16 aa, Homo sapiens
  CDR3 for beta chain variable domain of TCR clone 70091 (TRBV7-9, TRBJ2-5)
CASRLEIGTRKETQYL

SEQ ID NO: 140183 - protein, 13 aa, Homo sapiens
  CDR3 for alpha chain variable domain of TCR clone 70092 (TRAV26-2, TRAJ43)
CILRAVNNNDMRF

SEQ ID NO: 140184 - protein, 15 aa, Homo sapiens
  CDR3 for beta chain variable domain of TCR clone 70092 (TRBV7-2, TRBJ2-1)
CANTHGTGIYNEQFF

SEQ ID NO: 140185 - protein, 15 aa, Homo sapiens
  CDR3 for alpha chain variable domain of TCR clone 70093 (TRAV3, TRAJ13)
CAVRVYSGGYQKVTF

SEQ ID NO: 140186 - protein, 16 aa, Homo sapiens
  CDR3 for beta chain variable domain of TCR clone 70093 (TRBV28, TRBJ2-7)
CASSLFFETGGPEQYF

SEQ ID NO: 140187 - protein, 16 aa, Homo sapiens
  CDR3 for alpha chain variable domain of TCR clone 70094 (TRAV13-2, TRAJ53)
CAENANSGGSNYKLTF

SEQ ID NO: 140188 - protein, 21 aa, Homo sapiens
  CDR3 for beta chain variable domain of TCR clone 70094 (TRBV28, TRBJ2-7)
CASSYSGTSRLDGSTSSTSGR

SEQ ID NO: 140189 - protein, 14 aa, Homo sapiens
  CDR3 for alpha chain variable domain of TCR clone 70095 (TRAV13-1, TRAJ40)
CAASMTSGTYKYIF

SEQ ID NO: 140190 - protein, 15 aa, Homo sapiens
  CDR3 for beta chain variable domain of TCR clone 70095 (TRBV7-3, TRBJ2-1)
CASSPTGGGEVEQVF

SEQ ID NO: 140191 - protein, 17 aa, Homo sapiens
  CDR3 for alpha chain variable domain of TCR clone 70096 (TRAV3, TRAJ6)
CAVRDGPRAGGSYIPTF

SEQ ID NO: 140192 - protein, 15 aa, Homo sapiens
  CDR3 for beta chain variable domain of TCR clone 70096 (TRBV7-9, TRBJ1-4)
CASSATGGNNEKLFF

SEQ ID NO: 140193 - protein, 11 aa, Homo sapiens
  CDR3 for alpha chain variable domain of TCR clone 70097 (TRAV21, TRAJ11)
CAVNGYSTLTF

SEQ ID NO: 140194 - protein, 11 aa, Homo sapiens
  CDR3 for beta chain variable domain of TCR clone 70097 (TRBV19, TRBJ1-1)
CASSMGSEAFF

SEQ ID NO: 140195 - protein, 15 aa, Homo sapiens
  CDR3 for alpha chain variable domain of TCR clone 70098 (TRAV27, TRAJ38)
CAARRNAGNNRKLIW

SEQ ID NO: 140196 - protein, 13 aa, Homo sapiens
  CDR3 for beta chain variable domain of TCR clone 70098 (TRBV12-5, TRBJ2-3)
CASGDRPSDTQYF

SEQ ID NO: 140197 - protein, 15 aa, Homo sapiens
  CDR3 for alpha chain variable domain of TCR clone 70099 (TRAV21, TRAJ52)
CAVRGGGTSYGKLTF

SEQ ID NO: 140198 - protein, 17 aa, Homo sapiens
  CDR3 for beta chain variable domain of TCR clone 70099 (TRBV7-3, TRBJ2-3)
CASSLMKRMRGADTQYF

SEQ ID NO: 140199 - protein, 15 aa, Homo sapiens
  CDR3 for alpha chain variable domain of TCR clone 70100 (TRAV13-1, TRAJ16)
CSARYQMARSCSLQG

SEQ ID NO: 140200 - protein, 13 aa, Homo sapiens
  CDR3 for beta chain variable domain of TCR clone 70100 (TRBV4-1, TRBJ2-1)
CASSQAGGDEQFF

SEQ ID NO: 140201 - protein, 14 aa, Homo sapiens
  CDR3 for alpha chain variable domain of TCR clone 70101 (TRAV12-2, TRAJ24)
CAVTPADSWGKLQF

SEQ ID NO: 140202 - protein, 15 aa, Homo sapiens
  CDR3 for beta chain variable domain of TCR clone 70101 (TRBV7-9, TRBJ1-6)
CASSSPGRGNSPLHF

SEQ ID NO: 140203 - protein, 12 aa, Homo sapiens
  CDR3 for alpha chain variable domain of TCR clone 70102 (TRAV21, TRAJ31)
CVLAGNNARLMF

SEQ ID NO: 140204 - protein, 16 aa, Homo sapiens
  CDR3 for beta chain variable domain of TCR clone 70102 (TRBV27, TRBJ2-5)
CSSSFGPGGTKETQYF

SEQ ID NO: 140205 - protein, 19 aa, Homo sapiens
  CDR3 for alpha chain variable domain of TCR clone 70103 (TRAV26-1, TRAJ52)
CIVRAHRNAGGTSYGKLTF

SEQ ID NO: 140206 - protein, 15 aa, Homo sapiens
  CDR3 for beta chain variable domain of TCR clone 70103 (TRBV12-4, TRBJ2-5)
YASSPPTGLQETQYF

SEQ ID NO: 140207 - protein, 14 aa, Homo sapiens
  CDR3 for alpha chain variable domain of TCR clone 70104 (TRAV3, TRAJ21)
CALGRGSTNFTLDL

SEQ ID NO: 140208 - protein, 14 aa, Homo sapiens
  CDR3 for beta chain variable domain of TCR clone 70104 (TRBV7-9, TRBJ1-2)
CASSRQGANYGYAF

SEQ ID NO: 140209 - protein, 15 aa, Homo sapiens
  CDR3 for alpha chain variable domain of TCR clone 70105 (TRAV29/DV5, TRAJ42)
CAAKTDGGSQGNIIF

SEQ ID NO: 140210 - protein, 15 aa, Homo sapiens
  CDR3 for beta chain variable domain of TCR clone 70105 (TRBV5-1, TRBJ2-2)
CASSSQGGNTGELFF

SEQ ID NO: 140211 - protein, 12 aa, Homo sapiens
  CDR3 for alpha chain variable domain of TCR clone 70106 (TRAV17, TRAJ39)
CATGTAGNMLTF

SEQ ID NO: 140212 - protein, 14 aa, Homo sapiens
  CDR3 for beta chain variable domain of TCR clone 70106 (TRBV7-9, TRBJ1-2)
CASSRQGANYGYTF

SEQ ID NO: 140213 - protein, 13 aa, Homo sapiens
  CDR3 for alpha chain variable domain of TCR clone 70107 (TRAV38-1, TRAJ57)
CALVQGGSEKQVF

SEQ ID NO: 140214 - protein, 17 aa, Homo sapiens
  CDR3 for beta chain variable domain of TCR clone 70107 (TRBV29-1, TRBJ2-3)
CSVDSPPRGARTDTQYF

SEQ ID NO: 140215 - protein, 18 aa, Homo sapiens
  CDR3 for alpha chain variable domain of TCR clone 70108 (TRAV8-4, TRAJ52)
CSVTRANAGGTSYGKLTF

SEQ ID NO: 140216 - protein, 12 aa, Homo sapiens
  CDR3 for beta chain variable domain of TCR clone 70108 (TRBV11-2, TRBJ2-2)
CASSLPTGELFF

SEQ ID NO: 140217 - protein, 13 aa, Homo sapiens
  CDR3 for alpha chain variable domain of TCR clone 70109 (TRAV1-2, TRAJ9)
CAALNTGGFKTIF

SEQ ID NO: 140218 - protein, 18 aa, Homo sapiens
  CDR3 for beta chain variable domain of TCR clone 70109 (TRBV12-4, TRBJ2-2)
CASSLVAGTRGRTGELFF

SEQ ID NO: 140219 - protein, 14 aa, Homo sapiens
  CDR3 for alpha chain variable domain of TCR clone 70110 (TRAV23/DV6, TRAJ57)
CSASNQGGSEKLVF

SEQ ID NO: 140220 - protein, 13 aa, Homo sapiens
  CDR3 for beta chain variable domain of TCR clone 70110 (TRBV11-2, TRBJ2-7)
CASSSYPSYEQYF

SEQ ID NO: 140221 - protein, 14 aa, Homo sapiens
  CDR3 for alpha chain variable domain of TCR clone 70111 (TRAV2, TRAJ9)
CAVEDRSGGFKTIF

SEQ ID NO: 140222 - protein, 17 aa, Homo sapiens
  CDR3 for beta chain variable domain of TCR clone 70111 (TRBV28, TRBJ2-5)
CASSTPEGDALQETQYF

SEQ ID NO: 140223 - protein, 17 aa, Homo sapiens
  CDR3 for alpha chain variable domain of TCR clone 70112 (TRAV13-1, TRAJ52)
CAASSGAGGTSYGKLTF

SEQ ID NO: 140224 - protein, 13 aa, Homo sapiens
  CDR3 for beta chain variable domain of TCR clone 70112 (TRBV12-4, TRBJ1-2)
CASSLRQGKGYTF

SEQ ID NO: 140225 - protein, 14 aa, Homo sapiens
  CDR3 for alpha chain variable domain of TCR clone 70113 (TRAV34, TRAJ22)
CGADTSGSARQLTF

SEQ ID NO: 140226 - protein, 18 aa, Homo sapiens
  CDR3 for beta chain variable domain of TCR clone 70113 (TRBV12-4, TRBJ2-2)
CASSLVAGTRGRTGELFF

SEQ ID NO: 140227 - protein, 13 aa, Homo sapiens
  CDR3 for alpha chain variable domain of TCR clone 70114 (TRAV20, TRAJ56)
CAVQAGANSELTF

SEQ ID NO: 140228 - protein, 14 aa, Homo sapiens
  CDR3 for beta chain variable domain of TCR clone 70114 (TRBV28, TRBJ1-1)
CASSPRTRWAEAFF

SEQ ID NO: 140229 - protein, 14 aa, Homo sapiens
  CDR3 for alpha chain variable domain of TCR clone 70115 (TRAV26-1, TRAJ21)
CIVRVVYNFNKFYF

SEQ ID NO: 140230 - protein, 17 aa, Homo sapiens
  CDR3 for beta chain variable domain of TCR clone 70115 (TRBV11-2, TRBJ2-1)
CASSLYPPGVEYNEQLF

SEQ ID NO: 140231 - protein, 14 aa, Homo sapiens
  CDR3 for alpha chain variable domain of TCR clone 70116 (TRAV35, TRAJ22)
CAGLRPGSARQLTF

SEQ ID NO: 140232 - protein, 14 aa, Homo sapiens
  CDR3 for beta chain variable domain of TCR clone 70116 (TRBV12-4, TRBJ2-5)
CQQSPDRPPRDQYF

SEQ ID NO: 140233 - protein, 13 aa, Homo sapiens
  CDR3 for alpha chain variable domain of TCR clone 70117 (TRAV20, TRAJ21)
CAVEGYNFNKFYF

SEQ ID NO: 140234 - protein, 14 aa, Homo sapiens
  CDR3 for beta chain variable domain of TCR clone 70117 (TRBV7-6, TRBJ2-3)
CASSLGTVTDTQYF

SEQ ID NO: 140235 - protein, 16 aa, Homo sapiens
  CDR3 for alpha chain variable domain of TCR clone 70118 (TRAV30, TRAJ24)
CGTEIVDADSWGKFPL

SEQ ID NO: 140236 - protein, 14 aa, Homo sapiens
  CDR3 for beta chain variable domain of TCR clone 70118 (TRBV12-5, TRBJ2-5)
CASGSRTHQETQYF

SEQ ID NO: 140237 - protein, 14 aa, Homo sapiens
  CDR3 for alpha chain variable domain of TCR clone 70119 (TRAV38-1, TRAJ45)
CAHYSGGGADGLTF

SEQ ID NO: 140238 - protein, 20 aa, Homo sapiens
  CDR3 for beta chain variable domain of TCR clone 70119 (TRBV28, TRBJ2-1)
CASTPIGRSPGLAGGNEQFF

SEQ ID NO: 140239 - protein, 17 aa, Homo sapiens
  CDR3 for alpha chain variable domain of TCR clone 70120 (TRAV19, TRAJ28)
CALSEASSGAGSYQLTF

SEQ ID NO: 140240 - protein, 15 aa, Homo sapiens
  CDR3 for beta chain variable domain of TCR clone 70120 (TRBV7-8, TRBJ1-5)
CASSLALGGQQPQHF

SEQ ID NO: 140241 - protein, 16 aa, Homo sapiens
  CDR3 for alpha chain variable domain of TCR clone 70121 (TRAV21, TRAJ52)
CAVTNSGGTSYGKLTF

SEQ ID NO: 140242 - protein, 11 aa, Homo sapiens
  CDR3 for beta chain variable domain of TCR clone 70121 (TRBV2, TRBJ1-1)
CASREGTEAFF

SEQ ID NO: 140243 - protein, 10 aa, Homo sapiens
  CDR3 for alpha chain variable domain of TCR clone 70122 (TRAV26-1, TRAJ40)
CIAGTCKYIF

SEQ ID NO: 140244 - protein, 15 aa, Homo sapiens
  CDR3 for beta chain variable domain of TCR clone 70122 (TRBV19, TRBJ2-1)
CASSSPGVPLDEQFF

SEQ ID NO: 140245 - protein, 13 aa, Homo sapiens
  CDR3 for alpha chain variable domain of TCR clone 70123 (TRAV17, TRAJ5)
CAPMDTGRRALTF

SEQ ID NO: 140246 - protein, 16 aa, Homo sapiens
  CDR3 for beta chain variable domain of TCR clone 70123 (TRBV27, TRBJ2-7)
CASSSERRDGAYEQYF

SEQ ID NO: 140247 - protein, 15 aa, Homo sapiens
  CDR3 for alpha chain variable domain of TCR clone 70124 (TRAV17, TRAJ57)
CATGPSQGGSEKLVF

SEQ ID NO: 140248 - protein, 16 aa, Homo sapiens
  CDR3 for beta chain variable domain of TCR clone 70124 (TRBV12-4, TRBJ1-5)
SASSRPVGGSNQPQHF

SEQ ID NO: 140249 - protein, 13 aa, Homo sapiens
  CDR3 for alpha chain variable domain of TCR clone 70125 (TRAV12-3, TRAJ43)
CAMRPDNNNDMRF

SEQ ID NO: 140250 - protein, 16 aa, Homo sapiens
  CDR3 for beta chain variable domain of TCR clone 70125 (TRBV11-2, TRBJ2-1)
CASSLLLLSSYNEQFF

SEQ ID NO: 140251 - protein, 15 aa, Homo sapiens
  CDR3 for alpha chain variable domain of TCR clone 70126 (TRAV17, TRAJ57)
CATGPSQGGSERLVF

SEQ ID NO: 140252 - protein, 15 aa, Homo sapiens
  CDR3 for beta chain variable domain of TCR clone 70126 (TRBV9, TRBJ2-1)
CASSLAGSSYNEQFF

SEQ ID NO: 140253 - protein, 19 aa, Homo sapiens
  CDR3 for alpha chain variable domain of TCR clone 70127 (TRAV6, TRAJ29)
PAYRLSYLPLCSTITPLVF

SEQ ID NO: 140254 - protein, 12 aa, Homo sapiens
  CDR3 for beta chain variable domain of TCR clone 70127 (TRBV12-4, TRBJ2-3)
CASSTLPDTQYF

SEQ ID NO: 140255 - protein, 13 aa, Homo sapiens
  CDR3 for alpha chain variable domain of TCR clone 70128 (TRAV27, TRAJ42)
CAGARGSQGNLIF

SEQ ID NO: 140256 - protein, 14 aa, Homo sapiens
  CDR3 for beta chain variable domain of TCR clone 70128 (TRBV25-1, TRBJ1-1)
CASTHLGGNTEAFF

SEQ ID NO: 140257 - protein, 11 aa, Homo sapiens
  CDR3 for alpha chain variable domain of TCR clone 70129 (TRAV2, TRAJ23)
CAVEPRGKLIF

SEQ ID NO: 140258 - protein, 14 aa, Homo sapiens
  CDR3 for beta chain variable domain of TCR clone 70129 (TRBV2, TRBJ2-3)
CASSEGQNTDTQYF

SEQ ID NO: 140259 - protein, 15 aa, Homo sapiens
  CDR3 for alpha chain variable domain of TCR clone 70130 (TRAV27, TRAJ17)
CRSTMIKAAGNKLTF

SEQ ID NO: 140260 - protein, 14 aa, Homo sapiens
  CDR3 for beta chain variable domain of TCR clone 70130 (TRBV19, TRBJ2-1)
CASPTFVLSGEQFF

SEQ ID NO: 140261 - protein, 13 aa, Homo sapiens
  CDR3 for alpha chain variable domain of TCR clone 70131 (TRAV17, TRAJ29)
CATDAFRKHTSCL

SEQ ID NO: 140262 - protein, 13 aa, Homo sapiens
  CDR3 for beta chain variable domain of TCR clone 70131 (TRBV5-7, TRBJ2-6)
CASISSGANVLTF

SEQ ID NO: 140263 - protein, 15 aa, Homo sapiens
  CDR3 for alpha chain variable domain of TCR clone 70132 (TRAV4, TRAJ39)
CLVGPNNNAGNMLTF

SEQ ID NO: 140264 - protein, 15 aa, Homo sapiens
  CDR3 for beta chain variable domain of TCR clone 70132 (TRBV6-3, TRBJ2-7)
CASSSPGTVFYEQYF

SEQ ID NO: 140265 - protein, 15 aa, Homo sapiens
  CDR3 for alpha chain variable domain of TCR clone 70133 (TRAV26-2, TRAJ26)
CILRDFDNYGQNLVF

SEQ ID NO: 140266 - protein, 14 aa, Homo sapiens
  CDR3 for beta chain variable domain of TCR clone 70133 (TRBV29-1, TRBJ2-5)
CSFWTPYAGETQYF

SEQ ID NO: 140267 - protein, 12 aa, Homo sapiens
  CDR3 for alpha chain variable domain of TCR clone 70134 (TRAV23/DV6, TRAJ17)
CARGSCRQQANF

SEQ ID NO: 140268 - protein, 14 aa, Homo sapiens
  CDR3 for beta chain variable domain of TCR clone 70134 (TRBV7-2, TRBJ1-2)
CASSQTGSTYGDTF

SEQ ID NO: 140269 - protein, 11 aa, Homo sapiens
  CDR3 for alpha chain variable domain of TCR clone 70135 (TRAV2, TRAJ33)
CAVDCNYQLIW

SEQ ID NO: 140270 - protein, 15 aa, Homo sapiens
  CDR3 for beta chain variable domain of TCR clone 70135 (TRBV19, TRBJ1-2)
CASSVGQVLNYGYTF

SEQ ID NO: 140271 - protein, 12 aa, Homo sapiens
  CDR3 for alpha chain variable domain of TCR clone 70136 (TRAV12-2, TRAJ47)
CAVAEYGNNLVF

SEQ ID NO: 140272 - protein, 14 aa, Homo sapiens
  CDR3 for beta chain variable domain of TCR clone 70136 (TRBV20-1, TRBJ1-1)
CSAMGGTANTEAFF

SEQ ID NO: 140273 - protein, 15 aa, Homo sapiens
  CDR3 for alpha chain variable domain of TCR clone 70137 (TRAV25, TRAJ52)
SAGRPGGTSYGKLTF

SEQ ID NO: 140274 - protein, 17 aa, Homo sapiens
  CDR3 for beta chain variable domain of TCR clone 70137 (TRBV7-8, TRBJ2-6)
CASSAGTGGAGANVLTF

SEQ ID NO: 140275 - protein, 14 aa, Homo sapiens
  CDR3 for alpha chain variable domain of TCR clone 70138 (TRAV17, TRAJ6)
CATPAMGGSYIPTF

SEQ ID NO: 140276 - protein, 18 aa, Homo sapiens
  CDR3 for beta chain variable domain of TCR clone 70138 (TRBV11-2, TRBJ2-3)
CASSLGGASRGAPNTQYF

SEQ ID NO: 140277 - protein, 14 aa, Homo sapiens
  CDR3 for alpha chain variable domain of TCR clone 70139 (TRAV8-3, TRAJ4)
CAVGAAGGYNKLIF

SEQ ID NO: 140278 - protein, 15 aa, Homo sapiens
  CDR3 for beta chain variable domain of TCR clone 70139 (TRBV6-5, TRBJ2-1)
CASSCDAGAGNEQFF

SEQ ID NO: 140279 - protein, 12 aa, Homo sapiens
  CDR3 for alpha chain variable domain of TCR clone 70140 (TRAV12-3, TRAJ17)
SAMTLTGNKLTL

SEQ ID NO: 140280 - protein, 15 aa, Homo sapiens
  CDR3 for beta chain variable domain of TCR clone 70140 (TRBV20-1, TRBJ2-7)
CSARDRVSGMDEQYF

SEQ ID NO: 140281 - protein, 15 aa, Homo sapiens
  CDR3 for alpha chain variable domain of TCR clone 70141 (TRAV26-1, TRAJ48)
CVVRVGDFGNEKLTF

SEQ ID NO: 140282 - protein, 16 aa, Homo sapiens
  CDR3 for beta chain variable domain of TCR clone 70141 (TRBV4-1, TRBJ2-3)
CASSQRAGGLTDTQYF

SEQ ID NO: 140283 - protein, 16 aa, Homo sapiens
  CDR3 for alpha chain variable domain of TCR clone 70142 (TRAV3, TRAJ37)
CAVRGKGSGNTGKLIF

SEQ ID NO: 140284 - protein, 13 aa, Homo sapiens
  CDR3 for beta chain variable domain of TCR clone 70142 (TRBV7-2, TRBJ2-2)
CASSSVRAGELFL

SEQ ID NO: 140285 - protein, 13 aa, Homo sapiens
  CDR3 for alpha chain variable domain of TCR clone 70143 (TRAV27, TRAJ29)
CAGAHSGNTPLVF

SEQ ID NO: 140286 - protein, 14 aa, Homo sapiens
  CDR3 for beta chain variable domain of TCR clone 70143 (TRBV25-1, TRBJ1-1)
CASTHLGGNTEAFF

SEQ ID NO: 140287 - protein, 12 aa, Homo sapiens
  CDR3 for alpha chain variable domain of TCR clone 70144 (TRAV3, TRAJ27)
CAVRDNAGKSTF

SEQ ID NO: 140288 - protein, 14 aa, Homo sapiens
  CDR3 for beta chain variable domain of TCR clone 70144 (TRBV5-1, TRBJ1-2)
CASSVDSTNYGYTF

SEQ ID NO: 140289 - protein, 12 aa, Homo sapiens
  CDR3 for alpha chain variable domain of TCR clone 70145 (TRAV20, TRAJ56)
CAVIGANSKLTF

SEQ ID NO: 140290 - protein, 14 aa, Homo sapiens
  CDR3 for beta chain variable domain of TCR clone 70145 (TRBV20-1, TRBJ2-5)
CSALVPGYQETQYF

SEQ ID NO: 140291 - protein, 14 aa, Homo sapiens
  CDR3 for alpha chain variable domain of TCR clone 70146 (TRAV16, TRAJ39)
CALSKNNTGNMLTF

SEQ ID NO: 140292 - protein, 16 aa, Homo sapiens
  CDR3 for beta chain variable domain of TCR clone 70146 (TRBV6-6, TRBJ2-1)
CASSYSFSGSYNEQFF

SEQ ID NO: 140293 - protein, 15 aa, Homo sapiens
  CDR3 for alpha chain variable domain of TCR clone 70147 (TRAV26-1, TRAJ44)
CIGRANTGTASKLTF

SEQ ID NO: 140294 - protein, 16 aa, Homo sapiens
  CDR3 for beta chain variable domain of TCR clone 70147 (TRBV7-7, TRBJ2-1)
CASSLASGTSYNEQFF

SEQ ID NO: 140295 - protein, 19 aa, Homo sapiens
  CDR3 for alpha chain variable domain of TCR clone 70148 (TRAV1-2, TRAJ26)
CLLPLCCERPDNYGQNFVF

SEQ ID NO: 140296 - protein, 17 aa, Homo sapiens
  CDR3 for beta chain variable domain of TCR clone 70148 (TRBV11-2, TRBJ2-1)
CASSLYPPGVEYNEQFF

SEQ ID NO: 140297 - protein, 11 aa, Homo sapiens
  CDR3 for alpha chain variable domain of TCR clone 70149 (TRAV21, TRAJ11)
CAVNGYSTLTF

SEQ ID NO: 140298 - protein, 14 aa, Homo sapiens
  CDR3 for beta chain variable domain of TCR clone 70149 (TRBV19, TRBJ1-5)
CASRAPDSFLSQHF

SEQ ID NO: 140299 - protein, 15 aa, Homo sapiens
  CDR3 for alpha chain variable domain of TCR clone 70150 (TRAV8-3, TRAJ45)
CASSYSGGGADGLTF

SEQ ID NO: 140300 - protein, 17 aa, Homo sapiens
  CDR3 for beta chain variable domain of TCR clone 70150 (TRBV7-3, TRBJ2-3)
CASSLMKRMRGADTQYF

SEQ ID NO: 140301 - protein, 14 aa, Homo sapiens
  CDR3 for alpha chain variable domain of TCR clone 70151 (TRAV12-3, TRAJ10)
SHLPLPGGGNKLTF

SEQ ID NO: 140302 - protein, 15 aa, Homo sapiens
  CDR3 for beta chain variable domain of TCR clone 70151 (TRBV7-9, TRBJ1-6)
CASSSPGRGNSPLHF

SEQ ID NO: 140303 - protein, 15 aa, Homo sapiens
  CDR3 for alpha chain variable domain of TCR clone 70152 (TRAV8-3, TRAJ45)
CASSYSGGGADGLTF

SEQ ID NO: 140304 - protein, 13 aa, Homo sapiens
  CDR3 for beta chain variable domain of TCR clone 70152 (TRBV7-8, TRBJ2-7)
CASSLTGGREQYL

SEQ ID NO: 140305 - protein, 15 aa, Homo sapiens
  CDR3 for alpha chain variable domain of TCR clone 70153 (TRAV26-1, TRAJ48)
CIVRVGDFGNEKLTF

SEQ ID NO: 140306 - protein, 15 aa, Homo sapiens
  CDR3 for beta chain variable domain of TCR clone 70153 (TRBV4-1, TRBJ2-3)
RQQPKSGGLTDTQYF

SEQ ID NO: 140307 - protein, 14 aa, Homo sapiens
  CDR3 for alpha chain variable domain of TCR clone 70154 (TRAV26-1, TRAJ39)
CIVFTNNAGNMLTF

SEQ ID NO: 140308 - protein, 15 aa, Homo sapiens
  CDR3 for beta chain variable domain of TCR clone 70154 (TRBV19, TRBJ2-4)
CASSLTGLTKNIQYL

SEQ ID NO: 140309 - protein, 11 aa, Homo sapiens
  CDR3 for alpha chain variable domain of TCR clone 70155 (TRAV21, TRAJ34)
CAVTNTDKLIF

SEQ ID NO: 140310 - protein, 16 aa, Homo sapiens
  CDR3 for beta chain variable domain of TCR clone 70155 (TRBV7-9, TRBJ2-7)
CASSNHGGQEKYEQYF

SEQ ID NO: 140311 - protein, 14 aa, Homo sapiens
  CDR3 for alpha chain variable domain of TCR clone 70156 (TRAV22, TRAJ6)
CAGVGPGGSYIPTF

SEQ ID NO: 140312 - protein, 11 aa, Homo sapiens
  CDR3 for beta chain variable domain of TCR clone 70156 (TRBV20-1, TRBJ2-1)
CSLSSDSEQFF

SEQ ID NO: 140313 - protein, 14 aa, Homo sapiens
  CDR3 for alpha chain variable domain of TCR clone 70157 (TRAV12-1, TRAJ36)
CVVNYWGKQPLLWD

SEQ ID NO: 140314 - protein, 15 aa, Homo sapiens
  CDR3 for beta chain variable domain of TCR clone 70157 (TRBV4-1, TRBJ1-4)
CASSDTGGTNEKLFF

SEQ ID NO: 140315 - protein, 13 aa, Homo sapiens
  CDR3 for alpha chain variable domain of TCR clone 70158 (TRAV2, TRAJ40)
CAVVTSGTYKYIF

SEQ ID NO: 140316 - protein, 16 aa, Homo sapiens
  CDR3 for beta chain variable domain of TCR clone 70158 (TRBV28, TRBJ1-5)
CASSFRGGYSNQPQHF

SEQ ID NO: 140317 - protein, 13 aa, Homo sapiens
  CDR3 for alpha chain variable domain of TCR clone 70159 (TRAV20, TRAJ37)
CAGCSSYTGKLIF

SEQ ID NO: 140318 - protein, 11 aa, Homo sapiens
  CDR3 for beta chain variable domain of TCR clone 70159 (TRBV12-4, TRBJ2-3)
CASTATDTQYF

SEQ ID NO: 140319 - protein, 16 aa, Homo sapiens
  CDR3 for alpha chain variable domain of TCR clone 70160 (TRAV12-3, TRAJ53)
CAMSPGSGGSNYKLAF

SEQ ID NO: 140320 - protein, 20 aa, Homo sapiens
  CDR3 for beta chain variable domain of TCR clone 70160 (TRBV7-8, TRBJ2-2)
CASSHLFPGPTIHITGELFF

SEQ ID NO: 140321 - protein, 15 aa, Homo sapiens
  CDR3 for alpha chain variable domain of TCR clone 70161 (TRAV3, TRAJ32)
FAVSSYGGATNKLIF

SEQ ID NO: 140322 - protein, 13 aa, Homo sapiens
  CDR3 for beta chain variable domain of TCR clone 70161 (TRBV20-1, TRBJ2-7)
CSARPSTNYERYF

SEQ ID NO: 140323 - protein, 15 aa, Homo sapiens
  CDR3 for alpha chain variable domain of TCR clone 70162 (TRAV13-1, TRAJ8)
CAASIPNTGFQKLVF

SEQ ID NO: 140324 - protein, 11 aa, Homo sapiens
  CDR3 for beta chain variable domain of TCR clone 70162 (TRBV29-1, TRBJ2-5)
CSEDRTGTQYF

SEQ ID NO: 140325 - protein, 16 aa, Homo sapiens
  CDR3 for alpha chain variable domain of TCR clone 70163 (TRAV1-2, TRAJ16)
CAVTGFQMARSCSLQG

SEQ ID NO: 140326 - protein, 15 aa, Homo sapiens
  CDR3 for beta chain variable domain of TCR clone 70163 (TRBV7-9, TRBJ1-6)
CASSSPGRGNSPLHF

SEQ ID NO: 140327 - protein, 12 aa, Homo sapiens
  CDR3 for alpha chain variable domain of TCR clone 70164 (TRAV12-1, TRAJ40)
CVVYSGTYKYIF

SEQ ID NO: 140328 - protein, 15 aa, Homo sapiens
  CDR3 for beta chain variable domain of TCR clone 70164 (TRBV7-2, TRBJ2-1)
CASSSGLAGGNEQFF

SEQ ID NO: 140329 - protein, 11 aa, Homo sapiens
  CDR3 for alpha chain variable domain of TCR clone 70165 (TRAV12-3, TRAJ27)
CAMANAGTSTF

SEQ ID NO: 140330 - protein, 13 aa, Homo sapiens
  CDR3 for beta chain variable domain of TCR clone 70165 (TRBV20-1, TRBJ1-1)
CSARVGGNTEAFF

SEQ ID NO: 140331 - protein, 14 aa, Homo sapiens
  CDR3 for alpha chain variable domain of TCR clone 70166 (TRAV1-1, TRAJ27)
CAVIYNTNAGTSTF

SEQ ID NO: 140332 - protein, 15 aa, Homo sapiens
  CDR3 for beta chain variable domain of TCR clone 70166 (TRBV6-3, TRBJ2-7)
CASSSPGTVFYEQYF

SEQ ID NO: 140333 - protein, 14 aa, Homo sapiens
  CDR3 for alpha chain variable domain of TCR clone 70167 (TRAV2, TRAJ37)
CAVDFTSNTGKLIF

SEQ ID NO: 140334 - protein, 16 aa, Homo sapiens
  CDR3 for beta chain variable domain of TCR clone 70167 (TRBV19, TRBJ2-1)
CASSMGGGSSYNEQFF

SEQ ID NO: 140335 - protein, 16 aa, Homo sapiens
  CDR3 for alpha chain variable domain of TCR clone 70168 (TRAV14/DV4, TRAJ52)
CAMRYAGGTSYGKLTF

SEQ ID NO: 140336 - protein, 13 aa, Homo sapiens
  CDR3 for beta chain variable domain of TCR clone 70168 (TRBV19, TRBJ2-3)
CASASGSTDTQYF

SEQ ID NO: 140337 - protein, 10 aa, Homo sapiens
  CDR3 for alpha chain variable domain of TCR clone 70169 (TRAV26-1, TRAJ40)
CIAGTYKYIF

SEQ ID NO: 140338 - protein, 17 aa, Homo sapiens
  CDR3 for beta chain variable domain of TCR clone 70169 (TRBV7-8, TRBJ2-6)
CASSAGTGGAGANVLTF

SEQ ID NO: 140339 - protein, 14 aa, Homo sapiens
  CDR3 for alpha chain variable domain of TCR clone 70170 (TRAV17, TRAJ57)
CATDPQGGSEKLVF

SEQ ID NO: 140340 - protein, 14 aa, Homo sapiens
  CDR3 for beta chain variable domain of TCR clone 70170 (TRBV7-9, TRBJ2-5)
CASSLDTAQETQYF

SEQ ID NO: 140341 - protein, 15 aa, Homo sapiens
  CDR3 for alpha chain variable domain of TCR clone 70171 (TRAV3, TRAJ13)
CAVRVYSGGYQKVTF

SEQ ID NO: 140342 - protein, 15 aa, Homo sapiens
  CDR3 for beta chain variable domain of TCR clone 70171 (TRBV5-7, TRBJ1-2)
CASSLGVAANYGDTF

SEQ ID NO: 140343 - protein, 16 aa, Homo sapiens
  CDR3 for alpha chain variable domain of TCR clone 70172 (TRAV21, TRAJ37)
CAVRTAGSSNTGKLIF

SEQ ID NO: 140344 - protein, 13 aa, Homo sapiens
  CDR3 for beta chain variable domain of TCR clone 70172 (TRBV7-9, TRBJ2-5)
CASLPSGRETHHF

SEQ ID NO: 140345 - protein, 10 aa, Homo sapiens
  CDR3 for alpha chain variable domain of TCR clone 70173 (TRAV1-2, TRAJ20)
FACNDYKLSF

SEQ ID NO: 140346 - protein, 16 aa, Homo sapiens
  CDR3 for beta chain variable domain of TCR clone 70173 (TRBV20-1, TRBJ2-1)
CSARDLKQGMNNEQFF

SEQ ID NO: 140347 - protein, 15 aa, Homo sapiens
  CDR3 for alpha chain variable domain of TCR clone 70174 (TRAV17, TRAJ57)
CATGPSQGGSEKLVC

SEQ ID NO: 140348 - protein, 15 aa, Homo sapiens
  CDR3 for beta chain variable domain of TCR clone 70174 (TRBV6-3, TRBJ2-7)
CASSSPGTVFYEQYF

SEQ ID NO: 140349 - protein, 16 aa, Homo sapiens
  CDR3 for alpha chain variable domain of TCR clone 70175 (TRAV12-3, TRAJ58)
CAMTDTEETSGSRSTF

SEQ ID NO: 140350 - protein, 22 aa, Homo sapiens
  CDR3 for beta chain variable domain of TCR clone 70175 (TRBV23-1, TRBJ2-7)
CASSRRLDSGQGYVGGGYEQYF

SEQ ID NO: 140351 - protein, 14 aa, Homo sapiens
  CDR3 for alpha chain variable domain of TCR clone 70176 (TRAV12-3, TRAJ13)
CAVKKTGGYQKVTF

SEQ ID NO: 140352 - protein, 15 aa, Homo sapiens
  CDR3 for beta chain variable domain of TCR clone 70176 (TRBV20-1, TRBJ2-7)
CSARDRVSGMDEQYF

SEQ ID NO: 140353 - protein, 12 aa, Homo sapiens
  CDR3 for alpha chain variable domain of TCR clone 70177 (TRAV12-3, TRAJ17)
CAMTLTGNKLTF

SEQ ID NO: 140354 - protein, 15 aa, Homo sapiens
  CDR3 for beta chain variable domain of TCR clone 70177 (TRBV11-3, TRBJ2-3)
CASLKDGREGDMQYL

SEQ ID NO: 140355 - protein, 13 aa, Homo sapiens
  CDR3 for alpha chain variable domain of TCR clone 70178 (TRAV21, TRAJ9)
CAVRSSGGFKTIF

SEQ ID NO: 140356 - protein, 20 aa, Homo sapiens
  CDR3 for beta chain variable domain of TCR clone 70178 (TRBV28, TRBJ2-1)
CASTPIGRSPGLAGGNEQFF

SEQ ID NO: 140357 - protein, 13 aa, Homo sapiens
  CDR3 for alpha chain variable domain of TCR clone 70179 (TRAV30, TRAJ24)
CGTVTYSWGKLQF

SEQ ID NO: 140358 - protein, 15 aa, Homo sapiens
  CDR3 for beta chain variable domain of TCR clone 70179 (TRBV19, TRBJ1-1)
CASTSGQIQNTEAFF

SEQ ID NO: 140359 - protein, 14 aa, Homo sapiens
  CDR3 for alpha chain variable domain of TCR clone 70180 (TRAV13-1, TRAJ40)
CAASMTSGTYKYIS

SEQ ID NO: 140360 - protein, 13 aa, Homo sapiens
  CDR3 for beta chain variable domain of TCR clone 70180 (TRBV4-1, TRBJ2-5)
CASSQEVQETQYF

SEQ ID NO: 140361 - protein, 13 aa, Homo sapiens
  CDR3 for alpha chain variable domain of TCR clone 70181 (TRAV6, TRAJ39)
CALLGNAGNMLTF

SEQ ID NO: 140362 - protein, 15 aa, Homo sapiens
  CDR3 for beta chain variable domain of TCR clone 70181 (TRBV11-3, TRBJ2-5)
CASSPSTGGYETQYF

SEQ ID NO: 140363 - protein, 15 aa, Homo sapiens
  CDR3 for alpha chain variable domain of TCR clone 70182 (TRAV3, TRAJ22)
CAVRDRGGSERQLTF

SEQ ID NO: 140364 - protein, 12 aa, Homo sapiens
  CDR3 for beta chain variable domain of TCR clone 70182 (TRBV12-4, TRBJ1-2)
CASSFIWLHLRF

SEQ ID NO: 140365 - protein, 13 aa, Homo sapiens
  CDR3 for alpha chain variable domain of TCR clone 70183 (TRAV17, TRAJ26)
CATVDNYGQNFVF

SEQ ID NO: 140366 - protein, 14 aa, Homo sapiens
  CDR3 for beta chain variable domain of TCR clone 70183 (TRBV7-2, TRBJ1-1)
CASSFLTGTTEAVF

SEQ ID NO: 140367 - protein, 14 aa, Homo sapiens
  CDR3 for alpha chain variable domain of TCR clone 70184 (TRAV8-2, TRAJ11)
CVVSEKSGYSTLTF

SEQ ID NO: 140368 - protein, 16 aa, Homo sapiens
  CDR3 for beta chain variable domain of TCR clone 70184 (TRBV28, TRBJ2-1)
CASSSPEYPRDNEQFS

SEQ ID NO: 140369 - protein, 13 aa, Homo sapiens
  CDR3 for alpha chain variable domain of TCR clone 70185 (TRAV3, TRAJ21)
CAVREPDFNKFYF

SEQ ID NO: 140370 - protein, 16 aa, Homo sapiens
  CDR3 for beta chain variable domain of TCR clone 70185 (TRBV12-4, TRBJ1-5)
CASSRPVGGSNQPQHF

SEQ ID NO: 140371 - protein, 16 aa, Homo sapiens
  CDR3 for alpha chain variable domain of TCR clone 70186 (TRAV4, TRAJ22)
CVLLPRGGGSARQLTF

SEQ ID NO: 140372 - protein, 14 aa, Homo sapiens
  CDR3 for beta chain variable domain of TCR clone 70186 (TRBV20-1, TRBJ1-1)
CSARAVNGYTEAFF

SEQ ID NO: 140373 - protein, 20 aa, Homo sapiens
  CDR3 for alpha chain variable domain of TCR clone 70187 (TRAV12-1, TRAJ42)
SSVIQPPTSVKGGSQGNLIF

SEQ ID NO: 140374 - protein, 18 aa, Homo sapiens
  CDR3 for beta chain variable domain of TCR clone 70187 (TRBV11-2, TRBJ2-3)
CAGSLGGDSRGAPNTQYF

SEQ ID NO: 140375 - protein, 15 aa, Homo sapiens
  CDR3 for alpha chain variable domain of TCR clone 70188 (TRAV35, TRAJ50)
CAGQLRKTSYDKVIF

SEQ ID NO: 140376 - protein, 14 aa, Homo sapiens
  CDR3 for beta chain variable domain of TCR clone 70188 (TRBV20-1, TRBJ2-1)
CSAQIGGSANEQFF

SEQ ID NO: 140377 - protein, 17 aa, Homo sapiens
  CDR3 for alpha chain variable domain of TCR clone 70189 (TRAV3, TRAJ42)
CAVRDRDYGGSQGNLIF

SEQ ID NO: 140378 - protein, 15 aa, Homo sapiens
  CDR3 for beta chain variable domain of TCR clone 70189 (TRBV6-5, TRBJ2-1)
CTSSYDAGAGNEQFF

SEQ ID NO: 140379 - protein, 12 aa, Homo sapiens
  CDR3 for alpha chain variable domain of TCR clone 70190 (TRAV26-2, TRAJ28)
CICGAGSYQLTF

SEQ ID NO: 140380 - protein, 14 aa, Homo sapiens
  CDR3 for beta chain variable domain of TCR clone 70190 (TRBV7-3, TRBJ1-1)
CASSLKGGNTEAFF

SEQ ID NO: 140381 - protein, 12 aa, Homo sapiens
  CDR3 for alpha chain variable domain of TCR clone 70191 (TRAV1-1, TRAJ8)
CAGGTGFQKLVF

SEQ ID NO: 140382 - protein, 16 aa, Homo sapiens
  CDR3 for beta chain variable domain of TCR clone 70191 (TRBV5-1, TRBJ2-2)
CASSLWDTTNTGELFF

SEQ ID NO: 140383 - protein, 12 aa, Homo sapiens
  CDR3 for alpha chain variable domain of TCR clone 70192 (TRAV27, TRAJ37)
CADSGSTGKLIF

SEQ ID NO: 140384 - protein, 18 aa, Homo sapiens
  CDR3 for beta chain variable domain of TCR clone 70192 (TRBV7-9, TRBJ1-1)
CASSKPWDKMGMNTEAFF

SEQ ID NO: 140385 - protein, 13 aa, Homo sapiens
  CDR3 for alpha chain variable domain of TCR clone 70193 (TRAV1-2, TRAJ9)
CAALNTGGFKTIF

SEQ ID NO: 140386 - protein, 10 aa, Homo sapiens
  CDR3 for beta chain variable domain of TCR clone 70193 (TRBV7-9, TRBJ1-2)
CASSLKQNYG

SEQ ID NO: 140387 - protein, 16 aa, Homo sapiens
  CDR3 for alpha chain variable domain of TCR clone 70194 (TRAV4, TRAJ22)
CLVGDLYSGSARQLTF

SEQ ID NO: 140388 - protein, 17 aa, Homo sapiens
  CDR3 for beta chain variable domain of TCR clone 70194 (TRBV18, TRBJ1-5)
CASSPTMGQGTNQPQHF

SEQ ID NO: 140389 - protein, 15 aa, Homo sapiens
  CDR3 for alpha chain variable domain of TCR clone 70195 (TRAV13-1, TRAJ15)
CAASIERKAGTALIF

SEQ ID NO: 140390 - protein, 13 aa, Homo sapiens
  CDR3 for beta chain variable domain of TCR clone 70195 (TRBV5-1, TRBJ2-7)
CASSATGGNEQYF

SEQ ID NO: 140391 - protein, 16 aa, Homo sapiens
  CDR3 for alpha chain variable domain of TCR clone 70196 (TRAV3, TRAJ37)
RAVRPHGSGNTGKLIF

SEQ ID NO: 140392 - protein, 15 aa, Homo sapiens
  CDR3 for beta chain variable domain of TCR clone 70196 (TRBV5-5, TRBJ2-7)
CASSLAAPLSYEQYF

SEQ ID NO: 140393 - protein, 13 aa, Homo sapiens
  CDR3 for alpha chain variable domain of TCR clone 70197 (TRAV3, TRAJ20)
CAVRDTTRYKLSF

SEQ ID NO: 140394 - protein, 16 aa, Homo sapiens
  CDR3 for beta chain variable domain of TCR clone 70197 (TRBV20-1, TRBJ2-7)
CSARAPGLALSYEQYF

SEQ ID NO: 140395 - protein, 13 aa, Homo sapiens
  CDR3 for alpha chain variable domain of TCR clone 70198 (TRAV35, TRAJ36)
CAGPRIGSNNLFF

SEQ ID NO: 140396 - protein, 15 aa, Homo sapiens
  CDR3 for beta chain variable domain of TCR clone 70198 (TRBV28, TRBJ2-5)
CASSPPWSYQETQYF

SEQ ID NO: 140397 - protein, 12 aa, Homo sapiens
  CDR3 for alpha chain variable domain of TCR clone 70199 (TRAV3, TRAJ43)
CAVRDPNNDMRF

SEQ ID NO: 140398 - protein, 15 aa, Homo sapiens
  CDR3 for beta chain variable domain of TCR clone 70199 (TRBV27, TRBJ1-5)
CAISLGTGFDQPQHF

SEQ ID NO: 140399 - protein, 11 aa, Homo sapiens
  CDR3 for alpha chain variable domain of TCR clone 70200 (TRAV26-1, TRAJ37)
CIVRVGRKLIF

SEQ ID NO: 140400 - protein, 14 aa, Homo sapiens
  CDR3 for beta chain variable domain of TCR clone 70200 (TRBV20-1, TRBJ1-1)
CSAQTRIGGTEAFF

SEQ ID NO: 140401 - protein, 12 aa, Homo sapiens
  CDR3 for alpha chain variable domain of TCR clone 70201 (TRAV21, TRAJ29)
CAVTSGNTPLVF

SEQ ID NO: 140402 - protein, 12 aa, Homo sapiens
  CDR3 for beta chain variable domain of TCR clone 70201 (TRBV11-2, TRBJ2-2)
CASSLGGGELFF

SEQ ID NO: 140403 - protein, 16 aa, Homo sapiens
  CDR3 for alpha chain variable domain of TCR clone 70202 (TRAV3, TRAJ10)
CAVRDMRAGGGNKLTF

SEQ ID NO: 140404 - protein, 17 aa, Homo sapiens
  CDR3 for beta chain variable domain of TCR clone 70202 (TRBV6-5, TRBJ2-4)
CASRPTPGQGSKNSQYF

SEQ ID NO: 140405 - protein, 13 aa, Homo sapiens
  CDR3 for alpha chain variable domain of TCR clone 70203 (TRAV21, TRAJ20)
CAVGLRVEYKLSF

SEQ ID NO: 140406 - protein, 13 aa, Homo sapiens
  CDR3 for beta chain variable domain of TCR clone 70203 (TRBV6-1, TRBJ1-1)
CASSRQGNTEAFF

SEQ ID NO: 140407 - protein, 11 aa, Homo sapiens
  CDR3 for alpha chain variable domain of TCR clone 70204 (TRAV1-1, TRAJ23)
WAVRQGGKLIF

SEQ ID NO: 140408 - protein, 20 aa, Homo sapiens
  CDR3 for beta chain variable domain of TCR clone 70204 (TRBV7-8, TRBJ2-2)
CASSHLFPGPTIHITGELFF

SEQ ID NO: 140409 - protein, 14 aa, Homo sapiens
  CDR3 for alpha chain variable domain of TCR clone 70205 (TRAV14/DV4, TRAJ38)
CAMRGAGNNRKLIW

SEQ ID NO: 140410 - protein, 15 aa, Homo sapiens
  CDR3 for beta chain variable domain of TCR clone 70205 (TRBV4-1, TRBJ2-5)
CASSQWDLYQETQYF

SEQ ID NO: 140411 - protein, 12 aa, Homo sapiens
  CDR3 for alpha chain variable domain of TCR clone 70206 (TRAV27, TRAJ13)
CAGVRGYQKVTF

SEQ ID NO: 140412 - protein, 16 aa, Homo sapiens
  CDR3 for beta chain variable domain of TCR clone 70206 (TRBV28, TRBJ2-1)
CASSSAYSGSLNEQFF

SEQ ID NO: 140413 - protein, 16 aa, Homo sapiens
  CDR3 for alpha chain variable domain of TCR clone 70207 (TRAV16, TRAJ4)
CITVLPFSGGYNKLIF

SEQ ID NO: 140414 - protein, 15 aa, Homo sapiens
  CDR3 for beta chain variable domain of TCR clone 70207 (TRBV12-4, TRBJ2-5)
CASSPPTGLQETQYF

SEQ ID NO: 140415 - protein, 16 aa, Homo sapiens
  CDR3 for alpha chain variable domain of TCR clone 70208 (TRAV30, TRAJ24)
CGTEIVDAYSWGKFQF

SEQ ID NO: 140416 - protein, 12 aa, Homo sapiens
  CDR3 for beta chain variable domain of TCR clone 70208 (TRBV11-2, TRBJ2-2)
CASSLGGGELFF

SEQ ID NO: 140417 - protein, 16 aa, Homo sapiens
  CDR3 for alpha chain variable domain of TCR clone 70209 (TRAV23/DV6, TRAJ21)
CAARSGGGTTSTNFTL

SEQ ID NO: 140418 - protein, 11 aa, Homo sapiens
  CDR3 for beta chain variable domain of TCR clone 70209 (TRBV7-8, TRBJ2-7)
CASSLSLEQYF

SEQ ID NO: 140419 - protein, 12 aa, Homo sapiens
  CDR3 for alpha chain variable domain of TCR clone 70210 (TRAV20, TRAJ56)
CAVTGANGKLTF

SEQ ID NO: 140420 - protein, 14 aa, Homo sapiens
  CDR3 for beta chain variable domain of TCR clone 70210 (TRBV20-1, TRBJ2-5)
CSALVPGYQETQYF

SEQ ID NO: 140421 - protein, 11 aa, Homo sapiens
  CDR3 for alpha chain variable domain of TCR clone 70211 (TRAV13-2, TRAJ20)
CADSNDYKLSF

SEQ ID NO: 140422 - protein, 12 aa, Homo sapiens
  CDR3 for beta chain variable domain of TCR clone 70211 (TRBV5-1, TRBJ2-3)
CAGSLAADTQYF

SEQ ID NO: 140423 - protein, 14 aa, Homo sapiens
  CDR3 for alpha chain variable domain of TCR clone 70212 (TRAV12-1, TRAJ9)
CGELINTGGFKTIF

SEQ ID NO: 140424 - protein, 15 aa, Homo sapiens
  CDR3 for beta chain variable domain of TCR clone 70212 (TRBV9, TRBJ1-6)
CASSVAGTGDSPLHF

SEQ ID NO: 140425 - protein, 13 aa, Homo sapiens
  CDR3 for alpha chain variable domain of TCR clone 70213 (TRAV35, TRAJ57)
CAGSQCGSEKLVF

SEQ ID NO: 140426 - protein, 14 aa, Homo sapiens
  CDR3 for beta chain variable domain of TCR clone 70213 (TRBV25-1, TRBJ1-1)
CASTHLGGNTEAFF

SEQ ID NO: 140427 - protein, 14 aa, Homo sapiens
  CDR3 for alpha chain variable domain of TCR clone 70214 (TRAV1-2, TRAJ16)
CAVNRFSDGQKLLF

SEQ ID NO: 140428 - protein, 15 aa, Homo sapiens
  CDR3 for beta chain variable domain of TCR clone 70214 (TRBV20-1, TRBJ2-7)
CSARVPAAYFYEQYF

SEQ ID NO: 140429 - protein, 13 aa, Homo sapiens
  CDR3 for alpha chain variable domain of TCR clone 70215 (TRAV13-1, TRAJ41)
CAAILNSGYALDF

SEQ ID NO: 140430 - protein, 14 aa, Homo sapiens
  CDR3 for beta chain variable domain of TCR clone 70215 (TRBV20-1, TRBJ1-1)
CSARDRRTNTEAFF

SEQ ID NO: 140431 - protein, 13 aa, Homo sapiens
  CDR3 for alpha chain variable domain of TCR clone 70216 (TRAV1-1, TRAJ9)
CAAKNTGGFKTIF

SEQ ID NO: 140432 - protein, 14 aa, Homo sapiens
  CDR3 for beta chain variable domain of TCR clone 70216 (TRBV7-9, TRBJ1-2)
CASSLGPPQWPATF

SEQ ID NO: 140433 - protein, 15 aa, Homo sapiens
  CDR3 for alpha chain variable domain of TCR clone 70217 (TRAV3, TRAJ22)
CAVRDRGGSARQLTF

SEQ ID NO: 140434 - protein, 15 aa, Homo sapiens
  CDR3 for beta chain variable domain of TCR clone 70217 (TRBV11-3, TRBJ2-7)
CASSPGPASSYEQYF

SEQ ID NO: 140435 - protein, 11 aa, Homo sapiens
  CDR3 for alpha chain variable domain of TCR clone 70218 (TRAV1-2, TRAJ20)
CAVANDYKLSF

SEQ ID NO: 140436 - protein, 18 aa, Homo sapiens
  CDR3 for beta chain variable domain of TCR clone 70218 (TRBV20-1, TRBJ2-6)
CSAETTPNHGSGANVLTF

SEQ ID NO: 140437 - protein, 13 aa, Homo sapiens
  CDR3 for alpha chain variable domain of TCR clone 70219 (TRAV13-1, TRAJ6)
CAASKGGSYIPTF

SEQ ID NO: 140438 - protein, 14 aa, Homo sapiens
  CDR3 for beta chain variable domain of TCR clone 70219 (TRBV7-2, TRBJ2-1)
RASSLGVGYNEQFF

SEQ ID NO: 140439 - protein, 14 aa, Homo sapiens
  CDR3 for alpha chain variable domain of TCR clone 70220 (TRAV13-2, TRAJ17)
CAENSKAAGNKLTF

SEQ ID NO: 140440 - protein, 16 aa, Homo sapiens
  CDR3 for beta chain variable domain of TCR clone 70220 (TRBV6-1, TRBJ2-5)
CASSETLDRGAETQYF

SEQ ID NO: 140441 - protein, 16 aa, Homo sapiens
  CDR3 for alpha chain variable domain of TCR clone 70221 (TRAV26-1, )
CIDIQNPDPAVHQLRD

SEQ ID NO: 140442 - protein, 19 aa, Homo sapiens
  CDR3 for beta chain variable domain of TCR clone 70221 (TRBV19, TRBJ2-5)
CASSIGQVTDFFLGETQYF

SEQ ID NO: 140443 - protein, 14 aa, Homo sapiens
  CDR3 for alpha chain variable domain of TCR clone 70222 (TRAV20, TRAJ29)
CAVQAWVGNTPLVF

SEQ ID NO: 140444 - protein, 15 aa, Homo sapiens
  CDR3 for beta chain variable domain of TCR clone 70222 (TRBV29-1, TRBJ2-7)
CSVEFFGRGSYEQYF

SEQ ID NO: 140445 - protein, 13 aa, Homo sapiens
  CDR3 for alpha chain variable domain of TCR clone 70223 (TRAV8-3, TRAJ44)
CAVVPGTASKLTF

SEQ ID NO: 140446 - protein, 14 aa, Homo sapiens
  CDR3 for beta chain variable domain of TCR clone 70223 (TRBV25-1, TRBJ1-1)
CASTHLGGNTEAFF

SEQ ID NO: 140447 - protein, 14 aa, Homo sapiens
  CDR3 for alpha chain variable domain of TCR clone 70224 (TRAV17, TRAJ39)
CATDPVRAGKMLTF

SEQ ID NO: 140448 - protein, 15 aa, Homo sapiens
  CDR3 for beta chain variable domain of TCR clone 70224 (TRBV13, TRBJ1-5)
CASSFGQGGVQPQHF

SEQ ID NO: 140449 - protein, 10 aa, Homo sapiens
  CDR3 for alpha chain variable domain of TCR clone 70225 (TRAV12-1, TRAJ37)
ARGYTGKLIF

SEQ ID NO: 140450 - protein, 15 aa, Homo sapiens
  CDR3 for beta chain variable domain of TCR clone 70225 (TRBV7-2, TRBJ2-3)
CASSLEQGGTDTQYF

SEQ ID NO: 140451 - protein, 11 aa, Homo sapiens
  CDR3 for alpha chain variable domain of TCR clone 70226 (TRAV23/DV6, TRAJ49)
CAVAPVTSSIL

SEQ ID NO: 140452 - protein, 14 aa, Homo sapiens
  CDR3 for beta chain variable domain of TCR clone 70226 (TRBV19, TRBJ2-1)
CASPTVVLSGEQFF

SEQ ID NO: 140453 - protein, 14 aa, Homo sapiens
  CDR3 for alpha chain variable domain of TCR clone 70227 (TRAV27, TRAJ15)
CAGFDNQAGTALIF

SEQ ID NO: 140454 - protein, 11 aa, Homo sapiens
  CDR3 for beta chain variable domain of TCR clone 70227 (TRBV29-1, TRBJ1-1)
CSVEVGTRTSF

SEQ ID NO: 140455 - protein, 16 aa, Homo sapiens
  CDR3 for alpha chain variable domain of TCR clone 70228 (TRAV13-2, TRAJ32)
CAENMNYGVATNKLIF

SEQ ID NO: 140456 - protein, 14 aa, Homo sapiens
  CDR3 for beta chain variable domain of TCR clone 70228 (TRBV15, TRBJ2-5)
CATSSTGYQETQYF

SEQ ID NO: 140457 - protein, 11 aa, Homo sapiens
  CDR3 for alpha chain variable domain of TCR clone 70229 (TRAV21, TRAJ31)
CAVRNNARLMF

SEQ ID NO: 140458 - protein, 15 aa, Homo sapiens
  CDR3 for beta chain variable domain of TCR clone 70229 (TRBV7-2, TRBJ2-1)
CASSLVAGRYNEQFF

SEQ ID NO: 140459 - protein, 14 aa, Homo sapiens
  CDR3 for alpha chain variable domain of TCR clone 70230 (TRAV2, TRAJ30)
CAVAIMNGDDKIIF

SEQ ID NO: 140460 - protein, 16 aa, Homo sapiens
  CDR3 for beta chain variable domain of TCR clone 70230 (TRBV13, TRBJ2-2)
CASSPRTGEHTGELFF

SEQ ID NO: 140461 - protein, 13 aa, Homo sapiens
  CDR3 for alpha chain variable domain of TCR clone 70231 (TRAV27, TRAJ29)
CAGAHSGNTPLVF

SEQ ID NO: 140462 - protein, 14 aa, Homo sapiens
  CDR3 for beta chain variable domain of TCR clone 70231 (TRBV5-1, TRBJ2-7)
CASSRGESLYEQYF

SEQ ID NO: 140463 - protein, 14 aa, Homo sapiens
  CDR3 for alpha chain variable domain of TCR clone 70232 (TRAV12-2, TRAJ13)
CAVKKTGGYQKVTF

SEQ ID NO: 140464 - protein, 14 aa, Homo sapiens
  CDR3 for beta chain variable domain of TCR clone 70232 (TRBV12-4, TRBJ2-3)
CASSLGQGTDTQYF

SEQ ID NO: 140465 - protein, 14 aa, Homo sapiens
  CDR3 for alpha chain variable domain of TCR clone 70233 (TRAV8-3, TRAJ35)
CAVVPQGFGTVLHC

SEQ ID NO: 140466 - protein, 15 aa, Homo sapiens
  CDR3 for beta chain variable domain of TCR clone 70233 (TRBV6-1, TRBJ2-2)
CASSAGQGYTGELFF

SEQ ID NO: 140467 - protein, 13 aa, Homo sapiens
  CDR3 for alpha chain variable domain of TCR clone 70234 (TRAV17, TRAJ26)
CATVDNYGQNFVF

SEQ ID NO: 140468 - protein, 16 aa, Homo sapiens
  CDR3 for beta chain variable domain of TCR clone 70234 (TRBV2, TRBJ2-1)
CASRVGGSLSYNEQFF

SEQ ID NO: 140469 - protein, 12 aa, Homo sapiens
  CDR3 for alpha chain variable domain of TCR clone 70235 (TRAV26-2, TRAJ21)
CILKGNFNKFYF

SEQ ID NO: 140470 - protein, 14 aa, Homo sapiens
  CDR3 for beta chain variable domain of TCR clone 70235 (TRBV7-9, TRBJ1-1)
CASTPLQSYTESFF

SEQ ID NO: 140471 - protein, 14 aa, Homo sapiens
  CDR3 for alpha chain variable domain of TCR clone 70236 (TRAV12-1, TRAJ34)
CVVNLDYNTDKLIF

SEQ ID NO: 140472 - protein, 14 aa, Homo sapiens
  CDR3 for beta chain variable domain of TCR clone 70236 (TRBV7-2, TRBJ1-3)
CASSRLRSGNTIYF

SEQ ID NO: 140473 - protein, 13 aa, Homo sapiens
  CDR3 for alpha chain variable domain of TCR clone 70237 (TRAV2, TRAJ15)
CAVASQAGTALIF

SEQ ID NO: 140474 - protein, 13 aa, Homo sapiens
  CDR3 for beta chain variable domain of TCR clone 70237 (TRBV19, TRBJ2-7)
CASRKAGGSEQYF

SEQ ID NO: 140475 - protein, 11 aa, Homo sapiens
  CDR3 for alpha chain variable domain of TCR clone 70238 (TRAV20, TRAJ23)
CACNQGGKLIF

SEQ ID NO: 140476 - protein, 13 aa, Homo sapiens
  CDR3 for beta chain variable domain of TCR clone 70238 (TRBV12-5, TRBJ2-3)
CASGDRQSDTQYF

SEQ ID NO: 140477 - protein, 11 aa, Homo sapiens
  CDR3 for alpha chain variable domain of TCR clone 70239 (TRAV3, TRAJ21)
CAMGNSNKFYF

SEQ ID NO: 140478 - protein, 16 aa, Homo sapiens
  CDR3 for beta chain variable domain of TCR clone 70239 (TRBV19, TRBJ2-1)
CASSKAGPSSYNEQFF

SEQ ID NO: 140479 - protein, 13 aa, Homo sapiens
  CDR3 for alpha chain variable domain of TCR clone 70240 (TRAV12-3, TRAJ7)
CAMTPYGNNRLAF

SEQ ID NO: 140480 - protein, 13 aa, Homo sapiens
  CDR3 for beta chain variable domain of TCR clone 70240 (TRBV7-3, TRBJ1-1)
CASSQDWGAEAFF

SEQ ID NO: 140481 - protein, 14 aa, Homo sapiens
  CDR3 for alpha chain variable domain of TCR clone 70241 (TRAV12-3, TRAJ10)
SHLPLTGGGNKLTF

SEQ ID NO: 140482 - protein, 15 aa, Homo sapiens
  CDR3 for beta chain variable domain of TCR clone 70241 (TRBV27, TRBJ2-3)
CASSLGLAGPDTQYF

SEQ ID NO: 140483 - protein, 13 aa, Homo sapiens
  CDR3 for alpha chain variable domain of TCR clone 70242 (TRAV8-3, TRAJ6)
CAVGSGGSYIPTF

SEQ ID NO: 140484 - protein, 15 aa, Homo sapiens
  CDR3 for beta chain variable domain of TCR clone 70242 (TRBV2, TRBJ2-1)
CASSELAGGHNEQFF

SEQ ID NO: 140485 - protein, 11 aa, Homo sapiens
  CDR3 for alpha chain variable domain of TCR clone 70243 (TRAV23/DV6, TRAJ49)
CAARAGNQFYF

SEQ ID NO: 140486 - protein, 13 aa, Homo sapiens
  CDR3 for beta chain variable domain of TCR clone 70243 (TRBV19, TRBJ1-5)
CASSINFNQTQHF

SEQ ID NO: 140487 - protein, 18 aa, Homo sapiens
  CDR3 for alpha chain variable domain of TCR clone 70244 (TRAV13-1, TRAJ52)
CAAKNPNAGGTSYGKLTF

SEQ ID NO: 140488 - protein, 16 aa, Homo sapiens
  CDR3 for beta chain variable domain of TCR clone 70244 (TRBV6-3, TRBJ2-2)
CASRPPGQSGTGELFF

SEQ ID NO: 140489 - protein, 13 aa, Homo sapiens
  CDR3 for alpha chain variable domain of TCR clone 70245 (TRAV20, TRAJ15)
CATINQAGTALVF

SEQ ID NO: 140490 - protein, 13 aa, Homo sapiens
  CDR3 for beta chain variable domain of TCR clone 70245 (TRBV12-4, TRBJ2-1)
CASRQPSNNEQFF

SEQ ID NO: 140491 - protein, 13 aa, Homo sapiens
  CDR3 for alpha chain variable domain of TCR clone 70246 (TRAV13-2, TRAJ13)
CAERPGGYQKVTF

SEQ ID NO: 140492 - protein, 15 aa, Homo sapiens
  CDR3 for beta chain variable domain of TCR clone 70246 (TRBV11-3, TRBJ2-7)
CASSPGPGSSYEQYF

SEQ ID NO: 140493 - protein, 21 aa, Homo sapiens
  CDR3 for alpha chain variable domain of TCR clone 70247 (TRAV26-1, TRAJ38)
CIADNAGNNHIQNPDPAVYQL

SEQ ID NO: 140494 - protein, 16 aa, Homo sapiens
  CDR3 for beta chain variable domain of TCR clone 70247 (TRBV7-9, TRBJ1-2)
CASSLGFSSGEDGYTF

SEQ ID NO: 140495 - protein, 13 aa, Homo sapiens
  CDR3 for alpha chain variable domain of TCR clone 70248 (TRAV13-1, TRAJ21)
CAASIYNFNKFYF

SEQ ID NO: 140496 - protein, 13 aa, Homo sapiens
  CDR3 for beta chain variable domain of TCR clone 70248 (TRBV27, TRBJ1-4)
CASSLMGDEKLFC

SEQ ID NO: 140497 - protein, 13 aa, Homo sapiens
  CDR3 for alpha chain variable domain of TCR clone 70249 (TRAV22, TRAJ29)
CAVGGSGNTPLVF

SEQ ID NO: 140498 - protein, 14 aa, Homo sapiens
  CDR3 for beta chain variable domain of TCR clone 70249 (TRBV25-1, TRBJ1-1)
CASTHLGGNTEAFF

SEQ ID NO: 140499 - protein, 14 aa, Homo sapiens
  CDR3 for alpha chain variable domain of TCR clone 70250 (TRAV12-2, TRAJ13)
CAVKRTGGYQKVTF

SEQ ID NO: 140500 - protein, 15 aa, Homo sapiens
  CDR3 for beta chain variable domain of TCR clone 70250 (TRBV27, TRBJ2-1)
RASSNGGGSSNEQFF

SEQ ID NO: 140501 - protein, 17 aa, Homo sapiens
  CDR3 for alpha chain variable domain of TCR clone 70251 (TRAV3, TRAJ42)
CAVRDRDYGGSQGNRIF

SEQ ID NO: 140502 - protein, 14 aa, Homo sapiens
  CDR3 for beta chain variable domain of TCR clone 70251 (TRBV19, TRBJ2-5)
CASSMTGQQETQYF

SEQ ID NO: 140503 - protein, 13 aa, Homo sapiens
  CDR3 for alpha chain variable domain of TCR clone 70252 (TRAV8-3, TRAJ48)
CALVPFGNEKLTF

SEQ ID NO: 140504 - protein, 15 aa, Homo sapiens
  CDR3 for beta chain variable domain of TCR clone 70252 (TRBV11-2, TRBJ2-1)
CASSSPSTRYNEQFF

SEQ ID NO: 140505 - protein, 14 aa, Homo sapiens
  CDR3 for alpha chain variable domain of TCR clone 70253 (TRAV1-2, TRAJ16)
CAVNRFSDGQKLLF

SEQ ID NO: 140506 - protein, 15 aa, Homo sapiens
  CDR3 for beta chain variable domain of TCR clone 70253 (TRBV7-2, TRBJ2-7)
CASSLVSSGSYEQYF

SEQ ID NO: 140507 - protein, 11 aa, Homo sapiens
  CDR3 for alpha chain variable domain of TCR clone 70254 (TRAV21, TRAJ11)
CAVNGYSTLTF

SEQ ID NO: 140508 - protein, 15 aa, Homo sapiens
  CDR3 for beta chain variable domain of TCR clone 70254 (TRBV19, TRBJ2-2)
CASSLNRGVTGELFF

SEQ ID NO: 140509 - protein, 15 aa, Homo sapiens
  CDR3 for alpha chain variable domain of TCR clone 70255 (TRAV8-3, TRAJ45)
CASSYSGGGADGLTF

SEQ ID NO: 140510 - protein, 15 aa, Homo sapiens
  CDR3 for beta chain variable domain of TCR clone 70255 (TRBV18, TRBJ1-1)
CASSPRQGGNTEAFF

SEQ ID NO: 140511 - protein, 13 aa, Homo sapiens
  CDR3 for alpha chain variable domain of TCR clone 70256 (TRAV12-2, TRAJ37)
CAGGPGNTGKLIF

SEQ ID NO: 140512 - protein, 14 aa, Homo sapiens
  CDR3 for beta chain variable domain of TCR clone 70256 (TRBV6-1, TRBJ2-6)
CASQQGAGANVLTF

SEQ ID NO: 140513 - protein, 13 aa, Homo sapiens
  CDR3 for alpha chain variable domain of TCR clone 70257 (TRAV30, TRAJ24)
CGTVTDSWGKLQF

SEQ ID NO: 140514 - protein, 15 aa, Homo sapiens
  CDR3 for beta chain variable domain of TCR clone 70257 (TRBV25-1, TRBJ1-4)
CASSPGDSTNEELFF

SEQ ID NO: 140515 - protein, 13 aa, Homo sapiens
  CDR3 for alpha chain variable domain of TCR clone 70258 (TRAV12-2, TRAJ9)
CAVKWAGGFKTIF

SEQ ID NO: 140516 - protein, 15 aa, Homo sapiens
  CDR3 for beta chain variable domain of TCR clone 70258 (TRBV5-1, TRBJ1-4)
CASSLTADSDEELFF

SEQ ID NO: 140517 - protein, 15 aa, Homo sapiens
  CDR3 for alpha chain variable domain of TCR clone 70259 (TRAV21, TRAJ53)
CATLNSGGSNYKLTL

SEQ ID NO: 140518 - protein, 16 aa, Homo sapiens
  CDR3 for beta chain variable domain of TCR clone 70259 (TRBV24-1, TRBJ2-3)
CATSDPGTGATDTQYF

SEQ ID NO: 140519 - protein, 14 aa, Homo sapiens
  CDR3 for alpha chain variable domain of TCR clone 70260 (TRAV1-2, TRAJ16)
CAVNRFSDGQKLLF

SEQ ID NO: 140520 - protein, 14 aa, Homo sapiens
  CDR3 for beta chain variable domain of TCR clone 70260 (TRBV7-2, TRBJ1-1)
CASSFLTGTTEDFF

SEQ ID NO: 140521 - protein, 15 aa, Homo sapiens
  CDR3 for alpha chain variable domain of TCR clone 70261 (TRAV21, TRAJ53)
CATLNSGGSNYKLTF

SEQ ID NO: 140522 - protein, 14 aa, Homo sapiens
  CDR3 for beta chain variable domain of TCR clone 70261 (TRBV15, TRBJ2-5)
RATSIGGLGETQYF

SEQ ID NO: 140523 - protein, 15 aa, Homo sapiens
  CDR3 for alpha chain variable domain of TCR clone 70262 (TRAV13-1, TRAJ8)
CAASIPNTGFQKLVF

SEQ ID NO: 140524 - protein, 15 aa, Homo sapiens
  CDR3 for beta chain variable domain of TCR clone 70262 (TRBV7-3, TRBJ2-1)
CASSPTGGGEVEQFF

SEQ ID NO: 140525 - protein, 12 aa, Homo sapiens
  CDR3 for alpha chain variable domain of TCR clone 70263 (TRAV3, TRAJ27)
CAVRDKSGKSTF

SEQ ID NO: 140526 - protein, 14 aa, Homo sapiens
  CDR3 for beta chain variable domain of TCR clone 70263 (TRBV5-1, TRBJ1-2)
CASSVDSTNYGYTF

SEQ ID NO: 140527 - protein, 11 aa, Homo sapiens
  CDR3 for alpha chain variable domain of TCR clone 70264 (TRAV12-2, TRAJ49)
CALQGGNQFYF

SEQ ID NO: 140528 - protein, 16 aa, Homo sapiens
  CDR3 for beta chain variable domain of TCR clone 70264 (TRBV4-1, TRBJ2-3)
CASSQSTSGAEDTQYF

SEQ ID NO: 140529 - protein, 12 aa, Homo sapiens
  CDR3 for alpha chain variable domain of TCR clone 70265 (TRAV9-2, TRAJ26)
CALRGYGQNLVF

SEQ ID NO: 140530 - protein, 12 aa, Homo sapiens
  CDR3 for beta chain variable domain of TCR clone 70265 (TRBV29-1, TRBJ2-3)
CSVTGGADTQYF

SEQ ID NO: 140531 - protein, 16 aa, Homo sapiens
  CDR3 for alpha chain variable domain of TCR clone 70266 (TRAV12-3, TRAJ53)
CAMSPGSGGSNYKLTF

SEQ ID NO: 140532 - protein, 15 aa, Homo sapiens
  CDR3 for beta chain variable domain of TCR clone 70266 (TRBV28, TRBJ1-2)
CASSSPRRGNYGYTF

SEQ ID NO: 140533 - protein, 16 aa, Homo sapiens
  CDR3 for alpha chain variable domain of TCR clone 70267 (TRAV20, TRAJ52)
CAVLPDGGTSHGKLTF

SEQ ID NO: 140534 - protein, 12 aa, Homo sapiens
  CDR3 for beta chain variable domain of TCR clone 70267 (TRBV19, TRBJ2-1)
CASSQISNEQFF

SEQ ID NO: 140535 - protein, 15 aa, Homo sapiens
  CDR3 for alpha chain variable domain of TCR clone 70268 (TRAV23/DV6, TRAJ32)
CAASKMGGATNKLIF

SEQ ID NO: 140536 - protein, 12 aa, Homo sapiens
  CDR3 for beta chain variable domain of TCR clone 70268 (TRBV7-9, TRBJ2-5)
CASSLRGETQYF

SEQ ID NO: 140537 - protein, 14 aa, Homo sapiens
  CDR3 for alpha chain variable domain of TCR clone 70269 (TRAV9-2, TRAJ39)
CALYIYNAGNMLTF

SEQ ID NO: 140538 - protein, 12 aa, Homo sapiens
  CDR3 for beta chain variable domain of TCR clone 70269 (TRBV12-4, TRBJ2-7)
CASSLGGYEQYF

SEQ ID NO: 140539 - protein, 15 aa, Homo sapiens
  CDR3 for alpha chain variable domain of TCR clone 70270 (TRAV29/DV5, TRAJ24)
CAASGATDSWGKFLF

SEQ ID NO: 140540 - protein, 12 aa, Homo sapiens
  CDR3 for beta chain variable domain of TCR clone 70270 (TRBV11-2, TRBJ2-2)
CASSLPTGELFF

SEQ ID NO: 140541 - protein, 13 aa, Homo sapiens
  CDR3 for alpha chain variable domain of TCR clone 70271 (TRAV2, TRAJ15)
CAVASQAGTALIF

SEQ ID NO: 140542 - protein, 16 aa, Homo sapiens
  CDR3 for beta chain variable domain of TCR clone 70271 (TRBV19, TRBJ2-3)
CASSPGAASRTDTQYF

SEQ ID NO: 140543 - protein, 13 aa, Homo sapiens
  CDR3 for alpha chain variable domain of TCR clone 70272 (TRAV13-1, TRAJ5)
CAASDTGMRALTF

SEQ ID NO: 140544 - protein, 12 aa, Homo sapiens
  CDR3 for beta chain variable domain of TCR clone 70272 (TRBV28, TRBJ2-3)
CASSLYRDTQYF

SEQ ID NO: 140545 - protein, 17 aa, Homo sapiens
  CDR3 for alpha chain variable domain of TCR clone 70273 (TRAV26-2, TRAJ42)
CILRDVGYGGSQGNLIF

SEQ ID NO: 140546 - protein, 16 aa, Homo sapiens
  CDR3 for beta chain variable domain of TCR clone 70273 (TRBV12-4, TRBJ2-7)
CASSLIGETGTYEQYF

SEQ ID NO: 140547 - protein, 14 aa, Homo sapiens
  CDR3 for alpha chain variable domain of TCR clone 70274 (TRAV1-2, TRAJ16)
CAVNRFSDGQKLLF

SEQ ID NO: 140548 - protein, 20 aa, Homo sapiens
  CDR3 for beta chain variable domain of TCR clone 70274 (TRBV6-4, TRBJ2-7)
CASSDSSVSGQVPTSYEQYF

SEQ ID NO: 140549 - protein, 13 aa, Homo sapiens
  CDR3 for alpha chain variable domain of TCR clone 70275 (TRAV8-3, TRAJ21)
CAVGAYNFNKFYF

SEQ ID NO: 140550 - protein, 15 aa, Homo sapiens
  CDR3 for beta chain variable domain of TCR clone 70275 (TRBV5-1, TRBJ2-7)
CASSLGDFTTYEQYF

SEQ ID NO: 140551 - protein, 13 aa, Homo sapiens
  CDR3 for alpha chain variable domain of TCR clone 70276 (TRAV21, TRAJ57)
CAVTHGGSEKLVF

SEQ ID NO: 140552 - protein, 15 aa, Homo sapiens
  CDR3 for beta chain variable domain of TCR clone 70276 (TRBV5-1, TRBJ1-1)
CASSSTTGTNTEAFF

SEQ ID NO: 140553 - protein, 17 aa, Homo sapiens
  CDR3 for alpha chain variable domain of TCR clone 70277 (TRAV3, TRAJ42)
CAVRDRDYGGSQGNIIF

SEQ ID NO: 140554 - protein, 14 aa, Homo sapiens
  CDR3 for beta chain variable domain of TCR clone 70277 (TRBV19, TRBJ2-2)
CTSSGQGIAGELFF

SEQ ID NO: 140555 - protein, 14 aa, Homo sapiens
  CDR3 for alpha chain variable domain of TCR clone 70278 (TRAV13-1, TRAJ4)
CAATLPSGYNKLIF

SEQ ID NO: 140556 - protein, 14 aa, Homo sapiens
  CDR3 for beta chain variable domain of TCR clone 70278 (TRBV19, TRBJ2-1)
CASPTLVLSGEQFF

SEQ ID NO: 140557 - protein, 13 aa, Homo sapiens
  CDR3 for alpha chain variable domain of TCR clone 70279 (TRAV35, TRAJ22)
CAGLSGSASQLTF

SEQ ID NO: 140558 - protein, 16 aa, Homo sapiens
  CDR3 for beta chain variable domain of TCR clone 70279 (TRBV7-9, TRBJ2-1)
CASSLVLTGQGNEQFF

SEQ ID NO: 140559 - protein, 15 aa, Homo sapiens
  CDR3 for alpha chain variable domain of TCR clone 70280 (TRAV12-1, TRAJ44)
RVVFVNTGTASKLTF

SEQ ID NO: 140560 - protein, 17 aa, Homo sapiens
  CDR3 for beta chain variable domain of TCR clone 70280 (TRBV7-8, TRBJ2-6)
CASSAGTGGAGANVLTF

SEQ ID NO: 140561 - protein, 14 aa, Homo sapiens
  CDR3 for alpha chain variable domain of TCR clone 70281 (TRAV35, TRAJ13)
CAGRSPGGYQKGTF

SEQ ID NO: 140562 - protein, 14 aa, Homo sapiens
  CDR3 for beta chain variable domain of TCR clone 70281 (TRBV19, TRBJ2-2)
CASSMVGLSGELFF

SEQ ID NO: 140563 - protein, 12 aa, Homo sapiens
  CDR3 for alpha chain variable domain of TCR clone 70282 (TRAV27, TRAJ13)
CAGAGGYQKVTF

SEQ ID NO: 140564 - protein, 13 aa, Homo sapiens
  CDR3 for beta chain variable domain of TCR clone 70282 (TRBV7-9, TRBJ1-2)
CASSLKQNYGYTF

SEQ ID NO: 140565 - protein, 16 aa, Homo sapiens
  CDR3 for alpha chain variable domain of TCR clone 70283 (TRAV21, TRAJ17)
CSVRPGEEAAGNKLTF

SEQ ID NO: 140566 - protein, 16 aa, Homo sapiens
  CDR3 for beta chain variable domain of TCR clone 70283 (TRBV2, TRBJ2-7)
CASSEPWTGPSYEQYF

SEQ ID NO: 140567 - protein, 14 aa, Homo sapiens
  CDR3 for alpha chain variable domain of TCR clone 70284 (TRAV26-1, TRAJ49)
CIVRLTNTGNQFYF

SEQ ID NO: 140568 - protein, 13 aa, Homo sapiens
  CDR3 for beta chain variable domain of TCR clone 70284 (TRBV4-1, TRBJ2-7)
CASSQRQAYEQYF

SEQ ID NO: 140569 - protein, 14 aa, Homo sapiens
  CDR3 for alpha chain variable domain of TCR clone 70285 (TRAV27, TRAJ23)
CAGASDNQGGKLIF

SEQ ID NO: 140570 - protein, 15 aa, Homo sapiens
  CDR3 for beta chain variable domain of TCR clone 70285 (TRBV7-3, TRBJ2-7)
CASSLTGQGKYEQYF

SEQ ID NO: 140571 - protein, 11 aa, Homo sapiens
  CDR3 for alpha chain variable domain of TCR clone 70286 (TRAV1-1, TRAJ23)
CAVRQGGKLIF

SEQ ID NO: 140572 - protein, 21 aa, Homo sapiens
  CDR3 for beta chain variable domain of TCR clone 70286 (TRBV6-1, TRBJ1-1)
CASSGVGNYKGISGFDTEAFF

SEQ ID NO: 140573 - protein, 13 aa, Homo sapiens
  CDR3 for alpha chain variable domain of TCR clone 70287 (TRAV2, TRAJ40)
CAVVTSGTYKYIF

SEQ ID NO: 140574 - protein, 12 aa, Homo sapiens
  CDR3 for beta chain variable domain of TCR clone 70287 (TRBV2, TRBJ2-1)
CAYGPPGNEQFF

SEQ ID NO: 140575 - protein, 11 aa, Homo sapiens
  CDR3 for alpha chain variable domain of TCR clone 70288 (TRAV2, TRAJ13)
CASGGYQKVTF

SEQ ID NO: 140576 - protein, 15 aa, Homo sapiens
  CDR3 for beta chain variable domain of TCR clone 70288 (TRBV29-1, TRBJ2-1)
CSGRDKKSSYNEQFF

SEQ ID NO: 140577 - protein, 14 aa, Homo sapiens
  CDR3 for alpha chain variable domain of TCR clone 70289 (TRAV12-2, TRAJ17)
CALLFKAAGNKLTF

SEQ ID NO: 140578 - protein, 17 aa, Homo sapiens
  CDR3 for beta chain variable domain of TCR clone 70289 (TRBV11-2, TRBJ2-1)
CASSLYPPGVEYNEQFF

SEQ ID NO: 140579 - protein, 13 aa, Homo sapiens
  CDR3 for alpha chain variable domain of TCR clone 70290 (TRAV27, TRAJ41)
CAGEGNSGYALNF

SEQ ID NO: 140580 - protein, 14 aa, Homo sapiens
  CDR3 for beta chain variable domain of TCR clone 70290 (TRBV7-6, TRBJ2-3)
CASSVAGGTDTQYF

SEQ ID NO: 140581 - protein, 17 aa, Homo sapiens
  CDR3 for alpha chain variable domain of TCR clone 70291 (TRAV26-1, TRAJ37)
CIVRVITVSSNTGKLIF

SEQ ID NO: 140582 - protein, 15 aa, Homo sapiens
  CDR3 for beta chain variable domain of TCR clone 70291 (TRBV10-3, TRBJ2-1)
CAITFGGGTDNEQFF

SEQ ID NO: 140583 - protein, 14 aa, Homo sapiens
  CDR3 for alpha chain variable domain of TCR clone 70292 (TRAV12-1, TRAJ17)
CVVNYKAAGNKLTF

SEQ ID NO: 140584 - protein, 19 aa, Homo sapiens
  CDR3 for beta chain variable domain of TCR clone 70292 (TRBV25-1, TRBJ2-2)
CAILVYRVDRGRKTGELFF

SEQ ID NO: 140585 - protein, 14 aa, Homo sapiens
  CDR3 for alpha chain variable domain of TCR clone 70293 (TRAV12-3, TRAJ10)
SHLPLTGGGNKLTF

SEQ ID NO: 140586 - protein, 16 aa, Homo sapiens
  CDR3 for beta chain variable domain of TCR clone 70293 (TRBV28, TRBJ2-7)
CASSLFFETGGPEQYF

SEQ ID NO: 140587 - protein, 14 aa, Homo sapiens
  CDR3 for alpha chain variable domain of TCR clone 70294 (TRAV29/DV5, TRAJ36)
CAARRKTGANNLFF

SEQ ID NO: 140588 - protein, 16 aa, Homo sapiens
  CDR3 for beta chain variable domain of TCR clone 70294 (TRBV7-3, TRBJ2-2)
CASSLKRGTLSGELFF

SEQ ID NO: 140589 - protein, 11 aa, Homo sapiens
  CDR3 for alpha chain variable domain of TCR clone 70295 (TRAV12-1, TRAJ3)
CVVSSASKIIF

SEQ ID NO: 140590 - protein, 15 aa, Homo sapiens
  CDR3 for beta chain variable domain of TCR clone 70295 (TRBV5-1, TRBJ2-3)
CASSVTSGSTDTQYF

SEQ ID NO: 140591 - protein, 15 aa, Homo sapiens
  CDR3 for alpha chain variable domain of TCR clone 70296 (TRAV8-6, TRAJ11)
CAVSDRRSGYSTLTF

SEQ ID NO: 140592 - protein, 15 aa, Homo sapiens
  CDR3 for beta chain variable domain of TCR clone 70296 (TRBV7-3, TRBJ2-1)
CASSPTGVSRNEQFF

SEQ ID NO: 140593 - protein, 16 aa, Homo sapiens
  CDR3 for alpha chain variable domain of TCR clone 70297 (TRAV3, TRAJ10)
CAVRDMRAGGGNKLTF

SEQ ID NO: 140594 - protein, 15 aa, Homo sapiens
  CDR3 for beta chain variable domain of TCR clone 70297 (TRBV2, TRBJ2-1)
CASSELAGSYNEQFF

SEQ ID NO: 140595 - protein, 12 aa, Homo sapiens
  CDR3 for alpha chain variable domain of TCR clone 70298 (TRAV35, TRAJ39)
LALNNAGNMLTF

SEQ ID NO: 140596 - protein, 16 aa, Homo sapiens
  CDR3 for beta chain variable domain of TCR clone 70298 (TRBV2, TRBJ2-3)
CASSTSVEGVTDTQYF

SEQ ID NO: 140597 - protein, 13 aa, Homo sapiens
  CDR3 for alpha chain variable domain of TCR clone 70299 (TRAV6, TRAJ20)
CALAVSNDYKLSF

SEQ ID NO: 140598 - protein, 16 aa, Homo sapiens
  CDR3 for beta chain variable domain of TCR clone 70299 (TRBV7-9, TRBJ2-1)
SASSDVAGGSYNEQFF

SEQ ID NO: 140599 - protein, 14 aa, Homo sapiens
  CDR3 for alpha chain variable domain of TCR clone 70300 (TRAV34, TRAJ44)
CGADGTGTASKLTF

SEQ ID NO: 140600 - protein, 12 aa, Homo sapiens
  CDR3 for beta chain variable domain of TCR clone 70300 (TRBV11-2, TRBJ2-2)
CASGLGGGELFF

SEQ ID NO: 140601 - protein, 18 aa, Homo sapiens
  CDR3 for alpha chain variable domain of TCR clone 70301 (TRAV21, TRAJ52)
CAVRPSPAGGTSYGKLTF

SEQ ID NO: 140602 - protein, 14 aa, Homo sapiens
  CDR3 for beta chain variable domain of TCR clone 70301 (TRBV29-1, TRBJ2-2)
CSVLAETNTGELFF

SEQ ID NO: 140603 - protein, 14 aa, Homo sapiens
  CDR3 for alpha chain variable domain of TCR clone 70302 (TRAV13-1, TRAJ44)
CAAKATGTASKLTF

SEQ ID NO: 140604 - protein, 18 aa, Homo sapiens
  CDR3 for beta chain variable domain of TCR clone 70302 (TRBV4-1, TRBJ1-5)
CASSQDPRGQGLNQPQHF

SEQ ID NO: 140605 - protein, 10 aa, Homo sapiens
  CDR3 for alpha chain variable domain of TCR clone 70303 (TRAV1-2, TRAJ20)
CACNDYKLSV

SEQ ID NO: 140606 - protein, 16 aa, Homo sapiens
  CDR3 for beta chain variable domain of TCR clone 70303 (TRBV20-1, TRBJ2-1)
CSARDLKQGMNNEQFF

SEQ ID NO: 140607 - protein, 14 aa, Homo sapiens
  CDR3 for alpha chain variable domain of TCR clone 70304 (TRAV12-2, TRAJ40)
CAVKIPSGTYKYIF

SEQ ID NO: 140608 - protein, 17 aa, Homo sapiens
  CDR3 for beta chain variable domain of TCR clone 70304 (TRBV7-2, TRBJ2-7)
CASSFETSGSTSSTSGR

SEQ ID NO: 140609 - protein, 13 aa, Homo sapiens
  CDR3 for alpha chain variable domain of TCR clone 70305 (TRAV13-1, TRAJ41)
CADAPNSGYALNF

SEQ ID NO: 140610 - protein, 13 aa, Homo sapiens
  CDR3 for beta chain variable domain of TCR clone 70305 (TRBV19, TRBJ2-7)
CASGGTTTYEQYF

SEQ ID NO: 140611 - protein, 20 aa, Homo sapiens
  CDR3 for alpha chain variable domain of TCR clone 70306 (TRAV26-1, TRAJ42)
CCVILHRQTYYGGSQGNLIF

SEQ ID NO: 140612 - protein, 16 aa, Homo sapiens
  CDR3 for beta chain variable domain of TCR clone 70306 (TRBV7-3, TRBJ2-2)
CASSLKRGTLSGELFF

SEQ ID NO: 140613 - protein, 14 aa, Homo sapiens
  CDR3 for alpha chain variable domain of TCR clone 70307 (TRAV8-4, TRAJ15)
CAVTIREAGTALIF

SEQ ID NO: 140614 - protein, 16 aa, Homo sapiens
  CDR3 for beta chain variable domain of TCR clone 70307 (TRBV29-1, TRBJ2-6)
CSVEDITHFGANVLTF

SEQ ID NO: 140615 - protein, 13 aa, Homo sapiens
  CDR3 for alpha chain variable domain of TCR clone 70308 (TRAV2, TRAJ40)
CAVVTSGTYKYIF

SEQ ID NO: 140616 - protein, 17 aa, Homo sapiens
  CDR3 for beta chain variable domain of TCR clone 70308 (TRBV5-1, TRBJ2-7)
CASSKPEGREASYEQYF

SEQ ID NO: 140617 - protein, 20 aa, Homo sapiens
  CDR3 for alpha chain variable domain of TCR clone 70309 (TRAV12-1, TRAJ42)
SSVIQPPTSVKGGSQGNLIF

SEQ ID NO: 140618 - protein, 13 aa, Homo sapiens
  CDR3 for beta chain variable domain of TCR clone 70309 (TRBV10-3, TRBJ2-7)
CASKLAVNYEQYF

SEQ ID NO: 140619 - protein, 12 aa, Homo sapiens
  CDR3 for alpha chain variable domain of TCR clone 70310 (TRAV27, TRAJ41)
FAGRNSGYALNF

SEQ ID NO: 140620 - protein, 15 aa, Homo sapiens
  CDR3 for beta chain variable domain of TCR clone 70310 (TRBV20-1, TRBJ1-5)
CSATSDRGLGQPQHF

SEQ ID NO: 140621 - protein, 14 aa, Homo sapiens
  CDR3 for alpha chain variable domain of TCR clone 70311 (TRAV12-3, TRAJ10)
SHLPLTGGGNKLTF

SEQ ID NO: 140622 - protein, 15 aa, Homo sapiens
  CDR3 for beta chain variable domain of TCR clone 70311 (TRBV4-1, TRBJ1-4)
CASSGTGGTNEKLFF

SEQ ID NO: 140623 - protein, 14 aa, Homo sapiens
  CDR3 for alpha chain variable domain of TCR clone 70312 (TRAV29/DV5, TRAJ44)
CAAFLVGTASKLTF

SEQ ID NO: 140624 - protein, 15 aa, Homo sapiens
  CDR3 for beta chain variable domain of TCR clone 70312 (TRBV7-3, TRBJ2-2)
CASSETGQGTVELFF

SEQ ID NO: 140625 - protein, 14 aa, Homo sapiens
  CDR3 for alpha chain variable domain of TCR clone 70313 (TRAV17, TRAJ16)
CATADFSDGQKRLF

SEQ ID NO: 140626 - protein, 12 aa, Homo sapiens
  CDR3 for beta chain variable domain of TCR clone 70313 (TRBV24-1, TRBJ1-1)
CATLYPDTEAFF

SEQ ID NO: 140627 - protein, 14 aa, Homo sapiens
  CDR3 for alpha chain variable domain of TCR clone 70314 (TRAV21, TRAJ47)
CAVGKLEYGNKLVF

SEQ ID NO: 140628 - protein, 16 aa, Homo sapiens
  CDR3 for beta chain variable domain of TCR clone 70314 (TRBV11-2, TRBJ1-2)
CASSLDTGGADYGYTF

SEQ ID NO: 140629 - protein, 14 aa, Homo sapiens
  CDR3 for alpha chain variable domain of TCR clone 70315 (TRAV12-2, TRAJ36)
CAVNPPTGANNLFF

SEQ ID NO: 140630 - protein, 13 aa, Homo sapiens
  CDR3 for beta chain variable domain of TCR clone 70315 (TRBV27, TRBJ1-1)
CASSLSIGAEAFF

SEQ ID NO: 140631 - protein, 13 aa, Homo sapiens
  CDR3 for alpha chain variable domain of TCR clone 70316 (TRAV8-1, TRAJ34)
CAVNGKGTDKLIF

SEQ ID NO: 140632 - protein, 12 aa, Homo sapiens
  CDR3 for beta chain variable domain of TCR clone 70316 (TRBV19, TRBJ2-1)
CASSMQDTEQFF

SEQ ID NO: 140633 - protein, 17 aa, Homo sapiens
  CDR3 for alpha chain variable domain of TCR clone 70317 (TRAV3, TRAJ6)
CAVRDGPRAGGSYIPTF

SEQ ID NO: 140634 - protein, 15 aa, Homo sapiens
  CDR3 for beta chain variable domain of TCR clone 70317 (TRBV20-1, TRBJ1-1)
CSASWDRFLNTEAFF

SEQ ID NO: 140635 - protein, 18 aa, Homo sapiens
  CDR3 for alpha chain variable domain of TCR clone 70318 (TRAV21, TRAJ52)
CAVRPSPAGGTSYGKLTF

SEQ ID NO: 140636 - protein, 13 aa, Homo sapiens
  CDR3 for beta chain variable domain of TCR clone 70318 (TRBV11-2, TRBJ2-5)
CASSFSSQETQYF

SEQ ID NO: 140637 - protein, 13 aa, Homo sapiens
  CDR3 for alpha chain variable domain of TCR clone 70319 (TRAV1-2, TRAJ36)
CAVDQTGANNPFF

SEQ ID NO: 140638 - protein, 14 aa, Homo sapiens
  CDR3 for beta chain variable domain of TCR clone 70319 (TRBV20-1, TRBJ2-5)
CSAREMTKQETQYF

SEQ ID NO: 140639 - protein, 23 aa, Homo sapiens
  CDR3 for alpha chain variable domain of TCR clone 70320 (TRAV26-1, )
CIADNAGDNHIQNPDPAVYQLRD

SEQ ID NO: 140640 - protein, 12 aa, Homo sapiens
  CDR3 for beta chain variable domain of TCR clone 70320 (TRBV11-2, TRBJ2-2)
CASSLGGGELFF

SEQ ID NO: 140641 - protein, 13 aa, Homo sapiens
  CDR3 for alpha chain variable domain of TCR clone 70321 (TRAV12-1, TRAJ34)
CVVTGYNTDKIIF

SEQ ID NO: 140642 - protein, 13 aa, Homo sapiens
  CDR3 for beta chain variable domain of TCR clone 70321 (TRBV28, TRBJ2-7)
CASKAGGVYEQYF

SEQ ID NO: 140643 - protein, 16 aa, Homo sapiens
  CDR3 for alpha chain variable domain of TCR clone 70322 (TRAV26-1, TRAJ32)
CIVRKNYGGATNKLIF

SEQ ID NO: 140644 - protein, 14 aa, Homo sapiens
  CDR3 for beta chain variable domain of TCR clone 70322 (TRBV27, TRBJ1-1)
CASSLLSGLSEAFF

SEQ ID NO: 140645 - protein, 16 aa, Homo sapiens
  CDR3 for alpha chain variable domain of TCR clone 70323 (TRAV1-2, TRAJ6)
CAVRDQGTGRSYIPTF

SEQ ID NO: 140646 - protein, 13 aa, Homo sapiens
  CDR3 for beta chain variable domain of TCR clone 70323 (TRBV28, TRBJ2-7)
CASTPGLAGEQYF

SEQ ID NO: 140647 - protein, 23 aa, Homo sapiens
  CDR3 for alpha chain variable domain of TCR clone 70324 (TRAV9-2, )
CALSRAGNNHIQNPDPAVYQLRD

SEQ ID NO: 140648 - protein, 12 aa, Homo sapiens
  CDR3 for beta chain variable domain of TCR clone 70324 (TRBV7-2, TRBJ2-5)
CASSQYQETQYF

SEQ ID NO: 140649 - protein, 13 aa, Homo sapiens
  CDR3 for alpha chain variable domain of TCR clone 70325 (TRAV3, TRAJ21)
CAVREPDFNKFCF

SEQ ID NO: 140650 - protein, 18 aa, Homo sapiens
  CDR3 for beta chain variable domain of TCR clone 70325 (TRBV11-2, TRBJ2-3)
CASSLGGASRGAPNTQYF

SEQ ID NO: 140651 - protein, 15 aa, Homo sapiens
  CDR3 for alpha chain variable domain of TCR clone 70326 (TRAV23/DV6, TRAJ37)
CAAGEGSSNTGRLIF

SEQ ID NO: 140652 - protein, 17 aa, Homo sapiens
  CDR3 for beta chain variable domain of TCR clone 70326 (TRBV20-1, TRBJ2-7)
CSATRAGGVAGVEEQYF

SEQ ID NO: 140653 - protein, 14 aa, Homo sapiens
  CDR3 for alpha chain variable domain of TCR clone 70327 (TRAV1-2, TRAJ16)
CAVNRVSDGQKLLF

SEQ ID NO: 140654 - protein, 14 aa, Homo sapiens
  CDR3 for beta chain variable domain of TCR clone 70327 (TRBV4-1, TRBJ2-2)
CASSQAVNTGELFF

SEQ ID NO: 140655 - protein, 18 aa, Homo sapiens
  CDR3 for alpha chain variable domain of TCR clone 70328 (TRAV21, TRAJ52)
CAVRPSPAGGTSYGKLTF

SEQ ID NO: 140656 - protein, 16 aa, Homo sapiens
  CDR3 for beta chain variable domain of TCR clone 70328 (TRBV11-2, TRBJ2-7)
CASSLAPTGVNYEQYF

SEQ ID NO: 140657 - protein, 14 aa, Homo sapiens
  CDR3 for alpha chain variable domain of TCR clone 70329 (TRAV12-3, TRAJ10)
SHLPLTGGGNKLTF

SEQ ID NO: 140658 - protein, 14 aa, Homo sapiens
  CDR3 for beta chain variable domain of TCR clone 70329 (TRBV20-1, TRBJ2-3)
CSARGGTSTDTQYF

SEQ ID NO: 140659 - protein, 14 aa, Homo sapiens
  CDR3 for alpha chain variable domain of TCR clone 70330 (TRAV12-2, TRAJ17)
CAVLFKAAVNKLTF

SEQ ID NO: 140660 - protein, 15 aa, Homo sapiens
  CDR3 for beta chain variable domain of TCR clone 70330 (TRBV20-1, TRBJ2-7)
CSARDRVSGMDEQYF

SEQ ID NO: 140661 - protein, 13 aa, Homo sapiens
  CDR3 for alpha chain variable domain of TCR clone 70331 (TRAV12-3, TRAJ54)
CAMFAQGAQKMVF

SEQ ID NO: 140662 - protein, 16 aa, Homo sapiens
  CDR3 for beta chain variable domain of TCR clone 70331 (TRBV7-6, TRBJ2-3)
CASSPRRGGLGDTQYF

SEQ ID NO: 140663 - protein, 13 aa, Homo sapiens
  CDR3 for alpha chain variable domain of TCR clone 70332 (TRAV29/DV5, TRAJ31)
CAASRNNNARLMF

SEQ ID NO: 140664 - protein, 15 aa, Homo sapiens
  CDR3 for beta chain variable domain of TCR clone 70332 (TRBV4-1, TRBJ1-4)
CASSDTGGTNEKLFF

SEQ ID NO: 140665 - protein, 13 aa, Homo sapiens
  CDR3 for alpha chain variable domain of TCR clone 70333 (TRAV12-2, TRAJ20)
CAVYPSNDYKLSF

SEQ ID NO: 140666 - protein, 16 aa, Homo sapiens
  CDR3 for beta chain variable domain of TCR clone 70333 (TRBV20-1, TRBJ2-1)
CSARDLAGHSYNEQFF

SEQ ID NO: 140667 - protein, 11 aa, Homo sapiens
  CDR3 for alpha chain variable domain of TCR clone 70334 (TRAV17, TRAJ9)
CGFTGGFKTIF

SEQ ID NO: 140668 - protein, 14 aa, Homo sapiens
  CDR3 for beta chain variable domain of TCR clone 70334 (TRBV7-9, TRBJ2-2)
CARSLVQDTGELFF

SEQ ID NO: 140669 - protein, 10 aa, Homo sapiens
  CDR3 for alpha chain variable domain of TCR clone 70335 (TRAV36/DV7, TRAJ48)
CAVGNEKLTF

SEQ ID NO: 140670 - protein, 15 aa, Homo sapiens
  CDR3 for beta chain variable domain of TCR clone 70335 (TRBV9, TRBJ1-6)
CASSVAGTGDSPLHF

SEQ ID NO: 140671 - protein, 13 aa, Homo sapiens
  CDR3 for alpha chain variable domain of TCR clone 70336 (TRAV27, TRAJ41)
CAGEGNSGYALNF

SEQ ID NO: 140672 - protein, 14 aa, Homo sapiens
  CDR3 for beta chain variable domain of TCR clone 70336 (TRBV25-1, TRBJ1-1)
CASTNLGGNTEAFF

SEQ ID NO: 140673 - protein, 13 aa, Homo sapiens
  CDR3 for alpha chain variable domain of TCR clone 70337 (TRAV12-3, TRAJ20)
CAVGLRVDYKLSF

SEQ ID NO: 140674 - protein, 13 aa, Homo sapiens
  CDR3 for beta chain variable domain of TCR clone 70337 (TRBV6-1, TRBJ1-1)
CASSRQGNTEAFF

SEQ ID NO: 140675 - protein, 13 aa, Homo sapiens
  CDR3 for alpha chain variable domain of TCR clone 70338 (TRAV1-2, TRAJ7)
CAGPYYGNNRLAF

SEQ ID NO: 140676 - protein, 11 aa, Homo sapiens
  CDR3 for beta chain variable domain of TCR clone 70338 (TRBV27, TRBJ2-3)
CASSLGDTQYF

SEQ ID NO: 140677 - protein, 13 aa, Homo sapiens
  CDR3 for alpha chain variable domain of TCR clone 70339 (TRAV20, TRAJ48)
CAVQGVGNEKLTF

SEQ ID NO: 140678 - protein, 14 aa, Homo sapiens
  CDR3 for beta chain variable domain of TCR clone 70339 (TRBV27, TRBJ2-7)
CASSLRDGPYEQYF

SEQ ID NO: 140679 - protein, 15 aa, Homo sapiens
  CDR3 for alpha chain variable domain of TCR clone 70340 (TRAV3, TRAJ3)
CAVRDRDSSASKIIF

SEQ ID NO: 140680 - protein, 19 aa, Homo sapiens
  CDR3 for beta chain variable domain of TCR clone 70340 (TRBV25-1, TRBJ2-2)
CAILVYRVDRGRKTGELFF

SEQ ID NO: 140681 - protein, 15 aa, Homo sapiens
  CDR3 for alpha chain variable domain of TCR clone 70341 (TRAV9-2, TRAJ49)
CALSPPDHPGNQFYF

SEQ ID NO: 140682 - protein, 14 aa, Homo sapiens
  CDR3 for beta chain variable domain of TCR clone 70341 (TRBV12-4, TRBJ1-1)
CASSLGTGGTEAFF

SEQ ID NO: 140683 - protein, 11 aa, Homo sapiens
  CDR3 for alpha chain variable domain of TCR clone 70342 (TRAV23/DV6, TRAJ47)
CAASIRNGIWK

SEQ ID NO: 140684 - protein, 13 aa, Homo sapiens
  CDR3 for beta chain variable domain of TCR clone 70342 (TRBV19, TRBJ1-2)
CASSQGQVYGYTF

SEQ ID NO: 140685 - protein, 10 aa, Homo sapiens
  CDR3 for alpha chain variable domain of TCR clone 70343 (TRAV12-3, TRAJ49)
CAMNDDQFYF

SEQ ID NO: 140686 - protein, 15 aa, Homo sapiens
  CDR3 for beta chain variable domain of TCR clone 70343 (TRBV7-9, TRBJ1-4)
CASSRTGGFNEKLFF

SEQ ID NO: 140687 - protein, 14 aa, Homo sapiens
  CDR3 for alpha chain variable domain of TCR clone 70344 (TRAV12-3, TRAJ10)
SHLPLTGGGNKLTF

SEQ ID NO: 140688 - protein, 15 aa, Homo sapiens
  CDR3 for beta chain variable domain of TCR clone 70344 (TRBV29-1, TRBJ2-6)
CSVGDRGSGANDLTF

SEQ ID NO: 140689 - protein, 13 aa, Homo sapiens
  CDR3 for alpha chain variable domain of TCR clone 70345 (TRAV36/DV7, TRAJ54)
CAVDIQGAQKLGF

SEQ ID NO: 140690 - protein, 14 aa, Homo sapiens
  CDR3 for beta chain variable domain of TCR clone 70345 (TRBV19, TRBJ2-7)
CASNFRDTFTGMYF

SEQ ID NO: 140691 - protein, 16 aa, Homo sapiens
  CDR3 for alpha chain variable domain of TCR clone 70346 (TRAV3, TRAJ21)
CAVRDIERGNFNKFYF

SEQ ID NO: 140692 - protein, 13 aa, Homo sapiens
  CDR3 for beta chain variable domain of TCR clone 70346 (TRBV27, TRBJ2-7)
CASSLTTGHEQYF

SEQ ID NO: 140693 - protein, 15 aa, Homo sapiens
  CDR3 for alpha chain variable domain of TCR clone 70347 (TRAV4, TRAJ8)
CLVGEQHTGFQNLVF

SEQ ID NO: 140694 - protein, 15 aa, Homo sapiens
  CDR3 for beta chain variable domain of TCR clone 70347 (TRBV7-9, TRBJ2-5)
CASSNRDYLQETQYF

SEQ ID NO: 140695 - protein, 14 aa, Homo sapiens
  CDR3 for alpha chain variable domain of TCR clone 70348 (TRAV27, TRAJ22)
CAGVSVLGKRQLTF

SEQ ID NO: 140696 - protein, 16 aa, Homo sapiens
  CDR3 for beta chain variable domain of TCR clone 70348 (TRBV7-3, TRBJ2-2)
CASSLKRGTLSGELFF

SEQ ID NO: 140697 - protein, 13 aa, Homo sapiens
  CDR3 for alpha chain variable domain of TCR clone 70349 (TRAV12-1, TRAJ17)
CVVSKAAGNKLTF

SEQ ID NO: 140698 - protein, 16 aa, Homo sapiens
  CDR3 for beta chain variable domain of TCR clone 70349 (TRBV11-2, TRBJ2-2)
CASSLRTGNLIGELFF

SEQ ID NO: 140699 - protein, 17 aa, Homo sapiens
  CDR3 for alpha chain variable domain of TCR clone 70350 (TRAV3, TRAJ7)
CAVRDMSPLEGTTGSLL

SEQ ID NO: 140700 - protein, 17 aa, Homo sapiens
  CDR3 for beta chain variable domain of TCR clone 70350 (TRBV15, TRBJ1-2)
CATSGREIDVVNYGYTF

SEQ ID NO: 140701 - protein, 15 aa, Homo sapiens
  CDR3 for alpha chain variable domain of TCR clone 70351 (TRAV8-3, TRAJ45)
CASSYSGGGADGPTF

SEQ ID NO: 140702 - protein, 15 aa, Homo sapiens
  CDR3 for beta chain variable domain of TCR clone 70351 (TRBV27, TRBJ1-4)
CASSPRHATNEKLFF

SEQ ID NO: 140703 - protein, 15 aa, Homo sapiens
  CDR3 for alpha chain variable domain of TCR clone 70352 (TRAV3, TRAJ5)
CAVRDLETGRRALTF

SEQ ID NO: 140704 - protein, 14 aa, Homo sapiens
  CDR3 for beta chain variable domain of TCR clone 70352 (TRBV25-1, TRBJ1-4)
CASSGGGQPEKLFF

SEQ ID NO: 140705 - protein, 12 aa, Homo sapiens
  CDR3 for alpha chain variable domain of TCR clone 70353 (TRAV20, TRAJ39)
CAVGNAGNTLTF

SEQ ID NO: 140706 - protein, 17 aa, Homo sapiens
  CDR3 for beta chain variable domain of TCR clone 70353 (TRBV4-1, TRBJ2-3)
CASSQGYVSGGTDTQYF

SEQ ID NO: 140707 - protein, 12 aa, Homo sapiens
  CDR3 for alpha chain variable domain of TCR clone 70354 (TRAV3, TRAJ9)
CAVLPAGFKTIF

SEQ ID NO: 140708 - protein, 13 aa, Homo sapiens
  CDR3 for beta chain variable domain of TCR clone 70354 (TRBV27, TRBJ2-5)
CASSLSSLETQYF

SEQ ID NO: 140709 - protein, 14 aa, Homo sapiens
  CDR3 for alpha chain variable domain of TCR clone 70355 (TRAV12-2, TRAJ13)
CAVKKNGGYQKVTF

SEQ ID NO: 140710 - protein, 12 aa, Homo sapiens
  CDR3 for beta chain variable domain of TCR clone 70355 (TRBV12-4, TRBJ1-2)
CASSFIWLHLRF

SEQ ID NO: 140711 - protein, 11 aa, Homo sapiens
  CDR3 for alpha chain variable domain of TCR clone 70356 (TRAV26-1, TRAJ27)
CIDPNAGKSTF

SEQ ID NO: 140712 - protein, 18 aa, Homo sapiens
  CDR3 for beta chain variable domain of TCR clone 70356 (TRBV7-9, TRBJ2-6)
CASSFPGAGISGANVLTS

SEQ ID NO: 140713 - protein, 15 aa, Homo sapiens
  CDR3 for alpha chain variable domain of TCR clone 70357 (TRAV38-1, TRAJ37)
CAFIFGSGNTGKLIF

SEQ ID NO: 140714 - protein, 16 aa, Homo sapiens
  CDR3 for beta chain variable domain of TCR clone 70357 (TRBV7-9, TRBJ2-3)
CASSPWREVGTDTQYF

SEQ ID NO: 140715 - protein, 12 aa, Homo sapiens
  CDR3 for alpha chain variable domain of TCR clone 70358 (TRAV21, TRAJ31)
CVLTGNNARLMF

SEQ ID NO: 140716 - protein, 16 aa, Homo sapiens
  CDR3 for beta chain variable domain of TCR clone 70358 (TRBV27, TRBJ2-5)
CASSFGPGGTKETQYF

SEQ ID NO: 140717 - protein, 15 aa, Homo sapiens
  CDR3 for alpha chain variable domain of TCR clone 70359 (TRAV13-2, TRAJ23)
CAERGFYNQGGKLIF

SEQ ID NO: 140718 - protein, 18 aa, Homo sapiens
  CDR3 for beta chain variable domain of TCR clone 70359 (TRBV7-9, TRBJ2-7)
CASSLTTSGSRTWYEQYF

SEQ ID NO: 140719 - protein, 15 aa, Homo sapiens
  CDR3 for alpha chain variable domain of TCR clone 70360 (TRAV3, TRAJ22)
CAVRDRGGSARQLTF

SEQ ID NO: 140720 - protein, 13 aa, Homo sapiens
  CDR3 for beta chain variable domain of TCR clone 70360 (TRBV27, TRBJ1-4)
CASSLMGDEKLFF

SEQ ID NO: 140721 - protein, 15 aa, Homo sapiens
  CDR3 for alpha chain variable domain of TCR clone 70361 (TRAV8-4, TRAJ29)
CAVSEDFRGNTPLVF

SEQ ID NO: 140722 - protein, 18 aa, Homo sapiens
  CDR3 for beta chain variable domain of TCR clone 70361 (TRBV20-1, TRBJ2-6)
CSARTLAGGPAGANVLTF

SEQ ID NO: 140723 - protein, 13 aa, Homo sapiens
  CDR3 for alpha chain variable domain of TCR clone 70362 (TRAV26-2, TRAJ54)
CIPRVGGAQRLVF

SEQ ID NO: 140724 - protein, 16 aa, Homo sapiens
  CDR3 for beta chain variable domain of TCR clone 70362 (TRBV4-1, TRBJ1-1)
CASSSMSERPNTEAFF

SEQ ID NO: 140725 - protein, 13 aa, Homo sapiens
  CDR3 for alpha chain variable domain of TCR clone 70363 (TRAV12-2, TRAJ47)
CAVLMEYGNKLVF

SEQ ID NO: 140726 - protein, 14 aa, Homo sapiens
  CDR3 for beta chain variable domain of TCR clone 70363 (TRBV4-1, TRBJ1-5)
CASSQGPTNQPQHF

SEQ ID NO: 140727 - protein, 10 aa, Homo sapiens
  CDR3 for alpha chain variable domain of TCR clone 70364 (TRAV1-2, TRAJ20)
CALNDYKLSF

SEQ ID NO: 140728 - protein, 14 aa, Homo sapiens
  CDR3 for beta chain variable domain of TCR clone 70364 (TRBV19, TRBJ2-1)
CASPTFVLSGAQFF

SEQ ID NO: 140729 - protein, 14 aa, Homo sapiens
  CDR3 for alpha chain variable domain of TCR clone 70365 (TRAV8-1, TRAJ13)
CAVKRSGGYQKVTF

SEQ ID NO: 140730 - protein, 15 aa, Homo sapiens
  CDR3 for beta chain variable domain of TCR clone 70365 (TRBV19, TRBJ2-7)
CASSIGGGLVNEQYF

SEQ ID NO: 140731 - protein, 11 aa, Homo sapiens
  CDR3 for alpha chain variable domain of TCR clone 70366 (TRAV2, TRAJ13)
CASGGYQKVTF

SEQ ID NO: 140732 - protein, 15 aa, Homo sapiens
  CDR3 for beta chain variable domain of TCR clone 70366 (TRBV5-1, TRBJ2-5)
CASSFKGGDQETQYF

SEQ ID NO: 140733 - protein, 11 aa, Homo sapiens
  CDR3 for alpha chain variable domain of TCR clone 70367 (TRAV2, TRAJ13)
CASGGYQKVTF

SEQ ID NO: 140734 - protein, 16 aa, Homo sapiens
  CDR3 for beta chain variable domain of TCR clone 70367 (TRBV6-1, TRBJ2-5)
CASSETVDRGAETQYF

SEQ ID NO: 140735 - protein, 12 aa, Homo sapiens
  CDR3 for alpha chain variable domain of TCR clone 70368 (TRAV8-3, TRAJ20)
CAVGANDYKLSF

SEQ ID NO: 140736 - protein, 16 aa, Homo sapiens
  CDR3 for beta chain variable domain of TCR clone 70368 (TRBV19, TRBJ2-2)
CASRSPGTGATGDLFF

SEQ ID NO: 140737 - protein, 12 aa, Homo sapiens
  CDR3 for alpha chain variable domain of TCR clone 70369 (TRAV17, TRAJ39)
CATGAAGNMLTF

SEQ ID NO: 140738 - protein, 14 aa, Homo sapiens
  CDR3 for beta chain variable domain of TCR clone 70369 (TRBV7-9, TRBJ1-2)
CASSRQGANYSYTF

SEQ ID NO: 140739 - protein, 16 aa, Homo sapiens
  CDR3 for alpha chain variable domain of TCR clone 70370 (TRAV30, TRAJ24)
CGTEIVDADSWGKFQF

SEQ ID NO: 140740 - protein, 18 aa, Homo sapiens
  CDR3 for beta chain variable domain of TCR clone 70370 (TRBV7-6, TRBJ2-1)
CASSPRTSGMSSYNEQFF

SEQ ID NO: 140741 - protein, 13 aa, Homo sapiens
  CDR3 for alpha chain variable domain of TCR clone 70371 (TRAV12-3, TRAJ43)
CAMIRPNKNDMRF

SEQ ID NO: 140742 - protein, 12 aa, Homo sapiens
  CDR3 for beta chain variable domain of TCR clone 70371 (TRBV11-2, TRBJ2-5)
CASSLGQETQYF

SEQ ID NO: 140743 - protein, 16 aa, Homo sapiens
  CDR3 for alpha chain variable domain of TCR clone 70372 (TRAV3, TRAJ10)
CAVRDMRAGGGNKLTF

SEQ ID NO: 140744 - protein, 14 aa, Homo sapiens
  CDR3 for beta chain variable domain of TCR clone 70372 (TRBV19, TRBJ2-2)
CASSTLHRSGELFF

SEQ ID NO: 140745 - protein, 12 aa, Homo sapiens
  CDR3 for alpha chain variable domain of TCR clone 70373 (TRAV8-3, TRAJ26)
CAGDNYGQNFVF

SEQ ID NO: 140746 - protein, 16 aa, Homo sapiens
  CDR3 for beta chain variable domain of TCR clone 70373 (TRBV24-1, TRBJ2-3)
CATSDPGTGATDTQYF

SEQ ID NO: 140747 - protein, 13 aa, Homo sapiens
  CDR3 for alpha chain variable domain of TCR clone 70374 (TRAV21, TRAJ27)
CAARPGNAGKSTF

SEQ ID NO: 140748 - protein, 15 aa, Homo sapiens
  CDR3 for beta chain variable domain of TCR clone 70374 (TRBV7-9, TRBJ2-7)
CASSPGGGLTYEQYF

SEQ ID NO: 140749 - protein, 13 aa, Homo sapiens
  CDR3 for alpha chain variable domain of TCR clone 70375 (TRAV23/DV6, TRAJ27)
CAASKPMQANQSL

SEQ ID NO: 140750 - protein, 14 aa, Homo sapiens
  CDR3 for beta chain variable domain of TCR clone 70375 (TRBV5-4, TRBJ1-1)
CASSLDSRRDEAFF

SEQ ID NO: 140751 - protein, 13 aa, Homo sapiens
  CDR3 for alpha chain variable domain of TCR clone 70376 (TRAV12-1, TRAJ40)
CVVPTSGTYKYIF

SEQ ID NO: 140752 - protein, 13 aa, Homo sapiens
  CDR3 for beta chain variable domain of TCR clone 70376 (TRBV7-9, TRBJ1-2)
CASSLKQNYGYTF

SEQ ID NO: 140753 - protein, 16 aa, Homo sapiens
  CDR3 for alpha chain variable domain of TCR clone 70377 (TRAV3, TRAJ37)
CAVRGRGSGNTGKLIF

SEQ ID NO: 140754 - protein, 13 aa, Homo sapiens
  CDR3 for beta chain variable domain of TCR clone 70377 (TRBV14, TRBJ2-7)
CAGSQDRRGEQYF

SEQ ID NO: 140755 - protein, 13 aa, Homo sapiens
  CDR3 for alpha chain variable domain of TCR clone 70378 (TRAV1-2, TRAJ12)
CAVSMDSSYKLIF

SEQ ID NO: 140756 - protein, 16 aa, Homo sapiens
  CDR3 for beta chain variable domain of TCR clone 70378 (TRBV7-3, TRBJ2-2)
CASSLKRGTLSGELFF

SEQ ID NO: 140757 - protein, 16 aa, Homo sapiens
  CDR3 for alpha chain variable domain of TCR clone 70379 (TRAV4, TRAJ18)
CCVLLIGGSTLGRLYF

SEQ ID NO: 140758 - protein, 15 aa, Homo sapiens
  CDR3 for beta chain variable domain of TCR clone 70379 (TRBV20-1, TRBJ2-7)
CSARDRVSGMDEQYF

SEQ ID NO: 140759 - protein, 15 aa, Homo sapiens
  CDR3 for alpha chain variable domain of TCR clone 70380 (TRAV2, TRAJ9)
CAVAALNTGGFKTIF

SEQ ID NO: 140760 - protein, 15 aa, Homo sapiens
  CDR3 for beta chain variable domain of TCR clone 70380 (TRBV7-9, TRBJ1-5)
CASSQGHQPNQPQHF

SEQ ID NO: 140761 - protein, 10 aa, Homo sapiens
  CDR3 for alpha chain variable domain of TCR clone 70381 (TRAV26-1, TRAJ40)
CIAGTYKYIF

SEQ ID NO: 140762 - protein, 16 aa, Homo sapiens
  CDR3 for beta chain variable domain of TCR clone 70381 (TRBV28, TRBJ2-7)
CASSLFFETGGPEQYF

SEQ ID NO: 140763 - protein, 15 aa, Homo sapiens
  CDR3 for alpha chain variable domain of TCR clone 70382 (TRAV21, TRAJ53)
CATLNSGGSNYKLTF

SEQ ID NO: 140764 - protein, 16 aa, Homo sapiens
  CDR3 for beta chain variable domain of TCR clone 70382 (TRBV7-9, TRBJ1-2)
CASSLGFSSGEDGYTF

SEQ ID NO: 140765 - protein, 13 aa, Homo sapiens
  CDR3 for alpha chain variable domain of TCR clone 70383 (TRAV17, TRAJ9)
CATDYTGGFKTIF

SEQ ID NO: 140766 - protein, 11 aa, Homo sapiens
  CDR3 for beta chain variable domain of TCR clone 70383 (TRBV11-3, TRBJ2-2)
CASSSGGELFF

SEQ ID NO: 140767 - protein, 18 aa, Homo sapiens
  CDR3 for alpha chain variable domain of TCR clone 70384 (TRAV26-1, TRAJ23)
CIVRVGLEVWNQGGKLIL

SEQ ID NO: 140768 - protein, 14 aa, Homo sapiens
  CDR3 for beta chain variable domain of TCR clone 70384 (TRBV7-6, TRBJ2-3)
CASSLGTVTDTQYF

SEQ ID NO: 140769 - protein, 15 aa, Homo sapiens
  CDR3 for alpha chain variable domain of TCR clone 70385 (TRAV2, TRAJ9)
CAVEDRGTGGFKTIF

SEQ ID NO: 140770 - protein, 13 aa, Homo sapiens
  CDR3 for beta chain variable domain of TCR clone 70385 (TRBV19, TRBJ1-2)
CASSVPGQDCYTF

SEQ ID NO: 140771 - protein, 14 aa, Homo sapiens
  CDR3 for alpha chain variable domain of TCR clone 70386 (TRAV26-1, TRAJ26)
CIVRATFLGRNFVF

SEQ ID NO: 140772 - protein, 16 aa, Homo sapiens
  CDR3 for beta chain variable domain of TCR clone 70386 (TRBV12-4, TRBJ2-7)
CASRSTGTGPSYEQYF

SEQ ID NO: 140773 - protein, 12 aa, Homo sapiens
  CDR3 for alpha chain variable domain of TCR clone 70387 (TRAV3, TRAJ31)
CAAQRSNARLMF

SEQ ID NO: 140774 - protein, 16 aa, Homo sapiens
  CDR3 for beta chain variable domain of TCR clone 70387 (TRBV4-2, TRBJ1-1)
CASSPSPGRAAPEAFF

SEQ ID NO: 140775 - protein, 13 aa, Homo sapiens
  CDR3 for alpha chain variable domain of TCR clone 70388 (TRAV8-3, TRAJ44)
CAVVPGTVSKLTF

SEQ ID NO: 140776 - protein, 12 aa, Homo sapiens
  CDR3 for beta chain variable domain of TCR clone 70388 (TRBV7-8, TRBJ2-7)
CASSLGDREQYF

SEQ ID NO: 140777 - protein, 14 aa, Homo sapiens
  CDR3 for alpha chain variable domain of TCR clone 70389 (TRAV16, TRAJ33)
CALSAMDSNYQLIW

SEQ ID NO: 140778 - protein, 12 aa, Homo sapiens
  CDR3 for beta chain variable domain of TCR clone 70389 (TRBV28, TRBJ2-6)
CAIQAGANDLTF

SEQ ID NO: 140779 - protein, 11 aa, Homo sapiens
  CDR3 for alpha chain variable domain of TCR clone 70390 (TRAV3, TRAJ21)
CAVGNFNKIYF

SEQ ID NO: 140780 - protein, 16 aa, Homo sapiens
  CDR3 for beta chain variable domain of TCR clone 70390 (TRBV19, TRBJ2-1)
CASSKAGPSSYNEQFF

SEQ ID NO: 140781 - protein, 14 aa, Homo sapiens
  CDR3 for alpha chain variable domain of TCR clone 70391 (TRAV8-4, TRAJ9)
CAVRINTGGFKTLF

SEQ ID NO: 140782 - protein, 15 aa, Homo sapiens
  CDR3 for beta chain variable domain of TCR clone 70391 (TRBV10-2, TRBJ2-6)
CASSEQGTGANVLTF

SEQ ID NO: 140783 - protein, 14 aa, Homo sapiens
  CDR3 for alpha chain variable domain of TCR clone 70392 (TRAV35, TRAJ42)
CAGRYGGSQGNLIF

SEQ ID NO: 140784 - protein, 15 aa, Homo sapiens
  CDR3 for beta chain variable domain of TCR clone 70392 (TRBV6-3, TRBJ2-7)
CASSSPGTVFYEQYF

SEQ ID NO: 140785 - protein, 14 aa, Homo sapiens
  CDR3 for alpha chain variable domain of TCR clone 70393 (TRAV13-1, TRAJ35)
CAASKGGFGNVLHC

SEQ ID NO: 140786 - protein, 15 aa, Homo sapiens
  CDR3 for beta chain variable domain of TCR clone 70393 (TRBV19, TRBJ1-1)
CASTSGRIQDTEAFF

SEQ ID NO: 140787 - protein, 14 aa, Homo sapiens
  CDR3 for alpha chain variable domain of TCR clone 70394 (TRAV35, TRAJ33)
CAVSSQDSNYQLIW

SEQ ID NO: 140788 - protein, 15 aa, Homo sapiens
  CDR3 for beta chain variable domain of TCR clone 70394 (TRBV28, TRBJ2-5)
CASSPGQGSIETQYF

SEQ ID NO: 140789 - protein, 14 aa, Homo sapiens
  CDR3 for alpha chain variable domain of TCR clone 70395 (TRAV1-2, TRAJ16)
CAVNRFSDCQKLLF

SEQ ID NO: 140790 - protein, 13 aa, Homo sapiens
  CDR3 for beta chain variable domain of TCR clone 70395 (TRBV10-3, TRBJ2-7)
CASKLAVNYEQYF

SEQ ID NO: 140791 - protein, 13 aa, Homo sapiens
  CDR3 for alpha chain variable domain of TCR clone 70396 (TRAV3, TRAJ27)
CAVRPLGAGKSTF

SEQ ID NO: 140792 - protein, 13 aa, Homo sapiens
  CDR3 for beta chain variable domain of TCR clone 70396 (TRBV6-1, TRBJ2-1)
CAGAGTGLHEQFF

SEQ ID NO: 140793 - protein, 15 aa, Homo sapiens
  CDR3 for alpha chain variable domain of TCR clone 70397 (TRAV8-3, TRAJ27)
CAVGPSKTNAGKSTF

SEQ ID NO: 140794 - protein, 15 aa, Homo sapiens
  CDR3 for beta chain variable domain of TCR clone 70397 (TRBV7-2, TRBJ2-1)
CASSSGLAGGSGQFF

SEQ ID NO: 140795 - protein, 15 aa, Homo sapiens
  CDR3 for alpha chain variable domain of TCR clone 70398 (TRAV13-1, TRAJ52)
SYYNAGGTSYGKLTF

SEQ ID NO: 140796 - protein, 11 aa, Homo sapiens
  CDR3 for beta chain variable domain of TCR clone 70398 (TRBV12-4, TRBJ2-2)
CASSSAGELLF

SEQ ID NO: 140797 - protein, 14 aa, Homo sapiens
  CDR3 for alpha chain variable domain of TCR clone 70399 (TRAV12-3, TRAJ10)
SHLPLTGGGNKLTF

SEQ ID NO: 140798 - protein, 12 aa, Homo sapiens
  CDR3 for beta chain variable domain of TCR clone 70399 (TRBV7-2, TRBJ2-3)
CASSLTGDTQYF

SEQ ID NO: 140799 - protein, 14 aa, Homo sapiens
  CDR3 for alpha chain variable domain of TCR clone 70400 (TRAV17, TRAJ57)
CATDPQGGSEKLVF

SEQ ID NO: 140800 - protein, 16 aa, Homo sapiens
  CDR3 for beta chain variable domain of TCR clone 70400 (TRBV20-1, TRBJ1-4)
CSAPGQGLLTNDKLFF

SEQ ID NO: 140801 - protein, 14 aa, Homo sapiens
  CDR3 for alpha chain variable domain of TCR clone 70401 (TRAV8-6, TRAJ49)
CAVSVRYTGNQFYF

SEQ ID NO: 140802 - protein, 11 aa, Homo sapiens
  CDR3 for beta chain variable domain of TCR clone 70401 (TRBV20-1, TRBJ1-2)
CSVQGAGGYTF

SEQ ID NO: 140803 - protein, 13 aa, Homo sapiens
  CDR3 for alpha chain variable domain of TCR clone 70402 (TRAV27, TRAJ45)
CRSSGGGADGLTF

SEQ ID NO: 140804 - protein, 14 aa, Homo sapiens
  CDR3 for beta chain variable domain of TCR clone 70402 (TRBV7-9, TRBJ2-1)
CASSSMVGFSEQFF

SEQ ID NO: 140805 - protein, 15 aa, Homo sapiens
  CDR3 for alpha chain variable domain of TCR clone 70403 (TRAV26-1, TRAJ15)
CIVRAANQAGTALTF

SEQ ID NO: 140806 - protein, 15 aa, Homo sapiens
  CDR3 for beta chain variable domain of TCR clone 70403 (TRBV20-1, TRBJ1-1)
CSARSAATSNTEAFF

SEQ ID NO: 140807 - protein, 14 aa, Homo sapiens
  CDR3 for alpha chain variable domain of TCR clone 70404 (TRAV13-1, TRAJ9)
CAASALTGGFKTIF

SEQ ID NO: 140808 - protein, 16 aa, Homo sapiens
  CDR3 for beta chain variable domain of TCR clone 70404 (TRBV7-8, TRBJ2-4)
CASSAERTRAKNIQYF

SEQ ID NO: 140809 - protein, 12 aa, Homo sapiens
  CDR3 for alpha chain variable domain of TCR clone 70405 (TRAV16, TRAJ26)
CALRSYGQNFVF

SEQ ID NO: 140810 - protein, 14 aa, Homo sapiens
  CDR3 for beta chain variable domain of TCR clone 70405 (TRBV10-3, TRBJ2-1)
CAISSDLAYNGQFF

SEQ ID NO: 140811 - protein, 12 aa, Homo sapiens
  CDR3 for alpha chain variable domain of TCR clone 70406 (TRAV40, TRAJ20)
CLRGLNDYKLSF

SEQ ID NO: 140812 - protein, 14 aa, Homo sapiens
  CDR3 for beta chain variable domain of TCR clone 70406 (TRBV19, TRBJ2-1)
CASSSGREYNEQFF

SEQ ID NO: 140813 - protein, 16 aa, Homo sapiens
  CDR3 for alpha chain variable domain of TCR clone 70407 (TRAV26-1, TRAJ31)
CIVRPPVLNNNARLMF

SEQ ID NO: 140814 - protein, 11 aa, Homo sapiens
  CDR3 for beta chain variable domain of TCR clone 70407 (TRBV7-8, TRBJ2-7)
CASSLSREQYF

SEQ ID NO: 140815 - protein, 18 aa, Homo sapiens
  CDR3 for alpha chain variable domain of TCR clone 70408 (TRAV17, TRAJ45)
CATSLDLYSGGGADGLTF

SEQ ID NO: 140816 - protein, 12 aa, Homo sapiens
  CDR3 for beta chain variable domain of TCR clone 70408 (TRBV7-9, TRBJ1-1)
CASSLVRGEAFF

SEQ ID NO: 140817 - protein, 13 aa, Homo sapiens
  CDR3 for alpha chain variable domain of TCR clone 70409 (TRAV30, TRAJ6)
CGTEAGGSYIPTF

SEQ ID NO: 140818 - protein, 16 aa, Homo sapiens
  CDR3 for beta chain variable domain of TCR clone 70409 (TRBV4-3, TRBJ2-3)
CASSLGLAGEGGTQYF

SEQ ID NO: 140819 - protein, 18 aa, Homo sapiens
  CDR3 for alpha chain variable domain of TCR clone 70410 (TRAV13-1, TRAJ52)
CAAKDPNAGGTSYGKLTF

SEQ ID NO: 140820 - protein, 15 aa, Homo sapiens
  CDR3 for beta chain variable domain of TCR clone 70410 (TRBV6-1, TRBJ2-3)
CASSERGGITDTQYF

SEQ ID NO: 140821 - protein, 14 aa, Homo sapiens
  CDR3 for alpha chain variable domain of TCR clone 70411 (TRAV8-1, TRAJ3)
CAVGLYSSASKIIF

SEQ ID NO: 140822 - protein, 15 aa, Homo sapiens
  CDR3 for beta chain variable domain of TCR clone 70411 (TRBV19, TRBJ1-1)
CASTSGQIQNTEAFF

SEQ ID NO: 140823 - protein, 18 aa, Homo sapiens
  CDR3 for alpha chain variable domain of TCR clone 70412 (TRAV29/DV5, TRAJ52)
QCTSVQQADGTSYGKLTF

SEQ ID NO: 140824 - protein, 13 aa, Homo sapiens
  CDR3 for beta chain variable domain of TCR clone 70412 (TRBV7-2, TRBJ1-1)
CASNLKGAKGAFF

SEQ ID NO: 140825 - protein, 13 aa, Homo sapiens
  CDR3 for alpha chain variable domain of TCR clone 70413 (TRAV17, TRAJ5)
CAPMDTGRRALTF

SEQ ID NO: 140826 - protein, 15 aa, Homo sapiens
  CDR3 for beta chain variable domain of TCR clone 70413 (TRBV15, TRBJ1-2)
CATSRVRASGSGYTF

SEQ ID NO: 140827 - protein, 10 aa, Homo sapiens
  CDR3 for alpha chain variable domain of TCR clone 70414 (TRAV20, TRAJ22)
CAAPARQLTF

SEQ ID NO: 140828 - protein, 14 aa, Homo sapiens
  CDR3 for beta chain variable domain of TCR clone 70414 (TRBV19, TRBJ2-1)
CASSMGSGVTEQFF

SEQ ID NO: 140829 - protein, 17 aa, Homo sapiens
  CDR3 for alpha chain variable domain of TCR clone 70415 (TRAV3, TRAJ6)
CAVRDGPRAGGSYIPTF

SEQ ID NO: 140830 - protein, 13 aa, Homo sapiens
  CDR3 for beta chain variable domain of TCR clone 70415 (TRBV4-1, TRBJ2-2)
CASSQENTGELFS

SEQ ID NO: 140831 - protein, 15 aa, Homo sapiens
  CDR3 for alpha chain variable domain of TCR clone 70416 (TRAV2, TRAJ15)
CAVADREQAGTALIF

SEQ ID NO: 140832 - protein, 13 aa, Homo sapiens
  CDR3 for beta chain variable domain of TCR clone 70416 (TRBV10-2, TRBJ2-7)
CASGTSGGYEQYF

SEQ ID NO: 140833 - protein, 15 aa, Homo sapiens
  CDR3 for alpha chain variable domain of TCR clone 70417 (TRAV3, TRAJ22)
CAVRDRGGSARQLTF

SEQ ID NO: 140834 - protein, 16 aa, Homo sapiens
  CDR3 for beta chain variable domain of TCR clone 70417 (TRBV11-2, TRBJ2-1)
CASARGSYSHQNEQFF

SEQ ID NO: 140835 - protein, 11 aa, Homo sapiens
  CDR3 for alpha chain variable domain of TCR clone 70418 (TRAV2, TRAJ13)
CASGGYQKVTF

SEQ ID NO: 140836 - protein, 14 aa, Homo sapiens
  CDR3 for beta chain variable domain of TCR clone 70418 (TRBV7-8, TRBJ1-2)
CASSPDSLSYGYTF

SEQ ID NO: 140837 - protein, 14 aa, Homo sapiens
  CDR3 for alpha chain variable domain of TCR clone 70419 (TRAV2, TRAJ37)
FAVDFTSNTGKLIF

SEQ ID NO: 140838 - protein, 15 aa, Homo sapiens
  CDR3 for beta chain variable domain of TCR clone 70419 (TRBV20-1, TRBJ1-1)
CSASRGVTGNTEAFF

SEQ ID NO: 140839 - protein, 15 aa, Homo sapiens
  CDR3 for alpha chain variable domain of TCR clone 70420 (TRAV2, TRAJ22)
CAVPSRGGYARQLTF

SEQ ID NO: 140840 - protein, 11 aa, Homo sapiens
  CDR3 for beta chain variable domain of TCR clone 70420 (TRBV27, TRBJ2-3)
CASSLGDTQYF

SEQ ID NO: 140841 - protein, 17 aa, Homo sapiens
  CDR3 for alpha chain variable domain of TCR clone 70421 (TRAV26-1, TRAJ22)
CIVRVPSHSGSARLLTF

SEQ ID NO: 140842 - protein, 16 aa, Homo sapiens
  CDR3 for beta chain variable domain of TCR clone 70421 (TRBV28, TRBJ2-1)
CASRRSGRVVGNEQFF

SEQ ID NO: 140843 - protein, 15 aa, Homo sapiens
  CDR3 for alpha chain variable domain of TCR clone 70422 (TRAV34, TRAJ38)
CGADFTPGNNRKLIW

SEQ ID NO: 140844 - protein, 16 aa, Homo sapiens
  CDR3 for beta chain variable domain of TCR clone 70422 (TRBV12-5, TRBJ2-5)
CASGPRTSGNQETQYS

SEQ ID NO: 140845 - protein, 15 aa, Homo sapiens
  CDR3 for alpha chain variable domain of TCR clone 70423 (TRAV2, TRAJ9)
CAVEDRGTGGFKTIF

SEQ ID NO: 140846 - protein, 16 aa, Homo sapiens
  CDR3 for beta chain variable domain of TCR clone 70423 (TRBV24-1, TRBJ2-3)
CATSDPGTGATDTRYF

SEQ ID NO: 140847 - protein, 14 aa, Homo sapiens
  CDR3 for alpha chain variable domain of TCR clone 70424 (TRAV8-1, TRAJ4)
CAVKFSGGYNKLIF

SEQ ID NO: 140848 - protein, 13 aa, Homo sapiens
  CDR3 for beta chain variable domain of TCR clone 70424 (TRBV27, TRBJ1-4)
CASSLMGDEKLFF

SEQ ID NO: 140849 - protein, 15 aa, Homo sapiens
  CDR3 for alpha chain variable domain of TCR clone 70425 (TRAV8-3, TRAJ11)
CAVGLLNSGYSTLTF

SEQ ID NO: 140850 - protein, 12 aa, Homo sapiens
  CDR3 for beta chain variable domain of TCR clone 70425 (TRBV12-4, TRBJ2-3)
CASSTLPDTQYF

SEQ ID NO: 140851 - protein, 15 aa, Homo sapiens
  CDR3 for alpha chain variable domain of TCR clone 70426 (TRAV8-1, TRAJ6)
CAVNTPPGGSYIPTF

SEQ ID NO: 140852 - protein, 14 aa, Homo sapiens
  CDR3 for beta chain variable domain of TCR clone 70426 (TRBV12-4, TRBJ2-1)
CASSLGQGAYEQFF

SEQ ID NO: 140853 - protein, 12 aa, Homo sapiens
  CDR3 for alpha chain variable domain of TCR clone 70427 (TRAV3, TRAJ39)
CAVIEWSNVLTF

SEQ ID NO: 140854 - protein, 14 aa, Homo sapiens
  CDR3 for beta chain variable domain of TCR clone 70427 (TRBV7-8, TRBJ2-3)
CASSFPDGQDTQYF

SEQ ID NO: 140855 - protein, 15 aa, Homo sapiens
  CDR3 for alpha chain variable domain of TCR clone 70428 (TRAV26-1, TRAJ48)
CIARWSWFGNEKLTF

SEQ ID NO: 140856 - protein, 12 aa, Homo sapiens
  CDR3 for beta chain variable domain of TCR clone 70428 (TRBV19, TRBJ2-5)
CACSISEETQYF

SEQ ID NO: 140857 - protein, 16 aa, Homo sapiens
  CDR3 for alpha chain variable domain of TCR clone 70429 (TRAV30, TRAJ24)
CGTEIVDADSWGKFQF

SEQ ID NO: 140858 - protein, 13 aa, Homo sapiens
  CDR3 for beta chain variable domain of TCR clone 70429 (TRBV28, TRBJ2-5)
CASSFAGGETQYF

SEQ ID NO: 140859 - protein, 13 aa, Homo sapiens
  CDR3 for alpha chain variable domain of TCR clone 70430 (TRAV16, TRAJ34)
CALISYNTDKLIF

SEQ ID NO: 140860 - protein, 14 aa, Homo sapiens
  CDR3 for beta chain variable domain of TCR clone 70430 (TRBV20-1, TRBJ1-1)
CSAQTRIGGTEAFF

SEQ ID NO: 140861 - protein, 17 aa, Homo sapiens
  CDR3 for alpha chain variable domain of TCR clone 70431 (TRAV12-3, TRAJ6)
CATSARGGAGGSYIPTF

SEQ ID NO: 140862 - protein, 12 aa, Homo sapiens
  CDR3 for beta chain variable domain of TCR clone 70431 (TRBV12-4, TRBJ2-3)
CASSTLPDTQYF

SEQ ID NO: 140863 - protein, 13 aa, Homo sapiens
  CDR3 for alpha chain variable domain of TCR clone 70432 (TRAV20, TRAJ21)
CAVEGYNFNKFYF

SEQ ID NO: 140864 - protein, 14 aa, Homo sapiens
  CDR3 for beta chain variable domain of TCR clone 70432 (TRBV3-1, TRBJ2-5)
CASSQGPDQETQYF

SEQ ID NO: 140865 - protein, 13 aa, Homo sapiens
  CDR3 for alpha chain variable domain of TCR clone 70433 (TRAV12-1, TRAJ34)
CVVTGYNTDKLIF

SEQ ID NO: 140866 - protein, 13 aa, Homo sapiens
  CDR3 for beta chain variable domain of TCR clone 70433 (TRBV28, TRBJ2-7)
CASKAGGVYEQHF

SEQ ID NO: 140867 - protein, 14 aa, Homo sapiens
  CDR3 for alpha chain variable domain of TCR clone 70434 (TRAV19, TRAJ16)
CALSEVSDGQKLLF

SEQ ID NO: 140868 - protein, 14 aa, Homo sapiens
  CDR3 for beta chain variable domain of TCR clone 70434 (TRBV7-2, TRBJ1-1)
CASSFLTGTTEAFF

SEQ ID NO: 140869 - protein, 14 aa, Homo sapiens
  CDR3 for alpha chain variable domain of TCR clone 70435 (TRAV13-1, TRAJ35)
CAASKGGFGNVLHC

SEQ ID NO: 140870 - protein, 15 aa, Homo sapiens
  CDR3 for beta chain variable domain of TCR clone 70435 (TRBV7-3, TRBJ2-2)
CASSETGQGTGELFF

SEQ ID NO: 140871 - protein, 13 aa, Homo sapiens
  CDR3 for alpha chain variable domain of TCR clone 70436 (TRAV17, TRAJ40)
CAGALGGTYKYIF

SEQ ID NO: 140872 - protein, 16 aa, Homo sapiens
  CDR3 for beta chain variable domain of TCR clone 70436 (TRBV7-2, TRBJ1-4)
CASSLAPGRGDEKLFF

SEQ ID NO: 140873 - protein, 12 aa, Homo sapiens
  CDR3 for alpha chain variable domain of TCR clone 70437 (TRAV8-3, TRAJ26)
CAGDNYGQIFVF

SEQ ID NO: 140874 - protein, 12 aa, Homo sapiens
  CDR3 for beta chain variable domain of TCR clone 70437 (TRBV11-2, TRBJ2-1)
CASSPGNNEQFF

SEQ ID NO: 140875 - protein, 18 aa, Homo sapiens
  CDR3 for alpha chain variable domain of TCR clone 70438 (TRAV12-3, TRAJ52)
CAMSRTNAGGTSYGKLTF

SEQ ID NO: 140876 - protein, 17 aa, Homo sapiens
  CDR3 for beta chain variable domain of TCR clone 70438 (TRBV11-2, TRBJ2-1)
CASSLYPPGVEYNEQFF

SEQ ID NO: 140877 - protein, 12 aa, Homo sapiens
  CDR3 for alpha chain variable domain of TCR clone 70439 (TRAV20, TRAJ37)
CALPSNTGKLIF

SEQ ID NO: 140878 - protein, 14 aa, Homo sapiens
  CDR3 for beta chain variable domain of TCR clone 70439 (TRBV19, TRBJ2-1)
CASPTFVLSGEQLF

SEQ ID NO: 140879 - protein, 15 aa, Homo sapiens
  CDR3 for alpha chain variable domain of TCR clone 70440 (TRAV8-3, TRAJ32)
CAVVPYGGATNKLIF

SEQ ID NO: 140880 - protein, 14 aa, Homo sapiens
  CDR3 for beta chain variable domain of TCR clone 70440 (TRBV29-1, TRBJ2-2)
CSVLAETNTGELFF

SEQ ID NO: 140881 - protein, 13 aa, Homo sapiens
  CDR3 for alpha chain variable domain of TCR clone 70441 (TRAV2, TRAJ40)
CAVVTSGTYKYIF

SEQ ID NO: 140882 - protein, 14 aa, Homo sapiens
  CDR3 for beta chain variable domain of TCR clone 70441 (TRBV11-2, TRBJ1-2)
CASSLGTANYGYTF

SEQ ID NO: 140883 - protein, 16 aa, Homo sapiens
  CDR3 for alpha chain variable domain of TCR clone 70442 (TRAV1-1, TRAJ20)
CLLLLRCERYNYKLSF

SEQ ID NO: 140884 - protein, 18 aa, Homo sapiens
  CDR3 for beta chain variable domain of TCR clone 70442 (TRBV20-1, TRBJ2-6)
CSAETTPTHGSGANVLTF

SEQ ID NO: 140885 - protein, 11 aa, Homo sapiens
  CDR3 for alpha chain variable domain of TCR clone 70443 (TRAV30, TRAJ24)
WMLTAGGKFQF

SEQ ID NO: 140886 - protein, 19 aa, Homo sapiens
  CDR3 for beta chain variable domain of TCR clone 70443 (TRBV25-1, TRBJ2-2)
CAILVYRVDRGRKTGELFF

SEQ ID NO: 140887 - protein, 13 aa, Homo sapiens
  CDR3 for alpha chain variable domain of TCR clone 70444 (TRAV12-3, TRAJ30)
CAMSAKWDDKIIF

SEQ ID NO: 140888 - protein, 15 aa, Homo sapiens
  CDR3 for beta chain variable domain of TCR clone 70444 (TRBV20-1, TRBJ2-7)
CSARDWVSGMDEQYF

SEQ ID NO: 140889 - protein, 11 aa, Homo sapiens
  CDR3 for alpha chain variable domain of TCR clone 70445 (TRAV1-1, TRAJ16)
RAAGDGQKLLF

SEQ ID NO: 140890 - protein, 15 aa, Homo sapiens
  CDR3 for beta chain variable domain of TCR clone 70445 (TRBV28, TRBJ1-2)
CASIPQGSDDYGYTF

SEQ ID NO: 140891 - protein, 13 aa, Homo sapiens
  CDR3 for alpha chain variable domain of TCR clone 70446 (TRAV12-2, TRAJ50)
CAVIVTSYDKVIF

SEQ ID NO: 140892 - protein, 13 aa, Homo sapiens
  CDR3 for beta chain variable domain of TCR clone 70446 (TRBV7-3, TRBJ1-1)
CASSQDWGAEAFF

SEQ ID NO: 140893 - protein, 14 aa, Homo sapiens
  CDR3 for alpha chain variable domain of TCR clone 70447 (TRAV1-2, TRAJ8)
CVVREDTGFQKLVF

SEQ ID NO: 140894 - protein, 19 aa, Homo sapiens
  CDR3 for beta chain variable domain of TCR clone 70447 (TRBV7-2, TRBJ2-3)
CASSFLSRNWGGGTDTQYF

SEQ ID NO: 140895 - protein, 14 aa, Homo sapiens
  CDR3 for alpha chain variable domain of TCR clone 70448 (TRAV9-2, TRAJ6)
CALSDPGGSYIPTF

SEQ ID NO: 140896 - protein, 16 aa, Homo sapiens
  CDR3 for beta chain variable domain of TCR clone 70448 (TRBV19, TRBJ2-2)
CARRSPGTGATGELFF

SEQ ID NO: 140897 - protein, 15 aa, Homo sapiens
  CDR3 for alpha chain variable domain of TCR clone 70449 (TRAV12-1, TRAJ5)
CVVNMLEAGRRALTF

SEQ ID NO: 140898 - protein, 12 aa, Homo sapiens
  CDR3 for beta chain variable domain of TCR clone 70449 (TRBV11-2, TRBJ2-2)
CASSLGGGELFF

SEQ ID NO: 140899 - protein, 14 aa, Homo sapiens
  CDR3 for alpha chain variable domain of TCR clone 70450 (TRAV1-2, TRAJ16)
CAVNRFSDGQKLLL

SEQ ID NO: 140900 - protein, 14 aa, Homo sapiens
  CDR3 for beta chain variable domain of TCR clone 70450 (TRBV7-2, TRBJ2-5)
CASSPLGQSETQYF

SEQ ID NO: 140901 - protein, 15 aa, Homo sapiens
  CDR3 for alpha chain variable domain of TCR clone 70451 (TRAV3, TRAJ36)
CAVRASQTGANTLFF

SEQ ID NO: 140902 - protein, 13 aa, Homo sapiens
  CDR3 for beta chain variable domain of TCR clone 70451 (TRBV10-3, TRBJ1-2)
CAISERDSYGYTF

SEQ ID NO: 140903 - protein, 14 aa, Homo sapiens
  CDR3 for alpha chain variable domain of TCR clone 70452 (TRAV35, TRAJ42)
CAGRYGGSQGNLIF

SEQ ID NO: 140904 - protein, 15 aa, Homo sapiens
  CDR3 for beta chain variable domain of TCR clone 70452 (TRBV7-9, TRBJ2-1)
CVSSLGWGRANEQFS

SEQ ID NO: 140905 - protein, 14 aa, Homo sapiens
  CDR3 for alpha chain variable domain of TCR clone 70453 (TRAV1-2, TRAJ16)
CAVNRFSDGQKLLF

SEQ ID NO: 140906 - protein, 19 aa, Homo sapiens
  CDR3 for beta chain variable domain of TCR clone 70453 (TRBV7-2, TRBJ2-3)
CASSLRPGTGRIVVGEQYF

SEQ ID NO: 140907 - protein, 14 aa, Homo sapiens
  CDR3 for alpha chain variable domain of TCR clone 70454 (TRAV4, TRAJ17)
CLVGDPLVGNKLTF

SEQ ID NO: 140908 - protein, 20 aa, Homo sapiens
  CDR3 for beta chain variable domain of TCR clone 70454 (TRBV20-1, TRBJ2-1)
RSARPYSVAGGPSYYNEQFF

SEQ ID NO: 140909 - protein, 14 aa, Homo sapiens
  CDR3 for alpha chain variable domain of TCR clone 70455 (TRAV20, TRAJ42)
CAVQAGGSQGNLIF

SEQ ID NO: 140910 - protein, 14 aa, Homo sapiens
  CDR3 for beta chain variable domain of TCR clone 70455 (TRBV28, TRBJ1-2)
CAGRIQGANYGYAF

SEQ ID NO: 140911 - protein, 13 aa, Homo sapiens
  CDR3 for alpha chain variable domain of TCR clone 70456 (TRAV8-3, TRAJ21)
CAVGAYNFNKFYF

SEQ ID NO: 140912 - protein, 15 aa, Homo sapiens
  CDR3 for beta chain variable domain of TCR clone 70456 (TRBV7-2, TRBJ2-1)
CASSLASGRVNEQFF

SEQ ID NO: 140913 - protein, 12 aa, Homo sapiens
  CDR3 for alpha chain variable domain of TCR clone 70457 (TRAV2, TRAJ36)
CAELPGANNLFF

SEQ ID NO: 140914 - protein, 14 aa, Homo sapiens
  CDR3 for beta chain variable domain of TCR clone 70457 (TRBV18, TRBJ2-7)
CASSPRGGAYEQYF

SEQ ID NO: 140915 - protein, 19 aa, Homo sapiens
  CDR3 for alpha chain variable domain of TCR clone 70458 (TRAV26-1, TRAJ52)
CIVRAHRNSGGTSYGKLTF

SEQ ID NO: 140916 - protein, 15 aa, Homo sapiens
  CDR3 for beta chain variable domain of TCR clone 70458 (TRBV12-4, TRBJ2-5)
CASSPPTGLQETQYF

SEQ ID NO: 140917 - protein, 11 aa, Homo sapiens
  CDR3 for alpha chain variable domain of TCR clone 70459 (TRAV8-4, TRAJ26)
CAGGEGKNFVF

SEQ ID NO: 140918 - protein, 17 aa, Homo sapiens
  CDR3 for beta chain variable domain of TCR clone 70459 (TRBV7-9, TRBJ2-3)
CASSPTVAGDLTDTQYF

SEQ ID NO: 140919 - protein, 11 aa, Homo sapiens
  CDR3 for alpha chain variable domain of TCR clone 70460 (TRAV3, TRAJ13)
CAVTSYQQVTF

SEQ ID NO: 140920 - protein, 15 aa, Homo sapiens
  CDR3 for beta chain variable domain of TCR clone 70460 (TRBV7-9, TRBJ2-7)
CASSSSGLAVYEQYF

SEQ ID NO: 140921 - protein, 12 aa, Homo sapiens
  CDR3 for alpha chain variable domain of TCR clone 70461 (TRAV25, TRAJ20)
CAGRSNDYKLSF

SEQ ID NO: 140922 - protein, 13 aa, Homo sapiens
  CDR3 for beta chain variable domain of TCR clone 70461 (TRBV15, TRBJ1-6)
CATSGGLNSPLHF

SEQ ID NO: 140923 - protein, 14 aa, Homo sapiens
  CDR3 for alpha chain variable domain of TCR clone 70462 (TRAV26-1, TRAJ38)
CIADNAGNNRKLIW

SEQ ID NO: 140924 - protein, 14 aa, Homo sapiens
  CDR3 for beta chain variable domain of TCR clone 70462 (TRBV13, TRBJ2-5)
CASSLERVGETQYF

SEQ ID NO: 140925 - protein, 13 aa, Homo sapiens
  CDR3 for alpha chain variable domain of TCR clone 70463 (TRAV12-3, TRAJ47)
CAMKKEYGNKLVF

SEQ ID NO: 140926 - protein, 16 aa, Homo sapiens
  CDR3 for beta chain variable domain of TCR clone 70463 (TRBV3-1, TRBJ2-6)
CASSRTWVSGANVLTF

SEQ ID NO: 140927 - protein, 14 aa, Homo sapiens
  CDR3 for alpha chain variable domain of TCR clone 70464 (TRAV1-2, TRAJ8)
CAVRADTGFQKLVF

SEQ ID NO: 140928 - protein, 12 aa, Homo sapiens
  CDR3 for beta chain variable domain of TCR clone 70464 (TRBV29-1, TRBJ2-3)
CSVTGGADTQYF

SEQ ID NO: 140929 - protein, 15 aa, Homo sapiens
  CDR3 for alpha chain variable domain of TCR clone 70465 (TRAV12-1, TRAJ42)
CVVTRDGGSQGNLIF

SEQ ID NO: 140930 - protein, 14 aa, Homo sapiens
  CDR3 for beta chain variable domain of TCR clone 70465 (TRBV11-2, TRBJ2-3)
CASNLGGGANTQYF

SEQ ID NO: 140931 - protein, 14 aa, Homo sapiens
  CDR3 for alpha chain variable domain of TCR clone 70466 (TRAV17, TRAJ11)
CATDTSRGYRTLTF

SEQ ID NO: 140932 - protein, 13 aa, Homo sapiens
  CDR3 for beta chain variable domain of TCR clone 70466 (TRBV19, TRBJ2-5)
CASRDSRRETQYF

SEQ ID NO: 140933 - protein, 12 aa, Homo sapiens
  CDR3 for alpha chain variable domain of TCR clone 70467 (TRAV21, TRAJ39)
CSADNAGNMLTF

SEQ ID NO: 140934 - protein, 13 aa, Homo sapiens
  CDR3 for beta chain variable domain of TCR clone 70467 (TRBV12-4, TRBJ1-1)
CASSPGTGFEAFF

SEQ ID NO: 140935 - protein, 12 aa, Homo sapiens
  CDR3 for alpha chain variable domain of TCR clone 70468 (TRAV13-1, TRAJ53)
AASGGSHYKLTF

SEQ ID NO: 140936 - protein, 15 aa, Homo sapiens
  CDR3 for beta chain variable domain of TCR clone 70468 (TRBV5-1, TRBJ2-1)
CASSPPRAPYNEQFF

SEQ ID NO: 140937 - protein, 19 aa, Homo sapiens
  CDR3 for alpha chain variable domain of TCR clone 70469 (TRAV2, TRAJ20)
ILQVREADAAVYRDCKLSF

SEQ ID NO: 140938 - protein, 13 aa, Homo sapiens
  CDR3 for beta chain variable domain of TCR clone 70469 (TRBV15, TRBJ1-6)
CATSGGLNSPLHF

SEQ ID NO: 140939 - protein, 13 aa, Homo sapiens
  CDR3 for alpha chain variable domain of TCR clone 70470 (TRAV30, TRAJ24)
CGTVTDSWGKLQF

SEQ ID NO: 140940 - protein, 12 aa, Homo sapiens
  CDR3 for beta chain variable domain of TCR clone 70470 (TRBV11-2, TRBJ2-2)
CASSLPTGELFF

SEQ ID NO: 140941 - protein, 14 aa, Homo sapiens
  CDR3 for alpha chain variable domain of TCR clone 70471 (TRAV35, TRAJ33)
GAGSSQDSNYQLIW

SEQ ID NO: 140942 - protein, 15 aa, Homo sapiens
  CDR3 for beta chain variable domain of TCR clone 70471 (TRBV20-1, TRBJ2-7)
CSAESGTSGAYEQYF

SEQ ID NO: 140943 - protein, 15 aa, Homo sapiens
  CDR3 for alpha chain variable domain of TCR clone 70472 (TRAV3, TRAJ9)
CAVRARNTGGFKTTF

SEQ ID NO: 140944 - protein, 12 aa, Homo sapiens
  CDR3 for beta chain variable domain of TCR clone 70472 (TRBV11-2, TRBJ2-7)
CASSLPTYEQYF

SEQ ID NO: 140945 - protein, 13 aa, Homo sapiens
  CDR3 for alpha chain variable domain of TCR clone 70473 (TRAV21, TRAJ57)
CAVTQGGSEKLVF

SEQ ID NO: 140946 - protein, 15 aa, Homo sapiens
  CDR3 for beta chain variable domain of TCR clone 70473 (TRBV7-9, TRBJ1-5)
CASSQGHQPNQPQHF

SEQ ID NO: 140947 - protein, 14 aa, Homo sapiens
  CDR3 for alpha chain variable domain of TCR clone 70474 (TRAV12-1, TRAJ12)
CVGNGRDSSYKLIF

SEQ ID NO: 140948 - protein, 13 aa, Homo sapiens
  CDR3 for beta chain variable domain of TCR clone 70474 (TRBV28, TRBJ2-2)
CASIRESTGELFF

SEQ ID NO: 140949 - protein, 12 aa, Homo sapiens
  CDR3 for alpha chain variable domain of TCR clone 70475 (TRAV16, TRAJ10)
CSRTGGGNKLTF

SEQ ID NO: 140950 - protein, 13 aa, Homo sapiens
  CDR3 for beta chain variable domain of TCR clone 70475 (TRBV5-4, TRBJ1-1)
CASSSAGNTEAFF

SEQ ID NO: 140951 - protein, 16 aa, Homo sapiens
  CDR3 for alpha chain variable domain of TCR clone 70476 (TRAV12-2, TRAJ10)
CAVNRVLTGGGNKLTF

SEQ ID NO: 140952 - protein, 14 aa, Homo sapiens
  CDR3 for beta chain variable domain of TCR clone 70476 (TRBV9, TRBJ2-1)
CASSVALAVNEQLF

SEQ ID NO: 140953 - protein, 12 aa, Homo sapiens
  CDR3 for alpha chain variable domain of TCR clone 70477 (TRAV8-3, TRAJ20)
CAVGANDYKLSF

SEQ ID NO: 140954 - protein, 14 aa, Homo sapiens
  CDR3 for beta chain variable domain of TCR clone 70477 (TRBV7-2, TRBJ1-1)
CASSFLTGTTEAFF

SEQ ID NO: 140955 - protein, 13 aa, Homo sapiens
  CDR3 for alpha chain variable domain of TCR clone 70478 (TRAV12-2, TRAJ4)
CAVRSGGYTKLIF

SEQ ID NO: 140956 - protein, 15 aa, Homo sapiens
  CDR3 for beta chain variable domain of TCR clone 70478 (TRBV10-3, TRBJ2-1)
CAISDVQDRAYEQFF

SEQ ID NO: 140957 - protein, 16 aa, Homo sapiens
  CDR3 for alpha chain variable domain of TCR clone 70479 (TRAV26-1, TRAJ45)
CIVEKNSGGGADGLTF

SEQ ID NO: 140958 - protein, 15 aa, Homo sapiens
  CDR3 for beta chain variable domain of TCR clone 70479 (TRBV15, TRBJ2-7)
CHQQRPIQQAYEQYF

SEQ ID NO: 140959 - protein, 19 aa, Homo sapiens
  CDR3 for alpha chain variable domain of TCR clone 70480 (TRAV40, )
CLPIPDIQNPEPAVYQLRD

SEQ ID NO: 140960 - protein, 15 aa, Homo sapiens
  CDR3 for beta chain variable domain of TCR clone 70480 (TRBV2, TRBJ1-2)
CASSEIGGANYGYTF

SEQ ID NO: 140961 - protein, 13 aa, Homo sapiens
  CDR3 for alpha chain variable domain of TCR clone 70481 (TRAV12-1, TRAJ9)
CVVLNTGGFKTIF

SEQ ID NO: 140962 - protein, 13 aa, Homo sapiens
  CDR3 for beta chain variable domain of TCR clone 70481 (TRBV20-1, TRBJ1-1)
CSARGGGDTEAFF

SEQ ID NO: 140963 - protein, 15 aa, Homo sapiens
  CDR3 for alpha chain variable domain of TCR clone 70482 (TRAV35, TRAJ50)
CAGQLRKTYYDKVIF

SEQ ID NO: 140964 - protein, 12 aa, Homo sapiens
  CDR3 for beta chain variable domain of TCR clone 70482 (TRBV5-1, TRBJ2-5)
CASSLGLETQYF

SEQ ID NO: 140965 - protein, 12 aa, Homo sapiens
  CDR3 for alpha chain variable domain of TCR clone 70483 (TRAV25, TRAJ31)
CAGHLNNARLMF

SEQ ID NO: 140966 - protein, 13 aa, Homo sapiens
  CDR3 for beta chain variable domain of TCR clone 70483 (TRBV12-4, TRBJ1-1)
CASSPGTGFEAFF

SEQ ID NO: 140967 - protein, 15 aa, Homo sapiens
  CDR3 for alpha chain variable domain of TCR clone 70484 (TRAV2, TRAJ24)
CAVVRLKNSWGKWQF

SEQ ID NO: 140968 - protein, 16 aa, Homo sapiens
  CDR3 for beta chain variable domain of TCR clone 70484 (TRBV7-7, TRBJ2-3)
CASSPGTSGSTDTQYF

SEQ ID NO: 140969 - protein, 15 aa, Homo sapiens
  CDR3 for alpha chain variable domain of TCR clone 70485 (TRAV8-3, TRAJ11)
CAVGLLNSGYSTLTF

SEQ ID NO: 140970 - protein, 11 aa, Homo sapiens
  CDR3 for beta chain variable domain of TCR clone 70485 (TRBV19, TRBJ1-1)
CASSIGSEAFF

SEQ ID NO: 140971 - protein, 14 aa, Homo sapiens
  CDR3 for alpha chain variable domain of TCR clone 70486 (TRAV23/DV6, TRAJ11)
FAASLESGYSTLTF

SEQ ID NO: 140972 - protein, 13 aa, Homo sapiens
  CDR3 for beta chain variable domain of TCR clone 70486 (TRBV4-1, TRBJ2-5)
CASSLTRGETQYF

SEQ ID NO: 140973 - protein, 11 aa, Homo sapiens
  CDR3 for alpha chain variable domain of TCR clone 70487 (TRAV12-1, TRAJ34)
CVVNTGRELIF

SEQ ID NO: 140974 - protein, 12 aa, Homo sapiens
  CDR3 for beta chain variable domain of TCR clone 70487 (TRBV2, TRBJ2-1)
CAYGPPGNEQFF

SEQ ID NO: 140975 - protein, 18 aa, Homo sapiens
  CDR3 for alpha chain variable domain of TCR clone 70488 (TRAV21, TRAJ52)
CAVRPSPAGGTSYGKLTF

SEQ ID NO: 140976 - protein, 14 aa, Homo sapiens
  CDR3 for beta chain variable domain of TCR clone 70488 (TRBV4-1, TRBJ2-2)
CASSQAVNTGELFV

SEQ ID NO: 140977 - protein, 14 aa, Homo sapiens
  CDR3 for alpha chain variable domain of TCR clone 70489 (TRAV21, TRAJ45)
CAVSSGGGADGLTF

SEQ ID NO: 140978 - protein, 16 aa, Homo sapiens
  CDR3 for beta chain variable domain of TCR clone 70489 (TRBV12-5, TRBJ2-5)
CASGPRTSGNQETQYF

SEQ ID NO: 140979 - protein, 16 aa, Homo sapiens
  CDR3 for alpha chain variable domain of TCR clone 70490 (TRAV30, TRAJ24)
CGTEIVDADSWGKFQF

SEQ ID NO: 140980 - protein, 15 aa, Homo sapiens
  CDR3 for beta chain variable domain of TCR clone 70490 (TRBV6-1, TRBJ2-5)
CASSEGWGIQETQYF

SEQ ID NO: 140981 - protein, 12 aa, Homo sapiens
  CDR3 for alpha chain variable domain of TCR clone 70491 (TRAV26-1, TRAJ31)
CIVRNNNARPMF

SEQ ID NO: 140982 - protein, 15 aa, Homo sapiens
  CDR3 for beta chain variable domain of TCR clone 70491 (TRBV20-1, TRBJ2-4)
CSARDLTGGPNIQYF

SEQ ID NO: 140983 - protein, 14 aa, Homo sapiens
  CDR3 for alpha chain variable domain of TCR clone 70492 (TRAV12-2, TRAJ17)
CAVLFKAAGNKLTF

SEQ ID NO: 140984 - protein, 14 aa, Homo sapiens
  CDR3 for beta chain variable domain of TCR clone 70492 (TRBV7-2, TRBJ2-7)
CASRSQGAAYEQYL

SEQ ID NO: 140985 - protein, 13 aa, Homo sapiens
  CDR3 for alpha chain variable domain of TCR clone 70493 (TRAV12-2, TRAJ20)
CAVYPSNDYKLSF

SEQ ID NO: 140986 - protein, 15 aa, Homo sapiens
  CDR3 for beta chain variable domain of TCR clone 70493 (TRBV9, TRBJ1-6)
CASSVAGTGDSPLHF

SEQ ID NO: 140987 - protein, 23 aa, Homo sapiens
  CDR3 for alpha chain variable domain of TCR clone 70494 (TRAV12-2, TRAJ43)
SLLIRDSQPSDSAAYLCAFDMRF

SEQ ID NO: 140988 - protein, 18 aa, Homo sapiens
  CDR3 for beta chain variable domain of TCR clone 70494 (TRBV20-1, TRBJ2-3)
CSASGLAGGPGTTDTQYF

SEQ ID NO: 140989 - protein, 12 aa, Homo sapiens
  CDR3 for alpha chain variable domain of TCR clone 70495 (TRAV2, TRAJ9)
CAVGAGGFKTIF

SEQ ID NO: 140990 - protein, 16 aa, Homo sapiens
  CDR3 for beta chain variable domain of TCR clone 70495 (TRBV13, TRBJ2-2)
CACSPRTGEHTGELFF

SEQ ID NO: 140991 - protein, 11 aa, Homo sapiens
  CDR3 for alpha chain variable domain of TCR clone 70496 (TRAV21, TRAJ34)
CAVTNTDKLIF

SEQ ID NO: 140992 - protein, 20 aa, Homo sapiens
  CDR3 for beta chain variable domain of TCR clone 70496 (TRBV7-8, TRBJ2-2)
CASSHLFPGPTIHITGELFF

SEQ ID NO: 140993 - protein, 16 aa, Homo sapiens
  CDR3 for alpha chain variable domain of TCR clone 70497 (TRAV30, TRAJ24)
CGTEIVDADSWGKFQF

SEQ ID NO: 140994 - protein, 13 aa, Homo sapiens
  CDR3 for beta chain variable domain of TCR clone 70497 (TRBV20-1, TRBJ2-7)
CSARAGSPYEQYF

SEQ ID NO: 140995 - protein, 14 aa, Homo sapiens
  CDR3 for alpha chain variable domain of TCR clone 70498 (TRAV3, TRAJ34)
CAVRDINNTDKPIF

SEQ ID NO: 140996 - protein, 14 aa, Homo sapiens
  CDR3 for beta chain variable domain of TCR clone 70498 (TRBV7-2, TRBJ2-2)
CASSLGQNTGELFF

SEQ ID NO: 140997 - protein, 15 aa, Homo sapiens
  CDR3 for alpha chain variable domain of TCR clone 70499 (TRAV3, TRAJ22)
CAVRDRGGSARQLTF

SEQ ID NO: 140998 - protein, 14 aa, Homo sapiens
  CDR3 for beta chain variable domain of TCR clone 70499 (TRBV20-1, TRBJ2-5)
CSARVPGYQETQYF

SEQ ID NO: 140999 - protein, 11 aa, Homo sapiens
  CDR3 for alpha chain variable domain of TCR clone 70500 (TRAV12-2, TRAJ23)
CARGRGGKLIF

SEQ ID NO: 141000 - protein, 14 aa, Homo sapiens
  CDR3 for beta chain variable domain of TCR clone 70500 (TRBV28, TRBJ2-5)
CASSLGDRAETKYF

SEQ ID NO: 141001 - protein, 13 aa, Homo sapiens
  CDR3 for alpha chain variable domain of TCR clone 70501 (TRAV12-3, TRAJ47)
CAMKKEYGNKLVF

SEQ ID NO: 141002 - protein, 15 aa, Homo sapiens
  CDR3 for beta chain variable domain of TCR clone 70501 (TRBV20-1, TRBJ2-7)
CSARDRVSGMDKQYF

SEQ ID NO: 141003 - protein, 12 aa, Homo sapiens
  CDR3 for alpha chain variable domain of TCR clone 70502 (TRAV35, TRAJ49)
CAGWNTGNQFYF

SEQ ID NO: 141004 - protein, 13 aa, Homo sapiens
  CDR3 for beta chain variable domain of TCR clone 70502 (TRBV5-1, TRBJ1-2)
CASSLKQNYGYTF

SEQ ID NO: 141005 - protein, 20 aa, Homo sapiens
  CDR3 for alpha chain variable domain of TCR clone 70503 (TRAV1-2, TRAJ34)
LLKELQMKDSASPNTDKLIF

SEQ ID NO: 141006 - protein, 13 aa, Homo sapiens
  CDR3 for beta chain variable domain of TCR clone 70503 (TRBV7-9, TRBJ1-2)
CASSLKQNYGYTF

SEQ ID NO: 141007 - protein, 14 aa, Homo sapiens
  CDR3 for alpha chain variable domain of TCR clone 70504 (TRAV12-3, TRAJ47)
CAMRVREYGNKLVF

SEQ ID NO: 141008 - protein, 15 aa, Homo sapiens
  CDR3 for beta chain variable domain of TCR clone 70504 (TRBV20-1, TRBJ2-2)
CSARDTRLNTGELFF

SEQ ID NO: 141009 - protein, 14 aa, Homo sapiens
  CDR3 for alpha chain variable domain of TCR clone 70505 (TRAV12-2, TRAJ40)
CPVKIPSGTYKYIF

SEQ ID NO: 141010 - protein, 14 aa, Homo sapiens
  CDR3 for beta chain variable domain of TCR clone 70505 (TRBV20-1, TRBJ1-1)
CSAQTRIGGTEAFF

SEQ ID NO: 141011 - protein, 12 aa, Homo sapiens
  CDR3 for alpha chain variable domain of TCR clone 70506 (TRAV8-4, TRAJ37)
CAKSSNTGKLIF

SEQ ID NO: 141012 - protein, 15 aa, Homo sapiens
  CDR3 for beta chain variable domain of TCR clone 70506 (TRBV7-2, TRBJ2-1)
CASSLASGRVNEQFF

SEQ ID NO: 141013 - protein, 16 aa, Homo sapiens
  CDR3 for alpha chain variable domain of TCR clone 70507 (TRAV3, TRAJ21)
CAVRDIERGHFNKFYF

SEQ ID NO: 141014 - protein, 13 aa, Homo sapiens
  CDR3 for beta chain variable domain of TCR clone 70507 (TRBV27, TRBJ2-7)
CASSLTTGYEQYF

SEQ ID NO: 141015 - protein, 14 aa, Homo sapiens
  CDR3 for alpha chain variable domain of TCR clone 70508 (TRAV1-2, TRAJ8)
CAVREDTGFQKLVF

SEQ ID NO: 141016 - protein, 16 aa, Homo sapiens
  CDR3 for beta chain variable domain of TCR clone 70508 (TRBV29-1, TRBJ2-6)
CSVEDITYSGANDLTF

SEQ ID NO: 141017 - protein, 14 aa, Homo sapiens
  CDR3 for alpha chain variable domain of TCR clone 70509 (TRAV17, TRAJ35)
CATDRPGFGNVPHC

SEQ ID NO: 141018 - protein, 19 aa, Homo sapiens
  CDR3 for beta chain variable domain of TCR clone 70509 (TRBV11-3, TRBJ2-2)
CASSTRPGAKTTNTGELFF

SEQ ID NO: 141019 - protein, 15 aa, Homo sapiens
  CDR3 for alpha chain variable domain of TCR clone 70510 (TRAV17, TRAJ22)
CATAALLGSARRLTF

SEQ ID NO: 141020 - protein, 13 aa, Homo sapiens
  CDR3 for beta chain variable domain of TCR clone 70510 (TRBV29-1, TRBJ2-3)
CSVVPQGGDTQYF

SEQ ID NO: 141021 - protein, 16 aa, Homo sapiens
  CDR3 for alpha chain variable domain of TCR clone 70511 (TRAV1-2, TRAJ6)
CAVRDQGTGGSCIPTF

SEQ ID NO: 141022 - protein, 13 aa, Homo sapiens
  CDR3 for beta chain variable domain of TCR clone 70511 (TRBV28, TRBJ2-7)
CASTPGLAGEQYF

SEQ ID NO: 141023 - protein, 13 aa, Homo sapiens
  CDR3 for alpha chain variable domain of TCR clone 70512 (TRAV8-3, TRAJ43)
CAVGTDNNNDMRF

SEQ ID NO: 141024 - protein, 12 aa, Homo sapiens
  CDR3 for beta chain variable domain of TCR clone 70512 (TRBV7-2, TRBJ1-6)
CASSLSSSPLHF

SEQ ID NO: 141025 - protein, 11 aa, Homo sapiens
  CDR3 for alpha chain variable domain of TCR clone 70513 (TRAV27, TRAJ47)
SIVEYGNKLVL

SEQ ID NO: 141026 - protein, 18 aa, Homo sapiens
  CDR3 for beta chain variable domain of TCR clone 70513 (TRBV2, TRBJ2-1)
CASRGLAGGPRTYNEQFF

SEQ ID NO: 141027 - protein, 17 aa, Homo sapiens
  CDR3 for alpha chain variable domain of TCR clone 70514 (TRAV12-2, TRAJ52)
CAVNPYAGGTSSGKLTF

SEQ ID NO: 141028 - protein, 16 aa, Homo sapiens
  CDR3 for beta chain variable domain of TCR clone 70514 (TRBV5-5, TRBJ2-2)
CASSGRREGATGELFF

SEQ ID NO: 141029 - protein, 14 aa, Homo sapiens
  CDR3 for alpha chain variable domain of TCR clone 70515 (TRAV23/DV6, TRAJ27)
CAASGDGNAGKSTF

SEQ ID NO: 141030 - protein, 14 aa, Homo sapiens
  CDR3 for beta chain variable domain of TCR clone 70515 (TRBV25-1, TRBJ1-1)
CASTHLGGNTEAFF

SEQ ID NO: 141031 - protein, 14 aa, Homo sapiens
  CDR3 for alpha chain variable domain of TCR clone 70516 (TRAV4, TRAJ20)
CLVGDFINDYKLSF

SEQ ID NO: 141032 - protein, 15 aa, Homo sapiens
  CDR3 for beta chain variable domain of TCR clone 70516 (TRBV6-5, TRBJ1-1)
CASSYLGGSVPEAFF

SEQ ID NO: 141033 - protein, 18 aa, Homo sapiens
  CDR3 for alpha chain variable domain of TCR clone 70517 (TRAV26-1, TRAJ23)
CIVRVGLEVWNQGGKLIF

SEQ ID NO: 141034 - protein, 15 aa, Homo sapiens
  CDR3 for beta chain variable domain of TCR clone 70517 (TRBV5-7, TRBJ2-7)
CASSLGPGRGHEQYF

SEQ ID NO: 141035 - protein, 18 aa, Homo sapiens
  CDR3 for alpha chain variable domain of TCR clone 70518 (TRAV12-3, TRAJ52)
CAISRTNAGGTSYGKLTF

SEQ ID NO: 141036 - protein, 17 aa, Homo sapiens
  CDR3 for beta chain variable domain of TCR clone 70518 (TRBV7-3, TRBJ2-3)
CASSLMKRMRGADTQYF

SEQ ID NO: 141037 - protein, 12 aa, Homo sapiens
  CDR3 for alpha chain variable domain of TCR clone 70519 (TRAV17, TRAJ12)
CAKLRSSYKLIF

SEQ ID NO: 141038 - protein, 14 aa, Homo sapiens
  CDR3 for beta chain variable domain of TCR clone 70519 (TRBV19, TRBJ2-1)
CARGARSFQWEQFF

SEQ ID NO: 141039 - protein, 14 aa, Homo sapiens
  CDR3 for alpha chain variable domain of TCR clone 70520 (TRAV1-2, TRAJ6)
CAVSLSGGSYIPTF

SEQ ID NO: 141040 - protein, 15 aa, Homo sapiens
  CDR3 for beta chain variable domain of TCR clone 70520 (TRBV28, TRBJ2-7)
RASSPGGRGFYEQYF

SEQ ID NO: 141041 - protein, 15 aa, Homo sapiens
  CDR3 for alpha chain variable domain of TCR clone 70521 (TRAV38-2/DV8, TRAJ57)
CASARAQGGSEKLVF

SEQ ID NO: 141042 - protein, 16 aa, Homo sapiens
  CDR3 for beta chain variable domain of TCR clone 70521 (TRBV18, TRBJ1-5)
CQLTTMGQGTNQPQHF

SEQ ID NO: 141043 - protein, 15 aa, Homo sapiens
  CDR3 for alpha chain variable domain of TCR clone 70522 (TRAV17, TRAJ45)
CATAELGEGADGLTF

SEQ ID NO: 141044 - protein, 14 aa, Homo sapiens
  CDR3 for beta chain variable domain of TCR clone 70522 (TRBV3-1, TRBJ2-5)
CASSQAVRQETQYF

SEQ ID NO: 141045 - protein, 15 aa, Homo sapiens
  CDR3 for alpha chain variable domain of TCR clone 70523 (TRAV38-1, TRAJ37)
CAFIFGSGKTGKLIF

SEQ ID NO: 141046 - protein, 12 aa, Homo sapiens
  CDR3 for beta chain variable domain of TCR clone 70523 (TRBV7-9, TRBJ2-7)
CASSLEGYEQYF

SEQ ID NO: 141047 - protein, 11 aa, Homo sapiens
  CDR3 for alpha chain variable domain of TCR clone 70524 (TRAV13-1, TRAJ49)
CACVGGNQFYF

SEQ ID NO: 141048 - protein, 15 aa, Homo sapiens
  CDR3 for beta chain variable domain of TCR clone 70524 (TRBV2, TRBJ2-7)
CASSEGLARSYEQYF

SEQ ID NO: 141049 - protein, 15 aa, Homo sapiens
  CDR3 for alpha chain variable domain of TCR clone 70525 (TRAV17, TRAJ16)
CATALRFSDGQKLLF

SEQ ID NO: 141050 - protein, 14 aa, Homo sapiens
  CDR3 for beta chain variable domain of TCR clone 70525 (TRBV19, TRBJ2-1)
CASPTFVLSGEQFF

SEQ ID NO: 141051 - protein, 16 aa, Homo sapiens
  CDR3 for alpha chain variable domain of TCR clone 70526 (TRAV3, TRAJ3)
CAVRDRAKSSASKRIF

SEQ ID NO: 141052 - protein, 16 aa, Homo sapiens
  CDR3 for beta chain variable domain of TCR clone 70526 (TRBV20-1, TRBJ2-4)
CSATSLAELAKNIQYF

SEQ ID NO: 141053 - protein, 16 aa, Homo sapiens
  CDR3 for alpha chain variable domain of TCR clone 70527 (TRAV27, TRAJ53)
CAAPEGSGGSNYKLTF

SEQ ID NO: 141054 - protein, 14 aa, Homo sapiens
  CDR3 for beta chain variable domain of TCR clone 70527 (TRBV4-3, TRBJ1-5)
CARSQGGQGWPQHF

SEQ ID NO: 141055 - protein, 16 aa, Homo sapiens
  CDR3 for alpha chain variable domain of TCR clone 70528 (TRAV26-1, TRAJ47)
RIVRVVLSQYGNKLVF

SEQ ID NO: 141056 - protein, 16 aa, Homo sapiens
  CDR3 for beta chain variable domain of TCR clone 70528 (TRBV5-1, TRBJ2-1)
CASSFGVSGSYNEQFF

SEQ ID NO: 141057 - protein, 11 aa, Homo sapiens
  CDR3 for alpha chain variable domain of TCR clone 70529 (TRAV1-1, TRAJ23)
CAVRQGGKLIF

SEQ ID NO: 141058 - protein, 13 aa, Homo sapiens
  CDR3 for beta chain variable domain of TCR clone 70529 (TRBV15, TRBJ1-6)
CATSGGLNSPLHF

SEQ ID NO: 141059 - protein, 12 aa, Homo sapiens
  CDR3 for alpha chain variable domain of TCR clone 70530 (TRAV21, TRAJ11)
CAATSGYSTLIF

SEQ ID NO: 141060 - protein, 14 aa, Homo sapiens
  CDR3 for beta chain variable domain of TCR clone 70530 (TRBV20-1, TRBJ2-7)
CSAPELAGVGEQYF

SEQ ID NO: 141061 - protein, 12 aa, Homo sapiens
  CDR3 for alpha chain variable domain of TCR clone 70531 (TRAV35, TRAJ39)
LAPNNAGNMLTF

SEQ ID NO: 141062 - protein, 16 aa, Homo sapiens
  CDR3 for beta chain variable domain of TCR clone 70531 (TRBV2, TRBJ2-3)
CASSISVEGVTDTQYF

SEQ ID NO: 141063 - protein, 13 aa, Homo sapiens
  CDR3 for alpha chain variable domain of TCR clone 70532 (TRAV26-1, TRAJ12)
CIVRPDSSYKLIF

SEQ ID NO: 141064 - protein, 15 aa, Homo sapiens
  CDR3 for beta chain variable domain of TCR clone 70532 (TRBV28, TRBJ2-1)
CASSIIAGGRSEQFF

SEQ ID NO: 141065 - protein, 16 aa, Homo sapiens
  CDR3 for alpha chain variable domain of TCR clone 70533 (TRAV9-2, TRAJ37)
CAVRGKGSGNTGKLIF

SEQ ID NO: 141066 - protein, 20 aa, Homo sapiens
  CDR3 for beta chain variable domain of TCR clone 70533 (TRBV7-8, TRBJ2-2)
CASSHLFPGPTIHITGELFF

SEQ ID NO: 141067 - protein, 16 aa, Homo sapiens
  CDR3 for alpha chain variable domain of TCR clone 70534 (TRAV17, TRAJ28)
CASYAYSGAGSYQLTF

SEQ ID NO: 141068 - protein, 15 aa, Homo sapiens
  CDR3 for beta chain variable domain of TCR clone 70534 (TRBV4-2, TRBJ2-1)
CASSPCGGLYNEQFF

SEQ ID NO: 141069 - protein, 12 aa, Homo sapiens
  CDR3 for alpha chain variable domain of TCR clone 70535 (TRAV27, TRAJ37)
CADSGSTGKLIF

SEQ ID NO: 141070 - protein, 18 aa, Homo sapiens
  CDR3 for beta chain variable domain of TCR clone 70535 (TRBV7-9, TRBJ1-1)
CASSKPWGTMGMNTEAFF

SEQ ID NO: 141071 - protein, 13 aa, Homo sapiens
  CDR3 for alpha chain variable domain of TCR clone 70536 (TRAV12-1, TRAJ7)
RVVNMRGNNRLAF

SEQ ID NO: 141072 - protein, 15 aa, Homo sapiens
  CDR3 for beta chain variable domain of TCR clone 70536 (TRBV27, TRBJ2-3)
CASSLGLAATDTQYF

SEQ ID NO: 141073 - protein, 13 aa, Homo sapiens
  CDR3 for alpha chain variable domain of TCR clone 70537 (TRAV21, TRAJ27)
CAARPGNAGKSTF

SEQ ID NO: 141074 - protein, 13 aa, Homo sapiens
  CDR3 for beta chain variable domain of TCR clone 70537 (TRBV11-2, TRBJ2-7)
CASSGTRPYEQYL

SEQ ID NO: 141075 - protein, 12 aa, Homo sapiens
  CDR3 for alpha chain variable domain of TCR clone 70538 (TRAV8-3, TRAJ26)
CAGDNYGQNFVF

SEQ ID NO: 141076 - protein, 13 aa, Homo sapiens
  CDR3 for beta chain variable domain of TCR clone 70538 (TRBV7-3, TRBJ1-1)
CASSLTQGTEAFF

SEQ ID NO: 141077 - protein, 16 aa, Homo sapiens
  CDR3 for alpha chain variable domain of TCR clone 70539 (TRAV30, TRAJ24)
CGTEIVDADSWGKFQF

SEQ ID NO: 141078 - protein, 16 aa, Homo sapiens
  CDR3 for beta chain variable domain of TCR clone 70539 (TRBV3-1, TRBJ1-2)
CASSQGQGVQRDGYTF

SEQ ID NO: 141079 - protein, 15 aa, Homo sapiens
  CDR3 for alpha chain variable domain of TCR clone 70540 (TRAV26-1, TRAJ17)
CIVRVVKAAGNKLTF

SEQ ID NO: 141080 - protein, 16 aa, Homo sapiens
  CDR3 for beta chain variable domain of TCR clone 70540 (TRBV7-9, TRBJ2-1)
CASSLVSGPAYNEQFF

SEQ ID NO: 141081 - protein, 12 aa, Homo sapiens
  CDR3 for alpha chain variable domain of TCR clone 70541 (TRAV21, TRAJ11)
CAATSGYSTLTF

SEQ ID NO: 141082 - protein, 14 aa, Homo sapiens
  CDR3 for beta chain variable domain of TCR clone 70541 (TRBV6-1, TRBJ1-3)
CASVQGGGGNTIYF

SEQ ID NO: 141083 - protein, 18 aa, Homo sapiens
  CDR3 for alpha chain variable domain of TCR clone 70542 (TRAV12-3, TRAJ52)
CAMSVGGAGGTSYGKLTF

SEQ ID NO: 141084 - protein, 12 aa, Homo sapiens
  CDR3 for beta chain variable domain of TCR clone 70542 (TRBV11-2, TRBJ2-2)
CASSLPTGELFF

SEQ ID NO: 141085 - protein, 14 aa, Homo sapiens
  CDR3 for alpha chain variable domain of TCR clone 70543 (TRAV30, TRAJ26)
CGTEIVCYGQNFVF

SEQ ID NO: 141086 - protein, 13 aa, Homo sapiens
  CDR3 for beta chain variable domain of TCR clone 70543 (TRBV19, TRBJ1-3)
CASRLSLGNTIYF

SEQ ID NO: 141087 - protein, 13 aa, Homo sapiens
  CDR3 for alpha chain variable domain of TCR clone 70544 (TRAV27, TRAJ41)
CAGEGNSGYALNF

SEQ ID NO: 141088 - protein, 15 aa, Homo sapiens
  CDR3 for beta chain variable domain of TCR clone 70544 (TRBV2, TRBJ2-7)
CASSEGLARSYEQYF

SEQ ID NO: 141089 - protein, 22 aa, Homo sapiens
  CDR3 for alpha chain variable domain of TCR clone 70545 (TRAV8-2, TRAJ45)
HLTKPSAHMSDAAEYSADGLTF

SEQ ID NO: 141090 - protein, 13 aa, Homo sapiens
  CDR3 for beta chain variable domain of TCR clone 70545 (TRBV7-3, TRBJ2-1)
CAGSPVAYNEQFF

SEQ ID NO: 141091 - protein, 12 aa, Homo sapiens
  CDR3 for alpha chain variable domain of TCR clone 70546 (TRAV12-2, TRAJ31)
CAVNTPDASLMF

SEQ ID NO: 141092 - protein, 17 aa, Homo sapiens
  CDR3 for beta chain variable domain of TCR clone 70546 (TRBV20-1, TRBJ1-6)
CSARGGYTFSYNSPLHF

SEQ ID NO: 141093 - protein, 14 aa, Homo sapiens
  CDR3 for alpha chain variable domain of TCR clone 70547 (TRAV12-3, TRAJ10)
SHLPLTGGGNKLTF

SEQ ID NO: 141094 - protein, 13 aa, Homo sapiens
  CDR3 for beta chain variable domain of TCR clone 70547 (TRBV20-1, TRBJ1-6)
CSAPLGVGSHLHF

SEQ ID NO: 141095 - protein, 14 aa, Homo sapiens
  CDR3 for alpha chain variable domain of TCR clone 70548 (TRAV3, TRAJ33)
CAVRDMGSNYQLIW

SEQ ID NO: 141096 - protein, 17 aa, Homo sapiens
  CDR3 for beta chain variable domain of TCR clone 70548 (TRBV19, TRBJ2-1)
CASSIWSDQPTHNEQFF

SEQ ID NO: 141097 - protein, 14 aa, Homo sapiens
  CDR3 for alpha chain variable domain of TCR clone 70549 (TRAV3, TRAJ37)
CAVKESGNTGKLIF

SEQ ID NO: 141098 - protein, 14 aa, Homo sapiens
  CDR3 for beta chain variable domain of TCR clone 70549 (TRBV19, TRBJ2-1)
CASPTFVLSGEQFF

SEQ ID NO: 141099 - protein, 11 aa, Homo sapiens
  CDR3 for alpha chain variable domain of TCR clone 70550 (TRAV1-2, TRAJ31)
CAVNNKARLMF

SEQ ID NO: 141100 - protein, 15 aa, Homo sapiens
  CDR3 for beta chain variable domain of TCR clone 70550 (TRBV28, TRBJ2-1)
CASSIIAGGRSEQFF

SEQ ID NO: 141101 - protein, 14 aa, Homo sapiens
  CDR3 for alpha chain variable domain of TCR clone 70551 (TRAV12-1, TRAJ12)
CVVTGMDSSYKLIF

SEQ ID NO: 141102 - protein, 18 aa, Homo sapiens
  CDR3 for beta chain variable domain of TCR clone 70551 (TRBV20-1, TRBJ2-6)
CSAETTPTHGSGANVLTF

SEQ ID NO: 141103 - protein, 16 aa, Homo sapiens
  CDR3 for alpha chain variable domain of TCR clone 70552 (TRAV17, TRAJ35)
CATAEGGIGFGNVLHC

SEQ ID NO: 141104 - protein, 16 aa, Homo sapiens
  CDR3 for beta chain variable domain of TCR clone 70552 (TRBV6-5, TRBJ2-7)
WASSSDPTSGFYEQYF

SEQ ID NO: 141105 - protein, 14 aa, Homo sapiens
  CDR3 for alpha chain variable domain of TCR clone 70553 (TRAV38-1, TRAJ40)
CALRPTSGTYKYIF

SEQ ID NO: 141106 - protein, 13 aa, Homo sapiens
  CDR3 for beta chain variable domain of TCR clone 70553 (TRBV12-5, TRBJ2-3)
CASGDRQSDTQYF

SEQ ID NO: 141107 - protein, 13 aa, Homo sapiens
  CDR3 for alpha chain variable domain of TCR clone 70554 (TRAV8-3, TRAJ20)
CAVGRPNDYKLSF

SEQ ID NO: 141108 - protein, 14 aa, Homo sapiens
  CDR3 for beta chain variable domain of TCR clone 70554 (TRBV12-5, TRBJ2-5)
CASGSRTHQEAQYF

SEQ ID NO: 141109 - protein, 13 aa, Homo sapiens
  CDR3 for alpha chain variable domain of TCR clone 70555 (TRAV12-3, TRAJ33)
CAMSVNSNYQLIW

SEQ ID NO: 141110 - protein, 16 aa, Homo sapiens
  CDR3 for beta chain variable domain of TCR clone 70555 (TRBV13, TRBJ2-5)
CASSLRTGGSWETQCF

SEQ ID NO: 141111 - protein, 17 aa, Homo sapiens
  CDR3 for alpha chain variable domain of TCR clone 70556 (TRAV3, TRAJ12)
CAVRDGGRMDSSYKLIF

SEQ ID NO: 141112 - protein, 15 aa, Homo sapiens
  CDR3 for beta chain variable domain of TCR clone 70556 (TRBV5-5, TRBJ1-5)
CASSSTPGSNQPQHF

SEQ ID NO: 141113 - protein, 11 aa, Homo sapiens
  CDR3 for alpha chain variable domain of TCR clone 70557 (TRAV1-1, TRAJ23)
CAVRQGGKLIF

SEQ ID NO: 141114 - protein, 14 aa, Homo sapiens
  CDR3 for beta chain variable domain of TCR clone 70557 (TRBV7-9, TRBJ1-2)
CASSLGPPQWPATF

SEQ ID NO: 141115 - protein, 11 aa, Homo sapiens
  CDR3 for alpha chain variable domain of TCR clone 70558 (TRAV12-1, TRAJ43)
CVEYDNNDMRF

SEQ ID NO: 141116 - protein, 15 aa, Homo sapiens
  CDR3 for beta chain variable domain of TCR clone 70558 (TRBV18, TRBJ2-5)
CASSPRASEAENQYF

SEQ ID NO: 141117 - protein, 16 aa, Homo sapiens
  CDR3 for alpha chain variable domain of TCR clone 70559 (TRAV26-1, TRAJ37)
CIVRGDGSGNTGKLIF

SEQ ID NO: 141118 - protein, 14 aa, Homo sapiens
  CDR3 for beta chain variable domain of TCR clone 70559 (TRBV4-1, TRBJ2-2)
CASSQAVNTGELFF

SEQ ID NO: 141119 - protein, 14 aa, Homo sapiens
  CDR3 for alpha chain variable domain of TCR clone 70560 (TRAV12-1, TRAJ44)
CVVTHTGTASKLTF

SEQ ID NO: 141120 - protein, 14 aa, Homo sapiens
  CDR3 for beta chain variable domain of TCR clone 70560 (TRBV11-2, TRBJ2-7)
CASSSTGEGYEQYF

SEQ ID NO: 141121 - protein, 14 aa, Homo sapiens
  CDR3 for alpha chain variable domain of TCR clone 70561 (TRAV26-1, TRAJ34)
CIVRVAYNTDKLIL

SEQ ID NO: 141122 - protein, 16 aa, Homo sapiens
  CDR3 for beta chain variable domain of TCR clone 70561 (TRBV7-3, TRBJ2-2)
CASSLKRGTLSGELFF

SEQ ID NO: 141123 - protein, 14 aa, Homo sapiens
  CDR3 for alpha chain variable domain of TCR clone 70562 (TRAV1-2, TRAJ16)
CAVNRFSDGQKLPF

SEQ ID NO: 141124 - protein, 17 aa, Homo sapiens
  CDR3 for beta chain variable domain of TCR clone 70562 (TRBV20-1, TRBJ2-1)
CSASSSGLAGSYNEQFF

SEQ ID NO: 141125 - protein, 15 aa, Homo sapiens
  CDR3 for alpha chain variable domain of TCR clone 70563 (TRAV27, TRAJ38)
CAARRNAGNNRKLIW

SEQ ID NO: 141126 - protein, 16 aa, Homo sapiens
  CDR3 for beta chain variable domain of TCR clone 70563 (TRBV12-4, TRBJ1-5)
CASSRPVGGSNQPQHF

SEQ ID NO: 141127 - protein, 18 aa, Homo sapiens
  CDR3 for alpha chain variable domain of TCR clone 70564 (TRAV9-2, TRAJ52)
CALSRHNAGGTSYGKLTF

SEQ ID NO: 141128 - protein, 13 aa, Homo sapiens
  CDR3 for beta chain variable domain of TCR clone 70564 (TRBV7-9, TRBJ1-2)
CASSSKQNYGYTF

SEQ ID NO: 141129 - protein, 11 aa, Homo sapiens
  CDR3 for alpha chain variable domain of TCR clone 70565 (TRAV1-2, TRAJ31)
CAVNNNARLMF

SEQ ID NO: 141130 - protein, 14 aa, Homo sapiens
  CDR3 for beta chain variable domain of TCR clone 70565 (TRBV3-1, TRBJ2-5)
CASSQGPDQETQYF

SEQ ID NO: 141131 - protein, 17 aa, Homo sapiens
  CDR3 for alpha chain variable domain of TCR clone 70566 (TRAV3, TRAJ6)
CDVRDGPRAGGSYIPTF

SEQ ID NO: 141132 - protein, 15 aa, Homo sapiens
  CDR3 for beta chain variable domain of TCR clone 70566 (TRBV20-1, TRBJ2-7)
CSARDRVSGMDEQYF

SEQ ID NO: 141133 - protein, 12 aa, Homo sapiens
  CDR3 for alpha chain variable domain of TCR clone 70567 (TRAV35, TRAJ49)
CAGWNTGNQFDF

SEQ ID NO: 141134 - protein, 16 aa, Homo sapiens
  CDR3 for beta chain variable domain of TCR clone 70567 (TRBV5-1, TRBJ2-2)
CASSLWDTTNTGELFF

SEQ ID NO: 141135 - protein, 11 aa, Homo sapiens
  CDR3 for alpha chain variable domain of TCR clone 70568 (TRAV8-1, TRAJ8)
CAMTGIQKLVF

SEQ ID NO: 141136 - protein, 14 aa, Homo sapiens
  CDR3 for beta chain variable domain of TCR clone 70568 (TRBV5-4, TRBJ1-2)
CASTRQTGNYGYTF

SEQ ID NO: 141137 - protein, 14 aa, Homo sapiens
  CDR3 for alpha chain variable domain of TCR clone 70569 (TRAV8-4, TRAJ13)
CAVTLSGGYQKVTF

SEQ ID NO: 141138 - protein, 14 aa, Homo sapiens
  CDR3 for beta chain variable domain of TCR clone 70569 (TRBV7-2, TRBJ1-2)
CASSQTGSTYGYTC

SEQ ID NO: 141139 - protein, 16 aa, Homo sapiens
  CDR3 for alpha chain variable domain of TCR clone 70570 (TRAV16, TRAJ52)
CALSAAGGASYGKLTF

SEQ ID NO: 141140 - protein, 17 aa, Homo sapiens
  CDR3 for beta chain variable domain of TCR clone 70570 (TRBV11-2, TRBJ2-1)
CASSLYPPGVEYNEQFF

SEQ ID NO: 141141 - protein, 14 aa, Homo sapiens
  CDR3 for alpha chain variable domain of TCR clone 70571 (TRAV12-2, TRAJ40)
CAVKIPSGTYKYIL

SEQ ID NO: 141142 - protein, 14 aa, Homo sapiens
  CDR3 for beta chain variable domain of TCR clone 70571 (TRBV7-9, TRBJ1-2)
CASSRQGANYGYTF

SEQ ID NO: 141143 - protein, 15 aa, Homo sapiens
  CDR3 for alpha chain variable domain of TCR clone 70572 (TRAV25, TRAJ52)
CAGRPGGTSYGKLTF

SEQ ID NO: 141144 - protein, 17 aa, Homo sapiens
  CDR3 for beta chain variable domain of TCR clone 70572 (TRBV7-8, TRBJ2-6)
RASSAGTGGVGANVLTF

SEQ ID NO: 141145 - protein, 14 aa, Homo sapiens
  CDR3 for alpha chain variable domain of TCR clone 70573 (TRAV1-2, TRAJ16)
YAVNRFSDGQKLLF

SEQ ID NO: 141146 - protein, 13 aa, Homo sapiens
  CDR3 for beta chain variable domain of TCR clone 70573 (TRBV6-1, TRBJ1-1)
CASSRQGNTEAFF

SEQ ID NO: 141147 - protein, 14 aa, Homo sapiens
  CDR3 for alpha chain variable domain of TCR clone 70574 (TRAV3, TRAJ21)
CSVESQANFNKFYF

SEQ ID NO: 141148 - protein, 12 aa, Homo sapiens
  CDR3 for beta chain variable domain of TCR clone 70574 (TRBV6-3, TRBJ2-7)
CASSLTPYEQYF

SEQ ID NO: 141149 - protein, 11 aa, Homo sapiens
  CDR3 for alpha chain variable domain of TCR clone 70575 (TRAV21, TRAJ41)
CAVRSGDALNF

SEQ ID NO: 141150 - protein, 13 aa, Homo sapiens
  CDR3 for beta chain variable domain of TCR clone 70575 (TRBV7-9, TRBJ1-2)
CASSLKQNYGYTF

SEQ ID NO: 141151 - protein, 12 aa, Homo sapiens
  CDR3 for alpha chain variable domain of TCR clone 70576 (TRAV8-4, TRAJ57)
CAVKGGSEKLVF

SEQ ID NO: 141152 - protein, 15 aa, Homo sapiens
  CDR3 for beta chain variable domain of TCR clone 70576 (TRBV6-3, TRBJ2-7)
CASSSPGTVFYEQYF

SEQ ID NO: 141153 - protein, 14 aa, Homo sapiens
  CDR3 for alpha chain variable domain of TCR clone 70577 (TRAV1-2, TRAJ8)
CAVREDTGFQKLVF

SEQ ID NO: 141154 - protein, 16 aa, Homo sapiens
  CDR3 for beta chain variable domain of TCR clone 70577 (TRBV11-2, TRBJ1-1)
CASSLRQGGEHSKAFF

SEQ ID NO: 141155 - protein, 11 aa, Homo sapiens
  CDR3 for alpha chain variable domain of TCR clone 70578 (TRAV2, TRAJ13)
CASGGYQKVTF

SEQ ID NO: 141156 - protein, 17 aa, Homo sapiens
  CDR3 for beta chain variable domain of TCR clone 70578 (TRBV18, TRBJ2-2)
CASSQRSSGQGPGELFF

SEQ ID NO: 141157 - protein, 14 aa, Homo sapiens
  CDR3 for alpha chain variable domain of TCR clone 70579 (TRAV12-2, TRAJ13)
CAVKKTGGYQKVTF

SEQ ID NO: 141158 - protein, 18 aa, Homo sapiens
  CDR3 for beta chain variable domain of TCR clone 70579 (TRBV24-1, TRBJ2-2)
YATSDSGQGTANTGELFF

SEQ ID NO: 141159 - protein, 15 aa, Homo sapiens
  CDR3 for alpha chain variable domain of TCR clone 70580 (TRAV3, TRAJ22)
CAVRDRGGSARQLTF

SEQ ID NO: 141160 - protein, 14 aa, Homo sapiens
  CDR3 for beta chain variable domain of TCR clone 70580 (TRBV19, TRBJ1-5)
CASSLGLIGQHQHF

SEQ ID NO: 141161 - protein, 14 aa, Homo sapiens
  CDR3 for alpha chain variable domain of TCR clone 70581 (TRAV1-2, TRAJ16)
CAVNRFSDGQKLLF

SEQ ID NO: 141162 - protein, 17 aa, Homo sapiens
  CDR3 for beta chain variable domain of TCR clone 70581 (TRBV7-8, TRBJ2-6)
RASSAGTGGAGANVLTF

SEQ ID NO: 141163 - protein, 17 aa, Homo sapiens
  CDR3 for alpha chain variable domain of TCR clone 70582 (TRAV3, TRAJ12)
CAVRDGGRMDSSYKLIF

SEQ ID NO: 141164 - protein, 13 aa, Homo sapiens
  CDR3 for beta chain variable domain of TCR clone 70582 (TRBV15, TRBJ1-6)
CATSGGLNSPLHF

SEQ ID NO: 141165 - protein, 18 aa, Homo sapiens
  CDR3 for alpha chain variable domain of TCR clone 70583 (TRAV21, TRAJ52)
CAVRPSPAGGTSYGKLTF

SEQ ID NO: 141166 - protein, 15 aa, Homo sapiens
  CDR3 for beta chain variable domain of TCR clone 70583 (TRBV20-1, TRBJ1-5)
CSAKPPGQGPQPQHF

SEQ ID NO: 141167 - protein, 19 aa, Homo sapiens
  CDR3 for alpha chain variable domain of TCR clone 70584 (TRAV13-1, TRAJ52)
CAASPYQNAGGTRYGKLTF

SEQ ID NO: 141168 - protein, 14 aa, Homo sapiens
  CDR3 for beta chain variable domain of TCR clone 70584 (TRBV19, TRBJ2-7)
CASTVQGRPYEQYF

SEQ ID NO: 141169 - protein, 18 aa, Homo sapiens
  CDR3 for alpha chain variable domain of TCR clone 70585 (TRAV21, TRAJ52)
CAVRPSPAGGTSYGKLTF

SEQ ID NO: 141170 - protein, 16 aa, Homo sapiens
  CDR3 for beta chain variable domain of TCR clone 70585 (TRBV7-3, TRBJ2-1)
CASSLEGYHSYNEQFF

SEQ ID NO: 141171 - protein, 18 aa, Homo sapiens
  CDR3 for alpha chain variable domain of TCR clone 70586 (TRAV3, TRAJ17)
CAVGARRGGRSCRQQANF

SEQ ID NO: 141172 - protein, 14 aa, Homo sapiens
  CDR3 for beta chain variable domain of TCR clone 70586 (TRBV4-1, TRBJ2-2)
CASSQAVNTGELFF

SEQ ID NO: 141173 - protein, 17 aa, Homo sapiens
  CDR3 for alpha chain variable domain of TCR clone 70587 (TRAV13-1, TRAJ28)
CAASPPYSGAGSYQLTF

SEQ ID NO: 141174 - protein, 13 aa, Homo sapiens
  CDR3 for beta chain variable domain of TCR clone 70587 (TRBV7-3, TRBJ1-1)
CASSQDWGAEAFF

SEQ ID NO: 141175 - protein, 17 aa, Homo sapiens
  CDR3 for alpha chain variable domain of TCR clone 70588 (TRAV3, TRAJ6)
CAVRDGPRAGGSYIPTF

SEQ ID NO: 141176 - protein, 18 aa, Homo sapiens
  CDR3 for beta chain variable domain of TCR clone 70588 (TRBV7-9, TRBJ2-7)
CASSLTTSGSRTWYEQYL

SEQ ID NO: 141177 - protein, 14 aa, Homo sapiens
  CDR3 for alpha chain variable domain of TCR clone 70589 (TRAV3, TRAJ21)
CAVESQANFNKFYF

SEQ ID NO: 141178 - protein, 18 aa, Homo sapiens
  CDR3 for beta chain variable domain of TCR clone 70589 (TRBV7-9, TRBJ2-1)
CATSLAVSGTSGRNEQFF

SEQ ID NO: 141179 - protein, 13 aa, Homo sapiens
  CDR3 for alpha chain variable domain of TCR clone 70590 (TRAV12-2, TRAJ42)
CAVKRGSQGNLIF

SEQ ID NO: 141180 - protein, 14 aa, Homo sapiens
  CDR3 for beta chain variable domain of TCR clone 70590 (TRBV7-3, TRBJ1-1)
CASSLKGGNTEAFF

SEQ ID NO: 141181 - protein, 16 aa, Homo sapiens
  CDR3 for alpha chain variable domain of TCR clone 70591 (TRAV14/DV4, TRAJ12)
CAMREVLMDSSYKLIF

SEQ ID NO: 141182 - protein, 14 aa, Homo sapiens
  CDR3 for beta chain variable domain of TCR clone 70591 (TRBV5-4, TRBJ2-1)
CASSLDQGLNEQFF

SEQ ID NO: 141183 - protein, 13 aa, Homo sapiens
  CDR3 for alpha chain variable domain of TCR clone 70592 (TRAV16, TRAJ11)
CALSGPSHSTLTF

SEQ ID NO: 141184 - protein, 16 aa, Homo sapiens
  CDR3 for beta chain variable domain of TCR clone 70592 (TRBV10-3, TRBJ2-7)
CAISADFADRPYEQYF

SEQ ID NO: 141185 - protein, 14 aa, Homo sapiens
  CDR3 for alpha chain variable domain of TCR clone 70593 (TRAV38-1, TRAJ33)
CAFIKPYSNYQLIW

SEQ ID NO: 141186 - protein, 15 aa, Homo sapiens
  CDR3 for beta chain variable domain of TCR clone 70593 (TRBV7-6, TRBJ2-1)
CASSLGGQSHNEQFF

SEQ ID NO: 141187 - protein, 13 aa, Homo sapiens
  CDR3 for alpha chain variable domain of TCR clone 70594 (TRAV3, TRAJ21)
CAVGEPDFNKFYF

SEQ ID NO: 141188 - protein, 18 aa, Homo sapiens
  CDR3 for beta chain variable domain of TCR clone 70594 (TRBV20-1, TRBJ2-6)
CSAETTPTHGSGANVLTF

SEQ ID NO: 141189 - protein, 13 aa, Homo sapiens
  CDR3 for alpha chain variable domain of TCR clone 70595 (TRAV20, TRAJ21)
CAVEGYDFNKFYF

SEQ ID NO: 141190 - protein, 14 aa, Homo sapiens
  CDR3 for beta chain variable domain of TCR clone 70595 (TRBV3-1, TRBJ2-5)
CASSQGPDQETQYF

SEQ ID NO: 141191 - protein, 13 aa, Homo sapiens
  CDR3 for alpha chain variable domain of TCR clone 70596 (TRAV21, TRAJ20)
CAVGLRVDYKLSF

SEQ ID NO: 141192 - protein, 13 aa, Homo sapiens
  CDR3 for beta chain variable domain of TCR clone 70596 (TRBV6-1, TRBJ1-1)
CVSSRQGNTEAFF

SEQ ID NO: 141193 - protein, 13 aa, Homo sapiens
  CDR3 for alpha chain variable domain of TCR clone 70597 (TRAV21, TRAJ20)
CAVGLRVDYKLSF

SEQ ID NO: 141194 - protein, 12 aa, Homo sapiens
  CDR3 for beta chain variable domain of TCR clone 70597 (TRBV11-2, TRBJ2-1)
CASSPGNNEQFF

SEQ ID NO: 141195 - protein, 15 aa, Homo sapiens
  CDR3 for alpha chain variable domain of TCR clone 70598 (TRAV12-1, TRAJ9)
CVVSFGDTGGFKTIF

SEQ ID NO: 141196 - protein, 13 aa, Homo sapiens
  CDR3 for beta chain variable domain of TCR clone 70598 (TRBV2, TRBJ1-4)
CAGSERAGEKLFF

SEQ ID NO: 141197 - protein, 12 aa, Homo sapiens
  CDR3 for alpha chain variable domain of TCR clone 70599 (TRAV1-1, TRAJ39)
CAVPVVGNMLTF

SEQ ID NO: 141198 - protein, 20 aa, Homo sapiens
  CDR3 for beta chain variable domain of TCR clone 70599 (TRBV7-8, TRBJ2-2)
CASSHLFPGPTIHITGELFF

SEQ ID NO: 141199 - protein, 14 aa, Homo sapiens
  CDR3 for alpha chain variable domain of TCR clone 70600 (TRAV23/DV6, TRAJ40)
CAARKNSGTYKYIF

SEQ ID NO: 141200 - protein, 14 aa, Homo sapiens
  CDR3 for beta chain variable domain of TCR clone 70600 (TRBV19, TRBJ2-1)
CASPTFVLSGEQFF

SEQ ID NO: 141201 - protein, 12 aa, Homo sapiens
  CDR3 for alpha chain variable domain of TCR clone 70601 (TRAV2, TRAJ9)
CAVGAGGFKTIF

SEQ ID NO: 141202 - protein, 16 aa, Homo sapiens
  CDR3 for beta chain variable domain of TCR clone 70601 (TRBV13, TRBJ2-2)
CASSPRTGEHTGELIF

SEQ ID NO: 141203 - protein, 17 aa, Homo sapiens
  CDR3 for alpha chain variable domain of TCR clone 70602 (TRAV3, TRAJ42)
CAVRDRDYGGSQGNLIF

SEQ ID NO: 141204 - protein, 14 aa, Homo sapiens
  CDR3 for beta chain variable domain of TCR clone 70602 (TRBV7-2, TRBJ2-5)
CASSPRGSSETQCF

SEQ ID NO: 141205 - protein, 13 aa, Homo sapiens
  CDR3 for alpha chain variable domain of TCR clone 70603 (TRAV16, TRAJ31)
CALSAHNNASLMF

SEQ ID NO: 141206 - protein, 17 aa, Homo sapiens
  CDR3 for beta chain variable domain of TCR clone 70603 (TRBV12-4, TRBJ2-1)
CASSPGLAGGRINEQFF

SEQ ID NO: 141207 - protein, 11 aa, Homo sapiens
  CDR3 for alpha chain variable domain of TCR clone 70604 (TRAV23/DV6, TRAJ48)
RAPRWGEKLTF

SEQ ID NO: 141208 - protein, 13 aa, Homo sapiens
  CDR3 for beta chain variable domain of TCR clone 70604 (TRBV12-4, TRBJ2-5)
CASSPGTEETQYF

SEQ ID NO: 141209 - protein, 14 aa, Homo sapiens
  CDR3 for alpha chain variable domain of TCR clone 70605 (TRAV23/DV6, TRAJ4)
CAANLSGGYNKLIF

SEQ ID NO: 141210 - protein, 11 aa, Homo sapiens
  CDR3 for beta chain variable domain of TCR clone 70605 (TRBV7-9, TRBJ2-3)
CASSPIDTQYF

SEQ ID NO: 141211 - protein, 20 aa, Homo sapiens
  CDR3 for alpha chain variable domain of TCR clone 70606 (TRAV13-1, TRAJ9)
CASHTEASKLSLEQEQDYLL

SEQ ID NO: 141212 - protein, 13 aa, Homo sapiens
  CDR3 for beta chain variable domain of TCR clone 70606 (TRBV12-4, TRBJ1-2)
CASSSGSKDGYTF

SEQ ID NO: 141213 - protein, 15 aa, Homo sapiens
  CDR3 for alpha chain variable domain of TCR clone 70607 (TRAV8-3, TRAJ42)
CAGTNYGGSQGNLIF

SEQ ID NO: 141214 - protein, 14 aa, Homo sapiens
  CDR3 for beta chain variable domain of TCR clone 70607 (TRBV11-2, TRBJ1-2)
CASSLGTANYGYTF

SEQ ID NO: 141215 - protein, 16 aa, Homo sapiens
  CDR3 for alpha chain variable domain of TCR clone 70608 (TRAV12-3, TRAJ53)
CAMSVGSGGSNYKLTL

SEQ ID NO: 141216 - protein, 13 aa, Homo sapiens
  CDR3 for beta chain variable domain of TCR clone 70608 (TRBV7-6, TRBJ1-2)
CASSLVADYGYTF

SEQ ID NO: 141217 - protein, 14 aa, Homo sapiens
  CDR3 for alpha chain variable domain of TCR clone 70609 (TRAV25, TRAJ27)
CAGPGNTNAGKSTF

SEQ ID NO: 141218 - protein, 16 aa, Homo sapiens
  CDR3 for beta chain variable domain of TCR clone 70609 (TRBV4-1, TRBJ2-6)
CASSHDGGPGANVLTF

SEQ ID NO: 141219 - protein, 14 aa, Homo sapiens
  CDR3 for alpha chain variable domain of TCR clone 70610 (TRAV8-3, TRAJ9)
CAVVYNTRGFKTIF

SEQ ID NO: 141220 - protein, 14 aa, Homo sapiens
  CDR3 for beta chain variable domain of TCR clone 70610 (TRBV7-3, TRBJ2-2)
CASSSGGYTGELFF

SEQ ID NO: 141221 - protein, 10 aa, Homo sapiens
  CDR3 for alpha chain variable domain of TCR clone 70611 (TRAV23/DV6, TRAJ57)
CAASSTLSQG

SEQ ID NO: 141222 - protein, 17 aa, Homo sapiens
  CDR3 for beta chain variable domain of TCR clone 70611 (TRBV10-3, TRBJ2-6)
CAISESTAPSGANDLTF

SEQ ID NO: 141223 - protein, 12 aa, Homo sapiens
  CDR3 for alpha chain variable domain of TCR clone 70612 (TRAV12-1, TRAJ40)
CVVYSGTYKYIF

SEQ ID NO: 141224 - protein, 16 aa, Homo sapiens
  CDR3 for beta chain variable domain of TCR clone 70612 (TRBV7-9, TRBJ1-2)
CASSLGFSSGEDGYTF

SEQ ID NO: 141225 - protein, 11 aa, Homo sapiens
  CDR3 for alpha chain variable domain of TCR clone 70613 (TRAV1-2, TRAJ40)
CAVPGTYKYIF

SEQ ID NO: 141226 - protein, 15 aa, Homo sapiens
  CDR3 for beta chain variable domain of TCR clone 70613 (TRBV7-9, TRBJ1-6)
CASSSPGRGNSPLHF

SEQ ID NO: 141227 - protein, 17 aa, Homo sapiens
  CDR3 for alpha chain variable domain of TCR clone 70614 (TRAV4, TRAJ42)
CLVGVLNYGGSQGNLIF

SEQ ID NO: 141228 - protein, 13 aa, Homo sapiens
  CDR3 for beta chain variable domain of TCR clone 70614 (TRBV7-9, TRBJ1-2)
CASSLKQNYGYTF

SEQ ID NO: 141229 - protein, 15 aa, Homo sapiens
  CDR3 for alpha chain variable domain of TCR clone 70615 (TRAV3, TRAJ4)
CAVRDGTGGYNKLIF

SEQ ID NO: 141230 - protein, 15 aa, Homo sapiens
  CDR3 for beta chain variable domain of TCR clone 70615 (TRBV11-3, TRBJ2-3)
CASLKDGREGDTQYF

SEQ ID NO: 141231 - protein, 15 aa, Homo sapiens
  CDR3 for alpha chain variable domain of TCR clone 70616 (TRAV36/DV7, TRAJ53)
WEGENSGGSNYKLTF

SEQ ID NO: 141232 - protein, 12 aa, Homo sapiens
  CDR3 for beta chain variable domain of TCR clone 70616 (TRBV11-2, TRBJ2-5)
CASSLGQETQYF

SEQ ID NO: 141233 - protein, 14 aa, Homo sapiens
  CDR3 for alpha chain variable domain of TCR clone 70617 (TRAV1-2, TRAJ16)
CAVNRFSDGQKLLF

SEQ ID NO: 141234 - protein, 13 aa, Homo sapiens
  CDR3 for beta chain variable domain of TCR clone 70617 (TRBV20-1, TRBJ1-1)
CSARGGGNTEAFF

SEQ ID NO: 141235 - protein, 18 aa, Homo sapiens
  CDR3 for alpha chain variable domain of TCR clone 70618 (TRAV2, TRAJ20)
LQVREADAAVYRDCKLSF

SEQ ID NO: 141236 - protein, 18 aa, Homo sapiens
  CDR3 for beta chain variable domain of TCR clone 70618 (TRBV20-1, TRBJ2-3)
CSASGLAGGPGTTDTQYF

SEQ ID NO: 141237 - protein, 10 aa, Homo sapiens
  CDR3 for alpha chain variable domain of TCR clone 70619 (TRAV8-4, TRAJ43)
CAVSADDMRF

SEQ ID NO: 141238 - protein, 13 aa, Homo sapiens
  CDR3 for beta chain variable domain of TCR clone 70619 (TRBV12-4, TRBJ2-5)
CASSPGTEETKYF

SEQ ID NO: 141239 - protein, 16 aa, Homo sapiens
  CDR3 for alpha chain variable domain of TCR clone 70620 (TRAV27, TRAJ13)
CAGAKSDSGGYQKVTF

SEQ ID NO: 141240 - protein, 13 aa, Homo sapiens
  CDR3 for beta chain variable domain of TCR clone 70620 (TRBV12-4, TRBJ2-5)
CASRLAVQETQYF

SEQ ID NO: 141241 - protein, 14 aa, Homo sapiens
  CDR3 for alpha chain variable domain of TCR clone 70621 (TRAV21, TRAJ35)
CAVMPIGFGNVLHC

SEQ ID NO: 141242 - protein, 15 aa, Homo sapiens
  CDR3 for beta chain variable domain of TCR clone 70621 (TRBV7-9, TRBJ1-5)
CASSQGHQPNQPQHF

SEQ ID NO: 141243 - protein, 15 aa, Homo sapiens
  CDR3 for alpha chain variable domain of TCR clone 70622 (TRAV27, TRAJ38)
CAGRFNAGNNRKLIW

SEQ ID NO: 141244 - protein, 17 aa, Homo sapiens
  CDR3 for beta chain variable domain of TCR clone 70622 (TRBV25-1, TRBJ2-7)
CASSDARVVFSSYEQYF

SEQ ID NO: 141245 - protein, 14 aa, Homo sapiens
  CDR3 for alpha chain variable domain of TCR clone 70623 (TRAV12-3, TRAJ6)
CAMSATGGSYIPTF

SEQ ID NO: 141246 - protein, 16 aa, Homo sapiens
  CDR3 for beta chain variable domain of TCR clone 70623 (TRBV4-3, TRBJ2-1)
CASSPRAGQGANEQFF

SEQ ID NO: 141247 - protein, 14 aa, Homo sapiens
  CDR3 for alpha chain variable domain of TCR clone 70624 (TRAV1-1, TRAJ27)
CAVIYNTNAGKSTF

SEQ ID NO: 141248 - protein, 14 aa, Homo sapiens
  CDR3 for beta chain variable domain of TCR clone 70624 (TRBV18, TRBJ2-7)
CASSPRGGAYEQYF

SEQ ID NO: 141249 - protein, 15 aa, Homo sapiens
  CDR3 for alpha chain variable domain of TCR clone 70625 (TRAV3, TRAJ20)
CAVRDIKLSDYKLSF

SEQ ID NO: 141250 - protein, 14 aa, Homo sapiens
  CDR3 for beta chain variable domain of TCR clone 70625 (TRBV12-5, TRBJ2-5)
CASGSRTHQETQYF

SEQ ID NO: 141251 - protein, 12 aa, Homo sapiens
  CDR3 for alpha chain variable domain of TCR clone 70626 (TRAV3, TRAJ26)
WAVRDYGQNFVF

SEQ ID NO: 141252 - protein, 16 aa, Homo sapiens
  CDR3 for beta chain variable domain of TCR clone 70626 (TRBV11-2, TRBJ1-2)
CASSPSGREANYGYTF

SEQ ID NO: 141253 - protein, 13 aa, Homo sapiens
  CDR3 for alpha chain variable domain of TCR clone 70627 (TRAV13-1, TRAJ37)
CAARSGNTGKLIF

SEQ ID NO: 141254 - protein, 14 aa, Homo sapiens
  CDR3 for beta chain variable domain of TCR clone 70627 (TRBV12-4, TRBJ2-3)
CASSLGQGTDTRYF

SEQ ID NO: 141255 - protein, 12 aa, Homo sapiens
  CDR3 for alpha chain variable domain of TCR clone 70628 (TRAV8-3, TRAJ26)
CAGDNYGQNFVF

SEQ ID NO: 141256 - protein, 13 aa, Homo sapiens
  CDR3 for beta chain variable domain of TCR clone 70628 (TRBV7-2, TRBJ2-7)
CASSSPSGGEQYF

SEQ ID NO: 141257 - protein, 13 aa, Homo sapiens
  CDR3 for alpha chain variable domain of TCR clone 70629 (TRAV12-3, TRAJ9)
CAMRNTGGFKTIF

SEQ ID NO: 141258 - protein, 14 aa, Homo sapiens
  CDR3 for beta chain variable domain of TCR clone 70629 (TRBV11-2, TRBJ2-7)
CASSSTGKGYEQYF

SEQ ID NO: 141259 - protein, 12 aa, Homo sapiens
  CDR3 for alpha chain variable domain of TCR clone 70630 (TRAV16, TRAJ10)
CSRTGGGNKLTF

SEQ ID NO: 141260 - protein, 14 aa, Homo sapiens
  CDR3 for beta chain variable domain of TCR clone 70630 (TRBV7-2, TRBJ1-2)
RASSQTGSTYGYTF

SEQ ID NO: 141261 - protein, 13 aa, Homo sapiens
  CDR3 for alpha chain variable domain of TCR clone 70631 (TRAV27, TRAJ29)
CAGAHSGNPPLVF

SEQ ID NO: 141262 - protein, 14 aa, Homo sapiens
  CDR3 for beta chain variable domain of TCR clone 70631 (TRBV7-9, TRBJ2-7)
CASSIGQGAGEQYF

SEQ ID NO: 141263 - protein, 13 aa, Homo sapiens
  CDR3 for alpha chain variable domain of TCR clone 70632 (TRAV21, TRAJ3)
CCEPYSGASKIIF

SEQ ID NO: 141264 - protein, 15 aa, Homo sapiens
  CDR3 for beta chain variable domain of TCR clone 70632 (TRBV7-3, TRBJ2-1)
CASSPTGGGEVEQFF

SEQ ID NO: 141265 - protein, 12 aa, Homo sapiens
  CDR3 for alpha chain variable domain of TCR clone 70633 (TRAV8-3, TRAJ26)
CAGDNYGQNVVF

SEQ ID NO: 141266 - protein, 15 aa, Homo sapiens
  CDR3 for beta chain variable domain of TCR clone 70633 (TRBV9, TRBJ2-1)
CASSLAGSSYNEQFF

SEQ ID NO: 141267 - protein, 14 aa, Homo sapiens
  CDR3 for alpha chain variable domain of TCR clone 70634 (TRAV3, TRAJ21)
CALGRGSTNFTLDL

SEQ ID NO: 141268 - protein, 12 aa, Homo sapiens
  CDR3 for beta chain variable domain of TCR clone 70634 (TRBV7-9, TRBJ2-7)
CASRTGFDEQYF

SEQ ID NO: 141269 - protein, 14 aa, Homo sapiens
  CDR3 for alpha chain variable domain of TCR clone 70635 (TRAV25, TRAJ35)
CARRMEGFRNVLHC

SEQ ID NO: 141270 - protein, 13 aa, Homo sapiens
  CDR3 for beta chain variable domain of TCR clone 70635 (TRBV7-2, TRBJ1-4)
CASSLAGLEKLFF

SEQ ID NO: 141271 - protein, 13 aa, Homo sapiens
  CDR3 for alpha chain variable domain of TCR clone 70636 (TRAV2, TRAJ40)
CAVATSGTYKYIF

SEQ ID NO: 141272 - protein, 17 aa, Homo sapiens
  CDR3 for beta chain variable domain of TCR clone 70636 (TRBV11-2, TRBJ2-1)
CASSLYPPGVEYNEQFF

SEQ ID NO: 141273 - protein, 12 aa, Homo sapiens
  CDR3 for alpha chain variable domain of TCR clone 70637 (TRAV21, TRAJ29)
CAVTSGNTPLVF

SEQ ID NO: 141274 - protein, 13 aa, Homo sapiens
  CDR3 for beta chain variable domain of TCR clone 70637 (TRBV7-9, TRBJ1-2)
CASSLKQNYGYTF

SEQ ID NO: 141275 - protein, 14 aa, Homo sapiens
  CDR3 for alpha chain variable domain of TCR clone 70638 (TRAV26-1, TRAJ48)
CIVRVGFGNEKLPF

SEQ ID NO: 141276 - protein, 13 aa, Homo sapiens
  CDR3 for beta chain variable domain of TCR clone 70638 (TRBV11-3, TRBJ2-3)
CASSHDTKDTQYF

SEQ ID NO: 141277 - protein, 13 aa, Homo sapiens
  CDR3 for alpha chain variable domain of TCR clone 70639 (TRAV13-1, TRAJ21)
CAASKGSFNKFYF

SEQ ID NO: 141278 - protein, 16 aa, Homo sapiens
  CDR3 for beta chain variable domain of TCR clone 70639 (TRBV5-4, TRBJ2-3)
CASSWGTSGGTDTQYF

SEQ ID NO: 141279 - protein, 11 aa, Homo sapiens
  CDR3 for alpha chain variable domain of TCR clone 70640 (TRAV3, TRAJ17)
PRGAAGKKLTF

SEQ ID NO: 141280 - protein, 16 aa, Homo sapiens
  CDR3 for beta chain variable domain of TCR clone 70640 (TRBV7-6, TRBJ2-1)
CASSAPGPSSYNEQFF

SEQ ID NO: 141281 - protein, 14 aa, Homo sapiens
  CDR3 for alpha chain variable domain of TCR clone 70641 (TRAV1-2, TRAJ16)
CAVNRFSDGQKLLF

SEQ ID NO: 141282 - protein, 15 aa, Homo sapiens
  CDR3 for beta chain variable domain of TCR clone 70641 (TRBV7-9, TRBJ2-7)
CASSLDLDRGYEQYF

SEQ ID NO: 141283 - protein, 10 aa, Homo sapiens
  CDR3 for alpha chain variable domain of TCR clone 70642 (TRAV16, TRAJ22)
SAMYLRQLTF

SEQ ID NO: 141284 - protein, 15 aa, Homo sapiens
  CDR3 for beta chain variable domain of TCR clone 70642 (TRBV7-9, TRBJ1-6)
CASSTPGRGNSPLHF

SEQ ID NO: 141285 - protein, 13 aa, Homo sapiens
  CDR3 for alpha chain variable domain of TCR clone 70643 (TRAV27, TRAJ6)
CAGGTRGSYIPTF

SEQ ID NO: 141286 - protein, 14 aa, Homo sapiens
  CDR3 for beta chain variable domain of TCR clone 70643 (TRBV12-4, TRBJ1-1)
CASSLGTGGTEAFF

SEQ ID NO: 141287 - protein, 12 aa, Homo sapiens
  CDR3 for alpha chain variable domain of TCR clone 70644 (TRAV23/DV6, TRAJ31)
CAARRIGARLMF

SEQ ID NO: 141288 - protein, 16 aa, Homo sapiens
  CDR3 for beta chain variable domain of TCR clone 70644 (TRBV28, TRBJ2-7)
CASKAGGGYTSSTSGR

SEQ ID NO: 141289 - protein, 14 aa, Homo sapiens
  CDR3 for alpha chain variable domain of TCR clone 70645 (TRAV26-1, TRAJ38)
CIAANAGNNRKLIW

SEQ ID NO: 141290 - protein, 17 aa, Homo sapiens
  CDR3 for beta chain variable domain of TCR clone 70645 (TRBV15, TRBJ1-1)
CATSRVGGADGDTEAFF

SEQ ID NO: 141291 - protein, 14 aa, Homo sapiens
  CDR3 for alpha chain variable domain of TCR clone 70646 (TRAV26-1, TRAJ38)
CIADNAGNNRKLIW

SEQ ID NO: 141292 - protein, 15 aa, Homo sapiens
  CDR3 for beta chain variable domain of TCR clone 70646 (TRBV4-1, TRBJ1-1)
CARSQEWGHYTEAFF

SEQ ID NO: 141293 - protein, 14 aa, Homo sapiens
  CDR3 for alpha chain variable domain of TCR clone 70647 (TRAV13-1, TRAJ44)
CAAKATGTAIKLTF

SEQ ID NO: 141294 - protein, 17 aa, Homo sapiens
  CDR3 for beta chain variable domain of TCR clone 70647 (TRBV7-3, TRBJ2-3)
RASSLMKRMRGADTQYF

SEQ ID NO: 141295 - protein, 13 aa, Homo sapiens
  CDR3 for alpha chain variable domain of TCR clone 70648 (TRAV8-6, TRAJ13)
CAVSSGGYQKVTF

SEQ ID NO: 141296 - protein, 14 aa, Homo sapiens
  CDR3 for beta chain variable domain of TCR clone 70648 (TRBV6-1, TRBJ2-1)
CASAGGAIKNEQFF

SEQ ID NO: 141297 - protein, 16 aa, Homo sapiens
  CDR3 for alpha chain variable domain of TCR clone 70649 (TRAV38-1, TRAJ32)
CACMKGGGGATNKLIF

SEQ ID NO: 141298 - protein, 13 aa, Homo sapiens
  CDR3 for beta chain variable domain of TCR clone 70649 (TRBV20-1, TRBJ2-5)
CSAREAFQETQYF

SEQ ID NO: 141299 - protein, 11 aa, Homo sapiens
  CDR3 for alpha chain variable domain of TCR clone 70650 (TRAV2, TRAJ13)
CASGGYQKVTF

SEQ ID NO: 141300 - protein, 13 aa, Homo sapiens
  CDR3 for beta chain variable domain of TCR clone 70650 (TRBV3-1, TRBJ1-1)
CASSPGVITEAFF

SEQ ID NO: 141301 - protein, 15 aa, Homo sapiens
  CDR3 for alpha chain variable domain of TCR clone 70651 (TRAV2, TRAJ15)
CAVEDREQAGTAMIF

SEQ ID NO: 141302 - protein, 14 aa, Homo sapiens
  CDR3 for beta chain variable domain of TCR clone 70651 (TRBV11-2, TRBJ2-7)
CASSLGAGAYEQYF

SEQ ID NO: 141303 - protein, 15 aa, Homo sapiens
  CDR3 for alpha chain variable domain of TCR clone 70652 (TRAV27, TRAJ38)
CAARRNAGNNRKLIW

SEQ ID NO: 141304 - protein, 13 aa, Homo sapiens
  CDR3 for beta chain variable domain of TCR clone 70652 (TRBV10-3, TRBJ2-7)
CASKLAVNYEQYF

SEQ ID NO: 141305 - protein, 13 aa, Homo sapiens
  CDR3 for alpha chain variable domain of TCR clone 70653 (TRAV35, TRAJ48)
CAGHEFGNEKLTS

SEQ ID NO: 141306 - protein, 13 aa, Homo sapiens
  CDR3 for beta chain variable domain of TCR clone 70653 (TRBV7-2, TRBJ1-6)
CASSLVGSSPLHF

SEQ ID NO: 141307 - protein, 12 aa, Homo sapiens
  CDR3 for alpha chain variable domain of TCR clone 70654 (TRAV1-2, TRAJ33)
CAALDSNYQLIW

SEQ ID NO: 141308 - protein, 15 aa, Homo sapiens
  CDR3 for beta chain variable domain of TCR clone 70654 (TRBV6-1, TRBJ2-3)
CASSERGGITDTQYF

SEQ ID NO: 141309 - protein, 11 aa, Homo sapiens
  CDR3 for alpha chain variable domain of TCR clone 70655 (TRAV1-2, TRAJ20)
CAVANDYKLSF

SEQ ID NO: 141310 - protein, 12 aa, Homo sapiens
  CDR3 for beta chain variable domain of TCR clone 70655 (TRBV5-1, TRBJ2-5)
CASSLSWETQYF

SEQ ID NO: 141311 - protein, 14 aa, Homo sapiens
  CDR3 for alpha chain variable domain of TCR clone 70656 (TRAV1-2, TRAJ16)
CAVNRFSDGQKLLF

SEQ ID NO: 141312 - protein, 15 aa, Homo sapiens
  CDR3 for beta chain variable domain of TCR clone 70656 (TRBV2, TRBJ2-1)
CASSELAGSYNDQFF

SEQ ID NO: 141313 - protein, 14 aa, Homo sapiens
  CDR3 for alpha chain variable domain of TCR clone 70657 (TRAV1-2, TRAJ16)
CAVNRFSDGQKLLF

SEQ ID NO: 141314 - protein, 14 aa, Homo sapiens
  CDR3 for beta chain variable domain of TCR clone 70657 (TRBV20-1, TRBJ1-1)
CSAMGGTANTEAFF

SEQ ID NO: 141315 - protein, 14 aa, Homo sapiens
  CDR3 for alpha chain variable domain of TCR clone 70658 (TRAV12-3, TRAJ9)
CAMSQNTGGFKTIF

SEQ ID NO: 141316 - protein, 12 aa, Homo sapiens
  CDR3 for beta chain variable domain of TCR clone 70658 (TRBV19, TRBJ1-5)
CASSIAQQPQHF

SEQ ID NO: 141317 - protein, 11 aa, Homo sapiens
  CDR3 for alpha chain variable domain of TCR clone 70659 (TRAV21, TRAJ48)
CAVDGNEKLTF

SEQ ID NO: 141318 - protein, 16 aa, Homo sapiens
  CDR3 for beta chain variable domain of TCR clone 70659 (TRBV19, TRBJ2-1)
CASSSKGTRAYNEQFF

SEQ ID NO: 141319 - protein, 14 aa, Homo sapiens
  CDR3 for alpha chain variable domain of TCR clone 70660 (TRAV16, TRAJ33)
CALSAMDSNYQLIR

SEQ ID NO: 141320 - protein, 12 aa, Homo sapiens
  CDR3 for beta chain variable domain of TCR clone 70660 (TRBV5-1, TRBJ1-2)
CASSQGTYGYTF

SEQ ID NO: 141321 - protein, 15 aa, Homo sapiens
  CDR3 for alpha chain variable domain of TCR clone 70661 (TRAV21, TRAJ53)
CATLNSGGSNYKPTF

SEQ ID NO: 141322 - protein, 13 aa, Homo sapiens
  CDR3 for beta chain variable domain of TCR clone 70661 (TRBV4-1, TRBJ2-2)
CASSQENTGELFF

SEQ ID NO: 141323 - protein, 11 aa, Homo sapiens
  CDR3 for alpha chain variable domain of TCR clone 70662 (TRAV12-3, TRAJ43)
CAMSVSNDMRF

SEQ ID NO: 141324 - protein, 13 aa, Homo sapiens
  CDR3 for beta chain variable domain of TCR clone 70662 (TRBV7-3, TRBJ2-1)
CASSLDSYNEQFF

SEQ ID NO: 141325 - protein, 12 aa, Homo sapiens
  CDR3 for alpha chain variable domain of TCR clone 70663 (TRAV12-3, TRAJ17)
CAMTNTGNKLTF

SEQ ID NO: 141326 - protein, 15 aa, Homo sapiens
  CDR3 for beta chain variable domain of TCR clone 70663 (TRBV20-1, TRBJ2-7)
CSARDRVSGMDEQYF

SEQ ID NO: 141327 - protein, 12 aa, Homo sapiens
  CDR3 for alpha chain variable domain of TCR clone 70664 (TRAV25, TRAJ45)
DYSGGGADGLTF

SEQ ID NO: 141328 - protein, 19 aa, Homo sapiens
  CDR3 for beta chain variable domain of TCR clone 70664 (TRBV28, TRBJ2-7)
CASSYPGTSRLGWVYEQYF

SEQ ID NO: 141329 - protein, 17 aa, Homo sapiens
  CDR3 for alpha chain variable domain of TCR clone 70665 (TRAV26-1, TRAJ46)
IASSESEKKSSGDKLTF

SEQ ID NO: 141330 - protein, 15 aa, Homo sapiens
  CDR3 for beta chain variable domain of TCR clone 70665 (TRBV20-1, TRBJ2-7)
CSAGDRVSGMDEQYF

SEQ ID NO: 141331 - protein, 13 aa, Homo sapiens
  CDR3 for alpha chain variable domain of TCR clone 70666 (TRAV1-2, TRAJ9)
CAALNTGGFKTIF

SEQ ID NO: 141332 - protein, 14 aa, Homo sapiens
  CDR3 for beta chain variable domain of TCR clone 70666 (TRBV13, TRBJ2-3)
CASGSGSPTDTQYF

SEQ ID NO: 141333 - protein, 14 aa, Homo sapiens
  CDR3 for alpha chain variable domain of TCR clone 70667 (TRAV13-1, TRAJ40)
CAASMTSGTYKYIF

SEQ ID NO: 141334 - protein, 13 aa, Homo sapiens
  CDR3 for beta chain variable domain of TCR clone 70667 (TRBV29-1, TRBJ2-1)
CSVEGGRVNKQFF

SEQ ID NO: 141335 - protein, 15 aa, Homo sapiens
  CDR3 for alpha chain variable domain of TCR clone 70668 (TRAV35, TRAJ50)
CAGQLRKTSYDKVIF

SEQ ID NO: 141336 - protein, 12 aa, Homo sapiens
  CDR3 for beta chain variable domain of TCR clone 70668 (TRBV5-1, TRBJ2-5)
CASSLGSETQYF

SEQ ID NO: 141337 - protein, 16 aa, Homo sapiens
  CDR3 for alpha chain variable domain of TCR clone 70669 (TRAV12-3, TRAJ53)
CAMSPGSGGSNYKLTF

SEQ ID NO: 141338 - protein, 14 aa, Homo sapiens
  CDR3 for beta chain variable domain of TCR clone 70669 (TRBV19, TRBJ2-5)
CASSMTGQQETQYF

SEQ ID NO: 141339 - protein, 12 aa, Homo sapiens
  CDR3 for alpha chain variable domain of TCR clone 70670 (TRAV2, TRAJ33)
CAFMDSNYQLIW

SEQ ID NO: 141340 - protein, 16 aa, Homo sapiens
  CDR3 for beta chain variable domain of TCR clone 70670 (TRBV2, TRBJ2-7)
CASSDPWTGPSYEQYF

SEQ ID NO: 141341 - protein, 12 aa, Homo sapiens
  CDR3 for alpha chain variable domain of TCR clone 70671 (TRAV13-2, TRAJ42)
CAEGGSQGNLIF

SEQ ID NO: 141342 - protein, 14 aa, Homo sapiens
  CDR3 for beta chain variable domain of TCR clone 70671 (TRBV20-1, TRBJ2-1)
CSAQIGGSANEQFF

SEQ ID NO: 141343 - protein, 13 aa, Homo sapiens
  CDR3 for alpha chain variable domain of TCR clone 70672 (TRAV38-1, TRAJ42)
CARWGGSQGNLIF

SEQ ID NO: 141344 - protein, 13 aa, Homo sapiens
  CDR3 for beta chain variable domain of TCR clone 70672 (TRBV4-1, TRBJ2-1)
CASSQAGGDEQFF

SEQ ID NO: 141345 - protein, 14 aa, Homo sapiens
  CDR3 for alpha chain variable domain of TCR clone 70673 (TRAV8-3, TRAJ9)
CAMVYNTGGFKTIF

SEQ ID NO: 141346 - protein, 14 aa, Homo sapiens
  CDR3 for beta chain variable domain of TCR clone 70673 (TRBV7-3, TRBJ2-2)
CASSSGGYTGELFF

SEQ ID NO: 141347 - protein, 14 aa, Homo sapiens
  CDR3 for alpha chain variable domain of TCR clone 70674 (TRAV12-2, TRAJ17)
CAVNIKAAGNKLTL

SEQ ID NO: 141348 - protein, 13 aa, Homo sapiens
  CDR3 for beta chain variable domain of TCR clone 70674 (TRBV7-8, TRBJ2-7)
CASSLTGGREQYF

SEQ ID NO: 141349 - protein, 14 aa, Homo sapiens
  CDR3 for alpha chain variable domain of TCR clone 70675 (TRAV20, TRAJ42)
CAVQAGGSQGYLIF

SEQ ID NO: 141350 - protein, 14 aa, Homo sapiens
  CDR3 for beta chain variable domain of TCR clone 70675 (TRBV28, TRBJ1-2)
CASRIQGANYGYTF

SEQ ID NO: 141351 - protein, 10 aa, Homo sapiens
  CDR3 for alpha chain variable domain of TCR clone 70676 (TRAV12-3, TRAJ49)
CAMNDDQFYF

SEQ ID NO: 141352 - protein, 13 aa, Homo sapiens
  CDR3 for beta chain variable domain of TCR clone 70676 (TRBV7-3, TRBJ2-3)
CASSSWSTDTQYF

SEQ ID NO: 141353 - protein, 16 aa, Homo sapiens
  CDR3 for alpha chain variable domain of TCR clone 70677 (TRAV3, TRAJ37)
CAVRGKGSGNTGKLIF

SEQ ID NO: 141354 - protein, 14 aa, Homo sapiens
  CDR3 for beta chain variable domain of TCR clone 70677 (TRBV7-2, TRBJ2-7)
CASIPKTSFYEQYF

SEQ ID NO: 141355 - protein, 11 aa, Homo sapiens
  CDR3 for alpha chain variable domain of TCR clone 70678 (TRAV12-1, TRAJ37)
CVVNTPGKLIF

SEQ ID NO: 141356 - protein, 13 aa, Homo sapiens
  CDR3 for beta chain variable domain of TCR clone 70678 (TRBV12-4, TRBJ1-5)
CASSPDRAKPQHF

SEQ ID NO: 141357 - protein, 14 aa, Homo sapiens
  CDR3 for alpha chain variable domain of TCR clone 70679 (TRAV2, TRAJ9)
CAVEDRSGGFKTIF

SEQ ID NO: 141358 - protein, 15 aa, Homo sapiens
  CDR3 for beta chain variable domain of TCR clone 70679 (TRBV5-7, TRBJ1-5)
CASSHGKLWDQPQHF

SEQ ID NO: 141359 - protein, 16 aa, Homo sapiens
  CDR3 for alpha chain variable domain of TCR clone 70680 (TRAV3, TRAJ37)
CAVRGKGSGNTGKLIF

SEQ ID NO: 141360 - protein, 13 aa, Homo sapiens
  CDR3 for beta chain variable domain of TCR clone 70680 (TRBV14, TRBJ1-1)
CASSQAGNTEAFF

SEQ ID NO: 141361 - protein, 14 aa, Homo sapiens
  CDR3 for alpha chain variable domain of TCR clone 70681 (TRAV12-1, TRAJ17)
CVVRYKAAGNKLTF

SEQ ID NO: 141362 - protein, 17 aa, Homo sapiens
  CDR3 for beta chain variable domain of TCR clone 70681 (TRBV20-1, TRBJ2-1)
CSASSSGLAGSYNEQFF

SEQ ID NO: 141363 - protein, 14 aa, Homo sapiens
  CDR3 for alpha chain variable domain of TCR clone 70682 (TRAV17, TRAJ57)
CATDPQGGSEKLVF

SEQ ID NO: 141364 - protein, 14 aa, Homo sapiens
  CDR3 for beta chain variable domain of TCR clone 70682 (TRBV7-2, TRBJ2-7)
CASSLYPGRYEQYF

SEQ ID NO: 141365 - protein, 12 aa, Homo sapiens
  CDR3 for alpha chain variable domain of TCR clone 70683 (TRAV8-3, TRAJ26)
CAGDNYGQNFVF

SEQ ID NO: 141366 - protein, 16 aa, Homo sapiens
  CDR3 for beta chain variable domain of TCR clone 70683 (TRBV4-3, TRBJ2-1)
YASSPALDRGVNEQFF

SEQ ID NO: 141367 - protein, 16 aa, Homo sapiens
  CDR3 for alpha chain variable domain of TCR clone 70684 (TRAV30, TRAJ24)
CGTEIVDADSWGKFQF

SEQ ID NO: 141368 - protein, 14 aa, Homo sapiens
  CDR3 for beta chain variable domain of TCR clone 70684 (TRBV4-1, TRBJ2-7)
CASSPVAGGDEQYF

SEQ ID NO: 141369 - protein, 15 aa, Homo sapiens
  CDR3 for alpha chain variable domain of TCR clone 70685 (TRAV17, TRAJ35)
CATAFVIGFGNVLPC

SEQ ID NO: 141370 - protein, 15 aa, Homo sapiens
  CDR3 for beta chain variable domain of TCR clone 70685 (TRBV7-9, TRBJ2-7)
CASSLALAEAYEQYF

SEQ ID NO: 141371 - protein, 13 aa, Homo sapiens
  CDR3 for alpha chain variable domain of TCR clone 70686 (TRAV13-2, TRAJ30)
CAEKMNRDDKIIF

SEQ ID NO: 141372 - protein, 13 aa, Homo sapiens
  CDR3 for beta chain variable domain of TCR clone 70686 (TRBV7-9, TRBJ2-1)
CASSLDVGNEQFF

SEQ ID NO: 141373 - protein, 11 aa, Homo sapiens
  CDR3 for alpha chain variable domain of TCR clone 70687 (TRAV30, TRAJ23)
CGTGIAGKLIF

SEQ ID NO: 141374 - protein, 16 aa, Homo sapiens
  CDR3 for beta chain variable domain of TCR clone 70687 (TRBV7-2, TRBJ2-7)
CASTSQAASGGYEQYF

SEQ ID NO: 141375 - protein, 12 aa, Homo sapiens
  CDR3 for alpha chain variable domain of TCR clone 70688 (TRAV12-3, TRAJ41)
RAMSYSGYALNF

SEQ ID NO: 141376 - protein, 13 aa, Homo sapiens
  CDR3 for beta chain variable domain of TCR clone 70688 (TRBV7-3, TRBJ2-1)
CASSLDSYNEQFF

SEQ ID NO: 141377 - protein, 15 aa, Homo sapiens
  CDR3 for alpha chain variable domain of TCR clone 70689 (TRAV2, TRAJ9)
CAVEDRGIGGFKTIF

SEQ ID NO: 141378 - protein, 14 aa, Homo sapiens
  CDR3 for beta chain variable domain of TCR clone 70689 (TRBV12-5, TRBJ2-5)
CASGSRTHQETQYF

SEQ ID NO: 141379 - protein, 10 aa, Homo sapiens
  CDR3 for alpha chain variable domain of TCR clone 70690 (TRAV8-4, TRAJ12)
WRDSSYKLIF

SEQ ID NO: 141380 - protein, 16 aa, Homo sapiens
  CDR3 for beta chain variable domain of TCR clone 70690 (TRBV28, TRBJ2-7)
CASSLFFETGGPEQYF

SEQ ID NO: 141381 - protein, 18 aa, Homo sapiens
  CDR3 for alpha chain variable domain of TCR clone 70691 (TRAV13-1, TRAJ52)
CAAKNTNAGGTSYGKLTF

SEQ ID NO: 141382 - protein, 14 aa, Homo sapiens
  CDR3 for beta chain variable domain of TCR clone 70691 (TRBV7-2, TRBJ2-7)
CASRSQGAAYEQYF

SEQ ID NO: 141383 - protein, 11 aa, Homo sapiens
  CDR3 for alpha chain variable domain of TCR clone 70692 (TRAV12-3, TRAJ43)
CAMSVSNDMRF

SEQ ID NO: 141384 - protein, 13 aa, Homo sapiens
  CDR3 for beta chain variable domain of TCR clone 70692 (TRBV20-1, TRBJ1-1)
CSASLGGGTEAFF

SEQ ID NO: 141385 - protein, 13 aa, Homo sapiens
  CDR3 for alpha chain variable domain of TCR clone 70693 (TRAV27, TRAJ49)
CAPRTYTGNQFYF

SEQ ID NO: 141386 - protein, 18 aa, Homo sapiens
  CDR3 for beta chain variable domain of TCR clone 70693 (TRBV7-3, TRBJ2-5)
CASSLGGAAQGRWETQYF

SEQ ID NO: 141387 - protein, 15 aa, Homo sapiens
  CDR3 for alpha chain variable domain of TCR clone 70694 (TRAV13-1, TRAJ44)
CAASRNTGTASKLTF

SEQ ID NO: 141388 - protein, 15 aa, Homo sapiens
  CDR3 for beta chain variable domain of TCR clone 70694 (TRBV2, TRBJ2-7)
CASTLLGSGATEQYF

SEQ ID NO: 141389 - protein, 14 aa, Homo sapiens
  CDR3 for alpha chain variable domain of TCR clone 70695 (TRAV1-2, TRAJ16)
CAVNRFSDGQKLLF

SEQ ID NO: 141390 - protein, 17 aa, Homo sapiens
  CDR3 for beta chain variable domain of TCR clone 70695 (TRBV6-5, TRBJ2-3)
CASSYTTGTGRGDTQYF

SEQ ID NO: 141391 - protein, 12 aa, Homo sapiens
  CDR3 for alpha chain variable domain of TCR clone 70696 (TRAV2, TRAJ33)
CAFMDSNYQLTW

SEQ ID NO: 141392 - protein, 16 aa, Homo sapiens
  CDR3 for beta chain variable domain of TCR clone 70696 (TRBV2, TRBJ2-7)
CASSEPWTGPSYEQYF

SEQ ID NO: 141393 - protein, 13 aa, Homo sapiens
  CDR3 for alpha chain variable domain of TCR clone 70697 (TRAV27, TRAJ29)
CAGAHSGNTPLVF

SEQ ID NO: 141394 - protein, 14 aa, Homo sapiens
  CDR3 for beta chain variable domain of TCR clone 70697 (TRBV7-2, TRBJ2-7)
CASSPKTSFYEQYF

SEQ ID NO: 141395 - protein, 13 aa, Homo sapiens
  CDR3 for alpha chain variable domain of TCR clone 70698 (TRAV30, TRAJ34)
CGTVGYNNDKLIF

SEQ ID NO: 141396 - protein, 16 aa, Homo sapiens
  CDR3 for beta chain variable domain of TCR clone 70698 (TRBV7-9, TRBJ1-2)
CASSLGFSSGEDGYTF

SEQ ID NO: 141397 - protein, 15 aa, Homo sapiens
  CDR3 for alpha chain variable domain of TCR clone 70699 (TRAV29/DV5, TRAJ42)
CAAKTEGGSQGNLIF

SEQ ID NO: 141398 - protein, 12 aa, Homo sapiens
  CDR3 for beta chain variable domain of TCR clone 70699 (TRBV11-2, TRBJ2-1)
CASSPGNNEQFF

SEQ ID NO: 141399 - protein, 13 aa, Homo sapiens
  CDR3 for alpha chain variable domain of TCR clone 70700 (TRAV20, TRAJ31)
CAMQAWNNDRLMF

SEQ ID NO: 141400 - protein, 16 aa, Homo sapiens
  CDR3 for beta chain variable domain of TCR clone 70700 (TRBV6-6, TRBJ2-1)
CASSWGGQGPYNEQFF

SEQ ID NO: 141401 - protein, 18 aa, Homo sapiens
  CDR3 for alpha chain variable domain of TCR clone 70701 (TRAV21, TRAJ52)
CAVRPSPAGGTSYGKLTF

SEQ ID NO: 141402 - protein, 14 aa, Homo sapiens
  CDR3 for beta chain variable domain of TCR clone 70701 (TRBV7-2, TRBJ1-2)
CASSQTGSTYGYTF

SEQ ID NO: 141403 - protein, 14 aa, Homo sapiens
  CDR3 for alpha chain variable domain of TCR clone 70702 (TRAV12-1, TRAJ13)
CAVIDSGGHQKVTF

SEQ ID NO: 141404 - protein, 17 aa, Homo sapiens
  CDR3 for beta chain variable domain of TCR clone 70702 (TRBV15, TRBJ1-5)
CATSRAPPGTRNQPQHF

SEQ ID NO: 141405 - protein, 14 aa, Homo sapiens
  CDR3 for alpha chain variable domain of TCR clone 70703 (TRAV12-3, TRAJ13)
CAMRDSGGYQKVTF

SEQ ID NO: 141406 - protein, 14 aa, Homo sapiens
  CDR3 for beta chain variable domain of TCR clone 70703 (TRBV4-1, TRBJ1-6)
CASSPGSDSSPLHF

SEQ ID NO: 141407 - protein, 15 aa, Homo sapiens
  CDR3 for alpha chain variable domain of TCR clone 70704 (TRAV17, TRAJ23)
CATDAEVNQGGKLIF

SEQ ID NO: 141408 - protein, 12 aa, Homo sapiens
  CDR3 for beta chain variable domain of TCR clone 70704 (TRBV2, TRBJ2-1)
CAKREGYNEQFF

SEQ ID NO: 141409 - protein, 12 aa, Homo sapiens
  CDR3 for alpha chain variable domain of TCR clone 70705 (TRAV38-2/DV8, TRAJ48)
CALLSGNEKLTF

SEQ ID NO: 141410 - protein, 17 aa, Homo sapiens
  CDR3 for beta chain variable domain of TCR clone 70705 (TRBV15, TRBJ1-5)
CATSRAPPGTRNQPQHF

SEQ ID NO: 141411 - protein, 16 aa, Homo sapiens
  CDR3 for alpha chain variable domain of TCR clone 70706 (TRAV30, TRAJ24)
CGTEIVDADSWGKFQL

SEQ ID NO: 141412 - protein, 14 aa, Homo sapiens
  CDR3 for beta chain variable domain of TCR clone 70706 (TRBV12-5, TRBJ2-5)
CAGGSRTHQETQYF

SEQ ID NO: 141413 - protein, 16 aa, Homo sapiens
  CDR3 for alpha chain variable domain of TCR clone 70707 (TRAV16, TRAJ4)
CALSRMFSGGYNKLIL

SEQ ID NO: 141414 - protein, 16 aa, Homo sapiens
  CDR3 for beta chain variable domain of TCR clone 70707 (TRBV12-4, TRBJ1-5)
CASSRPVGGSNQPQHF

SEQ ID NO: 141415 - protein, 15 aa, Homo sapiens
  CDR3 for alpha chain variable domain of TCR clone 70708 (TRAV21, TRAJ52)
CAVRGGGTSHGKLTF

SEQ ID NO: 141416 - protein, 15 aa, Homo sapiens
  CDR3 for beta chain variable domain of TCR clone 70708 (TRBV18, TRBJ1-5)
CASSPSDRSNQPQHF

SEQ ID NO: 141417 - protein, 11 aa, Homo sapiens
  CDR3 for alpha chain variable domain of TCR clone 70709 (TRAV21, TRAJ34)
CAVTNTDKLIF

SEQ ID NO: 141418 - protein, 12 aa, Homo sapiens
  CDR3 for beta chain variable domain of TCR clone 70709 (TRBV24-1, TRBJ1-1)
CATLYPDTEAFF

SEQ ID NO: 141419 - protein, 12 aa, Homo sapiens
  CDR3 for alpha chain variable domain of TCR clone 70710 (TRAV8-3, TRAJ20)
CAVGANDYKLSF

SEQ ID NO: 141420 - protein, 14 aa, Homo sapiens
  CDR3 for beta chain variable domain of TCR clone 70710 (TRBV5-4, TRBJ1-1)
CASSLDSRRDEAFF

SEQ ID NO: 141421 - protein, 15 aa, Homo sapiens
  CDR3 for alpha chain variable domain of TCR clone 70711 (TRAV1-2, TRAJ32)
CAVRGYGGSTNKLIF

SEQ ID NO: 141422 - protein, 15 aa, Homo sapiens
  CDR3 for beta chain variable domain of TCR clone 70711 (TRBV25-1, TRBJ2-5)
CASSDTGTHQETQYF

SEQ ID NO: 141423 - protein, 14 aa, Homo sapiens
  CDR3 for alpha chain variable domain of TCR clone 70712 (TRAV1-2, TRAJ8)
CAVREDTGFQKLVF

SEQ ID NO: 141424 - protein, 16 aa, Homo sapiens
  CDR3 for beta chain variable domain of TCR clone 70712 (TRBV7-9, TRBJ2-1)
CASSDVAGGSYDEQFF

SEQ ID NO: 141425 - protein, 11 aa, Homo sapiens
  CDR3 for alpha chain variable domain of TCR clone 70713 (TRAV21, TRAJ34)
CAHYNTDKLIF

SEQ ID NO: 141426 - protein, 11 aa, Homo sapiens
  CDR3 for beta chain variable domain of TCR clone 70713 (TRBV29-1, TRBJ2-5)
CSEDRTGTQYF

SEQ ID NO: 141427 - protein, 13 aa, Homo sapiens
  CDR3 for alpha chain variable domain of TCR clone 70714 (TRAV12-3, TRAJ7)
CAMTPYGNNRLAC

SEQ ID NO: 141428 - protein, 16 aa, Homo sapiens
  CDR3 for beta chain variable domain of TCR clone 70714 (TRBV20-1, TRBJ1-4)
CSARPYGGELNEKLFF

SEQ ID NO: 141429 - protein, 14 aa, Homo sapiens
  CDR3 for alpha chain variable domain of TCR clone 70715 (TRAV12-2, TRAJ45)
CALPGRGGADGLTF

SEQ ID NO: 141430 - protein, 14 aa, Homo sapiens
  CDR3 for beta chain variable domain of TCR clone 70715 (TRBV18, TRBJ1-5)
CASSPGNSNQPQHF

SEQ ID NO: 141431 - protein, 14 aa, Homo sapiens
  CDR3 for alpha chain variable domain of TCR clone 70716 (TRAV1-2, TRAJ16)
CAVNRFSDGQKLLF

SEQ ID NO: 141432 - protein, 16 aa, Homo sapiens
  CDR3 for beta chain variable domain of TCR clone 70716 (TRBV10-3, TRBJ2-7)
CAISADFADRPYEQYF

SEQ ID NO: 141433 - protein, 16 aa, Homo sapiens
  CDR3 for alpha chain variable domain of TCR clone 70717 (TRAV3, TRAJ23)
CAVKIGMYNQGGKLIF

SEQ ID NO: 141434 - protein, 17 aa, Homo sapiens
  CDR3 for beta chain variable domain of TCR clone 70717 (TRBV10-3, TRBJ2-6)
CAISESTAPSGANVLTF

SEQ ID NO: 141435 - protein, 15 aa, Homo sapiens
  CDR3 for alpha chain variable domain of TCR clone 70718 (TRAV21, TRAJ38)
CAVRQDAGNNRKLIW

SEQ ID NO: 141436 - protein, 16 aa, Homo sapiens
  CDR3 for beta chain variable domain of TCR clone 70718 (TRBV4-2, TRBJ1-1)
CASGPLDGGGDTGAFF

SEQ ID NO: 141437 - protein, 15 aa, Homo sapiens
  CDR3 for alpha chain variable domain of TCR clone 70719 (TRAV26-2, TRAJ57)
CILRDIRGGSEKRVF

SEQ ID NO: 141438 - protein, 15 aa, Homo sapiens
  CDR3 for beta chain variable domain of TCR clone 70719 (TRBV2, TRBJ2-1)
CASDIGLAGEGEQFF

SEQ ID NO: 141439 - protein, 16 aa, Homo sapiens
  CDR3 for alpha chain variable domain of TCR clone 70720 (TRAV30, TRAJ24)
CGTEIVDADSWGKFQF

SEQ ID NO: 141440 - protein, 14 aa, Homo sapiens
  CDR3 for beta chain variable domain of TCR clone 70720 (TRBV7-2, TRBJ2-7)
CASSPKTSFYEQYL

SEQ ID NO: 141441 - protein, 15 aa, Homo sapiens
  CDR3 for alpha chain variable domain of TCR clone 70721 (TRAV27, TRAJ38)
CAARRNAGNNRKLIL

SEQ ID NO: 141442 - protein, 11 aa, Homo sapiens
  CDR3 for beta chain variable domain of TCR clone 70721 (TRBV12-4, TRBJ2-2)
CASSSAGELFF

SEQ ID NO: 141443 - protein, 15 aa, Homo sapiens
  CDR3 for alpha chain variable domain of TCR clone 70722 (TRAV35, TRAJ38)
CAGFSNAGNNRKLIW

SEQ ID NO: 141444 - protein, 18 aa, Homo sapiens
  CDR3 for beta chain variable domain of TCR clone 70722 (TRBV3-1, TRBJ1-2)
CASSQDVIGWNGDCGYTF

SEQ ID NO: 141445 - protein, 11 aa, Homo sapiens
  CDR3 for alpha chain variable domain of TCR clone 70723 (TRAV3, TRAJ32)
CSVREGIMVVL

SEQ ID NO: 141446 - protein, 13 aa, Homo sapiens
  CDR3 for beta chain variable domain of TCR clone 70723 (TRBV2, TRBJ1-1)
CASSEGGNTEAFF

SEQ ID NO: 141447 - protein, 14 aa, Homo sapiens
  CDR3 for alpha chain variable domain of TCR clone 70724 (TRAV12-1, TRAJ30)
CVVRGMNRDDKIIV

SEQ ID NO: 141448 - protein, 14 aa, Homo sapiens
  CDR3 for beta chain variable domain of TCR clone 70724 (TRBV7-2, TRBJ2-1)
CASSLTSGNRRQFF

SEQ ID NO: 141449 - protein, 15 aa, Homo sapiens
  CDR3 for alpha chain variable domain of TCR clone 70725 (TRAV26-1, TRAJ48)
CIVRVGEFGNEKLTF

SEQ ID NO: 141450 - protein, 16 aa, Homo sapiens
  CDR3 for beta chain variable domain of TCR clone 70725 (TRBV4-1, TRBJ2-3)
CASSQRAGGLTDTQYF

SEQ ID NO: 141451 - protein, 14 aa, Homo sapiens
  CDR3 for alpha chain variable domain of TCR clone 70726 (TRAV3, TRAJ17)
CAVRDAAAGNKLTF

SEQ ID NO: 141452 - protein, 14 aa, Homo sapiens
  CDR3 for beta chain variable domain of TCR clone 70726 (TRBV11-2, TRBJ2-5)
CASSRTGGIETQYF

SEQ ID NO: 141453 - protein, 16 aa, Homo sapiens
  CDR3 for alpha chain variable domain of TCR clone 70727 (TRAV12-2, TRAJ32)
CAVNLGQGGATNKLIF

SEQ ID NO: 141454 - protein, 15 aa, Homo sapiens
  CDR3 for beta chain variable domain of TCR clone 70727 (TRBV20-1, TRBJ2-7)
YSARGPLAGGREQYF

SEQ ID NO: 141455 - protein, 16 aa, Homo sapiens
  CDR3 for alpha chain variable domain of TCR clone 70728 (TRAV12-3, TRAJ53)
CAMSPGSGGSNYKLTF

SEQ ID NO: 141456 - protein, 17 aa, Homo sapiens
  CDR3 for beta chain variable domain of TCR clone 70728 (TRBV28, TRBJ2-5)
CASSTPEGDAIQETQYF

SEQ ID NO: 141457 - protein, 13 aa, Homo sapiens
  CDR3 for alpha chain variable domain of TCR clone 70729 (TRAV12-3, TRAJ33)
CAMSVNGNYQLIW

SEQ ID NO: 141458 - protein, 13 aa, Homo sapiens
  CDR3 for beta chain variable domain of TCR clone 70729 (TRBV7-2, TRBJ2-2)
CASSLAVTGELFF

SEQ ID NO: 141459 - protein, 12 aa, Homo sapiens
  CDR3 for alpha chain variable domain of TCR clone 70730 (TRAV27, TRAJ42)
CAGGGSQGNLIF

SEQ ID NO: 141460 - protein, 13 aa, Homo sapiens
  CDR3 for beta chain variable domain of TCR clone 70730 (TRBV19, TRBJ2-7)
SASSIRSSYEQYF

SEQ ID NO: 141461 - protein, 16 aa, Homo sapiens
  CDR3 for alpha chain variable domain of TCR clone 70731 (TRAV12-3, TRAJ10)
CAMKKGITGGGNKLNF

SEQ ID NO: 141462 - protein, 12 aa, Homo sapiens
  CDR3 for beta chain variable domain of TCR clone 70731 (TRBV20-1, TRBJ2-7)
CSAITPTKEQYF

SEQ ID NO: 141463 - protein, 15 aa, Homo sapiens
  CDR3 for alpha chain variable domain of TCR clone 70732 (TRAV8-1, TRAJ6)
CAVSTPPGGSYIPTF

SEQ ID NO: 141464 - protein, 14 aa, Homo sapiens
  CDR3 for beta chain variable domain of TCR clone 70732 (TRBV12-4, TRBJ2-1)
CASSLGQGASEQFF

SEQ ID NO: 141465 - protein, 13 aa, Homo sapiens
  CDR3 for alpha chain variable domain of TCR clone 70733 (TRAV22, TRAJ29)
CAVGGSGNTPLVF

SEQ ID NO: 141466 - protein, 15 aa, Homo sapiens
  CDR3 for beta chain variable domain of TCR clone 70733 (TRBV27, TRBJ2-1)
CASSNGGGSSNEQFF

SEQ ID NO: 141467 - protein, 14 aa, Homo sapiens
  CDR3 for alpha chain variable domain of TCR clone 70734 (TRAV13-1, TRAJ35)
CAASRGGFGNVLHC

SEQ ID NO: 141468 - protein, 13 aa, Homo sapiens
  CDR3 for beta chain variable domain of TCR clone 70734 (TRBV7-3, TRBJ1-1)
CASSQDWGAEAFF

SEQ ID NO: 141469 - protein, 14 aa, Homo sapiens
  CDR3 for alpha chain variable domain of TCR clone 70735 (TRAV1-2, TRAJ8)
CAVREDTGFQKLVF

SEQ ID NO: 141470 - protein, 18 aa, Homo sapiens
  CDR3 for beta chain variable domain of TCR clone 70735 (TRBV28, TRBJ1-4)
CASSPPYRGRSEKLFLAV

SEQ ID NO: 141471 - protein, 15 aa, Homo sapiens
  CDR3 for alpha chain variable domain of TCR clone 70736 (TRAV12-1, TRAJ44)
CVVFVNTGTASKLNF

SEQ ID NO: 141472 - protein, 17 aa, Homo sapiens
  CDR3 for beta chain variable domain of TCR clone 70736 (TRBV7-8, TRBJ2-6)
CASSAGTGGAGANVLTF

SEQ ID NO: 141473 - protein, 12 aa, Homo sapiens
  CDR3 for alpha chain variable domain of TCR clone 70737 (TRAV17, TRAJ39)
CATGAAGNMLIF

SEQ ID NO: 141474 - protein, 14 aa, Homo sapiens
  CDR3 for beta chain variable domain of TCR clone 70737 (TRBV7-9, TRBJ1-2)
CASSRQGANYGYTF

SEQ ID NO: 141475 - protein, 16 aa, Homo sapiens
  CDR3 for alpha chain variable domain of TCR clone 70738 (TRAV3, TRAJ3)
CAVRDRAKSSASRIIF

SEQ ID NO: 141476 - protein, 16 aa, Homo sapiens
  CDR3 for beta chain variable domain of TCR clone 70738 (TRBV20-1, TRBJ2-4)
CSATSLAELAKNIQYF

SEQ ID NO: 141477 - protein, 11 aa, Homo sapiens
  CDR3 for alpha chain variable domain of TCR clone 70739 (TRAV4, TRAJ31)
CPVGDNARLMF

SEQ ID NO: 141478 - protein, 16 aa, Homo sapiens
  CDR3 for beta chain variable domain of TCR clone 70739 (TRBV7-2, TRBJ2-5)
CASSSKWLSGQETQYF

SEQ ID NO: 141479 - protein, 15 aa, Homo sapiens
  CDR3 for alpha chain variable domain of TCR clone 70740 (TRAV25, TRAJ52)
CAGTSGGTSYGKLTF

SEQ ID NO: 141480 - protein, 16 aa, Homo sapiens
  CDR3 for beta chain variable domain of TCR clone 70740 (TRBV15, TRBJ1-2)
CATSRGHRTGGGGYTF

SEQ ID NO: 141481 - protein, 16 aa, Homo sapiens
  CDR3 for alpha chain variable domain of TCR clone 70741 (TRAV8-3, TRAJ13)
CAVGAYPSGGYQKVTF

SEQ ID NO: 141482 - protein, 15 aa, Homo sapiens
  CDR3 for beta chain variable domain of TCR clone 70741 (TRBV19, TRBJ1-5)
CDSSIVWADNQPQHF

SEQ ID NO: 141483 - protein, 13 aa, Homo sapiens
  CDR3 for alpha chain variable domain of TCR clone 70742 (TRAV21, TRAJ27)
CAARPGNAGKSTV

SEQ ID NO: 141484 - protein, 15 aa, Homo sapiens
  CDR3 for beta chain variable domain of TCR clone 70742 (TRBV11-3, TRBJ2-7)
CASSPGPASSYEQYF

SEQ ID NO: 141485 - protein, 16 aa, Homo sapiens
  CDR3 for alpha chain variable domain of TCR clone 70743 (TRAV3, TRAJ10)
CAVRDMRAGGGNKLTF

SEQ ID NO: 141486 - protein, 13 aa, Homo sapiens
  CDR3 for beta chain variable domain of TCR clone 70743 (TRBV7-9, TRBJ1-2)
CANSLKQNYGYTF

SEQ ID NO: 141487 - protein, 15 aa, Homo sapiens
  CDR3 for alpha chain variable domain of TCR clone 70744 (TRAV12-1, TRAJ44)
CVADLPTGTASRLTF

SEQ ID NO: 141488 - protein, 13 aa, Homo sapiens
  CDR3 for beta chain variable domain of TCR clone 70744 (TRBV20-1, TRBJ2-5)
CSARGDYQETQYF

SEQ ID NO: 141489 - protein, 14 aa, Homo sapiens
  CDR3 for alpha chain variable domain of TCR clone 70745 (TRAV12-1, TRAJ17)
CVVNYKAAGNKLTF

SEQ ID NO: 141490 - protein, 15 aa, Homo sapiens
  CDR3 for beta chain variable domain of TCR clone 70745 (TRBV20-1, TRBJ2-7)
CSARYRVSGMDEQYF

SEQ ID NO: 141491 - protein, 13 aa, Homo sapiens
  CDR3 for alpha chain variable domain of TCR clone 70746 (TRAV12-1, TRAJ26)
CVVRRNYGQNFVF

SEQ ID NO: 141492 - protein, 16 aa, Homo sapiens
  CDR3 for beta chain variable domain of TCR clone 70746 (TRBV12-4, TRBJ2-7)
CASRSTGTGPSYEQYF

SEQ ID NO: 141493 - protein, 16 aa, Homo sapiens
  CDR3 for alpha chain variable domain of TCR clone 70747 (TRAV16, TRAJ4)
CALSRMFSGGYNKLIF

SEQ ID NO: 141494 - protein, 14 aa, Homo sapiens
  CDR3 for beta chain variable domain of TCR clone 70747 (TRBV18, TRBJ2-7)
CASSPRGGAYEQYF

SEQ ID NO: 141495 - protein, 15 aa, Homo sapiens
  CDR3 for alpha chain variable domain of TCR clone 70748 (TRAV12-3, TRAJ6)
CAMSATTGGSYIPTF

SEQ ID NO: 141496 - protein, 16 aa, Homo sapiens
  CDR3 for beta chain variable domain of TCR clone 70748 (TRBV20-1, TRBJ1-2)
CSASMGQGVANYGNTF

SEQ ID NO: 141497 - protein, 16 aa, Homo sapiens
  CDR3 for alpha chain variable domain of TCR clone 70749 (TRAV12-3, TRAJ53)
CAMSTGSGGSNYKLTF

SEQ ID NO: 141498 - protein, 16 aa, Homo sapiens
  CDR3 for beta chain variable domain of TCR clone 70749 (TRBV4-2, TRBJ1-1)
CASSQAGFGMNTEAFF

SEQ ID NO: 141499 - protein, 14 aa, Homo sapiens
  CDR3 for alpha chain variable domain of TCR clone 70750 (TRAV12-3, TRAJ10)
SHLPLTGGGNKLTF

SEQ ID NO: 141500 - protein, 12 aa, Homo sapiens
  CDR3 for beta chain variable domain of TCR clone 70750 (TRBV7-8, TRBJ2-7)
CASSIGDREQYF

SEQ ID NO: 141501 - protein, 13 aa, Homo sapiens
  CDR3 for alpha chain variable domain of TCR clone 70751 (TRAV8-1, TRAJ30)
CAVIMNRDDKIIF

SEQ ID NO: 141502 - protein, 15 aa, Homo sapiens
  CDR3 for beta chain variable domain of TCR clone 70751 (TRBV6-3, TRBJ2-7)
CASSSPGTVFYEQYF

SEQ ID NO: 141503 - protein, 14 aa, Homo sapiens
  CDR3 for alpha chain variable domain of TCR clone 70752 (TRAV17, TRAJ16)
CATADFSGGQKLLF

SEQ ID NO: 141504 - protein, 12 aa, Homo sapiens
  CDR3 for beta chain variable domain of TCR clone 70752 (TRBV24-1, TRBJ1-1)
CATLYPDTEAFF

SEQ ID NO: 141505 - protein, 16 aa, Homo sapiens
  CDR3 for alpha chain variable domain of TCR clone 70753 (TRAV1-2, TRAJ10)
CALRGVLTGGGNKLTF

SEQ ID NO: 141506 - protein, 20 aa, Homo sapiens
  CDR3 for beta chain variable domain of TCR clone 70753 (TRBV7-8, TRBJ2-2)
CASSHLFPGPTIHITGELFF

SEQ ID NO: 141507 - protein, 12 aa, Homo sapiens
  CDR3 for alpha chain variable domain of TCR clone 70754 (TRAV20, TRAJ39)
CAVGNAGNMLTF

SEQ ID NO: 141508 - protein, 12 aa, Homo sapiens
  CDR3 for beta chain variable domain of TCR clone 70754 (TRBV11-2, TRBJ2-2)
CASSLGGGELFF

SEQ ID NO: 141509 - protein, 13 aa, Homo sapiens
  CDR3 for alpha chain variable domain of TCR clone 70755 (TRAV9-2, TRAJ53)
CALSGGSNYKLTF

SEQ ID NO: 141510 - protein, 15 aa, Homo sapiens
  CDR3 for beta chain variable domain of TCR clone 70755 (TRBV25-1, TRBJ1-4)
CASSPGDSTNEKLFF

SEQ ID NO: 141511 - protein, 13 aa, Homo sapiens
  CDR3 for alpha chain variable domain of TCR clone 70756 (TRAV23/DV6, TRAJ22)
CAPYSGSARQLTF

SEQ ID NO: 141512 - protein, 15 aa, Homo sapiens
  CDR3 for beta chain variable domain of TCR clone 70756 (TRBV11-2, TRBJ1-6)
CASSLGPWAVSPLHF

SEQ ID NO: 141513 - protein, 14 aa, Homo sapiens
  CDR3 for alpha chain variable domain of TCR clone 70757 (TRAV9-2, TRAJ39)
CALYIYNAGNMLTF

SEQ ID NO: 141514 - protein, 17 aa, Homo sapiens
  CDR3 for beta chain variable domain of TCR clone 70757 (TRBV11-2, TRBJ2-1)
CASSLYPPGVEYNGQFF

SEQ ID NO: 141515 - protein, 20 aa, Homo sapiens
  CDR3 for alpha chain variable domain of TCR clone 70758 (TRAV1-2, TRAJ8)
CAVREDTGLQKLVLELAPDF

SEQ ID NO: 141516 - protein, 14 aa, Homo sapiens
  CDR3 for beta chain variable domain of TCR clone 70758 (TRBV7-6, TRBJ2-3)
CASSLGTVTDTQYF

SEQ ID NO: 141517 - protein, 17 aa, Homo sapiens
  CDR3 for alpha chain variable domain of TCR clone 70759 (TRAV8-6, TRAJ8)
CAVKEGIENTGFKKLVF

SEQ ID NO: 141518 - protein, 12 aa, Homo sapiens
  CDR3 for beta chain variable domain of TCR clone 70759 (TRBV19, TRBJ1-4)
CASKDWPGGLFF

SEQ ID NO: 141519 - protein, 17 aa, Homo sapiens
  CDR3 for alpha chain variable domain of TCR clone 70760 (TRAV3, TRAJ38)
RAVRDCLNAGNNRKLIW

SEQ ID NO: 141520 - protein, 13 aa, Homo sapiens
  CDR3 for beta chain variable domain of TCR clone 70760 (TRBV23-1, TRBJ1-4)
CASRGKFNEKLFF

SEQ ID NO: 141521 - protein, 16 aa, Homo sapiens
  CDR3 for alpha chain variable domain of TCR clone 70761 (TRAV26-2, TRAJ52)
CIRGPAGGTSYGKLTF

SEQ ID NO: 141522 - protein, 14 aa, Homo sapiens
  CDR3 for beta chain variable domain of TCR clone 70761 (TRBV7-9, TRBJ1-1)
CASTPLQSYTEAFF

SEQ ID NO: 141523 - protein, 13 aa, Homo sapiens
  CDR3 for alpha chain variable domain of TCR clone 70762 (TRAV8-3, TRAJ44)
CAVVPGTASKLTF

SEQ ID NO: 141524 - protein, 11 aa, Homo sapiens
  CDR3 for beta chain variable domain of TCR clone 70762 (TRBV11-2, TRBJ2-2)
CASSLPGELFF

SEQ ID NO: 141525 - protein, 11 aa, Homo sapiens
  CDR3 for alpha chain variable domain of TCR clone 70763 (TRAV2, TRAJ13)
CASGGYQKVTF

SEQ ID NO: 141526 - protein, 12 aa, Homo sapiens
  CDR3 for beta chain variable domain of TCR clone 70763 (TRBV19, TRBJ1-4)
CASKDRPGGLFF

SEQ ID NO: 141527 - protein, 16 aa, Homo sapiens
  CDR3 for alpha chain variable domain of TCR clone 70764 (TRAV1-1, TRAJ29)
CAVRSTRNSGNTPLVF

SEQ ID NO: 141528 - protein, 13 aa, Homo sapiens
  CDR3 for beta chain variable domain of TCR clone 70764 (TRBV27, TRBJ1-1)
CASSLSIGAEAFF

SEQ ID NO: 141529 - protein, 13 aa, Homo sapiens
  CDR3 for alpha chain variable domain of TCR clone 70765 (TRAV6, TRAJ23)
CALDQNQGGKLIF

SEQ ID NO: 141530 - protein, 15 aa, Homo sapiens
  CDR3 for beta chain variable domain of TCR clone 70765 (TRBV28, TRBJ1-2)
CASSGSERRAFGYTF

SEQ ID NO: 141531 - protein, 13 aa, Homo sapiens
  CDR3 for alpha chain variable domain of TCR clone 70766 (TRAV27, TRAJ45)
CRSSGGGADGLTF

SEQ ID NO: 141532 - protein, 14 aa, Homo sapiens
  CDR3 for beta chain variable domain of TCR clone 70766 (TRBV4-2, TRBJ2-1)
CASGLDRAYNEQFF

SEQ ID NO: 141533 - protein, 16 aa, Homo sapiens
  CDR3 for alpha chain variable domain of TCR clone 70767 (TRAV16, TRAJ52)
CAISGVGGTSYGKLTF

SEQ ID NO: 141534 - protein, 14 aa, Homo sapiens
  CDR3 for beta chain variable domain of TCR clone 70767 (TRBV19, TRBJ1-2)
CASSLQGQAYGYTF

SEQ ID NO: 141535 - protein, 15 aa, Homo sapiens
  CDR3 for alpha chain variable domain of TCR clone 70768 (TRAV12-2, TRAJ52)
CAVTSGGTSYGKLTF

SEQ ID NO: 141536 - protein, 15 aa, Homo sapiens
  CDR3 for beta chain variable domain of TCR clone 70768 (TRBV7-2, TRBJ2-1)
YASSPGFISGNEQFF

SEQ ID NO: 141537 - protein, 14 aa, Homo sapiens
  CDR3 for alpha chain variable domain of TCR clone 70769 (TRAV26-1, TRAJ38)
CIADNAGNNRKLIW

SEQ ID NO: 141538 - protein, 18 aa, Homo sapiens
  CDR3 for beta chain variable domain of TCR clone 70769 (TRBV20-1, TRBJ2-3)
CSASGLAGGPGTTDTQYF

SEQ ID NO: 141539 - protein, 15 aa, Homo sapiens
  CDR3 for alpha chain variable domain of TCR clone 70770 (TRAV13-1, TRAJ3)
CAASKLASSASKIIF

SEQ ID NO: 141540 - protein, 16 aa, Homo sapiens
  CDR3 for beta chain variable domain of TCR clone 70770 (TRBV25-1, TRBJ1-5)
CASGAPTVNNNQPQHF

SEQ ID NO: 141541 - protein, 19 aa, Homo sapiens
  CDR3 for alpha chain variable domain of TCR clone 70771 (TRAV8-4, )
CAGGEDIQNPDPAVYQLRN

SEQ ID NO: 141542 - protein, 15 aa, Homo sapiens
  CDR3 for beta chain variable domain of TCR clone 70771 (TRBV7-2, TRBJ2-1)
CASRKTGSSYNEQFF

SEQ ID NO: 141543 - protein, 14 aa, Homo sapiens
  CDR3 for alpha chain variable domain of TCR clone 70772 (TRAV13-2, TRAJ17)
CTENSKAAGNKLTF

SEQ ID NO: 141544 - protein, 11 aa, Homo sapiens
  CDR3 for beta chain variable domain of TCR clone 70772 (TRBV6-3, TRBJ2-3)
CATGQADTQYF

SEQ ID NO: 141545 - protein, 15 aa, Homo sapiens
  CDR3 for alpha chain variable domain of TCR clone 70773 (TRAV12-1, TRAJ42)
CVVTRDGGSQGNLIF

SEQ ID NO: 141546 - protein, 14 aa, Homo sapiens
  CDR3 for beta chain variable domain of TCR clone 70773 (TRBV11-2, TRBJ2-3)
CASSLGGGAITQYF

SEQ ID NO: 141547 - protein, 14 aa, Homo sapiens
  CDR3 for alpha chain variable domain of TCR clone 70774 (TRAV26-2, TRAJ34)
CIVRVAYNTDKLIF

SEQ ID NO: 141548 - protein, 15 aa, Homo sapiens
  CDR3 for beta chain variable domain of TCR clone 70774 (TRBV20-1, TRBJ2-7)
CSARVPAAYFYEQYF

SEQ ID NO: 141549 - protein, 17 aa, Homo sapiens
  CDR3 for alpha chain variable domain of TCR clone 70775 (TRAV3, TRAJ12)
CAVRDGGRMDSSYKLIF

SEQ ID NO: 141550 - protein, 15 aa, Homo sapiens
  CDR3 for beta chain variable domain of TCR clone 70775 (TRBV27, TRBJ2-1)
CASSNGGGSSNEQFF

SEQ ID NO: 141551 - protein, 13 aa, Homo sapiens
  CDR3 for alpha chain variable domain of TCR clone 70776 (TRAV8-3, TRAJ43)
CAVGPDNNNDMRF

SEQ ID NO: 141552 - protein, 12 aa, Homo sapiens
  CDR3 for beta chain variable domain of TCR clone 70776 (TRBV7-2, TRBJ1-6)
RASSLSSSPLHF

SEQ ID NO: 141553 - protein, 14 aa, Homo sapiens
  CDR3 for alpha chain variable domain of TCR clone 70777 (TRAV12-1, TRAJ29)
CVVNEGSGNTPLVF

SEQ ID NO: 141554 - protein, 13 aa, Homo sapiens
  CDR3 for beta chain variable domain of TCR clone 70777 (TRBV7-9, TRBJ2-3)
CASGPGSTDTQYF

SEQ ID NO: 141555 - protein, 15 aa, Homo sapiens
  CDR3 for alpha chain variable domain of TCR clone 70778 (TRAV3, TRAJ22)
CAVRDRGGSARQLTL

SEQ ID NO: 141556 - protein, 13 aa, Homo sapiens
  CDR3 for beta chain variable domain of TCR clone 70778 (TRBV12-4, TRBJ1-2)
CASSLRQGKGYTF

SEQ ID NO: 141557 - protein, 13 aa, Homo sapiens
  CDR3 for alpha chain variable domain of TCR clone 70779 (TRAV30, TRAJ6)
CGFIEGGSYIPTF

SEQ ID NO: 141558 - protein, 16 aa, Homo sapiens
  CDR3 for beta chain variable domain of TCR clone 70779 (TRBV12-5, TRBJ2-5)
CASGPRTSGNQETQYF

SEQ ID NO: 141559 - protein, 15 aa, Homo sapiens
  CDR3 for alpha chain variable domain of TCR clone 70780 (TRAV26-1, TRAJ22)
CIVRVSFWFCKASDL

SEQ ID NO: 141560 - protein, 13 aa, Homo sapiens
  CDR3 for beta chain variable domain of TCR clone 70780 (TRBV7-9, TRBJ1-2)
CASSLKQNYGYTF

SEQ ID NO: 141561 - protein, 13 aa, Homo sapiens
  CDR3 for alpha chain variable domain of TCR clone 70781 (TRAV2, TRAJ15)
CAVAPQAGTALIF

SEQ ID NO: 141562 - protein, 15 aa, Homo sapiens
  CDR3 for beta chain variable domain of TCR clone 70781 (TRBV20-1, TRBJ2-7)
CSARDRVSGMDEQYF

SEQ ID NO: 141563 - protein, 12 aa, Homo sapiens
  CDR3 for alpha chain variable domain of TCR clone 70782 (TRAV12-2, TRAJ52)
IVGGTSYGKLTF

SEQ ID NO: 141564 - protein, 13 aa, Homo sapiens
  CDR3 for beta chain variable domain of TCR clone 70782 (TRBV15, TRBJ2-7)
CATSTTGHYEQYF

SEQ ID NO: 141565 - protein, 13 aa, Homo sapiens
  CDR3 for alpha chain variable domain of TCR clone 70783 (TRAV21, TRAJ57)
CAVTLGGSEKLVF

SEQ ID NO: 141566 - protein, 16 aa, Homo sapiens
  CDR3 for beta chain variable domain of TCR clone 70783 (TRBV29-1, TRBJ2-7)
CSVEDAEDGTAYEQYF

SEQ ID NO: 141567 - protein, 15 aa, Homo sapiens
  CDR3 for alpha chain variable domain of TCR clone 70784 (TRAV26-1, TRAJ40)
CIVRAVPSGTHKYIF

SEQ ID NO: 141568 - protein, 14 aa, Homo sapiens
  CDR3 for beta chain variable domain of TCR clone 70784 (TRBV19, TRBJ2-1)
CASKDPGLANEQFF

SEQ ID NO: 141569 - protein, 14 aa, Homo sapiens
  CDR3 for alpha chain variable domain of TCR clone 70785 (TRAV1-2, TRAJ16)
CAVNRFSDGQKLLF

SEQ ID NO: 141570 - protein, 14 aa, Homo sapiens
  CDR3 for beta chain variable domain of TCR clone 70785 (TRBV7-9, TRBJ2-3)
CASSLEDGADTQYF

SEQ ID NO: 141571 - protein, 12 aa, Homo sapiens
  CDR3 for alpha chain variable domain of TCR clone 70786 (TRAV13-2, TRAJ23)
CAERTRGGKLIF

SEQ ID NO: 141572 - protein, 16 aa, Homo sapiens
  CDR3 for beta chain variable domain of TCR clone 70786 (TRBV20-1, TRBJ1-4)
CSAPGQGLLTNEKLFF

SEQ ID NO: 141573 - protein, 15 aa, Homo sapiens
  CDR3 for alpha chain variable domain of TCR clone 70787 (TRAV13-1, TRAJ42)
CAASIAGGSQGNPIF

SEQ ID NO: 141574 - protein, 15 aa, Homo sapiens
  CDR3 for beta chain variable domain of TCR clone 70787 (TRBV19, TRBJ2-1)
CASSIVRGEGREQFF

SEQ ID NO: 141575 - protein, 16 aa, Homo sapiens
  CDR3 for alpha chain variable domain of TCR clone 70788 (TRAV20, TRAJ10)
FAVLRGLTGGGNKLTF

SEQ ID NO: 141576 - protein, 14 aa, Homo sapiens
  CDR3 for beta chain variable domain of TCR clone 70788 (TRBV19, TRBJ1-5)
CASRAPDSFLSQHF

SEQ ID NO: 141577 - protein, 14 aa, Homo sapiens
  CDR3 for alpha chain variable domain of TCR clone 70789 (TRAV9-2, TRAJ39)
CALYIYNAGNMLTF

SEQ ID NO: 141578 - protein, 13 aa, Homo sapiens
  CDR3 for beta chain variable domain of TCR clone 70789 (TRBV11-3, TRBJ1-1)
CASSRQPNTDAFF

SEQ ID NO: 141579 - protein, 13 aa, Homo sapiens
  CDR3 for alpha chain variable domain of TCR clone 70790 (TRAV2, TRAJ24)
CAVSTDSWGKLQF

SEQ ID NO: 141580 - protein, 14 aa, Homo sapiens
  CDR3 for beta chain variable domain of TCR clone 70790 (TRBV13, TRBJ2-5)
CASSLCTAQETQYF

SEQ ID NO: 141581 - protein, 12 aa, Homo sapiens
  CDR3 for alpha chain variable domain of TCR clone 70791 (TRAV1-1, TRAJ39)
CAVPVVGNMLTF

SEQ ID NO: 141582 - protein, 15 aa, Homo sapiens
  CDR3 for beta chain variable domain of TCR clone 70791 (TRBV19, TRBJ1-6)
CAISTQGAVGSPLHF

SEQ ID NO: 141583 - protein, 13 aa, Homo sapiens
  CDR3 for alpha chain variable domain of TCR clone 70792 (TRAV35, TRAJ42)
CAGFPGSQGNLIF

SEQ ID NO: 141584 - protein, 14 aa, Homo sapiens
  CDR3 for beta chain variable domain of TCR clone 70792 (TRBV18, TRBJ2-7)
CASSPRGGAYEQYF

SEQ ID NO: 141585 - protein, 10 aa, Homo sapiens
  CDR3 for alpha chain variable domain of TCR clone 70793 (TRAV23/DV6, TRAJ57)
CAASSTLSQG

SEQ ID NO: 141586 - protein, 13 aa, Homo sapiens
  CDR3 for beta chain variable domain of TCR clone 70793 (TRBV11-2, TRBJ2-7)
CASSGTRPYEQYF

SEQ ID NO: 141587 - protein, 13 aa, Homo sapiens
  CDR3 for alpha chain variable domain of TCR clone 70794 (TRAV13-1, TRAJ21)
CAASIYNFNKFYF

SEQ ID NO: 141588 - protein, 14 aa, Homo sapiens
  CDR3 for beta chain variable domain of TCR clone 70794 (TRBV5-4, TRBJ1-1)
CASSLDSRRDEAFF

SEQ ID NO: 141589 - protein, 11 aa, Homo sapiens
  CDR3 for alpha chain variable domain of TCR clone 70795 (TRAV3, TRAJ21)
CAVGNFNKFYF

SEQ ID NO: 141590 - protein, 12 aa, Homo sapiens
  CDR3 for beta chain variable domain of TCR clone 70795 (TRBV14, TRBJ2-5)
CASSQLKETQYF

SEQ ID NO: 141591 - protein, 14 aa, Homo sapiens
  CDR3 for alpha chain variable domain of TCR clone 70796 (TRAV4, TRAJ43)
CLVGPMYNNNDMRF

SEQ ID NO: 141592 - protein, 21 aa, Homo sapiens
  CDR3 for beta chain variable domain of TCR clone 70796 (TRBV11-1, TRBJ2-1)
CASSARERLRPEGPAYNEQFF

SEQ ID NO: 141593 - protein, 14 aa, Homo sapiens
  CDR3 for alpha chain variable domain of TCR clone 70797 (TRAV27, TRAJ50)
CAGGRKTSYDKVIF

SEQ ID NO: 141594 - protein, 15 aa, Homo sapiens
  CDR3 for beta chain variable domain of TCR clone 70797 (TRBV5-1, TRBJ2-7)
CASSLMTSGSNEQYF

SEQ ID NO: 141595 - protein, 20 aa, Homo sapiens
  CDR3 for alpha chain variable domain of TCR clone 70798 (TRAV12-1, TRAJ42)
SSVIQPPTSVKGGSQGNLIF

SEQ ID NO: 141596 - protein, 18 aa, Homo sapiens
  CDR3 for beta chain variable domain of TCR clone 70798 (TRBV11-2, TRBJ2-3)
CASSLGGASRWAPNTQYF

SEQ ID NO: 141597 - protein, 17 aa, Homo sapiens
  CDR3 for alpha chain variable domain of TCR clone 70799 (TRAV3, TRAJ42)
CAVRDRDYGGSQGNLIF

SEQ ID NO: 141598 - protein, 14 aa, Homo sapiens
  CDR3 for beta chain variable domain of TCR clone 70799 (TRBV4-1, TRBJ2-2)
YASSQAVNTGELFF

SEQ ID NO: 141599 - protein, 12 aa, Homo sapiens
  CDR3 for alpha chain variable domain of TCR clone 70800 (TRAV12-3, TRAJ40)
CAMSSGTYKYIF

SEQ ID NO: 141600 - protein, 15 aa, Homo sapiens
  CDR3 for beta chain variable domain of TCR clone 70800 (TRBV7-3, TRBJ2-2)
CASSETAQGTGELFF

SEQ ID NO: 141601 - protein, 15 aa, Homo sapiens
  CDR3 for alpha chain variable domain of TCR clone 70801 (TRAV17, TRAJ29)
CATDAFRKHTSCLWK

SEQ ID NO: 141602 - protein, 13 aa, Homo sapiens
  CDR3 for beta chain variable domain of TCR clone 70801 (TRBV5-7, TRBJ2-6)
CASTSSGANVLTF

SEQ ID NO: 141603 - protein, 12 aa, Homo sapiens
  CDR3 for alpha chain variable domain of TCR clone 70802 (TRAV12-3, TRAJ17)
CAMTLTGNKLTF

SEQ ID NO: 141604 - protein, 12 aa, Homo sapiens
  CDR3 for beta chain variable domain of TCR clone 70802 (TRBV19, TRBJ1-1)
CASSIGTEEAFF

SEQ ID NO: 141605 - protein, 12 aa, Homo sapiens
  CDR3 for alpha chain variable domain of TCR clone 70803 (TRAV8-3, TRAJ26)
CAGDNYGQNFFF

SEQ ID NO: 141606 - protein, 13 aa, Homo sapiens
  CDR3 for beta chain variable domain of TCR clone 70803 (TRBV10-3, TRBJ2-7)
CASKLAVNYEQYF

SEQ ID NO: 141607 - protein, 11 aa, Homo sapiens
  CDR3 for alpha chain variable domain of TCR clone 70804 (TRAV13-1, TRAJ6)
CANLGSYIPTF

SEQ ID NO: 141608 - protein, 12 aa, Homo sapiens
  CDR3 for beta chain variable domain of TCR clone 70804 (TRBV11-2, TRBJ2-1)
CASSPGNNEQFF

SEQ ID NO: 141609 - protein, 19 aa, Homo sapiens
  CDR3 for alpha chain variable domain of TCR clone 70805 (TRAV21, TRAJ45)
CAVEAPRGDQEEVLKDSPF

SEQ ID NO: 141610 - protein, 12 aa, Homo sapiens
  CDR3 for beta chain variable domain of TCR clone 70805 (TRBV29-1, TRBJ1-3)
CSTRDSGNTIYF

SEQ ID NO: 141611 - protein, 16 aa, Homo sapiens
  CDR3 for alpha chain variable domain of TCR clone 70806 (TRAV16, TRAJ4)
CALSRMFSGGYNKLIF

SEQ ID NO: 141612 - protein, 16 aa, Homo sapiens
  CDR3 for beta chain variable domain of TCR clone 70806 (TRBV24-1, TRBJ2-3)
CATSDPGTWATDTQYF

SEQ ID NO: 141613 - protein, 13 aa, Homo sapiens
  CDR3 for alpha chain variable domain of TCR clone 70807 (TRAV25, TRAJ26)
CAGMDNYGQNFVF

SEQ ID NO: 141614 - protein, 15 aa, Homo sapiens
  CDR3 for beta chain variable domain of TCR clone 70807 (TRBV10-3, TRBJ2-1)
CAIRNGTSGHNEQFL

SEQ ID NO: 141615 - protein, 14 aa, Homo sapiens
  CDR3 for alpha chain variable domain of TCR clone 70808 (TRAV13-1, TRAJ16)
CAAGQMARSCSLQG

SEQ ID NO: 141616 - protein, 20 aa, Homo sapiens
  CDR3 for beta chain variable domain of TCR clone 70808 (TRBV7-8, TRBJ2-2)
CASSHLFPGPTIHITGELFF

SEQ ID NO: 141617 - protein, 11 aa, Homo sapiens
  CDR3 for alpha chain variable domain of TCR clone 70809 (TRAV21, TRAJ34)
CAHYNTDKLIF

SEQ ID NO: 141618 - protein, 16 aa, Homo sapiens
  CDR3 for beta chain variable domain of TCR clone 70809 (TRBV10-2, TRBJ1-1)
CASSESGEGASTEAFF

SEQ ID NO: 141619 - protein, 11 aa, Homo sapiens
  CDR3 for alpha chain variable domain of TCR clone 70810 (TRAV21, TRAJ48)
CAVDGNEKLTF

SEQ ID NO: 141620 - protein, 13 aa, Homo sapiens
  CDR3 for beta chain variable domain of TCR clone 70810 (TRBV11-3, TRBJ1-1)
CASSLGGNTEAFF

SEQ ID NO: 141621 - protein, 11 aa, Homo sapiens
  CDR3 for alpha chain variable domain of TCR clone 70811 (TRAV27, TRAJ20)
CAGLNDYKLSL

SEQ ID NO: 141622 - protein, 14 aa, Homo sapiens
  CDR3 for beta chain variable domain of TCR clone 70811 (TRBV6-1, TRBJ1-1)
CASTPLQMNTEAFF

SEQ ID NO: 141623 - protein, 12 aa, Homo sapiens
  CDR3 for alpha chain variable domain of TCR clone 70812 (TRAV1-1, TRAJ43)
CAPRVSSNDMRF

SEQ ID NO: 141624 - protein, 15 aa, Homo sapiens
  CDR3 for beta chain variable domain of TCR clone 70812 (TRBV5-1, TRBJ2-7)
CANSLGDFTTYEQYF

SEQ ID NO: 141625 - protein, 15 aa, Homo sapiens
  CDR3 for alpha chain variable domain of TCR clone 70813 (TRAV12-2, TRAJ43)
CAFDMRFGAGTRLTV

SEQ ID NO: 141626 - protein, 18 aa, Homo sapiens
  CDR3 for beta chain variable domain of TCR clone 70813 (TRBV20-1, TRBJ2-3)
YSASGLAGGPGTTDTQYF

SEQ ID NO: 141627 - protein, 15 aa, Homo sapiens
  CDR3 for alpha chain variable domain of TCR clone 70814 (TRAV14/DV4, TRAJ12)
CAMREERDSSYKLIF

SEQ ID NO: 141628 - protein, 16 aa, Homo sapiens
  CDR3 for beta chain variable domain of TCR clone 70814 (TRBV11-2, TRBJ1-2)
CASSLDTGGADYGYAF

SEQ ID NO: 141629 - protein, 15 aa, Homo sapiens
  CDR3 for alpha chain variable domain of TCR clone 70815 (TRAV12-3, TRAJ6)
CAMSATSGGSYIPTF

SEQ ID NO: 141630 - protein, 11 aa, Homo sapiens
  CDR3 for beta chain variable domain of TCR clone 70815 (TRBV20-1, TRBJ1-5)
RSAQGDQPQHF

SEQ ID NO: 141631 - protein, 15 aa, Homo sapiens
  CDR3 for alpha chain variable domain of TCR clone 70816 (TRAV26-1, TRAJ52)
CIISDLGTSYGKLTF

SEQ ID NO: 141632 - protein, 15 aa, Homo sapiens
  CDR3 for beta chain variable domain of TCR clone 70816 (TRBV6-5, TRBJ2-7)
CASSASGRWSYEQYF

SEQ ID NO: 141633 - protein, 15 aa, Homo sapiens
  CDR3 for alpha chain variable domain of TCR clone 70817 (TRAV29/DV5, TRAJ42)
CAAKTDGGSQGNLTF

SEQ ID NO: 141634 - protein, 15 aa, Homo sapiens
  CDR3 for beta chain variable domain of TCR clone 70817 (TRBV5-1, TRBJ2-2)
CASSSQGGNTGELFF

SEQ ID NO: 141635 - protein, 14 aa, Homo sapiens
  CDR3 for alpha chain variable domain of TCR clone 70818 (TRAV26-1, TRAJ34)
CIVRVAYNTDKLIF

SEQ ID NO: 141636 - protein, 15 aa, Homo sapiens
  CDR3 for beta chain variable domain of TCR clone 70818 (TRBV7-3, TRBJ2-7)
CASSLTGQGKYEQYF

SEQ ID NO: 141637 - protein, 11 aa, Homo sapiens
  CDR3 for alpha chain variable domain of TCR clone 70819 (TRAV21, TRAJ11)
CAVNGYSTLTF

SEQ ID NO: 141638 - protein, 11 aa, Homo sapiens
  CDR3 for beta chain variable domain of TCR clone 70819 (TRBV19, TRBJ1-1)
CSSSIGSEAFF

SEQ ID NO: 141639 - protein, 14 aa, Homo sapiens
  CDR3 for alpha chain variable domain of TCR clone 70820 (TRAV17, TRAJ6)
CATDASGGSYIPTF

SEQ ID NO: 141640 - protein, 19 aa, Homo sapiens
  CDR3 for beta chain variable domain of TCR clone 70820 (TRBV4-3, TRBJ2-7)
CASSQEFIGWQVTPYEQYV

SEQ ID NO: 141641 - protein, 15 aa, Homo sapiens
  CDR3 for alpha chain variable domain of TCR clone 70821 (TRAV8-3, TRAJ40)
CAAPSLDSGTYRYIF

SEQ ID NO: 141642 - protein, 16 aa, Homo sapiens
  CDR3 for beta chain variable domain of TCR clone 70821 (TRBV7-3, TRBJ2-3)
CASSLSGYRPEGTQYF

SEQ ID NO: 141643 - protein, 15 aa, Homo sapiens
  CDR3 for alpha chain variable domain of TCR clone 70822 (TRAV12-2, TRAJ53)
CAVNGGGGSDYKLTF

SEQ ID NO: 141644 - protein, 12 aa, Homo sapiens
  CDR3 for beta chain variable domain of TCR clone 70822 (TRBV6-5, TRBJ2-2)
CASRTGTGELFF

SEQ ID NO: 141645 - protein, 14 aa, Homo sapiens
  CDR3 for alpha chain variable domain of TCR clone 70823 (TRAV12-2, TRAJ11)
CAGNRESGYSTLTF

SEQ ID NO: 141646 - protein, 10 aa, Homo sapiens
  CDR3 for beta chain variable domain of TCR clone 70823 (TRBV20-1, TRBJ2-5)
CSARFETQYF

SEQ ID NO: 141647 - protein, 11 aa, Homo sapiens
  CDR3 for alpha chain variable domain of TCR clone 70824 (TRAV3, TRAJ21)
CAVGNFNKFYF

SEQ ID NO: 141648 - protein, 12 aa, Homo sapiens
  CDR3 for beta chain variable domain of TCR clone 70824 (TRBV28, TRBJ2-3)
CASSLYRDTQYF

SEQ ID NO: 141649 - protein, 13 aa, Homo sapiens
  CDR3 for alpha chain variable domain of TCR clone 70825 (TRAV2, TRAJ40)
CVVVTSGTYKYIF

SEQ ID NO: 141650 - protein, 14 aa, Homo sapiens
  CDR3 for beta chain variable domain of TCR clone 70825 (TRBV4-2, TRBJ2-1)
CASGLDRAYNEQFF

SEQ ID NO: 141651 - protein, 14 aa, Homo sapiens
  CDR3 for alpha chain variable domain of TCR clone 70826 (TRAV21, TRAJ10)
CAVALTGGGNKLTS

SEQ ID NO: 141652 - protein, 13 aa, Homo sapiens
  CDR3 for beta chain variable domain of TCR clone 70826 (TRBV7-2, TRBJ1-6)
CASSLGSNSPLHF

SEQ ID NO: 141653 - protein, 12 aa, Homo sapiens
  CDR3 for alpha chain variable domain of TCR clone 70827 (TRAV27, TRAJ13)
CAGVRGYQRVTF

SEQ ID NO: 141654 - protein, 16 aa, Homo sapiens
  CDR3 for beta chain variable domain of TCR clone 70827 (TRBV28, TRBJ2-1)
CASSSSYSGSLNEQFF

SEQ ID NO: 141655 - protein, 10 aa, Homo sapiens
  CDR3 for alpha chain variable domain of TCR clone 70828 (TRAV1-2, TRAJ20)
CALNDYKLSF

SEQ ID NO: 141656 - protein, 16 aa, Homo sapiens
  CDR3 for beta chain variable domain of TCR clone 70828 (TRBV20-1, TRBJ1-1)
CSAWALTQGMNTEAFF

SEQ ID NO: 141657 - protein, 12 aa, Homo sapiens
  CDR3 for alpha chain variable domain of TCR clone 70829 (TRAV17, TRAJ20)
CATDSNDYKLSF

SEQ ID NO: 141658 - protein, 15 aa, Homo sapiens
  CDR3 for beta chain variable domain of TCR clone 70829 (TRBV7-2, TRBJ2-7)
CASSLSGALTYEQYF

SEQ ID NO: 141659 - protein, 13 aa, Homo sapiens
  CDR3 for alpha chain variable domain of TCR clone 70830 (TRAV12-1, TRAJ34)
CVVTGYNTDKLVF

SEQ ID NO: 141660 - protein, 13 aa, Homo sapiens
  CDR3 for beta chain variable domain of TCR clone 70830 (TRBV28, TRBJ2-7)
CASKAGGVYEQYF

SEQ ID NO: 141661 - protein, 13 aa, Homo sapiens
  CDR3 for alpha chain variable domain of TCR clone 70831 (TRAV27, TRAJ53)
CAPSGGSNYKLTF

SEQ ID NO: 141662 - protein, 14 aa, Homo sapiens
  CDR3 for beta chain variable domain of TCR clone 70831 (TRBV6-1, TRBJ2-3)
CSSENWNGGGRQYF

SEQ ID NO: 141663 - protein, 10 aa, Homo sapiens
  CDR3 for alpha chain variable domain of TCR clone 70832 (TRAV30, TRAJ24)
CAQRLWMLTA

SEQ ID NO: 141664 - protein, 14 aa, Homo sapiens
  CDR3 for beta chain variable domain of TCR clone 70832 (TRBV12-5, TRBJ2-5)
CAGGSRTHQETQYF

SEQ ID NO: 141665 - protein, 14 aa, Homo sapiens
  CDR3 for alpha chain variable domain of TCR clone 70833 (TRAV12-2, TRAJ40)
CAVKIPSGTYTYIF

SEQ ID NO: 141666 - protein, 15 aa, Homo sapiens
  CDR3 for beta chain variable domain of TCR clone 70833 (TRBV2, TRBJ2-7)
CASSEGLARSYEQYF

SEQ ID NO: 141667 - protein, 11 aa, Homo sapiens
  CDR3 for alpha chain variable domain of TCR clone 70834 (TRAV12-1, TRAJ30)
CVVNGQDKIIF

SEQ ID NO: 141668 - protein, 14 aa, Homo sapiens
  CDR3 for beta chain variable domain of TCR clone 70834 (TRBV19, TRBJ2-2)
CASSTLHRSGELFF

SEQ ID NO: 141669 - protein, 14 aa, Homo sapiens
  CDR3 for alpha chain variable domain of TCR clone 70835 (TRAV12-2, TRAJ17)
CAVLFKAAGNKLTF

SEQ ID NO: 141670 - protein, 13 aa, Homo sapiens
  CDR3 for beta chain variable domain of TCR clone 70835 (TRBV7-3, TRBJ1-1)
CQQLKGGNTEAFF

SEQ ID NO: 141671 - protein, 17 aa, Homo sapiens
  CDR3 for alpha chain variable domain of TCR clone 70836 (TRAV3, TRAJ6)
CAVRDGPRAGGSYIPPF

SEQ ID NO: 141672 - protein, 15 aa, Homo sapiens
  CDR3 for beta chain variable domain of TCR clone 70836 (TRBV11-3, TRBJ2-7)
CASSPGPASSYEQYF

SEQ ID NO: 141673 - protein, 13 aa, Homo sapiens
  CDR3 for alpha chain variable domain of TCR clone 70837 (TRAV27, TRAJ6)
CAGGTRGSYIPTF

SEQ ID NO: 141674 - protein, 17 aa, Homo sapiens
  CDR3 for beta chain variable domain of TCR clone 70837 (TRBV28, TRBJ2-5)
CASSRQGGLAGAETQYF

SEQ ID NO: 141675 - protein, 12 aa, Homo sapiens
  CDR3 for alpha chain variable domain of TCR clone 70838 (TRAV21, TRAJ33)
CAKMDSNYQLIW

SEQ ID NO: 141676 - protein, 16 aa, Homo sapiens
  CDR3 for beta chain variable domain of TCR clone 70838 (TRBV13, TRBJ2-2)
CASSPRTGEHTGELFF

SEQ ID NO: 141677 - protein, 13 aa, Homo sapiens
  CDR3 for alpha chain variable domain of TCR clone 70839 (TRAV20, TRAJ29)
CAVQAVGNTPLAF

SEQ ID NO: 141678 - protein, 15 aa, Homo sapiens
  CDR3 for beta chain variable domain of TCR clone 70839 (TRBV10-2, TRBJ2-5)
CASRGSGGPQETQYF

SEQ ID NO: 141679 - protein, 11 aa, Homo sapiens
  CDR3 for alpha chain variable domain of TCR clone 70840 (TRAV13-1, TRAJ52)
PGGTSYGKLTS

SEQ ID NO: 141680 - protein, 16 aa, Homo sapiens
  CDR3 for beta chain variable domain of TCR clone 70840 (TRBV28, TRBJ2-7)
CASSPWVATGDLSQYF

SEQ ID NO: 141681 - protein, 16 aa, Homo sapiens
  CDR3 for alpha chain variable domain of TCR clone 70841 (TRAV23/DV6, TRAJ9)
CAASIGGNTGGFKTIF

SEQ ID NO: 141682 - protein, 14 aa, Homo sapiens
  CDR3 for beta chain variable domain of TCR clone 70841 (TRBV7-8, TRBJ2-3)
CASSLEAGTDTQYF

SEQ ID NO: 141683 - protein, 11 aa, Homo sapiens
  CDR3 for alpha chain variable domain of TCR clone 70842 (TRAV1-2, TRAJ40)
CAVPGTYKYIF

SEQ ID NO: 141684 - protein, 16 aa, Homo sapiens
  CDR3 for beta chain variable domain of TCR clone 70842 (TRBV29-1, TRBJ2-7)
CSVEVVGTSGSYVQYF

SEQ ID NO: 141685 - protein, 14 aa, Homo sapiens
  CDR3 for alpha chain variable domain of TCR clone 70843 (TRAV26-1, TRAJ45)
CVEVTGGGADGLTF

SEQ ID NO: 141686 - protein, 15 aa, Homo sapiens
  CDR3 for beta chain variable domain of TCR clone 70843 (TRBV20-1, TRBJ2-7)
CSARVPAAYFYEQYF

SEQ ID NO: 141687 - protein, 12 aa, Homo sapiens
  CDR3 for alpha chain variable domain of TCR clone 70844 (TRAV12-3, TRAJ21)
CAMFNNFNKFYF

SEQ ID NO: 141688 - protein, 15 aa, Homo sapiens
  CDR3 for beta chain variable domain of TCR clone 70844 (TRBV19, TRBJ1-1)
CASTSGQIQNTEAFF

SEQ ID NO: 141689 - protein, 16 aa, Homo sapiens
  CDR3 for alpha chain variable domain of TCR clone 70845 (TRAV30, TRAJ24)
CGTETVDADSWGKFQF

SEQ ID NO: 141690 - protein, 14 aa, Homo sapiens
  CDR3 for beta chain variable domain of TCR clone 70845 (TRBV7-9, TRBJ2-4)
CASSLAMGGNIQYF

SEQ ID NO: 141691 - protein, 13 aa, Homo sapiens
  CDR3 for alpha chain variable domain of TCR clone 70846 (TRAV12-1, TRAJ7)
CVVNMRGNNRLAF

SEQ ID NO: 141692 - protein, 16 aa, Homo sapiens
  CDR3 for beta chain variable domain of TCR clone 70846 (TRBV20-1, TRBJ1-4)
CSAPGQGLLTNERLFF

SEQ ID NO: 141693 - protein, 20 aa, Homo sapiens
  CDR3 for alpha chain variable domain of TCR clone 70847 (TRAV12-2, TRAJ52)
SPVIQPPARAGGTSYGKLTF

SEQ ID NO: 141694 - protein, 17 aa, Homo sapiens
  CDR3 for beta chain variable domain of TCR clone 70847 (TRBV11-2, TRBJ2-1)
CASSLYPPGVEYNEQFF

SEQ ID NO: 141695 - protein, 12 aa, Homo sapiens
  CDR3 for alpha chain variable domain of TCR clone 70848 (TRAV3, TRAJ31)
CAVRDGNARLMF

SEQ ID NO: 141696 - protein, 16 aa, Homo sapiens
  CDR3 for beta chain variable domain of TCR clone 70848 (TRBV10-3, TRBJ2-1)
CAISGVGDGGGGEQFF

SEQ ID NO: 141697 - protein, 11 aa, Homo sapiens
  CDR3 for alpha chain variable domain of TCR clone 70849 (TRAV13-1, TRAJ52)
PGGTSYGKLTF

SEQ ID NO: 141698 - protein, 16 aa, Homo sapiens
  CDR3 for beta chain variable domain of TCR clone 70849 (TRBV28, TRBJ2-7)
CASSPWVATGGLSQYF

SEQ ID NO: 141699 - protein, 14 aa, Homo sapiens
  CDR3 for alpha chain variable domain of TCR clone 70850 (TRAV1-2, TRAJ8)
CAVREDTGFQKLVF

SEQ ID NO: 141700 - protein, 13 aa, Homo sapiens
  CDR3 for beta chain variable domain of TCR clone 70850 (TRBV12-4, TRBJ1-2)
CASSSGLTVISTL

SEQ ID NO: 141701 - protein, 13 aa, Homo sapiens
  CDR3 for alpha chain variable domain of TCR clone 70851 (TRAV13-1, TRAJ6)
CAASKGGSCIPTF

SEQ ID NO: 141702 - protein, 13 aa, Homo sapiens
  CDR3 for beta chain variable domain of TCR clone 70851 (TRBV7-9, TRBJ2-5)
CASLPSGRETQYF

SEQ ID NO: 141703 - protein, 14 aa, Homo sapiens
  CDR3 for alpha chain variable domain of TCR clone 70852 (TRAV38-1, TRAJ27)
CAFIHNTNAGKSTF

SEQ ID NO: 141704 - protein, 12 aa, Homo sapiens
  CDR3 for beta chain variable domain of TCR clone 70852 (TRBV7-8, TRBJ2-7)
CASSLGDRGQYF

SEQ ID NO: 141705 - protein, 12 aa, Homo sapiens
  CDR3 for alpha chain variable domain of TCR clone 70853 (TRAV12-2, TRAJ43)
CAVNVNNNDIRF

SEQ ID NO: 141706 - protein, 14 aa, Homo sapiens
  CDR3 for beta chain variable domain of TCR clone 70853 (TRBV12-5, TRBJ2-5)
CASGSRTHQETQYF

SEQ ID NO: 141707 - protein, 16 aa, Homo sapiens
  CDR3 for alpha chain variable domain of TCR clone 70854 (TRAV16, TRAJ42)
FARKMNYGGSQGNLIF

SEQ ID NO: 141708 - protein, 15 aa, Homo sapiens
  CDR3 for beta chain variable domain of TCR clone 70854 (TRBV20-1, TRBJ2-7)
CSAREGRDSLYEQYF

SEQ ID NO: 141709 - protein, 15 aa, Homo sapiens
  CDR3 for alpha chain variable domain of TCR clone 70855 (TRAV12-1, TRAJ37)
CVVNLPTSNTGKLIF

SEQ ID NO: 141710 - protein, 16 aa, Homo sapiens
  CDR3 for beta chain variable domain of TCR clone 70855 (TRBV2, TRBJ2-1)
CASRSPAGGKYNEQFL

SEQ ID NO: 141711 - protein, 15 aa, Homo sapiens
  CDR3 for alpha chain variable domain of TCR clone 70856 (TRAV4, TRAJ10)
CLVGDEEGGGNNLTF

SEQ ID NO: 141712 - protein, 15 aa, Homo sapiens
  CDR3 for beta chain variable domain of TCR clone 70856 (TRBV7-2, TRBJ2-7)
CASSLTGQGTYEQYF

SEQ ID NO: 141713 - protein, 13 aa, Homo sapiens
  CDR3 for alpha chain variable domain of TCR clone 70857 (TRAV8-2, TRAJ43)
CVVSDQGDNDMRF

SEQ ID NO: 141714 - protein, 12 aa, Homo sapiens
  CDR3 for beta chain variable domain of TCR clone 70857 (TRBV7-9, TRBJ2-7)
CASGTGFDEQYF

SEQ ID NO: 141715 - protein, 18 aa, Homo sapiens
  CDR3 for alpha chain variable domain of TCR clone 70858 (TRAV29/DV5, TRAJ52)
CAAGFRGGGGTSYGKLTF

SEQ ID NO: 141716 - protein, 16 aa, Homo sapiens
  CDR3 for beta chain variable domain of TCR clone 70858 (TRBV7-3, TRBJ2-2)
CASSLKRGTLSGELFF

SEQ ID NO: 141717 - protein, 14 aa, Homo sapiens
  CDR3 for alpha chain variable domain of TCR clone 70859 (TRAV12-2, TRAJ40)
CAVKIPSGTYKYIF

SEQ ID NO: 141718 - protein, 15 aa, Homo sapiens
  CDR3 for beta chain variable domain of TCR clone 70859 (TRBV11-2, TRBJ1-3)
CASSIWGSYGNTIYF

SEQ ID NO: 141719 - protein, 14 aa, Homo sapiens
  CDR3 for alpha chain variable domain of TCR clone 70860 (TRAV38-1, TRAJ40)
CALRPTSGTYKYIF

SEQ ID NO: 141720 - protein, 12 aa, Homo sapiens
  CDR3 for beta chain variable domain of TCR clone 70860 (TRBV7-9, TRBJ2-7)
CASSFGSYEQYF

SEQ ID NO: 141721 - protein, 11 aa, Homo sapiens
  CDR3 for alpha chain variable domain of TCR clone 70861 (TRAV2, TRAJ20)
CAVLNDYKLSF

SEQ ID NO: 141722 - protein, 16 aa, Homo sapiens
  CDR3 for beta chain variable domain of TCR clone 70861 (TRBV11-1, TRBJ2-2)
CASSAEGRKNTGELFF

SEQ ID NO: 141723 - protein, 19 aa, Homo sapiens
  CDR3 for alpha chain variable domain of TCR clone 70862 (TRAV2, TRAJ20)
ILQVWEADAAVYRDCKLSF

SEQ ID NO: 141724 - protein, 13 aa, Homo sapiens
  CDR3 for beta chain variable domain of TCR clone 70862 (TRBV15, TRBJ1-6)
CATSGGLNSPLHF

SEQ ID NO: 141725 - protein, 14 aa, Homo sapiens
  CDR3 for alpha chain variable domain of TCR clone 70863 (TRAV1-2, TRAJ29)
CAVRELTSATPLVF

SEQ ID NO: 141726 - protein, 14 aa, Homo sapiens
  CDR3 for beta chain variable domain of TCR clone 70863 (TRBV12-4, TRBJ2-7)
CASSPSGSPYEQYF

SEQ ID NO: 141727 - protein, 15 aa, Homo sapiens
  CDR3 for alpha chain variable domain of TCR clone 70864 (TRAV2, TRAJ15)
CAVEDREQAGTALIF

SEQ ID NO: 141728 - protein, 17 aa, Homo sapiens
  CDR3 for beta chain variable domain of TCR clone 70864 (TRBV7-8, TRBJ2-6)
CASSAGTGGAGASVLTF

SEQ ID NO: 141729 - protein, 16 aa, Homo sapiens
  CDR3 for alpha chain variable domain of TCR clone 70865 (TRAV16, TRAJ4)
CALSRMFSGGYNKLIF

SEQ ID NO: 141730 - protein, 15 aa, Homo sapiens
  CDR3 for beta chain variable domain of TCR clone 70865 (TRBV20-1, TRBJ1-1)
CSASRGVTGNTEAFF

SEQ ID NO: 141731 - protein, 14 aa, Homo sapiens
  CDR3 for alpha chain variable domain of TCR clone 70866 (TRAV29/DV5, TRAJ49)
CAASLSTTGNQFYF

SEQ ID NO: 141732 - protein, 15 aa, Homo sapiens
  CDR3 for beta chain variable domain of TCR clone 70866 (TRBV20-1, TRBJ2-1)
CSARGIGGTYNEQFF

SEQ ID NO: 141733 - protein, 13 aa, Homo sapiens
  CDR3 for alpha chain variable domain of TCR clone 70867 (TRAV22, TRAJ29)
CAVGGSGNTPLVF

SEQ ID NO: 141734 - protein, 14 aa, Homo sapiens
  CDR3 for beta chain variable domain of TCR clone 70867 (TRBV27, TRBJ2-3)
CASRDSPITDTQYF

SEQ ID NO: 141735 - protein, 13 aa, Homo sapiens
  CDR3 for alpha chain variable domain of TCR clone 70868 (TRAV20, TRAJ34)
CAVSSYNTDKLIF

SEQ ID NO: 141736 - protein, 15 aa, Homo sapiens
  CDR3 for beta chain variable domain of TCR clone 70868 (TRBV20-1, TRBJ1-2)
CSAAGEGARIYGYSF

SEQ ID NO: 141737 - protein, 15 aa, Homo sapiens
  CDR3 for alpha chain variable domain of TCR clone 70869 (TRAV17, TRAJ23)
CATDAEDNQGGKLIF

SEQ ID NO: 141738 - protein, 14 aa, Homo sapiens
  CDR3 for beta chain variable domain of TCR clone 70869 (TRBV12-4, TRBJ1-2)
CASSNLRGNYGYTF

SEQ ID NO: 141739 - protein, 14 aa, Homo sapiens
  CDR3 for alpha chain variable domain of TCR clone 70870 (TRAV30, TRAJ33)
CGTVAPRSNYQLIW

SEQ ID NO: 141740 - protein, 14 aa, Homo sapiens
  CDR3 for beta chain variable domain of TCR clone 70870 (TRBV3-1, TRBJ2-5)
CASSQGPDQETQYF

SEQ ID NO: 141741 - protein, 16 aa, Homo sapiens
  CDR3 for alpha chain variable domain of TCR clone 70871 (TRAV12-2, TRAJ6)
CAAPLAGSGGSYIPTF

SEQ ID NO: 141742 - protein, 10 aa, Homo sapiens
  CDR3 for beta chain variable domain of TCR clone 70871 (TRBV28, TRBJ1-2)
RASSSDRAVF

SEQ ID NO: 141743 - protein, 14 aa, Homo sapiens
  CDR3 for alpha chain variable domain of TCR clone 70872 (TRAV26-1, TRAJ38)
CIADNAGNNHKLIW

SEQ ID NO: 141744 - protein, 14 aa, Homo sapiens
  CDR3 for beta chain variable domain of TCR clone 70872 (TRBV4-1, TRBJ2-2)
CASSQAVNTGELFF

SEQ ID NO: 141745 - protein, 13 aa, Homo sapiens
  CDR3 for alpha chain variable domain of TCR clone 70873 (TRAV1-1, TRAJ31)
CASYLDNNARLMF

SEQ ID NO: 141746 - protein, 14 aa, Homo sapiens
  CDR3 for beta chain variable domain of TCR clone 70873 (TRBV4-1, TRBJ2-5)
CASSRSGSGETQYF

SEQ ID NO: 141747 - protein, 14 aa, Homo sapiens
  CDR3 for alpha chain variable domain of TCR clone 70874 (TRAV12-3, TRAJ9)
CAMSPNTGGFKTIF

SEQ ID NO: 141748 - protein, 16 aa, Homo sapiens
  CDR3 for beta chain variable domain of TCR clone 70874 (TRBV12-4, TRBJ2-5)
CASSFFVRGRQETQYF

SEQ ID NO: 141749 - protein, 12 aa, Homo sapiens
  CDR3 for alpha chain variable domain of TCR clone 70875 (TRAV12-3, TRAJ17)
CAMTLTGNKLTF

SEQ ID NO: 141750 - protein, 16 aa, Homo sapiens
  CDR3 for beta chain variable domain of TCR clone 70875 (TRBV12-4, TRBJ2-7)
CASSLIGGTGTYEQYF

SEQ ID NO: 141751 - protein, 15 aa, Homo sapiens
  CDR3 for alpha chain variable domain of TCR clone 70876 (TRAV3, TRAJ22)
CAVRDRGGSARQLNF

SEQ ID NO: 141752 - protein, 13 aa, Homo sapiens
  CDR3 for beta chain variable domain of TCR clone 70876 (TRBV2, TRBJ1-5)
CATAGPGNQPQHF

SEQ ID NO: 141753 - protein, 11 aa, Homo sapiens
  CDR3 for alpha chain variable domain of TCR clone 70877 (TRAV3, TRAJ21)
CAVGNFNKFYF

SEQ ID NO: 141754 - protein, 14 aa, Homo sapiens
  CDR3 for beta chain variable domain of TCR clone 70877 (TRBV5-1, TRBJ2-7)
CASSFASGVNEQYF

SEQ ID NO: 141755 - protein, 13 aa, Homo sapiens
  CDR3 for alpha chain variable domain of TCR clone 70878 (TRAV13-2, TRAJ13)
CAERPGGYQKVTF

SEQ ID NO: 141756 - protein, 18 aa, Homo sapiens
  CDR3 for beta chain variable domain of TCR clone 70878 (TRBV7-6, TRBJ2-1)
CAGSPRTSGMSSYNEQFF

SEQ ID NO: 141757 - protein, 12 aa, Homo sapiens
  CDR3 for alpha chain variable domain of TCR clone 70879 (TRAV9-2, TRAJ36)
CALKKGANNLFF

SEQ ID NO: 141758 - protein, 12 aa, Homo sapiens
  CDR3 for beta chain variable domain of TCR clone 70879 (TRBV4-3, TRBJ2-1)
CASSLSGYEQFF

SEQ ID NO: 141759 - protein, 10 aa, Homo sapiens
  CDR3 for alpha chain variable domain of TCR clone 70880 (TRAV26-1, TRAJ40)
CIAGTYKSIF

SEQ ID NO: 141760 - protein, 15 aa, Homo sapiens
  CDR3 for beta chain variable domain of TCR clone 70880 (TRBV19, TRBJ2-1)
CASSSPGVPLDEQFF

SEQ ID NO: 141761 - protein, 14 aa, Homo sapiens
  CDR3 for alpha chain variable domain of TCR clone 70881 (TRAV12-3, TRAJ10)
SHLPLTGGGNKLTF

SEQ ID NO: 141762 - protein, 14 aa, Homo sapiens
  CDR3 for beta chain variable domain of TCR clone 70881 (TRBV6-1, TRBJ1-6)
CASSGTAYNSPLHF

SEQ ID NO: 141763 - protein, 19 aa, Homo sapiens
  CDR3 for alpha chain variable domain of TCR clone 70882 (TRAV1-2, TRAJ26)
CLLPLCCERPDNYGQNFVF

SEQ ID NO: 141764 - protein, 15 aa, Homo sapiens
  CDR3 for beta chain variable domain of TCR clone 70882 (TRBV9, TRBJ1-6)
CASSVAGTGGSPLHF

SEQ ID NO: 141765 - protein, 16 aa, Homo sapiens
  CDR3 for alpha chain variable domain of TCR clone 70883 (TRAV23/DV6, TRAJ52)
CAARPSGGTSYGKLKF

SEQ ID NO: 141766 - protein, 13 aa, Homo sapiens
  CDR3 for beta chain variable domain of TCR clone 70883 (TRBV7-9, TRBJ1-1)
CASSLSGETEAFF

SEQ ID NO: 141767 - protein, 14 aa, Homo sapiens
  CDR3 for alpha chain variable domain of TCR clone 70884 (TRAV3, TRAJ22)
CALRDYGSARQLTF

SEQ ID NO: 141768 - protein, 13 aa, Homo sapiens
  CDR3 for beta chain variable domain of TCR clone 70884 (TRBV11-2, TRBJ2-5)
CASGHGAKETQYF

SEQ ID NO: 141769 - protein, 16 aa, Homo sapiens
  CDR3 for alpha chain variable domain of TCR clone 70885 (TRAV20, TRAJ22)
CAVQASSSGSAWQLTF

SEQ ID NO: 141770 - protein, 13 aa, Homo sapiens
  CDR3 for beta chain variable domain of TCR clone 70885 (TRBV11-2, TRBJ2-5)
CASSRGPSETQYF

SEQ ID NO: 141771 - protein, 14 aa, Homo sapiens
  CDR3 for alpha chain variable domain of TCR clone 70886 (TRAV12-3, TRAJ10)
SHLPLMGGGNKLTF

SEQ ID NO: 141772 - protein, 13 aa, Homo sapiens
  CDR3 for beta chain variable domain of TCR clone 70886 (TRBV27, TRBJ1-1)
CASSLSIGAEAFF

SEQ ID NO: 141773 - protein, 15 aa, Homo sapiens
  CDR3 for alpha chain variable domain of TCR clone 70887 (TRAV12-1, TRAJ45)
CVVLSGGGGADGLTF

SEQ ID NO: 141774 - protein, 14 aa, Homo sapiens
  CDR3 for beta chain variable domain of TCR clone 70887 (TRBV7-6, TRBJ2-3)
CASSLGTVTDTQYF

SEQ ID NO: 141775 - protein, 13 aa, Homo sapiens
  CDR3 for alpha chain variable domain of TCR clone 70888 (TRAV3, TRAJ41)
CAVSSNSGYALNF

SEQ ID NO: 141776 - protein, 15 aa, Homo sapiens
  CDR3 for beta chain variable domain of TCR clone 70888 (TRBV6-1, TRBJ2-3)
CASSERGGITDTQYF

SEQ ID NO: 141777 - protein, 14 aa, Homo sapiens
  CDR3 for alpha chain variable domain of TCR clone 70889 (TRAV12-3, TRAJ10)
SHLPLTGGGNKLTF

SEQ ID NO: 141778 - protein, 16 aa, Homo sapiens
  CDR3 for beta chain variable domain of TCR clone 70889 (TRBV9, TRBJ2-1)
CASSVGGGGNYNEQFF

SEQ ID NO: 141779 - protein, 13 aa, Homo sapiens
  CDR3 for alpha chain variable domain of TCR clone 70890 (TRAV13-2, TRAJ13)
CADLSGGYQKVTF

SEQ ID NO: 141780 - protein, 15 aa, Homo sapiens
  CDR3 for beta chain variable domain of TCR clone 70890 (TRBV19, TRBJ1-1)
CTSSIGGGRNTEAFF

SEQ ID NO: 141781 - protein, 14 aa, Homo sapiens
  CDR3 for alpha chain variable domain of TCR clone 70891 (TRAV13-1, TRAJ35)
CAASKGGFGNVLHL

SEQ ID NO: 141782 - protein, 13 aa, Homo sapiens
  CDR3 for beta chain variable domain of TCR clone 70891 (TRBV7-3, TRBJ1-1)
CASSQDWGAEAFF

SEQ ID NO: 141783 - protein, 16 aa, Homo sapiens
  CDR3 for alpha chain variable domain of TCR clone 70892 (TRAV12-3, TRAJ53)
CAMSPGSGGSNYKLTF

SEQ ID NO: 141784 - protein, 12 aa, Homo sapiens
  CDR3 for beta chain variable domain of TCR clone 70892 (TRBV29-1, TRBJ2-5)
SAARTERGTQYF

SEQ ID NO: 141785 - protein, 16 aa, Homo sapiens
  CDR3 for alpha chain variable domain of TCR clone 70893 (TRAV13-1, TRAJ10)
CAASSHFTGGGNKLTF

SEQ ID NO: 141786 - protein, 16 aa, Homo sapiens
  CDR3 for beta chain variable domain of TCR clone 70893 (TRBV11-1, TRBJ1-1)
CASSLARLGLGTEAFF

SEQ ID NO: 141787 - protein, 10 aa, Homo sapiens
  CDR3 for alpha chain variable domain of TCR clone 70894 (TRAV1-2, TRAJ31)
CVSEDARLMF

SEQ ID NO: 141788 - protein, 15 aa, Homo sapiens
  CDR3 for beta chain variable domain of TCR clone 70894 (TRBV20-1, TRBJ2-7)
CSARDRVSGMDEQYF

SEQ ID NO: 141789 - protein, 14 aa, Homo sapiens
  CDR3 for alpha chain variable domain of TCR clone 70895 (TRAV29/DV5, TRAJ49)
CAASLSNTGNQFYF

SEQ ID NO: 141790 - protein, 21 aa, Homo sapiens
  CDR3 for beta chain variable domain of TCR clone 70895 (TRBV9, TRBJ2-5)
CASRGRLAGGPEDPVLRARHE

SEQ ID NO: 141791 - protein, 18 aa, Homo sapiens
  CDR3 for alpha chain variable domain of TCR clone 70896 (TRAV12-2, )
CAVEYIQNPDPAVYQLRD

SEQ ID NO: 141792 - protein, 16 aa, Homo sapiens
  CDR3 for beta chain variable domain of TCR clone 70896 (TRBV6-1, TRBJ1-2)
CASSGAWQGRSHGYTF

SEQ ID NO: 141793 - protein, 18 aa, Homo sapiens
  CDR3 for alpha chain variable domain of TCR clone 70897 (TRAV26-2, TRAJ45)
CILRVDKYSGGVADGLTF

SEQ ID NO: 141794 - protein, 16 aa, Homo sapiens
  CDR3 for beta chain variable domain of TCR clone 70897 (TRBV2, TRBJ1-4)
CASNLLQGATNEKLFF

SEQ ID NO: 141795 - protein, 14 aa, Homo sapiens
  CDR3 for alpha chain variable domain of TCR clone 70898 (TRAV16, TRAJ32)
FALKSGGATNKLIF

SEQ ID NO: 141796 - protein, 13 aa, Homo sapiens
  CDR3 for beta chain variable domain of TCR clone 70898 (TRBV15, TRBJ1-6)
CATSGGLNSPLHF

SEQ ID NO: 141797 - protein, 14 aa, Homo sapiens
  CDR3 for alpha chain variable domain of TCR clone 70899 (TRAV13-1, TRAJ44)
CAEKATGTASKLTF

SEQ ID NO: 141798 - protein, 17 aa, Homo sapiens
  CDR3 for beta chain variable domain of TCR clone 70899 (TRBV7-3, TRBJ2-3)
RASSLMKRMRGADTQYF

SEQ ID NO: 141799 - protein, 18 aa, Homo sapiens
  CDR3 for alpha chain variable domain of TCR clone 70900 (TRAV29/DV5, TRAJ52)
CAAGFRGAGGTSYGKLTF

SEQ ID NO: 141800 - protein, 16 aa, Homo sapiens
  CDR3 for beta chain variable domain of TCR clone 70900 (TRBV7-3, TRBJ2-2)
CASSLKRGTLSGGLFF

SEQ ID NO: 141801 - protein, 14 aa, Homo sapiens
  CDR3 for alpha chain variable domain of TCR clone 70901 (TRAV2, TRAJ37)
CAIDFTSNTGKLIF

SEQ ID NO: 141802 - protein, 14 aa, Homo sapiens
  CDR3 for beta chain variable domain of TCR clone 70901 (TRBV20-1, TRBJ1-1)
CSAQTRIGGTEAFF

SEQ ID NO: 141803 - protein, 13 aa, Homo sapiens
  CDR3 for alpha chain variable domain of TCR clone 70902 (TRAV36/DV7, TRAJ7)
CAVTRYGNNRLAF

SEQ ID NO: 141804 - protein, 14 aa, Homo sapiens
  CDR3 for beta chain variable domain of TCR clone 70902 (TRBV19, TRBJ2-1)
CASPTFVLSGEQFF

SEQ ID NO: 141805 - protein, 15 aa, Homo sapiens
  CDR3 for alpha chain variable domain of TCR clone 70903 (TRAV2, TRAJ15)
CTVEDRGQAGTALIF

SEQ ID NO: 141806 - protein, 13 aa, Homo sapiens
  CDR3 for beta chain variable domain of TCR clone 70903 (TRBV10-2, TRBJ2-7)
CASGASGGYEQYF

SEQ ID NO: 141807 - protein, 12 aa, Homo sapiens
  CDR3 for alpha chain variable domain of TCR clone 70904 (TRAV17, TRAJ20)
CATDSNDYKLSF

SEQ ID NO: 141808 - protein, 20 aa, Homo sapiens
  CDR3 for beta chain variable domain of TCR clone 70904 (TRBV6-4, TRBJ2-7)
CASSDSGVSGQVPTSYEQYF

SEQ ID NO: 141809 - protein, 18 aa, Homo sapiens
  CDR3 for alpha chain variable domain of TCR clone 70905 (TRAV12-3, TRAJ52)
CAMSVGGAGGTSYGKLTF

SEQ ID NO: 141810 - protein, 15 aa, Homo sapiens
  CDR3 for beta chain variable domain of TCR clone 70905 (TRBV27, TRBJ1-6)
CASSFYRGLGSPLHF

SEQ ID NO: 141811 - protein, 15 aa, Homo sapiens
  CDR3 for alpha chain variable domain of TCR clone 70906 (TRAV13-1, TRAJ3)
CAASKLASSASKIIF

SEQ ID NO: 141812 - protein, 16 aa, Homo sapiens
  CDR3 for beta chain variable domain of TCR clone 70906 (TRBV25-1, TRBJ1-5)
CASGAPTVNSNRPQHF

SEQ ID NO: 141813 - protein, 15 aa, Homo sapiens
  CDR3 for alpha chain variable domain of TCR clone 70907 (TRAV25, TRAJ53)
CPTSNSGGSNYKLTF

SEQ ID NO: 141814 - protein, 14 aa, Homo sapiens
  CDR3 for beta chain variable domain of TCR clone 70907 (TRBV7-2, TRBJ1-3)
CASSLGTAGNTIYF

SEQ ID NO: 141815 - protein, 12 aa, Homo sapiens
  CDR3 for alpha chain variable domain of TCR clone 70908 (TRAV2, TRAJ15)
CCGLQAGTALIF

SEQ ID NO: 141816 - protein, 16 aa, Homo sapiens
  CDR3 for beta chain variable domain of TCR clone 70908 (TRBV18, TRBJ1-5)
CASSPYRVEGNQPQHF

SEQ ID NO: 141817 - protein, 14 aa, Homo sapiens
  CDR3 for alpha chain variable domain of TCR clone 70909 (TRAV17, TRAJ22)
CATSPSGSARQLTF

SEQ ID NO: 141818 - protein, 15 aa, Homo sapiens
  CDR3 for beta chain variable domain of TCR clone 70909 (TRBV4-1, TRBJ2-5)
CAISQWDLYQETQYF

SEQ ID NO: 141819 - protein, 14 aa, Homo sapiens
  CDR3 for alpha chain variable domain of TCR clone 70910 (TRAV8-4, TRAJ9)
CAVRINTGGFKTIF

SEQ ID NO: 141820 - protein, 15 aa, Homo sapiens
  CDR3 for beta chain variable domain of TCR clone 70910 (TRBV7-3, TRBJ2-1)
CASSASGTGFNEQFF

SEQ ID NO: 141821 - protein, 14 aa, Homo sapiens
  CDR3 for alpha chain variable domain of TCR clone 70911 (TRAV3, TRAJ21)
CAVRDKYNFNKFYF

SEQ ID NO: 141822 - protein, 14 aa, Homo sapiens
  CDR3 for beta chain variable domain of TCR clone 70911 (TRBV27, TRBJ2-3)
CASRDGPITDTQYF

SEQ ID NO: 141823 - protein, 14 aa, Homo sapiens
  CDR3 for alpha chain variable domain of TCR clone 70912 (TRAV8-4, TRAJ13)
CAVTLSGGYQKVTF

SEQ ID NO: 141824 - protein, 16 aa, Homo sapiens
  CDR3 for beta chain variable domain of TCR clone 70912 (TRBV19, TRBJ2-1)
CASSKAGPSSYNEQFF

SEQ ID NO: 141825 - protein, 16 aa, Homo sapiens
  CDR3 for alpha chain variable domain of TCR clone 70913 (TRAV3, TRAJ10)
CAVREMRAGGGNKLTF

SEQ ID NO: 141826 - protein, 14 aa, Homo sapiens
  CDR3 for beta chain variable domain of TCR clone 70913 (TRBV25-1, TRBJ1-1)
CASTHLGGNTEAFF

SEQ ID NO: 141827 - protein, 14 aa, Homo sapiens
  CDR3 for alpha chain variable domain of TCR clone 70914 (TRAV12-1, TRAJ23)
CVVIVYNQGGKLIF

SEQ ID NO: 141828 - protein, 15 aa, Homo sapiens
  CDR3 for beta chain variable domain of TCR clone 70914 (TRBV20-1, TRBJ1-5)
CSARPPGQGPQPQHF

SEQ ID NO: 141829 - protein, 13 aa, Homo sapiens
  CDR3 for alpha chain variable domain of TCR clone 70915 (TRAV2, TRAJ40)
CAVVTSGTYKYIF

SEQ ID NO: 141830 - protein, 15 aa, Homo sapiens
  CDR3 for beta chain variable domain of TCR clone 70915 (TRBV11-2, TRBJ2-2)
CASSSDRVNAGELFF

SEQ ID NO: 141831 - protein, 16 aa, Homo sapiens
  CDR3 for alpha chain variable domain of TCR clone 70916 (TRAV21, TRAJ33)
CAVSPASMDSNYQLIW

SEQ ID NO: 141832 - protein, 15 aa, Homo sapiens
  CDR3 for beta chain variable domain of TCR clone 70916 (TRBV7-9, TRBJ1-5)
CASSQGHQPNQPQHF

SEQ ID NO: 141833 - protein, 15 aa, Homo sapiens
  CDR3 for alpha chain variable domain of TCR clone 70917 (TRAV21, TRAJ32)
CAVNSYGGATNKLIF

SEQ ID NO: 141834 - protein, 15 aa, Homo sapiens
  CDR3 for beta chain variable domain of TCR clone 70917 (TRBV20-1, TRBJ2-2)
CSAIPGHSNTGELFF

SEQ ID NO: 141835 - protein, 13 aa, Homo sapiens
  CDR3 for alpha chain variable domain of TCR clone 70918 (TRAV12-2, TRAJ10)
CAVPTGGGNKLTF

SEQ ID NO: 141836 - protein, 20 aa, Homo sapiens
  CDR3 for beta chain variable domain of TCR clone 70918 (TRBV7-8, TRBJ2-2)
CASSHLFPGPTIHITGELFF

SEQ ID NO: 141837 - protein, 13 aa, Homo sapiens
  CDR3 for alpha chain variable domain of TCR clone 70919 (TRAV3, TRAJ20)
CAVRDTPRYKLSF

SEQ ID NO: 141838 - protein, 15 aa, Homo sapiens
  CDR3 for beta chain variable domain of TCR clone 70919 (TRBV7-2, TRBJ2-2)
CASRRPGQNTGELFF

SEQ ID NO: 141839 - protein, 18 aa, Homo sapiens
  CDR3 for alpha chain variable domain of TCR clone 70920 (TRAV26-1, TRAJ23)
CIVRVGLEVWNQGVKLIF

SEQ ID NO: 141840 - protein, 16 aa, Homo sapiens
  CDR3 for beta chain variable domain of TCR clone 70920 (TRBV12-4, TRBJ2-5)
CASSFFVRGRQETQYF

SEQ ID NO: 141841 - protein, 14 aa, Homo sapiens
  CDR3 for alpha chain variable domain of TCR clone 70921 (TRAV30, TRAJ33)
CGTVAPRSNYQLIW

SEQ ID NO: 141842 - protein, 12 aa, Homo sapiens
  CDR3 for beta chain variable domain of TCR clone 70921 (TRBV5-4, TRBJ2-7)
CASSWAGQGENF

SEQ ID NO: 141843 - protein, 16 aa, Homo sapiens
  CDR3 for alpha chain variable domain of TCR clone 70922 (TRAV3, TRAJ4)
CAVRPSPSGGYTKLIF

SEQ ID NO: 141844 - protein, 12 aa, Homo sapiens
  CDR3 for beta chain variable domain of TCR clone 70922 (TRBV7-9, TRBJ2-7)
CASSQGVYEQYF

SEQ ID NO: 141845 - protein, 16 aa, Homo sapiens
  CDR3 for alpha chain variable domain of TCR clone 70923 (TRAV3, TRAJ21)
CAVRDIERGNFNKFYF

SEQ ID NO: 141846 - protein, 16 aa, Homo sapiens
  CDR3 for beta chain variable domain of TCR clone 70923 (TRBV12-4, TRBJ1-5)
CASSRPVGGSNQPRHF

SEQ ID NO: 141847 - protein, 14 aa, Homo sapiens
  CDR3 for alpha chain variable domain of TCR clone 70924 (TRAV8-3, TRAJ4)
CAVGAAGGYNKLIF

SEQ ID NO: 141848 - protein, 13 aa, Homo sapiens
  CDR3 for beta chain variable domain of TCR clone 70924 (TRBV4-1, TRBJ2-2)
CASSQENTGELFF

SEQ ID NO: 141849 - protein, 12 aa, Homo sapiens
  CDR3 for alpha chain variable domain of TCR clone 70925 (TRAV2, TRAJ10)
CASTGGGNKLTF

SEQ ID NO: 141850 - protein, 15 aa, Homo sapiens
  CDR3 for beta chain variable domain of TCR clone 70925 (TRBV5-1, TRBJ2-3)
CASSVTSGSTDTQYF

SEQ ID NO: 141851 - protein, 14 aa, Homo sapiens
  CDR3 for alpha chain variable domain of TCR clone 70926 (TRAV38-1, TRAJ45)
CAYYSGGGADGLTI

SEQ ID NO: 141852 - protein, 20 aa, Homo sapiens
  CDR3 for beta chain variable domain of TCR clone 70926 (TRBV28, TRBJ2-1)
CASTPIGRSPGLAGGNEQFF

SEQ ID NO: 141853 - protein, 15 aa, Homo sapiens
  CDR3 for alpha chain variable domain of TCR clone 70927 (TRAV8-2, TRAJ16)
CVVSDGFSDGQKMLF

SEQ ID NO: 141854 - protein, 14 aa, Homo sapiens
  CDR3 for beta chain variable domain of TCR clone 70927 (TRBV7-3, TRBJ1-1)
CASSLGTGYTEAFF

SEQ ID NO: 141855 - protein, 13 aa, Homo sapiens
  CDR3 for alpha chain variable domain of TCR clone 70928 (TRAV29/DV5, TRAJ31)
CAASRNNNDRLMF

SEQ ID NO: 141856 - protein, 12 aa, Homo sapiens
  CDR3 for beta chain variable domain of TCR clone 70928 (TRBV14, TRBJ2-7)
CASSLYKDEQYF

SEQ ID NO: 141857 - protein, 15 aa, Homo sapiens
  CDR3 for alpha chain variable domain of TCR clone 70929 (TRAV26-1, TRAJ27)
CIVRVLTPMQANKPL

SEQ ID NO: 141858 - protein, 13 aa, Homo sapiens
  CDR3 for beta chain variable domain of TCR clone 70929 (TRBV20-1, TRBJ2-7)
CSATHTSGYEQYF

SEQ ID NO: 141859 - protein, 15 aa, Homo sapiens
  CDR3 for alpha chain variable domain of TCR clone 70930 (TRAV13-1, TRAJ52)
CALRTGGTSYGKLTF

SEQ ID NO: 141860 - protein, 16 aa, Homo sapiens
  CDR3 for beta chain variable domain of TCR clone 70930 (TRBV19, TRBJ2-1)
CASSKAGPSSYNEQFF

SEQ ID NO: 141861 - protein, 13 aa, Homo sapiens
  CDR3 for alpha chain variable domain of TCR clone 70931 (TRAV12-3, TRAJ13)
CAMSSGGYQKVTF

SEQ ID NO: 141862 - protein, 14 aa, Homo sapiens
  CDR3 for beta chain variable domain of TCR clone 70931 (TRBV27, TRBJ2-1)
CASRHLGGGKEQFF

SEQ ID NO: 141863 - protein, 10 aa, Homo sapiens
  CDR3 for alpha chain variable domain of TCR clone 70932 (TRAV1-2, TRAJ31)
CAFFDARLMF

SEQ ID NO: 141864 - protein, 14 aa, Homo sapiens
  CDR3 for beta chain variable domain of TCR clone 70932 (TRBV19, TRBJ1-2)
CASSVLGYNYGYTF

SEQ ID NO: 141865 - protein, 13 aa, Homo sapiens
  CDR3 for alpha chain variable domain of TCR clone 70933 (TRAV2, TRAJ40)
CAVVTSGTYKYIF

SEQ ID NO: 141866 - protein, 17 aa, Homo sapiens
  CDR3 for beta chain variable domain of TCR clone 70933 (TRBV20-1, TRBJ2-1)
CSASSSGLAGSYNEQFF

SEQ ID NO: 141867 - protein, 18 aa, Homo sapiens
  CDR3 for alpha chain variable domain of TCR clone 70934 (TRAV26-2, TRAJ45)
CILRVDKYSGGGADGLTF

SEQ ID NO: 141868 - protein, 14 aa, Homo sapiens
  CDR3 for beta chain variable domain of TCR clone 70934 (TRBV7-2, TRBJ2-7)
CASRSQGAAYEQYL

SEQ ID NO: 141869 - protein, 12 aa, Homo sapiens
  CDR3 for alpha chain variable domain of TCR clone 70935 (TRAV12-2, TRAJ8)
CAVNTGFQKLVF

SEQ ID NO: 141870 - protein, 13 aa, Homo sapiens
  CDR3 for beta chain variable domain of TCR clone 70935 (TRBV7-9, TRBJ1-2)
CASSLKQNYGYTF

SEQ ID NO: 141871 - protein, 13 aa, Homo sapiens
  CDR3 for alpha chain variable domain of TCR clone 70936 (TRAV4, TRAJ42)
CLVGGGSQGNLIF

SEQ ID NO: 141872 - protein, 15 aa, Homo sapiens
  CDR3 for beta chain variable domain of TCR clone 70936 (TRBV19, TRBJ1-1)
CASTSGQIQNTEAFF

SEQ ID NO: 141873 - protein, 17 aa, Homo sapiens
  CDR3 for alpha chain variable domain of TCR clone 70937 (TRAV14/DV4, TRAJ29)
CAMREGLGRSGNTPLVF

SEQ ID NO: 141874 - protein, 12 aa, Homo sapiens
  CDR3 for beta chain variable domain of TCR clone 70937 (TRBV11-2, TRBJ2-2)
CASSLPTGELFF

SEQ ID NO: 141875 - protein, 15 aa, Homo sapiens
  CDR3 for alpha chain variable domain of TCR clone 70938 (TRAV13-2, TRAJ16)
CAENDRFSYGQKLLF

SEQ ID NO: 141876 - protein, 14 aa, Homo sapiens
  CDR3 for beta chain variable domain of TCR clone 70938 (TRBV4-2, TRBJ1-5)
CASSRDRGNQPQHF

SEQ ID NO: 141877 - protein, 15 aa, Homo sapiens
  CDR3 for alpha chain variable domain of TCR clone 70939 (TRAV25, TRAJ53)
CPTSNSGGSNYKLTF

SEQ ID NO: 141878 - protein, 15 aa, Homo sapiens
  CDR3 for beta chain variable domain of TCR clone 70939 (TRBV20-1, TRBJ2-7)
CSARVPAAYFYEQYF

SEQ ID NO: 141879 - protein, 14 aa, Homo sapiens
  CDR3 for alpha chain variable domain of TCR clone 70940 (TRAV12-2, TRAJ17)
CAVLFKAAGNKLTF

SEQ ID NO: 141880 - protein, 13 aa, Homo sapiens
  CDR3 for beta chain variable domain of TCR clone 70940 (TRBV27, TRBJ1-1)
CASSLSIGAEAFF

SEQ ID NO: 141881 - protein, 12 aa, Homo sapiens
  CDR3 for alpha chain variable domain of TCR clone 70941 (TRAV13-1, TRAJ49)
CAASPMGNQFYF

SEQ ID NO: 141882 - protein, 12 aa, Homo sapiens
  CDR3 for beta chain variable domain of TCR clone 70941 (TRBV11-2, TRBJ2-2)
CASSLGGGELFF

SEQ ID NO: 141883 - protein, 14 aa, Homo sapiens
  CDR3 for alpha chain variable domain of TCR clone 70942 (TRAV12-2, TRAJ53)
CAVKGGGSNYKLTF

SEQ ID NO: 141884 - protein, 12 aa, Homo sapiens
  CDR3 for beta chain variable domain of TCR clone 70942 (TRBV11-2, TRBJ2-2)
CASSLGGGELFF

SEQ ID NO: 141885 - protein, 13 aa, Homo sapiens
  CDR3 for alpha chain variable domain of TCR clone 70943 (TRAV14/DV4, TRAJ23)
CATREVKGGKLIF

SEQ ID NO: 141886 - protein, 15 aa, Homo sapiens
  CDR3 for beta chain variable domain of TCR clone 70943 (TRBV6-3, TRBJ2-1)
CASSYASDSYNEQFF

SEQ ID NO: 141887 - protein, 14 aa, Homo sapiens
  CDR3 for alpha chain variable domain of TCR clone 70944 (TRAV12-1, TRAJ17)
CVVNYKAAGNKLTF

SEQ ID NO: 141888 - protein, 15 aa, Homo sapiens
  CDR3 for beta chain variable domain of TCR clone 70944 (TRBV4-3, TRBJ1-2)
CASSRGQGRNYGYTF

SEQ ID NO: 141889 - protein, 17 aa, Homo sapiens
  CDR3 for alpha chain variable domain of TCR clone 70945 (TRAV10, TRAJ48)
PTSVWWARDFGNEKLTF

SEQ ID NO: 141890 - protein, 16 aa, Homo sapiens
  CDR3 for beta chain variable domain of TCR clone 70945 (TRBV12-4, TRBJ2-5)
CASSWRPSGDLETQYF

SEQ ID NO: 141891 - protein, 13 aa, Homo sapiens
  CDR3 for alpha chain variable domain of TCR clone 70946 (TRAV27, TRAJ3)
ASLRGTSASKIIF

SEQ ID NO: 141892 - protein, 15 aa, Homo sapiens
  CDR3 for beta chain variable domain of TCR clone 70946 (TRBV28, TRBJ1-3)
CASSMGWASGNTIYF

SEQ ID NO: 141893 - protein, 17 aa, Homo sapiens
  CDR3 for alpha chain variable domain of TCR clone 70947 (TRAV3, TRAJ6)
CAVSRRTDTGGSYIPTF

SEQ ID NO: 141894 - protein, 18 aa, Homo sapiens
  CDR3 for beta chain variable domain of TCR clone 70947 (TRBV7-2, TRBJ2-3)
CASSLETSRCRKADTQYF

SEQ ID NO: 141895 - protein, 10 aa, Homo sapiens
  CDR3 for alpha chain variable domain of TCR clone 70948 (TRAV1-2, TRAJ16)
CAVNRFSDGQ

SEQ ID NO: 141896 - protein, 15 aa, Homo sapiens
  CDR3 for beta chain variable domain of TCR clone 70948 (TRBV7-9, TRBJ1-6)
CASSSPGRGNSPLHF

SEQ ID NO: 141897 - protein, 16 aa, Homo sapiens
  CDR3 for alpha chain variable domain of TCR clone 70949 (TRAV3, TRAJ21)
CVVRDIERGNFNKFYF

SEQ ID NO: 141898 - protein, 13 aa, Homo sapiens
  CDR3 for beta chain variable domain of TCR clone 70949 (TRBV27, TRBJ2-7)
CASSLKTGYEQYF

SEQ ID NO: 141899 - protein, 13 aa, Homo sapiens
  CDR3 for alpha chain variable domain of TCR clone 70950 (TRAV12-1, TRAJ40)
FVVPTSGTYKYIF

SEQ ID NO: 141900 - protein, 18 aa, Homo sapiens
  CDR3 for beta chain variable domain of TCR clone 70950 (TRBV7-6, TRBJ2-1)
CASSPRTSGMSSYNEQFF

SEQ ID NO: 141901 - protein, 15 aa, Homo sapiens
  CDR3 for alpha chain variable domain of TCR clone 70951 (TRAV27, TRAJ24)
CAGSMTTDSWGKSQF

SEQ ID NO: 141902 - protein, 15 aa, Homo sapiens
  CDR3 for beta chain variable domain of TCR clone 70951 (TRBV6-6, TRBJ1-5)
CASSSPRGQGQPQHF

SEQ ID NO: 141903 - protein, 16 aa, Homo sapiens
  CDR3 for alpha chain variable domain of TCR clone 70952 (TRAV8-3, TRAJ13)
CAVGAYPSGGYQKVTF

SEQ ID NO: 141904 - protein, 15 aa, Homo sapiens
  CDR3 for beta chain variable domain of TCR clone 70952 (TRBV19, TRBJ1-5)
CASSIVWADSQPQHF

SEQ ID NO: 141905 - protein, 15 aa, Homo sapiens
  CDR3 for alpha chain variable domain of TCR clone 70953 (TRAV8-1, TRAJ6)
CAVNTPPGGSYIPTF

SEQ ID NO: 141906 - protein, 14 aa, Homo sapiens
  CDR3 for beta chain variable domain of TCR clone 70953 (TRBV12-4, TRBJ2-1)
CASSVGQGASEQFF

SEQ ID NO: 141907 - protein, 13 aa, Homo sapiens
  CDR3 for alpha chain variable domain of TCR clone 70954 (TRAV27, TRAJ29)
CAGAHSGNTPLVF

SEQ ID NO: 141908 - protein, 12 aa, Homo sapiens
  CDR3 for beta chain variable domain of TCR clone 70954 (TRBV5-1, TRBJ1-2)
CASSQDTYGYTF

SEQ ID NO: 141909 - protein, 11 aa, Homo sapiens
  CDR3 for alpha chain variable domain of TCR clone 70955 (TRAV2, TRAJ13)
CASGGYQKVTF

SEQ ID NO: 141910 - protein, 14 aa, Homo sapiens
  CDR3 for beta chain variable domain of TCR clone 70955 (TRBV19, TRBJ2-1)
RASSKDRGQDEQFF

SEQ ID NO: 141911 - protein, 18 aa, Homo sapiens
  CDR3 for alpha chain variable domain of TCR clone 70956 (TRAV21, TRAJ52)
CAVRPSPAGGTSYGKLTC

SEQ ID NO: 141912 - protein, 13 aa, Homo sapiens
  CDR3 for beta chain variable domain of TCR clone 70956 (TRBV7-3, TRBJ1-1)
CASSQDWGAEAFF

SEQ ID NO: 141913 - protein, 17 aa, Homo sapiens
  CDR3 for alpha chain variable domain of TCR clone 70957 (TRAV21, TRAJ45)
CGGPQGGSGGGADGLTF

SEQ ID NO: 141914 - protein, 10 aa, Homo sapiens
  CDR3 for beta chain variable domain of TCR clone 70957 (TRBV4-1, TRBJ2-7)
SRGDRHEQYF

SEQ ID NO: 141915 - protein, 14 aa, Homo sapiens
  CDR3 for alpha chain variable domain of TCR clone 70958 (TRAV3, TRAJ34)
CAVGDINNTDKLIF

SEQ ID NO: 141916 - protein, 13 aa, Homo sapiens
  CDR3 for beta chain variable domain of TCR clone 70958 (TRBV20-1, TRBJ1-1)
CSARGGGNTEAFF

SEQ ID NO: 141917 - protein, 12 aa, Homo sapiens
  CDR3 for alpha chain variable domain of TCR clone 70959 (TRAV21, TRAJ13)
PDPSGGYQKVTF

SEQ ID NO: 141918 - protein, 14 aa, Homo sapiens
  CDR3 for beta chain variable domain of TCR clone 70959 (TRBV20-1, TRBJ2-7)
CSAKDRKGAYEQYF

SEQ ID NO: 141919 - protein, 14 aa, Homo sapiens
  CDR3 for alpha chain variable domain of TCR clone 70960 (TRAV1-2, TRAJ16)
CAVNRFSDGQELLF

SEQ ID NO: 141920 - protein, 13 aa, Homo sapiens
  CDR3 for beta chain variable domain of TCR clone 70960 (TRBV27, TRBJ1-1)
CASSLSIGAEAFF

SEQ ID NO: 141921 - protein, 14 aa, Homo sapiens
  CDR3 for alpha chain variable domain of TCR clone 70961 (TRAV17, TRAJ16)
CATADFSDGQKLLF

SEQ ID NO: 141922 - protein, 15 aa, Homo sapiens
  CDR3 for beta chain variable domain of TCR clone 70961 (TRBV18, TRBJ2-1)
CASSPPSASYNEQFY

SEQ ID NO: 141923 - protein, 14 aa, Homo sapiens
  CDR3 for alpha chain variable domain of TCR clone 70962 (TRAV8-3, TRAJ27)
CAVGAAGGYNKLIF

SEQ ID NO: 141924 - protein, 14 aa, Homo sapiens
  CDR3 for beta chain variable domain of TCR clone 70962 (TRBV7-6, TRBJ2-3)
CASSLGTVTDTQYF

SEQ ID NO: 141925 - protein, 14 aa, Homo sapiens
  CDR3 for alpha chain variable domain of TCR clone 70963 (TRAV13-1, TRAJ44)
CAAKATGTASKLTF

SEQ ID NO: 141926 - protein, 13 aa, Homo sapiens
  CDR3 for beta chain variable domain of TCR clone 70963 (TRBV5-5, TRBJ2-2)
CASTLGGAGELFF

SEQ ID NO: 141927 - protein, 15 aa, Homo sapiens
  CDR3 for alpha chain variable domain of TCR clone 70964 (TRAV26-1, TRAJ22)
CIVRVSFWFCKATDL

SEQ ID NO: 141928 - protein, 17 aa, Homo sapiens
  CDR3 for beta chain variable domain of TCR clone 70964 (TRBV28, TRBJ2-5)
CASSTPEGDALQETQYF

SEQ ID NO: 141929 - protein, 14 aa, Homo sapiens
  CDR3 for alpha chain variable domain of TCR clone 70965 (TRAV12-2, TRAJ5)
CAVNRSTGRRALTF

SEQ ID NO: 141930 - protein, 11 aa, Homo sapiens
  CDR3 for beta chain variable domain of TCR clone 70965 (TRBV29-1, TRBJ2-5)
CSEDRTGSQYF

SEQ ID NO: 141931 - protein, 17 aa, Homo sapiens
  CDR3 for alpha chain variable domain of TCR clone 70966 (TRAV3, TRAJ6)
CAVRGGPRAGGSYIPTF

SEQ ID NO: 141932 - protein, 18 aa, Homo sapiens
  CDR3 for beta chain variable domain of TCR clone 70966 (TRBV7-3, TRBJ2-3)
CASSSTGTYPGSTDTQYF

SEQ ID NO: 141933 - protein, 14 aa, Homo sapiens
  CDR3 for alpha chain variable domain of TCR clone 70967 (TRAV35, TRAJ38)
CAGSNAGNNRKLIW

SEQ ID NO: 141934 - protein, 12 aa, Homo sapiens
  CDR3 for beta chain variable domain of TCR clone 70967 (TRBV19, TRBJ2-7)
CASTDRGYEQYF

SEQ ID NO: 141935 - protein, 13 aa, Homo sapiens
  CDR3 for alpha chain variable domain of TCR clone 70968 (TRAV3, TRAJ20)
FAVRSLNDYKLSF

SEQ ID NO: 141936 - protein, 13 aa, Homo sapiens
  CDR3 for beta chain variable domain of TCR clone 70968 (TRBV6-1, TRBJ2-1)
CAGMDPTNNEQFF

SEQ ID NO: 141937 - protein, 13 aa, Homo sapiens
  CDR3 for alpha chain variable domain of TCR clone 70969 (TRAV8-6, TRAJ49)
CAVITNTGNRFYF

SEQ ID NO: 141938 - protein, 15 aa, Homo sapiens
  CDR3 for beta chain variable domain of TCR clone 70969 (TRBV9, TRBJ1-6)
CASSVAGTGDSTLHF

SEQ ID NO: 141939 - protein, 19 aa, Homo sapiens
  CDR3 for alpha chain variable domain of TCR clone 70970 (TRAV2, TRAJ20)
ILQVREADAAVYRDCMLSF

SEQ ID NO: 141940 - protein, 16 aa, Homo sapiens
  CDR3 for beta chain variable domain of TCR clone 70970 (TRBV20-1, TRBJ1-4)
CSAPGQGLLTNEKLFF

SEQ ID NO: 141941 - protein, 16 aa, Homo sapiens
  CDR3 for alpha chain variable domain of TCR clone 70971 (TRAV26-1, TRAJ48)
RIVREPPNFGNEKLTF

SEQ ID NO: 141942 - protein, 12 aa, Homo sapiens
  CDR3 for beta chain variable domain of TCR clone 70971 (TRBV19, TRBJ2-1)
CASSRQGAEQFF

SEQ ID NO: 141943 - protein, 13 aa, Homo sapiens
  CDR3 for alpha chain variable domain of TCR clone 70972 (TRAV17, TRAJ29)
CARDAFRKHTSCL

SEQ ID NO: 141944 - protein, 13 aa, Homo sapiens
  CDR3 for beta chain variable domain of TCR clone 70972 (TRBV5-7, TRBJ2-6)
CASTSSGANVLTF

SEQ ID NO: 141945 - protein, 15 aa, Homo sapiens
  CDR3 for alpha chain variable domain of TCR clone 70973 (TRAV26-1, TRAJ29)
CIVRVEGSGNTPLVF

SEQ ID NO: 141946 - protein, 14 aa, Homo sapiens
  CDR3 for beta chain variable domain of TCR clone 70973 (TRBV19, TRBJ1-5)
CASRAPDSFLSQHF

SEQ ID NO: 141947 - protein, 17 aa, Homo sapiens
  CDR3 for alpha chain variable domain of TCR clone 70974 (TRAV26-2, TRAJ42)
CILRDVGYGGSQGNLIF

SEQ ID NO: 141948 - protein, 16 aa, Homo sapiens
  CDR3 for beta chain variable domain of TCR clone 70974 (TRBV12-4, TRBJ2-7)
CASSLIGGTGTYEQYL

SEQ ID NO: 141949 - protein, 16 aa, Homo sapiens
  CDR3 for alpha chain variable domain of TCR clone 70975 (TRAV21, TRAJ52)
CAVTNAGGTSYGKLTF

SEQ ID NO: 141950 - protein, 13 aa, Homo sapiens
  CDR3 for beta chain variable domain of TCR clone 70975 (TRBV20-1, TRBJ2-3)
CSARLAGKDTQYF

SEQ ID NO: 141951 - protein, 13 aa, Homo sapiens
  CDR3 for alpha chain variable domain of TCR clone 70976 (TRAV16, TRAJ5)
CALTNTGRRALTF

SEQ ID NO: 141952 - protein, 14 aa, Homo sapiens
  CDR3 for beta chain variable domain of TCR clone 70976 (TRBV19, TRBJ2-1)
CASPTFVLSGEQFF

SEQ ID NO: 141953 - protein, 14 aa, Homo sapiens
  CDR3 for alpha chain variable domain of TCR clone 70977 (TRAV35, TRAJ38)
CAGSNAVNNRKLIW

SEQ ID NO: 141954 - protein, 12 aa, Homo sapiens
  CDR3 for beta chain variable domain of TCR clone 70977 (TRBV19, TRBJ2-7)
CASTDRGYEQYF

SEQ ID NO: 141955 - protein, 10 aa, Homo sapiens
  CDR3 for alpha chain variable domain of TCR clone 70978 (TRAV1-2, TRAJ31)
CVSEDARLMF

SEQ ID NO: 141956 - protein, 15 aa, Homo sapiens
  CDR3 for beta chain variable domain of TCR clone 70978 (TRBV11-3, TRBJ2-3)
YASLKDGREGDTQYF

SEQ ID NO: 141957 - protein, 14 aa, Homo sapiens
  CDR3 for alpha chain variable domain of TCR clone 70979 (TRAV8-2, TRAJ4)
CVVSPSGGYNKLIF

SEQ ID NO: 141958 - protein, 17 aa, Homo sapiens
  CDR3 for beta chain variable domain of TCR clone 70979 (TRBV7-8, TRBJ2-6)
CASSAGTGGAGANVLTF

SEQ ID NO: 141959 - protein, 19 aa, Homo sapiens
  CDR3 for alpha chain variable domain of TCR clone 70980 (TRAV26-1, TRAJ52)
CIVRAHRNVGGTSYGKLTF

SEQ ID NO: 141960 - protein, 15 aa, Homo sapiens
  CDR3 for beta chain variable domain of TCR clone 70980 (TRBV12-4, TRBJ2-5)
CASSPPTGLQETQYF

SEQ ID NO: 141961 - protein, 14 aa, Homo sapiens
  CDR3 for alpha chain variable domain of TCR clone 70981 (TRAV12-2, TRAJ40)
CAVKIPSGAYKYIF

SEQ ID NO: 141962 - protein, 15 aa, Homo sapiens
  CDR3 for beta chain variable domain of TCR clone 70981 (TRBV20-1, TRBJ1-4)
CSARREWGVNEKLFF

SEQ ID NO: 141963 - protein, 13 aa, Homo sapiens
  CDR3 for alpha chain variable domain of TCR clone 70982 (TRAV17, TRAJ7)
CATDNYGNNRLAF

SEQ ID NO: 141964 - protein, 14 aa, Homo sapiens
  CDR3 for beta chain variable domain of TCR clone 70982 (TRBV12-4, TRBJ1-2)
CASSFVGTAYGYTF

SEQ ID NO: 141965 - protein, 13 aa, Homo sapiens
  CDR3 for alpha chain variable domain of TCR clone 70983 (TRAV13-1, TRAJ37)
CAARSGNTGKLIF

SEQ ID NO: 141966 - protein, 15 aa, Homo sapiens
  CDR3 for beta chain variable domain of TCR clone 70983 (TRBV20-1, TRBJ2-7)
CSARDRVSGMDEQYF

SEQ ID NO: 141967 - protein, 12 aa, Homo sapiens
  CDR3 for alpha chain variable domain of TCR clone 70984 (TRAV21, TRAJ3)
CCFSSSASKIIF

SEQ ID NO: 141968 - protein, 16 aa, Homo sapiens
  CDR3 for beta chain variable domain of TCR clone 70984 (TRBV19, TRBJ2-1)
CASSKAGPSSYNEQFF

SEQ ID NO: 141969 - protein, 14 aa, Homo sapiens
  CDR3 for alpha chain variable domain of TCR clone 70985 (TRAV23/DV6, TRAJ4)
FAAPSSGGYNKLIF

SEQ ID NO: 141970 - protein, 16 aa, Homo sapiens
  CDR3 for beta chain variable domain of TCR clone 70985 (TRBV19, TRBJ1-1)
CASRFGGPVTGTEAFF

SEQ ID NO: 141971 - protein, 17 aa, Homo sapiens
  CDR3 for alpha chain variable domain of TCR clone 70986 (TRAV8-1, TRAJ43)
CAVTNDMRFGAGARLTV

SEQ ID NO: 141972 - protein, 17 aa, Homo sapiens
  CDR3 for beta chain variable domain of TCR clone 70986 (TRBV5-4, TRBJ2-1)
CASSSAGGRGPYNEQFF

SEQ ID NO: 141973 - protein, 15 aa, Homo sapiens
  CDR3 for alpha chain variable domain of TCR clone 70987 (TRAV27, TRAJ38)
CAARRNAGNNRKLIW

SEQ ID NO: 141974 - protein, 13 aa, Homo sapiens
  CDR3 for beta chain variable domain of TCR clone 70987 (TRBV28, TRBJ2-5)
CAGVGRGEETQYF

SEQ ID NO: 141975 - protein, 17 aa, Homo sapiens
  CDR3 for alpha chain variable domain of TCR clone 70988 (TRAV16, TRAJ58)
CITVLSNGENSGSRLTF

SEQ ID NO: 141976 - protein, 17 aa, Homo sapiens
  CDR3 for beta chain variable domain of TCR clone 70988 (TRBV18, TRBJ2-1)
CASSKGLSGGADNEQFF

SEQ ID NO: 141977 - protein, 23 aa, Homo sapiens
  CDR3 for alpha chain variable domain of TCR clone 70989 (TRAV17, TRAJ9)
CATTGGFKTILEQEQDYLLKQIS

SEQ ID NO: 141978 - protein, 14 aa, Homo sapiens
  CDR3 for beta chain variable domain of TCR clone 70989 (TRBV7-9, TRBJ2-2)
CASSGLADTGELFF

SEQ ID NO: 141979 - protein, 12 aa, Homo sapiens
  CDR3 for alpha chain variable domain of TCR clone 70990 (TRAV2, TRAJ10)
CASTGGGNKLTF

SEQ ID NO: 141980 - protein, 13 aa, Homo sapiens
  CDR3 for beta chain variable domain of TCR clone 70990 (TRBV7-9, TRBJ1-2)
CASSLKQNYGYTF

SEQ ID NO: 141981 - protein, 13 aa, Homo sapiens
  CDR3 for alpha chain variable domain of TCR clone 70991 (TRAV12-3, TRAJ13)
CAMTSGGYQKVTF

SEQ ID NO: 141982 - protein, 14 aa, Homo sapiens
  CDR3 for beta chain variable domain of TCR clone 70991 (TRBV19, TRBJ2-1)
CASPTFVLSGEQFF

SEQ ID NO: 141983 - protein, 13 aa, Homo sapiens
  CDR3 for alpha chain variable domain of TCR clone 70992 (TRAV8-3, TRAJ4)
WVVYSGGYNKLIF

SEQ ID NO: 141984 - protein, 16 aa, Homo sapiens
  CDR3 for beta chain variable domain of TCR clone 70992 (TRBV7-8, TRBJ2-3)
CASSTEGQRETDTQYF

SEQ ID NO: 141985 - protein, 12 aa, Homo sapiens
  CDR3 for alpha chain variable domain of TCR clone 70993 (TRAV25, TRAJ11)
CAGASGYSTLTF

SEQ ID NO: 141986 - protein, 14 aa, Homo sapiens
  CDR3 for beta chain variable domain of TCR clone 70993 (TRBV5-8, TRBJ2-3)
CASSLGQGTDTRYF

SEQ ID NO: 141987 - protein, 16 aa, Homo sapiens
  CDR3 for alpha chain variable domain of TCR clone 70994 (TRAV12-3, TRAJ53)
CAMSPGSGGSNYKLTF

SEQ ID NO: 141988 - protein, 15 aa, Homo sapiens
  CDR3 for beta chain variable domain of TCR clone 70994 (TRBV7-9, TRBJ1-4)
CASSARTGGNEKLFF

SEQ ID NO: 141989 - protein, 13 aa, Homo sapiens
  CDR3 for alpha chain variable domain of TCR clone 70995 (TRAV12-2, TRAJ39)
CAVNNNTGNMLTF

SEQ ID NO: 141990 - protein, 13 aa, Homo sapiens
  CDR3 for beta chain variable domain of TCR clone 70995 (TRBV2, TRBJ1-5)
CATAGPGNQPQHF

SEQ ID NO: 141991 - protein, 15 aa, Homo sapiens
  CDR3 for alpha chain variable domain of TCR clone 70996 (TRAV8-3, TRAJ11)
CAVGLLNSGYSTLTF

SEQ ID NO: 141992 - protein, 17 aa, Homo sapiens
  CDR3 for beta chain variable domain of TCR clone 70996 (TRBV7-3, TRBJ2-3)
CASSPRGQGYGTDTQYF

SEQ ID NO: 141993 - protein, 12 aa, Homo sapiens
  CDR3 for alpha chain variable domain of TCR clone 70997 (TRAV27, TRAJ37)
CADSGSTGKLIF

SEQ ID NO: 141994 - protein, 18 aa, Homo sapiens
  CDR3 for beta chain variable domain of TCR clone 70997 (TRBV7-9, TRBJ1-1)
CASSKPWYTMGMNTEAFF

SEQ ID NO: 141995 - protein, 13 aa, Homo sapiens
  CDR3 for alpha chain variable domain of TCR clone 70998 (TRAV13-2, TRAJ48)
CAEMDYGNEKLTF

SEQ ID NO: 141996 - protein, 15 aa, Homo sapiens
  CDR3 for beta chain variable domain of TCR clone 70998 (TRBV7-9, TRBJ1-6)
CASSSPGRGNSPLHF

SEQ ID NO: 141997 - protein, 15 aa, Homo sapiens
  CDR3 for alpha chain variable domain of TCR clone 70999 (TRAV8-2, TRAJ15)
CVVTMGNQAGTALIF

SEQ ID NO: 141998 - protein, 17 aa, Homo sapiens
  CDR3 for beta chain variable domain of TCR clone 70999 (TRBV11-2, TRBJ2-1)
CASSLYPPGVEYNEQFF

SEQ ID NO: 141999 - protein, 13 aa, Homo sapiens
  CDR3 for alpha chain variable domain of TCR clone 71000 (TRAV38-2/DV8, TRAJ34)
CAYRNYNTDKLIF

SEQ ID NO: 142000 - protein, 15 aa, Homo sapiens
  CDR3 for beta chain variable domain of TCR clone 71000 (TRBV20-1, TRBJ2-5)
CSAEGTGGLQEAQYF

SEQ ID NO: 142001 - protein, 15 aa, Homo sapiens
  CDR3 for alpha chain variable domain of TCR clone 71001 (TRAV14/DV4, TRAJ48)
CAMREGNAGNEKLTF

SEQ ID NO: 142002 - protein, 14 aa, Homo sapiens
  CDR3 for beta chain variable domain of TCR clone 71001 (TRBV28, TRBJ1-5)
FASSGQALYQPQHF

SEQ ID NO: 142003 - protein, 14 aa, Homo sapiens
  CDR3 for alpha chain variable domain of TCR clone 71002 (TRAV12-1, TRAJ17)
CVVNYKAAGNKLTF

SEQ ID NO: 142004 - protein, 15 aa, Homo sapiens
  CDR3 for beta chain variable domain of TCR clone 71002 (TRBV7-9, TRBJ2-7)
CISVSEAPPMNEQYF

SEQ ID NO: 142005 - protein, 13 aa, Homo sapiens
  CDR3 for alpha chain variable domain of TCR clone 71003 (TRAV20, TRAJ49)
CAVQARTGNKFYF

SEQ ID NO: 142006 - protein, 14 aa, Homo sapiens
  CDR3 for beta chain variable domain of TCR clone 71003 (TRBV7-2, TRBJ2-7)
CASSPKTSFYEQYF

SEQ ID NO: 142007 - protein, 15 aa, Homo sapiens
  CDR3 for alpha chain variable domain of TCR clone 71004 (TRAV26-1, TRAJ44)
CIVRANTGTASKLTF

SEQ ID NO: 142008 - protein, 12 aa, Homo sapiens
  CDR3 for beta chain variable domain of TCR clone 71004 (TRBV12-4, TRBJ2-7)
CASSLGGYEQYF

SEQ ID NO: 142009 - protein, 14 aa, Homo sapiens
  CDR3 for alpha chain variable domain of TCR clone 71005 (TRAV12-3, TRAJ12)
CAMSEVDSSYRLIF

SEQ ID NO: 142010 - protein, 12 aa, Homo sapiens
  CDR3 for beta chain variable domain of TCR clone 71005 (TRBV18, TRBJ1-4)
CASSPSREKLFF

SEQ ID NO: 142011 - protein, 14 aa, Homo sapiens
  CDR3 for alpha chain variable domain of TCR clone 71006 (TRAV1-2, TRAJ8)
CAVREDTGFQKLVF

SEQ ID NO: 142012 - protein, 18 aa, Homo sapiens
  CDR3 for beta chain variable domain of TCR clone 71006 (TRBV20-1, TRBJ2-6)
CSAETTPTRGSGANVLTF

SEQ ID NO: 142013 - protein, 14 aa, Homo sapiens
  CDR3 for alpha chain variable domain of TCR clone 71007 (TRAV26-1, TRAJ39)
CIVRGSRAGNMLTF

SEQ ID NO: 142014 - protein, 12 aa, Homo sapiens
  CDR3 for beta chain variable domain of TCR clone 71007 (TRBV7-3, TRBJ2-1)
CASSFINNEQFF

SEQ ID NO: 142015 - protein, 14 aa, Homo sapiens
  CDR3 for alpha chain variable domain of TCR clone 71008 (TRAV12-1, TRAJ17)
CVVNYKAAANKLTF

SEQ ID NO: 142016 - protein, 17 aa, Homo sapiens
  CDR3 for beta chain variable domain of TCR clone 71008 (TRBV20-1, TRBJ2-1)
CSASSSGLAGSYNEQFF

SEQ ID NO: 142017 - protein, 14 aa, Homo sapiens
  CDR3 for alpha chain variable domain of TCR clone 71009 (TRAV12-2, TRAJ13)
CAVKKTGGYQKVTF

SEQ ID NO: 142018 - protein, 13 aa, Homo sapiens
  CDR3 for beta chain variable domain of TCR clone 71009 (TRBV27, TRBJ2-1)
CASRTLGVGEQFF

SEQ ID NO: 142019 - protein, 13 aa, Homo sapiens
  CDR3 for alpha chain variable domain of TCR clone 71010 (TRAV3, TRAJ4)
CAVRDGGYNKLIF

SEQ ID NO: 142020 - protein, 15 aa, Homo sapiens
  CDR3 for beta chain variable domain of TCR clone 71010 (TRBV5-1, TRBJ2-1)
CASSPPRAAYNEQFF

SEQ ID NO: 142021 - protein, 13 aa, Homo sapiens
  CDR3 for alpha chain variable domain of TCR clone 71011 (TRAV1-2, TRAJ9)
CAALNTGGFKTIF

SEQ ID NO: 142022 - protein, 14 aa, Homo sapiens
  CDR3 for beta chain variable domain of TCR clone 71011 (TRBV11-2, TRBJ2-5)
CASSRTGGIETQYF

SEQ ID NO: 142023 - protein, 11 aa, Homo sapiens
  CDR3 for alpha chain variable domain of TCR clone 71012 (TRAV2, TRAJ13)
CASWGYQKVTF

SEQ ID NO: 142024 - protein, 16 aa, Homo sapiens
  CDR3 for beta chain variable domain of TCR clone 71012 (TRBV19, TRBJ2-1)
CASSKAGPSSYNEQFF

SEQ ID NO: 142025 - protein, 12 aa, Homo sapiens
  CDR3 for alpha chain variable domain of TCR clone 71013 (TRAV16, TRAJ26)
FALRSYGQNFVF

SEQ ID NO: 142026 - protein, 14 aa, Homo sapiens
  CDR3 for beta chain variable domain of TCR clone 71013 (TRBV10-3, TRBJ2-1)
CAISSDLAYNEQFF

SEQ ID NO: 142027 - protein, 18 aa, Homo sapiens
  CDR3 for alpha chain variable domain of TCR clone 71014 (TRAV12-3, TRAJ52)
CAMSVGGAGGTSYGKLTF

SEQ ID NO: 142028 - protein, 20 aa, Homo sapiens
  CDR3 for beta chain variable domain of TCR clone 71014 (TRBV7-8, TRBJ2-2)
CASSHLFPGPTIHITGELFS

SEQ ID NO: 142029 - protein, 14 aa, Homo sapiens
  CDR3 for alpha chain variable domain of TCR clone 71015 (TRAV12-3, TRAJ10)
SHLPLTGGGNKLTF

SEQ ID NO: 142030 - protein, 13 aa, Homo sapiens
  CDR3 for beta chain variable domain of TCR clone 71015 (TRBV3-1, TRBJ1-1)
CASSQLQGAEAFF

SEQ ID NO: 142031 - protein, 15 aa, Homo sapiens
  CDR3 for alpha chain variable domain of TCR clone 71016 (TRAV8-3, TRAJ15)
CAVGAPNQAGTTLIF

SEQ ID NO: 142032 - protein, 14 aa, Homo sapiens
  CDR3 for beta chain variable domain of TCR clone 71016 (TRBV20-1, TRBJ2-1)
RSPNDEASYNEQFF

SEQ ID NO: 142033 - protein, 23 aa, Homo sapiens
  CDR3 for alpha chain variable domain of TCR clone 71017 (TRAV30, TRAJ43)
CTLRPPSSVTQEPTSAALSDMRF

SEQ ID NO: 142034 - protein, 17 aa, Homo sapiens
  CDR3 for beta chain variable domain of TCR clone 71017 (TRBV24-1, TRBJ2-4)
CATSDAEARGVRNIQYF

SEQ ID NO: 142035 - protein, 14 aa, Homo sapiens
  CDR3 for alpha chain variable domain of TCR clone 71018 (TRAV12-2, TRAJ10)
CAVKIPSGTNKLTF

SEQ ID NO: 142036 - protein, 14 aa, Homo sapiens
  CDR3 for beta chain variable domain of TCR clone 71018 (TRBV4-1, TRBJ2-2)
CASSQAVNTGELFF

SEQ ID NO: 142037 - protein, 13 aa, Homo sapiens
  CDR3 for alpha chain variable domain of TCR clone 71019 (TRAV8-6, TRAJ49)
CAVITNTVNQFYF

SEQ ID NO: 142038 - protein, 14 aa, Homo sapiens
  CDR3 for beta chain variable domain of TCR clone 71019 (TRBV5-1, TRBJ2-7)
CASSRGESLYEQYF

SEQ ID NO: 142039 - protein, 13 aa, Homo sapiens
  CDR3 for alpha chain variable domain of TCR clone 71020 (TRAV3, TRAJ43)
RAVKARNNNDMRF

SEQ ID NO: 142040 - protein, 16 aa, Homo sapiens
  CDR3 for beta chain variable domain of TCR clone 71020 (TRBV7-9, TRBJ2-3)
CASSFSVAGGTDTQYF

SEQ ID NO: 142041 - protein, 13 aa, Homo sapiens
  CDR3 for alpha chain variable domain of TCR clone 71021 (TRAV17, TRAJ9)
CATDYTGGFKTIF

SEQ ID NO: 142042 - protein, 14 aa, Homo sapiens
  CDR3 for beta chain variable domain of TCR clone 71021 (TRBV4-1, TRBJ2-2)
CASSQAVNTGELFF

SEQ ID NO: 142043 - protein, 12 aa, Homo sapiens
  CDR3 for alpha chain variable domain of TCR clone 71022 (TRAV30, TRAJ20)
CCTESNDYKLSF

SEQ ID NO: 142044 - protein, 15 aa, Homo sapiens
  CDR3 for beta chain variable domain of TCR clone 71022 (TRBV20-1, TRBJ2-7)
CSARDRVSGMDEQYF

SEQ ID NO: 142045 - protein, 14 aa, Homo sapiens
  CDR3 for alpha chain variable domain of TCR clone 71023 (TRAV1-2, TRAJ16)
CAVSRFSDGQKLLF

SEQ ID NO: 142046 - protein, 16 aa, Homo sapiens
  CDR3 for beta chain variable domain of TCR clone 71023 (TRBV12-5, TRBJ2-5)
CASGPRTSGNQETQYF

SEQ ID NO: 142047 - protein, 14 aa, Homo sapiens
  CDR3 for alpha chain variable domain of TCR clone 71024 (TRAV1-2, TRAJ16)
CAVNRFSDGQKLLF

SEQ ID NO: 142048 - protein, 15 aa, Homo sapiens
  CDR3 for beta chain variable domain of TCR clone 71024 (TRBV7-9, TRBJ1-6)
CASSSPGRGDSPIHF

SEQ ID NO: 142049 - protein, 15 aa, Homo sapiens
  CDR3 for alpha chain variable domain of TCR clone 71025 (TRAV12-3, TRAJ6)
CAMSATTGGSYIPTF

SEQ ID NO: 142050 - protein, 12 aa, Homo sapiens
  CDR3 for beta chain variable domain of TCR clone 71025 (TRBV7-8, TRBJ2-7)
CASSLGDREQYF

SEQ ID NO: 142051 - protein, 18 aa, Homo sapiens
  CDR3 for alpha chain variable domain of TCR clone 71026 (TRAV8-3, TRAJ6)
CAVGAEHQEEATYLHLEE

SEQ ID NO: 142052 - protein, 14 aa, Homo sapiens
  CDR3 for beta chain variable domain of TCR clone 71026 (TRBV6-6, TRBJ2-7)
CASSDSGAGHEQYF

SEQ ID NO: 142053 - protein, 14 aa, Homo sapiens
  CDR3 for alpha chain variable domain of TCR clone 71027 (TRAV12-2, TRAJ44)
RAVNPAGTASKLTF

SEQ ID NO: 142054 - protein, 13 aa, Homo sapiens
  CDR3 for beta chain variable domain of TCR clone 71027 (TRBV20-1, TRBJ1-6)
CSAPLGVGSPLHF

SEQ ID NO: 142055 - protein, 12 aa, Homo sapiens
  CDR3 for alpha chain variable domain of TCR clone 71028 (TRAV12-3, TRAJ17)
CAMTLTGNKLTF

SEQ ID NO: 142056 - protein, 15 aa, Homo sapiens
  CDR3 for beta chain variable domain of TCR clone 71028 (TRBV6-5, TRBJ2-7)
CASSRTSGFSYEQYF

SEQ ID NO: 142057 - protein, 13 aa, Homo sapiens
  CDR3 for alpha chain variable domain of TCR clone 71029 (TRAV2, TRAJ40)
CAVVTSGTYKYIF

SEQ ID NO: 142058 - protein, 13 aa, Homo sapiens
  CDR3 for beta chain variable domain of TCR clone 71029 (TRBV7-6, TRBJ1-2)
CASSLVADYGYTF

SEQ ID NO: 142059 - protein, 14 aa, Homo sapiens
  CDR3 for alpha chain variable domain of TCR clone 71030 (TRAV13-1, TRAJ6)
CAASNGGGSYIPTF

SEQ ID NO: 142060 - protein, 13 aa, Homo sapiens
  CDR3 for beta chain variable domain of TCR clone 71030 (TRBV19, TRBJ2-1)
CATSRGVYNEQFF

SEQ ID NO: 142061 - protein, 10 aa, Homo sapiens
  CDR3 for alpha chain variable domain of TCR clone 71031 (TRAV12-3, TRAJ49)
CAMNDDQFYF

SEQ ID NO: 142062 - protein, 18 aa, Homo sapiens
  CDR3 for beta chain variable domain of TCR clone 71031 (TRBV12-4, TRBJ2-2)
CASSLVAGTRGRTGELFF

SEQ ID NO: 142063 - protein, 13 aa, Homo sapiens
  CDR3 for alpha chain variable domain of TCR clone 71032 (TRAV12-3, TRAJ21)
CAPGPHNFNKFYF

SEQ ID NO: 142064 - protein, 13 aa, Homo sapiens
  CDR3 for beta chain variable domain of TCR clone 71032 (TRBV4-2, TRBJ1-1)
CASSQAGNIEAFF

SEQ ID NO: 142065 - protein, 13 aa, Homo sapiens
  CDR3 for alpha chain variable domain of TCR clone 71033 (TRAV21, TRAJ48)
CAEMDFGNEKLTF

SEQ ID NO: 142066 - protein, 12 aa, Homo sapiens
  CDR3 for beta chain variable domain of TCR clone 71033 (TRBV5-1, TRBJ1-2)
CASSQDTYGYTF

SEQ ID NO: 142067 - protein, 14 aa, Homo sapiens
  CDR3 for alpha chain variable domain of TCR clone 71034 (TRAV27, TRAJ36)
CAGPPKRGTNNLFF

SEQ ID NO: 142068 - protein, 15 aa, Homo sapiens
  CDR3 for beta chain variable domain of TCR clone 71034 (TRBV18, TRBJ2-7)
CASSPASTPNYEQYF

SEQ ID NO: 142069 - protein, 14 aa, Homo sapiens
  CDR3 for alpha chain variable domain of TCR clone 71035 (TRAV12-1, TRAJ23)
CVVIVYNHGGKLIF

SEQ ID NO: 142070 - protein, 15 aa, Homo sapiens
  CDR3 for beta chain variable domain of TCR clone 71035 (TRBV20-1, TRBJ1-5)
CSAKPPGQGPQPQHF

SEQ ID NO: 142071 - protein, 13 aa, Homo sapiens
  CDR3 for alpha chain variable domain of TCR clone 71036 (TRAV21, TRAJ27)
CAARPGNAGKSTF

SEQ ID NO: 142072 - protein, 20 aa, Homo sapiens
  CDR3 for beta chain variable domain of TCR clone 71036 (TRBV7-8, TRBJ2-2)
WASSHLFPGPTIHITGELFF

SEQ ID NO: 142073 - protein, 12 aa, Homo sapiens
  CDR3 for alpha chain variable domain of TCR clone 71037 (TRAV16, TRAJ56)
CAPTGANSKLTF

SEQ ID NO: 142074 - protein, 17 aa, Homo sapiens
  CDR3 for beta chain variable domain of TCR clone 71037 (TRBV27, TRBJ2-6)
CASSLTGFASGANVLNF

SEQ ID NO: 142075 - protein, 18 aa, Homo sapiens
  CDR3 for alpha chain variable domain of TCR clone 71038 (TRAV12-3, TRAJ52)
CAMSVGGAGGTSYGKLTF

SEQ ID NO: 142076 - protein, 14 aa, Homo sapiens
  CDR3 for beta chain variable domain of TCR clone 71038 (TRBV19, TRBJ2-7)
CASTVQGRPYEQYF

SEQ ID NO: 142077 - protein, 14 aa, Homo sapiens
  CDR3 for alpha chain variable domain of TCR clone 71039 (TRAV9-2, TRAJ39)
CALYIYNAGNMLTF

SEQ ID NO: 142078 - protein, 15 aa, Homo sapiens
  CDR3 for beta chain variable domain of TCR clone 71039 (TRBV7-9, TRBJ2-2)
CASGPLDTFPGELFF

SEQ ID NO: 142079 - protein, 16 aa, Homo sapiens
  CDR3 for alpha chain variable domain of TCR clone 71040 (TRAV3, TRAJ18)
CAVRDGRGSTLGRLYF

SEQ ID NO: 142080 - protein, 14 aa, Homo sapiens
  CDR3 for beta chain variable domain of TCR clone 71040 (TRBV7-2, TRBJ1-1)
CASSFLTGTTEAFF

SEQ ID NO: 142081 - protein, 14 aa, Homo sapiens
  CDR3 for alpha chain variable domain of TCR clone 71041 (TRAV1-2, TRAJ16)
CAVNRFSDGQELLF

SEQ ID NO: 142082 - protein, 16 aa, Homo sapiens
  CDR3 for beta chain variable domain of TCR clone 71041 (TRBV19, TRBJ2-1)
CASSEILAGDGNEQFF

SEQ ID NO: 142083 - protein, 13 aa, Homo sapiens
  CDR3 for alpha chain variable domain of TCR clone 71042 (TRAV25, TRAJ54)
CAGTIQGVQKLVF

SEQ ID NO: 142084 - protein, 15 aa, Homo sapiens
  CDR3 for beta chain variable domain of TCR clone 71042 (TRBV19, TRBJ1-5)
CASSILTGENQPQHF

SEQ ID NO: 142085 - protein, 14 aa, Homo sapiens
  CDR3 for alpha chain variable domain of TCR clone 71043 (TRAV12-1, TRAJ34)
CVVNLDYNTDKLIF

SEQ ID NO: 142086 - protein, 14 aa, Homo sapiens
  CDR3 for beta chain variable domain of TCR clone 71043 (TRBV19, TRBJ2-1)
CASPTFVLSGEQFF

SEQ ID NO: 142087 - protein, 15 aa, Homo sapiens
  CDR3 for alpha chain variable domain of TCR clone 71044 (TRAV26-1, TRAJ44)
CIVRANTGTASKLTF

SEQ ID NO: 142088 - protein, 16 aa, Homo sapiens
  CDR3 for beta chain variable domain of TCR clone 71044 (TRBV7-7, TRBJ2-1)
CASSLTSGTSYNEQFF

SEQ ID NO: 142089 - protein, 14 aa, Homo sapiens
  CDR3 for alpha chain variable domain of TCR clone 71045 (TRAV17, TRAJ35)
CATDRPGCGNVLHC

SEQ ID NO: 142090 - protein, 19 aa, Homo sapiens
  CDR3 for beta chain variable domain of TCR clone 71045 (TRBV11-3, TRBJ2-2)
CASSTRPGAKTTNTGELFF

SEQ ID NO: 142091 - protein, 15 aa, Homo sapiens
  CDR3 for alpha chain variable domain of TCR clone 71046 (TRAV12-2, TRAJ53)
CAVNGGGGSNYKLTF

SEQ ID NO: 142092 - protein, 14 aa, Homo sapiens
  CDR3 for beta chain variable domain of TCR clone 71046 (TRBV12-5, TRBJ2-5)
CASGPRTHQETQYF

SEQ ID NO: 142093 - protein, 14 aa, Homo sapiens
  CDR3 for alpha chain variable domain of TCR clone 71047 (TRAV8-3, TRAJ4)
CAVGAAGGYNKVIF

SEQ ID NO: 142094 - protein, 15 aa, Homo sapiens
  CDR3 for beta chain variable domain of TCR clone 71047 (TRBV6-5, TRBJ2-1)
CASSYDAGAGNEQFF

SEQ ID NO: 142095 - protein, 23 aa, Homo sapiens
  CDR3 for alpha chain variable domain of TCR clone 71048 (TRAV3, TRAJ38)
CAVRDCLNAGNNHIQNPDPAVYH

SEQ ID NO: 142096 - protein, 19 aa, Homo sapiens
  CDR3 for beta chain variable domain of TCR clone 71048 (TRBV7-2, TRBJ2-3)
CASSFLSRNWGGGTDTQYF

SEQ ID NO: 142097 - protein, 14 aa, Homo sapiens
  CDR3 for alpha chain variable domain of TCR clone 71049 (TRAV30, TRAJ26)
CGTEVVSYGQNFVF

SEQ ID NO: 142098 - protein, 13 aa, Homo sapiens
  CDR3 for beta chain variable domain of TCR clone 71049 (TRBV10-3, TRBJ2-7)
CASKLAVNYEQYF

SEQ ID NO: 142099 - protein, 17 aa, Homo sapiens
  CDR3 for alpha chain variable domain of TCR clone 71050 (TRAV4, TRAJ18)
CLVVAAGRGSTLGRLYL

SEQ ID NO: 142100 - protein, 17 aa, Homo sapiens
  CDR3 for beta chain variable domain of TCR clone 71050 (TRBV28, TRBJ2-2)
CASSLATGMGDAGELFF

SEQ ID NO: 142101 - protein, 14 aa, Homo sapiens
  CDR3 for alpha chain variable domain of TCR clone 71051 (TRAV29/DV5, TRAJ36)
CAARRKTGANNLFF

SEQ ID NO: 142102 - protein, 13 aa, Homo sapiens
  CDR3 for beta chain variable domain of TCR clone 71051 (TRBV7-7, TRBJ2-3)
CASSLSRADTQDF

SEQ ID NO: 142103 - protein, 15 aa, Homo sapiens
  CDR3 for alpha chain variable domain of TCR clone 71052 (TRAV3, TRAJ32)
CAVSPYGGATNKLIF

SEQ ID NO: 142104 - protein, 13 aa, Homo sapiens
  CDR3 for beta chain variable domain of TCR clone 71052 (TRBV20-1, TRBJ2-7)
CSARPSTNYEQYF

SEQ ID NO: 142105 - protein, 14 aa, Homo sapiens
  CDR3 for alpha chain variable domain of TCR clone 71053 (TRAV35, TRAJ53)
CAGNSGGGNYKLTF

SEQ ID NO: 142106 - protein, 11 aa, Homo sapiens
  CDR3 for beta chain variable domain of TCR clone 71053 (TRBV4-1, TRBJ1-4)
CASRENEKLFF

SEQ ID NO: 142107 - protein, 10 aa, Homo sapiens
  CDR3 for alpha chain variable domain of TCR clone 71054 (TRAV16, TRAJ22)
SAMYLRKLTF

SEQ ID NO: 142108 - protein, 15 aa, Homo sapiens
  CDR3 for beta chain variable domain of TCR clone 71054 (TRBV7-9, TRBJ1-6)
CASSSPGRGNSPLHF

SEQ ID NO: 142109 - protein, 14 aa, Homo sapiens
  CDR3 for alpha chain variable domain of TCR clone 71055 (TRAV12-1, TRAJ17)
WVVNYKAAGNKLTF

SEQ ID NO: 142110 - protein, 14 aa, Homo sapiens
  CDR3 for beta chain variable domain of TCR clone 71055 (TRBV11-2, TRBJ1-5)
CASSLDRGRQPQHF

SEQ ID NO: 142111 - protein, 13 aa, Homo sapiens
  CDR3 for alpha chain variable domain of TCR clone 71056 (TRAV3, TRAJ31)
CAAREGNNARLMF

SEQ ID NO: 142112 - protein, 15 aa, Homo sapiens
  CDR3 for beta chain variable domain of TCR clone 71056 (TRBV6-1, TRBJ1-1)
CASRTPGQLNTEAFF

SEQ ID NO: 142113 - protein, 16 aa, Homo sapiens
  CDR3 for alpha chain variable domain of TCR clone 71057 (TRAV38-2/DV8, TRAJ57)
CAHRRRAQGGSEKLVF

SEQ ID NO: 142114 - protein, 13 aa, Homo sapiens
  CDR3 for beta chain variable domain of TCR clone 71057 (TRBV7-3, TRBJ1-1)
CASSQDWGAEAFF

SEQ ID NO: 142115 - protein, 14 aa, Homo sapiens
  CDR3 for alpha chain variable domain of TCR clone 71058 (TRAV2, TRAJ9)
CAVEDRSGGFKTIF

SEQ ID NO: 142116 - protein, 15 aa, Homo sapiens
  CDR3 for beta chain variable domain of TCR clone 71058 (TRBV19, TRBJ2-1)
CASSIVRGEGREQFF

SEQ ID NO: 142117 - protein, 21 aa, Homo sapiens
  CDR3 for alpha chain variable domain of TCR clone 71059 (TRAV29/DV5, TRAJ52)
CSVLLCSKREAGGTSYGKLTL

SEQ ID NO: 142118 - protein, 13 aa, Homo sapiens
  CDR3 for beta chain variable domain of TCR clone 71059 (TRBV27, TRBJ1-4)
CASSLMGDEKLFF

SEQ ID NO: 142119 - protein, 11 aa, Homo sapiens
  CDR3 for alpha chain variable domain of TCR clone 71060 (TRAV39, TRAJ49)
CALDISTQFYF

SEQ ID NO: 142120 - protein, 11 aa, Homo sapiens
  CDR3 for beta chain variable domain of TCR clone 71060 (TRBV7-8, TRBJ2-7)
CASSLSLEQYF

SEQ ID NO: 142121 - protein, 14 aa, Homo sapiens
  CDR3 for alpha chain variable domain of TCR clone 71061 (TRAV1-2, TRAJ8)
CAVREDTGFQKLVF

SEQ ID NO: 142122 - protein, 16 aa, Homo sapiens
  CDR3 for beta chain variable domain of TCR clone 71061 (TRBV29-1, TRBJ2-6)
CSVEDITYAGANVLTF

SEQ ID NO: 142123 - protein, 16 aa, Homo sapiens
  CDR3 for alpha chain variable domain of TCR clone 71062 (TRAV17, TRAJ52)
CAAGIIGGTSYGKLTF

SEQ ID NO: 142124 - protein, 12 aa, Homo sapiens
  CDR3 for beta chain variable domain of TCR clone 71062 (TRBV7-3, TRBJ2-1)
CASSFINNEQFF

SEQ ID NO: 142125 - protein, 13 aa, Homo sapiens
  CDR3 for alpha chain variable domain of TCR clone 71063 (TRAV38-1, TRAJ7)
CAFMMDGNNRLAF

SEQ ID NO: 142126 - protein, 12 aa, Homo sapiens
  CDR3 for beta chain variable domain of TCR clone 71063 (TRBV12-4, TRBJ2-5)
CASSSAQETQYF

SEQ ID NO: 142127 - protein, 11 aa, Homo sapiens
  CDR3 for alpha chain variable domain of TCR clone 71064 (TRAV3, TRAJ21)
CAVGNFNNFYF

SEQ ID NO: 142128 - protein, 13 aa, Homo sapiens
  CDR3 for beta chain variable domain of TCR clone 71064 (TRBV7-9, TRBJ1-2)
CASSLKQNYGYTF

SEQ ID NO: 142129 - protein, 11 aa, Homo sapiens
  CDR3 for alpha chain variable domain of TCR clone 71065 (TRAV21, TRAJ11)
CAVNGYSTLTF

SEQ ID NO: 142130 - protein, 15 aa, Homo sapiens
  CDR3 for beta chain variable domain of TCR clone 71065 (TRBV7-2, TRBJ1-2)
CASSPRAGWNYGYTF

SEQ ID NO: 142131 - protein, 23 aa, Homo sapiens
  CDR3 for alpha chain variable domain of TCR clone 71066 (TRAV26-1, TRAJ38)
CIADNAGNNHIQNPDPAGYQLRE

SEQ ID NO: 142132 - protein, 13 aa, Homo sapiens
  CDR3 for beta chain variable domain of TCR clone 71066 (TRBV20-1, TRBJ1-1)
CSARGGGNTEAFF

SEQ ID NO: 142133 - protein, 17 aa, Homo sapiens
  CDR3 for alpha chain variable domain of TCR clone 71067 (TRAV13-1, TRAJ52)
CAAGRNAGCTSYGKLTF

SEQ ID NO: 142134 - protein, 13 aa, Homo sapiens
  CDR3 for beta chain variable domain of TCR clone 71067 (TRBV7-2, TRBJ1-1)
CASNLKGAKVAFF

SEQ ID NO: 142135 - protein, 15 aa, Homo sapiens
  CDR3 for alpha chain variable domain of TCR clone 71068 (TRAV4, TRAJ42)
CLVGGYGGSQGNLIL

SEQ ID NO: 142136 - protein, 16 aa, Homo sapiens
  CDR3 for beta chain variable domain of TCR clone 71068 (TRBV27, TRBJ1-1)
CASSTRTGGVGTEAFF

SEQ ID NO: 142137 - protein, 20 aa, Homo sapiens
  CDR3 for alpha chain variable domain of TCR clone 71069 (TRAV12-1, TRAJ13)
CVVNKRGEFWGLPESYLWNW

SEQ ID NO: 142138 - protein, 17 aa, Homo sapiens
  CDR3 for beta chain variable domain of TCR clone 71069 (TRBV28, TRBJ2-5)
CASSTPEGDALQETQYF

SEQ ID NO: 142139 - protein, 14 aa, Homo sapiens
  CDR3 for alpha chain variable domain of TCR clone 71070 (TRAV13-1, TRAJ44)
CAAKATGTASKLTF

SEQ ID NO: 142140 - protein, 17 aa, Homo sapiens
  CDR3 for beta chain variable domain of TCR clone 71070 (TRBV7-3, TRBJ2-3)
RASSLMKRVRGADTQYF

SEQ ID NO: 142141 - protein, 13 aa, Homo sapiens
  CDR3 for alpha chain variable domain of TCR clone 71071 (TRAV2, TRAJ40)
CAVVTSGTYKYIF

SEQ ID NO: 142142 - protein, 16 aa, Homo sapiens
  CDR3 for beta chain variable domain of TCR clone 71071 (TRBV19, TRBJ2-2)
CASRSSGTGATGELFF

SEQ ID NO: 142143 - protein, 12 aa, Homo sapiens
  CDR3 for alpha chain variable domain of TCR clone 71072 (TRAV12-2, TRAJ9)
CAVYNGGFKTIF

SEQ ID NO: 142144 - protein, 13 aa, Homo sapiens
  CDR3 for beta chain variable domain of TCR clone 71072 (TRBV7-9, TRBJ1-2)
CASSLKQNYGYTF

SEQ ID NO: 142145 - protein, 15 aa, Homo sapiens
  CDR3 for alpha chain variable domain of TCR clone 71073 (TRAV8-3, TRAJ15)
CAVGAPNQAGTALIF

SEQ ID NO: 142146 - protein, 14 aa, Homo sapiens
  CDR3 for beta chain variable domain of TCR clone 71073 (TRBV20-1, TRBJ2-1)
CSPNDEASYNEQCF

SEQ ID NO: 142147 - protein, 14 aa, Homo sapiens
  CDR3 for alpha chain variable domain of TCR clone 71074 (TRAV12-3, TRAJ57)
CAMSAWGGSEKLVF

SEQ ID NO: 142148 - protein, 14 aa, Homo sapiens
  CDR3 for beta chain variable domain of TCR clone 71074 (TRBV18, TRBJ2-5)
CASSPGVPQETQYF

SEQ ID NO: 142149 - protein, 13 aa, Homo sapiens
  CDR3 for alpha chain variable domain of TCR clone 71075 (TRAV8-3, TRAJ44)
CDVVPGTASKLTF

SEQ ID NO: 142150 - protein, 14 aa, Homo sapiens
  CDR3 for beta chain variable domain of TCR clone 71075 (TRBV11-2, TRBJ2-3)
CASSRLARTDTQYF

SEQ ID NO: 142151 - protein, 11 aa, Homo sapiens
  CDR3 for alpha chain variable domain of TCR clone 71076 (TRAV16, TRAJ33)
CALHSNYQLIW

SEQ ID NO: 142152 - protein, 17 aa, Homo sapiens
  CDR3 for beta chain variable domain of TCR clone 71076 (TRBV4-1, TRBJ2-7)
CASSQQGQGLTSSTSGR

SEQ ID NO: 142153 - protein, 14 aa, Homo sapiens
  CDR3 for alpha chain variable domain of TCR clone 71077 (TRAV21, TRAJ35)
CAVMPIGFGNVLHC

SEQ ID NO: 142154 - protein, 18 aa, Homo sapiens
  CDR3 for beta chain variable domain of TCR clone 71077 (TRBV11-2, TRBJ2-3)
CASSLGGASRGAPNTQYF

SEQ ID NO: 142155 - protein, 14 aa, Homo sapiens
  CDR3 for alpha chain variable domain of TCR clone 71078 (TRAV13-2, TRAJ17)
CAENSKAAGNKLTF

SEQ ID NO: 142156 - protein, 14 aa, Homo sapiens
  CDR3 for beta chain variable domain of TCR clone 71078 (TRBV11-1, TRBJ2-7)
CASTFAVPSYEQYF

SEQ ID NO: 142157 - protein, 15 aa, Homo sapiens
  CDR3 for alpha chain variable domain of TCR clone 71079 (TRAV17, TRAJ16)
CATALRFSDGQQLLF

SEQ ID NO: 142158 - protein, 15 aa, Homo sapiens
  CDR3 for beta chain variable domain of TCR clone 71079 (TRBV20-1, TRBJ1-1)
CSASRGVTGNTEAFF

SEQ ID NO: 142159 - protein, 14 aa, Homo sapiens
  CDR3 for alpha chain variable domain of TCR clone 71080 (TRAV3, TRAJ21)
CAVRDAYSFNKFYF

SEQ ID NO: 142160 - protein, 17 aa, Homo sapiens
  CDR3 for beta chain variable domain of TCR clone 71080 (TRBV20-1, TRBJ1-6)
CSARGGYTFSYNSPLHF

SEQ ID NO: 142161 - protein, 14 aa, Homo sapiens
  CDR3 for alpha chain variable domain of TCR clone 71081 (TRAV12-3, TRAJ56)
CAMSVTGANSKLTF

SEQ ID NO: 142162 - protein, 20 aa, Homo sapiens
  CDR3 for beta chain variable domain of TCR clone 71081 (TRBV7-8, TRBJ2-2)
CASSHLFPGPTIHITGELFF

SEQ ID NO: 142163 - protein, 12 aa, Homo sapiens
  CDR3 for alpha chain variable domain of TCR clone 71082 (TRAV21, TRAJ33)
CAKMDSNYQLIW

SEQ ID NO: 142164 - protein, 14 aa, Homo sapiens
  CDR3 for beta chain variable domain of TCR clone 71082 (TRBV11-2, TRBJ1-1)
CASSLDRYGTEAFF

SEQ ID NO: 142165 - protein, 15 aa, Homo sapiens
  CDR3 for alpha chain variable domain of TCR clone 71083 (TRAV8-3, TRAJ40)
CAVGPYTSGTYKYIF

SEQ ID NO: 142166 - protein, 16 aa, Homo sapiens
  CDR3 for beta chain variable domain of TCR clone 71083 (TRBV7-2, TRBJ2-7)
CASSPDPGGGSGEQYF

SEQ ID NO: 142167 - protein, 12 aa, Homo sapiens
  CDR3 for alpha chain variable domain of TCR clone 71084 (TRAV13-1, TRAJ21)
CAAKEGFNKFYF

SEQ ID NO: 142168 - protein, 14 aa, Homo sapiens
  CDR3 for beta chain variable domain of TCR clone 71084 (TRBV5-4, TRBJ1-1)
CASILDSRRDEAFF

SEQ ID NO: 142169 - protein, 16 aa, Homo sapiens
  CDR3 for alpha chain variable domain of TCR clone 71085 (TRAV3, TRAJ37)
CAVRPHGSGNTGKLIF

SEQ ID NO: 142170 - protein, 16 aa, Homo sapiens
  CDR3 for beta chain variable domain of TCR clone 71085 (TRBV19, TRBJ2-2)
CASRSPGTGATGELFF

SEQ ID NO: 142171 - protein, 15 aa, Homo sapiens
  CDR3 for alpha chain variable domain of TCR clone 71086 (TRAV3, TRAJ22)
CAVRDRGGSARQLTF

SEQ ID NO: 142172 - protein, 15 aa, Homo sapiens
  CDR3 for beta chain variable domain of TCR clone 71086 (TRBV20-1, TRBJ1-1)
YSASRGVTGNTEAFF

SEQ ID NO: 142173 - protein, 17 aa, Homo sapiens
  CDR3 for alpha chain variable domain of TCR clone 71087 (TRAV3, TRAJ6)
CAVRDGPRAGGSYIPTF

SEQ ID NO: 142174 - protein, 16 aa, Homo sapiens
  CDR3 for beta chain variable domain of TCR clone 71087 (TRBV9, TRBJ1-2)
CASSVEEKVSPYGYTF

SEQ ID NO: 142175 - protein, 18 aa, Homo sapiens
  CDR3 for alpha chain variable domain of TCR clone 71088 (TRAV21, TRAJ52)
CAVRPSPAGCTSYGKLTF

SEQ ID NO: 142176 - protein, 13 aa, Homo sapiens
  CDR3 for beta chain variable domain of TCR clone 71088 (TRBV7-3, TRBJ1-1)
CASSQDWGAEAFF

SEQ ID NO: 142177 - protein, 14 aa, Homo sapiens
  CDR3 for alpha chain variable domain of TCR clone 71089 (TRAV26-1, TRAJ38)
CTVVGAGNNRKLIW

SEQ ID NO: 142178 - protein, 12 aa, Homo sapiens
  CDR3 for beta chain variable domain of TCR clone 71089 (TRBV5-1, TRBJ2-5)
CASSWDQETQYF

SEQ ID NO: 142179 - protein, 12 aa, Homo sapiens
  CDR3 for alpha chain variable domain of TCR clone 71090 (TRAV12-3, TRAJ17)
CAMTLTGNKLTF

SEQ ID NO: 142180 - protein, 15 aa, Homo sapiens
  CDR3 for beta chain variable domain of TCR clone 71090 (TRBV12-4, TRBJ2-5)
CASSPPTGLQEAQYF

SEQ ID NO: 142181 - protein, 17 aa, Homo sapiens
  CDR3 for alpha chain variable domain of TCR clone 71091 (TRAV17, TRAJ28)
CATGPRRGGAGSYQLTF

SEQ ID NO: 142182 - protein, 16 aa, Homo sapiens
  CDR3 for beta chain variable domain of TCR clone 71091 (TRBV25-1, TRBJ1-1)
CASSGDRDRGRIEAFF

SEQ ID NO: 142183 - protein, 16 aa, Homo sapiens
  CDR3 for alpha chain variable domain of TCR clone 71092 (TRAV16, TRAJ4)
CALSCMFSGGYNKLIF

SEQ ID NO: 142184 - protein, 16 aa, Homo sapiens
  CDR3 for beta chain variable domain of TCR clone 71092 (TRBV24-1, TRBJ2-3)
CATSDPGTGATDTQYF

SEQ ID NO: 142185 - protein, 17 aa, Homo sapiens
  CDR3 for alpha chain variable domain of TCR clone 71093 (TRAV27, TRAJ18)
CAGLHRGRGSTLGGLYF

SEQ ID NO: 142186 - protein, 14 aa, Homo sapiens
  CDR3 for beta chain variable domain of TCR clone 71093 (TRBV20-1, TRBJ1-5)
CSARGRGSNQPQHF

SEQ ID NO: 142187 - protein, 14 aa, Homo sapiens
  CDR3 for alpha chain variable domain of TCR clone 71094 (TRAV12-3, TRAJ29)
CAMILLSGNTLLVF

SEQ ID NO: 142188 - protein, 17 aa, Homo sapiens
  CDR3 for beta chain variable domain of TCR clone 71094 (TRBV7-8, TRBJ2-6)
CASSAGTGGAGANVLTF

SEQ ID NO: 142189 - protein, 10 aa, Homo sapiens
  CDR3 for alpha chain variable domain of TCR clone 71095 (TRAV12-1, TRAJ33)
CVASSYQLIW

SEQ ID NO: 142190 - protein, 15 aa, Homo sapiens
  CDR3 for beta chain variable domain of TCR clone 71095 (TRBV5-4, TRBJ1-4)
CASSHGDGENEKLFF

SEQ ID NO: 142191 - protein, 14 aa, Homo sapiens
  CDR3 for alpha chain variable domain of TCR clone 71096 (TRAV12-3, TRAJ42)
CAMNYGGSQGNLIF

SEQ ID NO: 142192 - protein, 16 aa, Homo sapiens
  CDR3 for beta chain variable domain of TCR clone 71096 (TRBV11-2, TRBJ2-7)
CASSPTTGGVSYEQYF

SEQ ID NO: 142193 - protein, 13 aa, Homo sapiens
  CDR3 for alpha chain variable domain of TCR clone 71097 (TRAV13-1, TRAJ21)
CAASIYDFNKFYF

SEQ ID NO: 142194 - protein, 13 aa, Homo sapiens
  CDR3 for beta chain variable domain of TCR clone 71097 (TRBV27, TRBJ1-4)
CASSLMGDEKLFF

SEQ ID NO: 142195 - protein, 12 aa, Homo sapiens
  CDR3 for alpha chain variable domain of TCR clone 71098 (TRAV13-1, TRAJ27)
CAAHTNAGKSTF

SEQ ID NO: 142196 - protein, 14 aa, Homo sapiens
  CDR3 for beta chain variable domain of TCR clone 71098 (TRBV19, TRBJ2-2)
CASSGQVIAGELFF

SEQ ID NO: 142197 - protein, 14 aa, Homo sapiens
  CDR3 for alpha chain variable domain of TCR clone 71099 (TRAV12-2, TRAJ17)
CAVLLKAAGNKLTF

SEQ ID NO: 142198 - protein, 17 aa, Homo sapiens
  CDR3 for beta chain variable domain of TCR clone 71099 (TRBV11-2, TRBJ2-1)
CASSLYPPGVEYNEQFF

SEQ ID NO: 142199 - protein, 12 aa, Homo sapiens
  CDR3 for alpha chain variable domain of TCR clone 71100 (TRAV13-1, TRAJ15)
CAASQAGTALIF

SEQ ID NO: 142200 - protein, 14 aa, Homo sapiens
  CDR3 for beta chain variable domain of TCR clone 71100 (TRBV19, TRBJ2-2)
CASSTLHRPGELFF

SEQ ID NO: 142201 - protein, 14 aa, Homo sapiens
  CDR3 for alpha chain variable domain of TCR clone 71101 (TRAV8-4, TRAJ26)
CAVSVGNYGQNFVF

SEQ ID NO: 142202 - protein, 14 aa, Homo sapiens
  CDR3 for beta chain variable domain of TCR clone 71101 (TRBV5-4, TRBJ1-1)
CASSLDSRRDEAFF

SEQ ID NO: 142203 - protein, 15 aa, Homo sapiens
  CDR3 for alpha chain variable domain of TCR clone 71102 (TRAV26-1, TRAJ29)
CIVRVEGSGNSPLVF

SEQ ID NO: 142204 - protein, 14 aa, Homo sapiens
  CDR3 for beta chain variable domain of TCR clone 71102 (TRBV18, TRBJ2-5)
CASSPGVSQETQYF

SEQ ID NO: 142205 - protein, 15 aa, Homo sapiens
  CDR3 for alpha chain variable domain of TCR clone 71103 (TRAV21, TRAJ32)
CAVNSYGGATNKLIF

SEQ ID NO: 142206 - protein, 18 aa, Homo sapiens
  CDR3 for beta chain variable domain of TCR clone 71103 (TRBV7-9, TRBJ2-1)
CASSTGLAEGSSYNEQVF

SEQ ID NO: 142207 - protein, 13 aa, Homo sapiens
  CDR3 for alpha chain variable domain of TCR clone 71104 (TRAV39, TRAJ49)
CAVDRNTGNQFYF

SEQ ID NO: 142208 - protein, 14 aa, Homo sapiens
  CDR3 for beta chain variable domain of TCR clone 71104 (TRBV4-1, TRBJ1-1)
CASSRSGQSFEASF

SEQ ID NO: 142209 - protein, 13 aa, Homo sapiens
  CDR3 for alpha chain variable domain of TCR clone 71105 (TRAV27, TRAJ6)
CAGGTRGSYIPTF

SEQ ID NO: 142210 - protein, 16 aa, Homo sapiens
  CDR3 for beta chain variable domain of TCR clone 71105 (TRBV7-9, TRBJ1-2)
CASSLGFSSGEDGYTF

SEQ ID NO: 142211 - protein, 15 aa, Homo sapiens
  CDR3 for alpha chain variable domain of TCR clone 71106 (TRAV12-1, TRAJ15)
CVVTRANQAGTALSF

SEQ ID NO: 142212 - protein, 14 aa, Homo sapiens
  CDR3 for beta chain variable domain of TCR clone 71106 (TRBV5-1, TRBJ1-1)
CASSLVSINTEAFF

SEQ ID NO: 142213 - protein, 14 aa, Homo sapiens
  CDR3 for alpha chain variable domain of TCR clone 71107 (TRAV9-2, TRAJ9)
CALSLIGGGFKTIF

SEQ ID NO: 142214 - protein, 15 aa, Homo sapiens
  CDR3 for beta chain variable domain of TCR clone 71107 (TRBV7-9, TRBJ2-1)
CASSLGLAGGTEQFF

SEQ ID NO: 142215 - protein, 12 aa, Homo sapiens
  CDR3 for alpha chain variable domain of TCR clone 71108 (TRAV27, TRAJ35)
CAGAYFGNVLHC

SEQ ID NO: 142216 - protein, 16 aa, Homo sapiens
  CDR3 for beta chain variable domain of TCR clone 71108 (TRBV6-1, TRBJ2-1)
CASILRQGSSYNEQFF

SEQ ID NO: 142217 - protein, 11 aa, Homo sapiens
  CDR3 for alpha chain variable domain of TCR clone 71109 (TRAV1-1, TRAJ23)
CAMRQGGKLIF

SEQ ID NO: 142218 - protein, 20 aa, Homo sapiens
  CDR3 for beta chain variable domain of TCR clone 71109 (TRBV7-8, TRBJ2-2)
CDSSHLFPGPTIHITGELFF

SEQ ID NO: 142219 - protein, 15 aa, Homo sapiens
  CDR3 for alpha chain variable domain of TCR clone 71110 (TRAV12-1, TRAJ44)
CVVFVNTGTASKLTF

SEQ ID NO: 142220 - protein, 17 aa, Homo sapiens
  CDR3 for beta chain variable domain of TCR clone 71110 (TRBV7-8, TRBJ2-6)
CASSAGTGGAGANVLNF

SEQ ID NO: 142221 - protein, 13 aa, Homo sapiens
  CDR3 for alpha chain variable domain of TCR clone 71111 (TRAV1-2, TRAJ9)
CAVLNTGGFKTIF

SEQ ID NO: 142222 - protein, 14 aa, Homo sapiens
  CDR3 for beta chain variable domain of TCR clone 71111 (TRBV20-1, TRBJ2-3)
CSARGGTSTDTQYL

SEQ ID NO: 142223 - protein, 18 aa, Homo sapiens
  CDR3 for alpha chain variable domain of TCR clone 71112 (TRAV26-2, TRAJ45)
CILRLWGYSGGGADGLTF

SEQ ID NO: 142224 - protein, 17 aa, Homo sapiens
  CDR3 for beta chain variable domain of TCR clone 71112 (TRBV28, TRBJ2-3)
CASSPTPAGGRVDTQYC

SEQ ID NO: 142225 - protein, 16 aa, Homo sapiens
  CDR3 for alpha chain variable domain of TCR clone 71113 (TRAV8-6, TRAJ53)
CAVTSNSGGSNYKLTF

SEQ ID NO: 142226 - protein, 15 aa, Homo sapiens
  CDR3 for beta chain variable domain of TCR clone 71113 (TRBV19, TRBJ1-6)
CASSTQGAVGSPLHF

SEQ ID NO: 142227 - protein, 16 aa, Homo sapiens
  CDR3 for alpha chain variable domain of TCR clone 71114 (TRAV38-2/DV8, TRAJ47)
CAYRSAIMEYGNKLGF

SEQ ID NO: 142228 - protein, 14 aa, Homo sapiens
  CDR3 for beta chain variable domain of TCR clone 71114 (TRBV19, TRBJ2-7)
CASSIFAGTYEQYF

SEQ ID NO: 142229 - protein, 20 aa, Homo sapiens
  CDR3 for alpha chain variable domain of TCR clone 71115 (TRAV8-3, TRAJ44)
LSTSVLWVRLYTGTASKLTF

SEQ ID NO: 142230 - protein, 15 aa, Homo sapiens
  CDR3 for beta chain variable domain of TCR clone 71115 (TRBV6-5, TRBJ1-2)
CASSYSQALNYGYTF

SEQ ID NO: 142231 - protein, 13 aa, Homo sapiens
  CDR3 for alpha chain variable domain of TCR clone 71116 (TRAV13-1, TRAJ21)
CASSIYNFNKFYF

SEQ ID NO: 142232 - protein, 13 aa, Homo sapiens
  CDR3 for beta chain variable domain of TCR clone 71116 (TRBV27, TRBJ1-4)
CASSLMGDEKLFF

SEQ ID NO: 142233 - protein, 14 aa, Homo sapiens
  CDR3 for alpha chain variable domain of TCR clone 71117 (TRAV8-1, TRAJ34)
CALPRGKTSSSLGL

SEQ ID NO: 142234 - protein, 16 aa, Homo sapiens
  CDR3 for beta chain variable domain of TCR clone 71117 (TRBV11-2, TRBJ1-2)
CASSLDTGGADYGYTF

SEQ ID NO: 142235 - protein, 17 aa, Homo sapiens
  CDR3 for alpha chain variable domain of TCR clone 71118 (TRAV29/DV5, TRAJ10)
CSALLGRATGGGNKLTF

SEQ ID NO: 142236 - protein, 14 aa, Homo sapiens
  CDR3 for beta chain variable domain of TCR clone 71118 (TRBV18, TRBJ2-5)
CASSPGVSQETQYF

SEQ ID NO: 142237 - protein, 12 aa, Homo sapiens
  CDR3 for alpha chain variable domain of TCR clone 71119 (TRAV17, TRAJ57)
CAADGGSEKLVF

SEQ ID NO: 142238 - protein, 13 aa, Homo sapiens
  CDR3 for beta chain variable domain of TCR clone 71119 (TRBV7-9, TRBJ2-7)
RASSFAGAYEQYF

SEQ ID NO: 142239 - protein, 14 aa, Homo sapiens
  CDR3 for alpha chain variable domain of TCR clone 71120 (TRAV26-1, TRAJ38)
CIADNAGNNRKLIW

SEQ ID NO: 142240 - protein, 13 aa, Homo sapiens
  CDR3 for beta chain variable domain of TCR clone 71120 (TRBV11-2, TRBJ2-1)
CASSLGLAGGRFF

SEQ ID NO: 142241 - protein, 13 aa, Homo sapiens
  CDR3 for alpha chain variable domain of TCR clone 71121 (TRAV3, TRAJ21)
CAVRELDFNKFYF

SEQ ID NO: 142242 - protein, 13 aa, Homo sapiens
  CDR3 for beta chain variable domain of TCR clone 71121 (TRBV9, TRBJ2-1)
CASSPSGGNEQFF

SEQ ID NO: 142243 - protein, 15 aa, Homo sapiens
  CDR3 for alpha chain variable domain of TCR clone 71122 (TRAV3, TRAJ20)
RAVRDIKLSDYKLSF

SEQ ID NO: 142244 - protein, 18 aa, Homo sapiens
  CDR3 for beta chain variable domain of TCR clone 71122 (TRBV20-1, TRBJ2-5)
CSQTGDSGRLGGKETQYF

SEQ ID NO: 142245 - protein, 11 aa, Homo sapiens
  CDR3 for alpha chain variable domain of TCR clone 71123 (TRAV1-2, TRAJ40)
CAVPGTYKYIF

SEQ ID NO: 142246 - protein, 16 aa, Homo sapiens
  CDR3 for beta chain variable domain of TCR clone 71123 (TRBV7-2, TRBJ1-4)
CASSLLGTRGDEKLFF

SEQ ID NO: 142247 - protein, 14 aa, Homo sapiens
  CDR3 for alpha chain variable domain of TCR clone 71124 (TRAV8-3, TRAJ39)
CAVGANNAGNMLTF

SEQ ID NO: 142248 - protein, 15 aa, Homo sapiens
  CDR3 for beta chain variable domain of TCR clone 71124 (TRBV7-2, TRBJ2-1)
CASSSGLAGGNEQFF

SEQ ID NO: 142249 - protein, 12 aa, Homo sapiens
  CDR3 for alpha chain variable domain of TCR clone 71125 (TRAV27, TRAJ35)
CAGADFGNGLHC

SEQ ID NO: 142250 - protein, 15 aa, Homo sapiens
  CDR3 for beta chain variable domain of TCR clone 71125 (TRBV20-1, TRBJ2-7)
CSARDRVSGMDEQYF

SEQ ID NO: 142251 - protein, 13 aa, Homo sapiens
  CDR3 for alpha chain variable domain of TCR clone 71126 (TRAV36/DV7, TRAJ54)
CAVDIQGAQKLVF

SEQ ID NO: 142252 - protein, 14 aa, Homo sapiens
  CDR3 for beta chain variable domain of TCR clone 71126 (TRBV19, TRBJ2-7)
CASNFRNTFTGMYF

SEQ ID NO: 142253 - protein, 14 aa, Homo sapiens
  CDR3 for alpha chain variable domain of TCR clone 71127 (TRAV1-2, TRAJ16)
CAVNRFSDGQKLLF

SEQ ID NO: 142254 - protein, 13 aa, Homo sapiens
  CDR3 for beta chain variable domain of TCR clone 71127 (TRBV5-4, TRBJ2-5)
CASSPVSQETQYF

SEQ ID NO: 142255 - protein, 14 aa, Homo sapiens
  CDR3 for alpha chain variable domain of TCR clone 71128 (TRAV3, TRAJ9)
CAVRFHTGGFKTIF

SEQ ID NO: 142256 - protein, 17 aa, Homo sapiens
  CDR3 for beta chain variable domain of TCR clone 71128 (TRBV19, TRBJ2-6)
CASSTGQVFSGANVLTF

SEQ ID NO: 142257 - protein, 10 aa, Homo sapiens
  CDR3 for alpha chain variable domain of TCR clone 71129 (TRAV25, TRAJ17)
CQAAGNKLTF

SEQ ID NO: 142258 - protein, 13 aa, Homo sapiens
  CDR3 for beta chain variable domain of TCR clone 71129 (TRBV6-5, TRBJ2-2)
CASSVPGVGELFF

SEQ ID NO: 142259 - protein, 18 aa, Homo sapiens
  CDR3 for alpha chain variable domain of TCR clone 71130 (TRAV3, TRAJ17)
CAVRARRGGRSCRQRANF

SEQ ID NO: 142260 - protein, 14 aa, Homo sapiens
  CDR3 for beta chain variable domain of TCR clone 71130 (TRBV4-1, TRBJ2-2)
CASSQAVNTGELFF

SEQ ID NO: 142261 - protein, 13 aa, Homo sapiens
  CDR3 for alpha chain variable domain of TCR clone 71131 (TRAV21, TRAJ49)
CAVRQSTGNQLYF

SEQ ID NO: 142262 - protein, 13 aa, Homo sapiens
  CDR3 for beta chain variable domain of TCR clone 71131 (TRBV6-6, TRBJ1-5)
CASRAYQDQPQHF

SEQ ID NO: 142263 - protein, 15 aa, Homo sapiens
  CDR3 for alpha chain variable domain of TCR clone 71132 (TRAV4, TRAJ39)
CLVGPNNSAGNTLTF

SEQ ID NO: 142264 - protein, 16 aa, Homo sapiens
  CDR3 for beta chain variable domain of TCR clone 71132 (TRBV13, TRBJ2-2)
CASSPRTGEHTGELFF

SEQ ID NO: 142265 - protein, 14 aa, Homo sapiens
  CDR3 for alpha chain variable domain of TCR clone 71133 (TRAV26-1, TRAJ38)
CIADNAGNNRKLIW

SEQ ID NO: 142266 - protein, 15 aa, Homo sapiens
  CDR3 for beta chain variable domain of TCR clone 71133 (TRBV20-1, TRBJ2-7)
CSARDRVSGMDEKYF

SEQ ID NO: 142267 - protein, 14 aa, Homo sapiens
  CDR3 for alpha chain variable domain of TCR clone 71134 (TRAV1-2, TRAJ13)
CAVKHSGGYQKVTF

SEQ ID NO: 142268 - protein, 13 aa, Homo sapiens
  CDR3 for beta chain variable domain of TCR clone 71134 (TRBV10-3, TRBJ2-7)
CASKLAVNYEQYF

SEQ ID NO: 142269 - protein, 12 aa, Homo sapiens
  CDR3 for alpha chain variable domain of TCR clone 71135 (TRAV21, TRAJ3)
CCFYSSASKIIF

SEQ ID NO: 142270 - protein, 16 aa, Homo sapiens
  CDR3 for beta chain variable domain of TCR clone 71135 (TRBV19, TRBJ2-1)
CASSKAGPSSYNEQFL

SEQ ID NO: 142271 - protein, 17 aa, Homo sapiens
  CDR3 for alpha chain variable domain of TCR clone 71136 (TRAV2, TRAJ36)
CAVEDRGNCGKQPLLWD

SEQ ID NO: 142272 - protein, 14 aa, Homo sapiens
  CDR3 for beta chain variable domain of TCR clone 71136 (TRBV7-9, TRBJ2-5)
CASSLDTAQETQYF

SEQ ID NO: 142273 - protein, 16 aa, Homo sapiens
  CDR3 for alpha chain variable domain of TCR clone 71137 (TRAV3, TRAJ18)
CAVRDGRGSTLGRLYF

SEQ ID NO: 142274 - protein, 15 aa, Homo sapiens
  CDR3 for beta chain variable domain of TCR clone 71137 (TRBV7-9, TRBJ1-6)
CASSSPGRGNSPLDF

SEQ ID NO: 142275 - protein, 12 aa, Homo sapiens
  CDR3 for alpha chain variable domain of TCR clone 71138 (TRAV16, TRAJ26)
CALRSYGQNFVF

SEQ ID NO: 142276 - protein, 14 aa, Homo sapiens
  CDR3 for beta chain variable domain of TCR clone 71138 (TRBV10-3, TRBJ2-1)
CASSSDLAYNEQFS

SEQ ID NO: 142277 - protein, 15 aa, Homo sapiens
  CDR3 for alpha chain variable domain of TCR clone 71139 (TRAV26-1, TRAJ22)
CIVRVSFWFCKATDL

SEQ ID NO: 142278 - protein, 16 aa, Homo sapiens
  CDR3 for beta chain variable domain of TCR clone 71139 (TRBV19, TRBJ2-1)
CASSKAGPSSYNEQFF

SEQ ID NO: 142279 - protein, 14 aa, Homo sapiens
  CDR3 for alpha chain variable domain of TCR clone 71140 (TRAV23/DV6, TRAJ8)
CAASKNTGFQKLVF

SEQ ID NO: 142280 - protein, 15 aa, Homo sapiens
  CDR3 for beta chain variable domain of TCR clone 71140 (TRBV15, TRBJ1-1)
CATSLQGGRNTEAFF

SEQ ID NO: 142281 - protein, 18 aa, Homo sapiens
  CDR3 for alpha chain variable domain of TCR clone 71141 (TRAV29/DV5, TRAJ52)
CAAGFRGAGGTSYGKLTF

SEQ ID NO: 142282 - protein, 16 aa, Homo sapiens
  CDR3 for beta chain variable domain of TCR clone 71141 (TRBV7-3, TRBJ2-2)
CASSLKRETLSGELFF

SEQ ID NO: 142283 - protein, 12 aa, Homo sapiens
  CDR3 for alpha chain variable domain of TCR clone 71142 (TRAV3, TRAJ43)
CAVRDPNNDMRF

SEQ ID NO: 142284 - protein, 17 aa, Homo sapiens
  CDR3 for beta chain variable domain of TCR clone 71142 (TRBV28, TRBJ2-7)
CASSPLRGRRWKGGQYF

SEQ ID NO: 142285 - protein, 17 aa, Homo sapiens
  CDR3 for alpha chain variable domain of TCR clone 71143 (TRAV16, TRAJ58)
CITVLSNGEASGSRLTF

SEQ ID NO: 142286 - protein, 17 aa, Homo sapiens
  CDR3 for beta chain variable domain of TCR clone 71143 (TRBV18, TRBJ2-1)
CASSKGLSGGADNEQFF

SEQ ID NO: 142287 - protein, 12 aa, Homo sapiens
  CDR3 for alpha chain variable domain of TCR clone 71144 (TRAV17, TRAJ12)
CATLRSSYKLFF

SEQ ID NO: 142288 - protein, 16 aa, Homo sapiens
  CDR3 for beta chain variable domain of TCR clone 71144 (TRBV28, TRBJ2-7)
CASSLFFETGGPEQYF

SEQ ID NO: 142289 - protein, 13 aa, Homo sapiens
  CDR3 for alpha chain variable domain of TCR clone 71145 (TRAV8-6, TRAJ9)
CAVWDTGGFKTIL

SEQ ID NO: 142290 - protein, 14 aa, Homo sapiens
  CDR3 for beta chain variable domain of TCR clone 71145 (TRBV2, TRBJ2-1)
CASSEALIYNEQFF

SEQ ID NO: 142291 - protein, 15 aa, Homo sapiens
  CDR3 for alpha chain variable domain of TCR clone 71146 (TRAV8-3, TRAJ41)
CAVGSNSNSGYALNF

SEQ ID NO: 142292 - protein, 17 aa, Homo sapiens
  CDR3 for beta chain variable domain of TCR clone 71146 (TRBV25-1, TRBJ2-1)
CASSAYGQGRGVHEQFF

SEQ ID NO: 142293 - protein, 11 aa, Homo sapiens
  CDR3 for alpha chain variable domain of TCR clone 71147 (TRAV8-3, TRAJ15)
CAVGPGTALIF

SEQ ID NO: 142294 - protein, 18 aa, Homo sapiens
  CDR3 for beta chain variable domain of TCR clone 71147 (TRBV18, TRBJ2-3)
CASSYTSGAAGGTGTQYF

SEQ ID NO: 142295 - protein, 16 aa, Homo sapiens
  CDR3 for alpha chain variable domain of TCR clone 71148 (TRAV30, TRAJ24)
CGTELVDADSWGKFQF

SEQ ID NO: 142296 - protein, 15 aa, Homo sapiens
  CDR3 for beta chain variable domain of TCR clone 71148 (TRBV7-9, TRBJ1-4)
CASSARTGGNEKLFF

SEQ ID NO: 142297 - protein, 11 aa, Homo sapiens
  CDR3 for alpha chain variable domain of TCR clone 71149 (TRAV17, TRAJ9)
CGFTGGFKTIF

SEQ ID NO: 142298 - protein, 14 aa, Homo sapiens
  CDR3 for beta chain variable domain of TCR clone 71149 (TRBV7-9, TRBJ2-2)
CASSLVQDTVELFF

SEQ ID NO: 142299 - protein, 14 aa, Homo sapiens
  CDR3 for alpha chain variable domain of TCR clone 71150 (TRAV26-1, TRAJ34)
CIVRVAYNTDKLIF

SEQ ID NO: 142300 - protein, 14 aa, Homo sapiens
  CDR3 for beta chain variable domain of TCR clone 71150 (TRBV20-1, TRBJ2-7)
CSAWTALSSYERYF

SEQ ID NO: 142301 - protein, 13 aa, Homo sapiens
  CDR3 for alpha chain variable domain of TCR clone 71151 (TRAV2, TRAJ24)
CAVTTDSWGKLQF

SEQ ID NO: 142302 - protein, 14 aa, Homo sapiens
  CDR3 for beta chain variable domain of TCR clone 71151 (TRBV13, TRBJ2-5)
CASSLGRGQETQYL

SEQ ID NO: 142303 - protein, 13 aa, Homo sapiens
  CDR3 for alpha chain variable domain of TCR clone 71152 (TRAV35, TRAJ33)
CAGLIDSNYQLIW

SEQ ID NO: 142304 - protein, 13 aa, Homo sapiens
  CDR3 for beta chain variable domain of TCR clone 71152 (TRBV10-3, TRBJ2-1)
CAISEFSGREQFF

SEQ ID NO: 142305 - protein, 16 aa, Homo sapiens
  CDR3 for alpha chain variable domain of TCR clone 71153 (TRAV3, TRAJ37)
CAVRPHGSGNTGKLIF

SEQ ID NO: 142306 - protein, 16 aa, Homo sapiens
  CDR3 for beta chain variable domain of TCR clone 71153 (TRBV20-1, TRBJ1-4)
CSAPGQGLLTNEKLLF

SEQ ID NO: 142307 - protein, 13 aa, Homo sapiens
  CDR3 for alpha chain variable domain of TCR clone 71154 (TRAV12-3, TRAJ40)
CAMSARGTYKYIF

SEQ ID NO: 142308 - protein, 16 aa, Homo sapiens
  CDR3 for beta chain variable domain of TCR clone 71154 (TRBV20-1, TRBJ2-3)
CSGEAGLAGGQDTRYF

SEQ ID NO: 142309 - protein, 13 aa, Homo sapiens
  CDR3 for alpha chain variable domain of TCR clone 71155 (TRAV17, TRAJ26)
CATVDNYGQNFVF

SEQ ID NO: 142310 - protein, 17 aa, Homo sapiens
  CDR3 for beta chain variable domain of TCR clone 71155 (TRBV11-2, TRBJ2-1)
CASSLYPPGVEYNEQFF

SEQ ID NO: 142311 - protein, 18 aa, Homo sapiens
  CDR3 for alpha chain variable domain of TCR clone 71156 (TRAV13-1, TRAJ52)
CAASKRSAGGTSYGKLTF

SEQ ID NO: 142312 - protein, 13 aa, Homo sapiens
  CDR3 for beta chain variable domain of TCR clone 71156 (TRBV12-4, TRBJ1-2)
CAISLRQGKGYTF

SEQ ID NO: 142313 - protein, 14 aa, Homo sapiens
  CDR3 for alpha chain variable domain of TCR clone 71157 (TRAV21, TRAJ35)
CAVMPIGFGNVLHC

SEQ ID NO: 142314 - protein, 12 aa, Homo sapiens
  CDR3 for beta chain variable domain of TCR clone 71157 (TRBV7-9, TRBJ2-7)
CASSIKREEQYC

SEQ ID NO: 142315 - protein, 15 aa, Homo sapiens
  CDR3 for alpha chain variable domain of TCR clone 71158 (TRAV3, TRAJ29)
RAVRDLYSGNTPLVF

SEQ ID NO: 142316 - protein, 17 aa, Homo sapiens
  CDR3 for beta chain variable domain of TCR clone 71158 (TRBV20-1, TRBJ2-1)
CSARDPLAGVWDNEQFF

SEQ ID NO: 142317 - protein, 17 aa, Homo sapiens
  CDR3 for alpha chain variable domain of TCR clone 71159 (TRAV3, TRAJ38)
CAVRGCLNAGNNRKLIW

SEQ ID NO: 142318 - protein, 13 aa, Homo sapiens
  CDR3 for beta chain variable domain of TCR clone 71159 (TRBV23-1, TRBJ1-4)
CASRGKFNEKLFF

SEQ ID NO: 142319 - protein, 11 aa, Homo sapiens
  CDR3 for alpha chain variable domain of TCR clone 71160 (TRAV2, TRAJ13)
CASGGYQQVTF

SEQ ID NO: 142320 - protein, 14 aa, Homo sapiens
  CDR3 for beta chain variable domain of TCR clone 71160 (TRBV7-3, TRBJ2-1)
CASSLAGGTNEQFF

SEQ ID NO: 142321 - protein, 13 aa, Homo sapiens
  CDR3 for alpha chain variable domain of TCR clone 71161 (TRAV12-2, TRAJ20)
CAVYPSNDYKLSF

SEQ ID NO: 142322 - protein, 14 aa, Homo sapiens
  CDR3 for beta chain variable domain of TCR clone 71161 (TRBV19, TRBJ2-1)
CASPTFVLSGEQFF

SEQ ID NO: 142323 - protein, 13 aa, Homo sapiens
  CDR3 for alpha chain variable domain of TCR clone 71162 (TRAV8-6, TRAJ13)
CAVRDGGYQKVTL

SEQ ID NO: 142324 - protein, 15 aa, Homo sapiens
  CDR3 for beta chain variable domain of TCR clone 71162 (TRBV7-9, TRBJ2-2)
CASRPEGTSTGELFF

SEQ ID NO: 142325 - protein, 14 aa, Homo sapiens
  CDR3 for alpha chain variable domain of TCR clone 71163 (TRAV12-2, TRAJ13)
CAVKKTGGYQKVTF

SEQ ID NO: 142326 - protein, 17 aa, Homo sapiens
  CDR3 for beta chain variable domain of TCR clone 71163 (TRBV4-1, TRBJ2-7)
CASSRDPLGVRGGEQYF

SEQ ID NO: 142327 - protein, 13 aa, Homo sapiens
  CDR3 for alpha chain variable domain of TCR clone 71164 (TRAV8-3, TRAJ28)
CAVGAVGSYQLTF

SEQ ID NO: 142328 - protein, 16 aa, Homo sapiens
  CDR3 for beta chain variable domain of TCR clone 71164 (TRBV19, TRBJ2-2)
CASRSPGTGATGELFF

SEQ ID NO: 142329 - protein, 12 aa, Homo sapiens
  CDR3 for alpha chain variable domain of TCR clone 71165 (TRAV21, TRAJ33)
CAKMDSTYQLIW

SEQ ID NO: 142330 - protein, 14 aa, Homo sapiens
  CDR3 for beta chain variable domain of TCR clone 71165 (TRBV2, TRBJ2-7)
CASSLTSGGYEQYF

SEQ ID NO: 142331 - protein, 15 aa, Homo sapiens
  CDR3 for alpha chain variable domain of TCR clone 71166 (TRAV23/DV6, TRAJ13)
CAAWPGGGGYQKVPF

SEQ ID NO: 142332 - protein, 17 aa, Homo sapiens
  CDR3 for beta chain variable domain of TCR clone 71166 (TRBV19, TRBJ2-7)
CASSISFYDSYPYEQYF

SEQ ID NO: 142333 - protein, 13 aa, Homo sapiens
  CDR3 for alpha chain variable domain of TCR clone 71167 (TRAV3, TRAJ21)
CAVREPDFNKFYF

SEQ ID NO: 142334 - protein, 15 aa, Homo sapiens
  CDR3 for beta chain variable domain of TCR clone 71167 (TRBV11-3, TRBJ2-7)
CASSPGPASSYEQYF

SEQ ID NO: 142335 - protein, 12 aa, Homo sapiens
  CDR3 for alpha chain variable domain of TCR clone 71168 (TRAV27, TRAJ41)
CAGRNSGYALNF

SEQ ID NO: 142336 - protein, 13 aa, Homo sapiens
  CDR3 for beta chain variable domain of TCR clone 71168 (TRBV6-5, TRBJ2-5)
CASSPQGGETQYF

SEQ ID NO: 142337 - protein, 15 aa, Homo sapiens
  CDR3 for alpha chain variable domain of TCR clone 71169 (TRAV3, TRAJ4)
CAVRDGTGGYNKLIF

SEQ ID NO: 142338 - protein, 15 aa, Homo sapiens
  CDR3 for beta chain variable domain of TCR clone 71169 (TRBV4-1, TRBJ1-4)
CASSDTGGTNEKLFF

SEQ ID NO: 142339 - protein, 16 aa, Homo sapiens
  CDR3 for alpha chain variable domain of TCR clone 71170 (TRAV1-2, TRAJ10)
CAGRGVLTGGGNKLTF

SEQ ID NO: 142340 - protein, 12 aa, Homo sapiens
  CDR3 for beta chain variable domain of TCR clone 71170 (TRBV7-8, TRBJ2-7)
CASSLGDREQYF

SEQ ID NO: 142341 - protein, 12 aa, Homo sapiens
  CDR3 for alpha chain variable domain of TCR clone 71171 (TRAV8-3, TRAJ26)
CAGDNYGQNFVF

SEQ ID NO: 142342 - protein, 13 aa, Homo sapiens
  CDR3 for beta chain variable domain of TCR clone 71171 (TRBV19, TRBJ1-2)
CASSVPGQDGYTF

SEQ ID NO: 142343 - protein, 13 aa, Homo sapiens
  CDR3 for alpha chain variable domain of TCR clone 71172 (TRAV8-4, TRAJ48)
CAVSLFGNEKLTF

SEQ ID NO: 142344 - protein, 15 aa, Homo sapiens
  CDR3 for beta chain variable domain of TCR clone 71172 (TRBV20-1, TRBJ2-7)
CSARKGLVESYEQYF

SEQ ID NO: 142345 - protein, 12 aa, Homo sapiens
  CDR3 for alpha chain variable domain of TCR clone 71173 (TRAV12-1, TRAJ20)
CVAHFNDYKLSF

SEQ ID NO: 142346 - protein, 13 aa, Homo sapiens
  CDR3 for beta chain variable domain of TCR clone 71173 (TRBV5-7, TRBJ2-5)
CASSVRLQETQYF

SEQ ID NO: 142347 - protein, 14 aa, Homo sapiens
  CDR3 for alpha chain variable domain of TCR clone 71174 (TRAV35, TRAJ22)
CAGLRPGSARQLTF

SEQ ID NO: 142348 - protein, 14 aa, Homo sapiens
  CDR3 for beta chain variable domain of TCR clone 71174 (TRBV12-4, TRBJ1-1)
CASSLGTGGTEAFF

SEQ ID NO: 142349 - protein, 14 aa, Homo sapiens
  CDR3 for alpha chain variable domain of TCR clone 71175 (TRAV8-3, TRAJ39)
CAVGANNAGSMLTF

SEQ ID NO: 142350 - protein, 15 aa, Homo sapiens
  CDR3 for beta chain variable domain of TCR clone 71175 (TRBV4-3, TRBJ1-1)
CASSQELGRGTEAFF

SEQ ID NO: 142351 - protein, 13 aa, Homo sapiens
  CDR3 for alpha chain variable domain of TCR clone 71176 (TRAV13-1, TRAJ5)
CAARVTCRRALTF

SEQ ID NO: 142352 - protein, 15 aa, Homo sapiens
  CDR3 for beta chain variable domain of TCR clone 71176 (TRBV7-9, TRBJ2-7)
CASSPGGGLTYEQYF

SEQ ID NO: 142353 - protein, 12 aa, Homo sapiens
  CDR3 for alpha chain variable domain of TCR clone 71177 (TRAV8-3, TRAJ26)
CAGDNYGQNFVF

SEQ ID NO: 142354 - protein, 15 aa, Homo sapiens
  CDR3 for beta chain variable domain of TCR clone 71177 (TRBV11-2, TRBJ2-1)
CASSKNRGLIYEQFF

SEQ ID NO: 142355 - protein, 14 aa, Homo sapiens
  CDR3 for alpha chain variable domain of TCR clone 71178 (TRAV12-2, TRAJ40)
CAVKIPSGTYKYIF

SEQ ID NO: 142356 - protein, 14 aa, Homo sapiens
  CDR3 for beta chain variable domain of TCR clone 71178 (TRBV20-1, TRBJ1-1)
CSAQTRIGGTEGFF

SEQ ID NO: 142357 - protein, 13 aa, Homo sapiens
  CDR3 for alpha chain variable domain of TCR clone 71179 (TRAV20, TRAJ42)
CAVQGGSKGNLIF

SEQ ID NO: 142358 - protein, 15 aa, Homo sapiens
  CDR3 for beta chain variable domain of TCR clone 71179 (TRBV10-1, TRBJ2-1)
CASSEWRGTYNEQFF

SEQ ID NO: 142359 - protein, 16 aa, Homo sapiens
  CDR3 for alpha chain variable domain of TCR clone 71180 (TRAV20, TRAJ38)
CAVQASNAGNNRKLIW

SEQ ID NO: 142360 - protein, 12 aa, Homo sapiens
  CDR3 for beta chain variable domain of TCR clone 71180 (TRBV7-8, TRBJ1-1)
CASSSLGGEAFF

SEQ ID NO: 142361 - protein, 14 aa, Homo sapiens
  CDR3 for alpha chain variable domain of TCR clone 71181 (TRAV8-6, TRAJ20)
CAVSDRRVRDKLSF

SEQ ID NO: 142362 - protein, 15 aa, Homo sapiens
  CDR3 for beta chain variable domain of TCR clone 71181 (TRBV11-3, TRBJ2-3)
CASLKDGREGDTQYF

SEQ ID NO: 142363 - protein, 13 aa, Homo sapiens
  CDR3 for alpha chain variable domain of TCR clone 71182 (TRAV13-2, TRAJ10)
CAENTGGGNKLTF

SEQ ID NO: 142364 - protein, 15 aa, Homo sapiens
  CDR3 for beta chain variable domain of TCR clone 71182 (TRBV12-4, TRBJ2-2)
CASSRQGANTGEPFF

SEQ ID NO: 142365 - protein, 16 aa, Homo sapiens
  CDR3 for alpha chain variable domain of TCR clone 71183 (TRAV30, TRAJ24)
CGTEIVDADSWGKFQF

SEQ ID NO: 142366 - protein, 15 aa, Homo sapiens
  CDR3 for beta chain variable domain of TCR clone 71183 (TRBV20-1, TRBJ2-1)
CSARGIGGTYNEQFF

SEQ ID NO: 142367 - protein, 14 aa, Homo sapiens
  CDR3 for alpha chain variable domain of TCR clone 71184 (TRAV13-1, TRAJ35)
CAASKGGFGNELHC

SEQ ID NO: 142368 - protein, 13 aa, Homo sapiens
  CDR3 for beta chain variable domain of TCR clone 71184 (TRBV7-3, TRBJ1-1)
CASSQDWGAEAFF

SEQ ID NO: 142369 - protein, 14 aa, Homo sapiens
  CDR3 for alpha chain variable domain of TCR clone 71185 (TRAV21, TRAJ58)
CAVRRGRSGSRLTF

SEQ ID NO: 142370 - protein, 13 aa, Homo sapiens
  CDR3 for beta chain variable domain of TCR clone 71185 (TRBV7-2, TRBJ1-6)
CASSLKFDSTLHF

SEQ ID NO: 142371 - protein, 14 aa, Homo sapiens
  CDR3 for alpha chain variable domain of TCR clone 71186 (TRAV12-3, TRAJ10)
SHLPLTGGGNKLTF

SEQ ID NO: 142372 - protein, 15 aa, Homo sapiens
  CDR3 for beta chain variable domain of TCR clone 71186 (TRBV4-1, TRBJ2-5)
CASSQWDLYQETQYF

SEQ ID NO: 142373 - protein, 14 aa, Homo sapiens
  CDR3 for alpha chain variable domain of TCR clone 71187 (TRAV1-2, TRAJ16)
CAVNRFSDGQKLLF

SEQ ID NO: 142374 - protein, 20 aa, Homo sapiens
  CDR3 for beta chain variable domain of TCR clone 71187 (TRBV7-8, TRBJ2-1)
RASSLAHRLAGVRSYNEQFF

SEQ ID NO: 142375 - protein, 15 aa, Homo sapiens
  CDR3 for alpha chain variable domain of TCR clone 71188 (TRAV25, TRAJ52)
CAGTSGGTSYGKLKF

SEQ ID NO: 142376 - protein, 13 aa, Homo sapiens
  CDR3 for beta chain variable domain of TCR clone 71188 (TRBV6-5, TRBJ2-5)
CASSPQGGETQYF

SEQ ID NO: 142377 - protein, 14 aa, Homo sapiens
  CDR3 for alpha chain variable domain of TCR clone 71189 (TRAV12-2, TRAJ13)
CAVKKTGGYQKVTF

SEQ ID NO: 142378 - protein, 17 aa, Homo sapiens
  CDR3 for beta chain variable domain of TCR clone 71189 (TRBV5-1, TRBJ2-5)
CASSPVALGQNQETQYF

SEQ ID NO: 142379 - protein, 14 aa, Homo sapiens
  CDR3 for alpha chain variable domain of TCR clone 71190 (TRAV12-2, TRAJ5)
CAVNRSTGRRALTF

SEQ ID NO: 142380 - protein, 12 aa, Homo sapiens
  CDR3 for beta chain variable domain of TCR clone 71190 (TRBV19, TRBJ1-5)
CASSIAQQHKHF

SEQ ID NO: 142381 - protein, 15 aa, Homo sapiens
  CDR3 for alpha chain variable domain of TCR clone 71191 (TRAV8-3, TRAJ44)
CAVGAGAGTASKLTF

SEQ ID NO: 142382 - protein, 12 aa, Homo sapiens
  CDR3 for beta chain variable domain of TCR clone 71191 (TRBV7-8, TRBJ2-4)
RASSLGGNIQYF

SEQ ID NO: 142383 - protein, 16 aa, Homo sapiens
  CDR3 for alpha chain variable domain of TCR clone 71192 (TRAV1-2, TRAJ10)
CAVRGVLTGGGNKLTF

SEQ ID NO: 142384 - protein, 17 aa, Homo sapiens
  CDR3 for beta chain variable domain of TCR clone 71192 (TRBV7-3, TRBJ2-3)
CASSLMKRMRGADTQYF

SEQ ID NO: 142385 - protein, 15 aa, Homo sapiens
  CDR3 for alpha chain variable domain of TCR clone 71193 (TRAV2, TRAJ9)
CAVEDRGTGGFKTIF

SEQ ID NO: 142386 - protein, 16 aa, Homo sapiens
  CDR3 for beta chain variable domain of TCR clone 71193 (TRBV24-1, TRBJ2-3)
CATRDPGTGATDTQYF

SEQ ID NO: 142387 - protein, 12 aa, Homo sapiens
  CDR3 for alpha chain variable domain of TCR clone 71194 (TRAV21, TRAJ11)
CAATSGYSTLTF

SEQ ID NO: 142388 - protein, 14 aa, Homo sapiens
  CDR3 for beta chain variable domain of TCR clone 71194 (TRBV6-1, TRBJ2-7)
CASSGGSYLYEQYF

SEQ ID NO: 142389 - protein, 13 aa, Homo sapiens
  CDR3 for alpha chain variable domain of TCR clone 71195 (TRAV21, TRAJ20)
CAVGLRVDYKLSF

SEQ ID NO: 142390 - protein, 17 aa, Homo sapiens
  CDR3 for beta chain variable domain of TCR clone 71195 (TRBV7-3, TRBJ2-3)
CASSLMKRMRGADTQYF

SEQ ID NO: 142391 - protein, 14 aa, Homo sapiens
  CDR3 for alpha chain variable domain of TCR clone 71196 (TRAV12-2, TRAJ40)
CAVKIPSGTYKYIF

SEQ ID NO: 142392 - protein, 20 aa, Homo sapiens
  CDR3 for beta chain variable domain of TCR clone 71196 (TRBV28, TRBJ2-1)
CASTPIGRSPGLAGGNEQFL

SEQ ID NO: 142393 - protein, 13 aa, Homo sapiens
  CDR3 for alpha chain variable domain of TCR clone 71197 (TRAV13-1, TRAJ39)
CAASIWAGNMLTF

SEQ ID NO: 142394 - protein, 15 aa, Homo sapiens
  CDR3 for beta chain variable domain of TCR clone 71197 (TRBV7-9, TRBJ1-1)
CASSLLEQGGTEDFF

SEQ ID NO: 142395 - protein, 12 aa, Homo sapiens
  CDR3 for alpha chain variable domain of TCR clone 71198 (TRAV16, TRAJ10)
CSRTGGGNKLTF

SEQ ID NO: 142396 - protein, 15 aa, Homo sapiens
  CDR3 for beta chain variable domain of TCR clone 71198 (TRBV6-5, TRBJ2-1)
CASSYDAGAGNEQFF

SEQ ID NO: 142397 - protein, 13 aa, Homo sapiens
  CDR3 for alpha chain variable domain of TCR clone 71199 (TRAV22, TRAJ40)
CAVGVSGTYKYIF

SEQ ID NO: 142398 - protein, 14 aa, Homo sapiens
  CDR3 for beta chain variable domain of TCR clone 71199 (TRBV6-1, TRBJ1-3)
CASVQGGGGNTIYF

SEQ ID NO: 142399 - protein, 12 aa, Homo sapiens
  CDR3 for alpha chain variable domain of TCR clone 71200 (TRAV29/DV5, TRAJ41)
CAASDSGYALNF

SEQ ID NO: 142400 - protein, 15 aa, Homo sapiens
  CDR3 for beta chain variable domain of TCR clone 71200 (TRBV15, TRBJ1-3)
CATSRDRGPGNTIYF

SEQ ID NO: 142401 - protein, 15 aa, Homo sapiens
  CDR3 for alpha chain variable domain of TCR clone 71201 (TRAV8-3, TRAJ40)
CAVGPYTSGTYKYIF

SEQ ID NO: 142402 - protein, 16 aa, Homo sapiens
  CDR3 for beta chain variable domain of TCR clone 71201 (TRBV7-2, TRBJ2-7)
CASSIDPGGGSGEQYF

SEQ ID NO: 142403 - protein, 12 aa, Homo sapiens
  CDR3 for alpha chain variable domain of TCR clone 71202 (TRAV13-2, TRAJ23)
CAERHREGKLIF

SEQ ID NO: 142404 - protein, 16 aa, Homo sapiens
  CDR3 for beta chain variable domain of TCR clone 71202 (TRBV27, TRBJ2-2)
CASSLSGFWVTGELFF

SEQ ID NO: 142405 - protein, 17 aa, Homo sapiens
  CDR3 for alpha chain variable domain of TCR clone 71203 (TRAV3, TRAJ6)
CAVRGGPRAGGGYIPTF

SEQ ID NO: 142406 - protein, 14 aa, Homo sapiens
  CDR3 for beta chain variable domain of TCR clone 71203 (TRBV7-2, TRBJ2-7)
CASSPKTSFYEQYF

SEQ ID NO: 142407 - protein, 14 aa, Homo sapiens
  CDR3 for alpha chain variable domain of TCR clone 71204 (TRAV20, TRAJ29)
CAVQAWVGNTPLVF

SEQ ID NO: 142408 - protein, 15 aa, Homo sapiens
  CDR3 for beta chain variable domain of TCR clone 71204 (TRBV29-1, TRBJ2-7)
CSVEFFDRGSCEQYF

SEQ ID NO: 142409 - protein, 11 aa, Homo sapiens
  CDR3 for alpha chain variable domain of TCR clone 71205 (TRAV1-1, TRAJ23)
CAVRQGGKLIF

SEQ ID NO: 142410 - protein, 14 aa, Homo sapiens
  CDR3 for beta chain variable domain of TCR clone 71205 (TRBV18, TRBJ2-7)
CASSPRGGAYEQYF

SEQ ID NO: 142411 - protein, 14 aa, Homo sapiens
  CDR3 for alpha chain variable domain of TCR clone 71206 (TRAV1-1, TRAJ27)
CAVIYNTNAGKSTF

SEQ ID NO: 142412 - protein, 14 aa, Homo sapiens
  CDR3 for beta chain variable domain of TCR clone 71206 (TRBV7-2, TRBJ2-7)
CASSPKTSFYEQYF

SEQ ID NO: 142413 - protein, 14 aa, Homo sapiens
  CDR3 for alpha chain variable domain of TCR clone 71207 (TRAV35, TRAJ42)
CAGRYGGSQGNLIF

SEQ ID NO: 142414 - protein, 15 aa, Homo sapiens
  CDR3 for beta chain variable domain of TCR clone 71207 (TRBV7-9, TRBJ2-1)
CASSLGWGRANEQFC

SEQ ID NO: 142415 - protein, 11 aa, Homo sapiens
  CDR3 for alpha chain variable domain of TCR clone 71208 (TRAV21, TRAJ34)
CAVTNTDKLIF

SEQ ID NO: 142416 - protein, 14 aa, Homo sapiens
  CDR3 for beta chain variable domain of TCR clone 71208 (TRBV7-6, TRBJ2-3)
CASSLGTVTDTQYF

SEQ ID NO: 142417 - protein, 14 aa, Homo sapiens
  CDR3 for alpha chain variable domain of TCR clone 71209 (TRAV12-2, TRAJ17)
CTALFKAAGNKLTF

SEQ ID NO: 142418 - protein, 16 aa, Homo sapiens
  CDR3 for beta chain variable domain of TCR clone 71209 (TRBV20-1, TRBJ2-2)
CSASASGIPGAGELFF

SEQ ID NO: 142419 - protein, 15 aa, Homo sapiens
  CDR3 for alpha chain variable domain of TCR clone 71210 (TRAV3, TRAJ36)
CAVRASQTGANNLFF

SEQ ID NO: 142420 - protein, 14 aa, Homo sapiens
  CDR3 for beta chain variable domain of TCR clone 71210 (TRBV12-5, TRBJ2-5)
CASGSRTHQETQYF

SEQ ID NO: 142421 - protein, 15 aa, Homo sapiens
  CDR3 for alpha chain variable domain of TCR clone 71211 (TRAV26-1, TRAJ15)
CIVRAANQAGTALLF

SEQ ID NO: 142422 - protein, 15 aa, Homo sapiens
  CDR3 for beta chain variable domain of TCR clone 71211 (TRBV20-1, TRBJ1-1)
CSARSAATSNTEAFF

SEQ ID NO: 142423 - protein, 14 aa, Homo sapiens
  CDR3 for alpha chain variable domain of TCR clone 71212 (TRAV12-2, TRAJ13)
CAVKKTGGYQKVTF

SEQ ID NO: 142424 - protein, 17 aa, Homo sapiens
  CDR3 for beta chain variable domain of TCR clone 71212 (TRBV13, TRBJ2-3)
YASSLSRVAGGRNTQYF

SEQ ID NO: 142425 - protein, 12 aa, Homo sapiens
  CDR3 for alpha chain variable domain of TCR clone 71213 (TRAV35, TRAJ31)
CAAASSNARLMF

SEQ ID NO: 142426 - protein, 14 aa, Homo sapiens
  CDR3 for beta chain variable domain of TCR clone 71213 (TRBV2, TRBJ2-2)
CASSLFGGNGELFF

SEQ ID NO: 142427 - protein, 15 aa, Homo sapiens
  CDR3 for alpha chain variable domain of TCR clone 71214 (TRAV12-2, TRAJ53)
CAVNGGGGSNYKLTF

SEQ ID NO: 142428 - protein, 16 aa, Homo sapiens
  CDR3 for beta chain variable domain of TCR clone 71214 (TRBV19, TRBJ1-1)
CASRFGGPVTGTEAFF

SEQ ID NO: 142429 - protein, 12 aa, Homo sapiens
  CDR3 for alpha chain variable domain of TCR clone 71215 (TRAV12-1, TRAJ40)
CVVYSGTYKYIF

SEQ ID NO: 142430 - protein, 17 aa, Homo sapiens
  CDR3 for beta chain variable domain of TCR clone 71215 (TRBV11-2, TRBJ2-3)
CSSLGGASRGAPNTQYF

SEQ ID NO: 142431 - protein, 11 aa, Homo sapiens
  CDR3 for alpha chain variable domain of TCR clone 71216 (TRAV21, TRAJ11)
CAVNGYSTLTF

SEQ ID NO: 142432 - protein, 14 aa, Homo sapiens
  CDR3 for beta chain variable domain of TCR clone 71216 (TRBV11-1, TRBJ2-7)
CASSFRQGSYEQYF

SEQ ID NO: 142433 - protein, 11 aa, Homo sapiens
  CDR3 for alpha chain variable domain of TCR clone 71217 (TRAV3, TRAJ13)
CAVTSYQKVTF

SEQ ID NO: 142434 - protein, 15 aa, Homo sapiens
  CDR3 for beta chain variable domain of TCR clone 71217 (TRBV7-9, TRBJ2-7)
CASSSSGLAVYEQYC

SEQ ID NO: 142435 - protein, 13 aa, Homo sapiens
  CDR3 for alpha chain variable domain of TCR clone 71218 (TRAV8-3, TRAJ44)
CAVVPGTASKLTF

SEQ ID NO: 142436 - protein, 14 aa, Homo sapiens
  CDR3 for beta chain variable domain of TCR clone 71218 (TRBV11-2, TRBJ2-3)
CSSSRLARTDTQYF

SEQ ID NO: 142437 - protein, 11 aa, Homo sapiens
  CDR3 for alpha chain variable domain of TCR clone 71219 (TRAV23/DV6, TRAJ48)
CAPRWGEKLTF

SEQ ID NO: 142438 - protein, 13 aa, Homo sapiens
  CDR3 for beta chain variable domain of TCR clone 71219 (TRBV12-4, TRBJ2-5)
CASRPGTEETQYF

SEQ ID NO: 142439 - protein, 15 aa, Homo sapiens
  CDR3 for alpha chain variable domain of TCR clone 71220 (TRAV2, TRAJ9)
CAVEDRGTGGFKTIF

SEQ ID NO: 142440 - protein, 15 aa, Homo sapiens
  CDR3 for beta chain variable domain of TCR clone 71220 (TRBV11-3, TRBJ2-3)
CASLKDGREGDTQYF

SEQ ID NO: 142441 - protein, 13 aa, Homo sapiens
  CDR3 for alpha chain variable domain of TCR clone 71221 (TRAV1-2, TRAJ13)
CAVNSGGYQKVTF

SEQ ID NO: 142442 - protein, 14 aa, Homo sapiens
  CDR3 for beta chain variable domain of TCR clone 71221 (TRBV4-1, TRBJ1-5)
CASSPKGDNQPLHF

SEQ ID NO: 142443 - protein, 14 aa, Homo sapiens
  CDR3 for alpha chain variable domain of TCR clone 71222 (TRAV1-2, TRAJ28)
CVARSGAGSYQLTF

SEQ ID NO: 142444 - protein, 15 aa, Homo sapiens
  CDR3 for beta chain variable domain of TCR clone 71222 (TRBV7-9, TRBJ1-4)
CASSARTGGNEKLFF

SEQ ID NO: 142445 - protein, 12 aa, Homo sapiens
  CDR3 for alpha chain variable domain of TCR clone 71223 (TRAV6, TRAJ30)
CALEFRDDKIIF

SEQ ID NO: 142446 - protein, 14 aa, Homo sapiens
  CDR3 for beta chain variable domain of TCR clone 71223 (TRBV7-8, TRBJ2-1)
CASSSQGTYNEQFF

SEQ ID NO: 142447 - protein, 15 aa, Homo sapiens
  CDR3 for alpha chain variable domain of TCR clone 71224 (TRAV8-4, TRAJ7)
CAVSGGDYGNNRLAF

SEQ ID NO: 142448 - protein, 11 aa, Homo sapiens
  CDR3 for beta chain variable domain of TCR clone 71224 (TRBV20-1, TRBJ2-1)
CSLSSGSEQFF

SEQ ID NO: 142449 - protein, 13 aa, Homo sapiens
  CDR3 for alpha chain variable domain of TCR clone 71225 (TRAV4, TRAJ33)
CPVGDMNNYQLIW

SEQ ID NO: 142450 - protein, 14 aa, Homo sapiens
  CDR3 for beta chain variable domain of TCR clone 71225 (TRBV7-9, TRBJ1-1)
CASSLGGANTEAFF

SEQ ID NO: 142451 - protein, 13 aa, Homo sapiens
  CDR3 for alpha chain variable domain of TCR clone 71226 (TRAV2, TRAJ21)
CSVEDLNFNKFYF

SEQ ID NO: 142452 - protein, 15 aa, Homo sapiens
  CDR3 for beta chain variable domain of TCR clone 71226 (TRBV28, TRBJ2-5)
CASSPGQGSIETQYF

SEQ ID NO: 142453 - protein, 15 aa, Homo sapiens
  CDR3 for alpha chain variable domain of TCR clone 71227 (TRAV3, TRAJ22)
CAVRDRGGSARQMTF

SEQ ID NO: 142454 - protein, 13 aa, Homo sapiens
  CDR3 for beta chain variable domain of TCR clone 71227 (TRBV2, TRBJ1-5)
CATAGPGNQPQHF

SEQ ID NO: 142455 - protein, 12 aa, Homo sapiens
  CDR3 for alpha chain variable domain of TCR clone 71228 (TRAV13-1, TRAJ21)
CAAKEGFNKFYF

SEQ ID NO: 142456 - protein, 13 aa, Homo sapiens
  CDR3 for beta chain variable domain of TCR clone 71228 (TRBV12-4, TRBJ1-2)
CASSLRQGEGYTF

SEQ ID NO: 142457 - protein, 11 aa, Homo sapiens
  CDR3 for alpha chain variable domain of TCR clone 71229 (TRAV17, TRAJ43)
CTTPRSNDMRF

SEQ ID NO: 142458 - protein, 15 aa, Homo sapiens
  CDR3 for beta chain variable domain of TCR clone 71229 (TRBV11-2, TRBJ2-1)
CASSLGTSGLNEQFF

SEQ ID NO: 142459 - protein, 17 aa, Homo sapiens
  CDR3 for alpha chain variable domain of TCR clone 71230 (TRAV13-1, TRAJ52)
CAAGRNAGGTSYGKLTF

SEQ ID NO: 142460 - protein, 19 aa, Homo sapiens
  CDR3 for beta chain variable domain of TCR clone 71230 (TRBV12-4, TRBJ2-1)
CASTLAFDPRDKEANEQFF

SEQ ID NO: 142461 - protein, 21 aa, Homo sapiens
  CDR3 for alpha chain variable domain of TCR clone 71231 (TRAV25, TRAJ53)
TATQTTDVGTGSGGSNYKLTF

SEQ ID NO: 142462 - protein, 16 aa, Homo sapiens
  CDR3 for beta chain variable domain of TCR clone 71231 (TRBV4-2, TRBJ2-3)
CASSLSSGGHTYTQYF

SEQ ID NO: 142463 - protein, 18 aa, Homo sapiens
  CDR3 for alpha chain variable domain of TCR clone 71232 (TRAV21, TRAJ52)
CAVRPSPAGGTSYGKLTF

SEQ ID NO: 142464 - protein, 17 aa, Homo sapiens
  CDR3 for beta chain variable domain of TCR clone 71232 (TRBV20-1, TRBJ2-2)
CSASGSGQGGLTWELFF

SEQ ID NO: 142465 - protein, 18 aa, Homo sapiens
  CDR3 for alpha chain variable domain of TCR clone 71233 (TRAV21, TRAJ52)
CAVRPSPVGGTSYGKLTF

SEQ ID NO: 142466 - protein, 17 aa, Homo sapiens
  CDR3 for beta chain variable domain of TCR clone 71233 (TRBV13, TRBJ2-3)
CASSLSRVAGGEEYAVF

SEQ ID NO: 142467 - protein, 16 aa, Homo sapiens
  CDR3 for alpha chain variable domain of TCR clone 71234 (TRAV30, TRAJ24)
CGTEIVDADSWGKFQF

SEQ ID NO: 142468 - protein, 13 aa, Homo sapiens
  CDR3 for beta chain variable domain of TCR clone 71234 (TRBV7-2, TRBJ1-4)
CDSSLAGLEKLFF

SEQ ID NO: 142469 - protein, 12 aa, Homo sapiens
  CDR3 for alpha chain variable domain of TCR clone 71235 (TRAV29/DV5, TRAJ34)
CAASVNTDKLIF

SEQ ID NO: 142470 - protein, 16 aa, Homo sapiens
  CDR3 for beta chain variable domain of TCR clone 71235 (TRBV12-4, TRBJ1-5)
CASRQPVEGSNQPQHF

SEQ ID NO: 142471 - protein, 12 aa, Homo sapiens
  CDR3 for alpha chain variable domain of TCR clone 71236 (TRAV16, TRAJ10)
CSRTGGGNKLTF

SEQ ID NO: 142472 - protein, 13 aa, Homo sapiens
  CDR3 for beta chain variable domain of TCR clone 71236 (TRBV2, TRBJ2-2)
CASRAWRTGELFF

SEQ ID NO: 142473 - protein, 14 aa, Homo sapiens
  CDR3 for alpha chain variable domain of TCR clone 71237 (TRAV1-2, TRAJ8)
CAVREDTGFQKLVF

SEQ ID NO: 142474 - protein, 16 aa, Homo sapiens
  CDR3 for beta chain variable domain of TCR clone 71237 (TRBV4-3, TRBJ2-1)
CASSPALGRGVNEQFF

SEQ ID NO: 142475 - protein, 14 aa, Homo sapiens
  CDR3 for alpha chain variable domain of TCR clone 71238 (TRAV17, TRAJ40)
CATALTPGTYKYIF

SEQ ID NO: 142476 - protein, 13 aa, Homo sapiens
  CDR3 for beta chain variable domain of TCR clone 71238 (TRBV27, TRBJ2-1)
CASSSGSYNEQFF

SEQ ID NO: 142477 - protein, 15 aa, Homo sapiens
  CDR3 for alpha chain variable domain of TCR clone 71239 (TRAV27, TRAJ38)
CAARRNAGNKRKLIW

SEQ ID NO: 142478 - protein, 11 aa, Homo sapiens
  CDR3 for beta chain variable domain of TCR clone 71239 (TRBV12-4, TRBJ2-2)
CASSSAGELFF

SEQ ID NO: 142479 - protein, 11 aa, Homo sapiens
  CDR3 for alpha chain variable domain of TCR clone 71240 (TRAV3, TRAJ21)
CAVGNFNKFYF

SEQ ID NO: 142480 - protein, 16 aa, Homo sapiens
  CDR3 for beta chain variable domain of TCR clone 71240 (TRBV19, TRBJ2-1)
CASSRAGPSSCNEQFF

SEQ ID NO: 142481 - protein, 13 aa, Homo sapiens
  CDR3 for alpha chain variable domain of TCR clone 71241 (TRAV3, TRAJ21)
CAVREPDFNKFYF

SEQ ID NO: 142482 - protein, 15 aa, Homo sapiens
  CDR3 for beta chain variable domain of TCR clone 71241 (TRBV4-2, TRBJ1-2)
CASSQRTGGRDGYTF

SEQ ID NO: 142483 - protein, 15 aa, Homo sapiens
  CDR3 for alpha chain variable domain of TCR clone 71242 (TRAV35, TRAJ58)
CAGRRQEASGSRLTF

SEQ ID NO: 142484 - protein, 11 aa, Homo sapiens
  CDR3 for beta chain variable domain of TCR clone 71242 (TRBV11-2, TRBJ1-1)
CASSINTEAFF

SEQ ID NO: 142485 - protein, 13 aa, Homo sapiens
  CDR3 for alpha chain variable domain of TCR clone 71243 (TRAV12-1, TRAJ35)
CVVRGGFGNVLHC

SEQ ID NO: 142486 - protein, 13 aa, Homo sapiens
  CDR3 for beta chain variable domain of TCR clone 71243 (TRBV19, TRBJ2-1)
RASTNSDVGEQFF

SEQ ID NO: 142487 - protein, 12 aa, Homo sapiens
  CDR3 for alpha chain variable domain of TCR clone 71244 (TRAV12-3, TRAJ17)
CAMTLAGNKLTF

SEQ ID NO: 142488 - protein, 15 aa, Homo sapiens
  CDR3 for beta chain variable domain of TCR clone 71244 (TRBV20-1, TRBJ2-7)
CSARDRVAGMDEQYF

SEQ ID NO: 142489 - protein, 18 aa, Homo sapiens
  CDR3 for alpha chain variable domain of TCR clone 71245 (TRAV21, TRAJ52)
CAVRPSPAGGTSYGKLTF

SEQ ID NO: 142490 - protein, 12 aa, Homo sapiens
  CDR3 for beta chain variable domain of TCR clone 71245 (TRBV7-2, TRBJ2-2)
CATQIVTGELFF

SEQ ID NO: 142491 - protein, 12 aa, Homo sapiens
  CDR3 for alpha chain variable domain of TCR clone 71246 (TRAV35, TRAJ30)
CAGLNRDDKVIF

SEQ ID NO: 142492 - protein, 15 aa, Homo sapiens
  CDR3 for beta chain variable domain of TCR clone 71246 (TRBV9, TRBJ1-6)
CASSVAGTGDSPLHF

SEQ ID NO: 142493 - protein, 15 aa, Homo sapiens
  CDR3 for alpha chain variable domain of TCR clone 71247 (TRAV14/DV4, TRAJ12)
CAMREERDSSYKLIF

SEQ ID NO: 142494 - protein, 13 aa, Homo sapiens
  CDR3 for beta chain variable domain of TCR clone 71247 (TRBV15, TRBJ1-6)
CATSGGLNSPLHF

SEQ ID NO: 142495 - protein, 14 aa, Homo sapiens
  CDR3 for alpha chain variable domain of TCR clone 71248 (TRAV12-2, TRAJ33)
CAVKRARSNYQLIW

SEQ ID NO: 142496 - protein, 12 aa, Homo sapiens
  CDR3 for beta chain variable domain of TCR clone 71248 (TRBV24-1, TRBJ2-3)
CATSDSTDTQYV

SEQ ID NO: 142497 - protein, 12 aa, Homo sapiens
  CDR3 for alpha chain variable domain of TCR clone 71249 (TRAV29/DV5, TRAJ49)
CAATDTGNQFYF

SEQ ID NO: 142498 - protein, 19 aa, Homo sapiens
  CDR3 for beta chain variable domain of TCR clone 71249 (TRBV25-1, TRBJ2-2)
CAILVYRVDKGRKTGELFF

SEQ ID NO: 142499 - protein, 18 aa, Homo sapiens
  CDR3 for alpha chain variable domain of TCR clone 71250 (TRAV8-4, TRAJ52)
CAVTRANAGGTSYGKLTF

SEQ ID NO: 142500 - protein, 20 aa, Homo sapiens
  CDR3 for beta chain variable domain of TCR clone 71250 (TRBV19, TRBJ2-1)
CASSISRTVTSTRLNNERFF

SEQ ID NO: 142501 - protein, 17 aa, Homo sapiens
  CDR3 for alpha chain variable domain of TCR clone 71251 (TRAV26-1, TRAJ37)
CIVRVITVPSNTGKLIF

SEQ ID NO: 142502 - protein, 17 aa, Homo sapiens
  CDR3 for beta chain variable domain of TCR clone 71251 (TRBV7-8, TRBJ2-6)
CASSAGTGGAGANVLTF

SEQ ID NO: 142503 - protein, 16 aa, Homo sapiens
  CDR3 for alpha chain variable domain of TCR clone 71252 (TRAV26-1, TRAJ45)
CIVEKYSGGGADGLTF

SEQ ID NO: 142504 - protein, 16 aa, Homo sapiens
  CDR3 for beta chain variable domain of TCR clone 71252 (TRBV28, TRBJ1-4)
CDSSPPYRGRSEKLFF

SEQ ID NO: 142505 - protein, 13 aa, Homo sapiens
  CDR3 for alpha chain variable domain of TCR clone 71253 (TRAV23/DV6, TRAJ47)
CAASSQYGNKLVF

SEQ ID NO: 142506 - protein, 15 aa, Homo sapiens
  CDR3 for beta chain variable domain of TCR clone 71253 (TRBV7-3, TRBJ2-1)
CASSLDGNSYNEQFL

SEQ ID NO: 142507 - protein, 12 aa, Homo sapiens
  CDR3 for alpha chain variable domain of TCR clone 71254 (TRAV13-1, TRAJ21)
CAAKDGFNKFYF

SEQ ID NO: 142508 - protein, 14 aa, Homo sapiens
  CDR3 for beta chain variable domain of TCR clone 71254 (TRBV5-4, TRBJ1-1)
CASSLDSRRDEAFF

SEQ ID NO: 142509 - protein, 15 aa, Homo sapiens
  CDR3 for alpha chain variable domain of TCR clone 71255 (TRAV38-1, TRAJ26)
CAFMKHDGNGQNFVF

SEQ ID NO: 142510 - protein, 13 aa, Homo sapiens
  CDR3 for beta chain variable domain of TCR clone 71255 (TRBV4-2, TRBJ1-1)
CASSQAGNTEAFF

SEQ ID NO: 142511 - protein, 14 aa, Homo sapiens
  CDR3 for alpha chain variable domain of TCR clone 71256 (TRAV1-2, TRAJ6)
CAVSLSGGSYIPTF

SEQ ID NO: 142512 - protein, 14 aa, Homo sapiens
  CDR3 for beta chain variable domain of TCR clone 71256 (TRBV19, TRBJ2-1)
CASPTFVLSGEQFF

SEQ ID NO: 142513 - protein, 16 aa, Homo sapiens
  CDR3 for alpha chain variable domain of TCR clone 71257 (TRAV3, TRAJ37)
CAVRPHGSGNTGKLIF

SEQ ID NO: 142514 - protein, 14 aa, Homo sapiens
  CDR3 for beta chain variable domain of TCR clone 71257 (TRBV7-2, TRBJ1-1)
CASSFLTGTTEAFF

SEQ ID NO: 142515 - protein, 12 aa, Homo sapiens
  CDR3 for alpha chain variable domain of TCR clone 71258 (TRAV13-2, TRAJ23)
CAERHRGGKLIF

SEQ ID NO: 142516 - protein, 15 aa, Homo sapiens
  CDR3 for beta chain variable domain of TCR clone 71258 (TRBV7-9, TRBJ1-6)
CAGSSPGRGNSPLHF

SEQ ID NO: 142517 - protein, 12 aa, Homo sapiens
  CDR3 for alpha chain variable domain of TCR clone 71259 (TRAV12-3, TRAJ17)
CAMTLTGNKLTF

SEQ ID NO: 142518 - protein, 14 aa, Homo sapiens
  CDR3 for beta chain variable domain of TCR clone 71259 (TRBV19, TRBJ2-1)
CASPTFVVSGEQFF

SEQ ID NO: 142519 - protein, 13 aa, Homo sapiens
  CDR3 for alpha chain variable domain of TCR clone 71260 (TRAV27, TRAJ29)
CAGAHSGNTPLVF

SEQ ID NO: 142520 - protein, 13 aa, Homo sapiens
  CDR3 for beta chain variable domain of TCR clone 71260 (TRBV6-4, TRBJ1-5)
CASSADLNQPQHF

SEQ ID NO: 142521 - protein, 11 aa, Homo sapiens
  CDR3 for alpha chain variable domain of TCR clone 71261 (TRAV12-3, TRAJ41)
CAMNAREALNF

SEQ ID NO: 142522 - protein, 16 aa, Homo sapiens
  CDR3 for beta chain variable domain of TCR clone 71261 (TRBV7-8, TRBJ2-3)
CAGSTEGQRETDTQYF

SEQ ID NO: 142523 - protein, 15 aa, Homo sapiens
  CDR3 for alpha chain variable domain of TCR clone 71262 (TRAV8-3, TRAJ45)
CASSYLGGGADGLTF

SEQ ID NO: 142524 - protein, 15 aa, Homo sapiens
  CDR3 for beta chain variable domain of TCR clone 71262 (TRBV18, TRBJ1-1)
CASSPRQGENTEAFF

SEQ ID NO: 142525 - protein, 11 aa, Homo sapiens
  CDR3 for alpha chain variable domain of TCR clone 71263 (TRAV17, TRAJ43)
CATPRRNDMRF

SEQ ID NO: 142526 - protein, 15 aa, Homo sapiens
  CDR3 for beta chain variable domain of TCR clone 71263 (TRBV11-2, TRBJ2-1)
CASSLGTSGLNEQFF

SEQ ID NO: 142527 - protein, 11 aa, Homo sapiens
  CDR3 for alpha chain variable domain of TCR clone 71264 (TRAV17, TRAJ9)
CGFTGGFKTIF

SEQ ID NO: 142528 - protein, 15 aa, Homo sapiens
  CDR3 for beta chain variable domain of TCR clone 71264 (TRBV11-2, TRBJ1-2)
CASSLEGVQRNGYTF

SEQ ID NO: 142529 - protein, 15 aa, Homo sapiens
  CDR3 for alpha chain variable domain of TCR clone 71265 (TRAV2, TRAJ15)
CAVEDREQAGTALIF

SEQ ID NO: 142530 - protein, 13 aa, Homo sapiens
  CDR3 for beta chain variable domain of TCR clone 71265 (TRBV10-2, TRBJ2-7)
RASGTSGGYEQYF

SEQ ID NO: 142531 - protein, 11 aa, Homo sapiens
  CDR3 for alpha chain variable domain of TCR clone 71266 (TRAV2, TRAJ33)
CAVDSNYQLIW

SEQ ID NO: 142532 - protein, 14 aa, Homo sapiens
  CDR3 for beta chain variable domain of TCR clone 71266 (TRBV7-8, TRBJ2-3)
CASSLEAGTDTQYF

SEQ ID NO: 142533 - protein, 12 aa, Homo sapiens
  CDR3 for alpha chain variable domain of TCR clone 71267 (TRAV12-3, TRAJ17)
CAMTLTGNKLTF

SEQ ID NO: 142534 - protein, 20 aa, Homo sapiens
  CDR3 for beta chain variable domain of TCR clone 71267 (TRBV19, TRBJ2-1)
CASSISRTVTSTRLSNEQFF

SEQ ID NO: 142535 - protein, 13 aa, Homo sapiens
  CDR3 for alpha chain variable domain of TCR clone 71268 (TRAV26-1, TRAJ33)
CIVRVEGNYQLIW

SEQ ID NO: 142536 - protein, 13 aa, Homo sapiens
  CDR3 for beta chain variable domain of TCR clone 71268 (TRBV7-3, TRBJ1-1)
CASSQDWGAEAFF

SEQ ID NO: 142537 - protein, 16 aa, Homo sapiens
  CDR3 for alpha chain variable domain of TCR clone 71269 (TRAV12-2, TRAJ45)
CAVKRNPGGGADGLTF

SEQ ID NO: 142538 - protein, 16 aa, Homo sapiens
  CDR3 for beta chain variable domain of TCR clone 71269 (TRBV12-5, TRBJ2-5)
CAGGPRTSGNQETQYF

SEQ ID NO: 142539 - protein, 14 aa, Homo sapiens
  CDR3 for alpha chain variable domain of TCR clone 71270 (TRAV1-2, TRAJ8)
CDVREDTGFQKLVF

SEQ ID NO: 142540 - protein, 15 aa, Homo sapiens
  CDR3 for beta chain variable domain of TCR clone 71270 (TRBV27, TRBJ2-1)
CASSNGGGSSNEQFF

SEQ ID NO: 142541 - protein, 13 aa, Homo sapiens
  CDR3 for alpha chain variable domain of TCR clone 71271 (TRAV12-2, TRAJ47)
CAVFMEYGHKLVF

SEQ ID NO: 142542 - protein, 14 aa, Homo sapiens
  CDR3 for beta chain variable domain of TCR clone 71271 (TRBV4-1, TRBJ1-5)
CASSQGPTNQPQHF

SEQ ID NO: 142543 - protein, 15 aa, Homo sapiens
  CDR3 for alpha chain variable domain of TCR clone 71272 (TRAV3, TRAJ22)
CAVRDRGGSARQLTF

SEQ ID NO: 142544 - protein, 18 aa, Homo sapiens
  CDR3 for beta chain variable domain of TCR clone 71272 (TRBV28, TRBJ2-1)
CAISSTSGRANSYNEQFF

SEQ ID NO: 142545 - protein, 16 aa, Homo sapiens
  CDR3 for alpha chain variable domain of TCR clone 71273 (TRAV4, TRAJ22)
CLVGDLYSGSARQLTS

SEQ ID NO: 142546 - protein, 16 aa, Homo sapiens
  CDR3 for beta chain variable domain of TCR clone 71273 (TRBV7-9, TRBJ2-1)
CASSDIAGGSYNEQFF

SEQ ID NO: 142547 - protein, 14 aa, Homo sapiens
  CDR3 for alpha chain variable domain of TCR clone 71274 (TRAV26-1, TRAJ45)
CIEVTGGGADGLTF

SEQ ID NO: 142548 - protein, 13 aa, Homo sapiens
  CDR3 for beta chain variable domain of TCR clone 71274 (TRBV7-6, TRBJ1-2)
FASSLVADYGYTF

SEQ ID NO: 142549 - protein, 12 aa, Homo sapiens
  CDR3 for alpha chain variable domain of TCR clone 71275 (TRAV12-3, TRAJ17)
CAMTLTGNKLTF

SEQ ID NO: 142550 - protein, 15 aa, Homo sapiens
  CDR3 for beta chain variable domain of TCR clone 71275 (TRBV5-1, TRBJ2-7)
CASSTSGGPTYEQYF

SEQ ID NO: 142551 - protein, 16 aa, Homo sapiens
  CDR3 for alpha chain variable domain of TCR clone 71276 (TRAV27, TRAJ13)
CAGAKSDSGGYQKVTF

SEQ ID NO: 142552 - protein, 13 aa, Homo sapiens
  CDR3 for beta chain variable domain of TCR clone 71276 (TRBV7-3, TRBJ1-1)
CASSQDWGAEAFF

SEQ ID NO: 142553 - protein, 14 aa, Homo sapiens
  CDR3 for alpha chain variable domain of TCR clone 71277 (TRAV13-1, TRAJ44)
CAAKATGTASKLTF

SEQ ID NO: 142554 - protein, 15 aa, Homo sapiens
  CDR3 for beta chain variable domain of TCR clone 71277 (TRBV14, TRBJ2-1)
CASSLGLAGGTEQFF

SEQ ID NO: 142555 - protein, 15 aa, Homo sapiens
  CDR3 for alpha chain variable domain of TCR clone 71278 (TRAV3, TRAJ29)
CAVRAPLSGHTPLVF

SEQ ID NO: 142556 - protein, 15 aa, Homo sapiens
  CDR3 for beta chain variable domain of TCR clone 71278 (TRBV28, TRBJ1-1)
CASRIKGGLNTEAFF

SEQ ID NO: 142557 - protein, 12 aa, Homo sapiens
  CDR3 for alpha chain variable domain of TCR clone 71279 (TRAV12-3, TRAJ20)
RAMVRGDYKLSF

SEQ ID NO: 142558 - protein, 14 aa, Homo sapiens
  CDR3 for beta chain variable domain of TCR clone 71279 (TRBV13, TRBJ2-5)
CASSLGPRGETQYF

SEQ ID NO: 142559 - protein, 14 aa, Homo sapiens
  CDR3 for alpha chain variable domain of TCR clone 71280 (TRAV12-3, TRAJ10)
SHLPLTGGGNKLTF

SEQ ID NO: 142560 - protein, 16 aa, Homo sapiens
  CDR3 for beta chain variable domain of TCR clone 71280 (TRBV27, TRBJ2-5)
CASSYGPGGQKETQYF

SEQ ID NO: 142561 - protein, 15 aa, Homo sapiens
  CDR3 for alpha chain variable domain of TCR clone 71281 (TRAV29/DV5, TRAJ24)
CAASGATDSWGKFQF

SEQ ID NO: 142562 - protein, 12 aa, Homo sapiens
  CDR3 for beta chain variable domain of TCR clone 71281 (TRBV11-2, TRBJ2-2)
CASNLPTGELFF

SEQ ID NO: 142563 - protein, 13 aa, Homo sapiens
  CDR3 for alpha chain variable domain of TCR clone 71282 (TRAV13-1, TRAJ39)
CAASIWAGNMLTF

SEQ ID NO: 142564 - protein, 13 aa, Homo sapiens
  CDR3 for beta chain variable domain of TCR clone 71282 (TRBV27, TRBJ1-4)
CASSLMGDEKLFF

SEQ ID NO: 142565 - protein, 15 aa, Homo sapiens
  CDR3 for alpha chain variable domain of TCR clone 71283 (TRAV4, TRAJ39)
CLVGPNNNAGNMLTF

SEQ ID NO: 142566 - protein, 13 aa, Homo sapiens
  CDR3 for beta chain variable domain of TCR clone 71283 (TRBV11-2, TRBJ2-5)
CASSSTWEETQYF

SEQ ID NO: 142567 - protein, 11 aa, Homo sapiens
  CDR3 for alpha chain variable domain of TCR clone 71284 (TRAV21, TRAJ11)
CAVNGYSTLTF

SEQ ID NO: 142568 - protein, 14 aa, Homo sapiens
  CDR3 for beta chain variable domain of TCR clone 71284 (TRBV6-1, TRBJ1-3)
CASVRGGGGNTIYF

SEQ ID NO: 142569 - protein, 15 aa, Homo sapiens
  CDR3 for alpha chain variable domain of TCR clone 71285 (TRAV13-2, TRAJ10)
CAENRDTGGGNKLTF

SEQ ID NO: 142570 - protein, 16 aa, Homo sapiens
  CDR3 for beta chain variable domain of TCR clone 71285 (TRBV2, TRBJ1-3)
CASSRTGGSTGNTVYF

SEQ ID NO: 142571 - protein, 17 aa, Homo sapiens
  CDR3 for alpha chain variable domain of TCR clone 71286 (TRAV3, TRAJ29)
CAVRDSDSEFRKHTSCL

SEQ ID NO: 142572 - protein, 15 aa, Homo sapiens
  CDR3 for beta chain variable domain of TCR clone 71286 (TRBV7-2, TRBJ2-5)
CASSGILVGAETQYF

SEQ ID NO: 142573 - protein, 15 aa, Homo sapiens
  CDR3 for alpha chain variable domain of TCR clone 71287 (TRAV35, TRAJ40)
CAGQIGQAGTYKYIF

SEQ ID NO: 142574 - protein, 14 aa, Homo sapiens
  CDR3 for beta chain variable domain of TCR clone 71287 (TRBV7-3, TRBJ2-1)
CASSLTGGANEQFF

SEQ ID NO: 142575 - protein, 19 aa, Homo sapiens
  CDR3 for alpha chain variable domain of TCR clone 71288 (TRAV14/DV4, TRAJ53)
CISVQWGLGGGGSNYKLTF

SEQ ID NO: 142576 - protein, 13 aa, Homo sapiens
  CDR3 for beta chain variable domain of TCR clone 71288 (TRBV4-2, TRBJ1-1)
CASSQAGNTEAFF

SEQ ID NO: 142577 - protein, 14 aa, Homo sapiens
  CDR3 for alpha chain variable domain of TCR clone 71289 (TRAV1-2, TRAJ8)
CAVREDTGFQKLVF

SEQ ID NO: 142578 - protein, 15 aa, Homo sapiens
  CDR3 for beta chain variable domain of TCR clone 71289 (TRBV5-5, TRBJ1-5)
CASSLEGASNQPQHF

SEQ ID NO: 142579 - protein, 18 aa, Homo sapiens
  CDR3 for alpha chain variable domain of TCR clone 71290 (TRAV21, TRAJ52)
CAVRPSPAGGTSYGKLTF

SEQ ID NO: 142580 - protein, 13 aa, Homo sapiens
  CDR3 for beta chain variable domain of TCR clone 71290 (TRBV7-3, TRBJ1-1)
CASSQDWGAGAFF

SEQ ID NO: 142581 - protein, 13 aa, Homo sapiens
  CDR3 for alpha chain variable domain of TCR clone 71291 (TRAV27, TRAJ41)
CAGEGNSGYALNF

SEQ ID NO: 142582 - protein, 15 aa, Homo sapiens
  CDR3 for beta chain variable domain of TCR clone 71291 (TRBV7-3, TRBJ2-1)
CASSPTGGGEVEQFF

SEQ ID NO: 142583 - protein, 13 aa, Homo sapiens
  CDR3 for alpha chain variable domain of TCR clone 71292 (TRAV8-3, TRAJ44)
CAVVPGTASKLTF

SEQ ID NO: 142584 - protein, 14 aa, Homo sapiens
  CDR3 for beta chain variable domain of TCR clone 71292 (TRBV11-2, TRBJ2-3)
CASRRLARADTQYF

SEQ ID NO: 142585 - protein, 15 aa, Homo sapiens
  CDR3 for alpha chain variable domain of TCR clone 71293 (TRAV26-1, TRAJ22)
CIVRVSFWFCKATDL

SEQ ID NO: 142586 - protein, 15 aa, Homo sapiens
  CDR3 for beta chain variable domain of TCR clone 71293 (TRBV11-2, TRBJ2-2)
CASSSDRVNAGELFF

SEQ ID NO: 142587 - protein, 12 aa, Homo sapiens
  CDR3 for alpha chain variable domain of TCR clone 71294 (TRAV30, TRAJ43)
CGTEERGNDMRV

SEQ ID NO: 142588 - protein, 11 aa, Homo sapiens
  CDR3 for beta chain variable domain of TCR clone 71294 (TRBV29-1, TRBJ2-5)
CSEDRTGTQYF

SEQ ID NO: 142589 - protein, 14 aa, Homo sapiens
  CDR3 for alpha chain variable domain of TCR clone 71295 (TRAV12-2, TRAJ17)
CSVLFKAAGNKLTF

SEQ ID NO: 142590 - protein, 14 aa, Homo sapiens
  CDR3 for beta chain variable domain of TCR clone 71295 (TRBV12-5, TRBJ2-5)
CASGSRTHQETQYF

SEQ ID NO: 142591 - protein, 13 aa, Homo sapiens
  CDR3 for alpha chain variable domain of TCR clone 71296 (TRAV13-1, TRAJ21)
CAASIYNFNKFYF

SEQ ID NO: 142592 - protein, 17 aa, Homo sapiens
  CDR3 for beta chain variable domain of TCR clone 71296 (TRBV7-9, TRBJ2-3)
CASSPTVAGDLTDTQYF

SEQ ID NO: 142593 - protein, 13 aa, Homo sapiens
  CDR3 for alpha chain variable domain of TCR clone 71297 (TRAV8-1, TRAJ28)
CAVSGAGSYQLTF

SEQ ID NO: 142594 - protein, 13 aa, Homo sapiens
  CDR3 for beta chain variable domain of TCR clone 71297 (TRBV7-2, TRBJ2-2)
CQQRTGGGWELFF

SEQ ID NO: 142595 - protein, 17 aa, Homo sapiens
  CDR3 for alpha chain variable domain of TCR clone 71298 (TRAV3, TRAJ38)
CAVRDCLNAGNNRKLIW

SEQ ID NO: 142596 - protein, 17 aa, Homo sapiens
  CDR3 for beta chain variable domain of TCR clone 71298 (TRBV13, TRBJ2-3)
CASSLSRVAGGRNTQYF

SEQ ID NO: 142597 - protein, 13 aa, Homo sapiens
  CDR3 for alpha chain variable domain of TCR clone 71299 (TRAV12-3, TRAJ7)
CAMSASGNNRLAF

SEQ ID NO: 142598 - protein, 15 aa, Homo sapiens
  CDR3 for beta chain variable domain of TCR clone 71299 (TRBV5-1, TRBJ2-3)
CASSVTSGSTDTQYF

SEQ ID NO: 142599 - protein, 15 aa, Homo sapiens
  CDR3 for alpha chain variable domain of TCR clone 71300 (TRAV26-1, TRAJ42)
CIVRVKGGSQGNLIF

SEQ ID NO: 142600 - protein, 16 aa, Homo sapiens
  CDR3 for beta chain variable domain of TCR clone 71300 (TRBV6-4, TRBJ1-2)
CASSEAVGDPNYGYTF

SEQ ID NO: 142601 - protein, 14 aa, Homo sapiens
  CDR3 for alpha chain variable domain of TCR clone 71301 (TRAV23/DV6, TRAJ17)
CAASVQAAGNELTF

SEQ ID NO: 142602 - protein, 18 aa, Homo sapiens
  CDR3 for beta chain variable domain of TCR clone 71301 (TRBV20-1, TRBJ2-7)
CSAGLPPRSGGSPYEQYF

SEQ ID NO: 142603 - protein, 15 aa, Homo sapiens
  CDR3 for alpha chain variable domain of TCR clone 71302 (TRAV29/DV5, TRAJ24)
CSASGATDSWGKFQF

SEQ ID NO: 142604 - protein, 14 aa, Homo sapiens
  CDR3 for beta chain variable domain of TCR clone 71302 (TRBV12-5, TRBJ2-5)
CASGSRTHQETQYF

SEQ ID NO: 142605 - protein, 14 aa, Homo sapiens
  CDR3 for alpha chain variable domain of TCR clone 71303 (TRAV12-3, TRAJ29)
CAMSPYSGNTPLVF

SEQ ID NO: 142606 - protein, 15 aa, Homo sapiens
  CDR3 for beta chain variable domain of TCR clone 71303 (TRBV11-2, TRBJ1-6)
CASSLDPWAVSPLHF

SEQ ID NO: 142607 - protein, 14 aa, Homo sapiens
  CDR3 for alpha chain variable domain of TCR clone 71304 (TRAV13-2, TRAJ22)
CADGTLGSARQLTF

SEQ ID NO: 142608 - protein, 15 aa, Homo sapiens
  CDR3 for beta chain variable domain of TCR clone 71304 (TRBV6-3, TRBJ2-7)
CASSSPGTVLYEQYF

SEQ ID NO: 142609 - protein, 15 aa, Homo sapiens
  CDR3 for alpha chain variable domain of TCR clone 71305 (TRAV8-3, TRAJ11)
CAVGLLNSGYSTLTF

SEQ ID NO: 142610 - protein, 12 aa, Homo sapiens
  CDR3 for beta chain variable domain of TCR clone 71305 (TRBV11-2, TRBJ2-1)
CASSPGNNEQFF

SEQ ID NO: 142611 - protein, 12 aa, Homo sapiens
  CDR3 for alpha chain variable domain of TCR clone 71306 (TRAV3, TRAJ20)
CAVRDPDYKLSF

SEQ ID NO: 142612 - protein, 14 aa, Homo sapiens
  CDR3 for beta chain variable domain of TCR clone 71306 (TRBV4-2, TRBJ2-1)
CASGSDRAYNEQFF

SEQ ID NO: 142613 - protein, 16 aa, Homo sapiens
  CDR3 for alpha chain variable domain of TCR clone 71307 (TRAV21, TRAJ37)
CAVRTAGSGNAGKLIF

SEQ ID NO: 142614 - protein, 13 aa, Homo sapiens
  CDR3 for beta chain variable domain of TCR clone 71307 (TRBV7-9, TRBJ2-5)
CASLPSGRETQYF

SEQ ID NO: 142615 - protein, 17 aa, Homo sapiens
  CDR3 for alpha chain variable domain of TCR clone 71308 (TRAV3, TRAJ6)
CAVRDGPRAGGSYIPTF

SEQ ID NO: 142616 - protein, 19 aa, Homo sapiens
  CDR3 for beta chain variable domain of TCR clone 71308 (TRBV25-1, TRBJ2-2)
CAILVYRVDRGRKTGELFF

SEQ ID NO: 142617 - protein, 15 aa, Homo sapiens
  CDR3 for alpha chain variable domain of TCR clone 71309 (TRAV8-3, TRAJ45)
CASSYSGGGADGLTF

SEQ ID NO: 142618 - protein, 15 aa, Homo sapiens
  CDR3 for beta chain variable domain of TCR clone 71309 (TRBV5-1, TRBJ2-7)
CASSLNGGPAREQYF

SEQ ID NO: 142619 - protein, 16 aa, Homo sapiens
  CDR3 for alpha chain variable domain of TCR clone 71310 (TRAV3, TRAJ18)
CAVRDGRGSTLGRLYF

SEQ ID NO: 142620 - protein, 15 aa, Homo sapiens
  CDR3 for beta chain variable domain of TCR clone 71310 (TRBV7-9, TRBJ1-6)
CASSSPGRGNSPLYF

SEQ ID NO: 142621 - protein, 16 aa, Homo sapiens
  CDR3 for alpha chain variable domain of TCR clone 71311 (TRAV30, TRAJ24)
CGTEIVDADSWGKFQF

SEQ ID NO: 142622 - protein, 12 aa, Homo sapiens
  CDR3 for beta chain variable domain of TCR clone 71311 (TRBV11-2, TRBJ2-1)
CASSPGNNKQFF

SEQ ID NO: 142623 - protein, 16 aa, Homo sapiens
  CDR3 for alpha chain variable domain of TCR clone 71312 (TRAV12-1, TRAJ12)
RVVNTLLMDSSYKLIF

SEQ ID NO: 142624 - protein, 13 aa, Homo sapiens
  CDR3 for beta chain variable domain of TCR clone 71312 (TRBV11-2, TRBJ2-1)
CASSSEAYNEQFF

SEQ ID NO: 142625 - protein, 15 aa, Homo sapiens
  CDR3 for alpha chain variable domain of TCR clone 71313 (TRAV14/DV4, TRAJ12)
CAMREERDSSYKLIF

SEQ ID NO: 142626 - protein, 13 aa, Homo sapiens
  CDR3 for beta chain variable domain of TCR clone 71313 (TRBV20-1, TRBJ1-1)
CSARGGGNTEAFF

SEQ ID NO: 142627 - protein, 12 aa, Homo sapiens
  CDR3 for alpha chain variable domain of TCR clone 71314 (TRAV1-1, TRAJ39)
CDVPVVGNMLTF

SEQ ID NO: 142628 - protein, 17 aa, Homo sapiens
  CDR3 for beta chain variable domain of TCR clone 71314 (TRBV28, TRBJ2-5)
CASSTPEGDALQETQYF

SEQ ID NO: 142629 - protein, 14 aa, Homo sapiens
  CDR3 for alpha chain variable domain of TCR clone 71315 (TRAV12-2, TRAJ13)
CAVQKTGGYQKVTF

SEQ ID NO: 142630 - protein, 12 aa, Homo sapiens
  CDR3 for beta chain variable domain of TCR clone 71315 (TRBV12-4, TRBJ1-2)
CASSFIWLHLRF

SEQ ID NO: 142631 - protein, 18 aa, Homo sapiens
  CDR3 for alpha chain variable domain of TCR clone 71316 (TRAV21, TRAJ52)
CAVGPSPAGGTSYGKLTF

SEQ ID NO: 142632 - protein, 17 aa, Homo sapiens
  CDR3 for beta chain variable domain of TCR clone 71316 (TRBV13, TRBJ2-3)
CASSRSRVAGGRNTQYF

SEQ ID NO: 142633 - protein, 11 aa, Homo sapiens
  CDR3 for alpha chain variable domain of TCR clone 71317 (TRAV20, TRAJ32)
CAVDGMVVLQT

SEQ ID NO: 142634 - protein, 16 aa, Homo sapiens
  CDR3 for beta chain variable domain of TCR clone 71317 (TRBV19, TRBJ2-2)
CASRSPGTGATGELFF

SEQ ID NO: 142635 - protein, 20 aa, Homo sapiens
  CDR3 for alpha chain variable domain of TCR clone 71318 (TRAV30, TRAJ32)
RSLLLRHREGYGGATNKLIF

SEQ ID NO: 142636 - protein, 13 aa, Homo sapiens
  CDR3 for beta chain variable domain of TCR clone 71318 (TRBV10-3, TRBJ2-7)
CASKLAVNYEQYF

SEQ ID NO: 142637 - protein, 16 aa, Homo sapiens
  CDR3 for alpha chain variable domain of TCR clone 71319 (TRAV30, TRAJ24)
CGTEIVDADSWGKFQF

SEQ ID NO: 142638 - protein, 13 aa, Homo sapiens
  CDR3 for beta chain variable domain of TCR clone 71319 (TRBV7-9, TRBJ1-2)
CASSLKRNYGYTF

SEQ ID NO: 142639 - protein, 17 aa, Homo sapiens
  CDR3 for alpha chain variable domain of TCR clone 71320 (TRAV4, TRAJ42)
CLVGVLKYGGSQGNLIF

SEQ ID NO: 142640 - protein, 12 aa, Homo sapiens
  CDR3 for beta chain variable domain of TCR clone 71320 (TRBV20-1, TRBJ2-1)
CSAQYTYNEQFF

SEQ ID NO: 142641 - protein, 15 aa, Homo sapiens
  CDR3 for alpha chain variable domain of TCR clone 71321 (TRAV3, TRAJ17)
CAVGDTGAAGNKLTF

SEQ ID NO: 142642 - protein, 14 aa, Homo sapiens
  CDR3 for beta chain variable domain of TCR clone 71321 (TRBV6-3, TRBJ1-1)
CASSNLLPGAEAFF

SEQ ID NO: 142643 - protein, 15 aa, Homo sapiens
  CDR3 for alpha chain variable domain of TCR clone 71322 (TRAV21, TRAJ53)
CATLNSGGSNYKLTF

SEQ ID NO: 142644 - protein, 16 aa, Homo sapiens
  CDR3 for beta chain variable domain of TCR clone 71322 (TRBV29-1, TRBJ1-2)
CSVEANRDIANYGDTF

SEQ ID NO: 142645 - protein, 15 aa, Homo sapiens
  CDR3 for alpha chain variable domain of TCR clone 71323 (TRAV8-3, TRAJ45)
CASSYSGGGADGLTF

SEQ ID NO: 142646 - protein, 13 aa, Homo sapiens
  CDR3 for beta chain variable domain of TCR clone 71323 (TRBV10-3, TRBJ2-7)
CASKLAVNYEQYY

SEQ ID NO: 142647 - protein, 16 aa, Homo sapiens
  CDR3 for alpha chain variable domain of TCR clone 71324 (TRAV22, TRAJ45)
CAVERGKRGGADGLTF

SEQ ID NO: 142648 - protein, 13 aa, Homo sapiens
  CDR3 for beta chain variable domain of TCR clone 71324 (TRBV27, TRBJ1-1)
CVSSLSIGAEAFF

SEQ ID NO: 142649 - protein, 14 aa, Homo sapiens
  CDR3 for alpha chain variable domain of TCR clone 71325 (TRAV12-1, TRAJ26)
CVVKGSNYGQNFVF

SEQ ID NO: 142650 - protein, 15 aa, Homo sapiens
  CDR3 for beta chain variable domain of TCR clone 71325 (TRBV20-1, TRBJ2-7)
CSARDRVSGMDEQYF

SEQ ID NO: 142651 - protein, 15 aa, Homo sapiens
  CDR3 for alpha chain variable domain of TCR clone 71326 (TRAV8-3, TRAJ27)
CAVGPSKTNAGKSTF

SEQ ID NO: 142652 - protein, 15 aa, Homo sapiens
  CDR3 for beta chain variable domain of TCR clone 71326 (TRBV7-2, TRBJ2-1)
GASSSGLAGGNEQFF

SEQ ID NO: 142653 - protein, 15 aa, Homo sapiens
  CDR3 for alpha chain variable domain of TCR clone 71327 (TRAV34, TRAJ38)
CGADFTPGNNRKLIW

SEQ ID NO: 142654 - protein, 14 aa, Homo sapiens
  CDR3 for beta chain variable domain of TCR clone 71327 (TRBV12-5, TRBJ2-5)
CASGSRTHQETRYF

SEQ ID NO: 142655 - protein, 19 aa, Homo sapiens
  CDR3 for alpha chain variable domain of TCR clone 71328 (TRAV26-1, TRAJ52)
CIVRAHRNASGTSYGKLTF

SEQ ID NO: 142656 - protein, 15 aa, Homo sapiens
  CDR3 for beta chain variable domain of TCR clone 71328 (TRBV12-4, TRBJ2-5)
CASSPPTGLQETQYF

SEQ ID NO: 142657 - protein, 13 aa, Homo sapiens
  CDR3 for alpha chain variable domain of TCR clone 71329 (TRAV3, TRAJ43)
CAVRDTRGGDMRF

SEQ ID NO: 142658 - protein, 15 aa, Homo sapiens
  CDR3 for beta chain variable domain of TCR clone 71329 (TRBV6-5, TRBJ1-5)
CASSYSRRSDQPQHF

SEQ ID NO: 142659 - protein, 13 aa, Homo sapiens
  CDR3 for alpha chain variable domain of TCR clone 71330 (TRAV12-2, TRAJ10)
CAVPTGGGSKLTF

SEQ ID NO: 142660 - protein, 11 aa, Homo sapiens
  CDR3 for beta chain variable domain of TCR clone 71330 (TRBV6-1, TRBJ2-1)
CASISSNEQFF

SEQ ID NO: 142661 - protein, 16 aa, Homo sapiens
  CDR3 for alpha chain variable domain of TCR clone 71331 (TRAV16, TRAJ52)
CALSAAGGTSYGKLTF

SEQ ID NO: 142662 - protein, 12 aa, Homo sapiens
  CDR3 for beta chain variable domain of TCR clone 71331 (TRBV12-4, TRBJ1-3)
CASRFSGNTIYF

SEQ ID NO: 142663 - protein, 13 aa, Homo sapiens
  CDR3 for alpha chain variable domain of TCR clone 71332 (TRAV8-6, TRAJ50)
CAVIKTSYDKVIF

SEQ ID NO: 142664 - protein, 15 aa, Homo sapiens
  CDR3 for beta chain variable domain of TCR clone 71332 (TRBV20-1, TRBJ2-4)
CSARDLTGGPNIQYF

SEQ ID NO: 142665 - protein, 14 aa, Homo sapiens
  CDR3 for alpha chain variable domain of TCR clone 71333 (TRAV1-2, TRAJ16)
CAVNRFSDGQKLLF

SEQ ID NO: 142666 - protein, 14 aa, Homo sapiens
  CDR3 for beta chain variable domain of TCR clone 71333 (TRBV11-2, TRBJ2-1)
CASSLSGPYNEQFF

SEQ ID NO: 142667 - protein, 18 aa, Homo sapiens
  CDR3 for alpha chain variable domain of TCR clone 71334 (TRAV21, TRAJ52)
CAVRPSSAGGTSYGKLTF

SEQ ID NO: 142668 - protein, 12 aa, Homo sapiens
  CDR3 for beta chain variable domain of TCR clone 71334 (TRBV11-2, TRBJ2-2)
CASSLGGGELFF

SEQ ID NO: 142669 - protein, 21 aa, Homo sapiens
  CDR3 for alpha chain variable domain of TCR clone 71335 (TRAV36/DV7, TRAJ39)
TATQTGDSAIYLPNAGNMLTF

SEQ ID NO: 142670 - protein, 16 aa, Homo sapiens
  CDR3 for beta chain variable domain of TCR clone 71335 (TRBV7-6, TRBJ2-1)
CASSAPGPSSYNEQFF

SEQ ID NO: 142671 - protein, 14 aa, Homo sapiens
  CDR3 for alpha chain variable domain of TCR clone 71336 (TRAV13-1, TRAJ10)
CGAKEPGGGNKLTF

SEQ ID NO: 142672 - protein, 14 aa, Homo sapiens
  CDR3 for beta chain variable domain of TCR clone 71336 (TRBV7-8, TRBJ2-3)
CASSLEAGTDTQYF

SEQ ID NO: 142673 - protein, 12 aa, Homo sapiens
  CDR3 for alpha chain variable domain of TCR clone 71337 (TRAV12-2, TRAJ21)
CAVRYNFNKFYF

SEQ ID NO: 142674 - protein, 12 aa, Homo sapiens
  CDR3 for beta chain variable domain of TCR clone 71337 (TRBV7-9, TRBJ2-7)
CASSLEGYEQYF

SEQ ID NO: 142675 - protein, 12 aa, Homo sapiens
  CDR3 for alpha chain variable domain of TCR clone 71338 (TRAV20, TRAJ56)
CAVTGANSKLTL

SEQ ID NO: 142676 - protein, 14 aa, Homo sapiens
  CDR3 for beta chain variable domain of TCR clone 71338 (TRBV20-1, TRBJ2-5)
CSALVPGYQETQYF

SEQ ID NO: 142677 - protein, 14 aa, Homo sapiens
  CDR3 for alpha chain variable domain of TCR clone 71339 (TRAV2, TRAJ37)
CAVDFTSNTGKLIF

SEQ ID NO: 142678 - protein, 16 aa, Homo sapiens
  CDR3 for beta chain variable domain of TCR clone 71339 (TRBV2, TRBJ2-3)
CASSTSVEGVTDTQYF

SEQ ID NO: 142679 - protein, 16 aa, Homo sapiens
  CDR3 for alpha chain variable domain of TCR clone 71340 (TRAV12-1, TRAJ53)
CVVTSVAGGSNYKLTF

SEQ ID NO: 142680 - protein, 15 aa, Homo sapiens
  CDR3 for beta chain variable domain of TCR clone 71340 (TRBV19, TRBJ1-2)
CASSVGQVLNYGYTF

SEQ ID NO: 142681 - protein, 15 aa, Homo sapiens
  CDR3 for alpha chain variable domain of TCR clone 71341 (TRAV2, TRAJ39)
CAVEDRRNAGNMLTF

SEQ ID NO: 142682 - protein, 13 aa, Homo sapiens
  CDR3 for beta chain variable domain of TCR clone 71341 (TRBV10-3, TRBJ2-5)
CAMTSGAGETQYF

SEQ ID NO: 142683 - protein, 17 aa, Homo sapiens
  CDR3 for alpha chain variable domain of TCR clone 71342 (TRAV3, TRAJ38)
CAVRDCLNAGNNRKLIW

SEQ ID NO: 142684 - protein, 15 aa, Homo sapiens
  CDR3 for beta chain variable domain of TCR clone 71342 (TRBV7-6, TRBJ1-2)
CASSSGGRGGYGYTF

SEQ ID NO: 142685 - protein, 17 aa, Homo sapiens
  CDR3 for alpha chain variable domain of TCR clone 71343 (TRAV8-6, TRAJ58)
CAVSSWVGKTSGSRLTF

SEQ ID NO: 142686 - protein, 14 aa, Homo sapiens
  CDR3 for beta chain variable domain of TCR clone 71343 (TRBV4-2, TRBJ2-1)
CASGLDRAYNEQFF

SEQ ID NO: 142687 - protein, 13 aa, Homo sapiens
  CDR3 for alpha chain variable domain of TCR clone 71344 (TRAV21, TRAJ27)
CAARPGNAGKSTF

SEQ ID NO: 142688 - protein, 16 aa, Homo sapiens
  CDR3 for beta chain variable domain of TCR clone 71344 (TRBV9, TRBJ2-2)
CASSAMGKGNTGELFF

SEQ ID NO: 142689 - protein, 12 aa, Homo sapiens
  CDR3 for alpha chain variable domain of TCR clone 71345 (TRAV35, TRAJ31)
CAAASNNARLMF

SEQ ID NO: 142690 - protein, 15 aa, Homo sapiens
  CDR3 for beta chain variable domain of TCR clone 71345 (TRBV18, TRBJ1-1)
CASSPRQGENTEAFF

SEQ ID NO: 142691 - protein, 13 aa, Homo sapiens
  CDR3 for alpha chain variable domain of TCR clone 71346 (TRAV30, TRAJ6)
CGFIEGGSYIPTF

SEQ ID NO: 142692 - protein, 13 aa, Homo sapiens
  CDR3 for beta chain variable domain of TCR clone 71346 (TRBV5-4, TRBJ2-5)
CASSPVSQETQFF

SEQ ID NO: 142693 - protein, 16 aa, Homo sapiens
  CDR3 for alpha chain variable domain of TCR clone 71347 (TRAV12-2, TRAJ10)
CAVNRVLTGGGNKLTF

SEQ ID NO: 142694 - protein, 15 aa, Homo sapiens
  CDR3 for beta chain variable domain of TCR clone 71347 (TRBV9, TRBJ1-6)
CASSVAGTGDSPFHF

SEQ ID NO: 142695 - protein, 12 aa, Homo sapiens
  CDR3 for alpha chain variable domain of TCR clone 71348 (TRAV38-2/DV8, TRAJ43)
CAYRSEMGDMRF

SEQ ID NO: 142696 - protein, 14 aa, Homo sapiens
  CDR3 for beta chain variable domain of TCR clone 71348 (TRBV2, TRBJ1-2)
CASSGEARRSGYTF

SEQ ID NO: 142697 - protein, 17 aa, Homo sapiens
  CDR3 for alpha chain variable domain of TCR clone 71349 (TRAV3, TRAJ6)
CAVRDGPRAGGSYIPTF

SEQ ID NO: 142698 - protein, 13 aa, Homo sapiens
  CDR3 for beta chain variable domain of TCR clone 71349 (TRBV14, TRBJ2-7)
CASSQDRRYEQYF

SEQ ID NO: 142699 - protein, 15 aa, Homo sapiens
  CDR3 for alpha chain variable domain of TCR clone 71350 (TRAV35, TRAJ23)
CAGQRGYNQGGELIF

SEQ ID NO: 142700 - protein, 16 aa, Homo sapiens
  CDR3 for beta chain variable domain of TCR clone 71350 (TRBV27, TRBJ2-1)
CASSSRLAGNYNEQFF

SEQ ID NO: 142701 - protein, 10 aa, Homo sapiens
  CDR3 for alpha chain variable domain of TCR clone 71351 (TRAV38-2/DV8, TRAJ40)
CASGTYKYIF

SEQ ID NO: 142702 - protein, 13 aa, Homo sapiens
  CDR3 for beta chain variable domain of TCR clone 71351 (TRBV7-3, TRBJ1-1)
CASSQDWGAEAFF

SEQ ID NO: 142703 - protein, 15 aa, Homo sapiens
  CDR3 for alpha chain variable domain of TCR clone 71352 (TRAV23/DV6, TRAJ4)
CAASPLRGGYNKLIL

SEQ ID NO: 142704 - protein, 15 aa, Homo sapiens
  CDR3 for beta chain variable domain of TCR clone 71352 (TRBV7-9, TRBJ1-6)
CASSSPGRGNSPLHF

SEQ ID NO: 142705 - protein, 18 aa, Homo sapiens
  CDR3 for alpha chain variable domain of TCR clone 71353 (TRAV26-2, TRAJ45)
CILRVDKYSGGGADGLTF

SEQ ID NO: 142706 - protein, 17 aa, Homo sapiens
  CDR3 for beta chain variable domain of TCR clone 71353 (TRBV13, TRBJ2-3)
CASSLSRVAGGRNTQYF

SEQ ID NO: 142707 - protein, 16 aa, Homo sapiens
  CDR3 for alpha chain variable domain of TCR clone 71354 (TRAV16, TRAJ52)
CALSAAGGTSNGKLTF

SEQ ID NO: 142708 - protein, 12 aa, Homo sapiens
  CDR3 for beta chain variable domain of TCR clone 71354 (TRBV12-4, TRBJ1-3)
CASSFSGNTIYF

SEQ ID NO: 142709 - protein, 16 aa, Homo sapiens
  CDR3 for alpha chain variable domain of TCR clone 71355 (TRAV21, TRAJ37)
CAVRNAGSSNTGKLIF

SEQ ID NO: 142710 - protein, 13 aa, Homo sapiens
  CDR3 for beta chain variable domain of TCR clone 71355 (TRBV7-9, TRBJ2-5)
CASLPSGRETQYF

SEQ ID NO: 142711 - protein, 13 aa, Homo sapiens
  CDR3 for alpha chain variable domain of TCR clone 71356 (TRAV16, TRAJ28)
CAPTGARGYQLTF

SEQ ID NO: 142712 - protein, 16 aa, Homo sapiens
  CDR3 for beta chain variable domain of TCR clone 71356 (TRBV28, TRBJ1-5)
CASSLTGQGWNQPQHF

SEQ ID NO: 142713 - protein, 12 aa, Homo sapiens
  CDR3 for alpha chain variable domain of TCR clone 71357 (TRAV3, TRAJ43)
CAVRDPNNDMRL

SEQ ID NO: 142714 - protein, 13 aa, Homo sapiens
  CDR3 for beta chain variable domain of TCR clone 71357 (TRBV19, TRBJ1-2)
CASSVPGQDGYTF

SEQ ID NO: 142715 - protein, 18 aa, Homo sapiens
  CDR3 for alpha chain variable domain of TCR clone 71358 (TRAV26-1, TRAJ52)
CIVSVEGAGGTSYGKLTF

SEQ ID NO: 142716 - protein, 13 aa, Homo sapiens
  CDR3 for beta chain variable domain of TCR clone 71358 (TRBV7-3, TRBJ1-2)
CASSLKRGYGYTF

SEQ ID NO: 142717 - protein, 13 aa, Homo sapiens
  CDR3 for alpha chain variable domain of TCR clone 71359 (TRAV8-3, TRAJ4)
WVFYSGGYNKLTF

SEQ ID NO: 142718 - protein, 14 aa, Homo sapiens
  CDR3 for beta chain variable domain of TCR clone 71359 (TRBV7-9, TRBJ2-3)
CASSLEDGTDTQYF

SEQ ID NO: 142719 - protein, 13 aa, Homo sapiens
  CDR3 for alpha chain variable domain of TCR clone 71360 (TRAV3, TRAJ27)
CAVRPLGAGKSTF

SEQ ID NO: 142720 - protein, 12 aa, Homo sapiens
  CDR3 for beta chain variable domain of TCR clone 71360 (TRBV12-5, TRBJ2-5)
CASGQGVETQYF

SEQ ID NO: 142721 - protein, 15 aa, Homo sapiens
  CDR3 for alpha chain variable domain of TCR clone 71361 (TRAV26-2, TRAJ13)
CILRNLSGGYQKVTF

SEQ ID NO: 142722 - protein, 11 aa, Homo sapiens
  CDR3 for beta chain variable domain of TCR clone 71361 (TRBV7-9, TRBJ2-5)
CASSLSATQYF

SEQ ID NO: 142723 - protein, 16 aa, Homo sapiens
  CDR3 for alpha chain variable domain of TCR clone 71362 (TRAV17, TRAJ17)
CATALQEEAAGNKLTF

SEQ ID NO: 142724 - protein, 15 aa, Homo sapiens
  CDR3 for beta chain variable domain of TCR clone 71362 (TRBV9, TRBJ1-6)
CASSVAGTGDSPLRF

SEQ ID NO: 142725 - protein, 15 aa, Homo sapiens
  CDR3 for alpha chain variable domain of TCR clone 71363 (TRAV4, TRAJ39)
CLVGPNNNAGNMLTF

SEQ ID NO: 142726 - protein, 13 aa, Homo sapiens
  CDR3 for beta chain variable domain of TCR clone 71363 (TRBV11-3, TRBJ2-5)
CASSATGEETQYF

SEQ ID NO: 142727 - protein, 17 aa, Homo sapiens
  CDR3 for alpha chain variable domain of TCR clone 71364 (TRAV23/DV6, TRAJ57)
CAANSTLYQGGSEKLVF

SEQ ID NO: 142728 - protein, 14 aa, Homo sapiens
  CDR3 for beta chain variable domain of TCR clone 71364 (TRBV25-1, TRBJ1-1)
CASTHLGGNTEAFF

SEQ ID NO: 142729 - protein, 12 aa, Homo sapiens
  CDR3 for alpha chain variable domain of TCR clone 71365 (TRAV13-2, TRAJ23)
CAERHRGGKLIF

SEQ ID NO: 142730 - protein, 19 aa, Homo sapiens
  CDR3 for beta chain variable domain of TCR clone 71365 (TRBV5-1, TRBJ2-3)
CASSLWLAGGITSTDTQYF

SEQ ID NO: 142731 - protein, 12 aa, Homo sapiens
  CDR3 for alpha chain variable domain of TCR clone 71366 (TRAV13-1, TRAJ49)
CAASPMGNQFYF

SEQ ID NO: 142732 - protein, 13 aa, Homo sapiens
  CDR3 for beta chain variable domain of TCR clone 71366 (TRBV20-1, TRBJ2-2)
CSASAAGTGELFS

SEQ ID NO: 142733 - protein, 14 aa, Homo sapiens
  CDR3 for alpha chain variable domain of TCR clone 71367 (TRAV17, TRAJ56)
CATVPDGANSKLTF

SEQ ID NO: 142734 - protein, 13 aa, Homo sapiens
  CDR3 for beta chain variable domain of TCR clone 71367 (TRBV12-4, TRBJ2-2)
CASSITGSGELFF

SEQ ID NO: 142735 - protein, 12 aa, Homo sapiens
  CDR3 for alpha chain variable domain of TCR clone 71368 (TRAV12-2, TRAJ10)
WWVTGGGNKLTF

SEQ ID NO: 142736 - protein, 16 aa, Homo sapiens
  CDR3 for beta chain variable domain of TCR clone 71368 (TRBV6-4, TRBJ1-2)
CASSEAVGDPNYGYTF

SEQ ID NO: 142737 - protein, 14 aa, Homo sapiens
  CDR3 for alpha chain variable domain of TCR clone 71369 (TRAV12-1, TRAJ12)
CVVTRMDSSYKLIF

SEQ ID NO: 142738 - protein, 13 aa, Homo sapiens
  CDR3 for beta chain variable domain of TCR clone 71369 (TRBV20-1, TRBJ1-1)
CSARGGGTTEAFF

SEQ ID NO: 142739 - protein, 14 aa, Homo sapiens
  CDR3 for alpha chain variable domain of TCR clone 71370 (TRAV17, TRAJ22)
CATSPSGSARQLTF

SEQ ID NO: 142740 - protein, 15 aa, Homo sapiens
  CDR3 for beta chain variable domain of TCR clone 71370 (TRBV4-1, TRBJ2-5)
CASIQWDLYQETQYF

SEQ ID NO: 142741 - protein, 13 aa, Homo sapiens
  CDR3 for alpha chain variable domain of TCR clone 71371 (TRAV12-2, TRAJ52)
CNAGGTSYGKLTF

SEQ ID NO: 142742 - protein, 15 aa, Homo sapiens
  CDR3 for beta chain variable domain of TCR clone 71371 (TRBV4-1, TRBJ1-4)
CASSDTGGTNEKLFF

SEQ ID NO: 142743 - protein, 16 aa, Homo sapiens
  CDR3 for alpha chain variable domain of TCR clone 71372 (TRAV17, TRAJ28)
CATSSVSGAGSYQLTF

SEQ ID NO: 142744 - protein, 11 aa, Homo sapiens
  CDR3 for beta chain variable domain of TCR clone 71372 (TRBV7-9, TRBJ2-5)
CASSLGETQYF

SEQ ID NO: 142745 - protein, 15 aa, Homo sapiens
  CDR3 for alpha chain variable domain of TCR clone 71373 (TRAV26-1, TRAJ42)
CIVRVAEGSQGNLIF

SEQ ID NO: 142746 - protein, 13 aa, Homo sapiens
  CDR3 for beta chain variable domain of TCR clone 71373 (TRBV7-9, TRBJ2-5)
CASLPSGRETQYF

SEQ ID NO: 142747 - protein, 13 aa, Homo sapiens
  CDR3 for alpha chain variable domain of TCR clone 71374 (TRAV2, TRAJ40)
CAVVTSGTYKYIF

SEQ ID NO: 142748 - protein, 16 aa, Homo sapiens
  CDR3 for beta chain variable domain of TCR clone 71374 (TRBV18, TRBJ2-2)
CASSPGDRGDTGELFF

SEQ ID NO: 142749 - protein, 14 aa, Homo sapiens
  CDR3 for alpha chain variable domain of TCR clone 71375 (TRAV12-2, TRAJ13)
CAVKKTGGYQKVTL

SEQ ID NO: 142750 - protein, 15 aa, Homo sapiens
  CDR3 for beta chain variable domain of TCR clone 71375 (TRBV27, TRBJ2-1)
CASSNGGGSSNEQYF

SEQ ID NO: 142751 - protein, 16 aa, Homo sapiens
  CDR3 for alpha chain variable domain of TCR clone 71376 (TRAV12-1, TRAJ48)
CVVNMVSNFGNEKLTF

SEQ ID NO: 142752 - protein, 18 aa, Homo sapiens
  CDR3 for beta chain variable domain of TCR clone 71376 (TRBV11-2, TRBJ2-6)
CASSLNPFMGTGANVLTF

SEQ ID NO: 142753 - protein, 15 aa, Homo sapiens
  CDR3 for alpha chain variable domain of TCR clone 71377 (TRAV8-2, TRAJ40)
CVVLGTTSGTYKYIF

SEQ ID NO: 142754 - protein, 13 aa, Homo sapiens
  CDR3 for beta chain variable domain of TCR clone 71377 (TRBV7-3, TRBJ1-1)
CASSQDWGAEAFF

SEQ ID NO: 142755 - protein, 14 aa, Homo sapiens
  CDR3 for alpha chain variable domain of TCR clone 71378 (TRAV1-2, TRAJ8)
CAVREDTGFQKLVF

SEQ ID NO: 142756 - protein, 11 aa, Homo sapiens
  CDR3 for beta chain variable domain of TCR clone 71378 (TRBV20-1, TRBJ2-7)
CSASGRIEQYF

SEQ ID NO: 142757 - protein, 14 aa, Homo sapiens
  CDR3 for alpha chain variable domain of TCR clone 71379 (TRAV1-2, TRAJ6)
CAVSLSGGSYIPTF

SEQ ID NO: 142758 - protein, 14 aa, Homo sapiens
  CDR3 for beta chain variable domain of TCR clone 71379 (TRBV11-2, TRBJ1-5)
CASSLDRGRQPQHF

SEQ ID NO: 142759 - protein, 16 aa, Homo sapiens
  CDR3 for alpha chain variable domain of TCR clone 71380 (TRAV8-3, TRAJ52)
CAVQPAGGTSYGKLTF

SEQ ID NO: 142760 - protein, 15 aa, Homo sapiens
  CDR3 for beta chain variable domain of TCR clone 71380 (TRBV11-2, TRBJ2-7)
CARSLAGGVATEQYF

SEQ ID NO: 142761 - protein, 13 aa, Homo sapiens
  CDR3 for alpha chain variable domain of TCR clone 71381 (TRAV12-3, TRAJ33)
CAMSVNSNYQLIW

SEQ ID NO: 142762 - protein, 16 aa, Homo sapiens
  CDR3 for beta chain variable domain of TCR clone 71381 (TRBV10-3, TRBJ1-5)
CAISGQGGLSNQPQHF

SEQ ID NO: 142763 - protein, 13 aa, Homo sapiens
  CDR3 for alpha chain variable domain of TCR clone 71382 (TRAV12-1, TRAJ6)
CVVFPVGSYIPTF

SEQ ID NO: 142764 - protein, 14 aa, Homo sapiens
  CDR3 for beta chain variable domain of TCR clone 71382 (TRBV20-1, TRBJ1-3)
CSASPTGAGNTIYF

SEQ ID NO: 142765 - protein, 17 aa, Homo sapiens
  CDR3 for alpha chain variable domain of TCR clone 71383 (TRAV3, TRAJ6)
CAVRDGPRAGGSYIPTF

SEQ ID NO: 142766 - protein, 16 aa, Homo sapiens
  CDR3 for beta chain variable domain of TCR clone 71383 (TRBV11-2, TRBJ1-2)
CAGSPSGREANYGYTF

SEQ ID NO: 142767 - protein, 16 aa, Homo sapiens
  CDR3 for alpha chain variable domain of TCR clone 71384 (TRAV3, TRAJ4)
CAVRAFFSGGYNKLIF

SEQ ID NO: 142768 - protein, 14 aa, Homo sapiens
  CDR3 for beta chain variable domain of TCR clone 71384 (TRBV19, TRBJ2-1)
CASPTFVLSGEQFF

SEQ ID NO: 142769 - protein, 13 aa, Homo sapiens
  CDR3 for alpha chain variable domain of TCR clone 71385 (TRAV27, TRAJ45)
CRSSGGGADGLTF

SEQ ID NO: 142770 - protein, 11 aa, Homo sapiens
  CDR3 for beta chain variable domain of TCR clone 71385 (TRBV19, TRBJ1-1)
CASSVGSEAFF

SEQ ID NO: 142771 - protein, 14 aa, Homo sapiens
  CDR3 for alpha chain variable domain of TCR clone 71386 (TRAV12-2, TRAJ53)
CAVKGGGSNYKPTF

SEQ ID NO: 142772 - protein, 14 aa, Homo sapiens
  CDR3 for beta chain variable domain of TCR clone 71386 (TRBV19, TRBJ2-1)
CASPTFVLSGEQFF

SEQ ID NO: 142773 - protein, 21 aa, Homo sapiens
  CDR3 for alpha chain variable domain of TCR clone 71387 (TRAV27, TRAJ3)
TAAQPGDTGLPPGSSASKIIF

SEQ ID NO: 142774 - protein, 15 aa, Homo sapiens
  CDR3 for beta chain variable domain of TCR clone 71387 (TRBV28, TRBJ1-3)
CASSMGWASGNTIYF

SEQ ID NO: 142775 - protein, 10 aa, Homo sapiens
  CDR3 for alpha chain variable domain of TCR clone 71388 (TRAV38-2/DV8, TRAJ40)
CASGTYKYIF

SEQ ID NO: 142776 - protein, 14 aa, Homo sapiens
  CDR3 for beta chain variable domain of TCR clone 71388 (TRBV7-9, TRBJ2-1)
CASRPRDSLYEQFF

SEQ ID NO: 142777 - protein, 14 aa, Homo sapiens
  CDR3 for alpha chain variable domain of TCR clone 71389 (TRAV1-2, TRAJ16)
CAVNRFSDGHKLLF

SEQ ID NO: 142778 - protein, 14 aa, Homo sapiens
  CDR3 for beta chain variable domain of TCR clone 71389 (TRBV25-1, TRBJ1-1)
CASTHLGGNTEAFF

SEQ ID NO: 142779 - protein, 16 aa, Homo sapiens
  CDR3 for alpha chain variable domain of TCR clone 71390 (TRAV3, TRAJ21)
CAVRDIERGNFNKFYF

SEQ ID NO: 142780 - protein, 14 aa, Homo sapiens
  CDR3 for beta chain variable domain of TCR clone 71390 (TRBV19, TRBJ2-2)
CASSGQGIAGELFF

SEQ ID NO: 142781 - protein, 15 aa, Homo sapiens
  CDR3 for alpha chain variable domain of TCR clone 71391 (TRAV12-2, TRAJ56)
CAVNPFTGANSKLTF

SEQ ID NO: 142782 - protein, 13 aa, Homo sapiens
  CDR3 for beta chain variable domain of TCR clone 71391 (TRBV20-1, TRBJ1-2)
CSARDRVHGGYTF

SEQ ID NO: 142783 - protein, 11 aa, Homo sapiens
  CDR3 for alpha chain variable domain of TCR clone 71392 (TRAV27, TRAJ20)
CAGADDYKPSF

SEQ ID NO: 142784 - protein, 12 aa, Homo sapiens
  CDR3 for beta chain variable domain of TCR clone 71392 (TRBV2, TRBJ1-1)
CATPSRGTEAFF

SEQ ID NO: 142785 - protein, 13 aa, Homo sapiens
  CDR3 for alpha chain variable domain of TCR clone 71393 (TRAV8-3, TRAJ31)
CAVGARNNARLMF

SEQ ID NO: 142786 - protein, 14 aa, Homo sapiens
  CDR3 for beta chain variable domain of TCR clone 71393 (TRBV12-5, TRBJ2-5)
CASGSRTHQETQYY

SEQ ID NO: 142787 - protein, 15 aa, Homo sapiens
  CDR3 for alpha chain variable domain of TCR clone 71394 (TRAV12-1, TRAJ9)
CVVSFGDTGGCKTIF

SEQ ID NO: 142788 - protein, 13 aa, Homo sapiens
  CDR3 for beta chain variable domain of TCR clone 71394 (TRBV2, TRBJ1-4)
CASSERAGEKLFF

SEQ ID NO: 142789 - protein, 13 aa, Homo sapiens
  CDR3 for alpha chain variable domain of TCR clone 71395 (TRAV35, TRAJ21)
CAWQLSNFNKFYF

SEQ ID NO: 142790 - protein, 11 aa, Homo sapiens
  CDR3 for beta chain variable domain of TCR clone 71395 (TRBV7-6, TRBJ2-5)
CASSSQETQYF

SEQ ID NO: 142791 - protein, 14 aa, Homo sapiens
  CDR3 for alpha chain variable domain of TCR clone 71396 (TRAV26-2, TRAJ27)
CILRDISGAGKSTF

SEQ ID NO: 142792 - protein, 12 aa, Homo sapiens
  CDR3 for beta chain variable domain of TCR clone 71396 (TRBV5-1, TRBJ2-5)
CASSLGLETQYF

SEQ ID NO: 142793 - protein, 16 aa, Homo sapiens
  CDR3 for alpha chain variable domain of TCR clone 71397 (TRAV12-3, TRAJ53)
CAMSPGSGGSNYKLTF

SEQ ID NO: 142794 - protein, 12 aa, Homo sapiens
  CDR3 for beta chain variable domain of TCR clone 71397 (TRBV3-1, TRBJ2-7)
CASSQVRYEQYF

SEQ ID NO: 142795 - protein, 18 aa, Homo sapiens
  CDR3 for alpha chain variable domain of TCR clone 71398 (TRAV13-1, TRAJ52)
CATKNPNAGGTSYGKLTF

SEQ ID NO: 142796 - protein, 15 aa, Homo sapiens
  CDR3 for beta chain variable domain of TCR clone 71398 (TRBV6-1, TRBJ2-3)
CASSERGGITDTQYF

SEQ ID NO: 142797 - protein, 13 aa, Homo sapiens
  CDR3 for alpha chain variable domain of TCR clone 71399 (TRAV17, TRAJ54)
CAAGIQGAQKLVF

SEQ ID NO: 142798 - protein, 16 aa, Homo sapiens
  CDR3 for beta chain variable domain of TCR clone 71399 (TRBV19, TRBJ2-1)
CASSKAGPSSYNEQFF

SEQ ID NO: 142799 - protein, 14 aa, Homo sapiens
  CDR3 for alpha chain variable domain of TCR clone 71400 (TRAV26-1, TRAJ48)
CIVRVGFGNEKLTF

SEQ ID NO: 142800 - protein, 13 aa, Homo sapiens
  CDR3 for beta chain variable domain of TCR clone 71400 (TRBV12-4, TRBJ1-2)
CASSLRQGKGYTF

SEQ ID NO: 142801 - protein, 12 aa, Homo sapiens
  CDR3 for alpha chain variable domain of TCR clone 71401 (TRAV21, TRAJ23)
CAVMLQGGKLIF

SEQ ID NO: 142802 - protein, 12 aa, Homo sapiens
  CDR3 for beta chain variable domain of TCR clone 71401 (TRBV11-2, TRBJ2-2)
CASSLGGGELFF

SEQ ID NO: 142803 - protein, 23 aa, Homo sapiens
  CDR3 for alpha chain variable domain of TCR clone 71402 (TRAV6, TRAJ34)
ISQPPSLQTQLPTSVPYTDKLIF

SEQ ID NO: 142804 - protein, 14 aa, Homo sapiens
  CDR3 for beta chain variable domain of TCR clone 71402 (TRBV4-2, TRBJ2-1)
CASGLDRAYNEQFF

SEQ ID NO: 142805 - protein, 16 aa, Homo sapiens
  CDR3 for alpha chain variable domain of TCR clone 71403 (TRAV30, TRAJ24)
CGTAIVDADSWGKFQF

SEQ ID NO: 142806 - protein, 13 aa, Homo sapiens
  CDR3 for beta chain variable domain of TCR clone 71403 (TRBV10-3, TRBJ2-7)
CASKLAVNYEQYF

SEQ ID NO: 142807 - protein, 10 aa, Homo sapiens
  CDR3 for alpha chain variable domain of TCR clone 71404 (TRAV12-1, TRAJ37)
ARGNTGKRIF

SEQ ID NO: 142808 - protein, 15 aa, Homo sapiens
  CDR3 for beta chain variable domain of TCR clone 71404 (TRBV7-2, TRBJ2-3)
CASSLEQGGTDTQYF

SEQ ID NO: 142809 - protein, 14 aa, Homo sapiens
  CDR3 for alpha chain variable domain of TCR clone 71405 (TRAV12-3, TRAJ58)
CAMSTETSGSRLTF

SEQ ID NO: 142810 - protein, 16 aa, Homo sapiens
  CDR3 for beta chain variable domain of TCR clone 71405 (TRBV12-5, TRBJ2-5)
CASGPRTSGNQETQYF

SEQ ID NO: 142811 - protein, 15 aa, Homo sapiens
  CDR3 for alpha chain variable domain of TCR clone 71406 (TRAV25, TRAJ52)
CAGTSGGTSYGKLTF

SEQ ID NO: 142812 - protein, 15 aa, Homo sapiens
  CDR3 for beta chain variable domain of TCR clone 71406 (TRBV19, TRBJ1-1)
CASTSGQIQNTEAFF

SEQ ID NO: 142813 - protein, 15 aa, Homo sapiens
  CDR3 for alpha chain variable domain of TCR clone 71407 (TRAV12-3, TRAJ10)
CASYILTGGGNKLTF

SEQ ID NO: 142814 - protein, 13 aa, Homo sapiens
  CDR3 for beta chain variable domain of TCR clone 71407 (TRBV10-3, TRBJ2-7)
CASKLAVNYEQYF

SEQ ID NO: 142815 - protein, 14 aa, Homo sapiens
  CDR3 for alpha chain variable domain of TCR clone 71408 (TRAV1-2, TRAJ16)
CAVNRSSDGQKLLF

SEQ ID NO: 142816 - protein, 15 aa, Homo sapiens
  CDR3 for beta chain variable domain of TCR clone 71408 (TRBV7-9, TRBJ1-6)
CAGSSPGRGNSPLHF

SEQ ID NO: 142817 - protein, 14 aa, Homo sapiens
  CDR3 for alpha chain variable domain of TCR clone 71409 (TRAV3, TRAJ20)
CAVPPAPNDYKLSF

SEQ ID NO: 142818 - protein, 16 aa, Homo sapiens
  CDR3 for beta chain variable domain of TCR clone 71409 (TRBV15, TRBJ2-3)
RATSRDLGIVTDTQYF

SEQ ID NO: 142819 - protein, 12 aa, Homo sapiens
  CDR3 for alpha chain variable domain of TCR clone 71410 (TRAV29/DV5, TRAJ34)
CAASGNTDKLIF

SEQ ID NO: 142820 - protein, 15 aa, Homo sapiens
  CDR3 for beta chain variable domain of TCR clone 71410 (TRBV10-2, TRBJ2-6)
CASSDQGTGANVLTF

SEQ ID NO: 142821 - protein, 18 aa, Homo sapiens
  CDR3 for alpha chain variable domain of TCR clone 71411 (TRAV21, TRAJ52)
CAVRPSPAGGTSYGKLPF

SEQ ID NO: 142822 - protein, 13 aa, Homo sapiens
  CDR3 for beta chain variable domain of TCR clone 71411 (TRBV2, TRBJ1-5)
CATAGPGNQPQHF

SEQ ID NO: 142823 - protein, 12 aa, Homo sapiens
  CDR3 for alpha chain variable domain of TCR clone 71412 (TRAV2, TRAJ9)
CAVGAGGFKTII

SEQ ID NO: 142824 - protein, 16 aa, Homo sapiens
  CDR3 for beta chain variable domain of TCR clone 71412 (TRBV13, TRBJ2-2)
CASSPRTGEHTGELFF

SEQ ID NO: 142825 - protein, 16 aa, Homo sapiens
  CDR3 for alpha chain variable domain of TCR clone 71413 (TRAV30, TRAJ24)
CGTEIVDADSWGKFQF

SEQ ID NO: 142826 - protein, 14 aa, Homo sapiens
  CDR3 for beta chain variable domain of TCR clone 71413 (TRBV7-2, TRBJ1-1)
CASSFLTGTAEAFF

SEQ ID NO: 142827 - protein, 12 aa, Homo sapiens
  CDR3 for alpha chain variable domain of TCR clone 71414 (TRAV13-1, TRAJ53)
CAAGGSNYKLTF

SEQ ID NO: 142828 - protein, 10 aa, Homo sapiens
  CDR3 for beta chain variable domain of TCR clone 71414 (TRBV20-1, TRBJ2-1)
CSASYNEQFF

SEQ ID NO: 142829 - protein, 13 aa, Homo sapiens
  CDR3 for alpha chain variable domain of TCR clone 71415 (TRAV13-2, TRAJ48)
CAEMDFGNEKLTF

SEQ ID NO: 142830 - protein, 15 aa, Homo sapiens
  CDR3 for beta chain variable domain of TCR clone 71415 (TRBV7-9, TRBJ1-6)
CASSSPGRGNSPVHF

SEQ ID NO: 142831 - protein, 11 aa, Homo sapiens
  CDR3 for alpha chain variable domain of TCR clone 71416 (TRAV1-1, TRAJ23)
CAVRQGGKLIF

SEQ ID NO: 142832 - protein, 15 aa, Homo sapiens
  CDR3 for beta chain variable domain of TCR clone 71416 (TRBV11-3, TRBJ2-7)
CASSPGPASSYEQYF

SEQ ID NO: 142833 - protein, 14 aa, Homo sapiens
  CDR3 for alpha chain variable domain of TCR clone 71417 (TRAV12-2, TRAJ17)
CAVLFKAAGNKLTF

SEQ ID NO: 142834 - protein, 14 aa, Homo sapiens
  CDR3 for beta chain variable domain of TCR clone 71417 (TRBV7-9, TRBJ2-2)
CASSLVQDTGELFF

SEQ ID NO: 142835 - protein, 19 aa, Homo sapiens
  CDR3 for alpha chain variable domain of TCR clone 71418 (TRAV25, TRAJ20)
TATQTTDVGILPHDYKLSF

SEQ ID NO: 142836 - protein, 17 aa, Homo sapiens
  CDR3 for beta chain variable domain of TCR clone 71418 (TRBV4-3, TRBJ2-1)
CAGSQFSSGRASGEQFF

SEQ ID NO: 142837 - protein, 13 aa, Homo sapiens
  CDR3 for alpha chain variable domain of TCR clone 71419 (TRAV13-1, TRAJ43)
CAASLSNNNDMRF

SEQ ID NO: 142838 - protein, 15 aa, Homo sapiens
  CDR3 for beta chain variable domain of TCR clone 71419 (TRBV5-1, TRBJ2-1)
CASSQAGYRWNEQFF

SEQ ID NO: 142839 - protein, 14 aa, Homo sapiens
  CDR3 for alpha chain variable domain of TCR clone 71420 (TRAV38-1, TRAJ40)
CALRPTSGTYKYIF

SEQ ID NO: 142840 - protein, 13 aa, Homo sapiens
  CDR3 for beta chain variable domain of TCR clone 71420 (TRBV20-1, TRBJ1-1)
CSARGGGNTEAFF

SEQ ID NO: 142841 - protein, 15 aa, Homo sapiens
  CDR3 for alpha chain variable domain of TCR clone 71421 (TRAV13-1, TRAJ44)
CAASRGGGTASKLTL

SEQ ID NO: 142842 - protein, 14 aa, Homo sapiens
  CDR3 for beta chain variable domain of TCR clone 71421 (TRBV7-2, TRBJ2-5)
CASSPRGSSETQYF

SEQ ID NO: 142843 - protein, 16 aa, Homo sapiens
  CDR3 for alpha chain variable domain of TCR clone 71422 (TRAV3, TRAJ10)
CAVRDMRAGGGNKLTF

SEQ ID NO: 142844 - protein, 12 aa, Homo sapiens
  CDR3 for beta chain variable domain of TCR clone 71422 (TRBV7-6, TRBJ2-3)
CASSTGTDTQYF

SEQ ID NO: 142845 - protein, 15 aa, Homo sapiens
  CDR3 for alpha chain variable domain of TCR clone 71423 (TRAV8-3, TRAJ45)
CAASYSGGGADGLTF

SEQ ID NO: 142846 - protein, 17 aa, Homo sapiens
  CDR3 for beta chain variable domain of TCR clone 71423 (TRBV7-8, TRBJ1-2)
CASSLRPLQGHLYGYTF

SEQ ID NO: 142847 - protein, 15 aa, Homo sapiens
  CDR3 for alpha chain variable domain of TCR clone 71424 (TRAV12-1, TRAJ44)
CVVDTPQGTASKLTF

SEQ ID NO: 142848 - protein, 14 aa, Homo sapiens
  CDR3 for beta chain variable domain of TCR clone 71424 (TRBV20-1, TRBJ2-1)
CSAQIGGSANEQFF

SEQ ID NO: 142849 - protein, 14 aa, Homo sapiens
  CDR3 for alpha chain variable domain of TCR clone 71425 (TRAV30, TRAJ33)
CGPVAPRSNYQLIW

SEQ ID NO: 142850 - protein, 14 aa, Homo sapiens
  CDR3 for beta chain variable domain of TCR clone 71425 (TRBV19, TRBJ2-1)
CASPTFVLSGEQFF

SEQ ID NO: 142851 - protein, 15 aa, Homo sapiens
  CDR3 for alpha chain variable domain of TCR clone 71426 (TRAV21, TRAJ32)
CAVNSYGGATNKLIF

SEQ ID NO: 142852 - protein, 18 aa, Homo sapiens
  CDR3 for beta chain variable domain of TCR clone 71426 (TRBV7-9, TRBJ2-1)
CAGSTGLAEGSSYNEQFF

SEQ ID NO: 142853 - protein, 16 aa, Homo sapiens
  CDR3 for alpha chain variable domain of TCR clone 71427 (TRAV30, TRAJ24)
CGTEIVDADSWGKFQF

SEQ ID NO: 142854 - protein, 18 aa, Homo sapiens
  CDR3 for beta chain variable domain of TCR clone 71427 (TRBV11-2, TRBJ2-6)
CASSLNPLLGTGANVLTF

SEQ ID NO: 142855 - protein, 13 aa, Homo sapiens
  CDR3 for alpha chain variable domain of TCR clone 71428 (TRAV21, TRAJ57)
CAVTQGGSEKLVF

SEQ ID NO: 142856 - protein, 16 aa, Homo sapiens
  CDR3 for beta chain variable domain of TCR clone 71428 (TRBV4-2, TRBJ2-3)
CASSQELAGDTDTQYF

SEQ ID NO: 142857 - protein, 15 aa, Homo sapiens
  CDR3 for alpha chain variable domain of TCR clone 71429 (TRAV12-3, TRAJ13)
CAMSARSGGYQRVTF

SEQ ID NO: 142858 - protein, 18 aa, Homo sapiens
  CDR3 for beta chain variable domain of TCR clone 71429 (TRBV3-1, TRBJ2-7)
CASSQEGGGRSWHYEQYF

SEQ ID NO: 142859 - protein, 16 aa, Homo sapiens
  CDR3 for alpha chain variable domain of TCR clone 71430 (TRAV16, TRAJ57)
CAPYLITQGGSEKLVF

SEQ ID NO: 142860 - protein, 14 aa, Homo sapiens
  CDR3 for beta chain variable domain of TCR clone 71430 (TRBV25-1, TRBJ1-1)
CASTHLGGNTEAFF

SEQ ID NO: 142861 - protein, 14 aa, Homo sapiens
  CDR3 for alpha chain variable domain of TCR clone 71431 (TRAV35, TRAJ50)
CAGHRKTSYDKVIF

SEQ ID NO: 142862 - protein, 13 aa, Homo sapiens
  CDR3 for beta chain variable domain of TCR clone 71431 (TRBV7-7, TRBJ2-3)
RASSLSRADTQYF

SEQ ID NO: 142863 - protein, 15 aa, Homo sapiens
  CDR3 for alpha chain variable domain of TCR clone 71432 (TRAV17, TRAJ16)
CATALRFSDGQKLLF

SEQ ID NO: 142864 - protein, 12 aa, Homo sapiens
  CDR3 for beta chain variable domain of TCR clone 71432 (TRBV19, TRBJ1-5)
CASSIAQQPQHF

SEQ ID NO: 142865 - protein, 13 aa, Homo sapiens
  CDR3 for alpha chain variable domain of TCR clone 71433 (TRAV2, TRAJ40)
CAVVTSGTYKYIF

SEQ ID NO: 142866 - protein, 15 aa, Homo sapiens
  CDR3 for beta chain variable domain of TCR clone 71433 (TRBV28, TRBJ1-3)
CASSMGWASGNTIYF

SEQ ID NO: 142867 - protein, 13 aa, Homo sapiens
  CDR3 for alpha chain variable domain of TCR clone 71434 (TRAV13-2, TRAJ5)
CAVMDTGRRALTF

SEQ ID NO: 142868 - protein, 12 aa, Homo sapiens
  CDR3 for beta chain variable domain of TCR clone 71434 (TRBV28, TRBJ2-7)
CARSFSSYEQYF

SEQ ID NO: 142869 - protein, 14 aa, Homo sapiens
  CDR3 for alpha chain variable domain of TCR clone 71435 (TRAV26-1, TRAJ52)
CIVKGGTSYGKLTF

SEQ ID NO: 142870 - protein, 15 aa, Homo sapiens
  CDR3 for beta chain variable domain of TCR clone 71435 (TRBV11-2, TRBJ1-6)
CASTLRGTGNSPLHF

SEQ ID NO: 142871 - protein, 15 aa, Homo sapiens
  CDR3 for alpha chain variable domain of TCR clone 71436 (TRAV26-1, TRAJ44)
CIVRIGTGTASKLTF

SEQ ID NO: 142872 - protein, 14 aa, Homo sapiens
  CDR3 for beta chain variable domain of TCR clone 71436 (TRBV25-1, TRBJ1-1)
CASTHLGGNTEAFF

SEQ ID NO: 142873 - protein, 17 aa, Homo sapiens
  CDR3 for alpha chain variable domain of TCR clone 71437 (TRAV3, TRAJ6)
CAVRDGPRAGGSYIPTF

SEQ ID NO: 142874 - protein, 15 aa, Homo sapiens
  CDR3 for beta chain variable domain of TCR clone 71437 (TRBV11-2, TRBJ2-2)
CASSLDTGNTGELFF

SEQ ID NO: 142875 - protein, 16 aa, Homo sapiens
  CDR3 for alpha chain variable domain of TCR clone 71438 (TRAV14/DV4, TRAJ53)
CAMREGGGGSNYKLTF

SEQ ID NO: 142876 - protein, 18 aa, Homo sapiens
  CDR3 for beta chain variable domain of TCR clone 71438 (TRBV11-2, TRBJ2-3)
CASSLGGASRGAPNTQYF

SEQ ID NO: 142877 - protein, 16 aa, Homo sapiens
  CDR3 for alpha chain variable domain of TCR clone 71439 (TRAV30, TRAJ24)
CGTEIVDADSWGKFQF

SEQ ID NO: 142878 - protein, 13 aa, Homo sapiens
  CDR3 for beta chain variable domain of TCR clone 71439 (TRBV19, TRBJ2-1)
CATSRGVYNEQFF

SEQ ID NO: 142879 - protein, 14 aa, Homo sapiens
  CDR3 for alpha chain variable domain of TCR clone 71440 (TRAV9-2, TRAJ39)
CALYIYNAGNMLTF

SEQ ID NO: 142880 - protein, 15 aa, Homo sapiens
  CDR3 for beta chain variable domain of TCR clone 71440 (TRBV7-2, TRBJ2-3)
CASSSTGLETDTQYF

SEQ ID NO: 142881 - protein, 14 aa, Homo sapiens
  CDR3 for alpha chain variable domain of TCR clone 71441 (TRAV12-3, TRAJ10)
SHLPLTGGGNKLTF

SEQ ID NO: 142882 - protein, 13 aa, Homo sapiens
  CDR3 for beta chain variable domain of TCR clone 71441 (TRBV11-2, TRBJ2-5)
CASSSTGEETQYF

SEQ ID NO: 142883 - protein, 14 aa, Homo sapiens
  CDR3 for alpha chain variable domain of TCR clone 71442 (TRAV36/DV7, TRAJ53)
CAVVDGGSNYKLTF

SEQ ID NO: 142884 - protein, 14 aa, Homo sapiens
  CDR3 for beta chain variable domain of TCR clone 71442 (TRBV19, TRBJ2-1)
CASSMGSGRRSSSS

SEQ ID NO: 142885 - protein, 15 aa, Homo sapiens
  CDR3 for alpha chain variable domain of TCR clone 71443 (TRAV12-3, TRAJ42)
CAMSGHGGSQGNLIF

SEQ ID NO: 142886 - protein, 15 aa, Homo sapiens
  CDR3 for beta chain variable domain of TCR clone 71443 (TRBV5-1, TRBJ2-4)
CASSLGGGGSYIQYF

SEQ ID NO: 142887 - protein, 16 aa, Homo sapiens
  CDR3 for alpha chain variable domain of TCR clone 71444 (TRAV1-1, TRAJ34)
CAVTLRRGGTGTRLQV

SEQ ID NO: 142888 - protein, 16 aa, Homo sapiens
  CDR3 for beta chain variable domain of TCR clone 71444 (TRBV2, TRBJ2-3)
CASSTSVEGVTDTQYF

SEQ ID NO: 142889 - protein, 12 aa, Homo sapiens
  CDR3 for alpha chain variable domain of TCR clone 71445 (TRAV17, TRAJ57)
CATDGGSEKLVF

SEQ ID NO: 142890 - protein, 16 aa, Homo sapiens
  CDR3 for beta chain variable domain of TCR clone 71445 (TRBV20-1, TRBJ1-4)
CSAPGQGLLTNEKLFF

SEQ ID NO: 142891 - protein, 13 aa, Homo sapiens
  CDR3 for alpha chain variable domain of TCR clone 71446 (TRAV3, TRAJ27)
CAVRPLGAGKSTF

SEQ ID NO: 142892 - protein, 15 aa, Homo sapiens
  CDR3 for beta chain variable domain of TCR clone 71446 (TRBV6-3, TRBJ2-7)
CAGSSPGTVFYEQYF

SEQ ID NO: 142893 - protein, 12 aa, Homo sapiens
  CDR3 for alpha chain variable domain of TCR clone 71447 (TRAV41, TRAJ34)
CAVVYNTDKLIF

SEQ ID NO: 142894 - protein, 13 aa, Homo sapiens
  CDR3 for beta chain variable domain of TCR clone 71447 (TRBV7-9, TRBJ2-1)
CASSWESYNEQFF

SEQ ID NO: 142895 - protein, 11 aa, Homo sapiens
  CDR3 for alpha chain variable domain of TCR clone 71448 (TRAV2, TRAJ33)
CAVDSNYRLIW

SEQ ID NO: 142896 - protein, 15 aa, Homo sapiens
  CDR3 for beta chain variable domain of TCR clone 71448 (TRBV19, TRBJ1-2)
CASSVGQVLNYGYTF

SEQ ID NO: 142897 - protein, 13 aa, Homo sapiens
  CDR3 for alpha chain variable domain of TCR clone 71449 (TRAV1-1, TRAJ9)
CAAKNTGGFKTIF

SEQ ID NO: 142898 - protein, 16 aa, Homo sapiens
  CDR3 for beta chain variable domain of TCR clone 71449 (TRBV18, TRBJ2-2)
CASSPPRTANTGELFF

SEQ ID NO: 142899 - protein, 18 aa, Homo sapiens
  CDR3 for alpha chain variable domain of TCR clone 71450 (TRAV26-2, TRAJ45)
CILRLWGYSGGGADGVTF

SEQ ID NO: 142900 - protein, 17 aa, Homo sapiens
  CDR3 for beta chain variable domain of TCR clone 71450 (TRBV28, TRBJ2-3)
CASSPTPAGGRVDTQYF

SEQ ID NO: 142901 - protein, 13 aa, Homo sapiens
  CDR3 for alpha chain variable domain of TCR clone 71451 (TRAV27, TRAJ56)
CAGKPGANSKLTF

SEQ ID NO: 142902 - protein, 15 aa, Homo sapiens
  CDR3 for beta chain variable domain of TCR clone 71451 (TRBV6-1, TRBJ2-3)
CASIERWDSTDTQYF

SEQ ID NO: 142903 - protein, 12 aa, Homo sapiens
  CDR3 for alpha chain variable domain of TCR clone 71452 (TRAV27, TRAJ37)
CADSGSTGKLIF

SEQ ID NO: 142904 - protein, 18 aa, Homo sapiens
  CDR3 for beta chain variable domain of TCR clone 71452 (TRBV7-9, TRBJ1-1)
CASSKPWDTMGMNTEASF

SEQ ID NO: 142905 - protein, 14 aa, Homo sapiens
  CDR3 for alpha chain variable domain of TCR clone 71453 (TRAV17, TRAJ57)
CATDPQGGSEKLVF

SEQ ID NO: 142906 - protein, 14 aa, Homo sapiens
  CDR3 for beta chain variable domain of TCR clone 71453 (TRBV7-2, TRBJ2-5)
CASSPRGSSETQYF

SEQ ID NO: 142907 - protein, 15 aa, Homo sapiens
  CDR3 for alpha chain variable domain of TCR clone 71454 (TRAV8-3, TRAJ41)
CAVGSNSNYGYALNF

SEQ ID NO: 142908 - protein, 17 aa, Homo sapiens
  CDR3 for beta chain variable domain of TCR clone 71454 (TRBV25-1, TRBJ2-1)
CASSAYGQGRGVYEQFF

SEQ ID NO: 142909 - protein, 11 aa, Homo sapiens
  CDR3 for alpha chain variable domain of TCR clone 71455 (TRAV3, TRAJ21)
CAVGNFNKFYF

SEQ ID NO: 142910 - protein, 17 aa, Homo sapiens
  CDR3 for beta chain variable domain of TCR clone 71455 (TRBV24-1, TRBJ2-1)
CATSDVSTSGTYNEQLF

SEQ ID NO: 142911 - protein, 18 aa, Homo sapiens
  CDR3 for alpha chain variable domain of TCR clone 71456 (TRAV12-3, TRAJ52)
CAMSVGGAGGTSYGKLTF

SEQ ID NO: 142912 - protein, 12 aa, Homo sapiens
  CDR3 for beta chain variable domain of TCR clone 71456 (TRBV2, TRBJ2-1)
CASRPGPREQFF

SEQ ID NO: 142913 - protein, 10 aa, Homo sapiens
  CDR3 for alpha chain variable domain of TCR clone 71457 (TRAV12-3, TRAJ49)
CAMNDDQFYF

SEQ ID NO: 142914 - protein, 11 aa, Homo sapiens
  CDR3 for beta chain variable domain of TCR clone 71457 (TRBV7-9, TRBJ2-1)
CASSSQNEQFF

SEQ ID NO: 142915 - protein, 13 aa, Homo sapiens
  CDR3 for alpha chain variable domain of TCR clone 71458 (TRAV8-3, TRAJ43)
CAVGPDNNNDMRF

SEQ ID NO: 142916 - protein, 14 aa, Homo sapiens
  CDR3 for beta chain variable domain of TCR clone 71458 (TRBV19, TRBJ2-1)
CASPTFVLSDEQFF

SEQ ID NO: 142917 - protein, 14 aa, Homo sapiens
  CDR3 for alpha chain variable domain of TCR clone 71459 (TRAV1-2, TRAJ8)
CAVREDTGFQKLVF

SEQ ID NO: 142918 - protein, 15 aa, Homo sapiens
  CDR3 for beta chain variable domain of TCR clone 71459 (TRBV27, TRBJ2-3)
CASSLGLAATDTQYF

SEQ ID NO: 142919 - protein, 10 aa, Homo sapiens
  CDR3 for alpha chain variable domain of TCR clone 71460 (TRAV13-1, TRAJ41)
CAASGPRRTQ

SEQ ID NO: 142920 - protein, 15 aa, Homo sapiens
  CDR3 for beta chain variable domain of TCR clone 71460 (TRBV7-3, TRBJ2-1)
CASSLSSGSFDEQFF

SEQ ID NO: 142921 - protein, 11 aa, Homo sapiens
  CDR3 for alpha chain variable domain of TCR clone 71461 (TRAV2, TRAJ21)
CASGGYQKVTF

SEQ ID NO: 142922 - protein, 16 aa, Homo sapiens
  CDR3 for beta chain variable domain of TCR clone 71461 (TRBV19, TRBJ2-1)
CASSKAGPSSYNEQFF

SEQ ID NO: 142923 - protein, 14 aa, Homo sapiens
  CDR3 for alpha chain variable domain of TCR clone 71462 (TRAV12-2, TRAJ17)
CAALFKAAGNKLTF

SEQ ID NO: 142924 - protein, 13 aa, Homo sapiens
  CDR3 for beta chain variable domain of TCR clone 71462 (TRBV11-2, TRBJ1-1)
CASSFTENTEAFF

SEQ ID NO: 142925 - protein, 18 aa, Homo sapiens
  CDR3 for alpha chain variable domain of TCR clone 71463 (TRAV13-1, TRAJ10)
CAASKGRAVTGGGKKLTF

SEQ ID NO: 142926 - protein, 14 aa, Homo sapiens
  CDR3 for beta chain variable domain of TCR clone 71463 (TRBV18, TRBJ2-7)
CASSPRGGAYEQYF

SEQ ID NO: 142927 - protein, 13 aa, Homo sapiens
  CDR3 for alpha chain variable domain of TCR clone 71464 (TRAV1-2, TRAJ9)
CAVLTTGGFKTIF

SEQ ID NO: 142928 - protein, 14 aa, Homo sapiens
  CDR3 for beta chain variable domain of TCR clone 71464 (TRBV20-1, TRBJ2-3)
CSARGGTSTDTQYF

SEQ ID NO: 142929 - protein, 16 aa, Homo sapiens
  CDR3 for alpha chain variable domain of TCR clone 71465 (TRAV20, TRAJ22)
CAVQASSSGSARQLTF

SEQ ID NO: 142930 - protein, 13 aa, Homo sapiens
  CDR3 for beta chain variable domain of TCR clone 71465 (TRBV7-2, TRBJ2-5)
CASIQTSVETQYF

SEQ ID NO: 142931 - protein, 16 aa, Homo sapiens
  CDR3 for alpha chain variable domain of TCR clone 71466 (TRAV3, TRAJ18)
CAVRDRRGSTLGRLYF

SEQ ID NO: 142932 - protein, 15 aa, Homo sapiens
  CDR3 for beta chain variable domain of TCR clone 71466 (TRBV7-9, TRBJ1-6)
CASSSPGRGNSPLHF

SEQ ID NO: 142933 - protein, 13 aa, Homo sapiens
  CDR3 for alpha chain variable domain of TCR clone 71467 (TRAV21, TRAJ20)
CAVGLRVDYKLSF

SEQ ID NO: 142934 - protein, 17 aa, Homo sapiens
  CDR3 for beta chain variable domain of TCR clone 71467 (TRBV7-8, TRBJ2-6)
CASSAGTGGAGANVLTF

SEQ ID NO: 142935 - protein, 17 aa, Homo sapiens
  CDR3 for alpha chain variable domain of TCR clone 71468 (TRAV3, TRAJ6)
CAVRDGPRAGGSYIPTF

SEQ ID NO: 142936 - protein, 14 aa, Homo sapiens
  CDR3 for beta chain variable domain of TCR clone 71468 (TRBV4-2, TRBJ1-5)
CASSRDRGNQPQHF

SEQ ID NO: 142937 - protein, 12 aa, Homo sapiens
  CDR3 for alpha chain variable domain of TCR clone 71469 (TRAV8-3, TRAJ20)
CAVGANNYKLSF

SEQ ID NO: 142938 - protein, 16 aa, Homo sapiens
  CDR3 for beta chain variable domain of TCR clone 71469 (TRBV19, TRBJ2-2)
CASRSPRTGATGELFF

SEQ ID NO: 142939 - protein, 12 aa, Homo sapiens
  CDR3 for alpha chain variable domain of TCR clone 71470 (TRAV8-3, TRAJ26)
CAGDNYGQNFVF

SEQ ID NO: 142940 - protein, 15 aa, Homo sapiens
  CDR3 for beta chain variable domain of TCR clone 71470 (TRBV9, TRBJ2-1)
WASSLAGSSYNEQFF

SEQ ID NO: 142941 - protein, 20 aa, Homo sapiens
  CDR3 for alpha chain variable domain of TCR clone 71471 (TRAV25, TRAJ21)
TATQTTDVGTYPLSFNKFYF

SEQ ID NO: 142942 - protein, 14 aa, Homo sapiens
  CDR3 for beta chain variable domain of TCR clone 71471 (TRBV25-1, TRBJ1-1)
CASTHLGGNTEAFF

SEQ ID NO: 142943 - protein, 14 aa, Homo sapiens
  CDR3 for alpha chain variable domain of TCR clone 71472 (TRAV21, TRAJ15)
CAVSLNQAGTALIF

SEQ ID NO: 142944 - protein, 11 aa, Homo sapiens
  CDR3 for beta chain variable domain of TCR clone 71472 (TRBV20-1, TRBJ2-7)
CSARTSYERYF

SEQ ID NO: 142945 - protein, 16 aa, Homo sapiens
  CDR3 for alpha chain variable domain of TCR clone 71473 (TRAV3, TRAJ21)
CAVRDIERGNFNKFYF

SEQ ID NO: 142946 - protein, 13 aa, Homo sapiens
  CDR3 for beta chain variable domain of TCR clone 71473 (TRBV10-3, TRBJ2-7)
CASKLAVNYEQYF

SEQ ID NO: 142947 - protein, 13 aa, Homo sapiens
  CDR3 for alpha chain variable domain of TCR clone 71474 (TRAV20, TRAJ37)
CAGCSSNTGKLIF

SEQ ID NO: 142948 - protein, 21 aa, Homo sapiens
  CDR3 for beta chain variable domain of TCR clone 71474 (TRBV4-2, TRBJ2-3)
PCSQETRPCISVPAAPDTQYF

SEQ ID NO: 142949 - protein, 14 aa, Homo sapiens
  CDR3 for alpha chain variable domain of TCR clone 71475 (TRAV12-3, TRAJ56)
CAMGVTGANSKLTF

SEQ ID NO: 142950 - protein, 17 aa, Homo sapiens
  CDR3 for beta chain variable domain of TCR clone 71475 (TRBV20-1, TRBJ2-3)
CSASLLGRGGSADTQYF

SEQ ID NO: 142951 - protein, 14 aa, Homo sapiens
  CDR3 for alpha chain variable domain of TCR clone 71476 (TRAV1-2, TRAJ16)
CAVNRFSDGQKLLF

SEQ ID NO: 142952 - protein, 15 aa, Homo sapiens
  CDR3 for beta chain variable domain of TCR clone 71476 (TRBV5-1, TRBJ1-1)
CASSLGEGENTEAFF

SEQ ID NO: 142953 - protein, 12 aa, Homo sapiens
  CDR3 for alpha chain variable domain of TCR clone 71477 (TRAV12-3, TRAJ5)
CAMDTGRRALTF

SEQ ID NO: 142954 - protein, 13 aa, Homo sapiens
  CDR3 for beta chain variable domain of TCR clone 71477 (TRBV7-7, TRBJ2-2)
CASSLTSAGELFL

SEQ ID NO: 142955 - protein, 15 aa, Homo sapiens
  CDR3 for alpha chain variable domain of TCR clone 71478 (TRAV26-2, TRAJ13)
CILRDLSGGYQKVTF

SEQ ID NO: 142956 - protein, 11 aa, Homo sapiens
  CDR3 for beta chain variable domain of TCR clone 71478 (TRBV7-9, TRBJ2-3)
CASSYTDAQYF

SEQ ID NO: 142957 - protein, 14 aa, Homo sapiens
  CDR3 for alpha chain variable domain of TCR clone 71479 (TRAV1-2, TRAJ16)
CAVNRFSDVQKLLF

SEQ ID NO: 142958 - protein, 14 aa, Homo sapiens
  CDR3 for beta chain variable domain of TCR clone 71479 (TRBV25-1, TRBJ1-1)
CASTHLGGNTEAFF

SEQ ID NO: 142959 - protein, 12 aa, Homo sapiens
  CDR3 for alpha chain variable domain of TCR clone 71480 (TRAV8-3, TRAJ20)
CAVGANDNKLSF

SEQ ID NO: 142960 - protein, 16 aa, Homo sapiens
  CDR3 for beta chain variable domain of TCR clone 71480 (TRBV19, TRBJ2-2)
CASRSPGTGATGELFF

SEQ ID NO: 142961 - protein, 14 aa, Homo sapiens
  CDR3 for alpha chain variable domain of TCR clone 71481 (TRAV1-2, TRAJ8)
CAVREDTGFQKLVF

SEQ ID NO: 142962 - protein, 15 aa, Homo sapiens
  CDR3 for beta chain variable domain of TCR clone 71481 (TRBV19, TRBJ2-1)
CASSIQATSYNEQFF

SEQ ID NO: 142963 - protein, 13 aa, Homo sapiens
  CDR3 for alpha chain variable domain of TCR clone 71482 (TRAV12-2, TRAJ37)
CAGGSGNTGKLIF

SEQ ID NO: 142964 - protein, 17 aa, Homo sapiens
  CDR3 for beta chain variable domain of TCR clone 71482 (TRBV11-2, TRBJ2-1)
CASSLSPPGVEYNEQFF

SEQ ID NO: 142965 - protein, 14 aa, Homo sapiens
  CDR3 for alpha chain variable domain of TCR clone 71483 (TRAV12-2, TRAJ17)
CAVNIKAAGNKLTF

SEQ ID NO: 142966 - protein, 16 aa, Homo sapiens
  CDR3 for beta chain variable domain of TCR clone 71483 (TRBV20-1, TRBJ2-6)
YSASSQGYDGANVLTF

SEQ ID NO: 142967 - protein, 11 aa, Homo sapiens
  CDR3 for alpha chain variable domain of TCR clone 71484 (TRAV2, TRAJ13)
CASGGYQKVTF

SEQ ID NO: 142968 - protein, 20 aa, Homo sapiens
  CDR3 for beta chain variable domain of TCR clone 71484 (TRBV7-8, TRBJ2-1)
CASSLAHRLAGVRSYNEQFF

SEQ ID NO: 142969 - protein, 18 aa, Homo sapiens
  CDR3 for alpha chain variable domain of TCR clone 71485 (TRAV21, TRAJ52)
CAVRPSPAGGTSYGKLTF

SEQ ID NO: 142970 - protein, 13 aa, Homo sapiens
  CDR3 for beta chain variable domain of TCR clone 71485 (TRBV5-5, TRBJ1-2)
CASSFWRGEDYTF

SEQ ID NO: 142971 - protein, 16 aa, Homo sapiens
  CDR3 for alpha chain variable domain of TCR clone 71486 (TRAV3, TRAJ37)
CAVRGKGSGNTGKLIF

SEQ ID NO: 142972 - protein, 16 aa, Homo sapiens
  CDR3 for beta chain variable domain of TCR clone 71486 (TRBV7-2, TRBJ2-5)
CASSSKWLSGQETQYF

SEQ ID NO: 142973 - protein, 13 aa, Homo sapiens
  CDR3 for alpha chain variable domain of TCR clone 71487 (TRAV12-3, TRAJ48)
CAMSLVGNEKLTF

SEQ ID NO: 142974 - protein, 11 aa, Homo sapiens
  CDR3 for beta chain variable domain of TCR clone 71487 (TRBV7-2, TRBJ2-7)
CASSSGLWQCF

SEQ ID NO: 142975 - protein, 15 aa, Homo sapiens
  CDR3 for alpha chain variable domain of TCR clone 71488 (TRAV17, TRAJ4)
CATGTWSGGYNKLTF

SEQ ID NO: 142976 - protein, 13 aa, Homo sapiens
  CDR3 for beta chain variable domain of TCR clone 71488 (TRBV6-6, TRBJ2-7)
CASSPKHLAEQYF

SEQ ID NO: 142977 - protein, 13 aa, Homo sapiens
  CDR3 for alpha chain variable domain of TCR clone 71489 (TRAV27, TRAJ41)
CAGEGNSGYALNF

SEQ ID NO: 142978 - protein, 15 aa, Homo sapiens
  CDR3 for beta chain variable domain of TCR clone 71489 (TRBV7-9, TRBJ1-1)
CASSRPGTANTEAFF

SEQ ID NO: 142979 - protein, 14 aa, Homo sapiens
  CDR3 for alpha chain variable domain of TCR clone 71490 (TRAV13-1, TRAJ9)
CAASALTGGFKNIF

SEQ ID NO: 142980 - protein, 13 aa, Homo sapiens
  CDR3 for beta chain variable domain of TCR clone 71490 (TRBV20-1, TRBJ1-1)
CSAGTVGNTEAFF

SEQ ID NO: 142981 - protein, 12 aa, Homo sapiens
  CDR3 for alpha chain variable domain of TCR clone 71491 (TRAV17, TRAJ30)
CATDARDYKIIF

SEQ ID NO: 142982 - protein, 15 aa, Homo sapiens
  CDR3 for beta chain variable domain of TCR clone 71491 (TRBV4-1, TRBJ2-1)
CASSQGGELYNEQFF

SEQ ID NO: 142983 - protein, 12 aa, Homo sapiens
  CDR3 for alpha chain variable domain of TCR clone 71492 (TRAV4, TRAJ26)
CLVCDYGQNFVF

SEQ ID NO: 142984 - protein, 16 aa, Homo sapiens
  CDR3 for beta chain variable domain of TCR clone 71492 (TRBV7-2, TRBJ1-2)
CASSSNQDRRGHGYTF

SEQ ID NO: 142985 - protein, 11 aa, Homo sapiens
  CDR3 for alpha chain variable domain of TCR clone 71493 (TRAV2, TRAJ33)
CAVDSNYQLIW

SEQ ID NO: 142986 - protein, 12 aa, Homo sapiens
  CDR3 for beta chain variable domain of TCR clone 71493 (TRBV6-3, TRBJ2-7)
CASSLTPYEQYF

SEQ ID NO: 142987 - protein, 16 aa, Homo sapiens
  CDR3 for alpha chain variable domain of TCR clone 71494 (TRAV30, TRAJ24)
CGTEIVDADSWGKFQF

SEQ ID NO: 142988 - protein, 16 aa, Homo sapiens
  CDR3 for beta chain variable domain of TCR clone 71494 (TRBV27, TRBJ2-2)
CASSSSGVSNTGELFF

SEQ ID NO: 142989 - protein, 14 aa, Homo sapiens
  CDR3 for alpha chain variable domain of TCR clone 71495 (TRAV17, TRAJ57)
CATDPQGGSEKLVF

SEQ ID NO: 142990 - protein, 14 aa, Homo sapiens
  CDR3 for beta chain variable domain of TCR clone 71495 (TRBV11-2, TRBJ2-7)
CASSLGAGAYEQYF

SEQ ID NO: 142991 - protein, 13 aa, Homo sapiens
  CDR3 for alpha chain variable domain of TCR clone 71496 (TRAV35, TRAJ57)
CAGSRGGSEKLVF

SEQ ID NO: 142992 - protein, 15 aa, Homo sapiens
  CDR3 for beta chain variable domain of TCR clone 71496 (TRBV20-1, TRBJ2-7)
CSARDRVSGMDEQYF

SEQ ID NO: 142993 - protein, 13 aa, Homo sapiens
  CDR3 for alpha chain variable domain of TCR clone 71497 (TRAV12-2, TRAJ42)
CAVKRGSQGNLIF

SEQ ID NO: 142994 - protein, 15 aa, Homo sapiens
  CDR3 for beta chain variable domain of TCR clone 71497 (TRBV6-3, TRBJ2-7)
CASSSPGTVFYEQYF

SEQ ID NO: 142995 - protein, 14 aa, Homo sapiens
  CDR3 for alpha chain variable domain of TCR clone 71498 (TRAV12-3, TRAJ9)
CAMSPNTGGFKTIF

SEQ ID NO: 142996 - protein, 16 aa, Homo sapiens
  CDR3 for beta chain variable domain of TCR clone 71498 (TRBV20-1, TRBJ1-4)
CSAPGQGLLTNEKLFF

SEQ ID NO: 142997 - protein, 16 aa, Homo sapiens
  CDR3 for alpha chain variable domain of TCR clone 71499 (TRAV30, TRAJ24)
CGTEIVDADSWGKLQV

SEQ ID NO: 142998 - protein, 14 aa, Homo sapiens
  CDR3 for beta chain variable domain of TCR clone 71499 (TRBV12-5, TRBJ2-5)
CASGSRTHQETQYF

SEQ ID NO: 142999 - protein, 14 aa, Homo sapiens
  CDR3 for alpha chain variable domain of TCR clone 71500 (TRAV8-1, TRAJ5)
CAVRTDTGRRALTF

SEQ ID NO: 143000 - protein, 14 aa, Homo sapiens
  CDR3 for beta chain variable domain of TCR clone 71500 (TRBV7-8, TRBJ2-3)
CASSSPDGQDTQYF

SEQ ID NO: 143001 - protein, 12 aa, Homo sapiens
  CDR3 for alpha chain variable domain of TCR clone 71501 (TRAV13-1, TRAJ48)
CAANFGNENLTF

SEQ ID NO: 143002 - protein, 13 aa, Homo sapiens
  CDR3 for beta chain variable domain of TCR clone 71501 (TRBV7-3, TRBJ1-1)
CASSQDWGAEAFF

SEQ ID NO: 143003 - protein, 13 aa, Homo sapiens
  CDR3 for alpha chain variable domain of TCR clone 71502 (TRAV12-2, TRAJ39)
CAVNNNAGNMLTF

SEQ ID NO: 143004 - protein, 18 aa, Homo sapiens
  CDR3 for beta chain variable domain of TCR clone 71502 (TRBV12-4, TRBJ1-2)
CASSPNPGQAGPYYGYTF

SEQ ID NO: 143005 - protein, 15 aa, Homo sapiens
  CDR3 for alpha chain variable domain of TCR clone 71503 (TRAV16, TRAJ16)
CALQGGGSDGQQLLF

SEQ ID NO: 143006 - protein, 15 aa, Homo sapiens
  CDR3 for beta chain variable domain of TCR clone 71503 (TRBV20-1, TRBJ2-7)
CSARDRVSGMDEQYF

SEQ ID NO: 143007 - protein, 13 aa, Homo sapiens
  CDR3 for alpha chain variable domain of TCR clone 71504 (TRAV12-1, TRAJ9)
CVVRNAGGFKTIF

SEQ ID NO: 143008 - protein, 14 aa, Homo sapiens
  CDR3 for beta chain variable domain of TCR clone 71504 (TRBV20-1, TRBJ2-1)
CSAQIGGSANEQFF

SEQ ID NO: 143009 - protein, 13 aa, Homo sapiens
  CDR3 for alpha chain variable domain of TCR clone 71505 (TRAV17, TRAJ9)
CATDYTGGFKTIF

SEQ ID NO: 143010 - protein, 16 aa, Homo sapiens
  CDR3 for beta chain variable domain of TCR clone 71505 (TRBV7-3, TRBJ2-2)
CASSLKRGTLSGELFF

SEQ ID NO: 143011 - protein, 12 aa, Homo sapiens
  CDR3 for alpha chain variable domain of TCR clone 71506 (TRAV13-1, TRAJ15)
CAASRAGTALIF

SEQ ID NO: 143012 - protein, 14 aa, Homo sapiens
  CDR3 for beta chain variable domain of TCR clone 71506 (TRBV19, TRBJ2-2)
CASSTLHRSGELFF

SEQ ID NO: 143013 - protein, 11 aa, Homo sapiens
  CDR3 for alpha chain variable domain of TCR clone 71507 (TRAV1-2, TRAJ20)
CAVANDYKLSF

SEQ ID NO: 143014 - protein, 15 aa, Homo sapiens
  CDR3 for beta chain variable domain of TCR clone 71507 (TRBV6-3, TRBJ2-7)
CASSSPGTVFYEQYF

SEQ ID NO: 143015 - protein, 12 aa, Homo sapiens
  CDR3 for alpha chain variable domain of TCR clone 71508 (TRAV12-1, TRAJ40)
CVFYSGTYKYIF

SEQ ID NO: 143016 - protein, 18 aa, Homo sapiens
  CDR3 for beta chain variable domain of TCR clone 71508 (TRBV12-4, TRBJ2-2)
CASSLVACTRGRTGELFF

SEQ ID NO: 143017 - protein, 15 aa, Homo sapiens
  CDR3 for alpha chain variable domain of TCR clone 71509 (TRAV8-3, TRAJ45)
CASSYSGGGAVGLTF

SEQ ID NO: 143018 - protein, 17 aa, Homo sapiens
  CDR3 for beta chain variable domain of TCR clone 71509 (TRBV7-8, TRBJ1-2)
CASSLRPLQGHLYGYTF

SEQ ID NO: 143019 - protein, 14 aa, Homo sapiens
  CDR3 for alpha chain variable domain of TCR clone 71510 (TRAV17, TRAJ57)
CATDPQGGSEKLVF

SEQ ID NO: 143020 - protein, 14 aa, Homo sapiens
  CDR3 for beta chain variable domain of TCR clone 71510 (TRBV2, TRBJ2-1)
CARRTGSSYNEQFF

SEQ ID NO: 143021 - protein, 13 aa, Homo sapiens
  CDR3 for alpha chain variable domain of TCR clone 71511 (TRAV12-2, TRAJ20)
CAVYPSNDYKLNF

SEQ ID NO: 143022 - protein, 15 aa, Homo sapiens
  CDR3 for beta chain variable domain of TCR clone 71511 (TRBV27, TRBJ2-5)
CASSLYPRGGETQYF

SEQ ID NO: 143023 - protein, 15 aa, Homo sapiens
  CDR3 for alpha chain variable domain of TCR clone 71512 (TRAV3, TRAJ40)
CAVRDGPGGTYKYIF

SEQ ID NO: 143024 - protein, 16 aa, Homo sapiens
  CDR3 for beta chain variable domain of TCR clone 71512 (TRBV5-1, TRBJ1-1)
CASNSGGNSLNTEAFF

SEQ ID NO: 143025 - protein, 13 aa, Homo sapiens
  CDR3 for alpha chain variable domain of TCR clone 71513 (TRAV2, TRAJ15)
CAVASQAGTALIF

SEQ ID NO: 143026 - protein, 16 aa, Homo sapiens
  CDR3 for beta chain variable domain of TCR clone 71513 (TRBV5-1, TRBJ1-1)
CASRSGGNSLNTEAFF

SEQ ID NO: 143027 - protein, 14 aa, Homo sapiens
  CDR3 for alpha chain variable domain of TCR clone 71514 (TRAV12-1, TRAJ6)
CVVKRSGGSYIPTF

SEQ ID NO: 143028 - protein, 13 aa, Homo sapiens
  CDR3 for beta chain variable domain of TCR clone 71514 (TRBV10-3, TRBJ2-7)
CASKLAVNYEQYI

SEQ ID NO: 143029 - protein, 12 aa, Homo sapiens
  CDR3 for alpha chain variable domain of TCR clone 71515 (TRAV27, TRAJ21)
CAGVRQLQQILL

SEQ ID NO: 143030 - protein, 11 aa, Homo sapiens
  CDR3 for beta chain variable domain of TCR clone 71515 (TRBV11-2, TRBJ2-2)
CASSLPGELFF

SEQ ID NO: 143031 - protein, 13 aa, Homo sapiens
  CDR3 for alpha chain variable domain of TCR clone 71516 (TRAV21, TRAJ20)
CAVGLRVDYKLGF

SEQ ID NO: 143032 - protein, 17 aa, Homo sapiens
  CDR3 for beta chain variable domain of TCR clone 71516 (TRBV13, TRBJ2-3)
CASSLSRVAGGRNTQYF

SEQ ID NO: 143033 - protein, 14 aa, Homo sapiens
  CDR3 for alpha chain variable domain of TCR clone 71517 (TRAV8-4, TRAJ15)
CAVTIREAGTALIF

SEQ ID NO: 143034 - protein, 16 aa, Homo sapiens
  CDR3 for beta chain variable domain of TCR clone 71517 (TRBV29-1, TRBJ2-6)
CSVEDITYAGANVLTF

SEQ ID NO: 143035 - protein, 14 aa, Homo sapiens
  CDR3 for alpha chain variable domain of TCR clone 71518 (TRAV8-1, TRAJ5)
CAVSMDTGRRALTF

SEQ ID NO: 143036 - protein, 13 aa, Homo sapiens
  CDR3 for beta chain variable domain of TCR clone 71518 (TRBV10-3, TRBJ2-7)
CASKLAVNYEQYF

SEQ ID NO: 143037 - protein, 10 aa, Homo sapiens
  CDR3 for alpha chain variable domain of TCR clone 71519 (TRAV12-3, TRAJ49)
YAMNDDQFYF

SEQ ID NO: 143038 - protein, 13 aa, Homo sapiens
  CDR3 for beta chain variable domain of TCR clone 71519 (TRBV12-4, TRBJ1-1)
CASSPGTGFEAFF

SEQ ID NO: 143039 - protein, 15 aa, Homo sapiens
  CDR3 for alpha chain variable domain of TCR clone 71520 (TRAV27, TRAJ38)
CAARRNAGNNRKLIW

SEQ ID NO: 143040 - protein, 13 aa, Homo sapiens
  CDR3 for beta chain variable domain of TCR clone 71520 (TRBV27, TRBJ1-4)
CASSLMGDEKLFF

SEQ ID NO: 143041 - protein, 13 aa, Homo sapiens
  CDR3 for alpha chain variable domain of TCR clone 71521 (TRAV8-3, TRAJ36)
CAVGATGANNPFF

SEQ ID NO: 143042 - protein, 17 aa, Homo sapiens
  CDR3 for beta chain variable domain of TCR clone 71521 (TRBV4-2, TRBJ1-1)
CASTQFGGGSGNTEAFF

SEQ ID NO: 143043 - protein, 13 aa, Homo sapiens
  CDR3 for alpha chain variable domain of TCR clone 71522 (TRAV12-2, TRAJ47)
CAVFMEYGNKLVF

SEQ ID NO: 143044 - protein, 14 aa, Homo sapiens
  CDR3 for beta chain variable domain of TCR clone 71522 (TRBV7-2, TRBJ2-7)
CASSPKTSFYEQYF

SEQ ID NO: 143045 - protein, 15 aa, Homo sapiens
  CDR3 for alpha chain variable domain of TCR clone 71523 (TRAV12-2, TRAJ53)
CAVNGGGGSNYKLTF

SEQ ID NO: 143046 - protein, 22 aa, Homo sapiens
  CDR3 for beta chain variable domain of TCR clone 71523 (TRBV6-1, TRBJ1-3)
CASVQGGGWKHHIFWRGKLAHC

SEQ ID NO: 143047 - protein, 11 aa, Homo sapiens
  CDR3 for alpha chain variable domain of TCR clone 71524 (TRAV26-1, TRAJ37)
CIVRAGRKLIF

SEQ ID NO: 143048 - protein, 13 aa, Homo sapiens
  CDR3 for beta chain variable domain of TCR clone 71524 (TRBV7-2, TRBJ2-2)
CASSLAVTGELFF

SEQ ID NO: 143049 - protein, 12 aa, Homo sapiens
  CDR3 for alpha chain variable domain of TCR clone 71525 (TRAV2, TRAJ33)
CAVPDSNYQLIW

SEQ ID NO: 143050 - protein, 13 aa, Homo sapiens
  CDR3 for beta chain variable domain of TCR clone 71525 (TRBV10-3, TRBJ2-7)
CASKLAVNYEQYF

SEQ ID NO: 143051 - protein, 14 aa, Homo sapiens
  CDR3 for alpha chain variable domain of TCR clone 71526 (TRAV23/DV6, TRAJ13)
CAASETGGYQKVAF

SEQ ID NO: 143052 - protein, 13 aa, Homo sapiens
  CDR3 for beta chain variable domain of TCR clone 71526 (TRBV29-1, TRBJ2-1)
CSVEGGRVNEQFF

SEQ ID NO: 143053 - protein, 16 aa, Homo sapiens
  CDR3 for alpha chain variable domain of TCR clone 71527 (TRAV30, TRAJ24)
CGTEIVDADSWGKFQF

SEQ ID NO: 143054 - protein, 12 aa, Homo sapiens
  CDR3 for beta chain variable domain of TCR clone 71527 (TRBV7-9, TRBJ2-7)
CATRTDAYEQYF

SEQ ID NO: 143055 - protein, 11 aa, Homo sapiens
  CDR3 for alpha chain variable domain of TCR clone 71528 (TRAV17, TRAJ9)
CGFTGGFKTIF

SEQ ID NO: 143056 - protein, 14 aa, Homo sapiens
  CDR3 for beta chain variable domain of TCR clone 71528 (TRBV7-9, TRBJ2-2)
CASSLVKDTGELFF

SEQ ID NO: 143057 - protein, 13 aa, Homo sapiens
  CDR3 for alpha chain variable domain of TCR clone 71529 (TRAV21, TRAJ36)
CAVIKTGANNLFF

SEQ ID NO: 143058 - protein, 13 aa, Homo sapiens
  CDR3 for beta chain variable domain of TCR clone 71529 (TRBV29-1, TRBJ2-3)
CRATRGGRDTQYF

SEQ ID NO: 143059 - protein, 13 aa, Homo sapiens
  CDR3 for alpha chain variable domain of TCR clone 71530 (TRAV13-1, TRAJ39)
CAASIWAGSMLTF

SEQ ID NO: 143060 - protein, 13 aa, Homo sapiens
  CDR3 for beta chain variable domain of TCR clone 71530 (TRBV11-2, TRBJ1-3)
CASSLEPVNTIYF

SEQ ID NO: 143061 - protein, 17 aa, Homo sapiens
  CDR3 for alpha chain variable domain of TCR clone 71531 (TRAV26-1, TRAJ37)
CIVRVITVSSNIGKLIF

SEQ ID NO: 143062 - protein, 13 aa, Homo sapiens
  CDR3 for beta chain variable domain of TCR clone 71531 (TRBV2, TRBJ2-7)
CASSVGGSGEQYF

SEQ ID NO: 143063 - protein, 12 aa, Homo sapiens
  CDR3 for alpha chain variable domain of TCR clone 71532 (TRAV27, TRAJ35)
CAGADFGNVLHC

SEQ ID NO: 143064 - protein, 15 aa, Homo sapiens
  CDR3 for beta chain variable domain of TCR clone 71532 (TRBV19, TRBJ2-1)
CASSISSGGYNEQFF

SEQ ID NO: 143065 - protein, 13 aa, Homo sapiens
  CDR3 for alpha chain variable domain of TCR clone 71533 (TRAV13-1, TRAJ6)
CAASKGGSYVPTF

SEQ ID NO: 143066 - protein, 14 aa, Homo sapiens
  CDR3 for beta chain variable domain of TCR clone 71533 (TRBV7-2, TRBJ2-2)
CASRGQGAAGELFF

SEQ ID NO: 143067 - protein, 14 aa, Homo sapiens
  CDR3 for alpha chain variable domain of TCR clone 71534 (TRAV12-3, TRAJ9)
CAMSPNTGGFKTIF

SEQ ID NO: 143068 - protein, 12 aa, Homo sapiens
  CDR3 for beta chain variable domain of TCR clone 71534 (TRBV19, TRBJ1-5)
RASSIAQQPQHF

SEQ ID NO: 143069 - protein, 11 aa, Homo sapiens
  CDR3 for alpha chain variable domain of TCR clone 71535 (TRAV12-3, TRAJ43)
CAMSVSNDMHF

SEQ ID NO: 143070 - protein, 13 aa, Homo sapiens
  CDR3 for beta chain variable domain of TCR clone 71535 (TRBV20-1, TRBJ1-1)
CSAPLGGGTEAFF

SEQ ID NO: 143071 - protein, 18 aa, Homo sapiens
  CDR3 for alpha chain variable domain of TCR clone 71536 (TRAV21, TRAJ52)
CAVRPSPAGGTSYGKLTF

SEQ ID NO: 143072 - protein, 16 aa, Homo sapiens
  CDR3 for beta chain variable domain of TCR clone 71536 (TRBV28, TRBJ1-4)
CASSPPYRGRSEKLFF

SEQ ID NO: 143073 - protein, 11 aa, Homo sapiens
  CDR3 for alpha chain variable domain of TCR clone 71537 (TRAV21, TRAJ34)
CAHYNTDKLIF

SEQ ID NO: 143074 - protein, 13 aa, Homo sapiens
  CDR3 for beta chain variable domain of TCR clone 71537 (TRBV27, TRBJ1-1)
CASSLSIGAEAFF

SEQ ID NO: 143075 - protein, 12 aa, Homo sapiens
  CDR3 for alpha chain variable domain of TCR clone 71538 (TRAV12-3, TRAJ34)
CAMGYNTDKLIF

SEQ ID NO: 143076 - protein, 15 aa, Homo sapiens
  CDR3 for beta chain variable domain of TCR clone 71538 (TRBV28, TRBJ2-1)
CASSIIARGRSEQFF

SEQ ID NO: 143077 - protein, 14 aa, Homo sapiens
  CDR3 for alpha chain variable domain of TCR clone 71539 (TRAV29/DV5, TRAJ36)
CAARRKTGASNLFF

SEQ ID NO: 143078 - protein, 14 aa, Homo sapiens
  CDR3 for beta chain variable domain of TCR clone 71539 (TRBV12-5, TRBJ2-5)
CASGSRTHQETQYF

SEQ ID NO: 143079 - protein, 14 aa, Homo sapiens
  CDR3 for alpha chain variable domain of TCR clone 71540 (TRAV21, TRAJ15)
CAVSLNQAGTALIF

SEQ ID NO: 143080 - protein, 11 aa, Homo sapiens
  CDR3 for beta chain variable domain of TCR clone 71540 (TRBV20-1, TRBJ2-7)
SSARTSYEQYF

SEQ ID NO: 143081 - protein, 14 aa, Homo sapiens
  CDR3 for alpha chain variable domain of TCR clone 71541 (TRAV23/DV6, TRAJ22)
CAASVSGSARQLTF

SEQ ID NO: 143082 - protein, 14 aa, Homo sapiens
  CDR3 for beta chain variable domain of TCR clone 71541 (TRBV7-3, TRBJ2-1)
CASSLAGGTNEQFF

SEQ ID NO: 143083 - protein, 15 aa, Homo sapiens
  CDR3 for alpha chain variable domain of TCR clone 71542 (TRAV13-1, TRAJ10)
CAATILPGGGNKLTF

SEQ ID NO: 143084 - protein, 15 aa, Homo sapiens
  CDR3 for beta chain variable domain of TCR clone 71542 (TRBV2, TRBJ2-7)
CASTLLGSGATEQYF

SEQ ID NO: 143085 - protein, 12 aa, Homo sapiens
  CDR3 for alpha chain variable domain of TCR clone 71543 (TRAV12-3, TRAJ17)
CAMTLTGNKLTF

SEQ ID NO: 143086 - protein, 12 aa, Homo sapiens
  CDR3 for beta chain variable domain of TCR clone 71543 (TRBV27, TRBJ2-2)
CASKLFTGELFF

SEQ ID NO: 143087 - protein, 13 aa, Homo sapiens
  CDR3 for alpha chain variable domain of TCR clone 71544 (TRAV27, TRAJ17)
CAGAATAGNKPTF

SEQ ID NO: 143088 - protein, 15 aa, Homo sapiens
  CDR3 for beta chain variable domain of TCR clone 71544 (TRBV5-1, TRBJ2-3)
CASRNQAGSTDTQYF

SEQ ID NO: 143089 - protein, 16 aa, Homo sapiens
  CDR3 for alpha chain variable domain of TCR clone 71545 (TRAV30, TRAJ24)
CGTEIVDADSWGKFQF

SEQ ID NO: 143090 - protein, 15 aa, Homo sapiens
  CDR3 for beta chain variable domain of TCR clone 71545 (TRBV20-1, TRBJ1-5)
CSARGSVDSNQPQHF

SEQ ID NO: 143091 - protein, 13 aa, Homo sapiens
  CDR3 for alpha chain variable domain of TCR clone 71546 (TRAV17, TRAJ5)
CAPMDTGRRALTF

SEQ ID NO: 143092 - protein, 15 aa, Homo sapiens
  CDR3 for beta chain variable domain of TCR clone 71546 (TRBV4-1, TRBJ2-7)
CASSQQGQGFDEQYF

SEQ ID NO: 143093 - protein, 13 aa, Homo sapiens
  CDR3 for alpha chain variable domain of TCR clone 71547 (TRAV3, TRAJ21)
CAVREPDFNKFYF

SEQ ID NO: 143094 - protein, 12 aa, Homo sapiens
  CDR3 for beta chain variable domain of TCR clone 71547 (TRBV29-1, TRBJ2-3)
CSVTGGADTQYF

SEQ ID NO: 143095 - protein, 14 aa, Homo sapiens
  CDR3 for alpha chain variable domain of TCR clone 71548 (TRAV1-1, TRAJ27)
CAVIYNTNAGKSTF

SEQ ID NO: 143096 - protein, 15 aa, Homo sapiens
  CDR3 for beta chain variable domain of TCR clone 71548 (TRBV6-3, TRBJ2-7)
YASSSPGTVFYEQYF

SEQ ID NO: 143097 - protein, 14 aa, Homo sapiens
  CDR3 for alpha chain variable domain of TCR clone 71549 (TRAV12-1, TRAJ9)
CVVTGVTGGFKTIF

SEQ ID NO: 143098 - protein, 16 aa, Homo sapiens
  CDR3 for beta chain variable domain of TCR clone 71549 (TRBV29-1, TRBJ1-2)
CSVEANRDIANYGYTF

SEQ ID NO: 143099 - protein, 10 aa, Homo sapiens
  CDR3 for alpha chain variable domain of TCR clone 71550 (TRAV38-1, TRAJ34)
CAFMDDKLIF

SEQ ID NO: 143100 - protein, 14 aa, Homo sapiens
  CDR3 for beta chain variable domain of TCR clone 71550 (TRBV7-2, TRBJ2-2)
CASSSNSNTGELFF

SEQ ID NO: 143101 - protein, 14 aa, Homo sapiens
  CDR3 for alpha chain variable domain of TCR clone 71551 (TRAV1-2, TRAJ16)
CAVNRFSDGQKLLF

SEQ ID NO: 143102 - protein, 13 aa, Homo sapiens
  CDR3 for beta chain variable domain of TCR clone 71551 (TRBV2, TRBJ2-2)
CTSRAWRTGELFF

SEQ ID NO: 143103 - protein, 13 aa, Homo sapiens
  CDR3 for alpha chain variable domain of TCR clone 71552 (TRAV1-2, TRAJ9)
CAALNTGGFKTIF

SEQ ID NO: 143104 - protein, 20 aa, Homo sapiens
  CDR3 for beta chain variable domain of TCR clone 71552 (TRBV28, TRBJ2-1)
CASTPIGRSPGLVGGNEQFF

SEQ ID NO: 143105 - protein, 11 aa, Homo sapiens
  CDR3 for alpha chain variable domain of TCR clone 71553 (TRAV1-2, TRAJ40)
CAVPGTYKYIF

SEQ ID NO: 143106 - protein, 18 aa, Homo sapiens
  CDR3 for beta chain variable domain of TCR clone 71553 (TRBV7-9, TRBJ2-7)
CASSLTTSGSRTWYEQYF

SEQ ID NO: 143107 - protein, 15 aa, Homo sapiens
  CDR3 for alpha chain variable domain of TCR clone 71554 (TRAV3, TRAJ6)
CAVRDFVGGSYIPTF

SEQ ID NO: 143108 - protein, 17 aa, Homo sapiens
  CDR3 for beta chain variable domain of TCR clone 71554 (TRBV19, TRBJ2-6)
CASSTGQVFSGANVLTF

SEQ ID NO: 143109 - protein, 15 aa, Homo sapiens
  CDR3 for alpha chain variable domain of TCR clone 71555 (TRAV25, TRAJ52)
CAGRPGGTSYGKLTF

SEQ ID NO: 143110 - protein, 17 aa, Homo sapiens
  CDR3 for beta chain variable domain of TCR clone 71555 (TRBV7-8, TRBJ2-6)
CASSAGTGGTGANVLTF

SEQ ID NO: 143111 - protein, 12 aa, Homo sapiens
  CDR3 for alpha chain variable domain of TCR clone 71556 (TRAV13-1, TRAJ21)
CAAKEGLNKFYF

SEQ ID NO: 143112 - protein, 13 aa, Homo sapiens
  CDR3 for beta chain variable domain of TCR clone 71556 (TRBV19, TRBJ2-7)
CASSPRQSYEQYF

SEQ ID NO: 143113 - protein, 14 aa, Homo sapiens
  CDR3 for alpha chain variable domain of TCR clone 71557 (TRAV13-1, TRAJ9)
CAASALTGGFKPIF

SEQ ID NO: 143114 - protein, 13 aa, Homo sapiens
  CDR3 for beta chain variable domain of TCR clone 71557 (TRBV20-1, TRBJ1-1)
CSAGTVGNTEAFF

SEQ ID NO: 143115 - protein, 14 aa, Homo sapiens
  CDR3 for alpha chain variable domain of TCR clone 71558 (TRAV9-2, TRAJ39)
CALYIYNAGNMLTF

SEQ ID NO: 143116 - protein, 14 aa, Homo sapiens
  CDR3 for beta chain variable domain of TCR clone 71558 (TRBV18, TRBJ2-5)
CASSPGVSQETQYF

SEQ ID NO: 143117 - protein, 13 aa, Homo sapiens
  CDR3 for alpha chain variable domain of TCR clone 71559 (TRAV22, TRAJ29)
CAVGGSGNTPLVC

SEQ ID NO: 143118 - protein, 13 aa, Homo sapiens
  CDR3 for beta chain variable domain of TCR clone 71559 (TRBV4-2, TRBJ1-1)
CASSQAGNTEAFF

SEQ ID NO: 143119 - protein, 13 aa, Homo sapiens
  CDR3 for alpha chain variable domain of TCR clone 71560 (TRAV1-2, TRAJ9)
CAVLITGGFKTIF

SEQ ID NO: 143120 - protein, 14 aa, Homo sapiens
  CDR3 for beta chain variable domain of TCR clone 71560 (TRBV20-1, TRBJ2-3)
CSARGGTSTDTQYF

SEQ ID NO: 143121 - protein, 16 aa, Homo sapiens
  CDR3 for alpha chain variable domain of TCR clone 71561 (TRAV26-1, TRAJ52)
CIVSNAGGTSYGKLTF

SEQ ID NO: 143122 - protein, 15 aa, Homo sapiens
  CDR3 for beta chain variable domain of TCR clone 71561 (TRBV7-3, TRBJ2-1)
CASSPTGGGEVEQSF

SEQ ID NO: 143123 - protein, 13 aa, Homo sapiens
  CDR3 for alpha chain variable domain of TCR clone 71562 (TRAV3, TRAJ21)
CAVREPDFNKFYF

SEQ ID NO: 143124 - protein, 18 aa, Homo sapiens
  CDR3 for beta chain variable domain of TCR clone 71562 (TRBV11-2, TRBJ2-3)
CARSLGGASRGAPNTQYF

SEQ ID NO: 143125 - protein, 18 aa, Homo sapiens
  CDR3 for alpha chain variable domain of TCR clone 71563 (TRAV13-1, TRAJ52)
CAAKNPNAGGTSYGKLTF

SEQ ID NO: 143126 - protein, 16 aa, Homo sapiens
  CDR3 for beta chain variable domain of TCR clone 71563 (TRBV11-2, TRBJ2-7)
CASSPTTGGVSYEQYF

SEQ ID NO: 143127 - protein, 14 aa, Homo sapiens
  CDR3 for alpha chain variable domain of TCR clone 71564 (TRAV8-4, TRAJ38)
CARLNADNNRKLIW

SEQ ID NO: 143128 - protein, 12 aa, Homo sapiens
  CDR3 for beta chain variable domain of TCR clone 71564 (TRBV6-1, TRBJ2-7)
CASSEPLYEQYF

SEQ ID NO: 143129 - protein, 13 aa, Homo sapiens
  CDR3 for alpha chain variable domain of TCR clone 71565 (TRAV23/DV6, TRAJ47)
CAASVRNGIWKQT

SEQ ID NO: 143130 - protein, 13 aa, Homo sapiens
  CDR3 for beta chain variable domain of TCR clone 71565 (TRBV19, TRBJ1-2)
CASSQGQVYGYTF

SEQ ID NO: 143131 - protein, 12 aa, Homo sapiens
  CDR3 for alpha chain variable domain of TCR clone 71566 (TRAV12-3, TRAJ17)
CAMTLTGNKLTF

SEQ ID NO: 143132 - protein, 15 aa, Homo sapiens
  CDR3 for beta chain variable domain of TCR clone 71566 (TRBV5-6, TRBJ2-7)
CASSPYFEGSYEQYF

SEQ ID NO: 143133 - protein, 17 aa, Homo sapiens
  CDR3 for alpha chain variable domain of TCR clone 71567 (TRAV38-1, TRAJ45)
CAFMRSYSGGGADGLTF

SEQ ID NO: 143134 - protein, 15 aa, Homo sapiens
  CDR3 for beta chain variable domain of TCR clone 71567 (TRBV7-2, TRBJ2-3)
CASSLVVRGPDTQYF

SEQ ID NO: 143135 - protein, 18 aa, Homo sapiens
  CDR3 for alpha chain variable domain of TCR clone 71568 (TRAV13-1, TRAJ52)
CAASKRSAGGTSYGKLTF

SEQ ID NO: 143136 - protein, 16 aa, Homo sapiens
  CDR3 for beta chain variable domain of TCR clone 71568 (TRBV7-3, TRBJ2-2)
CASSLKRGTLSGELFF

SEQ ID NO: 143137 - protein, 12 aa, Homo sapiens
  CDR3 for alpha chain variable domain of TCR clone 71569 (TRAV12-3, TRAJ17)
CAMTLTGNKLTF

SEQ ID NO: 143138 - protein, 14 aa, Homo sapiens
  CDR3 for beta chain variable domain of TCR clone 71569 (TRBV4-1, TRBJ2-5)
CASSQYRDQETQYF

SEQ ID NO: 143139 - protein, 14 aa, Homo sapiens
  CDR3 for alpha chain variable domain of TCR clone 71570 (TRAV12-1, TRAJ12)
CVVTMMDSSYKLIF

SEQ ID NO: 143140 - protein, 13 aa, Homo sapiens
  CDR3 for beta chain variable domain of TCR clone 71570 (TRBV20-1, TRBJ1-1)
CSARGGGNTEAFF

SEQ ID NO: 143141 - protein, 14 aa, Homo sapiens
  CDR3 for alpha chain variable domain of TCR clone 71571 (TRAV16, TRAJ33)
CALSAMDSNYQLIW

SEQ ID NO: 143142 - protein, 15 aa, Homo sapiens
  CDR3 for beta chain variable domain of TCR clone 71571 (TRBV20-1, TRBJ2-7)
CSARDRVSGMDEQYF

SEQ ID NO: 143143 - protein, 14 aa, Homo sapiens
  CDR3 for alpha chain variable domain of TCR clone 71572 (TRAV2, TRAJ33)
CAVEDQGSNYQLIW

SEQ ID NO: 143144 - protein, 14 aa, Homo sapiens
  CDR3 for beta chain variable domain of TCR clone 71572 (TRBV7-8, TRBJ2-3)
CASSSRDSTDTQYF

SEQ ID NO: 143145 - protein, 16 aa, Homo sapiens
  CDR3 for alpha chain variable domain of TCR clone 71573 (TRAV30, TRAJ24)
CGTEIVDADSWGKFQV

SEQ ID NO: 143146 - protein, 17 aa, Homo sapiens
  CDR3 for beta chain variable domain of TCR clone 71573 (TRBV20-1, TRBJ2-1)
CSAPPRLAGTRYNEQFF

SEQ ID NO: 143147 - protein, 13 aa, Homo sapiens
  CDR3 for alpha chain variable domain of TCR clone 71574 (TRAV27, TRAJ45)
CRSSGGGADGLTF

SEQ ID NO: 143148 - protein, 15 aa, Homo sapiens
  CDR3 for beta chain variable domain of TCR clone 71574 (TRBV9, TRBJ2-2)
CASSDLAGASGELFF

SEQ ID NO: 143149 - protein, 12 aa, Homo sapiens
  CDR3 for alpha chain variable domain of TCR clone 71575 (TRAV27, TRAJ41)
CAGRNSGYALSF

SEQ ID NO: 143150 - protein, 16 aa, Homo sapiens
  CDR3 for beta chain variable domain of TCR clone 71575 (TRBV25-1, TRBJ2-7)
CASSELTGGGIYEQYF

SEQ ID NO: 143151 - protein, 14 aa, Homo sapiens
  CDR3 for alpha chain variable domain of TCR clone 71576 (TRAV2, TRAJ9)
CAVEDRSGGFKTIF

SEQ ID NO: 143152 - protein, 12 aa, Homo sapiens
  CDR3 for beta chain variable domain of TCR clone 71576 (TRBV11-2, TRBJ2-1)
CASSPGNNERFF

SEQ ID NO: 143153 - protein, 14 aa, Homo sapiens
  CDR3 for alpha chain variable domain of TCR clone 71577 (TRAV8-3, TRAJ4)
CAVGASGGYNKLIF

SEQ ID NO: 143154 - protein, 13 aa, Homo sapiens
  CDR3 for beta chain variable domain of TCR clone 71577 (TRBV18, TRBJ2-5)
CASSPQGQETQYF

SEQ ID NO: 143155 - protein, 13 aa, Homo sapiens
  CDR3 for alpha chain variable domain of TCR clone 71578 (TRAV8-3, TRAJ36)
CAVGATGANNLFF

SEQ ID NO: 143156 - protein, 15 aa, Homo sapiens
  CDR3 for beta chain variable domain of TCR clone 71578 (TRBV28, TRBJ1-3)
CASSMGWASGNTIYF

SEQ ID NO: 143157 - protein, 12 aa, Homo sapiens
  CDR3 for alpha chain variable domain of TCR clone 71579 (TRAV40, TRAJ20)
CLRGLDDYKLSF

SEQ ID NO: 143158 - protein, 14 aa, Homo sapiens
  CDR3 for beta chain variable domain of TCR clone 71579 (TRBV19, TRBJ2-1)
CASSSGRDYNEQFF

SEQ ID NO: 143159 - protein, 15 aa, Homo sapiens
  CDR3 for alpha chain variable domain of TCR clone 71580 (TRAV25, TRAJ52)
CAGTSGDTSYGKLTF

SEQ ID NO: 143160 - protein, 16 aa, Homo sapiens
  CDR3 for beta chain variable domain of TCR clone 71580 (TRBV15, TRBJ1-2)
CATSRGPRTGGGGYTF

SEQ ID NO: 143161 - protein, 15 aa, Homo sapiens
  CDR3 for alpha chain variable domain of TCR clone 71581 (TRAV26-1, TRAJ40)
CIVRVTTSVTYKYIF

SEQ ID NO: 143162 - protein, 12 aa, Homo sapiens
  CDR3 for beta chain variable domain of TCR clone 71581 (TRBV7-9, TRBJ1-4)
CASSTDREKLFF

SEQ ID NO: 143163 - protein, 14 aa, Homo sapiens
  CDR3 for alpha chain variable domain of TCR clone 71582 (TRAV36/DV7, TRAJ40)
CAVEGASGTYKYIF

SEQ ID NO: 143164 - protein, 11 aa, Homo sapiens
  CDR3 for beta chain variable domain of TCR clone 71582 (TRBV18, TRBJ2-5)
CASSPRETQYF

SEQ ID NO: 143165 - protein, 12 aa, Homo sapiens
  CDR3 for alpha chain variable domain of TCR clone 71583 (TRAV13-1, TRAJ39)
CAASNAGNMLTF

SEQ ID NO: 143166 - protein, 15 aa, Homo sapiens
  CDR3 for beta chain variable domain of TCR clone 71583 (TRBV7-6, TRBJ2-1)
CASSPGQGPYNEQFF

SEQ ID NO: 143167 - protein, 13 aa, Homo sapiens
  CDR3 for alpha chain variable domain of TCR clone 71584 (TRAV27, TRAJ41)
CAGEGNSGSALNF

SEQ ID NO: 143168 - protein, 14 aa, Homo sapiens
  CDR3 for beta chain variable domain of TCR clone 71584 (TRBV7-2, TRBJ1-1)
CASSFLTGTTEAFF

SEQ ID NO: 143169 - protein, 13 aa, Homo sapiens
  CDR3 for alpha chain variable domain of TCR clone 71585 (TRAV12-3, TRAJ20)
CAMRRSNDYKLSF

SEQ ID NO: 143170 - protein, 15 aa, Homo sapiens
  CDR3 for beta chain variable domain of TCR clone 71585 (TRBV9, TRBJ2-3)
CASSVAGGHSDTQYF

SEQ ID NO: 143171 - protein, 15 aa, Homo sapiens
  CDR3 for alpha chain variable domain of TCR clone 71586 (TRAV2, TRAJ9)
RAVEDRGTGGFKTIF

SEQ ID NO: 143172 - protein, 17 aa, Homo sapiens
  CDR3 for beta chain variable domain of TCR clone 71586 (TRBV4-3, TRBJ2-1)
CASSQFSSGRASGEQFF

SEQ ID NO: 143173 - protein, 15 aa, Homo sapiens
  CDR3 for alpha chain variable domain of TCR clone 71587 (TRAV3, TRAJ4)
CAQNMFSGGYNKLIF

SEQ ID NO: 143174 - protein, 16 aa, Homo sapiens
  CDR3 for beta chain variable domain of TCR clone 71587 (TRBV7-7, TRBJ2-1)
CASSLASGTSYNEQFF

SEQ ID NO: 143175 - protein, 14 aa, Homo sapiens
  CDR3 for alpha chain variable domain of TCR clone 71588 (TRAV1-2, TRAJ16)
CPVNRFSDGQKLLF

SEQ ID NO: 143176 - protein, 14 aa, Homo sapiens
  CDR3 for beta chain variable domain of TCR clone 71588 (TRBV7-2, TRBJ2-7)
CASSPKTSFYEQYF

SEQ ID NO: 143177 - protein, 15 aa, Homo sapiens
  CDR3 for alpha chain variable domain of TCR clone 71589 (TRAV34, TRAJ38)
CGADLTPGNNRKLIW

SEQ ID NO: 143178 - protein, 16 aa, Homo sapiens
  CDR3 for beta chain variable domain of TCR clone 71589 (TRBV12-5, TRBJ2-5)
CASGPRTSGNQETQYF

SEQ ID NO: 143179 - protein, 13 aa, Homo sapiens
  CDR3 for alpha chain variable domain of TCR clone 71590 (TRAV3, TRAJ21)
CAVREPDFNKFYF

SEQ ID NO: 143180 - protein, 13 aa, Homo sapiens
  CDR3 for beta chain variable domain of TCR clone 71590 (TRBV20-1, TRBJ1-1)
CSARGGGNTEALF

SEQ ID NO: 143181 - protein, 16 aa, Homo sapiens
  CDR3 for alpha chain variable domain of TCR clone 71591 (TRAV20, TRAJ52)
CAVLPDGGTSYGKLTF

SEQ ID NO: 143182 - protein, 12 aa, Homo sapiens
  CDR3 for beta chain variable domain of TCR clone 71591 (TRBV19, TRBJ2-1)
CASPQISNEQFF

SEQ ID NO: 143183 - protein, 15 aa, Homo sapiens
  CDR3 for alpha chain variable domain of TCR clone 71592 (TRAV3, TRAJ4)
CDVRDGTGGYNKLIF

SEQ ID NO: 143184 - protein, 13 aa, Homo sapiens
  CDR3 for beta chain variable domain of TCR clone 71592 (TRBV10-3, TRBJ2-7)
CASKLAVNYEQYF

SEQ ID NO: 143185 - protein, 14 aa, Homo sapiens
  CDR3 for alpha chain variable domain of TCR clone 71593 (TRAV1-2, TRAJ6)
CSVSLSGGSYIPTF

SEQ ID NO: 143186 - protein, 11 aa, Homo sapiens
  CDR3 for beta chain variable domain of TCR clone 71593 (TRBV6-3, TRBJ2-3)
CATGQADTQYF

SEQ ID NO: 143187 - protein, 13 aa, Homo sapiens
  CDR3 for alpha chain variable domain of TCR clone 71594 (TRAV12-2, TRAJ43)
CAVSGDNNNDMRF

SEQ ID NO: 143188 - protein, 16 aa, Homo sapiens
  CDR3 for beta chain variable domain of TCR clone 71594 (TRBV28, TRBJ2-7)
CASSLFFETGGPEQYF

SEQ ID NO: 143189 - protein, 13 aa, Homo sapiens
  CDR3 for alpha chain variable domain of TCR clone 71595 (TRAV20, TRAJ37)
CAGCSSNIGKLIF

SEQ ID NO: 143190 - protein, 11 aa, Homo sapiens
  CDR3 for beta chain variable domain of TCR clone 71595 (TRBV12-4, TRBJ2-3)
CASTATDTQYF

SEQ ID NO: 143191 - protein, 14 aa, Homo sapiens
  CDR3 for alpha chain variable domain of TCR clone 71596 (TRAV9-2, TRAJ39)
CALYIYNAGNMLTF

SEQ ID NO: 143192 - protein, 19 aa, Homo sapiens
  CDR3 for beta chain variable domain of TCR clone 71596 (TRBV12-4, TRBJ2-1)
CASTLAFDPRDKEANEQFF

SEQ ID NO: 143193 - protein, 23 aa, Homo sapiens
  CDR3 for alpha chain variable domain of TCR clone 71597 (TRAV26-1, TRAJ38)
CIADNAGNNRIQNPDPAVYQLRD

SEQ ID NO: 143194 - protein, 12 aa, Homo sapiens
  CDR3 for beta chain variable domain of TCR clone 71597 (TRBV11-2, TRBJ2-2)
CASSLGGGELFF

SEQ ID NO: 143195 - protein, 14 aa, Homo sapiens
  CDR3 for alpha chain variable domain of TCR clone 71598 (TRAV26-1, TRAJ38)
CIADNAGNNRKLIW

SEQ ID NO: 143196 - protein, 13 aa, Homo sapiens
  CDR3 for beta chain variable domain of TCR clone 71598 (TRBV19, TRBJ1-2)
CAGSVPGQDGYTF

SEQ ID NO: 143197 - protein, 13 aa, Homo sapiens
  CDR3 for alpha chain variable domain of TCR clone 71599 (TRAV1-2, TRAJ11)
CDVRREGYSTLTF

SEQ ID NO: 143198 - protein, 14 aa, Homo sapiens
  CDR3 for beta chain variable domain of TCR clone 71599 (TRBV14, TRBJ2-7)
CASRHRDKPYEQYF

SEQ ID NO: 143199 - protein, 16 aa, Homo sapiens
  CDR3 for alpha chain variable domain of TCR clone 71600 (TRAV30, TRAJ24)
CGTEIVDAASWGTFQF

SEQ ID NO: 143200 - protein, 14 aa, Homo sapiens
  CDR3 for beta chain variable domain of TCR clone 71600 (TRBV12-5, TRBJ2-5)
CASGSRTHQETQYF

SEQ ID NO: 143201 - protein, 14 aa, Homo sapiens
  CDR3 for alpha chain variable domain of TCR clone 71601 (TRAV8-1, TRAJ13)
CAVTPSGGYQKVTF

SEQ ID NO: 143202 - protein, 15 aa, Homo sapiens
  CDR3 for beta chain variable domain of TCR clone 71601 (TRBV19, TRBJ1-2)
CASSVGQVLNYGYTF

SEQ ID NO: 143203 - protein, 12 aa, Homo sapiens
  CDR3 for alpha chain variable domain of TCR clone 71602 (TRAV13-1, TRAJ22)
CVPRGFCKATDL

SEQ ID NO: 143204 - protein, 13 aa, Homo sapiens
  CDR3 for beta chain variable domain of TCR clone 71602 (TRBV19, TRBJ2-2)
CASSIWSTGELFF

SEQ ID NO: 143205 - protein, 15 aa, Homo sapiens
  CDR3 for alpha chain variable domain of TCR clone 71603 (TRAV26-1, TRAJ42)
CIVRVKGGSQGNLIF

SEQ ID NO: 143206 - protein, 14 aa, Homo sapiens
  CDR3 for beta chain variable domain of TCR clone 71603 (TRBV19, TRBJ2-2)
CATTGHANTGELFS

SEQ ID NO: 143207 - protein, 15 aa, Homo sapiens
  CDR3 for alpha chain variable domain of TCR clone 71604 (TRAV26-1, TRAJ39)
CIVRDGSNEGNMLTF

SEQ ID NO: 143208 - protein, 14 aa, Homo sapiens
  CDR3 for beta chain variable domain of TCR clone 71604 (TRBV10-3, TRBJ1-2)
CAIRAGTGDYGYTF

SEQ ID NO: 143209 - protein, 15 aa, Homo sapiens
  CDR3 for alpha chain variable domain of TCR clone 71605 (TRAV26-1, TRAJ44)
CIVRANTGTASKLTF

SEQ ID NO: 143210 - protein, 14 aa, Homo sapiens
  CDR3 for beta chain variable domain of TCR clone 71605 (TRBV20-1, TRBJ2-5)
CSARDGRAGETQYF

SEQ ID NO: 143211 - protein, 14 aa, Homo sapiens
  CDR3 for alpha chain variable domain of TCR clone 71606 (TRAV35, TRAJ22)
CAGLRPGSARQLTF

SEQ ID NO: 143212 - protein, 15 aa, Homo sapiens
  CDR3 for beta chain variable domain of TCR clone 71606 (TRBV5-1, TRBJ2-2)
CASSSQGGNTGELFF

SEQ ID NO: 143213 - protein, 15 aa, Homo sapiens
  CDR3 for alpha chain variable domain of TCR clone 71607 (TRAV3, TRAJ17)
CAVSPKEAAGNKLTF

SEQ ID NO: 143214 - protein, 12 aa, Homo sapiens
  CDR3 for beta chain variable domain of TCR clone 71607 (TRBV7-9, TRBJ1-6)
CASSLMTSHLHF

SEQ ID NO: 143215 - protein, 16 aa, Homo sapiens
  CDR3 for alpha chain variable domain of TCR clone 71608 (TRAV27, TRAJ53)
CAAPEGSGGSNYKLTF

SEQ ID NO: 143216 - protein, 16 aa, Homo sapiens
  CDR3 for beta chain variable domain of TCR clone 71608 (TRBV7-7, TRBJ2-1)
CASSLASGTSYNEQFF

SEQ ID NO: 143217 - protein, 14 aa, Homo sapiens
  CDR3 for alpha chain variable domain of TCR clone 71609 (TRAV3, TRAJ22)
CAVRDYGSARQLTF

SEQ ID NO: 143218 - protein, 13 aa, Homo sapiens
  CDR3 for beta chain variable domain of TCR clone 71609 (TRBV11-2, TRBJ2-5)
FASGHGAKETQYF

SEQ ID NO: 143219 - protein, 14 aa, Homo sapiens
  CDR3 for alpha chain variable domain of TCR clone 71610 (TRAV12-2, TRAJ17)
CAVLFKAAGNKLTF

SEQ ID NO: 143220 - protein, 15 aa, Homo sapiens
  CDR3 for beta chain variable domain of TCR clone 71610 (TRBV20-1, TRBJ2-7)
CSAGDRVSGMDEQYF

SEQ ID NO: 143221 - protein, 15 aa, Homo sapiens
  CDR3 for alpha chain variable domain of TCR clone 71611 (TRAV38-1, TRAJ58)
CAFMKHGTSGSRLTF

SEQ ID NO: 143222 - protein, 15 aa, Homo sapiens
  CDR3 for beta chain variable domain of TCR clone 71611 (TRBV19, TRBJ1-2)
CASSVGQVLNYGYTF

SEQ ID NO: 143223 - protein, 13 aa, Homo sapiens
  CDR3 for alpha chain variable domain of TCR clone 71612 (TRAV2, TRAJ40)
CAVVTSGTYKYIF

SEQ ID NO: 143224 - protein, 14 aa, Homo sapiens
  CDR3 for beta chain variable domain of TCR clone 71612 (TRBV7-9, TRBJ2-1)
CASSPRDSLYEQFF

SEQ ID NO: 143225 - protein, 15 aa, Homo sapiens
  CDR3 for alpha chain variable domain of TCR clone 71613 (TRAV17, TRAJ22)
CAMVAPSGSARQLTF

SEQ ID NO: 143226 - protein, 16 aa, Homo sapiens
  CDR3 for beta chain variable domain of TCR clone 71613 (TRBV10-3, TRBJ2-7)
CAISADFADRPYEQYF

SEQ ID NO: 143227 - protein, 11 aa, Homo sapiens
  CDR3 for alpha chain variable domain of TCR clone 71614 (TRAV21, TRAJ23)
CAPQRRGKLIF

SEQ ID NO: 143228 - protein, 12 aa, Homo sapiens
  CDR3 for beta chain variable domain of TCR clone 71614 (TRBV7-9, TRBJ1-4)
CASSTDREKLFI

SEQ ID NO: 143229 - protein, 14 aa, Homo sapiens
  CDR3 for alpha chain variable domain of TCR clone 71615 (TRAV12-1, TRAJ26)
CVVKGSNYGQNFVF

SEQ ID NO: 143230 - protein, 15 aa, Homo sapiens
  CDR3 for beta chain variable domain of TCR clone 71615 (TRBV10-2, TRBJ2-6)
CASSGQGTGANVLTF

SEQ ID NO: 143231 - protein, 14 aa, Homo sapiens
  CDR3 for alpha chain variable domain of TCR clone 71616 (TRAV12-2, TRAJ6)
CVPLRPGGSYIPTF

SEQ ID NO: 143232 - protein, 13 aa, Homo sapiens
  CDR3 for beta chain variable domain of TCR clone 71616 (TRBV19, TRBJ2-2)
CASSIWSTGELFF

SEQ ID NO: 143233 - protein, 15 aa, Homo sapiens
  CDR3 for alpha chain variable domain of TCR clone 71617 (TRAV25, TRAJ53)
CPTSNSGGSNYKLTF

SEQ ID NO: 143234 - protein, 14 aa, Homo sapiens
  CDR3 for beta chain variable domain of TCR clone 71617 (TRBV11-2, TRBJ2-3)
CASSRRARTDTQYF

SEQ ID NO: 143235 - protein, 12 aa, Homo sapiens
  CDR3 for alpha chain variable domain of TCR clone 71618 (TRAV27, TRAJ9)
CAGESGGFKTIF

SEQ ID NO: 143236 - protein, 18 aa, Homo sapiens
  CDR3 for beta chain variable domain of TCR clone 71618 (TRBV10-2, TRBJ2-2)
CISALAVHRQADAGELFF

SEQ ID NO: 143237 - protein, 17 aa, Homo sapiens
  CDR3 for alpha chain variable domain of TCR clone 71619 (TRAV3, TRAJ6)
CAVRDGPRAGGSYIPTF

SEQ ID NO: 143238 - protein, 15 aa, Homo sapiens
  CDR3 for beta chain variable domain of TCR clone 71619 (TRBV7-3, TRBJ2-1)
CASSLGQGPFGEQFF

SEQ ID NO: 143239 - protein, 14 aa, Homo sapiens
  CDR3 for alpha chain variable domain of TCR clone 71620 (TRAV13-1, TRAJ44)
CAAKATGTASKLTF

SEQ ID NO: 143240 - protein, 18 aa, Homo sapiens
  CDR3 for beta chain variable domain of TCR clone 71620 (TRBV12-4, TRBJ2-4)
CASSRTGAVDVAKNIQYF

SEQ ID NO: 143241 - protein, 23 aa, Homo sapiens
  CDR3 for alpha chain variable domain of TCR clone 71621 (TRAV26-1, TRAJ38)
CIADNAGNNHIQNPDPAVYQLRD

SEQ ID NO: 143242 - protein, 12 aa, Homo sapiens
  CDR3 for beta chain variable domain of TCR clone 71621 (TRBV11-2, TRBJ2-2)
CASSLPTGELFF

SEQ ID NO: 143243 - protein, 15 aa, Homo sapiens
  CDR3 for alpha chain variable domain of TCR clone 71622 (TRAV12-3, TRAJ49)
CAMAVTPNTGNQFYF

SEQ ID NO: 143244 - protein, 18 aa, Homo sapiens
  CDR3 for beta chain variable domain of TCR clone 71622 (TRBV4-1, TRBJ1-5)
CASSQDPRRQGLNQPQHF

SEQ ID NO: 143245 - protein, 10 aa, Homo sapiens
  CDR3 for alpha chain variable domain of TCR clone 71623 (TRAV21, TRAJ49)
CAVNGNQFYF

SEQ ID NO: 143246 - protein, 12 aa, Homo sapiens
  CDR3 for beta chain variable domain of TCR clone 71623 (TRBV6-3, TRBJ2-7)
CASSLTPYEQYF

SEQ ID NO: 143247 - protein, 14 aa, Homo sapiens
  CDR3 for alpha chain variable domain of TCR clone 71624 (TRAV12-1, TRAJ26)
CVVKGSNYGQNFVF

SEQ ID NO: 143248 - protein, 13 aa, Homo sapiens
  CDR3 for beta chain variable domain of TCR clone 71624 (TRBV7-9, TRBJ1-2)
CASSLKQNYGYTF

SEQ ID NO: 143249 - protein, 14 aa, Homo sapiens
  CDR3 for alpha chain variable domain of TCR clone 71625 (TRAV3, TRAJ40)
CAVGDRRGTYKYIF

SEQ ID NO: 143250 - protein, 15 aa, Homo sapiens
  CDR3 for beta chain variable domain of TCR clone 71625 (TRBV11-1, TRBJ1-3)
CASTDPRAFGNTIYF

SEQ ID NO: 143251 - protein, 12 aa, Homo sapiens
  CDR3 for alpha chain variable domain of TCR clone 71626 (TRAV26-1, TRAJ17)
CIVRSAGNKLTF

SEQ ID NO: 143252 - protein, 15 aa, Homo sapiens
  CDR3 for beta chain variable domain of TCR clone 71626 (TRBV7-9, TRBJ2-2)
CASGPLDTFPGELFF

SEQ ID NO: 143253 - protein, 11 aa, Homo sapiens
  CDR3 for alpha chain variable domain of TCR clone 71627 (TRAV2, TRAJ13)
CASGGFQKVTF

SEQ ID NO: 143254 - protein, 16 aa, Homo sapiens
  CDR3 for beta chain variable domain of TCR clone 71627 (TRBV6-1, TRBJ2-5)
CASSETLDRGAETQYF

SEQ ID NO: 143255 - protein, 12 aa, Homo sapiens
  CDR3 for alpha chain variable domain of TCR clone 71628 (TRAV13-1, TRAJ26)
STSFSKGQNFVF

SEQ ID NO: 143256 - protein, 13 aa, Homo sapiens
  CDR3 for beta chain variable domain of TCR clone 71628 (TRBV7-3, TRBJ1-1)
CASSQDWGAEAFF

SEQ ID NO: 143257 - protein, 12 aa, Homo sapiens
  CDR3 for alpha chain variable domain of TCR clone 71629 (TRAV21, TRAJ33)
CAKMDSNYQLIW

SEQ ID NO: 143258 - protein, 16 aa, Homo sapiens
  CDR3 for beta chain variable domain of TCR clone 71629 (TRBV2, TRBJ1-4)
CASNLLQGATNEKLFF

SEQ ID NO: 143259 - protein, 11 aa, Homo sapiens
  CDR3 for alpha chain variable domain of TCR clone 71630 (TRAV3, TRAJ21)
CAVDNFNKFYF

SEQ ID NO: 143260 - protein, 15 aa, Homo sapiens
  CDR3 for beta chain variable domain of TCR clone 71630 (TRBV29-1, TRBJ2-1)
CSVEGGPASYNEQFF

SEQ ID NO: 143261 - protein, 13 aa, Homo sapiens
  CDR3 for alpha chain variable domain of TCR clone 71631 (TRAV38-1, TRAJ42)
CARWGGSQGNLIF

SEQ ID NO: 143262 - protein, 17 aa, Homo sapiens
  CDR3 for beta chain variable domain of TCR clone 71631 (TRBV20-1, TRBJ2-1)
CSARDPLAGVWDNEQFS

SEQ ID NO: 143263 - protein, 18 aa, Homo sapiens
  CDR3 for alpha chain variable domain of TCR clone 71632 (TRAV12-3, TRAJ52)
CAMSVGGAGGTSYGKLTF

SEQ ID NO: 143264 - protein, 15 aa, Homo sapiens
  CDR3 for beta chain variable domain of TCR clone 71632 (TRBV20-1, TRBJ2-7)
CSARDWVSGMDEQYF

SEQ ID NO: 143265 - protein, 11 aa, Homo sapiens
  CDR3 for alpha chain variable domain of TCR clone 71633 (TRAV2, TRAJ40)
CAVEDPGNLQI

SEQ ID NO: 143266 - protein, 14 aa, Homo sapiens
  CDR3 for beta chain variable domain of TCR clone 71633 (TRBV19, TRBJ2-2)
CASSTLHRSGELFL

SEQ ID NO: 143267 - protein, 15 aa, Homo sapiens
  CDR3 for alpha chain variable domain of TCR clone 71634 (TRAV8-3, TRAJ45)
CASSYSGGGADGLTF

SEQ ID NO: 143268 - protein, 15 aa, Homo sapiens
  CDR3 for beta chain variable domain of TCR clone 71634 (TRBV18, TRBJ1-1)
RASSPRQGENTEAFF

SEQ ID NO: 143269 - protein, 13 aa, Homo sapiens
  CDR3 for alpha chain variable domain of TCR clone 71635 (TRAV2, TRAJ40)
CAVVTSGTYKYIF

SEQ ID NO: 143270 - protein, 14 aa, Homo sapiens
  CDR3 for beta chain variable domain of TCR clone 71635 (TRBV19, TRBJ2-1)
RASPTFVLSGEQFS

SEQ ID NO: 143271 - protein, 16 aa, Homo sapiens
  CDR3 for alpha chain variable domain of TCR clone 71636 (TRAV3, TRAJ37)
CAVRGKGSGNTGQLIF

SEQ ID NO: 143272 - protein, 13 aa, Homo sapiens
  CDR3 for beta chain variable domain of TCR clone 71636 (TRBV7-2, TRBJ2-2)
CASSSVRAGELFF

SEQ ID NO: 143273 - protein, 17 aa, Homo sapiens
  CDR3 for alpha chain variable domain of TCR clone 71637 (TRAV38-2/DV8, TRAJ38)
CAYRSARGAGNNRKLIW

SEQ ID NO: 143274 - protein, 15 aa, Homo sapiens
  CDR3 for beta chain variable domain of TCR clone 71637 (TRBV5-1, TRBJ2-7)
CASSLGDFTTYEQYF

SEQ ID NO: 143275 - protein, 14 aa, Homo sapiens
  CDR3 for alpha chain variable domain of TCR clone 71638 (TRAV12-3, TRAJ9)
CAMSPNTRGFKTIF

SEQ ID NO: 143276 - protein, 12 aa, Homo sapiens
  CDR3 for beta chain variable domain of TCR clone 71638 (TRBV19, TRBJ1-5)
CASSIAQQPQHF

SEQ ID NO: 143277 - protein, 12 aa, Homo sapiens
  CDR3 for alpha chain variable domain of TCR clone 71639 (TRAV1-1, TRAJ8)
CAGGTGFQKLVF

SEQ ID NO: 143278 - protein, 15 aa, Homo sapiens
  CDR3 for beta chain variable domain of TCR clone 71639 (TRBV10-3, TRBJ2-1)
CAISDVQDRAYEQFF

SEQ ID NO: 143279 - protein, 13 aa, Homo sapiens
  CDR3 for alpha chain variable domain of TCR clone 71640 (TRAV13-1, TRAJ9)
CAASGTGGLKTIF

SEQ ID NO: 143280 - protein, 13 aa, Homo sapiens
  CDR3 for beta chain variable domain of TCR clone 71640 (TRBV12-4, TRBJ2-7)
CASSLERVREQYF

SEQ ID NO: 143281 - protein, 15 aa, Homo sapiens
  CDR3 for alpha chain variable domain of TCR clone 71641 (TRAV26-1, TRAJ22)
CNVRVSFWFCKATDL

SEQ ID NO: 143282 - protein, 13 aa, Homo sapiens
  CDR3 for beta chain variable domain of TCR clone 71641 (TRBV7-9, TRBJ1-2)
CASSLKQNYGYTF

SEQ ID NO: 143283 - protein, 15 aa, Homo sapiens
  CDR3 for alpha chain variable domain of TCR clone 71642 (TRAV3, TRAJ5)
CAVRDLDTGRRALTF

SEQ ID NO: 143284 - protein, 16 aa, Homo sapiens
  CDR3 for beta chain variable domain of TCR clone 71642 (TRBV6-1, TRBJ2-5)
CASSETLDRGAETQYF

SEQ ID NO: 143285 - protein, 10 aa, Homo sapiens
  CDR3 for alpha chain variable domain of TCR clone 71643 (TRAV13-1, TRAJ8)
CAAPFQKPVF

SEQ ID NO: 143286 - protein, 20 aa, Homo sapiens
  CDR3 for beta chain variable domain of TCR clone 71643 (TRBV3-1, TRBJ2-6)
CASSPRPGLEGGAGANVLTF

SEQ ID NO: 143287 - protein, 14 aa, Homo sapiens
  CDR3 for alpha chain variable domain of TCR clone 71644 (TRAV23/DV6, TRAJ27)
CAASRDTNAGKSTF

SEQ ID NO: 143288 - protein, 13 aa, Homo sapiens
  CDR3 for beta chain variable domain of TCR clone 71644 (TRBV20-1, TRBJ1-5)
CSASGGGNQPQHF

SEQ ID NO: 143289 - protein, 12 aa, Homo sapiens
  CDR3 for alpha chain variable domain of TCR clone 71645 (TRAV17, TRAJ57)
CATDGGSEKLVF

SEQ ID NO: 143290 - protein, 13 aa, Homo sapiens
  CDR3 for beta chain variable domain of TCR clone 71645 (TRBV10-3, TRBJ1-2)
CAISERDSYGYTF

SEQ ID NO: 143291 - protein, 17 aa, Homo sapiens
  CDR3 for alpha chain variable domain of TCR clone 71646 (TRAV3, TRAJ42)
CAVRDRDYGGSQGNLIF

SEQ ID NO: 143292 - protein, 15 aa, Homo sapiens
  CDR3 for beta chain variable domain of TCR clone 71646 (TRBV6-6, TRBJ2-7)
CVSSYSYGGSYEQYF

SEQ ID NO: 143293 - protein, 16 aa, Homo sapiens
  CDR3 for alpha chain variable domain of TCR clone 71647 (TRAV17, TRAJ17)
CATALQEEAAGNKLTF

SEQ ID NO: 143294 - protein, 12 aa, Homo sapiens
  CDR3 for beta chain variable domain of TCR clone 71647 (TRBV4-2, TRBJ2-5)
CASGGDQETQYF

SEQ ID NO: 143295 - protein, 12 aa, Homo sapiens
  CDR3 for alpha chain variable domain of TCR clone 71648 (TRAV3, TRAJ27)
CAVRDGAGKSTF

SEQ ID NO: 143296 - protein, 13 aa, Homo sapiens
  CDR3 for beta chain variable domain of TCR clone 71648 (TRBV10-3, TRBJ1-2)
CAINADLNYGYSF

SEQ ID NO: 143297 - protein, 16 aa, Homo sapiens
  CDR3 for alpha chain variable domain of TCR clone 71649 (TRAV12-3, TRAJ53)
CAMSPGSGGSNYKLTF

SEQ ID NO: 143298 - protein, 13 aa, Homo sapiens
  CDR3 for beta chain variable domain of TCR clone 71649 (TRBV7-7, TRBJ2-3)
CASSLSRADTQYF

SEQ ID NO: 143299 - protein, 14 aa, Homo sapiens
  CDR3 for alpha chain variable domain of TCR clone 71650 (TRAV9-2, TRAJ39)
CALYIYNAGNMLTF

SEQ ID NO: 143300 - protein, 17 aa, Homo sapiens
  CDR3 for beta chain variable domain of TCR clone 71650 (TRBV28, TRBJ2-5)
CASSRQGGLAGAETQYF

SEQ ID NO: 143301 - protein, 15 aa, Homo sapiens
  CDR3 for alpha chain variable domain of TCR clone 71651 (TRAV26-1, TRAJ39)
CIVRVARNAGNMLTF

SEQ ID NO: 143302 - protein, 16 aa, Homo sapiens
  CDR3 for beta chain variable domain of TCR clone 71651 (TRBV5-1, TRBJ2-1)
CASSRTLAGGRNEQFF

SEQ ID NO: 143303 - protein, 16 aa, Homo sapiens
  CDR3 for alpha chain variable domain of TCR clone 71652 (TRAV3, TRAJ10)
CAVRDMRAGGGNKLTL

SEQ ID NO: 143304 - protein, 13 aa, Homo sapiens
  CDR3 for beta chain variable domain of TCR clone 71652 (TRBV12-4, TRBJ2-7)
CASSPTETYEQYF

SEQ ID NO: 143305 - protein, 14 aa, Homo sapiens
  CDR3 for alpha chain variable domain of TCR clone 71653 (TRAV2, TRAJ29)
CAGPFQYGNTPLVF

SEQ ID NO: 143306 - protein, 11 aa, Homo sapiens
  CDR3 for beta chain variable domain of TCR clone 71653 (TRBV29-1, TRBJ2-5)
CSEDRTGTQYV

SEQ ID NO: 143307 - protein, 15 aa, Homo sapiens
  CDR3 for alpha chain variable domain of TCR clone 71654 (TRAV34, TRAJ38)
CGADFTPGNNRKLIW

SEQ ID NO: 143308 - protein, 15 aa, Homo sapiens
  CDR3 for beta chain variable domain of TCR clone 71654 (TRBV7-9, TRBJ1-4)
CASSARTGGNEKLFF

SEQ ID NO: 143309 - protein, 16 aa, Homo sapiens
  CDR3 for alpha chain variable domain of TCR clone 71655 (TRAV1-2, TRAJ10)
CAVRGVLTGGGNQLTF

SEQ ID NO: 143310 - protein, 12 aa, Homo sapiens
  CDR3 for beta chain variable domain of TCR clone 71655 (TRBV7-8, TRBJ2-7)
CASSLGDREQYF

SEQ ID NO: 143311 - protein, 14 aa, Homo sapiens
  CDR3 for alpha chain variable domain of TCR clone 71656 (TRAV35, TRAJ46)
CAGPQKSSGDKLTF

SEQ ID NO: 143312 - protein, 15 aa, Homo sapiens
  CDR3 for beta chain variable domain of TCR clone 71656 (TRBV7-9, TRBJ1-2)
CASSSFGDTNYGYTF

SEQ ID NO: 143313 - protein, 14 aa, Homo sapiens
  CDR3 for alpha chain variable domain of TCR clone 71657 (TRAV8-3, TRAJ4)
CAVGAAGGYNKLIF

SEQ ID NO: 143314 - protein, 15 aa, Homo sapiens
  CDR3 for beta chain variable domain of TCR clone 71657 (TRBV6-5, TRBJ2-1)
CASSYDAGAGNERFF

SEQ ID NO: 143315 - protein, 16 aa, Homo sapiens
  CDR3 for alpha chain variable domain of TCR clone 71658 (TRAV3, TRAJ10)
CAVRDMRAGGGNKLTF

SEQ ID NO: 143316 - protein, 15 aa, Homo sapiens
  CDR3 for beta chain variable domain of TCR clone 71658 (TRBV7-2, TRBJ2-2)
CASRRPGQNTGELFF

SEQ ID NO: 143317 - protein, 14 aa, Homo sapiens
  CDR3 for alpha chain variable domain of TCR clone 71659 (TRAV12-2, TRAJ13)
CAVKKTGGYQKVTF

SEQ ID NO: 143318 - protein, 11 aa, Homo sapiens
  CDR3 for beta chain variable domain of TCR clone 71659 (TRBV11-2, TRBJ2-2)
CAGSLPGELFF

SEQ ID NO: 143319 - protein, 14 aa, Homo sapiens
  CDR3 for alpha chain variable domain of TCR clone 71660 (TRAV26-1, TRAJ21)
CIVRPPYNFNKFYF

SEQ ID NO: 143320 - protein, 14 aa, Homo sapiens
  CDR3 for beta chain variable domain of TCR clone 71660 (TRBV11-3, TRBJ2-1)
CASSDTTSGSIQFF

SEQ ID NO: 143321 - protein, 12 aa, Homo sapiens
  CDR3 for alpha chain variable domain of TCR clone 71661 (TRAV35, TRAJ39)
LAPNNAANMLTF

SEQ ID NO: 143322 - protein, 16 aa, Homo sapiens
  CDR3 for beta chain variable domain of TCR clone 71661 (TRBV2, TRBJ2-3)
CASSTSVEGVTDTQYF

SEQ ID NO: 143323 - protein, 15 aa, Homo sapiens
  CDR3 for alpha chain variable domain of TCR clone 71662 (TRAV12-3, TRAJ6)
CAMSATTGGSYIPTF

SEQ ID NO: 143324 - protein, 16 aa, Homo sapiens
  CDR3 for beta chain variable domain of TCR clone 71662 (TRBV20-1, TRBJ1-2)
CSGSMGQGVANYGYTF

SEQ ID NO: 143325 - protein, 12 aa, Homo sapiens
  CDR3 for alpha chain variable domain of TCR clone 71663 (TRAV13-2, TRAJ23)
CAERHRGGKLIF

SEQ ID NO: 143326 - protein, 13 aa, Homo sapiens
  CDR3 for beta chain variable domain of TCR clone 71663 (TRBV7-9, TRBJ2-3)
CASSPGSTDTQYL

SEQ ID NO: 143327 - protein, 12 aa, Homo sapiens
  CDR3 for alpha chain variable domain of TCR clone 71664 (TRAV30, TRAJ15)
CGTNQAGTALIF

SEQ ID NO: 143328 - protein, 14 aa, Homo sapiens
  CDR3 for beta chain variable domain of TCR clone 71664 (TRBV12-4, TRBJ1-1)
CASSLGTGGTEAFF

SEQ ID NO: 143329 - protein, 18 aa, Homo sapiens
  CDR3 for alpha chain variable domain of TCR clone 71665 (TRAV12-3, TRAJ52)
CAMSVGGAGGTSFGKLTF

SEQ ID NO: 143330 - protein, 17 aa, Homo sapiens
  CDR3 for beta chain variable domain of TCR clone 71665 (TRBV13, TRBJ2-3)
CASSLSRVAGGRNTQYF

SEQ ID NO: 143331 - protein, 16 aa, Homo sapiens
  CDR3 for alpha chain variable domain of TCR clone 71666 (TRAV21, TRAJ17)
CAVRPGEEAAGSKLTF

SEQ ID NO: 143332 - protein, 16 aa, Homo sapiens
  CDR3 for beta chain variable domain of TCR clone 71666 (TRBV2, TRBJ2-7)
CASSEPWTGPSYEQYF

SEQ ID NO: 143333 - protein, 12 aa, Homo sapiens
  CDR3 for alpha chain variable domain of TCR clone 71667 (TRAV38-1, TRAJ36)
CAFETGANNLFF

SEQ ID NO: 143334 - protein, 16 aa, Homo sapiens
  CDR3 for beta chain variable domain of TCR clone 71667 (TRBV19, TRBJ2-2)
CASRSPGTGATGELFF

SEQ ID NO: 143335 - protein, 14 aa, Homo sapiens
  CDR3 for alpha chain variable domain of TCR clone 71668 (TRAV2, TRAJ3)
CAVRPYSSASKIIF

SEQ ID NO: 143336 - protein, 17 aa, Homo sapiens
  CDR3 for beta chain variable domain of TCR clone 71668 (TRBV7-6, TRBJ2-5)
CAGSSPQAGDPSETQYF

SEQ ID NO: 143337 - protein, 12 aa, Homo sapiens
  CDR3 for alpha chain variable domain of TCR clone 71669 (TRAV21, TRAJ33)
CAKMESNYQLIW

SEQ ID NO: 143338 - protein, 14 aa, Homo sapiens
  CDR3 for beta chain variable domain of TCR clone 71669 (TRBV2, TRBJ2-7)
CASSLTSGGYEQYF

SEQ ID NO: 143339 - protein, 15 aa, Homo sapiens
  CDR3 for alpha chain variable domain of TCR clone 71670 (TRAV13-1, TRAJ45)
CAASGSGGGADGLTF

SEQ ID NO: 143340 - protein, 14 aa, Homo sapiens
  CDR3 for beta chain variable domain of TCR clone 71670 (TRBV12-4, TRBJ1-2)
CASSFVGTAYGYSF

SEQ ID NO: 143341 - protein, 16 aa, Homo sapiens
  CDR3 for alpha chain variable domain of TCR clone 71671 (TRAV16, TRAJ52)
CALSAAGGTSYGKLTF

SEQ ID NO: 143342 - protein, 13 aa, Homo sapiens
  CDR3 for beta chain variable domain of TCR clone 71671 (TRBV28, TRBJ2-5)
CASSFAGGETQYF

SEQ ID NO: 143343 - protein, 14 aa, Homo sapiens
  CDR3 for alpha chain variable domain of TCR clone 71672 (TRAV26-2, TRAJ32)
CCVGYGGASNKLIF

SEQ ID NO: 143344 - protein, 14 aa, Homo sapiens
  CDR3 for beta chain variable domain of TCR clone 71672 (TRBV4-2, TRBJ2-1)
CASGLDRAYNEQFF

SEQ ID NO: 143345 - protein, 15 aa, Homo sapiens
  CDR3 for alpha chain variable domain of TCR clone 71673 (TRAV21, TRAJ53)
CATLNSGGSNYKLTF

SEQ ID NO: 143346 - protein, 14 aa, Homo sapiens
  CDR3 for beta chain variable domain of TCR clone 71673 (TRBV6-1, TRBJ2-1)
CASAKDGFYNEQFF

SEQ ID NO: 143347 - protein, 14 aa, Homo sapiens
  CDR3 for alpha chain variable domain of TCR clone 71674 (TRAV1-2, TRAJ16)
CAVIRFSDGQKLLF

SEQ ID NO: 143348 - protein, 15 aa, Homo sapiens
  CDR3 for beta chain variable domain of TCR clone 71674 (TRBV9, TRBJ1-6)
CASSVAGTGDSPLHF

SEQ ID NO: 143349 - protein, 13 aa, Homo sapiens
  CDR3 for alpha chain variable domain of TCR clone 71675 (TRAV2, TRAJ15)
CAVASQAGTALSF

SEQ ID NO: 143350 - protein, 16 aa, Homo sapiens
  CDR3 for beta chain variable domain of TCR clone 71675 (TRBV5-1, TRBJ1-1)
CASSSGGNSLNTEAFF

SEQ ID NO: 143351 - protein, 13 aa, Homo sapiens
  CDR3 for alpha chain variable domain of TCR clone 71676 (TRAV3, TRAJ29)
CAVRDIIDTPLVF

SEQ ID NO: 143352 - protein, 14 aa, Homo sapiens
  CDR3 for beta chain variable domain of TCR clone 71676 (TRBV27, TRBJ2-1)
CASSATGGYNEKFF

SEQ ID NO: 143353 - protein, 13 aa, Homo sapiens
  CDR3 for alpha chain variable domain of TCR clone 71677 (TRAV21, TRAJ29)
CAVRSSGNTPLVF

SEQ ID NO: 143354 - protein, 16 aa, Homo sapiens
  CDR3 for beta chain variable domain of TCR clone 71677 (TRBV19, TRBJ2-2)
CASRSPGTGATGELFF

SEQ ID NO: 143355 - protein, 16 aa, Homo sapiens
  CDR3 for alpha chain variable domain of TCR clone 71678 (TRAV3, TRAJ5)
CAVRNLMDMGRRALTF

SEQ ID NO: 143356 - protein, 16 aa, Homo sapiens
  CDR3 for beta chain variable domain of TCR clone 71678 (TRBV4-2, TRBJ2-7)
CASSQEGLANSYEQYF

SEQ ID NO: 143357 - protein, 14 aa, Homo sapiens
  CDR3 for alpha chain variable domain of TCR clone 71679 (TRAV26-1, TRAJ45)
CIEVTGGGADGLTF

SEQ ID NO: 143358 - protein, 19 aa, Homo sapiens
  CDR3 for beta chain variable domain of TCR clone 71679 (TRBV19, TRBJ2-2)
CASTRTGLAGGRVTGELFF

SEQ ID NO: 143359 - protein, 14 aa, Homo sapiens
  CDR3 for alpha chain variable domain of TCR clone 71680 (TRAV20, TRAJ56)
CAVQFGGANSKLTF

SEQ ID NO: 143360 - protein, 13 aa, Homo sapiens
  CDR3 for beta chain variable domain of TCR clone 71680 (TRBV7-6, TRBJ1-2)
CQQQVDRDYGYTF

SEQ ID NO: 143361 - protein, 18 aa, Homo sapiens
  CDR3 for alpha chain variable domain of TCR clone 71681 (TRAV21, TRAJ52)
CAVRPSPAGGTSYRKLTF

SEQ ID NO: 143362 - protein, 12 aa, Homo sapiens
  CDR3 for beta chain variable domain of TCR clone 71681 (TRBV11-2, TRBJ2-2)
CASSLGGGELFF

SEQ ID NO: 143363 - protein, 23 aa, Homo sapiens
  CDR3 for alpha chain variable domain of TCR clone 71682 (TRAV23/DV6, TRAJ15)
PSLETQPPTSLQPSQPAGTALIF

SEQ ID NO: 143364 - protein, 14 aa, Homo sapiens
  CDR3 for beta chain variable domain of TCR clone 71682 (TRBV7-9, TRBJ1-2)
CASSRQGANYGYTF

SEQ ID NO: 143365 - protein, 10 aa, Homo sapiens
  CDR3 for alpha chain variable domain of TCR clone 71683 (TRAV1-2, TRAJ23)
CAGQGGKLIF

SEQ ID NO: 143366 - protein, 16 aa, Homo sapiens
  CDR3 for beta chain variable domain of TCR clone 71683 (TRBV11-2, TRBJ1-1)
CASSLRQGGEHSKASF

SEQ ID NO: 143367 - protein, 12 aa, Homo sapiens
  CDR3 for alpha chain variable domain of TCR clone 71684 (TRAV21, TRAJ49)
CAVRNTGNQFYF

SEQ ID NO: 143368 - protein, 12 aa, Homo sapiens
  CDR3 for beta chain variable domain of TCR clone 71684 (TRBV7-9, TRBJ2-7)
CVTRTDAYEQYF

SEQ ID NO: 143369 - protein, 12 aa, Homo sapiens
  CDR3 for alpha chain variable domain of TCR clone 71685 (TRAV29/DV5, TRAJ49)
CAATDTGNQFYF

SEQ ID NO: 143370 - protein, 16 aa, Homo sapiens
  CDR3 for beta chain variable domain of TCR clone 71685 (TRBV18, TRBJ1-3)
CASSLGILNGENTIYF

SEQ ID NO: 143371 - protein, 11 aa, Homo sapiens
  CDR3 for alpha chain variable domain of TCR clone 71686 (TRAV17, TRAJ9)
CGFTGGFKTIF

SEQ ID NO: 143372 - protein, 15 aa, Homo sapiens
  CDR3 for beta chain variable domain of TCR clone 71686 (TRBV7-6, TRBJ1-5)
CASSQSSGINQPQHF

SEQ ID NO: 143373 - protein, 17 aa, Homo sapiens
  CDR3 for alpha chain variable domain of TCR clone 71687 (TRAV21, TRAJ10)
CAVRVYILTGGGNKLTF

SEQ ID NO: 143374 - protein, 16 aa, Homo sapiens
  CDR3 for beta chain variable domain of TCR clone 71687 (TRBV25-1, TRBJ1-1)
CASSGDRDRGRIEAFF

SEQ ID NO: 143375 - protein, 16 aa, Homo sapiens
  CDR3 for alpha chain variable domain of TCR clone 71688 (TRAV30, TRAJ24)
CGTEIVDADSWGTFQF

SEQ ID NO: 143376 - protein, 14 aa, Homo sapiens
  CDR3 for beta chain variable domain of TCR clone 71688 (TRBV12-5, TRBJ2-5)
CASGSRTQQETQYF

SEQ ID NO: 143377 - protein, 14 aa, Homo sapiens
  CDR3 for alpha chain variable domain of TCR clone 71689 (TRAV12-1, TRAJ9)
CVVNRRTGGFKTIF

SEQ ID NO: 143378 - protein, 20 aa, Homo sapiens
  CDR3 for beta chain variable domain of TCR clone 71689 (TRBV7-8, TRBJ2-2)
CASSHLFPGPTIHITGELFF

SEQ ID NO: 143379 - protein, 14 aa, Homo sapiens
  CDR3 for alpha chain variable domain of TCR clone 71690 (TRAV12-2, TRAJ24)
CAVTPADSWGKLQF

SEQ ID NO: 143380 - protein, 12 aa, Homo sapiens
  CDR3 for beta chain variable domain of TCR clone 71690 (TRBV3-1, TRBJ2-1)
CASSQGSGGQFF

SEQ ID NO: 143381 - protein, 15 aa, Homo sapiens
  CDR3 for alpha chain variable domain of TCR clone 71691 (TRAV29/DV5, TRAJ42)
CAAKTDEGSQGNLIF

SEQ ID NO: 143382 - protein, 15 aa, Homo sapiens
  CDR3 for beta chain variable domain of TCR clone 71691 (TRBV5-1, TRBJ2-2)
CASSSQGGNTGELFF

SEQ ID NO: 143383 - protein, 15 aa, Homo sapiens
  CDR3 for alpha chain variable domain of TCR clone 71692 (TRAV13-1, TRAJ38)
CAAGSLMLATTVSRF

SEQ ID NO: 143384 - protein, 14 aa, Homo sapiens
  CDR3 for beta chain variable domain of TCR clone 71692 (TRBV11-2, TRBJ2-1)
CASSLEVANNEQFF

SEQ ID NO: 143385 - protein, 13 aa, Homo sapiens
  CDR3 for alpha chain variable domain of TCR clone 71693 (TRAV30, TRAJ39)
CGTENNAGNMLTF

SEQ ID NO: 143386 - protein, 18 aa, Homo sapiens
  CDR3 for beta chain variable domain of TCR clone 71693 (TRBV7-9, TRBJ2-7)
CASSLTTSGSRTWYEQYF

SEQ ID NO: 143387 - protein, 16 aa, Homo sapiens
  CDR3 for alpha chain variable domain of TCR clone 71694 (TRAV12-3, TRAJ45)
CAMGWGSGGGADGLTF

SEQ ID NO: 143388 - protein, 18 aa, Homo sapiens
  CDR3 for beta chain variable domain of TCR clone 71694 (TRBV12-4, TRBJ2-2)
CDSSLVAGTRGRTGELFF

SEQ ID NO: 143389 - protein, 18 aa, Homo sapiens
  CDR3 for alpha chain variable domain of TCR clone 71695 (TRAV26-2, TRAJ54)
CILRDVEVGIQGAQKLVF

SEQ ID NO: 143390 - protein, 16 aa, Homo sapiens
  CDR3 for beta chain variable domain of TCR clone 71695 (TRBV6-1, TRBJ2-5)
CASSETLYRGAETQYF

SEQ ID NO: 143391 - protein, 12 aa, Homo sapiens
  CDR3 for alpha chain variable domain of TCR clone 71696 (TRAV13-2, TRAJ41)
CAKNIGRYAPNF

SEQ ID NO: 143392 - protein, 12 aa, Homo sapiens
  CDR3 for beta chain variable domain of TCR clone 71696 (TRBV7-9, TRBJ1-1)
CASSLSGGVAFF

SEQ ID NO: 143393 - protein, 14 aa, Homo sapiens
  CDR3 for alpha chain variable domain of TCR clone 71697 (TRAV1-2, TRAJ16)
CAINRFSDGQKLLF

SEQ ID NO: 143394 - protein, 14 aa, Homo sapiens
  CDR3 for beta chain variable domain of TCR clone 71697 (TRBV19, TRBJ2-1)
CASPTFVLSGEQFF

SEQ ID NO: 143395 - protein, 13 aa, Homo sapiens
  CDR3 for alpha chain variable domain of TCR clone 71698 (TRAV4, TRAJ42)
CLVGGGGQGNLIF

SEQ ID NO: 143396 - protein, 16 aa, Homo sapiens
  CDR3 for beta chain variable domain of TCR clone 71698 (TRBV5-1, TRBJ2-3)
CASSLQGRVGADTQYF

SEQ ID NO: 143397 - protein, 14 aa, Homo sapiens
  CDR3 for alpha chain variable domain of TCR clone 71699 (TRAV12-3, TRAJ10)
SHLPLTGGGNKLTF

SEQ ID NO: 143398 - protein, 14 aa, Homo sapiens
  CDR3 for beta chain variable domain of TCR clone 71699 (TRBV4-2, TRBJ2-3)
CASRETRAPGMQYF

SEQ ID NO: 143399 - protein, 14 aa, Homo sapiens
  CDR3 for alpha chain variable domain of TCR clone 71700 (TRAV17, TRAJ53)
CATDASGSNYKLTF

SEQ ID NO: 143400 - protein, 16 aa, Homo sapiens
  CDR3 for beta chain variable domain of TCR clone 71700 (TRBV4-1, TRBJ1-1)
CASSQDAGMGNTEAFF

SEQ ID NO: 143401 - protein, 14 aa, Homo sapiens
  CDR3 for alpha chain variable domain of TCR clone 71701 (TRAV12-3, TRAJ10)
SHLPLTGGGNKLTF

SEQ ID NO: 143402 - protein, 18 aa, Homo sapiens
  CDR3 for beta chain variable domain of TCR clone 71701 (TRBV12-4, TRBJ2-2)
CASSLVAGTRGRTGELFF

SEQ ID NO: 143403 - protein, 11 aa, Homo sapiens
  CDR3 for alpha chain variable domain of TCR clone 71702 (TRAV35, TRAJ12)
RRMDSSYKLIF

SEQ ID NO: 143404 - protein, 14 aa, Homo sapiens
  CDR3 for beta chain variable domain of TCR clone 71702 (TRBV19, TRBJ1-1)
CASSPNRGDTEALF

SEQ ID NO: 143405 - protein, 14 aa, Homo sapiens
  CDR3 for alpha chain variable domain of TCR clone 71703 (TRAV1-2, TRAJ16)
CAVNRFSDGQELLF

SEQ ID NO: 143406 - protein, 13 aa, Homo sapiens
  CDR3 for beta chain variable domain of TCR clone 71703 (TRBV4-2, TRBJ1-1)
CASSQAGNTEAFF

SEQ ID NO: 143407 - protein, 13 aa, Homo sapiens
  CDR3 for alpha chain variable domain of TCR clone 71704 (TRAV17, TRAJ36)
CATDQTGANNLFF

SEQ ID NO: 143408 - protein, 17 aa, Homo sapiens
  CDR3 for beta chain variable domain of TCR clone 71704 (TRBV28, TRBJ2-5)
CASSTPEGDALQETQYF

SEQ ID NO: 143409 - protein, 12 aa, Homo sapiens
  CDR3 for alpha chain variable domain of TCR clone 71705 (TRAV26-1, TRAJ36)
CIVRVRADNLFV

SEQ ID NO: 143410 - protein, 13 aa, Homo sapiens
  CDR3 for beta chain variable domain of TCR clone 71705 (TRBV11-2, TRBJ2-5)
CASSRGPSETQYF

SEQ ID NO: 143411 - protein, 13 aa, Homo sapiens
  CDR3 for alpha chain variable domain of TCR clone 71706 (TRAV21, TRAJ20)
CAVGLRVDYKLSF

SEQ ID NO: 143412 - protein, 13 aa, Homo sapiens
  CDR3 for beta chain variable domain of TCR clone 71706 (TRBV12-4, TRBJ1-2)
CASSLRQGKGYTF

SEQ ID NO: 143413 - protein, 13 aa, Homo sapiens
  CDR3 for alpha chain variable domain of TCR clone 71707 (TRAV21, TRAJ15)
CAVANQAGTALIF

SEQ ID NO: 143414 - protein, 14 aa, Homo sapiens
  CDR3 for beta chain variable domain of TCR clone 71707 (TRBV11-2, TRBJ1-2)
CASSLYRGNYGYTF

SEQ ID NO: 143415 - protein, 12 aa, Homo sapiens
  CDR3 for alpha chain variable domain of TCR clone 71708 (TRAV21, TRAJ11)
CAATSGYSTLTF

SEQ ID NO: 143416 - protein, 13 aa, Homo sapiens
  CDR3 for beta chain variable domain of TCR clone 71708 (TRBV10-3, TRBJ2-7)
CASKLAVNYEQYF

SEQ ID NO: 143417 - protein, 16 aa, Homo sapiens
  CDR3 for alpha chain variable domain of TCR clone 71709 (TRAV21, TRAJ37)
CAVRTAGSSNTGKLII

SEQ ID NO: 143418 - protein, 13 aa, Homo sapiens
  CDR3 for beta chain variable domain of TCR clone 71709 (TRBV7-9, TRBJ2-5)
CASLPSGRETQYF

SEQ ID NO: 143419 - protein, 13 aa, Homo sapiens
  CDR3 for alpha chain variable domain of TCR clone 71710 (TRAV3, TRAJ3)
CAVADSSASKLIF

SEQ ID NO: 143420 - protein, 12 aa, Homo sapiens
  CDR3 for beta chain variable domain of TCR clone 71710 (TRBV7-8, TRBJ2-7)
CASEGGPHGQYF

SEQ ID NO: 143421 - protein, 14 aa, Homo sapiens
  CDR3 for alpha chain variable domain of TCR clone 71711 (TRAV17, TRAJ39)
CATDPVRAGNMLTF

SEQ ID NO: 143422 - protein, 13 aa, Homo sapiens
  CDR3 for beta chain variable domain of TCR clone 71711 (TRBV19, TRBJ1-2)
CAGSVPGQDGYTF

SEQ ID NO: 143423 - protein, 15 aa, Homo sapiens
  CDR3 for alpha chain variable domain of TCR clone 71712 (TRAV13-2, TRAJ5)
CAENPHWTGRRALTF

SEQ ID NO: 143424 - protein, 14 aa, Homo sapiens
  CDR3 for beta chain variable domain of TCR clone 71712 (TRBV5-6, TRBJ2-7)
CASSFKGATGEQYF

SEQ ID NO: 143425 - protein, 14 aa, Homo sapiens
  CDR3 for alpha chain variable domain of TCR clone 71713 (TRAV27, TRAJ23)
CAGAFDNQGGKLIL

SEQ ID NO: 143426 - protein, 15 aa, Homo sapiens
  CDR3 for beta chain variable domain of TCR clone 71713 (TRBV7-3, TRBJ2-7)
CASSLTGQGKYEQYF

SEQ ID NO: 143427 - protein, 15 aa, Homo sapiens
  CDR3 for alpha chain variable domain of TCR clone 71714 (TRAV8-2, TRAJ23)
CVVSPLITREESLSS

SEQ ID NO: 143428 - protein, 18 aa, Homo sapiens
  CDR3 for beta chain variable domain of TCR clone 71714 (TRBV25-1, TRBJ1-2)
CASSGLQNGQGLIFGYTF

SEQ ID NO: 143429 - protein, 13 aa, Homo sapiens
  CDR3 for alpha chain variable domain of TCR clone 71715 (TRAV8-3, TRAJ28)
CAVGAVGSYQLTF

SEQ ID NO: 143430 - protein, 17 aa, Homo sapiens
  CDR3 for beta chain variable domain of TCR clone 71715 (TRBV20-1, TRBJ2-2)
CSASGSGQGGLTGELFF

SEQ ID NO: 143431 - protein, 18 aa, Homo sapiens
  CDR3 for alpha chain variable domain of TCR clone 71716 (TRAV26-2, TRAJ45)
RILRVDKYSGGGADGLTF

SEQ ID NO: 143432 - protein, 16 aa, Homo sapiens
  CDR3 for beta chain variable domain of TCR clone 71716 (TRBV2, TRBJ1-4)
CASNLLQGATNEKLFF

SEQ ID NO: 143433 - protein, 11 aa, Homo sapiens
  CDR3 for alpha chain variable domain of TCR clone 71717 (TRAV12-3, TRAJ27)
CAMANAGKSTF

SEQ ID NO: 143434 - protein, 15 aa, Homo sapiens
  CDR3 for beta chain variable domain of TCR clone 71717 (TRBV7-2, TRBJ2-1)
CASTHGTGIYNEQFF

SEQ ID NO: 143435 - protein, 15 aa, Homo sapiens
  CDR3 for alpha chain variable domain of TCR clone 71718 (TRAV12-3, TRAJ6)
CPMSATTGGSYIPTF

SEQ ID NO: 143436 - protein, 16 aa, Homo sapiens
  CDR3 for beta chain variable domain of TCR clone 71718 (TRBV20-1, TRBJ1-2)
CSASMGQGVANYGYTF

SEQ ID NO: 143437 - protein, 12 aa, Homo sapiens
  CDR3 for alpha chain variable domain of TCR clone 71719 (TRAV16, TRAJ10)
CSRTGGGNKLTF

SEQ ID NO: 143438 - protein, 17 aa, Homo sapiens
  CDR3 for beta chain variable domain of TCR clone 71719 (TRBV28, TRBJ2-5)
CASSTPEGDALQETQYF

SEQ ID NO: 143439 - protein, 16 aa, Homo sapiens
  CDR3 for alpha chain variable domain of TCR clone 71720 (TRAV12-3, TRAJ28)
CAMRANSGAGSYQLTF

SEQ ID NO: 143440 - protein, 14 aa, Homo sapiens
  CDR3 for beta chain variable domain of TCR clone 71720 (TRBV29-1, TRBJ2-3)
CSAGAGVGADTQYF

SEQ ID NO: 143441 - protein, 14 aa, Homo sapiens
  CDR3 for alpha chain variable domain of TCR clone 71721 (TRAV1-2, TRAJ8)
CAVREDTGFQKLAF

SEQ ID NO: 143442 - protein, 12 aa, Homo sapiens
  CDR3 for beta chain variable domain of TCR clone 71721 (TRBV7-9, TRBJ2-7)
CASSFGSYEQYF

SEQ ID NO: 143443 - protein, 14 aa, Homo sapiens
  CDR3 for alpha chain variable domain of TCR clone 71722 (TRAV12-1, TRAJ12)
CVVTRMDSSYKLIF

SEQ ID NO: 143444 - protein, 13 aa, Homo sapiens
  CDR3 for beta chain variable domain of TCR clone 71722 (TRBV20-1, TRBJ1-1)
CSARGGGNAEAFF

SEQ ID NO: 143445 - protein, 11 aa, Homo sapiens
  CDR3 for alpha chain variable domain of TCR clone 71723 (TRAV13-1, TRAJ43)
CAAHNNSDMRF

SEQ ID NO: 143446 - protein, 15 aa, Homo sapiens
  CDR3 for beta chain variable domain of TCR clone 71723 (TRBV6-1, TRBJ2-2)
CASSRLRGDTGELFF

SEQ ID NO: 143447 - protein, 11 aa, Homo sapiens
  CDR3 for alpha chain variable domain of TCR clone 71724 (TRAV12-2, TRAJ43)
CASPIGNDMRF

SEQ ID NO: 143448 - protein, 13 aa, Homo sapiens
  CDR3 for beta chain variable domain of TCR clone 71724 (TRBV7-3, TRBJ1-2)
CASSLKRGYGDTF

SEQ ID NO: 143449 - protein, 12 aa, Homo sapiens
  CDR3 for alpha chain variable domain of TCR clone 71725 (TRAV17, TRAJ58)
CGEETSGSRLTF

SEQ ID NO: 143450 - protein, 17 aa, Homo sapiens
  CDR3 for beta chain variable domain of TCR clone 71725 (TRBV28, TRBJ2-5)
CASSRQGGLAGAETQYF

SEQ ID NO: 143451 - protein, 14 aa, Homo sapiens
  CDR3 for alpha chain variable domain of TCR clone 71726 (TRAV8-2, TRAJ4)
CVVSPSGGYNKLIF

SEQ ID NO: 143452 - protein, 16 aa, Homo sapiens
  CDR3 for beta chain variable domain of TCR clone 71726 (TRBV7-3, TRBJ2-1)
RASSLLVGELVDEQFF

SEQ ID NO: 143453 - protein, 16 aa, Homo sapiens
  CDR3 for alpha chain variable domain of TCR clone 71727 (TRAV12-3, TRAJ53)
CAMSPGSGGSNYRLTF

SEQ ID NO: 143454 - protein, 12 aa, Homo sapiens
  CDR3 for beta chain variable domain of TCR clone 71727 (TRBV11-2, TRBJ2-2)
CASSLGGGELFF

SEQ ID NO: 143455 - protein, 12 aa, Homo sapiens
  CDR3 for alpha chain variable domain of TCR clone 71728 (TRAV8-3, TRAJ26)
CAGDNYGQNFVF

SEQ ID NO: 143456 - protein, 12 aa, Homo sapiens
  CDR3 for beta chain variable domain of TCR clone 71728 (TRBV5-1, TRBJ1-2)
CASSQDTYGYTF

SEQ ID NO: 143457 - protein, 15 aa, Homo sapiens
  CDR3 for alpha chain variable domain of TCR clone 71729 (TRAV6, TRAJ10)
CALDLLTGGGNKLTF

SEQ ID NO: 143458 - protein, 14 aa, Homo sapiens
  CDR3 for beta chain variable domain of TCR clone 71729 (TRBV20-1, TRBJ1-3)
CSASPTGAGNTIYF

SEQ ID NO: 143459 - protein, 12 aa, Homo sapiens
  CDR3 for alpha chain variable domain of TCR clone 71730 (TRAV17, TRAJ57)
CATDGGSEKLVF

SEQ ID NO: 143460 - protein, 13 aa, Homo sapiens
  CDR3 for beta chain variable domain of TCR clone 71730 (TRBV7-9, TRBJ2-7)
CASSFAWAYEQYF

SEQ ID NO: 143461 - protein, 15 aa, Homo sapiens
  CDR3 for alpha chain variable domain of TCR clone 71731 (TRAV3, TRAJ5)
CAVKDLDTGRRALTF

SEQ ID NO: 143462 - protein, 14 aa, Homo sapiens
  CDR3 for beta chain variable domain of TCR clone 71731 (TRBV25-1, TRBJ1-1)
CASTHLGGNTEAFF

SEQ ID NO: 143463 - protein, 14 aa, Homo sapiens
  CDR3 for alpha chain variable domain of TCR clone 71732 (TRAV1-2, TRAJ16)
CAVNRFSDGQKLLF

SEQ ID NO: 143464 - protein, 15 aa, Homo sapiens
  CDR3 for beta chain variable domain of TCR clone 71732 (TRBV5-7, TRBJ1-5)
CASSYGKLWDQPQHF

SEQ ID NO: 143465 - protein, 16 aa, Homo sapiens
  CDR3 for alpha chain variable domain of TCR clone 71733 (TRAV27, TRAJ13)
CAGAKSDSGGYQKVTF

SEQ ID NO: 143466 - protein, 15 aa, Homo sapiens
  CDR3 for beta chain variable domain of TCR clone 71733 (TRBV29-1, TRBJ2-1)
CSVGRHTLFYNEQFF

SEQ ID NO: 143467 - protein, 15 aa, Homo sapiens
  CDR3 for alpha chain variable domain of TCR clone 71734 (TRAV12-1, TRAJ9)
CVVSFGDTGGSKTIF

SEQ ID NO: 143468 - protein, 13 aa, Homo sapiens
  CDR3 for beta chain variable domain of TCR clone 71734 (TRBV2, TRBJ1-4)
CASSERAGEKLFF

SEQ ID NO: 143469 - protein, 18 aa, Homo sapiens
  CDR3 for alpha chain variable domain of TCR clone 71735 (TRAV26-1, TRAJ22)
CIVRAALISSGSARQLTF

SEQ ID NO: 143470 - protein, 13 aa, Homo sapiens
  CDR3 for beta chain variable domain of TCR clone 71735 (TRBV13, TRBJ2-5)
CASSPEVGETQYF

SEQ ID NO: 143471 - protein, 14 aa, Homo sapiens
  CDR3 for alpha chain variable domain of TCR clone 71736 (TRAV27, TRAJ23)
CAGLSYNQGGKLIF

SEQ ID NO: 143472 - protein, 15 aa, Homo sapiens
  CDR3 for beta chain variable domain of TCR clone 71736 (TRBV19, TRBJ2-2)
CASSLNREVTGELFF

SEQ ID NO: 143473 - protein, 10 aa, Homo sapiens
  CDR3 for alpha chain variable domain of TCR clone 71737 (TRAV17, TRAJ36)
CATVAGNLFF

SEQ ID NO: 143474 - protein, 12 aa, Homo sapiens
  CDR3 for beta chain variable domain of TCR clone 71737 (TRBV11-2, TRBJ2-4)
CASSSASGREYF

SEQ ID NO: 143475 - protein, 16 aa, Homo sapiens
  CDR3 for alpha chain variable domain of TCR clone 71738 (TRAV21, TRAJ37)
YAVRTAGSSNTGKLIF

SEQ ID NO: 143476 - protein, 13 aa, Homo sapiens
  CDR3 for beta chain variable domain of TCR clone 71738 (TRBV7-9, TRBJ2-5)
CASLPSGRETQYF

SEQ ID NO: 143477 - protein, 13 aa, Homo sapiens
  CDR3 for alpha chain variable domain of TCR clone 71739 (TRAV8-6, TRAJ49)
CAVITNTGNQFYF

SEQ ID NO: 143478 - protein, 14 aa, Homo sapiens
  CDR3 for beta chain variable domain of TCR clone 71739 (TRBV5-1, TRBJ2-7)
CASSRGESLYKQYF

SEQ ID NO: 143479 - protein, 11 aa, Homo sapiens
  CDR3 for alpha chain variable domain of TCR clone 71740 (TRAV26-1, TRAJ37)
CIVRVGRKLIF

SEQ ID NO: 143480 - protein, 20 aa, Homo sapiens
  CDR3 for beta chain variable domain of TCR clone 71740 (TRBV7-8, TRBJ2-2)
CASSHLFPGPTIHITGELFF

SEQ ID NO: 143481 - protein, 16 aa, Homo sapiens
  CDR3 for alpha chain variable domain of TCR clone 71741 (TRAV30, TRAJ24)
CGTEIVDADSWGKFRF

SEQ ID NO: 143482 - protein, 13 aa, Homo sapiens
  CDR3 for beta chain variable domain of TCR clone 71741 (TRBV11-2, TRBJ2-5)
CASSSTGEETQYF

SEQ ID NO: 143483 - protein, 14 aa, Homo sapiens
  CDR3 for alpha chain variable domain of TCR clone 71742 (TRAV1-2, TRAJ16)
CAVNRFSDGQKLLF

SEQ ID NO: 143484 - protein, 16 aa, Homo sapiens
  CDR3 for beta chain variable domain of TCR clone 71742 (TRBV11-2, TRBJ2-2)
CASSLRTGNLIGELFF

SEQ ID NO: 143485 - protein, 16 aa, Homo sapiens
  CDR3 for alpha chain variable domain of TCR clone 71743 (TRAV1-1, TRAJ45)
CAVGAYSGGGADGLTF

SEQ ID NO: 143486 - protein, 13 aa, Homo sapiens
  CDR3 for beta chain variable domain of TCR clone 71743 (TRBV20-1, TRBJ1-2)
CSARGTADYGYTF

SEQ ID NO: 143487 - protein, 10 aa, Homo sapiens
  CDR3 for alpha chain variable domain of TCR clone 71744 (TRAV1-2, TRAJ20)
CALNDYKLSF

SEQ ID NO: 143488 - protein, 16 aa, Homo sapiens
  CDR3 for beta chain variable domain of TCR clone 71744 (TRBV20-1, TRBJ1-1)
CSARALTQGMNTEAFC

SEQ ID NO: 143489 - protein, 14 aa, Homo sapiens
  CDR3 for alpha chain variable domain of TCR clone 71745 (TRAV12-3, TRAJ10)
SHLPLTGGGNKLTF

SEQ ID NO: 143490 - protein, 14 aa, Homo sapiens
  CDR3 for beta chain variable domain of TCR clone 71745 (TRBV11-1, TRBJ2-7)
CASTFAVPSYEQYF

SEQ ID NO: 143491 - protein, 14 aa, Homo sapiens
  CDR3 for alpha chain variable domain of TCR clone 71746 (TRAV12-2, TRAJ40)
CAVKIPSGTYKYIF

SEQ ID NO: 143492 - protein, 17 aa, Homo sapiens
  CDR3 for beta chain variable domain of TCR clone 71746 (TRBV4-1, TRBJ2-5)
CASSQDLTGGPIETQYF

SEQ ID NO: 143493 - protein, 15 aa, Homo sapiens
  CDR3 for alpha chain variable domain of TCR clone 71747 (TRAV12-3, TRAJ9)
CVVSFGDTGGFKTIF

SEQ ID NO: 143494 - protein, 15 aa, Homo sapiens
  CDR3 for beta chain variable domain of TCR clone 71747 (TRBV20-1, TRBJ2-7)
CSARDRVSGMDEQYF

SEQ ID NO: 143495 - protein, 14 aa, Homo sapiens
  CDR3 for alpha chain variable domain of TCR clone 71748 (TRAV17, TRAJ39)
CATDPVRAGNMLTF

SEQ ID NO: 143496 - protein, 15 aa, Homo sapiens
  CDR3 for beta chain variable domain of TCR clone 71748 (TRBV13, TRBJ1-5)
CASSVGQGGVQPQHF

SEQ ID NO: 143497 - protein, 14 aa, Homo sapiens
  CDR3 for alpha chain variable domain of TCR clone 71749 (TRAV12-3, TRAJ58)
CAMSTETSGSRLTF

SEQ ID NO: 143498 - protein, 14 aa, Homo sapiens
  CDR3 for beta chain variable domain of TCR clone 71749 (TRBV19, TRBJ2-1)
CASPTFVLSGEQFF

SEQ ID NO: 143499 - protein, 14 aa, Homo sapiens
  CDR3 for alpha chain variable domain of TCR clone 71750 (TRAV13-1, TRAJ45)
CAAIGGGGANGLTF

SEQ ID NO: 143500 - protein, 16 aa, Homo sapiens
  CDR3 for beta chain variable domain of TCR clone 71750 (TRBV7-2, TRBJ1-1)
CASSLGAGWTNTEAFF

SEQ ID NO: 143501 - protein, 12 aa, Homo sapiens
  CDR3 for alpha chain variable domain of TCR clone 71751 (TRAV2, TRAJ31)
CAVEDNNARLMS

SEQ ID NO: 143502 - protein, 16 aa, Homo sapiens
  CDR3 for beta chain variable domain of TCR clone 71751 (TRBV10-3, TRBJ2-1)
CAISGVGDGGGGEQFF

SEQ ID NO: 143503 - protein, 15 aa, Homo sapiens
  CDR3 for alpha chain variable domain of TCR clone 71752 (TRAV26-1, TRAJ29)
CIVGVEGSGNTPLVF

SEQ ID NO: 143504 - protein, 15 aa, Homo sapiens
  CDR3 for beta chain variable domain of TCR clone 71752 (TRBV12-4, TRBJ1-1)
CQQQDRVVANTEAFF

SEQ ID NO: 143505 - protein, 13 aa, Homo sapiens
  CDR3 for alpha chain variable domain of TCR clone 71753 (TRAV2, TRAJ40)
CAVVTSGTYKYIF

SEQ ID NO: 143506 - protein, 15 aa, Homo sapiens
  CDR3 for beta chain variable domain of TCR clone 71753 (TRBV11-3, TRBJ2-3)
CASLKDGREEDTQYF

SEQ ID NO: 143507 - protein, 13 aa, Homo sapiens
  CDR3 for alpha chain variable domain of TCR clone 71754 (TRAV17, TRAJ5)
CAPMDTGRRVLTF

SEQ ID NO: 143508 - protein, 14 aa, Homo sapiens
  CDR3 for beta chain variable domain of TCR clone 71754 (TRBV12-5, TRBJ2-5)
CASGSRTHQETQYF

SEQ ID NO: 143509 - protein, 12 aa, Homo sapiens
  CDR3 for alpha chain variable domain of TCR clone 71755 (TRAV3, TRAJ31)
CAVRDGNARLMF

SEQ ID NO: 143510 - protein, 15 aa, Homo sapiens
  CDR3 for beta chain variable domain of TCR clone 71755 (TRBV9, TRBJ1-6)
CASSVAGTGDSPLHF

SEQ ID NO: 143511 - protein, 13 aa, Homo sapiens
  CDR3 for alpha chain variable domain of TCR clone 71756 (TRAV12-3, TRAJ33)
CAMSVNSNYQLIW

SEQ ID NO: 143512 - protein, 15 aa, Homo sapiens
  CDR3 for beta chain variable domain of TCR clone 71756 (TRBV3-1, TRBJ2-2)
CASSQDWTRAGELFF

SEQ ID NO: 143513 - protein, 12 aa, Homo sapiens
  CDR3 for alpha chain variable domain of TCR clone 71757 (TRAV3, TRAJ26)
CAVRDYGQNFVF

SEQ ID NO: 143514 - protein, 15 aa, Homo sapiens
  CDR3 for beta chain variable domain of TCR clone 71757 (TRBV6-1, TRBJ2-3)
CASSERGGITDTQYF

SEQ ID NO: 143515 - protein, 14 aa, Homo sapiens
  CDR3 for alpha chain variable domain of TCR clone 71758 (TRAV21, TRAJ9)
CCGGGGTGGFRTIF

SEQ ID NO: 143516 - protein, 13 aa, Homo sapiens
  CDR3 for beta chain variable domain of TCR clone 71758 (TRBV12-4, TRBJ1-2)
CASSSGLTVISTF

SEQ ID NO: 143517 - protein, 13 aa, Homo sapiens
  CDR3 for alpha chain variable domain of TCR clone 71759 (TRAV8-3, TRAJ44)
CAVVPGTAGKLTF

SEQ ID NO: 143518 - protein, 14 aa, Homo sapiens
  CDR3 for beta chain variable domain of TCR clone 71759 (TRBV11-2, TRBJ2-3)
CASRRLARTDTQYF

SEQ ID NO: 143519 - protein, 14 aa, Homo sapiens
  CDR3 for alpha chain variable domain of TCR clone 71760 (TRAV17, TRAJ9)
CATVTLGGGFKTIF

SEQ ID NO: 143520 - protein, 16 aa, Homo sapiens
  CDR3 for beta chain variable domain of TCR clone 71760 (TRBV18, TRBJ1-5)
CASSPYRVEGNQPQHF

SEQ ID NO: 143521 - protein, 12 aa, Homo sapiens
  CDR3 for alpha chain variable domain of TCR clone 71761 (TRAV27, TRAJ21)
CAGVRQLQQILL

SEQ ID NO: 143522 - protein, 14 aa, Homo sapiens
  CDR3 for beta chain variable domain of TCR clone 71761 (TRBV7-9, TRBJ1-4)
CASSLEGQSERLFF

SEQ ID NO: 143523 - protein, 14 aa, Homo sapiens
  CDR3 for alpha chain variable domain of TCR clone 71762 (TRAV16, TRAJ37)
CALDISGNTGKLIF

SEQ ID NO: 143524 - protein, 14 aa, Homo sapiens
  CDR3 for beta chain variable domain of TCR clone 71762 (TRBV7-8, TRBJ1-2)
CASSPDSLSYGYTF

SEQ ID NO: 143525 - protein, 16 aa, Homo sapiens
  CDR3 for alpha chain variable domain of TCR clone 71763 (TRAV12-3, TRAJ53)
CAMSPGSRGSNYKLTF

SEQ ID NO: 143526 - protein, 12 aa, Homo sapiens
  CDR3 for beta chain variable domain of TCR clone 71763 (TRBV11-2, TRBJ2-2)
CASSLGGGELFF

SEQ ID NO: 143527 - protein, 12 aa, Homo sapiens
  CDR3 for alpha chain variable domain of TCR clone 71764 (TRAV8-3, TRAJ26)
CAGDNYGQNFVF

SEQ ID NO: 143528 - protein, 13 aa, Homo sapiens
  CDR3 for beta chain variable domain of TCR clone 71764 (TRBV7-2, TRBJ2-4)
CASSREHANIQYF

SEQ ID NO: 143529 - protein, 14 aa, Homo sapiens
  CDR3 for alpha chain variable domain of TCR clone 71765 (TRAV8-3, TRAJ39)
CAVGANNAGNMLTF

SEQ ID NO: 143530 - protein, 13 aa, Homo sapiens
  CDR3 for beta chain variable domain of TCR clone 71765 (TRBV7-2, TRBJ2-7)
CASSSPSGSEQYF

SEQ ID NO: 143531 - protein, 14 aa, Homo sapiens
  CDR3 for alpha chain variable domain of TCR clone 71766 (TRAV12-3, TRAJ57)
CARALEGGSEKLVF

SEQ ID NO: 143532 - protein, 13 aa, Homo sapiens
  CDR3 for beta chain variable domain of TCR clone 71766 (TRBV7-9, TRBJ1-2)
CASSLKQNYGYTF

SEQ ID NO: 143533 - protein, 15 aa, Homo sapiens
  CDR3 for alpha chain variable domain of TCR clone 71767 (TRAV2, TRAJ11)
CAVGGRNSGYSTLTF

SEQ ID NO: 143534 - protein, 14 aa, Homo sapiens
  CDR3 for beta chain variable domain of TCR clone 71767 (TRBV6-1, TRBJ1-3)
CASVQGGGGNTMYF

SEQ ID NO: 143535 - protein, 13 aa, Homo sapiens
  CDR3 for alpha chain variable domain of TCR clone 71768 (TRAV8-3, TRAJ44)
CAVVPGTASKLTF

SEQ ID NO: 143536 - protein, 15 aa, Homo sapiens
  CDR3 for beta chain variable domain of TCR clone 71768 (TRBV19, TRBJ1-1)
CASTSGQIQNTEAFF

SEQ ID NO: 143537 - protein, 15 aa, Homo sapiens
  CDR3 for alpha chain variable domain of TCR clone 71769 (TRAV20, TRAJ53)
CAVQARGGSNYKLTF

SEQ ID NO: 143538 - protein, 14 aa, Homo sapiens
  CDR3 for beta chain variable domain of TCR clone 71769 (TRBV7-2, TRBJ1-2)
CASSQTGSTYGYTF

SEQ ID NO: 143539 - protein, 13 aa, Homo sapiens
  CDR3 for alpha chain variable domain of TCR clone 71770 (TRAV13-1, TRAJ12)
CAASPDSRYKLIF

SEQ ID NO: 143540 - protein, 16 aa, Homo sapiens
  CDR3 for beta chain variable domain of TCR clone 71770 (TRBV15, TRBJ2-1)
CATSRERLAGAYEQFF

SEQ ID NO: 143541 - protein, 16 aa, Homo sapiens
  CDR3 for alpha chain variable domain of TCR clone 71771 (TRAV1-2, TRAJ10)
CAVRGVLTGGGDKLTF

SEQ ID NO: 143542 - protein, 15 aa, Homo sapiens
  CDR3 for beta chain variable domain of TCR clone 71771 (TRBV7-2, TRBJ2-1)
CASTHGTGIYNEQFF

SEQ ID NO: 143543 - protein, 14 aa, Homo sapiens
  CDR3 for alpha chain variable domain of TCR clone 71772 (TRAV2, TRAJ9)
CAVEDRCGGFKTIF

SEQ ID NO: 143544 - protein, 16 aa, Homo sapiens
  CDR3 for beta chain variable domain of TCR clone 71772 (TRBV20-1, TRBJ2-3)
CSAVRDRGPIADTQYF

SEQ ID NO: 143545 - protein, 14 aa, Homo sapiens
  CDR3 for alpha chain variable domain of TCR clone 71773 (TRAV16, TRAJ15)
YALSGPQAGTALIF

SEQ ID NO: 143546 - protein, 12 aa, Homo sapiens
  CDR3 for beta chain variable domain of TCR clone 71773 (TRBV18, TRBJ2-5)
CASSPSKETQYF

SEQ ID NO: 143547 - protein, 17 aa, Homo sapiens
  CDR3 for alpha chain variable domain of TCR clone 71774 (TRAV3, TRAJ38)
CAVRDCLNAGNNSKLIW

SEQ ID NO: 143548 - protein, 13 aa, Homo sapiens
  CDR3 for beta chain variable domain of TCR clone 71774 (TRBV23-1, TRBJ1-4)
CASRGKFNEKLFF

SEQ ID NO: 143549 - protein, 12 aa, Homo sapiens
  CDR3 for alpha chain variable domain of TCR clone 71775 (TRAV8-3, TRAJ26)
CAGGNYGQNFVF

SEQ ID NO: 143550 - protein, 17 aa, Homo sapiens
  CDR3 for beta chain variable domain of TCR clone 71775 (TRBV11-2, TRBJ2-1)
CASSLYPPGVEYNEQFF

SEQ ID NO: 143551 - protein, 11 aa, Homo sapiens
  CDR3 for alpha chain variable domain of TCR clone 71776 (TRAV13-1, TRAJ30)
CAASRDDKIIF

SEQ ID NO: 143552 - protein, 15 aa, Homo sapiens
  CDR3 for beta chain variable domain of TCR clone 71776 (TRBV19, TRBJ1-2)
CASSPGQVANYGYTF

SEQ ID NO: 143553 - protein, 17 aa, Homo sapiens
  CDR3 for alpha chain variable domain of TCR clone 71777 (TRAV10, TRAJ48)
PTSVWGVFHFGNEKLTF

SEQ ID NO: 143554 - protein, 13 aa, Homo sapiens
  CDR3 for beta chain variable domain of TCR clone 71777 (TRBV4-1, TRBJ2-7)
CASSQGQAYEQYF

SEQ ID NO: 143555 - protein, 18 aa, Homo sapiens
  CDR3 for alpha chain variable domain of TCR clone 71778 (TRAV29/DV5, TRAJ52)
CAAGFRGAGGTSYGKLTF

SEQ ID NO: 143556 - protein, 13 aa, Homo sapiens
  CDR3 for beta chain variable domain of TCR clone 71778 (TRBV7-9, TRBJ1-2)
CASSLKQNYGYTF

SEQ ID NO: 143557 - protein, 13 aa, Homo sapiens
  CDR3 for alpha chain variable domain of TCR clone 71779 (TRAV12-2, TRAJ20)
CAVYPSNDYKLSF

SEQ ID NO: 143558 - protein, 13 aa, Homo sapiens
  CDR3 for beta chain variable domain of TCR clone 71779 (TRBV7-3, TRBJ1-1)
CASSQDWGAEAFF

SEQ ID NO: 143559 - protein, 14 aa, Homo sapiens
  CDR3 for alpha chain variable domain of TCR clone 71780 (TRAV12-1, TRAJ12)
CVVTRMDSSYKLIF

SEQ ID NO: 143560 - protein, 15 aa, Homo sapiens
  CDR3 for beta chain variable domain of TCR clone 71780 (TRBV28, TRBJ2-1)
CASSIIAGGRSEQFF

SEQ ID NO: 143561 - protein, 16 aa, Homo sapiens
  CDR3 for alpha chain variable domain of TCR clone 71781 (TRAV3, TRAJ42)
CAVRGIEGGSQGNLIF

SEQ ID NO: 143562 - protein, 15 aa, Homo sapiens
  CDR3 for beta chain variable domain of TCR clone 71781 (TRBV9, TRBJ2-2)
CASSDFAGASGELFF

SEQ ID NO: 143563 - protein, 15 aa, Homo sapiens
  CDR3 for alpha chain variable domain of TCR clone 71782 (TRAV12-2, TRAJ26)
CAVNSHSNYGQNFVF

SEQ ID NO: 143564 - protein, 14 aa, Homo sapiens
  CDR3 for beta chain variable domain of TCR clone 71782 (TRBV5-1, TRBJ2-7)
CARSLEGRTYEQYF

SEQ ID NO: 143565 - protein, 13 aa, Homo sapiens
  CDR3 for alpha chain variable domain of TCR clone 71783 (TRAV12-2, TRAJ4)
CAVRSGGYNKLLF

SEQ ID NO: 143566 - protein, 15 aa, Homo sapiens
  CDR3 for beta chain variable domain of TCR clone 71783 (TRBV10-3, TRBJ2-1)
CAISDVQDRAYEQFF

SEQ ID NO: 143567 - protein, 15 aa, Homo sapiens
  CDR3 for alpha chain variable domain of TCR clone 71784 (TRAV8-3, TRAJ45)
CASSYSGGGADGLTF

SEQ ID NO: 143568 - protein, 15 aa, Homo sapiens
  CDR3 for beta chain variable domain of TCR clone 71784 (TRBV2, TRBJ2-3)
CASSDFEKATDTQYF

SEQ ID NO: 143569 - protein, 15 aa, Homo sapiens
  CDR3 for alpha chain variable domain of TCR clone 71785 (TRAV8-2, TRAJ16)
CVVSDGFSDGQKLRF

SEQ ID NO: 143570 - protein, 14 aa, Homo sapiens
  CDR3 for beta chain variable domain of TCR clone 71785 (TRBV7-3, TRBJ1-1)
CASSLGTGYTEAFF

SEQ ID NO: 143571 - protein, 15 aa, Homo sapiens
  CDR3 for alpha chain variable domain of TCR clone 71786 (TRAV12-3, TRAJ49)
CAMAVTPNTGNQFYF

SEQ ID NO: 143572 - protein, 18 aa, Homo sapiens
  CDR3 for beta chain variable domain of TCR clone 71786 (TRBV4-1, TRBJ1-5)
RASSQDPRGQGLNQPQHF

SEQ ID NO: 143573 - protein, 16 aa, Homo sapiens
  CDR3 for alpha chain variable domain of TCR clone 71787 (TRAV12-2, TRAJ32)
CAVNLGRGGATNKLIF

SEQ ID NO: 143574 - protein, 15 aa, Homo sapiens
  CDR3 for beta chain variable domain of TCR clone 71787 (TRBV20-1, TRBJ2-7)
CSARGPLAGGREQYF

SEQ ID NO: 143575 - protein, 12 aa, Homo sapiens
  CDR3 for alpha chain variable domain of TCR clone 71788 (TRAV1-1, TRAJ8)
CAGDTGFQKLVF

SEQ ID NO: 143576 - protein, 15 aa, Homo sapiens
  CDR3 for beta chain variable domain of TCR clone 71788 (TRBV7-9, TRBJ1-4)
CASSRTGGFNEKLFF

SEQ ID NO: 143577 - protein, 17 aa, Homo sapiens
  CDR3 for alpha chain variable domain of TCR clone 71789 (TRAV4, TRAJ42)
CLVGVPNYGGSQGNLIF

SEQ ID NO: 143578 - protein, 12 aa, Homo sapiens
  CDR3 for beta chain variable domain of TCR clone 71789 (TRBV20-1, TRBJ2-1)
CSAQYTYNEQFF

SEQ ID NO: 143579 - protein, 14 aa, Homo sapiens
  CDR3 for alpha chain variable domain of TCR clone 71790 (TRAV8-3, TRAJ6)
CAVGASVGSYIPTF

SEQ ID NO: 143580 - protein, 17 aa, Homo sapiens
  CDR3 for beta chain variable domain of TCR clone 71790 (TRBV18, TRBJ2-2)
CASSPSDPWQNTGELFF

SEQ ID NO: 143581 - protein, 15 aa, Homo sapiens
  CDR3 for alpha chain variable domain of TCR clone 71791 (TRAV23/DV6, TRAJ13)
CAAWPGGGGYTKVTF

SEQ ID NO: 143582 - protein, 17 aa, Homo sapiens
  CDR3 for beta chain variable domain of TCR clone 71791 (TRBV19, TRBJ2-7)
CASSISFYDSYPYEQYF

SEQ ID NO: 143583 - protein, 16 aa, Homo sapiens
  CDR3 for alpha chain variable domain of TCR clone 71792 (TRAV3, TRAJ10)
CAVRDMRAGGGNKLTF

SEQ ID NO: 143584 - protein, 15 aa, Homo sapiens
  CDR3 for beta chain variable domain of TCR clone 71792 (TRBV6-1, TRBJ2-1)
CASSELRGQYNEQFF

SEQ ID NO: 143585 - protein, 16 aa, Homo sapiens
  CDR3 for alpha chain variable domain of TCR clone 71793 (TRAV12-3, TRAJ53)
CAMSPGRGGSHYKLTF

SEQ ID NO: 143586 - protein, 11 aa, Homo sapiens
  CDR3 for beta chain variable domain of TCR clone 71793 (TRBV29-1, TRBJ2-5)
CSEDRTGTQYF

SEQ ID NO: 143587 - protein, 14 aa, Homo sapiens
  CDR3 for alpha chain variable domain of TCR clone 71794 (TRAV13-1, TRAJ44)
CAAKATGTASKLTF

SEQ ID NO: 143588 - protein, 16 aa, Homo sapiens
  CDR3 for beta chain variable domain of TCR clone 71794 (TRBV15, TRBJ1-2)
CATSRGHRTGGGGYTF

SEQ ID NO: 143589 - protein, 13 aa, Homo sapiens
  CDR3 for alpha chain variable domain of TCR clone 71795 (TRAV27, TRAJ29)
CAGAHSGNTPLVF

SEQ ID NO: 143590 - protein, 15 aa, Homo sapiens
  CDR3 for beta chain variable domain of TCR clone 71795 (TRBV15, TRBJ1-4)
CATSRDMGSYENLFF

SEQ ID NO: 143591 - protein, 16 aa, Homo sapiens
  CDR3 for alpha chain variable domain of TCR clone 71796 (TRAV3, TRAJ28)
CAALPRSGAGSYQLTF

SEQ ID NO: 143592 - protein, 18 aa, Homo sapiens
  CDR3 for beta chain variable domain of TCR clone 71796 (TRBV23-1, TRBJ2-7)
CASSQYRRTDSTSSTSGR

SEQ ID NO: 143593 - protein, 15 aa, Homo sapiens
  CDR3 for alpha chain variable domain of TCR clone 71797 (TRAV25, TRAJ53)
CPTSNSGGSNYKLTF

SEQ ID NO: 143594 - protein, 16 aa, Homo sapiens
  CDR3 for beta chain variable domain of TCR clone 71797 (TRBV7-2, TRBJ1-5)
CASSPWGPEGNQPQHF

SEQ ID NO: 143595 - protein, 15 aa, Homo sapiens
  CDR3 for alpha chain variable domain of TCR clone 71798 (TRAV12-2, TRAJ22)
CVVNGASGSARQLTF

SEQ ID NO: 143596 - protein, 15 aa, Homo sapiens
  CDR3 for beta chain variable domain of TCR clone 71798 (TRBV18, TRBJ2-2)
CASSPPVGFTGELFF

SEQ ID NO: 143597 - protein, 17 aa, Homo sapiens
  CDR3 for alpha chain variable domain of TCR clone 71799 (TRAV17, TRAJ28)
CATDPRRGGAGSYQLTF

SEQ ID NO: 143598 - protein, 16 aa, Homo sapiens
  CDR3 for beta chain variable domain of TCR clone 71799 (TRBV25-1, TRBJ1-1)
CASSGDRDRGRNEAFF

SEQ ID NO: 143599 - protein, 16 aa, Homo sapiens
  CDR3 for alpha chain variable domain of TCR clone 71800 (TRAV30, TRAJ24)
CGTEIVDADSRGKFQL

SEQ ID NO: 143600 - protein, 14 aa, Homo sapiens
  CDR3 for beta chain variable domain of TCR clone 71800 (TRBV12-5, TRBJ2-5)
CASGSRTHQETQYF

SEQ ID NO: 143601 - protein, 14 aa, Homo sapiens
  CDR3 for alpha chain variable domain of TCR clone 71801 (TRAV13-1, TRAJ9)
CAASALTGGFETIF

SEQ ID NO: 143602 - protein, 16 aa, Homo sapiens
  CDR3 for beta chain variable domain of TCR clone 71801 (TRBV7-8, TRBJ2-4)
CASSAERTLAKNIQYF

SEQ ID NO: 143603 - protein, 14 aa, Homo sapiens
  CDR3 for alpha chain variable domain of TCR clone 71802 (TRAV26-1, TRAJ34)
CIVRVAYNTDKLIF

SEQ ID NO: 143604 - protein, 16 aa, Homo sapiens
  CDR3 for beta chain variable domain of TCR clone 71802 (TRBV7-3, TRBJ2-2)
CASSLKRGTLSGELSF

SEQ ID NO: 143605 - protein, 14 aa, Homo sapiens
  CDR3 for alpha chain variable domain of TCR clone 71803 (TRAV13-1, TRAJ20)
CAARPGSNDYKLSF

SEQ ID NO: 143606 - protein, 14 aa, Homo sapiens
  CDR3 for beta chain variable domain of TCR clone 71803 (TRBV7-2, TRBJ2-5)
CASSPRGSSETQYF

SEQ ID NO: 143607 - protein, 15 aa, Homo sapiens
  CDR3 for alpha chain variable domain of TCR clone 71804 (TRAV17, TRAJ54)
CATTRSEQGAQKLVF

SEQ ID NO: 143608 - protein, 16 aa, Homo sapiens
  CDR3 for beta chain variable domain of TCR clone 71804 (TRBV12-4, TRBJ2-3)
CASSLRLAETTDTQYL

SEQ ID NO: 143609 - protein, 12 aa, Homo sapiens
  CDR3 for alpha chain variable domain of TCR clone 71805 (TRAV29/DV5, TRAJ49)
CAATDTGNQFYF

SEQ ID NO: 143610 - protein, 19 aa, Homo sapiens
  CDR3 for beta chain variable domain of TCR clone 71805 (TRBV25-1, TRBJ2-2)
CAILVYRVDRGRKTGELFF

SEQ ID NO: 143611 - protein, 12 aa, Homo sapiens
  CDR3 for alpha chain variable domain of TCR clone 71806 (TRAV12-3, TRAJ31)
CAMSVPNARLMF

SEQ ID NO: 143612 - protein, 12 aa, Homo sapiens
  CDR3 for beta chain variable domain of TCR clone 71806 (TRBV11-2, TRBJ2-1)
CASSVQREGRFF

SEQ ID NO: 143613 - protein, 18 aa, Homo sapiens
  CDR3 for alpha chain variable domain of TCR clone 71807 (TRAV21, TRAJ52)
CAVRPSPAGGTSYGKLTF

SEQ ID NO: 143614 - protein, 19 aa, Homo sapiens
  CDR3 for beta chain variable domain of TCR clone 71807 (TRBV4-1, TRBJ1-4)
CASSQEGPRGWRKNCFLAV

SEQ ID NO: 143615 - protein, 13 aa, Homo sapiens
  CDR3 for alpha chain variable domain of TCR clone 71808 (TRAV16, TRAJ20)
CALGPSNDYKLSF

SEQ ID NO: 143616 - protein, 15 aa, Homo sapiens
  CDR3 for beta chain variable domain of TCR clone 71808 (TRBV4-1, TRBJ1-4)
CASSDTGGTNEKLFF

SEQ ID NO: 143617 - protein, 14 aa, Homo sapiens
  CDR3 for alpha chain variable domain of TCR clone 71809 (TRAV12-2, TRAJ13)
CAVKKTGGYQKVTF

SEQ ID NO: 143618 - protein, 16 aa, Homo sapiens
  CDR3 for beta chain variable domain of TCR clone 71809 (TRBV2, TRBJ2-1)
CASRSPAGGKHNEQFF

SEQ ID NO: 143619 - protein, 14 aa, Homo sapiens
  CDR3 for alpha chain variable domain of TCR clone 71810 (TRAV12-3, TRAJ53)
CGATSGGSNYKLTF

SEQ ID NO: 143620 - protein, 13 aa, Homo sapiens
  CDR3 for beta chain variable domain of TCR clone 71810 (TRBV19, TRBJ1-5)
CASSTQDGQTQHF

SEQ ID NO: 143621 - protein, 15 aa, Homo sapiens
  CDR3 for alpha chain variable domain of TCR clone 71811 (TRAV20, TRAJ43)
CAVQAGKSSNNDMRF

SEQ ID NO: 143622 - protein, 14 aa, Homo sapiens
  CDR3 for beta chain variable domain of TCR clone 71811 (TRBV27, TRBJ2-1)
CASRHLGGCKEQFF

SEQ ID NO: 143623 - protein, 12 aa, Homo sapiens
  CDR3 for alpha chain variable domain of TCR clone 71812 (TRAV12-3, TRAJ17)
CAMTLTGNELTF

SEQ ID NO: 143624 - protein, 13 aa, Homo sapiens
  CDR3 for beta chain variable domain of TCR clone 71812 (TRBV7-9, TRBJ1-2)
CASSLKQNYGYTF

SEQ ID NO: 143625 - protein, 14 aa, Homo sapiens
  CDR3 for alpha chain variable domain of TCR clone 71813 (TRAV17, TRAJ12)
CATDGVDSSYKLIF

SEQ ID NO: 143626 - protein, 16 aa, Homo sapiens
  CDR3 for beta chain variable domain of TCR clone 71813 (TRBV18, TRBJ1-1)
CASSPGVGGRGGEAFF

SEQ ID NO: 143627 - protein, 14 aa, Homo sapiens
  CDR3 for alpha chain variable domain of TCR clone 71814 (TRAV38-1, TRAJ45)
CASHSGGGADGLTF

SEQ ID NO: 143628 - protein, 16 aa, Homo sapiens
  CDR3 for beta chain variable domain of TCR clone 71814 (TRBV4-2, TRBJ2-7)
CASSQGGLANSYGQYF

SEQ ID NO: 143629 - protein, 14 aa, Homo sapiens
  CDR3 for alpha chain variable domain of TCR clone 71815 (TRAV12-3, TRAJ13)
CAMRNSGGYQKVTF

SEQ ID NO: 143630 - protein, 15 aa, Homo sapiens
  CDR3 for beta chain variable domain of TCR clone 71815 (TRBV4-1, TRBJ1-4)
CASSDTGGTNEKLFF

SEQ ID NO: 143631 - protein, 14 aa, Homo sapiens
  CDR3 for alpha chain variable domain of TCR clone 71816 (TRAV12-1, TRAJ27)
CGEHIRTNAGKSTF

SEQ ID NO: 143632 - protein, 15 aa, Homo sapiens
  CDR3 for beta chain variable domain of TCR clone 71816 (TRBV20-1, TRBJ2-7)
CSARDRVSGMDEQYF

SEQ ID NO: 143633 - protein, 15 aa, Homo sapiens
  CDR3 for alpha chain variable domain of TCR clone 71817 (TRAV12-1, TRAJ44)
CMADLPTGTASKLTF

SEQ ID NO: 143634 - protein, 13 aa, Homo sapiens
  CDR3 for beta chain variable domain of TCR clone 71817 (TRBV6-5, TRBJ2-5)
CASSPQGGETQYF

SEQ ID NO: 143635 - protein, 13 aa, Homo sapiens
  CDR3 for alpha chain variable domain of TCR clone 71818 (TRAV25, TRAJ10)
CAGRTGGGNKLTF

SEQ ID NO: 143636 - protein, 15 aa, Homo sapiens
  CDR3 for beta chain variable domain of TCR clone 71818 (TRBV19, TRBJ2-1)
CASSSPGLPLDEQFF

SEQ ID NO: 143637 - protein, 13 aa, Homo sapiens
  CDR3 for alpha chain variable domain of TCR clone 71819 (TRAV17, TRAJ34)
CATVPYNTDKLIF

SEQ ID NO: 143638 - protein, 13 aa, Homo sapiens
  CDR3 for beta chain variable domain of TCR clone 71819 (TRBV7-9, TRBJ1-2)
CASSLKQNYGYTF

SEQ ID NO: 143639 - protein, 14 aa, Homo sapiens
  CDR3 for alpha chain variable domain of TCR clone 71820 (TRAV3, TRAJ21)
CAVESQATFNKFYF

SEQ ID NO: 143640 - protein, 18 aa, Homo sapiens
  CDR3 for beta chain variable domain of TCR clone 71820 (TRBV7-9, TRBJ2-1)
CASSLAVSGTSGRNEQFF

SEQ ID NO: 143641 - protein, 16 aa, Homo sapiens
  CDR3 for alpha chain variable domain of TCR clone 71821 (TRAV12-3, TRAJ53)
CAMSPGSGSSNYKLTF

SEQ ID NO: 143642 - protein, 18 aa, Homo sapiens
  CDR3 for beta chain variable domain of TCR clone 71821 (TRBV10-2, TRBJ2-2)
CISAPAVHRQADAGELFF

SEQ ID NO: 143643 - protein, 12 aa, Homo sapiens
  CDR3 for alpha chain variable domain of TCR clone 71822 (TRAV1-2, TRAJ29)
CAVRNLNTPLVF

SEQ ID NO: 143644 - protein, 14 aa, Homo sapiens
  CDR3 for beta chain variable domain of TCR clone 71822 (TRBV20-1, TRBJ2-3)
CSARGGTSTDTQYF

SEQ ID NO: 143645 - protein, 10 aa, Homo sapiens
  CDR3 for alpha chain variable domain of TCR clone 71823 (TRAV35, TRAJ48)
CAGTNIKLTF

SEQ ID NO: 143646 - protein, 15 aa, Homo sapiens
  CDR3 for beta chain variable domain of TCR clone 71823 (TRBV7-9, TRBJ1-6)
CASSSPGRGNSPLHF

SEQ ID NO: 143647 - protein, 15 aa, Homo sapiens
  CDR3 for alpha chain variable domain of TCR clone 71824 (TRAV26-1, TRAJ29)
CIVRVEGSGNTPPVF

SEQ ID NO: 143648 - protein, 14 aa, Homo sapiens
  CDR3 for beta chain variable domain of TCR clone 71824 (TRBV25-1, TRBJ1-1)
CASTHLGGNTEAFF

SEQ ID NO: 143649 - protein, 15 aa, Homo sapiens
  CDR3 for alpha chain variable domain of TCR clone 71825 (TRAV8-4, TRAJ37)
CAVTYGSSNTGKLIF

SEQ ID NO: 143650 - protein, 13 aa, Homo sapiens
  CDR3 for beta chain variable domain of TCR clone 71825 (TRBV12-4, TRBJ2-5)
CASSLGGSRTHYF

SEQ ID NO: 143651 - protein, 13 aa, Homo sapiens
  CDR3 for alpha chain variable domain of TCR clone 71826 (TRAV3, TRAJ36)
FAVRDTGANNLFF

SEQ ID NO: 143652 - protein, 15 aa, Homo sapiens
  CDR3 for beta chain variable domain of TCR clone 71826 (TRBV24-1, TRBJ2-1)
CATSGSGGFYNEQFF

SEQ ID NO: 143653 - protein, 15 aa, Homo sapiens
  CDR3 for alpha chain variable domain of TCR clone 71827 (TRAV13-1, TRAJ5)
CAASKADTGRRALTF

SEQ ID NO: 143654 - protein, 16 aa, Homo sapiens
  CDR3 for beta chain variable domain of TCR clone 71827 (TRBV7-2, TRBJ2-1)
CASSLGRTSGDNELFF

SEQ ID NO: 143655 - protein, 12 aa, Homo sapiens
  CDR3 for alpha chain variable domain of TCR clone 71828 (TRAV12-1, TRAJ40)
CVVPSGTYKYTF

SEQ ID NO: 143656 - protein, 15 aa, Homo sapiens
  CDR3 for beta chain variable domain of TCR clone 71828 (TRBV12-4, TRBJ2-1)
CASSPLSGRNNEQFF

SEQ ID NO: 143657 - protein, 16 aa, Homo sapiens
  CDR3 for alpha chain variable domain of TCR clone 71829 (TRAV12-2, TRAJ28)
CAVITDSGAGRYQLTF

SEQ ID NO: 143658 - protein, 12 aa, Homo sapiens
  CDR3 for beta chain variable domain of TCR clone 71829 (TRBV9, TRBJ2-2)
CASSLVTGELFF

SEQ ID NO: 143659 - protein, 15 aa, Homo sapiens
  CDR3 for alpha chain variable domain of TCR clone 71830 (TRAV3, TRAJ20)
CVVRDIKLSDYKLSF

SEQ ID NO: 143660 - protein, 16 aa, Homo sapiens
  CDR3 for beta chain variable domain of TCR clone 71830 (TRBV20-1, TRBJ1-4)
CSAPGQGLLTNEKLFF

SEQ ID NO: 143661 - protein, 15 aa, Homo sapiens
  CDR3 for alpha chain variable domain of TCR clone 71831 (TRAV17, TRAJ56)
TSVLRTPGANSKLTF

SEQ ID NO: 143662 - protein, 15 aa, Homo sapiens
  CDR3 for beta chain variable domain of TCR clone 71831 (TRBV27, TRBJ2-7)
CASSLFVTGLDEQYF

SEQ ID NO: 143663 - protein, 14 aa, Homo sapiens
  CDR3 for alpha chain variable domain of TCR clone 71832 (TRAV4, TRAJ6)
CLVGEAGGSYIPTF

SEQ ID NO: 143664 - protein, 16 aa, Homo sapiens
  CDR3 for beta chain variable domain of TCR clone 71832 (TRBV7-6, TRBJ2-1)
CASSLNEGLSYNEQFF

SEQ ID NO: 143665 - protein, 14 aa, Homo sapiens
  CDR3 for alpha chain variable domain of TCR clone 71833 (TRAV20, TRAJ22)
CAVQVSGSARQLTF

SEQ ID NO: 143666 - protein, 13 aa, Homo sapiens
  CDR3 for beta chain variable domain of TCR clone 71833 (TRBV20-1, TRBJ2-5)
CSTREGGKETQYF

SEQ ID NO: 143667 - protein, 18 aa, Homo sapiens
  CDR3 for alpha chain variable domain of TCR clone 71834 (TRAV26-1, TRAJ23)
CIVRVGLEVWNQGGKLIF

SEQ ID NO: 143668 - protein, 12 aa, Homo sapiens
  CDR3 for beta chain variable domain of TCR clone 71834 (TRBV11-2, TRBJ2-1)
CASSPGNNEQFF

SEQ ID NO: 143669 - protein, 21 aa, Homo sapiens
  CDR3 for alpha chain variable domain of TCR clone 71835 (TRAV26-2, TRAJ37)
CCVLLHPERHHGSSNTGKLIF

SEQ ID NO: 143670 - protein, 17 aa, Homo sapiens
  CDR3 for beta chain variable domain of TCR clone 71835 (TRBV20-1, TRBJ2-1)
CSARDRRRASSYNEQFF

SEQ ID NO: 143671 - protein, 11 aa, Homo sapiens
  CDR3 for alpha chain variable domain of TCR clone 71836 (TRAV21, TRAJ34)
CAVTNTDKLIF

SEQ ID NO: 143672 - protein, 16 aa, Homo sapiens
  CDR3 for beta chain variable domain of TCR clone 71836 (TRBV18, TRBJ1-1)
CASSTGVGGRGGEAFF

SEQ ID NO: 143673 - protein, 12 aa, Homo sapiens
  CDR3 for alpha chain variable domain of TCR clone 71837 (TRAV2, TRAJ9)
CAVGAAGFKTIF

SEQ ID NO: 143674 - protein, 16 aa, Homo sapiens
  CDR3 for beta chain variable domain of TCR clone 71837 (TRBV13, TRBJ2-2)
CASSPRTGEHTGELFF

SEQ ID NO: 143675 - protein, 16 aa, Homo sapiens
  CDR3 for alpha chain variable domain of TCR clone 71838 (TRAV23/DV6, TRAJ9)
CAASIGGNTGGLKTIF

SEQ ID NO: 143676 - protein, 13 aa, Homo sapiens
  CDR3 for beta chain variable domain of TCR clone 71838 (TRBV10-3, TRBJ2-7)
CASKLAVNYEQYF

SEQ ID NO: 143677 - protein, 16 aa, Homo sapiens
  CDR3 for alpha chain variable domain of TCR clone 71839 (TRAV29/DV5, TRAJ36)
CAASAGVETGANNPFF

SEQ ID NO: 143678 - protein, 16 aa, Homo sapiens
  CDR3 for beta chain variable domain of TCR clone 71839 (TRBV5-1, TRBJ2-3)
CASSLGLAVYTDTQYF

SEQ ID NO: 143679 - protein, 14 aa, Homo sapiens
  CDR3 for alpha chain variable domain of TCR clone 71840 (TRAV3, TRAJ20)
CAVRDSFNDYKLSS

SEQ ID NO: 143680 - protein, 15 aa, Homo sapiens
  CDR3 for beta chain variable domain of TCR clone 71840 (TRBV18, TRBJ2-7)
CASSPRSGTAYEQYF

SEQ ID NO: 143681 - protein, 17 aa, Homo sapiens
  CDR3 for alpha chain variable domain of TCR clone 71841 (TRAV1-2, TRAJ9)
CLLPLCCLKYWRLQTIF

SEQ ID NO: 143682 - protein, 14 aa, Homo sapiens
  CDR3 for beta chain variable domain of TCR clone 71841 (TRBV13, TRBJ2-3)
CASSSGSPTDTQYF

SEQ ID NO: 143683 - protein, 15 aa, Homo sapiens
  CDR3 for alpha chain variable domain of TCR clone 71842 (TRAV21, TRAJ40)
CAVRPQTSGTYKYIF

SEQ ID NO: 143684 - protein, 13 aa, Homo sapiens
  CDR3 for beta chain variable domain of TCR clone 71842 (TRBV7-2, TRBJ2-2)
CASSSVRAGELSF

SEQ ID NO: 143685 - protein, 11 aa, Homo sapiens
  CDR3 for alpha chain variable domain of TCR clone 71843 (TRAV16, TRAJ33)
CALHSNYQLIW

SEQ ID NO: 143686 - protein, 15 aa, Homo sapiens
  CDR3 for beta chain variable domain of TCR clone 71843 (TRBV4-1, TRBJ2-7)
CASSQQGQGFDEQCF

SEQ ID NO: 143687 - protein, 13 aa, Homo sapiens
  CDR3 for alpha chain variable domain of TCR clone 71844 (TRAV2, TRAJ40)
CAMVTSGTYKYIF

SEQ ID NO: 143688 - protein, 14 aa, Homo sapiens
  CDR3 for beta chain variable domain of TCR clone 71844 (TRBV19, TRBJ2-1)
CASPTFVLSGEQLF

SEQ ID NO: 143689 - protein, 14 aa, Homo sapiens
  CDR3 for alpha chain variable domain of TCR clone 71845 (TRAV12-2, TRAJ44)
CAVNPAGTASKLTF

SEQ ID NO: 143690 - protein, 13 aa, Homo sapiens
  CDR3 for beta chain variable domain of TCR clone 71845 (TRBV20-1, TRBJ1-6)
CSAPLGVGSPHHF

SEQ ID NO: 143691 - protein, 14 aa, Homo sapiens
  CDR3 for alpha chain variable domain of TCR clone 71846 (TRAV26-1, TRAJ40)
CIVRVARGTYKYIF

SEQ ID NO: 143692 - protein, 14 aa, Homo sapiens
  CDR3 for beta chain variable domain of TCR clone 71846 (TRBV7-3, TRBJ2-7)
CASRLKADSYEQYF

SEQ ID NO: 143693 - protein, 11 aa, Homo sapiens
  CDR3 for alpha chain variable domain of TCR clone 71847 (TRAV2, TRAJ33)
CAVESNYQLIW

SEQ ID NO: 143694 - protein, 14 aa, Homo sapiens
  CDR3 for beta chain variable domain of TCR clone 71847 (TRBV18, TRBJ2-7)
CASSPRGGAYEQYF

SEQ ID NO: 143695 - protein, 13 aa, Homo sapiens
  CDR3 for alpha chain variable domain of TCR clone 71848 (TRAV12-2, TRAJ52)
CAVSGTSYGKLTF

SEQ ID NO: 143696 - protein, 17 aa, Homo sapiens
  CDR3 for beta chain variable domain of TCR clone 71848 (TRBV11-2, TRBJ2-1)
CASSLSPPGVEYNEQFF

SEQ ID NO: 143697 - protein, 17 aa, Homo sapiens
  CDR3 for alpha chain variable domain of TCR clone 71849 (TRAV13-1, TRAJ52)
CTASSGAGGTSYGKLTF

SEQ ID NO: 143698 - protein, 15 aa, Homo sapiens
  CDR3 for beta chain variable domain of TCR clone 71849 (TRBV2, TRBJ2-1)
CASSELAGSYNEQFF

SEQ ID NO: 143699 - protein, 14 aa, Homo sapiens
  CDR3 for alpha chain variable domain of TCR clone 71850 (TRAV13-1, TRAJ40)
CAASMTSGTYKYIF

SEQ ID NO: 143700 - protein, 15 aa, Homo sapiens
  CDR3 for beta chain variable domain of TCR clone 71850 (TRBV7-3, TRBJ2-1)
CASSPTGGGDVEQFF

SEQ ID NO: 143701 - protein, 16 aa, Homo sapiens
  CDR3 for alpha chain variable domain of TCR clone 71851 (TRAV12-2, TRAJ50)
CAVGTATKTSYDKVIF

SEQ ID NO: 143702 - protein, 14 aa, Homo sapiens
  CDR3 for beta chain variable domain of TCR clone 71851 (TRBV12-5, TRBJ2-5)
CASGSRTHQETQYF

SEQ ID NO: 143703 - protein, 15 aa, Homo sapiens
  CDR3 for alpha chain variable domain of TCR clone 71852 (TRAV8-2, TRAJ17)
CVVSPFKAAGNKLTF

SEQ ID NO: 143704 - protein, 18 aa, Homo sapiens
  CDR3 for beta chain variable domain of TCR clone 71852 (TRBV28, TRBJ2-5)
CARSFPNFGTGGGETQYF

SEQ ID NO: 143705 - protein, 20 aa, Homo sapiens
  CDR3 for alpha chain variable domain of TCR clone 71853 (TRAV12-3, TRAJ41)
SLFIRDSQPSDSATPEALNF

SEQ ID NO: 143706 - protein, 15 aa, Homo sapiens
  CDR3 for beta chain variable domain of TCR clone 71853 (TRBV5-1, TRBJ2-7)
CASSLDLTSSYEQYL

SEQ ID NO: 143707 - protein, 14 aa, Homo sapiens
  CDR3 for alpha chain variable domain of TCR clone 71854 (TRAV2, TRAJ9)
CAVEDRSGGFKTIF

SEQ ID NO: 143708 - protein, 16 aa, Homo sapiens
  CDR3 for beta chain variable domain of TCR clone 71854 (TRBV29-1, TRBJ2-7)
CSVEVVGTSGSYEQYF

SEQ ID NO: 143709 - protein, 15 aa, Homo sapiens
  CDR3 for alpha chain variable domain of TCR clone 71855 (TRAV21, TRAJ24)
CAARSSADSWGKLQF

SEQ ID NO: 143710 - protein, 15 aa, Homo sapiens
  CDR3 for beta chain variable domain of TCR clone 71855 (TRBV4-1, TRBJ2-7)
CASSQNTGRLYEQYF

SEQ ID NO: 143711 - protein, 11 aa, Homo sapiens
  CDR3 for alpha chain variable domain of TCR clone 71856 (TRAV29/DV5, TRAJ47)
CAAQRGNKLVF

SEQ ID NO: 143712 - protein, 12 aa, Homo sapiens
  CDR3 for beta chain variable domain of TCR clone 71856 (TRBV11-2, TRBJ2-7)
CASSLLTYEQYF

SEQ ID NO: 143713 - protein, 13 aa, Homo sapiens
  CDR3 for alpha chain variable domain of TCR clone 71857 (TRAV8-3, TRAJ36)
CAVGATGANNLFF

SEQ ID NO: 143714 - protein, 15 aa, Homo sapiens
  CDR3 for beta chain variable domain of TCR clone 71857 (TRBV7-9, TRBJ1-4)
CASSARTGGNEKLFF

SEQ ID NO: 143715 - protein, 13 aa, Homo sapiens
  CDR3 for alpha chain variable domain of TCR clone 71858 (TRAV2, TRAJ40)
CAVVTSGTYKYIF

SEQ ID NO: 143716 - protein, 14 aa, Homo sapiens
  CDR3 for beta chain variable domain of TCR clone 71858 (TRBV19, TRBJ2-1)
CASSTFVLSGEQSF

SEQ ID NO: 143717 - protein, 14 aa, Homo sapiens
  CDR3 for alpha chain variable domain of TCR clone 71859 (TRAV1-2, TRAJ16)
CAVNRFSDGQKLLF

SEQ ID NO: 143718 - protein, 17 aa, Homo sapiens
  CDR3 for beta chain variable domain of TCR clone 71859 (TRBV10-3, TRBJ2-4)
CTPVPSVNKGSKNIQYF

SEQ ID NO: 143719 - protein, 14 aa, Homo sapiens
  CDR3 for alpha chain variable domain of TCR clone 71860 (TRAV12-2, TRAJ40)
CAVKIPSGTYKYIF

SEQ ID NO: 143720 - protein, 15 aa, Homo sapiens
  CDR3 for beta chain variable domain of TCR clone 71860 (TRBV7-9, TRBJ2-7)
CASSLALAEAYEQYF

SEQ ID NO: 143721 - protein, 17 aa, Homo sapiens
  CDR3 for alpha chain variable domain of TCR clone 71861 (TRAV8-6, TRAJ8)
CAVKGGIENTGFQKLVF

SEQ ID NO: 143722 - protein, 12 aa, Homo sapiens
  CDR3 for beta chain variable domain of TCR clone 71861 (TRBV19, TRBJ1-4)
CASKDWPGGLFF

SEQ ID NO: 143723 - protein, 14 aa, Homo sapiens
  CDR3 for alpha chain variable domain of TCR clone 71862 (TRAV17, TRAJ35)
CATDRPGFGNVLHC

SEQ ID NO: 143724 - protein, 15 aa, Homo sapiens
  CDR3 for beta chain variable domain of TCR clone 71862 (TRBV11-3, TRBJ2-3)
CASLKDGREGDTQYF

SEQ ID NO: 143725 - protein, 11 aa, Homo sapiens
  CDR3 for alpha chain variable domain of TCR clone 71863 (TRAV2, TRAJ33)
CAVESNYQLIW

SEQ ID NO: 143726 - protein, 13 aa, Homo sapiens
  CDR3 for beta chain variable domain of TCR clone 71863 (TRBV11-2, TRBJ2-5)
CASSRGPSETQYF

SEQ ID NO: 143727 - protein, 13 aa, Homo sapiens
  CDR3 for alpha chain variable domain of TCR clone 71864 (TRAV8-3, TRAJ44)
CAVVPGTASKLTF

SEQ ID NO: 143728 - protein, 13 aa, Homo sapiens
  CDR3 for beta chain variable domain of TCR clone 71864 (TRBV15, TRBJ2-7)
CATSTTGHYEQYF

SEQ ID NO: 143729 - protein, 15 aa, Homo sapiens
  CDR3 for alpha chain variable domain of TCR clone 71865 (TRAV12-3, TRAJ27)
CAMRAYNTNAGKSTF

SEQ ID NO: 143730 - protein, 13 aa, Homo sapiens
  CDR3 for beta chain variable domain of TCR clone 71865 (TRBV11-2, TRBJ2-5)
CASSRGPSETQYC

SEQ ID NO: 143731 - protein, 15 aa, Homo sapiens
  CDR3 for alpha chain variable domain of TCR clone 71866 (TRAV13-2, TRAJ35)
CAESPNIGFGNVLHC

SEQ ID NO: 143732 - protein, 13 aa, Homo sapiens
  CDR3 for beta chain variable domain of TCR clone 71866 (TRBV10-2, TRBJ2-5)
CASSTLARGTQYF

SEQ ID NO: 143733 - protein, 15 aa, Homo sapiens
  CDR3 for alpha chain variable domain of TCR clone 71867 (TRAV8-3, TRAJ27)
CAVGPSKTNAGKSTF

SEQ ID NO: 143734 - protein, 22 aa, Homo sapiens
  CDR3 for beta chain variable domain of TCR clone 71867 (TRBV3-1, TRBJ2-2)
CASSQDKGLAGGPSGGTGELFF

SEQ ID NO: 143735 - protein, 12 aa, Homo sapiens
  CDR3 for alpha chain variable domain of TCR clone 71868 (TRAV16, TRAJ56)
CAPTGANSKMTF

SEQ ID NO: 143736 - protein, 17 aa, Homo sapiens
  CDR3 for beta chain variable domain of TCR clone 71868 (TRBV27, TRBJ2-6)
CASSLTGFASGANVLTF

SEQ ID NO: 143737 - protein, 14 aa, Homo sapiens
  CDR3 for alpha chain variable domain of TCR clone 71869 (TRAV17, TRAJ57)
CATDPQGGSEKLVF

SEQ ID NO: 143738 - protein, 18 aa, Homo sapiens
  CDR3 for beta chain variable domain of TCR clone 71869 (TRBV20-1, TRBJ2-3)
CSAPGLAGGPGTTDTQYF

SEQ ID NO: 143739 - protein, 12 aa, Homo sapiens
  CDR3 for alpha chain variable domain of TCR clone 71870 (TRAV36/DV7, TRAJ40)
CAVGTGTYRYIF

SEQ ID NO: 143740 - protein, 14 aa, Homo sapiens
  CDR3 for beta chain variable domain of TCR clone 71870 (TRBV19, TRBJ2-3)
CASSIDLGGDTQYF

SEQ ID NO: 143741 - protein, 15 aa, Homo sapiens
  CDR3 for alpha chain variable domain of TCR clone 71871 (TRAV12-3, TRAJ27)
CAMRAYNTNAGKSTF

SEQ ID NO: 143742 - protein, 15 aa, Homo sapiens
  CDR3 for beta chain variable domain of TCR clone 71871 (TRBV20-1, TRBJ2-7)
CSARDRVSGMDEQYF

SEQ ID NO: 143743 - protein, 14 aa, Homo sapiens
  CDR3 for alpha chain variable domain of TCR clone 71872 (TRAV8-6, TRAJ53)
CAVTSGGSNYKLTF

SEQ ID NO: 143744 - protein, 14 aa, Homo sapiens
  CDR3 for beta chain variable domain of TCR clone 71872 (TRBV4-2, TRBJ1-4)
CASSQGATNEKLFF

SEQ ID NO: 143745 - protein, 18 aa, Homo sapiens
  CDR3 for alpha chain variable domain of TCR clone 71873 (TRAV13-1, TRAJ52)
CAAKNPNAGGTSYGKLTF

SEQ ID NO: 143746 - protein, 13 aa, Homo sapiens
  CDR3 for beta chain variable domain of TCR clone 71873 (TRBV27, TRBJ1-4)
CASSLMGDEKLFF

SEQ ID NO: 143747 - protein, 14 aa, Homo sapiens
  CDR3 for alpha chain variable domain of TCR clone 71874 (TRAV1-2, TRAJ8)
CAVREDTGFQKLVF

SEQ ID NO: 143748 - protein, 16 aa, Homo sapiens
  CDR3 for beta chain variable domain of TCR clone 71874 (TRBV6-5, TRBJ2-1)
CASSETLAGHYNEQFF

SEQ ID NO: 143749 - protein, 15 aa, Homo sapiens
  CDR3 for alpha chain variable domain of TCR clone 71875 (TRAV3, TRAJ5)
CAVRDRKTGRRALTF

SEQ ID NO: 143750 - protein, 16 aa, Homo sapiens
  CDR3 for beta chain variable domain of TCR clone 71875 (TRBV7-3, TRBJ2-2)
CASSLKRGTLSGELFF

SEQ ID NO: 143751 - protein, 22 aa, Homo sapiens
  CDR3 for alpha chain variable domain of TCR clone 71876 (TRAV21, )
CAVRQDAGNNHIQNPDPAAYQL

SEQ ID NO: 143752 - protein, 16 aa, Homo sapiens
  CDR3 for beta chain variable domain of TCR clone 71876 (TRBV4-2, TRBJ1-1)
CASRPLDGGGDTEAFF

SEQ ID NO: 143753 - protein, 11 aa, Homo sapiens
  CDR3 for alpha chain variable domain of TCR clone 71877 (TRAV26-1, TRAJ37)
CIVRVGRKLIF

SEQ ID NO: 143754 - protein, 16 aa, Homo sapiens
  CDR3 for beta chain variable domain of TCR clone 71877 (TRBV7-3, TRBJ2-2)
CASSLKRGTLSGELFF

SEQ ID NO: 143755 - protein, 16 aa, Homo sapiens
  CDR3 for alpha chain variable domain of TCR clone 71878 (TRAV16, TRAJ4)
CALSRMFSGGYNKLIF

SEQ ID NO: 143756 - protein, 16 aa, Homo sapiens
  CDR3 for beta chain variable domain of TCR clone 71878 (TRBV24-1, TRBJ2-3)
CATSDAGTGATDTQYF

SEQ ID NO: 143757 - protein, 14 aa, Homo sapiens
  CDR3 for alpha chain variable domain of TCR clone 71879 (TRAV8-3, TRAJ23)
RAVIIYNQGGKLIF

SEQ ID NO: 143758 - protein, 15 aa, Homo sapiens
  CDR3 for beta chain variable domain of TCR clone 71879 (TRBV18, TRBJ2-1)
CASSPPSASYNEQFF

SEQ ID NO: 143759 - protein, 11 aa, Homo sapiens
  CDR3 for alpha chain variable domain of TCR clone 71880 (TRAV20, TRAJ34)
CTRDNTDKLIF

SEQ ID NO: 143760 - protein, 15 aa, Homo sapiens
  CDR3 for beta chain variable domain of TCR clone 71880 (TRBV2, TRBJ2-1)
CASSVTSEGTGEQFF

SEQ ID NO: 143761 - protein, 13 aa, Homo sapiens
  CDR3 for alpha chain variable domain of TCR clone 71881 (TRAV2, TRAJ23)
CAVIGNQGGKLIF

SEQ ID NO: 143762 - protein, 15 aa, Homo sapiens
  CDR3 for beta chain variable domain of TCR clone 71881 (TRBV11-2, TRBJ2-1)
CASSSSTISYNEQFF

SEQ ID NO: 143763 - protein, 14 aa, Homo sapiens
  CDR3 for alpha chain variable domain of TCR clone 71882 (TRAV12-2, TRAJ40)
CAVRIPSGTYKYIF

SEQ ID NO: 143764 - protein, 12 aa, Homo sapiens
  CDR3 for beta chain variable domain of TCR clone 71882 (TRBV11-2, TRBJ2-1)
CASSPGNNEQFF

SEQ ID NO: 143765 - protein, 12 aa, Homo sapiens
  CDR3 for alpha chain variable domain of TCR clone 71883 (TRAV25, TRAJ38)
CAGTGNKRKLIW

SEQ ID NO: 143766 - protein, 14 aa, Homo sapiens
  CDR3 for beta chain variable domain of TCR clone 71883 (TRBV5-4, TRBJ1-1)
CASSLDSRRDEAFF

SEQ ID NO: 143767 - protein, 12 aa, Homo sapiens
  CDR3 for alpha chain variable domain of TCR clone 71884 (TRAV1-2, TRAJ33)
CAALDSNYQLIW

SEQ ID NO: 143768 - protein, 15 aa, Homo sapiens
  CDR3 for beta chain variable domain of TCR clone 71884 (TRBV28, TRBJ2-1)
CASSIIAGGRSEQFF

SEQ ID NO: 143769 - protein, 13 aa, Homo sapiens
  CDR3 for alpha chain variable domain of TCR clone 71885 (TRAV13-1, TRAJ21)
CAASIYNFNKFYF

SEQ ID NO: 143770 - protein, 12 aa, Homo sapiens
  CDR3 for beta chain variable domain of TCR clone 71885 (TRBV27, TRBJ1-4)
CQQLMGDEKLFF

SEQ ID NO: 143771 - protein, 14 aa, Homo sapiens
  CDR3 for alpha chain variable domain of TCR clone 71886 (TRAV12-2, TRAJ40)
CAVKIPSGTYKYIF

SEQ ID NO: 143772 - protein, 14 aa, Homo sapiens
  CDR3 for beta chain variable domain of TCR clone 71886 (TRBV28, TRBJ1-2)
CASRIQGANYGYTF

SEQ ID NO: 143773 - protein, 12 aa, Homo sapiens
  CDR3 for alpha chain variable domain of TCR clone 71887 (TRAV12-2, TRAJ47)
CAVAEYGNKLVF

SEQ ID NO: 143774 - protein, 14 aa, Homo sapiens
  CDR3 for beta chain variable domain of TCR clone 71887 (TRBV20-1, TRBJ1-1)
CSAMGGTANTEAVF

SEQ ID NO: 143775 - protein, 14 aa, Homo sapiens
  CDR3 for alpha chain variable domain of TCR clone 71888 (TRAV23/DV6, TRAJ4)
CAAPSSGGYTKLIF

SEQ ID NO: 143776 - protein, 16 aa, Homo sapiens
  CDR3 for beta chain variable domain of TCR clone 71888 (TRBV19, TRBJ1-1)
CASRFGGPVTGTEAFF

SEQ ID NO: 143777 - protein, 13 aa, Homo sapiens
  CDR3 for alpha chain variable domain of TCR clone 71889 (TRAV35, TRAJ43)
CAGYPYNNNDMRF

SEQ ID NO: 143778 - protein, 15 aa, Homo sapiens
  CDR3 for beta chain variable domain of TCR clone 71889 (TRBV25-1, TRBJ1-4)
CASSQRIATNEKLFF

SEQ ID NO: 143779 - protein, 17 aa, Homo sapiens
  CDR3 for alpha chain variable domain of TCR clone 71890 (TRAV3, TRAJ42)
CAVRDRDYGGSQGNLIF

SEQ ID NO: 143780 - protein, 15 aa, Homo sapiens
  CDR3 for beta chain variable domain of TCR clone 71890 (TRBV2, TRBJ2-7)
CASSEGLARSYERYF

SEQ ID NO: 143781 - protein, 14 aa, Homo sapiens
  CDR3 for alpha chain variable domain of TCR clone 71891 (TRAV1-2, TRAJ8)
CAVREDTGFRKLVF

SEQ ID NO: 143782 - protein, 12 aa, Homo sapiens
  CDR3 for beta chain variable domain of TCR clone 71891 (TRBV11-2, TRBJ2-2)
CASSLGGGELFF

SEQ ID NO: 143783 - protein, 14 aa, Homo sapiens
  CDR3 for alpha chain variable domain of TCR clone 71892 (TRAV26-1, TRAJ45)
CIEVTGGGADGLTF

SEQ ID NO: 143784 - protein, 11 aa, Homo sapiens
  CDR3 for beta chain variable domain of TCR clone 71892 (TRBV7-8, TRBJ2-7)
CASSLSLEQYF

SEQ ID NO: 143785 - protein, 13 aa, Homo sapiens
  CDR3 for alpha chain variable domain of TCR clone 71893 (TRAV12-1, TRAJ11)
CVVTRGGYSTLTF

SEQ ID NO: 143786 - protein, 14 aa, Homo sapiens
  CDR3 for beta chain variable domain of TCR clone 71893 (TRBV19, TRBJ2-1)
CASPTFVLSGEQFF

SEQ ID NO: 143787 - protein, 12 aa, Homo sapiens
  CDR3 for alpha chain variable domain of TCR clone 71894 (TRAV3, TRAJ20)
CAVRDGDYKLSF

SEQ ID NO: 143788 - protein, 15 aa, Homo sapiens
  CDR3 for beta chain variable domain of TCR clone 71894 (TRBV7-2, TRBJ2-1)
CASTHGTGIYNEQFF

SEQ ID NO: 143789 - protein, 12 aa, Homo sapiens
  CDR3 for alpha chain variable domain of TCR clone 71895 (TRAV1-1, TRAJ8)
CAGGTGFQKLVF

SEQ ID NO: 143790 - protein, 15 aa, Homo sapiens
  CDR3 for beta chain variable domain of TCR clone 71895 (TRBV28, TRBJ2-1)
CASSIIAGGRSEQFF

SEQ ID NO: 143791 - protein, 11 aa, Homo sapiens
  CDR3 for alpha chain variable domain of TCR clone 71896 (TRAV13-1, TRAJ8)
CAARGFQKLVL

SEQ ID NO: 143792 - protein, 16 aa, Homo sapiens
  CDR3 for beta chain variable domain of TCR clone 71896 (TRBV19, TRBJ1-5)
CASSTRGTGSNQPQHF

SEQ ID NO: 143793 - protein, 13 aa, Homo sapiens
  CDR3 for alpha chain variable domain of TCR clone 71897 (TRAV1-2, TRAJ9)
CAALNTGGFKTIC

SEQ ID NO: 143794 - protein, 14 aa, Homo sapiens
  CDR3 for beta chain variable domain of TCR clone 71897 (TRBV13, TRBJ2-3)
CASSSGSPTDTQYF

SEQ ID NO: 143795 - protein, 14 aa, Homo sapiens
  CDR3 for alpha chain variable domain of TCR clone 71898 (TRAV13-1, TRAJ20)
CAARPGSNDYKLSF

SEQ ID NO: 143796 - protein, 17 aa, Homo sapiens
  CDR3 for beta chain variable domain of TCR clone 71898 (TRBV28, TRBJ2-7)
CASSPLHRASGVYEQYF

SEQ ID NO: 143797 - protein, 13 aa, Homo sapiens
  CDR3 for alpha chain variable domain of TCR clone 71899 (TRAV12-2, TRAJ42)
CAVKRGSQGNLIF

SEQ ID NO: 143798 - protein, 12 aa, Homo sapiens
  CDR3 for beta chain variable domain of TCR clone 71899 (TRBV5-7, TRBJ1-2)
CANSLVQNGYTF

SEQ ID NO: 143799 - protein, 14 aa, Homo sapiens
  CDR3 for alpha chain variable domain of TCR clone 71900 (TRAV17, TRAJ56)
CATVPAGANSKLTF

SEQ ID NO: 143800 - protein, 16 aa, Homo sapiens
  CDR3 for beta chain variable domain of TCR clone 71900 (TRBV27, TRBJ2-2)
CASSFRGLVRTGELFF

SEQ ID NO: 143801 - protein, 15 aa, Homo sapiens
  CDR3 for alpha chain variable domain of TCR clone 71901 (TRAV20, TRAJ50)
CAVRQMKTSYDKVIF

SEQ ID NO: 143802 - protein, 17 aa, Homo sapiens
  CDR3 for beta chain variable domain of TCR clone 71901 (TRBV28, TRBJ2-7)
CASSPRHRASGVYEQYF

SEQ ID NO: 143803 - protein, 13 aa, Homo sapiens
  CDR3 for alpha chain variable domain of TCR clone 71902 (TRAV12-1, TRAJ6)
CVVFPGGSYIPTF

SEQ ID NO: 143804 - protein, 14 aa, Homo sapiens
  CDR3 for beta chain variable domain of TCR clone 71902 (TRBV20-1, TRBJ1-3)
CSASPKGAGNTIYF

SEQ ID NO: 143805 - protein, 12 aa, Homo sapiens
  CDR3 for alpha chain variable domain of TCR clone 71903 (TRAV12-3, TRAJ17)
CAMTLTGSKLTF

SEQ ID NO: 143806 - protein, 15 aa, Homo sapiens
  CDR3 for beta chain variable domain of TCR clone 71903 (TRBV6-4, TRBJ2-7)
CASSDQGPPNYEQYF

SEQ ID NO: 143807 - protein, 13 aa, Homo sapiens
  CDR3 for alpha chain variable domain of TCR clone 71904 (TRAV17, TRAJ5)
CALRGTGRRALTF

SEQ ID NO: 143808 - protein, 14 aa, Homo sapiens
  CDR3 for beta chain variable domain of TCR clone 71904 (TRBV7-2, TRBJ1-2)
CASSQTGSTYGYTF

SEQ ID NO: 143809 - protein, 12 aa, Homo sapiens
  CDR3 for alpha chain variable domain of TCR clone 71905 (TRAV29/DV5, TRAJ43)
CAAPYNNNDMRF

SEQ ID NO: 143810 - protein, 16 aa, Homo sapiens
  CDR3 for beta chain variable domain of TCR clone 71905 (TRBV18, TRBJ2-1)
CASSPYLSIRGDEQFF

SEQ ID NO: 143811 - protein, 12 aa, Homo sapiens
  CDR3 for alpha chain variable domain of TCR clone 71906 (TRAV3, TRAJ9)
CAVLPAGFKTIF

SEQ ID NO: 143812 - protein, 11 aa, Homo sapiens
  CDR3 for beta chain variable domain of TCR clone 71906 (TRBV7-9, TRBJ2-3)
CASSPPDTQYF

SEQ ID NO: 143813 - protein, 11 aa, Homo sapiens
  CDR3 for alpha chain variable domain of TCR clone 71907 (TRAV12-3, TRAJ6)
CAMSGSYIPTF

SEQ ID NO: 143814 - protein, 11 aa, Homo sapiens
  CDR3 for beta chain variable domain of TCR clone 71907 (TRBV12-4, TRBJ2-3)
CASTATDTQYF

SEQ ID NO: 143815 - protein, 13 aa, Homo sapiens
  CDR3 for alpha chain variable domain of TCR clone 71908 (TRAV8-3, TRAJ28)
CAVGAVGSYQITF

SEQ ID NO: 143816 - protein, 14 aa, Homo sapiens
  CDR3 for beta chain variable domain of TCR clone 71908 (TRBV7-2, TRBJ2-7)
CASRSQGAAYEQYF

SEQ ID NO: 143817 - protein, 15 aa, Homo sapiens
  CDR3 for alpha chain variable domain of TCR clone 71909 (TRAV3, TRAJ5)
CAVRDLDTGRRALTI

SEQ ID NO: 143818 - protein, 13 aa, Homo sapiens
  CDR3 for beta chain variable domain of TCR clone 71909 (TRBV12-4, TRBJ2-7)
CASSPTETYEQYF

SEQ ID NO: 143819 - protein, 12 aa, Homo sapiens
  CDR3 for alpha chain variable domain of TCR clone 71910 (TRAV12-1, TRAJ40)
CVFYSGTYKYIF

SEQ ID NO: 143820 - protein, 10 aa, Homo sapiens
  CDR3 for beta chain variable domain of TCR clone 71910 (TRBV12-4, TRBJ2-2)
CASGLVAGTR

SEQ ID NO: 143821 - protein, 12 aa, Homo sapiens
  CDR3 for alpha chain variable domain of TCR clone 71911 (TRAV1-2, TRAJ42)
CVAGGSQGNLIF

SEQ ID NO: 143822 - protein, 15 aa, Homo sapiens
  CDR3 for beta chain variable domain of TCR clone 71911 (TRBV20-1, TRBJ2-7)
CSARDRVSGMDEQYF

SEQ ID NO: 143823 - protein, 15 aa, Homo sapiens
  CDR3 for alpha chain variable domain of TCR clone 71912 (TRAV8-2, TRAJ40)
CVVLGTTSGTYKYIF

SEQ ID NO: 143824 - protein, 13 aa, Homo sapiens
  CDR3 for beta chain variable domain of TCR clone 71912 (TRBV10-3, TRBJ2-7)
CASKLAVNYEQYF

SEQ ID NO: 143825 - protein, 15 aa, Homo sapiens
  CDR3 for alpha chain variable domain of TCR clone 71913 (TRAV3, TRAJ32)
CAVSSYGGATNKLIL

SEQ ID NO: 143826 - protein, 13 aa, Homo sapiens
  CDR3 for beta chain variable domain of TCR clone 71913 (TRBV20-1, TRBJ2-7)
CSARPSTNYEQYF

SEQ ID NO: 143827 - protein, 18 aa, Homo sapiens
  CDR3 for alpha chain variable domain of TCR clone 71914 (TRAV26-2, TRAJ45)
CILRLWGYSGGGADGLTF

SEQ ID NO: 143828 - protein, 17 aa, Homo sapiens
  CDR3 for beta chain variable domain of TCR clone 71914 (TRBV28, TRBJ2-3)
CASSPTPVGGRVDTQYF

SEQ ID NO: 143829 - protein, 14 aa, Homo sapiens
  CDR3 for alpha chain variable domain of TCR clone 71915 (TRAV12-2, TRAJ40)
CAVKIPSGTYKYIF

SEQ ID NO: 143830 - protein, 13 aa, Homo sapiens
  CDR3 for beta chain variable domain of TCR clone 71915 (TRBV12-4, TRBJ2-5)
CASSPGTEETQYF

SEQ ID NO: 143831 - protein, 13 aa, Homo sapiens
  CDR3 for alpha chain variable domain of TCR clone 71916 (TRAV1-2, TRAJ9)
CAALNTGGFKAIF

SEQ ID NO: 143832 - protein, 14 aa, Homo sapiens
  CDR3 for beta chain variable domain of TCR clone 71916 (TRBV13, TRBJ2-3)
CASSSGSPTDTQYF

SEQ ID NO: 143833 - protein, 11 aa, Homo sapiens
  CDR3 for alpha chain variable domain of TCR clone 71917 (TRAV3, TRAJ21)
CAVGYFNKFYF

SEQ ID NO: 143834 - protein, 15 aa, Homo sapiens
  CDR3 for beta chain variable domain of TCR clone 71917 (TRBV11-3, TRBJ2-3)
CASLKDGREGDTQYF

SEQ ID NO: 143835 - protein, 11 aa, Homo sapiens
  CDR3 for alpha chain variable domain of TCR clone 71918 (TRAV12-1, TRAJ8)
CVVTGFKKLVF

SEQ ID NO: 143836 - protein, 14 aa, Homo sapiens
  CDR3 for beta chain variable domain of TCR clone 71918 (TRBV19, TRBJ2-1)
CASGKSTQYNEQFF

SEQ ID NO: 143837 - protein, 17 aa, Homo sapiens
  CDR3 for alpha chain variable domain of TCR clone 71919 (TRAV3, TRAJ6)
CAVRDGPRAGGSYIPTF

SEQ ID NO: 143838 - protein, 16 aa, Homo sapiens
  CDR3 for beta chain variable domain of TCR clone 71919 (TRBV28, TRBJ2-5)
CASSFSPAGGWETQYF

SEQ ID NO: 143839 - protein, 13 aa, Homo sapiens
  CDR3 for alpha chain variable domain of TCR clone 71920 (TRAV22, TRAJ29)
CAVGGSGNTPLVF

SEQ ID NO: 143840 - protein, 13 aa, Homo sapiens
  CDR3 for beta chain variable domain of TCR clone 71920 (TRBV5-7, TRBJ2-3)
CASSLGRTDTQYF

SEQ ID NO: 143841 - protein, 13 aa, Homo sapiens
  CDR3 for alpha chain variable domain of TCR clone 71921 (TRAV3, TRAJ21)
CAVREPDFNKFYF

SEQ ID NO: 143842 - protein, 15 aa, Homo sapiens
  CDR3 for beta chain variable domain of TCR clone 71921 (TRBV20-1, TRBJ2-2)
CSAIPGHSNTGELFF

SEQ ID NO: 143843 - protein, 15 aa, Homo sapiens
  CDR3 for alpha chain variable domain of TCR clone 71922 (TRAV12-2, TRAJ53)
CAVNGGGGSNYTLTF

SEQ ID NO: 143844 - protein, 17 aa, Homo sapiens
  CDR3 for beta chain variable domain of TCR clone 71922 (TRBV7-3, TRBJ2-3)
CASSLMKRMRGADTQYF

SEQ ID NO: 143845 - protein, 16 aa, Homo sapiens
  CDR3 for alpha chain variable domain of TCR clone 71923 (TRAV1-2, TRAJ10)
CAVRGVLTGGGNKLTF

SEQ ID NO: 143846 - protein, 16 aa, Homo sapiens
  CDR3 for beta chain variable domain of TCR clone 71923 (TRBV12-4, TRBJ1-5)
CASSRPVGGSNQPQHF

SEQ ID NO: 143847 - protein, 13 aa, Homo sapiens
  CDR3 for alpha chain variable domain of TCR clone 71924 (TRAV27, TRAJ45)
CRSSGGGADGLTF

SEQ ID NO: 143848 - protein, 12 aa, Homo sapiens
  CDR3 for beta chain variable domain of TCR clone 71924 (TRBV7-9, TRBJ2-7)
CASSLEGYEQYF

SEQ ID NO: 143849 - protein, 14 aa, Homo sapiens
  CDR3 for alpha chain variable domain of TCR clone 71925 (TRAV12-2, TRAJ40)
CAVKIPSGTYKYIF

SEQ ID NO: 143850 - protein, 16 aa, Homo sapiens
  CDR3 for beta chain variable domain of TCR clone 71925 (TRBV12-4, TRBJ2-5)
CASSFFVRGRQETQYF

SEQ ID NO: 143851 - protein, 13 aa, Homo sapiens
  CDR3 for alpha chain variable domain of TCR clone 71926 (TRAV8-3, TRAJ44)
CAVVPGAASKLTF

SEQ ID NO: 143852 - protein, 14 aa, Homo sapiens
  CDR3 for beta chain variable domain of TCR clone 71926 (TRBV11-2, TRBJ2-3)
CASSRLARTDTQHF

SEQ ID NO: 143853 - protein, 12 aa, Homo sapiens
  CDR3 for alpha chain variable domain of TCR clone 71927 (TRAV3, TRAJ20)
CTVRDGDYKLSF

SEQ ID NO: 143854 - protein, 13 aa, Homo sapiens
  CDR3 for beta chain variable domain of TCR clone 71927 (TRBV9, TRBJ2-1)
CASSVGQGGEQFF

SEQ ID NO: 143855 - protein, 15 aa, Homo sapiens
  CDR3 for alpha chain variable domain of TCR clone 71928 (TRAV12-2, TRAJ43)
CAFDMRFGPGTRLTV

SEQ ID NO: 143856 - protein, 18 aa, Homo sapiens
  CDR3 for beta chain variable domain of TCR clone 71928 (TRBV20-1, TRBJ2-3)
CSASGLAGGPGTTDTQYF

SEQ ID NO: 143857 - protein, 16 aa, Homo sapiens
  CDR3 for alpha chain variable domain of TCR clone 71929 (TRAV3, TRAJ4)
CAVRAFFSGGYNKLIF

SEQ ID NO: 143858 - protein, 13 aa, Homo sapiens
  CDR3 for beta chain variable domain of TCR clone 71929 (TRBV7-9, TRBJ1-2)
CASSLKQNYGYTF

SEQ ID NO: 143859 - protein, 14 aa, Homo sapiens
  CDR3 for alpha chain variable domain of TCR clone 71930 (TRAV12-2, TRAJ40)
CAVKIPSGTYKYIF

SEQ ID NO: 143860 - protein, 13 aa, Homo sapiens
  CDR3 for beta chain variable domain of TCR clone 71930 (TRBV7-8, TRBJ1-2)
CASSAQSYYGYTF

SEQ ID NO: 143861 - protein, 12 aa, Homo sapiens
  CDR3 for alpha chain variable domain of TCR clone 71931 (TRAV8-3, TRAJ41)
CAVALSGYALNF

SEQ ID NO: 143862 - protein, 17 aa, Homo sapiens
  CDR3 for beta chain variable domain of TCR clone 71931 (TRBV7-3, TRBJ2-2)
CASSLPGTSGGTGELFF

SEQ ID NO: 143863 - protein, 16 aa, Homo sapiens
  CDR3 for alpha chain variable domain of TCR clone 71932 (TRAV1-2, TRAJ10)
CAVRGVLTGGGNKLTF

SEQ ID NO: 143864 - protein, 12 aa, Homo sapiens
  CDR3 for beta chain variable domain of TCR clone 71932 (TRBV29-1, TRBJ2-3)
CSVTGGADTQYF

SEQ ID NO: 143865 - protein, 13 aa, Homo sapiens
  CDR3 for alpha chain variable domain of TCR clone 71933 (TRAV35, TRAJ33)
CAGLMDSNNQLIW

SEQ ID NO: 143866 - protein, 13 aa, Homo sapiens
  CDR3 for beta chain variable domain of TCR clone 71933 (TRBV10-3, TRBJ2-1)
CAISEFSGREQFF

SEQ ID NO: 143867 - protein, 13 aa, Homo sapiens
  CDR3 for alpha chain variable domain of TCR clone 71934 (TRAV17, TRAJ9)
CATDYTGGFKTIV

SEQ ID NO: 143868 - protein, 14 aa, Homo sapiens
  CDR3 for beta chain variable domain of TCR clone 71934 (TRBV19, TRBJ2-5)
CASSMTGQQETQYF

SEQ ID NO: 143869 - protein, 15 aa, Homo sapiens
  CDR3 for alpha chain variable domain of TCR clone 71935 (TRAV26-1, TRAJ29)
CIVRVEGSGNTPLVF

SEQ ID NO: 143870 - protein, 14 aa, Homo sapiens
  CDR3 for beta chain variable domain of TCR clone 71935 (TRBV18, TRBJ2-5)
CASSPGVSPETQYF

SEQ ID NO: 143871 - protein, 14 aa, Homo sapiens
  CDR3 for alpha chain variable domain of TCR clone 71936 (TRAV8-4, TRAJ13)
CAVTLSGGYQKVTF

SEQ ID NO: 143872 - protein, 14 aa, Homo sapiens
  CDR3 for beta chain variable domain of TCR clone 71936 (TRBV7-8, TRBJ1-2)
CASSQTGSTYGYTF

SEQ ID NO: 143873 - protein, 11 aa, Homo sapiens
  CDR3 for alpha chain variable domain of TCR clone 71937 (TRAV2, TRAJ13)
CASGGYQKVTF

SEQ ID NO: 143874 - protein, 16 aa, Homo sapiens
  CDR3 for beta chain variable domain of TCR clone 71937 (TRBV4-1, TRBJ1-3)
CASSQDELLAGSTIYF

SEQ ID NO: 143875 - protein, 14 aa, Homo sapiens
  CDR3 for alpha chain variable domain of TCR clone 71938 (TRAV13-2, TRAJ17)
CAENSKAAGNKLTF

SEQ ID NO: 143876 - protein, 18 aa, Homo sapiens
  CDR3 for beta chain variable domain of TCR clone 71938 (TRBV11-2, TRBJ2-3)
CASSLGGASRGAPNTQYF

SEQ ID NO: 143877 - protein, 12 aa, Homo sapiens
  CDR3 for alpha chain variable domain of TCR clone 71939 (TRAV2, TRAJ31)
CDVEDNNARLMF

SEQ ID NO: 143878 - protein, 16 aa, Homo sapiens
  CDR3 for beta chain variable domain of TCR clone 71939 (TRBV10-3, TRBJ2-1)
CAISGVGDGGGGEQFF

SEQ ID NO: 143879 - protein, 14 aa, Homo sapiens
  CDR3 for alpha chain variable domain of TCR clone 71940 (TRAV20, TRAJ29)
CAVQESFRKHTSCL

SEQ ID NO: 143880 - protein, 14 aa, Homo sapiens
  CDR3 for beta chain variable domain of TCR clone 71940 (TRBV7-2, TRBJ2-5)
CASSPRDSSETQYF

SEQ ID NO: 143881 - protein, 15 aa, Homo sapiens
  CDR3 for alpha chain variable domain of TCR clone 71941 (TRAV25, TRAJ52)
CTGTSGGTSYGKLTF

SEQ ID NO: 143882 - protein, 13 aa, Homo sapiens
  CDR3 for beta chain variable domain of TCR clone 71941 (TRBV6-5, TRBJ2-5)
CASSPQGGETQYF

SEQ ID NO: 143883 - protein, 14 aa, Homo sapiens
  CDR3 for alpha chain variable domain of TCR clone 71942 (TRAV17, TRAJ6)
CATDASGGSYIPTF

SEQ ID NO: 143884 - protein, 13 aa, Homo sapiens
  CDR3 for beta chain variable domain of TCR clone 71942 (TRBV7-3, TRBJ1-1)
CASSQDWGAEAFF

SEQ ID NO: 143885 - protein, 10 aa, Homo sapiens
  CDR3 for alpha chain variable domain of TCR clone 71943 (TRAV20, TRAJ22)
CAAPARQLTF

SEQ ID NO: 143886 - protein, 14 aa, Homo sapiens
  CDR3 for beta chain variable domain of TCR clone 71943 (TRBV19, TRBJ2-1)
CAGSMGSGATEQFF

SEQ ID NO: 143887 - protein, 16 aa, Homo sapiens
  CDR3 for alpha chain variable domain of TCR clone 71944 (TRAV16, TRAJ4)
CALSRMFSGGYNKLIF

SEQ ID NO: 143888 - protein, 16 aa, Homo sapiens
  CDR3 for beta chain variable domain of TCR clone 71944 (TRBV20-1, TRBJ1-4)
CSAPGQGLLTNEKLFF

SEQ ID NO: 143889 - protein, 12 aa, Homo sapiens
  CDR3 for alpha chain variable domain of TCR clone 71945 (TRAV12-3, TRAJ17)
CAMTLTGNKLTF

SEQ ID NO: 143890 - protein, 14 aa, Homo sapiens
  CDR3 for beta chain variable domain of TCR clone 71945 (TRBV7-9, TRBJ2-7)
CASSLSQGSYEQYF

SEQ ID NO: 143891 - protein, 14 aa, Homo sapiens
  CDR3 for alpha chain variable domain of TCR clone 71946 (TRAV17, TRAJ12)
CAILPMDSSYKLIF

SEQ ID NO: 143892 - protein, 13 aa, Homo sapiens
  CDR3 for beta chain variable domain of TCR clone 71946 (TRBV7-9, TRBJ1-2)
CASSLKQNYGYTF

SEQ ID NO: 143893 - protein, 11 aa, Homo sapiens
  CDR3 for alpha chain variable domain of TCR clone 71947 (TRAV1-2, TRAJ20)
CAVANDYKLSF

SEQ ID NO: 143894 - protein, 13 aa, Homo sapiens
  CDR3 for beta chain variable domain of TCR clone 71947 (TRBV20-1, TRBJ1-6)
CSAPLGVGSPLHF

SEQ ID NO: 143895 - protein, 14 aa, Homo sapiens
  CDR3 for alpha chain variable domain of TCR clone 71948 (TRAV12-1, TRAJ13)
CVVIDSGGYQKVTF

SEQ ID NO: 143896 - protein, 13 aa, Homo sapiens
  CDR3 for beta chain variable domain of TCR clone 71948 (TRBV10-3, TRBJ2-7)
CASKLAVNYEQYF

SEQ ID NO: 143897 - protein, 14 aa, Homo sapiens
  CDR3 for alpha chain variable domain of TCR clone 71949 (TRAV21, TRAJ35)
SAVMPIGFGNVLHC

SEQ ID NO: 143898 - protein, 12 aa, Homo sapiens
  CDR3 for beta chain variable domain of TCR clone 71949 (TRBV7-9, TRBJ2-7)
CASSIKREEQYF

SEQ ID NO: 143899 - protein, 16 aa, Homo sapiens
  CDR3 for alpha chain variable domain of TCR clone 71950 (TRAV12-3, TRAJ53)
CAMSPGRGGSNYKLTF

SEQ ID NO: 143900 - protein, 15 aa, Homo sapiens
  CDR3 for beta chain variable domain of TCR clone 71950 (TRBV27, TRBJ2-1)
CASSNGGGSSNEQFF

SEQ ID NO: 143901 - protein, 13 aa, Homo sapiens
  CDR3 for alpha chain variable domain of TCR clone 71951 (TRAV16, TRAJ28)
CALTGAGSYQLTF

SEQ ID NO: 143902 - protein, 16 aa, Homo sapiens
  CDR3 for beta chain variable domain of TCR clone 71951 (TRBV28, TRBJ2-2)
CASSLEGGSNTGELFF

SEQ ID NO: 143903 - protein, 17 aa, Homo sapiens
  CDR3 for alpha chain variable domain of TCR clone 71952 (TRAV13-1, TRAJ52)
CAAGRNAGGTSYGKLTF

SEQ ID NO: 143904 - protein, 13 aa, Homo sapiens
  CDR3 for beta chain variable domain of TCR clone 71952 (TRBV7-2, TRBJ1-1)
CASNLKGAKVSFF

SEQ ID NO: 143905 - protein, 16 aa, Homo sapiens
  CDR3 for alpha chain variable domain of TCR clone 71953 (TRAV30, TRAJ24)
CGTGIVDADSWGKFQF

SEQ ID NO: 143906 - protein, 15 aa, Homo sapiens
  CDR3 for beta chain variable domain of TCR clone 71953 (TRBV5-1, TRBJ1-1)
CASSLAPRGNTEAFF

SEQ ID NO: 143907 - protein, 14 aa, Homo sapiens
  CDR3 for alpha chain variable domain of TCR clone 71954 (TRAV26-1, TRAJ39)
CIVRGSRAGNMLTF

SEQ ID NO: 143908 - protein, 15 aa, Homo sapiens
  CDR3 for beta chain variable domain of TCR clone 71954 (TRBV7-9, TRBJ1-5)
CASSQGHQPNQPQQF

SEQ ID NO: 143909 - protein, 15 aa, Homo sapiens
  CDR3 for alpha chain variable domain of TCR clone 71955 (TRAV12-3, TRAJ6)
CAMSATTGGSYIPTF

SEQ ID NO: 143910 - protein, 13 aa, Homo sapiens
  CDR3 for beta chain variable domain of TCR clone 71955 (TRBV27, TRBJ1-1)
CASSLSIGAEAFF

SEQ ID NO: 143911 - protein, 14 aa, Homo sapiens
  CDR3 for alpha chain variable domain of TCR clone 71956 (TRAV8-1, TRAJ23)
CAVGTYNQGGKLIF

SEQ ID NO: 143912 - protein, 16 aa, Homo sapiens
  CDR3 for beta chain variable domain of TCR clone 71956 (TRBV18, TRBJ1-5)
CARSPSTGNSNQPQHF

SEQ ID NO: 143913 - protein, 16 aa, Homo sapiens
  CDR3 for alpha chain variable domain of TCR clone 71957 (TRAV3, TRAJ37)
CAVRPHGSGNTGKLIF

SEQ ID NO: 143914 - protein, 14 aa, Homo sapiens
  CDR3 for beta chain variable domain of TCR clone 71957 (TRBV20-1, TRBJ2-1)
CSARGGSSYNEQSF

SEQ ID NO: 143915 - protein, 14 aa, Homo sapiens
  CDR3 for alpha chain variable domain of TCR clone 71958 (TRAV1-2, TRAJ6)
CAVSLSGGSYIPTF

SEQ ID NO: 143916 - protein, 14 aa, Homo sapiens
  CDR3 for beta chain variable domain of TCR clone 71958 (TRBV12-4, TRBJ2-7)
CASTFGLSTYEQYF

SEQ ID NO: 143917 - protein, 12 aa, Homo sapiens
  CDR3 for alpha chain variable domain of TCR clone 71959 (TRAV21, TRAJ33)
CAKMDSNYQLIW

SEQ ID NO: 143918 - protein, 14 aa, Homo sapiens
  CDR3 for beta chain variable domain of TCR clone 71959 (TRBV2, TRBJ2-7)
CAGSLTSGGYEQYF

SEQ ID NO: 143919 - protein, 16 aa, Homo sapiens
  CDR3 for alpha chain variable domain of TCR clone 71960 (TRAV22, TRAJ45)
CAVERGKRGGADGLTF

SEQ ID NO: 143920 - protein, 14 aa, Homo sapiens
  CDR3 for beta chain variable domain of TCR clone 71960 (TRBV19, TRBJ2-1)
CASPTFVLSGEQFF

SEQ ID NO: 143921 - protein, 12 aa, Homo sapiens
  CDR3 for alpha chain variable domain of TCR clone 71961 (TRAV12-3, TRAJ3)
CAIDSSASKIIF

SEQ ID NO: 143922 - protein, 17 aa, Homo sapiens
  CDR3 for beta chain variable domain of TCR clone 71961 (TRBV7-9, TRBJ2-3)
CASSLEEAGACPDTQYF

SEQ ID NO: 143923 - protein, 13 aa, Homo sapiens
  CDR3 for alpha chain variable domain of TCR clone 71962 (TRAV27, TRAJ17)
CAGAATAGNKLTS

SEQ ID NO: 143924 - protein, 15 aa, Homo sapiens
  CDR3 for beta chain variable domain of TCR clone 71962 (TRBV5-1, TRBJ2-3)
CASRNQAGSTDTQYF

SEQ ID NO: 143925 - protein, 10 aa, Homo sapiens
  CDR3 for alpha chain variable domain of TCR clone 71963 (TRAV8-4, TRAJ43)
CAVSADDLRF

SEQ ID NO: 143926 - protein, 15 aa, Homo sapiens
  CDR3 for beta chain variable domain of TCR clone 71963 (TRBV5-1, TRBJ2-3)
CASSVTSGSTDTQYF

SEQ ID NO: 143927 - protein, 14 aa, Homo sapiens
  CDR3 for alpha chain variable domain of TCR clone 71964 (TRAV1-2, TRAJ16)
CAVNRFSDGQKLLF

SEQ ID NO: 143928 - protein, 16 aa, Homo sapiens
  CDR3 for beta chain variable domain of TCR clone 71964 (TRBV27, TRBJ2-2)
CASSSSGVSNTGELFF

SEQ ID NO: 143929 - protein, 19 aa, Homo sapiens
  CDR3 for alpha chain variable domain of TCR clone 71965 (TRAV4, TRAJ39)
CCVLLPRGPNNNAGNMLTF

SEQ ID NO: 143930 - protein, 13 aa, Homo sapiens
  CDR3 for beta chain variable domain of TCR clone 71965 (TRBV11-2, TRBJ2-5)
CASSSTGEETQYF

SEQ ID NO: 143931 - protein, 15 aa, Homo sapiens
  CDR3 for alpha chain variable domain of TCR clone 71966 (TRAV17, TRAJ37)
CATDGGSSNTGNLIF

SEQ ID NO: 143932 - protein, 15 aa, Homo sapiens
  CDR3 for beta chain variable domain of TCR clone 71966 (TRBV28, TRBJ2-5)
CASSSGRTIQETQYF

SEQ ID NO: 143933 - protein, 15 aa, Homo sapiens
  CDR3 for alpha chain variable domain of TCR clone 71967 (TRAV4, TRAJ39)
CLVGPNNNAGHMLTF

SEQ ID NO: 143934 - protein, 13 aa, Homo sapiens
  CDR3 for beta chain variable domain of TCR clone 71967 (TRBV11-2, TRBJ2-5)
CASSSTGEETQYF

SEQ ID NO: 143935 - protein, 14 aa, Homo sapiens
  CDR3 for alpha chain variable domain of TCR clone 71968 (TRAV16, TRAJ33)
CALSAMDSNYQLIW

SEQ ID NO: 143936 - protein, 14 aa, Homo sapiens
  CDR3 for beta chain variable domain of TCR clone 71968 (TRBV13, TRBJ2-5)
CASSLERVGETQYF

SEQ ID NO: 143937 - protein, 13 aa, Homo sapiens
  CDR3 for alpha chain variable domain of TCR clone 71969 (TRAV1-2, TRAJ9)
CAALNTGGFKTIF

SEQ ID NO: 143938 - protein, 14 aa, Homo sapiens
  CDR3 for beta chain variable domain of TCR clone 71969 (TRBV11-1, TRBJ2-7)
CASSFRQGSYEQYF

SEQ ID NO: 143939 - protein, 15 aa, Homo sapiens
  CDR3 for alpha chain variable domain of TCR clone 71970 (TRAV21, TRAJ13)
CAVRPTSGGYQKVTF

SEQ ID NO: 143940 - protein, 18 aa, Homo sapiens
  CDR3 for beta chain variable domain of TCR clone 71970 (TRBV11-3, TRBJ2-1)
CASSSYPGGRDSYSEQFF

SEQ ID NO: 143941 - protein, 18 aa, Homo sapiens
  CDR3 for alpha chain variable domain of TCR clone 71971 (TRAV16, TRAJ4)
CALSRMFSGGYNKLILEQ

SEQ ID NO: 143942 - protein, 16 aa, Homo sapiens
  CDR3 for beta chain variable domain of TCR clone 71971 (TRBV24-1, TRBJ2-3)
CATSDPGTGATDTQYF

SEQ ID NO: 143943 - protein, 15 aa, Homo sapiens
  CDR3 for alpha chain variable domain of TCR clone 71972 (TRAV3, TRAJ22)
CAVRDQGGSARQLTF

SEQ ID NO: 143944 - protein, 16 aa, Homo sapiens
  CDR3 for beta chain variable domain of TCR clone 71972 (TRBV5-4, TRBJ2-3)
CASQQPGAGGSDTQYF

SEQ ID NO: 143945 - protein, 15 aa, Homo sapiens
  CDR3 for alpha chain variable domain of TCR clone 71973 (TRAV12-3, TRAJ6)
CAMSATTGGSYIPTF

SEQ ID NO: 143946 - protein, 14 aa, Homo sapiens
  CDR3 for beta chain variable domain of TCR clone 71973 (TRBV7-6, TRBJ2-3)
CASSLGTVTDTQYF

SEQ ID NO: 143947 - protein, 15 aa, Homo sapiens
  CDR3 for alpha chain variable domain of TCR clone 71974 (TRAV21, TRAJ40)
CAVRPQTSGTYKYIF

SEQ ID NO: 143948 - protein, 13 aa, Homo sapiens
  CDR3 for beta chain variable domain of TCR clone 71974 (TRBV7-2, TRBJ2-2)
CASSSVRAGELFV

SEQ ID NO: 143949 - protein, 14 aa, Homo sapiens
  CDR3 for alpha chain variable domain of TCR clone 71975 (TRAV26-1, TRAJ21)
CIVRVAHNFNKFYF

SEQ ID NO: 143950 - protein, 16 aa, Homo sapiens
  CDR3 for beta chain variable domain of TCR clone 71975 (TRBV7-3, TRBJ2-1)
CASSLEGYRSYNEQFF

SEQ ID NO: 143951 - protein, 18 aa, Homo sapiens
  CDR3 for alpha chain variable domain of TCR clone 71976 (TRAV26-2, TRAJ54)
CILRDVEVGIQGAQKLVF

SEQ ID NO: 143952 - protein, 16 aa, Homo sapiens
  CDR3 for beta chain variable domain of TCR clone 71976 (TRBV6-1, TRBJ2-5)
CASSDTLDRGAETQYF

SEQ ID NO: 143953 - protein, 14 aa, Homo sapiens
  CDR3 for alpha chain variable domain of TCR clone 71977 (TRAV1-2, TRAJ16)
CAVNRFSDGQKLLF

SEQ ID NO: 143954 - protein, 14 aa, Homo sapiens
  CDR3 for beta chain variable domain of TCR clone 71977 (TRBV5-1, TRBJ1-2)
CASSLGERNYGYTF

SEQ ID NO: 143955 - protein, 13 aa, Homo sapiens
  CDR3 for alpha chain variable domain of TCR clone 71978 (TRAV25, TRAJ26)
CAGMDNYGQNFVF

SEQ ID NO: 143956 - protein, 13 aa, Homo sapiens
  CDR3 for beta chain variable domain of TCR clone 71978 (TRBV19, TRBJ1-1)
CASSFGRNTEAFF

SEQ ID NO: 143957 - protein, 14 aa, Homo sapiens
  CDR3 for alpha chain variable domain of TCR clone 71979 (TRAV1-2, TRAJ16)
CAVNRFSDGQKLLF

SEQ ID NO: 143958 - protein, 16 aa, Homo sapiens
  CDR3 for beta chain variable domain of TCR clone 71979 (TRBV4-2, TRBJ1-1)
CASRPLDGGGDTEAFF

SEQ ID NO: 143959 - protein, 14 aa, Homo sapiens
  CDR3 for alpha chain variable domain of TCR clone 71980 (TRAV12-2, TRAJ45)
CAVYSGGGADGLTF

SEQ ID NO: 143960 - protein, 14 aa, Homo sapiens
  CDR3 for beta chain variable domain of TCR clone 71980 (TRBV7-8, TRBJ2-7)
CASSPRDRVYEQYF

SEQ ID NO: 143961 - protein, 22 aa, Homo sapiens
  CDR3 for alpha chain variable domain of TCR clone 71981 (TRAV25, TRAJ13)
TATQTTDVGTFLDSGGSQKVTF

SEQ ID NO: 143962 - protein, 17 aa, Homo sapiens
  CDR3 for beta chain variable domain of TCR clone 71981 (TRBV2, TRBJ1-6)
CASSLRSGGLMTSPLHF

SEQ ID NO: 143963 - protein, 13 aa, Homo sapiens
  CDR3 for alpha chain variable domain of TCR clone 71982 (TRAV2, TRAJ40)
CAVVTSGTYKYIF

SEQ ID NO: 143964 - protein, 16 aa, Homo sapiens
  CDR3 for beta chain variable domain of TCR clone 71982 (TRBV7-9, TRBJ1-3)
CASGLGAGSSGNTIYF

SEQ ID NO: 143965 - protein, 14 aa, Homo sapiens
  CDR3 for alpha chain variable domain of TCR clone 71983 (TRAV1-2, TRAJ16)
CAVNRFSDGQNLLF

SEQ ID NO: 143966 - protein, 16 aa, Homo sapiens
  CDR3 for beta chain variable domain of TCR clone 71983 (TRBV20-1, TRBJ1-4)
CSAPGQGLLTNEKLFF

SEQ ID NO: 143967 - protein, 12 aa, Homo sapiens
  CDR3 for alpha chain variable domain of TCR clone 71984 (TRAV21, TRAJ49)
CAVRNTGNQFYF

SEQ ID NO: 143968 - protein, 17 aa, Homo sapiens
  CDR3 for beta chain variable domain of TCR clone 71984 (TRBV13, TRBJ2-3)
CASSLSRVAGGRNTQYF

SEQ ID NO: 143969 - protein, 13 aa, Homo sapiens
  CDR3 for alpha chain variable domain of TCR clone 71985 (TRAV8-3, TRAJ36)
CAVGATGANNLFF

SEQ ID NO: 143970 - protein, 16 aa, Homo sapiens
  CDR3 for beta chain variable domain of TCR clone 71985 (TRBV5-4, TRBJ2-3)
CASQQPGAGGADTQYF

SEQ ID NO: 143971 - protein, 13 aa, Homo sapiens
  CDR3 for alpha chain variable domain of TCR clone 71986 (TRAV1-2, TRAJ9)
CAVLNTGGFKTIF

SEQ ID NO: 143972 - protein, 14 aa, Homo sapiens
  CDR3 for beta chain variable domain of TCR clone 71986 (TRBV5-1, TRBJ2-2)
CAGSLGGGSGELFF

SEQ ID NO: 143973 - protein, 13 aa, Homo sapiens
  CDR3 for alpha chain variable domain of TCR clone 71987 (TRAV13-1, TRAJ6)
CAASKGGSYIPTF

SEQ ID NO: 143974 - protein, 14 aa, Homo sapiens
  CDR3 for beta chain variable domain of TCR clone 71987 (TRBV7-2, TRBJ2-1)
CASSLGAGYNEQFF

SEQ ID NO: 143975 - protein, 16 aa, Homo sapiens
  CDR3 for alpha chain variable domain of TCR clone 71988 (TRAV3, TRAJ37)
CAVRGKGSGNTGKLIS

SEQ ID NO: 143976 - protein, 13 aa, Homo sapiens
  CDR3 for beta chain variable domain of TCR clone 71988 (TRBV14, TRBJ2-7)
CASSQDRRYEQYF

SEQ ID NO: 143977 - protein, 12 aa, Homo sapiens
  CDR3 for alpha chain variable domain of TCR clone 71989 (TRAV26-1, TRAJ36)
CIVRVRADNLFF

SEQ ID NO: 143978 - protein, 12 aa, Homo sapiens
  CDR3 for beta chain variable domain of TCR clone 71989 (TRBV6-3, TRBJ2-7)
CASSLTPYEQYF

SEQ ID NO: 143979 - protein, 21 aa, Homo sapiens
  CDR3 for alpha chain variable domain of TCR clone 71990 (TRAV25, TRAJ53)
TATQTTDVGTESGGSNYKLTF

SEQ ID NO: 143980 - protein, 16 aa, Homo sapiens
  CDR3 for beta chain variable domain of TCR clone 71990 (TRBV4-2, TRBJ2-3)
CASSLSSGGHTDTQYF

SEQ ID NO: 143981 - protein, 17 aa, Homo sapiens
  CDR3 for alpha chain variable domain of TCR clone 71991 (TRAV8-6, TRAJ58)
CAVSSWVGETSGSRLTF

SEQ ID NO: 143982 - protein, 13 aa, Homo sapiens
  CDR3 for beta chain variable domain of TCR clone 71991 (TRBV19, TRBJ1-2)
CASSVPGQDGYTF

SEQ ID NO: 143983 - protein, 15 aa, Homo sapiens
  CDR3 for alpha chain variable domain of TCR clone 71992 (TRAV10, TRAJ6)
CVVRPRTGGSYIPTF

SEQ ID NO: 143984 - protein, 15 aa, Homo sapiens
  CDR3 for beta chain variable domain of TCR clone 71992 (TRBV10-3, TRBJ2-3)
CAISLTSGGTDTQYF

SEQ ID NO: 143985 - protein, 14 aa, Homo sapiens
  CDR3 for alpha chain variable domain of TCR clone 71993 (TRAV12-1, TRAJ26)
CVVKGSNYVQNFVF

SEQ ID NO: 143986 - protein, 17 aa, Homo sapiens
  CDR3 for beta chain variable domain of TCR clone 71993 (TRBV11-2, TRBJ2-6)
CASSQRDIFSGANVLTF

SEQ ID NO: 143987 - protein, 14 aa, Homo sapiens
  CDR3 for alpha chain variable domain of TCR clone 71994 (TRAV12-2, TRAJ45)
CAVNIGGGADGLTF

SEQ ID NO: 143988 - protein, 14 aa, Homo sapiens
  CDR3 for beta chain variable domain of TCR clone 71994 (TRBV11-2, TRBJ1-2)
CASSLGTANYGYTF

SEQ ID NO: 143989 - protein, 13 aa, Homo sapiens
  CDR3 for alpha chain variable domain of TCR clone 71995 (TRAV8-3, TRAJ40)
CAVGAQYLRNLQI

SEQ ID NO: 143990 - protein, 14 aa, Homo sapiens
  CDR3 for beta chain variable domain of TCR clone 71995 (TRBV18, TRBJ2-7)
CASSPRGGAYEQYF

SEQ ID NO: 143991 - protein, 13 aa, Homo sapiens
  CDR3 for alpha chain variable domain of TCR clone 71996 (TRAV12-1, TRAJ40)
CVVPTPGTYKYIF

SEQ ID NO: 143992 - protein, 18 aa, Homo sapiens
  CDR3 for beta chain variable domain of TCR clone 71996 (TRBV7-6, TRBJ2-1)
CASSPRTSGMSSYNEQFF

SEQ ID NO: 143993 - protein, 14 aa, Homo sapiens
  CDR3 for alpha chain variable domain of TCR clone 71997 (TRAV23/DV6, TRAJ27)
CAASRDTNAGKSTL

SEQ ID NO: 143994 - protein, 13 aa, Homo sapiens
  CDR3 for beta chain variable domain of TCR clone 71997 (TRBV20-1, TRBJ1-5)
CSASGRGNQPQHF

SEQ ID NO: 143995 - protein, 13 aa, Homo sapiens
  CDR3 for alpha chain variable domain of TCR clone 71998 (TRAV2, TRAJ40)
CAVVTSGTYRYIF

SEQ ID NO: 143996 - protein, 14 aa, Homo sapiens
  CDR3 for beta chain variable domain of TCR clone 71998 (TRBV19, TRBJ2-1)
CASPTFVLSGGQFF

SEQ ID NO: 143997 - protein, 18 aa, Homo sapiens
  CDR3 for alpha chain variable domain of TCR clone 71999 (TRAV26-1, TRAJ23)
CIVRVGLEVWNQGGKLIF

SEQ ID NO: 143998 - protein, 16 aa, Homo sapiens
  CDR3 for beta chain variable domain of TCR clone 71999 (TRBV12-4, TRBJ2-5)
CASSFFVRGRKETQYF

SEQ ID NO: 143999 - protein, 10 aa, Homo sapiens
  CDR3 for alpha chain variable domain of TCR clone 72000 (TRAV1-2, TRAJ31)
CAFFDARLMF

SEQ ID NO: 144000 - protein, 15 aa, Homo sapiens
  CDR3 for beta chain variable domain of TCR clone 72000 (TRBV20-1, TRBJ2-7)
CSARDRVSGMDEQYF

SEQ ID NO: 144001 - protein, 15 aa, Homo sapiens
  CDR3 for alpha chain variable domain of TCR clone 72001 (TRAV12-1, TRAJ3)
CVVSRPNSSASKIIF

SEQ ID NO: 144002 - protein, 12 aa, Homo sapiens
  CDR3 for beta chain variable domain of TCR clone 72001 (TRBV7-8, TRBJ2-7)
CASSLGDREQYF

SEQ ID NO: 144003 - protein, 14 aa, Homo sapiens
  CDR3 for alpha chain variable domain of TCR clone 72002 (TRAV20, TRAJ29)
CAVQAWVENTPLVF

SEQ ID NO: 144004 - protein, 15 aa, Homo sapiens
  CDR3 for beta chain variable domain of TCR clone 72002 (TRBV29-1, TRBJ2-7)
CSVEFFDRGSYEQYF

SEQ ID NO: 144005 - protein, 16 aa, Homo sapiens
  CDR3 for alpha chain variable domain of TCR clone 72003 (TRAV30, TRAJ24)
CGTEVVDADSWGKFKF

SEQ ID NO: 144006 - protein, 14 aa, Homo sapiens
  CDR3 for beta chain variable domain of TCR clone 72003 (TRBV12-5, TRBJ2-5)
CASGSRTHQETQYF

SEQ ID NO: 144007 - protein, 14 aa, Homo sapiens
  CDR3 for alpha chain variable domain of TCR clone 72004 (TRAV1-2, TRAJ16)
CAVNRFSDSQKLLF

SEQ ID NO: 144008 - protein, 13 aa, Homo sapiens
  CDR3 for beta chain variable domain of TCR clone 72004 (TRBV19, TRBJ1-2)
CASSVPGQDGYTF

SEQ ID NO: 144009 - protein, 16 aa, Homo sapiens
  CDR3 for alpha chain variable domain of TCR clone 72005 (TRAV4, TRAJ5)
CLVGPDHGPGQESTYF

SEQ ID NO: 144010 - protein, 15 aa, Homo sapiens
  CDR3 for beta chain variable domain of TCR clone 72005 (TRBV27, TRBJ2-5)
CASSLIPSGGETQYF

SEQ ID NO: 144011 - protein, 12 aa, Homo sapiens
  CDR3 for alpha chain variable domain of TCR clone 72006 (TRAV16, TRAJ10)
CSRTGGGNKLTF

SEQ ID NO: 144012 - protein, 16 aa, Homo sapiens
  CDR3 for beta chain variable domain of TCR clone 72006 (TRBV19, TRBJ2-2)
CASRSPGTGATGELFF

SEQ ID NO: 144013 - protein, 12 aa, Homo sapiens
  CDR3 for alpha chain variable domain of TCR clone 72007 (TRAV10, TRAJ43)
CVVVRVGNDMRF

SEQ ID NO: 144014 - protein, 15 aa, Homo sapiens
  CDR3 for beta chain variable domain of TCR clone 72007 (TRBV2, TRBJ2-7)
CASSGGLARSYEQYF

SEQ ID NO: 144015 - protein, 16 aa, Homo sapiens
  CDR3 for alpha chain variable domain of TCR clone 72008 (TRAV3, TRAJ21)
CAVREIERGNFNKFYF

SEQ ID NO: 144016 - protein, 16 aa, Homo sapiens
  CDR3 for beta chain variable domain of TCR clone 72008 (TRBV12-4, TRBJ1-5)
CASSRPVGGSNQPQHF

SEQ ID NO: 144017 - protein, 14 aa, Homo sapiens
  CDR3 for alpha chain variable domain of TCR clone 72009 (TRAV8-3, TRAJ36)
CAAVGNNGANNLFF

SEQ ID NO: 144018 - protein, 15 aa, Homo sapiens
  CDR3 for beta chain variable domain of TCR clone 72009 (TRBV18, TRBJ1-1)
CASSPRQGENTEAFF

SEQ ID NO: 144019 - protein, 11 aa, Homo sapiens
  CDR3 for alpha chain variable domain of TCR clone 72010 (TRAV21, TRAJ33)
CAVLSNYQLIW

SEQ ID NO: 144020 - protein, 15 aa, Homo sapiens
  CDR3 for beta chain variable domain of TCR clone 72010 (TRBV11-2, TRBJ2-7)
CASSLMVGGSYERYF

SEQ ID NO: 144021 - protein, 13 aa, Homo sapiens
  CDR3 for alpha chain variable domain of TCR clone 72011 (TRAV27, TRAJ42)
CAGARGSQGNLIF

SEQ ID NO: 144022 - protein, 14 aa, Homo sapiens
  CDR3 for beta chain variable domain of TCR clone 72011 (TRBV10-3, TRBJ2-2)
CHQDRQGGHRGAVF

SEQ ID NO: 144023 - protein, 15 aa, Homo sapiens
  CDR3 for alpha chain variable domain of TCR clone 72012 (TRAV12-3, TRAJ6)
CAMSAKSGGSYIPTF

SEQ ID NO: 144024 - protein, 11 aa, Homo sapiens
  CDR3 for beta chain variable domain of TCR clone 72012 (TRBV20-1, TRBJ1-5)
CSAQGDQPQHF

SEQ ID NO: 144025 - protein, 15 aa, Homo sapiens
  CDR3 for alpha chain variable domain of TCR clone 72013 (TRAV1-2, TRAJ17)
CAVRGDGAAGNKLTF

SEQ ID NO: 144026 - protein, 23 aa, Homo sapiens
  CDR3 for beta chain variable domain of TCR clone 72013 (TRBV11-2, TRBJ2-5)
CASSSPGGEGAASRDPVLRARHA

SEQ ID NO: 144027 - protein, 14 aa, Homo sapiens
  CDR3 for alpha chain variable domain of TCR clone 72014 (TRAV8-3, TRAJ9)
CAVVYNTGGFKTIF

SEQ ID NO: 144028 - protein, 14 aa, Homo sapiens
  CDR3 for beta chain variable domain of TCR clone 72014 (TRBV7-3, TRBJ2-2)
CASRSGGYTGELFF

SEQ ID NO: 144029 - protein, 10 aa, Homo sapiens
  CDR3 for alpha chain variable domain of TCR clone 72015 (TRAV12-3, TRAJ49)
CAMNDDQFYF

SEQ ID NO: 144030 - protein, 16 aa, Homo sapiens
  CDR3 for beta chain variable domain of TCR clone 72015 (TRBV12-5, TRBJ2-5)
CASGPRTSGNQETQYF

SEQ ID NO: 144031 - protein, 16 aa, Homo sapiens
  CDR3 for alpha chain variable domain of TCR clone 72016 (TRAV3, TRAJ37)
CAVRGKGSGNTGKLIF

SEQ ID NO: 144032 - protein, 13 aa, Homo sapiens
  CDR3 for beta chain variable domain of TCR clone 72016 (TRBV14, TRBJ2-7)
CAISQDRRYEQYF

SEQ ID NO: 144033 - protein, 12 aa, Homo sapiens
  CDR3 for alpha chain variable domain of TCR clone 72017 (TRAV3, TRAJ31)
CAVRDGNARLMF

SEQ ID NO: 144034 - protein, 15 aa, Homo sapiens
  CDR3 for beta chain variable domain of TCR clone 72017 (TRBV4-1, TRBJ1-4)
CASSDTGGTNEKLFF

SEQ ID NO: 144035 - protein, 13 aa, Homo sapiens
  CDR3 for alpha chain variable domain of TCR clone 72018 (TRAV14/DV4, TRAJ20)
CAMRESNDYKLSF

SEQ ID NO: 144036 - protein, 15 aa, Homo sapiens
  CDR3 for beta chain variable domain of TCR clone 72018 (TRBV7-9, TRBJ1-1)
CASSRPGTANTEAFS

SEQ ID NO: 144037 - protein, 11 aa, Homo sapiens
  CDR3 for alpha chain variable domain of TCR clone 72019 (TRAV13-1, TRAJ39)
CASHAGNMLTF

SEQ ID NO: 144038 - protein, 14 aa, Homo sapiens
  CDR3 for beta chain variable domain of TCR clone 72019 (TRBV7-3, TRBJ2-1)
CASSLAGGTNEQFF

SEQ ID NO: 144039 - protein, 12 aa, Homo sapiens
  CDR3 for alpha chain variable domain of TCR clone 72020 (TRAV21, TRAJ23)
CAVGPQGGKLIF

SEQ ID NO: 144040 - protein, 13 aa, Homo sapiens
  CDR3 for beta chain variable domain of TCR clone 72020 (TRBV20-1, TRBJ2-7)
CSARTGAGYEQYF

SEQ ID NO: 144041 - protein, 14 aa, Homo sapiens
  CDR3 for alpha chain variable domain of TCR clone 72021 (TRAV39, TRAJ48)
CAVVKDFGNEKLTF

SEQ ID NO: 144042 - protein, 12 aa, Homo sapiens
  CDR3 for beta chain variable domain of TCR clone 72021 (TRBV7-9, TRBJ2-7)
CASSIKREEQYF

SEQ ID NO: 144043 - protein, 14 aa, Homo sapiens
  CDR3 for alpha chain variable domain of TCR clone 72022 (TRAV26-1, TRAJ45)
CIEVTGGGADGLTF

SEQ ID NO: 144044 - protein, 13 aa, Homo sapiens
  CDR3 for beta chain variable domain of TCR clone 72022 (TRBV7-6, TRBJ1-2)
CASSLVADYGHTF

SEQ ID NO: 144045 - protein, 13 aa, Homo sapiens
  CDR3 for alpha chain variable domain of TCR clone 72023 (TRAV21, TRAJ27)
CSARPGNAGKSTF

SEQ ID NO: 144046 - protein, 15 aa, Homo sapiens
  CDR3 for beta chain variable domain of TCR clone 72023 (TRBV6-3, TRBJ2-7)
CASSSPGTVFYEQYF

SEQ ID NO: 144047 - protein, 11 aa, Homo sapiens
  CDR3 for alpha chain variable domain of TCR clone 72024 (TRAV2, TRAJ13)
CASGGYQKVTF

SEQ ID NO: 144048 - protein, 15 aa, Homo sapiens
  CDR3 for beta chain variable domain of TCR clone 72024 (TRBV19, TRBJ1-6)
CASSTQGAVGSPLHF

SEQ ID NO: 144049 - protein, 14 aa, Homo sapiens
  CDR3 for alpha chain variable domain of TCR clone 72025 (TRAV12-1, TRAJ9)
CVVNMGTGGFKAIF

SEQ ID NO: 144050 - protein, 12 aa, Homo sapiens
  CDR3 for beta chain variable domain of TCR clone 72025 (TRBV12-4, TRBJ2-7)
CASSLGGYEQYF

SEQ ID NO: 144051 - protein, 13 aa, Homo sapiens
  CDR3 for alpha chain variable domain of TCR clone 72026 (TRAV29/DV5, TRAJ31)
CAASRNNNARLMF

SEQ ID NO: 144052 - protein, 12 aa, Homo sapiens
  CDR3 for beta chain variable domain of TCR clone 72026 (TRBV14, TRBJ2-5)
CASSQLKETQYV

SEQ ID NO: 144053 - protein, 11 aa, Homo sapiens
  CDR3 for alpha chain variable domain of TCR clone 72027 (TRAV3, TRAJ49)
CAPITGNRFYF

SEQ ID NO: 144054 - protein, 16 aa, Homo sapiens
  CDR3 for beta chain variable domain of TCR clone 72027 (TRBV5-1, TRBJ2-3)
CASSVFPMSSTDTQYF

SEQ ID NO: 144055 - protein, 15 aa, Homo sapiens
  CDR3 for alpha chain variable domain of TCR clone 72028 (TRAV3, TRAJ5)
CAVRDLYTGRRALTF

SEQ ID NO: 144056 - protein, 15 aa, Homo sapiens
  CDR3 for beta chain variable domain of TCR clone 72028 (TRBV20-1, TRBJ2-7)
CSARDRVSGMDEQYF

SEQ ID NO: 144057 - protein, 13 aa, Homo sapiens
  CDR3 for alpha chain variable domain of TCR clone 72029 (TRAV27, TRAJ54)
CAGAGQGAKKLVF

SEQ ID NO: 144058 - protein, 15 aa, Homo sapiens
  CDR3 for beta chain variable domain of TCR clone 72029 (TRBV18, TRBJ2-6)
CASSPSYAGANVLTF

SEQ ID NO: 144059 - protein, 14 aa, Homo sapiens
  CDR3 for alpha chain variable domain of TCR clone 72030 (TRAV1-2, TRAJ16)
CAVNRFSDGQKLLF

SEQ ID NO: 144060 - protein, 12 aa, Homo sapiens
  CDR3 for beta chain variable domain of TCR clone 72030 (TRBV28, TRBJ2-6)
CAIQAGANALTF

SEQ ID NO: 144061 - protein, 17 aa, Homo sapiens
  CDR3 for alpha chain variable domain of TCR clone 72031 (TRAV3, TRAJ6)
CAVRDGPRAGGSYIPPF

SEQ ID NO: 144062 - protein, 13 aa, Homo sapiens
  CDR3 for beta chain variable domain of TCR clone 72031 (TRBV19, TRBJ2-7)
CASSIDRTYEQYF

SEQ ID NO: 144063 - protein, 13 aa, Homo sapiens
  CDR3 for alpha chain variable domain of TCR clone 72032 (TRAV12-1, TRAJ9)
CVVLNTGGFKTIL

SEQ ID NO: 144064 - protein, 13 aa, Homo sapiens
  CDR3 for beta chain variable domain of TCR clone 72032 (TRBV20-1, TRBJ1-1)
CSARGGGNTEAFF

SEQ ID NO: 144065 - protein, 13 aa, Homo sapiens
  CDR3 for alpha chain variable domain of TCR clone 72033 (TRAV13-1, TRAJ48)
CAAASFGNEKLTF

SEQ ID NO: 144066 - protein, 14 aa, Homo sapiens
  CDR3 for beta chain variable domain of TCR clone 72033 (TRBV18, TRBJ2-1)
CASSPGTSETGQFF

SEQ ID NO: 144067 - protein, 16 aa, Homo sapiens
  CDR3 for alpha chain variable domain of TCR clone 72034 (TRAV16, TRAJ42)
CARKMNYGGSQGNLIF

SEQ ID NO: 144068 - protein, 15 aa, Homo sapiens
  CDR3 for beta chain variable domain of TCR clone 72034 (TRBV20-1, TRBJ2-7)
CSAREERDSLYEQYF

SEQ ID NO: 144069 - protein, 15 aa, Homo sapiens
  CDR3 for alpha chain variable domain of TCR clone 72035 (TRAV3, TRAJ42)
CAVRGGTGSQGDLIF

SEQ ID NO: 144070 - protein, 14 aa, Homo sapiens
  CDR3 for beta chain variable domain of TCR clone 72035 (TRBV19, TRBJ1-2)
CASSSLFARDVYTF

SEQ ID NO: 144071 - protein, 14 aa, Homo sapiens
  CDR3 for alpha chain variable domain of TCR clone 72036 (TRAV8-4, TRAJ54)
CAVGEVLGAQKLVF

SEQ ID NO: 144072 - protein, 13 aa, Homo sapiens
  CDR3 for beta chain variable domain of TCR clone 72036 (TRBV27, TRBJ2-7)
CASSFVSSYEQYF

SEQ ID NO: 144073 - protein, 14 aa, Homo sapiens
  CDR3 for alpha chain variable domain of TCR clone 72037 (TRAV12-2, TRAJ17)
CAVLFKAAGNKLTF

SEQ ID NO: 144074 - protein, 13 aa, Homo sapiens
  CDR3 for beta chain variable domain of TCR clone 72037 (TRBV24-1, TRBJ2-2)
CATSDWSTGELFF

SEQ ID NO: 144075 - protein, 13 aa, Homo sapiens
  CDR3 for alpha chain variable domain of TCR clone 72038 (TRAV35, TRAJ43)
CAGCPYNNNDMRF

SEQ ID NO: 144076 - protein, 15 aa, Homo sapiens
  CDR3 for beta chain variable domain of TCR clone 72038 (TRBV25-1, TRBJ1-4)
CASSKRIATNEKLFF

SEQ ID NO: 144077 - protein, 16 aa, Homo sapiens
  CDR3 for alpha chain variable domain of TCR clone 72039 (TRAV30, TRAJ24)
CGTAIVDADSWGNFQF

SEQ ID NO: 144078 - protein, 14 aa, Homo sapiens
  CDR3 for beta chain variable domain of TCR clone 72039 (TRBV12-5, TRBJ2-5)
CASGSRTHQETQYF

SEQ ID NO: 144079 - protein, 12 aa, Homo sapiens
  CDR3 for alpha chain variable domain of TCR clone 72040 (TRAV38-1, TRAJ47)
CAFETYGNKLIF

SEQ ID NO: 144080 - protein, 15 aa, Homo sapiens
  CDR3 for beta chain variable domain of TCR clone 72040 (TRBV20-1, TRBJ2-7)
CSARKGLAESYEQYF

SEQ ID NO: 144081 - protein, 15 aa, Homo sapiens
  CDR3 for alpha chain variable domain of TCR clone 72041 (TRAV3, TRAJ32)
CAVSSYGGATNKLIF

SEQ ID NO: 144082 - protein, 13 aa, Homo sapiens
  CDR3 for beta chain variable domain of TCR clone 72041 (TRBV20-1, TRBJ2-7)
CSARPSTNYERYF

SEQ ID NO: 144083 - protein, 13 aa, Homo sapiens
  CDR3 for alpha chain variable domain of TCR clone 72042 (TRAV8-4, TRAJ37)
CAAPSGNTGKLIF

SEQ ID NO: 144084 - protein, 13 aa, Homo sapiens
  CDR3 for beta chain variable domain of TCR clone 72042 (TRBV12-4, TRBJ1-2)
CASSLRQGKGYTF

SEQ ID NO: 144085 - protein, 15 aa, Homo sapiens
  CDR3 for alpha chain variable domain of TCR clone 72043 (TRAV13-2, TRAJ23)
CAERGFYNQGGKLNF

SEQ ID NO: 144086 - protein, 14 aa, Homo sapiens
  CDR3 for beta chain variable domain of TCR clone 72043 (TRBV4-1, TRBJ2-3)
CASSQDWSTDTQYF

SEQ ID NO: 144087 - protein, 15 aa, Homo sapiens
  CDR3 for alpha chain variable domain of TCR clone 72044 (TRAV26-2, TRAJ45)
CILRDRVDQEEVLTD

SEQ ID NO: 144088 - protein, 15 aa, Homo sapiens
  CDR3 for beta chain variable domain of TCR clone 72044 (TRBV7-6, TRBJ2-5)
CASSKPTGPQGTQYF

SEQ ID NO: 144089 - protein, 12 aa, Homo sapiens
  CDR3 for alpha chain variable domain of TCR clone 72045 (TRAV12-3, TRAJ17)
CAMTLTGNKLTF

SEQ ID NO: 144090 - protein, 15 aa, Homo sapiens
  CDR3 for beta chain variable domain of TCR clone 72045 (TRBV20-1, TRBJ2-7)
CSAGGRVSGMDEQYF

SEQ ID NO: 144091 - protein, 15 aa, Homo sapiens
  CDR3 for alpha chain variable domain of TCR clone 72046 (TRAV21, TRAJ24)
CAARSSTDSWGKLQF

SEQ ID NO: 144092 - protein, 15 aa, Homo sapiens
  CDR3 for beta chain variable domain of TCR clone 72046 (TRBV5-1, TRBJ2-1)
CASSPPRATYNEQFF

SEQ ID NO: 144093 - protein, 14 aa, Homo sapiens
  CDR3 for alpha chain variable domain of TCR clone 72047 (TRAV1-2, TRAJ16)
CAVNRFSDGQKLPF

SEQ ID NO: 144094 - protein, 14 aa, Homo sapiens
  CDR3 for beta chain variable domain of TCR clone 72047 (TRBV7-3, TRBJ1-1)
CASSLGTGYTEAFF

SEQ ID NO: 144095 - protein, 12 aa, Homo sapiens
  CDR3 for alpha chain variable domain of TCR clone 72048 (TRAV16, TRAJ10)
CSRTGGGNKLTF

SEQ ID NO: 144096 - protein, 15 aa, Homo sapiens
  CDR3 for beta chain variable domain of TCR clone 72048 (TRBV6-3, TRBJ2-7)
CASSSPGIVFYEQYF

SEQ ID NO: 144097 - protein, 13 aa, Homo sapiens
  CDR3 for alpha chain variable domain of TCR clone 72049 (TRAV13-1, TRAJ21)
CAASIYNFNKFCF

SEQ ID NO: 144098 - protein, 13 aa, Homo sapiens
  CDR3 for beta chain variable domain of TCR clone 72049 (TRBV27, TRBJ1-4)
CASSLMGDEKLFF

SEQ ID NO: 144099 - protein, 15 aa, Homo sapiens
  CDR3 for alpha chain variable domain of TCR clone 72050 (TRAV2, TRAJ3)
CAVEDAYSSASKIIF

SEQ ID NO: 144100 - protein, 12 aa, Homo sapiens
  CDR3 for beta chain variable domain of TCR clone 72050 (TRBV11-2, TRBJ2-2)
CASSLGGGELFF

SEQ ID NO: 144101 - protein, 23 aa, Homo sapiens
  CDR3 for alpha chain variable domain of TCR clone 72051 (TRAV26-1, )
CIADTAGNNHIQNPDPAVYQLRD

SEQ ID NO: 144102 - protein, 13 aa, Homo sapiens
  CDR3 for beta chain variable domain of TCR clone 72051 (TRBV20-1, TRBJ1-1)
CSARGGGNTEAFF

SEQ ID NO: 144103 - protein, 16 aa, Homo sapiens
  CDR3 for alpha chain variable domain of TCR clone 72052 (TRAV8-3, TRAJ44)
CAVGTLMTGTASKITF

SEQ ID NO: 144104 - protein, 13 aa, Homo sapiens
  CDR3 for beta chain variable domain of TCR clone 72052 (TRBV11-2, TRBJ2-1)
CASSLRLTHEQFF

SEQ ID NO: 144105 - protein, 14 aa, Homo sapiens
  CDR3 for alpha chain variable domain of TCR clone 72053 (TRAV8-1, TRAJ4)
CAVKFSGGYNKLIL

SEQ ID NO: 144106 - protein, 22 aa, Homo sapiens
  CDR3 for beta chain variable domain of TCR clone 72053 (TRBV7-3, TRBJ2-5)
CASARDRVILRPRDPVLRARHA

SEQ ID NO: 144107 - protein, 14 aa, Homo sapiens
  CDR3 for alpha chain variable domain of TCR clone 72054 (TRAV13-1, TRAJ44)
CAAKATGTASKLTI

SEQ ID NO: 144108 - protein, 17 aa, Homo sapiens
  CDR3 for beta chain variable domain of TCR clone 72054 (TRBV7-3, TRBJ2-3)
CASSLMKRMRGADTQYF

SEQ ID NO: 144109 - protein, 12 aa, Homo sapiens
  CDR3 for alpha chain variable domain of TCR clone 72055 (TRAV12-3, TRAJ17)
CAMTLTGNKLTF

SEQ ID NO: 144110 - protein, 17 aa, Homo sapiens
  CDR3 for beta chain variable domain of TCR clone 72055 (TRBV7-9, TRBJ2-7)
CASSFDGSRGGAYEQYF

SEQ ID NO: 144111 - protein, 12 aa, Homo sapiens
  CDR3 for alpha chain variable domain of TCR clone 72056 (TRAV2, TRAJ9)
CAVDTGGFKTIF

SEQ ID NO: 144112 - protein, 13 aa, Homo sapiens
  CDR3 for beta chain variable domain of TCR clone 72056 (TRBV7-9, TRBJ1-2)
CASSLKQNYGYTF

SEQ ID NO: 144113 - protein, 13 aa, Homo sapiens
  CDR3 for alpha chain variable domain of TCR clone 72057 (TRAV27, TRAJ23)
CAGVLPKVGKLIF

SEQ ID NO: 144114 - protein, 14 aa, Homo sapiens
  CDR3 for beta chain variable domain of TCR clone 72057 (TRBV5-8, TRBJ2-3)
CASSLSPSTDTQYF

SEQ ID NO: 144115 - protein, 11 aa, Homo sapiens
  CDR3 for alpha chain variable domain of TCR clone 72058 (TRAV12-1, TRAJ30)
CVVNGQDKIIF

SEQ ID NO: 144116 - protein, 15 aa, Homo sapiens
  CDR3 for beta chain variable domain of TCR clone 72058 (TRBV27, TRBJ2-2)
CTSVPANSSPGRCFF

SEQ ID NO: 144117 - protein, 19 aa, Homo sapiens
  CDR3 for alpha chain variable domain of TCR clone 72059 (TRAV26-1, TRAJ28)
CIVRVAHAYSGAGSYQLTF

SEQ ID NO: 144118 - protein, 15 aa, Homo sapiens
  CDR3 for beta chain variable domain of TCR clone 72059 (TRBV5-1, TRBJ1-3)
CASSSKTGAGNTMYF

SEQ ID NO: 144119 - protein, 16 aa, Homo sapiens
  CDR3 for alpha chain variable domain of TCR clone 72060 (TRAV1-2, TRAJ10)
CAVRGVLTGGGNKLTF

SEQ ID NO: 144120 - protein, 12 aa, Homo sapiens
  CDR3 for beta chain variable domain of TCR clone 72060 (TRBV7-8, TRBJ2-7)
CASSLGDREQDF

SEQ ID NO: 144121 - protein, 17 aa, Homo sapiens
  CDR3 for alpha chain variable domain of TCR clone 72061 (TRAV8-2, TRAJ17)
CVVSDRRFKAAGNKLSF

SEQ ID NO: 144122 - protein, 18 aa, Homo sapiens
  CDR3 for beta chain variable domain of TCR clone 72061 (TRBV7-9, TRBJ2-7)
CASSLTTSGSRTWYEQYF

SEQ ID NO: 144123 - protein, 12 aa, Homo sapiens
  CDR3 for alpha chain variable domain of TCR clone 72062 (TRAV35, TRAJ30)
CAGLNRDDKIIF

SEQ ID NO: 144124 - protein, 15 aa, Homo sapiens
  CDR3 for beta chain variable domain of TCR clone 72062 (TRBV18, TRBJ2-3)
CASSPLAEETDTQYF

SEQ ID NO: 144125 - protein, 16 aa, Homo sapiens
  CDR3 for alpha chain variable domain of TCR clone 72063 (TRAV26-1, TRAJ22)
CIVRVHSSGSARQLTF

SEQ ID NO: 144126 - protein, 18 aa, Homo sapiens
  CDR3 for beta chain variable domain of TCR clone 72063 (TRBV7-2, TRBJ2-3)
CASSLKREGSGITDTQYF

SEQ ID NO: 144127 - protein, 13 aa, Homo sapiens
  CDR3 for alpha chain variable domain of TCR clone 72064 (TRAV2, TRAJ10)
CAVEPGGGNKLTF

SEQ ID NO: 144128 - protein, 14 aa, Homo sapiens
  CDR3 for beta chain variable domain of TCR clone 72064 (TRBV20-1, TRBJ2-3)
CSAGGRRGTDTQYF

SEQ ID NO: 144129 - protein, 15 aa, Homo sapiens
  CDR3 for alpha chain variable domain of TCR clone 72065 (TRAV17, TRAJ57)
CATGPSQGGSEKLVF

SEQ ID NO: 144130 - protein, 15 aa, Homo sapiens
  CDR3 for beta chain variable domain of TCR clone 72065 (TRBV6-3, TRBJ2-7)
CAGSSPGTVFYEQYF

SEQ ID NO: 144131 - protein, 13 aa, Homo sapiens
  CDR3 for alpha chain variable domain of TCR clone 72066 (TRAV2, TRAJ5)
CAVPDTGRRALTS

SEQ ID NO: 144132 - protein, 15 aa, Homo sapiens
  CDR3 for beta chain variable domain of TCR clone 72066 (TRBV7-2, TRBJ2-2)
CASSTRTGYTGELFF

SEQ ID NO: 144133 - protein, 16 aa, Homo sapiens
  CDR3 for alpha chain variable domain of TCR clone 72067 (TRAV27, TRAJ53)
CAAHEGSGGSNYKLTF

SEQ ID NO: 144134 - protein, 14 aa, Homo sapiens
  CDR3 for beta chain variable domain of TCR clone 72067 (TRBV4-3, TRBJ1-5)
CASSQGGQGWPQHF

SEQ ID NO: 144135 - protein, 16 aa, Homo sapiens
  CDR3 for alpha chain variable domain of TCR clone 72068 (TRAV3, TRAJ28)
FAVLPRSGAGSYQLTF

SEQ ID NO: 144136 - protein, 13 aa, Homo sapiens
  CDR3 for beta chain variable domain of TCR clone 72068 (TRBV12-4, TRBJ2-5)
CASRLAVQETQYF

SEQ ID NO: 144137 - protein, 14 aa, Homo sapiens
  CDR3 for alpha chain variable domain of TCR clone 72069 (TRAV17, TRAJ56)
CATVPAGANSKLTF

SEQ ID NO: 144138 - protein, 13 aa, Homo sapiens
  CDR3 for beta chain variable domain of TCR clone 72069 (TRBV7-9, TRBJ2-7)
CASSFAGAYEQYF

SEQ ID NO: 144139 - protein, 16 aa, Homo sapiens
  CDR3 for alpha chain variable domain of TCR clone 72070 (TRAV3, TRAJ37)
YAVRGKGSGNTGKLIF

SEQ ID NO: 144140 - protein, 15 aa, Homo sapiens
  CDR3 for beta chain variable domain of TCR clone 72070 (TRBV13, TRBJ1-2)
CASSLGRQPGYGYTF

SEQ ID NO: 144141 - protein, 13 aa, Homo sapiens
  CDR3 for alpha chain variable domain of TCR clone 72071 (TRAV3, TRAJ21)
CVVREPDFNKFYF

SEQ ID NO: 144142 - protein, 13 aa, Homo sapiens
  CDR3 for beta chain variable domain of TCR clone 72071 (TRBV9, TRBJ2-1)
CASSPSGGNEQFF

SEQ ID NO: 144143 - protein, 14 aa, Homo sapiens
  CDR3 for alpha chain variable domain of TCR clone 72072 (TRAV2, TRAJ41)
CAVWTSNSGYALNF

SEQ ID NO: 144144 - protein, 13 aa, Homo sapiens
  CDR3 for beta chain variable domain of TCR clone 72072 (TRBV4-1, TRBJ2-1)
CASSQEVQYEQFF

SEQ ID NO: 144145 - protein, 14 aa, Homo sapiens
  CDR3 for alpha chain variable domain of TCR clone 72073 (TRAV16, TRAJ54)
CALSGVQGAQKLVF

SEQ ID NO: 144146 - protein, 15 aa, Homo sapiens
  CDR3 for beta chain variable domain of TCR clone 72073 (TRBV18, TRBJ2-2)
CASSTSGLHTGELLF

SEQ ID NO: 144147 - protein, 13 aa, Homo sapiens
  CDR3 for alpha chain variable domain of TCR clone 72074 (TRAV17, TRAJ13)
CATDSGGYQKVTS

SEQ ID NO: 144148 - protein, 14 aa, Homo sapiens
  CDR3 for beta chain variable domain of TCR clone 72074 (TRBV6-1, TRBJ1-1)
CASTPLQMNTEAFF

SEQ ID NO: 144149 - protein, 12 aa, Homo sapiens
  CDR3 for alpha chain variable domain of TCR clone 72075 (TRAV12-3, TRAJ20)
CAMVRGDYKLSF

SEQ ID NO: 144150 - protein, 14 aa, Homo sapiens
  CDR3 for beta chain variable domain of TCR clone 72075 (TRBV5-5, TRBJ1-5)
CARSGQGVDQPQHF

SEQ ID NO: 144151 - protein, 14 aa, Homo sapiens
  CDR3 for alpha chain variable domain of TCR clone 72076 (TRAV26-1, TRAJ48)
CIVRVGFGNEKLTF

SEQ ID NO: 144152 - protein, 13 aa, Homo sapiens
  CDR3 for beta chain variable domain of TCR clone 72076 (TRBV11-3, TRBJ2-3)
CASSHDTRDTQYF

SEQ ID NO: 144153 - protein, 14 aa, Homo sapiens
  CDR3 for alpha chain variable domain of TCR clone 72077 (TRAV1-2, TRAJ15)
CAVRDMQAGTALIF

SEQ ID NO: 144154 - protein, 15 aa, Homo sapiens
  CDR3 for beta chain variable domain of TCR clone 72077 (TRBV7-2, TRBJ2-1)
CASSLASGRVNEQFF

SEQ ID NO: 144155 - protein, 13 aa, Homo sapiens
  CDR3 for alpha chain variable domain of TCR clone 72078 (TRAV13-1, TRAJ21)
CAASIYNFNRFYF

SEQ ID NO: 144156 - protein, 13 aa, Homo sapiens
  CDR3 for beta chain variable domain of TCR clone 72078 (TRBV27, TRBJ1-4)
CASSLMGDEKLFF

SEQ ID NO: 144157 - protein, 12 aa, Homo sapiens
  CDR3 for alpha chain variable domain of TCR clone 72079 (TRAV12-3, TRAJ42)
CAPGGSQGNLIF

SEQ ID NO: 144158 - protein, 15 aa, Homo sapiens
  CDR3 for beta chain variable domain of TCR clone 72079 (TRBV20-1, TRBJ2-7)
CSARDRVSGMDEQYF

SEQ ID NO: 144159 - protein, 13 aa, Homo sapiens
  CDR3 for alpha chain variable domain of TCR clone 72080 (TRAV12-2, TRAJ9)
CAVKWAGGFKTIF

SEQ ID NO: 144160 - protein, 13 aa, Homo sapiens
  CDR3 for beta chain variable domain of TCR clone 72080 (TRBV12-4, TRBJ1-2)
CASSSGPNYGYTF

SEQ ID NO: 144161 - protein, 14 aa, Homo sapiens
  CDR3 for alpha chain variable domain of TCR clone 72081 (TRAV8-3, TRAJ4)
CAVGAAGGYNKLIF

SEQ ID NO: 144162 - protein, 12 aa, Homo sapiens
  CDR3 for beta chain variable domain of TCR clone 72081 (TRBV7-8, TRBJ2-7)
CASSLGDREQYF

SEQ ID NO: 144163 - protein, 14 aa, Homo sapiens
  CDR3 for alpha chain variable domain of TCR clone 72082 (TRAV1-2, TRAJ8)
CSVREDTGFQKLVF

SEQ ID NO: 144164 - protein, 14 aa, Homo sapiens
  CDR3 for beta chain variable domain of TCR clone 72082 (TRBV11-2, TRBJ2-3)
CASSRLARTDTQYF

SEQ ID NO: 144165 - protein, 12 aa, Homo sapiens
  CDR3 for alpha chain variable domain of TCR clone 72083 (TRAV3, TRAJ43)
CAVRDTNNDMRF

SEQ ID NO: 144166 - protein, 15 aa, Homo sapiens
  CDR3 for beta chain variable domain of TCR clone 72083 (TRBV27, TRBJ1-5)
CASSLGTGFDQPQHF

SEQ ID NO: 144167 - protein, 16 aa, Homo sapiens
  CDR3 for alpha chain variable domain of TCR clone 72084 (TRAV12-3, TRAJ53)
CAMSPGSGGSNYKLTF

SEQ ID NO: 144168 - protein, 13 aa, Homo sapiens
  CDR3 for beta chain variable domain of TCR clone 72084 (TRBV24-1, TRBJ2-1)
CATSAGPYNEQFF

SEQ ID NO: 144169 - protein, 11 aa, Homo sapiens
  CDR3 for alpha chain variable domain of TCR clone 72085 (TRAV16, TRAJ31)
CALFSNARLMF

SEQ ID NO: 144170 - protein, 15 aa, Homo sapiens
  CDR3 for beta chain variable domain of TCR clone 72085 (TRBV18, TRBJ1-1)
CASSPRQGENTEAFF

SEQ ID NO: 144171 - protein, 15 aa, Homo sapiens
  CDR3 for alpha chain variable domain of TCR clone 72086 (TRAV17, TRAJ16)
CATALRFSDGQKLLF

SEQ ID NO: 144172 - protein, 15 aa, Homo sapiens
  CDR3 for beta chain variable domain of TCR clone 72086 (TRBV20-1, TRBJ1-1)
CSASRGVAGNTEAFF

SEQ ID NO: 144173 - protein, 12 aa, Homo sapiens
  CDR3 for alpha chain variable domain of TCR clone 72087 (TRAV8-3, TRAJ43)
CAVGAGNNDMRF

SEQ ID NO: 144174 - protein, 14 aa, Homo sapiens
  CDR3 for beta chain variable domain of TCR clone 72087 (TRBV4-2, TRBJ1-5)
CASSRDRGNQTQHF

SEQ ID NO: 144175 - protein, 14 aa, Homo sapiens
  CDR3 for alpha chain variable domain of TCR clone 72088 (TRAV29/DV5, TRAJ36)
CAARRKTGANNLFF

SEQ ID NO: 144176 - protein, 14 aa, Homo sapiens
  CDR3 for beta chain variable domain of TCR clone 72088 (TRBV15, TRBJ2-5)
CATSIRGLGETQYF

SEQ ID NO: 144177 - protein, 16 aa, Homo sapiens
  CDR3 for alpha chain variable domain of TCR clone 72089 (TRAV30, TRAJ24)
CGTEIVDADSWGKFQF

SEQ ID NO: 144178 - protein, 15 aa, Homo sapiens
  CDR3 for beta chain variable domain of TCR clone 72089 (TRBV18, TRBJ2-1)
CASSPPSASYNEQFF

SEQ ID NO: 144179 - protein, 14 aa, Homo sapiens
  CDR3 for alpha chain variable domain of TCR clone 72090 (TRAV14/DV4, TRAJ20)
CAMREGYNDYKLNF

SEQ ID NO: 144180 - protein, 15 aa, Homo sapiens
  CDR3 for beta chain variable domain of TCR clone 72090 (TRBV28, TRBJ2-7)
CASSLISGGSYEQYF

SEQ ID NO: 144181 - protein, 14 aa, Homo sapiens
  CDR3 for alpha chain variable domain of TCR clone 72091 (TRAV12-2, TRAJ13)
CAVKKTGGYQKVTF

SEQ ID NO: 144182 - protein, 13 aa, Homo sapiens
  CDR3 for beta chain variable domain of TCR clone 72091 (TRBV19, TRBJ2-2)
CASSPLGIGELFF

SEQ ID NO: 144183 - protein, 22 aa, Homo sapiens
  CDR3 for alpha chain variable domain of TCR clone 72092 (TRAV4, )
CLVGPHNYDIQNPDPAVYQLRD

SEQ ID NO: 144184 - protein, 17 aa, Homo sapiens
  CDR3 for beta chain variable domain of TCR clone 72092 (TRBV24-1, TRBJ2-1)
CATSDVSTSGTYNEQFS

SEQ ID NO: 144185 - protein, 14 aa, Homo sapiens
  CDR3 for alpha chain variable domain of TCR clone 72093 (TRAV1-2, TRAJ16)
CAVNRFSDVQKLLF

SEQ ID NO: 144186 - protein, 16 aa, Homo sapiens
  CDR3 for beta chain variable domain of TCR clone 72093 (TRBV12-5, TRBJ2-5)
CASGPRTSGNQETQYF

SEQ ID NO: 144187 - protein, 15 aa, Homo sapiens
  CDR3 for alpha chain variable domain of TCR clone 72094 (TRAV17, TRAJ16)
CATALRFSDGQKLLF

SEQ ID NO: 144188 - protein, 12 aa, Homo sapiens
  CDR3 for beta chain variable domain of TCR clone 72094 (TRBV2, TRBJ2-7)
CDSSDPDYEQYF

SEQ ID NO: 144189 - protein, 14 aa, Homo sapiens
  CDR3 for alpha chain variable domain of TCR clone 72095 (TRAV9-2, TRAJ39)
CALYIYNAGNMLTF

SEQ ID NO: 144190 - protein, 17 aa, Homo sapiens
  CDR3 for beta chain variable domain of TCR clone 72095 (TRBV7-8, TRBJ1-2)
CASSLRPLQGHLYGYTF

SEQ ID NO: 144191 - protein, 14 aa, Homo sapiens
  CDR3 for alpha chain variable domain of TCR clone 72096 (TRAV21, TRAJ45)
CAVSSGGGADGLTF

SEQ ID NO: 144192 - protein, 16 aa, Homo sapiens
  CDR3 for beta chain variable domain of TCR clone 72096 (TRBV20-1, TRBJ1-4)
CSAPGQGLLTNEKLFF

SEQ ID NO: 144193 - protein, 13 aa, Homo sapiens
  CDR3 for alpha chain variable domain of TCR clone 72097 (TRAV12-1, TRAJ40)
CVVPTSGTYKYIF

SEQ ID NO: 144194 - protein, 18 aa, Homo sapiens
  CDR3 for beta chain variable domain of TCR clone 72097 (TRBV7-6, TRBJ2-1)
CASSPRNSGMSSYNEQFF

SEQ ID NO: 144195 - protein, 10 aa, Homo sapiens
  CDR3 for alpha chain variable domain of TCR clone 72098 (TRAV36/DV7, TRAJ48)
CAVGSEKLTF

SEQ ID NO: 144196 - protein, 15 aa, Homo sapiens
  CDR3 for beta chain variable domain of TCR clone 72098 (TRBV6-5, TRBJ1-4)
CASSSVGGAGEKLFF

SEQ ID NO: 144197 - protein, 13 aa, Homo sapiens
  CDR3 for alpha chain variable domain of TCR clone 72099 (TRAV27, TRAJ54)
CAGAGQGAQKLVF

SEQ ID NO: 144198 - protein, 14 aa, Homo sapiens
  CDR3 for beta chain variable domain of TCR clone 72099 (TRBV6-3, TRBJ1-1)
CASSYHSKNTEAFF

SEQ ID NO: 144199 - protein, 12 aa, Homo sapiens
  CDR3 for alpha chain variable domain of TCR clone 72100 (TRAV16, TRAJ56)
CSPTGANSKLTF

SEQ ID NO: 144200 - protein, 17 aa, Homo sapiens
  CDR3 for beta chain variable domain of TCR clone 72100 (TRBV27, TRBJ2-6)
CASSLTGFASGANVLTF

SEQ ID NO: 144201 - protein, 18 aa, Homo sapiens
  CDR3 for alpha chain variable domain of TCR clone 72101 (TRAV26-1, TRAJ52)
CIFRVEGAGGTSYGKLTF

SEQ ID NO: 144202 - protein, 13 aa, Homo sapiens
  CDR3 for beta chain variable domain of TCR clone 72101 (TRBV7-3, TRBJ1-2)
CASSLKRGYGYTF

SEQ ID NO: 144203 - protein, 14 aa, Homo sapiens
  CDR3 for alpha chain variable domain of TCR clone 72102 (TRAV26-1, TRAJ38)
CIADNAGNNRKLIW

SEQ ID NO: 144204 - protein, 16 aa, Homo sapiens
  CDR3 for beta chain variable domain of TCR clone 72102 (TRBV20-1, TRBJ2-7)
CSASTSGRLSSCEQYF

SEQ ID NO: 144205 - protein, 16 aa, Homo sapiens
  CDR3 for alpha chain variable domain of TCR clone 72103 (TRAV3, TRAJ18)
CAVRDGRGSTLGRLYF

SEQ ID NO: 144206 - protein, 15 aa, Homo sapiens
  CDR3 for beta chain variable domain of TCR clone 72103 (TRBV7-9, TRBJ1-6)
CASSAPGRGNSPLHF

SEQ ID NO: 144207 - protein, 14 aa, Homo sapiens
  CDR3 for alpha chain variable domain of TCR clone 72104 (TRAV3, TRAJ7)
CAVREEERGQQTRF

SEQ ID NO: 144208 - protein, 12 aa, Homo sapiens
  CDR3 for beta chain variable domain of TCR clone 72104 (TRBV7-8, TRBJ2-7)
CASSLGDREQYF

SEQ ID NO: 144209 - protein, 14 aa, Homo sapiens
  CDR3 for alpha chain variable domain of TCR clone 72105 (TRAV23/DV6, TRAJ57)
CAASNQGGPEKLVF

SEQ ID NO: 144210 - protein, 13 aa, Homo sapiens
  CDR3 for beta chain variable domain of TCR clone 72105 (TRBV11-2, TRBJ2-7)
CASSSYPSYEQYF

SEQ ID NO: 144211 - protein, 16 aa, Homo sapiens
  CDR3 for alpha chain variable domain of TCR clone 72106 (TRAV16, TRAJ52)
CALSAAGGTSYGKLTF

SEQ ID NO: 144212 - protein, 12 aa, Homo sapiens
  CDR3 for beta chain variable domain of TCR clone 72106 (TRBV12-4, TRBJ1-3)
CASSFSGDTIYL

SEQ ID NO: 144213 - protein, 15 aa, Homo sapiens
  CDR3 for alpha chain variable domain of TCR clone 72107 (TRAV26-1, TRAJ22)
CIVRVSFWFCKATDL

SEQ ID NO: 144214 - protein, 15 aa, Homo sapiens
  CDR3 for beta chain variable domain of TCR clone 72107 (TRBV28, TRBJ2-1)
CASSIIAGGRSEQFF

SEQ ID NO: 144215 - protein, 15 aa, Homo sapiens
  CDR3 for alpha chain variable domain of TCR clone 72108 (TRAV17, TRAJ28)
CATVDSGAGSYQLTF

SEQ ID NO: 144216 - protein, 13 aa, Homo sapiens
  CDR3 for beta chain variable domain of TCR clone 72108 (TRBV5-4, TRBJ2-5)
CASSRQEGETQYL

SEQ ID NO: 144217 - protein, 15 aa, Homo sapiens
  CDR3 for alpha chain variable domain of TCR clone 72109 (TRAV3, TRAJ13)
CAVRVYSGGYQKVTF

SEQ ID NO: 144218 - protein, 15 aa, Homo sapiens
  CDR3 for beta chain variable domain of TCR clone 72109 (TRBV7-2, TRBJ2-3)
CASGLVVRGPDTQYF

SEQ ID NO: 144219 - protein, 13 aa, Homo sapiens
  CDR3 for alpha chain variable domain of TCR clone 72110 (TRAV12-2, TRAJ4)
CAGFSGGYNKLVF

SEQ ID NO: 144220 - protein, 14 aa, Homo sapiens
  CDR3 for beta chain variable domain of TCR clone 72110 (TRBV24-1, TRBJ1-1)
CATSIPRGDTEAFF

SEQ ID NO: 144221 - protein, 13 aa, Homo sapiens
  CDR3 for alpha chain variable domain of TCR clone 72111 (TRAV1-1, TRAJ31)
CASYLTNNARLMF

SEQ ID NO: 144222 - protein, 13 aa, Homo sapiens
  CDR3 for beta chain variable domain of TCR clone 72111 (TRBV15, TRBJ1-6)
CATSGGLNSPLHF

SEQ ID NO: 144223 - protein, 14 aa, Homo sapiens
  CDR3 for alpha chain variable domain of TCR clone 72112 (TRAV23/DV6, TRAJ13)
CAAGYSGGYQKVTF

SEQ ID NO: 144224 - protein, 16 aa, Homo sapiens
  CDR3 for beta chain variable domain of TCR clone 72112 (TRBV5-7, TRBJ2-3)
CASSSVSGLRSDTQYF

SEQ ID NO: 144225 - protein, 12 aa, Homo sapiens
  CDR3 for alpha chain variable domain of TCR clone 72113 (TRAV1-1, TRAJ9)
CAVDTGGFKTIF

SEQ ID NO: 144226 - protein, 12 aa, Homo sapiens
  CDR3 for beta chain variable domain of TCR clone 72113 (TRBV5-1, TRBJ2-1)
CASIGGYNEQFF

SEQ ID NO: 144227 - protein, 14 aa, Homo sapiens
  CDR3 for alpha chain variable domain of TCR clone 72114 (TRAV1-2, TRAJ16)
CAVNRFSDGQKLLF

SEQ ID NO: 144228 - protein, 11 aa, Homo sapiens
  CDR3 for beta chain variable domain of TCR clone 72114 (TRBV7-2, TRBJ2-3)
CASSSSDTQYF

SEQ ID NO: 144229 - protein, 13 aa, Homo sapiens
  CDR3 for alpha chain variable domain of TCR clone 72115 (TRAV2, TRAJ40)
CAMVTSGTYKYIF

SEQ ID NO: 144230 - protein, 16 aa, Homo sapiens
  CDR3 for beta chain variable domain of TCR clone 72115 (TRBV7-9, TRBJ1-3)
CASSLGAGSSGNTIYF

SEQ ID NO: 144231 - protein, 13 aa, Homo sapiens
  CDR3 for alpha chain variable domain of TCR clone 72116 (TRAV8-3, TRAJ28)
CAVGAVGSYQLTF

SEQ ID NO: 144232 - protein, 17 aa, Homo sapiens
  CDR3 for beta chain variable domain of TCR clone 72116 (TRBV7-3, TRBJ2-3)
CASSLMKRMRGADTQYF

SEQ ID NO: 144233 - protein, 18 aa, Homo sapiens
  CDR3 for alpha chain variable domain of TCR clone 72117 (TRAV17, TRAJ45)
CATSLDLYSGGGADGLTF

SEQ ID NO: 144234 - protein, 13 aa, Homo sapiens
  CDR3 for beta chain variable domain of TCR clone 72117 (TRBV6-1, TRBJ2-1)
CASSAYTAGEPFF

SEQ ID NO: 144235 - protein, 14 aa, Homo sapiens
  CDR3 for alpha chain variable domain of TCR clone 72118 (TRAV3, TRAJ21)
CAVESQPNFNKFYF

SEQ ID NO: 144236 - protein, 18 aa, Homo sapiens
  CDR3 for beta chain variable domain of TCR clone 72118 (TRBV7-9, TRBJ2-1)
CASSLAVSGTSGRNEQFF

SEQ ID NO: 144237 - protein, 14 aa, Homo sapiens
  CDR3 for alpha chain variable domain of TCR clone 72119 (TRAV23/DV6, TRAJ40)
CAASLTSGTYKYIF

SEQ ID NO: 144238 - protein, 13 aa, Homo sapiens
  CDR3 for beta chain variable domain of TCR clone 72119 (TRBV7-3, TRBJ1-1)
CASSQDWGAEAFF

SEQ ID NO: 144239 - protein, 14 aa, Homo sapiens
  CDR3 for alpha chain variable domain of TCR clone 72120 (TRAV12-1, TRAJ13)
CVVIDSGGYQKVTF

SEQ ID NO: 144240 - protein, 12 aa, Homo sapiens
  CDR3 for beta chain variable domain of TCR clone 72120 (TRBV29-1, TRBJ2-3)
CSVTGGADTQCF

SEQ ID NO: 144241 - protein, 18 aa, Homo sapiens
  CDR3 for alpha chain variable domain of TCR clone 72121 (TRAV21, TRAJ52)
CAVGPSPAGGTSYGKLTF

SEQ ID NO: 144242 - protein, 15 aa, Homo sapiens
  CDR3 for beta chain variable domain of TCR clone 72121 (TRBV19, TRBJ1-1)
CASTSGQIQNTEAFF

SEQ ID NO: 144243 - protein, 13 aa, Homo sapiens
  CDR3 for alpha chain variable domain of TCR clone 72122 (TRAV8-6, TRAJ24)
CAVSPDSWGNCSL

SEQ ID NO: 144244 - protein, 14 aa, Homo sapiens
  CDR3 for beta chain variable domain of TCR clone 72122 (TRBV7-2, TRBJ2-7)
CASSPKTSFYEQYF

SEQ ID NO: 144245 - protein, 14 aa, Homo sapiens
  CDR3 for alpha chain variable domain of TCR clone 72123 (TRAV12-2, TRAJ13)
CAVKKTGGYQKVTF

SEQ ID NO: 144246 - protein, 14 aa, Homo sapiens
  CDR3 for beta chain variable domain of TCR clone 72123 (TRBV25-1, TRBJ1-1)
CASTHLGGSTEAFF

SEQ ID NO: 144247 - protein, 15 aa, Homo sapiens
  CDR3 for alpha chain variable domain of TCR clone 72124 (TRAV12-1, TRAJ44)
CVVFVNTGTASKLTF

SEQ ID NO: 144248 - protein, 17 aa, Homo sapiens
  CDR3 for beta chain variable domain of TCR clone 72124 (TRBV7-8, TRBJ2-6)
CASSAGTGGDGANVLTF

SEQ ID NO: 144249 - protein, 12 aa, Homo sapiens
  CDR3 for alpha chain variable domain of TCR clone 72125 (TRAV21, TRAJ58)
CALSASGSRLTF

SEQ ID NO: 144250 - protein, 20 aa, Homo sapiens
  CDR3 for beta chain variable domain of TCR clone 72125 (TRBV4-1, TRBJ2-2)
CASSQASPPGLASNTGELFF

SEQ ID NO: 144251 - protein, 16 aa, Homo sapiens
  CDR3 for alpha chain variable domain of TCR clone 72126 (TRAV23/DV6, TRAJ22)
CAASSRGSRFCEATDL

SEQ ID NO: 144252 - protein, 15 aa, Homo sapiens
  CDR3 for beta chain variable domain of TCR clone 72126 (TRBV10-3, TRBJ2-3)
CAIDTSGRRTDTQYF

SEQ ID NO: 144253 - protein, 12 aa, Homo sapiens
  CDR3 for alpha chain variable domain of TCR clone 72127 (TRAV13-2, TRAJ48)
CRDGLWNEKLTF

SEQ ID NO: 144254 - protein, 15 aa, Homo sapiens
  CDR3 for beta chain variable domain of TCR clone 72127 (TRBV7-9, TRBJ1-6)
CASSSPGRGNSPLHF

SEQ ID NO: 144255 - protein, 14 aa, Homo sapiens
  CDR3 for alpha chain variable domain of TCR clone 72128 (TRAV26-1, TRAJ45)
CIEVTGGGADGLTF

SEQ ID NO: 144256 - protein, 14 aa, Homo sapiens
  CDR3 for beta chain variable domain of TCR clone 72128 (TRBV28, TRBJ2-1)
CASSYYTAYNEQFF

SEQ ID NO: 144257 - protein, 13 aa, Homo sapiens
  CDR3 for alpha chain variable domain of TCR clone 72129 (TRAV29/DV5, TRAJ47)
CAASAEYGNKLVF

SEQ ID NO: 144258 - protein, 15 aa, Homo sapiens
  CDR3 for beta chain variable domain of TCR clone 72129 (TRBV10-3, TRBJ2-1)
CHQWSGDGGGGEQFF

SEQ ID NO: 144259 - protein, 13 aa, Homo sapiens
  CDR3 for alpha chain variable domain of TCR clone 72130 (TRAV21, TRAJ21)
CAVRTSTNFTLDL

SEQ ID NO: 144260 - protein, 15 aa, Homo sapiens
  CDR3 for beta chain variable domain of TCR clone 72130 (TRBV6-3, TRBJ2-7)
CASSSPGTVFYEQYF

SEQ ID NO: 144261 - protein, 22 aa, Homo sapiens
  CDR3 for alpha chain variable domain of TCR clone 72131 (TRAV2, TRAJ10)
ILQVREADAAVYYTGGGNKLTF

SEQ ID NO: 144262 - protein, 12 aa, Homo sapiens
  CDR3 for beta chain variable domain of TCR clone 72131 (TRBV5-1, TRBJ2-1)
CASIGGYNEQFF

SEQ ID NO: 144263 - protein, 10 aa, Homo sapiens
  CDR3 for alpha chain variable domain of TCR clone 72132 (TRAV14/DV4, TRAJ32)
PLTPTNKLIF

SEQ ID NO: 144264 - protein, 14 aa, Homo sapiens
  CDR3 for beta chain variable domain of TCR clone 72132 (TRBV24-1, TRBJ1-5)
CATSDGQLGQPQHF

SEQ ID NO: 144265 - protein, 18 aa, Homo sapiens
  CDR3 for alpha chain variable domain of TCR clone 72133 (TRAV2, TRAJ32)
CCLLLCFHYDGATNKLIF

SEQ ID NO: 144266 - protein, 16 aa, Homo sapiens
  CDR3 for beta chain variable domain of TCR clone 72133 (TRBV7-9, TRBJ2-7)
CASSYPDREGGYEQYF

SEQ ID NO: 144267 - protein, 11 aa, Homo sapiens
  CDR3 for alpha chain variable domain of TCR clone 72134 (TRAV29/DV5, TRAJ47)
CAATYGNKLVF

SEQ ID NO: 144268 - protein, 17 aa, Homo sapiens
  CDR3 for beta chain variable domain of TCR clone 72134 (TRBV7-9, TRBJ2-1)
CASSLVASCPSYNEQFF

SEQ ID NO: 144269 - protein, 13 aa, Homo sapiens
  CDR3 for alpha chain variable domain of TCR clone 72135 (TRAV12-2, TRAJ20)
CAVYPSNDYKLSF

SEQ ID NO: 144270 - protein, 15 aa, Homo sapiens
  CDR3 for beta chain variable domain of TCR clone 72135 (TRBV18, TRBJ1-2)
CASSPGNGLGYGYTL

SEQ ID NO: 144271 - protein, 15 aa, Homo sapiens
  CDR3 for alpha chain variable domain of TCR clone 72136 (TRAV12-1, TRAJ10)
CVVNKLTGGGNKLTF

SEQ ID NO: 144272 - protein, 17 aa, Homo sapiens
  CDR3 for beta chain variable domain of TCR clone 72136 (TRBV5-1, TRBJ1-6)
CASSPSLQGSDNSPLLF

SEQ ID NO: 144273 - protein, 15 aa, Homo sapiens
  CDR3 for alpha chain variable domain of TCR clone 72137 (TRAV3, TRAJ36)
CAVRASQTGANNLFF

SEQ ID NO: 144274 - protein, 14 aa, Homo sapiens
  CDR3 for beta chain variable domain of TCR clone 72137 (TRBV6-1, TRBJ2-2)
CASRELAYTGELFF

SEQ ID NO: 144275 - protein, 13 aa, Homo sapiens
  CDR3 for alpha chain variable domain of TCR clone 72138 (TRAV12-3, TRAJ7)
CAMTPYGNNRLAF

SEQ ID NO: 144276 - protein, 17 aa, Homo sapiens
  CDR3 for beta chain variable domain of TCR clone 72138 (TRBV24-1, TRBJ2-1)
CATSDVSTSGTYNEQFF

SEQ ID NO: 144277 - protein, 16 aa, Homo sapiens
  CDR3 for alpha chain variable domain of TCR clone 72139 (TRAV8-3, TRAJ44)
CAVGPLNTGTASKPTF

SEQ ID NO: 144278 - protein, 18 aa, Homo sapiens
  CDR3 for beta chain variable domain of TCR clone 72139 (TRBV3-1, TRBJ2-1)
CASSQDLPGRPLFDEQFF

SEQ ID NO: 144279 - protein, 13 aa, Homo sapiens
  CDR3 for alpha chain variable domain of TCR clone 72140 (TRAV35, TRAJ21)
CAGQLSNFDKFYF

SEQ ID NO: 144280 - protein, 11 aa, Homo sapiens
  CDR3 for beta chain variable domain of TCR clone 72140 (TRBV7-6, TRBJ2-5)
CASSSQETQYF

SEQ ID NO: 144281 - protein, 13 aa, Homo sapiens
  CDR3 for alpha chain variable domain of TCR clone 72141 (TRAV8-3, TRAJ43)
CAVGIYNNNDMRF

SEQ ID NO: 144282 - protein, 15 aa, Homo sapiens
  CDR3 for beta chain variable domain of TCR clone 72141 (TRBV7-2, TRBJ2-7)
CASSLNAQGAYEQYF

SEQ ID NO: 144283 - protein, 12 aa, Homo sapiens
  CDR3 for alpha chain variable domain of TCR clone 72142 (TRAV12-3, TRAJ20)
CAMVRGDYKLSF

SEQ ID NO: 144284 - protein, 14 aa, Homo sapiens
  CDR3 for beta chain variable domain of TCR clone 72142 (TRBV6-1, TRBJ1-3)
CASVQGGGGNTIYF

SEQ ID NO: 144285 - protein, 12 aa, Homo sapiens
  CDR3 for alpha chain variable domain of TCR clone 72143 (TRAV26-1, TRAJ35)
CIGLSFGNVLHC

SEQ ID NO: 144286 - protein, 16 aa, Homo sapiens
  CDR3 for beta chain variable domain of TCR clone 72143 (TRBV11-3, TRBJ2-5)
CQQPPRGPGGKETQYF

SEQ ID NO: 144287 - protein, 12 aa, Homo sapiens
  CDR3 for alpha chain variable domain of TCR clone 72144 (TRAV12-3, TRAJ17)
CAMTLTGNKLTF

SEQ ID NO: 144288 - protein, 13 aa, Homo sapiens
  CDR3 for beta chain variable domain of TCR clone 72144 (TRBV10-3, TRBJ2-7)
CASKLSVNYEQYF

SEQ ID NO: 144289 - protein, 13 aa, Homo sapiens
  CDR3 for alpha chain variable domain of TCR clone 72145 (TRAV2, TRAJ20)
CAVEGPSEYTLSF

SEQ ID NO: 144290 - protein, 16 aa, Homo sapiens
  CDR3 for beta chain variable domain of TCR clone 72145 (TRBV25-1, TRBJ2-7)
CASSELTGGGIYEQYF

SEQ ID NO: 144291 - protein, 13 aa, Homo sapiens
  CDR3 for alpha chain variable domain of TCR clone 72146 (TRAV2, TRAJ26)
CAVVGNYGQNFVF

SEQ ID NO: 144292 - protein, 14 aa, Homo sapiens
  CDR3 for beta chain variable domain of TCR clone 72146 (TRBV6-5, TRBJ2-2)
CTSTEGQETGELFF

SEQ ID NO: 144293 - protein, 17 aa, Homo sapiens
  CDR3 for alpha chain variable domain of TCR clone 72147 (TRAV3, TRAJ42)
CAVRDRDYGGSQGNPIF

SEQ ID NO: 144294 - protein, 15 aa, Homo sapiens
  CDR3 for beta chain variable domain of TCR clone 72147 (TRBV4-1, TRBJ1-4)
CASSDTGGTNEKLFF

SEQ ID NO: 144295 - protein, 14 aa, Homo sapiens
  CDR3 for alpha chain variable domain of TCR clone 72148 (TRAV3, TRAJ36)
CAVRDGTGANNLFF

SEQ ID NO: 144296 - protein, 16 aa, Homo sapiens
  CDR3 for beta chain variable domain of TCR clone 72148 (TRBV20-1, TRBJ2-6)
CSARGGPGVGANVLTF

SEQ ID NO: 144297 - protein, 16 aa, Homo sapiens
  CDR3 for alpha chain variable domain of TCR clone 72149 (TRAV20, TRAJ22)
CAVQASSSGSARQLTF

SEQ ID NO: 144298 - protein, 14 aa, Homo sapiens
  CDR3 for beta chain variable domain of TCR clone 72149 (TRBV4-1, TRBJ2-7)
CASSQDREHVEQYF

SEQ ID NO: 144299 - protein, 12 aa, Homo sapiens
  CDR3 for alpha chain variable domain of TCR clone 72150 (TRAV25, TRAJ53)
CQSGGSNYKLTF

SEQ ID NO: 144300 - protein, 15 aa, Homo sapiens
  CDR3 for beta chain variable domain of TCR clone 72150 (TRBV5-1, TRBJ2-2)
CASSWTSPNIGELFF

SEQ ID NO: 144301 - protein, 13 aa, Homo sapiens
  CDR3 for alpha chain variable domain of TCR clone 72151 (TRAV8-3, TRAJ36)
CAVGATGANNLFF

SEQ ID NO: 144302 - protein, 15 aa, Homo sapiens
  CDR3 for beta chain variable domain of TCR clone 72151 (TRBV7-2, TRBJ1-2)
CASSPRAGWNYVYTF

SEQ ID NO: 144303 - protein, 16 aa, Homo sapiens
  CDR3 for alpha chain variable domain of TCR clone 72152 (TRAV30, TRAJ24)
CGTEIVDADSWGKSQF

SEQ ID NO: 144304 - protein, 15 aa, Homo sapiens
  CDR3 for beta chain variable domain of TCR clone 72152 (TRBV12-4, TRBJ2-7)
CASSQRASGNYEQYF

SEQ ID NO: 144305 - protein, 12 aa, Homo sapiens
  CDR3 for alpha chain variable domain of TCR clone 72153 (TRAV13-1, TRAJ21)
CAAKEGFNKFYF

SEQ ID NO: 144306 - protein, 14 aa, Homo sapiens
  CDR3 for beta chain variable domain of TCR clone 72153 (TRBV5-4, TRBJ1-1)
CASSLDSRRDDAFF

SEQ ID NO: 144307 - protein, 11 aa, Homo sapiens
  CDR3 for alpha chain variable domain of TCR clone 72154 (TRAV12-1, TRAJ33)
CVVNMNYQLIW

SEQ ID NO: 144308 - protein, 15 aa, Homo sapiens
  CDR3 for beta chain variable domain of TCR clone 72154 (TRBV2, TRBJ2-3)
CASSDFEKATDTQYF

SEQ ID NO: 144309 - protein, 12 aa, Homo sapiens
  CDR3 for alpha chain variable domain of TCR clone 72155 (TRAV12-2, TRAJ10)
WGVTGGGNKLTF

SEQ ID NO: 144310 - protein, 12 aa, Homo sapiens
  CDR3 for beta chain variable domain of TCR clone 72155 (TRBV11-2, TRBJ2-1)
CASSPGNNEQFF

SEQ ID NO: 144311 - protein, 13 aa, Homo sapiens
  CDR3 for alpha chain variable domain of TCR clone 72156 (TRAV2, TRAJ21)
CAVEDLNFNKFYF

SEQ ID NO: 144312 - protein, 14 aa, Homo sapiens
  CDR3 for beta chain variable domain of TCR clone 72156 (TRBV7-2, TRBJ2-7)
CASSPKTSFYEQYF

SEQ ID NO: 144313 - protein, 15 aa, Homo sapiens
  CDR3 for alpha chain variable domain of TCR clone 72157 (TRAV12-3, TRAJ27)
CAMRAYNTNAGKSTF

SEQ ID NO: 144314 - protein, 13 aa, Homo sapiens
  CDR3 for beta chain variable domain of TCR clone 72157 (TRBV11-2, TRBJ2-5)
CASSRVPSETQYF

SEQ ID NO: 144315 - protein, 18 aa, Homo sapiens
  CDR3 for alpha chain variable domain of TCR clone 72158 (TRAV21, TRAJ52)
CAVRSSPAGGTSYGKLTF

SEQ ID NO: 144316 - protein, 13 aa, Homo sapiens
  CDR3 for beta chain variable domain of TCR clone 72158 (TRBV5-7, TRBJ2-6)
CASTSSGANVLTF

SEQ ID NO: 144317 - protein, 12 aa, Homo sapiens
  CDR3 for alpha chain variable domain of TCR clone 72159 (TRAV1-1, TRAJ30)
CAVRGRDDKIIF

SEQ ID NO: 144318 - protein, 12 aa, Homo sapiens
  CDR3 for beta chain variable domain of TCR clone 72159 (TRBV11-2, TRBJ2-2)
CASSLGGGELFF

SEQ ID NO: 144319 - protein, 13 aa, Homo sapiens
  CDR3 for alpha chain variable domain of TCR clone 72160 (TRAV21, TRAJ37)
CAVSSGNTGKLIF

SEQ ID NO: 144320 - protein, 13 aa, Homo sapiens
  CDR3 for beta chain variable domain of TCR clone 72160 (TRBV7-2, TRBJ2-2)
CASSLAVTGELFF

SEQ ID NO: 144321 - protein, 17 aa, Homo sapiens
  CDR3 for alpha chain variable domain of TCR clone 72161 (TRAV3, TRAJ38)
CAVRDCLNAGNNLKLIW

SEQ ID NO: 144322 - protein, 14 aa, Homo sapiens
  CDR3 for beta chain variable domain of TCR clone 72161 (TRBV5-5, TRBJ1-5)
CASSGQGVDQPQHF

SEQ ID NO: 144323 - protein, 14 aa, Homo sapiens
  CDR3 for alpha chain variable domain of TCR clone 72162 (TRAV38-1, TRAJ40)
CALRPTSGTYKYIF

SEQ ID NO: 144324 - protein, 14 aa, Homo sapiens
  CDR3 for beta chain variable domain of TCR clone 72162 (TRBV25-1, TRBJ1-1)
CASTHLGGNTVAFF

SEQ ID NO: 144325 - protein, 16 aa, Homo sapiens
  CDR3 for alpha chain variable domain of TCR clone 72163 (TRAV16, TRAJ52)
CALSAAGGTSYGELTF

SEQ ID NO: 144326 - protein, 17 aa, Homo sapiens
  CDR3 for beta chain variable domain of TCR clone 72163 (TRBV11-2, TRBJ2-1)
CASSLYPPGVEYNEQFF

SEQ ID NO: 144327 - protein, 13 aa, Homo sapiens
  CDR3 for alpha chain variable domain of TCR clone 72164 (TRAV3, TRAJ27)
CDVRPLGAGKSTF

SEQ ID NO: 144328 - protein, 13 aa, Homo sapiens
  CDR3 for beta chain variable domain of TCR clone 72164 (TRBV7-9, TRBJ2-3)
CASSPGSTDTQYF

SEQ ID NO: 144329 - protein, 15 aa, Homo sapiens
  CDR3 for alpha chain variable domain of TCR clone 72165 (TRAV3, TRAJ22)
CAVRDRGGSARQLTF

SEQ ID NO: 144330 - protein, 13 aa, Homo sapiens
  CDR3 for beta chain variable domain of TCR clone 72165 (TRBV5-7, TRBJ1-1)
CASSLFQNTEAFF

SEQ ID NO: 144331 - protein, 13 aa, Homo sapiens
  CDR3 for alpha chain variable domain of TCR clone 72166 (TRAV12-3, TRAJ9)
CAMRNTGGFKTIF

SEQ ID NO: 144332 - protein, 14 aa, Homo sapiens
  CDR3 for beta chain variable domain of TCR clone 72166 (TRBV11-2, TRBJ2-7)
CASSYTGEGYEQYF

SEQ ID NO: 144333 - protein, 15 aa, Homo sapiens
  CDR3 for alpha chain variable domain of TCR clone 72167 (TRAV17, TRAJ37)
CATDHGSSNTGKLIF

SEQ ID NO: 144334 - protein, 14 aa, Homo sapiens
  CDR3 for beta chain variable domain of TCR clone 72167 (TRBV7-2, TRBJ2-3)
CASSRTSGADTQYL

SEQ ID NO: 144335 - protein, 11 aa, Homo sapiens
  CDR3 for alpha chain variable domain of TCR clone 72168 (TRAV8-3, TRAJ18)
CAVGGRQRLNP

SEQ ID NO: 144336 - protein, 12 aa, Homo sapiens
  CDR3 for beta chain variable domain of TCR clone 72168 (TRBV28, TRBJ2-6)
CAIQAGANGLTF

SEQ ID NO: 144337 - protein, 14 aa, Homo sapiens
  CDR3 for alpha chain variable domain of TCR clone 72169 (TRAV12-1, TRAJ17)
CVVNPKAAGNKLTF

SEQ ID NO: 144338 - protein, 15 aa, Homo sapiens
  CDR3 for beta chain variable domain of TCR clone 72169 (TRBV19, TRBJ1-1)
CASSKTGSTNTEAFF

SEQ ID NO: 144339 - protein, 12 aa, Homo sapiens
  CDR3 for alpha chain variable domain of TCR clone 72170 (TRAV12-3, TRAJ17)
CAMTLTGNKLTF

SEQ ID NO: 144340 - protein, 15 aa, Homo sapiens
  CDR3 for beta chain variable domain of TCR clone 72170 (TRBV20-1, TRBJ2-7)
CSARDRVSGMAEQYF

SEQ ID NO: 144341 - protein, 14 aa, Homo sapiens
  CDR3 for alpha chain variable domain of TCR clone 72171 (TRAV3, TRAJ9)
CAVRLNTGGFKTIF

SEQ ID NO: 144342 - protein, 15 aa, Homo sapiens
  CDR3 for beta chain variable domain of TCR clone 72171 (TRBV7-2, TRBJ2-1)
CASSLASDRVNEQFF

SEQ ID NO: 144343 - protein, 16 aa, Homo sapiens
  CDR3 for alpha chain variable domain of TCR clone 72172 (TRAV8-3, TRAJ44)
CAVGASNTVTASKLTF

SEQ ID NO: 144344 - protein, 15 aa, Homo sapiens
  CDR3 for beta chain variable domain of TCR clone 72172 (TRBV27, TRBJ1-5)
CASTFNRGSNQPQHF

SEQ ID NO: 144345 - protein, 15 aa, Homo sapiens
  CDR3 for alpha chain variable domain of TCR clone 72173 (TRAV2, TRAJ24)
CAVEVLTDSWGKFQV

SEQ ID NO: 144346 - protein, 14 aa, Homo sapiens
  CDR3 for beta chain variable domain of TCR clone 72173 (TRBV19, TRBJ2-1)
CASSMGSGRRSSSS

SEQ ID NO: 144347 - protein, 14 aa, Homo sapiens
  CDR3 for alpha chain variable domain of TCR clone 72174 (TRAV17, TRAJ56)
CATVPAGANSKLPF

SEQ ID NO: 144348 - protein, 13 aa, Homo sapiens
  CDR3 for beta chain variable domain of TCR clone 72174 (TRBV12-4, TRBJ2-2)
CASSITGSGELFF

SEQ ID NO: 144349 - protein, 11 aa, Homo sapiens
  CDR3 for alpha chain variable domain of TCR clone 72175 (TRAV3, TRAJ13)
CAVTRYQKVTF

SEQ ID NO: 144350 - protein, 15 aa, Homo sapiens
  CDR3 for beta chain variable domain of TCR clone 72175 (TRBV7-9, TRBJ2-7)
CASSSSGLAVYEQYF

SEQ ID NO: 144351 - protein, 11 aa, Homo sapiens
  CDR3 for alpha chain variable domain of TCR clone 72176 (TRAV16, TRAJ26)
CALSGKLWSEF

SEQ ID NO: 144352 - protein, 13 aa, Homo sapiens
  CDR3 for beta chain variable domain of TCR clone 72176 (TRBV19, TRBJ1-1)
CASSPSNGGEAFF

SEQ ID NO: 144353 - protein, 15 aa, Homo sapiens
  CDR3 for alpha chain variable domain of TCR clone 72177 (TRAV12-3, TRAJ6)
CAMSATSGGSYIPTF

SEQ ID NO: 144354 - protein, 14 aa, Homo sapiens
  CDR3 for beta chain variable domain of TCR clone 72177 (TRBV19, TRBJ2-1)
CASRGDPTGNEQFF

SEQ ID NO: 144355 - protein, 14 aa, Homo sapiens
  CDR3 for alpha chain variable domain of TCR clone 72178 (TRAV12-2, TRAJ17)
CAVLFKAAGNKLTF

SEQ ID NO: 144356 - protein, 12 aa, Homo sapiens
  CDR3 for beta chain variable domain of TCR clone 72178 (TRBV11-2, TRBJ2-2)
CASSLGGWELFF

SEQ ID NO: 144357 - protein, 14 aa, Homo sapiens
  CDR3 for alpha chain variable domain of TCR clone 72179 (TRAV4, TRAJ13)
CLVGCSGGYQKVTF

SEQ ID NO: 144358 - protein, 13 aa, Homo sapiens
  CDR3 for beta chain variable domain of TCR clone 72179 (TRBV18, TRBJ1-1)
CASSGGRNTEAFF

SEQ ID NO: 144359 - protein, 13 aa, Homo sapiens
  CDR3 for alpha chain variable domain of TCR clone 72180 (TRAV27, TRAJ45)
CRSSGGGADGLTF

SEQ ID NO: 144360 - protein, 17 aa, Homo sapiens
  CDR3 for beta chain variable domain of TCR clone 72180 (TRBV28, TRBJ2-7)
CASSPLHRASGVYEQYF

SEQ ID NO: 144361 - protein, 13 aa, Homo sapiens
  CDR3 for alpha chain variable domain of TCR clone 72181 (TRAV1-2, TRAJ23)
CAVRDRQGGKLIF

SEQ ID NO: 144362 - protein, 16 aa, Homo sapiens
  CDR3 for beta chain variable domain of TCR clone 72181 (TRBV7-9, TRBJ2-3)
CASSPWREVGTDTQYF

SEQ ID NO: 144363 - protein, 14 aa, Homo sapiens
  CDR3 for alpha chain variable domain of TCR clone 72182 (TRAV12-3, TRAJ54)
CAMRGIQGAQKLVF

SEQ ID NO: 144364 - protein, 15 aa, Homo sapiens
  CDR3 for beta chain variable domain of TCR clone 72182 (TRBV7-2, TRBJ2-1)
CASSSGLAGGNEQFF

SEQ ID NO: 144365 - protein, 16 aa, Homo sapiens
  CDR3 for alpha chain variable domain of TCR clone 72183 (TRAV38-1, TRAJ37)
CAFKGDGSSNTGKLIF

SEQ ID NO: 144366 - protein, 13 aa, Homo sapiens
  CDR3 for beta chain variable domain of TCR clone 72183 (TRBV12-4, TRBJ2-5)
CASSLVRRETQYF

SEQ ID NO: 144367 - protein, 11 aa, Homo sapiens
  CDR3 for alpha chain variable domain of TCR clone 72184 (TRAV2, TRAJ33)
CAVESNYQLIW

SEQ ID NO: 144368 - protein, 17 aa, Homo sapiens
  CDR3 for beta chain variable domain of TCR clone 72184 (TRBV28, TRBJ2-5)
CASSRQGGLAGAETQYF

SEQ ID NO: 144369 - protein, 13 aa, Homo sapiens
  CDR3 for alpha chain variable domain of TCR clone 72185 (TRAV13-2, TRAJ53)
CAENMGSNYKLTF

SEQ ID NO: 144370 - protein, 15 aa, Homo sapiens
  CDR3 for beta chain variable domain of TCR clone 72185 (TRBV6-3, TRBJ2-7)
CASSSPGTVFYEQYF

SEQ ID NO: 144371 - protein, 11 aa, Homo sapiens
  CDR3 for alpha chain variable domain of TCR clone 72186 (TRAV21, TRAJ34)
CAHYNTDKLIF

SEQ ID NO: 144372 - protein, 13 aa, Homo sapiens
  CDR3 for beta chain variable domain of TCR clone 72186 (TRBV7-6, TRBJ1-2)
CGSSLVADYGYTF

SEQ ID NO: 144373 - protein, 16 aa, Homo sapiens
  CDR3 for alpha chain variable domain of TCR clone 72187 (TRAV26-2, TRAJ57)
CILRDVGSGGSEKLVF

SEQ ID NO: 144374 - protein, 13 aa, Homo sapiens
  CDR3 for beta chain variable domain of TCR clone 72187 (TRBV18, TRBJ2-3)
CASSPGVIDTQYF

SEQ ID NO: 144375 - protein, 17 aa, Homo sapiens
  CDR3 for alpha chain variable domain of TCR clone 72188 (TRAV3, TRAJ42)
CAVRDRDYGGSQENLIF

SEQ ID NO: 144376 - protein, 13 aa, Homo sapiens
  CDR3 for beta chain variable domain of TCR clone 72188 (TRBV20-1, TRBJ2-5)
CSARRGTGATQYF

SEQ ID NO: 144377 - protein, 18 aa, Homo sapiens
  CDR3 for alpha chain variable domain of TCR clone 72189 (TRAV21, TRAJ52)
CAVRPSPAGGTSYGKLTF

SEQ ID NO: 144378 - protein, 12 aa, Homo sapiens
  CDR3 for beta chain variable domain of TCR clone 72189 (TRBV7-2, TRBJ1-6)
CASSLSSSPLHF

SEQ ID NO: 144379 - protein, 12 aa, Homo sapiens
  CDR3 for alpha chain variable domain of TCR clone 72190 (TRAV12-2, TRAJ10)
WGFTGGGNKLTF

SEQ ID NO: 144380 - protein, 16 aa, Homo sapiens
  CDR3 for beta chain variable domain of TCR clone 72190 (TRBV6-4, TRBJ1-2)
CASSEAVGDPNYGYTF

SEQ ID NO: 144381 - protein, 13 aa, Homo sapiens
  CDR3 for alpha chain variable domain of TCR clone 72191 (TRAV13-1, TRAJ33)
CAASRAGNYQLVW

SEQ ID NO: 144382 - protein, 12 aa, Homo sapiens
  CDR3 for beta chain variable domain of TCR clone 72191 (TRBV11-2, TRBJ1-2)
CASSREGDGYTF

SEQ ID NO: 144383 - protein, 14 aa, Homo sapiens
  CDR3 for alpha chain variable domain of TCR clone 72192 (TRAV1-2, TRAJ16)
CAVNRFSDGQKLLF

SEQ ID NO: 144384 - protein, 14 aa, Homo sapiens
  CDR3 for beta chain variable domain of TCR clone 72192 (TRBV2, TRBJ2-5)
CASSEVLAQETQYF

SEQ ID NO: 144385 - protein, 10 aa, Homo sapiens
  CDR3 for alpha chain variable domain of TCR clone 72193 (TRAV21, TRAJ34)
CAADTDKLIF

SEQ ID NO: 144386 - protein, 14 aa, Homo sapiens
  CDR3 for beta chain variable domain of TCR clone 72193 (TRBV5-4, TRBJ1-2)
CASSSSGSYVGYTS

SEQ ID NO: 144387 - protein, 14 aa, Homo sapiens
  CDR3 for alpha chain variable domain of TCR clone 72194 (TRAV35, TRAJ40)
CAGSTTSGTYKYIF

SEQ ID NO: 144388 - protein, 13 aa, Homo sapiens
  CDR3 for beta chain variable domain of TCR clone 72194 (TRBV20-1, TRBJ1-6)
CSAPLGVGSALHF

SEQ ID NO: 144389 - protein, 11 aa, Homo sapiens
  CDR3 for alpha chain variable domain of TCR clone 72195 (TRAV12-3, TRAJ20)
CAMTPRLQAQL

SEQ ID NO: 144390 - protein, 16 aa, Homo sapiens
  CDR3 for beta chain variable domain of TCR clone 72195 (TRBV14, TRBJ1-5)
CASSLSRVHSNQPQHF

SEQ ID NO: 144391 - protein, 12 aa, Homo sapiens
  CDR3 for alpha chain variable domain of TCR clone 72196 (TRAV9-2, TRAJ48)
CALTKGNEKLTF

SEQ ID NO: 144392 - protein, 15 aa, Homo sapiens
  CDR3 for beta chain variable domain of TCR clone 72196 (TRBV7-2, TRBJ2-7)
CASSTPGLTRGEQYF

SEQ ID NO: 144393 - protein, 14 aa, Homo sapiens
  CDR3 for alpha chain variable domain of TCR clone 72197 (TRAV8-2, TRAJ37)
CVVSISGNTGKLIF

SEQ ID NO: 144394 - protein, 17 aa, Homo sapiens
  CDR3 for beta chain variable domain of TCR clone 72197 (TRBV24-1, TRBJ2-1)
CATSDVSTSGTYNEQFF

SEQ ID NO: 144395 - protein, 18 aa, Homo sapiens
  CDR3 for alpha chain variable domain of TCR clone 72198 (TRAV26-2, TRAJ45)
CILRLCGYSGGGADGLTF

SEQ ID NO: 144396 - protein, 17 aa, Homo sapiens
  CDR3 for beta chain variable domain of TCR clone 72198 (TRBV28, TRBJ2-3)
CASSPTPAGGRVDTQYF

SEQ ID NO: 144397 - protein, 18 aa, Homo sapiens
  CDR3 for alpha chain variable domain of TCR clone 72199 (TRAV13-1, TRAJ52)
CAAKNPNAGGTSYGKLTF

SEQ ID NO: 144398 - protein, 15 aa, Homo sapiens
  CDR3 for beta chain variable domain of TCR clone 72199 (TRBV6-1, TRBJ2-3)
CASSERVGITDTQYF

SEQ ID NO: 144399 - protein, 11 aa, Homo sapiens
  CDR3 for alpha chain variable domain of TCR clone 72200 (TRAV12-2, TRAJ31)
CAILNNARLLF

SEQ ID NO: 144400 - protein, 13 aa, Homo sapiens
  CDR3 for beta chain variable domain of TCR clone 72200 (TRBV20-1, TRBJ1-1)
CSARLGQGTEAFF

SEQ ID NO: 144401 - protein, 18 aa, Homo sapiens
  CDR3 for alpha chain variable domain of TCR clone 72201 (TRAV3, TRAJ7)
CADLLWEQQTRFWEVEPS

SEQ ID NO: 144402 - protein, 13 aa, Homo sapiens
  CDR3 for beta chain variable domain of TCR clone 72201 (TRBV7-3, TRBJ2-5)
CASSFRGGETQYF

SEQ ID NO: 144403 - protein, 13 aa, Homo sapiens
  CDR3 for alpha chain variable domain of TCR clone 72202 (TRAV12-1, TRAJ34)
CVVTGYNTDKLIF

SEQ ID NO: 144404 - protein, 13 aa, Homo sapiens
  CDR3 for beta chain variable domain of TCR clone 72202 (TRBV28, TRBJ2-7)
CASKAGGAYEQYF

SEQ ID NO: 144405 - protein, 14 aa, Homo sapiens
  CDR3 for alpha chain variable domain of TCR clone 72203 (TRAV12-2, TRAJ13)
CAVKRTGGYQKVTF

SEQ ID NO: 144406 - protein, 11 aa, Homo sapiens
  CDR3 for beta chain variable domain of TCR clone 72203 (TRBV11-2, TRBJ2-2)
CASSLPGELFF

SEQ ID NO: 144407 - protein, 12 aa, Homo sapiens
  CDR3 for alpha chain variable domain of TCR clone 72204 (TRAV13-1, TRAJ15)
CAAIQAGTALIF

SEQ ID NO: 144408 - protein, 14 aa, Homo sapiens
  CDR3 for beta chain variable domain of TCR clone 72204 (TRBV19, TRBJ2-2)
CASSTLHRSGELFF

SEQ ID NO: 144409 - protein, 13 aa, Homo sapiens
  CDR3 for alpha chain variable domain of TCR clone 72205 (TRAV12-1, TRAJ39)
CVARSGAGNMLTF

SEQ ID NO: 144410 - protein, 15 aa, Homo sapiens
  CDR3 for beta chain variable domain of TCR clone 72205 (TRBV7-9, TRBJ1-6)
CASSSPGRGNSPLHF

SEQ ID NO: 144411 - protein, 12 aa, Homo sapiens
  CDR3 for alpha chain variable domain of TCR clone 72206 (TRAV12-3, TRAJ17)
CAMTLTGNKLTF

SEQ ID NO: 144412 - protein, 16 aa, Homo sapiens
  CDR3 for beta chain variable domain of TCR clone 72206 (TRBV13, TRBJ2-2)
CASSPRTGEHTRELFF

SEQ ID NO: 144413 - protein, 16 aa, Homo sapiens
  CDR3 for alpha chain variable domain of TCR clone 72207 (TRAV8-3, TRAJ42)
CAVGEGNGGSQGNLIF

SEQ ID NO: 144414 - protein, 15 aa, Homo sapiens
  CDR3 for beta chain variable domain of TCR clone 72207 (TRBV20-1, TRBJ2-5)
CSAPPRTGFGETQYF

SEQ ID NO: 144415 - protein, 13 aa, Homo sapiens
  CDR3 for alpha chain variable domain of TCR clone 72208 (TRAV12-1, TRAJ7)
CVVNMRGNNRLAF

SEQ ID NO: 144416 - protein, 16 aa, Homo sapiens
  CDR3 for beta chain variable domain of TCR clone 72208 (TRBV20-1, TRBJ1-4)
CSAPGLGLLTNEKLFF

SEQ ID NO: 144417 - protein, 12 aa, Homo sapiens
  CDR3 for alpha chain variable domain of TCR clone 72209 (TRAV12-3, TRAJ17)
CAMTPTGNKLTF

SEQ ID NO: 144418 - protein, 15 aa, Homo sapiens
  CDR3 for beta chain variable domain of TCR clone 72209 (TRBV2, TRBJ2-1)
CASSELAGSYNEQFF

SEQ ID NO: 144419 - protein, 14 aa, Homo sapiens
  CDR3 for alpha chain variable domain of TCR clone 72210 (TRAV1-2, TRAJ8)
CAVREDTGFQKLVF

SEQ ID NO: 144420 - protein, 15 aa, Homo sapiens
  CDR3 for beta chain variable domain of TCR clone 72210 (TRBV6-3, TRBJ2-7)
CASSSPGEVFYEQYF

SEQ ID NO: 144421 - protein, 13 aa, Homo sapiens
  CDR3 for alpha chain variable domain of TCR clone 72211 (TRAV12-2, TRAJ24)
CAVSTDGWGKLQF

SEQ ID NO: 144422 - protein, 12 aa, Homo sapiens
  CDR3 for beta chain variable domain of TCR clone 72211 (TRBV7-6, TRBJ2-7)
CASSLADSEQYF

SEQ ID NO: 144423 - protein, 17 aa, Homo sapiens
  CDR3 for alpha chain variable domain of TCR clone 72212 (TRAV3, TRAJ42)
CAVRDRDYGGSQGNLIF

SEQ ID NO: 144424 - protein, 15 aa, Homo sapiens
  CDR3 for beta chain variable domain of TCR clone 72212 (TRBV6-6, TRBJ2-7)
CTSSYSYGGSYEQYF

SEQ ID NO: 144425 - protein, 22 aa, Homo sapiens
  CDR3 for alpha chain variable domain of TCR clone 72213 (TRAV3, TRAJ38)
CAVRDCLNAGNNHIQNPDPAVY

SEQ ID NO: 144426 - protein, 14 aa, Homo sapiens
  CDR3 for beta chain variable domain of TCR clone 72213 (TRBV9, TRBJ2-1)
CASSVVAAYNEQFF

SEQ ID NO: 144427 - protein, 15 aa, Homo sapiens
  CDR3 for alpha chain variable domain of TCR clone 72214 (TRAV8-2, TRAJ40)
CVVLGTTSGTYKYIF

SEQ ID NO: 144428 - protein, 16 aa, Homo sapiens
  CDR3 for beta chain variable domain of TCR clone 72214 (TRBV7-3, TRBJ2-1)
CASSLDGYRSYNEQFF

SEQ ID NO: 144429 - protein, 13 aa, Homo sapiens
  CDR3 for alpha chain variable domain of TCR clone 72215 (TRAV29/DV5, TRAJ49)
CAASTTTGNQFYF

SEQ ID NO: 144430 - protein, 13 aa, Homo sapiens
  CDR3 for beta chain variable domain of TCR clone 72215 (TRBV7-2, TRBJ1-4)
CASSLAGLEKLFF

SEQ ID NO: 144431 - protein, 14 aa, Homo sapiens
  CDR3 for alpha chain variable domain of TCR clone 72216 (TRAV21, TRAJ35)
CAVMPIGFGNVLHC

SEQ ID NO: 144432 - protein, 15 aa, Homo sapiens
  CDR3 for beta chain variable domain of TCR clone 72216 (TRBV5-1, TRBJ2-1)
CASSRTSGGVNEQFF

SEQ ID NO: 144433 - protein, 12 aa, Homo sapiens
  CDR3 for alpha chain variable domain of TCR clone 72217 (TRAV36/DV7, TRAJ54)
CAAVRGAQKLVF

SEQ ID NO: 144434 - protein, 14 aa, Homo sapiens
  CDR3 for beta chain variable domain of TCR clone 72217 (TRBV7-3, TRBJ1-1)
CASSLKGGNTEAFF

SEQ ID NO: 144435 - protein, 13 aa, Homo sapiens
  CDR3 for alpha chain variable domain of TCR clone 72218 (TRAV8-3, TRAJ36)
CDVGATGANNLFF

SEQ ID NO: 144436 - protein, 15 aa, Homo sapiens
  CDR3 for beta chain variable domain of TCR clone 72218 (TRBV7-2, TRBJ1-2)
CASSPRAGWNYGYTF

SEQ ID NO: 144437 - protein, 15 aa, Homo sapiens
  CDR3 for alpha chain variable domain of TCR clone 72219 (TRAV23/DV6, TRAJ13)
CAAWPGGGGYQKVTF

SEQ ID NO: 144438 - protein, 17 aa, Homo sapiens
  CDR3 for beta chain variable domain of TCR clone 72219 (TRBV19, TRBJ2-7)
CASSISFCDSYPYEQYF

SEQ ID NO: 144439 - protein, 16 aa, Homo sapiens
  CDR3 for alpha chain variable domain of TCR clone 72220 (TRAV13-1, TRAJ45)
CAARGSRKGGADGLTF

SEQ ID NO: 144440 - protein, 13 aa, Homo sapiens
  CDR3 for beta chain variable domain of TCR clone 72220 (TRBV12-4, TRBJ2-5)
CAGRKRGKETQYF

SEQ ID NO: 144441 - protein, 11 aa, Homo sapiens
  CDR3 for alpha chain variable domain of TCR clone 72221 (TRAV21, TRAJ34)
CAVTNTDKLIF

SEQ ID NO: 144442 - protein, 12 aa, Homo sapiens
  CDR3 for beta chain variable domain of TCR clone 72221 (TRBV7-9, TRBJ1-1)
CAGSLVRGEAFF

SEQ ID NO: 144443 - protein, 15 aa, Homo sapiens
  CDR3 for alpha chain variable domain of TCR clone 72222 (TRAV12-2, TRAJ53)
CAVNGGGGSNYKLTF

SEQ ID NO: 144444 - protein, 13 aa, Homo sapiens
  CDR3 for beta chain variable domain of TCR clone 72222 (TRBV3-1, TRBJ1-1)
CTSSPGVITEAFF

SEQ ID NO: 144445 - protein, 12 aa, Homo sapiens
  CDR3 for alpha chain variable domain of TCR clone 72223 (TRAV17, TRAJ34)
CATDAKGDKLIF

SEQ ID NO: 144446 - protein, 16 aa, Homo sapiens
  CDR3 for beta chain variable domain of TCR clone 72223 (TRBV4-2, TRBJ1-1)
CASSPSPGRAAPEAFF

SEQ ID NO: 144447 - protein, 21 aa, Homo sapiens
  CDR3 for alpha chain variable domain of TCR clone 72224 (TRAV1-1, TRAJ6)
CLLLLRCERLERAGGSYIPTF

SEQ ID NO: 144448 - protein, 15 aa, Homo sapiens
  CDR3 for beta chain variable domain of TCR clone 72224 (TRBV7-2, TRBJ2-3)
CASSLVVRGPDTQYF

SEQ ID NO: 144449 - protein, 14 aa, Homo sapiens
  CDR3 for alpha chain variable domain of TCR clone 72225 (TRAV25, TRAJ23)
CAGQGDNQGGKLIF

SEQ ID NO: 144450 - protein, 12 aa, Homo sapiens
  CDR3 for beta chain variable domain of TCR clone 72225 (TRBV7-9, TRBJ1-1)
CASSLVRGEAFS

SEQ ID NO: 144451 - protein, 17 aa, Homo sapiens
  CDR3 for alpha chain variable domain of TCR clone 72226 (TRAV3, TRAJ12)
CAVRDGGRMDSSYKLIF

SEQ ID NO: 144452 - protein, 13 aa, Homo sapiens
  CDR3 for beta chain variable domain of TCR clone 72226 (TRBV9, TRBJ2-3)
CATSTGWADTQYF

SEQ ID NO: 144453 - protein, 16 aa, Homo sapiens
  CDR3 for alpha chain variable domain of TCR clone 72227 (TRAV1-2, TRAJ10)
CAVRGVLTGGGNKLTF

SEQ ID NO: 144454 - protein, 16 aa, Homo sapiens
  CDR3 for beta chain variable domain of TCR clone 72227 (TRBV19, TRBJ2-2)
CASRSPGTGATGELFF

SEQ ID NO: 144455 - protein, 16 aa, Homo sapiens
  CDR3 for alpha chain variable domain of TCR clone 72228 (TRAV2, TRAJ4)
CAVEDRFSGGYNKLIF

SEQ ID NO: 144456 - protein, 13 aa, Homo sapiens
  CDR3 for beta chain variable domain of TCR clone 72228 (TRBV7-7, TRBJ2-5)
CASGRSGQETQYF

SEQ ID NO: 144457 - protein, 12 aa, Homo sapiens
  CDR3 for alpha chain variable domain of TCR clone 72229 (TRAV3, TRAJ31)
CAVRDGNARLMF

SEQ ID NO: 144458 - protein, 18 aa, Homo sapiens
  CDR3 for beta chain variable domain of TCR clone 72229 (TRBV7-2, TRBJ2-3)
CASSLKREGSGITDAQYF

SEQ ID NO: 144459 - protein, 14 aa, Homo sapiens
  CDR3 for alpha chain variable domain of TCR clone 72230 (TRAV30, TRAJ26)
CGTEIVSYCQNFVF

SEQ ID NO: 144460 - protein, 13 aa, Homo sapiens
  CDR3 for beta chain variable domain of TCR clone 72230 (TRBV19, TRBJ1-3)
CASRLSLGNTIYF

SEQ ID NO: 144461 - protein, 23 aa, Homo sapiens
  CDR3 for alpha chain variable domain of TCR clone 72231 (TRAV3, TRAJ32)
CAVRDELVLQTSSSLELALCLLS

SEQ ID NO: 144462 - protein, 12 aa, Homo sapiens
  CDR3 for beta chain variable domain of TCR clone 72231 (TRBV6-1, TRBJ2-7)
CASSDYSYEQYF

SEQ ID NO: 144463 - protein, 14 aa, Homo sapiens
  CDR3 for alpha chain variable domain of TCR clone 72232 (TRAV35, TRAJ22)
CAGLRPGSARQLTF

SEQ ID NO: 144464 - protein, 15 aa, Homo sapiens
  CDR3 for beta chain variable domain of TCR clone 72232 (TRBV7-2, TRBJ2-1)
CASSSGLAGGNEQFF

SEQ ID NO: 144465 - protein, 13 aa, Homo sapiens
  CDR3 for alpha chain variable domain of TCR clone 72233 (TRAV1-2, TRAJ9)
CAVLNTGGFKTIF

SEQ ID NO: 144466 - protein, 14 aa, Homo sapiens
  CDR3 for beta chain variable domain of TCR clone 72233 (TRBV20-1, TRBJ2-3)
CSTRGGTSTDTQYF

SEQ ID NO: 144467 - protein, 12 aa, Homo sapiens
  CDR3 for alpha chain variable domain of TCR clone 72234 (TRAV13-1, TRAJ21)
CAAKEGFNKFYF

SEQ ID NO: 144468 - protein, 14 aa, Homo sapiens
  CDR3 for beta chain variable domain of TCR clone 72234 (TRBV18, TRBJ2-7)
CASSPRGGAYERYF

SEQ ID NO: 144469 - protein, 15 aa, Homo sapiens
  CDR3 for alpha chain variable domain of TCR clone 72235 (TRAV21, TRAJ53)
CATLNSGGSNYKLTF

SEQ ID NO: 144470 - protein, 14 aa, Homo sapiens
  CDR3 for beta chain variable domain of TCR clone 72235 (TRBV4-1, TRBJ2-2)
CASSQAVNTGELFF

SEQ ID NO: 144471 - protein, 14 aa, Homo sapiens
  CDR3 for alpha chain variable domain of TCR clone 72236 (TRAV12-3, TRAJ10)
SHLPLTGGGNKLTF

SEQ ID NO: 144472 - protein, 12 aa, Homo sapiens
  CDR3 for beta chain variable domain of TCR clone 72236 (TRBV7-3, TRBJ2-1)
CASSFINNEQFF

SEQ ID NO: 144473 - protein, 15 aa, Homo sapiens
  CDR3 for alpha chain variable domain of TCR clone 72237 (TRAV26-1, TRAJ29)
CIVRVEGSENTPLVF

SEQ ID NO: 144474 - protein, 14 aa, Homo sapiens
  CDR3 for beta chain variable domain of TCR clone 72237 (TRBV18, TRBJ2-5)
CASSPGVSQETQYF

SEQ ID NO: 144475 - protein, 11 aa, Homo sapiens
  CDR3 for alpha chain variable domain of TCR clone 72238 (TRAV17, TRAJ31)
CATSNNARLMF

SEQ ID NO: 144476 - protein, 14 aa, Homo sapiens
  CDR3 for beta chain variable domain of TCR clone 72238 (TRBV18, TRBJ2-7)
CASSPGGGAYEQYF

SEQ ID NO: 144477 - protein, 13 aa, Homo sapiens
  CDR3 for alpha chain variable domain of TCR clone 72239 (TRAV13-1, TRAJ39)
CSKYSNAGNMLTF

SEQ ID NO: 144478 - protein, 13 aa, Homo sapiens
  CDR3 for beta chain variable domain of TCR clone 72239 (TRBV10-3, TRBJ2-7)
CASKLAVNYEQYF

SEQ ID NO: 144479 - protein, 15 aa, Homo sapiens
  CDR3 for alpha chain variable domain of TCR clone 72240 (TRAV27, TRAJ50)
CAGVGRGTSYDKVIF

SEQ ID NO: 144480 - protein, 14 aa, Homo sapiens
  CDR3 for beta chain variable domain of TCR clone 72240 (TRBV7-2, TRBJ1-1)
CASSFYDLNTEAFC

SEQ ID NO: 144481 - protein, 16 aa, Homo sapiens
  CDR3 for alpha chain variable domain of TCR clone 72241 (TRAV30, TRAJ24)
CGTEIVDADSWGKFQF

SEQ ID NO: 144482 - protein, 15 aa, Homo sapiens
  CDR3 for beta chain variable domain of TCR clone 72241 (TRBV20-1, TRBJ2-7)
CSARDRVSGMDELYF

SEQ ID NO: 144483 - protein, 14 aa, Homo sapiens
  CDR3 for alpha chain variable domain of TCR clone 72242 (TRAV9-2, TRAJ13)
CALSPSGGYQKVTF

SEQ ID NO: 144484 - protein, 15 aa, Homo sapiens
  CDR3 for beta chain variable domain of TCR clone 72242 (TRBV2, TRBJ2-1)
CASSEARSAYNEQFF

SEQ ID NO: 144485 - protein, 12 aa, Homo sapiens
  CDR3 for alpha chain variable domain of TCR clone 72243 (TRAV25, TRAJ11)
CAGASGYSTLTF

SEQ ID NO: 144486 - protein, 12 aa, Homo sapiens
  CDR3 for beta chain variable domain of TCR clone 72243 (TRBV11-2, TRBJ2-2)
CASSLGGGELFF

SEQ ID NO: 144487 - protein, 11 aa, Homo sapiens
  CDR3 for alpha chain variable domain of TCR clone 72244 (TRAV1-2, TRAJ40)
CAVPGTYKYIF

SEQ ID NO: 144488 - protein, 16 aa, Homo sapiens
  CDR3 for beta chain variable domain of TCR clone 72244 (TRBV12-4, TRBJ1-5)
CASSRPVGGSNQPQHF

SEQ ID NO: 144489 - protein, 12 aa, Homo sapiens
  CDR3 for alpha chain variable domain of TCR clone 72245 (TRAV25, TRAJ26)
CAGDNYGQNFVF

SEQ ID NO: 144490 - protein, 14 aa, Homo sapiens
  CDR3 for beta chain variable domain of TCR clone 72245 (TRBV5-1, TRBJ2-7)
CARSRGESLYEQYF

SEQ ID NO: 144491 - protein, 14 aa, Homo sapiens
  CDR3 for alpha chain variable domain of TCR clone 72246 (TRAV12-2, TRAJ13)
CAVKKTEGYQKVTF

SEQ ID NO: 144492 - protein, 15 aa, Homo sapiens
  CDR3 for beta chain variable domain of TCR clone 72246 (TRBV7-2, TRBJ2-1)
CASSLASGRVNEQFF

SEQ ID NO: 144493 - protein, 14 aa, Homo sapiens
  CDR3 for alpha chain variable domain of TCR clone 72247 (TRAV13-1, TRAJ53)
CAASISGSNYKLTF

SEQ ID NO: 144494 - protein, 15 aa, Homo sapiens
  CDR3 for beta chain variable domain of TCR clone 72247 (TRBV4-1, TRBJ1-4)
CASSDIGGTNEKLFF

SEQ ID NO: 144495 - protein, 17 aa, Homo sapiens
  CDR3 for alpha chain variable domain of TCR clone 72248 (TRAV3, TRAJ6)
CAVTRRTDTGGSYIPTF

SEQ ID NO: 144496 - protein, 18 aa, Homo sapiens
  CDR3 for beta chain variable domain of TCR clone 72248 (TRBV7-2, TRBJ2-3)
CASSLETSRGRKADTQYF

SEQ ID NO: 144497 - protein, 13 aa, Homo sapiens
  CDR3 for alpha chain variable domain of TCR clone 72249 (TRAV20, TRAJ54)
CAVQAGGAQKLVL

SEQ ID NO: 144498 - protein, 14 aa, Homo sapiens
  CDR3 for beta chain variable domain of TCR clone 72249 (TRBV20-1, TRBJ2-7)
CSAKTGTGGYEQYF

SEQ ID NO: 144499 - protein, 10 aa, Homo sapiens
  CDR3 for alpha chain variable domain of TCR clone 72250 (TRAV21, TRAJ31)
CAVYNARLMF

SEQ ID NO: 144500 - protein, 13 aa, Homo sapiens
  CDR3 for beta chain variable domain of TCR clone 72250 (TRBV4-1, TRBJ1-1)
CASSRKMNTEAFF

SEQ ID NO: 144501 - protein, 10 aa, Homo sapiens
  CDR3 for alpha chain variable domain of TCR clone 72251 (TRAV27, TRAJ58)
SATSGSRLTF

SEQ ID NO: 144502 - protein, 14 aa, Homo sapiens
  CDR3 for beta chain variable domain of TCR clone 72251 (TRBV7-2, TRBJ2-7)
CASSPKTSFYEQYF

SEQ ID NO: 144503 - protein, 16 aa, Homo sapiens
  CDR3 for alpha chain variable domain of TCR clone 72252 (TRAV20, TRAJ22)
CAVQASSSGSARQLTF

SEQ ID NO: 144504 - protein, 13 aa, Homo sapiens
  CDR3 for beta chain variable domain of TCR clone 72252 (TRBV7-2, TRBJ2-5)
CARSQTSVETQYF

SEQ ID NO: 144505 - protein, 17 aa, Homo sapiens
  CDR3 for alpha chain variable domain of TCR clone 72253 (TRAV8-4, TRAJ53)
CAVSGPRGEGSNYKLTF

SEQ ID NO: 144506 - protein, 14 aa, Homo sapiens
  CDR3 for beta chain variable domain of TCR clone 72253 (TRBV7-3, TRBJ2-1)
CASSALAGGPEQFF

SEQ ID NO: 144507 - protein, 12 aa, Homo sapiens
  CDR3 for alpha chain variable domain of TCR clone 72254 (TRAV17, TRAJ28)
WDSGAGSYQLPF

SEQ ID NO: 144508 - protein, 13 aa, Homo sapiens
  CDR3 for beta chain variable domain of TCR clone 72254 (TRBV11-3, TRBJ1-1)
CASSRQPNTEAFF

SEQ ID NO: 144509 - protein, 13 aa, Homo sapiens
  CDR3 for alpha chain variable domain of TCR clone 72255 (TRAV12-1, TRAJ11)
CVVNRAGYSTLTF

SEQ ID NO: 144510 - protein, 15 aa, Homo sapiens
  CDR3 for beta chain variable domain of TCR clone 72255 (TRBV7-3, TRBJ2-2)
CASSGTGQGTGELFF

SEQ ID NO: 144511 - protein, 15 aa, Homo sapiens
  CDR3 for alpha chain variable domain of TCR clone 72256 (TRAV26-1, TRAJ22)
CIVRVSFWFCKATDL

SEQ ID NO: 144512 - protein, 13 aa, Homo sapiens
  CDR3 for beta chain variable domain of TCR clone 72256 (TRBV7-9, TRBJ1-2)
CASSLKQNYDYTF

SEQ ID NO: 144513 - protein, 16 aa, Homo sapiens
  CDR3 for alpha chain variable domain of TCR clone 72257 (TRAV8-2, TRAJ48)
CVVSDVSNFGNEKLTF

SEQ ID NO: 144514 - protein, 14 aa, Homo sapiens
  CDR3 for beta chain variable domain of TCR clone 72257 (TRBV13, TRBJ2-5)
CASSLERVGETQYF

SEQ ID NO: 144515 - protein, 14 aa, Homo sapiens
  CDR3 for alpha chain variable domain of TCR clone 72258 (TRAV12-2, TRAJ13)
CAVKKTGGYQKVTF

SEQ ID NO: 144516 - protein, 15 aa, Homo sapiens
  CDR3 for beta chain variable domain of TCR clone 72258 (TRBV20-1, TRBJ2-1)
CSARGIGVTYNEQFF

SEQ ID NO: 144517 - protein, 11 aa, Homo sapiens
  CDR3 for alpha chain variable domain of TCR clone 72259 (TRAV2, TRAJ13)
CASGGYQKVTF

SEQ ID NO: 144518 - protein, 16 aa, Homo sapiens
  CDR3 for beta chain variable domain of TCR clone 72259 (TRBV6-5, TRBJ2-2)
CASSPGVIGGTGELFF

SEQ ID NO: 144519 - protein, 15 aa, Homo sapiens
  CDR3 for alpha chain variable domain of TCR clone 72260 (TRAV26-1, TRAJ44)
CIVRIGTGTASQLTF

SEQ ID NO: 144520 - protein, 15 aa, Homo sapiens
  CDR3 for beta chain variable domain of TCR clone 72260 (TRBV7-6, TRBJ2-1)
CASSSLAGEGNEQFF

SEQ ID NO: 144521 - protein, 13 aa, Homo sapiens
  CDR3 for alpha chain variable domain of TCR clone 72261 (TRAV2, TRAJ13)
CAVESGGYQRVTF

SEQ ID NO: 144522 - protein, 12 aa, Homo sapiens
  CDR3 for beta chain variable domain of TCR clone 72261 (TRBV29-1, TRBJ2-3)
CSVTGGADTQYF

SEQ ID NO: 144523 - protein, 13 aa, Homo sapiens
  CDR3 for alpha chain variable domain of TCR clone 72262 (TRAV3, TRAJ29)
CAVRGIIDTPLVF

SEQ ID NO: 144524 - protein, 14 aa, Homo sapiens
  CDR3 for beta chain variable domain of TCR clone 72262 (TRBV27, TRBJ2-1)
CASSATGGYNEQFF

SEQ ID NO: 144525 - protein, 16 aa, Homo sapiens
  CDR3 for alpha chain variable domain of TCR clone 72263 (TRAV12-3, TRAJ53)
CAMSPGSGGSNYKLTF

SEQ ID NO: 144526 - protein, 16 aa, Homo sapiens
  CDR3 for beta chain variable domain of TCR clone 72263 (TRBV4-2, TRBJ1-1)
CASSQAGFGVNTEAFF

SEQ ID NO: 144527 - protein, 13 aa, Homo sapiens
  CDR3 for alpha chain variable domain of TCR clone 72264 (TRAV8-3, TRAJ48)
CAVVPFGNEKLTF

SEQ ID NO: 144528 - protein, 15 aa, Homo sapiens
  CDR3 for beta chain variable domain of TCR clone 72264 (TRBV6-1, TRBJ2-6)
CASSSRPSGANVLTF

SEQ ID NO: 144529 - protein, 11 aa, Homo sapiens
  CDR3 for alpha chain variable domain of TCR clone 72265 (TRAV2, TRAJ33)
CAVESNYQLIW

SEQ ID NO: 144530 - protein, 12 aa, Homo sapiens
  CDR3 for beta chain variable domain of TCR clone 72265 (TRBV11-2, TRBJ2-2)
CASSLGGGGLFF

SEQ ID NO: 144531 - protein, 14 aa, Homo sapiens
  CDR3 for alpha chain variable domain of TCR clone 72266 (TRAV13-1, TRAJ26)
CAAPKGPEGQNFVF

SEQ ID NO: 144532 - protein, 15 aa, Homo sapiens
  CDR3 for beta chain variable domain of TCR clone 72266 (TRBV28, TRBJ2-5)
CASSFRQGALETQYF

SEQ ID NO: 144533 - protein, 14 aa, Homo sapiens
  CDR3 for alpha chain variable domain of TCR clone 72267 (TRAV1-2, TRAJ16)
CAVNRFSDGQKLLF

SEQ ID NO: 144534 - protein, 12 aa, Homo sapiens
  CDR3 for beta chain variable domain of TCR clone 72267 (TRBV27, TRBJ2-5)
CASSLKGETQYF

SEQ ID NO: 144535 - protein, 12 aa, Homo sapiens
  CDR3 for alpha chain variable domain of TCR clone 72268 (TRAV8-3, TRAJ20)
CAVGANDYKLSF

SEQ ID NO: 144536 - protein, 16 aa, Homo sapiens
  CDR3 for beta chain variable domain of TCR clone 72268 (TRBV19, TRBJ2-2)
CASGSPGTGATGELFF

SEQ ID NO: 144537 - protein, 11 aa, Homo sapiens
  CDR3 for alpha chain variable domain of TCR clone 72269 (TRAV4, TRAJ31)
CLVGDNARLMF

SEQ ID NO: 144538 - protein, 13 aa, Homo sapiens
  CDR3 for beta chain variable domain of TCR clone 72269 (TRBV11-2, TRBJ1-1)
CASSLGNGAEAFF

SEQ ID NO: 144539 - protein, 17 aa, Homo sapiens
  CDR3 for alpha chain variable domain of TCR clone 72270 (TRAV3, TRAJ6)
CAARDGPRAGGSYIPTF

SEQ ID NO: 144540 - protein, 13 aa, Homo sapiens
  CDR3 for beta chain variable domain of TCR clone 72270 (TRBV27, TRBJ2-1)
CASRTLGVGEQFF

SEQ ID NO: 144541 - protein, 14 aa, Homo sapiens
  CDR3 for alpha chain variable domain of TCR clone 72271 (TRAV3, TRAJ22)
CAGLRPGSARQLTF

SEQ ID NO: 144542 - protein, 15 aa, Homo sapiens
  CDR3 for beta chain variable domain of TCR clone 72271 (TRBV12-4, TRBJ2-5)
CASSPPTGLQETQYF

SEQ ID NO: 144543 - protein, 13 aa, Homo sapiens
  CDR3 for alpha chain variable domain of TCR clone 72272 (TRAV16, TRAJ29)
CALSRRGNTPLVF

SEQ ID NO: 144544 - protein, 13 aa, Homo sapiens
  CDR3 for beta chain variable domain of TCR clone 72272 (TRBV11-2, TRBJ1-3)
CASSLEPVNTIYF

SEQ ID NO: 144545 - protein, 13 aa, Homo sapiens
  CDR3 for alpha chain variable domain of TCR clone 72273 (TRAV3, TRAJ27)
CAVRPLGAGKSTF

SEQ ID NO: 144546 - protein, 13 aa, Homo sapiens
  CDR3 for beta chain variable domain of TCR clone 72273 (TRBV7-9, TRBJ2-3)
SASSPGSTDTQYF

SEQ ID NO: 144547 - protein, 16 aa, Homo sapiens
  CDR3 for alpha chain variable domain of TCR clone 72274 (TRAV26-1, TRAJ37)
CIVSGDGSGNTGKLIF

SEQ ID NO: 144548 - protein, 17 aa, Homo sapiens
  CDR3 for beta chain variable domain of TCR clone 72274 (TRBV4-1, TRBJ2-7)
CASSRDPLGVRGGEQYF

SEQ ID NO: 144549 - protein, 13 aa, Homo sapiens
  CDR3 for alpha chain variable domain of TCR clone 72275 (TRAV2, TRAJ15)
CAVASQAGTALIF

SEQ ID NO: 144550 - protein, 16 aa, Homo sapiens
  CDR3 for beta chain variable domain of TCR clone 72275 (TRBV18, TRBJ1-5)
CASSPYRVEGNRPQHF

SEQ ID NO: 144551 - protein, 17 aa, Homo sapiens
  CDR3 for alpha chain variable domain of TCR clone 72276 (TRAV3, TRAJ28)
CAVREAYSGAGSYQLTF

SEQ ID NO: 144552 - protein, 18 aa, Homo sapiens
  CDR3 for beta chain variable domain of TCR clone 72276 (TRBV27, TRBJ2-1)
CASGNRAVGVGSKNEQFL

SEQ ID NO: 144553 - protein, 15 aa, Homo sapiens
  CDR3 for alpha chain variable domain of TCR clone 72277 (TRAV17, TRAJ57)
CATGPSQGGSEKLVF

SEQ ID NO: 144554 - protein, 16 aa, Homo sapiens
  CDR3 for beta chain variable domain of TCR clone 72277 (TRBV12-4, TRBJ1-5)
WASSRPVGGSNQPQHF

SEQ ID NO: 144555 - protein, 13 aa, Homo sapiens
  CDR3 for alpha chain variable domain of TCR clone 72278 (TRAV20, TRAJ20)
CVVQAGSGYKLSF

SEQ ID NO: 144556 - protein, 13 aa, Homo sapiens
  CDR3 for beta chain variable domain of TCR clone 72278 (TRBV3-1, TRBJ2-3)
CASSQGGGDTQYF

SEQ ID NO: 144557 - protein, 12 aa, Homo sapiens
  CDR3 for alpha chain variable domain of TCR clone 72279 (TRAV27, TRAJ48)
CAGARGNEKLTF

SEQ ID NO: 144558 - protein, 14 aa, Homo sapiens
  CDR3 for beta chain variable domain of TCR clone 72279 (TRBV19, TRBJ2-2)
CASSTLHRSGELFF

SEQ ID NO: 144559 - protein, 22 aa, Homo sapiens
  CDR3 for alpha chain variable domain of TCR clone 72280 (TRAV21, )
CAVRQDAGNNHIQDPDPAVYQL

SEQ ID NO: 144560 - protein, 16 aa, Homo sapiens
  CDR3 for beta chain variable domain of TCR clone 72280 (TRBV4-2, TRBJ1-1)
CASRPLDGGGDTEAFF

SEQ ID NO: 144561 - protein, 14 aa, Homo sapiens
  CDR3 for alpha chain variable domain of TCR clone 72281 (TRAV26-1, TRAJ26)
CIVRATFLGQNFVF

SEQ ID NO: 144562 - protein, 16 aa, Homo sapiens
  CDR3 for beta chain variable domain of TCR clone 72281 (TRBV12-4, TRBJ2-7)
CASRSTGTGPYYEQYF

SEQ ID NO: 144563 - protein, 13 aa, Homo sapiens
  CDR3 for alpha chain variable domain of TCR clone 72282 (TRAV21, TRAJ27)
CAARPGNAGKSTF

SEQ ID NO: 144564 - protein, 13 aa, Homo sapiens
  CDR3 for beta chain variable domain of TCR clone 72282 (TRBV7-2, TRBJ1-1)
CASNLKGAKVAFF

SEQ ID NO: 144565 - protein, 13 aa, Homo sapiens
  CDR3 for alpha chain variable domain of TCR clone 72283 (TRAV35, TRAJ22)
CAVLSGSARQLTF

SEQ ID NO: 144566 - protein, 16 aa, Homo sapiens
  CDR3 for beta chain variable domain of TCR clone 72283 (TRBV7-9, TRBJ2-1)
CASSLVLTGQGNEQFF

SEQ ID NO: 144567 - protein, 14 aa, Homo sapiens
  CDR3 for alpha chain variable domain of TCR clone 72284 (TRAV1-2, TRAJ16)
CAVNRFSDVQKLLF

SEQ ID NO: 144568 - protein, 13 aa, Homo sapiens
  CDR3 for beta chain variable domain of TCR clone 72284 (TRBV10-3, TRBJ2-7)
CASKLAVNYEQYF

SEQ ID NO: 144569 - protein, 17 aa, Homo sapiens
  CDR3 for alpha chain variable domain of TCR clone 72285 (TRAV3, TRAJ42)
CAVRDRDDGGSQGNLIF

SEQ ID NO: 144570 - protein, 20 aa, Homo sapiens
  CDR3 for beta chain variable domain of TCR clone 72285 (TRBV28, TRBJ2-1)
CASTPIGRSPGLAGGNEQFF

SEQ ID NO: 144571 - protein, 12 aa, Homo sapiens
  CDR3 for alpha chain variable domain of TCR clone 72286 (TRAV12-3, TRAJ40)
CAMSSGTYKYIF

SEQ ID NO: 144572 - protein, 19 aa, Homo sapiens
  CDR3 for beta chain variable domain of TCR clone 72286 (TRBV4-1, TRBJ1-1)
CASSRIILTPRGVNTEAFF

SEQ ID NO: 144573 - protein, 15 aa, Homo sapiens
  CDR3 for alpha chain variable domain of TCR clone 72287 (TRAV17, TRAJ48)
CATDETNFGNEKLIF

SEQ ID NO: 144574 - protein, 13 aa, Homo sapiens
  CDR3 for beta chain variable domain of TCR clone 72287 (TRBV12-4, TRBJ1-5)
CASSPDRAQPQHF

SEQ ID NO: 144575 - protein, 14 aa, Homo sapiens
  CDR3 for alpha chain variable domain of TCR clone 72288 (TRAV1-2, TRAJ16)
CAVNRFSDGQKLLF

SEQ ID NO: 144576 - protein, 15 aa, Homo sapiens
  CDR3 for beta chain variable domain of TCR clone 72288 (TRBV7-2, TRBJ2-3)
CASSLRGGSTDTQYF

SEQ ID NO: 144577 - protein, 14 aa, Homo sapiens
  CDR3 for alpha chain variable domain of TCR clone 72289 (TRAV12-1, TRAJ24)
CVVRSTASWGKFQF

SEQ ID NO: 144578 - protein, 13 aa, Homo sapiens
  CDR3 for beta chain variable domain of TCR clone 72289 (TRBV2, TRBJ2-3)
CASILAGGQGQYF

SEQ ID NO: 144579 - protein, 14 aa, Homo sapiens
  CDR3 for alpha chain variable domain of TCR clone 72290 (TRAV17, TRAJ16)
CATADFSGGQKLLF

SEQ ID NO: 144580 - protein, 14 aa, Homo sapiens
  CDR3 for beta chain variable domain of TCR clone 72290 (TRBV25-1, TRBJ1-1)
CASTHLGGNTEAFF

SEQ ID NO: 144581 - protein, 16 aa, Homo sapiens
  CDR3 for alpha chain variable domain of TCR clone 72291 (TRAV8-3, TRAJ13)
CAVGAYPSGGYQKVTF

SEQ ID NO: 144582 - protein, 15 aa, Homo sapiens
  CDR3 for beta chain variable domain of TCR clone 72291 (TRBV20-1, TRBJ2-7)
CSARDRVSGMDEQYF

SEQ ID NO: 144583 - protein, 14 aa, Homo sapiens
  CDR3 for alpha chain variable domain of TCR clone 72292 (TRAV9-2, TRAJ39)
CALHIYNAGNMLTF

SEQ ID NO: 144584 - protein, 14 aa, Homo sapiens
  CDR3 for beta chain variable domain of TCR clone 72292 (TRBV6-1, TRBJ1-3)
CASVQGGGGNTIYF

SEQ ID NO: 144585 - protein, 12 aa, Homo sapiens
  CDR3 for alpha chain variable domain of TCR clone 72293 (TRAV13-1, TRAJ11)
CAADSGYSTLTF

SEQ ID NO: 144586 - protein, 13 aa, Homo sapiens
  CDR3 for beta chain variable domain of TCR clone 72293 (TRBV15, TRBJ1-6)
CATSGGLNSPLHF

SEQ ID NO: 144587 - protein, 15 aa, Homo sapiens
  CDR3 for alpha chain variable domain of TCR clone 72294 (TRAV12-2, TRAJ53)
CAVNGGGGSNYKLTF

SEQ ID NO: 144588 - protein, 15 aa, Homo sapiens
  CDR3 for beta chain variable domain of TCR clone 72294 (TRBV19, TRBJ1-6)
CASSTQGAVGSPLHF

SEQ ID NO: 144589 - protein, 12 aa, Homo sapiens
  CDR3 for alpha chain variable domain of TCR clone 72295 (TRAV13-1, TRAJ48)
CEASFGNEKLTF

SEQ ID NO: 144590 - protein, 13 aa, Homo sapiens
  CDR3 for beta chain variable domain of TCR clone 72295 (TRBV24-1, TRBJ2-2)
CATSDWSTGELFF

SEQ ID NO: 144591 - protein, 11 aa, Homo sapiens
  CDR3 for alpha chain variable domain of TCR clone 72296 (TRAV13-1, TRAJ6)
CATLGSYILTF

SEQ ID NO: 144592 - protein, 13 aa, Homo sapiens
  CDR3 for beta chain variable domain of TCR clone 72296 (TRBV6-6, TRBJ2-1)
CASSLHQGDEQFF

SEQ ID NO: 144593 - protein, 14 aa, Homo sapiens
  CDR3 for alpha chain variable domain of TCR clone 72297 (TRAV17, TRAJ57)
CATDPQGGSEKLVF

SEQ ID NO: 144594 - protein, 14 aa, Homo sapiens
  CDR3 for beta chain variable domain of TCR clone 72297 (TRBV7-2, TRBJ1-1)
CASSFLTGTTEAFF

SEQ ID NO: 144595 - protein, 13 aa, Homo sapiens
  CDR3 for alpha chain variable domain of TCR clone 72298 (TRAV13-2, TRAJ48)
CAEMDFGNEKLTV

SEQ ID NO: 144596 - protein, 15 aa, Homo sapiens
  CDR3 for beta chain variable domain of TCR clone 72298 (TRBV7-9, TRBJ1-6)
CASSSPGRGNSPLHF

SEQ ID NO: 144597 - protein, 12 aa, Homo sapiens
  CDR3 for alpha chain variable domain of TCR clone 72299 (TRAV16, TRAJ10)
CSRTGGGNKLTF

SEQ ID NO: 144598 - protein, 15 aa, Homo sapiens
  CDR3 for beta chain variable domain of TCR clone 72299 (TRBV7-3, TRBJ2-1)
CASSQRGGALIEQSF

SEQ ID NO: 144599 - protein, 17 aa, Homo sapiens
  CDR3 for alpha chain variable domain of TCR clone 72300 (TRAV3, TRAJ6)
CAVRDGPRAGGSYIPTF

SEQ ID NO: 144600 - protein, 14 aa, Homo sapiens
  CDR3 for beta chain variable domain of TCR clone 72300 (TRBV7-2, TRBJ1-5)
CASSTQGAGQPQHF

SEQ ID NO: 144601 - protein, 14 aa, Homo sapiens
  CDR3 for alpha chain variable domain of TCR clone 72301 (TRAV13-1, TRAJ35)
CAASKGGFGNVLHW

SEQ ID NO: 144602 - protein, 13 aa, Homo sapiens
  CDR3 for beta chain variable domain of TCR clone 72301 (TRBV7-3, TRBJ1-1)
CASSQDWGAEAFF

SEQ ID NO: 144603 - protein, 13 aa, Homo sapiens
  CDR3 for alpha chain variable domain of TCR clone 72302 (TRAV12-3, TRAJ7)
CAMSASGNNRLAF

SEQ ID NO: 144604 - protein, 14 aa, Homo sapiens
  CDR3 for beta chain variable domain of TCR clone 72302 (TRBV13, TRBJ2-5)
CASSLGPRGETQYV

SEQ ID NO: 144605 - protein, 15 aa, Homo sapiens
  CDR3 for alpha chain variable domain of TCR clone 72303 (TRAV8-6, TRAJ10)
CAVSDQAGGGNKLTF

SEQ ID NO: 144606 - protein, 17 aa, Homo sapiens
  CDR3 for beta chain variable domain of TCR clone 72303 (TRBV11-2, TRBJ2-1)
CASSLYPPGVEYNEQFF

SEQ ID NO: 144607 - protein, 11 aa, Homo sapiens
  CDR3 for alpha chain variable domain of TCR clone 72304 (TRAV3, TRAJ21)
CAVGNFNKFYF

SEQ ID NO: 144608 - protein, 16 aa, Homo sapiens
  CDR3 for beta chain variable domain of TCR clone 72304 (TRBV20-1, TRBJ1-2)
CSASMGQGVANYGYSF

SEQ ID NO: 144609 - protein, 16 aa, Homo sapiens
  CDR3 for alpha chain variable domain of TCR clone 72305 (TRAV3, TRAJ10)
CAVRDMRAGGGKKLTF

SEQ ID NO: 144610 - protein, 19 aa, Homo sapiens
  CDR3 for beta chain variable domain of TCR clone 72305 (TRBV6-3, TRBJ1-2)
CASSYSKGRTGPPNYGYTF

SEQ ID NO: 144611 - protein, 13 aa, Homo sapiens
  CDR3 for alpha chain variable domain of TCR clone 72306 (TRAV8-4, TRAJ27)
YAVSPRNAGKSTF

SEQ ID NO: 144612 - protein, 17 aa, Homo sapiens
  CDR3 for beta chain variable domain of TCR clone 72306 (TRBV19, TRBJ2-3)
CASSIDPAGGGTDTQYF

SEQ ID NO: 144613 - protein, 14 aa, Homo sapiens
  CDR3 for alpha chain variable domain of TCR clone 72307 (TRAV29/DV5, TRAJ34)
CAASASRETDKLIF

SEQ ID NO: 144614 - protein, 15 aa, Homo sapiens
  CDR3 for beta chain variable domain of TCR clone 72307 (TRBV7-8, TRBJ2-7)
CASSLERAGSYEQYS

SEQ ID NO: 144615 - protein, 13 aa, Homo sapiens
  CDR3 for alpha chain variable domain of TCR clone 72308 (TRAV16, TRAJ34)
CALTGYNTDKLIF

SEQ ID NO: 144616 - protein, 13 aa, Homo sapiens
  CDR3 for beta chain variable domain of TCR clone 72308 (TRBV6-1, TRBJ2-1)
CASREDGGHEQFL

SEQ ID NO: 144617 - protein, 16 aa, Homo sapiens
  CDR3 for alpha chain variable domain of TCR clone 72309 (TRAV1-2, TRAJ18)
CAVRVDRGSTLGRLYF

SEQ ID NO: 144618 - protein, 16 aa, Homo sapiens
  CDR3 for beta chain variable domain of TCR clone 72309 (TRBV20-1, TRBJ2-7)
CSASTSGRLSSYEQYF

SEQ ID NO: 144619 - protein, 14 aa, Homo sapiens
  CDR3 for alpha chain variable domain of TCR clone 72310 (TRAV16, TRAJ17)
CALSGRAAGNKLTF

SEQ ID NO: 144620 - protein, 14 aa, Homo sapiens
  CDR3 for beta chain variable domain of TCR clone 72310 (TRBV19, TRBJ2-1)
CASPTFVLSGEQFF

SEQ ID NO: 144621 - protein, 13 aa, Homo sapiens
  CDR3 for alpha chain variable domain of TCR clone 72311 (TRAV12-2, TRAJ34)
CAVRGYNTDKLIF

SEQ ID NO: 144622 - protein, 18 aa, Homo sapiens
  CDR3 for beta chain variable domain of TCR clone 72311 (TRBV11-2, TRBJ2-3)
CASRLGGASRGAPNTQYF

SEQ ID NO: 144623 - protein, 15 aa, Homo sapiens
  CDR3 for alpha chain variable domain of TCR clone 72312 (TRAV12-1, TRAJ42)
CVVTRVGGSQGNLIF

SEQ ID NO: 144624 - protein, 14 aa, Homo sapiens
  CDR3 for beta chain variable domain of TCR clone 72312 (TRBV11-2, TRBJ2-3)
CASSLGGGANTQYF

SEQ ID NO: 144625 - protein, 14 aa, Homo sapiens
  CDR3 for alpha chain variable domain of TCR clone 72313 (TRAV8-4, TRAJ16)
CAVSPVGRWPEAAL

SEQ ID NO: 144626 - protein, 14 aa, Homo sapiens
  CDR3 for beta chain variable domain of TCR clone 72313 (TRBV23-1, TRBJ2-5)
CAGSFLRSQETQYF

SEQ ID NO: 144627 - protein, 13 aa, Homo sapiens
  CDR3 for alpha chain variable domain of TCR clone 72314 (TRAV20, TRAJ15)
CATINQAGTALIF

SEQ ID NO: 144628 - protein, 15 aa, Homo sapiens
  CDR3 for beta chain variable domain of TCR clone 72314 (TRBV9, TRBJ1-6)
CASSVAGTGDSPLHF

SEQ ID NO: 144629 - protein, 15 aa, Homo sapiens
  CDR3 for alpha chain variable domain of TCR clone 72315 (TRAV13-2, TRAJ23)
CAERGFYNQGGKLIF

SEQ ID NO: 144630 - protein, 14 aa, Homo sapiens
  CDR3 for beta chain variable domain of TCR clone 72315 (TRBV4-1, TRBJ2-3)
CASSQEWSTDTQYF

SEQ ID NO: 144631 - protein, 10 aa, Homo sapiens
  CDR3 for alpha chain variable domain of TCR clone 72316 (TRAV30, TRAJ48)
CCIGNEKLTF

SEQ ID NO: 144632 - protein, 14 aa, Homo sapiens
  CDR3 for beta chain variable domain of TCR clone 72316 (TRBV7-6, TRBJ2-3)
CASSVAGGTDTQYF

SEQ ID NO: 144633 - protein, 14 aa, Homo sapiens
  CDR3 for alpha chain variable domain of TCR clone 72317 (TRAV8-6, TRAJ4)
CAVTVSGGYNKLIF

SEQ ID NO: 144634 - protein, 13 aa, Homo sapiens
  CDR3 for beta chain variable domain of TCR clone 72317 (TRBV20-1, TRBJ1-1)
CSARGGGNTEAFF

SEQ ID NO: 144635 - protein, 13 aa, Homo sapiens
  CDR3 for alpha chain variable domain of TCR clone 72318 (TRAV13-1, TRAJ48)
CARSNFGNEKLTF

SEQ ID NO: 144636 - protein, 14 aa, Homo sapiens
  CDR3 for beta chain variable domain of TCR clone 72318 (TRBV7-3, TRBJ2-2)
CASSLLGSAGELFF

SEQ ID NO: 144637 - protein, 15 aa, Homo sapiens
  CDR3 for alpha chain variable domain of TCR clone 72319 (TRAV3, TRAJ4)
CAVRDGTGGYNKLIF

SEQ ID NO: 144638 - protein, 15 aa, Homo sapiens
  CDR3 for beta chain variable domain of TCR clone 72319 (TRBV27, TRBJ2-1)
CASSNGGRSSNEQFF

SEQ ID NO: 144639 - protein, 14 aa, Homo sapiens
  CDR3 for alpha chain variable domain of TCR clone 72320 (TRAV12-2, TRAJ13)
CAVKRTGGYQKVTF

SEQ ID NO: 144640 - protein, 14 aa, Homo sapiens
  CDR3 for beta chain variable domain of TCR clone 72320 (TRBV10-3, TRBJ2-1)
CAISSDLAYNEQFF

SEQ ID NO: 144641 - protein, 14 aa, Homo sapiens
  CDR3 for alpha chain variable domain of TCR clone 72321 (TRAV26-1, TRAJ39)
CIVRGSRAGNMLTF

SEQ ID NO: 144642 - protein, 15 aa, Homo sapiens
  CDR3 for beta chain variable domain of TCR clone 72321 (TRBV7-9, TRBJ1-5)
FASSQGHQPNQPQHF

SEQ ID NO: 144643 - protein, 17 aa, Homo sapiens
  CDR3 for alpha chain variable domain of TCR clone 72322 (TRAV3, TRAJ12)
CAVRDGGRMDSSYKLIF

SEQ ID NO: 144644 - protein, 13 aa, Homo sapiens
  CDR3 for beta chain variable domain of TCR clone 72322 (TRBV15, TRBJ1-6)
CATSGGLNSPLHV

SEQ ID NO: 144645 - protein, 13 aa, Homo sapiens
  CDR3 for alpha chain variable domain of TCR clone 72323 (TRAV1-1, TRAJ33)
CAVRRDSNYQLIW

SEQ ID NO: 144646 - protein, 16 aa, Homo sapiens
  CDR3 for beta chain variable domain of TCR clone 72323 (TRBV6-1, TRBJ2-2)
CASSAFRGEDTGELFF

SEQ ID NO: 144647 - protein, 13 aa, Homo sapiens
  CDR3 for alpha chain variable domain of TCR clone 72324 (TRAV12-3, TRAJ13)
CAMSSGGYKKVTF

SEQ ID NO: 144648 - protein, 16 aa, Homo sapiens
  CDR3 for beta chain variable domain of TCR clone 72324 (TRBV4-1, TRBJ2-7)
CASSRGDILNSYEQYF

SEQ ID NO: 144649 - protein, 23 aa, Homo sapiens
  CDR3 for alpha chain variable domain of TCR clone 72325 (TRAV12-2, TRAJ43)
SLLIRDSQPSDLATYLCAFDMRF

SEQ ID NO: 144650 - protein, 17 aa, Homo sapiens
  CDR3 for beta chain variable domain of TCR clone 72325 (TRBV13, TRBJ2-3)
CASSLSRVAGGRNTQYF

SEQ ID NO: 144651 - protein, 14 aa, Homo sapiens
  CDR3 for alpha chain variable domain of TCR clone 72326 (TRAV26-1, TRAJ34)
CIVRVAYNTDKLIF

SEQ ID NO: 144652 - protein, 13 aa, Homo sapiens
  CDR3 for beta chain variable domain of TCR clone 72326 (TRBV10-3, TRBJ1-2)
CAISERDSYGYTF

SEQ ID NO: 144653 - protein, 17 aa, Homo sapiens
  CDR3 for alpha chain variable domain of TCR clone 72327 (TRAV3, TRAJ42)
CAVRDRDYGGSQGNLIF

SEQ ID NO: 144654 - protein, 12 aa, Homo sapiens
  CDR3 for beta chain variable domain of TCR clone 72327 (TRBV19, TRBJ2-1)
CASSMQDTEQFF

SEQ ID NO: 144655 - protein, 13 aa, Homo sapiens
  CDR3 for alpha chain variable domain of TCR clone 72328 (TRAV38-2/DV8, TRAJ34)
CAYRSYNTDKLIF

SEQ ID NO: 144656 - protein, 17 aa, Homo sapiens
  CDR3 for beta chain variable domain of TCR clone 72328 (TRBV13, TRBJ2-3)
CASSLSRVAGGRNTQYF

SEQ ID NO: 144657 - protein, 16 aa, Homo sapiens
  CDR3 for alpha chain variable domain of TCR clone 72329 (TRAV29/DV5, )
CAASAFRTQIPDIQNP

SEQ ID NO: 144658 - protein, 13 aa, Homo sapiens
  CDR3 for beta chain variable domain of TCR clone 72329 (TRBV27, TRBJ1-1)
CASSLSIGAEAFF

SEQ ID NO: 144659 - protein, 18 aa, Homo sapiens
  CDR3 for alpha chain variable domain of TCR clone 72330 (TRAV21, TRAJ52)
CAVSPSPAGGTSYGKLTF

SEQ ID NO: 144660 - protein, 14 aa, Homo sapiens
  CDR3 for beta chain variable domain of TCR clone 72330 (TRBV4-1, TRBJ2-2)
CASSQAVNTGELFF

SEQ ID NO: 144661 - protein, 12 aa, Homo sapiens
  CDR3 for alpha chain variable domain of TCR clone 72331 (TRAV17, TRAJ28)
WDSGAGSYQLTF

SEQ ID NO: 144662 - protein, 13 aa, Homo sapiens
  CDR3 for beta chain variable domain of TCR clone 72331 (TRBV11-3, TRBJ1-1)
CASSRLPNTEAFF

SEQ ID NO: 144663 - protein, 14 aa, Homo sapiens
  CDR3 for alpha chain variable domain of TCR clone 72332 (TRAV29/DV5, TRAJ32)
CAAAYGGATNKLIF

SEQ ID NO: 144664 - protein, 15 aa, Homo sapiens
  CDR3 for beta chain variable domain of TCR clone 72332 (TRBV27, TRBJ2-7)
CASSTAGTGAYEQYF

SEQ ID NO: 144665 - protein, 16 aa, Homo sapiens
  CDR3 for alpha chain variable domain of TCR clone 72333 (TRAV12-2, TRAJ50)
CAVGTTTKTSYDKVIF

SEQ ID NO: 144666 - protein, 12 aa, Homo sapiens
  CDR3 for beta chain variable domain of TCR clone 72333 (TRBV12-4, TRBJ1-5)
CASSLGRQPQHF

SEQ ID NO: 144667 - protein, 15 aa, Homo sapiens
  CDR3 for alpha chain variable domain of TCR clone 72334 (TRAV17, TRAJ23)
CATDAEDNQGGKLIF

SEQ ID NO: 144668 - protein, 13 aa, Homo sapiens
  CDR3 for beta chain variable domain of TCR clone 72334 (TRBV7-2, TRBJ2-2)
CASSLAVTGELFF

SEQ ID NO: 144669 - protein, 14 aa, Homo sapiens
  CDR3 for alpha chain variable domain of TCR clone 72335 (TRAV12-2, TRAJ17)
CAVLFKAAGNKLTF

SEQ ID NO: 144670 - protein, 15 aa, Homo sapiens
  CDR3 for beta chain variable domain of TCR clone 72335 (TRBV7-3, TRBJ2-1)
CASSPTGGGEVEQFF

SEQ ID NO: 144671 - protein, 12 aa, Homo sapiens
  CDR3 for alpha chain variable domain of TCR clone 72336 (TRAV13-1, TRAJ21)
CAAKEGFNKFHF

SEQ ID NO: 144672 - protein, 13 aa, Homo sapiens
  CDR3 for beta chain variable domain of TCR clone 72336 (TRBV7-3, TRBJ1-1)
CASSQDWGAEAFF

SEQ ID NO: 144673 - protein, 11 aa, Homo sapiens
  CDR3 for alpha chain variable domain of TCR clone 72337 (TRAV12-3, TRAJ43)
CAMSVSNDMRF

SEQ ID NO: 144674 - protein, 16 aa, Homo sapiens
  CDR3 for beta chain variable domain of TCR clone 72337 (TRBV19, TRBJ2-1)
CASSKAGPSSYNEQFF

SEQ ID NO: 144675 - protein, 17 aa, Homo sapiens
  CDR3 for alpha chain variable domain of TCR clone 72338 (TRAV13-1, TRAJ52)
CAAGRNAGGTSYGRLTF

SEQ ID NO: 144676 - protein, 11 aa, Homo sapiens
  CDR3 for beta chain variable domain of TCR clone 72338 (TRBV20-1, TRBJ1-2)
CSVQGAGGYTF

SEQ ID NO: 144677 - protein, 14 aa, Homo sapiens
  CDR3 for alpha chain variable domain of TCR clone 72339 (TRAV13-1, TRAJ35)
CAASKGGFGKVLHF

SEQ ID NO: 144678 - protein, 13 aa, Homo sapiens
  CDR3 for beta chain variable domain of TCR clone 72339 (TRBV7-3, TRBJ1-1)
CASSQDWGAEAFF

SEQ ID NO: 144679 - protein, 13 aa, Homo sapiens
  CDR3 for alpha chain variable domain of TCR clone 72340 (TRAV27, TRAJ17)
CAVAATAGNKLTF

SEQ ID NO: 144680 - protein, 15 aa, Homo sapiens
  CDR3 for beta chain variable domain of TCR clone 72340 (TRBV5-1, TRBJ2-3)
CASRNQAGSTDTQYF

SEQ ID NO: 144681 - protein, 17 aa, Homo sapiens
  CDR3 for alpha chain variable domain of TCR clone 72341 (TRAV13-1, TRAJ52)
CAAGRHAGGTSYGKLTF

SEQ ID NO: 144682 - protein, 13 aa, Homo sapiens
  CDR3 for beta chain variable domain of TCR clone 72341 (TRBV7-2, TRBJ1-1)
CASNLKGAKVAFF

SEQ ID NO: 144683 - protein, 13 aa, Homo sapiens
  CDR3 for alpha chain variable domain of TCR clone 72342 (TRAV2, TRAJ36)
CAVDQTGANNLFF

SEQ ID NO: 144684 - protein, 12 aa, Homo sapiens
  CDR3 for beta chain variable domain of TCR clone 72342 (TRBV19, TRBJ1-1)
CASMNGYTEAFF

SEQ ID NO: 144685 - protein, 13 aa, Homo sapiens
  CDR3 for alpha chain variable domain of TCR clone 72343 (TRAV29/DV5, TRAJ31)
CAASRNNNARLLF

SEQ ID NO: 144686 - protein, 12 aa, Homo sapiens
  CDR3 for beta chain variable domain of TCR clone 72343 (TRBV14, TRBJ2-5)
CASSQLKETQYF

SEQ ID NO: 144687 - protein, 14 aa, Homo sapiens
  CDR3 for alpha chain variable domain of TCR clone 72344 (TRAV27, TRAJ45)
CAGAQEEVLTDSPL

SEQ ID NO: 144688 - protein, 11 aa, Homo sapiens
  CDR3 for beta chain variable domain of TCR clone 72344 (TRBV19, TRBJ1-1)
CASSIGSEAFF

SEQ ID NO: 144689 - protein, 14 aa, Homo sapiens
  CDR3 for alpha chain variable domain of TCR clone 72345 (TRAV38-1, TRAJ45)
CASHSGGGADVLTF

SEQ ID NO: 144690 - protein, 15 aa, Homo sapiens
  CDR3 for beta chain variable domain of TCR clone 72345 (TRBV10-2, TRBJ2-6)
CASSEQGTGANVLTF

SEQ ID NO: 144691 - protein, 13 aa, Homo sapiens
  CDR3 for alpha chain variable domain of TCR clone 72346 (TRAV1-2, TRAJ9)
CAALNTGGFKTIF

SEQ ID NO: 144692 - protein, 12 aa, Homo sapiens
  CDR3 for beta chain variable domain of TCR clone 72346 (TRBV11-2, TRBJ2-1)
CASSPGNNEQFF

SEQ ID NO: 144693 - protein, 15 aa, Homo sapiens
  CDR3 for alpha chain variable domain of TCR clone 72347 (TRAV1-2, TRAJ28)
CAVQYSGAGSYQLTF

SEQ ID NO: 144694 - protein, 15 aa, Homo sapiens
  CDR3 for beta chain variable domain of TCR clone 72347 (TRBV9, TRBJ1-6)
CASSVAGTGDSPPHF

SEQ ID NO: 144695 - protein, 14 aa, Homo sapiens
  CDR3 for alpha chain variable domain of TCR clone 72348 (TRAV1-2, TRAJ16)
CAVNRFSDGQKLLF

SEQ ID NO: 144696 - protein, 15 aa, Homo sapiens
  CDR3 for beta chain variable domain of TCR clone 72348 (TRBV20-1, TRBJ1-2)
CSARDSRGRNYGYTF

SEQ ID NO: 144697 - protein, 12 aa, Homo sapiens
  CDR3 for alpha chain variable domain of TCR clone 72349 (TRAV8-3, TRAJ11)
CAATSGYSTLTF

SEQ ID NO: 144698 - protein, 14 aa, Homo sapiens
  CDR3 for beta chain variable domain of TCR clone 72349 (TRBV20-1, TRBJ2-7)
CSAPELAGVGEQYF

SEQ ID NO: 144699 - protein, 12 aa, Homo sapiens
  CDR3 for alpha chain variable domain of TCR clone 72350 (TRAV3, TRAJ20)
CAVRDPDYKPSF

SEQ ID NO: 144700 - protein, 15 aa, Homo sapiens
  CDR3 for beta chain variable domain of TCR clone 72350 (TRBV2, TRBJ2-2)
CASSRETVGTGELFF

SEQ ID NO: 144701 - protein, 12 aa, Homo sapiens
  CDR3 for alpha chain variable domain of TCR clone 72351 (TRAV8-4, TRAJ31)
CAVSDSNAGLMF

SEQ ID NO: 144702 - protein, 14 aa, Homo sapiens
  CDR3 for beta chain variable domain of TCR clone 72351 (TRBV20-1, TRBJ2-7)
CSAKRGRSSYEQYF

SEQ ID NO: 144703 - protein, 16 aa, Homo sapiens
  CDR3 for alpha chain variable domain of TCR clone 72352 (TRAV30, TRAJ24)
CGTEIVDADSWGKFPF

SEQ ID NO: 144704 - protein, 14 aa, Homo sapiens
  CDR3 for beta chain variable domain of TCR clone 72352 (TRBV12-5, TRBJ2-5)
CASGSRTQQETQYF

SEQ ID NO: 144705 - protein, 16 aa, Homo sapiens
  CDR3 for alpha chain variable domain of TCR clone 72353 (TRAV30, TRAJ24)
CGTEIVDADSWGKFQF

SEQ ID NO: 144706 - protein, 18 aa, Homo sapiens
  CDR3 for beta chain variable domain of TCR clone 72353 (TRBV20-1, TRBJ2-1)
CSARGDRGPLGIQNEQFF

SEQ ID NO: 144707 - protein, 15 aa, Homo sapiens
  CDR3 for alpha chain variable domain of TCR clone 72354 (TRAV6, TRAJ4)
CALGGFSGGYHKLIF

SEQ ID NO: 144708 - protein, 13 aa, Homo sapiens
  CDR3 for beta chain variable domain of TCR clone 72354 (TRBV19, TRBJ1-2)
CASSVPGQDGYTF

SEQ ID NO: 144709 - protein, 13 aa, Homo sapiens
  CDR3 for alpha chain variable domain of TCR clone 72355 (TRAV35, TRAJ40)
CAEQLSGTYKYIF

SEQ ID NO: 144710 - protein, 14 aa, Homo sapiens
  CDR3 for beta chain variable domain of TCR clone 72355 (TRBV3-1, TRBJ2-5)
CASSLQLAGETQYF

SEQ ID NO: 144711 - protein, 14 aa, Homo sapiens
  CDR3 for alpha chain variable domain of TCR clone 72356 (TRAV12-1, TRAJ43)
CVVNGRSNNNDMRF

SEQ ID NO: 144712 - protein, 14 aa, Homo sapiens
  CDR3 for beta chain variable domain of TCR clone 72356 (TRBV18, TRBJ2-5)
CASSPGVSQETQYF

SEQ ID NO: 144713 - protein, 14 aa, Homo sapiens
  CDR3 for alpha chain variable domain of TCR clone 72357 (TRAV12-1, TRAJ9)
CVVTGYTGGVKTIF

SEQ ID NO: 144714 - protein, 13 aa, Homo sapiens
  CDR3 for beta chain variable domain of TCR clone 72357 (TRBV20-1, TRBJ1-1)
CSARAGGNTEAFF

SEQ ID NO: 144715 - protein, 12 aa, Homo sapiens
  CDR3 for alpha chain variable domain of TCR clone 72358 (TRAV17, TRAJ20)
CATDSNDSKLSF

SEQ ID NO: 144716 - protein, 16 aa, Homo sapiens
  CDR3 for beta chain variable domain of TCR clone 72358 (TRBV7-2, TRBJ1-2)
CASSSNQDRRGHGYTF

SEQ ID NO: 144717 - protein, 12 aa, Homo sapiens
  CDR3 for alpha chain variable domain of TCR clone 72359 (TRAV13-1, TRAJ15)
CAANQAGTALIF

SEQ ID NO: 144718 - protein, 14 aa, Homo sapiens
  CDR3 for beta chain variable domain of TCR clone 72359 (TRBV19, TRBJ2-2)
CASSTLHRSGELFF

SEQ ID NO: 144719 - protein, 12 aa, Homo sapiens
  CDR3 for alpha chain variable domain of TCR clone 72360 (TRAV1-2, TRAJ17)
CAVRSAGNKLTF

SEQ ID NO: 144720 - protein, 16 aa, Homo sapiens
  CDR3 for beta chain variable domain of TCR clone 72360 (TRBV20-1, TRBJ2-1)
CSAPGLAGSYSDEQFF

SEQ ID NO: 144721 - protein, 11 aa, Homo sapiens
  CDR3 for alpha chain variable domain of TCR clone 72361 (TRAV12-2, TRAJ49)
CAVNTGNQFYF

SEQ ID NO: 144722 - protein, 13 aa, Homo sapiens
  CDR3 for beta chain variable domain of TCR clone 72361 (TRBV19, TRBJ2-1)
CATSRGVYNEQFF

SEQ ID NO: 144723 - protein, 14 aa, Homo sapiens
  CDR3 for alpha chain variable domain of TCR clone 72362 (TRAV1-2, TRAJ16)
CAVNRFSDGQKLLF

SEQ ID NO: 144724 - protein, 15 aa, Homo sapiens
  CDR3 for beta chain variable domain of TCR clone 72362 (TRBV24-1, TRBJ1-4)
CATSDPQGADEKLFF

SEQ ID NO: 144725 - protein, 12 aa, Homo sapiens
  CDR3 for alpha chain variable domain of TCR clone 72363 (TRAV12-2, TRAJ8)
CAVNTGFQKLVF

SEQ ID NO: 144726 - protein, 14 aa, Homo sapiens
  CDR3 for beta chain variable domain of TCR clone 72363 (TRBV7-2, TRBJ1-1)
CASSFLTGTTEAFF

SEQ ID NO: 144727 - protein, 12 aa, Homo sapiens
  CDR3 for alpha chain variable domain of TCR clone 72364 (TRAV29/DV5, TRAJ34)
CAARHNTDKLIF

SEQ ID NO: 144728 - protein, 15 aa, Homo sapiens
  CDR3 for beta chain variable domain of TCR clone 72364 (TRBV19, TRBJ2-7)
CASSPSGSGEALRYF

SEQ ID NO: 144729 - protein, 12 aa, Homo sapiens
  CDR3 for alpha chain variable domain of TCR clone 72365 (TRAV1-1, TRAJ8)
CAGGTGFQKLVF

SEQ ID NO: 144730 - protein, 16 aa, Homo sapiens
  CDR3 for beta chain variable domain of TCR clone 72365 (TRBV12-4, TRBJ1-5)
CASSRPVGGSNQTQHF

SEQ ID NO: 144731 - protein, 13 aa, Homo sapiens
  CDR3 for alpha chain variable domain of TCR clone 72366 (TRAV1-2, TRAJ9)
CAALNTGGFKTIF

SEQ ID NO: 144732 - protein, 13 aa, Homo sapiens
  CDR3 for beta chain variable domain of TCR clone 72366 (TRBV4-1, TRBJ2-2)
CASSQENTGELFF

SEQ ID NO: 144733 - protein, 15 aa, Homo sapiens
  CDR3 for alpha chain variable domain of TCR clone 72367 (TRAV3, TRAJ20)
CAVRDIKLSDDKLSF

SEQ ID NO: 144734 - protein, 15 aa, Homo sapiens
  CDR3 for beta chain variable domain of TCR clone 72367 (TRBV7-9, TRBJ1-6)
CASSSPGRGNSPLHF

SEQ ID NO: 144735 - protein, 12 aa, Homo sapiens
  CDR3 for alpha chain variable domain of TCR clone 72368 (TRAV35, TRAJ43)
CAGAYNNNDIRF

SEQ ID NO: 144736 - protein, 14 aa, Homo sapiens
  CDR3 for beta chain variable domain of TCR clone 72368 (TRBV2, TRBJ2-2)
CASSWQGATGELFF

SEQ ID NO: 144737 - protein, 13 aa, Homo sapiens
  CDR3 for alpha chain variable domain of TCR clone 72369 (TRAV17, TRAJ5)
CALRGTGRRALTF

SEQ ID NO: 144738 - protein, 16 aa, Homo sapiens
  CDR3 for beta chain variable domain of TCR clone 72369 (TRBV12-5, TRBJ2-5)
CASGPRTSGNQETQYF

SEQ ID NO: 144739 - protein, 12 aa, Homo sapiens
  CDR3 for alpha chain variable domain of TCR clone 72370 (TRAV29/DV5, TRAJ15)
CASNQAGTALIF

SEQ ID NO: 144740 - protein, 15 aa, Homo sapiens
  CDR3 for beta chain variable domain of TCR clone 72370 (TRBV20-1, TRBJ2-7)
CSARDRVSGMDEQYF

SEQ ID NO: 144741 - protein, 13 aa, Homo sapiens
  CDR3 for alpha chain variable domain of TCR clone 72371 (TRAV20, TRAJ48)
CAVQGVGNEKLTF

SEQ ID NO: 144742 - protein, 12 aa, Homo sapiens
  CDR3 for beta chain variable domain of TCR clone 72371 (TRBV11-2, TRBJ2-2)
CASSLGGGELFF

SEQ ID NO: 144743 - protein, 12 aa, Homo sapiens
  CDR3 for alpha chain variable domain of TCR clone 72372 (TRAV8-3, TRAJ20)
CAVGANDYKLSF

SEQ ID NO: 144744 - protein, 14 aa, Homo sapiens
  CDR3 for beta chain variable domain of TCR clone 72372 (TRBV7-9, TRBJ2-3)
CASSLEDGTDTQYF

SEQ ID NO: 144745 - protein, 16 aa, Homo sapiens
  CDR3 for alpha chain variable domain of TCR clone 72373 (TRAV17, TRAJ28)
CATDEYSGAGSYQLTF

SEQ ID NO: 144746 - protein, 13 aa, Homo sapiens
  CDR3 for beta chain variable domain of TCR clone 72373 (TRBV7-9, TRBJ1-2)
CASRTGPNYGDTF

SEQ ID NO: 144747 - protein, 18 aa, Homo sapiens
  CDR3 for alpha chain variable domain of TCR clone 72374 (TRAV12-3, TRAJ52)
CALSVGGAGGTSYGKLTF

SEQ ID NO: 144748 - protein, 15 aa, Homo sapiens
  CDR3 for beta chain variable domain of TCR clone 72374 (TRBV27, TRBJ1-6)
CASSFDRGLGSPLHF

SEQ ID NO: 144749 - protein, 13 aa, Homo sapiens
  CDR3 for alpha chain variable domain of TCR clone 72375 (TRAV16, TRAJ58)
CALSIPSGSRLTF

SEQ ID NO: 144750 - protein, 14 aa, Homo sapiens
  CDR3 for beta chain variable domain of TCR clone 72375 (TRBV7-3, TRBJ2-2)
CASSSGGYTGELFF

SEQ ID NO: 144751 - protein, 13 aa, Homo sapiens
  CDR3 for alpha chain variable domain of TCR clone 72376 (TRAV8-1, TRAJ39)
CAGLNNEGNMLTF

SEQ ID NO: 144752 - protein, 17 aa, Homo sapiens
  CDR3 for beta chain variable domain of TCR clone 72376 (TRBV19, TRBJ2-3)
CASSIDPAGGGTDTQYF

SEQ ID NO: 144753 - protein, 12 aa, Homo sapiens
  CDR3 for alpha chain variable domain of TCR clone 72377 (TRAV29/DV5, TRAJ49)
CSATDTGNQFYF

SEQ ID NO: 144754 - protein, 12 aa, Homo sapiens
  CDR3 for beta chain variable domain of TCR clone 72377 (TRBV12-4, TRBJ2-7)
CASSLGGYEQYF

SEQ ID NO: 144755 - protein, 13 aa, Homo sapiens
  CDR3 for alpha chain variable domain of TCR clone 72378 (TRAV3, TRAJ4)
CAVRDGGYNKLIF

SEQ ID NO: 144756 - protein, 14 aa, Homo sapiens
  CDR3 for beta chain variable domain of TCR clone 72378 (TRBV12-4, TRBJ1-2)
CASSSSAAGSSYTL

SEQ ID NO: 144757 - protein, 12 aa, Homo sapiens
  CDR3 for alpha chain variable domain of TCR clone 72379 (TRAV20, TRAJ33)
CAVRGSNYQLIW

SEQ ID NO: 144758 - protein, 13 aa, Homo sapiens
  CDR3 for beta chain variable domain of TCR clone 72379 (TRBV4-3, TRBJ1-1)
CASSPTGNTEAFL

SEQ ID NO: 144759 - protein, 10 aa, Homo sapiens
  CDR3 for alpha chain variable domain of TCR clone 72380 (TRAV5, TRAJ34)
CAEDTDKLIF

SEQ ID NO: 144760 - protein, 20 aa, Homo sapiens
  CDR3 for beta chain variable domain of TCR clone 72380 (TRBV11-2, TRBJ2-2)
LRTRPCISVPAALEAGSFFF

SEQ ID NO: 144761 - protein, 15 aa, Homo sapiens
  CDR3 for alpha chain variable domain of TCR clone 72381 (TRAV25, TRAJ52)
CAGRPGGTSYGKLTF

SEQ ID NO: 144762 - protein, 17 aa, Homo sapiens
  CDR3 for beta chain variable domain of TCR clone 72381 (TRBV7-8, TRBJ2-6)
YASSAGTGGAGANVLTF

SEQ ID NO: 144763 - protein, 14 aa, Homo sapiens
  CDR3 for alpha chain variable domain of TCR clone 72382 (TRAV12-2, TRAJ4)
CAVLIGGGYNKLIF

SEQ ID NO: 144764 - protein, 12 aa, Homo sapiens
  CDR3 for beta chain variable domain of TCR clone 72382 (TRBV7-8, TRBJ2-7)
CASSLGDREQYF

SEQ ID NO: 144765 - protein, 15 aa, Homo sapiens
  CDR3 for alpha chain variable domain of TCR clone 72383 (TRAV35, TRAJ40)
CAGQLGTSGTYKYIF

SEQ ID NO: 144766 - protein, 14 aa, Homo sapiens
  CDR3 for beta chain variable domain of TCR clone 72383 (TRBV7-3, TRBJ2-1)
CASSLAGVTNEQFF

SEQ ID NO: 144767 - protein, 18 aa, Homo sapiens
  CDR3 for alpha chain variable domain of TCR clone 72384 (TRAV29/DV5, TRAJ52)
CAAGFRGAGGTSYGKLTF

SEQ ID NO: 144768 - protein, 15 aa, Homo sapiens
  CDR3 for beta chain variable domain of TCR clone 72384 (TRBV4-1, TRBJ1-4)
CASSDTGGTNEKLFF

SEQ ID NO: 144769 - protein, 16 aa, Homo sapiens
  CDR3 for alpha chain variable domain of TCR clone 72385 (TRAV1-2, TRAJ10)
CAVRGVLTGGGNKLTF

SEQ ID NO: 144770 - protein, 12 aa, Homo sapiens
  CDR3 for beta chain variable domain of TCR clone 72385 (TRBV7-8, TRBJ2-7)
CAISLGDREQYF

SEQ ID NO: 144771 - protein, 13 aa, Homo sapiens
  CDR3 for alpha chain variable domain of TCR clone 72386 (TRAV27, TRAJ56)
CAGKPGANSKLTF

SEQ ID NO: 144772 - protein, 16 aa, Homo sapiens
  CDR3 for beta chain variable domain of TCR clone 72386 (TRBV10-3, TRBJ2-1)
CAISGVGDGGGGEQFF

SEQ ID NO: 144773 - protein, 14 aa, Homo sapiens
  CDR3 for alpha chain variable domain of TCR clone 72387 (TRAV23/DV6, TRAJ22)
CAASVSGSARQLTF

SEQ ID NO: 144774 - protein, 15 aa, Homo sapiens
  CDR3 for beta chain variable domain of TCR clone 72387 (TRBV20-1, TRBJ2-7)
YSARDRVSGMDEQYF

SEQ ID NO: 144775 - protein, 13 aa, Homo sapiens
  CDR3 for alpha chain variable domain of TCR clone 72388 (TRAV2, TRAJ40)
CAVVTSGTYKYIF

SEQ ID NO: 144776 - protein, 14 aa, Homo sapiens
  CDR3 for beta chain variable domain of TCR clone 72388 (TRBV19, TRBJ2-1)
CASPTFVSSGEQSF

SEQ ID NO: 144777 - protein, 12 aa, Homo sapiens
  CDR3 for alpha chain variable domain of TCR clone 72389 (TRAV13-1, TRAJ15)
CAASQAGTAMIF

SEQ ID NO: 144778 - protein, 14 aa, Homo sapiens
  CDR3 for beta chain variable domain of TCR clone 72389 (TRBV19, TRBJ2-2)
CASSTLHRSGELFF

SEQ ID NO: 144779 - protein, 14 aa, Homo sapiens
  CDR3 for alpha chain variable domain of TCR clone 72390 (TRAV13-2, TRAJ10)
CAETLPGGGNKLTF

SEQ ID NO: 144780 - protein, 15 aa, Homo sapiens
  CDR3 for beta chain variable domain of TCR clone 72390 (TRBV7-9, TRBJ1-6)
CASSSPGRGNSPLHF

SEQ ID NO: 144781 - protein, 16 aa, Homo sapiens
  CDR3 for alpha chain variable domain of TCR clone 72391 (TRAV3, TRAJ21)
CAVRDLERGNFNKFYF

SEQ ID NO: 144782 - protein, 16 aa, Homo sapiens
  CDR3 for beta chain variable domain of TCR clone 72391 (TRBV12-4, TRBJ1-5)
CASSRPVGGSNQPQHF

SEQ ID NO: 144783 - protein, 16 aa, Homo sapiens
  CDR3 for alpha chain variable domain of TCR clone 72392 (TRAV8-3, TRAJ8)
CAVPRDGNTGFQKLVF

SEQ ID NO: 144784 - protein, 14 aa, Homo sapiens
  CDR3 for beta chain variable domain of TCR clone 72392 (TRBV11-2, TRBJ2-5)
CASSRTGGIETQCF

SEQ ID NO: 144785 - protein, 13 aa, Homo sapiens
  CDR3 for alpha chain variable domain of TCR clone 72393 (TRAV13-1, TRAJ5)
CAASDPGRRALTF

SEQ ID NO: 144786 - protein, 12 aa, Homo sapiens
  CDR3 for beta chain variable domain of TCR clone 72393 (TRBV28, TRBJ2-3)
CASSLYRDTQYF

SEQ ID NO: 144787 - protein, 10 aa, Homo sapiens
  CDR3 for alpha chain variable domain of TCR clone 72394 (TRAV2, TRAJ34)
CAVVNDKLIF

SEQ ID NO: 144788 - protein, 12 aa, Homo sapiens
  CDR3 for beta chain variable domain of TCR clone 72394 (TRBV7-8, TRBJ2-7)
CASSLGEREQYF

SEQ ID NO: 144789 - protein, 12 aa, Homo sapiens
  CDR3 for alpha chain variable domain of TCR clone 72395 (TRAV8-4, TRAJ43)
CAVSVNNNDMRF

SEQ ID NO: 144790 - protein, 12 aa, Homo sapiens
  CDR3 for beta chain variable domain of TCR clone 72395 (TRBV11-2, TRBJ2-2)
CASSLGGGELFF

SEQ ID NO: 144791 - protein, 14 aa, Homo sapiens
  CDR3 for alpha chain variable domain of TCR clone 72396 (TRAV1-2, TRAJ8)
CAVREDTGFQTLVF

SEQ ID NO: 144792 - protein, 14 aa, Homo sapiens
  CDR3 for beta chain variable domain of TCR clone 72396 (TRBV5-4, TRBJ1-1)
CASSLDSRRDEAFF

SEQ ID NO: 144793 - protein, 15 aa, Homo sapiens
  CDR3 for alpha chain variable domain of TCR clone 72397 (TRAV25, TRAJ52)
CAGRPGGTSYGKLTF

SEQ ID NO: 144794 - protein, 17 aa, Homo sapiens
  CDR3 for beta chain variable domain of TCR clone 72397 (TRBV7-8, TRBJ2-6)
CASSDGTGGAGANVLTF

SEQ ID NO: 144795 - protein, 12 aa, Homo sapiens
  CDR3 for alpha chain variable domain of TCR clone 72398 (TRAV13-1, TRAJ21)
CAAKEGFNEFYF

SEQ ID NO: 144796 - protein, 14 aa, Homo sapiens
  CDR3 for beta chain variable domain of TCR clone 72398 (TRBV5-1, TRBJ2-7)
CASSRGESLYEQYF

SEQ ID NO: 144797 - protein, 16 aa, Homo sapiens
  CDR3 for alpha chain variable domain of TCR clone 72399 (TRAV3, TRAJ10)
CAVRGMRAGGGNKLTF

SEQ ID NO: 144798 - protein, 14 aa, Homo sapiens
  CDR3 for beta chain variable domain of TCR clone 72399 (TRBV25-1, TRBJ1-1)
CASTHLGGNTEAFF

SEQ ID NO: 144799 - protein, 17 aa, Homo sapiens
  CDR3 for alpha chain variable domain of TCR clone 72400 (TRAV22, TRAJ53)
CAVEFSSSGGSNYKLTF

SEQ ID NO: 144800 - protein, 15 aa, Homo sapiens
  CDR3 for beta chain variable domain of TCR clone 72400 (TRBV29-1, TRBJ2-1)
CSVPTGLALYNEQFF

SEQ ID NO: 144801 - protein, 12 aa, Homo sapiens
  CDR3 for alpha chain variable domain of TCR clone 72401 (TRAV13-1, TRAJ49)
CATSPMGNQFYF

SEQ ID NO: 144802 - protein, 10 aa, Homo sapiens
  CDR3 for beta chain variable domain of TCR clone 72401 (TRBV15, TRBJ2-7)
AETGGYEQYF

SEQ ID NO: 144803 - protein, 12 aa, Homo sapiens
  CDR3 for alpha chain variable domain of TCR clone 72402 (TRAV13-1, TRAJ49)
CAASPMGNQIYF

SEQ ID NO: 144804 - protein, 13 aa, Homo sapiens
  CDR3 for beta chain variable domain of TCR clone 72402 (TRBV20-1, TRBJ2-2)
CSASAAGTGELFF

SEQ ID NO: 144805 - protein, 14 aa, Homo sapiens
  CDR3 for alpha chain variable domain of TCR clone 72403 (TRAV35, TRAJ10)
CAGILTGGGNKLTF

SEQ ID NO: 144806 - protein, 12 aa, Homo sapiens
  CDR3 for beta chain variable domain of TCR clone 72403 (TRBV11-2, TRBJ2-2)
CASSLGGGELFF

SEQ ID NO: 144807 - protein, 14 aa, Homo sapiens
  CDR3 for alpha chain variable domain of TCR clone 72404 (TRAV17, TRAJ22)
CATDAIGSARQLTF

SEQ ID NO: 144808 - protein, 14 aa, Homo sapiens
  CDR3 for beta chain variable domain of TCR clone 72404 (TRBV7-3, TRBJ1-1)
CASSLKGGNTEAFF

SEQ ID NO: 144809 - protein, 13 aa, Homo sapiens
  CDR3 for alpha chain variable domain of TCR clone 72405 (TRAV12-1, TRAJ16)
CVVNGPDGQKLLF

SEQ ID NO: 144810 - protein, 18 aa, Homo sapiens
  CDR3 for beta chain variable domain of TCR clone 72405 (TRBV12-4, TRBJ2-2)
CASSLVAGTRGRTGELFF

SEQ ID NO: 144811 - protein, 12 aa, Homo sapiens
  CDR3 for alpha chain variable domain of TCR clone 72406 (TRAV3, TRAJ39)
CAVIEWSKMLTF

SEQ ID NO: 144812 - protein, 14 aa, Homo sapiens
  CDR3 for beta chain variable domain of TCR clone 72406 (TRBV7-8, TRBJ2-3)
CASSFPDGQDTQYF

SEQ ID NO: 144813 - protein, 20 aa, Homo sapiens
  CDR3 for alpha chain variable domain of TCR clone 72407 (TRAV12-2, TRAJ52)
SPVIQPPARAGGTSYGKLTF

SEQ ID NO: 144814 - protein, 16 aa, Homo sapiens
  CDR3 for beta chain variable domain of TCR clone 72407 (TRBV15, TRBJ1-2)
CATSRGPRTGGGGYSF

SEQ ID NO: 144815 - protein, 13 aa, Homo sapiens
  CDR3 for alpha chain variable domain of TCR clone 72408 (TRAV1-2, TRAJ9)
CAVLNTGGLKTIF

SEQ ID NO: 144816 - protein, 14 aa, Homo sapiens
  CDR3 for beta chain variable domain of TCR clone 72408 (TRBV20-1, TRBJ2-3)
CSARGGTSTDTQYF

SEQ ID NO: 144817 - protein, 12 aa, Homo sapiens
  CDR3 for alpha chain variable domain of TCR clone 72409 (TRAV12-3, TRAJ17)
CAMTLTGNKLTF

SEQ ID NO: 144818 - protein, 20 aa, Homo sapiens
  CDR3 for beta chain variable domain of TCR clone 72409 (TRBV11-1, TRBJ2-6)
CASSAEFQPGMSSGANVLTF

SEQ ID NO: 144819 - protein, 14 aa, Homo sapiens
  CDR3 for alpha chain variable domain of TCR clone 72410 (TRAV26-2, TRAJ27)
CILRDISDAGKSTF

SEQ ID NO: 144820 - protein, 15 aa, Homo sapiens
  CDR3 for beta chain variable domain of TCR clone 72410 (TRBV10-3, TRBJ2-7)
CATREQGLRSYEQYL

SEQ ID NO: 144821 - protein, 16 aa, Homo sapiens
  CDR3 for alpha chain variable domain of TCR clone 72411 (TRAV30, TRAJ24)
CGTEIVDADSWGKFQF

SEQ ID NO: 144822 - protein, 12 aa, Homo sapiens
  CDR3 for beta chain variable domain of TCR clone 72411 (TRBV12-4, TRBJ2-1)
CASSPGRNEQFF

SEQ ID NO: 144823 - protein, 11 aa, Homo sapiens
  CDR3 for alpha chain variable domain of TCR clone 72412 (TRAV8-4, TRAJ20)
CAVTNVLTTTS

SEQ ID NO: 144824 - protein, 16 aa, Homo sapiens
  CDR3 for beta chain variable domain of TCR clone 72412 (TRBV6-1, TRBJ1-2)
CASSGAWQGSSHGYTF

SEQ ID NO: 144825 - protein, 13 aa, Homo sapiens
  CDR3 for alpha chain variable domain of TCR clone 72413 (TRAV1-2, TRAJ9)
CAALNTGGFKTIF

SEQ ID NO: 144826 - protein, 17 aa, Homo sapiens
  CDR3 for beta chain variable domain of TCR clone 72413 (TRBV7-9, TRBJ2-3)
CASSPTVAGDLTDTQYF

SEQ ID NO: 144827 - protein, 15 aa, Homo sapiens
  CDR3 for alpha chain variable domain of TCR clone 72414 (TRAV27, TRAJ28)
CAGAYSGAGSYQLTF

SEQ ID NO: 144828 - protein, 14 aa, Homo sapiens
  CDR3 for beta chain variable domain of TCR clone 72414 (TRBV28, TRBJ2-3)
CASSWRGRADTQYF

SEQ ID NO: 144829 - protein, 16 aa, Homo sapiens
  CDR3 for alpha chain variable domain of TCR clone 72415 (TRAV8-6, TRAJ28)
CAVTSKPGAGSYQLPF

SEQ ID NO: 144830 - protein, 16 aa, Homo sapiens
  CDR3 for beta chain variable domain of TCR clone 72415 (TRBV12-4, TRBJ2-5)
CASSWRPSGDLETQYF

SEQ ID NO: 144831 - protein, 16 aa, Homo sapiens
  CDR3 for alpha chain variable domain of TCR clone 72416 (TRAV14/DV4, TRAJ53)
CAMREGGGGSNYKLTF

SEQ ID NO: 144832 - protein, 15 aa, Homo sapiens
  CDR3 for beta chain variable domain of TCR clone 72416 (TRBV7-9, TRBJ1-5)
CASSQGHQPNQPQHF

SEQ ID NO: 144833 - protein, 14 aa, Homo sapiens
  CDR3 for alpha chain variable domain of TCR clone 72417 (TRAV12-3, TRAJ57)
CARALEGGSEKLVF

SEQ ID NO: 144834 - protein, 17 aa, Homo sapiens
  CDR3 for beta chain variable domain of TCR clone 72417 (TRBV11-3, TRBJ2-3)
CASSLGLTGGGHRYAVF

SEQ ID NO: 144835 - protein, 12 aa, Homo sapiens
  CDR3 for alpha chain variable domain of TCR clone 72418 (TRAV8-3, TRAJ20)
CAVGANDYKLSF

SEQ ID NO: 144836 - protein, 16 aa, Homo sapiens
  CDR3 for beta chain variable domain of TCR clone 72418 (TRBV19, TRBJ2-2)
CASRSPCTGATGELFF

SEQ ID NO: 144837 - protein, 14 aa, Homo sapiens
  CDR3 for alpha chain variable domain of TCR clone 72419 (TRAV35, TRAJ50)
CAGHRKTSYDTVIF

SEQ ID NO: 144838 - protein, 13 aa, Homo sapiens
  CDR3 for beta chain variable domain of TCR clone 72419 (TRBV7-7, TRBJ2-3)
CASSLSRADTQYF

SEQ ID NO: 144839 - protein, 15 aa, Homo sapiens
  CDR3 for alpha chain variable domain of TCR clone 72420 (TRAV4, TRAJ39)
CLVGPNNDAGNMLTF

SEQ ID NO: 144840 - protein, 16 aa, Homo sapiens
  CDR3 for beta chain variable domain of TCR clone 72420 (TRBV13, TRBJ2-2)
CASSPRTGEHTGELFF

SEQ ID NO: 144841 - protein, 13 aa, Homo sapiens
  CDR3 for alpha chain variable domain of TCR clone 72421 (TRAV13-2, TRAJ53)
CAENMGSNYKLTF

SEQ ID NO: 144842 - protein, 19 aa, Homo sapiens
  CDR3 for beta chain variable domain of TCR clone 72421 (TRBV7-2, TRBJ2-3)
CASSFLSRNWGGGTDTQYF

SEQ ID NO: 144843 - protein, 14 aa, Homo sapiens
  CDR3 for alpha chain variable domain of TCR clone 72422 (TRAV1-2, TRAJ16)
CAVNRFSDGQKLLF

SEQ ID NO: 144844 - protein, 13 aa, Homo sapiens
  CDR3 for beta chain variable domain of TCR clone 72422 (TRBV27, TRBJ2-1)
CARRTLGVGEQFF

SEQ ID NO: 144845 - protein, 12 aa, Homo sapiens
  CDR3 for alpha chain variable domain of TCR clone 72423 (TRAV9-2, TRAJ40)
CALTSGTYKYIF

SEQ ID NO: 144846 - protein, 16 aa, Homo sapiens
  CDR3 for beta chain variable domain of TCR clone 72423 (TRBV7-7, TRBJ2-2)
CASSPRTGLNTGEPFF

SEQ ID NO: 144847 - protein, 13 aa, Homo sapiens
  CDR3 for alpha chain variable domain of TCR clone 72424 (TRAV2, TRAJ39)
TTVHNNAGNMLTF

SEQ ID NO: 144848 - protein, 16 aa, Homo sapiens
  CDR3 for beta chain variable domain of TCR clone 72424 (TRBV24-1, TRBJ2-3)
CATSGYRDRDADTQYF

SEQ ID NO: 144849 - protein, 15 aa, Homo sapiens
  CDR3 for alpha chain variable domain of TCR clone 72425 (TRAV12-1, TRAJ8)
CVVNIENTGFQKLVF

SEQ ID NO: 144850 - protein, 16 aa, Homo sapiens
  CDR3 for beta chain variable domain of TCR clone 72425 (TRBV7-2, TRBJ2-7)
CASSLEAGGPWYEQYF

SEQ ID NO: 144851 - protein, 16 aa, Homo sapiens
  CDR3 for alpha chain variable domain of TCR clone 72426 (TRAV20, TRAJ26)
CAVQHRRDNYGQNFVF

SEQ ID NO: 144852 - protein, 15 aa, Homo sapiens
  CDR3 for beta chain variable domain of TCR clone 72426 (TRBV7-2, TRBJ2-7)
RASSWGQGAIYEQYF

SEQ ID NO: 144853 - protein, 14 aa, Homo sapiens
  CDR3 for alpha chain variable domain of TCR clone 72427 (TRAV16, TRAJ15)
CALSGPQAGTALIF

SEQ ID NO: 144854 - protein, 12 aa, Homo sapiens
  CDR3 for beta chain variable domain of TCR clone 72427 (TRBV18, TRBJ2-5)
CANSPSKETQYF

SEQ ID NO: 144855 - protein, 18 aa, Homo sapiens
  CDR3 for alpha chain variable domain of TCR clone 72428 (TRAV21, TRAJ52)
CAVRLSPAGGTSYGKLTF

SEQ ID NO: 144856 - protein, 13 aa, Homo sapiens
  CDR3 for beta chain variable domain of TCR clone 72428 (TRBV7-3, TRBJ1-1)
CASSQDWGAEAFF

SEQ ID NO: 144857 - protein, 14 aa, Homo sapiens
  CDR3 for alpha chain variable domain of TCR clone 72429 (TRAV1-1, TRAJ28)
CAAPSGAGSCQLTF

SEQ ID NO: 144858 - protein, 15 aa, Homo sapiens
  CDR3 for beta chain variable domain of TCR clone 72429 (TRBV7-2, TRBJ1-2)
CASSLVSGGDYGYTF

SEQ ID NO: 144859 - protein, 15 aa, Homo sapiens
  CDR3 for alpha chain variable domain of TCR clone 72430 (TRAV3, TRAJ33)
CSCERLLLWNYQLIW

SEQ ID NO: 144860 - protein, 15 aa, Homo sapiens
  CDR3 for beta chain variable domain of TCR clone 72430 (TRBV20-1, TRBJ1-1)
CSASRGVTGNTEAFF

SEQ ID NO: 144861 - protein, 16 aa, Homo sapiens
  CDR3 for alpha chain variable domain of TCR clone 72431 (TRAV12-2, TRAJ40)
CAVIRGGTSGTYNYIF

SEQ ID NO: 144862 - protein, 14 aa, Homo sapiens
  CDR3 for beta chain variable domain of TCR clone 72431 (TRBV20-1, TRBJ2-5)
CSARDGRAGETQYF

SEQ ID NO: 144863 - protein, 13 aa, Homo sapiens
  CDR3 for alpha chain variable domain of TCR clone 72432 (TRAV1-2, TRAJ9)
CAALNTGGFKTIF

SEQ ID NO: 144864 - protein, 15 aa, Homo sapiens
  CDR3 for beta chain variable domain of TCR clone 72432 (TRBV20-1, TRBJ2-2)
CSAIPGHSNTGELFF

SEQ ID NO: 144865 - protein, 10 aa, Homo sapiens
  CDR3 for alpha chain variable domain of TCR clone 72433 (TRAV12-3, TRAJ49)
CAMNDDQFYF

SEQ ID NO: 144866 - protein, 16 aa, Homo sapiens
  CDR3 for beta chain variable domain of TCR clone 72433 (TRBV7-9, TRBJ1-2)
CASSLGFSSGEDGYTF

SEQ ID NO: 144867 - protein, 12 aa, Homo sapiens
  CDR3 for alpha chain variable domain of TCR clone 72434 (TRAV13-1, TRAJ27)
CAAHTNAGKSTC

SEQ ID NO: 144868 - protein, 14 aa, Homo sapiens
  CDR3 for beta chain variable domain of TCR clone 72434 (TRBV12-5, TRBJ2-5)
CASGSRTHQETQYF

SEQ ID NO: 144869 - protein, 13 aa, Homo sapiens
  CDR3 for alpha chain variable domain of TCR clone 72435 (TRAV30, TRAJ24)
CGTVTDSWGNLQF

SEQ ID NO: 144870 - protein, 14 aa, Homo sapiens
  CDR3 for beta chain variable domain of TCR clone 72435 (TRBV6-3, TRBJ2-2)
CASTYTPDTGELFF

SEQ ID NO: 144871 - protein, 17 aa, Homo sapiens
  CDR3 for alpha chain variable domain of TCR clone 72436 (TRAV36/DV7, TRAJ42)
CAGGGMNYGGSQGNLIF

SEQ ID NO: 144872 - protein, 13 aa, Homo sapiens
  CDR3 for beta chain variable domain of TCR clone 72436 (TRBV7-9, TRBJ2-3)
CASSPGSTDTQYF

SEQ ID NO: 144873 - protein, 14 aa, Homo sapiens
  CDR3 for alpha chain variable domain of TCR clone 72437 (TRAV12-2, TRAJ13)
CAVKKTGGYQKVTF

SEQ ID NO: 144874 - protein, 16 aa, Homo sapiens
  CDR3 for beta chain variable domain of TCR clone 72437 (TRBV12-4, TRBJ2-5)
CASSWRPSGDLETQYF

SEQ ID NO: 144875 - protein, 11 aa, Homo sapiens
  CDR3 for alpha chain variable domain of TCR clone 72438 (TRAV2, TRAJ13)
CASGGYQKVTF

SEQ ID NO: 144876 - protein, 14 aa, Homo sapiens
  CDR3 for beta chain variable domain of TCR clone 72438 (TRBV18, TRBJ2-3)
CASSGLADTDTQYF

SEQ ID NO: 144877 - protein, 16 aa, Homo sapiens
  CDR3 for alpha chain variable domain of TCR clone 72439 (TRAV30, TRAJ24)
CGTEILDADSWGKFQF

SEQ ID NO: 144878 - protein, 12 aa, Homo sapiens
  CDR3 for beta chain variable domain of TCR clone 72439 (TRBV11-2, TRBJ2-2)
CASSLGGGELFF

SEQ ID NO: 144879 - protein, 14 aa, Homo sapiens
  CDR3 for alpha chain variable domain of TCR clone 72440 (TRAV12-1, TRAJ12)
CVVTRMDSSYKLIF

SEQ ID NO: 144880 - protein, 12 aa, Homo sapiens
  CDR3 for beta chain variable domain of TCR clone 72440 (TRBV6-1, TRBJ2-7)
CASSDYSYEQYF

SEQ ID NO: 144881 - protein, 16 aa, Homo sapiens
  CDR3 for alpha chain variable domain of TCR clone 72441 (TRAV30, TRAJ24)
CGTEIVDADSWGKFQV

SEQ ID NO: 144882 - protein, 18 aa, Homo sapiens
  CDR3 for beta chain variable domain of TCR clone 72441 (TRBV11-2, TRBJ2-3)
CASSLGGASRGAPNTQYF

SEQ ID NO: 144883 - protein, 14 aa, Homo sapiens
  CDR3 for alpha chain variable domain of TCR clone 72442 (TRAV1-2, TRAJ16)
CAVNRFSDGQKLLF

SEQ ID NO: 144884 - protein, 16 aa, Homo sapiens
  CDR3 for beta chain variable domain of TCR clone 72442 (TRBV7-3, TRBJ2-2)
CASSLKRGTLSGELFF

SEQ ID NO: 144885 - protein, 18 aa, Homo sapiens
  CDR3 for alpha chain variable domain of TCR clone 72443 (TRAV13-1, TRAJ52)
CAAKNPNAGGTSYGKLTF

SEQ ID NO: 144886 - protein, 15 aa, Homo sapiens
  CDR3 for beta chain variable domain of TCR clone 72443 (TRBV6-1, TRBJ2-3)
CASSERGGMTDTQYF

SEQ ID NO: 144887 - protein, 14 aa, Homo sapiens
  CDR3 for alpha chain variable domain of TCR clone 72444 (TRAV12-1, TRAJ12)
CVVTRMDSSYKLIF

SEQ ID NO: 144888 - protein, 15 aa, Homo sapiens
  CDR3 for beta chain variable domain of TCR clone 72444 (TRBV20-1, TRBJ2-7)
CSARDRVPGMDEQYF

SEQ ID NO: 144889 - protein, 15 aa, Homo sapiens
  CDR3 for alpha chain variable domain of TCR clone 72445 (TRAV12-3, TRAJ6)
CAMSPASGGSYIPTF

SEQ ID NO: 144890 - protein, 16 aa, Homo sapiens
  CDR3 for beta chain variable domain of TCR clone 72445 (TRBV10-3, TRBJ1-2)
CAISDKVSGPSYGYTF

SEQ ID NO: 144891 - protein, 14 aa, Homo sapiens
  CDR3 for alpha chain variable domain of TCR clone 72446 (TRAV1-2, TRAJ8)
CAVREDTGFQKLVF

SEQ ID NO: 144892 - protein, 13 aa, Homo sapiens
  CDR3 for beta chain variable domain of TCR clone 72446 (TRBV7-7, TRBJ2-2)
CASSLTSAGELFF

SEQ ID NO: 144893 - protein, 12 aa, Homo sapiens
  CDR3 for alpha chain variable domain of TCR clone 72447 (TRAV8-3, TRAJ20)
CAVGANDYKLSF

SEQ ID NO: 144894 - protein, 15 aa, Homo sapiens
  CDR3 for beta chain variable domain of TCR clone 72447 (TRBV2, TRBJ2-7)
CASSEGLARSYEQYF

SEQ ID NO: 144895 - protein, 12 aa, Homo sapiens
  CDR3 for alpha chain variable domain of TCR clone 72448 (TRAV12-3, TRAJ17)
CAMTLTGNKLTF

SEQ ID NO: 144896 - protein, 12 aa, Homo sapiens
  CDR3 for beta chain variable domain of TCR clone 72448 (TRBV14, TRBJ2-7)
CASSRLKGEQYF

SEQ ID NO: 144897 - protein, 12 aa, Homo sapiens
  CDR3 for alpha chain variable domain of TCR clone 72449 (TRAV21, TRAJ37)
CSVRGNTGKLIF

SEQ ID NO: 144898 - protein, 13 aa, Homo sapiens
  CDR3 for beta chain variable domain of TCR clone 72449 (TRBV19, TRBJ1-2)
CASSVPGQDGYTF

SEQ ID NO: 144899 - protein, 15 aa, Homo sapiens
  CDR3 for alpha chain variable domain of TCR clone 72450 (TRAV10, TRAJ6)
CVVRPRTGGSYIPTV

SEQ ID NO: 144900 - protein, 14 aa, Homo sapiens
  CDR3 for beta chain variable domain of TCR clone 72450 (TRBV18, TRBJ2-5)
CASSPGVSQETQYF

SEQ ID NO: 144901 - protein, 15 aa, Homo sapiens
  CDR3 for alpha chain variable domain of TCR clone 72451 (TRAV26-1, TRAJ42)
CIVRVKGGSQGNLIF

SEQ ID NO: 144902 - protein, 14 aa, Homo sapiens
  CDR3 for beta chain variable domain of TCR clone 72451 (TRBV19, TRBJ2-2)
CATTGHANTGEPFF

SEQ ID NO: 144903 - protein, 15 aa, Homo sapiens
  CDR3 for alpha chain variable domain of TCR clone 72452 (TRAV14/DV4, TRAJ10)
CAMRELTGGGNKPTF

SEQ ID NO: 144904 - protein, 18 aa, Homo sapiens
  CDR3 for beta chain variable domain of TCR clone 72452 (TRBV7-9, TRBJ2-7)
CASSLTTSGSRTWYEQYF

SEQ ID NO: 144905 - protein, 14 aa, Homo sapiens
  CDR3 for alpha chain variable domain of TCR clone 72453 (TRAV12-1, TRAJ43)
CVVNGRGNNNDMRF

SEQ ID NO: 144906 - protein, 22 aa, Homo sapiens
  CDR3 for beta chain variable domain of TCR clone 72453 (TRBV29-1, TRBJ2-5)
TVSNMSPEDSSIYLCSAGTQYF

SEQ ID NO: 144907 - protein, 13 aa, Homo sapiens
  CDR3 for alpha chain variable domain of TCR clone 72454 (TRAV17, TRAJ57)
CAIYQGGSEKLVF

SEQ ID NO: 144908 - protein, 16 aa, Homo sapiens
  CDR3 for beta chain variable domain of TCR clone 72454 (TRBV4-3, TRBJ2-1)
CASSQERPAGFNEQFF

SEQ ID NO: 144909 - protein, 13 aa, Homo sapiens
  CDR3 for alpha chain variable domain of TCR clone 72455 (TRAV17, TRAJ5)
CATGDTGRRALTF

SEQ ID NO: 144910 - protein, 13 aa, Homo sapiens
  CDR3 for beta chain variable domain of TCR clone 72455 (TRBV19, TRBJ1-5)
CASSIGPVQPQHF

SEQ ID NO: 144911 - protein, 12 aa, Homo sapiens
  CDR3 for alpha chain variable domain of TCR clone 72456 (TRAV30, TRAJ43)
CGTEERGNDMRF

SEQ ID NO: 144912 - protein, 13 aa, Homo sapiens
  CDR3 for beta chain variable domain of TCR clone 72456 (TRBV6-5, TRBJ2-7)
CASSFSQGYEQYF

SEQ ID NO: 144913 - protein, 15 aa, Homo sapiens
  CDR3 for alpha chain variable domain of TCR clone 72457 (TRAV4, TRAJ39)
CLVGPNNNAGNMLTF

SEQ ID NO: 144914 - protein, 13 aa, Homo sapiens
  CDR3 for beta chain variable domain of TCR clone 72457 (TRBV11-2, TRBJ2-5)
CASSSTGKETQYF

SEQ ID NO: 144915 - protein, 15 aa, Homo sapiens
  CDR3 for alpha chain variable domain of TCR clone 72458 (TRAV25, TRAJ53)
CAATGGGGSNYKLTF

SEQ ID NO: 144916 - protein, 14 aa, Homo sapiens
  CDR3 for beta chain variable domain of TCR clone 72458 (TRBV7-9, TRBJ1-2)
CASSRQGANYGYTF

SEQ ID NO: 144917 - protein, 12 aa, Homo sapiens
  CDR3 for alpha chain variable domain of TCR clone 72459 (TRAV13-1, TRAJ20)
CAASMGVYKLSF

SEQ ID NO: 144918 - protein, 15 aa, Homo sapiens
  CDR3 for beta chain variable domain of TCR clone 72459 (TRBV11-3, TRBJ2-3)
CASNGGLDSTDTQYF

SEQ ID NO: 144919 - protein, 12 aa, Homo sapiens
  CDR3 for alpha chain variable domain of TCR clone 72460 (TRAV12-1, TRAJ40)
CVVYSGTYKYIF

SEQ ID NO: 144920 - protein, 16 aa, Homo sapiens
  CDR3 for beta chain variable domain of TCR clone 72460 (TRBV7-2, TRBJ2-5)
CASSLESAGGRETQYF

SEQ ID NO: 144921 - protein, 15 aa, Homo sapiens
  CDR3 for alpha chain variable domain of TCR clone 72461 (TRAV21, TRAJ32)
CAAAPYGGATNKLIF

SEQ ID NO: 144922 - protein, 17 aa, Homo sapiens
  CDR3 for beta chain variable domain of TCR clone 72461 (TRBV18, TRBJ2-3)
CASSPFGDGGFTDTLYF

SEQ ID NO: 144923 - protein, 15 aa, Homo sapiens
  CDR3 for alpha chain variable domain of TCR clone 72462 (TRAV16, TRAJ48)
CALFISNFGNEKLTF

SEQ ID NO: 144924 - protein, 15 aa, Homo sapiens
  CDR3 for beta chain variable domain of TCR clone 72462 (TRBV7-3, TRBJ2-1)
CASSPTGGGEVEQFF

SEQ ID NO: 144925 - protein, 15 aa, Homo sapiens
  CDR3 for alpha chain variable domain of TCR clone 72463 (TRAV17, TRAJ45)
TSVLRTGGGADGLTF

SEQ ID NO: 144926 - protein, 15 aa, Homo sapiens
  CDR3 for beta chain variable domain of TCR clone 72463 (TRBV5-7, TRBJ1-5)
CASGYGKLWDQPQHF

SEQ ID NO: 144927 - protein, 14 aa, Homo sapiens
  CDR3 for alpha chain variable domain of TCR clone 72464 (TRAV29/DV5, TRAJ45)
CAASFRGGADGLTF

SEQ ID NO: 144928 - protein, 11 aa, Homo sapiens
  CDR3 for beta chain variable domain of TCR clone 72464 (TRBV11-2, TRBJ2-2)
YASSLPGELFF

SEQ ID NO: 144929 - protein, 14 aa, Homo sapiens
  CDR3 for alpha chain variable domain of TCR clone 72465 (TRAV8-2, TRAJ4)
CVVSPSGGYNKLIF

SEQ ID NO: 144930 - protein, 16 aa, Homo sapiens
  CDR3 for beta chain variable domain of TCR clone 72465 (TRBV7-3, TRBJ2-1)
CASSLEGYRSYNGQFF

SEQ ID NO: 144931 - protein, 14 aa, Homo sapiens
  CDR3 for alpha chain variable domain of TCR clone 72466 (TRAV1-2, TRAJ16)
CAVNRFSDGQKLLF

SEQ ID NO: 144932 - protein, 15 aa, Homo sapiens
  CDR3 for beta chain variable domain of TCR clone 72466 (TRBV28, TRBJ2-7)
CASSLISGGSYEQYF

SEQ ID NO: 144933 - protein, 20 aa, Homo sapiens
  CDR3 for alpha chain variable domain of TCR clone 72467 (TRAV21, TRAJ4)
AASQTGDSATLAGGYNKLIF

SEQ ID NO: 144934 - protein, 19 aa, Homo sapiens
  CDR3 for beta chain variable domain of TCR clone 72467 (TRBV18, TRBJ1-3)
CASSPLSRTGMSSGNTIYF

SEQ ID NO: 144935 - protein, 13 aa, Homo sapiens
  CDR3 for alpha chain variable domain of TCR clone 72468 (TRAV27, TRAJ49)
CAPRPYTGNQFCF

SEQ ID NO: 144936 - protein, 18 aa, Homo sapiens
  CDR3 for beta chain variable domain of TCR clone 72468 (TRBV7-3, TRBJ2-5)
CASSLGGAAQGRWETQYF

SEQ ID NO: 144937 - protein, 16 aa, Homo sapiens
  CDR3 for alpha chain variable domain of TCR clone 72469 (TRAV3, TRAJ10)
CAVRDMRAGGGNKLTF

SEQ ID NO: 144938 - protein, 11 aa, Homo sapiens
  CDR3 for beta chain variable domain of TCR clone 72469 (TRBV19, TRBJ2-7)
CASGNSYEQYF

SEQ ID NO: 144939 - protein, 18 aa, Homo sapiens
  CDR3 for alpha chain variable domain of TCR clone 72470 (TRAV26-2, TRAJ45)
CILRVDKYSGGGADGLTF

SEQ ID NO: 144940 - protein, 16 aa, Homo sapiens
  CDR3 for beta chain variable domain of TCR clone 72470 (TRBV2, TRBJ1-4)
CASNLLQGATNEKLVF

SEQ ID NO: 144941 - protein, 13 aa, Homo sapiens
  CDR3 for alpha chain variable domain of TCR clone 72471 (TRAV8-3, TRAJ28)
CAVGAVGSYQLTF

SEQ ID NO: 144942 - protein, 15 aa, Homo sapiens
  CDR3 for beta chain variable domain of TCR clone 72471 (TRBV7-2, TRBJ2-1)
CASSSGLAGGNEQFF

SEQ ID NO: 144943 - protein, 14 aa, Homo sapiens
  CDR3 for alpha chain variable domain of TCR clone 72472 (TRAV12-3, TRAJ10)
SHLPLTGGGNKLTF

SEQ ID NO: 144944 - protein, 14 aa, Homo sapiens
  CDR3 for beta chain variable domain of TCR clone 72472 (TRBV7-2, TRBJ2-2)
CASSLEANTGELFF

SEQ ID NO: 144945 - protein, 14 aa, Homo sapiens
  CDR3 for alpha chain variable domain of TCR clone 72473 (TRAV14/DV4, TRAJ26)
CAMREGTYGQNFVF

SEQ ID NO: 144946 - protein, 15 aa, Homo sapiens
  CDR3 for beta chain variable domain of TCR clone 72473 (TRBV6-3, TRBJ2-7)
CASSSPGTVFYEQYF

SEQ ID NO: 144947 - protein, 17 aa, Homo sapiens
  CDR3 for alpha chain variable domain of TCR clone 72474 (TRAV20, TRAJ4)
CAVQLVLFSGGYNKLIF

SEQ ID NO: 144948 - protein, 15 aa, Homo sapiens
  CDR3 for beta chain variable domain of TCR clone 72474 (TRBV19, TRBJ2-7)
CASSIGRTFSYEQYF

SEQ ID NO: 144949 - protein, 13 aa, Homo sapiens
  CDR3 for alpha chain variable domain of TCR clone 72475 (TRAV36/DV7, TRAJ34)
CAGRPYNTDKLIF

SEQ ID NO: 144950 - protein, 15 aa, Homo sapiens
  CDR3 for beta chain variable domain of TCR clone 72475 (TRBV27, TRBJ1-6)
CASSFDRGLESPLHF

SEQ ID NO: 144951 - protein, 17 aa, Homo sapiens
  CDR3 for alpha chain variable domain of TCR clone 72476 (TRAV13-1, TRAJ52)
CAASSGAGGTSYGKLTS

SEQ ID NO: 144952 - protein, 15 aa, Homo sapiens
  CDR3 for beta chain variable domain of TCR clone 72476 (TRBV2, TRBJ2-1)
CASSELAGSYNEQFF

SEQ ID NO: 144953 - protein, 14 aa, Homo sapiens
  CDR3 for alpha chain variable domain of TCR clone 72477 (TRAV12-2, TRAJ40)
CAVKIPSRTYKYIF

SEQ ID NO: 144954 - protein, 14 aa, Homo sapiens
  CDR3 for beta chain variable domain of TCR clone 72477 (TRBV20-1, TRBJ1-1)
CSAQTRIGGTEAFF

SEQ ID NO: 144955 - protein, 14 aa, Homo sapiens
  CDR3 for alpha chain variable domain of TCR clone 72478 (TRAV12-3, TRAJ10)
SHLPLTGGGNKLTF

SEQ ID NO: 144956 - protein, 15 aa, Homo sapiens
  CDR3 for beta chain variable domain of TCR clone 72478 (TRBV7-8, TRBJ2-2)
CASSEKGQGTGELFF

SEQ ID NO: 144957 - protein, 17 aa, Homo sapiens
  CDR3 for alpha chain variable domain of TCR clone 72479 (TRAV23/DV6, TRAJ57)
CAASSTISQGGSEKLVF

SEQ ID NO: 144958 - protein, 14 aa, Homo sapiens
  CDR3 for beta chain variable domain of TCR clone 72479 (TRBV25-1, TRBJ1-1)
CASTHLGGNTEAFF

SEQ ID NO: 144959 - protein, 14 aa, Homo sapiens
  CDR3 for alpha chain variable domain of TCR clone 72480 (TRAV17, TRAJ12)
CVTDEKDSSYKLIF

SEQ ID NO: 144960 - protein, 16 aa, Homo sapiens
  CDR3 for beta chain variable domain of TCR clone 72480 (TRBV11-2, TRBJ2-1)
CASSPRLAGVYNEQFF

SEQ ID NO: 144961 - protein, 12 aa, Homo sapiens
  CDR3 for alpha chain variable domain of TCR clone 72481 (TRAV12-3, TRAJ17)
CAMTLTGNKLTF

SEQ ID NO: 144962 - protein, 15 aa, Homo sapiens
  CDR3 for beta chain variable domain of TCR clone 72481 (TRBV6-1, TRBJ2-5)
CASSEGWGIQETQYF

SEQ ID NO: 144963 - protein, 14 aa, Homo sapiens
  CDR3 for alpha chain variable domain of TCR clone 72482 (TRAV12-2, TRAJ13)
CAVKKTGGYQKVTF

SEQ ID NO: 144964 - protein, 15 aa, Homo sapiens
  CDR3 for beta chain variable domain of TCR clone 72482 (TRBV12-4, TRBJ2-5)
SASSPPTGLQETQYF

SEQ ID NO: 144965 - protein, 14 aa, Homo sapiens
  CDR3 for alpha chain variable domain of TCR clone 72483 (TRAV12-1, TRAJ17)
CVVNYKAAGNKLTF

SEQ ID NO: 144966 - protein, 17 aa, Homo sapiens
  CDR3 for beta chain variable domain of TCR clone 72483 (TRBV20-1, TRBJ2-2)
CSASGSGQGGLTGELFF

SEQ ID NO: 144967 - protein, 13 aa, Homo sapiens
  CDR3 for alpha chain variable domain of TCR clone 72484 (TRAV27, TRAJ17)
CAGAATAGHKLTF

SEQ ID NO: 144968 - protein, 15 aa, Homo sapiens
  CDR3 for beta chain variable domain of TCR clone 72484 (TRBV5-1, TRBJ2-3)
CASRNQAGSTDTQYF

SEQ ID NO: 144969 - protein, 15 aa, Homo sapiens
  CDR3 for alpha chain variable domain of TCR clone 72485 (TRAV3, TRAJ17)
CAVSPKEAAGNKITF

SEQ ID NO: 144970 - protein, 12 aa, Homo sapiens
  CDR3 for beta chain variable domain of TCR clone 72485 (TRBV7-9, TRBJ1-6)
CASSLMTSPLHF

SEQ ID NO: 144971 - protein, 16 aa, Homo sapiens
  CDR3 for alpha chain variable domain of TCR clone 72486 (TRAV12-3, TRAJ53)
CAMSPGSGGSNYKLTF

SEQ ID NO: 144972 - protein, 15 aa, Homo sapiens
  CDR3 for beta chain variable domain of TCR clone 72486 (TRBV7-3, TRBJ2-1)
CASSPTGGGEVEQFF

SEQ ID NO: 144973 - protein, 14 aa, Homo sapiens
  CDR3 for alpha chain variable domain of TCR clone 72487 (TRAV4, TRAJ43)
CLVGLMYNNNDMRF

SEQ ID NO: 144974 - protein, 21 aa, Homo sapiens
  CDR3 for beta chain variable domain of TCR clone 72487 (TRBV11-1, TRBJ2-1)
CASSARERLRPEGPSYNEQFF

SEQ ID NO: 144975 - protein, 12 aa, Homo sapiens
  CDR3 for alpha chain variable domain of TCR clone 72488 (TRAV21, TRAJ31)
CAVWGNNARLMF

SEQ ID NO: 144976 - protein, 16 aa, Homo sapiens
  CDR3 for beta chain variable domain of TCR clone 72488 (TRBV27, TRBJ2-5)
CASSYGPGGQKENQYF

SEQ ID NO: 144977 - protein, 16 aa, Homo sapiens
  CDR3 for alpha chain variable domain of TCR clone 72489 (TRAV20, TRAJ22)
CAVQASSSGSARQLTF

SEQ ID NO: 144978 - protein, 13 aa, Homo sapiens
  CDR3 for beta chain variable domain of TCR clone 72489 (TRBV7-9, TRBJ1-2)
CASSLKQNYGYTF

SEQ ID NO: 144979 - protein, 11 aa, Homo sapiens
  CDR3 for alpha chain variable domain of TCR clone 72490 (TRAV21, TRAJ11)
CAVNGYSTVTF

SEQ ID NO: 144980 - protein, 11 aa, Homo sapiens
  CDR3 for beta chain variable domain of TCR clone 72490 (TRBV19, TRBJ1-1)
CASSIGSEAFF

SEQ ID NO: 144981 - protein, 13 aa, Homo sapiens
  CDR3 for alpha chain variable domain of TCR clone 72491 (TRAV2, TRAJ40)
CAVVTSGTYKYIF

SEQ ID NO: 144982 - protein, 14 aa, Homo sapiens
  CDR3 for beta chain variable domain of TCR clone 72491 (TRBV9, TRBJ2-7)
CASSVGVGSYEQYF

SEQ ID NO: 144983 - protein, 14 aa, Homo sapiens
  CDR3 for alpha chain variable domain of TCR clone 72492 (TRAV16, TRAJ32)
CALKSGGATNKPIF

SEQ ID NO: 144984 - protein, 13 aa, Homo sapiens
  CDR3 for beta chain variable domain of TCR clone 72492 (TRBV15, TRBJ1-6)
CATSGGLNSPLHF

SEQ ID NO: 144985 - protein, 17 aa, Homo sapiens
  CDR3 for alpha chain variable domain of TCR clone 72493 (TRAV38-1, TRAJ45)
CAFMKHYMGGGADGLTF

SEQ ID NO: 144986 - protein, 17 aa, Homo sapiens
  CDR3 for beta chain variable domain of TCR clone 72493 (TRBV13, TRBJ2-3)
CASSLSRVAGGRNTQYF

SEQ ID NO: 144987 - protein, 14 aa, Homo sapiens
  CDR3 for alpha chain variable domain of TCR clone 72494 (TRAV38-1, TRAJ40)
CALRPTSGTYKYIF

SEQ ID NO: 144988 - protein, 13 aa, Homo sapiens
  CDR3 for beta chain variable domain of TCR clone 72494 (TRBV7-9, TRBJ2-7)
CASSFAGAYEQYF

SEQ ID NO: 144989 - protein, 13 aa, Homo sapiens
  CDR3 for alpha chain variable domain of TCR clone 72495 (TRAV12-3, TRAJ43)
CAMIRPNNHDMRF

SEQ ID NO: 144990 - protein, 12 aa, Homo sapiens
  CDR3 for beta chain variable domain of TCR clone 72495 (TRBV11-2, TRBJ2-5)
CASSLGQETQYF

SEQ ID NO: 144991 - protein, 12 aa, Homo sapiens
  CDR3 for alpha chain variable domain of TCR clone 72496 (TRAV17, TRAJ20)
CATALNDYKLSF

SEQ ID NO: 144992 - protein, 12 aa, Homo sapiens
  CDR3 for beta chain variable domain of TCR clone 72496 (TRBV10-3, TRBJ2-7)
CAHGAASGEQYF

SEQ ID NO: 144993 - protein, 14 aa, Homo sapiens
  CDR3 for alpha chain variable domain of TCR clone 72497 (TRAV3, TRAJ34)
CAVRAPGNTDKLIF

SEQ ID NO: 144994 - protein, 14 aa, Homo sapiens
  CDR3 for beta chain variable domain of TCR clone 72497 (TRBV20-1, TRBJ2-7)
CPGLARGISYEQYF

SEQ ID NO: 144995 - protein, 12 aa, Homo sapiens
  CDR3 for alpha chain variable domain of TCR clone 72498 (TRAV4, TRAJ6)
CLAPGGSYIPTF

SEQ ID NO: 144996 - protein, 18 aa, Homo sapiens
  CDR3 for beta chain variable domain of TCR clone 72498 (TRBV20-1, TRBJ2-3)
CSASGLAGGPGATDTQYF

SEQ ID NO: 144997 - protein, 14 aa, Homo sapiens
  CDR3 for alpha chain variable domain of TCR clone 72499 (TRAV1-2, TRAJ16)
CAVNRFSDGQKLLF

SEQ ID NO: 144998 - protein, 16 aa, Homo sapiens
  CDR3 for beta chain variable domain of TCR clone 72499 (TRBV28, TRBJ1-5)
CASRTGLQGEGQPQHF

SEQ ID NO: 144999 - protein, 13 aa, Homo sapiens
  CDR3 for alpha chain variable domain of TCR clone 72500 (TRAV3, TRAJ21)
CAVREPDFNKFYF

SEQ ID NO: 145000 - protein, 17 aa, Homo sapiens
  CDR3 for beta chain variable domain of TCR clone 72500 (TRBV7-8, TRBJ2-6)
CASSAGAGGAGANVLTF

SEQ ID NO: 145001 - protein, 13 aa, Homo sapiens
  CDR3 for alpha chain variable domain of TCR clone 72501 (TRAV3, TRAJ20)
CAVRDTPRYKLSF

SEQ ID NO: 145002 - protein, 18 aa, Homo sapiens
  CDR3 for beta chain variable domain of TCR clone 72501 (TRBV11-2, TRBJ2-3)
CASSLGGASRGAPNTQYF

SEQ ID NO: 145003 - protein, 14 aa, Homo sapiens
  CDR3 for alpha chain variable domain of TCR clone 72502 (TRAV12-2, TRAJ11)
CAVEGGSGYSTLTF

SEQ ID NO: 145004 - protein, 16 aa, Homo sapiens
  CDR3 for beta chain variable domain of TCR clone 72502 (TRBV6-1, TRBJ1-2)
CASSGAWQGRSHGYSF

SEQ ID NO: 145005 - protein, 17 aa, Homo sapiens
  CDR3 for alpha chain variable domain of TCR clone 72503 (TRAV13-1, TRAJ31)
CAPRDRLMFGDGTQLVV

SEQ ID NO: 145006 - protein, 16 aa, Homo sapiens
  CDR3 for beta chain variable domain of TCR clone 72503 (TRBV25-1, TRBJ1-1)
CASSGDRDRGRIEAFF

SEQ ID NO: 145007 - protein, 15 aa, Homo sapiens
  CDR3 for alpha chain variable domain of TCR clone 72504 (TRAV21, TRAJ42)
CAVTRYGGSQGNLIF

SEQ ID NO: 145008 - protein, 18 aa, Homo sapiens
  CDR3 for beta chain variable domain of TCR clone 72504 (TRBV11-2, TRBJ2-3)
CASSLGGASRGAPNTQYF

SEQ ID NO: 145009 - protein, 12 aa, Homo sapiens
  CDR3 for alpha chain variable domain of TCR clone 72505 (TRAV3, TRAJ20)
CAVRDPDYKLSF

SEQ ID NO: 145010 - protein, 11 aa, Homo sapiens
  CDR3 for beta chain variable domain of TCR clone 72505 (TRBV28, TRBJ2-5)
CASGLKETQYF

SEQ ID NO: 145011 - protein, 16 aa, Homo sapiens
  CDR3 for alpha chain variable domain of TCR clone 72506 (TRAV26-1, TRAJ48)
CIVREPPNFGNEKLTF

SEQ ID NO: 145012 - protein, 12 aa, Homo sapiens
  CDR3 for beta chain variable domain of TCR clone 72506 (TRBV19, TRBJ2-1)
CDSSRQGAEQFF

SEQ ID NO: 145013 - protein, 16 aa, Homo sapiens
  CDR3 for alpha chain variable domain of TCR clone 72507 (TRAV8-3, TRAJ22)
CAADLLGPGSARQLTF

SEQ ID NO: 145014 - protein, 14 aa, Homo sapiens
  CDR3 for beta chain variable domain of TCR clone 72507 (TRBV11-2, TRBJ2-7)
CASSLELEGYEQYF

SEQ ID NO: 145015 - protein, 12 aa, Homo sapiens
  CDR3 for alpha chain variable domain of TCR clone 72508 (TRAV29/DV5, TRAJ49)
CAASAIGNQFYF

SEQ ID NO: 145016 - protein, 17 aa, Homo sapiens
  CDR3 for beta chain variable domain of TCR clone 72508 (TRBV5-1, TRBJ2-2)
CASSRTSGRFSTGELFS

SEQ ID NO: 145017 - protein, 15 aa, Homo sapiens
  CDR3 for alpha chain variable domain of TCR clone 72509 (TRAV13-2, TRAJ53)
CAERGSRGSNYELTF

SEQ ID NO: 145018 - protein, 14 aa, Homo sapiens
  CDR3 for beta chain variable domain of TCR clone 72509 (TRBV4-1, TRBJ2-2)
CASSQYPDTGELFF

SEQ ID NO: 145019 - protein, 14 aa, Homo sapiens
  CDR3 for alpha chain variable domain of TCR clone 72510 (TRAV23/DV6, TRAJ17)
CAARGRAAGKKLTF

SEQ ID NO: 145020 - protein, 12 aa, Homo sapiens
  CDR3 for beta chain variable domain of TCR clone 72510 (TRBV7-9, TRBJ2-3)
CASSFITDTQYF

SEQ ID NO: 145021 - protein, 13 aa, Homo sapiens
  CDR3 for alpha chain variable domain of TCR clone 72511 (TRAV21, TRAJ34)
CAVSEGDTDKLIF

SEQ ID NO: 145022 - protein, 17 aa, Homo sapiens
  CDR3 for beta chain variable domain of TCR clone 72511 (TRBV20-1, TRBJ1-5)
CSASDPSAQGFNQPQHF

SEQ ID NO: 145023 - protein, 13 aa, Homo sapiens
  CDR3 for alpha chain variable domain of TCR clone 72512 (TRAV21, TRAJ37)
CAVRSGNTGKLIF

SEQ ID NO: 145024 - protein, 13 aa, Homo sapiens
  CDR3 for beta chain variable domain of TCR clone 72512 (TRBV7-6, TRBJ2-3)
CASSLRSDNTQYF

SEQ ID NO: 145025 - protein, 14 aa, Homo sapiens
  CDR3 for alpha chain variable domain of TCR clone 72513 (TRAV35, TRAJ22)
CAGLRPGSARQLSF

SEQ ID NO: 145026 - protein, 15 aa, Homo sapiens
  CDR3 for beta chain variable domain of TCR clone 72513 (TRBV12-4, TRBJ2-5)
CASSPPTGLQETQYF

SEQ ID NO: 145027 - protein, 13 aa, Homo sapiens
  CDR3 for alpha chain variable domain of TCR clone 72514 (TRAV1-1, TRAJ31)
CASYLNNNAGLMF

SEQ ID NO: 145028 - protein, 14 aa, Homo sapiens
  CDR3 for beta chain variable domain of TCR clone 72514 (TRBV4-1, TRBJ2-5)
CASSRSGSGETQYF

SEQ ID NO: 145029 - protein, 12 aa, Homo sapiens
  CDR3 for alpha chain variable domain of TCR clone 72515 (TRAV12-3, TRAJ17)
CAMTLTGNKLTF

SEQ ID NO: 145030 - protein, 14 aa, Homo sapiens
  CDR3 for beta chain variable domain of TCR clone 72515 (TRBV2, TRBJ2-1)
CASRTGSSYNEQFF

SEQ ID NO: 145031 - protein, 16 aa, Homo sapiens
  CDR3 for alpha chain variable domain of TCR clone 72516 (TRAV8-4, TRAJ27)
CAMKEGGFTNAGKSTF

SEQ ID NO: 145032 - protein, 15 aa, Homo sapiens
  CDR3 for beta chain variable domain of TCR clone 72516 (TRBV6-3, TRBJ2-7)
CASSSPGTVFYEQYF

SEQ ID NO: 145033 - protein, 14 aa, Homo sapiens
  CDR3 for alpha chain variable domain of TCR clone 72517 (TRAV12-3, TRAJ58)
RAMSTETSGSRLTF

SEQ ID NO: 145034 - protein, 15 aa, Homo sapiens
  CDR3 for beta chain variable domain of TCR clone 72517 (TRBV4-1, TRBJ1-4)
CASSDTGGTNEKLFS

SEQ ID NO: 145035 - protein, 15 aa, Homo sapiens
  CDR3 for alpha chain variable domain of TCR clone 72518 (TRAV17, TRAJ10)
CATDLLTGGGNKLTF

SEQ ID NO: 145036 - protein, 16 aa, Homo sapiens
  CDR3 for beta chain variable domain of TCR clone 72518 (TRBV7-9, TRBJ2-3)
CASSPWREVGTDTQYF

SEQ ID NO: 145037 - protein, 15 aa, Homo sapiens
  CDR3 for alpha chain variable domain of TCR clone 72519 (TRAV3, TRAJ4)
CAVRDGNGGYNKLIF

SEQ ID NO: 145038 - protein, 16 aa, Homo sapiens
  CDR3 for beta chain variable domain of TCR clone 72519 (TRBV27, TRBJ2-2)
CASSSSGVSNTGELFF

SEQ ID NO: 145039 - protein, 16 aa, Homo sapiens
  CDR3 for alpha chain variable domain of TCR clone 72520 (TRAV12-1, TRAJ12)
CVVNTLLMDSSYKLIF

SEQ ID NO: 145040 - protein, 13 aa, Homo sapiens
  CDR3 for beta chain variable domain of TCR clone 72520 (TRBV12-5, TRBJ2-3)
CASGDRQSDTQYF

SEQ ID NO: 145041 - protein, 14 aa, Homo sapiens
  CDR3 for alpha chain variable domain of TCR clone 72521 (TRAV12-1, TRAJ30)
CVPTGTNRADKIIF

SEQ ID NO: 145042 - protein, 11 aa, Homo sapiens
  CDR3 for beta chain variable domain of TCR clone 72521 (TRBV4-1, TRBJ2-2)
CASEHTGELFF

SEQ ID NO: 145043 - protein, 15 aa, Homo sapiens
  CDR3 for alpha chain variable domain of TCR clone 72522 (TRAV27, TRAJ22)
CAGAPLKGSARQLTF

SEQ ID NO: 145044 - protein, 16 aa, Homo sapiens
  CDR3 for beta chain variable domain of TCR clone 72522 (TRBV19, TRBJ2-2)
CASTLGASGAPGELFS

SEQ ID NO: 145045 - protein, 14 aa, Homo sapiens
  CDR3 for alpha chain variable domain of TCR clone 72523 (TRAV1-2, TRAJ8)
CAVREDTGFQKLGF

SEQ ID NO: 145046 - protein, 12 aa, Homo sapiens
  CDR3 for beta chain variable domain of TCR clone 72523 (TRBV11-2, TRBJ2-2)
CASSLGGGELFF

SEQ ID NO: 145047 - protein, 14 aa, Homo sapiens
  CDR3 for alpha chain variable domain of TCR clone 72524 (TRAV1-2, TRAJ16)
CAVNRFSDGQKLLF

SEQ ID NO: 145048 - protein, 13 aa, Homo sapiens
  CDR3 for beta chain variable domain of TCR clone 72524 (TRBV19, TRBJ2-5)
CASSETAPETQYF

SEQ ID NO: 145049 - protein, 17 aa, Homo sapiens
  CDR3 for alpha chain variable domain of TCR clone 72525 (TRAV3, TRAJ6)
CAVRDGPRAGGSYIPTF

SEQ ID NO: 145050 - protein, 12 aa, Homo sapiens
  CDR3 for beta chain variable domain of TCR clone 72525 (TRBV6-5, TRBJ2-2)
CASRTGTGELFF

SEQ ID NO: 145051 - protein, 11 aa, Homo sapiens
  CDR3 for alpha chain variable domain of TCR clone 72526 (TRAV17, TRAJ31)
CATSNNARLMF

SEQ ID NO: 145052 - protein, 16 aa, Homo sapiens
  CDR3 for beta chain variable domain of TCR clone 72526 (TRBV7-8, TRBJ2-4)
CDSSAERTLAKNIQYF

SEQ ID NO: 145053 - protein, 11 aa, Homo sapiens
  CDR3 for alpha chain variable domain of TCR clone 72527 (TRAV38-1, TRAJ43)
CAFMKHNSGRH

SEQ ID NO: 145054 - protein, 11 aa, Homo sapiens
  CDR3 for beta chain variable domain of TCR clone 72527 (TRBV7-9, TRBJ2-3)
CASGYTDTQYF

SEQ ID NO: 145055 - protein, 15 aa, Homo sapiens
  CDR3 for alpha chain variable domain of TCR clone 72528 (TRAV12-1, TRAJ45)
CVVLSGGGGADGLTF

SEQ ID NO: 145056 - protein, 14 aa, Homo sapiens
  CDR3 for beta chain variable domain of TCR clone 72528 (TRBV11-2, TRBJ2-5)
CASRRTGGIETQYF

SEQ ID NO: 145057 - protein, 11 aa, Homo sapiens
  CDR3 for alpha chain variable domain of TCR clone 72529 (TRAV21, TRAJ34)
CAHYNTDQLIF

SEQ ID NO: 145058 - protein, 13 aa, Homo sapiens
  CDR3 for beta chain variable domain of TCR clone 72529 (TRBV7-6, TRBJ1-2)
CASSLVADYGYTF

SEQ ID NO: 145059 - protein, 12 aa, Homo sapiens
  CDR3 for alpha chain variable domain of TCR clone 72530 (TRAV1-1, TRAJ8)
CAGGTGFQKLVF

SEQ ID NO: 145060 - protein, 13 aa, Homo sapiens
  CDR3 for beta chain variable domain of TCR clone 72530 (TRBV20-1, TRBJ1-6)
CSARAPPEGPLHF

SEQ ID NO: 145061 - protein, 13 aa, Homo sapiens
  CDR3 for alpha chain variable domain of TCR clone 72531 (TRAV29/DV5, TRAJ48)
CAAKYFGNEKLTF

SEQ ID NO: 145062 - protein, 15 aa, Homo sapiens
  CDR3 for beta chain variable domain of TCR clone 72531 (TRBV11-3, TRBJ1-2)
CASSSRGRANYGYTF

SEQ ID NO: 145063 - protein, 11 aa, Homo sapiens
  CDR3 for alpha chain variable domain of TCR clone 72532 (TRAV12-3, TRAJ43)
CAMSVPNDMRF

SEQ ID NO: 145064 - protein, 16 aa, Homo sapiens
  CDR3 for beta chain variable domain of TCR clone 72532 (TRBV20-1, TRBJ2-1)
CSARDSLGAVYNEQFF

SEQ ID NO: 145065 - protein, 14 aa, Homo sapiens
  CDR3 for alpha chain variable domain of TCR clone 72533 (TRAV1-2, TRAJ16)
CAVNRFSDGQKLLF

SEQ ID NO: 145066 - protein, 22 aa, Homo sapiens
  CDR3 for beta chain variable domain of TCR clone 72533 (TRBV20-1, TRBJ1-4)
TSAHPEDSSFFLPQGANEKLFF

SEQ ID NO: 145067 - protein, 15 aa, Homo sapiens
  CDR3 for alpha chain variable domain of TCR clone 72534 (TRAV17, TRAJ4)
CATGTYSGGYNKLIF

SEQ ID NO: 145068 - protein, 13 aa, Homo sapiens
  CDR3 for beta chain variable domain of TCR clone 72534 (TRBV6-6, TRBJ2-7)
CASSPKHLAEQYF

SEQ ID NO: 145069 - protein, 14 aa, Homo sapiens
  CDR3 for alpha chain variable domain of TCR clone 72535 (TRAV38-1, TRAJ45)
CAYYSGGGADGLTF

SEQ ID NO: 145070 - protein, 20 aa, Homo sapiens
  CDR3 for beta chain variable domain of TCR clone 72535 (TRBV28, TRBJ2-1)
CASTPIGQSPGLAGGNEQFF

SEQ ID NO: 145071 - protein, 13 aa, Homo sapiens
  CDR3 for alpha chain variable domain of TCR clone 72536 (TRAV13-1, TRAJ20)
CAERVSNDYKLSF

SEQ ID NO: 145072 - protein, 16 aa, Homo sapiens
  CDR3 for beta chain variable domain of TCR clone 72536 (TRBV11-1, TRBJ1-1)
CATNPRDRAFNTEAFF

SEQ ID NO: 145073 - protein, 13 aa, Homo sapiens
  CDR3 for alpha chain variable domain of TCR clone 72537 (TRAV23/DV6, TRAJ57)
ALPFQGGSEKLVF

SEQ ID NO: 145074 - protein, 14 aa, Homo sapiens
  CDR3 for beta chain variable domain of TCR clone 72537 (TRBV25-1, TRBJ1-1)
CASTHLGGNTEAFF

SEQ ID NO: 145075 - protein, 13 aa, Homo sapiens
  CDR3 for alpha chain variable domain of TCR clone 72538 (TRAV2, TRAJ15)
CAVASQAGTALIF

SEQ ID NO: 145076 - protein, 14 aa, Homo sapiens
  CDR3 for beta chain variable domain of TCR clone 72538 (TRBV19, TRBJ2-1)
CASGKSTQFNEQFF

SEQ ID NO: 145077 - protein, 16 aa, Homo sapiens
  CDR3 for alpha chain variable domain of TCR clone 72539 (TRAV12-1, TRAJ45)
CVVIRYSGGGADGLTF

SEQ ID NO: 145078 - protein, 16 aa, Homo sapiens
  CDR3 for beta chain variable domain of TCR clone 72539 (TRBV2, TRBJ2-5)
CASSETQGVGEETQYF

SEQ ID NO: 145079 - protein, 13 aa, Homo sapiens
  CDR3 for alpha chain variable domain of TCR clone 72540 (TRAV12-2, TRAJ20)
CAVYPSNDYKLSF

SEQ ID NO: 145080 - protein, 11 aa, Homo sapiens
  CDR3 for beta chain variable domain of TCR clone 72540 (TRBV11-2, TRBJ1-1)
CASSINTEAFF

SEQ ID NO: 145081 - protein, 13 aa, Homo sapiens
  CDR3 for alpha chain variable domain of TCR clone 72541 (TRAV1-2, TRAJ12)
CAVSMDSSYKLIF

SEQ ID NO: 145082 - protein, 15 aa, Homo sapiens
  CDR3 for beta chain variable domain of TCR clone 72541 (TRBV27, TRBJ2-5)
SASSLIPSGGETQYF

SEQ ID NO: 145083 - protein, 15 aa, Homo sapiens
  CDR3 for alpha chain variable domain of TCR clone 72542 (TRAV8-3, TRAJ23)
CAVGDRDNQGGKLIF

SEQ ID NO: 145084 - protein, 22 aa, Homo sapiens
  CDR3 for beta chain variable domain of TCR clone 72542 (TRBV29-1, TRBJ2-5)
TVSNMSPEDSSIYLCSAGTQYF

SEQ ID NO: 145085 - protein, 14 aa, Homo sapiens
  CDR3 for alpha chain variable domain of TCR clone 72543 (TRAV8-3, TRAJ42)
CAVGAWGSQGNLIF

SEQ ID NO: 145086 - protein, 16 aa, Homo sapiens
  CDR3 for beta chain variable domain of TCR clone 72543 (TRBV20-1, TRBJ1-4)
CSAPGQGLLTNEKLFF

SEQ ID NO: 145087 - protein, 16 aa, Homo sapiens
  CDR3 for alpha chain variable domain of TCR clone 72544 (TRAV30, TRAJ24)
CGTEIVDADSWGKFQF

SEQ ID NO: 145088 - protein, 13 aa, Homo sapiens
  CDR3 for beta chain variable domain of TCR clone 72544 (TRBV2, TRBJ2-2)
CASRAWRTGELFF

SEQ ID NO: 145089 - protein, 12 aa, Homo sapiens
  CDR3 for alpha chain variable domain of TCR clone 72545 (TRAV26-1, TRAJ20)
CIVGSNDYKLSF

SEQ ID NO: 145090 - protein, 16 aa, Homo sapiens
  CDR3 for beta chain variable domain of TCR clone 72545 (TRBV12-5, TRBJ2-5)
CASGPRTSGNQETQYF

SEQ ID NO: 145091 - protein, 14 aa, Homo sapiens
  CDR3 for alpha chain variable domain of TCR clone 72546 (TRAV38-1, TRAJ40)
CALRPTSGTYKYIF

SEQ ID NO: 145092 - protein, 20 aa, Homo sapiens
  CDR3 for beta chain variable domain of TCR clone 72546 (TRBV28, TRBJ2-1)
CASTPIGRSPGLAGGNEQFF

SEQ ID NO: 145093 - protein, 17 aa, Homo sapiens
  CDR3 for alpha chain variable domain of TCR clone 72547 (TRAV14/DV4, TRAJ28)
CAMRGTSSGAGSYQLTF

SEQ ID NO: 145094 - protein, 13 aa, Homo sapiens
  CDR3 for beta chain variable domain of TCR clone 72547 (TRBV28, TRBJ2-5)
CASSFAGGATQYF

SEQ ID NO: 145095 - protein, 14 aa, Homo sapiens
  CDR3 for alpha chain variable domain of TCR clone 72548 (TRAV12-1, TRAJ17)
CVVNNKAAGNKLTF

SEQ ID NO: 145096 - protein, 17 aa, Homo sapiens
  CDR3 for beta chain variable domain of TCR clone 72548 (TRBV20-1, TRBJ2-1)
CSASSSGLAGSYNEQFF

SEQ ID NO: 145097 - protein, 14 aa, Homo sapiens
  CDR3 for alpha chain variable domain of TCR clone 72549 (TRAV12-1, TRAJ27)
CGEHIRTNAGKSTF

SEQ ID NO: 145098 - protein, 15 aa, Homo sapiens
  CDR3 for beta chain variable domain of TCR clone 72549 (TRBV19, TRBJ1-1)
CASTSGQIQDTEAFF

SEQ ID NO: 145099 - protein, 17 aa, Homo sapiens
  CDR3 for alpha chain variable domain of TCR clone 72550 (TRAV13-1, TRAJ52)
CASSSGAGGTSYGKLTF

SEQ ID NO: 145100 - protein, 15 aa, Homo sapiens
  CDR3 for beta chain variable domain of TCR clone 72550 (TRBV2, TRBJ2-1)
CASSELAGSYNEQFF

SEQ ID NO: 145101 - protein, 15 aa, Homo sapiens
  CDR3 for alpha chain variable domain of TCR clone 72551 (TRAV3, TRAJ47)
CAVRDIGEYGNKLVF

SEQ ID NO: 145102 - protein, 13 aa, Homo sapiens
  CDR3 for beta chain variable domain of TCR clone 72551 (TRBV7-9, TRBJ1-2)
CASSLKQNYGYTF

SEQ ID NO: 145103 - protein, 17 aa, Homo sapiens
  CDR3 for alpha chain variable domain of TCR clone 72552 (TRAV4, TRAJ42)
CLVGVLNYGGSQGNFIF

SEQ ID NO: 145104 - protein, 12 aa, Homo sapiens
  CDR3 for beta chain variable domain of TCR clone 72552 (TRBV20-1, TRBJ2-1)
CSAQYTYNEQFF

SEQ ID NO: 145105 - protein, 16 aa, Homo sapiens
  CDR3 for alpha chain variable domain of TCR clone 72553 (TRAV3, TRAJ37)
CAVRPHGSGNAGKLIF

SEQ ID NO: 145106 - protein, 17 aa, Homo sapiens
  CDR3 for beta chain variable domain of TCR clone 72553 (TRBV5-1, TRBJ2-5)
CASSPVALGQNQETQYF

SEQ ID NO: 145107 - protein, 18 aa, Homo sapiens
  CDR3 for alpha chain variable domain of TCR clone 72554 (TRAV12-3, TRAJ52)
CAMSVGGAGGTSYGKLTF

SEQ ID NO: 145108 - protein, 11 aa, Homo sapiens
  CDR3 for beta chain variable domain of TCR clone 72554 (TRBV11-2, TRBJ2-2)
CASSLPGELFF

SEQ ID NO: 145109 - protein, 15 aa, Homo sapiens
  CDR3 for alpha chain variable domain of TCR clone 72555 (TRAV3, TRAJ32)
CAVSSYGGATNKLIF

SEQ ID NO: 145110 - protein, 13 aa, Homo sapiens
  CDR3 for beta chain variable domain of TCR clone 72555 (TRBV20-1, TRBJ2-7)
CSDRPSTNYEQYF

SEQ ID NO: 145111 - protein, 13 aa, Homo sapiens
  CDR3 for alpha chain variable domain of TCR clone 72556 (TRAV12-1, TRAJ38)
CVVPAGNNRKLIW

SEQ ID NO: 145112 - protein, 17 aa, Homo sapiens
  CDR3 for beta chain variable domain of TCR clone 72556 (TRBV4-1, TRBJ2-3)
CASSQSTTGGPVDTQYF

SEQ ID NO: 145113 - protein, 14 aa, Homo sapiens
  CDR3 for alpha chain variable domain of TCR clone 72557 (TRAV26-1, TRAJ45)
CIEVTGGGADGFTF

SEQ ID NO: 145114 - protein, 13 aa, Homo sapiens
  CDR3 for beta chain variable domain of TCR clone 72557 (TRBV7-6, TRBJ1-2)
CASSLVADYGYTF

SEQ ID NO: 145115 - protein, 14 aa, Homo sapiens
  CDR3 for alpha chain variable domain of TCR clone 72558 (TRAV12-2, TRAJ17)
CVVLFKAAGNKLTF

SEQ ID NO: 145116 - protein, 13 aa, Homo sapiens
  CDR3 for beta chain variable domain of TCR clone 72558 (TRBV19, TRBJ1-2)
CASSQGQVYGYTF

SEQ ID NO: 145117 - protein, 15 aa, Homo sapiens
  CDR3 for alpha chain variable domain of TCR clone 72559 (TRAV27, TRAJ17)
CRSTMIKAAGNKLTF

SEQ ID NO: 145118 - protein, 13 aa, Homo sapiens
  CDR3 for beta chain variable domain of TCR clone 72559 (TRBV18, TRBJ2-7)
CASQSGGGYEQYC

SEQ ID NO: 145119 - protein, 13 aa, Homo sapiens
  CDR3 for alpha chain variable domain of TCR clone 72560 (TRAV8-6, TRAJ54)
CAVEAQGAQKLVF

SEQ ID NO: 145120 - protein, 14 aa, Homo sapiens
  CDR3 for beta chain variable domain of TCR clone 72560 (TRBV11-2, TRBJ2-3)
CASSRLARTDTQYF

SEQ ID NO: 145121 - protein, 11 aa, Homo sapiens
  CDR3 for alpha chain variable domain of TCR clone 72561 (TRAV2, TRAJ33)
CAVDSNYQLIC

SEQ ID NO: 145122 - protein, 13 aa, Homo sapiens
  CDR3 for beta chain variable domain of TCR clone 72561 (TRBV7-2, TRBJ2-7)
CASSSPSGSEQYF

SEQ ID NO: 145123 - protein, 14 aa, Homo sapiens
  CDR3 for alpha chain variable domain of TCR clone 72562 (TRAV26-1, TRAJ38)
CIADNAGNNRKLIW

SEQ ID NO: 145124 - protein, 17 aa, Homo sapiens
  CDR3 for beta chain variable domain of TCR clone 72562 (TRBV7-9, TRBJ2-3)
CASRPTVAGDLTDTQYF

SEQ ID NO: 145125 - protein, 14 aa, Homo sapiens
  CDR3 for alpha chain variable domain of TCR clone 72563 (TRAV12-2, TRAJ53)
CRERGGGSNYKLTF

SEQ ID NO: 145126 - protein, 14 aa, Homo sapiens
  CDR3 for beta chain variable domain of TCR clone 72563 (TRBV11-2, TRBJ2-5)
CASSRTGGIETQYF

SEQ ID NO: 145127 - protein, 13 aa, Homo sapiens
  CDR3 for alpha chain variable domain of TCR clone 72564 (TRAV12-2, TRAJ52)
CAVGGTSYGKLTF

SEQ ID NO: 145128 - protein, 14 aa, Homo sapiens
  CDR3 for beta chain variable domain of TCR clone 72564 (TRBV19, TRBJ2-1)
CASPTVVLSGEQFF

SEQ ID NO: 145129 - protein, 13 aa, Homo sapiens
  CDR3 for alpha chain variable domain of TCR clone 72565 (TRAV21, TRAJ27)
CAARPGNAGKSTF

SEQ ID NO: 145130 - protein, 14 aa, Homo sapiens
  CDR3 for beta chain variable domain of TCR clone 72565 (TRBV7-6, TRBJ2-3)
CASSLRTVTDTQYL

SEQ ID NO: 145131 - protein, 18 aa, Homo sapiens
  CDR3 for alpha chain variable domain of TCR clone 72566 (TRAV26-1, TRAJ52)
CIVRVEGAGGTSYGKLTF

SEQ ID NO: 145132 - protein, 13 aa, Homo sapiens
  CDR3 for beta chain variable domain of TCR clone 72566 (TRBV7-3, TRBJ1-2)
CASSLKRGYGYSF

SEQ ID NO: 145133 - protein, 15 aa, Homo sapiens
  CDR3 for alpha chain variable domain of TCR clone 72567 (TRAV12-3, TRAJ49)
CAMAVTPNTGNQFYF

SEQ ID NO: 145134 - protein, 14 aa, Homo sapiens
  CDR3 for beta chain variable domain of TCR clone 72567 (TRBV18, TRBJ2-7)
CASSPRGGAYEQYF

SEQ ID NO: 145135 - protein, 14 aa, Homo sapiens
  CDR3 for alpha chain variable domain of TCR clone 72568 (TRAV1-2, TRAJ16)
CAVNRFSDGQKLLF

SEQ ID NO: 145136 - protein, 15 aa, Homo sapiens
  CDR3 for beta chain variable domain of TCR clone 72568 (TRBV11-2, TRBJ2-1)
CASSRNRGLMYEQFF

SEQ ID NO: 145137 - protein, 14 aa, Homo sapiens
  CDR3 for alpha chain variable domain of TCR clone 72569 (TRAV35, TRAJ33)
CAGSSQDSNYQLIW

SEQ ID NO: 145138 - protein, 15 aa, Homo sapiens
  CDR3 for beta chain variable domain of TCR clone 72569 (TRBV20-1, TRBJ2-7)
YSAESGTSGAYEQYF

SEQ ID NO: 145139 - protein, 14 aa, Homo sapiens
  CDR3 for alpha chain variable domain of TCR clone 72570 (TRAV8-3, TRAJ4)
CAVGADGGYNKLIF

SEQ ID NO: 145140 - protein, 15 aa, Homo sapiens
  CDR3 for beta chain variable domain of TCR clone 72570 (TRBV6-5, TRBJ2-1)
CASSYDAGAGNEQFF

SEQ ID NO: 145141 - protein, 16 aa, Homo sapiens
  CDR3 for alpha chain variable domain of TCR clone 72571 (TRAV30, TRAJ24)
CGTEIVDADSWGKFQF

SEQ ID NO: 145142 - protein, 12 aa, Homo sapiens
  CDR3 for beta chain variable domain of TCR clone 72571 (TRBV11-2, TRBJ2-2)
CASSFGGGELFF

SEQ ID NO: 145143 - protein, 17 aa, Homo sapiens
  CDR3 for alpha chain variable domain of TCR clone 72572 (TRAV13-1, TRAJ28)
CAASPPYSGAGSYQLTF

SEQ ID NO: 145144 - protein, 14 aa, Homo sapiens
  CDR3 for beta chain variable domain of TCR clone 72572 (TRBV5-4, TRBJ1-1)
CASSLDSRRDEAFF

SEQ ID NO: 145145 - protein, 11 aa, Homo sapiens
  CDR3 for alpha chain variable domain of TCR clone 72573 (TRAV13-1, TRAJ6)
CATLGSYIPTL

SEQ ID NO: 145146 - protein, 12 aa, Homo sapiens
  CDR3 for beta chain variable domain of TCR clone 72573 (TRBV11-2, TRBJ2-1)
CASSPGNNEQFF

SEQ ID NO: 145147 - protein, 16 aa, Homo sapiens
  CDR3 for alpha chain variable domain of TCR clone 72574 (TRAV38-1, TRAJ28)
CAFPDDSGAGSYQLTF

SEQ ID NO: 145148 - protein, 12 aa, Homo sapiens
  CDR3 for beta chain variable domain of TCR clone 72574 (TRBV14, TRBJ1-1)
CASSQLKGLAFF

SEQ ID NO: 145149 - protein, 15 aa, Homo sapiens
  CDR3 for alpha chain variable domain of TCR clone 72575 (TRAV27, TRAJ53)
CRAINSGGSNYKLTF

SEQ ID NO: 145150 - protein, 14 aa, Homo sapiens
  CDR3 for beta chain variable domain of TCR clone 72575 (TRBV7-3, TRBJ2-1)
CASSLAGGTNEQFL

SEQ ID NO: 145151 - protein, 14 aa, Homo sapiens
  CDR3 for alpha chain variable domain of TCR clone 72576 (TRAV16, TRAJ15)
CALSGTQAGTALIF

SEQ ID NO: 145152 - protein, 12 aa, Homo sapiens
  CDR3 for beta chain variable domain of TCR clone 72576 (TRBV18, TRBJ2-5)
CASSPSKETQYF

SEQ ID NO: 145153 - protein, 16 aa, Homo sapiens
  CDR3 for alpha chain variable domain of TCR clone 72577 (TRAV12-2, TRAJ39)
CAGNRGPNNAGNMLTF

SEQ ID NO: 145154 - protein, 10 aa, Homo sapiens
  CDR3 for beta chain variable domain of TCR clone 72577 (TRBV2, TRBJ2-4)
CASRGSIQYF

SEQ ID NO: 145155 - protein, 13 aa, Homo sapiens
  CDR3 for alpha chain variable domain of TCR clone 72578 (TRAV1-1, TRAJ9)
CAAKNTGGFKTIF

SEQ ID NO: 145156 - protein, 14 aa, Homo sapiens
  CDR3 for beta chain variable domain of TCR clone 72578 (TRBV18, TRBJ2-5)
CASSPGVSQETQYF

SEQ ID NO: 145157 - protein, 17 aa, Homo sapiens
  CDR3 for alpha chain variable domain of TCR clone 72579 (TRAV3, TRAJ38)
CAVRDCLNAGNNRKLIW

SEQ ID NO: 145158 - protein, 12 aa, Homo sapiens
  CDR3 for beta chain variable domain of TCR clone 72579 (TRBV12-4, TRBJ2-7)
CASSLGGYEQYF

SEQ ID NO: 145159 - protein, 14 aa, Homo sapiens
  CDR3 for alpha chain variable domain of TCR clone 72580 (TRAV35, TRAJ24)
CAGPRRDSWGKLQF

SEQ ID NO: 145160 - protein, 15 aa, Homo sapiens
  CDR3 for beta chain variable domain of TCR clone 72580 (TRBV12-4, TRBJ1-1)
CASSLAVSRGAEAFF

SEQ ID NO: 145161 - protein, 13 aa, Homo sapiens
  CDR3 for alpha chain variable domain of TCR clone 72581 (TRAV27, TRAJ45)
CRSSGGGADGLTF

SEQ ID NO: 145162 - protein, 13 aa, Homo sapiens
  CDR3 for beta chain variable domain of TCR clone 72581 (TRBV4-1, TRBJ2-1)
CASSQAGGDEQFF

SEQ ID NO: 145163 - protein, 14 aa, Homo sapiens
  CDR3 for alpha chain variable domain of TCR clone 72582 (TRAV13-1, TRAJ44)
SAAKATGTASKLTF

SEQ ID NO: 145164 - protein, 17 aa, Homo sapiens
  CDR3 for beta chain variable domain of TCR clone 72582 (TRBV7-3, TRBJ2-3)
RASSLMKRMRGADTQYF

SEQ ID NO: 145165 - protein, 11 aa, Homo sapiens
  CDR3 for alpha chain variable domain of TCR clone 72583 (TRAV2, TRAJ13)
CASGGYQKVTF

SEQ ID NO: 145166 - protein, 16 aa, Homo sapiens
  CDR3 for beta chain variable domain of TCR clone 72583 (TRBV15, TRBJ2-7)
CATSRDGGIPSYEQYF

SEQ ID NO: 145167 - protein, 17 aa, Homo sapiens
  CDR3 for alpha chain variable domain of TCR clone 72584 (TRAV13-1, TRAJ52)
CAASSGAGGPSYGKLTF

SEQ ID NO: 145168 - protein, 15 aa, Homo sapiens
  CDR3 for beta chain variable domain of TCR clone 72584 (TRBV2, TRBJ2-1)
CASSELAGSYNEQFF

SEQ ID NO: 145169 - protein, 13 aa, Homo sapiens
  CDR3 for alpha chain variable domain of TCR clone 72585 (TRAV21, TRAJ27)
CAALNTNAGKSTF

SEQ ID NO: 145170 - protein, 13 aa, Homo sapiens
  CDR3 for beta chain variable domain of TCR clone 72585 (TRBV19, TRBJ2-7)
CASRKAGGSEQYF

SEQ ID NO: 145171 - protein, 13 aa, Homo sapiens
  CDR3 for alpha chain variable domain of TCR clone 72586 (TRAV36/DV7, TRAJ37)
CAVFSSNTGKLIF

SEQ ID NO: 145172 - protein, 15 aa, Homo sapiens
  CDR3 for beta chain variable domain of TCR clone 72586 (TRBV20-1, TRBJ2-7)
CSARDRVSGMDEQYF

SEQ ID NO: 145173 - protein, 14 aa, Homo sapiens
  CDR3 for alpha chain variable domain of TCR clone 72587 (TRAV10, TRAJ36)
CVVKYEGGANNLFF

SEQ ID NO: 145174 - protein, 16 aa, Homo sapiens
  CDR3 for beta chain variable domain of TCR clone 72587 (TRBV19, TRBJ2-2)
CASSFPGQGLAGELFF

SEQ ID NO: 145175 - protein, 13 aa, Homo sapiens
  CDR3 for alpha chain variable domain of TCR clone 72588 (TRAV2, TRAJ21)
CAVEDLNFNKFYF

SEQ ID NO: 145176 - protein, 15 aa, Homo sapiens
  CDR3 for beta chain variable domain of TCR clone 72588 (TRBV28, TRBJ2-5)
CASSTGQGSIETQYF

SEQ ID NO: 145177 - protein, 16 aa, Homo sapiens
  CDR3 for alpha chain variable domain of TCR clone 72589 (TRAV26-1, TRAJ52)
CIFSNAGGTSYGKLTF

SEQ ID NO: 145178 - protein, 16 aa, Homo sapiens
  CDR3 for beta chain variable domain of TCR clone 72589 (TRBV5-1, TRBJ2-1)
CASSLEGRGLYNEQFF

SEQ ID NO: 145179 - protein, 15 aa, Homo sapiens
  CDR3 for alpha chain variable domain of TCR clone 72590 (TRAV1-2, TRAJ38)
CAVSENADNNRKLIW

SEQ ID NO: 145180 - protein, 16 aa, Homo sapiens
  CDR3 for beta chain variable domain of TCR clone 72590 (TRBV4-1, TRBJ2-7)
CASSLTAGQATYEQYF

SEQ ID NO: 145181 - protein, 11 aa, Homo sapiens
  CDR3 for alpha chain variable domain of TCR clone 72591 (TRAV13-1, TRAJ39)
CASHAGNMLTF

SEQ ID NO: 145182 - protein, 16 aa, Homo sapiens
  CDR3 for beta chain variable domain of TCR clone 72591 (TRBV11-2, TRBJ1-5)
CASSLDSEGSPSILVM

SEQ ID NO: 145183 - protein, 14 aa, Homo sapiens
  CDR3 for alpha chain variable domain of TCR clone 72592 (TRAV13-2, TRAJ17)
CAENSKAAGNKLTF

SEQ ID NO: 145184 - protein, 13 aa, Homo sapiens
  CDR3 for beta chain variable domain of TCR clone 72592 (TRBV11-2, TRBJ2-5)
CASSRGPSETQYF

SEQ ID NO: 145185 - protein, 14 aa, Homo sapiens
  CDR3 for alpha chain variable domain of TCR clone 72593 (TRAV8-3, TRAJ4)
CAVGAAGGYNKLIF

SEQ ID NO: 145186 - protein, 13 aa, Homo sapiens
  CDR3 for beta chain variable domain of TCR clone 72593 (TRBV3-1, TRBJ1-1)
CASSPGVITEALF

SEQ ID NO: 145187 - protein, 17 aa, Homo sapiens
  CDR3 for alpha chain variable domain of TCR clone 72594 (TRAV3, TRAJ6)
CAVRDGPRAGGSYIPTF

SEQ ID NO: 145188 - protein, 15 aa, Homo sapiens
  CDR3 for beta chain variable domain of TCR clone 72594 (TRBV27, TRBJ2-5)
CASSLIPSGGETQYF

SEQ ID NO: 145189 - protein, 15 aa, Homo sapiens
  CDR3 for alpha chain variable domain of TCR clone 72595 (TRAV8-4, TRAJ10)
CAVGDGPGGGNKLTF

SEQ ID NO: 145190 - protein, 13 aa, Homo sapiens
  CDR3 for beta chain variable domain of TCR clone 72595 (TRBV28, TRBJ1-3)
CASSFLGSGTIYF

SEQ ID NO: 145191 - protein, 12 aa, Homo sapiens
  CDR3 for alpha chain variable domain of TCR clone 72596 (TRAV13-2, TRAJ8)
CAPWLGFQKLVF

SEQ ID NO: 145192 - protein, 16 aa, Homo sapiens
  CDR3 for beta chain variable domain of TCR clone 72596 (TRBV7-8, TRBJ2-5)
CASSFGGQPAQETQYF

SEQ ID NO: 145193 - protein, 14 aa, Homo sapiens
  CDR3 for alpha chain variable domain of TCR clone 72597 (TRAV27, TRAJ15)
CAGFDNQAGTALIF

SEQ ID NO: 145194 - protein, 11 aa, Homo sapiens
  CDR3 for beta chain variable domain of TCR clone 72597 (TRBV29-1, TRBJ1-1)
CSVEVGKRTFF

SEQ ID NO: 145195 - protein, 13 aa, Homo sapiens
  CDR3 for alpha chain variable domain of TCR clone 72598 (TRAV8-3, TRAJ36)
CAVGATEANNLFF

SEQ ID NO: 145196 - protein, 15 aa, Homo sapiens
  CDR3 for beta chain variable domain of TCR clone 72598 (TRBV7-2, TRBJ1-2)
CASSPRAGWNYGYTF

SEQ ID NO: 145197 - protein, 13 aa, Homo sapiens
  CDR3 for alpha chain variable domain of TCR clone 72599 (TRAV2, TRAJ12)
CAAGADSSYKLIF

SEQ ID NO: 145198 - protein, 13 aa, Homo sapiens
  CDR3 for beta chain variable domain of TCR clone 72599 (TRBV20-1, TRBJ2-1)
CSARSSPRDEQFF

SEQ ID NO: 145199 - protein, 19 aa, Homo sapiens
  CDR3 for alpha chain variable domain of TCR clone 72600 (TRAV3, TRAJ6)
CAVRDMNPSRSGGSYIPTF

SEQ ID NO: 145200 - protein, 15 aa, Homo sapiens
  CDR3 for beta chain variable domain of TCR clone 72600 (TRBV18, TRBJ2-7)
CASSPTFMDSYEQYF

SEQ ID NO: 145201 - protein, 17 aa, Homo sapiens
  CDR3 for alpha chain variable domain of TCR clone 72601 (TRAV14/DV4, TRAJ28)
CAMRGTSSGAGSYQLTF

SEQ ID NO: 145202 - protein, 13 aa, Homo sapiens
  CDR3 for beta chain variable domain of TCR clone 72601 (TRBV28, TRBJ2-5)
CASSFAGGEIQYF

SEQ ID NO: 145203 - protein, 16 aa, Homo sapiens
  CDR3 for alpha chain variable domain of TCR clone 72602 (TRAV3, TRAJ5)
CAVRNLMDTGRRAPTF

SEQ ID NO: 145204 - protein, 16 aa, Homo sapiens
  CDR3 for beta chain variable domain of TCR clone 72602 (TRBV4-2, TRBJ2-7)
CASSQEGLANSYEQYF

SEQ ID NO: 145205 - protein, 15 aa, Homo sapiens
  CDR3 for alpha chain variable domain of TCR clone 72603 (TRAV2, TRAJ10)
AAHPPGAGGGNKLTF

SEQ ID NO: 145206 - protein, 15 aa, Homo sapiens
  CDR3 for beta chain variable domain of TCR clone 72603 (TRBV6-3, TRBJ2-7)
CASSSPGTVFYEQYF

SEQ ID NO: 145207 - protein, 12 aa, Homo sapiens
  CDR3 for alpha chain variable domain of TCR clone 72604 (TRAV3, TRAJ27)
CAVRDKAGKSTF

SEQ ID NO: 145208 - protein, 14 aa, Homo sapiens
  CDR3 for beta chain variable domain of TCR clone 72604 (TRBV5-1, TRBJ1-2)
CASSVDSTSYGYTF

SEQ ID NO: 145209 - protein, 13 aa, Homo sapiens
  CDR3 for alpha chain variable domain of TCR clone 72605 (TRAV12-3, TRAJ33)
CAMSVNSNYQLIW

SEQ ID NO: 145210 - protein, 12 aa, Homo sapiens
  CDR3 for beta chain variable domain of TCR clone 72605 (TRBV12-5, TRBJ1-2)
CASSFIWLHLRF

SEQ ID NO: 145211 - protein, 12 aa, Homo sapiens
  CDR3 for alpha chain variable domain of TCR clone 72606 (TRAV35, TRAJ49)
CAGWNTGNQFYF

SEQ ID NO: 145212 - protein, 13 aa, Homo sapiens
  CDR3 for beta chain variable domain of TCR clone 72606 (TRBV7-9, TRBJ1-2)
CASSLKQNYGYTF

SEQ ID NO: 145213 - protein, 13 aa, Homo sapiens
  CDR3 for alpha chain variable domain of TCR clone 72607 (TRAV22, TRAJ29)
CAVGGSGNTPLVF

SEQ ID NO: 145214 - protein, 11 aa, Homo sapiens
  CDR3 for beta chain variable domain of TCR clone 72607 (TRBV11-2, TRBJ2-2)
CASSLPGELFF

SEQ ID NO: 145215 - protein, 16 aa, Homo sapiens
  CDR3 for alpha chain variable domain of TCR clone 72608 (TRAV12-3, TRAJ53)
CAMSPGSGGSNYKLTF

SEQ ID NO: 145216 - protein, 12 aa, Homo sapiens
  CDR3 for beta chain variable domain of TCR clone 72608 (TRBV29-1, TRBJ2-3)
CSVTGGADTQYF

SEQ ID NO: 145217 - protein, 12 aa, Homo sapiens
  CDR3 for alpha chain variable domain of TCR clone 72609 (TRAV13-1, TRAJ42)
GNYGGSQGNLIF

SEQ ID NO: 145218 - protein, 15 aa, Homo sapiens
  CDR3 for beta chain variable domain of TCR clone 72609 (TRBV20-1, TRBJ2-1)
CSASSAGSSYNEQFF

SEQ ID NO: 145219 - protein, 15 aa, Homo sapiens
  CDR3 for alpha chain variable domain of TCR clone 72610 (TRAV17, TRAJ57)
CATGPSQGGTEKLVF

SEQ ID NO: 145220 - protein, 18 aa, Homo sapiens
  CDR3 for beta chain variable domain of TCR clone 72610 (TRBV7-9, TRBJ2-7)
CASSLTTSGSRTWYEQYF

SEQ ID NO: 145221 - protein, 11 aa, Homo sapiens
  CDR3 for alpha chain variable domain of TCR clone 72611 (TRAV3, TRAJ21)
CAVGNLNKFYF

SEQ ID NO: 145222 - protein, 13 aa, Homo sapiens
  CDR3 for beta chain variable domain of TCR clone 72611 (TRBV7-9, TRBJ1-2)
CASSLKQNYGYTF

SEQ ID NO: 145223 - protein, 13 aa, Homo sapiens
  CDR3 for alpha chain variable domain of TCR clone 72612 (TRAV12-3, TRAJ33)
CAMSVNSNYQLIW

SEQ ID NO: 145224 - protein, 13 aa, Homo sapiens
  CDR3 for beta chain variable domain of TCR clone 72612 (TRBV7-2, TRBJ2-2)
CASSLTVTGELFF

SEQ ID NO: 145225 - protein, 12 aa, Homo sapiens
  CDR3 for alpha chain variable domain of TCR clone 72613 (TRAV21, TRAJ13)
PGPSGGYQKVTF

SEQ ID NO: 145226 - protein, 15 aa, Homo sapiens
  CDR3 for beta chain variable domain of TCR clone 72613 (TRBV19, TRBJ1-2)
CASSVGQVLNYGYTF

SEQ ID NO: 145227 - protein, 14 aa, Homo sapiens
  CDR3 for alpha chain variable domain of TCR clone 72614 (TRAV3, TRAJ28)
CSVRRGAGSYQLTF

SEQ ID NO: 145228 - protein, 16 aa, Homo sapiens
  CDR3 for beta chain variable domain of TCR clone 72614 (TRBV4-1, TRBJ2-7)
CASSQEWTSGPLEQYF

SEQ ID NO: 145229 - protein, 12 aa, Homo sapiens
  CDR3 for alpha chain variable domain of TCR clone 72615 (TRAV17, TRAJ49)
CATASTGNQFYF

SEQ ID NO: 145230 - protein, 15 aa, Homo sapiens
  CDR3 for beta chain variable domain of TCR clone 72615 (TRBV15, TRBJ2-1)
CATSRDLGTYNEQFF

SEQ ID NO: 145231 - protein, 16 aa, Homo sapiens
  CDR3 for alpha chain variable domain of TCR clone 72616 (TRAV3, TRAJ10)
CAVRDMRAGGGNKLTF

SEQ ID NO: 145232 - protein, 15 aa, Homo sapiens
  CDR3 for beta chain variable domain of TCR clone 72616 (TRBV9, TRBJ1-6)
CASSVSGTGDSPLHF

SEQ ID NO: 145233 - protein, 19 aa, Homo sapiens
  CDR3 for alpha chain variable domain of TCR clone 72617 (TRAV38-1, TRAJ53)
CAFMKHGLESGGSNYKLTF

SEQ ID NO: 145234 - protein, 13 aa, Homo sapiens
  CDR3 for beta chain variable domain of TCR clone 72617 (TRBV19, TRBJ2-7)
CASRPRQSYEQYF

SEQ ID NO: 145235 - protein, 14 aa, Homo sapiens
  CDR3 for alpha chain variable domain of TCR clone 72618 (TRAV12-1, TRAJ42)
CVVIYGGSQGNLIF

SEQ ID NO: 145236 - protein, 13 aa, Homo sapiens
  CDR3 for beta chain variable domain of TCR clone 72618 (TRBV12-4, TRBJ1-2)
CASSLRQGKGYTF

SEQ ID NO: 145237 - protein, 14 aa, Homo sapiens
  CDR3 for alpha chain variable domain of TCR clone 72619 (TRAV12-1, TRAJ42)
CVVIYGGSQGNLIF

SEQ ID NO: 145238 - protein, 14 aa, Homo sapiens
  CDR3 for beta chain variable domain of TCR clone 72619 (TRBV19, TRBJ2-7)
CASSIFAGTYEQYF

SEQ ID NO: 145239 - protein, 12 aa, Homo sapiens
  CDR3 for alpha chain variable domain of TCR clone 72620 (TRAV17, TRAJ57)
CATDGGSEKLVF

SEQ ID NO: 145240 - protein, 13 aa, Homo sapiens
  CDR3 for beta chain variable domain of TCR clone 72620 (TRBV7-9, TRBJ2-7)
CASSFAVAYEQYF

SEQ ID NO: 145241 - protein, 16 aa, Homo sapiens
  CDR3 for alpha chain variable domain of TCR clone 72621 (TRAV30, TRAJ57)
CGTGWAPQGGSEKLVF

SEQ ID NO: 145242 - protein, 14 aa, Homo sapiens
  CDR3 for beta chain variable domain of TCR clone 72621 (TRBV18, TRBJ1-1)
CASSPGSQGVEAFF

SEQ ID NO: 145243 - protein, 15 aa, Homo sapiens
  CDR3 for alpha chain variable domain of TCR clone 72622 (TRAV8-4, TRAJ47)
CAVSDPEEYGNKLVF

SEQ ID NO: 145244 - protein, 15 aa, Homo sapiens
  CDR3 for beta chain variable domain of TCR clone 72622 (TRBV11-2, TRBJ2-1)
CASSLGPDAYNEQFF

SEQ ID NO: 145245 - protein, 14 aa, Homo sapiens
  CDR3 for alpha chain variable domain of TCR clone 72623 (TRAV35, TRAJ22)
CAGLRPGSARQLTF

SEQ ID NO: 145246 - protein, 12 aa, Homo sapiens
  CDR3 for beta chain variable domain of TCR clone 72623 (TRBV14, TRBJ2-5)
CASSQLKETQYF

SEQ ID NO: 145247 - protein, 14 aa, Homo sapiens
  CDR3 for alpha chain variable domain of TCR clone 72624 (TRAV3, TRAJ9)
CAVRLNTGGFKTIF

SEQ ID NO: 145248 - protein, 15 aa, Homo sapiens
  CDR3 for beta chain variable domain of TCR clone 72624 (TRBV3-1, TRBJ2-7)
CASSQEWTGSYEQYF

SEQ ID NO: 145249 - protein, 14 aa, Homo sapiens
  CDR3 for alpha chain variable domain of TCR clone 72625 (TRAV27, TRAJ38)
CAGDRAGNNRKLIW

SEQ ID NO: 145250 - protein, 12 aa, Homo sapiens
  CDR3 for beta chain variable domain of TCR clone 72625 (TRBV6-1, TRBJ2-7)
CASSLYGNEQYF

SEQ ID NO: 145251 - protein, 17 aa, Homo sapiens
  CDR3 for alpha chain variable domain of TCR clone 72626 (TRAV8-2, )
CVVNIQNPDPAVYQLRD

SEQ ID NO: 145252 - protein, 12 aa, Homo sapiens
  CDR3 for beta chain variable domain of TCR clone 72626 (TRBV11-2, TRBJ2-2)
CASSLGGGELFF

SEQ ID NO: 145253 - protein, 11 aa, Homo sapiens
  CDR3 for alpha chain variable domain of TCR clone 72627 (TRAV12-1, TRAJ34)
CVVNKGRELIF

SEQ ID NO: 145254 - protein, 14 aa, Homo sapiens
  CDR3 for beta chain variable domain of TCR clone 72627 (TRBV19, TRBJ2-1)
CASPTFVLSGEQFF

SEQ ID NO: 145255 - protein, 14 aa, Homo sapiens
  CDR3 for alpha chain variable domain of TCR clone 72628 (TRAV8-3, TRAJ9)
CAVVYNTGRFKTIF

SEQ ID NO: 145256 - protein, 14 aa, Homo sapiens
  CDR3 for beta chain variable domain of TCR clone 72628 (TRBV7-3, TRBJ2-2)
CASSSGGYTGELFF

SEQ ID NO: 145257 - protein, 15 aa, Homo sapiens
  CDR3 for alpha chain variable domain of TCR clone 72629 (TRAV21, TRAJ53)
CATLNSGGSNYKLTF

SEQ ID NO: 145258 - protein, 16 aa, Homo sapiens
  CDR3 for beta chain variable domain of TCR clone 72629 (TRBV20-1, TRBJ1-4)
CSAPGQGLLTNEKPFF

SEQ ID NO: 145259 - protein, 18 aa, Homo sapiens
  CDR3 for alpha chain variable domain of TCR clone 72630 (TRAV21, TRAJ52)
CAVRPSPAGGTSYGKLTF

SEQ ID NO: 145260 - protein, 13 aa, Homo sapiens
  CDR3 for beta chain variable domain of TCR clone 72630 (TRBV20-1, TRBJ1-1)
CSAPLGGGTEAFF

SEQ ID NO: 145261 - protein, 15 aa, Homo sapiens
  CDR3 for alpha chain variable domain of TCR clone 72631 (TRAV4, TRAJ10)
CLVGDGSGGGNKLTF

SEQ ID NO: 145262 - protein, 20 aa, Homo sapiens
  CDR3 for beta chain variable domain of TCR clone 72631 (TRBV7-8, TRBJ2-2)
CASSHLFPGPTIHITGELFF

SEQ ID NO: 145263 - protein, 13 aa, Homo sapiens
  CDR3 for alpha chain variable domain of TCR clone 72632 (TRAV12-2, TRAJ12)
CAARMDSSYKLIF

SEQ ID NO: 145264 - protein, 18 aa, Homo sapiens
  CDR3 for beta chain variable domain of TCR clone 72632 (TRBV6-6, TRBJ2-5)
CASSYSWLQGALRETQYF

SEQ ID NO: 145265 - protein, 13 aa, Homo sapiens
  CDR3 for alpha chain variable domain of TCR clone 72633 (TRAV12-3, TRAJ33)
CAMSVNSNYQLIW

SEQ ID NO: 145266 - protein, 13 aa, Homo sapiens
  CDR3 for beta chain variable domain of TCR clone 72633 (TRBV15, TRBJ2-7)
CATSTTGHYEQYF

SEQ ID NO: 145267 - protein, 16 aa, Homo sapiens
  CDR3 for alpha chain variable domain of TCR clone 72634 (TRAV1-2, TRAJ10)
CAVRGVLTGGGNKLTF

SEQ ID NO: 145268 - protein, 12 aa, Homo sapiens
  CDR3 for beta chain variable domain of TCR clone 72634 (TRBV11-2, TRBJ2-1)
CASSPGNNEQLF

SEQ ID NO: 145269 - protein, 13 aa, Homo sapiens
  CDR3 for alpha chain variable domain of TCR clone 72635 (TRAV27, TRAJ3)
ASLRGSSASKIIF

SEQ ID NO: 145270 - protein, 15 aa, Homo sapiens
  CDR3 for beta chain variable domain of TCR clone 72635 (TRBV28, TRBJ1-3)
CASSMGGASGNTIYF

SEQ ID NO: 145271 - protein, 15 aa, Homo sapiens
  CDR3 for alpha chain variable domain of TCR clone 72636 (TRAV13-1, TRAJ18)
CAASGGGSILGRLYF

SEQ ID NO: 145272 - protein, 13 aa, Homo sapiens
  CDR3 for beta chain variable domain of TCR clone 72636 (TRBV18, TRBJ2-1)
CASGLASNNEQFF

SEQ ID NO: 145273 - protein, 11 aa, Homo sapiens
  CDR3 for alpha chain variable domain of TCR clone 72637 (TRAV1-2, TRAJ20)
CAVATDYKLSF

SEQ ID NO: 145274 - protein, 18 aa, Homo sapiens
  CDR3 for beta chain variable domain of TCR clone 72637 (TRBV20-1, TRBJ2-6)
CSAETTPTHGSGANVLTF

SEQ ID NO: 145275 - protein, 16 aa, Homo sapiens
  CDR3 for alpha chain variable domain of TCR clone 72638 (TRAV20, TRAJ22)
CAVQASSSGSARQLTF

SEQ ID NO: 145276 - protein, 13 aa, Homo sapiens
  CDR3 for beta chain variable domain of TCR clone 72638 (TRBV7-2, TRBJ2-5)
CASSQTSAETQYF

SEQ ID NO: 145277 - protein, 15 aa, Homo sapiens
  CDR3 for alpha chain variable domain of TCR clone 72639 (TRAV2, TRAJ37)
CAVEDGSSNTGQLIF

SEQ ID NO: 145278 - protein, 13 aa, Homo sapiens
  CDR3 for beta chain variable domain of TCR clone 72639 (TRBV20-1, TRBJ1-6)
CSTFREGNSPLHF

SEQ ID NO: 145279 - protein, 13 aa, Homo sapiens
  CDR3 for alpha chain variable domain of TCR clone 72640 (TRAV35, TRAJ57)
CWSPQGGSEKLVF

SEQ ID NO: 145280 - protein, 14 aa, Homo sapiens
  CDR3 for beta chain variable domain of TCR clone 72640 (TRBV28, TRBJ2-7)
CASTRQGAPYEQYF

SEQ ID NO: 145281 - protein, 17 aa, Homo sapiens
  CDR3 for alpha chain variable domain of TCR clone 72641 (TRAV17, TRAJ28)
CATDPRRGGAGRYQLTF

SEQ ID NO: 145282 - protein, 14 aa, Homo sapiens
  CDR3 for beta chain variable domain of TCR clone 72641 (TRBV19, TRBJ2-7)
CASRPGTGVNEQYF

SEQ ID NO: 145283 - protein, 13 aa, Homo sapiens
  CDR3 for alpha chain variable domain of TCR clone 72642 (TRAV1-1, TRAJ9)
CAAKNTGGFKTIF

SEQ ID NO: 145284 - protein, 16 aa, Homo sapiens
  CDR3 for beta chain variable domain of TCR clone 72642 (TRBV6-5, TRBJ2-1)
CASSETLAGHYNEQFF

SEQ ID NO: 145285 - protein, 12 aa, Homo sapiens
  CDR3 for alpha chain variable domain of TCR clone 72643 (TRAV8-3, TRAJ26)
CAGDNYGQNFGF

SEQ ID NO: 145286 - protein, 15 aa, Homo sapiens
  CDR3 for beta chain variable domain of TCR clone 72643 (TRBV9, TRBJ2-1)
CASSLAGSSYNEQFF

SEQ ID NO: 145287 - protein, 12 aa, Homo sapiens
  CDR3 for alpha chain variable domain of TCR clone 72644 (TRAV2, TRAJ40)
CCGYLRTYKYIF

SEQ ID NO: 145288 - protein, 16 aa, Homo sapiens
  CDR3 for beta chain variable domain of TCR clone 72644 (TRBV12-5, TRBJ2-5)
CASGPRTSGNQETQYF

SEQ ID NO: 145289 - protein, 13 aa, Homo sapiens
  CDR3 for alpha chain variable domain of TCR clone 72645 (TRAV41, TRAJ44)
CAVISGTASKLTF

SEQ ID NO: 145290 - protein, 17 aa, Homo sapiens
  CDR3 for beta chain variable domain of TCR clone 72645 (TRBV4-1, TRBJ1-5)
CASSQQPPTVANQPQHF

SEQ ID NO: 145291 - protein, 15 aa, Homo sapiens
  CDR3 for alpha chain variable domain of TCR clone 72646 (TRAV12-3, TRAJ49)
CAMAVTPNTGNQFNF

SEQ ID NO: 145292 - protein, 18 aa, Homo sapiens
  CDR3 for beta chain variable domain of TCR clone 72646 (TRBV4-1, TRBJ1-5)
CASSQDPRGQGLNQPQHF

SEQ ID NO: 145293 - protein, 16 aa, Homo sapiens
  CDR3 for alpha chain variable domain of TCR clone 72647 (TRAV12-3, TRAJ53)
FAMSVGSGGSNYKLTF

SEQ ID NO: 145294 - protein, 13 aa, Homo sapiens
  CDR3 for beta chain variable domain of TCR clone 72647 (TRBV7-6, TRBJ1-2)
CASSLVADYGYTF

SEQ ID NO: 145295 - protein, 14 aa, Homo sapiens
  CDR3 for alpha chain variable domain of TCR clone 72648 (TRAV17, TRAJ32)
CATDPGGAPNKLIF

SEQ ID NO: 145296 - protein, 14 aa, Homo sapiens
  CDR3 for beta chain variable domain of TCR clone 72648 (TRBV2, TRBJ1-5)
CASSENRGGQPQHF

SEQ ID NO: 145297 - protein, 14 aa, Homo sapiens
  CDR3 for alpha chain variable domain of TCR clone 72649 (TRAV9-2, TRAJ39)
CALYIYNAGNMLTF

SEQ ID NO: 145298 - protein, 14 aa, Homo sapiens
  CDR3 for beta chain variable domain of TCR clone 72649 (TRBV12-4, TRBJ2-3)
CASSLSGATDTQYF

SEQ ID NO: 145299 - protein, 19 aa, Homo sapiens
  CDR3 for alpha chain variable domain of TCR clone 72650 (TRAV21, TRAJ39)
SLVTQPPPKGAKAGNMLTF

SEQ ID NO: 145300 - protein, 14 aa, Homo sapiens
  CDR3 for beta chain variable domain of TCR clone 72650 (TRBV11-2, TRBJ2-7)
CASSLGAGAYEQYF

SEQ ID NO: 145301 - protein, 19 aa, Homo sapiens
  CDR3 for alpha chain variable domain of TCR clone 72651 (TRAV2, TRAJ20)
ILQVREADAAVYRDCKLSF

SEQ ID NO: 145302 - protein, 18 aa, Homo sapiens
  CDR3 for beta chain variable domain of TCR clone 72651 (TRBV20-1, TRBJ2-3)
CSASGLSGGPGTTDTQYF

SEQ ID NO: 145303 - protein, 15 aa, Homo sapiens
  CDR3 for alpha chain variable domain of TCR clone 72652 (TRAV17, TRAJ23)
CATDAEDNQGGKLIV

SEQ ID NO: 145304 - protein, 12 aa, Homo sapiens
  CDR3 for beta chain variable domain of TCR clone 72652 (TRBV2, TRBJ2-1)
CAKREGYNEQFF

SEQ ID NO: 145305 - protein, 15 aa, Homo sapiens
  CDR3 for alpha chain variable domain of TCR clone 72653 (TRAV8-3, TRAJ37)
CAVGARASSTGKLIF

SEQ ID NO: 145306 - protein, 15 aa, Homo sapiens
  CDR3 for beta chain variable domain of TCR clone 72653 (TRBV5-4, TRBJ2-3)
CASSLAGRVTDTQYF

SEQ ID NO: 145307 - protein, 19 aa, Homo sapiens
  CDR3 for alpha chain variable domain of TCR clone 72654 (TRAV2, TRAJ20)
ILQVREADAAVYRDCKLSF

SEQ ID NO: 145308 - protein, 13 aa, Homo sapiens
  CDR3 for beta chain variable domain of TCR clone 72654 (TRBV7-2, TRBJ2-2)
CASSSVRAGELFF

SEQ ID NO: 145309 - protein, 14 aa, Homo sapiens
  CDR3 for alpha chain variable domain of TCR clone 72655 (TRAV2, TRAJ9)
CAVEDRSGGFKTIF

SEQ ID NO: 145310 - protein, 12 aa, Homo sapiens
  CDR3 for beta chain variable domain of TCR clone 72655 (TRBV28, TRBJ2-7)
CASSFSSYEQYF

SEQ ID NO: 145311 - protein, 16 aa, Homo sapiens
  CDR3 for alpha chain variable domain of TCR clone 72656 (TRAV14/DV4, TRAJ12)
CAMREVLMDSSYKLIF

SEQ ID NO: 145312 - protein, 13 aa, Homo sapiens
  CDR3 for beta chain variable domain of TCR clone 72656 (TRBV7-9, TRBJ1-2)
CASSLKQNYGYTF

SEQ ID NO: 145313 - protein, 13 aa, Homo sapiens
  CDR3 for alpha chain variable domain of TCR clone 72657 (TRAV1-2, TRAJ9)
CAVLNTGGFKTIF

SEQ ID NO: 145314 - protein, 17 aa, Homo sapiens
  CDR3 for beta chain variable domain of TCR clone 72657 (TRBV13, TRBJ2-3)
CASSLSRVAGGRNTQHF

SEQ ID NO: 145315 - protein, 12 aa, Homo sapiens
  CDR3 for alpha chain variable domain of TCR clone 72658 (TRAV20, TRAJ39)
CAVGNAGNMLTF

SEQ ID NO: 145316 - protein, 15 aa, Homo sapiens
  CDR3 for beta chain variable domain of TCR clone 72658 (TRBV4-1, TRBJ1-1)
CASSQEWGHYTEAFF

SEQ ID NO: 145317 - protein, 11 aa, Homo sapiens
  CDR3 for alpha chain variable domain of TCR clone 72659 (TRAV29/DV5, TRAJ49)
CAAVPGNQFYF

SEQ ID NO: 145318 - protein, 17 aa, Homo sapiens
  CDR3 for beta chain variable domain of TCR clone 72659 (TRBV4-2, TRBJ1-1)
CASTQCGGGSGNTEAFF

SEQ ID NO: 145319 - protein, 15 aa, Homo sapiens
  CDR3 for alpha chain variable domain of TCR clone 72660 (TRAV2, TRAJ15)
CAVEDRGQAGPALIF

SEQ ID NO: 145320 - protein, 13 aa, Homo sapiens
  CDR3 for beta chain variable domain of TCR clone 72660 (TRBV10-2, TRBJ2-7)
CASGASGGYEQYF

SEQ ID NO: 145321 - protein, 15 aa, Homo sapiens
  CDR3 for alpha chain variable domain of TCR clone 72661 (TRAV23/DV6, TRAJ18)
CAARYRGSTLGRLYF

SEQ ID NO: 145322 - protein, 13 aa, Homo sapiens
  CDR3 for beta chain variable domain of TCR clone 72661 (TRBV7-3, TRBJ1-1)
CASSLTQGTEAFF

SEQ ID NO: 145323 - protein, 14 aa, Homo sapiens
  CDR3 for alpha chain variable domain of TCR clone 72662 (TRAV12-3, TRAJ53)
CGATSGGSNYKLTF

SEQ ID NO: 145324 - protein, 13 aa, Homo sapiens
  CDR3 for beta chain variable domain of TCR clone 72662 (TRBV19, TRBJ1-5)
CASSTQDGQPQHL

SEQ ID NO: 145325 - protein, 12 aa, Homo sapiens
  CDR3 for alpha chain variable domain of TCR clone 72663 (TRAV3, TRAJ7)
CADLLWERQTRF

SEQ ID NO: 145326 - protein, 13 aa, Homo sapiens
  CDR3 for beta chain variable domain of TCR clone 72663 (TRBV7-3, TRBJ2-5)
CASSFRGGETQYF

SEQ ID NO: 145327 - protein, 11 aa, Homo sapiens
  CDR3 for alpha chain variable domain of TCR clone 72664 (TRAV21, TRAJ11)
CAVNGYSTLTF

SEQ ID NO: 145328 - protein, 14 aa, Homo sapiens
  CDR3 for beta chain variable domain of TCR clone 72664 (TRBV7-2, TRBJ2-7)
CASSFLGRVYEQYF

SEQ ID NO: 145329 - protein, 12 aa, Homo sapiens
  CDR3 for alpha chain variable domain of TCR clone 72665 (TRAV2, TRAJ9)
CAVGAGGFKTIF

SEQ ID NO: 145330 - protein, 16 aa, Homo sapiens
  CDR3 for beta chain variable domain of TCR clone 72665 (TRBV13, TRBJ2-2)
CACSPRAGEHTGELFF

SEQ ID NO: 145331 - protein, 13 aa, Homo sapiens
  CDR3 for alpha chain variable domain of TCR clone 72666 (TRAV2, TRAJ15)
CAVASQAGTALIF

SEQ ID NO: 145332 - protein, 14 aa, Homo sapiens
  CDR3 for beta chain variable domain of TCR clone 72666 (TRBV28, TRBJ1-1)
CASSSEQGYTEAFF

SEQ ID NO: 145333 - protein, 13 aa, Homo sapiens
  CDR3 for alpha chain variable domain of TCR clone 72667 (TRAV8-3, TRAJ48)
CCGCNFGNEKLTF

SEQ ID NO: 145334 - protein, 14 aa, Homo sapiens
  CDR3 for beta chain variable domain of TCR clone 72667 (TRBV9, TRBJ2-3)
CQQHWGGEGDTQYF

SEQ ID NO: 145335 - protein, 14 aa, Homo sapiens
  CDR3 for alpha chain variable domain of TCR clone 72668 (TRAV29/DV5, TRAJ36)
CAARRKTGANNLFF

SEQ ID NO: 145336 - protein, 19 aa, Homo sapiens
  CDR3 for beta chain variable domain of TCR clone 72668 (TRBV25-1, TRBJ2-2)
CAILVYRVDRGRKTGELFF

SEQ ID NO: 145337 - protein, 15 aa, Homo sapiens
  CDR3 for alpha chain variable domain of TCR clone 72669 (TRAV8-4, TRAJ37)
CAVTYGSSDTGKLIF

SEQ ID NO: 145338 - protein, 13 aa, Homo sapiens
  CDR3 for beta chain variable domain of TCR clone 72669 (TRBV12-4, TRBJ2-5)
CASSLGGSRTQYF

SEQ ID NO: 145339 - protein, 14 aa, Homo sapiens
  CDR3 for alpha chain variable domain of TCR clone 72670 (TRAV8-3, TRAJ39)
CAVGANNAGNMLTF

SEQ ID NO: 145340 - protein, 16 aa, Homo sapiens
  CDR3 for beta chain variable domain of TCR clone 72670 (TRBV12-5, TRBJ2-5)
CASGPRASGNQETQYF

SEQ ID NO: 145341 - protein, 15 aa, Homo sapiens
  CDR3 for alpha chain variable domain of TCR clone 72671 (TRAV14/DV4, TRAJ10)
CAMRELTGGGNKLTF

SEQ ID NO: 145342 - protein, 14 aa, Homo sapiens
  CDR3 for beta chain variable domain of TCR clone 72671 (TRBV7-9, TRBJ1-1)
CASTPLQSYTEAFF

SEQ ID NO: 145343 - protein, 11 aa, Homo sapiens
  CDR3 for alpha chain variable domain of TCR clone 72672 (TRAV12-1, TRAJ9)
CVVKNGFKTIF

SEQ ID NO: 145344 - protein, 13 aa, Homo sapiens
  CDR3 for beta chain variable domain of TCR clone 72672 (TRBV10-3, TRBJ2-7)
CASKLAVNYEQYF

SEQ ID NO: 145345 - protein, 13 aa, Homo sapiens
  CDR3 for alpha chain variable domain of TCR clone 72673 (TRAV3, TRAJ4)
CAARDGGYNKLIF

SEQ ID NO: 145346 - protein, 14 aa, Homo sapiens
  CDR3 for beta chain variable domain of TCR clone 72673 (TRBV12-4, TRBJ1-2)
CASSSSAAGSSYTF

SEQ ID NO: 145347 - protein, 14 aa, Homo sapiens
  CDR3 for alpha chain variable domain of TCR clone 72674 (TRAV26-1, TRAJ38)
CIADNAGNNRKLIW

SEQ ID NO: 145348 - protein, 13 aa, Homo sapiens
  CDR3 for beta chain variable domain of TCR clone 72674 (TRBV20-1, TRBJ1-1)
CRARGGGNTEAFF

SEQ ID NO: 145349 - protein, 19 aa, Homo sapiens
  CDR3 for alpha chain variable domain of TCR clone 72675 (TRAV8-3, TRAJ4)
LSTSVLWMFYSGGYNKLIF

SEQ ID NO: 145350 - protein, 14 aa, Homo sapiens
  CDR3 for beta chain variable domain of TCR clone 72675 (TRBV7-9, TRBJ2-3)
CASSLGDGTDTQYF

SEQ ID NO: 145351 - protein, 13 aa, Homo sapiens
  CDR3 for alpha chain variable domain of TCR clone 72676 (TRAV20, TRAJ37)
CAGCSSNTGKLIF

SEQ ID NO: 145352 - protein, 10 aa, Homo sapiens
  CDR3 for beta chain variable domain of TCR clone 72676 (TRBV7-9, TRBJ1-1)
CASSFTEAFF

SEQ ID NO: 145353 - protein, 14 aa, Homo sapiens
  CDR3 for alpha chain variable domain of TCR clone 72677 (TRAV2, TRAJ39)
CAVEGDNAGNMLTF

SEQ ID NO: 145354 - protein, 14 aa, Homo sapiens
  CDR3 for beta chain variable domain of TCR clone 72677 (TRBV28, TRBJ2-4)
CASSPRARGNTQYF

SEQ ID NO: 145355 - protein, 15 aa, Homo sapiens
  CDR3 for alpha chain variable domain of TCR clone 72678 (TRAV3, TRAJ5)
CAVRGLDTGRRALTF

SEQ ID NO: 145356 - protein, 13 aa, Homo sapiens
  CDR3 for beta chain variable domain of TCR clone 72678 (TRBV20-1, TRBJ2-5)
CSARDSKQATQYF

SEQ ID NO: 145357 - protein, 14 aa, Homo sapiens
  CDR3 for alpha chain variable domain of TCR clone 72679 (TRAV1-2, TRAJ8)
CAVREDAGFQKLVF

SEQ ID NO: 145358 - protein, 15 aa, Homo sapiens
  CDR3 for beta chain variable domain of TCR clone 72679 (TRBV27, TRBJ2-1)
CASSNGGGSSNEQFF

SEQ ID NO: 145359 - protein, 14 aa, Homo sapiens
  CDR3 for alpha chain variable domain of TCR clone 72680 (TRAV8-3, TRAJ9)
CAVVYNTGGFKTIF

SEQ ID NO: 145360 - protein, 14 aa, Homo sapiens
  CDR3 for beta chain variable domain of TCR clone 72680 (TRBV7-3, TRBJ2-2)
CASSSGGYTGELCF

SEQ ID NO: 145361 - protein, 14 aa, Homo sapiens
  CDR3 for alpha chain variable domain of TCR clone 72681 (TRAV13-1, TRAJ44)
CAAKATGTASKLTF

SEQ ID NO: 145362 - protein, 15 aa, Homo sapiens
  CDR3 for beta chain variable domain of TCR clone 72681 (TRBV19, TRBJ2-1)
CASSKGRGPYNEQFF

SEQ ID NO: 145363 - protein, 13 aa, Homo sapiens
  CDR3 for alpha chain variable domain of TCR clone 72682 (TRAV3, TRAJ20)
CCEAFCNDYKLGF

SEQ ID NO: 145364 - protein, 15 aa, Homo sapiens
  CDR3 for beta chain variable domain of TCR clone 72682 (TRBV7-8, TRBJ1-1)
CASSLGDSRNTEAFF

SEQ ID NO: 145365 - protein, 14 aa, Homo sapiens
  CDR3 for alpha chain variable domain of TCR clone 72683 (TRAV26-1, TRAJ45)
CIEVTGGGADGLTF

SEQ ID NO: 145366 - protein, 20 aa, Homo sapiens
  CDR3 for beta chain variable domain of TCR clone 72683 (TRBV28, TRBJ2-1)
CASTPIGRSPGLAGGNEQFF

SEQ ID NO: 145367 - protein, 11 aa, Homo sapiens
  CDR3 for alpha chain variable domain of TCR clone 72684 (TRAV13-1, TRAJ15)
CAATPGTALIF

SEQ ID NO: 145368 - protein, 17 aa, Homo sapiens
  CDR3 for beta chain variable domain of TCR clone 72684 (TRBV13, TRBJ2-3)
CASSRSRVAGGRNTQYF

SEQ ID NO: 145369 - protein, 15 aa, Homo sapiens
  CDR3 for alpha chain variable domain of TCR clone 72685 (TRAV2, TRAJ9)
CAVEDRGTGGFKTIF

SEQ ID NO: 145370 - protein, 13 aa, Homo sapiens
  CDR3 for beta chain variable domain of TCR clone 72685 (TRBV7-2, TRBJ2-2)
CASSLAVTGELFF

SEQ ID NO: 145371 - protein, 14 aa, Homo sapiens
  CDR3 for alpha chain variable domain of TCR clone 72686 (TRAV3, TRAJ21)
CAVESQANFNKFYF

SEQ ID NO: 145372 - protein, 15 aa, Homo sapiens
  CDR3 for beta chain variable domain of TCR clone 72686 (TRBV7-8, TRBJ2-7)
CASSERLAGAYEQYF

SEQ ID NO: 145373 - protein, 15 aa, Homo sapiens
  CDR3 for alpha chain variable domain of TCR clone 72687 (TRAV23/DV6, TRAJ42)
CAANYYGGSQGNLIF

SEQ ID NO: 145374 - protein, 15 aa, Homo sapiens
  CDR3 for beta chain variable domain of TCR clone 72687 (TRBV7-9, TRBJ1-1)
CASSLLEQGGTEAFF

SEQ ID NO: 145375 - protein, 18 aa, Homo sapiens
  CDR3 for alpha chain variable domain of TCR clone 72688 (TRAV21, TRAJ52)
CAVRPSPAGGTSYGKLTF

SEQ ID NO: 145376 - protein, 14 aa, Homo sapiens
  CDR3 for beta chain variable domain of TCR clone 72688 (TRBV27, TRBJ1-1)
CASSQGTVMTEAFF

SEQ ID NO: 145377 - protein, 17 aa, Homo sapiens
  CDR3 for alpha chain variable domain of TCR clone 72689 (TRAV38-1, TRAJ45)
CAFMKHYMGGGADGLTF

SEQ ID NO: 145378 - protein, 14 aa, Homo sapiens
  CDR3 for beta chain variable domain of TCR clone 72689 (TRBV19, TRBJ2-1)
CASPTFVLSGEQFF

SEQ ID NO: 145379 - protein, 11 aa, Homo sapiens
  CDR3 for alpha chain variable domain of TCR clone 72690 (TRAV1-2, TRAJ31)
CAVNNNARLMF

SEQ ID NO: 145380 - protein, 14 aa, Homo sapiens
  CDR3 for beta chain variable domain of TCR clone 72690 (TRBV4-1, TRBJ2-2)
CASSQAVNTGELFF

SEQ ID NO: 145381 - protein, 15 aa, Homo sapiens
  CDR3 for alpha chain variable domain of TCR clone 72691 (TRAV8-2, TRAJ42)
CVVSAYMGSQGNLIL

SEQ ID NO: 145382 - protein, 11 aa, Homo sapiens
  CDR3 for beta chain variable domain of TCR clone 72691 (TRBV5-1, TRBJ2-1)
CVSSIGQEQFF

SEQ ID NO: 145383 - protein, 18 aa, Homo sapiens
  CDR3 for alpha chain variable domain of TCR clone 72692 (TRAV3, TRAJ52)
CALSRHNAGGTSYGKLTF

SEQ ID NO: 145384 - protein, 13 aa, Homo sapiens
  CDR3 for beta chain variable domain of TCR clone 72692 (TRBV7-9, TRBJ1-2)
CASSLKQNYGYTF

SEQ ID NO: 145385 - protein, 18 aa, Homo sapiens
  CDR3 for alpha chain variable domain of TCR clone 72693 (TRAV12-2, )
CAVEDIQNPDPAVYQLRD

SEQ ID NO: 145386 - protein, 16 aa, Homo sapiens
  CDR3 for beta chain variable domain of TCR clone 72693 (TRBV7-9, TRBJ1-2)
CASSLGFSSGEDGYTF

SEQ ID NO: 145387 - protein, 13 aa, Homo sapiens
  CDR3 for alpha chain variable domain of TCR clone 72694 (TRAV13-1, TRAJ21)
CAASIYNFNKFYF

SEQ ID NO: 145388 - protein, 16 aa, Homo sapiens
  CDR3 for beta chain variable domain of TCR clone 72694 (TRBV12-4, TRBJ1-5)
CASSRPVGGSNQPQHF

SEQ ID NO: 145389 - protein, 17 aa, Homo sapiens
  CDR3 for alpha chain variable domain of TCR clone 72695 (TRAV23/DV6, TRAJ57)
CAASSTLSQGGSEKLVF

SEQ ID NO: 145390 - protein, 14 aa, Homo sapiens
  CDR3 for beta chain variable domain of TCR clone 72695 (TRBV25-1, TRBJ1-1)
CASTHLGWNTEAFF

SEQ ID NO: 145391 - protein, 14 aa, Homo sapiens
  CDR3 for alpha chain variable domain of TCR clone 72696 (TRAV13-1, TRAJ3)
CAASKRSSASKIIF

SEQ ID NO: 145392 - protein, 13 aa, Homo sapiens
  CDR3 for beta chain variable domain of TCR clone 72696 (TRBV25-1, TRBJ2-5)
CASSESGRETQYF

SEQ ID NO: 145393 - protein, 13 aa, Homo sapiens
  CDR3 for alpha chain variable domain of TCR clone 72697 (TRAV21, TRAJ57)
CAVTQGGSEKLVF

SEQ ID NO: 145394 - protein, 13 aa, Homo sapiens
  CDR3 for beta chain variable domain of TCR clone 72697 (TRBV13, TRBJ2-7)
CASSLERGWKKYF

SEQ ID NO: 145395 - protein, 10 aa, Homo sapiens
  CDR3 for alpha chain variable domain of TCR clone 72698 (TRAV26-1, TRAJ22)
RSVSARQLTF

SEQ ID NO: 145396 - protein, 13 aa, Homo sapiens
  CDR3 for beta chain variable domain of TCR clone 72698 (TRBV7-9, TRBJ1-2)
CASSLKQNYGYTF

SEQ ID NO: 145397 - protein, 14 aa, Homo sapiens
  CDR3 for alpha chain variable domain of TCR clone 72699 (TRAV12-2, TRAJ5)
CAVNRSTGRRTLTF

SEQ ID NO: 145398 - protein, 12 aa, Homo sapiens
  CDR3 for beta chain variable domain of TCR clone 72699 (TRBV19, TRBJ1-5)
CASSIAQQPQHF

SEQ ID NO: 145399 - protein, 15 aa, Homo sapiens
  CDR3 for alpha chain variable domain of TCR clone 72700 (TRAV21, TRAJ53)
CAALNSGGSNYKLTF

SEQ ID NO: 145400 - protein, 13 aa, Homo sapiens
  CDR3 for beta chain variable domain of TCR clone 72700 (TRBV11-2, TRBJ2-5)
CASSSTGEETQYF

SEQ ID NO: 145401 - protein, 14 aa, Homo sapiens
  CDR3 for alpha chain variable domain of TCR clone 72701 (TRAV17, TRAJ53)
CATDAGGSNYKLTF

SEQ ID NO: 145402 - protein, 16 aa, Homo sapiens
  CDR3 for beta chain variable domain of TCR clone 72701 (TRBV4-1, TRBJ1-1)
CASSQDAGMGSTEAFF

SEQ ID NO: 145403 - protein, 14 aa, Homo sapiens
  CDR3 for alpha chain variable domain of TCR clone 72702 (TRAV2, TRAJ37)
CDVDFTSNTGKLIF

SEQ ID NO: 145404 - protein, 13 aa, Homo sapiens
  CDR3 for beta chain variable domain of TCR clone 72702 (TRBV20-1, TRBJ1-1)
CSAPLGGGTEAFF

SEQ ID NO: 145405 - protein, 12 aa, Homo sapiens
  CDR3 for alpha chain variable domain of TCR clone 72703 (TRAV36/DV7, TRAJ54)
CAVVRGAQKLVF

SEQ ID NO: 145406 - protein, 14 aa, Homo sapiens
  CDR3 for beta chain variable domain of TCR clone 72703 (TRBV7-3, TRBJ1-1)
CACSLKGGNTEAFF

SEQ ID NO: 145407 - protein, 14 aa, Homo sapiens
  CDR3 for alpha chain variable domain of TCR clone 72704 (TRAV12-2, TRAJ45)
CALPERGGADGLTF

SEQ ID NO: 145408 - protein, 17 aa, Homo sapiens
  CDR3 for beta chain variable domain of TCR clone 72704 (TRBV7-8, TRBJ2-6)
CASSAGTGGAGANVPTF

SEQ ID NO: 145409 - protein, 15 aa, Homo sapiens
  CDR3 for alpha chain variable domain of TCR clone 72705 (TRAV13-1, TRAJ36)
CAASIRQTGANNLFF

SEQ ID NO: 145410 - protein, 17 aa, Homo sapiens
  CDR3 for beta chain variable domain of TCR clone 72705 (TRBV7-3, TRBJ2-5)
CASSLGSGRSGSETQYF

SEQ ID NO: 145411 - protein, 16 aa, Homo sapiens
  CDR3 for alpha chain variable domain of TCR clone 72706 (TRAV4, TRAJ22)
CLVGDLYSGSARQLTF

SEQ ID NO: 145412 - protein, 12 aa, Homo sapiens
  CDR3 for beta chain variable domain of TCR clone 72706 (TRBV7-8, TRBJ2-7)
CASSLGDREQYF

SEQ ID NO: 145413 - protein, 15 aa, Homo sapiens
  CDR3 for alpha chain variable domain of TCR clone 72707 (TRAV12-2, TRAJ53)
CAVNGGGGSNYKLTF

SEQ ID NO: 145414 - protein, 15 aa, Homo sapiens
  CDR3 for beta chain variable domain of TCR clone 72707 (TRBV10-3, TRBJ2-3)
CAISLTSGGTDTQYF

SEQ ID NO: 145415 - protein, 16 aa, Homo sapiens
  CDR3 for alpha chain variable domain of TCR clone 72708 (TRAV3, TRAJ3)
CAVRDRAKSSASKLIF

SEQ ID NO: 145416 - protein, 16 aa, Homo sapiens
  CDR3 for beta chain variable domain of TCR clone 72708 (TRBV20-1, TRBJ2-4)
CSATSLAELAKNIQYF

SEQ ID NO: 145417 - protein, 13 aa, Homo sapiens
  CDR3 for alpha chain variable domain of TCR clone 72709 (TRAV23/DV6, TRAJ27)
CAASKPMQENQPL

SEQ ID NO: 145418 - protein, 14 aa, Homo sapiens
  CDR3 for beta chain variable domain of TCR clone 72709 (TRBV5-4, TRBJ1-1)
CASSLDSRRDEAFF

SEQ ID NO: 145419 - protein, 14 aa, Homo sapiens
  CDR3 for alpha chain variable domain of TCR clone 72710 (TRAV8-3, TRAJ6)
CAVGSSGGSYIPTF

SEQ ID NO: 145420 - protein, 15 aa, Homo sapiens
  CDR3 for beta chain variable domain of TCR clone 72710 (TRBV7-2, TRBJ1-2)
CASSPRAGWNYGYTF

SEQ ID NO: 145421 - protein, 14 aa, Homo sapiens
  CDR3 for alpha chain variable domain of TCR clone 72711 (TRAV12-2, TRAJ53)
CRERVGGGNYKLTF

SEQ ID NO: 145422 - protein, 17 aa, Homo sapiens
  CDR3 for beta chain variable domain of TCR clone 72711 (TRBV7-3, TRBJ2-3)
CASSLMKRMRGADTQYF

SEQ ID NO: 145423 - protein, 11 aa, Homo sapiens
  CDR3 for alpha chain variable domain of TCR clone 72712 (TRAV2, TRAJ13)
CASGGYQKVTF

SEQ ID NO: 145424 - protein, 13 aa, Homo sapiens
  CDR3 for beta chain variable domain of TCR clone 72712 (TRBV28, TRBJ2-5)
CASSFAGGETQYF

SEQ ID NO: 145425 - protein, 15 aa, Homo sapiens
  CDR3 for alpha chain variable domain of TCR clone 72713 (TRAV1-2, TRAJ30)
CAVRPHGNRDDKIIF

SEQ ID NO: 145426 - protein, 16 aa, Homo sapiens
  CDR3 for beta chain variable domain of TCR clone 72713 (TRBV24-1, TRBJ2-3)
CATSDRRQDLTDTQYF

SEQ ID NO: 145427 - protein, 15 aa, Homo sapiens
  CDR3 for alpha chain variable domain of TCR clone 72714 (TRAV17, TRAJ6)
CATDLPSGGSCIPTF

SEQ ID NO: 145428 - protein, 16 aa, Homo sapiens
  CDR3 for beta chain variable domain of TCR clone 72714 (TRBV4-1, TRBJ2-7)
CASSQDPTGYSYEQYF

SEQ ID NO: 145429 - protein, 14 aa, Homo sapiens
  CDR3 for alpha chain variable domain of TCR clone 72715 (TRAV1-2, TRAJ8)
CAVREDTGFQKLVF

SEQ ID NO: 145430 - protein, 15 aa, Homo sapiens
  CDR3 for beta chain variable domain of TCR clone 72715 (TRBV5-1, TRBJ2-3)
CASGVTSGSTDTQYF

SEQ ID NO: 145431 - protein, 16 aa, Homo sapiens
  CDR3 for alpha chain variable domain of TCR clone 72716 (TRAV23/DV6, TRAJ9)
CAASIGGDTGGFKTTF

SEQ ID NO: 145432 - protein, 17 aa, Homo sapiens
  CDR3 for beta chain variable domain of TCR clone 72716 (TRBV13, TRBJ2-3)
CASSLSRVAGGRNTQYF

SEQ ID NO: 145433 - protein, 15 aa, Homo sapiens
  CDR3 for alpha chain variable domain of TCR clone 72717 (TRAV3, TRAJ3)
CAVRDGHSSASKILF

SEQ ID NO: 145434 - protein, 14 aa, Homo sapiens
  CDR3 for beta chain variable domain of TCR clone 72717 (TRBV28, TRBJ1-4)
CASSFGTFDEKLFF

SEQ ID NO: 145435 - protein, 14 aa, Homo sapiens
  CDR3 for alpha chain variable domain of TCR clone 72718 (TRAV26-1, TRAJ38)
CIADNAGNNRKLIW

SEQ ID NO: 145436 - protein, 17 aa, Homo sapiens
  CDR3 for beta chain variable domain of TCR clone 72718 (TRBV7-9, TRBJ2-3)
CASSPTVAGDLADTQYF

SEQ ID NO: 145437 - protein, 15 aa, Homo sapiens
  CDR3 for alpha chain variable domain of TCR clone 72719 (TRAV3, TRAJ23)
CAVRDRGNQGRKLIF

SEQ ID NO: 145438 - protein, 15 aa, Homo sapiens
  CDR3 for beta chain variable domain of TCR clone 72719 (TRBV7-3, TRBJ2-1)
CQQLAPSGSYNEQFF

SEQ ID NO: 145439 - protein, 13 aa, Homo sapiens
  CDR3 for alpha chain variable domain of TCR clone 72720 (TRAV12-2, TRAJ20)
CAVYPSNDYKLSF

SEQ ID NO: 145440 - protein, 15 aa, Homo sapiens
  CDR3 for beta chain variable domain of TCR clone 72720 (TRBV2, TRBJ1-2)
CASSEIGGANYGYTF

SEQ ID NO: 145441 - protein, 12 aa, Homo sapiens
  CDR3 for alpha chain variable domain of TCR clone 72721 (TRAV12-2, TRAJ7)
CAVMRGNNRLAF

SEQ ID NO: 145442 - protein, 17 aa, Homo sapiens
  CDR3 for beta chain variable domain of TCR clone 72721 (TRBV7-9, TRBJ2-3)
CASSPTVAGNLTDTQYF

SEQ ID NO: 145443 - protein, 14 aa, Homo sapiens
  CDR3 for alpha chain variable domain of TCR clone 72722 (TRAV3, TRAJ9)
CAARLNTGGFKTIF

SEQ ID NO: 145444 - protein, 15 aa, Homo sapiens
  CDR3 for beta chain variable domain of TCR clone 72722 (TRBV7-2, TRBJ2-1)
CASSLASGRVNEQFF

SEQ ID NO: 145445 - protein, 23 aa, Homo sapiens
  CDR3 for alpha chain variable domain of TCR clone 72723 (TRAV1-1, TRAJ11)
LLQELQMKDSASYFCAGYSTLTF

SEQ ID NO: 145446 - protein, 17 aa, Homo sapiens
  CDR3 for beta chain variable domain of TCR clone 72723 (TRBV7-8, TRBJ2-6)
CASSAGTGGAGANVLTF

SEQ ID NO: 145447 - protein, 13 aa, Homo sapiens
  CDR3 for alpha chain variable domain of TCR clone 72724 (TRAV17, TRAJ7)
CATDNYGNNRLAF

SEQ ID NO: 145448 - protein, 14 aa, Homo sapiens
  CDR3 for beta chain variable domain of TCR clone 72724 (TRBV7-2, TRBJ1-1)
CASSFLTGTTEAFF

SEQ ID NO: 145449 - protein, 19 aa, Homo sapiens
  CDR3 for alpha chain variable domain of TCR clone 72725 (TRAV21, TRAJ20)
SLVFQPPTSVLPNDYKLSF

SEQ ID NO: 145450 - protein, 14 aa, Homo sapiens
  CDR3 for beta chain variable domain of TCR clone 72725 (TRBV7-2, TRBJ1-3)
CASSRLRSGNTIYF

SEQ ID NO: 145451 - protein, 12 aa, Homo sapiens
  CDR3 for alpha chain variable domain of TCR clone 72726 (TRAV1-1, TRAJ8)
CAGGTGFQKLVF

SEQ ID NO: 145452 - protein, 13 aa, Homo sapiens
  CDR3 for beta chain variable domain of TCR clone 72726 (TRBV10-3, TRBJ2-7)
CASKLAVNYEQYF

SEQ ID NO: 145453 - protein, 15 aa, Homo sapiens
  CDR3 for alpha chain variable domain of TCR clone 72727 (TRAV35, TRAJ40)
CAGQLGTSGTYKYIF

SEQ ID NO: 145454 - protein, 13 aa, Homo sapiens
  CDR3 for beta chain variable domain of TCR clone 72727 (TRBV11-2, TRBJ2-1)
CASSLGLAGGRFF

SEQ ID NO: 145455 - protein, 12 aa, Homo sapiens
  CDR3 for alpha chain variable domain of TCR clone 72728 (TRAV8-3, TRAJ26)
CAGDNYGRNFVF

SEQ ID NO: 145456 - protein, 15 aa, Homo sapiens
  CDR3 for beta chain variable domain of TCR clone 72728 (TRBV9, TRBJ2-1)
CASSLAGSSYNEQFF

SEQ ID NO: 145457 - protein, 13 aa, Homo sapiens
  CDR3 for alpha chain variable domain of TCR clone 72729 (TRAV13-1, TRAJ21)
CAASIYNFNKFYF

SEQ ID NO: 145458 - protein, 16 aa, Homo sapiens
  CDR3 for beta chain variable domain of TCR clone 72729 (TRBV15, TRBJ1-2)
CATSRGPRTGGGGYTF

SEQ ID NO: 145459 - protein, 12 aa, Homo sapiens
  CDR3 for alpha chain variable domain of TCR clone 72730 (TRAV12-3, TRAJ17)
CAMTLTGNKLTF

SEQ ID NO: 145460 - protein, 14 aa, Homo sapiens
  CDR3 for beta chain variable domain of TCR clone 72730 (TRBV7-2, TRBJ2-7)
CASSLYPGRYEQYF

SEQ ID NO: 145461 - protein, 12 aa, Homo sapiens
  CDR3 for alpha chain variable domain of TCR clone 72731 (TRAV17, TRAJ30)
CVPERRDDKIIF

SEQ ID NO: 145462 - protein, 14 aa, Homo sapiens
  CDR3 for beta chain variable domain of TCR clone 72731 (TRBV7-7, TRBJ2-2)
CASSRERSTGELFF

SEQ ID NO: 145463 - protein, 14 aa, Homo sapiens
  CDR3 for alpha chain variable domain of TCR clone 72732 (TRAV8-4, TRAJ13)
CAVTLSGGYQKVTF

SEQ ID NO: 145464 - protein, 12 aa, Homo sapiens
  CDR3 for beta chain variable domain of TCR clone 72732 (TRBV11-2, TRBJ2-2)
CASSLGGGELFF

SEQ ID NO: 145465 - protein, 14 aa, Homo sapiens
  CDR3 for alpha chain variable domain of TCR clone 72733 (TRAV12-3, TRAJ35)
CAMSLIGFGNVLHC

SEQ ID NO: 145466 - protein, 12 aa, Homo sapiens
  CDR3 for beta chain variable domain of TCR clone 72733 (TRBV12-4, TRBJ1-1)
CASSLAGREAFF

SEQ ID NO: 145467 - protein, 13 aa, Homo sapiens
  CDR3 for alpha chain variable domain of TCR clone 72734 (TRAV27, TRAJ6)
CAGGTRGSYIPTF

SEQ ID NO: 145468 - protein, 14 aa, Homo sapiens
  CDR3 for beta chain variable domain of TCR clone 72734 (TRBV6-3, TRBJ1-1)
CASSYQRRGTEAFF

SEQ ID NO: 145469 - protein, 14 aa, Homo sapiens
  CDR3 for alpha chain variable domain of TCR clone 72735 (TRAV12-3, TRAJ10)
SHLPPTGGGNKLTF

SEQ ID NO: 145470 - protein, 15 aa, Homo sapiens
  CDR3 for beta chain variable domain of TCR clone 72735 (TRBV7-9, TRBJ1-4)
CASSRTGGFNEKLFF

SEQ ID NO: 145471 - protein, 17 aa, Homo sapiens
  CDR3 for alpha chain variable domain of TCR clone 72736 (TRAV16, TRAJ58)
CITVLPNGETSGSRLTF

SEQ ID NO: 145472 - protein, 17 aa, Homo sapiens
  CDR3 for beta chain variable domain of TCR clone 72736 (TRBV18, TRBJ2-1)
CASSKGLSGGADNEQFF

SEQ ID NO: 145473 - protein, 11 aa, Homo sapiens
  CDR3 for alpha chain variable domain of TCR clone 72737 (TRAV2, TRAJ4)
CAAGGYNKLIF

SEQ ID NO: 145474 - protein, 13 aa, Homo sapiens
  CDR3 for beta chain variable domain of TCR clone 72737 (TRBV6-1, TRBJ1-1)
CASSRQGNTEAFF

SEQ ID NO: 145475 - protein, 14 aa, Homo sapiens
  CDR3 for alpha chain variable domain of TCR clone 72738 (TRAV26-1, TRAJ39)
CIVRGSRAGNMLTF

SEQ ID NO: 145476 - protein, 15 aa, Homo sapiens
  CDR3 for beta chain variable domain of TCR clone 72738 (TRBV7-9, TRBJ1-5)
CASSQGHQPNPPQHF

SEQ ID NO: 145477 - protein, 18 aa, Homo sapiens
  CDR3 for alpha chain variable domain of TCR clone 72739 (TRAV21, TRAJ52)
CAVRPSPAGCTSYGKLTF

SEQ ID NO: 145478 - protein, 15 aa, Homo sapiens
  CDR3 for beta chain variable domain of TCR clone 72739 (TRBV7-9, TRBJ2-7)
CASSSSGLAVYEQYF

SEQ ID NO: 145479 - protein, 15 aa, Homo sapiens
  CDR3 for alpha chain variable domain of TCR clone 72740 (TRAV35, TRAJ41)
CAGQLFSNSGYALNF

SEQ ID NO: 145480 - protein, 14 aa, Homo sapiens
  CDR3 for beta chain variable domain of TCR clone 72740 (TRBV7-2, TRBJ1-2)
CASSRGGTNYGYAF

SEQ ID NO: 145481 - protein, 13 aa, Homo sapiens
  CDR3 for alpha chain variable domain of TCR clone 72741 (TRAV2, TRAJ15)
CAVASQAGTALIF

SEQ ID NO: 145482 - protein, 13 aa, Homo sapiens
  CDR3 for beta chain variable domain of TCR clone 72741 (TRBV15, TRBJ1-6)
CATSGGLNSPLHF

SEQ ID NO: 145483 - protein, 15 aa, Homo sapiens
  CDR3 for alpha chain variable domain of TCR clone 72742 (TRAV3, TRAJ5)
CAVRDLDTGRRALTF

SEQ ID NO: 145484 - protein, 17 aa, Homo sapiens
  CDR3 for beta chain variable domain of TCR clone 72742 (TRBV11-2, TRBJ2-1)
CASSLYPPGVEYNEQFF

SEQ ID NO: 145485 - protein, 15 aa, Homo sapiens
  CDR3 for alpha chain variable domain of TCR clone 72743 (TRAV38-1, TRAJ37)
CAFIFGSGNTGTLIF

SEQ ID NO: 145486 - protein, 16 aa, Homo sapiens
  CDR3 for beta chain variable domain of TCR clone 72743 (TRBV6-1, TRBJ2-3)
CASSEVIGQGTDTQYF

SEQ ID NO: 145487 - protein, 17 aa, Homo sapiens
  CDR3 for alpha chain variable domain of TCR clone 72744 (TRAV22, TRAJ53)
CAVEFSNSGGSNYKLTF

SEQ ID NO: 145488 - protein, 13 aa, Homo sapiens
  CDR3 for beta chain variable domain of TCR clone 72744 (TRBV9, TRBJ2-1)
CASSPSGGNEQFF

SEQ ID NO: 145489 - protein, 15 aa, Homo sapiens
  CDR3 for alpha chain variable domain of TCR clone 72745 (TRAV26-1, TRAJ29)
CIVRVEGSGNTPLVF

SEQ ID NO: 145490 - protein, 14 aa, Homo sapiens
  CDR3 for beta chain variable domain of TCR clone 72745 (TRBV20-1, TRBJ1-1)
CSAQTRIGGTEAFF

SEQ ID NO: 145491 - protein, 13 aa, Homo sapiens
  CDR3 for alpha chain variable domain of TCR clone 72746 (TRAV27, TRAJ6)
CAGGTRGSYIPTS

SEQ ID NO: 145492 - protein, 13 aa, Homo sapiens
  CDR3 for beta chain variable domain of TCR clone 72746 (TRBV4-1, TRBJ2-2)
CASSQENTGELFF

SEQ ID NO: 145493 - protein, 15 aa, Homo sapiens
  CDR3 for alpha chain variable domain of TCR clone 72747 (TRAV25, TRAJ52)
CAGRPGGTSYGKLTF

SEQ ID NO: 145494 - protein, 17 aa, Homo sapiens
  CDR3 for beta chain variable domain of TCR clone 72747 (TRBV7-8, TRBJ2-6)
CASSAGTGGAGANVRTF

SEQ ID NO: 145495 - protein, 14 aa, Homo sapiens
  CDR3 for alpha chain variable domain of TCR clone 72748 (TRAV16, TRAJ33)
CALSAMDSNYQLIW

SEQ ID NO: 145496 - protein, 15 aa, Homo sapiens
  CDR3 for beta chain variable domain of TCR clone 72748 (TRBV2, TRBJ2-1)
CASSEEREGDNEQFF

SEQ ID NO: 145497 - protein, 15 aa, Homo sapiens
  CDR3 for alpha chain variable domain of TCR clone 72749 (TRAV26-1, TRAJ29)
CIVRVEGSGNTPLVF

SEQ ID NO: 145498 - protein, 11 aa, Homo sapiens
  CDR3 for beta chain variable domain of TCR clone 72749 (TRBV7-8, TRBJ2-7)
CASSLSLEQYF

SEQ ID NO: 145499 - protein, 12 aa, Homo sapiens
  CDR3 for alpha chain variable domain of TCR clone 72750 (TRAV26-1, TRAJ36)
CIVRVRADNLFF

SEQ ID NO: 145500 - protein, 13 aa, Homo sapiens
  CDR3 for beta chain variable domain of TCR clone 72750 (TRBV11-2, TRBJ2-5)
CASSRGPSEAQYF

SEQ ID NO: 145501 - protein, 16 aa, Homo sapiens
  CDR3 for alpha chain variable domain of TCR clone 72751 (TRAV16, TRAJ52)
CALSAAGGTSYGKLTF

SEQ ID NO: 145502 - protein, 16 aa, Homo sapiens
  CDR3 for beta chain variable domain of TCR clone 72751 (TRBV12-4, TRBJ1-5)
CASSRPVGGSKQPQHF

SEQ ID NO: 145503 - protein, 12 aa, Homo sapiens
  CDR3 for alpha chain variable domain of TCR clone 72752 (TRAV17, TRAJ57)
CATDGGSEKLVF

SEQ ID NO: 145504 - protein, 13 aa, Homo sapiens
  CDR3 for beta chain variable domain of TCR clone 72752 (TRBV20-1, TRBJ1-1)
CSARGGGNTEAFF

SEQ ID NO: 145505 - protein, 14 aa, Homo sapiens
  CDR3 for alpha chain variable domain of TCR clone 72753 (TRAV13-2, TRAJ6)
CAERGSGGSYIPTF

SEQ ID NO: 145506 - protein, 12 aa, Homo sapiens
  CDR3 for beta chain variable domain of TCR clone 72753 (TRBV19, TRBJ1-5)
CASSIAQQPQHF

SEQ ID NO: 145507 - protein, 16 aa, Homo sapiens
  CDR3 for alpha chain variable domain of TCR clone 72754 (TRAV30, TRAJ24)
CGTEIVDADSWGKFQL

SEQ ID NO: 145508 - protein, 13 aa, Homo sapiens
  CDR3 for beta chain variable domain of TCR clone 72754 (TRBV7-2, TRBJ1-4)
CASSLAGLEKLFF

SEQ ID NO: 145509 - protein, 14 aa, Homo sapiens
  CDR3 for alpha chain variable domain of TCR clone 72755 (TRAV13-1, TRAJ15)
SAQQINQAGTALIF

SEQ ID NO: 145510 - protein, 14 aa, Homo sapiens
  CDR3 for beta chain variable domain of TCR clone 72755 (TRBV7-9, TRBJ2-1)
CASSDNSGYNEQFF

SEQ ID NO: 145511 - protein, 15 aa, Homo sapiens
  CDR3 for alpha chain variable domain of TCR clone 72756 (TRAV3, TRAJ20)
CDVRDIKLSDYKLSF

SEQ ID NO: 145512 - protein, 15 aa, Homo sapiens
  CDR3 for beta chain variable domain of TCR clone 72756 (TRBV7-9, TRBJ1-6)
CASSSPGRGNSPLHF

SEQ ID NO: 145513 - protein, 11 aa, Homo sapiens
  CDR3 for alpha chain variable domain of TCR clone 72757 (TRAV21, TRAJ9)
CAVPGGFKTIF

SEQ ID NO: 145514 - protein, 17 aa, Homo sapiens
  CDR3 for beta chain variable domain of TCR clone 72757 (TRBV7-9, TRBJ2-5)
CATSGGARDPVLRARRA

SEQ ID NO: 145515 - protein, 12 aa, Homo sapiens
  CDR3 for alpha chain variable domain of TCR clone 72758 (TRAV20, TRAJ39)
CAVGNAGNMLTF

SEQ ID NO: 145516 - protein, 16 aa, Homo sapiens
  CDR3 for beta chain variable domain of TCR clone 72758 (TRBV15, TRBJ1-2)
CATSRGPRTGGGGYSF

SEQ ID NO: 145517 - protein, 14 aa, Homo sapiens
  CDR3 for alpha chain variable domain of TCR clone 72759 (TRAV2, TRAJ37)
CAVDFTSNTGKLIF

SEQ ID NO: 145518 - protein, 15 aa, Homo sapiens
  CDR3 for beta chain variable domain of TCR clone 72759 (TRBV9, TRBJ1-6)
CASSVAGTGDSPLHF

SEQ ID NO: 145519 - protein, 12 aa, Homo sapiens
  CDR3 for alpha chain variable domain of TCR clone 72760 (TRAV13-2, TRAJ23)
CAERHRGGKLIF

SEQ ID NO: 145520 - protein, 16 aa, Homo sapiens
  CDR3 for beta chain variable domain of TCR clone 72760 (TRBV2, TRBJ2-1)
CASSVGGSLSYNEQFF

SEQ ID NO: 145521 - protein, 17 aa, Homo sapiens
  CDR3 for alpha chain variable domain of TCR clone 72761 (TRAV8-1, TRAJ43)
CAVTNDMRFGAGTRLTV

SEQ ID NO: 145522 - protein, 11 aa, Homo sapiens
  CDR3 for beta chain variable domain of TCR clone 72761 (TRBV12-4, TRBJ2-3)
CASTATDTQYF

SEQ ID NO: 145523 - protein, 12 aa, Homo sapiens
  CDR3 for alpha chain variable domain of TCR clone 72762 (TRAV13-2, TRAJ8)
CAPWLGFQKLVF

SEQ ID NO: 145524 - protein, 17 aa, Homo sapiens
  CDR3 for beta chain variable domain of TCR clone 72762 (TRBV11-2, TRBJ2-1)
CASSLYPPGVEYNEQFF

SEQ ID NO: 145525 - protein, 10 aa, Homo sapiens
  CDR3 for alpha chain variable domain of TCR clone 72763 (TRAV23/DV6, TRAJ10)
CAASRLLYSW

SEQ ID NO: 145526 - protein, 15 aa, Homo sapiens
  CDR3 for beta chain variable domain of TCR clone 72763 (TRBV20-1, TRBJ2-1)
CSAEGGLLAGDEQFF

SEQ ID NO: 145527 - protein, 11 aa, Homo sapiens
  CDR3 for alpha chain variable domain of TCR clone 72764 (TRAV17, TRAJ53)
CATGSNYKLTF

SEQ ID NO: 145528 - protein, 13 aa, Homo sapiens
  CDR3 for beta chain variable domain of TCR clone 72764 (TRBV7-9, TRBJ1-2)
CASSLKQNYGYTF

SEQ ID NO: 145529 - protein, 16 aa, Homo sapiens
  CDR3 for alpha chain variable domain of TCR clone 72765 (TRAV12-2, TRAJ6)
CAAPLAGSGESYIPTF

SEQ ID NO: 145530 - protein, 10 aa, Homo sapiens
  CDR3 for beta chain variable domain of TCR clone 72765 (TRBV28, TRBJ1-2)
CASSSDRAVF

SEQ ID NO: 145531 - protein, 20 aa, Homo sapiens
  CDR3 for alpha chain variable domain of TCR clone 72766 (TRAV1-2, TRAJ10)
CLLPLCCERVLTGGGNKLTF

SEQ ID NO: 145532 - protein, 12 aa, Homo sapiens
  CDR3 for beta chain variable domain of TCR clone 72766 (TRBV7-8, TRBJ2-7)
CASSLGDREQYF

SEQ ID NO: 145533 - protein, 12 aa, Homo sapiens
  CDR3 for alpha chain variable domain of TCR clone 72767 (TRAV16, TRAJ10)
CSRTGGGNKLTF

SEQ ID NO: 145534 - protein, 15 aa, Homo sapiens
  CDR3 for beta chain variable domain of TCR clone 72767 (TRBV27, TRBJ2-5)
CASSLYPRGGETQYF

SEQ ID NO: 145535 - protein, 13 aa, Homo sapiens
  CDR3 for alpha chain variable domain of TCR clone 72768 (TRAV1-2, TRAJ9)
CAALNTGGFQTIF

SEQ ID NO: 145536 - protein, 14 aa, Homo sapiens
  CDR3 for beta chain variable domain of TCR clone 72768 (TRBV13, TRBJ2-3)
CASSSGSPTDTQYF

SEQ ID NO: 145537 - protein, 14 aa, Homo sapiens
  CDR3 for alpha chain variable domain of TCR clone 72769 (TRAV23/DV6, TRAJ13)
CAAMYSGGYQKVTF

SEQ ID NO: 145538 - protein, 15 aa, Homo sapiens
  CDR3 for beta chain variable domain of TCR clone 72769 (TRBV9, TRBJ2-1)
CQQRPWGIGNNEQFF

SEQ ID NO: 145539 - protein, 11 aa, Homo sapiens
  CDR3 for alpha chain variable domain of TCR clone 72770 (TRAV1-2, TRAJ31)
CAVNNNARLMF

SEQ ID NO: 145540 - protein, 13 aa, Homo sapiens
  CDR3 for beta chain variable domain of TCR clone 72770 (TRBV19, TRBJ2-1)
CASSMYRVNEQFF

SEQ ID NO: 145541 - protein, 15 aa, Homo sapiens
  CDR3 for alpha chain variable domain of TCR clone 72771 (TRAV1-2, TRAJ16)
CAVRARFSDGQKLLF

SEQ ID NO: 145542 - protein, 19 aa, Homo sapiens
  CDR3 for beta chain variable domain of TCR clone 72771 (TRBV11-3, TRBJ2-3)
CASGFGTSGGPRGGGTRYF

SEQ ID NO: 145543 - protein, 13 aa, Homo sapiens
  CDR3 for alpha chain variable domain of TCR clone 72772 (TRAV12-2, TRAJ20)
CAVNRFDDYKLSF

SEQ ID NO: 145544 - protein, 13 aa, Homo sapiens
  CDR3 for beta chain variable domain of TCR clone 72772 (TRBV18, TRBJ1-1)
CASSGGRNTEDFF

SEQ ID NO: 145545 - protein, 14 aa, Homo sapiens
  CDR3 for alpha chain variable domain of TCR clone 72773 (TRAV12-2, TRAJ13)
CAVKKTGGYRKVTF

SEQ ID NO: 145546 - protein, 15 aa, Homo sapiens
  CDR3 for beta chain variable domain of TCR clone 72773 (TRBV12-4, TRBJ2-5)
CASSPPTGLQETQYF

SEQ ID NO: 145547 - protein, 18 aa, Homo sapiens
  CDR3 for alpha chain variable domain of TCR clone 72774 (TRAV21, TRAJ52)
CAVRPSPAGGTSYGKLTF

SEQ ID NO: 145548 - protein, 17 aa, Homo sapiens
  CDR3 for beta chain variable domain of TCR clone 72774 (TRBV13, TRBJ2-3)
CASSHSRVAGGRNTQYF

SEQ ID NO: 145549 - protein, 14 aa, Homo sapiens
  CDR3 for alpha chain variable domain of TCR clone 72775 (TRAV2, TRAJ9)
CAVEDRSGGFKTIF

SEQ ID NO: 145550 - protein, 12 aa, Homo sapiens
  CDR3 for beta chain variable domain of TCR clone 72775 (TRBV11-2, TRBJ2-7)
CASSPPADEQYF

SEQ ID NO: 145551 - protein, 13 aa, Homo sapiens
  CDR3 for alpha chain variable domain of TCR clone 72776 (TRAV1-2, TRAJ11)
CAVRREGYSTLTF

SEQ ID NO: 145552 - protein, 15 aa, Homo sapiens
  CDR3 for beta chain variable domain of TCR clone 72776 (TRBV20-1, TRBJ2-7)
CSAESGTSGAYEQYF

SEQ ID NO: 145553 - protein, 12 aa, Homo sapiens
  CDR3 for alpha chain variable domain of TCR clone 72777 (TRAV12-3, TRAJ5)
CAMDTGRRAPTF

SEQ ID NO: 145554 - protein, 13 aa, Homo sapiens
  CDR3 for beta chain variable domain of TCR clone 72777 (TRBV7-7, TRBJ2-2)
CASSLTSAGELFF

SEQ ID NO: 145555 - protein, 15 aa, Homo sapiens
  CDR3 for alpha chain variable domain of TCR clone 72778 (TRAV35, TRAJ23)
CSGPLGNNQGGKLIF

SEQ ID NO: 145556 - protein, 14 aa, Homo sapiens
  CDR3 for beta chain variable domain of TCR clone 72778 (TRBV7-9, TRBJ1-1)
CASTPLQSYTEAFF

SEQ ID NO: 145557 - protein, 14 aa, Homo sapiens
  CDR3 for alpha chain variable domain of TCR clone 72779 (TRAV26-1, TRAJ21)
CIVRVVYNFNKFYF

SEQ ID NO: 145558 - protein, 17 aa, Homo sapiens
  CDR3 for beta chain variable domain of TCR clone 72779 (TRBV11-3, TRBJ2-1)
CASSLYPPGVEYNEQFF

SEQ ID NO: 145559 - protein, 15 aa, Homo sapiens
  CDR3 for alpha chain variable domain of TCR clone 72780 (TRAV3, TRAJ4)
CAVRDGTGGYNKLIF

SEQ ID NO: 145560 - protein, 15 aa, Homo sapiens
  CDR3 for beta chain variable domain of TCR clone 72780 (TRBV28, TRBJ2-7)
CASSPGGRGFYEQYF

SEQ ID NO: 145561 - protein, 16 aa, Homo sapiens
  CDR3 for alpha chain variable domain of TCR clone 72781 (TRAV4, TRAJ9)
RLVGDPNRPGGFKTIF

SEQ ID NO: 145562 - protein, 16 aa, Homo sapiens
  CDR3 for beta chain variable domain of TCR clone 72781 (TRBV28, TRBJ1-4)
CASSPPYRGRSEKLFF

SEQ ID NO: 145563 - protein, 12 aa, Homo sapiens
  CDR3 for alpha chain variable domain of TCR clone 72782 (TRAV12-3, TRAJ17)
CAMTLTGNKLTF

SEQ ID NO: 145564 - protein, 20 aa, Homo sapiens
  CDR3 for beta chain variable domain of TCR clone 72782 (TRBV7-8, TRBJ2-2)
CASSHLFPGPTIYITGELFF

SEQ ID NO: 145565 - protein, 13 aa, Homo sapiens
  CDR3 for alpha chain variable domain of TCR clone 72783 (TRAV2, TRAJ40)
CAVVTSGTYKYIF

SEQ ID NO: 145566 - protein, 15 aa, Homo sapiens
  CDR3 for beta chain variable domain of TCR clone 72783 (TRBV7-3, TRBJ2-2)
RASSETGQGTGELFF

SEQ ID NO: 145567 - protein, 13 aa, Homo sapiens
  CDR3 for alpha chain variable domain of TCR clone 72784 (TRAV17, TRAJ22)
CAHHSGSSRQLTF

SEQ ID NO: 145568 - protein, 13 aa, Homo sapiens
  CDR3 for beta chain variable domain of TCR clone 72784 (TRBV27, TRBJ1-4)
CASSLMGDEKLFF

SEQ ID NO: 145569 - protein, 15 aa, Homo sapiens
  CDR3 for alpha chain variable domain of TCR clone 72785 (TRAV26-2, TRAJ39)
CSLRGNNNAGNMLTF

SEQ ID NO: 145570 - protein, 15 aa, Homo sapiens
  CDR3 for beta chain variable domain of TCR clone 72785 (TRBV5-4, TRBJ1-1)
CASSFLGWANTEAFF

SEQ ID NO: 145571 - protein, 13 aa, Homo sapiens
  CDR3 for alpha chain variable domain of TCR clone 72786 (TRAV2, TRAJ15)
CAVASQAGTALIF

SEQ ID NO: 145572 - protein, 16 aa, Homo sapiens
  CDR3 for beta chain variable domain of TCR clone 72786 (TRBV5-1, TRBJ1-1)
CASSAGGNSLNTEAFF

SEQ ID NO: 145573 - protein, 13 aa, Homo sapiens
  CDR3 for alpha chain variable domain of TCR clone 72787 (TRAV26-2, TRAJ43)
CILRAVHNNDMRF

SEQ ID NO: 145574 - protein, 15 aa, Homo sapiens
  CDR3 for beta chain variable domain of TCR clone 72787 (TRBV7-2, TRBJ2-1)
CASTHGTGIYNEQFF

SEQ ID NO: 145575 - protein, 13 aa, Homo sapiens
  CDR3 for alpha chain variable domain of TCR clone 72788 (TRAV8-3, TRAJ48)
CAVVPFGDEKLTF

SEQ ID NO: 145576 - protein, 14 aa, Homo sapiens
  CDR3 for beta chain variable domain of TCR clone 72788 (TRBV18, TRBJ2-7)
CASSPRGGAYEQYF

SEQ ID NO: 145577 - protein, 13 aa, Homo sapiens
  CDR3 for alpha chain variable domain of TCR clone 72789 (TRAV12-2, TRAJ20)
CAVYPSNDYKLSF

SEQ ID NO: 145578 - protein, 15 aa, Homo sapiens
  CDR3 for beta chain variable domain of TCR clone 72789 (TRBV7-9, TRBJ1-6)
CASSSPGRGNSPLHF

SEQ ID NO: 145579 - protein, 12 aa, Homo sapiens
  CDR3 for alpha chain variable domain of TCR clone 72790 (TRAV16, TRAJ10)
CSRTGGGNKPTF

SEQ ID NO: 145580 - protein, 19 aa, Homo sapiens
  CDR3 for beta chain variable domain of TCR clone 72790 (TRBV25-1, TRBJ2-2)
CAILVYRVDRGRKTGELFF

SEQ ID NO: 145581 - protein, 11 aa, Homo sapiens
  CDR3 for alpha chain variable domain of TCR clone 72791 (TRAV12-1, TRAJ15)
CVVNAGTALIF

SEQ ID NO: 145582 - protein, 12 aa, Homo sapiens
  CDR3 for beta chain variable domain of TCR clone 72791 (TRBV5-7, TRBJ1-1)
CASSLGRGKAFF

SEQ ID NO: 145583 - protein, 15 aa, Homo sapiens
  CDR3 for alpha chain variable domain of TCR clone 72792 (TRAV26-1, TRAJ29)
CIVRVEGSGNTPLVF

SEQ ID NO: 145584 - protein, 14 aa, Homo sapiens
  CDR3 for beta chain variable domain of TCR clone 72792 (TRBV11-2, TRBJ2-5)
CASSRTGGIETQYF

SEQ ID NO: 145585 - protein, 14 aa, Homo sapiens
  CDR3 for alpha chain variable domain of TCR clone 72793 (TRAV13-2, TRAJ22)
CADGTLGSARQLTF

SEQ ID NO: 145586 - protein, 16 aa, Homo sapiens
  CDR3 for beta chain variable domain of TCR clone 72793 (TRBV19, TRBJ2-1)
CASSSKGTSSYNEQFF

SEQ ID NO: 145587 - protein, 12 aa, Homo sapiens
  CDR3 for alpha chain variable domain of TCR clone 72794 (TRAV36/DV7, TRAJ50)
CAVEPESLLRQG

SEQ ID NO: 145588 - protein, 13 aa, Homo sapiens
  CDR3 for beta chain variable domain of TCR clone 72794 (TRBV7-2, TRBJ2-7)
CASSSPSGSEQYF

SEQ ID NO: 145589 - protein, 12 aa, Homo sapiens
  CDR3 for alpha chain variable domain of TCR clone 72795 (TRAV12-3, TRAJ4)
CAMTGAGTRLAV

SEQ ID NO: 145590 - protein, 14 aa, Homo sapiens
  CDR3 for beta chain variable domain of TCR clone 72795 (TRBV10-3, TRBJ1-1)
CAISDTDRGVEALF

SEQ ID NO: 145591 - protein, 14 aa, Homo sapiens
  CDR3 for alpha chain variable domain of TCR clone 72796 (TRAV23/DV6, TRAJ8)
CAASKATGFQKIVF

SEQ ID NO: 145592 - protein, 15 aa, Homo sapiens
  CDR3 for beta chain variable domain of TCR clone 72796 (TRBV28, TRBJ2-3)
CASSPDRQGANTQYF

SEQ ID NO: 145593 - protein, 12 aa, Homo sapiens
  CDR3 for alpha chain variable domain of TCR clone 72797 (TRAV2, TRAJ31)
CAVEDNNARLMF

SEQ ID NO: 145594 - protein, 14 aa, Homo sapiens
  CDR3 for beta chain variable domain of TCR clone 72797 (TRBV18, TRBJ2-5)
CASSPGVSQETQYF

SEQ ID NO: 145595 - protein, 20 aa, Homo sapiens
  CDR3 for alpha chain variable domain of TCR clone 72798 (TRAV25, TRAJ21)
TATQTTDVGTYPLSFNKFYF

SEQ ID NO: 145596 - protein, 15 aa, Homo sapiens
  CDR3 for beta chain variable domain of TCR clone 72798 (TRBV10-2, TRBJ2-6)
CASSEQGTGANVLTF

SEQ ID NO: 145597 - protein, 17 aa, Homo sapiens
  CDR3 for alpha chain variable domain of TCR clone 72799 (TRAV3, TRAJ6)
CAVRDGPRAGGSYIPTF

SEQ ID NO: 145598 - protein, 16 aa, Homo sapiens
  CDR3 for beta chain variable domain of TCR clone 72799 (TRBV20-1, TRBJ1-1)
CSARALTQGMNTEAFF

SEQ ID NO: 145599 - protein, 10 aa, Homo sapiens
  CDR3 for alpha chain variable domain of TCR clone 72800 (TRAV36/DV7, TRAJ48)
CAVGNEKLTF

SEQ ID NO: 145600 - protein, 13 aa, Homo sapiens
  CDR3 for beta chain variable domain of TCR clone 72800 (TRBV14, TRBJ2-7)
CASSQDRRYEQYF

SEQ ID NO: 145601 - protein, 14 aa, Homo sapiens
  CDR3 for alpha chain variable domain of TCR clone 72801 (TRAV9-2, TRAJ39)
CALYIYNAGNMLTF

SEQ ID NO: 145602 - protein, 16 aa, Homo sapiens
  CDR3 for beta chain variable domain of TCR clone 72801 (TRBV4-1, TRBJ1-2)
CASSQDAGQVLYGYTF

SEQ ID NO: 145603 - protein, 14 aa, Homo sapiens
  CDR3 for alpha chain variable domain of TCR clone 72802 (TRAV1-2, TRAJ16)
CAVNRSSDGQKLLF

SEQ ID NO: 145604 - protein, 15 aa, Homo sapiens
  CDR3 for beta chain variable domain of TCR clone 72802 (TRBV7-8, TRBJ2-1)
CASSLHGGPYNEQFF

SEQ ID NO: 145605 - protein, 13 aa, Homo sapiens
  CDR3 for alpha chain variable domain of TCR clone 72803 (TRAV13-2, TRAJ48)
CADMDFGNEKLTF

SEQ ID NO: 145606 - protein, 12 aa, Homo sapiens
  CDR3 for beta chain variable domain of TCR clone 72803 (TRBV11-2, TRBJ2-2)
CASSLGGGELFF

SEQ ID NO: 145607 - protein, 13 aa, Homo sapiens
  CDR3 for alpha chain variable domain of TCR clone 72804 (TRAV1-2, TRAJ9)
CAALSTGGFKTIF

SEQ ID NO: 145608 - protein, 14 aa, Homo sapiens
  CDR3 for beta chain variable domain of TCR clone 72804 (TRBV13, TRBJ2-5)
CASSLERVGETQYF

SEQ ID NO: 145609 - protein, 14 aa, Homo sapiens
  CDR3 for alpha chain variable domain of TCR clone 72805 (TRAV2, TRAJ39)
CAVEGDNASNMLTF

SEQ ID NO: 145610 - protein, 14 aa, Homo sapiens
  CDR3 for beta chain variable domain of TCR clone 72805 (TRBV28, TRBJ2-7)
CASSLRARGNEQYF

SEQ ID NO: 145611 - protein, 14 aa, Homo sapiens
  CDR3 for alpha chain variable domain of TCR clone 72806 (TRAV26-1, TRAJ49)
CIVRPSNTGNQVYF

SEQ ID NO: 145612 - protein, 15 aa, Homo sapiens
  CDR3 for beta chain variable domain of TCR clone 72806 (TRBV19, TRBJ1-1)
CASMGFRDVNTEAFF

SEQ ID NO: 145613 - protein, 14 aa, Homo sapiens
  CDR3 for alpha chain variable domain of TCR clone 72807 (TRAV12-3, TRAJ56)
CAMSVTGANSKLTF

SEQ ID NO: 145614 - protein, 13 aa, Homo sapiens
  CDR3 for beta chain variable domain of TCR clone 72807 (TRBV7-9, TRBJ1-2)
CASSLKQNYGYTF

SEQ ID NO: 145615 - protein, 15 aa, Homo sapiens
  CDR3 for alpha chain variable domain of TCR clone 72808 (TRAV17, TRAJ57)
CATGPSQGGSEKLVF

SEQ ID NO: 145616 - protein, 13 aa, Homo sapiens
  CDR3 for beta chain variable domain of TCR clone 72808 (TRBV12-4, TRBJ1-2)
CASSLRQGKGYTF

SEQ ID NO: 145617 - protein, 14 aa, Homo sapiens
  CDR3 for alpha chain variable domain of TCR clone 72809 (TRAV8-4, TRAJ16)
CAVSPVGRWPEAAL

SEQ ID NO: 145618 - protein, 15 aa, Homo sapiens
  CDR3 for beta chain variable domain of TCR clone 72809 (TRBV7-3, TRBJ1-6)
CASSLGRGAGSPLHI

SEQ ID NO: 145619 - protein, 16 aa, Homo sapiens
  CDR3 for alpha chain variable domain of TCR clone 72810 (TRAV27, TRAJ52)
CAGAPAGGTSYGQLTF

SEQ ID NO: 145620 - protein, 12 aa, Homo sapiens
  CDR3 for beta chain variable domain of TCR clone 72810 (TRBV27, TRBJ2-1)
CASRGFYNEQFF

SEQ ID NO: 145621 - protein, 16 aa, Homo sapiens
  CDR3 for alpha chain variable domain of TCR clone 72811 (TRAV30, TRAJ24)
CGTEIVDADSWGKFQF

SEQ ID NO: 145622 - protein, 16 aa, Homo sapiens
  CDR3 for beta chain variable domain of TCR clone 72811 (TRBV19, TRBJ1-2)
CASSIGSNRDGYGYTF

SEQ ID NO: 145623 - protein, 14 aa, Homo sapiens
  CDR3 for alpha chain variable domain of TCR clone 72812 (TRAV8-3, TRAJ30)
CAVGEVNRDDKIIF

SEQ ID NO: 145624 - protein, 13 aa, Homo sapiens
  CDR3 for beta chain variable domain of TCR clone 72812 (TRBV7-9, TRBJ1-2)
CASSLKQNYGYTF

SEQ ID NO: 145625 - protein, 14 aa, Homo sapiens
  CDR3 for alpha chain variable domain of TCR clone 72813 (TRAV12-3, TRAJ56)
CAMSVTGANSKLKF

SEQ ID NO: 145626 - protein, 17 aa, Homo sapiens
  CDR3 for beta chain variable domain of TCR clone 72813 (TRBV20-1, TRBJ2-3)
CSASLLGRGGSADTQYF

SEQ ID NO: 145627 - protein, 12 aa, Homo sapiens
  CDR3 for alpha chain variable domain of TCR clone 72814 (TRAV2, TRAJ9)
CAVGAGGFKTIF

SEQ ID NO: 145628 - protein, 14 aa, Homo sapiens
  CDR3 for beta chain variable domain of TCR clone 72814 (TRBV7-6, TRBJ2-3)
CASSLGTVTDTQYF

SEQ ID NO: 145629 - protein, 12 aa, Homo sapiens
  CDR3 for alpha chain variable domain of TCR clone 72815 (TRAV21, TRAJ33)
CAKMDCNYQLIW

SEQ ID NO: 145630 - protein, 15 aa, Homo sapiens
  CDR3 for beta chain variable domain of TCR clone 72815 (TRBV12-4, TRBJ2-5)
CASSPPTGLQETQYF

SEQ ID NO: 145631 - protein, 16 aa, Homo sapiens
  CDR3 for alpha chain variable domain of TCR clone 72816 (TRAV17, TRAJ22)
CATGPISSGSAGQLTF

SEQ ID NO: 145632 - protein, 13 aa, Homo sapiens
  CDR3 for beta chain variable domain of TCR clone 72816 (TRBV11-2, TRBJ2-1)
CASSLGLAGGRFF

SEQ ID NO: 145633 - protein, 14 aa, Homo sapiens
  CDR3 for alpha chain variable domain of TCR clone 72817 (TRAV12-2, TRAJ4)
CAVSSSGGYNKLIF

SEQ ID NO: 145634 - protein, 12 aa, Homo sapiens
  CDR3 for beta chain variable domain of TCR clone 72817 (TRBV5-4, TRBJ2-5)
CASSSTRETQYF

SEQ ID NO: 145635 - protein, 11 aa, Homo sapiens
  CDR3 for alpha chain variable domain of TCR clone 72818 (TRAV2, TRAJ33)
CAVESNYQLIW

SEQ ID NO: 145636 - protein, 16 aa, Homo sapiens
  CDR3 for beta chain variable domain of TCR clone 72818 (TRBV11-2, TRBJ2-7)
CASSPTTGGVSYEQYF

SEQ ID NO: 145637 - protein, 14 aa, Homo sapiens
  CDR3 for alpha chain variable domain of TCR clone 72819 (TRAV12-2, TRAJ33)
CAVERARSNYQLTW

SEQ ID NO: 145638 - protein, 15 aa, Homo sapiens
  CDR3 for beta chain variable domain of TCR clone 72819 (TRBV20-1, TRBJ2-7)
CSARDRVSGMDEQYF

SEQ ID NO: 145639 - protein, 15 aa, Homo sapiens
  CDR3 for alpha chain variable domain of TCR clone 72820 (TRAV8-1, TRAJ6)
CAVNTPPGGSYVPTF

SEQ ID NO: 145640 - protein, 14 aa, Homo sapiens
  CDR3 for beta chain variable domain of TCR clone 72820 (TRBV12-4, TRBJ2-1)
CASSLGQGASEQFF

SEQ ID NO: 145641 - protein, 15 aa, Homo sapiens
  CDR3 for alpha chain variable domain of TCR clone 72821 (TRAV17, TRAJ56)
CATKPFTGANSKLTF

SEQ ID NO: 145642 - protein, 15 aa, Homo sapiens
  CDR3 for beta chain variable domain of TCR clone 72821 (TRBV28, TRBJ1-5)
CASSRTGGYVQPQHF

SEQ ID NO: 145643 - protein, 13 aa, Homo sapiens
  CDR3 for alpha chain variable domain of TCR clone 72822 (TRAV13-2, TRAJ53)
CAANMGSNYKLTF

SEQ ID NO: 145644 - protein, 13 aa, Homo sapiens
  CDR3 for beta chain variable domain of TCR clone 72822 (TRBV4-1, TRBJ2-2)
CASSQENTGELFF

SEQ ID NO: 145645 - protein, 12 aa, Homo sapiens
  CDR3 for alpha chain variable domain of TCR clone 72823 (TRAV23/DV6, TRAJ30)
CAASKGDDKIIF

SEQ ID NO: 145646 - protein, 15 aa, Homo sapiens
  CDR3 for beta chain variable domain of TCR clone 72823 (TRBV9, TRBJ2-1)
CASSLAGSSYNEQFF

SEQ ID NO: 145647 - protein, 15 aa, Homo sapiens
  CDR3 for alpha chain variable domain of TCR clone 72824 (TRAV2, TRAJ15)
CAVEDRGQAGTALIF

SEQ ID NO: 145648 - protein, 13 aa, Homo sapiens
  CDR3 for beta chain variable domain of TCR clone 72824 (TRBV10-2, TRBJ2-7)
CASGASGGYDQYF

SEQ ID NO: 145649 - protein, 13 aa, Homo sapiens
  CDR3 for alpha chain variable domain of TCR clone 72825 (TRAV2, TRAJ40)
CAVVTSGTYKYIF

SEQ ID NO: 145650 - protein, 15 aa, Homo sapiens
  CDR3 for beta chain variable domain of TCR clone 72825 (TRBV18, TRBJ2-1)
CASSPPRASYNEQFF

SEQ ID NO: 145651 - protein, 11 aa, Homo sapiens
  CDR3 for alpha chain variable domain of TCR clone 72826 (TRAV17, TRAJ21)
CATGNFNKFYI

SEQ ID NO: 145652 - protein, 16 aa, Homo sapiens
  CDR3 for beta chain variable domain of TCR clone 72826 (TRBV2, TRBJ2-1)
CASSANPRDWQAEQFF

SEQ ID NO: 145653 - protein, 14 aa, Homo sapiens
  CDR3 for alpha chain variable domain of TCR clone 72827 (TRAV30, TRAJ26)
CGTEIVSYGQNFVF

SEQ ID NO: 145654 - protein, 13 aa, Homo sapiens
  CDR3 for beta chain variable domain of TCR clone 72827 (TRBV19, TRBJ1-3)
CASRLALGNTIYF

SEQ ID NO: 145655 - protein, 19 aa, Homo sapiens
  CDR3 for alpha chain variable domain of TCR clone 72828 (TRAV26-1, TRAJ52)
CIVRAHRNAGGTSYGKLTF

SEQ ID NO: 145656 - protein, 14 aa, Homo sapiens
  CDR3 for beta chain variable domain of TCR clone 72828 (TRBV18, TRBJ2-7)
CASSPTSGGYEQYF

SEQ ID NO: 145657 - protein, 16 aa, Homo sapiens
  CDR3 for alpha chain variable domain of TCR clone 72829 (TRAV27, TRAJ52)
CAEAPAGGTSYGKLTF

SEQ ID NO: 145658 - protein, 12 aa, Homo sapiens
  CDR3 for beta chain variable domain of TCR clone 72829 (TRBV27, TRBJ2-1)
CASRGFYNEQFF

SEQ ID NO: 145659 - protein, 12 aa, Homo sapiens
  CDR3 for alpha chain variable domain of TCR clone 72830 (TRAV4, TRAJ26)
CLVGDSGQNFVF

SEQ ID NO: 145660 - protein, 16 aa, Homo sapiens
  CDR3 for beta chain variable domain of TCR clone 72830 (TRBV7-2, TRBJ1-2)
CASSSNQDRRGHGYTF

SEQ ID NO: 145661 - protein, 13 aa, Homo sapiens
  CDR3 for alpha chain variable domain of TCR clone 72831 (TRAV23/DV6, TRAJ34)
CAAIENNTDKLIF

SEQ ID NO: 145662 - protein, 14 aa, Homo sapiens
  CDR3 for beta chain variable domain of TCR clone 72831 (TRBV19, TRBJ2-2)
CASTVTANTGELFF

SEQ ID NO: 145663 - protein, 14 aa, Homo sapiens
  CDR3 for alpha chain variable domain of TCR clone 72832 (TRAV13-2, TRAJ17)
CAENSKAAGNKLTF

SEQ ID NO: 145664 - protein, 13 aa, Homo sapiens
  CDR3 for beta chain variable domain of TCR clone 72832 (TRBV10-3, TRBJ1-2)
CAISERDSYGYTF

SEQ ID NO: 145665 - protein, 16 aa, Homo sapiens
  CDR3 for alpha chain variable domain of TCR clone 72833 (TRAV38-1, TRAJ12)
CAFMKHARDSSYKLIF

SEQ ID NO: 145666 - protein, 12 aa, Homo sapiens
  CDR3 for beta chain variable domain of TCR clone 72833 (TRBV7-8, TRBJ2-7)
CASSLGDREQYF

SEQ ID NO: 145667 - protein, 14 aa, Homo sapiens
  CDR3 for alpha chain variable domain of TCR clone 72834 (TRAV12-3, TRAJ10)
SHLPLTGGGNKLTF

SEQ ID NO: 145668 - protein, 14 aa, Homo sapiens
  CDR3 for beta chain variable domain of TCR clone 72834 (TRBV7-9, TRBJ2-4)
CASSLAMGGNIQYF

SEQ ID NO: 145669 - protein, 16 aa, Homo sapiens
  CDR3 for alpha chain variable domain of TCR clone 72835 (TRAV3, TRAJ10)
CAVRDMRAGGENKLTF

SEQ ID NO: 145670 - protein, 14 aa, Homo sapiens
  CDR3 for beta chain variable domain of TCR clone 72835 (TRBV25-1, TRBJ1-1)
CASTHLGGNTEAFF

SEQ ID NO: 145671 - protein, 14 aa, Homo sapiens
  CDR3 for alpha chain variable domain of TCR clone 72836 (TRAV13-1, TRAJ6)
CAASITGGSYIPTF

SEQ ID NO: 145672 - protein, 14 aa, Homo sapiens
  CDR3 for beta chain variable domain of TCR clone 72836 (TRBV6-3, TRBJ2-1)
CASLHSAYYIEQFF

SEQ ID NO: 145673 - protein, 14 aa, Homo sapiens
  CDR3 for alpha chain variable domain of TCR clone 72837 (TRAV21, TRAJ35)
CAVMPIGFGNVLHC

SEQ ID NO: 145674 - protein, 16 aa, Homo sapiens
  CDR3 for beta chain variable domain of TCR clone 72837 (TRBV7-9, TRBJ2-1)
CASSPRLGSSYNEQFF

SEQ ID NO: 145675 - protein, 11 aa, Homo sapiens
  CDR3 for alpha chain variable domain of TCR clone 72838 (TRAV1-2, TRAJ20)
CAVANDYKLSF

SEQ ID NO: 145676 - protein, 13 aa, Homo sapiens
  CDR3 for beta chain variable domain of TCR clone 72838 (TRBV12-4, TRBJ1-1)
CASSPGTGFEAFF

SEQ ID NO: 145677 - protein, 15 aa, Homo sapiens
  CDR3 for alpha chain variable domain of TCR clone 72839 (TRAV8-1, TRAJ23)
CAVNSHYNQGGKLIF

SEQ ID NO: 145678 - protein, 16 aa, Homo sapiens
  CDR3 for beta chain variable domain of TCR clone 72839 (TRBV11-2, TRBJ1-1)
CASSLRQGGEHSKAFF

SEQ ID NO: 145679 - protein, 13 aa, Homo sapiens
  CDR3 for alpha chain variable domain of TCR clone 72840 (TRAV26-1, TRAJ34)
CIVRPWITDKLIF

SEQ ID NO: 145680 - protein, 14 aa, Homo sapiens
  CDR3 for beta chain variable domain of TCR clone 72840 (TRBV7-2, TRBJ2-7)
CASSSQGAAYEQYF

SEQ ID NO: 145681 - protein, 14 aa, Homo sapiens
  CDR3 for alpha chain variable domain of TCR clone 72841 (TRAV12-2, TRAJ24)
CAVTPADSWGKLQF

SEQ ID NO: 145682 - protein, 12 aa, Homo sapiens
  CDR3 for beta chain variable domain of TCR clone 72841 (TRBV11-2, TRBJ2-2)
CASSLGGGELFF

SEQ ID NO: 145683 - protein, 13 aa, Homo sapiens
  CDR3 for alpha chain variable domain of TCR clone 72842 (TRAV8-3, TRAJ43)
CAVVPYNNNDMRF

SEQ ID NO: 145684 - protein, 17 aa, Homo sapiens
  CDR3 for beta chain variable domain of TCR clone 72842 (TRBV7-7, TRBJ1-1)
CASIGDRPNLGATEAFF

SEQ ID NO: 145685 - protein, 12 aa, Homo sapiens
  CDR3 for alpha chain variable domain of TCR clone 72843 (TRAV12-2, TRAJ20)
CAVNRNDYKPSF

SEQ ID NO: 145686 - protein, 14 aa, Homo sapiens
  CDR3 for beta chain variable domain of TCR clone 72843 (TRBV7-3, TRBJ2-1)
CASSLAGGTNEQFF

SEQ ID NO: 145687 - protein, 13 aa, Homo sapiens
  CDR3 for alpha chain variable domain of TCR clone 72844 (TRAV20, TRAJ54)
CAVQAGGAQKLVF

SEQ ID NO: 145688 - protein, 14 aa, Homo sapiens
  CDR3 for beta chain variable domain of TCR clone 72844 (TRBV20-1, TRBJ2-7)
CSAKTGTWGYEQYF

SEQ ID NO: 145689 - protein, 14 aa, Homo sapiens
  CDR3 for alpha chain variable domain of TCR clone 72845 (TRAV26-1, TRAJ34)
CTVRVAYNTDKLIF

SEQ ID NO: 145690 - protein, 15 aa, Homo sapiens
  CDR3 for beta chain variable domain of TCR clone 72845 (TRBV20-1, TRBJ2-7)
CSARVPAAYFYEQYF

SEQ ID NO: 145691 - protein, 11 aa, Homo sapiens
  CDR3 for alpha chain variable domain of TCR clone 72846 (TRAV8-3, TRAJ15)
CAVGPGTALIF

SEQ ID NO: 145692 - protein, 18 aa, Homo sapiens
  CDR3 for beta chain variable domain of TCR clone 72846 (TRBV18, TRBJ2-3)
CASSCTSGAAGGTDTQYF

SEQ ID NO: 145693 - protein, 14 aa, Homo sapiens
  CDR3 for alpha chain variable domain of TCR clone 72847 (TRAV3, TRAJ21)
CAVRDAYNFNKFYF

SEQ ID NO: 145694 - protein, 17 aa, Homo sapiens
  CDR3 for beta chain variable domain of TCR clone 72847 (TRBV20-1, TRBJ1-6)
CSARGGYTSSYNSPLHF

SEQ ID NO: 145695 - protein, 13 aa, Homo sapiens
  CDR3 for alpha chain variable domain of TCR clone 72848 (TRAV17, TRAJ5)
CAPMDTGRRALTF

SEQ ID NO: 145696 - protein, 13 aa, Homo sapiens
  CDR3 for beta chain variable domain of TCR clone 72848 (TRBV7-9, TRBJ1-2)
RASSLKQNYGYTF

SEQ ID NO: 145697 - protein, 13 aa, Homo sapiens
  CDR3 for alpha chain variable domain of TCR clone 72849 (TRAV2, TRAJ27)
CAVEAPMQANQPL

SEQ ID NO: 145698 - protein, 12 aa, Homo sapiens
  CDR3 for beta chain variable domain of TCR clone 72849 (TRBV11-2, TRBJ2-2)
CASSLGGGELFF

SEQ ID NO: 145699 - protein, 16 aa, Homo sapiens
  CDR3 for alpha chain variable domain of TCR clone 72850 (TRAV23/DV6, TRAJ9)
CAASIGGNTGGFKTIF

SEQ ID NO: 145700 - protein, 13 aa, Homo sapiens
  CDR3 for beta chain variable domain of TCR clone 72850 (TRBV19, TRBJ2-7)
CASSIDRTYEQYF

SEQ ID NO: 145701 - protein, 18 aa, Homo sapiens
  CDR3 for alpha chain variable domain of TCR clone 72851 (TRAV1-1, TRAJ42)
CAVSPSAFYGGSQGNLIF

SEQ ID NO: 145702 - protein, 14 aa, Homo sapiens
  CDR3 for beta chain variable domain of TCR clone 72851 (TRBV6-3, TRBJ2-7)
CASSYSTGGDDQYF

SEQ ID NO: 145703 - protein, 13 aa, Homo sapiens
  CDR3 for alpha chain variable domain of TCR clone 72852 (TRAV12-1, TRAJ34)
CVMTGYNTDKLIF

SEQ ID NO: 145704 - protein, 13 aa, Homo sapiens
  CDR3 for beta chain variable domain of TCR clone 72852 (TRBV28, TRBJ2-7)
CASKAGGVYEQYF

SEQ ID NO: 145705 - protein, 18 aa, Homo sapiens
  CDR3 for alpha chain variable domain of TCR clone 72853 (TRAV26-2, TRAJ54)
CILRDVEVGIQGAQKLVF

SEQ ID NO: 145706 - protein, 14 aa, Homo sapiens
  CDR3 for beta chain variable domain of TCR clone 72853 (TRBV20-1, TRBJ1-1)
CSAQTRIGGTEAFF

SEQ ID NO: 145707 - protein, 17 aa, Homo sapiens
  CDR3 for alpha chain variable domain of TCR clone 72854 (TRAV8-6, TRAJ8)
CAVKEGIENTGFQKLVF

SEQ ID NO: 145708 - protein, 10 aa, Homo sapiens
  CDR3 for beta chain variable domain of TCR clone 72854 (TRBV23-1, TRBJ2-7)
NDSTSYEQYF

SEQ ID NO: 145709 - protein, 15 aa, Homo sapiens
  CDR3 for alpha chain variable domain of TCR clone 72855 (TRAV17, TRAJ54)
CATEKLGQGAQKLVF

SEQ ID NO: 145710 - protein, 15 aa, Homo sapiens
  CDR3 for beta chain variable domain of TCR clone 72855 (TRBV7-2, TRBJ1-2)
CASSLVSGGDYGYTF

SEQ ID NO: 145711 - protein, 16 aa, Homo sapiens
  CDR3 for alpha chain variable domain of TCR clone 72856 (TRAV3, TRAJ5)
CAVRNLMDTGRRALTF

SEQ ID NO: 145712 - protein, 13 aa, Homo sapiens
  CDR3 for beta chain variable domain of TCR clone 72856 (TRBV7-9, TRBJ1-2)
CASSLKQNYGYTF

SEQ ID NO: 145713 - protein, 16 aa, Homo sapiens
  CDR3 for alpha chain variable domain of TCR clone 72857 (TRAV30, TRAJ24)
CGTEIVDADSWGKFQF

SEQ ID NO: 145714 - protein, 16 aa, Homo sapiens
  CDR3 for beta chain variable domain of TCR clone 72857 (TRBV19, TRBJ1-1)
CASRFGGPVTGTEAFF

SEQ ID NO: 145715 - protein, 10 aa, Homo sapiens
  CDR3 for alpha chain variable domain of TCR clone 72858 (TRAV23/DV6, TRAJ21)
CAASREQLQQ

SEQ ID NO: 145716 - protein, 16 aa, Homo sapiens
  CDR3 for beta chain variable domain of TCR clone 72858 (TRBV20-1, TRBJ2-3)
CSAVRDRGPIADTQYF

SEQ ID NO: 145717 - protein, 16 aa, Homo sapiens
  CDR3 for alpha chain variable domain of TCR clone 72859 (TRAV30, TRAJ24)
CGTETVDADSWGKFQF

SEQ ID NO: 145718 - protein, 15 aa, Homo sapiens
  CDR3 for beta chain variable domain of TCR clone 72859 (TRBV20-1, TRBJ2-7)
CSARDRVSGMDEQYF

SEQ ID NO: 145719 - protein, 13 aa, Homo sapiens
  CDR3 for alpha chain variable domain of TCR clone 72860 (TRAV8-6, TRAJ21)
CAVSPSSLNKFYF

SEQ ID NO: 145720 - protein, 14 aa, Homo sapiens
  CDR3 for beta chain variable domain of TCR clone 72860 (TRBV7-9, TRBJ2-5)
CVSSLDTAQETQYF

SEQ ID NO: 145721 - protein, 13 aa, Homo sapiens
  CDR3 for alpha chain variable domain of TCR clone 72861 (TRAV21, TRAJ27)
CAARPGNAGNQPL

SEQ ID NO: 145722 - protein, 14 aa, Homo sapiens
  CDR3 for beta chain variable domain of TCR clone 72861 (TRBV7-6, TRBJ2-3)
CASSLGTVTDTQYF

SEQ ID NO: 145723 - protein, 13 aa, Homo sapiens
  CDR3 for alpha chain variable domain of TCR clone 72862 (TRAV3, TRAJ3)
CAVADSSASKIIF

SEQ ID NO: 145724 - protein, 16 aa, Homo sapiens
  CDR3 for beta chain variable domain of TCR clone 72862 (TRBV7-8, TRBJ2-4)
CASSAERTLAKNIQYF

SEQ ID NO: 145725 - protein, 13 aa, Homo sapiens
  CDR3 for alpha chain variable domain of TCR clone 72863 (TRAV36/DV7, TRAJ37)
CAVFSSNTGKLTF

SEQ ID NO: 145726 - protein, 12 aa, Homo sapiens
  CDR3 for beta chain variable domain of TCR clone 72863 (TRBV11-2, TRBJ2-2)
CASSLGGGELFF

SEQ ID NO: 145727 - protein, 14 aa, Homo sapiens
  CDR3 for alpha chain variable domain of TCR clone 72864 (TRAV17, TRAJ45)
CATALGGGADGLTF

SEQ ID NO: 145728 - protein, 15 aa, Homo sapiens
  CDR3 for beta chain variable domain of TCR clone 72864 (TRBV11-2, TRBJ2-1)
CASSRNRGLMYEQFF

SEQ ID NO: 145729 - protein, 16 aa, Homo sapiens
  CDR3 for alpha chain variable domain of TCR clone 72865 (TRAV20, TRAJ10)
CAVLRGLTGGGNKLTF

SEQ ID NO: 145730 - protein, 14 aa, Homo sapiens
  CDR3 for beta chain variable domain of TCR clone 72865 (TRBV19, TRBJ2-1)
CASPTFVLSGEQFF

SEQ ID NO: 145731 - protein, 15 aa, Homo sapiens
  CDR3 for alpha chain variable domain of TCR clone 72866 (TRAV26-1, TRAJ48)
CIARWSWFGNEKLNF

SEQ ID NO: 145732 - protein, 12 aa, Homo sapiens
  CDR3 for beta chain variable domain of TCR clone 72866 (TRBV19, TRBJ2-5)
CASSISEETQYF

SEQ ID NO: 145733 - protein, 14 aa, Homo sapiens
  CDR3 for alpha chain variable domain of TCR clone 72867 (TRAV1-1, TRAJ27)
CVVIYNTNAGKSTF

SEQ ID NO: 145734 - protein, 15 aa, Homo sapiens
  CDR3 for beta chain variable domain of TCR clone 72867 (TRBV6-3, TRBJ2-7)
CASSSPGTVFYEQYF

SEQ ID NO: 145735 - protein, 13 aa, Homo sapiens
  CDR3 for alpha chain variable domain of TCR clone 72868 (TRAV12-2, TRAJ12)
CAVNWDSSYKLIF

SEQ ID NO: 145736 - protein, 18 aa, Homo sapiens
  CDR3 for beta chain variable domain of TCR clone 72868 (TRBV12-4, TRBJ2-2)
CASSRSGGAIPNTGELFF

SEQ ID NO: 145737 - protein, 14 aa, Homo sapiens
  CDR3 for alpha chain variable domain of TCR clone 72869 (TRAV1-1, TRAJ23)
CALSIYNQGGKLIF

SEQ ID NO: 145738 - protein, 14 aa, Homo sapiens
  CDR3 for beta chain variable domain of TCR clone 72869 (TRBV19, TRBJ2-1)
CASPTFVLSGEQFF

SEQ ID NO: 145739 - protein, 14 aa, Homo sapiens
  CDR3 for alpha chain variable domain of TCR clone 72870 (TRAV12-1, TRAJ17)
CVVNFKAAGNKLTF

SEQ ID NO: 145740 - protein, 17 aa, Homo sapiens
  CDR3 for beta chain variable domain of TCR clone 72870 (TRBV20-1, TRBJ2-1)
CSASSSGLAGSYNEQFF

SEQ ID NO: 145741 - protein, 13 aa, Homo sapiens
  CDR3 for alpha chain variable domain of TCR clone 72871 (TRAV8-3, TRAJ44)
CAVVPGTASKLTF

SEQ ID NO: 145742 - protein, 11 aa, Homo sapiens
  CDR3 for beta chain variable domain of TCR clone 72871 (TRBV29-1, TRBJ2-5)
CSEDRTGTQYF

SEQ ID NO: 145743 - protein, 13 aa, Homo sapiens
  CDR3 for alpha chain variable domain of TCR clone 72872 (TRAV12-1, TRAJ9)
CVVLNTGGFKNIF

SEQ ID NO: 145744 - protein, 13 aa, Homo sapiens
  CDR3 for beta chain variable domain of TCR clone 72872 (TRBV20-1, TRBJ1-1)
CSARGGGNTEAFF

SEQ ID NO: 145745 - protein, 13 aa, Homo sapiens
  CDR3 for alpha chain variable domain of TCR clone 72873 (TRAV6, TRAJ12)
CSEVLDSSYKLIF

SEQ ID NO: 145746 - protein, 15 aa, Homo sapiens
  CDR3 for beta chain variable domain of TCR clone 72873 (TRBV20-1, TRBJ2-7)
CSARDRVSGMDEQYF

SEQ ID NO: 145747 - protein, 14 aa, Homo sapiens
  CDR3 for alpha chain variable domain of TCR clone 72874 (TRAV17, TRAJ37)
CATDGSSKTGKLIF

SEQ ID NO: 145748 - protein, 13 aa, Homo sapiens
  CDR3 for beta chain variable domain of TCR clone 72874 (TRBV11-2, TRBJ2-1)
CASSLDLVNEQFF

SEQ ID NO: 145749 - protein, 18 aa, Homo sapiens
  CDR3 for alpha chain variable domain of TCR clone 72875 (TRAV13-1, TRAJ52)
CAASKRSAGGTSYGKLTF

SEQ ID NO: 145750 - protein, 12 aa, Homo sapiens
  CDR3 for beta chain variable domain of TCR clone 72875 (TRBV7-9, TRBJ1-5)
CASSPQGQPQHF

SEQ ID NO: 145751 - protein, 14 aa, Homo sapiens
  CDR3 for alpha chain variable domain of TCR clone 72876 (TRAV17, TRAJ16)
CATADFSDGQNLLF

SEQ ID NO: 145752 - protein, 15 aa, Homo sapiens
  CDR3 for beta chain variable domain of TCR clone 72876 (TRBV18, TRBJ2-1)
CASSPPSASYNEQFF

SEQ ID NO: 145753 - protein, 15 aa, Homo sapiens
  CDR3 for alpha chain variable domain of TCR clone 72877 (TRAV8-3, TRAJ45)
CASSYSGGGADGLTF

SEQ ID NO: 145754 - protein, 14 aa, Homo sapiens
  CDR3 for beta chain variable domain of TCR clone 72877 (TRBV20-1, TRBJ1-1)
CSAQTRIGGTEAFF

SEQ ID NO: 145755 - protein, 16 aa, Homo sapiens
  CDR3 for alpha chain variable domain of TCR clone 72878 (TRAV35, TRAJ37)
CWAFLRGPSNTGKLIF

SEQ ID NO: 145756 - protein, 13 aa, Homo sapiens
  CDR3 for beta chain variable domain of TCR clone 72878 (TRBV2, TRBJ1-2)
CAGSVRGNYGYTF

SEQ ID NO: 145757 - protein, 15 aa, Homo sapiens
  CDR3 for alpha chain variable domain of TCR clone 72879 (TRAV35, TRAJ40)
CAGQLGTSGTYKYIF

SEQ ID NO: 145758 - protein, 19 aa, Homo sapiens
  CDR3 for beta chain variable domain of TCR clone 72879 (TRBV23-1, TRBJ2-7)
CASILLRDRARAVLRAGHQ

SEQ ID NO: 145759 - protein, 16 aa, Homo sapiens
  CDR3 for alpha chain variable domain of TCR clone 72880 (TRAV12-2, TRAJ40)
CAVIRGGTSGTYKYIF

SEQ ID NO: 145760 - protein, 12 aa, Homo sapiens
  CDR3 for beta chain variable domain of TCR clone 72880 (TRBV7-3, TRBJ2-1)
CASSFINNEQFF

SEQ ID NO: 145761 - protein, 11 aa, Homo sapiens
  CDR3 for alpha chain variable domain of TCR clone 72881 (TRAV13-1, TRAJ15)
CAATPGTALIF

SEQ ID NO: 145762 - protein, 13 aa, Homo sapiens
  CDR3 for beta chain variable domain of TCR clone 72881 (TRBV7-2, TRBJ2-1)
CASSLGVYNERFF

SEQ ID NO: 145763 - protein, 12 aa, Homo sapiens
  CDR3 for alpha chain variable domain of TCR clone 72882 (TRAV12-3, TRAJ41)
CAMIYSGYALNF

SEQ ID NO: 145764 - protein, 13 aa, Homo sapiens
  CDR3 for beta chain variable domain of TCR clone 72882 (TRBV7-3, TRBJ2-1)
CASSLDSYNEQFF

SEQ ID NO: 145765 - protein, 12 aa, Homo sapiens
  CDR3 for alpha chain variable domain of TCR clone 72883 (TRAV12-2, TRAJ9)
CAVYNGGFKTIF

SEQ ID NO: 145766 - protein, 14 aa, Homo sapiens
  CDR3 for beta chain variable domain of TCR clone 72883 (TRBV6-1, TRBJ1-5)
CASSETGMEQTQHF

SEQ ID NO: 145767 - protein, 15 aa, Homo sapiens
  CDR3 for alpha chain variable domain of TCR clone 72884 (TRAV23/DV6, TRAJ18)
CAARYRGSTLGRLYF

SEQ ID NO: 145768 - protein, 15 aa, Homo sapiens
  CDR3 for beta chain variable domain of TCR clone 72884 (TRBV20-1, TRBJ2-7)
CSAGDRVSGMDEQYF

SEQ ID NO: 145769 - protein, 14 aa, Homo sapiens
  CDR3 for alpha chain variable domain of TCR clone 72885 (TRAV13-1, TRAJ35)
CAASKGGFGNVLHC

SEQ ID NO: 145770 - protein, 13 aa, Homo sapiens
  CDR3 for beta chain variable domain of TCR clone 72885 (TRBV15, TRBJ1-6)
CATSGGLNSPLHF

SEQ ID NO: 145771 - protein, 19 aa, Homo sapiens
  CDR3 for alpha chain variable domain of TCR clone 72886 (TRAV1-2, TRAJ15)
CLLPLCCGRHGSAGTALIF

SEQ ID NO: 145772 - protein, 13 aa, Homo sapiens
  CDR3 for beta chain variable domain of TCR clone 72886 (TRBV20-1, TRBJ1-1)
CSAFDRENTEAFF

SEQ ID NO: 145773 - protein, 15 aa, Homo sapiens
  CDR3 for alpha chain variable domain of TCR clone 72887 (TRAV13-1, TRAJ5)
CAVSPIDTGRRALTF

SEQ ID NO: 145774 - protein, 18 aa, Homo sapiens
  CDR3 for beta chain variable domain of TCR clone 72887 (TRBV4-1, TRBJ2-2)
CASSVRTSGGEGPGELFF

SEQ ID NO: 145775 - protein, 14 aa, Homo sapiens
  CDR3 for alpha chain variable domain of TCR clone 72888 (TRAV9-2, TRAJ39)
CALYIYNAGNMLTF

SEQ ID NO: 145776 - protein, 12 aa, Homo sapiens
  CDR3 for beta chain variable domain of TCR clone 72888 (TRBV6-3, TRBJ2-7)
CASSLTPYEQYL

SEQ ID NO: 145777 - protein, 12 aa, Homo sapiens
  CDR3 for alpha chain variable domain of TCR clone 72889 (TRAV21, TRAJ37)
CAVRGNTGKLIF

SEQ ID NO: 145778 - protein, 13 aa, Homo sapiens
  CDR3 for beta chain variable domain of TCR clone 72889 (TRBV7-9, TRBJ1-2)
CASSLKQNYGYTF

SEQ ID NO: 145779 - protein, 15 aa, Homo sapiens
  CDR3 for alpha chain variable domain of TCR clone 72890 (TRAV2, TRAJ15)
CAVEDRNQAGAALIF

SEQ ID NO: 145780 - protein, 13 aa, Homo sapiens
  CDR3 for beta chain variable domain of TCR clone 72890 (TRBV10-2, TRBJ2-1)
CASGASGDAKQFF

SEQ ID NO: 145781 - protein, 13 aa, Homo sapiens
  CDR3 for alpha chain variable domain of TCR clone 72891 (TRAV12-2, TRAJ20)
CAVYPSNDYKLSF

SEQ ID NO: 145782 - protein, 14 aa, Homo sapiens
  CDR3 for beta chain variable domain of TCR clone 72891 (TRBV7-9, TRBJ2-1)
CASSPRDSLYEQFF

SEQ ID NO: 145783 - protein, 14 aa, Homo sapiens
  CDR3 for alpha chain variable domain of TCR clone 72892 (TRAV9-2, TRAJ38)
CALSNAGNNRKLIW

SEQ ID NO: 145784 - protein, 15 aa, Homo sapiens
  CDR3 for beta chain variable domain of TCR clone 72892 (TRBV9, TRBJ2-1)
CASSLAGSSYDEQFF

SEQ ID NO: 145785 - protein, 13 aa, Homo sapiens
  CDR3 for alpha chain variable domain of TCR clone 72893 (TRAV12-1, TRAJ13)
CVVALLGYQKVTF

SEQ ID NO: 145786 - protein, 13 aa, Homo sapiens
  CDR3 for beta chain variable domain of TCR clone 72893 (TRBV20-1, TRBJ2-5)
CGAILTGQETQYF

SEQ ID NO: 145787 - protein, 13 aa, Homo sapiens
  CDR3 for alpha chain variable domain of TCR clone 72894 (TRAV23/DV6, )
CAADIQNPDPAVY

SEQ ID NO: 145788 - protein, 14 aa, Homo sapiens
  CDR3 for beta chain variable domain of TCR clone 72894 (TRBV5-7, TRBJ1-6)
CASSFAGHNSPLHF

SEQ ID NO: 145789 - protein, 12 aa, Homo sapiens
  CDR3 for alpha chain variable domain of TCR clone 72895 (TRAV1-2, TRAJ42)
CVAGGSQGNLIF

SEQ ID NO: 145790 - protein, 12 aa, Homo sapiens
  CDR3 for beta chain variable domain of TCR clone 72895 (TRBV11-2, TRBJ2-2)
CASSLGGGELFF

SEQ ID NO: 145791 - protein, 13 aa, Homo sapiens
  CDR3 for alpha chain variable domain of TCR clone 72896 (TRAV21, TRAJ57)
CAVTEGGSEKLVF

SEQ ID NO: 145792 - protein, 11 aa, Homo sapiens
  CDR3 for beta chain variable domain of TCR clone 72896 (TRBV11-2, TRBJ2-2)
CASSLPGELFF

SEQ ID NO: 145793 - protein, 14 aa, Homo sapiens
  CDR3 for alpha chain variable domain of TCR clone 72897 (TRAV17, TRAJ31)
CDTVLRNNNARLMF

SEQ ID NO: 145794 - protein, 14 aa, Homo sapiens
  CDR3 for beta chain variable domain of TCR clone 72897 (TRBV12-4, TRBJ2-5)
CASSLWQKQETQYF

SEQ ID NO: 145795 - protein, 13 aa, Homo sapiens
  CDR3 for alpha chain variable domain of TCR clone 72898 (TRAV35, TRAJ36)
CAGPRIGAYNLFF

SEQ ID NO: 145796 - protein, 15 aa, Homo sapiens
  CDR3 for beta chain variable domain of TCR clone 72898 (TRBV28, TRBJ2-5)
CASSPPWSYQETQYF

SEQ ID NO: 145797 - protein, 17 aa, Homo sapiens
  CDR3 for alpha chain variable domain of TCR clone 72899 (TRAV3, TRAJ28)
CAVREAYSGAGRYQLTF

SEQ ID NO: 145798 - protein, 11 aa, Homo sapiens
  CDR3 for beta chain variable domain of TCR clone 72899 (TRBV19, TRBJ2-2)
CASRYSGELFF

SEQ ID NO: 145799 - protein, 18 aa, Homo sapiens
  CDR3 for alpha chain variable domain of TCR clone 72900 (TRAV26-2, TRAJ45)
CILRVDKYSRGGADGLTF

SEQ ID NO: 145800 - protein, 16 aa, Homo sapiens
  CDR3 for beta chain variable domain of TCR clone 72900 (TRBV2, TRBJ1-4)
CASNLLQGATNEKLFF

SEQ ID NO: 145801 - protein, 14 aa, Homo sapiens
  CDR3 for alpha chain variable domain of TCR clone 72901 (TRAV12-3, TRAJ10)
SHLPLTGGGNKLTF

SEQ ID NO: 145802 - protein, 14 aa, Homo sapiens
  CDR3 for beta chain variable domain of TCR clone 72901 (TRBV11-2, TRBJ2-7)
CASSSTGEGYEQYF

SEQ ID NO: 145803 - protein, 17 aa, Homo sapiens
  CDR3 for alpha chain variable domain of TCR clone 72902 (TRAV26-1, TRAJ37)
CIVRVITVSSNTGKLIF

SEQ ID NO: 145804 - protein, 15 aa, Homo sapiens
  CDR3 for beta chain variable domain of TCR clone 72902 (TRBV10-1, TRBJ2-3)
CASSATSGGFGTQYF

SEQ ID NO: 145805 - protein, 16 aa, Homo sapiens
  CDR3 for alpha chain variable domain of TCR clone 72903 (TRAV3, TRAJ23)
CAVKIGIYNQGGKLIF

SEQ ID NO: 145806 - protein, 17 aa, Homo sapiens
  CDR3 for beta chain variable domain of TCR clone 72903 (TRBV10-3, TRBJ2-6)
CAISEYTAPSGANVLTF

SEQ ID NO: 145807 - protein, 15 aa, Homo sapiens
  CDR3 for alpha chain variable domain of TCR clone 72904 (TRAV23/DV6, TRAJ18)
CAASFRGSTLGRLYF

SEQ ID NO: 145808 - protein, 13 aa, Homo sapiens
  CDR3 for beta chain variable domain of TCR clone 72904 (TRBV28, TRBJ2-7)
CAILDRAGGEQYF

SEQ ID NO: 145809 - protein, 15 aa, Homo sapiens
  CDR3 for alpha chain variable domain of TCR clone 72905 (TRAV1-1, TRAJ24)
CALSGGTDSWGKFQF

SEQ ID NO: 145810 - protein, 16 aa, Homo sapiens
  CDR3 for beta chain variable domain of TCR clone 72905 (TRBV2, TRBJ2-7)
CASSEPWTGPSYEQCF

SEQ ID NO: 145811 - protein, 15 aa, Homo sapiens
  CDR3 for alpha chain variable domain of TCR clone 72906 (TRAV12-3, TRAJ11)
CAVSEENSGYSTLTF

SEQ ID NO: 145812 - protein, 16 aa, Homo sapiens
  CDR3 for beta chain variable domain of TCR clone 72906 (TRBV5-1, TRBJ2-7)
CASSLEGLAGLYEQYF

SEQ ID NO: 145813 - protein, 14 aa, Homo sapiens
  CDR3 for alpha chain variable domain of TCR clone 72907 (TRAV29/DV5, TRAJ36)
CAARRKTGANNLFF

SEQ ID NO: 145814 - protein, 13 aa, Homo sapiens
  CDR3 for beta chain variable domain of TCR clone 72907 (TRBV7-2, TRBJ2-2)
CASSLAVTGELFF

SEQ ID NO: 145815 - protein, 14 aa, Homo sapiens
  CDR3 for alpha chain variable domain of TCR clone 72908 (TRAV8-3, TRAJ4)
CAVGAVGGYNKLIF

SEQ ID NO: 145816 - protein, 15 aa, Homo sapiens
  CDR3 for beta chain variable domain of TCR clone 72908 (TRBV6-5, TRBJ2-1)
CASSYDAGAGNEQFF

SEQ ID NO: 145817 - protein, 13 aa, Homo sapiens
  CDR3 for alpha chain variable domain of TCR clone 72909 (TRAV13-2, TRAJ48)
CAEMDFGNEKLTF

SEQ ID NO: 145818 - protein, 18 aa, Homo sapiens
  CDR3 for beta chain variable domain of TCR clone 72909 (TRBV12-4, TRBJ2-2)
CASSRSGGAIPNTGELFF

SEQ ID NO: 145819 - protein, 15 aa, Homo sapiens
  CDR3 for alpha chain variable domain of TCR clone 72910 (TRAV34, TRAJ38)
CGADFTPGKNRKLIW

SEQ ID NO: 145820 - protein, 16 aa, Homo sapiens
  CDR3 for beta chain variable domain of TCR clone 72910 (TRBV12-5, TRBJ2-5)
CASGPRTSGNQETQYF

SEQ ID NO: 145821 - protein, 15 aa, Homo sapiens
  CDR3 for alpha chain variable domain of TCR clone 72911 (TRAV17, TRAJ16)
CATALWFSDGQKLLF

SEQ ID NO: 145822 - protein, 15 aa, Homo sapiens
  CDR3 for beta chain variable domain of TCR clone 72911 (TRBV20-1, TRBJ1-1)
CSASRGVTGNTEAFF

SEQ ID NO: 145823 - protein, 22 aa, Homo sapiens
  CDR3 for alpha chain variable domain of TCR clone 72912 (TRAV27, TRAJ38)
CAARRNAGNNHIQNPDPAVYQL

SEQ ID NO: 145824 - protein, 17 aa, Homo sapiens
  CDR3 for beta chain variable domain of TCR clone 72912 (TRBV13, TRBJ2-3)
CASSLSRVAGGRNTQYF

SEQ ID NO: 145825 - protein, 14 aa, Homo sapiens
  CDR3 for alpha chain variable domain of TCR clone 72913 (TRAV12-3, TRAJ54)
CAMRGIQGAQKRVF

SEQ ID NO: 145826 - protein, 13 aa, Homo sapiens
  CDR3 for beta chain variable domain of TCR clone 72913 (TRBV19, TRBJ1-1)
CASSPSNGGEAFF

SEQ ID NO: 145827 - protein, 15 aa, Homo sapiens
  CDR3 for alpha chain variable domain of TCR clone 72914 (TRAV38-1, TRAJ37)
CAFIHGSANTGKLIF

SEQ ID NO: 145828 - protein, 12 aa, Homo sapiens
  CDR3 for beta chain variable domain of TCR clone 72914 (TRBV7-9, TRBJ2-7)
CASSFGSYEQYF

SEQ ID NO: 145829 - protein, 17 aa, Homo sapiens
  CDR3 for alpha chain variable domain of TCR clone 72915 (TRAV12-2, TRAJ52)
CAVNPCAGGTSYGKLTF

SEQ ID NO: 145830 - protein, 16 aa, Homo sapiens
  CDR3 for beta chain variable domain of TCR clone 72915 (TRBV5-5, TRBJ2-2)
CASSGRREGATGELFF

SEQ ID NO: 145831 - protein, 14 aa, Homo sapiens
  CDR3 for alpha chain variable domain of TCR clone 72916 (TRAV2, TRAJ9)
CAVEDRSGGFKTIF

SEQ ID NO: 145832 - protein, 15 aa, Homo sapiens
  CDR3 for beta chain variable domain of TCR clone 72916 (TRBV28, TRBJ1-3)
CASSMGWASGNTMYF

SEQ ID NO: 145833 - protein, 15 aa, Homo sapiens
  CDR3 for alpha chain variable domain of TCR clone 72917 (TRAV12-3, TRAJ6)
CAMSATTGGSYIPTF

SEQ ID NO: 145834 - protein, 15 aa, Homo sapiens
  CDR3 for beta chain variable domain of TCR clone 72917 (TRBV5-1, TRBJ2-7)
CASSLNGGPAREQHF

SEQ ID NO: 145835 - protein, 12 aa, Homo sapiens
  CDR3 for alpha chain variable domain of TCR clone 72918 (TRAV3, TRAJ26)
CAVRDYGQNFVF

SEQ ID NO: 145836 - protein, 16 aa, Homo sapiens
  CDR3 for beta chain variable domain of TCR clone 72918 (TRBV11-2, TRBJ1-2)
CASSPSGREANYGYIF

SEQ ID NO: 145837 - protein, 14 aa, Homo sapiens
  CDR3 for alpha chain variable domain of TCR clone 72919 (TRAV1-2, TRAJ16)
CAVNRFSDGQKLRF

SEQ ID NO: 145838 - protein, 12 aa, Homo sapiens
  CDR3 for beta chain variable domain of TCR clone 72919 (TRBV11-2, TRBJ2-2)
CASSLGGGELFF

SEQ ID NO: 145839 - protein, 14 aa, Homo sapiens
  CDR3 for alpha chain variable domain of TCR clone 72920 (TRAV13-1, TRAJ24)
CAASRTDSWGKLQL

SEQ ID NO: 145840 - protein, 15 aa, Homo sapiens
  CDR3 for beta chain variable domain of TCR clone 72920 (TRBV7-9, TRBJ1-5)
CASSQGHQPNQPQHF

SEQ ID NO: 145841 - protein, 12 aa, Homo sapiens
  CDR3 for alpha chain variable domain of TCR clone 72921 (TRAV16, TRAJ9)
CSLSSGGFKTIF

SEQ ID NO: 145842 - protein, 14 aa, Homo sapiens
  CDR3 for beta chain variable domain of TCR clone 72921 (TRBV7-9, TRBJ2-1)
CASSLAGPYNEQFF

SEQ ID NO: 145843 - protein, 14 aa, Homo sapiens
  CDR3 for alpha chain variable domain of TCR clone 72922 (TRAV8-3, TRAJ39)
CAVGANNAGNMLTF

SEQ ID NO: 145844 - protein, 19 aa, Homo sapiens
  CDR3 for beta chain variable domain of TCR clone 72922 (TRBV25-1, TRBJ2-2)
CAILVYRVGRGRKTGELFF

SEQ ID NO: 145845 - protein, 17 aa, Homo sapiens
  CDR3 for alpha chain variable domain of TCR clone 72923 (TRAV3, TRAJ42)
CAVRDRDYGGSQGNLIL

SEQ ID NO: 145846 - protein, 17 aa, Homo sapiens
  CDR3 for beta chain variable domain of TCR clone 72923 (TRBV7-9, TRBJ2-3)
CASSPTVAGDLTDTQYF

SEQ ID NO: 145847 - protein, 14 aa, Homo sapiens
  CDR3 for alpha chain variable domain of TCR clone 72924 (TRAV20, TRAJ56)
CAVQFGGANSKLTF

SEQ ID NO: 145848 - protein, 14 aa, Homo sapiens
  CDR3 for beta chain variable domain of TCR clone 72924 (TRBV20-1, TRBJ2-7)
CSAKRGRSSYEQYI

SEQ ID NO: 145849 - protein, 14 aa, Homo sapiens
  CDR3 for alpha chain variable domain of TCR clone 72925 (TRAV26-1, TRAJ21)
CIVRPPYNFNKFYF

SEQ ID NO: 145850 - protein, 14 aa, Homo sapiens
  CDR3 for beta chain variable domain of TCR clone 72925 (TRBV11-3, TRBJ2-1)
CASSATTSGGIQFF

SEQ ID NO: 145851 - protein, 15 aa, Homo sapiens
  CDR3 for alpha chain variable domain of TCR clone 72926 (TRAV9-2, TRAJ39)
CALSDRNNAGNMLTF

SEQ ID NO: 145852 - protein, 15 aa, Homo sapiens
  CDR3 for beta chain variable domain of TCR clone 72926 (TRBV10-3, TRBJ2-2)
CAISPGRTDTGELFF

SEQ ID NO: 145853 - protein, 14 aa, Homo sapiens
  CDR3 for alpha chain variable domain of TCR clone 72927 (TRAV21, TRAJ32)
CCGDYGGSTNKLIF

SEQ ID NO: 145854 - protein, 13 aa, Homo sapiens
  CDR3 for beta chain variable domain of TCR clone 72927 (TRBV2, TRBJ1-6)
CASGRGGISPLHF

SEQ ID NO: 145855 - protein, 13 aa, Homo sapiens
  CDR3 for alpha chain variable domain of TCR clone 72928 (TRAV13-2, TRAJ11)
CAEGDSGYSTLTF

SEQ ID NO: 145856 - protein, 12 aa, Homo sapiens
  CDR3 for beta chain variable domain of TCR clone 72928 (TRBV7-9, TRBJ1-1)
CASSSEGTEAFF

SEQ ID NO: 145857 - protein, 18 aa, Homo sapiens
  CDR3 for alpha chain variable domain of TCR clone 72929 (TRAV21, TRAJ52)
CAVRPSPAGGTSYGKLTF

SEQ ID NO: 145858 - protein, 13 aa, Homo sapiens
  CDR3 for beta chain variable domain of TCR clone 72929 (TRBV7-3, TRBJ1-1)
CASSQDWGAEPFF

SEQ ID NO: 145859 - protein, 14 aa, Homo sapiens
  CDR3 for alpha chain variable domain of TCR clone 72930 (TRAV16, TRAJ42)
CALLAGGSQGNLIF

SEQ ID NO: 145860 - protein, 13 aa, Homo sapiens
  CDR3 for beta chain variable domain of TCR clone 72930 (TRBV7-9, TRBJ2-5)
CASLSPGQETQYF

SEQ ID NO: 145861 - protein, 17 aa, Homo sapiens
  CDR3 for alpha chain variable domain of TCR clone 72931 (TRAV8-6, TRAJ58)
CAVSSWVGETSGSRLTF

SEQ ID NO: 145862 - protein, 14 aa, Homo sapiens
  CDR3 for beta chain variable domain of TCR clone 72931 (TRBV4-2, TRBJ2-1)
CAGGLDRAYNEQFF

SEQ ID NO: 145863 - protein, 16 aa, Homo sapiens
  CDR3 for alpha chain variable domain of TCR clone 72932 (TRAV3, TRAJ37)
CAVRPHGSGNTGKLIF

SEQ ID NO: 145864 - protein, 16 aa, Homo sapiens
  CDR3 for beta chain variable domain of TCR clone 72932 (TRBV9, TRBJ1-2)
CASSVEEKVSPNGYTF

SEQ ID NO: 145865 - protein, 12 aa, Homo sapiens
  CDR3 for alpha chain variable domain of TCR clone 72933 (TRAV21, TRAJ33)
SAKMDSNYQLIW

SEQ ID NO: 145866 - protein, 15 aa, Homo sapiens
  CDR3 for beta chain variable domain of TCR clone 72933 (TRBV9, TRBJ1-6)
CASSVAGTGDSPLHF

SEQ ID NO: 145867 - protein, 14 aa, Homo sapiens
  CDR3 for alpha chain variable domain of TCR clone 72934 (TRAV8-6, TRAJ12)
CAAKAADSSYKLIF

SEQ ID NO: 145868 - protein, 15 aa, Homo sapiens
  CDR3 for beta chain variable domain of TCR clone 72934 (TRBV5-1, TRBJ2-5)
CASSLGLAEQETQYF

SEQ ID NO: 145869 - protein, 16 aa, Homo sapiens
  CDR3 for alpha chain variable domain of TCR clone 72935 (TRAV12-1, TRAJ48)
CVVNMVSNFGNEKLTF

SEQ ID NO: 145870 - protein, 18 aa, Homo sapiens
  CDR3 for beta chain variable domain of TCR clone 72935 (TRBV11-2, TRBJ2-6)
CASSLNPFLGTGADVLTF

SEQ ID NO: 145871 - protein, 15 aa, Homo sapiens
  CDR3 for alpha chain variable domain of TCR clone 72936 (TRAV27, TRAJ38)
CAARRNAGNNRKLIW

SEQ ID NO: 145872 - protein, 15 aa, Homo sapiens
  CDR3 for beta chain variable domain of TCR clone 72936 (TRBV20-1, TRBJ2-3)
CSAEPLAGHGDTQYF

SEQ ID NO: 145873 - protein, 12 aa, Homo sapiens
  CDR3 for alpha chain variable domain of TCR clone 72937 (TRAV8-3, TRAJ20)
CAVGANDYKLSL

SEQ ID NO: 145874 - protein, 12 aa, Homo sapiens
  CDR3 for beta chain variable domain of TCR clone 72937 (TRBV6-3, TRBJ2-7)
CASSLTPYEQYF

SEQ ID NO: 145875 - protein, 14 aa, Homo sapiens
  CDR3 for alpha chain variable domain of TCR clone 72938 (TRAV1-2, TRAJ16)
CAVNRFSDSQKLLF

SEQ ID NO: 145876 - protein, 14 aa, Homo sapiens
  CDR3 for beta chain variable domain of TCR clone 72938 (TRBV7-9, TRBJ1-4)
CAITEGEANEKLFF

SEQ ID NO: 145877 - protein, 13 aa, Homo sapiens
  CDR3 for alpha chain variable domain of TCR clone 72939 (TRAV17, TRAJ26)
CATVDNYGQNFVF

SEQ ID NO: 145878 - protein, 11 aa, Homo sapiens
  CDR3 for beta chain variable domain of TCR clone 72939 (TRBV29-1, TRBJ2-5)
CSEDRTGTQYF

SEQ ID NO: 145879 - protein, 11 aa, Homo sapiens
  CDR3 for alpha chain variable domain of TCR clone 72940 (TRAV2, TRAJ13)
CASGGYQKVTF

SEQ ID NO: 145880 - protein, 14 aa, Homo sapiens
  CDR3 for beta chain variable domain of TCR clone 72940 (TRBV7-2, TRBJ2-2)
CASRGQGAAGELFF

SEQ ID NO: 145881 - protein, 13 aa, Homo sapiens
  CDR3 for alpha chain variable domain of TCR clone 72941 (TRAV2, TRAJ15)
CAVASQAGTALIF

SEQ ID NO: 145882 - protein, 15 aa, Homo sapiens
  CDR3 for beta chain variable domain of TCR clone 72941 (TRBV7-9, TRBJ1-5)
CASSQGHQPNQPQHF

SEQ ID NO: 145883 - protein, 15 aa, Homo sapiens
  CDR3 for alpha chain variable domain of TCR clone 72942 (TRAV2, TRAJ24)
CAVVRLKNSWGKLQF

SEQ ID NO: 145884 - protein, 16 aa, Homo sapiens
  CDR3 for beta chain variable domain of TCR clone 72942 (TRBV7-7, TRBJ2-3)
CASSPGTSGSTGTQYF

SEQ ID NO: 145885 - protein, 16 aa, Homo sapiens
  CDR3 for alpha chain variable domain of TCR clone 72943 (TRAV3, TRAJ10)
CAVRDMRAGGGNKLTF

SEQ ID NO: 145886 - protein, 14 aa, Homo sapiens
  CDR3 for beta chain variable domain of TCR clone 72943 (TRBV25-1, TRBJ1-1)
CAGTHLGGNTEAFF

SEQ ID NO: 145887 - protein, 10 aa, Homo sapiens
  CDR3 for alpha chain variable domain of TCR clone 72944 (TRAV26-1, TRAJ22)
CIVSLNFFWF

SEQ ID NO: 145888 - protein, 15 aa, Homo sapiens
  CDR3 for beta chain variable domain of TCR clone 72944 (TRBV4-2, TRBJ1-2)
CASSQRAGGRDGYTF

SEQ ID NO: 145889 - protein, 18 aa, Homo sapiens
  CDR3 for alpha chain variable domain of TCR clone 72945 (TRAV12-3, TRAJ52)
CAMSVGGAGGTSYGKLTF

SEQ ID NO: 145890 - protein, 15 aa, Homo sapiens
  CDR3 for beta chain variable domain of TCR clone 72945 (TRBV27, TRBJ1-6)
CANSFDRGLGSPLHF

SEQ ID NO: 145891 - protein, 11 aa, Homo sapiens
  CDR3 for alpha chain variable domain of TCR clone 72946 (TRAV35, TRAJ34)
CWARNTDKLIF

SEQ ID NO: 145892 - protein, 12 aa, Homo sapiens
  CDR3 for beta chain variable domain of TCR clone 72946 (TRBV11-2, TRBJ2-2)
CASSLPTGELFF

SEQ ID NO: 145893 - protein, 14 aa, Homo sapiens
  CDR3 for alpha chain variable domain of TCR clone 72947 (TRAV8-3, TRAJ4)
CAVGAAGGYNKLIF

SEQ ID NO: 145894 - protein, 15 aa, Homo sapiens
  CDR3 for beta chain variable domain of TCR clone 72947 (TRBV5-1, TRBJ2-1)
CASSPPRAPHNEQFF

SEQ ID NO: 145895 - protein, 12 aa, Homo sapiens
  CDR3 for alpha chain variable domain of TCR clone 72948 (TRAV26-2, TRAJ48)
CILRKGNEKLTF

SEQ ID NO: 145896 - protein, 14 aa, Homo sapiens
  CDR3 for beta chain variable domain of TCR clone 72948 (TRBV28, TRBJ2-7)
CASSTPRGRFEQYF

SEQ ID NO: 145897 - protein, 12 aa, Homo sapiens
  CDR3 for alpha chain variable domain of TCR clone 72949 (TRAV1-1, TRAJ16)
CAEMARSCSLQG

SEQ ID NO: 145898 - protein, 18 aa, Homo sapiens
  CDR3 for beta chain variable domain of TCR clone 72949 (TRBV11-2, TRBJ2-3)
CASSLGGASRGAPNTQYF

SEQ ID NO: 145899 - protein, 14 aa, Homo sapiens
  CDR3 for alpha chain variable domain of TCR clone 72950 (TRAV16, TRAJ42)
CALLAGGSQGNLIF

SEQ ID NO: 145900 - protein, 13 aa, Homo sapiens
  CDR3 for beta chain variable domain of TCR clone 72950 (TRBV7-9, TRBJ1-2)
CASSLKQNYVYTF

SEQ ID NO: 145901 - protein, 12 aa, Homo sapiens
  CDR3 for alpha chain variable domain of TCR clone 72951 (TRAV30, TRAJ39)
CGRGNAGNMLTF

SEQ ID NO: 145902 - protein, 16 aa, Homo sapiens
  CDR3 for beta chain variable domain of TCR clone 72951 (TRBV12-4, TRBJ1-5)
CASSSGPRGSNQPQHF

SEQ ID NO: 145903 - protein, 13 aa, Homo sapiens
  CDR3 for alpha chain variable domain of TCR clone 72952 (TRAV5, TRAJ11)
CAETTSGYSTLTF

SEQ ID NO: 145904 - protein, 22 aa, Homo sapiens
  CDR3 for beta chain variable domain of TCR clone 72952 (TRBV12-4, TRBJ2-5)
CASSFETSGVIRRDPVLRARHA

SEQ ID NO: 145905 - protein, 14 aa, Homo sapiens
  CDR3 for alpha chain variable domain of TCR clone 72953 (TRAV1-2, TRAJ16)
CAVNRFSDGQKLFF

SEQ ID NO: 145906 - protein, 15 aa, Homo sapiens
  CDR3 for beta chain variable domain of TCR clone 72953 (TRBV7-9, TRBJ1-6)
CASSSPGRGNSPLHF

SEQ ID NO: 145907 - protein, 14 aa, Homo sapiens
  CDR3 for alpha chain variable domain of TCR clone 72954 (TRAV12-2, TRAJ13)
CAVKKTGGYQNVTF

SEQ ID NO: 145908 - protein, 13 aa, Homo sapiens
  CDR3 for beta chain variable domain of TCR clone 72954 (TRBV28, TRBJ2-3)
CASSLPQVDTQYF

SEQ ID NO: 145909 - protein, 11 aa, Homo sapiens
  CDR3 for alpha chain variable domain of TCR clone 72955 (TRAV2, TRAJ33)
CAVGSNYQLIW

SEQ ID NO: 145910 - protein, 15 aa, Homo sapiens
  CDR3 for beta chain variable domain of TCR clone 72955 (TRBV19, TRBJ1-2)
CASSVGQVLDYGYTF

SEQ ID NO: 145911 - protein, 13 aa, Homo sapiens
  CDR3 for alpha chain variable domain of TCR clone 72956 (TRAV3, TRAJ27)
CAVRPLGAGKSTG

SEQ ID NO: 145912 - protein, 13 aa, Homo sapiens
  CDR3 for beta chain variable domain of TCR clone 72956 (TRBV7-9, TRBJ2-3)
CASSPGSTDTQYF

SEQ ID NO: 145913 - protein, 20 aa, Homo sapiens
  CDR3 for alpha chain variable domain of TCR clone 72957 (TRAV27, TRAJ36)
TAAQPGDTGLYPGWANNLFF

SEQ ID NO: 145914 - protein, 13 aa, Homo sapiens
  CDR3 for beta chain variable domain of TCR clone 72957 (TRBV7-9, TRBJ2-3)
CASSPGSTDTQYF

SEQ ID NO: 145915 - protein, 17 aa, Homo sapiens
  CDR3 for alpha chain variable domain of TCR clone 72958 (TRAV26-1, TRAJ37)
CIVRVITVSSNTGKLIF

SEQ ID NO: 145916 - protein, 12 aa, Homo sapiens
  CDR3 for beta chain variable domain of TCR clone 72958 (TRBV14, TRBJ2-5)
CASSQLKETQYF

SEQ ID NO: 145917 - protein, 18 aa, Homo sapiens
  CDR3 for alpha chain variable domain of TCR clone 72959 (TRAV29/DV5, TRAJ52)
CAAGFRGAGGTSYGKLTF

SEQ ID NO: 145918 - protein, 16 aa, Homo sapiens
  CDR3 for beta chain variable domain of TCR clone 72959 (TRBV7-3, TRBJ2-2)
CTSSLKRGTLSGELFF

SEQ ID NO: 145919 - protein, 13 aa, Homo sapiens
  CDR3 for alpha chain variable domain of TCR clone 72960 (TRAV35, TRAJ42)
CAGFPGSQGNLIF

SEQ ID NO: 145920 - protein, 14 aa, Homo sapiens
  CDR3 for beta chain variable domain of TCR clone 72960 (TRBV7-2, TRBJ2-7)
CASSPKTSFYEQYF

SEQ ID NO: 145921 - protein, 13 aa, Homo sapiens
  CDR3 for alpha chain variable domain of TCR clone 72961 (TRAV12-3, TRAJ13)
CAMTSGGYQKVIF

SEQ ID NO: 145922 - protein, 13 aa, Homo sapiens
  CDR3 for beta chain variable domain of TCR clone 72961 (TRBV7-9, TRBJ1-2)
CASSLKQNYGYTF

SEQ ID NO: 145923 - protein, 14 aa, Homo sapiens
  CDR3 for alpha chain variable domain of TCR clone 72962 (TRAV16, TRAJ48)
CALTPGFGNEKLTF

SEQ ID NO: 145924 - protein, 17 aa, Homo sapiens
  CDR3 for beta chain variable domain of TCR clone 72962 (TRBV20-1, TRBJ1-5)
CSARVGGERQGNQPQHF

SEQ ID NO: 145925 - protein, 15 aa, Homo sapiens
  CDR3 for alpha chain variable domain of TCR clone 72963 (TRAV26-1, TRAJ44)
CIVRANTGTASKLTF

SEQ ID NO: 145926 - protein, 15 aa, Homo sapiens
  CDR3 for beta chain variable domain of TCR clone 72963 (TRBV27, TRBJ2-7)
CASSPGQGRLYEQYF

SEQ ID NO: 145927 - protein, 14 aa, Homo sapiens
  CDR3 for alpha chain variable domain of TCR clone 72964 (TRAV1-2, TRAJ16)
CAVNRFSDGQKLLF

SEQ ID NO: 145928 - protein, 12 aa, Homo sapiens
  CDR3 for beta chain variable domain of TCR clone 72964 (TRBV12-4, TRBJ1-6)
CASSRQGVPLHF

SEQ ID NO: 145929 - protein, 13 aa, Homo sapiens
  CDR3 for alpha chain variable domain of TCR clone 72965 (TRAV8-3, TRAJ44)
CTVVPGTASKLTF

SEQ ID NO: 145930 - protein, 14 aa, Homo sapiens
  CDR3 for beta chain variable domain of TCR clone 72965 (TRBV11-2, TRBJ2-3)
CASSRLARTDTQYF

SEQ ID NO: 145931 - protein, 13 aa, Homo sapiens
  CDR3 for alpha chain variable domain of TCR clone 72966 (TRAV38-1, TRAJ42)
CARWGGSQGNLIF

SEQ ID NO: 145932 - protein, 17 aa, Homo sapiens
  CDR3 for beta chain variable domain of TCR clone 72966 (TRBV20-1, TRBJ2-1)
CSSRDPLAGVWDNEQFF

SEQ ID NO: 145933 - protein, 19 aa, Homo sapiens
  CDR3 for alpha chain variable domain of TCR clone 72967 (TRAV1-1, TRAJ27)
CAGSEMTRSSLEKGHDFIF

SEQ ID NO: 145934 - protein, 14 aa, Homo sapiens
  CDR3 for beta chain variable domain of TCR clone 72967 (TRBV11-3, TRBJ1-6)
CASSFSGGDSPLNF

SEQ ID NO: 145935 - protein, 14 aa, Homo sapiens
  CDR3 for alpha chain variable domain of TCR clone 72968 (TRAV1-2, TRAJ16)
CAVNRFSDGQKLLF

SEQ ID NO: 145936 - protein, 17 aa, Homo sapiens
  CDR3 for beta chain variable domain of TCR clone 72968 (TRBV5-1, TRBJ2-2)
CASSPRTGGMNTGELFF

SEQ ID NO: 145937 - protein, 14 aa, Homo sapiens
  CDR3 for alpha chain variable domain of TCR clone 72969 (TRAV12-3, TRAJ10)
SHLPLTGGGNKLTF

SEQ ID NO: 145938 - protein, 14 aa, Homo sapiens
  CDR3 for beta chain variable domain of TCR clone 72969 (TRBV18, TRBJ2-3)
RASSGLADTDTQYF

SEQ ID NO: 145939 - protein, 10 aa, Homo sapiens
  CDR3 for alpha chain variable domain of TCR clone 72970 (TRAV39, TRAJ49)
CAVAGNQFYF

SEQ ID NO: 145940 - protein, 14 aa, Homo sapiens
  CDR3 for beta chain variable domain of TCR clone 72970 (TRBV7-8, TRBJ2-7)
CASSPRDRVYEQYL

SEQ ID NO: 145941 - protein, 12 aa, Homo sapiens
  CDR3 for alpha chain variable domain of TCR clone 72971 (TRAV27, TRAJ29)
CRSHSGNTPLVF

SEQ ID NO: 145942 - protein, 14 aa, Homo sapiens
  CDR3 for beta chain variable domain of TCR clone 72971 (TRBV7-9, TRBJ2-7)
CASSIGQGAGEQYF

SEQ ID NO: 145943 - protein, 16 aa, Homo sapiens
  CDR3 for alpha chain variable domain of TCR clone 72972 (TRAV12-3, TRAJ53)
CAMSPGSGGSNYKLTF

SEQ ID NO: 145944 - protein, 16 aa, Homo sapiens
  CDR3 for beta chain variable domain of TCR clone 72972 (TRBV27, TRBJ2-2)
CASSFRGLVRTGELFF

SEQ ID NO: 145945 - protein, 15 aa, Homo sapiens
  CDR3 for alpha chain variable domain of TCR clone 72973 (TRAV23/DV6, TRAJ10)
CAAGGLTGGGNKLTF

SEQ ID NO: 145946 - protein, 15 aa, Homo sapiens
  CDR3 for beta chain variable domain of TCR clone 72973 (TRBV5-1, TRBJ2-3)
CASSFEGLFADTQYF

SEQ ID NO: 145947 - protein, 13 aa, Homo sapiens
  CDR3 for alpha chain variable domain of TCR clone 72974 (TRAV8-6, TRAJ50)
CSVIKTSYDKVIF

SEQ ID NO: 145948 - protein, 15 aa, Homo sapiens
  CDR3 for beta chain variable domain of TCR clone 72974 (TRBV7-2, TRBJ2-2)
CASRRPGQNTGELFF

SEQ ID NO: 145949 - protein, 13 aa, Homo sapiens
  CDR3 for alpha chain variable domain of TCR clone 72975 (TRAV21, TRAJ15)
CAVANQAGTALIF

SEQ ID NO: 145950 - protein, 14 aa, Homo sapiens
  CDR3 for beta chain variable domain of TCR clone 72975 (TRBV11-1, TRBJ2-2)
CASSLGAATGELFF

SEQ ID NO: 145951 - protein, 13 aa, Homo sapiens
  CDR3 for alpha chain variable domain of TCR clone 72976 (TRAV8-1, TRAJ30)
CAVIMNRDDKLIF

SEQ ID NO: 145952 - protein, 14 aa, Homo sapiens
  CDR3 for beta chain variable domain of TCR clone 72976 (TRBV7-2, TRBJ1-6)
CASSLQGANSPLHF

SEQ ID NO: 145953 - protein, 15 aa, Homo sapiens
  CDR3 for alpha chain variable domain of TCR clone 72977 (TRAV34, TRAJ38)
CGADFTPGSNRKLIW

SEQ ID NO: 145954 - protein, 16 aa, Homo sapiens
  CDR3 for beta chain variable domain of TCR clone 72977 (TRBV12-5, TRBJ2-5)
CASGPRTSGNQETQYF

SEQ ID NO: 145955 - protein, 12 aa, Homo sapiens
  CDR3 for alpha chain variable domain of TCR clone 72978 (TRAV13-1, TRAJ58)
CAPGGSGSRLTF

SEQ ID NO: 145956 - protein, 13 aa, Homo sapiens
  CDR3 for beta chain variable domain of TCR clone 72978 (TRBV12-4, TRBJ1-1)
CASSLMRDTEAFF

SEQ ID NO: 145957 - protein, 16 aa, Homo sapiens
  CDR3 for alpha chain variable domain of TCR clone 72979 (TRAV38-1, TRAJ37)
CAFKGDGSSNTGKLIF

SEQ ID NO: 145958 - protein, 15 aa, Homo sapiens
  CDR3 for beta chain variable domain of TCR clone 72979 (TRBV7-9, TRBJ1-4)
CASSATGGNNEKLFF

SEQ ID NO: 145959 - protein, 16 aa, Homo sapiens
  CDR3 for alpha chain variable domain of TCR clone 72980 (TRAV3, TRAJ21)
CAVRDIERGNFNKFYF

SEQ ID NO: 145960 - protein, 14 aa, Homo sapiens
  CDR3 for beta chain variable domain of TCR clone 72980 (TRBV12-4, TRBJ2-5)
CASSLSSGRETQYF

SEQ ID NO: 145961 - protein, 14 aa, Homo sapiens
  CDR3 for alpha chain variable domain of TCR clone 72981 (TRAV1-2, TRAJ16)
CAVNRFSDGQKLLF

SEQ ID NO: 145962 - protein, 13 aa, Homo sapiens
  CDR3 for beta chain variable domain of TCR clone 72981 (TRBV18, TRBJ1-1)
CASSGGRNTEAFF

SEQ ID NO: 145963 - protein, 16 aa, Homo sapiens
  CDR3 for alpha chain variable domain of TCR clone 72982 (TRAV12-2, TRAJ18)
CAVTTDRGSTLGRLYV

SEQ ID NO: 145964 - protein, 13 aa, Homo sapiens
  CDR3 for beta chain variable domain of TCR clone 72982 (TRBV19, TRBJ2-3)
CATWDKITDTQYF

SEQ ID NO: 145965 - protein, 16 aa, Homo sapiens
  CDR3 for alpha chain variable domain of TCR clone 72983 (TRAV3, TRAJ10)
CAVRDMRAGGGNKLTF

SEQ ID NO: 145966 - protein, 14 aa, Homo sapiens
  CDR3 for beta chain variable domain of TCR clone 72983 (TRBV19, TRBJ2-7)
CASTVQGRPYEQYF

SEQ ID NO: 145967 - protein, 17 aa, Homo sapiens
  CDR3 for alpha chain variable domain of TCR clone 72984 (TRAV3, TRAJ38)
CAVRDCLNAGNNRKLIW

SEQ ID NO: 145968 - protein, 16 aa, Homo sapiens
  CDR3 for beta chain variable domain of TCR clone 72984 (TRBV6-1, TRBJ2-5)
CASSETLDRGAETQYF

SEQ ID NO: 145969 - protein, 12 aa, Homo sapiens
  CDR3 for alpha chain variable domain of TCR clone 72985 (TRAV3, TRAJ26)
CAVRDYGQNFVF

SEQ ID NO: 145970 - protein, 16 aa, Homo sapiens
  CDR3 for beta chain variable domain of TCR clone 72985 (TRBV11-2, TRBJ1-2)
WASSPSGREANYGYTF

SEQ ID NO: 145971 - protein, 14 aa, Homo sapiens
  CDR3 for alpha chain variable domain of TCR clone 72986 (TRAV12-3, TRAJ10)
SHLPLTGGGNKLTF

SEQ ID NO: 145972 - protein, 15 aa, Homo sapiens
  CDR3 for beta chain variable domain of TCR clone 72986 (TRBV7-9, TRBJ1-6)
CASSSPGRRNSPLHF

SEQ ID NO: 145973 - protein, 13 aa, Homo sapiens
  CDR3 for alpha chain variable domain of TCR clone 72987 (TRAV35, TRAJ57)
CAGSQGGSEKLVF

SEQ ID NO: 145974 - protein, 15 aa, Homo sapiens
  CDR3 for beta chain variable domain of TCR clone 72987 (TRBV20-1, TRBJ2-7)
CSARDRVSGMDEQHF

SEQ ID NO: 145975 - protein, 12 aa, Homo sapiens
  CDR3 for alpha chain variable domain of TCR clone 72988 (TRAV13-1, TRAJ21)
CAAKEGFNKFYF

SEQ ID NO: 145976 - protein, 13 aa, Homo sapiens
  CDR3 for beta chain variable domain of TCR clone 72988 (TRBV7-9, TRBJ1-4)
CATQIGPNEKLFF

SEQ ID NO: 145977 - protein, 15 aa, Homo sapiens
  CDR3 for alpha chain variable domain of TCR clone 72989 (TRAV12-1, TRAJ9)
CVVSFGDTGGFKTIF

SEQ ID NO: 145978 - protein, 15 aa, Homo sapiens
  CDR3 for beta chain variable domain of TCR clone 72989 (TRBV10-2, TRBJ2-6)
CASSEQGTGANVLTF

SEQ ID NO: 145979 - protein, 12 aa, Homo sapiens
  CDR3 for alpha chain variable domain of TCR clone 72990 (TRAV20, TRAJ39)
CAVGNAGNMLTF

SEQ ID NO: 145980 - protein, 16 aa, Homo sapiens
  CDR3 for beta chain variable domain of TCR clone 72990 (TRBV12-5, TRBJ2-5)
CASGPRTSGNQETQYF

SEQ ID NO: 145981 - protein, 16 aa, Homo sapiens
  CDR3 for alpha chain variable domain of TCR clone 72991 (TRAV13-1, TRAJ48)
CAASIFGNFGNEKLTF

SEQ ID NO: 145982 - protein, 13 aa, Homo sapiens
  CDR3 for beta chain variable domain of TCR clone 72991 (TRBV7-9, TRBJ2-1)
CASSSSNFNEQFF

SEQ ID NO: 145983 - protein, 14 aa, Homo sapiens
  CDR3 for alpha chain variable domain of TCR clone 72992 (TRAV1-2, TRAJ16)
CAVNRFSDGQKLLF

SEQ ID NO: 145984 - protein, 15 aa, Homo sapiens
  CDR3 for beta chain variable domain of TCR clone 72992 (TRBV12-5, TRBJ2-2)
CASGRLGGNTGELFF

SEQ ID NO: 145985 - protein, 15 aa, Homo sapiens
  CDR3 for alpha chain variable domain of TCR clone 72993 (TRAV9-2, TRAJ33)
CALTPFMDSNYQLIW

SEQ ID NO: 145986 - protein, 14 aa, Homo sapiens
  CDR3 for beta chain variable domain of TCR clone 72993 (TRBV11-2, TRBJ2-3)
CASSLGGGANTQYF

SEQ ID NO: 145987 - protein, 13 aa, Homo sapiens
  CDR3 for alpha chain variable domain of TCR clone 72994 (TRAV12-3, TRAJ4)
CNEQAGGYNKLIF

SEQ ID NO: 145988 - protein, 15 aa, Homo sapiens
  CDR3 for beta chain variable domain of TCR clone 72994 (TRBV5-1, TRBJ1-1)
CASSPSDLGGTEAFF

SEQ ID NO: 145989 - protein, 14 aa, Homo sapiens
  CDR3 for alpha chain variable domain of TCR clone 72995 (TRAV12-2, TRAJ53)
CRERGVGSNYKLTF

SEQ ID NO: 145990 - protein, 17 aa, Homo sapiens
  CDR3 for beta chain variable domain of TCR clone 72995 (TRBV7-3, TRBJ2-3)
CASSLMKRMRGADTQYF

SEQ ID NO: 145991 - protein, 18 aa, Homo sapiens
  CDR3 for alpha chain variable domain of TCR clone 72996 (TRAV26-1, TRAJ52)
CIVRVAGAGGTRYGKLTF

SEQ ID NO: 145992 - protein, 13 aa, Homo sapiens
  CDR3 for beta chain variable domain of TCR clone 72996 (TRBV7-8, TRBJ1-2)
CASSAQSYYGYTF

SEQ ID NO: 145993 - protein, 10 aa, Homo sapiens
  CDR3 for alpha chain variable domain of TCR clone 72997 (TRAV12-3, TRAJ49)
CAMNDDQFYF

SEQ ID NO: 145994 - protein, 18 aa, Homo sapiens
  CDR3 for beta chain variable domain of TCR clone 72997 (TRBV7-9, TRBJ2-7)
CTSSLTTSGSRTWYEQYF

SEQ ID NO: 145995 - protein, 15 aa, Homo sapiens
  CDR3 for alpha chain variable domain of TCR clone 72998 (TRAV8-3, TRAJ21)
CAVGALPPRGDKFYF

SEQ ID NO: 145996 - protein, 15 aa, Homo sapiens
  CDR3 for beta chain variable domain of TCR clone 72998 (TRBV7-8, TRBJ1-5)
CASSLERRGLEPQHF

SEQ ID NO: 145997 - protein, 17 aa, Homo sapiens
  CDR3 for alpha chain variable domain of TCR clone 72999 (TRAV3, TRAJ6)
CAVGDGPRAGGSYIPTF

SEQ ID NO: 145998 - protein, 14 aa, Homo sapiens
  CDR3 for beta chain variable domain of TCR clone 72999 (TRBV7-2, TRBJ2-7)
CASSPKISFYEQYF

SEQ ID NO: 145999 - protein, 18 aa, Homo sapiens
  CDR3 for alpha chain variable domain of TCR clone 73000 (TRAV12-3, TRAJ52)
CAMSVGGAGGTSYGKLTF

SEQ ID NO: 146000 - protein, 11 aa, Homo sapiens
  CDR3 for beta chain variable domain of TCR clone 73000 (TRBV12-4, TRBJ2-3)
CASTATDTQYF

SEQ ID NO: 146001 - protein, 17 aa, Homo sapiens
  CDR3 for alpha chain variable domain of TCR clone 73001 (TRAV4, TRAJ13)
CIVGVQGSSEGYQKVTF

SEQ ID NO: 146002 - protein, 18 aa, Homo sapiens
  CDR3 for beta chain variable domain of TCR clone 73001 (TRBV15, TRBJ2-3)
CATSRDGARSWDTDTQYF

SEQ ID NO: 146003 - protein, 13 aa, Homo sapiens
  CDR3 for alpha chain variable domain of TCR clone 73002 (TRAV27, TRAJ41)
CAGEGNSGYALNF

SEQ ID NO: 146004 - protein, 12 aa, Homo sapiens
  CDR3 for beta chain variable domain of TCR clone 73002 (TRBV28, TRBJ2-7)
CASSFSSYEQYF

SEQ ID NO: 146005 - protein, 16 aa, Homo sapiens
  CDR3 for alpha chain variable domain of TCR clone 73003 (TRAV8-6, TRAJ4)
CAVSPTFSGGYNKMIF

SEQ ID NO: 146006 - protein, 14 aa, Homo sapiens
  CDR3 for beta chain variable domain of TCR clone 73003 (TRBV29-1, TRBJ2-2)
CSVVTSGAPGELFF

SEQ ID NO: 146007 - protein, 14 aa, Homo sapiens
  CDR3 for alpha chain variable domain of TCR clone 73004 (TRAV23/DV6, TRAJ8)
CAASKATGFQKLVF

SEQ ID NO: 146008 - protein, 15 aa, Homo sapiens
  CDR3 for beta chain variable domain of TCR clone 73004 (TRBV28, TRBJ2-3)
CASIPDRQGANTQYF

SEQ ID NO: 146009 - protein, 13 aa, Homo sapiens
  CDR3 for alpha chain variable domain of TCR clone 73005 (TRAV12-1, TRAJ6)
CVVFPGGSYIPTF

SEQ ID NO: 146010 - protein, 12 aa, Homo sapiens
  CDR3 for beta chain variable domain of TCR clone 73005 (TRBV19, TRBJ2-1)
CASSMQDTEQFF

SEQ ID NO: 146011 - protein, 12 aa, Homo sapiens
  CDR3 for alpha chain variable domain of TCR clone 73006 (TRAV17, TRAJ39)
CATGAAGDMLTF

SEQ ID NO: 146012 - protein, 15 aa, Homo sapiens
  CDR3 for beta chain variable domain of TCR clone 73006 (TRBV5-1, TRBJ2-2)
CASSWTSPNTGELFF

SEQ ID NO: 146013 - protein, 14 aa, Homo sapiens
  CDR3 for alpha chain variable domain of TCR clone 73007 (TRAV38-1, TRAJ40)
CALRPTSGTYKYIF

SEQ ID NO: 146014 - protein, 16 aa, Homo sapiens
  CDR3 for beta chain variable domain of TCR clone 73007 (TRBV6-1, TRBJ2-2)
CASSAFRGGDTGELFF

SEQ ID NO: 146015 - protein, 14 aa, Homo sapiens
  CDR3 for alpha chain variable domain of TCR clone 73008 (TRAV4, TRAJ6)
CLVGEAGGSYIPPF

SEQ ID NO: 146016 - protein, 16 aa, Homo sapiens
  CDR3 for beta chain variable domain of TCR clone 73008 (TRBV7-6, TRBJ2-1)
CASSLNEGPSYNEQFF

SEQ ID NO: 146017 - protein, 17 aa, Homo sapiens
  CDR3 for alpha chain variable domain of TCR clone 73009 (TRAV14/DV4, TRAJ4)
CAMREASGRGGYNKLMF

SEQ ID NO: 146018 - protein, 14 aa, Homo sapiens
  CDR3 for beta chain variable domain of TCR clone 73009 (TRBV19, TRBJ2-7)
CASSMGQGAIEQYF

SEQ ID NO: 146019 - protein, 10 aa, Homo sapiens
  CDR3 for alpha chain variable domain of TCR clone 73010 (TRAV8-4, TRAJ43)
CAVSSDDMRF

SEQ ID NO: 146020 - protein, 15 aa, Homo sapiens
  CDR3 for beta chain variable domain of TCR clone 73010 (TRBV5-1, TRBJ2-3)
CASSVTSGSTDTQYF

SEQ ID NO: 146021 - protein, 11 aa, Homo sapiens
  CDR3 for alpha chain variable domain of TCR clone 73011 (TRAV3, TRAJ21)
CAVGNFNKFYF

SEQ ID NO: 146022 - protein, 11 aa, Homo sapiens
  CDR3 for beta chain variable domain of TCR clone 73011 (TRBV6-3, TRBJ2-3)
CATGQADTQYF

SEQ ID NO: 146023 - protein, 15 aa, Homo sapiens
  CDR3 for alpha chain variable domain of TCR clone 73012 (TRAV4, TRAJ39)
CLVGPNNNAGNMLTF

SEQ ID NO: 146024 - protein, 17 aa, Homo sapiens
  CDR3 for beta chain variable domain of TCR clone 73012 (TRBV13, TRBJ2-3)
CASSLSRVAGGRNTQYF

SEQ ID NO: 146025 - protein, 16 aa, Homo sapiens
  CDR3 for alpha chain variable domain of TCR clone 73013 (TRAV16, TRAJ52)
CALSAAGGTSYGKLTF

SEQ ID NO: 146026 - protein, 13 aa, Homo sapiens
  CDR3 for beta chain variable domain of TCR clone 73013 (TRBV10-3, TRBJ2-7)
CASKLAVNYEQYF

SEQ ID NO: 146027 - protein, 16 aa, Homo sapiens
  CDR3 for alpha chain variable domain of TCR clone 73014 (TRAV21, TRAJ52)
CAVTNAGGTSYGKLTF

SEQ ID NO: 146028 - protein, 13 aa, Homo sapiens
  CDR3 for beta chain variable domain of TCR clone 73014 (TRBV19, TRBJ1-2)
CASSVPGQDGYTF

SEQ ID NO: 146029 - protein, 15 aa, Homo sapiens
  CDR3 for alpha chain variable domain of TCR clone 73015 (TRAV2, TRAJ9)
CAVEDRGTGGFKTIF

SEQ ID NO: 146030 - protein, 14 aa, Homo sapiens
  CDR3 for beta chain variable domain of TCR clone 73015 (TRBV4-1, TRBJ2-2)
CASSQAVYTGELFF

SEQ ID NO: 146031 - protein, 13 aa, Homo sapiens
  CDR3 for alpha chain variable domain of TCR clone 73016 (TRAV12-3, TRAJ9)
CAMRNTGGFKTIF

SEQ ID NO: 146032 - protein, 16 aa, Homo sapiens
  CDR3 for beta chain variable domain of TCR clone 73016 (TRBV7-9, TRBJ2-1)
CASSDVAGGSYNEQFF

SEQ ID NO: 146033 - protein, 14 aa, Homo sapiens
  CDR3 for alpha chain variable domain of TCR clone 73017 (TRAV1-2, TRAJ16)
CAVNRFSDGQKLLF

SEQ ID NO: 146034 - protein, 14 aa, Homo sapiens
  CDR3 for beta chain variable domain of TCR clone 73017 (TRBV12-4, TRBJ1-2)
CASSLTGQGKGYTF

SEQ ID NO: 146035 - protein, 14 aa, Homo sapiens
  CDR3 for alpha chain variable domain of TCR clone 73018 (TRAV12-3, TRAJ10)
SHLPLTGGGNKLTF

SEQ ID NO: 146036 - protein, 16 aa, Homo sapiens
  CDR3 for beta chain variable domain of TCR clone 73018 (TRBV7-9, TRBJ2-5)
CASSPSGQGVKGTQYF

SEQ ID NO: 146037 - protein, 14 aa, Homo sapiens
  CDR3 for alpha chain variable domain of TCR clone 73019 (TRAV2, TRAJ9)
CAVEDRSGGFKTIF

SEQ ID NO: 146038 - protein, 17 aa, Homo sapiens
  CDR3 for beta chain variable domain of TCR clone 73019 (TRBV20-1, TRBJ2-2)
CSASGSGQGGLTGELFF

SEQ ID NO: 146039 - protein, 11 aa, Homo sapiens
  CDR3 for alpha chain variable domain of TCR clone 73020 (TRAV12-3, TRAJ27)
CAMANAGKSTF

SEQ ID NO: 146040 - protein, 13 aa, Homo sapiens
  CDR3 for beta chain variable domain of TCR clone 73020 (TRBV20-1, TRBJ1-1)
CSSRVGGNTEAFF

SEQ ID NO: 146041 - protein, 12 aa, Homo sapiens
  CDR3 for alpha chain variable domain of TCR clone 73021 (TRAV27, TRAJ9)
CAGESGGFKTIF

SEQ ID NO: 146042 - protein, 14 aa, Homo sapiens
  CDR3 for beta chain variable domain of TCR clone 73021 (TRBV6-1, TRBJ2-1)
CASAKDGFYNEQSF

SEQ ID NO: 146043 - protein, 16 aa, Homo sapiens
  CDR3 for alpha chain variable domain of TCR clone 73022 (TRAV3, TRAJ21)
CAVRDIERENFNKFYF

SEQ ID NO: 146044 - protein, 13 aa, Homo sapiens
  CDR3 for beta chain variable domain of TCR clone 73022 (TRBV27, TRBJ2-7)
CASSLTTGYEQYF

SEQ ID NO: 146045 - protein, 14 aa, Homo sapiens
  CDR3 for alpha chain variable domain of TCR clone 73023 (TRAV9-2, TRAJ36)
CALPWRTGANNLLF

SEQ ID NO: 146046 - protein, 14 aa, Homo sapiens
  CDR3 for beta chain variable domain of TCR clone 73023 (TRBV2, TRBJ1-2)
CASSELQVNYGYTF

SEQ ID NO: 146047 - protein, 14 aa, Homo sapiens
  CDR3 for alpha chain variable domain of TCR clone 73024 (TRAV12-2, TRAJ40)
CAVKIPSGAYKYIF

SEQ ID NO: 146048 - protein, 17 aa, Homo sapiens
  CDR3 for beta chain variable domain of TCR clone 73024 (TRBV7-8, TRBJ2-6)
CASSAGTGGAGANVLTF

SEQ ID NO: 146049 - protein, 18 aa, Homo sapiens
  CDR3 for alpha chain variable domain of TCR clone 73025 (TRAV13-1, TRAJ52)
CAASKRSAGGTSYGELTF

SEQ ID NO: 146050 - protein, 13 aa, Homo sapiens
  CDR3 for beta chain variable domain of TCR clone 73025 (TRBV12-4, TRBJ1-2)
CASSLRQGKGYTF

SEQ ID NO: 146051 - protein, 13 aa, Homo sapiens
  CDR3 for alpha chain variable domain of TCR clone 73026 (TRAV8-3, TRAJ28)
CAVGAVGSYQLTF

SEQ ID NO: 146052 - protein, 14 aa, Homo sapiens
  CDR3 for beta chain variable domain of TCR clone 73026 (TRBV7-2, TRBJ2-7)
CASRSQEAAYEQYF

SEQ ID NO: 146053 - protein, 15 aa, Homo sapiens
  CDR3 for alpha chain variable domain of TCR clone 73027 (TRAV17, TRAJ4)
CATGTWSGGYNKLLF

SEQ ID NO: 146054 - protein, 13 aa, Homo sapiens
  CDR3 for beta chain variable domain of TCR clone 73027 (TRBV6-6, TRBJ2-7)
CASSPKHLAEQYF

SEQ ID NO: 146055 - protein, 13 aa, Homo sapiens
  CDR3 for alpha chain variable domain of TCR clone 73028 (TRAV12-1, TRAJ16)
CVVNGPDGQKLLF

SEQ ID NO: 146056 - protein, 10 aa, Homo sapiens
  CDR3 for beta chain variable domain of TCR clone 73028 (TRBV2, TRBJ1-1)
IRQGGFHAFF

SEQ ID NO: 146057 - protein, 12 aa, Homo sapiens
  CDR3 for alpha chain variable domain of TCR clone 73029 (TRAV12-3, TRAJ20)
RAMVRGDYELSF

SEQ ID NO: 146058 - protein, 13 aa, Homo sapiens
  CDR3 for beta chain variable domain of TCR clone 73029 (TRBV23-1, TRBJ1-4)
CASRGKFNEKLFF

SEQ ID NO: 146059 - protein, 13 aa, Homo sapiens
  CDR3 for alpha chain variable domain of TCR clone 73030 (TRAV21, TRAJ27)
CAARPGNAGKSTF

SEQ ID NO: 146060 - protein, 18 aa, Homo sapiens
  CDR3 for beta chain variable domain of TCR clone 73030 (TRBV7-9, TRBJ2-7)
CASSLTTSGSRTWYEQYF

SEQ ID NO: 146061 - protein, 12 aa, Homo sapiens
  CDR3 for alpha chain variable domain of TCR clone 73031 (TRAV35, TRAJ31)
CAAASNNASLMF

SEQ ID NO: 146062 - protein, 14 aa, Homo sapiens
  CDR3 for beta chain variable domain of TCR clone 73031 (TRBV2, TRBJ2-2)
CASSLFGGNGELFF

SEQ ID NO: 146063 - protein, 13 aa, Homo sapiens
  CDR3 for alpha chain variable domain of TCR clone 73032 (TRAV8-3, TRAJ28)
CAVGAVGSYQLTF

SEQ ID NO: 146064 - protein, 14 aa, Homo sapiens
  CDR3 for beta chain variable domain of TCR clone 73032 (TRBV7-2, TRBJ2-7)
CASKSQGAAYEQYF

SEQ ID NO: 146065 - protein, 15 aa, Homo sapiens
  CDR3 for alpha chain variable domain of TCR clone 73033 (TRAV21, TRAJ52)
CAMRGGGTSYGKLTF

SEQ ID NO: 146066 - protein, 15 aa, Homo sapiens
  CDR3 for beta chain variable domain of TCR clone 73033 (TRBV18, TRBJ1-5)
CASSPSDRSNQPQHF

SEQ ID NO: 146067 - protein, 13 aa, Homo sapiens
  CDR3 for alpha chain variable domain of TCR clone 73034 (TRAV35, TRAJ42)
CAGFPGSQGNLIF

SEQ ID NO: 146068 - protein, 13 aa, Homo sapiens
  CDR3 for beta chain variable domain of TCR clone 73034 (TRBV29-1, TRBJ2-1)
CSVEGGRVNEQFC

SEQ ID NO: 146069 - protein, 18 aa, Homo sapiens
  CDR3 for alpha chain variable domain of TCR clone 73035 (TRAV12-3, TRAJ52)
RAMCVGGAGGTSYGKLTF

SEQ ID NO: 146070 - protein, 15 aa, Homo sapiens
  CDR3 for beta chain variable domain of TCR clone 73035 (TRBV27, TRBJ1-6)
CASSFDRGLGSPLHF

SEQ ID NO: 146071 - protein, 13 aa, Homo sapiens
  CDR3 for alpha chain variable domain of TCR clone 73036 (TRAV38-1, TRAJ42)
CARWGGSQGNLIC

SEQ ID NO: 146072 - protein, 17 aa, Homo sapiens
  CDR3 for beta chain variable domain of TCR clone 73036 (TRBV20-1, TRBJ2-1)
CSARDPLAGVWDNEQFF

SEQ ID NO: 146073 - protein, 14 aa, Homo sapiens
  CDR3 for alpha chain variable domain of TCR clone 73037 (TRAV35, TRAJ40)
CAGSTTSGTYKYIF

SEQ ID NO: 146074 - protein, 18 aa, Homo sapiens
  CDR3 for beta chain variable domain of TCR clone 73037 (TRBV11-2, TRBJ2-3)
CASSLGGASRGAPNTQYF

SEQ ID NO: 146075 - protein, 13 aa, Homo sapiens
  CDR3 for alpha chain variable domain of TCR clone 73038 (TRAV12-2, TRAJ26)
CAVRPNYGQNFVF

SEQ ID NO: 146076 - protein, 14 aa, Homo sapiens
  CDR3 for beta chain variable domain of TCR clone 73038 (TRBV4-1, TRBJ2-5)
CASSQDLALETQYF

SEQ ID NO: 146077 - protein, 13 aa, Homo sapiens
  CDR3 for alpha chain variable domain of TCR clone 73039 (TRAV12-3, TRAJ20)
CAMSATNDYKLGF

SEQ ID NO: 146078 - protein, 16 aa, Homo sapiens
  CDR3 for beta chain variable domain of TCR clone 73039 (TRBV18, TRBJ2-7)
CASSPYRDGQTYEQYF

SEQ ID NO: 146079 - protein, 14 aa, Homo sapiens
  CDR3 for alpha chain variable domain of TCR clone 73040 (TRAV16, TRAJ37)
CALDISGNTGKLIF

SEQ ID NO: 146080 - protein, 13 aa, Homo sapiens
  CDR3 for beta chain variable domain of TCR clone 73040 (TRBV10-3, TRBJ2-7)
CASKLAVNYEQYF

SEQ ID NO: 146081 - protein, 14 aa, Homo sapiens
  CDR3 for alpha chain variable domain of TCR clone 73041 (TRAV3, TRAJ21)
CAVRDKHNFNKFYF

SEQ ID NO: 146082 - protein, 14 aa, Homo sapiens
  CDR3 for beta chain variable domain of TCR clone 73041 (TRBV27, TRBJ2-3)
CASRDSPITDTQYF

SEQ ID NO: 146083 - protein, 13 aa, Homo sapiens
  CDR3 for alpha chain variable domain of TCR clone 73042 (TRAV8-3, TRAJ43)
CAVVPYNNNDMCF

SEQ ID NO: 146084 - protein, 16 aa, Homo sapiens
  CDR3 for beta chain variable domain of TCR clone 73042 (TRBV7-2, TRBJ2-5)
CASSPFPTGGEETQYF

SEQ ID NO: 146085 - protein, 14 aa, Homo sapiens
  CDR3 for alpha chain variable domain of TCR clone 73043 (TRAV21, TRAJ35)
CAVMPIGFGNVLHC

SEQ ID NO: 146086 - protein, 12 aa, Homo sapiens
  CDR3 for beta chain variable domain of TCR clone 73043 (TRBV7-9, TRBJ2-7)
GASSIKREEQYF

SEQ ID NO: 146087 - protein, 12 aa, Homo sapiens
  CDR3 for alpha chain variable domain of TCR clone 73044 (TRAV16, TRAJ26)
CALRSYGQNFVF

SEQ ID NO: 146088 - protein, 12 aa, Homo sapiens
  CDR3 for beta chain variable domain of TCR clone 73044 (TRBV7-3, TRBJ2-1)
CASSFQSGPQFF

SEQ ID NO: 146089 - protein, 10 aa, Homo sapiens
  CDR3 for alpha chain variable domain of TCR clone 73045 (TRAV5, TRAJ34)
CAEDTDKLIF

SEQ ID NO: 146090 - protein, 15 aa, Homo sapiens
  CDR3 for beta chain variable domain of TCR clone 73045 (TRBV20-1, TRBJ2-7)
CSARDRVSGMDEQYF

SEQ ID NO: 146091 - protein, 13 aa, Homo sapiens
  CDR3 for alpha chain variable domain of TCR clone 73046 (TRAV2, TRAJ40)
CAVVTSGTYKYIF

SEQ ID NO: 146092 - protein, 15 aa, Homo sapiens
  CDR3 for beta chain variable domain of TCR clone 73046 (TRBV6-5, TRBJ1-1)
CASSYSAAMETEAFF

SEQ ID NO: 146093 - protein, 13 aa, Homo sapiens
  CDR3 for alpha chain variable domain of TCR clone 73047 (TRAV21, TRAJ20)
CAVGLRVDYKLSF

SEQ ID NO: 146094 - protein, 18 aa, Homo sapiens
  CDR3 for beta chain variable domain of TCR clone 73047 (TRBV20-1, TRBJ2-2)
CNARVQTARPSGTGELFF

SEQ ID NO: 146095 - protein, 15 aa, Homo sapiens
  CDR3 for alpha chain variable domain of TCR clone 73048 (TRAV8-4, TRAJ48)
CAVSAAYFGNEKLTF

SEQ ID NO: 146096 - protein, 12 aa, Homo sapiens
  CDR3 for beta chain variable domain of TCR clone 73048 (TRBV3-1, TRBJ2-5)
CASSQRGETLYF

SEQ ID NO: 146097 - protein, 12 aa, Homo sapiens
  CDR3 for alpha chain variable domain of TCR clone 73049 (TRAV23/DV6, TRAJ17)
CARGSCRQHANF

SEQ ID NO: 146098 - protein, 14 aa, Homo sapiens
  CDR3 for beta chain variable domain of TCR clone 73049 (TRBV7-2, TRBJ1-2)
CASSQTGSTYGYTF

SEQ ID NO: 146099 - protein, 14 aa, Homo sapiens
  CDR3 for alpha chain variable domain of TCR clone 73050 (TRAV1-2, TRAJ16)
CAVNRFSDGQKLLF

SEQ ID NO: 146100 - protein, 11 aa, Homo sapiens
  CDR3 for beta chain variable domain of TCR clone 73050 (TRBV7-8, TRBJ2-7)
CASSLSHEQYF

SEQ ID NO: 146101 - protein, 10 aa, Homo sapiens
  CDR3 for alpha chain variable domain of TCR clone 73051 (TRAV1-2, TRAJ34)
CAVNTDELIF

SEQ ID NO: 146102 - protein, 18 aa, Homo sapiens
  CDR3 for beta chain variable domain of TCR clone 73051 (TRBV7-9, TRBJ2-7)
CASSLTTSGSRTWYEQYF

SEQ ID NO: 146103 - protein, 17 aa, Homo sapiens
  CDR3 for alpha chain variable domain of TCR clone 73052 (TRAV26-1, TRAJ37)
CIVRVITVSSNTGKLIF

SEQ ID NO: 146104 - protein, 13 aa, Homo sapiens
  CDR3 for beta chain variable domain of TCR clone 73052 (TRBV12-5, TRBJ2-3)
CASQNRGTDTQYF

SEQ ID NO: 146105 - protein, 16 aa, Homo sapiens
  CDR3 for alpha chain variable domain of TCR clone 73053 (TRAV30, TRAJ24)
CGTEIVDADSWGKFQF

SEQ ID NO: 146106 - protein, 15 aa, Homo sapiens
  CDR3 for beta chain variable domain of TCR clone 73053 (TRBV7-2, TRBJ2-7)
CASSLAVGQVYEQYF

SEQ ID NO: 146107 - protein, 17 aa, Homo sapiens
  CDR3 for alpha chain variable domain of TCR clone 73054 (TRAV3, TRAJ12)
CAVRDGGRMDSSYELIF

SEQ ID NO: 146108 - protein, 14 aa, Homo sapiens
  CDR3 for beta chain variable domain of TCR clone 73054 (TRBV7-9, TRBJ1-2)
CASSRQGANYGYTF

SEQ ID NO: 146109 - protein, 16 aa, Homo sapiens
  CDR3 for alpha chain variable domain of TCR clone 73055 (TRAV26-1, TRAJ33)
CIVPFWGEDSNYQLIW

SEQ ID NO: 146110 - protein, 14 aa, Homo sapiens
  CDR3 for beta chain variable domain of TCR clone 73055 (TRBV19, TRBJ2-1)
CASPTFVLSGEQFF

SEQ ID NO: 146111 - protein, 22 aa, Homo sapiens
  CDR3 for alpha chain variable domain of TCR clone 73056 (TRAV8-3, TRAJ32)
CAVEVVLQTSSSLELALCLLSS

SEQ ID NO: 146112 - protein, 15 aa, Homo sapiens
  CDR3 for beta chain variable domain of TCR clone 73056 (TRBV7-2, TRBJ2-1)
CASSSRTSREDEQLF

SEQ ID NO: 146113 - protein, 12 aa, Homo sapiens
  CDR3 for alpha chain variable domain of TCR clone 73057 (TRAV20, TRAJ39)
CAVGNAGNMLTF

SEQ ID NO: 146114 - protein, 16 aa, Homo sapiens
  CDR3 for beta chain variable domain of TCR clone 73057 (TRBV15, TRBJ1-2)
CATSRGPRTGGGGYTF

SEQ ID NO: 146115 - protein, 12 aa, Homo sapiens
  CDR3 for alpha chain variable domain of TCR clone 73058 (TRAV26-1, TRAJ17)
CIVRSAGNKLTF

SEQ ID NO: 146116 - protein, 15 aa, Homo sapiens
  CDR3 for beta chain variable domain of TCR clone 73058 (TRBV4-1, TRBJ2-5)
CASSQWDLYQETQYF

SEQ ID NO: 146117 - protein, 11 aa, Homo sapiens
  CDR3 for alpha chain variable domain of TCR clone 73059 (TRAV21, TRAJ39)
LLVNAGNMLTF

SEQ ID NO: 146118 - protein, 13 aa, Homo sapiens
  CDR3 for beta chain variable domain of TCR clone 73059 (TRBV7-3, TRBJ2-5)
CASSFRGGETQYF

SEQ ID NO: 146119 - protein, 14 aa, Homo sapiens
  CDR3 for alpha chain variable domain of TCR clone 73060 (TRAV20, TRAJ40)
CCAGLDSGTYKYIF

SEQ ID NO: 146120 - protein, 14 aa, Homo sapiens
  CDR3 for beta chain variable domain of TCR clone 73060 (TRBV7-2, TRBJ2-7)
CASSPKTSFYEQYF

SEQ ID NO: 146121 - protein, 12 aa, Homo sapiens
  CDR3 for alpha chain variable domain of TCR clone 73061 (TRAV1-1, TRAJ8)
CAGGTGFQKLVF

SEQ ID NO: 146122 - protein, 15 aa, Homo sapiens
  CDR3 for beta chain variable domain of TCR clone 73061 (TRBV7-9, IGHJ2)
CASSRTGGFNEKLFF

SEQ ID NO: 146123 - protein, 18 aa, Homo sapiens
  CDR3 for alpha chain variable domain of TCR clone 73062 (TRAV21, TRAJ52)
CAVRPSPAGGTSYGKLTF

SEQ ID NO: 146124 - protein, 13 aa, Homo sapiens
  CDR3 for beta chain variable domain of TCR clone 73062 (TRBV7-3, TRBJ1-1)
CASSQDWGAEASF

SEQ ID NO: 146125 - protein, 13 aa, Homo sapiens
  CDR3 for alpha chain variable domain of TCR clone 73063 (TRAV8-4, TRAJ49)
CAVGTLTGNQFYF

SEQ ID NO: 146126 - protein, 16 aa, Homo sapiens
  CDR3 for beta chain variable domain of TCR clone 73063 (TRBV5-7, TRBJ2-5)
CASTLAPAGGRETQYF

SEQ ID NO: 146127 - protein, 16 aa, Homo sapiens
  CDR3 for alpha chain variable domain of TCR clone 73064 (TRAV16, TRAJ42)
CARKMNYGGSQGNLIF

SEQ ID NO: 146128 - protein, 15 aa, Homo sapiens
  CDR3 for beta chain variable domain of TCR clone 73064 (TRBV6-3, TRBJ2-7)
CASSSPGTVFYEQYF

SEQ ID NO: 146129 - protein, 12 aa, Homo sapiens
  CDR3 for alpha chain variable domain of TCR clone 73065 (TRAV12-3, TRAJ17)
CAMTLTSNKLTF

SEQ ID NO: 146130 - protein, 15 aa, Homo sapiens
  CDR3 for beta chain variable domain of TCR clone 73065 (TRBV20-1, TRBJ2-7)
CSARDQVSGMDEQYF

SEQ ID NO: 146131 - protein, 14 aa, Homo sapiens
  CDR3 for alpha chain variable domain of TCR clone 73066 (TRAV8-1, TRAJ6)
CAVNASGGSYIPTF

SEQ ID NO: 146132 - protein, 13 aa, Homo sapiens
  CDR3 for beta chain variable domain of TCR clone 73066 (TRBV2, TRBJ1-5)
CASSQGGSQPKHF

SEQ ID NO: 146133 - protein, 16 aa, Homo sapiens
  CDR3 for alpha chain variable domain of TCR clone 73067 (TRAV30, TRAJ24)
CGTEIVDADSWGKFHF

SEQ ID NO: 146134 - protein, 15 aa, Homo sapiens
  CDR3 for beta chain variable domain of TCR clone 73067 (TRBV7-9, TRBJ1-4)
CASSARTGGNEKLFF

SEQ ID NO: 146135 - protein, 14 aa, Homo sapiens
  CDR3 for alpha chain variable domain of TCR clone 73068 (TRAV29/DV5, TRAJ36)
CAARRKTGANNLFF

SEQ ID NO: 146136 - protein, 15 aa, Homo sapiens
  CDR3 for beta chain variable domain of TCR clone 73068 (TRBV6-3, TRBJ2-2)
CASSFLATLTGELFF

SEQ ID NO: 146137 - protein, 13 aa, Homo sapiens
  CDR3 for alpha chain variable domain of TCR clone 73069 (TRAV30, TRAJ24)
CGTVTDSWGKLQF

SEQ ID NO: 146138 - protein, 16 aa, Homo sapiens
  CDR3 for beta chain variable domain of TCR clone 73069 (TRBV7-3, TRBJ2-2)
CASSLKWGTLSGELFF

SEQ ID NO: 146139 - protein, 13 aa, Homo sapiens
  CDR3 for alpha chain variable domain of TCR clone 73070 (TRAV13-1, TRAJ5)
CAARVTGRRALTF

SEQ ID NO: 146140 - protein, 15 aa, Homo sapiens
  CDR3 for beta chain variable domain of TCR clone 73070 (TRBV7-9, TRBJ2-7)
CASSPGGGLTYKQYF

SEQ ID NO: 146141 - protein, 15 aa, Homo sapiens
  CDR3 for alpha chain variable domain of TCR clone 73071 (TRAV25, TRAJ53)
CHTSNSGGSNYKLTF

SEQ ID NO: 146142 - protein, 14 aa, Homo sapiens
  CDR3 for beta chain variable domain of TCR clone 73071 (TRBV11-2, TRBJ2-3)
CASSRLARTDTQYF

SEQ ID NO: 146143 - protein, 14 aa, Homo sapiens
  CDR3 for alpha chain variable domain of TCR clone 73072 (TRAV12-2, TRAJ13)
CAVKKTGGYQKVTF

SEQ ID NO: 146144 - protein, 16 aa, Homo sapiens
  CDR3 for beta chain variable domain of TCR clone 73072 (TRBV7-8, TRBJ2-5)
CASSFGGQPAQETQYF

SEQ ID NO: 146145 - protein, 15 aa, Homo sapiens
  CDR3 for alpha chain variable domain of TCR clone 73073 (TRAV25, TRAJ52)
CAGRPGGTSYGKLTF

SEQ ID NO: 146146 - protein, 17 aa, Homo sapiens
  CDR3 for beta chain variable domain of TCR clone 73073 (TRBV7-8, TRBJ2-6)
CASSAGTGGVGANVLTF

SEQ ID NO: 146147 - protein, 15 aa, Homo sapiens
  CDR3 for alpha chain variable domain of TCR clone 73074 (TRAV13-1, TRAJ18)
CAASGGGSTLGRLYF

SEQ ID NO: 146148 - protein, 13 aa, Homo sapiens
  CDR3 for beta chain variable domain of TCR clone 73074 (TRBV18, TRBJ2-1)
CASGLASNNERFF

SEQ ID NO: 146149 - protein, 13 aa, Homo sapiens
  CDR3 for alpha chain variable domain of TCR clone 73075 (TRAV16, TRAJ34)
CALTGYNTDKLIF

SEQ ID NO: 146150 - protein, 13 aa, Homo sapiens
  CDR3 for beta chain variable domain of TCR clone 73075 (TRBV7-7, TRBJ2-3)
CASSLSRADTQYF

SEQ ID NO: 146151 - protein, 14 aa, Homo sapiens
  CDR3 for alpha chain variable domain of TCR clone 73076 (TRAV12-2, TRAJ13)
CAVKKTVGYQKVTF

SEQ ID NO: 146152 - protein, 12 aa, Homo sapiens
  CDR3 for beta chain variable domain of TCR clone 73076 (TRBV12-4, TRBJ1-2)
CASSFIWLHLRF

SEQ ID NO: 146153 - protein, 14 aa, Homo sapiens
  CDR3 for alpha chain variable domain of TCR clone 73077 (TRAV12-1, TRAJ12)
CVVTSGDSSYKLIF

SEQ ID NO: 146154 - protein, 15 aa, Homo sapiens
  CDR3 for beta chain variable domain of TCR clone 73077 (TRBV28, TRBJ2-1)
CASSIIAGGRSEQFF

SEQ ID NO: 146155 - protein, 13 aa, Homo sapiens
  CDR3 for alpha chain variable domain of TCR clone 73078 (TRAV13-1, TRAJ5)
CAASDTGRRALTF

SEQ ID NO: 146156 - protein, 16 aa, Homo sapiens
  CDR3 for beta chain variable domain of TCR clone 73078 (TRBV7-3, TRBJ2-2)
CASSLKRGTLSGELFF

SEQ ID NO: 146157 - protein, 12 aa, Homo sapiens
  CDR3 for alpha chain variable domain of TCR clone 73079 (TRAV26-2, TRAJ21)
CILKGNFNKFYF

SEQ ID NO: 146158 - protein, 14 aa, Homo sapiens
  CDR3 for beta chain variable domain of TCR clone 73079 (TRBV7-9, TRBJ1-1)
CASTTLQSYTEAFF

SEQ ID NO: 146159 - protein, 12 aa, Homo sapiens
  CDR3 for alpha chain variable domain of TCR clone 73080 (TRAV3, TRAJ20)
CAVRDPDYKLSF

SEQ ID NO: 146160 - protein, 14 aa, Homo sapiens
  CDR3 for beta chain variable domain of TCR clone 73080 (TRBV4-2, TRBJ2-1)
CASGLDRAYNEQFS

SEQ ID NO: 146161 - protein, 16 aa, Homo sapiens
  CDR3 for alpha chain variable domain of TCR clone 73081 (TRAV27, TRAJ52)
CAGAGAGGTSYGKLTF

SEQ ID NO: 146162 - protein, 12 aa, Homo sapiens
  CDR3 for beta chain variable domain of TCR clone 73081 (TRBV11-2, TRBJ2-2)
CASSLGGGELFF

SEQ ID NO: 146163 - protein, 16 aa, Homo sapiens
  CDR3 for alpha chain variable domain of TCR clone 73082 (TRAV38-1, TRAJ32)
RAFMPFLGGATNKLIF

SEQ ID NO: 146164 - protein, 13 aa, Homo sapiens
  CDR3 for beta chain variable domain of TCR clone 73082 (TRBV7-9, TRBJ2-7)
CASSFAGAYEQYF

SEQ ID NO: 146165 - protein, 14 aa, Homo sapiens
  CDR3 for alpha chain variable domain of TCR clone 73083 (TRAV1-2, TRAJ8)
CAVREDTGFQKLVF

SEQ ID NO: 146166 - protein, 15 aa, Homo sapiens
  CDR3 for beta chain variable domain of TCR clone 73083 (TRBV7-9, TRBJ1-4)
CASSAWTGGNEKLFF

SEQ ID NO: 146167 - protein, 11 aa, Homo sapiens
  CDR3 for alpha chain variable domain of TCR clone 73084 (TRAV23/DV6, TRAJ58)
CAARLLRGETS

SEQ ID NO: 146168 - protein, 13 aa, Homo sapiens
  CDR3 for beta chain variable domain of TCR clone 73084 (TRBV28, TRBJ2-5)
CASSFAGGETQYF

SEQ ID NO: 146169 - protein, 11 aa, Homo sapiens
  CDR3 for alpha chain variable domain of TCR clone 73085 (TRAV1-2, TRAJ40)
CAVPGTYKYIF

SEQ ID NO: 146170 - protein, 13 aa, Homo sapiens
  CDR3 for beta chain variable domain of TCR clone 73085 (TRBV4-2, TRBJ1-1)
CASSQAGNTEAFF

SEQ ID NO: 146171 - protein, 14 aa, Homo sapiens
  CDR3 for alpha chain variable domain of TCR clone 73086 (TRAV1-2, TRAJ16)
CAVNRFSDGQKLPF

SEQ ID NO: 146172 - protein, 19 aa, Homo sapiens
  CDR3 for beta chain variable domain of TCR clone 73086 (TRBV25-1, TRBJ2-2)
YAILVYRVDRGRKTGELFF

SEQ ID NO: 146173 - protein, 11 aa, Homo sapiens
  CDR3 for alpha chain variable domain of TCR clone 73087 (TRAV1-1, TRAJ20)
CAVFNDYKLSF

SEQ ID NO: 146174 - protein, 16 aa, Homo sapiens
  CDR3 for beta chain variable domain of TCR clone 73087 (TRBV29-1, TRBJ2-2)
CGVEKTSEGNTGELFF

SEQ ID NO: 146175 - protein, 14 aa, Homo sapiens
  CDR3 for alpha chain variable domain of TCR clone 73088 (TRAV12-2, TRAJ13)
CAVKKTGGYQKVTF

SEQ ID NO: 146176 - protein, 14 aa, Homo sapiens
  CDR3 for beta chain variable domain of TCR clone 73088 (TRBV19, TRBJ2-1)
CASPTFVLSGERFF

SEQ ID NO: 146177 - protein, 10 aa, Homo sapiens
  CDR3 for alpha chain variable domain of TCR clone 73089 (TRAV1-2, TRAJ20)
CAVTDYKLSF

SEQ ID NO: 146178 - protein, 13 aa, Homo sapiens
  CDR3 for beta chain variable domain of TCR clone 73089 (TRBV7-9, TRBJ1-2)
CASSLKQNYGYTF

SEQ ID NO: 146179 - protein, 12 aa, Homo sapiens
  CDR3 for alpha chain variable domain of TCR clone 73090 (TRAV3, TRAJ20)
CAVRDPDYKLSF

SEQ ID NO: 146180 - protein, 14 aa, Homo sapiens
  CDR3 for beta chain variable domain of TCR clone 73090 (TRBV6-1, TRBJ1-3)
CASVQGGGGNTIYF

SEQ ID NO: 146181 - protein, 16 aa, Homo sapiens
  CDR3 for alpha chain variable domain of TCR clone 73091 (TRAV23/DV6, TRAJ9)
CAASIGGNTGGFKTIF

SEQ ID NO: 146182 - protein, 13 aa, Homo sapiens
  CDR3 for beta chain variable domain of TCR clone 73091 (TRBV12-4, TRBJ2-7)
CASSPTETYEQYF

SEQ ID NO: 146183 - protein, 12 aa, Homo sapiens
  CDR3 for alpha chain variable domain of TCR clone 73092 (TRAV13-2, TRAJ23)
CAERHRGGKLIF

SEQ ID NO: 146184 - protein, 15 aa, Homo sapiens
  CDR3 for beta chain variable domain of TCR clone 73092 (TRBV7-9, TRBJ1-6)
CTSSSPRRGNSPLHF

SEQ ID NO: 146185 - protein, 17 aa, Homo sapiens
  CDR3 for alpha chain variable domain of TCR clone 73093 (TRAV3, TRAJ13)
CAVRDMRRTGGYQKVTF

SEQ ID NO: 146186 - protein, 13 aa, Homo sapiens
  CDR3 for beta chain variable domain of TCR clone 73093 (TRBV19, TRBJ1-2)
CASSVPGQDGYTF

SEQ ID NO: 146187 - protein, 12 aa, Homo sapiens
  CDR3 for alpha chain variable domain of TCR clone 73094 (TRAV8-3, TRAJ26)
CAGDNYGQNFVF

SEQ ID NO: 146188 - protein, 18 aa, Homo sapiens
  CDR3 for beta chain variable domain of TCR clone 73094 (TRBV12-4, TRBJ2-2)
CASSLVAGTRGRTGEPFF

SEQ ID NO: 146189 - protein, 20 aa, Homo sapiens
  CDR3 for alpha chain variable domain of TCR clone 73095 (TRAV12-1, )
CVVLRGIPDIQNPDPAVYQL

SEQ ID NO: 146190 - protein, 15 aa, Homo sapiens
  CDR3 for beta chain variable domain of TCR clone 73095 (TRBV2, TRBJ2-1)
CASSEARSAYNEQFF

SEQ ID NO: 146191 - protein, 16 aa, Homo sapiens
  CDR3 for alpha chain variable domain of TCR clone 73096 (TRAV30, TRAJ24)
CGTEIVDANSWGKFQF

SEQ ID NO: 146192 - protein, 15 aa, Homo sapiens
  CDR3 for beta chain variable domain of TCR clone 73096 (TRBV5-1, TRBJ2-2)
CASSSQGGNTGELFF

SEQ ID NO: 146193 - protein, 15 aa, Homo sapiens
  CDR3 for alpha chain variable domain of TCR clone 73097 (TRAV12-3, TRAJ6)
CAMSATTGGSYIPTF

SEQ ID NO: 146194 - protein, 16 aa, Homo sapiens
  CDR3 for beta chain variable domain of TCR clone 73097 (TRBV20-1, TRBJ1-2)
CSASMGQGVDNYGYTF

SEQ ID NO: 146195 - protein, 11 aa, Homo sapiens
  CDR3 for alpha chain variable domain of TCR clone 73098 (TRAV27, TRAJ43)
CAGANNNDMRF

SEQ ID NO: 146196 - protein, 15 aa, Homo sapiens
  CDR3 for beta chain variable domain of TCR clone 73098 (TRBV11-3, TRBJ2-3)
CASLKDGREGDTQYF

SEQ ID NO: 146197 - protein, 12 aa, Homo sapiens
  CDR3 for alpha chain variable domain of TCR clone 73099 (TRAV8-3, TRAJ26)
CAGDNYGQNFVF

SEQ ID NO: 146198 - protein, 11 aa, Homo sapiens
  CDR3 for beta chain variable domain of TCR clone 73099 (TRBV29-1, TRBJ2-5)
RSENRTGTQYF

SEQ ID NO: 146199 - protein, 12 aa, Homo sapiens
  CDR3 for alpha chain variable domain of TCR clone 73100 (TRAV36/DV7, TRAJ21)
CAAKEGFNKFYF

SEQ ID NO: 146200 - protein, 13 aa, Homo sapiens
  CDR3 for beta chain variable domain of TCR clone 73100 (TRBV19, TRBJ2-7)
CASSPRQSYEQYF

SEQ ID NO: 146201 - protein, 17 aa, Homo sapiens
  CDR3 for alpha chain variable domain of TCR clone 73101 (TRAV17, TRAJ7)
CATLGRLAFGKGKQVVV

SEQ ID NO: 146202 - protein, 13 aa, Homo sapiens
  CDR3 for beta chain variable domain of TCR clone 73101 (TRBV12-4, TRBJ2-7)
CASSLERVREQYF

SEQ ID NO: 146203 - protein, 15 aa, Homo sapiens
  CDR3 for alpha chain variable domain of TCR clone 73102 (TRAV26-1, TRAJ48)
CIARWSGFGNEKLTF

SEQ ID NO: 146204 - protein, 12 aa, Homo sapiens
  CDR3 for beta chain variable domain of TCR clone 73102 (TRBV19, TRBJ2-5)
CASSISEETQYF

SEQ ID NO: 146205 - protein, 18 aa, Homo sapiens
  CDR3 for alpha chain variable domain of TCR clone 73103 (TRAV26-1, TRAJ22)
CIVRVAFISSGSARQLTF

SEQ ID NO: 146206 - protein, 13 aa, Homo sapiens
  CDR3 for beta chain variable domain of TCR clone 73103 (TRBV13, TRBJ2-5)
CASSPEVGETQYF

SEQ ID NO: 146207 - protein, 15 aa, Homo sapiens
  CDR3 for alpha chain variable domain of TCR clone 73104 (TRAV13-1, TRAJ5)
CAASRADTGRRALTF

SEQ ID NO: 146208 - protein, 16 aa, Homo sapiens
  CDR3 for beta chain variable domain of TCR clone 73104 (TRBV7-2, TRBJ2-1)
CASSLGRTSGDNEQFF

SEQ ID NO: 146209 - protein, 18 aa, Homo sapiens
  CDR3 for alpha chain variable domain of TCR clone 73105 (TRAV21, TRAJ52)
CAVRPSPAGGTSYGKLTF

SEQ ID NO: 146210 - protein, 14 aa, Homo sapiens
  CDR3 for beta chain variable domain of TCR clone 73105 (TRBV7-9, TRBJ2-7)
CASSLDRPTDEQYF

SEQ ID NO: 146211 - protein, 19 aa, Homo sapiens
  CDR3 for alpha chain variable domain of TCR clone 73106 (TRAV25, TRAJ43)
TATQTTDVGTYFCAVFMRF

SEQ ID NO: 146212 - protein, 13 aa, Homo sapiens
  CDR3 for beta chain variable domain of TCR clone 73106 (TRBV7-9, TRBJ1-2)
CASSLKQNYGYTY

SEQ ID NO: 146213 - protein, 13 aa, Homo sapiens
  CDR3 for alpha chain variable domain of TCR clone 73107 (TRAV12-3, TRAJ33)
CAMSLNSNCQLIW

SEQ ID NO: 146214 - protein, 13 aa, Homo sapiens
  CDR3 for beta chain variable domain of TCR clone 73107 (TRBV7-2, TRBJ2-2)
CASSLAVTGELFF

SEQ ID NO: 146215 - protein, 13 aa, Homo sapiens
  CDR3 for alpha chain variable domain of TCR clone 73108 (TRAV21, TRAJ57)
CAVAQGGSEELVF

SEQ ID NO: 146216 - protein, 16 aa, Homo sapiens
  CDR3 for beta chain variable domain of TCR clone 73108 (TRBV29-1, TRBJ2-7)
CSVEDAEDGTAYEQYF

SEQ ID NO: 146217 - protein, 13 aa, Homo sapiens
  CDR3 for alpha chain variable domain of TCR clone 73109 (TRAV13-2, TRAJ40)
CAEFTSGTYKYIF

SEQ ID NO: 146218 - protein, 14 aa, Homo sapiens
  CDR3 for beta chain variable domain of TCR clone 73109 (TRBV10-2, TRBJ1-5)
RASSSTGRNQPQHF

SEQ ID NO: 146219 - protein, 13 aa, Homo sapiens
  CDR3 for alpha chain variable domain of TCR clone 73110 (TRAV13-2, TRAJ48)
CAEMDFGNEKLPF

SEQ ID NO: 146220 - protein, 15 aa, Homo sapiens
  CDR3 for beta chain variable domain of TCR clone 73110 (TRBV7-9, TRBJ1-6)
CASSSPGRGNSPLHF

SEQ ID NO: 146221 - protein, 14 aa, Homo sapiens
  CDR3 for alpha chain variable domain of TCR clone 73111 (TRAV8-4, TRAJ9)
RAVSDRTGGFKTIF

SEQ ID NO: 146222 - protein, 13 aa, Homo sapiens
  CDR3 for beta chain variable domain of TCR clone 73111 (TRBV11-2, TRBJ2-7)
CASSLGDSYEQYF

SEQ ID NO: 146223 - protein, 12 aa, Homo sapiens
  CDR3 for alpha chain variable domain of TCR clone 73112 (TRAV8-3, TRAJ43)
CAVGAGNNDMRF

SEQ ID NO: 146224 - protein, 16 aa, Homo sapiens
  CDR3 for beta chain variable domain of TCR clone 73112 (TRBV19, TRBJ2-1)
CASSSKGTRSYNEQFF

SEQ ID NO: 146225 - protein, 11 aa, Homo sapiens
  CDR3 for alpha chain variable domain of TCR clone 73113 (TRAV2, TRAJ13)
CASGGYQKVTF

SEQ ID NO: 146226 - protein, 17 aa, Homo sapiens
  CDR3 for beta chain variable domain of TCR clone 73113 (TRBV20-1, TRBJ2-2)
CSASGSGQCGLTGELFF

SEQ ID NO: 146227 - protein, 12 aa, Homo sapiens
  CDR3 for alpha chain variable domain of TCR clone 73114 (TRAV1-2, TRAJ42)
CVAGGSQGNLIF

SEQ ID NO: 146228 - protein, 13 aa, Homo sapiens
  CDR3 for beta chain variable domain of TCR clone 73114 (TRBV7-9, TRBJ2-5)
CASLPSGRETQYF

SEQ ID NO: 146229 - protein, 17 aa, Homo sapiens
  CDR3 for alpha chain variable domain of TCR clone 73115 (TRAV27, TRAJ42)
CAERVIYYGGSQGNLIF

SEQ ID NO: 146230 - protein, 13 aa, Homo sapiens
  CDR3 for beta chain variable domain of TCR clone 73115 (TRBV7-3, TRBJ1-1)
CASSQDWGAEAFF

SEQ ID NO: 146231 - protein, 13 aa, Homo sapiens
  CDR3 for alpha chain variable domain of TCR clone 73116 (TRAV8-3, TRAJ15)
CAVGIQAGTALIF

SEQ ID NO: 146232 - protein, 17 aa, Homo sapiens
  CDR3 for beta chain variable domain of TCR clone 73116 (TRBV20-1, TRBJ2-1)
CSAREPLAGVSYNEQFF

SEQ ID NO: 146233 - protein, 13 aa, Homo sapiens
  CDR3 for alpha chain variable domain of TCR clone 73117 (TRAV12-3, TRAJ43)
CAMILPNNNDMRF

SEQ ID NO: 146234 - protein, 12 aa, Homo sapiens
  CDR3 for beta chain variable domain of TCR clone 73117 (TRBV11-2, TRBJ2-5)
CASSLGQETQYF

SEQ ID NO: 146235 - protein, 15 aa, Homo sapiens
  CDR3 for alpha chain variable domain of TCR clone 73118 (TRAV13-2, TRAJ45)
CAENNSGGGADGLTF

SEQ ID NO: 146236 - protein, 13 aa, Homo sapiens
  CDR3 for beta chain variable domain of TCR clone 73118 (TRBV7-7, TRBJ2-5)
CASSRSGQETQYF

SEQ ID NO: 146237 - protein, 13 aa, Homo sapiens
  CDR3 for alpha chain variable domain of TCR clone 73119 (TRAV35, TRAJ44)
CAGLSGTASKLTF

SEQ ID NO: 146238 - protein, 15 aa, Homo sapiens
  CDR3 for beta chain variable domain of TCR clone 73119 (TRBV7-2, TRBJ2-1)
CASSFQADEYNEQFF

SEQ ID NO: 146239 - protein, 21 aa, Homo sapiens
  CDR3 for alpha chain variable domain of TCR clone 73120 (TRAV17, TRAJ53)
TASRAADTASQGGGSNYKLTF

SEQ ID NO: 146240 - protein, 15 aa, Homo sapiens
  CDR3 for beta chain variable domain of TCR clone 73120 (TRBV7-2, TRBJ2-1)
CASSLVLAGGNEQFF

SEQ ID NO: 146241 - protein, 13 aa, Homo sapiens
  CDR3 for alpha chain variable domain of TCR clone 73121 (TRAV26-1, TRAJ29)
CIVRRSGNSPLVF

SEQ ID NO: 146242 - protein, 16 aa, Homo sapiens
  CDR3 for beta chain variable domain of TCR clone 73121 (TRBV11-2, TRBJ2-7)
CASSLAPTGVNYEQYF

SEQ ID NO: 146243 - protein, 16 aa, Homo sapiens
  CDR3 for alpha chain variable domain of TCR clone 73122 (TRAV20, TRAJ22)
CAVQASSSGSARQLTF

SEQ ID NO: 146244 - protein, 13 aa, Homo sapiens
  CDR3 for beta chain variable domain of TCR clone 73122 (TRBV7-2, TRBJ2-5)
CASNQTSVETQYF

SEQ ID NO: 146245 - protein, 16 aa, Homo sapiens
  CDR3 for alpha chain variable domain of TCR clone 73123 (TRAV3, TRAJ10)
CAVRDMNAGGGNKLTF

SEQ ID NO: 146246 - protein, 14 aa, Homo sapiens
  CDR3 for beta chain variable domain of TCR clone 73123 (TRBV6-1, TRBJ1-3)
CASVQGGGGNTIYF

SEQ ID NO: 146247 - protein, 10 aa, Homo sapiens
  CDR3 for alpha chain variable domain of TCR clone 73124 (TRAV2, TRAJ34)
CAVVNDKLIF

SEQ ID NO: 146248 - protein, 20 aa, Homo sapiens
  CDR3 for beta chain variable domain of TCR clone 73124 (TRBV19, TRBJ2-1)
CASSISRTVTSTRLNNEQFS

SEQ ID NO: 146249 - protein, 14 aa, Homo sapiens
  CDR3 for alpha chain variable domain of TCR clone 73125 (TRAV1-2, TRAJ8)
CAVREDTGFQKLVF

SEQ ID NO: 146250 - protein, 16 aa, Homo sapiens
  CDR3 for beta chain variable domain of TCR clone 73125 (TRBV12-4, TRBJ2-7)
CASSLIGGTGTYEQYF

SEQ ID NO: 146251 - protein, 13 aa, Homo sapiens
  CDR3 for alpha chain variable domain of TCR clone 73126 (TRAV12-2, TRAJ13)
CAVKKTGGYQSYL

SEQ ID NO: 146252 - protein, 15 aa, Homo sapiens
  CDR3 for beta chain variable domain of TCR clone 73126 (TRBV27, TRBJ2-1)
CASSNGGGSSNEQFF

SEQ ID NO: 146253 - protein, 17 aa, Homo sapiens
  CDR3 for alpha chain variable domain of TCR clone 73127 (TRAV23/DV6, TRAJ57)
CAASATLSQGGSEKLVF

SEQ ID NO: 146254 - protein, 14 aa, Homo sapiens
  CDR3 for beta chain variable domain of TCR clone 73127 (TRBV25-1, TRBJ1-1)
CASTHLGGNTEAFF

SEQ ID NO: 146255 - protein, 14 aa, Homo sapiens
  CDR3 for alpha chain variable domain of TCR clone 73128 (TRAV12-3, TRAJ10)
SHLPLTGGGNKLTF

SEQ ID NO: 146256 - protein, 16 aa, Homo sapiens
  CDR3 for beta chain variable domain of TCR clone 73128 (TRBV5-1, TRBJ2-1)
CASSIRSGGSYNEQFF

SEQ ID NO: 146257 - protein, 14 aa, Homo sapiens
  CDR3 for alpha chain variable domain of TCR clone 73129 (TRAV12-2, TRAJ53)
CAVKGGGSNYKLTF

SEQ ID NO: 146258 - protein, 15 aa, Homo sapiens
  CDR3 for beta chain variable domain of TCR clone 73129 (TRBV12-4, TRBJ2-5)
CAGSPPTGLQETQYF

SEQ ID NO: 146259 - protein, 17 aa, Homo sapiens
  CDR3 for alpha chain variable domain of TCR clone 73130 (TRAV4, TRAJ42)
CLVGVLNYGGSQGNLIF

SEQ ID NO: 146260 - protein, 12 aa, Homo sapiens
  CDR3 for beta chain variable domain of TCR clone 73130 (TRBV20-1, TRBJ2-1)
CSAQYTYNEKFF

SEQ ID NO: 146261 - protein, 15 aa, Homo sapiens
  CDR3 for alpha chain variable domain of TCR clone 73131 (TRAV2, TRAJ9)
CAVEDRGTGGFKTIF

SEQ ID NO: 146262 - protein, 16 aa, Homo sapiens
  CDR3 for beta chain variable domain of TCR clone 73131 (TRBV24-1, TRBJ2-3)
CATSDPGTGATDTQYL

SEQ ID NO: 146263 - protein, 11 aa, Homo sapiens
  CDR3 for alpha chain variable domain of TCR clone 73132 (TRAV2, TRAJ13)
CASGGYQKVTF

SEQ ID NO: 146264 - protein, 14 aa, Homo sapiens
  CDR3 for beta chain variable domain of TCR clone 73132 (TRBV5-1, TRBJ2-7)
CASSRGESLYEQYF

SEQ ID NO: 146265 - protein, 14 aa, Homo sapiens
  CDR3 for alpha chain variable domain of TCR clone 73133 (TRAV12-1, TRAJ42)
CVVIYGGSQGNLIF

SEQ ID NO: 146266 - protein, 13 aa, Homo sapiens
  CDR3 for beta chain variable domain of TCR clone 73133 (TRBV18, TRBJ2-5)
YASSPPGKETQYF

SEQ ID NO: 146267 - protein, 12 aa, Homo sapiens
  CDR3 for alpha chain variable domain of TCR clone 73134 (TRAV2, TRAJ9)
CAVGAGGFKTIF

SEQ ID NO: 146268 - protein, 16 aa, Homo sapiens
  CDR3 for beta chain variable domain of TCR clone 73134 (TRBV7-9, TRBJ2-1)
CASSDVAGGSYNEQFF

SEQ ID NO: 146269 - protein, 22 aa, Homo sapiens
  CDR3 for alpha chain variable domain of TCR clone 73135 (TRAV26-1, TRAJ42)
CIVRPITEEAKEISSLEKALNS

SEQ ID NO: 146270 - protein, 16 aa, Homo sapiens
  CDR3 for beta chain variable domain of TCR clone 73135 (TRBV7-3, TRBJ2-2)
CASSLKRGTLSGELFF

SEQ ID NO: 146271 - protein, 15 aa, Homo sapiens
  CDR3 for alpha chain variable domain of TCR clone 73136 (TRAV26-1, TRAJ29)
CIVRVEGSGDTPLVF

SEQ ID NO: 146272 - protein, 14 aa, Homo sapiens
  CDR3 for beta chain variable domain of TCR clone 73136 (TRBV18, TRBJ2-5)
CASSPGVSQETRYF

SEQ ID NO: 146273 - protein, 16 aa, Homo sapiens
  CDR3 for alpha chain variable domain of TCR clone 73137 (TRAV30, TRAJ24)
CGTEIVDADSWGKFQF

SEQ ID NO: 146274 - protein, 12 aa, Homo sapiens
  CDR3 for beta chain variable domain of TCR clone 73137 (TRBV11-2, TRBJ2-5)
CASSLDTQTQYF

SEQ ID NO: 146275 - protein, 18 aa, Homo sapiens
  CDR3 for alpha chain variable domain of TCR clone 73138 (TRAV29/DV5, TRAJ52)
CAAGFRGAGGTSYGMLTF

SEQ ID NO: 146276 - protein, 16 aa, Homo sapiens
  CDR3 for beta chain variable domain of TCR clone 73138 (TRBV7-3, TRBJ2-2)
CASSLKRGTLSGELFF

SEQ ID NO: 146277 - protein, 16 aa, Homo sapiens
  CDR3 for alpha chain variable domain of TCR clone 73139 (TRAV3, TRAJ18)
CAVRDGSGSTLGRLYF

SEQ ID NO: 146278 - protein, 15 aa, Homo sapiens
  CDR3 for beta chain variable domain of TCR clone 73139 (TRBV7-9, TRBJ1-6)
CASSSPGRGNSPLHF

SEQ ID NO: 146279 - protein, 16 aa, Homo sapiens
  CDR3 for alpha chain variable domain of TCR clone 73140 (TRAV3, TRAJ37)
CAVRGKGSGNTGKLIF

SEQ ID NO: 146280 - protein, 12 aa, Homo sapiens
  CDR3 for beta chain variable domain of TCR clone 73140 (TRBV11-2, TRBJ2-2)
RASSLGGGELFF

SEQ ID NO: 146281 - protein, 16 aa, Homo sapiens
  CDR3 for alpha chain variable domain of TCR clone 73141 (TRAV30, TRAJ24)
CDTEIVDADSWGKFQF

SEQ ID NO: 146282 - protein, 16 aa, Homo sapiens
  CDR3 for beta chain variable domain of TCR clone 73141 (TRBV28, TRBJ2-7)
CASSLFFETGGPEQYF

SEQ ID NO: 146283 - protein, 19 aa, Homo sapiens
  CDR3 for alpha chain variable domain of TCR clone 73142 (TRAV26-1, TRAJ52)
CIVRAHRNAGGISYGKLSF

SEQ ID NO: 146284 - protein, 15 aa, Homo sapiens
  CDR3 for beta chain variable domain of TCR clone 73142 (TRBV29-1, TRBJ2-1)
CSGRDRKSSYNEQFF

SEQ ID NO: 146285 - protein, 15 aa, Homo sapiens
  CDR3 for alpha chain variable domain of TCR clone 73143 (TRAV2, TRAJ15)
CAVEDRGQAGTALIF

SEQ ID NO: 146286 - protein, 16 aa, Homo sapiens
  CDR3 for beta chain variable domain of TCR clone 73143 (TRBV12-4, TRBJ1-5)
CASSRPVGGSNQPQHF

SEQ ID NO: 146287 - protein, 12 aa, Homo sapiens
  CDR3 for alpha chain variable domain of TCR clone 73144 (TRAV16, TRAJ10)
FSRTGGGNKLTF

SEQ ID NO: 146288 - protein, 15 aa, Homo sapiens
  CDR3 for beta chain variable domain of TCR clone 73144 (TRBV6-3, TRBJ2-7)
CASSSPGTVFYEQYF

SEQ ID NO: 146289 - protein, 14 aa, Homo sapiens
  CDR3 for alpha chain variable domain of TCR clone 73145 (TRAV12-1, TRAJ12)
CVVTRMDSSYKLIF

SEQ ID NO: 146290 - protein, 15 aa, Homo sapiens
  CDR3 for beta chain variable domain of TCR clone 73145 (TRBV7-8, TRBJ2-1)
CASSSGLAGGNKQFF

SEQ ID NO: 146291 - protein, 11 aa, Homo sapiens
  CDR3 for alpha chain variable domain of TCR clone 73146 (TRAV21, TRAJ9)
CAVPGGFKTIF

SEQ ID NO: 146292 - protein, 12 aa, Homo sapiens
  CDR3 for beta chain variable domain of TCR clone 73146 (TRBV20-1, TRBJ2-3)
CSARVGTDTRYF

SEQ ID NO: 146293 - protein, 16 aa, Homo sapiens
  CDR3 for alpha chain variable domain of TCR clone 73147 (TRAV23/DV6, TRAJ9)
CAASIGGNTGGFKTIL

SEQ ID NO: 146294 - protein, 14 aa, Homo sapiens
  CDR3 for beta chain variable domain of TCR clone 73147 (TRBV6-1, TRBJ2-5)
CASSYAGGEETQYF

SEQ ID NO: 146295 - protein, 13 aa, Homo sapiens
  CDR3 for alpha chain variable domain of TCR clone 73148 (TRAV13-1, TRAJ12)
CAASPDSSYKLIF

SEQ ID NO: 146296 - protein, 16 aa, Homo sapiens
  CDR3 for beta chain variable domain of TCR clone 73148 (TRBV15, TRBJ2-1)
CATSRERLAGAYEQLF

SEQ ID NO: 146297 - protein, 16 aa, Homo sapiens
  CDR3 for alpha chain variable domain of TCR clone 73149 (TRAV21, TRAJ37)
CAVRTAGSSNTGKLIF

SEQ ID NO: 146298 - protein, 14 aa, Homo sapiens
  CDR3 for beta chain variable domain of TCR clone 73149 (TRBV12-5, TRBJ2-5)
CASGSRTHQETQYF

SEQ ID NO: 146299 - protein, 16 aa, Homo sapiens
  CDR3 for alpha chain variable domain of TCR clone 73150 (TRAV30, TRAJ24)
CGTEIVDADSWGKFRF

SEQ ID NO: 146300 - protein, 17 aa, Homo sapiens
  CDR3 for beta chain variable domain of TCR clone 73150 (TRBV20-1, TRBJ2-1)
CSARDRRRASSYNEQFF

SEQ ID NO: 146301 - protein, 11 aa, Homo sapiens
  CDR3 for alpha chain variable domain of TCR clone 73151 (TRAV2, TRAJ13)
CASGGYQKVTF

SEQ ID NO: 146302 - protein, 15 aa, Homo sapiens
  CDR3 for beta chain variable domain of TCR clone 73151 (TRBV13, TRBJ1-5)
CAGSFGQGGVQPQHF

SEQ ID NO: 146303 - protein, 13 aa, Homo sapiens
  CDR3 for alpha chain variable domain of TCR clone 73152 (TRAV39, TRAJ58)
CAGEETSGSRLTF

SEQ ID NO: 146304 - protein, 15 aa, Homo sapiens
  CDR3 for beta chain variable domain of TCR clone 73152 (TRBV20-1, TRBJ2-7)
CSTRDRVSGMDEQYF

SEQ ID NO: 146305 - protein, 13 aa, Homo sapiens
  CDR3 for alpha chain variable domain of TCR clone 73153 (TRAV20, TRAJ21)
CAVEGYNFNKFYL

SEQ ID NO: 146306 - protein, 14 aa, Homo sapiens
  CDR3 for beta chain variable domain of TCR clone 73153 (TRBV12-5, TRBJ2-5)
CASGSRTHQETQYF

SEQ ID NO: 146307 - protein, 16 aa, Homo sapiens
  CDR3 for alpha chain variable domain of TCR clone 73154 (TRAV12-3, TRAJ53)
CAMSPGSGGSNYELTF

SEQ ID NO: 146308 - protein, 11 aa, Homo sapiens
  CDR3 for beta chain variable domain of TCR clone 73154 (TRBV29-1, TRBJ2-5)
RSEDRTGTQYF

SEQ ID NO: 146309 - protein, 15 aa, Homo sapiens
  CDR3 for alpha chain variable domain of TCR clone 73155 (TRAV13-1, TRAJ44)
CAASRGGGTASKLTF

SEQ ID NO: 146310 - protein, 14 aa, Homo sapiens
  CDR3 for beta chain variable domain of TCR clone 73155 (TRBV19, TRBJ2-1)
CASPTFVLSGEQFF

SEQ ID NO: 146311 - protein, 11 aa, Homo sapiens
  CDR3 for alpha chain variable domain of TCR clone 73156 (TRAV2, TRAJ33)
CAVDSNYQLIW

SEQ ID NO: 146312 - protein, 15 aa, Homo sapiens
  CDR3 for beta chain variable domain of TCR clone 73156 (TRBV19, TRBJ1-2)
CGSSVGQVLNYGYTF

SEQ ID NO: 146313 - protein, 15 aa, Homo sapiens
  CDR3 for alpha chain variable domain of TCR clone 73157 (TRAV8-3, TRAJ45)
CASSYSGGGAGGLTF

SEQ ID NO: 146314 - protein, 12 aa, Homo sapiens
  CDR3 for beta chain variable domain of TCR clone 73157 (TRBV12-4, TRBJ2-7)
CASSLGGYEQYF

SEQ ID NO: 146315 - protein, 11 aa, Homo sapiens
  CDR3 for alpha chain variable domain of TCR clone 73158 (TRAV3, TRAJ21)
CAVGNFNKFYF

SEQ ID NO: 146316 - protein, 16 aa, Homo sapiens
  CDR3 for beta chain variable domain of TCR clone 73158 (TRBV19, TRBJ2-1)
CASRRRDRAPTMSSSS

SEQ ID NO: 146317 - protein, 14 aa, Homo sapiens
  CDR3 for alpha chain variable domain of TCR clone 73159 (TRAV1-2, TRAJ16)
CAVNRFSDGQKLLF

SEQ ID NO: 146318 - protein, 11 aa, Homo sapiens
  CDR3 for beta chain variable domain of TCR clone 73159 (TRBV29-1, TRBJ2-5)
CSEDRTGTQYL

SEQ ID NO: 146319 - protein, 13 aa, Homo sapiens
  CDR3 for alpha chain variable domain of TCR clone 73160 (TRAV20, TRAJ3)
CARRYSSASKIIF

SEQ ID NO: 146320 - protein, 12 aa, Homo sapiens
  CDR3 for beta chain variable domain of TCR clone 73160 (TRBV28, TRBJ2-1)
CASRFRGNEQFF

SEQ ID NO: 146321 - protein, 15 aa, Homo sapiens
  CDR3 for alpha chain variable domain of TCR clone 73161 (TRAV19, TRAJ23)
CALSEVGNQGGKLIF

SEQ ID NO: 146322 - protein, 13 aa, Homo sapiens
  CDR3 for beta chain variable domain of TCR clone 73161 (TRBV7-9, TRBJ1-2)
CASSLKQNYGYTL

SEQ ID NO: 146323 - protein, 12 aa, Homo sapiens
  CDR3 for alpha chain variable domain of TCR clone 73162 (TRAV21, TRAJ43)
CAVSWNNNDIRF

SEQ ID NO: 146324 - protein, 15 aa, Homo sapiens
  CDR3 for beta chain variable domain of TCR clone 73162 (TRBV20-1, TRBJ2-1)
CSASPPSGGYNEQFF

SEQ ID NO: 146325 - protein, 15 aa, Homo sapiens
  CDR3 for alpha chain variable domain of TCR clone 73163 (TRAV13-1, TRAJ57)
QVPPLSQGGSEKLVF

SEQ ID NO: 146326 - protein, 17 aa, Homo sapiens
  CDR3 for beta chain variable domain of TCR clone 73163 (TRBV7-3, TRBJ2-3)
CASSLMKGMRGADTQYF

SEQ ID NO: 146327 - protein, 17 aa, Homo sapiens
  CDR3 for alpha chain variable domain of TCR clone 73164 (TRAV3, TRAJ38)
CAVRDCLNAGNNRQLIW

SEQ ID NO: 146328 - protein, 14 aa, Homo sapiens
  CDR3 for beta chain variable domain of TCR clone 73164 (TRBV5-5, TRBJ1-5)
CASSGQGVDQPQHF

SEQ ID NO: 146329 - protein, 14 aa, Homo sapiens
  CDR3 for alpha chain variable domain of TCR clone 73165 (TRAV38-1, TRAJ35)
CALLTIGFGNVLHC

SEQ ID NO: 146330 - protein, 17 aa, Homo sapiens
  CDR3 for beta chain variable domain of TCR clone 73165 (TRBV28, TRBJ1-1)
CASSGDLRTESNTEAFF

SEQ ID NO: 146331 - protein, 13 aa, Homo sapiens
  CDR3 for alpha chain variable domain of TCR clone 73166 (TRAV1-2, TRAJ9)
RAVLNTGGFKTIF

SEQ ID NO: 146332 - protein, 14 aa, Homo sapiens
  CDR3 for beta chain variable domain of TCR clone 73166 (TRBV20-1, TRBJ2-3)
CSARGGTSTDTQYF

SEQ ID NO: 146333 - protein, 17 aa, Homo sapiens
  CDR3 for alpha chain variable domain of TCR clone 73167 (TRAV3, TRAJ6)
CAVRDGPRAGGSYIPTF

SEQ ID NO: 146334 - protein, 14 aa, Homo sapiens
  CDR3 for beta chain variable domain of TCR clone 73167 (TRBV11-2, TRBJ2-5)
CASRPLAGRETQYF

SEQ ID NO: 146335 - protein, 14 aa, Homo sapiens
  CDR3 for alpha chain variable domain of TCR clone 73168 (TRAV12-2, TRAJ40)
CAVKIPPGTYKYIF

SEQ ID NO: 146336 - protein, 14 aa, Homo sapiens
  CDR3 for beta chain variable domain of TCR clone 73168 (TRBV7-8, TRBJ2-7)
CASSPRDRVYEQYF

SEQ ID NO: 146337 - protein, 12 aa, Homo sapiens
  CDR3 for alpha chain variable domain of TCR clone 73169 (TRAV12-1, TRAJ6)
CVVSERSHIPTF

SEQ ID NO: 146338 - protein, 21 aa, Homo sapiens
  CDR3 for beta chain variable domain of TCR clone 73169 (TRBV7-3, TRBJ2-1)
GGTQPCISVPAAYGLAGAQFF

SEQ ID NO: 146339 - protein, 14 aa, Homo sapiens
  CDR3 for alpha chain variable domain of TCR clone 73170 (TRAV12-2, TRAJ44)
CAVNPAGTASKLTF

SEQ ID NO: 146340 - protein, 13 aa, Homo sapiens
  CDR3 for beta chain variable domain of TCR clone 73170 (TRBV20-1, TRBJ1-6)
CSAPLGVGSALHF

SEQ ID NO: 146341 - protein, 14 aa, Homo sapiens
  CDR3 for alpha chain variable domain of TCR clone 73171 (TRAV21, TRAJ35)
CAVMPIGFGNVLHC

SEQ ID NO: 146342 - protein, 15 aa, Homo sapiens
  CDR3 for beta chain variable domain of TCR clone 73171 (TRBV28, TRBJ2-3)
CASSPDRQGANTQYF

SEQ ID NO: 146343 - protein, 13 aa, Homo sapiens
  CDR3 for alpha chain variable domain of TCR clone 73172 (TRAV2, TRAJ40)
RAVVTSGTYKYIF

SEQ ID NO: 146344 - protein, 17 aa, Homo sapiens
  CDR3 for beta chain variable domain of TCR clone 73172 (TRBV7-3, TRBJ2-3)
CASSLMKRMRGADTQYF

SEQ ID NO: 146345 - protein, 14 aa, Homo sapiens
  CDR3 for alpha chain variable domain of TCR clone 73173 (TRAV1-2, TRAJ16)
CAVNRFSDCQKLLF

SEQ ID NO: 146346 - protein, 16 aa, Homo sapiens
  CDR3 for beta chain variable domain of TCR clone 73173 (TRBV12-5, TRBJ2-5)
CASGPRTSGNQETQYF

SEQ ID NO: 146347 - protein, 14 aa, Homo sapiens
  CDR3 for alpha chain variable domain of TCR clone 73174 (TRAV17, TRAJ57)
CATDPQGGSEKLVF

SEQ ID NO: 146348 - protein, 16 aa, Homo sapiens
  CDR3 for beta chain variable domain of TCR clone 73174 (TRBV18, TRBJ1-5)
CASTPSTGNSNQPQHF

SEQ ID NO: 146349 - protein, 12 aa, Homo sapiens
  CDR3 for alpha chain variable domain of TCR clone 73175 (TRAV8-3, TRAJ26)
CAGDNYGQNFVF

SEQ ID NO: 146350 - protein, 15 aa, Homo sapiens
  CDR3 for beta chain variable domain of TCR clone 73175 (TRBV11-2, TRBJ2-2)
CASSLETGVTGELFF

SEQ ID NO: 146351 - protein, 15 aa, Homo sapiens
  CDR3 for alpha chain variable domain of TCR clone 73176 (TRAV6, TRAJ4)
CALGGFSGGYNKLIF

SEQ ID NO: 146352 - protein, 14 aa, Homo sapiens
  CDR3 for beta chain variable domain of TCR clone 73176 (TRBV2, TRBJ2-1)
CASSVGRSGNGQFF

SEQ ID NO: 146353 - protein, 13 aa, Homo sapiens
  CDR3 for alpha chain variable domain of TCR clone 73177 (TRAV8-1, TRAJ30)
CAGIMNRDDKIIF

SEQ ID NO: 146354 - protein, 14 aa, Homo sapiens
  CDR3 for beta chain variable domain of TCR clone 73177 (TRBV7-2, TRBJ1-6)
CASSLQGANSPLHF

SEQ ID NO: 146355 - protein, 14 aa, Homo sapiens
  CDR3 for alpha chain variable domain of TCR clone 73178 (TRAV8-4, TRAJ54)
CAVGEVLGAQKLVF

SEQ ID NO: 146356 - protein, 15 aa, Homo sapiens
  CDR3 for beta chain variable domain of TCR clone 73178 (TRBV6-1, TRBJ2-6)
CASSSRPSGANVLTF

SEQ ID NO: 146357 - protein, 18 aa, Homo sapiens
  CDR3 for alpha chain variable domain of TCR clone 73179 (TRAV40, TRAJ42)
SSGSRLLNYGGSQGNLIF

SEQ ID NO: 146358 - protein, 14 aa, Homo sapiens
  CDR3 for beta chain variable domain of TCR clone 73179 (TRBV20-1, TRBJ2-5)
CSAHRQGLWETQYF

SEQ ID NO: 146359 - protein, 16 aa, Homo sapiens
  CDR3 for alpha chain variable domain of TCR clone 73180 (TRAV1-2, TRAJ10)
CAVRGVLTGGGNKLTF

SEQ ID NO: 146360 - protein, 17 aa, Homo sapiens
  CDR3 for beta chain variable domain of TCR clone 73180 (TRBV4-1, TRBJ1-4)
CASSQEGPRGVEEKLFF

SEQ ID NO: 146361 - protein, 12 aa, Homo sapiens
  CDR3 for alpha chain variable domain of TCR clone 73181 (TRAV17, TRAJ4)
GATDGGYNKLIF

SEQ ID NO: 146362 - protein, 13 aa, Homo sapiens
  CDR3 for beta chain variable domain of TCR clone 73181 (TRBV29-1, TRBJ2-2)
CSTTGVNTGELFF

SEQ ID NO: 146363 - protein, 16 aa, Homo sapiens
  CDR3 for alpha chain variable domain of TCR clone 73182 (TRAV12-3, TRAJ53)
CAMSPGSGGSNYKLTF

SEQ ID NO: 146364 - protein, 11 aa, Homo sapiens
  CDR3 for beta chain variable domain of TCR clone 73182 (TRBV29-1, TRBJ2-5)
CSEDPTGTQYF

SEQ ID NO: 146365 - protein, 13 aa, Homo sapiens
  CDR3 for alpha chain variable domain of TCR clone 73183 (TRAV1-1, TRAJ9)
CAAKNTGGFKTIF

SEQ ID NO: 146366 - protein, 12 aa, Homo sapiens
  CDR3 for beta chain variable domain of TCR clone 73183 (TRBV7-8, TRBJ2-5)
CASSPRVETQYF

SEQ ID NO: 146367 - protein, 14 aa, Homo sapiens
  CDR3 for alpha chain variable domain of TCR clone 73184 (TRAV21, TRAJ35)
CAVMPIGFGNVLHC

SEQ ID NO: 146368 - protein, 12 aa, Homo sapiens
  CDR3 for beta chain variable domain of TCR clone 73184 (TRBV7-9, TRBJ2-7)
CASSIKREDQYF

SEQ ID NO: 146369 - protein, 14 aa, Homo sapiens
  CDR3 for alpha chain variable domain of TCR clone 73185 (TRAV9-2, TRAJ39)
CALYTYNAGNMLTF

SEQ ID NO: 146370 - protein, 14 aa, Homo sapiens
  CDR3 for beta chain variable domain of TCR clone 73185 (TRBV12-5, TRBJ2-5)
CASGSRTHQETQYF

SEQ ID NO: 146371 - protein, 11 aa, Homo sapiens
  CDR3 for alpha chain variable domain of TCR clone 73186 (TRAV3, TRAJ21)
CAVGNFNKFYF

SEQ ID NO: 146372 - protein, 17 aa, Homo sapiens
  CDR3 for beta chain variable domain of TCR clone 73186 (TRBV24-1, TRBJ2-1)
CATSDVSTSGTYNEKFF

SEQ ID NO: 146373 - protein, 14 aa, Homo sapiens
  CDR3 for alpha chain variable domain of TCR clone 73187 (TRAV1-2, TRAJ8)
CAVREDTGFQKLVF

SEQ ID NO: 146374 - protein, 15 aa, Homo sapiens
  CDR3 for beta chain variable domain of TCR clone 73187 (TRBV19, TRBJ1-6)
CASSTQGAVGSPLHF

SEQ ID NO: 146375 - protein, 14 aa, Homo sapiens
  CDR3 for alpha chain variable domain of TCR clone 73188 (TRAV12-3, TRAJ57)
CAMSAWGGSEKLVF

SEQ ID NO: 146376 - protein, 15 aa, Homo sapiens
  CDR3 for beta chain variable domain of TCR clone 73188 (TRBV19, TRBJ1-2)
CASSVGQVLNYGYTF

SEQ ID NO: 146377 - protein, 10 aa, Homo sapiens
  CDR3 for alpha chain variable domain of TCR clone 73189 (TRAV1-2, TRAJ23)
CAGQGGKLIF

SEQ ID NO: 146378 - protein, 16 aa, Homo sapiens
  CDR3 for beta chain variable domain of TCR clone 73189 (TRBV11-2, TRBJ1-1)
CASGLRQGGEHSKAFF

SEQ ID NO: 146379 - protein, 12 aa, Homo sapiens
  CDR3 for alpha chain variable domain of TCR clone 73190 (TRAV2, TRAJ9)
CAVGAGGFKTIF

SEQ ID NO: 146380 - protein, 16 aa, Homo sapiens
  CDR3 for beta chain variable domain of TCR clone 73190 (TRBV13, TRBJ2-2)
CSSSPRTGEHTGELFF

SEQ ID NO: 146381 - protein, 14 aa, Homo sapiens
  CDR3 for alpha chain variable domain of TCR clone 73191 (TRAV9-2, TRAJ39)
CALYIYNAGNMLTF

SEQ ID NO: 146382 - protein, 12 aa, Homo sapiens
  CDR3 for beta chain variable domain of TCR clone 73191 (TRBV28, TRBJ2-6)
CAIQAGANVLTF

SEQ ID NO: 146383 - protein, 14 aa, Homo sapiens
  CDR3 for alpha chain variable domain of TCR clone 73192 (TRAV20, TRAJ8)
CAVREDTGFQKLVF

SEQ ID NO: 146384 - protein, 15 aa, Homo sapiens
  CDR3 for beta chain variable domain of TCR clone 73192 (TRBV11-3, TRBJ2-1)
CASSLGDSSHNEQFF

SEQ ID NO: 146385 - protein, 12 aa, Homo sapiens
  CDR3 for alpha chain variable domain of TCR clone 73193 (TRAV2, TRAJ10)
CASTGGGNKLTF

SEQ ID NO: 146386 - protein, 14 aa, Homo sapiens
  CDR3 for beta chain variable domain of TCR clone 73193 (TRBV11-2, TRBJ2-3)
CASSRLARTDTQYF

SEQ ID NO: 146387 - protein, 11 aa, Homo sapiens
  CDR3 for alpha chain variable domain of TCR clone 73194 (TRAV27, TRAJ43)
CAGANNNDMRF

SEQ ID NO: 146388 - protein, 14 aa, Homo sapiens
  CDR3 for beta chain variable domain of TCR clone 73194 (TRBV6-1, TRBJ1-3)
CASVQGGGGNTIYF

SEQ ID NO: 146389 - protein, 13 aa, Homo sapiens
  CDR3 for alpha chain variable domain of TCR clone 73195 (TRAV23/DV6, TRAJ27)
CAASKPMQANQPL

SEQ ID NO: 146390 - protein, 15 aa, Homo sapiens
  CDR3 for beta chain variable domain of TCR clone 73195 (TRBV9, TRBJ1-6)
CASSVAGTGDSPLHF

SEQ ID NO: 146391 - protein, 13 aa, Homo sapiens
  CDR3 for alpha chain variable domain of TCR clone 73196 (TRAV27, TRAJ45)
CRSSGGGADGLTF

SEQ ID NO: 146392 - protein, 17 aa, Homo sapiens
  CDR3 for beta chain variable domain of TCR clone 73196 (TRBV11-2, TRBJ2-1)
CASSLYPPGVEYNDQFF

SEQ ID NO: 146393 - protein, 12 aa, Homo sapiens
  CDR3 for alpha chain variable domain of TCR clone 73197 (TRAV21, TRAJ37)
CAVRGNTGKLIF

SEQ ID NO: 146394 - protein, 15 aa, Homo sapiens
  CDR3 for beta chain variable domain of TCR clone 73197 (TRBV20-1, TRBJ2-1)
RSARGGTRYYNEQFF

SEQ ID NO: 146395 - protein, 15 aa, Homo sapiens
  CDR3 for alpha chain variable domain of TCR clone 73198 (TRAV8-1, TRAJ6)
CAVNTGAGGSYIPTF

SEQ ID NO: 146396 - protein, 14 aa, Homo sapiens
  CDR3 for beta chain variable domain of TCR clone 73198 (TRBV25-1, TRBJ1-6)
CASSLSADISPLHF

SEQ ID NO: 146397 - protein, 12 aa, Homo sapiens
  CDR3 for alpha chain variable domain of TCR clone 73199 (TRAV30, TRAJ39)
CGRGNAGNMLTF

SEQ ID NO: 146398 - protein, 16 aa, Homo sapiens
  CDR3 for beta chain variable domain of TCR clone 73199 (TRBV12-4, TRBJ1-5)
CASSRPVGGSNQPQHF

SEQ ID NO: 146399 - protein, 14 aa, Homo sapiens
  CDR3 for alpha chain variable domain of TCR clone 73200 (TRAV12-2, TRAJ24)
CAVTPADSWGKLQF

SEQ ID NO: 146400 - protein, 15 aa, Homo sapiens
  CDR3 for beta chain variable domain of TCR clone 73200 (TRBV4-1, TRBJ1-4)
CASSDTGGTNEKLFF

SEQ ID NO: 146401 - protein, 13 aa, Homo sapiens
  CDR3 for alpha chain variable domain of TCR clone 73201 (TRAV27, TRAJ49)
CAPRPYTGNQFYF

SEQ ID NO: 146402 - protein, 16 aa, Homo sapiens
  CDR3 for beta chain variable domain of TCR clone 73201 (TRBV4-1, TRBJ1-2)
CASSQDAGQVLYVYTF

SEQ ID NO: 146403 - protein, 16 aa, Homo sapiens
  CDR3 for alpha chain variable domain of TCR clone 73202 (TRAV14/DV4, TRAJ53)
CAMREGGGGSNYKLTF

SEQ ID NO: 146404 - protein, 15 aa, Homo sapiens
  CDR3 for beta chain variable domain of TCR clone 73202 (TRBV5-1, TRBJ2-3)
CAGSVTSGSTDTQYF

SEQ ID NO: 146405 - protein, 18 aa, Homo sapiens
  CDR3 for alpha chain variable domain of TCR clone 73203 (TRAV12-3, TRAJ52)
CAMSRTNAGGTSYGKLTC

SEQ ID NO: 146406 - protein, 17 aa, Homo sapiens
  CDR3 for beta chain variable domain of TCR clone 73203 (TRBV7-3, TRBJ2-3)
CASSLMKRMRGADTQYF

SEQ ID NO: 146407 - protein, 12 aa, Homo sapiens
  CDR3 for alpha chain variable domain of TCR clone 73204 (TRAV38-2/DV8, TRAJ47)
CVLMEYGNKLVF

SEQ ID NO: 146408 - protein, 14 aa, Homo sapiens
  CDR3 for beta chain variable domain of TCR clone 73204 (TRBV20-1, TRBJ1-5)
CSATGRGSNQPQHF

SEQ ID NO: 146409 - protein, 15 aa, Homo sapiens
  CDR3 for alpha chain variable domain of TCR clone 73205 (TRAV35, TRAJ40)
CAGQLGTSGTYKCIF

SEQ ID NO: 146410 - protein, 14 aa, Homo sapiens
  CDR3 for beta chain variable domain of TCR clone 73205 (TRBV7-3, TRBJ2-1)
CASSLAGGTNEQFF

SEQ ID NO: 146411 - protein, 16 aa, Homo sapiens
  CDR3 for alpha chain variable domain of TCR clone 73206 (TRAV26-1, TRAJ37)
CIVRGDGSGNTGKLIF

SEQ ID NO: 146412 - protein, 13 aa, Homo sapiens
  CDR3 for beta chain variable domain of TCR clone 73206 (TRBV4-1, TRBJ2-2)
CASNQENTGELFF

SEQ ID NO: 146413 - protein, 19 aa, Homo sapiens
  CDR3 for alpha chain variable domain of TCR clone 73207 (TRAV3, TRAJ6)
CAVRDRNPRRSGGSYIPTF

SEQ ID NO: 146414 - protein, 15 aa, Homo sapiens
  CDR3 for beta chain variable domain of TCR clone 73207 (TRBV18, TRBJ2-7)
CASSPTFMDSYEQYF

SEQ ID NO: 146415 - protein, 12 aa, Homo sapiens
  CDR3 for alpha chain variable domain of TCR clone 73208 (TRAV21, TRAJ3)
CCFYSSASKIIF

SEQ ID NO: 146416 - protein, 16 aa, Homo sapiens
  CDR3 for beta chain variable domain of TCR clone 73208 (TRBV19, TRBJ2-1)
CASSKAGPSYYNEQFF

SEQ ID NO: 146417 - protein, 16 aa, Homo sapiens
  CDR3 for alpha chain variable domain of TCR clone 73209 (TRAV30, TRAJ24)
CGTEIVDADSWGKFQL

SEQ ID NO: 146418 - protein, 17 aa, Homo sapiens
  CDR3 for beta chain variable domain of TCR clone 73209 (TRBV20-1, TRBJ2-2)
CSASGSGQGGLTGELFF

SEQ ID NO: 146419 - protein, 16 aa, Homo sapiens
  CDR3 for alpha chain variable domain of TCR clone 73210 (TRAV3, TRAJ37)
CAVRPHGSGNTGKLIF

SEQ ID NO: 146420 - protein, 15 aa, Homo sapiens
  CDR3 for beta chain variable domain of TCR clone 73210 (TRBV7-9, TRBJ1-5)
CASSQGHQPNQPQHF

SEQ ID NO: 146421 - protein, 12 aa, Homo sapiens
  CDR3 for alpha chain variable domain of TCR clone 73211 (TRAV12-2, TRAJ31)
CAVNTPDARLMF

SEQ ID NO: 146422 - protein, 12 aa, Homo sapiens
  CDR3 for beta chain variable domain of TCR clone 73211 (TRBV2, TRBJ2-7)
CASSSGGWEQYF

SEQ ID NO: 146423 - protein, 11 aa, Homo sapiens
  CDR3 for alpha chain variable domain of TCR clone 73212 (TRAV2, TRAJ13)
CASGGYQKVTF

SEQ ID NO: 146424 - protein, 16 aa, Homo sapiens
  CDR3 for beta chain variable domain of TCR clone 73212 (TRBV6-1, TRBJ2-5)
CSSSETLDRGAETQYF

SEQ ID NO: 146425 - protein, 14 aa, Homo sapiens
  CDR3 for alpha chain variable domain of TCR clone 73213 (TRAV35, TRAJ46)
CAGPQKSSGDKLTF

SEQ ID NO: 146426 - protein, 12 aa, Homo sapiens
  CDR3 for beta chain variable domain of TCR clone 73213 (TRBV7-9, TRBJ1-5)
CASSPQGQPQHF

SEQ ID NO: 146427 - protein, 14 aa, Homo sapiens
  CDR3 for alpha chain variable domain of TCR clone 73214 (TRAV1-2, TRAJ16)
CAVNRLSDGQKLLF

SEQ ID NO: 146428 - protein, 16 aa, Homo sapiens
  CDR3 for beta chain variable domain of TCR clone 73214 (TRBV29-1, TRBJ2-7)
CSVEVVGTSGSYEQYF

SEQ ID NO: 146429 - protein, 14 aa, Homo sapiens
  CDR3 for alpha chain variable domain of TCR clone 73215 (TRAV16, TRAJ33)
CALSAMDSNYQLIW

SEQ ID NO: 146430 - protein, 14 aa, Homo sapiens
  CDR3 for beta chain variable domain of TCR clone 73215 (TRBV5-1, TRBJ2-3)
CASSRGQGGGTQYF

SEQ ID NO: 146431 - protein, 16 aa, Homo sapiens
  CDR3 for alpha chain variable domain of TCR clone 73216 (TRAV12-1, TRAJ45)
CVVIRYSGGGADGLTF

SEQ ID NO: 146432 - protein, 20 aa, Homo sapiens
  CDR3 for beta chain variable domain of TCR clone 73216 (TRBV7-8, TRBJ2-2)
CASSHLFPGPTIHITGELFF

SEQ ID NO: 146433 - protein, 15 aa, Homo sapiens
  CDR3 for alpha chain variable domain of TCR clone 73217 (TRAV12-3, TRAJ13)
CAMSYDSGGYQKVTF

SEQ ID NO: 146434 - protein, 15 aa, Homo sapiens
  CDR3 for beta chain variable domain of TCR clone 73217 (TRBV28, TRBJ2-5)
CASSPGQGSIETQYF

SEQ ID NO: 146435 - protein, 10 aa, Homo sapiens
  CDR3 for alpha chain variable domain of TCR clone 73218 (TRAV23/DV6, TRAJ57)
CAASSTLSQG

SEQ ID NO: 146436 - protein, 14 aa, Homo sapiens
  CDR3 for beta chain variable domain of TCR clone 73218 (TRBV20-1, TRBJ1-1)
CSAQTRIGGTEAFF

SEQ ID NO: 146437 - protein, 15 aa, Homo sapiens
  CDR3 for alpha chain variable domain of TCR clone 73219 (TRAV8-3, TRAJ11)
CAVGLLNSGYSTLTF

SEQ ID NO: 146438 - protein, 15 aa, Homo sapiens
  CDR3 for beta chain variable domain of TCR clone 73219 (TRBV12-4, TRBJ2-2)
CASSTFGGYTGELFF

SEQ ID NO: 146439 - protein, 12 aa, Homo sapiens
  CDR3 for alpha chain variable domain of TCR clone 73220 (TRAV12-3, TRAJ21)
CAMVNNFNKFYF

SEQ ID NO: 146440 - protein, 14 aa, Homo sapiens
  CDR3 for beta chain variable domain of TCR clone 73220 (TRBV28, TRBJ2-1)
CASSIQGTVGEQFF

SEQ ID NO: 146441 - protein, 14 aa, Homo sapiens
  CDR3 for alpha chain variable domain of TCR clone 73221 (TRAV1-2, TRAJ16)
CAVNRFSDGQKLLL

SEQ ID NO: 146442 - protein, 16 aa, Homo sapiens
  CDR3 for beta chain variable domain of TCR clone 73221 (TRBV11-2, TRBJ1-2)
CASSLDTGGADYGYTF

SEQ ID NO: 146443 - protein, 15 aa, Homo sapiens
  CDR3 for alpha chain variable domain of TCR clone 73222 (TRAV8-1, TRAJ6)
CAVNTPPGGSYIPTF

SEQ ID NO: 146444 - protein, 14 aa, Homo sapiens
  CDR3 for beta chain variable domain of TCR clone 73222 (TRBV12-4, TRBJ2-1)
CASSLGQGASEKFF

SEQ ID NO: 146445 - protein, 15 aa, Homo sapiens
  CDR3 for alpha chain variable domain of TCR clone 73223 (TRAV2, TRAJ22)
CAVPSRGGSARQLTF

SEQ ID NO: 146446 - protein, 13 aa, Homo sapiens
  CDR3 for beta chain variable domain of TCR clone 73223 (TRBV7-9, TRBJ1-2)
CASSLKQNYGYTF

SEQ ID NO: 146447 - protein, 16 aa, Homo sapiens
  CDR3 for alpha chain variable domain of TCR clone 73224 (TRAV38-1, TRAJ37)
CAFKGDGSSNTGNLIF

SEQ ID NO: 146448 - protein, 13 aa, Homo sapiens
  CDR3 for beta chain variable domain of TCR clone 73224 (TRBV12-4, TRBJ2-5)
CASSLFRRETQYF

SEQ ID NO: 146449 - protein, 14 aa, Homo sapiens
  CDR3 for alpha chain variable domain of TCR clone 73225 (TRAV13-2, TRAJ10)
CAETLTGGGNKLTF

SEQ ID NO: 146450 - protein, 16 aa, Homo sapiens
  CDR3 for beta chain variable domain of TCR clone 73225 (TRBV18, TRBJ2-7)
CASSPRSQGISYEQYF

SEQ ID NO: 146451 - protein, 15 aa, Homo sapiens
  CDR3 for alpha chain variable domain of TCR clone 73226 (TRAV12-3, TRAJ6)
CAMSATTGGSYIPTF

SEQ ID NO: 146452 - protein, 13 aa, Homo sapiens
  CDR3 for beta chain variable domain of TCR clone 73226 (TRBV4-1, TRBJ2-2)
CASSQENTGELFF

SEQ ID NO: 146453 - protein, 14 aa, Homo sapiens
  CDR3 for alpha chain variable domain of TCR clone 73227 (TRAV23/DV6, TRAJ17)
CAASIGAAGNKLTF

SEQ ID NO: 146454 - protein, 12 aa, Homo sapiens
  CDR3 for beta chain variable domain of TCR clone 73227 (TRBV20-1, TRBJ2-5)
CSARGAGETQYF

SEQ ID NO: 146455 - protein, 14 aa, Homo sapiens
  CDR3 for alpha chain variable domain of TCR clone 73228 (TRAV3, TRAJ9)
CAVRGNAGGFKTIF

SEQ ID NO: 146456 - protein, 14 aa, Homo sapiens
  CDR3 for beta chain variable domain of TCR clone 73228 (TRBV15, TRBJ2-1)
CATSGVEDYNEQFF

SEQ ID NO: 146457 - protein, 13 aa, Homo sapiens
  CDR3 for alpha chain variable domain of TCR clone 73229 (TRAV36/DV7, TRAJ7)
CAGTRYGNNRLAF

SEQ ID NO: 146458 - protein, 15 aa, Homo sapiens
  CDR3 for beta chain variable domain of TCR clone 73229 (TRBV7-3, TRBJ2-1)
CASSPTGGGEVEQFF

SEQ ID NO: 146459 - protein, 11 aa, Homo sapiens
  CDR3 for alpha chain variable domain of TCR clone 73230 (TRAV21, TRAJ31)
CAVRNNARLMF

SEQ ID NO: 146460 - protein, 16 aa, Homo sapiens
  CDR3 for beta chain variable domain of TCR clone 73230 (TRBV5-1, TRBJ1-1)
CASSSGGNSLNTEAFF

SEQ ID NO: 146461 - protein, 14 aa, Homo sapiens
  CDR3 for alpha chain variable domain of TCR clone 73231 (TRAV38-1, TRAJ29)
CAFITPSGNTPLVF

SEQ ID NO: 146462 - protein, 14 aa, Homo sapiens
  CDR3 for beta chain variable domain of TCR clone 73231 (TRBV18, TRBJ2-7)
YASSPRGGAYEQYF

SEQ ID NO: 146463 - protein, 15 aa, Homo sapiens
  CDR3 for alpha chain variable domain of TCR clone 73232 (TRAV12-3, TRAJ6)
CAMSPASGGSYIPTF

SEQ ID NO: 146464 - protein, 14 aa, Homo sapiens
  CDR3 for beta chain variable domain of TCR clone 73232 (TRBV12-5, TRBJ2-5)
CASGSRTHQETQYF

SEQ ID NO: 146465 - protein, 12 aa, Homo sapiens
  CDR3 for alpha chain variable domain of TCR clone 73233 (TRAV12-1, TRAJ40)
CVVYSGTYKYIF

SEQ ID NO: 146466 - protein, 16 aa, Homo sapiens
  CDR3 for beta chain variable domain of TCR clone 73233 (TRBV11-2, TRBJ1-2)
CASSLDTGGADYGYTF

SEQ ID NO: 146467 - protein, 13 aa, Homo sapiens
  CDR3 for alpha chain variable domain of TCR clone 73234 (TRAV27, TRAJ6)
CAGGTRGSYITTF

SEQ ID NO: 146468 - protein, 13 aa, Homo sapiens
  CDR3 for beta chain variable domain of TCR clone 73234 (TRBV4-1, TRBJ2-2)
CASSQENTGELFF

SEQ ID NO: 146469 - protein, 12 aa, Homo sapiens
  CDR3 for alpha chain variable domain of TCR clone 73235 (TRAV12-1, TRAJ40)
CVVNGETYKYIF

SEQ ID NO: 146470 - protein, 14 aa, Homo sapiens
  CDR3 for beta chain variable domain of TCR clone 73235 (TRBV7-9, TRBJ1-1)
CASSATKGNTEAFF

SEQ ID NO: 146471 - protein, 15 aa, Homo sapiens
  CDR3 for alpha chain variable domain of TCR clone 73236 (TRAV21, TRAJ24)
CAARSSTDSWGKLQF

SEQ ID NO: 146472 - protein, 15 aa, Homo sapiens
  CDR3 for beta chain variable domain of TCR clone 73236 (TRBV11-2, TRBJ1-3)
CASSLDGTVGNTIYF

SEQ ID NO: 146473 - protein, 17 aa, Homo sapiens
  CDR3 for alpha chain variable domain of TCR clone 73237 (TRAV3, TRAJ42)
CAVRDRDYGGSQGNIIF

SEQ ID NO: 146474 - protein, 17 aa, Homo sapiens
  CDR3 for beta chain variable domain of TCR clone 73237 (TRBV7-9, TRBJ2-3)
CASSPTVAGDLTDTQYF

SEQ ID NO: 146475 - protein, 17 aa, Homo sapiens
  CDR3 for alpha chain variable domain of TCR clone 73238 (TRAV3, TRAJ12)
CAVRDGGRMDSSYKLIF

SEQ ID NO: 146476 - protein, 12 aa, Homo sapiens
  CDR3 for beta chain variable domain of TCR clone 73238 (TRBV11-3, TRBJ2-2)
CASSLGGGELFF

SEQ ID NO: 146477 - protein, 14 aa, Homo sapiens
  CDR3 for alpha chain variable domain of TCR clone 73239 (TRAV1-2, TRAJ8)
CAVRENTGFQKLVF

SEQ ID NO: 146478 - protein, 13 aa, Homo sapiens
  CDR3 for beta chain variable domain of TCR clone 73239 (TRBV12-4, TRBJ1-5)
CASSPDRAQPQHF

SEQ ID NO: 146479 - protein, 11 aa, Homo sapiens
  CDR3 for alpha chain variable domain of TCR clone 73240 (TRAV8-3, TRAJ15)
CAVGPGTALIF

SEQ ID NO: 146480 - protein, 18 aa, Homo sapiens
  CDR3 for beta chain variable domain of TCR clone 73240 (TRBV18, TRBJ2-3)
CASSYTSGGAGGTDTQYF

SEQ ID NO: 146481 - protein, 14 aa, Homo sapiens
  CDR3 for alpha chain variable domain of TCR clone 73241 (TRAV12-2, TRAJ17)
CAVLFKAAGNKLTF

SEQ ID NO: 146482 - protein, 18 aa, Homo sapiens
  CDR3 for beta chain variable domain of TCR clone 73241 (TRBV7-2, TRBJ2-2)
CASSLGLAGVANTGELFF

SEQ ID NO: 146483 - protein, 12 aa, Homo sapiens
  CDR3 for alpha chain variable domain of TCR clone 73242 (TRAV12-3, TRAJ17)
CATTLTGNKLTF

SEQ ID NO: 146484 - protein, 16 aa, Homo sapiens
  CDR3 for beta chain variable domain of TCR clone 73242 (TRBV20-1, TRBJ1-4)
CSAPGQGLLTNEKLFF

SEQ ID NO: 146485 - protein, 14 aa, Homo sapiens
  CDR3 for alpha chain variable domain of TCR clone 73243 (TRAV16, TRAJ54)
FALSLIQGAQKLVF

SEQ ID NO: 146486 - protein, 17 aa, Homo sapiens
  CDR3 for beta chain variable domain of TCR clone 73243 (TRBV11-2, TRBJ2-4)
CASSSVGPGGHRNIQYF

SEQ ID NO: 146487 - protein, 13 aa, Homo sapiens
  CDR3 for alpha chain variable domain of TCR clone 73244 (TRAV13-2, TRAJ48)
CAEMDFGNEKLTF

SEQ ID NO: 146488 - protein, 17 aa, Homo sapiens
  CDR3 for beta chain variable domain of TCR clone 73244 (TRBV13, TRBJ2-3)
CASSLSRVAGGRNTQYF

SEQ ID NO: 146489 - protein, 12 aa, Homo sapiens
  CDR3 for alpha chain variable domain of TCR clone 73245 (TRAV35, TRAJ30)
CAGQLADDKIIF

SEQ ID NO: 146490 - protein, 17 aa, Homo sapiens
  CDR3 for beta chain variable domain of TCR clone 73245 (TRBV4-2, TRBJ2-5)
CTSSPGRWRNFQETQYF

SEQ ID NO: 146491 - protein, 13 aa, Homo sapiens
  CDR3 for alpha chain variable domain of TCR clone 73246 (TRAV8-3, TRAJ43)
CAVGPYNNNDMRF

SEQ ID NO: 146492 - protein, 19 aa, Homo sapiens
  CDR3 for beta chain variable domain of TCR clone 73246 (TRBV7-2, TRBJ2-3)
CASSFLSRNWGGGTDTQYF

SEQ ID NO: 146493 - protein, 11 aa, Homo sapiens
  CDR3 for alpha chain variable domain of TCR clone 73247 (TRAV16, TRAJ20)
CALSEGFKAAF

SEQ ID NO: 146494 - protein, 13 aa, Homo sapiens
  CDR3 for beta chain variable domain of TCR clone 73247 (TRBV7-3, TRBJ2-1)
CASSLDSYNEQFF

SEQ ID NO: 146495 - protein, 12 aa, Homo sapiens
  CDR3 for alpha chain variable domain of TCR clone 73248 (TRAV17, TRAJ49)
CATVTTGNQFYF

SEQ ID NO: 146496 - protein, 13 aa, Homo sapiens
  CDR3 for beta chain variable domain of TCR clone 73248 (TRBV7-9, TRBJ1-2)
CASSLKQNYGYTF

SEQ ID NO: 146497 - protein, 10 aa, Homo sapiens
  CDR3 for alpha chain variable domain of TCR clone 73249 (TRAV12-3, TRAJ34)
CAMSADKLIF

SEQ ID NO: 146498 - protein, 13 aa, Homo sapiens
  CDR3 for beta chain variable domain of TCR clone 73249 (TRBV7-3, TRBJ1-1)
CASSQDWGAEAFF

SEQ ID NO: 146499 - protein, 14 aa, Homo sapiens
  CDR3 for alpha chain variable domain of TCR clone 73250 (TRAV2, TRAJ42)
CAVVGGGSQGNLIF

SEQ ID NO: 146500 - protein, 15 aa, Homo sapiens
  CDR3 for beta chain variable domain of TCR clone 73250 (TRBV11-2, TRBJ1-2)
CASSLEGVQRNGYTF

SEQ ID NO: 146501 - protein, 16 aa, Homo sapiens
  CDR3 for alpha chain variable domain of TCR clone 73251 (TRAV26-1, TRAJ53)
CIVRVAMGGSNYKLTF

SEQ ID NO: 146502 - protein, 13 aa, Homo sapiens
  CDR3 for beta chain variable domain of TCR clone 73251 (TRBV7-3, TRBJ1-1)
CASSQDWGAEAFF

SEQ ID NO: 146503 - protein, 12 aa, Homo sapiens
  CDR3 for alpha chain variable domain of TCR clone 73252 (TRAV17, TRAJ4)
CATDGGYNKLIF

SEQ ID NO: 146504 - protein, 13 aa, Homo sapiens
  CDR3 for beta chain variable domain of TCR clone 73252 (TRBV29-1, TRBJ2-2)
CSTTGFNTGELFF

SEQ ID NO: 146505 - protein, 12 aa, Homo sapiens
  CDR3 for alpha chain variable domain of TCR clone 73253 (TRAV21, TRAJ6)
CAVKGGSYIPTF

SEQ ID NO: 146506 - protein, 13 aa, Homo sapiens
  CDR3 for beta chain variable domain of TCR clone 73253 (TRBV11-2, TRBJ1-1)
CASSLTENTEAFF

SEQ ID NO: 146507 - protein, 14 aa, Homo sapiens
  CDR3 for alpha chain variable domain of TCR clone 73254 (TRAV20, TRAJ4)
CAVRLGGGYNKLIF

SEQ ID NO: 146508 - protein, 15 aa, Homo sapiens
  CDR3 for beta chain variable domain of TCR clone 73254 (TRBV5-1, TRBJ2-1)
CASSPPRAPYNEQFF

SEQ ID NO: 146509 - protein, 14 aa, Homo sapiens
  CDR3 for alpha chain variable domain of TCR clone 73255 (TRAV12-2, TRAJ44)
CAVNPAGTASKLTF

SEQ ID NO: 146510 - protein, 15 aa, Homo sapiens
  CDR3 for beta chain variable domain of TCR clone 73255 (TRBV5-1, TRBJ2-1)
CASSPPRAPYNEQFL

SEQ ID NO: 146511 - protein, 14 aa, Homo sapiens
  CDR3 for alpha chain variable domain of TCR clone 73256 (TRAV8-3, TRAJ4)
CAVGAAGGYNKLIF

SEQ ID NO: 146512 - protein, 15 aa, Homo sapiens
  CDR3 for beta chain variable domain of TCR clone 73256 (TRBV6-5, TRBJ2-1)
CASSYDAGAGNAQFF

SEQ ID NO: 146513 - protein, 13 aa, Homo sapiens
  CDR3 for alpha chain variable domain of TCR clone 73257 (TRAV26-1, TRAJ33)
CIVRVDSNYQLIW

SEQ ID NO: 146514 - protein, 15 aa, Homo sapiens
  CDR3 for beta chain variable domain of TCR clone 73257 (TRBV7-2, TRBJ1-5)
CASSFSAGINQHQHF

SEQ ID NO: 146515 - protein, 14 aa, Homo sapiens
  CDR3 for alpha chain variable domain of TCR clone 73258 (TRAV3, TRAJ9)
CAVRLNTGSFKTIF

SEQ ID NO: 146516 - protein, 15 aa, Homo sapiens
  CDR3 for beta chain variable domain of TCR clone 73258 (TRBV7-2, TRBJ2-1)
CASSLASGRVNEQFF

SEQ ID NO: 146517 - protein, 10 aa, Homo sapiens
  CDR3 for alpha chain variable domain of TCR clone 73259 (TRAV12-2, TRAJ52)
RSTSYGKLTF

SEQ ID NO: 146518 - protein, 15 aa, Homo sapiens
  CDR3 for beta chain variable domain of TCR clone 73259 (TRBV28, TRBJ2-5)
CASSSGRTIQETQYF

SEQ ID NO: 146519 - protein, 18 aa, Homo sapiens
  CDR3 for alpha chain variable domain of TCR clone 73260 (TRAV29/DV5, TRAJ53)
CSVLLCSKRGGSNYNLTF

SEQ ID NO: 146520 - protein, 17 aa, Homo sapiens
  CDR3 for beta chain variable domain of TCR clone 73260 (TRBV7-8, TRBJ2-6)
CASSAGTGGAGANVLTF

SEQ ID NO: 146521 - protein, 23 aa, Homo sapiens
  CDR3 for alpha chain variable domain of TCR clone 73261 (TRAV26-1, TRAJ38)
CIADNAGNNHIQDPDPAVYQLRD

SEQ ID NO: 146522 - protein, 13 aa, Homo sapiens
  CDR3 for beta chain variable domain of TCR clone 73261 (TRBV10-3, TRBJ2-7)
CASKLAVNYEQYF

SEQ ID NO: 146523 - protein, 14 aa, Homo sapiens
  CDR3 for alpha chain variable domain of TCR clone 73262 (TRAV12-2, TRAJ15)
CAPHTGQAGTVLIF

SEQ ID NO: 146524 - protein, 17 aa, Homo sapiens
  CDR3 for beta chain variable domain of TCR clone 73262 (TRBV5-5, TRBJ1-2)
CASSLGSLDGQSEGYTF

SEQ ID NO: 146525 - protein, 15 aa, Homo sapiens
  CDR3 for alpha chain variable domain of TCR clone 73263 (TRAV3, TRAJ8)
CAVRDRNTGFQKLVF

SEQ ID NO: 146526 - protein, 14 aa, Homo sapiens
  CDR3 for beta chain variable domain of TCR clone 73263 (TRBV19, TRBJ2-1)
CASPTFVLSGEQFF

SEQ ID NO: 146527 - protein, 14 aa, Homo sapiens
  CDR3 for alpha chain variable domain of TCR clone 73264 (TRAV3, TRAJ37)
CAVKESGNTGKLIF

SEQ ID NO: 146528 - protein, 16 aa, Homo sapiens
  CDR3 for beta chain variable domain of TCR clone 73264 (TRBV2, TRBJ1-5)
CASSENRGGQPSILVM

SEQ ID NO: 146529 - protein, 14 aa, Homo sapiens
  CDR3 for alpha chain variable domain of TCR clone 73265 (TRAV12-2, TRAJ13)
CAVKKTGGYQKVTY

SEQ ID NO: 146530 - protein, 11 aa, Homo sapiens
  CDR3 for beta chain variable domain of TCR clone 73265 (TRBV12-4, TRBJ2-2)
CASSSAGELFF

SEQ ID NO: 146531 - protein, 15 aa, Homo sapiens
  CDR3 for alpha chain variable domain of TCR clone 73266 (TRAV14/DV4, TRAJ10)
CAMRELTGGGNKLTF

SEQ ID NO: 146532 - protein, 18 aa, Homo sapiens
  CDR3 for beta chain variable domain of TCR clone 73266 (TRBV7-9, TRBJ2-7)
CASSLTTSGSRTWYEQYV

SEQ ID NO: 146533 - protein, 15 aa, Homo sapiens
  CDR3 for alpha chain variable domain of TCR clone 73267 (TRAV26-2, TRAJ45)
CILRDRVDQKEVLTD

SEQ ID NO: 146534 - protein, 15 aa, Homo sapiens
  CDR3 for beta chain variable domain of TCR clone 73267 (TRBV7-6, TRBJ2-5)
CASSRPTGPQETQYF

SEQ ID NO: 146535 - protein, 13 aa, Homo sapiens
  CDR3 for alpha chain variable domain of TCR clone 73268 (TRAV13-2, TRAJ48)
CAEMDFGNEKLTF

SEQ ID NO: 146536 - protein, 15 aa, Homo sapiens
  CDR3 for beta chain variable domain of TCR clone 73268 (TRBV7-9, TRBJ1-6)
CACSSPGRGNSPLHF

SEQ ID NO: 146537 - protein, 17 aa, Homo sapiens
  CDR3 for alpha chain variable domain of TCR clone 73269 (TRAV3, TRAJ42)
CAVRDRDYGGSQGNLIF

SEQ ID NO: 146538 - protein, 15 aa, Homo sapiens
  CDR3 for beta chain variable domain of TCR clone 73269 (TRBV27, TRBJ1-6)
CASSFDRGLGSPLLF

SEQ ID NO: 146539 - protein, 14 aa, Homo sapiens
  CDR3 for alpha chain variable domain of TCR clone 73270 (TRAV26-1, TRAJ21)
CIVRVAHNFNKFYF

SEQ ID NO: 146540 - protein, 14 aa, Homo sapiens
  CDR3 for beta chain variable domain of TCR clone 73270 (TRBV19, TRBJ2-1)
CASPTFVLSGEQFF

SEQ ID NO: 146541 - protein, 12 aa, Homo sapiens
  CDR3 for alpha chain variable domain of TCR clone 73271 (TRAV13-1, TRAJ48)
CAANFGNEKLTF

SEQ ID NO: 146542 - protein, 14 aa, Homo sapiens
  CDR3 for beta chain variable domain of TCR clone 73271 (TRBV7-7, TRBJ2-2)
CATRQDSDTGELFF

SEQ ID NO: 146543 - protein, 15 aa, Homo sapiens
  CDR3 for alpha chain variable domain of TCR clone 73272 (TRAV13-1, TRAJ15)
CAASIERQAGTALIF

SEQ ID NO: 146544 - protein, 12 aa, Homo sapiens
  CDR3 for beta chain variable domain of TCR clone 73272 (TRBV14, TRBJ2-7)
CASSSLKGEQYF

SEQ ID NO: 146545 - protein, 17 aa, Homo sapiens
  CDR3 for alpha chain variable domain of TCR clone 73273 (TRAV12-3, TRAJ6)
CAMSARGRAGGSYIPTF

SEQ ID NO: 146546 - protein, 12 aa, Homo sapiens
  CDR3 for beta chain variable domain of TCR clone 73273 (TRBV12-4, TRBJ2-3)
CASSTLPDTQYF

SEQ ID NO: 146547 - protein, 12 aa, Homo sapiens
  CDR3 for alpha chain variable domain of TCR clone 73274 (TRAV1-1, TRAJ33)
CDASDSNYQLIW

SEQ ID NO: 146548 - protein, 18 aa, Homo sapiens
  CDR3 for beta chain variable domain of TCR clone 73274 (TRBV20-1, TRBJ2-2)
CSARVQTARPSGTGELFF

SEQ ID NO: 146549 - protein, 16 aa, Homo sapiens
  CDR3 for alpha chain variable domain of TCR clone 73275 (TRAV3, TRAJ37)
CAVRPNGSGNTGKLIF

SEQ ID NO: 146550 - protein, 16 aa, Homo sapiens
  CDR3 for beta chain variable domain of TCR clone 73275 (TRBV9, TRBJ1-2)
CASSVEEKVSPYGYTF

SEQ ID NO: 146551 - protein, 14 aa, Homo sapiens
  CDR3 for alpha chain variable domain of TCR clone 73276 (TRAV17, TRAJ43)
CATDHPYNNNDMRF

SEQ ID NO: 146552 - protein, 15 aa, Homo sapiens
  CDR3 for beta chain variable domain of TCR clone 73276 (TRBV5-1, TRBJ2-2)
CASSSQGGNTGELFF

SEQ ID NO: 146553 - protein, 12 aa, Homo sapiens
  CDR3 for alpha chain variable domain of TCR clone 73277 (TRAV17, TRAJ57)
CATDGGSEKLVF

SEQ ID NO: 146554 - protein, 13 aa, Homo sapiens
  CDR3 for beta chain variable domain of TCR clone 73277 (TRBV7-9, TRBJ2-7)
CASRFAGAYEQYF

SEQ ID NO: 146555 - protein, 13 aa, Homo sapiens
  CDR3 for alpha chain variable domain of TCR clone 73278 (TRAV12-3, TRAJ33)
CAISVNSNYQLIW

SEQ ID NO: 146556 - protein, 15 aa, Homo sapiens
  CDR3 for beta chain variable domain of TCR clone 73278 (TRBV6-3, TRBJ2-7)
CASSSPGTVFYEQYF

SEQ ID NO: 146557 - protein, 14 aa, Homo sapiens
  CDR3 for alpha chain variable domain of TCR clone 73279 (TRAV12-2, TRAJ53)
CRERGGGSNYKLTF

SEQ ID NO: 146558 - protein, 14 aa, Homo sapiens
  CDR3 for beta chain variable domain of TCR clone 73279 (TRBV19, TRBJ2-2)
CASSTLRRSGELFF

SEQ ID NO: 146559 - protein, 14 aa, Homo sapiens
  CDR3 for alpha chain variable domain of TCR clone 73280 (TRAV13-1, TRAJ35)
CAASKGGFGNVLHC

SEQ ID NO: 146560 - protein, 13 aa, Homo sapiens
  CDR3 for beta chain variable domain of TCR clone 73280 (TRBV7-2, TRBJ2-5)
CASSLYRQETQYF

SEQ ID NO: 146561 - protein, 13 aa, Homo sapiens
  CDR3 for alpha chain variable domain of TCR clone 73281 (TRAV27, TRAJ45)
CRSSGGGADGLTF

SEQ ID NO: 146562 - protein, 14 aa, Homo sapiens
  CDR3 for beta chain variable domain of TCR clone 73281 (TRBV7-9, TRBJ2-1)
CASGSMVGFGEQFF

SEQ ID NO: 146563 - protein, 12 aa, Homo sapiens
  CDR3 for alpha chain variable domain of TCR clone 73282 (TRAV13-1, TRAJ36)
WRGGAGANNLSF

SEQ ID NO: 146564 - protein, 16 aa, Homo sapiens
  CDR3 for beta chain variable domain of TCR clone 73282 (TRBV7-9, TRBJ2-5)
CASRLEIGTRKETQYF

SEQ ID NO: 146565 - protein, 16 aa, Homo sapiens
  CDR3 for alpha chain variable domain of TCR clone 73283 (TRAV3, TRAJ37)
CAVRPHGSGNTGKLIF

SEQ ID NO: 146566 - protein, 13 aa, Homo sapiens
  CDR3 for beta chain variable domain of TCR clone 73283 (TRBV2, TRBJ1-5)
CASGTGWYQPQHF

SEQ ID NO: 146567 - protein, 15 aa, Homo sapiens
  CDR3 for alpha chain variable domain of TCR clone 73284 (TRAV21, TRAJ52)
CATRSGGTSYGKLTF

SEQ ID NO: 146568 - protein, 16 aa, Homo sapiens
  CDR3 for beta chain variable domain of TCR clone 73284 (TRBV7-3, TRBJ2-2)
CASSLKRGTLSGELFF

SEQ ID NO: 146569 - protein, 11 aa, Homo sapiens
  CDR3 for alpha chain variable domain of TCR clone 73285 (TRAV23/DV6, TRAJ58)
CAARLLRGETS

SEQ ID NO: 146570 - protein, 13 aa, Homo sapiens
  CDR3 for beta chain variable domain of TCR clone 73285 (TRBV7-7, TRBJ2-3)
CASSLSRADTQYF

SEQ ID NO: 146571 - protein, 15 aa, Homo sapiens
  CDR3 for alpha chain variable domain of TCR clone 73286 (TRAV13-1, TRAJ32)
CAAGIYGGATNKLIF

SEQ ID NO: 146572 - protein, 12 aa, Homo sapiens
  CDR3 for beta chain variable domain of TCR clone 73286 (TRBV7-6, TRBJ2-3)
CASSTGTDTQYF

SEQ ID NO: 146573 - protein, 15 aa, Homo sapiens
  CDR3 for alpha chain variable domain of TCR clone 73287 (TRAV3, TRAJ45)
CAVRTPWGGADGLTF

SEQ ID NO: 146574 - protein, 17 aa, Homo sapiens
  CDR3 for beta chain variable domain of TCR clone 73287 (TRBV13, TRBJ2-3)
CASSLSRVAGGRNTQYF

SEQ ID NO: 146575 - protein, 16 aa, Homo sapiens
  CDR3 for alpha chain variable domain of TCR clone 73288 (TRAV30, TRAJ24)
CGTEIVDADSWGKFQF

SEQ ID NO: 146576 - protein, 14 aa, Homo sapiens
  CDR3 for beta chain variable domain of TCR clone 73288 (TRBV15, TRBJ2-5)
CATSIGGLGETQYF

SEQ ID NO: 146577 - protein, 14 aa, Homo sapiens
  CDR3 for alpha chain variable domain of TCR clone 73289 (TRAV8-6, TRAJ9)
CAVSENTGGFKTIF

SEQ ID NO: 146578 - protein, 11 aa, Homo sapiens
  CDR3 for beta chain variable domain of TCR clone 73289 (TRBV11-2, TRBJ2-2)
CASSLPGELFF

SEQ ID NO: 146579 - protein, 14 aa, Homo sapiens
  CDR3 for alpha chain variable domain of TCR clone 73290 (TRAV12-2, TRAJ33)
CAVKRARSNYQLIW

SEQ ID NO: 146580 - protein, 12 aa, Homo sapiens
  CDR3 for beta chain variable domain of TCR clone 73290 (TRBV24-1, TRBJ2-3)
CATSESTDTQYF

SEQ ID NO: 146581 - protein, 12 aa, Homo sapiens
  CDR3 for alpha chain variable domain of TCR clone 73291 (TRAV13-1, TRAJ21)
CAAKEGFNKFYF

SEQ ID NO: 146582 - protein, 12 aa, Homo sapiens
  CDR3 for beta chain variable domain of TCR clone 73291 (TRBV2, TRBJ2-1)
CAYGPPGNEQFF

SEQ ID NO: 146583 - protein, 13 aa, Homo sapiens
  CDR3 for alpha chain variable domain of TCR clone 73292 (TRAV27, TRAJ3)
ASLRASSASKIIF

SEQ ID NO: 146584 - protein, 15 aa, Homo sapiens
  CDR3 for beta chain variable domain of TCR clone 73292 (TRBV28, TRBJ1-3)
CASSMGWASGNTIYF

SEQ ID NO: 146585 - protein, 15 aa, Homo sapiens
  CDR3 for alpha chain variable domain of TCR clone 73293 (TRAV8-6, TRAJ6)
CAVSGESGGSYIPTF

SEQ ID NO: 146586 - protein, 14 aa, Homo sapiens
  CDR3 for beta chain variable domain of TCR clone 73293 (TRBV7-9, TRBJ2-1)
CASGSMVGFGEQFF

SEQ ID NO: 146587 - protein, 15 aa, Homo sapiens
  CDR3 for alpha chain variable domain of TCR clone 73294 (TRAV17, TRAJ16)
CATALRFSDGQKLLF

SEQ ID NO: 146588 - protein, 15 aa, Homo sapiens
  CDR3 for beta chain variable domain of TCR clone 73294 (TRBV9, TRBJ1-6)
CASSVAGTGDSPLHF

SEQ ID NO: 146589 - protein, 16 aa, Homo sapiens
  CDR3 for alpha chain variable domain of TCR clone 73295 (TRAV3, TRAJ37)
CAVRVRGSGNTGKLIF

SEQ ID NO: 146590 - protein, 13 aa, Homo sapiens
  CDR3 for beta chain variable domain of TCR clone 73295 (TRBV14, TRBJ2-1)
CASSRDRRNEQFF

SEQ ID NO: 146591 - protein, 14 aa, Homo sapiens
  CDR3 for alpha chain variable domain of TCR clone 73296 (TRAV9-2, TRAJ39)
CALYIYNAGNMLTF

SEQ ID NO: 146592 - protein, 14 aa, Homo sapiens
  CDR3 for beta chain variable domain of TCR clone 73296 (TRBV28, TRBJ2-4)
CASTQVTGVNIQYF

SEQ ID NO: 146593 - protein, 18 aa, Homo sapiens
  CDR3 for alpha chain variable domain of TCR clone 73297 (TRAV21, TRAJ52)
CAVRPSPAGGTRYGKLTF

SEQ ID NO: 146594 - protein, 17 aa, Homo sapiens
  CDR3 for beta chain variable domain of TCR clone 73297 (TRBV13, TRBJ2-3)
RASSLSRVAGGRNTQYF

SEQ ID NO: 146595 - protein, 16 aa, Homo sapiens
  CDR3 for alpha chain variable domain of TCR clone 73298 (TRAV3, TRAJ10)
CAVRDMRAGGGNKLTF

SEQ ID NO: 146596 - protein, 11 aa, Homo sapiens
  CDR3 for beta chain variable domain of TCR clone 73298 (TRBV29-1, TRBJ2-5)
CGEDRTGTQYF

SEQ ID NO: 146597 - protein, 11 aa, Homo sapiens
  CDR3 for alpha chain variable domain of TCR clone 73299 (TRAV16, TRAJ31)
CALFNNARLMF

SEQ ID NO: 146598 - protein, 14 aa, Homo sapiens
  CDR3 for beta chain variable domain of TCR clone 73299 (TRBV20-1, TRBJ1-1)
CSAQTRIGGTEAFF

SEQ ID NO: 146599 - protein, 13 aa, Homo sapiens
  CDR3 for alpha chain variable domain of TCR clone 73300 (TRAV27, TRAJ45)
CRSSGGGADGLIF

SEQ ID NO: 146600 - protein, 14 aa, Homo sapiens
  CDR3 for beta chain variable domain of TCR clone 73300 (TRBV7-9, TRBJ2-1)
CASSSMVGFGEQFF

SEQ ID NO: 146601 - protein, 10 aa, Homo sapiens
  CDR3 for alpha chain variable domain of TCR clone 73301 (TRAV3, TRAJ30)
CAVREIEIIF

SEQ ID NO: 146602 - protein, 14 aa, Homo sapiens
  CDR3 for beta chain variable domain of TCR clone 73301 (TRBV7-2, TRBJ1-1)
CASSFLTGTTEAFF

SEQ ID NO: 146603 - protein, 14 aa, Homo sapiens
  CDR3 for alpha chain variable domain of TCR clone 73302 (TRAV12-2, TRAJ13)
CAVEKTGGYQKVTF

SEQ ID NO: 146604 - protein, 18 aa, Homo sapiens
  CDR3 for beta chain variable domain of TCR clone 73302 (TRBV27, TRBJ2-1)
CTSVPAVMGGGSSNEQFF

SEQ ID NO: 146605 - protein, 16 aa, Homo sapiens
  CDR3 for alpha chain variable domain of TCR clone 73303 (TRAV17, TRAJ52)
CATGIIGGTSYGKLTF

SEQ ID NO: 146606 - protein, 12 aa, Homo sapiens
  CDR3 for beta chain variable domain of TCR clone 73303 (TRBV7-3, TRBJ2-1)
CASSFINDEQFF

SEQ ID NO: 146607 - protein, 12 aa, Homo sapiens
  CDR3 for alpha chain variable domain of TCR clone 73304 (TRAV12-2, TRAJ10)
WGVTGGGNKLTF

SEQ ID NO: 146608 - protein, 16 aa, Homo sapiens
  CDR3 for beta chain variable domain of TCR clone 73304 (TRBV20-1, TRBJ1-4)
CSAPGQGLLTNEKLFF

SEQ ID NO: 146609 - protein, 15 aa, Homo sapiens
  CDR3 for alpha chain variable domain of TCR clone 73305 (TRAV3, TRAJ40)
CAVRDVTSGTYKYIF

SEQ ID NO: 146610 - protein, 13 aa, Homo sapiens
  CDR3 for beta chain variable domain of TCR clone 73305 (TRBV7-9, TRBJ1-2)
CASSLKQNYGYAF

SEQ ID NO: 146611 - protein, 14 aa, Homo sapiens
  CDR3 for alpha chain variable domain of TCR clone 73306 (TRAV1-1, TRAJ30)
CAVRSLNRDDKIIF

SEQ ID NO: 146612 - protein, 12 aa, Homo sapiens
  CDR3 for beta chain variable domain of TCR clone 73306 (TRBV11-2, TRBJ2-2)
CASSLPTGELFF

SEQ ID NO: 146613 - protein, 15 aa, Homo sapiens
  CDR3 for alpha chain variable domain of TCR clone 73307 (TRAV27, TRAJ38)
CAARRNAGNNRMLIW

SEQ ID NO: 146614 - protein, 13 aa, Homo sapiens
  CDR3 for beta chain variable domain of TCR clone 73307 (TRBV12-5, TRBJ2-3)
CASGDRQSDTQYF

SEQ ID NO: 146615 - protein, 14 aa, Homo sapiens
  CDR3 for alpha chain variable domain of TCR clone 73308 (TRAV23/DV6, TRAJ13)
CAASETGGYQKVTF

SEQ ID NO: 146616 - protein, 13 aa, Homo sapiens
  CDR3 for beta chain variable domain of TCR clone 73308 (TRBV29-1, TRBJ2-1)
CSVEGGRANEQFF

SEQ ID NO: 146617 - protein, 12 aa, Homo sapiens
  CDR3 for alpha chain variable domain of TCR clone 73309 (TRAV12-3, TRAJ17)
CAMTLTGNKLTF

SEQ ID NO: 146618 - protein, 12 aa, Homo sapiens
  CDR3 for beta chain variable domain of TCR clone 73309 (TRBV11-2, TRBJ2-2)
CASSLPTGELSF

SEQ ID NO: 146619 - protein, 14 aa, Homo sapiens
  CDR3 for alpha chain variable domain of TCR clone 73310 (TRAV1-2, TRAJ8)
CAVREDTGFQKLVF

SEQ ID NO: 146620 - protein, 15 aa, Homo sapiens
  CDR3 for beta chain variable domain of TCR clone 73310 (TRBV4-2, TRBJ1-2)
CASSQRTGGRDGYTF

SEQ ID NO: 146621 - protein, 16 aa, Homo sapiens
  CDR3 for alpha chain variable domain of TCR clone 73311 (TRAV12-3, TRAJ53)
CAMSPGSGGSNYKLTF

SEQ ID NO: 146622 - protein, 16 aa, Homo sapiens
  CDR3 for beta chain variable domain of TCR clone 73311 (TRBV4-2, TRBJ1-1)
CASSQAGFGMNTEAFV

SEQ ID NO: 146623 - protein, 16 aa, Homo sapiens
  CDR3 for alpha chain variable domain of TCR clone 73312 (TRAV26-1, TRAJ23)
CIVRPAIYNQGGKLIL

SEQ ID NO: 146624 - protein, 15 aa, Homo sapiens
  CDR3 for beta chain variable domain of TCR clone 73312 (TRBV20-1, TRBJ2-3)
CSARPSGFYTDTQYF

SEQ ID NO: 146625 - protein, 15 aa, Homo sapiens
  CDR3 for alpha chain variable domain of TCR clone 73313 (TRAV2, TRAJ22)
CAVPSRGGSARQLTF

SEQ ID NO: 146626 - protein, 14 aa, Homo sapiens
  CDR3 for beta chain variable domain of TCR clone 73313 (TRBV7-6, TRBJ2-3)
CASSLGAVTDTQYF

SEQ ID NO: 146627 - protein, 15 aa, Homo sapiens
  CDR3 for alpha chain variable domain of TCR clone 73314 (TRAV26-1, TRAJ23)
RIVRVAGYQGGKLIF

SEQ ID NO: 146628 - protein, 18 aa, Homo sapiens
  CDR3 for beta chain variable domain of TCR clone 73314 (TRBV28, TRBJ2-1)
CASSPTSGRANSYNEQFF

SEQ ID NO: 146629 - protein, 14 aa, Homo sapiens
  CDR3 for alpha chain variable domain of TCR clone 73315 (TRAV17, TRAJ22)
CATSPSGSARQLTF

SEQ ID NO: 146630 - protein, 15 aa, Homo sapiens
  CDR3 for beta chain variable domain of TCR clone 73315 (TRBV27, TRBJ2-1)
CASSNGGGSSNEQFF

SEQ ID NO: 146631 - protein, 11 aa, Homo sapiens
  CDR3 for alpha chain variable domain of TCR clone 73316 (TRAV17, TRAJ9)
CATTGGFKTIF

SEQ ID NO: 146632 - protein, 14 aa, Homo sapiens
  CDR3 for beta chain variable domain of TCR clone 73316 (TRBV7-9, TRBJ2-2)
CASSGLAETGELFF

SEQ ID NO: 146633 - protein, 15 aa, Homo sapiens
  CDR3 for alpha chain variable domain of TCR clone 73317 (TRAV2, TRAJ37)
CAVEDGYSNTGKPIF

SEQ ID NO: 146634 - protein, 13 aa, Homo sapiens
  CDR3 for beta chain variable domain of TCR clone 73317 (TRBV20-1, TRBJ1-6)
CSTFREGNSPLHF

SEQ ID NO: 146635 - protein, 11 aa, Homo sapiens
  CDR3 for alpha chain variable domain of TCR clone 73318 (TRAV2, TRAJ13)
CASGGYQKVTF

SEQ ID NO: 146636 - protein, 15 aa, Homo sapiens
  CDR3 for beta chain variable domain of TCR clone 73318 (TRBV19, TRBJ2-2)
CASSPRTGWTGELFF

SEQ ID NO: 146637 - protein, 13 aa, Homo sapiens
  CDR3 for alpha chain variable domain of TCR clone 73319 (TRAV2, TRAJ40)
CAVVTSGTYKYIF

SEQ ID NO: 146638 - protein, 14 aa, Homo sapiens
  CDR3 for beta chain variable domain of TCR clone 73319 (TRBV19, TRBJ2-7)
CASTVQGRPYEQYF

SEQ ID NO: 146639 - protein, 17 aa, Homo sapiens
  CDR3 for alpha chain variable domain of TCR clone 73320 (TRAV35, TRAJ28)
CAGLQVYSGAGSYPLTF

SEQ ID NO: 146640 - protein, 15 aa, Homo sapiens
  CDR3 for beta chain variable domain of TCR clone 73320 (TRBV2, TRBJ1-2)
CASSEIGGANYGYTF

SEQ ID NO: 146641 - protein, 14 aa, Homo sapiens
  CDR3 for alpha chain variable domain of TCR clone 73321 (TRAV35, TRAJ22)
CAGLRPGSARQLTF

SEQ ID NO: 146642 - protein, 13 aa, Homo sapiens
  CDR3 for beta chain variable domain of TCR clone 73321 (TRBV20-1, TRBJ2-7)
CSVTHTSGYEQYF

SEQ ID NO: 146643 - protein, 14 aa, Homo sapiens
  CDR3 for alpha chain variable domain of TCR clone 73322 (TRAV12-2, TRAJ17)
CAVLFKAAGNKLTF

SEQ ID NO: 146644 - protein, 16 aa, Homo sapiens
  CDR3 for beta chain variable domain of TCR clone 73322 (TRBV9, TRBJ2-2)
CASSAMGKGNTGELFF

SEQ ID NO: 146645 - protein, 15 aa, Homo sapiens
  CDR3 for alpha chain variable domain of TCR clone 73323 (TRAV21, TRAJ24)
CAARSSTDSWGKLPF

SEQ ID NO: 146646 - protein, 15 aa, Homo sapiens
  CDR3 for beta chain variable domain of TCR clone 73323 (TRBV4-1, TRBJ2-7)
CASSQNTGRLYEQYF

SEQ ID NO: 146647 - protein, 18 aa, Homo sapiens
  CDR3 for alpha chain variable domain of TCR clone 73324 (TRAV21, TRAJ52)
CAVRPSPAGGTSYGKLTF

SEQ ID NO: 146648 - protein, 16 aa, Homo sapiens
  CDR3 for beta chain variable domain of TCR clone 73324 (TRBV27, TRBJ2-2)
CASSFRGLVRTGELFF

SEQ ID NO: 146649 - protein, 12 aa, Homo sapiens
  CDR3 for alpha chain variable domain of TCR clone 73325 (TRAV12-2, TRAJ21)
CAVRYNFNKFYF

SEQ ID NO: 146650 - protein, 17 aa, Homo sapiens
  CDR3 for beta chain variable domain of TCR clone 73325 (TRBV13, TRBJ2-3)
CASSLSRVAGGRNTQYF

SEQ ID NO: 146651 - protein, 13 aa, Homo sapiens
  CDR3 for alpha chain variable domain of TCR clone 73326 (TRAV2, TRAJ15)
CAVAPQAGTALIF

SEQ ID NO: 146652 - protein, 14 aa, Homo sapiens
  CDR3 for beta chain variable domain of TCR clone 73326 (TRBV20-1, TRBJ1-1)
CSAQTRIGGTEAFF

SEQ ID NO: 146653 - protein, 12 aa, Homo sapiens
  CDR3 for alpha chain variable domain of TCR clone 73327 (TRAV16, TRAJ8)
CAPLGGFQKLVF

SEQ ID NO: 146654 - protein, 13 aa, Homo sapiens
  CDR3 for beta chain variable domain of TCR clone 73327 (TRBV7-9, TRBJ2-3)
CASSPGSTDTQYF

SEQ ID NO: 146655 - protein, 15 aa, Homo sapiens
  CDR3 for alpha chain variable domain of TCR clone 73328 (TRAV8-3, TRAJ45)
CASSYSGGGADGLTF

SEQ ID NO: 146656 - protein, 16 aa, Homo sapiens
  CDR3 for beta chain variable domain of TCR clone 73328 (TRBV20-1, TRBJ2-2)
CSASASGIPGAGELFY

SEQ ID NO: 146657 - protein, 16 aa, Homo sapiens
  CDR3 for alpha chain variable domain of TCR clone 73329 (TRAV1-2, TRAJ10)
CAVRGELTGGGNKLTF

SEQ ID NO: 146658 - protein, 12 aa, Homo sapiens
  CDR3 for beta chain variable domain of TCR clone 73329 (TRBV7-8, TRBJ2-7)
CASSLGDREQYF

SEQ ID NO: 146659 - protein, 16 aa, Homo sapiens
  CDR3 for alpha chain variable domain of TCR clone 73330 (TRAV3, TRAJ37)
CAVRGKGSGNTGKLIF

SEQ ID NO: 146660 - protein, 13 aa, Homo sapiens
  CDR3 for beta chain variable domain of TCR clone 73330 (TRBV7-2, TRBJ2-4)
CASSREHANIQYF

SEQ ID NO: 146661 - protein, 14 aa, Homo sapiens
  CDR3 for alpha chain variable domain of TCR clone 73331 (TRAV4, TRAJ11)
CLVGEYSGYSTLTF

SEQ ID NO: 146662 - protein, 15 aa, Homo sapiens
  CDR3 for beta chain variable domain of TCR clone 73331 (TRBV20-1, TRBJ2-7)
CSARDRVSGMDEQYF

SEQ ID NO: 146663 - protein, 15 aa, Homo sapiens
  CDR3 for alpha chain variable domain of TCR clone 73332 (TRAV5, TRAJ33)
CAEAPAMDSNYQLIW

SEQ ID NO: 146664 - protein, 13 aa, Homo sapiens
  CDR3 for beta chain variable domain of TCR clone 73332 (TRBV27, TRBJ2-7)
CASSSGDSYEQYF

SEQ ID NO: 146665 - protein, 12 aa, Homo sapiens
  CDR3 for alpha chain variable domain of TCR clone 73333 (TRAV13-1, TRAJ21)
CAAKEGFNKFYF

SEQ ID NO: 146666 - protein, 13 aa, Homo sapiens
  CDR3 for beta chain variable domain of TCR clone 73333 (TRBV7-9, TRBJ2-1)
RASSLGTVNEQFF

SEQ ID NO: 146667 - protein, 17 aa, Homo sapiens
  CDR3 for alpha chain variable domain of TCR clone 73334 (TRAV3, TRAJ38)
CAVRDCLNAGNNRKLIW

SEQ ID NO: 146668 - protein, 12 aa, Homo sapiens
  CDR3 for beta chain variable domain of TCR clone 73334 (TRBV11-3, TRBJ1-1)
CASSLRDSEAFF

SEQ ID NO: 146669 - protein, 16 aa, Homo sapiens
  CDR3 for alpha chain variable domain of TCR clone 73335 (TRAV22, TRAJ45)
CAVERGKRGGADGLTF

SEQ ID NO: 146670 - protein, 11 aa, Homo sapiens
  CDR3 for beta chain variable domain of TCR clone 73335 (TRBV29-1, TRBJ2-5)
CSEGRTGTQYF

SEQ ID NO: 146671 - protein, 13 aa, Homo sapiens
  CDR3 for alpha chain variable domain of TCR clone 73336 (TRAV27, TRAJ6)
CAGGTRGSYIPTL

SEQ ID NO: 146672 - protein, 15 aa, Homo sapiens
  CDR3 for beta chain variable domain of TCR clone 73336 (TRBV11-2, TRBJ1-3)
CASSLSPLVRDTIYF

SEQ ID NO: 146673 - protein, 13 aa, Homo sapiens
  CDR3 for alpha chain variable domain of TCR clone 73337 (TRAV20, TRAJ20)
CAVRWVRDYKLSF

SEQ ID NO: 146674 - protein, 15 aa, Homo sapiens
  CDR3 for beta chain variable domain of TCR clone 73337 (TRBV19, TRBJ2-1)
CASSSPGVPLDEQFF

SEQ ID NO: 146675 - protein, 14 aa, Homo sapiens
  CDR3 for alpha chain variable domain of TCR clone 73338 (TRAV1-2, TRAJ16)
CAVNRFSDGQKLLF

SEQ ID NO: 146676 - protein, 15 aa, Homo sapiens
  CDR3 for beta chain variable domain of TCR clone 73338 (TRBV7-2, TRBJ2-1)
CASSLVGSSYNEQFF

SEQ ID NO: 146677 - protein, 13 aa, Homo sapiens
  CDR3 for alpha chain variable domain of TCR clone 73339 (TRAV3, TRAJ41)
CAVSSNSGYALNF

SEQ ID NO: 146678 - protein, 14 aa, Homo sapiens
  CDR3 for beta chain variable domain of TCR clone 73339 (TRBV4-1, TRBJ2-2)
CASSQAVNTGELFF

SEQ ID NO: 146679 - protein, 14 aa, Homo sapiens
  CDR3 for alpha chain variable domain of TCR clone 73340 (TRAV16, TRAJ33)
CALSAMDSNNQLIW

SEQ ID NO: 146680 - protein, 17 aa, Homo sapiens
  CDR3 for beta chain variable domain of TCR clone 73340 (TRBV25-1, TRBJ2-7)
CASSDARVVFSSYEQYF

SEQ ID NO: 146681 - protein, 14 aa, Homo sapiens
  CDR3 for alpha chain variable domain of TCR clone 73341 (TRAV13-1, TRAJ13)
CAASRVGGYQKVTF

SEQ ID NO: 146682 - protein, 17 aa, Homo sapiens
  CDR3 for beta chain variable domain of TCR clone 73341 (TRBV15, TRBJ1-5)
CATSRAPPGTRTQPQHF

SEQ ID NO: 146683 - protein, 11 aa, Homo sapiens
  CDR3 for alpha chain variable domain of TCR clone 73342 (TRAV2, TRAJ13)
CASGGYQKVTF

SEQ ID NO: 146684 - protein, 15 aa, Homo sapiens
  CDR3 for beta chain variable domain of TCR clone 73342 (TRBV7-3, TRBJ2-1)
CASSLDGNSYNEQFF

SEQ ID NO: 146685 - protein, 18 aa, Homo sapiens
  CDR3 for alpha chain variable domain of TCR clone 73343 (TRAV13-1, TRAJ52)
CAASKRSAGGTSYGKLIF

SEQ ID NO: 146686 - protein, 12 aa, Homo sapiens
  CDR3 for beta chain variable domain of TCR clone 73343 (TRBV11-2, TRBJ2-2)
CASSLGGGELFF

SEQ ID NO: 146687 - protein, 12 aa, Homo sapiens
  CDR3 for alpha chain variable domain of TCR clone 73344 (TRAV8-3, TRAJ26)
CAGDDYGQNLVF

SEQ ID NO: 146688 - protein, 15 aa, Homo sapiens
  CDR3 for beta chain variable domain of TCR clone 73344 (TRBV9, TRBJ2-1)
CASSLAGSSYNEQFF

SEQ ID NO: 146689 - protein, 13 aa, Homo sapiens
  CDR3 for alpha chain variable domain of TCR clone 73345 (TRAV3, TRAJ20)
CCEAFCNDYKLGF

SEQ ID NO: 146690 - protein, 15 aa, Homo sapiens
  CDR3 for beta chain variable domain of TCR clone 73345 (TRBV19, TRBJ2-6)
CASVRRDSGANVLTF

SEQ ID NO: 146691 - protein, 18 aa, Homo sapiens
  CDR3 for alpha chain variable domain of TCR clone 73346 (TRAV26-2, TRAJ45)
CILRVDKNSGGGADGLTF

SEQ ID NO: 146692 - protein, 16 aa, Homo sapiens
  CDR3 for beta chain variable domain of TCR clone 73346 (TRBV2, TRBJ1-4)
CASNLLQGATNEKLFF

SEQ ID NO: 146693 - protein, 15 aa, Homo sapiens
  CDR3 for alpha chain variable domain of TCR clone 73347 (TRAV3, TRAJ22)
CAVRDRGGSARQLTF

SEQ ID NO: 146694 - protein, 14 aa, Homo sapiens
  CDR3 for beta chain variable domain of TCR clone 73347 (TRBV25-1, TRBJ1-1)
CASTHLGGSTEAFF

SEQ ID NO: 146695 - protein, 13 aa, Homo sapiens
  CDR3 for alpha chain variable domain of TCR clone 73348 (TRAV35, TRAJ42)
CTGFPGSQGNLIF

SEQ ID NO: 146696 - protein, 13 aa, Homo sapiens
  CDR3 for beta chain variable domain of TCR clone 73348 (TRBV29-1, TRBJ2-1)
CSVEGGRVNEQFF

SEQ ID NO: 146697 - protein, 12 aa, Homo sapiens
  CDR3 for alpha chain variable domain of TCR clone 73349 (TRAV3, TRAJ20)
CAVRDPNNDMRF

SEQ ID NO: 146698 - protein, 15 aa, Homo sapiens
  CDR3 for beta chain variable domain of TCR clone 73349 (TRBV7-9, TRBJ1-6)
CASSSPGRGNSPLHF

SEQ ID NO: 146699 - protein, 14 aa, Homo sapiens
  CDR3 for alpha chain variable domain of TCR clone 73350 (TRAV12-2, TRAJ44)
CAVNPAGTASKLTF

SEQ ID NO: 146700 - protein, 14 aa, Homo sapiens
  CDR3 for beta chain variable domain of TCR clone 73350 (TRBV7-2, TRBJ1-3)
CASSSLRSGNTIYF

SEQ ID NO: 146701 - protein, 14 aa, Homo sapiens
  CDR3 for alpha chain variable domain of TCR clone 73351 (TRAV2, TRAJ9)
CAVEDRSGGFKTIF

SEQ ID NO: 146702 - protein, 13 aa, Homo sapiens
  CDR3 for beta chain variable domain of TCR clone 73351 (TRBV15, TRBJ1-6)
CATSGGLNSPLHF

SEQ ID NO: 146703 - protein, 12 aa, Homo sapiens
  CDR3 for alpha chain variable domain of TCR clone 73352 (TRAV12-2, TRAJ10)
WGGTGGGNKLTF

SEQ ID NO: 146704 - protein, 16 aa, Homo sapiens
  CDR3 for beta chain variable domain of TCR clone 73352 (TRBV6-4, TRBJ1-2)
CASSEAVGDPNYGYTF

SEQ ID NO: 146705 - protein, 17 aa, Homo sapiens
  CDR3 for alpha chain variable domain of TCR clone 73353 (TRAV20, TRAJ42)
CAVQAWGYGGSQGNLIF

SEQ ID NO: 146706 - protein, 16 aa, Homo sapiens
  CDR3 for beta chain variable domain of TCR clone 73353 (TRBV29-1, TRBJ2-5)
CSAEGLAGDYQETQYF

SEQ ID NO: 146707 - protein, 13 aa, Homo sapiens
  CDR3 for alpha chain variable domain of TCR clone 73354 (TRAV8-6, TRAJ21)
CAVSPSSLNKFYF

SEQ ID NO: 146708 - protein, 14 aa, Homo sapiens
  CDR3 for beta chain variable domain of TCR clone 73354 (TRBV7-9, TRBJ2-5)
CASSLDTAKETQYF

SEQ ID NO: 146709 - protein, 11 aa, Homo sapiens
  CDR3 for alpha chain variable domain of TCR clone 73355 (TRAV21, TRAJ4)
HVSGGYNKLIF

SEQ ID NO: 146710 - protein, 15 aa, Homo sapiens
  CDR3 for beta chain variable domain of TCR clone 73355 (TRBV20-1, TRBJ2-7)
CSARDRVSGMDEQYF

SEQ ID NO: 146711 - protein, 12 aa, Homo sapiens
  CDR3 for alpha chain variable domain of TCR clone 73356 (TRAV8-3, TRAJ26)
CAGDNYGQNFVS

SEQ ID NO: 146712 - protein, 16 aa, Homo sapiens
  CDR3 for beta chain variable domain of TCR clone 73356 (TRBV12-4, TRBJ2-5)
CASSFFVRGRQETQYF

SEQ ID NO: 146713 - protein, 14 aa, Homo sapiens
  CDR3 for alpha chain variable domain of TCR clone 73357 (TRAV29/DV5, TRAJ44)
CAAFLVGTASKLTF

SEQ ID NO: 146714 - protein, 15 aa, Homo sapiens
  CDR3 for beta chain variable domain of TCR clone 73357 (TRBV7-3, TRBJ2-2)
CASSETGHGTGELFF

SEQ ID NO: 146715 - protein, 14 aa, Homo sapiens
  CDR3 for alpha chain variable domain of TCR clone 73358 (TRAV17, TRAJ22)
CATIPSGSARQLTF

SEQ ID NO: 146716 - protein, 15 aa, Homo sapiens
  CDR3 for beta chain variable domain of TCR clone 73358 (TRBV4-1, TRBJ2-5)
CASSQWDLYQETQYF

SEQ ID NO: 146717 - protein, 15 aa, Homo sapiens
  CDR3 for alpha chain variable domain of TCR clone 73359 (TRAV8-3, TRAJ45)
CASSYSGGGADGLTF

SEQ ID NO: 146718 - protein, 17 aa, Homo sapiens
  CDR3 for beta chain variable domain of TCR clone 73359 (TRBV7-8, TRBJ1-2)
CASSFRPLQGHLYGYTF

SEQ ID NO: 146719 - protein, 14 aa, Homo sapiens
  CDR3 for alpha chain variable domain of TCR clone 73360 (TRAV1-2, TRAJ16)
CAVNRFSDGQKLLF

SEQ ID NO: 146720 - protein, 17 aa, Homo sapiens
  CDR3 for beta chain variable domain of TCR clone 73360 (TRBV7-3, TRBJ2-3)
CASSPRGQGYGTDTQYF

SEQ ID NO: 146721 - protein, 13 aa, Homo sapiens
  CDR3 for alpha chain variable domain of TCR clone 73361 (TRAV17, TRAJ5)
CAPMDTGRRALTF

SEQ ID NO: 146722 - protein, 14 aa, Homo sapiens
  CDR3 for beta chain variable domain of TCR clone 73361 (TRBV18, TRBJ2-7)
CASSPRGGAYEQYF

SEQ ID NO: 146723 - protein, 14 aa, Homo sapiens
  CDR3 for alpha chain variable domain of TCR clone 73362 (TRAV17, TRAJ37)
CATDGSSNTCKLIF

SEQ ID NO: 146724 - protein, 13 aa, Homo sapiens
  CDR3 for beta chain variable domain of TCR clone 73362 (TRBV11-2, TRBJ2-1)
CASSLDLVNEQFF

SEQ ID NO: 146725 - protein, 15 aa, Homo sapiens
  CDR3 for alpha chain variable domain of TCR clone 73363 (TRAV8-3, TRAJ27)
CAVGHSKTNAGKSTF

SEQ ID NO: 146726 - protein, 12 aa, Homo sapiens
  CDR3 for beta chain variable domain of TCR clone 73363 (TRBV11-2, TRBJ2-2)
CASSLGGGELFF

SEQ ID NO: 146727 - protein, 15 aa, Homo sapiens
  CDR3 for alpha chain variable domain of TCR clone 73364 (TRAV13-1, TRAJ52)
CAATSPRTSYGKLTF

SEQ ID NO: 146728 - protein, 16 aa, Homo sapiens
  CDR3 for beta chain variable domain of TCR clone 73364 (TRBV7-3, TRBJ2-2)
CASSLKRGTVSGELFF

SEQ ID NO: 146729 - protein, 11 aa, Homo sapiens
  CDR3 for alpha chain variable domain of TCR clone 73365 (TRAV12-2, TRAJ49)
CAVNTGNQSYF

SEQ ID NO: 146730 - protein, 12 aa, Homo sapiens
  CDR3 for beta chain variable domain of TCR clone 73365 (TRBV2, TRBJ2-3)
CASSGRFDTQYF

SEQ ID NO: 146731 - protein, 15 aa, Homo sapiens
  CDR3 for alpha chain variable domain of TCR clone 73366 (TRAV26-1, TRAJ56)
CIVRVATGANSKLKF

SEQ ID NO: 146732 - protein, 15 aa, Homo sapiens
  CDR3 for beta chain variable domain of TCR clone 73366 (TRBV27, TRBJ2-7)
CASSPQREGQREQYF

SEQ ID NO: 146733 - protein, 10 aa, Homo sapiens
  CDR3 for alpha chain variable domain of TCR clone 73367 (TRAV26-1, TRAJ40)
CIAGTYKYIF

SEQ ID NO: 146734 - protein, 14 aa, Homo sapiens
  CDR3 for beta chain variable domain of TCR clone 73367 (TRBV27, TRBJ2-3)
CASRDSPITDTQYF

SEQ ID NO: 146735 - protein, 17 aa, Homo sapiens
  CDR3 for alpha chain variable domain of TCR clone 73368 (TRAV26-1, TRAJ53)
CIVRVDDSGGSNYKLTF

SEQ ID NO: 146736 - protein, 15 aa, Homo sapiens
  CDR3 for beta chain variable domain of TCR clone 73368 (TRBV20-1, TRBJ2-7)
CSARVPVAYFYEQYF

SEQ ID NO: 146737 - protein, 12 aa, Homo sapiens
  CDR3 for alpha chain variable domain of TCR clone 73369 (TRAV12-3, TRAJ17)
CAVTLTGNKLTF

SEQ ID NO: 146738 - protein, 15 aa, Homo sapiens
  CDR3 for beta chain variable domain of TCR clone 73369 (TRBV9, TRBJ1-6)
CASSVAGTGDSPLHF

SEQ ID NO: 146739 - protein, 14 aa, Homo sapiens
  CDR3 for alpha chain variable domain of TCR clone 73370 (TRAV38-1, TRAJ40)
CALRPTSGTYKYIF

SEQ ID NO: 146740 - protein, 14 aa, Homo sapiens
  CDR3 for beta chain variable domain of TCR clone 73370 (TRBV25-1, TRBJ1-1)
CASTHLGGNTEAFF

SEQ ID NO: 146741 - protein, 13 aa, Homo sapiens
  CDR3 for alpha chain variable domain of TCR clone 73371 (TRAV1-2, TRAJ20)
CAVPRSNDYKLSF

SEQ ID NO: 146742 - protein, 14 aa, Homo sapiens
  CDR3 for beta chain variable domain of TCR clone 73371 (TRBV20-1, TRBJ2-7)
CSARYGTTYYEQCF

SEQ ID NO: 146743 - protein, 13 aa, Homo sapiens
  CDR3 for alpha chain variable domain of TCR clone 73372 (TRAV8-3, TRAJ21)
CAVGAYNFNKFYF

SEQ ID NO: 146744 - protein, 16 aa, Homo sapiens
  CDR3 for beta chain variable domain of TCR clone 73372 (TRBV10-2, TRBJ1-1)
CASSEFGEGASTEAFF

SEQ ID NO: 146745 - protein, 14 aa, Homo sapiens
  CDR3 for alpha chain variable domain of TCR clone 73373 (TRAV12-2, TRAJ13)
CAVKKTGGYQKVTF

SEQ ID NO: 146746 - protein, 15 aa, Homo sapiens
  CDR3 for beta chain variable domain of TCR clone 73373 (TRBV11-2, TRBJ2-2)
CASSSDRANAGELFF

SEQ ID NO: 146747 - protein, 15 aa, Homo sapiens
  CDR3 for alpha chain variable domain of TCR clone 73374 (TRAV13-1, TRAJ45)
CAASGSGGGADGLAF

SEQ ID NO: 146748 - protein, 12 aa, Homo sapiens
  CDR3 for beta chain variable domain of TCR clone 73374 (TRBV11-2, TRBJ2-2)
CASSLGGGGLFF

SEQ ID NO: 146749 - protein, 17 aa, Homo sapiens
  CDR3 for alpha chain variable domain of TCR clone 73375 (TRAV3, TRAJ12)
CAVRDGGRMDSSYKLIF

SEQ ID NO: 146750 - protein, 11 aa, Homo sapiens
  CDR3 for beta chain variable domain of TCR clone 73375 (TRBV11-2, TRBJ2-2)
CASSLPGELFF

SEQ ID NO: 146751 - protein, 14 aa, Homo sapiens
  CDR3 for alpha chain variable domain of TCR clone 73376 (TRAV38-1, TRAJ45)
CASHSGGGADGLTF

SEQ ID NO: 146752 - protein, 13 aa, Homo sapiens
  CDR3 for beta chain variable domain of TCR clone 73376 (TRBV10-3, TRBJ1-2)
CAINERDSYGYTF

SEQ ID NO: 146753 - protein, 16 aa, Homo sapiens
  CDR3 for alpha chain variable domain of TCR clone 73377 (TRAV4, TRAJ22)
CLVGDLYSGSARQLTF

SEQ ID NO: 146754 - protein, 13 aa, Homo sapiens
  CDR3 for beta chain variable domain of TCR clone 73377 (TRBV7-9, TRBJ1-2)
CASSLKQNYGYTF

SEQ ID NO: 146755 - protein, 11 aa, Homo sapiens
  CDR3 for alpha chain variable domain of TCR clone 73378 (TRAV2, TRAJ33)
CAVESNYQLIW

SEQ ID NO: 146756 - protein, 15 aa, Homo sapiens
  CDR3 for beta chain variable domain of TCR clone 73378 (TRBV19, TRBJ1-1)
CASTSGEIQNTEAFF

SEQ ID NO: 146757 - protein, 15 aa, Homo sapiens
  CDR3 for alpha chain variable domain of TCR clone 73379 (TRAV17, TRAJ42)
CATDHYGGSQGNLIF

SEQ ID NO: 146758 - protein, 15 aa, Homo sapiens
  CDR3 for beta chain variable domain of TCR clone 73379 (TRBV5-1, TRBJ2-2)
CASSPQGGNTGELFF

SEQ ID NO: 146759 - protein, 14 aa, Homo sapiens
  CDR3 for alpha chain variable domain of TCR clone 73380 (TRAV1-1, TRAJ27)
CAVIYNTNAGKSTF

SEQ ID NO: 146760 - protein, 12 aa, Homo sapiens
  CDR3 for beta chain variable domain of TCR clone 73380 (TRBV12-4, TRBJ2-7)
CASSLGGYEQYF

SEQ ID NO: 146761 - protein, 13 aa, Homo sapiens
  CDR3 for alpha chain variable domain of TCR clone 73381 (TRAV21, TRAJ20)
CAGPDSNDYKLSF

SEQ ID NO: 146762 - protein, 15 aa, Homo sapiens
  CDR3 for beta chain variable domain of TCR clone 73381 (TRBV28, TRBJ1-3)
CASSMGWASGNTIYF

SEQ ID NO: 146763 - protein, 14 aa, Homo sapiens
  CDR3 for alpha chain variable domain of TCR clone 73382 (TRAV8-4, TRAJ13)
CAVTLSGGYQKVTF

SEQ ID NO: 146764 - protein, 13 aa, Homo sapiens
  CDR3 for beta chain variable domain of TCR clone 73382 (TRBV10-3, TRBJ2-7)
CASKLAVNYEQYF

SEQ ID NO: 146765 - protein, 14 aa, Homo sapiens
  CDR3 for alpha chain variable domain of TCR clone 73383 (TRAV13-1, TRAJ40)
CAASMTSGTYKYIF

SEQ ID NO: 146766 - protein, 14 aa, Homo sapiens
  CDR3 for beta chain variable domain of TCR clone 73383 (TRBV11-2, TRBJ2-7)
CASSLGAGAYEQYF

SEQ ID NO: 146767 - protein, 17 aa, Homo sapiens
  CDR3 for alpha chain variable domain of TCR clone 73384 (TRAV26-2, TRAJ37)
CILRELVGSSNTGKLIF

SEQ ID NO: 146768 - protein, 15 aa, Homo sapiens
  CDR3 for beta chain variable domain of TCR clone 73384 (TRBV7-2, TRBJ2-1)
CASTSASGDYNEQFF

SEQ ID NO: 146769 - protein, 14 aa, Homo sapiens
  CDR3 for alpha chain variable domain of TCR clone 73385 (TRAV12-1, TRAJ23)
CVVIVYNQGGKLIC

SEQ ID NO: 146770 - protein, 13 aa, Homo sapiens
  CDR3 for beta chain variable domain of TCR clone 73385 (TRBV11-2, TRBJ2-5)
CASSFSSQETQYF

SEQ ID NO: 146771 - protein, 14 aa, Homo sapiens
  CDR3 for alpha chain variable domain of TCR clone 73386 (TRAV17, TRAJ22)
CATSPSGSARQLTF

SEQ ID NO: 146772 - protein, 13 aa, Homo sapiens
  CDR3 for beta chain variable domain of TCR clone 73386 (TRBV12-4, TRBJ1-2)
CASSLLQGKGYTF

SEQ ID NO: 146773 - protein, 11 aa, Homo sapiens
  CDR3 for alpha chain variable domain of TCR clone 73387 (TRAV3, TRAJ21)
CAVGNFNKFYF

SEQ ID NO: 146774 - protein, 14 aa, Homo sapiens
  CDR3 for beta chain variable domain of TCR clone 73387 (TRBV3-1, TRBJ1-5)
CASSPLWSNQPQHF

SEQ ID NO: 146775 - protein, 18 aa, Homo sapiens
  CDR3 for alpha chain variable domain of TCR clone 73388 (TRAV26-2, TRAJ45)
CILRVDKYSGGGADGLTF

SEQ ID NO: 146776 - protein, 16 aa, Homo sapiens
  CDR3 for beta chain variable domain of TCR clone 73388 (TRBV2, TRBJ1-4)
RASNLLQGATNEKLFF

SEQ ID NO: 146777 - protein, 13 aa, Homo sapiens
  CDR3 for alpha chain variable domain of TCR clone 73389 (TRAV27, TRAJ49)
CAPRPYTGNQFYF

SEQ ID NO: 146778 - protein, 13 aa, Homo sapiens
  CDR3 for beta chain variable domain of TCR clone 73389 (TRBV7-3, TRBJ1-1)
CASSQDWGAEAFF

SEQ ID NO: 146779 - protein, 11 aa, Homo sapiens
  CDR3 for alpha chain variable domain of TCR clone 73390 (TRAV26-1, TRAJ37)
RIVRVGRKLIF

SEQ ID NO: 146780 - protein, 13 aa, Homo sapiens
  CDR3 for beta chain variable domain of TCR clone 73390 (TRBV14, TRBJ1-2)
CASSEDRRYGYTF

SEQ ID NO: 146781 - protein, 12 aa, Homo sapiens
  CDR3 for alpha chain variable domain of TCR clone 73391 (TRAV1-2, TRAJ33)
CAALDSNYQLIW

SEQ ID NO: 146782 - protein, 13 aa, Homo sapiens
  CDR3 for beta chain variable domain of TCR clone 73391 (TRBV7-3, TRBJ1-1)
CASSQDWGAEAFF

SEQ ID NO: 146783 - protein, 11 aa, Homo sapiens
  CDR3 for alpha chain variable domain of TCR clone 73392 (TRAV3, TRAJ32)
CAVRAGIMVVL

SEQ ID NO: 146784 - protein, 13 aa, Homo sapiens
  CDR3 for beta chain variable domain of TCR clone 73392 (TRBV2, TRBJ1-1)
CASSEGGNTEAFF

SEQ ID NO: 146785 - protein, 13 aa, Homo sapiens
  CDR3 for alpha chain variable domain of TCR clone 73393 (TRAV35, TRAJ44)
CAGLSGTASKLTF

SEQ ID NO: 146786 - protein, 17 aa, Homo sapiens
  CDR3 for beta chain variable domain of TCR clone 73393 (TRBV7-8, TRBJ1-2)
CASSLRPLQGHLYGYTS

SEQ ID NO: 146787 - protein, 15 aa, Homo sapiens
  CDR3 for alpha chain variable domain of TCR clone 73394 (TRAV38-2/DV8, TRAJ57)
CAYGRVFGKGTKLTV

SEQ ID NO: 146788 - protein, 15 aa, Homo sapiens
  CDR3 for beta chain variable domain of TCR clone 73394 (TRBV5-7, TRBJ2-7)
CASSPYFEGSYEQYF

SEQ ID NO: 146789 - protein, 11 aa, Homo sapiens
  CDR3 for alpha chain variable domain of TCR clone 73395 (TRAV17, TRAJ43)
CATDVTGDMRF

SEQ ID NO: 146790 - protein, 14 aa, Homo sapiens
  CDR3 for beta chain variable domain of TCR clone 73395 (TRBV12-4, TRBJ1-1)
CASRPEQGRTEAFF

SEQ ID NO: 146791 - protein, 16 aa, Homo sapiens
  CDR3 for alpha chain variable domain of TCR clone 73396 (TRAV26-2, TRAJ45)
CTTASPIGGGADGLTF

SEQ ID NO: 146792 - protein, 20 aa, Homo sapiens
  CDR3 for beta chain variable domain of TCR clone 73396 (TRBV28, TRBJ2-1)
CASTPTGRSPGLAGGNEQFF

SEQ ID NO: 146793 - protein, 14 aa, Homo sapiens
  CDR3 for alpha chain variable domain of TCR clone 73397 (TRAV8-6, TRAJ29)
CAVSGWAGNTPLVF

SEQ ID NO: 146794 - protein, 20 aa, Homo sapiens
  CDR3 for beta chain variable domain of TCR clone 73397 (TRBV5-1, TRBJ2-2)
CASSYSLPGLAVQNTGELFF

SEQ ID NO: 146795 - protein, 17 aa, Homo sapiens
  CDR3 for alpha chain variable domain of TCR clone 73398 (TRAV26-1, TRAJ58)
CIVRVGAEETSGSRLNF

SEQ ID NO: 146796 - protein, 18 aa, Homo sapiens
  CDR3 for beta chain variable domain of TCR clone 73398 (TRBV7-9, TRBJ2-7)
CASSLTTSGSRTWYEQYF

SEQ ID NO: 146797 - protein, 15 aa, Homo sapiens
  CDR3 for alpha chain variable domain of TCR clone 73399 (TRAV27, TRAJ53)
CRAINSGGRNYKLTF

SEQ ID NO: 146798 - protein, 14 aa, Homo sapiens
  CDR3 for beta chain variable domain of TCR clone 73399 (TRBV7-3, TRBJ2-1)
CASSLAGGTNEQFF

SEQ ID NO: 146799 - protein, 11 aa, Homo sapiens
  CDR3 for alpha chain variable domain of TCR clone 73400 (TRAV26-1, TRAJ37)
CIVRVGRKLIF

SEQ ID NO: 146800 - protein, 14 aa, Homo sapiens
  CDR3 for beta chain variable domain of TCR clone 73400 (TRBV15, TRBJ2-3)
CATRSGTSTDTQYF

SEQ ID NO: 146801 - protein, 15 aa, Homo sapiens
  CDR3 for alpha chain variable domain of TCR clone 73401 (TRAV23/DV6, TRAJ10)
CAASIGTHGRRKQTH

SEQ ID NO: 146802 - protein, 13 aa, Homo sapiens
  CDR3 for beta chain variable domain of TCR clone 73401 (TRBV11-1, TRBJ1-2)
CASVGSWGYGYTF

SEQ ID NO: 146803 - protein, 13 aa, Homo sapiens
  CDR3 for alpha chain variable domain of TCR clone 73402 (TRAV8-3, TRAJ43)
CAVVPYNNNDMRF

SEQ ID NO: 146804 - protein, 13 aa, Homo sapiens
  CDR3 for beta chain variable domain of TCR clone 73402 (TRBV7-9, TRBJ2-3)
CASSPGSTDTQYF

SEQ ID NO: 146805 - protein, 14 aa, Homo sapiens
  CDR3 for alpha chain variable domain of TCR clone 73403 (TRAV8-4, TRAJ40)
CAVLSTSGTYKYIF

SEQ ID NO: 146806 - protein, 14 aa, Homo sapiens
  CDR3 for beta chain variable domain of TCR clone 73403 (TRBV19, TRBJ2-1)
CARGARSFQWEQFF

SEQ ID NO: 146807 - protein, 12 aa, Homo sapiens
  CDR3 for alpha chain variable domain of TCR clone 73404 (TRAV16, TRAJ10)
CSRTGGGNKLTF

SEQ ID NO: 146808 - protein, 13 aa, Homo sapiens
  CDR3 for beta chain variable domain of TCR clone 73404 (TRBV2, TRBJ1-1)
CARNPTGGFHAFF

SEQ ID NO: 146809 - protein, 10 aa, Homo sapiens
  CDR3 for alpha chain variable domain of TCR clone 73405 (TRAV2, TRAJ15)
RGPAGTALIF

SEQ ID NO: 146810 - protein, 12 aa, Homo sapiens
  CDR3 for beta chain variable domain of TCR clone 73405 (TRBV11-2, TRBJ2-2)
CASSLGGGELFF

SEQ ID NO: 146811 - protein, 15 aa, Homo sapiens
  CDR3 for alpha chain variable domain of TCR clone 73406 (TRAV3, TRAJ47)
CAVRDIGEYGNKLVF

SEQ ID NO: 146812 - protein, 14 aa, Homo sapiens
  CDR3 for beta chain variable domain of TCR clone 73406 (TRBV13, TRBJ2-5)
CASSLERVGETHYF

SEQ ID NO: 146813 - protein, 13 aa, Homo sapiens
  CDR3 for alpha chain variable domain of TCR clone 73407 (TRAV23/DV6, TRAJ36)
CAASQTGANNLFF

SEQ ID NO: 146814 - protein, 13 aa, Homo sapiens
  CDR3 for beta chain variable domain of TCR clone 73407 (TRBV5-4, TRBJ1-5)
CASSLGGDQHQHF

SEQ ID NO: 146815 - protein, 13 aa, Homo sapiens
  CDR3 for alpha chain variable domain of TCR clone 73408 (TRAV19, TRAJ31)
CALKSGNNARLMF

SEQ ID NO: 146816 - protein, 12 aa, Homo sapiens
  CDR3 for beta chain variable domain of TCR clone 73408 (TRBV11-2, TRBJ2-2)
CASSLGGGELFF

SEQ ID NO: 146817 - protein, 11 aa, Homo sapiens
  CDR3 for alpha chain variable domain of TCR clone 73409 (TRAV27, TRAJ47)
SIVDYGNKLVF

SEQ ID NO: 146818 - protein, 18 aa, Homo sapiens
  CDR3 for beta chain variable domain of TCR clone 73409 (TRBV2, TRBJ2-1)
CASRGLAGGPRTYNEQFF

SEQ ID NO: 146819 - protein, 10 aa, Homo sapiens
  CDR3 for alpha chain variable domain of TCR clone 73410 (TRAV16, TRAJ22)
SAMYLRQLTF

SEQ ID NO: 146820 - protein, 15 aa, Homo sapiens
  CDR3 for beta chain variable domain of TCR clone 73410 (TRBV7-9, TRBJ1-6)
CASSSPGRGNSPRHF

SEQ ID NO: 146821 - protein, 16 aa, Homo sapiens
  CDR3 for alpha chain variable domain of TCR clone 73411 (TRAV13-1, TRAJ48)
CSKYRESNSGNEKLTF

SEQ ID NO: 146822 - protein, 17 aa, Homo sapiens
  CDR3 for beta chain variable domain of TCR clone 73411 (TRBV28, TRBJ2-1)
CASSSARQALTYNEQFF

SEQ ID NO: 146823 - protein, 14 aa, Homo sapiens
  CDR3 for alpha chain variable domain of TCR clone 73412 (TRAV12-2, TRAJ24)
CAVTPADRWGKLQF

SEQ ID NO: 146824 - protein, 12 aa, Homo sapiens
  CDR3 for beta chain variable domain of TCR clone 73412 (TRBV3-1, TRBJ2-1)
CASSQGSSGQFF

SEQ ID NO: 146825 - protein, 12 aa, Homo sapiens
  CDR3 for alpha chain variable domain of TCR clone 73413 (TRAV12-3, TRAJ17)
CAMTLTGNKLTF

SEQ ID NO: 146826 - protein, 15 aa, Homo sapiens
  CDR3 for beta chain variable domain of TCR clone 73413 (TRBV20-1, TRBJ2-7)
CSARDRVPGMEEQYF

SEQ ID NO: 146827 - protein, 16 aa, Homo sapiens
  CDR3 for alpha chain variable domain of TCR clone 73414 (TRAV4, TRAJ22)
CLVGDLYSSSARQLTF

SEQ ID NO: 146828 - protein, 16 aa, Homo sapiens
  CDR3 for beta chain variable domain of TCR clone 73414 (TRBV7-9, TRBJ2-1)
CASSDVAGGSYNEQFF

SEQ ID NO: 146829 - protein, 14 aa, Homo sapiens
  CDR3 for alpha chain variable domain of TCR clone 73415 (TRAV26-1, TRAJ48)
CIVRVGFGNAKLTF

SEQ ID NO: 146830 - protein, 13 aa, Homo sapiens
  CDR3 for beta chain variable domain of TCR clone 73415 (TRBV11-3, TRBJ2-3)
CASSHDTKDTQYF

SEQ ID NO: 146831 - protein, 10 aa, Homo sapiens
  CDR3 for alpha chain variable domain of TCR clone 73416 (TRAV30, TRAJ48)
CGIGNEKLTF

SEQ ID NO: 146832 - protein, 14 aa, Homo sapiens
  CDR3 for beta chain variable domain of TCR clone 73416 (TRBV7-6, TRBJ2-3)
CASSVEGGTDTQYF

SEQ ID NO: 146833 - protein, 13 aa, Homo sapiens
  CDR3 for alpha chain variable domain of TCR clone 73417 (TRAV12-3, TRAJ7)
CAMSASGNNRLAF

SEQ ID NO: 146834 - protein, 14 aa, Homo sapiens
  CDR3 for beta chain variable domain of TCR clone 73417 (TRBV4-1, TRBJ2-7)
CASSRTGVAFEQYF

SEQ ID NO: 146835 - protein, 12 aa, Homo sapiens
  CDR3 for alpha chain variable domain of TCR clone 73418 (TRAV12-3, TRAJ17)
CAMALTGNKLTF

SEQ ID NO: 146836 - protein, 15 aa, Homo sapiens
  CDR3 for beta chain variable domain of TCR clone 73418 (TRBV7-2, TRBJ1-2)
CASSPRAGWNYGYTF

SEQ ID NO: 146837 - protein, 15 aa, Homo sapiens
  CDR3 for alpha chain variable domain of TCR clone 73419 (TRAV12-3, TRAJ49)
CAMAVTPNTGNQFYF

SEQ ID NO: 146838 - protein, 12 aa, Homo sapiens
  CDR3 for beta chain variable domain of TCR clone 73419 (TRBV14, TRBJ1-1)
CASSQLKGLAFF

SEQ ID NO: 146839 - protein, 12 aa, Homo sapiens
  CDR3 for alpha chain variable domain of TCR clone 73420 (TRAV27, TRAJ11)
CAGASGYSTLPF

SEQ ID NO: 146840 - protein, 14 aa, Homo sapiens
  CDR3 for beta chain variable domain of TCR clone 73420 (TRBV12-5, TRBJ1-3)
CASGPAGSGNTIYF

SEQ ID NO: 146841 - protein, 13 aa, Homo sapiens
  CDR3 for alpha chain variable domain of TCR clone 73421 (TRAV1-2, TRAJ31)
CAVRPNNNARLMF

SEQ ID NO: 146842 - protein, 14 aa, Homo sapiens
  CDR3 for beta chain variable domain of TCR clone 73421 (TRBV11-2, TRBJ2-1)
CASSLSGPYNEQFL

SEQ ID NO: 146843 - protein, 19 aa, Homo sapiens
  CDR3 for alpha chain variable domain of TCR clone 73422 (TRAV17, TRAJ17)
CATDGRPGVIKAAGNKPTF

SEQ ID NO: 146844 - protein, 17 aa, Homo sapiens
  CDR3 for beta chain variable domain of TCR clone 73422 (TRBV12-4, TRBJ1-1)
CASSLSGFRTMNTEAFF

SEQ ID NO: 146845 - protein, 14 aa, Homo sapiens
  CDR3 for alpha chain variable domain of TCR clone 73423 (TRAV12-3, TRAJ10)
SHLPLTGGGNKLTF

SEQ ID NO: 146846 - protein, 16 aa, Homo sapiens
  CDR3 for beta chain variable domain of TCR clone 73423 (TRBV6-4, TRBJ1-2)
CASSEAVGDPNYGYTF

SEQ ID NO: 146847 - protein, 18 aa, Homo sapiens
  CDR3 for alpha chain variable domain of TCR clone 73424 (TRAV13-1, TRAJ52)
CAAKNPNAGGTSYGKLTF

SEQ ID NO: 146848 - protein, 15 aa, Homo sapiens
  CDR3 for beta chain variable domain of TCR clone 73424 (TRBV6-1, TRBJ2-3)
CSSSERGGITDTQYF

SEQ ID NO: 146849 - protein, 15 aa, Homo sapiens
  CDR3 for alpha chain variable domain of TCR clone 73425 (TRAV3, TRAJ29)
CAVRAHLSGNTPLVF

SEQ ID NO: 146850 - protein, 15 aa, Homo sapiens
  CDR3 for beta chain variable domain of TCR clone 73425 (TRBV28, TRBJ1-1)
CASRIKGGLNTEAFL

SEQ ID NO: 146851 - protein, 11 aa, Homo sapiens
  CDR3 for alpha chain variable domain of TCR clone 73426 (TRAV12-1, TRAJ37)
CVVNTPGQLIF

SEQ ID NO: 146852 - protein, 13 aa, Homo sapiens
  CDR3 for beta chain variable domain of TCR clone 73426 (TRBV12-4, TRBJ1-5)
CASSPDRAQPQHF

SEQ ID NO: 146853 - protein, 16 aa, Homo sapiens
  CDR3 for alpha chain variable domain of TCR clone 73427 (TRAV13-1, TRAJ39)
CATSIVMQATCSPLEG

SEQ ID NO: 146854 - protein, 16 aa, Homo sapiens
  CDR3 for beta chain variable domain of TCR clone 73427 (TRBV20-1, TRBJ1-4)
CSAPGQGLLTNEKLFF

SEQ ID NO: 146855 - protein, 11 aa, Homo sapiens
  CDR3 for alpha chain variable domain of TCR clone 73428 (TRAV12-1, TRAJ21)
CVVNNFNKFYF

SEQ ID NO: 146856 - protein, 14 aa, Homo sapiens
  CDR3 for beta chain variable domain of TCR clone 73428 (TRBV18, TRBJ2-7)
SASSPRGGAYEQYF

SEQ ID NO: 146857 - protein, 14 aa, Homo sapiens
  CDR3 for alpha chain variable domain of TCR clone 73429 (TRAV35, TRAJ33)
CAGSSPDSNYQLIW

SEQ ID NO: 146858 - protein, 15 aa, Homo sapiens
  CDR3 for beta chain variable domain of TCR clone 73429 (TRBV20-1, TRBJ2-7)
CSAESGTSGAYEQYF

SEQ ID NO: 146859 - protein, 12 aa, Homo sapiens
  CDR3 for alpha chain variable domain of TCR clone 73430 (TRAV12-3, TRAJ17)
CAMTLTGNKLTF

SEQ ID NO: 146860 - protein, 15 aa, Homo sapiens
  CDR3 for beta chain variable domain of TCR clone 73430 (TRBV7-3, TRBJ2-3)
CASSLGLTLGDTQYF

SEQ ID NO: 146861 - protein, 13 aa, Homo sapiens
  CDR3 for alpha chain variable domain of TCR clone 73431 (TRAV36/DV7, TRAJ53)
CALSGGSSYKLTF

SEQ ID NO: 146862 - protein, 13 aa, Homo sapiens
  CDR3 for beta chain variable domain of TCR clone 73431 (TRBV28, TRBJ2-7)
CASSLPSRYEQYF

SEQ ID NO: 146863 - protein, 12 aa, Homo sapiens
  CDR3 for alpha chain variable domain of TCR clone 73432 (TRAV21, TRAJ37)
CAVGGNTGKLIF

SEQ ID NO: 146864 - protein, 14 aa, Homo sapiens
  CDR3 for beta chain variable domain of TCR clone 73432 (TRBV19, TRBJ2-1)
CASEVTGARNEQFF

SEQ ID NO: 146865 - protein, 14 aa, Homo sapiens
  CDR3 for alpha chain variable domain of TCR clone 73433 (TRAV13-1, TRAJ40)
CAASMTSGTYKYIF

SEQ ID NO: 146866 - protein, 15 aa, Homo sapiens
  CDR3 for beta chain variable domain of TCR clone 73433 (TRBV7-3, TRBJ2-1)
RASSPTGGGEVEQFF

SEQ ID NO: 146867 - protein, 14 aa, Homo sapiens
  CDR3 for alpha chain variable domain of TCR clone 73434 (TRAV1-2, TRAJ16)
CAVNRFSDGQKLLF

SEQ ID NO: 146868 - protein, 14 aa, Homo sapiens
  CDR3 for beta chain variable domain of TCR clone 73434 (TRBV20-1, TRBJ2-5)
CSASDSGSGETQYF

SEQ ID NO: 146869 - protein, 16 aa, Homo sapiens
  CDR3 for alpha chain variable domain of TCR clone 73435 (TRAV21, TRAJ37)
CAVRTAGSRDTGKLIF

SEQ ID NO: 146870 - protein, 13 aa, Homo sapiens
  CDR3 for beta chain variable domain of TCR clone 73435 (TRBV7-9, TRBJ2-5)
CASLPSGRETQYF

SEQ ID NO: 146871 - protein, 17 aa, Homo sapiens
  CDR3 for alpha chain variable domain of TCR clone 73436 (TRAV3, TRAJ6)
CAVRDGPRAGGSYIPTF

SEQ ID NO: 146872 - protein, 15 aa, Homo sapiens
  CDR3 for beta chain variable domain of TCR clone 73436 (TRBV29-1, TRBJ2-5)
CSVEGLTVNQETQYF

SEQ ID NO: 146873 - protein, 10 aa, Homo sapiens
  CDR3 for alpha chain variable domain of TCR clone 73437 (TRAV30, TRAJ13)
CGIGNEKLTF

SEQ ID NO: 146874 - protein, 17 aa, Homo sapiens
  CDR3 for beta chain variable domain of TCR clone 73437 (TRBV11-2, TRBJ2-1)
CASSLYPPGVEYNEQFF

SEQ ID NO: 146875 - protein, 14 aa, Homo sapiens
  CDR3 for alpha chain variable domain of TCR clone 73438 (TRAV4, TRAJ9)
CLVGSGTGGFKTIF

SEQ ID NO: 146876 - protein, 14 aa, Homo sapiens
  CDR3 for beta chain variable domain of TCR clone 73438 (TRBV18, TRBJ2-7)
CASSPRGGAYEQYF

SEQ ID NO: 146877 - protein, 18 aa, Homo sapiens
  CDR3 for alpha chain variable domain of TCR clone 73439 (TRAV13-1, TRAJ52)
CAAKNPNAGGTSYGKLTF

SEQ ID NO: 146878 - protein, 16 aa, Homo sapiens
  CDR3 for beta chain variable domain of TCR clone 73439 (TRBV7-9, TRBJ2-1)
CASSLVSGPSYNEQFF

SEQ ID NO: 146879 - protein, 15 aa, Homo sapiens
  CDR3 for alpha chain variable domain of TCR clone 73440 (TRAV21, TRAJ40)
CAVRPQTSGTYKYIF

SEQ ID NO: 146880 - protein, 16 aa, Homo sapiens
  CDR3 for beta chain variable domain of TCR clone 73440 (TRBV20-1, TRBJ1-4)
CSAPGQGLLTNEKLFF

SEQ ID NO: 146881 - protein, 12 aa, Homo sapiens
  CDR3 for alpha chain variable domain of TCR clone 73441 (TRAV10, TRAJ43)
CVVVLVGNDMRF

SEQ ID NO: 146882 - protein, 15 aa, Homo sapiens
  CDR3 for beta chain variable domain of TCR clone 73441 (TRBV2, TRBJ2-7)
CASSEGLARSYEQYF

SEQ ID NO: 146883 - protein, 12 aa, Homo sapiens
  CDR3 for alpha chain variable domain of TCR clone 73442 (TRAV17, TRAJ49)
CATVTTGNQFYF

SEQ ID NO: 146884 - protein, 14 aa, Homo sapiens
  CDR3 for beta chain variable domain of TCR clone 73442 (TRBV25-1, TRBJ1-1)
CASTHLGGNTEAFF

SEQ ID NO: 146885 - protein, 15 aa, Homo sapiens
  CDR3 for alpha chain variable domain of TCR clone 73443 (TRAV12-3, TRAJ6)
CAMSATTGGSYIPTF

SEQ ID NO: 146886 - protein, 12 aa, Homo sapiens
  CDR3 for beta chain variable domain of TCR clone 73443 (TRBV12-4, TRBJ2-7)
CASSLGGYEQYF

SEQ ID NO: 146887 - protein, 14 aa, Homo sapiens
  CDR3 for alpha chain variable domain of TCR clone 73444 (TRAV12-3, TRAJ54)
AAMYQIQGAQKLVF

SEQ ID NO: 146888 - protein, 17 aa, Homo sapiens
  CDR3 for beta chain variable domain of TCR clone 73444 (TRBV6-1, TRBJ2-3)
CASSEALRLISTDTQYF

SEQ ID NO: 146889 - protein, 12 aa, Homo sapiens
  CDR3 for alpha chain variable domain of TCR clone 73445 (TRAV17, TRAJ57)
CATDGGSEKLVF

SEQ ID NO: 146890 - protein, 16 aa, Homo sapiens
  CDR3 for beta chain variable domain of TCR clone 73445 (TRBV2, TRBJ2-1)
CASSVGGSLSYDEQFF

SEQ ID NO: 146891 - protein, 12 aa, Homo sapiens
  CDR3 for alpha chain variable domain of TCR clone 73446 (TRAV25, TRAJ11)
CAGYSGYSTLTF

SEQ ID NO: 146892 - protein, 18 aa, Homo sapiens
  CDR3 for beta chain variable domain of TCR clone 73446 (TRBV5-4, TRBJ2-3)
CASSPTAGFLPSTNTQYF

SEQ ID NO: 146893 - protein, 18 aa, Homo sapiens
  CDR3 for alpha chain variable domain of TCR clone 73447 (TRAV21, TRAJ52)
CAVRPSPAGGTSYGKLTF

SEQ ID NO: 146894 - protein, 14 aa, Homo sapiens
  CDR3 for beta chain variable domain of TCR clone 73447 (TRBV7-7, TRBJ2-7)
CASSLGRGVGEQYF

SEQ ID NO: 146895 - protein, 14 aa, Homo sapiens
  CDR3 for alpha chain variable domain of TCR clone 73448 (TRAV8-3, TRAJ4)
CAVGASGGYNKLIF

SEQ ID NO: 146896 - protein, 14 aa, Homo sapiens
  CDR3 for beta chain variable domain of TCR clone 73448 (TRBV7-2, TRBJ2-7)
CASSPKTSFYEQYF

SEQ ID NO: 146897 - protein, 13 aa, Homo sapiens
  CDR3 for alpha chain variable domain of TCR clone 73449 (TRAV21, TRAJ26)
RAVLDNYGQNFVF

SEQ ID NO: 146898 - protein, 16 aa, Homo sapiens
  CDR3 for beta chain variable domain of TCR clone 73449 (TRBV29-1, TRBJ2-2)
CSVETRASGNTGELFF

SEQ ID NO: 146899 - protein, 11 aa, Homo sapiens
  CDR3 for alpha chain variable domain of TCR clone 73450 (TRAV2, TRAJ13)
CASGGYQKVNF

SEQ ID NO: 146900 - protein, 14 aa, Homo sapiens
  CDR3 for beta chain variable domain of TCR clone 73450 (TRBV6-3, TRBJ1-1)
CASSNLLPGAEAFF

SEQ ID NO: 146901 - protein, 12 aa, Homo sapiens
  CDR3 for alpha chain variable domain of TCR clone 73451 (TRAV27, TRAJ35)
CAGADFGNVLHC

SEQ ID NO: 146902 - protein, 21 aa, Homo sapiens
  CDR3 for beta chain variable domain of TCR clone 73451 (TRBV28, TRBJ2-7)
CASSANRNLRGPSGRVNEQYF

SEQ ID NO: 146903 - protein, 14 aa, Homo sapiens
  CDR3 for alpha chain variable domain of TCR clone 73452 (TRAV1-2, TRAJ16)
CAVNRSSDGQKLLF

SEQ ID NO: 146904 - protein, 12 aa, Homo sapiens
  CDR3 for beta chain variable domain of TCR clone 73452 (TRBV5-1, TRBJ2-7)
CASSSTTYEQYF

SEQ ID NO: 146905 - protein, 14 aa, Homo sapiens
  CDR3 for alpha chain variable domain of TCR clone 73453 (TRAV27, TRAJ22)
CAGLPSGSARQLTF

SEQ ID NO: 146906 - protein, 13 aa, Homo sapiens
  CDR3 for beta chain variable domain of TCR clone 73453 (TRBV7-2, TRBJ2-7)
CASSSPGGSEQYF

SEQ ID NO: 146907 - protein, 19 aa, Homo sapiens
  CDR3 for alpha chain variable domain of TCR clone 73454 (TRAV2, TRAJ20)
IFQVREADAAVYRDCKLSF

SEQ ID NO: 146908 - protein, 13 aa, Homo sapiens
  CDR3 for beta chain variable domain of TCR clone 73454 (TRBV15, TRBJ1-6)
CATSGGLNSPLHF

SEQ ID NO: 146909 - protein, 13 aa, Homo sapiens
  CDR3 for alpha chain variable domain of TCR clone 73455 (TRAV29/DV5, TRAJ31)
CAASRNNNARLLF

SEQ ID NO: 146910 - protein, 12 aa, Homo sapiens
  CDR3 for beta chain variable domain of TCR clone 73455 (TRBV11-2, TRBJ2-2)
CASSLGGGELFF

SEQ ID NO: 146911 - protein, 13 aa, Homo sapiens
  CDR3 for alpha chain variable domain of TCR clone 73456 (TRAV6, TRAJ40)
CALVTSGTYKYIF

SEQ ID NO: 146912 - protein, 12 aa, Homo sapiens
  CDR3 for beta chain variable domain of TCR clone 73456 (TRBV12-4, TRBJ2-7)
CASSLGGYEQYF

SEQ ID NO: 146913 - protein, 13 aa, Homo sapiens
  CDR3 for alpha chain variable domain of TCR clone 73457 (TRAV12-2, TRAJ20)
CAVYPSNDYKLSF

SEQ ID NO: 146914 - protein, 16 aa, Homo sapiens
  CDR3 for beta chain variable domain of TCR clone 73457 (TRBV19, TRBJ2-1)
CASSKAGPSSYNEQFF

SEQ ID NO: 146915 - protein, 15 aa, Homo sapiens
  CDR3 for alpha chain variable domain of TCR clone 73458 (TRAV3, TRAJ22)
CSVRDRGGSARQLTF

SEQ ID NO: 146916 - protein, 13 aa, Homo sapiens
  CDR3 for beta chain variable domain of TCR clone 73458 (TRBV20-1, TRBJ1-1)
CSARVGGNTEAFF

SEQ ID NO: 146917 - protein, 14 aa, Homo sapiens
  CDR3 for alpha chain variable domain of TCR clone 73459 (TRAV1-2, TRAJ16)
CAVNRFSDGQKLLF

SEQ ID NO: 146918 - protein, 16 aa, Homo sapiens
  CDR3 for beta chain variable domain of TCR clone 73459 (TRBV13, TRBJ2-2)
CASSPRTEEHTGELFF

SEQ ID NO: 146919 - protein, 14 aa, Homo sapiens
  CDR3 for alpha chain variable domain of TCR clone 73460 (TRAV8-3, TRAJ4)
CDVGASGGYNKLIF

SEQ ID NO: 146920 - protein, 16 aa, Homo sapiens
  CDR3 for beta chain variable domain of TCR clone 73460 (TRBV4-3, TRBJ2-2)
CASSHLQGSGTGELFF

SEQ ID NO: 146921 - protein, 13 aa, Homo sapiens
  CDR3 for alpha chain variable domain of TCR clone 73461 (TRAV13-1, TRAJ5)
CAARVTGRRALTF

SEQ ID NO: 146922 - protein, 15 aa, Homo sapiens
  CDR3 for beta chain variable domain of TCR clone 73461 (TRBV7-9, TRBJ2-7)
CASSPGGGLTYEQYC

SEQ ID NO: 146923 - protein, 12 aa, Homo sapiens
  CDR3 for alpha chain variable domain of TCR clone 73462 (TRAV17, TRAJ57)
CATDGGSEKLVF

SEQ ID NO: 146924 - protein, 13 aa, Homo sapiens
  CDR3 for beta chain variable domain of TCR clone 73462 (TRBV20-1, TRBJ1-1)
CSARVGGNTEAFF

SEQ ID NO: 146925 - protein, 13 aa, Homo sapiens
  CDR3 for alpha chain variable domain of TCR clone 73463 (TRAV21, TRAJ57)
CAVIEGGSEKMVF

SEQ ID NO: 146926 - protein, 15 aa, Homo sapiens
  CDR3 for beta chain variable domain of TCR clone 73463 (TRBV10-3, TRBJ2-5)
CAISEFGRGQETQYF

SEQ ID NO: 146927 - protein, 14 aa, Homo sapiens
  CDR3 for alpha chain variable domain of TCR clone 73464 (TRAV12-1, TRAJ9)
CVVTGYTGGIKTIF

SEQ ID NO: 146928 - protein, 13 aa, Homo sapiens
  CDR3 for beta chain variable domain of TCR clone 73464 (TRBV20-1, TRBJ1-1)
CSARAGGNTEAFF

SEQ ID NO: 146929 - protein, 14 aa, Homo sapiens
  CDR3 for alpha chain variable domain of TCR clone 73465 (TRAV20, TRAJ42)
CAVQAGGSQGNLIF

SEQ ID NO: 146930 - protein, 14 aa, Homo sapiens
  CDR3 for beta chain variable domain of TCR clone 73465 (TRBV20-1, TRBJ2-1)
CSARGGSSYNEQFF

SEQ ID NO: 146931 - protein, 14 aa, Homo sapiens
  CDR3 for alpha chain variable domain of TCR clone 73466 (TRAV12-2, TRAJ39)
CAVTPNNAGNMLTF

SEQ ID NO: 146932 - protein, 17 aa, Homo sapiens
  CDR3 for beta chain variable domain of TCR clone 73466 (TRBV11-2, TRBJ2-1)
CASSLYPPGVEYNEQFF

SEQ ID NO: 146933 - protein, 18 aa, Homo sapiens
  CDR3 for alpha chain variable domain of TCR clone 73467 (TRAV21, TRAJ52)
CAVRPSPAGGTSYGKLTF

SEQ ID NO: 146934 - protein, 14 aa, Homo sapiens
  CDR3 for beta chain variable domain of TCR clone 73467 (TRBV10-1, TRBJ2-7)
CASSDPGTPWEQYF

SEQ ID NO: 146935 - protein, 13 aa, Homo sapiens
  CDR3 for alpha chain variable domain of TCR clone 73468 (TRAV20, TRAJ48)
CAVQGFGNEKLTF

SEQ ID NO: 146936 - protein, 14 aa, Homo sapiens
  CDR3 for beta chain variable domain of TCR clone 73468 (TRBV27, TRBJ2-7)
CASSFRDGPYEQYF

SEQ ID NO: 146937 - protein, 18 aa, Homo sapiens
  CDR3 for alpha chain variable domain of TCR clone 73469 (TRAV21, TRAJ52)
CAVRPSPAGGTSYGKLTF

SEQ ID NO: 146938 - protein, 13 aa, Homo sapiens
  CDR3 for beta chain variable domain of TCR clone 73469 (TRBV10-3, TRBJ2-1)
CAISECSGREQFF

SEQ ID NO: 146939 - protein, 14 aa, Homo sapiens
  CDR3 for alpha chain variable domain of TCR clone 73470 (TRAV1-2, TRAJ8)
CAVREDTAFQKLVF

SEQ ID NO: 146940 - protein, 15 aa, Homo sapiens
  CDR3 for beta chain variable domain of TCR clone 73470 (TRBV6-3, TRBJ2-7)
CASSSPGTVFYEQYF

SEQ ID NO: 146941 - protein, 16 aa, Homo sapiens
  CDR3 for alpha chain variable domain of TCR clone 73471 (TRAV23/DV6, TRAJ9)
CAASIGGNTGGFKTIF

SEQ ID NO: 146942 - protein, 15 aa, Homo sapiens
  CDR3 for beta chain variable domain of TCR clone 73471 (TRBV25-1, TRBJ1-4)
CASSPGDSTNEKLFF

SEQ ID NO: 146943 - protein, 14 aa, Homo sapiens
  CDR3 for alpha chain variable domain of TCR clone 73472 (TRAV13-2, TRAJ37)
CAEKISGNTGKLIF

SEQ ID NO: 146944 - protein, 17 aa, Homo sapiens
  CDR3 for beta chain variable domain of TCR clone 73472 (TRBV24-1, TRBJ2-1)
CATSDVSTSGTYNEQFF

SEQ ID NO: 146945 - protein, 15 aa, Homo sapiens
  CDR3 for alpha chain variable domain of TCR clone 73473 (TRAV21, TRAJ10)
CAVHLLTGGGNKLTF

SEQ ID NO: 146946 - protein, 14 aa, Homo sapiens
  CDR3 for beta chain variable domain of TCR clone 73473 (TRBV12-4, TRBJ1-1)
CASSLGTGGTEAFF

SEQ ID NO: 146947 - protein, 11 aa, Homo sapiens
  CDR3 for alpha chain variable domain of TCR clone 73474 (TRAV1-2, TRAJ20)
CAVSNDYKLSF

SEQ ID NO: 146948 - protein, 16 aa, Homo sapiens
  CDR3 for beta chain variable domain of TCR clone 73474 (TRBV29-1, TRBJ2-6)
CSVEDITYSGANVLSF

SEQ ID NO: 146949 - protein, 13 aa, Homo sapiens
  CDR3 for alpha chain variable domain of TCR clone 73475 (TRAV27, TRAJ49)
CAPRPYTGNQFCF

SEQ ID NO: 146950 - protein, 16 aa, Homo sapiens
  CDR3 for beta chain variable domain of TCR clone 73475 (TRBV4-1, TRBJ1-2)
CASSQDAGQVLYGYTL

SEQ ID NO: 146951 - protein, 13 aa, Homo sapiens
  CDR3 for alpha chain variable domain of TCR clone 73476 (TRAV2, TRAJ40)
CTVVTSGTYKYIF

SEQ ID NO: 146952 - protein, 15 aa, Homo sapiens
  CDR3 for beta chain variable domain of TCR clone 73476 (TRBV11-3, TRBJ2-3)
CASLEDGREGDTQYF

SEQ ID NO: 146953 - protein, 15 aa, Homo sapiens
  CDR3 for alpha chain variable domain of TCR clone 73477 (TRAV34, TRAJ38)
CGADFTPGNNRKLIW

SEQ ID NO: 146954 - protein, 16 aa, Homo sapiens
  CDR3 for beta chain variable domain of TCR clone 73477 (TRBV7-3, TRBJ2-2)
CASSLKRGTLSGELFF

SEQ ID NO: 146955 - protein, 15 aa, Homo sapiens
  CDR3 for alpha chain variable domain of TCR clone 73478 (TRAV27, TRAJ38)
CAARRNAGNNRKLIW

SEQ ID NO: 146956 - protein, 13 aa, Homo sapiens
  CDR3 for beta chain variable domain of TCR clone 73478 (TRBV20-1, TRBJ1-1)
CSARAGGNTEAVF

SEQ ID NO: 146957 - protein, 16 aa, Homo sapiens
  CDR3 for alpha chain variable domain of TCR clone 73479 (TRAV8-3, TRAJ22)
CAVDLLGPGSARQLPF

SEQ ID NO: 146958 - protein, 14 aa, Homo sapiens
  CDR3 for beta chain variable domain of TCR clone 73479 (TRBV11-2, TRBJ2-7)
CASSLELEGYEQYF

SEQ ID NO: 146959 - protein, 18 aa, Homo sapiens
  CDR3 for alpha chain variable domain of TCR clone 73480 (TRAV13-1, TRAJ52)
CAAKNPNAGCTSYGKLTF

SEQ ID NO: 146960 - protein, 15 aa, Homo sapiens
  CDR3 for beta chain variable domain of TCR clone 73480 (TRBV6-1, TRBJ2-3)
CASSERGGITDTQYF

SEQ ID NO: 146961 - protein, 18 aa, Homo sapiens
  CDR3 for alpha chain variable domain of TCR clone 73481 (TRAV21, TRAJ52)
CAVRPSPAGGTSYGKLTF

SEQ ID NO: 146962 - protein, 12 aa, Homo sapiens
  CDR3 for beta chain variable domain of TCR clone 73481 (TRBV28, TRBJ2-3)
CASSLYRDTQYF

SEQ ID NO: 146963 - protein, 14 aa, Homo sapiens
  CDR3 for alpha chain variable domain of TCR clone 73482 (TRAV12-3, TRAJ10)
SHLPLTGGGNKLTF

SEQ ID NO: 146964 - protein, 17 aa, Homo sapiens
  CDR3 for beta chain variable domain of TCR clone 73482 (TRBV28, TRBJ2-5)
CASSRQGGLAGAETQYF

SEQ ID NO: 146965 - protein, 11 aa, Homo sapiens
  CDR3 for alpha chain variable domain of TCR clone 73483 (TRAV21, TRAJ34)
CAHYNTDKLIF

SEQ ID NO: 146966 - protein, 17 aa, Homo sapiens
  CDR3 for beta chain variable domain of TCR clone 73483 (TRBV19, TRBJ2-6)
CASSTGQVFSGANVLTF

SEQ ID NO: 146967 - protein, 14 aa, Homo sapiens
  CDR3 for alpha chain variable domain of TCR clone 73484 (TRAV12-2, TRAJ17)
CAALFKAAGNKITF

SEQ ID NO: 146968 - protein, 16 aa, Homo sapiens
  CDR3 for beta chain variable domain of TCR clone 73484 (TRBV20-1, TRBJ2-2)
CSASASGIPGAGELFF

SEQ ID NO: 146969 - protein, 11 aa, Homo sapiens
  CDR3 for alpha chain variable domain of TCR clone 73485 (TRAV2, TRAJ23)
WAVETRGKLIF

SEQ ID NO: 146970 - protein, 14 aa, Homo sapiens
  CDR3 for beta chain variable domain of TCR clone 73485 (TRBV2, TRBJ2-3)
CASSEGQNTDTQYF

SEQ ID NO: 146971 - protein, 13 aa, Homo sapiens
  CDR3 for alpha chain variable domain of TCR clone 73486 (TRAV12-1, TRAJ11)
CMVTRGGYSTLTF

SEQ ID NO: 146972 - protein, 13 aa, Homo sapiens
  CDR3 for beta chain variable domain of TCR clone 73486 (TRBV20-1, TRBJ1-2)
CSARDQGAYGYTF

SEQ ID NO: 146973 - protein, 15 aa, Homo sapiens
  CDR3 for alpha chain variable domain of TCR clone 73487 (TRAV21, TRAJ38)
CAVRQDAGNNRKLIW

SEQ ID NO: 146974 - protein, 12 aa, Homo sapiens
  CDR3 for beta chain variable domain of TCR clone 73487 (TRBV14, TRBJ2-7)
CASSRLKGEQYF

SEQ ID NO: 146975 - protein, 14 aa, Homo sapiens
  CDR3 for alpha chain variable domain of TCR clone 73488 (TRAV16, TRAJ54)
CALSLIQGAQELVF

SEQ ID NO: 146976 - protein, 17 aa, Homo sapiens
  CDR3 for beta chain variable domain of TCR clone 73488 (TRBV11-2, TRBJ2-4)
CASSSVGPGGHRNIQYF

SEQ ID NO: 146977 - protein, 15 aa, Homo sapiens
  CDR3 for alpha chain variable domain of TCR clone 73489 (TRAV13-1, TRAJ17)
CAASIERAAGNKLNF

SEQ ID NO: 146978 - protein, 12 aa, Homo sapiens
  CDR3 for beta chain variable domain of TCR clone 73489 (TRBV5-7, TRBJ1-1)
CASSLGRGKAFF

SEQ ID NO: 146979 - protein, 14 aa, Homo sapiens
  CDR3 for alpha chain variable domain of TCR clone 73490 (TRAV9-2, TRAJ39)
CALYIYNAGNMLTF

SEQ ID NO: 146980 - protein, 12 aa, Homo sapiens
  CDR3 for beta chain variable domain of TCR clone 73490 (TRBV19, TRBJ2-1)
CASSRQGAEQFF

SEQ ID NO: 146981 - protein, 14 aa, Homo sapiens
  CDR3 for alpha chain variable domain of TCR clone 73491 (TRAV12-3, TRAJ43)
CAMSLGGAWTRLTV

SEQ ID NO: 146982 - protein, 13 aa, Homo sapiens
  CDR3 for beta chain variable domain of TCR clone 73491 (TRBV7-9, TRBJ1-2)
CASSLKQNYGYTF

SEQ ID NO: 146983 - protein, 13 aa, Homo sapiens
  CDR3 for alpha chain variable domain of TCR clone 73492 (TRAV27, TRAJ8)
CAGGPKGFQKLVF

SEQ ID NO: 146984 - protein, 15 aa, Homo sapiens
  CDR3 for beta chain variable domain of TCR clone 73492 (TRBV6-1, TRBJ2-7)
CASSESMGDFYEQYF

SEQ ID NO: 146985 - protein, 21 aa, Homo sapiens
  CDR3 for alpha chain variable domain of TCR clone 73493 (TRAV1-1, TRAJ6)
CLLLLRCERLERTGGSYVPTF

SEQ ID NO: 146986 - protein, 13 aa, Homo sapiens
  CDR3 for beta chain variable domain of TCR clone 73493 (TRBV10-2, TRBJ2-7)
CASGASGGYEQYF

SEQ ID NO: 146987 - protein, 16 aa, Homo sapiens
  CDR3 for alpha chain variable domain of TCR clone 73494 (TRAV1-2, TRAJ10)
CAVRGVLTGGGNKLTF

SEQ ID NO: 146988 - protein, 13 aa, Homo sapiens
  CDR3 for beta chain variable domain of TCR clone 73494 (TRBV20-1, TRBJ1-1)
CSAPPGGHTEAFF

SEQ ID NO: 146989 - protein, 14 aa, Homo sapiens
  CDR3 for alpha chain variable domain of TCR clone 73495 (TRAV1-1, TRAJ27)
CSVIYNTNAGKSTF

SEQ ID NO: 146990 - protein, 15 aa, Homo sapiens
  CDR3 for beta chain variable domain of TCR clone 73495 (TRBV7-2, TRBJ2-1)
CASSSGLAGGNEQFF

SEQ ID NO: 146991 - protein, 14 aa, Homo sapiens
  CDR3 for alpha chain variable domain of TCR clone 73496 (TRAV17, TRAJ36)
CATVSLNWANNLFF

SEQ ID NO: 146992 - protein, 13 aa, Homo sapiens
  CDR3 for beta chain variable domain of TCR clone 73496 (TRBV4-1, TRBJ1-1)
CASSQLGTGEAFF

SEQ ID NO: 146993 - protein, 12 aa, Homo sapiens
  CDR3 for alpha chain variable domain of TCR clone 73497 (TRAV12-3, TRAJ42)
CAPGGSQGNLIF

SEQ ID NO: 146994 - protein, 13 aa, Homo sapiens
  CDR3 for beta chain variable domain of TCR clone 73497 (TRBV5-7, TRBJ2-6)
RASTSSGANVLTF

SEQ ID NO: 146995 - protein, 13 aa, Homo sapiens
  CDR3 for alpha chain variable domain of TCR clone 73498 (TRAV4, TRAJ22)
CLGGSGSARQLTF

SEQ ID NO: 146996 - protein, 15 aa, Homo sapiens
  CDR3 for beta chain variable domain of TCR clone 73498 (TRBV7-9, TRBJ1-6)
CASSSPGRGNSTLHF

SEQ ID NO: 146997 - protein, 14 aa, Homo sapiens
  CDR3 for alpha chain variable domain of TCR clone 73499 (TRAV16, TRAJ42)
CALLAGGSQGNLIF

SEQ ID NO: 146998 - protein, 16 aa, Homo sapiens
  CDR3 for beta chain variable domain of TCR clone 73499 (TRBV7-2, TRBJ2-3)
CASSLVALYSTDTQYF

SEQ ID NO: 146999 - protein, 14 aa, Homo sapiens
  CDR3 for alpha chain variable domain of TCR clone 73500 (TRAV1-2, TRAJ16)
CAVNRFSDGQKLLF

SEQ ID NO: 147000 - protein, 14 aa, Homo sapiens
  CDR3 for beta chain variable domain of TCR clone 73500 (TRBV13, TRBJ2-3)
CASSSGSPTDTQYF

SEQ ID NO: 147001 - protein, 12 aa, Homo sapiens
  CDR3 for alpha chain variable domain of TCR clone 73501 (TRAV3, TRAJ7)
CADLLWEQQTRF

SEQ ID NO: 147002 - protein, 13 aa, Homo sapiens
  CDR3 for beta chain variable domain of TCR clone 73501 (TRBV7-3, TRBJ2-5)
GASSFRGGETQYF

SEQ ID NO: 147003 - protein, 13 aa, Homo sapiens
  CDR3 for alpha chain variable domain of TCR clone 73502 (TRAV13-2, TRAJ48)
CAEMDFGNEKLTF

SEQ ID NO: 147004 - protein, 16 aa, Homo sapiens
  CDR3 for beta chain variable domain of TCR clone 73502 (TRBV27, TRBJ2-2)
CAGSFRGLVRTGELFF

SEQ ID NO: 147005 - protein, 11 aa, Homo sapiens
  CDR3 for alpha chain variable domain of TCR clone 73503 (TRAV30, TRAJ23)
CGTEIAGKLIF

SEQ ID NO: 147006 - protein, 18 aa, Homo sapiens
  CDR3 for beta chain variable domain of TCR clone 73503 (TRBV12-4, TRBJ2-2)
CASSLVAGTRGRTGELFF

SEQ ID NO: 147007 - protein, 16 aa, Homo sapiens
  CDR3 for alpha chain variable domain of TCR clone 73504 (TRAV3, TRAJ37)
RAVRGKGSGNTGKLIF

SEQ ID NO: 147008 - protein, 15 aa, Homo sapiens
  CDR3 for beta chain variable domain of TCR clone 73504 (TRBV5-1, TRBJ2-7)
CASSLNGGPAREQYF

SEQ ID NO: 147009 - protein, 12 aa, Homo sapiens
  CDR3 for alpha chain variable domain of TCR clone 73505 (TRAV25, TRAJ11)
CAGASGYSTLTF

SEQ ID NO: 147010 - protein, 16 aa, Homo sapiens
  CDR3 for beta chain variable domain of TCR clone 73505 (TRBV15, TRBJ1-2)
CATSRGPRTGGGGDTF

SEQ ID NO: 147011 - protein, 13 aa, Homo sapiens
  CDR3 for alpha chain variable domain of TCR clone 73506 (TRAV27, TRAJ41)
FAGEGNSGYALNF

SEQ ID NO: 147012 - protein, 16 aa, Homo sapiens
  CDR3 for beta chain variable domain of TCR clone 73506 (TRBV13, TRBJ2-2)
CASSPRTGEHTGELFF

SEQ ID NO: 147013 - protein, 14 aa, Homo sapiens
  CDR3 for alpha chain variable domain of TCR clone 73507 (TRAV26-1, TRAJ40)
CCVLFIAGTYKYIF

SEQ ID NO: 147014 - protein, 15 aa, Homo sapiens
  CDR3 for beta chain variable domain of TCR clone 73507 (TRBV19, TRBJ2-1)
CASSSPGVPLDEQFF

SEQ ID NO: 147015 - protein, 14 aa, Homo sapiens
  CDR3 for alpha chain variable domain of TCR clone 73508 (TRAV12-2, TRAJ40)
CAVKIPSGTYKYIF

SEQ ID NO: 147016 - protein, 13 aa, Homo sapiens
  CDR3 for beta chain variable domain of TCR clone 73508 (TRBV7-9, TRBJ1-2)
CASSLKQNYGYAF

SEQ ID NO: 147017 - protein, 16 aa, Homo sapiens
  CDR3 for alpha chain variable domain of TCR clone 73509 (TRAV8-3, TRAJ10)
CAVGPILTGGGNKLTF

SEQ ID NO: 147018 - protein, 16 aa, Homo sapiens
  CDR3 for beta chain variable domain of TCR clone 73509 (TRBV7-2, TRBJ2-5)
CASSSKWVSGQETQYF

SEQ ID NO: 147019 - protein, 12 aa, Homo sapiens
  CDR3 for alpha chain variable domain of TCR clone 73510 (TRAV8-3, TRAJ4)
PAFSGGYHKLIF

SEQ ID NO: 147020 - protein, 13 aa, Homo sapiens
  CDR3 for beta chain variable domain of TCR clone 73510 (TRBV20-1, TRBJ1-3)
CSAGAYSGNTIYF

SEQ ID NO: 147021 - protein, 13 aa, Homo sapiens
  CDR3 for alpha chain variable domain of TCR clone 73511 (TRAV1-1, TRAJ28)
CVTSGAGSYQLTF

SEQ ID NO: 147022 - protein, 17 aa, Homo sapiens
  CDR3 for beta chain variable domain of TCR clone 73511 (TRBV18, TRBJ2-2)
CACSQRSSGQGPGELFF

SEQ ID NO: 147023 - protein, 15 aa, Homo sapiens
  CDR3 for alpha chain variable domain of TCR clone 73512 (TRAV23/DV6, TRAJ18)
CAARDRGSTLGRLYF

SEQ ID NO: 147024 - protein, 13 aa, Homo sapiens
  CDR3 for beta chain variable domain of TCR clone 73512 (TRBV7-2, TRBJ2-7)
CASSSPSGSEQYF

SEQ ID NO: 147025 - protein, 12 aa, Homo sapiens
  CDR3 for alpha chain variable domain of TCR clone 73513 (TRAV21, TRAJ33)
CAKMDSNYQLIW

SEQ ID NO: 147026 - protein, 13 aa, Homo sapiens
  CDR3 for beta chain variable domain of TCR clone 73513 (TRBV19, TRBJ1-2)
CASSVPGQDGYTF

SEQ ID NO: 147027 - protein, 11 aa, Homo sapiens
  CDR3 for alpha chain variable domain of TCR clone 73514 (TRAV21, TRAJ41)
CAVRSGYALNF

SEQ ID NO: 147028 - protein, 13 aa, Homo sapiens
  CDR3 for beta chain variable domain of TCR clone 73514 (TRBV7-9, TRBJ1-2)
CASSLEQNYGYTF

SEQ ID NO: 147029 - protein, 10 aa, Homo sapiens
  CDR3 for alpha chain variable domain of TCR clone 73515 (TRAV1-2, TRAJ20)
CACNDYELSF

SEQ ID NO: 147030 - protein, 16 aa, Homo sapiens
  CDR3 for beta chain variable domain of TCR clone 73515 (TRBV20-1, TRBJ2-1)
CSARDLKQGMNNEQFF

SEQ ID NO: 147031 - protein, 13 aa, Homo sapiens
  CDR3 for alpha chain variable domain of TCR clone 73516 (TRAV2, TRAJ40)
CAVVTSGTYKYIF

SEQ ID NO: 147032 - protein, 16 aa, Homo sapiens
  CDR3 for beta chain variable domain of TCR clone 73516 (TRBV7-9, TRBJ1-3)
CASSLGAGSYGNTIYF

SEQ ID NO: 147033 - protein, 10 aa, Homo sapiens
  CDR3 for alpha chain variable domain of TCR clone 73517 (TRAV23/DV6, TRAJ57)
CAASSTLSQG

SEQ ID NO: 147034 - protein, 15 aa, Homo sapiens
  CDR3 for beta chain variable domain of TCR clone 73517 (TRBV7-9, TRBJ1-4)
CASSARTGGNEKLFF

SEQ ID NO: 147035 - protein, 12 aa, Homo sapiens
  CDR3 for alpha chain variable domain of TCR clone 73518 (TRAV12-3, TRAJ40)
CAMSSGTYKYIF

SEQ ID NO: 147036 - protein, 17 aa, Homo sapiens
  CDR3 for beta chain variable domain of TCR clone 73518 (TRBV13, TRBJ2-3)
CASSLSRVAGGRNTQYF

SEQ ID NO: 147037 - protein, 15 aa, Homo sapiens
  CDR3 for alpha chain variable domain of TCR clone 73519 (TRAV3, TRAJ24)
CAVRDKMTAGGNCRL

SEQ ID NO: 147038 - protein, 14 aa, Homo sapiens
  CDR3 for beta chain variable domain of TCR clone 73519 (TRBV7-2, TRBJ2-3)
CASSQTGSSYTQYF

SEQ ID NO: 147039 - protein, 16 aa, Homo sapiens
  CDR3 for alpha chain variable domain of TCR clone 73520 (TRAV8-3, TRAJ22)
CAVDPLGPGSARQLTF

SEQ ID NO: 147040 - protein, 14 aa, Homo sapiens
  CDR3 for beta chain variable domain of TCR clone 73520 (TRBV11-2, TRBJ2-7)
CASSLELEGYEQYF

SEQ ID NO: 147041 - protein, 15 aa, Homo sapiens
  CDR3 for alpha chain variable domain of TCR clone 73521 (TRAV26-2, TRAJ13)
CILRDLSGGYQKVTF

SEQ ID NO: 147042 - protein, 14 aa, Homo sapiens
  CDR3 for beta chain variable domain of TCR clone 73521 (TRBV4-1, TRBJ2-3)
CASSQEGSTDTQHF

SEQ ID NO: 147043 - protein, 18 aa, Homo sapiens
  CDR3 for alpha chain variable domain of TCR clone 73522 (TRAV21, TRAJ52)
CALRPSPAGGTSYGKLTF

SEQ ID NO: 147044 - protein, 13 aa, Homo sapiens
  CDR3 for beta chain variable domain of TCR clone 73522 (TRBV7-3, TRBJ1-1)
CASSQDWGAEAFF

SEQ ID NO: 147045 - protein, 13 aa, Homo sapiens
  CDR3 for alpha chain variable domain of TCR clone 73523 (TRAV13-1, TRAJ39)
CSKYSNAGNMLTF

SEQ ID NO: 147046 - protein, 15 aa, Homo sapiens
  CDR3 for beta chain variable domain of TCR clone 73523 (TRBV10-3, TRBJ2-3)
CAISLTSGGTDTQYF

SEQ ID NO: 147047 - protein, 15 aa, Homo sapiens
  CDR3 for alpha chain variable domain of TCR clone 73524 (TRAV26-1, TRAJ22)
CIVRVSFWFCKATDL

SEQ ID NO: 147048 - protein, 13 aa, Homo sapiens
  CDR3 for beta chain variable domain of TCR clone 73524 (TRBV7-9, TRBJ1-2)
CASSIKQNYGYTF

SEQ ID NO: 147049 - protein, 15 aa, Homo sapiens
  CDR3 for alpha chain variable domain of TCR clone 73525 (TRAV25, TRAJ53)
CAATGGGGSNYKLTF

SEQ ID NO: 147050 - protein, 17 aa, Homo sapiens
  CDR3 for beta chain variable domain of TCR clone 73525 (TRBV15, TRBJ2-3)
CATSGTTSEEGTDTQYF

SEQ ID NO: 147051 - protein, 14 aa, Homo sapiens
  CDR3 for alpha chain variable domain of TCR clone 73526 (TRAV12-3, TRAJ9)
CAMRPNTGGFKTIF

SEQ ID NO: 147052 - protein, 12 aa, Homo sapiens
  CDR3 for beta chain variable domain of TCR clone 73526 (TRBV11-2, TRBJ2-2)
CASSLGGGELFF

SEQ ID NO: 147053 - protein, 19 aa, Homo sapiens
  CDR3 for alpha chain variable domain of TCR clone 73527 (TRAV1-2, TRAJ26)
CLLPLCCERPDNYGQNFVF

SEQ ID NO: 147054 - protein, 12 aa, Homo sapiens
  CDR3 for beta chain variable domain of TCR clone 73527 (TRBV20-1, TRBJ2-1)
CSAQYTYNEQFF

SEQ ID NO: 147055 - protein, 14 aa, Homo sapiens
  CDR3 for alpha chain variable domain of TCR clone 73528 (TRAV35, TRAJ13)
CAGSPSGGYQKVTF

SEQ ID NO: 147056 - protein, 17 aa, Homo sapiens
  CDR3 for beta chain variable domain of TCR clone 73528 (TRBV15, TRBJ1-5)
CATSRAPPGTRNQPQHF

SEQ ID NO: 147057 - protein, 12 aa, Homo sapiens
  CDR3 for alpha chain variable domain of TCR clone 73529 (TRAV13-2, TRAJ8)
CAPWLGFQKLAF

SEQ ID NO: 147058 - protein, 12 aa, Homo sapiens
  CDR3 for beta chain variable domain of TCR clone 73529 (TRBV11-2, TRBJ2-2)
CASSLPTGELFF

SEQ ID NO: 147059 - protein, 17 aa, Homo sapiens
  CDR3 for alpha chain variable domain of TCR clone 73530 (TRAV26-1, TRAJ53)
CIVRVVDSGGSNYKLTF

SEQ ID NO: 147060 - protein, 15 aa, Homo sapiens
  CDR3 for beta chain variable domain of TCR clone 73530 (TRBV20-1, TRBJ2-7)
CSARVPAAYFYEQYF

SEQ ID NO: 147061 - protein, 13 aa, Homo sapiens
  CDR3 for alpha chain variable domain of TCR clone 73531 (TRAV13-1, TRAJ20)
CAARVSNDYKLSF

SEQ ID NO: 147062 - protein, 16 aa, Homo sapiens
  CDR3 for beta chain variable domain of TCR clone 73531 (TRBV11-1, TRBJ1-1)
CATNPRDRALNTEAFF

SEQ ID NO: 147063 - protein, 14 aa, Homo sapiens
  CDR3 for alpha chain variable domain of TCR clone 73532 (TRAV13-1, TRAJ20)
CAARPGSNDYKLSF

SEQ ID NO: 147064 - protein, 14 aa, Homo sapiens
  CDR3 for beta chain variable domain of TCR clone 73532 (TRBV25-1, TRBJ1-1)
CASTHLGGNTEAFF

SEQ ID NO: 147065 - protein, 15 aa, Homo sapiens
  CDR3 for alpha chain variable domain of TCR clone 73533 (TRAV12-1, TRAJ44)
CVADLPTGTASKLTF

SEQ ID NO: 147066 - protein, 14 aa, Homo sapiens
  CDR3 for beta chain variable domain of TCR clone 73533 (TRBV28, TRBJ1-3)
CASSFRDRVNTIYF

SEQ ID NO: 147067 - protein, 14 aa, Homo sapiens
  CDR3 for alpha chain variable domain of TCR clone 73534 (TRAV23/DV6, TRAJ4)
CAAPSSVGYNKLIF

SEQ ID NO: 147068 - protein, 16 aa, Homo sapiens
  CDR3 for beta chain variable domain of TCR clone 73534 (TRBV19, TRBJ1-1)
CASRFGGPVTGTEAFF

SEQ ID NO: 147069 - protein, 14 aa, Homo sapiens
  CDR3 for alpha chain variable domain of TCR clone 73535 (TRAV9-2, TRAJ39)
CALYIYNAGNMLTF

SEQ ID NO: 147070 - protein, 18 aa, Homo sapiens
  CDR3 for beta chain variable domain of TCR clone 73535 (TRBV24-1, TRBJ2-2)
CATSDSGQGTANTGELFF

SEQ ID NO: 147071 - protein, 15 aa, Homo sapiens
  CDR3 for alpha chain variable domain of TCR clone 73536 (TRAV3, TRAJ3)
CAVRDGHSSASKITF

SEQ ID NO: 147072 - protein, 14 aa, Homo sapiens
  CDR3 for beta chain variable domain of TCR clone 73536 (TRBV28, TRBJ1-4)
CASSFGTFDEKLFF

SEQ ID NO: 147073 - protein, 16 aa, Homo sapiens
  CDR3 for alpha chain variable domain of TCR clone 73537 (TRAV12-2, TRAJ28)
CAVITDSGAGSYQLTF

SEQ ID NO: 147074 - protein, 13 aa, Homo sapiens
  CDR3 for beta chain variable domain of TCR clone 73537 (TRBV25-1, TRBJ1-1)
CQHPPGGNTEAFF

SEQ ID NO: 147075 - protein, 14 aa, Homo sapiens
  CDR3 for alpha chain variable domain of TCR clone 73538 (TRAV35, TRAJ44)
CAGRPSRTASKLTF

SEQ ID NO: 147076 - protein, 14 aa, Homo sapiens
  CDR3 for beta chain variable domain of TCR clone 73538 (TRBV7-2, TRBJ1-3)
CASSRGGTGNTICF

SEQ ID NO: 147077 - protein, 12 aa, Homo sapiens
  CDR3 for alpha chain variable domain of TCR clone 73539 (TRAV1-2, TRAJ33)
CAALDSNYQLIW

SEQ ID NO: 147078 - protein, 16 aa, Homo sapiens
  CDR3 for beta chain variable domain of TCR clone 73539 (TRBV6-4, TRBJ1-2)
CASSEAVGDPNYDYTF

SEQ ID NO: 147079 - protein, 15 aa, Homo sapiens
  CDR3 for alpha chain variable domain of TCR clone 73540 (TRAV40, TRAJ39)
CLLPPRGNAGNMLTF

SEQ ID NO: 147080 - protein, 15 aa, Homo sapiens
  CDR3 for beta chain variable domain of TCR clone 73540 (TRBV11-1, TRBJ2-2)
CASSFGRLNTGELFF

SEQ ID NO: 147081 - protein, 12 aa, Homo sapiens
  CDR3 for alpha chain variable domain of TCR clone 73541 (TRAV12-3, TRAJ17)
CAMTLTSNKLTF

SEQ ID NO: 147082 - protein, 14 aa, Homo sapiens
  CDR3 for beta chain variable domain of TCR clone 73541 (TRBV4-1, TRBJ2-7)
CASSQDREHVEQYF

SEQ ID NO: 147083 - protein, 12 aa, Homo sapiens
  CDR3 for alpha chain variable domain of TCR clone 73542 (TRAV23/DV6, TRAJ17)
CAAKAAGNKLTF

SEQ ID NO: 147084 - protein, 13 aa, Homo sapiens
  CDR3 for beta chain variable domain of TCR clone 73542 (TRBV19, TRBJ1-2)
CASSVPGQDGYTF

SEQ ID NO: 147085 - protein, 14 aa, Homo sapiens
  CDR3 for alpha chain variable domain of TCR clone 73543 (TRAV17, TRAJ22)
CATSPSGSARQLTF

SEQ ID NO: 147086 - protein, 15 aa, Homo sapiens
  CDR3 for beta chain variable domain of TCR clone 73543 (TRBV12-4, TRBJ2-5)
CASSPPTGLQETQYF

SEQ ID NO: 147087 - protein, 12 aa, Homo sapiens
  CDR3 for alpha chain variable domain of TCR clone 73544 (TRAV16, TRAJ10)
CSRTGGGNKLTF

SEQ ID NO: 147088 - protein, 13 aa, Homo sapiens
  CDR3 for beta chain variable domain of TCR clone 73544 (TRBV10-3, TRBJ1-2)
CAISERDSYGYTF

SEQ ID NO: 147089 - protein, 14 aa, Homo sapiens
  CDR3 for alpha chain variable domain of TCR clone 73545 (TRAV1-2, TRAJ16)
CAVNRFSDGQKLLF

SEQ ID NO: 147090 - protein, 14 aa, Homo sapiens
  CDR3 for beta chain variable domain of TCR clone 73545 (TRBV4-1, TRBJ2-2)
CAGSQAVNTGELFF

SEQ ID NO: 147091 - protein, 14 aa, Homo sapiens
  CDR3 for alpha chain variable domain of TCR clone 73546 (TRAV20, TRAJ56)
CAVHFGGANSKLTF

SEQ ID NO: 147092 - protein, 14 aa, Homo sapiens
  CDR3 for beta chain variable domain of TCR clone 73546 (TRBV20-1, TRBJ2-7)
CSAKRGRSSYEQYF

SEQ ID NO: 147093 - protein, 14 aa, Homo sapiens
  CDR3 for alpha chain variable domain of TCR clone 73547 (TRAV12-1, TRAJ23)
CVVMIYNQGGKLIF

SEQ ID NO: 147094 - protein, 22 aa, Homo sapiens
  CDR3 for beta chain variable domain of TCR clone 73547 (TRBV7-3, TRBJ1-6)
CSSLTSRDEASDPSSYNSPLHF

SEQ ID NO: 147095 - protein, 14 aa, Homo sapiens
  CDR3 for alpha chain variable domain of TCR clone 73548 (TRAV17, TRAJ35)
CATDRPGFGNVLHW

SEQ ID NO: 147096 - protein, 19 aa, Homo sapiens
  CDR3 for beta chain variable domain of TCR clone 73548 (TRBV11-3, TRBJ2-2)
CASSTRPGAKTTNTGELFF

SEQ ID NO: 147097 - protein, 14 aa, Homo sapiens
  CDR3 for alpha chain variable domain of TCR clone 73549 (TRAV1-2, TRAJ16)
CAVSRFSDGQKLLF

SEQ ID NO: 147098 - protein, 15 aa, Homo sapiens
  CDR3 for beta chain variable domain of TCR clone 73549 (TRBV7-9, TRBJ1-4)
CASSARTGGNEKLFF

SEQ ID NO: 147099 - protein, 14 aa, Homo sapiens
  CDR3 for alpha chain variable domain of TCR clone 73550 (TRAV26-1, TRAJ38)
CIADNAGNNRKLIW

SEQ ID NO: 147100 - protein, 13 aa, Homo sapiens
  CDR3 for beta chain variable domain of TCR clone 73550 (TRBV24-1, TRBJ2-1)
CATSAGPYNEQFF

SEQ ID NO: 147101 - protein, 13 aa, Homo sapiens
  CDR3 for alpha chain variable domain of TCR clone 73551 (TRAV2, TRAJ29)
CAVCSSGNTPLVF

SEQ ID NO: 147102 - protein, 14 aa, Homo sapiens
  CDR3 for beta chain variable domain of TCR clone 73551 (TRBV7-9, TRBJ1-1)
CASSLGGLKTEAFF

SEQ ID NO: 147103 - protein, 13 aa, Homo sapiens
  CDR3 for alpha chain variable domain of TCR clone 73552 (TRAV12-3, TRAJ7)
CAMSASGNNRLAF

SEQ ID NO: 147104 - protein, 14 aa, Homo sapiens
  CDR3 for beta chain variable domain of TCR clone 73552 (TRBV13, TRBJ2-5)
CASSSGPRGETQYF

SEQ ID NO: 147105 - protein, 13 aa, Homo sapiens
  CDR3 for alpha chain variable domain of TCR clone 73553 (TRAV35, TRAJ44)
CARLSGTASKLTF

SEQ ID NO: 147106 - protein, 17 aa, Homo sapiens
  CDR3 for beta chain variable domain of TCR clone 73553 (TRBV7-8, TRBJ1-2)
CASSLRPLQGHLYSYTF

SEQ ID NO: 147107 - protein, 13 aa, Homo sapiens
  CDR3 for alpha chain variable domain of TCR clone 73554 (TRAV3, TRAJ29)
CAVRDIIDTPLVF

SEQ ID NO: 147108 - protein, 14 aa, Homo sapiens
  CDR3 for beta chain variable domain of TCR clone 73554 (TRBV27, TRBJ2-1)
CASSAKGGYNEQFF

SEQ ID NO: 147109 - protein, 11 aa, Homo sapiens
  CDR3 for alpha chain variable domain of TCR clone 73555 (TRAV1-1, TRAJ5)
CAVRVRRALTF

SEQ ID NO: 147110 - protein, 13 aa, Homo sapiens
  CDR3 for beta chain variable domain of TCR clone 73555 (TRBV19, TRBJ1-2)
CASSQGQVYGYTF

SEQ ID NO: 147111 - protein, 13 aa, Homo sapiens
  CDR3 for alpha chain variable domain of TCR clone 73556 (TRAV3, TRAJ20)
CAVRSLNDYKLSF

SEQ ID NO: 147112 - protein, 13 aa, Homo sapiens
  CDR3 for beta chain variable domain of TCR clone 73556 (TRBV6-1, TRBJ2-1)
CAVMDPTNNEQFF

SEQ ID NO: 147113 - protein, 11 aa, Homo sapiens
  CDR3 for alpha chain variable domain of TCR clone 73557 (TRAV12-2, TRAJ39)
CAVNNMLTFGG

SEQ ID NO: 147114 - protein, 18 aa, Homo sapiens
  CDR3 for beta chain variable domain of TCR clone 73557 (TRBV11-2, TRBJ2-3)
CASSLGGASRGAPNTQYF

SEQ ID NO: 147115 - protein, 12 aa, Homo sapiens
  CDR3 for alpha chain variable domain of TCR clone 73558 (TRAV12-3, TRAJ17)
CAMTLTGNKLTF

SEQ ID NO: 147116 - protein, 17 aa, Homo sapiens
  CDR3 for beta chain variable domain of TCR clone 73558 (TRBV7-8, TRBJ2-6)
CASSAGTGGAGANDLTF

SEQ ID NO: 147117 - protein, 14 aa, Homo sapiens
  CDR3 for alpha chain variable domain of TCR clone 73559 (TRAV12-2, TRAJ13)
CAVKKTGGYQKVTF

SEQ ID NO: 147118 - protein, 17 aa, Homo sapiens
  CDR3 for beta chain variable domain of TCR clone 73559 (TRBV4-3, TRBJ1-4)
CASSQEGPRGVEEKLFF

SEQ ID NO: 147119 - protein, 13 aa, Homo sapiens
  CDR3 for alpha chain variable domain of TCR clone 73560 (TRAV8-3, TRAJ8)
CAVVPYNNNDMRF

SEQ ID NO: 147120 - protein, 14 aa, Homo sapiens
  CDR3 for beta chain variable domain of TCR clone 73560 (TRBV7-6, TRBJ2-3)
CASSLGTATDTQYF

SEQ ID NO: 147121 - protein, 15 aa, Homo sapiens
  CDR3 for alpha chain variable domain of TCR clone 73561 (TRAV29/DV5, TRAJ10)
CAAFGITGGGNKLTF

SEQ ID NO: 147122 - protein, 13 aa, Homo sapiens
  CDR3 for beta chain variable domain of TCR clone 73561 (TRBV10-2, TRBJ2-5)
CASGRLARETQYF

SEQ ID NO: 147123 - protein, 11 aa, Homo sapiens
  CDR3 for alpha chain variable domain of TCR clone 73562 (TRAV13-1, TRAJ39)
CASHAGNMLTF

SEQ ID NO: 147124 - protein, 13 aa, Homo sapiens
  CDR3 for beta chain variable domain of TCR clone 73562 (TRBV7-3, TRBJ1-1)
CASSQDWGAEAFF

SEQ ID NO: 147125 - protein, 13 aa, Homo sapiens
  CDR3 for alpha chain variable domain of TCR clone 73563 (TRAV3, TRAJ30)
CAVRDRGADKIIF

SEQ ID NO: 147126 - protein, 16 aa, Homo sapiens
  CDR3 for beta chain variable domain of TCR clone 73563 (TRBV7-3, TRBJ2-2)
CASSLKRGTLSGELFF

SEQ ID NO: 147127 - protein, 14 aa, Homo sapiens
  CDR3 for alpha chain variable domain of TCR clone 73564 (TRAV13-2, TRAJ43)
CAEIPTYNNNDMRF

SEQ ID NO: 147128 - protein, 15 aa, Homo sapiens
  CDR3 for beta chain variable domain of TCR clone 73564 (TRBV7-9, TRBJ2-2)
CASGPLDTFPGEMFF

SEQ ID NO: 147129 - protein, 14 aa, Homo sapiens
  CDR3 for alpha chain variable domain of TCR clone 73565 (TRAV12-3, TRAJ58)
CAMSTETSGARLTF

SEQ ID NO: 147130 - protein, 15 aa, Homo sapiens
  CDR3 for beta chain variable domain of TCR clone 73565 (TRBV4-1, TRBJ1-4)
CASSDTGGTNEKLFF

SEQ ID NO: 147131 - protein, 14 aa, Homo sapiens
  CDR3 for alpha chain variable domain of TCR clone 73566 (TRAV12-3, TRAJ47)
CAMSVREYGNELVF

SEQ ID NO: 147132 - protein, 15 aa, Homo sapiens
  CDR3 for beta chain variable domain of TCR clone 73566 (TRBV20-1, TRBJ2-2)
CSARDTRLNTGELFF

SEQ ID NO: 147133 - protein, 13 aa, Homo sapiens
  CDR3 for alpha chain variable domain of TCR clone 73567 (TRAV29/DV5, TRAJ31)
CAASRNNNARLIF

SEQ ID NO: 147134 - protein, 12 aa, Homo sapiens
  CDR3 for beta chain variable domain of TCR clone 73567 (TRBV14, TRBJ1-1)
CASSQLKGLAFF

SEQ ID NO: 147135 - protein, 12 aa, Homo sapiens
  CDR3 for alpha chain variable domain of TCR clone 73568 (TRAV16, TRAJ9)
FALSSGGFKTIF

SEQ ID NO: 147136 - protein, 14 aa, Homo sapiens
  CDR3 for beta chain variable domain of TCR clone 73568 (TRBV7-9, TRBJ2-1)
CASSLAGPYNEQFF

SEQ ID NO: 147137 - protein, 14 aa, Homo sapiens
  CDR3 for alpha chain variable domain of TCR clone 73569 (TRAV12-3, TRAJ12)
CAMSALDSSYKLIF

SEQ ID NO: 147138 - protein, 16 aa, Homo sapiens
  CDR3 for beta chain variable domain of TCR clone 73569 (TRBV7-9, TRBJ2-3)
CASSLQGNPGIDTQYF

SEQ ID NO: 147139 - protein, 16 aa, Homo sapiens
  CDR3 for alpha chain variable domain of TCR clone 73570 (TRAV12-2, TRAJ32)
CAVNLGQGGATNKLIF

SEQ ID NO: 147140 - protein, 13 aa, Homo sapiens
  CDR3 for beta chain variable domain of TCR clone 73570 (TRBV7-3, TRBJ1-1)
CASSQDWGAEAFF

SEQ ID NO: 147141 - protein, 16 aa, Homo sapiens
  CDR3 for alpha chain variable domain of TCR clone 73571 (TRAV12-2, TRAJ40)
CAVIRGGTSGTYKYIF

SEQ ID NO: 147142 - protein, 12 aa, Homo sapiens
  CDR3 for beta chain variable domain of TCR clone 73571 (TRBV11-2, TRBJ2-2)
CASSLGGGELFF

SEQ ID NO: 147143 - protein, 14 aa, Homo sapiens
  CDR3 for alpha chain variable domain of TCR clone 73572 (TRAV13-1, TRAJ47)
CAADPGEYGNKLVF

SEQ ID NO: 147144 - protein, 14 aa, Homo sapiens
  CDR3 for beta chain variable domain of TCR clone 73572 (TRBV19, TRBJ2-1)
CASGKSTQYNEQFF

SEQ ID NO: 147145 - protein, 15 aa, Homo sapiens
  CDR3 for alpha chain variable domain of TCR clone 73573 (TRAV8-2, TRAJ16)
CVVSDGFLDGQKLLF

SEQ ID NO: 147146 - protein, 13 aa, Homo sapiens
  CDR3 for beta chain variable domain of TCR clone 73573 (TRBV20-1, TRBJ1-1)
CSAPPGGHTEAFF

SEQ ID NO: 147147 - protein, 12 aa, Homo sapiens
  CDR3 for alpha chain variable domain of TCR clone 73574 (TRAV12-1, TRAJ34)
CVVAGATDTLIF

SEQ ID NO: 147148 - protein, 12 aa, Homo sapiens
  CDR3 for beta chain variable domain of TCR clone 73574 (TRBV7-9, TRBJ1-1)
CASSLVRGEAFF

SEQ ID NO: 147149 - protein, 12 aa, Homo sapiens
  CDR3 for alpha chain variable domain of TCR clone 73575 (TRAV13-1, TRAJ20)
CAASMGDYKPSF

SEQ ID NO: 147150 - protein, 14 aa, Homo sapiens
  CDR3 for beta chain variable domain of TCR clone 73575 (TRBV20-1, TRBJ2-5)
CSASDSGSGETQYF

SEQ ID NO: 147151 - protein, 15 aa, Homo sapiens
  CDR3 for alpha chain variable domain of TCR clone 73576 (TRAV3, TRAJ9)
CAVRARNTGGFKTIF

SEQ ID NO: 147152 - protein, 15 aa, Homo sapiens
  CDR3 for beta chain variable domain of TCR clone 73576 (TRBV6-5, TRBJ2-6)
CASSQWEAGANVLTF

SEQ ID NO: 147153 - protein, 12 aa, Homo sapiens
  CDR3 for alpha chain variable domain of TCR clone 73577 (TRAV13-1, TRAJ48)
CAANFGNEKLTF

SEQ ID NO: 147154 - protein, 15 aa, Homo sapiens
  CDR3 for beta chain variable domain of TCR clone 73577 (TRBV11-2, TRBJ2-2)
CASSLDGGNTGELFF

SEQ ID NO: 147155 - protein, 13 aa, Homo sapiens
  CDR3 for alpha chain variable domain of TCR clone 73578 (TRAV25, TRAJ10)
CAGRTGGGNKLTF

SEQ ID NO: 147156 - protein, 15 aa, Homo sapiens
  CDR3 for beta chain variable domain of TCR clone 73578 (TRBV19, TRBJ2-1)
CASSSPGVPIDEQFF

SEQ ID NO: 147157 - protein, 12 aa, Homo sapiens
  CDR3 for alpha chain variable domain of TCR clone 73579 (TRAV12-3, TRAJ42)
CAPGGSQGNRIF

SEQ ID NO: 147158 - protein, 13 aa, Homo sapiens
  CDR3 for beta chain variable domain of TCR clone 73579 (TRBV5-7, TRBJ2-6)
CASTSSGANVLTF

SEQ ID NO: 147159 - protein, 14 aa, Homo sapiens
  CDR3 for alpha chain variable domain of TCR clone 73580 (TRAV26-1, TRAJ38)
CIADNAGNNRKLIW

SEQ ID NO: 147160 - protein, 12 aa, Homo sapiens
  CDR3 for beta chain variable domain of TCR clone 73580 (TRBV12-4, TRBJ2-7)
CASSLGGYEQYF

SEQ ID NO: 147161 - protein, 13 aa, Homo sapiens
  CDR3 for alpha chain variable domain of TCR clone 73581 (TRAV13-1, TRAJ17)
CAANKAAGNKLTF

SEQ ID NO: 147162 - protein, 14 aa, Homo sapiens
  CDR3 for beta chain variable domain of TCR clone 73581 (TRBV2, TRBJ2-5)
RASSEVLAQETQYF

SEQ ID NO: 147163 - protein, 14 aa, Homo sapiens
  CDR3 for alpha chain variable domain of TCR clone 73582 (TRAV8-2, TRAJ11)
CVVSENSGYSTLTF

SEQ ID NO: 147164 - protein, 16 aa, Homo sapiens
  CDR3 for beta chain variable domain of TCR clone 73582 (TRBV28, TRBJ2-1)
CASSSPEYPRDNEQFF

SEQ ID NO: 147165 - protein, 11 aa, Homo sapiens
  CDR3 for alpha chain variable domain of TCR clone 73583 (TRAV23/DV6, TRAJ48)
CAPRWGEKLTF

SEQ ID NO: 147166 - protein, 13 aa, Homo sapiens
  CDR3 for beta chain variable domain of TCR clone 73583 (TRBV12-4, TRBJ2-5)
RASSPGTEETQYF

SEQ ID NO: 147167 - protein, 12 aa, Homo sapiens
  CDR3 for alpha chain variable domain of TCR clone 73584 (TRAV12-3, TRAJ5)
CAMDTGMRALTF

SEQ ID NO: 147168 - protein, 13 aa, Homo sapiens
  CDR3 for beta chain variable domain of TCR clone 73584 (TRBV7-7, TRBJ2-2)
CASSLTSAGELFF

SEQ ID NO: 147169 - protein, 14 aa, Homo sapiens
  CDR3 for alpha chain variable domain of TCR clone 73585 (TRAV13-1, TRAJ10)
CAALFTGGGNKITF

SEQ ID NO: 147170 - protein, 15 aa, Homo sapiens
  CDR3 for beta chain variable domain of TCR clone 73585 (TRBV10-3, TRBJ2-2)
CAISEGDRAAGELFF

SEQ ID NO: 147171 - protein, 15 aa, Homo sapiens
  CDR3 for alpha chain variable domain of TCR clone 73586 (TRAV20, TRAJ43)
CAVQAGKSSNNDMRL

SEQ ID NO: 147172 - protein, 14 aa, Homo sapiens
  CDR3 for beta chain variable domain of TCR clone 73586 (TRBV27, TRBJ2-1)
CASRHLGGGKEQFF

SEQ ID NO: 147173 - protein, 15 aa, Homo sapiens
  CDR3 for alpha chain variable domain of TCR clone 73587 (TRAV2, TRAJ22)
CAVGFFSGSARQLAF

SEQ ID NO: 147174 - protein, 15 aa, Homo sapiens
  CDR3 for beta chain variable domain of TCR clone 73587 (TRBV2, TRBJ2-1)
CASSELAGGYNEQFF

SEQ ID NO: 147175 - protein, 11 aa, Homo sapiens
  CDR3 for alpha chain variable domain of TCR clone 73588 (TRAV12-1, TRAJ34)
CVVNKGRELIF

SEQ ID NO: 147176 - protein, 11 aa, Homo sapiens
  CDR3 for beta chain variable domain of TCR clone 73588 (TRBV7-9, TRBJ2-3)
CASSGPDTQYF

SEQ ID NO: 147177 - protein, 12 aa, Homo sapiens
  CDR3 for alpha chain variable domain of TCR clone 73589 (TRAV3, TRAJ20)
CAVRDPDYKLSF

SEQ ID NO: 147178 - protein, 15 aa, Homo sapiens
  CDR3 for beta chain variable domain of TCR clone 73589 (TRBV28, TRBJ1-1)
CASTSTRGLNTEAFF

SEQ ID NO: 147179 - protein, 13 aa, Homo sapiens
  CDR3 for alpha chain variable domain of TCR clone 73590 (TRAV13-2, TRAJ15)
CAESNQAGTALIF

SEQ ID NO: 147180 - protein, 12 aa, Homo sapiens
  CDR3 for beta chain variable domain of TCR clone 73590 (TRBV6-5, TRBJ1-1)
CASSAEGAEAFF

SEQ ID NO: 147181 - protein, 13 aa, Homo sapiens
  CDR3 for alpha chain variable domain of TCR clone 73591 (TRAV6, TRAJ16)
CALDDSDGQQLLF

SEQ ID NO: 147182 - protein, 14 aa, Homo sapiens
  CDR3 for beta chain variable domain of TCR clone 73591 (TRBV12-4, TRBJ1-6)
CASNLQGKGSPLHF

SEQ ID NO: 147183 - protein, 21 aa, Homo sapiens
  CDR3 for alpha chain variable domain of TCR clone 73592 (TRAV12-1, TRAJ32)
SSVIQPPTSMNYGGATNKLIF

SEQ ID NO: 147184 - protein, 12 aa, Homo sapiens
  CDR3 for beta chain variable domain of TCR clone 73592 (TRBV11-2, TRBJ2-1)
CASSPGNNEQFF

SEQ ID NO: 147185 - protein, 14 aa, Homo sapiens
  CDR3 for alpha chain variable domain of TCR clone 73593 (TRAV17, TRAJ16)
CATADFSVGQKLLF

SEQ ID NO: 147186 - protein, 15 aa, Homo sapiens
  CDR3 for beta chain variable domain of TCR clone 73593 (TRBV18, TRBJ2-1)
CASSPPSASYNEQFF

SEQ ID NO: 147187 - protein, 14 aa, Homo sapiens
  CDR3 for alpha chain variable domain of TCR clone 73594 (TRAV8-4, TRAJ13)
CAVTLSGGYQKVTF

SEQ ID NO: 147188 - protein, 14 aa, Homo sapiens
  CDR3 for beta chain variable domain of TCR clone 73594 (TRBV7-2, TRBJ1-2)
CASSQTGSTYGYTY

SEQ ID NO: 147189 - protein, 20 aa, Homo sapiens
  CDR3 for alpha chain variable domain of TCR clone 73595 (TRAV21, TRAJ4)
AASQPGDSAALAGGYNKLIF

SEQ ID NO: 147190 - protein, 19 aa, Homo sapiens
  CDR3 for beta chain variable domain of TCR clone 73595 (TRBV18, TRBJ1-3)
CASSPLSRTGMSSGNTIYF

SEQ ID NO: 147191 - protein, 14 aa, Homo sapiens
  CDR3 for alpha chain variable domain of TCR clone 73596 (TRAV1-2, TRAJ16)
CAVNRFSDGQKLLS

SEQ ID NO: 147192 - protein, 16 aa, Homo sapiens
  CDR3 for beta chain variable domain of TCR clone 73596 (TRBV7-2, TRBJ2-7)
CASSLDLSGGAYEQYF

SEQ ID NO: 147193 - protein, 15 aa, Homo sapiens
  CDR3 for alpha chain variable domain of TCR clone 73597 (TRAV26-1, TRAJ48)
CIVRVGDFGNEKLTF

SEQ ID NO: 147194 - protein, 16 aa, Homo sapiens
  CDR3 for beta chain variable domain of TCR clone 73597 (TRBV4-1, TRBJ2-3)
CASSQRAGGLTDTHYF

SEQ ID NO: 147195 - protein, 14 aa, Homo sapiens
  CDR3 for alpha chain variable domain of TCR clone 73598 (TRAV16, TRAJ37)
CALDISGNTGKLIF

SEQ ID NO: 147196 - protein, 13 aa, Homo sapiens
  CDR3 for beta chain variable domain of TCR clone 73598 (TRBV7-6, TRBJ2-7)
CQQLSTGADEQYF

SEQ ID NO: 147197 - protein, 15 aa, Homo sapiens
  CDR3 for alpha chain variable domain of TCR clone 73599 (TRAV25, TRAJ53)
CAATGGGGSNYKLTF

SEQ ID NO: 147198 - protein, 19 aa, Homo sapiens
  CDR3 for beta chain variable domain of TCR clone 73599 (TRBV7-2, TRBJ2-3)
CASSFLSRNWGGGTETQYF

SEQ ID NO: 147199 - protein, 12 aa, Homo sapiens
  CDR3 for alpha chain variable domain of TCR clone 73600 (TRAV2, TRAJ33)
CAVPDSNYQLIW

SEQ ID NO: 147200 - protein, 20 aa, Homo sapiens
  CDR3 for beta chain variable domain of TCR clone 73600 (TRBV19, TRBJ2-1)
CASSISRTVTSTRLNDEQFF

SEQ ID NO: 147201 - protein, 15 aa, Homo sapiens
  CDR3 for alpha chain variable domain of TCR clone 73601 (TRAV3, TRAJ9)
CAVRARNTGGFKNIF

SEQ ID NO: 147202 - protein, 12 aa, Homo sapiens
  CDR3 for beta chain variable domain of TCR clone 73601 (TRBV11-2, TRBJ2-7)
CASSLPTYEQYF

SEQ ID NO: 147203 - protein, 14 aa, Homo sapiens
  CDR3 for alpha chain variable domain of TCR clone 73602 (TRAV2, TRAJ17)
CAVVGKAAGNKLTF

SEQ ID NO: 147204 - protein, 13 aa, Homo sapiens
  CDR3 for beta chain variable domain of TCR clone 73602 (TRBV7-2, TRBJ2-7)
CASSAGLSYGQYF

SEQ ID NO: 147205 - protein, 14 aa, Homo sapiens
  CDR3 for alpha chain variable domain of TCR clone 73603 (TRAV12-3, TRAJ10)
SHLPLTGGGNRLTF

SEQ ID NO: 147206 - protein, 16 aa, Homo sapiens
  CDR3 for beta chain variable domain of TCR clone 73603 (TRBV4-1, TRBJ1-4)
CASSQDLRRGGEKLFF

SEQ ID NO: 147207 - protein, 13 aa, Homo sapiens
  CDR3 for alpha chain variable domain of TCR clone 73604 (TRAV17, TRAJ5)
CAPMDTGRRALTF

SEQ ID NO: 147208 - protein, 13 aa, Homo sapiens
  CDR3 for beta chain variable domain of TCR clone 73604 (TRBV7-9, TRBJ1-2)
CASSLKQNYCYTF

SEQ ID NO: 147209 - protein, 13 aa, Homo sapiens
  CDR3 for alpha chain variable domain of TCR clone 73605 (TRAV27, TRAJ41)
CAGEGNSGYALNF

SEQ ID NO: 147210 - protein, 14 aa, Homo sapiens
  CDR3 for beta chain variable domain of TCR clone 73605 (TRBV12-4, TRBJ1-1)
CASSLGTGGTEAFF

SEQ ID NO: 147211 - protein, 14 aa, Homo sapiens
  CDR3 for alpha chain variable domain of TCR clone 73606 (TRAV17, TRAJ57)
CATEPQGGSEKLVF

SEQ ID NO: 147212 - protein, 13 aa, Homo sapiens
  CDR3 for beta chain variable domain of TCR clone 73606 (TRBV7-9, TRBJ1-2)
CASSLKQNYGYTF

SEQ ID NO: 147213 - protein, 14 aa, Homo sapiens
  CDR3 for alpha chain variable domain of TCR clone 73607 (TRAV1-2, TRAJ16)
CAVNRFSDGQKLLF

SEQ ID NO: 147214 - protein, 10 aa, Homo sapiens
  CDR3 for beta chain variable domain of TCR clone 73607 (TRBV20-1, TRBJ2-5)
CSARFETQYF

SEQ ID NO: 147215 - protein, 14 aa, Homo sapiens
  CDR3 for alpha chain variable domain of TCR clone 73608 (TRAV1-2, TRAJ16)
CAVNRFSDGQKLLF

SEQ ID NO: 147216 - protein, 14 aa, Homo sapiens
  CDR3 for beta chain variable domain of TCR clone 73608 (TRBV7-9, TRBJ2-3)
CASNLEDGTDTQYF

SEQ ID NO: 147217 - protein, 22 aa, Homo sapiens
  CDR3 for alpha chain variable domain of TCR clone 73609 (TRAV3, TRAJ38)
CAVRDCLNAGNNHIQNPDPAVY

SEQ ID NO: 147218 - protein, 18 aa, Homo sapiens
  CDR3 for beta chain variable domain of TCR clone 73609 (TRBV12-4, TRBJ2-2)
CASSLVAGTRGRTGELFF

SEQ ID NO: 147219 - protein, 14 aa, Homo sapiens
  CDR3 for alpha chain variable domain of TCR clone 73610 (TRAV12-1, TRAJ10)
CVVNSAGGGNKLNF

SEQ ID NO: 147220 - protein, 14 aa, Homo sapiens
  CDR3 for beta chain variable domain of TCR clone 73610 (TRBV12-4, TRBJ1-1)
CASSLGTGGTEAFF

SEQ ID NO: 147221 - protein, 15 aa, Homo sapiens
  CDR3 for alpha chain variable domain of TCR clone 73611 (TRAV1-1, TRAJ20)
CAVRDNVSNDYKLSF

SEQ ID NO: 147222 - protein, 13 aa, Homo sapiens
  CDR3 for beta chain variable domain of TCR clone 73611 (TRBV4-1, TRBJ2-2)
CASSQENTGELFF

SEQ ID NO: 147223 - protein, 11 aa, Homo sapiens
  CDR3 for alpha chain variable domain of TCR clone 73612 (TRAV1-1, TRAJ16)
CAAGDGQKLLF

SEQ ID NO: 147224 - protein, 16 aa, Homo sapiens
  CDR3 for beta chain variable domain of TCR clone 73612 (TRBV7-3, TRBJ2-2)
CASSLKRVTLSGELFF

SEQ ID NO: 147225 - protein, 13 aa, Homo sapiens
  CDR3 for alpha chain variable domain of TCR clone 73613 (TRAV35, TRAJ36)
CAGPRIGANNLFF

SEQ ID NO: 147226 - protein, 14 aa, Homo sapiens
  CDR3 for beta chain variable domain of TCR clone 73613 (TRBV18, TRBJ1-5)
CASSPGNSNQPQHF

SEQ ID NO: 147227 - protein, 12 aa, Homo sapiens
  CDR3 for alpha chain variable domain of TCR clone 73614 (TRAV12-1, TRAJ20)
CVAHFNDYKLSF

SEQ ID NO: 147228 - protein, 13 aa, Homo sapiens
  CDR3 for beta chain variable domain of TCR clone 73614 (TRBV5-6, TRBJ2-5)
CASSLRLQETQYF

SEQ ID NO: 147229 - protein, 16 aa, Homo sapiens
  CDR3 for alpha chain variable domain of TCR clone 73615 (TRAV30, TRAJ24)
CGAEIVDADSWGKFQF

SEQ ID NO: 147230 - protein, 12 aa, Homo sapiens
  CDR3 for beta chain variable domain of TCR clone 73615 (TRBV11-2, TRBJ2-2)
CASSLGGGELFF

SEQ ID NO: 147231 - protein, 12 aa, Homo sapiens
  CDR3 for alpha chain variable domain of TCR clone 73616 (TRAV13-2, TRAJ8)
FAPWLGFQKLVF

SEQ ID NO: 147232 - protein, 14 aa, Homo sapiens
  CDR3 for beta chain variable domain of TCR clone 73616 (TRBV18, TRBJ1-5)
CASSRQQRNQPQHF

SEQ ID NO: 147233 - protein, 15 aa, Homo sapiens
  CDR3 for alpha chain variable domain of TCR clone 73617 (TRAV3, TRAJ17)
CAVSPKEAAGNKLTF

SEQ ID NO: 147234 - protein, 15 aa, Homo sapiens
  CDR3 for beta chain variable domain of TCR clone 73617 (TRBV6-1, TRBJ2-1)
CASSEAAYSYNEQFF

SEQ ID NO: 147235 - protein, 14 aa, Homo sapiens
  CDR3 for alpha chain variable domain of TCR clone 73618 (TRAV12-3, TRAJ10)
SHLPLTGGGNKLTF

SEQ ID NO: 147236 - protein, 14 aa, Homo sapiens
  CDR3 for beta chain variable domain of TCR clone 73618 (TRBV28, TRBJ2-1)
CASSLNGRNNEQFF

SEQ ID NO: 147237 - protein, 13 aa, Homo sapiens
  CDR3 for alpha chain variable domain of TCR clone 73619 (TRAV21, TRAJ57)
CALTQGGSEKLVF

SEQ ID NO: 147238 - protein, 14 aa, Homo sapiens
  CDR3 for beta chain variable domain of TCR clone 73619 (TRBV18, TRBJ2-5)
CASSPGVSQETQYF

SEQ ID NO: 147239 - protein, 11 aa, Homo sapiens
  CDR3 for alpha chain variable domain of TCR clone 73620 (TRAV12-1, TRAJ34)
CVVNKGRELIF

SEQ ID NO: 147240 - protein, 12 aa, Homo sapiens
  CDR3 for beta chain variable domain of TCR clone 73620 (TRBV11-2, TRBJ2-2)
CASSLGGGEPFF

SEQ ID NO: 147241 - protein, 12 aa, Homo sapiens
  CDR3 for alpha chain variable domain of TCR clone 73621 (TRAV13-1, TRAJ27)
CAAHTNAGKSTF

SEQ ID NO: 147242 - protein, 14 aa, Homo sapiens
  CDR3 for beta chain variable domain of TCR clone 73621 (TRBV19, TRBJ2-2)
WASSGQGIAGELFF

SEQ ID NO: 147243 - protein, 15 aa, Homo sapiens
  CDR3 for alpha chain variable domain of TCR clone 73622 (TRAV2, TRAJ9)
CAVEDRGTGGFKTIF

SEQ ID NO: 147244 - protein, 16 aa, Homo sapiens
  CDR3 for beta chain variable domain of TCR clone 73622 (TRBV24-1, TRBJ2-3)
CDTSDPGTGATDTQYF

SEQ ID NO: 147245 - protein, 11 aa, Homo sapiens
  CDR3 for alpha chain variable domain of TCR clone 73623 (TRAV12-2, TRAJ33)
CAVTSNYQLIC

SEQ ID NO: 147246 - protein, 14 aa, Homo sapiens
  CDR3 for beta chain variable domain of TCR clone 73623 (TRBV12-4, TRBJ2-2)
CASNQGANTGELFF

SEQ ID NO: 147247 - protein, 15 aa, Homo sapiens
  CDR3 for alpha chain variable domain of TCR clone 73624 (TRAV29/DV5, TRAJ24)
CAASGATDSWGKFQF

SEQ ID NO: 147248 - protein, 12 aa, Homo sapiens
  CDR3 for beta chain variable domain of TCR clone 73624 (TRBV11-3, TRBJ2-2)
CASSLPTGELFF

SEQ ID NO: 147249 - protein, 15 aa, Homo sapiens
  CDR3 for alpha chain variable domain of TCR clone 73625 (TRAV26-1, TRAJ44)
CIVRANTGTASKLTF

SEQ ID NO: 147250 - protein, 14 aa, Homo sapiens
  CDR3 for beta chain variable domain of TCR clone 73625 (TRBV7-2, TRBJ2-7)
CASRSQGAAYEQYF

SEQ ID NO: 147251 - protein, 18 aa, Homo sapiens
  CDR3 for alpha chain variable domain of TCR clone 73626 (TRAV21, TRAJ52)
CAVRPSLAGGTSYGKLTF

SEQ ID NO: 147252 - protein, 14 aa, Homo sapiens
  CDR3 for beta chain variable domain of TCR clone 73626 (TRBV7-2, TRBJ2-1)
CASSLEGGYNEQFF

SEQ ID NO: 147253 - protein, 12 aa, Homo sapiens
  CDR3 for alpha chain variable domain of TCR clone 73627 (TRAV12-3, TRAJ20)
CAMVRGDYKLSF

SEQ ID NO: 147254 - protein, 13 aa, Homo sapiens
  CDR3 for beta chain variable domain of TCR clone 73627 (TRBV20-1, TRBJ1-1)
CSARGGGNTEAFF

SEQ ID NO: 147255 - protein, 10 aa, Homo sapiens
  CDR3 for alpha chain variable domain of TCR clone 73628 (TRAV25, TRAJ17)
CQAAGNKLTF

SEQ ID NO: 147256 - protein, 13 aa, Homo sapiens
  CDR3 for beta chain variable domain of TCR clone 73628 (TRBV10-3, TRBJ2-7)
CASKLAVNYEQYF

SEQ ID NO: 147257 - protein, 13 aa, Homo sapiens
  CDR3 for alpha chain variable domain of TCR clone 73629 (TRAV17, TRAJ33)
CATDADSNYQLIW

SEQ ID NO: 147258 - protein, 13 aa, Homo sapiens
  CDR3 for beta chain variable domain of TCR clone 73629 (TRBV10-3, TRBJ2-7)
CASKLAVNYEQYF

SEQ ID NO: 147259 - protein, 13 aa, Homo sapiens
  CDR3 for alpha chain variable domain of TCR clone 73630 (TRAV1-2, TRAJ9)
CAALNTGGFKTIF

SEQ ID NO: 147260 - protein, 16 aa, Homo sapiens
  CDR3 for beta chain variable domain of TCR clone 73630 (TRBV2, TRBJ2-1)
CASSVGGSLSYNEQFF

SEQ ID NO: 147261 - protein, 14 aa, Homo sapiens
  CDR3 for alpha chain variable domain of TCR clone 73631 (TRAV2, TRAJ12)
CAVDAMDSSYKLIL

SEQ ID NO: 147262 - protein, 13 aa, Homo sapiens
  CDR3 for beta chain variable domain of TCR clone 73631 (TRBV19, TRBJ2-1)
CASKVGAGGEQFF

SEQ ID NO: 147263 - protein, 14 aa, Homo sapiens
  CDR3 for alpha chain variable domain of TCR clone 73632 (TRAV12-3, TRAJ10)
SHLPLTGEGNKLTF

SEQ ID NO: 147264 - protein, 14 aa, Homo sapiens
  CDR3 for beta chain variable domain of TCR clone 73632 (TRBV6-1, TRBJ1-3)
CASVQGGGGNTIYF

SEQ ID NO: 147265 - protein, 13 aa, Homo sapiens
  CDR3 for alpha chain variable domain of TCR clone 73633 (TRAV13-1, TRAJ10)
CAATAEGGNKLTF

SEQ ID NO: 147266 - protein, 12 aa, Homo sapiens
  CDR3 for beta chain variable domain of TCR clone 73633 (TRBV7-3, TRBJ2-1)
CASSFQSGPQFF

SEQ ID NO: 147267 - protein, 15 aa, Homo sapiens
  CDR3 for alpha chain variable domain of TCR clone 73634 (TRAV27, TRAJ38)
CAARRNAGNNRKLIW

SEQ ID NO: 147268 - protein, 12 aa, Homo sapiens
  CDR3 for beta chain variable domain of TCR clone 73634 (TRBV29-1, TRBJ2-3)
CSVTGGADTQYF

SEQ ID NO: 147269 - protein, 14 aa, Homo sapiens
  CDR3 for alpha chain variable domain of TCR clone 73635 (TRAV12-2, TRAJ3)
CAVSLYSSASKIIF

SEQ ID NO: 147270 - protein, 14 aa, Homo sapiens
  CDR3 for beta chain variable domain of TCR clone 73635 (TRBV27, TRBJ2-1)
CAGSIAEKYNEQFF

SEQ ID NO: 147271 - protein, 14 aa, Homo sapiens
  CDR3 for alpha chain variable domain of TCR clone 73636 (TRAV35, TRAJ33)
CAGSSQDSNYQLTW

SEQ ID NO: 147272 - protein, 15 aa, Homo sapiens
  CDR3 for beta chain variable domain of TCR clone 73636 (TRBV20-1, TRBJ2-7)
CSAESGTSGAYEQYF

SEQ ID NO: 147273 - protein, 15 aa, Homo sapiens
  CDR3 for alpha chain variable domain of TCR clone 73637 (TRAV12-2, TRAJ43)
CAFDMRFGAGTRLTV

SEQ ID NO: 147274 - protein, 14 aa, Homo sapiens
  CDR3 for beta chain variable domain of TCR clone 73637 (TRBV28, TRBJ2-1)
CASSIQGTVGEQFF

SEQ ID NO: 147275 - protein, 15 aa, Homo sapiens
  CDR3 for alpha chain variable domain of TCR clone 73638 (TRAV8-3, TRAJ45)
CASSYSGGGADGLTF

SEQ ID NO: 147276 - protein, 14 aa, Homo sapiens
  CDR3 for beta chain variable domain of TCR clone 73638 (TRBV11-3, TRBJ1-1)
CASSPGAWNTEAFF

SEQ ID NO: 147277 - protein, 11 aa, Homo sapiens
  CDR3 for alpha chain variable domain of TCR clone 73639 (TRAV2, TRAJ33)
CAVQSNYQLIW

SEQ ID NO: 147278 - protein, 15 aa, Homo sapiens
  CDR3 for beta chain variable domain of TCR clone 73639 (TRBV19, TRBJ1-1)
CASTSGQIQNTEAFF

SEQ ID NO: 147279 - protein, 14 aa, Homo sapiens
  CDR3 for alpha chain variable domain of TCR clone 73640 (TRAV14/DV4, TRAJ54)
CAMREAPGAQKLVF

SEQ ID NO: 147280 - protein, 15 aa, Homo sapiens
  CDR3 for beta chain variable domain of TCR clone 73640 (TRBV5-1, TRBJ2-7)
CASSLNGGPSREQYF

SEQ ID NO: 147281 - protein, 15 aa, Homo sapiens
  CDR3 for alpha chain variable domain of TCR clone 73641 (TRAV12-2, TRAJ53)
CAVNGGGGSNYKLTF

SEQ ID NO: 147282 - protein, 15 aa, Homo sapiens
  CDR3 for beta chain variable domain of TCR clone 73641 (TRBV20-1, TRBJ2-7)
CSVRDRVSGMDEQYF

SEQ ID NO: 147283 - protein, 13 aa, Homo sapiens
  CDR3 for alpha chain variable domain of TCR clone 73642 (TRAV8-6, TRAJ54)
CAGGIQGAQKLVF

SEQ ID NO: 147284 - protein, 15 aa, Homo sapiens
  CDR3 for beta chain variable domain of TCR clone 73642 (TRBV6-1, TRBJ2-1)
CASSEAAYSYNEQFF

SEQ ID NO: 147285 - protein, 14 aa, Homo sapiens
  CDR3 for alpha chain variable domain of TCR clone 73643 (TRAV12-3, TRAJ10)
SHLPLTGGGNKLTF

SEQ ID NO: 147286 - protein, 14 aa, Homo sapiens
  CDR3 for beta chain variable domain of TCR clone 73643 (TRBV19, TRBJ2-1)
RASPTFVLSGEQFF

SEQ ID NO: 147287 - protein, 15 aa, Homo sapiens
  CDR3 for alpha chain variable domain of TCR clone 73644 (TRAV26-1, TRAJ29)
CIVRVEGSGNTPLVF

SEQ ID NO: 147288 - protein, 15 aa, Homo sapiens
  CDR3 for beta chain variable domain of TCR clone 73644 (TRBV7-9, TRBJ1-5)
CASSQGHQPYQPQHF

SEQ ID NO: 147289 - protein, 16 aa, Homo sapiens
  CDR3 for alpha chain variable domain of TCR clone 73645 (TRAV35, TRAJ28)
CAGVAYSGAGSYQLTF

SEQ ID NO: 147290 - protein, 12 aa, Homo sapiens
  CDR3 for beta chain variable domain of TCR clone 73645 (TRBV6-3, TRBJ2-1)
CASSGSYNEQFF

SEQ ID NO: 147291 - protein, 12 aa, Homo sapiens
  CDR3 for alpha chain variable domain of TCR clone 73646 (TRAV17, TRAJ34)
CATDAKGNKLIF

SEQ ID NO: 147292 - protein, 12 aa, Homo sapiens
  CDR3 for beta chain variable domain of TCR clone 73646 (TRBV7-2, TRBJ2-7)
CASSSHSYEQYF

SEQ ID NO: 147293 - protein, 13 aa, Homo sapiens
  CDR3 for alpha chain variable domain of TCR clone 73647 (TRAV12-2, TRAJ48)
CAAPNFGNEKLTF

SEQ ID NO: 147294 - protein, 17 aa, Homo sapiens
  CDR3 for beta chain variable domain of TCR clone 73647 (TRBV18, TRBJ1-5)
CASSPTMGQGTNQPQHF

SEQ ID NO: 147295 - protein, 14 aa, Homo sapiens
  CDR3 for alpha chain variable domain of TCR clone 73648 (TRAV3, TRAJ17)
CAVRDAAAGNKLTF

SEQ ID NO: 147296 - protein, 13 aa, Homo sapiens
  CDR3 for beta chain variable domain of TCR clone 73648 (TRBV2, TRBJ1-1)
YASSVSGYTEAFF

SEQ ID NO: 147297 - protein, 19 aa, Homo sapiens
  CDR3 for alpha chain variable domain of TCR clone 73649 (TRAV2, TRAJ20)
ILQVREADAAVYRDCKLSF

SEQ ID NO: 147298 - protein, 12 aa, Homo sapiens
  CDR3 for beta chain variable domain of TCR clone 73649 (TRBV7-9, TRBJ2-7)
CASSFGSYEQYF

SEQ ID NO: 147299 - protein, 15 aa, Homo sapiens
  CDR3 for alpha chain variable domain of TCR clone 73650 (TRAV20, TRAJ58)
CAVQDLETSGSRLTF

SEQ ID NO: 147300 - protein, 12 aa, Homo sapiens
  CDR3 for beta chain variable domain of TCR clone 73650 (TRBV9, TRBJ2-2)
CASSTRTGELFF

SEQ ID NO: 147301 - protein, 12 aa, Homo sapiens
  CDR3 for alpha chain variable domain of TCR clone 73651 (TRAV12-3, TRAJ17)
RAMTLTGNKLTF

SEQ ID NO: 147302 - protein, 16 aa, Homo sapiens
  CDR3 for beta chain variable domain of TCR clone 73651 (TRBV29-1, TRBJ2-7)
CSVEDAEDGTAYEQYF

SEQ ID NO: 147303 - protein, 13 aa, Homo sapiens
  CDR3 for alpha chain variable domain of TCR clone 73652 (TRAV9-2, TRAJ53)
FALSGGSNYKLTF

SEQ ID NO: 147304 - protein, 17 aa, Homo sapiens
  CDR3 for beta chain variable domain of TCR clone 73652 (TRBV11-2, TRBJ2-1)
CASSLYPPGVEYNEQFF

SEQ ID NO: 147305 - protein, 15 aa, Homo sapiens
  CDR3 for alpha chain variable domain of TCR clone 73653 (TRAV38-1, TRAJ37)
CAFIFGSGNTGKLIF

SEQ ID NO: 147306 - protein, 12 aa, Homo sapiens
  CDR3 for beta chain variable domain of TCR clone 73653 (TRBV7-9, TRBJ2-7)
CASSLECYEQYF

SEQ ID NO: 147307 - protein, 15 aa, Homo sapiens
  CDR3 for alpha chain variable domain of TCR clone 73654 (TRAV12-1, TRAJ42)
CVVTRDGGSQRNLIF

SEQ ID NO: 147308 - protein, 14 aa, Homo sapiens
  CDR3 for beta chain variable domain of TCR clone 73654 (TRBV4-1, TRBJ2-2)
CASSQAVNTGELFF

SEQ ID NO: 147309 - protein, 14 aa, Homo sapiens
  CDR3 for alpha chain variable domain of TCR clone 73655 (TRAV26-1, TRAJ21)
CIVRPPYNFNKFYF

SEQ ID NO: 147310 - protein, 16 aa, Homo sapiens
  CDR3 for beta chain variable domain of TCR clone 73655 (TRBV7-8, TRBJ2-6)
CASRVGDSSGANVLTF

SEQ ID NO: 147311 - protein, 16 aa, Homo sapiens
  CDR3 for alpha chain variable domain of TCR clone 73656 (TRAV3, TRAJ3)
CAVRDRAKSSASKIIF

SEQ ID NO: 147312 - protein, 13 aa, Homo sapiens
  CDR3 for beta chain variable domain of TCR clone 73656 (TRBV10-3, TRBJ2-7)
CASKLAVSYEQYF

SEQ ID NO: 147313 - protein, 11 aa, Homo sapiens
  CDR3 for alpha chain variable domain of TCR clone 73657 (TRAV12-3, TRAJ43)
CAMSVSNDMRF

SEQ ID NO: 147314 - protein, 20 aa, Homo sapiens
  CDR3 for beta chain variable domain of TCR clone 73657 (TRBV28, TRBJ2-1)
CASTPIGRSPGLAGGNEQFL

SEQ ID NO: 147315 - protein, 13 aa, Homo sapiens
  CDR3 for alpha chain variable domain of TCR clone 73658 (TRAV21, TRAJ27)
CAARPGNAGKSTF

SEQ ID NO: 147316 - protein, 13 aa, Homo sapiens
  CDR3 for beta chain variable domain of TCR clone 73658 (TRBV12-4, TRBJ2-7)
CASSPTETYEQYF

SEQ ID NO: 147317 - protein, 13 aa, Homo sapiens
  CDR3 for alpha chain variable domain of TCR clone 73659 (TRAV8-6, TRAJ16)
CAVSSPDGQKLLF

SEQ ID NO: 147318 - protein, 16 aa, Homo sapiens
  CDR3 for beta chain variable domain of TCR clone 73659 (TRBV5-7, TRBJ2-3)
CASSSLGGAITDTQYL

SEQ ID NO: 147319 - protein, 11 aa, Homo sapiens
  CDR3 for alpha chain variable domain of TCR clone 73660 (TRAV13-1, TRAJ39)
CASHAGNMLTF

SEQ ID NO: 147320 - protein, 10 aa, Homo sapiens
  CDR3 for beta chain variable domain of TCR clone 73660 (TRBV6-3, TRBJ2-7)
CASSSPGQFS

SEQ ID NO: 147321 - protein, 12 aa, Homo sapiens
  CDR3 for alpha chain variable domain of TCR clone 73661 (TRAV21, TRAJ58)
CALSASGSRLTF

SEQ ID NO: 147322 - protein, 13 aa, Homo sapiens
  CDR3 for beta chain variable domain of TCR clone 73661 (TRBV5-7, TRBJ1-2)
CASSLGVFNGDTF

SEQ ID NO: 147323 - protein, 14 aa, Homo sapiens
  CDR3 for alpha chain variable domain of TCR clone 73662 (TRAV12-2, TRAJ13)
CAVKETGGYQKVTF

SEQ ID NO: 147324 - protein, 17 aa, Homo sapiens
  CDR3 for beta chain variable domain of TCR clone 73662 (TRBV20-1, TRBJ2-2)
CSASGSGQGGLTGELFF

SEQ ID NO: 147325 - protein, 13 aa, Homo sapiens
  CDR3 for alpha chain variable domain of TCR clone 73663 (TRAV12-1, TRAJ16)
YVVNGPDGQKLLF

SEQ ID NO: 147326 - protein, 15 aa, Homo sapiens
  CDR3 for beta chain variable domain of TCR clone 73663 (TRBV6-3, TRBJ2-7)
CASSSPGTVFYEQYF

SEQ ID NO: 147327 - protein, 18 aa, Homo sapiens
  CDR3 for alpha chain variable domain of TCR clone 73664 (TRAV12-3, TRAJ52)
CAMSVGGACGTSYGKLTF

SEQ ID NO: 147328 - protein, 15 aa, Homo sapiens
  CDR3 for beta chain variable domain of TCR clone 73664 (TRBV27, TRBJ1-6)
CASSFDRGLGSPLHF

SEQ ID NO: 147329 - protein, 23 aa, Homo sapiens
  CDR3 for alpha chain variable domain of TCR clone 73665 (TRAV26-1, )
CIADNAGNSHIQNPDPAVYQLRD

SEQ ID NO: 147330 - protein, 12 aa, Homo sapiens
  CDR3 for beta chain variable domain of TCR clone 73665 (TRBV11-2, TRBJ2-2)
CASSLGGGELFF

SEQ ID NO: 147331 - protein, 15 aa, Homo sapiens
  CDR3 for alpha chain variable domain of TCR clone 73666 (TRAV8-3, TRAJ27)
CAVGPSKTNAGKSTF

SEQ ID NO: 147332 - protein, 13 aa, Homo sapiens
  CDR3 for beta chain variable domain of TCR clone 73666 (TRBV10-3, TRBJ2-7)
CASKLAVNYEQYF

SEQ ID NO: 147333 - protein, 14 aa, Homo sapiens
  CDR3 for alpha chain variable domain of TCR clone 73667 (TRAV1-2, TRAJ8)
CAVREDTGFQKLVF

SEQ ID NO: 147334 - protein, 13 aa, Homo sapiens
  CDR3 for beta chain variable domain of TCR clone 73667 (TRBV19, TRBJ1-2)
CTSSVPGQDGYTF

SEQ ID NO: 147335 - protein, 16 aa, Homo sapiens
  CDR3 for alpha chain variable domain of TCR clone 73668 (TRAV16, TRAJ52)
CALSAAGGTSYGKLTF

SEQ ID NO: 147336 - protein, 13 aa, Homo sapiens
  CDR3 for beta chain variable domain of TCR clone 73668 (TRBV7-2, TRBJ2-7)
CASSSPSGSEQYF

SEQ ID NO: 147337 - protein, 11 aa, Homo sapiens
  CDR3 for alpha chain variable domain of TCR clone 73669 (TRAV1-1, TRAJ23)
CAVRQGGKLIF

SEQ ID NO: 147338 - protein, 16 aa, Homo sapiens
  CDR3 for beta chain variable domain of TCR clone 73669 (TRBV7-3, TRBJ2-1)
CASSFTGRRSYNEQFF

SEQ ID NO: 147339 - protein, 14 aa, Homo sapiens
  CDR3 for alpha chain variable domain of TCR clone 73670 (TRAV4, TRAJ6)
CLVGEAGGSYIPTF

SEQ ID NO: 147340 - protein, 16 aa, Homo sapiens
  CDR3 for beta chain variable domain of TCR clone 73670 (TRBV7-6, TRBJ2-1)
CARSLNEGPSYNEQFF

SEQ ID NO: 147341 - protein, 18 aa, Homo sapiens
  CDR3 for alpha chain variable domain of TCR clone 73671 (TRAV1-2, TRAJ18)
CAVRDMGDRGSTLGRLYF

SEQ ID NO: 147342 - protein, 16 aa, Homo sapiens
  CDR3 for beta chain variable domain of TCR clone 73671 (TRBV29-1, TRBJ1-2)
CSAEANRNIANYGYTF

SEQ ID NO: 147343 - protein, 15 aa, Homo sapiens
  CDR3 for alpha chain variable domain of TCR clone 73672 (TRAV2, TRAJ13)
CCLLLCFRGYQKVTF

SEQ ID NO: 147344 - protein, 17 aa, Homo sapiens
  CDR3 for beta chain variable domain of TCR clone 73672 (TRBV7-3, TRBJ2-3)
CASSLMKRMRGADTQYF

SEQ ID NO: 147345 - protein, 12 aa, Homo sapiens
  CDR3 for alpha chain variable domain of TCR clone 73673 (TRAV22, TRAJ34)
CAVLYNTDKLIF

SEQ ID NO: 147346 - protein, 12 aa, Homo sapiens
  CDR3 for beta chain variable domain of TCR clone 73673 (TRBV3-1, TRBJ2-1)
CASSQGSSGQFF

SEQ ID NO: 147347 - protein, 11 aa, Homo sapiens
  CDR3 for alpha chain variable domain of TCR clone 73674 (TRAV2, TRAJ13)
CASGGYQKVTF

SEQ ID NO: 147348 - protein, 15 aa, Homo sapiens
  CDR3 for beta chain variable domain of TCR clone 73674 (TRBV7-2, TRBJ2-3)
CASSARGSGTDTQYF

SEQ ID NO: 147349 - protein, 17 aa, Homo sapiens
  CDR3 for alpha chain variable domain of TCR clone 73675 (TRAV3, TRAJ6)
CAVRDGPRAGGSYIPTF

SEQ ID NO: 147350 - protein, 12 aa, Homo sapiens
  CDR3 for beta chain variable domain of TCR clone 73675 (TRBV3-1, TRBJ2-2)
CASSLFPGELFF

SEQ ID NO: 147351 - protein, 17 aa, Homo sapiens
  CDR3 for alpha chain variable domain of TCR clone 73676 (TRAV13-1, TRAJ10)
CAASIWRGTGGGNKLTF

SEQ ID NO: 147352 - protein, 15 aa, Homo sapiens
  CDR3 for beta chain variable domain of TCR clone 73676 (TRBV20-1, TRBJ1-1)
CSARGGGTLKFSLDK

SEQ ID NO: 147353 - protein, 14 aa, Homo sapiens
  CDR3 for alpha chain variable domain of TCR clone 73677 (TRAV12-3, TRAJ10)
SHLPLTGGGNKLTF

SEQ ID NO: 147354 - protein, 14 aa, Homo sapiens
  CDR3 for beta chain variable domain of TCR clone 73677 (TRBV13, TRBJ1-1)
CASTVITVNTEAFF

SEQ ID NO: 147355 - protein, 13 aa, Homo sapiens
  CDR3 for alpha chain variable domain of TCR clone 73678 (TRAV13-2, TRAJ40)
CAEFTSGTYKYIF

SEQ ID NO: 147356 - protein, 14 aa, Homo sapiens
  CDR3 for beta chain variable domain of TCR clone 73678 (TRBV12-5, TRBJ2-5)
CASGSRTHQETQYF

SEQ ID NO: 147357 - protein, 13 aa, Homo sapiens
  CDR3 for alpha chain variable domain of TCR clone 73679 (TRAV20, TRAJ21)
CAVEGYNFNKFYF

SEQ ID NO: 147358 - protein, 14 aa, Homo sapiens
  CDR3 for beta chain variable domain of TCR clone 73679 (TRBV3-1, TRBJ2-5)
CASSQGPDKETQYF

SEQ ID NO: 147359 - protein, 14 aa, Homo sapiens
  CDR3 for alpha chain variable domain of TCR clone 73680 (TRAV21, TRAJ15)
CAVSLNQAGTALIF

SEQ ID NO: 147360 - protein, 11 aa, Homo sapiens
  CDR3 for beta chain variable domain of TCR clone 73680 (TRBV20-1, TRBJ2-7)
CSARTSYKQYF

SEQ ID NO: 147361 - protein, 16 aa, Homo sapiens
  CDR3 for alpha chain variable domain of TCR clone 73681 (TRAV26-1, TRAJ45)
CIVERYSGGGADGLTF

SEQ ID NO: 147362 - protein, 16 aa, Homo sapiens
  CDR3 for beta chain variable domain of TCR clone 73681 (TRBV10-3, TRBJ1-6)
CAISERRGQGNSPLHF

SEQ ID NO: 147363 - protein, 17 aa, Homo sapiens
  CDR3 for alpha chain variable domain of TCR clone 73682 (TRAV3, TRAJ6)
CAVRDGPRAGGSYIPTF

SEQ ID NO: 147364 - protein, 20 aa, Homo sapiens
  CDR3 for beta chain variable domain of TCR clone 73682 (TRBV28, TRBJ2-1)
CASTPIGRSPGLEGGNEQFF

SEQ ID NO: 147365 - protein, 14 aa, Homo sapiens
  CDR3 for alpha chain variable domain of TCR clone 73683 (TRAV12-3, TRAJ10)
SHLPLTGGGNKLTF

SEQ ID NO: 147366 - protein, 15 aa, Homo sapiens
  CDR3 for beta chain variable domain of TCR clone 73683 (TRBV2, TRBJ2-5)
CASTRDGGPQETQYF

SEQ ID NO: 147367 - protein, 14 aa, Homo sapiens
  CDR3 for alpha chain variable domain of TCR clone 73684 (TRAV13-1, TRAJ4)
CAATPPSGYNKLIF

SEQ ID NO: 147368 - protein, 14 aa, Homo sapiens
  CDR3 for beta chain variable domain of TCR clone 73684 (TRBV19, TRBJ2-1)
CASPTFVLSGEQFF

SEQ ID NO: 147369 - protein, 12 aa, Homo sapiens
  CDR3 for alpha chain variable domain of TCR clone 73685 (TRAV12-3, TRAJ17)
CAMTLTGNKLTF

SEQ ID NO: 147370 - protein, 17 aa, Homo sapiens
  CDR3 for beta chain variable domain of TCR clone 73685 (TRBV11-3, TRBJ2-1)
CASSLYPPGVEYNEQFF

SEQ ID NO: 147371 - protein, 12 aa, Homo sapiens
  CDR3 for alpha chain variable domain of TCR clone 73686 (TRAV35, TRAJ39)
LAPNNAGNMLTF

SEQ ID NO: 147372 - protein, 16 aa, Homo sapiens
  CDR3 for beta chain variable domain of TCR clone 73686 (TRBV2, TRBJ2-3)
CASSTSVGGGNRYAVF

SEQ ID NO: 147373 - protein, 11 aa, Homo sapiens
  CDR3 for alpha chain variable domain of TCR clone 73687 (TRAV2, TRAJ33)
CAVESNYQLIW

SEQ ID NO: 147374 - protein, 17 aa, Homo sapiens
  CDR3 for beta chain variable domain of TCR clone 73687 (TRBV19, TRBJ1-1)
CASTSGQIQNTEAFLDK

SEQ ID NO: 147375 - protein, 18 aa, Homo sapiens
  CDR3 for alpha chain variable domain of TCR clone 73688 (TRAV12-3, TRAJ52)
CAMSVGGAGGTSYGKLTF

SEQ ID NO: 147376 - protein, 15 aa, Homo sapiens
  CDR3 for beta chain variable domain of TCR clone 73688 (TRBV6-5, TRBJ2-1)
CASSYDAGAGNEQFF

SEQ ID NO: 147377 - protein, 22 aa, Homo sapiens
  CDR3 for alpha chain variable domain of TCR clone 73689 (TRAV21, )
CAVRQDAGNNHIQNPDPAVYQL

SEQ ID NO: 147378 - protein, 16 aa, Homo sapiens
  CDR3 for beta chain variable domain of TCR clone 73689 (TRBV4-2, TRBJ1-1)
CASRPPDGGGDTEAFF

SEQ ID NO: 147379 - protein, 12 aa, Homo sapiens
  CDR3 for alpha chain variable domain of TCR clone 73690 (TRAV16, TRAJ26)
CALRSYGQNFVF

SEQ ID NO: 147380 - protein, 13 aa, Homo sapiens
  CDR3 for beta chain variable domain of TCR clone 73690 (TRBV7-9, TRBJ1-2)
CASSLKQNYGYTF

SEQ ID NO: 147381 - protein, 14 aa, Homo sapiens
  CDR3 for alpha chain variable domain of TCR clone 73691 (TRAV21, TRAJ37)
CAVKGSSNTGKLIF

SEQ ID NO: 147382 - protein, 12 aa, Homo sapiens
  CDR3 for beta chain variable domain of TCR clone 73691 (TRBV19, TRBJ1-5)
CASSIAQQPQHF

SEQ ID NO: 147383 - protein, 17 aa, Homo sapiens
  CDR3 for alpha chain variable domain of TCR clone 73692 (TRAV12-2, TRAJ52)
CAVNPYAGGTRYGKLTF

SEQ ID NO: 147384 - protein, 16 aa, Homo sapiens
  CDR3 for beta chain variable domain of TCR clone 73692 (TRBV5-5, TRBJ2-2)
CASSGRREGATGELFF

SEQ ID NO: 147385 - protein, 13 aa, Homo sapiens
  CDR3 for alpha chain variable domain of TCR clone 73693 (TRAV13-1, TRAJ39)
CAASIWEGNMLTF

SEQ ID NO: 147386 - protein, 15 aa, Homo sapiens
  CDR3 for beta chain variable domain of TCR clone 73693 (TRBV7-9, TRBJ1-1)
CASSLLEQGGTEAFF

SEQ ID NO: 147387 - protein, 14 aa, Homo sapiens
  CDR3 for alpha chain variable domain of TCR clone 73694 (TRAV17, TRAJ57)
CATDPQGGSEKLVF

SEQ ID NO: 147388 - protein, 15 aa, Homo sapiens
  CDR3 for beta chain variable domain of TCR clone 73694 (TRBV7-2, TRBJ2-1)
CASSSGLAGGNEQFF

SEQ ID NO: 147389 - protein, 15 aa, Homo sapiens
  CDR3 for alpha chain variable domain of TCR clone 73695 (TRAV8-3, TRAJ40)
CAAPSLGSGTYKYIF

SEQ ID NO: 147390 - protein, 16 aa, Homo sapiens
  CDR3 for beta chain variable domain of TCR clone 73695 (TRBV7-3, TRBJ2-3)
CASSLSGYRPEDTQYS

SEQ ID NO: 147391 - protein, 14 aa, Homo sapiens
  CDR3 for alpha chain variable domain of TCR clone 73696 (TRAV38-2/DV8, TRAJ23)
CAYRSQNQGGKLIF

SEQ ID NO: 147392 - protein, 13 aa, Homo sapiens
  CDR3 for beta chain variable domain of TCR clone 73696 (TRBV24-1, TRBJ2-1)
CATSAGPYSEQFF

SEQ ID NO: 147393 - protein, 14 aa, Homo sapiens
  CDR3 for alpha chain variable domain of TCR clone 73697 (TRAV12-2, TRAJ13)
RAVKKTGGYQKVTF

SEQ ID NO: 147394 - protein, 14 aa, Homo sapiens
  CDR3 for beta chain variable domain of TCR clone 73697 (TRBV7-2, TRBJ2-7)
CASSPKTSFYEQYF

SEQ ID NO: 147395 - protein, 14 aa, Homo sapiens
  CDR3 for alpha chain variable domain of TCR clone 73698 (TRAV3, TRAJ21)
CAVESQAKFNKFYF

SEQ ID NO: 147396 - protein, 18 aa, Homo sapiens
  CDR3 for beta chain variable domain of TCR clone 73698 (TRBV7-9, TRBJ2-1)
CASSLAVSGTSGRNEQFF

SEQ ID NO: 147397 - protein, 23 aa, Homo sapiens
  CDR3 for alpha chain variable domain of TCR clone 73699 (TRAV26-1, TRAJ38)
CIADNAGNNHIQNPDPAVYQLRD

SEQ ID NO: 147398 - protein, 13 aa, Homo sapiens
  CDR3 for beta chain variable domain of TCR clone 73699 (TRBV20-1, TRBJ1-1)
CSARGGGNTEAIF

SEQ ID NO: 147399 - protein, 15 aa, Homo sapiens
  CDR3 for alpha chain variable domain of TCR clone 73700 (TRAV3, TRAJ5)
CAVRDLDTGRRARTF

SEQ ID NO: 147400 - protein, 14 aa, Homo sapiens
  CDR3 for beta chain variable domain of TCR clone 73700 (TRBV25-1, TRBJ1-4)
CASSGGGQPEKLFF

SEQ ID NO: 147401 - protein, 14 aa, Homo sapiens
  CDR3 for alpha chain variable domain of TCR clone 73701 (TRAV29/DV5, TRAJ32)
CAAAYGGATNKLIF

SEQ ID NO: 147402 - protein, 12 aa, Homo sapiens
  CDR3 for beta chain variable domain of TCR clone 73701 (TRBV11-2, TRBJ2-7)
CASSLPTYEQYF

SEQ ID NO: 147403 - protein, 14 aa, Homo sapiens
  CDR3 for alpha chain variable domain of TCR clone 73702 (TRAV8-3, TRAJ9)
CAVVYNTGGFKTIF

SEQ ID NO: 147404 - protein, 14 aa, Homo sapiens
  CDR3 for beta chain variable domain of TCR clone 73702 (TRBV7-3, TRBJ2-2)
CASSSGGYIGELFF

SEQ ID NO: 147405 - protein, 12 aa, Homo sapiens
  CDR3 for alpha chain variable domain of TCR clone 73703 (TRAV23/DV6, TRAJ30)
CAASKGEDKIIF

SEQ ID NO: 147406 - protein, 17 aa, Homo sapiens
  CDR3 for beta chain variable domain of TCR clone 73703 (TRBV13, TRBJ2-3)
CASSLSRVAGGRNTQYF

SEQ ID NO: 147407 - protein, 11 aa, Homo sapiens
  CDR3 for alpha chain variable domain of TCR clone 73704 (TRAV12-1, TRAJ30)
CVANGQDKIIF

SEQ ID NO: 147408 - protein, 12 aa, Homo sapiens
  CDR3 for beta chain variable domain of TCR clone 73704 (TRBV27, TRBJ2-2)
CASKLLTGELFF

SEQ ID NO: 147409 - protein, 17 aa, Homo sapiens
  CDR3 for alpha chain variable domain of TCR clone 73705 (TRAV13-1, TRAJ52)
CAASSGAGGTSYGKLTV

SEQ ID NO: 147410 - protein, 15 aa, Homo sapiens
  CDR3 for beta chain variable domain of TCR clone 73705 (TRBV2, TRBJ2-1)
CASSELAGSYNEQFF

SEQ ID NO: 147411 - protein, 15 aa, Homo sapiens
  CDR3 for alpha chain variable domain of TCR clone 73706 (TRAV8-4, TRAJ47)
CAVSDPEKYGNKLVF

SEQ ID NO: 147412 - protein, 15 aa, Homo sapiens
  CDR3 for beta chain variable domain of TCR clone 73706 (TRBV11-2, TRBJ2-1)
CASSLGPDSYNEQFF

SEQ ID NO: 147413 - protein, 14 aa, Homo sapiens
  CDR3 for alpha chain variable domain of TCR clone 73707 (TRAV1-2, TRAJ16)
CAVNRFSDGQKLLF

SEQ ID NO: 147414 - protein, 15 aa, Homo sapiens
  CDR3 for beta chain variable domain of TCR clone 73707 (TRBV5-5, TRBJ1-5)
CASSSTPGINQPQHF

SEQ ID NO: 147415 - protein, 12 aa, Homo sapiens
  CDR3 for alpha chain variable domain of TCR clone 73708 (TRAV12-1, TRAJ6)
CVVSERSYIPTF

SEQ ID NO: 147416 - protein, 21 aa, Homo sapiens
  CDR3 for beta chain variable domain of TCR clone 73708 (TRBV7-3, TRBJ2-1)
GGTQPCIPVPAAYGLAGAQFF

SEQ ID NO: 147417 - protein, 16 aa, Homo sapiens
  CDR3 for alpha chain variable domain of TCR clone 73709 (TRAV8-3, TRAJ13)
CAVGAYPSGGYQKVTF

SEQ ID NO: 147418 - protein, 15 aa, Homo sapiens
  CDR3 for beta chain variable domain of TCR clone 73709 (TRBV19, TRBJ1-5)
CASSIVWADNQPQLF

SEQ ID NO: 147419 - protein, 12 aa, Homo sapiens
  CDR3 for alpha chain variable domain of TCR clone 73710 (TRAV12-3, TRAJ17)
CAMTLTGNKLTF

SEQ ID NO: 147420 - protein, 13 aa, Homo sapiens
  CDR3 for beta chain variable domain of TCR clone 73710 (TRBV18, TRBJ1-1)
RASSGGRNTEALF

SEQ ID NO: 147421 - protein, 17 aa, Homo sapiens
  CDR3 for alpha chain variable domain of TCR clone 73711 (TRAV3, TRAJ6)
CAVRDGPRAGGSYIHTF

SEQ ID NO: 147422 - protein, 15 aa, Homo sapiens
  CDR3 for beta chain variable domain of TCR clone 73711 (TRBV7-9, TRBJ1-6)
CASSSPGRGNSPLHF

SEQ ID NO: 147423 - protein, 14 aa, Homo sapiens
  CDR3 for alpha chain variable domain of TCR clone 73712 (TRAV26-1, TRAJ38)
CIADNAGNNRKLIW

SEQ ID NO: 147424 - protein, 20 aa, Homo sapiens
  CDR3 for beta chain variable domain of TCR clone 73712 (TRBV28, TRBJ2-1)
CASTPIGRSPGLAGGNEQFF

SEQ ID NO: 147425 - protein, 14 aa, Homo sapiens
  CDR3 for alpha chain variable domain of TCR clone 73713 (TRAV2, TRAJ9)
CAVEDRSGGFKTIF

SEQ ID NO: 147426 - protein, 17 aa, Homo sapiens
  CDR3 for beta chain variable domain of TCR clone 73713 (TRBV11-2, TRBJ2-1)
CASSLYPPGVEYNEQFY

SEQ ID NO: 147427 - protein, 14 aa, Homo sapiens
  CDR3 for alpha chain variable domain of TCR clone 73714 (TRAV9-2, TRAJ39)
CALYIYNAGNMLTF

SEQ ID NO: 147428 - protein, 15 aa, Homo sapiens
  CDR3 for beta chain variable domain of TCR clone 73714 (TRBV18, TRBJ2-7)
CASSPTFMDSYEQYF

SEQ ID NO: 147429 - protein, 12 aa, Homo sapiens
  CDR3 for alpha chain variable domain of TCR clone 73715 (TRAV30, TRAJ43)
CGTEERGNDMLF

SEQ ID NO: 147430 - protein, 14 aa, Homo sapiens
  CDR3 for beta chain variable domain of TCR clone 73715 (TRBV7-2, TRBJ2-7)
CASSPKTSFYEQYF

SEQ ID NO: 147431 - protein, 12 aa, Homo sapiens
  CDR3 for alpha chain variable domain of TCR clone 73716 (TRAV29/DV5, TRAJ34)
CAARHNTDKLIF

SEQ ID NO: 147432 - protein, 13 aa, Homo sapiens
  CDR3 for beta chain variable domain of TCR clone 73716 (TRBV7-9, TRBJ2-5)
CASTPVGQETQYF

SEQ ID NO: 147433 - protein, 17 aa, Homo sapiens
  CDR3 for alpha chain variable domain of TCR clone 73717 (TRAV8-6, TRAJ58)
CAVSSWVGETSGSRLTF

SEQ ID NO: 147434 - protein, 14 aa, Homo sapiens
  CDR3 for beta chain variable domain of TCR clone 73717 (TRBV7-8, TRBJ2-3)
CASSLEAGTDTQYF

SEQ ID NO: 147435 - protein, 14 aa, Homo sapiens
  CDR3 for alpha chain variable domain of TCR clone 73718 (TRAV4, TRAJ17)
CLVGDMAAGDKLTF

SEQ ID NO: 147436 - protein, 13 aa, Homo sapiens
  CDR3 for beta chain variable domain of TCR clone 73718 (TRBV18, TRBJ2-7)
CASQSGGGYEQYF

SEQ ID NO: 147437 - protein, 15 aa, Homo sapiens
  CDR3 for alpha chain variable domain of TCR clone 73719 (TRAV21, TRAJ37)
CAVRPTLSKTGKLIF

SEQ ID NO: 147438 - protein, 16 aa, Homo sapiens
  CDR3 for beta chain variable domain of TCR clone 73719 (TRBV24-1, TRBJ2-3)
CATSDRRQDLTDTQYF

SEQ ID NO: 147439 - protein, 15 aa, Homo sapiens
  CDR3 for alpha chain variable domain of TCR clone 73720 (TRAV20, TRAJ6)
CAVRLQSGGSYIPTF

SEQ ID NO: 147440 - protein, 14 aa, Homo sapiens
  CDR3 for beta chain variable domain of TCR clone 73720 (TRBV12-4, TRBJ2-7)
CASSASGGWYGQYF

SEQ ID NO: 147441 - protein, 11 aa, Homo sapiens
  CDR3 for alpha chain variable domain of TCR clone 73721 (TRAV17, TRAJ9)
FATTGGFKTIF

SEQ ID NO: 147442 - protein, 14 aa, Homo sapiens
  CDR3 for beta chain variable domain of TCR clone 73721 (TRBV7-9, TRBJ2-2)
CASSGLADTGELFF

SEQ ID NO: 147443 - protein, 13 aa, Homo sapiens
  CDR3 for alpha chain variable domain of TCR clone 73722 (TRAV13-1, TRAJ5)
CAASDTGRRALTF

SEQ ID NO: 147444 - protein, 12 aa, Homo sapiens
  CDR3 for beta chain variable domain of TCR clone 73722 (TRBV28, TRBJ2-3)
CASSLYRETQYF

SEQ ID NO: 147445 - protein, 12 aa, Homo sapiens
  CDR3 for alpha chain variable domain of TCR clone 73723 (TRAV12-2, TRAJ20)
CAVRPSDYKPSF

SEQ ID NO: 147446 - protein, 14 aa, Homo sapiens
  CDR3 for beta chain variable domain of TCR clone 73723 (TRBV6-1, TRBJ2-7)
CASNRARPDYEQYF

SEQ ID NO: 147447 - protein, 11 aa, Homo sapiens
  CDR3 for alpha chain variable domain of TCR clone 73724 (TRAV4, TRAJ29)
CLVEVNTPLVF

SEQ ID NO: 147448 - protein, 16 aa, Homo sapiens
  CDR3 for beta chain variable domain of TCR clone 73724 (TRBV19, TRBJ2-2)
CASRSPGTGATGELFF

SEQ ID NO: 147449 - protein, 15 aa, Homo sapiens
  CDR3 for alpha chain variable domain of TCR clone 73725 (TRAV3, TRAJ6)
CAVRDLDTGRRALTF

SEQ ID NO: 147450 - protein, 15 aa, Homo sapiens
  CDR3 for beta chain variable domain of TCR clone 73725 (TRBV4-1, TRBJ2-3)
CASSNLAGGRDTQYF

SEQ ID NO: 147451 - protein, 15 aa, Homo sapiens
  CDR3 for alpha chain variable domain of TCR clone 73726 (TRAV40, TRAJ45)
CLLGDLGGGADGLTF

SEQ ID NO: 147452 - protein, 13 aa, Homo sapiens
  CDR3 for beta chain variable domain of TCR clone 73726 (TRBV7-9, TRBJ1-2)
CAGSLKQNYGYTF

SEQ ID NO: 147453 - protein, 14 aa, Homo sapiens
  CDR3 for alpha chain variable domain of TCR clone 73727 (TRAV23/DV6, TRAJ4)
CAANLSGGYNKLIF

SEQ ID NO: 147454 - protein, 11 aa, Homo sapiens
  CDR3 for beta chain variable domain of TCR clone 73727 (TRBV7-9, TRBJ2-3)
CASSPTDTQYV

SEQ ID NO: 147455 - protein, 17 aa, Homo sapiens
  CDR3 for alpha chain variable domain of TCR clone 73728 (TRAV3, TRAJ38)
CAVRDCLNAGNNRKLIW

SEQ ID NO: 147456 - protein, 18 aa, Homo sapiens
  CDR3 for beta chain variable domain of TCR clone 73728 (TRBV11-2, TRBJ2-3)
CASSLGGASRGAPNTQYF

SEQ ID NO: 147457 - protein, 12 aa, Homo sapiens
  CDR3 for alpha chain variable domain of TCR clone 73729 (TRAV34, TRAJ27)
CGADTNAGKSTF

SEQ ID NO: 147458 - protein, 11 aa, Homo sapiens
  CDR3 for beta chain variable domain of TCR clone 73729 (TRBV11-2, TRBJ2-2)
CASSLPGELFF

SEQ ID NO: 147459 - protein, 13 aa, Homo sapiens
  CDR3 for alpha chain variable domain of TCR clone 73730 (TRAV38-1, TRAJ42)
CARWGGSQGNLIF

SEQ ID NO: 147460 - protein, 17 aa, Homo sapiens
  CDR3 for beta chain variable domain of TCR clone 73730 (TRBV20-1, TRBJ2-1)
CSARDPLAGGWDNEQFF

SEQ ID NO: 147461 - protein, 10 aa, Homo sapiens
  CDR3 for alpha chain variable domain of TCR clone 73731 (TRAV13-1, TRAJ7)
LIGGNNRLAF

SEQ ID NO: 147462 - protein, 16 aa, Homo sapiens
  CDR3 for beta chain variable domain of TCR clone 73731 (TRBV4-1, TRBJ1-2)
CASSQDAGQVLYGYTL

SEQ ID NO: 147463 - protein, 16 aa, Homo sapiens
  CDR3 for alpha chain variable domain of TCR clone 73732 (TRAV27, TRAJ53)
CAAPEGSGGSNYKLTF

SEQ ID NO: 147464 - protein, 14 aa, Homo sapiens
  CDR3 for beta chain variable domain of TCR clone 73732 (TRBV4-3, TRBJ1-5)
CASNQGGQGWPQHF

SEQ ID NO: 147465 - protein, 14 aa, Homo sapiens
  CDR3 for alpha chain variable domain of TCR clone 73733 (TRAV12-2, TRAJ11)
CAVEGGSGYSTLTF

SEQ ID NO: 147466 - protein, 11 aa, Homo sapiens
  CDR3 for beta chain variable domain of TCR clone 73733 (TRBV19, TRBJ1-1)
CASSIGSEAFF

SEQ ID NO: 147467 - protein, 15 aa, Homo sapiens
  CDR3 for alpha chain variable domain of TCR clone 73734 (TRAV12-3, TRAJ6)
CAMSATTGGSYIPTI

SEQ ID NO: 147468 - protein, 16 aa, Homo sapiens
  CDR3 for beta chain variable domain of TCR clone 73734 (TRBV20-1, TRBJ1-2)
CSASMGQGVANYGYTF

SEQ ID NO: 147469 - protein, 16 aa, Homo sapiens
  CDR3 for alpha chain variable domain of TCR clone 73735 (TRAV26-1, TRAJ53)
CIDRVAMGGSNYKLTF

SEQ ID NO: 147470 - protein, 12 aa, Homo sapiens
  CDR3 for beta chain variable domain of TCR clone 73735 (TRBV7-9, TRBJ1-5)
CASSPQGQPQHF

SEQ ID NO: 147471 - protein, 14 aa, Homo sapiens
  CDR3 for alpha chain variable domain of TCR clone 73736 (TRAV12-2, TRAJ45)
CAVYSGGGADGLTF

SEQ ID NO: 147472 - protein, 13 aa, Homo sapiens
  CDR3 for beta chain variable domain of TCR clone 73736 (TRBV10-3, TRBJ2-7)
CASKLAVNYEQYF

SEQ ID NO: 147473 - protein, 17 aa, Homo sapiens
  CDR3 for alpha chain variable domain of TCR clone 73737 (TRAV3, TRAJ42)
CAVRGRDYGGSQGNLIF

SEQ ID NO: 147474 - protein, 13 aa, Homo sapiens
  CDR3 for beta chain variable domain of TCR clone 73737 (TRBV10-3, TRBJ2-7)
CASKLAVNYEQYF

SEQ ID NO: 147475 - protein, 13 aa, Homo sapiens
  CDR3 for alpha chain variable domain of TCR clone 73738 (TRAV21, TRAJ27)
CAARPGNAGKSTF

SEQ ID NO: 147476 - protein, 13 aa, Homo sapiens
  CDR3 for beta chain variable domain of TCR clone 73738 (TRBV27, TRBJ2-1)
RASRTLGVGEQFF

SEQ ID NO: 147477 - protein, 14 aa, Homo sapiens
  CDR3 for alpha chain variable domain of TCR clone 73739 (TRAV9-2, TRAJ39)
CALYIYNAGNMLTF

SEQ ID NO: 147478 - protein, 16 aa, Homo sapiens
  CDR3 for beta chain variable domain of TCR clone 73739 (TRBV4-2, TRBJ2-6)
CASSQARSSGANVLTF

SEQ ID NO: 147479 - protein, 13 aa, Homo sapiens
  CDR3 for alpha chain variable domain of TCR clone 73740 (TRAV8-3, TRAJ21)
CAVGAYNFNKFYF

SEQ ID NO: 147480 - protein, 15 aa, Homo sapiens
  CDR3 for beta chain variable domain of TCR clone 73740 (TRBV28, TRBJ2-2)
CASSLPFMNTGELFF

SEQ ID NO: 147481 - protein, 12 aa, Homo sapiens
  CDR3 for alpha chain variable domain of TCR clone 73741 (TRAV12-3, TRAJ17)
CAMTLTGNKLTF

SEQ ID NO: 147482 - protein, 14 aa, Homo sapiens
  CDR3 for beta chain variable domain of TCR clone 73741 (TRBV11-2, TRBJ1-5)
CASSLDRGRQPQHF

SEQ ID NO: 147483 - protein, 12 aa, Homo sapiens
  CDR3 for alpha chain variable domain of TCR clone 73742 (TRAV8-3, TRAJ26)
CAGDNYGQNFVF

SEQ ID NO: 147484 - protein, 15 aa, Homo sapiens
  CDR3 for beta chain variable domain of TCR clone 73742 (TRBV9, TRBJ2-1)
CASSLAVSSYNEQFF

SEQ ID NO: 147485 - protein, 10 aa, Homo sapiens
  CDR3 for alpha chain variable domain of TCR clone 73743 (TRAV12-3, TRAJ49)
CSMNDDQFYF

SEQ ID NO: 147486 - protein, 13 aa, Homo sapiens
  CDR3 for beta chain variable domain of TCR clone 73743 (TRBV12-4, TRBJ1-1)
CASSPGTGFEAFF

SEQ ID NO: 147487 - protein, 14 aa, Homo sapiens
  CDR3 for alpha chain variable domain of TCR clone 73744 (TRAV13-1, TRAJ44)
CAAKATGTASKLTF

SEQ ID NO: 147488 - protein, 16 aa, Homo sapiens
  CDR3 for beta chain variable domain of TCR clone 73744 (TRBV7-2, TRBJ1-2)
CASSWGTGGSSYGYTF

SEQ ID NO: 147489 - protein, 16 aa, Homo sapiens
  CDR3 for alpha chain variable domain of TCR clone 73745 (TRAV30, TRAJ24)
CGTEIVDADSCGNSSL

SEQ ID NO: 147490 - protein, 14 aa, Homo sapiens
  CDR3 for beta chain variable domain of TCR clone 73745 (TRBV12-5, TRBJ2-5)
CASGSRTHQETQYF

SEQ ID NO: 147491 - protein, 22 aa, Homo sapiens
  CDR3 for alpha chain variable domain of TCR clone 73746 (TRAV21, )
CAVRQDAGNNHIQNPDPAVYQL

SEQ ID NO: 147492 - protein, 13 aa, Homo sapiens
  CDR3 for beta chain variable domain of TCR clone 73746 (TRBV4-1, TRBJ2-1)
CASSQAGGDEQFF

SEQ ID NO: 147493 - protein, 10 aa, Homo sapiens
  CDR3 for alpha chain variable domain of TCR clone 73747 (TRAV23/DV6, TRAJ57)
FAASSTLSQG

SEQ ID NO: 147494 - protein, 14 aa, Homo sapiens
  CDR3 for beta chain variable domain of TCR clone 73747 (TRBV25-1, TRBJ1-1)
CASTHLGGNTEAFF

SEQ ID NO: 147495 - protein, 15 aa, Homo sapiens
  CDR3 for alpha chain variable domain of TCR clone 73748 (TRAV26-1, TRAJ22)
CIVRVSFWFCKATDR

SEQ ID NO: 147496 - protein, 13 aa, Homo sapiens
  CDR3 for beta chain variable domain of TCR clone 73748 (TRBV7-9, TRBJ1-2)
CASSLKQNYGYTF

SEQ ID NO: 147497 - protein, 14 aa, Homo sapiens
  CDR3 for alpha chain variable domain of TCR clone 73749 (TRAV26-1, TRAJ38)
CIADNAGNNRKRIW

SEQ ID NO: 147498 - protein, 13 aa, Homo sapiens
  CDR3 for beta chain variable domain of TCR clone 73749 (TRBV4-1, TRBJ2-7)
CASSQGQAYEQYF

SEQ ID NO: 147499 - protein, 16 aa, Homo sapiens
  CDR3 for alpha chain variable domain of TCR clone 73750 (TRAV1-2, TRAJ10)
CAVRDQGGGGGNKLTL

SEQ ID NO: 147500 - protein, 13 aa, Homo sapiens
  CDR3 for beta chain variable domain of TCR clone 73750 (TRBV29-1, TRBJ1-1)
CSVGDSRNTEAFF

SEQ ID NO: 147501 - protein, 14 aa, Homo sapiens
  CDR3 for alpha chain variable domain of TCR clone 73751 (TRAV12-3, TRAJ42)
CAMNYGGSQGNLIF

SEQ ID NO: 147502 - protein, 15 aa, Homo sapiens
  CDR3 for beta chain variable domain of TCR clone 73751 (TRBV5-7, TRBJ1-5)
CANSYGKLWDQPQHF

SEQ ID NO: 147503 - protein, 20 aa, Homo sapiens
  CDR3 for alpha chain variable domain of TCR clone 73752 (TRAV1-1, TRAJ4)
CLLLLRCEGFLSGGYNKLIF

SEQ ID NO: 147504 - protein, 16 aa, Homo sapiens
  CDR3 for beta chain variable domain of TCR clone 73752 (TRBV28, TRBJ1-4)
CASSPPYRGRSENLFF

SEQ ID NO: 147505 - protein, 15 aa, Homo sapiens
  CDR3 for alpha chain variable domain of TCR clone 73753 (TRAV8-3, TRAJ32)
CAVGPYGCATNKLIF

SEQ ID NO: 147506 - protein, 14 aa, Homo sapiens
  CDR3 for beta chain variable domain of TCR clone 73753 (TRBV29-1, TRBJ2-2)
CSVLAETNTGELFF

SEQ ID NO: 147507 - protein, 14 aa, Homo sapiens
  CDR3 for alpha chain variable domain of TCR clone 73754 (TRAV39, TRAJ28)
CASGYWGWELPTHF

SEQ ID NO: 147508 - protein, 14 aa, Homo sapiens
  CDR3 for beta chain variable domain of TCR clone 73754 (TRBV9, TRBJ2-1)
CASSVDPRGKEQFF

SEQ ID NO: 147509 - protein, 15 aa, Homo sapiens
  CDR3 for alpha chain variable domain of TCR clone 73755 (TRAV13-1, TRAJ17)
CAASIERAAGNKLTS

SEQ ID NO: 147510 - protein, 13 aa, Homo sapiens
  CDR3 for beta chain variable domain of TCR clone 73755 (TRBV7-7, TRBJ2-3)
CASSLSRADTQYF

SEQ ID NO: 147511 - protein, 14 aa, Homo sapiens
  CDR3 for alpha chain variable domain of TCR clone 73756 (TRAV21, TRAJ45)
CAVVSGGGAEGLTF

SEQ ID NO: 147512 - protein, 14 aa, Homo sapiens
  CDR3 for beta chain variable domain of TCR clone 73756 (TRBV20-1, TRBJ2-3)
CSALGLEGADTQYF

SEQ ID NO: 147513 - protein, 15 aa, Homo sapiens
  CDR3 for alpha chain variable domain of TCR clone 73757 (TRAV8-3, TRAJ15)
CAVGAPNQSGTALIF

SEQ ID NO: 147514 - protein, 14 aa, Homo sapiens
  CDR3 for beta chain variable domain of TCR clone 73757 (TRBV20-1, TRBJ2-1)
CSPNDEASYNEQFF

SEQ ID NO: 147515 - protein, 11 aa, Homo sapiens
  CDR3 for alpha chain variable domain of TCR clone 73758 (TRAV8-4, TRAJ26)
CAGGEGQNFVF

SEQ ID NO: 147516 - protein, 15 aa, Homo sapiens
  CDR3 for beta chain variable domain of TCR clone 73758 (TRBV7-2, TRBJ2-1)
CASRKTGSSYNEQFF

SEQ ID NO: 147517 - protein, 14 aa, Homo sapiens
  CDR3 for alpha chain variable domain of TCR clone 73759 (TRAV1-2, TRAJ16)
CAVNRFSDGQKLLL

SEQ ID NO: 147518 - protein, 10 aa, Homo sapiens
  CDR3 for beta chain variable domain of TCR clone 73759 (TRBV20-1, TRBJ1-4)
PQGANEKLFF

SEQ ID NO: 147519 - protein, 14 aa, Homo sapiens
  CDR3 for alpha chain variable domain of TCR clone 73760 (TRAV3, TRAJ34)
YAVRDINNTDKLIF

SEQ ID NO: 147520 - protein, 14 aa, Homo sapiens
  CDR3 for beta chain variable domain of TCR clone 73760 (TRBV7-2, TRBJ2-2)
CASSLGQNTGELFF

SEQ ID NO: 147521 - protein, 14 aa, Homo sapiens
  CDR3 for alpha chain variable domain of TCR clone 73761 (TRAV8-3, TRAJ39)
CAVGAWGAGNMLNF

SEQ ID NO: 147522 - protein, 16 aa, Homo sapiens
  CDR3 for beta chain variable domain of TCR clone 73761 (TRBV7-2, TRBJ1-3)
CASSSGRVLSGNTIYF

SEQ ID NO: 147523 - protein, 16 aa, Homo sapiens
  CDR3 for alpha chain variable domain of TCR clone 73762 (TRAV38-2/DV8, TRAJ57)
CAYRSVGQGGSEKLVF

SEQ ID NO: 147524 - protein, 16 aa, Homo sapiens
  CDR3 for beta chain variable domain of TCR clone 73762 (TRBV28, TRBJ2-1)
CASSSRVRDSYNEQFF

SEQ ID NO: 147525 - protein, 14 aa, Homo sapiens
  CDR3 for alpha chain variable domain of TCR clone 73763 (TRAV16, TRAJ54)
CALSLIQGAQKLVS

SEQ ID NO: 147526 - protein, 15 aa, Homo sapiens
  CDR3 for beta chain variable domain of TCR clone 73763 (TRBV20-1, TRBJ2-7)
YSARDRVSGMDEQYF

SEQ ID NO: 147527 - protein, 12 aa, Homo sapiens
  CDR3 for alpha chain variable domain of TCR clone 73764 (TRAV17, TRAJ57)
CATDGVSEKLVF

SEQ ID NO: 147528 - protein, 13 aa, Homo sapiens
  CDR3 for beta chain variable domain of TCR clone 73764 (TRBV7-9, TRBJ2-7)
CASSFAGAYEQYF

SEQ ID NO: 147529 - protein, 15 aa, Homo sapiens
  CDR3 for alpha chain variable domain of TCR clone 73765 (TRAV26-1, TRAJ29)
CIVRVEGSGNTPLVF

SEQ ID NO: 147530 - protein, 14 aa, Homo sapiens
  CDR3 for beta chain variable domain of TCR clone 73765 (TRBV4-2, TRBJ2-3)
CASRETRAPGMQYF

SEQ ID NO: 147531 - protein, 12 aa, Homo sapiens
  CDR3 for alpha chain variable domain of TCR clone 73766 (TRAV26-1, TRAJ17)
CISQSCRQQANF

SEQ ID NO: 147532 - protein, 16 aa, Homo sapiens
  CDR3 for beta chain variable domain of TCR clone 73766 (TRBV20-1, TRBJ1-4)
CSAPGQGLLTNEKLFF

SEQ ID NO: 147533 - protein, 14 aa, Homo sapiens
  CDR3 for alpha chain variable domain of TCR clone 73767 (TRAV12-2, TRAJ13)
CAVKKTGGYQKITS

SEQ ID NO: 147534 - protein, 15 aa, Homo sapiens
  CDR3 for beta chain variable domain of TCR clone 73767 (TRBV27, TRBJ2-1)
CASSNGGGSSNEQFF

SEQ ID NO: 147535 - protein, 15 aa, Homo sapiens
  CDR3 for alpha chain variable domain of TCR clone 73768 (TRAV26-1, TRAJ15)
CIVRAANQAGNALIF

SEQ ID NO: 147536 - protein, 15 aa, Homo sapiens
  CDR3 for beta chain variable domain of TCR clone 73768 (TRBV20-1, TRBJ1-1)
CSARSAATSNTEAFF

SEQ ID NO: 147537 - protein, 14 aa, Homo sapiens
  CDR3 for alpha chain variable domain of TCR clone 73769 (TRAV1-2, TRAJ8)
CAVREDTGFQELVF

SEQ ID NO: 147538 - protein, 11 aa, Homo sapiens
  CDR3 for beta chain variable domain of TCR clone 73769 (TRBV20-1, TRBJ2-5)
CSADRAETQYF

SEQ ID NO: 147539 - protein, 11 aa, Homo sapiens
  CDR3 for alpha chain variable domain of TCR clone 73770 (TRAV1-1, TRAJ23)
CAVRQGGKLVF

SEQ ID NO: 147540 - protein, 14 aa, Homo sapiens
  CDR3 for beta chain variable domain of TCR clone 73770 (TRBV19, TRBJ2-1)
CASPTFVLSGEQFF

SEQ ID NO: 147541 - protein, 10 aa, Homo sapiens
  CDR3 for alpha chain variable domain of TCR clone 73771 (TRAV1-2, TRAJ20)
FALNDYKLSF

SEQ ID NO: 147542 - protein, 16 aa, Homo sapiens
  CDR3 for beta chain variable domain of TCR clone 73771 (TRBV20-1, TRBJ1-1)
CSARALTQGMNTEAFF

SEQ ID NO: 147543 - protein, 16 aa, Homo sapiens
  CDR3 for alpha chain variable domain of TCR clone 73772 (TRAV4, TRAJ28)
CNTAFLSGAGSYQLTF

SEQ ID NO: 147544 - protein, 14 aa, Homo sapiens
  CDR3 for beta chain variable domain of TCR clone 73772 (TRBV7-9, TRBJ2-5)
CASSLDTAQETQYF

SEQ ID NO: 147545 - protein, 16 aa, Homo sapiens
  CDR3 for alpha chain variable domain of TCR clone 73773 (TRAV30, TRAJ24)
CGTEIVDADSWGKFQF

SEQ ID NO: 147546 - protein, 15 aa, Homo sapiens
  CDR3 for beta chain variable domain of TCR clone 73773 (TRBV7-9, TRBJ1-4)
CASSAWTGGNEKLFF

SEQ ID NO: 147547 - protein, 16 aa, Homo sapiens
  CDR3 for alpha chain variable domain of TCR clone 73774 (TRAV30, TRAJ24)
CGTEIVDADSWGKFQF

SEQ ID NO: 147548 - protein, 14 aa, Homo sapiens
  CDR3 for beta chain variable domain of TCR clone 73774 (TRBV4-2, TRBJ2-3)
CASRETRAPGMQYF

SEQ ID NO: 147549 - protein, 14 aa, Homo sapiens
  CDR3 for alpha chain variable domain of TCR clone 73775 (TRAV12-3, TRAJ10)
SHLPLAGGGNKLTF

SEQ ID NO: 147550 - protein, 14 aa, Homo sapiens
  CDR3 for beta chain variable domain of TCR clone 73775 (TRBV18, TRBJ2-3)
CASSPRTSTDTQYF

SEQ ID NO: 147551 - protein, 15 aa, Homo sapiens
  CDR3 for alpha chain variable domain of TCR clone 73776 (TRAV26-1, TRAJ29)
CIVRVEGSGNTPLVF

SEQ ID NO: 147552 - protein, 13 aa, Homo sapiens
  CDR3 for beta chain variable domain of TCR clone 73776 (TRBV6-5, TRBJ2-5)
CASSPQGGETQYF

SEQ ID NO: 147553 - protein, 16 aa, Homo sapiens
  CDR3 for alpha chain variable domain of TCR clone 73777 (TRAV12-3, TRAJ53)
CAMSPGSGGSNYKLTF

SEQ ID NO: 147554 - protein, 13 aa, Homo sapiens
  CDR3 for beta chain variable domain of TCR clone 73777 (TRBV2, TRBJ2-7)
CASSQGQNYEQYF

SEQ ID NO: 147555 - protein, 13 aa, Homo sapiens
  CDR3 for alpha chain variable domain of TCR clone 73778 (TRAV1-2, TRAJ8)
CAVGSTGFQKLVF

SEQ ID NO: 147556 - protein, 11 aa, Homo sapiens
  CDR3 for beta chain variable domain of TCR clone 73778 (TRBV29-1, TRBJ2-5)
CSEDRTGTQYF

SEQ ID NO: 147557 - protein, 15 aa, Homo sapiens
  CDR3 for alpha chain variable domain of TCR clone 73779 (TRAV8-3, TRAJ45)
CASAYSGGGADGLTF

SEQ ID NO: 147558 - protein, 13 aa, Homo sapiens
  CDR3 for beta chain variable domain of TCR clone 73779 (TRBV10-3, TRBJ2-7)
CASKLAVNYEQYF

SEQ ID NO: 147559 - protein, 16 aa, Homo sapiens
  CDR3 for alpha chain variable domain of TCR clone 73780 (TRAV30, TRAJ24)
CGTEIVDADSWGKFQF

SEQ ID NO: 147560 - protein, 13 aa, Homo sapiens
  CDR3 for beta chain variable domain of TCR clone 73780 (TRBV20-1, TRBJ1-6)
CSAPLGVGSPLHF

SEQ ID NO: 147561 - protein, 17 aa, Homo sapiens
  CDR3 for alpha chain variable domain of TCR clone 73781 (TRAV26-1, TRAJ53)
CIVRVDDSGGSNYKLTF

SEQ ID NO: 147562 - protein, 15 aa, Homo sapiens
  CDR3 for beta chain variable domain of TCR clone 73781 (TRBV20-1, TRBJ2-7)
CSARVPASYFYEQYF

SEQ ID NO: 147563 - protein, 16 aa, Homo sapiens
  CDR3 for alpha chain variable domain of TCR clone 73782 (TRAV21, TRAJ37)
CDVRTAGSSNTGKLIF

SEQ ID NO: 147564 - protein, 13 aa, Homo sapiens
  CDR3 for beta chain variable domain of TCR clone 73782 (TRBV7-9, TRBJ2-5)
CASLPSGRETQYF

SEQ ID NO: 147565 - protein, 12 aa, Homo sapiens
  CDR3 for alpha chain variable domain of TCR clone 73783 (TRAV17, TRAJ20)
CATALNDYKLSF

SEQ ID NO: 147566 - protein, 12 aa, Homo sapiens
  CDR3 for beta chain variable domain of TCR clone 73783 (TRBV10-3, TRBJ2-7)
CAHGAYSGEQYF

SEQ ID NO: 147567 - protein, 14 aa, Homo sapiens
  CDR3 for alpha chain variable domain of TCR clone 73784 (TRAV8-6, TRAJ5)
CAVSVDTGRRALTF

SEQ ID NO: 147568 - protein, 15 aa, Homo sapiens
  CDR3 for beta chain variable domain of TCR clone 73784 (TRBV12-4, TRBJ1-2)
CASSLAHRDGQAYTF

SEQ ID NO: 147569 - protein, 15 aa, Homo sapiens
  CDR3 for alpha chain variable domain of TCR clone 73785 (TRAV26-1, TRAJ29)
CIVRVEGSGNTPLVF

SEQ ID NO: 147570 - protein, 11 aa, Homo sapiens
  CDR3 for beta chain variable domain of TCR clone 73785 (TRBV29-1, TRBJ2-5)
CSEDRTGTQYF

SEQ ID NO: 147571 - protein, 13 aa, Homo sapiens
  CDR3 for alpha chain variable domain of TCR clone 73786 (TRAV21, TRAJ20)
CAVGLRVDYKLSF

SEQ ID NO: 147572 - protein, 12 aa, Homo sapiens
  CDR3 for beta chain variable domain of TCR clone 73786 (TRBV7-9, TRBJ2-7)
CASSLEGYEQYF

SEQ ID NO: 147573 - protein, 16 aa, Homo sapiens
  CDR3 for alpha chain variable domain of TCR clone 73787 (TRAV3, TRAJ37)
CAVRPHGSCNTGKLIF

SEQ ID NO: 147574 - protein, 16 aa, Homo sapiens
  CDR3 for beta chain variable domain of TCR clone 73787 (TRBV9, TRBJ1-2)
CASSVEEKVSPYGYTF

SEQ ID NO: 147575 - protein, 14 aa, Homo sapiens
  CDR3 for alpha chain variable domain of TCR clone 73788 (TRAV35, TRAJ33)
CAGSSQDSNYQLIW

SEQ ID NO: 147576 - protein, 13 aa, Homo sapiens
  CDR3 for beta chain variable domain of TCR clone 73788 (TRBV7-3, TRBJ1-1)
CASSQDWGAEAFF

SEQ ID NO: 147577 - protein, 12 aa, Homo sapiens
  CDR3 for alpha chain variable domain of TCR clone 73789 (TRAV12-3, TRAJ17)
CAMTLTGNKLTF

SEQ ID NO: 147578 - protein, 13 aa, Homo sapiens
  CDR3 for beta chain variable domain of TCR clone 73789 (TRBV7-9, TRBJ1-2)
CASSLKQNYGHTF

SEQ ID NO: 147579 - protein, 16 aa, Homo sapiens
  CDR3 for alpha chain variable domain of TCR clone 73790 (TRAV12-1, TRAJ12)
CVVNTLLMDSSYKLIF

SEQ ID NO: 147580 - protein, 18 aa, Homo sapiens
  CDR3 for beta chain variable domain of TCR clone 73790 (TRBV13, TRBJ2-6)
CASSPMTSGGSGANVLTF

SEQ ID NO: 147581 - protein, 14 aa, Homo sapiens
  CDR3 for alpha chain variable domain of TCR clone 73791 (TRAV2, TRAJ37)
CAVVFTSNTGKLIF

SEQ ID NO: 147582 - protein, 13 aa, Homo sapiens
  CDR3 for beta chain variable domain of TCR clone 73791 (TRBV20-1, TRBJ1-1)
CSAPLGGGTEAFF

SEQ ID NO: 147583 - protein, 12 aa, Homo sapiens
  CDR3 for alpha chain variable domain of TCR clone 73792 (TRAV8-2, TRAJ6)
CVGSKGSYIPTF

SEQ ID NO: 147584 - protein, 18 aa, Homo sapiens
  CDR3 for beta chain variable domain of TCR clone 73792 (TRBV4-1, TRBJ2-3)
CASSQGGASGGATDTQYF

SEQ ID NO: 147585 - protein, 17 aa, Homo sapiens
  CDR3 for alpha chain variable domain of TCR clone 73793 (TRAV16, TRAJ58)
CTTVLSNGETSGSRLTF

SEQ ID NO: 147586 - protein, 17 aa, Homo sapiens
  CDR3 for beta chain variable domain of TCR clone 73793 (TRBV18, TRBJ2-1)
CASSKGLSGGADNEQFF

SEQ ID NO: 147587 - protein, 15 aa, Homo sapiens
  CDR3 for alpha chain variable domain of TCR clone 73794 (TRAV35, TRAJ50)
CAGQLRKTSYDKVIF

SEQ ID NO: 147588 - protein, 12 aa, Homo sapiens
  CDR3 for beta chain variable domain of TCR clone 73794 (TRBV5-1, TRBJ2-5)
CASSLGLENQYF

SEQ ID NO: 147589 - protein, 14 aa, Homo sapiens
  CDR3 for alpha chain variable domain of TCR clone 73795 (TRAV3, TRAJ9)
CAVRGNTGGFKTIF

SEQ ID NO: 147590 - protein, 14 aa, Homo sapiens
  CDR3 for beta chain variable domain of TCR clone 73795 (TRBV19, TRBJ2-1)
CASPTFVLSGEQFF

SEQ ID NO: 147591 - protein, 15 aa, Homo sapiens
  CDR3 for alpha chain variable domain of TCR clone 73796 (TRAV13-1, TRAJ32)
CAASDGWWCYKQAHL

SEQ ID NO: 147592 - protein, 17 aa, Homo sapiens
  CDR3 for beta chain variable domain of TCR clone 73796 (TRBV15, TRBJ1-2)
CATSGREIDVVNYGYTF

SEQ ID NO: 147593 - protein, 14 aa, Homo sapiens
  CDR3 for alpha chain variable domain of TCR clone 73797 (TRAV20, TRAJ42)
CAVQAGGSPGKLIF

SEQ ID NO: 147594 - protein, 14 aa, Homo sapiens
  CDR3 for beta chain variable domain of TCR clone 73797 (TRBV28, TRBJ1-2)
CASRIQGANYGYTF

SEQ ID NO: 147595 - protein, 14 aa, Homo sapiens
  CDR3 for alpha chain variable domain of TCR clone 73798 (TRAV35, TRAJ33)
CAGSSQESNYQLIW

SEQ ID NO: 147596 - protein, 15 aa, Homo sapiens
  CDR3 for beta chain variable domain of TCR clone 73798 (TRBV20-1, TRBJ2-7)
CSAESGTSGAYEQYF

SEQ ID NO: 147597 - protein, 14 aa, Homo sapiens
  CDR3 for alpha chain variable domain of TCR clone 73799 (TRAV38-1, TRAJ45)
CASHSGGGAEGLTF

SEQ ID NO: 147598 - protein, 14 aa, Homo sapiens
  CDR3 for beta chain variable domain of TCR clone 73799 (TRBV20-1, TRBJ1-1)
CSAQTRIGGTEAFF

SEQ ID NO: 147599 - protein, 15 aa, Homo sapiens
  CDR3 for alpha chain variable domain of TCR clone 73800 (TRAV3, TRAJ20)
CAVRDIKLSDYKLNF

SEQ ID NO: 147600 - protein, 18 aa, Homo sapiens
  CDR3 for beta chain variable domain of TCR clone 73800 (TRBV20-1, TRBJ2-5)
CSQTGDSGRLGGKETQYF

SEQ ID NO: 147601 - protein, 15 aa, Homo sapiens
  CDR3 for alpha chain variable domain of TCR clone 73801 (TRAV21, TRAJ34)
CAVRGPAYNTDKLIF

SEQ ID NO: 147602 - protein, 16 aa, Homo sapiens
  CDR3 for beta chain variable domain of TCR clone 73801 (TRBV19, TRBJ2-2)
CAGRSPGTGATGELFF

SEQ ID NO: 147603 - protein, 20 aa, Homo sapiens
  CDR3 for alpha chain variable domain of TCR clone 73802 (TRAV21, TRAJ22)
SLVTQPPTLKSSGSARQLTF

SEQ ID NO: 147604 - protein, 16 aa, Homo sapiens
  CDR3 for beta chain variable domain of TCR clone 73802 (TRBV7-3, TRBJ2-2)
CASSVKRGTLSGELFF

SEQ ID NO: 147605 - protein, 14 aa, Homo sapiens
  CDR3 for alpha chain variable domain of TCR clone 73803 (TRAV12-1, TRAJ36)
CVVNYWGKQPLLWD

SEQ ID NO: 147606 - protein, 12 aa, Homo sapiens
  CDR3 for beta chain variable domain of TCR clone 73803 (TRBV11-2, TRBJ2-2)
CASSLGGGELFF

SEQ ID NO: 147607 - protein, 12 aa, Homo sapiens
  CDR3 for alpha chain variable domain of TCR clone 73804 (TRAV3, TRAJ43)
CAVRDHNNDMRF

SEQ ID NO: 147608 - protein, 15 aa, Homo sapiens
  CDR3 for beta chain variable domain of TCR clone 73804 (TRBV27, TRBJ1-5)
CASSLGTGFDQPQHF

SEQ ID NO: 147609 - protein, 12 aa, Homo sapiens
  CDR3 for alpha chain variable domain of TCR clone 73805 (TRAV12-1, TRAJ34)
CVVAGSTDKLIF

SEQ ID NO: 147610 - protein, 12 aa, Homo sapiens
  CDR3 for beta chain variable domain of TCR clone 73805 (TRBV7-9, TRBJ1-1)
CASSLVRGEAFF

SEQ ID NO: 147611 - protein, 13 aa, Homo sapiens
  CDR3 for alpha chain variable domain of TCR clone 73806 (TRAV12-1, TRAJ11)
CVVNRAGCSTLTF

SEQ ID NO: 147612 - protein, 16 aa, Homo sapiens
  CDR3 for beta chain variable domain of TCR clone 73806 (TRBV27, TRBJ2-2)
CASSLRPGGAPGELFF

SEQ ID NO: 147613 - protein, 16 aa, Homo sapiens
  CDR3 for alpha chain variable domain of TCR clone 73807 (TRAV20, TRAJ22)
CAVQASSSGSARQLTF

SEQ ID NO: 147614 - protein, 13 aa, Homo sapiens
  CDR3 for beta chain variable domain of TCR clone 73807 (TRBV7-2, TRBJ2-5)
CASSQSSVETQYF

SEQ ID NO: 147615 - protein, 14 aa, Homo sapiens
  CDR3 for alpha chain variable domain of TCR clone 73808 (TRAV26-1, TRAJ34)
CIIRVAYNTDKLIF

SEQ ID NO: 147616 - protein, 15 aa, Homo sapiens
  CDR3 for beta chain variable domain of TCR clone 73808 (TRBV20-1, TRBJ2-7)
CSARVPAAYFYEQYF

SEQ ID NO: 147617 - protein, 11 aa, Homo sapiens
  CDR3 for alpha chain variable domain of TCR clone 73809 (TRAV1-2, TRAJ31)
CAVNNNARLMF

SEQ ID NO: 147618 - protein, 12 aa, Homo sapiens
  CDR3 for beta chain variable domain of TCR clone 73809 (TRBV12-4, TRBJ1-5)
CASSLGRQPQHF

SEQ ID NO: 147619 - protein, 18 aa, Homo sapiens
  CDR3 for alpha chain variable domain of TCR clone 73810 (TRAV9-2, TRAJ52)
FALSRHNAGGTSYGKLTF

SEQ ID NO: 147620 - protein, 13 aa, Homo sapiens
  CDR3 for beta chain variable domain of TCR clone 73810 (TRBV7-9, TRBJ1-2)
CASSLKQNYGYTF

SEQ ID NO: 147621 - protein, 14 aa, Homo sapiens
  CDR3 for alpha chain variable domain of TCR clone 73811 (TRAV3, TRAJ33)
CAVRDMDSNYQLIW

SEQ ID NO: 147622 - protein, 19 aa, Homo sapiens
  CDR3 for beta chain variable domain of TCR clone 73811 (TRBV7-3, TRBJ1-2)
CASSFPQGNDGELWLDLRF

SEQ ID NO: 147623 - protein, 12 aa, Homo sapiens
  CDR3 for alpha chain variable domain of TCR clone 73812 (TRAV13-1, TRAJ49)
CAASPMGNQFYF

SEQ ID NO: 147624 - protein, 15 aa, Homo sapiens
  CDR3 for beta chain variable domain of TCR clone 73812 (TRBV20-1, TRBJ2-1)
CSASSAGSSYNEQFF

SEQ ID NO: 147625 - protein, 15 aa, Homo sapiens
  CDR3 for alpha chain variable domain of TCR clone 73813 (TRAV12-2, TRAJ53)
CAVNGGGGSNYKLTF

SEQ ID NO: 147626 - protein, 16 aa, Homo sapiens
  CDR3 for beta chain variable domain of TCR clone 73813 (TRBV19, TRBJ2-1)
CASSIDGSFAYNEQFF

SEQ ID NO: 147627 - protein, 14 aa, Homo sapiens
  CDR3 for alpha chain variable domain of TCR clone 73814 (TRAV8-2, TRAJ37)
CVVSISGNTGKLIF

SEQ ID NO: 147628 - protein, 14 aa, Homo sapiens
  CDR3 for beta chain variable domain of TCR clone 73814 (TRBV11-2, TRBJ2-5)
CASSRTGGIETQYF

SEQ ID NO: 147629 - protein, 13 aa, Homo sapiens
  CDR3 for alpha chain variable domain of TCR clone 73815 (TRAV8-3, TRAJ30)
CAVGGGRDDKIIF

SEQ ID NO: 147630 - protein, 14 aa, Homo sapiens
  CDR3 for beta chain variable domain of TCR clone 73815 (TRBV20-1, TRBJ1-1)
CSAPPADMNTEAFF

SEQ ID NO: 147631 - protein, 16 aa, Homo sapiens
  CDR3 for alpha chain variable domain of TCR clone 73816 (TRAV8-3, TRAJ13)
CAVGACPSGGYQKVTF

SEQ ID NO: 147632 - protein, 15 aa, Homo sapiens
  CDR3 for beta chain variable domain of TCR clone 73816 (TRBV19, TRBJ1-5)
CASSIVWADNQPQHF

SEQ ID NO: 147633 - protein, 13 aa, Homo sapiens
  CDR3 for alpha chain variable domain of TCR clone 73817 (TRAV17, TRAJ5)
CAPMDTGRRALTF

SEQ ID NO: 147634 - protein, 17 aa, Homo sapiens
  CDR3 for beta chain variable domain of TCR clone 73817 (TRBV25-1, TRBJ2-7)
CASSDARVVFSSYEQYF

SEQ ID NO: 147635 - protein, 16 aa, Homo sapiens
  CDR3 for alpha chain variable domain of TCR clone 73818 (TRAV21, TRAJ33)
CAVSPASMDSNYQLIW

SEQ ID NO: 147636 - protein, 17 aa, Homo sapiens
  CDR3 for beta chain variable domain of TCR clone 73818 (TRBV13, TRBJ2-3)
CASSLSRVAGGRNTQYF

SEQ ID NO: 147637 - protein, 13 aa, Homo sapiens
  CDR3 for alpha chain variable domain of TCR clone 73819 (TRAV13-1, TRAJ39)
CSKYSNAGNMLTF

SEQ ID NO: 147638 - protein, 11 aa, Homo sapiens
  CDR3 for beta chain variable domain of TCR clone 73819 (TRBV12-4, TRBJ2-3)
CASTATDTQYF

SEQ ID NO: 147639 - protein, 13 aa, Homo sapiens
  CDR3 for alpha chain variable domain of TCR clone 73820 (TRAV8-3, TRAJ48)
CAVVPFGNEKLTF

SEQ ID NO: 147640 - protein, 15 aa, Homo sapiens
  CDR3 for beta chain variable domain of TCR clone 73820 (TRBV11-2, TRBJ2-1)
CASSSPSTRYNEHFF

SEQ ID NO: 147641 - protein, 15 aa, Homo sapiens
  CDR3 for alpha chain variable domain of TCR clone 73821 (TRAV8-3, TRAJ45)
CASSYSGGGADGLTF

SEQ ID NO: 147642 - protein, 15 aa, Homo sapiens
  CDR3 for beta chain variable domain of TCR clone 73821 (TRBV5-1, TRBJ2-7)
CASSFRLAGVHEQYF

SEQ ID NO: 147643 - protein, 12 aa, Homo sapiens
  CDR3 for alpha chain variable domain of TCR clone 73822 (TRAV13-2, TRAJ23)
CTERHRGGKLIF

SEQ ID NO: 147644 - protein, 16 aa, Homo sapiens
  CDR3 for beta chain variable domain of TCR clone 73822 (TRBV20-1, TRBJ1-4)
CSAPGQGLLTNEKLFF

SEQ ID NO: 147645 - protein, 12 aa, Homo sapiens
  CDR3 for alpha chain variable domain of TCR clone 73823 (TRAV21, TRAJ33)
CANMDSNYQLIW

SEQ ID NO: 147646 - protein, 17 aa, Homo sapiens
  CDR3 for beta chain variable domain of TCR clone 73823 (TRBV20-1, TRBJ2-2)
CSASGSGQGGLTGELFF

SEQ ID NO: 147647 - protein, 14 aa, Homo sapiens
  CDR3 for alpha chain variable domain of TCR clone 73824 (TRAV12-1, TRAJ33)
CVVAPGGSNYQLIW

SEQ ID NO: 147648 - protein, 13 aa, Homo sapiens
  CDR3 for beta chain variable domain of TCR clone 73824 (TRBV13, TRBJ2-5)
CASSLGGEETQYF

SEQ ID NO: 147649 - protein, 16 aa, Homo sapiens
  CDR3 for alpha chain variable domain of TCR clone 73825 (TRAV12-3, TRAJ53)
CAMSPGSGGSNYKLTF

SEQ ID NO: 147650 - protein, 20 aa, Homo sapiens
  CDR3 for beta chain variable domain of TCR clone 73825 (TRBV7-8, TRBJ2-2)
RASSHLFPGPTIHITGELFF

SEQ ID NO: 147651 - protein, 14 aa, Homo sapiens
  CDR3 for alpha chain variable domain of TCR clone 73826 (TRAV13-1, TRAJ24)
CAASRTDSWGKLQF

SEQ ID NO: 147652 - protein, 15 aa, Homo sapiens
  CDR3 for beta chain variable domain of TCR clone 73826 (TRBV7-9, TRBJ1-5)
CASSQGHQPNQAQHF

SEQ ID NO: 147653 - protein, 13 aa, Homo sapiens
  CDR3 for alpha chain variable domain of TCR clone 73827 (TRAV2, TRAJ3)
CAVDGSSASKIIF

SEQ ID NO: 147654 - protein, 16 aa, Homo sapiens
  CDR3 for beta chain variable domain of TCR clone 73827 (TRBV4-1, TRBJ1-3)
CASSQDELLAGNTIYF

SEQ ID NO: 147655 - protein, 14 aa, Homo sapiens
  CDR3 for alpha chain variable domain of TCR clone 73828 (TRAV35, TRAJ42)
CAGRYGGSQGNLIF

SEQ ID NO: 147656 - protein, 15 aa, Homo sapiens
  CDR3 for beta chain variable domain of TCR clone 73828 (TRBV7-9, TRBJ2-1)
CASGLGWGRANEQFF

SEQ ID NO: 147657 - protein, 17 aa, Homo sapiens
  CDR3 for alpha chain variable domain of TCR clone 73829 (TRAV23/DV6, TRAJ58)
CAARLLRGETSGSRLTF

SEQ ID NO: 147658 - protein, 10 aa, Homo sapiens
  CDR3 for beta chain variable domain of TCR clone 73829 (TRBV2, TRBJ2-7)
CASSVYEQYF

SEQ ID NO: 147659 - protein, 15 aa, Homo sapiens
  CDR3 for alpha chain variable domain of TCR clone 73830 (TRAV26-1, TRAJ23)
CIVRVVGYQGGKLIF

SEQ ID NO: 147660 - protein, 18 aa, Homo sapiens
  CDR3 for beta chain variable domain of TCR clone 73830 (TRBV28, TRBJ2-1)
CASSSTSGRANSYNEQFF

SEQ ID NO: 147661 - protein, 14 aa, Homo sapiens
  CDR3 for alpha chain variable domain of TCR clone 73831 (TRAV2, TRAJ9)
CAVEDRSGGFKTIF

SEQ ID NO: 147662 - protein, 13 aa, Homo sapiens
  CDR3 for beta chain variable domain of TCR clone 73831 (TRBV19, TRBJ1-5)
CASSIGGEQPQHF

SEQ ID NO: 147663 - protein, 14 aa, Homo sapiens
  CDR3 for alpha chain variable domain of TCR clone 73832 (TRAV26-1, TRAJ48)
CIVRVGFGNEKLTF

SEQ ID NO: 147664 - protein, 13 aa, Homo sapiens
  CDR3 for beta chain variable domain of TCR clone 73832 (TRBV7-3, TRBJ1-1)
CASSQDWGAEAFF

SEQ ID NO: 147665 - protein, 16 aa, Homo sapiens
  CDR3 for alpha chain variable domain of TCR clone 73833 (TRAV26-1, TRAJ53)
CIVRVAIGGSNYKLTF

SEQ ID NO: 147666 - protein, 12 aa, Homo sapiens
  CDR3 for beta chain variable domain of TCR clone 73833 (TRBV7-9, TRBJ1-5)
CASSPQGQPQHF

SEQ ID NO: 147667 - protein, 16 aa, Homo sapiens
  CDR3 for alpha chain variable domain of TCR clone 73834 (TRAV30, TRAJ24)
CGTEIVDADSWGKFQF

SEQ ID NO: 147668 - protein, 14 aa, Homo sapiens
  CDR3 for beta chain variable domain of TCR clone 73834 (TRBV13, TRBJ2-5)
CASSLERVGETQYF

SEQ ID NO: 147669 - protein, 10 aa, Homo sapiens
  CDR3 for alpha chain variable domain of TCR clone 73835 (TRAV23/DV6, TRAJ45)
TGGGADGLTF

SEQ ID NO: 147670 - protein, 11 aa, Homo sapiens
  CDR3 for beta chain variable domain of TCR clone 73835 (TRBV11-2, TRBJ2-1)
PPGVEYNEQFF

SEQ ID NO: 147671 - protein, 13 aa, Homo sapiens
  CDR3 for alpha chain variable domain of TCR clone 73836 (TRAV13-1, TRAJ20)
CAARVSTDYKLSF

SEQ ID NO: 147672 - protein, 12 aa, Homo sapiens
  CDR3 for beta chain variable domain of TCR clone 73836 (TRBV20-1, TRBJ2-1)
CSARLGTDEQFF

SEQ ID NO: 147673 - protein, 12 aa, Homo sapiens
  CDR3 for alpha chain variable domain of TCR clone 73837 (TRAV21, TRAJ49)
CAVNDGGNQFYF

SEQ ID NO: 147674 - protein, 14 aa, Homo sapiens
  CDR3 for beta chain variable domain of TCR clone 73837 (TRBV12-5, TRBJ2-5)
CASGLRTHQETQYF

SEQ ID NO: 147675 - protein, 14 aa, Homo sapiens
  CDR3 for alpha chain variable domain of TCR clone 73838 (TRAV17, TRAJ16)
CATADFSDGQKLLF

SEQ ID NO: 147676 - protein, 12 aa, Homo sapiens
  CDR3 for beta chain variable domain of TCR clone 73838 (TRBV24-1, TRBJ1-1)
CATLYPDTEDFF

SEQ ID NO: 147677 - protein, 14 aa, Homo sapiens
  CDR3 for alpha chain variable domain of TCR clone 73839 (TRAV2, TRAJ9)
CAVEDRSGGFKTIF

SEQ ID NO: 147678 - protein, 16 aa, Homo sapiens
  CDR3 for beta chain variable domain of TCR clone 73839 (TRBV6-1, TRBJ2-1)
CASILRQGSSYNEQFF

SEQ ID NO: 147679 - protein, 14 aa, Homo sapiens
  CDR3 for alpha chain variable domain of TCR clone 73840 (TRAV8-2, TRAJ4)
CVVSPSGGYNKLIF

SEQ ID NO: 147680 - protein, 13 aa, Homo sapiens
  CDR3 for beta chain variable domain of TCR clone 73840 (TRBV19, TRBJ1-2)
CASSIVGARGYTF

SEQ ID NO: 147681 - protein, 11 aa, Homo sapiens
  CDR3 for alpha chain variable domain of TCR clone 73841 (TRAV13-2, TRAJ20)
CADSNDYKLSF

SEQ ID NO: 147682 - protein, 18 aa, Homo sapiens
  CDR3 for beta chain variable domain of TCR clone 73841 (TRBV20-1, TRBJ2-6)
CSARTLAGGPSGANVLTF

SEQ ID NO: 147683 - protein, 19 aa, Homo sapiens
  CDR3 for alpha chain variable domain of TCR clone 73842 (TRAV26-1, TRAJ52)
CIVRAHRNAGGTSYGKRTF

SEQ ID NO: 147684 - protein, 15 aa, Homo sapiens
  CDR3 for beta chain variable domain of TCR clone 73842 (TRBV29-1, TRBJ2-1)
CSGRDRKSSYNEQFF

SEQ ID NO: 147685 - protein, 14 aa, Homo sapiens
  CDR3 for alpha chain variable domain of TCR clone 73843 (TRAV12-2, TRAJ40)
CAVKIPSGTYKYIF

SEQ ID NO: 147686 - protein, 13 aa, Homo sapiens
  CDR3 for beta chain variable domain of TCR clone 73843 (TRBV5-4, TRBJ2-5)
CASSPVSQETQYF

SEQ ID NO: 147687 - protein, 16 aa, Homo sapiens
  CDR3 for alpha chain variable domain of TCR clone 73844 (TRAV3, TRAJ6)
CAVRDGMGRRKLHTYI

SEQ ID NO: 147688 - protein, 15 aa, Homo sapiens
  CDR3 for beta chain variable domain of TCR clone 73844 (TRBV9, TRBJ2-1)
CASSLAGSSYNEQLF

SEQ ID NO: 147689 - protein, 13 aa, Homo sapiens
  CDR3 for alpha chain variable domain of TCR clone 73845 (TRAV39, TRAJ58)
CAGEETSGSRLTF

SEQ ID NO: 147690 - protein, 13 aa, Homo sapiens
  CDR3 for beta chain variable domain of TCR clone 73845 (TRBV15, TRBJ2-7)
CATSTTGQYEQYF

SEQ ID NO: 147691 - protein, 18 aa, Homo sapiens
  CDR3 for alpha chain variable domain of TCR clone 73846 (TRAV21, TRAJ52)
CAVRPSPAGGTSYGKLTF

SEQ ID NO: 147692 - protein, 13 aa, Homo sapiens
  CDR3 for beta chain variable domain of TCR clone 73846 (TRBV29-1, TRBJ2-2)
SSVYREDTGELFF

SEQ ID NO: 147693 - protein, 14 aa, Homo sapiens
  CDR3 for alpha chain variable domain of TCR clone 73847 (TRAV17, TRAJ22)
CATSPSGSARQLTF

SEQ ID NO: 147694 - protein, 15 aa, Homo sapiens
  CDR3 for beta chain variable domain of TCR clone 73847 (TRBV4-1, TRBJ2-5)
CASSQWDLYQETQYI

SEQ ID NO: 147695 - protein, 11 aa, Homo sapiens
  CDR3 for alpha chain variable domain of TCR clone 73848 (TRAV12-1, TRAJ34)
CVVNKGRELIF

SEQ ID NO: 147696 - protein, 12 aa, Homo sapiens
  CDR3 for beta chain variable domain of TCR clone 73848 (TRBV2, TRBJ2-1)
CADGPPGNEQFF

SEQ ID NO: 147697 - protein, 14 aa, Homo sapiens
  CDR3 for alpha chain variable domain of TCR clone 73849 (TRAV17, TRAJ22)
CATSPSGSARQLTF

SEQ ID NO: 147698 - protein, 16 aa, Homo sapiens
  CDR3 for beta chain variable domain of TCR clone 73849 (TRBV19, TRBJ2-1)
CASSKAGPSSYNEQFF

SEQ ID NO: 147699 - protein, 15 aa, Homo sapiens
  CDR3 for alpha chain variable domain of TCR clone 73850 (TRAV23/DV6, TRAJ13)
CSAWPGGGGYQKVTF

SEQ ID NO: 147700 - protein, 17 aa, Homo sapiens
  CDR3 for beta chain variable domain of TCR clone 73850 (TRBV19, TRBJ2-7)
CASSISFYDSYPYEQYF

SEQ ID NO: 147701 - protein, 15 aa, Homo sapiens
  CDR3 for alpha chain variable domain of TCR clone 73851 (TRAV2, TRAJ15)
CAVEDRGQAGTALIF

SEQ ID NO: 147702 - protein, 14 aa, Homo sapiens
  CDR3 for beta chain variable domain of TCR clone 73851 (TRBV4-1, TRBJ2-2)
CASSQAVNTGELLF

SEQ ID NO: 147703 - protein, 15 aa, Homo sapiens
  CDR3 for alpha chain variable domain of TCR clone 73852 (TRAV35, TRAJ20)
CAGQLVGSNDYKLSF

SEQ ID NO: 147704 - protein, 14 aa, Homo sapiens
  CDR3 for beta chain variable domain of TCR clone 73852 (TRBV6-5, TRBJ2-7)
CASSPHRGLREQYF

SEQ ID NO: 147705 - protein, 13 aa, Homo sapiens
  CDR3 for alpha chain variable domain of TCR clone 73853 (TRAV8-6, TRAJ54)
CAVSEEGAQKLVF

SEQ ID NO: 147706 - protein, 14 aa, Homo sapiens
  CDR3 for beta chain variable domain of TCR clone 73853 (TRBV7-9, TRBJ2-1)
CASSSMVGFGEQFF

SEQ ID NO: 147707 - protein, 13 aa, Homo sapiens
  CDR3 for alpha chain variable domain of TCR clone 73854 (TRAV12-2, TRAJ20)
CAMYPSNGYKLSF

SEQ ID NO: 147708 - protein, 15 aa, Homo sapiens
  CDR3 for beta chain variable domain of TCR clone 73854 (TRBV27, TRBJ2-5)
CASSLYPRGGETQYF

SEQ ID NO: 147709 - protein, 14 aa, Homo sapiens
  CDR3 for alpha chain variable domain of TCR clone 73855 (TRAV12-2, TRAJ20)
CAVNVGGNDYKLSF

SEQ ID NO: 147710 - protein, 14 aa, Homo sapiens
  CDR3 for beta chain variable domain of TCR clone 73855 (TRBV5-4, TRBJ1-4)
CASSLNLGREKLFF

SEQ ID NO: 147711 - protein, 16 aa, Homo sapiens
  CDR3 for alpha chain variable domain of TCR clone 73856 (TRAV38-1, TRAJ56)
CAFMKRQTGANSKLTF

SEQ ID NO: 147712 - protein, 15 aa, Homo sapiens
  CDR3 for beta chain variable domain of TCR clone 73856 (TRBV5-1, TRBJ2-2)
CASSSQGGNTGELFF

SEQ ID NO: 147713 - protein, 14 aa, Homo sapiens
  CDR3 for alpha chain variable domain of TCR clone 73857 (TRAV35, TRAJ50)
CAGHRKTSYDKVIF

SEQ ID NO: 147714 - protein, 13 aa, Homo sapiens
  CDR3 for beta chain variable domain of TCR clone 73857 (TRBV7-7, TRBJ2-3)
CASSVSRADTQDF

SEQ ID NO: 147715 - protein, 14 aa, Homo sapiens
  CDR3 for alpha chain variable domain of TCR clone 73858 (TRAV8-3, TRAJ9)
CAVVYNTGGFKTIF

SEQ ID NO: 147716 - protein, 14 aa, Homo sapiens
  CDR3 for beta chain variable domain of TCR clone 73858 (TRBV7-3, TRBJ2-2)
CASSSGRYTGELFF

SEQ ID NO: 147717 - protein, 14 aa, Homo sapiens
  CDR3 for alpha chain variable domain of TCR clone 73859 (TRAV1-2, TRAJ16)
CAVNRLSDGQKLLF

SEQ ID NO: 147718 - protein, 16 aa, Homo sapiens
  CDR3 for beta chain variable domain of TCR clone 73859 (TRBV7-3, TRBJ2-2)
CASSLKRGTLSGELFF

SEQ ID NO: 147719 - protein, 14 aa, Homo sapiens
  CDR3 for alpha chain variable domain of TCR clone 73860 (TRAV17, TRAJ34)
CATDSLEGTDKLIF

SEQ ID NO: 147720 - protein, 12 aa, Homo sapiens
  CDR3 for beta chain variable domain of TCR clone 73860 (TRBV7-8, TRBJ2-7)
CASSLGDREQYF

SEQ ID NO: 147721 - protein, 12 aa, Homo sapiens
  CDR3 for alpha chain variable domain of TCR clone 73861 (TRAV17, TRAJ53)
CATEGSNYKLAF

SEQ ID NO: 147722 - protein, 19 aa, Homo sapiens
  CDR3 for beta chain variable domain of TCR clone 73861 (TRBV5-1, TRBJ2-3)
CASSLWTSGGITTPDTQYF

SEQ ID NO: 147723 - protein, 16 aa, Homo sapiens
  CDR3 for alpha chain variable domain of TCR clone 73862 (TRAV1-2, TRAJ10)
CAVRGVHTGGGNKLTF

SEQ ID NO: 147724 - protein, 12 aa, Homo sapiens
  CDR3 for beta chain variable domain of TCR clone 73862 (TRBV7-8, TRBJ2-7)
CASSLGDREQYF

SEQ ID NO: 147725 - protein, 11 aa, Homo sapiens
  CDR3 for alpha chain variable domain of TCR clone 73863 (TRAV2, TRAJ13)
CASGGYQKVTF

SEQ ID NO: 147726 - protein, 18 aa, Homo sapiens
  CDR3 for beta chain variable domain of TCR clone 73863 (TRBV20-1, TRBJ1-1)
CSARDLLRQGVVDTEAFF

SEQ ID NO: 147727 - protein, 11 aa, Homo sapiens
  CDR3 for alpha chain variable domain of TCR clone 73864 (TRAV2, TRAJ13)
CASGGYQEVTF

SEQ ID NO: 147728 - protein, 15 aa, Homo sapiens
  CDR3 for beta chain variable domain of TCR clone 73864 (TRBV6-3, TRBJ2-7)
CASSSPGTVFYEQYF

SEQ ID NO: 147729 - protein, 14 aa, Homo sapiens
  CDR3 for alpha chain variable domain of TCR clone 73865 (TRAV26-1, TRAJ45)
CIEVTGGGADGLTF

SEQ ID NO: 147730 - protein, 13 aa, Homo sapiens
  CDR3 for beta chain variable domain of TCR clone 73865 (TRBV7-6, TRBJ1-2)
CASSLVSDYGYTF

SEQ ID NO: 147731 - protein, 15 aa, Homo sapiens
  CDR3 for alpha chain variable domain of TCR clone 73866 (TRAV3, TRAJ3)
CAVRDRDSSASKIIF

SEQ ID NO: 147732 - protein, 18 aa, Homo sapiens
  CDR3 for beta chain variable domain of TCR clone 73866 (TRBV11-2, TRBJ2-3)
CASSLGGASRGAPNTQYF

SEQ ID NO: 147733 - protein, 14 aa, Homo sapiens
  CDR3 for alpha chain variable domain of TCR clone 73867 (TRAV12-2, TRAJ48)
CAVNAFVGNEKLTF

SEQ ID NO: 147734 - protein, 13 aa, Homo sapiens
  CDR3 for beta chain variable domain of TCR clone 73867 (TRBV28, TRBJ2-7)
CAGAQQGLDEQYF

SEQ ID NO: 147735 - protein, 15 aa, Homo sapiens
  CDR3 for alpha chain variable domain of TCR clone 73868 (TRAV4, TRAJ39)
CLVGPNNNAGNMLTF

SEQ ID NO: 147736 - protein, 15 aa, Homo sapiens
  CDR3 for beta chain variable domain of TCR clone 73868 (TRBV27, TRBJ1-4)
CASSAQHDLNEKLFF

SEQ ID NO: 147737 - protein, 17 aa, Homo sapiens
  CDR3 for alpha chain variable domain of TCR clone 73869 (TRAV13-1, TRAJ52)
CAASSGVGGTSYGKLTF

SEQ ID NO: 147738 - protein, 15 aa, Homo sapiens
  CDR3 for beta chain variable domain of TCR clone 73869 (TRBV2, TRBJ2-1)
CASSELAGSYNEQFF

SEQ ID NO: 147739 - protein, 10 aa, Homo sapiens
  CDR3 for alpha chain variable domain of TCR clone 73870 (TRAV12-3, TRAJ49)
CAMNDDQFYF

SEQ ID NO: 147740 - protein, 16 aa, Homo sapiens
  CDR3 for beta chain variable domain of TCR clone 73870 (TRBV20-1, TRBJ2-1)
CSASASGYSSYNEQFF

SEQ ID NO: 147741 - protein, 14 aa, Homo sapiens
  CDR3 for alpha chain variable domain of TCR clone 73871 (TRAV25, TRAJ20)
CAGKGRWGDYKLSF

SEQ ID NO: 147742 - protein, 12 aa, Homo sapiens
  CDR3 for beta chain variable domain of TCR clone 73871 (TRBV12-5, TRBJ2-3)
CASQASTDTQYF

SEQ ID NO: 147743 - protein, 13 aa, Homo sapiens
  CDR3 for alpha chain variable domain of TCR clone 73872 (TRAV1-2, TRAJ9)
CAALNTGGFKTIF

SEQ ID NO: 147744 - protein, 15 aa, Homo sapiens
  CDR3 for beta chain variable domain of TCR clone 73872 (TRBV28, TRBJ2-1)
CASSIIAGGRSEQFF

SEQ ID NO: 147745 - protein, 18 aa, Homo sapiens
  CDR3 for alpha chain variable domain of TCR clone 73873 (TRAV26-2, TRAJ32)
RILRAPLNYGGATNKLIF

SEQ ID NO: 147746 - protein, 13 aa, Homo sapiens
  CDR3 for beta chain variable domain of TCR clone 73873 (TRBV7-3, TRBJ2-1)
CASSLWPYNEQFF

SEQ ID NO: 147747 - protein, 15 aa, Homo sapiens
  CDR3 for alpha chain variable domain of TCR clone 73874 (TRAV8-3, TRAJ45)
CASSYSGGGADGLTF

SEQ ID NO: 147748 - protein, 13 aa, Homo sapiens
  CDR3 for beta chain variable domain of TCR clone 73874 (TRBV9, TRBJ2-1)
CASSPSGGSEQFF

SEQ ID NO: 147749 - protein, 14 aa, Homo sapiens
  CDR3 for alpha chain variable domain of TCR clone 73875 (TRAV2, TRAJ9)
CAVEDRSGGFKTIF

SEQ ID NO: 147750 - protein, 12 aa, Homo sapiens
  CDR3 for beta chain variable domain of TCR clone 73875 (TRBV14, TRBJ2-7)
CDSSRLKGEQYF

SEQ ID NO: 147751 - protein, 14 aa, Homo sapiens
  CDR3 for alpha chain variable domain of TCR clone 73876 (TRAV8-3, TRAJ10)
CAVGNAGGGNKLTF

SEQ ID NO: 147752 - protein, 12 aa, Homo sapiens
  CDR3 for beta chain variable domain of TCR clone 73876 (TRBV12-4, TRBJ1-2)
CASSFIWLHLRF

SEQ ID NO: 147753 - protein, 13 aa, Homo sapiens
  CDR3 for alpha chain variable domain of TCR clone 73877 (TRAV8-3, TRAJ6)
CAARRGGSYIPTF

SEQ ID NO: 147754 - protein, 15 aa, Homo sapiens
  CDR3 for beta chain variable domain of TCR clone 73877 (TRBV4-1, TRBJ2-3)
CASSSLAGGRDTQYF

SEQ ID NO: 147755 - protein, 14 aa, Homo sapiens
  CDR3 for alpha chain variable domain of TCR clone 73878 (TRAV1-1, TRAJ27)
CAVIYNTNARKSTF

SEQ ID NO: 147756 - protein, 15 aa, Homo sapiens
  CDR3 for beta chain variable domain of TCR clone 73878 (TRBV7-2, TRBJ2-1)
CASSSGLAGGNEQFF

SEQ ID NO: 147757 - protein, 14 aa, Homo sapiens
  CDR3 for alpha chain variable domain of TCR clone 73879 (TRAV1-2, TRAJ24)
CAVLTTDSWGKFQF

SEQ ID NO: 147758 - protein, 15 aa, Homo sapiens
  CDR3 for beta chain variable domain of TCR clone 73879 (TRBV6-6, TRBJ2-7)
CASSYSCGGSYEQYF

SEQ ID NO: 147759 - protein, 12 aa, Homo sapiens
  CDR3 for alpha chain variable domain of TCR clone 73880 (TRAV12-3, TRAJ54)
CGADRRAQKLVF

SEQ ID NO: 147760 - protein, 15 aa, Homo sapiens
  CDR3 for beta chain variable domain of TCR clone 73880 (TRBV27, TRBJ2-1)
CASSLAGGPFNEQFF

SEQ ID NO: 147761 - protein, 16 aa, Homo sapiens
  CDR3 for alpha chain variable domain of TCR clone 73881 (TRAV2, TRAJ4)
CAVEDRFSGGYNKLFF

SEQ ID NO: 147762 - protein, 13 aa, Homo sapiens
  CDR3 for beta chain variable domain of TCR clone 73881 (TRBV7-7, TRBJ2-5)
CASSRSGQETQYF

SEQ ID NO: 147763 - protein, 14 aa, Homo sapiens
  CDR3 for alpha chain variable domain of TCR clone 73882 (TRAV2, TRAJ9)
CAVEDRSGGFKTIF

SEQ ID NO: 147764 - protein, 13 aa, Homo sapiens
  CDR3 for beta chain variable domain of TCR clone 73882 (TRBV4-1, TRBJ2-2)
CASSQENTGELFF

SEQ ID NO: 147765 - protein, 12 aa, Homo sapiens
  CDR3 for alpha chain variable domain of TCR clone 73883 (TRAV2, TRAJ10)
CASTGGGNKLTV

SEQ ID NO: 147766 - protein, 14 aa, Homo sapiens
  CDR3 for beta chain variable domain of TCR clone 73883 (TRBV7-2, TRBJ2-2)
CASRGQGAAGELFF

SEQ ID NO: 147767 - protein, 12 aa, Homo sapiens
  CDR3 for alpha chain variable domain of TCR clone 73884 (TRAV2, TRAJ31)
CAVEDNNARLMF

SEQ ID NO: 147768 - protein, 16 aa, Homo sapiens
  CDR3 for beta chain variable domain of TCR clone 73884 (TRBV10-3, TRBJ2-1)
CAISGVGDGGGGQQFF

SEQ ID NO: 147769 - protein, 12 aa, Homo sapiens
  CDR3 for alpha chain variable domain of TCR clone 73885 (TRAV12-1, TRAJ6)
CVVSERSYIPTF

SEQ ID NO: 147770 - protein, 15 aa, Homo sapiens
  CDR3 for beta chain variable domain of TCR clone 73885 (TRBV11-2, TRBJ1-6)
CASSLDPWAVSPLHF

SEQ ID NO: 147771 - protein, 17 aa, Homo sapiens
  CDR3 for alpha chain variable domain of TCR clone 73886 (TRAV12-2, TRAJ42)
CAVNILNYGGSQGNLIF

SEQ ID NO: 147772 - protein, 13 aa, Homo sapiens
  CDR3 for beta chain variable domain of TCR clone 73886 (TRBV3-1, TRBJ1-5)
CASSQDLDQPQNF

SEQ ID NO: 147773 - protein, 18 aa, Homo sapiens
  CDR3 for alpha chain variable domain of TCR clone 73887 (TRAV9-2, TRAJ52)
CALSDLNLGGTSYGKLTF

SEQ ID NO: 147774 - protein, 15 aa, Homo sapiens
  CDR3 for beta chain variable domain of TCR clone 73887 (TRBV6-5, TRBJ1-2)
CASSHLLQGGYGYTF

SEQ ID NO: 147775 - protein, 14 aa, Homo sapiens
  CDR3 for alpha chain variable domain of TCR clone 73888 (TRAV13-1, TRAJ44)
CSAKATGTASKLTF

SEQ ID NO: 147776 - protein, 16 aa, Homo sapiens
  CDR3 for beta chain variable domain of TCR clone 73888 (TRBV7-9, TRBJ2-6)
CASSLKGPLRANVLTF

SEQ ID NO: 147777 - protein, 14 aa, Homo sapiens
  CDR3 for alpha chain variable domain of TCR clone 73889 (TRAV1-2, TRAJ16)
CAVNRFSDGQKLLF

SEQ ID NO: 147778 - protein, 14 aa, Homo sapiens
  CDR3 for beta chain variable domain of TCR clone 73889 (TRBV28, TRBJ2-4)
CASTQVTGVNIQYF

SEQ ID NO: 147779 - protein, 17 aa, Homo sapiens
  CDR3 for alpha chain variable domain of TCR clone 73890 (TRAV13-1, TRAJ28)
CAASPPYSGAGSYQLTF

SEQ ID NO: 147780 - protein, 12 aa, Homo sapiens
  CDR3 for beta chain variable domain of TCR clone 73890 (TRBV11-2, TRBJ2-2)
CASSLPTGELFS

SEQ ID NO: 147781 - protein, 14 aa, Homo sapiens
  CDR3 for alpha chain variable domain of TCR clone 73891 (TRAV9-2, TRAJ39)
CALYIYNAGNMLTF

SEQ ID NO: 147782 - protein, 17 aa, Homo sapiens
  CDR3 for beta chain variable domain of TCR clone 73891 (TRBV15, TRBJ1-5)
CATSRAPPGTRNQPQHF

SEQ ID NO: 147783 - protein, 18 aa, Homo sapiens
  CDR3 for alpha chain variable domain of TCR clone 73892 (TRAV21, TRAJ52)
CAVRPSPAGGTSYGKLTF

SEQ ID NO: 147784 - protein, 15 aa, Homo sapiens
  CDR3 for beta chain variable domain of TCR clone 73892 (TRBV11-2, TRBJ2-1)
CASSLGPDSYNEQFF

SEQ ID NO: 147785 - protein, 15 aa, Homo sapiens
  CDR3 for alpha chain variable domain of TCR clone 73893 (TRAV12-3, TRAJ6)
CEMSATTGGSYIPTF

SEQ ID NO: 147786 - protein, 16 aa, Homo sapiens
  CDR3 for beta chain variable domain of TCR clone 73893 (TRBV20-1, TRBJ1-2)
CSASMGQGVANYGYTF

SEQ ID NO: 147787 - protein, 12 aa, Homo sapiens
  CDR3 for alpha chain variable domain of TCR clone 73894 (TRAV17, TRAJ30)
CATDARDDKIIF

SEQ ID NO: 147788 - protein, 15 aa, Homo sapiens
  CDR3 for beta chain variable domain of TCR clone 73894 (TRBV4-1, TRBJ2-1)
CASSQGGELYNEKFF

SEQ ID NO: 147789 - protein, 15 aa, Homo sapiens
  CDR3 for alpha chain variable domain of TCR clone 73895 (TRAV21, TRAJ24)
CAARSLTDSWGKLQF

SEQ ID NO: 147790 - protein, 13 aa, Homo sapiens
  CDR3 for beta chain variable domain of TCR clone 73895 (TRBV11-2, TRBJ2-5)
CASSSTGEETQYF

SEQ ID NO: 147791 - protein, 13 aa, Homo sapiens
  CDR3 for alpha chain variable domain of TCR clone 73896 (TRAV20, TRAJ20)
CAVQAGSGYKLSF

SEQ ID NO: 147792 - protein, 13 aa, Homo sapiens
  CDR3 for beta chain variable domain of TCR clone 73896 (TRBV12-4, TRBJ1-2)
CASSLRQGKGYTF

SEQ ID NO: 147793 - protein, 14 aa, Homo sapiens
  CDR3 for alpha chain variable domain of TCR clone 73897 (TRAV38-1, TRAJ45)
CAYYSGGGADGLTF

SEQ ID NO: 147794 - protein, 15 aa, Homo sapiens
  CDR3 for beta chain variable domain of TCR clone 73897 (TRBV11-2, TRBJ2-1)
CASSSPSTRYNEQFF

SEQ ID NO: 147795 - protein, 16 aa, Homo sapiens
  CDR3 for alpha chain variable domain of TCR clone 73898 (TRAV23/DV6, )
CADIQNPDPAVYQLRD

SEQ ID NO: 147796 - protein, 13 aa, Homo sapiens
  CDR3 for beta chain variable domain of TCR clone 73898 (TRBV28, TRBJ2-7)
CASRSSGAYEQYF

SEQ ID NO: 147797 - protein, 13 aa, Homo sapiens
  CDR3 for alpha chain variable domain of TCR clone 73899 (TRAV29/DV5, TRAJ31)
CAASRNNNARLIF

SEQ ID NO: 147798 - protein, 14 aa, Homo sapiens
  CDR3 for beta chain variable domain of TCR clone 73899 (TRBV7-2, TRBJ2-7)
CASSPKTSFYEQYF

SEQ ID NO: 147799 - protein, 14 aa, Homo sapiens
  CDR3 for alpha chain variable domain of TCR clone 73900 (TRAV1-2, TRAJ16)
CAVNRFSDGQKLLF

SEQ ID NO: 147800 - protein, 16 aa, Homo sapiens
  CDR3 for beta chain variable domain of TCR clone 73900 (TRBV6-5, TRBJ2-7)
CASSTRTSGAPYEQYF

SEQ ID NO: 147801 - protein, 12 aa, Homo sapiens
  CDR3 for alpha chain variable domain of TCR clone 73901 (TRAV23/DV6, TRAJ52)
CAASPNAGGTSY

SEQ ID NO: 147802 - protein, 11 aa, Homo sapiens
  CDR3 for beta chain variable domain of TCR clone 73901 (TRBV11-2, TRBJ1-1)
CASSINTEAFF

SEQ ID NO: 147803 - protein, 12 aa, Homo sapiens
  CDR3 for alpha chain variable domain of TCR clone 73902 (TRAV2, TRAJ9)
CAVGAGGFKTIF

SEQ ID NO: 147804 - protein, 16 aa, Homo sapiens
  CDR3 for beta chain variable domain of TCR clone 73902 (TRBV13, TRBJ2-2)
CASSPRTGEPTGELFF

SEQ ID NO: 147805 - protein, 11 aa, Homo sapiens
  CDR3 for alpha chain variable domain of TCR clone 73903 (TRAV1-2, TRAJ20)
CAVSNDYKLSF

SEQ ID NO: 147806 - protein, 14 aa, Homo sapiens
  CDR3 for beta chain variable domain of TCR clone 73903 (TRBV12-5, TRBJ2-5)
CASGSRTHQETQYF

SEQ ID NO: 147807 - protein, 17 aa, Homo sapiens
  CDR3 for alpha chain variable domain of TCR clone 73904 (TRAV3, TRAJ42)
CAVRDRDYGGSQGNLIF

SEQ ID NO: 147808 - protein, 18 aa, Homo sapiens
  CDR3 for beta chain variable domain of TCR clone 73904 (TRBV20-1, TRBJ2-6)
CSAETTPTHGSGANVLTF

SEQ ID NO: 147809 - protein, 14 aa, Homo sapiens
  CDR3 for alpha chain variable domain of TCR clone 73905 (TRAV1-2, TRAJ16)
CAVNRFSDGQKLLV

SEQ ID NO: 147810 - protein, 13 aa, Homo sapiens
  CDR3 for beta chain variable domain of TCR clone 73905 (TRBV7-9, TRBJ1-2)
CASSLKQNYGYTF

SEQ ID NO: 147811 - protein, 12 aa, Homo sapiens
  CDR3 for alpha chain variable domain of TCR clone 73906 (TRAV12-1, TRAJ40)
CVVYSGTYKYIF

SEQ ID NO: 147812 - protein, 16 aa, Homo sapiens
  CDR3 for beta chain variable domain of TCR clone 73906 (TRBV12-4, TRBJ2-5)
CASSPTSGRAEGTQYF

SEQ ID NO: 147813 - protein, 16 aa, Homo sapiens
  CDR3 for alpha chain variable domain of TCR clone 73907 (TRAV30, TRAJ26)
CGTESVGDDYGQNFVF

SEQ ID NO: 147814 - protein, 13 aa, Homo sapiens
  CDR3 for beta chain variable domain of TCR clone 73907 (TRBV19, TRBJ1-2)
CASSISEDYGYTF

SEQ ID NO: 147815 - protein, 12 aa, Homo sapiens
  CDR3 for alpha chain variable domain of TCR clone 73908 (TRAV13-1, TRAJ21)
CAAKEGFNKFYF

SEQ ID NO: 147816 - protein, 15 aa, Homo sapiens
  CDR3 for beta chain variable domain of TCR clone 73908 (TRBV20-1, TRBJ2-7)
CSARDRVSGMDEQCF

SEQ ID NO: 147817 - protein, 13 aa, Homo sapiens
  CDR3 for alpha chain variable domain of TCR clone 73909 (TRAV12-3, TRAJ54)
CALVPQGAKKLVF

SEQ ID NO: 147818 - protein, 15 aa, Homo sapiens
  CDR3 for beta chain variable domain of TCR clone 73909 (TRBV4-1, TRBJ2-2)
CASSQDSRGTGELFF

SEQ ID NO: 147819 - protein, 10 aa, Homo sapiens
  CDR3 for alpha chain variable domain of TCR clone 73910 (TRAV26-1, TRAJ54)
GIQGAQKLVF

SEQ ID NO: 147820 - protein, 15 aa, Homo sapiens
  CDR3 for beta chain variable domain of TCR clone 73910 (TRBV27, TRBJ2-7)
CASSTAGTGSYEQYF

SEQ ID NO: 147821 - protein, 13 aa, Homo sapiens
  CDR3 for alpha chain variable domain of TCR clone 73911 (TRAV3, TRAJ21)
CAVREPDFNKFYF

SEQ ID NO: 147822 - protein, 22 aa, Homo sapiens
  CDR3 for beta chain variable domain of TCR clone 73911 (TRBV6-1, TRBJ1-3)
CASVQGGGWKHHIFWRGKLAHC

SEQ ID NO: 147823 - protein, 16 aa, Homo sapiens
  CDR3 for alpha chain variable domain of TCR clone 73912 (TRAV3, TRAJ37)
CAVRPHGSGNTGKLIF

SEQ ID NO: 147824 - protein, 16 aa, Homo sapiens
  CDR3 for beta chain variable domain of TCR clone 73912 (TRBV9, TRBJ1-2)
CDSSVEEKVSPYGYTF

SEQ ID NO: 147825 - protein, 11 aa, Homo sapiens
  CDR3 for alpha chain variable domain of TCR clone 73913 (TRAV1-2, TRAJ31)
CAVNNNATLMF

SEQ ID NO: 147826 - protein, 15 aa, Homo sapiens
  CDR3 for beta chain variable domain of TCR clone 73913 (TRBV28, TRBJ2-1)
CASSIIAGGRSEQFF

SEQ ID NO: 147827 - protein, 15 aa, Homo sapiens
  CDR3 for alpha chain variable domain of TCR clone 73914 (TRAV12-3, TRAJ13)
CAMSARSGGYQKVTF

SEQ ID NO: 147828 - protein, 14 aa, Homo sapiens
  CDR3 for beta chain variable domain of TCR clone 73914 (TRBV12-5, TRBJ2-5)
CASGSRTHQETQYF

SEQ ID NO: 147829 - protein, 13 aa, Homo sapiens
  CDR3 for alpha chain variable domain of TCR clone 73915 (TRAV8-2, TRAJ43)
CVVSDQGDNDMRF

SEQ ID NO: 147830 - protein, 12 aa, Homo sapiens
  CDR3 for beta chain variable domain of TCR clone 73915 (TRBV7-9, TRBJ2-7)
CASRTGLDEQYF

SEQ ID NO: 147831 - protein, 11 aa, Homo sapiens
  CDR3 for alpha chain variable domain of TCR clone 73916 (TRAV12-2, TRAJ43)
CAMSVSNDMRF

SEQ ID NO: 147832 - protein, 12 aa, Homo sapiens
  CDR3 for beta chain variable domain of TCR clone 73916 (TRBV20-1, TRBJ1-1)
QCSTWGGTEAFF

SEQ ID NO: 147833 - protein, 13 aa, Homo sapiens
  CDR3 for alpha chain variable domain of TCR clone 73917 (TRAV30, TRAJ24)
CGTVTDSWGKLQF

SEQ ID NO: 147834 - protein, 12 aa, Homo sapiens
  CDR3 for beta chain variable domain of TCR clone 73917 (TRBV7-9, TRBJ1-4)
CASSTDREKLFF

SEQ ID NO: 147835 - protein, 14 aa, Homo sapiens
  CDR3 for alpha chain variable domain of TCR clone 73918 (TRAV2, TRAJ3)
CAVRPYSSVSKIIF

SEQ ID NO: 147836 - protein, 17 aa, Homo sapiens
  CDR3 for beta chain variable domain of TCR clone 73918 (TRBV7-6, TRBJ2-5)
CASSSPQAGDPSETQYF

SEQ ID NO: 147837 - protein, 13 aa, Homo sapiens
  CDR3 for alpha chain variable domain of TCR clone 73919 (TRAV16, TRAJ34)
CALTGDNTDKLIF

SEQ ID NO: 147838 - protein, 13 aa, Homo sapiens
  CDR3 for beta chain variable domain of TCR clone 73919 (TRBV6-1, TRBJ2-1)
CASREDGGHEQFF

SEQ ID NO: 147839 - protein, 12 aa, Homo sapiens
  CDR3 for alpha chain variable domain of TCR clone 73920 (TRAV13-1, TRAJ48)
CAANFGNEKLTF

SEQ ID NO: 147840 - protein, 18 aa, Homo sapiens
  CDR3 for beta chain variable domain of TCR clone 73920 (TRBV28, TRBJ2-1)
CASSSTSGRANSYNEQFF

SEQ ID NO: 147841 - protein, 13 aa, Homo sapiens
  CDR3 for alpha chain variable domain of TCR clone 73921 (TRAV1-2, TRAJ11)
CAVRDSGYSTLTF

SEQ ID NO: 147842 - protein, 14 aa, Homo sapiens
  CDR3 for beta chain variable domain of TCR clone 73921 (TRBV28, TRBJ1-2)
CASRIQGANYGYTF

SEQ ID NO: 147843 - protein, 14 aa, Homo sapiens
  CDR3 for alpha chain variable domain of TCR clone 73922 (TRAV38-1, TRAJ40)
CALRPTSGTYKYIF

SEQ ID NO: 147844 - protein, 16 aa, Homo sapiens
  CDR3 for beta chain variable domain of TCR clone 73922 (TRBV29-1, TRBJ2-7)
CSVEVVGTSGSYEQYF

SEQ ID NO: 147845 - protein, 13 aa, Homo sapiens
  CDR3 for alpha chain variable domain of TCR clone 73923 (TRAV12-2, TRAJ50)
CAVIVTSYDKVIF

SEQ ID NO: 147846 - protein, 15 aa, Homo sapiens
  CDR3 for beta chain variable domain of TCR clone 73923 (TRBV20-1, TRBJ2-7)
CSARDRVSGMDEQYF

SEQ ID NO: 147847 - protein, 15 aa, Homo sapiens
  CDR3 for alpha chain variable domain of TCR clone 73924 (TRAV12-3, TRAJ27)
CAMRAYNTNSGKSTF

SEQ ID NO: 147848 - protein, 13 aa, Homo sapiens
  CDR3 for beta chain variable domain of TCR clone 73924 (TRBV11-2, TRBJ2-5)
CASSRGPSETQYF

SEQ ID NO: 147849 - protein, 14 aa, Homo sapiens
  CDR3 for alpha chain variable domain of TCR clone 73925 (TRAV20, TRAJ10)
RAVRVEGGGNKLTF

SEQ ID NO: 147850 - protein, 13 aa, Homo sapiens
  CDR3 for beta chain variable domain of TCR clone 73925 (TRBV13, TRBJ2-2)
CASSPGLTGELFF

SEQ ID NO: 147851 - protein, 14 aa, Homo sapiens
  CDR3 for alpha chain variable domain of TCR clone 73926 (TRAV3, TRAJ36)
CAVRYGTGANNLFF

SEQ ID NO: 147852 - protein, 16 aa, Homo sapiens
  CDR3 for beta chain variable domain of TCR clone 73926 (TRBV20-1, TRBJ2-6)
CSAREGPGVGANVLTF

SEQ ID NO: 147853 - protein, 15 aa, Homo sapiens
  CDR3 for alpha chain variable domain of TCR clone 73927 (TRAV16, TRAJ20)
CALKGGLRADYKLGF

SEQ ID NO: 147854 - protein, 16 aa, Homo sapiens
  CDR3 for beta chain variable domain of TCR clone 73927 (TRBV11-3, TRBJ2-2)
CASSSRTSPGTGELFF

SEQ ID NO: 147855 - protein, 15 aa, Homo sapiens
  CDR3 for alpha chain variable domain of TCR clone 73928 (TRAV21, TRAJ24)
CAARSSTDSWGQLQF

SEQ ID NO: 147856 - protein, 11 aa, Homo sapiens
  CDR3 for beta chain variable domain of TCR clone 73928 (TRBV11-2, TRBJ2-2)
CASSLPGELFF

SEQ ID NO: 147857 - protein, 14 aa, Homo sapiens
  CDR3 for alpha chain variable domain of TCR clone 73929 (TRAV12-1, TRAJ30)
CVVNIGNRDDKIIF

SEQ ID NO: 147858 - protein, 14 aa, Homo sapiens
  CDR3 for beta chain variable domain of TCR clone 73929 (TRBV7-9, TRBJ2-5)
CAGSPRPSGETQYF

SEQ ID NO: 147859 - protein, 11 aa, Homo sapiens
  CDR3 for alpha chain variable domain of TCR clone 73930 (TRAV12-2, TRAJ39)
CAVNNMLTFGG

SEQ ID NO: 147860 - protein, 14 aa, Homo sapiens
  CDR3 for beta chain variable domain of TCR clone 73930 (TRBV19, TRBJ2-1)
CASPTFVLSGEQFF

SEQ ID NO: 147861 - protein, 15 aa, Homo sapiens
  CDR3 for alpha chain variable domain of TCR clone 73931 (TRAV3, TRAJ32)
CAVSSYGGSTNKLIF

SEQ ID NO: 147862 - protein, 13 aa, Homo sapiens
  CDR3 for beta chain variable domain of TCR clone 73931 (TRBV20-1, TRBJ2-7)
CSARPSTNYEQYF

SEQ ID NO: 147863 - protein, 16 aa, Homo sapiens
  CDR3 for alpha chain variable domain of TCR clone 73932 (TRAV2, TRAJ4)
CAVEGRFSGGYNKLIF

SEQ ID NO: 147864 - protein, 13 aa, Homo sapiens
  CDR3 for beta chain variable domain of TCR clone 73932 (TRBV7-7, TRBJ2-5)
CASSRSGQETQYF

SEQ ID NO: 147865 - protein, 15 aa, Homo sapiens
  CDR3 for alpha chain variable domain of TCR clone 73933 (TRAV20, TRAJ6)
CAVRLQSGGSYIPTF

SEQ ID NO: 147866 - protein, 14 aa, Homo sapiens
  CDR3 for beta chain variable domain of TCR clone 73933 (TRBV12-4, TRBJ2-7)
CASSTSGGWYEQYF

SEQ ID NO: 147867 - protein, 16 aa, Homo sapiens
  CDR3 for alpha chain variable domain of TCR clone 73934 (TRAV3, TRAJ37)
CAVRPHGSGNTGKLIF

SEQ ID NO: 147868 - protein, 14 aa, Homo sapiens
  CDR3 for beta chain variable domain of TCR clone 73934 (TRBV25-1, TRBJ1-1)
CASTHLGGSTEAFF

SEQ ID NO: 147869 - protein, 16 aa, Homo sapiens
  CDR3 for alpha chain variable domain of TCR clone 73935 (TRAV17, TRAJ22)
CATGPIPSGSARQLTF

SEQ ID NO: 147870 - protein, 13 aa, Homo sapiens
  CDR3 for beta chain variable domain of TCR clone 73935 (TRBV11-2, TRBJ2-1)
CASSLGLAGGRFF

SEQ ID NO: 147871 - protein, 13 aa, Homo sapiens
  CDR3 for alpha chain variable domain of TCR clone 73936 (TRAV21, TRAJ27)
CAARPGNAGKSTF

SEQ ID NO: 147872 - protein, 14 aa, Homo sapiens
  CDR3 for beta chain variable domain of TCR clone 73936 (TRBV7-9, TRBJ2-1)
CASSPRDSLYEQFF

SEQ ID NO: 147873 - protein, 15 aa, Homo sapiens
  CDR3 for alpha chain variable domain of TCR clone 73937 (TRAV3, TRAJ4)
CAVRYGTGGYNKLIF

SEQ ID NO: 147874 - protein, 16 aa, Homo sapiens
  CDR3 for beta chain variable domain of TCR clone 73937 (TRBV27, TRBJ2-2)
CASSSSGVSNTGELFF

SEQ ID NO: 147875 - protein, 13 aa, Homo sapiens
  CDR3 for alpha chain variable domain of TCR clone 73938 (TRAV12-1, TRAJ31)
CVVNMNNNARLMF

SEQ ID NO: 147876 - protein, 12 aa, Homo sapiens
  CDR3 for beta chain variable domain of TCR clone 73938 (TRBV4-1, TRBJ1-2)
CASSQGQGRPMA

SEQ ID NO: 147877 - protein, 19 aa, Homo sapiens
  CDR3 for alpha chain variable domain of TCR clone 73939 (TRAV38-1, TRAJ53)
CAFMKHGLESGGSNYKLTF

SEQ ID NO: 147878 - protein, 13 aa, Homo sapiens
  CDR3 for beta chain variable domain of TCR clone 73939 (TRBV19, TRBJ2-7)
CASSPRRSYEQYF

SEQ ID NO: 147879 - protein, 13 aa, Homo sapiens
  CDR3 for alpha chain variable domain of TCR clone 73940 (TRAV8-6, TRAJ21)
CAVSPSSLNKFYF

SEQ ID NO: 147880 - protein, 14 aa, Homo sapiens
  CDR3 for beta chain variable domain of TCR clone 73940 (TRBV19, TRBJ2-1)
CASPTFVLSGEQFF

SEQ ID NO: 147881 - protein, 15 aa, Homo sapiens
  CDR3 for alpha chain variable domain of TCR clone 73941 (TRAV12-2, TRAJ53)
CAVNGGGGSNYKLTF

SEQ ID NO: 147882 - protein, 13 aa, Homo sapiens
  CDR3 for beta chain variable domain of TCR clone 73941 (TRBV3-1, TRBJ1-1)
CASSPGVITEASF

SEQ ID NO: 147883 - protein, 18 aa, Homo sapiens
  CDR3 for alpha chain variable domain of TCR clone 73942 (TRAV29/DV5, TRAJ52)
CAAGFRGVGGTSYGKLTF

SEQ ID NO: 147884 - protein, 16 aa, Homo sapiens
  CDR3 for beta chain variable domain of TCR clone 73942 (TRBV7-3, TRBJ2-2)
CASSLKRGTLSGELFF

SEQ ID NO: 147885 - protein, 17 aa, Homo sapiens
  CDR3 for alpha chain variable domain of TCR clone 73943 (TRAV3, TRAJ42)
CAVRDRDYGGSQGNLIF

SEQ ID NO: 147886 - protein, 14 aa, Homo sapiens
  CDR3 for beta chain variable domain of TCR clone 73943 (TRBV7-9, TRBJ2-1)
CASSPRDSLYEQFF

SEQ ID NO: 147887 - protein, 19 aa, Homo sapiens
  CDR3 for alpha chain variable domain of TCR clone 73944 (TRAV8-3, TRAJ4)
LSTSVLWGFYSGGYNKLIF

SEQ ID NO: 147888 - protein, 16 aa, Homo sapiens
  CDR3 for beta chain variable domain of TCR clone 73944 (TRBV7-8, TRBJ2-3)
CASSTEGQRETDTQYF

SEQ ID NO: 147889 - protein, 13 aa, Homo sapiens
  CDR3 for alpha chain variable domain of TCR clone 73945 (TRAV13-2, TRAJ49)
CAENTNTGSQFYF

SEQ ID NO: 147890 - protein, 12 aa, Homo sapiens
  CDR3 for beta chain variable domain of TCR clone 73945 (TRBV6-6, TRBJ2-3)
CASSSRGDTQYF

SEQ ID NO: 147891 - protein, 16 aa, Homo sapiens
  CDR3 for alpha chain variable domain of TCR clone 73946 (TRAV30, TRAJ24)
CGTEIVDADSWGKFQF

SEQ ID NO: 147892 - protein, 14 aa, Homo sapiens
  CDR3 for beta chain variable domain of TCR clone 73946 (TRBV11-1, TRBJ2-7)
CASSWTGTAYEQYF

SEQ ID NO: 147893 - protein, 15 aa, Homo sapiens
  CDR3 for alpha chain variable domain of TCR clone 73947 (TRAV8-3, TRAJ40)
CAAPSLGSGTYKYIF

SEQ ID NO: 147894 - protein, 16 aa, Homo sapiens
  CDR3 for beta chain variable domain of TCR clone 73947 (TRBV7-9, TRBJ1-2)
CASSLGFSSGEDGYTF

SEQ ID NO: 147895 - protein, 14 aa, Homo sapiens
  CDR3 for alpha chain variable domain of TCR clone 73948 (TRAV12-2, TRAJ40)
CAVKIPSGTYKYIF

SEQ ID NO: 147896 - protein, 14 aa, Homo sapiens
  CDR3 for beta chain variable domain of TCR clone 73948 (TRBV7-2, TRBJ2-7)
CASSLYPGRYEQYF

SEQ ID NO: 147897 - protein, 12 aa, Homo sapiens
  CDR3 for alpha chain variable domain of TCR clone 73949 (TRAV2, TRAJ9)
CAVGAGGFKTIF

SEQ ID NO: 147898 - protein, 14 aa, Homo sapiens
  CDR3 for beta chain variable domain of TCR clone 73949 (TRBV6-1, TRBJ1-3)
CAIVQGGGGNTIYF

SEQ ID NO: 147899 - protein, 14 aa, Homo sapiens
  CDR3 for alpha chain variable domain of TCR clone 73950 (TRAV26-1, TRAJ45)
CIEVTGGGADGLTF

SEQ ID NO: 147900 - protein, 17 aa, Homo sapiens
  CDR3 for beta chain variable domain of TCR clone 73950 (TRBV11-2, TRBJ2-1)
CASSLYPPGVEYNEQFF

SEQ ID NO: 147901 - protein, 12 aa, Homo sapiens
  CDR3 for alpha chain variable domain of TCR clone 73951 (TRAV35, TRAJ49)
CAGGTPVTSSIL

SEQ ID NO: 147902 - protein, 13 aa, Homo sapiens
  CDR3 for beta chain variable domain of TCR clone 73951 (TRBV27, TRBJ1-1)
CASSLSIGAEAFF

SEQ ID NO: 147903 - protein, 15 aa, Homo sapiens
  CDR3 for alpha chain variable domain of TCR clone 73952 (TRAV30, TRAJ32)
CGTEILGGATNKLIF

SEQ ID NO: 147904 - protein, 16 aa, Homo sapiens
  CDR3 for beta chain variable domain of TCR clone 73952 (TRBV7-7, TRBJ2-1)
CASSLASGTSYNEQFF

SEQ ID NO: 147905 - protein, 11 aa, Homo sapiens
  CDR3 for alpha chain variable domain of TCR clone 73953 (TRAV2, TRAJ33)
CAVDSSYQLIW

SEQ ID NO: 147906 - protein, 15 aa, Homo sapiens
  CDR3 for beta chain variable domain of TCR clone 73953 (TRBV19, TRBJ1-2)
CASSVGQVLNYGYTF

SEQ ID NO: 147907 - protein, 17 aa, Homo sapiens
  CDR3 for alpha chain variable domain of TCR clone 73954 (TRAV13-1, TRAJ52)
CAACSGAGGTSYGKLTF

SEQ ID NO: 147908 - protein, 15 aa, Homo sapiens
  CDR3 for beta chain variable domain of TCR clone 73954 (TRBV2, TRBJ2-1)
CASSELAGSYNEQFF

SEQ ID NO: 147909 - protein, 21 aa, Homo sapiens
  CDR3 for alpha chain variable domain of TCR clone 73955 (TRAV3, )
CAVRPTPGIQNPDPAVYQLRD

SEQ ID NO: 147910 - protein, 15 aa, Homo sapiens
  CDR3 for beta chain variable domain of TCR clone 73955 (TRBV11-3, TRBJ2-5)
CASSDTSGGIETQYF

SEQ ID NO: 147911 - protein, 14 aa, Homo sapiens
  CDR3 for alpha chain variable domain of TCR clone 73956 (TRAV3, TRAJ9)
CAVRLNTGGFKTIF

SEQ ID NO: 147912 - protein, 14 aa, Homo sapiens
  CDR3 for beta chain variable domain of TCR clone 73956 (TRBV7-2, TRBJ2-7)
CASSPKTSFYEQYF

SEQ ID NO: 147913 - protein, 12 aa, Homo sapiens
  CDR3 for alpha chain variable domain of TCR clone 73957 (TRAV13-1, TRAJ27)
CAAHTNAGKSTF

SEQ ID NO: 147914 - protein, 12 aa, Homo sapiens
  CDR3 for beta chain variable domain of TCR clone 73957 (TRBV19, TRBJ2-1)
CASSQISNEQFF

SEQ ID NO: 147915 - protein, 16 aa, Homo sapiens
  CDR3 for alpha chain variable domain of TCR clone 73958 (TRAV36/DV7, TRAJ30)
CAVETYGLDRDDKIIF

SEQ ID NO: 147916 - protein, 15 aa, Homo sapiens
  CDR3 for beta chain variable domain of TCR clone 73958 (TRBV4-2, TRBJ1-1)
CASSQQGAGDTEAFF

SEQ ID NO: 147917 - protein, 15 aa, Homo sapiens
  CDR3 for alpha chain variable domain of TCR clone 73959 (TRAV26-1, TRAJ17)
CIVRVVKAAGNKLTF

SEQ ID NO: 147918 - protein, 17 aa, Homo sapiens
  CDR3 for beta chain variable domain of TCR clone 73959 (TRBV11-2, TRBJ2-1)
CASSLYPPGVEYNEQFF

SEQ ID NO: 147919 - protein, 12 aa, Homo sapiens
  CDR3 for alpha chain variable domain of TCR clone 73960 (TRAV12-3, TRAJ21)
CAMFNNFNEFYF

SEQ ID NO: 147920 - protein, 14 aa, Homo sapiens
  CDR3 for beta chain variable domain of TCR clone 73960 (TRBV28, TRBJ2-1)
CASSIQGTVGEQFF

SEQ ID NO: 147921 - protein, 11 aa, Homo sapiens
  CDR3 for alpha chain variable domain of TCR clone 73961 (TRAV3, TRAJ21)
CAVGNFNKFYF

SEQ ID NO: 147922 - protein, 16 aa, Homo sapiens
  CDR3 for beta chain variable domain of TCR clone 73961 (TRBV27, TRBJ2-2)
CASSLSGFWVTGELFF

SEQ ID NO: 147923 - protein, 14 aa, Homo sapiens
  CDR3 for alpha chain variable domain of TCR clone 73962 (TRAV9-2, TRAJ39)
CALYIYNAGNMLTF

SEQ ID NO: 147924 - protein, 15 aa, Homo sapiens
  CDR3 for beta chain variable domain of TCR clone 73962 (TRBV11-3, TRBJ2-2)
CASSLGGRPTGELFF

SEQ ID NO: 147925 - protein, 13 aa, Homo sapiens
  CDR3 for alpha chain variable domain of TCR clone 73963 (TRAV21, TRAJ20)
CAVGLRVDYKLSF

SEQ ID NO: 147926 - protein, 18 aa, Homo sapiens
  CDR3 for beta chain variable domain of TCR clone 73963 (TRBV12-4, TRBJ2-4)
CASSRTGAVDVAKNIQYF

SEQ ID NO: 147927 - protein, 12 aa, Homo sapiens
  CDR3 for alpha chain variable domain of TCR clone 73964 (TRAV13-1, TRAJ15)
CAASQAGTALIF

SEQ ID NO: 147928 - protein, 14 aa, Homo sapiens
  CDR3 for beta chain variable domain of TCR clone 73964 (TRBV19, TRBJ2-1)
CASPTVVLSGEQFF

SEQ ID NO: 147929 - protein, 12 aa, Homo sapiens
  CDR3 for alpha chain variable domain of TCR clone 73965 (TRAV1-1, TRAJ8)
CAGGTGFQKLVF

SEQ ID NO: 147930 - protein, 15 aa, Homo sapiens
  CDR3 for beta chain variable domain of TCR clone 73965 (TRBV7-9, TRBJ1-4)
CASSRTGGFNVKLFF

SEQ ID NO: 147931 - protein, 14 aa, Homo sapiens
  CDR3 for alpha chain variable domain of TCR clone 73966 (TRAV35, TRAJ33)
SAGSSQDSNYQLIW

SEQ ID NO: 147932 - protein, 15 aa, Homo sapiens
  CDR3 for beta chain variable domain of TCR clone 73966 (TRBV20-1, TRBJ2-7)
CSAESGTSGAYEQYF

SEQ ID NO: 147933 - protein, 13 aa, Homo sapiens
  CDR3 for alpha chain variable domain of TCR clone 73967 (TRAV2, TRAJ15)
CAVASQAGTALIF

SEQ ID NO: 147934 - protein, 16 aa, Homo sapiens
  CDR3 for beta chain variable domain of TCR clone 73967 (TRBV5-1, TRBJ1-1)
CASSSGGNSLNTEASF

SEQ ID NO: 147935 - protein, 14 aa, Homo sapiens
  CDR3 for alpha chain variable domain of TCR clone 73968 (TRAV8-4, TRAJ9)
CAVRINTGGFKTIF

SEQ ID NO: 147936 - protein, 12 aa, Homo sapiens
  CDR3 for beta chain variable domain of TCR clone 73968 (TRBV11-2, TRBJ2-2)
CASSLGGGELFF

SEQ ID NO: 147937 - protein, 13 aa, Homo sapiens
  CDR3 for alpha chain variable domain of TCR clone 73969 (TRAV27, TRAJ6)
CAGGTRGSYIPTF

SEQ ID NO: 147938 - protein, 14 aa, Homo sapiens
  CDR3 for beta chain variable domain of TCR clone 73969 (TRBV7-8, TRBJ2-3)
CASSSRDSTDTQYF

SEQ ID NO: 147939 - protein, 13 aa, Homo sapiens
  CDR3 for alpha chain variable domain of TCR clone 73970 (TRAV26-1, TRAJ33)
CIVRVEGNYQLIW

SEQ ID NO: 147940 - protein, 13 aa, Homo sapiens
  CDR3 for beta chain variable domain of TCR clone 73970 (TRBV6-3, TRBJ2-7)
WASTWGSSYEQYF

SEQ ID NO: 147941 - protein, 18 aa, Homo sapiens
  CDR3 for alpha chain variable domain of TCR clone 73971 (TRAV21, TRAJ52)
CAVRPSPAGGTSYGKLTF

SEQ ID NO: 147942 - protein, 16 aa, Homo sapiens
  CDR3 for beta chain variable domain of TCR clone 73971 (TRBV4-2, TRBJ2-3)
CASSQELAGDTDTQYF

SEQ ID NO: 147943 - protein, 13 aa, Homo sapiens
  CDR3 for alpha chain variable domain of TCR clone 73972 (TRAV3, TRAJ43)
CAVRDTRGGDIRF

SEQ ID NO: 147944 - protein, 15 aa, Homo sapiens
  CDR3 for beta chain variable domain of TCR clone 73972 (TRBV6-5, TRBJ1-5)
CASSYSRRSNQPQHF

SEQ ID NO: 147945 - protein, 15 aa, Homo sapiens
  CDR3 for alpha chain variable domain of TCR clone 73973 (TRAV3, TRAJ45)
CAVRTPWGGAAGLTF

SEQ ID NO: 147946 - protein, 16 aa, Homo sapiens
  CDR3 for beta chain variable domain of TCR clone 73973 (TRBV6-1, TRBJ2-2)
CASSFGQGANTGELFF

SEQ ID NO: 147947 - protein, 14 aa, Homo sapiens
  CDR3 for alpha chain variable domain of TCR clone 73974 (TRAV35, TRAJ22)
CAGLRPGSARQLTF

SEQ ID NO: 147948 - protein, 17 aa, Homo sapiens
  CDR3 for beta chain variable domain of TCR clone 73974 (TRBV20-1, TRBJ2-3)
CSASLLGRGGSADTQYF

SEQ ID NO: 147949 - protein, 18 aa, Homo sapiens
  CDR3 for alpha chain variable domain of TCR clone 73975 (TRAV9-2, TRAJ52)
CALSRHNAGGTSYGKLTF

SEQ ID NO: 147950 - protein, 13 aa, Homo sapiens
  CDR3 for beta chain variable domain of TCR clone 73975 (TRBV7-9, TRBJ1-2)
CASSLKRNYGYTF

SEQ ID NO: 147951 - protein, 15 aa, Homo sapiens
  CDR3 for alpha chain variable domain of TCR clone 73976 (TRAV38-2/DV8, TRAJ26)
CAYRSRDNYGQNFVF

SEQ ID NO: 147952 - protein, 14 aa, Homo sapiens
  CDR3 for beta chain variable domain of TCR clone 73976 (TRBV29-1, TRBJ1-3)
CSVAGRVVGNTIYF

SEQ ID NO: 147953 - protein, 12 aa, Homo sapiens
  CDR3 for alpha chain variable domain of TCR clone 73977 (TRAV30, TRAJ43)
CGTEKGAMTCAL

SEQ ID NO: 147954 - protein, 13 aa, Homo sapiens
  CDR3 for beta chain variable domain of TCR clone 73977 (TRBV27, TRBJ2-7)
CASSFSQGYEQYF

SEQ ID NO: 147955 - protein, 19 aa, Homo sapiens
  CDR3 for alpha chain variable domain of TCR clone 73978 (TRAV17, TRAJ17)
CATDGRPGVIKAAGNTLTF

SEQ ID NO: 147956 - protein, 17 aa, Homo sapiens
  CDR3 for beta chain variable domain of TCR clone 73978 (TRBV12-4, TRBJ1-1)
CASSLSGFRTMNTEAFF

SEQ ID NO: 147957 - protein, 14 aa, Homo sapiens
  CDR3 for alpha chain variable domain of TCR clone 73979 (TRAV8-1, TRAJ5)
CAVRTDTGRRALTF

SEQ ID NO: 147958 - protein, 15 aa, Homo sapiens
  CDR3 for beta chain variable domain of TCR clone 73979 (TRBV9, TRBJ2-1)
CASSLAGSSYNEQFF

SEQ ID NO: 147959 - protein, 20 aa, Homo sapiens
  CDR3 for alpha chain variable domain of TCR clone 73980 (TRAV12-2, TRAJ42)
SSVIRPPTSVKGGSQGNLIF

SEQ ID NO: 147960 - protein, 18 aa, Homo sapiens
  CDR3 for beta chain variable domain of TCR clone 73980 (TRBV11-2, TRBJ2-3)
CASSLGGASRGAPNTQYF

SEQ ID NO: 147961 - protein, 15 aa, Homo sapiens
  CDR3 for alpha chain variable domain of TCR clone 73981 (TRAV12-1, TRAJ42)
CVVTRDGGSHGNLIF

SEQ ID NO: 147962 - protein, 14 aa, Homo sapiens
  CDR3 for beta chain variable domain of TCR clone 73981 (TRBV11-2, TRBJ2-3)
CASSLGGGANTQYF

SEQ ID NO: 147963 - protein, 12 aa, Homo sapiens
  CDR3 for alpha chain variable domain of TCR clone 73982 (TRAV2, TRAJ10)
CASTGGGNKLTF

SEQ ID NO: 147964 - protein, 14 aa, Homo sapiens
  CDR3 for beta chain variable domain of TCR clone 73982 (TRBV7-2, TRBJ2-2)
CASRGQGAARELFF

SEQ ID NO: 147965 - protein, 14 aa, Homo sapiens
  CDR3 for alpha chain variable domain of TCR clone 73983 (TRAV1-2, TRAJ16)
CAFNRFSDGQKLLF

SEQ ID NO: 147966 - protein, 11 aa, Homo sapiens
  CDR3 for beta chain variable domain of TCR clone 73983 (TRBV4-1, TRBJ2-2)
CASEHIGELFF

SEQ ID NO: 147967 - protein, 12 aa, Homo sapiens
  CDR3 for alpha chain variable domain of TCR clone 73984 (TRAV12-1, TRAJ40)
CVVYSGTYKYIF

SEQ ID NO: 147968 - protein, 13 aa, Homo sapiens
  CDR3 for beta chain variable domain of TCR clone 73984 (TRBV15, TRBJ1-6)
CATSGGLNSPLHF

SEQ ID NO: 147969 - protein, 11 aa, Homo sapiens
  CDR3 for alpha chain variable domain of TCR clone 73985 (TRAV2, TRAJ33)
CAVESNYQLIW

SEQ ID NO: 147970 - protein, 12 aa, Homo sapiens
  CDR3 for beta chain variable domain of TCR clone 73985 (TRBV11-3, TRBJ2-2)
CASSLGGGELFF

SEQ ID NO: 147971 - protein, 14 aa, Homo sapiens
  CDR3 for alpha chain variable domain of TCR clone 73986 (TRAV8-4, TRAJ15)
CAVTIREAGTTLIF

SEQ ID NO: 147972 - protein, 13 aa, Homo sapiens
  CDR3 for beta chain variable domain of TCR clone 73986 (TRBV10-3, TRBJ2-7)
CAISEKGGYEQYF

SEQ ID NO: 147973 - protein, 11 aa, Homo sapiens
  CDR3 for alpha chain variable domain of TCR clone 73987 (TRAV21, TRAJ34)
CAPDNTDKLIF

SEQ ID NO: 147974 - protein, 14 aa, Homo sapiens
  CDR3 for beta chain variable domain of TCR clone 73987 (TRBV4-1, TRBJ1-5)
CASSPKGDNQPQHF

SEQ ID NO: 147975 - protein, 14 aa, Homo sapiens
  CDR3 for alpha chain variable domain of TCR clone 73988 (TRAV35, TRAJ22)
CAGLRPGSARQLTF

SEQ ID NO: 147976 - protein, 15 aa, Homo sapiens
  CDR3 for beta chain variable domain of TCR clone 73988 (TRBV12-4, TRBJ2-5)
CANSPPTGLQETQYF

SEQ ID NO: 147977 - protein, 14 aa, Homo sapiens
  CDR3 for alpha chain variable domain of TCR clone 73989 (TRAV1-2, TRAJ6)
CSVSLSGGSYIPTF

SEQ ID NO: 147978 - protein, 15 aa, Homo sapiens
  CDR3 for beta chain variable domain of TCR clone 73989 (TRBV28, TRBJ2-7)
CASSPGGRGFYEQYF

SEQ ID NO: 147979 - protein, 11 aa, Homo sapiens
  CDR3 for alpha chain variable domain of TCR clone 73990 (TRAV23/DV6, TRAJ49)
CAVAPVTSSIL

SEQ ID NO: 147980 - protein, 14 aa, Homo sapiens
  CDR3 for beta chain variable domain of TCR clone 73990 (TRBV19, TRBJ2-1)
CASPTFVLSCEQFF

SEQ ID NO: 147981 - protein, 12 aa, Homo sapiens
  CDR3 for alpha chain variable domain of TCR clone 73991 (TRAV8-3, TRAJ20)
CAVGGNDYKLSF

SEQ ID NO: 147982 - protein, 16 aa, Homo sapiens
  CDR3 for beta chain variable domain of TCR clone 73991 (TRBV19, TRBJ2-2)
CASRSPGTGATGELFF

SEQ ID NO: 147983 - protein, 12 aa, Homo sapiens
  CDR3 for alpha chain variable domain of TCR clone 73992 (TRAV8-3, TRAJ26)
CASDNYGQNFVF

SEQ ID NO: 147984 - protein, 13 aa, Homo sapiens
  CDR3 for beta chain variable domain of TCR clone 73992 (TRBV20-1, TRBJ1-1)
CSAPLGGGTEASF

SEQ ID NO: 147985 - protein, 14 aa, Homo sapiens
  CDR3 for alpha chain variable domain of TCR clone 73993 (TRAV13-2, TRAJ17)
FAENSKAAGNKLTF

SEQ ID NO: 147986 - protein, 11 aa, Homo sapiens
  CDR3 for beta chain variable domain of TCR clone 73993 (TRBV6-3, TRBJ2-3)
CATGQADTQYF

SEQ ID NO: 147987 - protein, 13 aa, Homo sapiens
  CDR3 for alpha chain variable domain of TCR clone 73994 (TRAV2, TRAJ40)
CAVVTSETYKYIF

SEQ ID NO: 147988 - protein, 14 aa, Homo sapiens
  CDR3 for beta chain variable domain of TCR clone 73994 (TRBV19, TRBJ2-1)
CASPTFVLGGEQFF

SEQ ID NO: 147989 - protein, 17 aa, Homo sapiens
  CDR3 for alpha chain variable domain of TCR clone 73995 (TRAV3, TRAJ6)
CAVRDGPRAGGSYIPTF

SEQ ID NO: 147990 - protein, 13 aa, Homo sapiens
  CDR3 for beta chain variable domain of TCR clone 73995 (TRBV7-2, TRBJ2-7)
CASPKTSFYEQYF

SEQ ID NO: 147991 - protein, 15 aa, Homo sapiens
  CDR3 for alpha chain variable domain of TCR clone 73996 (TRAV27, TRAJ38)
CAARRNASNNRKLIW

SEQ ID NO: 147992 - protein, 14 aa, Homo sapiens
  CDR3 for beta chain variable domain of TCR clone 73996 (TRBV7-2, TRBJ2-7)
CASSPRDGAYEQYF

SEQ ID NO: 147993 - protein, 14 aa, Homo sapiens
  CDR3 for alpha chain variable domain of TCR clone 73997 (TRAV8-4, TRAJ13)
CAVTLSGGYQKVTF

SEQ ID NO: 147994 - protein, 14 aa, Homo sapiens
  CDR3 for beta chain variable domain of TCR clone 73997 (TRBV7-2, TRBJ1-2)
CASSQTGATYGYTF

SEQ ID NO: 147995 - protein, 16 aa, Homo sapiens
  CDR3 for alpha chain variable domain of TCR clone 73998 (TRAV27, TRAJ13)
CAGAKSDSGGYQKVTF

SEQ ID NO: 147996 - protein, 13 aa, Homo sapiens
  CDR3 for beta chain variable domain of TCR clone 73998 (TRBV11-2, TRBJ2-2)
CASGRDREEELFF

SEQ ID NO: 147997 - protein, 17 aa, Homo sapiens
  CDR3 for alpha chain variable domain of TCR clone 73999 (TRAV12-2, TRAJ6)
CAPQGPPRAGGSYIPTF

SEQ ID NO: 147998 - protein, 16 aa, Homo sapiens
  CDR3 for beta chain variable domain of TCR clone 73999 (TRBV19, TRBJ2-2)
CASSTARAPNTGELFF

SEQ ID NO: 147999 - protein, 11 aa, Homo sapiens
  CDR3 for alpha chain variable domain of TCR clone 74000 (TRAV2, TRAJ33)
CAVDSNYQLIW

SEQ ID NO: 148000 - protein, 13 aa, Homo sapiens
  CDR3 for beta chain variable domain of TCR clone 74000 (TRBV12-4, TRBJ1-2)
CASSLRQGKGYTF

SEQ ID NO: 148001 - protein, 14 aa, Homo sapiens
  CDR3 for alpha chain variable domain of TCR clone 74001 (TRAV8-3, TRAJ6)
CAVGASGGSYTPTF

SEQ ID NO: 148002 - protein, 17 aa, Homo sapiens
  CDR3 for beta chain variable domain of TCR clone 74001 (TRBV18, TRBJ2-2)
CASSPSDPWQNTGELFF

SEQ ID NO: 148003 - protein, 15 aa, Homo sapiens
  CDR3 for alpha chain variable domain of TCR clone 74002 (TRAV35, TRAJ40)
CAGQLGTSGTYKYIF

SEQ ID NO: 148004 - protein, 14 aa, Homo sapiens
  CDR3 for beta chain variable domain of TCR clone 74002 (TRBV7-3, TRBJ2-1)
CASSLAGGTNEQFS

SEQ ID NO: 148005 - protein, 14 aa, Homo sapiens
  CDR3 for alpha chain variable domain of TCR clone 74003 (TRAV12-2, TRAJ40)
CAVKIPSGTYKYIF

SEQ ID NO: 148006 - protein, 12 aa, Homo sapiens
  CDR3 for beta chain variable domain of TCR clone 74003 (TRBV28, TRBJ1-2)
CASLTLAEGYTF

SEQ ID NO: 148007 - protein, 13 aa, Homo sapiens
  CDR3 for alpha chain variable domain of TCR clone 74004 (TRAV21, TRAJ15)
CAVPNQAGAALIF

SEQ ID NO: 148008 - protein, 15 aa, Homo sapiens
  CDR3 for beta chain variable domain of TCR clone 74004 (TRBV12-4, TRBJ2-7)
CASSRGLAGTYEQYF

SEQ ID NO: 148009 - protein, 13 aa, Homo sapiens
  CDR3 for alpha chain variable domain of TCR clone 74005 (TRAV16, TRAJ10)
CALLTGGGNKLTS

SEQ ID NO: 148010 - protein, 12 aa, Homo sapiens
  CDR3 for beta chain variable domain of TCR clone 74005 (TRBV28, TRBJ2-7)
CASTGNHYEQYF

SEQ ID NO: 148011 - protein, 16 aa, Homo sapiens
  CDR3 for alpha chain variable domain of TCR clone 74006 (TRAV23/DV6, TRAJ9)
CAASIGGNTGGFKTIF

SEQ ID NO: 148012 - protein, 14 aa, Homo sapiens
  CDR3 for beta chain variable domain of TCR clone 74006 (TRBV9, TRBJ2-7)
CASSVGVGSYEQYF

SEQ ID NO: 148013 - protein, 14 aa, Homo sapiens
  CDR3 for alpha chain variable domain of TCR clone 74007 (TRAV1-2, TRAJ16)
CAVNRFSDGQKLLF

SEQ ID NO: 148014 - protein, 16 aa, Homo sapiens
  CDR3 for beta chain variable domain of TCR clone 74007 (TRBV12-5, TRBJ2-5)
CASGPRTSGNRETQYF

SEQ ID NO: 148015 - protein, 14 aa, Homo sapiens
  CDR3 for alpha chain variable domain of TCR clone 74008 (TRAV26-1, TRAJ39)
CIVRGSRAGNMLTF

SEQ ID NO: 148016 - protein, 12 aa, Homo sapiens
  CDR3 for beta chain variable domain of TCR clone 74008 (TRBV11-2, TRBJ2-2)
CASSLGGGELFF

SEQ ID NO: 148017 - protein, 12 aa, Homo sapiens
  CDR3 for alpha chain variable domain of TCR clone 74009 (TRAV1-1, TRAJ9)
CAVDTGGFKTIF

SEQ ID NO: 148018 - protein, 14 aa, Homo sapiens
  CDR3 for beta chain variable domain of TCR clone 74009 (TRBV7-8, TRBJ2-5)
CASSATGGQETQHF

SEQ ID NO: 148019 - protein, 14 aa, Homo sapiens
  CDR3 for alpha chain variable domain of TCR clone 74010 (TRAV12-2, TRAJ40)
CAVKIPSGTYKYIF

SEQ ID NO: 148020 - protein, 14 aa, Homo sapiens
  CDR3 for beta chain variable domain of TCR clone 74010 (TRBV20-1, TRBJ2-3)
CSARGGTSTDTQYF

SEQ ID NO: 148021 - protein, 14 aa, Homo sapiens
  CDR3 for alpha chain variable domain of TCR clone 74011 (TRAV9-2, TRAJ39)
CALYFYNAGNMLTF

SEQ ID NO: 148022 - protein, 14 aa, Homo sapiens
  CDR3 for beta chain variable domain of TCR clone 74011 (TRBV6-1, TRBJ1-3)
CASVQGGGGNTIYF

SEQ ID NO: 148023 - protein, 15 aa, Homo sapiens
  CDR3 for alpha chain variable domain of TCR clone 74012 (TRAV12-1, TRAJ4)
CVVTPWMGGYNKLIF

SEQ ID NO: 148024 - protein, 11 aa, Homo sapiens
  CDR3 for beta chain variable domain of TCR clone 74012 (TRBV6-3, TRBJ2-3)
CATGQADTQYF

SEQ ID NO: 148025 - protein, 13 aa, Homo sapiens
  CDR3 for alpha chain variable domain of TCR clone 74013 (TRAV13-1, TRAJ20)
CAARVSNDYKLSF

SEQ ID NO: 148026 - protein, 13 aa, Homo sapiens
  CDR3 for beta chain variable domain of TCR clone 74013 (TRBV7-2, TRBJ2-7)
CASSSPSGSEQYF

SEQ ID NO: 148027 - protein, 12 aa, Homo sapiens
  CDR3 for alpha chain variable domain of TCR clone 74014 (TRAV27, TRAJ35)
CAGADFGNVLHC

SEQ ID NO: 148028 - protein, 17 aa, Homo sapiens
  CDR3 for beta chain variable domain of TCR clone 74014 (TRBV13, TRBJ2-3)
CASSLSRVAGGRNTQYF

SEQ ID NO: 148029 - protein, 15 aa, Homo sapiens
  CDR3 for alpha chain variable domain of TCR clone 74015 (TRAV12-3, TRAJ27)
CAMRAYNTNAGKSTF

SEQ ID NO: 148030 - protein, 13 aa, Homo sapiens
  CDR3 for beta chain variable domain of TCR clone 74015 (TRBV11-2, TRBJ2-5)
CASSRGPSENQYF

SEQ ID NO: 148031 - protein, 12 aa, Homo sapiens
  CDR3 for alpha chain variable domain of TCR clone 74016 (TRAV17, TRAJ12)
CATLRSSYKLIF

SEQ ID NO: 148032 - protein, 16 aa, Homo sapiens
  CDR3 for beta chain variable domain of TCR clone 74016 (TRBV28, TRBJ2-7)
CASGLFFETGGPEQYF

SEQ ID NO: 148033 - protein, 18 aa, Homo sapiens
  CDR3 for alpha chain variable domain of TCR clone 74017 (TRAV17, TRAJ45)
CATSLDLYSGGGADGLTF

SEQ ID NO: 148034 - protein, 15 aa, Homo sapiens
  CDR3 for beta chain variable domain of TCR clone 74017 (TRBV11-2, TRBJ2-1)
CASSKNRGLIYEQLF

SEQ ID NO: 148035 - protein, 11 aa, Homo sapiens
  CDR3 for alpha chain variable domain of TCR clone 74018 (TRAV3, TRAJ21)
CAVGSFNKFYF

SEQ ID NO: 148036 - protein, 16 aa, Homo sapiens
  CDR3 for beta chain variable domain of TCR clone 74018 (TRBV19, TRBJ2-1)
CARSKAGPSSYNEQFF

SEQ ID NO: 148037 - protein, 15 aa, Homo sapiens
  CDR3 for alpha chain variable domain of TCR clone 74019 (TRAV2, TRAJ15)
CAVEDRGQAGTALIF

SEQ ID NO: 148038 - protein, 12 aa, Homo sapiens
  CDR3 for beta chain variable domain of TCR clone 74019 (TRBV2, TRBJ2-1)
CAKREGYNEQFF

SEQ ID NO: 148039 - protein, 17 aa, Homo sapiens
  CDR3 for alpha chain variable domain of TCR clone 74020 (TRAV13-1, TRAJ28)
CAASPPYSGAGSYQLTF

SEQ ID NO: 148040 - protein, 15 aa, Homo sapiens
  CDR3 for beta chain variable domain of TCR clone 74020 (TRBV5-1, TRBJ2-1)
CASSPPRAPYNEQFF

SEQ ID NO: 148041 - protein, 12 aa, Homo sapiens
  CDR3 for alpha chain variable domain of TCR clone 74021 (TRAV20, TRAJ33)
CAVRGSNYQLIW

SEQ ID NO: 148042 - protein, 16 aa, Homo sapiens
  CDR3 for beta chain variable domain of TCR clone 74021 (TRBV27, TRBJ2-1)
CASSGGSGAIYNEQFF

SEQ ID NO: 148043 - protein, 10 aa, Homo sapiens
  CDR3 for alpha chain variable domain of TCR clone 74022 (TRAV1-2, TRAJ31)
CVSEDARLMF

SEQ ID NO: 148044 - protein, 14 aa, Homo sapiens
  CDR3 for beta chain variable domain of TCR clone 74022 (TRBV19, TRBJ2-1)
CASPTIVLSGEQFF

SEQ ID NO: 148045 - protein, 16 aa, Homo sapiens
  CDR3 for alpha chain variable domain of TCR clone 74023 (TRAV16, TRAJ4)
CALSRMFSGGYNKLIF

SEQ ID NO: 148046 - protein, 16 aa, Homo sapiens
  CDR3 for beta chain variable domain of TCR clone 74023 (TRBV24-1, TRBJ2-3)
CATSDPGTGATDTQYS

SEQ ID NO: 148047 - protein, 14 aa, Homo sapiens
  CDR3 for alpha chain variable domain of TCR clone 74024 (TRAV30, TRAJ33)
CGTVAPSSNYQLIW

SEQ ID NO: 148048 - protein, 16 aa, Homo sapiens
  CDR3 for beta chain variable domain of TCR clone 74024 (TRBV3-1, TRBJ2-5)
CASSPGQFNGFGTQYF

SEQ ID NO: 148049 - protein, 16 aa, Homo sapiens
  CDR3 for alpha chain variable domain of TCR clone 74025 (TRAV30, TRAJ24)
CGTEIVDADSWGKFQF

SEQ ID NO: 148050 - protein, 15 aa, Homo sapiens
  CDR3 for beta chain variable domain of TCR clone 74025 (TRBV12-4, TRBJ2-2)
CASSPNGSGTGELFF

SEQ ID NO: 148051 - protein, 10 aa, Homo sapiens
  CDR3 for alpha chain variable domain of TCR clone 74026 (TRAV13-1, TRAJ15)
INQAGTALIF

SEQ ID NO: 148052 - protein, 14 aa, Homo sapiens
  CDR3 for beta chain variable domain of TCR clone 74026 (TRBV7-9, TRBJ2-5)
CASSPAQDQETQYF

SEQ ID NO: 148053 - protein, 13 aa, Homo sapiens
  CDR3 for alpha chain variable domain of TCR clone 74027 (TRAV12-3, TRAJ43)
CAMIRPNNNDMRF

SEQ ID NO: 148054 - protein, 12 aa, Homo sapiens
  CDR3 for beta chain variable domain of TCR clone 74027 (TRBV11-2, TRBJ2-5)
RASSLGQETQYF

SEQ ID NO: 148055 - protein, 11 aa, Homo sapiens
  CDR3 for alpha chain variable domain of TCR clone 74028 (TRAV2, TRAJ13)
CASGGYQKVTF

SEQ ID NO: 148056 - protein, 16 aa, Homo sapiens
  CDR3 for beta chain variable domain of TCR clone 74028 (TRBV12-5, TRBJ2-5)
CASGPRTSGNQETQYL

SEQ ID NO: 148057 - protein, 13 aa, Homo sapiens
  CDR3 for alpha chain variable domain of TCR clone 74029 (TRAV8-6, TRAJ49)
CAVITNTGNQLYF

SEQ ID NO: 148058 - protein, 14 aa, Homo sapiens
  CDR3 for beta chain variable domain of TCR clone 74029 (TRBV5-1, TRBJ2-7)
CASSRGESLYEQYF

SEQ ID NO: 148059 - protein, 13 aa, Homo sapiens
  CDR3 for alpha chain variable domain of TCR clone 74030 (TRAV2, TRAJ40)
CAVVTSGTYKYIF

SEQ ID NO: 148060 - protein, 16 aa, Homo sapiens
  CDR3 for beta chain variable domain of TCR clone 74030 (TRBV27, TRBJ2-7)
CASSSERRDSAYEQYF

SEQ ID NO: 148061 - protein, 14 aa, Homo sapiens
  CDR3 for alpha chain variable domain of TCR clone 74031 (TRAV8-6, TRAJ8)
CAVNENTGFQKLVF

SEQ ID NO: 148062 - protein, 16 aa, Homo sapiens
  CDR3 for beta chain variable domain of TCR clone 74031 (TRBV2, TRBJ2-3)
CASSTSVEGVTDTQYF

SEQ ID NO: 148063 - protein, 15 aa, Homo sapiens
  CDR3 for alpha chain variable domain of TCR clone 74032 (TRAV26-1, TRAJ12)
IASSELMDSSYNLIF

SEQ ID NO: 148064 - protein, 11 aa, Homo sapiens
  CDR3 for beta chain variable domain of TCR clone 74032 (TRBV7-9, TRBJ2-3)
CASSPPDTQYF

SEQ ID NO: 148065 - protein, 16 aa, Homo sapiens
  CDR3 for alpha chain variable domain of TCR clone 74033 (TRAV3, TRAJ21)
CAVRDIERGNFNKFYF

SEQ ID NO: 148066 - protein, 18 aa, Homo sapiens
  CDR3 for beta chain variable domain of TCR clone 74033 (TRBV11-2, TRBJ2-3)
CASSLGGASRGAPNTQYF

SEQ ID NO: 148067 - protein, 23 aa, Homo sapiens
  CDR3 for alpha chain variable domain of TCR clone 74034 (TRAV26-1, TRAJ38)
CIADNAGNNHIQSPDPAVYQLRD

SEQ ID NO: 148068 - protein, 16 aa, Homo sapiens
  CDR3 for beta chain variable domain of TCR clone 74034 (TRBV7-9, TRBJ1-2)
CASSLGFSSGEDGYTF

SEQ ID NO: 148069 - protein, 14 aa, Homo sapiens
  CDR3 for alpha chain variable domain of TCR clone 74035 (TRAV1-2, TRAJ8)
CAVREDTGFQKLVF

SEQ ID NO: 148070 - protein, 14 aa, Homo sapiens
  CDR3 for beta chain variable domain of TCR clone 74035 (TRBV11-2, TRBJ2-1)
CASTTGQGNNEQFF

SEQ ID NO: 148071 - protein, 14 aa, Homo sapiens
  CDR3 for alpha chain variable domain of TCR clone 74036 (TRAV1-2, TRAJ16)
CAVNRFSDGQKRLF

SEQ ID NO: 148072 - protein, 14 aa, Homo sapiens
  CDR3 for beta chain variable domain of TCR clone 74036 (TRBV4-1, TRBJ2-2)
CASSQAVNTGELFF

SEQ ID NO: 148073 - protein, 14 aa, Homo sapiens
  CDR3 for alpha chain variable domain of TCR clone 74037 (TRAV1-2, TRAJ8)
CAVREDTGSQKLVF

SEQ ID NO: 148074 - protein, 12 aa, Homo sapiens
  CDR3 for beta chain variable domain of TCR clone 74037 (TRBV7-8, TRBJ2-7)
CASSLGDREQYF

SEQ ID NO: 148075 - protein, 19 aa, Homo sapiens
  CDR3 for alpha chain variable domain of TCR clone 74038 (TRAV2, TRAJ22)
CSSSRCGRQMLLEQRQLTF

SEQ ID NO: 148076 - protein, 16 aa, Homo sapiens
  CDR3 for beta chain variable domain of TCR clone 74038 (TRBV2, TRBJ2-5)
CASSETQGVGEETQYF

SEQ ID NO: 148077 - protein, 15 aa, Homo sapiens
  CDR3 for alpha chain variable domain of TCR clone 74039 (TRAV17, TRAJ22)
CAKVAPSGSARQLTF

SEQ ID NO: 148078 - protein, 14 aa, Homo sapiens
  CDR3 for beta chain variable domain of TCR clone 74039 (TRBV4-1, TRBJ2-2)
CASSQAVNTGELFF

SEQ ID NO: 148079 - protein, 13 aa, Homo sapiens
  CDR3 for alpha chain variable domain of TCR clone 74040 (TRAV1-2, TRAJ9)
CAVLNTGGFKTIF

SEQ ID NO: 148080 - protein, 13 aa, Homo sapiens
  CDR3 for beta chain variable domain of TCR clone 74040 (TRBV4-1, TRBJ2-7)
CASSQGQAYEQYF

SEQ ID NO: 148081 - protein, 12 aa, Homo sapiens
  CDR3 for alpha chain variable domain of TCR clone 74041 (TRAV17, TRAJ39)
CATGAAGNMLTF

SEQ ID NO: 148082 - protein, 14 aa, Homo sapiens
  CDR3 for beta chain variable domain of TCR clone 74041 (TRBV7-9, TRBJ1-2)
CASSRKGANYGYTF

SEQ ID NO: 148083 - protein, 17 aa, Homo sapiens
  CDR3 for alpha chain variable domain of TCR clone 74042 (TRAV3, TRAJ13)
CAVRDMRRTGGYQKVTF

SEQ ID NO: 148084 - protein, 14 aa, Homo sapiens
  CDR3 for beta chain variable domain of TCR clone 74042 (TRBV7-8, TRBJ2-3)
CASSLEAGTDTQYF

SEQ ID NO: 148085 - protein, 16 aa, Homo sapiens
  CDR3 for alpha chain variable domain of TCR clone 74043 (TRAV30, TRAJ24)
CGTEIVDADSWGKFQF

SEQ ID NO: 148086 - protein, 18 aa, Homo sapiens
  CDR3 for beta chain variable domain of TCR clone 74043 (TRBV7-9, TRBJ2-7)
CASSLTTSGSRTWYEQYF

SEQ ID NO: 148087 - protein, 16 aa, Homo sapiens
  CDR3 for alpha chain variable domain of TCR clone 74044 (TRAV13-1, TRAJ22)
CAAKGGRSGSARQLTF

SEQ ID NO: 148088 - protein, 15 aa, Homo sapiens
  CDR3 for beta chain variable domain of TCR clone 74044 (TRBV9, TRBJ1-6)
CASSVAGTGDSTLHF

SEQ ID NO: 148089 - protein, 14 aa, Homo sapiens
  CDR3 for alpha chain variable domain of TCR clone 74045 (TRAV12-2, TRAJ40)
CAVKIPSGTYKYIF

SEQ ID NO: 148090 - protein, 15 aa, Homo sapiens
  CDR3 for beta chain variable domain of TCR clone 74045 (TRBV6-1, TRBJ2-3)
CASSERGGITDTQYF

SEQ ID NO: 148091 - protein, 14 aa, Homo sapiens
  CDR3 for alpha chain variable domain of TCR clone 74046 (TRAV13-1, TRAJ53)
CAASISGSNYKLIF

SEQ ID NO: 148092 - protein, 15 aa, Homo sapiens
  CDR3 for beta chain variable domain of TCR clone 74046 (TRBV4-1, TRBJ1-4)
CASSDTGGTNEKLFF

SEQ ID NO: 148093 - protein, 12 aa, Homo sapiens
  CDR3 for alpha chain variable domain of TCR clone 74047 (TRAV3, TRAJ43)
CAVRDPNNDTRF

SEQ ID NO: 148094 - protein, 15 aa, Homo sapiens
  CDR3 for beta chain variable domain of TCR clone 74047 (TRBV27, TRBJ1-5)
CASSLGTGFDQPQHF

SEQ ID NO: 148095 - protein, 13 aa, Homo sapiens
  CDR3 for alpha chain variable domain of TCR clone 74048 (TRAV27, TRAJ49)
CAPRPYTGNQFYF

SEQ ID NO: 148096 - protein, 14 aa, Homo sapiens
  CDR3 for beta chain variable domain of TCR clone 74048 (TRBV18, TRBJ2-5)
CASSPGVSQETQYF

SEQ ID NO: 148097 - protein, 10 aa, Homo sapiens
  CDR3 for alpha chain variable domain of TCR clone 74049 (TRAV20, TRAJ22)
CAAPARQLTF

SEQ ID NO: 148098 - protein, 14 aa, Homo sapiens
  CDR3 for beta chain variable domain of TCR clone 74049 (TRBV28, TRBJ2-7)
CASTNRGRAYEQYF

SEQ ID NO: 148099 - protein, 17 aa, Homo sapiens
  CDR3 for alpha chain variable domain of TCR clone 74050 (TRAV26-2, TRAJ42)
CILRDVGYGGRQGNLIF

SEQ ID NO: 148100 - protein, 16 aa, Homo sapiens
  CDR3 for beta chain variable domain of TCR clone 74050 (TRBV6-5, TRBJ2-1)
CASSETLAGHYNEQFF

SEQ ID NO: 148101 - protein, 23 aa, Homo sapiens
  CDR3 for alpha chain variable domain of TCR clone 74051 (TRAV26-1, TRAJ38)
CIADNAGNNHIQNPDPAVYQLRD

SEQ ID NO: 148102 - protein, 12 aa, Homo sapiens
  CDR3 for beta chain variable domain of TCR clone 74051 (TRBV11-2, TRBJ2-2)
CASSPGGGELFF

SEQ ID NO: 148103 - protein, 11 aa, Homo sapiens
  CDR3 for alpha chain variable domain of TCR clone 74052 (TRAV13-1, TRAJ27)
CAAYNAGKSTF

SEQ ID NO: 148104 - protein, 17 aa, Homo sapiens
  CDR3 for beta chain variable domain of TCR clone 74052 (TRBV13, TRBJ2-3)
CASSLSRVAGGRNTQYF

SEQ ID NO: 148105 - protein, 15 aa, Homo sapiens
  CDR3 for alpha chain variable domain of TCR clone 74053 (TRAV17, TRAJ42)
CATDHYGGSQGNLIF

SEQ ID NO: 148106 - protein, 14 aa, Homo sapiens
  CDR3 for beta chain variable domain of TCR clone 74053 (TRBV7-9, TRBJ2-1)
CASRPTGLRNEQFF

SEQ ID NO: 148107 - protein, 15 aa, Homo sapiens
  CDR3 for alpha chain variable domain of TCR clone 74054 (TRAV12-1, TRAJ42)
CVVTRDGGSQGNLIF

SEQ ID NO: 148108 - protein, 14 aa, Homo sapiens
  CDR3 for beta chain variable domain of TCR clone 74054 (TRBV11-2, TRBJ2-3)
CARSLGGGANTQYF

SEQ ID NO: 148109 - protein, 12 aa, Homo sapiens
  CDR3 for alpha chain variable domain of TCR clone 74055 (TRAV5, TRAJ3)
CAEDSSASKIIF

SEQ ID NO: 148110 - protein, 14 aa, Homo sapiens
  CDR3 for beta chain variable domain of TCR clone 74055 (TRBV19, TRBJ2-1)
CASPTFVLSGEQFF

SEQ ID NO: 148111 - protein, 14 aa, Homo sapiens
  CDR3 for alpha chain variable domain of TCR clone 74056 (TRAV13-1, TRAJ20)
CAARPGSNDYKLSF

SEQ ID NO: 148112 - protein, 13 aa, Homo sapiens
  CDR3 for beta chain variable domain of TCR clone 74056 (TRBV20-1, TRBJ1-1)
CSAPPGGHTEASF

SEQ ID NO: 148113 - protein, 14 aa, Homo sapiens
  CDR3 for alpha chain variable domain of TCR clone 74057 (TRAV1-1, TRAJ27)
CAVIYNTNAGKSTF

SEQ ID NO: 148114 - protein, 14 aa, Homo sapiens
  CDR3 for beta chain variable domain of TCR clone 74057 (TRBV12-5, TRBJ2-5)
CASGSRTHQETQYF

SEQ ID NO: 148115 - protein, 16 aa, Homo sapiens
  CDR3 for alpha chain variable domain of TCR clone 74058 (TRAV3, TRAJ10)
CAVRDMRAGGGNKLNF

SEQ ID NO: 148116 - protein, 17 aa, Homo sapiens
  CDR3 for beta chain variable domain of TCR clone 74058 (TRBV28, TRBJ2-5)
CASSTPEGDALQETQYF

SEQ ID NO: 148117 - protein, 13 aa, Homo sapiens
  CDR3 for alpha chain variable domain of TCR clone 74059 (TRAV21, TRAJ20)
CAVGLRVDYKLSF

SEQ ID NO: 148118 - protein, 14 aa, Homo sapiens
  CDR3 for beta chain variable domain of TCR clone 74059 (TRBV20-1, TRBJ1-1)
CSAQTRIGGTEAFF

SEQ ID NO: 148119 - protein, 16 aa, Homo sapiens
  CDR3 for alpha chain variable domain of TCR clone 74060 (TRAV3, TRAJ21)
CAVRDIERGNFNKFYF

SEQ ID NO: 148120 - protein, 15 aa, Homo sapiens
  CDR3 for beta chain variable domain of TCR clone 74060 (TRBV11-2, TRBJ2-1)
CASSLGTSGLNEQFF

SEQ ID NO: 148121 - protein, 16 aa, Homo sapiens
  CDR3 for alpha chain variable domain of TCR clone 74061 (TRAV20, TRAJ52)
CAVLPDGGTSYGKLTF

SEQ ID NO: 148122 - protein, 12 aa, Homo sapiens
  CDR3 for beta chain variable domain of TCR clone 74061 (TRBV19, TRBJ2-1)
CVSSQISNEQFF

SEQ ID NO: 148123 - protein, 13 aa, Homo sapiens
  CDR3 for alpha chain variable domain of TCR clone 74062 (TRAV13-2, TRAJ48)
CAEMDFGNEKLTF

SEQ ID NO: 148124 - protein, 15 aa, Homo sapiens
  CDR3 for beta chain variable domain of TCR clone 74062 (TRBV7-9, TRBJ1-6)
CASSSPGGGNSPLHF

SEQ ID NO: 148125 - protein, 17 aa, Homo sapiens
  CDR3 for alpha chain variable domain of TCR clone 74063 (TRAV3, TRAJ6)
CSVRDGPRAGGSYIPTF

SEQ ID NO: 148126 - protein, 13 aa, Homo sapiens
  CDR3 for beta chain variable domain of TCR clone 74063 (TRBV20-1, TRBJ1-6)
CSAPLGVGSPLHF

SEQ ID NO: 148127 - protein, 15 aa, Homo sapiens
  CDR3 for alpha chain variable domain of TCR clone 74064 (TRAV4, TRAJ39)
CLVGPNNNAGNRLTF

SEQ ID NO: 148128 - protein, 13 aa, Homo sapiens
  CDR3 for beta chain variable domain of TCR clone 74064 (TRBV11-2, TRBJ2-5)
CASSSTGEETQYF

SEQ ID NO: 148129 - protein, 16 aa, Homo sapiens
  CDR3 for alpha chain variable domain of TCR clone 74065 (TRAV30, TRAJ24)
CGTEIVDADSWGKFQF

SEQ ID NO: 148130 - protein, 17 aa, Homo sapiens
  CDR3 for beta chain variable domain of TCR clone 74065 (TRBV20-1, TRBJ2-1)
RSASSSGLAGSYNEQFF

SEQ ID NO: 148131 - protein, 18 aa, Homo sapiens
  CDR3 for alpha chain variable domain of TCR clone 74066 (TRAV26-1, TRAJ23)
CIVRVGLEVWNQGGKLIF

SEQ ID NO: 148132 - protein, 16 aa, Homo sapiens
  CDR3 for beta chain variable domain of TCR clone 74066 (TRBV15, TRBJ2-3)
CATSRDLGIVTDTQYF

SEQ ID NO: 148133 - protein, 13 aa, Homo sapiens
  CDR3 for alpha chain variable domain of TCR clone 74067 (TRAV35, TRAJ36)
CAGPRIGANNLFF

SEQ ID NO: 148134 - protein, 15 aa, Homo sapiens
  CDR3 for beta chain variable domain of TCR clone 74067 (TRBV7-9, TRBJ1-6)
CASSSPGRGNSPLHF

SEQ ID NO: 148135 - protein, 11 aa, Homo sapiens
  CDR3 for alpha chain variable domain of TCR clone 74068 (TRAV21, TRAJ31)
CAVRNNARLMF

SEQ ID NO: 148136 - protein, 13 aa, Homo sapiens
  CDR3 for beta chain variable domain of TCR clone 74068 (TRBV19, TRBJ1-1)
CASSGQVNTEAFF

SEQ ID NO: 148137 - protein, 12 aa, Homo sapiens
  CDR3 for alpha chain variable domain of TCR clone 74069 (TRAV26-1, TRAJ26)
CIVFIYGQNFVF

SEQ ID NO: 148138 - protein, 13 aa, Homo sapiens
  CDR3 for beta chain variable domain of TCR clone 74069 (TRBV10-3, TRBJ2-7)
CASKLAVNYEQYF

SEQ ID NO: 148139 - protein, 13 aa, Homo sapiens
  CDR3 for alpha chain variable domain of TCR clone 74070 (TRAV12-3, TRAJ9)
FAMRNTGGFKTIF

SEQ ID NO: 148140 - protein, 14 aa, Homo sapiens
  CDR3 for beta chain variable domain of TCR clone 74070 (TRBV11-2, TRBJ2-7)
CASSSTGEGYEQYF

SEQ ID NO: 148141 - protein, 12 aa, Homo sapiens
  CDR3 for alpha chain variable domain of TCR clone 74071 (TRAV23/DV6, TRAJ30)
CAASKGDDKIIF

SEQ ID NO: 148142 - protein, 15 aa, Homo sapiens
  CDR3 for beta chain variable domain of TCR clone 74071 (TRBV29-1, TRBJ2-1)
CSGRDGKSSYNEQFF

SEQ ID NO: 148143 - protein, 14 aa, Homo sapiens
  CDR3 for alpha chain variable domain of TCR clone 74072 (TRAV17, TRAJ11)
CATDTSRGYSTLTF

SEQ ID NO: 148144 - protein, 13 aa, Homo sapiens
  CDR3 for beta chain variable domain of TCR clone 74072 (TRBV19, TRBJ2-5)
FASRDSRRETQYF

SEQ ID NO: 148145 - protein, 14 aa, Homo sapiens
  CDR3 for alpha chain variable domain of TCR clone 74073 (TRAV14/DV4, TRAJ13)
CAMIHSGGYQKVTF

SEQ ID NO: 148146 - protein, 14 aa, Homo sapiens
  CDR3 for beta chain variable domain of TCR clone 74073 (TRBV19, TRBJ2-7)
CASSMGQGAIEQYF

SEQ ID NO: 148147 - protein, 15 aa, Homo sapiens
  CDR3 for alpha chain variable domain of TCR clone 74074 (TRAV3, TRAJ22)
CAVRDRGGSARQLTF

SEQ ID NO: 148148 - protein, 16 aa, Homo sapiens
  CDR3 for beta chain variable domain of TCR clone 74074 (TRBV4-2, TRBJ2-4)
CASNQELRRAKNIQYF

SEQ ID NO: 148149 - protein, 18 aa, Homo sapiens
  CDR3 for alpha chain variable domain of TCR clone 74075 (TRAV26-1, TRAJ5)
CIVRVVPPRYTGRRALTF

SEQ ID NO: 148150 - protein, 15 aa, Homo sapiens
  CDR3 for beta chain variable domain of TCR clone 74075 (TRBV7-9, TRBJ2-7)
CASSLPMGQANEQYF

SEQ ID NO: 148151 - protein, 12 aa, Homo sapiens
  CDR3 for alpha chain variable domain of TCR clone 74076 (TRAV27, TRAJ36)
ASTPAGANNLFF

SEQ ID NO: 148152 - protein, 14 aa, Homo sapiens
  CDR3 for beta chain variable domain of TCR clone 74076 (TRBV19, TRBJ2-1)
CASPTFVLSGEQFF

SEQ ID NO: 148153 - protein, 12 aa, Homo sapiens
  CDR3 for alpha chain variable domain of TCR clone 74077 (TRAV16, TRAJ10)
CSRTGGGNKLTI

SEQ ID NO: 148154 - protein, 15 aa, Homo sapiens
  CDR3 for beta chain variable domain of TCR clone 74077 (TRBV6-3, TRBJ2-7)
CASSSPGTVFYEQYF

SEQ ID NO: 148155 - protein, 12 aa, Homo sapiens
  CDR3 for alpha chain variable domain of TCR clone 74078 (TRAV8-3, TRAJ20)
CAVGANDYKLSF

SEQ ID NO: 148156 - protein, 16 aa, Homo sapiens
  CDR3 for beta chain variable domain of TCR clone 74078 (TRBV19, TRBJ2-2)
CGSRSPGTGATGELFF

SEQ ID NO: 148157 - protein, 17 aa, Homo sapiens
  CDR3 for alpha chain variable domain of TCR clone 74079 (TRAV2, TRAJ36)
CAVEDRGNWGKQPLLWD

SEQ ID NO: 148158 - protein, 14 aa, Homo sapiens
  CDR3 for beta chain variable domain of TCR clone 74079 (TRBV7-9, TRBJ2-5)
CASSLDTAQENQYF

SEQ ID NO: 148159 - protein, 13 aa, Homo sapiens
  CDR3 for alpha chain variable domain of TCR clone 74080 (TRAV36/DV7, TRAJ37)
CAVFSSNTGKLIF

SEQ ID NO: 148160 - protein, 15 aa, Homo sapiens
  CDR3 for beta chain variable domain of TCR clone 74080 (TRBV12-4, TRBJ2-5)
CRQFFVRGRQETQYF

SEQ ID NO: 148161 - protein, 14 aa, Homo sapiens
  CDR3 for alpha chain variable domain of TCR clone 74081 (TRAV21, TRAJ35)
CAVMPIGFGNVLHC

SEQ ID NO: 148162 - protein, 12 aa, Homo sapiens
  CDR3 for beta chain variable domain of TCR clone 74081 (TRBV7-9, TRBJ2-7)
CASSIKWEEQYF

SEQ ID NO: 148163 - protein, 17 aa, Homo sapiens
  CDR3 for alpha chain variable domain of TCR clone 74082 (TRAV27, TRAJ42)
CAERGIYYGGSQGNLIF

SEQ ID NO: 148164 - protein, 14 aa, Homo sapiens
  CDR3 for beta chain variable domain of TCR clone 74082 (TRBV6-6, TRBJ2-3)
CASRLQREADTQYF

SEQ ID NO: 148165 - protein, 15 aa, Homo sapiens
  CDR3 for alpha chain variable domain of TCR clone 74083 (TRAV17, TRAJ48)
CATDETNFGNEKLTF

SEQ ID NO: 148166 - protein, 13 aa, Homo sapiens
  CDR3 for beta chain variable domain of TCR clone 74083 (TRBV12-4, TRBJ1-5)
CASSPDRAQPQHL

SEQ ID NO: 148167 - protein, 14 aa, Homo sapiens
  CDR3 for alpha chain variable domain of TCR clone 74084 (TRAV3, TRAJ33)
CAVRDMDSNYPLIW

SEQ ID NO: 148168 - protein, 19 aa, Homo sapiens
  CDR3 for beta chain variable domain of TCR clone 74084 (TRBV7-3, TRBJ1-2)
CASSFPQGNDGELWLHLRF

SEQ ID NO: 148169 - protein, 14 aa, Homo sapiens
  CDR3 for alpha chain variable domain of TCR clone 74085 (TRAV12-2, TRAJ13)
CAVKKTGGYQKVTF

SEQ ID NO: 148170 - protein, 14 aa, Homo sapiens
  CDR3 for beta chain variable domain of TCR clone 74085 (TRBV11-2, TRBJ2-5)
CASSRTGGIETQYF

SEQ ID NO: 148171 - protein, 12 aa, Homo sapiens
  CDR3 for alpha chain variable domain of TCR clone 74086 (TRAV13-1, TRAJ21)
CAAKEGFNKFYF

SEQ ID NO: 148172 - protein, 16 aa, Homo sapiens
  CDR3 for beta chain variable domain of TCR clone 74086 (TRBV7-2, TRBJ2-6)
CASSLAGRSGANVLTS

SEQ ID NO: 148173 - protein, 14 aa, Homo sapiens
  CDR3 for alpha chain variable domain of TCR clone 74087 (TRAV3, TRAJ9)
CAVRGNTGGFKTIF

SEQ ID NO: 148174 - protein, 14 aa, Homo sapiens
  CDR3 for beta chain variable domain of TCR clone 74087 (TRBV7-2, TRBJ2-7)
CASSPKTSFYEQYF

SEQ ID NO: 148175 - protein, 15 aa, Homo sapiens
  CDR3 for alpha chain variable domain of TCR clone 74088 (TRAV8-3, TRAJ40)
CAAPSLGSGAYRYIF

SEQ ID NO: 148176 - protein, 16 aa, Homo sapiens
  CDR3 for beta chain variable domain of TCR clone 74088 (TRBV7-3, TRBJ2-3)
CASSLSGYRPEDTQYF

SEQ ID NO: 148177 - protein, 18 aa, Homo sapiens
  CDR3 for alpha chain variable domain of TCR clone 74089 (TRAV21, TRAJ52)
CAVRPSPAGGTSYGKLTF

SEQ ID NO: 148178 - protein, 17 aa, Homo sapiens
  CDR3 for beta chain variable domain of TCR clone 74089 (TRBV2, TRBJ1-4)
CASSKRELTQGEEKLFF

SEQ ID NO: 148179 - protein, 19 aa, Homo sapiens
  CDR3 for alpha chain variable domain of TCR clone 74090 (TRAV1-2, TRAJ26)
CLLPLCCERPDNYGQNFIF

SEQ ID NO: 148180 - protein, 14 aa, Homo sapiens
  CDR3 for beta chain variable domain of TCR clone 74090 (TRBV27, TRBJ2-1)
CASSATGGYNEQFF

SEQ ID NO: 148181 - protein, 12 aa, Homo sapiens
  CDR3 for alpha chain variable domain of TCR clone 74091 (TRAV8-3, TRAJ26)
CAGDNYGQNFVF

SEQ ID NO: 148182 - protein, 12 aa, Homo sapiens
  CDR3 for beta chain variable domain of TCR clone 74091 (TRBV11-2, TRBJ2-2)
CASSLGGGELVF

SEQ ID NO: 148183 - protein, 12 aa, Homo sapiens
  CDR3 for alpha chain variable domain of TCR clone 74092 (TRAV2, TRAJ10)
CCGTGGGNKLTF

SEQ ID NO: 148184 - protein, 14 aa, Homo sapiens
  CDR3 for beta chain variable domain of TCR clone 74092 (TRBV20-1, TRBJ2-3)
CSAGGRRGTDTQYF

SEQ ID NO: 148185 - protein, 16 aa, Homo sapiens
  CDR3 for alpha chain variable domain of TCR clone 74093 (TRAV3, TRAJ13)
CAVRDLRSGGYQKVTF

SEQ ID NO: 148186 - protein, 15 aa, Homo sapiens
  CDR3 for beta chain variable domain of TCR clone 74093 (TRBV19, TRBJ1-2)
CASSVGQVLNYGYTF

SEQ ID NO: 148187 - protein, 12 aa, Homo sapiens
  CDR3 for alpha chain variable domain of TCR clone 74094 (TRAV3, TRAJ31)
CAVRDGNARLMF

SEQ ID NO: 148188 - protein, 18 aa, Homo sapiens
  CDR3 for beta chain variable domain of TCR clone 74094 (TRBV7-2, TRBJ2-3)
CASSLKRGGSGITDTQYF

SEQ ID NO: 148189 - protein, 15 aa, Homo sapiens
  CDR3 for alpha chain variable domain of TCR clone 74095 (TRAV13-1, TRAJ44)
CAASRGGGTASKLTL

SEQ ID NO: 148190 - protein, 12 aa, Homo sapiens
  CDR3 for beta chain variable domain of TCR clone 74095 (TRBV11-2, TRBJ2-2)
CASSLGGGELFF

SEQ ID NO: 148191 - protein, 12 aa, Homo sapiens
  CDR3 for alpha chain variable domain of TCR clone 74096 (TRAV12-1, TRAJ34)
CVVAGATDKLIF

SEQ ID NO: 148192 - protein, 15 aa, Homo sapiens
  CDR3 for beta chain variable domain of TCR clone 74096 (TRBV9, TRBJ1-6)
CASSVAGTGDSPLHF

SEQ ID NO: 148193 - protein, 14 aa, Homo sapiens
  CDR3 for alpha chain variable domain of TCR clone 74097 (TRAV17, TRAJ4)
CATAPFGGYNKLIF

SEQ ID NO: 148194 - protein, 13 aa, Homo sapiens
  CDR3 for beta chain variable domain of TCR clone 74097 (TRBV12-4, TRBJ1-3)
CASSLASGNTIYF

SEQ ID NO: 148195 - protein, 13 aa, Homo sapiens
  CDR3 for alpha chain variable domain of TCR clone 74098 (TRAV3, TRAJ15)
CAVRDQAETALIF

SEQ ID NO: 148196 - protein, 15 aa, Homo sapiens
  CDR3 for beta chain variable domain of TCR clone 74098 (TRBV11-1, TRBJ2-7)
CASSLNYGASYEQYF

SEQ ID NO: 148197 - protein, 15 aa, Homo sapiens
  CDR3 for alpha chain variable domain of TCR clone 74099 (TRAV21, TRAJ45)
CAVSYSGGCADGLTF

SEQ ID NO: 148198 - protein, 13 aa, Homo sapiens
  CDR3 for beta chain variable domain of TCR clone 74099 (TRBV20-1, TRBJ2-5)
CSAATELQETQYF

SEQ ID NO: 148199 - protein, 12 aa, Homo sapiens
  CDR3 for alpha chain variable domain of TCR clone 74100 (TRAV13-1, TRAJ43)
CAAGRFNDDMRF

SEQ ID NO: 148200 - protein, 14 aa, Homo sapiens
  CDR3 for beta chain variable domain of TCR clone 74100 (TRBV6-3, TRBJ2-5)
CASRRDGGEETQYF

SEQ ID NO: 148201 - protein, 13 aa, Homo sapiens
  CDR3 for alpha chain variable domain of TCR clone 74101 (TRAV27, TRAJ41)
CAGEGNSGYALNF

SEQ ID NO: 148202 - protein, 16 aa, Homo sapiens
  CDR3 for beta chain variable domain of TCR clone 74101 (TRBV5-1, TRBJ2-2)
CASSSRTGGRTGELFF

SEQ ID NO: 148203 - protein, 13 aa, Homo sapiens
  CDR3 for alpha chain variable domain of TCR clone 74102 (TRAV17, TRAJ5)
CAPMDTGRRALTF

SEQ ID NO: 148204 - protein, 14 aa, Homo sapiens
  CDR3 for beta chain variable domain of TCR clone 74102 (TRBV25-1, TRBJ1-1)
CASTHLGGNTEAFF

SEQ ID NO: 148205 - protein, 17 aa, Homo sapiens
  CDR3 for alpha chain variable domain of TCR clone 74103 (TRAV4, TRAJ42)
CLVGVLDYGGSQGNLIF

SEQ ID NO: 148206 - protein, 12 aa, Homo sapiens
  CDR3 for beta chain variable domain of TCR clone 74103 (TRBV20-1, TRBJ2-1)
CSAQYTYNEQFF

SEQ ID NO: 148207 - protein, 13 aa, Homo sapiens
  CDR3 for alpha chain variable domain of TCR clone 74104 (TRAV3, TRAJ21)
CSVREPDFNKFYF

SEQ ID NO: 148208 - protein, 12 aa, Homo sapiens
  CDR3 for beta chain variable domain of TCR clone 74104 (TRBV5-1, TRBJ2-4)
LAGEWTKNIQYF

SEQ ID NO: 148209 - protein, 13 aa, Homo sapiens
  CDR3 for alpha chain variable domain of TCR clone 74105 (TRAV3, TRAJ21)
CAVIEPDFNKFYF

SEQ ID NO: 148210 - protein, 17 aa, Homo sapiens
  CDR3 for beta chain variable domain of TCR clone 74105 (TRBV7-8, TRBJ2-6)
CASSAGTGGAGANVLTF

SEQ ID NO: 148211 - protein, 16 aa, Homo sapiens
  CDR3 for alpha chain variable domain of TCR clone 74106 (TRAV26-1, TRAJ37)
CIVRGDGSGNTGKLIF

SEQ ID NO: 148212 - protein, 17 aa, Homo sapiens
  CDR3 for beta chain variable domain of TCR clone 74106 (TRBV4-1, TRBJ2-7)
SASSRDPLGVRGGEQYF

SEQ ID NO: 148213 - protein, 17 aa, Homo sapiens
  CDR3 for alpha chain variable domain of TCR clone 74107 (TRAV3, TRAJ6)
RAVRDGPRAGGSYIPTF

SEQ ID NO: 148214 - protein, 13 aa, Homo sapiens
  CDR3 for beta chain variable domain of TCR clone 74107 (TRBV27, TRBJ1-1)
CASSLSIGAEAFF

SEQ ID NO: 148215 - protein, 16 aa, Homo sapiens
  CDR3 for alpha chain variable domain of TCR clone 74108 (TRAV30, TRAJ24)
CGTEIVDADSWGKFQF

SEQ ID NO: 148216 - protein, 11 aa, Homo sapiens
  CDR3 for beta chain variable domain of TCR clone 74108 (TRBV19, TRBJ1-1)
CASSIGSEAFS

SEQ ID NO: 148217 - protein, 17 aa, Homo sapiens
  CDR3 for alpha chain variable domain of TCR clone 74109 (TRAV8-6, TRAJ58)
CAVSSWVGETSGSRLTF

SEQ ID NO: 148218 - protein, 14 aa, Homo sapiens
  CDR3 for beta chain variable domain of TCR clone 74109 (TRBV4-2, TRBJ2-1)
CASILDRAYNEQFF

SEQ ID NO: 148219 - protein, 18 aa, Homo sapiens
  CDR3 for alpha chain variable domain of TCR clone 74110 (TRAV21, TRAJ52)
CAVRPSPAGGTSYGKLTF

SEQ ID NO: 148220 - protein, 14 aa, Homo sapiens
  CDR3 for beta chain variable domain of TCR clone 74110 (TRBV5-1, TRBJ1-1)
CASSLQGASTEAFF

SEQ ID NO: 148221 - protein, 16 aa, Homo sapiens
  CDR3 for alpha chain variable domain of TCR clone 74111 (TRAV16, TRAJ4)
CALSRMFSGGYNKLLF

SEQ ID NO: 148222 - protein, 16 aa, Homo sapiens
  CDR3 for beta chain variable domain of TCR clone 74111 (TRBV12-4, TRBJ1-5)
CASSRPVGGSNQPQHF

SEQ ID NO: 148223 - protein, 13 aa, Homo sapiens
  CDR3 for alpha chain variable domain of TCR clone 74112 (TRAV27, TRAJ56)
CAGKPGANSKLTF

SEQ ID NO: 148224 - protein, 18 aa, Homo sapiens
  CDR3 for beta chain variable domain of TCR clone 74112 (TRBV11-2, TRBJ2-3)
CASRLGGASRGAPNTQYF

SEQ ID NO: 148225 - protein, 11 aa, Homo sapiens
  CDR3 for alpha chain variable domain of TCR clone 74113 (TRAV2, TRAJ13)
CASGGYQKVTF

SEQ ID NO: 148226 - protein, 14 aa, Homo sapiens
  CDR3 for beta chain variable domain of TCR clone 74113 (TRBV19, TRBJ1-2)
CASSVLGYNYGYTF

SEQ ID NO: 148227 - protein, 14 aa, Homo sapiens
  CDR3 for alpha chain variable domain of TCR clone 74114 (TRAV12-2, TRAJ17)
CAVLFKASGNKLTF

SEQ ID NO: 148228 - protein, 17 aa, Homo sapiens
  CDR3 for beta chain variable domain of TCR clone 74114 (TRBV11-2, TRBJ2-1)
CASSLYPPGVEYNEQFF

SEQ ID NO: 148229 - protein, 13 aa, Homo sapiens
  CDR3 for alpha chain variable domain of TCR clone 74115 (TRAV13-2, TRAJ48)
CAEMDFGNEKLTF

SEQ ID NO: 148230 - protein, 14 aa, Homo sapiens
  CDR3 for beta chain variable domain of TCR clone 74115 (TRBV7-9, TRBJ2-7)
CASSRPGGPYEQYF

SEQ ID NO: 148231 - protein, 14 aa, Homo sapiens
  CDR3 for alpha chain variable domain of TCR clone 74116 (TRAV12-3, TRAJ10)
SHLPLTGGGNKLTF

SEQ ID NO: 148232 - protein, 15 aa, Homo sapiens
  CDR3 for beta chain variable domain of TCR clone 74116 (TRBV28, TRBJ1-5)
CASSPGMKGNQPQHF

SEQ ID NO: 148233 - protein, 14 aa, Homo sapiens
  CDR3 for alpha chain variable domain of TCR clone 74117 (TRAV21, TRAJ38)
CAVMGAGNNRKLIW

SEQ ID NO: 148234 - protein, 13 aa, Homo sapiens
  CDR3 for beta chain variable domain of TCR clone 74117 (TRBV7-3, TRBJ2-5)
CTSSIGFFETQYF

SEQ ID NO: 148235 - protein, 19 aa, Homo sapiens
  CDR3 for alpha chain variable domain of TCR clone 74118 (TRAV1-2, TRAJ26)
CLLPLCCERPDNYGQNFVF

SEQ ID NO: 148236 - protein, 14 aa, Homo sapiens
  CDR3 for beta chain variable domain of TCR clone 74118 (TRBV4-1, TRBJ2-2)
CASSQAVNTGELFF

SEQ ID NO: 148237 - protein, 23 aa, Homo sapiens
  CDR3 for alpha chain variable domain of TCR clone 74119 (TRAV26-1, TRAJ38)
CIADNAGNNHIHNPDPAVYQLRD

SEQ ID NO: 148238 - protein, 12 aa, Homo sapiens
  CDR3 for beta chain variable domain of TCR clone 74119 (TRBV11-2, TRBJ2-2)
CASSLGGGELFF

SEQ ID NO: 148239 - protein, 12 aa, Homo sapiens
  CDR3 for alpha chain variable domain of TCR clone 74120 (TRAV4, TRAJ26)
CLVGDYGQNIVF

SEQ ID NO: 148240 - protein, 16 aa, Homo sapiens
  CDR3 for beta chain variable domain of TCR clone 74120 (TRBV7-2, TRBJ1-2)
CASSSNQDRRGHGYTF

SEQ ID NO: 148241 - protein, 14 aa, Homo sapiens
  CDR3 for alpha chain variable domain of TCR clone 74121 (TRAV13-1, TRAJ9)
CAASALTGGFKTIF

SEQ ID NO: 148242 - protein, 13 aa, Homo sapiens
  CDR3 for beta chain variable domain of TCR clone 74121 (TRBV20-1, TRBJ1-1)
CSAGTLGNTEAFF

SEQ ID NO: 148243 - protein, 14 aa, Homo sapiens
  CDR3 for alpha chain variable domain of TCR clone 74122 (TRAV13-1, TRAJ44)
CAAKATGTASKRTF

SEQ ID NO: 148244 - protein, 17 aa, Homo sapiens
  CDR3 for beta chain variable domain of TCR clone 74122 (TRBV7-3, TRBJ2-3)
RASSLMKRMRGADTQYF

SEQ ID NO: 148245 - protein, 16 aa, Homo sapiens
  CDR3 for alpha chain variable domain of TCR clone 74123 (TRAV16, TRAJ4)
FALSRMFSGGYNKLIF

SEQ ID NO: 148246 - protein, 16 aa, Homo sapiens
  CDR3 for beta chain variable domain of TCR clone 74123 (TRBV12-4, TRBJ1-5)
CASSRPVGGSNQPQHF

SEQ ID NO: 148247 - protein, 14 aa, Homo sapiens
  CDR3 for alpha chain variable domain of TCR clone 74124 (TRAV12-3, TRAJ10)
SHLPLTGGGNKLTF

SEQ ID NO: 148248 - protein, 18 aa, Homo sapiens
  CDR3 for beta chain variable domain of TCR clone 74124 (TRBV20-1, TRBJ2-3)
CSASGLAGGPGTTDTQYF

SEQ ID NO: 148249 - protein, 18 aa, Homo sapiens
  CDR3 for alpha chain variable domain of TCR clone 74125 (TRAV3, TRAJ17)
CAVRARRGGRSCRQQANF

SEQ ID NO: 148250 - protein, 16 aa, Homo sapiens
  CDR3 for beta chain variable domain of TCR clone 74125 (TRBV7-9, TRBJ1-2)
CASSLGFSSGEDGYTF

SEQ ID NO: 148251 - protein, 14 aa, Homo sapiens
  CDR3 for alpha chain variable domain of TCR clone 74126 (TRAV8-3, TRAJ4)
CAVGAAGGYNQLIF

SEQ ID NO: 148252 - protein, 15 aa, Homo sapiens
  CDR3 for beta chain variable domain of TCR clone 74126 (TRBV6-5, TRBJ2-1)
CASSYDAGAGNEQFF

SEQ ID NO: 148253 - protein, 14 aa, Homo sapiens
  CDR3 for alpha chain variable domain of TCR clone 74127 (TRAV17, TRAJ34)
CATDSLDGTDKLIF

SEQ ID NO: 148254 - protein, 13 aa, Homo sapiens
  CDR3 for beta chain variable domain of TCR clone 74127 (TRBV11-2, TRBJ2-7)
CASSGTRPYEQYF

SEQ ID NO: 148255 - protein, 14 aa, Homo sapiens
  CDR3 for alpha chain variable domain of TCR clone 74128 (TRAV12-2, TRAJ13)
CAVKKTGGYQKVTF

SEQ ID NO: 148256 - protein, 11 aa, Homo sapiens
  CDR3 for beta chain variable domain of TCR clone 74128 (TRBV7-9, TRBJ2-3)
CASSPTDTQYF

SEQ ID NO: 148257 - protein, 13 aa, Homo sapiens
  CDR3 for alpha chain variable domain of TCR clone 74129 (TRAV25, TRAJ17)
CAGLRAAGNKLTF

SEQ ID NO: 148258 - protein, 13 aa, Homo sapiens
  CDR3 for beta chain variable domain of TCR clone 74129 (TRBV7-3, TRBJ1-1)
CASSQDWGAEAFF

SEQ ID NO: 148259 - protein, 14 aa, Homo sapiens
  CDR3 for alpha chain variable domain of TCR clone 74130 (TRAV12-3, TRAJ10)
SHLPLTGGGNKLTF

SEQ ID NO: 148260 - protein, 13 aa, Homo sapiens
  CDR3 for beta chain variable domain of TCR clone 74130 (TRBV7-6, TRBJ1-2)
CASSLVADYGYTF

SEQ ID NO: 148261 - protein, 14 aa, Homo sapiens
  CDR3 for alpha chain variable domain of TCR clone 74131 (TRAV1-2, TRAJ16)
CAVNRFSDGQKLLF

SEQ ID NO: 148262 - protein, 15 aa, Homo sapiens
  CDR3 for beta chain variable domain of TCR clone 74131 (TRBV28, TRBJ1-3)
CASGATGSSGNTIYF

SEQ ID NO: 148263 - protein, 15 aa, Homo sapiens
  CDR3 for alpha chain variable domain of TCR clone 74132 (TRAV12-3, TRAJ6)
CAMSATTGGSYIPTF

SEQ ID NO: 148264 - protein, 13 aa, Homo sapiens
  CDR3 for beta chain variable domain of TCR clone 74132 (TRBV7-9, TRBJ1-2)
CASSLKQNYGYAF

SEQ ID NO: 148265 - protein, 13 aa, Homo sapiens
  CDR3 for alpha chain variable domain of TCR clone 74133 (TRAV8-1, TRAJ34)
CAVRPYNTDKLIF

SEQ ID NO: 148266 - protein, 15 aa, Homo sapiens
  CDR3 for beta chain variable domain of TCR clone 74133 (TRBV7-9, TRBJ1-3)
CASSLRAGSGNTIYF

SEQ ID NO: 148267 - protein, 14 aa, Homo sapiens
  CDR3 for alpha chain variable domain of TCR clone 74134 (TRAV12-2, TRAJ13)
CAVKKTGGYQKVTF

SEQ ID NO: 148268 - protein, 15 aa, Homo sapiens
  CDR3 for beta chain variable domain of TCR clone 74134 (TRBV27, TRBJ2-1)
CASSNGRGSSNEHFF

SEQ ID NO: 148269 - protein, 10 aa, Homo sapiens
  CDR3 for alpha chain variable domain of TCR clone 74135 (TRAV23/DV6, TRAJ57)
CAASSTLSQG

SEQ ID NO: 148270 - protein, 12 aa, Homo sapiens
  CDR3 for beta chain variable domain of TCR clone 74135 (TRBV11-2, TRBJ2-1)
CASSPGNNEQFF

SEQ ID NO: 148271 - protein, 16 aa, Homo sapiens
  CDR3 for alpha chain variable domain of TCR clone 74136 (TRAV12-1, TRAJ45)
CVVIRYSGGGADGLTF

SEQ ID NO: 148272 - protein, 11 aa, Homo sapiens
  CDR3 for beta chain variable domain of TCR clone 74136 (TRBV7-9, TRBJ2-3)
CASSPTDTQYF

SEQ ID NO: 148273 - protein, 12 aa, Homo sapiens
  CDR3 for alpha chain variable domain of TCR clone 74137 (TRAV21, TRAJ31)
CVLAGNNARLMV

SEQ ID NO: 148274 - protein, 16 aa, Homo sapiens
  CDR3 for beta chain variable domain of TCR clone 74137 (TRBV27, TRBJ2-5)
CASSFGPGGTKETQYF

SEQ ID NO: 148275 - protein, 11 aa, Homo sapiens
  CDR3 for alpha chain variable domain of TCR clone 74138 (TRAV2, TRAJ33)
CAVESNYQLIW

SEQ ID NO: 148276 - protein, 15 aa, Homo sapiens
  CDR3 for beta chain variable domain of TCR clone 74138 (TRBV19, TRBJ1-1)
CASSSGQIQNTEAFF

SEQ ID NO: 148277 - protein, 16 aa, Homo sapiens
  CDR3 for alpha chain variable domain of TCR clone 74139 (TRAV30, TRAJ24)
CGPEIVDADSWGKFQF

SEQ ID NO: 148278 - protein, 19 aa, Homo sapiens
  CDR3 for beta chain variable domain of TCR clone 74139 (TRBV25-1, TRBJ2-2)
CAILVYRVDRGRKTGELFF

SEQ ID NO: 148279 - protein, 13 aa, Homo sapiens
  CDR3 for alpha chain variable domain of TCR clone 74140 (TRAV35, TRAJ42)
CAGFPGSQGNLIF

SEQ ID NO: 148280 - protein, 16 aa, Homo sapiens
  CDR3 for beta chain variable domain of TCR clone 74140 (TRBV20-1, TRBJ1-4)
CSARPYGGELNEKLFF

SEQ ID NO: 148281 - protein, 15 aa, Homo sapiens
  CDR3 for alpha chain variable domain of TCR clone 74141 (TRAV20, TRAJ4)
CAVQVFSGGYNKLIF

SEQ ID NO: 148282 - protein, 12 aa, Homo sapiens
  CDR3 for beta chain variable domain of TCR clone 74141 (TRBV7-9, TRBJ2-7)
CASSQGVYEQYF

SEQ ID NO: 148283 - protein, 15 aa, Homo sapiens
  CDR3 for alpha chain variable domain of TCR clone 74142 (TRAV13-2, TRAJ23)
CAERGFYNQGGKLIL

SEQ ID NO: 148284 - protein, 14 aa, Homo sapiens
  CDR3 for beta chain variable domain of TCR clone 74142 (TRBV4-1, TRBJ2-3)
CASSQDWSTDTQYF

SEQ ID NO: 148285 - protein, 12 aa, Homo sapiens
  CDR3 for alpha chain variable domain of TCR clone 74143 (TRAV38-1, TRAJ34)
CAFMKETDKLIF

SEQ ID NO: 148286 - protein, 17 aa, Homo sapiens
  CDR3 for beta chain variable domain of TCR clone 74143 (TRBV7-8, TRBJ2-6)
CASSAGTGGAGANDLTF

SEQ ID NO: 148287 - protein, 15 aa, Homo sapiens
  CDR3 for alpha chain variable domain of TCR clone 74144 (TRAV27, TRAJ38)
CAARRNAGNNRKLIW

SEQ ID NO: 148288 - protein, 15 aa, Homo sapiens
  CDR3 for beta chain variable domain of TCR clone 74144 (TRBV19, TRBJ1-1)
CASTSGQIQNTEAFF

SEQ ID NO: 148289 - protein, 19 aa, Homo sapiens
  CDR3 for alpha chain variable domain of TCR clone 74145 (TRAV26-1, TRAJ50)
CCVLLHRQNPKTSYDKVIF

SEQ ID NO: 148290 - protein, 17 aa, Homo sapiens
  CDR3 for beta chain variable domain of TCR clone 74145 (TRBV4-1, TRBJ1-4)
CASSQEGPRGVEERLFF

SEQ ID NO: 148291 - protein, 14 aa, Homo sapiens
  CDR3 for alpha chain variable domain of TCR clone 74146 (TRAV13-1, TRAJ44)
CAAKATGTASKLAF

SEQ ID NO: 148292 - protein, 17 aa, Homo sapiens
  CDR3 for beta chain variable domain of TCR clone 74146 (TRBV7-3, TRBJ2-3)
RASSLMKRVRGADTQYF

SEQ ID NO: 148293 - protein, 15 aa, Homo sapiens
  CDR3 for alpha chain variable domain of TCR clone 74147 (TRAV3, TRAJ22)
CAVRDRSGSARQLTF

SEQ ID NO: 148294 - protein, 13 aa, Homo sapiens
  CDR3 for beta chain variable domain of TCR clone 74147 (TRBV20-1, TRBJ1-1)
CSARVGGNTEAFF

SEQ ID NO: 148295 - protein, 17 aa, Homo sapiens
  CDR3 for alpha chain variable domain of TCR clone 74148 (TRAV13-1, TRAJ52)
CAAGRNAGGTSYGKLTF

SEQ ID NO: 148296 - protein, 14 aa, Homo sapiens
  CDR3 for beta chain variable domain of TCR clone 74148 (TRBV25-1, TRBJ1-1)
CASTHLGGNTEAFF

SEQ ID NO: 148297 - protein, 15 aa, Homo sapiens
  CDR3 for alpha chain variable domain of TCR clone 74149 (TRAV8-3, TRAJ6)
CAVGPLGGGSYIPTS

SEQ ID NO: 148298 - protein, 14 aa, Homo sapiens
  CDR3 for beta chain variable domain of TCR clone 74149 (TRBV19, TRBJ2-2)
CASSTGQGAGELFF

SEQ ID NO: 148299 - protein, 14 aa, Homo sapiens
  CDR3 for alpha chain variable domain of TCR clone 74150 (TRAV12-2, TRAJ13)
CAVNPSGGYQKVTF

SEQ ID NO: 148300 - protein, 13 aa, Homo sapiens
  CDR3 for beta chain variable domain of TCR clone 74150 (TRBV20-1, TRBJ1-6)
CSAKLGGTSPLHF

SEQ ID NO: 148301 - protein, 16 aa, Homo sapiens
  CDR3 for alpha chain variable domain of TCR clone 74151 (TRAV30, TRAJ24)
CGTEIVDADSWGKFKF

SEQ ID NO: 148302 - protein, 13 aa, Homo sapiens
  CDR3 for beta chain variable domain of TCR clone 74151 (TRBV20-1, TRBJ1-1)
CSARGGGNTEAFF

SEQ ID NO: 148303 - protein, 13 aa, Homo sapiens
  CDR3 for alpha chain variable domain of TCR clone 74152 (TRAV21, TRAJ27)
CAARPGNAGKSTF

SEQ ID NO: 148304 - protein, 14 aa, Homo sapiens
  CDR3 for beta chain variable domain of TCR clone 74152 (TRBV7-6, TRBJ2-3)
CASSLGTVTDSQYF

SEQ ID NO: 148305 - protein, 14 aa, Homo sapiens
  CDR3 for alpha chain variable domain of TCR clone 74153 (TRAV23/DV6, TRAJ39)
CAASIGNAGNMPTF

SEQ ID NO: 148306 - protein, 12 aa, Homo sapiens
  CDR3 for beta chain variable domain of TCR clone 74153 (TRBV20-1, TRBJ2-5)
CSVGTGSETQYF

SEQ ID NO: 148307 - protein, 14 aa, Homo sapiens
  CDR3 for alpha chain variable domain of TCR clone 74154 (TRAV20, TRAJ47)
CAVTFGEYGNKLVF

SEQ ID NO: 148308 - protein, 13 aa, Homo sapiens
  CDR3 for beta chain variable domain of TCR clone 74154 (TRBV10-3, TRBJ2-7)
CASKLAVNYEQYF

SEQ ID NO: 148309 - protein, 14 aa, Homo sapiens
  CDR3 for alpha chain variable domain of TCR clone 74155 (TRAV23/DV6, TRAJ40)
CAASLTSGTYKNIF

SEQ ID NO: 148310 - protein, 14 aa, Homo sapiens
  CDR3 for beta chain variable domain of TCR clone 74155 (TRBV5-1, TRBJ2-3)
CASSRGQGGGTQYF

SEQ ID NO: 148311 - protein, 15 aa, Homo sapiens
  CDR3 for alpha chain variable domain of TCR clone 74156 (TRAV12-1, TRAJ44)
CVVDEYTGTASKLTF

SEQ ID NO: 148312 - protein, 14 aa, Homo sapiens
  CDR3 for beta chain variable domain of TCR clone 74156 (TRBV5-1, TRBJ1-2)
CASSLEPVNYGYAF

SEQ ID NO: 148313 - protein, 13 aa, Homo sapiens
  CDR3 for alpha chain variable domain of TCR clone 74157 (TRAV1-2, TRAJ9)
CAALNTGGFKTIF

SEQ ID NO: 148314 - protein, 15 aa, Homo sapiens
  CDR3 for beta chain variable domain of TCR clone 74157 (TRBV18, TRBJ1-1)
CASSPRQGENTEAFF

SEQ ID NO: 148315 - protein, 15 aa, Homo sapiens
  CDR3 for alpha chain variable domain of TCR clone 74158 (TRAV1-1, TRAJ5)
CAVRHMDTGRGALTF

SEQ ID NO: 148316 - protein, 17 aa, Homo sapiens
  CDR3 for beta chain variable domain of TCR clone 74158 (TRBV28, TRBJ2-7)
CASSPGLAGGDSSEQYF

SEQ ID NO: 148317 - protein, 13 aa, Homo sapiens
  CDR3 for alpha chain variable domain of TCR clone 74159 (TRAV2, TRAJ36)
CAVDQTGANNLFF

SEQ ID NO: 148318 - protein, 12 aa, Homo sapiens
  CDR3 for beta chain variable domain of TCR clone 74159 (TRBV19, TRBJ1-1)
CASMNRYAEAFF

SEQ ID NO: 148319 - protein, 14 aa, Homo sapiens
  CDR3 for alpha chain variable domain of TCR clone 74160 (TRAV39, TRAJ54)
CAVVLIQGAQRLVF

SEQ ID NO: 148320 - protein, 16 aa, Homo sapiens
  CDR3 for beta chain variable domain of TCR clone 74160 (TRBV3-1, TRBJ2-7)
CASSQGATGVAYEQYF

SEQ ID NO: 148321 - protein, 13 aa, Homo sapiens
  CDR3 for alpha chain variable domain of TCR clone 74161 (TRAV39, TRAJ48)
CAAVNFGNEKLTF

SEQ ID NO: 148322 - protein, 12 aa, Homo sapiens
  CDR3 for beta chain variable domain of TCR clone 74161 (TRBV5-5, TRBJ2-5)
CASSYVGETQYF

SEQ ID NO: 148323 - protein, 11 aa, Homo sapiens
  CDR3 for alpha chain variable domain of TCR clone 74162 (TRAV17, TRAJ31)
CATSNNARLMF

SEQ ID NO: 148324 - protein, 15 aa, Homo sapiens
  CDR3 for beta chain variable domain of TCR clone 74162 (TRBV7-9, TRBJ1-2)
CASSLDREPNYGYTF

SEQ ID NO: 148325 - protein, 13 aa, Homo sapiens
  CDR3 for alpha chain variable domain of TCR clone 74163 (TRAV13-1, TRAJ42)
CAARKPRKSHLWK

SEQ ID NO: 148326 - protein, 13 aa, Homo sapiens
  CDR3 for beta chain variable domain of TCR clone 74163 (TRBV2, TRBJ1-4)
CASSELGVEKLFF

SEQ ID NO: 148327 - protein, 13 aa, Homo sapiens
  CDR3 for alpha chain variable domain of TCR clone 74164 (TRAV13-1, TRAJ21)
CAASISNFNKFYF

SEQ ID NO: 148328 - protein, 20 aa, Homo sapiens
  CDR3 for beta chain variable domain of TCR clone 74164 (TRBV7-8, TRBJ2-2)
CASSHLFPGPTIHITGELFF

SEQ ID NO: 148329 - protein, 11 aa, Homo sapiens
  CDR3 for alpha chain variable domain of TCR clone 74165 (TRAV17, TRAJ31)
CATSNNARLMF

SEQ ID NO: 148330 - protein, 15 aa, Homo sapiens
  CDR3 for beta chain variable domain of TCR clone 74165 (TRBV5-1, TRBJ1-1)
CASSSTTGTNTEAFF

SEQ ID NO: 148331 - protein, 11 aa, Homo sapiens
  CDR3 for alpha chain variable domain of TCR clone 74166 (TRAV1-2, TRAJ20)
CAVANDYKLSF

SEQ ID NO: 148332 - protein, 18 aa, Homo sapiens
  CDR3 for beta chain variable domain of TCR clone 74166 (TRBV20-1, TRBJ2-6)
WSAETTPTHGSGANVLTF

SEQ ID NO: 148333 - protein, 13 aa, Homo sapiens
  CDR3 for alpha chain variable domain of TCR clone 74167 (TRAV13-2, TRAJ48)
CAEMDFGNEKLTF

SEQ ID NO: 148334 - protein, 15 aa, Homo sapiens
  CDR3 for beta chain variable domain of TCR clone 74167 (TRBV7-9, TRBJ1-6)
CASSSPGRGNSPHHF

SEQ ID NO: 148335 - protein, 14 aa, Homo sapiens
  CDR3 for alpha chain variable domain of TCR clone 74168 (TRAV1-2, TRAJ16)
CAVNRFSDGQKLLF

SEQ ID NO: 148336 - protein, 13 aa, Homo sapiens
  CDR3 for beta chain variable domain of TCR clone 74168 (TRBV28, TRBJ1-2)
CAGRDRGNYGYTF

SEQ ID NO: 148337 - protein, 14 aa, Homo sapiens
  CDR3 for alpha chain variable domain of TCR clone 74169 (TRAV9-2, TRAJ39)
CALYIYNAGNMLTF

SEQ ID NO: 148338 - protein, 12 aa, Homo sapiens
  CDR3 for beta chain variable domain of TCR clone 74169 (TRBV5-1, TRBJ1-2)
CASSQDTYGYTF

SEQ ID NO: 148339 - protein, 17 aa, Homo sapiens
  CDR3 for alpha chain variable domain of TCR clone 74170 (TRAV27, TRAJ42)
CAERVIYYGGSQGNPIF

SEQ ID NO: 148340 - protein, 14 aa, Homo sapiens
  CDR3 for beta chain variable domain of TCR clone 74170 (TRBV6-6, TRBJ2-3)
CASRLQREADTQYF

SEQ ID NO: 148341 - protein, 14 aa, Homo sapiens
  CDR3 for alpha chain variable domain of TCR clone 74171 (TRAV8-3, TRAJ4)
CAVGAAGGYNKLIF

SEQ ID NO: 148342 - protein, 14 aa, Homo sapiens
  CDR3 for beta chain variable domain of TCR clone 74171 (TRBV19, TRBJ1-2)
CASSLQGQAYGYTF

SEQ ID NO: 148343 - protein, 13 aa, Homo sapiens
  CDR3 for alpha chain variable domain of TCR clone 74172 (TRAV36/DV7, TRAJ49)
CAVEANTGNQFYF

SEQ ID NO: 148344 - protein, 14 aa, Homo sapiens
  CDR3 for beta chain variable domain of TCR clone 74172 (TRBV7-6, TRBJ2-3)
CASSLGTVTDTQYF

SEQ ID NO: 148345 - protein, 10 aa, Homo sapiens
  CDR3 for alpha chain variable domain of TCR clone 74173 (TRAV23/DV6, TRAJ57)
CAASSNLSQG

SEQ ID NO: 148346 - protein, 13 aa, Homo sapiens
  CDR3 for beta chain variable domain of TCR clone 74173 (TRBV15, TRBJ1-6)
CATSGGLNSPLHF

SEQ ID NO: 148347 - protein, 13 aa, Homo sapiens
  CDR3 for alpha chain variable domain of TCR clone 74174 (TRAV12-3, TRAJ7)
CAMTPYGNNRLSF

SEQ ID NO: 148348 - protein, 16 aa, Homo sapiens
  CDR3 for beta chain variable domain of TCR clone 74174 (TRBV20-1, TRBJ1-4)
CSARPYGGELNEKLFF

SEQ ID NO: 148349 - protein, 14 aa, Homo sapiens
  CDR3 for alpha chain variable domain of TCR clone 74175 (TRAV12-2, TRAJ40)
CAVKIPSGTYKYIL

SEQ ID NO: 148350 - protein, 11 aa, Homo sapiens
  CDR3 for beta chain variable domain of TCR clone 74175 (TRBV29-1, TRBJ2-5)
CSEDRTGTQYF

SEQ ID NO: 148351 - protein, 12 aa, Homo sapiens
  CDR3 for alpha chain variable domain of TCR clone 74176 (TRAV13-1, TRAJ15)
CAANQAGTALIL

SEQ ID NO: 148352 - protein, 14 aa, Homo sapiens
  CDR3 for beta chain variable domain of TCR clone 74176 (TRBV20-1, TRBJ2-5)
CSARYRGLQETQYF

SEQ ID NO: 148353 - protein, 14 aa, Homo sapiens
  CDR3 for alpha chain variable domain of TCR clone 74177 (TRAV16, TRAJ33)
CALSAMDSNYQLIW

SEQ ID NO: 148354 - protein, 16 aa, Homo sapiens
  CDR3 for beta chain variable domain of TCR clone 74177 (TRBV25-1, TRBJ2-7)
CASSELTGGGIYGQYF

SEQ ID NO: 148355 - protein, 11 aa, Homo sapiens
  CDR3 for alpha chain variable domain of TCR clone 74178 (TRAV21, TRAJ11)
WAVNGYSTLTF

SEQ ID NO: 148356 - protein, 11 aa, Homo sapiens
  CDR3 for beta chain variable domain of TCR clone 74178 (TRBV19, TRBJ1-1)
CASSIGSEAFF

SEQ ID NO: 148357 - protein, 13 aa, Homo sapiens
  CDR3 for alpha chain variable domain of TCR clone 74179 (TRAV13-1, TRAJ12)
CAASPDSSDKLIF

SEQ ID NO: 148358 - protein, 16 aa, Homo sapiens
  CDR3 for beta chain variable domain of TCR clone 74179 (TRBV15, TRBJ2-1)
CATSRERLAGAYEQFF

SEQ ID NO: 148359 - protein, 11 aa, Homo sapiens
  CDR3 for alpha chain variable domain of TCR clone 74180 (TRAV2, TRAJ21)
CAVFNFNKFYF

SEQ ID NO: 148360 - protein, 14 aa, Homo sapiens
  CDR3 for beta chain variable domain of TCR clone 74180 (TRBV15, TRBJ2-3)
CAMRSGTSTDTQYF

SEQ ID NO: 148361 - protein, 15 aa, Homo sapiens
  CDR3 for alpha chain variable domain of TCR clone 74181 (TRAV3, TRAJ5)
CAVRDLDTGRRALTF

SEQ ID NO: 148362 - protein, 13 aa, Homo sapiens
  CDR3 for beta chain variable domain of TCR clone 74181 (TRBV12-4, TRBJ2-7)
CASSPTETYEQYI

SEQ ID NO: 148363 - protein, 11 aa, Homo sapiens
  CDR3 for alpha chain variable domain of TCR clone 74182 (TRAV2, TRAJ33)
CAVDSNYQLIW

SEQ ID NO: 148364 - protein, 13 aa, Homo sapiens
  CDR3 for beta chain variable domain of TCR clone 74182 (TRBV7-2, TRBJ2-2)
CASSLAVTGELFF

SEQ ID NO: 148365 - protein, 15 aa, Homo sapiens
  CDR3 for alpha chain variable domain of TCR clone 74183 (TRAV17, TRAJ42)
CATDHYGGSQGNLIF

SEQ ID NO: 148366 - protein, 14 aa, Homo sapiens
  CDR3 for beta chain variable domain of TCR clone 74183 (TRBV19, TRBJ2-5)
CASSIEHSQENQYF

SEQ ID NO: 148367 - protein, 12 aa, Homo sapiens
  CDR3 for alpha chain variable domain of TCR clone 74184 (TRAV12-3, TRAJ17)
CAMTLTGNKLTL

SEQ ID NO: 148368 - protein, 14 aa, Homo sapiens
  CDR3 for beta chain variable domain of TCR clone 74184 (TRBV20-1, TRBJ1-3)
CSASPTGAGNTIYF

SEQ ID NO: 148369 - protein, 13 aa, Homo sapiens
  CDR3 for alpha chain variable domain of TCR clone 74185 (TRAV12-2, TRAJ7)
CAVNLYGNNRPAF

SEQ ID NO: 148370 - protein, 14 aa, Homo sapiens
  CDR3 for beta chain variable domain of TCR clone 74185 (TRBV25-1, TRBJ1-2)
CASSEATGPYGYTF

SEQ ID NO: 148371 - protein, 14 aa, Homo sapiens
  CDR3 for alpha chain variable domain of TCR clone 74186 (TRAV1-2, TRAJ16)
CAVNRFSDGQKLLL

SEQ ID NO: 148372 - protein, 13 aa, Homo sapiens
  CDR3 for beta chain variable domain of TCR clone 74186 (TRBV10-3, TRBJ2-7)
CASKLAVNYEQYF

SEQ ID NO: 148373 - protein, 15 aa, Homo sapiens
  CDR3 for alpha chain variable domain of TCR clone 74187 (TRAV8-3, TRAJ11)
CAGGLLNSGYSTLTF

SEQ ID NO: 148374 - protein, 16 aa, Homo sapiens
  CDR3 for beta chain variable domain of TCR clone 74187 (TRBV7-9, TRBJ1-2)
CASSLGFSSGEDGYTF

SEQ ID NO: 148375 - protein, 11 aa, Homo sapiens
  CDR3 for alpha chain variable domain of TCR clone 74188 (TRAV2, TRAJ33)
CAVESNYQLIW

SEQ ID NO: 148376 - protein, 16 aa, Homo sapiens
  CDR3 for beta chain variable domain of TCR clone 74188 (TRBV7-9, TRBJ1-3)
CASSQTSGLRMGTIYF

SEQ ID NO: 148377 - protein, 16 aa, Homo sapiens
  CDR3 for alpha chain variable domain of TCR clone 74189 (TRAV30, TRAJ44)
CGTEDKRTGTASKLTF

SEQ ID NO: 148378 - protein, 16 aa, Homo sapiens
  CDR3 for beta chain variable domain of TCR clone 74189 (TRBV10-3, TRBJ2-1)
CAISGVGDGGGGEQFF

SEQ ID NO: 148379 - protein, 12 aa, Homo sapiens
  CDR3 for alpha chain variable domain of TCR clone 74190 (TRAV17, TRAJ30)
CATDARDDKIIF

SEQ ID NO: 148380 - protein, 14 aa, Homo sapiens
  CDR3 for beta chain variable domain of TCR clone 74190 (TRBV4-1, TRBJ2-1)
RQQPRGGLYNEQFF

SEQ ID NO: 148381 - protein, 17 aa, Homo sapiens
  CDR3 for alpha chain variable domain of TCR clone 74191 (TRAV3, TRAJ42)
CAVRDRDYGGSQGNLIF

SEQ ID NO: 148382 - protein, 15 aa, Homo sapiens
  CDR3 for beta chain variable domain of TCR clone 74191 (TRBV13, TRBJ1-2)
CASSLGRQPGYGYTF

SEQ ID NO: 148383 - protein, 11 aa, Homo sapiens
  CDR3 for alpha chain variable domain of TCR clone 74192 (TRAV2, TRAJ33)
CAVDSNYQLIW

SEQ ID NO: 148384 - protein, 14 aa, Homo sapiens
  CDR3 for beta chain variable domain of TCR clone 74192 (TRBV11-2, TRBJ2-3)
CSSSRLARTDTQYF

SEQ ID NO: 148385 - protein, 17 aa, Homo sapiens
  CDR3 for alpha chain variable domain of TCR clone 74193 (TRAV26-1, TRAJ47)
CIVPSLLYMEYGNKLVF

SEQ ID NO: 148386 - protein, 14 aa, Homo sapiens
  CDR3 for beta chain variable domain of TCR clone 74193 (TRBV7-3, TRBJ1-5)
RASSFSGCNQTQHF

SEQ ID NO: 148387 - protein, 15 aa, Homo sapiens
  CDR3 for alpha chain variable domain of TCR clone 74194 (TRAV12-3, TRAJ49)
CAMAVTPNTGNQFYF

SEQ ID NO: 148388 - protein, 18 aa, Homo sapiens
  CDR3 for beta chain variable domain of TCR clone 74194 (TRBV4-1, TRBJ1-5)
CTSSQDPRGQGLNQPQHF

SEQ ID NO: 148389 - protein, 13 aa, Homo sapiens
  CDR3 for alpha chain variable domain of TCR clone 74195 (TRAV13-2, TRAJ48)
CAEMDFGNEKLTF

SEQ ID NO: 148390 - protein, 16 aa, Homo sapiens
  CDR3 for beta chain variable domain of TCR clone 74195 (TRBV20-1, TRBJ1-2)
CSASMGQGVANYGYTF

SEQ ID NO: 148391 - protein, 10 aa, Homo sapiens
  CDR3 for alpha chain variable domain of TCR clone 74196 (TRAV36/DV7, TRAJ31)
CAVGEARLMF

SEQ ID NO: 148392 - protein, 15 aa, Homo sapiens
  CDR3 for beta chain variable domain of TCR clone 74196 (TRBV19, TRBJ1-1)
CASSIGGGRNTEAFF

SEQ ID NO: 148393 - protein, 12 aa, Homo sapiens
  CDR3 for alpha chain variable domain of TCR clone 74197 (TRAV8-3, TRAJ20)
CAVGANDYKLSF

SEQ ID NO: 148394 - protein, 16 aa, Homo sapiens
  CDR3 for beta chain variable domain of TCR clone 74197 (TRBV19, TRBJ2-2)
CASRCPGTGATGELFF

SEQ ID NO: 148395 - protein, 11 aa, Homo sapiens
  CDR3 for alpha chain variable domain of TCR clone 74198 (TRAV12-2, TRAJ39)
CAVNNMLTFGG

SEQ ID NO: 148396 - protein, 16 aa, Homo sapiens
  CDR3 for beta chain variable domain of TCR clone 74198 (TRBV5-3, TRBJ2-2)
CARSFGTCTNTGELFF

SEQ ID NO: 148397 - protein, 12 aa, Homo sapiens
  CDR3 for alpha chain variable domain of TCR clone 74199 (TRAV4, TRAJ26)
CLVGDYGHNFVF

SEQ ID NO: 148398 - protein, 16 aa, Homo sapiens
  CDR3 for beta chain variable domain of TCR clone 74199 (TRBV7-2, TRBJ1-2)
CASSSNQDRRGHGYTF

SEQ ID NO: 148399 - protein, 16 aa, Homo sapiens
  CDR3 for alpha chain variable domain of TCR clone 74200 (TRAV8-3, TRAJ44)
CAVGPLNTGTAGKLTF

SEQ ID NO: 148400 - protein, 18 aa, Homo sapiens
  CDR3 for beta chain variable domain of TCR clone 74200 (TRBV3-1, TRBJ2-1)
CASSQDLPGRPLFDEQFF

SEQ ID NO: 148401 - protein, 12 aa, Homo sapiens
  CDR3 for alpha chain variable domain of TCR clone 74201 (TRAV12-3, TRAJ17)
CAMTLTGNKLTF

SEQ ID NO: 148402 - protein, 15 aa, Homo sapiens
  CDR3 for beta chain variable domain of TCR clone 74201 (TRBV7-3, TRBJ2-1)
CASSLSSGSFDEQFF

SEQ ID NO: 148403 - protein, 10 aa, Homo sapiens
  CDR3 for alpha chain variable domain of TCR clone 74202 (TRAV1-2, TRAJ20)
CALNDYKLSF

SEQ ID NO: 148404 - protein, 13 aa, Homo sapiens
  CDR3 for beta chain variable domain of TCR clone 74202 (TRBV7-2, TRBJ2-5)
CASSQTSVETQYF

SEQ ID NO: 148405 - protein, 13 aa, Homo sapiens
  CDR3 for alpha chain variable domain of TCR clone 74203 (TRAV20, TRAJ37)
CAGCSSNTGKLIF

SEQ ID NO: 148406 - protein, 17 aa, Homo sapiens
  CDR3 for beta chain variable domain of TCR clone 74203 (TRBV11-2, TRBJ2-1)
CASSLYLPGVEYNEQFF

SEQ ID NO: 148407 - protein, 14 aa, Homo sapiens
  CDR3 for alpha chain variable domain of TCR clone 74204 (TRAV1-2, TRAJ16)
CAVNRFSDGQKLLL

SEQ ID NO: 148408 - protein, 17 aa, Homo sapiens
  CDR3 for beta chain variable domain of TCR clone 74204 (TRBV7-8, TRBJ2-6)
CASSAGTGGAGANVLTF

SEQ ID NO: 148409 - protein, 11 aa, Homo sapiens
  CDR3 for alpha chain variable domain of TCR clone 74205 (TRAV35, TRAJ30)
CAGERDDRIIF

SEQ ID NO: 148410 - protein, 14 aa, Homo sapiens
  CDR3 for beta chain variable domain of TCR clone 74205 (TRBV15, TRBJ2-5)
CATSGDRGQETQYF

SEQ ID NO: 148411 - protein, 14 aa, Homo sapiens
  CDR3 for alpha chain variable domain of TCR clone 74206 (TRAV17, TRAJ20)
CATLSGSNDYKLSF

SEQ ID NO: 148412 - protein, 13 aa, Homo sapiens
  CDR3 for beta chain variable domain of TCR clone 74206 (TRBV12-4, TRBJ1-5)
CASSPDRAQPQHF

SEQ ID NO: 148413 - protein, 15 aa, Homo sapiens
  CDR3 for alpha chain variable domain of TCR clone 74207 (TRAV21, TRAJ53)
CATLNSGGRNYKLTF

SEQ ID NO: 148414 - protein, 16 aa, Homo sapiens
  CDR3 for beta chain variable domain of TCR clone 74207 (TRBV9, TRBJ2-1)
CASSVGGGGNYNEQFF

SEQ ID NO: 148415 - protein, 13 aa, Homo sapiens
  CDR3 for alpha chain variable domain of TCR clone 74208 (TRAV35, TRAJ42)
CAGFPGSQGNLTF

SEQ ID NO: 148416 - protein, 14 aa, Homo sapiens
  CDR3 for beta chain variable domain of TCR clone 74208 (TRBV4-1, TRBJ2-2)
CASSQAVNTGELFF

SEQ ID NO: 148417 - protein, 16 aa, Homo sapiens
  CDR3 for alpha chain variable domain of TCR clone 74209 (TRAV12-3, TRAJ28)
CAMRANSGAGSYQLTL

SEQ ID NO: 148418 - protein, 16 aa, Homo sapiens
  CDR3 for beta chain variable domain of TCR clone 74209 (TRBV7-2, TRBJ1-3)
CASSRLEASSGNTIYF

SEQ ID NO: 148419 - protein, 14 aa, Homo sapiens
  CDR3 for alpha chain variable domain of TCR clone 74210 (TRAV34, TRAJ44)
CGADGTGTASKLTF

SEQ ID NO: 148420 - protein, 16 aa, Homo sapiens
  CDR3 for beta chain variable domain of TCR clone 74210 (TRBV28, TRBJ2-6)
CASSNRRGSGANVLTF

SEQ ID NO: 148421 - protein, 22 aa, Homo sapiens
  CDR3 for alpha chain variable domain of TCR clone 74211 (TRAV26-1, TRAJ30)
CIVRVRTEMTRSSWEKGHDFIF

SEQ ID NO: 148422 - protein, 18 aa, Homo sapiens
  CDR3 for beta chain variable domain of TCR clone 74211 (TRBV4-1, TRBJ1-5)
CASSQDPRGQGLNQPQHF

SEQ ID NO: 148423 - protein, 12 aa, Homo sapiens
  CDR3 for alpha chain variable domain of TCR clone 74212 (TRAV8-3, TRAJ20)
CAVGANDYKLSF

SEQ ID NO: 148424 - protein, 16 aa, Homo sapiens
  CDR3 for beta chain variable domain of TCR clone 74212 (TRBV19, TRBJ2-2)
CASRSPGTGATGELFY

SEQ ID NO: 148425 - protein, 14 aa, Homo sapiens
  CDR3 for alpha chain variable domain of TCR clone 74213 (TRAV23/DV6, TRAJ4)
CAANLSGGYNKLIF

SEQ ID NO: 148426 - protein, 17 aa, Homo sapiens
  CDR3 for beta chain variable domain of TCR clone 74213 (TRBV4-1, TRBJ1-3)
CASSPQRGIRFENTIYF

SEQ ID NO: 148427 - protein, 15 aa, Homo sapiens
  CDR3 for alpha chain variable domain of TCR clone 74214 (TRAV3, TRAJ5)
CAVRDLDTGRRALTF

SEQ ID NO: 148428 - protein, 13 aa, Homo sapiens
  CDR3 for beta chain variable domain of TCR clone 74214 (TRBV24-1, TRBJ2-1)
CATSAGPYNEQFF

SEQ ID NO: 148429 - protein, 13 aa, Homo sapiens
  CDR3 for alpha chain variable domain of TCR clone 74215 (TRAV29/DV5, TRAJ31)
CSASRNNNARLMF

SEQ ID NO: 148430 - protein, 12 aa, Homo sapiens
  CDR3 for beta chain variable domain of TCR clone 74215 (TRBV14, TRBJ2-7)
CASSLYKDEQYF

SEQ ID NO: 148431 - protein, 14 aa, Homo sapiens
  CDR3 for alpha chain variable domain of TCR clone 74216 (TRAV2, TRAJ37)
CAVDFTGNTGKLIF

SEQ ID NO: 148432 - protein, 14 aa, Homo sapiens
  CDR3 for beta chain variable domain of TCR clone 74216 (TRBV20-1, TRBJ2-7)
CSAPELAGVGEQYF

SEQ ID NO: 148433 - protein, 12 aa, Homo sapiens
  CDR3 for alpha chain variable domain of TCR clone 74217 (TRAV25, TRAJ10)
CAFTGGGNKLTF

SEQ ID NO: 148434 - protein, 14 aa, Homo sapiens
  CDR3 for beta chain variable domain of TCR clone 74217 (TRBV19, TRBJ1-1)
CATTSGTRGTEALF

SEQ ID NO: 148435 - protein, 13 aa, Homo sapiens
  CDR3 for alpha chain variable domain of TCR clone 74218 (TRAV21, TRAJ27)
CAARPGNEGKSTF

SEQ ID NO: 148436 - protein, 13 aa, Homo sapiens
  CDR3 for beta chain variable domain of TCR clone 74218 (TRBV18, TRBJ2-7)
CASQSGGGYEQYF

SEQ ID NO: 148437 - protein, 22 aa, Homo sapiens
  CDR3 for alpha chain variable domain of TCR clone 74219 (TRAV40, )
CLLGDGIPDIQNPDPAVYQLRD

SEQ ID NO: 148438 - protein, 16 aa, Homo sapiens
  CDR3 for beta chain variable domain of TCR clone 74219 (TRBV20-1, TRBJ1-5)
CSAELPGQQTNQPKHF

SEQ ID NO: 148439 - protein, 15 aa, Homo sapiens
  CDR3 for alpha chain variable domain of TCR clone 74220 (TRAV21, TRAJ24)
CAARSSTDSWGKLQF

SEQ ID NO: 148440 - protein, 13 aa, Homo sapiens
  CDR3 for beta chain variable domain of TCR clone 74220 (TRBV11-2, TRBJ2-5)
CASSSTGEESQYF

SEQ ID NO: 148441 - protein, 13 aa, Homo sapiens
  CDR3 for alpha chain variable domain of TCR clone 74221 (TRAV12-3, TRAJ6)
CAMIPGGSYIPTF

SEQ ID NO: 148442 - protein, 15 aa, Homo sapiens
  CDR3 for beta chain variable domain of TCR clone 74221 (TRBV12-4, TRBJ2-5)
CASSPPTGLQETQYF

SEQ ID NO: 148443 - protein, 12 aa, Homo sapiens
  CDR3 for alpha chain variable domain of TCR clone 74222 (TRAV23/DV6, TRAJ31)
CAARRIGAGLMF

SEQ ID NO: 148444 - protein, 13 aa, Homo sapiens
  CDR3 for beta chain variable domain of TCR clone 74222 (TRBV28, TRBJ2-7)
CASKAGGVYEQYF

SEQ ID NO: 148445 - protein, 14 aa, Homo sapiens
  CDR3 for alpha chain variable domain of TCR clone 74223 (TRAV1-2, TRAJ16)
CAVNRFSDGQKLPF

SEQ ID NO: 148446 - protein, 14 aa, Homo sapiens
  CDR3 for beta chain variable domain of TCR clone 74223 (TRBV25-1, TRBJ1-1)
CASTHLGGNTEAFF

SEQ ID NO: 148447 - protein, 12 aa, Homo sapiens
  CDR3 for alpha chain variable domain of TCR clone 74224 (TRAV27, TRAJ13)
CAGVRGYQKVTF

SEQ ID NO: 148448 - protein, 16 aa, Homo sapiens
  CDR3 for beta chain variable domain of TCR clone 74224 (TRBV28, TRBJ2-1)
CASSSSYSGSLNEQFC

SEQ ID NO: 148449 - protein, 18 aa, Homo sapiens
  CDR3 for alpha chain variable domain of TCR clone 74225 (TRAV13-1, TRAJ52)
CAASIRSAGGTSYGKLTF

SEQ ID NO: 148450 - protein, 13 aa, Homo sapiens
  CDR3 for beta chain variable domain of TCR clone 74225 (TRBV12-4, TRBJ1-2)
CASSLRQGKGYTF

SEQ ID NO: 148451 - protein, 14 aa, Homo sapiens
  CDR3 for alpha chain variable domain of TCR clone 74226 (TRAV1-2, TRAJ16)
CAVNRFSDGQKLLF

SEQ ID NO: 148452 - protein, 15 aa, Homo sapiens
  CDR3 for beta chain variable domain of TCR clone 74226 (TRBV7-9, TRBJ2-2)
CASSPETGAGGELFF

SEQ ID NO: 148453 - protein, 14 aa, Homo sapiens
  CDR3 for alpha chain variable domain of TCR clone 74227 (TRAV25, TRAJ6)
CAGRESGGSYIPTF

SEQ ID NO: 148454 - protein, 13 aa, Homo sapiens
  CDR3 for beta chain variable domain of TCR clone 74227 (TRBV27, TRBJ1-1)
CASSLSIGAEALF

SEQ ID NO: 148455 - protein, 13 aa, Homo sapiens
  CDR3 for alpha chain variable domain of TCR clone 74228 (TRAV1-2, TRAJ9)
CAALNTGGFKTIF

SEQ ID NO: 148456 - protein, 14 aa, Homo sapiens
  CDR3 for beta chain variable domain of TCR clone 74228 (TRBV5-1, TRBJ2-7)
CASSRGESLYEQYF

SEQ ID NO: 148457 - protein, 14 aa, Homo sapiens
  CDR3 for alpha chain variable domain of TCR clone 74229 (TRAV2, TRAJ37)
CAVDFTSNTGKLIL

SEQ ID NO: 148458 - protein, 18 aa, Homo sapiens
  CDR3 for beta chain variable domain of TCR clone 74229 (TRBV7-9, TRBJ2-7)
CASSLTTSGSRTWYEQYF

SEQ ID NO: 148459 - protein, 12 aa, Homo sapiens
  CDR3 for alpha chain variable domain of TCR clone 74230 (TRAV12-3, TRAJ5)
CAMDTGRRAITF

SEQ ID NO: 148460 - protein, 13 aa, Homo sapiens
  CDR3 for beta chain variable domain of TCR clone 74230 (TRBV7-7, TRBJ2-2)
CASSLTSAGELFF

SEQ ID NO: 148461 - protein, 16 aa, Homo sapiens
  CDR3 for alpha chain variable domain of TCR clone 74231 (TRAV12-1, TRAJ12)
CVVNTLLMDSSYKLIF

SEQ ID NO: 148462 - protein, 13 aa, Homo sapiens
  CDR3 for beta chain variable domain of TCR clone 74231 (TRBV11-2, TRBJ2-1)
CASSSKAYNEQFF

SEQ ID NO: 148463 - protein, 17 aa, Homo sapiens
  CDR3 for alpha chain variable domain of TCR clone 74232 (TRAV4, TRAJ13)
CLVGVQGSSGGYQKVTF

SEQ ID NO: 148464 - protein, 18 aa, Homo sapiens
  CDR3 for beta chain variable domain of TCR clone 74232 (TRBV15, TRBJ2-3)
CATSRDGARSWDTDTQYC

SEQ ID NO: 148465 - protein, 13 aa, Homo sapiens
  CDR3 for alpha chain variable domain of TCR clone 74233 (TRAV20, TRAJ29)
CAVQAVGNTPLVF

SEQ ID NO: 148466 - protein, 13 aa, Homo sapiens
  CDR3 for beta chain variable domain of TCR clone 74233 (TRBV27, TRBJ2-7)
CASSFSQGYEQYF

SEQ ID NO: 148467 - protein, 17 aa, Homo sapiens
  CDR3 for alpha chain variable domain of TCR clone 74234 (TRAV23/DV6, TRAJ57)
CAASSTLSQGGSEKLVF

SEQ ID NO: 148468 - protein, 15 aa, Homo sapiens
  CDR3 for beta chain variable domain of TCR clone 74234 (TRBV28, TRBJ2-5)
CASSPPWSYQETQYF

SEQ ID NO: 148469 - protein, 15 aa, Homo sapiens
  CDR3 for alpha chain variable domain of TCR clone 74235 (TRAV12-3, TRAJ6)
CAMSPASGGSYIPTF

SEQ ID NO: 148470 - protein, 16 aa, Homo sapiens
  CDR3 for beta chain variable domain of TCR clone 74235 (TRBV5-1, TRBJ2-7)
CASSLEGLAGLYEQYF

SEQ ID NO: 148471 - protein, 15 aa, Homo sapiens
  CDR3 for alpha chain variable domain of TCR clone 74236 (TRAV4, TRAJ39)
CLVGPNNNAGNMPTF

SEQ ID NO: 148472 - protein, 14 aa, Homo sapiens
  CDR3 for beta chain variable domain of TCR clone 74236 (TRBV19, TRBJ2-7)
CASNFRDTFTGMYF

SEQ ID NO: 148473 - protein, 20 aa, Homo sapiens
  CDR3 for alpha chain variable domain of TCR clone 74237 (TRAV26-1, TRAJ42)
CCVLLHRQTYYGGSQGNLIF

SEQ ID NO: 148474 - protein, 17 aa, Homo sapiens
  CDR3 for beta chain variable domain of TCR clone 74237 (TRBV13, TRBJ2-3)
CASSLSRVAGGRNTQYF

SEQ ID NO: 148475 - protein, 16 aa, Homo sapiens
  CDR3 for alpha chain variable domain of TCR clone 74238 (TRAV13-1, TRAJ48)
CAASIFGNFGNEKLTF

SEQ ID NO: 148476 - protein, 14 aa, Homo sapiens
  CDR3 for beta chain variable domain of TCR clone 74238 (TRBV11-2, TRBJ2-3)
CASSRLARTDTQYF

SEQ ID NO: 148477 - protein, 15 aa, Homo sapiens
  CDR3 for alpha chain variable domain of TCR clone 74239 (TRAV17, TRAJ16)
CATALRFSDGQKLLF

SEQ ID NO: 148478 - protein, 15 aa, Homo sapiens
  CDR3 for beta chain variable domain of TCR clone 74239 (TRBV13, TRBJ1-5)
CASSFGQGGVQPQNF

SEQ ID NO: 148479 - protein, 12 aa, Homo sapiens
  CDR3 for alpha chain variable domain of TCR clone 74240 (TRAV27, TRAJ35)
CAGSDFGNVLHC

SEQ ID NO: 148480 - protein, 16 aa, Homo sapiens
  CDR3 for beta chain variable domain of TCR clone 74240 (TRBV6-1, TRBJ2-1)
CASILRQGSSYNEQFF

SEQ ID NO: 148481 - protein, 14 aa, Homo sapiens
  CDR3 for alpha chain variable domain of TCR clone 74241 (TRAV26-1, TRAJ38)
CIADNAGNNRKLIW

SEQ ID NO: 148482 - protein, 13 aa, Homo sapiens
  CDR3 for beta chain variable domain of TCR clone 74241 (TRBV20-1, TRBJ1-1)
WSARGGGNTEAFF

SEQ ID NO: 148483 - protein, 15 aa, Homo sapiens
  CDR3 for alpha chain variable domain of TCR clone 74242 (TRAV12-3, TRAJ6)
CAMSATSGGSYIPTF

SEQ ID NO: 148484 - protein, 15 aa, Homo sapiens
  CDR3 for beta chain variable domain of TCR clone 74242 (TRBV5-1, TRBJ2-6)
CASSLDPSGANVLTF

SEQ ID NO: 148485 - protein, 15 aa, Homo sapiens
  CDR3 for alpha chain variable domain of TCR clone 74243 (TRAV17, TRAJ56)
SATDANTGANSKLTF

SEQ ID NO: 148486 - protein, 12 aa, Homo sapiens
  CDR3 for beta chain variable domain of TCR clone 74243 (TRBV7-8, TRBJ2-7)
CASSLGEREQYF

SEQ ID NO: 148487 - protein, 11 aa, Homo sapiens
  CDR3 for alpha chain variable domain of TCR clone 74244 (TRAV12-3, TRAJ45)
CAMSVSNDMRF

SEQ ID NO: 148488 - protein, 15 aa, Homo sapiens
  CDR3 for beta chain variable domain of TCR clone 74244 (TRBV11-2, TRBJ2-1)
CASSKNRGLIYEQFF

SEQ ID NO: 148489 - protein, 14 aa, Homo sapiens
  CDR3 for alpha chain variable domain of TCR clone 74245 (TRAV17, TRAJ57)
CATDPQGGSEKLVF

SEQ ID NO: 148490 - protein, 18 aa, Homo sapiens
  CDR3 for beta chain variable domain of TCR clone 74245 (TRBV6-6, TRBJ1-3)
CASSYSKWDSISGNTIDF

SEQ ID NO: 148491 - protein, 18 aa, Homo sapiens
  CDR3 for alpha chain variable domain of TCR clone 74246 (TRAV26-2, TRAJ45)
CILRVDKYSGGGADRLTF

SEQ ID NO: 148492 - protein, 11 aa, Homo sapiens
  CDR3 for beta chain variable domain of TCR clone 74246 (TRBV29-1, TRBJ2-5)
CSEDRTGTQYF

SEQ ID NO: 148493 - protein, 16 aa, Homo sapiens
  CDR3 for alpha chain variable domain of TCR clone 74247 (TRAV30, TRAJ24)
CGTEIVDADSWGKFQF

SEQ ID NO: 148494 - protein, 17 aa, Homo sapiens
  CDR3 for beta chain variable domain of TCR clone 74247 (TRBV7-3, TRBJ2-3)
CASSPRGQGYGTDTQYF

SEQ ID NO: 148495 - protein, 17 aa, Homo sapiens
  CDR3 for alpha chain variable domain of TCR clone 74248 (TRAV4, TRAJ18)
CLVGERSVGSTLGRLYF

SEQ ID NO: 148496 - protein, 13 aa, Homo sapiens
  CDR3 for beta chain variable domain of TCR clone 74248 (TRBV20-1, TRBJ1-1)
CSARGGGNTEAFF

SEQ ID NO: 148497 - protein, 14 aa, Homo sapiens
  CDR3 for alpha chain variable domain of TCR clone 74249 (TRAV1-2, TRAJ16)
CAVNRFSDGQKLLF

SEQ ID NO: 148498 - protein, 16 aa, Homo sapiens
  CDR3 for beta chain variable domain of TCR clone 74249 (TRBV11-2, TRBJ2-7)
CASSPLAGGPRYEQYF

SEQ ID NO: 148499 - protein, 14 aa, Homo sapiens
  CDR3 for alpha chain variable domain of TCR clone 74250 (TRAV1-2, TRAJ16)
CAVNRFSDVQKLLF

SEQ ID NO: 148500 - protein, 15 aa, Homo sapiens
  CDR3 for beta chain variable domain of TCR clone 74250 (TRBV20-1, TRBJ2-7)
CSARDRVSGMDEQYF

SEQ ID NO: 148501 - protein, 14 aa, Homo sapiens
  CDR3 for alpha chain variable domain of TCR clone 74251 (TRAV12-3, TRAJ5)
CAMTWDTGRRALTF

SEQ ID NO: 148502 - protein, 14 aa, Homo sapiens
  CDR3 for beta chain variable domain of TCR clone 74251 (TRBV10-2, TRBJ1-5)
CACSSTGRNQPQHF

SEQ ID NO: 148503 - protein, 11 aa, Homo sapiens
  CDR3 for alpha chain variable domain of TCR clone 74252 (TRAV39, TRAJ49)
CAVDISTQFYF

SEQ ID NO: 148504 - protein, 11 aa, Homo sapiens
  CDR3 for beta chain variable domain of TCR clone 74252 (TRBV7-8, TRBJ2-7)
CARSLSLEQYF

SEQ ID NO: 148505 - protein, 15 aa, Homo sapiens
  CDR3 for alpha chain variable domain of TCR clone 74253 (TRAV3, TRAJ23)
CAVRDRGNQGGKLIF

SEQ ID NO: 148506 - protein, 18 aa, Homo sapiens
  CDR3 for beta chain variable domain of TCR clone 74253 (TRBV11-2, TRBJ2-3)
CASSLGGASRGAPNTQYF

SEQ ID NO: 148507 - protein, 15 aa, Homo sapiens
  CDR3 for alpha chain variable domain of TCR clone 74254 (TRAV12-2, TRAJ30)
CAVNPAMDRDDKIIF

SEQ ID NO: 148508 - protein, 17 aa, Homo sapiens
  CDR3 for beta chain variable domain of TCR clone 74254 (TRBV7-8, TRBJ2-6)
CASSAGTGGAGANVLTF

SEQ ID NO: 148509 - protein, 15 aa, Homo sapiens
  CDR3 for alpha chain variable domain of TCR clone 74255 (TRAV8-4, TRAJ3)
CAVTGENLVQQCFQD

SEQ ID NO: 148510 - protein, 16 aa, Homo sapiens
  CDR3 for beta chain variable domain of TCR clone 74255 (TRBV4-2, TRBJ1-1)
CASSHAGFGMNTEAFF

SEQ ID NO: 148511 - protein, 15 aa, Homo sapiens
  CDR3 for alpha chain variable domain of TCR clone 74256 (TRAV8-6, TRAJ57)
CAVSLTQGGSEKLVF

SEQ ID NO: 148512 - protein, 14 aa, Homo sapiens
  CDR3 for beta chain variable domain of TCR clone 74256 (TRBV7-9, TRBJ2-2)
CASSGLADTGELFF

SEQ ID NO: 148513 - protein, 14 aa, Homo sapiens
  CDR3 for alpha chain variable domain of TCR clone 74257 (TRAV12-2, TRAJ17)
CAVLFKAAGNKLTF

SEQ ID NO: 148514 - protein, 14 aa, Homo sapiens
  CDR3 for beta chain variable domain of TCR clone 74257 (TRBV12-4, TRBJ1-1)
CASRPGQGRTEAFF

SEQ ID NO: 148515 - protein, 15 aa, Homo sapiens
  CDR3 for alpha chain variable domain of TCR clone 74258 (TRAV21, TRAJ38)
CAARRNAGNNRKLIW

SEQ ID NO: 148516 - protein, 13 aa, Homo sapiens
  CDR3 for beta chain variable domain of TCR clone 74258 (TRBV12-5, TRBJ2-3)
CASGDRQSDTQYF

SEQ ID NO: 148517 - protein, 14 aa, Homo sapiens
  CDR3 for alpha chain variable domain of TCR clone 74259 (TRAV14/DV4, TRAJ34)
CAMREGRPHRQAHL

SEQ ID NO: 148518 - protein, 14 aa, Homo sapiens
  CDR3 for beta chain variable domain of TCR clone 74259 (TRBV19, TRBJ2-1)
CASPTVVLSGEQFF

SEQ ID NO: 148519 - protein, 14 aa, Homo sapiens
  CDR3 for alpha chain variable domain of TCR clone 74260 (TRAV8-3, TRAJ9)
CAVVYNTGGFKTIF

SEQ ID NO: 148520 - protein, 14 aa, Homo sapiens
  CDR3 for beta chain variable domain of TCR clone 74260 (TRBV7-3, TRBJ2-2)
CASSSGGYTGDLFF

SEQ ID NO: 148521 - protein, 14 aa, Homo sapiens
  CDR3 for alpha chain variable domain of TCR clone 74261 (TRAV12-2, TRAJ5)
CAVNRSTGWRALTF

SEQ ID NO: 148522 - protein, 12 aa, Homo sapiens
  CDR3 for beta chain variable domain of TCR clone 74261 (TRBV19, TRBJ1-5)
CASSIAQQPQHF

SEQ ID NO: 148523 - protein, 14 aa, Homo sapiens
  CDR3 for alpha chain variable domain of TCR clone 74262 (TRAV1-2, TRAJ16)
CAVNRFSDGQKLLF

SEQ ID NO: 148524 - protein, 16 aa, Homo sapiens
  CDR3 for beta chain variable domain of TCR clone 74262 (TRBV15, TRBJ2-1)
CATSRERLAGAYEQFF

SEQ ID NO: 148525 - protein, 14 aa, Homo sapiens
  CDR3 for alpha chain variable domain of TCR clone 74263 (TRAV9-2, TRAJ39)
CALYIYNAGNMLTF

SEQ ID NO: 148526 - protein, 13 aa, Homo sapiens
  CDR3 for beta chain variable domain of TCR clone 74263 (TRBV12-4, TRBJ1-1)
CASSPGTGFEAFF

SEQ ID NO: 148527 - protein, 15 aa, Homo sapiens
  CDR3 for alpha chain variable domain of TCR clone 74264 (TRAV17, TRAJ13)
CATDAGSGGYQKVTF

SEQ ID NO: 148528 - protein, 16 aa, Homo sapiens
  CDR3 for beta chain variable domain of TCR clone 74264 (TRBV12-4, TRBJ2-7)
CASRSTGTGPSYEQYF

SEQ ID NO: 148529 - protein, 16 aa, Homo sapiens
  CDR3 for alpha chain variable domain of TCR clone 74265 (TRAV8-3, TRAJ13)
CAVGAYPSGGYQKVTF

SEQ ID NO: 148530 - protein, 14 aa, Homo sapiens
  CDR3 for beta chain variable domain of TCR clone 74265 (TRBV7-2, TRBJ2-2)
CASRGQGAAGELFF

SEQ ID NO: 148531 - protein, 13 aa, Homo sapiens
  CDR3 for alpha chain variable domain of TCR clone 74266 (TRAV27, TRAJ6)
CAGGTRGSYIPTF

SEQ ID NO: 148532 - protein, 15 aa, Homo sapiens
  CDR3 for beta chain variable domain of TCR clone 74266 (TRBV6-5, TRBJ2-1)
CASSYDAGAGNEQFF

SEQ ID NO: 148533 - protein, 14 aa, Homo sapiens
  CDR3 for alpha chain variable domain of TCR clone 74267 (TRAV12-2, TRAJ17)
CAVLFKAAGNKLTF

SEQ ID NO: 148534 - protein, 13 aa, Homo sapiens
  CDR3 for beta chain variable domain of TCR clone 74267 (TRBV11-2, TRBJ2-5)
CASSSTGEETQYF

SEQ ID NO: 148535 - protein, 10 aa, Homo sapiens
  CDR3 for alpha chain variable domain of TCR clone 74268 (TRAV26-1, TRAJ40)
CIAGTYKYIV

SEQ ID NO: 148536 - protein, 15 aa, Homo sapiens
  CDR3 for beta chain variable domain of TCR clone 74268 (TRBV19, TRBJ2-1)
CASSSPGVPLDEQFF

SEQ ID NO: 148537 - protein, 15 aa, Homo sapiens
  CDR3 for alpha chain variable domain of TCR clone 74269 (TRAV2, TRAJ9)
CAVEDRGTGGFKTIF

SEQ ID NO: 148538 - protein, 16 aa, Homo sapiens
  CDR3 for beta chain variable domain of TCR clone 74269 (TRBV24-1, TRBJ2-3)
CATSDPGTGATDTQYC

SEQ ID NO: 148539 - protein, 11 aa, Homo sapiens
  CDR3 for alpha chain variable domain of TCR clone 74270 (TRAV2, TRAJ13)
CASGGYQKVTF

SEQ ID NO: 148540 - protein, 14 aa, Homo sapiens
  CDR3 for beta chain variable domain of TCR clone 74270 (TRBV19, TRBJ2-1)
CASPTVVLSGEQFF

SEQ ID NO: 148541 - protein, 14 aa, Homo sapiens
  CDR3 for alpha chain variable domain of TCR clone 74271 (TRAV29/DV5, TRAJ36)
CAARRKTGANNLFF

SEQ ID NO: 148542 - protein, 16 aa, Homo sapiens
  CDR3 for beta chain variable domain of TCR clone 74271 (TRBV12-4, TRBJ2-5)
CASSFFVRGRQETQYF

SEQ ID NO: 148543 - protein, 12 aa, Homo sapiens
  CDR3 for alpha chain variable domain of TCR clone 74272 (TRAV12-3, TRAJ34)
CAMGYNTDKLIF

SEQ ID NO: 148544 - protein, 14 aa, Homo sapiens
  CDR3 for beta chain variable domain of TCR clone 74272 (TRBV7-2, TRBJ1-1)
CASSFLTGTTEAFF

SEQ ID NO: 148545 - protein, 12 aa, Homo sapiens
  CDR3 for alpha chain variable domain of TCR clone 74273 (TRAV17, TRAJ20)
CATDGDDYKPSF

SEQ ID NO: 148546 - protein, 18 aa, Homo sapiens
  CDR3 for beta chain variable domain of TCR clone 74273 (TRBV6-5, TRBJ2-5)
CASSYSQAGGSYQETQYF

SEQ ID NO: 148547 - protein, 14 aa, Homo sapiens
  CDR3 for alpha chain variable domain of TCR clone 74274 (TRAV1-2, TRAJ16)
CAVNRFSDGQKLLF

SEQ ID NO: 148548 - protein, 15 aa, Homo sapiens
  CDR3 for beta chain variable domain of TCR clone 74274 (TRBV2, TRBJ2-3)
CASSDAGGPPDTQYF

SEQ ID NO: 148549 - protein, 11 aa, Homo sapiens
  CDR3 for alpha chain variable domain of TCR clone 74275 (TRAV2, TRAJ33)
CAVDSNYQLIW

SEQ ID NO: 148550 - protein, 15 aa, Homo sapiens
  CDR3 for beta chain variable domain of TCR clone 74275 (TRBV19, TRBJ1-2)
CANSVGQVLNYGYTF

SEQ ID NO: 148551 - protein, 16 aa, Homo sapiens
  CDR3 for alpha chain variable domain of TCR clone 74276 (TRAV3, TRAJ18)
CAVRDGRGSTLGRLYF

SEQ ID NO: 148552 - protein, 15 aa, Homo sapiens
  CDR3 for beta chain variable domain of TCR clone 74276 (TRBV7-9, TRBJ1-6)
CASSSPGRGNSPLRF

SEQ ID NO: 148553 - protein, 13 aa, Homo sapiens
  CDR3 for alpha chain variable domain of TCR clone 74277 (TRAV1-2, TRAJ9)
CVALNTGGFKTIF

SEQ ID NO: 148554 - protein, 13 aa, Homo sapiens
  CDR3 for beta chain variable domain of TCR clone 74277 (TRBV19, TRBJ1-2)
CASSVPGQDGYTS

SEQ ID NO: 148555 - protein, 12 aa, Homo sapiens
  CDR3 for alpha chain variable domain of TCR clone 74278 (TRAV12-3, TRAJ40)
CAMSSGTYKYIF

SEQ ID NO: 148556 - protein, 14 aa, Homo sapiens
  CDR3 for beta chain variable domain of TCR clone 74278 (TRBV15, TRBJ2-5)
CATSIGGLGETQYF

SEQ ID NO: 148557 - protein, 15 aa, Homo sapiens
  CDR3 for alpha chain variable domain of TCR clone 74279 (TRAV27, TRAJ38)
CAARRNAGNNRKLIL

SEQ ID NO: 148558 - protein, 13 aa, Homo sapiens
  CDR3 for beta chain variable domain of TCR clone 74279 (TRBV20-1, TRBJ1-1)
CSARGGGNTEAFF

SEQ ID NO: 148559 - protein, 12 aa, Homo sapiens
  CDR3 for alpha chain variable domain of TCR clone 74280 (TRAV3, TRAJ34)
CAVLGNTDKLIF

SEQ ID NO: 148560 - protein, 13 aa, Homo sapiens
  CDR3 for beta chain variable domain of TCR clone 74280 (TRBV19, TRBJ2-1)
CVSSIGTGNEQFF

SEQ ID NO: 148561 - protein, 15 aa, Homo sapiens
  CDR3 for alpha chain variable domain of TCR clone 74281 (TRAV21, TRAJ24)
CASRSSTDSWGKLQF

SEQ ID NO: 148562 - protein, 13 aa, Homo sapiens
  CDR3 for beta chain variable domain of TCR clone 74281 (TRBV11-2, TRBJ2-5)
CASSSTGEETQYF

SEQ ID NO: 148563 - protein, 15 aa, Homo sapiens
  CDR3 for alpha chain variable domain of TCR clone 74282 (TRAV2, TRAJ22)
CAVPSRGGSARQLTF

SEQ ID NO: 148564 - protein, 14 aa, Homo sapiens
  CDR3 for beta chain variable domain of TCR clone 74282 (TRBV5-1, TRBJ2-3)
CASSRGQGGGTQYF

SEQ ID NO: 148565 - protein, 10 aa, Homo sapiens
  CDR3 for alpha chain variable domain of TCR clone 74283 (TRAV21, TRAJ31)
CAVDNARLMF

SEQ ID NO: 148566 - protein, 13 aa, Homo sapiens
  CDR3 for beta chain variable domain of TCR clone 74283 (TRBV5-5, TRBJ2-2)
CSSLLGDTGELFF

SEQ ID NO: 148567 - protein, 13 aa, Homo sapiens
  CDR3 for alpha chain variable domain of TCR clone 74284 (TRAV23/DV6, TRAJ16)
CAASISDGQTLLF

SEQ ID NO: 148568 - protein, 15 aa, Homo sapiens
  CDR3 for beta chain variable domain of TCR clone 74284 (TRBV2, TRBJ2-2)
CASSRETVGTGELFF

SEQ ID NO: 148569 - protein, 14 aa, Homo sapiens
  CDR3 for alpha chain variable domain of TCR clone 74285 (TRAV35, TRAJ22)
CAGLRPGSARQLTF

SEQ ID NO: 148570 - protein, 13 aa, Homo sapiens
  CDR3 for beta chain variable domain of TCR clone 74285 (TRBV4-1, TRBJ2-1)
CASSQAGGDEQFF

SEQ ID NO: 148571 - protein, 16 aa, Homo sapiens
  CDR3 for alpha chain variable domain of TCR clone 74286 (TRAV30, TRAJ24)
CGTEIADADSWGKFQF

SEQ ID NO: 148572 - protein, 15 aa, Homo sapiens
  CDR3 for beta chain variable domain of TCR clone 74286 (TRBV20-1, TRBJ2-7)
CSARDRVSGMDEQYF

SEQ ID NO: 148573 - protein, 14 aa, Homo sapiens
  CDR3 for alpha chain variable domain of TCR clone 74287 (TRAV12-1, TRAJ30)
CVPTGTNRDDKIIF

SEQ ID NO: 148574 - protein, 11 aa, Homo sapiens
  CDR3 for beta chain variable domain of TCR clone 74287 (TRBV4-1, TRBJ2-2)
CASEHIGELFF

SEQ ID NO: 148575 - protein, 14 aa, Homo sapiens
  CDR3 for alpha chain variable domain of TCR clone 74288 (TRAV23/DV6, TRAJ13)
CAASDSGGYQKVTF

SEQ ID NO: 148576 - protein, 13 aa, Homo sapiens
  CDR3 for beta chain variable domain of TCR clone 74288 (TRBV12-4, TRBJ1-1)
CASSPGTGFEAFF

SEQ ID NO: 148577 - protein, 14 aa, Homo sapiens
  CDR3 for alpha chain variable domain of TCR clone 74289 (TRAV1-2, TRAJ8)
CAVREDTGFQKLVF

SEQ ID NO: 148578 - protein, 14 aa, Homo sapiens
  CDR3 for beta chain variable domain of TCR clone 74289 (TRBV5-4, TRBJ2-1)
CASSLDQGLNEQFF

SEQ ID NO: 148579 - protein, 17 aa, Homo sapiens
  CDR3 for alpha chain variable domain of TCR clone 74290 (TRAV27, TRAJ42)
CAERVIYYGGSQGNRIF

SEQ ID NO: 148580 - protein, 14 aa, Homo sapiens
  CDR3 for beta chain variable domain of TCR clone 74290 (TRBV6-6, TRBJ2-3)
CASRLQREADTQYF

SEQ ID NO: 148581 - protein, 12 aa, Homo sapiens
  CDR3 for alpha chain variable domain of TCR clone 74291 (TRAV17, TRAJ43)
CATDAFPAAMRF

SEQ ID NO: 148582 - protein, 14 aa, Homo sapiens
  CDR3 for beta chain variable domain of TCR clone 74291 (TRBV20-1, TRBJ2-3)
CSARDGGSTDTQYF

SEQ ID NO: 148583 - protein, 13 aa, Homo sapiens
  CDR3 for alpha chain variable domain of TCR clone 74292 (TRAV22, TRAJ29)
CAVGGSGNTPLVF

SEQ ID NO: 148584 - protein, 13 aa, Homo sapiens
  CDR3 for beta chain variable domain of TCR clone 74292 (TRBV4-2, TRBJ1-1)
CASSQTGNTEAFF

SEQ ID NO: 148585 - protein, 18 aa, Homo sapiens
  CDR3 for alpha chain variable domain of TCR clone 74293 (TRAV21, TRAJ52)
CAVRPSPAGGTSYGKLTF

SEQ ID NO: 148586 - protein, 14 aa, Homo sapiens
  CDR3 for beta chain variable domain of TCR clone 74293 (TRBV7-3, TRBJ1-1)
CASSLKGGNTEAFF

SEQ ID NO: 148587 - protein, 11 aa, Homo sapiens
  CDR3 for alpha chain variable domain of TCR clone 74294 (TRAV21, TRAJ34)
CAVTNTDKLIF

SEQ ID NO: 148588 - protein, 16 aa, Homo sapiens
  CDR3 for beta chain variable domain of TCR clone 74294 (TRBV18, TRBJ1-1)
CASSPGVVGRGGEAFF

SEQ ID NO: 148589 - protein, 13 aa, Homo sapiens
  CDR3 for alpha chain variable domain of TCR clone 74295 (TRAV3, TRAJ27)
CAVTNTNAGKSTS

SEQ ID NO: 148590 - protein, 13 aa, Homo sapiens
  CDR3 for beta chain variable domain of TCR clone 74295 (TRBV19, TRBJ2-7)
CASQSYGAGEQYF

SEQ ID NO: 148591 - protein, 14 aa, Homo sapiens
  CDR3 for alpha chain variable domain of TCR clone 74296 (TRAV12-1, TRAJ9)
CVVNRRTGGFKTIF

SEQ ID NO: 148592 - protein, 16 aa, Homo sapiens
  CDR3 for beta chain variable domain of TCR clone 74296 (TRBV4-1, TRBJ2-3)
CASSQSTSGAKDTQYF

SEQ ID NO: 148593 - protein, 14 aa, Homo sapiens
  CDR3 for alpha chain variable domain of TCR clone 74297 (TRAV35, TRAJ10)
CAGILTGGGNKLTL

SEQ ID NO: 148594 - protein, 16 aa, Homo sapiens
  CDR3 for beta chain variable domain of TCR clone 74297 (TRBV12-5, TRBJ2-5)
CASGPRTSGNQETQYF

SEQ ID NO: 148595 - protein, 10 aa, Homo sapiens
  CDR3 for alpha chain variable domain of TCR clone 74298 (TRAV23/DV6, TRAJ57)
CAASSTPSQG

SEQ ID NO: 148596 - protein, 14 aa, Homo sapiens
  CDR3 for beta chain variable domain of TCR clone 74298 (TRBV19, TRBJ2-1)
CASSKDRGQDEQFF

SEQ ID NO: 148597 - protein, 15 aa, Homo sapiens
  CDR3 for alpha chain variable domain of TCR clone 74299 (TRAV2, TRAJ9)
CAVAAFNTGGFKTIF

SEQ ID NO: 148598 - protein, 14 aa, Homo sapiens
  CDR3 for beta chain variable domain of TCR clone 74299 (TRBV7-8, TRBJ2-5)
CASSATGGQETQYF

SEQ ID NO: 148599 - protein, 13 aa, Homo sapiens
  CDR3 for alpha chain variable domain of TCR clone 74300 (TRAV21, TRAJ27)
CAARPGNAGKSTF

SEQ ID NO: 148600 - protein, 12 aa, Homo sapiens
  CDR3 for beta chain variable domain of TCR clone 74300 (TRBV11-2, TRBJ2-2)
SASSLGGGELFF

SEQ ID NO: 148601 - protein, 14 aa, Homo sapiens
  CDR3 for alpha chain variable domain of TCR clone 74301 (TRAV20, TRAJ22)
CAVALGGSARQLTF

SEQ ID NO: 148602 - protein, 15 aa, Homo sapiens
  CDR3 for beta chain variable domain of TCR clone 74301 (TRBV6-3, TRBJ2-2)
GASSFLATLTGELFF

SEQ ID NO: 148603 - protein, 14 aa, Homo sapiens
  CDR3 for alpha chain variable domain of TCR clone 74302 (TRAV1-2, TRAJ16)
CAVNRFSDVQKLLF

SEQ ID NO: 148604 - protein, 14 aa, Homo sapiens
  CDR3 for beta chain variable domain of TCR clone 74302 (TRBV19, TRBJ2-1)
CASPTFVLSGEQFF

SEQ ID NO: 148605 - protein, 12 aa, Homo sapiens
  CDR3 for alpha chain variable domain of TCR clone 74303 (TRAV8-3, TRAJ20)
CAVGAYDYKLSF

SEQ ID NO: 148606 - protein, 16 aa, Homo sapiens
  CDR3 for beta chain variable domain of TCR clone 74303 (TRBV19, TRBJ2-2)
CASRSPGTGATGELFF

SEQ ID NO: 148607 - protein, 15 aa, Homo sapiens
  CDR3 for alpha chain variable domain of TCR clone 74304 (TRAV3, TRAJ17)
CAVSPKEAAGNKQTF

SEQ ID NO: 148608 - protein, 12 aa, Homo sapiens
  CDR3 for beta chain variable domain of TCR clone 74304 (TRBV7-9, TRBJ1-6)
CASSLMTSPLHF

SEQ ID NO: 148609 - protein, 12 aa, Homo sapiens
  CDR3 for alpha chain variable domain of TCR clone 74305 (TRAV12-1, TRAJ40)
CVFCSGTYKYIF

SEQ ID NO: 148610 - protein, 12 aa, Homo sapiens
  CDR3 for beta chain variable domain of TCR clone 74305 (TRBV7-3, TRBJ2-1)
CASSFINNEQFF

SEQ ID NO: 148611 - protein, 16 aa, Homo sapiens
  CDR3 for alpha chain variable domain of TCR clone 74306 (TRAV30, TRAJ24)
CGTEIVDADSWGQFQF

SEQ ID NO: 148612 - protein, 12 aa, Homo sapiens
  CDR3 for beta chain variable domain of TCR clone 74306 (TRBV11-2, TRBJ2-2)
CASSLPTGELFF

SEQ ID NO: 148613 - protein, 11 aa, Homo sapiens
  CDR3 for alpha chain variable domain of TCR clone 74307 (TRAV17, TRAJ36)
CAPTGANNLFF

SEQ ID NO: 148614 - protein, 13 aa, Homo sapiens
  CDR3 for beta chain variable domain of TCR clone 74307 (TRBV7-9, TRBJ1-2)
CASSLKQNYGYTF

SEQ ID NO: 148615 - protein, 14 aa, Homo sapiens
  CDR3 for alpha chain variable domain of TCR clone 74308 (TRAV8-4, TRAJ48)
CAVSETFGNERLTF

SEQ ID NO: 148616 - protein, 14 aa, Homo sapiens
  CDR3 for beta chain variable domain of TCR clone 74308 (TRBV13, TRBJ2-7)
CASSLKGASYEQYF

SEQ ID NO: 148617 - protein, 15 aa, Homo sapiens
  CDR3 for alpha chain variable domain of TCR clone 74309 (TRAV23/DV6, TRAJ6)
CAMSATTGGSYIPTF

SEQ ID NO: 148618 - protein, 16 aa, Homo sapiens
  CDR3 for beta chain variable domain of TCR clone 74309 (TRBV20-1, TRBJ1-2)
CSASMGQGVANYGYTF

SEQ ID NO: 148619 - protein, 13 aa, Homo sapiens
  CDR3 for alpha chain variable domain of TCR clone 74310 (TRAV1-2, TRAJ9)
CAALNTGGFKTIF

SEQ ID NO: 148620 - protein, 16 aa, Homo sapiens
  CDR3 for beta chain variable domain of TCR clone 74310 (TRBV19, TRBJ2-3)
CASSPGAASRTDTQYF

SEQ ID NO: 148621 - protein, 13 aa, Homo sapiens
  CDR3 for alpha chain variable domain of TCR clone 74311 (TRAV1-1, TRAJ9)
CAAKNTRGFKTIF

SEQ ID NO: 148622 - protein, 14 aa, Homo sapiens
  CDR3 for beta chain variable domain of TCR clone 74311 (TRBV20-1, TRBJ2-1)
CSTQIGGSANEQFF

SEQ ID NO: 148623 - protein, 13 aa, Homo sapiens
  CDR3 for alpha chain variable domain of TCR clone 74312 (TRAV12-1, TRAJ22)
CVASGGSARQLTF

SEQ ID NO: 148624 - protein, 14 aa, Homo sapiens
  CDR3 for beta chain variable domain of TCR clone 74312 (TRBV5-1, TRBJ2-2)
CASSLIWIPGELFF

SEQ ID NO: 148625 - protein, 15 aa, Homo sapiens
  CDR3 for alpha chain variable domain of TCR clone 74313 (TRAV27, TRAJ38)
CAARRNAGNNRKLIW

SEQ ID NO: 148626 - protein, 13 aa, Homo sapiens
  CDR3 for beta chain variable domain of TCR clone 74313 (TRBV7-3, TRBJ2-1)
CASSLDSYNEQFF

SEQ ID NO: 148627 - protein, 14 aa, Homo sapiens
  CDR3 for alpha chain variable domain of TCR clone 74314 (TRAV1-2, TRAJ16)
CAVNRFSDGQKLLF

SEQ ID NO: 148628 - protein, 14 aa, Homo sapiens
  CDR3 for beta chain variable domain of TCR clone 74314 (TRBV7-2, TRBJ1-1)
CASSFLTGTIEAFF

SEQ ID NO: 148629 - protein, 16 aa, Homo sapiens
  CDR3 for alpha chain variable domain of TCR clone 74315 (TRAV12-1, TRAJ18)
CVVNPRGGPTLGRLYF

SEQ ID NO: 148630 - protein, 14 aa, Homo sapiens
  CDR3 for beta chain variable domain of TCR clone 74315 (TRBV27, TRBJ2-1)
CASRPMGQGVEQFF

SEQ ID NO: 148631 - protein, 15 aa, Homo sapiens
  CDR3 for alpha chain variable domain of TCR clone 74316 (TRAV8-3, TRAJ11)
CAVGLLNSGYSTLTF

SEQ ID NO: 148632 - protein, 15 aa, Homo sapiens
  CDR3 for beta chain variable domain of TCR clone 74316 (TRBV28, TRBJ2-5)
CASSPPWSYQETQYF

SEQ ID NO: 148633 - protein, 15 aa, Homo sapiens
  CDR3 for alpha chain variable domain of TCR clone 74317 (TRAV21, TRAJ53)
CATLNSGGSNYKLTF

SEQ ID NO: 148634 - protein, 16 aa, Homo sapiens
  CDR3 for beta chain variable domain of TCR clone 74317 (TRBV19, TRBJ1-2)
CASSIGLFRDAYGYTF

SEQ ID NO: 148635 - protein, 12 aa, Homo sapiens
  CDR3 for alpha chain variable domain of TCR clone 74318 (TRAV8-3, TRAJ31)
CAVADKQCQTHV

SEQ ID NO: 148636 - protein, 16 aa, Homo sapiens
  CDR3 for beta chain variable domain of TCR clone 74318 (TRBV20-1, TRBJ1-4)
CSAPGQGLLTNEKLFF

SEQ ID NO: 148637 - protein, 14 aa, Homo sapiens
  CDR3 for alpha chain variable domain of TCR clone 74319 (TRAV17, TRAJ11)
CATDTSRGYSTLPF

SEQ ID NO: 148638 - protein, 13 aa, Homo sapiens
  CDR3 for beta chain variable domain of TCR clone 74319 (TRBV19, TRBJ2-5)
CASRDSRRETQYF

SEQ ID NO: 148639 - protein, 15 aa, Homo sapiens
  CDR3 for alpha chain variable domain of TCR clone 74320 (TRAV17, TRAJ4)
CDTGTWSGGYNKLIF

SEQ ID NO: 148640 - protein, 13 aa, Homo sapiens
  CDR3 for beta chain variable domain of TCR clone 74320 (TRBV6-6, TRBJ2-7)
CASSPKHLAEQYF

SEQ ID NO: 148641 - protein, 13 aa, Homo sapiens
  CDR3 for alpha chain variable domain of TCR clone 74321 (TRAV22, TRAJ26)
CVVEHNYGQNFVF

SEQ ID NO: 148642 - protein, 16 aa, Homo sapiens
  CDR3 for beta chain variable domain of TCR clone 74321 (TRBV7-2, TRBJ2-6)
CASSERRASGANVLTF

SEQ ID NO: 148643 - protein, 11 aa, Homo sapiens
  CDR3 for alpha chain variable domain of TCR clone 74322 (TRAV12-2, TRAJ31)
CAVTRWARLMV

SEQ ID NO: 148644 - protein, 15 aa, Homo sapiens
  CDR3 for beta chain variable domain of TCR clone 74322 (TRBV19, TRBJ2-7)
CASSIGGGLVNEQYF

SEQ ID NO: 148645 - protein, 14 aa, Homo sapiens
  CDR3 for alpha chain variable domain of TCR clone 74323 (TRAV1-2, TRAJ8)
CAVREDTGFQKLLF

SEQ ID NO: 148646 - protein, 15 aa, Homo sapiens
  CDR3 for beta chain variable domain of TCR clone 74323 (TRBV12-4, TRBJ2-5)
CASSPPTGLQETQYF

SEQ ID NO: 148647 - protein, 15 aa, Homo sapiens
  CDR3 for alpha chain variable domain of TCR clone 74324 (TRAV26-1, TRAJ29)
CIVRVEGSGNTPLVF

SEQ ID NO: 148648 - protein, 15 aa, Homo sapiens
  CDR3 for beta chain variable domain of TCR clone 74324 (TRBV7-9, TRBJ1-5)
CASSQGHQPNQPQHF

SEQ ID NO: 148649 - protein, 11 aa, Homo sapiens
  CDR3 for alpha chain variable domain of TCR clone 74325 (TRAV21, TRAJ34)
CVHYNTDKLIF

SEQ ID NO: 148650 - protein, 13 aa, Homo sapiens
  CDR3 for beta chain variable domain of TCR clone 74325 (TRBV20-1, TRBJ2-7)
CSADPGATYEQYF

SEQ ID NO: 148651 - protein, 13 aa, Homo sapiens
  CDR3 for alpha chain variable domain of TCR clone 74326 (TRAV12-1, TRAJ26)
CVVRRNYGRNFVF

SEQ ID NO: 148652 - protein, 15 aa, Homo sapiens
  CDR3 for beta chain variable domain of TCR clone 74326 (TRBV28, TRBJ2-1)
CASSIIAGGRSEQFF

SEQ ID NO: 148653 - protein, 15 aa, Homo sapiens
  CDR3 for alpha chain variable domain of TCR clone 74327 (TRAV3, TRAJ13)
CAVRVYSGGYQKVTF

SEQ ID NO: 148654 - protein, 15 aa, Homo sapiens
  CDR3 for beta chain variable domain of TCR clone 74327 (TRBV5-7, TRBJ1-2)
CASSLGVAANYGCTF

SEQ ID NO: 148655 - protein, 11 aa, Homo sapiens
  CDR3 for alpha chain variable domain of TCR clone 74328 (TRAV12-1, TRAJ26)
CVAAYGQNFVF

SEQ ID NO: 148656 - protein, 15 aa, Homo sapiens
  CDR3 for beta chain variable domain of TCR clone 74328 (TRBV12-4, TRBJ2-5)
CASSGTGQAQETQYF

SEQ ID NO: 148657 - protein, 11 aa, Homo sapiens
  CDR3 for alpha chain variable domain of TCR clone 74329 (TRAV29/DV5, TRAJ31)
CAASYRDRLMF

SEQ ID NO: 148658 - protein, 19 aa, Homo sapiens
  CDR3 for beta chain variable domain of TCR clone 74329 (TRBV19, TRBJ2-5)
GASSIGQVTDFFLGETQYF

SEQ ID NO: 148659 - protein, 11 aa, Homo sapiens
  CDR3 for alpha chain variable domain of TCR clone 74330 (TRAV12-1, TRAJ34)
CVVNKGREHIF

SEQ ID NO: 148660 - protein, 12 aa, Homo sapiens
  CDR3 for beta chain variable domain of TCR clone 74330 (TRBV2, TRBJ2-1)
CAYGPPGNEQFF

SEQ ID NO: 148661 - protein, 12 aa, Homo sapiens
  CDR3 for alpha chain variable domain of TCR clone 74331 (TRAV21, TRAJ33)
CAKMDSNYQLIW

SEQ ID NO: 148662 - protein, 14 aa, Homo sapiens
  CDR3 for beta chain variable domain of TCR clone 74331 (TRBV2, TRBJ2-7)
CASNLTSGGYEQYF

SEQ ID NO: 148663 - protein, 14 aa, Homo sapiens
  CDR3 for alpha chain variable domain of TCR clone 74332 (TRAV13-1, TRAJ44)
CAAKATGTASKLTF

SEQ ID NO: 148664 - protein, 17 aa, Homo sapiens
  CDR3 for beta chain variable domain of TCR clone 74332 (TRBV7-3, TRBJ2-3)
CASSLMKRMLGADTQYF

SEQ ID NO: 148665 - protein, 14 aa, Homo sapiens
  CDR3 for alpha chain variable domain of TCR clone 74333 (TRAV29/DV5, TRAJ45)
CAASFRGGADGLTF

SEQ ID NO: 148666 - protein, 10 aa, Homo sapiens
  CDR3 for beta chain variable domain of TCR clone 74333 (TRBV11-2, TRBJ2-2)
CQQLTGELFF

SEQ ID NO: 148667 - protein, 11 aa, Homo sapiens
  CDR3 for alpha chain variable domain of TCR clone 74334 (TRAV2, TRAJ13)
CASGGYQKVTF

SEQ ID NO: 148668 - protein, 14 aa, Homo sapiens
  CDR3 for beta chain variable domain of TCR clone 74334 (TRBV4-2, TRBJ1-2)
CASSPGGSNYGYTF

SEQ ID NO: 148669 - protein, 15 aa, Homo sapiens
  CDR3 for alpha chain variable domain of TCR clone 74335 (TRAV2, TRAJ9)
CAVAALNTGGFKTIF

SEQ ID NO: 148670 - protein, 11 aa, Homo sapiens
  CDR3 for beta chain variable domain of TCR clone 74335 (TRBV20-1, TRBJ2-3)
CSGTSSTTQYF

SEQ ID NO: 148671 - protein, 15 aa, Homo sapiens
  CDR3 for alpha chain variable domain of TCR clone 74336 (TRAV34, TRAJ38)
CGADFTPGNNRKLIW

SEQ ID NO: 148672 - protein, 13 aa, Homo sapiens
  CDR3 for beta chain variable domain of TCR clone 74336 (TRBV7-2, TRBJ2-2)
CASSLAVTGELFF

SEQ ID NO: 148673 - protein, 15 aa, Homo sapiens
  CDR3 for alpha chain variable domain of TCR clone 74337 (TRAV12-3, TRAJ40)
CAVRPQTSGTYKYIF

SEQ ID NO: 148674 - protein, 13 aa, Homo sapiens
  CDR3 for beta chain variable domain of TCR clone 74337 (TRBV7-2, TRBJ2-2)
CASSSVRAGELFF

SEQ ID NO: 148675 - protein, 12 aa, Homo sapiens
  CDR3 for alpha chain variable domain of TCR clone 74338 (TRAV12-1, TRAJ20)
CVVNPDDYKLSF

SEQ ID NO: 148676 - protein, 14 aa, Homo sapiens
  CDR3 for beta chain variable domain of TCR clone 74338 (TRBV20-1, TRBJ2-1)
CSPNDEASYNEQFF

SEQ ID NO: 148677 - protein, 14 aa, Homo sapiens
  CDR3 for alpha chain variable domain of TCR clone 74339 (TRAV17, TRAJ57)
CATDPQGGSEKLVF

SEQ ID NO: 148678 - protein, 13 aa, Homo sapiens
  CDR3 for beta chain variable domain of TCR clone 74339 (TRBV4-2, TRBJ1-1)
CASSQAGNTEAFF

SEQ ID NO: 148679 - protein, 16 aa, Homo sapiens
  CDR3 for alpha chain variable domain of TCR clone 74340 (TRAV30, TRAJ24)
CGPEIVDADSWGKFQF

SEQ ID NO: 148680 - protein, 12 aa, Homo sapiens
  CDR3 for beta chain variable domain of TCR clone 74340 (TRBV11-2, TRBJ2-2)
CASSLGGGELFF

SEQ ID NO: 148681 - protein, 14 aa, Homo sapiens
  CDR3 for alpha chain variable domain of TCR clone 74341 (TRAV13-2, TRAJ43)
CAEIPTYNNKDMRF

SEQ ID NO: 148682 - protein, 15 aa, Homo sapiens
  CDR3 for beta chain variable domain of TCR clone 74341 (TRBV7-9, TRBJ2-2)
CASGPLDTFPGELFF

SEQ ID NO: 148683 - protein, 15 aa, Homo sapiens
  CDR3 for alpha chain variable domain of TCR clone 74342 (TRAV8-1, TRAJ6)
CAVNTPPGGSYIPTF

SEQ ID NO: 148684 - protein, 14 aa, Homo sapiens
  CDR3 for beta chain variable domain of TCR clone 74342 (TRBV12-4, TRBJ2-1)
CASSLGQGASDQFF

SEQ ID NO: 148685 - protein, 12 aa, Homo sapiens
  CDR3 for alpha chain variable domain of TCR clone 74343 (TRAV13-2, TRAJ8)
CAPWLGFQKLVF

SEQ ID NO: 148686 - protein, 15 aa, Homo sapiens
  CDR3 for beta chain variable domain of TCR clone 74343 (TRBV20-1, TRBJ2-7)
CSARDRVSGMDERYF

SEQ ID NO: 148687 - protein, 15 aa, Homo sapiens
  CDR3 for alpha chain variable domain of TCR clone 74344 (TRAV12-3, TRAJ10)
CASYILTGGGNKLTF

SEQ ID NO: 148688 - protein, 15 aa, Homo sapiens
  CDR3 for beta chain variable domain of TCR clone 74344 (TRBV7-2, TRBJ1-6)
CASILGPDRGMPLHF

SEQ ID NO: 148689 - protein, 13 aa, Homo sapiens
  CDR3 for alpha chain variable domain of TCR clone 74345 (TRAV14/DV4, TRAJ23)
CAMREVKGGKLIF

SEQ ID NO: 148690 - protein, 15 aa, Homo sapiens
  CDR3 for beta chain variable domain of TCR clone 74345 (TRBV6-3, TRBJ2-1)
CASSDASDSYNEQFF

SEQ ID NO: 148691 - protein, 15 aa, Homo sapiens
  CDR3 for alpha chain variable domain of TCR clone 74346 (TRAV8-3, TRAJ20)
CAVEAKGSNDYKLSF

SEQ ID NO: 148692 - protein, 14 aa, Homo sapiens
  CDR3 for beta chain variable domain of TCR clone 74346 (TRBV7-2, TRBJ1-4)
CASSHSKTNEKLFF

SEQ ID NO: 148693 - protein, 15 aa, Homo sapiens
  CDR3 for alpha chain variable domain of TCR clone 74347 (TRAV8-3, TRAJ45)
CASSYSGGGSDGLTF

SEQ ID NO: 148694 - protein, 16 aa, Homo sapiens
  CDR3 for beta chain variable domain of TCR clone 74347 (TRBV20-1, TRBJ2-2)
CSASASGIPGAGELFF

SEQ ID NO: 148695 - protein, 12 aa, Homo sapiens
  CDR3 for alpha chain variable domain of TCR clone 74348 (TRAV8-3, TRAJ20)
CAVGWGDYKLSF

SEQ ID NO: 148696 - protein, 14 aa, Homo sapiens
  CDR3 for beta chain variable domain of TCR clone 74348 (TRBV5-1, TRBJ2-7)
CASSRGESLYEQYF

SEQ ID NO: 148697 - protein, 17 aa, Homo sapiens
  CDR3 for alpha chain variable domain of TCR clone 74349 (TRAV17, TRAJ57)
TSVLRTNGQGGSEKLVF

SEQ ID NO: 148698 - protein, 14 aa, Homo sapiens
  CDR3 for beta chain variable domain of TCR clone 74349 (TRBV11-1, TRBJ1-1)
CASSLEHPNTEAFF

SEQ ID NO: 148699 - protein, 14 aa, Homo sapiens
  CDR3 for alpha chain variable domain of TCR clone 74350 (TRAV1-2, TRAJ27)
CAVRSGTNAGKSTF

SEQ ID NO: 148700 - protein, 15 aa, Homo sapiens
  CDR3 for beta chain variable domain of TCR clone 74350 (TRBV5-1, TRBJ2-7)
CASSLNGGPAREQYF

SEQ ID NO: 148701 - protein, 14 aa, Homo sapiens
  CDR3 for alpha chain variable domain of TCR clone 74351 (TRAV35, TRAJ33)
FAGSSQDSNYQLIW

SEQ ID NO: 148702 - protein, 15 aa, Homo sapiens
  CDR3 for beta chain variable domain of TCR clone 74351 (TRBV20-1, TRBJ2-7)
CSAESGTSGAYEQYF

SEQ ID NO: 148703 - protein, 14 aa, Homo sapiens
  CDR3 for alpha chain variable domain of TCR clone 74352 (TRAV1-2, TRAJ16)
CAVNRFSDGQKLLF

SEQ ID NO: 148704 - protein, 13 aa, Homo sapiens
  CDR3 for beta chain variable domain of TCR clone 74352 (TRBV27, TRBJ2-7)
CASSFGDSHEQYF

SEQ ID NO: 148705 - protein, 15 aa, Homo sapiens
  CDR3 for alpha chain variable domain of TCR clone 74353 (TRAV8-4, TRAJ3)
CAVTGENLVQQCFQD

SEQ ID NO: 148706 - protein, 13 aa, Homo sapiens
  CDR3 for beta chain variable domain of TCR clone 74353 (TRBV7-9, TRBJ1-2)
CASSLKQNYGYTF

SEQ ID NO: 148707 - protein, 12 aa, Homo sapiens
  CDR3 for alpha chain variable domain of TCR clone 74354 (TRAV13-1, TRAJ21)
CAAKEGFNNFYF

SEQ ID NO: 148708 - protein, 17 aa, Homo sapiens
  CDR3 for beta chain variable domain of TCR clone 74354 (TRBV19, TRBJ2-7)
CASSISFYDSYPYEQYF

SEQ ID NO: 148709 - protein, 13 aa, Homo sapiens
  CDR3 for alpha chain variable domain of TCR clone 74355 (TRAV8-2, TRAJ36)
CVVSHLPTNNLFF

SEQ ID NO: 148710 - protein, 18 aa, Homo sapiens
  CDR3 for beta chain variable domain of TCR clone 74355 (TRBV7-9, TRBJ2-6)
CASIFPGAGISGANVLTF

SEQ ID NO: 148711 - protein, 15 aa, Homo sapiens
  CDR3 for alpha chain variable domain of TCR clone 74356 (TRAV21, TRAJ53)
CATLNSGDSNYKLTF

SEQ ID NO: 148712 - protein, 16 aa, Homo sapiens
  CDR3 for beta chain variable domain of TCR clone 74356 (TRBV9, TRBJ2-1)
CASSVGGGGNYNEQFF

SEQ ID NO: 148713 - protein, 12 aa, Homo sapiens
  CDR3 for alpha chain variable domain of TCR clone 74357 (TRAV2, TRAJ10)
CASTGGGSKLTF

SEQ ID NO: 148714 - protein, 14 aa, Homo sapiens
  CDR3 for beta chain variable domain of TCR clone 74357 (TRBV7-2, TRBJ2-2)
CASRGQGAAGELFF

SEQ ID NO: 148715 - protein, 15 aa, Homo sapiens
  CDR3 for alpha chain variable domain of TCR clone 74358 (TRAV12-1, TRAJ44)
CVVDEYTGTASKLTF

SEQ ID NO: 148716 - protein, 14 aa, Homo sapiens
  CDR3 for beta chain variable domain of TCR clone 74358 (TRBV5-1, TRBJ1-2)
CASSLGPVNYGYTF

SEQ ID NO: 148717 - protein, 17 aa, Homo sapiens
  CDR3 for alpha chain variable domain of TCR clone 74359 (TRAV3, TRAJ6)
CAVRDGPRAGGSYIPTF

SEQ ID NO: 148718 - protein, 13 aa, Homo sapiens
  CDR3 for beta chain variable domain of TCR clone 74359 (TRBV25-1, TRBJ2-5)
CASSESGRETQYF

SEQ ID NO: 148719 - protein, 17 aa, Homo sapiens
  CDR3 for alpha chain variable domain of TCR clone 74360 (TRAV3, TRAJ6)
CAVRDGPRAGVSYIPTF

SEQ ID NO: 148720 - protein, 20 aa, Homo sapiens
  CDR3 for beta chain variable domain of TCR clone 74360 (TRBV28, TRBJ2-1)
CASTPIGRSPGLAGGNEQFF

SEQ ID NO: 148721 - protein, 11 aa, Homo sapiens
  CDR3 for alpha chain variable domain of TCR clone 74361 (TRAV17, TRAJ31)
CSTSNNARLMF

SEQ ID NO: 148722 - protein, 16 aa, Homo sapiens
  CDR3 for beta chain variable domain of TCR clone 74361 (TRBV7-8, TRBJ2-4)
CASSAERTLAKNIQYF

SEQ ID NO: 148723 - protein, 13 aa, Homo sapiens
  CDR3 for alpha chain variable domain of TCR clone 74362 (TRAV17, TRAJ26)
CATVDNYGQNFVF

SEQ ID NO: 148724 - protein, 14 aa, Homo sapiens
  CDR3 for beta chain variable domain of TCR clone 74362 (TRBV6-1, TRBJ1-3)
CASVQGGGGNTMYF

SEQ ID NO: 148725 - protein, 15 aa, Homo sapiens
  CDR3 for alpha chain variable domain of TCR clone 74363 (TRAV12-3, TRAJ6)
CAMSATTGGSYIPTF

SEQ ID NO: 148726 - protein, 19 aa, Homo sapiens
  CDR3 for beta chain variable domain of TCR clone 74363 (TRBV25-1, TRBJ2-2)
CAILAYRVDRGRKTGELFF

SEQ ID NO: 148727 - protein, 16 aa, Homo sapiens
  CDR3 for alpha chain variable domain of TCR clone 74364 (TRAV12-2, TRAJ10)
CAVNRVLTGGGNKLTF

SEQ ID NO: 148728 - protein, 15 aa, Homo sapiens
  CDR3 for beta chain variable domain of TCR clone 74364 (TRBV9, TRBJ1-6)
CASSVAGTGDSPLHF

SEQ ID NO: 148729 - protein, 12 aa, Homo sapiens
  CDR3 for alpha chain variable domain of TCR clone 74365 (TRAV2, TRAJ9)
CAVGPGGFKTIF

SEQ ID NO: 148730 - protein, 16 aa, Homo sapiens
  CDR3 for beta chain variable domain of TCR clone 74365 (TRBV13, TRBJ2-2)
CASSPRTGEHTGELFF

SEQ ID NO: 148731 - protein, 14 aa, Homo sapiens
  CDR3 for alpha chain variable domain of TCR clone 74366 (TRAV1-2, TRAJ8)
CAVREGTGFQKLVF

SEQ ID NO: 148732 - protein, 16 aa, Homo sapiens
  CDR3 for beta chain variable domain of TCR clone 74366 (TRBV4-1, TRBJ2-7)
CASSRGDILNSYEQYF

SEQ ID NO: 148733 - protein, 11 aa, Homo sapiens
  CDR3 for alpha chain variable domain of TCR clone 74367 (TRAV13-1, TRAJ39)
CASHAGNMLTF

SEQ ID NO: 148734 - protein, 15 aa, Homo sapiens
  CDR3 for beta chain variable domain of TCR clone 74367 (TRBV20-1, TRBJ2-7)
CSARDRVSGVDEQYF

SEQ ID NO: 148735 - protein, 14 aa, Homo sapiens
  CDR3 for alpha chain variable domain of TCR clone 74368 (TRAV1-2, TRAJ16)
CAVNRFSDGQKLLF

SEQ ID NO: 148736 - protein, 11 aa, Homo sapiens
  CDR3 for beta chain variable domain of TCR clone 74368 (TRBV7-9, TRBJ2-3)
CASSTTDTQYF

SEQ ID NO: 148737 - protein, 21 aa, Homo sapiens
  CDR3 for alpha chain variable domain of TCR clone 74369 (TRAV26-1, TRAJ22)
CIVRVSFWFCKATDLWIWDTF

SEQ ID NO: 148738 - protein, 13 aa, Homo sapiens
  CDR3 for beta chain variable domain of TCR clone 74369 (TRBV7-9, TRBJ1-2)
CASSLKQNYGYTF

SEQ ID NO: 148739 - protein, 14 aa, Homo sapiens
  CDR3 for alpha chain variable domain of TCR clone 74370 (TRAV21, TRAJ35)
CAVMPKGFGNVLHC

SEQ ID NO: 148740 - protein, 12 aa, Homo sapiens
  CDR3 for beta chain variable domain of TCR clone 74370 (TRBV7-9, TRBJ2-7)
CASSIKREEQYF

SEQ ID NO: 148741 - protein, 14 aa, Homo sapiens
  CDR3 for alpha chain variable domain of TCR clone 74371 (TRAV12-3, TRAJ33)
CNDHGRDSNYQLIW

SEQ ID NO: 148742 - protein, 15 aa, Homo sapiens
  CDR3 for beta chain variable domain of TCR clone 74371 (TRBV28, TRBJ1-5)
CACSLPQQGEQPQHF

SEQ ID NO: 148743 - protein, 16 aa, Homo sapiens
  CDR3 for alpha chain variable domain of TCR clone 74372 (TRAV3, TRAJ37)
CAVRGKGSGNTGKLIF

SEQ ID NO: 148744 - protein, 15 aa, Homo sapiens
  CDR3 for beta chain variable domain of TCR clone 74372 (TRBV5-1, TRBJ2-1)
CASSPPRAPYNEQFF

SEQ ID NO: 148745 - protein, 16 aa, Homo sapiens
  CDR3 for alpha chain variable domain of TCR clone 74373 (TRAV26-1, TRAJ53)
CIVRVAMGGSNYKLTF

SEQ ID NO: 148746 - protein, 14 aa, Homo sapiens
  CDR3 for beta chain variable domain of TCR clone 74373 (TRBV2, TRBJ2-7)
CASSLISGGYEQYF

SEQ ID NO: 148747 - protein, 15 aa, Homo sapiens
  CDR3 for alpha chain variable domain of TCR clone 74374 (TRAV25, TRAJ53)
CAATGGGGSNYKLTF

SEQ ID NO: 148748 - protein, 12 aa, Homo sapiens
  CDR3 for beta chain variable domain of TCR clone 74374 (TRBV7-3, TRBJ2-1)
CASSFINNEQFF

SEQ ID NO: 148749 - protein, 14 aa, Homo sapiens
  CDR3 for alpha chain variable domain of TCR clone 74375 (TRAV12-3, TRAJ42)
CAMNYGGSQGNLIF

SEQ ID NO: 148750 - protein, 11 aa, Homo sapiens
  CDR3 for beta chain variable domain of TCR clone 74375 (TRBV29-1, TRBJ2-5)
CSEDRTGTQYF

SEQ ID NO: 148751 - protein, 14 aa, Homo sapiens
  CDR3 for alpha chain variable domain of TCR clone 74376 (TRAV8-4, TRAJ9)
CAVRINTGGFKTIF

SEQ ID NO: 148752 - protein, 14 aa, Homo sapiens
  CDR3 for beta chain variable domain of TCR clone 74376 (TRBV11-2, TRBJ2-3)
CASSRLARTDTQYF

SEQ ID NO: 148753 - protein, 15 aa, Homo sapiens
  CDR3 for alpha chain variable domain of TCR clone 74377 (TRAV8-3, TRAJ45)
CASSYSGGGDDGLTF

SEQ ID NO: 148754 - protein, 17 aa, Homo sapiens
  CDR3 for beta chain variable domain of TCR clone 74377 (TRBV7-8, TRBJ1-2)
CASSLRPLQGHLYGYTL

SEQ ID NO: 148755 - protein, 13 aa, Homo sapiens
  CDR3 for alpha chain variable domain of TCR clone 74378 (TRAV1-1, TRAJ9)
CAAKNTGGFKTIF

SEQ ID NO: 148756 - protein, 13 aa, Homo sapiens
  CDR3 for beta chain variable domain of TCR clone 74378 (TRBV4-2, TRBJ1-1)
CASSQAGNTEAFF

SEQ ID NO: 148757 - protein, 13 aa, Homo sapiens
  CDR3 for alpha chain variable domain of TCR clone 74379 (TRAV3, TRAJ50)
CAVIKTSYDKVIF

SEQ ID NO: 148758 - protein, 15 aa, Homo sapiens
  CDR3 for beta chain variable domain of TCR clone 74379 (TRBV7-2, TRBJ2-2)
CASRRPGQNTGELFF

SEQ ID NO: 148759 - protein, 16 aa, Homo sapiens
  CDR3 for alpha chain variable domain of TCR clone 74380 (TRAV12-2, TRAJ50)
CAVGTATKTSYDKVIF

SEQ ID NO: 148760 - protein, 12 aa, Homo sapiens
  CDR3 for beta chain variable domain of TCR clone 74380 (TRBV12-4, TRBJ1-5)
CASSLGRQPRHF

SEQ ID NO: 148761 - protein, 17 aa, Homo sapiens
  CDR3 for alpha chain variable domain of TCR clone 74381 (TRAV3, TRAJ6)
CAVRDGPRVGGSYIPPF

SEQ ID NO: 148762 - protein, 12 aa, Homo sapiens
  CDR3 for beta chain variable domain of TCR clone 74381 (TRBV11-2, TRBJ2-2)
CASSLGGGELFF

SEQ ID NO: 148763 - protein, 16 aa, Homo sapiens
  CDR3 for alpha chain variable domain of TCR clone 74382 (TRAV12-2, TRAJ32)
CAVNLGQGGATNKLIF

SEQ ID NO: 148764 - protein, 11 aa, Homo sapiens
  CDR3 for beta chain variable domain of TCR clone 74382 (TRBV18, TRBJ2-5)
CASSPRETQYF

SEQ ID NO: 148765 - protein, 12 aa, Homo sapiens
  CDR3 for alpha chain variable domain of TCR clone 74383 (TRAV13-2, TRAJ23)
CAERHRGGKLIF

SEQ ID NO: 148766 - protein, 16 aa, Homo sapiens
  CDR3 for beta chain variable domain of TCR clone 74383 (TRBV6-1, TRBJ1-3)
CASVQGGVETPYILER

SEQ ID NO: 148767 - protein, 14 aa, Homo sapiens
  CDR3 for alpha chain variable domain of TCR clone 74384 (TRAV17, TRAJ16)
CATADFSDGQKLLF

SEQ ID NO: 148768 - protein, 15 aa, Homo sapiens
  CDR3 for beta chain variable domain of TCR clone 74384 (TRBV18, TRBJ2-1)
CASSPPSASYNEQFS

SEQ ID NO: 148769 - protein, 15 aa, Homo sapiens
  CDR3 for alpha chain variable domain of TCR clone 74385 (TRAV25, TRAJ52)
CAGRPGGTSYGKLTF

SEQ ID NO: 148770 - protein, 15 aa, Homo sapiens
  CDR3 for beta chain variable domain of TCR clone 74385 (TRBV7-8, TRBJ2-1)
CASSLADSLYNEQFF

SEQ ID NO: 148771 - protein, 13 aa, Homo sapiens
  CDR3 for alpha chain variable domain of TCR clone 74386 (TRAV12-3, TRAJ9)
CAMRNTGGFKTIF

SEQ ID NO: 148772 - protein, 14 aa, Homo sapiens
  CDR3 for beta chain variable domain of TCR clone 74386 (TRBV11-2, TRBJ2-5)
CASSSTGEGYEQYF

SEQ ID NO: 148773 - protein, 18 aa, Homo sapiens
  CDR3 for alpha chain variable domain of TCR clone 74387 (TRAV8-4, TRAJ52)
CAVTRANAGGTSYGKLTF

SEQ ID NO: 148774 - protein, 20 aa, Homo sapiens
  CDR3 for beta chain variable domain of TCR clone 74387 (TRBV19, TRBJ2-1)
CASSISRTVTSTRLNNEQLF

SEQ ID NO: 148775 - protein, 12 aa, Homo sapiens
  CDR3 for alpha chain variable domain of TCR clone 74388 (TRAV13-1, TRAJ49)
CAASPMGNQFYF

SEQ ID NO: 148776 - protein, 15 aa, Homo sapiens
  CDR3 for beta chain variable domain of TCR clone 74388 (TRBV12-4, TRBJ1-3)
CASSLGAISGNTIYF

SEQ ID NO: 148777 - protein, 14 aa, Homo sapiens
  CDR3 for alpha chain variable domain of TCR clone 74389 (TRAV12-2, TRAJ44)
CAVNPAGTASKLTF

SEQ ID NO: 148778 - protein, 13 aa, Homo sapiens
  CDR3 for beta chain variable domain of TCR clone 74389 (TRBV20-1, TRBJ1-6)
CSVPLGVGSPLHF

SEQ ID NO: 148779 - protein, 12 aa, Homo sapiens
  CDR3 for alpha chain variable domain of TCR clone 74390 (TRAV12-2, TRAJ31)
CAVNTPDARLMF

SEQ ID NO: 148780 - protein, 17 aa, Homo sapiens
  CDR3 for beta chain variable domain of TCR clone 74390 (TRBV20-1, TRBJ1-6)
RSARGGYTFSYNSPLHF

SEQ ID NO: 148781 - protein, 13 aa, Homo sapiens
  CDR3 for alpha chain variable domain of TCR clone 74391 (TRAV2, TRAJ40)
CAVVTLGTYKYIF

SEQ ID NO: 148782 - protein, 17 aa, Homo sapiens
  CDR3 for beta chain variable domain of TCR clone 74391 (TRBV5-1, TRBJ2-5)
CASSPVALGQNQETQYF

SEQ ID NO: 148783 - protein, 16 aa, Homo sapiens
  CDR3 for alpha chain variable domain of TCR clone 74392 (TRAV27, TRAJ52)
CAGAPAGGTCYGKLTF

SEQ ID NO: 148784 - protein, 12 aa, Homo sapiens
  CDR3 for beta chain variable domain of TCR clone 74392 (TRBV27, TRBJ2-1)
CASRGFYNEQFF

SEQ ID NO: 148785 - protein, 13 aa, Homo sapiens
  CDR3 for alpha chain variable domain of TCR clone 74393 (TRAV16, TRAJ28)
CALTGAGSYQLTF

SEQ ID NO: 148786 - protein, 16 aa, Homo sapiens
  CDR3 for beta chain variable domain of TCR clone 74393 (TRBV28, TRBJ1-5)
CASSLTGQGWNQPQHL

SEQ ID NO: 148787 - protein, 14 aa, Homo sapiens
  CDR3 for alpha chain variable domain of TCR clone 74394 (TRAV20, TRAJ42)
CAVQAGGSQGNLIF

SEQ ID NO: 148788 - protein, 12 aa, Homo sapiens
  CDR3 for beta chain variable domain of TCR clone 74394 (TRBV12-4, TRBJ1-2)
CASSFIWLHLRF

SEQ ID NO: 148789 - protein, 14 aa, Homo sapiens
  CDR3 for alpha chain variable domain of TCR clone 74395 (TRAV2, TRAJ9)
CAVEDRSGGFKTIF

SEQ ID NO: 148790 - protein, 17 aa, Homo sapiens
  CDR3 for beta chain variable domain of TCR clone 74395 (TRBV24-1, TRBJ2-1)
CATSDASTSGTYNEQFF

SEQ ID NO: 148791 - protein, 15 aa, Homo sapiens
  CDR3 for alpha chain variable domain of TCR clone 74396 (TRAV29/DV5, TRAJ24)
CAASGATDSWGKFQF

SEQ ID NO: 148792 - protein, 12 aa, Homo sapiens
  CDR3 for beta chain variable domain of TCR clone 74396 (TRBV11-2, TRBJ2-2)
RASSLPTGELFF

SEQ ID NO: 148793 - protein, 16 aa, Homo sapiens
  CDR3 for alpha chain variable domain of TCR clone 74397 (TRAV12-3, TRAJ53)
CAMSPGRGGSNYKLTF

SEQ ID NO: 148794 - protein, 13 aa, Homo sapiens
  CDR3 for beta chain variable domain of TCR clone 74397 (TRBV12-5, TRBJ2-3)
CASGDRQSDTQYF

SEQ ID NO: 148795 - protein, 14 aa, Homo sapiens
  CDR3 for alpha chain variable domain of TCR clone 74398 (TRAV17, TRAJ22)
CATSPSGSARQLTF

SEQ ID NO: 148796 - protein, 14 aa, Homo sapiens
  CDR3 for beta chain variable domain of TCR clone 74398 (TRBV6-1, TRBJ1-3)
CASVQGGGGNTIYF

SEQ ID NO: 148797 - protein, 14 aa, Homo sapiens
  CDR3 for alpha chain variable domain of TCR clone 74399 (TRAV13-1, TRAJ36)
CAASFETGANNLFF

SEQ ID NO: 148798 - protein, 13 aa, Homo sapiens
  CDR3 for beta chain variable domain of TCR clone 74399 (TRBV12-4, TRBJ1-5)
CASSPDRAQPQHF

SEQ ID NO: 148799 - protein, 13 aa, Homo sapiens
  CDR3 for alpha chain variable domain of TCR clone 74400 (TRAV12-2, TRAJ42)
CAVKRGSQGNLIF

SEQ ID NO: 148800 - protein, 13 aa, Homo sapiens
  CDR3 for beta chain variable domain of TCR clone 74400 (TRBV18, TRBJ1-1)
CASSPETKPEAFF

SEQ ID NO: 148801 - protein, 11 aa, Homo sapiens
  CDR3 for alpha chain variable domain of TCR clone 74401 (TRAV36/DV7, TRAJ43)
CAVERVNDMRF

SEQ ID NO: 148802 - protein, 15 aa, Homo sapiens
  CDR3 for beta chain variable domain of TCR clone 74401 (TRBV27, TRBJ2-1)
CASSNGGGSSNEQFF

SEQ ID NO: 148803 - protein, 14 aa, Homo sapiens
  CDR3 for alpha chain variable domain of TCR clone 74402 (TRAV17, TRAJ32)
CATDPGGATTKLIF

SEQ ID NO: 148804 - protein, 14 aa, Homo sapiens
  CDR3 for beta chain variable domain of TCR clone 74402 (TRBV2, TRBJ1-5)
CASSENRGGQPQHF

SEQ ID NO: 148805 - protein, 12 aa, Homo sapiens
  CDR3 for alpha chain variable domain of TCR clone 74403 (TRAV13-2, TRAJ8)
CAPWLGFQKLVF

SEQ ID NO: 148806 - protein, 13 aa, Homo sapiens
  CDR3 for beta chain variable domain of TCR clone 74403 (TRBV12-4, TRBJ2-2)
CASSITGSGELFF

SEQ ID NO: 148807 - protein, 12 aa, Homo sapiens
  CDR3 for alpha chain variable domain of TCR clone 74404 (TRAV3, TRAJ20)
CAVRDGDYKLSF

SEQ ID NO: 148808 - protein, 14 aa, Homo sapiens
  CDR3 for beta chain variable domain of TCR clone 74404 (TRBV7-3, TRBJ2-2)
CASSSGGYTGELFF

SEQ ID NO: 148809 - protein, 15 aa, Homo sapiens
  CDR3 for alpha chain variable domain of TCR clone 74405 (TRAV38-2/DV8, TRAJ48)
CAYRSGDFGNEKLTF

SEQ ID NO: 148810 - protein, 16 aa, Homo sapiens
  CDR3 for beta chain variable domain of TCR clone 74405 (TRBV28, TRBJ2-7)
CASSPWVATGDLSQYF

SEQ ID NO: 148811 - protein, 16 aa, Homo sapiens
  CDR3 for alpha chain variable domain of TCR clone 74406 (TRAV26-1, TRAJ45)
FIVEKYSGGGADGLTF

SEQ ID NO: 148812 - protein, 15 aa, Homo sapiens
  CDR3 for beta chain variable domain of TCR clone 74406 (TRBV15, TRBJ2-7)
CHQQRPIQQAYEQYF

SEQ ID NO: 148813 - protein, 13 aa, Homo sapiens
  CDR3 for alpha chain variable domain of TCR clone 74407 (TRAV13-1, TRAJ39)
CAASIWAGNMLTF

SEQ ID NO: 148814 - protein, 15 aa, Homo sapiens
  CDR3 for beta chain variable domain of TCR clone 74407 (TRBV9, TRBJ1-6)
CASSVAGTGDSPLHF

SEQ ID NO: 148815 - protein, 13 aa, Homo sapiens
  CDR3 for alpha chain variable domain of TCR clone 74408 (TRAV17, TRAJ34)
CSTDLYNTDKLIF

SEQ ID NO: 148816 - protein, 12 aa, Homo sapiens
  CDR3 for beta chain variable domain of TCR clone 74408 (TRBV11-2, TRBJ2-2)
CASSLGGGELFF

SEQ ID NO: 148817 - protein, 11 aa, Homo sapiens
  CDR3 for alpha chain variable domain of TCR clone 74409 (TRAV21, TRAJ34)
CAVTKTDKLIF

SEQ ID NO: 148818 - protein, 17 aa, Homo sapiens
  CDR3 for beta chain variable domain of TCR clone 74409 (TRBV20-1, TRBJ2-1)
CSARSPSGGPPTMSSSS

SEQ ID NO: 148819 - protein, 12 aa, Homo sapiens
  CDR3 for alpha chain variable domain of TCR clone 74410 (TRAV8-3, TRAJ26)
CAGDNYGQNFVF

SEQ ID NO: 148820 - protein, 15 aa, Homo sapiens
  CDR3 for beta chain variable domain of TCR clone 74410 (TRBV9, TRBJ2-1)
CACSLAGSSYNEQFF

SEQ ID NO: 148821 - protein, 11 aa, Homo sapiens
  CDR3 for alpha chain variable domain of TCR clone 74411 (TRAV21, TRAJ34)
CAVTNTDKLIF

SEQ ID NO: 148822 - protein, 16 aa, Homo sapiens
  CDR3 for beta chain variable domain of TCR clone 74411 (TRBV18, TRBJ1-1)
CASSPGVGGRGGGAFF

SEQ ID NO: 148823 - protein, 12 aa, Homo sapiens
  CDR3 for alpha chain variable domain of TCR clone 74412 (TRAV8-3, TRAJ20)
CAVGANDYKLSF

SEQ ID NO: 148824 - protein, 11 aa, Homo sapiens
  CDR3 for beta chain variable domain of TCR clone 74412 (TRBV19, TRBJ2-2)
CASRYSGELFF

SEQ ID NO: 148825 - protein, 14 aa, Homo sapiens
  CDR3 for alpha chain variable domain of TCR clone 74413 (TRAV26-1, TRAJ38)
CIADNAGNNRKLIW

SEQ ID NO: 148826 - protein, 13 aa, Homo sapiens
  CDR3 for beta chain variable domain of TCR clone 74413 (TRBV19, TRBJ1-2)
CASSVPGQDGDTF

SEQ ID NO: 148827 - protein, 14 aa, Homo sapiens
  CDR3 for alpha chain variable domain of TCR clone 74414 (TRAV17, TRAJ16)
CATADFSDGQKLLF

SEQ ID NO: 148828 - protein, 12 aa, Homo sapiens
  CDR3 for beta chain variable domain of TCR clone 74414 (TRBV24-1, TRBJ1-1)
CATHYPDTEAFF

SEQ ID NO: 148829 - protein, 14 aa, Homo sapiens
  CDR3 for alpha chain variable domain of TCR clone 74415 (TRAV8-2, TRAJ11)
CVVSERSGYSTLTF

SEQ ID NO: 148830 - protein, 16 aa, Homo sapiens
  CDR3 for beta chain variable domain of TCR clone 74415 (TRBV28, TRBJ2-1)
CASSSPEYPRDNEKFF

SEQ ID NO: 148831 - protein, 12 aa, Homo sapiens
  CDR3 for alpha chain variable domain of TCR clone 74416 (TRAV12-3, TRAJ17)
CAMTLTGNKITF

SEQ ID NO: 148832 - protein, 15 aa, Homo sapiens
  CDR3 for beta chain variable domain of TCR clone 74416 (TRBV20-1, TRBJ2-7)
CSARDRVAGMDEQYF

SEQ ID NO: 148833 - protein, 13 aa, Homo sapiens
  CDR3 for alpha chain variable domain of TCR clone 74417 (TRAV27, TRAJ16)
CAGACSDGQKLLF

SEQ ID NO: 148834 - protein, 14 aa, Homo sapiens
  CDR3 for beta chain variable domain of TCR clone 74417 (TRBV11-2, TRBJ1-3)
CASSLAVPGNAIYF

SEQ ID NO: 148835 - protein, 17 aa, Homo sapiens
  CDR3 for alpha chain variable domain of TCR clone 74418 (TRAV26-1, TRAJ53)
CIVRVDDSGVSNYKLTF

SEQ ID NO: 148836 - protein, 15 aa, Homo sapiens
  CDR3 for beta chain variable domain of TCR clone 74418 (TRBV20-1, TRBJ2-7)
CSARVPAAYFYEQYF

SEQ ID NO: 148837 - protein, 11 aa, Homo sapiens
  CDR3 for alpha chain variable domain of TCR clone 74419 (TRAV3, TRAJ21)
CAVGNFNKFYF

SEQ ID NO: 148838 - protein, 13 aa, Homo sapiens
  CDR3 for beta chain variable domain of TCR clone 74419 (TRBV19, TRBJ2-7)
CASRKAGGSEQYF

SEQ ID NO: 148839 - protein, 13 aa, Homo sapiens
  CDR3 for alpha chain variable domain of TCR clone 74420 (TRAV12-2, TRAJ4)
CAVRSGGYNKLIL

SEQ ID NO: 148840 - protein, 15 aa, Homo sapiens
  CDR3 for beta chain variable domain of TCR clone 74420 (TRBV10-3, TRBJ2-1)
CAISDVQDRAYEQFF

SEQ ID NO: 148841 - protein, 10 aa, Homo sapiens
  CDR3 for alpha chain variable domain of TCR clone 74421 (TRAV30, TRAJ48)
CGIGNVKLTF

SEQ ID NO: 148842 - protein, 14 aa, Homo sapiens
  CDR3 for beta chain variable domain of TCR clone 74421 (TRBV7-6, TRBJ2-3)
CASSVAGGTDTQYF

SEQ ID NO: 148843 - protein, 10 aa, Homo sapiens
  CDR3 for alpha chain variable domain of TCR clone 74422 (TRAV12-2, TRAJ49)
CAVHGNQFYF

SEQ ID NO: 148844 - protein, 12 aa, Homo sapiens
  CDR3 for beta chain variable domain of TCR clone 74422 (TRBV24-1, TRBJ2-7)
CATSDPGYEQYF

SEQ ID NO: 148845 - protein, 14 aa, Homo sapiens
  CDR3 for alpha chain variable domain of TCR clone 74423 (TRAV8-3, TRAJ15)
CAVGRHQAGTTLIF

SEQ ID NO: 148846 - protein, 13 aa, Homo sapiens
  CDR3 for beta chain variable domain of TCR clone 74423 (TRBV9, TRBJ2-7)
CASSASDSYEQYF

SEQ ID NO: 148847 - protein, 11 aa, Homo sapiens
  CDR3 for alpha chain variable domain of TCR clone 74424 (TRAV25, TRAJ47)
CAGLYGNRLVF

SEQ ID NO: 148848 - protein, 14 aa, Homo sapiens
  CDR3 for beta chain variable domain of TCR clone 74424 (TRBV19, TRBJ2-1)
CASKEGVQVNEQFF

SEQ ID NO: 148849 - protein, 18 aa, Homo sapiens
  CDR3 for alpha chain variable domain of TCR clone 74425 (TRAV17, TRAJ28)
CATDPPRGPGAGSYQLTF

SEQ ID NO: 148850 - protein, 14 aa, Homo sapiens
  CDR3 for beta chain variable domain of TCR clone 74425 (TRBV13, TRBJ2-5)
CASSLDYPQETQYF

SEQ ID NO: 148851 - protein, 12 aa, Homo sapiens
  CDR3 for alpha chain variable domain of TCR clone 74426 (TRAV17, TRAJ57)
CATDGGSEKLVF

SEQ ID NO: 148852 - protein, 14 aa, Homo sapiens
  CDR3 for beta chain variable domain of TCR clone 74426 (TRBV4-1, TRBJ2-2)
CASSQAVNTGELFF

SEQ ID NO: 148853 - protein, 18 aa, Homo sapiens
  CDR3 for alpha chain variable domain of TCR clone 74427 (TRAV13-1, TRAJ52)
CAASKRSAGGTSYGKLTF

SEQ ID NO: 148854 - protein, 13 aa, Homo sapiens
  CDR3 for beta chain variable domain of TCR clone 74427 (TRBV12-4, TRBJ1-2)
CASSLRQGKSYTF

SEQ ID NO: 148855 - protein, 14 aa, Homo sapiens
  CDR3 for alpha chain variable domain of TCR clone 74428 (TRAV17, TRAJ57)
CATDPQCGSEKLVF

SEQ ID NO: 148856 - protein, 18 aa, Homo sapiens
  CDR3 for beta chain variable domain of TCR clone 74428 (TRBV6-6, TRBJ1-3)
CASSYSKWDSISGNTIYF

SEQ ID NO: 148857 - protein, 15 aa, Homo sapiens
  CDR3 for alpha chain variable domain of TCR clone 74429 (TRAV23/DV6, TRAJ18)
CAARYRGSTLGRLHF

SEQ ID NO: 148858 - protein, 13 aa, Homo sapiens
  CDR3 for beta chain variable domain of TCR clone 74429 (TRBV7-2, TRBJ2-7)
CASSSPSGSEQYF

SEQ ID NO: 148859 - protein, 16 aa, Homo sapiens
  CDR3 for alpha chain variable domain of TCR clone 74430 (TRAV17, TRAJ52)
CATGIIGGTSYGKLTF

SEQ ID NO: 148860 - protein, 12 aa, Homo sapiens
  CDR3 for beta chain variable domain of TCR clone 74430 (TRBV7-3, TRBJ2-1)
CARSFINNEQFF

SEQ ID NO: 148861 - protein, 12 aa, Homo sapiens
  CDR3 for alpha chain variable domain of TCR clone 74431 (TRAV8-3, TRAJ20)
CAVGANDYKLSF

SEQ ID NO: 148862 - protein, 14 aa, Homo sapiens
  CDR3 for beta chain variable domain of TCR clone 74431 (TRBV19, TRBJ2-7)
CASSSGTPRHEQYF

SEQ ID NO: 148863 - protein, 15 aa, Homo sapiens
  CDR3 for alpha chain variable domain of TCR clone 74432 (TRAV26-1, TRAJ15)
CIVRAANHAGTALIF

SEQ ID NO: 148864 - protein, 15 aa, Homo sapiens
  CDR3 for beta chain variable domain of TCR clone 74432 (TRBV20-1, TRBJ1-1)
CSARSAATSNTEAFF

SEQ ID NO: 148865 - protein, 17 aa, Homo sapiens
  CDR3 for alpha chain variable domain of TCR clone 74433 (TRAV13-1, TRAJ31)
CAPRDRLMFGDGTQLVV

SEQ ID NO: 148866 - protein, 14 aa, Homo sapiens
  CDR3 for beta chain variable domain of TCR clone 74433 (TRBV10-2, TRBJ1-3)
CASTRTDTGNTIYF

SEQ ID NO: 148867 - protein, 11 aa, Homo sapiens
  CDR3 for alpha chain variable domain of TCR clone 74434 (TRAV35, TRAJ30)
CAPGGDDKVIF

SEQ ID NO: 148868 - protein, 13 aa, Homo sapiens
  CDR3 for beta chain variable domain of TCR clone 74434 (TRBV7-6, TRBJ2-1)
CQQLGGGADEQFF

SEQ ID NO: 148869 - protein, 18 aa, Homo sapiens
  CDR3 for alpha chain variable domain of TCR clone 74435 (TRAV12-3, TRAJ52)
CAMSRTNDGGTSYGKLTF

SEQ ID NO: 148870 - protein, 17 aa, Homo sapiens
  CDR3 for beta chain variable domain of TCR clone 74435 (TRBV7-3, TRBJ2-3)
CASSLMKRMRGADTQYF

SEQ ID NO: 148871 - protein, 11 aa, Homo sapiens
  CDR3 for alpha chain variable domain of TCR clone 74436 (TRAV2, TRAJ13)
CASGGYQKVTF

SEQ ID NO: 148872 - protein, 13 aa, Homo sapiens
  CDR3 for beta chain variable domain of TCR clone 74436 (TRBV19, TRBJ2-1)
CATSRGVYNEQFF

SEQ ID NO: 148873 - protein, 16 aa, Homo sapiens
  CDR3 for alpha chain variable domain of TCR clone 74437 (TRAV8-3, TRAJ42)
CAVGDGNGGSQGNLIF

SEQ ID NO: 148874 - protein, 14 aa, Homo sapiens
  CDR3 for beta chain variable domain of TCR clone 74437 (TRBV7-2, TRBJ2-1)
CASSRGGARNEQFF

SEQ ID NO: 148875 - protein, 16 aa, Homo sapiens
  CDR3 for alpha chain variable domain of TCR clone 74438 (TRAV8-3, TRAJ44)
CAVGTLMTGTASKLTF

SEQ ID NO: 148876 - protein, 13 aa, Homo sapiens
  CDR3 for beta chain variable domain of TCR clone 74438 (TRBV11-2, TRBJ2-1)
CASSLRLKHEQFF

SEQ ID NO: 148877 - protein, 10 aa, Homo sapiens
  CDR3 for alpha chain variable domain of TCR clone 74439 (TRAV1-2, TRAJ23)
CAGQGGKLIF

SEQ ID NO: 148878 - protein, 13 aa, Homo sapiens
  CDR3 for beta chain variable domain of TCR clone 74439 (TRBV7-7, TRBJ2-3)
CASSLSSADTQYF

SEQ ID NO: 148879 - protein, 15 aa, Homo sapiens
  CDR3 for alpha chain variable domain of TCR clone 74440 (TRAV3, TRAJ22)
CAVRDRGGSARQLTF

SEQ ID NO: 148880 - protein, 14 aa, Homo sapiens
  CDR3 for beta chain variable domain of TCR clone 74440 (TRBV19, TRBJ1-5)
CASSLGLIGQTQHF

SEQ ID NO: 148881 - protein, 12 aa, Homo sapiens
  CDR3 for alpha chain variable domain of TCR clone 74441 (TRAV13-1, TRAJ21)
CAAFFNFNKFYF

SEQ ID NO: 148882 - protein, 12 aa, Homo sapiens
  CDR3 for beta chain variable domain of TCR clone 74441 (TRBV11-2, TRBJ2-2)
CASSLGGGELFF

SEQ ID NO: 148883 - protein, 14 aa, Homo sapiens
  CDR3 for alpha chain variable domain of TCR clone 74442 (TRAV8-3, TRAJ9)
CAVVYNTGGFKTIF

SEQ ID NO: 148884 - protein, 14 aa, Homo sapiens
  CDR3 for beta chain variable domain of TCR clone 74442 (TRBV7-3, TRBJ2-2)
CASSSGGYTGELFV

SEQ ID NO: 148885 - protein, 14 aa, Homo sapiens
  CDR3 for alpha chain variable domain of TCR clone 74443 (TRAV1-2, TRAJ16)
CAVNRFSDGQKLLF

SEQ ID NO: 148886 - protein, 13 aa, Homo sapiens
  CDR3 for beta chain variable domain of TCR clone 74443 (TRBV24-1, TRBJ2-2)
CATSEWSTGELFF

SEQ ID NO: 148887 - protein, 12 aa, Homo sapiens
  CDR3 for alpha chain variable domain of TCR clone 74444 (TRAV1-1, TRAJ39)
CAVPVVGTMLTF

SEQ ID NO: 148888 - protein, 15 aa, Homo sapiens
  CDR3 for beta chain variable domain of TCR clone 74444 (TRBV19, TRBJ1-6)
CASSTQGAVGSPLHF

SEQ ID NO: 148889 - protein, 14 aa, Homo sapiens
  CDR3 for alpha chain variable domain of TCR clone 74445 (TRAV12-3, TRAJ10)
SHLPLTGGGNELTF

SEQ ID NO: 148890 - protein, 12 aa, Homo sapiens
  CDR3 for beta chain variable domain of TCR clone 74445 (TRBV7-8, TRBJ2-7)
CASSLGDREQYF

SEQ ID NO: 148891 - protein, 14 aa, Homo sapiens
  CDR3 for alpha chain variable domain of TCR clone 74446 (TRAV8-4, TRAJ9)
CAVRINTGGFKSIF

SEQ ID NO: 148892 - protein, 15 aa, Homo sapiens
  CDR3 for beta chain variable domain of TCR clone 74446 (TRBV10-2, TRBJ2-6)
CASSEQGTGANVLTF

SEQ ID NO: 148893 - protein, 16 aa, Homo sapiens
  CDR3 for alpha chain variable domain of TCR clone 74447 (TRAV16, TRAJ52)
CALSAAGGTSYGKLTF

SEQ ID NO: 148894 - protein, 17 aa, Homo sapiens
  CDR3 for beta chain variable domain of TCR clone 74447 (TRBV20-1, TRBJ2-1)
CSASSSGLAGSYNEQFF

SEQ ID NO: 148895 - protein, 16 aa, Homo sapiens
  CDR3 for alpha chain variable domain of TCR clone 74448 (TRAV30, TRAJ24)
CGTEIVDADSWGKFQF

SEQ ID NO: 148896 - protein, 17 aa, Homo sapiens
  CDR3 for beta chain variable domain of TCR clone 74448 (TRBV20-1, TRBJ2-1)
CSAPPRRAGTRYNEQFF

SEQ ID NO: 148897 - protein, 11 aa, Homo sapiens
  CDR3 for alpha chain variable domain of TCR clone 74449 (TRAV2, TRAJ13)
CASGDYQKVTF

SEQ ID NO: 148898 - protein, 14 aa, Homo sapiens
  CDR3 for beta chain variable domain of TCR clone 74449 (TRBV19, TRBJ2-1)
CASPTFVLSGEQFF

SEQ ID NO: 148899 - protein, 11 aa, Homo sapiens
  CDR3 for alpha chain variable domain of TCR clone 74450 (TRAV12-3, TRAJ27)
CAMANAGKSTF

SEQ ID NO: 148900 - protein, 16 aa, Homo sapiens
  CDR3 for beta chain variable domain of TCR clone 74450 (TRBV19, TRBJ1-6)
CARRLEGNLHNSPLHF

SEQ ID NO: 148901 - protein, 10 aa, Homo sapiens
  CDR3 for alpha chain variable domain of TCR clone 74451 (TRAV30, TRAJ48)
CGSGNEKLTF

SEQ ID NO: 148902 - protein, 14 aa, Homo sapiens
  CDR3 for beta chain variable domain of TCR clone 74451 (TRBV7-6, TRBJ2-3)
CASSVAGGTDTQYF

SEQ ID NO: 148903 - protein, 12 aa, Homo sapiens
  CDR3 for alpha chain variable domain of TCR clone 74452 (TRAV8-3, TRAJ20)
CAVGANDYKLSF

SEQ ID NO: 148904 - protein, 14 aa, Homo sapiens
  CDR3 for beta chain variable domain of TCR clone 74452 (TRBV7-9, TRBJ1-1)
CASTPLQSYTEAFF

SEQ ID NO: 148905 - protein, 13 aa, Homo sapiens
  CDR3 for alpha chain variable domain of TCR clone 74453 (TRAV27, TRAJ3)
ASLRGSIASKIIF

SEQ ID NO: 148906 - protein, 15 aa, Homo sapiens
  CDR3 for beta chain variable domain of TCR clone 74453 (TRBV28, TRBJ1-3)
CASSMGWASGNTIYF

SEQ ID NO: 148907 - protein, 13 aa, Homo sapiens
  CDR3 for alpha chain variable domain of TCR clone 74454 (TRAV12-1, TRAJ29)
CVVDTSGNTPLVF

SEQ ID NO: 148908 - protein, 14 aa, Homo sapiens
  CDR3 for beta chain variable domain of TCR clone 74454 (TRBV12-4, TRBJ2-3)
CASSSVPSTDTQYF

SEQ ID NO: 148909 - protein, 11 aa, Homo sapiens
  CDR3 for alpha chain variable domain of TCR clone 74455 (TRAV4, TRAJ23)
CLVAPGGKLIF

SEQ ID NO: 148910 - protein, 17 aa, Homo sapiens
  CDR3 for beta chain variable domain of TCR clone 74455 (TRBV11-2, TRBJ2-1)
CASSLYPPGVEYNEQFF

SEQ ID NO: 148911 - protein, 13 aa, Homo sapiens
  CDR3 for alpha chain variable domain of TCR clone 74456 (TRAV8-3, TRAJ28)
CAVGAVGSYQLTF

SEQ ID NO: 148912 - protein, 12 aa, Homo sapiens
  CDR3 for beta chain variable domain of TCR clone 74456 (TRBV7-8, TRBJ2-7)
RASSLGDREQYF

SEQ ID NO: 148913 - protein, 12 aa, Homo sapiens
  CDR3 for alpha chain variable domain of TCR clone 74457 (TRAV12-3, TRAJ17)
CAMTLTGSKLTF

SEQ ID NO: 148914 - protein, 15 aa, Homo sapiens
  CDR3 for beta chain variable domain of TCR clone 74457 (TRBV7-9, TRBJ1-6)
CASSSPGRGNSPLHF

SEQ ID NO: 148915 - protein, 12 aa, Homo sapiens
  CDR3 for alpha chain variable domain of TCR clone 74458 (TRAV36/DV7, TRAJ26)
CAVDNYGQNFVF

SEQ ID NO: 148916 - protein, 16 aa, Homo sapiens
  CDR3 for beta chain variable domain of TCR clone 74458 (TRBV7-3, TRBJ2-2)
CASSLTGTGTTGELSF

SEQ ID NO: 148917 - protein, 14 aa, Homo sapiens
  CDR3 for alpha chain variable domain of TCR clone 74459 (TRAV12-1, TRAJ27)
CGEHIRTNAGKSTF

SEQ ID NO: 148918 - protein, 16 aa, Homo sapiens
  CDR3 for beta chain variable domain of TCR clone 74459 (TRBV6-4, TRBJ1-2)
CASSEAVGDPNYGYTF

SEQ ID NO: 148919 - protein, 13 aa, Homo sapiens
  CDR3 for alpha chain variable domain of TCR clone 74460 (TRAV13-2, TRAJ15)
CAERPQAGTALIF

SEQ ID NO: 148920 - protein, 15 aa, Homo sapiens
  CDR3 for beta chain variable domain of TCR clone 74460 (TRBV11-2, TRBJ2-7)
CASGFPGTGGYEQYF

SEQ ID NO: 148921 - protein, 12 aa, Homo sapiens
  CDR3 for alpha chain variable domain of TCR clone 74461 (TRAV17, TRAJ4)
CATDGDYNKLIF

SEQ ID NO: 148922 - protein, 13 aa, Homo sapiens
  CDR3 for beta chain variable domain of TCR clone 74461 (TRBV29-1, TRBJ2-2)
CSTTGVNTGELFF

SEQ ID NO: 148923 - protein, 14 aa, Homo sapiens
  CDR3 for alpha chain variable domain of TCR clone 74462 (TRAV12-2, TRAJ13)
CAVKKTGGYQKVTF

SEQ ID NO: 148924 - protein, 15 aa, Homo sapiens
  CDR3 for beta chain variable domain of TCR clone 74462 (TRBV10-3, TRBJ2-7)
CATREQGLRSYEQYF

SEQ ID NO: 148925 - protein, 14 aa, Homo sapiens
  CDR3 for alpha chain variable domain of TCR clone 74463 (TRAV1-2, TRAJ16)
CAVNRFSDGQKLLF

SEQ ID NO: 148926 - protein, 19 aa, Homo sapiens
  CDR3 for beta chain variable domain of TCR clone 74463 (TRBV28, TRBJ2-7)
CASSYSGTSRLGWVYEQHF

SEQ ID NO: 148927 - protein, 12 aa, Homo sapiens
  CDR3 for alpha chain variable domain of TCR clone 74464 (TRAV13-1, TRAJ27)
CAAHTNAGKSTV

SEQ ID NO: 148928 - protein, 14 aa, Homo sapiens
  CDR3 for beta chain variable domain of TCR clone 74464 (TRBV19, TRBJ2-2)
CASSGQGIAGELFF

SEQ ID NO: 148929 - protein, 13 aa, Homo sapiens
  CDR3 for alpha chain variable domain of TCR clone 74465 (TRAV38-2/DV8, TRAJ34)
CAYRTWNTDKLIF

SEQ ID NO: 148930 - protein, 14 aa, Homo sapiens
  CDR3 for beta chain variable domain of TCR clone 74465 (TRBV11-2, TRBJ2-3)
CASSRLARTDTQYF

SEQ ID NO: 148931 - protein, 14 aa, Homo sapiens
  CDR3 for alpha chain variable domain of TCR clone 74466 (TRAV12-1, TRAJ45)
CVVNENAGADGLTF

SEQ ID NO: 148932 - protein, 15 aa, Homo sapiens
  CDR3 for beta chain variable domain of TCR clone 74466 (TRBV5-6, TRBJ2-7)
CASSLGPGRGHEQYF

SEQ ID NO: 148933 - protein, 14 aa, Homo sapiens
  CDR3 for alpha chain variable domain of TCR clone 74467 (TRAV12-2, TRAJ36)
CAVNPPTGANNLFF

SEQ ID NO: 148934 - protein, 13 aa, Homo sapiens
  CDR3 for beta chain variable domain of TCR clone 74467 (TRBV20-1, TRBJ1-6)
CSAPTGLGSPLNF

SEQ ID NO: 148935 - protein, 11 aa, Homo sapiens
  CDR3 for alpha chain variable domain of TCR clone 74468 (TRAV1-2, TRAJ40)
CAVPGTYKYIF

SEQ ID NO: 148936 - protein, 16 aa, Homo sapiens
  CDR3 for beta chain variable domain of TCR clone 74468 (TRBV29-1, TRBJ2-7)
CNVEVVGTSGSYEQYF

SEQ ID NO: 148937 - protein, 12 aa, Homo sapiens
  CDR3 for alpha chain variable domain of TCR clone 74469 (TRAV12-3, TRAJ39)
CAMTQAGNMLTF

SEQ ID NO: 148938 - protein, 14 aa, Homo sapiens
  CDR3 for beta chain variable domain of TCR clone 74469 (TRBV7-3, TRBJ2-1)
CASSLAGGTNEQFF

SEQ ID NO: 148939 - protein, 16 aa, Homo sapiens
  CDR3 for alpha chain variable domain of TCR clone 74470 (TRAV30, TRAJ24)
CGTEIVDADSWGKFQF

SEQ ID NO: 148940 - protein, 16 aa, Homo sapiens
  CDR3 for beta chain variable domain of TCR clone 74470 (TRBV2, TRBJ2-1)
CASRSPAGGKYNEQFF

SEQ ID NO: 148941 - protein, 14 aa, Homo sapiens
  CDR3 for alpha chain variable domain of TCR clone 74471 (TRAV12-2, TRAJ24)
CAVTPADSWGTLQF

SEQ ID NO: 148942 - protein, 12 aa, Homo sapiens
  CDR3 for beta chain variable domain of TCR clone 74471 (TRBV3-1, TRBJ2-1)
CASSQGSSGQFF

SEQ ID NO: 148943 - protein, 15 aa, Homo sapiens
  CDR3 for alpha chain variable domain of TCR clone 74472 (TRAV17, TRAJ56)
CATEPFTGANSKLTF

SEQ ID NO: 148944 - protein, 15 aa, Homo sapiens
  CDR3 for beta chain variable domain of TCR clone 74472 (TRBV28, TRBJ1-5)
CASNRTGGYVQPQHF

SEQ ID NO: 148945 - protein, 14 aa, Homo sapiens
  CDR3 for alpha chain variable domain of TCR clone 74473 (TRAV27, TRAJ42)
CAGASGGSQGNLIF

SEQ ID NO: 148946 - protein, 14 aa, Homo sapiens
  CDR3 for beta chain variable domain of TCR clone 74473 (TRBV19, TRBJ2-1)
CASPTFVLSGEQFF

SEQ ID NO: 148947 - protein, 11 aa, Homo sapiens
  CDR3 for alpha chain variable domain of TCR clone 74474 (TRAV13-1, TRAJ5)
CASKGRRALTF

SEQ ID NO: 148948 - protein, 15 aa, Homo sapiens
  CDR3 for beta chain variable domain of TCR clone 74474 (TRBV11-2, TRBJ1-1)
CASSSRSSLLLSLDK

SEQ ID NO: 148949 - protein, 16 aa, Homo sapiens
  CDR3 for alpha chain variable domain of TCR clone 74475 (TRAV30, TRAJ24)
CGTEIVDADSWGKFQF

SEQ ID NO: 148950 - protein, 13 aa, Homo sapiens
  CDR3 for beta chain variable domain of TCR clone 74475 (TRBV2, TRBJ1-1)
CASRWTVNTEAFF

SEQ ID NO: 148951 - protein, 14 aa, Homo sapiens
  CDR3 for alpha chain variable domain of TCR clone 74476 (TRAV12-1, TRAJ3)
CGAARYSSASKITF

SEQ ID NO: 148952 - protein, 15 aa, Homo sapiens
  CDR3 for beta chain variable domain of TCR clone 74476 (TRBV7-2, TRBJ2-6)
CASSREGSGANVLTF

SEQ ID NO: 148953 - protein, 14 aa, Homo sapiens
  CDR3 for alpha chain variable domain of TCR clone 74477 (TRAV17, TRAJ22)
CATSPFGSARQLTF

SEQ ID NO: 148954 - protein, 15 aa, Homo sapiens
  CDR3 for beta chain variable domain of TCR clone 74477 (TRBV4-1, TRBJ2-5)
CASSQWDLYQETQYF

SEQ ID NO: 148955 - protein, 13 aa, Homo sapiens
  CDR3 for alpha chain variable domain of TCR clone 74478 (TRAV26-1, )
CIVSHRVEGFWNQ

SEQ ID NO: 148956 - protein, 14 aa, Homo sapiens
  CDR3 for beta chain variable domain of TCR clone 74478 (TRBV20-1, TRBJ2-7)
CSAWTALGSYEQYF

SEQ ID NO: 148957 - protein, 15 aa, Homo sapiens
  CDR3 for alpha chain variable domain of TCR clone 74479 (TRAV23/DV6, TRAJ18)
CAARYRGSTLGRLYF

SEQ ID NO: 148958 - protein, 16 aa, Homo sapiens
  CDR3 for beta chain variable domain of TCR clone 74479 (TRBV7-3, TRBJ2-2)
CASSLKRGTLSGELFF

SEQ ID NO: 148959 - protein, 14 aa, Homo sapiens
  CDR3 for alpha chain variable domain of TCR clone 74480 (TRAV12-2, TRAJ17)
CAVLFKAAGNKLTF

SEQ ID NO: 148960 - protein, 14 aa, Homo sapiens
  CDR3 for beta chain variable domain of TCR clone 74480 (TRBV15, TRBJ1-2)
CTTSRDFDRVGYTF

SEQ ID NO: 148961 - protein, 13 aa, Homo sapiens
  CDR3 for alpha chain variable domain of TCR clone 74481 (TRAV20, TRAJ37)
CAGCSSNTGKLIF

SEQ ID NO: 148962 - protein, 13 aa, Homo sapiens
  CDR3 for beta chain variable domain of TCR clone 74481 (TRBV19, TRBJ1-2)
CASSVPGQDGYTF

SEQ ID NO: 148963 - protein, 14 aa, Homo sapiens
  CDR3 for alpha chain variable domain of TCR clone 74482 (TRAV12-2, TRAJ40)
CAVKIPSGTYKCIF

SEQ ID NO: 148964 - protein, 14 aa, Homo sapiens
  CDR3 for beta chain variable domain of TCR clone 74482 (TRBV4-2, TRBJ2-1)
CTSGLDRAYNEQFF

SEQ ID NO: 148965 - protein, 14 aa, Homo sapiens
  CDR3 for alpha chain variable domain of TCR clone 74483 (TRAV12-1, TRAJ5)
CVVNERTGRRALTF

SEQ ID NO: 148966 - protein, 15 aa, Homo sapiens
  CDR3 for beta chain variable domain of TCR clone 74483 (TRBV9, TRBJ1-6)
CASSVAGTGDSPLHF

SEQ ID NO: 148967 - protein, 14 aa, Homo sapiens
  CDR3 for alpha chain variable domain of TCR clone 74484 (TRAV12-2, TRAJ11)
CAVEGGSGYSTLTF

SEQ ID NO: 148968 - protein, 16 aa, Homo sapiens
  CDR3 for beta chain variable domain of TCR clone 74484 (TRBV6-1, TRBJ1-2)
CASSGAWQGRSHGDTF

SEQ ID NO: 148969 - protein, 16 aa, Homo sapiens
  CDR3 for alpha chain variable domain of TCR clone 74485 (TRAV3, TRAJ37)
CAVRVRGSGNTGKLIF

SEQ ID NO: 148970 - protein, 13 aa, Homo sapiens
  CDR3 for beta chain variable domain of TCR clone 74485 (TRBV7-9, TRBJ1-2)
CASSLRQNYGYTF

SEQ ID NO: 148971 - protein, 17 aa, Homo sapiens
  CDR3 for alpha chain variable domain of TCR clone 74486 (TRAV3, TRAJ6)
CAVRDGPRAGGSYIPTL

SEQ ID NO: 148972 - protein, 18 aa, Homo sapiens
  CDR3 for beta chain variable domain of TCR clone 74486 (TRBV7-9, TRBJ2-7)
CASSLTTSGSRTWYEQYF

SEQ ID NO: 148973 - protein, 13 aa, Homo sapiens
  CDR3 for alpha chain variable domain of TCR clone 74487 (TRAV17, TRAJ5)
CATGDKGRRALTF

SEQ ID NO: 148974 - protein, 13 aa, Homo sapiens
  CDR3 for beta chain variable domain of TCR clone 74487 (TRBV19, TRBJ1-5)
CASSIEPVQPQHF

SEQ ID NO: 148975 - protein, 11 aa, Homo sapiens
  CDR3 for alpha chain variable domain of TCR clone 74488 (TRAV12-3, TRAJ43)
CAMSVSNDMRF

SEQ ID NO: 148976 - protein, 14 aa, Homo sapiens
  CDR3 for beta chain variable domain of TCR clone 74488 (TRBV12-4, TRBJ1-1)
CASSLGTGGTEAFF

SEQ ID NO: 148977 - protein, 13 aa, Homo sapiens
  CDR3 for alpha chain variable domain of TCR clone 74489 (TRAV16, TRAJ48)
CFPLNFGNEKLTF

SEQ ID NO: 148978 - protein, 11 aa, Homo sapiens
  CDR3 for beta chain variable domain of TCR clone 74489 (TRBV7-9, TRBJ2-3)
CASSPTDTQYF

SEQ ID NO: 148979 - protein, 15 aa, Homo sapiens
  CDR3 for alpha chain variable domain of TCR clone 74490 (TRAV2, TRAJ9)
CAVAALNTGGFKPIF

SEQ ID NO: 148980 - protein, 14 aa, Homo sapiens
  CDR3 for beta chain variable domain of TCR clone 74490 (TRBV7-8, TRBJ2-5)
CASSATGGQETQYF

SEQ ID NO: 148981 - protein, 12 aa, Homo sapiens
  CDR3 for alpha chain variable domain of TCR clone 74491 (TRAV12-2, TRAJ20)
CAVRPSDYKLSF

SEQ ID NO: 148982 - protein, 12 aa, Homo sapiens
  CDR3 for beta chain variable domain of TCR clone 74491 (TRBV11-2, TRBJ2-2)
CASSLGGGELFF

SEQ ID NO: 148983 - protein, 14 aa, Homo sapiens
  CDR3 for alpha chain variable domain of TCR clone 74492 (TRAV2, TRAJ9)
CAVEDRSGGFKTIF

SEQ ID NO: 148984 - protein, 15 aa, Homo sapiens
  CDR3 for beta chain variable domain of TCR clone 74492 (TRBV7-9, TRBJ2-7)
CASSPGGGLTYEQYF

SEQ ID NO: 148985 - protein, 15 aa, Homo sapiens
  CDR3 for alpha chain variable domain of TCR clone 74493 (TRAV2, TRAJ22)
CAVPSRGGSARQLTF

SEQ ID NO: 148986 - protein, 11 aa, Homo sapiens
  CDR3 for beta chain variable domain of TCR clone 74493 (TRBV27, TRBJ2-3)
CASSFGDTQYF

SEQ ID NO: 148987 - protein, 15 aa, Homo sapiens
  CDR3 for alpha chain variable domain of TCR clone 74494 (TRAV20, TRAJ24)
CAVQAAPDSWGKFHF

SEQ ID NO: 148988 - protein, 14 aa, Homo sapiens
  CDR3 for beta chain variable domain of TCR clone 74494 (TRBV20-1, TRBJ1-1)
CSARDRGQGSEAFF

SEQ ID NO: 148989 - protein, 14 aa, Homo sapiens
  CDR3 for alpha chain variable domain of TCR clone 74495 (TRAV17, TRAJ53)
CATDAGGSNYKLTF

SEQ ID NO: 148990 - protein, 16 aa, Homo sapiens
  CDR3 for beta chain variable domain of TCR clone 74495 (TRBV4-2, TRBJ1-1)
CASSQAGFGMNTEAFF

SEQ ID NO: 148991 - protein, 13 aa, Homo sapiens
  CDR3 for alpha chain variable domain of TCR clone 74496 (TRAV23/DV6, TRAJ34)
CAAIENNTDKLIL

SEQ ID NO: 148992 - protein, 13 aa, Homo sapiens
  CDR3 for beta chain variable domain of TCR clone 74496 (TRBV29-1, TRBJ2-7)
CSVGPSGGYEQYF

SEQ ID NO: 148993 - protein, 13 aa, Homo sapiens
  CDR3 for alpha chain variable domain of TCR clone 74497 (TRAV8-6, TRAJ8)
CAFMNTGFQKLVF

SEQ ID NO: 148994 - protein, 15 aa, Homo sapiens
  CDR3 for beta chain variable domain of TCR clone 74497 (TRBV28, TRBJ2-5)
CASSSGRVIQETKYF

SEQ ID NO: 148995 - protein, 14 aa, Homo sapiens
  CDR3 for alpha chain variable domain of TCR clone 74498 (TRAV1-2, TRAJ16)
CAVNRFSDGQKLLF

SEQ ID NO: 148996 - protein, 18 aa, Homo sapiens
  CDR3 for beta chain variable domain of TCR clone 74498 (TRBV25-1, TRBJ1-2)
CASSGLQNGQGLIFGYTF

SEQ ID NO: 148997 - protein, 13 aa, Homo sapiens
  CDR3 for alpha chain variable domain of TCR clone 74499 (TRAV12-1, TRAJ9)
CVVLYTGGFKTIF

SEQ ID NO: 148998 - protein, 14 aa, Homo sapiens
  CDR3 for beta chain variable domain of TCR clone 74499 (TRBV2, TRBJ2-1)
CASSEARQGVSEFF

SEQ ID NO: 148999 - protein, 11 aa, Homo sapiens
  CDR3 for alpha chain variable domain of TCR clone 74500 (TRAV2, TRAJ33)
CAVDSNYQLIW

SEQ ID NO: 149000 - protein, 13 aa, Homo sapiens
  CDR3 for beta chain variable domain of TCR clone 74500 (TRBV29-1, TRBJ2-2)
CSTTGVNTGELFF

SEQ ID NO: 149001 - protein, 15 aa, Homo sapiens
  CDR3 for alpha chain variable domain of TCR clone 74501 (TRAV13-1, TRAJ57)
QVPPLSQGGSEKLVF

SEQ ID NO: 149002 - protein, 16 aa, Homo sapiens
  CDR3 for beta chain variable domain of TCR clone 74501 (TRBV7-3, TRBJ2-2)
CASSLKRGTLSGELFF

SEQ ID NO: 149003 - protein, 19 aa, Homo sapiens
  CDR3 for alpha chain variable domain of TCR clone 74502 (TRAV1-2, TRAJ26)
CLLPLCCERPDNYGQNFVF

SEQ ID NO: 149004 - protein, 12 aa, Homo sapiens
  CDR3 for beta chain variable domain of TCR clone 74502 (TRBV7-9, TRBJ2-7)
CATRMDAYEQYF

SEQ ID NO: 149005 - protein, 15 aa, Homo sapiens
  CDR3 for alpha chain variable domain of TCR clone 74503 (TRAV14/DV4, TRAJ26)
CAMREDQNYGQNFVF

SEQ ID NO: 149006 - protein, 13 aa, Homo sapiens
  CDR3 for beta chain variable domain of TCR clone 74503 (TRBV24-1, TRBJ2-2)
CATSDWSTGELFF

SEQ ID NO: 149007 - protein, 15 aa, Homo sapiens
  CDR3 for alpha chain variable domain of TCR clone 74504 (TRAV8-1, TRAJ8)
CAVNAMNTGFQKLVF

SEQ ID NO: 149008 - protein, 13 aa, Homo sapiens
  CDR3 for beta chain variable domain of TCR clone 74504 (TRBV19, TRBJ1-5)
CASSIGGNQPQHF

SEQ ID NO: 149009 - protein, 12 aa, Homo sapiens
  CDR3 for alpha chain variable domain of TCR clone 74505 (TRAV38-1, TRAJ47)
CAFETYGNKLVF

SEQ ID NO: 149010 - protein, 15 aa, Homo sapiens
  CDR3 for beta chain variable domain of TCR clone 74505 (TRBV5-7, TRBJ2-7)
CASSVGRPVPYEQYF

SEQ ID NO: 149011 - protein, 14 aa, Homo sapiens
  CDR3 for alpha chain variable domain of TCR clone 74506 (TRAV1-2, TRAJ16)
CAVNRFSDGQKLPF

SEQ ID NO: 149012 - protein, 13 aa, Homo sapiens
  CDR3 for beta chain variable domain of TCR clone 74506 (TRBV6-1, TRBJ2-5)
CASGYQSVETQYF

SEQ ID NO: 149013 - protein, 16 aa, Homo sapiens
  CDR3 for alpha chain variable domain of TCR clone 74507 (TRAV21, TRAJ52)
CAVTNAGGTSYRKLTF

SEQ ID NO: 149014 - protein, 11 aa, Homo sapiens
  CDR3 for beta chain variable domain of TCR clone 74507 (TRBV2, TRBJ1-1)
CASREGTEAFF

SEQ ID NO: 149015 - protein, 16 aa, Homo sapiens
  CDR3 for alpha chain variable domain of TCR clone 74508 (TRAV1-2, TRAJ16)
NALDGLEEKDGQKLLF

SEQ ID NO: 149016 - protein, 16 aa, Homo sapiens
  CDR3 for beta chain variable domain of TCR clone 74508 (TRBV2, TRBJ2-1)
CASRSPAGGKYNEQFF

SEQ ID NO: 149017 - protein, 13 aa, Homo sapiens
  CDR3 for alpha chain variable domain of TCR clone 74509 (TRAV8-3, TRAJ36)
CAVGETGANNLFF

SEQ ID NO: 149018 - protein, 15 aa, Homo sapiens
  CDR3 for beta chain variable domain of TCR clone 74509 (TRBV7-2, TRBJ1-2)
CASSPRAGWNYGYTF

SEQ ID NO: 149019 - protein, 14 aa, Homo sapiens
  CDR3 for alpha chain variable domain of TCR clone 74510 (TRAV26-1, TRAJ8)
CIVRVDTGFQKLVF

SEQ ID NO: 149020 - protein, 14 aa, Homo sapiens
  CDR3 for beta chain variable domain of TCR clone 74510 (TRBV11-2, TRBJ2-5)
CASSRTGGIETQYF

SEQ ID NO: 149021 - protein, 12 aa, Homo sapiens
  CDR3 for alpha chain variable domain of TCR clone 74511 (TRAV17, TRAJ20)
CATDSNDYKLSF

SEQ ID NO: 149022 - protein, 14 aa, Homo sapiens
  CDR3 for beta chain variable domain of TCR clone 74511 (TRBV7-2, TRBJ2-7)
CASRSQGAAYEQYF

SEQ ID NO: 149023 - protein, 18 aa, Homo sapiens
  CDR3 for alpha chain variable domain of TCR clone 74512 (TRAV21, TRAJ52)
CAVRPSPAGGTSYGKLTF

SEQ ID NO: 149024 - protein, 15 aa, Homo sapiens
  CDR3 for beta chain variable domain of TCR clone 74512 (TRBV7-9, TRBJ2-7)
CASSISGLAVYEQYF

SEQ ID NO: 149025 - protein, 13 aa, Homo sapiens
  CDR3 for alpha chain variable domain of TCR clone 74513 (TRAV1-1, TRAJ9)
CAALNTGGFKTIF

SEQ ID NO: 149026 - protein, 13 aa, Homo sapiens
  CDR3 for beta chain variable domain of TCR clone 74513 (TRBV19, TRBJ1-2)
CASSVPGQDGYTF

SEQ ID NO: 149027 - protein, 14 aa, Homo sapiens
  CDR3 for alpha chain variable domain of TCR clone 74514 (TRAV26-1, TRAJ11)
CIVPLYSGYSTLTF

SEQ ID NO: 149028 - protein, 14 aa, Homo sapiens
  CDR3 for beta chain variable domain of TCR clone 74514 (TRBV7-9, TRBJ2-5)
CASSLVGGEETQYF

SEQ ID NO: 149029 - protein, 14 aa, Homo sapiens
  CDR3 for alpha chain variable domain of TCR clone 74515 (TRAV2, TRAJ9)
CAVEDRRGGFKTIF

SEQ ID NO: 149030 - protein, 13 aa, Homo sapiens
  CDR3 for beta chain variable domain of TCR clone 74515 (TRBV19, TRBJ1-2)
CASSVPGQDGYTF

SEQ ID NO: 149031 - protein, 16 aa, Homo sapiens
  CDR3 for alpha chain variable domain of TCR clone 74516 (TRAV12-2, TRAJ50)
CAVGTATKTSYDKVIL

SEQ ID NO: 149032 - protein, 12 aa, Homo sapiens
  CDR3 for beta chain variable domain of TCR clone 74516 (TRBV12-4, TRBJ1-5)
CASSLGRQPQHF

SEQ ID NO: 149033 - protein, 13 aa, Homo sapiens
  CDR3 for alpha chain variable domain of TCR clone 74517 (TRAV8-6, TRAJ54)
CAGGIQGAQKLVF

SEQ ID NO: 149034 - protein, 14 aa, Homo sapiens
  CDR3 for beta chain variable domain of TCR clone 74517 (TRBV19, TRBJ2-1)
CASPTFVLSGEQFF

SEQ ID NO: 149035 - protein, 14 aa, Homo sapiens
  CDR3 for alpha chain variable domain of TCR clone 74518 (TRAV35, TRAJ13)
CAGSPSGGYQNVTF

SEQ ID NO: 149036 - protein, 13 aa, Homo sapiens
  CDR3 for beta chain variable domain of TCR clone 74518 (TRBV29-1, TRBJ1-1)
CSVGDSRNTEAFF

SEQ ID NO: 149037 - protein, 16 aa, Homo sapiens
  CDR3 for alpha chain variable domain of TCR clone 74519 (TRAV3, TRAJ21)
CAVRDIERGNFNKFYF

SEQ ID NO: 149038 - protein, 12 aa, Homo sapiens
  CDR3 for beta chain variable domain of TCR clone 74519 (TRBV7-3, TRBJ2-1)
CASSFINNEQFF

SEQ ID NO: 149039 - protein, 11 aa, Homo sapiens
  CDR3 for alpha chain variable domain of TCR clone 74520 (TRAV6, TRAJ39)
CAPDAGNMLTF

SEQ ID NO: 149040 - protein, 14 aa, Homo sapiens
  CDR3 for beta chain variable domain of TCR clone 74520 (TRBV28, TRBJ1-5)
CAGSRTGLNQPQHF

SEQ ID NO: 149041 - protein, 14 aa, Homo sapiens
  CDR3 for alpha chain variable domain of TCR clone 74521 (TRAV8-3, TRAJ36)
CAVGPITGANNLFF

SEQ ID NO: 149042 - protein, 15 aa, Homo sapiens
  CDR3 for beta chain variable domain of TCR clone 74521 (TRBV4-1, TRBJ2-1)
CASSQDPGNHNEQFF

SEQ ID NO: 149043 - protein, 14 aa, Homo sapiens
  CDR3 for alpha chain variable domain of TCR clone 74522 (TRAV12-1, TRAJ13)
CGDPLCGGYQKVTF

SEQ ID NO: 149044 - protein, 13 aa, Homo sapiens
  CDR3 for beta chain variable domain of TCR clone 74522 (TRBV10-3, TRBJ2-7)
CAISEAGAPEQYF

SEQ ID NO: 149045 - protein, 15 aa, Homo sapiens
  CDR3 for alpha chain variable domain of TCR clone 74523 (TRAV13-1, TRAJ3)
CAASKLASSDSKIIF

SEQ ID NO: 149046 - protein, 16 aa, Homo sapiens
  CDR3 for beta chain variable domain of TCR clone 74523 (TRBV25-1, TRBJ1-5)
CASGAPTVNSNQPQHF

SEQ ID NO: 149047 - protein, 14 aa, Homo sapiens
  CDR3 for alpha chain variable domain of TCR clone 74524 (TRAV17, TRAJ34)
CATDSLEGTDKLIF

SEQ ID NO: 149048 - protein, 18 aa, Homo sapiens
  CDR3 for beta chain variable domain of TCR clone 74524 (TRBV5-1, TRBJ1-6)
CASSVGGGYGERNSPLHF

SEQ ID NO: 149049 - protein, 14 aa, Homo sapiens
  CDR3 for alpha chain variable domain of TCR clone 74525 (TRAV3, TRAJ6)
CAVRDPWGSYIPTF

SEQ ID NO: 149050 - protein, 14 aa, Homo sapiens
  CDR3 for beta chain variable domain of TCR clone 74525 (TRBV7-2, TRBJ2-7)
CASSPKTSFYEQYF

SEQ ID NO: 149051 - protein, 13 aa, Homo sapiens
  CDR3 for alpha chain variable domain of TCR clone 74526 (TRAV35, TRAJ42)
CAGFPGSQGSLIF

SEQ ID NO: 149052 - protein, 14 aa, Homo sapiens
  CDR3 for beta chain variable domain of TCR clone 74526 (TRBV4-1, TRBJ2-2)
CASSQAVNTGELFF

SEQ ID NO: 149053 - protein, 16 aa, Homo sapiens
  CDR3 for alpha chain variable domain of TCR clone 74527 (TRAV41, TRAJ53)
CATPRGSGGSNYKLTF

SEQ ID NO: 149054 - protein, 15 aa, Homo sapiens
  CDR3 for beta chain variable domain of TCR clone 74527 (TRBV27, TRBJ2-2)
CASSLEGPSTGELFF

SEQ ID NO: 149055 - protein, 13 aa, Homo sapiens
  CDR3 for alpha chain variable domain of TCR clone 74528 (TRAV8-3, TRAJ43)
CAVGPDNNNDMRF

SEQ ID NO: 149056 - protein, 18 aa, Homo sapiens
  CDR3 for beta chain variable domain of TCR clone 74528 (TRBV7-9, TRBJ2-1)
CASSLAVSGTSGRNEQFF

SEQ ID NO: 149057 - protein, 12 aa, Homo sapiens
  CDR3 for alpha chain variable domain of TCR clone 74529 (TRAV8-3, TRAJ26)
CSGDNYGQNFVF

SEQ ID NO: 149058 - protein, 15 aa, Homo sapiens
  CDR3 for beta chain variable domain of TCR clone 74529 (TRBV5-1, TRBJ2-3)
CASSVTSGSTDTQYF

SEQ ID NO: 149059 - protein, 11 aa, Homo sapiens
  CDR3 for alpha chain variable domain of TCR clone 74530 (TRAV3, TRAJ21)
CAVGNFNKFYF

SEQ ID NO: 149060 - protein, 16 aa, Homo sapiens
  CDR3 for beta chain variable domain of TCR clone 74530 (TRBV19, TRBJ2-1)
CASCKAGPSSYNEQFF

SEQ ID NO: 149061 - protein, 14 aa, Homo sapiens
  CDR3 for alpha chain variable domain of TCR clone 74531 (TRAV13-1, TRAJ40)
CAASMTSGTYKYIF

SEQ ID NO: 149062 - protein, 15 aa, Homo sapiens
  CDR3 for beta chain variable domain of TCR clone 74531 (TRBV7-3, TRBJ2-1)
CASSSTGGGEVEQFF

SEQ ID NO: 149063 - protein, 13 aa, Homo sapiens
  CDR3 for alpha chain variable domain of TCR clone 74532 (TRAV35, TRAJ21)
CAGQLSNFNKFYF

SEQ ID NO: 149064 - protein, 14 aa, Homo sapiens
  CDR3 for beta chain variable domain of TCR clone 74532 (TRBV6-1, TRBJ1-3)
CASVQGGGGNTIYF

SEQ ID NO: 149065 - protein, 12 aa, Homo sapiens
  CDR3 for alpha chain variable domain of TCR clone 74533 (TRAV25, TRAJ17)
CKIKAAGNKLTF

SEQ ID NO: 149066 - protein, 16 aa, Homo sapiens
  CDR3 for beta chain variable domain of TCR clone 74533 (TRBV2, TRBJ2-3)
CASSTSVEGVTDTQYF

SEQ ID NO: 149067 - protein, 20 aa, Homo sapiens
  CDR3 for alpha chain variable domain of TCR clone 74534 (TRAV1-1, TRAJ39)
CLLLLRCESSAYNAGKMLTF

SEQ ID NO: 149068 - protein, 13 aa, Homo sapiens
  CDR3 for beta chain variable domain of TCR clone 74534 (TRBV12-4, TRBJ1-5)
CASSPDRAQPQHF

SEQ ID NO: 149069 - protein, 15 aa, Homo sapiens
  CDR3 for alpha chain variable domain of TCR clone 74535 (TRAV13-1, TRAJ17)
CAASIERAAGNKLTF

SEQ ID NO: 149070 - protein, 15 aa, Homo sapiens
  CDR3 for beta chain variable domain of TCR clone 74535 (TRBV7-9, TRBJ1-5)
CASSQGHQPNQPQHF

SEQ ID NO: 149071 - protein, 10 aa, Homo sapiens
  CDR3 for alpha chain variable domain of TCR clone 74536 (TRAV12-1, TRAJ20)
CVVNPRKLSF

SEQ ID NO: 149072 - protein, 13 aa, Homo sapiens
  CDR3 for beta chain variable domain of TCR clone 74536 (TRBV2, TRBJ2-1)
CASTRDRNNEQFF

SEQ ID NO: 149073 - protein, 13 aa, Homo sapiens
  CDR3 for alpha chain variable domain of TCR clone 74537 (TRAV12-1, TRAJ22)
CVVYSGSARQLTF

SEQ ID NO: 149074 - protein, 10 aa, Homo sapiens
  CDR3 for beta chain variable domain of TCR clone 74537 (TRBV6-3, TRBJ2-2)
CASRDGEMFF

SEQ ID NO: 149075 - protein, 11 aa, Homo sapiens
  CDR3 for alpha chain variable domain of TCR clone 74538 (TRAV8-1, TRAJ34)
CPAPGNDKLIF

SEQ ID NO: 149076 - protein, 16 aa, Homo sapiens
  CDR3 for beta chain variable domain of TCR clone 74538 (TRBV11-2, TRBJ1-2)
CASSLDTGGADYGYTF

SEQ ID NO: 149077 - protein, 17 aa, Homo sapiens
  CDR3 for alpha chain variable domain of TCR clone 74539 (TRAV12-2, TRAJ6)
CAPQGPPRAGGSYIPTF

SEQ ID NO: 149078 - protein, 14 aa, Homo sapiens
  CDR3 for beta chain variable domain of TCR clone 74539 (TRBV19, TRBJ2-1)
CASPTFVLSGEQFF

SEQ ID NO: 149079 - protein, 15 aa, Homo sapiens
  CDR3 for alpha chain variable domain of TCR clone 74540 (TRAV17, TRAJ22)
CATVAPSGSARQMTF

SEQ ID NO: 149080 - protein, 14 aa, Homo sapiens
  CDR3 for beta chain variable domain of TCR clone 74540 (TRBV20-1, TRBJ1-5)
CSARDGGSGQPQHF

SEQ ID NO: 149081 - protein, 13 aa, Homo sapiens
  CDR3 for alpha chain variable domain of TCR clone 74541 (TRAV12-2, TRAJ20)
CAVYPSNDYKLSF

SEQ ID NO: 149082 - protein, 15 aa, Homo sapiens
  CDR3 for beta chain variable domain of TCR clone 74541 (TRBV11-3, TRBJ2-3)
CASLKDGREGDTQYF

SEQ ID NO: 149083 - protein, 11 aa, Homo sapiens
  CDR3 for alpha chain variable domain of TCR clone 74542 (TRAV2, TRAJ13)
YASGGYQKVTF

SEQ ID NO: 149084 - protein, 16 aa, Homo sapiens
  CDR3 for beta chain variable domain of TCR clone 74542 (TRBV19, TRBJ2-1)
CASSMGGGSSYNEQFF

SEQ ID NO: 149085 - protein, 18 aa, Homo sapiens
  CDR3 for alpha chain variable domain of TCR clone 74543 (TRAV26-2, )
CILLDIQNPDPDVYQLRD

SEQ ID NO: 149086 - protein, 15 aa, Homo sapiens
  CDR3 for beta chain variable domain of TCR clone 74543 (TRBV6-3, TRBJ2-7)
CASSSPGTVFYEQYF

SEQ ID NO: 149087 - protein, 14 aa, Homo sapiens
  CDR3 for alpha chain variable domain of TCR clone 74544 (TRAV38-1, TRAJ40)
CALRATSGTYKYIF

SEQ ID NO: 149088 - protein, 14 aa, Homo sapiens
  CDR3 for beta chain variable domain of TCR clone 74544 (TRBV25-1, TRBJ1-1)
CASTHLGGNTEAFF

SEQ ID NO: 149089 - protein, 14 aa, Homo sapiens
  CDR3 for alpha chain variable domain of TCR clone 74545 (TRAV2, TRAJ9)
CAVEDRSGGFKTIF

SEQ ID NO: 149090 - protein, 17 aa, Homo sapiens
  CDR3 for beta chain variable domain of TCR clone 74545 (TRBV5-1, TRBJ2-5)
CASRRGGLGAGGETQYF

SEQ ID NO: 149091 - protein, 15 aa, Homo sapiens
  CDR3 for alpha chain variable domain of TCR clone 74546 (TRAV3, TRAJ30)
CAVRDEYGRDDKIIF

SEQ ID NO: 149092 - protein, 16 aa, Homo sapiens
  CDR3 for beta chain variable domain of TCR clone 74546 (TRBV5-1, TRBJ2-5)
YASSLANHRGRETQYF

SEQ ID NO: 149093 - protein, 12 aa, Homo sapiens
  CDR3 for alpha chain variable domain of TCR clone 74547 (TRAV13-1, TRAJ15)
CAASQAGTDLIF

SEQ ID NO: 149094 - protein, 18 aa, Homo sapiens
  CDR3 for beta chain variable domain of TCR clone 74547 (TRBV7-9, TRBJ2-3)
CASSLPINGQISTDTQYF

SEQ ID NO: 149095 - protein, 11 aa, Homo sapiens
  CDR3 for alpha chain variable domain of TCR clone 74548 (TRAV35, TRAJ30)
CAGERDDKIIF

SEQ ID NO: 149096 - protein, 14 aa, Homo sapiens
  CDR3 for beta chain variable domain of TCR clone 74548 (TRBV7-6, TRBJ2-3)
CASSLGTVTDTQYF

SEQ ID NO: 149097 - protein, 15 aa, Homo sapiens
  CDR3 for alpha chain variable domain of TCR clone 74549 (TRAV21, TRAJ37)
CAVRPPLSNTGKLIF

SEQ ID NO: 149098 - protein, 16 aa, Homo sapiens
  CDR3 for beta chain variable domain of TCR clone 74549 (TRBV24-1, TRBJ2-3)
CATSDRRQDLTDTQYF

SEQ ID NO: 149099 - protein, 15 aa, Homo sapiens
  CDR3 for alpha chain variable domain of TCR clone 74550 (TRAV20, TRAJ43)
CAVQAGKSSKNDMRF

SEQ ID NO: 149100 - protein, 14 aa, Homo sapiens
  CDR3 for beta chain variable domain of TCR clone 74550 (TRBV27, TRBJ2-1)
CASRHLGGGKEQFF

SEQ ID NO: 149101 - protein, 16 aa, Homo sapiens
  CDR3 for alpha chain variable domain of TCR clone 74551 (TRAV20, TRAJ22)
CAVQASSSGSARQLTF

SEQ ID NO: 149102 - protein, 13 aa, Homo sapiens
  CDR3 for beta chain variable domain of TCR clone 74551 (TRBV7-2, TRBJ2-5)
CASSQTSVETQYC

SEQ ID NO: 149103 - protein, 15 aa, Homo sapiens
  CDR3 for alpha chain variable domain of TCR clone 74552 (TRAV3, TRAJ5)
CAVRDLEAGRRALTF

SEQ ID NO: 149104 - protein, 13 aa, Homo sapiens
  CDR3 for beta chain variable domain of TCR clone 74552 (TRBV12-4, TRBJ2-7)
CASSPTETYEQYF

SEQ ID NO: 149105 - protein, 12 aa, Homo sapiens
  CDR3 for alpha chain variable domain of TCR clone 74553 (TRAV9-2, TRAJ57)
CALRSGSEKLVF

SEQ ID NO: 149106 - protein, 15 aa, Homo sapiens
  CDR3 for beta chain variable domain of TCR clone 74553 (TRBV19, TRBJ1-6)
CASSVGQAYNSPLHF

SEQ ID NO: 149107 - protein, 15 aa, Homo sapiens
  CDR3 for alpha chain variable domain of TCR clone 74554 (TRAV3, TRAJ5)
FAVRDLDTGRRALTF

SEQ ID NO: 149108 - protein, 14 aa, Homo sapiens
  CDR3 for beta chain variable domain of TCR clone 74554 (TRBV25-1, TRBJ1-4)
CASSGGGQPEKLFF

SEQ ID NO: 149109 - protein, 12 aa, Homo sapiens
  CDR3 for alpha chain variable domain of TCR clone 74555 (TRAV12-3, TRAJ17)
CAMTLTGNKLTF

SEQ ID NO: 149110 - protein, 14 aa, Homo sapiens
  CDR3 for beta chain variable domain of TCR clone 74555 (TRBV28, TRBJ1-1)
CASSFPRKNTEAFF

SEQ ID NO: 149111 - protein, 18 aa, Homo sapiens
  CDR3 for alpha chain variable domain of TCR clone 74556 (TRAV21, TRAJ52)
CAVRPSPAGGTSYGKLTF

SEQ ID NO: 149112 - protein, 15 aa, Homo sapiens
  CDR3 for beta chain variable domain of TCR clone 74556 (TRBV12-4, TRBJ1-5)
CASSLWTGLNQPQHF

SEQ ID NO: 149113 - protein, 17 aa, Homo sapiens
  CDR3 for alpha chain variable domain of TCR clone 74557 (TRAV3, TRAJ6)
CAVRDGPRAGGSYIPTF

SEQ ID NO: 149114 - protein, 14 aa, Homo sapiens
  CDR3 for beta chain variable domain of TCR clone 74557 (TRBV6-3, TRBJ2-1)
CASLHSAYYNEQFF

SEQ ID NO: 149115 - protein, 14 aa, Homo sapiens
  CDR3 for alpha chain variable domain of TCR clone 74558 (TRAV20, TRAJ29)
CAVQAWVGNTPLVF

SEQ ID NO: 149116 - protein, 12 aa, Homo sapiens
  CDR3 for beta chain variable domain of TCR clone 74558 (TRBV7-8, TRBJ2-7)
CASNLGDRGQYF

SEQ ID NO: 149117 - protein, 15 aa, Homo sapiens
  CDR3 for alpha chain variable domain of TCR clone 74559 (TRAV8-3, TRAJ27)
CAVGPYKTNAGKSTF

SEQ ID NO: 149118 - protein, 15 aa, Homo sapiens
  CDR3 for beta chain variable domain of TCR clone 74559 (TRBV27, TRBJ2-1)
CASSNGGGSSNEQFF

SEQ ID NO: 149119 - protein, 14 aa, Homo sapiens
  CDR3 for alpha chain variable domain of TCR clone 74560 (TRAV4, TRAJ9)
CLVGSGTGGCKTIF

SEQ ID NO: 149120 - protein, 14 aa, Homo sapiens
  CDR3 for beta chain variable domain of TCR clone 74560 (TRBV7-9, TRBJ2-4)
CASSLAMGGNIQYF

SEQ ID NO: 149121 - protein, 15 aa, Homo sapiens
  CDR3 for alpha chain variable domain of TCR clone 74561 (TRAV21, TRAJ52)
CAVRGGGTSYGKLTF

SEQ ID NO: 149122 - protein, 15 aa, Homo sapiens
  CDR3 for beta chain variable domain of TCR clone 74561 (TRBV18, TRBJ1-5)
CASSPTDRSNQPQHF

SEQ ID NO: 149123 - protein, 14 aa, Homo sapiens
  CDR3 for alpha chain variable domain of TCR clone 74562 (TRAV3, TRAJ9)
CAVRLNTGGFKTIF

SEQ ID NO: 149124 - protein, 15 aa, Homo sapiens
  CDR3 for beta chain variable domain of TCR clone 74562 (TRBV7-2, TRBJ2-1)
CASSLASGRVNEHFF

SEQ ID NO: 149125 - protein, 12 aa, Homo sapiens
  CDR3 for alpha chain variable domain of TCR clone 74563 (TRAV8-4, TRAJ43)
CAVSVNNNDMRF

SEQ ID NO: 149126 - protein, 14 aa, Homo sapiens
  CDR3 for beta chain variable domain of TCR clone 74563 (TRBV11-2, TRBJ1-2)
CGSSLGTANYGYTF

SEQ ID NO: 149127 - protein, 14 aa, Homo sapiens
  CDR3 for alpha chain variable domain of TCR clone 74564 (TRAV12-2, TRAJ40)
CAVKIPPGTYKYIF

SEQ ID NO: 149128 - protein, 12 aa, Homo sapiens
  CDR3 for beta chain variable domain of TCR clone 74564 (TRBV11-2, TRBJ2-1)
CASSPGNNEQFF

SEQ ID NO: 149129 - protein, 14 aa, Homo sapiens
  CDR3 for alpha chain variable domain of TCR clone 74565 (TRAV12-2, TRAJ13)
CAVKKTGGYQKVTF

SEQ ID NO: 149130 - protein, 15 aa, Homo sapiens
  CDR3 for beta chain variable domain of TCR clone 74565 (TRBV27, TRBJ2-1)
CASSNAGGSSNEQFF

SEQ ID NO: 149131 - protein, 17 aa, Homo sapiens
  CDR3 for alpha chain variable domain of TCR clone 74566 (TRAV3, TRAJ38)
CAVRDCLNAGNNRKLIW

SEQ ID NO: 149132 - protein, 13 aa, Homo sapiens
  CDR3 for beta chain variable domain of TCR clone 74566 (TRBV7-9, TRBJ2-3)
CASSPGSTDTQYF

SEQ ID NO: 149133 - protein, 18 aa, Homo sapiens
  CDR3 for alpha chain variable domain of TCR clone 74567 (TRAV21, TRAJ52)
CAVRPSPAGGTSYGKLTF

SEQ ID NO: 149134 - protein, 15 aa, Homo sapiens
  CDR3 for beta chain variable domain of TCR clone 74567 (TRBV15, TRBJ1-1)
CATSLQGGRNTEAFF

SEQ ID NO: 149135 - protein, 14 aa, Homo sapiens
  CDR3 for alpha chain variable domain of TCR clone 74568 (TRAV1-2, TRAJ27)
CAVRSGTNAGKSNF

SEQ ID NO: 149136 - protein, 15 aa, Homo sapiens
  CDR3 for beta chain variable domain of TCR clone 74568 (TRBV18, TRBJ2-7)
CASSPLQGRTYEQYF

SEQ ID NO: 149137 - protein, 11 aa, Homo sapiens
  CDR3 for alpha chain variable domain of TCR clone 74569 (TRAV38-1, TRAJ43)
CAFMKHNSGRH

SEQ ID NO: 149138 - protein, 11 aa, Homo sapiens
  CDR3 for beta chain variable domain of TCR clone 74569 (TRBV7-9, TRBJ2-3)
CASSYTGTQYF

SEQ ID NO: 149139 - protein, 12 aa, Homo sapiens
  CDR3 for alpha chain variable domain of TCR clone 74570 (TRAV12-3, TRAJ17)
CAMTLTGNKLTF

SEQ ID NO: 149140 - protein, 14 aa, Homo sapiens
  CDR3 for beta chain variable domain of TCR clone 74570 (TRBV9, TRBJ2-5)
CASSVVPYQETQYF

SEQ ID NO: 149141 - protein, 16 aa, Homo sapiens
  CDR3 for alpha chain variable domain of TCR clone 74571 (TRAV16, TRAJ4)
CITVLPLSGGYNKLIF

SEQ ID NO: 149142 - protein, 14 aa, Homo sapiens
  CDR3 for beta chain variable domain of TCR clone 74571 (TRBV19, TRBJ2-7)
CASSMGQGAIEQYF

SEQ ID NO: 149143 - protein, 21 aa, Homo sapiens
  CDR3 for alpha chain variable domain of TCR clone 74572 (TRAV26-1, TRAJ17)
CCVLLHRQSSGSKAAGNKLAF

SEQ ID NO: 149144 - protein, 14 aa, Homo sapiens
  CDR3 for beta chain variable domain of TCR clone 74572 (TRBV28, TRBJ1-2)
CASRIQGANYGYTF

SEQ ID NO: 149145 - protein, 14 aa, Homo sapiens
  CDR3 for alpha chain variable domain of TCR clone 74573 (TRAV23/DV6, TRAJ9)
CAASKDTGGFKTIF

SEQ ID NO: 149146 - protein, 14 aa, Homo sapiens
  CDR3 for beta chain variable domain of TCR clone 74573 (TRBV19, TRBJ1-2)
CASSLQGQTYGYTF

SEQ ID NO: 149147 - protein, 15 aa, Homo sapiens
  CDR3 for alpha chain variable domain of TCR clone 74574 (TRAV17, TRAJ56)
CATEANTGANSKLTF

SEQ ID NO: 149148 - protein, 14 aa, Homo sapiens
  CDR3 for beta chain variable domain of TCR clone 74574 (TRBV19, TRBJ1-5)
CASSLGTGGQPQHF

SEQ ID NO: 149149 - protein, 13 aa, Homo sapiens
  CDR3 for alpha chain variable domain of TCR clone 74575 (TRAV2, TRAJ40)
CAVVTSGTYKYIF

SEQ ID NO: 149150 - protein, 15 aa, Homo sapiens
  CDR3 for beta chain variable domain of TCR clone 74575 (TRBV4-1, TRBJ2-5)
CASSQWDLYQETQYF

SEQ ID NO: 149151 - protein, 14 aa, Homo sapiens
  CDR3 for alpha chain variable domain of TCR clone 74576 (TRAV1-2, TRAJ8)
CAVREDTGFQKLVF

SEQ ID NO: 149152 - protein, 16 aa, Homo sapiens
  CDR3 for beta chain variable domain of TCR clone 74576 (TRBV12-4, TRBJ2-3)
CASSFISGSGTDTQYF

SEQ ID NO: 149153 - protein, 13 aa, Homo sapiens
  CDR3 for alpha chain variable domain of TCR clone 74577 (TRAV21, TRAJ49)
CAVRQSTGNQFYF

SEQ ID NO: 149154 - protein, 15 aa, Homo sapiens
  CDR3 for beta chain variable domain of TCR clone 74577 (TRBV28, TRBJ2-2)
CASKTGTTGAGELFF

SEQ ID NO: 149155 - protein, 15 aa, Homo sapiens
  CDR3 for alpha chain variable domain of TCR clone 74578 (TRAV1-2, TRAJ28)
CAVQYSGAGSYQLTF

SEQ ID NO: 149156 - protein, 18 aa, Homo sapiens
  CDR3 for beta chain variable domain of TCR clone 74578 (TRBV11-2, TRBJ2-3)
CASSLGGASRGAPNTQYF

SEQ ID NO: 149157 - protein, 13 aa, Homo sapiens
  CDR3 for alpha chain variable domain of TCR clone 74579 (TRAV27, TRAJ3)
ASLRCSSASKIIF

SEQ ID NO: 149158 - protein, 15 aa, Homo sapiens
  CDR3 for beta chain variable domain of TCR clone 74579 (TRBV28, TRBJ1-3)
CASSMGWASGNTIYF

SEQ ID NO: 149159 - protein, 13 aa, Homo sapiens
  CDR3 for alpha chain variable domain of TCR clone 74580 (TRAV8-6, TRAJ21)
CAVSPSSHNKFYF

SEQ ID NO: 149160 - protein, 14 aa, Homo sapiens
  CDR3 for beta chain variable domain of TCR clone 74580 (TRBV7-9, TRBJ2-5)
CASSLDTAQETQYF

SEQ ID NO: 149161 - protein, 13 aa, Homo sapiens
  CDR3 for alpha chain variable domain of TCR clone 74581 (TRAV3, TRAJ4)
CAVRDGGYNKLIL

SEQ ID NO: 149162 - protein, 14 aa, Homo sapiens
  CDR3 for beta chain variable domain of TCR clone 74581 (TRBV12-4, TRBJ1-2)
CASSSSAAGSSYTF

SEQ ID NO: 149163 - protein, 13 aa, Homo sapiens
  CDR3 for alpha chain variable domain of TCR clone 74582 (TRAV13-1, TRAJ42)
QANYGGSQGNLIF

SEQ ID NO: 149164 - protein, 15 aa, Homo sapiens
  CDR3 for beta chain variable domain of TCR clone 74582 (TRBV20-1, TRBJ2-1)
CSASSARSSYNEQFF

SEQ ID NO: 149165 - protein, 13 aa, Homo sapiens
  CDR3 for alpha chain variable domain of TCR clone 74583 (TRAV8-3, TRAJ28)
CTVGAVGSYQLTF

SEQ ID NO: 149166 - protein, 14 aa, Homo sapiens
  CDR3 for beta chain variable domain of TCR clone 74583 (TRBV7-2, TRBJ2-7)
CASRSQGAAYEQYF

SEQ ID NO: 149167 - protein, 14 aa, Homo sapiens
  CDR3 for alpha chain variable domain of TCR clone 74584 (TRAV8-3, TRAJ4)
CAVGAAGGYNKLIF

SEQ ID NO: 149168 - protein, 12 aa, Homo sapiens
  CDR3 for beta chain variable domain of TCR clone 74584 (TRBV7-9, TRBJ2-7)
CASSLEGYEQYF

SEQ ID NO: 149169 - protein, 16 aa, Homo sapiens
  CDR3 for alpha chain variable domain of TCR clone 74585 (TRAV30, TRAJ24)
CGTEIVDADSWGKFKF

SEQ ID NO: 149170 - protein, 15 aa, Homo sapiens
  CDR3 for beta chain variable domain of TCR clone 74585 (TRBV12-4, TRBJ2-2)
CASSPNDSGTGELFF

SEQ ID NO: 149171 - protein, 19 aa, Homo sapiens
  CDR3 for alpha chain variable domain of TCR clone 74586 (TRAV2, TRAJ20)
ILQVREADAAVYRDCKLSF

SEQ ID NO: 149172 - protein, 15 aa, Homo sapiens
  CDR3 for beta chain variable domain of TCR clone 74586 (TRBV4-1, TRBJ1-2)
CASSQGQGAAYGYTF

SEQ ID NO: 149173 - protein, 16 aa, Homo sapiens
  CDR3 for alpha chain variable domain of TCR clone 74587 (TRAV16, TRAJ4)
CALSRMFSGGYNKLIF

SEQ ID NO: 149174 - protein, 13 aa, Homo sapiens
  CDR3 for beta chain variable domain of TCR clone 74587 (TRBV4-2, TRBJ1-1)
CASSQAGNTEAFF

SEQ ID NO: 149175 - protein, 12 aa, Homo sapiens
  CDR3 for alpha chain variable domain of TCR clone 74588 (TRAV13-2, TRAJ23)
CAERHRGGKLIF

SEQ ID NO: 149176 - protein, 15 aa, Homo sapiens
  CDR3 for beta chain variable domain of TCR clone 74588 (TRBV19, TRBJ1-2)
CASSVGQALNYGYTF

SEQ ID NO: 149177 - protein, 16 aa, Homo sapiens
  CDR3 for alpha chain variable domain of TCR clone 74589 (TRAV30, TRAJ24)
CGTEIVDADSWGKFQF

SEQ ID NO: 149178 - protein, 13 aa, Homo sapiens
  CDR3 for beta chain variable domain of TCR clone 74589 (TRBV11-2, TRBJ1-1)
CASSLGNGAEAFF

SEQ ID NO: 149179 - protein, 16 aa, Homo sapiens
  CDR3 for alpha chain variable domain of TCR clone 74590 (TRAV30, TRAJ24)
CGTEIVDADSWGKFQF

SEQ ID NO: 149180 - protein, 15 aa, Homo sapiens
  CDR3 for beta chain variable domain of TCR clone 74590 (TRBV20-1, TRBJ2-6)
CSARDRGPWANVLTF

SEQ ID NO: 149181 - protein, 15 aa, Homo sapiens
  CDR3 for alpha chain variable domain of TCR clone 74591 (TRAV26-2, TRAJ13)
CILRDLSGGYQKVTF

SEQ ID NO: 149182 - protein, 14 aa, Homo sapiens
  CDR3 for beta chain variable domain of TCR clone 74591 (TRBV4-1, TRBJ2-3)
CASSQEDSTDTQYF

SEQ ID NO: 149183 - protein, 15 aa, Homo sapiens
  CDR3 for alpha chain variable domain of TCR clone 74592 (TRAV8-1, TRAJ37)
CAVKKGSGNTGKLIF

SEQ ID NO: 149184 - protein, 17 aa, Homo sapiens
  CDR3 for beta chain variable domain of TCR clone 74592 (TRBV11-2, TRBJ2-1)
CASSLYPPGVEYNEQFF

SEQ ID NO: 149185 - protein, 11 aa, Homo sapiens
  CDR3 for alpha chain variable domain of TCR clone 74593 (TRAV21, TRAJ11)
CAVNGYSTLTF

SEQ ID NO: 149186 - protein, 17 aa, Homo sapiens
  CDR3 for beta chain variable domain of TCR clone 74593 (TRBV20-1, TRBJ2-2)
CSASGSGQGGLTGELFF

SEQ ID NO: 149187 - protein, 16 aa, Homo sapiens
  CDR3 for alpha chain variable domain of TCR clone 74594 (TRAV16, TRAJ4)
CALSRMFSGGYNKLIF

SEQ ID NO: 149188 - protein, 16 aa, Homo sapiens
  CDR3 for beta chain variable domain of TCR clone 74594 (TRBV24-1, TRBJ2-3)
RATSDPGTGATDTQYF

SEQ ID NO: 149189 - protein, 14 aa, Homo sapiens
  CDR3 for alpha chain variable domain of TCR clone 74595 (TRAV26-1, TRAJ21)
CIVRVAHNFNKFYF

SEQ ID NO: 149190 - protein, 13 aa, Homo sapiens
  CDR3 for beta chain variable domain of TCR clone 74595 (TRBV10-3, TRBJ2-7)
CASKLAVNYEQYF

SEQ ID NO: 149191 - protein, 12 aa, Homo sapiens
  CDR3 for alpha chain variable domain of TCR clone 74596 (TRAV12-3, TRAJ3)
CAIDSSASKIIF

SEQ ID NO: 149192 - protein, 17 aa, Homo sapiens
  CDR3 for beta chain variable domain of TCR clone 74596 (TRBV7-9, TRBJ2-3)
CASSLEEAEAYPDTQYF

SEQ ID NO: 149193 - protein, 14 aa, Homo sapiens
  CDR3 for alpha chain variable domain of TCR clone 74597 (TRAV25, TRAJ22)
CAVRSSGSARKLTF

SEQ ID NO: 149194 - protein, 16 aa, Homo sapiens
  CDR3 for beta chain variable domain of TCR clone 74597 (TRBV4-2, TRBJ1-1)
CASSPSPGRAAPEAFF

SEQ ID NO: 149195 - protein, 14 aa, Homo sapiens
  CDR3 for alpha chain variable domain of TCR clone 74598 (TRAV1-1, TRAJ23)
CAVSIYNQGGKLIF

SEQ ID NO: 149196 - protein, 15 aa, Homo sapiens
  CDR3 for beta chain variable domain of TCR clone 74598 (TRBV5-8, TRBJ2-2)
FASSLDRGATGELFF

SEQ ID NO: 149197 - protein, 14 aa, Homo sapiens
  CDR3 for alpha chain variable domain of TCR clone 74599 (TRAV1-2, TRAJ16)
CAVNRFSDGQKLLF

SEQ ID NO: 149198 - protein, 14 aa, Homo sapiens
  CDR3 for beta chain variable domain of TCR clone 74599 (TRBV7-8, TRBJ2-7)
RASSQTQGADEQYF

SEQ ID NO: 149199 - protein, 14 aa, Homo sapiens
  CDR3 for alpha chain variable domain of TCR clone 74600 (TRAV3, TRAJ9)
CAVRLNTGGFKTIF

SEQ ID NO: 149200 - protein, 13 aa, Homo sapiens
  CDR3 for beta chain variable domain of TCR clone 74600 (TRBV19, TRBJ1-2)
CASSIGQVYGYTF

SEQ ID NO: 149201 - protein, 13 aa, Homo sapiens
  CDR3 for alpha chain variable domain of TCR clone 74601 (TRAV21, TRAJ27)
CAARPGNAGKSTF

SEQ ID NO: 149202 - protein, 14 aa, Homo sapiens
  CDR3 for beta chain variable domain of TCR clone 74601 (TRBV11-2, TRBJ2-7)
CASSLGAGAYEKYF

SEQ ID NO: 149203 - protein, 16 aa, Homo sapiens
  CDR3 for alpha chain variable domain of TCR clone 74602 (TRAV8-1, TRAJ42)
CAVTSRYGGSQGNLIF

SEQ ID NO: 149204 - protein, 12 aa, Homo sapiens
  CDR3 for beta chain variable domain of TCR clone 74602 (TRBV6-3, TRBJ2-7)
CASSLGRRGPYF

SEQ ID NO: 149205 - protein, 14 aa, Homo sapiens
  CDR3 for alpha chain variable domain of TCR clone 74603 (TRAV4, TRAJ26)
CLVGPHNYGQNFVF

SEQ ID NO: 149206 - protein, 14 aa, Homo sapiens
  CDR3 for beta chain variable domain of TCR clone 74603 (TRBV4-2, TRBJ2-1)
CASGLDRAYNEQFF

SEQ ID NO: 149207 - protein, 14 aa, Homo sapiens
  CDR3 for alpha chain variable domain of TCR clone 74604 (TRAV2, TRAJ9)
CAVEDRRGGFKTIF

SEQ ID NO: 149208 - protein, 12 aa, Homo sapiens
  CDR3 for beta chain variable domain of TCR clone 74604 (TRBV11-2, TRBJ2-1)
CASSPGNNEQFF

SEQ ID NO: 149209 - protein, 18 aa, Homo sapiens
  CDR3 for alpha chain variable domain of TCR clone 74605 (TRAV26-2, TRAJ54)
CILRDVEVGVQGAQKLVF

SEQ ID NO: 149210 - protein, 17 aa, Homo sapiens
  CDR3 for beta chain variable domain of TCR clone 74605 (TRBV20-1, TRBJ1-5)
CSASLSPGQGGNQPQHF

SEQ ID NO: 149211 - protein, 11 aa, Homo sapiens
  CDR3 for alpha chain variable domain of TCR clone 74606 (TRAV3, TRAJ21)
CAVGNFNKFYF

SEQ ID NO: 149212 - protein, 13 aa, Homo sapiens
  CDR3 for beta chain variable domain of TCR clone 74606 (TRBV7-9, TRBJ1-2)
CASSSKQNYGYTF

SEQ ID NO: 149213 - protein, 12 aa, Homo sapiens
  CDR3 for alpha chain variable domain of TCR clone 74607 (TRAV22, TRAJ22)
CAPGGSASQLTF

SEQ ID NO: 149214 - protein, 13 aa, Homo sapiens
  CDR3 for beta chain variable domain of TCR clone 74607 (TRBV15, TRBJ1-6)
CATSGGLNSPLHF

SEQ ID NO: 149215 - protein, 11 aa, Homo sapiens
  CDR3 for alpha chain variable domain of TCR clone 74608 (TRAV21, TRAJ39)
LLVNAGNMLTF

SEQ ID NO: 149216 - protein, 12 aa, Homo sapiens
  CDR3 for beta chain variable domain of TCR clone 74608 (TRBV29-1, TRBJ2-3)
CSVTGGADTQYF

SEQ ID NO: 149217 - protein, 11 aa, Homo sapiens
  CDR3 for alpha chain variable domain of TCR clone 74609 (TRAV21, TRAJ11)
CAVNGYSTLTF

SEQ ID NO: 149218 - protein, 16 aa, Homo sapiens
  CDR3 for beta chain variable domain of TCR clone 74609 (TRBV7-2, TRBJ2-5)
CASSPFPTGGEETQYF

SEQ ID NO: 149219 - protein, 11 aa, Homo sapiens
  CDR3 for alpha chain variable domain of TCR clone 74610 (TRAV1-2, TRAJ11)
CAVRGYSTLTF

SEQ ID NO: 149220 - protein, 12 aa, Homo sapiens
  CDR3 for beta chain variable domain of TCR clone 74610 (TRBV7-8, TRBJ2-7)
CASSLGDREQYF

SEQ ID NO: 149221 - protein, 13 aa, Homo sapiens
  CDR3 for alpha chain variable domain of TCR clone 74611 (TRAV2, TRAJ24)
CAVSTDSWGKLQF

SEQ ID NO: 149222 - protein, 14 aa, Homo sapiens
  CDR3 for beta chain variable domain of TCR clone 74611 (TRBV13, TRBJ2-5)
CASSLGTAQETKYF

SEQ ID NO: 149223 - protein, 15 aa, Homo sapiens
  CDR3 for alpha chain variable domain of TCR clone 74612 (TRAV35, TRAJ20)
CAGQLVGSNDYKLSF

SEQ ID NO: 149224 - protein, 14 aa, Homo sapiens
  CDR3 for beta chain variable domain of TCR clone 74612 (TRBV7-2, TRBJ2-7)
CASRSQGAAYEQYF

SEQ ID NO: 149225 - protein, 13 aa, Homo sapiens
  CDR3 for alpha chain variable domain of TCR clone 74613 (TRAV16, TRAJ28)
CALTGAGSYQLTF

SEQ ID NO: 149226 - protein, 16 aa, Homo sapiens
  CDR3 for beta chain variable domain of TCR clone 74613 (TRBV5-1, TRBJ1-1)
CASSKTGTEVGTEAFF

SEQ ID NO: 149227 - protein, 11 aa, Homo sapiens
  CDR3 for alpha chain variable domain of TCR clone 74614 (TRAV1-2, TRAJ20)
CAVANDYKLSF

SEQ ID NO: 149228 - protein, 14 aa, Homo sapiens
  CDR3 for beta chain variable domain of TCR clone 74614 (TRBV27, TRBJ2-1)
CAGSIAETYNEQFF

SEQ ID NO: 149229 - protein, 14 aa, Homo sapiens
  CDR3 for alpha chain variable domain of TCR clone 74615 (TRAV12-1, TRAJ12)
CVVNPMDSSYKLIF

SEQ ID NO: 149230 - protein, 16 aa, Homo sapiens
  CDR3 for beta chain variable domain of TCR clone 74615 (TRBV28, TRBJ2-2)
CTSVPALGRAPGSCFF

SEQ ID NO: 149231 - protein, 14 aa, Homo sapiens
  CDR3 for alpha chain variable domain of TCR clone 74616 (TRAV17, TRAJ56)
CVTDVGGANSKLTF

SEQ ID NO: 149232 - protein, 15 aa, Homo sapiens
  CDR3 for beta chain variable domain of TCR clone 74616 (TRBV20-1, TRBJ2-7)
CSARDRVSGMDEQYF

SEQ ID NO: 149233 - protein, 12 aa, Homo sapiens
  CDR3 for alpha chain variable domain of TCR clone 74617 (TRAV1-2, TRAJ29)
CAVPSGNTPLVF

SEQ ID NO: 149234 - protein, 13 aa, Homo sapiens
  CDR3 for beta chain variable domain of TCR clone 74617 (TRBV5-4, TRBJ1-1)
CASSVDLGTETFF

SEQ ID NO: 149235 - protein, 16 aa, Homo sapiens
  CDR3 for alpha chain variable domain of TCR clone 74618 (TRAV3, TRAJ37)
CAVRPHGSGNTGKLIF

SEQ ID NO: 149236 - protein, 14 aa, Homo sapiens
  CDR3 for beta chain variable domain of TCR clone 74618 (TRBV11-2, TRBJ2-7)
CASSPSTTSYEQYF

SEQ ID NO: 149237 - protein, 11 aa, Homo sapiens
  CDR3 for alpha chain variable domain of TCR clone 74619 (TRAV1-1, TRAJ23)
CAVRQGGKLIF

SEQ ID NO: 149238 - protein, 13 aa, Homo sapiens
  CDR3 for beta chain variable domain of TCR clone 74619 (TRBV20-1, TRBJ2-1)
CSARDLVSNEQFF

SEQ ID NO: 149239 - protein, 15 aa, Homo sapiens
  CDR3 for alpha chain variable domain of TCR clone 74620 (TRAV27, TRAJ38)
CAGRFNAGNNRKLIW

SEQ ID NO: 149240 - protein, 16 aa, Homo sapiens
  CDR3 for beta chain variable domain of TCR clone 74620 (TRBV19, TRBJ2-1)
CASSKAGPSSYNEQFF

SEQ ID NO: 149241 - protein, 16 aa, Homo sapiens
  CDR3 for alpha chain variable domain of TCR clone 74621 (TRAV12-2, TRAJ6)
CPSRPPRAGGSYIPTF

SEQ ID NO: 149242 - protein, 16 aa, Homo sapiens
  CDR3 for beta chain variable domain of TCR clone 74621 (TRBV19, TRBJ2-2)
CASSTARASNTGELFF

SEQ ID NO: 149243 - protein, 17 aa, Homo sapiens
  CDR3 for alpha chain variable domain of TCR clone 74622 (TRAV3, TRAJ42)
CAVRDRDYGGSQGNLIF

SEQ ID NO: 149244 - protein, 16 aa, Homo sapiens
  CDR3 for beta chain variable domain of TCR clone 74622 (TRBV12-4, TRBJ2-5)
CASSLSTSGGKETQYF

SEQ ID NO: 149245 - protein, 11 aa, Homo sapiens
  CDR3 for alpha chain variable domain of TCR clone 74623 (TRAV13-1, TRAJ6)
CATLGSYIPTF

SEQ ID NO: 149246 - protein, 13 aa, Homo sapiens
  CDR3 for beta chain variable domain of TCR clone 74623 (TRBV6-6, TRBJ2-1)
CASGLHQGDEQFF

SEQ ID NO: 149247 - protein, 12 aa, Homo sapiens
  CDR3 for alpha chain variable domain of TCR clone 74624 (TRAV25, TRAJ38)
CAGTGNNRKLIW

SEQ ID NO: 149248 - protein, 14 aa, Homo sapiens
  CDR3 for beta chain variable domain of TCR clone 74624 (TRBV19, TRBJ1-5)
CASSKMTGPQTQHF

SEQ ID NO: 149249 - protein, 14 aa, Homo sapiens
  CDR3 for alpha chain variable domain of TCR clone 74625 (TRAV16, TRAJ33)
CALSAMDSDYQLIW

SEQ ID NO: 149250 - protein, 12 aa, Homo sapiens
  CDR3 for beta chain variable domain of TCR clone 74625 (TRBV5-1, TRBJ1-2)
CASSQDTYGYTF

SEQ ID NO: 149251 - protein, 14 aa, Homo sapiens
  CDR3 for alpha chain variable domain of TCR clone 74626 (TRAV23/DV6, TRAJ10)
CAARLTGGGNKLTF

SEQ ID NO: 149252 - protein, 16 aa, Homo sapiens
  CDR3 for beta chain variable domain of TCR clone 74626 (TRBV6-1, TRBJ1-5)
CASSDIAGQINQPQHF

SEQ ID NO: 149253 - protein, 15 aa, Homo sapiens
  CDR3 for alpha chain variable domain of TCR clone 74627 (TRAV8-6, TRAJ10)
CAVSDRAGGGNKLTF

SEQ ID NO: 149254 - protein, 15 aa, Homo sapiens
  CDR3 for beta chain variable domain of TCR clone 74627 (TRBV3-1, TRBJ2-5)
CASSANLGGPETQYF

SEQ ID NO: 149255 - protein, 11 aa, Homo sapiens
  CDR3 for alpha chain variable domain of TCR clone 74628 (TRAV2, TRAJ13)
CASGGYQKVTF

SEQ ID NO: 149256 - protein, 13 aa, Homo sapiens
  CDR3 for beta chain variable domain of TCR clone 74628 (TRBV12-4, TRBJ1-2)
CASSVRQGKGYTF

SEQ ID NO: 149257 - protein, 13 aa, Homo sapiens
  CDR3 for alpha chain variable domain of TCR clone 74629 (TRAV21, TRAJ57)
CAVTQGASEKLVF

SEQ ID NO: 149258 - protein, 16 aa, Homo sapiens
  CDR3 for beta chain variable domain of TCR clone 74629 (TRBV29-1, TRBJ2-7)
CSVEDAEDGTAYEQYF

SEQ ID NO: 149259 - protein, 13 aa, Homo sapiens
  CDR3 for alpha chain variable domain of TCR clone 74630 (TRAV12-2, TRAJ47)
CSVFMEYGNKLVL

SEQ ID NO: 149260 - protein, 14 aa, Homo sapiens
  CDR3 for beta chain variable domain of TCR clone 74630 (TRBV4-1, TRBJ1-5)
CASSQGPTNQPQHF

SEQ ID NO: 149261 - protein, 11 aa, Homo sapiens
  CDR3 for alpha chain variable domain of TCR clone 74631 (TRAV12-3, TRAJ43)
CAMSVSNDMRF

SEQ ID NO: 149262 - protein, 15 aa, Homo sapiens
  CDR3 for beta chain variable domain of TCR clone 74631 (TRBV9, TRBJ1-6)
CASSVSGTGDSPLHF

SEQ ID NO: 149263 - protein, 15 aa, Homo sapiens
  CDR3 for alpha chain variable domain of TCR clone 74632 (TRAV8-2, TRAJ28)
CVVSESGAGSYQLTF

SEQ ID NO: 149264 - protein, 12 aa, Homo sapiens
  CDR3 for beta chain variable domain of TCR clone 74632 (TRBV11-2, TRBJ2-2)
CASSLGGGELFF

SEQ ID NO: 149265 - protein, 13 aa, Homo sapiens
  CDR3 for alpha chain variable domain of TCR clone 74633 (TRAV26-1, TRAJ33)
CIVRVEGNYELIW

SEQ ID NO: 149266 - protein, 16 aa, Homo sapiens
  CDR3 for beta chain variable domain of TCR clone 74633 (TRBV15, TRBJ2-7)
CATSRDRGRRRGEQYF

SEQ ID NO: 149267 - protein, 14 aa, Homo sapiens
  CDR3 for alpha chain variable domain of TCR clone 74634 (TRAV3, TRAJ40)
CAVRDHRGTYKYIF

SEQ ID NO: 149268 - protein, 15 aa, Homo sapiens
  CDR3 for beta chain variable domain of TCR clone 74634 (TRBV11-1, TRBJ1-3)
CASTDPRAFGNTIYF

SEQ ID NO: 149269 - protein, 13 aa, Homo sapiens
  CDR3 for alpha chain variable domain of TCR clone 74635 (TRAV8-6, TRAJ49)
CAVITNTGNQFYF

SEQ ID NO: 149270 - protein, 14 aa, Homo sapiens
  CDR3 for beta chain variable domain of TCR clone 74635 (TRBV5-1, TRBJ2-7)
CASSGGESLYEQYF

SEQ ID NO: 149271 - protein, 12 aa, Homo sapiens
  CDR3 for alpha chain variable domain of TCR clone 74636 (TRAV38-2/DV8, TRAJ48)
CALLSGNEKLTF

SEQ ID NO: 149272 - protein, 14 aa, Homo sapiens
  CDR3 for beta chain variable domain of TCR clone 74636 (TRBV19, TRBJ2-1)
CASPTFVLSGEQFF

SEQ ID NO: 149273 - protein, 13 aa, Homo sapiens
  CDR3 for alpha chain variable domain of TCR clone 74637 (TRAV13-1, TRAJ40)
CEARTSGTYKYIF

SEQ ID NO: 149274 - protein, 17 aa, Homo sapiens
  CDR3 for beta chain variable domain of TCR clone 74637 (TRBV4-1, TRBJ2-3)
CASSQGYVSGGTDTQYF

SEQ ID NO: 149275 - protein, 12 aa, Homo sapiens
  CDR3 for alpha chain variable domain of TCR clone 74638 (TRAV8-3, TRAJ26)
CAGDNYGQNFVF

SEQ ID NO: 149276 - protein, 13 aa, Homo sapiens
  CDR3 for beta chain variable domain of TCR clone 74638 (TRBV20-1, TRBJ1-1)
CSAPLEGGTEAFF

SEQ ID NO: 149277 - protein, 12 aa, Homo sapiens
  CDR3 for alpha chain variable domain of TCR clone 74639 (TRAV8-3, TRAJ20)
CAVDFNDYKLNF

SEQ ID NO: 149278 - protein, 13 aa, Homo sapiens
  CDR3 for beta chain variable domain of TCR clone 74639 (TRBV5-7, TRBJ2-3)
CASSLGRTDTQYF

SEQ ID NO: 149279 - protein, 15 aa, Homo sapiens
  CDR3 for alpha chain variable domain of TCR clone 74640 (TRAV8-3, TRAJ40)
CAVGPYTSGTYNYIF

SEQ ID NO: 149280 - protein, 16 aa, Homo sapiens
  CDR3 for beta chain variable domain of TCR clone 74640 (TRBV7-2, TRBJ2-7)
CASSLDPGGGSGEQYF

SEQ ID NO: 149281 - protein, 16 aa, Homo sapiens
  CDR3 for alpha chain variable domain of TCR clone 74641 (TRAV30, TRAJ24)
CGTEIVDADSWGKFPF

SEQ ID NO: 149282 - protein, 14 aa, Homo sapiens
  CDR3 for beta chain variable domain of TCR clone 74641 (TRBV7-2, TRBJ2-7)
CASSPKTSFYEQYF

SEQ ID NO: 149283 - protein, 14 aa, Homo sapiens
  CDR3 for alpha chain variable domain of TCR clone 74642 (TRAV8-4, TRAJ13)
CAVTLSGGYQKVTF

SEQ ID NO: 149284 - protein, 14 aa, Homo sapiens
  CDR3 for beta chain variable domain of TCR clone 74642 (TRBV11-2, TRBJ2-3)
CASSRLARTDTQYF

SEQ ID NO: 149285 - protein, 11 aa, Homo sapiens
  CDR3 for alpha chain variable domain of TCR clone 74643 (TRAV26-1, TRAJ37)
CIVRVGRKIIF

SEQ ID NO: 149286 - protein, 13 aa, Homo sapiens
  CDR3 for beta chain variable domain of TCR clone 74643 (TRBV14, TRBJ1-2)
CASSEDRRYGYTF

SEQ ID NO: 149287 - protein, 14 aa, Homo sapiens
  CDR3 for alpha chain variable domain of TCR clone 74644 (TRAV1-2, TRAJ8)
CAVREDTGFQKLVF

SEQ ID NO: 149288 - protein, 15 aa, Homo sapiens
  CDR3 for beta chain variable domain of TCR clone 74644 (TRBV6-1, TRBJ2-7)
CASSESMGDFYEQYF

SEQ ID NO: 149289 - protein, 10 aa, Homo sapiens
  CDR3 for alpha chain variable domain of TCR clone 74645 (TRAV16, TRAJ22)
SAMYLRQLTF

SEQ ID NO: 149290 - protein, 16 aa, Homo sapiens
  CDR3 for beta chain variable domain of TCR clone 74645 (TRBV6-3, TRBJ2-1)
CASSYPDGGALGEQFF

SEQ ID NO: 149291 - protein, 16 aa, Homo sapiens
  CDR3 for alpha chain variable domain of TCR clone 74646 (TRAV3, TRAJ32)
CCERRNYGGATNKLIF

SEQ ID NO: 149292 - protein, 13 aa, Homo sapiens
  CDR3 for beta chain variable domain of TCR clone 74646 (TRBV2, TRBJ1-1)
CASGEGGNTEAFF

SEQ ID NO: 149293 - protein, 15 aa, Homo sapiens
  CDR3 for alpha chain variable domain of TCR clone 74647 (TRAV23/DV6, TRAJ49)
CAATPGQVRRSFQIS

SEQ ID NO: 149294 - protein, 14 aa, Homo sapiens
  CDR3 for beta chain variable domain of TCR clone 74647 (TRBV7-3, TRBJ1-1)
CASSLKGGNTEAFF

SEQ ID NO: 149295 - protein, 17 aa, Homo sapiens
  CDR3 for alpha chain variable domain of TCR clone 74648 (TRAV8-4, TRAJ11)
CAVSDRGENSGYSTLTF

SEQ ID NO: 149296 - protein, 16 aa, Homo sapiens
  CDR3 for beta chain variable domain of TCR clone 74648 (TRBV20-1, TRBJ1-2)
CSASMGQGVANYGYTF

SEQ ID NO: 149297 - protein, 13 aa, Homo sapiens
  CDR3 for alpha chain variable domain of TCR clone 74649 (TRAV13-1, TRAJ39)
CAASIWAGNMLTF

SEQ ID NO: 149298 - protein, 12 aa, Homo sapiens
  CDR3 for beta chain variable domain of TCR clone 74649 (TRBV27, TRBJ2-1)
CASRGPVNEQFF

SEQ ID NO: 149299 - protein, 13 aa, Homo sapiens
  CDR3 for alpha chain variable domain of TCR clone 74650 (TRAV3, TRAJ21)
CAVREPDFNKFYF

SEQ ID NO: 149300 - protein, 16 aa, Homo sapiens
  CDR3 for beta chain variable domain of TCR clone 74650 (TRBV5-5, TRBJ1-2)
CASSPTWGRGLYGYTF

SEQ ID NO: 149301 - protein, 13 aa, Homo sapiens
  CDR3 for alpha chain variable domain of TCR clone 74651 (TRAV27, TRAJ6)
CAGGTRGSYIPTF

SEQ ID NO: 149302 - protein, 15 aa, Homo sapiens
  CDR3 for beta chain variable domain of TCR clone 74651 (TRBV5-7, TRBJ2-7)
CASSLGPGRGNEQYF

SEQ ID NO: 149303 - protein, 11 aa, Homo sapiens
  CDR3 for alpha chain variable domain of TCR clone 74652 (TRAV13-1, TRAJ6)
CATLGSYIPTF

SEQ ID NO: 149304 - protein, 12 aa, Homo sapiens
  CDR3 for beta chain variable domain of TCR clone 74652 (TRBV11-2, TRBJ2-1)
CASGPGNNEQFF

SEQ ID NO: 149305 - protein, 15 aa, Homo sapiens
  CDR3 for alpha chain variable domain of TCR clone 74653 (TRAV21, TRAJ13)
CAVPRSFWGLPESSL

SEQ ID NO: 149306 - protein, 15 aa, Homo sapiens
  CDR3 for beta chain variable domain of TCR clone 74653 (TRBV7-9, TRBJ1-6)
CASSSPGRGNSPLHF

SEQ ID NO: 149307 - protein, 14 aa, Homo sapiens
  CDR3 for alpha chain variable domain of TCR clone 74654 (TRAV12-3, TRAJ10)
SHLPLKGGGNKLTF

SEQ ID NO: 149308 - protein, 13 aa, Homo sapiens
  CDR3 for beta chain variable domain of TCR clone 74654 (TRBV27, TRBJ1-1)
CASSLSIGAEAFF

SEQ ID NO: 149309 - protein, 13 aa, Homo sapiens
  CDR3 for alpha chain variable domain of TCR clone 74655 (TRAV8-4, TRAJ8)
CAVSYTGFQKLVF

SEQ ID NO: 149310 - protein, 14 aa, Homo sapiens
  CDR3 for beta chain variable domain of TCR clone 74655 (TRBV25-1, TRBJ1-1)
CASTHLGGNTEAFF

SEQ ID NO: 149311 - protein, 16 aa, Homo sapiens
  CDR3 for alpha chain variable domain of TCR clone 74656 (TRAV12-3, TRAJ53)
CAMSLGSGGSNYKLTF

SEQ ID NO: 149312 - protein, 17 aa, Homo sapiens
  CDR3 for beta chain variable domain of TCR clone 74656 (TRBV28, TRBJ2-5)
CASSTPEGDALQETQYF

SEQ ID NO: 149313 - protein, 14 aa, Homo sapiens
  CDR3 for alpha chain variable domain of TCR clone 74657 (TRAV1-2, TRAJ16)
CAVNRFSDGQKLLF

SEQ ID NO: 149314 - protein, 13 aa, Homo sapiens
  CDR3 for beta chain variable domain of TCR clone 74657 (TRBV7-9, TRBJ1-2)
CASRLKQNYGYTF

SEQ ID NO: 149315 - protein, 12 aa, Homo sapiens
  CDR3 for alpha chain variable domain of TCR clone 74658 (TRAV13-2, TRAJ39)
CAESRPGNMLTF

SEQ ID NO: 149316 - protein, 15 aa, Homo sapiens
  CDR3 for beta chain variable domain of TCR clone 74658 (TRBV7-2, TRBJ2-3)
CASSLAGAFIDTQYF

SEQ ID NO: 149317 - protein, 15 aa, Homo sapiens
  CDR3 for alpha chain variable domain of TCR clone 74659 (TRAV8-3, TRAJ45)
CASSYSGGGVDGLTF

SEQ ID NO: 149318 - protein, 17 aa, Homo sapiens
  CDR3 for beta chain variable domain of TCR clone 74659 (TRBV7-8, TRBJ1-2)
CASSLRPLQGHLYGYTF

SEQ ID NO: 149319 - protein, 15 aa, Homo sapiens
  CDR3 for alpha chain variable domain of TCR clone 74660 (TRAV26-1, TRAJ29)
CIVRVKNSGNTPLVF

SEQ ID NO: 149320 - protein, 12 aa, Homo sapiens
  CDR3 for beta chain variable domain of TCR clone 74660 (TRBV20-1, TRBJ1-2)
CSASWQGYGYTF

SEQ ID NO: 149321 - protein, 16 aa, Homo sapiens
  CDR3 for alpha chain variable domain of TCR clone 74661 (TRAV3, TRAJ37)
CAVRGKGSGNTGKLIF

SEQ ID NO: 149322 - protein, 13 aa, Homo sapiens
  CDR3 for beta chain variable domain of TCR clone 74661 (TRBV14, TRBJ2-7)
CAGSQDRRYEQYF

SEQ ID NO: 149323 - protein, 14 aa, Homo sapiens
  CDR3 for alpha chain variable domain of TCR clone 74662 (TRAV1-2, TRAJ16)
CAVNRFSDGQKLLF

SEQ ID NO: 149324 - protein, 14 aa, Homo sapiens
  CDR3 for beta chain variable domain of TCR clone 74662 (TRBV4-1, TRBJ2-2)
CASSQAVNAGELFF

SEQ ID NO: 149325 - protein, 14 aa, Homo sapiens
  CDR3 for alpha chain variable domain of TCR clone 74663 (TRAV13-1, TRAJ39)
CAVSYNNAGNMLTF

SEQ ID NO: 149326 - protein, 13 aa, Homo sapiens
  CDR3 for beta chain variable domain of TCR clone 74663 (TRBV24-1, TRBJ1-4)
CATNNGRSEKLFF

SEQ ID NO: 149327 - protein, 12 aa, Homo sapiens
  CDR3 for alpha chain variable domain of TCR clone 74664 (TRAV2, TRAJ23)
CAVEDVGGKLIF

SEQ ID NO: 149328 - protein, 13 aa, Homo sapiens
  CDR3 for beta chain variable domain of TCR clone 74664 (TRBV10-3, TRBJ2-7)
CASKLAVNYEQYF

SEQ ID NO: 149329 - protein, 16 aa, Homo sapiens
  CDR3 for alpha chain variable domain of TCR clone 74665 (TRAV30, TRAJ24)
CGTEIVDADSWGKFRF

SEQ ID NO: 149330 - protein, 15 aa, Homo sapiens
  CDR3 for beta chain variable domain of TCR clone 74665 (TRBV20-1, TRBJ2-6)
CSARDRGPGANVLTF

SEQ ID NO: 149331 - protein, 15 aa, Homo sapiens
  CDR3 for alpha chain variable domain of TCR clone 74666 (TRAV8-3, TRAJ11)
CAVGLLNSGYSTLTF

SEQ ID NO: 149332 - protein, 14 aa, Homo sapiens
  CDR3 for beta chain variable domain of TCR clone 74666 (TRBV7-6, TRBJ2-3)
CASSLGTVTDTQYF

SEQ ID NO: 149333 - protein, 15 aa, Homo sapiens
  CDR3 for alpha chain variable domain of TCR clone 74667 (TRAV8-6, TRAJ26)
CAVSDQSPGGQDFVF

SEQ ID NO: 149334 - protein, 13 aa, Homo sapiens
  CDR3 for beta chain variable domain of TCR clone 74667 (TRBV27, TRBJ2-7)
CASSLRHRYEQYF

SEQ ID NO: 149335 - protein, 16 aa, Homo sapiens
  CDR3 for alpha chain variable domain of TCR clone 74668 (TRAV21, TRAJ17)
CAVRPGEEAAGNKLTV

SEQ ID NO: 149336 - protein, 16 aa, Homo sapiens
  CDR3 for beta chain variable domain of TCR clone 74668 (TRBV2, TRBJ2-7)
CASSEPWTGPSYEQYF

SEQ ID NO: 149337 - protein, 14 aa, Homo sapiens
  CDR3 for alpha chain variable domain of TCR clone 74669 (TRAV3, TRAJ33)
CAGRDMDSNYQLIW

SEQ ID NO: 149338 - protein, 19 aa, Homo sapiens
  CDR3 for beta chain variable domain of TCR clone 74669 (TRBV7-3, TRBJ1-2)
CASSFPQGNDGELWLHLRF

SEQ ID NO: 149339 - protein, 16 aa, Homo sapiens
  CDR3 for alpha chain variable domain of TCR clone 74670 (TRAV14/DV4, TRAJ12)
CAMREGRGDSSYKLIF

SEQ ID NO: 149340 - protein, 13 aa, Homo sapiens
  CDR3 for beta chain variable domain of TCR clone 74670 (TRBV12-5, TRBJ2-3)
CASGDRQSDTQYF

SEQ ID NO: 149341 - protein, 14 aa, Homo sapiens
  CDR3 for alpha chain variable domain of TCR clone 74671 (TRAV17, TRAJ31)
CATVLLNNNARLMF

SEQ ID NO: 149342 - protein, 14 aa, Homo sapiens
  CDR3 for beta chain variable domain of TCR clone 74671 (TRBV12-4, TRBJ2-5)
CASSLWQKQETQYF

SEQ ID NO: 149343 - protein, 13 aa, Homo sapiens
  CDR3 for alpha chain variable domain of TCR clone 74672 (TRAV20, TRAJ37)
CAGCSSSTGKLIF

SEQ ID NO: 149344 - protein, 10 aa, Homo sapiens
  CDR3 for beta chain variable domain of TCR clone 74672 (TRBV12-4, TRBJ2-3)
CSTATDTQYF

SEQ ID NO: 149345 - protein, 13 aa, Homo sapiens
  CDR3 for alpha chain variable domain of TCR clone 74673 (TRAV21, TRAJ27)
CAARPGNAGKSTF

SEQ ID NO: 149346 - protein, 16 aa, Homo sapiens
  CDR3 for beta chain variable domain of TCR clone 74673 (TRBV11-2, TRBJ2-7)
CASSPTTGGVSYEQYF

SEQ ID NO: 149347 - protein, 15 aa, Homo sapiens
  CDR3 for alpha chain variable domain of TCR clone 74674 (TRAV12-2, TRAJ23)
CAVKPIYNQGGKLIF

SEQ ID NO: 149348 - protein, 15 aa, Homo sapiens
  CDR3 for beta chain variable domain of TCR clone 74674 (TRBV20-1, TRBJ2-7)
CSARDRVSGTDEQYF

SEQ ID NO: 149349 - protein, 13 aa, Homo sapiens
  CDR3 for alpha chain variable domain of TCR clone 74675 (TRAV8-6, TRAJ21)
CAVSPSALNKFYF

SEQ ID NO: 149350 - protein, 14 aa, Homo sapiens
  CDR3 for beta chain variable domain of TCR clone 74675 (TRBV7-9, TRBJ2-5)
CASSLDTAQETQYF

SEQ ID NO: 149351 - protein, 16 aa, Homo sapiens
  CDR3 for alpha chain variable domain of TCR clone 74676 (TRAV30, TRAJ24)
CGTEIVDANSWGKFQF

SEQ ID NO: 149352 - protein, 15 aa, Homo sapiens
  CDR3 for beta chain variable domain of TCR clone 74676 (TRBV12-4, TRBJ2-2)
CASSPNDSGTGELFF

SEQ ID NO: 149353 - protein, 15 aa, Homo sapiens
  CDR3 for alpha chain variable domain of TCR clone 74677 (TRAV12-2, TRAJ53)
CAVNGGGGRNYKLTF

SEQ ID NO: 149354 - protein, 14 aa, Homo sapiens
  CDR3 for beta chain variable domain of TCR clone 74677 (TRBV19, TRBJ2-2)
CASSTLHRSGELFF

SEQ ID NO: 149355 - protein, 11 aa, Homo sapiens
  CDR3 for alpha chain variable domain of TCR clone 74678 (TRAV3, TRAJ21)
CAVGNFNKLCF

SEQ ID NO: 149356 - protein, 17 aa, Homo sapiens
  CDR3 for beta chain variable domain of TCR clone 74678 (TRBV24-1, TRBJ2-1)
CATSDVSTSGTYNEQFF

SEQ ID NO: 149357 - protein, 18 aa, Homo sapiens
  CDR3 for alpha chain variable domain of TCR clone 74679 (TRAV13-1, TRAJ52)
CAAKNPKAGGTSYGKLTF

SEQ ID NO: 149358 - protein, 15 aa, Homo sapiens
  CDR3 for beta chain variable domain of TCR clone 74679 (TRBV6-1, TRBJ2-3)
CASSERGGITDTQYF

SEQ ID NO: 149359 - protein, 13 aa, Homo sapiens
  CDR3 for alpha chain variable domain of TCR clone 74680 (TRAV8-6, TRAJ49)
CAVITNTGNQFYF

SEQ ID NO: 149360 - protein, 15 aa, Homo sapiens
  CDR3 for beta chain variable domain of TCR clone 74680 (TRBV7-3, TRBJ2-1)
CASSPTGGGEVEQFF

SEQ ID NO: 149361 - protein, 13 aa, Homo sapiens
  CDR3 for alpha chain variable domain of TCR clone 74681 (TRAV26-1, TRAJ10)
CIVRKGGGNKLTF

SEQ ID NO: 149362 - protein, 15 aa, Homo sapiens
  CDR3 for beta chain variable domain of TCR clone 74681 (TRBV9, TRBJ2-1)
CASSLAGSSYNEQFF

SEQ ID NO: 149363 - protein, 14 aa, Homo sapiens
  CDR3 for alpha chain variable domain of TCR clone 74682 (TRAV17, TRAJ34)
CATDSLEGTDKLIF

SEQ ID NO: 149364 - protein, 13 aa, Homo sapiens
  CDR3 for beta chain variable domain of TCR clone 74682 (TRBV11-2, TRBJ2-7)
CASNGTRPYEQYF

SEQ ID NO: 149365 - protein, 13 aa, Homo sapiens
  CDR3 for alpha chain variable domain of TCR clone 74683 (TRAV13-2, TRAJ53)
CAENMGSNYKLTS

SEQ ID NO: 149366 - protein, 13 aa, Homo sapiens
  CDR3 for beta chain variable domain of TCR clone 74683 (TRBV4-1, TRBJ2-2)
CASSQENTGELFF

SEQ ID NO: 149367 - protein, 14 aa, Homo sapiens
  CDR3 for alpha chain variable domain of TCR clone 74684 (TRAV26-1, TRAJ38)
FIADNAGNNRKLIW

SEQ ID NO: 149368 - protein, 17 aa, Homo sapiens
  CDR3 for beta chain variable domain of TCR clone 74684 (TRBV7-9, TRBJ2-3)
CASSPTVAGDLTDTQYF

SEQ ID NO: 149369 - protein, 11 aa, Homo sapiens
  CDR3 for alpha chain variable domain of TCR clone 74685 (TRAV8-3, TRAJ21)
CAVGNFNKFYF

SEQ ID NO: 149370 - protein, 16 aa, Homo sapiens
  CDR3 for beta chain variable domain of TCR clone 74685 (TRBV19, TRBJ2-1)
CASSKAGPSSYNEQFF

SEQ ID NO: 149371 - protein, 13 aa, Homo sapiens
  CDR3 for alpha chain variable domain of TCR clone 74686 (TRAV12-1, TRAJ8)
CVGMGPGFQKLVF

SEQ ID NO: 149372 - protein, 18 aa, Homo sapiens
  CDR3 for beta chain variable domain of TCR clone 74686 (TRBV12-4, TRBJ2-2)
CASSLVAGTRGRTGGLFF

SEQ ID NO: 149373 - protein, 16 aa, Homo sapiens
  CDR3 for alpha chain variable domain of TCR clone 74687 (TRAV4, TRAJ22)
CLVGDLYYGSARQLTF

SEQ ID NO: 149374 - protein, 14 aa, Homo sapiens
  CDR3 for beta chain variable domain of TCR clone 74687 (TRBV28, TRBJ2-3)
CASSWRGRADTQYF

SEQ ID NO: 149375 - protein, 15 aa, Homo sapiens
  CDR3 for alpha chain variable domain of TCR clone 74688 (TRAV12-1, TRAJ8)
CVVNAENTGFQKLVF

SEQ ID NO: 149376 - protein, 15 aa, Homo sapiens
  CDR3 for beta chain variable domain of TCR clone 74688 (TRBV12-4, TRBJ1-6)
CASSLGQGFRSPLHF

SEQ ID NO: 149377 - protein, 17 aa, Homo sapiens
  CDR3 for alpha chain variable domain of TCR clone 74689 (TRAV8-6, TRAJ58)
CAVSSWVGETSGSRLTF

SEQ ID NO: 149378 - protein, 17 aa, Homo sapiens
  CDR3 for beta chain variable domain of TCR clone 74689 (TRBV11-2, TRBJ2-1)
CASNLYPPGVEYNEQFF

SEQ ID NO: 149379 - protein, 14 aa, Homo sapiens
  CDR3 for alpha chain variable domain of TCR clone 74690 (TRAV12-3, TRAJ10)
SHLPLTGGGNELTF

SEQ ID NO: 149380 - protein, 15 aa, Homo sapiens
  CDR3 for beta chain variable domain of TCR clone 74690 (TRBV4-1, TRBJ1-4)
CASSDTGGTNEKLFF

SEQ ID NO: 149381 - protein, 14 aa, Homo sapiens
  CDR3 for alpha chain variable domain of TCR clone 74691 (TRAV1-2, TRAJ16)
FAVNRFSDGQKLLF

SEQ ID NO: 149382 - protein, 14 aa, Homo sapiens
  CDR3 for beta chain variable domain of TCR clone 74691 (TRBV19, TRBJ2-1)
CASPTFVLSGEQFF

SEQ ID NO: 149383 - protein, 14 aa, Homo sapiens
  CDR3 for alpha chain variable domain of TCR clone 74692 (TRAV17, TRAJ53)
CATDAGGSNYKLTF

SEQ ID NO: 149384 - protein, 15 aa, Homo sapiens
  CDR3 for beta chain variable domain of TCR clone 74692 (TRBV6-1, TRBJ2-1)
CASSELRGQYNEQFF

SEQ ID NO: 149385 - protein, 13 aa, Homo sapiens
  CDR3 for alpha chain variable domain of TCR clone 74693 (TRAV3, TRAJ4)
CAVRDGGYNKLIF

SEQ ID NO: 149386 - protein, 14 aa, Homo sapiens
  CDR3 for beta chain variable domain of TCR clone 74693 (TRBV12-4, TRBJ1-2)
CASSSSAAGSSDTF

SEQ ID NO: 149387 - protein, 17 aa, Homo sapiens
  CDR3 for alpha chain variable domain of TCR clone 74694 (TRAV8-1, TRAJ43)
CAATNDMRFGAGTRLTV

SEQ ID NO: 149388 - protein, 12 aa, Homo sapiens
  CDR3 for beta chain variable domain of TCR clone 74694 (TRBV4-1, TRBJ2-3)
CASSQGTDTQYF

SEQ ID NO: 149389 - protein, 13 aa, Homo sapiens
  CDR3 for alpha chain variable domain of TCR clone 74695 (TRAV29/DV5, TRAJ47)
CAASAEYGNKLVF

SEQ ID NO: 149390 - protein, 15 aa, Homo sapiens
  CDR3 for beta chain variable domain of TCR clone 74695 (TRBV7-6, TRBJ2-1)
CASSSLAGEGNEQFF

SEQ ID NO: 149391 - protein, 13 aa, Homo sapiens
  CDR3 for alpha chain variable domain of TCR clone 74696 (TRAV13-2, TRAJ48)
CAEMDFGNEKLTF

SEQ ID NO: 149392 - protein, 15 aa, Homo sapiens
  CDR3 for beta chain variable domain of TCR clone 74696 (TRBV7-9, TRBJ1-6)
CASSSPGRGTSPLHF

SEQ ID NO: 149393 - protein, 14 aa, Homo sapiens
  CDR3 for alpha chain variable domain of TCR clone 74697 (TRAV2, TRAJ37)
CAVDFTSNTGKLIF

SEQ ID NO: 149394 - protein, 17 aa, Homo sapiens
  CDR3 for beta chain variable domain of TCR clone 74697 (TRBV7-3, TRBJ2-3)
CASSLMKRMRGADTQYF

SEQ ID NO: 149395 - protein, 14 aa, Homo sapiens
  CDR3 for alpha chain variable domain of TCR clone 74698 (TRAV2, TRAJ9)
CAVEDRSGGFKTIF

SEQ ID NO: 149396 - protein, 13 aa, Homo sapiens
  CDR3 for beta chain variable domain of TCR clone 74698 (TRBV19, TRBJ1-1)
CASSGQVNTEAFF

SEQ ID NO: 149397 - protein, 18 aa, Homo sapiens
  CDR3 for alpha chain variable domain of TCR clone 74699 (TRAV26-2, TRAJ45)
CILRVDKYSGGGADGLTF

SEQ ID NO: 149398 - protein, 16 aa, Homo sapiens
  CDR3 for beta chain variable domain of TCR clone 74699 (TRBV2, TRBJ1-4)
CASNLLQGATNEKLFV

SEQ ID NO: 149399 - protein, 15 aa, Homo sapiens
  CDR3 for alpha chain variable domain of TCR clone 74700 (TRAV12-1, TRAJ44)
CLVDTPQGTASKLTF

SEQ ID NO: 149400 - protein, 13 aa, Homo sapiens
  CDR3 for beta chain variable domain of TCR clone 74700 (TRBV27, TRBJ2-1)
CASSSGSYNEQFF

SEQ ID NO: 149401 - protein, 16 aa, Homo sapiens
  CDR3 for alpha chain variable domain of TCR clone 74701 (TRAV23/DV6, TRAJ21)
CAASSGGGTPSTNFTL

SEQ ID NO: 149402 - protein, 11 aa, Homo sapiens
  CDR3 for beta chain variable domain of TCR clone 74701 (TRBV7-8, TRBJ2-7)
CASSLSLEQYF

SEQ ID NO: 149403 - protein, 14 aa, Homo sapiens
  CDR3 for alpha chain variable domain of TCR clone 74702 (TRAV1-1, TRAJ27)
CAVIYNTNAVKSTF

SEQ ID NO: 149404 - protein, 15 aa, Homo sapiens
  CDR3 for beta chain variable domain of TCR clone 74702 (TRBV7-2, TRBJ2-1)
CASGSGLAGGNEQFF

SEQ ID NO: 149405 - protein, 13 aa, Homo sapiens
  CDR3 for alpha chain variable domain of TCR clone 74703 (TRAV12-1, TRAJ33)
CGDAPDSNYQLIW

SEQ ID NO: 149406 - protein, 12 aa, Homo sapiens
  CDR3 for beta chain variable domain of TCR clone 74703 (TRBV5-6, TRBJ2-7)
CASSLGRYEQYF

SEQ ID NO: 149407 - protein, 12 aa, Homo sapiens
  CDR3 for alpha chain variable domain of TCR clone 74704 (TRAV8-3, TRAJ26)
CAGDNYGQNFVF

SEQ ID NO: 149408 - protein, 15 aa, Homo sapiens
  CDR3 for beta chain variable domain of TCR clone 74704 (TRBV6-3, TRBJ2-2)
CASSFLATLTGELFF

SEQ ID NO: 149409 - protein, 14 aa, Homo sapiens
  CDR3 for alpha chain variable domain of TCR clone 74705 (TRAV35, TRAJ22)
CAGLRPGSARQLTF

SEQ ID NO: 149410 - protein, 16 aa, Homo sapiens
  CDR3 for beta chain variable domain of TCR clone 74705 (TRBV2, TRBJ2-3)
CASSTSVEGVTDTQYF

SEQ ID NO: 149411 - protein, 12 aa, Homo sapiens
  CDR3 for alpha chain variable domain of TCR clone 74706 (TRAV30, TRAJ43)
CGTEERGNDMRF

SEQ ID NO: 149412 - protein, 16 aa, Homo sapiens
  CDR3 for beta chain variable domain of TCR clone 74706 (TRBV3-1, TRBJ2-3)
CASSQGTGYGTDTQYF

SEQ ID NO: 149413 - protein, 13 aa, Homo sapiens
  CDR3 for alpha chain variable domain of TCR clone 74707 (TRAV25, TRAJ26)
CAGMDNYGQNFVF

SEQ ID NO: 149414 - protein, 15 aa, Homo sapiens
  CDR3 for beta chain variable domain of TCR clone 74707 (TRBV28, TRBJ1-5)
CASSRTGGYVQPQHF

SEQ ID NO: 149415 - protein, 13 aa, Homo sapiens
  CDR3 for alpha chain variable domain of TCR clone 74708 (TRAV16, TRAJ39)
CALGPNAGNMLTF

SEQ ID NO: 149416 - protein, 14 aa, Homo sapiens
  CDR3 for beta chain variable domain of TCR clone 74708 (TRBV7-9, TRBJ2-1)
CASSPRDSLYEQFF

SEQ ID NO: 149417 - protein, 15 aa, Homo sapiens
  CDR3 for alpha chain variable domain of TCR clone 74709 (TRAV21, TRAJ37)
CAVRPTLSNTGKLIF

SEQ ID NO: 149418 - protein, 14 aa, Homo sapiens
  CDR3 for beta chain variable domain of TCR clone 74709 (TRBV4-1, TRBJ2-5)
CASSRSGSGETQYF

SEQ ID NO: 149419 - protein, 14 aa, Homo sapiens
  CDR3 for alpha chain variable domain of TCR clone 74710 (TRAV2, TRAJ37)
CAVDFTSNTGKLIF

SEQ ID NO: 149420 - protein, 14 aa, Homo sapiens
  CDR3 for beta chain variable domain of TCR clone 74710 (TRBV4-2, TRBJ2-7)
CASSQGQTAYEQYF

SEQ ID NO: 149421 - protein, 12 aa, Homo sapiens
  CDR3 for alpha chain variable domain of TCR clone 74711 (TRAV12-1, TRAJ40)
CVVYSGTYKYIF

SEQ ID NO: 149422 - protein, 18 aa, Homo sapiens
  CDR3 for beta chain variable domain of TCR clone 74711 (TRBV11-2, TRBJ2-3)
CASTLGGASRGAPNTQYF

SEQ ID NO: 149423 - protein, 12 aa, Homo sapiens
  CDR3 for alpha chain variable domain of TCR clone 74712 (TRAV12-3, TRAJ34)
CAMGYNTDKLIF

SEQ ID NO: 149424 - protein, 14 aa, Homo sapiens
  CDR3 for beta chain variable domain of TCR clone 74712 (TRBV5-7, TRBJ1-5)
CSSSRTGGGQPQHF

SEQ ID NO: 149425 - protein, 14 aa, Homo sapiens
  CDR3 for alpha chain variable domain of TCR clone 74713 (TRAV12-2, TRAJ52)
CRCAGGTSHGKLTF

SEQ ID NO: 149426 - protein, 17 aa, Homo sapiens
  CDR3 for beta chain variable domain of TCR clone 74713 (TRBV4-1, TRBJ2-3)
CASSQGYVSGGTDTQYF

SEQ ID NO: 149427 - protein, 15 aa, Homo sapiens
  CDR3 for alpha chain variable domain of TCR clone 74714 (TRAV8-4, TRAJ47)
CAVSDPEEYGNKLVV

SEQ ID NO: 149428 - protein, 15 aa, Homo sapiens
  CDR3 for beta chain variable domain of TCR clone 74714 (TRBV11-2, TRBJ2-1)
CASSLGPDSYNEQFF

SEQ ID NO: 149429 - protein, 16 aa, Homo sapiens
  CDR3 for alpha chain variable domain of TCR clone 74715 (TRAV27, TRAJ53)
CAAPEGSGGSNDKLTF

SEQ ID NO: 149430 - protein, 14 aa, Homo sapiens
  CDR3 for beta chain variable domain of TCR clone 74715 (TRBV4-3, TRBJ1-5)
CASSQGGQGWPQHF

SEQ ID NO: 149431 - protein, 14 aa, Homo sapiens
  CDR3 for alpha chain variable domain of TCR clone 74716 (TRAV21, TRAJ35)
CAVMPIGFGNVLHC

SEQ ID NO: 149432 - protein, 16 aa, Homo sapiens
  CDR3 for beta chain variable domain of TCR clone 74716 (TRBV27, TRBJ2-2)
CASSLRPGGAPGELFF

SEQ ID NO: 149433 - protein, 12 aa, Homo sapiens
  CDR3 for alpha chain variable domain of TCR clone 74717 (TRAV21, TRAJ41)
CAVRGFRVCTQL

SEQ ID NO: 149434 - protein, 15 aa, Homo sapiens
  CDR3 for beta chain variable domain of TCR clone 74717 (TRBV18, TRBJ1-5)
CASSPQARSNQPQHF

SEQ ID NO: 149435 - protein, 19 aa, Homo sapiens
  CDR3 for alpha chain variable domain of TCR clone 74718 (TRAV1-2, TRAJ26)
CLLPLCCERPDNYGKNFVF

SEQ ID NO: 149436 - protein, 12 aa, Homo sapiens
  CDR3 for beta chain variable domain of TCR clone 74718 (TRBV20-1, TRBJ2-1)
CSAQYTYNEQFF

SEQ ID NO: 149437 - protein, 14 aa, Homo sapiens
  CDR3 for alpha chain variable domain of TCR clone 74719 (TRAV38-1, TRAJ40)
CALRPTSGTYKYIF

SEQ ID NO: 149438 - protein, 18 aa, Homo sapiens
  CDR3 for beta chain variable domain of TCR clone 74719 (TRBV7-9, TRBJ2-7)
CASSLTTSGSRTWYEQYF

SEQ ID NO: 149439 - protein, 13 aa, Homo sapiens
  CDR3 for alpha chain variable domain of TCR clone 74720 (TRAV1-2, TRAJ31)
CAVRPNNNARLMF

SEQ ID NO: 149440 - protein, 17 aa, Homo sapiens
  CDR3 for beta chain variable domain of TCR clone 74720 (TRBV15, TRBJ1-5)
CATSRAPPGTRNQPQHF

SEQ ID NO: 149441 - protein, 15 aa, Homo sapiens
  CDR3 for alpha chain variable domain of TCR clone 74721 (TRAV8-4, TRAJ47)
CAVSDPEEYGNKLVF

SEQ ID NO: 149442 - protein, 15 aa, Homo sapiens
  CDR3 for beta chain variable domain of TCR clone 74721 (TRBV11-2, TRBJ2-1)
CASSLGPDYYNEQFF

SEQ ID NO: 149443 - protein, 14 aa, Homo sapiens
  CDR3 for alpha chain variable domain of TCR clone 74722 (TRAV13-2, TRAJ22)
CADGTLGSARQLNF

SEQ ID NO: 149444 - protein, 16 aa, Homo sapiens
  CDR3 for beta chain variable domain of TCR clone 74722 (TRBV19, TRBJ2-1)
CASSSKGTRSYNEQFF

SEQ ID NO: 149445 - protein, 16 aa, Homo sapiens
  CDR3 for alpha chain variable domain of TCR clone 74723 (TRAV26-1, TRAJ56)
CIVRARERGANSKLAF

SEQ ID NO: 149446 - protein, 13 aa, Homo sapiens
  CDR3 for beta chain variable domain of TCR clone 74723 (TRBV7-2, TRBJ1-1)
CASSLRANTEAFF

SEQ ID NO: 149447 - protein, 13 aa, Homo sapiens
  CDR3 for alpha chain variable domain of TCR clone 74724 (TRAV20, TRAJ37)
CAGCSSNTGKLIC

SEQ ID NO: 149448 - protein, 11 aa, Homo sapiens
  CDR3 for beta chain variable domain of TCR clone 74724 (TRBV12-4, TRBJ2-3)
CASTATDTQYF

SEQ ID NO: 149449 - protein, 15 aa, Homo sapiens
  CDR3 for alpha chain variable domain of TCR clone 74725 (TRAV8-3, TRAJ15)
CAVGAPNQAGTALIF

SEQ ID NO: 149450 - protein, 13 aa, Homo sapiens
  CDR3 for beta chain variable domain of TCR clone 74725 (TRBV20-1, TRBJ2-1)
QSNDEASYNEQFF

SEQ ID NO: 149451 - protein, 11 aa, Homo sapiens
  CDR3 for alpha chain variable domain of TCR clone 74726 (TRAV35, TRAJ34)
CWARNTDKLIF

SEQ ID NO: 149452 - protein, 14 aa, Homo sapiens
  CDR3 for beta chain variable domain of TCR clone 74726 (TRBV5-1, TRBJ2-7)
CASSRGESLYEQYL

SEQ ID NO: 149453 - protein, 10 aa, Homo sapiens
  CDR3 for alpha chain variable domain of TCR clone 74727 (TRAV12-3, TRAJ18)
CAMSAEAQPG

SEQ ID NO: 149454 - protein, 13 aa, Homo sapiens
  CDR3 for beta chain variable domain of TCR clone 74727 (TRBV15, TRBJ1-6)
CATSGGLNSPLHF

SEQ ID NO: 149455 - protein, 12 aa, Homo sapiens
  CDR3 for alpha chain variable domain of TCR clone 74728 (TRAV23/DV6, TRAJ30)
CAASKGDAKIIF

SEQ ID NO: 149456 - protein, 15 aa, Homo sapiens
  CDR3 for beta chain variable domain of TCR clone 74728 (TRBV20-1, TRBJ2-7)
CSARDRVSGMDEQYF

SEQ ID NO: 149457 - protein, 14 aa, Homo sapiens
  CDR3 for alpha chain variable domain of TCR clone 74729 (TRAV12-3, TRAJ10)
SHPPLTGGGNKLTF

SEQ ID NO: 149458 - protein, 14 aa, Homo sapiens
  CDR3 for beta chain variable domain of TCR clone 74729 (TRBV19, TRBJ2-7)
CASTVQGRPYEQYF

SEQ ID NO: 149459 - protein, 15 aa, Homo sapiens
  CDR3 for alpha chain variable domain of TCR clone 74730 (TRAV3, TRAJ22)
CAVRDRGGSARQLTF

SEQ ID NO: 149460 - protein, 15 aa, Homo sapiens
  CDR3 for beta chain variable domain of TCR clone 74730 (TRBV11-2, TRBJ1-1)
CASSSRSSLLPSLDK

SEQ ID NO: 149461 - protein, 12 aa, Homo sapiens
  CDR3 for alpha chain variable domain of TCR clone 74731 (TRAV26-2, TRAJ21)
CILKGNFNKFYF

SEQ ID NO: 149462 - protein, 13 aa, Homo sapiens
  CDR3 for beta chain variable domain of TCR clone 74731 (TRBV7-3, TRBJ1-1)
CASSQDWGAEAFF

SEQ ID NO: 149463 - protein, 10 aa, Homo sapiens
  CDR3 for alpha chain variable domain of TCR clone 74732 (TRAV1-2, TRAJ23)
CAGQGGKLIF

SEQ ID NO: 149464 - protein, 12 aa, Homo sapiens
  CDR3 for beta chain variable domain of TCR clone 74732 (TRBV11-2, TRBJ2-2)
CASSLPTGELFF

SEQ ID NO: 149465 - protein, 17 aa, Homo sapiens
  CDR3 for alpha chain variable domain of TCR clone 74733 (TRAV17, TRAJ7)
CATLGRLAFGKGHQVVV

SEQ ID NO: 149466 - protein, 13 aa, Homo sapiens
  CDR3 for beta chain variable domain of TCR clone 74733 (TRBV12-4, TRBJ2-7)
CASSLERVREQYF

SEQ ID NO: 149467 - protein, 17 aa, Homo sapiens
  CDR3 for alpha chain variable domain of TCR clone 74734 (TRAV17, TRAJ28)
CATDPRRGGAGSYQLTL

SEQ ID NO: 149468 - protein, 16 aa, Homo sapiens
  CDR3 for beta chain variable domain of TCR clone 74734 (TRBV25-1, TRBJ1-1)
CASSGDRDRGRIEAFF

SEQ ID NO: 149469 - protein, 13 aa, Homo sapiens
  CDR3 for alpha chain variable domain of TCR clone 74735 (TRAV2, TRAJ47)
CAVDREYGNKLVL

SEQ ID NO: 149470 - protein, 17 aa, Homo sapiens
  CDR3 for beta chain variable domain of TCR clone 74735 (TRBV15, TRBJ1-5)
CATSRVKGIYSNQPQHF

SEQ ID NO: 149471 - protein, 15 aa, Homo sapiens
  CDR3 for alpha chain variable domain of TCR clone 74736 (TRAV35, TRAJ40)
CAGQLGTSGTYKYIS

SEQ ID NO: 149472 - protein, 14 aa, Homo sapiens
  CDR3 for beta chain variable domain of TCR clone 74736 (TRBV7-3, TRBJ2-1)
CASSLAGGTNEQFF

SEQ ID NO: 149473 - protein, 16 aa, Homo sapiens
  CDR3 for alpha chain variable domain of TCR clone 74737 (TRAV26-1, TRAJ45)
CIVEKYSGGGADGLTF

SEQ ID NO: 149474 - protein, 15 aa, Homo sapiens
  CDR3 for beta chain variable domain of TCR clone 74737 (TRBV15, TRBJ2-7)
CHQQRHIQQAYEQYF

SEQ ID NO: 149475 - protein, 14 aa, Homo sapiens
  CDR3 for alpha chain variable domain of TCR clone 74738 (TRAV1-2, TRAJ16)
CAVNRFSDGQKLLF

SEQ ID NO: 149476 - protein, 16 aa, Homo sapiens
  CDR3 for beta chain variable domain of TCR clone 74738 (TRBV7-3, TRBJ2-2)
CASSLKRGNLSGELFF

SEQ ID NO: 149477 - protein, 13 aa, Homo sapiens
  CDR3 for alpha chain variable domain of TCR clone 74739 (TRAV21, TRAJ8)
CAAPNTGFQKLVF

SEQ ID NO: 149478 - protein, 12 aa, Homo sapiens
  CDR3 for beta chain variable domain of TCR clone 74739 (TRBV11-2, TRBJ2-2)
CASSLGGGELFF

SEQ ID NO: 149479 - protein, 15 aa, Homo sapiens
  CDR3 for alpha chain variable domain of TCR clone 74740 (TRAV25, TRAJ53)
CAATGGGGSNYKLTF

SEQ ID NO: 149480 - protein, 14 aa, Homo sapiens
  CDR3 for beta chain variable domain of TCR clone 74740 (TRBV7-2, TRBJ2-2)
CASRGQGAAGELFF

SEQ ID NO: 149481 - protein, 15 aa, Homo sapiens
  CDR3 for alpha chain variable domain of TCR clone 74741 (TRAV21, TRAJ23)
CAVDQRKNQGGKLIF

SEQ ID NO: 149482 - protein, 13 aa, Homo sapiens
  CDR3 for beta chain variable domain of TCR clone 74741 (TRBV12-4, TRBJ1-4)
CASAMGHNEKLFF

SEQ ID NO: 149483 - protein, 15 aa, Homo sapiens
  CDR3 for alpha chain variable domain of TCR clone 74742 (TRAV13-2, TRAJ10)
CAEIDFTGGGNKLTF

SEQ ID NO: 149484 - protein, 13 aa, Homo sapiens
  CDR3 for beta chain variable domain of TCR clone 74742 (TRBV7-3, TRBJ1-1)
CASSQDWGAEAFF

SEQ ID NO: 149485 - protein, 17 aa, Homo sapiens
  CDR3 for alpha chain variable domain of TCR clone 74743 (TRAV9-2, TRAJ45)
CALSGYYSGGGADGLTF

SEQ ID NO: 149486 - protein, 18 aa, Homo sapiens
  CDR3 for beta chain variable domain of TCR clone 74743 (TRBV4-1, TRBJ2-7)
CASSQAPGTGTLGDEQYF

SEQ ID NO: 149487 - protein, 17 aa, Homo sapiens
  CDR3 for alpha chain variable domain of TCR clone 74744 (TRAV29/DV5, TRAJ52)
CTSVQQADGTSYGKLTF

SEQ ID NO: 149488 - protein, 13 aa, Homo sapiens
  CDR3 for beta chain variable domain of TCR clone 74744 (TRBV7-2, TRBJ1-1)
CASNLKGAKVAFF

SEQ ID NO: 149489 - protein, 11 aa, Homo sapiens
  CDR3 for alpha chain variable domain of TCR clone 74745 (TRAV35, TRAJ30)
CAGERDDKIIF

SEQ ID NO: 149490 - protein, 18 aa, Homo sapiens
  CDR3 for beta chain variable domain of TCR clone 74745 (TRBV12-4, TRBJ2-2)
CASSLVAGTRGRTGELFF

SEQ ID NO: 149491 - protein, 14 aa, Homo sapiens
  CDR3 for alpha chain variable domain of TCR clone 74746 (TRAV12-3, TRAJ54)
CAMSALQGAQKLGF

SEQ ID NO: 149492 - protein, 15 aa, Homo sapiens
  CDR3 for beta chain variable domain of TCR clone 74746 (TRBV19, TRBJ2-4)
CASSTPGIAKNIQYF

SEQ ID NO: 149493 - protein, 13 aa, Homo sapiens
  CDR3 for alpha chain variable domain of TCR clone 74747 (TRAV1-1, TRAJ23)
CAVVANQGGKLIF

SEQ ID NO: 149494 - protein, 16 aa, Homo sapiens
  CDR3 for beta chain variable domain of TCR clone 74747 (TRBV29-1, TRBJ2-7)
CSVEDAEDGTAYEQYF

SEQ ID NO: 149495 - protein, 14 aa, Homo sapiens
  CDR3 for alpha chain variable domain of TCR clone 74748 (TRAV5, TRAJ12)
CAEKNMDSSYKLIF

SEQ ID NO: 149496 - protein, 16 aa, Homo sapiens
  CDR3 for beta chain variable domain of TCR clone 74748 (TRBV7-2, TRBJ1-5)
CASSPWGPEGNQPQHF

SEQ ID NO: 149497 - protein, 11 aa, Homo sapiens
  CDR3 for alpha chain variable domain of TCR clone 74749 (TRAV21, TRAJ11)
CAVNGYSTLTF

SEQ ID NO: 149498 - protein, 15 aa, Homo sapiens
  CDR3 for beta chain variable domain of TCR clone 74749 (TRBV7-9, TRBJ1-6)
CASSSPGRGNSPLHF

SEQ ID NO: 149499 - protein, 11 aa, Homo sapiens
  CDR3 for alpha chain variable domain of TCR clone 74750 (TRAV8-1, TRAJ8)
CAMTGFQKLVF

SEQ ID NO: 149500 - protein, 14 aa, Homo sapiens
  CDR3 for beta chain variable domain of TCR clone 74750 (TRBV5-4, TRBJ1-2)
CASTRQTDNYGYSF

SEQ ID NO: 149501 - protein, 12 aa, Homo sapiens
  CDR3 for alpha chain variable domain of TCR clone 74751 (TRAV21, TRAJ13)
PGPSGGYQKVTF

SEQ ID NO: 149502 - protein, 15 aa, Homo sapiens
  CDR3 for beta chain variable domain of TCR clone 74751 (TRBV7-9, TRBJ1-6)
CASSSTGRGNSPLHF

SEQ ID NO: 149503 - protein, 14 aa, Homo sapiens
  CDR3 for alpha chain variable domain of TCR clone 74752 (TRAV1-2, TRAJ16)
CAVNRFSDGQKLLF

SEQ ID NO: 149504 - protein, 14 aa, Homo sapiens
  CDR3 for beta chain variable domain of TCR clone 74752 (TRBV7-9, TRBJ2-3)
CASSLEYGTDTQYF

SEQ ID NO: 149505 - protein, 17 aa, Homo sapiens
  CDR3 for alpha chain variable domain of TCR clone 74753 (TRAV17, TRAJ52)
CATERPSGGTSYGKLTF

SEQ ID NO: 149506 - protein, 15 aa, Homo sapiens
  CDR3 for beta chain variable domain of TCR clone 74753 (TRBV5-1, TRBJ2-1)
CASGLVANSYNEQFF

SEQ ID NO: 149507 - protein, 16 aa, Homo sapiens
  CDR3 for alpha chain variable domain of TCR clone 74754 (TRAV35, TRAJ28)
CAGQRYSGAGSYQLTC

SEQ ID NO: 149508 - protein, 13 aa, Homo sapiens
  CDR3 for beta chain variable domain of TCR clone 74754 (TRBV19, TRBJ1-2)
CASSQGQVYGYTF

SEQ ID NO: 149509 - protein, 16 aa, Homo sapiens
  CDR3 for alpha chain variable domain of TCR clone 74755 (TRAV26-1, TRAJ37)
CIVRGDGSGNTGKLIF

SEQ ID NO: 149510 - protein, 20 aa, Homo sapiens
  CDR3 for beta chain variable domain of TCR clone 74755 (TRBV7-8, TRBJ2-2)
CASSHLFPGPTIHITGELFF

SEQ ID NO: 149511 - protein, 17 aa, Homo sapiens
  CDR3 for alpha chain variable domain of TCR clone 74756 (TRAV13-1, TRAJ52)
CAAGRNAGGTSYVKLTF

SEQ ID NO: 149512 - protein, 13 aa, Homo sapiens
  CDR3 for beta chain variable domain of TCR clone 74756 (TRBV7-2, TRBJ1-1)
CASNLKGAKVAFF

SEQ ID NO: 149513 - protein, 16 aa, Homo sapiens
  CDR3 for alpha chain variable domain of TCR clone 74757 (TRAV30, TRAJ24)
CGEEIVDADSWGKFQF

SEQ ID NO: 149514 - protein, 12 aa, Homo sapiens
  CDR3 for beta chain variable domain of TCR clone 74757 (TRBV11-2, TRBJ2-2)
CASSLGGGELFF

SEQ ID NO: 149515 - protein, 16 aa, Homo sapiens
  CDR3 for alpha chain variable domain of TCR clone 74758 (TRAV8-3, TRAJ13)
CAVGAYPSGGYQEVTF

SEQ ID NO: 149516 - protein, 14 aa, Homo sapiens
  CDR3 for beta chain variable domain of TCR clone 74758 (TRBV18, TRBJ2-5)
CASSPRASSETQYF

SEQ ID NO: 149517 - protein, 14 aa, Homo sapiens
  CDR3 for alpha chain variable domain of TCR clone 74759 (TRAV21, TRAJ48)
CAASTDFGNEKLTF

SEQ ID NO: 149518 - protein, 15 aa, Homo sapiens
  CDR3 for beta chain variable domain of TCR clone 74759 (TRBV10-2, TRBJ2-5)
CASKPEDRRQETQYF

SEQ ID NO: 149519 - protein, 13 aa, Homo sapiens
  CDR3 for alpha chain variable domain of TCR clone 74760 (TRAV8-3, TRAJ48)
CAVVPFGNEKLTF

SEQ ID NO: 149520 - protein, 19 aa, Homo sapiens
  CDR3 for beta chain variable domain of TCR clone 74760 (TRBV25-1, TRBJ2-2)
CAILVYRVDRGRKTGELFF

SEQ ID NO: 149521 - protein, 11 aa, Homo sapiens
  CDR3 for alpha chain variable domain of TCR clone 74761 (TRAV21, TRAJ11)
CTVNGYSTLTF

SEQ ID NO: 149522 - protein, 11 aa, Homo sapiens
  CDR3 for beta chain variable domain of TCR clone 74761 (TRBV19, TRBJ1-1)
CASSIGSEAFF

SEQ ID NO: 149523 - protein, 12 aa, Homo sapiens
  CDR3 for alpha chain variable domain of TCR clone 74762 (TRAV12-1, TRAJ40)
CVVYSGTYKYIF

SEQ ID NO: 149524 - protein, 16 aa, Homo sapiens
  CDR3 for beta chain variable domain of TCR clone 74762 (TRBV6-1, TRBJ1-5)
CASSALHPRGNQPQHF

SEQ ID NO: 149525 - protein, 14 aa, Homo sapiens
  CDR3 for alpha chain variable domain of TCR clone 74763 (TRAV13-1, TRAJ44)
CAAKATGTASKLTF

SEQ ID NO: 149526 - protein, 15 aa, Homo sapiens
  CDR3 for beta chain variable domain of TCR clone 74763 (TRBV7-2, TRBJ2-5)
CASSPLGLDKETQYF

SEQ ID NO: 149527 - protein, 15 aa, Homo sapiens
  CDR3 for alpha chain variable domain of TCR clone 74764 (TRAV3, TRAJ22)
CAVRDRGGSARQLTF

SEQ ID NO: 149528 - protein, 15 aa, Homo sapiens
  CDR3 for beta chain variable domain of TCR clone 74764 (TRBV10-2, TRBJ2-6)
CASSEQGTGANVLTF

SEQ ID NO: 149529 - protein, 15 aa, Homo sapiens
  CDR3 for alpha chain variable domain of TCR clone 74765 (TRAV1-2, TRAJ3)
CAVRGGYSSASKIIF

SEQ ID NO: 149530 - protein, 11 aa, Homo sapiens
  CDR3 for beta chain variable domain of TCR clone 74765 (TRBV11-2, TRBJ2-2)
CASSLPGELFF

SEQ ID NO: 149531 - protein, 17 aa, Homo sapiens
  CDR3 for alpha chain variable domain of TCR clone 74766 (TRAV26-1, TRAJ37)
CIVRVITVSSNTGKLIF

SEQ ID NO: 149532 - protein, 14 aa, Homo sapiens
  CDR3 for beta chain variable domain of TCR clone 74766 (TRBV5-4, TRBJ1-1)
CASSLDSRRDEAFF

SEQ ID NO: 149533 - protein, 11 aa, Homo sapiens
  CDR3 for alpha chain variable domain of TCR clone 74767 (TRAV13-1, TRAJ5)
CAPKGGRALTF

SEQ ID NO: 149534 - protein, 15 aa, Homo sapiens
  CDR3 for beta chain variable domain of TCR clone 74767 (TRBV11-2, TRBJ1-1)
CASSSRSSLLLSLDK

SEQ ID NO: 149535 - protein, 16 aa, Homo sapiens
  CDR3 for alpha chain variable domain of TCR clone 74768 (TRAV3, TRAJ5)
CAVSNLMDTGRRALTF

SEQ ID NO: 149536 - protein, 16 aa, Homo sapiens
  CDR3 for beta chain variable domain of TCR clone 74768 (TRBV4-2, TRBJ2-7)
CASSQEGLANSYEQYF

SEQ ID NO: 149537 - protein, 15 aa, Homo sapiens
  CDR3 for alpha chain variable domain of TCR clone 74769 (TRAV17, TRAJ16)
CATALRVSDGQKLLF

SEQ ID NO: 149538 - protein, 15 aa, Homo sapiens
  CDR3 for beta chain variable domain of TCR clone 74769 (TRBV20-1, TRBJ1-1)
CSASRGVTGNTEAFF

SEQ ID NO: 149539 - protein, 20 aa, Homo sapiens
  CDR3 for alpha chain variable domain of TCR clone 74770 (TRAV26-1, TRAJ42)
CCVLLHRQTYYGGSQGNLIF

SEQ ID NO: 149540 - protein, 14 aa, Homo sapiens
  CDR3 for beta chain variable domain of TCR clone 74770 (TRBV12-4, TRBJ1-1)
CASSPIRRTGEAFF

SEQ ID NO: 149541 - protein, 17 aa, Homo sapiens
  CDR3 for alpha chain variable domain of TCR clone 74771 (TRAV26-2, TRAJ42)
CILRDAGYGGSQGNLIF

SEQ ID NO: 149542 - protein, 16 aa, Homo sapiens
  CDR3 for beta chain variable domain of TCR clone 74771 (TRBV6-5, TRBJ2-1)
CASSETLAGHYNEQFF

SEQ ID NO: 149543 - protein, 17 aa, Homo sapiens
  CDR3 for alpha chain variable domain of TCR clone 74772 (TRAV3, TRAJ28)
CAVREAYSGAGSYQLTF

SEQ ID NO: 149544 - protein, 15 aa, Homo sapiens
  CDR3 for beta chain variable domain of TCR clone 74772 (TRBV7-2, TRBJ2-1)
CASTHGTGIYNEQFF

SEQ ID NO: 149545 - protein, 12 aa, Homo sapiens
  CDR3 for alpha chain variable domain of TCR clone 74773 (TRAV1-1, TRAJ39)
CALPVVGNMLTF

SEQ ID NO: 149546 - protein, 15 aa, Homo sapiens
  CDR3 for beta chain variable domain of TCR clone 74773 (TRBV19, TRBJ1-6)
CASSTQGAVGSPLHF

SEQ ID NO: 149547 - protein, 11 aa, Homo sapiens
  CDR3 for alpha chain variable domain of TCR clone 74774 (TRAV2, TRAJ13)
CASGGYQKVTF

SEQ ID NO: 149548 - protein, 14 aa, Homo sapiens
  CDR3 for beta chain variable domain of TCR clone 74774 (TRBV19, TRBJ2-7)
CASSIGQGAIEQYF

SEQ ID NO: 149549 - protein, 12 aa, Homo sapiens
  CDR3 for alpha chain variable domain of TCR clone 74775 (TRAV17, TRAJ20)
CATYSNDSKLSF

SEQ ID NO: 149550 - protein, 11 aa, Homo sapiens
  CDR3 for beta chain variable domain of TCR clone 74775 (TRBV4-1, TRBJ2-2)
CASEHTGELFF

SEQ ID NO: 149551 - protein, 14 aa, Homo sapiens
  CDR3 for alpha chain variable domain of TCR clone 74776 (TRAV1-2, TRAJ16)
CAVNRFSDGQKLLF

SEQ ID NO: 149552 - protein, 16 aa, Homo sapiens
  CDR3 for beta chain variable domain of TCR clone 74776 (TRBV12-5, TRBJ2-5)
CASGTRTSGNQETQYF

SEQ ID NO: 149553 - protein, 11 aa, Homo sapiens
  CDR3 for alpha chain variable domain of TCR clone 74777 (TRAV12-1, TRAJ30)
CVVNGQDKIIF

SEQ ID NO: 149554 - protein, 12 aa, Homo sapiens
  CDR3 for beta chain variable domain of TCR clone 74777 (TRBV27, TRBJ2-2)
CAIKLFTGELFF

SEQ ID NO: 149555 - protein, 15 aa, Homo sapiens
  CDR3 for alpha chain variable domain of TCR clone 74778 (TRAV8-3, TRAJ11)
CAVGLLNSGYSTLTF

SEQ ID NO: 149556 - protein, 16 aa, Homo sapiens
  CDR3 for beta chain variable domain of TCR clone 74778 (TRBV7-9, TRBJ1-2)
FASSLGFSSGEDGYTF

SEQ ID NO: 149557 - protein, 11 aa, Homo sapiens
  CDR3 for alpha chain variable domain of TCR clone 74779 (TRAV12-3, TRAJ26)
CAMSHGQNFVF

SEQ ID NO: 149558 - protein, 14 aa, Homo sapiens
  CDR3 for beta chain variable domain of TCR clone 74779 (TRBV4-2, TRBJ2-1)
CASGLDRAYNEQFF

SEQ ID NO: 149559 - protein, 14 aa, Homo sapiens
  CDR3 for alpha chain variable domain of TCR clone 74780 (TRAV17, TRAJ16)
CATADFSDGQKLIF

SEQ ID NO: 149560 - protein, 12 aa, Homo sapiens
  CDR3 for beta chain variable domain of TCR clone 74780 (TRBV24-1, TRBJ1-1)
CATLYPDTEAFF

SEQ ID NO: 149561 - protein, 12 aa, Homo sapiens
  CDR3 for alpha chain variable domain of TCR clone 74781 (TRAV12-3, TRAJ20)
CAMVRGDYKLSF

SEQ ID NO: 149562 - protein, 14 aa, Homo sapiens
  CDR3 for beta chain variable domain of TCR clone 74781 (TRBV20-1, TRBJ2-3)
CSARGGTSTDTQYF

SEQ ID NO: 149563 - protein, 14 aa, Homo sapiens
  CDR3 for alpha chain variable domain of TCR clone 74782 (TRAV13-1, TRAJ40)
CAARSTSGTYRYIF

SEQ ID NO: 149564 - protein, 15 aa, Homo sapiens
  CDR3 for beta chain variable domain of TCR clone 74782 (TRBV18, TRBJ1-5)
CASSETGGNNQPQHF

SEQ ID NO: 149565 - protein, 14 aa, Homo sapiens
  CDR3 for alpha chain variable domain of TCR clone 74783 (TRAV8-6, TRAJ54)
CAVSPALGAQKLVF

SEQ ID NO: 149566 - protein, 15 aa, Homo sapiens
  CDR3 for beta chain variable domain of TCR clone 74783 (TRBV4-1, TRBJ1-6)
CASSAGQGYNSTLHF

SEQ ID NO: 149567 - protein, 14 aa, Homo sapiens
  CDR3 for alpha chain variable domain of TCR clone 74784 (TRAV13-2, TRAJ41)
CAEYLSNSGYALNF

SEQ ID NO: 149568 - protein, 16 aa, Homo sapiens
  CDR3 for beta chain variable domain of TCR clone 74784 (TRBV19, TRBJ2-1)
CASSKAGPSSYNEQFF

SEQ ID NO: 149569 - protein, 12 aa, Homo sapiens
  CDR3 for alpha chain variable domain of TCR clone 74785 (TRAV21, TRAJ39)
CAADNAGNMLTF

SEQ ID NO: 149570 - protein, 17 aa, Homo sapiens
  CDR3 for beta chain variable domain of TCR clone 74785 (TRBV10-3, TRBJ2-4)
CTSVPSVNKGSKNIQYF

SEQ ID NO: 149571 - protein, 14 aa, Homo sapiens
  CDR3 for alpha chain variable domain of TCR clone 74786 (TRAV25, TRAJ27)
CAGPGNTNAGKSTL

SEQ ID NO: 149572 - protein, 16 aa, Homo sapiens
  CDR3 for beta chain variable domain of TCR clone 74786 (TRBV4-1, TRBJ2-6)
CASSQDGGPGANVLTF

SEQ ID NO: 149573 - protein, 12 aa, Homo sapiens
  CDR3 for alpha chain variable domain of TCR clone 74787 (TRAV12-3, TRAJ20)
CAMVRGDYKLIF

SEQ ID NO: 149574 - protein, 15 aa, Homo sapiens
  CDR3 for beta chain variable domain of TCR clone 74787 (TRBV20-1, TRBJ2-7)
CSARDRVSGMDEQYF

SEQ ID NO: 149575 - protein, 13 aa, Homo sapiens
  CDR3 for alpha chain variable domain of TCR clone 74788 (TRAV27, TRAJ42)
CAGARGSPGNLIF

SEQ ID NO: 149576 - protein, 15 aa, Homo sapiens
  CDR3 for beta chain variable domain of TCR clone 74788 (TRBV10-3, TRBJ2-2)
CAIRTDREDTGELFF

SEQ ID NO: 149577 - protein, 14 aa, Homo sapiens
  CDR3 for alpha chain variable domain of TCR clone 74789 (TRAV35, TRAJ33)
CAGSSQDSNYQLIW

SEQ ID NO: 149578 - protein, 14 aa, Homo sapiens
  CDR3 for beta chain variable domain of TCR clone 74789 (TRBV13, TRBJ2-5)
CASSLGPRGETQYF

SEQ ID NO: 149579 - protein, 15 aa, Homo sapiens
  CDR3 for alpha chain variable domain of TCR clone 74790 (TRAV12-2, TRAJ53)
CAVNGGGGSNYKLTF

SEQ ID NO: 149580 - protein, 13 aa, Homo sapiens
  CDR3 for beta chain variable domain of TCR clone 74790 (TRBV12-5, TRBJ2-3)
CASGDRQSDTQYF

SEQ ID NO: 149581 - protein, 13 aa, Homo sapiens
  CDR3 for alpha chain variable domain of TCR clone 74791 (TRAV3, TRAJ36)
CAVIDTGANNLFF

SEQ ID NO: 149582 - protein, 15 aa, Homo sapiens
  CDR3 for beta chain variable domain of TCR clone 74791 (TRBV24-1, TRBJ2-1)
CATSGSGGFYNEQFF

SEQ ID NO: 149583 - protein, 23 aa, Homo sapiens
  CDR3 for alpha chain variable domain of TCR clone 74792 (TRAV26-1, TRAJ38)
CIADNAGNNHIQNPDPAVYQLRD

SEQ ID NO: 149584 - protein, 13 aa, Homo sapiens
  CDR3 for beta chain variable domain of TCR clone 74792 (TRBV10-3, TRBJ2-7)
CASKLAVNYGQYF

SEQ ID NO: 149585 - protein, 14 aa, Homo sapiens
  CDR3 for alpha chain variable domain of TCR clone 74793 (TRAV1-2, TRAJ17)
CAVRDMTAGNKLTF

SEQ ID NO: 149586 - protein, 19 aa, Homo sapiens
  CDR3 for beta chain variable domain of TCR clone 74793 (TRBV25-1, TRBJ2-2)
CAILVYRVDRGRKTGELFF

SEQ ID NO: 149587 - protein, 15 aa, Homo sapiens
  CDR3 for alpha chain variable domain of TCR clone 74794 (TRAV8-2, TRAJ15)
CVVTMGNQAGTALIF

SEQ ID NO: 149588 - protein, 15 aa, Homo sapiens
  CDR3 for beta chain variable domain of TCR clone 74794 (TRBV19, TRBJ1-2)
CASSVGQVLNYGYTF

SEQ ID NO: 149589 - protein, 15 aa, Homo sapiens
  CDR3 for alpha chain variable domain of TCR clone 74795 (TRAV20, TRAJ53)
CAVQASGGSNYKLKF

SEQ ID NO: 149590 - protein, 12 aa, Homo sapiens
  CDR3 for beta chain variable domain of TCR clone 74795 (TRBV7-6, TRBJ2-5)
CASSLSQETQYF

SEQ ID NO: 149591 - protein, 12 aa, Homo sapiens
  CDR3 for alpha chain variable domain of TCR clone 74796 (TRAV35, TRAJ30)
CAGLNRDDKIIF

SEQ ID NO: 149592 - protein, 15 aa, Homo sapiens
  CDR3 for beta chain variable domain of TCR clone 74796 (TRBV18, TRBJ2-3)
CASSPLAGETGTQYF

SEQ ID NO: 149593 - protein, 14 aa, Homo sapiens
  CDR3 for alpha chain variable domain of TCR clone 74797 (TRAV12-2, TRAJ40)
CAVKIPSGTYKYIF

SEQ ID NO: 149594 - protein, 20 aa, Homo sapiens
  CDR3 for beta chain variable domain of TCR clone 74797 (TRBV28, TRBJ2-1)
CASPPIGRSPGLAGGNEQFF

SEQ ID NO: 149595 - protein, 12 aa, Homo sapiens
  CDR3 for alpha chain variable domain of TCR clone 74798 (TRAV36/DV7, TRAJ54)
CAVVRGAQKLVF

SEQ ID NO: 149596 - protein, 14 aa, Homo sapiens
  CDR3 for beta chain variable domain of TCR clone 74798 (TRBV7-3, TRBJ1-1)
CTSSLKGGNTEAFF

SEQ ID NO: 149597 - protein, 12 aa, Homo sapiens
  CDR3 for alpha chain variable domain of TCR clone 74799 (TRAV13-2, TRAJ8)
CAPWLGFQKLLF

SEQ ID NO: 149598 - protein, 11 aa, Homo sapiens
  CDR3 for beta chain variable domain of TCR clone 74799 (TRBV29-1, TRBJ2-5)
CSEDRTGTQYF

SEQ ID NO: 149599 - protein, 11 aa, Homo sapiens
  CDR3 for alpha chain variable domain of TCR clone 74800 (TRAV16, TRAJ33)
CALHSNYQLIG

SEQ ID NO: 149600 - protein, 15 aa, Homo sapiens
  CDR3 for beta chain variable domain of TCR clone 74800 (TRBV4-1, TRBJ2-7)
CASSQQGQGFDEQYF

SEQ ID NO: 149601 - protein, 14 aa, Homo sapiens
  CDR3 for alpha chain variable domain of TCR clone 74801 (TRAV12-1, TRAJ15)
CVVNRNQAGTALIF

SEQ ID NO: 149602 - protein, 14 aa, Homo sapiens
  CDR3 for beta chain variable domain of TCR clone 74801 (TRBV19, TRBJ1-1)
CATTSGTRGTEAFS

SEQ ID NO: 149603 - protein, 12 aa, Homo sapiens
  CDR3 for alpha chain variable domain of TCR clone 74802 (TRAV13-2, TRAJ23)
CAERHRGGKLIF

SEQ ID NO: 149604 - protein, 14 aa, Homo sapiens
  CDR3 for beta chain variable domain of TCR clone 74802 (TRBV2, TRBJ2-7)
CASSLASGGYEQYF

SEQ ID NO: 149605 - protein, 13 aa, Homo sapiens
  CDR3 for alpha chain variable domain of TCR clone 74803 (TRAV35, TRAJ37)
CAGSSGNTGKLIF

SEQ ID NO: 149606 - protein, 16 aa, Homo sapiens
  CDR3 for beta chain variable domain of TCR clone 74803 (TRBV10-3, TRBJ2-1)
CAISLTSGNSYNEQLF

SEQ ID NO: 149607 - protein, 12 aa, Homo sapiens
  CDR3 for alpha chain variable domain of TCR clone 74804 (TRAV12-2, TRAJ8)
CAANTGFQKLVF

SEQ ID NO: 149608 - protein, 15 aa, Homo sapiens
  CDR3 for beta chain variable domain of TCR clone 74804 (TRBV7-8, TRBJ1-5)
CASSLERRGLEPQHF

SEQ ID NO: 149609 - protein, 23 aa, Homo sapiens
  CDR3 for alpha chain variable domain of TCR clone 74805 (TRAV8-4, TRAJ38)
CARLNAGNNHIQNPDPAVYQLTD

SEQ ID NO: 149610 - protein, 14 aa, Homo sapiens
  CDR3 for beta chain variable domain of TCR clone 74805 (TRBV7-8, TRBJ2-3)
CASSLEAGTDTQYF

SEQ ID NO: 149611 - protein, 11 aa, Homo sapiens
  CDR3 for alpha chain variable domain of TCR clone 74806 (TRAV4, TRAJ23)
CLVAPGGKLIF

SEQ ID NO: 149612 - protein, 14 aa, Homo sapiens
  CDR3 for beta chain variable domain of TCR clone 74806 (TRBV7-9, TRBJ2-7)
CASSIGQGAGEQYF

SEQ ID NO: 149613 - protein, 15 aa, Homo sapiens
  CDR3 for alpha chain variable domain of TCR clone 74807 (TRAV8-2, TRAJ28)
CVVSESGAGSYQLTF

SEQ ID NO: 149614 - protein, 15 aa, Homo sapiens
  CDR3 for beta chain variable domain of TCR clone 74807 (TRBV7-3, TRBJ2-1)
CASSQRGGALIEQFF

SEQ ID NO: 149615 - protein, 15 aa, Homo sapiens
  CDR3 for alpha chain variable domain of TCR clone 74808 (TRAV35, TRAJ40)
CAGQLGTSGTYIYIF

SEQ ID NO: 149616 - protein, 14 aa, Homo sapiens
  CDR3 for beta chain variable domain of TCR clone 74808 (TRBV7-3, TRBJ2-1)
CASSLAGGTNEQFF

SEQ ID NO: 149617 - protein, 10 aa, Homo sapiens
  CDR3 for alpha chain variable domain of TCR clone 74809 (TRAV8-3, TRAJ43)
CAVALADMRF

SEQ ID NO: 149618 - protein, 17 aa, Homo sapiens
  CDR3 for beta chain variable domain of TCR clone 74809 (TRBV10-1, TRBJ2-1)
CASSPQRAGGPFNERFF

SEQ ID NO: 149619 - protein, 13 aa, Homo sapiens
  CDR3 for alpha chain variable domain of TCR clone 74810 (TRAV1-2, TRAJ27)
CAVFNTNAGKSTF

SEQ ID NO: 149620 - protein, 17 aa, Homo sapiens
  CDR3 for beta chain variable domain of TCR clone 74810 (TRBV11-2, TRBJ2-4)
CASSLREGEGGKNIQYF

SEQ ID NO: 149621 - protein, 12 aa, Homo sapiens
  CDR3 for alpha chain variable domain of TCR clone 74811 (TRAV27, TRAJ35)
CAGADFGNVLHC

SEQ ID NO: 149622 - protein, 14 aa, Homo sapiens
  CDR3 for beta chain variable domain of TCR clone 74811 (TRBV18, TRBJ2-5)
CASSPGVSQETQYF

SEQ ID NO: 149623 - protein, 11 aa, Homo sapiens
  CDR3 for alpha chain variable domain of TCR clone 74812 (TRAV14/DV4, TRAJ3)
RLGSSASKIIF

SEQ ID NO: 149624 - protein, 13 aa, Homo sapiens
  CDR3 for beta chain variable domain of TCR clone 74812 (TRBV20-1, TRBJ1-1)
CSARAGGNTEAFF

SEQ ID NO: 149625 - protein, 13 aa, Homo sapiens
  CDR3 for alpha chain variable domain of TCR clone 74813 (TRAV2, TRAJ40)
CAVVTSGTYKYIF

SEQ ID NO: 149626 - protein, 12 aa, Homo sapiens
  CDR3 for beta chain variable domain of TCR clone 74813 (TRBV4-1, TRBJ2-3)
CASSQGTDTQYF

SEQ ID NO: 149627 - protein, 14 aa, Homo sapiens
  CDR3 for alpha chain variable domain of TCR clone 74814 (TRAV21, TRAJ45)
CAVSSGGGADGLTF

SEQ ID NO: 149628 - protein, 12 aa, Homo sapiens
  CDR3 for beta chain variable domain of TCR clone 74814 (TRBV11-2, TRBJ2-1)
CASSPGNNEQFF

SEQ ID NO: 149629 - protein, 13 aa, Homo sapiens
  CDR3 for alpha chain variable domain of TCR clone 74815 (TRAV23/DV6, TRAJ22)
CAPYSGSARQLTF

SEQ ID NO: 149630 - protein, 15 aa, Homo sapiens
  CDR3 for beta chain variable domain of TCR clone 74815 (TRBV11-2, TRBJ1-6)
CASSLDPWAASPLHF

SEQ ID NO: 149631 - protein, 15 aa, Homo sapiens
  CDR3 for alpha chain variable domain of TCR clone 74816 (TRAV8-2, TRAJ16)
CVVSDGFSDGQKLLF

SEQ ID NO: 149632 - protein, 14 aa, Homo sapiens
  CDR3 for beta chain variable domain of TCR clone 74816 (TRBV7-3, TRBJ1-1)
CASSLGTGYTEAVF

SEQ ID NO: 149633 - protein, 14 aa, Homo sapiens
  CDR3 for alpha chain variable domain of TCR clone 74817 (TRAV12-2, TRAJ13)
CAVKKTGGYQKVTF

SEQ ID NO: 149634 - protein, 20 aa, Homo sapiens
  CDR3 for beta chain variable domain of TCR clone 74817 (TRBV7-8, TRBJ2-2)
CASSHLFPGPTIHIAGELFS

SEQ ID NO: 149635 - protein, 14 aa, Homo sapiens
  CDR3 for alpha chain variable domain of TCR clone 74818 (TRAV13-1, TRAJ44)
CAAKATGTASKLTF

SEQ ID NO: 149636 - protein, 14 aa, Homo sapiens
  CDR3 for beta chain variable domain of TCR clone 74818 (TRBV5-7, TRBJ1-1)
CASSLAGDWTEAFF

SEQ ID NO: 149637 - protein, 14 aa, Homo sapiens
  CDR3 for alpha chain variable domain of TCR clone 74819 (TRAV12-2, TRAJ44)
CAVNKAGTASKLTF

SEQ ID NO: 149638 - protein, 12 aa, Homo sapiens
  CDR3 for beta chain variable domain of TCR clone 74819 (TRBV19, TRBJ1-4)
CTSKDWPGGLFF

SEQ ID NO: 149639 - protein, 12 aa, Homo sapiens
  CDR3 for alpha chain variable domain of TCR clone 74820 (TRAV3, TRAJ31)
CAVRDGNARLMF

SEQ ID NO: 149640 - protein, 14 aa, Homo sapiens
  CDR3 for beta chain variable domain of TCR clone 74820 (TRBV7-6, TRBJ2-3)
CASSLGTVTDTQYF

SEQ ID NO: 149641 - protein, 12 aa, Homo sapiens
  CDR3 for alpha chain variable domain of TCR clone 74821 (TRAV16, TRAJ27)
CALNTNAGKSTF

SEQ ID NO: 149642 - protein, 15 aa, Homo sapiens
  CDR3 for beta chain variable domain of TCR clone 74821 (TRBV6-3, TRBJ2-7)
CASSSPGTVFYEQYF

SEQ ID NO: 149643 - protein, 13 aa, Homo sapiens
  CDR3 for alpha chain variable domain of TCR clone 74822 (TRAV12-1, TRAJ40)
CVVNSSGTYKYIF

SEQ ID NO: 149644 - protein, 14 aa, Homo sapiens
  CDR3 for beta chain variable domain of TCR clone 74822 (TRBV2, TRBJ1-6)
CASEVSSYSSPLHF

SEQ ID NO: 149645 - protein, 12 aa, Homo sapiens
  CDR3 for alpha chain variable domain of TCR clone 74823 (TRAV13-1, TRAJ21)
CAAKEGFNKFYF

SEQ ID NO: 149646 - protein, 13 aa, Homo sapiens
  CDR3 for beta chain variable domain of TCR clone 74823 (TRBV19, TRBJ2-7)
CASNPRQSYEQYF

SEQ ID NO: 149647 - protein, 16 aa, Homo sapiens
  CDR3 for alpha chain variable domain of TCR clone 74824 (TRAV12-3, TRAJ53)
CAMSPGSGGSNYKLTF

SEQ ID NO: 149648 - protein, 14 aa, Homo sapiens
  CDR3 for beta chain variable domain of TCR clone 74824 (TRBV28, TRBJ1-2)
CASRIQGANYGYTF

SEQ ID NO: 149649 - protein, 13 aa, Homo sapiens
  CDR3 for alpha chain variable domain of TCR clone 74825 (TRAV13-1, TRAJ21)
CAASIYNFNKFYF

SEQ ID NO: 149650 - protein, 12 aa, Homo sapiens
  CDR3 for beta chain variable domain of TCR clone 74825 (TRBV11-2, TRBJ2-2)
CASSLPTGELFF

SEQ ID NO: 149651 - protein, 12 aa, Homo sapiens
  CDR3 for alpha chain variable domain of TCR clone 74826 (TRAV29/DV5, TRAJ49)
CAATDTGNQFYF

SEQ ID NO: 149652 - protein, 14 aa, Homo sapiens
  CDR3 for beta chain variable domain of TCR clone 74826 (TRBV19, TRBJ1-2)
CASSIGAGSYGYTF

SEQ ID NO: 149653 - protein, 19 aa, Homo sapiens
  CDR3 for alpha chain variable domain of TCR clone 74827 (TRAV2, TRAJ8)
CAVEHRLSETCTWNWHPTS

SEQ ID NO: 149654 - protein, 15 aa, Homo sapiens
  CDR3 for beta chain variable domain of TCR clone 74827 (TRBV15, TRBJ2-7)
CATSSRQESSYEQYF

SEQ ID NO: 149655 - protein, 13 aa, Homo sapiens
  CDR3 for alpha chain variable domain of TCR clone 74828 (TRAV27, TRAJ41)
CGGEGNSGYALNF

SEQ ID NO: 149656 - protein, 14 aa, Homo sapiens
  CDR3 for beta chain variable domain of TCR clone 74828 (TRBV7-2, TRBJ1-1)
CASSFLTGTTEAFF

SEQ ID NO: 149657 - protein, 13 aa, Homo sapiens
  CDR3 for alpha chain variable domain of TCR clone 74829 (TRAV13-1, TRAJ6)
CAASSGGSYIPTS

SEQ ID NO: 149658 - protein, 15 aa, Homo sapiens
  CDR3 for beta chain variable domain of TCR clone 74829 (TRBV12-4, TRBJ2-5)
CASSPPTGLQETQYL

SEQ ID NO: 149659 - protein, 14 aa, Homo sapiens
  CDR3 for alpha chain variable domain of TCR clone 74830 (TRAV38-1, TRAJ45)
CAYYSGGGADGLTF

SEQ ID NO: 149660 - protein, 20 aa, Homo sapiens
  CDR3 for beta chain variable domain of TCR clone 74830 (TRBV28, TRBJ2-1)
CASTPIGRSPGLAGGNEQCF

SEQ ID NO: 149661 - protein, 14 aa, Homo sapiens
  CDR3 for alpha chain variable domain of TCR clone 74831 (TRAV2, TRAJ9)
CAVEDRSGGFKTIV

SEQ ID NO: 149662 - protein, 19 aa, Homo sapiens
  CDR3 for beta chain variable domain of TCR clone 74831 (TRBV25-1, TRBJ2-2)
CAILVYRVDRGRKTGELFF

SEQ ID NO: 149663 - protein, 16 aa, Homo sapiens
  CDR3 for alpha chain variable domain of TCR clone 74832 (TRAV30, TRAJ24)
CGTEIVDADSWGKFKF

SEQ ID NO: 149664 - protein, 17 aa, Homo sapiens
  CDR3 for beta chain variable domain of TCR clone 74832 (TRBV20-1, TRBJ2-1)
CSAPPRLAGTRYNEQFF

SEQ ID NO: 149665 - protein, 15 aa, Homo sapiens
  CDR3 for alpha chain variable domain of TCR clone 74833 (TRAV41, TRAJ45)
CSASYSGGGADGLTF

SEQ ID NO: 149666 - protein, 14 aa, Homo sapiens
  CDR3 for beta chain variable domain of TCR clone 74833 (TRBV12-5, TRBJ2-5)
CASGSRTHQETQYF

SEQ ID NO: 149667 - protein, 13 aa, Homo sapiens
  CDR3 for alpha chain variable domain of TCR clone 74834 (TRAV2, TRAJ40)
CSVVTSGTYKYIF

SEQ ID NO: 149668 - protein, 15 aa, Homo sapiens
  CDR3 for beta chain variable domain of TCR clone 74834 (TRBV9, TRBJ1-6)
CASSVAGTGDSPLHF

SEQ ID NO: 149669 - protein, 23 aa, Homo sapiens
  CDR3 for alpha chain variable domain of TCR clone 74835 (TRAV12-2, TRAJ36)
SLLIRDSQPSDSATLERANNLFF

SEQ ID NO: 149670 - protein, 17 aa, Homo sapiens
  CDR3 for beta chain variable domain of TCR clone 74835 (TRBV3-1, TRBJ2-3)
CASSHLLDRGHTDTQYF

SEQ ID NO: 149671 - protein, 15 aa, Homo sapiens
  CDR3 for alpha chain variable domain of TCR clone 74836 (TRAV3, TRAJ32)
CAVSSYGGAANKLIF

SEQ ID NO: 149672 - protein, 13 aa, Homo sapiens
  CDR3 for beta chain variable domain of TCR clone 74836 (TRBV20-1, TRBJ2-7)
CSARPSTNYEQYF

SEQ ID NO: 149673 - protein, 15 aa, Homo sapiens
  CDR3 for alpha chain variable domain of TCR clone 74837 (TRAV26-1, TRAJ44)
CIVRANTCTASKLTF

SEQ ID NO: 149674 - protein, 16 aa, Homo sapiens
  CDR3 for beta chain variable domain of TCR clone 74837 (TRBV7-7, TRBJ2-1)
CASSLASGTSYNEQFF

SEQ ID NO: 149675 - protein, 17 aa, Homo sapiens
  CDR3 for alpha chain variable domain of TCR clone 74838 (TRAV38-2/DV8, TRAJ28)
CAFLTLYSGAGSYQLTF

SEQ ID NO: 149676 - protein, 13 aa, Homo sapiens
  CDR3 for beta chain variable domain of TCR clone 74838 (TRBV12-4, TRBJ1-1)
CASSWTGGTEAFF

SEQ ID NO: 149677 - protein, 14 aa, Homo sapiens
  CDR3 for alpha chain variable domain of TCR clone 74839 (TRAV13-1, TRAJ13)
CAASRVGGYQKVTF

SEQ ID NO: 149678 - protein, 17 aa, Homo sapiens
  CDR3 for beta chain variable domain of TCR clone 74839 (TRBV15, TRBJ1-5)
CATSGAPPGTRNQPQHF

SEQ ID NO: 149679 - protein, 13 aa, Homo sapiens
  CDR3 for alpha chain variable domain of TCR clone 74840 (TRAV12-2, TRAJ20)
CAVYPSNDYKLSF

SEQ ID NO: 149680 - protein, 15 aa, Homo sapiens
  CDR3 for beta chain variable domain of TCR clone 74840 (TRBV18, TRBJ1-2)
CASSPENGLGYGYTF

SEQ ID NO: 149681 - protein, 14 aa, Homo sapiens
  CDR3 for alpha chain variable domain of TCR clone 74841 (TRAV2, TRAJ37)
CAVDFTSNTGKLIF

SEQ ID NO: 149682 - protein, 14 aa, Homo sapiens
  CDR3 for beta chain variable domain of TCR clone 74841 (TRBV2, TRBJ2-7)
CASSLTSGGYEQYF

SEQ ID NO: 149683 - protein, 14 aa, Homo sapiens
  CDR3 for alpha chain variable domain of TCR clone 74842 (TRAV16, TRAJ42)
CALLAGGRQGNLIF

SEQ ID NO: 149684 - protein, 13 aa, Homo sapiens
  CDR3 for beta chain variable domain of TCR clone 74842 (TRBV7-9, TRBJ1-2)
CASSLKQNYGYTF

SEQ ID NO: 149685 - protein, 12 aa, Homo sapiens
  CDR3 for alpha chain variable domain of TCR clone 74843 (TRAV12-2, TRAJ43)
CAVNVNSNDMRF

SEQ ID NO: 149686 - protein, 17 aa, Homo sapiens
  CDR3 for beta chain variable domain of TCR clone 74843 (TRBV3-1, TRBJ2-2)
CASSQFRDKVDTGELFF

SEQ ID NO: 149687 - protein, 13 aa, Homo sapiens
  CDR3 for alpha chain variable domain of TCR clone 74844 (TRAV20, TRAJ31)
CAVQAWNNARLMF

SEQ ID NO: 149688 - protein, 13 aa, Homo sapiens
  CDR3 for beta chain variable domain of TCR clone 74844 (TRBV12-4, TRBJ1-2)
CASSVRQGKGYTF

SEQ ID NO: 149689 - protein, 12 aa, Homo sapiens
  CDR3 for alpha chain variable domain of TCR clone 74845 (TRAV12-1, TRAJ31)
CVSWNNNARVMF

SEQ ID NO: 149690 - protein, 15 aa, Homo sapiens
  CDR3 for beta chain variable domain of TCR clone 74845 (TRBV7-2, TRBJ1-5)
CASSLDRGQDQPQHF

SEQ ID NO: 149691 - protein, 11 aa, Homo sapiens
  CDR3 for alpha chain variable domain of TCR clone 74846 (TRAV25, TRAJ5)
CRGGGRRALTF

SEQ ID NO: 149692 - protein, 12 aa, Homo sapiens
  CDR3 for beta chain variable domain of TCR clone 74846 (TRBV29-1, TRBJ2-3)
CSVTGGADTQYF

SEQ ID NO: 149693 - protein, 18 aa, Homo sapiens
  CDR3 for alpha chain variable domain of TCR clone 74847 (TRAV26-2, TRAJ45)
CILRVDKYSGGGADGLTF

SEQ ID NO: 149694 - protein, 16 aa, Homo sapiens
  CDR3 for beta chain variable domain of TCR clone 74847 (TRBV2, TRBJ1-4)
CASNLLQGATNDKLFF

SEQ ID NO: 149695 - protein, 16 aa, Homo sapiens
  CDR3 for alpha chain variable domain of TCR clone 74848 (TRAV26-2, TRAJ48)
CILRPPFNFGNEKLTL

SEQ ID NO: 149696 - protein, 15 aa, Homo sapiens
  CDR3 for beta chain variable domain of TCR clone 74848 (TRBV20-1, TRBJ2-3)
CSARVEGTYTDTQYF

SEQ ID NO: 149697 - protein, 15 aa, Homo sapiens
  CDR3 for alpha chain variable domain of TCR clone 74849 (TRAV20, TRAJ4)
CAVQVFSGGYNKLIF

SEQ ID NO: 149698 - protein, 13 aa, Homo sapiens
  CDR3 for beta chain variable domain of TCR clone 74849 (TRBV7-9, TRBJ1-2)
CASSLKQNYGYTF

SEQ ID NO: 149699 - protein, 13 aa, Homo sapiens
  CDR3 for alpha chain variable domain of TCR clone 74850 (TRAV8-3, TRAJ28)
CAVGAVGSYQLTF

SEQ ID NO: 149700 - protein, 16 aa, Homo sapiens
  CDR3 for beta chain variable domain of TCR clone 74850 (TRBV7-9, TRBJ2-1)
CASSDVAGGSYNEQFF

SEQ ID NO: 149701 - protein, 13 aa, Homo sapiens
  CDR3 for alpha chain variable domain of TCR clone 74851 (TRAV27, TRAJ8)
CAGGPTGFQKLVF

SEQ ID NO: 149702 - protein, 16 aa, Homo sapiens
  CDR3 for beta chain variable domain of TCR clone 74851 (TRBV7-7, TRBJ2-1)
CASSPRTGSSYNEQFF

SEQ ID NO: 149703 - protein, 14 aa, Homo sapiens
  CDR3 for alpha chain variable domain of TCR clone 74852 (TRAV13-2, TRAJ23)
CAENTYNQGGKLIF

SEQ ID NO: 149704 - protein, 14 aa, Homo sapiens
  CDR3 for beta chain variable domain of TCR clone 74852 (TRBV19, TRBJ2-1)
CASPTFVLSGEQFF

SEQ ID NO: 149705 - protein, 17 aa, Homo sapiens
  CDR3 for alpha chain variable domain of TCR clone 74853 (TRAV29/DV5, TRAJ40)
CAASVIYTTSGTYKYIF

SEQ ID NO: 149706 - protein, 13 aa, Homo sapiens
  CDR3 for beta chain variable domain of TCR clone 74853 (TRBV6-1, TRBJ2-1)
CASSRDRNNEQFF

SEQ ID NO: 149707 - protein, 12 aa, Homo sapiens
  CDR3 for alpha chain variable domain of TCR clone 74854 (TRAV12-1, TRAJ34)
CVAAGATDKLIF

SEQ ID NO: 149708 - protein, 12 aa, Homo sapiens
  CDR3 for beta chain variable domain of TCR clone 74854 (TRBV7-9, TRBJ1-1)
CASSLVRGEAFF

SEQ ID NO: 149709 - protein, 15 aa, Homo sapiens
  CDR3 for alpha chain variable domain of TCR clone 74855 (TRAV29/DV5, TRAJ31)
CSVLLCSKRNPRLIF

SEQ ID NO: 149710 - protein, 14 aa, Homo sapiens
  CDR3 for beta chain variable domain of TCR clone 74855 (TRBV7-8, TRBJ2-7)
CASSVGQGAYEQYF

SEQ ID NO: 149711 - protein, 13 aa, Homo sapiens
  CDR3 for alpha chain variable domain of TCR clone 74856 (TRAV3, TRAJ27)
CAVRPHGAGKSTF

SEQ ID NO: 149712 - protein, 13 aa, Homo sapiens
  CDR3 for beta chain variable domain of TCR clone 74856 (TRBV7-9, TRBJ2-3)
CASSPGSTDTQYF

SEQ ID NO: 149713 - protein, 10 aa, Homo sapiens
  CDR3 for alpha chain variable domain of TCR clone 74857 (TRAV8-4, TRAJ43)
CAVSADDMRF

SEQ ID NO: 149714 - protein, 15 aa, Homo sapiens
  CDR3 for beta chain variable domain of TCR clone 74857 (TRBV6-3, TRBJ2-7)
CASSSPGTVFYEQYF

SEQ ID NO: 149715 - protein, 10 aa, Homo sapiens
  CDR3 for alpha chain variable domain of TCR clone 74858 (TRAV1-2, TRAJ31)
CVSEDARLMF

SEQ ID NO: 149716 - protein, 14 aa, Homo sapiens
  CDR3 for beta chain variable domain of TCR clone 74858 (TRBV11-2, TRBJ2-7)
CASSLGAGAYEQYF

SEQ ID NO: 149717 - protein, 13 aa, Homo sapiens
  CDR3 for alpha chain variable domain of TCR clone 74859 (TRAV2, TRAJ20)
CAVEDPSEYKLSF

SEQ ID NO: 149718 - protein, 16 aa, Homo sapiens
  CDR3 for beta chain variable domain of TCR clone 74859 (TRBV25-1, TRBJ2-7)
CASSELAGGGIYEQYF

SEQ ID NO: 149719 - protein, 12 aa, Homo sapiens
  CDR3 for alpha chain variable domain of TCR clone 74860 (TRAV12-1, TRAJ34)
CLVAGATDKLIF

SEQ ID NO: 149720 - protein, 12 aa, Homo sapiens
  CDR3 for beta chain variable domain of TCR clone 74860 (TRBV7-9, TRBJ1-1)
CASSLVRGEAFF

SEQ ID NO: 149721 - protein, 12 aa, Homo sapiens
  CDR3 for alpha chain variable domain of TCR clone 74861 (TRAV12-1, TRAJ29)
CVADSGNTPLVF

SEQ ID NO: 149722 - protein, 12 aa, Homo sapiens
  CDR3 for beta chain variable domain of TCR clone 74861 (TRBV2, TRBJ2-7)
CASKRGSYEQYL

SEQ ID NO: 149723 - protein, 13 aa, Homo sapiens
  CDR3 for alpha chain variable domain of TCR clone 74862 (TRAV8-3, TRAJ28)
CAVGAVGSYQLTF

SEQ ID NO: 149724 - protein, 17 aa, Homo sapiens
  CDR3 for beta chain variable domain of TCR clone 74862 (TRBV19, TRBJ2-7)
CASSISFYDSYPYEQYF

SEQ ID NO: 149725 - protein, 14 aa, Homo sapiens
  CDR3 for alpha chain variable domain of TCR clone 74863 (TRAV12-2, TRAJ13)
CAVKKTGGYQKVTF

SEQ ID NO: 149726 - protein, 14 aa, Homo sapiens
  CDR3 for beta chain variable domain of TCR clone 74863 (TRBV7-7, TRBJ2-2)
CASSRDRSTGELFF

SEQ ID NO: 149727 - protein, 11 aa, Homo sapiens
  CDR3 for alpha chain variable domain of TCR clone 74864 (TRAV35, TRAJ30)
CAGPGDDKVIF

SEQ ID NO: 149728 - protein, 14 aa, Homo sapiens
  CDR3 for beta chain variable domain of TCR clone 74864 (TRBV7-6, TRBJ1-6)
CASSQAGGGSPLHF

SEQ ID NO: 149729 - protein, 15 aa, Homo sapiens
  CDR3 for alpha chain variable domain of TCR clone 74865 (TRAV34, TRAJ38)
CGADFTPGNNRKLIW

SEQ ID NO: 149730 - protein, 16 aa, Homo sapiens
  CDR3 for beta chain variable domain of TCR clone 74865 (TRBV12-5, TRBJ2-5)
CASCPRTSGNQETQYF

SEQ ID NO: 149731 - protein, 16 aa, Homo sapiens
  CDR3 for alpha chain variable domain of TCR clone 74866 (TRAV3, TRAJ21)
CAVRDIERGNCNKFYF

SEQ ID NO: 149732 - protein, 16 aa, Homo sapiens
  CDR3 for beta chain variable domain of TCR clone 74866 (TRBV12-4, TRBJ1-5)
CASSRPVGGSNQPQHF

SEQ ID NO: 149733 - protein, 11 aa, Homo sapiens
  CDR3 for alpha chain variable domain of TCR clone 74867 (TRAV23/DV6, TRAJ43)
CAASSGNGMRF

SEQ ID NO: 149734 - protein, 14 aa, Homo sapiens
  CDR3 for beta chain variable domain of TCR clone 74867 (TRBV4-1, TRBJ1-2)
CASSQDPLPYGYTF

SEQ ID NO: 149735 - protein, 18 aa, Homo sapiens
  CDR3 for alpha chain variable domain of TCR clone 74868 (TRAV26-2, TRAJ45)
CILRVDKYSGGGADGRTF

SEQ ID NO: 149736 - protein, 16 aa, Homo sapiens
  CDR3 for beta chain variable domain of TCR clone 74868 (TRBV2, TRBJ1-4)
CASNLLQGATNEKLFF

SEQ ID NO: 149737 - protein, 10 aa, Homo sapiens
  CDR3 for alpha chain variable domain of TCR clone 74869 (TRAV16, TRAJ26)
CAPEELWSEF

SEQ ID NO: 149738 - protein, 13 aa, Homo sapiens
  CDR3 for beta chain variable domain of TCR clone 74869 (TRBV10-3, TRBJ2-7)
CASKLAVNYEQYF

SEQ ID NO: 149739 - protein, 12 aa, Homo sapiens
  CDR3 for alpha chain variable domain of TCR clone 74870 (TRAV22, TRAJ22)
CAPGGSARQLTF

SEQ ID NO: 149740 - protein, 12 aa, Homo sapiens
  CDR3 for beta chain variable domain of TCR clone 74870 (TRBV12-4, TRBJ2-7)
CASSLGGYEQYF

SEQ ID NO: 149741 - protein, 14 aa, Homo sapiens
  CDR3 for alpha chain variable domain of TCR clone 74871 (TRAV26-1, TRAJ38)
CIADNAVNNRKLIW

SEQ ID NO: 149742 - protein, 17 aa, Homo sapiens
  CDR3 for beta chain variable domain of TCR clone 74871 (TRBV7-9, TRBJ2-3)
CASSPTVAGDLTDTQYF

SEQ ID NO: 149743 - protein, 16 aa, Homo sapiens
  CDR3 for alpha chain variable domain of TCR clone 74872 (TRAV16, TRAJ57)
CAPYLITQGGTEKLVF

SEQ ID NO: 149744 - protein, 17 aa, Homo sapiens
  CDR3 for beta chain variable domain of TCR clone 74872 (TRBV24-1, TRBJ2-4)
CATSDAEARGVRNIQYF

SEQ ID NO: 149745 - protein, 13 aa, Homo sapiens
  CDR3 for alpha chain variable domain of TCR clone 74873 (TRAV29/DV5, TRAJ44)
CAASTGTASKLTF

SEQ ID NO: 149746 - protein, 13 aa, Homo sapiens
  CDR3 for beta chain variable domain of TCR clone 74873 (TRBV9, TRBJ2-7)
CASSASDSYEQYF

SEQ ID NO: 149747 - protein, 11 aa, Homo sapiens
  CDR3 for alpha chain variable domain of TCR clone 74874 (TRAV12-3, TRAJ27)
CAMANAGKSTF

SEQ ID NO: 149748 - protein, 12 aa, Homo sapiens
  CDR3 for beta chain variable domain of TCR clone 74874 (TRBV7-9, TRBJ1-1)
CASSLVRGEAFF

SEQ ID NO: 149749 - protein, 17 aa, Homo sapiens
  CDR3 for alpha chain variable domain of TCR clone 74875 (TRAV12-3, TRAJ6)
CAMSARGGAGGSYIPTS

SEQ ID NO: 149750 - protein, 12 aa, Homo sapiens
  CDR3 for beta chain variable domain of TCR clone 74875 (TRBV12-4, TRBJ2-3)
CASSTLPDTQYF

SEQ ID NO: 149751 - protein, 14 aa, Homo sapiens
  CDR3 for alpha chain variable domain of TCR clone 74876 (TRAV26-1, TRAJ45)
CIEVTGGGADGLTF

SEQ ID NO: 149752 - protein, 15 aa, Homo sapiens
  CDR3 for beta chain variable domain of TCR clone 74876 (TRBV5-1, TRBJ1-1)
CASSSTTGTNTEAFL

SEQ ID NO: 149753 - protein, 16 aa, Homo sapiens
  CDR3 for alpha chain variable domain of TCR clone 74877 (TRAV3, TRAJ21)
CAVRDIERGNFNKFYF

SEQ ID NO: 149754 - protein, 13 aa, Homo sapiens
  CDR3 for beta chain variable domain of TCR clone 74877 (TRBV7-9, TRBJ2-3)
CASSPGSTDTQYF

SEQ ID NO: 149755 - protein, 18 aa, Homo sapiens
  CDR3 for alpha chain variable domain of TCR clone 74878 (TRAV8-6, TRAJ52)
CAVSRVGAGGTSYGKLTF

SEQ ID NO: 149756 - protein, 14 aa, Homo sapiens
  CDR3 for beta chain variable domain of TCR clone 74878 (TRBV7-3, TRBJ2-1)
CASSLAGGTNEQFF

SEQ ID NO: 149757 - protein, 13 aa, Homo sapiens
  CDR3 for alpha chain variable domain of TCR clone 74879 (TRAV12-1, TRAJ31)
CVVNMNNNARLMF

SEQ ID NO: 149758 - protein, 15 aa, Homo sapiens
  CDR3 for beta chain variable domain of TCR clone 74879 (TRBV4-1, TRBJ1-2)
CASSQGQGAAYGDTF

SEQ ID NO: 149759 - protein, 15 aa, Homo sapiens
  CDR3 for alpha chain variable domain of TCR clone 74880 (TRAV2, TRAJ44)
CDVEAYTGTASKLTF

SEQ ID NO: 149760 - protein, 14 aa, Homo sapiens
  CDR3 for beta chain variable domain of TCR clone 74880 (TRBV11-2, TRBJ2-1)
CASSPGSRDNEQFF

SEQ ID NO: 149761 - protein, 13 aa, Homo sapiens
  CDR3 for alpha chain variable domain of TCR clone 74881 (TRAV3, TRAJ36)
CAVRDTGANNLFF

SEQ ID NO: 149762 - protein, 15 aa, Homo sapiens
  CDR3 for beta chain variable domain of TCR clone 74881 (TRBV24-1, TRBJ2-1)
CAASGSGGFYNEQFF

SEQ ID NO: 149763 - protein, 12 aa, Homo sapiens
  CDR3 for alpha chain variable domain of TCR clone 74882 (TRAV12-3, TRAJ31)
CAMSVPNARLMF

SEQ ID NO: 149764 - protein, 13 aa, Homo sapiens
  CDR3 for beta chain variable domain of TCR clone 74882 (TRBV4-2, TRBJ1-1)
CASSQAGNTEAFF

SEQ ID NO: 149765 - protein, 16 aa, Homo sapiens
  CDR3 for alpha chain variable domain of TCR clone 74883 (TRAV16, TRAJ4)
CALSRMFSGGYNKLIF

SEQ ID NO: 149766 - protein, 17 aa, Homo sapiens
  CDR3 for beta chain variable domain of TCR clone 74883 (TRBV28, TRBJ2-5)
CASSRQGGLAGAETQYF

SEQ ID NO: 149767 - protein, 16 aa, Homo sapiens
  CDR3 for alpha chain variable domain of TCR clone 74884 (TRAV30, TRAJ24)
CGTEIVDADSWGKFQF

SEQ ID NO: 149768 - protein, 17 aa, Homo sapiens
  CDR3 for beta chain variable domain of TCR clone 74884 (TRBV20-1, TRBJ2-1)
CSAPPRLVGTRYNEQFF

SEQ ID NO: 149769 - protein, 14 aa, Homo sapiens
  CDR3 for alpha chain variable domain of TCR clone 74885 (TRAV12-3, TRAJ10)
SHLPLTGGGNKLTF

SEQ ID NO: 149770 - protein, 14 aa, Homo sapiens
  CDR3 for beta chain variable domain of TCR clone 74885 (TRBV6-3, TRBJ2-2)
CASTYTPDTGELFF

SEQ ID NO: 149771 - protein, 14 aa, Homo sapiens
  CDR3 for alpha chain variable domain of TCR clone 74886 (TRAV12-2, TRAJ40)
CAVKIPSGTYKYTF

SEQ ID NO: 149772 - protein, 15 aa, Homo sapiens
  CDR3 for beta chain variable domain of TCR clone 74886 (TRBV20-1, TRBJ1-4)
CSARREWGVNEKLFF

SEQ ID NO: 149773 - protein, 14 aa, Homo sapiens
  CDR3 for alpha chain variable domain of TCR clone 74887 (TRAV17, TRAJ31)
CATVPLSGNSRLMF

SEQ ID NO: 149774 - protein, 15 aa, Homo sapiens
  CDR3 for beta chain variable domain of TCR clone 74887 (TRBV15, TRBJ2-2)
CATSGTGGRVGELFF

SEQ ID NO: 149775 - protein, 12 aa, Homo sapiens
  CDR3 for alpha chain variable domain of TCR clone 74888 (TRAV36/DV7, TRAJ50)
CAVEPENLLRQG

SEQ ID NO: 149776 - protein, 14 aa, Homo sapiens
  CDR3 for beta chain variable domain of TCR clone 74888 (TRBV18, TRBJ2-7)
CASSPRGGAYEQYF

SEQ ID NO: 149777 - protein, 12 aa, Homo sapiens
  CDR3 for alpha chain variable domain of TCR clone 74889 (TRAV8-3, TRAJ26)
CAGDNYGQNFVF

SEQ ID NO: 149778 - protein, 15 aa, Homo sapiens
  CDR3 for beta chain variable domain of TCR clone 74889 (TRBV5-1, TRBJ2-3)
CASSVTAGSTDTQYF

SEQ ID NO: 149779 - protein, 15 aa, Homo sapiens
  CDR3 for alpha chain variable domain of TCR clone 74890 (TRAV8-3, TRAJ15)
CAVGAPNQAGTALIL

SEQ ID NO: 149780 - protein, 14 aa, Homo sapiens
  CDR3 for beta chain variable domain of TCR clone 74890 (TRBV20-1, TRBJ2-1)
CSPDDEASYNEQFF

SEQ ID NO: 149781 - protein, 13 aa, Homo sapiens
  CDR3 for alpha chain variable domain of TCR clone 74891 (TRAV12-1, TRAJ16)
CVVNGPAGQKLLF

SEQ ID NO: 149782 - protein, 13 aa, Homo sapiens
  CDR3 for beta chain variable domain of TCR clone 74891 (TRBV2, TRBJ1-1)
CARNPTGGFHAFF

SEQ ID NO: 149783 - protein, 13 aa, Homo sapiens
  CDR3 for alpha chain variable domain of TCR clone 74892 (TRAV12-1, TRAJ40)
CVVPTSGTYKYIF

SEQ ID NO: 149784 - protein, 18 aa, Homo sapiens
  CDR3 for beta chain variable domain of TCR clone 74892 (TRBV7-6, TRBJ2-1)
CASSPRTSEMSSYNEQFF

SEQ ID NO: 149785 - protein, 14 aa, Homo sapiens
  CDR3 for alpha chain variable domain of TCR clone 74893 (TRAV1-2, TRAJ8)
CAVREDTGFQKLVF

SEQ ID NO: 149786 - protein, 14 aa, Homo sapiens
  CDR3 for beta chain variable domain of TCR clone 74893 (TRBV19, TRBJ2-1)
CASPTFVVSGEQFF

SEQ ID NO: 149787 - protein, 14 aa, Homo sapiens
  CDR3 for alpha chain variable domain of TCR clone 74894 (TRAV12-2, TRAJ13)
RAVKKTGGYQKVTF

SEQ ID NO: 149788 - protein, 19 aa, Homo sapiens
  CDR3 for beta chain variable domain of TCR clone 74894 (TRBV25-1, TRBJ2-2)
CAILVYRVDRGRKTGELFF

SEQ ID NO: 149789 - protein, 13 aa, Homo sapiens
  CDR3 for alpha chain variable domain of TCR clone 74895 (TRAV21, TRAJ57)
CAVTQGGSERLVF

SEQ ID NO: 149790 - protein, 14 aa, Homo sapiens
  CDR3 for beta chain variable domain of TCR clone 74895 (TRBV5-1, TRBJ2-1)
CASSALWAGNEQFF

SEQ ID NO: 149791 - protein, 14 aa, Homo sapiens
  CDR3 for alpha chain variable domain of TCR clone 74896 (TRAV9-2, TRAJ39)
CALYIYNAGNMLTF

SEQ ID NO: 149792 - protein, 15 aa, Homo sapiens
  CDR3 for beta chain variable domain of TCR clone 74896 (TRBV28, TRBJ2-4)
CAAGSGTLLMGIQYF

SEQ ID NO: 149793 - protein, 13 aa, Homo sapiens
  CDR3 for alpha chain variable domain of TCR clone 74897 (TRAV27, TRAJ40)
CAGARIGTYKYIF

SEQ ID NO: 149794 - protein, 11 aa, Homo sapiens
  CDR3 for beta chain variable domain of TCR clone 74897 (TRBV29-1, TRBJ2-5)
CSEDRTGTQYF

SEQ ID NO: 149795 - protein, 15 aa, Homo sapiens
  CDR3 for alpha chain variable domain of TCR clone 74898 (TRAV8-3, TRAJ15)
CAVGAPNQAGTALIF

SEQ ID NO: 149796 - protein, 14 aa, Homo sapiens
  CDR3 for beta chain variable domain of TCR clone 74898 (TRBV20-1, TRBJ2-1)
CSPNDEASYNKQFF

SEQ ID NO: 149797 - protein, 14 aa, Homo sapiens
  CDR3 for alpha chain variable domain of TCR clone 74899 (TRAV26-1, TRAJ34)
CIVRVAYNTDKLIF

SEQ ID NO: 149798 - protein, 15 aa, Homo sapiens
  CDR3 for beta chain variable domain of TCR clone 74899 (TRBV20-1, TRBJ2-7)
CRARVPAAYFYEQYF

SEQ ID NO: 149799 - protein, 10 aa, Homo sapiens
  CDR3 for alpha chain variable domain of TCR clone 74900 (TRAV13-1, TRAJ52)
CAAKTPMLVV

SEQ ID NO: 149800 - protein, 14 aa, Homo sapiens
  CDR3 for beta chain variable domain of TCR clone 74900 (TRBV6-5, TRBJ1-1)
CASSFGQGLTESFF

SEQ ID NO: 149801 - protein, 14 aa, Homo sapiens
  CDR3 for alpha chain variable domain of TCR clone 74901 (TRAV13-1, TRAJ44)
CAAKATGTASKLTF

SEQ ID NO: 149802 - protein, 17 aa, Homo sapiens
  CDR3 for beta chain variable domain of TCR clone 74901 (TRBV18, TRBJ2-1)
CASSKGLSGGADNEQFF

SEQ ID NO: 149803 - protein, 13 aa, Homo sapiens
  CDR3 for alpha chain variable domain of TCR clone 74902 (TRAV35, TRAJ49)
CAGRLNTGNQSYF

SEQ ID NO: 149804 - protein, 17 aa, Homo sapiens
  CDR3 for beta chain variable domain of TCR clone 74902 (TRBV6-1, TRBJ2-1)
CASSEGGWGQFYNEQFF

SEQ ID NO: 149805 - protein, 13 aa, Homo sapiens
  CDR3 for alpha chain variable domain of TCR clone 74903 (TRAV27, TRAJ54)
CARAGQGAQKLVF

SEQ ID NO: 149806 - protein, 15 aa, Homo sapiens
  CDR3 for beta chain variable domain of TCR clone 74903 (TRBV18, TRBJ2-6)
CASSPSYAGANVLTF

SEQ ID NO: 149807 - protein, 14 aa, Homo sapiens
  CDR3 for alpha chain variable domain of TCR clone 74904 (TRAV13-1, TRAJ10)
CAAKEPGGGDKLTF

SEQ ID NO: 149808 - protein, 14 aa, Homo sapiens
  CDR3 for beta chain variable domain of TCR clone 74904 (TRBV6-6, TRBJ2-7)
CASSDSGAGYEQYF

SEQ ID NO: 149809 - protein, 13 aa, Homo sapiens
  CDR3 for alpha chain variable domain of TCR clone 74905 (TRAV27, TRAJ8)
CAGGPTGFQKLVF

SEQ ID NO: 149810 - protein, 16 aa, Homo sapiens
  CDR3 for beta chain variable domain of TCR clone 74905 (TRBV19, TRBJ1-1)
CASRVDVTGAAWGAFF

SEQ ID NO: 149811 - protein, 11 aa, Homo sapiens
  CDR3 for alpha chain variable domain of TCR clone 74906 (TRAV17, TRAJ9)
CATTGGFKTIF

SEQ ID NO: 149812 - protein, 14 aa, Homo sapiens
  CDR3 for beta chain variable domain of TCR clone 74906 (TRBV7-9, TRBJ2-2)
CASSGLTDTGELFF

SEQ ID NO: 149813 - protein, 14 aa, Homo sapiens
  CDR3 for alpha chain variable domain of TCR clone 74907 (TRAV12-2, TRAJ13)
CAVKKAGGYQKVTF

SEQ ID NO: 149814 - protein, 15 aa, Homo sapiens
  CDR3 for beta chain variable domain of TCR clone 74907 (TRBV20-1, TRBJ2-7)
CSARDRVSGMDEQYF

SEQ ID NO: 149815 - protein, 15 aa, Homo sapiens
  CDR3 for alpha chain variable domain of TCR clone 74908 (TRAV8-3, TRAJ37)
CAVGGPSSNTGKLIF

SEQ ID NO: 149816 - protein, 15 aa, Homo sapiens
  CDR3 for beta chain variable domain of TCR clone 74908 (TRBV10-3, TRBJ2-7)
CATREQGLRSYEQYF

SEQ ID NO: 149817 - protein, 11 aa, Homo sapiens
  CDR3 for alpha chain variable domain of TCR clone 74909 (TRAV2, TRAJ13)
CASGGYQKVTF

SEQ ID NO: 149818 - protein, 16 aa, Homo sapiens
  CDR3 for beta chain variable domain of TCR clone 74909 (TRBV12-4, TRBJ2-5)
CASSFFVRGRRETQYF

SEQ ID NO: 149819 - protein, 14 aa, Homo sapiens
  CDR3 for alpha chain variable domain of TCR clone 74910 (TRAV13-1, TRAJ26)
CAASSAHYGQNFVF

SEQ ID NO: 149820 - protein, 16 aa, Homo sapiens
  CDR3 for beta chain variable domain of TCR clone 74910 (TRBV20-1, TRBJ1-4)
CSAPGQGLLTNEKLFF

SEQ ID NO: 149821 - protein, 14 aa, Homo sapiens
  CDR3 for alpha chain variable domain of TCR clone 74911 (TRAV13-1, TRAJ53)
CAAIISGSNYKLTF

SEQ ID NO: 149822 - protein, 15 aa, Homo sapiens
  CDR3 for beta chain variable domain of TCR clone 74911 (TRBV4-1, TRBJ1-4)
CASSDTGGTNEKLFF

SEQ ID NO: 149823 - protein, 11 aa, Homo sapiens
  CDR3 for alpha chain variable domain of TCR clone 74912 (TRAV12-2, TRAJ49)
CAVTDGNQFYF

SEQ ID NO: 149824 - protein, 16 aa, Homo sapiens
  CDR3 for beta chain variable domain of TCR clone 74912 (TRBV19, TRBJ1-2)
CASSIGSNRDGYGYTF

SEQ ID NO: 149825 - protein, 12 aa, Homo sapiens
  CDR3 for alpha chain variable domain of TCR clone 74913 (TRAV8-3, TRAJ27)
CAVDAEAGKSTF

SEQ ID NO: 149826 - protein, 14 aa, Homo sapiens
  CDR3 for beta chain variable domain of TCR clone 74913 (TRBV2, TRBJ2-1)
CASRLIVGHDEQFF

SEQ ID NO: 149827 - protein, 15 aa, Homo sapiens
  CDR3 for alpha chain variable domain of TCR clone 74914 (TRAV16, TRAJ58)
CALKRGNQWLSVDLW

SEQ ID NO: 149828 - protein, 17 aa, Homo sapiens
  CDR3 for beta chain variable domain of TCR clone 74914 (TRBV18, TRBJ2-1)
CASSKGLSGGADNEQFF

SEQ ID NO: 149829 - protein, 14 aa, Homo sapiens
  CDR3 for alpha chain variable domain of TCR clone 74915 (TRAV27, TRAJ12)
CAGAWMDSSYKLIF

SEQ ID NO: 149830 - protein, 18 aa, Homo sapiens
  CDR3 for beta chain variable domain of TCR clone 74915 (TRBV10-3, TRBJ2-7)
CAISESGRPSGGRVEQYF

SEQ ID NO: 149831 - protein, 12 aa, Homo sapiens
  CDR3 for alpha chain variable domain of TCR clone 74916 (TRAV8-3, TRAJ20)
CAVGANDYKLSF

SEQ ID NO: 149832 - protein, 15 aa, Homo sapiens
  CDR3 for beta chain variable domain of TCR clone 74916 (TRBV5-7, TRBJ1-5)
CANSYGKLWDQPQHF

SEQ ID NO: 149833 - protein, 12 aa, Homo sapiens
  CDR3 for alpha chain variable domain of TCR clone 74917 (TRAV8-3, TRAJ20)
CAVGANDYELSF

SEQ ID NO: 149834 - protein, 16 aa, Homo sapiens
  CDR3 for beta chain variable domain of TCR clone 74917 (TRBV19, TRBJ2-2)
CASRSPGTGATGELFL

SEQ ID NO: 149835 - protein, 11 aa, Homo sapiens
  CDR3 for alpha chain variable domain of TCR clone 74918 (TRAV12-1, TRAJ34)
CVVNKGRELIF

SEQ ID NO: 149836 - protein, 18 aa, Homo sapiens
  CDR3 for beta chain variable domain of TCR clone 74918 (TRBV11-2, TRBJ2-3)
CASSLGGASRGAPNTQYF

SEQ ID NO: 149837 - protein, 14 aa, Homo sapiens
  CDR3 for alpha chain variable domain of TCR clone 74919 (TRAV36/DV7, TRAJ16)
CAVEADSDGQKLLF

SEQ ID NO: 149838 - protein, 20 aa, Homo sapiens
  CDR3 for beta chain variable domain of TCR clone 74919 (TRBV28, TRBJ2-1)
CASTPIGRSPGLAGGNEQFF

SEQ ID NO: 149839 - protein, 14 aa, Homo sapiens
  CDR3 for alpha chain variable domain of TCR clone 74920 (TRAV20, TRAJ56)
CAVQFGGANSKLTF

SEQ ID NO: 149840 - protein, 14 aa, Homo sapiens
  CDR3 for beta chain variable domain of TCR clone 74920 (TRBV20-1, TRBJ2-7)
CSAERGRSSYEQYF

SEQ ID NO: 149841 - protein, 15 aa, Homo sapiens
  CDR3 for alpha chain variable domain of TCR clone 74921 (TRAV26-1, TRAJ40)
CIVRVTTSGTYKYIL

SEQ ID NO: 149842 - protein, 12 aa, Homo sapiens
  CDR3 for beta chain variable domain of TCR clone 74921 (TRBV7-9, TRBJ1-4)
CASSTDREKLFF

SEQ ID NO: 149843 - protein, 14 aa, Homo sapiens
  CDR3 for alpha chain variable domain of TCR clone 74922 (TRAV8-3, TRAJ3)
CAVVPWSSASKIIF

SEQ ID NO: 149844 - protein, 16 aa, Homo sapiens
  CDR3 for beta chain variable domain of TCR clone 74922 (TRBV4-1, TRBJ2-3)
CASSQLTSGGGDTQYF

SEQ ID NO: 149845 - protein, 13 aa, Homo sapiens
  CDR3 for alpha chain variable domain of TCR clone 74923 (TRAV12-3, TRAJ9)
CAMRNTGGFKTIF

SEQ ID NO: 149846 - protein, 14 aa, Homo sapiens
  CDR3 for beta chain variable domain of TCR clone 74923 (TRBV11-2, TRBJ2-7)
CASSSTGEGYEQFF

SEQ ID NO: 149847 - protein, 15 aa, Homo sapiens
  CDR3 for alpha chain variable domain of TCR clone 74924 (TRAV13-1, TRAJ15)
CAASIERQAGTALTF

SEQ ID NO: 149848 - protein, 13 aa, Homo sapiens
  CDR3 for beta chain variable domain of TCR clone 74924 (TRBV5-1, TRBJ2-7)
CASSATGGNEQYF

SEQ ID NO: 149849 - protein, 13 aa, Homo sapiens
  CDR3 for alpha chain variable domain of TCR clone 74925 (TRAV20, TRAJ34)
CAVRSYNTDKLIF

SEQ ID NO: 149850 - protein, 15 aa, Homo sapiens
  CDR3 for beta chain variable domain of TCR clone 74925 (TRBV27, TRBJ1-3)
CASSPSPGSGDTIYF

SEQ ID NO: 149851 - protein, 12 aa, Homo sapiens
  CDR3 for alpha chain variable domain of TCR clone 74926 (TRAV8-3, TRAJ26)
CAGDNYGQNFVF

SEQ ID NO: 149852 - protein, 15 aa, Homo sapiens
  CDR3 for beta chain variable domain of TCR clone 74926 (TRBV9, TRBJ2-1)
FASSLAGSSYNEQFF

SEQ ID NO: 149853 - protein, 12 aa, Homo sapiens
  CDR3 for alpha chain variable domain of TCR clone 74927 (TRAV30, TRAJ39)
CGRGNAGNMLTF

SEQ ID NO: 149854 - protein, 12 aa, Homo sapiens
  CDR3 for beta chain variable domain of TCR clone 74927 (TRBV18, TRBJ2-5)
CASSPNQETQYF

SEQ ID NO: 149855 - protein, 15 aa, Homo sapiens
  CDR3 for alpha chain variable domain of TCR clone 74928 (TRAV14/DV4, TRAJ26)
CAMREGQNYGQNFVF

SEQ ID NO: 149856 - protein, 13 aa, Homo sapiens
  CDR3 for beta chain variable domain of TCR clone 74928 (TRBV24-1, TRBJ2-2)
CATSDWSTGELFS

SEQ ID NO: 149857 - protein, 14 aa, Homo sapiens
  CDR3 for alpha chain variable domain of TCR clone 74929 (TRAV35, TRAJ24)
CAGPRRDSWGKLQL

SEQ ID NO: 149858 - protein, 12 aa, Homo sapiens
  CDR3 for beta chain variable domain of TCR clone 74929 (TRBV12-4, TRBJ2-3)
CASSLGQDTQYF

SEQ ID NO: 149859 - protein, 15 aa, Homo sapiens
  CDR3 for alpha chain variable domain of TCR clone 74930 (TRAV3, TRAJ20)
CAVRDIKLSDYKLSF

SEQ ID NO: 149860 - protein, 15 aa, Homo sapiens
  CDR3 for beta chain variable domain of TCR clone 74930 (TRBV7-9, TRBJ1-6)
CASSSPGRGHSPLHF

SEQ ID NO: 149861 - protein, 14 aa, Homo sapiens
  CDR3 for alpha chain variable domain of TCR clone 74931 (TRAV12-3, TRAJ22)
CSMSLFGSARQLTF

SEQ ID NO: 149862 - protein, 11 aa, Homo sapiens
  CDR3 for beta chain variable domain of TCR clone 74931 (TRBV12-4, TRBJ2-2)
CASSSAGELFF

SEQ ID NO: 149863 - protein, 18 aa, Homo sapiens
  CDR3 for alpha chain variable domain of TCR clone 74932 (TRAV16, TRAJ26)
CALTRWSEFCLCSRNQIV

SEQ ID NO: 149864 - protein, 13 aa, Homo sapiens
  CDR3 for beta chain variable domain of TCR clone 74932 (TRBV4-1, TRBJ2-2)
CASSQENTGELFF

SEQ ID NO: 149865 - protein, 14 aa, Homo sapiens
  CDR3 for alpha chain variable domain of TCR clone 74933 (TRAV2, TRAJ5)
CAVEDRAGRRALTF

SEQ ID NO: 149866 - protein, 12 aa, Homo sapiens
  CDR3 for beta chain variable domain of TCR clone 74933 (TRBV11-2, TRBJ2-2)
CASSLGGGELFF

SEQ ID NO: 149867 - protein, 15 aa, Homo sapiens
  CDR3 for alpha chain variable domain of TCR clone 74934 (TRAV38-2/DV8, TRAJ47)
CAYRSAKGYGNKLVF

SEQ ID NO: 149868 - protein, 16 aa, Homo sapiens
  CDR3 for beta chain variable domain of TCR clone 74934 (TRBV19, TRBJ2-4)
CATGGLAGGTKNIQYF

SEQ ID NO: 149869 - protein, 13 aa, Homo sapiens
  CDR3 for alpha chain variable domain of TCR clone 74935 (TRAV38-1, TRAJ42)
CARWGGSQGNLLF

SEQ ID NO: 149870 - protein, 10 aa, Homo sapiens
  CDR3 for beta chain variable domain of TCR clone 74935 (TRBV2, TRBJ2-5)
CASSAATQYF

SEQ ID NO: 149871 - protein, 16 aa, Homo sapiens
  CDR3 for alpha chain variable domain of TCR clone 74936 (TRAV30, TRAJ24)
CGTEIVDADSWGEFQF

SEQ ID NO: 149872 - protein, 15 aa, Homo sapiens
  CDR3 for beta chain variable domain of TCR clone 74936 (TRBV28, TRBJ2-1)
CASSIIAGGRSEQFF

SEQ ID NO: 149873 - protein, 14 aa, Homo sapiens
  CDR3 for alpha chain variable domain of TCR clone 74937 (TRAV36/DV7, TRAJ13)
WGSGENGGYQKATF

SEQ ID NO: 149874 - protein, 15 aa, Homo sapiens
  CDR3 for beta chain variable domain of TCR clone 74937 (TRBV19, TRBJ2-1)
CASSTGTSSYNEQFF

SEQ ID NO: 149875 - protein, 15 aa, Homo sapiens
  CDR3 for alpha chain variable domain of TCR clone 74938 (TRAV27, TRAJ38)
CAARRNAGNNRKLIW

SEQ ID NO: 149876 - protein, 14 aa, Homo sapiens
  CDR3 for beta chain variable domain of TCR clone 74938 (TRBV19, TRBJ1-5)
CASRAPDSFLSQHF

SEQ ID NO: 149877 - protein, 16 aa, Homo sapiens
  CDR3 for alpha chain variable domain of TCR clone 74939 (TRAV21, TRAJ52)
CAVTNAGGTSYGKLTF

SEQ ID NO: 149878 - protein, 14 aa, Homo sapiens
  CDR3 for beta chain variable domain of TCR clone 74939 (TRBV4-1, TRBJ2-5)
CASSRSGSGETQYF

SEQ ID NO: 149879 - protein, 15 aa, Homo sapiens
  CDR3 for alpha chain variable domain of TCR clone 74940 (TRAV4, TRAJ39)
CLVGPNNNAGNMLTF

SEQ ID NO: 149880 - protein, 15 aa, Homo sapiens
  CDR3 for beta chain variable domain of TCR clone 74940 (TRBV7-9, TRBJ1-6)
CAGSSPGRGNSPLHF

SEQ ID NO: 149881 - protein, 14 aa, Homo sapiens
  CDR3 for alpha chain variable domain of TCR clone 74941 (TRAV13-1, TRAJ44)
CAAKATGTASKLTF

SEQ ID NO: 149882 - protein, 15 aa, Homo sapiens
  CDR3 for beta chain variable domain of TCR clone 74941 (TRBV20-1, TRBJ2-7)
CSAESGTSGAYEQYF

SEQ ID NO: 149883 - protein, 13 aa, Homo sapiens
  CDR3 for alpha chain variable domain of TCR clone 74942 (TRAV12-2, TRAJ50)
CAVTVTSYDKVIF

SEQ ID NO: 149884 - protein, 14 aa, Homo sapiens
  CDR3 for beta chain variable domain of TCR clone 74942 (TRBV9, TRBJ2-1)
CASSVDPRGKEQFF

SEQ ID NO: 149885 - protein, 14 aa, Homo sapiens
  CDR3 for alpha chain variable domain of TCR clone 74943 (TRAV17, TRAJ22)
CATSHSGSARQLTF

SEQ ID NO: 149886 - protein, 15 aa, Homo sapiens
  CDR3 for beta chain variable domain of TCR clone 74943 (TRBV4-1, TRBJ2-5)
CASSQWDLYQETQYF

SEQ ID NO: 149887 - protein, 15 aa, Homo sapiens
  CDR3 for alpha chain variable domain of TCR clone 74944 (TRAV26-1, TRAJ22)
CIVRVSFWFCKATDL

SEQ ID NO: 149888 - protein, 13 aa, Homo sapiens
  CDR3 for beta chain variable domain of TCR clone 74944 (TRBV7-9, TRBJ1-2)
CASSLKQNYGYTF

SEQ ID NO: 149889 - protein, 14 aa, Homo sapiens
  CDR3 for alpha chain variable domain of TCR clone 74945 (TRAV1-2, TRAJ28)
CVARSGAGSYQLTF

SEQ ID NO: 149890 - protein, 14 aa, Homo sapiens
  CDR3 for beta chain variable domain of TCR clone 74945 (TRBV7-7, TRBJ2-2)
CATRQDSDTGELFF

SEQ ID NO: 149891 - protein, 13 aa, Homo sapiens
  CDR3 for alpha chain variable domain of TCR clone 74946 (TRAV30, TRAJ8)
CGTPNTGFQKLVF

SEQ ID NO: 149892 - protein, 12 aa, Homo sapiens
  CDR3 for beta chain variable domain of TCR clone 74946 (TRBV19, TRBJ1-5)
CASSIAQQPQHF

SEQ ID NO: 149893 - protein, 14 aa, Homo sapiens
  CDR3 for alpha chain variable domain of TCR clone 74947 (TRAV13-1, TRAJ35)
CAPSKGGFGNVLHC

SEQ ID NO: 149894 - protein, 13 aa, Homo sapiens
  CDR3 for beta chain variable domain of TCR clone 74947 (TRBV7-3, TRBJ1-1)
CASSQDWGAEAFF

SEQ ID NO: 149895 - protein, 15 aa, Homo sapiens
  CDR3 for alpha chain variable domain of TCR clone 74948 (TRAV17, TRAJ57)
CATGPSQGGSEKLVL

SEQ ID NO: 149896 - protein, 13 aa, Homo sapiens
  CDR3 for beta chain variable domain of TCR clone 74948 (TRBV6-5, TRBJ2-5)
CASSPQGGETQYF

SEQ ID NO: 149897 - protein, 12 aa, Homo sapiens
  CDR3 for alpha chain variable domain of TCR clone 74949 (TRAV9-2, TRAJ26)
CALRGYGQNFVF

SEQ ID NO: 149898 - protein, 12 aa, Homo sapiens
  CDR3 for beta chain variable domain of TCR clone 74949 (TRBV29-1, TRBJ2-3)
CSVTGGADTQYC

SEQ ID NO: 149899 - protein, 15 aa, Homo sapiens
  CDR3 for alpha chain variable domain of TCR clone 74950 (TRAV34, TRAJ38)
CGADFTPGNNRKLIW

SEQ ID NO: 149900 - protein, 16 aa, Homo sapiens
  CDR3 for beta chain variable domain of TCR clone 74950 (TRBV5-4, TRBJ2-3)
CASQQPGAGGADTQYF

SEQ ID NO: 149901 - protein, 18 aa, Homo sapiens
  CDR3 for alpha chain variable domain of TCR clone 74951 (TRAV13-1, TRAJ52)
CAAKNPNAGGTSYGKLTV

SEQ ID NO: 149902 - protein, 15 aa, Homo sapiens
  CDR3 for beta chain variable domain of TCR clone 74951 (TRBV6-1, TRBJ2-3)
CASSERGGITDTQYF

SEQ ID NO: 149903 - protein, 15 aa, Homo sapiens
  CDR3 for alpha chain variable domain of TCR clone 74952 (TRAV8-6, TRAJ10)
CAVSDQAGGGKKLTF

SEQ ID NO: 149904 - protein, 15 aa, Homo sapiens
  CDR3 for beta chain variable domain of TCR clone 74952 (TRBV3-1, TRBJ2-5)
CASSANLGGPETQYF

SEQ ID NO: 149905 - protein, 15 aa, Homo sapiens
  CDR3 for alpha chain variable domain of TCR clone 74953 (TRAV27, TRAJ38)
CAARRNAGKNRKLIW

SEQ ID NO: 149906 - protein, 13 aa, Homo sapiens
  CDR3 for beta chain variable domain of TCR clone 74953 (TRBV12-5, TRBJ2-3)
CASGDRQSDTQYF

SEQ ID NO: 149907 - protein, 14 aa, Homo sapiens
  CDR3 for alpha chain variable domain of TCR clone 74954 (TRAV2, TRAJ37)
CAVDFTSNTGKLIF

SEQ ID NO: 149908 - protein, 13 aa, Homo sapiens
  CDR3 for beta chain variable domain of TCR clone 74954 (TRBV19, TRBJ1-3)
CASRLSLGNTIYF

SEQ ID NO: 149909 - protein, 15 aa, Homo sapiens
  CDR3 for alpha chain variable domain of TCR clone 74955 (TRAV26-1, TRAJ40)
CIVSFATPGTYKYIF

SEQ ID NO: 149910 - protein, 15 aa, Homo sapiens
  CDR3 for beta chain variable domain of TCR clone 74955 (TRBV5-7, TRBJ2-3)
CASSPGLATTDTQYF

SEQ ID NO: 149911 - protein, 14 aa, Homo sapiens
  CDR3 for alpha chain variable domain of TCR clone 74956 (TRAV12-2, TRAJ17)
FAVNIKAAGNKLTF

SEQ ID NO: 149912 - protein, 16 aa, Homo sapiens
  CDR3 for beta chain variable domain of TCR clone 74956 (TRBV20-1, TRBJ2-6)
CSASSQGYDGANVLTF

SEQ ID NO: 149913 - protein, 13 aa, Homo sapiens
  CDR3 for alpha chain variable domain of TCR clone 74957 (TRAV12-3, TRAJ7)
CAMTPYGNNRLAF

SEQ ID NO: 149914 - protein, 13 aa, Homo sapiens
  CDR3 for beta chain variable domain of TCR clone 74957 (TRBV20-1, TRBJ1-1)
CSARGGGNTEAFF

SEQ ID NO: 149915 - protein, 14 aa, Homo sapiens
  CDR3 for alpha chain variable domain of TCR clone 74958 (TRAV12-2, TRAJ5)
GAVNRSTGRRALTF

SEQ ID NO: 149916 - protein, 12 aa, Homo sapiens
  CDR3 for beta chain variable domain of TCR clone 74958 (TRBV19, TRBJ1-5)
CASSIAQQPQHF

SEQ ID NO: 149917 - protein, 16 aa, Homo sapiens
  CDR3 for alpha chain variable domain of TCR clone 74959 (TRAV3, TRAJ10)
CAVRDMGAGGGNKLTF

SEQ ID NO: 149918 - protein, 19 aa, Homo sapiens
  CDR3 for beta chain variable domain of TCR clone 74959 (TRBV6-3, TRBJ1-2)
CASSYSKGRTGPPNYGYTF

SEQ ID NO: 149919 - protein, 14 aa, Homo sapiens
  CDR3 for alpha chain variable domain of TCR clone 74960 (TRAV8-6, TRAJ5)
CAVSVDTGRRALTF

SEQ ID NO: 149920 - protein, 11 aa, Homo sapiens
  CDR3 for beta chain variable domain of TCR clone 74960 (TRBV7-3, TRBJ2-5)
CASGLSETQYF

SEQ ID NO: 149921 - protein, 14 aa, Homo sapiens
  CDR3 for alpha chain variable domain of TCR clone 74961 (TRAV3, TRAJ33)
CAVRDMGSNYQLIW

SEQ ID NO: 149922 - protein, 17 aa, Homo sapiens
  CDR3 for beta chain variable domain of TCR clone 74961 (TRBV19, TRBJ2-1)
CAGSIWSAQPTHNEQFF

SEQ ID NO: 149923 - protein, 15 aa, Homo sapiens
  CDR3 for alpha chain variable domain of TCR clone 74962 (TRAV26-1, TRAJ29)
CIVRVEGSGNTPLVF

SEQ ID NO: 149924 - protein, 15 aa, Homo sapiens
  CDR3 for beta chain variable domain of TCR clone 74962 (TRBV7-9, TRBJ1-5)
CASSQGHQPIQPQHF

SEQ ID NO: 149925 - protein, 14 aa, Homo sapiens
  CDR3 for alpha chain variable domain of TCR clone 74963 (TRAV12-3, TRAJ10)
SHLPLTGGGNKLTF

SEQ ID NO: 149926 - protein, 16 aa, Homo sapiens
  CDR3 for beta chain variable domain of TCR clone 74963 (TRBV11-3, TRBJ2-5)
CASSSVVAGSTETQYF

SEQ ID NO: 149927 - protein, 14 aa, Homo sapiens
  CDR3 for alpha chain variable domain of TCR clone 74964 (TRAV12-3, TRAJ33)
CAMSVPGGNYQLIW

SEQ ID NO: 149928 - protein, 12 aa, Homo sapiens
  CDR3 for beta chain variable domain of TCR clone 74964 (TRBV7-8, TRBJ2-7)
CASSLGDREQYF

SEQ ID NO: 149929 - protein, 14 aa, Homo sapiens
  CDR3 for alpha chain variable domain of TCR clone 74965 (TRAV29/DV5, TRAJ36)
CAARRKTGANNLFF

SEQ ID NO: 149930 - protein, 13 aa, Homo sapiens
  CDR3 for beta chain variable domain of TCR clone 74965 (TRBV12-4, TRBJ2-7)
CASSPTETYEQYF

SEQ ID NO: 149931 - protein, 11 aa, Homo sapiens
  CDR3 for alpha chain variable domain of TCR clone 74966 (TRAV8-4, TRAJ47)
DAAERGNKLVF

SEQ ID NO: 149932 - protein, 14 aa, Homo sapiens
  CDR3 for beta chain variable domain of TCR clone 74966 (TRBV12-4, TRBJ2-5)
CASSLWQKQETQYF

SEQ ID NO: 149933 - protein, 13 aa, Homo sapiens
  CDR3 for alpha chain variable domain of TCR clone 74967 (TRAV23/DV6, TRAJ15)
CAALPAGRNCSYL

SEQ ID NO: 149934 - protein, 14 aa, Homo sapiens
  CDR3 for beta chain variable domain of TCR clone 74967 (TRBV7-9, TRBJ1-2)
CASSRQGANYGYTF

SEQ ID NO: 149935 - protein, 16 aa, Homo sapiens
  CDR3 for alpha chain variable domain of TCR clone 74968 (TRAV23/DV6, TRAJ9)
CAASIGGNTGGFKTIF

SEQ ID NO: 149936 - protein, 13 aa, Homo sapiens
  CDR3 for beta chain variable domain of TCR clone 74968 (TRBV4-1, TRBJ2-2)
CASSQENTGELFF

SEQ ID NO: 149937 - protein, 12 aa, Homo sapiens
  CDR3 for alpha chain variable domain of TCR clone 74969 (TRAV35, TRAJ49)
CAGWNTGNRFYF

SEQ ID NO: 149938 - protein, 16 aa, Homo sapiens
  CDR3 for beta chain variable domain of TCR clone 74969 (TRBV5-1, TRBJ2-2)
CASSLWDTTNTGELFF

SEQ ID NO: 149939 - protein, 14 aa, Homo sapiens
  CDR3 for alpha chain variable domain of TCR clone 74970 (TRAV29/DV5, TRAJ26)
CAASVSPRVRILSL

SEQ ID NO: 149940 - protein, 17 aa, Homo sapiens
  CDR3 for beta chain variable domain of TCR clone 74970 (TRBV20-1, TRBJ2-2)
CSASGSGQGGLTGELFF

SEQ ID NO: 149941 - protein, 13 aa, Homo sapiens
  CDR3 for alpha chain variable domain of TCR clone 74971 (TRAV8-3, TRAJ43)
CAVGPDNNNDMRF

SEQ ID NO: 149942 - protein, 14 aa, Homo sapiens
  CDR3 for beta chain variable domain of TCR clone 74971 (TRBV19, TRBJ2-1)
CANPTFVLSGEQFF

SEQ ID NO: 149943 - protein, 12 aa, Homo sapiens
  CDR3 for alpha chain variable domain of TCR clone 74972 (TRAV8-4, TRAJ31)
CAVSDSNARLMF

SEQ ID NO: 149944 - protein, 14 aa, Homo sapiens
  CDR3 for beta chain variable domain of TCR clone 74972 (TRBV7-6, TRBJ2-3)
CASSLGTVTDTQYF

SEQ ID NO: 149945 - protein, 13 aa, Homo sapiens
  CDR3 for alpha chain variable domain of TCR clone 74973 (TRAV2, TRAJ24)
CAVPTDSCGKLQF

SEQ ID NO: 149946 - protein, 16 aa, Homo sapiens
  CDR3 for beta chain variable domain of TCR clone 74973 (TRBV6-3, TRBJ1-2)
CASSRELSGTPYGYTF

SEQ ID NO: 149947 - protein, 15 aa, Homo sapiens
  CDR3 for alpha chain variable domain of TCR clone 74974 (TRAV26-1, TRAJ22)
CIVRVSFWFCKATDL

SEQ ID NO: 149948 - protein, 13 aa, Homo sapiens
  CDR3 for beta chain variable domain of TCR clone 74974 (TRBV7-9, TRBJ1-2)
CPSSLKQNYGYTF

SEQ ID NO: 149949 - protein, 15 aa, Homo sapiens
  CDR3 for alpha chain variable domain of TCR clone 74975 (TRAV26-1, TRAJ29)
CIVRVEGSGNTPLVF

SEQ ID NO: 149950 - protein, 14 aa, Homo sapiens
  CDR3 for beta chain variable domain of TCR clone 74975 (TRBV18, TRBJ2-5)
CASSPGVCQETQYF

SEQ ID NO: 149951 - protein, 16 aa, Homo sapiens
  CDR3 for alpha chain variable domain of TCR clone 74976 (TRAV3, TRAJ21)
CAVRDIERGNFNKFYF

SEQ ID NO: 149952 - protein, 15 aa, Homo sapiens
  CDR3 for beta chain variable domain of TCR clone 74976 (TRBV18, TRBJ2-1)
CASLPDRGRDNEQFF

SEQ ID NO: 149953 - protein, 16 aa, Homo sapiens
  CDR3 for alpha chain variable domain of TCR clone 74977 (TRAV4, TRAJ9)
CLVGDPNRPGGFKTIF

SEQ ID NO: 149954 - protein, 14 aa, Homo sapiens
  CDR3 for beta chain variable domain of TCR clone 74977 (TRBV20-1, TRBJ1-1)
CNAQTRIGGTEAFF

SEQ ID NO: 149955 - protein, 13 aa, Homo sapiens
  CDR3 for alpha chain variable domain of TCR clone 74978 (TRAV2, TRAJ40)
CAVVTSGTYKYIF

SEQ ID NO: 149956 - protein, 11 aa, Homo sapiens
  CDR3 for beta chain variable domain of TCR clone 74978 (TRBV19, TRBJ1-1)
CASSIGSEAFF

SEQ ID NO: 149957 - protein, 13 aa, Homo sapiens
  CDR3 for alpha chain variable domain of TCR clone 74979 (TRAV8-6, TRAJ21)
CAVSPSSLNTFYF

SEQ ID NO: 149958 - protein, 14 aa, Homo sapiens
  CDR3 for beta chain variable domain of TCR clone 74979 (TRBV7-9, TRBJ2-5)
CASSLDTAQETQYF

SEQ ID NO: 149959 - protein, 15 aa, Homo sapiens
  CDR3 for alpha chain variable domain of TCR clone 74980 (TRAV8-3, TRAJ6)
CAVGEGRGGSYIPTF

SEQ ID NO: 149960 - protein, 14 aa, Homo sapiens
  CDR3 for beta chain variable domain of TCR clone 74980 (TRBV27, TRBJ2-2)
CASLRSPPGGELFF

SEQ ID NO: 149961 - protein, 11 aa, Homo sapiens
  CDR3 for alpha chain variable domain of TCR clone 74981 (TRAV13-1, TRAJ39)
CASHAGNMLTF

SEQ ID NO: 149962 - protein, 13 aa, Homo sapiens
  CDR3 for beta chain variable domain of TCR clone 74981 (TRBV10-3, TRBJ2-7)
CASKLAVNYEQYF

SEQ ID NO: 149963 - protein, 13 aa, Homo sapiens
  CDR3 for alpha chain variable domain of TCR clone 74982 (TRAV13-1, TRAJ39)
CSKYSNGGNMLTF

SEQ ID NO: 149964 - protein, 16 aa, Homo sapiens
  CDR3 for beta chain variable domain of TCR clone 74982 (TRBV20-1, TRBJ1-4)
CSAPGQGLLTNEKLFF

SEQ ID NO: 149965 - protein, 14 aa, Homo sapiens
  CDR3 for alpha chain variable domain of TCR clone 74983 (TRAV8-3, TRAJ11)
CAVGSNSGYGTLTF

SEQ ID NO: 149966 - protein, 14 aa, Homo sapiens
  CDR3 for beta chain variable domain of TCR clone 74983 (TRBV5-1, TRBJ2-7)
CASSLTSGGYEQYF

SEQ ID NO: 149967 - protein, 14 aa, Homo sapiens
  CDR3 for alpha chain variable domain of TCR clone 74984 (TRAV14/DV4, TRAJ23)
CAMRYYNQGGKLIF

SEQ ID NO: 149968 - protein, 13 aa, Homo sapiens
  CDR3 for beta chain variable domain of TCR clone 74984 (TRBV7-3, TRBJ1-1)
CASSQDWGAEAFF

SEQ ID NO: 149969 - protein, 11 aa, Homo sapiens
  CDR3 for alpha chain variable domain of TCR clone 74985 (TRAV2, TRAJ13)
CASGGYQKVTF

SEQ ID NO: 149970 - protein, 11 aa, Homo sapiens
  CDR3 for beta chain variable domain of TCR clone 74985 (TRBV19, TRBJ1-1)
CASSIGSEVFF

SEQ ID NO: 149971 - protein, 17 aa, Homo sapiens
  CDR3 for alpha chain variable domain of TCR clone 74986 (TRAV36/DV7, TRAJ52)
CAVAQRAGVTSYGKLTF

SEQ ID NO: 149972 - protein, 15 aa, Homo sapiens
  CDR3 for beta chain variable domain of TCR clone 74986 (TRBV6-5, TRBJ1-2)
CASSYSQAFNYGYTF

SEQ ID NO: 149973 - protein, 14 aa, Homo sapiens
  CDR3 for alpha chain variable domain of TCR clone 74987 (TRAV35, TRAJ46)
CAGPQKSSGDKLTF

SEQ ID NO: 149974 - protein, 12 aa, Homo sapiens
  CDR3 for beta chain variable domain of TCR clone 74987 (TRBV11-2, TRBJ2-7)
CASSLPTYEQYF

SEQ ID NO: 149975 - protein, 14 aa, Homo sapiens
  CDR3 for alpha chain variable domain of TCR clone 74988 (TRAV13-1, TRAJ33)
CAASSRDSNYQLIW

SEQ ID NO: 149976 - protein, 15 aa, Homo sapiens
  CDR3 for beta chain variable domain of TCR clone 74988 (TRBV5-1, TRBJ2-3)
CASSYNVGRTDTQYF

SEQ ID NO: 149977 - protein, 16 aa, Homo sapiens
  CDR3 for alpha chain variable domain of TCR clone 74989 (TRAV12-1, TRAJ22)
CVVNTISSGSARQLTF

SEQ ID NO: 149978 - protein, 15 aa, Homo sapiens
  CDR3 for beta chain variable domain of TCR clone 74989 (TRBV19, TRBJ1-5)
CASSIVWADNQPQHF

SEQ ID NO: 149979 - protein, 14 aa, Homo sapiens
  CDR3 for alpha chain variable domain of TCR clone 74990 (TRAV12-1, TRAJ8)
CVVNSNTGFRKLVF

SEQ ID NO: 149980 - protein, 17 aa, Homo sapiens
  CDR3 for beta chain variable domain of TCR clone 74990 (TRBV7-8, TRBJ2-6)
CASSAGTGGAGANVLTF

SEQ ID NO: 149981 - protein, 23 aa, Homo sapiens
  CDR3 for alpha chain variable domain of TCR clone 74991 (TRAV26-1, )
CIADNDGNNHIQNPDPAVYQLRD

SEQ ID NO: 149982 - protein, 13 aa, Homo sapiens
  CDR3 for beta chain variable domain of TCR clone 74991 (TRBV20-1, TRBJ1-1)
CSARGGGNTEAFF

SEQ ID NO: 149983 - protein, 22 aa, Homo sapiens
  CDR3 for alpha chain variable domain of TCR clone 74992 (TRAV3, TRAJ38)
CAVRDCLNAGNNHIQNPDPAVY

SEQ ID NO: 149984 - protein, 19 aa, Homo sapiens
  CDR3 for beta chain variable domain of TCR clone 74992 (TRBV7-2, TRBJ2-3)
CASSFLSRNWGGGTDTQYS

SEQ ID NO: 149985 - protein, 16 aa, Homo sapiens
  CDR3 for alpha chain variable domain of TCR clone 74993 (TRAV30, TRAJ24)
CGTEIVDADSWGKFQF

SEQ ID NO: 149986 - protein, 13 aa, Homo sapiens
  CDR3 for beta chain variable domain of TCR clone 74993 (TRBV11-2, TRBJ2-5)
CASSSAGEETQYF

SEQ ID NO: 149987 - protein, 16 aa, Homo sapiens
  CDR3 for alpha chain variable domain of TCR clone 74994 (TRAV23/DV6, TRAJ21)
CAASSGGGTTSTNFTL

SEQ ID NO: 149988 - protein, 11 aa, Homo sapiens
  CDR3 for beta chain variable domain of TCR clone 74994 (TRBV7-8, TRBJ2-7)
CASSLSHEQYF

SEQ ID NO: 149989 - protein, 14 aa, Homo sapiens
  CDR3 for alpha chain variable domain of TCR clone 74995 (TRAV1-2, TRAJ8)
CAVREDTDFQKLVF

SEQ ID NO: 149990 - protein, 12 aa, Homo sapiens
  CDR3 for beta chain variable domain of TCR clone 74995 (TRBV11-2, TRBJ2-1)
CASSPGNNEQFF

SEQ ID NO: 149991 - protein, 13 aa, Homo sapiens
  CDR3 for alpha chain variable domain of TCR clone 74996 (TRAV17, TRAJ9)
CATDYTGGFKTIF

SEQ ID NO: 149992 - protein, 14 aa, Homo sapiens
  CDR3 for beta chain variable domain of TCR clone 74996 (TRBV19, TRBJ2-5)
CASSMTGQQETQCF

SEQ ID NO: 149993 - protein, 15 aa, Homo sapiens
  CDR3 for alpha chain variable domain of TCR clone 74997 (TRAV13-2, TRAJ32)
CAETGYGGATNKLIF

SEQ ID NO: 149994 - protein, 16 aa, Homo sapiens
  CDR3 for beta chain variable domain of TCR clone 74997 (TRBV7-9, TRBJ1-2)
CASSISLDRGGYGYTF

SEQ ID NO: 149995 - protein, 11 aa, Homo sapiens
  CDR3 for alpha chain variable domain of TCR clone 74998 (TRAV36/DV7, TRAJ45)
SGGGGADGHTF

SEQ ID NO: 149996 - protein, 13 aa, Homo sapiens
  CDR3 for beta chain variable domain of TCR clone 74998 (TRBV28, TRBJ2-7)
CASSPSGTYEQYF

SEQ ID NO: 149997 - protein, 14 aa, Homo sapiens
  CDR3 for alpha chain variable domain of TCR clone 74999 (TRAV1-2, TRAJ8)
CAVRDDTGFQKLVF

SEQ ID NO: 149998 - protein, 16 aa, Homo sapiens
  CDR3 for beta chain variable domain of TCR clone 74999 (TRBV5-7, TRBJ2-5)
CASTLAPAGGRETQYF

SEQ ID NO: 149999 - protein, 16 aa, Homo sapiens
  CDR3 for alpha chain variable domain of TCR clone 75000 (TRAV30, TRAJ24)
CGTEIVDADSWGKFQF

SEQ ID NO: 150000 - protein, 14 aa, Homo sapiens
  CDR3 for beta chain variable domain of TCR clone 75000 (TRBV13, TRBJ2-1)
CASSPRPGYNEQFF

SEQ ID NO: 150001 - protein, 14 aa, Homo sapiens
  CDR3 for alpha chain variable domain of TCR clone 75001 (TRAV12-1, TRAJ17)
CVLNYKAAGNKLTF

SEQ ID NO: 150002 - protein, 15 aa, Homo sapiens
  CDR3 for beta chain variable domain of TCR clone 75001 (TRBV20-1, TRBJ2-7)
CSARDRVSGMDEQYF

SEQ ID NO: 150003 - protein, 14 aa, Homo sapiens
  CDR3 for alpha chain variable domain of TCR clone 75002 (TRAV27, TRAJ22)
CAGLPSGSARQLTF

SEQ ID NO: 150004 - protein, 15 aa, Homo sapiens
  CDR3 for beta chain variable domain of TCR clone 75002 (TRBV20-1, TRBJ2-7)
CSARDRVSGMDEQYF

SEQ ID NO: 150005 - protein, 15 aa, Homo sapiens
  CDR3 for alpha chain variable domain of TCR clone 75003 (TRAV25, TRAJ53)
CAATGGGGSNYKLTF

SEQ ID NO: 150006 - protein, 13 aa, Homo sapiens
  CDR3 for beta chain variable domain of TCR clone 75003 (TRBV20-1, TRBJ2-5)
CSARGDYQETQYF

SEQ ID NO: 150007 - protein, 13 aa, Homo sapiens
  CDR3 for alpha chain variable domain of TCR clone 75004 (TRAV2, TRAJ40)
CTVVTSGTYKYIF

SEQ ID NO: 150008 - protein, 16 aa, Homo sapiens
  CDR3 for beta chain variable domain of TCR clone 75004 (TRBV19, TRBJ2-2)
CASRSPGTGATGELFF

SEQ ID NO: 150009 - protein, 11 aa, Homo sapiens
  CDR3 for alpha chain variable domain of TCR clone 75005 (TRAV12-1, TRAJ8)
CVVTGFQKLVL

SEQ ID NO: 150010 - protein, 14 aa, Homo sapiens
  CDR3 for beta chain variable domain of TCR clone 75005 (TRBV19, TRBJ2-1)
CASGKSTQYNEQFF

SEQ ID NO: 150011 - protein, 13 aa, Homo sapiens
  CDR3 for alpha chain variable domain of TCR clone 75006 (TRAV8-3, TRAJ43)
CAVGADNNNDMRF

SEQ ID NO: 150012 - protein, 12 aa, Homo sapiens
  CDR3 for beta chain variable domain of TCR clone 75006 (TRBV7-2, TRBJ1-6)
CASSLSSSPLHF

SEQ ID NO: 150013 - protein, 14 aa, Homo sapiens
  CDR3 for alpha chain variable domain of TCR clone 75007 (TRAV29/DV5, TRAJ45)
CAASFRGGADGLTF

SEQ ID NO: 150014 - protein, 11 aa, Homo sapiens
  CDR3 for beta chain variable domain of TCR clone 75007 (TRBV11-2, TRBJ2-2)
CASSLLGELFF

SEQ ID NO: 150015 - protein, 15 aa, Homo sapiens
  CDR3 for alpha chain variable domain of TCR clone 75008 (TRAV3, TRAJ30)
CAASSQESRDDKIIF

SEQ ID NO: 150016 - protein, 17 aa, Homo sapiens
  CDR3 for beta chain variable domain of TCR clone 75008 (TRBV4-3, TRBJ2-1)
CASSQFSSGRASGEQFF

SEQ ID NO: 150017 - protein, 13 aa, Homo sapiens
  CDR3 for alpha chain variable domain of TCR clone 75009 (TRAV12-1, TRAJ26)
CVVRRDYGQNFVF

SEQ ID NO: 150018 - protein, 14 aa, Homo sapiens
  CDR3 for beta chain variable domain of TCR clone 75009 (TRBV6-3, TRBJ1-1)
CASRYTGESTEAFL

SEQ ID NO: 150019 - protein, 14 aa, Homo sapiens
  CDR3 for alpha chain variable domain of TCR clone 75010 (TRAV3, TRAJ28)
CAVRRGAGSYQLTF

SEQ ID NO: 150020 - protein, 16 aa, Homo sapiens
  CDR3 for beta chain variable domain of TCR clone 75010 (TRBV4-1, TRBJ2-7)
CASSQGWTSGPLEQYF

SEQ ID NO: 150021 - protein, 14 aa, Homo sapiens
  CDR3 for alpha chain variable domain of TCR clone 75011 (TRAV1-1, TRAJ23)
CAVKAYNQGGKLIF

SEQ ID NO: 150022 - protein, 13 aa, Homo sapiens
  CDR3 for beta chain variable domain of TCR clone 75011 (TRBV7-9, TRBJ1-2)
CASSLKQNYGYTF

SEQ ID NO: 150023 - protein, 12 aa, Homo sapiens
  CDR3 for alpha chain variable domain of TCR clone 75012 (TRAV16, TRAJ56)
CAPTGANSKLTF

SEQ ID NO: 150024 - protein, 17 aa, Homo sapiens
  CDR3 for beta chain variable domain of TCR clone 75012 (TRBV27, TRBJ2-6)
CASSLTGFAYGANVLTF

SEQ ID NO: 150025 - protein, 14 aa, Homo sapiens
  CDR3 for alpha chain variable domain of TCR clone 75013 (TRAV13-1, TRAJ20)
CAARPGSNDYKLSF

SEQ ID NO: 150026 - protein, 13 aa, Homo sapiens
  CDR3 for beta chain variable domain of TCR clone 75013 (TRBV20-1, TRBJ1-1)
CIAPPGGHTEAFF

SEQ ID NO: 150027 - protein, 13 aa, Homo sapiens
  CDR3 for alpha chain variable domain of TCR clone 75014 (TRAV12-1, TRAJ11)
CVVTRGGYSTLTF

SEQ ID NO: 150028 - protein, 13 aa, Homo sapiens
  CDR3 for beta chain variable domain of TCR clone 75014 (TRBV20-1, TRBJ1-2)
CSARDQGTYGYTF

SEQ ID NO: 150029 - protein, 12 aa, Homo sapiens
  CDR3 for alpha chain variable domain of TCR clone 75015 (TRAV12-3, TRAJ17)
CAMTLTVNKLTF

SEQ ID NO: 150030 - protein, 14 aa, Homo sapiens
  CDR3 for beta chain variable domain of TCR clone 75015 (TRBV18, TRBJ2-7)
CASSPRGGAYEQYF

SEQ ID NO: 150031 - protein, 15 aa, Homo sapiens
  CDR3 for alpha chain variable domain of TCR clone 75016 (TRAV21, TRAJ53)
CATLNSGGSNYKLTF

SEQ ID NO: 150032 - protein, 15 aa, Homo sapiens
  CDR3 for beta chain variable domain of TCR clone 75016 (TRBV18, TRBJ2-1)
CASSPPSASYNGQFF

SEQ ID NO: 150033 - protein, 12 aa, Homo sapiens
  CDR3 for alpha chain variable domain of TCR clone 75017 (TRAV8-3, TRAJ20)
CAVCANDYKLSF

SEQ ID NO: 150034 - protein, 13 aa, Homo sapiens
  CDR3 for beta chain variable domain of TCR clone 75017 (TRBV12-4, TRBJ1-2)
CASSLRQGKGYTF

SEQ ID NO: 150035 - protein, 16 aa, Homo sapiens
  CDR3 for alpha chain variable domain of TCR clone 75018 (TRAV30, TRAJ24)
CGTEIVDADSWGKFQF

SEQ ID NO: 150036 - protein, 13 aa, Homo sapiens
  CDR3 for beta chain variable domain of TCR clone 75018 (TRBV12-5, TRBJ2-3)
CASQNRGTDTQYF

SEQ ID NO: 150037 - protein, 14 aa, Homo sapiens
  CDR3 for alpha chain variable domain of TCR clone 75019 (TRAV29/DV5, TRAJ56)
CAARPTGANSKLTF

SEQ ID NO: 150038 - protein, 15 aa, Homo sapiens
  CDR3 for beta chain variable domain of TCR clone 75019 (TRBV5-5, TRBJ1-6)
CASSLVIVGNSPLHF

SEQ ID NO: 150039 - protein, 15 aa, Homo sapiens
  CDR3 for alpha chain variable domain of TCR clone 75020 (TRAV13-2, TRAJ8)
CAPGGRNTGFQKLVF

SEQ ID NO: 150040 - protein, 15 aa, Homo sapiens
  CDR3 for beta chain variable domain of TCR clone 75020 (TRBV7-6, TRBJ2-5)
CASSKPTGPQETQYF

SEQ ID NO: 150041 - protein, 14 aa, Homo sapiens
  CDR3 for alpha chain variable domain of TCR clone 75021 (TRAV9-2, TRAJ39)
CALYIYNAGNMLTF

SEQ ID NO: 150042 - protein, 14 aa, Homo sapiens
  CDR3 for beta chain variable domain of TCR clone 75021 (TRBV28, TRBJ2-5)
CASTGAGGVETQYF

SEQ ID NO: 150043 - protein, 11 aa, Homo sapiens
  CDR3 for alpha chain variable domain of TCR clone 75022 (TRAV2, TRAJ33)
CAVDSNYQLIW

SEQ ID NO: 150044 - protein, 14 aa, Homo sapiens
  CDR3 for beta chain variable domain of TCR clone 75022 (TRBV11-2, TRBJ2-3)
CASSGLARTDTQYF

SEQ ID NO: 150045 - protein, 14 aa, Homo sapiens
  CDR3 for alpha chain variable domain of TCR clone 75023 (TRAV1-1, TRAJ27)
CAVIYSTNAGKSTF

SEQ ID NO: 150046 - protein, 15 aa, Homo sapiens
  CDR3 for beta chain variable domain of TCR clone 75023 (TRBV7-2, TRBJ2-1)
RASSSGLAGGNEQFF

SEQ ID NO: 150047 - protein, 14 aa, Homo sapiens
  CDR3 for alpha chain variable domain of TCR clone 75024 (TRAV35, TRAJ28)
CAGRRGGWELPTHF

SEQ ID NO: 150048 - protein, 13 aa, Homo sapiens
  CDR3 for beta chain variable domain of TCR clone 75024 (TRBV9, TRBJ2-1)
CASSPSGGSEQFF

SEQ ID NO: 150049 - protein, 12 aa, Homo sapiens
  CDR3 for alpha chain variable domain of TCR clone 75025 (TRAV12-3, TRAJ3)
CAIDSRASKIIF

SEQ ID NO: 150050 - protein, 17 aa, Homo sapiens
  CDR3 for beta chain variable domain of TCR clone 75025 (TRBV7-9, TRBJ2-3)
CASSLEEAGAYPDTQYF

SEQ ID NO: 150051 - protein, 16 aa, Homo sapiens
  CDR3 for alpha chain variable domain of TCR clone 75026 (TRAV3, TRAJ23)
CAVEPLIYNQGGKLIF

SEQ ID NO: 150052 - protein, 15 aa, Homo sapiens
  CDR3 for beta chain variable domain of TCR clone 75026 (TRBV19, TRBJ1-5)
CASSPEGRPNQPQHL

SEQ ID NO: 150053 - protein, 13 aa, Homo sapiens
  CDR3 for alpha chain variable domain of TCR clone 75027 (TRAV26-2, TRAJ54)
CIPRVGGAQKLVF

SEQ ID NO: 150054 - protein, 16 aa, Homo sapiens
  CDR3 for beta chain variable domain of TCR clone 75027 (TRBV4-1, TRBJ1-1)
CASSSMSERPNTDAFF

SEQ ID NO: 150055 - protein, 12 aa, Homo sapiens
  CDR3 for alpha chain variable domain of TCR clone 75028 (TRAV17, TRAJ16)
CATVLPGQKLLF

SEQ ID NO: 150056 - protein, 13 aa, Homo sapiens
  CDR3 for beta chain variable domain of TCR clone 75028 (TRBV2, TRBJ2-3)
CASILAGGQGQYF

SEQ ID NO: 150057 - protein, 14 aa, Homo sapiens
  CDR3 for alpha chain variable domain of TCR clone 75029 (TRAV17, TRAJ57)
CATDPQGGSEKLVF

SEQ ID NO: 150058 - protein, 15 aa, Homo sapiens
  CDR3 for beta chain variable domain of TCR clone 75029 (TRBV19, TRBJ1-2)
CASSVGQVLNYGYTF

SEQ ID NO: 150059 - protein, 14 aa, Homo sapiens
  CDR3 for alpha chain variable domain of TCR clone 75030 (TRAV12-3, TRAJ10)
SHLPLTGGGNKLTF

SEQ ID NO: 150060 - protein, 14 aa, Homo sapiens
  CDR3 for beta chain variable domain of TCR clone 75030 (TRBV13, TRBJ2-5)
CASSLERVGETQYF

SEQ ID NO: 150061 - protein, 14 aa, Homo sapiens
  CDR3 for alpha chain variable domain of TCR clone 75031 (TRAV13-1, TRAJ17)
LSSRSKAAGNKLTF

SEQ ID NO: 150062 - protein, 15 aa, Homo sapiens
  CDR3 for beta chain variable domain of TCR clone 75031 (TRBV4-1, TRBJ1-4)
CASSDTGGTNEKLFF

SEQ ID NO: 150063 - protein, 15 aa, Homo sapiens
  CDR3 for alpha chain variable domain of TCR clone 75032 (TRAV4, TRAJ39)
CLVGPNNNAGNMLPF

SEQ ID NO: 150064 - protein, 14 aa, Homo sapiens
  CDR3 for beta chain variable domain of TCR clone 75032 (TRBV19, TRBJ2-7)
CASNFRDTFTGMYF

SEQ ID NO: 150065 - protein, 14 aa, Homo sapiens
  CDR3 for alpha chain variable domain of TCR clone 75033 (TRAV3, TRAJ9)
CAVRLNTGGFKTIF

SEQ ID NO: 150066 - protein, 15 aa, Homo sapiens
  CDR3 for beta chain variable domain of TCR clone 75033 (TRBV7-2, TRBJ2-1)
CASSLAGGRVNERFF

SEQ ID NO: 150067 - protein, 11 aa, Homo sapiens
  CDR3 for alpha chain variable domain of TCR clone 75034 (TRAV8-3, TRAJ42)
NYGGSQGNLIF

SEQ ID NO: 150068 - protein, 17 aa, Homo sapiens
  CDR3 for beta chain variable domain of TCR clone 75034 (TRBV11-2, TRBJ2-1)
CASSLYPPGVEYNEQFF

SEQ ID NO: 150069 - protein, 16 aa, Homo sapiens
  CDR3 for alpha chain variable domain of TCR clone 75035 (TRAV17, TRAJ22)
CATGPISSGSARQLAF

SEQ ID NO: 150070 - protein, 15 aa, Homo sapiens
  CDR3 for beta chain variable domain of TCR clone 75035 (TRBV11-1, TRBJ2-7)
CASSLNYGASYEQYF

SEQ ID NO: 150071 - protein, 13 aa, Homo sapiens
  CDR3 for alpha chain variable domain of TCR clone 75036 (TRAV12-3, TRAJ33)
CAMSVNSNYQLIW

SEQ ID NO: 150072 - protein, 16 aa, Homo sapiens
  CDR3 for beta chain variable domain of TCR clone 75036 (TRBV13, TRBJ2-5)
CASSLRTGGSWDTQYF

SEQ ID NO: 150073 - protein, 18 aa, Homo sapiens
  CDR3 for alpha chain variable domain of TCR clone 75037 (TRAV17, TRAJ45)
CATSLDLYSGGGADGLNF

SEQ ID NO: 150074 - protein, 15 aa, Homo sapiens
  CDR3 for beta chain variable domain of TCR clone 75037 (TRBV11-2, TRBJ2-1)
CASSKNRGLIYEQFF

SEQ ID NO: 150075 - protein, 15 aa, Homo sapiens
  CDR3 for alpha chain variable domain of TCR clone 75038 (TRAV2, TRAJ22)
CAVPSRGGSARQLTF

SEQ ID NO: 150076 - protein, 16 aa, Homo sapiens
  CDR3 for beta chain variable domain of TCR clone 75038 (TRBV12-5, TRBJ2-5)
CASGPRTSGNQETQYF

SEQ ID NO: 150077 - protein, 13 aa, Homo sapiens
  CDR3 for alpha chain variable domain of TCR clone 75039 (TRAV17, TRAJ9)
CATFLTGGFKTIF

SEQ ID NO: 150078 - protein, 16 aa, Homo sapiens
  CDR3 for beta chain variable domain of TCR clone 75039 (TRBV5-7, TRBJ1-4)
CASSPSGGLKTENLFF

SEQ ID NO: 150079 - protein, 11 aa, Homo sapiens
  CDR3 for alpha chain variable domain of TCR clone 75040 (TRAV12-1, TRAJ30)
CVVNGQDKIIF

SEQ ID NO: 150080 - protein, 17 aa, Homo sapiens
  CDR3 for beta chain variable domain of TCR clone 75040 (TRBV7-8, TRBJ2-6)
CASSAGTGGAGANVLTF

SEQ ID NO: 150081 - protein, 23 aa, Homo sapiens
  CDR3 for alpha chain variable domain of TCR clone 75041 (TRAV8-4, TRAJ38)
CARLNAGNNHIQNPAPAVYQLRD

SEQ ID NO: 150082 - protein, 14 aa, Homo sapiens
  CDR3 for beta chain variable domain of TCR clone 75041 (TRBV7-8, TRBJ2-3)
CASSLEAGTDTQYF

SEQ ID NO: 150083 - protein, 12 aa, Homo sapiens
  CDR3 for alpha chain variable domain of TCR clone 75042 (TRAV12-2, TRAJ7)
CAVMGGNNRLAF

SEQ ID NO: 150084 - protein, 17 aa, Homo sapiens
  CDR3 for beta chain variable domain of TCR clone 75042 (TRBV7-9, TRBJ2-3)
CASSPTVAGDLTDTQYF

SEQ ID NO: 150085 - protein, 16 aa, Homo sapiens
  CDR3 for alpha chain variable domain of TCR clone 75043 (TRAV30, TRAJ24)
CGTEIVDADSWGKFQF

SEQ ID NO: 150086 - protein, 17 aa, Homo sapiens
  CDR3 for beta chain variable domain of TCR clone 75043 (TRBV7-9, TRBJ1-1)
CASSSPPGQGQNTEAFF

SEQ ID NO: 150087 - protein, 17 aa, Homo sapiens
  CDR3 for alpha chain variable domain of TCR clone 75044 (TRAV35, TRAJ28)
CAGLQLYSGAGSYQLTF

SEQ ID NO: 150088 - protein, 15 aa, Homo sapiens
  CDR3 for beta chain variable domain of TCR clone 75044 (TRBV2, TRBJ1-2)
CASSEIGGANYGYTF

SEQ ID NO: 150089 - protein, 17 aa, Homo sapiens
  CDR3 for alpha chain variable domain of TCR clone 75045 (TRAV8-4, TRAJ11)
CAVSDRGENSGYSTLTF

SEQ ID NO: 150090 - protein, 14 aa, Homo sapiens
  CDR3 for beta chain variable domain of TCR clone 75045 (TRBV20-1, TRBJ2-1)
CSPNDEASYNEQFL

SEQ ID NO: 150091 - protein, 14 aa, Homo sapiens
  CDR3 for alpha chain variable domain of TCR clone 75046 (TRAV16, TRAJ37)
CALDISGNTGKLIF

SEQ ID NO: 150092 - protein, 14 aa, Homo sapiens
  CDR3 for beta chain variable domain of TCR clone 75046 (TRBV19, TRBJ2-1)
CASPTFILSGEQFF

SEQ ID NO: 150093 - protein, 15 aa, Homo sapiens
  CDR3 for alpha chain variable domain of TCR clone 75047 (TRAV16, TRAJ16)
CAPQGGGSDGQKLLF

SEQ ID NO: 150094 - protein, 15 aa, Homo sapiens
  CDR3 for beta chain variable domain of TCR clone 75047 (TRBV20-1, TRBJ2-7)
CSARDRVSGMDEQYF

SEQ ID NO: 150095 - protein, 17 aa, Homo sapiens
  CDR3 for alpha chain variable domain of TCR clone 75048 (TRAV3, TRAJ6)
CAVIDGPRAGGSYIPTF

SEQ ID NO: 150096 - protein, 13 aa, Homo sapiens
  CDR3 for beta chain variable domain of TCR clone 75048 (TRBV4-1, TRBJ2-2)
CASSQENTGELFF

SEQ ID NO: 150097 - protein, 14 aa, Homo sapiens
  CDR3 for alpha chain variable domain of TCR clone 75049 (TRAV10, TRAJ34)
CVVSRGGDTDKLIF

SEQ ID NO: 150098 - protein, 17 aa, Homo sapiens
  CDR3 for beta chain variable domain of TCR clone 75049 (TRBV6-3, TRBJ2-3)
CASRRPLGGGRTDTQYF

SEQ ID NO: 150099 - protein, 17 aa, Homo sapiens
  CDR3 for alpha chain variable domain of TCR clone 75050 (TRAV17, TRAJ28)
CATDPRRGGAGSFQLTF

SEQ ID NO: 150100 - protein, 16 aa, Homo sapiens
  CDR3 for beta chain variable domain of TCR clone 75050 (TRBV25-1, TRBJ1-1)
CASSGDRDRGRIEAFF

SEQ ID NO: 150101 - protein, 11 aa, Homo sapiens
  CDR3 for alpha chain variable domain of TCR clone 75051 (TRAV14/DV4, TRAJ31)
CAMGENARLMF

SEQ ID NO: 150102 - protein, 15 aa, Homo sapiens
  CDR3 for beta chain variable domain of TCR clone 75051 (TRBV19, TRBJ2-1)
CASSLETSGYNEQFF

SEQ ID NO: 150103 - protein, 12 aa, Homo sapiens
  CDR3 for alpha chain variable domain of TCR clone 75052 (TRAV12-1, TRAJ40)
CVVSSGTYKYIF

SEQ ID NO: 150104 - protein, 14 aa, Homo sapiens
  CDR3 for beta chain variable domain of TCR clone 75052 (TRBV20-1, TRBJ2-2)
CSAPDTANTGELFY

SEQ ID NO: 150105 - protein, 14 aa, Homo sapiens
  CDR3 for alpha chain variable domain of TCR clone 75053 (TRAV12-3, TRAJ10)
SHLPLTGGGNKLTF

SEQ ID NO: 150106 - protein, 11 aa, Homo sapiens
  CDR3 for beta chain variable domain of TCR clone 75053 (TRBV12-3, TRBJ2-3)
CASTATDTQYF

SEQ ID NO: 150107 - protein, 14 aa, Homo sapiens
  CDR3 for alpha chain variable domain of TCR clone 75054 (TRAV2, TRAJ37)
CAVDFTSNTGKLIF

SEQ ID NO: 150108 - protein, 15 aa, Homo sapiens
  CDR3 for beta chain variable domain of TCR clone 75054 (TRBV20-1, TRBJ1-1)
CSASRGVTGDTEAFL

SEQ ID NO: 150109 - protein, 18 aa, Homo sapiens
  CDR3 for alpha chain variable domain of TCR clone 75055 (TRAV13-1, TRAJ52)
CAAKNPNAGGTSYGKLTF

SEQ ID NO: 150110 - protein, 13 aa, Homo sapiens
  CDR3 for beta chain variable domain of TCR clone 75055 (TRBV10-3, TRBJ2-7)
CASKLAVNYEQYF

SEQ ID NO: 150111 - protein, 20 aa, Homo sapiens
  CDR3 for alpha chain variable domain of TCR clone 75056 (TRAV4, TRAJ29)
CCVLLPRGCVPFSGNTPLVF

SEQ ID NO: 150112 - protein, 13 aa, Homo sapiens
  CDR3 for beta chain variable domain of TCR clone 75056 (TRBV11-2, TRBJ2-1)
CASSLRLTHEQFF

SEQ ID NO: 150113 - protein, 15 aa, Homo sapiens
  CDR3 for alpha chain variable domain of TCR clone 75057 (TRAV12-1, TRAJ44)
CVVFVNTGTASKLTF

SEQ ID NO: 150114 - protein, 17 aa, Homo sapiens
  CDR3 for beta chain variable domain of TCR clone 75057 (TRBV7-8, TRBJ2-6)
CASSAWTGGAGANVLTF

SEQ ID NO: 150115 - protein, 17 aa, Homo sapiens
  CDR3 for alpha chain variable domain of TCR clone 75058 (TRAV13-1, )
CAANIQNPDPAVYQLRD

SEQ ID NO: 150116 - protein, 13 aa, Homo sapiens
  CDR3 for beta chain variable domain of TCR clone 75058 (TRBV7-3, TRBJ1-1)
CASSQDWGAEAFF

SEQ ID NO: 150117 - protein, 13 aa, Homo sapiens
  CDR3 for alpha chain variable domain of TCR clone 75059 (TRAV8-4, TRAJ9)
CAVSETGGFKTIF

SEQ ID NO: 150118 - protein, 14 aa, Homo sapiens
  CDR3 for beta chain variable domain of TCR clone 75059 (TRBV13, TRBJ2-5)
CASSLGRVGETQYF

SEQ ID NO: 150119 - protein, 17 aa, Homo sapiens
  CDR3 for alpha chain variable domain of TCR clone 75060 (TRAV26-2, TRAJ42)
CILRDESYGGSQGNLIF

SEQ ID NO: 150120 - protein, 13 aa, Homo sapiens
  CDR3 for beta chain variable domain of TCR clone 75060 (TRBV20-1, TRBJ1-1)
CSAGTVGNAEAFF

SEQ ID NO: 150121 - protein, 12 aa, Homo sapiens
  CDR3 for alpha chain variable domain of TCR clone 75061 (TRAV13-1, TRAJ21)
CAAKEGFNKFYF

SEQ ID NO: 150122 - protein, 14 aa, Homo sapiens
  CDR3 for beta chain variable domain of TCR clone 75061 (TRBV23-1, TRBJ2-5)
CASSFLRPQETQYF

SEQ ID NO: 150123 - protein, 16 aa, Homo sapiens
  CDR3 for alpha chain variable domain of TCR clone 75062 (TRAV12-3, TRAJ53)
CAMSPGSGGSNYKLTF

SEQ ID NO: 150124 - protein, 15 aa, Homo sapiens
  CDR3 for beta chain variable domain of TCR clone 75062 (TRBV12-4, TRBJ2-5)
CASSPPTGLQETQYF

SEQ ID NO: 150125 - protein, 12 aa, Homo sapiens
  CDR3 for alpha chain variable domain of TCR clone 75063 (TRAV13-1, TRAJ27)
CAAHTNAGKSTL

SEQ ID NO: 150126 - protein, 14 aa, Homo sapiens
  CDR3 for beta chain variable domain of TCR clone 75063 (TRBV19, TRBJ2-2)
CTSSGQGIAGELFF

SEQ ID NO: 150127 - protein, 17 aa, Homo sapiens
  CDR3 for alpha chain variable domain of TCR clone 75064 (TRAV23/DV6, TRAJ57)
CAASSTLSQGGSEKLVF

SEQ ID NO: 150128 - protein, 17 aa, Homo sapiens
  CDR3 for beta chain variable domain of TCR clone 75064 (TRBV25-1, TRBJ1-1)
SAPLCQHPPGGNTEAFF

SEQ ID NO: 150129 - protein, 12 aa, Homo sapiens
  CDR3 for alpha chain variable domain of TCR clone 75065 (TRAV12-3, TRAJ17)
CAMTLTGNKLTF

SEQ ID NO: 150130 - protein, 17 aa, Homo sapiens
  CDR3 for beta chain variable domain of TCR clone 75065 (TRBV7-9, TRBJ2-3)
CASSPTVAGDLTDTQYF

SEQ ID NO: 150131 - protein, 16 aa, Homo sapiens
  CDR3 for alpha chain variable domain of TCR clone 75066 (TRAV16, TRAJ4)
CALCRMFSGGYNKLIF

SEQ ID NO: 150132 - protein, 14 aa, Homo sapiens
  CDR3 for beta chain variable domain of TCR clone 75066 (TRBV4-1, TRBJ2-2)
CASSQAVNTGELFF

SEQ ID NO: 150133 - protein, 18 aa, Homo sapiens
  CDR3 for alpha chain variable domain of TCR clone 75067 (TRAV29/DV5, TRAJ52)
CAAGFRGAGGTSYGKLTF

SEQ ID NO: 150134 - protein, 15 aa, Homo sapiens
  CDR3 for beta chain variable domain of TCR clone 75067 (TRBV7-3, TRBJ2-2)
CQQLKAGTLSGELFF

SEQ ID NO: 150135 - protein, 13 aa, Homo sapiens
  CDR3 for alpha chain variable domain of TCR clone 75068 (TRAV21, TRAJ11)
CAVPNSGYSTLTF

SEQ ID NO: 150136 - protein, 13 aa, Homo sapiens
  CDR3 for beta chain variable domain of TCR clone 75068 (TRBV27, TRBJ1-1)
CASSLSIGAEAFF

SEQ ID NO: 150137 - protein, 15 aa, Homo sapiens
  CDR3 for alpha chain variable domain of TCR clone 75069 (TRAV13-1, TRAJ57)
QVPPLSQGGSEKLVF

SEQ ID NO: 150138 - protein, 16 aa, Homo sapiens
  CDR3 for beta chain variable domain of TCR clone 75069 (TRBV19, TRBJ2-1)
CASSKAGPSSYNEQFF

SEQ ID NO: 150139 - protein, 14 aa, Homo sapiens
  CDR3 for alpha chain variable domain of TCR clone 75070 (TRAV16, TRAJ37)
CALDISGNTGKLIF

SEQ ID NO: 150140 - protein, 16 aa, Homo sapiens
  CDR3 for beta chain variable domain of TCR clone 75070 (TRBV19, TRBJ2-1)
CASSKAGPSSYNEQFF

SEQ ID NO: 150141 - protein, 14 aa, Homo sapiens
  CDR3 for alpha chain variable domain of TCR clone 75071 (TRAV16, TRAJ33)
CALSAMDSNYQLIW

SEQ ID NO: 150142 - protein, 14 aa, Homo sapiens
  CDR3 for beta chain variable domain of TCR clone 75071 (TRBV20-1, TRBJ2-7)
CSAKTGTGGYEQYF

SEQ ID NO: 150143 - protein, 15 aa, Homo sapiens
  CDR3 for alpha chain variable domain of TCR clone 75072 (TRAV27, TRAJ38)
CAARRNAGNNRKLIW

SEQ ID NO: 150144 - protein, 14 aa, Homo sapiens
  CDR3 for beta chain variable domain of TCR clone 75072 (TRBV7-9, TRBJ2-1)
CASSPRDSLYEQFF

SEQ ID NO: 150145 - protein, 13 aa, Homo sapiens
  CDR3 for alpha chain variable domain of TCR clone 75073 (TRAV20, TRAJ34)
CAVRSYNTDKLIF

SEQ ID NO: 150146 - protein, 11 aa, Homo sapiens
  CDR3 for beta chain variable domain of TCR clone 75073 (TRBV11-2, TRBJ2-1)
CQQPGNNEQFF

SEQ ID NO: 150147 - protein, 12 aa, Homo sapiens
  CDR3 for alpha chain variable domain of TCR clone 75074 (TRAV17, TRAJ49)
CATVTTGNQFYF

SEQ ID NO: 150148 - protein, 15 aa, Homo sapiens
  CDR3 for beta chain variable domain of TCR clone 75074 (TRBV6-5, TRBJ2-1)
CASSYDAGAGNEQFF

SEQ ID NO: 150149 - protein, 17 aa, Homo sapiens
  CDR3 for alpha chain variable domain of TCR clone 75075 (TRAV3, TRAJ38)
CAVRDCLNAGNNRKLIW

SEQ ID NO: 150150 - protein, 13 aa, Homo sapiens
  CDR3 for beta chain variable domain of TCR clone 75075 (TRBV3-1, TRBJ1-1)
CASSPGVITEAFF

SEQ ID NO: 150151 - protein, 11 aa, Homo sapiens
  CDR3 for alpha chain variable domain of TCR clone 75076 (TRAV2, TRAJ33)
CAVDSNYQLIW

SEQ ID NO: 150152 - protein, 13 aa, Homo sapiens
  CDR3 for beta chain variable domain of TCR clone 75076 (TRBV7-6, TRBJ1-2)
CASSLVADYGYTF

SEQ ID NO: 150153 - protein, 15 aa, Homo sapiens
  CDR3 for alpha chain variable domain of TCR clone 75077 (TRAV12-1, TRAJ44)
CVVDEYTGTASKLTF

SEQ ID NO: 150154 - protein, 14 aa, Homo sapiens
  CDR3 for beta chain variable domain of TCR clone 75077 (TRBV5-1, TRBJ1-2)
CASSLEPVNYGYTS

SEQ ID NO: 150155 - protein, 12 aa, Homo sapiens
  CDR3 for alpha chain variable domain of TCR clone 75078 (TRAV12-3, TRAJ3)
CAIDSSASKIIF

SEQ ID NO: 150156 - protein, 17 aa, Homo sapiens
  CDR3 for beta chain variable domain of TCR clone 75078 (TRBV7-9, TRBJ2-3)
CASSLEETGAYPDTQYF

SEQ ID NO: 150157 - protein, 11 aa, Homo sapiens
  CDR3 for alpha chain variable domain of TCR clone 75079 (TRAV12-3, TRAJ43)
CAMSVSNGMRF

SEQ ID NO: 150158 - protein, 14 aa, Homo sapiens
  CDR3 for beta chain variable domain of TCR clone 75079 (TRBV12-5, TRBJ2-5)
CASGSRTHQETQYF

SEQ ID NO: 150159 - protein, 13 aa, Homo sapiens
  CDR3 for alpha chain variable domain of TCR clone 75080 (TRAV21, TRAJ57)
CAVTQGGSEKLVF

SEQ ID NO: 150160 - protein, 12 aa, Homo sapiens
  CDR3 for beta chain variable domain of TCR clone 75080 (TRBV19, TRBJ1-1)
CASSTTGIEAFF

SEQ ID NO: 150161 - protein, 13 aa, Homo sapiens
  CDR3 for alpha chain variable domain of TCR clone 75081 (TRAV13-1, TRAJ48)
CAAASFGNEKLTF

SEQ ID NO: 150162 - protein, 12 aa, Homo sapiens
  CDR3 for beta chain variable domain of TCR clone 75081 (TRBV19, TRBJ1-1)
CASMNRYTEAFF

SEQ ID NO: 150163 - protein, 13 aa, Homo sapiens
  CDR3 for alpha chain variable domain of TCR clone 75082 (TRAV27, TRAJ6)
CAGGTRGSDIPTF

SEQ ID NO: 150164 - protein, 15 aa, Homo sapiens
  CDR3 for beta chain variable domain of TCR clone 75082 (TRBV11-2, TRBJ1-3)
CASSLSPLVRDTIYF

SEQ ID NO: 150165 - protein, 12 aa, Homo sapiens
  CDR3 for alpha chain variable domain of TCR clone 75083 (TRAV12-2, TRAJ36)
CAAPRGANNLSF

SEQ ID NO: 150166 - protein, 12 aa, Homo sapiens
  CDR3 for beta chain variable domain of TCR clone 75083 (TRBV6-3, TRBJ2-7)
CASSLTPYEQYF

SEQ ID NO: 150167 - protein, 17 aa, Homo sapiens
  CDR3 for alpha chain variable domain of TCR clone 75084 (TRAV3, TRAJ6)
CAVRDGPRAGGSYIPTF

SEQ ID NO: 150168 - protein, 14 aa, Homo sapiens
  CDR3 for beta chain variable domain of TCR clone 75084 (TRBV15, TRBJ2-7)
CATSRVARGYEQYF

SEQ ID NO: 150169 - protein, 15 aa, Homo sapiens
  CDR3 for alpha chain variable domain of TCR clone 75085 (TRAV21, TRAJ23)
CAPNRVYNQGGKLIF

SEQ ID NO: 150170 - protein, 15 aa, Homo sapiens
  CDR3 for beta chain variable domain of TCR clone 75085 (TRBV9, TRBJ1-6)
CASSVAGTGDSPLHF

SEQ ID NO: 150171 - protein, 13 aa, Homo sapiens
  CDR3 for alpha chain variable domain of TCR clone 75086 (TRAV27, TRAJ45)
CRSSGGGADGLTF

SEQ ID NO: 150172 - protein, 12 aa, Homo sapiens
  CDR3 for beta chain variable domain of TCR clone 75086 (TRBV5-1, TRBJ2-5)
CASSWDQETQYF

SEQ ID NO: 150173 - protein, 14 aa, Homo sapiens
  CDR3 for alpha chain variable domain of TCR clone 75087 (TRAV1-2, TRAJ16)
CAVNRFSDGQKLLF

SEQ ID NO: 150174 - protein, 16 aa, Homo sapiens
  CDR3 for beta chain variable domain of TCR clone 75087 (TRBV4-1, TRBJ2-7)
CASSQEWTSGPLEQYF

SEQ ID NO: 150175 - protein, 12 aa, Homo sapiens
  CDR3 for alpha chain variable domain of TCR clone 75088 (TRAV30, TRAJ43)
CGTEERGNDMRF

SEQ ID NO: 150176 - protein, 12 aa, Homo sapiens
  CDR3 for beta chain variable domain of TCR clone 75088 (TRBV11-2, TRBJ2-5)
CASSLGQETQYF

SEQ ID NO: 150177 - protein, 12 aa, Homo sapiens
  CDR3 for alpha chain variable domain of TCR clone 75089 (TRAV12-3, TRAJ17)
CAMTLTGNKLTF

SEQ ID NO: 150178 - protein, 13 aa, Homo sapiens
  CDR3 for beta chain variable domain of TCR clone 75089 (TRBV6-1, TRBJ1-2)
CASSAREGYGYTF

SEQ ID NO: 150179 - protein, 10 aa, Homo sapiens
  CDR3 for alpha chain variable domain of TCR clone 75090 (TRAV5, TRAJ34)
CAEDTDKLTF

SEQ ID NO: 150180 - protein, 20 aa, Homo sapiens
  CDR3 for beta chain variable domain of TCR clone 75090 (TRBV11-2, TRBJ2-2)
LRTRPCISVPAALEAGSCFF

SEQ ID NO: 150181 - protein, 11 aa, Homo sapiens
  CDR3 for alpha chain variable domain of TCR clone 75091 (TRAV2, TRAJ33)
CAVDSNYQLIW

SEQ ID NO: 150182 - protein, 12 aa, Homo sapiens
  CDR3 for beta chain variable domain of TCR clone 75091 (TRBV7-9, TRBJ2-7)
CASSIKREEQYF

SEQ ID NO: 150183 - protein, 11 aa, Homo sapiens
  CDR3 for alpha chain variable domain of TCR clone 75092 (TRAV3, TRAJ21)
CAVGNFNKFYF

SEQ ID NO: 150184 - protein, 14 aa, Homo sapiens
  CDR3 for beta chain variable domain of TCR clone 75092 (TRBV11-2, TRBJ2-7)
CASSLGAGAYEQYF

SEQ ID NO: 150185 - protein, 13 aa, Homo sapiens
  CDR3 for alpha chain variable domain of TCR clone 75093 (TRAV8-3, TRAJ34)
CAVGAYNTDKLIF

SEQ ID NO: 150186 - protein, 11 aa, Homo sapiens
  CDR3 for beta chain variable domain of TCR clone 75093 (TRBV7-3, TRBJ1-2)
CASSLGDGNTF

SEQ ID NO: 150187 - protein, 16 aa, Homo sapiens
  CDR3 for alpha chain variable domain of TCR clone 75094 (TRAV20, TRAJ52)
CAVQAAGGTSYGKLTF

SEQ ID NO: 150188 - protein, 15 aa, Homo sapiens
  CDR3 for beta chain variable domain of TCR clone 75094 (TRBV10-2, TRBJ2-5)
CASSEPDRVQETQYF

SEQ ID NO: 150189 - protein, 23 aa, Homo sapiens
  CDR3 for alpha chain variable domain of TCR clone 75095 (TRAV26-1, TRAJ38)
CIADNAGNNHIQNPDPAVYQLRV

SEQ ID NO: 150190 - protein, 13 aa, Homo sapiens
  CDR3 for beta chain variable domain of TCR clone 75095 (TRBV20-1, TRBJ1-1)
CSARGGGNTEAFF

SEQ ID NO: 150191 - protein, 23 aa, Homo sapiens
  CDR3 for alpha chain variable domain of TCR clone 75096 (TRAV12-2, TRAJ43)
SLLIRDSQPSDSTTYLCAFDMRF

SEQ ID NO: 150192 - protein, 18 aa, Homo sapiens
  CDR3 for beta chain variable domain of TCR clone 75096 (TRBV20-1, TRBJ2-3)
CSASGLAGGPGTTDTQYF

SEQ ID NO: 150193 - protein, 11 aa, Homo sapiens
  CDR3 for alpha chain variable domain of TCR clone 75097 (TRAV12-1, TRAJ43)
CVEYDNNDMRF

SEQ ID NO: 150194 - protein, 15 aa, Homo sapiens
  CDR3 for beta chain variable domain of TCR clone 75097 (TRBV18, TRBJ2-5)
CASSPRASEADTQYF

SEQ ID NO: 150195 - protein, 17 aa, Homo sapiens
  CDR3 for alpha chain variable domain of TCR clone 75098 (TRAV13-1, TRAJ53)
CAASWKSSGGSNYKLTF

SEQ ID NO: 150196 - protein, 19 aa, Homo sapiens
  CDR3 for beta chain variable domain of TCR clone 75098 (TRBV7-9, TRBJ2-1)
CDSSHNRGALLRSYNEQFF

SEQ ID NO: 150197 - protein, 14 aa, Homo sapiens
  CDR3 for alpha chain variable domain of TCR clone 75099 (TRAV2, TRAJ22)
CAVGRGGPARQLTF

SEQ ID NO: 150198 - protein, 14 aa, Homo sapiens
  CDR3 for beta chain variable domain of TCR clone 75099 (TRBV19, TRBJ2-1)
CASPTFVLSGEQFF

SEQ ID NO: 150199 - protein, 15 aa, Homo sapiens
  CDR3 for alpha chain variable domain of TCR clone 75100 (TRAV4, TRAJ39)
CLVGPNNNAGNMLTS

SEQ ID NO: 150200 - protein, 14 aa, Homo sapiens
  CDR3 for beta chain variable domain of TCR clone 75100 (TRBV19, TRBJ2-1)
CASPTFVLSGEQFF

SEQ ID NO: 150201 - protein, 12 aa, Homo sapiens
  CDR3 for alpha chain variable domain of TCR clone 75101 (TRAV13-2, TRAJ23)
CAERHRGGKLIF

SEQ ID NO: 150202 - protein, 16 aa, Homo sapiens
  CDR3 for beta chain variable domain of TCR clone 75101 (TRBV4-2, TRBJ2-3)
CASSQELAGDTDTQYF

SEQ ID NO: 150203 - protein, 15 aa, Homo sapiens
  CDR3 for alpha chain variable domain of TCR clone 75102 (TRAV4, TRAJ36)
CLVGDRQTGANNLFF

SEQ ID NO: 150204 - protein, 16 aa, Homo sapiens
  CDR3 for beta chain variable domain of TCR clone 75102 (TRBV9, TRBJ2-1)
CASSVGGGGNYNEQFF

SEQ ID NO: 150205 - protein, 13 aa, Homo sapiens
  CDR3 for alpha chain variable domain of TCR clone 75103 (TRAV27, TRAJ29)
CAGAHSGNTPLVF

SEQ ID NO: 150206 - protein, 14 aa, Homo sapiens
  CDR3 for beta chain variable domain of TCR clone 75103 (TRBV7-9, TRBJ2-7)
CASRIGQGAGEQYF

SEQ ID NO: 150207 - protein, 14 aa, Homo sapiens
  CDR3 for alpha chain variable domain of TCR clone 75104 (TRAV1-2, TRAJ15)
CAVRDRQAGTALIF

SEQ ID NO: 150208 - protein, 13 aa, Homo sapiens
  CDR3 for beta chain variable domain of TCR clone 75104 (TRBV12-5, TRBJ2-3)
CASGDRQSDTQYF

SEQ ID NO: 150209 - protein, 14 aa, Homo sapiens
  CDR3 for alpha chain variable domain of TCR clone 75105 (TRAV2, TRAJ37)
CAVDFTSNTGKLIF

SEQ ID NO: 150210 - protein, 15 aa, Homo sapiens
  CDR3 for beta chain variable domain of TCR clone 75105 (TRBV10-3, TRBJ2-1)
CAISDVQDRAYEQFF

SEQ ID NO: 150211 - protein, 13 aa, Homo sapiens
  CDR3 for alpha chain variable domain of TCR clone 75106 (TRAV38-2/DV8, TRAJ34)
CAYRTWNTDKLIF

SEQ ID NO: 150212 - protein, 16 aa, Homo sapiens
  CDR3 for beta chain variable domain of TCR clone 75106 (TRBV11-2, TRBJ1-2)
CASSLDTGGADYGYTF

SEQ ID NO: 150213 - protein, 12 aa, Homo sapiens
  CDR3 for alpha chain variable domain of TCR clone 75107 (TRAV1-1, TRAJ43)
CAPRVSSNDMRF

SEQ ID NO: 150214 - protein, 20 aa, Homo sapiens
  CDR3 for beta chain variable domain of TCR clone 75107 (TRBV28, TRBJ2-1)
CASTPIGRSPGLAGGNEQFF

SEQ ID NO: 150215 - protein, 15 aa, Homo sapiens
  CDR3 for alpha chain variable domain of TCR clone 75108 (TRAV8-3, TRAJ45)
CASSYSGGGADGLTF

SEQ ID NO: 150216 - protein, 13 aa, Homo sapiens
  CDR3 for beta chain variable domain of TCR clone 75108 (TRBV25-1, TRBJ2-2)
CASRKANTGELFF

SEQ ID NO: 150217 - protein, 12 aa, Homo sapiens
  CDR3 for alpha chain variable domain of TCR clone 75109 (TRAV1-1, TRAJ8)
CAGGTGFQKLVF

SEQ ID NO: 150218 - protein, 13 aa, Homo sapiens
  CDR3 for beta chain variable domain of TCR clone 75109 (TRBV7-9, TRBJ2-3)
CASSPGSTDTQYF

SEQ ID NO: 150219 - protein, 15 aa, Homo sapiens
  CDR3 for alpha chain variable domain of TCR clone 75110 (TRAV38-1, TRAJ57)
CAFMDSQGGSEKLVF

SEQ ID NO: 150220 - protein, 19 aa, Homo sapiens
  CDR3 for beta chain variable domain of TCR clone 75110 (TRBV10-3, TRBJ2-1)
CTSVPSGGGGRGDYNEQFF

SEQ ID NO: 150221 - protein, 14 aa, Homo sapiens
  CDR3 for alpha chain variable domain of TCR clone 75111 (TRAV1-2, TRAJ16)
CAANRFSDGQKLLF

SEQ ID NO: 150222 - protein, 13 aa, Homo sapiens
  CDR3 for beta chain variable domain of TCR clone 75111 (TRBV20-1, TRBJ1-1)
CSARGGGNTEAFF

SEQ ID NO: 150223 - protein, 14 aa, Homo sapiens
  CDR3 for alpha chain variable domain of TCR clone 75112 (TRAV20, TRAJ9)
CAEQASTGGFKTIF

SEQ ID NO: 150224 - protein, 14 aa, Homo sapiens
  CDR3 for beta chain variable domain of TCR clone 75112 (TRBV12-5, TRBJ1-6)
CASRVGQINSPLHF

SEQ ID NO: 150225 - protein, 11 aa, Homo sapiens
  CDR3 for alpha chain variable domain of TCR clone 75113 (TRAV1-1, TRAJ23)
CAVRQGGKLIF

SEQ ID NO: 150226 - protein, 20 aa, Homo sapiens
  CDR3 for beta chain variable domain of TCR clone 75113 (TRBV7-8, TRBJ2-2)
CASSHLFRGPTIHITGELFF

SEQ ID NO: 150227 - protein, 11 aa, Homo sapiens
  CDR3 for alpha chain variable domain of TCR clone 75114 (TRAV3, TRAJ21)
CAVGNFNKFYF

SEQ ID NO: 150228 - protein, 14 aa, Homo sapiens
  CDR3 for beta chain variable domain of TCR clone 75114 (TRBV20-1, TRBJ2-2)
CSAPDTANTGELFF

SEQ ID NO: 150229 - protein, 14 aa, Homo sapiens
  CDR3 for alpha chain variable domain of TCR clone 75115 (TRAV26-1, TRAJ54)
CIVRRTQGAQKLVF

SEQ ID NO: 150230 - protein, 16 aa, Homo sapiens
  CDR3 for beta chain variable domain of TCR clone 75115 (TRBV25-1, TRBJ1-1)
CASSGDRDRGRIEAFF

SEQ ID NO: 150231 - protein, 13 aa, Homo sapiens
  CDR3 for alpha chain variable domain of TCR clone 75116 (TRAV2, TRAJ5)
CAVPDTGRRALTF

SEQ ID NO: 150232 - protein, 15 aa, Homo sapiens
  CDR3 for beta chain variable domain of TCR clone 75116 (TRBV7-2, TRBJ2-2)
CASSTSTGYTGELFF

SEQ ID NO: 150233 - protein, 15 aa, Homo sapiens
  CDR3 for alpha chain variable domain of TCR clone 75117 (TRAV8-3, TRAJ32)
CAVGPYGGATNKLVF

SEQ ID NO: 150234 - protein, 14 aa, Homo sapiens
  CDR3 for beta chain variable domain of TCR clone 75117 (TRBV29-1, TRBJ2-2)
CSVLAETNTGELFF

SEQ ID NO: 150235 - protein, 12 aa, Homo sapiens
  CDR3 for alpha chain variable domain of TCR clone 75118 (TRAV12-2, TRAJ10)
WGVTGGGNKLTF

SEQ ID NO: 150236 - protein, 13 aa, Homo sapiens
  CDR3 for beta chain variable domain of TCR clone 75118 (TRBV27, TRBJ2-7)
CQRTGTERREQYF

SEQ ID NO: 150237 - protein, 14 aa, Homo sapiens
  CDR3 for alpha chain variable domain of TCR clone 75119 (TRAV14/DV4, TRAJ15)
CAMRRDQAGTALLF

SEQ ID NO: 150238 - protein, 16 aa, Homo sapiens
  CDR3 for beta chain variable domain of TCR clone 75119 (TRBV15, TRBJ2-3)
CATSRDLGIVTDTQYF

SEQ ID NO: 150239 - protein, 15 aa, Homo sapiens
  CDR3 for alpha chain variable domain of TCR clone 75120 (TRAV21, TRAJ24)
CAARSSTDSWGKLQF

SEQ ID NO: 150240 - protein, 17 aa, Homo sapiens
  CDR3 for beta chain variable domain of TCR clone 75120 (TRBV11-2, TRBJ2-5)
CASSSTGEETVLRARHA

SEQ ID NO: 150241 - protein, 14 aa, Homo sapiens
  CDR3 for alpha chain variable domain of TCR clone 75121 (TRAV4, TRAJ26)
CLVGPHNYGQNFVF

SEQ ID NO: 150242 - protein, 17 aa, Homo sapiens
  CDR3 for beta chain variable domain of TCR clone 75121 (TRBV24-1, TRBJ2-1)
CATSDVSTSGTYIEQFF

SEQ ID NO: 150243 - protein, 13 aa, Homo sapiens
  CDR3 for alpha chain variable domain of TCR clone 75122 (TRAV23/DV6, TRAJ16)
CAASTSDGQKLLF

SEQ ID NO: 150244 - protein, 15 aa, Homo sapiens
  CDR3 for beta chain variable domain of TCR clone 75122 (TRBV2, TRBJ2-2)
CASSRETVGTGELFF

SEQ ID NO: 150245 - protein, 15 aa, Homo sapiens
  CDR3 for alpha chain variable domain of TCR clone 75123 (TRAV29/DV5, TRAJ48)
CAASLGGFGNEELTF

SEQ ID NO: 150246 - protein, 11 aa, Homo sapiens
  CDR3 for beta chain variable domain of TCR clone 75123 (TRBV20-1, TRBJ2-3)
CSGTSSTTQYF

SEQ ID NO: 150247 - protein, 13 aa, Homo sapiens
  CDR3 for alpha chain variable domain of TCR clone 75124 (TRAV20, TRAJ20)
CAVRWGRDYKLSF

SEQ ID NO: 150248 - protein, 14 aa, Homo sapiens
  CDR3 for beta chain variable domain of TCR clone 75124 (TRBV19, TRBJ2-2)
CASTVTANTGELFF

SEQ ID NO: 150249 - protein, 13 aa, Homo sapiens
  CDR3 for alpha chain variable domain of TCR clone 75125 (TRAV12-3, TRAJ13)
CAMSSGGYQKVTF

SEQ ID NO: 150250 - protein, 16 aa, Homo sapiens
  CDR3 for beta chain variable domain of TCR clone 75125 (TRBV5-1, TRBJ2-2)
CASSLWDTTNTGELFF

SEQ ID NO: 150251 - protein, 14 aa, Homo sapiens
  CDR3 for alpha chain variable domain of TCR clone 75126 (TRAV4, TRAJ9)
CLVGSGTGGFKTNF

SEQ ID NO: 150252 - protein, 15 aa, Homo sapiens
  CDR3 for beta chain variable domain of TCR clone 75126 (TRBV7-2, TRBJ2-1)
CASSLASGRVNEQFF

SEQ ID NO: 150253 - protein, 13 aa, Homo sapiens
  CDR3 for alpha chain variable domain of TCR clone 75127 (TRAV36/DV7, TRAJ37)
CAVFSSNTGKLIF

SEQ ID NO: 150254 - protein, 15 aa, Homo sapiens
  CDR3 for beta chain variable domain of TCR clone 75127 (TRBV9, TRBJ1-6)
CASSVAGTGDSPLHF

SEQ ID NO: 150255 - protein, 18 aa, Homo sapiens
  CDR3 for alpha chain variable domain of TCR clone 75128 (TRAV21, TRAJ52)
CAGRPSPAGGTSYGKLTF

SEQ ID NO: 150256 - protein, 13 aa, Homo sapiens
  CDR3 for beta chain variable domain of TCR clone 75128 (TRBV2, TRBJ1-5)
CATAGPGNQPQHF

SEQ ID NO: 150257 - protein, 16 aa, Homo sapiens
  CDR3 for alpha chain variable domain of TCR clone 75129 (TRAV3, TRAJ18)
CAVRDGRGSTLGWLYF

SEQ ID NO: 150258 - protein, 15 aa, Homo sapiens
  CDR3 for beta chain variable domain of TCR clone 75129 (TRBV7-9, TRBJ1-6)
CASSSPGRGNSPLHF

SEQ ID NO: 150259 - protein, 14 aa, Homo sapiens
  CDR3 for alpha chain variable domain of TCR clone 75130 (TRAV35, TRAJ33)
CAGSSQDSNYQLIW

SEQ ID NO: 150260 - protein, 15 aa, Homo sapiens
  CDR3 for beta chain variable domain of TCR clone 75130 (TRBV20-1, TRBJ2-7)
CIAESGTSGAYEQYF

SEQ ID NO: 150261 - protein, 14 aa, Homo sapiens
  CDR3 for alpha chain variable domain of TCR clone 75131 (TRAV2, TRAJ9)
CDVEDRSGGFKTIF

SEQ ID NO: 150262 - protein, 14 aa, Homo sapiens
  CDR3 for beta chain variable domain of TCR clone 75131 (TRBV7-6, TRBJ2-3)
CASSLGTVTDTQYF

SEQ ID NO: 150263 - protein, 14 aa, Homo sapiens
  CDR3 for alpha chain variable domain of TCR clone 75132 (TRAV12-2, TRAJ13)
CAVKKTGGYQQVTF

SEQ ID NO: 150264 - protein, 14 aa, Homo sapiens
  CDR3 for beta chain variable domain of TCR clone 75132 (TRBV5-5, TRBJ2-7)
CASSLGQGTYEQYF

SEQ ID NO: 150265 - protein, 15 aa, Homo sapiens
  CDR3 for alpha chain variable domain of TCR clone 75133 (TRAV17, TRAJ16)
CSTALRFSDGQKLLF

SEQ ID NO: 150266 - protein, 12 aa, Homo sapiens
  CDR3 for beta chain variable domain of TCR clone 75133 (TRBV2, TRBJ2-7)
CASSDPDYEQYF

SEQ ID NO: 150267 - protein, 11 aa, Homo sapiens
  CDR3 for alpha chain variable domain of TCR clone 75134 (TRAV26-1, TRAJ37)
CIVRVGRKLIF

SEQ ID NO: 150268 - protein, 14 aa, Homo sapiens
  CDR3 for beta chain variable domain of TCR clone 75134 (TRBV7-6, TRBJ2-3)
CASSLGTVTDTQYF

SEQ ID NO: 150269 - protein, 14 aa, Homo sapiens
  CDR3 for alpha chain variable domain of TCR clone 75135 (TRAV12-3, TRAJ29)
CAMILLLGNTPLVF

SEQ ID NO: 150270 - protein, 16 aa, Homo sapiens
  CDR3 for beta chain variable domain of TCR clone 75135 (TRBV28, TRBJ2-7)
CASSSGTSGRGYEQYF

SEQ ID NO: 150271 - protein, 15 aa, Homo sapiens
  CDR3 for alpha chain variable domain of TCR clone 75136 (TRAV21, TRAJ53)
CATLNSGGSNYKLTF

SEQ ID NO: 150272 - protein, 16 aa, Homo sapiens
  CDR3 for beta chain variable domain of TCR clone 75136 (TRBV7-9, TRBJ2-1)
CASSDVAGGSYNEQFF

SEQ ID NO: 150273 - protein, 19 aa, Homo sapiens
  CDR3 for alpha chain variable domain of TCR clone 75137 (TRAV26-1, TRAJ22)
CRVLLYRWVFSGSARQLTF

SEQ ID NO: 150274 - protein, 19 aa, Homo sapiens
  CDR3 for beta chain variable domain of TCR clone 75137 (TRBV19, TRBJ2-5)
CASSIGQVTDFFLGETQYF

SEQ ID NO: 150275 - protein, 12 aa, Homo sapiens
  CDR3 for alpha chain variable domain of TCR clone 75138 (TRAV17, TRAJ20)
CATYSNDCKLSF

SEQ ID NO: 150276 - protein, 11 aa, Homo sapiens
  CDR3 for beta chain variable domain of TCR clone 75138 (TRBV4-1, TRBJ2-2)
CASEHTGELFF

SEQ ID NO: 150277 - protein, 15 aa, Homo sapiens
  CDR3 for alpha chain variable domain of TCR clone 75139 (TRAV21, TRAJ53)
CATLNSGGSNYKLTF

SEQ ID NO: 150278 - protein, 14 aa, Homo sapiens
  CDR3 for beta chain variable domain of TCR clone 75139 (TRBV27, TRBJ2-2)
CAGRPGVNTGELFF

SEQ ID NO: 150279 - protein, 10 aa, Homo sapiens
  CDR3 for alpha chain variable domain of TCR clone 75140 (TRAV2, TRAJ31)
CAVVDLRITM

SEQ ID NO: 150280 - protein, 15 aa, Homo sapiens
  CDR3 for beta chain variable domain of TCR clone 75140 (TRBV14, TRBJ2-1)
CASSLLAGIYNEQFF

SEQ ID NO: 150281 - protein, 13 aa, Homo sapiens
  CDR3 for alpha chain variable domain of TCR clone 75141 (TRAV27, TRAJ29)
CAGAHSGNTPLVF

SEQ ID NO: 150282 - protein, 14 aa, Homo sapiens
  CDR3 for beta chain variable domain of TCR clone 75141 (TRBV7-9, TRBJ2-7)
CASSSGQGAGEQYF

SEQ ID NO: 150283 - protein, 18 aa, Homo sapiens
  CDR3 for alpha chain variable domain of TCR clone 75142 (TRAV21, TRAJ52)
CAVRPSPAGGTSYGKLTF

SEQ ID NO: 150284 - protein, 13 aa, Homo sapiens
  CDR3 for beta chain variable domain of TCR clone 75142 (TRBV6-4, TRBJ1-5)
CASSADLNQPQHF

SEQ ID NO: 150285 - protein, 16 aa, Homo sapiens
  CDR3 for alpha chain variable domain of TCR clone 75143 (TRAV1-2, TRAJ10)
CAVRGVLTGGGNKLTF

SEQ ID NO: 150286 - protein, 16 aa, Homo sapiens
  CDR3 for beta chain variable domain of TCR clone 75143 (TRBV4-2, TRBJ2-5)
CASSRELVGSQETQYF

SEQ ID NO: 150287 - protein, 13 aa, Homo sapiens
  CDR3 for alpha chain variable domain of TCR clone 75144 (TRAV12-3, TRAJ54)
CAMTLQGAQKLVF

SEQ ID NO: 150288 - protein, 14 aa, Homo sapiens
  CDR3 for beta chain variable domain of TCR clone 75144 (TRBV4-1, TRBJ2-2)
CASSQAVNTGELVF

SEQ ID NO: 150289 - protein, 14 aa, Homo sapiens
  CDR3 for alpha chain variable domain of TCR clone 75145 (TRAV26-1, TRAJ45)
CIEVTGGGADGLTF

SEQ ID NO: 150290 - protein, 16 aa, Homo sapiens
  CDR3 for beta chain variable domain of TCR clone 75145 (TRBV20-1, TRBJ1-4)
CSAPGQGLLTNEKLFF

SEQ ID NO: 150291 - protein, 14 aa, Homo sapiens
  CDR3 for alpha chain variable domain of TCR clone 75146 (TRAV1-2, TRAJ16)
CAVNRFSDGQKLLF

SEQ ID NO: 150292 - protein, 13 aa, Homo sapiens
  CDR3 for beta chain variable domain of TCR clone 75146 (TRBV10-3, TRBJ2-7)
CAPKLAVNYEQYF

SEQ ID NO: 150293 - protein, 15 aa, Homo sapiens
  CDR3 for alpha chain variable domain of TCR clone 75147 (TRAV1-2, TRAJ9)
CAVRDDGTGGFKTIF

SEQ ID NO: 150294 - protein, 20 aa, Homo sapiens
  CDR3 for beta chain variable domain of TCR clone 75147 (TRBV7-8, TRBJ2-2)
CASSHLFPGPTIHITGELFF

SEQ ID NO: 150295 - protein, 14 aa, Homo sapiens
  CDR3 for alpha chain variable domain of TCR clone 75148 (TRAV1-2, TRAJ16)
CAVNRFSDGQKLLF

SEQ ID NO: 150296 - protein, 13 aa, Homo sapiens
  CDR3 for beta chain variable domain of TCR clone 75148 (TRBV7-9, TRBJ1-2)
CASSLRQNYGYTF

SEQ ID NO: 150297 - protein, 15 aa, Homo sapiens
  CDR3 for alpha chain variable domain of TCR clone 75149 (TRAV12-3, TRAJ42)
CAMSGHGGSQGNLIF

SEQ ID NO: 150298 - protein, 13 aa, Homo sapiens
  CDR3 for beta chain variable domain of TCR clone 75149 (TRBV9, TRBJ2-1)
CASSPSGGSEQFF

SEQ ID NO: 150299 - protein, 14 aa, Homo sapiens
  CDR3 for alpha chain variable domain of TCR clone 75150 (TRAV2, TRAJ9)
CAVEDRSGGFKTIF

SEQ ID NO: 150300 - protein, 14 aa, Homo sapiens
  CDR3 for beta chain variable domain of TCR clone 75150 (TRBV16, TRBJ1-1)
CASSQAGPNTEAFF

SEQ ID NO: 150301 - protein, 15 aa, Homo sapiens
  CDR3 for alpha chain variable domain of TCR clone 75151 (TRAV27, TRAJ38)
CAGRFNAGNNCKLIW

SEQ ID NO: 150302 - protein, 13 aa, Homo sapiens
  CDR3 for beta chain variable domain of TCR clone 75151 (TRBV12-5, TRBJ2-3)
CASQNRGTDTQYF

SEQ ID NO: 150303 - protein, 13 aa, Homo sapiens
  CDR3 for alpha chain variable domain of TCR clone 75152 (TRAV2, TRAJ29)
RAAGNSGNTPLVF

SEQ ID NO: 150304 - protein, 16 aa, Homo sapiens
  CDR3 for beta chain variable domain of TCR clone 75152 (TRBV7-9, TRBJ1-2)
CASSPGGGAINYGYTF

SEQ ID NO: 150305 - protein, 13 aa, Homo sapiens
  CDR3 for alpha chain variable domain of TCR clone 75153 (TRAV12-2, TRAJ10)
CAVPTGGGNKLTF

SEQ ID NO: 150306 - protein, 16 aa, Homo sapiens
  CDR3 for beta chain variable domain of TCR clone 75153 (TRBV12-5, TRBJ2-5)
CASGPRTSGNQETQYF

SEQ ID NO: 150307 - protein, 14 aa, Homo sapiens
  CDR3 for alpha chain variable domain of TCR clone 75154 (TRAV12-3, TRAJ5)
CAMTWDTGRRALTF

SEQ ID NO: 150308 - protein, 14 aa, Homo sapiens
  CDR3 for beta chain variable domain of TCR clone 75154 (TRBV10-2, TRBJ1-5)
CASSSTGRDQPQHF

SEQ ID NO: 150309 - protein, 13 aa, Homo sapiens
  CDR3 for alpha chain variable domain of TCR clone 75155 (TRAV26-2, TRAJ54)
CILRDQGAQKLVF

SEQ ID NO: 150310 - protein, 15 aa, Homo sapiens
  CDR3 for beta chain variable domain of TCR clone 75155 (TRBV11-3, TRBJ2-3)
CASLKDGREGDTQYF

SEQ ID NO: 150311 - protein, 11 aa, Homo sapiens
  CDR3 for alpha chain variable domain of TCR clone 75156 (TRAV8-4, TRAJ20)
CAVTNVLTTTS

SEQ ID NO: 150312 - protein, 16 aa, Homo sapiens
  CDR3 for beta chain variable domain of TCR clone 75156 (TRBV7-3, TRBJ2-2)
CASSLKRGTLSGELFS

SEQ ID NO: 150313 - protein, 12 aa, Homo sapiens
  CDR3 for alpha chain variable domain of TCR clone 75157 (TRAV12-1, TRAJ16)
CVVFRDGQKLLF

SEQ ID NO: 150314 - protein, 12 aa, Homo sapiens
  CDR3 for beta chain variable domain of TCR clone 75157 (TRBV11-2, TRBJ2-2)
CASSLGGGELFF

SEQ ID NO: 150315 - protein, 21 aa, Homo sapiens
  CDR3 for alpha chain variable domain of TCR clone 75158 (TRAV25, TRAJ53)
TATQTTDVGTGSGGSNYKLTF

SEQ ID NO: 150316 - protein, 16 aa, Homo sapiens
  CDR3 for beta chain variable domain of TCR clone 75158 (TRBV4-2, TRBJ2-3)
CVSSLSSGGHTDTQYF

SEQ ID NO: 150317 - protein, 17 aa, Homo sapiens
  CDR3 for alpha chain variable domain of TCR clone 75159 (TRAV13-1, TRAJ31)
CAPRDRLMFGDGTQLVV

SEQ ID NO: 150318 - protein, 12 aa, Homo sapiens
  CDR3 for beta chain variable domain of TCR clone 75159 (TRBV7-9, TRBJ2-7)
CASSLEGYEQYC

SEQ ID NO: 150319 - protein, 20 aa, Homo sapiens
  CDR3 for alpha chain variable domain of TCR clone 75160 (TRAV26-1, TRAJ42)
CCVLLHRQTYYGGSQGNRIF

SEQ ID NO: 150320 - protein, 16 aa, Homo sapiens
  CDR3 for beta chain variable domain of TCR clone 75160 (TRBV7-3, TRBJ2-2)
CASSLKRGTLSGELFF

SEQ ID NO: 150321 - protein, 12 aa, Homo sapiens
  CDR3 for alpha chain variable domain of TCR clone 75161 (TRAV13-2, TRAJ23)
CAERHRGGKLIF

SEQ ID NO: 150322 - protein, 16 aa, Homo sapiens
  CDR3 for beta chain variable domain of TCR clone 75161 (TRBV20-1, TRBJ1-4)
CSAPGQGLLTNEKLFC

SEQ ID NO: 150323 - protein, 15 aa, Homo sapiens
  CDR3 for alpha chain variable domain of TCR clone 75162 (TRAV3, TRAJ3)
CAVRDRDSSASKIIF

SEQ ID NO: 150324 - protein, 15 aa, Homo sapiens
  CDR3 for beta chain variable domain of TCR clone 75162 (TRBV6-3, TRBJ2-7)
CASSSPGTVFYEQYF

SEQ ID NO: 150325 - protein, 14 aa, Homo sapiens
  CDR3 for alpha chain variable domain of TCR clone 75163 (TRAV12-3, TRAJ10)
SHLPLTGGGNKLTF

SEQ ID NO: 150326 - protein, 13 aa, Homo sapiens
  CDR3 for beta chain variable domain of TCR clone 75163 (TRBV2, TRBJ1-6)
CADSGSYNSPLLF

SEQ ID NO: 150327 - protein, 16 aa, Homo sapiens
  CDR3 for alpha chain variable domain of TCR clone 75164 (TRAV3, TRAJ37)
CAVRGKGSGNTCKLIF

SEQ ID NO: 150328 - protein, 13 aa, Homo sapiens
  CDR3 for beta chain variable domain of TCR clone 75164 (TRBV14, TRBJ2-7)
CASSQDRRYEQYF

SEQ ID NO: 150329 - protein, 14 aa, Homo sapiens
  CDR3 for alpha chain variable domain of TCR clone 75165 (TRAV16, TRAJ15)
CALSGPQAGTALIF

SEQ ID NO: 150330 - protein, 12 aa, Homo sapiens
  CDR3 for beta chain variable domain of TCR clone 75165 (TRBV18, TRBJ2-5)
CASSPSKETQYL

SEQ ID NO: 150331 - protein, 15 aa, Homo sapiens
  CDR3 for alpha chain variable domain of TCR clone 75166 (TRAV20, TRAJ4)
CAVTMFSGGYNKLIF

SEQ ID NO: 150332 - protein, 14 aa, Homo sapiens
  CDR3 for beta chain variable domain of TCR clone 75166 (TRBV20-1, TRBJ2-7)
CSAKRGRSSYEQYF

SEQ ID NO: 150333 - protein, 14 aa, Homo sapiens
  CDR3 for alpha chain variable domain of TCR clone 75167 (TRAV16, TRAJ39)
CALSKNNAGNMLTF

SEQ ID NO: 150334 - protein, 15 aa, Homo sapiens
  CDR3 for beta chain variable domain of TCR clone 75167 (TRBV11-2, TRBJ2-1)
CASSKNRGLIYEQFF

SEQ ID NO: 150335 - protein, 16 aa, Homo sapiens
  CDR3 for alpha chain variable domain of TCR clone 75168 (TRAV38-1, TRAJ32)
CAFMKGGGGATNKLIF

SEQ ID NO: 150336 - protein, 13 aa, Homo sapiens
  CDR3 for beta chain variable domain of TCR clone 75168 (TRBV20-1, TRBJ2-5)
CSAREALQETQYF

SEQ ID NO: 150337 - protein, 13 aa, Homo sapiens
  CDR3 for alpha chain variable domain of TCR clone 75169 (TRAV8-6, TRAJ50)
CAVIKTTYDKVIF

SEQ ID NO: 150338 - protein, 15 aa, Homo sapiens
  CDR3 for beta chain variable domain of TCR clone 75169 (TRBV7-2, TRBJ2-2)
CASRRPGQNTGELFF

SEQ ID NO: 150339 - protein, 13 aa, Homo sapiens
  CDR3 for alpha chain variable domain of TCR clone 75170 (TRAV13-1, TRAJ5)
CAAEHTGRRALTF

SEQ ID NO: 150340 - protein, 14 aa, Homo sapiens
  CDR3 for beta chain variable domain of TCR clone 75170 (TRBV7-2, TRBJ1-2)
CASSQTGSTYGYTF

SEQ ID NO: 150341 - protein, 12 aa, Homo sapiens
  CDR3 for alpha chain variable domain of TCR clone 75171 (TRAV13-1, TRAJ21)
CAAKEGFNKFYF

SEQ ID NO: 150342 - protein, 14 aa, Homo sapiens
  CDR3 for beta chain variable domain of TCR clone 75171 (TRBV13, TRBJ2-3)
CASSSGSPTDTQYF

SEQ ID NO: 150343 - protein, 14 aa, Homo sapiens
  CDR3 for alpha chain variable domain of TCR clone 75172 (TRAV12-2, TRAJ40)
CAVKTPPGTYKYIF

SEQ ID NO: 150344 - protein, 14 aa, Homo sapiens
  CDR3 for beta chain variable domain of TCR clone 75172 (TRBV20-1, TRBJ1-1)
CSAQTRIGGTEAFF

SEQ ID NO: 150345 - protein, 15 aa, Homo sapiens
  CDR3 for alpha chain variable domain of TCR clone 75173 (TRAV13-1, TRAJ45)
CAASGSGGGADGLPF

SEQ ID NO: 150346 - protein, 12 aa, Homo sapiens
  CDR3 for beta chain variable domain of TCR clone 75173 (TRBV11-2, TRBJ2-2)
CASSLGGGELFF

SEQ ID NO: 150347 - protein, 15 aa, Homo sapiens
  CDR3 for alpha chain variable domain of TCR clone 75174 (TRAV25, TRAJ52)
CAGRPGGTSYGKLTF

SEQ ID NO: 150348 - protein, 14 aa, Homo sapiens
  CDR3 for beta chain variable domain of TCR clone 75174 (TRBV18, TRBJ2-7)
CASSLDRAAYEQYF

SEQ ID NO: 150349 - protein, 16 aa, Homo sapiens
  CDR3 for alpha chain variable domain of TCR clone 75175 (TRAV3, TRAJ37)
CAVRPHGSGNTGKLIF

SEQ ID NO: 150350 - protein, 17 aa, Homo sapiens
  CDR3 for beta chain variable domain of TCR clone 75175 (TRBV20-1, TRBJ2-1)
CSASSSGLAGSYNEQSF

SEQ ID NO: 150351 - protein, 15 aa, Homo sapiens
  CDR3 for alpha chain variable domain of TCR clone 75176 (TRAV13-1, TRAJ52)
CALRTGGTSYGKLTS

SEQ ID NO: 150352 - protein, 14 aa, Homo sapiens
  CDR3 for beta chain variable domain of TCR clone 75176 (TRBV20-1, TRBJ2-5)
CSASDSGSGETQYF

SEQ ID NO: 150353 - protein, 11 aa, Homo sapiens
  CDR3 for alpha chain variable domain of TCR clone 75177 (TRAV1-2, TRAJ20)
CAVANDYKLSF

SEQ ID NO: 150354 - protein, 13 aa, Homo sapiens
  CDR3 for beta chain variable domain of TCR clone 75177 (TRBV20-1, TRBJ1-1)
CSARGGGNTEAFF

SEQ ID NO: 150355 - protein, 13 aa, Homo sapiens
  CDR3 for alpha chain variable domain of TCR clone 75178 (TRAV13-1, TRAJ49)
CAAMLYTGSQFYF

SEQ ID NO: 150356 - protein, 15 aa, Homo sapiens
  CDR3 for beta chain variable domain of TCR clone 75178 (TRBV12-4, TRBJ1-5)
CASTRGSGFGQPQHF

SEQ ID NO: 150357 - protein, 14 aa, Homo sapiens
  CDR3 for alpha chain variable domain of TCR clone 75179 (TRAV1-2, TRAJ29)
CAVRELTSATPLVF

SEQ ID NO: 150358 - protein, 15 aa, Homo sapiens
  CDR3 for beta chain variable domain of TCR clone 75179 (TRBV28, TRBJ2-1)
CASSIIAGGRSEQFF

SEQ ID NO: 150359 - protein, 17 aa, Homo sapiens
  CDR3 for alpha chain variable domain of TCR clone 75180 (TRAV3, TRAJ42)
CAVRDRDYGGSQGNLIF

SEQ ID NO: 150360 - protein, 14 aa, Homo sapiens
  CDR3 for beta chain variable domain of TCR clone 75180 (TRBV19, TRBJ2-5)
CASSMAGQQETQYF

SEQ ID NO: 150361 - protein, 13 aa, Homo sapiens
  CDR3 for alpha chain variable domain of TCR clone 75181 (TRAV8-3, TRAJ28)
CAVGAVGSYQLTF

SEQ ID NO: 150362 - protein, 15 aa, Homo sapiens
  CDR3 for beta chain variable domain of TCR clone 75181 (TRBV7-9, TRBJ1-5)
CASSQGHQPYQPQHF

SEQ ID NO: 150363 - protein, 11 aa, Homo sapiens
  CDR3 for alpha chain variable domain of TCR clone 75182 (TRAV17, TRAJ43)
CATPRSNDMRF

SEQ ID NO: 150364 - protein, 15 aa, Homo sapiens
  CDR3 for beta chain variable domain of TCR clone 75182 (TRBV11-2, TRBJ2-1)
CASSWGTSGLNEQFF

SEQ ID NO: 150365 - protein, 14 aa, Homo sapiens
  CDR3 for alpha chain variable domain of TCR clone 75183 (TRAV12-1, TRAJ17)
CVVNYKAAGNKLTF

SEQ ID NO: 150366 - protein, 14 aa, Homo sapiens
  CDR3 for beta chain variable domain of TCR clone 75183 (TRBV7-2, TRBJ2-7)
CASSSQGAAYEQYF

SEQ ID NO: 150367 - protein, 15 aa, Homo sapiens
  CDR3 for alpha chain variable domain of TCR clone 75184 (TRAV2, TRAJ15)
CAVEDRNQAGTALIF

SEQ ID NO: 150368 - protein, 13 aa, Homo sapiens
  CDR3 for beta chain variable domain of TCR clone 75184 (TRBV7-9, TRBJ1-2)
CASSLKQNYGYTF

SEQ ID NO: 150369 - protein, 11 aa, Homo sapiens
  CDR3 for alpha chain variable domain of TCR clone 75185 (TRAV21, TRAJ11)
CAVNGYSTLTF

SEQ ID NO: 150370 - protein, 14 aa, Homo sapiens
  CDR3 for beta chain variable domain of TCR clone 75185 (TRBV27, TRBJ2-2)
CASRPGVNTGELFF

SEQ ID NO: 150371 - protein, 14 aa, Homo sapiens
  CDR3 for alpha chain variable domain of TCR clone 75186 (TRAV35, TRAJ13)
CAGSPSGGHQKVTF

SEQ ID NO: 150372 - protein, 13 aa, Homo sapiens
  CDR3 for beta chain variable domain of TCR clone 75186 (TRBV29-1, TRBJ1-1)
CSVGDSRNTEAFF

SEQ ID NO: 150373 - protein, 15 aa, Homo sapiens
  CDR3 for alpha chain variable domain of TCR clone 75187 (TRAV35, TRAJ40)
CAGQLGTSGTYKYIF

SEQ ID NO: 150374 - protein, 14 aa, Homo sapiens
  CDR3 for beta chain variable domain of TCR clone 75187 (TRBV7-3, TRBJ2-1)
CASSLTGGTNEQFF

SEQ ID NO: 150375 - protein, 13 aa, Homo sapiens
  CDR3 for alpha chain variable domain of TCR clone 75188 (TRAV3, TRAJ33)
CAVRDRSNYQLIW

SEQ ID NO: 150376 - protein, 13 aa, Homo sapiens
  CDR3 for beta chain variable domain of TCR clone 75188 (TRBV7-3, TRBJ1-1)
CASSQDWGAEAFF

SEQ ID NO: 150377 - protein, 15 aa, Homo sapiens
  CDR3 for alpha chain variable domain of TCR clone 75189 (TRAV26-2, TRAJ13)
CILRDLSGGYQKVNF

SEQ ID NO: 150378 - protein, 11 aa, Homo sapiens
  CDR3 for beta chain variable domain of TCR clone 75189 (TRBV7-9, TRBJ2-5)
CASSLSATQYF

SEQ ID NO: 150379 - protein, 17 aa, Homo sapiens
  CDR3 for alpha chain variable domain of TCR clone 75190 (TRAV3, TRAJ6)
CAVRDGPRVGGSDIPTF

SEQ ID NO: 150380 - protein, 12 aa, Homo sapiens
  CDR3 for beta chain variable domain of TCR clone 75190 (TRBV11-2, TRBJ2-2)
CASSLGGGELFF

SEQ ID NO: 150381 - protein, 15 aa, Homo sapiens
  CDR3 for alpha chain variable domain of TCR clone 75191 (TRAV8-3, TRAJ27)
CAVGPSKTNAGKSTF

SEQ ID NO: 150382 - protein, 12 aa, Homo sapiens
  CDR3 for beta chain variable domain of TCR clone 75191 (TRBV11-2, TRBJ2-2)
CASSLGGGELSF

SEQ ID NO: 150383 - protein, 11 aa, Homo sapiens
  CDR3 for alpha chain variable domain of TCR clone 75192 (TRAV26-2, TRAJ8)
CILTDFQKLVF

SEQ ID NO: 150384 - protein, 19 aa, Homo sapiens
  CDR3 for beta chain variable domain of TCR clone 75192 (TRBV20-1, TRBJ2-1)
CSARGETSGNSPQIDEQFF

SEQ ID NO: 150385 - protein, 17 aa, Homo sapiens
  CDR3 for alpha chain variable domain of TCR clone 75193 (TRAV26-2, TRAJ42)
CILRDVGYRGSQGNLIF

SEQ ID NO: 150386 - protein, 16 aa, Homo sapiens
  CDR3 for beta chain variable domain of TCR clone 75193 (TRBV12-4, TRBJ2-7)
CASSLIGGTGTYEQYF

SEQ ID NO: 150387 - protein, 13 aa, Homo sapiens
  CDR3 for alpha chain variable domain of TCR clone 75194 (TRAV3, TRAJ41)
CAVSSNSGYALNF

SEQ ID NO: 150388 - protein, 16 aa, Homo sapiens
  CDR3 for beta chain variable domain of TCR clone 75194 (TRBV7-9, TRBJ1-1)
CASSLTQVRSNTEAFF

SEQ ID NO: 150389 - protein, 14 aa, Homo sapiens
  CDR3 for alpha chain variable domain of TCR clone 75195 (TRAV12-3, TRAJ12)
CATSRMDSSYKLIF

SEQ ID NO: 150390 - protein, 14 aa, Homo sapiens
  CDR3 for beta chain variable domain of TCR clone 75195 (TRBV20-1, TRBJ1-4)
CSARSGQSNEKLFF

SEQ ID NO: 150391 - protein, 11 aa, Homo sapiens
  CDR3 for alpha chain variable domain of TCR clone 75196 (TRAV21, TRAJ34)
CAHYNTDKLIF

SEQ ID NO: 150392 - protein, 13 aa, Homo sapiens
  CDR3 for beta chain variable domain of TCR clone 75196 (TRBV7-7, TRBJ1-2)
CASSLVADYGYTF

SEQ ID NO: 150393 - protein, 23 aa, Homo sapiens
  CDR3 for alpha chain variable domain of TCR clone 75197 (TRAV16, TRAJ8)
CAPLGGFQKLVLELAPDFWSVQI

SEQ ID NO: 150394 - protein, 15 aa, Homo sapiens
  CDR3 for beta chain variable domain of TCR clone 75197 (TRBV6-1, TRBJ1-5)
CASIPDRLGNQPQHF

SEQ ID NO: 150395 - protein, 15 aa, Homo sapiens
  CDR3 for alpha chain variable domain of TCR clone 75198 (TRAV25, TRAJ53)
CAATGGGGSNYKLTF

SEQ ID NO: 150396 - protein, 19 aa, Homo sapiens
  CDR3 for beta chain variable domain of TCR clone 75198 (TRBV7-2, TRBJ2-3)
CASSFRSRNWGGGTDTQYF

SEQ ID NO: 150397 - protein, 14 aa, Homo sapiens
  CDR3 for alpha chain variable domain of TCR clone 75199 (TRAV13-1, TRAJ35)
CAASKGGFGNVLHC

SEQ ID NO: 150398 - protein, 14 aa, Homo sapiens
  CDR3 for beta chain variable domain of TCR clone 75199 (TRBV7-8, TRBJ2-3)
CASSCPDGQDTQYF

SEQ ID NO: 150399 - protein, 12 aa, Homo sapiens
  CDR3 for alpha chain variable domain of TCR clone 75200 (TRAV13-2, TRAJ23)
CAERHRGGKLLF

SEQ ID NO: 150400 - protein, 16 aa, Homo sapiens
  CDR3 for beta chain variable domain of TCR clone 75200 (TRBV20-1, TRBJ1-4)
CSAPGQGLLTNEKLFF

SEQ ID NO: 150401 - protein, 14 aa, Homo sapiens
  CDR3 for alpha chain variable domain of TCR clone 75201 (TRAV12-1, TRAJ12)
CVVTRMDSSYKLIF

SEQ ID NO: 150402 - protein, 13 aa, Homo sapiens
  CDR3 for beta chain variable domain of TCR clone 75201 (TRBV20-1, TRBJ1-1)
CSARGGGNTEVFF

SEQ ID NO: 150403 - protein, 15 aa, Homo sapiens
  CDR3 for alpha chain variable domain of TCR clone 75202 (TRAV3, TRAJ5)
CAVRYLDTGRRALTF

SEQ ID NO: 150404 - protein, 15 aa, Homo sapiens
  CDR3 for beta chain variable domain of TCR clone 75202 (TRBV20-1, TRBJ2-1)
CSARSPGGPGNEQFF

SEQ ID NO: 150405 - protein, 15 aa, Homo sapiens
  CDR3 for alpha chain variable domain of TCR clone 75203 (TRAV25, TRAJ52)
CAGRPGGTSYGKLTF

SEQ ID NO: 150406 - protein, 17 aa, Homo sapiens
  CDR3 for beta chain variable domain of TCR clone 75203 (TRBV7-8, TRBJ2-6)
GASSAGTGGAGANVLTF

SEQ ID NO: 150407 - protein, 16 aa, Homo sapiens
  CDR3 for alpha chain variable domain of TCR clone 75204 (TRAV1-2, TRAJ10)
CAVRGVLTGGGNKLTF

SEQ ID NO: 150408 - protein, 12 aa, Homo sapiens
  CDR3 for beta chain variable domain of TCR clone 75204 (TRBV7-8, TRBJ2-7)
YASSLGDREQYF

SEQ ID NO: 150409 - protein, 15 aa, Homo sapiens
  CDR3 for alpha chain variable domain of TCR clone 75205 (TRAV12-3, TRAJ6)
CAMSATTGGSYIPTF

SEQ ID NO: 150410 - protein, 16 aa, Homo sapiens
  CDR3 for beta chain variable domain of TCR clone 75205 (TRBV20-1, TRBJ1-2)
CSASMGHGVANYGYTF

SEQ ID NO: 150411 - protein, 13 aa, Homo sapiens
  CDR3 for alpha chain variable domain of TCR clone 75206 (TRAV13-1, TRAJ20)
CAARVSNDYKLSF

SEQ ID NO: 150412 - protein, 16 aa, Homo sapiens
  CDR3 for beta chain variable domain of TCR clone 75206 (TRBV11-1, TRBJ1-1)
CATTPRDRAFNTEAFF

SEQ ID NO: 150413 - protein, 14 aa, Homo sapiens
  CDR3 for alpha chain variable domain of TCR clone 75207 (TRAV35, TRAJ33)
CAGSSQDSNYQLIW

SEQ ID NO: 150414 - protein, 13 aa, Homo sapiens
  CDR3 for beta chain variable domain of TCR clone 75207 (TRBV5-1, TRBJ2-1)
CASSSEGFEEQFF

SEQ ID NO: 150415 - protein, 17 aa, Homo sapiens
  CDR3 for alpha chain variable domain of TCR clone 75208 (TRAV17, TRAJ40)
CFLLLCWGTGGTYKYIF

SEQ ID NO: 150416 - protein, 16 aa, Homo sapiens
  CDR3 for beta chain variable domain of TCR clone 75208 (TRBV11-2, TRBJ1-2)
CASSLDTGGADYGYTF

SEQ ID NO: 150417 - protein, 13 aa, Homo sapiens
  CDR3 for alpha chain variable domain of TCR clone 75209 (TRAV12-1, TRAJ6)
CVVFPGGSYIPTF

SEQ ID NO: 150418 - protein, 14 aa, Homo sapiens
  CDR3 for beta chain variable domain of TCR clone 75209 (TRBV20-1, TRBJ1-3)
CSASPTGAGNTIYS

SEQ ID NO: 150419 - protein, 13 aa, Homo sapiens
  CDR3 for alpha chain variable domain of TCR clone 75210 (TRAV17, TRAJ9)
CATFLTGGFKTIF

SEQ ID NO: 150420 - protein, 12 aa, Homo sapiens
  CDR3 for beta chain variable domain of TCR clone 75210 (TRBV11-2, TRBJ2-2)
CASSLPTGELFF

SEQ ID NO: 150421 - protein, 22 aa, Homo sapiens
  CDR3 for alpha chain variable domain of TCR clone 75211 (TRAV3, )
CAVRDHTGNNHIQNPDPAVYQL

SEQ ID NO: 150422 - protein, 12 aa, Homo sapiens
  CDR3 for beta chain variable domain of TCR clone 75211 (TRBV11-2, TRBJ2-2)
CASSLGGGELFF

SEQ ID NO: 150423 - protein, 15 aa, Homo sapiens
  CDR3 for alpha chain variable domain of TCR clone 75212 (TRAV3, TRAJ3)
CAVRDRYSSASKIIF

SEQ ID NO: 150424 - protein, 18 aa, Homo sapiens
  CDR3 for beta chain variable domain of TCR clone 75212 (TRBV25-1, TRBJ1-2)
CASSGLQNGQGLIFGYTF

SEQ ID NO: 150425 - protein, 13 aa, Homo sapiens
  CDR3 for alpha chain variable domain of TCR clone 75213 (TRAV12-2, TRAJ52)
CAVGGTSYGKLTF

SEQ ID NO: 150426 - protein, 14 aa, Homo sapiens
  CDR3 for beta chain variable domain of TCR clone 75213 (TRBV2, TRBJ2-5)
CASKRDGTTETQYF

SEQ ID NO: 150427 - protein, 13 aa, Homo sapiens
  CDR3 for alpha chain variable domain of TCR clone 75214 (TRAV29/DV5, TRAJ31)
CAASRNNNARLMF

SEQ ID NO: 150428 - protein, 15 aa, Homo sapiens
  CDR3 for beta chain variable domain of TCR clone 75214 (TRBV7-3, TRBJ2-1)
CASSPTGGGEVEQFF

SEQ ID NO: 150429 - protein, 17 aa, Homo sapiens
  CDR3 for alpha chain variable domain of TCR clone 75215 (TRAV26-1, TRAJ27)
CIVSTPWINTNAGKSTF

SEQ ID NO: 150430 - protein, 16 aa, Homo sapiens
  CDR3 for beta chain variable domain of TCR clone 75215 (TRBV7-9, TRBJ2-1)
CASSLDPGLAIDEQFL

SEQ ID NO: 150431 - protein, 13 aa, Homo sapiens
  CDR3 for alpha chain variable domain of TCR clone 75216 (TRAV1-2, TRAJ31)
CDVRPNNNARLMF

SEQ ID NO: 150432 - protein, 14 aa, Homo sapiens
  CDR3 for beta chain variable domain of TCR clone 75216 (TRBV11-2, TRBJ2-1)
CASSLSGPYNEQFF

SEQ ID NO: 150433 - protein, 15 aa, Homo sapiens
  CDR3 for alpha chain variable domain of TCR clone 75217 (TRAV27, TRAJ38)
CAARRNAGNNRKLIW

SEQ ID NO: 150434 - protein, 14 aa, Homo sapiens
  CDR3 for beta chain variable domain of TCR clone 75217 (TRBV7-8, TRBJ2-3)
CASSLEAGADTQYF

SEQ ID NO: 150435 - protein, 12 aa, Homo sapiens
  CDR3 for alpha chain variable domain of TCR clone 75218 (TRAV20, TRAJ6)
CVHAGGSYIPTF

SEQ ID NO: 150436 - protein, 18 aa, Homo sapiens
  CDR3 for beta chain variable domain of TCR clone 75218 (TRBV20-1, TRBJ2-3)
CSASGLAGGPGTTDTQYF

SEQ ID NO: 150437 - protein, 14 aa, Homo sapiens
  CDR3 for alpha chain variable domain of TCR clone 75219 (TRAV23/DV6, TRAJ8)
CAASKAPGFQKLVF

SEQ ID NO: 150438 - protein, 15 aa, Homo sapiens
  CDR3 for beta chain variable domain of TCR clone 75219 (TRBV28, TRBJ2-3)
CASSPDRQGANTQYF

SEQ ID NO: 150439 - protein, 11 aa, Homo sapiens
  CDR3 for alpha chain variable domain of TCR clone 75220 (TRAV12-1, TRAJ30)
SVVNGQDKIIF

SEQ ID NO: 150440 - protein, 15 aa, Homo sapiens
  CDR3 for beta chain variable domain of TCR clone 75220 (TRBV28, TRBJ2-5)
CASSSGRTIQETQYF

SEQ ID NO: 150441 - protein, 13 aa, Homo sapiens
  CDR3 for alpha chain variable domain of TCR clone 75221 (TRAV14/DV4, TRAJ23)
CAMREVKGGKLIF

SEQ ID NO: 150442 - protein, 15 aa, Homo sapiens
  CDR3 for beta chain variable domain of TCR clone 75221 (TRBV19, TRBJ2-1)
CASSSPGVPLDEQFF

SEQ ID NO: 150443 - protein, 11 aa, Homo sapiens
  CDR3 for alpha chain variable domain of TCR clone 75222 (TRAV35, TRAJ34)
CWARNTDKLIF

SEQ ID NO: 150444 - protein, 14 aa, Homo sapiens
  CDR3 for beta chain variable domain of TCR clone 75222 (TRBV7-2, TRBJ2-7)
CASSLDPGPYEQYF

SEQ ID NO: 150445 - protein, 14 aa, Homo sapiens
  CDR3 for alpha chain variable domain of TCR clone 75223 (TRAV2, TRAJ23)
CAVIIYNQGGKLIS

SEQ ID NO: 150446 - protein, 13 aa, Homo sapiens
  CDR3 for beta chain variable domain of TCR clone 75223 (TRBV20-1, TRBJ2-3)
CSATSGGAGTQYF

SEQ ID NO: 150447 - protein, 13 aa, Homo sapiens
  CDR3 for alpha chain variable domain of TCR clone 75224 (TRAV2, TRAJ9)
CAVESTGGFKTIF

SEQ ID NO: 150448 - protein, 15 aa, Homo sapiens
  CDR3 for beta chain variable domain of TCR clone 75224 (TRBV10-3, TRBJ2-1)
CAITFGGGTDNDQFF

SEQ ID NO: 150449 - protein, 14 aa, Homo sapiens
  CDR3 for alpha chain variable domain of TCR clone 75225 (TRAV17, TRAJ40)
CATALTSGTYKYIF

SEQ ID NO: 150450 - protein, 14 aa, Homo sapiens
  CDR3 for beta chain variable domain of TCR clone 75225 (TRBV12-4, TRBJ1-1)
CASSLGTGGTEAFF

SEQ ID NO: 150451 - protein, 14 aa, Homo sapiens
  CDR3 for alpha chain variable domain of TCR clone 75226 (TRAV1-2, TRAJ8)
CAVREDTGFQKLVF

SEQ ID NO: 150452 - protein, 14 aa, Homo sapiens
  CDR3 for beta chain variable domain of TCR clone 75226 (TRBV7-9, TRBJ2-5)
CASSLVGGEETQYF

SEQ ID NO: 150453 - protein, 14 aa, Homo sapiens
  CDR3 for alpha chain variable domain of TCR clone 75227 (TRAV26-1, TRAJ38)
CIADNAGNKRKLIW

SEQ ID NO: 150454 - protein, 13 aa, Homo sapiens
  CDR3 for beta chain variable domain of TCR clone 75227 (TRBV20-1, TRBJ2-1)
CSARSSPRDEQFF

SEQ ID NO: 150455 - protein, 17 aa, Homo sapiens
  CDR3 for alpha chain variable domain of TCR clone 75228 (TRAV9-2, TRAJ45)
CALSGYYSGGGADGLAF

SEQ ID NO: 150456 - protein, 16 aa, Homo sapiens
  CDR3 for beta chain variable domain of TCR clone 75228 (TRBV5-7, TRBJ2-7)
PAANEGGGRGSYEQYF

SEQ ID NO: 150457 - protein, 13 aa, Homo sapiens
  CDR3 for alpha chain variable domain of TCR clone 75229 (TRAV13-1, TRAJ6)
RAASSGGSYIPTF

SEQ ID NO: 150458 - protein, 14 aa, Homo sapiens
  CDR3 for beta chain variable domain of TCR clone 75229 (TRBV20-1, TRBJ2-4)
CSAVAGGPGNIQYF

SEQ ID NO: 150459 - protein, 12 aa, Homo sapiens
  CDR3 for alpha chain variable domain of TCR clone 75230 (TRAV12-3, TRAJ17)
CAMTLTGNKLTF

SEQ ID NO: 150460 - protein, 12 aa, Homo sapiens
  CDR3 for beta chain variable domain of TCR clone 75230 (TRBV24-1, TRBJ1-1)
CATSDSDRGAFF

SEQ ID NO: 150461 - protein, 14 aa, Homo sapiens
  CDR3 for alpha chain variable domain of TCR clone 75231 (TRAV30, TRAJ33)
CGTVAPRSNYQLIW

SEQ ID NO: 150462 - protein, 13 aa, Homo sapiens
  CDR3 for beta chain variable domain of TCR clone 75231 (TRBV10-3, TRBJ2-7)
CASKLAVNYEQYF

SEQ ID NO: 150463 - protein, 14 aa, Homo sapiens
  CDR3 for alpha chain variable domain of TCR clone 75232 (TRAV36/DV7, TRAJ57)
CAVGFPGGSEKLVF

SEQ ID NO: 150464 - protein, 12 aa, Homo sapiens
  CDR3 for beta chain variable domain of TCR clone 75232 (TRBV19, TRBJ2-7)
CARTSGTYEQYF

SEQ ID NO: 150465 - protein, 12 aa, Homo sapiens
  CDR3 for alpha chain variable domain of TCR clone 75233 (TRAV21, TRAJ33)
CAKMDSKYQLIW

SEQ ID NO: 150466 - protein, 18 aa, Homo sapiens
  CDR3 for beta chain variable domain of TCR clone 75233 (TRBV15, TRBJ2-3)
CATSRDGARSWDADTQYF

SEQ ID NO: 150467 - protein, 12 aa, Homo sapiens
  CDR3 for alpha chain variable domain of TCR clone 75234 (TRAV13-1, TRAJ21)
CAAKEGFNKSYF

SEQ ID NO: 150468 - protein, 15 aa, Homo sapiens
  CDR3 for beta chain variable domain of TCR clone 75234 (TRBV27, TRBJ2-1)
CASSNGGGSSNEQFF

SEQ ID NO: 150469 - protein, 18 aa, Homo sapiens
  CDR3 for alpha chain variable domain of TCR clone 75235 (TRAV12-2, )
CAVEDIQNPDPAVYQLRD

SEQ ID NO: 150470 - protein, 15 aa, Homo sapiens
  CDR3 for beta chain variable domain of TCR clone 75235 (TRBV2, TRBJ2-5)
CASTRDGGPQETQYF

SEQ ID NO: 150471 - protein, 12 aa, Homo sapiens
  CDR3 for alpha chain variable domain of TCR clone 75236 (TRAV21, TRAJ11)
CAATSGYSTLTF

SEQ ID NO: 150472 - protein, 14 aa, Homo sapiens
  CDR3 for beta chain variable domain of TCR clone 75236 (TRBV20-1, TRBJ2-7)
CSAPELAGVGEHYF

SEQ ID NO: 150473 - protein, 14 aa, Homo sapiens
  CDR3 for alpha chain variable domain of TCR clone 75237 (TRAV17, TRAJ39)
CATDPVRAGTMLTF

SEQ ID NO: 150474 - protein, 15 aa, Homo sapiens
  CDR3 for beta chain variable domain of TCR clone 75237 (TRBV13, TRBJ1-5)
CASSFGQGGVQPQHF

SEQ ID NO: 150475 - protein, 14 aa, Homo sapiens
  CDR3 for alpha chain variable domain of TCR clone 75238 (TRAV1-2, TRAJ8)
CAVREDTGFQKLVF

SEQ ID NO: 150476 - protein, 15 aa, Homo sapiens
  CDR3 for beta chain variable domain of TCR clone 75238 (TRBV19, TRBJ2-2)
CASSPRTGWTGELFF

SEQ ID NO: 150477 - protein, 15 aa, Homo sapiens
  CDR3 for alpha chain variable domain of TCR clone 75239 (TRAV21, TRAJ53)
CATLNIGGSNYKLTF

SEQ ID NO: 150478 - protein, 16 aa, Homo sapiens
  CDR3 for beta chain variable domain of TCR clone 75239 (TRBV9, TRBJ2-1)
CASSVGGGGNYNEQFF

SEQ ID NO: 150479 - protein, 13 aa, Homo sapiens
  CDR3 for alpha chain variable domain of TCR clone 75240 (TRAV13-1, TRAJ40)
CAAISPGTYKYIF

SEQ ID NO: 150480 - protein, 11 aa, Homo sapiens
  CDR3 for beta chain variable domain of TCR clone 75240 (TRBV3-1, TRBJ2-1)
CQRGLGNEQFF

SEQ ID NO: 150481 - protein, 13 aa, Homo sapiens
  CDR3 for alpha chain variable domain of TCR clone 75241 (TRAV2, TRAJ21)
RAVEDLNFNKFYF

SEQ ID NO: 150482 - protein, 15 aa, Homo sapiens
  CDR3 for beta chain variable domain of TCR clone 75241 (TRBV28, TRBJ2-5)
CASSPGQGSIETQYF

SEQ ID NO: 150483 - protein, 12 aa, Homo sapiens
  CDR3 for alpha chain variable domain of TCR clone 75242 (TRAV12-2, TRAJ10)
WGVTGGGNKLTF

SEQ ID NO: 150484 - protein, 15 aa, Homo sapiens
  CDR3 for beta chain variable domain of TCR clone 75242 (TRBV6-1, TRBJ2-1)
CASSELRGQYNEQFF

SEQ ID NO: 150485 - protein, 13 aa, Homo sapiens
  CDR3 for alpha chain variable domain of TCR clone 75243 (TRAV12-3, TRAJ47)
CAMKKEYGNKLVF

SEQ ID NO: 150486 - protein, 16 aa, Homo sapiens
  CDR3 for beta chain variable domain of TCR clone 75243 (TRBV3-1, TRBJ2-6)
CASSLTRVSGANVLTF

SEQ ID NO: 150487 - protein, 14 aa, Homo sapiens
  CDR3 for alpha chain variable domain of TCR clone 75244 (TRAV17, TRAJ45)
CATASGGGADGLTF

SEQ ID NO: 150488 - protein, 15 aa, Homo sapiens
  CDR3 for beta chain variable domain of TCR clone 75244 (TRBV11-2, TRBJ2-1)
CASGRNRGLMYEQFF

SEQ ID NO: 150489 - protein, 14 aa, Homo sapiens
  CDR3 for alpha chain variable domain of TCR clone 75245 (TRAV17, TRAJ54)
CATDANQGAQKLVF

SEQ ID NO: 150490 - protein, 13 aa, Homo sapiens
  CDR3 for beta chain variable domain of TCR clone 75245 (TRBV25-1, TRBJ1-1)
CQHPPGGNTEAFF

SEQ ID NO: 150491 - protein, 15 aa, Homo sapiens
  CDR3 for alpha chain variable domain of TCR clone 75246 (TRAV21, TRAJ24)
CAARSSTDSWGKLQF

SEQ ID NO: 150492 - protein, 14 aa, Homo sapiens
  CDR3 for beta chain variable domain of TCR clone 75246 (TRBV4-1, TRBJ2-2)
CASSQAVNTGELFF

SEQ ID NO: 150493 - protein, 11 aa, Homo sapiens
  CDR3 for alpha chain variable domain of TCR clone 75247 (TRAV1-2, TRAJ31)
CAENNNARLMF

SEQ ID NO: 150494 - protein, 15 aa, Homo sapiens
  CDR3 for beta chain variable domain of TCR clone 75247 (TRBV28, TRBJ2-1)
CASSIIAGGRSEQFF

SEQ ID NO: 150495 - protein, 15 aa, Homo sapiens
  CDR3 for alpha chain variable domain of TCR clone 75248 (TRAV8-3, TRAJ45)
CASSYSGGGADGLTF

SEQ ID NO: 150496 - protein, 13 aa, Homo sapiens
  CDR3 for beta chain variable domain of TCR clone 75248 (TRBV6-1, TRBJ1-1)
CASSRQGNTEAFF

SEQ ID NO: 150497 - protein, 14 aa, Homo sapiens
  CDR3 for alpha chain variable domain of TCR clone 75249 (TRAV13-1, TRAJ35)
CAASKGGFGNVLHS

SEQ ID NO: 150498 - protein, 13 aa, Homo sapiens
  CDR3 for beta chain variable domain of TCR clone 75249 (TRBV7-3, TRBJ1-1)
CASSQDWGAEAFF

SEQ ID NO: 150499 - protein, 14 aa, Homo sapiens
  CDR3 for alpha chain variable domain of TCR clone 75250 (TRAV26-1, TRAJ34)
CIVRVAYNTDKPIF

SEQ ID NO: 150500 - protein, 15 aa, Homo sapiens
  CDR3 for beta chain variable domain of TCR clone 75250 (TRBV7-9, TRBJ1-4)
CASSRTGGFNEKLFF

SEQ ID NO: 150501 - protein, 12 aa, Homo sapiens
  CDR3 for alpha chain variable domain of TCR clone 75251 (TRAV23/DV6, TRAJ30)
CAASKGDDKIIL

SEQ ID NO: 150502 - protein, 13 aa, Homo sapiens
  CDR3 for beta chain variable domain of TCR clone 75251 (TRBV19, TRBJ1-2)
CASSVPGQDGYTF

SEQ ID NO: 150503 - protein, 16 aa, Homo sapiens
  CDR3 for alpha chain variable domain of TCR clone 75252 (TRAV3, TRAJ37)
CAVRGRGSGNTGKLIF

SEQ ID NO: 150504 - protein, 15 aa, Homo sapiens
  CDR3 for beta chain variable domain of TCR clone 75252 (TRBV7-9, TRBJ2-2)
CASGPLDTFPGELFF

SEQ ID NO: 150505 - protein, 14 aa, Homo sapiens
  CDR3 for alpha chain variable domain of TCR clone 75253 (TRAV20, TRAJ10)
CAVRVEGGGNKLTF

SEQ ID NO: 150506 - protein, 18 aa, Homo sapiens
  CDR3 for beta chain variable domain of TCR clone 75253 (TRBV24-1, TRBJ2-1)
WATSDLMFLGRGVHEQFF

SEQ ID NO: 150507 - protein, 12 aa, Homo sapiens
  CDR3 for alpha chain variable domain of TCR clone 75254 (TRAV17, TRAJ20)
CATALNDYRLSF

SEQ ID NO: 150508 - protein, 12 aa, Homo sapiens
  CDR3 for beta chain variable domain of TCR clone 75254 (TRBV10-3, TRBJ2-7)
CAHGADSGEQYF

SEQ ID NO: 150509 - protein, 13 aa, Homo sapiens
  CDR3 for alpha chain variable domain of TCR clone 75255 (TRAV16, TRAJ48)
CSPLNFGNERLTF

SEQ ID NO: 150510 - protein, 11 aa, Homo sapiens
  CDR3 for beta chain variable domain of TCR clone 75255 (TRBV7-9, TRBJ2-3)
CASSPTDTQYF

SEQ ID NO: 150511 - protein, 12 aa, Homo sapiens
  CDR3 for alpha chain variable domain of TCR clone 75256 (TRAV12-3, TRAJ17)
CAMTLTVNKLTF

SEQ ID NO: 150512 - protein, 13 aa, Homo sapiens
  CDR3 for beta chain variable domain of TCR clone 75256 (TRBV7-3, TRBJ1-1)
CASSQDWGAEAFF

SEQ ID NO: 150513 - protein, 18 aa, Homo sapiens
  CDR3 for alpha chain variable domain of TCR clone 75257 (TRAV26-1, TRAJ57)
CIVRVALRFQGGSEKLVS

SEQ ID NO: 150514 - protein, 15 aa, Homo sapiens
  CDR3 for beta chain variable domain of TCR clone 75257 (TRBV27, TRBJ2-1)
CASSNGGGSSNEQFF

SEQ ID NO: 150515 - protein, 17 aa, Homo sapiens
  CDR3 for alpha chain variable domain of TCR clone 75258 (TRAV26-2, TRAJ42)
CILRDVGYGGSQGNLIF

SEQ ID NO: 150516 - protein, 16 aa, Homo sapiens
  CDR3 for beta chain variable domain of TCR clone 75258 (TRBV12-4, TRBJ2-7)
CASSVIGGTGTYEQYF

SEQ ID NO: 150517 - protein, 13 aa, Homo sapiens
  CDR3 for alpha chain variable domain of TCR clone 75259 (TRAV8-1, TRAJ9)
CAVNSVGGFKTIF

SEQ ID NO: 150518 - protein, 15 aa, Homo sapiens
  CDR3 for beta chain variable domain of TCR clone 75259 (TRBV11-2, TRBJ2-3)
CASSGRDGLTDTRYF

SEQ ID NO: 150519 - protein, 15 aa, Homo sapiens
  CDR3 for alpha chain variable domain of TCR clone 75260 (TRAV27, TRAJ50)
CEGVGRGTSYDKVIF

SEQ ID NO: 150520 - protein, 14 aa, Homo sapiens
  CDR3 for beta chain variable domain of TCR clone 75260 (TRBV7-2, TRBJ1-1)
CASSFYDLNTEAFF

SEQ ID NO: 150521 - protein, 14 aa, Homo sapiens
  CDR3 for alpha chain variable domain of TCR clone 75261 (TRAV30, TRAJ33)
CGTVAPRSNHQLIW

SEQ ID NO: 150522 - protein, 14 aa, Homo sapiens
  CDR3 for beta chain variable domain of TCR clone 75261 (TRBV19, TRBJ2-1)
CASPTFVLSGEQFF

SEQ ID NO: 150523 - protein, 14 aa, Homo sapiens
  CDR3 for alpha chain variable domain of TCR clone 75262 (TRAV8-2, TRAJ4)
CVVSPSGGYNKLIF

SEQ ID NO: 150524 - protein, 14 aa, Homo sapiens
  CDR3 for beta chain variable domain of TCR clone 75262 (TRBV4-2, TRBJ2-1)
CASGLDRAYNEQFF

SEQ ID NO: 150525 - protein, 15 aa, Homo sapiens
  CDR3 for alpha chain variable domain of TCR clone 75263 (TRAV12-1, TRAJ44)
CVVFVNTGTASKLTF

SEQ ID NO: 150526 - protein, 17 aa, Homo sapiens
  CDR3 for beta chain variable domain of TCR clone 75263 (TRBV7-8, TRBJ2-6)
CASSAGTGGAGANVLAF

SEQ ID NO: 150527 - protein, 13 aa, Homo sapiens
  CDR3 for alpha chain variable domain of TCR clone 75264 (TRAV21, TRAJ15)
CAVANQAGTALIF

SEQ ID NO: 150528 - protein, 15 aa, Homo sapiens
  CDR3 for beta chain variable domain of TCR clone 75264 (TRBV20-1, TRBJ2-7)
CSARDRVSGMDEQYF

SEQ ID NO: 150529 - protein, 14 aa, Homo sapiens
  CDR3 for alpha chain variable domain of TCR clone 75265 (TRAV8-3, TRAJ4)
CAVGAAGGYNKLIF

SEQ ID NO: 150530 - protein, 14 aa, Homo sapiens
  CDR3 for beta chain variable domain of TCR clone 75265 (TRBV7-3, TRBJ2-7)
CASSLSGVSYEQYF

SEQ ID NO: 150531 - protein, 12 aa, Homo sapiens
  CDR3 for alpha chain variable domain of TCR clone 75266 (TRAV12-2, TRAJ10)
WGVTGGGNKLTF

SEQ ID NO: 150532 - protein, 14 aa, Homo sapiens
  CDR3 for beta chain variable domain of TCR clone 75266 (TRBV5-4, TRBJ1-1)
CASSLDSRRDEAFF

SEQ ID NO: 150533 - protein, 14 aa, Homo sapiens
  CDR3 for alpha chain variable domain of TCR clone 75267 (TRAV12-3, TRAJ10)
RHLPLTGGGNKLTF

SEQ ID NO: 150534 - protein, 18 aa, Homo sapiens
  CDR3 for beta chain variable domain of TCR clone 75267 (TRBV6-5, TRBJ1-1)
CASSYSAPGGTGGTEAFF

SEQ ID NO: 150535 - protein, 16 aa, Homo sapiens
  CDR3 for alpha chain variable domain of TCR clone 75268 (TRAV3, TRAJ3)
CAVRDRAKRSASKIIF

SEQ ID NO: 150536 - protein, 16 aa, Homo sapiens
  CDR3 for beta chain variable domain of TCR clone 75268 (TRBV20-1, TRBJ2-4)
CSATSLAELAKNIQYF

SEQ ID NO: 150537 - protein, 17 aa, Homo sapiens
  CDR3 for alpha chain variable domain of TCR clone 75269 (TRAV12-2, TRAJ6)
CAPQGAPRAGGSYIPTF

SEQ ID NO: 150538 - protein, 16 aa, Homo sapiens
  CDR3 for beta chain variable domain of TCR clone 75269 (TRBV19, TRBJ2-2)
CASSTARASNTGELFF

SEQ ID NO: 150539 - protein, 14 aa, Homo sapiens
  CDR3 for alpha chain variable domain of TCR clone 75270 (TRAV1-1, TRAJ27)
CAVTYNTNAGKSTF

SEQ ID NO: 150540 - protein, 13 aa, Homo sapiens
  CDR3 for beta chain variable domain of TCR clone 75270 (TRBV12-5, TRBJ1-2)
CASGVRTGNGYTF

SEQ ID NO: 150541 - protein, 14 aa, Homo sapiens
  CDR3 for alpha chain variable domain of TCR clone 75271 (TRAV4, TRAJ10)
CLVGDTGGGNKLTF

SEQ ID NO: 150542 - protein, 15 aa, Homo sapiens
  CDR3 for beta chain variable domain of TCR clone 75271 (TRBV7-9, TRBJ1-2)
CASSLDREPNYGYTF

SEQ ID NO: 150543 - protein, 13 aa, Homo sapiens
  CDR3 for alpha chain variable domain of TCR clone 75272 (TRAV27, TRAJ6)
CAGETRGSYIPTF

SEQ ID NO: 150544 - protein, 14 aa, Homo sapiens
  CDR3 for beta chain variable domain of TCR clone 75272 (TRBV6-3, TRBJ1-1)
CASSYQRRDTEAFF

SEQ ID NO: 150545 - protein, 17 aa, Homo sapiens
  CDR3 for alpha chain variable domain of TCR clone 75273 (TRAV3, TRAJ6)
CAVRDGPRAGGSYIPTF

SEQ ID NO: 150546 - protein, 16 aa, Homo sapiens
  CDR3 for beta chain variable domain of TCR clone 75273 (TRBV7-8, TRBJ2-3)
CASITEGQRETDTQYF

SEQ ID NO: 150547 - protein, 16 aa, Homo sapiens
  CDR3 for alpha chain variable domain of TCR clone 75274 (TRAV17, TRAJ35)
CATAEGGIGLGNVLHC

SEQ ID NO: 150548 - protein, 16 aa, Homo sapiens
  CDR3 for beta chain variable domain of TCR clone 75274 (TRBV6-5, TRBJ2-7)
CASSSDPTSGFYEQYF

SEQ ID NO: 150549 - protein, 11 aa, Homo sapiens
  CDR3 for alpha chain variable domain of TCR clone 75275 (TRAV12-3, TRAJ43)
CAMIVSNDMRF

SEQ ID NO: 150550 - protein, 16 aa, Homo sapiens
  CDR3 for beta chain variable domain of TCR clone 75275 (TRBV20-1, TRBJ2-1)
CSARDSLGAVYNEQFF

SEQ ID NO: 150551 - protein, 12 aa, Homo sapiens
  CDR3 for alpha chain variable domain of TCR clone 75276 (TRAV25, TRAJ53)
CQSGGSNYKLTF

SEQ ID NO: 150552 - protein, 12 aa, Homo sapiens
  CDR3 for beta chain variable domain of TCR clone 75276 (TRBV14, TRBJ2-7)
CASNSLKGEQYF

SEQ ID NO: 150553 - protein, 16 aa, Homo sapiens
  CDR3 for alpha chain variable domain of TCR clone 75277 (TRAV13-2, TRAJ52)
CRESPTGGTSYGKLTF

SEQ ID NO: 150554 - protein, 14 aa, Homo sapiens
  CDR3 for beta chain variable domain of TCR clone 75277 (TRBV7-6, TRBJ2-3)
CASSLGTVTDTQYF

SEQ ID NO: 150555 - protein, 13 aa, Homo sapiens
  CDR3 for alpha chain variable domain of TCR clone 75278 (TRAV27, TRAJ45)
CRSSGGGPDGLTF

SEQ ID NO: 150556 - protein, 17 aa, Homo sapiens
  CDR3 for beta chain variable domain of TCR clone 75278 (TRBV11-2, TRBJ2-1)
CASSLYPPGVEYNEQFF

SEQ ID NO: 150557 - protein, 14 aa, Homo sapiens
  CDR3 for alpha chain variable domain of TCR clone 75279 (TRAV1-2, TRAJ8)
CAVREDTGFQKLVF

SEQ ID NO: 150558 - protein, 15 aa, Homo sapiens
  CDR3 for beta chain variable domain of TCR clone 75279 (TRBV12-4, TRBJ2-5)
CASSPPTGLKETQYF

SEQ ID NO: 150559 - protein, 14 aa, Homo sapiens
  CDR3 for alpha chain variable domain of TCR clone 75280 (TRAV12-3, TRAJ9)
CAMSPNTGGFKTIF

SEQ ID NO: 150560 - protein, 12 aa, Homo sapiens
  CDR3 for beta chain variable domain of TCR clone 75280 (TRBV19, TRBJ1-5)
CASSIARKPQHF

SEQ ID NO: 150561 - protein, 13 aa, Homo sapiens
  CDR3 for alpha chain variable domain of TCR clone 75281 (TRAV12-3, TRAJ13)
CAMSSGGYQKGTF

SEQ ID NO: 150562 - protein, 13 aa, Homo sapiens
  CDR3 for beta chain variable domain of TCR clone 75281 (TRBV20-1, TRBJ1-1)
CSAPPGGHTEAFF

SEQ ID NO: 150563 - protein, 13 aa, Homo sapiens
  CDR3 for alpha chain variable domain of TCR clone 75282 (TRAV35, TRAJ42)
CAGFPGRQGNLIF

SEQ ID NO: 150564 - protein, 14 aa, Homo sapiens
  CDR3 for beta chain variable domain of TCR clone 75282 (TRBV4-1, TRBJ2-2)
CASSQAVNTGELFF

SEQ ID NO: 150565 - protein, 11 aa, Homo sapiens
  CDR3 for alpha chain variable domain of TCR clone 75283 (TRAV13-1, TRAJ39)
CASHAGNMLTF

SEQ ID NO: 150566 - protein, 16 aa, Homo sapiens
  CDR3 for beta chain variable domain of TCR clone 75283 (TRBV11-2, TRBJ1-5)
CASSLDREGSPSILVM

SEQ ID NO: 150567 - protein, 14 aa, Homo sapiens
  CDR3 for alpha chain variable domain of TCR clone 75284 (TRAV12-2, TRAJ17)
CAVLFKAAGNKLTF

SEQ ID NO: 150568 - protein, 16 aa, Homo sapiens
  CDR3 for beta chain variable domain of TCR clone 75284 (TRBV19, TRBJ1-1)
CASSPTRFWPGTEAFF

SEQ ID NO: 150569 - protein, 14 aa, Homo sapiens
  CDR3 for alpha chain variable domain of TCR clone 75285 (TRAV17, TRAJ39)
CATDPVRAGNMLTF

SEQ ID NO: 150570 - protein, 17 aa, Homo sapiens
  CDR3 for beta chain variable domain of TCR clone 75285 (TRBV11-2, TRBJ2-1)
CASSLYPPGVEYNEQFF

SEQ ID NO: 150571 - protein, 12 aa, Homo sapiens
  CDR3 for alpha chain variable domain of TCR clone 75286 (TRAV1-2, TRAJ29)
CAVPSGNTPLVF

SEQ ID NO: 150572 - protein, 12 aa, Homo sapiens
  CDR3 for beta chain variable domain of TCR clone 75286 (TRBV12-4, TRBJ2-7)
CASSLGGYEQYS

SEQ ID NO: 150573 - protein, 13 aa, Homo sapiens
  CDR3 for alpha chain variable domain of TCR clone 75287 (TRAV21, TRAJ37)
CAASSGNTGKLIF

SEQ ID NO: 150574 - protein, 13 aa, Homo sapiens
  CDR3 for beta chain variable domain of TCR clone 75287 (TRBV7-6, TRBJ2-3)
CASSLRSDNTQYF

SEQ ID NO: 150575 - protein, 16 aa, Homo sapiens
  CDR3 for alpha chain variable domain of TCR clone 75288 (TRAV12-3, TRAJ53)
CAMSPGSGGSNYKLTF

SEQ ID NO: 150576 - protein, 11 aa, Homo sapiens
  CDR3 for beta chain variable domain of TCR clone 75288 (TRBV29-1, TRBJ2-5)
CSEDRTGTQNF

SEQ ID NO: 150577 - protein, 17 aa, Homo sapiens
  CDR3 for alpha chain variable domain of TCR clone 75289 (TRAV3, TRAJ6)
CAVRDGPRAGGSYIATF

SEQ ID NO: 150578 - protein, 20 aa, Homo sapiens
  CDR3 for beta chain variable domain of TCR clone 75289 (TRBV28, TRBJ2-1)
CASTPIGRSPGLAGGNEQFF

SEQ ID NO: 150579 - protein, 15 aa, Homo sapiens
  CDR3 for alpha chain variable domain of TCR clone 75290 (TRAV29/DV5, TRAJ24)
CAASGATDSWGKFQF

SEQ ID NO: 150580 - protein, 12 aa, Homo sapiens
  CDR3 for beta chain variable domain of TCR clone 75290 (TRBV11-2, TRBJ2-2)
CVSSLPTGELFF

SEQ ID NO: 150581 - protein, 21 aa, Homo sapiens
  CDR3 for alpha chain variable domain of TCR clone 75291 (TRAV17, TRAJ28)
CFLLLCYGPAAGWGWELQLTF

SEQ ID NO: 150582 - protein, 16 aa, Homo sapiens
  CDR3 for beta chain variable domain of TCR clone 75291 (TRBV25-1, TRBJ1-1)
CASSGDRDRGRIEAFF

SEQ ID NO: 150583 - protein, 14 aa, Homo sapiens
  CDR3 for alpha chain variable domain of TCR clone 75292 (TRAV35, TRAJ38)
CAGSNAGNNRKLIL

SEQ ID NO: 150584 - protein, 12 aa, Homo sapiens
  CDR3 for beta chain variable domain of TCR clone 75292 (TRBV19, TRBJ2-7)
CASTDRGYEQYF

SEQ ID NO: 150585 - protein, 12 aa, Homo sapiens
  CDR3 for alpha chain variable domain of TCR clone 75293 (TRAV13-1, TRAJ21)
CAAKEGSNKFYF

SEQ ID NO: 150586 - protein, 17 aa, Homo sapiens
  CDR3 for beta chain variable domain of TCR clone 75293 (TRBV20-1, TRBJ2-1)
CSASSSGLAGSYNEQFF

SEQ ID NO: 150587 - protein, 12 aa, Homo sapiens
  CDR3 for alpha chain variable domain of TCR clone 75294 (TRAV3, TRAJ43)
CAVRDPNNDMRF

SEQ ID NO: 150588 - protein, 15 aa, Homo sapiens
  CDR3 for beta chain variable domain of TCR clone 75294 (TRBV27, TRBJ1-5)
FASSLGTGFDQPQHF

SEQ ID NO: 150589 - protein, 12 aa, Homo sapiens
  CDR3 for alpha chain variable domain of TCR clone 75295 (TRAV12-2, TRAJ10)
WGVTGGGNKLTF

SEQ ID NO: 150590 - protein, 13 aa, Homo sapiens
  CDR3 for beta chain variable domain of TCR clone 75295 (TRBV19, TRBJ1-4)
CATTARPSEKLFF

SEQ ID NO: 150591 - protein, 14 aa, Homo sapiens
  CDR3 for alpha chain variable domain of TCR clone 75296 (TRAV12-2, TRAJ45)
CAVNIGEGADGLTF

SEQ ID NO: 150592 - protein, 13 aa, Homo sapiens
  CDR3 for beta chain variable domain of TCR clone 75296 (TRBV5-5, TRBJ1-2)
CASSFWRGEDYTF

SEQ ID NO: 150593 - protein, 12 aa, Homo sapiens
  CDR3 for alpha chain variable domain of TCR clone 75297 (TRAV8-3, TRAJ20)
CAVGANDYKLSF

SEQ ID NO: 150594 - protein, 16 aa, Homo sapiens
  CDR3 for beta chain variable domain of TCR clone 75297 (TRBV7-9, TRBJ1-2)
CASSLGFSSGEDGYTF

SEQ ID NO: 150595 - protein, 14 aa, Homo sapiens
  CDR3 for alpha chain variable domain of TCR clone 75298 (TRAV12-2, TRAJ13)
CAVKKTGGYQKVTF

SEQ ID NO: 150596 - protein, 15 aa, Homo sapiens
  CDR3 for beta chain variable domain of TCR clone 75298 (TRBV27, TRBJ2-1)
CASSIGGGSSNEQFF

SEQ ID NO: 150597 - protein, 11 aa, Homo sapiens
  CDR3 for alpha chain variable domain of TCR clone 75299 (TRAV3, TRAJ21)
CAVGNFNKFYF

SEQ ID NO: 150598 - protein, 13 aa, Homo sapiens
  CDR3 for beta chain variable domain of TCR clone 75299 (TRBV5-4, TRBJ1-1)
CASSVDLGTEAFF

SEQ ID NO: 150599 - protein, 20 aa, Homo sapiens
  CDR3 for alpha chain variable domain of TCR clone 75300 (TRAV21, TRAJ4)
AASQPGDSATLAGGYNKLIF

SEQ ID NO: 150600 - protein, 19 aa, Homo sapiens
  CDR3 for beta chain variable domain of TCR clone 75300 (TRBV18, TRBJ1-3)
CASSPLSRTGMSSGNTIYL

SEQ ID NO: 150601 - protein, 18 aa, Homo sapiens
  CDR3 for alpha chain variable domain of TCR clone 75301 (TRAV13-1, TRAJ52)
CAAKNPNAGGTSYGKLTF

SEQ ID NO: 150602 - protein, 15 aa, Homo sapiens
  CDR3 for beta chain variable domain of TCR clone 75301 (TRBV6-1, TRBJ2-3)
CASSESGGITDTQYF

SEQ ID NO: 150603 - protein, 14 aa, Homo sapiens
  CDR3 for alpha chain variable domain of TCR clone 75302 (TRAV1-2, TRAJ16)
CAVNRFLDGQKLLF

SEQ ID NO: 150604 - protein, 12 aa, Homo sapiens
  CDR3 for beta chain variable domain of TCR clone 75302 (TRBV11-2, TRBJ2-1)
CASSPGNNEQFF

SEQ ID NO: 150605 - protein, 17 aa, Homo sapiens
  CDR3 for alpha chain variable domain of TCR clone 75303 (TRAV26-1, TRAJ27)
CIVSTPWINTNAGKSTF

SEQ ID NO: 150606 - protein, 15 aa, Homo sapiens
  CDR3 for beta chain variable domain of TCR clone 75303 (TRBV7-9, TRBJ2-1)
CQQLDPGLAIDEQFF

SEQ ID NO: 150607 - protein, 14 aa, Homo sapiens
  CDR3 for alpha chain variable domain of TCR clone 75304 (TRAV8-4, TRAJ8)
CAVRVGTGFQKLVF

SEQ ID NO: 150608 - protein, 15 aa, Homo sapiens
  CDR3 for beta chain variable domain of TCR clone 75304 (TRBV2, TRBJ2-3)
CASSGEGTGTDTQYF

SEQ ID NO: 150609 - protein, 15 aa, Homo sapiens
  CDR3 for alpha chain variable domain of TCR clone 75305 (TRAV3, TRAJ22)
CAVRDRGGSARQLTF

SEQ ID NO: 150610 - protein, 15 aa, Homo sapiens
  CDR3 for beta chain variable domain of TCR clone 75305 (TRBV7-2, TRBJ2-3)
CASSSTGLETDTQYF

SEQ ID NO: 150611 - protein, 15 aa, Homo sapiens
  CDR3 for alpha chain variable domain of TCR clone 75306 (TRAV8-4, TRAJ45)
GELGGPGGGADGLTF

SEQ ID NO: 150612 - protein, 16 aa, Homo sapiens
  CDR3 for beta chain variable domain of TCR clone 75306 (TRBV4-2, TRBJ2-3)
CASSQELAGDTDTQYF

SEQ ID NO: 150613 - protein, 14 aa, Homo sapiens
  CDR3 for alpha chain variable domain of TCR clone 75307 (TRAV1-2, TRAJ16)
CAVNRFSDGQKLLF

SEQ ID NO: 150614 - protein, 14 aa, Homo sapiens
  CDR3 for beta chain variable domain of TCR clone 75307 (TRBV12-4, TRBJ2-5)
CASSFGASGGTQYF

SEQ ID NO: 150615 - protein, 17 aa, Homo sapiens
  CDR3 for alpha chain variable domain of TCR clone 75308 (TRAV26-1, TRAJ37)
CIVRVITASSNTGKLIF

SEQ ID NO: 150616 - protein, 14 aa, Homo sapiens
  CDR3 for beta chain variable domain of TCR clone 75308 (TRBV19, TRBJ2-1)
CASPTFVLSGEQFF

SEQ ID NO: 150617 - protein, 14 aa, Homo sapiens
  CDR3 for alpha chain variable domain of TCR clone 75309 (TRAV9-2, TRAJ39)
CALYIYNAGNMLTF

SEQ ID NO: 150618 - protein, 14 aa, Homo sapiens
  CDR3 for beta chain variable domain of TCR clone 75309 (TRBV7-8, TRBJ2-3)
CASSFPDGQDTQYF

SEQ ID NO: 150619 - protein, 12 aa, Homo sapiens
  CDR3 for alpha chain variable domain of TCR clone 75310 (TRAV1-1, TRAJ39)
CAVPVVGNMLTF

SEQ ID NO: 150620 - protein, 15 aa, Homo sapiens
  CDR3 for beta chain variable domain of TCR clone 75310 (TRBV19, TRBJ1-6)
CASSTQGAVGSALHF

SEQ ID NO: 150621 - protein, 12 aa, Homo sapiens
  CDR3 for alpha chain variable domain of TCR clone 75311 (TRAV8-3, TRAJ26)
CAGDNYGQNFVL

SEQ ID NO: 150622 - protein, 17 aa, Homo sapiens
  CDR3 for beta chain variable domain of TCR clone 75311 (TRBV7-8, TRBJ2-6)
CASSAGTGGAGANVLTF

SEQ ID NO: 150623 - protein, 14 aa, Homo sapiens
  CDR3 for alpha chain variable domain of TCR clone 75312 (TRAV13-1, TRAJ44)
CAAKATGTASKLTF

SEQ ID NO: 150624 - protein, 14 aa, Homo sapiens
  CDR3 for beta chain variable domain of TCR clone 75312 (TRBV7-9, TRBJ2-5)
CASSPAQDQETQYF

SEQ ID NO: 150625 - protein, 14 aa, Homo sapiens
  CDR3 for alpha chain variable domain of TCR clone 75313 (TRAV12-2, TRAJ44)
CAVNPAGTASKLTF

SEQ ID NO: 150626 - protein, 13 aa, Homo sapiens
  CDR3 for beta chain variable domain of TCR clone 75313 (TRBV20-1, TRBJ2-5)
CSAREAFQETQYF

SEQ ID NO: 150627 - protein, 12 aa, Homo sapiens
  CDR3 for alpha chain variable domain of TCR clone 75314 (TRAV26-2, TRAJ21)
CILKGNFNKFYF

SEQ ID NO: 150628 - protein, 14 aa, Homo sapiens
  CDR3 for beta chain variable domain of TCR clone 75314 (TRBV19, TRBJ2-1)
CASPTFVLSGEQFF

SEQ ID NO: 150629 - protein, 15 aa, Homo sapiens
  CDR3 for alpha chain variable domain of TCR clone 75315 (TRAV38-1, TRAJ37)
CAFIHGSGNTGKLNF

SEQ ID NO: 150630 - protein, 12 aa, Homo sapiens
  CDR3 for beta chain variable domain of TCR clone 75315 (TRBV7-9, TRBJ2-7)
CASSFGSYEQYF

SEQ ID NO: 150631 - protein, 11 aa, Homo sapiens
  CDR3 for alpha chain variable domain of TCR clone 75316 (TRAV12-1, TRAJ21)
CVVNNFNKFYF

SEQ ID NO: 150632 - protein, 14 aa, Homo sapiens
  CDR3 for beta chain variable domain of TCR clone 75316 (TRBV18, TRBJ2-7)
CASSLRGGAYEQYF

SEQ ID NO: 150633 - protein, 13 aa, Homo sapiens
  CDR3 for alpha chain variable domain of TCR clone 75317 (TRAV39, TRAJ41)
CAVISNSGYALNF

SEQ ID NO: 150634 - protein, 14 aa, Homo sapiens
  CDR3 for beta chain variable domain of TCR clone 75317 (TRBV7-6, TRBJ2-4)
CASSPAPGSFLWYF

SEQ ID NO: 150635 - protein, 13 aa, Homo sapiens
  CDR3 for alpha chain variable domain of TCR clone 75318 (TRAV12-3, TRAJ13)
YAMSSGGYQKVTF

SEQ ID NO: 150636 - protein, 13 aa, Homo sapiens
  CDR3 for beta chain variable domain of TCR clone 75318 (TRBV7-3, TRBJ1-1)
CASSQDWGAEAFF

SEQ ID NO: 150637 - protein, 16 aa, Homo sapiens
  CDR3 for alpha chain variable domain of TCR clone 75319 (TRAV2, TRAJ4)
CAVEDRFSGGYNKLIF

SEQ ID NO: 150638 - protein, 14 aa, Homo sapiens
  CDR3 for beta chain variable domain of TCR clone 75319 (TRBV12-5, TRBJ2-5)
CASGSRTHQETQYF

SEQ ID NO: 150639 - protein, 11 aa, Homo sapiens
  CDR3 for alpha chain variable domain of TCR clone 75320 (TRAV21, TRAJ9)
CAVPGGSKTIF

SEQ ID NO: 150640 - protein, 17 aa, Homo sapiens
  CDR3 for beta chain variable domain of TCR clone 75320 (TRBV7-9, TRBJ2-5)
CATSGGARDPVLRARHA

SEQ ID NO: 150641 - protein, 14 aa, Homo sapiens
  CDR3 for alpha chain variable domain of TCR clone 75321 (TRAV21, TRAJ35)
CAVMPIGLGNVLHC

SEQ ID NO: 150642 - protein, 12 aa, Homo sapiens
  CDR3 for beta chain variable domain of TCR clone 75321 (TRBV7-9, TRBJ2-7)
CASSIKREEQHF

SEQ ID NO: 150643 - protein, 16 aa, Homo sapiens
  CDR3 for alpha chain variable domain of TCR clone 75322 (TRAV12-3, TRAJ53)
CAMSPGSGGSNYKLTF

SEQ ID NO: 150644 - protein, 11 aa, Homo sapiens
  CDR3 for beta chain variable domain of TCR clone 75322 (TRBV29-1, TRBJ2-5)
CSEDRTATQYF

SEQ ID NO: 150645 - protein, 13 aa, Homo sapiens
  CDR3 for alpha chain variable domain of TCR clone 75323 (TRAV3, TRAJ27)
CAVRPLGAGKSTF

SEQ ID NO: 150646 - protein, 13 aa, Homo sapiens
  CDR3 for beta chain variable domain of TCR clone 75323 (TRBV7-9, TRBJ2-3)
CASSSGSTDTQYF

SEQ ID NO: 150647 - protein, 13 aa, Homo sapiens
  CDR3 for alpha chain variable domain of TCR clone 75324 (TRAV8-4, TRAJ44)
CAVCTGTASKLTF

SEQ ID NO: 150648 - protein, 15 aa, Homo sapiens
  CDR3 for beta chain variable domain of TCR clone 75324 (TRBV14, TRBJ2-1)
CASSKMGLHFNEQFF

SEQ ID NO: 150649 - protein, 18 aa, Homo sapiens
  CDR3 for alpha chain variable domain of TCR clone 75325 (TRAV21, TRAJ52)
CAVRPSPAGGTSYGKLTF

SEQ ID NO: 150650 - protein, 15 aa, Homo sapiens
  CDR3 for beta chain variable domain of TCR clone 75325 (TRBV27, TRBJ1-6)
CASSFDRGLGSPLHF

SEQ ID NO: 150651 - protein, 14 aa, Homo sapiens
  CDR3 for alpha chain variable domain of TCR clone 75326 (TRAV1-2, TRAJ8)
CAVREDTGFQELVF

SEQ ID NO: 150652 - protein, 13 aa, Homo sapiens
  CDR3 for beta chain variable domain of TCR clone 75326 (TRBV10-3, TRBJ1-2)
CAISERDSYGYTF

SEQ ID NO: 150653 - protein, 15 aa, Homo sapiens
  CDR3 for alpha chain variable domain of TCR clone 75327 (TRAV12-3, TRAJ6)
CAMSATTGGSYIPTF

SEQ ID NO: 150654 - protein, 17 aa, Homo sapiens
  CDR3 for beta chain variable domain of TCR clone 75327 (TRBV20-1, TRBJ2-1)
CSASSSGLAGSYNEQFF

SEQ ID NO: 150655 - protein, 14 aa, Homo sapiens
  CDR3 for alpha chain variable domain of TCR clone 75328 (TRAV16, TRAJ33)
CALSAMDSNYQFIW

SEQ ID NO: 150656 - protein, 12 aa, Homo sapiens
  CDR3 for beta chain variable domain of TCR clone 75328 (TRBV5-1, TRBJ1-2)
CASSQDTYGYTF

SEQ ID NO: 150657 - protein, 23 aa, Homo sapiens
  CDR3 for alpha chain variable domain of TCR clone 75329 (TRAV8-4, TRAJ32)
CAAYMVVLQTSSSSELALCLLSS

SEQ ID NO: 150658 - protein, 16 aa, Homo sapiens
  CDR3 for beta chain variable domain of TCR clone 75329 (TRBV27, TRBJ2-2)
CASSPLAAANTGELFF

SEQ ID NO: 150659 - protein, 15 aa, Homo sapiens
  CDR3 for alpha chain variable domain of TCR clone 75330 (TRAV23/DV6, TRAJ18)
CAARYRGTTLGRLYF

SEQ ID NO: 150660 - protein, 13 aa, Homo sapiens
  CDR3 for beta chain variable domain of TCR clone 75330 (TRBV7-2, TRBJ2-7)
CASSSPSGSEQYF

SEQ ID NO: 150661 - protein, 13 aa, Homo sapiens
  CDR3 for alpha chain variable domain of TCR clone 75331 (TRAV2, TRAJ15)
CAVASQAGTALIF

SEQ ID NO: 150662 - protein, 16 aa, Homo sapiens
  CDR3 for beta chain variable domain of TCR clone 75331 (TRBV18, TRBJ1-5)
FASSPYRVEGNQPQHF

SEQ ID NO: 150663 - protein, 15 aa, Homo sapiens
  CDR3 for alpha chain variable domain of TCR clone 75332 (TRAV26-1, TRAJ22)
CIVRVSFWFCKATDL

SEQ ID NO: 150664 - protein, 13 aa, Homo sapiens
  CDR3 for beta chain variable domain of TCR clone 75332 (TRBV7-9, TRBJ1-2)
FASSLKQNYGYTF

SEQ ID NO: 150665 - protein, 13 aa, Homo sapiens
  CDR3 for alpha chain variable domain of TCR clone 75333 (TRAV8-6, TRAJ21)
CAVSPSSLNKFYF

SEQ ID NO: 150666 - protein, 14 aa, Homo sapiens
  CDR3 for beta chain variable domain of TCR clone 75333 (TRBV7-9, TRBJ2-5)
CASSLDTAQENQYF

SEQ ID NO: 150667 - protein, 14 aa, Homo sapiens
  CDR3 for alpha chain variable domain of TCR clone 75334 (TRAV12-3, TRAJ10)
SHLPLTGGGNKLTF

SEQ ID NO: 150668 - protein, 12 aa, Homo sapiens
  CDR3 for beta chain variable domain of TCR clone 75334 (TRBV6-6, TRBJ2-3)
CASSSRGDTQYL

SEQ ID NO: 150669 - protein, 17 aa, Homo sapiens
  CDR3 for alpha chain variable domain of TCR clone 75335 (TRAV3, TRAJ6)
CAVRDGPRAGGSYIPTF

SEQ ID NO: 150670 - protein, 18 aa, Homo sapiens
  CDR3 for beta chain variable domain of TCR clone 75335 (TRBV25-1, TRBJ1-2)
RASSGLQNGQGLIFGYTF

SEQ ID NO: 150671 - protein, 12 aa, Homo sapiens
  CDR3 for alpha chain variable domain of TCR clone 75336 (TRAV16, TRAJ49)
CALNEGGNQFYF

SEQ ID NO: 150672 - protein, 14 aa, Homo sapiens
  CDR3 for beta chain variable domain of TCR clone 75336 (TRBV7-9, TRBJ2-1)
CASRPTGLRNEQFS

SEQ ID NO: 150673 - protein, 10 aa, Homo sapiens
  CDR3 for alpha chain variable domain of TCR clone 75337 (TRAV23/DV6, TRAJ57)
CAASSTLSQG

SEQ ID NO: 150674 - protein, 15 aa, Homo sapiens
  CDR3 for beta chain variable domain of TCR clone 75337 (TRBV7-9, TRBJ2-2)
CASGPLDTFPGELFF

SEQ ID NO: 150675 - protein, 12 aa, Homo sapiens
  CDR3 for alpha chain variable domain of TCR clone 75338 (TRAV24, TRAJ26)
CALDNYGQNFVF

SEQ ID NO: 150676 - protein, 15 aa, Homo sapiens
  CDR3 for beta chain variable domain of TCR clone 75338 (TRBV6-6, TRBJ1-5)
CASSTIQGTNQPQHF

SEQ ID NO: 150677 - protein, 14 aa, Homo sapiens
  CDR3 for alpha chain variable domain of TCR clone 75339 (TRAV8-3, TRAJ35)
CAVVPQGFGNVLHC

SEQ ID NO: 150678 - protein, 15 aa, Homo sapiens
  CDR3 for beta chain variable domain of TCR clone 75339 (TRBV6-1, TRBJ2-2)
CANSAGQGYTGELFF

SEQ ID NO: 150679 - protein, 15 aa, Homo sapiens
  CDR3 for alpha chain variable domain of TCR clone 75340 (TRAV12-1, TRAJ4)
CVVNPFSGGYNRLIF

SEQ ID NO: 150680 - protein, 16 aa, Homo sapiens
  CDR3 for beta chain variable domain of TCR clone 75340 (TRBV5-1, TRBJ1-1)
CASSKTGTEVGTEAFF

SEQ ID NO: 150681 - protein, 14 aa, Homo sapiens
  CDR3 for alpha chain variable domain of TCR clone 75341 (TRAV16, TRAJ42)
CALLAGGSQGNLIF

SEQ ID NO: 150682 - protein, 14 aa, Homo sapiens
  CDR3 for beta chain variable domain of TCR clone 75341 (TRBV7-3, TRBJ2-2)
CASSSGGYTGELFF

SEQ ID NO: 150683 - protein, 14 aa, Homo sapiens
  CDR3 for alpha chain variable domain of TCR clone 75342 (TRAV8-2, TRAJ23)
CVVSDDNQGGKLIF

SEQ ID NO: 150684 - protein, 14 aa, Homo sapiens
  CDR3 for beta chain variable domain of TCR clone 75342 (TRBV7-9, TRBJ2-1)
CASSPRDSLYEQFF

SEQ ID NO: 150685 - protein, 14 aa, Homo sapiens
  CDR3 for alpha chain variable domain of TCR clone 75343 (TRAV29/DV5, TRAJ49)
CAASAQNTGNQFYF

SEQ ID NO: 150686 - protein, 17 aa, Homo sapiens
  CDR3 for beta chain variable domain of TCR clone 75343 (TRBV7-9, TRBJ2-1)
CASSLVASYPSYNEQFF

SEQ ID NO: 150687 - protein, 13 aa, Homo sapiens
  CDR3 for alpha chain variable domain of TCR clone 75344 (TRAV16, TRAJ26)
CITVLCLGQNFVF

SEQ ID NO: 150688 - protein, 12 aa, Homo sapiens
  CDR3 for beta chain variable domain of TCR clone 75344 (TRBV11-2, TRBJ2-1)
CASSPGNNEKFF

SEQ ID NO: 150689 - protein, 12 aa, Homo sapiens
  CDR3 for alpha chain variable domain of TCR clone 75345 (TRAV8-3, TRAJ26)
CAGDNYGQNSVF

SEQ ID NO: 150690 - protein, 18 aa, Homo sapiens
  CDR3 for beta chain variable domain of TCR clone 75345 (TRBV12-4, TRBJ2-2)
CASSLVAGTRGRTGELFF

SEQ ID NO: 150691 - protein, 13 aa, Homo sapiens
  CDR3 for alpha chain variable domain of TCR clone 75346 (TRAV2, TRAJ13)
CAVESGGYQKVTF

SEQ ID NO: 150692 - protein, 12 aa, Homo sapiens
  CDR3 for beta chain variable domain of TCR clone 75346 (TRBV29-1, TRBJ2-3)
CSVTGGADTQYL

SEQ ID NO: 150693 - protein, 15 aa, Homo sapiens
  CDR3 for alpha chain variable domain of TCR clone 75347 (TRAV10, TRAJ6)
CVVRPRTGGSYIPTF

SEQ ID NO: 150694 - protein, 14 aa, Homo sapiens
  CDR3 for beta chain variable domain of TCR clone 75347 (TRBV20-1, TRBJ2-4)
CSASGRVGENSQYF

SEQ ID NO: 150695 - protein, 16 aa, Homo sapiens
  CDR3 for alpha chain variable domain of TCR clone 75348 (TRAV17, TRAJ52)
CATGIIGGTSYGKLTF

SEQ ID NO: 150696 - protein, 14 aa, Homo sapiens
  CDR3 for beta chain variable domain of TCR clone 75348 (TRBV19, TRBJ2-1)
CASPTFVLSGEQFF

SEQ ID NO: 150697 - protein, 14 aa, Homo sapiens
  CDR3 for alpha chain variable domain of TCR clone 75349 (TRAV21, TRAJ58)
CAVGEETSGSRLTF

SEQ ID NO: 150698 - protein, 13 aa, Homo sapiens
  CDR3 for beta chain variable domain of TCR clone 75349 (TRBV7-9, TRBJ1-2)
CASSLKQNYGYTF

SEQ ID NO: 150699 - protein, 18 aa, Homo sapiens
  CDR3 for alpha chain variable domain of TCR clone 75350 (TRAV13-1, TRAJ52)
CAASKRSAGGTSYGKLTF

SEQ ID NO: 150700 - protein, 13 aa, Homo sapiens
  CDR3 for beta chain variable domain of TCR clone 75350 (TRBV12-4, TRBJ1-2)
CASSLRQGEGYAF

SEQ ID NO: 150701 - protein, 15 aa, Homo sapiens
  CDR3 for alpha chain variable domain of TCR clone 75351 (TRAV12-3, TRAJ6)
CAMSATTGGSYIPTF

SEQ ID NO: 150702 - protein, 17 aa, Homo sapiens
  CDR3 for beta chain variable domain of TCR clone 75351 (TRBV2, TRBJ1-4)
CASSKRELTQGEEKLFF

SEQ ID NO: 150703 - protein, 14 aa, Homo sapiens
  CDR3 for alpha chain variable domain of TCR clone 75352 (TRAV1-2, TRAJ23)
CVVSDDNQGGKLIF

SEQ ID NO: 150704 - protein, 16 aa, Homo sapiens
  CDR3 for beta chain variable domain of TCR clone 75352 (TRBV4-2, TRBJ2-5)
CASSQELVGSQETQYF

SEQ ID NO: 150705 - protein, 11 aa, Homo sapiens
  CDR3 for alpha chain variable domain of TCR clone 75353 (TRAV2, TRAJ33)
CAVESNYQLIW

SEQ ID NO: 150706 - protein, 14 aa, Homo sapiens
  CDR3 for beta chain variable domain of TCR clone 75353 (TRBV19, TRBJ2-1)
CASSDNQGANEQFF

SEQ ID NO: 150707 - protein, 13 aa, Homo sapiens
  CDR3 for alpha chain variable domain of TCR clone 75354 (TRAV38-1, TRAJ42)
CARWGGSQGNLIF

SEQ ID NO: 150708 - protein, 10 aa, Homo sapiens
  CDR3 for beta chain variable domain of TCR clone 75354 (TRBV2, TRBJ2-5)
CASNAATQYF

SEQ ID NO: 150709 - protein, 13 aa, Homo sapiens
  CDR3 for alpha chain variable domain of TCR clone 75355 (TRAV21, TRAJ57)
CAVTQGGSEKLVF

SEQ ID NO: 150710 - protein, 15 aa, Homo sapiens
  CDR3 for beta chain variable domain of TCR clone 75355 (TRBV5-1, TRBJ1-1)
CASSSTTGTKTEAFF

SEQ ID NO: 150711 - protein, 12 aa, Homo sapiens
  CDR3 for alpha chain variable domain of TCR clone 75356 (TRAV13-2, TRAJ23)
CAERHKGGKLIF

SEQ ID NO: 150712 - protein, 16 aa, Homo sapiens
  CDR3 for beta chain variable domain of TCR clone 75356 (TRBV20-1, TRBJ1-4)
CSAPGQGLLTNEKLFF

SEQ ID NO: 150713 - protein, 14 aa, Homo sapiens
  CDR3 for alpha chain variable domain of TCR clone 75357 (TRAV1-2, TRAJ8)
CAVREDTGFQKLVF

SEQ ID NO: 150714 - protein, 16 aa, Homo sapiens
  CDR3 for beta chain variable domain of TCR clone 75357 (TRBV12-5, TRBJ2-5)
CASGPRTGGNQETQYF

SEQ ID NO: 150715 - protein, 13 aa, Homo sapiens
  CDR3 for alpha chain variable domain of TCR clone 75358 (TRAV20, TRAJ3)
RASRYSSASKIIF

SEQ ID NO: 150716 - protein, 16 aa, Homo sapiens
  CDR3 for beta chain variable domain of TCR clone 75358 (TRBV6-1, TRBJ1-6)
CASSSDGSPRNSPLHF

SEQ ID NO: 150717 - protein, 13 aa, Homo sapiens
  CDR3 for alpha chain variable domain of TCR clone 75359 (TRAV8-3, TRAJ28)
CAVGAVGSYQLTF

SEQ ID NO: 150718 - protein, 14 aa, Homo sapiens
  CDR3 for beta chain variable domain of TCR clone 75359 (TRBV7-2, TRBJ2-7)
CASRSQWAAYEQYF

SEQ ID NO: 150719 - protein, 14 aa, Homo sapiens
  CDR3 for alpha chain variable domain of TCR clone 75360 (TRAV12-1, TRAJ46)
CVVTAKSSGDKLTL

SEQ ID NO: 150720 - protein, 17 aa, Homo sapiens
  CDR3 for beta chain variable domain of TCR clone 75360 (TRBV4-1, TRBJ2-3)
CASSQDPAGGPLDTQYF

SEQ ID NO: 150721 - protein, 16 aa, Homo sapiens
  CDR3 for alpha chain variable domain of TCR clone 75361 (TRAV3, TRAJ37)
CAVRVMGSGNTGKLIF

SEQ ID NO: 150722 - protein, 11 aa, Homo sapiens
  CDR3 for beta chain variable domain of TCR clone 75361 (TRBV11-2, TRBJ2-2)
CASSLPGELFF

SEQ ID NO: 150723 - protein, 12 aa, Homo sapiens
  CDR3 for alpha chain variable domain of TCR clone 75362 (TRAV8-3, TRAJ26)
CAGDNYGQNFVF

SEQ ID NO: 150724 - protein, 15 aa, Homo sapiens
  CDR3 for beta chain variable domain of TCR clone 75362 (TRBV9, TRBJ2-1)
CASSRAGSAYNEQFF

SEQ ID NO: 150725 - protein, 11 aa, Homo sapiens
  CDR3 for alpha chain variable domain of TCR clone 75363 (TRAV12-1, TRAJ8)
CVVTGFQKLVF

SEQ ID NO: 150726 - protein, 14 aa, Homo sapiens
  CDR3 for beta chain variable domain of TCR clone 75363 (TRBV19, TRBJ2-1)
CASGKSTLYNEQFF

SEQ ID NO: 150727 - protein, 13 aa, Homo sapiens
  CDR3 for alpha chain variable domain of TCR clone 75364 (TRAV21, TRAJ27)
CAARPGNAGKSTF

SEQ ID NO: 150728 - protein, 15 aa, Homo sapiens
  CDR3 for beta chain variable domain of TCR clone 75364 (TRBV4-1, TRBJ1-4)
CASSDTGGTNEKLFF

SEQ ID NO: 150729 - protein, 12 aa, Homo sapiens
  CDR3 for alpha chain variable domain of TCR clone 75365 (TRAV26-2, TRAJ21)
CILKGNFNKFYF

SEQ ID NO: 150730 - protein, 14 aa, Homo sapiens
  CDR3 for beta chain variable domain of TCR clone 75365 (TRBV25-1, TRBJ1-1)
CASTHLGGNTEAFF

SEQ ID NO: 150731 - protein, 14 aa, Homo sapiens
  CDR3 for alpha chain variable domain of TCR clone 75366 (TRAV35, TRAJ29)
CAGQLTSGNTPLVF

SEQ ID NO: 150732 - protein, 15 aa, Homo sapiens
  CDR3 for beta chain variable domain of TCR clone 75366 (TRBV11-3, TRBJ2-3)
CASLKDGREGDTQYF

SEQ ID NO: 150733 - protein, 18 aa, Homo sapiens
  CDR3 for alpha chain variable domain of TCR clone 75367 (TRAV26-2, TRAJ45)
CILRVDKYSGGGADGLTF

SEQ ID NO: 150734 - protein, 14 aa, Homo sapiens
  CDR3 for beta chain variable domain of TCR clone 75367 (TRBV6-1, TRBJ1-3)
CASVQGGGGNTIYF

SEQ ID NO: 150735 - protein, 13 aa, Homo sapiens
  CDR3 for alpha chain variable domain of TCR clone 75368 (TRAV35, TRAJ42)
CAGCPGSQGNLIF

SEQ ID NO: 150736 - protein, 14 aa, Homo sapiens
  CDR3 for beta chain variable domain of TCR clone 75368 (TRBV4-1, TRBJ2-2)
CASSQAVNTGELFF

SEQ ID NO: 150737 - protein, 18 aa, Homo sapiens
  CDR3 for alpha chain variable domain of TCR clone 75369 (TRAV26-1, TRAJ23)
CIVRVGLEVWNQGGKLIF

SEQ ID NO: 150738 - protein, 17 aa, Homo sapiens
  CDR3 for beta chain variable domain of TCR clone 75369 (TRBV7-3, TRBJ2-3)
CASSLMKRMRGADTQYF

SEQ ID NO: 150739 - protein, 13 aa, Homo sapiens
  CDR3 for alpha chain variable domain of TCR clone 75370 (TRAV27, TRAJ29)
CAGAHSGNTPLVF

SEQ ID NO: 150740 - protein, 13 aa, Homo sapiens
  CDR3 for beta chain variable domain of TCR clone 75370 (TRBV10-3, TRBJ2-7)
CASKLAVNYEQYF

SEQ ID NO: 150741 - protein, 15 aa, Homo sapiens
  CDR3 for alpha chain variable domain of TCR clone 75371 (TRAV12-2, TRAJ53)
CAVNGGGGSNYKLTF

SEQ ID NO: 150742 - protein, 12 aa, Homo sapiens
  CDR3 for beta chain variable domain of TCR clone 75371 (TRBV18, TRBJ1-1)
CASSPGQRQAFF

SEQ ID NO: 150743 - protein, 14 aa, Homo sapiens
  CDR3 for alpha chain variable domain of TCR clone 75372 (TRAV1-2, TRAJ16)
CAVNRFSDGQKLLF

SEQ ID NO: 150744 - protein, 17 aa, Homo sapiens
  CDR3 for beta chain variable domain of TCR clone 75372 (TRBV15, TRBJ1-2)
CATSGREIDVVNYGYAF

SEQ ID NO: 150745 - protein, 14 aa, Homo sapiens
  CDR3 for alpha chain variable domain of TCR clone 75373 (TRAV16, TRAJ17)
CAPRIKAAGNKLTF

SEQ ID NO: 150746 - protein, 17 aa, Homo sapiens
  CDR3 for beta chain variable domain of TCR clone 75373 (TRBV7-2, TRBJ2-3)
CASSSYFGTRRADTQYF

SEQ ID NO: 150747 - protein, 11 aa, Homo sapiens
  CDR3 for alpha chain variable domain of TCR clone 75374 (TRAV27, TRAJ13)
CRSGGYQKVTF

SEQ ID NO: 150748 - protein, 15 aa, Homo sapiens
  CDR3 for beta chain variable domain of TCR clone 75374 (TRBV20-1, TRBJ2-6)
CSARDRGPGANVLTF

SEQ ID NO: 150749 - protein, 13 aa, Homo sapiens
  CDR3 for alpha chain variable domain of TCR clone 75375 (TRAV39, TRAJ58)
CAGEETSGSRLPF

SEQ ID NO: 150750 - protein, 13 aa, Homo sapiens
  CDR3 for beta chain variable domain of TCR clone 75375 (TRBV15, TRBJ2-7)
CATSTTGHYEQYF

SEQ ID NO: 150751 - protein, 12 aa, Homo sapiens
  CDR3 for alpha chain variable domain of TCR clone 75376 (TRAV12-3, TRAJ17)
CAMTLTGNKLTF

SEQ ID NO: 150752 - protein, 13 aa, Homo sapiens
  CDR3 for beta chain variable domain of TCR clone 75376 (TRBV5-1, TRBJ1-2)
CASSSTGVYGDTF

SEQ ID NO: 150753 - protein, 15 aa, Homo sapiens
  CDR3 for alpha chain variable domain of TCR clone 75377 (TRAV26-1, TRAJ29)
CIVRVEGSGNTPLVF

SEQ ID NO: 150754 - protein, 13 aa, Homo sapiens
  CDR3 for beta chain variable domain of TCR clone 75377 (TRBV2, TRBJ2-7)
FASSVGGSGEQYF

SEQ ID NO: 150755 - protein, 14 aa, Homo sapiens
  CDR3 for alpha chain variable domain of TCR clone 75378 (TRAV30, TRAJ33)
CGTVAPRSNYQLIW

SEQ ID NO: 150756 - protein, 13 aa, Homo sapiens
  CDR3 for beta chain variable domain of TCR clone 75378 (TRBV3-1, TRBJ2-2)
CASLARGSGELFF

SEQ ID NO: 150757 - protein, 12 aa, Homo sapiens
  CDR3 for alpha chain variable domain of TCR clone 75379 (TRAV21, TRAJ33)
CAKMDSNYQLIW

SEQ ID NO: 150758 - protein, 14 aa, Homo sapiens
  CDR3 for beta chain variable domain of TCR clone 75379 (TRBV2, TRBJ2-7)
CASSLTSGSYEQYF

SEQ ID NO: 150759 - protein, 13 aa, Homo sapiens
  CDR3 for alpha chain variable domain of TCR clone 75380 (TRAV27, TRAJ6)
CAGGTRGSYIPTF

SEQ ID NO: 150760 - protein, 17 aa, Homo sapiens
  CDR3 for beta chain variable domain of TCR clone 75380 (TRBV7-3, TRBJ2-3)
CASSLMKRMRGADTQYF

SEQ ID NO: 150761 - protein, 17 aa, Homo sapiens
  CDR3 for alpha chain variable domain of TCR clone 75381 (TRAV4, TRAJ42)
CLGGVLNYGGSQGNLIF

SEQ ID NO: 150762 - protein, 12 aa, Homo sapiens
  CDR3 for beta chain variable domain of TCR clone 75381 (TRBV20-1, TRBJ2-1)
CSAQYTYNEQFF

SEQ ID NO: 150763 - protein, 12 aa, Homo sapiens
  CDR3 for alpha chain variable domain of TCR clone 75382 (TRAV12-3, TRAJ20)
CAMVRGDYKLSF

SEQ ID NO: 150764 - protein, 15 aa, Homo sapiens
  CDR3 for beta chain variable domain of TCR clone 75382 (TRBV5-1, TRBJ2-1)
CASSPPRAPYNEQFF

SEQ ID NO: 150765 - protein, 14 aa, Homo sapiens
  CDR3 for alpha chain variable domain of TCR clone 75383 (TRAV26-1, TRAJ38)
CIADIAGNNRKLIW

SEQ ID NO: 150766 - protein, 13 aa, Homo sapiens
  CDR3 for beta chain variable domain of TCR clone 75383 (TRBV20-1, TRBJ1-1)
CSARGGGNTEAFF

SEQ ID NO: 150767 - protein, 16 aa, Homo sapiens
  CDR3 for alpha chain variable domain of TCR clone 75384 (TRAV14/DV4, TRAJ54)
CAMREGRIQGAQKLVF

SEQ ID NO: 150768 - protein, 15 aa, Homo sapiens
  CDR3 for beta chain variable domain of TCR clone 75384 (TRBV27, TRBJ2-3)
CASSLGLAATDTQYF

SEQ ID NO: 150769 - protein, 17 aa, Homo sapiens
  CDR3 for alpha chain variable domain of TCR clone 75385 (TRAV26-1, TRAJ53)
CIVRVDDSGGSNYKRTF

SEQ ID NO: 150770 - protein, 15 aa, Homo sapiens
  CDR3 for beta chain variable domain of TCR clone 75385 (TRBV20-1, TRBJ2-7)
CSARVPAAYFYEQYF

SEQ ID NO: 150771 - protein, 14 aa, Homo sapiens
  CDR3 for alpha chain variable domain of TCR clone 75386 (TRAV2, TRAJ9)
CAVDPNTGGFKTIF

SEQ ID NO: 150772 - protein, 14 aa, Homo sapiens
  CDR3 for beta chain variable domain of TCR clone 75386 (TRBV7-2, TRBJ2-7)
CASSPKTSFYEQYL

SEQ ID NO: 150773 - protein, 13 aa, Homo sapiens
  CDR3 for alpha chain variable domain of TCR clone 75387 (TRAV8-6, TRAJ50)
CAVIKTSYDKVIF

SEQ ID NO: 150774 - protein, 14 aa, Homo sapiens
  CDR3 for beta chain variable domain of TCR clone 75387 (TRBV19, TRBJ2-1)
CASPTFVLSGEQFF

SEQ ID NO: 150775 - protein, 12 aa, Homo sapiens
  CDR3 for alpha chain variable domain of TCR clone 75388 (TRAV13-1, TRAJ21)
CAAKEGFNKFYF

SEQ ID NO: 150776 - protein, 17 aa, Homo sapiens
  CDR3 for beta chain variable domain of TCR clone 75388 (TRBV19, TRBJ2-7)
CDSSISFYDSYPYEQYF

SEQ ID NO: 150777 - protein, 10 aa, Homo sapiens
  CDR3 for alpha chain variable domain of TCR clone 75389 (TRAV26-1, TRAJ22)
CIGSLNFFWF

SEQ ID NO: 150778 - protein, 15 aa, Homo sapiens
  CDR3 for beta chain variable domain of TCR clone 75389 (TRBV4-2, TRBJ1-2)
CASSQRTGGRDGYTF

SEQ ID NO: 150779 - protein, 14 aa, Homo sapiens
  CDR3 for alpha chain variable domain of TCR clone 75390 (TRAV12-3, TRAJ10)
SHLPLTGGGNKLTF

SEQ ID NO: 150780 - protein, 15 aa, Homo sapiens
  CDR3 for beta chain variable domain of TCR clone 75390 (TRBV2, TRBJ2-1)
CASSEEREGDNEQFF

SEQ ID NO: 150781 - protein, 16 aa, Homo sapiens
  CDR3 for alpha chain variable domain of TCR clone 75391 (TRAV12-1, TRAJ45)
CVVIRYSGGGADGLTF

SEQ ID NO: 150782 - protein, 12 aa, Homo sapiens
  CDR3 for beta chain variable domain of TCR clone 75391 (TRBV6-5, TRBJ2-2)
CDSRQITGELFF

SEQ ID NO: 150783 - protein, 19 aa, Homo sapiens
  CDR3 for alpha chain variable domain of TCR clone 75392 (TRAV38-1, TRAJ53)
CAFMKHGLESGGSNYKLTF

SEQ ID NO: 150784 - protein, 13 aa, Homo sapiens
  CDR3 for beta chain variable domain of TCR clone 75392 (TRBV20-1, TRBJ1-1)
CSAGTVGNTEAFF

SEQ ID NO: 150785 - protein, 14 aa, Homo sapiens
  CDR3 for alpha chain variable domain of TCR clone 75393 (TRAV1-2, TRAJ16)
CAVNRFSDGQKLLF

SEQ ID NO: 150786 - protein, 15 aa, Homo sapiens
  CDR3 for beta chain variable domain of TCR clone 75393 (TRBV5-1, TRBJ2-3)
CASRNQAGSTDTQYF

SEQ ID NO: 150787 - protein, 17 aa, Homo sapiens
  CDR3 for alpha chain variable domain of TCR clone 75394 (TRAV3, TRAJ6)
CAVRDGPRAGGSYIPTF

SEQ ID NO: 150788 - protein, 15 aa, Homo sapiens
  CDR3 for beta chain variable domain of TCR clone 75394 (TRBV20-1, TRBJ2-7)
CSAESGTSGAYEQYF

SEQ ID NO: 150789 - protein, 14 aa, Homo sapiens
  CDR3 for alpha chain variable domain of TCR clone 75395 (TRAV1-1, TRAJ27)
CAVIYITNAGKSTF

SEQ ID NO: 150790 - protein, 15 aa, Homo sapiens
  CDR3 for beta chain variable domain of TCR clone 75395 (TRBV7-2, TRBJ2-1)
CASSSGLAGGNEQFF

SEQ ID NO: 150791 - protein, 15 aa, Homo sapiens
  CDR3 for alpha chain variable domain of TCR clone 75396 (TRAV26-1, TRAJ29)
CIVRVEGSGNKTLVF

SEQ ID NO: 150792 - protein, 18 aa, Homo sapiens
  CDR3 for beta chain variable domain of TCR clone 75396 (TRBV5-5, TRBJ1-5)
CASSLRQVKGSSNQPQHF

SEQ ID NO: 150793 - protein, 13 aa, Homo sapiens
  CDR3 for alpha chain variable domain of TCR clone 75397 (TRAV16, TRAJ34)
CALKGYNTDKLIF

SEQ ID NO: 150794 - protein, 13 aa, Homo sapiens
  CDR3 for beta chain variable domain of TCR clone 75397 (TRBV6-1, TRBJ2-1)
CASREDGGHEQFF

SEQ ID NO: 150795 - protein, 15 aa, Homo sapiens
  CDR3 for alpha chain variable domain of TCR clone 75398 (TRAV17, TRAJ57)
CATGPSQGGSEKLVF

SEQ ID NO: 150796 - protein, 16 aa, Homo sapiens
  CDR3 for beta chain variable domain of TCR clone 75398 (TRBV12-4, TRBJ1-5)
CASSRPFGGSSQPQHF

SEQ ID NO: 150797 - protein, 16 aa, Homo sapiens
  CDR3 for alpha chain variable domain of TCR clone 75399 (TRAV8-6, TRAJ39)
CAVMPMNNNAGNMPTF

SEQ ID NO: 150798 - protein, 16 aa, Homo sapiens
  CDR3 for beta chain variable domain of TCR clone 75399 (TRBV15, TRBJ2-5)
CATSRYLEAAQETQYF

SEQ ID NO: 150799 - protein, 14 aa, Homo sapiens
  CDR3 for alpha chain variable domain of TCR clone 75400 (TRAV29/DV5, TRAJ45)
CAASFIGGADGLTF

SEQ ID NO: 150800 - protein, 11 aa, Homo sapiens
  CDR3 for beta chain variable domain of TCR clone 75400 (TRBV11-2, TRBJ2-2)
CASSLPGELFF

SEQ ID NO: 150801 - protein, 12 aa, Homo sapiens
  CDR3 for alpha chain variable domain of TCR clone 75401 (TRAV35, TRAJ30)
CAGHLADDKIIF

SEQ ID NO: 150802 - protein, 17 aa, Homo sapiens
  CDR3 for beta chain variable domain of TCR clone 75401 (TRBV4-2, TRBJ2-5)
CASSPGRWRNFQETQYF

SEQ ID NO: 150803 - protein, 12 aa, Homo sapiens
  CDR3 for alpha chain variable domain of TCR clone 75402 (TRAV13-2, TRAJ23)
CAERHRGGKLIF

SEQ ID NO: 150804 - protein, 17 aa, Homo sapiens
  CDR3 for beta chain variable domain of TCR clone 75402 (TRBV20-1, TRBJ2-2)
CSASGSGQGGLTGELFF

SEQ ID NO: 150805 - protein, 16 aa, Homo sapiens
  CDR3 for alpha chain variable domain of TCR clone 75403 (TRAV30, TRAJ24)
CGTEIVDADSWGKFQF

SEQ ID NO: 150806 - protein, 19 aa, Homo sapiens
  CDR3 for beta chain variable domain of TCR clone 75403 (TRBV7-2, TRBJ2-3)
CASSPGLAGGGLTTDTQYF

SEQ ID NO: 150807 - protein, 13 aa, Homo sapiens
  CDR3 for alpha chain variable domain of TCR clone 75404 (TRAV13-1, TRAJ11)
CAAVLAGYSTLTF

SEQ ID NO: 150808 - protein, 17 aa, Homo sapiens
  CDR3 for beta chain variable domain of TCR clone 75404 (TRBV25-1, TRBJ2-7)
CAGSDARVVFSSYEQYF

SEQ ID NO: 150809 - protein, 13 aa, Homo sapiens
  CDR3 for alpha chain variable domain of TCR clone 75405 (TRAV30, TRAJ20)
CGTEDRSGYKLSF

SEQ ID NO: 150810 - protein, 17 aa, Homo sapiens
  CDR3 for beta chain variable domain of TCR clone 75405 (TRBV20-1, TRBJ2-2)
CSASGSGQGGLTGELFF

SEQ ID NO: 150811 - protein, 13 aa, Homo sapiens
  CDR3 for alpha chain variable domain of TCR clone 75406 (TRAV23/DV6, TRAJ47)
CAVSSQYGNKLVF

SEQ ID NO: 150812 - protein, 15 aa, Homo sapiens
  CDR3 for beta chain variable domain of TCR clone 75406 (TRBV7-3, TRBJ2-1)
CASSLDGNSYNEQFF

SEQ ID NO: 150813 - protein, 12 aa, Homo sapiens
  CDR3 for alpha chain variable domain of TCR clone 75407 (TRAV1-1, TRAJ39)
CAVPGVGNMLTF

SEQ ID NO: 150814 - protein, 15 aa, Homo sapiens
  CDR3 for beta chain variable domain of TCR clone 75407 (TRBV19, TRBJ1-6)
CASSTQGAVGSPLHF

SEQ ID NO: 150815 - protein, 16 aa, Homo sapiens
  CDR3 for alpha chain variable domain of TCR clone 75408 (TRAV30, TRAJ24)
CGTEIVDDDSWGKFQF

SEQ ID NO: 150816 - protein, 14 aa, Homo sapiens
  CDR3 for beta chain variable domain of TCR clone 75408 (TRBV7-2, TRBJ2-7)
CASSPKTSFYEQYF

SEQ ID NO: 150817 - protein, 17 aa, Homo sapiens
  CDR3 for alpha chain variable domain of TCR clone 75409 (TRAV26-2, TRAJ42)
CILRDVGYGGSQGNLIF

SEQ ID NO: 150818 - protein, 16 aa, Homo sapiens
  CDR3 for beta chain variable domain of TCR clone 75409 (TRBV12-4, TRBJ2-3)
CASSFPSNTNTDTQYF

SEQ ID NO: 150819 - protein, 12 aa, Homo sapiens
  CDR3 for alpha chain variable domain of TCR clone 75410 (TRAV8-3, TRAJ26)
CAGDNYGQNFVF

SEQ ID NO: 150820 - protein, 16 aa, Homo sapiens
  CDR3 for beta chain variable domain of TCR clone 75410 (TRBV19, TRBJ2-2)
CASRSPGTGATGELFF

SEQ ID NO: 150821 - protein, 10 aa, Homo sapiens
  CDR3 for alpha chain variable domain of TCR clone 75411 (TRAV23/DV6, TRAJ57)
CAAGSTLSQG

SEQ ID NO: 150822 - protein, 14 aa, Homo sapiens
  CDR3 for beta chain variable domain of TCR clone 75411 (TRBV7-9, TRBJ2-2)
CASSFDRGTGELFF

SEQ ID NO: 150823 - protein, 14 aa, Homo sapiens
  CDR3 for alpha chain variable domain of TCR clone 75412 (TRAV26-1, TRAJ38)
CIADNAGNNRKLIW

SEQ ID NO: 150824 - protein, 14 aa, Homo sapiens
  CDR3 for beta chain variable domain of TCR clone 75412 (TRBV7-2, TRBJ1-2)
CASSQTGSTYGYTF

SEQ ID NO: 150825 - protein, 16 aa, Homo sapiens
  CDR3 for alpha chain variable domain of TCR clone 75413 (TRAV20, TRAJ52)
CAALPDGGTSYGKLTF

SEQ ID NO: 150826 - protein, 12 aa, Homo sapiens
  CDR3 for beta chain variable domain of TCR clone 75413 (TRBV19, TRBJ2-1)
CASSQISNEQFF

SEQ ID NO: 150827 - protein, 12 aa, Homo sapiens
  CDR3 for alpha chain variable domain of TCR clone 75414 (TRAV29/DV5, TRAJ34)
CAAHHNTDKLIF

SEQ ID NO: 150828 - protein, 15 aa, Homo sapiens
  CDR3 for beta chain variable domain of TCR clone 75414 (TRBV19, TRBJ2-7)
CTSSPAGSGEALRYF

SEQ ID NO: 150829 - protein, 12 aa, Homo sapiens
  CDR3 for alpha chain variable domain of TCR clone 75415 (TRAV13-2, TRAJ8)
CAPWLGFQKLVF

SEQ ID NO: 150830 - protein, 15 aa, Homo sapiens
  CDR3 for beta chain variable domain of TCR clone 75415 (TRBV19, TRBJ2-4)
CASRGPRRGENIQYF

SEQ ID NO: 150831 - protein, 13 aa, Homo sapiens
  CDR3 for alpha chain variable domain of TCR clone 75416 (TRAV8-3, TRAJ44)
CAVVPGTASKLTF

SEQ ID NO: 150832 - protein, 14 aa, Homo sapiens
  CDR3 for beta chain variable domain of TCR clone 75416 (TRBV11-2, TRBJ2-3)
CASSRLACTDTQYF

SEQ ID NO: 150833 - protein, 11 aa, Homo sapiens
  CDR3 for alpha chain variable domain of TCR clone 75417 (TRAV2, TRAJ33)
CAVESNYQLIW

SEQ ID NO: 150834 - protein, 15 aa, Homo sapiens
  CDR3 for beta chain variable domain of TCR clone 75417 (TRBV19, TRBJ2-2)
CASSPRTGWTGELFF

SEQ ID NO: 150835 - protein, 17 aa, Homo sapiens
  CDR3 for alpha chain variable domain of TCR clone 75418 (TRAV8-6, TRAJ58)
CAVSSWVGETSGSRLTF

SEQ ID NO: 150836 - protein, 14 aa, Homo sapiens
  CDR3 for beta chain variable domain of TCR clone 75418 (TRBV4-2, TRBJ2-1)
CASGLDSAYNEQFF

SEQ ID NO: 150837 - protein, 15 aa, Homo sapiens
  CDR3 for alpha chain variable domain of TCR clone 75419 (TRAV25, TRAJ53)
CAATGGGGSNYKRTF

SEQ ID NO: 150838 - protein, 19 aa, Homo sapiens
  CDR3 for beta chain variable domain of TCR clone 75419 (TRBV7-2, TRBJ2-3)
CASSFLSRNWGGGTDTQYF

SEQ ID NO: 150839 - protein, 13 aa, Homo sapiens
  CDR3 for alpha chain variable domain of TCR clone 75420 (TRAV22, TRAJ29)
CAVGGSGNTPLVF

SEQ ID NO: 150840 - protein, 14 aa, Homo sapiens
  CDR3 for beta chain variable domain of TCR clone 75420 (TRBV12-5, TRBJ2-7)
CASGQTGNSYEQYF

SEQ ID NO: 150841 - protein, 14 aa, Homo sapiens
  CDR3 for alpha chain variable domain of TCR clone 75421 (TRAV38-1, TRAJ29)
CAFITPSGNTPLVF

SEQ ID NO: 150842 - protein, 16 aa, Homo sapiens
  CDR3 for beta chain variable domain of TCR clone 75421 (TRBV11-2, TRBJ2-7)
CASSPTTGEVSYEQYF

SEQ ID NO: 150843 - protein, 14 aa, Homo sapiens
  CDR3 for alpha chain variable domain of TCR clone 75422 (TRAV16, TRAJ39)
CALSKNNAGNMLTL

SEQ ID NO: 150844 - protein, 17 aa, Homo sapiens
  CDR3 for beta chain variable domain of TCR clone 75422 (TRBV23-1, TRBJ1-2)
CASSNTGGGLLWLHLRF

SEQ ID NO: 150845 - protein, 16 aa, Homo sapiens
  CDR3 for alpha chain variable domain of TCR clone 75423 (TRAV3, TRAJ37)
CAVRPHGSGNTGKLIF

SEQ ID NO: 150846 - protein, 17 aa, Homo sapiens
  CDR3 for beta chain variable domain of TCR clone 75423 (TRBV20-1, TRBJ2-1)
CSASSSGLAGSYNEQLF

SEQ ID NO: 150847 - protein, 15 aa, Homo sapiens
  CDR3 for alpha chain variable domain of TCR clone 75424 (TRAV8-3, TRAJ45)
CASSYSGGGADGPTF

SEQ ID NO: 150848 - protein, 13 aa, Homo sapiens
  CDR3 for beta chain variable domain of TCR clone 75424 (TRBV10-3, TRBJ2-7)
YASKLAVNYEQYF

SEQ ID NO: 150849 - protein, 11 aa, Homo sapiens
  CDR3 for alpha chain variable domain of TCR clone 75425 (TRAV1-1, TRAJ23)
CAVRQGGKLIF

SEQ ID NO: 150850 - protein, 15 aa, Homo sapiens
  CDR3 for beta chain variable domain of TCR clone 75425 (TRBV5-1, TRBJ2-1)
CASSPPRAPYNGQFF

SEQ ID NO: 150851 - protein, 14 aa, Homo sapiens
  CDR3 for alpha chain variable domain of TCR clone 75426 (TRAV1-2, TRAJ8)
CAVREDTGFQKLVF

SEQ ID NO: 150852 - protein, 16 aa, Homo sapiens
  CDR3 for beta chain variable domain of TCR clone 75426 (TRBV19, TRBJ2-1)
CASGKAGPSSYNEQFF

SEQ ID NO: 150853 - protein, 16 aa, Homo sapiens
  CDR3 for alpha chain variable domain of TCR clone 75427 (TRAV30, TRAJ24)
CGTETVDADSWGKFQF

SEQ ID NO: 150854 - protein, 12 aa, Homo sapiens
  CDR3 for beta chain variable domain of TCR clone 75427 (TRBV7-8, TRBJ2-7)
CASSLGDREQYF

SEQ ID NO: 150855 - protein, 11 aa, Homo sapiens
  CDR3 for alpha chain variable domain of TCR clone 75428 (TRAV26-2, TRAJ8)
CILTGFQKLVF

SEQ ID NO: 150856 - protein, 16 aa, Homo sapiens
  CDR3 for beta chain variable domain of TCR clone 75428 (TRBV7-3, TRBJ2-2)
CASSLKRGTLSGELFF

SEQ ID NO: 150857 - protein, 14 aa, Homo sapiens
  CDR3 for alpha chain variable domain of TCR clone 75429 (TRAV12-3, TRAJ9)
CAMSPNTGGFKTIF

SEQ ID NO: 150858 - protein, 13 aa, Homo sapiens
  CDR3 for beta chain variable domain of TCR clone 75429 (TRBV2, TRBJ2-7)
CASSVGGSGEQYF

SEQ ID NO: 150859 - protein, 14 aa, Homo sapiens
  CDR3 for alpha chain variable domain of TCR clone 75430 (TRAV12-2, TRAJ13)
CAVKKTGGYQKVTF

SEQ ID NO: 150860 - protein, 13 aa, Homo sapiens
  CDR3 for beta chain variable domain of TCR clone 75430 (TRBV28, TRBJ1-2)
CAGRDRGNYGYTF

SEQ ID NO: 150861 - protein, 20 aa, Homo sapiens
  CDR3 for alpha chain variable domain of TCR clone 75431 (TRAV27, TRAJ5)
TAAQPGDTGLYETGRRALTF

SEQ ID NO: 150862 - protein, 15 aa, Homo sapiens
  CDR3 for beta chain variable domain of TCR clone 75431 (TRBV28, TRBJ1-3)
CASSMGWASGNTIYF

SEQ ID NO: 150863 - protein, 18 aa, Homo sapiens
  CDR3 for alpha chain variable domain of TCR clone 75432 (TRAV3, TRAJ17)
CAVRARRGGRSCRQPANF

SEQ ID NO: 150864 - protein, 14 aa, Homo sapiens
  CDR3 for beta chain variable domain of TCR clone 75432 (TRBV4-1, TRBJ2-2)
CASSQAVNTGELFF

SEQ ID NO: 150865 - protein, 13 aa, Homo sapiens
  CDR3 for alpha chain variable domain of TCR clone 75433 (TRAV12-3, TRAJ9)
CAMSADGGFKTTF

SEQ ID NO: 150866 - protein, 13 aa, Homo sapiens
  CDR3 for beta chain variable domain of TCR clone 75433 (TRBV12-5, TRBJ2-3)
CASGDRQSDTQYF

SEQ ID NO: 150867 - protein, 13 aa, Homo sapiens
  CDR3 for alpha chain variable domain of TCR clone 75434 (TRAV21, TRAJ27)
CAARPDNAGKSTF

SEQ ID NO: 150868 - protein, 13 aa, Homo sapiens
  CDR3 for beta chain variable domain of TCR clone 75434 (TRBV20-1, TRBJ2-2)
CSASAAGTGELFF

SEQ ID NO: 150869 - protein, 16 aa, Homo sapiens
  CDR3 for alpha chain variable domain of TCR clone 75435 (TRAV3, TRAJ10)
CAVRDMNAGGGNKLTF

SEQ ID NO: 150870 - protein, 17 aa, Homo sapiens
  CDR3 for beta chain variable domain of TCR clone 75435 (TRBV20-1, TRBJ2-7)
CSARDRVSGWTSSTSGR

SEQ ID NO: 150871 - protein, 14 aa, Homo sapiens
  CDR3 for alpha chain variable domain of TCR clone 75436 (TRAV1-2, TRAJ16)
CAVNRFSDGQKLLF

SEQ ID NO: 150872 - protein, 19 aa, Homo sapiens
  CDR3 for beta chain variable domain of TCR clone 75436 (TRBV11-3, TRBJ2-2)
CASSTRPGAKTTNTGELFF

SEQ ID NO: 150873 - protein, 14 aa, Homo sapiens
  CDR3 for alpha chain variable domain of TCR clone 75437 (TRAV35, TRAJ22)
CAGLRPGSARQLTF

SEQ ID NO: 150874 - protein, 12 aa, Homo sapiens
  CDR3 for beta chain variable domain of TCR clone 75437 (TRBV2, TRBJ2-1)
CAYGPPGNEQFF

SEQ ID NO: 150875 - protein, 13 aa, Homo sapiens
  CDR3 for alpha chain variable domain of TCR clone 75438 (TRAV27, TRAJ56)
CAGKPGANSKLTF

SEQ ID NO: 150876 - protein, 21 aa, Homo sapiens
  CDR3 for beta chain variable domain of TCR clone 75438 (TRBV5-1, TRBJ2-7)
CASSGQPGTDSLRAVLRAGHQ

SEQ ID NO: 150877 - protein, 13 aa, Homo sapiens
  CDR3 for alpha chain variable domain of TCR clone 75439 (TRAV29/DV5, TRAJ52)
CAAGFRGAGGTSY

SEQ ID NO: 150878 - protein, 16 aa, Homo sapiens
  CDR3 for beta chain variable domain of TCR clone 75439 (TRBV7-3, TRBJ2-2)
CASSLKRGTLSGELFF

SEQ ID NO: 150879 - protein, 16 aa, Homo sapiens
  CDR3 for alpha chain variable domain of TCR clone 75440 (TRAV3, TRAJ28)
CAVLPRSGAGSYKLTF

SEQ ID NO: 150880 - protein, 13 aa, Homo sapiens
  CDR3 for beta chain variable domain of TCR clone 75440 (TRBV12-4, TRBJ2-5)
CASRLAVQETQYF

SEQ ID NO: 150881 - protein, 15 aa, Homo sapiens
  CDR3 for alpha chain variable domain of TCR clone 75441 (TRAV3, TRAJ5)
WAVRDLDTGRRALTF

SEQ ID NO: 150882 - protein, 13 aa, Homo sapiens
  CDR3 for beta chain variable domain of TCR clone 75441 (TRBV12-4, TRBJ2-7)
CASSPTETYEQYF

SEQ ID NO: 150883 - protein, 13 aa, Homo sapiens
  CDR3 for alpha chain variable domain of TCR clone 75442 (TRAV12-1, TRAJ16)
CVVNGPDGQKLLF

SEQ ID NO: 150884 - protein, 12 aa, Homo sapiens
  CDR3 for beta chain variable domain of TCR clone 75442 (TRBV28, TRBJ2-7)
CASSFSSYEQYF

SEQ ID NO: 150885 - protein, 11 aa, Homo sapiens
  CDR3 for alpha chain variable domain of TCR clone 75443 (TRAV35, TRAJ30)
CAGPGDDKIIF

SEQ ID NO: 150886 - protein, 14 aa, Homo sapiens
  CDR3 for beta chain variable domain of TCR clone 75443 (TRBV7-6, TRBJ1-6)
CASSQAGGGSPLQF

SEQ ID NO: 150887 - protein, 14 aa, Homo sapiens
  CDR3 for alpha chain variable domain of TCR clone 75444 (TRAV12-2, TRAJ11)
CAVNRESGYSTLTF

SEQ ID NO: 150888 - protein, 10 aa, Homo sapiens
  CDR3 for beta chain variable domain of TCR clone 75444 (TRBV20-1, TRBJ2-5)
CSAGFETQYF

SEQ ID NO: 150889 - protein, 18 aa, Homo sapiens
  CDR3 for alpha chain variable domain of TCR clone 75445 (TRAV20, TRAJ4)
CAVQPYYMFSGGYNKLIF

SEQ ID NO: 150890 - protein, 13 aa, Homo sapiens
  CDR3 for beta chain variable domain of TCR clone 75445 (TRBV19, TRBJ2-3)
CATWDKITGTQYF

SEQ ID NO: 150891 - protein, 13 aa, Homo sapiens
  CDR3 for alpha chain variable domain of TCR clone 75446 (TRAV17, TRAJ9)
CATDYTGGFKTIF

SEQ ID NO: 150892 - protein, 14 aa, Homo sapiens
  CDR3 for beta chain variable domain of TCR clone 75446 (TRBV19, TRBJ2-5)
CTSSMTGQQETQYF

SEQ ID NO: 150893 - protein, 14 aa, Homo sapiens
  CDR3 for alpha chain variable domain of TCR clone 75447 (TRAV26-1, TRAJ38)
FIADNAGNNRKLIW

SEQ ID NO: 150894 - protein, 13 aa, Homo sapiens
  CDR3 for beta chain variable domain of TCR clone 75447 (TRBV4-1, TRBJ2-7)
CASSQGQAYEQYF

SEQ ID NO: 150895 - protein, 15 aa, Homo sapiens
  CDR3 for alpha chain variable domain of TCR clone 75448 (TRAV2, TRAJ9)
SAVEDRGTGGFKTIF

SEQ ID NO: 150896 - protein, 16 aa, Homo sapiens
  CDR3 for beta chain variable domain of TCR clone 75448 (TRBV24-1, TRBJ2-3)
CATSDPGTGATDTQYF

SEQ ID NO: 150897 - protein, 18 aa, Homo sapiens
  CDR3 for alpha chain variable domain of TCR clone 75449 (TRAV21, TRAJ52)
CAVRPSPAGGTSYGQLTF

SEQ ID NO: 150898 - protein, 14 aa, Homo sapiens
  CDR3 for beta chain variable domain of TCR clone 75449 (TRBV4-1, TRBJ2-2)
CASSQAVNTGELFF

SEQ ID NO: 150899 - protein, 15 aa, Homo sapiens
  CDR3 for alpha chain variable domain of TCR clone 75450 (TRAV13-1, TRAJ17)
CAASIERAAGNKLTF

SEQ ID NO: 150900 - protein, 15 aa, Homo sapiens
  CDR3 for beta chain variable domain of TCR clone 75450 (TRBV9, TRBJ1-6)
CASSVAGTGDSPLHF

SEQ ID NO: 150901 - protein, 10 aa, Homo sapiens
  CDR3 for alpha chain variable domain of TCR clone 75451 (TRAV38-2/DV8, TRAJ40)
CASGTYEYIF

SEQ ID NO: 150902 - protein, 14 aa, Homo sapiens
  CDR3 for beta chain variable domain of TCR clone 75451 (TRBV7-9, TRBJ2-1)
CASSPRDSLYEQFF

SEQ ID NO: 150903 - protein, 13 aa, Homo sapiens
  CDR3 for alpha chain variable domain of TCR clone 75452 (TRAV12-3, TRAJ21)
CAPGPHNFNNFYF

SEQ ID NO: 150904 - protein, 13 aa, Homo sapiens
  CDR3 for beta chain variable domain of TCR clone 75452 (TRBV4-2, TRBJ1-1)
CASSQAGNTEAFF

SEQ ID NO: 150905 - protein, 16 aa, Homo sapiens
  CDR3 for alpha chain variable domain of TCR clone 75453 (TRAV30, TRAJ24)
CGTEIVDADSWGKFQF

SEQ ID NO: 150906 - protein, 18 aa, Homo sapiens
  CDR3 for beta chain variable domain of TCR clone 75453 (TRBV7-3, TRBJ2-1)
CASSLTLASGRAMVSSSS

SEQ ID NO: 150907 - protein, 11 aa, Homo sapiens
  CDR3 for alpha chain variable domain of TCR clone 75454 (TRAV12-3, TRAJ43)
CTISVSNDMRF

SEQ ID NO: 150908 - protein, 14 aa, Homo sapiens
  CDR3 for beta chain variable domain of TCR clone 75454 (TRBV7-2, TRBJ1-2)
CASSQTGSTYGYTF

SEQ ID NO: 150909 - protein, 13 aa, Homo sapiens
  CDR3 for alpha chain variable domain of TCR clone 75455 (TRAV13-1, TRAJ33)
CAASRADNYQLIW

SEQ ID NO: 150910 - protein, 15 aa, Homo sapiens
  CDR3 for beta chain variable domain of TCR clone 75455 (TRBV2, TRBJ2-7)
EDSAMYFCASSEQYF

SEQ ID NO: 150911 - protein, 11 aa, Homo sapiens
  CDR3 for alpha chain variable domain of TCR clone 75456 (TRAV21, TRAJ48)
CAVDGNEKLTF

SEQ ID NO: 150912 - protein, 13 aa, Homo sapiens
  CDR3 for beta chain variable domain of TCR clone 75456 (TRBV7-9, TRBJ1-2)
CASSLKQNYGYTF

SEQ ID NO: 150913 - protein, 11 aa, Homo sapiens
  CDR3 for alpha chain variable domain of TCR clone 75457 (TRAV12-3, TRAJ43)
RAMSVSNDMRF

SEQ ID NO: 150914 - protein, 14 aa, Homo sapiens
  CDR3 for beta chain variable domain of TCR clone 75457 (TRBV6-3, TRBJ1-1)
CASSNLLPGAEAFF

SEQ ID NO: 150915 - protein, 14 aa, Homo sapiens
  CDR3 for alpha chain variable domain of TCR clone 75458 (TRAV3, TRAJ22)
CCERPGGSARQLTF

SEQ ID NO: 150916 - protein, 14 aa, Homo sapiens
  CDR3 for beta chain variable domain of TCR clone 75458 (TRBV7-2, TRBJ2-5)
CASSPRGSSETQYF

SEQ ID NO: 150917 - protein, 15 aa, Homo sapiens
  CDR3 for alpha chain variable domain of TCR clone 75459 (TRAV26-1, TRAJ29)
CIVRVEGSGNTALVF

SEQ ID NO: 150918 - protein, 14 aa, Homo sapiens
  CDR3 for beta chain variable domain of TCR clone 75459 (TRBV18, TRBJ2-5)
CASSPGVSQETQYF

SEQ ID NO: 150919 - protein, 14 aa, Homo sapiens
  CDR3 for alpha chain variable domain of TCR clone 75460 (TRAV12-3, TRAJ45)
SHLPLTGGGNKLTF

SEQ ID NO: 150920 - protein, 17 aa, Homo sapiens
  CDR3 for beta chain variable domain of TCR clone 75460 (TRBV11-2, TRBJ2-1)
CASSLYPPGVEYNEQFF

SEQ ID NO: 150921 - protein, 11 aa, Homo sapiens
  CDR3 for alpha chain variable domain of TCR clone 75461 (TRAV12-2, TRAJ30)
CAVNRDDKIIF

SEQ ID NO: 150922 - protein, 16 aa, Homo sapiens
  CDR3 for beta chain variable domain of TCR clone 75461 (TRBV6-1, TRBJ2-5)
CASSETLDRGAETQYF

SEQ ID NO: 150923 - protein, 17 aa, Homo sapiens
  CDR3 for alpha chain variable domain of TCR clone 75462 (TRAV13-1, TRAJ52)
CAAGRNAGGTSYGKLTS

SEQ ID NO: 150924 - protein, 15 aa, Homo sapiens
  CDR3 for beta chain variable domain of TCR clone 75462 (TRBV6-3, TRBJ2-7)
CASSSPGTVFYEQYF

SEQ ID NO: 150925 - protein, 15 aa, Homo sapiens
  CDR3 for alpha chain variable domain of TCR clone 75463 (TRAV35, TRAJ38)
CAGFSNAGNNRKLIW

SEQ ID NO: 150926 - protein, 14 aa, Homo sapiens
  CDR3 for beta chain variable domain of TCR clone 75463 (TRBV12-4, TRBJ1-1)
CASSLGTGGTEAFF

SEQ ID NO: 150927 - protein, 16 aa, Homo sapiens
  CDR3 for alpha chain variable domain of TCR clone 75464 (TRAV16, TRAJ4)
CALSRMFSGGYNKLIF

SEQ ID NO: 150928 - protein, 16 aa, Homo sapiens
  CDR3 for beta chain variable domain of TCR clone 75464 (TRBV12-4, TRBJ1-5)
CASSRPVGGSNRPQHF

SEQ ID NO: 150929 - protein, 12 aa, Homo sapiens
  CDR3 for alpha chain variable domain of TCR clone 75465 (TRAV17, TRAJ12)
CATLRSSYKLIF

SEQ ID NO: 150930 - protein, 13 aa, Homo sapiens
  CDR3 for beta chain variable domain of TCR clone 75465 (TRBV7-9, TRBJ1-2)
CASSLKQNYGYTF

SEQ ID NO: 150931 - protein, 15 aa, Homo sapiens
  CDR3 for alpha chain variable domain of TCR clone 75466 (TRAV1-2, TRAJ26)
CAVRDLITMVRILSF

SEQ ID NO: 150932 - protein, 11 aa, Homo sapiens
  CDR3 for beta chain variable domain of TCR clone 75466 (TRBV29-1, TRBJ2-5)
CSEDRTGTQYF

SEQ ID NO: 150933 - protein, 14 aa, Homo sapiens
  CDR3 for alpha chain variable domain of TCR clone 75467 (TRAV25, TRAJ6)
CAGRESGGSYIPTF

SEQ ID NO: 150934 - protein, 14 aa, Homo sapiens
  CDR3 for beta chain variable domain of TCR clone 75467 (TRBV25-1, TRBJ1-1)
CASTHLGGNTEAFF

SEQ ID NO: 150935 - protein, 12 aa, Homo sapiens
  CDR3 for alpha chain variable domain of TCR clone 75468 (TRAV12-1, TRAJ40)
CVFYSGTYKYIF

SEQ ID NO: 150936 - protein, 18 aa, Homo sapiens
  CDR3 for beta chain variable domain of TCR clone 75468 (TRBV12-4, TRBJ2-2)
CASSLVAGTRGRTWELFF

SEQ ID NO: 150937 - protein, 12 aa, Homo sapiens
  CDR3 for alpha chain variable domain of TCR clone 75469 (TRAV12-3, TRAJ17)
CAMTLTGNKLTF

SEQ ID NO: 150938 - protein, 13 aa, Homo sapiens
  CDR3 for beta chain variable domain of TCR clone 75469 (TRBV12-4, TRBJ1-1)
CASSPGTGCEAFF

SEQ ID NO: 150939 - protein, 14 aa, Homo sapiens
  CDR3 for alpha chain variable domain of TCR clone 75470 (TRAV16, TRAJ33)
CALSAMDSNYQLIW

SEQ ID NO: 150940 - protein, 16 aa, Homo sapiens
  CDR3 for beta chain variable domain of TCR clone 75470 (TRBV12-4, TRBJ2-3)
CASSFPSKTNTDTQYF

SEQ ID NO: 150941 - protein, 13 aa, Homo sapiens
  CDR3 for alpha chain variable domain of TCR clone 75471 (TRAV2, TRAJ40)
CAVVTSGTYKYIF

SEQ ID NO: 150942 - protein, 14 aa, Homo sapiens
  CDR3 for beta chain variable domain of TCR clone 75471 (TRBV19, TRBJ2-1)
CDSPTLVLSGEQFF

SEQ ID NO: 150943 - protein, 14 aa, Homo sapiens
  CDR3 for alpha chain variable domain of TCR clone 75472 (TRAV8-3, TRAJ4)
CAVGAAGGYNKLIF

SEQ ID NO: 150944 - protein, 16 aa, Homo sapiens
  CDR3 for beta chain variable domain of TCR clone 75472 (TRBV5-7, TRBJ2-1)
CASSGGLAGTYNEQFF

SEQ ID NO: 150945 - protein, 14 aa, Homo sapiens
  CDR3 for alpha chain variable domain of TCR clone 75473 (TRAV13-1, TRAJ44)
CAAKATGTASKLTF

SEQ ID NO: 150946 - protein, 17 aa, Homo sapiens
  CDR3 for beta chain variable domain of TCR clone 75473 (TRBV7-3, TRBJ2-3)
RAGSLMKRMRGADTQYF

SEQ ID NO: 150947 - protein, 20 aa, Homo sapiens
  CDR3 for alpha chain variable domain of TCR clone 75474 (TRAV1-1, TRAJ4)
CLLLLRCEGFLSGGYNKLIF

SEQ ID NO: 150948 - protein, 16 aa, Homo sapiens
  CDR3 for beta chain variable domain of TCR clone 75474 (TRBV28, TRBJ1-4)
CASSPPCRGRSEKLFF

SEQ ID NO: 150949 - protein, 15 aa, Homo sapiens
  CDR3 for alpha chain variable domain of TCR clone 75475 (TRAV8-3, TRAJ6)
CAVGPLGGGSYLPTF

SEQ ID NO: 150950 - protein, 14 aa, Homo sapiens
  CDR3 for beta chain variable domain of TCR clone 75475 (TRBV19, TRBJ2-2)
CASSTGQGAGELFF

SEQ ID NO: 150951 - protein, 14 aa, Homo sapiens
  CDR3 for alpha chain variable domain of TCR clone 75476 (TRAV38-1, TRAJ39)
CAFAHNNAGNMLTF

SEQ ID NO: 150952 - protein, 15 aa, Homo sapiens
  CDR3 for beta chain variable domain of TCR clone 75476 (TRBV19, TRBJ2-6)
CASSTGPSGANVLTF

SEQ ID NO: 150953 - protein, 15 aa, Homo sapiens
  CDR3 for alpha chain variable domain of TCR clone 75477 (TRAV8-3, TRAJ27)
CAVGPSKTNAGKSTF

SEQ ID NO: 150954 - protein, 14 aa, Homo sapiens
  CDR3 for beta chain variable domain of TCR clone 75477 (TRBV7-2, TRBJ1-1)
CASSFLTGTTEAFF

SEQ ID NO: 150955 - protein, 10 aa, Homo sapiens
  CDR3 for alpha chain variable domain of TCR clone 75478 (TRAV16, TRAJ22)
SAMYLRQLTF

SEQ ID NO: 150956 - protein, 15 aa, Homo sapiens
  CDR3 for beta chain variable domain of TCR clone 75478 (TRBV7-9, TRBJ1-6)
CASRSPGRGNSPLHF

SEQ ID NO: 150957 - protein, 13 aa, Homo sapiens
  CDR3 for alpha chain variable domain of TCR clone 75479 (TRAV21, TRAJ57)
CAVTQGGSEKLVF

SEQ ID NO: 150958 - protein, 16 aa, Homo sapiens
  CDR3 for beta chain variable domain of TCR clone 75479 (TRBV29-1, TRBJ2-7)
CSVEDAEDGTAYVQYF

SEQ ID NO: 150959 - protein, 14 aa, Homo sapiens
  CDR3 for alpha chain variable domain of TCR clone 75480 (TRAV13-1, TRAJ9)
CAASALTGGFKTIF

SEQ ID NO: 150960 - protein, 16 aa, Homo sapiens
  CDR3 for beta chain variable domain of TCR clone 75480 (TRBV7-8, TRBJ2-4)
CASSAERTIAKNIQYF

SEQ ID NO: 150961 - protein, 17 aa, Homo sapiens
  CDR3 for alpha chain variable domain of TCR clone 75481 (TRAV26-1, TRAJ11)
CIVRVGQSNSGYSTLTF

SEQ ID NO: 150962 - protein, 15 aa, Homo sapiens
  CDR3 for beta chain variable domain of TCR clone 75481 (TRBV27, TRBJ2-5)
CASSLIPSGGDTQYF

SEQ ID NO: 150963 - protein, 14 aa, Homo sapiens
  CDR3 for alpha chain variable domain of TCR clone 75482 (TRAV2, TRAJ9)
CAVEDRGGGFKTIF

SEQ ID NO: 150964 - protein, 17 aa, Homo sapiens
  CDR3 for beta chain variable domain of TCR clone 75482 (TRBV20-1, TRBJ2-7)
CSATRAGGVAGVEEQYF

SEQ ID NO: 150965 - protein, 12 aa, Homo sapiens
  CDR3 for alpha chain variable domain of TCR clone 75483 (TRAV13-1, TRAJ15)
CAASQAGTALIF

SEQ ID NO: 150966 - protein, 18 aa, Homo sapiens
  CDR3 for beta chain variable domain of TCR clone 75483 (TRBV7-9, TRBJ2-3)
CASSLPINGQISTETQYF

SEQ ID NO: 150967 - protein, 12 aa, Homo sapiens
  CDR3 for alpha chain variable domain of TCR clone 75484 (TRAV17, TRAJ39)
CATEGAGNMLTF

SEQ ID NO: 150968 - protein, 15 aa, Homo sapiens
  CDR3 for beta chain variable domain of TCR clone 75484 (TRBV12-4, TRBJ2-1)
CDSSLLATGNNEQFF

SEQ ID NO: 150969 - protein, 14 aa, Homo sapiens
  CDR3 for alpha chain variable domain of TCR clone 75485 (TRAV12-2, TRAJ40)
CAVKIPSGAYKYIL

SEQ ID NO: 150970 - protein, 14 aa, Homo sapiens
  CDR3 for beta chain variable domain of TCR clone 75485 (TRBV20-1, TRBJ1-1)
CSAQTRIGGTEAFF

SEQ ID NO: 150971 - protein, 14 aa, Homo sapiens
  CDR3 for alpha chain variable domain of TCR clone 75486 (TRAV17, TRAJ54)
CATDANQGAQKLVF

SEQ ID NO: 150972 - protein, 12 aa, Homo sapiens
  CDR3 for beta chain variable domain of TCR clone 75486 (TRBV6-3, TRBJ2-1)
CASSVSYNEQFF

SEQ ID NO: 150973 - protein, 15 aa, Homo sapiens
  CDR3 for alpha chain variable domain of TCR clone 75487 (TRAV8-6, TRAJ10)
CSVSDQAGGGNKLTF

SEQ ID NO: 150974 - protein, 13 aa, Homo sapiens
  CDR3 for beta chain variable domain of TCR clone 75487 (TRBV10-2, TRBJ2-3)
CASSESGDHTQYF

SEQ ID NO: 150975 - protein, 13 aa, Homo sapiens
  CDR3 for alpha chain variable domain of TCR clone 75488 (TRAV1-2, TRAJ9)
CAALNTGGFKTIF

SEQ ID NO: 150976 - protein, 13 aa, Homo sapiens
  CDR3 for beta chain variable domain of TCR clone 75488 (TRBV19, TRBJ1-2)
CASSVPGQDGYTI

SEQ ID NO: 150977 - protein, 15 aa, Homo sapiens
  CDR3 for alpha chain variable domain of TCR clone 75489 (TRAV21, TRAJ45)
CAGSYSGGGADGLTF

SEQ ID NO: 150978 - protein, 13 aa, Homo sapiens
  CDR3 for beta chain variable domain of TCR clone 75489 (TRBV20-1, TRBJ2-5)
CSAATELQETQYF

SEQ ID NO: 150979 - protein, 13 aa, Homo sapiens
  CDR3 for alpha chain variable domain of TCR clone 75490 (TRAV21, TRAJ56)
CAVRTGANSKLAF

SEQ ID NO: 150980 - protein, 15 aa, Homo sapiens
  CDR3 for beta chain variable domain of TCR clone 75490 (TRBV7-9, TRBJ1-1)
CASSHRGTVNTEAFF

SEQ ID NO: 150981 - protein, 15 aa, Homo sapiens
  CDR3 for alpha chain variable domain of TCR clone 75491 (TRAV35, TRAJ40)
CAGQLGTAGTYKYIF

SEQ ID NO: 150982 - protein, 14 aa, Homo sapiens
  CDR3 for beta chain variable domain of TCR clone 75491 (TRBV7-3, TRBJ2-1)
CASSLAGGTNEQFF

SEQ ID NO: 150983 - protein, 14 aa, Homo sapiens
  CDR3 for alpha chain variable domain of TCR clone 75492 (TRAV1-2, TRAJ16)
CAVNRFSDGQKLLF

SEQ ID NO: 150984 - protein, 13 aa, Homo sapiens
  CDR3 for beta chain variable domain of TCR clone 75492 (TRBV7-9, TRBJ1-2)
CASSLKQNYGYIF

SEQ ID NO: 150985 - protein, 23 aa, Homo sapiens
  CDR3 for alpha chain variable domain of TCR clone 75493 (TRAV26-1, TRAJ38)
CIADNAGNNHIQNPDPAVYQLRD

SEQ ID NO: 150986 - protein, 16 aa, Homo sapiens
  CDR3 for beta chain variable domain of TCR clone 75493 (TRBV12-5, TRBJ2-5)
CASGPRTSGNQETQYF

SEQ ID NO: 150987 - protein, 15 aa, Homo sapiens
  CDR3 for alpha chain variable domain of TCR clone 75494 (TRAV34, TRAJ38)
CGADFTPGNNRKLIW

SEQ ID NO: 150988 - protein, 16 aa, Homo sapiens
  CDR3 for beta chain variable domain of TCR clone 75494 (TRBV4-3, TRBJ2-1)
CASSPALDRGVNEQFF

SEQ ID NO: 150989 - protein, 12 aa, Homo sapiens
  CDR3 for alpha chain variable domain of TCR clone 75495 (TRAV3, TRAJ31)
CAVRDGNARLMF

SEQ ID NO: 150990 - protein, 13 aa, Homo sapiens
  CDR3 for beta chain variable domain of TCR clone 75495 (TRBV7-9, TRBJ2-3)
CASSPGSTDTQYF

SEQ ID NO: 150991 - protein, 14 aa, Homo sapiens
  CDR3 for alpha chain variable domain of TCR clone 75496 (TRAV12-2, TRAJ13)
CAVKKAGGYQKVTF

SEQ ID NO: 150992 - protein, 13 aa, Homo sapiens
  CDR3 for beta chain variable domain of TCR clone 75496 (TRBV20-1, TRBJ1-1)
CSARGGGNTEAFF

SEQ ID NO: 150993 - protein, 17 aa, Homo sapiens
  CDR3 for alpha chain variable domain of TCR clone 75497 (TRAV3, TRAJ42)
RAVRDRDYGGSQGNLIF

SEQ ID NO: 150994 - protein, 17 aa, Homo sapiens
  CDR3 for beta chain variable domain of TCR clone 75497 (TRBV7-9, TRBJ2-3)
CASSPTVAGDLTDTQYF

SEQ ID NO: 150995 - protein, 20 aa, Homo sapiens
  CDR3 for alpha chain variable domain of TCR clone 75498 (TRAV27, TRAJ5)
TAAQPGDTGLYETGRRALTF

SEQ ID NO: 150996 - protein, 13 aa, Homo sapiens
  CDR3 for beta chain variable domain of TCR clone 75498 (TRBV4-1, TRBJ2-1)
CASSQEVQYEQFF

SEQ ID NO: 150997 - protein, 14 aa, Homo sapiens
  CDR3 for alpha chain variable domain of TCR clone 75499 (TRAV8-4, TRAJ38)
CARLNAGNNRKLIW

SEQ ID NO: 150998 - protein, 15 aa, Homo sapiens
  CDR3 for beta chain variable domain of TCR clone 75499 (TRBV3-1, TRBJ2-1)
CASSQQPSGGNEQFF

SEQ ID NO: 150999 - protein, 11 aa, Homo sapiens
  CDR3 for alpha chain variable domain of TCR clone 75500 (TRAV17, TRAJ9)
CATTGGFKTIF

SEQ ID NO: 151000 - protein, 13 aa, Homo sapiens
  CDR3 for beta chain variable domain of TCR clone 75500 (TRBV19, TRBJ1-2)
CASSQGQVYGYTF

SEQ ID NO: 151001 - protein, 11 aa, Homo sapiens
  CDR3 for alpha chain variable domain of TCR clone 75501 (TRAV12-1, TRAJ47)
CVVNDGNKLVF

SEQ ID NO: 151002 - protein, 16 aa, Homo sapiens
  CDR3 for beta chain variable domain of TCR clone 75501 (TRBV4-2, TRBJ2-3)
CASSQELAGDTDTQYF

SEQ ID NO: 151003 - protein, 15 aa, Homo sapiens
  CDR3 for alpha chain variable domain of TCR clone 75502 (TRAV38-1, TRAJ57)
CAFMKLQGGSEKLVF

SEQ ID NO: 151004 - protein, 14 aa, Homo sapiens
  CDR3 for beta chain variable domain of TCR clone 75502 (TRBV27, TRBJ2-7)
CASATGTERREQYF

SEQ ID NO: 151005 - protein, 12 aa, Homo sapiens
  CDR3 for alpha chain variable domain of TCR clone 75503 (TRAV35, TRAJ49)
CAGWNTGNQFYF

SEQ ID NO: 151006 - protein, 16 aa, Homo sapiens
  CDR3 for beta chain variable domain of TCR clone 75503 (TRBV5-1, TRBJ2-2)
CAISLWDTTNTGELFF

SEQ ID NO: 151007 - protein, 15 aa, Homo sapiens
  CDR3 for alpha chain variable domain of TCR clone 75504 (TRAV2, TRAJ9)
CAVEDRGTGGFKTIF

SEQ ID NO: 151008 - protein, 17 aa, Homo sapiens
  CDR3 for beta chain variable domain of TCR clone 75504 (TRBV7-9, TRBJ2-3)
CASSLEEAGAYPDTQYF

SEQ ID NO: 151009 - protein, 14 aa, Homo sapiens
  CDR3 for alpha chain variable domain of TCR clone 75505 (TRAV35, TRAJ22)
CAGLRPGPARQLTF

SEQ ID NO: 151010 - protein, 13 aa, Homo sapiens
  CDR3 for beta chain variable domain of TCR clone 75505 (TRBV20-1, TRBJ1-1)
CSARGGGNTEAFF

SEQ ID NO: 151011 - protein, 12 aa, Homo sapiens
  CDR3 for alpha chain variable domain of TCR clone 75506 (TRAV25, TRAJ11)
CAGYSGYSTLTS

SEQ ID NO: 151012 - protein, 13 aa, Homo sapiens
  CDR3 for beta chain variable domain of TCR clone 75506 (TRBV7-9, TRBJ1-2)
CASSLKQNYGYTF

SEQ ID NO: 151013 - protein, 13 aa, Homo sapiens
  CDR3 for alpha chain variable domain of TCR clone 75507 (TRAV1-1, TRAJ9)
CAAKNTGGFKTIF

SEQ ID NO: 151014 - protein, 16 aa, Homo sapiens
  CDR3 for beta chain variable domain of TCR clone 75507 (TRBV12-4, TRBJ2-7)
CASRSTGTGPSYEQYF

SEQ ID NO: 151015 - protein, 14 aa, Homo sapiens
  CDR3 for alpha chain variable domain of TCR clone 75508 (TRAV12-3, TRAJ7)
CAMSEIGGNNRLAF

SEQ ID NO: 151016 - protein, 15 aa, Homo sapiens
  CDR3 for beta chain variable domain of TCR clone 75508 (TRBV6-1, TRBJ2-6)
CASSSRPSGANVLTF

SEQ ID NO: 151017 - protein, 17 aa, Homo sapiens
  CDR3 for alpha chain variable domain of TCR clone 75509 (TRAV3, TRAJ6)
CAVRDGPRTGGSYIPTF

SEQ ID NO: 151018 - protein, 14 aa, Homo sapiens
  CDR3 for beta chain variable domain of TCR clone 75509 (TRBV7-2, TRBJ2-7)
CASNPKTSFYEQYF

SEQ ID NO: 151019 - protein, 18 aa, Homo sapiens
  CDR3 for alpha chain variable domain of TCR clone 75510 (TRAV26-1, TRAJ52)
CIVRVEGAGGTSYGKLTF

SEQ ID NO: 151020 - protein, 13 aa, Homo sapiens
  CDR3 for beta chain variable domain of TCR clone 75510 (TRBV7-3, TRBJ1-2)
CASSLKRGYSYTF

SEQ ID NO: 151021 - protein, 16 aa, Homo sapiens
  CDR3 for alpha chain variable domain of TCR clone 75511 (TRAV30, TRAJ49)
SAAQRVGPNTGNQFYF

SEQ ID NO: 151022 - protein, 12 aa, Homo sapiens
  CDR3 for beta chain variable domain of TCR clone 75511 (TRBV7-8, TRBJ2-7)
CASSLGDREQYF

SEQ ID NO: 151023 - protein, 16 aa, Homo sapiens
  CDR3 for alpha chain variable domain of TCR clone 75512 (TRAV8-3, TRAJ13)
CAGGAYPSGGYQKVTF

SEQ ID NO: 151024 - protein, 15 aa, Homo sapiens
  CDR3 for beta chain variable domain of TCR clone 75512 (TRBV19, TRBJ1-5)
CASSIVWADNQPQHF

SEQ ID NO: 151025 - protein, 22 aa, Homo sapiens
  CDR3 for alpha chain variable domain of TCR clone 75513 (TRAV21, )
CAVRQDAGNNHIQNPDPAVYQL

SEQ ID NO: 151026 - protein, 16 aa, Homo sapiens
  CDR3 for beta chain variable domain of TCR clone 75513 (TRBV4-2, TRBJ1-1)
CARRPLDGGGDTEAFF

SEQ ID NO: 151027 - protein, 13 aa, Homo sapiens
  CDR3 for alpha chain variable domain of TCR clone 75514 (TRAV26-1, )
CIVSHRVEGFWNQ

SEQ ID NO: 151028 - protein, 14 aa, Homo sapiens
  CDR3 for beta chain variable domain of TCR clone 75514 (TRBV20-1, TRBJ2-7)
FSAWTALSSYEQYF

SEQ ID NO: 151029 - protein, 13 aa, Homo sapiens
  CDR3 for alpha chain variable domain of TCR clone 75515 (TRAV17, TRAJ7)
CATDNYGNNRLAF

SEQ ID NO: 151030 - protein, 12 aa, Homo sapiens
  CDR3 for beta chain variable domain of TCR clone 75515 (TRBV5-7, TRBJ1-1)
CASSLGRGKAFF

SEQ ID NO: 151031 - protein, 12 aa, Homo sapiens
  CDR3 for alpha chain variable domain of TCR clone 75516 (TRAV27, TRAJ35)
CAGADFGNVLHC

SEQ ID NO: 151032 - protein, 14 aa, Homo sapiens
  CDR3 for beta chain variable domain of TCR clone 75516 (TRBV4-1, TRBJ2-2)
CASSQAVNTGELFF

SEQ ID NO: 151033 - protein, 12 aa, Homo sapiens
  CDR3 for alpha chain variable domain of TCR clone 75517 (TRAV13-1, TRAJ35)
CAASKGGFGNVL

SEQ ID NO: 151034 - protein, 13 aa, Homo sapiens
  CDR3 for beta chain variable domain of TCR clone 75517 (TRBV7-3, TRBJ1-1)
CASSQDWGAEAFF

SEQ ID NO: 151035 - protein, 10 aa, Homo sapiens
  CDR3 for alpha chain variable domain of TCR clone 75518 (TRAV2, TRAJ34)
CAVVNDKLIF

SEQ ID NO: 151036 - protein, 17 aa, Homo sapiens
  CDR3 for beta chain variable domain of TCR clone 75518 (TRBV7-8, TRBJ2-6)
CASSAGTGGAGANVLTF

SEQ ID NO: 151037 - protein, 16 aa, Homo sapiens
  CDR3 for alpha chain variable domain of TCR clone 75519 (TRAV8-3, TRAJ10)
CAVGPGVTGGGNKLTF

SEQ ID NO: 151038 - protein, 13 aa, Homo sapiens
  CDR3 for beta chain variable domain of TCR clone 75519 (TRBV18, TRBJ1-1)
CTSSPGPSGEAFF

SEQ ID NO: 151039 - protein, 14 aa, Homo sapiens
  CDR3 for alpha chain variable domain of TCR clone 75520 (TRAV4, TRAJ20)
CLVGRRANDYKLSF

SEQ ID NO: 151040 - protein, 18 aa, Homo sapiens
  CDR3 for beta chain variable domain of TCR clone 75520 (TRBV2, TRBJ2-5)
CASSGDPQGRGAQETQYF

SEQ ID NO: 151041 - protein, 12 aa, Homo sapiens
  CDR3 for alpha chain variable domain of TCR clone 75521 (TRAV8-3, TRAJ20)
CAVGANDYKLSF

SEQ ID NO: 151042 - protein, 17 aa, Homo sapiens
  CDR3 for beta chain variable domain of TCR clone 75521 (TRBV19, TRBJ2-2)
CASSRNPGGFGTGELFF

SEQ ID NO: 151043 - protein, 16 aa, Homo sapiens
  CDR3 for alpha chain variable domain of TCR clone 75522 (TRAV13-1, TRAJ48)
CAASIFGNFGNEKLTF

SEQ ID NO: 151044 - protein, 16 aa, Homo sapiens
  CDR3 for beta chain variable domain of TCR clone 75522 (TRBV24-1, TRBJ2-3)
CATSDRRQDLTDTQYF

SEQ ID NO: 151045 - protein, 13 aa, Homo sapiens
  CDR3 for alpha chain variable domain of TCR clone 75523 (TRAV12-2, TRAJ50)
CAVIVTSYDKVIF

SEQ ID NO: 151046 - protein, 14 aa, Homo sapiens
  CDR3 for beta chain variable domain of TCR clone 75523 (TRBV9, TRBJ2-1)
CASSVDLRGKEQFF

SEQ ID NO: 151047 - protein, 16 aa, Homo sapiens
  CDR3 for alpha chain variable domain of TCR clone 75524 (TRAV16, TRAJ57)
CAPYLITQGGSEKLVV

SEQ ID NO: 151048 - protein, 17 aa, Homo sapiens
  CDR3 for beta chain variable domain of TCR clone 75524 (TRBV24-1, TRBJ2-4)
CATSDAEARGVRNIQYF

SEQ ID NO: 151049 - protein, 16 aa, Homo sapiens
  CDR3 for alpha chain variable domain of TCR clone 75525 (TRAV12-3, TRAJ53)
CAMSPGSGGSNYKLTF

SEQ ID NO: 151050 - protein, 17 aa, Homo sapiens
  CDR3 for beta chain variable domain of TCR clone 75525 (TRBV28, TRBJ2-5)
CASSTPEGDSLQETQYF

SEQ ID NO: 151051 - protein, 11 aa, Homo sapiens
  CDR3 for alpha chain variable domain of TCR clone 75526 (TRAV39, TRAJ26)
CAVDLMRHFVF

SEQ ID NO: 151052 - protein, 11 aa, Homo sapiens
  CDR3 for beta chain variable domain of TCR clone 75526 (TRBV7-9, TRBJ2-1)
CASSSQNEQLF

SEQ ID NO: 151053 - protein, 14 aa, Homo sapiens
  CDR3 for alpha chain variable domain of TCR clone 75527 (TRAV9-2, TRAJ48)
CALSSNFGNEKLTF

SEQ ID NO: 151054 - protein, 14 aa, Homo sapiens
  CDR3 for beta chain variable domain of TCR clone 75527 (TRBV20-1, TRBJ2-7)
CSAKRGRSSYEQYF

SEQ ID NO: 151055 - protein, 16 aa, Homo sapiens
  CDR3 for alpha chain variable domain of TCR clone 75528 (TRAV26-1, TRAJ32)
CIVRTKYGGATNKLIF

SEQ ID NO: 151056 - protein, 14 aa, Homo sapiens
  CDR3 for beta chain variable domain of TCR clone 75528 (TRBV27, TRBJ1-1)
CASSLLSGLSEAFF

SEQ ID NO: 151057 - protein, 14 aa, Homo sapiens
  CDR3 for alpha chain variable domain of TCR clone 75529 (TRAV12-2, TRAJ13)
CAVKTTGGYQKVTF

SEQ ID NO: 151058 - protein, 12 aa, Homo sapiens
  CDR3 for beta chain variable domain of TCR clone 75529 (TRBV12-4, TRBJ1-2)
CASSFIWLHLRF

SEQ ID NO: 151059 - protein, 13 aa, Homo sapiens
  CDR3 for alpha chain variable domain of TCR clone 75530 (TRAV8-2, TRAJ47)
CVVSEREGNKLVF

SEQ ID NO: 151060 - protein, 16 aa, Homo sapiens
  CDR3 for beta chain variable domain of TCR clone 75530 (TRBV5-1, TRBJ1-1)
CASSKTGTEVGTGAFF

SEQ ID NO: 151061 - protein, 19 aa, Homo sapiens
  CDR3 for alpha chain variable domain of TCR clone 75531 (TRAV2, TRAJ20)
ILQVREADAAVYRDCKLSF

SEQ ID NO: 151062 - protein, 17 aa, Homo sapiens
  CDR3 for beta chain variable domain of TCR clone 75531 (TRBV7-8, TRBJ2-6)
CASSAGTGGAGANVLTF

SEQ ID NO: 151063 - protein, 13 aa, Homo sapiens
  CDR3 for alpha chain variable domain of TCR clone 75532 (TRAV17, TRAJ26)
CATVDNYGQNFVF

SEQ ID NO: 151064 - protein, 14 aa, Homo sapiens
  CDR3 for beta chain variable domain of TCR clone 75532 (TRBV7-9, TRBJ2-1)
CASSSRDSLYEQFF

SEQ ID NO: 151065 - protein, 13 aa, Homo sapiens
  CDR3 for alpha chain variable domain of TCR clone 75533 (TRAV21, TRAJ57)
CAVTQGGSEKLVF

SEQ ID NO: 151066 - protein, 16 aa, Homo sapiens
  CDR3 for beta chain variable domain of TCR clone 75533 (TRBV29-1, TRBJ2-7)
CSVEDAEDGTAYEQYF

SEQ ID NO: 151067 - protein, 16 aa, Homo sapiens
  CDR3 for alpha chain variable domain of TCR clone 75534 (TRAV2, TRAJ4)
CAVEYRFSGGYNKLIF

SEQ ID NO: 151068 - protein, 13 aa, Homo sapiens
  CDR3 for beta chain variable domain of TCR clone 75534 (TRBV7-7, TRBJ2-5)
CASSRSGQETQYF

SEQ ID NO: 151069 - protein, 13 aa, Homo sapiens
  CDR3 for alpha chain variable domain of TCR clone 75535 (TRAV13-1, TRAJ5)
CAASDTGRRALTF

SEQ ID NO: 151070 - protein, 12 aa, Homo sapiens
  CDR3 for beta chain variable domain of TCR clone 75535 (TRBV28, TRBJ2-3)
CASSLYRDMQYF

SEQ ID NO: 151071 - protein, 14 aa, Homo sapiens
  CDR3 for alpha chain variable domain of TCR clone 75536 (TRAV16, TRAJ33)
CALSAMDSNYQLIW

SEQ ID NO: 151072 - protein, 16 aa, Homo sapiens
  CDR3 for beta chain variable domain of TCR clone 75536 (TRBV25-1, TRBJ2-7)
CASSELTGGGVYEQYF

SEQ ID NO: 151073 - protein, 13 aa, Homo sapiens
  CDR3 for alpha chain variable domain of TCR clone 75537 (TRAV27, TRAJ16)
CAGACSDGQKLLF

SEQ ID NO: 151074 - protein, 15 aa, Homo sapiens
  CDR3 for beta chain variable domain of TCR clone 75537 (TRBV18, TRBJ2-5)
CASSPRASEAETQYF

SEQ ID NO: 151075 - protein, 14 aa, Homo sapiens
  CDR3 for alpha chain variable domain of TCR clone 75538 (TRAV2, TRAJ9)
CAVEDRGGGFKTIF

SEQ ID NO: 151076 - protein, 11 aa, Homo sapiens
  CDR3 for beta chain variable domain of TCR clone 75538 (TRBV12-4, TRBJ2-3)
CASTATDTQYF

SEQ ID NO: 151077 - protein, 14 aa, Homo sapiens
  CDR3 for alpha chain variable domain of TCR clone 75539 (TRAV12-2, TRAJ17)
CAALFKAAGNKLTF

SEQ ID NO: 151078 - protein, 16 aa, Homo sapiens
  CDR3 for beta chain variable domain of TCR clone 75539 (TRBV20-1, TRBJ2-2)
CSASASGIPGAGELFF

SEQ ID NO: 151079 - protein, 16 aa, Homo sapiens
  CDR3 for alpha chain variable domain of TCR clone 75540 (TRAV30, TRAJ24)
CGTEIVDADGWGKLQF

SEQ ID NO: 151080 - protein, 14 aa, Homo sapiens
  CDR3 for beta chain variable domain of TCR clone 75540 (TRBV7-2, TRBJ2-7)
CASSPKTSFYEQYF

SEQ ID NO: 151081 - protein, 14 aa, Homo sapiens
  CDR3 for alpha chain variable domain of TCR clone 75541 (TRAV8-4, TRAJ9)
CAVKINTGGFKTIF

SEQ ID NO: 151082 - protein, 15 aa, Homo sapiens
  CDR3 for beta chain variable domain of TCR clone 75541 (TRBV10-2, TRBJ2-6)
CASSEQGTGANVLTF

SEQ ID NO: 151083 - protein, 13 aa, Homo sapiens
  CDR3 for alpha chain variable domain of TCR clone 75542 (TRAV4, TRAJ42)
CLVGGGSQGNLIF

SEQ ID NO: 151084 - protein, 16 aa, Homo sapiens
  CDR3 for beta chain variable domain of TCR clone 75542 (TRBV5-1, TRBJ2-3)
CASSLQGRMGADTQYF

SEQ ID NO: 151085 - protein, 12 aa, Homo sapiens
  CDR3 for alpha chain variable domain of TCR clone 75543 (TRAV27, TRAJ35)
CAGADFGNVLHF

SEQ ID NO: 151086 - protein, 13 aa, Homo sapiens
  CDR3 for beta chain variable domain of TCR clone 75543 (TRBV7-3, TRBJ1-1)
CASSQDWGAEAFF

SEQ ID NO: 151087 - protein, 15 aa, Homo sapiens
  CDR3 for alpha chain variable domain of TCR clone 75544 (TRAV26-2, TRAJ39)
CSLRGNNNAGNMLTF

SEQ ID NO: 151088 - protein, 14 aa, Homo sapiens
  CDR3 for beta chain variable domain of TCR clone 75544 (TRBV4-2, TRBJ2-1)
CASGLDRAYNEQFF

SEQ ID NO: 151089 - protein, 11 aa, Homo sapiens
  CDR3 for alpha chain variable domain of TCR clone 75545 (TRAV35, TRAJ12)
RRMDSSYRLIF

SEQ ID NO: 151090 - protein, 14 aa, Homo sapiens
  CDR3 for beta chain variable domain of TCR clone 75545 (TRBV19, TRBJ1-1)
CASSPNRGDTEAFF

SEQ ID NO: 151091 - protein, 11 aa, Homo sapiens
  CDR3 for alpha chain variable domain of TCR clone 75546 (TRAV16, TRAJ31)
CALFNNARLMF

SEQ ID NO: 151092 - protein, 15 aa, Homo sapiens
  CDR3 for beta chain variable domain of TCR clone 75546 (TRBV18, TRBJ1-1)
CASFPRQGENTEAFF

SEQ ID NO: 151093 - protein, 13 aa, Homo sapiens
  CDR3 for alpha chain variable domain of TCR clone 75547 (TRAV1-2, TRAJ9)
CAVLNTGGFQTIF

SEQ ID NO: 151094 - protein, 14 aa, Homo sapiens
  CDR3 for beta chain variable domain of TCR clone 75547 (TRBV20-1, TRBJ2-3)
CSARGGTSTDTQYF

SEQ ID NO: 151095 - protein, 14 aa, Homo sapiens
  CDR3 for alpha chain variable domain of TCR clone 75548 (TRAV12-2, TRAJ40)
CAVKIPSGTYKYIF

SEQ ID NO: 151096 - protein, 15 aa, Homo sapiens
  CDR3 for beta chain variable domain of TCR clone 75548 (TRBV3-1, TRBJ2-5)
CASSANLGGPETQYF

SEQ ID NO: 151097 - protein, 16 aa, Homo sapiens
  CDR3 for alpha chain variable domain of TCR clone 75549 (TRAV30, TRAJ24)
CGTEIVDADSWGKFQF

SEQ ID NO: 151098 - protein, 19 aa, Homo sapiens
  CDR3 for beta chain variable domain of TCR clone 75549 (TRBV25-1, TRBJ2-2)
CAILVYQVDRGRKTGELFF

SEQ ID NO: 151099 - protein, 16 aa, Homo sapiens
  CDR3 for alpha chain variable domain of TCR clone 75550 (TRAV4, TRAJ9)
CLVGDPNRPGGFETIF

SEQ ID NO: 151100 - protein, 13 aa, Homo sapiens
  CDR3 for beta chain variable domain of TCR clone 75550 (TRBV5-5, TRBJ1-2)
CASSFWRGEDYTF

SEQ ID NO: 151101 - protein, 13 aa, Homo sapiens
  CDR3 for alpha chain variable domain of TCR clone 75551 (TRAV20, TRAJ40)
CAVSFSGTYKCIF

SEQ ID NO: 151102 - protein, 13 aa, Homo sapiens
  CDR3 for beta chain variable domain of TCR clone 75551 (TRBV15, TRBJ2-5)
CATSQIGEETQYF

SEQ ID NO: 151103 - protein, 10 aa, Homo sapiens
  CDR3 for alpha chain variable domain of TCR clone 75552 (TRAV16, TRAJ22)
SAMYLRQLTF

SEQ ID NO: 151104 - protein, 16 aa, Homo sapiens
  CDR3 for beta chain variable domain of TCR clone 75552 (TRBV7-3, TRBJ2-1)
CASSLEGYRSYNEQFF

SEQ ID NO: 151105 - protein, 14 aa, Homo sapiens
  CDR3 for alpha chain variable domain of TCR clone 75553 (TRAV17, TRAJ54)
CATGANQGAQKLVF

SEQ ID NO: 151106 - protein, 12 aa, Homo sapiens
  CDR3 for beta chain variable domain of TCR clone 75553 (TRBV6-3, TRBJ2-1)
CASSGSYNEQFF

SEQ ID NO: 151107 - protein, 14 aa, Homo sapiens
  CDR3 for alpha chain variable domain of TCR clone 75554 (TRAV8-3, TRAJ4)
CAVGAAGGYNKLIF

SEQ ID NO: 151108 - protein, 15 aa, Homo sapiens
  CDR3 for beta chain variable domain of TCR clone 75554 (TRBV6-5, TRBJ2-1)
CASSYNAGAGNEQFF

SEQ ID NO: 151109 - protein, 15 aa, Homo sapiens
  CDR3 for alpha chain variable domain of TCR clone 75555 (TRAV30, TRAJ13)
CGTQGATGGYQKVTF

SEQ ID NO: 151110 - protein, 17 aa, Homo sapiens
  CDR3 for beta chain variable domain of TCR clone 75555 (TRBV20-1, TRBJ2-2)
CSARVKRTHVRSGELFF

SEQ ID NO: 151111 - protein, 13 aa, Homo sapiens
  CDR3 for alpha chain variable domain of TCR clone 75556 (TRAV8-3, TRAJ44)
CAVVPGTASKLTF

SEQ ID NO: 151112 - protein, 20 aa, Homo sapiens
  CDR3 for beta chain variable domain of TCR clone 75556 (TRBV7-8, TRBJ2-2)
CASSHLFPGPTIHITGELFF

SEQ ID NO: 151113 - protein, 15 aa, Homo sapiens
  CDR3 for alpha chain variable domain of TCR clone 75557 (TRAV16, TRAJ16)
CALPGGGSDGQKLLF

SEQ ID NO: 151114 - protein, 15 aa, Homo sapiens
  CDR3 for beta chain variable domain of TCR clone 75557 (TRBV20-1, TRBJ2-7)
CSARDRVSGMDEQYF

SEQ ID NO: 151115 - protein, 15 aa, Homo sapiens
  CDR3 for alpha chain variable domain of TCR clone 75558 (TRAV17, TRAJ6)
CATDLPSGGSYVPTF

SEQ ID NO: 151116 - protein, 16 aa, Homo sapiens
  CDR3 for beta chain variable domain of TCR clone 75558 (TRBV4-1, TRBJ2-7)
CASSQDPTGYSYEQYF

SEQ ID NO: 151117 - protein, 13 aa, Homo sapiens
  CDR3 for alpha chain variable domain of TCR clone 75559 (TRAV2, TRAJ40)
CAVVTSGTYKYIF

SEQ ID NO: 151118 - protein, 13 aa, Homo sapiens
  CDR3 for beta chain variable domain of TCR clone 75559 (TRBV20-1, TRBJ1-1)
CSAPLGGGTEAFF

SEQ ID NO: 151119 - protein, 13 aa, Homo sapiens
  CDR3 for alpha chain variable domain of TCR clone 75560 (TRAV17, TRAJ9)
CATDYTGGFKTIF

SEQ ID NO: 151120 - protein, 16 aa, Homo sapiens
  CDR3 for beta chain variable domain of TCR clone 75560 (TRBV7-7, TRBJ2-1)
CASSLASVTSYNEQFF

SEQ ID NO: 151121 - protein, 13 aa, Homo sapiens
  CDR3 for alpha chain variable domain of TCR clone 75561 (TRAV26-1, TRAJ20)
CIVRVDSDYKLSF

SEQ ID NO: 151122 - protein, 13 aa, Homo sapiens
  CDR3 for beta chain variable domain of TCR clone 75561 (TRBV7-3, TRBJ2-2)
CASSLNSGGLARR

SEQ ID NO: 151123 - protein, 14 aa, Homo sapiens
  CDR3 for alpha chain variable domain of TCR clone 75562 (TRAV12-2, TRAJ53)
CRERGGGSNYRLTF

SEQ ID NO: 151124 - protein, 13 aa, Homo sapiens
  CDR3 for beta chain variable domain of TCR clone 75562 (TRBV3-1, TRBJ1-1)
CASSPGVITEAFF

SEQ ID NO: 151125 - protein, 14 aa, Homo sapiens
  CDR3 for alpha chain variable domain of TCR clone 75563 (TRAV21, TRAJ21)
CAVRGFGNFNKFYF

SEQ ID NO: 151126 - protein, 13 aa, Homo sapiens
  CDR3 for beta chain variable domain of TCR clone 75563 (TRBV18, TRBJ1-1)
CASSPETKPEAFF

SEQ ID NO: 151127 - protein, 13 aa, Homo sapiens
  CDR3 for alpha chain variable domain of TCR clone 75564 (TRAV20, TRAJ15)
CATINQAGTALIF

SEQ ID NO: 151128 - protein, 13 aa, Homo sapiens
  CDR3 for beta chain variable domain of TCR clone 75564 (TRBV12-4, TRBJ2-1)
CASRRPSNNEQFF

SEQ ID NO: 151129 - protein, 16 aa, Homo sapiens
  CDR3 for alpha chain variable domain of TCR clone 75565 (TRAV16, TRAJ4)
CALSRMFFGGYNKLIF

SEQ ID NO: 151130 - protein, 16 aa, Homo sapiens
  CDR3 for beta chain variable domain of TCR clone 75565 (TRBV24-1, TRBJ2-3)
CATSDPGTGATDTQYF

SEQ ID NO: 151131 - protein, 14 aa, Homo sapiens
  CDR3 for alpha chain variable domain of TCR clone 75566 (TRAV21, TRAJ21)
CAVKGFGNFNKSYF

SEQ ID NO: 151132 - protein, 13 aa, Homo sapiens
  CDR3 for beta chain variable domain of TCR clone 75566 (TRBV18, TRBJ1-1)
CASSPETKPEAFF

SEQ ID NO: 151133 - protein, 16 aa, Homo sapiens
  CDR3 for alpha chain variable domain of TCR clone 75567 (TRAV14/DV4, TRAJ20)
CAMREGRSRDDYKLSF

SEQ ID NO: 151134 - protein, 13 aa, Homo sapiens
  CDR3 for beta chain variable domain of TCR clone 75567 (TRBV20-1, TRBJ1-1)
CSAPPGGHTEAFF

SEQ ID NO: 151135 - protein, 16 aa, Homo sapiens
  CDR3 for alpha chain variable domain of TCR clone 75568 (TRAV30, TRAJ24)
CGTEIVDADSWGKFQF

SEQ ID NO: 151136 - protein, 16 aa, Homo sapiens
  CDR3 for beta chain variable domain of TCR clone 75568 (TRBV3-1, TRBJ2-5)
CASNQDWASGQETQYF

SEQ ID NO: 151137 - protein, 14 aa, Homo sapiens
  CDR3 for alpha chain variable domain of TCR clone 75569 (TRAV12-2, TRAJ13)
CAVKKTGGYQKVTF

SEQ ID NO: 151138 - protein, 15 aa, Homo sapiens
  CDR3 for beta chain variable domain of TCR clone 75569 (TRBV11-3, TRBJ2-1)
CASSNGGGSSNEQFF

SEQ ID NO: 151139 - protein, 14 aa, Homo sapiens
  CDR3 for alpha chain variable domain of TCR clone 75570 (TRAV8-2, TRAJ17)
CVVSEGAAGNKLTF

SEQ ID NO: 151140 - protein, 13 aa, Homo sapiens
  CDR3 for beta chain variable domain of TCR clone 75570 (TRBV19, TRBJ2-1)
CASSMYRVNEQFF

SEQ ID NO: 151141 - protein, 18 aa, Homo sapiens
  CDR3 for alpha chain variable domain of TCR clone 75571 (TRAV21, TRAJ52)
CAVRPSPAGGTSYGKLTF

SEQ ID NO: 151142 - protein, 14 aa, Homo sapiens
  CDR3 for beta chain variable domain of TCR clone 75571 (TRBV11-2, TRBJ2-7)
CASSSTGEGYEQYF

SEQ ID NO: 151143 - protein, 12 aa, Homo sapiens
  CDR3 for alpha chain variable domain of TCR clone 75572 (TRAV13-1, TRAJ16)
CAARYQMARSCS

SEQ ID NO: 151144 - protein, 13 aa, Homo sapiens
  CDR3 for beta chain variable domain of TCR clone 75572 (TRBV4-1, TRBJ2-1)
CASSQAGGDEQFF

SEQ ID NO: 151145 - protein, 16 aa, Homo sapiens
  CDR3 for alpha chain variable domain of TCR clone 75573 (TRAV20, TRAJ22)
CAVQASSSGSARQLIF

SEQ ID NO: 151146 - protein, 13 aa, Homo sapiens
  CDR3 for beta chain variable domain of TCR clone 75573 (TRBV7-2, TRBJ2-5)
CASSQTSVETQYF

SEQ ID NO: 151147 - protein, 15 aa, Homo sapiens
  CDR3 for alpha chain variable domain of TCR clone 75574 (TRAV12-3, TRAJ49)
CAMAVTPNTGNQFYF

SEQ ID NO: 151148 - protein, 18 aa, Homo sapiens
  CDR3 for beta chain variable domain of TCR clone 75574 (TRBV4-1, TRBJ1-5)
CASSQDPRGQGLNQPQHC

SEQ ID NO: 151149 - protein, 13 aa, Homo sapiens
  CDR3 for alpha chain variable domain of TCR clone 75575 (TRAV12-2, TRAJ7)
CAVNLYGNNRLAF

SEQ ID NO: 151150 - protein, 15 aa, Homo sapiens
  CDR3 for beta chain variable domain of TCR clone 75575 (TRBV15, TRBJ2-3)
CATSRDPRGTDTQYF

SEQ ID NO: 151151 - protein, 17 aa, Homo sapiens
  CDR3 for alpha chain variable domain of TCR clone 75576 (TRAV26-1, TRAJ37)
CIVRGITVSSNTGKLIF

SEQ ID NO: 151152 - protein, 14 aa, Homo sapiens
  CDR3 for beta chain variable domain of TCR clone 75576 (TRBV19, TRBJ2-1)
CASPTFVLSGEQFF

SEQ ID NO: 151153 - protein, 14 aa, Homo sapiens
  CDR3 for alpha chain variable domain of TCR clone 75577 (TRAV3, TRAJ21)
CAVRDAYNFNKFYF

SEQ ID NO: 151154 - protein, 15 aa, Homo sapiens
  CDR3 for beta chain variable domain of TCR clone 75577 (TRBV6-5, TRBJ1-5)
CASSYSWDSNQPQHF

SEQ ID NO: 151155 - protein, 13 aa, Homo sapiens
  CDR3 for alpha chain variable domain of TCR clone 75578 (TRAV27, TRAJ45)
CRSSGGGADGLTF

SEQ ID NO: 151156 - protein, 17 aa, Homo sapiens
  CDR3 for beta chain variable domain of TCR clone 75578 (TRBV28, TRBJ2-5)
CASSTPEGDALQETQYF

SEQ ID NO: 151157 - protein, 11 aa, Homo sapiens
  CDR3 for alpha chain variable domain of TCR clone 75579 (TRAV16, TRAJ29)
WAPSGNTPLVF

SEQ ID NO: 151158 - protein, 15 aa, Homo sapiens
  CDR3 for beta chain variable domain of TCR clone 75579 (TRBV5-7, TRBJ2-7)
CASSPYVEGSYEQYF

SEQ ID NO: 151159 - protein, 11 aa, Homo sapiens
  CDR3 for alpha chain variable domain of TCR clone 75580 (TRAV21, TRAJ34)
CAHYNTDKLIF

SEQ ID NO: 151160 - protein, 13 aa, Homo sapiens
  CDR3 for beta chain variable domain of TCR clone 75580 (TRBV7-6, TRBJ1-2)
CASSLVAGYGYTF

SEQ ID NO: 151161 - protein, 14 aa, Homo sapiens
  CDR3 for alpha chain variable domain of TCR clone 75581 (TRAV6, TRAJ6)
CALPTSGGSYIPTF

SEQ ID NO: 151162 - protein, 17 aa, Homo sapiens
  CDR3 for beta chain variable domain of TCR clone 75581 (TRBV5-1, TRBJ2-5)
CSSSPVALGQNQETQYF

SEQ ID NO: 151163 - protein, 12 aa, Homo sapiens
  CDR3 for alpha chain variable domain of TCR clone 75582 (TRAV17, TRAJ30)
CVPERRDDKVIF

SEQ ID NO: 151164 - protein, 11 aa, Homo sapiens
  CDR3 for beta chain variable domain of TCR clone 75582 (TRBV20-1, TRBJ1-2)
CSAQGAGGYTF

SEQ ID NO: 151165 - protein, 13 aa, Homo sapiens
  CDR3 for alpha chain variable domain of TCR clone 75583 (TRAV36/DV7, TRAJ38)
CVANAGSNRKLIW

SEQ ID NO: 151166 - protein, 14 aa, Homo sapiens
  CDR3 for beta chain variable domain of TCR clone 75583 (TRBV7-2, TRBJ2-7)
CASSLRWEVNEQYF

SEQ ID NO: 151167 - protein, 11 aa, Homo sapiens
  CDR3 for alpha chain variable domain of TCR clone 75584 (TRAV21, TRAJ9)
CAVPGGFKTIF

SEQ ID NO: 151168 - protein, 12 aa, Homo sapiens
  CDR3 for beta chain variable domain of TCR clone 75584 (TRBV20-1, TRBJ2-3)
CSARAGTDTQYF

SEQ ID NO: 151169 - protein, 12 aa, Homo sapiens
  CDR3 for alpha chain variable domain of TCR clone 75585 (TRAV8-3, TRAJ5)
CAVGGGLRALTF

SEQ ID NO: 151170 - protein, 18 aa, Homo sapiens
  CDR3 for beta chain variable domain of TCR clone 75585 (TRBV7-9, TRBJ2-1)
CASSLAVSGTSGRNEQFF

SEQ ID NO: 151171 - protein, 12 aa, Homo sapiens
  CDR3 for alpha chain variable domain of TCR clone 75586 (TRAV1-2, TRAJ29)
CAVPSGNAPLVF

SEQ ID NO: 151172 - protein, 13 aa, Homo sapiens
  CDR3 for beta chain variable domain of TCR clone 75586 (TRBV5-4, TRBJ1-1)
CASSVDLGTEAFF

SEQ ID NO: 151173 - protein, 13 aa, Homo sapiens
  CDR3 for alpha chain variable domain of TCR clone 75587 (TRAV12-1, TRAJ47)
CVVNMEYGNKLVF

SEQ ID NO: 151174 - protein, 12 aa, Homo sapiens
  CDR3 for beta chain variable domain of TCR clone 75587 (TRBV7-3, TRBJ2-1)
CASSFINNEQFF

SEQ ID NO: 151175 - protein, 14 aa, Homo sapiens
  CDR3 for alpha chain variable domain of TCR clone 75588 (TRAV17, TRAJ34)
CATDSLEGTDKLIF

SEQ ID NO: 151176 - protein, 15 aa, Homo sapiens
  CDR3 for beta chain variable domain of TCR clone 75588 (TRBV6-6, TRBJ2-7)
CASSYSYGGSYEQYF

SEQ ID NO: 151177 - protein, 23 aa, Homo sapiens
  CDR3 for alpha chain variable domain of TCR clone 75589 (TRAV26-1, TRAJ38)
CIADNAGNNHIQNPDPAVYQLRE

SEQ ID NO: 151178 - protein, 13 aa, Homo sapiens
  CDR3 for beta chain variable domain of TCR clone 75589 (TRBV10-3, TRBJ2-7)
CASKLAVNYEQYF

SEQ ID NO: 151179 - protein, 14 aa, Homo sapiens
  CDR3 for alpha chain variable domain of TCR clone 75590 (TRAV23/DV6, TRAJ58)
CAGMRGTSGSRLTF

SEQ ID NO: 151180 - protein, 13 aa, Homo sapiens
  CDR3 for beta chain variable domain of TCR clone 75590 (TRBV28, TRBJ2-7)
CASRSSGVYEQYF

SEQ ID NO: 151181 - protein, 11 aa, Homo sapiens
  CDR3 for alpha chain variable domain of TCR clone 75591 (TRAV12-1, TRAJ26)
CVVAYGQNFVF

SEQ ID NO: 151182 - protein, 15 aa, Homo sapiens
  CDR3 for beta chain variable domain of TCR clone 75591 (TRBV12-4, TRBJ2-5)
CASSGTGQAKETQYF

SEQ ID NO: 151183 - protein, 12 aa, Homo sapiens
  CDR3 for alpha chain variable domain of TCR clone 75592 (TRAV12-3, TRAJ42)
CAPGGSQGNLIF

SEQ ID NO: 151184 - protein, 15 aa, Homo sapiens
  CDR3 for beta chain variable domain of TCR clone 75592 (TRBV18, TRBJ2-1)
CASSPPSASYNEQFF

SEQ ID NO: 151185 - protein, 11 aa, Homo sapiens
  CDR3 for alpha chain variable domain of TCR clone 75593 (TRAV21, TRAJ49)
CAVSFGNQFYF

SEQ ID NO: 151186 - protein, 15 aa, Homo sapiens
  CDR3 for beta chain variable domain of TCR clone 75593 (TRBV10-3, TRBJ2-1)
CATNGGLGQGDEQFF

SEQ ID NO: 151187 - protein, 14 aa, Homo sapiens
  CDR3 for alpha chain variable domain of TCR clone 75594 (TRAV13-1, TRAJ44)
CAAKATGTASKLTF

SEQ ID NO: 151188 - protein, 17 aa, Homo sapiens
  CDR3 for beta chain variable domain of TCR clone 75594 (TRBV7-3, TRBJ2-3)
CASSLMKRMRGAYTQYF

SEQ ID NO: 151189 - protein, 11 aa, Homo sapiens
  CDR3 for alpha chain variable domain of TCR clone 75595 (TRAV12-1, TRAJ34)
CVVNKGRELIF

SEQ ID NO: 151190 - protein, 12 aa, Homo sapiens
  CDR3 for beta chain variable domain of TCR clone 75595 (TRBV2, TRBJ2-1)
CTYGPPGNEQFF

SEQ ID NO: 151191 - protein, 11 aa, Homo sapiens
  CDR3 for alpha chain variable domain of TCR clone 75596 (TRAV12-1, TRAJ34)
CAVNKGRELIF

SEQ ID NO: 151192 - protein, 15 aa, Homo sapiens
  CDR3 for beta chain variable domain of TCR clone 75596 (TRBV10-3, TRBJ2-1)
CAIRNGTSGHNEQFF

SEQ ID NO: 151193 - protein, 14 aa, Homo sapiens
  CDR3 for alpha chain variable domain of TCR clone 75597 (TRAV26-1, TRAJ38)
CIADNAGHNRKLIW

SEQ ID NO: 151194 - protein, 13 aa, Homo sapiens
  CDR3 for beta chain variable domain of TCR clone 75597 (TRBV4-1, TRBJ2-7)
CASSQGQAYEQYF

SEQ ID NO: 151195 - protein, 12 aa, Homo sapiens
  CDR3 for alpha chain variable domain of TCR clone 75598 (TRAV27, TRAJ35)
CAGADFGNVMHC

SEQ ID NO: 151196 - protein, 16 aa, Homo sapiens
  CDR3 for beta chain variable domain of TCR clone 75598 (TRBV6-1, TRBJ2-1)
CASILRQGSSYNEQFF

SEQ ID NO: 151197 - protein, 14 aa, Homo sapiens
  CDR3 for alpha chain variable domain of TCR clone 75599 (TRAV13-1, TRAJ35)
CAASKGGFGNVLHC

SEQ ID NO: 151198 - protein, 13 aa, Homo sapiens
  CDR3 for beta chain variable domain of TCR clone 75599 (TRBV7-9, TRBJ2-3)
CASSPGSTDTQYF

SEQ ID NO: 151199 - protein, 12 aa, Homo sapiens
  CDR3 for alpha chain variable domain of TCR clone 75600 (TRAV17, TRAJ39)
CATGAAGNMLTF

SEQ ID NO: 151200 - protein, 14 aa, Homo sapiens
  CDR3 for beta chain variable domain of TCR clone 75600 (TRBV7-9, TRBJ1-2)
CASSRQGANYGYTV

SEQ ID NO: 151201 - protein, 10 aa, Homo sapiens
  CDR3 for alpha chain variable domain of TCR clone 75601 (TRAV36/DV7, TRAJ48)
CTVGNEKLTF

SEQ ID NO: 151202 - protein, 12 aa, Homo sapiens
  CDR3 for beta chain variable domain of TCR clone 75601 (TRBV20-1, TRBJ2-5)
CSAGGAGETQYF

SEQ ID NO: 151203 - protein, 12 aa, Homo sapiens
  CDR3 for alpha chain variable domain of TCR clone 75602 (TRAV13-1, TRAJ15)
CAANQAGTALIF

SEQ ID NO: 151204 - protein, 14 aa, Homo sapiens
  CDR3 for beta chain variable domain of TCR clone 75602 (TRBV20-1, TRBJ2-5)
CGARYRGLQETQYF

SEQ ID NO: 151205 - protein, 15 aa, Homo sapiens
  CDR3 for alpha chain variable domain of TCR clone 75603 (TRAV17, TRAJ57)
CATGPSQGGSEKLVF

SEQ ID NO: 151206 - protein, 15 aa, Homo sapiens
  CDR3 for beta chain variable domain of TCR clone 75603 (TRBV19, TRBJ2-7)
CASSPAGSGEALRYF

SEQ ID NO: 151207 - protein, 14 aa, Homo sapiens
  CDR3 for alpha chain variable domain of TCR clone 75604 (TRAV1-1, TRAJ27)
CAVIYNTNAGKSTF

SEQ ID NO: 151208 - protein, 18 aa, Homo sapiens
  CDR3 for beta chain variable domain of TCR clone 75604 (TRBV11-2, TRBJ2-3)
CASSLGGASRGAPNTQYF

SEQ ID NO: 151209 - protein, 15 aa, Homo sapiens
  CDR3 for alpha chain variable domain of TCR clone 75605 (TRAV4, TRAJ10)
YLVGDGSGGGNKLTF

SEQ ID NO: 151210 - protein, 15 aa, Homo sapiens
  CDR3 for beta chain variable domain of TCR clone 75605 (TRBV27, TRBJ2-3)
CASSSLAGVIDTQYF

SEQ ID NO: 151211 - protein, 14 aa, Homo sapiens
  CDR3 for alpha chain variable domain of TCR clone 75606 (TRAV36/DV7, TRAJ13)
WGSGEKGGYQKVTF

SEQ ID NO: 151212 - protein, 15 aa, Homo sapiens
  CDR3 for beta chain variable domain of TCR clone 75606 (TRBV19, TRBJ2-1)
CASSTGTSSYNEQFF

SEQ ID NO: 151213 - protein, 14 aa, Homo sapiens
  CDR3 for alpha chain variable domain of TCR clone 75607 (TRAV17, TRAJ37)
CATDGSSNTGKLIF

SEQ ID NO: 151214 - protein, 13 aa, Homo sapiens
  CDR3 for beta chain variable domain of TCR clone 75607 (TRBV11-2, TRBJ2-1)
CASRLDLVNEQFF

SEQ ID NO: 151215 - protein, 15 aa, Homo sapiens
  CDR3 for alpha chain variable domain of TCR clone 75608 (TRAV17, TRAJ16)
CATALRFSGGQKLLF

SEQ ID NO: 151216 - protein, 12 aa, Homo sapiens
  CDR3 for beta chain variable domain of TCR clone 75608 (TRBV2, TRBJ2-7)
CASSDPDYEQYF

SEQ ID NO: 151217 - protein, 16 aa, Homo sapiens
  CDR3 for alpha chain variable domain of TCR clone 75609 (TRAV12-2, TRAJ39)
CAVNRGPNNAGNMPTF

SEQ ID NO: 151218 - protein, 10 aa, Homo sapiens
  CDR3 for beta chain variable domain of TCR clone 75609 (TRBV2, TRBJ2-4)
CASRGSIQYF

SEQ ID NO: 151219 - protein, 13 aa, Homo sapiens
  CDR3 for alpha chain variable domain of TCR clone 75610 (TRAV1-1, TRAJ15)
CAVVDQAGTALIS

SEQ ID NO: 151220 - protein, 14 aa, Homo sapiens
  CDR3 for beta chain variable domain of TCR clone 75610 (TRBV5-4, TRBJ1-6)
CASSLWSDNSPLHF

SEQ ID NO: 151221 - protein, 13 aa, Homo sapiens
  CDR3 for alpha chain variable domain of TCR clone 75611 (TRAV30, TRAJ6)
CGFIEGGSYIPTF

SEQ ID NO: 151222 - protein, 15 aa, Homo sapiens
  CDR3 for beta chain variable domain of TCR clone 75611 (TRBV5-1, TRBJ2-1)
CASSPPRAPYNEQFF

SEQ ID NO: 151223 - protein, 17 aa, Homo sapiens
  CDR3 for alpha chain variable domain of TCR clone 75612 (TRAV3, TRAJ42)
CAVRDRDYGGSQGNLIF

SEQ ID NO: 151224 - protein, 12 aa, Homo sapiens
  CDR3 for beta chain variable domain of TCR clone 75612 (TRBV7-6, TRBJ2-5)
CASSLSQETQYF

SEQ ID NO: 151225 - protein, 16 aa, Homo sapiens
  CDR3 for alpha chain variable domain of TCR clone 75613 (TRAV26-1, )
CIDIQNPDPAMYQLRD

SEQ ID NO: 151226 - protein, 19 aa, Homo sapiens
  CDR3 for beta chain variable domain of TCR clone 75613 (TRBV19, TRBJ2-5)
CASSIGQVTDFFLGETQYF

SEQ ID NO: 151227 - protein, 18 aa, Homo sapiens
  CDR3 for alpha chain variable domain of TCR clone 75614 (TRAV21, TRAJ52)
CAVRPSPAGSTSYGKLTF

SEQ ID NO: 151228 - protein, 15 aa, Homo sapiens
  CDR3 for beta chain variable domain of TCR clone 75614 (TRBV6-6, TRBJ2-7)
CASSCSYGGSYEQYF

SEQ ID NO: 151229 - protein, 14 aa, Homo sapiens
  CDR3 for alpha chain variable domain of TCR clone 75615 (TRAV16, TRAJ31)
CALSGRNNNARLMS

SEQ ID NO: 151230 - protein, 12 aa, Homo sapiens
  CDR3 for beta chain variable domain of TCR clone 75615 (TRBV11-2, TRBJ1-2)
CASSREGDGYTF

SEQ ID NO: 151231 - protein, 16 aa, Homo sapiens
  CDR3 for alpha chain variable domain of TCR clone 75616 (TRAV30, TRAJ24)
CGTEIVDADSWGKFQF

SEQ ID NO: 151232 - protein, 13 aa, Homo sapiens
  CDR3 for beta chain variable domain of TCR clone 75616 (TRBV18, TRBJ1-2)
CASSASATEGYSF

SEQ ID NO: 151233 - protein, 13 aa, Homo sapiens
  CDR3 for alpha chain variable domain of TCR clone 75617 (TRAV8-3, TRAJ48)
CAVVPFGNEKLTF

SEQ ID NO: 151234 - protein, 12 aa, Homo sapiens
  CDR3 for beta chain variable domain of TCR clone 75617 (TRBV11-2, TRBJ2-2)
CASSLGGGGLFF

SEQ ID NO: 151235 - protein, 14 aa, Homo sapiens
  CDR3 for alpha chain variable domain of TCR clone 75618 (TRAV13-1, TRAJ33)
CAASSRDSNYQLIW

SEQ ID NO: 151236 - protein, 16 aa, Homo sapiens
  CDR3 for beta chain variable domain of TCR clone 75618 (TRBV7-3, TRBJ2-1)
RASSLLVGELVDEQFF

SEQ ID NO: 151237 - protein, 12 aa, Homo sapiens
  CDR3 for alpha chain variable domain of TCR clone 75619 (TRAV3, TRAJ30)
CAVRDPDDKIIF

SEQ ID NO: 151238 - protein, 13 aa, Homo sapiens
  CDR3 for beta chain variable domain of TCR clone 75619 (TRBV12-4, TRBJ2-1)
CASSFSGFNEQFF

SEQ ID NO: 151239 - protein, 15 aa, Homo sapiens
  CDR3 for alpha chain variable domain of TCR clone 75620 (TRAV26-1, TRAJ39)
CIVRDGSNAGNMLTF

SEQ ID NO: 151240 - protein, 14 aa, Homo sapiens
  CDR3 for beta chain variable domain of TCR clone 75620 (TRBV10-3, TRBJ1-2)
CAIRAGTGDHGCTF

SEQ ID NO: 151241 - protein, 22 aa, Homo sapiens
  CDR3 for alpha chain variable domain of TCR clone 75621 (TRAV12-2, TRAJ53)
SPVIRPPTSVPPILSSNYKLTF

SEQ ID NO: 151242 - protein, 13 aa, Homo sapiens
  CDR3 for beta chain variable domain of TCR clone 75621 (TRBV7-7, TRBJ2-3)
CASSLSRADTQYF

SEQ ID NO: 151243 - protein, 15 aa, Homo sapiens
  CDR3 for alpha chain variable domain of TCR clone 75622 (TRAV26-1, TRAJ15)
CIVRMANQAGTALVF

SEQ ID NO: 151244 - protein, 15 aa, Homo sapiens
  CDR3 for beta chain variable domain of TCR clone 75622 (TRBV20-1, TRBJ1-1)
CSARKAETSNTEAFF

SEQ ID NO: 151245 - protein, 11 aa, Homo sapiens
  CDR3 for alpha chain variable domain of TCR clone 75623 (TRAV12-3, TRAJ27)
CAMANAGKSTF

SEQ ID NO: 151246 - protein, 13 aa, Homo sapiens
  CDR3 for beta chain variable domain of TCR clone 75623 (TRBV20-1, TRBJ1-1)
CSAKVGGNTEAFF

SEQ ID NO: 151247 - protein, 14 aa, Homo sapiens
  CDR3 for alpha chain variable domain of TCR clone 75624 (TRAV17, TRAJ39)
SATDPVRAGNMLTF

SEQ ID NO: 151248 - protein, 15 aa, Homo sapiens
  CDR3 for beta chain variable domain of TCR clone 75624 (TRBV13, TRBJ1-5)
CAGSFGQGGVQPQHF

SEQ ID NO: 151249 - protein, 17 aa, Homo sapiens
  CDR3 for alpha chain variable domain of TCR clone 75625 (TRAV23/DV6, TRAJ58)
CAARLLRGETSGSRLTF

SEQ ID NO: 151250 - protein, 13 aa, Homo sapiens
  CDR3 for beta chain variable domain of TCR clone 75625 (TRBV7-9, TRBJ2-3)
CASSPGSTDTQYF

SEQ ID NO: 151251 - protein, 13 aa, Homo sapiens
  CDR3 for alpha chain variable domain of TCR clone 75626 (TRAV17, TRAJ9)
CASDYTGGFKTIF

SEQ ID NO: 151252 - protein, 16 aa, Homo sapiens
  CDR3 for beta chain variable domain of TCR clone 75626 (TRBV7-7, TRBJ2-1)
CASSLASGTSYNEQFF

SEQ ID NO: 151253 - protein, 15 aa, Homo sapiens
  CDR3 for alpha chain variable domain of TCR clone 75627 (TRAV21, TRAJ24)
CAARSSTDSWGKLQF

SEQ ID NO: 151254 - protein, 15 aa, Homo sapiens
  CDR3 for beta chain variable domain of TCR clone 75627 (TRBV5-1, TRBJ2-1)
CASSPPGAPYNEQFF

SEQ ID NO: 151255 - protein, 23 aa, Homo sapiens
  CDR3 for alpha chain variable domain of TCR clone 75628 (TRAV26-1, TRAJ38)
CIADNAGNNHIQNPDPAVYQLRD

SEQ ID NO: 151256 - protein, 13 aa, Homo sapiens
  CDR3 for beta chain variable domain of TCR clone 75628 (TRBV10-3, TRBJ2-7)
CASKLAVNHEQYF

SEQ ID NO: 151257 - protein, 13 aa, Homo sapiens
  CDR3 for alpha chain variable domain of TCR clone 75629 (TRAV8-1, TRAJ30)
CAVIMNRDEKIIF

SEQ ID NO: 151258 - protein, 14 aa, Homo sapiens
  CDR3 for beta chain variable domain of TCR clone 75629 (TRBV7-2, TRBJ1-6)
CASSLQGANSPLHF

SEQ ID NO: 151259 - protein, 15 aa, Homo sapiens
  CDR3 for alpha chain variable domain of TCR clone 75630 (TRAV8-3, TRAJ52)
CAVGPSKTNAGKSTF

SEQ ID NO: 151260 - protein, 13 aa, Homo sapiens
  CDR3 for beta chain variable domain of TCR clone 75630 (TRBV7-8, TRBJ1-2)
CASSAQSYYGYTF

SEQ ID NO: 151261 - protein, 15 aa, Homo sapiens
  CDR3 for alpha chain variable domain of TCR clone 75631 (TRAV3, TRAJ27)
CAVRDPLTNAGKPTF

SEQ ID NO: 151262 - protein, 15 aa, Homo sapiens
  CDR3 for beta chain variable domain of TCR clone 75631 (TRBV28, TRBJ2-1)
CASSIIAGGRSEQFF

SEQ ID NO: 151263 - protein, 13 aa, Homo sapiens
  CDR3 for alpha chain variable domain of TCR clone 75632 (TRAV12-1, TRAJ22)
CVVYSGSARQLTF

SEQ ID NO: 151264 - protein, 17 aa, Homo sapiens
  CDR3 for beta chain variable domain of TCR clone 75632 (TRBV7-2, TRBJ2-7)
CASSLVGAGGARNEQYF

SEQ ID NO: 151265 - protein, 10 aa, Homo sapiens
  CDR3 for alpha chain variable domain of TCR clone 75633 (TRAV13-1, TRAJ8)
CAAPFQKLVF

SEQ ID NO: 151266 - protein, 14 aa, Homo sapiens
  CDR3 for beta chain variable domain of TCR clone 75633 (TRBV11-2, TRBJ2-2)
CASSLGLRVRELFF

SEQ ID NO: 151267 - protein, 15 aa, Homo sapiens
  CDR3 for alpha chain variable domain of TCR clone 75634 (TRAV12-2, TRAJ43)
CAFDMRFGAGTRLTV

SEQ ID NO: 151268 - protein, 20 aa, Homo sapiens
  CDR3 for beta chain variable domain of TCR clone 75634 (TRBV28, TRBJ2-1)
CASTPIGRSPGLAGGNEQFF

SEQ ID NO: 151269 - protein, 12 aa, Homo sapiens
  CDR3 for alpha chain variable domain of TCR clone 75635 (TRAV13-1, TRAJ53)
AASGGSNNKLTF

SEQ ID NO: 151270 - protein, 15 aa, Homo sapiens
  CDR3 for beta chain variable domain of TCR clone 75635 (TRBV5-1, TRBJ2-1)
CASSPPRAPYNEQFF

SEQ ID NO: 151271 - protein, 12 aa, Homo sapiens
  CDR3 for alpha chain variable domain of TCR clone 75636 (TRAV17, TRAJ39)
CATGAAGNMLTF

SEQ ID NO: 151272 - protein, 14 aa, Homo sapiens
  CDR3 for beta chain variable domain of TCR clone 75636 (TRBV7-6, TRBJ2-3)
CASSLGTVTDTQYF

SEQ ID NO: 151273 - protein, 18 aa, Homo sapiens
  CDR3 for alpha chain variable domain of TCR clone 75637 (TRAV2, TRAJ20)
LRVREADAAVYRDCKLSF

SEQ ID NO: 151274 - protein, 13 aa, Homo sapiens
  CDR3 for beta chain variable domain of TCR clone 75637 (TRBV15, TRBJ1-6)
CATSGGLNSPLHF

SEQ ID NO: 151275 - protein, 13 aa, Homo sapiens
  CDR3 for alpha chain variable domain of TCR clone 75638 (TRAV27, TRAJ45)
CGSSGGGADGLTF

SEQ ID NO: 151276 - protein, 11 aa, Homo sapiens
  CDR3 for beta chain variable domain of TCR clone 75638 (TRBV19, TRBJ1-1)
CASSIGSEAFF

SEQ ID NO: 151277 - protein, 13 aa, Homo sapiens
  CDR3 for alpha chain variable domain of TCR clone 75639 (TRAV1-2, TRAJ12)
CAVSMDSSYKLIF

SEQ ID NO: 151278 - protein, 15 aa, Homo sapiens
  CDR3 for beta chain variable domain of TCR clone 75639 (TRBV27, TRBJ2-5)
CACSLIPSGGETQYF

SEQ ID NO: 151279 - protein, 13 aa, Homo sapiens
  CDR3 for alpha chain variable domain of TCR clone 75640 (TRAV21, TRAJ56)
CAVRLGANSKLTF

SEQ ID NO: 151280 - protein, 15 aa, Homo sapiens
  CDR3 for beta chain variable domain of TCR clone 75640 (TRBV20-1, TRBJ2-7)
CSARDRVSGMDEQYF

SEQ ID NO: 151281 - protein, 15 aa, Homo sapiens
  CDR3 for alpha chain variable domain of TCR clone 75641 (TRAV12-2, TRAJ53)
CAVNGGGGSNYKLTF

SEQ ID NO: 151282 - protein, 14 aa, Homo sapiens
  CDR3 for beta chain variable domain of TCR clone 75641 (TRBV2, TRBJ2-1)
CASSDRACYNEQFF

SEQ ID NO: 151283 - protein, 17 aa, Homo sapiens
  CDR3 for alpha chain variable domain of TCR clone 75642 (TRAV8-6, TRAJ58)
YAVSSWVGETSGSRLTF

SEQ ID NO: 151284 - protein, 14 aa, Homo sapiens
  CDR3 for beta chain variable domain of TCR clone 75642 (TRBV4-2, TRBJ2-1)
CASGLDRAYNEQFF

SEQ ID NO: 151285 - protein, 16 aa, Homo sapiens
  CDR3 for alpha chain variable domain of TCR clone 75643 (TRAV30, TRAJ24)
CGTEIVDADSWGKFQF

SEQ ID NO: 151286 - protein, 15 aa, Homo sapiens
  CDR3 for beta chain variable domain of TCR clone 75643 (TRBV19, TRBJ2-7)
CASSFNSGGVWEQYF

SEQ ID NO: 151287 - protein, 13 aa, Homo sapiens
  CDR3 for alpha chain variable domain of TCR clone 75644 (TRAV1-2, TRAJ9)
CAALNTGGFKTIF

SEQ ID NO: 151288 - protein, 14 aa, Homo sapiens
  CDR3 for beta chain variable domain of TCR clone 75644 (TRBV13, TRBJ2-7)
CASSLKGASYEQYF

SEQ ID NO: 151289 - protein, 14 aa, Homo sapiens
  CDR3 for alpha chain variable domain of TCR clone 75645 (TRAV1-2, TRAJ8)
CAVREDTGFQKLLF

SEQ ID NO: 151290 - protein, 14 aa, Homo sapiens
  CDR3 for beta chain variable domain of TCR clone 75645 (TRBV5-4, TRBJ1-1)
CASSLDSRRDEAFF

SEQ ID NO: 151291 - protein, 16 aa, Homo sapiens
  CDR3 for alpha chain variable domain of TCR clone 75646 (TRAV30, TRAJ24)
CGTEIVDADSWGKFQF

SEQ ID NO: 151292 - protein, 17 aa, Homo sapiens
  CDR3 for beta chain variable domain of TCR clone 75646 (TRBV20-1, TRBJ2-1)
CSASSSGLGDPTMSSSS

SEQ ID NO: 151293 - protein, 13 aa, Homo sapiens
  CDR3 for alpha chain variable domain of TCR clone 75647 (TRAV8-4, TRAJ34)
CAVTLYNTDKPIF

SEQ ID NO: 151294 - protein, 17 aa, Homo sapiens
  CDR3 for beta chain variable domain of TCR clone 75647 (TRBV7-2, TRBJ2-2)
CASSPSWRGGGTGELFF

SEQ ID NO: 151295 - protein, 15 aa, Homo sapiens
  CDR3 for alpha chain variable domain of TCR clone 75648 (TRAV13-1, TRAJ45)
CAASGSGGGDDGLTF

SEQ ID NO: 151296 - protein, 12 aa, Homo sapiens
  CDR3 for beta chain variable domain of TCR clone 75648 (TRBV11-2, TRBJ2-2)
CASSLGGGELFF

SEQ ID NO: 151297 - protein, 12 aa, Homo sapiens
  CDR3 for alpha chain variable domain of TCR clone 75649 (TRAV12-1, TRAJ40)
CVFYSGTYKYIF

SEQ ID NO: 151298 - protein, 18 aa, Homo sapiens
  CDR3 for beta chain variable domain of TCR clone 75649 (TRBV12-4, TRBJ2-2)
CASSLVAGTRGRTGELFF

SEQ ID NO: 151299 - protein, 15 aa, Homo sapiens
  CDR3 for alpha chain variable domain of TCR clone 75650 (TRAV35, TRAJ40)
CAGQLGTSGTYKYIF

SEQ ID NO: 151300 - protein, 13 aa, Homo sapiens
  CDR3 for beta chain variable domain of TCR clone 75650 (TRBV9, TRBJ2-1)
CASSPSGGNEQFF

SEQ ID NO: 151301 - protein, 14 aa, Homo sapiens
  CDR3 for alpha chain variable domain of TCR clone 75651 (TRAV39, TRAJ34)
CATDSLEGTDKLIF

SEQ ID NO: 151302 - protein, 13 aa, Homo sapiens
  CDR3 for beta chain variable domain of TCR clone 75651 (TRBV11-2, TRBJ2-7)
CASSGTRPYEQYF

SEQ ID NO: 151303 - protein, 14 aa, Homo sapiens
  CDR3 for alpha chain variable domain of TCR clone 75652 (TRAV8-2, TRAJ4)
CVVSPSGGCNKLIF

SEQ ID NO: 151304 - protein, 15 aa, Homo sapiens
  CDR3 for beta chain variable domain of TCR clone 75652 (TRBV6-6, TRBJ2-7)
CASSYSYGGSYEQYF

SEQ ID NO: 151305 - protein, 14 aa, Homo sapiens
  CDR3 for alpha chain variable domain of TCR clone 75653 (TRAV8-1, TRAJ34)
CAVNPSYNTDKLIF

SEQ ID NO: 151306 - protein, 16 aa, Homo sapiens
  CDR3 for beta chain variable domain of TCR clone 75653 (TRBV7-2, TRBJ2-6)
CASSLAGRSWANVLTF

SEQ ID NO: 151307 - protein, 15 aa, Homo sapiens
  CDR3 for alpha chain variable domain of TCR clone 75654 (TRAV3, TRAJ3)
CAVRDGRSSASKIIF

SEQ ID NO: 151308 - protein, 17 aa, Homo sapiens
  CDR3 for beta chain variable domain of TCR clone 75654 (TRBV25-1, TRBJ2-7)
CASSDARVVFSSYEQYF

SEQ ID NO: 151309 - protein, 18 aa, Homo sapiens
  CDR3 for alpha chain variable domain of TCR clone 75655 (TRAV29/DV5, TRAJ52)
CAAGFRGAGGTSYGKLTF

SEQ ID NO: 151310 - protein, 15 aa, Homo sapiens
  CDR3 for beta chain variable domain of TCR clone 75655 (TRBV20-1, TRBJ2-7)
CSAGDRVSGMDEQYF

SEQ ID NO: 151311 - protein, 11 aa, Homo sapiens
  CDR3 for alpha chain variable domain of TCR clone 75656 (TRAV2, TRAJ13)
SASGGYQKVTF

SEQ ID NO: 151312 - protein, 15 aa, Homo sapiens
  CDR3 for beta chain variable domain of TCR clone 75656 (TRBV6-1, TRBJ2-2)
CASSRLRGDTGELFF

SEQ ID NO: 151313 - protein, 14 aa, Homo sapiens
  CDR3 for alpha chain variable domain of TCR clone 75657 (TRAV16, TRAJ54)
CAQSLIQGAQKLVF

SEQ ID NO: 151314 - protein, 17 aa, Homo sapiens
  CDR3 for beta chain variable domain of TCR clone 75657 (TRBV11-2, TRBJ2-4)
CASSSVGPGGHRNIQYF

SEQ ID NO: 151315 - protein, 15 aa, Homo sapiens
  CDR3 for alpha chain variable domain of TCR clone 75658 (TRAV4, TRAJ39)
CLVGPNNNAGNMLTL

SEQ ID NO: 151316 - protein, 15 aa, Homo sapiens
  CDR3 for beta chain variable domain of TCR clone 75658 (TRBV7-9, TRBJ1-6)
CASSSPGRGNSPLHF

SEQ ID NO: 151317 - protein, 14 aa, Homo sapiens
  CDR3 for alpha chain variable domain of TCR clone 75659 (TRAV8-3, TRAJ3)
CAVVPRSSASKIIF

SEQ ID NO: 151318 - protein, 16 aa, Homo sapiens
  CDR3 for beta chain variable domain of TCR clone 75659 (TRBV4-1, TRBJ2-3)
CASSQLTSGGGGYAVF

SEQ ID NO: 151319 - protein, 16 aa, Homo sapiens
  CDR3 for alpha chain variable domain of TCR clone 75660 (TRAV12-1, TRAJ43)
CVVNPHRFGAGTRLTI

SEQ ID NO: 151320 - protein, 13 aa, Homo sapiens
  CDR3 for beta chain variable domain of TCR clone 75660 (TRBV20-1, TRBJ1-1)
CSARGGGNTEAFF

SEQ ID NO: 151321 - protein, 16 aa, Homo sapiens
  CDR3 for alpha chain variable domain of TCR clone 75661 (TRAV30, TRAJ24)
CGTEIVDTDSWGKFQF

SEQ ID NO: 151322 - protein, 17 aa, Homo sapiens
  CDR3 for beta chain variable domain of TCR clone 75661 (TRBV20-1, TRBJ2-1)
CSARDPLAGVWDNEQFF

SEQ ID NO: 151323 - protein, 12 aa, Homo sapiens
  CDR3 for alpha chain variable domain of TCR clone 75662 (TRAV12-3, TRAJ20)
CAMVRGYYKLSF

SEQ ID NO: 151324 - protein, 14 aa, Homo sapiens
  CDR3 for beta chain variable domain of TCR clone 75662 (TRBV5-5, TRBJ1-5)
CASSGQGVDQPQHF

SEQ ID NO: 151325 - protein, 16 aa, Homo sapiens
  CDR3 for alpha chain variable domain of TCR clone 75663 (TRAV30, TRAJ24)
CGTEIVDADSWGKFQF

SEQ ID NO: 151326 - protein, 11 aa, Homo sapiens
  CDR3 for beta chain variable domain of TCR clone 75663 (TRBV11-2, TRBJ2-2)
CQQPPYRELFF

SEQ ID NO: 151327 - protein, 13 aa, Homo sapiens
  CDR3 for alpha chain variable domain of TCR clone 75664 (TRAV3, TRAJ20)
CAVRSLNDYKLSF

SEQ ID NO: 151328 - protein, 13 aa, Homo sapiens
  CDR3 for beta chain variable domain of TCR clone 75664 (TRBV7-3, TRBJ1-1)
CTSSQDWGAEAFF

SEQ ID NO: 151329 - protein, 12 aa, Homo sapiens
  CDR3 for alpha chain variable domain of TCR clone 75665 (TRAV35, TRAJ49)
CAGWNIGNQFYF

SEQ ID NO: 151330 - protein, 16 aa, Homo sapiens
  CDR3 for beta chain variable domain of TCR clone 75665 (TRBV5-1, TRBJ2-2)
CASSLWDTTNTGELFF

SEQ ID NO: 151331 - protein, 14 aa, Homo sapiens
  CDR3 for alpha chain variable domain of TCR clone 75666 (TRAV17, TRAJ6)
CATDASGGSYIPTF

SEQ ID NO: 151332 - protein, 19 aa, Homo sapiens
  CDR3 for beta chain variable domain of TCR clone 75666 (TRBV4-3, TRBJ2-7)
CASSQEFMGWQVTPYEQYF

SEQ ID NO: 151333 - protein, 14 aa, Homo sapiens
  CDR3 for alpha chain variable domain of TCR clone 75667 (TRAV27, TRAJ37)
CAGERSGNTGKLIF

SEQ ID NO: 151334 - protein, 15 aa, Homo sapiens
  CDR3 for beta chain variable domain of TCR clone 75667 (TRBV11-3, TRBJ1-6)
CASSLDWGANSPLHF

SEQ ID NO: 151335 - protein, 14 aa, Homo sapiens
  CDR3 for alpha chain variable domain of TCR clone 75668 (TRAV23/DV6, TRAJ40)
CAASLTSGTYKYIF

SEQ ID NO: 151336 - protein, 13 aa, Homo sapiens
  CDR3 for beta chain variable domain of TCR clone 75668 (TRBV15, TRBJ1-2)
CATSMTANYGYTF

SEQ ID NO: 151337 - protein, 15 aa, Homo sapiens
  CDR3 for alpha chain variable domain of TCR clone 75669 (TRAV13-1, TRAJ52)
CALRTGGTSCGKLTF

SEQ ID NO: 151338 - protein, 14 aa, Homo sapiens
  CDR3 for beta chain variable domain of TCR clone 75669 (TRBV20-1, TRBJ2-5)
CSASDSGSGETQYF

SEQ ID NO: 151339 - protein, 14 aa, Homo sapiens
  CDR3 for alpha chain variable domain of TCR clone 75670 (TRAV12-1, TRAJ30)
CVPTGTNRGDKIIF

SEQ ID NO: 151340 - protein, 11 aa, Homo sapiens
  CDR3 for beta chain variable domain of TCR clone 75670 (TRBV4-1, TRBJ2-2)
CASEHTGELFF

SEQ ID NO: 151341 - protein, 16 aa, Homo sapiens
  CDR3 for alpha chain variable domain of TCR clone 75671 (TRAV12-2, TRAJ18)
CAVTTDRGSTLGRLYF

SEQ ID NO: 151342 - protein, 14 aa, Homo sapiens
  CDR3 for beta chain variable domain of TCR clone 75671 (TRBV4-2, TRBJ1-5)
CASSQDSINQPQHY

SEQ ID NO: 151343 - protein, 15 aa, Homo sapiens
  CDR3 for alpha chain variable domain of TCR clone 75672 (TRAV8-3, TRAJ15)
CAVGVPNQAGTALIF

SEQ ID NO: 151344 - protein, 14 aa, Homo sapiens
  CDR3 for beta chain variable domain of TCR clone 75672 (TRBV20-1, TRBJ2-1)
CSPNDEASYNEQFF

SEQ ID NO: 151345 - protein, 14 aa, Homo sapiens
  CDR3 for alpha chain variable domain of TCR clone 75673 (TRAV1-1, TRAJ35)
CAVRSIGFGNVLHC

SEQ ID NO: 151346 - protein, 12 aa, Homo sapiens
  CDR3 for beta chain variable domain of TCR clone 75673 (TRBV6-3, TRBJ2-1)
CASSGSYNEQFF

SEQ ID NO: 151347 - protein, 10 aa, Homo sapiens
  CDR3 for alpha chain variable domain of TCR clone 75674 (TRAV12-3, TRAJ49)
CAMNDDQFYF

SEQ ID NO: 151348 - protein, 15 aa, Homo sapiens
  CDR3 for beta chain variable domain of TCR clone 75674 (TRBV9, TRBJ2-1)
CASSLAGSSYNEQFF

SEQ ID NO: 151349 - protein, 14 aa, Homo sapiens
  CDR3 for alpha chain variable domain of TCR clone 75675 (TRAV22, TRAJ6)
CAGVGPGGSYIPTF

SEQ ID NO: 151350 - protein, 16 aa, Homo sapiens
  CDR3 for beta chain variable domain of TCR clone 75675 (TRBV12-4, TRBJ1-5)
CASSRPVGGSNQPQHF

SEQ ID NO: 151351 - protein, 16 aa, Homo sapiens
  CDR3 for alpha chain variable domain of TCR clone 75676 (TRAV30, TRAJ24)
CGTEIVDADSWGKFQF

SEQ ID NO: 151352 - protein, 15 aa, Homo sapiens
  CDR3 for beta chain variable domain of TCR clone 75676 (TRBV7-9, TRBJ1-4)
YASSARTGGNEKLFF

SEQ ID NO: 151353 - protein, 13 aa, Homo sapiens
  CDR3 for alpha chain variable domain of TCR clone 75677 (TRAV12-3, TRAJ7)
CAMTPCGNNRLAF

SEQ ID NO: 151354 - protein, 16 aa, Homo sapiens
  CDR3 for beta chain variable domain of TCR clone 75677 (TRBV7-3, TRBJ2-1)
CASSLEGYRSYNEQFF

SEQ ID NO: 151355 - protein, 19 aa, Homo sapiens
  CDR3 for alpha chain variable domain of TCR clone 75678 (TRAV25, TRAJ20)
TATQTTDVGILPHDYKLSF

SEQ ID NO: 151356 - protein, 15 aa, Homo sapiens
  CDR3 for beta chain variable domain of TCR clone 75678 (TRBV7-2, TRBJ2-1)
CASSFQADEYNEQFF

SEQ ID NO: 151357 - protein, 10 aa, Homo sapiens
  CDR3 for alpha chain variable domain of TCR clone 75679 (TRAV36/DV7, TRAJ49)
CALNGNQFYF

SEQ ID NO: 151358 - protein, 14 aa, Homo sapiens
  CDR3 for beta chain variable domain of TCR clone 75679 (TRBV4-2, TRBJ2-5)
CASSQDRGRETQYF

SEQ ID NO: 151359 - protein, 14 aa, Homo sapiens
  CDR3 for alpha chain variable domain of TCR clone 75680 (TRAV13-1, TRAJ35)
CAASKGGFGNVLHC

SEQ ID NO: 151360 - protein, 13 aa, Homo sapiens
  CDR3 for beta chain variable domain of TCR clone 75680 (TRBV7-3, TRBJ1-1)
CASSQDWGAEAVF

SEQ ID NO: 151361 - protein, 10 aa, Homo sapiens
  CDR3 for alpha chain variable domain of TCR clone 75681 (TRAV21, TRAJ31)
CAVDNARLMF

SEQ ID NO: 151362 - protein, 20 aa, Homo sapiens
  CDR3 for beta chain variable domain of TCR clone 75681 (TRBV28, TRBJ2-1)
CASTPIGRSPGLAGGNEQFF

SEQ ID NO: 151363 - protein, 13 aa, Homo sapiens
  CDR3 for alpha chain variable domain of TCR clone 75682 (TRAV13-2, TRAJ48)
CAEMAFGNEKLTF

SEQ ID NO: 151364 - protein, 15 aa, Homo sapiens
  CDR3 for beta chain variable domain of TCR clone 75682 (TRBV7-9, TRBJ1-6)
CASSSPGRGNSPLHF

SEQ ID NO: 151365 - protein, 14 aa, Homo sapiens
  CDR3 for alpha chain variable domain of TCR clone 75683 (TRAV26-1, TRAJ38)
CIADNAGNNRKLIW

SEQ ID NO: 151366 - protein, 13 aa, Homo sapiens
  CDR3 for beta chain variable domain of TCR clone 75683 (TRBV11-2, TRBJ2-7)
CASSFQGVYEQYF

SEQ ID NO: 151367 - protein, 14 aa, Homo sapiens
  CDR3 for alpha chain variable domain of TCR clone 75684 (TRAV14/DV4, TRAJ42)
CPRGSLRSQGNLIF

SEQ ID NO: 151368 - protein, 13 aa, Homo sapiens
  CDR3 for beta chain variable domain of TCR clone 75684 (TRBV4-2, TRBJ1-1)
CASSQAGNTEAFS

SEQ ID NO: 151369 - protein, 15 aa, Homo sapiens
  CDR3 for alpha chain variable domain of TCR clone 75685 (TRAV3, TRAJ17)
CAVRDTGAAGNKLTF

SEQ ID NO: 151370 - protein, 15 aa, Homo sapiens
  CDR3 for beta chain variable domain of TCR clone 75685 (TRBV11-2, TRBJ2-2)
CASRGLAANTGELFF

SEQ ID NO: 151371 - protein, 12 aa, Homo sapiens
  CDR3 for alpha chain variable domain of TCR clone 75686 (TRAV12-1, TRAJ34)
CVVAGATDKLIF

SEQ ID NO: 151372 - protein, 12 aa, Homo sapiens
  CDR3 for beta chain variable domain of TCR clone 75686 (TRBV7-9, TRBJ1-1)
CASSFVRGEAFF

SEQ ID NO: 151373 - protein, 14 aa, Homo sapiens
  CDR3 for alpha chain variable domain of TCR clone 75687 (TRAV13-2, TRAJ17)
CAENSKAAGNKLTF

SEQ ID NO: 151374 - protein, 16 aa, Homo sapiens
  CDR3 for beta chain variable domain of TCR clone 75687 (TRBV12-4, TRBJ1-5)
CASSRPVGGSNQPQHS

SEQ ID NO: 151375 - protein, 12 aa, Homo sapiens
  CDR3 for alpha chain variable domain of TCR clone 75688 (TRAV29/DV5, TRAJ15)
CASNQAGTALLF

SEQ ID NO: 151376 - protein, 15 aa, Homo sapiens
  CDR3 for beta chain variable domain of TCR clone 75688 (TRBV11-2, TRBJ2-2)
CASSSDRVNAGELFF

SEQ ID NO: 151377 - protein, 13 aa, Homo sapiens
  CDR3 for alpha chain variable domain of TCR clone 75689 (TRAV12-3, TRAJ33)
CAMSVNSNYQLIW

SEQ ID NO: 151378 - protein, 13 aa, Homo sapiens
  CDR3 for beta chain variable domain of TCR clone 75689 (TRBV7-2, TRBJ2-2)
CASSSAVTGELFS

SEQ ID NO: 151379 - protein, 12 aa, Homo sapiens
  CDR3 for alpha chain variable domain of TCR clone 75690 (TRAV35, TRAJ53)
CAGLGSNYKLTF

SEQ ID NO: 151380 - protein, 15 aa, Homo sapiens
  CDR3 for beta chain variable domain of TCR clone 75690 (TRBV13, TRBJ2-5)
CASSLRPGRGETQYL

SEQ ID NO: 151381 - protein, 15 aa, Homo sapiens
  CDR3 for alpha chain variable domain of TCR clone 75691 (TRAV26-1, TRAJ29)
CIVRVEGSGNTPLVF

SEQ ID NO: 151382 - protein, 14 aa, Homo sapiens
  CDR3 for beta chain variable domain of TCR clone 75691 (TRBV25-1, TRBJ1-1)
CASTHLGGNTEAYF

SEQ ID NO: 151383 - protein, 11 aa, Homo sapiens
  CDR3 for alpha chain variable domain of TCR clone 75692 (TRAV8-4, TRAJ34)
CAVSWTDELIF

SEQ ID NO: 151384 - protein, 16 aa, Homo sapiens
  CDR3 for beta chain variable domain of TCR clone 75692 (TRBV11-2, TRBJ2-7)
CASSPLAGGPRYEQYF

SEQ ID NO: 151385 - protein, 12 aa, Homo sapiens
  CDR3 for alpha chain variable domain of TCR clone 75693 (TRAV3, TRAJ20)
CSVRDHDYKLSF

SEQ ID NO: 151386 - protein, 13 aa, Homo sapiens
  CDR3 for beta chain variable domain of TCR clone 75693 (TRBV9, TRBJ2-7)
CASSVGQGGEQYF

SEQ ID NO: 151387 - protein, 14 aa, Homo sapiens
  CDR3 for alpha chain variable domain of TCR clone 75694 (TRAV1-2, TRAJ16)
CAINRFSDGQKLLF

SEQ ID NO: 151388 - protein, 13 aa, Homo sapiens
  CDR3 for beta chain variable domain of TCR clone 75694 (TRBV19, TRBJ2-7)
CASSTSGSYEQYF

SEQ ID NO: 151389 - protein, 13 aa, Homo sapiens
  CDR3 for alpha chain variable domain of TCR clone 75695 (TRAV36/DV7, TRAJ53)
CALSGGSNHKLTF

SEQ ID NO: 151390 - protein, 13 aa, Homo sapiens
  CDR3 for beta chain variable domain of TCR clone 75695 (TRBV28, TRBJ2-4)
CASSQSSKNIQYF

SEQ ID NO: 151391 - protein, 12 aa, Homo sapiens
  CDR3 for alpha chain variable domain of TCR clone 75696 (TRAV12-1, TRAJ23)
CVVNIPGGKLIF

SEQ ID NO: 151392 - protein, 15 aa, Homo sapiens
  CDR3 for beta chain variable domain of TCR clone 75696 (TRBV6-3, TRBJ2-7)
CASSSPGAVFYEQYF

SEQ ID NO: 151393 - protein, 14 aa, Homo sapiens
  CDR3 for alpha chain variable domain of TCR clone 75697 (TRAV13-1, TRAJ40)
CAASMTSGTYKYIF

SEQ ID NO: 151394 - protein, 15 aa, Homo sapiens
  CDR3 for beta chain variable domain of TCR clone 75697 (TRBV7-3, TRBJ2-1)
CASSPTGGGEVEKFF

SEQ ID NO: 151395 - protein, 16 aa, Homo sapiens
  CDR3 for alpha chain variable domain of TCR clone 75698 (TRAV8-1, TRAJ48)
CAVTLISNFGNEKLTF

SEQ ID NO: 151396 - protein, 12 aa, Homo sapiens
  CDR3 for beta chain variable domain of TCR clone 75698 (TRBV20-1, TRBJ1-2)
CSAPGSNYGYTF

SEQ ID NO: 151397 - protein, 14 aa, Homo sapiens
  CDR3 for alpha chain variable domain of TCR clone 75699 (TRAV3, TRAJ28)
CAVRRGAGSYQLTF

SEQ ID NO: 151398 - protein, 13 aa, Homo sapiens
  CDR3 for beta chain variable domain of TCR clone 75699 (TRBV10-3, TRBJ2-7)
CASKLAVNYEQYF

SEQ ID NO: 151399 - protein, 17 aa, Homo sapiens
  CDR3 for alpha chain variable domain of TCR clone 75700 (TRAV23/DV6, TRAJ3)
CSNHFCFGWSSASKLIF

SEQ ID NO: 151400 - protein, 15 aa, Homo sapiens
  CDR3 for beta chain variable domain of TCR clone 75700 (TRBV19, TRBJ1-6)
CASSTQGAVGSPLHF

SEQ ID NO: 151401 - protein, 13 aa, Homo sapiens
  CDR3 for alpha chain variable domain of TCR clone 75701 (TRAV12-1, TRAJ13)
CVVTSGGYQKVTF

SEQ ID NO: 151402 - protein, 14 aa, Homo sapiens
  CDR3 for beta chain variable domain of TCR clone 75701 (TRBV27, TRBJ2-7)
CASSLAGLSYEKYF

SEQ ID NO: 151403 - protein, 14 aa, Homo sapiens
  CDR3 for alpha chain variable domain of TCR clone 75702 (TRAV17, TRAJ57)
CATDPQGGSEKLVF

SEQ ID NO: 151404 - protein, 14 aa, Homo sapiens
  CDR3 for beta chain variable domain of TCR clone 75702 (TRBV20-1, TRBJ1-1)
CSAQTRIGGTEAFF

SEQ ID NO: 151405 - protein, 15 aa, Homo sapiens
  CDR3 for alpha chain variable domain of TCR clone 75703 (TRAV27, TRAJ45)
CAVRYSGGGADGLTF

SEQ ID NO: 151406 - protein, 14 aa, Homo sapiens
  CDR3 for beta chain variable domain of TCR clone 75703 (TRBV19, TRBJ2-1)
CASPTFVLSGEQFF

SEQ ID NO: 151407 - protein, 16 aa, Homo sapiens
  CDR3 for alpha chain variable domain of TCR clone 75704 (TRAV21, TRAJ37)
CAVRTAGSSNTGKLIF

SEQ ID NO: 151408 - protein, 16 aa, Homo sapiens
  CDR3 for beta chain variable domain of TCR clone 75704 (TRBV7-9, TRBJ1-2)
CASSLGFSSGEDGYTL

SEQ ID NO: 151409 - protein, 13 aa, Homo sapiens
  CDR3 for alpha chain variable domain of TCR clone 75705 (TRAV3, TRAJ27)
CAVRPLGAGNSTF

SEQ ID NO: 151410 - protein, 15 aa, Homo sapiens
  CDR3 for beta chain variable domain of TCR clone 75705 (TRBV20-1, TRBJ2-7)
CSARDRVSGMDEQYF

SEQ ID NO: 151411 - protein, 14 aa, Homo sapiens
  CDR3 for alpha chain variable domain of TCR clone 75706 (TRAV12-3, TRAJ10)
SHLPLTGGGKKLTF

SEQ ID NO: 151412 - protein, 13 aa, Homo sapiens
  CDR3 for beta chain variable domain of TCR clone 75706 (TRBV7-7, TRBJ2-5)
CASSRSGQETQYF

SEQ ID NO: 151413 - protein, 13 aa, Homo sapiens
  CDR3 for alpha chain variable domain of TCR clone 75707 (TRAV3, TRAJ33)
CSVRDRSNYQLIW

SEQ ID NO: 151414 - protein, 16 aa, Homo sapiens
  CDR3 for beta chain variable domain of TCR clone 75707 (TRBV4-2, TRBJ2-7)
CASSQDRGTSSYEQYF

SEQ ID NO: 151415 - protein, 13 aa, Homo sapiens
  CDR3 for alpha chain variable domain of TCR clone 75708 (TRAV12-3, TRAJ9)
CAMRNTGGFRTIF

SEQ ID NO: 151416 - protein, 16 aa, Homo sapiens
  CDR3 for beta chain variable domain of TCR clone 75708 (TRBV19, TRBJ2-1)
CASSIDGSFAYNEQFF

SEQ ID NO: 151417 - protein, 14 aa, Homo sapiens
  CDR3 for alpha chain variable domain of TCR clone 75709 (TRAV23/DV6, TRAJ8)
CAARKATGFQKLVF

SEQ ID NO: 151418 - protein, 15 aa, Homo sapiens
  CDR3 for beta chain variable domain of TCR clone 75709 (TRBV28, TRBJ2-3)
CASSPDRQGANTQYF

SEQ ID NO: 151419 - protein, 16 aa, Homo sapiens
  CDR3 for alpha chain variable domain of TCR clone 75710 (TRAV30, TRAJ48)
CGTEIKSNFGNEKLTF

SEQ ID NO: 151420 - protein, 17 aa, Homo sapiens
  CDR3 for beta chain variable domain of TCR clone 75710 (TRBV27, TRBJ2-1)
CASSSERGGQSADGQFF

SEQ ID NO: 151421 - protein, 14 aa, Homo sapiens
  CDR3 for alpha chain variable domain of TCR clone 75711 (TRAV13-1, TRAJ9)
CAASALTGGFKAIF

SEQ ID NO: 151422 - protein, 13 aa, Homo sapiens
  CDR3 for beta chain variable domain of TCR clone 75711 (TRBV20-1, TRBJ1-1)
CSAGTVGNTEAFF

SEQ ID NO: 151423 - protein, 10 aa, Homo sapiens
  CDR3 for alpha chain variable domain of TCR clone 75712 (TRAV30, TRAJ48)
CGIGNEKLTF

SEQ ID NO: 151424 - protein, 14 aa, Homo sapiens
  CDR3 for beta chain variable domain of TCR clone 75712 (TRBV7-6, TRBJ2-3)
CVSSVAGGTDTQYF

SEQ ID NO: 151425 - protein, 11 aa, Homo sapiens
  CDR3 for alpha chain variable domain of TCR clone 75713 (TRAV21, TRAJ11)
CAVNGYSTLTF

SEQ ID NO: 151426 - protein, 11 aa, Homo sapiens
  CDR3 for beta chain variable domain of TCR clone 75713 (TRBV19, TRBJ1-1)
CASSIGSEAFC

SEQ ID NO: 151427 - protein, 14 aa, Homo sapiens
  CDR3 for alpha chain variable domain of TCR clone 75714 (TRAV1-2, TRAJ16)
CAVNRFSDGQKLLF

SEQ ID NO: 151428 - protein, 13 aa, Homo sapiens
  CDR3 for beta chain variable domain of TCR clone 75714 (TRBV4-1, TRBJ2-1)
CASRQAGGDEQFF

SEQ ID NO: 151429 - protein, 14 aa, Homo sapiens
  CDR3 for alpha chain variable domain of TCR clone 75715 (TRAV1-2, TRAJ16)
CVVNRFSDGRKLLF

SEQ ID NO: 151430 - protein, 15 aa, Homo sapiens
  CDR3 for beta chain variable domain of TCR clone 75715 (TRBV9, TRBJ1-6)
CASSVAGTGDSPLHF

SEQ ID NO: 151431 - protein, 14 aa, Homo sapiens
  CDR3 for alpha chain variable domain of TCR clone 75716 (TRAV4, TRAJ6)
CLVGEAGGSYIPTF

SEQ ID NO: 151432 - protein, 16 aa, Homo sapiens
  CDR3 for beta chain variable domain of TCR clone 75716 (TRBV7-7, TRBJ2-1)
CASSLNEGPSYNEQFF

SEQ ID NO: 151433 - protein, 18 aa, Homo sapiens
  CDR3 for alpha chain variable domain of TCR clone 75717 (TRAV21, TRAJ52)
CAVRPSPAGGTSYGKLTF

SEQ ID NO: 151434 - protein, 17 aa, Homo sapiens
  CDR3 for beta chain variable domain of TCR clone 75717 (TRBV5-5, TRBJ1-2)
CASSLGSLDGQSEGYTF

SEQ ID NO: 151435 - protein, 14 aa, Homo sapiens
  CDR3 for alpha chain variable domain of TCR clone 75718 (TRAV38-1, TRAJ29)
CAFITPSGNTPLVF

SEQ ID NO: 151436 - protein, 14 aa, Homo sapiens
  CDR3 for beta chain variable domain of TCR clone 75718 (TRBV18, TRBJ2-7)
FASSPRGGAYEQYF

SEQ ID NO: 151437 - protein, 13 aa, Homo sapiens
  CDR3 for alpha chain variable domain of TCR clone 75719 (TRAV22, TRAJ29)
CAVGGSGNTPLVF

SEQ ID NO: 151438 - protein, 13 aa, Homo sapiens
  CDR3 for beta chain variable domain of TCR clone 75719 (TRBV4-2, TRBJ1-1)
CASSQAGNTEAFV

SEQ ID NO: 151439 - protein, 11 aa, Homo sapiens
  CDR3 for alpha chain variable domain of TCR clone 75720 (TRAV12-1, TRAJ30)
CVVNGQDKIIF

SEQ ID NO: 151440 - protein, 12 aa, Homo sapiens
  CDR3 for beta chain variable domain of TCR clone 75720 (TRBV27, TRBJ2-2)
CASELFTGELFF

SEQ ID NO: 151441 - protein, 12 aa, Homo sapiens
  CDR3 for alpha chain variable domain of TCR clone 75721 (TRAV20, TRAJ33)
CAVRGSNYQVIW

SEQ ID NO: 151442 - protein, 15 aa, Homo sapiens
  CDR3 for beta chain variable domain of TCR clone 75721 (TRBV11-3, TRBJ2-3)
CASLKDGREGDTQYF

SEQ ID NO: 151443 - protein, 14 aa, Homo sapiens
  CDR3 for alpha chain variable domain of TCR clone 75722 (TRAV3, TRAJ8)
CAVSLNTGFQKLVF

SEQ ID NO: 151444 - protein, 15 aa, Homo sapiens
  CDR3 for beta chain variable domain of TCR clone 75722 (TRBV19, TRBJ2-1)
CASSIVRGEGREQFF

SEQ ID NO: 151445 - protein, 17 aa, Homo sapiens
  CDR3 for alpha chain variable domain of TCR clone 75723 (TRAV3, TRAJ6)
CAVRDGPRAGGSYIPTF

SEQ ID NO: 151446 - protein, 20 aa, Homo sapiens
  CDR3 for beta chain variable domain of TCR clone 75723 (TRBV28, TRBJ2-1)
CASSPIGRSPGLAGGNEQFF

SEQ ID NO: 151447 - protein, 17 aa, Homo sapiens
  CDR3 for alpha chain variable domain of TCR clone 75724 (TRAV3, TRAJ6)
CAVRDGPRAGGSYIPTF

SEQ ID NO: 151448 - protein, 12 aa, Homo sapiens
  CDR3 for beta chain variable domain of TCR clone 75724 (TRBV12-5, TRBJ2-5)
CASGQGVETQYF

SEQ ID NO: 151449 - protein, 17 aa, Homo sapiens
  CDR3 for alpha chain variable domain of TCR clone 75725 (TRAV26-1, TRAJ37)
CIVGVITVSSNTGKLIF

SEQ ID NO: 151450 - protein, 14 aa, Homo sapiens
  CDR3 for beta chain variable domain of TCR clone 75725 (TRBV19, TRBJ2-1)
CASPTFVLSGEQFF

SEQ ID NO: 151451 - protein, 16 aa, Homo sapiens
  CDR3 for alpha chain variable domain of TCR clone 75726 (TRAV3, TRAJ37)
CAVRPHGSGNTGKLIF

SEQ ID NO: 151452 - protein, 14 aa, Homo sapiens
  CDR3 for beta chain variable domain of TCR clone 75726 (TRBV5-4, TRBJ1-1)
CASSLDSRRDEAFF

SEQ ID NO: 151453 - protein, 13 aa, Homo sapiens
  CDR3 for alpha chain variable domain of TCR clone 75727 (TRAV16, TRAJ29)
CALSRRGNTPLVL

SEQ ID NO: 151454 - protein, 15 aa, Homo sapiens
  CDR3 for beta chain variable domain of TCR clone 75727 (TRBV4-1, TRBJ2-3)
CASSRGQGIPDTQYF

SEQ ID NO: 151455 - protein, 14 aa, Homo sapiens
  CDR3 for alpha chain variable domain of TCR clone 75728 (TRAV1-2, TRAJ16)
CAVNRFSDGQKLLF

SEQ ID NO: 151456 - protein, 15 aa, Homo sapiens
  CDR3 for beta chain variable domain of TCR clone 75728 (TRBV3-1, TRBJ2-5)
CASSANLGGPEAQYF

SEQ ID NO: 151457 - protein, 12 aa, Homo sapiens
  CDR3 for alpha chain variable domain of TCR clone 75729 (TRAV12-2, TRAJ10)
WGVTGGGNKLTF

SEQ ID NO: 151458 - protein, 14 aa, Homo sapiens
  CDR3 for beta chain variable domain of TCR clone 75729 (TRBV27, TRBJ2-7)
CASATGTERREKYF

SEQ ID NO: 151459 - protein, 11 aa, Homo sapiens
  CDR3 for alpha chain variable domain of TCR clone 75730 (TRAV2, TRAJ13)
CASGGYQKVTF

SEQ ID NO: 151460 - protein, 12 aa, Homo sapiens
  CDR3 for beta chain variable domain of TCR clone 75730 (TRBV12-5, TRBJ2-5)
CASGQGVETQYF

SEQ ID NO: 151461 - protein, 16 aa, Homo sapiens
  CDR3 for alpha chain variable domain of TCR clone 75731 (TRAV30, TRAJ24)
CGKEIVDADSWGKFQF

SEQ ID NO: 151462 - protein, 15 aa, Homo sapiens
  CDR3 for beta chain variable domain of TCR clone 75731 (TRBV20-1, TRBJ2-7)
CSARDRVSGMDEQYF

SEQ ID NO: 151463 - protein, 12 aa, Homo sapiens
  CDR3 for alpha chain variable domain of TCR clone 75732 (TRAV30, TRAJ43)
CGTEERGNDMRF

SEQ ID NO: 151464 - protein, 13 aa, Homo sapiens
  CDR3 for beta chain variable domain of TCR clone 75732 (TRBV27, TRBJ2-7)
CASSFSPGYEQYF

SEQ ID NO: 151465 - protein, 15 aa, Homo sapiens
  CDR3 for alpha chain variable domain of TCR clone 75733 (TRAV3, TRAJ3)
CAVRDRDSSASMIIF

SEQ ID NO: 151466 - protein, 18 aa, Homo sapiens
  CDR3 for beta chain variable domain of TCR clone 75733 (TRBV25-1, TRBJ1-2)
CASSGLQNGQGLIFGYTF

SEQ ID NO: 151467 - protein, 14 aa, Homo sapiens
  CDR3 for alpha chain variable domain of TCR clone 75734 (TRAV13-1, TRAJ23)
CAASRLGRGGKLIS

SEQ ID NO: 151468 - protein, 15 aa, Homo sapiens
  CDR3 for beta chain variable domain of TCR clone 75734 (TRBV7-2, TRBJ2-1)
CASSLVAGRYNEQFF

SEQ ID NO: 151469 - protein, 15 aa, Homo sapiens
  CDR3 for alpha chain variable domain of TCR clone 75735 (TRAV12-1, TRAJ9)
CVVSFGDTGGFKTIF

SEQ ID NO: 151470 - protein, 15 aa, Homo sapiens
  CDR3 for beta chain variable domain of TCR clone 75735 (TRBV27, TRBJ2-1)
CASSDGGGSSNEQFF

SEQ ID NO: 151471 - protein, 14 aa, Homo sapiens
  CDR3 for alpha chain variable domain of TCR clone 75736 (TRAV12-2, TRAJ13)
CAAKKTGGYQKVTF

SEQ ID NO: 151472 - protein, 12 aa, Homo sapiens
  CDR3 for beta chain variable domain of TCR clone 75736 (TRBV12-4, TRBJ1-2)
CASSFIWLHLRF

SEQ ID NO: 151473 - protein, 15 aa, Homo sapiens
  CDR3 for alpha chain variable domain of TCR clone 75737 (TRAV12-2, TRAJ53)
CAVNGGGGSNYKLTF

SEQ ID NO: 151474 - protein, 14 aa, Homo sapiens
  CDR3 for beta chain variable domain of TCR clone 75737 (TRBV19, TRBJ2-2)
CASSTLHRSGKLFF

SEQ ID NO: 151475 - protein, 14 aa, Homo sapiens
  CDR3 for alpha chain variable domain of TCR clone 75738 (TRAV1-2, TRAJ16)
CAVNRFSDGQKLLF

SEQ ID NO: 151476 - protein, 18 aa, Homo sapiens
  CDR3 for beta chain variable domain of TCR clone 75738 (TRBV7-3, TRBJ2-3)
CASSSTGTYPGSTDTQYF

SEQ ID NO: 151477 - protein, 14 aa, Homo sapiens
  CDR3 for alpha chain variable domain of TCR clone 75739 (TRAV1-2, TRAJ16)
CAVNRFSDGQKLLF

SEQ ID NO: 151478 - protein, 16 aa, Homo sapiens
  CDR3 for beta chain variable domain of TCR clone 75739 (TRBV12-5, TRBJ2-5)
CASGSRTSGNQETQYF

SEQ ID NO: 151479 - protein, 14 aa, Homo sapiens
  CDR3 for alpha chain variable domain of TCR clone 75740 (TRAV8-6, TRAJ53)
CAVTSGGSNYKLTF

SEQ ID NO: 151480 - protein, 11 aa, Homo sapiens
  CDR3 for beta chain variable domain of TCR clone 75740 (TRBV29-1, TRBJ2-5)
CSEDRTGTQYF

SEQ ID NO: 151481 - protein, 15 aa, Homo sapiens
  CDR3 for alpha chain variable domain of TCR clone 75741 (TRAV3, TRAJ5)
CAVRDRKTGRRALTF

SEQ ID NO: 151482 - protein, 15 aa, Homo sapiens
  CDR3 for beta chain variable domain of TCR clone 75741 (TRBV7-8, TRBJ2-1)
CASSLADSLYNEQFS

SEQ ID NO: 151483 - protein, 12 aa, Homo sapiens
  CDR3 for alpha chain variable domain of TCR clone 75742 (TRAV27, TRAJ9)
CAGESGGFKTIF

SEQ ID NO: 151484 - protein, 18 aa, Homo sapiens
  CDR3 for beta chain variable domain of TCR clone 75742 (TRBV10-2, TRBJ2-2)
CISVPAVHRQADAGELFF

SEQ ID NO: 151485 - protein, 11 aa, Homo sapiens
  CDR3 for alpha chain variable domain of TCR clone 75743 (TRAV17, TRAJ9)
CGFTGGFKTIF

SEQ ID NO: 151486 - protein, 13 aa, Homo sapiens
  CDR3 for beta chain variable domain of TCR clone 75743 (TRBV7-3, TRBJ1-1)
CASSQDWGAEAFF

SEQ ID NO: 151487 - protein, 14 aa, Homo sapiens
  CDR3 for alpha chain variable domain of TCR clone 75744 (TRAV12-2, TRAJ40)
CAVKVPSGTYKYIF

SEQ ID NO: 151488 - protein, 15 aa, Homo sapiens
  CDR3 for beta chain variable domain of TCR clone 75744 (TRBV7-9, TRBJ2-1)
CASSLGWGRANEQFF

SEQ ID NO: 151489 - protein, 12 aa, Homo sapiens
  CDR3 for alpha chain variable domain of TCR clone 75745 (TRAV9-2, TRAJ36)
CALKKEANNLFF

SEQ ID NO: 151490 - protein, 13 aa, Homo sapiens
  CDR3 for beta chain variable domain of TCR clone 75745 (TRBV27, TRBJ1-1)
CASSLSIGAEAFF

SEQ ID NO: 151491 - protein, 13 aa, Homo sapiens
  CDR3 for alpha chain variable domain of TCR clone 75746 (TRAV2, TRAJ40)
CAVVTSGTCKYIF

SEQ ID NO: 151492 - protein, 14 aa, Homo sapiens
  CDR3 for beta chain variable domain of TCR clone 75746 (TRBV19, TRBJ2-3)
CASSAPRGTDTQCF

SEQ ID NO: 151493 - protein, 13 aa, Homo sapiens
  CDR3 for alpha chain variable domain of TCR clone 75747 (TRAV13-2, TRAJ48)
CAEMDFGNEKLTF

SEQ ID NO: 151494 - protein, 15 aa, Homo sapiens
  CDR3 for beta chain variable domain of TCR clone 75747 (TRBV6-1, TRBJ2-2)
CASSRLRGDTGELFF

SEQ ID NO: 151495 - protein, 14 aa, Homo sapiens
  CDR3 for alpha chain variable domain of TCR clone 75748 (TRAV26-1, TRAJ45)
CIEVTGGGADGLTF

SEQ ID NO: 151496 - protein, 11 aa, Homo sapiens
  CDR3 for beta chain variable domain of TCR clone 75748 (TRBV11-2, TRBJ2-2)
CASSLPGELFF

SEQ ID NO: 151497 - protein, 16 aa, Homo sapiens
  CDR3 for alpha chain variable domain of TCR clone 75749 (TRAV23/DV6, TRAJ48)
CAASGVVNFGTEKLTF

SEQ ID NO: 151498 - protein, 15 aa, Homo sapiens
  CDR3 for beta chain variable domain of TCR clone 75749 (TRBV20-1, TRBJ2-5)
CSAGLAGVSQETQYF

SEQ ID NO: 151499 - protein, 13 aa, Homo sapiens
  CDR3 for alpha chain variable domain of TCR clone 75750 (TRAV2, TRAJ40)
CAVVTSGTYKYIF

SEQ ID NO: 151500 - protein, 14 aa, Homo sapiens
  CDR3 for beta chain variable domain of TCR clone 75750 (TRBV19, TRBJ2-1)
CASPPFVLSGEQFF

SEQ ID NO: 151501 - protein, 11 aa, Homo sapiens
  CDR3 for alpha chain variable domain of TCR clone 75751 (TRAV1-1, TRAJ23)
CAVRQGGKLIF

SEQ ID NO: 151502 - protein, 13 aa, Homo sapiens
  CDR3 for beta chain variable domain of TCR clone 75751 (TRBV7-3, TRBJ1-1)
CASSQDWGAEAFF

SEQ ID NO: 151503 - protein, 14 aa, Homo sapiens
  CDR3 for alpha chain variable domain of TCR clone 75752 (TRAV1-2, TRAJ8)
CAVREDTGLQKLVF

SEQ ID NO: 151504 - protein, 12 aa, Homo sapiens
  CDR3 for beta chain variable domain of TCR clone 75752 (TRBV11-2, TRBJ2-2)
CASSLPTGELFF

SEQ ID NO: 151505 - protein, 14 aa, Homo sapiens
  CDR3 for alpha chain variable domain of TCR clone 75753 (TRAV12-3, TRAJ22)
CAMSSFGSARLLTF

SEQ ID NO: 151506 - protein, 11 aa, Homo sapiens
  CDR3 for beta chain variable domain of TCR clone 75753 (TRBV12-4, TRBJ2-2)
CASSSAGELFF

SEQ ID NO: 151507 - protein, 12 aa, Homo sapiens
  CDR3 for alpha chain variable domain of TCR clone 75754 (TRAV27, TRAJ35)
CAGADCGNVLHC

SEQ ID NO: 151508 - protein, 16 aa, Homo sapiens
  CDR3 for beta chain variable domain of TCR clone 75754 (TRBV6-1, TRBJ2-1)
CASILRQGSSYNEQFF

SEQ ID NO: 151509 - protein, 16 aa, Homo sapiens
  CDR3 for alpha chain variable domain of TCR clone 75755 (TRAV26-1, TRAJ37)
CIVRGDGSGNTGKLIF

SEQ ID NO: 151510 - protein, 17 aa, Homo sapiens
  CDR3 for beta chain variable domain of TCR clone 75755 (TRBV4-1, TRBJ2-7)
CASSGDPLGVRGGEQYF

SEQ ID NO: 151511 - protein, 10 aa, Homo sapiens
  CDR3 for alpha chain variable domain of TCR clone 75756 (TRAV13-1, TRAJ27)
CAPLARQINL

SEQ ID NO: 151512 - protein, 13 aa, Homo sapiens
  CDR3 for beta chain variable domain of TCR clone 75756 (TRBV28, TRBJ1-1)
CASSKQGWTEALF

SEQ ID NO: 151513 - protein, 14 aa, Homo sapiens
  CDR3 for alpha chain variable domain of TCR clone 75757 (TRAV12-2, TRAJ17)
CAVLFKAGGNKLTF

SEQ ID NO: 151514 - protein, 17 aa, Homo sapiens
  CDR3 for beta chain variable domain of TCR clone 75757 (TRBV20-1, TRBJ2-2)
CSASGSGQGGLTGELFF

SEQ ID NO: 151515 - protein, 14 aa, Homo sapiens
  CDR3 for alpha chain variable domain of TCR clone 75758 (TRAV17, TRAJ49)
CATDARDTGNQFYF

SEQ ID NO: 151516 - protein, 14 aa, Homo sapiens
  CDR3 for beta chain variable domain of TCR clone 75758 (TRBV5-5, TRBJ1-2)
CASSFGQINYGYSF

SEQ ID NO: 151517 - protein, 15 aa, Homo sapiens
  CDR3 for alpha chain variable domain of TCR clone 75759 (TRAV3, TRAJ9)
CAVRARNTGGFKTIF

SEQ ID NO: 151518 - protein, 16 aa, Homo sapiens
  CDR3 for beta chain variable domain of TCR clone 75759 (TRBV9, TRBJ2-1)
CASSVGGGGNYNEQFF

SEQ ID NO: 151519 - protein, 14 aa, Homo sapiens
  CDR3 for alpha chain variable domain of TCR clone 75760 (TRAV26-1, TRAJ39)
CIVRGSRAGNMLTF

SEQ ID NO: 151520 - protein, 13 aa, Homo sapiens
  CDR3 for beta chain variable domain of TCR clone 75760 (TRBV10-3, TRBJ2-1)
CAISEFSGREQFF

SEQ ID NO: 151521 - protein, 11 aa, Homo sapiens
  CDR3 for alpha chain variable domain of TCR clone 75761 (TRAV1-2, TRAJ40)
CAVPGTYKYIF

SEQ ID NO: 151522 - protein, 16 aa, Homo sapiens
  CDR3 for beta chain variable domain of TCR clone 75761 (TRBV7-3, TRBJ2-2)
CASSLKRETLSGELFF

SEQ ID NO: 151523 - protein, 14 aa, Homo sapiens
  CDR3 for alpha chain variable domain of TCR clone 75762 (TRAV1-2, TRAJ16)
CAVNRFSDGQTLLF

SEQ ID NO: 151524 - protein, 14 aa, Homo sapiens
  CDR3 for beta chain variable domain of TCR clone 75762 (TRBV7-9, TRBJ2-3)
CASSLEDGTDTQYF

SEQ ID NO: 151525 - protein, 15 aa, Homo sapiens
  CDR3 for alpha chain variable domain of TCR clone 75763 (TRAV8-1, TRAJ8)
CAVNAMNTGFQKLVF

SEQ ID NO: 151526 - protein, 13 aa, Homo sapiens
  CDR3 for beta chain variable domain of TCR clone 75763 (TRBV27, TRBJ1-4)
CASSLMGDEKLFF

SEQ ID NO: 151527 - protein, 11 aa, Homo sapiens
  CDR3 for alpha chain variable domain of TCR clone 75764 (TRAV12-2, TRAJ31)
CAILNNARLMF

SEQ ID NO: 151528 - protein, 16 aa, Homo sapiens
  CDR3 for beta chain variable domain of TCR clone 75764 (TRBV13, TRBJ2-2)
CASSPRTGEHTGKLFF

SEQ ID NO: 151529 - protein, 13 aa, Homo sapiens
  CDR3 for alpha chain variable domain of TCR clone 75765 (TRAV12-1, TRAJ43)
CVVSHHNNNDMRF

SEQ ID NO: 151530 - protein, 14 aa, Homo sapiens
  CDR3 for beta chain variable domain of TCR clone 75765 (TRBV5-5, TRBJ2-2)
CASSLLGDTGGLFF

SEQ ID NO: 151531 - protein, 12 aa, Homo sapiens
  CDR3 for alpha chain variable domain of TCR clone 75766 (TRAV12-2, TRAJ10)
WGVTGGGNKLTF

SEQ ID NO: 151532 - protein, 15 aa, Homo sapiens
  CDR3 for beta chain variable domain of TCR clone 75766 (TRBV20-1, TRBJ2-7)
CSARDRVSGMDGQYF

SEQ ID NO: 151533 - protein, 14 aa, Homo sapiens
  CDR3 for alpha chain variable domain of TCR clone 75767 (TRAV1-2, TRAJ16)
CAVNQFSDGQKLLF

SEQ ID NO: 151534 - protein, 11 aa, Homo sapiens
  CDR3 for beta chain variable domain of TCR clone 75767 (TRBV29-1, TRBJ2-5)
CGEDRTGTQYF

SEQ ID NO: 151535 - protein, 15 aa, Homo sapiens
  CDR3 for alpha chain variable domain of TCR clone 75768 (TRAV2, TRAJ22)
CAVPSRGGSAGQLTF

SEQ ID NO: 151536 - protein, 14 aa, Homo sapiens
  CDR3 for beta chain variable domain of TCR clone 75768 (TRBV7-6, TRBJ2-3)
CASSLGTVTDTQYF

SEQ ID NO: 151537 - protein, 16 aa, Homo sapiens
  CDR3 for alpha chain variable domain of TCR clone 75769 (TRAV30, TRAJ24)
CGTEIVDADSWGKFQF

SEQ ID NO: 151538 - protein, 14 aa, Homo sapiens
  CDR3 for beta chain variable domain of TCR clone 75769 (TRBV12-5, TRBJ2-5)
CASGSRTHQGTQHF

SEQ ID NO: 151539 - protein, 16 aa, Homo sapiens
  CDR3 for alpha chain variable domain of TCR clone 75770 (TRAV3, TRAJ10)
CAVRDMRAGGGNKLTF

SEQ ID NO: 151540 - protein, 14 aa, Homo sapiens
  CDR3 for beta chain variable domain of TCR clone 75770 (TRBV7-2, TRBJ1-1)
CASSFLTGTTEDFF

SEQ ID NO: 151541 - protein, 16 aa, Homo sapiens
  CDR3 for alpha chain variable domain of TCR clone 75771 (TRAV26-1, TRAJ37)
CIVRGDGSGNTGKLIF

SEQ ID NO: 151542 - protein, 17 aa, Homo sapiens
  CDR3 for beta chain variable domain of TCR clone 75771 (TRBV28, TRBJ2-3)
CASSPTPAGGRVDTQYF

SEQ ID NO: 151543 - protein, 14 aa, Homo sapiens
  CDR3 for alpha chain variable domain of TCR clone 75772 (TRAV12-1, TRAJ17)
CVVNYKAAGNKLTF

SEQ ID NO: 151544 - protein, 17 aa, Homo sapiens
  CDR3 for beta chain variable domain of TCR clone 75772 (TRBV20-1, TRBJ2-1)
CSASSSGLAGSYNEQFI

SEQ ID NO: 151545 - protein, 12 aa, Homo sapiens
  CDR3 for alpha chain variable domain of TCR clone 75773 (TRAV2, TRAJ9)
CAVGAGGFKTIF

SEQ ID NO: 151546 - protein, 16 aa, Homo sapiens
  CDR3 for beta chain variable domain of TCR clone 75773 (TRBV13, TRBJ2-2)
CASSTRTREHTGELFF

SEQ ID NO: 151547 - protein, 14 aa, Homo sapiens
  CDR3 for alpha chain variable domain of TCR clone 75774 (TRAV8-4, TRAJ9)
CAVRINTGGFKTIF

SEQ ID NO: 151548 - protein, 12 aa, Homo sapiens
  CDR3 for beta chain variable domain of TCR clone 75774 (TRBV6-5, TRBJ2-2)
CASRQITGELFF

SEQ ID NO: 151549 - protein, 17 aa, Homo sapiens
  CDR3 for alpha chain variable domain of TCR clone 75775 (TRAV8-6, TRAJ58)
CAVSSWVGETSGSRLTF

SEQ ID NO: 151550 - protein, 14 aa, Homo sapiens
  CDR3 for beta chain variable domain of TCR clone 75775 (TRBV4-2, TRBJ2-1)
CASGLDRDYNEQFF

SEQ ID NO: 151551 - protein, 13 aa, Homo sapiens
  CDR3 for alpha chain variable domain of TCR clone 75776 (TRAV12-2, TRAJ12)
CAVNWDSSYKLIF

SEQ ID NO: 151552 - protein, 14 aa, Homo sapiens
  CDR3 for beta chain variable domain of TCR clone 75776 (TRBV12-4, TRBJ1-3)
CASTLTGAGNTIYF

SEQ ID NO: 151553 - protein, 14 aa, Homo sapiens
  CDR3 for alpha chain variable domain of TCR clone 75777 (TRAV12-2, TRAJ40)
CAVKIPSGTYKYIF

SEQ ID NO: 151554 - protein, 20 aa, Homo sapiens
  CDR3 for beta chain variable domain of TCR clone 75777 (TRBV28, TRBJ2-1)
CASTPIGRSPGRAGGNEQFF

SEQ ID NO: 151555 - protein, 12 aa, Homo sapiens
  CDR3 for alpha chain variable domain of TCR clone 75778 (TRAV10, TRAJ43)
CVVVRVGNDMRF

SEQ ID NO: 151556 - protein, 15 aa, Homo sapiens
  CDR3 for beta chain variable domain of TCR clone 75778 (TRBV2, TRBJ2-7)
CASSEGLARSYEQYF

SEQ ID NO: 151557 - protein, 10 aa, Homo sapiens
  CDR3 for alpha chain variable domain of TCR clone 75779 (TRAV1-2, TRAJ18)
CAVRGEAQPC

SEQ ID NO: 151558 - protein, 13 aa, Homo sapiens
  CDR3 for beta chain variable domain of TCR clone 75779 (TRBV20-1, TRBJ1-1)
CSARVGGNTEAFF

SEQ ID NO: 151559 - protein, 11 aa, Homo sapiens
  CDR3 for alpha chain variable domain of TCR clone 75780 (TRAV12-1, TRAJ33)
CVVNMNYQLIW

SEQ ID NO: 151560 - protein, 15 aa, Homo sapiens
  CDR3 for beta chain variable domain of TCR clone 75780 (TRBV9, TRBJ1-6)
CASSVAGTGDSPLHL

SEQ ID NO: 151561 - protein, 13 aa, Homo sapiens
  CDR3 for alpha chain variable domain of TCR clone 75781 (TRAV8-6, TRAJ49)
CAVITNTSNQFYF

SEQ ID NO: 151562 - protein, 14 aa, Homo sapiens
  CDR3 for beta chain variable domain of TCR clone 75781 (TRBV5-1, TRBJ2-7)
CASSRGESLYEQYF

SEQ ID NO: 151563 - protein, 15 aa, Homo sapiens
  CDR3 for alpha chain variable domain of TCR clone 75782 (TRAV4, TRAJ39)
CLVGPNNNAGNMLTF

SEQ ID NO: 151564 - protein, 13 aa, Homo sapiens
  CDR3 for beta chain variable domain of TCR clone 75782 (TRBV11-2, TRBJ2-5)
SASSSTGEETQYF

SEQ ID NO: 151565 - protein, 16 aa, Homo sapiens
  CDR3 for alpha chain variable domain of TCR clone 75783 (TRAV26-1, TRAJ36)
CTVRVPDQTGANNLFF

SEQ ID NO: 151566 - protein, 15 aa, Homo sapiens
  CDR3 for beta chain variable domain of TCR clone 75783 (TRBV19, TRBJ2-4)
CASRGPRRGENIQYF

SEQ ID NO: 151567 - protein, 15 aa, Homo sapiens
  CDR3 for alpha chain variable domain of TCR clone 75784 (TRAV4, TRAJ39)
CLVGPNNNAGKMLTF

SEQ ID NO: 151568 - protein, 13 aa, Homo sapiens
  CDR3 for beta chain variable domain of TCR clone 75784 (TRBV11-3, TRBJ2-5)
CASSSTGEETQYF

SEQ ID NO: 151569 - protein, 15 aa, Homo sapiens
  CDR3 for alpha chain variable domain of TCR clone 75785 (TRAV3, TRAJ22)
CAVRDRGGSARQLTF

SEQ ID NO: 151570 - protein, 12 aa, Homo sapiens
  CDR3 for beta chain variable domain of TCR clone 75785 (TRBV5-5, TRBJ2-5)
CASSYFGETQYF

SEQ ID NO: 151571 - protein, 13 aa, Homo sapiens
  CDR3 for alpha chain variable domain of TCR clone 75786 (TRAV12-1, TRAJ33)
CGDAPDSNYQLIW

SEQ ID NO: 151572 - protein, 15 aa, Homo sapiens
  CDR3 for beta chain variable domain of TCR clone 75786 (TRBV27, TRBJ2-1)
CASSNGGGASNEQFF

SEQ ID NO: 151573 - protein, 14 aa, Homo sapiens
  CDR3 for alpha chain variable domain of TCR clone 75787 (TRAV1-2, TRAJ8)
CAVREETGFQKLVF

SEQ ID NO: 151574 - protein, 13 aa, Homo sapiens
  CDR3 for beta chain variable domain of TCR clone 75787 (TRBV7-3, TRBJ2-1)
CASSLDSYNEQFF

SEQ ID NO: 151575 - protein, 15 aa, Homo sapiens
  CDR3 for alpha chain variable domain of TCR clone 75788 (TRAV3, TRAJ20)
CAVRDIKLSDYKLNF

SEQ ID NO: 151576 - protein, 15 aa, Homo sapiens
  CDR3 for beta chain variable domain of TCR clone 75788 (TRBV7-9, TRBJ1-6)
CASSSPGRGNSPLHF

SEQ ID NO: 151577 - protein, 14 aa, Homo sapiens
  CDR3 for alpha chain variable domain of TCR clone 75789 (TRAV8-3, TRAJ10)
CAVGNAGGGNKLTF

SEQ ID NO: 151578 - protein, 16 aa, Homo sapiens
  CDR3 for beta chain variable domain of TCR clone 75789 (TRBV11-2, TRBJ1-2)
CASSLDTGGADYGYAF

SEQ ID NO: 151579 - protein, 16 aa, Homo sapiens
  CDR3 for alpha chain variable domain of TCR clone 75790 (TRAV38-1, TRAJ37)
CAFKGDGSSNTGKLIF

SEQ ID NO: 151580 - protein, 13 aa, Homo sapiens
  CDR3 for beta chain variable domain of TCR clone 75790 (TRBV12-4, TRBJ2-5)
CASSLFRRENQYF

SEQ ID NO: 151581 - protein, 14 aa, Homo sapiens
  CDR3 for alpha chain variable domain of TCR clone 75791 (TRAV13-1, TRAJ9)
CAASALTGGFKTIF

SEQ ID NO: 151582 - protein, 17 aa, Homo sapiens
  CDR3 for beta chain variable domain of TCR clone 75791 (TRBV13, TRBJ2-3)
CASSLSRVAGGRNTQYF

SEQ ID NO: 151583 - protein, 14 aa, Homo sapiens
  CDR3 for alpha chain variable domain of TCR clone 75792 (TRAV12-2, TRAJ9)
CAVNALEGGFKTIF

SEQ ID NO: 151584 - protein, 16 aa, Homo sapiens
  CDR3 for beta chain variable domain of TCR clone 75792 (TRBV19, TRBJ1-6)
CASSVAPVAGNSPLLF

SEQ ID NO: 151585 - protein, 16 aa, Homo sapiens
  CDR3 for alpha chain variable domain of TCR clone 75793 (TRAV8-3, TRAJ8)
CAVPRDGNKGFQKLVF

SEQ ID NO: 151586 - protein, 15 aa, Homo sapiens
  CDR3 for beta chain variable domain of TCR clone 75793 (TRBV6-1, TRBJ2-6)
CASSSRPSGANVLTF

SEQ ID NO: 151587 - protein, 16 aa, Homo sapiens
  CDR3 for alpha chain variable domain of TCR clone 75794 (TRAV3, TRAJ37)
CAVRPHGSGNTGKLIF

SEQ ID NO: 151588 - protein, 14 aa, Homo sapiens
  CDR3 for beta chain variable domain of TCR clone 75794 (TRBV25-1, TRBJ1-1)
CASTHLGGNTEALF

SEQ ID NO: 151589 - protein, 14 aa, Homo sapiens
  CDR3 for alpha chain variable domain of TCR clone 75795 (TRAV3, TRAJ36)
CAVRDGTGANNLFF

SEQ ID NO: 151590 - protein, 16 aa, Homo sapiens
  CDR3 for beta chain variable domain of TCR clone 75795 (TRBV7-3, TRBJ2-5)
CASIRPGGSVQETQYF

SEQ ID NO: 151591 - protein, 14 aa, Homo sapiens
  CDR3 for alpha chain variable domain of TCR clone 75796 (TRAV1-1, TRAJ28)
CAAPSGAWSYQLTF

SEQ ID NO: 151592 - protein, 15 aa, Homo sapiens
  CDR3 for beta chain variable domain of TCR clone 75796 (TRBV7-2, TRBJ1-2)
CASSLVSGGDYGYTF

SEQ ID NO: 151593 - protein, 16 aa, Homo sapiens
  CDR3 for alpha chain variable domain of TCR clone 75797 (TRAV26-1, )
CIDIQNPDPAVYQLRD

SEQ ID NO: 151594 - protein, 19 aa, Homo sapiens
  CDR3 for beta chain variable domain of TCR clone 75797 (TRBV19, TRBJ2-5)
CASSIGQVTDFFPGETQYF

SEQ ID NO: 151595 - protein, 19 aa, Homo sapiens
  CDR3 for alpha chain variable domain of TCR clone 75798 (TRAV2, TRAJ20)
ILQVREADAAVYRDYKLSF

SEQ ID NO: 151596 - protein, 18 aa, Homo sapiens
  CDR3 for beta chain variable domain of TCR clone 75798 (TRBV7-3, TRBJ2-3)
CASSSTGTYPSSTDTQYF

SEQ ID NO: 151597 - protein, 14 aa, Homo sapiens
  CDR3 for alpha chain variable domain of TCR clone 75799 (TRAV26-1, TRAJ38)
CTADNAGNNRKLIW

SEQ ID NO: 151598 - protein, 13 aa, Homo sapiens
  CDR3 for beta chain variable domain of TCR clone 75799 (TRBV20-1, TRBJ2-1)
CSARSSPRDEQFF

SEQ ID NO: 151599 - protein, 12 aa, Homo sapiens
  CDR3 for alpha chain variable domain of TCR clone 75800 (TRAV13-1, TRAJ49)
CAAPNTGNQFYF

SEQ ID NO: 151600 - protein, 17 aa, Homo sapiens
  CDR3 for beta chain variable domain of TCR clone 75800 (TRBV25-1, TRBJ2-7)
CAGSDARVVFSSYEQYF

SEQ ID NO: 151601 - protein, 11 aa, Homo sapiens
  CDR3 for alpha chain variable domain of TCR clone 75801 (TRAV21, TRAJ34)
CAHYNTDKLIF

SEQ ID NO: 151602 - protein, 13 aa, Homo sapiens
  CDR3 for beta chain variable domain of TCR clone 75801 (TRBV7-6, TRBJ1-2)
CASSLVADFGYTF

SEQ ID NO: 151603 - protein, 11 aa, Homo sapiens
  CDR3 for alpha chain variable domain of TCR clone 75802 (TRAV2, TRAJ13)
CASGGYQKVTF

SEQ ID NO: 151604 - protein, 15 aa, Homo sapiens
  CDR3 for beta chain variable domain of TCR clone 75802 (TRBV6-1, TRBJ2-3)
CASSERGGITDTQYF

SEQ ID NO: 151605 - protein, 15 aa, Homo sapiens
  CDR3 for alpha chain variable domain of TCR clone 75803 (TRAV8-3, TRAJ45)
CASSYSRGGADGLTF

SEQ ID NO: 151606 - protein, 17 aa, Homo sapiens
  CDR3 for beta chain variable domain of TCR clone 75803 (TRBV7-8, TRBJ1-2)
CASSLRPLQGHLYGYTF

SEQ ID NO: 151607 - protein, 11 aa, Homo sapiens
  CDR3 for alpha chain variable domain of TCR clone 75804 (TRAV1-2, TRAJ20)
CAVANDYKLSF

SEQ ID NO: 151608 - protein, 13 aa, Homo sapiens
  CDR3 for beta chain variable domain of TCR clone 75804 (TRBV12-5, TRBJ2-3)
CASGDRQSDTQYF

SEQ ID NO: 151609 - protein, 16 aa, Homo sapiens
  CDR3 for alpha chain variable domain of TCR clone 75805 (TRAV12-3, TRAJ53)
CAMSPGSGGSNYKLTL

SEQ ID NO: 151610 - protein, 16 aa, Homo sapiens
  CDR3 for beta chain variable domain of TCR clone 75805 (TRBV4-2, TRBJ1-1)
CASSQAGFGMNTEAFF

SEQ ID NO: 151611 - protein, 14 aa, Homo sapiens
  CDR3 for alpha chain variable domain of TCR clone 75806 (TRAV12-1, TRAJ3)
CVVILYSSASKIIF

SEQ ID NO: 151612 - protein, 12 aa, Homo sapiens
  CDR3 for beta chain variable domain of TCR clone 75806 (TRBV18, TRBJ2-7)
CASSTAMGEQYF

SEQ ID NO: 151613 - protein, 14 aa, Homo sapiens
  CDR3 for alpha chain variable domain of TCR clone 75807 (TRAV38-2/DV8, TRAJ30)
CAYMDGLGGGKIIF

SEQ ID NO: 151614 - protein, 15 aa, Homo sapiens
  CDR3 for beta chain variable domain of TCR clone 75807 (TRBV7-9, TRBJ2-2)
CASRPADRDTGELFF

SEQ ID NO: 151615 - protein, 13 aa, Homo sapiens
  CDR3 for alpha chain variable domain of TCR clone 75808 (TRAV3, TRAJ21)
CAVREPDLNKFYF

SEQ ID NO: 151616 - protein, 18 aa, Homo sapiens
  CDR3 for beta chain variable domain of TCR clone 75808 (TRBV11-2, TRBJ2-3)
CASSLGGASRGAPNTQYF

SEQ ID NO: 151617 - protein, 13 aa, Homo sapiens
  CDR3 for alpha chain variable domain of TCR clone 75809 (TRAV8-6, TRAJ49)
CAVITNTGNQFYF

SEQ ID NO: 151618 - protein, 12 aa, Homo sapiens
  CDR3 for beta chain variable domain of TCR clone 75809 (TRBV11-2, TRBJ2-2)
CASSLGGGELLF

SEQ ID NO: 151619 - protein, 14 aa, Homo sapiens
  CDR3 for alpha chain variable domain of TCR clone 75810 (TRAV26-1, TRAJ38)
CIADNAGNNRKLIW

SEQ ID NO: 151620 - protein, 15 aa, Homo sapiens
  CDR3 for beta chain variable domain of TCR clone 75810 (TRBV6-3, TRBJ2-7)
CASSSPGTVSYEQYF

SEQ ID NO: 151621 - protein, 17 aa, Homo sapiens
  CDR3 for alpha chain variable domain of TCR clone 75811 (TRAV3, TRAJ38)
CAVRDCLNAVNNRKLIW

SEQ ID NO: 151622 - protein, 15 aa, Homo sapiens
  CDR3 for beta chain variable domain of TCR clone 75811 (TRBV27, TRBJ2-1)
CASSNGGGSSNEQFF

SEQ ID NO: 151623 - protein, 13 aa, Homo sapiens
  CDR3 for alpha chain variable domain of TCR clone 75812 (TRAV1-1, TRAJ15)
CAVVDQAGTALIF

SEQ ID NO: 151624 - protein, 14 aa, Homo sapiens
  CDR3 for beta chain variable domain of TCR clone 75812 (TRBV5-4, TRBJ1-6)
CASSLWSDSSPLHF

SEQ ID NO: 151625 - protein, 19 aa, Homo sapiens
  CDR3 for alpha chain variable domain of TCR clone 75813 (TRAV3, TRAJ6)
CAVRDRNPSRSGGSYIPPF

SEQ ID NO: 151626 - protein, 15 aa, Homo sapiens
  CDR3 for beta chain variable domain of TCR clone 75813 (TRBV18, TRBJ2-7)
CASSPTFMDNYEQYF

SEQ ID NO: 151627 - protein, 13 aa, Homo sapiens
  CDR3 for alpha chain variable domain of TCR clone 75814 (TRAV3, TRAJ30)
CAVRDRGDDKIIL

SEQ ID NO: 151628 - protein, 17 aa, Homo sapiens
  CDR3 for beta chain variable domain of TCR clone 75814 (TRBV4-1, TRBJ2-7)
CASSRDPLGVRGGEQYF

SEQ ID NO: 151629 - protein, 13 aa, Homo sapiens
  CDR3 for alpha chain variable domain of TCR clone 75815 (TRAV8-3, TRAJ28)
CAVGAVGSYQLTF

SEQ ID NO: 151630 - protein, 17 aa, Homo sapiens
  CDR3 for beta chain variable domain of TCR clone 75815 (TRBV11-2, TRBJ2-1)
FASSLYPPGVEYNEQFF

SEQ ID NO: 151631 - protein, 14 aa, Homo sapiens
  CDR3 for alpha chain variable domain of TCR clone 75816 (TRAV20, TRAJ42)
CAVQAGGSQGNLIF

SEQ ID NO: 151632 - protein, 14 aa, Homo sapiens
  CDR3 for beta chain variable domain of TCR clone 75816 (TRBV28, TRBJ1-2)
CASRIQGANHGYTF

SEQ ID NO: 151633 - protein, 14 aa, Homo sapiens
  CDR3 for alpha chain variable domain of TCR clone 75817 (TRAV38-1, TRAJ29)
CAFITPSGNTPLVF

SEQ ID NO: 151634 - protein, 14 aa, Homo sapiens
  CDR3 for beta chain variable domain of TCR clone 75817 (TRBV18, TRBJ2-7)
CASSPRGGAYEQCF

SEQ ID NO: 151635 - protein, 18 aa, Homo sapiens
  CDR3 for alpha chain variable domain of TCR clone 75818 (TRAV21, TRAJ52)
RAVRPSPAGGTSYGKLTF

SEQ ID NO: 151636 - protein, 13 aa, Homo sapiens
  CDR3 for beta chain variable domain of TCR clone 75818 (TRBV7-3, TRBJ1-1)
CASSQDWGAEAFF

SEQ ID NO: 151637 - protein, 18 aa, Homo sapiens
  CDR3 for alpha chain variable domain of TCR clone 75819 (TRAV13-1, TRAJ52)
CAAKDPNAGGTSYGKLTF

SEQ ID NO: 151638 - protein, 14 aa, Homo sapiens
  CDR3 for beta chain variable domain of TCR clone 75819 (TRBV7-2, TRBJ2-7)
CASRSQGAAYEQYF

SEQ ID NO: 151639 - protein, 14 aa, Homo sapiens
  CDR3 for alpha chain variable domain of TCR clone 75820 (TRAV12-3, TRAJ10)
CHLPLTGGGNKLTF

SEQ ID NO: 151640 - protein, 17 aa, Homo sapiens
  CDR3 for beta chain variable domain of TCR clone 75820 (TRBV28, TRBJ2-5)
CASSTPEGDALQETQYF

SEQ ID NO: 151641 - protein, 15 aa, Homo sapiens
  CDR3 for alpha chain variable domain of TCR clone 75821 (TRAV35, TRAJ58)
RAGRRQETSGSRLTF

SEQ ID NO: 151642 - protein, 11 aa, Homo sapiens
  CDR3 for beta chain variable domain of TCR clone 75821 (TRBV11-2, TRBJ1-1)
CASSINTEAFF

SEQ ID NO: 151643 - protein, 14 aa, Homo sapiens
  CDR3 for alpha chain variable domain of TCR clone 75822 (TRAV9-2, TRAJ39)
CALYIYNAGNMLTF

SEQ ID NO: 151644 - protein, 15 aa, Homo sapiens
  CDR3 for beta chain variable domain of TCR clone 75822 (TRBV7-3, TRBJ2-2)
CASSETGQGTGELFF

SEQ ID NO: 151645 - protein, 17 aa, Homo sapiens
  CDR3 for alpha chain variable domain of TCR clone 75823 (TRAV12-2, TRAJ52)
CSVNPYAGGTSYGKLTF

SEQ ID NO: 151646 - protein, 16 aa, Homo sapiens
  CDR3 for beta chain variable domain of TCR clone 75823 (TRBV5-5, TRBJ2-2)
CASSGRREGATGELFF

SEQ ID NO: 151647 - protein, 13 aa, Homo sapiens
  CDR3 for alpha chain variable domain of TCR clone 75824 (TRAV20, TRAJ42)
YAVQGGSQGNLIF

SEQ ID NO: 151648 - protein, 15 aa, Homo sapiens
  CDR3 for beta chain variable domain of TCR clone 75824 (TRBV9, TRBJ1-6)
CASSVAGTGDSPLHF

SEQ ID NO: 151649 - protein, 14 aa, Homo sapiens
  CDR3 for alpha chain variable domain of TCR clone 75825 (TRAV1-2, TRAJ16)
CAVKRFSDGQKLLF

SEQ ID NO: 151650 - protein, 14 aa, Homo sapiens
  CDR3 for beta chain variable domain of TCR clone 75825 (TRBV19, TRBJ2-1)
CASPTFVLSGEQFF

SEQ ID NO: 151651 - protein, 15 aa, Homo sapiens
  CDR3 for alpha chain variable domain of TCR clone 75826 (TRAV21, TRAJ38)
CAVRQDAGNNLKLIW

SEQ ID NO: 151652 - protein, 16 aa, Homo sapiens
  CDR3 for beta chain variable domain of TCR clone 75826 (TRBV4-2, TRBJ1-1)
CASRPLDGGGDTEAFF

SEQ ID NO: 151653 - protein, 15 aa, Homo sapiens
  CDR3 for alpha chain variable domain of TCR clone 75827 (TRAV1-2, TRAJ30)
CAVRLHGNRDDKIIF

SEQ ID NO: 151654 - protein, 13 aa, Homo sapiens
  CDR3 for beta chain variable domain of TCR clone 75827 (TRBV4-1, TRBJ2-7)
CASSQGQAYEQYF

SEQ ID NO: 151655 - protein, 13 aa, Homo sapiens
  CDR3 for alpha chain variable domain of TCR clone 75828 (TRAV29/DV5, TRAJ31)
CAASRDNNARLMF

SEQ ID NO: 151656 - protein, 15 aa, Homo sapiens
  CDR3 for beta chain variable domain of TCR clone 75828 (TRBV28, TRBJ2-1)
CASSIIAGGRSEQFF

SEQ ID NO: 151657 - protein, 10 aa, Homo sapiens
  CDR3 for alpha chain variable domain of TCR clone 75829 (TRAV12-1, TRAJ37)
ARGNTGKLNF

SEQ ID NO: 151658 - protein, 15 aa, Homo sapiens
  CDR3 for beta chain variable domain of TCR clone 75829 (TRBV7-2, TRBJ2-3)
CASSLEQGGTDTQYF

SEQ ID NO: 151659 - protein, 16 aa, Homo sapiens
  CDR3 for alpha chain variable domain of TCR clone 75830 (TRAV3, TRAJ10)
CAVRDMRAGGGNKLTF

SEQ ID NO: 151660 - protein, 13 aa, Homo sapiens
  CDR3 for beta chain variable domain of TCR clone 75830 (TRBV19, TRBJ1-5)
CASSMRGYQPQHF

SEQ ID NO: 151661 - protein, 16 aa, Homo sapiens
  CDR3 for alpha chain variable domain of TCR clone 75831 (TRAV23/DV6, TRAJ9)
CAASIGGNTGGFKTIF

SEQ ID NO: 151662 - protein, 23 aa, Homo sapiens
  CDR3 for beta chain variable domain of TCR clone 75831 (TRBV7-9, TRBJ1-2)
EAQLEKSRLLSDRFSSGEDGYTF

SEQ ID NO: 151663 - protein, 12 aa, Homo sapiens
  CDR3 for alpha chain variable domain of TCR clone 75832 (TRAV17, TRAJ20)
CATDSNDYKPSF

SEQ ID NO: 151664 - protein, 16 aa, Homo sapiens
  CDR3 for beta chain variable domain of TCR clone 75832 (TRBV7-2, TRBJ1-2)
CASSSNQDRRGHGYTF

SEQ ID NO: 151665 - protein, 14 aa, Homo sapiens
  CDR3 for alpha chain variable domain of TCR clone 75833 (TRAV12-3, TRAJ47)
CAMSVREYGNRLVF

SEQ ID NO: 151666 - protein, 15 aa, Homo sapiens
  CDR3 for beta chain variable domain of TCR clone 75833 (TRBV20-1, TRBJ2-2)
CSARDTRLNTGELFF

SEQ ID NO: 151667 - protein, 12 aa, Homo sapiens
  CDR3 for alpha chain variable domain of TCR clone 75834 (TRAV20, TRAJ39)
CAVGNAGNMPTF

SEQ ID NO: 151668 - protein, 17 aa, Homo sapiens
  CDR3 for beta chain variable domain of TCR clone 75834 (TRBV4-1, TRBJ2-3)
CASSQGYVSGGTDTQYF

SEQ ID NO: 151669 - protein, 14 aa, Homo sapiens
  CDR3 for alpha chain variable domain of TCR clone 75835 (TRAV22, TRAJ6)
CAGVGPGGSYIPTF

SEQ ID NO: 151670 - protein, 14 aa, Homo sapiens
  CDR3 for beta chain variable domain of TCR clone 75835 (TRBV7-9, TRBJ2-1)
CASSFSLAGNEQFF

SEQ ID NO: 151671 - protein, 14 aa, Homo sapiens
  CDR3 for alpha chain variable domain of TCR clone 75836 (TRAV5, TRAJ21)
CAEEARGNFNKFYF

SEQ ID NO: 151672 - protein, 14 aa, Homo sapiens
  CDR3 for beta chain variable domain of TCR clone 75836 (TRBV4-1, TRBJ2-2)
CASSQAVNTGELFF

SEQ ID NO: 151673 - protein, 15 aa, Homo sapiens
  CDR3 for alpha chain variable domain of TCR clone 75837 (TRAV8-3, TRAJ45)
CASSYSGGGADGLTF

SEQ ID NO: 151674 - protein, 15 aa, Homo sapiens
  CDR3 for beta chain variable domain of TCR clone 75837 (TRBV5-1, TRBJ1-1)
CASSLAPRGNTEAFF

SEQ ID NO: 151675 - protein, 15 aa, Homo sapiens
  CDR3 for alpha chain variable domain of TCR clone 75838 (TRAV40, TRAJ45)
CLLGDLGGGADGLTF

SEQ ID NO: 151676 - protein, 13 aa, Homo sapiens
  CDR3 for beta chain variable domain of TCR clone 75838 (TRBV7-9, TRBJ1-2)
CASSLKQNYGYIF

SEQ ID NO: 151677 - protein, 13 aa, Homo sapiens
  CDR3 for alpha chain variable domain of TCR clone 75839 (TRAV8-1, TRAJ30)
CAVIMNRDDKNIF

SEQ ID NO: 151678 - protein, 14 aa, Homo sapiens
  CDR3 for beta chain variable domain of TCR clone 75839 (TRBV7-2, TRBJ1-6)
CASSLQGANSPLHF

SEQ ID NO: 151679 - protein, 16 aa, Homo sapiens
  CDR3 for alpha chain variable domain of TCR clone 75840 (TRAV26-1, TRAJ32)
CIVRTNYGGATNKPIF

SEQ ID NO: 151680 - protein, 14 aa, Homo sapiens
  CDR3 for beta chain variable domain of TCR clone 75840 (TRBV6-1, TRBJ1-3)
CASVQGGGGNTIYF

SEQ ID NO: 151681 - protein, 12 aa, Homo sapiens
  CDR3 for alpha chain variable domain of TCR clone 75841 (TRAV1-2, TRAJ29)
CAVPSGNTPLVF

SEQ ID NO: 151682 - protein, 13 aa, Homo sapiens
  CDR3 for beta chain variable domain of TCR clone 75841 (TRBV5-4, TRBJ1-1)
CASSLDLGTEAFF

SEQ ID NO: 151683 - protein, 14 aa, Homo sapiens
  CDR3 for alpha chain variable domain of TCR clone 75842 (TRAV35, TRAJ42)
CAGRYGGSQGHLIF

SEQ ID NO: 151684 - protein, 15 aa, Homo sapiens
  CDR3 for beta chain variable domain of TCR clone 75842 (TRBV7-9, TRBJ2-1)
CASSLGWGRANEQFF

SEQ ID NO: 151685 - protein, 13 aa, Homo sapiens
  CDR3 for alpha chain variable domain of TCR clone 75843 (TRAV27, TRAJ17)
CAGAATAGNKLTF

SEQ ID NO: 151686 - protein, 15 aa, Homo sapiens
  CDR3 for beta chain variable domain of TCR clone 75843 (TRBV5-1, TRBJ2-3)
CASKNQAGSTDTQYF

SEQ ID NO: 151687 - protein, 15 aa, Homo sapiens
  CDR3 for alpha chain variable domain of TCR clone 75844 (TRAV8-4, TRAJ3)
CAVTGENLVQQCFQD

SEQ ID NO: 151688 - protein, 16 aa, Homo sapiens
  CDR3 for beta chain variable domain of TCR clone 75844 (TRBV4-2, TRBJ1-1)
CASSQAGFGMNTEAYF

SEQ ID NO: 151689 - protein, 13 aa, Homo sapiens
  CDR3 for alpha chain variable domain of TCR clone 75845 (TRAV8-3, TRAJ43)
CDVGPDNNNDMRF

SEQ ID NO: 151690 - protein, 19 aa, Homo sapiens
  CDR3 for beta chain variable domain of TCR clone 75845 (TRBV7-2, TRBJ2-3)
CASSFLSRNWGGGTDTQYF

SEQ ID NO: 151691 - protein, 14 aa, Homo sapiens
  CDR3 for alpha chain variable domain of TCR clone 75846 (TRAV12-2, TRAJ17)
CAVLFKAAGNKLAF

SEQ ID NO: 151692 - protein, 14 aa, Homo sapiens
  CDR3 for beta chain variable domain of TCR clone 75846 (TRBV12-5, TRBJ2-5)
CASGSRTHQETQYF

SEQ ID NO: 151693 - protein, 11 aa, Homo sapiens
  CDR3 for alpha chain variable domain of TCR clone 75847 (TRAV16, TRAJ33)
CALHSNYQLIW

SEQ ID NO: 151694 - protein, 13 aa, Homo sapiens
  CDR3 for beta chain variable domain of TCR clone 75847 (TRBV2, TRBJ1-1)
CASSVSGYTEAFF

SEQ ID NO: 151695 - protein, 14 aa, Homo sapiens
  CDR3 for alpha chain variable domain of TCR clone 75848 (TRAV12-2, TRAJ17)
CAALFKAAGNKLNF

SEQ ID NO: 151696 - protein, 16 aa, Homo sapiens
  CDR3 for beta chain variable domain of TCR clone 75848 (TRBV20-1, TRBJ2-2)
CSASASGIPGAGELFF

SEQ ID NO: 151697 - protein, 13 aa, Homo sapiens
  CDR3 for alpha chain variable domain of TCR clone 75849 (TRAV21, TRAJ27)
CAARPGNAGKSTF

SEQ ID NO: 151698 - protein, 13 aa, Homo sapiens
  CDR3 for beta chain variable domain of TCR clone 75849 (TRBV19, TRBJ2-7)
CASRKAGGSEQYF

SEQ ID NO: 151699 - protein, 12 aa, Homo sapiens
  CDR3 for alpha chain variable domain of TCR clone 75850 (TRAV12-1, TRAJ23)
RVVNIPGGKLIF

SEQ ID NO: 151700 - protein, 15 aa, Homo sapiens
  CDR3 for beta chain variable domain of TCR clone 75850 (TRBV7-2, TRBJ2-7)
CASSLVSSGSYEQYF

SEQ ID NO: 151701 - protein, 13 aa, Homo sapiens
  CDR3 for alpha chain variable domain of TCR clone 75851 (TRAV13-2, TRAJ49)
CAETLHGGNQFYF

SEQ ID NO: 151702 - protein, 16 aa, Homo sapiens
  CDR3 for beta chain variable domain of TCR clone 75851 (TRBV2, TRBJ2-1)
CASSVGGSLSYNEQFF

SEQ ID NO: 151703 - protein, 16 aa, Homo sapiens
  CDR3 for alpha chain variable domain of TCR clone 75852 (TRAV21, TRAJ52)
CAVTNAGGTSYGKLTF

SEQ ID NO: 151704 - protein, 17 aa, Homo sapiens
  CDR3 for beta chain variable domain of TCR clone 75852 (TRBV28, TRBJ2-5)
CASSRQGGLAGAENQYF

SEQ ID NO: 151705 - protein, 14 aa, Homo sapiens
  CDR3 for alpha chain variable domain of TCR clone 75853 (TRAV1-2, TRAJ16)
CAVNRFSDGQKLLF

SEQ ID NO: 151706 - protein, 12 aa, Homo sapiens
  CDR3 for beta chain variable domain of TCR clone 75853 (TRBV12-4, TRBJ2-7)
CASNPGGGEQYF

SEQ ID NO: 151707 - protein, 17 aa, Homo sapiens
  CDR3 for alpha chain variable domain of TCR clone 75854 (TRAV3, TRAJ6)
CAVRDGPRAGGSYIPTF

SEQ ID NO: 151708 - protein, 15 aa, Homo sapiens
  CDR3 for beta chain variable domain of TCR clone 75854 (TRBV19, TRBJ1-1)
CASSRGGALNTEAFF

SEQ ID NO: 151709 - protein, 14 aa, Homo sapiens
  CDR3 for alpha chain variable domain of TCR clone 75855 (TRAV9-2, TRAJ24)
CALNPRGSWGKLQF

SEQ ID NO: 151710 - protein, 17 aa, Homo sapiens
  CDR3 for beta chain variable domain of TCR clone 75855 (TRBV10-3, TRBJ2-4)
CTSVPSVNKGSKNIQYF

SEQ ID NO: 151711 - protein, 16 aa, Homo sapiens
  CDR3 for alpha chain variable domain of TCR clone 75856 (TRAV27, TRAJ48)
TAAQPGDTGLYLPLTF

SEQ ID NO: 151712 - protein, 19 aa, Homo sapiens
  CDR3 for beta chain variable domain of TCR clone 75856 (TRBV25-1, TRBJ2-2)
CAILVYRVDRGRKTGELFF

SEQ ID NO: 151713 - protein, 12 aa, Homo sapiens
  CDR3 for alpha chain variable domain of TCR clone 75857 (TRAV10, TRAJ34)
CVVSGEHRQAHL

SEQ ID NO: 151714 - protein, 14 aa, Homo sapiens
  CDR3 for beta chain variable domain of TCR clone 75857 (TRBV19, TRBJ2-1)
CASPTFVLSGEQFF

SEQ ID NO: 151715 - protein, 14 aa, Homo sapiens
  CDR3 for alpha chain variable domain of TCR clone 75858 (TRAV35, TRAJ22)
CAGLRPGSARQLTC

SEQ ID NO: 151716 - protein, 15 aa, Homo sapiens
  CDR3 for beta chain variable domain of TCR clone 75858 (TRBV12-4, TRBJ2-5)
CASSPPTGLQETQYF

SEQ ID NO: 151717 - protein, 16 aa, Homo sapiens
  CDR3 for alpha chain variable domain of TCR clone 75859 (TRAV16, TRAJ4)
CALSRMFSGGYNKLIF

SEQ ID NO: 151718 - protein, 15 aa, Homo sapiens
  CDR3 for beta chain variable domain of TCR clone 75859 (TRBV10-2, TRBJ2-6)
CASSEQGTGANVLTF

SEQ ID NO: 151719 - protein, 13 aa, Homo sapiens
  CDR3 for alpha chain variable domain of TCR clone 75860 (TRAV17, TRAJ34)
CATDLYNADKLIF

SEQ ID NO: 151720 - protein, 15 aa, Homo sapiens
  CDR3 for beta chain variable domain of TCR clone 75860 (TRBV20-1, TRBJ2-3)
CSATGTSGFTDTQYF

SEQ ID NO: 151721 - protein, 14 aa, Homo sapiens
  CDR3 for alpha chain variable domain of TCR clone 75861 (TRAV4, TRAJ17)
CLMGDMAAGNKLTF

SEQ ID NO: 151722 - protein, 14 aa, Homo sapiens
  CDR3 for beta chain variable domain of TCR clone 75861 (TRBV7-6, TRBJ2-3)
CASSLGTVTDTQYF

SEQ ID NO: 151723 - protein, 13 aa, Homo sapiens
  CDR3 for alpha chain variable domain of TCR clone 75862 (TRAV3, TRAJ21)
CAVREPDFNKFYF

SEQ ID NO: 151724 - protein, 18 aa, Homo sapiens
  CDR3 for beta chain variable domain of TCR clone 75862 (TRBV6-6, TRBJ1-3)
CASSYSKWDSISGNTIYF

SEQ ID NO: 151725 - protein, 14 aa, Homo sapiens
  CDR3 for alpha chain variable domain of TCR clone 75863 (TRAV8-4, TRAJ9)
CAVRINTGGFKTIF

SEQ ID NO: 151726 - protein, 15 aa, Homo sapiens
  CDR3 for beta chain variable domain of TCR clone 75863 (TRBV10-2, TRBJ2-6)
CASSEPGTGANVLTF

SEQ ID NO: 151727 - protein, 12 aa, Homo sapiens
  CDR3 for alpha chain variable domain of TCR clone 75864 (TRAV8-3, TRAJ22)
FGGQSSARQLTF

SEQ ID NO: 151728 - protein, 12 aa, Homo sapiens
  CDR3 for beta chain variable domain of TCR clone 75864 (TRBV11-2, TRBJ2-2)
CASSLGGGELFS

SEQ ID NO: 151729 - protein, 14 aa, Homo sapiens
  CDR3 for alpha chain variable domain of TCR clone 75865 (TRAV4, TRAJ26)
CLVGPHNYGQNFVF

SEQ ID NO: 151730 - protein, 17 aa, Homo sapiens
  CDR3 for beta chain variable domain of TCR clone 75865 (TRBV24-1, TRBJ2-1)
CSTSDVSTSGTYNEQFF

SEQ ID NO: 151731 - protein, 12 aa, Homo sapiens
  CDR3 for alpha chain variable domain of TCR clone 75866 (TRAV8-3, TRAJ22)
FGGQSSARQLTF

SEQ ID NO: 151732 - protein, 14 aa, Homo sapiens
  CDR3 for beta chain variable domain of TCR clone 75866 (TRBV7-6, TRBJ2-3)
CASSLGTVTDTQYF

SEQ ID NO: 151733 - protein, 12 aa, Homo sapiens
  CDR3 for alpha chain variable domain of TCR clone 75867 (TRAV1-2, TRAJ33)
CAALDSNYQLIW

SEQ ID NO: 151734 - protein, 16 aa, Homo sapiens
  CDR3 for beta chain variable domain of TCR clone 75867 (TRBV6-4, TRBJ1-2)
CASSEAVEDPNYGYTF

SEQ ID NO: 151735 - protein, 14 aa, Homo sapiens
  CDR3 for alpha chain variable domain of TCR clone 75868 (TRAV9-2, TRAJ39)
CALYIYNAGNMLTF

SEQ ID NO: 151736 - protein, 14 aa, Homo sapiens
  CDR3 for beta chain variable domain of TCR clone 75868 (TRBV28, TRBJ1-2)
CASRVQGANYGYTF

SEQ ID NO: 151737 - protein, 12 aa, Homo sapiens
  CDR3 for alpha chain variable domain of TCR clone 75869 (TRAV16, TRAJ26)
CALRSYGQNFVF

SEQ ID NO: 151738 - protein, 14 aa, Homo sapiens
  CDR3 for beta chain variable domain of TCR clone 75869 (TRBV10-3, TRBJ2-1)
CAISSDLAYNEQLF

SEQ ID NO: 151739 - protein, 13 aa, Homo sapiens
  CDR3 for alpha chain variable domain of TCR clone 75870 (TRAV30, TRAJ39)
CGTEKNAGNMLTF

SEQ ID NO: 151740 - protein, 13 aa, Homo sapiens
  CDR3 for beta chain variable domain of TCR clone 75870 (TRBV7-9, TRBJ1-2)
CASSLKQNYGYTF

SEQ ID NO: 151741 - protein, 14 aa, Homo sapiens
  CDR3 for alpha chain variable domain of TCR clone 75871 (TRAV13-1, TRAJ20)
CAARPGSNDYKLSF

SEQ ID NO: 151742 - protein, 17 aa, Homo sapiens
  CDR3 for beta chain variable domain of TCR clone 75871 (TRBV11-2, TRBJ2-1)
CASSLYPPGVEYNEQFF

SEQ ID NO: 151743 - protein, 18 aa, Homo sapiens
  CDR3 for alpha chain variable domain of TCR clone 75872 (TRAV3, TRAJ32)
CAVRDIRGYGGATNKLIF

SEQ ID NO: 151744 - protein, 15 aa, Homo sapiens
  CDR3 for beta chain variable domain of TCR clone 75872 (TRBV12-4, TRBJ2-2)
RASSLGVRHTGELFF

SEQ ID NO: 151745 - protein, 13 aa, Homo sapiens
  CDR3 for alpha chain variable domain of TCR clone 75873 (TRAV36/DV7, TRAJ38)
CVANAGNNRKLIW

SEQ ID NO: 151746 - protein, 14 aa, Homo sapiens
  CDR3 for beta chain variable domain of TCR clone 75873 (TRBV19, TRBJ2-1)
CASPTFVLRGEQFF

SEQ ID NO: 151747 - protein, 11 aa, Homo sapiens
  CDR3 for alpha chain variable domain of TCR clone 75874 (TRAV3, TRAJ49)
CAPITGNQFYF

SEQ ID NO: 151748 - protein, 16 aa, Homo sapiens
  CDR3 for beta chain variable domain of TCR clone 75874 (TRBV5-1, TRBJ2-3)
CASSVFPMSSTDTQYS

SEQ ID NO: 151749 - protein, 10 aa, Homo sapiens
  CDR3 for alpha chain variable domain of TCR clone 75875 (TRAV12-3, TRAJ49)
CAMNDDQFYF

SEQ ID NO: 151750 - protein, 14 aa, Homo sapiens
  CDR3 for beta chain variable domain of TCR clone 75875 (TRBV28, TRBJ2-7)
CASSLRARGNEQYF

SEQ ID NO: 151751 - protein, 15 aa, Homo sapiens
  CDR3 for alpha chain variable domain of TCR clone 75876 (TRAV8-3, TRAJ32)
CAVGPYGGATNKLIF

SEQ ID NO: 151752 - protein, 15 aa, Homo sapiens
  CDR3 for beta chain variable domain of TCR clone 75876 (TRBV20-1, TRBJ2-7)
CSARDRVSGMDEQYF

SEQ ID NO: 151753 - protein, 22 aa, Homo sapiens
  CDR3 for alpha chain variable domain of TCR clone 75877 (TRAV21, )
CAVRQDAGNNHIQNPDPAVYQL

SEQ ID NO: 151754 - protein, 16 aa, Homo sapiens
  CDR3 for beta chain variable domain of TCR clone 75877 (TRBV4-2, TRBJ1-1)
CASRPLGGGGDTEAFF

SEQ ID NO: 151755 - protein, 13 aa, Homo sapiens
  CDR3 for alpha chain variable domain of TCR clone 75878 (TRAV35, TRAJ42)
CPGFPGSQGNLIF

SEQ ID NO: 151756 - protein, 13 aa, Homo sapiens
  CDR3 for beta chain variable domain of TCR clone 75878 (TRBV29-1, TRBJ2-1)
CSVEGGRVNEQFF

SEQ ID NO: 151757 - protein, 12 aa, Homo sapiens
  CDR3 for alpha chain variable domain of TCR clone 75879 (TRAV3, TRAJ20)
CAVRDGDYKLSF

SEQ ID NO: 151758 - protein, 13 aa, Homo sapiens
  CDR3 for beta chain variable domain of TCR clone 75879 (TRBV19, TRBJ1-2)
CASSVPGQDGYTF

SEQ ID NO: 151759 - protein, 11 aa, Homo sapiens
  CDR3 for alpha chain variable domain of TCR clone 75880 (TRAV8-3, TRAJ15)
CAVGPGIALIF

SEQ ID NO: 151760 - protein, 15 aa, Homo sapiens
  CDR3 for beta chain variable domain of TCR clone 75880 (TRBV7-9, TRBJ2-7)
CASSLALAEAYEQYF

SEQ ID NO: 151761 - protein, 13 aa, Homo sapiens
  CDR3 for alpha chain variable domain of TCR clone 75881 (TRAV17, TRAJ7)
CATDNYGNNRLAF

SEQ ID NO: 151762 - protein, 13 aa, Homo sapiens
  CDR3 for beta chain variable domain of TCR clone 75881 (TRBV27, TRBJ2-1)
CASSSGSCNEQFF

SEQ ID NO: 151763 - protein, 11 aa, Homo sapiens
  CDR3 for alpha chain variable domain of TCR clone 75882 (TRAV20, TRAJ40)
CAVGGTYKYIF

SEQ ID NO: 151764 - protein, 14 aa, Homo sapiens
  CDR3 for beta chain variable domain of TCR clone 75882 (TRBV6-3, TRBJ2-2)
CQQFLATLTGELFF

SEQ ID NO: 151765 - protein, 13 aa, Homo sapiens
  CDR3 for alpha chain variable domain of TCR clone 75883 (TRAV27, TRAJ29)
CAGAHSGNTPLVF

SEQ ID NO: 151766 - protein, 14 aa, Homo sapiens
  CDR3 for beta chain variable domain of TCR clone 75883 (TRBV7-9, TRBJ2-7)
CACSIGQGAGEQYF

SEQ ID NO: 151767 - protein, 15 aa, Homo sapiens
  CDR3 for alpha chain variable domain of TCR clone 75884 (TRAV2, TRAJ9)
CAVAALNTGGFKTIF

SEQ ID NO: 151768 - protein, 15 aa, Homo sapiens
  CDR3 for beta chain variable domain of TCR clone 75884 (TRBV9, TRBJ1-6)
CASSVAGTGDSPLHF

SEQ ID NO: 151769 - protein, 17 aa, Homo sapiens
  CDR3 for alpha chain variable domain of TCR clone 75885 (TRAV3, TRAJ42)
CAVRDGDYGGSQGNLIF

SEQ ID NO: 151770 - protein, 14 aa, Homo sapiens
  CDR3 for beta chain variable domain of TCR clone 75885 (TRBV7-2, TRBJ2-5)
CASSPRGSSETQYF

SEQ ID NO: 151771 - protein, 14 aa, Homo sapiens
  CDR3 for alpha chain variable domain of TCR clone 75886 (TRAV26-1, TRAJ38)
CIADNAGNNRKLIW

SEQ ID NO: 151772 - protein, 13 aa, Homo sapiens
  CDR3 for beta chain variable domain of TCR clone 75886 (TRBV7-9, TRBJ1-2)
CASSLKQNYGYTV

SEQ ID NO: 151773 - protein, 14 aa, Homo sapiens
  CDR3 for alpha chain variable domain of TCR clone 75887 (TRAV13-2, TRAJ41)
CAERPDWAGYALNF

SEQ ID NO: 151774 - protein, 14 aa, Homo sapiens
  CDR3 for beta chain variable domain of TCR clone 75887 (TRBV4-1, TRBJ2-2)
CASSQAVNTGELFF

SEQ ID NO: 151775 - protein, 15 aa, Homo sapiens
  CDR3 for alpha chain variable domain of TCR clone 75888 (TRAV17, TRAJ42)
CATPYYGGSQGNLIF

SEQ ID NO: 151776 - protein, 14 aa, Homo sapiens
  CDR3 for beta chain variable domain of TCR clone 75888 (TRBV19, TRBJ2-3)
CANSAPRGTDTQYF

SEQ ID NO: 151777 - protein, 14 aa, Homo sapiens
  CDR3 for alpha chain variable domain of TCR clone 75889 (TRAV17, TRAJ53)
CATDAGGSNYKLTF

SEQ ID NO: 151778 - protein, 16 aa, Homo sapiens
  CDR3 for beta chain variable domain of TCR clone 75889 (TRBV4-1, TRBJ1-1)
CATSQDAGMGNTEAFF

SEQ ID NO: 151779 - protein, 12 aa, Homo sapiens
  CDR3 for alpha chain variable domain of TCR clone 75890 (TRAV16, TRAJ27)
CALNHRCRQINL

SEQ ID NO: 151780 - protein, 14 aa, Homo sapiens
  CDR3 for beta chain variable domain of TCR clone 75890 (TRBV11-2, TRBJ1-5)
CASSLDRGRQPQHF

SEQ ID NO: 151781 - protein, 15 aa, Homo sapiens
  CDR3 for alpha chain variable domain of TCR clone 75891 (TRAV23/DV6, TRAJ28)
CAALLAYSGAGSYQL

SEQ ID NO: 151782 - protein, 15 aa, Homo sapiens
  CDR3 for beta chain variable domain of TCR clone 75891 (TRBV12-4, TRBJ2-5)
CASSPPTGLQETQYF

SEQ ID NO: 151783 - protein, 16 aa, Homo sapiens
  CDR3 for alpha chain variable domain of TCR clone 75892 (TRAV4, TRAJ22)
CLVGDLYSGSARQLTL

SEQ ID NO: 151784 - protein, 16 aa, Homo sapiens
  CDR3 for beta chain variable domain of TCR clone 75892 (TRBV7-9, TRBJ2-1)
CASSDVAGGSYNEQFF

SEQ ID NO: 151785 - protein, 14 aa, Homo sapiens
  CDR3 for alpha chain variable domain of TCR clone 75893 (TRAV8-3, TRAJ39)
CAVGANNAGNMLTF

SEQ ID NO: 151786 - protein, 15 aa, Homo sapiens
  CDR3 for beta chain variable domain of TCR clone 75893 (TRBV4-3, TRBJ1-1)
CSSSQELGRGTEAFF

SEQ ID NO: 151787 - protein, 12 aa, Homo sapiens
  CDR3 for alpha chain variable domain of TCR clone 75894 (TRAV16, TRAJ10)
CSRTGGGNKLTF

SEQ ID NO: 151788 - protein, 15 aa, Homo sapiens
  CDR3 for beta chain variable domain of TCR clone 75894 (TRBV28, TRBJ1-3)
CASSMGWASGNTIYF

SEQ ID NO: 151789 - protein, 14 aa, Homo sapiens
  CDR3 for alpha chain variable domain of TCR clone 75895 (TRAV12-3, TRAJ10)
SHLPLTGGGNKLTF

SEQ ID NO: 151790 - protein, 14 aa, Homo sapiens
  CDR3 for beta chain variable domain of TCR clone 75895 (TRBV7-2, TRBJ2-7)
CASSLPPGQGPQYF

SEQ ID NO: 151791 - protein, 16 aa, Homo sapiens
  CDR3 for alpha chain variable domain of TCR clone 75896 (TRAV30, TRAJ24)
CGTEIVDADSWGKFQF

SEQ ID NO: 151792 - protein, 14 aa, Homo sapiens
  CDR3 for beta chain variable domain of TCR clone 75896 (TRBV7-2, TRBJ2-7)
CASSPKTRFYEQYF

SEQ ID NO: 151793 - protein, 11 aa, Homo sapiens
  CDR3 for alpha chain variable domain of TCR clone 75897 (TRAV12-2, TRAJ49)
CAVNTGNQFYF

SEQ ID NO: 151794 - protein, 13 aa, Homo sapiens
  CDR3 for beta chain variable domain of TCR clone 75897 (TRBV7-2, TRBJ2-5)
CASSLYRQETQYF

SEQ ID NO: 151795 - protein, 12 aa, Homo sapiens
  CDR3 for alpha chain variable domain of TCR clone 75898 (TRAV27, TRAJ9)
CAGESGGFKTIF

SEQ ID NO: 151796 - protein, 15 aa, Homo sapiens
  CDR3 for beta chain variable domain of TCR clone 75898 (TRBV10-2, TRBJ2-2)
CASSASTSRCRGAVF

SEQ ID NO: 151797 - protein, 15 aa, Homo sapiens
  CDR3 for alpha chain variable domain of TCR clone 75899 (TRAV17, TRAJ57)
CATGPSQGGSEKLVF

SEQ ID NO: 151798 - protein, 15 aa, Homo sapiens
  CDR3 for beta chain variable domain of TCR clone 75899 (TRBV7-2, TRBJ2-1)
CASSSGLAGGNEQFF

SEQ ID NO: 151799 - protein, 14 aa, Homo sapiens
  CDR3 for alpha chain variable domain of TCR clone 75900 (TRAV1-2, TRAJ8)
CAVREDTGFQKVVF

SEQ ID NO: 151800 - protein, 15 aa, Homo sapiens
  CDR3 for beta chain variable domain of TCR clone 75900 (TRBV6-3, TRBJ2-7)
CASSSPGTVFYEQYF

SEQ ID NO: 151801 - protein, 14 aa, Homo sapiens
  CDR3 for alpha chain variable domain of TCR clone 75901 (TRAV17, TRAJ22)
CATSPSGSARQLTF

SEQ ID NO: 151802 - protein, 14 aa, Homo sapiens
  CDR3 for beta chain variable domain of TCR clone 75901 (TRBV4-1, TRBJ2-2)
CASSQAVNTGELFF

SEQ ID NO: 151803 - protein, 10 aa, Homo sapiens
  CDR3 for alpha chain variable domain of TCR clone 75902 (TRAV2, TRAJ34)
CAVVNDKLIF

SEQ ID NO: 151804 - protein, 14 aa, Homo sapiens
  CDR3 for beta chain variable domain of TCR clone 75902 (TRBV3-1, TRBJ2-2)
CQQQDWTRAGELFF

SEQ ID NO: 151805 - protein, 15 aa, Homo sapiens
  CDR3 for alpha chain variable domain of TCR clone 75903 (TRAV17, TRAJ57)
CATGPSQGGSEKLVF

SEQ ID NO: 151806 - protein, 13 aa, Homo sapiens
  CDR3 for beta chain variable domain of TCR clone 75903 (TRBV9, TRBJ2-7)
CASSVAEYYEQYF

SEQ ID NO: 151807 - protein, 12 aa, Homo sapiens
  CDR3 for alpha chain variable domain of TCR clone 75904 (TRAV27, TRAJ9)
CAGESGGFKTIF

SEQ ID NO: 151808 - protein, 11 aa, Homo sapiens
  CDR3 for beta chain variable domain of TCR clone 75904 (TRBV11-2, TRBJ1-1)
CASSINTEAFF

SEQ ID NO: 151809 - protein, 13 aa, Homo sapiens
  CDR3 for alpha chain variable domain of TCR clone 75905 (TRAV8-3, TRAJ44)
CAVVPGTASKLTF

SEQ ID NO: 151810 - protein, 14 aa, Homo sapiens
  CDR3 for beta chain variable domain of TCR clone 75905 (TRBV11-3, TRBJ2-3)
CASRRLARTDTQYF

SEQ ID NO: 151811 - protein, 15 aa, Homo sapiens
  CDR3 for alpha chain variable domain of TCR clone 75906 (TRAV25, TRAJ53)
CPTSNSGGSNYKLTF

SEQ ID NO: 151812 - protein, 15 aa, Homo sapiens
  CDR3 for beta chain variable domain of TCR clone 75906 (TRBV5-1, TRBJ2-3)
CASSVTSGSTDTQYF

SEQ ID NO: 151813 - protein, 14 aa, Homo sapiens
  CDR3 for alpha chain variable domain of TCR clone 75907 (TRAV27, TRAJ15)
CAGFDNQAGTALSF

SEQ ID NO: 151814 - protein, 11 aa, Homo sapiens
  CDR3 for beta chain variable domain of TCR clone 75907 (TRBV29-1, TRBJ1-1)
CSVEVGTRTFF

SEQ ID NO: 151815 - protein, 15 aa, Homo sapiens
  CDR3 for alpha chain variable domain of TCR clone 75908 (TRAV3, TRAJ22)
CAVRDRGGSARQLTF

SEQ ID NO: 151816 - protein, 13 aa, Homo sapiens
  CDR3 for beta chain variable domain of TCR clone 75908 (TRBV6-1, TRBJ1-1)
CASSRQGNTEAFF

SEQ ID NO: 151817 - protein, 14 aa, Homo sapiens
  CDR3 for alpha chain variable domain of TCR clone 75909 (TRAV12-1, TRAJ17)
CVVNYKAAGNKLTF

SEQ ID NO: 151818 - protein, 17 aa, Homo sapiens
  CDR3 for beta chain variable domain of TCR clone 75909 (TRBV20-1, TRBJ2-1)
CSARDPLAGAWDNEQFF

SEQ ID NO: 151819 - protein, 13 aa, Homo sapiens
  CDR3 for alpha chain variable domain of TCR clone 75910 (TRAV1-2, TRAJ9)
CAALNTGGFKTTF

SEQ ID NO: 151820 - protein, 13 aa, Homo sapiens
  CDR3 for beta chain variable domain of TCR clone 75910 (TRBV15, TRBJ1-6)
CATSGGLNSPLHF

SEQ ID NO: 151821 - protein, 12 aa, Homo sapiens
  CDR3 for alpha chain variable domain of TCR clone 75911 (TRAV35, TRAJ31)
CAAVSNNARLMF

SEQ ID NO: 151822 - protein, 14 aa, Homo sapiens
  CDR3 for beta chain variable domain of TCR clone 75911 (TRBV2, TRBJ2-2)
CASSLFGGNGELFF

SEQ ID NO: 151823 - protein, 10 aa, Homo sapiens
  CDR3 for alpha chain variable domain of TCR clone 75912 (TRAV8-3, TRAJ43)
CAVALADMRF

SEQ ID NO: 151824 - protein, 13 aa, Homo sapiens
  CDR3 for beta chain variable domain of TCR clone 75912 (TRBV15, TRBJ1-6)
CATSGGLNSPLHF

SEQ ID NO: 151825 - protein, 12 aa, Homo sapiens
  CDR3 for alpha chain variable domain of TCR clone 75913 (TRAV1-1, TRAJ39)
CAVPVVGNMLTF

SEQ ID NO: 151826 - protein, 15 aa, Homo sapiens
  CDR3 for beta chain variable domain of TCR clone 75913 (TRBV19, TRBJ1-6)
CASSTQGAVGSSLHF

SEQ ID NO: 151827 - protein, 14 aa, Homo sapiens
  CDR3 for alpha chain variable domain of TCR clone 75914 (TRAV1-2, TRAJ8)
CAVREDTGFQKLVF

SEQ ID NO: 151828 - protein, 13 aa, Homo sapiens
  CDR3 for beta chain variable domain of TCR clone 75914 (TRBV5-7, TRBJ2-3)
CASSLGRTDTQYF

SEQ ID NO: 151829 - protein, 15 aa, Homo sapiens
  CDR3 for alpha chain variable domain of TCR clone 75915 (TRAV2, TRAJ15)
CAVEDRGQAGTALIF

SEQ ID NO: 151830 - protein, 13 aa, Homo sapiens
  CDR3 for beta chain variable domain of TCR clone 75915 (TRBV10-3, TRBJ2-7)
CASKLAVNYEQYF

SEQ ID NO: 151831 - protein, 17 aa, Homo sapiens
  CDR3 for alpha chain variable domain of TCR clone 75916 (TRAV3, TRAJ6)
CAVRDGPRAGGSSIPTF

SEQ ID NO: 151832 - protein, 13 aa, Homo sapiens
  CDR3 for beta chain variable domain of TCR clone 75916 (TRBV27, TRBJ2-1)
CASRTLGVGEQFF

SEQ ID NO: 151833 - protein, 13 aa, Homo sapiens
  CDR3 for alpha chain variable domain of TCR clone 75917 (TRAV8-3, TRAJ28)
CAVGAVGSYQLTF

SEQ ID NO: 151834 - protein, 14 aa, Homo sapiens
  CDR3 for beta chain variable domain of TCR clone 75917 (TRBV3-1, TRBJ2-2)
CASSLPDNTGELFF

SEQ ID NO: 151835 - protein, 14 aa, Homo sapiens
  CDR3 for alpha chain variable domain of TCR clone 75918 (TRAV16, TRAJ39)
CALSKNNEGNMLTF

SEQ ID NO: 151836 - protein, 16 aa, Homo sapiens
  CDR3 for beta chain variable domain of TCR clone 75918 (TRBV6-6, TRBJ2-1)
CASSYSFSGSYNEQFF

SEQ ID NO: 151837 - protein, 14 aa, Homo sapiens
  CDR3 for alpha chain variable domain of TCR clone 75919 (TRAV8-4, TRAJ34)
LAVSDPGDTDKLIF

SEQ ID NO: 151838 - protein, 13 aa, Homo sapiens
  CDR3 for beta chain variable domain of TCR clone 75919 (TRBV7-9, TRBJ2-5)
CASLSPGQETQYF

SEQ ID NO: 151839 - protein, 15 aa, Homo sapiens
  CDR3 for alpha chain variable domain of TCR clone 75920 (TRAV17, TRAJ4)
CATGTWSGGYNKLIF

SEQ ID NO: 151840 - protein, 11 aa, Homo sapiens
  CDR3 for beta chain variable domain of TCR clone 75920 (TRBV12-4, TRBJ2-3)
CASTATDTQYF

SEQ ID NO: 151841 - protein, 18 aa, Homo sapiens
  CDR3 for alpha chain variable domain of TCR clone 75921 (TRAV13-1, TRAJ52)
CAAKNPNAGGTSYGKLTF

SEQ ID NO: 151842 - protein, 12 aa, Homo sapiens
  CDR3 for beta chain variable domain of TCR clone 75921 (TRBV14, TRBJ2-4)
CASSNLKSIQYF

SEQ ID NO: 151843 - protein, 14 aa, Homo sapiens
  CDR3 for alpha chain variable domain of TCR clone 75922 (TRAV38-1, TRAJ45)
CAYYSGGGADGLTF

SEQ ID NO: 151844 - protein, 16 aa, Homo sapiens
  CDR3 for beta chain variable domain of TCR clone 75922 (TRBV11-2, TRBJ1-2)
CASSPSGREANYGYTF

SEQ ID NO: 151845 - protein, 16 aa, Homo sapiens
  CDR3 for alpha chain variable domain of TCR clone 75923 (TRAV13-2, TRAJ32)
CAENMNYGGATNNLIF

SEQ ID NO: 151846 - protein, 14 aa, Homo sapiens
  CDR3 for beta chain variable domain of TCR clone 75923 (TRBV15, TRBJ2-5)
CATSSTGYQETQYF

SEQ ID NO: 151847 - protein, 18 aa, Homo sapiens
  CDR3 for alpha chain variable domain of TCR clone 75924 (TRAV8-4, TRAJ52)
CAVTRANAGGTSYGKLTF

SEQ ID NO: 151848 - protein, 20 aa, Homo sapiens
  CDR3 for beta chain variable domain of TCR clone 75924 (TRBV19, TRBJ2-1)
CASSISRTATSTRLNNEQFF

SEQ ID NO: 151849 - protein, 16 aa, Homo sapiens
  CDR3 for alpha chain variable domain of TCR clone 75925 (TRAV1-2, TRAJ10)
CAVRGVLTGGGNKLTF

SEQ ID NO: 151850 - protein, 16 aa, Homo sapiens
  CDR3 for beta chain variable domain of TCR clone 75925 (TRBV4-2, TRBJ2-3)
CASSQELAGDTDTQYF

SEQ ID NO: 151851 - protein, 13 aa, Homo sapiens
  CDR3 for alpha chain variable domain of TCR clone 75926 (TRAV27, TRAJ45)
CRSPGGGADGLTF

SEQ ID NO: 151852 - protein, 17 aa, Homo sapiens
  CDR3 for beta chain variable domain of TCR clone 75926 (TRBV11-2, TRBJ2-1)
CASSLYPPGVEYNEQFL

SEQ ID NO: 151853 - protein, 13 aa, Homo sapiens
  CDR3 for alpha chain variable domain of TCR clone 75927 (TRAV12-3, TRAJ13)
CAISSGGYQKVTF

SEQ ID NO: 151854 - protein, 13 aa, Homo sapiens
  CDR3 for beta chain variable domain of TCR clone 75927 (TRBV20-1, TRBJ1-1)
CSAPPGGHTEAFF

SEQ ID NO: 151855 - protein, 15 aa, Homo sapiens
  CDR3 for alpha chain variable domain of TCR clone 75928 (TRAV8-2, TRAJ24)
CVVSDRTDSWGKLQF

SEQ ID NO: 151856 - protein, 14 aa, Homo sapiens
  CDR3 for beta chain variable domain of TCR clone 75928 (TRBV11-2, TRBJ2-1)
CASSLSGPYNEQFF

SEQ ID NO: 151857 - protein, 13 aa, Homo sapiens
  CDR3 for alpha chain variable domain of TCR clone 75929 (TRAV3, TRAJ29)
CAVGDIIDTPLVF

SEQ ID NO: 151858 - protein, 14 aa, Homo sapiens
  CDR3 for beta chain variable domain of TCR clone 75929 (TRBV27, TRBJ2-1)
CASSATGGYNEQFF

SEQ ID NO: 151859 - protein, 14 aa, Homo sapiens
  CDR3 for alpha chain variable domain of TCR clone 75930 (TRAV2, TRAJ3)
CAVDRYSSASNIIF

SEQ ID NO: 151860 - protein, 16 aa, Homo sapiens
  CDR3 for beta chain variable domain of TCR clone 75930 (TRBV20-1, TRBJ1-5)
CSAELPGQQTNQPQHF

SEQ ID NO: 151861 - protein, 13 aa, Homo sapiens
  CDR3 for alpha chain variable domain of TCR clone 75931 (TRAV20, TRAJ40)
CAVPFSGTYKYIF

SEQ ID NO: 151862 - protein, 13 aa, Homo sapiens
  CDR3 for beta chain variable domain of TCR clone 75931 (TRBV15, TRBJ2-5)
CATSQIGLETQYF

SEQ ID NO: 151863 - protein, 13 aa, Homo sapiens
  CDR3 for alpha chain variable domain of TCR clone 75932 (TRAV21, TRAJ15)
CAVANQAGTALIF

SEQ ID NO: 151864 - protein, 15 aa, Homo sapiens
  CDR3 for beta chain variable domain of TCR clone 75932 (TRBV4-1, TRBJ2-1)
CASSQDPGNYNEQFF

SEQ ID NO: 151865 - protein, 16 aa, Homo sapiens
  CDR3 for alpha chain variable domain of TCR clone 75933 (TRAV3, TRAJ37)
CAVRPHGSGNTGKLIC

SEQ ID NO: 151866 - protein, 14 aa, Homo sapiens
  CDR3 for beta chain variable domain of TCR clone 75933 (TRBV25-1, TRBJ1-1)
CASTHLGGNTEAFF

SEQ ID NO: 151867 - protein, 14 aa, Homo sapiens
  CDR3 for alpha chain variable domain of TCR clone 75934 (TRAV3, TRAJ34)
CAVRAPGNTDKLIF

SEQ ID NO: 151868 - protein, 12 aa, Homo sapiens
  CDR3 for beta chain variable domain of TCR clone 75934 (TRBV6-1, TRBJ2-1)
CATYGLNNEQFF

SEQ ID NO: 151869 - protein, 15 aa, Homo sapiens
  CDR3 for alpha chain variable domain of TCR clone 75935 (TRAV3, TRAJ4)
CAARDGTGGYNKLIF

SEQ ID NO: 151870 - protein, 13 aa, Homo sapiens
  CDR3 for beta chain variable domain of TCR clone 75935 (TRBV12-5, TRBJ1-2)
CASGVRTGNGYTF

SEQ ID NO: 151871 - protein, 15 aa, Homo sapiens
  CDR3 for alpha chain variable domain of TCR clone 75936 (TRAV21, TRAJ56)
CAVTKYTGVNSKLTF

SEQ ID NO: 151872 - protein, 14 aa, Homo sapiens
  CDR3 for beta chain variable domain of TCR clone 75936 (TRBV20-1, TRBJ2-3)
CSARVRGSTDTQYF

SEQ ID NO: 151873 - protein, 11 aa, Homo sapiens
  CDR3 for alpha chain variable domain of TCR clone 75937 (TRAV12-1, TRAJ8)
CVVTGFQKLVF

SEQ ID NO: 151874 - protein, 14 aa, Homo sapiens
  CDR3 for beta chain variable domain of TCR clone 75937 (TRBV19, TRBJ2-1)
CASGKPTQYNEQFS

SEQ ID NO: 151875 - protein, 11 aa, Homo sapiens
  CDR3 for alpha chain variable domain of TCR clone 75938 (TRAV3, TRAJ32)
CAVSPKGMVVL

SEQ ID NO: 151876 - protein, 15 aa, Homo sapiens
  CDR3 for beta chain variable domain of TCR clone 75938 (TRBV24-1, TRBJ2-4)
CATSDPRDRANIQYF

SEQ ID NO: 151877 - protein, 12 aa, Homo sapiens
  CDR3 for alpha chain variable domain of TCR clone 75939 (TRAV13-1, TRAJ21)
CAAKEGFNKFYF

SEQ ID NO: 151878 - protein, 14 aa, Homo sapiens
  CDR3 for beta chain variable domain of TCR clone 75939 (TRBV5-4, TRBJ1-1)
CASSLDSRRDEDLF

SEQ ID NO: 151879 - protein, 14 aa, Homo sapiens
  CDR3 for alpha chain variable domain of TCR clone 75940 (TRAV9-2, TRAJ39)
CALYIYNAGKMLTF

SEQ ID NO: 151880 - protein, 14 aa, Homo sapiens
  CDR3 for beta chain variable domain of TCR clone 75940 (TRBV12-5, TRBJ2-5)
CASGSRTHQETQYF

SEQ ID NO: 151881 - protein, 13 aa, Homo sapiens
  CDR3 for alpha chain variable domain of TCR clone 75941 (TRAV2, TRAJ40)
CAVVTSGTYKYIV

SEQ ID NO: 151882 - protein, 15 aa, Homo sapiens
  CDR3 for beta chain variable domain of TCR clone 75941 (TRBV11-3, TRBJ2-3)
CASLKDGREGDTQYF

SEQ ID NO: 151883 - protein, 12 aa, Homo sapiens
  CDR3 for alpha chain variable domain of TCR clone 75942 (TRAV13-1, TRAJ27)
CAAHTNAGKSTF

SEQ ID NO: 151884 - protein, 16 aa, Homo sapiens
  CDR3 for beta chain variable domain of TCR clone 75942 (TRBV19, TRBJ2-1)
CASSKAGPSSYNEQFF

SEQ ID NO: 151885 - protein, 11 aa, Homo sapiens
  CDR3 for alpha chain variable domain of TCR clone 75943 (TRAV26-1, TRAJ37)
CIVRVGRKLIF

SEQ ID NO: 151886 - protein, 18 aa, Homo sapiens
  CDR3 for beta chain variable domain of TCR clone 75943 (TRBV11-2, TRBJ2-3)
CASSLGGASRGAPNTQYF

SEQ ID NO: 151887 - protein, 11 aa, Homo sapiens
  CDR3 for alpha chain variable domain of TCR clone 75944 (TRAV1-2, TRAJ40)
CAVPGTYKYIF

SEQ ID NO: 151888 - protein, 16 aa, Homo sapiens
  CDR3 for beta chain variable domain of TCR clone 75944 (TRBV4-1, TRBJ1-1)
CASSSMSERPNTEAFF

SEQ ID NO: 151889 - protein, 14 aa, Homo sapiens
  CDR3 for alpha chain variable domain of TCR clone 75945 (TRAV8-4, TRAJ9)
CAVRINTGGFKTIF

SEQ ID NO: 151890 - protein, 14 aa, Homo sapiens
  CDR3 for beta chain variable domain of TCR clone 75945 (TRBV15, TRBJ2-3)
CATRSGTSTDTQYF

SEQ ID NO: 151891 - protein, 18 aa, Homo sapiens
  CDR3 for alpha chain variable domain of TCR clone 75946 (TRAV26-1, TRAJ23)
CIVRVGLEVWNQGGKLIF

SEQ ID NO: 151892 - protein, 16 aa, Homo sapiens
  CDR3 for beta chain variable domain of TCR clone 75946 (TRBV12-4, TRBJ2-5)
FASSFFVRGRQETQYF

SEQ ID NO: 151893 - protein, 13 aa, Homo sapiens
  CDR3 for alpha chain variable domain of TCR clone 75947 (TRAV17, TRAJ39)
CATDYGAGNMLTF

SEQ ID NO: 151894 - protein, 12 aa, Homo sapiens
  CDR3 for beta chain variable domain of TCR clone 75947 (TRBV11-2, TRBJ2-2)
CASSLGGGELFF

SEQ ID NO: 151895 - protein, 11 aa, Homo sapiens
  CDR3 for alpha chain variable domain of TCR clone 75948 (TRAV13-1, TRAJ8)
CAARGFQKLVF

SEQ ID NO: 151896 - protein, 16 aa, Homo sapiens
  CDR3 for beta chain variable domain of TCR clone 75948 (TRBV19, TRBJ1-5)
CASSTRGTRSNQTQHF

SEQ ID NO: 151897 - protein, 11 aa, Homo sapiens
  CDR3 for alpha chain variable domain of TCR clone 75949 (TRAV2, TRAJ33)
CAVESNYQLIW

SEQ ID NO: 151898 - protein, 16 aa, Homo sapiens
  CDR3 for beta chain variable domain of TCR clone 75949 (TRBV20-1, TRBJ2-7)
CSARGDLGQAAYEQYF

SEQ ID NO: 151899 - protein, 15 aa, Homo sapiens
  CDR3 for alpha chain variable domain of TCR clone 75950 (TRAV2, TRAJ15)
CAVEDRGQAGTALIF

SEQ ID NO: 151900 - protein, 13 aa, Homo sapiens
  CDR3 for beta chain variable domain of TCR clone 75950 (TRBV10-2, TRBJ2-7)
CASGASGGYEHYF

SEQ ID NO: 151901 - protein, 15 aa, Homo sapiens
  CDR3 for alpha chain variable domain of TCR clone 75951 (TRAV4, TRAJ39)
CLVGPNNNAGNMLTF

SEQ ID NO: 151902 - protein, 13 aa, Homo sapiens
  CDR3 for beta chain variable domain of TCR clone 75951 (TRBV11-2, TRBJ2-5)
CASSSTGEETQYV

SEQ ID NO: 151903 - protein, 14 aa, Homo sapiens
  CDR3 for alpha chain variable domain of TCR clone 75952 (TRAV1-2, TRAJ8)
CAVREDTGFQKLVF

SEQ ID NO: 151904 - protein, 14 aa, Homo sapiens
  CDR3 for beta chain variable domain of TCR clone 75952 (TRBV7-9, TRBJ1-1)
CASTPLQSYTEAFL

SEQ ID NO: 151905 - protein, 17 aa, Homo sapiens
  CDR3 for alpha chain variable domain of TCR clone 75953 (TRAV21, TRAJ52)
CAVGANAGGTSYGKLTF

SEQ ID NO: 151906 - protein, 13 aa, Homo sapiens
  CDR3 for beta chain variable domain of TCR clone 75953 (TRBV5-1, TRBJ1-2)
CASSLQGNYGYAF

SEQ ID NO: 151907 - protein, 14 aa, Homo sapiens
  CDR3 for alpha chain variable domain of TCR clone 75954 (TRAV1-2, TRAJ16)
CAVNRFSDGQKLLF

SEQ ID NO: 151908 - protein, 15 aa, Homo sapiens
  CDR3 for beta chain variable domain of TCR clone 75954 (TRBV29-1, TRBJ2-7)
CSVEFFDRGSYEQYF

SEQ ID NO: 151909 - protein, 15 aa, Homo sapiens
  CDR3 for alpha chain variable domain of TCR clone 75955 (TRAV8-4, TRAJ13)
CAVSDWSGGYQKVTF

SEQ ID NO: 151910 - protein, 16 aa, Homo sapiens
  CDR3 for beta chain variable domain of TCR clone 75955 (TRBV19, TRBJ2-5)
CASSIGTSGSQETQYF

SEQ ID NO: 151911 - protein, 14 aa, Homo sapiens
  CDR3 for alpha chain variable domain of TCR clone 75956 (TRAV1-2, TRAJ8)
CAVREDTGFQKLVF

SEQ ID NO: 151912 - protein, 16 aa, Homo sapiens
  CDR3 for beta chain variable domain of TCR clone 75956 (TRBV29-1, TRBJ2-6)
CSVENITYSGANVLTF

SEQ ID NO: 151913 - protein, 12 aa, Homo sapiens
  CDR3 for alpha chain variable domain of TCR clone 75957 (TRAV3, TRAJ31)
CAVRDGNARLMF

SEQ ID NO: 151914 - protein, 13 aa, Homo sapiens
  CDR3 for beta chain variable domain of TCR clone 75957 (TRBV24-1, TRBJ2-2)
CATSDWSTGELFF

SEQ ID NO: 151915 - protein, 12 aa, Homo sapiens
  CDR3 for alpha chain variable domain of TCR clone 75958 (TRAV22, TRAJ29)
CAPPSGNTPLVF

SEQ ID NO: 151916 - protein, 14 aa, Homo sapiens
  CDR3 for beta chain variable domain of TCR clone 75958 (TRBV11-2, TRBJ2-7)
CASSLGAGAYELYF

SEQ ID NO: 151917 - protein, 11 aa, Homo sapiens
  CDR3 for alpha chain variable domain of TCR clone 75959 (TRAV21, TRAJ34)
CAHYNTDKLIF

SEQ ID NO: 151918 - protein, 13 aa, Homo sapiens
  CDR3 for beta chain variable domain of TCR clone 75959 (TRBV7-6, TRBJ1-2)
CASTLVADYGYTF

SEQ ID NO: 151919 - protein, 14 aa, Homo sapiens
  CDR3 for alpha chain variable domain of TCR clone 75960 (TRAV2, TRAJ9)
CAVKDRSGGFKTIF

SEQ ID NO: 151920 - protein, 16 aa, Homo sapiens
  CDR3 for beta chain variable domain of TCR clone 75960 (TRBV7-9, TRBJ1-2)
CASSLGFSSGEDGYTF

SEQ ID NO: 151921 - protein, 16 aa, Homo sapiens
  CDR3 for alpha chain variable domain of TCR clone 75961 (TRAV4, TRAJ42)
CLVGPIYGGSQGNLIF

SEQ ID NO: 151922 - protein, 20 aa, Homo sapiens
  CDR3 for beta chain variable domain of TCR clone 75961 (TRBV7-8, TRBJ2-2)
CASSHLFPGPTIHITGELFF

SEQ ID NO: 151923 - protein, 14 aa, Homo sapiens
  CDR3 for alpha chain variable domain of TCR clone 75962 (TRAV35, TRAJ50)
CAGQLRKTSYKVIF

SEQ ID NO: 151924 - protein, 12 aa, Homo sapiens
  CDR3 for beta chain variable domain of TCR clone 75962 (TRBV5-1, TRBJ2-5)
CASSLGLETQYF

SEQ ID NO: 151925 - protein, 16 aa, Homo sapiens
  CDR3 for alpha chain variable domain of TCR clone 75963 (TRAV17, TRAJ28)
CATASVSGAGSYQLTF

SEQ ID NO: 151926 - protein, 14 aa, Homo sapiens
  CDR3 for beta chain variable domain of TCR clone 75963 (TRBV19, TRBJ2-1)
CASEVKGARNEQFF

SEQ ID NO: 151927 - protein, 12 aa, Homo sapiens
  CDR3 for alpha chain variable domain of TCR clone 75964 (TRAV3, TRAJ43)
CAVRDPNNDMRV

SEQ ID NO: 151928 - protein, 17 aa, Homo sapiens
  CDR3 for beta chain variable domain of TCR clone 75964 (TRBV7-8, TRBJ2-6)
CASSAGTGGAGANVLTF

SEQ ID NO: 151929 - protein, 14 aa, Homo sapiens
  CDR3 for alpha chain variable domain of TCR clone 75965 (TRAV1-2, TRAJ16)
CAVNRFSDGQKLLF

SEQ ID NO: 151930 - protein, 17 aa, Homo sapiens
  CDR3 for beta chain variable domain of TCR clone 75965 (TRBV25-1, TRBJ2-3)
CASSGYGGGGNTDTQYF

SEQ ID NO: 151931 - protein, 10 aa, Homo sapiens
  CDR3 for alpha chain variable domain of TCR clone 75966 (TRAV2, TRAJ34)
CAVVNDKLIF

SEQ ID NO: 151932 - protein, 15 aa, Homo sapiens
  CDR3 for beta chain variable domain of TCR clone 75966 (TRBV7-2, TRBJ2-2)
CASRRPGQNTGELFF

SEQ ID NO: 151933 - protein, 18 aa, Homo sapiens
  CDR3 for alpha chain variable domain of TCR clone 75967 (TRAV12-3, TRAJ52)
CAMSVGGAGGTSYGKPTF

SEQ ID NO: 151934 - protein, 14 aa, Homo sapiens
  CDR3 for beta chain variable domain of TCR clone 75967 (TRBV7-2, TRBJ2-7)
CASRSQGAAYEQYF

SEQ ID NO: 151935 - protein, 14 aa, Homo sapiens
  CDR3 for alpha chain variable domain of TCR clone 75968 (TRAV21, TRAJ58)
CAVRRGRSGSRLTF

SEQ ID NO: 151936 - protein, 13 aa, Homo sapiens
  CDR3 for beta chain variable domain of TCR clone 75968 (TRBV7-2, TRBJ1-6)
CASSLKFDLPLHF

SEQ ID NO: 151937 - protein, 13 aa, Homo sapiens
  CDR3 for alpha chain variable domain of TCR clone 75969 (TRAV26-1, TRAJ34)
CIVRTWITDKLIF

SEQ ID NO: 151938 - protein, 14 aa, Homo sapiens
  CDR3 for beta chain variable domain of TCR clone 75969 (TRBV12-4, TRBJ1-4)
CASSRQGANEKLFF

SEQ ID NO: 151939 - protein, 14 aa, Homo sapiens
  CDR3 for alpha chain variable domain of TCR clone 75970 (TRAV35, TRAJ33)
CAGSSQDSNYQLIW

SEQ ID NO: 151940 - protein, 13 aa, Homo sapiens
  CDR3 for beta chain variable domain of TCR clone 75970 (TRBV10-3, TRBJ2-7)
CASKLAVNYEQYF

SEQ ID NO: 151941 - protein, 11 aa, Homo sapiens
  CDR3 for alpha chain variable domain of TCR clone 75971 (TRAV21, TRAJ34)
CAVTNTDKLIF

SEQ ID NO: 151942 - protein, 14 aa, Homo sapiens
  CDR3 for beta chain variable domain of TCR clone 75971 (TRBV20-1, TRBJ2-7)
CSAPELAGVGEQYF

SEQ ID NO: 151943 - protein, 12 aa, Homo sapiens
  CDR3 for alpha chain variable domain of TCR clone 75972 (TRAV3, TRAJ20)
CAVRDPDYKLSF

SEQ ID NO: 151944 - protein, 15 aa, Homo sapiens
  CDR3 for beta chain variable domain of TCR clone 75972 (TRBV27, TRBJ2-1)
CASSNGGGSSNEQFF

SEQ ID NO: 151945 - protein, 14 aa, Homo sapiens
  CDR3 for alpha chain variable domain of TCR clone 75973 (TRAV13-1, TRAJ40)
CAASMTSGTYKYIF

SEQ ID NO: 151946 - protein, 15 aa, Homo sapiens
  CDR3 for beta chain variable domain of TCR clone 75973 (TRBV7-3, TRBJ2-1)
CASSPKGGGEVEQFF

SEQ ID NO: 151947 - protein, 12 aa, Homo sapiens
  CDR3 for alpha chain variable domain of TCR clone 75974 (TRAV1-1, TRAJ30)
CAVRGRDDKIIF

SEQ ID NO: 151948 - protein, 14 aa, Homo sapiens
  CDR3 for beta chain variable domain of TCR clone 75974 (TRBV4-2, TRBJ2-1)
CASGLDRAYNEQFF

SEQ ID NO: 151949 - protein, 16 aa, Homo sapiens
  CDR3 for alpha chain variable domain of TCR clone 75975 (TRAV13-2, TRAJ32)
CAENMNYGGATNKLIF

SEQ ID NO: 151950 - protein, 14 aa, Homo sapiens
  CDR3 for beta chain variable domain of TCR clone 75975 (TRBV2, TRBJ2-7)
CASSLTSGGYEQYF

SEQ ID NO: 151951 - protein, 16 aa, Homo sapiens
  CDR3 for alpha chain variable domain of TCR clone 75976 (TRAV14/DV4, TRAJ53)
CAMREGGGGSNYKLTF

SEQ ID NO: 151952 - protein, 11 aa, Homo sapiens
  CDR3 for beta chain variable domain of TCR clone 75976 (TRBV19, TRBJ2-4)
CASSNKNIQYF

SEQ ID NO: 151953 - protein, 21 aa, Homo sapiens
  CDR3 for alpha chain variable domain of TCR clone 75977 (TRAV13-1, TRAJ37)
CAATPKGIKHRQTNLWARDNF

SEQ ID NO: 151954 - protein, 13 aa, Homo sapiens
  CDR3 for beta chain variable domain of TCR clone 75977 (TRBV20-1, TRBJ2-7)
CSATSEDSYEQYF

SEQ ID NO: 151955 - protein, 14 aa, Homo sapiens
  CDR3 for alpha chain variable domain of TCR clone 75978 (TRAV1-2, TRAJ8)
CAVREDTGFQKLVF

SEQ ID NO: 151956 - protein, 12 aa, Homo sapiens
  CDR3 for beta chain variable domain of TCR clone 75978 (TRBV7-9, TRBJ2-7)
CASSIKREEQYF

SEQ ID NO: 151957 - protein, 16 aa, Homo sapiens
  CDR3 for alpha chain variable domain of TCR clone 75979 (TRAV3, TRAJ37)
CAVRPHVSGNTGKLIF

SEQ ID NO: 151958 - protein, 14 aa, Homo sapiens
  CDR3 for beta chain variable domain of TCR clone 75979 (TRBV2, TRBJ2-1)
CASSDRAYYNEQFF

SEQ ID NO: 151959 - protein, 17 aa, Homo sapiens
  CDR3 for alpha chain variable domain of TCR clone 75980 (TRAV8-6, TRAJ58)
CAVSSWVGETSGSRLTF

SEQ ID NO: 151960 - protein, 16 aa, Homo sapiens
  CDR3 for beta chain variable domain of TCR clone 75980 (TRBV29-1, TRBJ2-7)
CSVEDAEDGTAYEQYF

SEQ ID NO: 151961 - protein, 13 aa, Homo sapiens
  CDR3 for alpha chain variable domain of TCR clone 75981 (TRAV2, TRAJ40)
CAVVTSGTYKYIF

SEQ ID NO: 151962 - protein, 15 aa, Homo sapiens
  CDR3 for beta chain variable domain of TCR clone 75981 (TRBV20-1, TRBJ2-7)
CSARGPLAGGREQYF

SEQ ID NO: 151963 - protein, 15 aa, Homo sapiens
  CDR3 for alpha chain variable domain of TCR clone 75982 (TRAV12-2, TRAJ53)
CAVNGEGGSNYKLTF

SEQ ID NO: 151964 - protein, 15 aa, Homo sapiens
  CDR3 for beta chain variable domain of TCR clone 75982 (TRBV2, TRBJ2-7)
CASSEGLARSYEQYF

SEQ ID NO: 151965 - protein, 17 aa, Homo sapiens
  CDR3 for alpha chain variable domain of TCR clone 75983 (TRAV27, TRAJ18)
CAGPHRGRGSTLGRLYF

SEQ ID NO: 151966 - protein, 14 aa, Homo sapiens
  CDR3 for beta chain variable domain of TCR clone 75983 (TRBV20-1, TRBJ1-5)
CSARGRGSNQPQHF

SEQ ID NO: 151967 - protein, 14 aa, Homo sapiens
  CDR3 for alpha chain variable domain of TCR clone 75984 (TRAV12-3, TRAJ10)
SHLPLTGGGNKLTF

SEQ ID NO: 151968 - protein, 16 aa, Homo sapiens
  CDR3 for beta chain variable domain of TCR clone 75984 (TRBV5-4, TRBJ2-3)
CASQQPGAGGADTQYF

SEQ ID NO: 151969 - protein, 14 aa, Homo sapiens
  CDR3 for alpha chain variable domain of TCR clone 75985 (TRAV1-2, TRAJ16)
CAVNRFSDGQKLLF

SEQ ID NO: 151970 - protein, 13 aa, Homo sapiens
  CDR3 for beta chain variable domain of TCR clone 75985 (TRBV20-1, TRBJ1-2)
CSARGTADYGYTF

SEQ ID NO: 151971 - protein, 13 aa, Homo sapiens
  CDR3 for alpha chain variable domain of TCR clone 75986 (TRAV1-1, TRAJ9)
CAAKNTGGFKTIF

SEQ ID NO: 151972 - protein, 14 aa, Homo sapiens
  CDR3 for beta chain variable domain of TCR clone 75986 (TRBV20-1, TRBJ2-1)
CSAQIGGSANEQYF

SEQ ID NO: 151973 - protein, 14 aa, Homo sapiens
  CDR3 for alpha chain variable domain of TCR clone 75987 (TRAV16, TRAJ54)
CSLSLIQGAQKLVS

SEQ ID NO: 151974 - protein, 15 aa, Homo sapiens
  CDR3 for beta chain variable domain of TCR clone 75987 (TRBV20-1, TRBJ2-7)
CSARDRVSGMDEQYF

SEQ ID NO: 151975 - protein, 11 aa, Homo sapiens
  CDR3 for alpha chain variable domain of TCR clone 75988 (TRAV12-1, TRAJ21)
CVGYNFNKFYF

SEQ ID NO: 151976 - protein, 14 aa, Homo sapiens
  CDR3 for beta chain variable domain of TCR clone 75988 (TRBV19, TRBJ2-7)
CASSMGQGAIEQYF

SEQ ID NO: 151977 - protein, 14 aa, Homo sapiens
  CDR3 for alpha chain variable domain of TCR clone 75989 (TRAV12-3, TRAJ10)
SHLPLTGGGNKLTF

SEQ ID NO: 151978 - protein, 18 aa, Homo sapiens
  CDR3 for beta chain variable domain of TCR clone 75989 (TRBV7-9, TRBJ2-1)
CASSLAVSGTSGRNEQFF

SEQ ID NO: 151979 - protein, 13 aa, Homo sapiens
  CDR3 for alpha chain variable domain of TCR clone 75990 (TRAV12-2, TRAJ49)
CAVNMRTSNQFYF

SEQ ID NO: 151980 - protein, 11 aa, Homo sapiens
  CDR3 for beta chain variable domain of TCR clone 75990 (TRBV5-5, TRBJ1-1)
CASSLGVEAFF

SEQ ID NO: 151981 - protein, 18 aa, Homo sapiens
  CDR3 for alpha chain variable domain of TCR clone 75991 (TRAV9-2, TRAJ52)
YALSRHNAGGTSYGKLTF

SEQ ID NO: 151982 - protein, 13 aa, Homo sapiens
  CDR3 for beta chain variable domain of TCR clone 75991 (TRBV7-9, TRBJ1-2)
CASSLKQNYGYTF

SEQ ID NO: 151983 - protein, 11 aa, Homo sapiens
  CDR3 for alpha chain variable domain of TCR clone 75992 (TRAV2, TRAJ23)
CAVETRGKLIF

SEQ ID NO: 151984 - protein, 14 aa, Homo sapiens
  CDR3 for beta chain variable domain of TCR clone 75992 (TRBV2, TRBJ2-3)
CASSEGQNTDTQCF

SEQ ID NO: 151985 - protein, 14 aa, Homo sapiens
  CDR3 for alpha chain variable domain of TCR clone 75993 (TRAV17, TRAJ6)
CATDASGGSYIPTF

SEQ ID NO: 151986 - protein, 14 aa, Homo sapiens
  CDR3 for beta chain variable domain of TCR clone 75993 (TRBV19, TRBJ1-5)
CASGTEVYNQPQHF

SEQ ID NO: 151987 - protein, 14 aa, Homo sapiens
  CDR3 for alpha chain variable domain of TCR clone 75994 (TRAV12-1, TRAJ26)
CAVKGSNYGQNFVF

SEQ ID NO: 151988 - protein, 15 aa, Homo sapiens
  CDR3 for beta chain variable domain of TCR clone 75994 (TRBV10-2, TRBJ2-6)
CASSEQGTGANVLTF

SEQ ID NO: 151989 - protein, 15 aa, Homo sapiens
  CDR3 for alpha chain variable domain of TCR clone 75995 (TRAV8-4, TRAJ7)
CAVSGGNYGNNRLAF

SEQ ID NO: 151990 - protein, 11 aa, Homo sapiens
  CDR3 for beta chain variable domain of TCR clone 75995 (TRBV20-1, TRBJ2-1)
CSLSSGSEQLF

SEQ ID NO: 151991 - protein, 14 aa, Homo sapiens
  CDR3 for alpha chain variable domain of TCR clone 75996 (TRAV17, TRAJ57)
CATDPQGGPEKLVF

SEQ ID NO: 151992 - protein, 15 aa, Homo sapiens
  CDR3 for beta chain variable domain of TCR clone 75996 (TRBV5-1, TRBJ2-7)
CASSLDLTSSYEQYF

SEQ ID NO: 151993 - protein, 13 aa, Homo sapiens
  CDR3 for alpha chain variable domain of TCR clone 75997 (TRAV23/DV6, TRAJ16)
CAASISDGKKLLF

SEQ ID NO: 151994 - protein, 15 aa, Homo sapiens
  CDR3 for beta chain variable domain of TCR clone 75997 (TRBV2, TRBJ2-2)
CASSRETVGTGELFF

SEQ ID NO: 151995 - protein, 14 aa, Homo sapiens
  CDR3 for alpha chain variable domain of TCR clone 75998 (TRAV16, TRAJ33)
CALSALDSNYQLIW

SEQ ID NO: 151996 - protein, 12 aa, Homo sapiens
  CDR3 for beta chain variable domain of TCR clone 75998 (TRBV5-1, TRBJ1-2)
CASSQDTYGYTF

SEQ ID NO: 151997 - protein, 14 aa, Homo sapiens
  CDR3 for alpha chain variable domain of TCR clone 75999 (TRAV17, TRAJ42)
CATSPPGSQGNLIF

SEQ ID NO: 151998 - protein, 17 aa, Homo sapiens
  CDR3 for beta chain variable domain of TCR clone 75999 (TRBV7-8, TRBJ2-6)
CASSAGTGGAGANVLTF

SEQ ID NO: 151999 - protein, 14 aa, Homo sapiens
  CDR3 for alpha chain variable domain of TCR clone 76000 (TRAV12-3, TRAJ33)
CAMSVPGSNYQLIW

SEQ ID NO: 152000 - protein, 14 aa, Homo sapiens
  CDR3 for beta chain variable domain of TCR clone 76000 (TRBV20-1, TRBJ2-3)
CSARGGTSTDTQYF

SEQ ID NO: 152001 - protein, 12 aa, Homo sapiens
  CDR3 for alpha chain variable domain of TCR clone 76001 (TRAV1-1, TRAJ39)
CAVPVVGNMLTF

SEQ ID NO: 152002 - protein, 15 aa, Homo sapiens
  CDR3 for beta chain variable domain of TCR clone 76001 (TRBV19, TRBJ1-6)
CASSTQGAVGPPLHF

SEQ ID NO: 152003 - protein, 12 aa, Homo sapiens
  CDR3 for alpha chain variable domain of TCR clone 76002 (TRAV12-3, TRAJ17)
CAMTLTGNKLNF

SEQ ID NO: 152004 - protein, 12 aa, Homo sapiens
  CDR3 for beta chain variable domain of TCR clone 76002 (TRBV11-2, TRBJ2-7)
CASSLPTYEQYF

SEQ ID NO: 152005 - protein, 13 aa, Homo sapiens
  CDR3 for alpha chain variable domain of TCR clone 76003 (TRAV8-3, TRAJ48)
CSVVPFGNEKLTF

SEQ ID NO: 152006 - protein, 14 aa, Homo sapiens
  CDR3 for beta chain variable domain of TCR clone 76003 (TRBV18, TRBJ2-7)
CASSPRGGAYEQYF

SEQ ID NO: 152007 - protein, 13 aa, Homo sapiens
  CDR3 for alpha chain variable domain of TCR clone 76004 (TRAV21, TRAJ47)
CAVSGLYGNKLVL

SEQ ID NO: 152008 - protein, 17 aa, Homo sapiens
  CDR3 for beta chain variable domain of TCR clone 76004 (TRBV15, TRBJ2-3)
CATSGTTSEEGTDTQYF

SEQ ID NO: 152009 - protein, 18 aa, Homo sapiens
  CDR3 for alpha chain variable domain of TCR clone 76005 (TRAV12-2, TRAJ32)
CAVNLGQGGATNKLILEL

SEQ ID NO: 152010 - protein, 15 aa, Homo sapiens
  CDR3 for beta chain variable domain of TCR clone 76005 (TRBV20-1, TRBJ2-7)
CSARGPLAGGREQYF

SEQ ID NO: 152011 - protein, 14 aa, Homo sapiens
  CDR3 for alpha chain variable domain of TCR clone 76006 (TRAV12-1, TRAJ3)
CGAARYSSASKIIF

SEQ ID NO: 152012 - protein, 15 aa, Homo sapiens
  CDR3 for beta chain variable domain of TCR clone 76006 (TRBV7-2, TRBJ2-6)
CASSREGSGANVLSF

SEQ ID NO: 152013 - protein, 10 aa, Homo sapiens
  CDR3 for alpha chain variable domain of TCR clone 76007 (TRAV23/DV6, TRAJ57)
CAASSTLSQG

SEQ ID NO: 152014 - protein, 16 aa, Homo sapiens
  CDR3 for beta chain variable domain of TCR clone 76007 (TRBV25-1, TRBJ1-1)
CASTHLGGNTEAFLDK

SEQ ID NO: 152015 - protein, 14 aa, Homo sapiens
  CDR3 for alpha chain variable domain of TCR clone 76008 (TRAV1-2, TRAJ16)
CAVNRFSDGQKLLF

SEQ ID NO: 152016 - protein, 19 aa, Homo sapiens
  CDR3 for beta chain variable domain of TCR clone 76008 (TRBV28, TRBJ2-4)
CASSFQPGGPAHSKNIQYF

SEQ ID NO: 152017 - protein, 14 aa, Homo sapiens
  CDR3 for alpha chain variable domain of TCR clone 76009 (TRAV9-2, TRAJ39)
CALYIYNAGNMLTF

SEQ ID NO: 152018 - protein, 13 aa, Homo sapiens
  CDR3 for beta chain variable domain of TCR clone 76009 (TRBV7-9, TRBJ1-4)
CASSLPGIEKLFF

SEQ ID NO: 152019 - protein, 14 aa, Homo sapiens
  CDR3 for alpha chain variable domain of TCR clone 76010 (TRAV38-1, TRAJ27)
CAFTHNTNAGKSTF

SEQ ID NO: 152020 - protein, 12 aa, Homo sapiens
  CDR3 for beta chain variable domain of TCR clone 76010 (TRBV7-8, TRBJ2-7)
CASSLGDREQYF

SEQ ID NO: 152021 - protein, 14 aa, Homo sapiens
  CDR3 for alpha chain variable domain of TCR clone 76011 (TRAV1-2, TRAJ16)
CAVNRFSDGQKLLF

SEQ ID NO: 152022 - protein, 15 aa, Homo sapiens
  CDR3 for beta chain variable domain of TCR clone 76011 (TRBV2, TRBJ2-7)
CASTLLGSGATEQYF

SEQ ID NO: 152023 - protein, 15 aa, Homo sapiens
  CDR3 for alpha chain variable domain of TCR clone 76012 (TRAV26-1, TRAJ48)
CIARWSWFGNEKLTF

SEQ ID NO: 152024 - protein, 12 aa, Homo sapiens
  CDR3 for beta chain variable domain of TCR clone 76012 (TRBV19, TRBJ2-5)
CASSISEEAQYF

SEQ ID NO: 152025 - protein, 12 aa, Homo sapiens
  CDR3 for alpha chain variable domain of TCR clone 76013 (TRAV8-3, TRAJ26)
CAGDNYGQNFVF

SEQ ID NO: 152026 - protein, 15 aa, Homo sapiens
  CDR3 for beta chain variable domain of TCR clone 76013 (TRBV7-8, TRBJ2-3)
CASSLMSGNTDTQYF

SEQ ID NO: 152027 - protein, 15 aa, Homo sapiens
  CDR3 for alpha chain variable domain of TCR clone 76014 (TRAV12-2, TRAJ53)
CAVNGGGGSKYKLTF

SEQ ID NO: 152028 - protein, 13 aa, Homo sapiens
  CDR3 for beta chain variable domain of TCR clone 76014 (TRBV3-1, TRBJ1-1)
CASSPGVITEAFF

SEQ ID NO: 152029 - protein, 14 aa, Homo sapiens
  CDR3 for alpha chain variable domain of TCR clone 76015 (TRAV21, TRAJ22)
CAVLFSGSARQLTF

SEQ ID NO: 152030 - protein, 14 aa, Homo sapiens
  CDR3 for beta chain variable domain of TCR clone 76015 (TRBV19, TRBJ1-1)
CASSIREMNTEAFF

SEQ ID NO: 152031 - protein, 13 aa, Homo sapiens
  CDR3 for alpha chain variable domain of TCR clone 76016 (TRAV12-1, TRAJ29)
CVVKGSGNTPLVF

SEQ ID NO: 152032 - protein, 15 aa, Homo sapiens
  CDR3 for beta chain variable domain of TCR clone 76016 (TRBV7-2, TRBJ2-1)
CASTHGTGIYNEQFF

SEQ ID NO: 152033 - protein, 13 aa, Homo sapiens
  CDR3 for alpha chain variable domain of TCR clone 76017 (TRAV13-1, TRAJ5)
CAARVTGRRALTF

SEQ ID NO: 152034 - protein, 15 aa, Homo sapiens
  CDR3 for beta chain variable domain of TCR clone 76017 (TRBV7-9, TRBJ1-6)
CASSSPGRGNSPLHF

SEQ ID NO: 152035 - protein, 14 aa, Homo sapiens
  CDR3 for alpha chain variable domain of TCR clone 76018 (TRAV3, TRAJ9)
CAGRLNTGGFKTIF

SEQ ID NO: 152036 - protein, 15 aa, Homo sapiens
  CDR3 for beta chain variable domain of TCR clone 76018 (TRBV7-2, TRBJ2-1)
CASSLASGRVNEQFF

SEQ ID NO: 152037 - protein, 14 aa, Homo sapiens
  CDR3 for alpha chain variable domain of TCR clone 76019 (TRAV1-2, TRAJ8)
CAVREDTGFQKLVF

SEQ ID NO: 152038 - protein, 14 aa, Homo sapiens
  CDR3 for beta chain variable domain of TCR clone 76019 (TRBV20-1, TRBJ1-1)
CSARTRIGGTEAFF

SEQ ID NO: 152039 - protein, 13 aa, Homo sapiens
  CDR3 for alpha chain variable domain of TCR clone 76020 (TRAV13-2, TRAJ48)
CAEMDFGNEKLTF

SEQ ID NO: 152040 - protein, 15 aa, Homo sapiens
  CDR3 for beta chain variable domain of TCR clone 76020 (TRBV7-9, TRBJ1-6)
YASSSPGRGNSPLHF

SEQ ID NO: 152041 - protein, 14 aa, Homo sapiens
  CDR3 for alpha chain variable domain of TCR clone 76021 (TRAV12-1, TRAJ15)
CLPPANQAGTALIF

SEQ ID NO: 152042 - protein, 15 aa, Homo sapiens
  CDR3 for beta chain variable domain of TCR clone 76021 (TRBV7-9, TRBJ1-6)
CASSSPGRGNSPLHF

SEQ ID NO: 152043 - protein, 15 aa, Homo sapiens
  CDR3 for alpha chain variable domain of TCR clone 76022 (TRAV26-2, TRAJ45)
CILRDRVDQEEVLTD

SEQ ID NO: 152044 - protein, 15 aa, Homo sapiens
  CDR3 for beta chain variable domain of TCR clone 76022 (TRBV7-6, TRBJ2-5)
CASSKPTGPQETQYS

SEQ ID NO: 152045 - protein, 14 aa, Homo sapiens
  CDR3 for alpha chain variable domain of TCR clone 76023 (TRAV1-2, TRAJ16)
CAVNRFSDGQKLLF

SEQ ID NO: 152046 - protein, 14 aa, Homo sapiens
  CDR3 for beta chain variable domain of TCR clone 76023 (TRBV7-3, TRBJ2-1)
RASSLAGGTNEQFF

SEQ ID NO: 152047 - protein, 12 aa, Homo sapiens
  CDR3 for alpha chain variable domain of TCR clone 76024 (TRAV13-1, TRAJ15)
CAASQAGTALIF

SEQ ID NO: 152048 - protein, 18 aa, Homo sapiens
  CDR3 for beta chain variable domain of TCR clone 76024 (TRBV7-9, TRBJ2-3)
CASSLPINGQISTDTQYL

SEQ ID NO: 152049 - protein, 16 aa, Homo sapiens
  CDR3 for alpha chain variable domain of TCR clone 76025 (TRAV26-1, TRAJ37)
CIVRGNGSGNTGKLIF

SEQ ID NO: 152050 - protein, 17 aa, Homo sapiens
  CDR3 for beta chain variable domain of TCR clone 76025 (TRBV4-1, TRBJ2-7)
CASSRDPLGVRGGEQYF

SEQ ID NO: 152051 - protein, 12 aa, Homo sapiens
  CDR3 for alpha chain variable domain of TCR clone 76026 (TRAV12-3, TRAJ17)
CAMTLTGNKLTF

SEQ ID NO: 152052 - protein, 14 aa, Homo sapiens
  CDR3 for beta chain variable domain of TCR clone 76026 (TRBV11-2, TRBJ2-5)
CASRPLAGRETQYF

SEQ ID NO: 152053 - protein, 16 aa, Homo sapiens
  CDR3 for alpha chain variable domain of TCR clone 76027 (TRAV16, TRAJ4)
CALSRMFSGDYNKLIF

SEQ ID NO: 152054 - protein, 16 aa, Homo sapiens
  CDR3 for beta chain variable domain of TCR clone 76027 (TRBV24-1, TRBJ2-3)
CATSDPGTGATDTQYF

SEQ ID NO: 152055 - protein, 10 aa, Homo sapiens
  CDR3 for alpha chain variable domain of TCR clone 76028 (TRAV8-4, TRAJ43)
CAVSADDMRF

SEQ ID NO: 152056 - protein, 14 aa, Homo sapiens
  CDR3 for beta chain variable domain of TCR clone 76028 (TRBV19, TRBJ2-7)
CASSIEASSYEQYF

SEQ ID NO: 152057 - protein, 16 aa, Homo sapiens
  CDR3 for alpha chain variable domain of TCR clone 76029 (TRAV13-1, TRAJ48)
CSKYRGSNFGNEKLTF

SEQ ID NO: 152058 - protein, 17 aa, Homo sapiens
  CDR3 for beta chain variable domain of TCR clone 76029 (TRBV28, TRBJ2-1)
CASSSARQALTYNEQFF

SEQ ID NO: 152059 - protein, 11 aa, Homo sapiens
  CDR3 for alpha chain variable domain of TCR clone 76030 (TRAV3, TRAJ21)
CAVGNFKKFYF

SEQ ID NO: 152060 - protein, 13 aa, Homo sapiens
  CDR3 for beta chain variable domain of TCR clone 76030 (TRBV7-9, TRBJ1-2)
CASSLKQNYGYTF

SEQ ID NO: 152061 - protein, 15 aa, Homo sapiens
  CDR3 for alpha chain variable domain of TCR clone 76031 (TRAV12-3, TRAJ6)
CAMSATIGGSYIPTF

SEQ ID NO: 152062 - protein, 15 aa, Homo sapiens
  CDR3 for beta chain variable domain of TCR clone 76031 (TRBV20-1, TRBJ2-7)
CSARDRVSGMDEQYF

SEQ ID NO: 152063 - protein, 15 aa, Homo sapiens
  CDR3 for alpha chain variable domain of TCR clone 76032 (TRAV19, TRAJ9)
CALSLPDTGGFKTIF

SEQ ID NO: 152064 - protein, 16 aa, Homo sapiens
  CDR3 for beta chain variable domain of TCR clone 76032 (TRBV12-5, TRBJ2-5)
CASGPRTSGNQETQYF

SEQ ID NO: 152065 - protein, 14 aa, Homo sapiens
  CDR3 for alpha chain variable domain of TCR clone 76033 (TRAV4, TRAJ26)
CLVGPHNYGQNFVF

SEQ ID NO: 152066 - protein, 17 aa, Homo sapiens
  CDR3 for beta chain variable domain of TCR clone 76033 (TRBV24-1, TRBJ2-1)
CATSDVSTSGTYNEQFS

SEQ ID NO: 152067 - protein, 13 aa, Homo sapiens
  CDR3 for alpha chain variable domain of TCR clone 76034 (TRAV3, TRAJ27)
CAVRPLGAGKSTF

SEQ ID NO: 152068 - protein, 15 aa, Homo sapiens
  CDR3 for beta chain variable domain of TCR clone 76034 (TRBV28, TRBJ2-1)
CASSIIAGGRSEQFF

SEQ ID NO: 152069 - protein, 15 aa, Homo sapiens
  CDR3 for alpha chain variable domain of TCR clone 76035 (TRAV29/DV5, TRAJ42)
CAAKTDGGSQGNLIF

SEQ ID NO: 152070 - protein, 13 aa, Homo sapiens
  CDR3 for beta chain variable domain of TCR clone 76035 (TRBV10-3, TRBJ2-7)
CASKLAVNYEQYF

SEQ ID NO: 152071 - protein, 12 aa, Homo sapiens
  CDR3 for alpha chain variable domain of TCR clone 76036 (TRAV20, TRAJ37)
CALPSNIGKLIF

SEQ ID NO: 152072 - protein, 16 aa, Homo sapiens
  CDR3 for beta chain variable domain of TCR clone 76036 (TRBV28, TRBJ1-2)
CASSHGQGVYKDGYTS

SEQ ID NO: 152073 - protein, 12 aa, Homo sapiens
  CDR3 for alpha chain variable domain of TCR clone 76037 (TRAV21, TRAJ31)
CAVSPARGRLMS

SEQ ID NO: 152074 - protein, 14 aa, Homo sapiens
  CDR3 for beta chain variable domain of TCR clone 76037 (TRBV28, TRBJ2-7)
CASSLLRISYEQYF

SEQ ID NO: 152075 - protein, 15 aa, Homo sapiens
  CDR3 for alpha chain variable domain of TCR clone 76038 (TRAV26-2, TRAJ28)
CILVESGAGSYQLTF

SEQ ID NO: 152076 - protein, 13 aa, Homo sapiens
  CDR3 for beta chain variable domain of TCR clone 76038 (TRBV2, TRBJ2-3)
CASGRGRTDTQYF

SEQ ID NO: 152077 - protein, 12 aa, Homo sapiens
  CDR3 for alpha chain variable domain of TCR clone 76039 (TRAV36/DV7, TRAJ37)
CACYGNTGKIIF

SEQ ID NO: 152078 - protein, 13 aa, Homo sapiens
  CDR3 for beta chain variable domain of TCR clone 76039 (TRBV10-3, TRBJ2-7)
CASKLAVNYEQYF

SEQ ID NO: 152079 - protein, 14 aa, Homo sapiens
  CDR3 for alpha chain variable domain of TCR clone 76040 (TRAV1-1, TRAJ9)
CAVRGGNGGFKTIF

SEQ ID NO: 152080 - protein, 12 aa, Homo sapiens
  CDR3 for beta chain variable domain of TCR clone 76040 (TRBV14, TRBJ1-1)
CASSQLKGLAFF

SEQ ID NO: 152081 - protein, 11 aa, Homo sapiens
  CDR3 for alpha chain variable domain of TCR clone 76041 (TRAV12-1, TRAJ8)
CVVTGFQKLVF

SEQ ID NO: 152082 - protein, 14 aa, Homo sapiens
  CDR3 for beta chain variable domain of TCR clone 76041 (TRBV19, TRBJ2-1)
CASVKSTQYNEQFF

SEQ ID NO: 152083 - protein, 17 aa, Homo sapiens
  CDR3 for alpha chain variable domain of TCR clone 76042 (TRAV38-2/DV8, TRAJ56)
CAYRSEVGTGANSKLTF

SEQ ID NO: 152084 - protein, 14 aa, Homo sapiens
  CDR3 for beta chain variable domain of TCR clone 76042 (TRBV11-1, TRBJ1-1)
CASSLEHPNTEAFL

SEQ ID NO: 152085 - protein, 14 aa, Homo sapiens
  CDR3 for alpha chain variable domain of TCR clone 76043 (TRAV2, TRAJ37)
CAVDFTSNTGKLIF

SEQ ID NO: 152086 - protein, 15 aa, Homo sapiens
  CDR3 for beta chain variable domain of TCR clone 76043 (TRBV20-1, TRBJ1-1)
CSASRGGTGNTEAFF

SEQ ID NO: 152087 - protein, 13 aa, Homo sapiens
  CDR3 for alpha chain variable domain of TCR clone 76044 (TRAV13-2, TRAJ53)
CAENMVGNYKLTF

SEQ ID NO: 152088 - protein, 13 aa, Homo sapiens
  CDR3 for beta chain variable domain of TCR clone 76044 (TRBV4-1, TRBJ2-2)
CASSQENTGELFF

SEQ ID NO: 152089 - protein, 14 aa, Homo sapiens
  CDR3 for alpha chain variable domain of TCR clone 76045 (TRAV1-2, TRAJ16)
CAVNRFSDGQKLLF

SEQ ID NO: 152090 - protein, 22 aa, Homo sapiens
  CDR3 for beta chain variable domain of TCR clone 76045 (TRBV6-1, TRBJ1-3)
CASVQGGGWKHHIFWRGKLAHC

SEQ ID NO: 152091 - protein, 12 aa, Homo sapiens
  CDR3 for alpha chain variable domain of TCR clone 76046 (TRAV21, TRAJ33)
CAKMGSNYQLIW

SEQ ID NO: 152092 - protein, 14 aa, Homo sapiens
  CDR3 for beta chain variable domain of TCR clone 76046 (TRBV7-3, TRBJ1-1)
CASSLKGGNTEAFF

SEQ ID NO: 152093 - protein, 14 aa, Homo sapiens
  CDR3 for alpha chain variable domain of TCR clone 76047 (TRAV12-3, TRAJ58)
CAMSTEISGSRLTF

SEQ ID NO: 152094 - protein, 13 aa, Homo sapiens
  CDR3 for beta chain variable domain of TCR clone 76047 (TRBV27, TRBJ2-3)
CASSWGRTDTQYF

SEQ ID NO: 152095 - protein, 15 aa, Homo sapiens
  CDR3 for alpha chain variable domain of TCR clone 76048 (TRAV21, TRAJ24)
CAARSSTDSWGKLQF

SEQ ID NO: 152096 - protein, 15 aa, Homo sapiens
  CDR3 for beta chain variable domain of TCR clone 76048 (TRBV9, TRBJ1-6)
CASSVSGTGDPPLHF

SEQ ID NO: 152097 - protein, 15 aa, Homo sapiens
  CDR3 for alpha chain variable domain of TCR clone 76049 (TRAV27, TRAJ38)
CAARRNAGNNRKLIW

SEQ ID NO: 152098 - protein, 15 aa, Homo sapiens
  CDR3 for beta chain variable domain of TCR clone 76049 (TRBV19, TRBJ2-7)
CASSPAGSGEALRYF

SEQ ID NO: 152099 - protein, 13 aa, Homo sapiens
  CDR3 for alpha chain variable domain of TCR clone 76050 (TRAV12-1, TRAJ9)
CVVLNTGGFKTIF

SEQ ID NO: 152100 - protein, 15 aa, Homo sapiens
  CDR3 for beta chain variable domain of TCR clone 76050 (TRBV28, TRBJ2-1)
CASSIIAGGRSEQFF

SEQ ID NO: 152101 - protein, 13 aa, Homo sapiens
  CDR3 for alpha chain variable domain of TCR clone 76051 (TRAV12-3, TRAJ13)
CEMTSGGYQKVTF

SEQ ID NO: 152102 - protein, 13 aa, Homo sapiens
  CDR3 for beta chain variable domain of TCR clone 76051 (TRBV7-9, TRBJ1-2)
CASSLKQNYGYTF

SEQ ID NO: 152103 - protein, 18 aa, Homo sapiens
  CDR3 for alpha chain variable domain of TCR clone 76052 (TRAV9-2, TRAJ52)
CALSRHNAGGTSYGKLTF

SEQ ID NO: 152104 - protein, 13 aa, Homo sapiens
  CDR3 for beta chain variable domain of TCR clone 76052 (TRBV7-9, TRBJ1-2)
CASRLKQNYGYTF

SEQ ID NO: 152105 - protein, 14 aa, Homo sapiens
  CDR3 for alpha chain variable domain of TCR clone 76053 (TRAV23/DV6, TRAJ37)
CAASTSSNTGQLIF

SEQ ID NO: 152106 - protein, 13 aa, Homo sapiens
  CDR3 for beta chain variable domain of TCR clone 76053 (TRBV7-7, TRBJ1-1)
CASSLGANTEAFF

SEQ ID NO: 152107 - protein, 14 aa, Homo sapiens
  CDR3 for alpha chain variable domain of TCR clone 76054 (TRAV12-2, TRAJ13)
CAVKKTGGYQKVTF

SEQ ID NO: 152108 - protein, 11 aa, Homo sapiens
  CDR3 for beta chain variable domain of TCR clone 76054 (TRBV29-1, TRBJ2-5)
CIEDRTGTQYF

SEQ ID NO: 152109 - protein, 15 aa, Homo sapiens
  CDR3 for alpha chain variable domain of TCR clone 76055 (TRAV26-1, TRAJ29)
CIVRVEGSGNTPLVF

SEQ ID NO: 152110 - protein, 13 aa, Homo sapiens
  CDR3 for beta chain variable domain of TCR clone 76055 (TRBV7-9, TRBJ2-5)
CASLPSGRETQYF

SEQ ID NO: 152111 - protein, 14 aa, Homo sapiens
  CDR3 for alpha chain variable domain of TCR clone 76056 (TRAV13-1, TRAJ45)
CAATGGGGADGLTF

SEQ ID NO: 152112 - protein, 16 aa, Homo sapiens
  CDR3 for beta chain variable domain of TCR clone 76056 (TRBV7-2, TRBJ1-1)
CASSLGAGWTNTEAFF

SEQ ID NO: 152113 - protein, 12 aa, Homo sapiens
  CDR3 for alpha chain variable domain of TCR clone 76057 (TRAV8-3, TRAJ26)
CAGDNYGQNFVF

SEQ ID NO: 152114 - protein, 13 aa, Homo sapiens
  CDR3 for beta chain variable domain of TCR clone 76057 (TRBV7-9, TRBJ2-3)
CASSPGSTDTQYF

SEQ ID NO: 152115 - protein, 15 aa, Homo sapiens
  CDR3 for alpha chain variable domain of TCR clone 76058 (TRAV3, TRAJ47)
CAVRGIGKYGNKLVF

SEQ ID NO: 152116 - protein, 14 aa, Homo sapiens
  CDR3 for beta chain variable domain of TCR clone 76058 (TRBV13, TRBJ2-5)
CASSLERVGETQYF

SEQ ID NO: 152117 - protein, 13 aa, Homo sapiens
  CDR3 for alpha chain variable domain of TCR clone 76059 (TRAV21, TRAJ27)
CAARPGNAGKSTL

SEQ ID NO: 152118 - protein, 13 aa, Homo sapiens
  CDR3 for beta chain variable domain of TCR clone 76059 (TRBV7-9, TRBJ1-2)
CASSLKQNYGYTF

SEQ ID NO: 152119 - protein, 15 aa, Homo sapiens
  CDR3 for alpha chain variable domain of TCR clone 76060 (TRAV3, TRAJ5)
CAVRDLDTGRRALTF

SEQ ID NO: 152120 - protein, 13 aa, Homo sapiens
  CDR3 for beta chain variable domain of TCR clone 76060 (TRBV12-4, TRBJ2-7)
CASSPTENYEQYF

SEQ ID NO: 152121 - protein, 14 aa, Homo sapiens
  CDR3 for alpha chain variable domain of TCR clone 76061 (TRAV4, TRAJ13)
CLVGYSGGYQKVTF

SEQ ID NO: 152122 - protein, 13 aa, Homo sapiens
  CDR3 for beta chain variable domain of TCR clone 76061 (TRBV18, TRBJ1-1)
CAGSGGRNTEAFF

SEQ ID NO: 152123 - protein, 15 aa, Homo sapiens
  CDR3 for alpha chain variable domain of TCR clone 76062 (TRAV4, TRAJ39)
CFVGPNNNAGNMLTF

SEQ ID NO: 152124 - protein, 13 aa, Homo sapiens
  CDR3 for beta chain variable domain of TCR clone 76062 (TRBV11-2, TRBJ2-5)
CASSSTGEETQYF

SEQ ID NO: 152125 - protein, 12 aa, Homo sapiens
  CDR3 for alpha chain variable domain of TCR clone 76063 (TRAV12-3, TRAJ17)
CAMTLTGNKLTF

SEQ ID NO: 152126 - protein, 14 aa, Homo sapiens
  CDR3 for beta chain variable domain of TCR clone 76063 (TRBV12-4, TRBJ1-4)
CASSRQGANEKLFF

SEQ ID NO: 152127 - protein, 18 aa, Homo sapiens
  CDR3 for alpha chain variable domain of TCR clone 76064 (TRAV17, TRAJ45)
CATSLDLYSGGGADGLTF

SEQ ID NO: 152128 - protein, 15 aa, Homo sapiens
  CDR3 for beta chain variable domain of TCR clone 76064 (TRBV11-2, TRBJ2-1)
CASSKNRWLIYEQFF

SEQ ID NO: 152129 - protein, 20 aa, Homo sapiens
  CDR3 for alpha chain variable domain of TCR clone 76065 (TRAV12-1, TRAJ42)
RSVIQPPTSVKGGSQGNLIF

SEQ ID NO: 152130 - protein, 18 aa, Homo sapiens
  CDR3 for beta chain variable domain of TCR clone 76065 (TRBV11-2, TRBJ2-3)
CASSLGGASRGAPNTQYF

SEQ ID NO: 152131 - protein, 14 aa, Homo sapiens
  CDR3 for alpha chain variable domain of TCR clone 76066 (TRAV17, TRAJ37)
CATDGSSNTGKLIF

SEQ ID NO: 152132 - protein, 13 aa, Homo sapiens
  CDR3 for beta chain variable domain of TCR clone 76066 (TRBV11-2, TRBJ2-1)
CASSLELVNEQFF

SEQ ID NO: 152133 - protein, 14 aa, Homo sapiens
  CDR3 for alpha chain variable domain of TCR clone 76067 (TRAV26-1, TRAJ34)
CIVRVAYNTERLIF

SEQ ID NO: 152134 - protein, 13 aa, Homo sapiens
  CDR3 for beta chain variable domain of TCR clone 76067 (TRBV4-2, TRBJ1-1)
CASSQAGNTEAFF

SEQ ID NO: 152135 - protein, 15 aa, Homo sapiens
  CDR3 for alpha chain variable domain of TCR clone 76068 (TRAV14/DV4, TRAJ33)
CAMREGRYSNYQLIW

SEQ ID NO: 152136 - protein, 16 aa, Homo sapiens
  CDR3 for beta chain variable domain of TCR clone 76068 (TRBV12-5, TRBJ2-5)
CASGPRTSGNQETQYF

SEQ ID NO: 152137 - protein, 12 aa, Homo sapiens
  CDR3 for alpha chain variable domain of TCR clone 76069 (TRAV25, TRAJ38)
CAGTGNNRKLIW

SEQ ID NO: 152138 - protein, 16 aa, Homo sapiens
  CDR3 for beta chain variable domain of TCR clone 76069 (TRBV24-1, TRBJ2-3)
CATSDPGTGATDTQYF

SEQ ID NO: 152139 - protein, 15 aa, Homo sapiens
  CDR3 for alpha chain variable domain of TCR clone 76070 (TRAV17, TRAJ57)
CATGPSQGGSEKLVF

SEQ ID NO: 152140 - protein, 15 aa, Homo sapiens
  CDR3 for beta chain variable domain of TCR clone 76070 (TRBV6-5, TRBJ1-2)
CASSYSQAFNYGYTF

SEQ ID NO: 152141 - protein, 16 aa, Homo sapiens
  CDR3 for alpha chain variable domain of TCR clone 76071 (TRAV3, TRAJ21)
CAVRDIERGNFNTFYF

SEQ ID NO: 152142 - protein, 13 aa, Homo sapiens
  CDR3 for beta chain variable domain of TCR clone 76071 (TRBV27, TRBJ2-7)
CASSLTTGYEQYF

SEQ ID NO: 152143 - protein, 13 aa, Homo sapiens
  CDR3 for alpha chain variable domain of TCR clone 76072 (TRAV27, TRAJ54)
CAGAGQGAQKLVV

SEQ ID NO: 152144 - protein, 15 aa, Homo sapiens
  CDR3 for beta chain variable domain of TCR clone 76072 (TRBV18, TRBJ2-6)
CASSPSYAGANVLTF

SEQ ID NO: 152145 - protein, 13 aa, Homo sapiens
  CDR3 for alpha chain variable domain of TCR clone 76073 (TRAV13-1, TRAJ37)
CAAVSGNTGKLIF

SEQ ID NO: 152146 - protein, 17 aa, Homo sapiens
  CDR3 for beta chain variable domain of TCR clone 76073 (TRBV10-2, TRBJ1-6)
RASSENRGSSYNSPLHF

SEQ ID NO: 152147 - protein, 17 aa, Homo sapiens
  CDR3 for alpha chain variable domain of TCR clone 76074 (TRAV3, TRAJ42)
CAVRDRDYGGSQGNLIF

SEQ ID NO: 152148 - protein, 15 aa, Homo sapiens
  CDR3 for beta chain variable domain of TCR clone 76074 (TRBV6-6, TRBJ2-7)
CASSYSYGGSYEHYF

SEQ ID NO: 152149 - protein, 15 aa, Homo sapiens
  CDR3 for alpha chain variable domain of TCR clone 76075 (TRAV13-1, TRAJ10)
CAATILTGGGNKLTF

SEQ ID NO: 152150 - protein, 15 aa, Homo sapiens
  CDR3 for beta chain variable domain of TCR clone 76075 (TRBV27, TRBJ2-1)
CASSNGGGSSNEQFF

SEQ ID NO: 152151 - protein, 12 aa, Homo sapiens
  CDR3 for alpha chain variable domain of TCR clone 76076 (TRAV17, TRAJ57)
CATDGGSERLVF

SEQ ID NO: 152152 - protein, 13 aa, Homo sapiens
  CDR3 for beta chain variable domain of TCR clone 76076 (TRBV7-9, TRBJ2-7)
CASSFAGAYEQYF

SEQ ID NO: 152153 - protein, 14 aa, Homo sapiens
  CDR3 for alpha chain variable domain of TCR clone 76077 (TRAV12-2, TRAJ17)
CAVVFKAAGNKLTF

SEQ ID NO: 152154 - protein, 17 aa, Homo sapiens
  CDR3 for beta chain variable domain of TCR clone 76077 (TRBV20-1, TRBJ2-2)
CSASGSGQGGLTGELFF

SEQ ID NO: 152155 - protein, 13 aa, Homo sapiens
  CDR3 for alpha chain variable domain of TCR clone 76078 (TRAV2, TRAJ9)
CAVESTGGFKTIF

SEQ ID NO: 152156 - protein, 15 aa, Homo sapiens
  CDR3 for beta chain variable domain of TCR clone 76078 (TRBV10-3, TRBJ2-1)
CAITFGGGTDSEQFF

SEQ ID NO: 152157 - protein, 14 aa, Homo sapiens
  CDR3 for alpha chain variable domain of TCR clone 76079 (TRAV1-2, TRAJ6)
CAVSLSGGSYIPTF

SEQ ID NO: 152158 - protein, 15 aa, Homo sapiens
  CDR3 for beta chain variable domain of TCR clone 76079 (TRBV28, TRBJ2-7)
CASSPGGGGLYEQYF

SEQ ID NO: 152159 - protein, 15 aa, Homo sapiens
  CDR3 for alpha chain variable domain of TCR clone 76080 (TRAV25, TRAJ52)
CAGRPGGTSYGKLTF

SEQ ID NO: 152160 - protein, 17 aa, Homo sapiens
  CDR3 for beta chain variable domain of TCR clone 76080 (TRBV7-8, TRBJ2-6)
CASSAGTGAAGANVLTF

SEQ ID NO: 152161 - protein, 13 aa, Homo sapiens
  CDR3 for alpha chain variable domain of TCR clone 76081 (TRAV12-3, TRAJ48)
CAMSLVGNEKLTF

SEQ ID NO: 152162 - protein, 15 aa, Homo sapiens
  CDR3 for beta chain variable domain of TCR clone 76081 (TRBV28, TRBJ2-1)
CASSIIAGGRSEQFF

SEQ ID NO: 152163 - protein, 17 aa, Homo sapiens
  CDR3 for alpha chain variable domain of TCR clone 76082 (TRAV13-1, TRAJ28)
CAAGPPYSGAGSYQLAF

SEQ ID NO: 152164 - protein, 12 aa, Homo sapiens
  CDR3 for beta chain variable domain of TCR clone 76082 (TRBV11-2, TRBJ2-2)
CASSLPTGELFF

SEQ ID NO: 152165 - protein, 12 aa, Homo sapiens
  CDR3 for alpha chain variable domain of TCR clone 76083 (TRAV35, TRAJ49)
CAGWNTGNKFYF

SEQ ID NO: 152166 - protein, 16 aa, Homo sapiens
  CDR3 for beta chain variable domain of TCR clone 76083 (TRBV5-1, TRBJ2-2)
CASSLWDTTNTGELFF

SEQ ID NO: 152167 - protein, 14 aa, Homo sapiens
  CDR3 for alpha chain variable domain of TCR clone 76084 (TRAV3, TRAJ9)
CAVRGNTGGFKTIF

SEQ ID NO: 152168 - protein, 15 aa, Homo sapiens
  CDR3 for beta chain variable domain of TCR clone 76084 (TRBV7-9, TRBJ1-6)
CASSSPGRGNSPLHF

SEQ ID NO: 152169 - protein, 12 aa, Homo sapiens
  CDR3 for alpha chain variable domain of TCR clone 76085 (TRAV12-3, TRAJ17)
CAMTLTGNKLTF

SEQ ID NO: 152170 - protein, 16 aa, Homo sapiens
  CDR3 for beta chain variable domain of TCR clone 76085 (TRBV7-2, TRBJ2-5)
CASSLESAGGRETQYF

SEQ ID NO: 152171 - protein, 17 aa, Homo sapiens
  CDR3 for alpha chain variable domain of TCR clone 76086 (TRAV13-1, TRAJ28)
CAASPPYSGAGSYQLTF

SEQ ID NO: 152172 - protein, 12 aa, Homo sapiens
  CDR3 for beta chain variable domain of TCR clone 76086 (TRBV11-2, TRBJ2-2)
CASSLGGGELFF

SEQ ID NO: 152173 - protein, 12 aa, Homo sapiens
  CDR3 for alpha chain variable domain of TCR clone 76087 (TRAV12-3, TRAJ17)
CAMTLTGNKLTF

SEQ ID NO: 152174 - protein, 14 aa, Homo sapiens
  CDR3 for beta chain variable domain of TCR clone 76087 (TRBV15, TRBJ2-5)
CATSGDRGQETQYF

SEQ ID NO: 152175 - protein, 14 aa, Homo sapiens
  CDR3 for alpha chain variable domain of TCR clone 76088 (TRAV1-2, TRAJ15)
RAVRDRQAGTALIF

SEQ ID NO: 152176 - protein, 15 aa, Homo sapiens
  CDR3 for beta chain variable domain of TCR clone 76088 (TRBV7-2, TRBJ2-1)
RASSLASGRVNEQFF

SEQ ID NO: 152177 - protein, 12 aa, Homo sapiens
  CDR3 for alpha chain variable domain of TCR clone 76089 (TRAV12-3, TRAJ17)
CAMTLTGNKLTF

SEQ ID NO: 152178 - protein, 14 aa, Homo sapiens
  CDR3 for beta chain variable domain of TCR clone 76089 (TRBV7-7, TRBJ2-2)
CATRQDSDTGELFF

SEQ ID NO: 152179 - protein, 14 aa, Homo sapiens
  CDR3 for alpha chain variable domain of TCR clone 76090 (TRAV3, TRAJ48)
CAVRLSFGNEKLTF

SEQ ID NO: 152180 - protein, 13 aa, Homo sapiens
  CDR3 for beta chain variable domain of TCR clone 76090 (TRBV10-3, TRBJ2-7)
CASKLTVNYEQYF

SEQ ID NO: 152181 - protein, 11 aa, Homo sapiens
  CDR3 for alpha chain variable domain of TCR clone 76091 (TRAV12-3, TRAJ27)
CAMANAGKSTF

SEQ ID NO: 152182 - protein, 14 aa, Homo sapiens
  CDR3 for beta chain variable domain of TCR clone 76091 (TRBV4-1, TRBJ2-2)
CASSQAVSTGELFF

SEQ ID NO: 152183 - protein, 13 aa, Homo sapiens
  CDR3 for alpha chain variable domain of TCR clone 76092 (TRAV12-2, TRAJ20)
CAVYPSNDYKLSF

SEQ ID NO: 152184 - protein, 15 aa, Homo sapiens
  CDR3 for beta chain variable domain of TCR clone 76092 (TRBV6-1, TRBJ2-5)
CASSEGWGIQETQCF

SEQ ID NO: 152185 - protein, 15 aa, Homo sapiens
  CDR3 for alpha chain variable domain of TCR clone 76093 (TRAV8-3, TRAJ23)
CAVGDRYNQGGKLIF

SEQ ID NO: 152186 - protein, 22 aa, Homo sapiens
  CDR3 for beta chain variable domain of TCR clone 76093 (TRBV29-1, TRBJ2-5)
TVSNMSPEDSSIYLCSAGTQHF

SEQ ID NO: 152187 - protein, 13 aa, Homo sapiens
  CDR3 for alpha chain variable domain of TCR clone 76094 (TRAV8-3, TRAJ36)
CAVGASGANNLFF

SEQ ID NO: 152188 - protein, 15 aa, Homo sapiens
  CDR3 for beta chain variable domain of TCR clone 76094 (TRBV7-2, TRBJ1-2)
CASSPRAGWNYGYTF

SEQ ID NO: 152189 - protein, 16 aa, Homo sapiens
  CDR3 for alpha chain variable domain of TCR clone 76095 (TRAV14/DV4, TRAJ45)
CAMREGERGGADGLTF

SEQ ID NO: 152190 - protein, 14 aa, Homo sapiens
  CDR3 for beta chain variable domain of TCR clone 76095 (TRBV11-2, TRBJ2-1)
CASSLSGPYNEQFF

SEQ ID NO: 152191 - protein, 11 aa, Homo sapiens
  CDR3 for alpha chain variable domain of TCR clone 76096 (TRAV17, TRAJ9)
CATTGGFKAIF

SEQ ID NO: 152192 - protein, 18 aa, Homo sapiens
  CDR3 for beta chain variable domain of TCR clone 76096 (TRBV11-2, TRBJ2-3)
CASSLGGASRGAPNTQYF

SEQ ID NO: 152193 - protein, 11 aa, Homo sapiens
  CDR3 for alpha chain variable domain of TCR clone 76097 (TRAV8-3, TRAJ15)
CAVGPGTALIF

SEQ ID NO: 152194 - protein, 18 aa, Homo sapiens
  CDR3 for beta chain variable domain of TCR clone 76097 (TRBV18, TRBJ2-3)
CASSYTSGAAGGTDTPYF

SEQ ID NO: 152195 - protein, 13 aa, Homo sapiens
  CDR3 for alpha chain variable domain of TCR clone 76098 (TRAV20, TRAJ56)
CAVQAGANSKLTF

SEQ ID NO: 152196 - protein, 14 aa, Homo sapiens
  CDR3 for beta chain variable domain of TCR clone 76098 (TRBV28, TRBJ1-1)
CASSPWTRWAEAFF

SEQ ID NO: 152197 - protein, 14 aa, Homo sapiens
  CDR3 for alpha chain variable domain of TCR clone 76099 (TRAV35, TRAJ22)
CAGLRPGSARQLTF

SEQ ID NO: 152198 - protein, 16 aa, Homo sapiens
  CDR3 for beta chain variable domain of TCR clone 76099 (TRBV4-3, TRBJ2-1)
CASSPALDRGVNEQFF

SEQ ID NO: 152199 - protein, 14 aa, Homo sapiens
  CDR3 for alpha chain variable domain of TCR clone 76100 (TRAV17, TRAJ12)
CATDEKDSSYKLIF

SEQ ID NO: 152200 - protein, 13 aa, Homo sapiens
  CDR3 for beta chain variable domain of TCR clone 76100 (TRBV11-2, TRBJ1-1)
CASSLGRNTEAFF

SEQ ID NO: 152201 - protein, 14 aa, Homo sapiens
  CDR3 for alpha chain variable domain of TCR clone 76101 (TRAV4, TRAJ6)
CLVGEAGGSYIPTF

SEQ ID NO: 152202 - protein, 16 aa, Homo sapiens
  CDR3 for beta chain variable domain of TCR clone 76101 (TRBV7-6, TRBJ2-1)
CASSLNEGPSYNEQLF

SEQ ID NO: 152203 - protein, 13 aa, Homo sapiens
  CDR3 for alpha chain variable domain of TCR clone 76102 (TRAV8-3, TRAJ6)
CAVGSGGSYIPTF

SEQ ID NO: 152204 - protein, 14 aa, Homo sapiens
  CDR3 for beta chain variable domain of TCR clone 76102 (TRBV11-2, TRBJ1-1)
CAGSTQRGRTEAFF

SEQ ID NO: 152205 - protein, 14 aa, Homo sapiens
  CDR3 for alpha chain variable domain of TCR clone 76103 (TRAV16, TRAJ33)
CALSAMDSNYQLIW

SEQ ID NO: 152206 - protein, 12 aa, Homo sapiens
  CDR3 for beta chain variable domain of TCR clone 76103 (TRBV5-1, TRBJ1-2)
CAISQDTYGYTF

SEQ ID NO: 152207 - protein, 14 aa, Homo sapiens
  CDR3 for alpha chain variable domain of TCR clone 76104 (TRAV27, TRAJ36)
CAGPPKRGATNLFF

SEQ ID NO: 152208 - protein, 15 aa, Homo sapiens
  CDR3 for beta chain variable domain of TCR clone 76104 (TRBV18, TRBJ2-7)
CASSPASTPNYEQYF

SEQ ID NO: 152209 - protein, 13 aa, Homo sapiens
  CDR3 for alpha chain variable domain of TCR clone 76105 (TRAV35, TRAJ42)
CARFPGSQGNLIF

SEQ ID NO: 152210 - protein, 14 aa, Homo sapiens
  CDR3 for beta chain variable domain of TCR clone 76105 (TRBV19, TRBJ2-1)
CASPTFVLSGEQFF

SEQ ID NO: 152211 - protein, 13 aa, Homo sapiens
  CDR3 for alpha chain variable domain of TCR clone 76106 (TRAV3, TRAJ27)
CAVRPLGAGKSTF

SEQ ID NO: 152212 - protein, 13 aa, Homo sapiens
  CDR3 for beta chain variable domain of TCR clone 76106 (TRBV7-9, TRBJ2-3)
CASSRGSTDTQYF

SEQ ID NO: 152213 - protein, 15 aa, Homo sapiens
  CDR3 for alpha chain variable domain of TCR clone 76107 (TRAV3, TRAJ4)
CAVRDGTGGYNKLIF

SEQ ID NO: 152214 - protein, 16 aa, Homo sapiens
  CDR3 for beta chain variable domain of TCR clone 76107 (TRBV7-3, TRBJ2-2)
CASSLKRGTLSGELFF

SEQ ID NO: 152215 - protein, 15 aa, Homo sapiens
  CDR3 for alpha chain variable domain of TCR clone 76108 (TRAV4, TRAJ10)
CLVGDGSGGGNKLTF

SEQ ID NO: 152216 - protein, 15 aa, Homo sapiens
  CDR3 for beta chain variable domain of TCR clone 76108 (TRBV27, TRBJ2-3)
CASSSLAGVIDTQHF

SEQ ID NO: 152217 - protein, 14 aa, Homo sapiens
  CDR3 for alpha chain variable domain of TCR clone 76109 (TRAV12-2, TRAJ11)
CAVEGGSGYSTLTF

SEQ ID NO: 152218 - protein, 14 aa, Homo sapiens
  CDR3 for beta chain variable domain of TCR clone 76109 (TRBV7-2, TRBJ2-7)
CASSPKTSFYEQYF

SEQ ID NO: 152219 - protein, 16 aa, Homo sapiens
  CDR3 for alpha chain variable domain of TCR clone 76110 (TRAV3, TRAJ37)
CAVRGKESGNTGKLIF

SEQ ID NO: 152220 - protein, 16 aa, Homo sapiens
  CDR3 for beta chain variable domain of TCR clone 76110 (TRBV12-4, TRBJ1-5)
CASSRPVGGSNQPQHF

SEQ ID NO: 152221 - protein, 13 aa, Homo sapiens
  CDR3 for alpha chain variable domain of TCR clone 76111 (TRAV21, TRAJ37)
CAVSSGYTGKLIF

SEQ ID NO: 152222 - protein, 17 aa, Homo sapiens
  CDR3 for beta chain variable domain of TCR clone 76111 (TRBV5-1, TRBJ2-5)
CASSLLGLAANQETQYF

SEQ ID NO: 152223 - protein, 12 aa, Homo sapiens
  CDR3 for alpha chain variable domain of TCR clone 76112 (TRAV1-1, TRAJ43)
CAPRVSSNDMRF

SEQ ID NO: 152224 - protein, 15 aa, Homo sapiens
  CDR3 for beta chain variable domain of TCR clone 76112 (TRBV5-1, TRBJ2-7)
CASSLGDFTPYEQYF

SEQ ID NO: 152225 - protein, 17 aa, Homo sapiens
  CDR3 for alpha chain variable domain of TCR clone 76113 (TRAV3, TRAJ6)
CAVRDGPRAGGSYIPTF

SEQ ID NO: 152226 - protein, 14 aa, Homo sapiens
  CDR3 for beta chain variable domain of TCR clone 76113 (TRBV7-8, TRBJ2-3)
CASSFPDGQDTQYF

SEQ ID NO: 152227 - protein, 13 aa, Homo sapiens
  CDR3 for alpha chain variable domain of TCR clone 76114 (TRAV27, TRAJ42)
CAGARGSQGNLIF

SEQ ID NO: 152228 - protein, 14 aa, Homo sapiens
  CDR3 for beta chain variable domain of TCR clone 76114 (TRBV28, TRBJ1-2)
CASRIQGANYGYTF

SEQ ID NO: 152229 - protein, 12 aa, Homo sapiens
  CDR3 for alpha chain variable domain of TCR clone 76115 (TRAV26-1, TRAJ36)
CIVRVRADNLFF

SEQ ID NO: 152230 - protein, 13 aa, Homo sapiens
  CDR3 for beta chain variable domain of TCR clone 76115 (TRBV11-2, TRBJ2-5)
CASSRGSSETQYF

SEQ ID NO: 152231 - protein, 14 aa, Homo sapiens
  CDR3 for alpha chain variable domain of TCR clone 76116 (TRAV12-2, TRAJ3)
CAVSLYSSASKISF

SEQ ID NO: 152232 - protein, 14 aa, Homo sapiens
  CDR3 for beta chain variable domain of TCR clone 76116 (TRBV27, TRBJ2-1)
CAGSIAETYNEQFF

SEQ ID NO: 152233 - protein, 13 aa, Homo sapiens
  CDR3 for alpha chain variable domain of TCR clone 76117 (TRAV8-3, TRAJ36)
CAVGATGANNLFF

SEQ ID NO: 152234 - protein, 22 aa, Homo sapiens
  CDR3 for beta chain variable domain of TCR clone 76117 (TRBV29-1, TRBJ2-5)
TVSNMSPEDSSIYLCSAGTQYF

SEQ ID NO: 152235 - protein, 16 aa, Homo sapiens
  CDR3 for alpha chain variable domain of TCR clone 76118 (TRAV17, TRAJ35)
CATAEGGIGFGNVLHC

SEQ ID NO: 152236 - protein, 16 aa, Homo sapiens
  CDR3 for beta chain variable domain of TCR clone 76118 (TRBV6-5, TRBJ2-7)
CASSSDPTSGFYEQYL

SEQ ID NO: 152237 - protein, 14 aa, Homo sapiens
  CDR3 for alpha chain variable domain of TCR clone 76119 (TRAV26-1, TRAJ38)
CIADNAGNNRKLIW

SEQ ID NO: 152238 - protein, 13 aa, Homo sapiens
  CDR3 for beta chain variable domain of TCR clone 76119 (TRBV20-1, TRBJ1-1)
CSARGWGNTEAFF

SEQ ID NO: 152239 - protein, 16 aa, Homo sapiens
  CDR3 for alpha chain variable domain of TCR clone 76120 (TRAV4, TRAJ22)
CLVGDLYSGSARQLTF

SEQ ID NO: 152240 - protein, 16 aa, Homo sapiens
  CDR3 for beta chain variable domain of TCR clone 76120 (TRBV7-9, TRBJ2-3)
CASSAWREVGTDTQYF

SEQ ID NO: 152241 - protein, 10 aa, Homo sapiens
  CDR3 for alpha chain variable domain of TCR clone 76121 (TRAV12-3, TRAJ49)
CAMNDDQFYV

SEQ ID NO: 152242 - protein, 13 aa, Homo sapiens
  CDR3 for beta chain variable domain of TCR clone 76121 (TRBV12-4, TRBJ1-1)
CASSPGTGFEAFF

SEQ ID NO: 152243 - protein, 16 aa, Homo sapiens
  CDR3 for alpha chain variable domain of TCR clone 76122 (TRAV38-2/DV8, TRAJ47)
CAYRSASMEYGNKLVF

SEQ ID NO: 152244 - protein, 14 aa, Homo sapiens
  CDR3 for beta chain variable domain of TCR clone 76122 (TRBV19, TRBJ2-7)
CASSIFAGTYEQYF

SEQ ID NO: 152245 - protein, 17 aa, Homo sapiens
  CDR3 for alpha chain variable domain of TCR clone 76123 (TRAV3, TRAJ6)
CAVRDGPRAGGSYIPTF

SEQ ID NO: 152246 - protein, 17 aa, Homo sapiens
  CDR3 for beta chain variable domain of TCR clone 76123 (TRBV7-3, TRBJ2-3)
CASSPRGQGYGTDTQYF

SEQ ID NO: 152247 - protein, 13 aa, Homo sapiens
  CDR3 for alpha chain variable domain of TCR clone 76124 (TRAV35, TRAJ36)
RARPRIGANNLFF

SEQ ID NO: 152248 - protein, 15 aa, Homo sapiens
  CDR3 for beta chain variable domain of TCR clone 76124 (TRBV28, TRBJ2-5)
CASSPPWSYQETQYF

SEQ ID NO: 152249 - protein, 16 aa, Homo sapiens
  CDR3 for alpha chain variable domain of TCR clone 76125 (TRAV30, TRAJ24)
CGTEIVDADSWGKFQF

SEQ ID NO: 152250 - protein, 14 aa, Homo sapiens
  CDR3 for beta chain variable domain of TCR clone 76125 (TRBV7-9, TRBJ2-1)
CASSSMVGFGEQFF

SEQ ID NO: 152251 - protein, 10 aa, Homo sapiens
  CDR3 for alpha chain variable domain of TCR clone 76126 (TRAV26-1, TRAJ22)
RSGSARQLTF

SEQ ID NO: 152252 - protein, 13 aa, Homo sapiens
  CDR3 for beta chain variable domain of TCR clone 76126 (TRBV7-9, TRBJ1-2)
CASSLKQSYGYTF

SEQ ID NO: 152253 - protein, 12 aa, Homo sapiens
  CDR3 for alpha chain variable domain of TCR clone 76127 (TRAV2, TRAJ31)
CAVEDNNARLMF

SEQ ID NO: 152254 - protein, 16 aa, Homo sapiens
  CDR3 for beta chain variable domain of TCR clone 76127 (TRBV10-3, TRBJ2-1)
CAISVVGDGGGGEQFF

SEQ ID NO: 152255 - protein, 17 aa, Homo sapiens
  CDR3 for alpha chain variable domain of TCR clone 76128 (TRAV12-2, TRAJ22)
CTVNRIPFSGSARQLTF

SEQ ID NO: 152256 - protein, 13 aa, Homo sapiens
  CDR3 for beta chain variable domain of TCR clone 76128 (TRBV11-3, TRBJ1-1)
CASSSNRDTEAFF

SEQ ID NO: 152257 - protein, 11 aa, Homo sapiens
  CDR3 for alpha chain variable domain of TCR clone 76129 (TRAV35, TRAJ30)
CAGPGDYKIIF

SEQ ID NO: 152258 - protein, 14 aa, Homo sapiens
  CDR3 for beta chain variable domain of TCR clone 76129 (TRBV7-6, TRBJ1-6)
CASSQAGGGSPLHF

SEQ ID NO: 152259 - protein, 12 aa, Homo sapiens
  CDR3 for alpha chain variable domain of TCR clone 76130 (TRAV3, TRAJ20)
CAVRDPDYKLSF

SEQ ID NO: 152260 - protein, 14 aa, Homo sapiens
  CDR3 for beta chain variable domain of TCR clone 76130 (TRBV7-2, TRBJ2-7)
CASRSQGAAYEQYF

SEQ ID NO: 152261 - protein, 14 aa, Homo sapiens
  CDR3 for alpha chain variable domain of TCR clone 76131 (TRAV16, TRAJ48)
FALTPGFGNEKLTF

SEQ ID NO: 152262 - protein, 14 aa, Homo sapiens
  CDR3 for beta chain variable domain of TCR clone 76131 (TRBV7-2, TRBJ2-7)
CASSSISGFSEQYF

SEQ ID NO: 152263 - protein, 12 aa, Homo sapiens
  CDR3 for alpha chain variable domain of TCR clone 76132 (TRAV36/DV7, TRAJ37)
CACYGNTSKLIF

SEQ ID NO: 152264 - protein, 13 aa, Homo sapiens
  CDR3 for beta chain variable domain of TCR clone 76132 (TRBV10-3, TRBJ2-7)
CASKLAVNYEQYF

SEQ ID NO: 152265 - protein, 15 aa, Homo sapiens
  CDR3 for alpha chain variable domain of TCR clone 76133 (TRAV3, TRAJ5)
CAVRDLDTGRGALTF

SEQ ID NO: 152266 - protein, 13 aa, Homo sapiens
  CDR3 for beta chain variable domain of TCR clone 76133 (TRBV12-4, TRBJ2-7)
CARSPTETYEQYF

SEQ ID NO: 152267 - protein, 14 aa, Homo sapiens
  CDR3 for alpha chain variable domain of TCR clone 76134 (TRAV13-1, TRAJ20)
CAARPGSNDYTLSF

SEQ ID NO: 152268 - protein, 13 aa, Homo sapiens
  CDR3 for beta chain variable domain of TCR clone 76134 (TRBV20-1, TRBJ1-1)
CSAPPGGHTEAFF

SEQ ID NO: 152269 - protein, 10 aa, Homo sapiens
  CDR3 for alpha chain variable domain of TCR clone 76135 (TRAV23/DV6, TRAJ31)
CARGGARLMF

SEQ ID NO: 152270 - protein, 17 aa, Homo sapiens
  CDR3 for beta chain variable domain of TCR clone 76135 (TRBV7-8, TRBJ2-7)
CASSFTSGRPPSYEQYF

SEQ ID NO: 152271 - protein, 11 aa, Homo sapiens
  CDR3 for alpha chain variable domain of TCR clone 76136 (TRAV1-2, TRAJ31)
CAVNNNARLMF

SEQ ID NO: 152272 - protein, 15 aa, Homo sapiens
  CDR3 for beta chain variable domain of TCR clone 76136 (TRBV28, TRBJ2-1)
CASSIIAGGRSEQIF

SEQ ID NO: 152273 - protein, 11 aa, Homo sapiens
  CDR3 for alpha chain variable domain of TCR clone 76137 (TRAV17, TRAJ29)
CATWRRTHLLS

SEQ ID NO: 152274 - protein, 12 aa, Homo sapiens
  CDR3 for beta chain variable domain of TCR clone 76137 (TRBV7-9, TRBJ2-7)
CASSIKREEQYF

SEQ ID NO: 152275 - protein, 12 aa, Homo sapiens
  CDR3 for alpha chain variable domain of TCR clone 76138 (TRAV1-1, TRAJ39)
CAVPVVGNMLTL

SEQ ID NO: 152276 - protein, 13 aa, Homo sapiens
  CDR3 for beta chain variable domain of TCR clone 76138 (TRBV7-9, TRBJ2-1)
CASSSSNFNEQFF

SEQ ID NO: 152277 - protein, 14 aa, Homo sapiens
  CDR3 for alpha chain variable domain of TCR clone 76139 (TRAV12-1, TRAJ30)
CVPTGTNRDDKIIF

SEQ ID NO: 152278 - protein, 11 aa, Homo sapiens
  CDR3 for beta chain variable domain of TCR clone 76139 (TRBV4-1, TRBJ2-2)
RASEHTGELFF

SEQ ID NO: 152279 - protein, 14 aa, Homo sapiens
  CDR3 for alpha chain variable domain of TCR clone 76140 (TRAV17, TRAJ35)
CATDRPGFGNVLHC

SEQ ID NO: 152280 - protein, 15 aa, Homo sapiens
  CDR3 for beta chain variable domain of TCR clone 76140 (TRBV28, TRBJ2-5)
RASSSGRVIQETQYF

SEQ ID NO: 152281 - protein, 13 aa, Homo sapiens
  CDR3 for alpha chain variable domain of TCR clone 76141 (TRAV12-3, TRAJ13)
FAMTSGGYQKVTF

SEQ ID NO: 152282 - protein, 13 aa, Homo sapiens
  CDR3 for beta chain variable domain of TCR clone 76141 (TRBV20-1, TRBJ2-2)
CSALSGGAGELFF

SEQ ID NO: 152283 - protein, 14 aa, Homo sapiens
  CDR3 for alpha chain variable domain of TCR clone 76142 (TRAV1-2, TRAJ8)
CAVREDTGFQKLVF

SEQ ID NO: 152284 - protein, 14 aa, Homo sapiens
  CDR3 for beta chain variable domain of TCR clone 76142 (TRBV29-1, TRBJ2-5)
CGVETSGSGETQYF

SEQ ID NO: 152285 - protein, 14 aa, Homo sapiens
  CDR3 for alpha chain variable domain of TCR clone 76143 (TRAV26-1, TRAJ34)
CVVRVAYNTDKLIF

SEQ ID NO: 152286 - protein, 12 aa, Homo sapiens
  CDR3 for beta chain variable domain of TCR clone 76143 (TRBV7-9, TRBJ1-4)
CASSTDREKLFF

SEQ ID NO: 152287 - protein, 14 aa, Homo sapiens
  CDR3 for alpha chain variable domain of TCR clone 76144 (TRAV8-6, TRAJ9)
CAVTRNTGGFKTIF

SEQ ID NO: 152288 - protein, 13 aa, Homo sapiens
  CDR3 for beta chain variable domain of TCR clone 76144 (TRBV27, TRBJ1-1)
CASSLSIGAEAFF

SEQ ID NO: 152289 - protein, 17 aa, Homo sapiens
  CDR3 for alpha chain variable domain of TCR clone 76145 (TRAV2, TRAJ36)
CAVEDRGNWGKQPLLWD

SEQ ID NO: 152290 - protein, 14 aa, Homo sapiens
  CDR3 for beta chain variable domain of TCR clone 76145 (TRBV7-9, TRBJ2-5)
CARSLDTAQETQYF

SEQ ID NO: 152291 - protein, 14 aa, Homo sapiens
  CDR3 for alpha chain variable domain of TCR clone 76146 (TRAV12-2, TRAJ13)
CAVKKTGGYQKVTF

SEQ ID NO: 152292 - protein, 13 aa, Homo sapiens
  CDR3 for beta chain variable domain of TCR clone 76146 (TRBV20-1, TRBJ1-1)
CSTRLGQGTEAFF

SEQ ID NO: 152293 - protein, 13 aa, Homo sapiens
  CDR3 for alpha chain variable domain of TCR clone 76147 (TRAV3, TRAJ20)
CAVRDTPRYKLSF

SEQ ID NO: 152294 - protein, 17 aa, Homo sapiens
  CDR3 for beta chain variable domain of TCR clone 76147 (TRBV25-1, TRBJ2-7)
CQPQQPPRTGVTYEQYF

SEQ ID NO: 152295 - protein, 15 aa, Homo sapiens
  CDR3 for alpha chain variable domain of TCR clone 76148 (TRAV26-1, TRAJ22)
CIVRVSFWFCKATHL

SEQ ID NO: 152296 - protein, 13 aa, Homo sapiens
  CDR3 for beta chain variable domain of TCR clone 76148 (TRBV7-9, TRBJ1-2)
CASSLKQNYGYTF

SEQ ID NO: 152297 - protein, 17 aa, Homo sapiens
  CDR3 for alpha chain variable domain of TCR clone 76149 (TRAV3, TRAJ6)
CAVSRRTDTGGSNIPTF

SEQ ID NO: 152298 - protein, 18 aa, Homo sapiens
  CDR3 for beta chain variable domain of TCR clone 76149 (TRBV7-2, TRBJ2-3)
CASSLETSRGRKADTQYF

SEQ ID NO: 152299 - protein, 14 aa, Homo sapiens
  CDR3 for alpha chain variable domain of TCR clone 76150 (TRAV2, TRAJ37)
CAVDFTSNTGRLIF

SEQ ID NO: 152300 - protein, 13 aa, Homo sapiens
  CDR3 for beta chain variable domain of TCR clone 76150 (TRBV4-1, TRBJ2-2)
CASSQENTGELFF

SEQ ID NO: 152301 - protein, 12 aa, Homo sapiens
  CDR3 for alpha chain variable domain of TCR clone 76151 (TRAV13-1, TRAJ21)
CAAKEGFNKFYF

SEQ ID NO: 152302 - protein, 14 aa, Homo sapiens
  CDR3 for beta chain variable domain of TCR clone 76151 (TRBV19, TRBJ1-6)
CASSSGTGYSPLHF

SEQ ID NO: 152303 - protein, 15 aa, Homo sapiens
  CDR3 for alpha chain variable domain of TCR clone 76152 (TRAV12-1, TRAJ44)
CVADLPTGTASKLTF

SEQ ID NO: 152304 - protein, 14 aa, Homo sapiens
  CDR3 for beta chain variable domain of TCR clone 76152 (TRBV19, TRBJ2-7)
CASSIFAGTYEQYF

SEQ ID NO: 152305 - protein, 16 aa, Homo sapiens
  CDR3 for alpha chain variable domain of TCR clone 76153 (TRAV30, TRAJ24)
CGTEIVDADSWGKFQF

SEQ ID NO: 152306 - protein, 14 aa, Homo sapiens
  CDR3 for beta chain variable domain of TCR clone 76153 (TRBV7-2, TRBJ2-7)
CASSPKTSCYEQYF

SEQ ID NO: 152307 - protein, 12 aa, Homo sapiens
  CDR3 for alpha chain variable domain of TCR clone 76154 (TRAV12-2, TRAJ10)
WGVTGGENKLTF

SEQ ID NO: 152308 - protein, 16 aa, Homo sapiens
  CDR3 for beta chain variable domain of TCR clone 76154 (TRBV6-4, TRBJ1-2)
CASSEAVGDPNYGYTF

SEQ ID NO: 152309 - protein, 16 aa, Homo sapiens
  CDR3 for alpha chain variable domain of TCR clone 76155 (TRAV3, TRAJ22)
CLVGDLYSGSARQLTF

SEQ ID NO: 152310 - protein, 16 aa, Homo sapiens
  CDR3 for beta chain variable domain of TCR clone 76155 (TRBV7-9, TRBJ2-1)
CASSDVAGGSYNEQFF

SEQ ID NO: 152311 - protein, 12 aa, Homo sapiens
  CDR3 for alpha chain variable domain of TCR clone 76156 (TRAV30, TRAJ43)
CGTEERGNDMRF

SEQ ID NO: 152312 - protein, 12 aa, Homo sapiens
  CDR3 for beta chain variable domain of TCR clone 76156 (TRBV19, TRBJ1-1)
CASMNRYTEAFF

SEQ ID NO: 152313 - protein, 13 aa, Homo sapiens
  CDR3 for alpha chain variable domain of TCR clone 76157 (TRAV21, TRAJ27)
CAARPGNAGKSTF

SEQ ID NO: 152314 - protein, 12 aa, Homo sapiens
  CDR3 for beta chain variable domain of TCR clone 76157 (TRBV11-2, TRBJ2-1)
CASSPGNNEQFF

SEQ ID NO: 152315 - protein, 13 aa, Homo sapiens
  CDR3 for alpha chain variable domain of TCR clone 76158 (TRAV13-1, TRAJ6)
CAARRGGSYIPTF

SEQ ID NO: 152316 - protein, 16 aa, Homo sapiens
  CDR3 for beta chain variable domain of TCR clone 76158 (TRBV7-9, TRBJ2-2)
CASSVATGVGTGELFF

SEQ ID NO: 152317 - protein, 15 aa, Homo sapiens
  CDR3 for alpha chain variable domain of TCR clone 76159 (TRAV8-3, TRAJ45)
CASSYSGGGADGRTF

SEQ ID NO: 152318 - protein, 14 aa, Homo sapiens
  CDR3 for beta chain variable domain of TCR clone 76159 (TRBV11-2, TRBJ2-3)
CASSRLARTDTQYF

SEQ ID NO: 152319 - protein, 13 aa, Homo sapiens
  CDR3 for alpha chain variable domain of TCR clone 76160 (TRAV27, TRAJ6)
CAGGTRGSYIPTS

SEQ ID NO: 152320 - protein, 14 aa, Homo sapiens
  CDR3 for beta chain variable domain of TCR clone 76160 (TRBV20-1, TRBJ2-4)
CSASGRVGENIQYF

SEQ ID NO: 152321 - protein, 12 aa, Homo sapiens
  CDR3 for alpha chain variable domain of TCR clone 76161 (TRAV2, TRAJ34)
CAVERNTDKLIF

SEQ ID NO: 152322 - protein, 14 aa, Homo sapiens
  CDR3 for beta chain variable domain of TCR clone 76161 (TRBV7-9, TRBJ2-1)
CASSDNSGYNEQFL

SEQ ID NO: 152323 - protein, 18 aa, Homo sapiens
  CDR3 for alpha chain variable domain of TCR clone 76162 (TRAV26-1, TRAJ23)
CIVRVGLEVWNQGGKLIF

SEQ ID NO: 152324 - protein, 14 aa, Homo sapiens
  CDR3 for beta chain variable domain of TCR clone 76162 (TRBV12-5, TRBJ2-5)
CASGSRTHQETQYF

SEQ ID NO: 152325 - protein, 11 aa, Homo sapiens
  CDR3 for alpha chain variable domain of TCR clone 76163 (TRAV35, TRAJ31)
CAKSGDARLMF

SEQ ID NO: 152326 - protein, 11 aa, Homo sapiens
  CDR3 for beta chain variable domain of TCR clone 76163 (TRBV24-1, TRBJ2-3)
CATSDLDTQYF

SEQ ID NO: 152327 - protein, 14 aa, Homo sapiens
  CDR3 for alpha chain variable domain of TCR clone 76164 (TRAV29/DV5, TRAJ36)
CAARRKTGANNLFF

SEQ ID NO: 152328 - protein, 13 aa, Homo sapiens
  CDR3 for beta chain variable domain of TCR clone 76164 (TRBV27, TRBJ1-1)
CASSLSIGAEAFF

SEQ ID NO: 152329 - protein, 14 aa, Homo sapiens
  CDR3 for alpha chain variable domain of TCR clone 76165 (TRAV16, TRAJ33)
CALSAMDSNYQLIW

SEQ ID NO: 152330 - protein, 16 aa, Homo sapiens
  CDR3 for beta chain variable domain of TCR clone 76165 (TRBV7-7, TRBJ2-1)
CASSLASGTSYNEQLF

SEQ ID NO: 152331 - protein, 15 aa, Homo sapiens
  CDR3 for alpha chain variable domain of TCR clone 76166 (TRAV26-1, TRAJ47)
CIVRVGWGYGNKLVF

SEQ ID NO: 152332 - protein, 14 aa, Homo sapiens
  CDR3 for beta chain variable domain of TCR clone 76166 (TRBV12-5, TRBJ2-5)
CASGSRTHQETQYF

SEQ ID NO: 152333 - protein, 10 aa, Homo sapiens
  CDR3 for alpha chain variable domain of TCR clone 76167 (TRAV12-3, TRAJ49)
CAMNDDQFYF

SEQ ID NO: 152334 - protein, 13 aa, Homo sapiens
  CDR3 for beta chain variable domain of TCR clone 76167 (TRBV12-4, TRBJ1-1)
CGSSPGTGFEAFF

SEQ ID NO: 152335 - protein, 13 aa, Homo sapiens
  CDR3 for alpha chain variable domain of TCR clone 76168 (TRAV36/DV7, TRAJ54)
CAVCTQGAQKLVF

SEQ ID NO: 152336 - protein, 13 aa, Homo sapiens
  CDR3 for beta chain variable domain of TCR clone 76168 (TRBV7-6, TRBJ2-7)
CASSLDHTNEQYF

SEQ ID NO: 152337 - protein, 15 aa, Homo sapiens
  CDR3 for alpha chain variable domain of TCR clone 76169 (TRAV14/DV4, TRAJ46)
CAMREKKSSGDKLTF

SEQ ID NO: 152338 - protein, 13 aa, Homo sapiens
  CDR3 for beta chain variable domain of TCR clone 76169 (TRBV20-1, TRBJ2-5)
CSAREAFRETQYF

SEQ ID NO: 152339 - protein, 12 aa, Homo sapiens
  CDR3 for alpha chain variable domain of TCR clone 76170 (TRAV1-2, TRAJ26)
CAVSPYGQNFFF

SEQ ID NO: 152340 - protein, 14 aa, Homo sapiens
  CDR3 for beta chain variable domain of TCR clone 76170 (TRBV5-1, TRBJ2-7)
CASSFASGVNEQYF

SEQ ID NO: 152341 - protein, 12 aa, Homo sapiens
  CDR3 for alpha chain variable domain of TCR clone 76171 (TRAV17, TRAJ20)
CATDSNDYTLSF

SEQ ID NO: 152342 - protein, 17 aa, Homo sapiens
  CDR3 for beta chain variable domain of TCR clone 76171 (TRBV5-1, TRBJ2-2)
CASSLAGLSGGTGELFF

SEQ ID NO: 152343 - protein, 14 aa, Homo sapiens
  CDR3 for alpha chain variable domain of TCR clone 76172 (TRAV30, TRAJ26)
CGTEIVSYGQNFVF

SEQ ID NO: 152344 - protein, 15 aa, Homo sapiens
  CDR3 for beta chain variable domain of TCR clone 76172 (TRBV19, TRBJ1-1)
CASTSGQIQNTEAFF

SEQ ID NO: 152345 - protein, 13 aa, Homo sapiens
  CDR3 for alpha chain variable domain of TCR clone 76173 (TRAV8-6, TRAJ49)
CAVITNTGNQFYF

SEQ ID NO: 152346 - protein, 18 aa, Homo sapiens
  CDR3 for beta chain variable domain of TCR clone 76173 (TRBV11-2, TRBJ2-3)
CASSLGGASRGAPNTQYF

SEQ ID NO: 152347 - protein, 13 aa, Homo sapiens
  CDR3 for alpha chain variable domain of TCR clone 76174 (TRAV8-6, TRAJ49)
CAVITNTGNQFYL

SEQ ID NO: 152348 - protein, 14 aa, Homo sapiens
  CDR3 for beta chain variable domain of TCR clone 76174 (TRBV5-1, TRBJ2-7)
CASSRGESLYEQYF

SEQ ID NO: 152349 - protein, 13 aa, Homo sapiens
  CDR3 for alpha chain variable domain of TCR clone 76175 (TRAV21, TRAJ20)
CAVGLRVGYKLSF

SEQ ID NO: 152350 - protein, 13 aa, Homo sapiens
  CDR3 for beta chain variable domain of TCR clone 76175 (TRBV29-1, TRBJ2-1)
CSVEGGRVNEQFF

SEQ ID NO: 152351 - protein, 13 aa, Homo sapiens
  CDR3 for alpha chain variable domain of TCR clone 76176 (TRAV13-1, TRAJ39)
CSKYSNAGNMLTF

SEQ ID NO: 152352 - protein, 16 aa, Homo sapiens
  CDR3 for beta chain variable domain of TCR clone 76176 (TRBV12-5, TRBJ2-5)
CASGPRTSGNQETQYF

SEQ ID NO: 152353 - protein, 19 aa, Homo sapiens
  CDR3 for alpha chain variable domain of TCR clone 76177 (TRAV1-1, TRAJ8)
CAGGHRLSETCIWNWHPTS

SEQ ID NO: 152354 - protein, 15 aa, Homo sapiens
  CDR3 for beta chain variable domain of TCR clone 76177 (TRBV7-9, TRBJ1-4)
CASSRTGGFNEKLFF

SEQ ID NO: 152355 - protein, 15 aa, Homo sapiens
  CDR3 for alpha chain variable domain of TCR clone 76178 (TRAV26-1, TRAJ44)
CIVRANTGTANKLTF

SEQ ID NO: 152356 - protein, 16 aa, Homo sapiens
  CDR3 for beta chain variable domain of TCR clone 76178 (TRBV7-7, TRBJ2-1)
CASSLASGTSYNEQFF

SEQ ID NO: 152357 - protein, 10 aa, Homo sapiens
  CDR3 for alpha chain variable domain of TCR clone 76179 (TRAV23/DV6, TRAJ57)
CAASSTLSQG

SEQ ID NO: 152358 - protein, 17 aa, Homo sapiens
  CDR3 for beta chain variable domain of TCR clone 76179 (TRBV7-3, TRBJ2-3)
CASSLMKRMRGADTQYF

SEQ ID NO: 152359 - protein, 15 aa, Homo sapiens
  CDR3 for alpha chain variable domain of TCR clone 76180 (TRAV22, TRAJ18)
CAASDRGSTLGRLYF

SEQ ID NO: 152360 - protein, 15 aa, Homo sapiens
  CDR3 for beta chain variable domain of TCR clone 76180 (TRBV3-1, TRBJ2-3)
CASSHSGGAGDTQYF

SEQ ID NO: 152361 - protein, 23 aa, Homo sapiens
  CDR3 for alpha chain variable domain of TCR clone 76181 (TRAV26-1, TRAJ38)
CIADNAGNNHIQNPDPAVYQLRD

SEQ ID NO: 152362 - protein, 14 aa, Homo sapiens
  CDR3 for beta chain variable domain of TCR clone 76181 (TRBV7-8, TRBJ2-3)
CASSLEAGTDTQYF

SEQ ID NO: 152363 - protein, 15 aa, Homo sapiens
  CDR3 for alpha chain variable domain of TCR clone 76182 (TRAV26-1, TRAJ42)
CIVRVKGGSQGNIIF

SEQ ID NO: 152364 - protein, 14 aa, Homo sapiens
  CDR3 for beta chain variable domain of TCR clone 76182 (TRBV19, TRBJ2-2)
CATTGHANTGELFF

SEQ ID NO: 152365 - protein, 12 aa, Homo sapiens
  CDR3 for alpha chain variable domain of TCR clone 76183 (TRAV4, TRAJ26)
CLVGDYGQNFVF

SEQ ID NO: 152366 - protein, 16 aa, Homo sapiens
  CDR3 for beta chain variable domain of TCR clone 76183 (TRBV7-2, TRBJ1-2)
CASSSNQDRRGHCYTF

SEQ ID NO: 152367 - protein, 12 aa, Homo sapiens
  CDR3 for alpha chain variable domain of TCR clone 76184 (TRAV12-3, TRAJ17)
CAMTLTGNKLTF

SEQ ID NO: 152368 - protein, 13 aa, Homo sapiens
  CDR3 for beta chain variable domain of TCR clone 76184 (TRBV7-2, TRBJ1-1)
CASSPGTGFEAFF

SEQ ID NO: 152369 - protein, 14 aa, Homo sapiens
  CDR3 for alpha chain variable domain of TCR clone 76185 (TRAV23/DV6, TRAJ40)
CAASLTSGTYKYIF

SEQ ID NO: 152370 - protein, 15 aa, Homo sapiens
  CDR3 for beta chain variable domain of TCR clone 76185 (TRBV28, TRBJ2-1)
CASSIIAGGRSEQFF

SEQ ID NO: 152371 - protein, 13 aa, Homo sapiens
  CDR3 for alpha chain variable domain of TCR clone 76186 (TRAV12-2, TRAJ24)
CAVSTDSWGKLRF

SEQ ID NO: 152372 - protein, 15 aa, Homo sapiens
  CDR3 for beta chain variable domain of TCR clone 76186 (TRBV7-2, TRBJ2-2)
CASSPTGANTGELFF

SEQ ID NO: 152373 - protein, 14 aa, Homo sapiens
  CDR3 for alpha chain variable domain of TCR clone 76187 (TRAV3, TRAJ34)
CAVRDINNTGKLIF

SEQ ID NO: 152374 - protein, 14 aa, Homo sapiens
  CDR3 for beta chain variable domain of TCR clone 76187 (TRBV7-2, TRBJ2-2)
CASSLGQNTGELFF

SEQ ID NO: 152375 - protein, 16 aa, Homo sapiens
  CDR3 for alpha chain variable domain of TCR clone 76188 (TRAV13-1, TRAJ18)
CAASRMRGSTLGRPYF

SEQ ID NO: 152376 - protein, 16 aa, Homo sapiens
  CDR3 for beta chain variable domain of TCR clone 76188 (TRBV27, TRBJ1-1)
CASSSRGRTGYTEAFF

SEQ ID NO: 152377 - protein, 14 aa, Homo sapiens
  CDR3 for alpha chain variable domain of TCR clone 76189 (TRAV35, TRAJ38)
CAGPNAGNNRKLIW

SEQ ID NO: 152378 - protein, 12 aa, Homo sapiens
  CDR3 for beta chain variable domain of TCR clone 76189 (TRBV19, TRBJ2-7)
CASTDRGYEQYF

SEQ ID NO: 152379 - protein, 15 aa, Homo sapiens
  CDR3 for alpha chain variable domain of TCR clone 76190 (TRAV21, TRAJ53)
CATLNSGGSNYKLTF

SEQ ID NO: 152380 - protein, 14 aa, Homo sapiens
  CDR3 for beta chain variable domain of TCR clone 76190 (TRBV7-2, TRBJ2-7)
CASRSQEAAYEQYF

SEQ ID NO: 152381 - protein, 14 aa, Homo sapiens
  CDR3 for alpha chain variable domain of TCR clone 76191 (TRAV17, TRAJ54)
CATDANQGAQKLVF

SEQ ID NO: 152382 - protein, 17 aa, Homo sapiens
  CDR3 for beta chain variable domain of TCR clone 76191 (TRBV7-8, TRBJ2-6)
CASSAGTGGAGANVLTF

SEQ ID NO: 152383 - protein, 13 aa, Homo sapiens
  CDR3 for alpha chain variable domain of TCR clone 76192 (TRAV12-2, TRAJ20)
CAVYPSNDYKLGF

SEQ ID NO: 152384 - protein, 15 aa, Homo sapiens
  CDR3 for beta chain variable domain of TCR clone 76192 (TRBV27, TRBJ2-5)
CASSLYPRGGETQYF

SEQ ID NO: 152385 - protein, 14 aa, Homo sapiens
  CDR3 for alpha chain variable domain of TCR clone 76193 (TRAV12-3, TRAJ21)
CAMEGHQGFSKFYF

SEQ ID NO: 152386 - protein, 16 aa, Homo sapiens
  CDR3 for beta chain variable domain of TCR clone 76193 (TRBV19, TRBJ2-1)
CASSKAGPSSYNEQFF

SEQ ID NO: 152387 - protein, 14 aa, Homo sapiens
  CDR3 for alpha chain variable domain of TCR clone 76194 (TRAV13-1, TRAJ44)
CAAKASGTASKLTF

SEQ ID NO: 152388 - protein, 17 aa, Homo sapiens
  CDR3 for beta chain variable domain of TCR clone 76194 (TRBV7-3, TRBJ2-3)
CASSLMKRMRGADTQYF

SEQ ID NO: 152389 - protein, 12 aa, Homo sapiens
  CDR3 for alpha chain variable domain of TCR clone 76195 (TRAV35, TRAJ12)
CAGMDSSYKLIF

SEQ ID NO: 152390 - protein, 14 aa, Homo sapiens
  CDR3 for beta chain variable domain of TCR clone 76195 (TRBV28, TRBJ2-5)
CASSLYRGTETQYV

SEQ ID NO: 152391 - protein, 14 aa, Homo sapiens
  CDR3 for alpha chain variable domain of TCR clone 76196 (TRAV8-4, TRAJ39)
CAVSLNNAGNMLTF

SEQ ID NO: 152392 - protein, 16 aa, Homo sapiens
  CDR3 for beta chain variable domain of TCR clone 76196 (TRBV13, TRBJ2-7)
CASSSRGSGRTYEQYF

SEQ ID NO: 152393 - protein, 13 aa, Homo sapiens
  CDR3 for alpha chain variable domain of TCR clone 76197 (TRAV3, TRAJ21)
CAVREPDFNKFYF

SEQ ID NO: 152394 - protein, 13 aa, Homo sapiens
  CDR3 for beta chain variable domain of TCR clone 76197 (TRBV9, TRBJ2-1)
CASSPSGGDEQFF

SEQ ID NO: 152395 - protein, 10 aa, Homo sapiens
  CDR3 for alpha chain variable domain of TCR clone 76198 (TRAV8-4, TRAJ43)
CAMSADDMRF

SEQ ID NO: 152396 - protein, 16 aa, Homo sapiens
  CDR3 for beta chain variable domain of TCR clone 76198 (TRBV12-5, TRBJ2-5)
CASGPRTSGNQETQYF

SEQ ID NO: 152397 - protein, 12 aa, Homo sapiens
  CDR3 for alpha chain variable domain of TCR clone 76199 (TRAV21, TRAJ8)
CAVNTGFQKLVF

SEQ ID NO: 152398 - protein, 15 aa, Homo sapiens
  CDR3 for beta chain variable domain of TCR clone 76199 (TRBV28, TRBJ2-1)
CASSLGTRLYNEQFF

SEQ ID NO: 152399 - protein, 21 aa, Homo sapiens
  CDR3 for alpha chain variable domain of TCR clone 76200 (TRAV8-4, TRAJ47)
HLTKPSAHMSDAAERGNKLVL

SEQ ID NO: 152400 - protein, 14 aa, Homo sapiens
  CDR3 for beta chain variable domain of TCR clone 76200 (TRBV7-9, TRBJ2-1)
CASSPRDSLYEQFF

SEQ ID NO: 152401 - protein, 13 aa, Homo sapiens
  CDR3 for alpha chain variable domain of TCR clone 76201 (TRAV13-1, TRAJ49)
CAAMLYTGNQFYF

SEQ ID NO: 152402 - protein, 14 aa, Homo sapiens
  CDR3 for beta chain variable domain of TCR clone 76201 (TRBV19, TRBJ2-1)
CASPTFVLSGEQFS

SEQ ID NO: 152403 - protein, 12 aa, Homo sapiens
  CDR3 for alpha chain variable domain of TCR clone 76202 (TRAV12-3, TRAJ20)
CAMVRGDYKLSF

SEQ ID NO: 152404 - protein, 12 aa, Homo sapiens
  CDR3 for beta chain variable domain of TCR clone 76202 (TRBV14, TRBJ1-1)
CASSQLKGLAFF

SEQ ID NO: 152405 - protein, 12 aa, Homo sapiens
  CDR3 for alpha chain variable domain of TCR clone 76203 (TRAV27, TRAJ13)
CAGVRGYQKVTF

SEQ ID NO: 152406 - protein, 16 aa, Homo sapiens
  CDR3 for beta chain variable domain of TCR clone 76203 (TRBV28, TRBJ2-1)
CASSSSYSGSLNEQFV

SEQ ID NO: 152407 - protein, 15 aa, Homo sapiens
  CDR3 for alpha chain variable domain of TCR clone 76204 (TRAV12-3, TRAJ27)
CAMRAYNTMQANQPL

SEQ ID NO: 152408 - protein, 13 aa, Homo sapiens
  CDR3 for beta chain variable domain of TCR clone 76204 (TRBV11-2, TRBJ2-5)
CASSRGPSETQYF

SEQ ID NO: 152409 - protein, 13 aa, Homo sapiens
  CDR3 for alpha chain variable domain of TCR clone 76205 (TRAV12-2, TRAJ4)
CAGFSGGHNKLIF

SEQ ID NO: 152410 - protein, 14 aa, Homo sapiens
  CDR3 for beta chain variable domain of TCR clone 76205 (TRBV24-1, TRBJ1-1)
CATSIPRGDTEAFF

SEQ ID NO: 152411 - protein, 14 aa, Homo sapiens
  CDR3 for alpha chain variable domain of TCR clone 76206 (TRAV1-2, TRAJ8)
CAVREDTGFQKLVF

SEQ ID NO: 152412 - protein, 13 aa, Homo sapiens
  CDR3 for beta chain variable domain of TCR clone 76206 (TRBV10-3, TRBJ2-7)
CASKRAVNYEQYF

SEQ ID NO: 152413 - protein, 18 aa, Homo sapiens
  CDR3 for alpha chain variable domain of TCR clone 76207 (TRAV21, TRAJ52)
CAVRPSPAGGTGYGKLTF

SEQ ID NO: 152414 - protein, 15 aa, Homo sapiens
  CDR3 for beta chain variable domain of TCR clone 76207 (TRBV5-1, TRBJ2-3)
CASSVTSGSTDTQYF

SEQ ID NO: 152415 - protein, 15 aa, Homo sapiens
  CDR3 for alpha chain variable domain of TCR clone 76208 (TRAV17, TRAJ54)
CATEKLGQGAQKLVF

SEQ ID NO: 152416 - protein, 14 aa, Homo sapiens
  CDR3 for beta chain variable domain of TCR clone 76208 (TRBV7-3, TRBJ1-1)
CQQLRGQMNTEAFL

SEQ ID NO: 152417 - protein, 13 aa, Homo sapiens
  CDR3 for alpha chain variable domain of TCR clone 76209 (TRAV21, TRAJ27)
CAARPGNAGKSTF

SEQ ID NO: 152418 - protein, 15 aa, Homo sapiens
  CDR3 for beta chain variable domain of TCR clone 76209 (TRBV28, TRBJ2-7)
CASSPGGRGFYEQYF

SEQ ID NO: 152419 - protein, 14 aa, Homo sapiens
  CDR3 for alpha chain variable domain of TCR clone 76210 (TRAV36/DV7, TRAJ32)
CAVGHVGATNKLIF

SEQ ID NO: 152420 - protein, 16 aa, Homo sapiens
  CDR3 for beta chain variable domain of TCR clone 76210 (TRBV12-4, TRBJ1-4)
CDSSLKGIGHGEKLFF

SEQ ID NO: 152421 - protein, 13 aa, Homo sapiens
  CDR3 for alpha chain variable domain of TCR clone 76211 (TRAV12-2, TRAJ6)
CAVNVSRRLHTYI

SEQ ID NO: 152422 - protein, 12 aa, Homo sapiens
  CDR3 for beta chain variable domain of TCR clone 76211 (TRBV29-1, TRBJ2-3)
CSVTGGADTQYF

SEQ ID NO: 152423 - protein, 14 aa, Homo sapiens
  CDR3 for alpha chain variable domain of TCR clone 76212 (TRAV12-2, TRAJ11)
CVVEGGSGYSTLTF

SEQ ID NO: 152424 - protein, 16 aa, Homo sapiens
  CDR3 for beta chain variable domain of TCR clone 76212 (TRBV6-1, TRBJ1-2)
CASSGAWQGRSHGYTF

SEQ ID NO: 152425 - protein, 11 aa, Homo sapiens
  CDR3 for alpha chain variable domain of TCR clone 76213 (TRAV1-2, TRAJ40)
CAVPGTYKYIF

SEQ ID NO: 152426 - protein, 16 aa, Homo sapiens
  CDR3 for beta chain variable domain of TCR clone 76213 (TRBV7-6, TRBJ2-1)
CASSAPGPSSYNEQFF

SEQ ID NO: 152427 - protein, 15 aa, Homo sapiens
  CDR3 for alpha chain variable domain of TCR clone 76214 (TRAV35, TRAJ23)
CAGPLGNNQGGKLIF

SEQ ID NO: 152428 - protein, 14 aa, Homo sapiens
  CDR3 for beta chain variable domain of TCR clone 76214 (TRBV7-9, TRBJ1-1)
CASTPLQAYTEAFF

SEQ ID NO: 152429 - protein, 17 aa, Homo sapiens
  CDR3 for alpha chain variable domain of TCR clone 76215 (TRAV3, TRAJ12)
CAVRDGGRMDSSYKLIF

SEQ ID NO: 152430 - protein, 14 aa, Homo sapiens
  CDR3 for beta chain variable domain of TCR clone 76215 (TRBV7-9, TRBJ1-2)
CASSRRGANYGYTF

SEQ ID NO: 152431 - protein, 16 aa, Homo sapiens
  CDR3 for alpha chain variable domain of TCR clone 76216 (TRAV30, TRAJ24)
CGTEIVDADSWGKFQF

SEQ ID NO: 152432 - protein, 15 aa, Homo sapiens
  CDR3 for beta chain variable domain of TCR clone 76216 (TRBV2, TRBJ2-2)
CASSRETVGTGELFF

SEQ ID NO: 152433 - protein, 12 aa, Homo sapiens
  CDR3 for alpha chain variable domain of TCR clone 76217 (TRAV13-1, TRAJ49)
CAAPNTGNQFYF

SEQ ID NO: 152434 - protein, 17 aa, Homo sapiens
  CDR3 for beta chain variable domain of TCR clone 76217 (TRBV25-1, TRBJ2-7)
CASSDARVVFSSYERYF

SEQ ID NO: 152435 - protein, 14 aa, Homo sapiens
  CDR3 for alpha chain variable domain of TCR clone 76218 (TRAV23/DV6, TRAJ27)
CAASRDTNAGKSTF

SEQ ID NO: 152436 - protein, 16 aa, Homo sapiens
  CDR3 for beta chain variable domain of TCR clone 76218 (TRBV4-2, TRBJ2-5)
CASSQELVGSQETQYF

SEQ ID NO: 152437 - protein, 13 aa, Homo sapiens
  CDR3 for alpha chain variable domain of TCR clone 76219 (TRAV30, TRAJ34)
CGTVWYNTDKLIF

SEQ ID NO: 152438 - protein, 16 aa, Homo sapiens
  CDR3 for beta chain variable domain of TCR clone 76219 (TRBV7-9, TRBJ1-2)
CASSLGFSSGEDGYTF

SEQ ID NO: 152439 - protein, 15 aa, Homo sapiens
  CDR3 for alpha chain variable domain of TCR clone 76220 (TRAV12-2, TRAJ53)
CAVNEGGGSNYKLTF

SEQ ID NO: 152440 - protein, 13 aa, Homo sapiens
  CDR3 for beta chain variable domain of TCR clone 76220 (TRBV3-1, TRBJ1-1)
CASSPGVITEAFF

SEQ ID NO: 152441 - protein, 14 aa, Homo sapiens
  CDR3 for alpha chain variable domain of TCR clone 76221 (TRAV1-1, TRAJ27)
CAVIYNTNAGKSTF

SEQ ID NO: 152442 - protein, 16 aa, Homo sapiens
  CDR3 for beta chain variable domain of TCR clone 76221 (TRBV28, TRBJ2-7)
CASSLFFETGGPEQYF

SEQ ID NO: 152443 - protein, 10 aa, Homo sapiens
  CDR3 for alpha chain variable domain of TCR clone 76222 (TRAV13-2, TRAJ49)
CADTGNQFYF

SEQ ID NO: 152444 - protein, 13 aa, Homo sapiens
  CDR3 for beta chain variable domain of TCR clone 76222 (TRBV10-3, TRBJ1-2)
CAISERDSYGDTF

SEQ ID NO: 152445 - protein, 13 aa, Homo sapiens
  CDR3 for alpha chain variable domain of TCR clone 76223 (TRAV2, TRAJ20)
CAVEGPSEYKLSF

SEQ ID NO: 152446 - protein, 16 aa, Homo sapiens
  CDR3 for beta chain variable domain of TCR clone 76223 (TRBV25-1, TRBJ2-7)
CASSELTGGGVYEQYF

SEQ ID NO: 152447 - protein, 11 aa, Homo sapiens
  CDR3 for alpha chain variable domain of TCR clone 76224 (TRAV29/DV5, TRAJ31)
CAASYRDRLMF

SEQ ID NO: 152448 - protein, 19 aa, Homo sapiens
  CDR3 for beta chain variable domain of TCR clone 76224 (TRBV19, TRBJ2-5)
CASSIGQVTGFFLGETQYF

SEQ ID NO: 152449 - protein, 13 aa, Homo sapiens
  CDR3 for alpha chain variable domain of TCR clone 76225 (TRAV3, TRAJ27)
CAVRPLGAGKSTF

SEQ ID NO: 152450 - protein, 13 aa, Homo sapiens
  CDR3 for beta chain variable domain of TCR clone 76225 (TRBV7-9, TRBJ2-3)
CASSTGSTDTQYF

SEQ ID NO: 152451 - protein, 12 aa, Homo sapiens
  CDR3 for alpha chain variable domain of TCR clone 76226 (TRAV17, TRAJ4)
CATDCGYNKLIF

SEQ ID NO: 152452 - protein, 13 aa, Homo sapiens
  CDR3 for beta chain variable domain of TCR clone 76226 (TRBV29-1, TRBJ2-2)
CSTTGVNTGELFF

SEQ ID NO: 152453 - protein, 14 aa, Homo sapiens
  CDR3 for alpha chain variable domain of TCR clone 76227 (TRAV1-2, TRAJ16)
CAVNRFSDGQKLLF

SEQ ID NO: 152454 - protein, 14 aa, Homo sapiens
  CDR3 for beta chain variable domain of TCR clone 76227 (TRBV7-9, TRBJ2-7)
CASSLSQGSYEQYF

SEQ ID NO: 152455 - protein, 16 aa, Homo sapiens
  CDR3 for alpha chain variable domain of TCR clone 76228 (TRAV4, TRAJ5)
CLVGPDHGHGQESTYF

SEQ ID NO: 152456 - protein, 15 aa, Homo sapiens
  CDR3 for beta chain variable domain of TCR clone 76228 (TRBV27, TRBJ2-5)
CASSVIPSGGETQYF

SEQ ID NO: 152457 - protein, 12 aa, Homo sapiens
  CDR3 for alpha chain variable domain of TCR clone 76229 (TRAV1-1, TRAJ9)
CAVDTGGFKTIF

SEQ ID NO: 152458 - protein, 15 aa, Homo sapiens
  CDR3 for beta chain variable domain of TCR clone 76229 (TRBV7-9, TRBJ1-4)
CASSRTGGFNEKLFF

SEQ ID NO: 152459 - protein, 17 aa, Homo sapiens
  CDR3 for alpha chain variable domain of TCR clone 76230 (TRAV4, TRAJ13)
CLVGVQGSSGGYQKVTS

SEQ ID NO: 152460 - protein, 18 aa, Homo sapiens
  CDR3 for beta chain variable domain of TCR clone 76230 (TRBV15, TRBJ2-3)
CATSRDGARSWDTDTQYF

SEQ ID NO: 152461 - protein, 14 aa, Homo sapiens
  CDR3 for alpha chain variable domain of TCR clone 76231 (TRAV13-2, TRAJ15)
FAENPNQAGTALIF

SEQ ID NO: 152462 - protein, 16 aa, Homo sapiens
  CDR3 for beta chain variable domain of TCR clone 76231 (TRBV12-4, TRBJ1-2)
CASSPTATGKTRGYTF

SEQ ID NO: 152463 - protein, 13 aa, Homo sapiens
  CDR3 for alpha chain variable domain of TCR clone 76232 (TRAV8-1, TRAJ34)
CTVNAGNTDKLIF

SEQ ID NO: 152464 - protein, 13 aa, Homo sapiens
  CDR3 for beta chain variable domain of TCR clone 76232 (TRBV20-1, TRBJ2-1)
CSAGAGTYNEQFF

SEQ ID NO: 152465 - protein, 14 aa, Homo sapiens
  CDR3 for alpha chain variable domain of TCR clone 76233 (TRAV12-2, TRAJ17)
CAALFKAAGNKLTF

SEQ ID NO: 152466 - protein, 14 aa, Homo sapiens
  CDR3 for beta chain variable domain of TCR clone 76233 (TRBV7-2, TRBJ2-7)
CASRSQGAAYEQYF

SEQ ID NO: 152467 - protein, 13 aa, Homo sapiens
  CDR3 for alpha chain variable domain of TCR clone 76234 (TRAV36/DV7, TRAJ37)
CAVFSSNTGKLIF

SEQ ID NO: 152468 - protein, 14 aa, Homo sapiens
  CDR3 for beta chain variable domain of TCR clone 76234 (TRBV6-1, TRBJ1-3)
CASVQGEGGNTIYF

SEQ ID NO: 152469 - protein, 11 aa, Homo sapiens
  CDR3 for alpha chain variable domain of TCR clone 76235 (TRAV1-2, TRAJ11)
CAVRGYSTLTF

SEQ ID NO: 152470 - protein, 17 aa, Homo sapiens
  CDR3 for beta chain variable domain of TCR clone 76235 (TRBV7-8, TRBJ2-6)
CASSAGTGGAGANVLTF

SEQ ID NO: 152471 - protein, 14 aa, Homo sapiens
  CDR3 for alpha chain variable domain of TCR clone 76236 (TRAV9-2, TRAJ39)
CALYIYNAGNMLTF

SEQ ID NO: 152472 - protein, 15 aa, Homo sapiens
  CDR3 for beta chain variable domain of TCR clone 76236 (TRBV27, TRBJ1-5)
CASSLGTGFDQTQHF

SEQ ID NO: 152473 - protein, 14 aa, Homo sapiens
  CDR3 for alpha chain variable domain of TCR clone 76237 (TRAV1-2, TRAJ16)
CAVNRFSDGQNLLF

SEQ ID NO: 152474 - protein, 16 aa, Homo sapiens
  CDR3 for beta chain variable domain of TCR clone 76237 (TRBV7-2, TRBJ2-7)
CASSLDLSGGAYEQYF

SEQ ID NO: 152475 - protein, 14 aa, Homo sapiens
  CDR3 for alpha chain variable domain of TCR clone 76238 (TRAV12-2, TRAJ40)
CAVKIPSGTYKSIF

SEQ ID NO: 152476 - protein, 17 aa, Homo sapiens
  CDR3 for beta chain variable domain of TCR clone 76238 (TRBV13, TRBJ2-3)
CASSLSRVAGGRNTQYF

SEQ ID NO: 152477 - protein, 13 aa, Homo sapiens
  CDR3 for alpha chain variable domain of TCR clone 76239 (TRAV8-1, TRAJ39)
CAGLNNAGSMLTF

SEQ ID NO: 152478 - protein, 17 aa, Homo sapiens
  CDR3 for beta chain variable domain of TCR clone 76239 (TRBV19, TRBJ2-3)
CASSIDPAGGGTDTQYF

SEQ ID NO: 152479 - protein, 13 aa, Homo sapiens
  CDR3 for alpha chain variable domain of TCR clone 76240 (TRAV13-2, TRAJ48)
CAEMDFGNEKLTF

SEQ ID NO: 152480 - protein, 13 aa, Homo sapiens
  CDR3 for beta chain variable domain of TCR clone 76240 (TRBV14, TRBJ1-2)
CASSEDRRYGYTF

SEQ ID NO: 152481 - protein, 16 aa, Homo sapiens
  CDR3 for alpha chain variable domain of TCR clone 76241 (TRAV4, TRAJ22)
CLVGDLYSGSARQLTF

SEQ ID NO: 152482 - protein, 15 aa, Homo sapiens
  CDR3 for beta chain variable domain of TCR clone 76241 (TRBV4-1, TRBJ2-3)
CASSQDRLPPDTQYF

SEQ ID NO: 152483 - protein, 14 aa, Homo sapiens
  CDR3 for alpha chain variable domain of TCR clone 76242 (TRAV17, TRAJ35)
CATDRPGFGNVLHC

SEQ ID NO: 152484 - protein, 15 aa, Homo sapiens
  CDR3 for beta chain variable domain of TCR clone 76242 (TRBV28, TRBJ2-5)
CASSYGRVIQETQYF

SEQ ID NO: 152485 - protein, 16 aa, Homo sapiens
  CDR3 for alpha chain variable domain of TCR clone 76243 (TRAV4, TRAJ42)
CLVGPIYGGSQGNLIF

SEQ ID NO: 152486 - protein, 17 aa, Homo sapiens
  CDR3 for beta chain variable domain of TCR clone 76243 (TRBV11-2, TRBJ2-1)
CASSLYPPGVEYNEQFF

SEQ ID NO: 152487 - protein, 17 aa, Homo sapiens
  CDR3 for alpha chain variable domain of TCR clone 76244 (TRAV8-6, TRAJ58)
CAVSSWVGETSGSRLTC

SEQ ID NO: 152488 - protein, 17 aa, Homo sapiens
  CDR3 for beta chain variable domain of TCR clone 76244 (TRBV11-2, TRBJ2-1)
CASSLYPPGVEYNEQFF

SEQ ID NO: 152489 - protein, 12 aa, Homo sapiens
  CDR3 for alpha chain variable domain of TCR clone 76245 (TRAV12-3, TRAJ17)
CAMTLTGNKLTF

SEQ ID NO: 152490 - protein, 10 aa, Homo sapiens
  CDR3 for beta chain variable domain of TCR clone 76245 (TRBV23-1, TRBJ2-1)
KWSSYNEQFF

SEQ ID NO: 152491 - protein, 15 aa, Homo sapiens
  CDR3 for alpha chain variable domain of TCR clone 76246 (TRAV17, TRAJ57)
CAADWTPGGSEKLVF

SEQ ID NO: 152492 - protein, 15 aa, Homo sapiens
  CDR3 for beta chain variable domain of TCR clone 76246 (TRBV27, TRBJ2-1)
CASSLAGGPFNEQFF

SEQ ID NO: 152493 - protein, 16 aa, Homo sapiens
  CDR3 for alpha chain variable domain of TCR clone 76247 (TRAV26-1, TRAJ32)
CIVRTNYGGATNKLIF

SEQ ID NO: 152494 - protein, 14 aa, Homo sapiens
  CDR3 for beta chain variable domain of TCR clone 76247 (TRBV27, TRBJ1-1)
CASSLLSGLSEAFS

SEQ ID NO: 152495 - protein, 17 aa, Homo sapiens
  CDR3 for alpha chain variable domain of TCR clone 76248 (TRAV17, TRAJ52)
CATERPSGGTSYGNLTF

SEQ ID NO: 152496 - protein, 13 aa, Homo sapiens
  CDR3 for beta chain variable domain of TCR clone 76248 (TRBV7-9, TRBJ1-2)
CASSLKQNYGYTF

SEQ ID NO: 152497 - protein, 16 aa, Homo sapiens
  CDR3 for alpha chain variable domain of TCR clone 76249 (TRAV35, TRAJ37)
CWAFLRGSSNTGKLIF

SEQ ID NO: 152498 - protein, 13 aa, Homo sapiens
  CDR3 for beta chain variable domain of TCR clone 76249 (TRBV2, TRBJ1-2)
CVSSVRGNYGYTF

SEQ ID NO: 152499 - protein, 16 aa, Homo sapiens
  CDR3 for alpha chain variable domain of TCR clone 76250 (TRAV12-2, TRAJ32)
CAVNLGQGGATNKLIF

SEQ ID NO: 152500 - protein, 15 aa, Homo sapiens
  CDR3 for beta chain variable domain of TCR clone 76250 (TRBV20-1, TRBJ2-7)
CSARGPLAGGREQYF

SEQ ID NO: 152501 - protein, 15 aa, Homo sapiens
  CDR3 for alpha chain variable domain of TCR clone 76251 (TRAV21, TRAJ53)
CATLNSGGSNYELTF

SEQ ID NO: 152502 - protein, 14 aa, Homo sapiens
  CDR3 for beta chain variable domain of TCR clone 76251 (TRBV9, TRBJ1-2)
CASSVSTRSYGYTF

SEQ ID NO: 152503 - protein, 16 aa, Homo sapiens
  CDR3 for alpha chain variable domain of TCR clone 76252 (TRAV27, TRAJ48)
TAAQPGDTGLYLPLTF

SEQ ID NO: 152504 - protein, 12 aa, Homo sapiens
  CDR3 for beta chain variable domain of TCR clone 76252 (TRBV11-2, TRBJ2-2)
CASSLPTGELFF

SEQ ID NO: 152505 - protein, 12 aa, Homo sapiens
  CDR3 for alpha chain variable domain of TCR clone 76253 (TRAV12-1, TRAJ40)
CVFYSGTHKYIF

SEQ ID NO: 152506 - protein, 18 aa, Homo sapiens
  CDR3 for beta chain variable domain of TCR clone 76253 (TRBV12-4, TRBJ2-2)
CASSLVAGTRGRTGELFF

SEQ ID NO: 152507 - protein, 15 aa, Homo sapiens
  CDR3 for alpha chain variable domain of TCR clone 76254 (TRAV21, TRAJ53)
CATLNSGGSNYKLTF

SEQ ID NO: 152508 - protein, 15 aa, Homo sapiens
  CDR3 for beta chain variable domain of TCR clone 76254 (TRBV18, TRBJ2-1)
CASSPQSASYNEQFF

SEQ ID NO: 152509 - protein, 12 aa, Homo sapiens
  CDR3 for alpha chain variable domain of TCR clone 76255 (TRAV12-1, TRAJ40)
CVVYSGTNKYIF

SEQ ID NO: 152510 - protein, 18 aa, Homo sapiens
  CDR3 for beta chain variable domain of TCR clone 76255 (TRBV11-2, TRBJ2-3)
CASSLGGASRGAPNTQYF

SEQ ID NO: 152511 - protein, 15 aa, Homo sapiens
  CDR3 for alpha chain variable domain of TCR clone 76256 (TRAV3, TRAJ5)
CAVRDLDTGRRALTF

SEQ ID NO: 152512 - protein, 13 aa, Homo sapiens
  CDR3 for beta chain variable domain of TCR clone 76256 (TRBV12-4, TRBJ2-7)
CASSPTETYVQYL

SEQ ID NO: 152513 - protein, 11 aa, Homo sapiens
  CDR3 for alpha chain variable domain of TCR clone 76257 (TRAV13-1, TRAJ40)
CAVSGTYKYIF

SEQ ID NO: 152514 - protein, 14 aa, Homo sapiens
  CDR3 for beta chain variable domain of TCR clone 76257 (TRBV20-1, TRBJ1-3)
CSASPTGAGNTIYF

SEQ ID NO: 152515 - protein, 14 aa, Homo sapiens
  CDR3 for alpha chain variable domain of TCR clone 76258 (TRAV27, TRAJ13)
CRSSNSGGYQKVTF

SEQ ID NO: 152516 - protein, 14 aa, Homo sapiens
  CDR3 for beta chain variable domain of TCR clone 76258 (TRBV19, TRBJ1-2)
CASSLQGQAYGYTF

SEQ ID NO: 152517 - protein, 12 aa, Homo sapiens
  CDR3 for alpha chain variable domain of TCR clone 76259 (TRAV12-3, TRAJ4)
CAMKGAGTRLAV

SEQ ID NO: 152518 - protein, 14 aa, Homo sapiens
  CDR3 for beta chain variable domain of TCR clone 76259 (TRBV10-3, TRBJ1-1)
CAISDTDRGVEAFF

SEQ ID NO: 152519 - protein, 12 aa, Homo sapiens
  CDR3 for alpha chain variable domain of TCR clone 76260 (TRAV12-3, TRAJ34)
CAMGNNTDKLIF

SEQ ID NO: 152520 - protein, 14 aa, Homo sapiens
  CDR3 for beta chain variable domain of TCR clone 76260 (TRBV4-1, TRBJ2-2)
CASSQAVNTGELFF

SEQ ID NO: 152521 - protein, 12 aa, Homo sapiens
  CDR3 for alpha chain variable domain of TCR clone 76261 (TRAV29/DV5, TRAJ49)
CAATDTGNQFYF

SEQ ID NO: 152522 - protein, 19 aa, Homo sapiens
  CDR3 for beta chain variable domain of TCR clone 76261 (TRBV25-1, TRBJ2-2)
CAILVSRVDRGRKTGELFF

SEQ ID NO: 152523 - protein, 12 aa, Homo sapiens
  CDR3 for alpha chain variable domain of TCR clone 76262 (TRAV29/DV5, TRAJ15)
CASNQAGTALIF

SEQ ID NO: 152524 - protein, 16 aa, Homo sapiens
  CDR3 for beta chain variable domain of TCR clone 76262 (TRBV28, TRBJ1-4)
CASSPPYRGRSEKLFF

SEQ ID NO: 152525 - protein, 13 aa, Homo sapiens
  CDR3 for alpha chain variable domain of TCR clone 76263 (TRAV27, TRAJ45)
CRSSGGGADGLTF

SEQ ID NO: 152526 - protein, 13 aa, Homo sapiens
  CDR3 for beta chain variable domain of TCR clone 76263 (TRBV7-7, TRBJ2-5)
CASSRSCQETQYF

SEQ ID NO: 152527 - protein, 12 aa, Homo sapiens
  CDR3 for alpha chain variable domain of TCR clone 76264 (TRAV35, TRAJ31)
CAAASNNARLMF

SEQ ID NO: 152528 - protein, 13 aa, Homo sapiens
  CDR3 for beta chain variable domain of TCR clone 76264 (TRBV7-9, TRBJ1-2)
CASSLKQNYGYTF

SEQ ID NO: 152529 - protein, 13 aa, Homo sapiens
  CDR3 for alpha chain variable domain of TCR clone 76265 (TRAV12-2, TRAJ3)
CAFQYSSASKIIF

SEQ ID NO: 152530 - protein, 14 aa, Homo sapiens
  CDR3 for beta chain variable domain of TCR clone 76265 (TRBV20-1, TRBJ1-1)
CSAQTRIGGTEAFF

SEQ ID NO: 152531 - protein, 13 aa, Homo sapiens
  CDR3 for alpha chain variable domain of TCR clone 76266 (TRAV21, TRAJ15)
CAVANQAGTALIF

SEQ ID NO: 152532 - protein, 14 aa, Homo sapiens
  CDR3 for beta chain variable domain of TCR clone 76266 (TRBV27, TRBJ2-2)
CASSLGAATGGLFF

SEQ ID NO: 152533 - protein, 10 aa, Homo sapiens
  CDR3 for alpha chain variable domain of TCR clone 76267 (TRAV23/DV6, TRAJ43)
CAAAVAALEQ

SEQ ID NO: 152534 - protein, 16 aa, Homo sapiens
  CDR3 for beta chain variable domain of TCR clone 76267 (TRBV18, TRBJ1-2)
CASSPPERVTIYGCTF

SEQ ID NO: 152535 - protein, 11 aa, Homo sapiens
  CDR3 for alpha chain variable domain of TCR clone 76268 (TRAV3, TRAJ13)
CAVTSYQKVTS

SEQ ID NO: 152536 - protein, 15 aa, Homo sapiens
  CDR3 for beta chain variable domain of TCR clone 76268 (TRBV7-9, TRBJ2-7)
CASSSSGLAVYEQYF

SEQ ID NO: 152537 - protein, 14 aa, Homo sapiens
  CDR3 for alpha chain variable domain of TCR clone 76269 (TRAV2, TRAJ37)
CAVDFTSNTGKLIF

SEQ ID NO: 152538 - protein, 15 aa, Homo sapiens
  CDR3 for beta chain variable domain of TCR clone 76269 (TRBV2, TRBJ2-1)
CASSETGGNYNEQFF

SEQ ID NO: 152539 - protein, 14 aa, Homo sapiens
  CDR3 for alpha chain variable domain of TCR clone 76270 (TRAV29/DV5, TRAJ36)
CAARRKTGANNLFF

SEQ ID NO: 152540 - protein, 14 aa, Homo sapiens
  CDR3 for beta chain variable domain of TCR clone 76270 (TRBV12-5, TRBJ2-5)
CASGARTHQETQYF

SEQ ID NO: 152541 - protein, 13 aa, Homo sapiens
  CDR3 for alpha chain variable domain of TCR clone 76271 (TRAV3, TRAJ27)
CAVRPLGAGKSTF

SEQ ID NO: 152542 - protein, 14 aa, Homo sapiens
  CDR3 for beta chain variable domain of TCR clone 76271 (TRBV20-1, TRBJ2-7)
CSAKTGTGGYEQYF

SEQ ID NO: 152543 - protein, 13 aa, Homo sapiens
  CDR3 for alpha chain variable domain of TCR clone 76272 (TRAV13-1, TRAJ39)
CSKYSNAGNMLTF

SEQ ID NO: 152544 - protein, 16 aa, Homo sapiens
  CDR3 for beta chain variable domain of TCR clone 76272 (TRBV20-1, TRBJ1-4)
CSAPGQGVLTNEKLFF

SEQ ID NO: 152545 - protein, 13 aa, Homo sapiens
  CDR3 for alpha chain variable domain of TCR clone 76273 (TRAV8-3, TRAJ37)
CAVPSGNTGKLIF

SEQ ID NO: 152546 - protein, 12 aa, Homo sapiens
  CDR3 for beta chain variable domain of TCR clone 76273 (TRBV11-2, TRBJ2-1)
CASSPGNNEQFF

SEQ ID NO: 152547 - protein, 15 aa, Homo sapiens
  CDR3 for alpha chain variable domain of TCR clone 76274 (TRAV26-2, TRAJ26)
CILRDLDNYGQNFVF

SEQ ID NO: 152548 - protein, 14 aa, Homo sapiens
  CDR3 for beta chain variable domain of TCR clone 76274 (TRBV29-1, TRBJ2-5)
CSFWTPYAGETQYF

SEQ ID NO: 152549 - protein, 15 aa, Homo sapiens
  CDR3 for alpha chain variable domain of TCR clone 76275 (TRAV26-1, TRAJ21)
CIVRVPNYNFNKFYF

SEQ ID NO: 152550 - protein, 16 aa, Homo sapiens
  CDR3 for beta chain variable domain of TCR clone 76275 (TRBV7-9, TRBJ2-3)
CASSLQGNPGTDTQYF

SEQ ID NO: 152551 - protein, 16 aa, Homo sapiens
  CDR3 for alpha chain variable domain of TCR clone 76276 (TRAV30, TRAJ24)
CGTEIVDADSWGKFQF

SEQ ID NO: 152552 - protein, 14 aa, Homo sapiens
  CDR3 for beta chain variable domain of TCR clone 76276 (TRBV27, TRBJ2-5)
CASSSLKGWETQYF

SEQ ID NO: 152553 - protein, 15 aa, Homo sapiens
  CDR3 for alpha chain variable domain of TCR clone 76277 (TRAV2, TRAJ9)
CAVEDRGTGGFKTIF

SEQ ID NO: 152554 - protein, 16 aa, Homo sapiens
  CDR3 for beta chain variable domain of TCR clone 76277 (TRBV7-3, TRBJ2-2)
CASSLKRGTLSGELFF

SEQ ID NO: 152555 - protein, 17 aa, Homo sapiens
  CDR3 for alpha chain variable domain of TCR clone 76278 (TRAV3, TRAJ42)
CAVRDRDYGGSQGNLIF

SEQ ID NO: 152556 - protein, 15 aa, Homo sapiens
  CDR3 for beta chain variable domain of TCR clone 76278 (TRBV7-3, TRBJ2-2)
CASSETGQGTGELFF

SEQ ID NO: 152557 - protein, 12 aa, Homo sapiens
  CDR3 for alpha chain variable domain of TCR clone 76279 (TRAV13-1, TRAJ21)
CAAKEGFNKCYF

SEQ ID NO: 152558 - protein, 15 aa, Homo sapiens
  CDR3 for beta chain variable domain of TCR clone 76279 (TRBV9, TRBJ1-6)
CASSVAGTGDSPLHF

SEQ ID NO: 152559 - protein, 15 aa, Homo sapiens
  CDR3 for alpha chain variable domain of TCR clone 76280 (TRAV4, TRAJ39)
CLVGPNNNVGNMLTF

SEQ ID NO: 152560 - protein, 16 aa, Homo sapiens
  CDR3 for beta chain variable domain of TCR clone 76280 (TRBV13, TRBJ2-2)
CASSPRTGEHTGELFF

SEQ ID NO: 152561 - protein, 18 aa, Homo sapiens
  CDR3 for alpha chain variable domain of TCR clone 76281 (TRAV21, TRAJ52)
CAVRPSPAGGTSYGKLTF

SEQ ID NO: 152562 - protein, 15 aa, Homo sapiens
  CDR3 for beta chain variable domain of TCR clone 76281 (TRBV7-9, TRBJ2-7)
CARSSSGLAVYEQYF

SEQ ID NO: 152563 - protein, 10 aa, Homo sapiens
  CDR3 for alpha chain variable domain of TCR clone 76282 (TRAV21, TRAJ43)
CAVRIGDVRF

SEQ ID NO: 152564 - protein, 13 aa, Homo sapiens
  CDR3 for beta chain variable domain of TCR clone 76282 (TRBV20-1, TRBJ2-7)
CSAPGLADYEQYF

SEQ ID NO: 152565 - protein, 11 aa, Homo sapiens
  CDR3 for alpha chain variable domain of TCR clone 76283 (TRAV12-2, TRAJ23)
CARGRGGKLIF

SEQ ID NO: 152566 - protein, 14 aa, Homo sapiens
  CDR3 for beta chain variable domain of TCR clone 76283 (TRBV28, TRBJ2-5)
CASSLGDRAETQYL

SEQ ID NO: 152567 - protein, 16 aa, Homo sapiens
  CDR3 for alpha chain variable domain of TCR clone 76284 (TRAV8-2, TRAJ45)
CVVTTLQEEVLTDSPL

SEQ ID NO: 152568 - protein, 14 aa, Homo sapiens
  CDR3 for beta chain variable domain of TCR clone 76284 (TRBV7-2, TRBJ1-1)
CASSFLTGTTEAFF

SEQ ID NO: 152569 - protein, 14 aa, Homo sapiens
  CDR3 for alpha chain variable domain of TCR clone 76285 (TRAV2, TRAJ37)
CAVEDQGNTGKLIF

SEQ ID NO: 152570 - protein, 14 aa, Homo sapiens
  CDR3 for beta chain variable domain of TCR clone 76285 (TRBV18, TRBJ2-1)
CAGSPQGRFNEQFF

SEQ ID NO: 152571 - protein, 12 aa, Homo sapiens
  CDR3 for alpha chain variable domain of TCR clone 76286 (TRAV12-3, TRAJ3)
CAIDSSASKIIF

SEQ ID NO: 152572 - protein, 17 aa, Homo sapiens
  CDR3 for beta chain variable domain of TCR clone 76286 (TRBV7-9, TRBJ2-3)
CASSLEEAGAYPDTKYF

SEQ ID NO: 152573 - protein, 14 aa, Homo sapiens
  CDR3 for alpha chain variable domain of TCR clone 76287 (TRAV1-2, TRAJ8)
CAVGEDTGFQELVF

SEQ ID NO: 152574 - protein, 16 aa, Homo sapiens
  CDR3 for beta chain variable domain of TCR clone 76287 (TRBV7-3, TRBJ2-2)
CASSLKRGTLSGELFF

SEQ ID NO: 152575 - protein, 16 aa, Homo sapiens
  CDR3 for alpha chain variable domain of TCR clone 76288 (TRAV12-2, TRAJ48)
CAVNPTSNFGNEKLTF

SEQ ID NO: 152576 - protein, 12 aa, Homo sapiens
  CDR3 for beta chain variable domain of TCR clone 76288 (TRBV9, TRBJ2-3)
CACSLRAGTQYF

SEQ ID NO: 152577 - protein, 13 aa, Homo sapiens
  CDR3 for alpha chain variable domain of TCR clone 76289 (TRAV3, TRAJ43)
CAVRDTRGGDMRC

SEQ ID NO: 152578 - protein, 15 aa, Homo sapiens
  CDR3 for beta chain variable domain of TCR clone 76289 (TRBV6-5, TRBJ1-5)
CASSYSRRSNQPQHF

SEQ ID NO: 152579 - protein, 15 aa, Homo sapiens
  CDR3 for alpha chain variable domain of TCR clone 76290 (TRAV3, TRAJ22)
WAVRDRGGSARQLTF

SEQ ID NO: 152580 - protein, 16 aa, Homo sapiens
  CDR3 for beta chain variable domain of TCR clone 76290 (TRBV5-4, TRBJ2-3)
CASQQPGAGGADTQYF

SEQ ID NO: 152581 - protein, 15 aa, Homo sapiens
  CDR3 for alpha chain variable domain of TCR clone 76291 (TRAV21, TRAJ45)
CAVSYSGGGADGLTF

SEQ ID NO: 152582 - protein, 13 aa, Homo sapiens
  CDR3 for beta chain variable domain of TCR clone 76291 (TRBV20-1, TRBJ2-5)
CSAATELQETQFF

SEQ ID NO: 152583 - protein, 15 aa, Homo sapiens
  CDR3 for alpha chain variable domain of TCR clone 76292 (TRAV34, TRAJ38)
CGADFTPGNNRKLIW

SEQ ID NO: 152584 - protein, 16 aa, Homo sapiens
  CDR3 for beta chain variable domain of TCR clone 76292 (TRBV20-1, TRBJ1-4)
CSAPGQGLLTNEKLFF

SEQ ID NO: 152585 - protein, 14 aa, Homo sapiens
  CDR3 for alpha chain variable domain of TCR clone 76293 (TRAV1-2, TRAJ16)
CAVNRFSDGQKLLF

SEQ ID NO: 152586 - protein, 16 aa, Homo sapiens
  CDR3 for beta chain variable domain of TCR clone 76293 (TRBV7-3, TRBJ2-2)
CASSLKRGTLSGKLFF

SEQ ID NO: 152587 - protein, 12 aa, Homo sapiens
  CDR3 for alpha chain variable domain of TCR clone 76294 (TRAV16, TRAJ10)
CSRTGGGNKLTF

SEQ ID NO: 152588 - protein, 15 aa, Homo sapiens
  CDR3 for beta chain variable domain of TCR clone 76294 (TRBV6-3, TRBJ2-7)
CASSSPGTVFYEQFF

SEQ ID NO: 152589 - protein, 16 aa, Homo sapiens
  CDR3 for alpha chain variable domain of TCR clone 76295 (TRAV16, TRAJ4)
CALSRMFSGGYNKLNF

SEQ ID NO: 152590 - protein, 16 aa, Homo sapiens
  CDR3 for beta chain variable domain of TCR clone 76295 (TRBV24-1, TRBJ2-3)
CATSDPGTGATDTQYF

SEQ ID NO: 152591 - protein, 15 aa, Homo sapiens
  CDR3 for alpha chain variable domain of TCR clone 76296 (TRAV8-3, TRAJ11)
CAVGLLYSGYSTLTF

SEQ ID NO: 152592 - protein, 16 aa, Homo sapiens
  CDR3 for beta chain variable domain of TCR clone 76296 (TRBV7-9, TRBJ1-2)
CASSLGFSSGEDGYTF

SEQ ID NO: 152593 - protein, 13 aa, Homo sapiens
  CDR3 for alpha chain variable domain of TCR clone 76297 (TRAV3, TRAJ21)
CAVREPDFNKFYF

SEQ ID NO: 152594 - protein, 12 aa, Homo sapiens
  CDR3 for beta chain variable domain of TCR clone 76297 (TRBV7-9, TRBJ2-7)
CASSLEGYEQYF

SEQ ID NO: 152595 - protein, 15 aa, Homo sapiens
  CDR3 for alpha chain variable domain of TCR clone 76298 (TRAV12-1, TRAJ44)
CVVDTPQGTASKLTF

SEQ ID NO: 152596 - protein, 14 aa, Homo sapiens
  CDR3 for beta chain variable domain of TCR clone 76298 (TRBV2, TRBJ1-6)
CALSPSDPRSPLHF

SEQ ID NO: 152597 - protein, 17 aa, Homo sapiens
  CDR3 for alpha chain variable domain of TCR clone 76299 (TRAV12-3, TRAJ6)
CAMSARGGAGGSYIPTF

SEQ ID NO: 152598 - protein, 12 aa, Homo sapiens
  CDR3 for beta chain variable domain of TCR clone 76299 (TRBV11-2, TRBJ2-1)
CASSPGNNEQFF

SEQ ID NO: 152599 - protein, 18 aa, Homo sapiens
  CDR3 for alpha chain variable domain of TCR clone 76300 (TRAV29/DV5, TRAJ52)
CAAGFRGAGGTSYGKLTF

SEQ ID NO: 152600 - protein, 15 aa, Homo sapiens
  CDR3 for beta chain variable domain of TCR clone 76300 (TRBV18, TRBJ2-3)
CASSPLAGETDTQYF

SEQ ID NO: 152601 - protein, 13 aa, Homo sapiens
  CDR3 for alpha chain variable domain of TCR clone 76301 (TRAV3, TRAJ27)
CAVRPLGAGKSTF

SEQ ID NO: 152602 - protein, 14 aa, Homo sapiens
  CDR3 for beta chain variable domain of TCR clone 76301 (TRBV20-1, TRBJ2-1)
CSAQIGGSANEQFF

SEQ ID NO: 152603 - protein, 19 aa, Homo sapiens
  CDR3 for alpha chain variable domain of TCR clone 76302 (TRAV26-1, TRAJ52)
CIVRAHRNAGGASYGKLTF

SEQ ID NO: 152604 - protein, 15 aa, Homo sapiens
  CDR3 for beta chain variable domain of TCR clone 76302 (TRBV29-1, TRBJ2-1)
CSGRDRKSSYNEQFF

SEQ ID NO: 152605 - protein, 13 aa, Homo sapiens
  CDR3 for alpha chain variable domain of TCR clone 76303 (TRAV35, TRAJ44)
CAGLSGTASKLTF

SEQ ID NO: 152606 - protein, 12 aa, Homo sapiens
  CDR3 for beta chain variable domain of TCR clone 76303 (TRBV5-4, TRBJ2-7)
CASSWAGQGENF

SEQ ID NO: 152607 - protein, 17 aa, Homo sapiens
  CDR3 for alpha chain variable domain of TCR clone 76304 (TRAV3, TRAJ6)
CAVRDGPRAGGSYIPTF

SEQ ID NO: 152608 - protein, 16 aa, Homo sapiens
  CDR3 for beta chain variable domain of TCR clone 76304 (TRBV4-1, TRBJ2-3)
CASSQSTSGAEDTQYF

SEQ ID NO: 152609 - protein, 18 aa, Homo sapiens
  CDR3 for alpha chain variable domain of TCR clone 76305 (TRAV13-1, TRAJ52)
CAASKRSAGGTSYGKLTF

SEQ ID NO: 152610 - protein, 18 aa, Homo sapiens
  CDR3 for beta chain variable domain of TCR clone 76305 (TRBV12-4, TRBJ2-2)
CASSRSGGAIPNTGELFF

SEQ ID NO: 152611 - protein, 13 aa, Homo sapiens
  CDR3 for alpha chain variable domain of TCR clone 76306 (TRAV3, TRAJ29)
CAVRDIINTPLVF

SEQ ID NO: 152612 - protein, 14 aa, Homo sapiens
  CDR3 for beta chain variable domain of TCR clone 76306 (TRBV27, TRBJ2-1)
CASSATGGYNEQFF

SEQ ID NO: 152613 - protein, 15 aa, Homo sapiens
  CDR3 for alpha chain variable domain of TCR clone 76307 (TRAV35, TRAJ40)
CAGRLGTSGTYKYIF

SEQ ID NO: 152614 - protein, 14 aa, Homo sapiens
  CDR3 for beta chain variable domain of TCR clone 76307 (TRBV7-3, TRBJ2-1)
CASSLAGGTNEQFF

SEQ ID NO: 152615 - protein, 14 aa, Homo sapiens
  CDR3 for alpha chain variable domain of TCR clone 76308 (TRAV2, TRAJ20)
CAVELAPNDYKLSF

SEQ ID NO: 152616 - protein, 14 aa, Homo sapiens
  CDR3 for beta chain variable domain of TCR clone 76308 (TRBV4-2, TRBJ1-2)
CASSQVGQNYGYTF

SEQ ID NO: 152617 - protein, 16 aa, Homo sapiens
  CDR3 for alpha chain variable domain of TCR clone 76309 (TRAV3, TRAJ37)
CAVRGKGSGNTGKLIF

SEQ ID NO: 152618 - protein, 14 aa, Homo sapiens
  CDR3 for beta chain variable domain of TCR clone 76309 (TRBV20-1, TRBJ2-3)
CRARGGTSTDTQYF

SEQ ID NO: 152619 - protein, 15 aa, Homo sapiens
  CDR3 for alpha chain variable domain of TCR clone 76310 (TRAV27, TRAJ42)
CAGPNYGGSQGNLIF

SEQ ID NO: 152620 - protein, 13 aa, Homo sapiens
  CDR3 for beta chain variable domain of TCR clone 76310 (TRBV12-4, TRBJ2-2)
CASSITGSGELFF

SEQ ID NO: 152621 - protein, 11 aa, Homo sapiens
  CDR3 for alpha chain variable domain of TCR clone 76311 (TRAV12-2, TRAJ43)
CVEYDNNDMRF

SEQ ID NO: 152622 - protein, 16 aa, Homo sapiens
  CDR3 for beta chain variable domain of TCR clone 76311 (TRBV5-4, TRBJ2-1)
CASSLVGSGQDNEQFF

SEQ ID NO: 152623 - protein, 16 aa, Homo sapiens
  CDR3 for alpha chain variable domain of TCR clone 76312 (TRAV8-3, TRAJ44)
CAVGSSNTGTASRLTF

SEQ ID NO: 152624 - protein, 15 aa, Homo sapiens
  CDR3 for beta chain variable domain of TCR clone 76312 (TRBV27, TRBJ1-5)
CASTFNRGSNQPQHF

SEQ ID NO: 152625 - protein, 12 aa, Homo sapiens
  CDR3 for alpha chain variable domain of TCR clone 76313 (TRAV12-1, TRAJ40)
CVVYSGTYKYIF

SEQ ID NO: 152626 - protein, 16 aa, Homo sapiens
  CDR3 for beta chain variable domain of TCR clone 76313 (TRBV2, TRBJ2-1)
CASSVGGSLSYNEQFF

SEQ ID NO: 152627 - protein, 10 aa, Homo sapiens
  CDR3 for alpha chain variable domain of TCR clone 76314 (TRAV23/DV6, TRAJ57)
CAASSTLSQG

SEQ ID NO: 152628 - protein, 15 aa, Homo sapiens
  CDR3 for beta chain variable domain of TCR clone 76314 (TRBV11-2, TRBJ2-1)
CASSLGNSGLNEQFF

SEQ ID NO: 152629 - protein, 13 aa, Homo sapiens
  CDR3 for alpha chain variable domain of TCR clone 76315 (TRAV27, TRAJ41)
CAGEGNSGYALNF

SEQ ID NO: 152630 - protein, 14 aa, Homo sapiens
  CDR3 for beta chain variable domain of TCR clone 76315 (TRBV7-2, TRBJ1-1)
CASSFLKGTTEAFF

SEQ ID NO: 152631 - protein, 13 aa, Homo sapiens
  CDR3 for alpha chain variable domain of TCR clone 76316 (TRAV35, TRAJ57)
CAGSQGGSEKLVF

SEQ ID NO: 152632 - protein, 14 aa, Homo sapiens
  CDR3 for beta chain variable domain of TCR clone 76316 (TRBV25-1, TRBJ1-1)
CASTPLGGNTEAFF

SEQ ID NO: 152633 - protein, 13 aa, Homo sapiens
  CDR3 for alpha chain variable domain of TCR clone 76317 (TRAV13-1, TRAJ37)
CAARSGNTGKLIF

SEQ ID NO: 152634 - protein, 15 aa, Homo sapiens
  CDR3 for beta chain variable domain of TCR clone 76317 (TRBV11-3, TRBJ2-3)
CASLKDGREGDTQYF

SEQ ID NO: 152635 - protein, 14 aa, Homo sapiens
  CDR3 for alpha chain variable domain of TCR clone 76318 (TRAV13-1, TRAJ9)
CAASALTGGFKTIF

SEQ ID NO: 152636 - protein, 14 aa, Homo sapiens
  CDR3 for beta chain variable domain of TCR clone 76318 (TRBV4-1, TRBJ2-2)
CASSQAVNTGELFF

SEQ ID NO: 152637 - protein, 14 aa, Homo sapiens
  CDR3 for alpha chain variable domain of TCR clone 76319 (TRAV13-1, TRAJ39)
CAASYNNTGNMLTF

SEQ ID NO: 152638 - protein, 13 aa, Homo sapiens
  CDR3 for beta chain variable domain of TCR clone 76319 (TRBV24-1, TRBJ1-4)
CATNNGRSEKLFF

SEQ ID NO: 152639 - protein, 14 aa, Homo sapiens
  CDR3 for alpha chain variable domain of TCR clone 76320 (TRAV8-2, TRAJ4)
CVVSPSGGYNKLIF

SEQ ID NO: 152640 - protein, 16 aa, Homo sapiens
  CDR3 for beta chain variable domain of TCR clone 76320 (TRBV13, TRBJ2-3)
CQQPLQGSGGRNTQYF

SEQ ID NO: 152641 - protein, 13 aa, Homo sapiens
  CDR3 for alpha chain variable domain of TCR clone 76321 (TRAV3, TRAJ4)
CAVRDGGYNKLIF

SEQ ID NO: 152642 - protein, 15 aa, Homo sapiens
  CDR3 for beta chain variable domain of TCR clone 76321 (TRBV5-1, TRBJ2-1)
CTSSPPRAPYNEQFF

SEQ ID NO: 152643 - protein, 22 aa, Homo sapiens
  CDR3 for alpha chain variable domain of TCR clone 76322 (TRAV4, )
CLVGPRNYDIQNPDPAVYQLRD

SEQ ID NO: 152644 - protein, 17 aa, Homo sapiens
  CDR3 for beta chain variable domain of TCR clone 76322 (TRBV24-1, TRBJ2-1)
CATSDVSTSGTYNEQFF

SEQ ID NO: 152645 - protein, 13 aa, Homo sapiens
  CDR3 for alpha chain variable domain of TCR clone 76323 (TRAV16, TRAJ34)
CALTGYNTDKPIF

SEQ ID NO: 152646 - protein, 13 aa, Homo sapiens
  CDR3 for beta chain variable domain of TCR clone 76323 (TRBV6-1, TRBJ2-1)
CASREDGGHEQFF

SEQ ID NO: 152647 - protein, 12 aa, Homo sapiens
  CDR3 for alpha chain variable domain of TCR clone 76324 (TRAV12-3, TRAJ17)
CAMTLAGNKLTF

SEQ ID NO: 152648 - protein, 15 aa, Homo sapiens
  CDR3 for beta chain variable domain of TCR clone 76324 (TRBV20-1, TRBJ2-7)
CSASDRVSGMDEQYF

SEQ ID NO: 152649 - protein, 14 aa, Homo sapiens
  CDR3 for alpha chain variable domain of TCR clone 76325 (TRAV1-2, TRAJ8)
CAVRKDTGFQKLVF

SEQ ID NO: 152650 - protein, 12 aa, Homo sapiens
  CDR3 for beta chain variable domain of TCR clone 76325 (TRBV2, TRBJ2-1)
CAYGPPGNEQFF

SEQ ID NO: 152651 - protein, 18 aa, Homo sapiens
  CDR3 for alpha chain variable domain of TCR clone 76326 (TRAV21, TRAJ52)
CAVRPSPAGGTSNGKLTF

SEQ ID NO: 152652 - protein, 14 aa, Homo sapiens
  CDR3 for beta chain variable domain of TCR clone 76326 (TRBV4-1, TRBJ2-2)
CASSQAVNTGELFF

SEQ ID NO: 152653 - protein, 14 aa, Homo sapiens
  CDR3 for alpha chain variable domain of TCR clone 76327 (TRAV17, TRAJ43)
CATDHPYNNNDMRF

SEQ ID NO: 152654 - protein, 12 aa, Homo sapiens
  CDR3 for beta chain variable domain of TCR clone 76327 (TRBV11-2, TRBJ2-2)
CASSLPTGELFF

SEQ ID NO: 152655 - protein, 15 aa, Homo sapiens
  CDR3 for alpha chain variable domain of TCR clone 76328 (TRAV29/DV5, TRAJ24)
CAASGATDSWGKFQL

SEQ ID NO: 152656 - protein, 13 aa, Homo sapiens
  CDR3 for beta chain variable domain of TCR clone 76328 (TRBV19, TRBJ1-2)
CASSVPGQDGYTF

SEQ ID NO: 152657 - protein, 14 aa, Homo sapiens
  CDR3 for alpha chain variable domain of TCR clone 76329 (TRAV20, TRAJ22)
CAVAVGGSARQLTF

SEQ ID NO: 152658 - protein, 15 aa, Homo sapiens
  CDR3 for beta chain variable domain of TCR clone 76329 (TRBV7-2, TRBJ1-1)
CASSFAGDRDTEAFF

SEQ ID NO: 152659 - protein, 11 aa, Homo sapiens
  CDR3 for alpha chain variable domain of TCR clone 76330 (TRAV2, TRAJ20)
CAVLNDYKLSF

SEQ ID NO: 152660 - protein, 13 aa, Homo sapiens
  CDR3 for beta chain variable domain of TCR clone 76330 (TRBV19, TRBJ2-7)
CASSPRQSYEQYF

SEQ ID NO: 152661 - protein, 11 aa, Homo sapiens
  CDR3 for alpha chain variable domain of TCR clone 76331 (TRAV12-1, TRAJ8)
CVVTGFQKLVF

SEQ ID NO: 152662 - protein, 14 aa, Homo sapiens
  CDR3 for beta chain variable domain of TCR clone 76331 (TRBV12-5, TRBJ2-5)
CASGSRTHQETQYF

SEQ ID NO: 152663 - protein, 13 aa, Homo sapiens
  CDR3 for alpha chain variable domain of TCR clone 76332 (TRAV9-2, TRAJ9)
CALSDRGGFKTIF

SEQ ID NO: 152664 - protein, 15 aa, Homo sapiens
  CDR3 for beta chain variable domain of TCR clone 76332 (TRBV6-3, TRBJ2-7)
CASSSPGTVFYEQYF

SEQ ID NO: 152665 - protein, 13 aa, Homo sapiens
  CDR3 for alpha chain variable domain of TCR clone 76333 (TRAV12-1, TRAJ16)
CVVNGPDGQKLLF

SEQ ID NO: 152666 - protein, 15 aa, Homo sapiens
  CDR3 for beta chain variable domain of TCR clone 76333 (TRBV6-3, TRBJ2-7)
CASSSPGTVFYEQYV

SEQ ID NO: 152667 - protein, 14 aa, Homo sapiens
  CDR3 for alpha chain variable domain of TCR clone 76334 (TRAV1-2, TRAJ28)
CVARSGAGSYQLTF

SEQ ID NO: 152668 - protein, 16 aa, Homo sapiens
  CDR3 for beta chain variable domain of TCR clone 76334 (TRBV5-1, TRBJ2-5)
CASSLRGTSGQETQYF

SEQ ID NO: 152669 - protein, 15 aa, Homo sapiens
  CDR3 for alpha chain variable domain of TCR clone 76335 (TRAV26-1, TRAJ48)
CIARWSWFGNEKLTF

SEQ ID NO: 152670 - protein, 12 aa, Homo sapiens
  CDR3 for beta chain variable domain of TCR clone 76335 (TRBV19, TRBJ2-5)
CASSISEETQCF

SEQ ID NO: 152671 - protein, 14 aa, Homo sapiens
  CDR3 for alpha chain variable domain of TCR clone 76336 (TRAV1-2, TRAJ8)
CAVREDTGFQKLVF

SEQ ID NO: 152672 - protein, 16 aa, Homo sapiens
  CDR3 for beta chain variable domain of TCR clone 76336 (TRBV12-5, TRBJ2-5)
CASGPRTSGNQETQYV

SEQ ID NO: 152673 - protein, 15 aa, Homo sapiens
  CDR3 for alpha chain variable domain of TCR clone 76337 (TRAV8-3, TRAJ45)
CASSYSGGGADGLTF

SEQ ID NO: 152674 - protein, 13 aa, Homo sapiens
  CDR3 for beta chain variable domain of TCR clone 76337 (TRBV7-9, TRBJ2-7)
RASSFAGAYEQYF

SEQ ID NO: 152675 - protein, 15 aa, Homo sapiens
  CDR3 for alpha chain variable domain of TCR clone 76338 (TRAV8-4, TRAJ44)
CAVSSDTGTASKLTF

SEQ ID NO: 152676 - protein, 12 aa, Homo sapiens
  CDR3 for beta chain variable domain of TCR clone 76338 (TRBV12-4, TRBJ2-7)
CASSLGGYEQYF

SEQ ID NO: 152677 - protein, 13 aa, Homo sapiens
  CDR3 for alpha chain variable domain of TCR clone 76339 (TRAV12-2, TRAJ6)
CAGNVSRKLHTYI

SEQ ID NO: 152678 - protein, 12 aa, Homo sapiens
  CDR3 for beta chain variable domain of TCR clone 76339 (TRBV29-1, TRBJ2-3)
CSVTGGADTQYF

SEQ ID NO: 152679 - protein, 13 aa, Homo sapiens
  CDR3 for alpha chain variable domain of TCR clone 76340 (TRAV26-2, TRAJ43)
CILRAVNNNGMRF

SEQ ID NO: 152680 - protein, 11 aa, Homo sapiens
  CDR3 for beta chain variable domain of TCR clone 76340 (TRBV29-1, TRBJ2-5)
CSEDRTGTQYF

SEQ ID NO: 152681 - protein, 16 aa, Homo sapiens
  CDR3 for alpha chain variable domain of TCR clone 76341 (TRAV3, TRAJ18)
CAVRDGRGSTLGRLYF

SEQ ID NO: 152682 - protein, 15 aa, Homo sapiens
  CDR3 for beta chain variable domain of TCR clone 76341 (TRBV7-9, TRBJ1-6)
CARSSPGRGNSPLHF

SEQ ID NO: 152683 - protein, 16 aa, Homo sapiens
  CDR3 for alpha chain variable domain of TCR clone 76342 (TRAV3, TRAJ10)
CAMRDMRAGGGNKLTF

SEQ ID NO: 152684 - protein, 13 aa, Homo sapiens
  CDR3 for beta chain variable domain of TCR clone 76342 (TRBV27, TRBJ2-7)
CASSFVSSYEQYF

SEQ ID NO: 152685 - protein, 13 aa, Homo sapiens
  CDR3 for alpha chain variable domain of TCR clone 76343 (TRAV2, TRAJ15)
CAVAPQAGTALIF

SEQ ID NO: 152686 - protein, 16 aa, Homo sapiens
  CDR3 for beta chain variable domain of TCR clone 76343 (TRBV5-1, TRBJ1-1)
RASSSGGNSLNTEAFF

SEQ ID NO: 152687 - protein, 13 aa, Homo sapiens
  CDR3 for alpha chain variable domain of TCR clone 76344 (TRAV12-1, TRAJ42)
CGGGGGSQGNLIF

SEQ ID NO: 152688 - protein, 15 aa, Homo sapiens
  CDR3 for beta chain variable domain of TCR clone 76344 (TRBV5-4, TRBJ1-4)
CASSSFGTGNEKLFF

SEQ ID NO: 152689 - protein, 13 aa, Homo sapiens
  CDR3 for alpha chain variable domain of TCR clone 76345 (TRAV20, TRAJ37)
CAGCSSNTGKLIF

SEQ ID NO: 152690 - protein, 16 aa, Homo sapiens
  CDR3 for beta chain variable domain of TCR clone 76345 (TRBV24-1, TRBJ2-3)
CATSDPGTGATDTQYF

SEQ ID NO: 152691 - protein, 13 aa, Homo sapiens
  CDR3 for alpha chain variable domain of TCR clone 76346 (TRAV16, TRAJ11)
CALTQSGYSTLTF

SEQ ID NO: 152692 - protein, 14 aa, Homo sapiens
  CDR3 for beta chain variable domain of TCR clone 76346 (TRBV19, TRBJ2-7)
CASSTTRSSYEQYL

SEQ ID NO: 152693 - protein, 14 aa, Homo sapiens
  CDR3 for alpha chain variable domain of TCR clone 76347 (TRAV8-2, TRAJ4)
CVVSPSGGYNKLIF

SEQ ID NO: 152694 - protein, 13 aa, Homo sapiens
  CDR3 for beta chain variable domain of TCR clone 76347 (TRBV7-9, TRBJ1-2)
CASSLKQNYGYTF

SEQ ID NO: 152695 - protein, 13 aa, Homo sapiens
  CDR3 for alpha chain variable domain of TCR clone 76348 (TRAV12-1, TRAJ16)
WVVNGPDGQKLLF

SEQ ID NO: 152696 - protein, 13 aa, Homo sapiens
  CDR3 for beta chain variable domain of TCR clone 76348 (TRBV2, TRBJ1-1)
CARNPTGGFHAFF

SEQ ID NO: 152697 - protein, 14 aa, Homo sapiens
  CDR3 for alpha chain variable domain of TCR clone 76349 (TRAV1-2, TRAJ8)
CAVREDTGFQKLVF

SEQ ID NO: 152698 - protein, 13 aa, Homo sapiens
  CDR3 for beta chain variable domain of TCR clone 76349 (TRBV11-2, TRBJ2-1)
CASSLDLVNEQFF

SEQ ID NO: 152699 - protein, 13 aa, Homo sapiens
  CDR3 for alpha chain variable domain of TCR clone 76350 (TRAV8-3, TRAJ36)
CAVGATGANNLFF

SEQ ID NO: 152700 - protein, 16 aa, Homo sapiens
  CDR3 for beta chain variable domain of TCR clone 76350 (TRBV27, TRBJ2-5)
CASSYGPGGQKETQYF

SEQ ID NO: 152701 - protein, 16 aa, Homo sapiens
  CDR3 for alpha chain variable domain of TCR clone 76351 (TRAV30, TRAJ57)
CGTGWAPQGGSEKLVF

SEQ ID NO: 152702 - protein, 14 aa, Homo sapiens
  CDR3 for beta chain variable domain of TCR clone 76351 (TRBV18, TRBJ1-1)
CASSPGFQGVEAFS

SEQ ID NO: 152703 - protein, 12 aa, Homo sapiens
  CDR3 for alpha chain variable domain of TCR clone 76352 (TRAV27, TRAJ35)
CAGADFRNVLHC

SEQ ID NO: 152704 - protein, 16 aa, Homo sapiens
  CDR3 for beta chain variable domain of TCR clone 76352 (TRBV6-1, TRBJ2-1)
CASILRQGSSYNEQFF

SEQ ID NO: 152705 - protein, 16 aa, Homo sapiens
  CDR3 for alpha chain variable domain of TCR clone 76353 (TRAV17, TRAJ22)
CATDAISSGSARQLTF

SEQ ID NO: 152706 - protein, 15 aa, Homo sapiens
  CDR3 for beta chain variable domain of TCR clone 76353 (TRBV5-1, TRBJ2-1)
CASSPPNAPYNEQFF

SEQ ID NO: 152707 - protein, 14 aa, Homo sapiens
  CDR3 for alpha chain variable domain of TCR clone 76354 (TRAV1-2, TRAJ8)
CAVREDTGFQKLVF

SEQ ID NO: 152708 - protein, 16 aa, Homo sapiens
  CDR3 for beta chain variable domain of TCR clone 76354 (TRBV20-1, TRBJ1-4)
CSAPGQGLLTNETLFF

SEQ ID NO: 152709 - protein, 14 aa, Homo sapiens
  CDR3 for alpha chain variable domain of TCR clone 76355 (TRAV20, TRAJ42)
CAVQAGGSQGNLIF

SEQ ID NO: 152710 - protein, 16 aa, Homo sapiens
  CDR3 for beta chain variable domain of TCR clone 76355 (TRBV15, TRBJ2-7)
CATSRDGGIPSYEQYF

SEQ ID NO: 152711 - protein, 14 aa, Homo sapiens
  CDR3 for alpha chain variable domain of TCR clone 76356 (TRAV36/DV7, TRAJ57)
CAVGFPGGSEKLVF

SEQ ID NO: 152712 - protein, 16 aa, Homo sapiens
  CDR3 for beta chain variable domain of TCR clone 76356 (TRBV20-1, TRBJ1-4)
CSAPGQGLLTNEKLFF

SEQ ID NO: 152713 - protein, 14 aa, Homo sapiens
  CDR3 for alpha chain variable domain of TCR clone 76357 (TRAV13-1, TRAJ35)
CAASKGGFGNVLHC

SEQ ID NO: 152714 - protein, 17 aa, Homo sapiens
  CDR3 for beta chain variable domain of TCR clone 76357 (TRBV7-3, TRBJ2-3)
CASSPGGLAGFGDTQYF

SEQ ID NO: 152715 - protein, 12 aa, Homo sapiens
  CDR3 for alpha chain variable domain of TCR clone 76358 (TRAV1-2, TRAJ33)
CAALDSNYQLIW

SEQ ID NO: 152716 - protein, 14 aa, Homo sapiens
  CDR3 for beta chain variable domain of TCR clone 76358 (TRBV2, TRBJ1-5)
CASSHGNSNQPQHF

SEQ ID NO: 152717 - protein, 14 aa, Homo sapiens
  CDR3 for alpha chain variable domain of TCR clone 76359 (TRAV20, TRAJ29)
CAVQAWVGNTPLVF

SEQ ID NO: 152718 - protein, 15 aa, Homo sapiens
  CDR3 for beta chain variable domain of TCR clone 76359 (TRBV29-1, TRBJ2-7)
CSVEFLDRGSYEQYF

SEQ ID NO: 152719 - protein, 13 aa, Homo sapiens
  CDR3 for alpha chain variable domain of TCR clone 76360 (TRAV3, TRAJ20)
CAVRDIGDYKLGF

SEQ ID NO: 152720 - protein, 12 aa, Homo sapiens
  CDR3 for beta chain variable domain of TCR clone 76360 (TRBV3-1, TRBJ1-2)
CASTSGLYGYTF

SEQ ID NO: 152721 - protein, 13 aa, Homo sapiens
  CDR3 for alpha chain variable domain of TCR clone 76361 (TRAV40, TRAJ41)
CLLGAQSGYALNF

SEQ ID NO: 152722 - protein, 15 aa, Homo sapiens
  CDR3 for beta chain variable domain of TCR clone 76361 (TRBV4-2, TRBJ1-1)
CANSQLQGASAEAFF

SEQ ID NO: 152723 - protein, 12 aa, Homo sapiens
  CDR3 for alpha chain variable domain of TCR clone 76362 (TRAV3, TRAJ31)
CAAQRANARLML

SEQ ID NO: 152724 - protein, 16 aa, Homo sapiens
  CDR3 for beta chain variable domain of TCR clone 76362 (TRBV4-2, TRBJ1-1)
CASSPSPGRAAPEAFF

SEQ ID NO: 152725 - protein, 17 aa, Homo sapiens
  CDR3 for alpha chain variable domain of TCR clone 76363 (TRAV35, TRAJ28)
CAGLQGYSGAGSYQLTF

SEQ ID NO: 152726 - protein, 15 aa, Homo sapiens
  CDR3 for beta chain variable domain of TCR clone 76363 (TRBV2, TRBJ1-2)
CASSEIGGANYGYTF

SEQ ID NO: 152727 - protein, 10 aa, Homo sapiens
  CDR3 for alpha chain variable domain of TCR clone 76364 (TRAV27, TRAJ49)
CVVPVTSSIL

SEQ ID NO: 152728 - protein, 13 aa, Homo sapiens
  CDR3 for beta chain variable domain of TCR clone 76364 (TRBV7-3, TRBJ1-1)
CASSQDWGAEAFF

SEQ ID NO: 152729 - protein, 16 aa, Homo sapiens
  CDR3 for alpha chain variable domain of TCR clone 76365 (TRAV3, TRAJ23)
CAVKIGIYNQGGKLIF

SEQ ID NO: 152730 - protein, 17 aa, Homo sapiens
  CDR3 for beta chain variable domain of TCR clone 76365 (TRBV10-3, TRBJ2-6)
RAISESTAPSGANVLTF

SEQ ID NO: 152731 - protein, 13 aa, Homo sapiens
  CDR3 for alpha chain variable domain of TCR clone 76366 (TRAV29/DV5, TRAJ31)
CAASRSNNARLMF

SEQ ID NO: 152732 - protein, 12 aa, Homo sapiens
  CDR3 for beta chain variable domain of TCR clone 76366 (TRBV14, TRBJ1-1)
CASSQLKGLAFF

SEQ ID NO: 152733 - protein, 14 aa, Homo sapiens
  CDR3 for alpha chain variable domain of TCR clone 76367 (TRAV12-2, TRAJ13)
CAVKKTGGYQKVTF

SEQ ID NO: 152734 - protein, 15 aa, Homo sapiens
  CDR3 for beta chain variable domain of TCR clone 76367 (TRBV6-3, TRBJ2-1)
CASSYASDSYNEQFF

SEQ ID NO: 152735 - protein, 12 aa, Homo sapiens
  CDR3 for alpha chain variable domain of TCR clone 76368 (TRAV12-2, TRAJ11)
CAATSGYSTLTF

SEQ ID NO: 152736 - protein, 14 aa, Homo sapiens
  CDR3 for beta chain variable domain of TCR clone 76368 (TRBV20-1, TRBJ2-7)
CSAPELAGVGEQYF

SEQ ID NO: 152737 - protein, 13 aa, Homo sapiens
  CDR3 for alpha chain variable domain of TCR clone 76369 (TRAV8-3, TRAJ36)
CAVGATGANNLFF

SEQ ID NO: 152738 - protein, 18 aa, Homo sapiens
  CDR3 for beta chain variable domain of TCR clone 76369 (TRBV28, TRBJ2-1)
CASSSTSGRANSYNEQFF

SEQ ID NO: 152739 - protein, 12 aa, Homo sapiens
  CDR3 for alpha chain variable domain of TCR clone 76370 (TRAV1-1, TRAJ39)
CAVPVVGNMLTF

SEQ ID NO: 152740 - protein, 13 aa, Homo sapiens
  CDR3 for beta chain variable domain of TCR clone 76370 (TRBV7-9, TRBJ2-1)
CASSASNFNEQFF

SEQ ID NO: 152741 - protein, 16 aa, Homo sapiens
  CDR3 for alpha chain variable domain of TCR clone 76371 (TRAV30, TRAJ24)
CGTEIVDADSWGKFQF

SEQ ID NO: 152742 - protein, 16 aa, Homo sapiens
  CDR3 for beta chain variable domain of TCR clone 76371 (TRBV20-1, TRBJ1-1)
CSASALTQGMNTEAFF

SEQ ID NO: 152743 - protein, 14 aa, Homo sapiens
  CDR3 for alpha chain variable domain of TCR clone 76372 (TRAV1-2, TRAJ16)
CAVNRFSDGQKLLL

SEQ ID NO: 152744 - protein, 17 aa, Homo sapiens
  CDR3 for beta chain variable domain of TCR clone 76372 (TRBV13, TRBJ2-3)
CASSLSRVAGGRNTQYF

SEQ ID NO: 152745 - protein, 18 aa, Homo sapiens
  CDR3 for alpha chain variable domain of TCR clone 76373 (TRAV29/DV5, TRAJ52)
CAAGFRGAGGTSYGKLTF

SEQ ID NO: 152746 - protein, 16 aa, Homo sapiens
  CDR3 for beta chain variable domain of TCR clone 76373 (TRBV7-3, TRBJ2-2)
CASRLKRGTLSGELFF

SEQ ID NO: 152747 - protein, 12 aa, Homo sapiens
  CDR3 for alpha chain variable domain of TCR clone 76374 (TRAV12-3, TRAJ40)
CAVSSGTYKYIF

SEQ ID NO: 152748 - protein, 15 aa, Homo sapiens
  CDR3 for beta chain variable domain of TCR clone 76374 (TRBV7-9, TRBJ2-7)
CAGSPGGGLTYEQYF

SEQ ID NO: 152749 - protein, 12 aa, Homo sapiens
  CDR3 for alpha chain variable domain of TCR clone 76375 (TRAV21, TRAJ33)
CAKMDSNYQLIW

SEQ ID NO: 152750 - protein, 14 aa, Homo sapiens
  CDR3 for beta chain variable domain of TCR clone 76375 (TRBV7-2, TRBJ2-7)
CASRSQGAAYEQYF

SEQ ID NO: 152751 - protein, 13 aa, Homo sapiens
  CDR3 for alpha chain variable domain of TCR clone 76376 (TRAV8-3, TRAJ28)
CAVGAVGVTNSLS

SEQ ID NO: 152752 - protein, 15 aa, Homo sapiens
  CDR3 for beta chain variable domain of TCR clone 76376 (TRBV7-9, TRBJ1-5)
CASSQGHQPNQPQHF

SEQ ID NO: 152753 - protein, 13 aa, Homo sapiens
  CDR3 for alpha chain variable domain of TCR clone 76377 (TRAV17, TRAJ9)
CATDYTGGFKTIF

SEQ ID NO: 152754 - protein, 15 aa, Homo sapiens
  CDR3 for beta chain variable domain of TCR clone 76377 (TRBV27, TRBJ2-7)
CASSPQREGQREQYF

SEQ ID NO: 152755 - protein, 13 aa, Homo sapiens
  CDR3 for alpha chain variable domain of TCR clone 76378 (TRAV21, TRAJ27)
CAARPGNAGKSTF

SEQ ID NO: 152756 - protein, 15 aa, Homo sapiens
  CDR3 for beta chain variable domain of TCR clone 76378 (TRBV2, TRBJ2-3)
CAGSDAGGPPDTQYF

SEQ ID NO: 152757 - protein, 16 aa, Homo sapiens
  CDR3 for alpha chain variable domain of TCR clone 76379 (TRAV12-3, TRAJ53)
CAMSPGSGGSSYKLTF

SEQ ID NO: 152758 - protein, 13 aa, Homo sapiens
  CDR3 for beta chain variable domain of TCR clone 76379 (TRBV19, TRBJ1-2)
CASSVPGQDGYTF

SEQ ID NO: 152759 - protein, 15 aa, Homo sapiens
  CDR3 for alpha chain variable domain of TCR clone 76380 (TRAV26-1, TRAJ44)
CIVRANTGTASKLTF

SEQ ID NO: 152760 - protein, 15 aa, Homo sapiens
  CDR3 for beta chain variable domain of TCR clone 76380 (TRBV20-1, TRBJ2-7)
CSARDRVSGMDEQYF

SEQ ID NO: 152761 - protein, 13 aa, Homo sapiens
  CDR3 for alpha chain variable domain of TCR clone 76381 (TRAV29/DV5, TRAJ31)
CAASRNNNARLLF

SEQ ID NO: 152762 - protein, 12 aa, Homo sapiens
  CDR3 for beta chain variable domain of TCR clone 76381 (TRBV14, TRBJ1-1)
CASSQLKGLAFF

SEQ ID NO: 152763 - protein, 14 aa, Homo sapiens
  CDR3 for alpha chain variable domain of TCR clone 76382 (TRAV12-3, TRAJ10)
SHLPLTGGRNKLTF

SEQ ID NO: 152764 - protein, 13 aa, Homo sapiens
  CDR3 for beta chain variable domain of TCR clone 76382 (TRBV19, TRBJ1-1)
CASSPSNGGEAFF

SEQ ID NO: 152765 - protein, 11 aa, Homo sapiens
  CDR3 for alpha chain variable domain of TCR clone 76383 (TRAV21, TRAJ11)
CAVSGYSTLTF

SEQ ID NO: 152766 - protein, 14 aa, Homo sapiens
  CDR3 for beta chain variable domain of TCR clone 76383 (TRBV2, TRBJ2-5)
CASTWGRAQETQYF

SEQ ID NO: 152767 - protein, 16 aa, Homo sapiens
  CDR3 for alpha chain variable domain of TCR clone 76384 (TRAV4, TRAJ22)
CLVGDLYSGSARQLTS

SEQ ID NO: 152768 - protein, 14 aa, Homo sapiens
  CDR3 for beta chain variable domain of TCR clone 76384 (TRBV28, TRBJ2-3)
CASSWRGRADTQYF

SEQ ID NO: 152769 - protein, 17 aa, Homo sapiens
  CDR3 for alpha chain variable domain of TCR clone 76385 (TRAV17, TRAJ7)
CATLGRLAFGKGNQVVV

SEQ ID NO: 152770 - protein, 15 aa, Homo sapiens
  CDR3 for beta chain variable domain of TCR clone 76385 (TRBV7-9, TRBJ1-6)
CASSSPGRGNSPLHF

SEQ ID NO: 152771 - protein, 17 aa, Homo sapiens
  CDR3 for alpha chain variable domain of TCR clone 76386 (TRAV4, TRAJ42)
CLVGVLNYGGNQGNLIF

SEQ ID NO: 152772 - protein, 12 aa, Homo sapiens
  CDR3 for beta chain variable domain of TCR clone 76386 (TRBV20-1, TRBJ2-1)
CSAQYTYNEQFF

SEQ ID NO: 152773 - protein, 12 aa, Homo sapiens
  CDR3 for alpha chain variable domain of TCR clone 76387 (TRAV12-2, TRAJ10)
WGVTGGGNKLTF

SEQ ID NO: 152774 - protein, 13 aa, Homo sapiens
  CDR3 for beta chain variable domain of TCR clone 76387 (TRBV15, TRBJ2-7)
CATSTTGHYEQYF

SEQ ID NO: 152775 - protein, 13 aa, Homo sapiens
  CDR3 for alpha chain variable domain of TCR clone 76388 (TRAV12-3, TRAJ13)
CAMSSGGYQKVTF

SEQ ID NO: 152776 - protein, 13 aa, Homo sapiens
  CDR3 for beta chain variable domain of TCR clone 76388 (TRBV20-1, TRBJ1-1)
CSARGGGNTEAFF

SEQ ID NO: 152777 - protein, 15 aa, Homo sapiens
  CDR3 for alpha chain variable domain of TCR clone 76389 (TRAV23/DV6, TRAJ44)
CAAMKPTGTVSKLTF

SEQ ID NO: 152778 - protein, 16 aa, Homo sapiens
  CDR3 for beta chain variable domain of TCR clone 76389 (TRBV28, TRBJ2-5)
CATSGWPSRLKETQYF

SEQ ID NO: 152779 - protein, 13 aa, Homo sapiens
  CDR3 for alpha chain variable domain of TCR clone 76390 (TRAV35, TRAJ42)
CAGFPGSQGNLIF

SEQ ID NO: 152780 - protein, 16 aa, Homo sapiens
  CDR3 for beta chain variable domain of TCR clone 76390 (TRBV2, TRBJ1-4)
CASNLLQGATNEKLFF

SEQ ID NO: 152781 - protein, 13 aa, Homo sapiens
  CDR3 for alpha chain variable domain of TCR clone 76391 (TRAV12-1, TRAJ29)
CAVRNSGNTPLVF

SEQ ID NO: 152782 - protein, 14 aa, Homo sapiens
  CDR3 for beta chain variable domain of TCR clone 76391 (TRBV7-2, TRBJ2-7)
CASRSQGAAYEQYF

SEQ ID NO: 152783 - protein, 20 aa, Homo sapiens
  CDR3 for alpha chain variable domain of TCR clone 76392 (TRAV12-3, TRAJ41)
SLFIRDSQPSDSATPEALNF

SEQ ID NO: 152784 - protein, 15 aa, Homo sapiens
  CDR3 for beta chain variable domain of TCR clone 76392 (TRBV5-1, TRBJ2-7)
RASSLDLTSSYEQYF

SEQ ID NO: 152785 - protein, 12 aa, Homo sapiens
  CDR3 for alpha chain variable domain of TCR clone 76393 (TRAV16, TRAJ12)
CAHGDSSYKLIL

SEQ ID NO: 152786 - protein, 12 aa, Homo sapiens
  CDR3 for beta chain variable domain of TCR clone 76393 (TRBV28, TRBJ2-1)
CASSRLVGEQFF

SEQ ID NO: 152787 - protein, 12 aa, Homo sapiens
  CDR3 for alpha chain variable domain of TCR clone 76394 (TRAV16, TRAJ21)
CALLGNFNKFYF

SEQ ID NO: 152788 - protein, 15 aa, Homo sapiens
  CDR3 for beta chain variable domain of TCR clone 76394 (TRBV3-1, TRBJ2-2)
CVSSQAVRETGELFF

SEQ ID NO: 152789 - protein, 11 aa, Homo sapiens
  CDR3 for alpha chain variable domain of TCR clone 76395 (TRAV16, TRAJ33)
CALHSNYQLIW

SEQ ID NO: 152790 - protein, 12 aa, Homo sapiens
  CDR3 for beta chain variable domain of TCR clone 76395 (TRBV7-2, TRBJ2-5)
CASSQYQETQYF

SEQ ID NO: 152791 - protein, 11 aa, Homo sapiens
  CDR3 for alpha chain variable domain of TCR clone 76396 (TRAV1-2, TRAJ20)
CAVSNDYRLSF

SEQ ID NO: 152792 - protein, 15 aa, Homo sapiens
  CDR3 for beta chain variable domain of TCR clone 76396 (TRBV5-1, TRBJ2-2)
CASSSQGGNTGELFF

SEQ ID NO: 152793 - protein, 11 aa, Homo sapiens
  CDR3 for alpha chain variable domain of TCR clone 76397 (TRAV21, TRAJ34)
CAVTNTAKLIF

SEQ ID NO: 152794 - protein, 16 aa, Homo sapiens
  CDR3 for beta chain variable domain of TCR clone 76397 (TRBV18, TRBJ1-1)
CASSPGVGGRGGEAFF

SEQ ID NO: 152795 - protein, 10 aa, Homo sapiens
  CDR3 for alpha chain variable domain of TCR clone 76398 (TRAV16, TRAJ22)
SAMYLRQLTF

SEQ ID NO: 152796 - protein, 17 aa, Homo sapiens
  CDR3 for beta chain variable domain of TCR clone 76398 (TRBV13, TRBJ2-3)
CASSLSRVAGGRNTQYF

SEQ ID NO: 152797 - protein, 12 aa, Homo sapiens
  CDR3 for alpha chain variable domain of TCR clone 76399 (TRAV13-2, TRAJ23)
CAERHRGGKLIF

SEQ ID NO: 152798 - protein, 19 aa, Homo sapiens
  CDR3 for beta chain variable domain of TCR clone 76399 (TRBV19, TRBJ2-5)
CASSIGQVTDFFLGEAQYF

SEQ ID NO: 152799 - protein, 14 aa, Homo sapiens
  CDR3 for alpha chain variable domain of TCR clone 76400 (TRAV12-2, TRAJ13)
CAVKKTGGYQKVTF

SEQ ID NO: 152800 - protein, 14 aa, Homo sapiens
  CDR3 for beta chain variable domain of TCR clone 76400 (TRBV5-7, TRBJ1-1)
CASSLAGDWTEAFF

SEQ ID NO: 152801 - protein, 18 aa, Homo sapiens
  CDR3 for alpha chain variable domain of TCR clone 76401 (TRAV2, TRAJ22)
CSSSRCGRQLLEQRQLTF

SEQ ID NO: 152802 - protein, 16 aa, Homo sapiens
  CDR3 for beta chain variable domain of TCR clone 76401 (TRBV2, TRBJ2-5)
CASSETQGVGEETQYF

SEQ ID NO: 152803 - protein, 14 aa, Homo sapiens
  CDR3 for alpha chain variable domain of TCR clone 76402 (TRAV12-2, TRAJ40)
CAVKIPSGTYKYIF

SEQ ID NO: 152804 - protein, 20 aa, Homo sapiens
  CDR3 for beta chain variable domain of TCR clone 76402 (TRBV28, TRBJ2-1)
CASTPIGWSPGLAGGNEQFF

SEQ ID NO: 152805 - protein, 14 aa, Homo sapiens
  CDR3 for alpha chain variable domain of TCR clone 76403 (TRAV38-1, TRAJ45)
CASHSGGGADGLTV

SEQ ID NO: 152806 - protein, 13 aa, Homo sapiens
  CDR3 for beta chain variable domain of TCR clone 76403 (TRBV10-3, TRBJ1-2)
CAISERDSYGYTF
